United States Patent Application Publication US 2005/0244851 A1 - sequence listing, part 27

SEQ ID NO: 1037770 - DNA, 25 bp, Homo sapien
taaaaggcaaccgatcacgctttgc

SEQ ID NO: 1037771 - DNA, 25 bp, Homo sapien
ggtggttgtgatcccgagcaagtca

SEQ ID NO: 1037772 - DNA, 25 bp, Homo sapien
tgaaacaagccgagcatgcacctct

SEQ ID NO: 1037773 - DNA, 25 bp, Homo sapien
tcagtgaaccccaagttgctgcccg

SEQ ID NO: 1037774 - DNA, 25 bp, Homo sapien
tctacagagtttcagggaagcacgc

SEQ ID NO: 1037775 - DNA, 25 bp, Homo sapien
tcaaagcaggcccaaaatgtgccct

SEQ ID NO: 1037776 - DNA, 25 bp, Homo sapien
tggatgatccacactcagcaaggac

SEQ ID NO: 1037777 - DNA, 25 bp, Homo sapien
gactatctgtgtctcaagccatgga

SEQ ID NO: 1037778 - DNA, 25 bp, Homo sapien
tatcggggcgtttgagatccaaatt

SEQ ID NO: 1037779 - DNA, 25 bp, Homo sapien
agaacttggctgcacccctatcggg

SEQ ID NO: 1037780 - DNA, 25 bp, Homo sapien
ccctatcggggcgtttgagatccaa

SEQ ID NO: 1037781 - DNA, 25 bp, Homo sapien
tgagatccaaattgctgccttggca

SEQ ID NO: 1037782 - DNA, 25 bp, Homo sapien
gagggaaggtggatccggagcccat

SEQ ID NO: 1037783 - DNA, 25 bp, Homo sapien
ggagggaaggtggatccggagccca

SEQ ID NO: 1037784 - DNA, 25 bp, Homo sapien
gaaaatgccaataggacaggtgacc

SEQ ID NO: 1037785 - DNA, 25 bp, Homo sapien
atgccaataggacaggtgacccaga

SEQ ID NO: 1037786 - DNA, 25 bp, Homo sapien
aaatgccaataggacaggtgaccca

SEQ ID NO: 1037787 - DNA, 25 bp, Homo sapien
aggaaaatgccaataggacaggtga

SEQ ID NO: 1037788 - DNA, 25 bp, Homo sapien
tggcacctgagcaagtatagcctca

SEQ ID NO: 1037789 - DNA, 25 bp, Homo sapien
ggcacctgagcaagtatagcctcat

SEQ ID NO: 1037790 - DNA, 25 bp, Homo sapien
ctggcacctgagcaagtatagcctc

SEQ ID NO: 1037791 - DNA, 25 bp, Homo sapien
gccagggggaggaaccactgtccca

SEQ ID NO: 1037792 - DNA, 25 bp, Homo sapien
ggcgacttcagaaccgtccttggtg

SEQ ID NO: 1037793 - DNA, 25 bp, Homo sapien
ttcagaaccgtccttggtgcccatg

SEQ ID NO: 1037794 - DNA, 25 bp, Homo sapien
tcagggcgacttcagaaccgtcctt

SEQ ID NO: 1037795 - DNA, 25 bp, Homo sapien
aaactcagggcgacttcagaaccgt

SEQ ID NO: 1037796 - DNA, 25 bp, Homo sapien
tacaccagttaaccaatgcaccagg

SEQ ID NO: 1037797 - DNA, 25 bp, Homo sapien
tgcgccagataagcaatgcaccagg

SEQ ID NO: 1037798 - DNA, 25 bp, Homo sapien
taatcaacgccccaggtaaccaatg

SEQ ID NO: 1037799 - DNA, 25 bp, Homo sapien
gcaccaggtaactgatgcgccagat

SEQ ID NO: 1037800 - DNA, 25 bp, Homo sapien
cttccccgtggcctcccattccagg

SEQ ID NO: 1037801 - DNA, 25 bp, Homo sapien
cctcccattccaggctgcaccccca

SEQ ID NO: 1037802 - DNA, 25 bp, Homo sapien
cacctccttccccgtggcctcccat

SEQ ID NO: 1037803 - DNA, 25 bp, Homo sapien
ctcccattccaggctgcacccccat

SEQ ID NO: 1037804 - DNA, 25 bp, Homo sapien
gacagcctatcccagggtcaccatg

SEQ ID NO: 1037805 - DNA, 25 bp, Homo sapien
ccttctttcctagtgatgctgatca

SEQ ID NO: 1037806 - DNA, 25 bp, Homo sapien
tgggcagacagcctatcccagggtc

SEQ ID NO: 1037807 - DNA, 25 bp, Homo sapien
agtgatgctgatcattttgggcaga

SEQ ID NO: 1037808 - DNA, 25 bp, Homo sapien
ctgtggcatgcagtcctgtctctcc

SEQ ID NO: 1037809 - DNA, 25 bp, Homo sapien
tgtggcatgcagtcctgtctctcca

SEQ ID NO: 1037810 - DNA, 25 bp, Homo sapien
gtggcatgcagtcctgtctctccac

SEQ ID NO: 1037811 - DNA, 25 bp, Homo sapien
cctgtggcatgcagtcctgtctctc

SEQ ID NO: 1037812 - DNA, 25 bp, Homo sapien
tctccgttgctgaatgagccacagc

SEQ ID NO: 1037813 - DNA, 25 bp, Homo sapien
acctgagtgttctccgttgctgaat

SEQ ID NO: 1037814 - DNA, 25 bp, Homo sapien
gagggagaaggtccccgctccagaa

SEQ ID NO: 1037815 - DNA, 25 bp, Homo sapien
gagaggagttgcactcaacacccca

SEQ ID NO: 1037816 - DNA, 25 bp, Homo sapien
tcctttgccagctcctcttttgtca

SEQ ID NO: 1037817 - DNA, 25 bp, Homo sapien
ttgccagctcctcttttgtcaccat

SEQ ID NO: 1037818 - DNA, 25 bp, Homo sapien
tcttcatctgtttcctttgccagct

SEQ ID NO: 1037819 - DNA, 25 bp, Homo sapien
tttgccagctcctcttttgtcacca

SEQ ID NO: 1037820 - DNA, 25 bp, Homo sapien
caatcccaaagaagatgttcttcct

SEQ ID NO: 1037821 - DNA, 25 bp, Homo sapien
tcccaatcccaaagaagatgttctt

SEQ ID NO: 1037822 - DNA, 25 bp, Homo sapien
tcccaaagaagatgttcttccttct

SEQ ID NO: 1037823 - DNA, 25 bp, Homo sapien
ccaatcccaaagaagatgttcttcc

SEQ ID NO: 1037824 - DNA, 25 bp, Homo sapien
cattctgtagtatggtgagggaagc

SEQ ID NO: 1037825 - DNA, 25 bp, Homo sapien
tattcacggagggtctggtgaagcc

SEQ ID NO: 1037826 - DNA, 25 bp, Homo sapien
gatgttgtcatagaccttgctgatg

SEQ ID NO: 1037827 - DNA, 25 bp, Homo sapien
tacattctgcagtaggtggcggaca

SEQ ID NO: 1037828 - DNA, 25 bp, Homo sapien
ccggtgaatcctcagtccaggtgtc

SEQ ID NO: 1037829 - DNA, 25 bp, Homo sapien
tcagccatgacctccggtgaatcct

SEQ ID NO: 1037830 - DNA, 25 bp, Homo sapien
tgcctggagtcaacacctcccagag

SEQ ID NO: 1037831 - DNA, 25 bp, Homo sapien
ctcccagagcatgaccatgcccgct

SEQ ID NO: 1037832 - DNA, 25 bp, Homo sapien
atgccaagatgctgcccgctgggtc

SEQ ID NO: 1037833 - DNA, 25 bp, Homo sapien
tgccaagatgctgcccgctgggtcc

SEQ ID NO: 1037834 - DNA, 25 bp, Homo sapien
gatgccaagatgctgcccgctgggt

SEQ ID NO: 1037835 - DNA, 25 bp, Homo sapien
gacgataaatctcagcgcaggcttc

SEQ ID NO: 1037836 - DNA, 25 bp, Homo sapien
taaatctcagcgcaggcttccacca

SEQ ID NO: 1037837 - DNA, 25 bp, Homo sapien
caggcagcaggaacacgacgataaa

SEQ ID NO: 1037838 - DNA, 25 bp, Homo sapien
ggaacacgacgataaatctcagcgc

SEQ ID NO: 1037839 - DNA, 25 bp, Homo sapien
cagttcacagttcaatgttcgcagc

SEQ ID NO: 1037840 - DNA, 25 bp, Homo sapien
cagctgttgaccaatcagggtggcg

SEQ ID NO: 1037841 - DNA, 25 bp, Homo sapien
catgtgatactgtttgatgatagca

SEQ ID NO: 1037842 - DNA, 25 bp, Homo sapien
gattttctctgtaacatgtgatact

SEQ ID NO: 1037843 - DNA, 25 bp, Homo sapien
ttgtctgcaacaaggctgtgccggt

SEQ ID NO: 1037844 - DNA, 25 bp, Homo sapien
cgctgttggcggcagacatctcaga

SEQ ID NO: 1037845 - DNA, 25 bp, Homo sapien
agaagacgaggctcgggcacagctg

SEQ ID NO: 1037846 - DNA, 25 bp, Homo sapien
tgtgccggtcagtggcgctgttggc

SEQ ID NO: 1037847 - DNA, 25 bp, Homo sapien
ttcctcatccgtggttctcagactg

SEQ ID NO: 1037848 - DNA, 25 bp, Homo sapien
ggccaatcagccagcctcagtcatg

SEQ ID NO: 1037849 - DNA, 25 bp, Homo sapien
gggttagtcatttccccgctctgga

SEQ ID NO: 1037850 - DNA, 25 bp, Homo sapien
gagtaagtctcagttggccaatcag

SEQ ID NO: 1037851 - DNA, 25 bp, Homo sapien
agagctgtggggtgggcactataac

SEQ ID NO: 1037852 - DNA, 25 bp, Homo sapien
tgtggggtgggcactataaccccca

SEQ ID NO: 1037853 - DNA, 25 bp, Homo sapien
ccgtccaagagctgtggggtgggca

SEQ ID NO: 1037854 - DNA, 25 bp, Homo sapien
agctgtggggtgggcactataaccc

SEQ ID NO: 1037855 - DNA, 25 bp, Homo sapien
ggatcttggccaacaccaaaaaggc

SEQ ID NO: 1037856 - DNA, 25 bp, Homo sapien
atggatcttggccaacaccaaaaag

SEQ ID NO: 1037857 - DNA, 25 bp, Homo sapien
tggatcttggccaacaccaaaaagg

SEQ ID NO: 1037858 - DNA, 25 bp, Homo sapien
gccctgctgagggtactgtgcccag

SEQ ID NO: 1037859 - DNA, 25 bp, Homo sapien
ggagcggccagcttgccgggagcag

SEQ ID NO: 1037860 - DNA, 25 bp, Homo sapien
caggagcggccagcttgccgggagc

SEQ ID NO: 1037861 - DNA, 25 bp, Homo sapien
ctctggctgtccccgctcctcatta

SEQ ID NO: 1037862 - DNA, 25 bp, Homo sapien
tggctgtccccgctcctcattaaag

SEQ ID NO: 1037863 - DNA, 25 bp, Homo sapien
tcagcccacgatgcacttgctttgc

SEQ ID NO: 1037864 - DNA, 25 bp, Homo sapien
taaacccttcccagggaatgctgag

SEQ ID NO: 1037865 - DNA, 25 bp, Homo sapien
tggtgaatcccaagcacagtgtcca

SEQ ID NO: 1037866 - DNA, 25 bp, Homo sapien
tgtggttcttcattccccgtcgagc

SEQ ID NO: 1037867 - DNA, 25 bp, Homo sapien
ctccagggcaagcagaccgcgggaa

SEQ ID NO: 1037868 - DNA, 25 bp, Homo sapien
agctgcgcgcgaatcccagtcctca

SEQ ID NO: 1037869 - DNA, 25 bp, Homo sapien
cagactcgtctcctcgcggaagtcg

SEQ ID NO: 1037870 - DNA, 25 bp, Homo sapien
cgcgggagagagtgcgcagagggtc

SEQ ID NO: 1037871 - DNA, 25 bp, Homo sapien
tgtcaaagggcaagccaggtcatgg

SEQ ID NO: 1037872 - DNA, 25 bp, Homo sapien
taagctcggactaggatccaggtcc

SEQ ID NO: 1037873 - DNA, 25 bp, Homo sapien
caggcagtcctttaacagacgggaa

SEQ ID NO: 1037874 - DNA, 25 bp, Homo sapien
ttggccccttggagagatcactggg

SEQ ID NO: 1037875 - DNA, 25 bp, Homo sapien
gcagtgggctgactgatggccctta

SEQ ID NO: 1037876 - DNA, 25 bp, Homo sapien
gggtgcctacttttattgctggcag

SEQ ID NO: 1037877 - DNA, 25 bp, Homo sapien
tctgtgaaggctatttttgccatcc

SEQ ID NO: 1037878 - DNA, 25 bp, Homo sapien
ctccttgctcagcatctcatttggc

SEQ ID NO: 1037879 - DNA, 25 bp, Homo sapien
cacatggcagctatgattggttggt

SEQ ID NO: 1037880 - DNA, 25 bp, Homo sapien
gacatgagatggtggcaaggcttaa

SEQ ID NO: 1037881 - DNA, 25 bp, Homo sapien
gagacagtccatgtaaatgcttagc

SEQ ID NO: 1037882 - DNA, 25 bp, Homo sapien
gatcaaaatctgatcccagcttggc

SEQ ID NO: 1037883 - DNA, 25 bp, Homo sapien
cattctccatgtagctgcccgttct

SEQ ID NO: 1037884 - DNA, 25 bp, Homo sapien
gctgcccattctccatgtagctgcc

SEQ ID NO: 1037885 - DNA, 25 bp, Homo sapien
ctccatgtagctgcccgttctccat

SEQ ID NO: 1037886 - DNA, 25 bp, Homo sapien
ggctcagctgcccattctccatgta

SEQ ID NO: 1037887 - DNA, 25 bp, Homo sapien
ctgagcctcagagcaacttctgagc

SEQ ID NO: 1037888 - DNA, 25 bp, Homo sapien
ctgctgagcctcagagcaacttctg

SEQ ID NO: 1037889 - DNA, 25 bp, Homo sapien
agcctcagagcaacttctgagcagg

SEQ ID NO: 1037890 - DNA, 25 bp, Homo sapien
tcagagcaacttctgagcaggggta

SEQ ID NO: 1037891 - DNA, 25 bp, Homo sapien
gatccaaactgggacttaagcgcca

SEQ ID NO: 1037892 - DNA, 25 bp, Homo sapien
tcgaaacgctgtgaggcctcgtggt

SEQ ID NO: 1037893 - DNA, 25 bp, Homo sapien
cacagcacggattggtgaaggccca

SEQ ID NO: 1037894 - DNA, 25 bp, Homo sapien
tctcggaggtgaagtcggccaaatc

SEQ ID NO: 1037895 - DNA, 25 bp, Homo sapien
caaacaggatctcactgcgcaggag

SEQ ID NO: 1037896 - DNA, 25 bp, Homo sapien
gaagctctgaaacttagcccgttgt

SEQ ID NO: 1037897 - DNA, 25 bp, Homo sapien
tcccagcggtcatctactgagtagt

SEQ ID NO: 1037898 - DNA, 25 bp, Homo sapien
tcttcagattgtctgcagagaggcc

SEQ ID NO: 1037899 - DNA, 25 bp, Homo sapien
taaagggtttcgaacagtgtgtggc

SEQ ID NO: 1037900 - DNA, 25 bp, Homo sapien
ccagcagttgctcaatataaaggat

SEQ ID NO: 1037901 - DNA, 25 bp, Homo sapien
acattagctctgattattccagcag

SEQ ID NO: 1037902 - DNA, 25 bp, Homo sapien
cataacagcactcacctcattgggt

SEQ ID NO: 1037903 - DNA, 25 bp, Homo sapien
tatacaaagtattgaacaccaacag

SEQ ID NO: 1037904 - DNA, 25 bp, Homo sapien
gatttacagcctacttttctacaga

SEQ ID NO: 1037905 - DNA, 25 bp, Homo sapien
tatcaccagcaaacctgtactgaaa

SEQ ID NO: 1037906 - DNA, 25 bp, Homo sapien
agatgtctactaggcaaacaaaaca

SEQ ID NO: 1037907 - DNA, 25 bp, Homo sapien
gaacacatggccaggttttccctca

SEQ ID NO: 1037908 - DNA, 25 bp, Homo sapien
aactagaggtagactgagactttcc

SEQ ID NO: 1037909 - DNA, 25 bp, Homo sapien
gagctttgggcagacacttgcagat

SEQ ID NO: 1037910 - DNA, 25 bp, Homo sapien
gattctaaacatgggcagaaggctg

SEQ ID NO: 1037911 - DNA, 25 bp, Homo sapien
tgaggatgtagaccagggcagcaat

SEQ ID NO: 1037912 - DNA, 25 bp, Homo sapien
gaacgtcctgcgcacttcatagtca

SEQ ID NO: 1037913 - DNA, 25 bp, Homo sapien
ggtctgtccccccatagagaacctg

SEQ ID NO: 1037914 - DNA, 25 bp, Homo sapien
caggagcatgtcattgttgaacgtc

SEQ ID NO: 1037915 - DNA, 25 bp, Homo sapien
gataccaaagaccacgtggtacagg

SEQ ID NO: 1037916 - DNA, 25 bp, Homo sapien
tggcaatcccaaagaaggacaggaa

SEQ ID NO: 1037917 - DNA, 25 bp, Homo sapien
gatgcccaagtactggataccaaag

SEQ ID NO: 1037918 - DNA, 25 bp, Homo sapien
aggcagctgagaccaatgctggcaa

SEQ ID NO: 1037919 - DNA, 25 bp, Homo sapien
cctggcggtaggtgttgatgaacac

SEQ ID NO: 1037920 - DNA, 25 bp, Homo sapien
tggatcatgcgcagctgtgggtctt

SEQ ID NO: 1037921 - DNA, 25 bp, Homo sapien
ggagaagacgttagctgcgtaggcg

SEQ ID NO: 1037922 - DNA, 25 bp, Homo sapien
cctgcagtttggacggtgtggatca

SEQ ID NO: 1037923 - DNA, 25 bp, Homo sapien
atggtgacaagcacggccagccagc

SEQ ID NO: 1037924 - DNA, 25 bp, Homo sapien
gatgagagacatgaacaggccaaag

SEQ ID NO: 1037925 - DNA, 25 bp, Homo sapien
gccaggtagaggctccagaggccca

SEQ ID NO: 1037926 - DNA, 25 bp, Homo sapien
cagccagcaacaggacacgatgaga

SEQ ID NO: 1037927 - DNA, 25 bp, Homo sapien
gctcttcctcgacctccagcaaggg

SEQ ID NO: 1037928 - DNA, 25 bp, Homo sapien
tcgggagcggcaaacacgtctccgg

SEQ ID NO: 1037929 - DNA, 25 bp, Homo sapien
ctccaacctgctcgggagcggcaaa

SEQ ID NO: 1037930 - DNA, 25 bp, Homo sapien
cagggaggtcttccggctgcaattc

SEQ ID NO: 1037931 - DNA, 25 bp, Homo sapien
ctgcacgatgagatggccgcggctg

SEQ ID NO: 1037932 - DNA, 25 bp, Homo sapien
atcacccagcggctcttgacggctg

SEQ ID NO: 1037933 - DNA, 25 bp, Homo sapien
cagcggctcttgacggctgaccaca

SEQ ID NO: 1037934 - DNA, 25 bp, Homo sapien
cagggacacgtctcccagctccagt

SEQ ID NO: 1037935 - DNA, 25 bp, Homo sapien
tggcgaacaccagggacaagatgag

SEQ ID NO: 1037936 - DNA, 25 bp, Homo sapien
ctggcgaacaccagggacaagatga

SEQ ID NO: 1037937 - DNA, 25 bp, Homo sapien
agagtagcggggcccggctggcggg

SEQ ID NO: 1037938 - DNA, 25 bp, Homo sapien
acaggtgatgcaggagatgccctcg

SEQ ID NO: 1037939 - DNA, 25 bp, Homo sapien
tgaacaggtgatgcaggagatgccc

SEQ ID NO: 1037940 - DNA, 25 bp, Homo sapien
tgttggtatcaggccggaagagtag

SEQ ID NO: 1037941 - DNA, 25 bp, Homo sapien
agggtggcctcaggccggctagccc

SEQ ID NO: 1037942 - DNA, 25 bp, Homo sapien
cagggtggcctcaggccggctagcc

SEQ ID NO: 1037943 - DNA, 25 bp, Homo sapien
tctccagggacgtccggatgttgtt

SEQ ID NO: 1037944 - DNA, 25 bp, Homo sapien
agggacgtccggatgttgttctgca

SEQ ID NO: 1037945 - DNA, 25 bp, Homo sapien
gagatgtacacggtgcctgggaaat

SEQ ID NO: 1037946 - DNA, 25 bp, Homo sapien
ccccaggcgacacagcctgccaagg

SEQ ID NO: 1037947 - DNA, 25 bp, Homo sapien
agacagcggggtggccttgactctt

SEQ ID NO: 1037948 - DNA, 25 bp, Homo sapien
actttagagatgtacacggtgcctg

SEQ ID NO: 1037949 - DNA, 25 bp, Homo sapien
gaagctgaagtcaaacttccagccc

SEQ ID NO: 1037950 - DNA, 25 bp, Homo sapien
tgtagacatacaagcggtcagcttc

SEQ ID NO: 1037951 - DNA, 25 bp, Homo sapien
tcgtcagcatccacttgcgggaggg

SEQ ID NO: 1037952 - DNA, 25 bp, Homo sapien
catcacaggccaaggtcgtcagcat

SEQ ID NO: 1037953 - DNA, 25 bp, Homo sapien
cggcttgtctgccaggctctgttac

SEQ ID NO: 1037954 - DNA, 25 bp, Homo sapien
ccggcttgtctgccaggctctgtta

SEQ ID NO: 1037955 - DNA, 25 bp, Homo sapien
gtgggactgggcgaagtacagcttc

SEQ ID NO: 1037956 - DNA, 25 bp, Homo sapien
gtgccatgcatacgcgcccgtggaa

SEQ ID NO: 1037957 - DNA, 25 bp, Homo sapien
actaggcacgaagaagaagcctttg

SEQ ID NO: 1037958 - DNA, 25 bp, Homo sapien
ccagggggtgccatgcatacgcgcc

SEQ ID NO: 1037959 - DNA, 25 bp, Homo sapien
tccacctgccgagtgcggttgacgc

SEQ ID NO: 1037960 - DNA, 25 bp, Homo sapien
catggccccggtatccactagtggc

SEQ ID NO: 1037961 - DNA, 25 bp, Homo sapien
gccaataatgccgaagaccacaaag

SEQ ID NO: 1037962 - DNA, 25 bp, Homo sapien
gggtctccaatgacgtggttgtcca

SEQ ID NO: 1037963 - DNA, 25 bp, Homo sapien
aacaagccggcccgggccgctcagt

SEQ ID NO: 1037964 - DNA, 25 bp, Homo sapien
aaacaagccggcccgggccgctcag

SEQ ID NO: 1037965 - DNA, 25 bp, Homo sapien
acaagccggcccgggccgctcagtg

SEQ ID NO: 1037966 - DNA, 25 bp, Homo sapien
gaaacaagccggcccgggccgctca

SEQ ID NO: 1037967 - DNA, 25 bp, Homo sapien
ttcaccagctcggagttggctgcga

SEQ ID NO: 1037968 - DNA, 25 bp, Homo sapien
caaagctgctgtcgtagacaacact

SEQ ID NO: 1037969 - DNA, 25 bp, Homo sapien
cacaggtgcccaatttccttgaaga

SEQ ID NO: 1037970 - DNA, 25 bp, Homo sapien
gaggtgacacaggtgcccaatttcc

SEQ ID NO: 1037971 - DNA, 25 bp, Homo sapien
cgactcgaaagccatggagatccac

SEQ ID NO: 1037972 - DNA, 25 bp, Homo sapien
atggagatccactgcacgcggccct

SEQ ID NO: 1037973 - DNA, 25 bp, Homo sapien
ctgacgcccactgccccgtgggaca

SEQ ID NO: 1037974 - DNA, 25 bp, Homo sapien
cactcagggtgcaacatctgcagga

SEQ ID NO: 1037975 - DNA, 25 bp, Homo sapien
gattcttaaggtatctgctcatcaa

SEQ ID NO: 1037976 - DNA, 25 bp, Homo sapien
gtcagcttggaagcgggcaccttgc

SEQ ID NO: 1037977 - DNA, 25 bp, Homo sapien
agttcatagtaggtctgcgtgtgtg

SEQ ID NO: 1037978 - DNA, 25 bp, Homo sapien
cacaagccagttcatagtaggtctg

SEQ ID NO: 1037979 - DNA, 25 bp, Homo sapien
ctcccagcgcaggtagtccgagtag

SEQ ID NO: 1037980 - DNA, 25 bp, Homo sapien
cggcgcaggactgagccctcgggca

SEQ ID NO: 1037981 - DNA, 25 bp, Homo sapien
cagcgcaggtagtccgagtaggtct

SEQ ID NO: 1037982 - DNA, 25 bp, Homo sapien
ccagtgctcgcaggtctggaagccc

SEQ ID NO: 1037983 - DNA, 25 bp, Homo sapien
ctacgatttccatgaatatctgctt

SEQ ID NO: 1037984 - DNA, 25 bp, Homo sapien
gatggaggggcgaggctgccgcttg

SEQ ID NO: 1037985 - DNA, 25 bp, Homo sapien
ggatggaggggcgaggctgccgctt

SEQ ID NO: 1037986 - DNA, 25 bp, Homo sapien
atggaggggcgaggctgccgcttgc

SEQ ID NO: 1037987 - DNA, 25 bp, Homo sapien
caggatggaggggcgaggctgccgc

SEQ ID NO: 1037988 - DNA, 25 bp, Homo sapien
ggatgtgggtggtgaacacggccac

SEQ ID NO: 1037989 - DNA, 25 bp, Homo sapien
gagcagggatagcaccaggccgcac

SEQ ID NO: 1037990 - DNA, 25 bp, Homo sapien
aggccgcacagggcgctctgcaccc

SEQ ID NO: 1037991 - DNA, 25 bp, Homo sapien
cctaccagcagggtgcctgccagcc

SEQ ID NO: 1037992 - DNA, 25 bp, Homo sapien
ccgtccctaccagcagggtgcctgc

SEQ ID NO: 1037993 - DNA, 25 bp, Homo sapien
ttcccgtccctaccagcagggtgcc

SEQ ID NO: 1037994 - DNA, 25 bp, Homo sapien
tccctaccagcagggtgcctgccag

SEQ ID NO: 1037995 - DNA, 25 bp, Homo sapien
gctgagggctactacctgggtaccc

SEQ ID NO: 1037996 - DNA, 25 bp, Homo sapien
tatgagcctccgctgagatgtgaca

SEQ ID NO: 1037997 - DNA, 25 bp, Homo sapien
gggacaggtgcagtaacacatcact

SEQ ID NO: 1037998 - DNA, 25 bp, Homo sapien
agggaggtctggagtccagccccca

SEQ ID NO: 1037999 - DNA, 25 bp, Homo sapien
tcgaccaggtggacgcagtaatcca

SEQ ID NO: 1038000 - DNA, 25 bp, Homo sapien
agcaggtagccctcgaccaggtgga

SEQ ID NO: 1038001 - DNA, 25 bp, Homo sapien
aatccacggaggagccaacgaggat

SEQ ID NO: 1038002 - DNA, 25 bp, Homo sapien
tcccagccgctccagtacatgatgg

SEQ ID NO: 1038003 - DNA, 25 bp, Homo sapien
aaccaggtaggtgttgctatggcaa

SEQ ID NO: 1038004 - DNA, 25 bp, Homo sapien
ctatggcaacaggacgcgagggtct

SEQ ID NO: 1038005 - DNA, 25 bp, Homo sapien
tactaggcccagagccggttttggc

SEQ ID NO: 1038006 - DNA, 25 bp, Homo sapien
gcactgagtatgtgaacatgtcctc

SEQ ID NO: 1038007 - DNA, 25 bp, Homo sapien
cagcgtacgccactggcgctgcgtt

SEQ ID NO: 1038008 - DNA, 25 bp, Homo sapien
tgttgagtgccacaatcttgccgaa

SEQ ID NO: 1038009 - DNA, 25 bp, Homo sapien
aagtccgggtccgagtgaaagagct

SEQ ID NO: 1038010 - DNA, 25 bp, Homo sapien
tgtagaggatggacacgcccgtgtt

SEQ ID NO: 1038011 - DNA, 25 bp, Homo sapien
cgggcaggggaatcttatagccgct

SEQ ID NO: 1038012 - DNA, 25 bp, Homo sapien
ctatagggaggcccctgcgggcagg

SEQ ID NO: 1038013 - DNA, 25 bp, Homo sapien
ttatagccgctctgcaggagcacga

SEQ ID NO: 1038014 - DNA, 25 bp, Homo sapien
gaatcttatagccgctctgcaggag

SEQ ID NO: 1038015 - DNA, 25 bp, Homo sapien
tctgccactgggcaaaaagccgagt

SEQ ID NO: 1038016 - DNA, 25 bp, Homo sapien
tcctgtatgattcccgagggcggca

SEQ ID NO: 1038017 - DNA, 25 bp, Homo sapien
aatagcaaccttctgccgtgagcag

SEQ ID NO: 1038018 - DNA, 25 bp, Homo sapien
accaaaggtgcaagtgtccagagcc

SEQ ID NO: 1038019 - DNA, 25 bp, Homo sapien
ccagacttgggcaccaatgaaggct

SEQ ID NO: 1038020 - DNA, 25 bp, Homo sapien
ttgggcaccaatgaaggcttcctgg

SEQ ID NO: 1038021 - DNA, 25 bp, Homo sapien
cagacttgggcaccaatgaaggctt

SEQ ID NO: 1038022 - DNA, 25 bp, Homo sapien
gacttgggcaccaatgaaggcttcc

SEQ ID NO: 1038023 - DNA, 25 bp, Homo sapien
tcaggtagacctgggcattcatctt

SEQ ID NO: 1038024 - DNA, 25 bp, Homo sapien
aacgaggcaaggcagatcaaccctg

SEQ ID NO: 1038025 - DNA, 25 bp, Homo sapien
atcaaccctgaaggcgctcgggcag

SEQ ID NO: 1038026 - DNA, 25 bp, Homo sapien
aaccaggtaagtacaagcagcgtcc

SEQ ID NO: 1038027 - DNA, 25 bp, Homo sapien
cattccttgaagtgtgggtcctttg

SEQ ID NO: 1038028 - DNA, 25 bp, Homo sapien
gcattccttgaagtgtgggtccttt

SEQ ID NO: 1038029 - DNA, 25 bp, Homo sapien
gggcattccttgaagtgtgggtcct

SEQ ID NO: 1038030 - DNA, 25 bp, Homo sapien
ctgggcattccttgaagtgtgggtc

SEQ ID NO: 1038031 - DNA, 25 bp, Homo sapien
cacggttgagtttgctgccctggtt

SEQ ID NO: 1038032 - DNA, 25 bp, Homo sapien
gaaaaggcaaatgcctatcactcca

SEQ ID NO: 1038033 - DNA, 25 bp, Homo sapien
tccatagattgtagggtcccgccga

SEQ ID NO: 1038034 - DNA, 25 bp, Homo sapien
gagccctccggctgctttagtttcc

SEQ ID NO: 1038035 - DNA, 25 bp, Homo sapien
tcacatacggaacttccactgaaga

SEQ ID NO: 1038036 - DNA, 25 bp, Homo sapien
ctgagaccgtcgaggccagaggttt

SEQ ID NO: 1038037 - DNA, 25 bp, Homo sapien
gagcaggacgttgcctgctctcacc

SEQ ID NO: 1038038 - DNA, 25 bp, Homo sapien
gaggtttgcacactgttcctcaggg

SEQ ID NO: 1038039 - DNA, 25 bp, Homo sapien
ggcccctcaggttccctgcacagga

SEQ ID NO: 1038040 - DNA, 25 bp, Homo sapien
tactggaacttcatttccgctcacc

SEQ ID NO: 1038041 - DNA, 25 bp, Homo sapien
tgagctctgtgccttacatccatga

SEQ ID NO: 1038042 - DNA, 25 bp, Homo sapien
gctgagctctgtgccttacatccat

SEQ ID NO: 1038043 - DNA, 25 bp, Homo sapien
tctttttgattctacatggccctgg

SEQ ID NO: 1038044 - DNA, 25 bp, Homo sapien
tcaagcttgtcatttcccttcgcct

SEQ ID NO: 1038045 - DNA, 25 bp, Homo sapien
tggcttagctcctgggcaaatatgg

SEQ ID NO: 1038046 - DNA, 25 bp, Homo sapien
tgaatggagctttcaggagctgacc

SEQ ID NO: 1038047 - DNA, 25 bp, Homo sapien
gcaattttctgagctgtcggttccc

SEQ ID NO: 1038048 - DNA, 25 bp, Homo sapien
ttagcttccgtgctgtgcatttctt

SEQ ID NO: 1038049 - DNA, 25 bp, Homo sapien
tctttaaatcacaggattcttgcaa

SEQ ID NO: 1038050 - DNA, 25 bp, Homo sapien
cacttggcgggattttgggctctga

SEQ ID NO: 1038051 - DNA, 25 bp, Homo sapien
tagcttggaagttgacccttcccat

SEQ ID NO: 1038052 - DNA, 25 bp, Homo sapien
tagatacgagatgtccaccagtcct

SEQ ID NO: 1038053 - DNA, 25 bp, Homo sapien
ctgaagggctgtagatacgagatgt

SEQ ID NO: 1038054 - DNA, 25 bp, Homo sapien
ccaccagtcctccttagcttggaag

SEQ ID NO: 1038055 - DNA, 25 bp, Homo sapien
caaaatgagaaatgaagtctggatt

SEQ ID NO: 1038056 - DNA, 25 bp, Homo sapien
gcaaaatgagaaatgaagtctggat

SEQ ID NO: 1038057 - DNA, 25 bp, Homo sapien
accaatgcccaatgcgtccatctgg

SEQ ID NO: 1038058 - DNA, 25 bp, Homo sapien
gccgccaacggcacagtgaccaatg

SEQ ID NO: 1038059 - DNA, 25 bp, Homo sapien
aacggcacagtgaccaatgcccaat

SEQ ID NO: 1038060 - DNA, 25 bp, Homo sapien
gccaacggcacagtgaccaatgccc

SEQ ID NO: 1038061 - DNA, 25 bp, Homo sapien
gagtgaattggaggtatttgcagcc

SEQ ID NO: 1038062 - DNA, 25 bp, Homo sapien
agtgaattggaggtatttgcagcca

SEQ ID NO: 1038063 - DNA, 25 bp, Homo sapien
ttcatcaatccaccaaagagtcctt

SEQ ID NO: 1038064 - DNA, 25 bp, Homo sapien
agtccttgcggaagctgtgcccggg

SEQ ID NO: 1038065 - DNA, 25 bp, Homo sapien
cagttccactcttgcaagcagggag

SEQ ID NO: 1038066 - DNA, 25 bp, Homo sapien
gaacattctagacaatgctgagcac

SEQ ID NO: 1038067 - DNA, 25 bp, Homo sapien
aatgctgagcacagtctcccctgag

SEQ ID NO: 1038068 - DNA, 25 bp, Homo sapien
agcagcaatgtgttttcgctttgac

SEQ ID NO: 1038069 - DNA, 25 bp, Homo sapien
tttgaccagctgatatcgaagaaca

SEQ ID NO: 1038070 - DNA, 25 bp, Homo sapien
tattgctttgctcttgatgggtgag

SEQ ID NO: 1038071 - DNA, 25 bp, Homo sapien
ttgtttccgtcttcgtgtggttctg

SEQ ID NO: 1038072 - DNA, 25 bp, Homo sapien
tcgtgtggttctgcgcttctctcca

SEQ ID NO: 1038073 - DNA, 25 bp, Homo sapien
ttgctttgctcttgatgggtgagag

SEQ ID NO: 1038074 - DNA, 25 bp, Homo sapien
atattgcagcttttccccgtttctt

SEQ ID NO: 1038075 - DNA, 25 bp, Homo sapien
gcaggcttgtccttgactgggctgt

SEQ ID NO: 1038076 - DNA, 25 bp, Homo sapien
gctgcgtgggggaaatattgcagct

SEQ ID NO: 1038077 - DNA, 25 bp, Homo sapien
aggcttgtccttgactgggctgttg

SEQ ID NO: 1038078 - DNA, 25 bp, Homo sapien
ccatggagcagccaaaaggatcctt

SEQ ID NO: 1038079 - DNA, 25 bp, Homo sapien
ccaggctcctggctagttagttgct

SEQ ID NO: 1038080 - DNA, 25 bp, Homo sapien
tcttttgcacgggtgcccatggcac

SEQ ID NO: 1038081 - DNA, 25 bp, Homo sapien
gctgactgggtgcttcccatcactg

SEQ ID NO: 1038082 - DNA, 25 bp, Homo sapien
cacagaggatccaggttaaacacat

SEQ ID NO: 1038083 - DNA, 25 bp, Homo sapien
tgttggctccaaggatatctctccc

SEQ ID NO: 1038084 - DNA, 25 bp, Homo sapien
caacaactgtgtccgcaactggtgg

SEQ ID NO: 1038085 - DNA, 25 bp, Homo sapien
cgatgcttcctctgaggcaggttgg

SEQ ID NO: 1038086 - DNA, 25 bp, Homo sapien
ctgtgaagccattagctgggttgat

SEQ ID NO: 1038087 - DNA, 25 bp, Homo sapien
ttcctgtgaagccattagctgggtt

SEQ ID NO: 1038088 - DNA, 25 bp, Homo sapien
gctgggttgatgtgagctggagctg

SEQ ID NO: 1038089 - DNA, 25 bp, Homo sapien
cctgtgaagccattagctgggttga

SEQ ID NO: 1038090 - DNA, 25 bp, Homo sapien
tagccattgtctccctttggcatga

SEQ ID NO: 1038091 - DNA, 25 bp, Homo sapien
tgagccaatttctcgaacctctctc

SEQ ID NO: 1038092 - DNA, 25 bp, Homo sapien
tgggaaagactcagccccatgagtc

SEQ ID NO: 1038093 - DNA, 25 bp, Homo sapien
tgcatacacaacctgtgtgttctgt

SEQ ID NO: 1038094 - DNA, 25 bp, Homo sapien
tgggttcgggggcaagaggtagcca

SEQ ID NO: 1038095 - DNA, 25 bp, Homo sapien
agttctctgggttcgggggcaagag

SEQ ID NO: 1038096 - DNA, 25 bp, Homo sapien
tctctgggttcgggggcaagaggta

SEQ ID NO: 1038097 - DNA, 25 bp, Homo sapien
tctgggttcgggggcaagaggtagc

SEQ ID NO: 1038098 - DNA, 25 bp, Homo sapien
taatttttcaatgtgcgaagcactg

SEQ ID NO: 1038099 - DNA, 25 bp, Homo sapien
gcactgtagtagcatctggattcga

SEQ ID NO: 1038100 - DNA, 25 bp, Homo sapien
caatgtgcgaagcactgtagtagca

SEQ ID NO: 1038101 - DNA, 25 bp, Homo sapien
tagcatctggattcgaatagaaatc

SEQ ID NO: 1038102 - DNA, 25 bp, Homo sapien
ctgggattgcaggcacgtgccacca

SEQ ID NO: 1038103 - DNA, 25 bp, Homo sapien
caccacaccaggctaatttttattt

SEQ ID NO: 1038104 - DNA, 25 bp, Homo sapien
cctcaattttctgggctcaagcgat

SEQ ID NO: 1038105 - DNA, 25 bp, Homo sapien
ccttccacctcagcctcctgagtag

SEQ ID NO: 1038106 - DNA, 25 bp, Homo sapien
tctagaatgtagatccgtgagggcg

SEQ ID NO: 1038107 - DNA, 25 bp, Homo sapien
gactccgtctactggaagggctggt

SEQ ID NO: 1038108 - DNA, 25 bp, Homo sapien
caacagcagcgtgtgggtagaaccc

SEQ ID NO: 1038109 - DNA, 25 bp, Homo sapien
cataggtttgcttaggtagccggct

SEQ ID NO: 1038110 - DNA, 25 bp, Homo sapien
cccaagacagtgacggcgggggctg

SEQ ID NO: 1038111 - DNA, 25 bp, Homo sapien
agtgccccaagacagtgacggcggg

SEQ ID NO: 1038112 - DNA, 25 bp, Homo sapien
ccccaagacagtgacggcgggggct

SEQ ID NO: 1038113 - DNA, 25 bp, Homo sapien
ggcagtgccccaagacagtgacggc

SEQ ID NO: 1038114 - DNA, 25 bp, Homo sapien
tggtgtgacgtggagcatggtgggg

SEQ ID NO: 1038115 - DNA, 25 bp, Homo sapien
ggtgtgacgtggagcatggtgggga

SEQ ID NO: 1038116 - DNA, 25 bp, Homo sapien
aggcctgccgcctggtgtgcctgcg

SEQ ID NO: 1038117 - DNA, 25 bp, Homo sapien
gaccactggcagcagttctacttcc

SEQ ID NO: 1038118 - DNA, 25 bp, Homo sapien
tctacttcctgagcaagcggcgccg

SEQ ID NO: 1038119 - DNA, 25 bp, Homo sapien
caaccttctgcgtaacccgtgtggg

SEQ ID NO: 1038120 - DNA, 25 bp, Homo sapien
tcctcggtccgctgaggaacccgca

SEQ ID NO: 1038121 - DNA, 25 bp, Homo sapien
cgggactcgcgcagcccgcagcgct

SEQ ID NO: 1038122 - DNA, 25 bp, Homo sapien
acagacgcggacagcgccgggactc

SEQ ID NO: 1038123 - DNA, 25 bp, Homo sapien
agccccgggcctcgagcagactgct

SEQ ID NO: 1038124 - DNA, 25 bp, Homo sapien
ggcacgatccgttgggccgcccaag

SEQ ID NO: 1038125 - DNA, 25 bp, Homo sapien
ggccgccgcggcacgatccgttggg

SEQ ID NO: 1038126 - DNA, 25 bp, Homo sapien
ctgcgcttgcctggaaagcgaggcc

SEQ ID NO: 1038127 - DNA, 25 bp, Homo sapien
agctgcaccgcctggacctgcgctt

SEQ ID NO: 1038128 - DNA, 25 bp, Homo sapien
ggaggaggaggctaattatcactgc

SEQ ID NO: 1038129 - DNA, 25 bp, Homo sapien
tttcagtaggccagtctttaatggg

SEQ ID NO: 1038130 - DNA, 25 bp, Homo sapien
cacaatagaggtggaaggcactgcc

SEQ ID NO: 1038131 - DNA, 25 bp, Homo sapien
gggacacatcaggtactttaataaa

SEQ ID NO: 1038132 - DNA, 25 bp, Homo sapien
ccaggggtcactggggcggtccaag

SEQ ID NO: 1038133 - DNA, 25 bp, Homo sapien
caggggtcactggggcggtccaagg

SEQ ID NO: 1038134 - DNA, 25 bp, Homo sapien
ttgtggcttctggacaccctcctgt

SEQ ID NO: 1038135 - DNA, 25 bp, Homo sapien
ggcttgtggcttctggacaccctcc

SEQ ID NO: 1038136 - DNA, 25 bp, Homo sapien
cttgtggcttctggacaccctcctg

SEQ ID NO: 1038137 - DNA, 25 bp, Homo sapien
gtggcttctggacaccctcctgtag

SEQ ID NO: 1038138 - DNA, 25 bp, Homo sapien
gatgttctcgggcagctcgttgatg

SEQ ID NO: 1038139 - DNA, 25 bp, Homo sapien
gcacgggttgtgcaggaggttcctg

SEQ ID NO: 1038140 - DNA, 25 bp, Homo sapien
tgcgtttccagagggtcacgaggtc

SEQ ID NO: 1038141 - DNA, 25 bp, Homo sapien
ggcagctcgttgatgttccccacag

SEQ ID NO: 1038142 - DNA, 25 bp, Homo sapien
tgtggaaaatgaggttcccatgcca

SEQ ID NO: 1038143 - DNA, 25 bp, Homo sapien
tggccttctgggaccatgtcagtag

SEQ ID NO: 1038144 - DNA, 25 bp, Homo sapien
taacatactgagaagacgactggat

SEQ ID NO: 1038145 - DNA, 25 bp, Homo sapien
ggatcagtggaagccttgctttacc

SEQ ID NO: 1038146 - DNA, 25 bp, Homo sapien
tccactcatcgcctccattcacatc

SEQ ID NO: 1038147 - DNA, 25 bp, Homo sapien
ttcctctggtctcgagagagatcct

SEQ ID NO: 1038148 - DNA, 25 bp, Homo sapien
atcctccaccttccactcatcgcct

SEQ ID NO: 1038149 - DNA, 25 bp, Homo sapien
ccttcctctggtctcgagagagatc

SEQ ID NO: 1038150 - DNA, 25 bp, Homo sapien
atgaagtaacgaagtatttcttgac

SEQ ID NO: 1038151 - DNA, 25 bp, Homo sapien
aatatgaagtaacgaagtatttctt

SEQ ID NO: 1038152 - DNA, 25 bp, Homo sapien
tatgaagtaacgaagtatttcttga

SEQ ID NO: 1038153 - DNA, 25 bp, Homo sapien
atatgaagtaacgaagtatttcttg

SEQ ID NO: 1038154 - DNA, 25 bp, Homo sapien
aggggctaggactgccccttccagg

SEQ ID NO: 1038155 - DNA, 25 bp, Homo sapien
gaggggctaggactgccccttccag

SEQ ID NO: 1038156 - DNA, 25 bp, Homo sapien
tgaggggctaggactgccccttcca

SEQ ID NO: 1038157 - DNA, 25 bp, Homo sapien
agagaccccagggtaaattgatttg

SEQ ID NO: 1038158 - DNA, 25 bp, Homo sapien
cgatgtccggccgtgtggtatccat

SEQ ID NO: 1038159 - DNA, 25 bp, Homo sapien
ttgacctcgatgtccggccgtgtgg

SEQ ID NO: 1038160 - DNA, 25 bp, Homo sapien
gccgtgtggtatccatcagctcctc

SEQ ID NO: 1038161 - DNA, 25 bp, Homo sapien
tacccttcggccttgaggtccacca

SEQ ID NO: 1038162 - DNA, 25 bp, Homo sapien
gctgaacgcacagctggtacttgga

SEQ ID NO: 1038163 - DNA, 25 bp, Homo sapien
aaggtccccagaggcgcgtgcgcgg

SEQ ID NO: 1038164 - DNA, 25 bp, Homo sapien
cgcggacgacaggagctgaacgcac

SEQ ID NO: 1038165 - DNA, 25 bp, Homo sapien
gacccgcaatctggcctggctgcga

SEQ ID NO: 1038166 - DNA, 25 bp, Homo sapien
agcttggatctgaacctaggccccg

SEQ ID NO: 1038167 - DNA, 25 bp, Homo sapien
gaaacagcgagtgaagctcagagca

SEQ ID NO: 1038168 - DNA, 25 bp, Homo sapien
tctatgagggaaacactatataccc

SEQ ID NO: 1038169 - DNA, 25 bp, Homo sapien
agcctcagccttggacgatctgcct

SEQ ID NO: 1038170 - DNA, 25 bp, Homo sapien
ggcacatgtattatttaggttaaaa

SEQ ID NO: 1038171 - DNA, 25 bp, Homo sapien
tccaatatactcatcacggggcaca

SEQ ID NO: 1038172 - DNA, 25 bp, Homo sapien
aatatactcatcacggggcacatgt

SEQ ID NO: 1038173 - DNA, 25 bp, Homo sapien
catcacggggcacatgtattattta

SEQ ID NO: 1038174 - DNA, 25 bp, Homo sapien
gcctgtagttctaggcaggctgagg

SEQ ID NO: 1038175 - DNA, 25 bp, Homo sapien
ccaggagtttgcaactagtcttgtc

SEQ ID NO: 1038176 - DNA, 25 bp, Homo sapien
tacaggctaaagtaggagttcaaga

SEQ ID NO: 1038177 - DNA, 25 bp, Homo sapien
ctagtcttgtcgcaaaccagagagt

SEQ ID NO: 1038178 - DNA, 25 bp, Homo sapien
ctgaaaccagatgtagcggacgccg

SEQ ID NO: 1038179 - DNA, 25 bp, Homo sapien
agtaatgagtgtccacgccgccgtg

SEQ ID NO: 1038180 - DNA, 25 bp, Homo sapien
cgccgccgtgctgaaaccagatgta

SEQ ID NO: 1038181 - DNA, 25 bp, Homo sapien
taccagccggcccagtaatgagtgt

SEQ ID NO: 1038182 - DNA, 25 bp, Homo sapien
ggcagcgggggcccgatggtgatgc

SEQ ID NO: 1038183 - DNA, 25 bp, Homo sapien
cagcgggggcccgatggtgatgctg

SEQ ID NO: 1038184 - DNA, 25 bp, Homo sapien
gcagcgggggcccgatggtgatgct

SEQ ID NO: 1038185 - DNA, 25 bp, Homo sapien
tcagggttcagcagatgggggctca

SEQ ID NO: 1038186 - DNA, 25 bp, Homo sapien
tcagcagatgggggctcagggggtg

SEQ ID NO: 1038187 - DNA, 25 bp, Homo sapien
agggttcagcagatgggggctcagg

SEQ ID NO: 1038188 - DNA, 25 bp, Homo sapien
gttcagcagatgggggctcaggggg

SEQ ID NO: 1038189 - DNA, 25 bp, Homo sapien
gattggtcagagttacatggtcacc

SEQ ID NO: 1038190 - DNA, 25 bp, Homo sapien
tagggcgaagtcaggagaacactgc

SEQ ID NO: 1038191 - DNA, 25 bp, Homo sapien
cctgctccgagggtcaaagaacaca

SEQ ID NO: 1038192 - DNA, 25 bp, Homo sapien
catccagggctcatgtgtccagctg

SEQ ID NO: 1038193 - DNA, 25 bp, Homo sapien
gggtggcactgctgatctggcacaa

SEQ ID NO: 1038194 - DNA, 25 bp, Homo sapien
tagacagaagccatgccattgtacc

SEQ ID NO: 1038195 - DNA, 25 bp, Homo sapien
cagcagtactggacggctgccaggt

SEQ ID NO: 1038196 - DNA, 25 bp, Homo sapien
tctggcacaaggtggactcaagagc

SEQ ID NO: 1038197 - DNA, 25 bp, Homo sapien
gcttcggcttcatccaatgtccgta

SEQ ID NO: 1038198 - DNA, 25 bp, Homo sapien
ttcggcttcatccaatgtccgtaaa

SEQ ID NO: 1038199 - DNA, 25 bp, Homo sapien
tcggcttcatccaatgtccgtaaag

SEQ ID NO: 1038200 - DNA, 25 bp, Homo sapien
atgcttcggcttcatccaatgtccg

SEQ ID NO: 1038201 - DNA, 25 bp, Homo sapien
cacaaagcttaaccatatcacgcac

SEQ ID NO: 1038202 - DNA, 25 bp, Homo sapien
acacaaagcttaaccatatcacgca

SEQ ID NO: 1038203 - DNA, 25 bp, Homo sapien
aggtctctccctaaacacccaggat

SEQ ID NO: 1038204 - DNA, 25 bp, Homo sapien
ttcacatggcggcaggagggagccg

SEQ ID NO: 1038205 - DNA, 25 bp, Homo sapien
gaagcaacgaccttcttcacatggc

SEQ ID NO: 1038206 - DNA, 25 bp, Homo sapien
acatggcggcaggagggagccgggg

SEQ ID NO: 1038207 - DNA, 25 bp, Homo sapien
catggtggtggaaggtgaaggggaa

SEQ ID NO: 1038208 - DNA, 25 bp, Homo sapien
tgaggcaggtgaatggcgcgaacct

SEQ ID NO: 1038209 - DNA, 25 bp, Homo sapien
gcctgggcgacagagcgagactcca

SEQ ID NO: 1038210 - DNA, 25 bp, Homo sapien
gctgagattgcgccactgcactcca

SEQ ID NO: 1038211 - DNA, 25 bp, Homo sapien
aggcagagcttgcagtgagctgaga

SEQ ID NO: 1038212 - DNA, 25 bp, Homo sapien
agcctcaagaaacaatcgctgggcg

SEQ ID NO: 1038213 - DNA, 25 bp, Homo sapien
cctcaagaaacaatcgctgggcgcg

SEQ ID NO: 1038214 - DNA, 25 bp, Homo sapien
ggaagcctcaagaaacaatcgctgg

SEQ ID NO: 1038215 - DNA, 25 bp, Homo sapien
ctcaagaaacaatcgctgggcgcgg

SEQ ID NO: 1038216 - DNA, 25 bp, Homo sapien
tacgcagggccgaagctcccgaacg

SEQ ID NO: 1038217 - DNA, 25 bp, Homo sapien
acctgcacccgcctcctacgcaggg

SEQ ID NO: 1038218 - DNA, 25 bp, Homo sapien
tcgctgcggcctgcgtgtcctgaag

SEQ ID NO: 1038219 - DNA, 25 bp, Homo sapien
gcggcgggcggctcagcacccacac

SEQ ID NO: 1038220 - DNA, 25 bp, Homo sapien
agggctgctttggagtggggagcat

SEQ ID NO: 1038221 - DNA, 25 bp, Homo sapien
gggctgctttggagtggggagcatc

SEQ ID NO: 1038222 - DNA, 25 bp, Homo sapien
acacgggttgcgcaggaggttccta

SEQ ID NO: 1038223 - DNA, 25 bp, Homo sapien
cacttgcgtttccagagggtcatga

SEQ ID NO: 1038224 - DNA, 25 bp, Homo sapien
tgcgtttccagagggtcatgaggtc

SEQ ID NO: 1038225 - DNA, 25 bp, Homo sapien
ggcacttgcgtttccagagggtcat

SEQ ID NO: 1038226 - DNA, 25 bp, Homo sapien
gggaggctctccaccttccagcggt

SEQ ID NO: 1038227 - DNA, 25 bp, Homo sapien
cattgaaatcaatttgccatgcaaa

SEQ ID NO: 1038228 - DNA, 25 bp, Homo sapien
aaatctgtcccgtgggctccaggga

SEQ ID NO: 1038229 - DNA, 25 bp, Homo sapien
ttccagcggtccccaccattgaaat

SEQ ID NO: 1038230 - DNA, 25 bp, Homo sapien
gagcagagttgggggcttgcatacc

SEQ ID NO: 1038231 - DNA, 25 bp, Homo sapien
ggggcttgcatacctgggtgtgctc

SEQ ID NO: 1038232 - DNA, 25 bp, Homo sapien
gcttgcatacctgggtgtgctctgc

SEQ ID NO: 1038233 - DNA, 25 bp, Homo sapien
ttgcatacctgggtgtgctctgcat

SEQ ID NO: 1038234 - DNA, 25 bp, Homo sapien
gctacaaggtccaccagctgggact

SEQ ID NO: 1038235 - DNA, 25 bp, Homo sapien
tgtgtctagtagctcctcccagtag

SEQ ID NO: 1038236 - DNA, 25 bp, Homo sapien
tcccagtagccctcggctacaaggt

SEQ ID NO: 1038237 - DNA, 25 bp, Homo sapien
tccttaaccacgatgtccggccgga

SEQ ID NO: 1038238 - DNA, 25 bp, Homo sapien
tgagttggtaggtgcagccacagtc

SEQ ID NO: 1038239 - DNA, 25 bp, Homo sapien
cattgttccactgttggatggtcac

SEQ ID NO: 1038240 - DNA, 25 bp, Homo sapien
tcgaaggaggccaacacgaagtagt

SEQ ID NO: 1038241 - DNA, 25 bp, Homo sapien
gccacagtcggctctggcagcaaac

SEQ ID NO: 1038242 - DNA, 25 bp, Homo sapien
tgctggaagaggatgtagcggacac

SEQ ID NO: 1038243 - DNA, 25 bp, Homo sapien
ctggaagaggatgtagcggacaccc

SEQ ID NO: 1038244 - DNA, 25 bp, Homo sapien
tggaagaggatgtagcggacacccc

SEQ ID NO: 1038245 - DNA, 25 bp, Homo sapien
catgctggaagaggatgtagcggac

SEQ ID NO: 1038246 - DNA, 25 bp, Homo sapien
tcttggggctgacgacaatgctgct

SEQ ID NO: 1038247 - DNA, 25 bp, Homo sapien
ctcggtagggcgattgggcagcctc

SEQ ID NO: 1038248 - DNA, 25 bp, Homo sapien
aaatctggacaacagctcggtaggg

SEQ ID NO: 1038249 - DNA, 25 bp, Homo sapien
cctggttcctggtcatcttggggct

SEQ ID NO: 1038250 - DNA, 25 bp, Homo sapien
cagagctatgtgacagtaagttacc

SEQ ID NO: 1038251 - DNA, 25 bp, Homo sapien
tttattacaacaaaacgtcagagct

SEQ ID NO: 1038252 - DNA, 25 bp, Homo sapien
ccacaagctggtagggttgaaccgg

SEQ ID NO: 1038253 - DNA, 25 bp, Homo sapien
gagtcgctggtacagggacctcact

SEQ ID NO: 1038254 - DNA, 25 bp, Homo sapien
tattattattttatgagccagagtc

SEQ ID NO: 1038255 - DNA, 25 bp, Homo sapien
ttattattattttatgagccagagt

SEQ ID NO: 1038256 - DNA, 25 bp, Homo sapien
ttattattttatgagccagagtctc

SEQ ID NO: 1038257 - DNA, 25 bp, Homo sapien
tattattttatgagccagagtctcg

SEQ ID NO: 1038258 - DNA, 25 bp, Homo sapien
ggatgccgcaacctcgacttctcag

SEQ ID NO: 1038259 - DNA, 25 bp, Homo sapien
ggttccgccggccaacactgtctgt

SEQ ID NO: 1038260 - DNA, 25 bp, Homo sapien
ctcaggtctgcttggaggatgcctc

SEQ ID NO: 1038261 - DNA, 25 bp, Homo sapien
gcagtgagggatgccgcaacctcga

SEQ ID NO: 1038262 - DNA, 25 bp, Homo sapien
aaggcagatgagagcggagaggagc

SEQ ID NO: 1038263 - DNA, 25 bp, Homo sapien
gctgtcagcaggaagtccttgtctt

SEQ ID NO: 1038264 - DNA, 25 bp, Homo sapien
gatgagagcggagaggagctgtcag

SEQ ID NO: 1038265 - DNA, 25 bp, Homo sapien
gcaggaagtccttgtctttaggcat

SEQ ID NO: 1038266 - DNA, 25 bp, Homo sapien
ctggcgccctgagctcgccaggtgg

SEQ ID NO: 1038267 - DNA, 25 bp, Homo sapien
gcgccctgagctcgccaggtggctt

SEQ ID NO: 1038268 - DNA, 25 bp, Homo sapien
cctgagctcgccaggtggcttccat

SEQ ID NO: 1038269 - DNA, 25 bp, Homo sapien
ccctgagctcgccaggtggcttcca

SEQ ID NO: 1038270 - DNA, 25 bp, Homo sapien
ccagcgctggggccggctcatccat

SEQ ID NO: 1038271 - DNA, 25 bp, Homo sapien
aaagccagcgctggggccggctcat

SEQ ID NO: 1038272 - DNA, 25 bp, Homo sapien
ccggacaaagccagcgctggggccg

SEQ ID NO: 1038273 - DNA, 25 bp, Homo sapien
agccagcgctggggccggctcatcc

SEQ ID NO: 1038274 - DNA, 25 bp, Homo sapien
ggccggcgtggagaggtgcgcgggc

SEQ ID NO: 1038275 - DNA, 25 bp, Homo sapien
gaagacttcttccaacggtggcgga

SEQ ID NO: 1038276 - DNA, 25 bp, Homo sapien
cttcttccaacggtggcggactggg

SEQ ID NO: 1038277 - DNA, 25 bp, Homo sapien
tcttcgaagacttcttccaacggtg

SEQ ID NO: 1038278 - DNA, 25 bp, Homo sapien
gagtcttcgaagacttcttccaacg

SEQ ID NO: 1038279 - DNA, 25 bp, Homo sapien
caaaagctcagaggagggcagactg

SEQ ID NO: 1038280 - DNA, 25 bp, Homo sapien
ctagcaaaagctcagaggagggcag

SEQ ID NO: 1038281 - DNA, 25 bp, Homo sapien
tagcaaaagctcagaggagggcaga

SEQ ID NO: 1038282 - DNA, 25 bp, Homo sapien
aagctcagaggagggcagactgtgg

SEQ ID NO: 1038283 - DNA, 25 bp, Homo sapien
gggagcggtgtggatggcaggccca

SEQ ID NO: 1038284 - DNA, 25 bp, Homo sapien
ggagcggtgtggatggcaggcccag

SEQ ID NO: 1038285 - DNA, 25 bp, Homo sapien
agcggtgtggatggcaggcccagcc

SEQ ID NO: 1038286 - DNA, 25 bp, Homo sapien
cggtgtggatggcaggcccagccat

SEQ ID NO: 1038287 - DNA, 25 bp, Homo sapien
ctgccaggctcagctccaggggcag

SEQ ID NO: 1038288 - DNA, 25 bp, Homo sapien
ggcagcaggaggacgaggaacagca

SEQ ID NO: 1038289 - DNA, 25 bp, Homo sapien
caggggcagcaggaggacgaggaac

SEQ ID NO: 1038290 - DNA, 25 bp, Homo sapien
gggcagcaggaggacgaggaacagc

SEQ ID NO: 1038291 - DNA, 25 bp, Homo sapien
ccttctcggggtagggcaatgccag

SEQ ID NO: 1038292 - DNA, 25 bp, Homo sapien
aggtcaatgtgattctcagggaggt

SEQ ID NO: 1038293 - DNA, 25 bp, Homo sapien
aatgtgattctcagggaggttccgg

SEQ ID NO: 1038294 - DNA, 25 bp, Homo sapien
ctggaggtcggttctccttctcggg

SEQ ID NO: 1038295 - DNA, 25 bp, Homo sapien
tgtgctccctgctgcgtttcctggt

SEQ ID NO: 1038296 - DNA, 25 bp, Homo sapien
gcaggatcagggactcttctgtggc

SEQ ID NO: 1038297 - DNA, 25 bp, Homo sapien
caggatcagggactcttctgtggca

SEQ ID NO: 1038298 - DNA, 25 bp, Homo sapien
ccatcaggttttaagtcttcataat

SEQ ID NO: 1038299 - DNA, 25 bp, Homo sapien
tcttcataatcggtccagtcgaaca

SEQ ID NO: 1038300 - DNA, 25 bp, Homo sapien
taatcggtccagtcgaacaaggcca

SEQ ID NO: 1038301 - DNA, 25 bp, Homo sapien
taagtcttcataatcggtccagtcg

SEQ ID NO: 1038302 - DNA, 25 bp, Homo sapien
ctggagagtttaccgcggtgtttct

SEQ ID NO: 1038303 - DNA, 25 bp, Homo sapien
cttcggctggtgatgtttcgttacc

SEQ ID NO: 1038304 - DNA, 25 bp, Homo sapien
catggttccccttcggctggtgatg

SEQ ID NO: 1038305 - DNA, 25 bp, Homo sapien
ggtcgcatggttccccttcggctgg

SEQ ID NO: 1038306 - DNA, 25 bp, Homo sapien
ggctggtgatgtttcgttaccatca

SEQ ID NO: 1038307 - DNA, 25 bp, Homo sapien
atgctcccgcaggtcgcagcaagtc

SEQ ID NO: 1038308 - DNA, 25 bp, Homo sapien
catttgttgttgaggcctcggttgt

SEQ ID NO: 1038309 - DNA, 25 bp, Homo sapien
catcgaagcatttgttgttgaggcc

SEQ ID NO: 1038310 - DNA, 25 bp, Homo sapien
acacacatgcagtcatcgaagcatt

SEQ ID NO: 1038311 - DNA, 25 bp, Homo sapien
acccagcttcctcacggcagcccca

SEQ ID NO: 1038312 - DNA, 25 bp, Homo sapien
ggtcagaggcgcgaagggcccgtgc

SEQ ID NO: 1038313 - DNA, 25 bp, Homo sapien
ttcccctgcacgctcggggccagcc

SEQ ID NO: 1038314 - DNA, 25 bp, Homo sapien
attattctgccctacaacccagctt

SEQ ID NO: 1038315 - DNA, 25 bp, Homo sapien
ctgcggttccggtggaatttggcat

SEQ ID NO: 1038316 - DNA, 25 bp, Homo sapien
cctgcggttccggtggaatttggca

SEQ ID NO: 1038317 - DNA, 25 bp, Homo sapien
cgggctccacacagcgccctttcct

SEQ ID NO: 1038318 - DNA, 25 bp, Homo sapien
cacagcgccctttcctccgtgtaac

SEQ ID NO: 1038319 - DNA, 25 bp, Homo sapien
caacctgtcgcatggtgataatgcc

SEQ ID NO: 1038320 - DNA, 25 bp, Homo sapien
tgctagttacaaacaaatcgcccgg

SEQ ID NO: 1038321 - DNA, 25 bp, Homo sapien
gtcaaataactccagcgtgcctcac

SEQ ID NO: 1038322 - DNA, 25 bp, Homo sapien
ccctgggcaagtcgagtcaaataac

SEQ ID NO: 1038323 - DNA, 25 bp, Homo sapien
tacacctttatccagggaaggcaga

SEQ ID NO: 1038324 - DNA, 25 bp, Homo sapien
ggacctccaggtgactcttagcatg

SEQ ID NO: 1038325 - DNA, 25 bp, Homo sapien
gagcacagagcccactgagtcagat

SEQ ID NO: 1038326 - DNA, 25 bp, Homo sapien
cagcaagaacgtgggccttggagct

SEQ ID NO: 1038327 - DNA, 25 bp, Homo sapien
aataaagaccagttgcagcccagga

SEQ ID NO: 1038328 - DNA, 25 bp, Homo sapien
tcatgaaactacaagggcgtggcac

SEQ ID NO: 1038329 - DNA, 25 bp, Homo sapien
tattcctgggatccgcggtgagact

SEQ ID NO: 1038330 - DNA, 25 bp, Homo sapien
attagctacgcaaaacaggtctcgg

SEQ ID NO: 1038331 - DNA, 25 bp, Homo sapien
ggccgagggcacctgcgccgcagcc

SEQ ID NO: 1038332 - DNA, 25 bp, Homo sapien
ccgagggcacctgcgccgcagccgc

SEQ ID NO: 1038333 - DNA, 25 bp, Homo sapien
gccgagggcacctgcgccgcagccg

SEQ ID NO: 1038334 - DNA, 25 bp, Homo sapien
caggccgagggcacctgcgccgcag

SEQ ID NO: 1038335 - DNA, 25 bp, Homo sapien
cttcaggttcacagcaggcagctcc

SEQ ID NO: 1038336 - DNA, 25 bp, Homo sapien
ttcaggttcacagcaggcagctcca

SEQ ID NO: 1038337 - DNA, 25 bp, Homo sapien
tcaggttcacagcaggcagctccat

SEQ ID NO: 1038338 - DNA, 25 bp, Homo sapien
ctcttgaccacacaccaactatgtg

SEQ ID NO: 1038339 - DNA, 25 bp, Homo sapien
tatggtggagtacatctatagcccc

SEQ ID NO: 1038340 - DNA, 25 bp, Homo sapien
tcaagactccacaggtagcaagtgg

SEQ ID NO: 1038341 - DNA, 25 bp, Homo sapien
tatgccaaccgtctcacatgacctt

SEQ ID NO: 1038342 - DNA, 25 bp, Homo sapien
tgatttcttgggacactggagctgg

SEQ ID NO: 1038343 - DNA, 25 bp, Homo sapien
ggtgatttcttgggacactggagct

SEQ ID NO: 1038344 - DNA, 25 bp, Homo sapien
gtgatttcttgggacactggagctg

SEQ ID NO: 1038345 - DNA, 25 bp, Homo sapien
gaggaggaagaaagcaggccaggcc

SEQ ID NO: 1038346 - DNA, 25 bp, Homo sapien
cagcaactgcaggtggcccaggagt

SEQ ID NO: 1038347 - DNA, 25 bp, Homo sapien
tggcccaggagtgaaggaggaggaa

SEQ ID NO: 1038348 - DNA, 25 bp, Homo sapien
ccaggccagggaggggccgcttcat

SEQ ID NO: 1038349 - DNA, 25 bp, Homo sapien
gttgtcagcagccagtgacctagga

SEQ ID NO: 1038350 - DNA, 25 bp, Homo sapien
gtcagcagccagtgacctaggagaa

SEQ ID NO: 1038351 - DNA, 25 bp, Homo sapien
cagcagccagtgacctaggagaatc

SEQ ID NO: 1038352 - DNA, 25 bp, Homo sapien
caggttgtcagcagccagtgaccta

SEQ ID NO: 1038353 - DNA, 25 bp, Homo sapien
acggaaatcaagacccggagaggca

SEQ ID NO: 1038354 - DNA, 25 bp, Homo sapien
ctattgtacagacggaaatcaagac

SEQ ID NO: 1038355 - DNA, 25 bp, Homo sapien
tacagacggaaatcaagacccggag

SEQ ID NO: 1038356 - DNA, 25 bp, Homo sapien
ttgtacagacggaaatcaagacccg

SEQ ID NO: 1038357 - DNA, 25 bp, Homo sapien
ctggggagctctgatgagcacttcc

SEQ ID NO: 1038358 - DNA, 25 bp, Homo sapien
cctgcagggtgtgcaatccttatgc

SEQ ID NO: 1038359 - DNA, 25 bp, Homo sapien
caggtgagctcaatggtttccagtc

SEQ ID NO: 1038360 - DNA, 25 bp, Homo sapien
tgcacaggtgagctcaatggtttcc

SEQ ID NO: 1038361 - DNA, 25 bp, Homo sapien
gctgcacttcgaagtttgcaaagtg

SEQ ID NO: 1038362 - DNA, 25 bp, Homo sapien
agctgttgccctgtgcgctgcactt

SEQ ID NO: 1038363 - DNA, 25 bp, Homo sapien
tgaagttggcccaggcataggagcc

SEQ ID NO: 1038364 - DNA, 25 bp, Homo sapien
tatggcgtcgatggagtcccgctga

SEQ ID NO: 1038365 - DNA, 25 bp, Homo sapien
catgcttatggcgtcgatggagtcc

SEQ ID NO: 1038366 - DNA, 25 bp, Homo sapien
gcgtcgatggagtcccgctgagcca

SEQ ID NO: 1038367 - DNA, 25 bp, Homo sapien
ctgcaagacacaccacactgatgag

SEQ ID NO: 1038368 - DNA, 25 bp, Homo sapien
gaagccgtttcatgccctgctgtgt

SEQ ID NO: 1038369 - DNA, 25 bp, Homo sapien
cacaagacttggctctagaacctcc

SEQ ID NO: 1038370 - DNA, 25 bp, Homo sapien
gccacacaccggatgggaagccgtt

SEQ ID NO: 1038371 - DNA, 25 bp, Homo sapien
caaagcggcccgtgtccgtgaggct

SEQ ID NO: 1038372 - DNA, 25 bp, Homo sapien
agatgctgatgtgcacgatgtccag

SEQ ID NO: 1038373 - DNA, 25 bp, Homo sapien
cccggtacatgtggtagacgaagca

SEQ ID NO: 1038374 - DNA, 25 bp, Homo sapien
gctgacccgcgggtagaagatgctg

SEQ ID NO: 1038375 - DNA, 25 bp, Homo sapien
agtaccctcgggcatcttgactcct

SEQ ID NO: 1038376 - DNA, 25 bp, Homo sapien
ggactgcaaagggatctgcgggcgc

SEQ ID NO: 1038377 - DNA, 25 bp, Homo sapien
tacggtcctgagaagacccaaggaa

SEQ ID NO: 1038378 - DNA, 25 bp, Homo sapien
gctgagtcaatcgtctggtaggcac

SEQ ID NO: 1038379 - DNA, 25 bp, Homo sapien
tcaggagcatccctagaacgacctc

SEQ ID NO: 1038380 - DNA, 25 bp, Homo sapien
tccaagagacggaggtcaggagcat

SEQ ID NO: 1038381 - DNA, 25 bp, Homo sapien
tgagcttgcaacactcaggcaggac

SEQ ID NO: 1038382 - DNA, 25 bp, Homo sapien
gcatccctaggcaccatgtgaccag

SEQ ID NO: 1038383 - DNA, 25 bp, Homo sapien
tgggcaacaagagcgaaactctgtc

SEQ ID NO: 1038384 - DNA, 25 bp, Homo sapien
aaacaaaacaaaacgccaggcgcag

SEQ ID NO: 1038385 - DNA, 25 bp, Homo sapien
cgcttgaacccagctgcagtgagcc

SEQ ID NO: 1038386 - DNA, 25 bp, Homo sapien
aagattgcaccattgcacgccagcc

SEQ ID NO: 1038387 - DNA, 25 bp, Homo sapien
tcactaatacccgagtcaggcacta

SEQ ID NO: 1038388 - DNA, 25 bp, Homo sapien
gccattccggagactctgagaaccg

SEQ ID NO: 1038389 - DNA, 25 bp, Homo sapien
gggccaggtagagatactcgaatca

SEQ ID NO: 1038390 - DNA, 25 bp, Homo sapien
tccagagcccgtttagagacacagt

SEQ ID NO: 1038391 - DNA, 25 bp, Homo sapien
tatctggctgcttttgggagcttaa

SEQ ID NO: 1038392 - DNA, 25 bp, Homo sapien
cattaactgggtgccatgggtgcca

SEQ ID NO: 1038393 - DNA, 25 bp, Homo sapien
ccactttgaaggtatcattccactg

SEQ ID NO: 1038394 - DNA, 25 bp, Homo sapien
tcagctgccagtaattgtcaatctt

SEQ ID NO: 1038395 - DNA, 25 bp, Homo sapien
ccagtcggatttgaatctagacggg

SEQ ID NO: 1038396 - DNA, 25 bp, Homo sapien
tggtcccagggcaacttttgcacgt

SEQ ID NO: 1038397 - DNA, 25 bp, Homo sapien
tggccaccgacgtcctggtacaggt

SEQ ID NO: 1038398 - DNA, 25 bp, Homo sapien
tgcacgtgcaagatgagcgacattc

SEQ ID NO: 1038399 - DNA, 25 bp, Homo sapien
ttgtggctggcatcagaccttagct

SEQ ID NO: 1038400 - DNA, 25 bp, Homo sapien
tcagggacaggagtatccttggtcc

SEQ ID NO: 1038401 - DNA, 25 bp, Homo sapien
cactccacagtgagtggcctggtct

SEQ ID NO: 1038402 - DNA, 25 bp, Homo sapien
ctcttgcctggcttcgggagcgctg

SEQ ID NO: 1038403 - DNA, 25 bp, Homo sapien
ctagagagggccctgctcctgtaac

SEQ ID NO: 1038404 - DNA, 25 bp, Homo sapien
tgctcctgtaactgcccatccaggc

SEQ ID NO: 1038405 - DNA, 25 bp, Homo sapien
agggccctgctcctgtaactgccca

SEQ ID NO: 1038406 - DNA, 25 bp, Homo sapien
ccctgctcctgtaactgcccatcca

SEQ ID NO: 1038407 - DNA, 25 bp, Homo sapien
caggctcctccggaatcttcgttgc

SEQ ID NO: 1038408 - DNA, 25 bp, Homo sapien
ccactggtcatgtctaccactcagg

SEQ ID NO: 1038409 - DNA, 25 bp, Homo sapien
ggcacccactggtcatgtctaccac

SEQ ID NO: 1038410 - DNA, 25 bp, Homo sapien
tcatgtctaccactcaggccgatgc

SEQ ID NO: 1038411 - DNA, 25 bp, Homo sapien
gctcttgggataggagaggacccca

SEQ ID NO: 1038412 - DNA, 25 bp, Homo sapien
gggctgctggtctcgttgatgctca

SEQ ID NO: 1038413 - DNA, 25 bp, Homo sapien
tggccagtcgtgtccttcagagcta

SEQ ID NO: 1038414 - DNA, 25 bp, Homo sapien
gctcaggttgctctgctggatggca

SEQ ID NO: 1038415 - DNA, 25 bp, Homo sapien
caggcaatgtacagaagccagcagc

SEQ ID NO: 1038416 - DNA, 25 bp, Homo sapien
tcctccagggtgagaggttccccca

SEQ ID NO: 1038417 - DNA, 25 bp, Homo sapien
ctggtggacggcagcacgggatggg

SEQ ID NO: 1038418 - DNA, 25 bp, Homo sapien
tgagtcgggctgcctcctgcgccag

SEQ ID NO: 1038419 - DNA, 25 bp, Homo sapien
actgctcgctgggactgtgtctgac

SEQ ID NO: 1038420 - DNA, 25 bp, Homo sapien
ttctgcttgggtgagactccccagg

SEQ ID NO: 1038421 - DNA, 25 bp, Homo sapien
ggtccgtgtccccaaagtggtctca

SEQ ID NO: 1038422 - DNA, 25 bp, Homo sapien
agcccctgctcaggattaagggaat

SEQ ID NO: 1038423 - DNA, 25 bp, Homo sapien
attgcctcagactctggggctgtga

SEQ ID NO: 1038424 - DNA, 25 bp, Homo sapien
cagattgcctcagactctggggctg

SEQ ID NO: 1038425 - DNA, 25 bp, Homo sapien
ctggggctgtgatgttttgtgcctt

SEQ ID NO: 1038426 - DNA, 25 bp, Homo sapien
tctggggctgtgatgttttgtgcct

SEQ ID NO: 1038427 - DNA, 25 bp, Homo sapien
aagtgcctccaggatcgaaaacatc

SEQ ID NO: 1038428 - DNA, 25 bp, Homo sapien
cggaccagcagaacctttgtgtact

SEQ ID NO: 1038429 - DNA, 25 bp, Homo sapien
ggcactttcgcaacagctgccagcg

SEQ ID NO: 1038430 - DNA, 25 bp, Homo sapien
ggcctgaaggcactttcgcaacagc

SEQ ID NO: 1038431 - DNA, 25 bp, Homo sapien
cccctggcccaacctggagaccgct

SEQ ID NO: 1038432 - DNA, 25 bp, Homo sapien
ctggcccaacctggagaccgctgac

SEQ ID NO: 1038433 - DNA, 25 bp, Homo sapien
tcacacggccccctggcccaacctg

SEQ ID NO: 1038434 - DNA, 25 bp, Homo sapien
tgcttcacacggccccctggcccaa

SEQ ID NO: 1038435 - DNA, 25 bp, Homo sapien
ctggtgtgttccagcctgcttctct

SEQ ID NO: 1038436 - DNA, 25 bp, Homo sapien
ttcttcccaaggagaggcctttgcc

SEQ ID NO: 1038437 - DNA, 25 bp, Homo sapien
ttctgctgtaaagccaggtttctcc

SEQ ID NO: 1038438 - DNA, 25 bp, Homo sapien
catgtggggctgtacttgtttctgc

SEQ ID NO: 1038439 - DNA, 25 bp, Homo sapien
tctggactctctcgtgtctgctgtc

SEQ ID NO: 1038440 - DNA, 25 bp, Homo sapien
tggactctctcgtgtctgctgtctg

SEQ ID NO: 1038441 - DNA, 25 bp, Homo sapien
agaagccgctgagcaatctcctcct

SEQ ID NO: 1038442 - DNA, 25 bp, Homo sapien
ggatctggactctctcgtgtctgct

SEQ ID NO: 1038443 - DNA, 25 bp, Homo sapien
tacacctgcagcagtagagtgccag

SEQ ID NO: 1038444 - DNA, 25 bp, Homo sapien
tggtggccttccgcagagtctccct

SEQ ID NO: 1038445 - DNA, 25 bp, Homo sapien
tccctctcctgtctggcccgtttct

SEQ ID NO: 1038446 - DNA, 25 bp, Homo sapien
tctcctgtctggcccgtttcttctg

SEQ ID NO: 1038447 - DNA, 25 bp, Homo sapien
tgcttcatccgcacccactgttcca

SEQ ID NO: 1038448 - DNA, 25 bp, Homo sapien
ctcagggtccccgtccggcggtcag

SEQ ID NO: 1038449 - DNA, 25 bp, Homo sapien
ggtcagccaggtggtctcggtaccg

SEQ ID NO: 1038450 - DNA, 25 bp, Homo sapien
ttgccccatctgattcccggagctg

SEQ ID NO: 1038451 - DNA, 25 bp, Homo sapien
agcagcgcccagcagagggccagtg

SEQ ID NO: 1038452 - DNA, 25 bp, Homo sapien
ctggaaaagccgcatcttccacagc

SEQ ID NO: 1038453 - DNA, 25 bp, Homo sapien
ggcgctggaaaagccgcatcttcca

SEQ ID NO: 1038454 - DNA, 25 bp, Homo sapien
actggcgctggaaaagccgcatctt

SEQ ID NO: 1038455 - DNA, 25 bp, Homo sapien
tcccactgggatttacagcaagctg

SEQ ID NO: 1038456 - DNA, 25 bp, Homo sapien
tgccaggagatatgaactgtgccct

SEQ ID NO: 1038457 - DNA, 25 bp, Homo sapien
gtctggctaaccgagctagtgctcc

SEQ ID NO: 1038458 - DNA, 25 bp, Homo sapien
gcccaagcagctgatcagaggtgga

SEQ ID NO: 1038459 - DNA, 25 bp, Homo sapien
agagccgagggggtcttggtgcagc

SEQ ID NO: 1038460 - DNA, 25 bp, Homo sapien
cagcttgatgtggcatctgggccca

SEQ ID NO: 1038461 - DNA, 25 bp, Homo sapien
tcaagtgccaccatctcaggctgcg

SEQ ID NO: 1038462 - DNA, 25 bp, Homo sapien
gagtcttggagtgtgctgctgctca

SEQ ID NO: 1038463 - DNA, 25 bp, Homo sapien
tctggcgggtatgctggtaccacct

SEQ ID NO: 1038464 - DNA, 25 bp, Homo sapien
cgcctctggcgggtatgctggtacc

SEQ ID NO: 1038465 - DNA, 25 bp, Homo sapien
cctctggcgggtatgctggtaccac

SEQ ID NO: 1038466 - DNA, 25 bp, Homo sapien
cagctgcccacagaaggctcccctg

SEQ ID NO: 1038467 - DNA, 25 bp, Homo sapien
gagtgccagtggcatagggcatctc

SEQ ID NO: 1038468 - DNA, 25 bp, Homo sapien
aggcccattgggctgttgcccagcg

SEQ ID NO: 1038469 - DNA, 25 bp, Homo sapien
tgcaggtccgatcccaggcccggtg

SEQ ID NO: 1038470 - DNA, 25 bp, Homo sapien
atagggcatctcgtgccagccgcca

SEQ ID NO: 1038471 - DNA, 25 bp, Homo sapien
gctgctctggccgggtcactgtgca

SEQ ID NO: 1038472 - DNA, 25 bp, Homo sapien
gtctggcacttttcatgcaggaact

SEQ ID NO: 1038473 - DNA, 25 bp, Homo sapien
ctgccagctccggaacaccaccttc

SEQ ID NO: 1038474 - DNA, 25 bp, Homo sapien
ctctggccgggtcactgtgcatctc

SEQ ID NO: 1038475 - DNA, 25 bp, Homo sapien
agcaccaagtccagcactgggctgc

SEQ ID NO: 1038476 - DNA, 25 bp, Homo sapien
catcctgaaaggcttgatgctgggc

SEQ ID NO: 1038477 - DNA, 25 bp, Homo sapien
tccaggaagcatgggctcggctgac

SEQ ID NO: 1038478 - DNA, 25 bp, Homo sapien
tgggcttcccgccatgtggcaaaca

SEQ ID NO: 1038479 - DNA, 25 bp, Homo sapien
aggatggctcgctggacaccgccgc

SEQ ID NO: 1038480 - DNA, 25 bp, Homo sapien
gccgactgcaccgaggcctctagga

SEQ ID NO: 1038481 - DNA, 25 bp, Homo sapien
cgcgcaccgccgactgcaccgaggc

SEQ ID NO: 1038482 - DNA, 25 bp, Homo sapien
tgagctgcactgtccgcaggaagcg

SEQ ID NO: 1038483 - DNA, 25 bp, Homo sapien
tccggggccagagcgtgaggtcagt

SEQ ID NO: 1038484 - DNA, 25 bp, Homo sapien
catccggggccagagcgtgaggtca

SEQ ID NO: 1038485 - DNA, 25 bp, Homo sapien
cggggccagagcgtgaggtcagtct

SEQ ID NO: 1038486 - DNA, 25 bp, Homo sapien
ggccagagcgtgaggtcagtctggg

SEQ ID NO: 1038487 - DNA, 25 bp, Homo sapien
ttccaaggggctggggcgtccagca

SEQ ID NO: 1038488 - DNA, 25 bp, Homo sapien
caaggggctggggcgtccagcagca

SEQ ID NO: 1038489 - DNA, 25 bp, Homo sapien
tgtttccaaggggctggggcgtcca

SEQ ID NO: 1038490 - DNA, 25 bp, Homo sapien
tttccaaggggctggggcgtccagc

SEQ ID NO: 1038491 - DNA, 25 bp, Homo sapien
gggagaggtggtgcatacgaggttg

SEQ ID NO: 1038492 - DNA, 25 bp, Homo sapien
gtgcatacgaggttgctgggcccct

SEQ ID NO: 1038493 - DNA, 25 bp, Homo sapien
gagaggtggtgcatacgaggttgct

SEQ ID NO: 1038494 - DNA, 25 bp, Homo sapien
ggtggtgcatacgaggttgctgggc

SEQ ID NO: 1038495 - DNA, 25 bp, Homo sapien
cagtggcctggcactcgagaggtgc

SEQ ID NO: 1038496 - DNA, 25 bp, Homo sapien
cgagaggtgccaggttcatctttgc

SEQ ID NO: 1038497 - DNA, 25 bp, Homo sapien
ctgatggattcagagttgcttgtca

SEQ ID NO: 1038498 - DNA, 25 bp, Homo sapien
gctgatggattcagagttgcttgtc

SEQ ID NO: 1038499 - DNA, 25 bp, Homo sapien
gaatagccagagaggagcacctgaa

SEQ ID NO: 1038500 - DNA, 25 bp, Homo sapien
tgtgaattctgcaactagccaaggc

SEQ ID NO: 1038501 - DNA, 25 bp, Homo sapien
gctcatggcgtaatgggcctgccca

SEQ ID NO: 1038502 - DNA, 25 bp, Homo sapien
agttagccctcagtcagttcccgga

SEQ ID NO: 1038503 - DNA, 25 bp, Homo sapien
cactgcagtgatggcgcgggaggca

SEQ ID NO: 1038504 - DNA, 25 bp, Homo sapien
agtgatggcgcgggaggcaccagct

SEQ ID NO: 1038505 - DNA, 25 bp, Homo sapien
gcagtgatggcgcgggaggcaccag

SEQ ID NO: 1038506 - DNA, 25 bp, Homo sapien
tgcactgcagtgatggcgcgggagg

SEQ ID NO: 1038507 - DNA, 25 bp, Homo sapien
aaggtgctgagcttagccttgtgcc

SEQ ID NO: 1038508 - DNA, 25 bp, Homo sapien
tagtgcccgcctaggagttgagtac

SEQ ID NO: 1038509 - DNA, 25 bp, Homo sapien
gaaggcagctgctcttagtgcccgc

SEQ ID NO: 1038510 - DNA, 25 bp, Homo sapien
gaacagctgaaacattccgaagagg

SEQ ID NO: 1038511 - DNA, 25 bp, Homo sapien
ctggagtgcgctcttggtccctggt

SEQ ID NO: 1038512 - DNA, 25 bp, Homo sapien
cgtagcctccgtttatgggccttgc

SEQ ID NO: 1038513 - DNA, 25 bp, Homo sapien
ttggtccctggtccctcgtccacag

SEQ ID NO: 1038514 - DNA, 25 bp, Homo sapien
tgggacccagctactctgtccaggc

SEQ ID NO: 1038515 - DNA, 25 bp, Homo sapien
ggcctgggcctgcttttccaggatc

SEQ ID NO: 1038516 - DNA, 25 bp, Homo sapien
cagaaggagggcagagccatgggcc

SEQ ID NO: 1038517 - DNA, 25 bp, Homo sapien
aggagggcagagccatgggcctggg

SEQ ID NO: 1038518 - DNA, 25 bp, Homo sapien
gagccatgggcctgggcctgctttt

SEQ ID NO: 1038519 - DNA, 25 bp, Homo sapien
gccccttgggcatccacccagtgct

SEQ ID NO: 1038520 - DNA, 25 bp, Homo sapien
agcagtgcctcgaggcaccggcgct

SEQ ID NO: 1038521 - DNA, 25 bp, Homo sapien
ggcaccggcgctgcaggtacttcct

SEQ ID NO: 1038522 - DNA, 25 bp, Homo sapien
cagcccgtgaagcagtgcctcgagg

SEQ ID NO: 1038523 - DNA, 25 bp, Homo sapien
gcagtcgcaggatccgctgccacca

SEQ ID NO: 1038524 - DNA, 25 bp, Homo sapien
actcgcagtcgcaggatccgctgcc

SEQ ID NO: 1038525 - DNA, 25 bp, Homo sapien
ctgagccactcgcagtcgcaggatc

SEQ ID NO: 1038526 - DNA, 25 bp, Homo sapien
gagccactcgcagtcgcaggatccg

SEQ ID NO: 1038527 - DNA, 25 bp, Homo sapien
ctggcaagcagggaaagctccacgg

SEQ ID NO: 1038528 - DNA, 25 bp, Homo sapien
tgtggcacagacttctggaaggctg

SEQ ID NO: 1038529 - DNA, 25 bp, Homo sapien
gtgcgtggctgtggcacagacttct

SEQ ID NO: 1038530 - DNA, 25 bp, Homo sapien
cagggaaagctccacggtgcgtggc

SEQ ID NO: 1038531 - DNA, 25 bp, Homo sapien
ggcgttggtgccacttcttaaaggc

SEQ ID NO: 1038532 - DNA, 25 bp, Homo sapien
gtgctctggcggcttcctgtccact

SEQ ID NO: 1038533 - DNA, 25 bp, Homo sapien
cccaaccccgcggtgctctggcggc

SEQ ID NO: 1038534 - DNA, 25 bp, Homo sapien
caggcgttggtgccacttcttaaag

SEQ ID NO: 1038535 - DNA, 25 bp, Homo sapien
tcagagctcttcaagctgtcccctc

SEQ ID NO: 1038536 - DNA, 25 bp, Homo sapien
ccttcagagctcttcaagctgtccc

SEQ ID NO: 1038537 - DNA, 25 bp, Homo sapien
ttcagagctcttcaagctgtcccct

SEQ ID NO: 1038538 - DNA, 25 bp, Homo sapien
cttcagagctcttcaagctgtcccc

SEQ ID NO: 1038539 - DNA, 25 bp, Homo sapien
tgatgctgccccgttccctgtcaga

SEQ ID NO: 1038540 - DNA, 25 bp, Homo sapien
cttgtgcttggtggggctcgtggcc

SEQ ID NO: 1038541 - DNA, 25 bp, Homo sapien
tggaggcctgatgctgccccgttcc

SEQ ID NO: 1038542 - DNA, 25 bp, Homo sapien
ccccgttccctgtcagaggctaaga

SEQ ID NO: 1038543 - DNA, 25 bp, Homo sapien
ctctgttgtgccatgtcaccacaca

SEQ ID NO: 1038544 - DNA, 25 bp, Homo sapien
tgtgccatgtcaccacacacccatt

SEQ ID NO: 1038545 - DNA, 25 bp, Homo sapien
acacacccattcactactgtgtgtt

SEQ ID NO: 1038546 - DNA, 25 bp, Homo sapien
cacacccattcactactgtgtgttt

SEQ ID NO: 1038547 - DNA, 25 bp, Homo sapien
tgacgataaaggcacggcctccaac

SEQ ID NO: 1038548 - DNA, 25 bp, Homo sapien
atgacgataaaggcacggcctccaa

SEQ ID NO: 1038549 - DNA, 25 bp, Homo sapien
cttcctcctttactgccactctgga

SEQ ID NO: 1038550 - DNA, 25 bp, Homo sapien
cagcagcagcacagagaccccctgc

SEQ ID NO: 1038551 - DNA, 25 bp, Homo sapien
acagagaccccctgcaccccgccat

SEQ ID NO: 1038552 - DNA, 25 bp, Homo sapien
agcacagagaccccctgcaccccgc

SEQ ID NO: 1038553 - DNA, 25 bp, Homo sapien
cagcagcacagagaccccctgcacc

SEQ ID NO: 1038554 - DNA, 25 bp, Homo sapien
agctcctcgggggtgcgggtctcac

SEQ ID NO: 1038555 - DNA, 25 bp, Homo sapien
tcgggggtgcgggtctcacgctcac

SEQ ID NO: 1038556 - DNA, 25 bp, Homo sapien
gctcctcgggggtgcgggtctcacg

SEQ ID NO: 1038557 - DNA, 25 bp, Homo sapien
ggtgcgggtctcacgctcaccgcag

SEQ ID NO: 1038558 - DNA, 25 bp, Homo sapien
ctcatagtctttccttggaagaatc

SEQ ID NO: 1038559 - DNA, 25 bp, Homo sapien
tttccttggaagaatctcatcctcc

SEQ ID NO: 1038560 - DNA, 25 bp, Homo sapien
cttggaagaatctcatcctcctcct

SEQ ID NO: 1038561 - DNA, 25 bp, Homo sapien
tagtctttccttggaagaatctcat

SEQ ID NO: 1038562 - DNA, 25 bp, Homo sapien
ttagttgcccaagcagtatcaaagg

SEQ ID NO: 1038563 - DNA, 25 bp, Homo sapien
gttgcccaagcagtatcaaaggagc

SEQ ID NO: 1038564 - DNA, 25 bp, Homo sapien
cccaagcagtatcaaaggagctcac

SEQ ID NO: 1038565 - DNA, 25 bp, Homo sapien
actttagttgcccaagcagtatcaa

SEQ ID NO: 1038566 - DNA, 25 bp, Homo sapien
ccacctataatgagaatggatgtca

SEQ ID NO: 1038567 - DNA, 25 bp, Homo sapien
tgtgtgacctgcatgaaaacattcc

SEQ ID NO: 1038568 - DNA, 25 bp, Homo sapien
gggttacgagcaaaatggcacctgg

SEQ ID NO: 1038569 - DNA, 25 bp, Homo sapien
accagccccaattcaaccaggaagg

SEQ ID NO: 1038570 - DNA, 25 bp, Homo sapien
tatgtatggaaattactggtcaagt

SEQ ID NO: 1038571 - DNA, 25 bp, Homo sapien
caagtacttcattgatggttccatc

SEQ ID NO: 1038572 - DNA, 25 bp, Homo sapien
ctaataatgatatggttccgtaaac

SEQ ID NO: 1038573 - DNA, 25 bp, Homo sapien
gcaaatagacagaaaggagatcact

SEQ ID NO: 1038574 - DNA, 25 bp, Homo sapien
aggagaccgaagctgaaggttaagc

SEQ ID NO: 1038575 - DNA, 25 bp, Homo sapien
gacagctgaaccgtttggaggttcc

SEQ ID NO: 1038576 - DNA, 25 bp, Homo sapien
tttgctaatgagatgagtggcggct

SEQ ID NO: 1038577 - DNA, 25 bp, Homo sapien
caagggctggtgatgtaatcaatca

SEQ ID NO: 1038578 - DNA, 25 bp, Homo sapien
caaaacttccaggtaagggtcattg

SEQ ID NO: 1038579 - DNA, 25 bp, Homo sapien
tgatacagcgatcataatccaaact

SEQ ID NO: 1038580 - DNA, 25 bp, Homo sapien
ccaggtaagggtcattgatacagcg

SEQ ID NO: 1038581 - DNA, 25 bp, Homo sapien
taagggtcattgatacagcgatcat

SEQ ID NO: 1038582 - DNA, 25 bp, Homo sapien
tcaccgcctcatatcttcgaccttt

SEQ ID NO: 1038583 - DNA, 25 bp, Homo sapien
gtgcagactccaatggcaaacacca

SEQ ID NO: 1038584 - DNA, 25 bp, Homo sapien
caccatccacttcaccgcctcatat

SEQ ID NO: 1038585 - DNA, 25 bp, Homo sapien
caggccagtgcagactccaatggca

SEQ ID NO: 1038586 - DNA, 25 bp, Homo sapien
gctgttactgaggacagatacccta

SEQ ID NO: 1038587 - DNA, 25 bp, Homo sapien
gataccctatcccaacactgtactg

SEQ ID NO: 1038588 - DNA, 25 bp, Homo sapien
tgtactgaccggaatcagatttgac

SEQ ID NO: 1038589 - DNA, 25 bp, Homo sapien
tgtgaagtcggcagttttggttcca

SEQ ID NO: 1038590 - DNA, 25 bp, Homo sapien
ggcccctgtggctatattataccga

SEQ ID NO: 1038591 - DNA, 25 bp, Homo sapien
catgtcaaattaagtaggaggcttg

SEQ ID NO: 1038592 - DNA, 25 bp, Homo sapien
gaatgccatcagtcttacctagtaa

SEQ ID NO: 1038593 - DNA, 25 bp, Homo sapien
ataaaaattgtggttggcccctgtg

SEQ ID NO: 1038594 - DNA, 25 bp, Homo sapien
ttgggtgaagagtcgcacaaaaaag

SEQ ID NO: 1038595 - DNA, 25 bp, Homo sapien
gaagagtcgcacaaaaaagtccaca

SEQ ID NO: 1038596 - DNA, 25 bp, Homo sapien
ggtgaagagtcgcacaaaaaagtcc

SEQ ID NO: 1038597 - DNA, 25 bp, Homo sapien
agttgggtgaagagtcgcacaaaaa

SEQ ID NO: 1038598 - DNA, 25 bp, Homo sapien
ctatgtaagaaagaatcttggtgac

SEQ ID NO: 1038599 - DNA, 25 bp, Homo sapien
gaacaaggaggcttgccaggaagac

SEQ ID NO: 1038600 - DNA, 25 bp, Homo sapien
gagaacaaggaggcttgccaggaag

SEQ ID NO: 1038601 - DNA, 25 bp, Homo sapien
agaacaaggaggcttgccaggaaga

SEQ ID NO: 1038602 - DNA, 25 bp, Homo sapien
tctaaaacctcctaagcgagcaggt

SEQ ID NO: 1038603 - DNA, 25 bp, Homo sapien
taaaacctcctaagcgagcaggtga

SEQ ID NO: 1038604 - DNA, 25 bp, Homo sapien
actctaaaacctcctaagcgagcag

SEQ ID NO: 1038605 - DNA, 25 bp, Homo sapien
aaaacctcctaagcgagcaggtgaa

SEQ ID NO: 1038606 - DNA, 25 bp, Homo sapien
ctcaccagaggtgaaacctttacct

SEQ ID NO: 1038607 - DNA, 25 bp, Homo sapien
taatctcaccagaggtgaaaccttt

SEQ ID NO: 1038608 - DNA, 25 bp, Homo sapien
tctcaccagaggtgaaacctttacc

SEQ ID NO: 1038609 - DNA, 25 bp, Homo sapien
atctcaccagaggtgaaacctttac

SEQ ID NO: 1038610 - DNA, 25 bp, Homo sapien
gattgcatgtacaggtatgttacga

SEQ ID NO: 1038611 - DNA, 25 bp, Homo sapien
gtcacccaggtagtgcgcatggcac

SEQ ID NO: 1038612 - DNA, 25 bp, Homo sapien
tctgtacaagttccctgtgaatgag

SEQ ID NO: 1038613 - DNA, 25 bp, Homo sapien
caggtatgttacgagggtatattgc

SEQ ID NO: 1038614 - DNA, 25 bp, Homo sapien
aactcgaaatccattggttctctgg

SEQ ID NO: 1038615 - DNA, 25 bp, Homo sapien
actcgaaatccattggttctctggc

SEQ ID NO: 1038616 - DNA, 25 bp, Homo sapien
ctgatggaggagagcaggcacaccc

SEQ ID NO: 1038617 - DNA, 25 bp, Homo sapien
gatggaggagagcaggcacacccat

SEQ ID NO: 1038618 - DNA, 25 bp, Homo sapien
tgatggaggagagcaggcacaccca

SEQ ID NO: 1038619 - DNA, 25 bp, Homo sapien
tagcatttgacctcgggtatcccgg

SEQ ID NO: 1038620 - DNA, 25 bp, Homo sapien
gacgattcctggcacctttacgcca

SEQ ID NO: 1038621 - DNA, 25 bp, Homo sapien
gccacactgaacagcactccaagga

SEQ ID NO: 1038622 - DNA, 25 bp, Homo sapien
tccaaggaccttgcagagcagggtc

SEQ ID NO: 1038623 - DNA, 25 bp, Homo sapien
cagctcccaccaccgaaccactgtg

SEQ ID NO: 1038624 - DNA, 25 bp, Homo sapien
ccaccaccgaaccactgtggatcat

SEQ ID NO: 1038625 - DNA, 25 bp, Homo sapien
ccactgtggatcatggggccttcct

SEQ ID NO: 1038626 - DNA, 25 bp, Homo sapien
cactgtggatcatggggccttcctt

SEQ ID NO: 1038627 - DNA, 25 bp, Homo sapien
ctgtcgcttcggaaataggggaagt

SEQ ID NO: 1038628 - DNA, 25 bp, Homo sapien
aaactggatcttccgtaaggagatg

SEQ ID NO: 1038629 - DNA, 25 bp, Homo sapien
ttaaactggatcttccgtaaggaga

SEQ ID NO: 1038630 - DNA, 25 bp, Homo sapien
taaactggatcttccgtaaggagat

SEQ ID NO: 1038631 - DNA, 25 bp, Homo sapien
tgctgatacaaagtctctcttgtct

SEQ ID NO: 1038632 - DNA, 25 bp, Homo sapien
ctgctgatacaaagtctctcttgtc

SEQ ID NO: 1038633 - DNA, 25 bp, Homo sapien
ctagactgaacaaggtacccccgat

SEQ ID NO: 1038634 - DNA, 25 bp, Homo sapien
gattggcgccccgaaagctgcagca

SEQ ID NO: 1038635 - DNA, 25 bp, Homo sapien
gaaggacgaaccctcctctagactg

SEQ ID NO: 1038636 - DNA, 25 bp, Homo sapien
ctgaacaaggtacccccgattggcg

SEQ ID NO: 1038637 - DNA, 25 bp, Homo sapien
aagttcagcaatccagggagctgga

SEQ ID NO: 1038638 - DNA, 25 bp, Homo sapien
gaatcccagaacggaagaagttgag

SEQ ID NO: 1038639 - DNA, 25 bp, Homo sapien
ctgaatcccagaacggaagaagttg

SEQ ID NO: 1038640 - DNA, 25 bp, Homo sapien
caaagttcagcaatccagggagctg

SEQ ID NO: 1038641 - DNA, 25 bp, Homo sapien
aacccaaatccatagctgtccagag

SEQ ID NO: 1038642 - DNA, 25 bp, Homo sapien
ccaaatccatagctgtccagagatg

SEQ ID NO: 1038643 - DNA, 25 bp, Homo sapien
cacgacgaagaaacccaaatccata

SEQ ID NO: 1038644 - DNA, 25 bp, Homo sapien
agaaacccaaatccatagctgtcca

SEQ ID NO: 1038645 - DNA, 25 bp, Homo sapien
ttaggtttcgggtgcacgtttcgca

SEQ ID NO: 1038646 - DNA, 25 bp, Homo sapien
cacgtttcgcatacggtactttgca

SEQ ID NO: 1038647 - DNA, 25 bp, Homo sapien
gcatacggtactttgcaagcctctt

SEQ ID NO: 1038648 - DNA, 25 bp, Homo sapien
tttcgggtgcacgtttcgcatacgg

SEQ ID NO: 1038649 - DNA, 25 bp, Homo sapien
ggcattctcctaacaccatcgaggc

SEQ ID NO: 1038650 - DNA, 25 bp, Homo sapien
gacatctgtcggcattctcctaaca

SEQ ID NO: 1038651 - DNA, 25 bp, Homo sapien
tgtcggcattctcctaacaccatcg

SEQ ID NO: 1038652 - DNA, 25 bp, Homo sapien
taacaccatcgaggccacaaacacc

SEQ ID NO: 1038653 - DNA, 25 bp, Homo sapien
aggctccacggactacctcatggga

SEQ ID NO: 1038654 - DNA, 25 bp, Homo sapien
ctggctgactcactgaaccacaggt

SEQ ID NO: 1038655 - DNA, 25 bp, Homo sapien
ttggaccgaaagaacacagcgtgga

SEQ ID NO: 1038656 - DNA, 25 bp, Homo sapien
agagagaagcctccttgccctgaca

SEQ ID NO: 1038657 - DNA, 25 bp, Homo sapien
ccacagttggttgaccctacgtaat

SEQ ID NO: 1038658 - DNA, 25 bp, Homo sapien
tgcaggacccacaaatgtggatggc

SEQ ID NO: 1038659 - DNA, 25 bp, Homo sapien
tacgtaattccatggatgcaggacc

SEQ ID NO: 1038660 - DNA, 25 bp, Homo sapien
gtggatggccgaccgcacttagaga

SEQ ID NO: 1038661 - DNA, 25 bp, Homo sapien
gcaagggtgtttcaagtgtgctgtt

SEQ ID NO: 1038662 - DNA, 25 bp, Homo sapien
tgctagaaggcaagggtgtttcaag

SEQ ID NO: 1038663 - DNA, 25 bp, Homo sapien
gatgggatctttgctagaaggcaag

SEQ ID NO: 1038664 - DNA, 25 bp, Homo sapien
gatctttgctagaaggcaagggtgt

SEQ ID NO: 1038665 - DNA, 25 bp, Homo sapien
tgcctggagagcagacccagtcctc

SEQ ID NO: 1038666 - DNA, 25 bp, Homo sapien
gcctggagagcagacccagtcctcc

SEQ ID NO: 1038667 - DNA, 25 bp, Homo sapien
cctggagagcagacccagtcctcca

SEQ ID NO: 1038668 - DNA, 25 bp, Homo sapien
gtcactatggccgtgattcaccgtg

SEQ ID NO: 1038669 - DNA, 25 bp, Homo sapien
atccagggcaccacttgaccgaaag

SEQ ID NO: 1038670 - DNA, 25 bp, Homo sapien
ttctaagtgatgctgctagaagcct

SEQ ID NO: 1038671 - DNA, 25 bp, Homo sapien
cctctcccggtgctaactttctaag

SEQ ID NO: 1038672 - DNA, 25 bp, Homo sapien
cattgtaggtatcattgggacaaaa

SEQ ID NO: 1038673 - DNA, 25 bp, Homo sapien
aggatggcagactcctgcgggttga

SEQ ID NO: 1038674 - DNA, 25 bp, Homo sapien
gaagaagagtgtggccatgtcattg

SEQ ID NO: 1038675 - DNA, 25 bp, Homo sapien
gagctggaggatggcagactcctgc

SEQ ID NO: 1038676 - DNA, 25 bp, Homo sapien
tctgggtgggcgttacaaagaagtc

SEQ ID NO: 1038677 - DNA, 25 bp, Homo sapien
ggcagaaaccaatcttttgtctggg

SEQ ID NO: 1038678 - DNA, 25 bp, Homo sapien
cttgcttggaatgaagggcaagcct

SEQ ID NO: 1038679 - DNA, 25 bp, Homo sapien
gagatgacaccaatcacccacgatt

SEQ ID NO: 1038680 - DNA, 25 bp, Homo sapien
aactaaacgtccaaaagcagctcca

SEQ ID NO: 1038681 - DNA, 25 bp, Homo sapien
gccgtaagtccaacatgcaagcaag

SEQ ID NO: 1038682 - DNA, 25 bp, Homo sapien
gaaatagagaacgaagaacaaggcc

SEQ ID NO: 1038683 - DNA, 25 bp, Homo sapien
gagaaggcacaaaaaggccacttgg

SEQ ID NO: 1038684 - DNA, 25 bp, Homo sapien
caccgagaacatggctttgaaccac

SEQ ID NO: 1038685 - DNA, 25 bp, Homo sapien
cgagaacatggctttgaaccacact

SEQ ID NO: 1038686 - DNA, 25 bp, Homo sapien
ggaaaacaccgagaacatggctttg

SEQ ID NO: 1038687 - DNA, 25 bp, Homo sapien
ctagtgaaggaaaacaccgagaaca

SEQ ID NO: 1038688 - DNA, 25 bp, Homo sapien
aaggtccccgaatagatgtggccca

SEQ ID NO: 1038689 - DNA, 25 bp, Homo sapien
caagaaagccgctgcaccaatcagg

SEQ ID NO: 1038690 - DNA, 25 bp, Homo sapien
cagggcaaaggtccccgaatagatg

SEQ ID NO: 1038691 - DNA, 25 bp, Homo sapien
ccaagaaagccgctgcaccaatcag

SEQ ID NO: 1038692 - DNA, 25 bp, Homo sapien
tcagtgtgaccatgatggggagccc

SEQ ID NO: 1038693 - DNA, 25 bp, Homo sapien
tggactcgatcaggatgaccgtgag

SEQ ID NO: 1038694 - DNA, 25 bp, Homo sapien
ctcattggtggactcgatcaggatg

SEQ ID NO: 1038695 - DNA, 25 bp, Homo sapien
ccgtaggtgatctcattggtggact

SEQ ID NO: 1038696 - DNA, 25 bp, Homo sapien
tgtctcccattccagaagcggcacg

SEQ ID NO: 1038697 - DNA, 25 bp, Homo sapien
gcccacgtggatatcataaatgccc

SEQ ID NO: 1038698 - DNA, 25 bp, Homo sapien
atgcccttattgaaaaagtcccctg

SEQ ID NO: 1038699 - DNA, 25 bp, Homo sapien
cctcgcaggcccacgtggatatcat

SEQ ID NO: 1038700 - DNA, 25 bp, Homo sapien
gaccgtggtgcgcaggatgctcacc

SEQ ID NO: 1038701 - DNA, 25 bp, Homo sapien
actggatgcgggtgtgcgggtagac

SEQ ID NO: 1038702 - DNA, 25 bp, Homo sapien
tcgttaccgcggttctctgtgacca

SEQ ID NO: 1038703 - DNA, 25 bp, Homo sapien
tagacgtaggtcaggttgggctcca

SEQ ID NO: 1038704 - DNA, 25 bp, Homo sapien
ggactggctccgtttgcgctgctcg

SEQ ID NO: 1038705 - DNA, 25 bp, Homo sapien
tcagaggcgatgtgctcatcacaca

SEQ ID NO: 1038706 - DNA, 25 bp, Homo sapien
catcacacatgttccgtagctcgct

SEQ ID NO: 1038707 - DNA, 25 bp, Homo sapien
tagctcgctggatgggtaggacttc

SEQ ID NO: 1038708 - DNA, 25 bp, Homo sapien
ctgttacacaaaaaccagatgctgc

SEQ ID NO: 1038709 - DNA, 25 bp, Homo sapien
ctggtcagggtataggttggggtag

SEQ ID NO: 1038710 - DNA, 25 bp, Homo sapien
atcaggccgtggaaggtcagagggc

SEQ ID NO: 1038711 - DNA, 25 bp, Homo sapien
gtgacaagctgcgaccgaaggatca

SEQ ID NO: 1038712 - DNA, 25 bp, Homo sapien
agggcggaaccgctcctccatggtc

SEQ ID NO: 1038713 - DNA, 25 bp, Homo sapien
taacaaactcctcggacaagcaggg

SEQ ID NO: 1038714 - DNA, 25 bp, Homo sapien
tcctcggccatctcggcataggaga

SEQ ID NO: 1038715 - DNA, 25 bp, Homo sapien
catgcgcgggttgagcagcgtcagg

SEQ ID NO: 1038716 - DNA, 25 bp, Homo sapien
gtagtcctcggccatctcggcatag

SEQ ID NO: 1038717 - DNA, 25 bp, Homo sapien
gtaccgcgggtagtcctcggccatc

SEQ ID NO: 1038718 - DNA, 25 bp, Homo sapien
ggcccatcgttctgaacaggttgaa

SEQ ID NO: 1038719 - DNA, 25 bp, Homo sapien
ccacagcgttcaccacgggcaggtg

SEQ ID NO: 1038720 - DNA, 25 bp, Homo sapien
gaaaggcgaagggttcatgtatggg

SEQ ID NO: 1038721 - DNA, 25 bp, Homo sapien
tgttgggcgagacggtgaaaggcga

SEQ ID NO: 1038722 - DNA, 25 bp, Homo sapien
tgcacggaagccgagcagggttcaa

SEQ ID NO: 1038723 - DNA, 25 bp, Homo sapien
ccagtggtacggagtgaagagcaac

SEQ ID NO: 1038724 - DNA, 25 bp, Homo sapien
tccctacgcaggtggagaaccaagg

SEQ ID NO: 1038725 - DNA, 25 bp, Homo sapien
ggttcaaagctagtgttgggccaca

SEQ ID NO: 1038726 - DNA, 25 bp, Homo sapien
cttcagggtaaaacccgctggcgag

SEQ ID NO: 1038727 - DNA, 25 bp, Homo sapien
caggagccggccctgttagtttgtc

SEQ ID NO: 1038728 - DNA, 25 bp, Homo sapien
ccggccctgttagtttgtcacagaa

SEQ ID NO: 1038729 - DNA, 25 bp, Homo sapien
acccgctggcgagaacaggagtgac

SEQ ID NO: 1038730 - DNA, 25 bp, Homo sapien
ggttgtgccgtgtgatgatccccac

SEQ ID NO: 1038731 - DNA, 25 bp, Homo sapien
taggtgaggttgtgccgtgtgatga

SEQ ID NO: 1038732 - DNA, 25 bp, Homo sapien
tgaggttgtgccgtgtgatgatccc

SEQ ID NO: 1038733 - DNA, 25 bp, Homo sapien
tctggtagtgctgcctcagccgggc

SEQ ID NO: 1038734 - DNA, 25 bp, Homo sapien
caacagccgggttctctaggaaagt

SEQ ID NO: 1038735 - DNA, 25 bp, Homo sapien
gactgggaatcttccatgccccgga

SEQ ID NO: 1038736 - DNA, 25 bp, Homo sapien
cccgccggagtgagcatgatttgcc

SEQ ID NO: 1038737 - DNA, 25 bp, Homo sapien
tctaaggagagtcaaaccacagggc

SEQ ID NO: 1038738 - DNA, 25 bp, Homo sapien
gaagcagccccatctctggagtgga

SEQ ID NO: 1038739 - DNA, 25 bp, Homo sapien
tctctgggctaaactgatgggaaca

SEQ ID NO: 1038740 - DNA, 25 bp, Homo sapien
tttactgaggcgactgatcactggg

SEQ ID NO: 1038741 - DNA, 25 bp, Homo sapien
tattccctagagtgtgctgagcgca

SEQ ID NO: 1038742 - DNA, 25 bp, Homo sapien
ctggagatgaaacacaaaacaccac

SEQ ID NO: 1038743 - DNA, 25 bp, Homo sapien
ggagatgaaacacaaaacaccactt

SEQ ID NO: 1038744 - DNA, 25 bp, Homo sapien
tgaaacacaaaacaccacttcttac

SEQ ID NO: 1038745 - DNA, 25 bp, Homo sapien
gatgaaacacaaaacaccacttctt

SEQ ID NO: 1038746 - DNA, 25 bp, Homo sapien
aaaaaaggaagctgcgactgcggca

SEQ ID NO: 1038747 - DNA, 25 bp, Homo sapien
gccatacagtggactgggtcctgaa

SEQ ID NO: 1038748 - DNA, 25 bp, Homo sapien
ttaatcaaggtcaggagcaaatcat

SEQ ID NO: 1038749 - DNA, 25 bp, Homo sapien
tccgcagagctgtggtgcaatactg

SEQ ID NO: 1038750 - DNA, 25 bp, Homo sapien
gacatcggggcaatctgtgtgtggg

SEQ ID NO: 1038751 - DNA, 25 bp, Homo sapien
agaaacagaatggattccccatccg

SEQ ID NO: 1038752 - DNA, 25 bp, Homo sapien
acagaatggattccccatccgctgc

SEQ ID NO: 1038753 - DNA, 25 bp, Homo sapien
tcacttcttctggttggacatcggg

SEQ ID NO: 1038754 - DNA, 25 bp, Homo sapien
gaactggctgcgaccactgatggaa

SEQ ID NO: 1038755 - DNA, 25 bp, Homo sapien
gcaatggccgatggcaacaacagaa

SEQ ID NO: 1038756 - DNA, 25 bp, Homo sapien
gaggccgctcttcttgcaaaaccaa

SEQ ID NO: 1038757 - DNA, 25 bp, Homo sapien
acagaagctggccacgggtcttcac

SEQ ID NO: 1038758 - DNA, 25 bp, Homo sapien
ccttgtcgttttactctttgtcaga

SEQ ID NO: 1038759 - DNA, 25 bp, Homo sapien
gaattcaggccgatattccttgtcg

SEQ ID NO: 1038760 - DNA, 25 bp, Homo sapien
tgttactgaaagtggtttgaaagtg

SEQ ID NO: 1038761 - DNA, 25 bp, Homo sapien
aagacaaatgcctgcgttggtgtgc

SEQ ID NO: 1038762 - DNA, 25 bp, Homo sapien
ggtttgatggtgacttcctcgcctc

SEQ ID NO: 1038763 - DNA, 25 bp, Homo sapien
tcatcttgttgccatggagttgtga

SEQ ID NO: 1038764 - DNA, 25 bp, Homo sapien
tgcagcttcctgtcaacacttctca

SEQ ID NO: 1038765 - DNA, 25 bp, Homo sapien
ggagttgtgatcatcccatctaagc

SEQ ID NO: 1038766 - DNA, 25 bp, Homo sapien
aaaagatgcctttagaagatgaggt

SEQ ID NO: 1038767 - DNA, 25 bp, Homo sapien
gaagaaaagatgcctttagaagatg

SEQ ID NO: 1038768 - DNA, 25 bp, Homo sapien
gaaaagatgcctttagaagatgagg

SEQ ID NO: 1038769 - DNA, 25 bp, Homo sapien
agaaaagatgcctttagaagatgag

SEQ ID NO: 1038770 - DNA, 25 bp, Homo sapien
tggatttcaaggtagggccaggaaa

SEQ ID NO: 1038771 - DNA, 25 bp, Homo sapien
ctccaagtcagtgaggtttatccct

SEQ ID NO: 1038772 - DNA, 25 bp, Homo sapien
ctgatggatttcaaggtagggccag

SEQ ID NO: 1038773 - DNA, 25 bp, Homo sapien
gctttctgatgctgtgctcactcct

SEQ ID NO: 1038774 - DNA, 25 bp, Homo sapien
tggattgctccttgacgacgccagc

SEQ ID NO: 1038775 - DNA, 25 bp, Homo sapien
gccctgcgggatgataactttaaaa

SEQ ID NO: 1038776 - DNA, 25 bp, Homo sapien
gctataaaaagaggcggcactgggc

SEQ ID NO: 1038777 - DNA, 25 bp, Homo sapien
ggtcagaccagagctaatcccatgt

SEQ ID NO: 1038778 - DNA, 25 bp, Homo sapien
gacttcttacggtccagccggctct

SEQ ID NO: 1038779 - DNA, 25 bp, Homo sapien
aggatccaaggtgccatgtgtttgc

SEQ ID NO: 1038780 - DNA, 25 bp, Homo sapien
tcatgtggatgttctgggacggcca

SEQ ID NO: 1038781 - DNA, 25 bp, Homo sapien
tcctgggacggctctattaataacc

SEQ ID NO: 1038782 - DNA, 25 bp, Homo sapien
gctgccagcttgggggggttgtact

SEQ ID NO: 1038783 - DNA, 25 bp, Homo sapien
gatctcgtccccttggtcttcaggg

SEQ ID NO: 1038784 - DNA, 25 bp, Homo sapien
gagatctcgtccccttggtcttcag

SEQ ID NO: 1038785 - DNA, 25 bp, Homo sapien
actgagatctcgtccccttggtctt

SEQ ID NO: 1038786 - DNA, 25 bp, Homo sapien
cagttggtggtcaacatgcggttgt

SEQ ID NO: 1038787 - DNA, 25 bp, Homo sapien
agttggtggtcaacatgcggttgtc

SEQ ID NO: 1038788 - DNA, 25 bp, Homo sapien
agcagttggtggtcaacatgcggtt

SEQ ID NO: 1038789 - DNA, 25 bp, Homo sapien
gttggtggtcaacatgcggttgtcc

SEQ ID NO: 1038790 - DNA, 25 bp, Homo sapien
ctggggcacgatcagcagccccggg

SEQ ID NO: 1038791 - DNA, 25 bp, Homo sapien
ggggcacgatcagcagccccgggta

SEQ ID NO: 1038792 - DNA, 25 bp, Homo sapien
tggggcacgatcagcagccccgggt

SEQ ID NO: 1038793 - DNA, 25 bp, Homo sapien
gggcacgatcagcagccccgggtag

SEQ ID NO: 1038794 - DNA, 25 bp, Homo sapien
cccactgcagggcattgtcctggac

SEQ ID NO: 1038795 - DNA, 25 bp, Homo sapien
ggggaagcagttctggtagtagcag

SEQ ID NO: 1038796 - DNA, 25 bp, Homo sapien
tctggtagtagcagtgggacaccca

SEQ ID NO: 1038797 - DNA, 25 bp, Homo sapien
tgggacacccactgcagggcattgt

SEQ ID NO: 1038798 - DNA, 25 bp, Homo sapien
gcaggccccagagcgcagcagcact

SEQ ID NO: 1038799 - DNA, 25 bp, Homo sapien
tgcaggccccagagcgcagcagcac

SEQ ID NO: 1038800 - DNA, 25 bp, Homo sapien
cagcagcactgccttggaccacccg

SEQ ID NO: 1038801 - DNA, 25 bp, Homo sapien
agagcgcagcagcactgccttggac

SEQ ID NO: 1038802 - DNA, 25 bp, Homo sapien
gagaaggtgcgttctgggccttgaa

SEQ ID NO: 1038803 - DNA, 25 bp, Homo sapien
cttgaagaggccgaggacacctctg

SEQ ID NO: 1038804 - DNA, 25 bp, Homo sapien
tgggccttgaagaggccgaggacac

SEQ ID NO: 1038805 - DNA, 25 bp, Homo sapien
gccttgaagaggccgaggacacctc

SEQ ID NO: 1038806 - DNA, 25 bp, Homo sapien
acagcctgcaggtacttctcctgct

SEQ ID NO: 1038807 - DNA, 25 bp, Homo sapien
ttctcctgctccaggctactcgagt

SEQ ID NO: 1038808 - DNA, 25 bp, Homo sapien
tcctgctccaggctactcgagtcca

SEQ ID NO: 1038809 - DNA, 25 bp, Homo sapien
cacagcctgcaggtacttctcctgc

SEQ ID NO: 1038810 - DNA, 25 bp, Homo sapien
tgttgcgtcccgacgcgtcggcata

SEQ ID NO: 1038811 - DNA, 25 bp, Homo sapien
gagaagccggtaagcatgttgcgtc

SEQ ID NO: 1038812 - DNA, 25 bp, Homo sapien
catctggagggcaagggcgccatgg

SEQ ID NO: 1038813 - DNA, 25 bp, Homo sapien
ggctgggaatgtgactgcccatgtg

SEQ ID NO: 1038814 - DNA, 25 bp, Homo sapien
cactgctgcgcccgctggtctggac

SEQ ID NO: 1038815 - DNA, 25 bp, Homo sapien
cgcccgctggtctggacactgcccc

SEQ ID NO: 1038816 - DNA, 25 bp, Homo sapien
tgctgcgcccgctggtctggacact

SEQ ID NO: 1038817 - DNA, 25 bp, Homo sapien
gctgcgcccgctggtctggacactg

SEQ ID NO: 1038818 - DNA, 25 bp, Homo sapien
cgcaggaagcccgggtgggcgaggg

SEQ ID NO: 1038819 - DNA, 25 bp, Homo sapien
ccgcaggaagcccgggtgggcgagg

SEQ ID NO: 1038820 - DNA, 25 bp, Homo sapien
gcagccgcaggaagcccgggtgggc

SEQ ID NO: 1038821 - DNA, 25 bp, Homo sapien
agccgcaggaagcccgggtgggcga

SEQ ID NO: 1038822 - DNA, 25 bp, Homo sapien
ctttgttcccgaggatgtagagggc

SEQ ID NO: 1038823 - DNA, 25 bp, Homo sapien
tcccgaggatgtagagggctactcg

SEQ ID NO: 1038824 - DNA, 25 bp, Homo sapien
agctgggctttgttcccgaggatgt

SEQ ID NO: 1038825 - DNA, 25 bp, Homo sapien
ctgggctttgttcccgaggatgtag

SEQ ID NO: 1038826 - DNA, 25 bp, Homo sapien
tgttcctcgaatacctcaatgggca

SEQ ID NO: 1038827 - DNA, 25 bp, Homo sapien
agcacagaggagtctgaatccaggg

SEQ ID NO: 1038828 - DNA, 25 bp, Homo sapien
gggtcagccgctccgagtcctccag

SEQ ID NO: 1038829 - DNA, 25 bp, Homo sapien
actgctgcagggagtctggccgcac

SEQ ID NO: 1038830 - DNA, 25 bp, Homo sapien
caggcggaagctctccagcgtgcaa

SEQ ID NO: 1038831 - DNA, 25 bp, Homo sapien
aggcggaagctctccagcgtgcaat

SEQ ID NO: 1038832 - DNA, 25 bp, Homo sapien
gcaggcggaagctctccagcgtgca

SEQ ID NO: 1038833 - DNA, 25 bp, Homo sapien
tggcaggcggaagctctccagcgtg

SEQ ID NO: 1038834 - DNA, 25 bp, Homo sapien
gaagggatgactgaaggacaaccac

SEQ ID NO: 1038835 - DNA, 25 bp, Homo sapien
gctgaagggatgactgaaggacaac

SEQ ID NO: 1038836 - DNA, 25 bp, Homo sapien
gggatgactgaaggacaaccacttc

SEQ ID NO: 1038837 - DNA, 25 bp, Homo sapien
ccacggtggctgaagggatgactga

SEQ ID NO: 1038838 - DNA, 25 bp, Homo sapien
cggaacggcgggacatatggtggca

SEQ ID NO: 1038839 - DNA, 25 bp, Homo sapien
tccggaacggcgggacatatggtgg

SEQ ID NO: 1038840 - DNA, 25 bp, Homo sapien
ccggaacggcgggacatatggtggc

SEQ ID NO: 1038841 - DNA, 25 bp, Homo sapien
ctcatacagcagccccagctcaatg

SEQ ID NO: 1038842 - DNA, 25 bp, Homo sapien
acacactcccacaaagacctgcaca

SEQ ID NO: 1038843 - DNA, 25 bp, Homo sapien
actcccacaaagacctgcacagcag

SEQ ID NO: 1038844 - DNA, 25 bp, Homo sapien
cccacaaagacctgcacagcagctg

SEQ ID NO: 1038845 - DNA, 25 bp, Homo sapien
acactcccacaaagacctgcacagc

SEQ ID NO: 1038846 - DNA, 25 bp, Homo sapien
gagctctgtgtcctcgggtgcatgc

SEQ ID NO: 1038847 - DNA, 25 bp, Homo sapien
cgggtgcatgcatgtaattgtagaa

SEQ ID NO: 1038848 - DNA, 25 bp, Homo sapien
gggctgcgggagctctgtgtcctcg

SEQ ID NO: 1038849 - DNA, 25 bp, Homo sapien
gctctgtgtcctcgggtgcatgcat

SEQ ID NO: 1038850 - DNA, 25 bp, Homo sapien
atagggagggcccttggccagtatc

SEQ ID NO: 1038851 - DNA, 25 bp, Homo sapien
agggagggcccttggccagtatctc

SEQ ID NO: 1038852 - DNA, 25 bp, Homo sapien
catagggagggcccttggccagtat

SEQ ID NO: 1038853 - DNA, 25 bp, Homo sapien
tagggagggcccttggccagtatct

SEQ ID NO: 1038854 - DNA, 25 bp, Homo sapien
ccacgccacgcggtgcctgcactgg

SEQ ID NO: 1038855 - DNA, 25 bp, Homo sapien
gccacgcggtgcctgcactggggag

SEQ ID NO: 1038856 - DNA, 25 bp, Homo sapien
gcactggggagcacctccgtcagac

SEQ ID NO: 1038857 - DNA, 25 bp, Homo sapien
acgccacgcggtgcctgcactgggg

SEQ ID NO: 1038858 - DNA, 25 bp, Homo sapien
agaagcggtcgagccactactctgg

SEQ ID NO: 1038859 - DNA, 25 bp, Homo sapien
ccagcgggccttccaaggcttcatg

SEQ ID NO: 1038860 - DNA, 25 bp, Homo sapien
tccaaggcttcatgaaggcctcctt

SEQ ID NO: 1038861 - DNA, 25 bp, Homo sapien
ttccaaggcttcatgaaggcctcct

SEQ ID NO: 1038862 - DNA, 25 bp, Homo sapien
gcgggccttccaaggcttcatgaag

SEQ ID NO: 1038863 - DNA, 25 bp, Homo sapien
tcatccatggtcttagggcgtgccc

SEQ ID NO: 1038864 - DNA, 25 bp, Homo sapien
tgggcacagatgttgtaaacgcaaa

SEQ ID NO: 1038865 - DNA, 25 bp, Homo sapien
aacgcaaagtgttgtcttcacgtca

SEQ ID NO: 1038866 - DNA, 25 bp, Homo sapien
ggccaagggcatatcctgggcacag

SEQ ID NO: 1038867 - DNA, 25 bp, Homo sapien
tctgcactgagccagcgcaagggcg

SEQ ID NO: 1038868 - DNA, 25 bp, Homo sapien
caaccgcttcccgtctgcactgagc

SEQ ID NO: 1038869 - DNA, 25 bp, Homo sapien
caagggcgagcggacagagcctcat

SEQ ID NO: 1038870 - DNA, 25 bp, Homo sapien
ctgcagaatgctggaactggctcca

SEQ ID NO: 1038871 - DNA, 25 bp, Homo sapien
atgggaccgcccaatggccggtggg

SEQ ID NO: 1038872 - DNA, 25 bp, Homo sapien
ggaccgcccaatggccggtgggcat

SEQ ID NO: 1038873 - DNA, 25 bp, Homo sapien
cccaatggccggtgggcatgggcac

SEQ ID NO: 1038874 - DNA, 25 bp, Homo sapien
cgcatgggaccgcccaatggccggt

SEQ ID NO: 1038875 - DNA, 25 bp, Homo sapien
ctggtggcacctttagagggctttt

SEQ ID NO: 1038876 - DNA, 25 bp, Homo sapien
atgcgacccgcggagccaacctgga

SEQ ID NO: 1038877 - DNA, 25 bp, Homo sapien
atctcagcccgggcagttcccttgg

SEQ ID NO: 1038878 - DNA, 25 bp, Homo sapien
gctccgtagctccactagttcctgg

SEQ ID NO: 1038879 - DNA, 25 bp, Homo sapien
agcacttggcaggtgatgcgacccg

SEQ ID NO: 1038880 - DNA, 25 bp, Homo sapien
ttgagaggccagacgccctcatctt

SEQ ID NO: 1038881 - DNA, 25 bp, Homo sapien
ccagcccgcctgcaaccgcatctgg

SEQ ID NO: 1038882 - DNA, 25 bp, Homo sapien
gtgtcagcccacgacatcccagggg

SEQ ID NO: 1038883 - DNA, 25 bp, Homo sapien
ccttgagaggccagacgccctcatc

SEQ ID NO: 1038884 - DNA, 25 bp, Homo sapien
aaattggtttcagactcacactcgt

SEQ ID NO: 1038885 - DNA, 25 bp, Homo sapien
aagccctgctaagaaacgcaaggcc

SEQ ID NO: 1038886 - DNA, 25 bp, Homo sapien
gctaagaaacgcaaggcctcaaaaa

SEQ ID NO: 1038887 - DNA, 25 bp, Homo sapien
ggtttcagactcacactcgtttctc

SEQ ID NO: 1038888 - DNA, 25 bp, Homo sapien
aaccgtaactcgcatttgttctata

SEQ ID NO: 1038889 - DNA, 25 bp, Homo sapien
gctccacacgcgatttaacggaatc

SEQ ID NO: 1038890 - DNA, 25 bp, Homo sapien
tacatagctccacacgcgatttaac

SEQ ID NO: 1038891 - DNA, 25 bp, Homo sapien
taacggaatcgcatctgtttttaaa

SEQ ID NO: 1038892 - DNA, 25 bp, Homo sapien
agaatctgatgccttgctgccctga

SEQ ID NO: 1038893 - DNA, 25 bp, Homo sapien
aatgctcgcttgtgagtcggtaacc

SEQ ID NO: 1038894 - DNA, 25 bp, Homo sapien
caggcggacctcaggcgttaatgct

SEQ ID NO: 1038895 - DNA, 25 bp, Homo sapien
tggtgtaatcaaccaacaaacccta

SEQ ID NO: 1038896 - DNA, 25 bp, Homo sapien
tattactctttgttgtataaccaag

SEQ ID NO: 1038897 - DNA, 25 bp, Homo sapien
ccggcgggtatagggacaggggctg

SEQ ID NO: 1038898 - DNA, 25 bp, Homo sapien
ctctgtcacacctgcatcagggccg

SEQ ID NO: 1038899 - DNA, 25 bp, Homo sapien
tactctttgttgtataaccaaggaa

SEQ ID NO: 1038900 - DNA, 25 bp, Homo sapien
ctaattaggataggctggccaggcc

SEQ ID NO: 1038901 - DNA, 25 bp, Homo sapien
cagacactaatcagagaggagcagc

SEQ ID NO: 1038902 - DNA, 25 bp, Homo sapien
tgttcctacccaaaaagctgaggct

SEQ ID NO: 1038903 - DNA, 25 bp, Homo sapien
tagatgttggcagcgcagtacagac

SEQ ID NO: 1038904 - DNA, 25 bp, Homo sapien
gagattttgctagatggcttttgca

SEQ ID NO: 1038905 - DNA, 25 bp, Homo sapien
gttgtgctgtcatcctcgggtttgc

SEQ ID NO: 1038906 - DNA, 25 bp, Homo sapien
tgatgtccatctcggcgttcggagg

SEQ ID NO: 1038907 - DNA, 25 bp, Homo sapien
ttttgcatcccctgtagatggtgag

SEQ ID NO: 1038908 - DNA, 25 bp, Homo sapien
gcaagggatcctttggaagcacccg

SEQ ID NO: 1038909 - DNA, 25 bp, Homo sapien
tgtgaattgaacaggaagatcccag

SEQ ID NO: 1038910 - DNA, 25 bp, Homo sapien
tgagtccgtggtaattctgcaaggc

SEQ ID NO: 1038911 - DNA, 25 bp, Homo sapien
cctatttctatagctggccactggg

SEQ ID NO: 1038912 - DNA, 25 bp, Homo sapien
cctgagacatgtttgcccctggaag

SEQ ID NO: 1038913 - DNA, 25 bp, Homo sapien
gattttggccatcattgctgcaaga

SEQ ID NO: 1038914 - DNA, 25 bp, Homo sapien
ggccatctcgttagcataggacaca

SEQ ID NO: 1038915 - DNA, 25 bp, Homo sapien
taactgcaacaagcccctagattga

SEQ ID NO: 1038916 - DNA, 25 bp, Homo sapien
ggtgaaaccagcaggtggatcccct

SEQ ID NO: 1038917 - DNA, 25 bp, Homo sapien
cagacgtgggcttcttgacataacc

SEQ ID NO: 1038918 - DNA, 25 bp, Homo sapien
gattctttgctcagcaccgcagtcg

SEQ ID NO: 1038919 - DNA, 25 bp, Homo sapien
cataacccctgctaggctgaggtgc

SEQ ID NO: 1038920 - DNA, 25 bp, Homo sapien
tggccgccaagaagctggtgaaccg

SEQ ID NO: 1038921 - DNA, 25 bp, Homo sapien
gcaagaggactttctggcgcacagg

SEQ ID NO: 1038922 - DNA, 25 bp, Homo sapien
taccctggagaaggtcggagaccat

SEQ ID NO: 1038923 - DNA, 25 bp, Homo sapien
tacgcccactgggttggtgcacctg

SEQ ID NO: 1038924 - DNA, 25 bp, Homo sapien
tagcgcacttagagcagccccaggt

SEQ ID NO: 1038925 - DNA, 25 bp, Homo sapien
tttcatgatttcattagtccttccc

SEQ ID NO: 1038926 - DNA, 25 bp, Homo sapien
ctgtagcgcacttagagcagcccca

SEQ ID NO: 1038927 - DNA, 25 bp, Homo sapien
tgatttcattagtccttcccaaaac

SEQ ID NO: 1038928 - DNA, 25 bp, Homo sapien
cgcaggtcccgctgccacgcactgg

SEQ ID NO: 1038929 - DNA, 25 bp, Homo sapien
cgaggtatgggggacgatcggccga

SEQ ID NO: 1038930 - DNA, 25 bp, Homo sapien
ctcgcagggctggaaacttcgcgac

SEQ ID NO: 1038931 - DNA, 25 bp, Homo sapien
tcgcagggctggaaacttcgcgacg

SEQ ID NO: 1038932 - DNA, 25 bp, Homo sapien
ttggcgtcgcccttcgcttcggcca

SEQ ID NO: 1038933 - DNA, 25 bp, Homo sapien
ggcttggcgtcgcccttcgcttcgg

SEQ ID NO: 1038934 - DNA, 25 bp, Homo sapien
cggcttggcgtcgcccttcgcttcg

SEQ ID NO: 1038935 - DNA, 25 bp, Homo sapien
ggcgtcgcccttcgcttcggccagc

SEQ ID NO: 1038936 - DNA, 25 bp, Homo sapien
gcagtctatgcccttctcgggacag

SEQ ID NO: 1038937 - DNA, 25 bp, Homo sapien
cttctcgggacagccctggagatgg

SEQ ID NO: 1038938 - DNA, 25 bp, Homo sapien
ttgctgggactgtccgcagtctatg

SEQ ID NO: 1038939 - DNA, 25 bp, Homo sapien
ctggagatggcccatgccagggagg

SEQ ID NO: 1038940 - DNA, 25 bp, Homo sapien
cccgggatccttctggtgatacagt

SEQ ID NO: 1038941 - DNA, 25 bp, Homo sapien
gggatccttctggtgatacagtttc

SEQ ID NO: 1038942 - DNA, 25 bp, Homo sapien
caaagaacccgggatccttctggtg

SEQ ID NO: 1038943 - DNA, 25 bp, Homo sapien
gaacccgggatccttctggtgatac

SEQ ID NO: 1038944 - DNA, 25 bp, Homo sapien
ggcagctgcggtttctctcctggga

SEQ ID NO: 1038945 - DNA, 25 bp, Homo sapien
cagctgcggtttctctcctgggatg

SEQ ID NO: 1038946 - DNA, 25 bp, Homo sapien
atcatgggcagctgcggtttctctc

SEQ ID NO: 1038947 - DNA, 25 bp, Homo sapien
atgggcagctgcggtttctctcctg

SEQ ID NO: 1038948 - DNA, 25 bp, Homo sapien
ctgggatccagaaacgagggatgct

SEQ ID NO: 1038949 - DNA, 25 bp, Homo sapien
cctgccaggacggtgaagtctctcc

SEQ ID NO: 1038950 - DNA, 25 bp, Homo sapien
ggatccagaaacgagggatgctgct

SEQ ID NO: 1038951 - DNA, 25 bp, Homo sapien
ccaggacggtgaagtctctccccag

SEQ ID NO: 1038952 - DNA, 25 bp, Homo sapien
cggtctccttagtggccaccgtgag

SEQ ID NO: 1038953 - DNA, 25 bp, Homo sapien
ttgaagcgacggaatccctcggtct

SEQ ID NO: 1038954 - DNA, 25 bp, Homo sapien
agctgagcgcttgaagcgacggaat

SEQ ID NO: 1038955 - DNA, 25 bp, Homo sapien
gaatccctcggtctccttagtggcc

SEQ ID NO: 1038956 - DNA, 25 bp, Homo sapien
tgccctccacctgccgacgtcccct

SEQ ID NO: 1038957 - DNA, 25 bp, Homo sapien
cattccagtcctcccctaggccaag

SEQ ID NO: 1038958 - DNA, 25 bp, Homo sapien
acattccagtcctcccctaggccaa

SEQ ID NO: 1038959 - DNA, 25 bp, Homo sapien
ccacattccagtcctcccctaggcc

SEQ ID NO: 1038960 - DNA, 25 bp, Homo sapien
tgaccagatcctccttgtctgcgtg

SEQ ID NO: 1038961 - DNA, 25 bp, Homo sapien
cagatcctccttgtctgcgtgcttc

SEQ ID NO: 1038962 - DNA, 25 bp, Homo sapien
gaagagaatgaccagatcctccttg

SEQ ID NO: 1038963 - DNA, 25 bp, Homo sapien
ctgtctgcgaagagaatgaccagat

SEQ ID NO: 1038964 - DNA, 25 bp, Homo sapien
tggctcctggcctgccggaacttct

SEQ ID NO: 1038965 - DNA, 25 bp, Homo sapien
gacaccaccggatacttggtctcca

SEQ ID NO: 1038966 - DNA, 25 bp, Homo sapien
cctgcggtctgggtagatgagctcc

SEQ ID NO: 1038967 - DNA, 25 bp, Homo sapien
gccccgatgcaaacagcacgtcata

SEQ ID NO: 1038968 - DNA, 25 bp, Homo sapien
tgagttcctaatgaccccaagaata

SEQ ID NO: 1038969 - DNA, 25 bp, Homo sapien
gaagaaacggattgtacgaggagcc

SEQ ID NO: 1038970 - DNA, 25 bp, Homo sapien
caatggtgcccactaagctgtactg

SEQ ID NO: 1038971 - DNA, 25 bp, Homo sapien
agaagtcctcctgaattgacaggag

SEQ ID NO: 1038972 - DNA, 25 bp, Homo sapien
aaaacagctgatcgctgtcgctgtc

SEQ ID NO: 1038973 - DNA, 25 bp, Homo sapien
gtgtaaaacagctgatcgctgtcgc

SEQ ID NO: 1038974 - DNA, 25 bp, Homo sapien
ctcccactcggccaccagtttgctg

SEQ ID NO: 1038975 - DNA, 25 bp, Homo sapien
acagctgatcgctgtcgctgtcctg

SEQ ID NO: 1038976 - DNA, 25 bp, Homo sapien
tacacgcacatagctactccaaata

SEQ ID NO: 1038977 - DNA, 25 bp, Homo sapien
ctacaacaatgacggccgttaagag

SEQ ID NO: 1038978 - DNA, 25 bp, Homo sapien
ttaagagtaaccagcacctgccaag

SEQ ID NO: 1038979 - DNA, 25 bp, Homo sapien
caagcactccactacacgcacatag

SEQ ID NO: 1038980 - DNA, 25 bp, Homo sapien
cagtctagtggctctactcacagaa

SEQ ID NO: 1038981 - DNA, 25 bp, Homo sapien
ccacgtcacatcagggcagctaggt

SEQ ID NO: 1038982 - DNA, 25 bp, Homo sapien
caggaaagaaggtaccagactgcag

SEQ ID NO: 1038983 - DNA, 25 bp, Homo sapien
cagggactctgaactggaaggaatc

SEQ ID NO: 1038984 - DNA, 25 bp, Homo sapien
ggtccagggtgatattgatctgctc

SEQ ID NO: 1038985 - DNA, 25 bp, Homo sapien
ggttctggaagatacggcagcggtg

SEQ ID NO: 1038986 - DNA, 25 bp, Homo sapien
gtggtccagggtgatattgatctgc

SEQ ID NO: 1038987 - DNA, 25 bp, Homo sapien
ggaagatacggcagcggtggtccag

SEQ ID NO: 1038988 - DNA, 25 bp, Homo sapien
tcgctctcacatggcccatttcaaa

SEQ ID NO: 1038989 - DNA, 25 bp, Homo sapien
ccgttgccatggatcaggaccggga

SEQ ID NO: 1038990 - DNA, 25 bp, Homo sapien
atttcaaacttgagcacgacctcat

SEQ ID NO: 1038991 - DNA, 25 bp, Homo sapien
aggaccgggagggtgtcataggcca

SEQ ID NO: 1038992 - DNA, 25 bp, Homo sapien
aggcatcacgctgagctcagatgtg

SEQ ID NO: 1038993 - DNA, 25 bp, Homo sapien
aaagaaggcatcacgctgagctcag

SEQ ID NO: 1038994 - DNA, 25 bp, Homo sapien
aggaaaagaaggcatcacgctgagc

SEQ ID NO: 1038995 - DNA, 25 bp, Homo sapien
agaggcagtgagttcatagcaggcc

SEQ ID NO: 1038996 - DNA, 25 bp, Homo sapien
acacacggtgcagcctgtttcgaag

SEQ ID NO: 1038997 - DNA, 25 bp, Homo sapien
tcgaaggtccagaagcgcgggatgt

SEQ ID NO: 1038998 - DNA, 25 bp, Homo sapien
cagaagcgcgggatgtagttgccca

SEQ ID NO: 1038999 - DNA, 25 bp, Homo sapien
tgcgcaagccttcgtcacacacggt

SEQ ID NO: 1039000 - DNA, 25 bp, Homo sapien
ccgcaggagccgctggaagaacagg

SEQ ID NO: 1039001 - DNA, 25 bp, Homo sapien
ctgttcgatgaacacgccgaccagg

SEQ ID NO: 1039002 - DNA, 25 bp, Homo sapien
gacacaaacggcgtgggctgttcga

SEQ ID NO: 1039003 - DNA, 25 bp, Homo sapien
ccgaccaggaccgtgggcagagctt

SEQ ID NO: 1039004 - DNA, 25 bp, Homo sapien
tgttcctggcatctgcattcgccat

SEQ ID NO: 1039005 - DNA, 25 bp, Homo sapien
gtactcgctgccatgctgtgccagg

SEQ ID NO: 1039006 - DNA, 25 bp, Homo sapien
tgcattcgccatccgcacctcaggg

SEQ ID NO: 1039007 - DNA, 25 bp, Homo sapien
actggtactcgctgccatgctgtgc

SEQ ID NO: 1039008 - DNA, 25 bp, Homo sapien
caggctgttgggctcggtcagggcc

SEQ ID NO: 1039009 - DNA, 25 bp, Homo sapien
tgaagtagtaggtgcagctgcggtc

SEQ ID NO: 1039010 - DNA, 25 bp, Homo sapien
tgttggatcagcagccgcaggctgt

SEQ ID NO: 1039011 - DNA, 25 bp, Homo sapien
ggctcggtcagggccacgtcagcat

SEQ ID NO: 1039012 - DNA, 25 bp, Homo sapien
gagcacctcagtaggaggtcgctgc

SEQ ID NO: 1039013 - DNA, 25 bp, Homo sapien
aagggagcacctcagtaggaggtcg

SEQ ID NO: 1039014 - DNA, 25 bp, Homo sapien
cacctcagtaggaggtcgctgccca

SEQ ID NO: 1039015 - DNA, 25 bp, Homo sapien
gagggaagggagcacctcagtagga

SEQ ID NO: 1039016 - DNA, 25 bp, Homo sapien
ccatgccgggtcatcagcggggcaa

SEQ ID NO: 1039017 - DNA, 25 bp, Homo sapien
agaagttcgaccacagcctcccatg

SEQ ID NO: 1039018 - DNA, 25 bp, Homo sapien
tagtcctcggaacgggcatagtagc

SEQ ID NO: 1039019 - DNA, 25 bp, Homo sapien
atctgcactgagagccccccagaag

SEQ ID NO: 1039020 - DNA, 25 bp, Homo sapien
tggtggaagagatctgaggactgca

SEQ ID NO: 1039021 - DNA, 25 bp, Homo sapien
gcacagaaggccatgtcggggtcca

SEQ ID NO: 1039022 - DNA, 25 bp, Homo sapien
gcccttgatcaagtagatgtttgaa

SEQ ID NO: 1039023 - DNA, 25 bp, Homo sapien
agggcactgcccttgatcaagtaga

SEQ ID NO: 1039024 - DNA, 25 bp, Homo sapien
ctgccccatccagagggcgtcctgt

SEQ ID NO: 1039025 - DNA, 25 bp, Homo sapien
tgccccatccagagggcgtcctgtg

SEQ ID NO: 1039026 - DNA, 25 bp, Homo sapien
gccccatccagagggcgtcctgtgc

SEQ ID NO: 1039027 - DNA, 25 bp, Homo sapien
ccccatccagagggcgtcctgtgct

SEQ ID NO: 1039028 - DNA, 25 bp, Homo sapien
ttccgagatgccctgctagaatctc

SEQ ID NO: 1039029 - DNA, 25 bp, Homo sapien
cgagatgccctgctagaatctctgg

SEQ ID NO: 1039030 - DNA, 25 bp, Homo sapien
agatgccctgctagaatctctggag

SEQ ID NO: 1039031 - DNA, 25 bp, Homo sapien
aggaccagccctcgtgcccgacggc

SEQ ID NO: 1039032 - DNA, 25 bp, Homo sapien
gggttgctgaacacctcccagaggt

SEQ ID NO: 1039033 - DNA, 25 bp, Homo sapien
ctgtctagggagagcagatggccaa

SEQ ID NO: 1039034 - DNA, 25 bp, Homo sapien
cctcccagaggtcgttgtgcaggtg

SEQ ID NO: 1039035 - DNA, 25 bp, Homo sapien
tgtgccggttggtcaggaacatgaa

SEQ ID NO: 1039036 - DNA, 25 bp, Homo sapien
gtgtagttctggtggatgtacttct

SEQ ID NO: 1039037 - DNA, 25 bp, Homo sapien
ggtgtagttctggtggatgtacttc

SEQ ID NO: 1039038 - DNA, 25 bp, Homo sapien
ctttggtgtagttctggtggatgta

SEQ ID NO: 1039039 - DNA, 25 bp, Homo sapien
ttggtgtagttctggtggatgtact

SEQ ID NO: 1039040 - DNA, 25 bp, Homo sapien
caggcaaggctggtccaagagggtg

SEQ ID NO: 1039041 - DNA, 25 bp, Homo sapien
agcaggcaaggctggtccaagaggg

SEQ ID NO: 1039042 - DNA, 25 bp, Homo sapien
aaggctggtccaagagggtgtccat

SEQ ID NO: 1039043 - DNA, 25 bp, Homo sapien
ggcaaggctggtccaagagggtgtc

SEQ ID NO: 1039044 - DNA, 25 bp, Homo sapien
ggaaccaatagacatccgggcaggg

SEQ ID NO: 1039045 - DNA, 25 bp, Homo sapien
cctccgtgaagatggggaaccaata

SEQ ID NO: 1039046 - DNA, 25 bp, Homo sapien
tcatcacaggccacctccgtgaaga

SEQ ID NO: 1039047 - DNA, 25 bp, Homo sapien
ccagagaccactggccaaagtgctc

SEQ ID NO: 1039048 - DNA, 25 bp, Homo sapien
ttctcgtagccaccctggatgcggt

SEQ ID NO: 1039049 - DNA, 25 bp, Homo sapien
gagcttctccgtcatgggcgcaatg

SEQ ID NO: 1039050 - DNA, 25 bp, Homo sapien
gggcgcaatgtactccagcaggaat

SEQ ID NO: 1039051 - DNA, 25 bp, Homo sapien
gatgtcaatagtcggcacgttctcg

SEQ ID NO: 1039052 - DNA, 25 bp, Homo sapien
cacgccatgggcaggtatctggaga

SEQ ID NO: 1039053 - DNA, 25 bp, Homo sapien
ttgtgagaattaaccgaggccagcc

SEQ ID NO: 1039054 - DNA, 25 bp, Homo sapien
gaaggaggccggacatggtactcac

SEQ ID NO: 1039055 - DNA, 25 bp, Homo sapien
gaggccagccaggtaattgtttccg

SEQ ID NO: 1039056 - DNA, 25 bp, Homo sapien
caccccgactcggttcagggcgatg

SEQ ID NO: 1039057 - DNA, 25 bp, Homo sapien
cagggcgatgttgatggtgaaggtg

SEQ ID NO: 1039058 - DNA, 25 bp, Homo sapien
tgctcatcaggcttgtagcggacga

SEQ ID NO: 1039059 - DNA, 25 bp, Homo sapien
ctgctcatcaggcttgtagcggacg

SEQ ID NO: 1039060 - DNA, 25 bp, Homo sapien
tggaacagttgtagcgcaggaaccg

SEQ ID NO: 1039061 - DNA, 25 bp, Homo sapien
taatgcgtgagtcgtccagggtgca

SEQ ID NO: 1039062 - DNA, 25 bp, Homo sapien
agactgcgatgtagcgggtgcccct

SEQ ID NO: 1039063 - DNA, 25 bp, Homo sapien
ccagggtgcatgagggtccagccct

SEQ ID NO: 1039064 - DNA, 25 bp, Homo sapien
gagccccagccataaaggtgtgttc

SEQ ID NO: 1039065 - DNA, 25 bp, Homo sapien
caggttggagagcacgagtcactac

SEQ ID NO: 1039066 - DNA, 25 bp, Homo sapien
gaagtccctggtgcaacacctgtgc

SEQ ID NO: 1039067 - DNA, 25 bp, Homo sapien
tgatccaggtgtctttaccccaaaa

SEQ ID NO: 1039068 - DNA, 25 bp, Homo sapien
tccagtttctgacggtctgtccctc

SEQ ID NO: 1039069 - DNA, 25 bp, Homo sapien
tgtggtgtgtggacctgtcactccc

SEQ ID NO: 1039070 - DNA, 25 bp, Homo sapien
gactacggtttgctctcatgaccag

SEQ ID NO: 1039071 - DNA, 25 bp, Homo sapien
tccccacaggcaagtagaagatcga

SEQ ID NO: 1039072 - DNA, 25 bp, Homo sapien
gcgcgtcaccagtcgcctcagattg

SEQ ID NO: 1039073 - DNA, 25 bp, Homo sapien
agggaagtggataagcgcgtcacca

SEQ ID NO: 1039074 - DNA, 25 bp, Homo sapien
atcacactcactacgtcaccagcga

SEQ ID NO: 1039075 - DNA, 25 bp, Homo sapien
tcagattgcccctcgacccgggtga

SEQ ID NO: 1039076 - DNA, 25 bp, Homo sapien
ggaccccgcttgactgcatcccaga

SEQ ID NO: 1039077 - DNA, 25 bp, Homo sapien
gtggggaccccgcttgactgcatcc

SEQ ID NO: 1039078 - DNA, 25 bp, Homo sapien
gccgagctgctcaggactcgccggg

SEQ ID NO: 1039079 - DNA, 25 bp, Homo sapien
gtggccccagaatcccgtcggccca

SEQ ID NO: 1039080 - DNA, 25 bp, Homo sapien
tattggggagttgcgctggcatgtg

SEQ ID NO: 1039081 - DNA, 25 bp, Homo sapien
ttgcgctggcatgtgaggaagtgcc

SEQ ID NO: 1039082 - DNA, 25 bp, Homo sapien
cattgaggtattggggagttgcgct

SEQ ID NO: 1039083 - DNA, 25 bp, Homo sapien
gggagttgcgctggcatgtgaggaa

SEQ ID NO: 1039084 - DNA, 25 bp, Homo sapien
tgattgactgtgttgactccaccag

SEQ ID NO: 1039085 - DNA, 25 bp, Homo sapien
caggttgaggttggctattgattga

SEQ ID NO: 1039086 - DNA, 25 bp, Homo sapien
tttggatggtgagagatcttcacag

SEQ ID NO: 1039087 - DNA, 25 bp, Homo sapien
cagggtaggcatcatggacatggct

SEQ ID NO: 1039088 - DNA, 25 bp, Homo sapien
aaataaaatggatccacggatcgtc

SEQ ID NO: 1039089 - DNA, 25 bp, Homo sapien
gatccacggatcgtctgctggcaca

SEQ ID NO: 1039090 - DNA, 25 bp, Homo sapien
tacagcaactcctagcagggaaaat

SEQ ID NO: 1039091 - DNA, 25 bp, Homo sapien
ccagtgttatgtacagcaactccta

SEQ ID NO: 1039092 - DNA, 25 bp, Homo sapien
tagagttgcatcgagagaagagcag

SEQ ID NO: 1039093 - DNA, 25 bp, Homo sapien
tatttttcttgactgtgacgataga

SEQ ID NO: 1039094 - DNA, 25 bp, Homo sapien
ttaagtggggatgcattcacctcag

SEQ ID NO: 1039095 - DNA, 25 bp, Homo sapien
attgatcttcttcttggcagtgaca

SEQ ID NO: 1039096 - DNA, 25 bp, Homo sapien
aggaaggtggcgctctcctggatgt

SEQ ID NO: 1039097 - DNA, 25 bp, Homo sapien
cttcaaggaaggtggcgctctcctg

SEQ ID NO: 1039098 - DNA, 25 bp, Homo sapien
gaaggtggcgctctcctggatgtag

SEQ ID NO: 1039099 - DNA, 25 bp, Homo sapien
caaggaaggtggcgctctcctggat

SEQ ID NO: 1039100 - DNA, 25 bp, Homo sapien
gctacgtgagcagacctttggatca

SEQ ID NO: 1039101 - DNA, 25 bp, Homo sapien
tcatgagggccacactatctgaccc

SEQ ID NO: 1039102 - DNA, 25 bp, Homo sapien
ggtaactgtacagctcacctgtctg

SEQ ID NO: 1039103 - DNA, 25 bp, Homo sapien
gtctagaactcgcaccagacaggtg

SEQ ID NO: 1039104 - DNA, 25 bp, Homo sapien
tcaggagcaacactgcctggttctg

SEQ ID NO: 1039105 - DNA, 25 bp, Homo sapien
tggttaagaagatggctcaggagca

SEQ ID NO: 1039106 - DNA, 25 bp, Homo sapien
gaagctggttcttaccactttctag

SEQ ID NO: 1039107 - DNA, 25 bp, Homo sapien
gatcctctatggtggccccacggtg

SEQ ID NO: 1039108 - DNA, 25 bp, Homo sapien
aaatgggtcaccacgtggtcagagg

SEQ ID NO: 1039109 - DNA, 25 bp, Homo sapien
ggtggggattgaaaatgggtcacca

SEQ ID NO: 1039110 - DNA, 25 bp, Homo sapien
gaggtggggattgaaaatgggtcac

SEQ ID NO: 1039111 - DNA, 25 bp, Homo sapien
caccacgtggtcagaggagttccac

SEQ ID NO: 1039112 - DNA, 25 bp, Homo sapien
ttgacgtccagaacctgttcttctg

SEQ ID NO: 1039113 - DNA, 25 bp, Homo sapien
actttcatgtgcctccgagccagca

SEQ ID NO: 1039114 - DNA, 25 bp, Homo sapien
tgttcttctgtggtaacggggtcca

SEQ ID NO: 1039115 - DNA, 25 bp, Homo sapien
ctctcactttggataggtaaccttt

SEQ ID NO: 1039116 - DNA, 25 bp, Homo sapien
tgatggctagctttgtttaatgtct

SEQ ID NO: 1039117 - DNA, 25 bp, Homo sapien
ttgagatgatggctagctttgttta

SEQ ID NO: 1039118 - DNA, 25 bp, Homo sapien
ggcagaactttgtcccagagcatgg

SEQ ID NO: 1039119 - DNA, 25 bp, Homo sapien
agcaattggtggtgtggccaatccc

SEQ ID NO: 1039120 - DNA, 25 bp, Homo sapien
tgagccctcggtaaggagaaaggcc

SEQ ID NO: 1039121 - DNA, 25 bp, Homo sapien
cagagcatggcattgatcacggtgc

SEQ ID NO: 1039122 - DNA, 25 bp, Homo sapien
tcatccttcagaagtgggcacttag

SEQ ID NO: 1039123 - DNA, 25 bp, Homo sapien
acactcactaggctgccggcatgga

SEQ ID NO: 1039124 - DNA, 25 bp, Homo sapien
gttgggccacatcacactcactagg

SEQ ID NO: 1039125 - DNA, 25 bp, Homo sapien
gggcatgggccagctggttcacagt

SEQ ID NO: 1039126 - DNA, 25 bp, Homo sapien
ggtatagtaaccagactccagagga

SEQ ID NO: 1039127 - DNA, 25 bp, Homo sapien
tatcttttacagaccatccctggga

SEQ ID NO: 1039128 - DNA, 25 bp, Homo sapien
tggttgagcccatctgaaaggtagt

SEQ ID NO: 1039129 - DNA, 25 bp, Homo sapien
tccagtttggacctcctaggagggc

SEQ ID NO: 1039130 - DNA, 25 bp, Homo sapien
ctctgtggtgacatcaataccaggg

SEQ ID NO: 1039131 - DNA, 25 bp, Homo sapien
ctgcatcagggtggactctgagttg

SEQ ID NO: 1039132 - DNA, 25 bp, Homo sapien
agctctgtggtgacatcaataccag

SEQ ID NO: 1039133 - DNA, 25 bp, Homo sapien
tcagggtggactctgagttggccac

SEQ ID NO: 1039134 - DNA, 25 bp, Homo sapien
ggagagacgctcactcaccttgtgg

SEQ ID NO: 1039135 - DNA, 25 bp, Homo sapien
gaggcagatgcatcccagcggttgt

SEQ ID NO: 1039136 - DNA, 25 bp, Homo sapien
tcccagcggttgttcaggatgaaga

SEQ ID NO: 1039137 - DNA, 25 bp, Homo sapien
catgtactcgggctctgaggcagat

SEQ ID NO: 1039138 - DNA, 25 bp, Homo sapien
tccctagagctgagcctgttctgta

SEQ ID NO: 1039139 - DNA, 25 bp, Homo sapien
gcagcagggatcctttttaggccta

SEQ ID NO: 1039140 - DNA, 25 bp, Homo sapien
gaaagaccaccagaagataccacag

SEQ ID NO: 1039141 - DNA, 25 bp, Homo sapien
taattcagggaagtcactagatcca

SEQ ID NO: 1039142 - DNA, 25 bp, Homo sapien
tctgaatcctggcgttgagcacctc

SEQ ID NO: 1039143 - DNA, 25 bp, Homo sapien
ggtccccggcctgggatcgatccac

SEQ ID NO: 1039144 - DNA, 25 bp, Homo sapien
tggtacaacgctccatgtgctgccg

SEQ ID NO: 1039145 - DNA, 25 bp, Homo sapien
gttgagcacctccttagcagacaca

SEQ ID NO: 1039146 - DNA, 25 bp, Homo sapien
ttctgaaactcaaacatcctcactt

SEQ ID NO: 1039147 - DNA, 25 bp, Homo sapien
tctcaaaattctgaaactcaaacat

SEQ ID NO: 1039148 - DNA, 25 bp, Homo sapien
ctcctctcaaaattctgaaactcaa

SEQ ID NO: 1039149 - DNA, 25 bp, Homo sapien
aaattctgaaactcaaacatcctca

SEQ ID NO: 1039150 - DNA, 25 bp, Homo sapien
ccaggggcctacaaccaagggccag

SEQ ID NO: 1039151 - DNA, 25 bp, Homo sapien
ggcctacaaccaagggccagactct

SEQ ID NO: 1039152 - DNA, 25 bp, Homo sapien
gactctggttttcactgccagggac

SEQ ID NO: 1039153 - DNA, 25 bp, Homo sapien
agggccagactctggttttcactgc

SEQ ID NO: 1039154 - DNA, 25 bp, Homo sapien
tcccgagccgccatgtgcagggagt

SEQ ID NO: 1039155 - DNA, 25 bp, Homo sapien
gcagggagtccatgatgagtcgaac

SEQ ID NO: 1039156 - DNA, 25 bp, Homo sapien
gtcgaaccgcctctgcaatctgctt

SEQ ID NO: 1039157 - DNA, 25 bp, Homo sapien
cccggaccgtgtgctgctcaaactt

SEQ ID NO: 1039158 - DNA, 25 bp, Homo sapien
tgaaagcagagtactggtgagaaat

SEQ ID NO: 1039159 - DNA, 25 bp, Homo sapien
ctgaaagcagagtactggtgagaaa

SEQ ID NO: 1039160 - DNA, 25 bp, Homo sapien
aaagcagagtactggtgagaaatcc

SEQ ID NO: 1039161 - DNA, 25 bp, Homo sapien
gaaagcagagtactggtgagaaatc

SEQ ID NO: 1039162 - DNA, 25 bp, Homo sapien
ttcacgcatttcctcgcagtaaacc

SEQ ID NO: 1039163 - DNA, 25 bp, Homo sapien
aataaatttcagtcggtcttgccgc

SEQ ID NO: 1039164 - DNA, 25 bp, Homo sapien
tagtcttgagccaagagctccagct

SEQ ID NO: 1039165 - DNA, 25 bp, Homo sapien
tcctccgtaatctgcttaattcgca

SEQ ID NO: 1039166 - DNA, 25 bp, Homo sapien
ggtggaagtccatctggtaatcgtc

SEQ ID NO: 1039167 - DNA, 25 bp, Homo sapien
gatctcctcggccattgcagtcgac

SEQ ID NO: 1039168 - DNA, 25 bp, Homo sapien
accagtacagagaggcgcctgatct

SEQ ID NO: 1039169 - DNA, 25 bp, Homo sapien
taatcgtccaccagtacagagaggc

SEQ ID NO: 1039170 - DNA, 25 bp, Homo sapien
agcagcggtcagacatgtttcgacc

SEQ ID NO: 1039171 - DNA, 25 bp, Homo sapien
tggtgatggccgtggagcagcggtc

SEQ ID NO: 1039172 - DNA, 25 bp, Homo sapien
cttcctctatgtggcggtgcagctc

SEQ ID NO: 1039173 - DNA, 25 bp, Homo sapien
gacatgtttcgacccagtccttcct

SEQ ID NO: 1039174 - DNA, 25 bp, Homo sapien
gcgtgggaccagcatgtctatctga

SEQ ID NO: 1039175 - DNA, 25 bp, Homo sapien
tgtcttcctggaagtcagcacacag

SEQ ID NO: 1039176 - DNA, 25 bp, Homo sapien
cagcatggtccatccgagagagaaa

SEQ ID NO: 1039177 - DNA, 25 bp, Homo sapien
tatctgactccgcacagacacagga

SEQ ID NO: 1039178 - DNA, 25 bp, Homo sapien
gtagcccatcaaggcccgacggctg

SEQ ID NO: 1039179 - DNA, 25 bp, Homo sapien
atcaaggcccgacggctgttcttgg

SEQ ID NO: 1039180 - DNA, 25 bp, Homo sapien
ttgtagcccatcaaggcccgacggc

SEQ ID NO: 1039181 - DNA, 25 bp, Homo sapien
ccatcaaggcccgacggctgttctt

SEQ ID NO: 1039182 - DNA, 25 bp, Homo sapien
ctcctcctgggtgagcgagccctgt

SEQ ID NO: 1039183 - DNA, 25 bp, Homo sapien
gcgtcagagggatgggacgctggac

SEQ ID NO: 1039184 - DNA, 25 bp, Homo sapien
tcctcctgggtgagcgagccctgtg

SEQ ID NO: 1039185 - DNA, 25 bp, Homo sapien
gggttggctggcgtcagagggatgg

SEQ ID NO: 1039186 - DNA, 25 bp, Homo sapien
ggagccagtgtagctgatgacaagc

SEQ ID NO: 1039187 - DNA, 25 bp, Homo sapien
tggtggtccaggtcagacgctcata

SEQ ID NO: 1039188 - DNA, 25 bp, Homo sapien
cacaaactggcgcttgaaggccctc

SEQ ID NO: 1039189 - DNA, 25 bp, Homo sapien
gacgctcatagacgtagaggaggcc

SEQ ID NO: 1039190 - DNA, 25 bp, Homo sapien
cccgggtgacgtcaacttgctgaca

SEQ ID NO: 1039191 - DNA, 25 bp, Homo sapien
ggtgacgtcaacttgctgacacaga

SEQ ID NO: 1039192 - DNA, 25 bp, Homo sapien
gtgacgtcaacttgctgacacagat

SEQ ID NO: 1039193 - DNA, 25 bp, Homo sapien
cgggtgacgtcaacttgctgacaca

SEQ ID NO: 1039194 - DNA, 25 bp, Homo sapien
tgctctgaagtgagtcaagaacctc

SEQ ID NO: 1039195 - DNA, 25 bp, Homo sapien
gttcatggcggcaatttcctgctcc

SEQ ID NO: 1039196 - DNA, 25 bp, Homo sapien
ttcatggcggcaatttcctgctcca

SEQ ID NO: 1039197 - DNA, 25 bp, Homo sapien
ctctgaagtgagtcaagaacctcaa

SEQ ID NO: 1039198 - DNA, 25 bp, Homo sapien
cactgtccaaccaaccggctttatt

SEQ ID NO: 1039199 - DNA, 25 bp, Homo sapien
agctcactgtccaaccaaccggctt

SEQ ID NO: 1039200 - DNA, 25 bp, Homo sapien
gtgtgaacatgttgagctcactgtc

SEQ ID NO: 1039201 - DNA, 25 bp, Homo sapien
gctgcaggtactggtgtgtgaacat

SEQ ID NO: 1039202 - DNA, 25 bp, Homo sapien
tcaaaatggtacgagactgggtgct

SEQ ID NO: 1039203 - DNA, 25 bp, Homo sapien
tgtctgtgtgataccctcaaaggct

SEQ ID NO: 1039204 - DNA, 25 bp, Homo sapien
caaaggcttccatgaggcattgtgc

SEQ ID NO: 1039205 - DNA, 25 bp, Homo sapien
catgctgtccatagctgtcgctgaa

SEQ ID NO: 1039206 - DNA, 25 bp, Homo sapien
gaaatttagtccagggcacttggga

SEQ ID NO: 1039207 - DNA, 25 bp, Homo sapien
tccaggactgacactaaagcaaagg

SEQ ID NO: 1039208 - DNA, 25 bp, Homo sapien
tcttaaagggcacaacagggatgca

SEQ ID NO: 1039209 - DNA, 25 bp, Homo sapien
caataatgagaagagaggcaagtcc

SEQ ID NO: 1039210 - DNA, 25 bp, Homo sapien
tctaggaagcgatccaacttgtgcc

SEQ ID NO: 1039211 - DNA, 25 bp, Homo sapien
tgtgtgacagtgattttccctgaca

SEQ ID NO: 1039212 - DNA, 25 bp, Homo sapien
tacaagcaggtatgtgaacaggaca

SEQ ID NO: 1039213 - DNA, 25 bp, Homo sapien
gtggccaccaaacagtgcacagagg

SEQ ID NO: 1039214 - DNA, 25 bp, Homo sapien
tatgagcaatgatacaggagtaact

SEQ ID NO: 1039215 - DNA, 25 bp, Homo sapien
tgtgtcagcacgtcttgcgctccag

SEQ ID NO: 1039216 - DNA, 25 bp, Homo sapien
acatcaccttaaatacatcagagaa

SEQ ID NO: 1039217 - DNA, 25 bp, Homo sapien
tcagagaaaactcactgtgtcagca

SEQ ID NO: 1039218 - DNA, 25 bp, Homo sapien
ggtgagcgttactcggcgatccgaa

SEQ ID NO: 1039219 - DNA, 25 bp, Homo sapien
gagcggagctacacaaccgattggt

SEQ ID NO: 1039220 - DNA, 25 bp, Homo sapien
ttggtcaattttcgaggccggtgcg

SEQ ID NO: 1039221 - DNA, 25 bp, Homo sapien
tcggccggccgtcttgattggtcag

SEQ ID NO: 1039222 - DNA, 25 bp, Homo sapien
cccctgggccgcaggatgtcctcag

SEQ ID NO: 1039223 - DNA, 25 bp, Homo sapien
gcccctgggccgcaggatgtcctca

SEQ ID NO: 1039224 - DNA, 25 bp, Homo sapien
gccactgaccgccgcacagcatcct

SEQ ID NO: 1039225 - DNA, 25 bp, Homo sapien
tgcctcaggagctccagattgagca

SEQ ID NO: 1039226 - DNA, 25 bp, Homo sapien
agccgcagctgtgccagttcctcag

SEQ ID NO: 1039227 - DNA, 25 bp, Homo sapien
actgaccgccgcacagcatcctgcc

SEQ ID NO: 1039228 - DNA, 25 bp, Homo sapien
tctctggggtcgatggagtctctga

SEQ ID NO: 1039229 - DNA, 25 bp, Homo sapien
ctcgacaggcatctggtgggcccca

SEQ ID NO: 1039230 - DNA, 25 bp, Homo sapien
tcaaggaagttgaggacgtctctgg

SEQ ID NO: 1039231 - DNA, 25 bp, Homo sapien
ccgatctggccacatcacggaggtc

SEQ ID NO: 1039232 - DNA, 25 bp, Homo sapien
tcctcttaggaactgcagactcctc

SEQ ID NO: 1039233 - DNA, 25 bp, Homo sapien
tagcccaggtatggcctgaggcgcc

SEQ ID NO: 1039234 - DNA, 25 bp, Homo sapien
atagcccaggtatggcctgaggcgc

SEQ ID NO: 1039235 - DNA, 25 bp, Homo sapien
gcccaggtatggcctgaggcgccag

SEQ ID NO: 1039236 - DNA, 25 bp, Homo sapien
aggatggctgcagatacactcctcc

SEQ ID NO: 1039237 - DNA, 25 bp, Homo sapien
ggtttcccgaaactcctgcagcttg

SEQ ID NO: 1039238 - DNA, 25 bp, Homo sapien
tgttggtttcccgaaactcctgcag

SEQ ID NO: 1039239 - DNA, 25 bp, Homo sapien
ctgcagatacactcctccttgttgg

SEQ ID NO: 1039240 - DNA, 25 bp, Homo sapien
tggagccgctcagccgccctcgccc

SEQ ID NO: 1039241 - DNA, 25 bp, Homo sapien
ccgctgccactgctctcacgcaggc

SEQ ID NO: 1039242 - DNA, 25 bp, Homo sapien
gaggctggactactcagcggcctag

SEQ ID NO: 1039243 - DNA, 25 bp, Homo sapien
acagggcagcccctaattcggtggc

SEQ ID NO: 1039244 - DNA, 25 bp, Homo sapien
ggtggccaggccttagctcactcca

SEQ ID NO: 1039245 - DNA, 25 bp, Homo sapien
tctgggaagcccttcggcccatttc

SEQ ID NO: 1039246 - DNA, 25 bp, Homo sapien
ctcgcggtgtcctgcacaggcggca

SEQ ID NO: 1039247 - DNA, 25 bp, Homo sapien
tggtctcgcggtgtcctgcacaggc

SEQ ID NO: 1039248 - DNA, 25 bp, Homo sapien
cggttgacacggtaacagtacacgc

SEQ ID NO: 1039249 - DNA, 25 bp, Homo sapien
ggcaccgggaacaggcgccggttga

SEQ ID NO: 1039250 - DNA, 25 bp, Homo sapien
aaaaccagtggttcaggctctgtcc

SEQ ID NO: 1039251 - DNA, 25 bp, Homo sapien
gtgtcccaatactctggtcactcac

SEQ ID NO: 1039252 - DNA, 25 bp, Homo sapien
tgtcccccaaggtgtcccaatactc

SEQ ID NO: 1039253 - DNA, 25 bp, Homo sapien
cttaaaaccagtggttcaggctctg

SEQ ID NO: 1039254 - DNA, 25 bp, Homo sapien
tctttcgccggtggatgtggtaccg

SEQ ID NO: 1039255 - DNA, 25 bp, Homo sapien
tccaggatcgacagcgggatgctca

SEQ ID NO: 1039256 - DNA, 25 bp, Homo sapien
gctccaggatcgacagcgggatgct

SEQ ID NO: 1039257 - DNA, 25 bp, Homo sapien
ccagtgtgtcagaggcgtcaaagct

SEQ ID NO: 1039258 - DNA, 25 bp, Homo sapien
catccagccccacgtggctgctcac

SEQ ID NO: 1039259 - DNA, 25 bp, Homo sapien
gaggaactgtgccccccattaggaa

SEQ ID NO: 1039260 - DNA, 25 bp, Homo sapien
aaggcaaggagttaaaagtgcctga

SEQ ID NO: 1039261 - DNA, 25 bp, Homo sapien
tgggacaagctccccgctgactggg

SEQ ID NO: 1039262 - DNA, 25 bp, Homo sapien
caaggagttaaaagtgcctgacctg

SEQ ID NO: 1039263 - DNA, 25 bp, Homo sapien
tcctgggggctgagcttttctcaga

SEQ ID NO: 1039264 - DNA, 25 bp, Homo sapien
ttcggaggaaaaatgtcccagccca

SEQ ID NO: 1039265 - DNA, 25 bp, Homo sapien
agcttttctcagacttcggaggaaa

SEQ ID NO: 1039266 - DNA, 25 bp, Homo sapien
ctcagacttcggaggaaaaatgtcc

SEQ ID NO: 1039267 - DNA, 25 bp, Homo sapien
gctgggcctcagcggagacagagga

SEQ ID NO: 1039268 - DNA, 25 bp, Homo sapien
agggctgctggtgccggacagcttc

SEQ ID NO: 1039269 - DNA, 25 bp, Homo sapien
tgctggtgccggacagcttctggtg

SEQ ID NO: 1039270 - DNA, 25 bp, Homo sapien
ctggtgctgggcctcagcggagaca

SEQ ID NO: 1039271 - DNA, 25 bp, Homo sapien
gaaagggacaggtcatccccagttc

SEQ ID NO: 1039272 - DNA, 25 bp, Homo sapien
gggccacttgaaagggacaggtcat

SEQ ID NO: 1039273 - DNA, 25 bp, Homo sapien
cacattccctcctggatcttgcagt

SEQ ID NO: 1039274 - DNA, 25 bp, Homo sapien
cagaggagttccgagggatggctag

SEQ ID NO: 1039275 - DNA, 25 bp, Homo sapien
ctggggcactgaccaggtcggggtc

SEQ ID NO: 1039276 - DNA, 25 bp, Homo sapien
ggtcgggggcagcatctgcattggt

SEQ ID NO: 1039277 - DNA, 25 bp, Homo sapien
cggggtcgggggcagcatctgcatt

SEQ ID NO: 1039278 - DNA, 25 bp, Homo sapien
accaggtcggggtcgggggcagcat

SEQ ID NO: 1039279 - DNA, 25 bp, Homo sapien
tcagggcttctgccgtgggacgtgg

SEQ ID NO: 1039280 - DNA, 25 bp, Homo sapien
cagggcttctgccgtgggacgtggg

SEQ ID NO: 1039281 - DNA, 25 bp, Homo sapien
ttctgccgtgggacgtggggccgag

SEQ ID NO: 1039282 - DNA, 25 bp, Homo sapien
ggcttctgccgtgggacgtggggcc

SEQ ID NO: 1039283 - DNA, 25 bp, Homo sapien
acaagcttgggtccacccacctgcc

SEQ ID NO: 1039284 - DNA, 25 bp, Homo sapien
ggctggaggcggcgggaatgctgtt

SEQ ID NO: 1039285 - DNA, 25 bp, Homo sapien
tgcccaacctaggacagctgggcct

SEQ ID NO: 1039286 - DNA, 25 bp, Homo sapien
tccacagaatccctcaccctccacc

SEQ ID NO: 1039287 - DNA, 25 bp, Homo sapien
gacttccagagagcccttctatcaa

SEQ ID NO: 1039288 - DNA, 25 bp, Homo sapien
cagagagcccttctatcaatggatc

SEQ ID NO: 1039289 - DNA, 25 bp, Homo sapien
gcccttctatcaatggatcccggtt

SEQ ID NO: 1039290 - DNA, 25 bp, Homo sapien
tctgaatgacctgcggctcccatgg

SEQ ID NO: 1039291 - DNA, 25 bp, Homo sapien
tcagagcctccatgctaatgaaact

SEQ ID NO: 1039292 - DNA, 25 bp, Homo sapien
ggatcaaaggactccatgccctgct

SEQ ID NO: 1039293 - DNA, 25 bp, Homo sapien
ggtgaaggccactggatcaaaggac

SEQ ID NO: 1039294 - DNA, 25 bp, Homo sapien
gagcctccatgctaatgaaactggc

SEQ ID NO: 1039295 - DNA, 25 bp, Homo sapien
ctgaaagtgaaacccggaacacagc

SEQ ID NO: 1039296 - DNA, 25 bp, Homo sapien
tgaaagtgaaacccggaacacagcc

SEQ ID NO: 1039297 - DNA, 25 bp, Homo sapien
aaagtgaaacccggaacacagccat

SEQ ID NO: 1039298 - DNA, 25 bp, Homo sapien
gaaagtgaaacccggaacacagcca

SEQ ID NO: 1039299 - DNA, 25 bp, Homo sapien
gggctggtctaggggtgttccaaga

SEQ ID NO: 1039300 - DNA, 25 bp, Homo sapien
gtgttccaagaacaccaagcaaggc

SEQ ID NO: 1039301 - DNA, 25 bp, Homo sapien
ggctttccgatttccaatatctcct

SEQ ID NO: 1039302 - DNA, 25 bp, Homo sapien
tcccccagagacacgaagaaggaag

SEQ ID NO: 1039303 - DNA, 25 bp, Homo sapien
catcccccagagacacgaagaagga

SEQ ID NO: 1039304 - DNA, 25 bp, Homo sapien
gcagctgggctttccgatttccaat

SEQ ID NO: 1039305 - DNA, 25 bp, Homo sapien
aacgcacgccgcgaagtcacttcaa

SEQ ID NO: 1039306 - DNA, 25 bp, Homo sapien
cgaggtttcagccttagttctcccg

SEQ ID NO: 1039307 - DNA, 25 bp, Homo sapien
gcgcgtggacttcaggctccagcac

SEQ ID NO: 1039308 - DNA, 25 bp, Homo sapien
acgtgcggtcccggcggttctcagc

SEQ ID NO: 1039309 - DNA, 25 bp, Homo sapien
cggacgtgaggtggcctggcggccg

SEQ ID NO: 1039310 - DNA, 25 bp, Homo sapien
gccggacgtgaggtggcctggcggc

SEQ ID NO: 1039311 - DNA, 25 bp, Homo sapien
ggccggacgtgaggtggcctggcgg

SEQ ID NO: 1039312 - DNA, 25 bp, Homo sapien
ggggccggacgtgaggtggcctggc

SEQ ID NO: 1039313 - DNA, 25 bp, Homo sapien
tgtgggaaggctcgtagcgccccca

SEQ ID NO: 1039314 - DNA, 25 bp, Homo sapien
aggctcgtagcgcccccaggaacag

SEQ ID NO: 1039315 - DNA, 25 bp, Homo sapien
tgggaaggctcgtagcgcccccagg

SEQ ID NO: 1039316 - DNA, 25 bp, Homo sapien
ggaaggctcgtagcgcccccaggaa

SEQ ID NO: 1039317 - DNA, 25 bp, Homo sapien
agagctgggacagggtgtctctagc

SEQ ID NO: 1039318 - DNA, 25 bp, Homo sapien
gagctgggacagggtgtctctagcc

SEQ ID NO: 1039319 - DNA, 25 bp, Homo sapien
agctgggacagggtgtctctagcca

SEQ ID NO: 1039320 - DNA, 25 bp, Homo sapien
atgccgaggtggatggatctcctga

SEQ ID NO: 1039321 - DNA, 25 bp, Homo sapien
gagacaaagtgagactgtcccaaaa

SEQ ID NO: 1039322 - DNA, 25 bp, Homo sapien
tgggagacaaagtgagactgtccca

SEQ ID NO: 1039323 - DNA, 25 bp, Homo sapien
tagggaggctgagacggtagaatca

SEQ ID NO: 1039324 - DNA, 25 bp, Homo sapien
cagtggttttcaaccatagataccg

SEQ ID NO: 1039325 - DNA, 25 bp, Homo sapien
caaccatagataccggaagaaggtc

SEQ ID NO: 1039326 - DNA, 25 bp, Homo sapien
tggttttcaaccatagataccggaa

SEQ ID NO: 1039327 - DNA, 25 bp, Homo sapien
ttcaaccatagataccggaagaagg

SEQ ID NO: 1039328 - DNA, 25 bp, Homo sapien
gtgtggaggccacattatctgtgca

SEQ ID NO: 1039329 - DNA, 25 bp, Homo sapien
tttcagtaaactgtgtggaggccac

SEQ ID NO: 1039330 - DNA, 25 bp, Homo sapien
gccacattatctgtgcacgcactct

SEQ ID NO: 1039331 - DNA, 25 bp, Homo sapien
tcagcaggttggaaccatttcagta

SEQ ID NO: 1039332 - DNA, 25 bp, Homo sapien
ttttcaggtctgtctattttcaggt

SEQ ID NO: 1039333 - DNA, 25 bp, Homo sapien
ctgtctattttcaggttggtttggt

SEQ ID NO: 1039334 - DNA, 25 bp, Homo sapien
cattttcaggtctgtctattttcag

SEQ ID NO: 1039335 - DNA, 25 bp, Homo sapien
attttcaggtctgtctattttcagg

SEQ ID NO: 1039336 - DNA, 25 bp, Homo sapien
tgtcccagctcccggtggagaagga

SEQ ID NO: 1039337 - DNA, 25 bp, Homo sapien
cccggagaagtctggccctgtgaat

SEQ ID NO: 1039338 - DNA, 25 bp, Homo sapien
aagtctggccctgtgaatttccagg

SEQ ID NO: 1039339 - DNA, 25 bp, Homo sapien
gcgtctgccgctgcccggagaagtc

SEQ ID NO: 1039340 - DNA, 25 bp, Homo sapien
caaggcctgctgagtgtgggaacat

SEQ ID NO: 1039341 - DNA, 25 bp, Homo sapien
ggcctgcctgctaatctcactgaca

SEQ ID NO: 1039342 - DNA, 25 bp, Homo sapien
tcacatggcgcttgagttgtctccc

SEQ ID NO: 1039343 - DNA, 25 bp, Homo sapien
tcactgacagctacggagtctatgg

SEQ ID NO: 1039344 - DNA, 25 bp, Homo sapien
gcagcggtaacagcacctcctgaca

SEQ ID NO: 1039345 - DNA, 25 bp, Homo sapien
ccatgacaggtgtcctcgaagggtc

SEQ ID NO: 1039346 - DNA, 25 bp, Homo sapien
tgtcatagtagtggctggggtttcc

SEQ ID NO: 1039347 - DNA, 25 bp, Homo sapien
gacaggtgtcctcgaagggtcgatc

SEQ ID NO: 1039348 - DNA, 25 bp, Homo sapien
cagctccagtggaatagccctgatg

SEQ ID NO: 1039349 - DNA, 25 bp, Homo sapien
ccagtggaatagccctgatggccat

SEQ ID NO: 1039350 - DNA, 25 bp, Homo sapien
tccagtggaatagccctgatggcca

SEQ ID NO: 1039351 - DNA, 25 bp, Homo sapien
gctccagtggaatagccctgatggc

SEQ ID NO: 1039352 - DNA, 25 bp, Homo sapien
gcaggctgtacagcggtcggcctca

SEQ ID NO: 1039353 - DNA, 25 bp, Homo sapien
ctgtacagcggtcggcctcatccag

SEQ ID NO: 1039354 - DNA, 25 bp, Homo sapien
ctgcagtcagtaggcctctgtgggc

SEQ ID NO: 1039355 - DNA, 25 bp, Homo sapien
aagtcacgcaggctgtacagcggtc

SEQ ID NO: 1039356 - DNA, 25 bp, Homo sapien
cagacagaatggaagaagcagcggg

SEQ ID NO: 1039357 - DNA, 25 bp, Homo sapien
cgggtcgacattcgcagacacggga

SEQ ID NO: 1039358 - DNA, 25 bp, Homo sapien
cagacgtggaacagaacatgccggg

SEQ ID NO: 1039359 - DNA, 25 bp, Homo sapien
acaatcatccctgccggacagacag

SEQ ID NO: 1039360 - DNA, 25 bp, Homo sapien
tgacccctggggaagccggctcaca

SEQ ID NO: 1039361 - DNA, 25 bp, Homo sapien
cagaccgtgttcttctgcgccgtgc

SEQ ID NO: 1039362 - DNA, 25 bp, Homo sapien
gggaagccggctcacagaccgtgtt

SEQ ID NO: 1039363 - DNA, 25 bp, Homo sapien
ggctcacagaccgtgttcttctgcg

SEQ ID NO: 1039364 - DNA, 25 bp, Homo sapien
cagttgtaccatgggcgtcctgtgg

SEQ ID NO: 1039365 - DNA, 25 bp, Homo sapien
caccatgggctgaatcccgcttaca

SEQ ID NO: 1039366 - DNA, 25 bp, Homo sapien
gcctcaaatgatctgaggggcttgg

SEQ ID NO: 1039367 - DNA, 25 bp, Homo sapien
aagtgctgacaccatgggctgaatc

SEQ ID NO: 1039368 - DNA, 25 bp, Homo sapien
gggaagaagccagagatgggactga

SEQ ID NO: 1039369 - DNA, 25 bp, Homo sapien
gaagccagagatgggactgataatt

SEQ ID NO: 1039370 - DNA, 25 bp, Homo sapien
gaagaagccagagatgggactgata

SEQ ID NO: 1039371 - DNA, 25 bp, Homo sapien
aagaagccagagatgggactgataa

SEQ ID NO: 1039372 - DNA, 25 bp, Homo sapien
tctgaactaggccttcccacagagg

SEQ ID NO: 1039373 - DNA, 25 bp, Homo sapien
gagggagagtcgggagccctcgtca

SEQ ID NO: 1039374 - DNA, 25 bp, Homo sapien
cactggaggttgctggggacaccgg

SEQ ID NO: 1039375 - DNA, 25 bp, Homo sapien
agcttcctgggcgaggcgggtgccc

SEQ ID NO: 1039376 - DNA, 25 bp, Homo sapien
tcgagaacagctcacgcaggccgtg

SEQ ID NO: 1039377 - DNA, 25 bp, Homo sapien
ctcgagaacagctcacgcaggccgt

SEQ ID NO: 1039378 - DNA, 25 bp, Homo sapien
cgagaacagctcacgcaggccgtgc

SEQ ID NO: 1039379 - DNA, 25 bp, Homo sapien
tgccaggtcgacattcgcaggtgcg

SEQ ID NO: 1039380 - DNA, 25 bp, Homo sapien
gagttggtggctgatgtggcacaga

SEQ ID NO: 1039381 - DNA, 25 bp, Homo sapien
ggcttggtgaccgtctctgctgcac

SEQ ID NO: 1039382 - DNA, 25 bp, Homo sapien
gacacagcgggcacgggagttggtg

SEQ ID NO: 1039383 - DNA, 25 bp, Homo sapien
tctgatctggctcaactggtctata

SEQ ID NO: 1039384 - DNA, 25 bp, Homo sapien
taaaaggacagtgtgccctcaccat

SEQ ID NO: 1039385 - DNA, 25 bp, Homo sapien
cattctggttctagcttcggccctg

SEQ ID NO: 1039386 - DNA, 25 bp, Homo sapien
cagtggaagtactctgggctgaccc

SEQ ID NO: 1039387 - DNA, 25 bp, Homo sapien
cccctagttggtctgcctgtgttct

SEQ ID NO: 1039388 - DNA, 25 bp, Homo sapien
gagaaggcattgtctagcccctagt

SEQ ID NO: 1039389 - DNA, 25 bp, Homo sapien
gagtcagtgatcctccccttttcct

SEQ ID NO: 1039390 - DNA, 25 bp, Homo sapien
gtctagcccctagttggtctgcctg

SEQ ID NO: 1039391 - DNA, 25 bp, Homo sapien
caggggtggcgcctcaaaggtggtg

SEQ ID NO: 1039392 - DNA, 25 bp, Homo sapien
ggtggggttgcagtccggctgggtc

SEQ ID NO: 1039393 - DNA, 25 bp, Homo sapien
tggcaggcgcctcgccattctctgg

SEQ ID NO: 1039394 - DNA, 25 bp, Homo sapien
ttgcagtccggctgggtccccaggg

SEQ ID NO: 1039395 - DNA, 25 bp, Homo sapien
ctgggagtccaccagcaagctctga

SEQ ID NO: 1039396 - DNA, 25 bp, Homo sapien
atccagaacgggcttccccgtggag

SEQ ID NO: 1039397 - DNA, 25 bp, Homo sapien
gagagcgacgggagcgctggttggg

SEQ ID NO: 1039398 - DNA, 25 bp, Homo sapien
tgggcagcgtcttactggcctggga

SEQ ID NO: 1039399 - DNA, 25 bp, Homo sapien
tggaacacagagacgccccacactc

SEQ ID NO: 1039400 - DNA, 25 bp, Homo sapien
ctggaacacagagacgccccacact

SEQ ID NO: 1039401 - DNA, 25 bp, Homo sapien
tctgccgaattcgcttcctgcaggc

SEQ ID NO: 1039402 - DNA, 25 bp, Homo sapien
ctgcaggccctccggtggcacagga

SEQ ID NO: 1039403 - DNA, 25 bp, Homo sapien
ccacaaccaacaccaggatcaccca

SEQ ID NO: 1039404 - DNA, 25 bp, Homo sapien
gaaggcgctggagccgaccaccaca

SEQ ID NO: 1039405 - DNA, 25 bp, Homo sapien
ggtctggaccgggtagcacaggtgg

SEQ ID NO: 1039406 - DNA, 25 bp, Homo sapien
tggaccgggtagcacaggtggagct

SEQ ID NO: 1039407 - DNA, 25 bp, Homo sapien
gctgggaggtctggaccgggtagca

SEQ ID NO: 1039408 - DNA, 25 bp, Homo sapien
tgggaggtctggaccgggtagcaca

SEQ ID NO: 1039409 - DNA, 25 bp, Homo sapien
ctgtgttcctctggctcgggcagcc

SEQ ID NO: 1039410 - DNA, 25 bp, Homo sapien
cccctttggacggctggacactcac

SEQ ID NO: 1039411 - DNA, 25 bp, Homo sapien
ccctgtgttcctctggctcgggcag

SEQ ID NO: 1039412 - DNA, 25 bp, Homo sapien
agcccctttggacggctggacactc

SEQ ID NO: 1039413 - DNA, 25 bp, Homo sapien
cccagccaagatttgatgtgatgag

SEQ ID NO: 1039414 - DNA, 25 bp, Homo sapien
gagcatgacgtttcacctctgtggt

SEQ ID NO: 1039415 - DNA, 25 bp, Homo sapien
gatgtgatgagcatgacgtttcacc

SEQ ID NO: 1039416 - DNA, 25 bp, Homo sapien
taactccagtctaatcatggggaag

SEQ ID NO: 1039417 - DNA, 25 bp, Homo sapien
cagctggacttcgattttctctttc

SEQ ID NO: 1039418 - DNA, 25 bp, Homo sapien
tctgctgtggagcccttctgactcc

SEQ ID NO: 1039419 - DNA, 25 bp, Homo sapien
ctgggacacgcccgaagccagtctg

SEQ ID NO: 1039420 - DNA, 25 bp, Homo sapien
gagacaggatgatggatcctgcaga

SEQ ID NO: 1039421 - DNA, 25 bp, Homo sapien
tggagagccccgaattctctggaat

SEQ ID NO: 1039422 - DNA, 25 bp, Homo sapien
tctctggaataccaggcaaaaccca

SEQ ID NO: 1039423 - DNA, 25 bp, Homo sapien
ctccagggtgtggagagccccgaat

SEQ ID NO: 1039424 - DNA, 25 bp, Homo sapien
aacccacatggaggacctcaaggca

SEQ ID NO: 1039425 - DNA, 25 bp, Homo sapien
cgttgagctcctcctgggtctggaa

SEQ ID NO: 1039426 - DNA, 25 bp, Homo sapien
gttgagctcctcctgggtctggaat

SEQ ID NO: 1039427 - DNA, 25 bp, Homo sapien
ctgtcaccgacgcaccactcctcag

SEQ ID NO: 1039428 - DNA, 25 bp, Homo sapien
tgtcaccgacgcaccactcctcagc

SEQ ID NO: 1039429 - DNA, 25 bp, Homo sapien
aggtctccatcagtggctggctcat

SEQ ID NO: 1039430 - DNA, 25 bp, Homo sapien
caggtctccatcagtggctggctca

SEQ ID NO: 1039431 - DNA, 25 bp, Homo sapien
tggcaggtctccatcagtggctggc

SEQ ID NO: 1039432 - DNA, 25 bp, Homo sapien
ctgtggcaggtctccatcagtggct

SEQ ID NO: 1039433 - DNA, 25 bp, Homo sapien
cagcggcaggctctccaggtaggct

SEQ ID NO: 1039434 - DNA, 25 bp, Homo sapien
attggtgtgctccgtggacacccgg

SEQ ID NO: 1039435 - DNA, 25 bp, Homo sapien
ctgcagcggcaggctctccaggtag

SEQ ID NO: 1039436 - DNA, 25 bp, Homo sapien
tgctccgtggacacccggggctcag

SEQ ID NO: 1039437 - DNA, 25 bp, Homo sapien
agcatgacatcgctgcagctgccca

SEQ ID NO: 1039438 - DNA, 25 bp, Homo sapien
ttcacggtccccacgatcacggtgt

SEQ ID NO: 1039439 - DNA, 25 bp, Homo sapien
cggtgtcagccttcatgatgtagat

SEQ ID NO: 1039440 - DNA, 25 bp, Homo sapien
ttccactgagagcatgacatcgctg

SEQ ID NO: 1039441 - DNA, 25 bp, Homo sapien
tatggtccagagtaaagcagatgcc

SEQ ID NO: 1039442 - DNA, 25 bp, Homo sapien
tagtggatttgcaagcagggcagac

SEQ ID NO: 1039443 - DNA, 25 bp, Homo sapien
tgcatacacgtctgaaggccctagg

SEQ ID NO: 1039444 - DNA, 25 bp, Homo sapien
gaagtccctgggcaaagtaaagcag

SEQ ID NO: 1039445 - DNA, 25 bp, Homo sapien
ccatagctacaatcatcaccaggaa

SEQ ID NO: 1039446 - DNA, 25 bp, Homo sapien
gctgctgcctgtttccccaacttcc

SEQ ID NO: 1039447 - DNA, 25 bp, Homo sapien
tgctgtcttagttctttctgagaaa

SEQ ID NO: 1039448 - DNA, 25 bp, Homo sapien
tacccatagctacaatcatcaccag

SEQ ID NO: 1039449 - DNA, 25 bp, Homo sapien
tgtcgcctatttggtatccttgctg

SEQ ID NO: 1039450 - DNA, 25 bp, Homo sapien
caataattccttgcatgcgctagat

SEQ ID NO: 1039451 - DNA, 25 bp, Homo sapien
caatggaatccatcaatgtttcgcc

SEQ ID NO: 1039452 - DNA, 25 bp, Homo sapien
catgacctataggtagagctactca

SEQ ID NO: 1039453 - DNA, 25 bp, Homo sapien
tctctggagtaggactgctggatcg

SEQ ID NO: 1039454 - DNA, 25 bp, Homo sapien
gatcttgctgtacaaggttcctctc

SEQ ID NO: 1039455 - DNA, 25 bp, Homo sapien
tgtccttataaaacatgtggtggcg

SEQ ID NO: 1039456 - DNA, 25 bp, Homo sapien
gaatcatactgcacagatcttgctg

SEQ ID NO: 1039457 - DNA, 25 bp, Homo sapien
cctgccctcgcgccctcgcgccctc

SEQ ID NO: 1039458 - DNA, 25 bp, Homo sapien
ctgccctcgcgccctcgcgccctcg

SEQ ID NO: 1039459 - DNA, 25 bp, Homo sapien
gtccggttgccccctgccctcgcgc

SEQ ID NO: 1039460 - DNA, 25 bp, Homo sapien
cggcccagacggcgacgggcgccat

SEQ ID NO: 1039461 - DNA, 25 bp, Homo sapien
gcaaggcgtgcgccgcagcccagag

SEQ ID NO: 1039462 - DNA, 25 bp, Homo sapien
gctccagtccgacggccagcgcggc

SEQ ID NO: 1039463 - DNA, 25 bp, Homo sapien
ctgggcgggcaaggcgtgcgccgca

SEQ ID NO: 1039464 - DNA, 25 bp, Homo sapien
ctggtcctgctcttcagacacagga

SEQ ID NO: 1039465 - DNA, 25 bp, Homo sapien
ggtcctgctcttcagacacaggacc

SEQ ID NO: 1039466 - DNA, 25 bp, Homo sapien
tcttcagacacaggaccctggtatt

SEQ ID NO: 1039467 - DNA, 25 bp, Homo sapien
ctgctcttcagacacaggaccctgg

SEQ ID NO: 1039468 - DNA, 25 bp, Homo sapien
tcatacctgagatgagcaaccagcc

SEQ ID NO: 1039469 - DNA, 25 bp, Homo sapien
gacactgaccagaatcagtccactg

SEQ ID NO: 1039470 - DNA, 25 bp, Homo sapien
ggtaaccagccagcggtgaccagga

SEQ ID NO: 1039471 - DNA, 25 bp, Homo sapien
ctgtgaccgactgcaaaagctccag

SEQ ID NO: 1039472 - DNA, 25 bp, Homo sapien
gaggagctcgaggggtctggaggca

SEQ ID NO: 1039473 - DNA, 25 bp, Homo sapien
acagtcaacgaagccaaaggtctgg

SEQ ID NO: 1039474 - DNA, 25 bp, Homo sapien
aggagctcgaggggtctggaggcac

SEQ ID NO: 1039475 - DNA, 25 bp, Homo sapien
cagtcaacgaagccaaaggtctggg

SEQ ID NO: 1039476 - DNA, 25 bp, Homo sapien
agtgacagcggaggcccgtctgccg

SEQ ID NO: 1039477 - DNA, 25 bp, Homo sapien
ggaggcccgtctgccgtcacggaga

SEQ ID NO: 1039478 - DNA, 25 bp, Homo sapien
gcccgtctgccgtcacggagaggaa

SEQ ID NO: 1039479 - DNA, 25 bp, Homo sapien
ctgccgtcacggagaggaatggcat

SEQ ID NO: 1039480 - DNA, 25 bp, Homo sapien
tggaaggaagaagggaagactgcca

SEQ ID NO: 1039481 - DNA, 25 bp, Homo sapien
ctggaaggaagaagggaagactgcc

SEQ ID NO: 1039482 - DNA, 25 bp, Homo sapien
ggaaggaagaagggaagactgccat

SEQ ID NO: 1039483 - DNA, 25 bp, Homo sapien
tgagccggcatgtgctcccgggctc

SEQ ID NO: 1039484 - DNA, 25 bp, Homo sapien
tctctgagccggcatgtgctcccgg

SEQ ID NO: 1039485 - DNA, 25 bp, Homo sapien
catagtattctctgagccggcatgt

SEQ ID NO: 1039486 - DNA, 25 bp, Homo sapien
agctgtctggtcatagtattctctg

SEQ ID NO: 1039487 - DNA, 25 bp, Homo sapien
ggtgtccgaggtcttggtacagaag

SEQ ID NO: 1039488 - DNA, 25 bp, Homo sapien
gtgtccgaggtcttggtacagaaga

SEQ ID NO: 1039489 - DNA, 25 bp, Homo sapien
gtacagaagacttttgcatgttggc

SEQ ID NO: 1039490 - DNA, 25 bp, Homo sapien
tggtacagaagacttttgcatgttg

SEQ ID NO: 1039491 - DNA, 25 bp, Homo sapien
tcaagcactcgggaacccagttcca

SEQ ID NO: 1039492 - DNA, 25 bp, Homo sapien
gagccacagctcaagcactcgggaa

SEQ ID NO: 1039493 - DNA, 25 bp, Homo sapien
acagctcaagcactcgggaacccag

SEQ ID NO: 1039494 - DNA, 25 bp, Homo sapien
agcactcgggaacccagttccagag

SEQ ID NO: 1039495 - DNA, 25 bp, Homo sapien
ggtgcagatgcggttctgttcccga

SEQ ID NO: 1039496 - DNA, 25 bp, Homo sapien
ttgctcagcgcgcagtaccagccgg

SEQ ID NO: 1039497 - DNA, 25 bp, Homo sapien
ttcccgagtgcaggcttgagtttcc

SEQ ID NO: 1039498 - DNA, 25 bp, Homo sapien
ggcacttgcgcagcggcgcgcacag

SEQ ID NO: 1039499 - DNA, 25 bp, Homo sapien
cttggcactagagccctaggagagg

SEQ ID NO: 1039500 - DNA, 25 bp, Homo sapien
cttcagggaacaatccgaacttgtc

SEQ ID NO: 1039501 - DNA, 25 bp, Homo sapien
accactcagacactctgcgggacag

SEQ ID NO: 1039502 - DNA, 25 bp, Homo sapien
gaacaatccgaacttgtcaaccact

SEQ ID NO: 1039503 - DNA, 25 bp, Homo sapien
tgcacaccacgtctgatgtttcagt

SEQ ID NO: 1039504 - DNA, 25 bp, Homo sapien
tgaagtcgtgttggagaacgtcccc

SEQ ID NO: 1039505 - DNA, 25 bp, Homo sapien
gggcctgcaaatatccgtggatgaa

SEQ ID NO: 1039506 - DNA, 25 bp, Homo sapien
gggcttgcacaccacgtctgatgtt

SEQ ID NO: 1039507 - DNA, 25 bp, Homo sapien
gggtggctgggctcattcacgggcc

SEQ ID NO: 1039508 - DNA, 25 bp, Homo sapien
tggggtggctgggctcattcacggg

SEQ ID NO: 1039509 - DNA, 25 bp, Homo sapien
gctggggtggctgggctcattcacg

SEQ ID NO: 1039510 - DNA, 25 bp, Homo sapien
gtggctgggctcattcacgggcccc

SEQ ID NO: 1039511 - DNA, 25 bp, Homo sapien
tgttgggatcgtgtggacactggct

SEQ ID NO: 1039512 - DNA, 25 bp, Homo sapien
gagcgaagtcgccagtgctcccttc

SEQ ID NO: 1039513 - DNA, 25 bp, Homo sapien
ggacgtggacgtgcagactgcatcc

SEQ ID NO: 1039514 - DNA, 25 bp, Homo sapien
catgcttgcattcccagggatggcc

SEQ ID NO: 1039515 - DNA, 25 bp, Homo sapien
atgaatgagacttcttgcgacttac

SEQ ID NO: 1039516 - DNA, 25 bp, Homo sapien
tattattagtagacccaaggctgtc

SEQ ID NO: 1039517 - DNA, 25 bp, Homo sapien
tcatgatgacacagttcaccactcc

SEQ ID NO: 1039518 - DNA, 25 bp, Homo sapien
ttagtagacccaaggctgtcacacc

SEQ ID NO: 1039519 - DNA, 25 bp, Homo sapien
gatgacacagttcaccactcctatt

SEQ ID NO: 1039520 - DNA, 25 bp, Homo sapien
tggcttctctctgcaggcacaaggg

SEQ ID NO: 1039521 - DNA, 25 bp, Homo sapien
gcttctctctgcaggcacaagggct

SEQ ID NO: 1039522 - DNA, 25 bp, Homo sapien
cttctctctgcaggcacaagggctt

SEQ ID NO: 1039523 - DNA, 25 bp, Homo sapien
tctctctgcaggcacaagggcttct

SEQ ID NO: 1039524 - DNA, 25 bp, Homo sapien
accctggtcactgcccacaactgcc

SEQ ID NO: 1039525 - DNA, 25 bp, Homo sapien
tgcaagttcatgctgaacctccgcc

SEQ ID NO: 1039526 - DNA, 25 bp, Homo sapien
gggcattgcaagttcatgctgaacc

SEQ ID NO: 1039527 - DNA, 25 bp, Homo sapien
cattgcaagttcatgctgaacctcc

SEQ ID NO: 1039528 - DNA, 25 bp, Homo sapien
tgtggtgaggcgagatcgagccact

SEQ ID NO: 1039529 - DNA, 25 bp, Homo sapien
aaaaaaagaataatttgcggcacat

SEQ ID NO: 1039530 - DNA, 25 bp, Homo sapien
ggttgtggtgaggcgagatcgagcc

SEQ ID NO: 1039531 - DNA, 25 bp, Homo sapien
gcactccaggctgggcaacaagagt

SEQ ID NO: 1039532 - DNA, 25 bp, Homo sapien
ttgcataagggagtagaaggaaagc

SEQ ID NO: 1039533 - DNA, 25 bp, Homo sapien
ttcaccaaatagtcttagaggtggg

SEQ ID NO: 1039534 - DNA, 25 bp, Homo sapien
tggccctgttcaccaaatagtctta

SEQ ID NO: 1039535 - DNA, 25 bp, Homo sapien
catccttattttgcataagggagta

SEQ ID NO: 1039536 - DNA, 25 bp, Homo sapien
ttctgtccaacgcactggccgagct

SEQ ID NO: 1039537 - DNA, 25 bp, Homo sapien
ctcggcgctgtgatcagcaggtgct

SEQ ID NO: 1039538 - DNA, 25 bp, Homo sapien
tggcctccacgcctggtgcctgtgg

SEQ ID NO: 1039539 - DNA, 25 bp, Homo sapien
gctggttccgagtgggcgcccttct

SEQ ID NO: 1039540 - DNA, 25 bp, Homo sapien
actgatgagacctcccaccgaggag

SEQ ID NO: 1039541 - DNA, 25 bp, Homo sapien
cattcattcaacagtgtgtagggcc

SEQ ID NO: 1039542 - DNA, 25 bp, Homo sapien
caggtaggaacaggtgtggcaggca

SEQ ID NO: 1039543 - DNA, 25 bp, Homo sapien
cagaaatggccacgtcagctcctgt

SEQ ID NO: 1039544 - DNA, 25 bp, Homo sapien
tgtggtcagagctgctacagacgtt

SEQ ID NO: 1039545 - DNA, 25 bp, Homo sapien
gggctggaatctgtgtctcccattg

SEQ ID NO: 1039546 - DNA, 25 bp, Homo sapien
ggaatctgtgtctcccattgtggag

SEQ ID NO: 1039547 - DNA, 25 bp, Homo sapien
cagacgttcacgatgcaggtgacat

SEQ ID NO: 1039548 - DNA, 25 bp, Homo sapien
ttaactgggcttcatcccagcatca

SEQ ID NO: 1039549 - DNA, 25 bp, Homo sapien
aggggcttctcttcggtgctcccca

SEQ ID NO: 1039550 - DNA, 25 bp, Homo sapien
aactgggcttcatcccagcatcagg

SEQ ID NO: 1039551 - DNA, 25 bp, Homo sapien
gcttctcttcggtgctccccagcag

SEQ ID NO: 1039552 - DNA, 25 bp, Homo sapien
cactgaatatggtggcctgcctggg

SEQ ID NO: 1039553 - DNA, 25 bp, Homo sapien
tgagctaacttgaaggaccccgttc

SEQ ID NO: 1039554 - DNA, 25 bp, Homo sapien
ccatgtaccaaagtggcagggcagc

SEQ ID NO: 1039555 - DNA, 25 bp, Homo sapien
tccgggcaaggctacactggtttcc

SEQ ID NO: 1039556 - DNA, 25 bp, Homo sapien
ggtttattgataagcaggaatgccg

SEQ ID NO: 1039557 - DNA, 25 bp, Homo sapien
aggtttattgataagcaggaatgcc

SEQ ID NO: 1039558 - DNA, 25 bp, Homo sapien
gtgacgccatctccccttacacagg

SEQ ID NO: 1039559 - DNA, 25 bp, Homo sapien
ccagactccagggaccgtgacgcca

SEQ ID NO: 1039560 - DNA, 25 bp, Homo sapien
gaccgtgacgccatctccccttaca

SEQ ID NO: 1039561 - DNA, 25 bp, Homo sapien
agactccagggaccgtgacgccatc

SEQ ID NO: 1039562 - DNA, 25 bp, Homo sapien
ggcatgagaccagggcacacttgga

SEQ ID NO: 1039563 - DNA, 25 bp, Homo sapien
ccagctgtgtggtcccgagcaggaa

SEQ ID NO: 1039564 - DNA, 25 bp, Homo sapien
gaagttctcttatggttcacaggct

SEQ ID NO: 1039565 - DNA, 25 bp, Homo sapien
gatgaaggcatgagaccagggcaca

SEQ ID NO: 1039566 - DNA, 25 bp, Homo sapien
ctgtactggtctgagtatcccaggg

SEQ ID NO: 1039567 - DNA, 25 bp, Homo sapien
accctgtactggtctgagtatccca

SEQ ID NO: 1039568 - DNA, 25 bp, Homo sapien
ggtcatctccagaaccctgttctaa

SEQ ID NO: 1039569 - DNA, 25 bp, Homo sapien
caaaaccctgtactggtctgagtat

SEQ ID NO: 1039570 - DNA, 25 bp, Homo sapien
ctccctgatccaaaagggcacttcc

SEQ ID NO: 1039571 - DNA, 25 bp, Homo sapien
tgggaaacagcagcgctggatctgg

SEQ ID NO: 1039572 - DNA, 25 bp, Homo sapien
ggatctggtccctcgggctcagcac

SEQ ID NO: 1039573 - DNA, 25 bp, Homo sapien
tgtctccagataggtggtgagctct

SEQ ID NO: 1039574 - DNA, 25 bp, Homo sapien
gtctccagataggtggtgagctctg

SEQ ID NO: 1039575 - DNA, 25 bp, Homo sapien
gcccgccccagcccggcgctgcgcg

SEQ ID NO: 1039576 - DNA, 25 bp, Homo sapien
ccgccccagcccggcgctgcgcggc

SEQ ID NO: 1039577 - DNA, 25 bp, Homo sapien
ggccgcccgccccagcccggcgctg

SEQ ID NO: 1039578 - DNA, 25 bp, Homo sapien
ccgcccgccccagcccggcgctgcg

SEQ ID NO: 1039579 - DNA, 25 bp, Homo sapien
aggaaaaggtgtttagaaatcatgg

SEQ ID NO: 1039580 - DNA, 25 bp, Homo sapien
aggtattgagaacccaggctacaag

SEQ ID NO: 1039581 - DNA, 25 bp, Homo sapien
aagtgcaactgagagctggtcagtg

SEQ ID NO: 1039582 - DNA, 25 bp, Homo sapien
ctttgagaagtgcaactgagagctg

SEQ ID NO: 1039583 - DNA, 25 bp, Homo sapien
tgagaacccaggctacaaggccttc

SEQ ID NO: 1039584 - DNA, 25 bp, Homo sapien
tacacacgtggcaaactgactttct

SEQ ID NO: 1039585 - DNA, 25 bp, Homo sapien
gaaccaccggtactctattctcaga

SEQ ID NO: 1039586 - DNA, 25 bp, Homo sapien
tctcagactacgcaaacagctgtgt

SEQ ID NO: 1039587 - DNA, 25 bp, Homo sapien
gcctggccggaaagcaacacattta

SEQ ID NO: 1039588 - DNA, 25 bp, Homo sapien
aaaccattcttagtctgcaggccag

SEQ ID NO: 1039589 - DNA, 25 bp, Homo sapien
gggaactccttagcacctctactta

SEQ ID NO: 1039590 - DNA, 25 bp, Homo sapien
tgctgaccccttgcttaggctaata

SEQ ID NO: 1039591 - DNA, 25 bp, Homo sapien
caaaatctgactcacctaggatgaa

SEQ ID NO: 1039592 - DNA, 25 bp, Homo sapien
gacttcaaatggtaattccaattct

SEQ ID NO: 1039593 - DNA, 25 bp, Homo sapien
acttcaaatggtaattccaattctt

SEQ ID NO: 1039594 - DNA, 25 bp, Homo sapien
tttgacttcaaatggtaattccaat

SEQ ID NO: 1039595 - DNA, 25 bp, Homo sapien
tgacttcaaatggtaattccaattc

SEQ ID NO: 1039596 - DNA, 25 bp, Homo sapien
tgttcaccatctgtacacattttta

SEQ ID NO: 1039597 - DNA, 25 bp, Homo sapien
ggagaaggaaagtcttgttcaccat

SEQ ID NO: 1039598 - DNA, 25 bp, Homo sapien
agaaggaaagtcttgttcaccatct

SEQ ID NO: 1039599 - DNA, 25 bp, Homo sapien
caccatctgtacacatttttaattc

SEQ ID NO: 1039600 - DNA, 25 bp, Homo sapien
caagggtccacatgggggcgataaa

SEQ ID NO: 1039601 - DNA, 25 bp, Homo sapien
ccaagggtccacatgggggcgataa

SEQ ID NO: 1039602 - DNA, 25 bp, Homo sapien
tccacatgggggcgataaaagggaa

SEQ ID NO: 1039603 - DNA, 25 bp, Homo sapien
acatgggggcgataaaagggaatct

SEQ ID NO: 1039604 - DNA, 25 bp, Homo sapien
ctccaattaagtgaaggctggagat

SEQ ID NO: 1039605 - DNA, 25 bp, Homo sapien
gctccaattaagtgaaggctggaga

SEQ ID NO: 1039606 - DNA, 25 bp, Homo sapien
gggctccaattaagtgaaggctgga

SEQ ID NO: 1039607 - DNA, 25 bp, Homo sapien
tggggctccaattaagtgaaggctg

SEQ ID NO: 1039608 - DNA, 25 bp, Homo sapien
cagggcttgaagtagtgctttctta

SEQ ID NO: 1039609 - DNA, 25 bp, Homo sapien
ctcctccagggcttgaagtagtgct

SEQ ID NO: 1039610 - DNA, 25 bp, Homo sapien
tccagggcttgaagtagtgctttct

SEQ ID NO: 1039611 - DNA, 25 bp, Homo sapien
cctccagggcttgaagtagtgcttt

SEQ ID NO: 1039612 - DNA, 25 bp, Homo sapien
atggcccagaagatctctgccttgc

SEQ ID NO: 1039613 - DNA, 25 bp, Homo sapien
tatggcccagaagatctctgccttg

SEQ ID NO: 1039614 - DNA, 25 bp, Homo sapien
ttatggcccagaagatctctgcctt

SEQ ID NO: 1039615 - DNA, 25 bp, Homo sapien
gagtcagcattagctcaatctagtg

SEQ ID NO: 1039616 - DNA, 25 bp, Homo sapien
ctacaaagacaagagtcagcattag

SEQ ID NO: 1039617 - DNA, 25 bp, Homo sapien
caaagacaagagtcagcattagctc

SEQ ID NO: 1039618 - DNA, 25 bp, Homo sapien
gctcaatctagtgttcttgctcatc

SEQ ID NO: 1039619 - DNA, 25 bp, Homo sapien
ctacggaggcggtaactgaatacca

SEQ ID NO: 1039620 - DNA, 25 bp, Homo sapien
ggactcccctttctgctggcggtca

SEQ ID NO: 1039621 - DNA, 25 bp, Homo sapien
taactgaataccaataggactcccc

SEQ ID NO: 1039622 - DNA, 25 bp, Homo sapien
gactcccctttctgctggcggtcat

SEQ ID NO: 1039623 - DNA, 25 bp, Homo sapien
tcaatattctccacaatccttgtaa

SEQ ID NO: 1039624 - DNA, 25 bp, Homo sapien
ttcaatattctccacaatccttgta

SEQ ID NO: 1039625 - DNA, 25 bp, Homo sapien
tagtgggaccctgatcaagtttttg

SEQ ID NO: 1039626 - DNA, 25 bp, Homo sapien
tgccaccagatacaccagcaagagg

SEQ ID NO: 1039627 - DNA, 25 bp, Homo sapien
tacaaaagggcagacctgagcagcc

SEQ ID NO: 1039628 - DNA, 25 bp, Homo sapien
ctttggcagtgactacctgttggga

SEQ ID NO: 1039629 - DNA, 25 bp, Homo sapien
ccatgtctagctaattttgtatttt

SEQ ID NO: 1039630 - DNA, 25 bp, Homo sapien
gacgacacgcacatgccaccatgtc

SEQ ID NO: 1039631 - DNA, 25 bp, Homo sapien
ggacgacacgcacatgccaccatgt

SEQ ID NO: 1039632 - DNA, 25 bp, Homo sapien
gacacgcacatgccaccatgtctag

SEQ ID NO: 1039633 - DNA, 25 bp, Homo sapien
cctgaatggtgttagagagaatgct

SEQ ID NO: 1039634 - DNA, 25 bp, Homo sapien
ggtgttagagagaatgctatctcac

SEQ ID NO: 1039635 - DNA, 25 bp, Homo sapien
gtcctgaatggtgttagagagaatg

SEQ ID NO: 1039636 - DNA, 25 bp, Homo sapien
gaatggtgttagagagaatgctatc

SEQ ID NO: 1039637 - DNA, 25 bp, Homo sapien
gacacattcttaatgcagatgccaa

SEQ ID NO: 1039638 - DNA, 25 bp, Homo sapien
caaagcgtaaatggacatcttgaat

SEQ ID NO: 1039639 - DNA, 25 bp, Homo sapien
atggacacattcttaatgcagatgc

SEQ ID NO: 1039640 - DNA, 25 bp, Homo sapien
atgggagggattggtgacaccatct

SEQ ID NO: 1039641 - DNA, 25 bp, Homo sapien
agagccccagattcctagagcatgg

SEQ ID NO: 1039642 - DNA, 25 bp, Homo sapien
cccagattcctagagcatggctttc

SEQ ID NO: 1039643 - DNA, 25 bp, Homo sapien
gagccccagattcctagagcatggc

SEQ ID NO: 1039644 - DNA, 25 bp, Homo sapien
gccccagattcctagagcatggctt

SEQ ID NO: 1039645 - DNA, 25 bp, Homo sapien
gcaaatacacaagagacacccatgc

SEQ ID NO: 1039646 - DNA, 25 bp, Homo sapien
cagcaaatttgatttgttgcaaata

SEQ ID NO: 1039647 - DNA, 25 bp, Homo sapien
ctgtttccctatttcagcaaatttg

SEQ ID NO: 1039648 - DNA, 25 bp, Homo sapien
tttgatttgttgcaaatacacaaga

SEQ ID NO: 1039649 - DNA, 25 bp, Homo sapien
aatgaaagtgatataaccaaaggtc

SEQ ID NO: 1039650 - DNA, 25 bp, Homo sapien
aaagtgatataaccaaaggtcagag

SEQ ID NO: 1039651 - DNA, 25 bp, Homo sapien
gtgatataaccaaaggtcagagaaa

SEQ ID NO: 1039652 - DNA, 25 bp, Homo sapien
tataaccaaaggtcagagaaaatta

SEQ ID NO: 1039653 - DNA, 25 bp, Homo sapien
ggtaaaacctgacagcatcctgcaa

SEQ ID NO: 1039654 - DNA, 25 bp, Homo sapien
gatggcacgctcttccataaagggc

SEQ ID NO: 1039655 - DNA, 25 bp, Homo sapien
cttctagagatcagtgtggcaggca

SEQ ID NO: 1039656 - DNA, 25 bp, Homo sapien
tactgtgtgggtcctgacatggaaa

SEQ ID NO: 1039657 - DNA, 25 bp, Homo sapien
agtattttccgatcctctgttggtg

SEQ ID NO: 1039658 - DNA, 25 bp, Homo sapien
gggtgaccgtacaaaaggcctgata

SEQ ID NO: 1039659 - DNA, 25 bp, Homo sapien
tctgtctgtacaactggaacactgg

SEQ ID NO: 1039660 - DNA, 25 bp, Homo sapien
aagtcataaccacacagaagcgtgt

SEQ ID NO: 1039661 - DNA, 25 bp, Homo sapien
gctacgtctaattgctttttccgca

SEQ ID NO: 1039662 - DNA, 25 bp, Homo sapien
ccccagtaaagtgcaatcgacatcc

SEQ ID NO: 1039663 - DNA, 25 bp, Homo sapien
ctgtaactccatctgaggcaaatcc

SEQ ID NO: 1039664 - DNA, 25 bp, Homo sapien
caatagatgctaaattctgctacgt

SEQ ID NO: 1039665 - DNA, 25 bp, Homo sapien
cttccatgctgtcttgcaacaaatc

SEQ ID NO: 1039666 - DNA, 25 bp, Homo sapien
gtggcagtgaccctacgccgcttcc

SEQ ID NO: 1039667 - DNA, 25 bp, Homo sapien
aacaaatctccctgccgaaatcgta

SEQ ID NO: 1039668 - DNA, 25 bp, Homo sapien
tgtcttgcaacaaatctccctgccg

SEQ ID NO: 1039669 - DNA, 25 bp, Homo sapien
tttcctacttctgcctctcgagtag

SEQ ID NO: 1039670 - DNA, 25 bp, Homo sapien
caattttcctacttctgcctctcga

SEQ ID NO: 1039671 - DNA, 25 bp, Homo sapien
ttaagcaattttcctacttctgcct

SEQ ID NO: 1039672 - DNA, 25 bp, Homo sapien
attttcctacttctgcctctcgagt

SEQ ID NO: 1039673 - DNA, 25 bp, Homo sapien
aacacctgctctgctccgaatggct

SEQ ID NO: 1039674 - DNA, 25 bp, Homo sapien
agaacacctgctctgctccgaatgg

SEQ ID NO: 1039675 - DNA, 25 bp, Homo sapien
gtcacaagaacacctgctctgctcc

SEQ ID NO: 1039676 - DNA, 25 bp, Homo sapien
acaagaacacctgctctgctccgaa

SEQ ID NO: 1039677 - DNA, 25 bp, Homo sapien
gatggctgcgactctccatgctcct

SEQ ID NO: 1039678 - DNA, 25 bp, Homo sapien
ggtctccagctgaatatcacaatca

SEQ ID NO: 1039679 - DNA, 25 bp, Homo sapien
caatacggggactgtgccgagaccg

SEQ ID NO: 1039680 - DNA, 25 bp, Homo sapien
acaggctccaggacgtagtgatggc

SEQ ID NO: 1039681 - DNA, 25 bp, Homo sapien
cttagatatcgccaccttgggtttc

SEQ ID NO: 1039682 - DNA, 25 bp, Homo sapien
ctcctttcgttccagctccttgagg

SEQ ID NO: 1039683 - DNA, 25 bp, Homo sapien
gatatcgccaccttgggtttccacc

SEQ ID NO: 1039684 - DNA, 25 bp, Homo sapien
attccatgatttgccggtattgcag

SEQ ID NO: 1039685 - DNA, 25 bp, Homo sapien
gaaatagtccataacgatgtaatca

SEQ ID NO: 1039686 - DNA, 25 bp, Homo sapien
tgtcatctgtggacagcaggcctcc

SEQ ID NO: 1039687 - DNA, 25 bp, Homo sapien
gagcgcggtgcaacataaagtccca

SEQ ID NO: 1039688 - DNA, 25 bp, Homo sapien
gcaggcctccttttaacttgttgaa

SEQ ID NO: 1039689 - DNA, 25 bp, Homo sapien
taagatacagcatcacgagcgcggt

SEQ ID NO: 1039690 - DNA, 25 bp, Homo sapien
aacgttgtagatccagagacactgg

SEQ ID NO: 1039691 - DNA, 25 bp, Homo sapien
taagtagcttttccatataatccag

SEQ ID NO: 1039692 - DNA, 25 bp, Homo sapien
caagataaatagttccatgattgct

SEQ ID NO: 1039693 - DNA, 25 bp, Homo sapien
ggacaccctcacaagccactaaaag

SEQ ID NO: 1039694 - DNA, 25 bp, Homo sapien
cagttcacgcaaaatcttcaattcc

SEQ ID NO: 1039695 - DNA, 25 bp, Homo sapien
cctgtttgtgaaatcgatcatgaac

SEQ ID NO: 1039696 - DNA, 25 bp, Homo sapien
gaaatcgatcatgaaccagttcacg

SEQ ID NO: 1039697 - DNA, 25 bp, Homo sapien
tgttcctcttcaatccgacacattt

SEQ ID NO: 1039698 - DNA, 25 bp, Homo sapien
ggttctggggctcccggacaggctc

SEQ ID NO: 1039699 - DNA, 25 bp, Homo sapien
tgctgcccgtaccagccaccccatc

SEQ ID NO: 1039700 - DNA, 25 bp, Homo sapien
ggtctgctgcccgtaccagccaccc

SEQ ID NO: 1039701 - DNA, 25 bp, Homo sapien
gctcctggagaatcaaactgaggct

SEQ ID NO: 1039702 - DNA, 25 bp, Homo sapien
gaaaactcgagctgcatgaaagcac

SEQ ID NO: 1039703 - DNA, 25 bp, Homo sapien
gagtcactgtacctcgctgcaactg

SEQ ID NO: 1039704 - DNA, 25 bp, Homo sapien
gctccttgtgtaacagagtcactgt

SEQ ID NO: 1039705 - DNA, 25 bp, Homo sapien
tgttcatacacgaggcatctgcagt

SEQ ID NO: 1039706 - DNA, 25 bp, Homo sapien
gccaggtctcgaagaaacagtccac

SEQ ID NO: 1039707 - DNA, 25 bp, Homo sapien
tttcttcgaggaagagactctgcta

SEQ ID NO: 1039708 - DNA, 25 bp, Homo sapien
agaggaaacatagttccttctgtag

SEQ ID NO: 1039709 - DNA, 25 bp, Homo sapien
acccaaccggactgaaagcaacgag

SEQ ID NO: 1039710 - DNA, 25 bp, Homo sapien
tgtagtttgtagaccaaaagattgt

SEQ ID NO: 1039711 - DNA, 25 bp, Homo sapien
attgtgagactctgccaacttcttt

SEQ ID NO: 1039712 - DNA, 25 bp, Homo sapien
ctgcagatgtagtttgtagaccaaa

SEQ ID NO: 1039713 - DNA, 25 bp, Homo sapien
cagatgtagtttgtagaccaaaaga

SEQ ID NO: 1039714 - DNA, 25 bp, Homo sapien
tgtgctgacattgagccgcctctca

SEQ ID NO: 1039715 - DNA, 25 bp, Homo sapien
tatgatgttcaagggccttgtgctg

SEQ ID NO: 1039716 - DNA, 25 bp, Homo sapien
caaagtggctgtgcgccggatttct

SEQ ID NO: 1039717 - DNA, 25 bp, Homo sapien
aatggcctgcggattgtatatgatg

SEQ ID NO: 1039718 - DNA, 25 bp, Homo sapien
ttatattgtcttcgggcagcttcag

SEQ ID NO: 1039719 - DNA, 25 bp, Homo sapien
tcacccactagcaaacgatcaagag

SEQ ID NO: 1039720 - DNA, 25 bp, Homo sapien
cgatcaagagtttgccggatttctg

SEQ ID NO: 1039721 - DNA, 25 bp, Homo sapien
tgccggatttctgccttggtctgca

SEQ ID NO: 1039722 - DNA, 25 bp, Homo sapien
gcagaaatatccagccgcacggtcc

SEQ ID NO: 1039723 - DNA, 25 bp, Homo sapien
aatatccagccgcacggtccatcgt

SEQ ID NO: 1039724 - DNA, 25 bp, Homo sapien
tatccagccgcacggtccatcgttt

SEQ ID NO: 1039725 - DNA, 25 bp, Homo sapien
agccgcacggtccatcgtttactct

SEQ ID NO: 1039726 - DNA, 25 bp, Homo sapien
cttgggtgttcgtcaaaagcattct

SEQ ID NO: 1039727 - DNA, 25 bp, Homo sapien
tagatccacgacaactaacacagga

SEQ ID NO: 1039728 - DNA, 25 bp, Homo sapien
cacaggattcttgaatttgaaatca

SEQ ID NO: 1039729 - DNA, 25 bp, Homo sapien
aaaagcattcttcctagatccacga

SEQ ID NO: 1039730 - DNA, 25 bp, Homo sapien
gataccatctcgctatactcggcag

SEQ ID NO: 1039731 - DNA, 25 bp, Homo sapien
gcttccgagggatagaaacaactgg

SEQ ID NO: 1039732 - DNA, 25 bp, Homo sapien
ttaagtgggccacattcggtccaga

SEQ ID NO: 1039733 - DNA, 25 bp, Homo sapien
taagttgcctgagagcacggctcct

SEQ ID NO: 1039734 - DNA, 25 bp, Homo sapien
atcatgtcgtgtgaaatgagcttcc

SEQ ID NO: 1039735 - DNA, 25 bp, Homo sapien
tgccagacccggaaggtgggcaaaa

SEQ ID NO: 1039736 - DNA, 25 bp, Homo sapien
gactgttggcactgccagacccgga

SEQ ID NO: 1039737 - DNA, 25 bp, Homo sapien
tgggcaaaacatccggcttccttca

SEQ ID NO: 1039738 - DNA, 25 bp, Homo sapien
tctctctctatagggatcttctcca

SEQ ID NO: 1039739 - DNA, 25 bp, Homo sapien
ccagtttaaactgaatggtggtgtt

SEQ ID NO: 1039740 - DNA, 25 bp, Homo sapien
catctgggctaagagaaaaagtcaa

SEQ ID NO: 1039741 - DNA, 25 bp, Homo sapien
tcatgatgctagaagttcccaggtc

SEQ ID NO: 1039742 - DNA, 25 bp, Homo sapien
tgtccagggtttgtaaaacctgctc

SEQ ID NO: 1039743 - DNA, 25 bp, Homo sapien
tattcagatcttcactgtacacgag

SEQ ID NO: 1039744 - DNA, 25 bp, Homo sapien
gtaaaacctgctcatatacatgctt

SEQ ID NO: 1039745 - DNA, 25 bp, Homo sapien
tcttcactgtacacgagattgtcca

SEQ ID NO: 1039746 - DNA, 25 bp, Homo sapien
ggcaaggggaggaggtagcactggc

SEQ ID NO: 1039747 - DNA, 25 bp, Homo sapien
gcaaggggaggaggtagcactggct

SEQ ID NO: 1039748 - DNA, 25 bp, Homo sapien
gatctccacttagctgaacctgaag

SEQ ID NO: 1039749 - DNA, 25 bp, Homo sapien
gctggagtggctgaacaatccattc

SEQ ID NO: 1039750 - DNA, 25 bp, Homo sapien
gaagctctgatatacaaaaggtggc

SEQ ID NO: 1039751 - DNA, 25 bp, Homo sapien
tgacttctgagaggtgttagaaagg

SEQ ID NO: 1039752 - DNA, 25 bp, Homo sapien
gatattccacattggacactgaggg

SEQ ID NO: 1039753 - DNA, 25 bp, Homo sapien
gggctcctcgagacaccatcaggtt

SEQ ID NO: 1039754 - DNA, 25 bp, Homo sapien
gagagaccgaggcatatcaggatat

SEQ ID NO: 1039755 - DNA, 25 bp, Homo sapien
gaggtgggcctttgatacaactgga

SEQ ID NO: 1039756 - DNA, 25 bp, Homo sapien
caacaagtatcttgggctcatccac

SEQ ID NO: 1039757 - DNA, 25 bp, Homo sapien
tccaacaagtatcttgggctcatcc

SEQ ID NO: 1039758 - DNA, 25 bp, Homo sapien
ccaacaagtatcttgggctcatcca

SEQ ID NO: 1039759 - DNA, 25 bp, Homo sapien
ctaccaagaatatgttgatgtggac

SEQ ID NO: 1039760 - DNA, 25 bp, Homo sapien
gaatatgttgatgtggactaaggaa

SEQ ID NO: 1039761 - DNA, 25 bp, Homo sapien
ccaagaatatgttgatgtggactaa

SEQ ID NO: 1039762 - DNA, 25 bp, Homo sapien
tgttgatgtggactaaggaatcatc

SEQ ID NO: 1039763 - DNA, 25 bp, Homo sapien
cagactccatggaggcatgtggctc

SEQ ID NO: 1039764 - DNA, 25 bp, Homo sapien
acaacccaggtttgcagtgtgatca

SEQ ID NO: 1039765 - DNA, 25 bp, Homo sapien
tggttgtctgcagtggagccgattc

SEQ ID NO: 1039766 - DNA, 25 bp, Homo sapien
caacttcacgttgtgcagaatgccc

SEQ ID NO: 1039767 - DNA, 25 bp, Homo sapien
catttccaggtgtgctactaatttg

SEQ ID NO: 1039768 - DNA, 25 bp, Homo sapien
tggtcttattcagcactagagaaag

SEQ ID NO: 1039769 - DNA, 25 bp, Homo sapien
caagctcactggtggtcttattcag

SEQ ID NO: 1039770 - DNA, 25 bp, Homo sapien
gctactaatttggacacatttgctt

SEQ ID NO: 1039771 - DNA, 25 bp, Homo sapien
taaaagtctggaagatgagtgcttc

SEQ ID NO: 1039772 - DNA, 25 bp, Homo sapien
tctggaagatgagtgcttcttcacc

SEQ ID NO: 1039773 - DNA, 25 bp, Homo sapien
ccatggcatgtgaggtcacttagag

SEQ ID NO: 1039774 - DNA, 25 bp, Homo sapien
ttcaccactggtagtgaaccgttct

SEQ ID NO: 1039775 - DNA, 25 bp, Homo sapien
atactgcacagaggccatccggagg

SEQ ID NO: 1039776 - DNA, 25 bp, Homo sapien
ggaaacgctgagtatgcacatactg

SEQ ID NO: 1039777 - DNA, 25 bp, Homo sapien
cgaatgtcgtgttctctccggagca

SEQ ID NO: 1039778 - DNA, 25 bp, Homo sapien
atccggaggctcacgcgaatgtcgt

SEQ ID NO: 1039779 - DNA, 25 bp, Homo sapien
gcaccagcctcaatatccaggagaa

SEQ ID NO: 1039780 - DNA, 25 bp, Homo sapien
gaacccgtgaacagcgctgggcttg

SEQ ID NO: 1039781 - DNA, 25 bp, Homo sapien
ctttctgggatcaagagaacgggag

SEQ ID NO: 1039782 - DNA, 25 bp, Homo sapien
tccccaaatttgctacaatcagatt

SEQ ID NO: 1039783 - DNA, 25 bp, Homo sapien
gacaaacctcacacatgcaaatgta

SEQ ID NO: 1039784 - DNA, 25 bp, Homo sapien
taaccactggaatgcatattagaca

SEQ ID NO: 1039785 - DNA, 25 bp, Homo sapien
caagggcaaataacccgtctccaag

SEQ ID NO: 1039786 - DNA, 25 bp, Homo sapien
tgagaagattaacccaaagcttttc

SEQ ID NO: 1039787 - DNA, 25 bp, Homo sapien
cactcttcaggcttcctaggctcat

SEQ ID NO: 1039788 - DNA, 25 bp, Homo sapien
tactggactcttggccaacagacag

SEQ ID NO: 1039789 - DNA, 25 bp, Homo sapien
gcatcgtgaactgcccctgggaatg

SEQ ID NO: 1039790 - DNA, 25 bp, Homo sapien
aggtactgggcacaaactcactctt

SEQ ID NO: 1039791 - DNA, 25 bp, Homo sapien
attatgttgcttttctcctctttta

SEQ ID NO: 1039792 - DNA, 25 bp, Homo sapien
cttcagtattatgttgcttttctcc

SEQ ID NO: 1039793 - DNA, 25 bp, Homo sapien
ttatgttgcttttctcctcttttac

SEQ ID NO: 1039794 - DNA, 25 bp, Homo sapien
cagtattatgttgcttttctcctct

SEQ ID NO: 1039795 - DNA, 25 bp, Homo sapien
tattctctcggatgtctctctgcag

SEQ ID NO: 1039796 - DNA, 25 bp, Homo sapien
tcctggagatccacgacaacgcaat

SEQ ID NO: 1039797 - DNA, 25 bp, Homo sapien
cctgtctgtcgcacaaaataggaag

SEQ ID NO: 1039798 - DNA, 25 bp, Homo sapien
tacaaggctcggttaagaggcttcc

SEQ ID NO: 1039799 - DNA, 25 bp, Homo sapien
gaataggttcgtcatctcagctggg

SEQ ID NO: 1039800 - DNA, 25 bp, Homo sapien
gagaaaagccgacatacaacagagt

SEQ ID NO: 1039801 - DNA, 25 bp, Homo sapien
aaagctttctctaacctcccatggg

SEQ ID NO: 1039802 - DNA, 25 bp, Homo sapien
tgtttcatactgagcccagatggga

SEQ ID NO: 1039803 - DNA, 25 bp, Homo sapien
aggttgttctctaataagccgcgga

SEQ ID NO: 1039804 - DNA, 25 bp, Homo sapien
catggatagatatgtctggcacagt

SEQ ID NO: 1039805 - DNA, 25 bp, Homo sapien
agccgcggatcagcttgtatttata

SEQ ID NO: 1039806 - DNA, 25 bp, Homo sapien
taaggccgcataaattcctctatgg

SEQ ID NO: 1039807 - DNA, 25 bp, Homo sapien
caggtgtacacttctccactcagga

SEQ ID NO: 1039808 - DNA, 25 bp, Homo sapien
ttcaccatatcaatgaggaagcaca

SEQ ID NO: 1039809 - DNA, 25 bp, Homo sapien
ccatatcaatgaggaagcacataca

SEQ ID NO: 1039810 - DNA, 25 bp, Homo sapien
ggaagcacatacaggtgtacacttc

SEQ ID NO: 1039811 - DNA, 25 bp, Homo sapien
agggctggtcttctgcccagcataa

SEQ ID NO: 1039812 - DNA, 25 bp, Homo sapien
taacgggtgtcaaaagccatcatgg

SEQ ID NO: 1039813 - DNA, 25 bp, Homo sapien
tgaacacattcgtcatgccagggct

SEQ ID NO: 1039814 - DNA, 25 bp, Homo sapien
tcatggaatgggaaaccaagttaat

SEQ ID NO: 1039815 - DNA, 25 bp, Homo sapien
tctaaagccaacaaagacgtgaccc

SEQ ID NO: 1039816 - DNA, 25 bp, Homo sapien
ggccaataaatgaaactgcaagatt

SEQ ID NO: 1039817 - DNA, 25 bp, Homo sapien
tatttttaaaggcaacagagacatc

SEQ ID NO: 1039818 - DNA, 25 bp, Homo sapien
gtacactgcactgattaagccatta

SEQ ID NO: 1039819 - DNA, 25 bp, Homo sapien
cacacggagattgttgagaactact

SEQ ID NO: 1039820 - DNA, 25 bp, Homo sapien
ttgggaactatagcagattcgctgc

SEQ ID NO: 1039821 - DNA, 25 bp, Homo sapien
gattcgctgctagagttacggtggc

SEQ ID NO: 1039822 - DNA, 25 bp, Homo sapien
gaagaccgcttggtaactactccac

SEQ ID NO: 1039823 - DNA, 25 bp, Homo sapien
tcttcaatgaccacaaactccgtac

SEQ ID NO: 1039824 - DNA, 25 bp, Homo sapien
aatggcattggtgtcgaagcaggac

SEQ ID NO: 1039825 - DNA, 25 bp, Homo sapien
gcttataggtgagcactgtggtgcc

SEQ ID NO: 1039826 - DNA, 25 bp, Homo sapien
ctgaaaaggggcgatcaacaaaccg

SEQ ID NO: 1039827 - DNA, 25 bp, Homo sapien
aacgagagggcacaacaaggtgcct

SEQ ID NO: 1039828 - DNA, 25 bp, Homo sapien
ctgcagaacgagagggcacaacaag

SEQ ID NO: 1039829 - DNA, 25 bp, Homo sapien
tgcagaacgagagggcacaacaagg

SEQ ID NO: 1039830 - DNA, 25 bp, Homo sapien
cagaacgagagggcacaacaaggtg

SEQ ID NO: 1039831 - DNA, 25 bp, Homo sapien
caggacaggtgggaaatcttcacta

SEQ ID NO: 1039832 - DNA, 25 bp, Homo sapien
gctcattccctagtcggcatgaaaa

SEQ ID NO: 1039833 - DNA, 25 bp, Homo sapien
tgataagaagaattccccaccaact

SEQ ID NO: 1039834 - DNA, 25 bp, Homo sapien
ccatttgaatttgtacgggatccac

SEQ ID NO: 1039835 - DNA, 25 bp, Homo sapien
taagtgccaacggagtctgactcca

SEQ ID NO: 1039836 - DNA, 25 bp, Homo sapien
cagggccactgagtctggcactgca

SEQ ID NO: 1039837 - DNA, 25 bp, Homo sapien
gctgaacatcattataggagagtct

SEQ ID NO: 1039838 - DNA, 25 bp, Homo sapien
ctctgggatggattttgcaatggca

SEQ ID NO: 1039839 - DNA, 25 bp, Homo sapien
ctgatttcctctccaacgcgagatg

SEQ ID NO: 1039840 - DNA, 25 bp, Homo sapien
gagagtcatacttaggacttacagt

SEQ ID NO: 1039841 - DNA, 25 bp, Homo sapien
cgttattagcaagactgagtgggtt

SEQ ID NO: 1039842 - DNA, 25 bp, Homo sapien
gtcaaaaagaagaagcgttattagc

SEQ ID NO: 1039843 - DNA, 25 bp, Homo sapien
actgtgtacaatttagttgtgcaaa

SEQ ID NO: 1039844 - DNA, 25 bp, Homo sapien
gcttaaaattagaggtgggcacagt

SEQ ID NO: 1039845 - DNA, 25 bp, Homo sapien
gggactactcgagaccaggaactca

SEQ ID NO: 1039846 - DNA, 25 bp, Homo sapien
gaaggtctatttcgcatctggcccc

SEQ ID NO: 1039847 - DNA, 25 bp, Homo sapien
ttttaaagtggtgtcctggccagga

SEQ ID NO: 1039848 - DNA, 25 bp, Homo sapien
agagctttgcgacaatcatccatgc

SEQ ID NO: 1039849 - DNA, 25 bp, Homo sapien
gctttgcgacaatcatccatgctga

SEQ ID NO: 1039850 - DNA, 25 bp, Homo sapien
gacaatcatccatgctgaatcccag

SEQ ID NO: 1039851 - DNA, 25 bp, Homo sapien
gccaaaagagctttgcgacaatcat

SEQ ID NO: 1039852 - DNA, 25 bp, Homo sapien
taagatgatatgcagtccagagaag

SEQ ID NO: 1039853 - DNA, 25 bp, Homo sapien
tccagagaagacacataaagcgtcc

SEQ ID NO: 1039854 - DNA, 25 bp, Homo sapien
tcatcaagataaacaacgggtaaca

SEQ ID NO: 1039855 - DNA, 25 bp, Homo sapien
tcagctctctaagtcaccttgtgga

SEQ ID NO: 1039856 - DNA, 25 bp, Homo sapien
tcagacttaatgaagaacttaaatt

SEQ ID NO: 1039857 - DNA, 25 bp, Homo sapien
aaaatcatcagacttaatgaagaac

SEQ ID NO: 1039858 - DNA, 25 bp, Homo sapien
atcagacttaatgaagaacttaaat

SEQ ID NO: 1039859 - DNA, 25 bp, Homo sapien
gatatatggtatgcccaggctgtct

SEQ ID NO: 1039860 - DNA, 25 bp, Homo sapien
taaaaatcaagttcacagggtagca

SEQ ID NO: 1039861 - DNA, 25 bp, Homo sapien
gcaagttgcagattaccacagttgg

SEQ ID NO: 1039862 - DNA, 25 bp, Homo sapien
tgtttgagggcatataatctggata

SEQ ID NO: 1039863 - DNA, 25 bp, Homo sapien
ttcagcgtcccattaattggcattc

SEQ ID NO: 1039864 - DNA, 25 bp, Homo sapien
tgtatcagctgtatggagagctgcc

SEQ ID NO: 1039865 - DNA, 25 bp, Homo sapien
gctcaatgttctgggatgtatcagc

SEQ ID NO: 1039866 - DNA, 25 bp, Homo sapien
tccttgccaggtttcagcgtcccat

SEQ ID NO: 1039867 - DNA, 25 bp, Homo sapien
ttttgatattctaaccctgggtgac

SEQ ID NO: 1039868 - DNA, 25 bp, Homo sapien
gcctggaatcacactagagagccta

SEQ ID NO: 1039869 - DNA, 25 bp, Homo sapien
tctctctagctagggtagggatcaa

SEQ ID NO: 1039870 - DNA, 25 bp, Homo sapien
tgtcaaaatagctcacagcaaaagt

SEQ ID NO: 1039871 - DNA, 25 bp, Homo sapien
tgctcgacacacaatccggatggtg

SEQ ID NO: 1039872 - DNA, 25 bp, Homo sapien
gttcagctgccgacggttgacgtca

SEQ ID NO: 1039873 - DNA, 25 bp, Homo sapien
gacgtcatagagtcgcattctcacc

SEQ ID NO: 1039874 - DNA, 25 bp, Homo sapien
caccatatagttttgggttccaggt

SEQ ID NO: 1039875 - DNA, 25 bp, Homo sapien
taagcatttatgatggaagcaggaa

SEQ ID NO: 1039876 - DNA, 25 bp, Homo sapien
gcattggctccatttagttagctaa

SEQ ID NO: 1039877 - DNA, 25 bp, Homo sapien
tgaattcccatgactaacgccaaag

SEQ ID NO: 1039878 - DNA, 25 bp, Homo sapien
gcagctcagactgttgaagtaatct

SEQ ID NO: 1039879 - DNA, 25 bp, Homo sapien
agagaaaagtttacatcaataccac

SEQ ID NO: 1039880 - DNA, 25 bp, Homo sapien
gagaaaagtttacatcaataccacc

SEQ ID NO: 1039881 - DNA, 25 bp, Homo sapien
gagagaaaagtttacatcaatacca

SEQ ID NO: 1039882 - DNA, 25 bp, Homo sapien
gaaaagtttacatcaataccaccca

SEQ ID NO: 1039883 - DNA, 25 bp, Homo sapien
ggactcaggctacgggccagctcat

SEQ ID NO: 1039884 - DNA, 25 bp, Homo sapien
ggcattgtcctgtctgaagatcagt

SEQ ID NO: 1039885 - DNA, 25 bp, Homo sapien
tcagcatagcagaataagagaggac

SEQ ID NO: 1039886 - DNA, 25 bp, Homo sapien
tcttggcattgtcctgtctgaagat

SEQ ID NO: 1039887 - DNA, 25 bp, Homo sapien
cactaacaagcgatgtaaacttggg

SEQ ID NO: 1039888 - DNA, 25 bp, Homo sapien
gccagtgtcctgtcatggatttcga

SEQ ID NO: 1039889 - DNA, 25 bp, Homo sapien
ttcctgccctgcctaaaccattggg

SEQ ID NO: 1039890 - DNA, 25 bp, Homo sapien
cccagccggcctgatactattacaa

SEQ ID NO: 1039891 - DNA, 25 bp, Homo sapien
cggcatgccttctggatgaatcccc

SEQ ID NO: 1039892 - DNA, 25 bp, Homo sapien
ttcaaagctcggacaccactaccac

SEQ ID NO: 1039893 - DNA, 25 bp, Homo sapien
caatgttatagatcagccctgggcg

SEQ ID NO: 1039894 - DNA, 25 bp, Homo sapien
gccctgggcggtttccttgctggat

SEQ ID NO: 1039895 - DNA, 25 bp, Homo sapien
ctttttggcttacacctgggacaca

SEQ ID NO: 1039896 - DNA, 25 bp, Homo sapien
taacagcaactaaaatacacaggtg

SEQ ID NO: 1039897 - DNA, 25 bp, Homo sapien
ggttcagaggcaagatcaacatccc

SEQ ID NO: 1039898 - DNA, 25 bp, Homo sapien
tatcacccagaggatattgaacctt

SEQ ID NO: 1039899 - DNA, 25 bp, Homo sapien
aatgtatcgacctcggcctttcttg

SEQ ID NO: 1039900 - DNA, 25 bp, Homo sapien
ggcaaattccctctgtgcaaatgca

SEQ ID NO: 1039901 - DNA, 25 bp, Homo sapien
gaccatgcaggtatcaatgtatcga

SEQ ID NO: 1039902 - DNA, 25 bp, Homo sapien
tgcaaatgcaagcttgtgagatgat

SEQ ID NO: 1039903 - DNA, 25 bp, Homo sapien
gatcacaggctttagtcaacaagtc

SEQ ID NO: 1039904 - DNA, 25 bp, Homo sapien
gagcagttacttgcatcacagaacg

SEQ ID NO: 1039905 - DNA, 25 bp, Homo sapien
tctgggtaccaaaggcacagagcag

SEQ ID NO: 1039906 - DNA, 25 bp, Homo sapien
taccctctaacaggagctatctggg

SEQ ID NO: 1039907 - DNA, 25 bp, Homo sapien
tcattccgaggccagtggaacacca

SEQ ID NO: 1039908 - DNA, 25 bp, Homo sapien
gacacacaatagctgatcatagtca

SEQ ID NO: 1039909 - DNA, 25 bp, Homo sapien
tccagaccaaatacaattgggaacg

SEQ ID NO: 1039910 - DNA, 25 bp, Homo sapien
ttgggaacgtccatcagtctgacac

SEQ ID NO: 1039911 - DNA, 25 bp, Homo sapien
gactttgcaagttctaagacctctg

SEQ ID NO: 1039912 - DNA, 25 bp, Homo sapien
ttaccacattaggtgtagaaagcca

SEQ ID NO: 1039913 - DNA, 25 bp, Homo sapien
tacaccatggtcaaaacgggcaaca

SEQ ID NO: 1039914 - DNA, 25 bp, Homo sapien
tactctttggattagacaacagcaa

SEQ ID NO: 1039915 - DNA, 25 bp, Homo sapien
tccactcgtaggaagaagcattttc

SEQ ID NO: 1039916 - DNA, 25 bp, Homo sapien
tcctcggagagtaatttccactcgt

SEQ ID NO: 1039917 - DNA, 25 bp, Homo sapien
caattcggaaaggaggaggtaactg

SEQ ID NO: 1039918 - DNA, 25 bp, Homo sapien
gatcctatacgtagctcctcggaga

SEQ ID NO: 1039919 - DNA, 25 bp, Homo sapien
taaagctgccgattatcctggaaat

SEQ ID NO: 1039920 - DNA, 25 bp, Homo sapien
cttcacttcagtccggagcctgggt

SEQ ID NO: 1039921 - DNA, 25 bp, Homo sapien
cagtcagagtgataaaaggtggcaa

SEQ ID NO: 1039922 - DNA, 25 bp, Homo sapien
tgggttcagctacgccatgctgagt

SEQ ID NO: 1039923 - DNA, 25 bp, Homo sapien
tgagacatccaaaacgagctccgca

SEQ ID NO: 1039924 - DNA, 25 bp, Homo sapien
tctttgtgtcttgggtgagacatcc

SEQ ID NO: 1039925 - DNA, 25 bp, Homo sapien
taatggccttgttggaagccacagg

SEQ ID NO: 1039926 - DNA, 25 bp, Homo sapien
aaacgagctccgcacaggtaatggc

SEQ ID NO: 1039927 - DNA, 25 bp, Homo sapien
agtttccatactgggattcctctac

SEQ ID NO: 1039928 - DNA, 25 bp, Homo sapien
gtttccatactgggattcctctact

SEQ ID NO: 1039929 - DNA, 25 bp, Homo sapien
caagtttccatactgggattcctct

SEQ ID NO: 1039930 - DNA, 25 bp, Homo sapien
gatcaagtttccatactgggattcc

SEQ ID NO: 1039931 - DNA, 25 bp, Homo sapien
cctccacagctgagaacgctttcct

SEQ ID NO: 1039932 - DNA, 25 bp, Homo sapien
cacagctgagaacgctttcctggtt

SEQ ID NO: 1039933 - DNA, 25 bp, Homo sapien
acagctgagaacgctttcctggttc

SEQ ID NO: 1039934 - DNA, 25 bp, Homo sapien
ctccacagctgagaacgctttcctg

SEQ ID NO: 1039935 - DNA, 25 bp, Homo sapien
gcttattgggattgtgaggaactga

SEQ ID NO: 1039936 - DNA, 25 bp, Homo sapien
atggcagacccctcggtggagcggg

SEQ ID NO: 1039937 - DNA, 25 bp, Homo sapien
ctgttgtcagtcactgcagcgagac

SEQ ID NO: 1039938 - DNA, 25 bp, Homo sapien
ccagcaatatctaagatggcagacc

SEQ ID NO: 1039939 - DNA, 25 bp, Homo sapien
ccttctcggaaactccacgtctgag

SEQ ID NO: 1039940 - DNA, 25 bp, Homo sapien
cttcgcctgcggtcaggctttctca

SEQ ID NO: 1039941 - DNA, 25 bp, Homo sapien
gctttctcagcatcagtggctcgta

SEQ ID NO: 1039942 - DNA, 25 bp, Homo sapien
catgtaacccacaggtcagttttcc

SEQ ID NO: 1039943 - DNA, 25 bp, Homo sapien
caagagcgacactttgtcaaaagaa

SEQ ID NO: 1039944 - DNA, 25 bp, Homo sapien
aaaagacagactgactgacttcagc

SEQ ID NO: 1039945 - DNA, 25 bp, Homo sapien
caattcacaaatcaggcagcctcca

SEQ ID NO: 1039946 - DNA, 25 bp, Homo sapien
agactgactgacttcagccgaatta

SEQ ID NO: 1039947 - DNA, 25 bp, Homo sapien
tggccccaaaagctccatggaagtg

SEQ ID NO: 1039948 - DNA, 25 bp, Homo sapien
taataaattgttgttcaggtggaac

SEQ ID NO: 1039949 - DNA, 25 bp, Homo sapien
gactctgatggataacattccagaa

SEQ ID NO: 1039950 - DNA, 25 bp, Homo sapien
ctggagtgctctagttggtccatct

SEQ ID NO: 1039951 - DNA, 25 bp, Homo sapien
tcctgctctgtatctggattcttta

SEQ ID NO: 1039952 - DNA, 25 bp, Homo sapien
gcagctcttgttcggtgacaggaag

SEQ ID NO: 1039953 - DNA, 25 bp, Homo sapien
acttcatatgaacggctgcttttcc

SEQ ID NO: 1039954 - DNA, 25 bp, Homo sapien
aattcctgctctgtatctggattct

SEQ ID NO: 1039955 - DNA, 25 bp, Homo sapien
tcctgtatgctgagttcaagcatgt

SEQ ID NO: 1039956 - DNA, 25 bp, Homo sapien
catgtgactggttgccagctgtgta

SEQ ID NO: 1039957 - DNA, 25 bp, Homo sapien
tgctgagttcaagcatgtgactggt

SEQ ID NO: 1039958 - DNA, 25 bp, Homo sapien
gctgtgtatagtgcacattgattcc

SEQ ID NO: 1039959 - DNA, 25 bp, Homo sapien
gttgtgtgctatattccatccagtg

SEQ ID NO: 1039960 - DNA, 25 bp, Homo sapien
tggtatagtttccttcacagttgtg

SEQ ID NO: 1039961 - DNA, 25 bp, Homo sapien
gttgggtgctaaattgtcatattcc

SEQ ID NO: 1039962 - DNA, 25 bp, Homo sapien
atcagttttgaccaattagtctccc

SEQ ID NO: 1039963 - DNA, 25 bp, Homo sapien
tggagtgtaaaggagtggtctcggc

SEQ ID NO: 1039964 - DNA, 25 bp, Homo sapien
cgccactgcccggataatctttgca

SEQ ID NO: 1039965 - DNA, 25 bp, Homo sapien
ccactgcccggataatctttgcatt

SEQ ID NO: 1039966 - DNA, 25 bp, Homo sapien
agtgtaaaggagtggtctcggctca

SEQ ID NO: 1039967 - DNA, 25 bp, Homo sapien
acagctgggccggtctcgatgacct

SEQ ID NO: 1039968 - DNA, 25 bp, Homo sapien
cttgtagatgttggtcagtgcactc

SEQ ID NO: 1039969 - DNA, 25 bp, Homo sapien
ggagtcacatagagcatgaagggct

SEQ ID NO: 1039970 - DNA, 25 bp, Homo sapien
gggaacttcactgcgttgacttgca

SEQ ID NO: 1039971 - DNA, 25 bp, Homo sapien
cagcttgaggagcagtttctcctca

SEQ ID NO: 1039972 - DNA, 25 bp, Homo sapien
tgatcgtagccaaagaaacttagca

SEQ ID NO: 1039973 - DNA, 25 bp, Homo sapien
ctgattctgcttgatcgtagccaaa

SEQ ID NO: 1039974 - DNA, 25 bp, Homo sapien
tgaatctctgagctgtgatcatcag

SEQ ID NO: 1039975 - DNA, 25 bp, Homo sapien
caaagtagtatcgaattggtgttcc

SEQ ID NO: 1039976 - DNA, 25 bp, Homo sapien
ctgaggaatgctgattttgagattt

SEQ ID NO: 1039977 - DNA, 25 bp, Homo sapien
cttaagatccaatgggagcttgttg

SEQ ID NO: 1039978 - DNA, 25 bp, Homo sapien
ggaggtgaacacacttagcttgatc

SEQ ID NO: 1039979 - DNA, 25 bp, Homo sapien
cacgctgggaaaacagggtactgac

SEQ ID NO: 1039980 - DNA, 25 bp, Homo sapien
tgatgataaagtacgtgagcaggcc

SEQ ID NO: 1039981 - DNA, 25 bp, Homo sapien
tattaggtagaaagcatgaaagcca

SEQ ID NO: 1039982 - DNA, 25 bp, Homo sapien
tcatttcactgtcggagaaactgag

SEQ ID NO: 1039983 - DNA, 25 bp, Homo sapien
ccttggtctcatagggatgtacccg

SEQ ID NO: 1039984 - DNA, 25 bp, Homo sapien
agcgtcttcaaaccgtatcaaagga

SEQ ID NO: 1039985 - DNA, 25 bp, Homo sapien
gaggatatcattgatgatgaactcc

SEQ ID NO: 1039986 - DNA, 25 bp, Homo sapien
gaatggatctagattaatcacagcg

SEQ ID NO: 1039987 - DNA, 25 bp, Homo sapien
caaaagccccataggattgccaaga

SEQ ID NO: 1039988 - DNA, 25 bp, Homo sapien
cagagtttgatactccgtgtgtaac

SEQ ID NO: 1039989 - DNA, 25 bp, Homo sapien
gtccagtaaccccttcagaaacatc

SEQ ID NO: 1039990 - DNA, 25 bp, Homo sapien
tgccaagaaaatccactgatcccag

SEQ ID NO: 1039991 - DNA, 25 bp, Homo sapien
ttccagcttcgcatataatcaattc

SEQ ID NO: 1039992 - DNA, 25 bp, Homo sapien
tttccagcttcgcatataatcaatt

SEQ ID NO: 1039993 - DNA, 25 bp, Homo sapien
gcccggctgcagaactaaatttaaa

SEQ ID NO: 1039994 - DNA, 25 bp, Homo sapien
aattcaagcaatggtgtcactaagc

SEQ ID NO: 1039995 - DNA, 25 bp, Homo sapien
tcaggaataacacactctccccaac

SEQ ID NO: 1039996 - DNA, 25 bp, Homo sapien
tccctctggcttcttaattcaagca

SEQ ID NO: 1039997 - DNA, 25 bp, Homo sapien
tgtgctgtccagcaatgttccagga

SEQ ID NO: 1039998 - DNA, 25 bp, Homo sapien
tagttttaggcttatagaaaggatc

SEQ ID NO: 1039999 - DNA, 25 bp, Homo sapien
caataataataccatttacctagtt

SEQ ID NO: 1040000 - DNA, 25 bp, Homo sapien
attatttacttccactgggtctccg

SEQ ID NO: 1040001 - DNA, 25 bp, Homo sapien
ggtgctttaaggagctgtactacct

SEQ ID NO: 1040002 - DNA, 25 bp, Homo sapien
aagattctgctgaaggactagtaat

SEQ ID NO: 1040003 - DNA, 25 bp, Homo sapien
ggactagtaatagaaggtgctttaa

SEQ ID NO: 1040004 - DNA, 25 bp, Homo sapien
ggagctgtactacctgcagcccctt

SEQ ID NO: 1040005 - DNA, 25 bp, Homo sapien
gtgttctcataacgaagacaaagcc

SEQ ID NO: 1040006 - DNA, 25 bp, Homo sapien
gaggtacagcaaacagccacttctg

SEQ ID NO: 1040007 - DNA, 25 bp, Homo sapien
tcaaagtgttctcataacgaagaca

SEQ ID NO: 1040008 - DNA, 25 bp, Homo sapien
gagaggtacagcaaacagccacttc

SEQ ID NO: 1040009 - DNA, 25 bp, Homo sapien
tgaatgaatgatccccgcaggagct

SEQ ID NO: 1040010 - DNA, 25 bp, Homo sapien
gtgaacttggaatgaccccagctgc

SEQ ID NO: 1040011 - DNA, 25 bp, Homo sapien
ggagggcaggcacgctttattaaac

SEQ ID NO: 1040012 - DNA, 25 bp, Homo sapien
gcaggagctgccgactgttttcaca

SEQ ID NO: 1040013 - DNA, 25 bp, Homo sapien
aagacacacgcctgctgaactggca

SEQ ID NO: 1040014 - DNA, 25 bp, Homo sapien
agaattatctcagcacccaaggttg

SEQ ID NO: 1040015 - DNA, 25 bp, Homo sapien
aacaaagttatctaaagccacccag

SEQ ID NO: 1040016 - DNA, 25 bp, Homo sapien
taaacacttatcaggcaacagacac

SEQ ID NO: 1040017 - DNA, 25 bp, Homo sapien
ctaaaagccctcctaccctaagatg

SEQ ID NO: 1040018 - DNA, 25 bp, Homo sapien
taaaagccctcctaccctaagatgc

SEQ ID NO: 1040019 - DNA, 25 bp, Homo sapien
agaaaagctgtctcatccatcaaag

SEQ ID NO: 1040020 - DNA, 25 bp, Homo sapien
ccagaaaagctgtctcatccatcaa

SEQ ID NO: 1040021 - DNA, 25 bp, Homo sapien
aaccagaaaagctgtctcatccatc

SEQ ID NO: 1040022 - DNA, 25 bp, Homo sapien
taaccagaaaagctgtctcatccat

SEQ ID NO: 1040023 - DNA, 25 bp, Homo sapien
tccctaagccatctgataatgttcc

SEQ ID NO: 1040024 - DNA, 25 bp, Homo sapien
atgtactcccgctctgactgatgcc

SEQ ID NO: 1040025 - DNA, 25 bp, Homo sapien
gtactcccgctctgactgatgccga

SEQ ID NO: 1040026 - DNA, 25 bp, Homo sapien
gatgtactcccgctctgactgatgc

SEQ ID NO: 1040027 - DNA, 25 bp, Homo sapien
tgtactcccgctctgactgatgccg

SEQ ID NO: 1040028 - DNA, 25 bp, Homo sapien
ccaggccatggatgccggctacaag

SEQ ID NO: 1040029 - DNA, 25 bp, Homo sapien
caggccatggatgccggctacaagg

SEQ ID NO: 1040030 - DNA, 25 bp, Homo sapien
gatgccggctacaaggtgttcacca

SEQ ID NO: 1040031 - DNA, 25 bp, Homo sapien
catggatgccggctacaaggtgttc

SEQ ID NO: 1040032 - DNA, 25 bp, Homo sapien
tctccacgtcacaaggatgctggcc

SEQ ID NO: 1040033 - DNA, 25 bp, Homo sapien
gacagctccctttacggttgggcag

SEQ ID NO: 1040034 - DNA, 25 bp, Homo sapien
tggcctgacgtctccttagggacag

SEQ ID NO: 1040035 - DNA, 25 bp, Homo sapien
taaaggccaccacacataacaaagc

SEQ ID NO: 1040036 - DNA, 25 bp, Homo sapien
gaagttataacactggtcagtccac

SEQ ID NO: 1040037 - DNA, 25 bp, Homo sapien
acactggtcagtccaccaatgatac

SEQ ID NO: 1040038 - DNA, 25 bp, Homo sapien
ctgtcgaagttataacactggtcag

SEQ ID NO: 1040039 - DNA, 25 bp, Homo sapien
tataacactggtcagtccaccaatg

SEQ ID NO: 1040040 - DNA, 25 bp, Homo sapien
tccaaggccagatatgaaaccgctg

SEQ ID NO: 1040041 - DNA, 25 bp, Homo sapien
tggttacagtgccaacaagcccttt

SEQ ID NO: 1040042 - DNA, 25 bp, Homo sapien
cagggcgcctgccactggcttggtt

SEQ ID NO: 1040043 - DNA, 25 bp, Homo sapien
gccagatatgaaaccgctgacaccc

SEQ ID NO: 1040044 - DNA, 25 bp, Homo sapien
ggggccgctgagtgtggctgtgtct

SEQ ID NO: 1040045 - DNA, 25 bp, Homo sapien
tggggccgctgagtgtggctgtgtc

SEQ ID NO: 1040046 - DNA, 25 bp, Homo sapien
ggccgctgagtgtggctgtgtctct

SEQ ID NO: 1040047 - DNA, 25 bp, Homo sapien
gggccgctgagtgtggctgtgtctc

SEQ ID NO: 1040048 - DNA, 25 bp, Homo sapien
taagtcgagtctagcttggctgggc

SEQ ID NO: 1040049 - DNA, 25 bp, Homo sapien
tggctgggcccttaacattcattat

SEQ ID NO: 1040050 - DNA, 25 bp, Homo sapien
aaagggcgtactaattcactcaggg

SEQ ID NO: 1040051 - DNA, 25 bp, Homo sapien
ggccaggccctaggcattctaaaag

SEQ ID NO: 1040052 - DNA, 25 bp, Homo sapien
ccccacaacttcataaatgcttcaa

SEQ ID NO: 1040053 - DNA, 25 bp, Homo sapien
tttagttttgtatctgagaatagaa

SEQ ID NO: 1040054 - DNA, 25 bp, Homo sapien
cccacaacttcataaatgcttcaaa

SEQ ID NO: 1040055 - DNA, 25 bp, Homo sapien
tccccacaacttcataaatgcttca

SEQ ID NO: 1040056 - DNA, 25 bp, Homo sapien
tagaaaagcctgtctcaactcccct

SEQ ID NO: 1040057 - DNA, 25 bp, Homo sapien
tccacacgtggaggcacaaagacaa

SEQ ID NO: 1040058 - DNA, 25 bp, Homo sapien
cataggctgggtctaagtctaggtc

SEQ ID NO: 1040059 - DNA, 25 bp, Homo sapien
tgatcactaggttagccaccctcct

SEQ ID NO: 1040060 - DNA, 25 bp, Homo sapien
taggcagatcgctgtctcatgaaac

SEQ ID NO: 1040061 - DNA, 25 bp, Homo sapien
tctggacctggacaaatggactgag

SEQ ID NO: 1040062 - DNA, 25 bp, Homo sapien
gatatatgaagaccggctgtgcctc

SEQ ID NO: 1040063 - DNA, 25 bp, Homo sapien
actgagggacattggtgaaacggct

SEQ ID NO: 1040064 - DNA, 25 bp, Homo sapien
tcctgagaactattgggttgcctgg

SEQ ID NO: 1040065 - DNA, 25 bp, Homo sapien
tgccagcgcactccaacaaggagag

SEQ ID NO: 1040066 - DNA, 25 bp, Homo sapien
gcctggaaatttcagaggaaagtta

SEQ ID NO: 1040067 - DNA, 25 bp, Homo sapien
aaagttaggtggctgtcgcttggaa

SEQ ID NO: 1040068 - DNA, 25 bp, Homo sapien
taaaatgtcatgcaccccagtctgc

SEQ ID NO: 1040069 - DNA, 25 bp, Homo sapien
tcaaaggccgtcacatttacacagt

SEQ ID NO: 1040070 - DNA, 25 bp, Homo sapien
catggcttggcaccttgcttgggcc

SEQ ID NO: 1040071 - DNA, 25 bp, Homo sapien
caaatacatagtgcagaggcagaca

SEQ ID NO: 1040072 - DNA, 25 bp, Homo sapien
tacatctacgtgcacaatccgaggg

SEQ ID NO: 1040073 - DNA, 25 bp, Homo sapien
tccagaacattatcagtcctgatgg

SEQ ID NO: 1040074 - DNA, 25 bp, Homo sapien
cgagggtcccgggattccagaacat

SEQ ID NO: 1040075 - DNA, 25 bp, Homo sapien
cgagataagctccaacactcctgag

SEQ ID NO: 1040076 - DNA, 25 bp, Homo sapien
gactcatctggaaggagcgtgctgg

SEQ ID NO: 1040077 - DNA, 25 bp, Homo sapien
tcatctggaaggagcgtgctggaac

SEQ ID NO: 1040078 - DNA, 25 bp, Homo sapien
cggactcatctggaaggagcgtgct

SEQ ID NO: 1040079 - DNA, 25 bp, Homo sapien
actcatctggaaggagcgtgctgga

SEQ ID NO: 1040080 - DNA, 25 bp, Homo sapien
ttttttcctaacagataatcttgca

SEQ ID NO: 1040081 - DNA, 25 bp, Homo sapien
aaatggcaaaaattagacgctctcc

SEQ ID NO: 1040082 - DNA, 25 bp, Homo sapien
atttcagaaatggaaaggcttttct

SEQ ID NO: 1040083 - DNA, 25 bp, Homo sapien
ggatagtgtggtttctatgaagtca

SEQ ID NO: 1040084 - DNA, 25 bp, Homo sapien
tttatcttgggcaaaggtggatgat

SEQ ID NO: 1040085 - DNA, 25 bp, Homo sapien
ttatcttgggcaaaggtggatgatt

SEQ ID NO: 1040086 - DNA, 25 bp, Homo sapien
ttccctccatttgacaagttagtaa

SEQ ID NO: 1040087 - DNA, 25 bp, Homo sapien
tttccctccatttgacaagttagta

SEQ ID NO: 1040088 - DNA, 25 bp, Homo sapien
cttttagagtatattgtgataagaa

SEQ ID NO: 1040089 - DNA, 25 bp, Homo sapien
ttagagtatattgtgataagaatgt

SEQ ID NO: 1040090 - DNA, 25 bp, Homo sapien
gtaagaggtctttctgatatgtgat

SEQ ID NO: 1040091 - DNA, 25 bp, Homo sapien
ttattgtaagaggtctttctgatat

SEQ ID NO: 1040092 - DNA, 25 bp, Homo sapien
ttgtaagaggtctttctgatatgtg

SEQ ID NO: 1040093 - DNA, 25 bp, Homo sapien
tattgtaagaggtctttctgatatg

SEQ ID NO: 1040094 - DNA, 25 bp, Homo sapien
acatcatcaaagtgacctgggtggg

SEQ ID NO: 1040095 - DNA, 25 bp, Homo sapien
gggcttcactgggaatactatttac

SEQ ID NO: 1040096 - DNA, 25 bp, Homo sapien
gacaatactgaaagagcagttacta

SEQ ID NO: 1040097 - DNA, 25 bp, Homo sapien
ccaaagtgttgaaagtgattgcctc

SEQ ID NO: 1040098 - DNA, 25 bp, Homo sapien
gctgttacagggtcgcatgccccat

SEQ ID NO: 1040099 - DNA, 25 bp, Homo sapien
ttaagcactccatcattctcggttg

SEQ ID NO: 1040100 - DNA, 25 bp, Homo sapien
gatcagccctcgacagttccaagag

SEQ ID NO: 1040101 - DNA, 25 bp, Homo sapien
tctcggttgtcctagtctcggcaga

SEQ ID NO: 1040102 - DNA, 25 bp, Homo sapien
gaaataaaaggtgcatgatgaaagc

SEQ ID NO: 1040103 - DNA, 25 bp, Homo sapien
catcagacttagctagaaatgaaag

SEQ ID NO: 1040104 - DNA, 25 bp, Homo sapien
tttcaaaggctcaaggcattacgat

SEQ ID NO: 1040105 - DNA, 25 bp, Homo sapien
agagctacctcccttgcctaaagga

SEQ ID NO: 1040106 - DNA, 25 bp, Homo sapien
ggctacagactcaatcccttgcggg

SEQ ID NO: 1040107 - DNA, 25 bp, Homo sapien
cacccatgtgatcaagcctgctatg

SEQ ID NO: 1040108 - DNA, 25 bp, Homo sapien
tacctccacgatgactgagcatgcg

SEQ ID NO: 1040109 - DNA, 25 bp, Homo sapien
ttatttacaacaggttccctggaca

SEQ ID NO: 1040110 - DNA, 25 bp, Homo sapien
gcttgcagtaaccagccagcttgga

SEQ ID NO: 1040111 - DNA, 25 bp, Homo sapien
tcttgcttgcagtaaccagccagct

SEQ ID NO: 1040112 - DNA, 25 bp, Homo sapien
ggcttctcttgcttgcagtaaccag

SEQ ID NO: 1040113 - DNA, 25 bp, Homo sapien
ggaaggcgggcttctcttgcttgca

SEQ ID NO: 1040114 - DNA, 25 bp, Homo sapien
ctccagcacggtcttgctttctgac

SEQ ID NO: 1040115 - DNA, 25 bp, Homo sapien
tctccagcacggtcttgctttctga

SEQ ID NO: 1040116 - DNA, 25 bp, Homo sapien
tccagcacggtcttgctttctgacc

SEQ ID NO: 1040117 - DNA, 25 bp, Homo sapien
ttctccagcacggtcttgctttctg

SEQ ID NO: 1040118 - DNA, 25 bp, Homo sapien
catataccgcatacagcacaggctg

SEQ ID NO: 1040119 - DNA, 25 bp, Homo sapien
taaagggccatcagttgaccattac

SEQ ID NO: 1040120 - DNA, 25 bp, Homo sapien
tatgcctcgtctcccaagattggga

SEQ ID NO: 1040121 - DNA, 25 bp, Homo sapien
tacagagagcattcaggcacaaatg

SEQ ID NO: 1040122 - DNA, 25 bp, Homo sapien
caactggtcacgttttacaacagga

SEQ ID NO: 1040123 - DNA, 25 bp, Homo sapien
tactaatacaaggatgtacagcatc

SEQ ID NO: 1040124 - DNA, 25 bp, Homo sapien
gatgtacagcatcagtaccaactgg

SEQ ID NO: 1040125 - DNA, 25 bp, Homo sapien
tacaacaggaactggtggaaagaaa

SEQ ID NO: 1040126 - DNA, 25 bp, Homo sapien
taaaattgtatctggacggagcacc

SEQ ID NO: 1040127 - DNA, 25 bp, Homo sapien
gacctgtctgaatgactcctgagga

SEQ ID NO: 1040128 - DNA, 25 bp, Homo sapien
aacacaggctgaaatcccagtcact

SEQ ID NO: 1040129 - DNA, 25 bp, Homo sapien
ccgtgtccagcccaatattttcaga

SEQ ID NO: 1040130 - DNA, 25 bp, Homo sapien
ggtatatttaattgctgccagctgg

SEQ ID NO: 1040131 - DNA, 25 bp, Homo sapien
tggccaaaggtctgcggtatattta

SEQ ID NO: 1040132 - DNA, 25 bp, Homo sapien
tctgcggtatatttaattgctgcca

SEQ ID NO: 1040133 - DNA, 25 bp, Homo sapien
ctgccagctggagcttgtcggccat

SEQ ID NO: 1040134 - DNA, 25 bp, Homo sapien
tcagagcccaaatatcgatcgaaag

SEQ ID NO: 1040135 - DNA, 25 bp, Homo sapien
acgactgctgccgagaggatgctgg

SEQ ID NO: 1040136 - DNA, 25 bp, Homo sapien
ggccgctgctaacccatcaggagag

SEQ ID NO: 1040137 - DNA, 25 bp, Homo sapien
tagaggggccgctgctaacccatca

SEQ ID NO: 1040138 - DNA, 25 bp, Homo sapien
cagggtaattggtaagtactttctg

SEQ ID NO: 1040139 - DNA, 25 bp, Homo sapien
gctttgttatggctttcagggtagg

SEQ ID NO: 1040140 - DNA, 25 bp, Homo sapien
gccactcagctgtcggcggcccgga

SEQ ID NO: 1040141 - DNA, 25 bp, Homo sapien
tccacacagcatatacagggtaatt

SEQ ID NO: 1040142 - DNA, 25 bp, Homo sapien
gacaaaagcactctgtaatacgaga

SEQ ID NO: 1040143 - DNA, 25 bp, Homo sapien
catgaaatagcggttaaagaccctc

SEQ ID NO: 1040144 - DNA, 25 bp, Homo sapien
cataaagccaagaggttaagtgtgc

SEQ ID NO: 1040145 - DNA, 25 bp, Homo sapien
agtactgcctgtgaatacaccatga

SEQ ID NO: 1040146 - DNA, 25 bp, Homo sapien
agaatatcggggaagcagcccctgg

SEQ ID NO: 1040147 - DNA, 25 bp, Homo sapien
agcaacgcggtttccgaaccctctg

SEQ ID NO: 1040148 - DNA, 25 bp, Homo sapien
cagaatatcggggaagcagcccctg

SEQ ID NO: 1040149 - DNA, 25 bp, Homo sapien
gggccccgtgcagcaacgcggtttc

SEQ ID NO: 1040150 - DNA, 25 bp, Homo sapien
atgttgtctgtgagtttgaagagct

SEQ ID NO: 1040151 - DNA, 25 bp, Homo sapien
tgttgtctgtgagtttgaagagctg

SEQ ID NO: 1040152 - DNA, 25 bp, Homo sapien
gtatgttgtctgtgagtttgaagag

SEQ ID NO: 1040153 - DNA, 25 bp, Homo sapien
tatgttgtctgtgagtttgaagagc

SEQ ID NO: 1040154 - DNA, 25 bp, Homo sapien
tttagtcagaacagtagagcaaggt

SEQ ID NO: 1040155 - DNA, 25 bp, Homo sapien
gaagtgaaacagtgagcctaactgg

SEQ ID NO: 1040156 - DNA, 25 bp, Homo sapien
gacaattgtgcaacttatcagagga

SEQ ID NO: 1040157 - DNA, 25 bp, Homo sapien
aaattaaatgcaactcgatctggga

SEQ ID NO: 1040158 - DNA, 25 bp, Homo sapien
gaccccttatctaatggagcctcat

SEQ ID NO: 1040159 - DNA, 25 bp, Homo sapien
tagaatcaagcttcccgcaaggcct

SEQ ID NO: 1040160 - DNA, 25 bp, Homo sapien
caaaactcagggtggtaagagaagc

SEQ ID NO: 1040161 - DNA, 25 bp, Homo sapien
gcttttggtccacgaatgagtgact

SEQ ID NO: 1040162 - DNA, 25 bp, Homo sapien
tgagcatttttggatagcttaaagc

SEQ ID NO: 1040163 - DNA, 25 bp, Homo sapien
cctgaaattctatcttgtgggtgtt

SEQ ID NO: 1040164 - DNA, 25 bp, Homo sapien
aaactgtaacaatactctattggac

SEQ ID NO: 1040165 - DNA, 25 bp, Homo sapien
ccagggcctgagtgcgaatcccggc

SEQ ID NO: 1040166 - DNA, 25 bp, Homo sapien
ccacgtagtctccacttttcaggaa

SEQ ID NO: 1040167 - DNA, 25 bp, Homo sapien
gagatgagcacgcagtagctgtcaa

SEQ ID NO: 1040168 - DNA, 25 bp, Homo sapien
cagtggtagaggtcatcgtatttga

SEQ ID NO: 1040169 - DNA, 25 bp, Homo sapien
gaagtaaacagctttggaggagatg

SEQ ID NO: 1040170 - DNA, 25 bp, Homo sapien
cctcccatgttcaggactgagaggc

SEQ ID NO: 1040171 - DNA, 25 bp, Homo sapien
ttcaggactgagaggcagcactcct

SEQ ID NO: 1040172 - DNA, 25 bp, Homo sapien
tcaggactgagaggcagcactcctg

SEQ ID NO: 1040173 - DNA, 25 bp, Homo sapien
ccatgttcaggactgagaggcagca

SEQ ID NO: 1040174 - DNA, 25 bp, Homo sapien
gctgttccttatcaccaacgagagt

SEQ ID NO: 1040175 - DNA, 25 bp, Homo sapien
taactgaggcacaaacgttgtgagg

SEQ ID NO: 1040176 - DNA, 25 bp, Homo sapien
caacgagagtaagtattgttaccct

SEQ ID NO: 1040177 - DNA, 25 bp, Homo sapien
ttgttaccctcactacatctacggg

SEQ ID NO: 1040178 - DNA, 25 bp, Homo sapien
taaaagccttgtcataacaatacct

SEQ ID NO: 1040179 - DNA, 25 bp, Homo sapien
aaagccttgtcataacaataccttg

SEQ ID NO: 1040180 - DNA, 25 bp, Homo sapien
agccttgtcataacaataccttgtc

SEQ ID NO: 1040181 - DNA, 25 bp, Homo sapien
tttaaaagccttgtcataacaatac

SEQ ID NO: 1040182 - DNA, 25 bp, Homo sapien
gaatcagcgaacaaaagcctctagg

SEQ ID NO: 1040183 - DNA, 25 bp, Homo sapien
tccaggaatcagatccacccaggtg

SEQ ID NO: 1040184 - DNA, 25 bp, Homo sapien
tctcaggatgggatgtacacgtcaa

SEQ ID NO: 1040185 - DNA, 25 bp, Homo sapien
cacggccataactgatctgcagagg

SEQ ID NO: 1040186 - DNA, 25 bp, Homo sapien
gctgctgttcatagtagaggctctt

SEQ ID NO: 1040187 - DNA, 25 bp, Homo sapien
tctcggttttcgctgagtcttaaca

SEQ ID NO: 1040188 - DNA, 25 bp, Homo sapien
tgtgacaacttgacagcaaggacct

SEQ ID NO: 1040189 - DNA, 25 bp, Homo sapien
gaggctctttgcgtagtttatttct

SEQ ID NO: 1040190 - DNA, 25 bp, Homo sapien
tacaatgctgacttgcacccatgtg

SEQ ID NO: 1040191 - DNA, 25 bp, Homo sapien
tcattcattctaaagtgaggcccct

SEQ ID NO: 1040192 - DNA, 25 bp, Homo sapien
tggacagccacgatgtcaaaggcgt

SEQ ID NO: 1040193 - DNA, 25 bp, Homo sapien
ggctgtggagctacgatgcctgcct

SEQ ID NO: 1040194 - DNA, 25 bp, Homo sapien
ttacaaacaaagtggccctggagcc

SEQ ID NO: 1040195 - DNA, 25 bp, Homo sapien
tcagaacattgcgatgagcacccac

SEQ ID NO: 1040196 - DNA, 25 bp, Homo sapien
gatagaaggctcactgacgcataca

SEQ ID NO: 1040197 - DNA, 25 bp, Homo sapien
taacaaagtcttaggcattgctggc

SEQ ID NO: 1040198 - DNA, 25 bp, Homo sapien
gtatcccaggctgccacagatggtg

SEQ ID NO: 1040199 - DNA, 25 bp, Homo sapien
tcatgcgtatcccaggctgccacag

SEQ ID NO: 1040200 - DNA, 25 bp, Homo sapien
gaaaggcaggtcatgggcttgggcc

SEQ ID NO: 1040201 - DNA, 25 bp, Homo sapien
gggaagaaaggcaggtcatgggctt

SEQ ID NO: 1040202 - DNA, 25 bp, Homo sapien
cccgaagcaccaaagcccgtaggtg

SEQ ID NO: 1040203 - DNA, 25 bp, Homo sapien
ccaaagcccgtaggtgggcatcatc

SEQ ID NO: 1040204 - DNA, 25 bp, Homo sapien
catcatcatggtggccatttgggcc

SEQ ID NO: 1040205 - DNA, 25 bp, Homo sapien
ttcacccagcaagacactcccgaag

SEQ ID NO: 1040206 - DNA, 25 bp, Homo sapien
tcttgcattcttgcggcggcagctc

SEQ ID NO: 1040207 - DNA, 25 bp, Homo sapien
ccgcatcgtagagcccgtgggtctt

SEQ ID NO: 1040208 - DNA, 25 bp, Homo sapien
cctcagagcgggtgttttgggtcca

SEQ ID NO: 1040209 - DNA, 25 bp, Homo sapien
gagaaaatgggtcactcctagtggg

SEQ ID NO: 1040210 - DNA, 25 bp, Homo sapien
cagtccagtggagcagtctcggctc

SEQ ID NO: 1040211 - DNA, 25 bp, Homo sapien
gcagtccagtggagcagtctcggct

SEQ ID NO: 1040212 - DNA, 25 bp, Homo sapien
aggtagctgggattataagtgtgag

SEQ ID NO: 1040213 - DNA, 25 bp, Homo sapien
gtgagccaccacgcctggctaattt

SEQ ID NO: 1040214 - DNA, 25 bp, Homo sapien
ggaaaggcagccttcggagctgtcc

SEQ ID NO: 1040215 - DNA, 25 bp, Homo sapien
ctgggaacttggcgttggagttggg

SEQ ID NO: 1040216 - DNA, 25 bp, Homo sapien
cctctgggaacttggcgttggagtt

SEQ ID NO: 1040217 - DNA, 25 bp, Homo sapien
tgcctctgggaacttggcgttggag

SEQ ID NO: 1040218 - DNA, 25 bp, Homo sapien
cctccctctggaaaagtgggttcag

SEQ ID NO: 1040219 - DNA, 25 bp, Homo sapien
aagaagggaagagcccctccctctg

SEQ ID NO: 1040220 - DNA, 25 bp, Homo sapien
ttcagggactcccgggcaatggcca

SEQ ID NO: 1040221 - DNA, 25 bp, Homo sapien
ctctggaaaagtgggttcagggact

SEQ ID NO: 1040222 - DNA, 25 bp, Homo sapien
aaccctggcgaaccccagcatctgc

SEQ ID NO: 1040223 - DNA, 25 bp, Homo sapien
cacaaccctggcgaaccccagcatc

SEQ ID NO: 1040224 - DNA, 25 bp, Homo sapien
gtcacacaaccctggcgaaccccag

SEQ ID NO: 1040225 - DNA, 25 bp, Homo sapien
tcacacaaccctggcgaaccccagc

SEQ ID NO: 1040226 - DNA, 25 bp, Homo sapien
gttctgtccggcagtccatcacagg

SEQ ID NO: 1040227 - DNA, 25 bp, Homo sapien
tgtccggcagtccatcacaggcggc

SEQ ID NO: 1040228 - DNA, 25 bp, Homo sapien
cagttctgtccggcagtccatcaca

SEQ ID NO: 1040229 - DNA, 25 bp, Homo sapien
ttctgtccggcagtccatcacaggc

SEQ ID NO: 1040230 - DNA, 25 bp, Homo sapien
gcattgtgtggttcctcctacgtca

SEQ ID NO: 1040231 - DNA, 25 bp, Homo sapien
cagtcctcaaagagccgaacgtcgc

SEQ ID NO: 1040232 - DNA, 25 bp, Homo sapien
catcatgctgtgacgcttccagggc

SEQ ID NO: 1040233 - DNA, 25 bp, Homo sapien
cgaacgtcgccgtgataatgccacg

SEQ ID NO: 1040234 - DNA, 25 bp, Homo sapien
aagtgatatgtgagccagcacgcag

SEQ ID NO: 1040235 - DNA, 25 bp, Homo sapien
tatgtgagccagcacgcaggcaaga

SEQ ID NO: 1040236 - DNA, 25 bp, Homo sapien
gtgatatgtgagccagcacgcaggc

SEQ ID NO: 1040237 - DNA, 25 bp, Homo sapien
ggaagtgatatgtgagccagcacgc

SEQ ID NO: 1040238 - DNA, 25 bp, Homo sapien
ggagggggccatggtgcgtattaga

SEQ ID NO: 1040239 - DNA, 25 bp, Homo sapien
aaggccaactgtaggtcaggcagtg

SEQ ID NO: 1040240 - DNA, 25 bp, Homo sapien
ttaaaggccaactgtaggtcaggca

SEQ ID NO: 1040241 - DNA, 25 bp, Homo sapien
gctcgtcgcactgagctttcagcag

SEQ ID NO: 1040242 - DNA, 25 bp, Homo sapien
gcagtgtgcatagaccatttccagg

SEQ ID NO: 1040243 - DNA, 25 bp, Homo sapien
tcaagtctaaccagcctcagcagtg

SEQ ID NO: 1040244 - DNA, 25 bp, Homo sapien
caaagggcggacatagagacaggat

SEQ ID NO: 1040245 - DNA, 25 bp, Homo sapien
gaagacatgcttgaggagccacgga

SEQ ID NO: 1040246 - DNA, 25 bp, Homo sapien
tagcaggtcaccgtggggagctggg

SEQ ID NO: 1040247 - DNA, 25 bp, Homo sapien
ctgtaaagggcagcgtgaccttcat

SEQ ID NO: 1040248 - DNA, 25 bp, Homo sapien
cctggtagcaggtcaccgtggggag

SEQ ID NO: 1040249 - DNA, 25 bp, Homo sapien
tgtgactgtaaagggcagcgtgacc

SEQ ID NO: 1040250 - DNA, 25 bp, Homo sapien
catacacgattggtaatatacgtga

SEQ ID NO: 1040251 - DNA, 25 bp, Homo sapien
ggtaccatacacgattggtaatata

SEQ ID NO: 1040252 - DNA, 25 bp, Homo sapien
taccatacacgattggtaatatacg

SEQ ID NO: 1040253 - DNA, 25 bp, Homo sapien
ctgtggtaccatacacgattggtaa

SEQ ID NO: 1040254 - DNA, 25 bp, Homo sapien
ccttgcgttcgtagtaatattcatg

SEQ ID NO: 1040255 - DNA, 25 bp, Homo sapien
ttcatgaccgtggtactctacatgt

SEQ ID NO: 1040256 - DNA, 25 bp, Homo sapien
cgtagtaatattcatgaccgtggta

SEQ ID NO: 1040257 - DNA, 25 bp, Homo sapien
tgctgatggcttccttgcgttcgta

SEQ ID NO: 1040258 - DNA, 25 bp, Homo sapien
cagggaggaggcaagagggtgcagg

SEQ ID NO: 1040259 - DNA, 25 bp, Homo sapien
ggaggcaagagggtgcagggtgggc

SEQ ID NO: 1040260 - DNA, 25 bp, Homo sapien
gagggtgcagggtgggcacagactc

SEQ ID NO: 1040261 - DNA, 25 bp, Homo sapien
agggtgcagggtgggcacagactca

SEQ ID NO: 1040262 - DNA, 25 bp, Homo sapien
attcctttgtccaggctttccaggg

SEQ ID NO: 1040263 - DNA, 25 bp, Homo sapien
cattcctttgtccaggctttccagg

SEQ ID NO: 1040264 - DNA, 25 bp, Homo sapien
tcctttgtccaggctttccagggtg

SEQ ID NO: 1040265 - DNA, 25 bp, Homo sapien
tcattcctttgtccaggctttccag

SEQ ID NO: 1040266 - DNA, 25 bp, Homo sapien
tcagcatgacttcagcaggatcctc

SEQ ID NO: 1040267 - DNA, 25 bp, Homo sapien
caagactgggttcttgaccctggaa

SEQ ID NO: 1040268 - DNA, 25 bp, Homo sapien
agccaagactgggttcttgaccctg

SEQ ID NO: 1040269 - DNA, 25 bp, Homo sapien
ccagccaagactgggttcttgaccc

SEQ ID NO: 1040270 - DNA, 25 bp, Homo sapien
ccaagactgggttcttgaccctgga

SEQ ID NO: 1040271 - DNA, 25 bp, Homo sapien
cggctgtgtggaaccacagatgaca

SEQ ID NO: 1040272 - DNA, 25 bp, Homo sapien
cagcctagattctggtgggattgga

SEQ ID NO: 1040273 - DNA, 25 bp, Homo sapien
ccgcagcctgcagtgatactagaca

SEQ ID NO: 1040274 - DNA, 25 bp, Homo sapien
tggcccaagagtactagaccagaga

SEQ ID NO: 1040275 - DNA, 25 bp, Homo sapien
ttaattcctgtattgctcggcccgg

SEQ ID NO: 1040276 - DNA, 25 bp, Homo sapien
cagaaaggtaccaggcactgcgact

SEQ ID NO: 1040277 - DNA, 25 bp, Homo sapien
cacccacgagtgctgagctagtcgg

SEQ ID NO: 1040278 - DNA, 25 bp, Homo sapien
gatgatctatctggtggtgaaagca

SEQ ID NO: 1040279 - DNA, 25 bp, Homo sapien
agaattgcacgctgattggtccatg

SEQ ID NO: 1040280 - DNA, 25 bp, Homo sapien
gctggtcatccagtcatctgtgcag

SEQ ID NO: 1040281 - DNA, 25 bp, Homo sapien
aggtcatcccatcgtctctgtagct

SEQ ID NO: 1040282 - DNA, 25 bp, Homo sapien
tgcagccagggtgttcccacaagtg

SEQ ID NO: 1040283 - DNA, 25 bp, Homo sapien
atgcccggccaggtgtaattatctt

SEQ ID NO: 1040284 - DNA, 25 bp, Homo sapien
catgcccggccaggtgtaattatct

SEQ ID NO: 1040285 - DNA, 25 bp, Homo sapien
gaatctcaacttggcaggatgctgc

SEQ ID NO: 1040286 - DNA, 25 bp, Homo sapien
gatatccgtggtgaggaagtgctca

SEQ ID NO: 1040287 - DNA, 25 bp, Homo sapien
tgctgcaaggtagcagggatatccg

SEQ ID NO: 1040288 - DNA, 25 bp, Homo sapien
cccaggaaaaagatgggcaatgcca

SEQ ID NO: 1040289 - DNA, 25 bp, Homo sapien
ctttcatatccaggctcaagagtca

SEQ ID NO: 1040290 - DNA, 25 bp, Homo sapien
ttcagcaggtggttggacaccaaac

SEQ ID NO: 1040291 - DNA, 25 bp, Homo sapien
gactttcatatccaggctcaagagt

SEQ ID NO: 1040292 - DNA, 25 bp, Homo sapien
gtggttggacaccaaactgactttc

SEQ ID NO: 1040293 - DNA, 25 bp, Homo sapien
tgaatttgccaaagggtagcctagc

SEQ ID NO: 1040294 - DNA, 25 bp, Homo sapien
tgatgtgaatttgccaaagggtagc

SEQ ID NO: 1040295 - DNA, 25 bp, Homo sapien
ttgccaaagggtagcctagcttggg

SEQ ID NO: 1040296 - DNA, 25 bp, Homo sapien
atgatgtgaatttgccaaagggtag

SEQ ID NO: 1040297 - DNA, 25 bp, Homo sapien
tgtgtccaggtagagggctgggttt

SEQ ID NO: 1040298 - DNA, 25 bp, Homo sapien
cctcctgtaggtacagggggctctt

SEQ ID NO: 1040299 - DNA, 25 bp, Homo sapien
ctcttcaggaatccataggctctgg

SEQ ID NO: 1040300 - DNA, 25 bp, Homo sapien
tgcctcctgtaggtacagggggctc

SEQ ID NO: 1040301 - DNA, 25 bp, Homo sapien
cgaataaatttgggcatggagcaaa

SEQ ID NO: 1040302 - DNA, 25 bp, Homo sapien
aacgaataaatttgggcatggagca

SEQ ID NO: 1040303 - DNA, 25 bp, Homo sapien
aataaatttgggcatggagcaaatt

SEQ ID NO: 1040304 - DNA, 25 bp, Homo sapien
aaacgaataaatttgggcatggagc

SEQ ID NO: 1040305 - DNA, 25 bp, Homo sapien
tcacgggtatcgtcccaaaacgcag

SEQ ID NO: 1040306 - DNA, 25 bp, Homo sapien
acgcaggtcggtcaccacaagttca

SEQ ID NO: 1040307 - DNA, 25 bp, Homo sapien
tatcgtcccaaaacgcaggtcggtc

SEQ ID NO: 1040308 - DNA, 25 bp, Homo sapien
tggaacagcctcacgggtatcgtcc

SEQ ID NO: 1040309 - DNA, 25 bp, Homo sapien
atggtagaagatgatgcctcgccgg

SEQ ID NO: 1040310 - DNA, 25 bp, Homo sapien
caggctcccaaatactgtggcccct

SEQ ID NO: 1040311 - DNA, 25 bp, Homo sapien
cctcgccggggtctggaggatgctg

SEQ ID NO: 1040312 - DNA, 25 bp, Homo sapien
tccatggtagaagatgatgcctcgc

SEQ ID NO: 1040313 - DNA, 25 bp, Homo sapien
agtctcccgggccagataattgcac

SEQ ID NO: 1040314 - DNA, 25 bp, Homo sapien
ccaatcatcagaagtacagattcag

SEQ ID NO: 1040315 - DNA, 25 bp, Homo sapien
gtgaatggaggcattcatgcagtct

SEQ ID NO: 1040316 - DNA, 25 bp, Homo sapien
gcacctccgacgctttctccacaga

SEQ ID NO: 1040317 - DNA, 25 bp, Homo sapien
cattcatgcagtcttggaaaagggc

SEQ ID NO: 1040318 - DNA, 25 bp, Homo sapien
tttctccacagaccacaaccctgga

SEQ ID NO: 1040319 - DNA, 25 bp, Homo sapien
cagaacctgagcccggatccgggga

SEQ ID NO: 1040320 - DNA, 25 bp, Homo sapien
gatccggggaagatctgatctgccc

SEQ ID NO: 1040321 - DNA, 25 bp, Homo sapien
cccggatccggggaagatctgatct

SEQ ID NO: 1040322 - DNA, 25 bp, Homo sapien
ctgagcccggatccggggaagatct

SEQ ID NO: 1040323 - DNA, 25 bp, Homo sapien
tggcgtcacgccaggagaggtcaat

SEQ ID NO: 1040324 - DNA, 25 bp, Homo sapien
tacacaagtgccgttcaagatggcg

SEQ ID NO: 1040325 - DNA, 25 bp, Homo sapien
ggtcaatggccagatagttacacag

SEQ ID NO: 1040326 - DNA, 25 bp, Homo sapien
cagcttcattaaaagggccgggaga

SEQ ID NO: 1040327 - DNA, 25 bp, Homo sapien
tcattctcacagctcaccaggaagg

SEQ ID NO: 1040328 - DNA, 25 bp, Homo sapien
tccaagcgcttcttatagagcaagc

SEQ ID NO: 1040329 - DNA, 25 bp, Homo sapien
ggaagctgagcgatgacctcatcat

SEQ ID NO: 1040330 - DNA, 25 bp, Homo sapien
tcatcacggagtatgtcattctcac

SEQ ID NO: 1040331 - DNA, 25 bp, Homo sapien
cagctgccccaagcattgatgtagc

SEQ ID NO: 1040332 - DNA, 25 bp, Homo sapien
gataatggatccgtgaaaaccatca

SEQ ID NO: 1040333 - DNA, 25 bp, Homo sapien
tgacggtatgaccagttgttggcat

SEQ ID NO: 1040334 - DNA, 25 bp, Homo sapien
tagagaatgtcgctagatccagcaa

SEQ ID NO: 1040335 - DNA, 25 bp, Homo sapien
atgaggcagggtccccacgactcct

SEQ ID NO: 1040336 - DNA, 25 bp, Homo sapien
tgatgaggcagggtccccacgactc

SEQ ID NO: 1040337 - DNA, 25 bp, Homo sapien
cccacgactcctcctggataggcat

SEQ ID NO: 1040338 - DNA, 25 bp, Homo sapien
ctttgatgaggcagggtccccacga

SEQ ID NO: 1040339 - DNA, 25 bp, Homo sapien
cactctgtggtagaagatgatgtct

SEQ ID NO: 1040340 - DNA, 25 bp, Homo sapien
gatgatgtctcccttgagctggaac

SEQ ID NO: 1040341 - DNA, 25 bp, Homo sapien
cagcctcatgagtgtcatcctaaaa

SEQ ID NO: 1040342 - DNA, 25 bp, Homo sapien
gctgatcaccaccagtttagagccc

SEQ ID NO: 1040343 - DNA, 25 bp, Homo sapien
tataaacatggatgcggacaacggt

SEQ ID NO: 1040344 - DNA, 25 bp, Homo sapien
aacatggatgcggacaacggtctcc

SEQ ID NO: 1040345 - DNA, 25 bp, Homo sapien
atgcggacaacggtctccagatgcc

SEQ ID NO: 1040346 - DNA, 25 bp, Homo sapien
tggatgcggacaacggtctccagat

SEQ ID NO: 1040347 - DNA, 25 bp, Homo sapien
atggcagacttggtggtcagcggga

SEQ ID NO: 1040348 - DNA, 25 bp, Homo sapien
catggcagacttggtggtcagcggg

SEQ ID NO: 1040349 - DNA, 25 bp, Homo sapien
tggcagacttggtggtcagcgggaa

SEQ ID NO: 1040350 - DNA, 25 bp, Homo sapien
gtggctcatgcctgcaatctgatac

SEQ ID NO: 1040351 - DNA, 25 bp, Homo sapien
atttaagaatattcagccaggcaca

SEQ ID NO: 1040352 - DNA, 25 bp, Homo sapien
cagtggctcatgcctgcaatctgat

SEQ ID NO: 1040353 - DNA, 25 bp, Homo sapien
ttatttaagaatattcagccaggca

SEQ ID NO: 1040354 - DNA, 25 bp, Homo sapien
cttccagctcagagcgggctgagag

SEQ ID NO: 1040355 - DNA, 25 bp, Homo sapien
gcttccagctcagagcgggctgaga

SEQ ID NO: 1040356 - DNA, 25 bp, Homo sapien
cacagagtgacccctagtgagaaca

SEQ ID NO: 1040357 - DNA, 25 bp, Homo sapien
agagtgacccctagtgagaacactc

SEQ ID NO: 1040358 - DNA, 25 bp, Homo sapien
cagggtggccaaccgctgcagggat

SEQ ID NO: 1040359 - DNA, 25 bp, Homo sapien
cagctggaagatgcaatggaggact

SEQ ID NO: 1040360 - DNA, 25 bp, Homo sapien
tggaagatgcaatggaggactctca

SEQ ID NO: 1040361 - DNA, 25 bp, Homo sapien
gctggaagatgcaatggaggactct

SEQ ID NO: 1040362 - DNA, 25 bp, Homo sapien
cagcctgggcgcaacatctgtttcc

SEQ ID NO: 1040363 - DNA, 25 bp, Homo sapien
aggccttcctgtgccgtcccagcca

SEQ ID NO: 1040364 - DNA, 25 bp, Homo sapien
ctcagcctgggcgcaacatctgttt

SEQ ID NO: 1040365 - DNA, 25 bp, Homo sapien
agggaggccttcctgtgccgtccca

SEQ ID NO: 1040366 - DNA, 25 bp, Homo sapien
agaaatgatgggtcgagatgggttt

SEQ ID NO: 1040367 - DNA, 25 bp, Homo sapien
aagaaatgatgggtcgagatgggtt

SEQ ID NO: 1040368 - DNA, 25 bp, Homo sapien
gagaagaaatgatgggtcgagatgg

SEQ ID NO: 1040369 - DNA, 25 bp, Homo sapien
gagagaagaaatgatgggtcgagat

SEQ ID NO: 1040370 - DNA, 25 bp, Homo sapien
ttctgagcttctcaaatatcatccc

SEQ ID NO: 1040371 - DNA, 25 bp, Homo sapien
attctgagcttctcaaatatcatcc

SEQ ID NO: 1040372 - DNA, 25 bp, Homo sapien
aattggggcatagaacagattctga

SEQ ID NO: 1040373 - DNA, 25 bp, Homo sapien
acagaaaaattggggcatagaacag

SEQ ID NO: 1040374 - DNA, 25 bp, Homo sapien
gaaatccgtgaccacaacatcggga

SEQ ID NO: 1040375 - DNA, 25 bp, Homo sapien
tcgggatcatactttagcggaggca

SEQ ID NO: 1040376 - DNA, 25 bp, Homo sapien
gatgccttggattggtacagcttca

SEQ ID NO: 1040377 - DNA, 25 bp, Homo sapien
ggtagtacacgatgccaggcttcag

SEQ ID NO: 1040378 - DNA, 25 bp, Homo sapien
tttaggaggtctgagaaaatggttc

SEQ ID NO: 1040379 - DNA, 25 bp, Homo sapien
ctttaggaggtctgagaaaatggtt

SEQ ID NO: 1040380 - DNA, 25 bp, Homo sapien
cctttaggaggtctgagaaaatggt

SEQ ID NO: 1040381 - DNA, 25 bp, Homo sapien
tccttcgtggtactgcctgaacaac

SEQ ID NO: 1040382 - DNA, 25 bp, Homo sapien
cacttgggccgatgccgactaggtt

SEQ ID NO: 1040383 - DNA, 25 bp, Homo sapien
gactaggttttcctctactccagca

SEQ ID NO: 1040384 - DNA, 25 bp, Homo sapien
tactccagcaaacttccggtcaatc

SEQ ID NO: 1040385 - DNA, 25 bp, Homo sapien
tgcacaaacgagagcatatgccatg

SEQ ID NO: 1040386 - DNA, 25 bp, Homo sapien
ccttgcacaaacgagagcatatgcc

SEQ ID NO: 1040387 - DNA, 25 bp, Homo sapien
acaaacgagagcatatgccatggtg

SEQ ID NO: 1040388 - DNA, 25 bp, Homo sapien
caactgccagaaccacggagtcact

SEQ ID NO: 1040389 - DNA, 25 bp, Homo sapien
tcaagaaacacagttgataacgccc

SEQ ID NO: 1040390 - DNA, 25 bp, Homo sapien
gaatcaagaaacacagttgataacg

SEQ ID NO: 1040391 - DNA, 25 bp, Homo sapien
agaaacacagttgataacgccccgg

SEQ ID NO: 1040392 - DNA, 25 bp, Homo sapien
cacagttgataacgccccggcagat

SEQ ID NO: 1040393 - DNA, 25 bp, Homo sapien
tcttactggcactggaaacttatgc

SEQ ID NO: 1040394 - DNA, 25 bp, Homo sapien
aaacttatgcttaggtaacttgcgg

SEQ ID NO: 1040395 - DNA, 25 bp, Homo sapien
gcatccagggacttcaggaagtgga

SEQ ID NO: 1040396 - DNA, 25 bp, Homo sapien
aacccgggctggatccactccatat

SEQ ID NO: 1040397 - DNA, 25 bp, Homo sapien
catagatcaggatctgagcccggat

SEQ ID NO: 1040398 - DNA, 25 bp, Homo sapien
gacttcagcaggcaaatgggcacct

SEQ ID NO: 1040399 - DNA, 25 bp, Homo sapien
tttctgggcccaaccactttctgta

SEQ ID NO: 1040400 - DNA, 25 bp, Homo sapien
gatctggcctgtccacaagttgttg

SEQ ID NO: 1040401 - DNA, 25 bp, Homo sapien
caacagtgaattgtcccggagagca

SEQ ID NO: 1040402 - DNA, 25 bp, Homo sapien
tcctccatatggtgccaggtcacgg

SEQ ID NO: 1040403 - DNA, 25 bp, Homo sapien
cagctcacgatgcaggtttccggga

SEQ ID NO: 1040404 - DNA, 25 bp, Homo sapien
tttccgggagctgagacactatgtc

SEQ ID NO: 1040405 - DNA, 25 bp, Homo sapien
gaactaatgcactcagaattctcat

SEQ ID NO: 1040406 - DNA, 25 bp, Homo sapien
ttctcatggagcagggaaagtgcaa

SEQ ID NO: 1040407 - DNA, 25 bp, Homo sapien
ctttacaaattgaactaatgcactc

SEQ ID NO: 1040408 - DNA, 25 bp, Homo sapien
tcagaattctcatggagcagggaaa

SEQ ID NO: 1040409 - DNA, 25 bp, Homo sapien
tcagaggcttgtctcagaggcggcc

SEQ ID NO: 1040410 - DNA, 25 bp, Homo sapien
tagcatgtagctggccctgggtgaa

SEQ ID NO: 1040411 - DNA, 25 bp, Homo sapien
gatcaatctgggagcctgaactgcc

SEQ ID NO: 1040412 - DNA, 25 bp, Homo sapien
taaatcagcaacagagagccctgtg

SEQ ID NO: 1040413 - DNA, 25 bp, Homo sapien
gagactcacctaagatgattgatga

SEQ ID NO: 1040414 - DNA, 25 bp, Homo sapien
tatgctaaatctagcctccctgtgc

SEQ ID NO: 1040415 - DNA, 25 bp, Homo sapien
caagaatgggccctgaaaaattatg

SEQ ID NO: 1040416 - DNA, 25 bp, Homo sapien
tatggacctcagcaaagtaaactgg

SEQ ID NO: 1040417 - DNA, 25 bp, Homo sapien
ctacagaatgcgagaaaaatttgca

SEQ ID NO: 1040418 - DNA, 25 bp, Homo sapien
tacagaatgcgagaaaaatttgcaa

SEQ ID NO: 1040419 - DNA, 25 bp, Homo sapien
cagaatgcgagaaaaatttgcaatc

SEQ ID NO: 1040420 - DNA, 25 bp, Homo sapien
cctacagaatgcgagaaaaatttgc

SEQ ID NO: 1040421 - DNA, 25 bp, Homo sapien
gcaaaagctggaagtattcctttta

SEQ ID NO: 1040422 - DNA, 25 bp, Homo sapien
tctaacagagatacaaagaacagct

SEQ ID NO: 1040423 - DNA, 25 bp, Homo sapien
aaaaaaccaacacaggacaaggatg

SEQ ID NO: 1040424 - DNA, 25 bp, Homo sapien
gatgagctacttatgacaaacccat

SEQ ID NO: 1040425 - DNA, 25 bp, Homo sapien
tagacctgaaggacatagagacata

SEQ ID NO: 1040426 - DNA, 25 bp, Homo sapien
gtagacctgaaggacatagagacat

SEQ ID NO: 1040427 - DNA, 25 bp, Homo sapien
gaacaagtttcctggccatgtcaac

SEQ ID NO: 1040428 - DNA, 25 bp, Homo sapien
tctgcatcattctacctcctggagg

SEQ ID NO: 1040429 - DNA, 25 bp, Homo sapien
gatgatccccatttcaaggcaagaa

SEQ ID NO: 1040430 - DNA, 25 bp, Homo sapien
gattggctccagatcacgtgttctg

SEQ ID NO: 1040431 - DNA, 25 bp, Homo sapien
ggaaatgcaaagtctaaagtgggac

SEQ ID NO: 1040432 - DNA, 25 bp, Homo sapien
gtctaaagtgggactcaaggagtga

SEQ ID NO: 1040433 - DNA, 25 bp, Homo sapien
caatcatcaggttcacgaaccacaa

SEQ ID NO: 1040434 - DNA, 25 bp, Homo sapien
catcaggttcacgaaccacaaaagc

SEQ ID NO: 1040435 - DNA, 25 bp, Homo sapien
cccaatcatcaggttcacgaaccac

SEQ ID NO: 1040436 - DNA, 25 bp, Homo sapien
caggttcacgaaccacaaaagcatc

SEQ ID NO: 1040437 - DNA, 25 bp, Homo sapien
actgtcagcctttagggagagttga

SEQ ID NO: 1040438 - DNA, 25 bp, Homo sapien
tagggagagttgatctatcttggat

SEQ ID NO: 1040439 - DNA, 25 bp, Homo sapien
tcagagaataaaacggccccaagag

SEQ ID NO: 1040440 - DNA, 25 bp, Homo sapien
aacggccccaagagttcactgtcag

SEQ ID NO: 1040441 - DNA, 25 bp, Homo sapien
ggggtgcctattttgtcttcccagc

SEQ ID NO: 1040442 - DNA, 25 bp, Homo sapien
aaggtgttatgaagttgctgagttt

SEQ ID NO: 1040443 - DNA, 25 bp, Homo sapien
ggctagtagatgactccttgctaac

SEQ ID NO: 1040444 - DNA, 25 bp, Homo sapien
ctcctgaatggctagtagatgactc

SEQ ID NO: 1040445 - DNA, 25 bp, Homo sapien
tccaatttccagtgagcactttcgt

SEQ ID NO: 1040446 - DNA, 25 bp, Homo sapien
ccagctcggagtagagagtggctgt

SEQ ID NO: 1040447 - DNA, 25 bp, Homo sapien
cttggtctcaatctgccagctcgga

SEQ ID NO: 1040448 - DNA, 25 bp, Homo sapien
gagcactttcgttgaatacttggtc

SEQ ID NO: 1040449 - DNA, 25 bp, Homo sapien
tagttttaggtctcatccaggtctc

SEQ ID NO: 1040450 - DNA, 25 bp, Homo sapien
ttttttcgcacctagatatccactt

SEQ ID NO: 1040451 - DNA, 25 bp, Homo sapien
caagagtcatttgaccgtatataca

SEQ ID NO: 1040452 - DNA, 25 bp, Homo sapien
aacaggtttagcatcctcgtcaaga

SEQ ID NO: 1040453 - DNA, 25 bp, Homo sapien
tctgggaaggggatgtattcttttc

SEQ ID NO: 1040454 - DNA, 25 bp, Homo sapien
tctgtaaatggattggggtgtcttg

SEQ ID NO: 1040455 - DNA, 25 bp, Homo sapien
ctggagatctggtctggtctgtggt

SEQ ID NO: 1040456 - DNA, 25 bp, Homo sapien
ggagatctggtctggtctgtggtct

SEQ ID NO: 1040457 - DNA, 25 bp, Homo sapien
tggggatctgcactgacttacaagg

SEQ ID NO: 1040458 - DNA, 25 bp, Homo sapien
caagggggcataatgttgatttcca

SEQ ID NO: 1040459 - DNA, 25 bp, Homo sapien
tctgggatgtttgcctgaatcagtg

SEQ ID NO: 1040460 - DNA, 25 bp, Homo sapien
ggatgtttgcctgaatcagtgcttt

SEQ ID NO: 1040461 - DNA, 25 bp, Homo sapien
tccattccaagtgcggagtggaggc

SEQ ID NO: 1040462 - DNA, 25 bp, Homo sapien
cataggtgctgatcaggtagcgatg

SEQ ID NO: 1040463 - DNA, 25 bp, Homo sapien
accatgccggttgtaatggtcgtca

SEQ ID NO: 1040464 - DNA, 25 bp, Homo sapien
cagccccgggttgtaaccatgccgg

SEQ ID NO: 1040465 - DNA, 25 bp, Homo sapien
cagaccaacgcagaggaataccctg

SEQ ID NO: 1040466 - DNA, 25 bp, Homo sapien
tccttctgcatgaggcaggtacagc

SEQ ID NO: 1040467 - DNA, 25 bp, Homo sapien
gcaactttacagaccaacgcagagg

SEQ ID NO: 1040468 - DNA, 25 bp, Homo sapien
tccgttggtctgtgcaactttacag

SEQ ID NO: 1040469 - DNA, 25 bp, Homo sapien
caaaagtgcattccaagtcttggga

SEQ ID NO: 1040470 - DNA, 25 bp, Homo sapien
gcagagagcattggttcagccagcc

SEQ ID NO: 1040471 - DNA, 25 bp, Homo sapien
ttggaaaagtcagccccacggtgtg

SEQ ID NO: 1040472 - DNA, 25 bp, Homo sapien
ggaatgtcaactccccgagtccaga

SEQ ID NO: 1040473 - DNA, 25 bp, Homo sapien
ggagtcttgctctaaatggccaatg

SEQ ID NO: 1040474 - DNA, 25 bp, Homo sapien
atggccaatggccacgagactgggc

SEQ ID NO: 1040475 - DNA, 25 bp, Homo sapien
tctaaatggccaatggccacgagac

SEQ ID NO: 1040476 - DNA, 25 bp, Homo sapien
tcttgctctaaatggccaatggcca

SEQ ID NO: 1040477 - DNA, 25 bp, Homo sapien
agagaaaccagggtccagttgaatg

SEQ ID NO: 1040478 - DNA, 25 bp, Homo sapien
cagggtccagttgaatggggcttac

SEQ ID NO: 1040479 - DNA, 25 bp, Homo sapien
ccagggtccagttgaatggggctta

SEQ ID NO: 1040480 - DNA, 25 bp, Homo sapien
aaccagggtccagttgaatggggct

SEQ ID NO: 1040481 - DNA, 25 bp, Homo sapien
agctgctcatagagtccatagtttg

SEQ ID NO: 1040482 - DNA, 25 bp, Homo sapien
cttgggtgtgagctgtctctgcttg

SEQ ID NO: 1040483 - DNA, 25 bp, Homo sapien
gagctgctcatagagtccatagttt

SEQ ID NO: 1040484 - DNA, 25 bp, Homo sapien
gtgagctgtctctgcttgagctgct

SEQ ID NO: 1040485 - DNA, 25 bp, Homo sapien
taggatgaagtataagtgctctgct

SEQ ID NO: 1040486 - DNA, 25 bp, Homo sapien
gatgaagtataagtgctctgcttca

SEQ ID NO: 1040487 - DNA, 25 bp, Homo sapien
gggtaggatgaagtataagtgctct

SEQ ID NO: 1040488 - DNA, 25 bp, Homo sapien
gtaggatgaagtataagtgctctgc

SEQ ID NO: 1040489 - DNA, 25 bp, Homo sapien
ggagggaccgggaccgcatgctccc

SEQ ID NO: 1040490 - DNA, 25 bp, Homo sapien
gggagggaccgggaccgcatgctcc

SEQ ID NO: 1040491 - DNA, 25 bp, Homo sapien
cgtactctgagtttatctgcgccac

SEQ ID NO: 1040492 - DNA, 25 bp, Homo sapien
gcaagtccagtgatgctgtggtctc

SEQ ID NO: 1040493 - DNA, 25 bp, Homo sapien
tctgagagcacctttgacgggccag

SEQ ID NO: 1040494 - DNA, 25 bp, Homo sapien
tctccagctgattctatctgagctg

SEQ ID NO: 1040495 - DNA, 25 bp, Homo sapien
taattgttggatggaaaagaaagga

SEQ ID NO: 1040496 - DNA, 25 bp, Homo sapien
tcttgtgcacgtacatagccctgca

SEQ ID NO: 1040497 - DNA, 25 bp, Homo sapien
cagcaagtcacattacctctccggg

SEQ ID NO: 1040498 - DNA, 25 bp, Homo sapien
tgggagtagactcttcagcaagtca

SEQ ID NO: 1040499 - DNA, 25 bp, Homo sapien
gatttgcgagctcagagacaaagga

SEQ ID NO: 1040500 - DNA, 25 bp, Homo sapien
gccaaaagattagacgcccctgctt

SEQ ID NO: 1040501 - DNA, 25 bp, Homo sapien
tcaatggatgctcaatagaaaggct

SEQ ID NO: 1040502 - DNA, 25 bp, Homo sapien
caagcatgcaaagggccaaaggtgt

SEQ ID NO: 1040503 - DNA, 25 bp, Homo sapien
tgactgctggactgaggctctgtga

SEQ ID NO: 1040504 - DNA, 25 bp, Homo sapien
tttctggccttgacctacctgattc

SEQ ID NO: 1040505 - DNA, 25 bp, Homo sapien
gacatcctttactttcgcacaagct

SEQ ID NO: 1040506 - DNA, 25 bp, Homo sapien
cctacctaggcaggccaggtcttca

SEQ ID NO: 1040507 - DNA, 25 bp, Homo sapien
tccagcagcaataggagaccaatgc

SEQ ID NO: 1040508 - DNA, 25 bp, Homo sapien
catttagagcaaggtttcctcctgc

SEQ ID NO: 1040509 - DNA, 25 bp, Homo sapien
gactttctaggtggtcacacacata

SEQ ID NO: 1040510 - DNA, 25 bp, Homo sapien
taccatgaggtcattgcagcaatgc

SEQ ID NO: 1040511 - DNA, 25 bp, Homo sapien
gagatttgtcctaccagggatatgg

SEQ ID NO: 1040512 - DNA, 25 bp, Homo sapien
tgggaacgagaatgtcctgtggccc

SEQ ID NO: 1040513 - DNA, 25 bp, Homo sapien
acacagcctacattctcagttccca

SEQ ID NO: 1040514 - DNA, 25 bp, Homo sapien
taaaacaatgggaacgagaatgtcc

SEQ ID NO: 1040515 - DNA, 25 bp, Homo sapien
ccctaaaacaatgggaacgagaatg

SEQ ID NO: 1040516 - DNA, 25 bp, Homo sapien
ggccaaggcccggtctctcagcaga

SEQ ID NO: 1040517 - DNA, 25 bp, Homo sapien
ctccagcacagctcgaaagatctct

SEQ ID NO: 1040518 - DNA, 25 bp, Homo sapien
tctagattacatgacttcatcaggg

SEQ ID NO: 1040519 - DNA, 25 bp, Homo sapien
agttgtcagggtctcgcagcatctc

SEQ ID NO: 1040520 - DNA, 25 bp, Homo sapien
gctccagaccatatgccccagaagt

SEQ ID NO: 1040521 - DNA, 25 bp, Homo sapien
tccagaccatatgccccagaagttc

SEQ ID NO: 1040522 - DNA, 25 bp, Homo sapien
aagctccagaccatatgccccagaa

SEQ ID NO: 1040523 - DNA, 25 bp, Homo sapien
agaagctccagaccatatgccccag

SEQ ID NO: 1040524 - DNA, 25 bp, Homo sapien
tctaggatcaccatcaagggctgct

SEQ ID NO: 1040525 - DNA, 25 bp, Homo sapien
acctctatgatcctgtggatggcta

SEQ ID NO: 1040526 - DNA, 25 bp, Homo sapien
ggaatgcaggcagagacatggatgt

SEQ ID NO: 1040527 - DNA, 25 bp, Homo sapien
tataagaatggacagctcccacggg

SEQ ID NO: 1040528 - DNA, 25 bp, Homo sapien
agacagagtgcatgtaaagcttctg

SEQ ID NO: 1040529 - DNA, 25 bp, Homo sapien
agagacagagtgcatgtaaagcttc

SEQ ID NO: 1040530 - DNA, 25 bp, Homo sapien
gagacagagtgcatgtaaagcttct

SEQ ID NO: 1040531 - DNA, 25 bp, Homo sapien
aaagagacagagtgcatgtaaagct

SEQ ID NO: 1040532 - DNA, 25 bp, Homo sapien
cattcggtcattacgactgtctcca

SEQ ID NO: 1040533 - DNA, 25 bp, Homo sapien
agcaggcattcggtcattacgactg

SEQ ID NO: 1040534 - DNA, 25 bp, Homo sapien
ctcttttagctgacggatgctcggg

SEQ ID NO: 1040535 - DNA, 25 bp, Homo sapien
agtgtgatgcccctcaggtctagct

SEQ ID NO: 1040536 - DNA, 25 bp, Homo sapien
agtgctgaacacaataatcttgggc

SEQ ID NO: 1040537 - DNA, 25 bp, Homo sapien
gggacacaggtctctaaagctccta

SEQ ID NO: 1040538 - DNA, 25 bp, Homo sapien
gattcagttgccaaatgaccagaag

SEQ ID NO: 1040539 - DNA, 25 bp, Homo sapien
tcctttcccgttcacattgagcagg

SEQ ID NO: 1040540 - DNA, 25 bp, Homo sapien
ttgagcaggcatatgaaacgatggg

SEQ ID NO: 1040541 - DNA, 25 bp, Homo sapien
tggacctaaagaggcaccctggact

SEQ ID NO: 1040542 - DNA, 25 bp, Homo sapien
ggccggcgtcactttatgcatccca

SEQ ID NO: 1040543 - DNA, 25 bp, Homo sapien
tggacttctgggtggtgacactgcc

SEQ ID NO: 1040544 - DNA, 25 bp, Homo sapien
ctatgaggcccttgcttaggctctc

SEQ ID NO: 1040545 - DNA, 25 bp, Homo sapien
gcagagttctgggacctctcaggga

SEQ ID NO: 1040546 - DNA, 25 bp, Homo sapien
cagagttctgggacctctcagggaa

SEQ ID NO: 1040547 - DNA, 25 bp, Homo sapien
agttctgggacctctcagggaacca

SEQ ID NO: 1040548 - DNA, 25 bp, Homo sapien
ctgggacctctcagggaaccaacca

SEQ ID NO: 1040549 - DNA, 25 bp, Homo sapien
tccagcaatgcttttaaggtctcca

SEQ ID NO: 1040550 - DNA, 25 bp, Homo sapien
cttccagcaatgcttttaaggtctc

SEQ ID NO: 1040551 - DNA, 25 bp, Homo sapien
ccagcaatgcttttaaggtctccaa

SEQ ID NO: 1040552 - DNA, 25 bp, Homo sapien
agcaatgcttttaaggtctccaaat

SEQ ID NO: 1040553 - DNA, 25 bp, Homo sapien
ggcaactaaccgtccttggagttca

SEQ ID NO: 1040554 - DNA, 25 bp, Homo sapien
atttggcaactaaccgtccttggag

SEQ ID NO: 1040555 - DNA, 25 bp, Homo sapien
cactaactagcttgtacatgatgtc

SEQ ID NO: 1040556 - DNA, 25 bp, Homo sapien
tctctttgacatcatatcaacttga

SEQ ID NO: 1040557 - DNA, 25 bp, Homo sapien
tgtaacaggaaattcacacgtgcac

SEQ ID NO: 1040558 - DNA, 25 bp, Homo sapien
caacttgaaacacactttgtaacag

SEQ ID NO: 1040559 - DNA, 25 bp, Homo sapien
cattcgtgatcactaagccggtgag

SEQ ID NO: 1040560 - DNA, 25 bp, Homo sapien
aatggacaggtttgatgcgctttcc

SEQ ID NO: 1040561 - DNA, 25 bp, Homo sapien
gagacaggatcattcgtgatcacta

SEQ ID NO: 1040562 - DNA, 25 bp, Homo sapien
agccggtgaggacagacgttctatt

SEQ ID NO: 1040563 - DNA, 25 bp, Homo sapien
agggcgtcaatagacatgcaatttc

SEQ ID NO: 1040564 - DNA, 25 bp, Homo sapien
cagggcgtcaatagacatgcaattt

SEQ ID NO: 1040565 - DNA, 25 bp, Homo sapien
actttggatttctctaccccactgg

SEQ ID NO: 1040566 - DNA, 25 bp, Homo sapien
cccacatagtagattttagtgtcca

SEQ ID NO: 1040567 - DNA, 25 bp, Homo sapien
aaccctgtctcaaattgtctttaat

SEQ ID NO: 1040568 - DNA, 25 bp, Homo sapien
agaaaaatagtttgcacccacatag

SEQ ID NO: 1040569 - DNA, 25 bp, Homo sapien
tctcatcactgtagaactttagctt

SEQ ID NO: 1040570 - DNA, 25 bp, Homo sapien
atattccttggtaaccatccttgca

SEQ ID NO: 1040571 - DNA, 25 bp, Homo sapien
ttcctttaagttgcatgtggcctgg

SEQ ID NO: 1040572 - DNA, 25 bp, Homo sapien
tcatcactgtagaactttagcttct

SEQ ID NO: 1040573 - DNA, 25 bp, Homo sapien
tcaatcacagacaaattagtatttc

SEQ ID NO: 1040574 - DNA, 25 bp, Homo sapien
tatttggttgctttgatgttctaca

SEQ ID NO: 1040575 - DNA, 25 bp, Homo sapien
tttccatccgtaactcgataactag

SEQ ID NO: 1040576 - DNA, 25 bp, Homo sapien
tacaactgaaactcaatcacagaca

SEQ ID NO: 1040577 - DNA, 25 bp, Homo sapien
cctagagacatcagccaccccctgc

SEQ ID NO: 1040578 - DNA, 25 bp, Homo sapien
acctagagacatcagccaccccctg

SEQ ID NO: 1040579 - DNA, 25 bp, Homo sapien
caccccctgccccattcgcccagca

SEQ ID NO: 1040580 - DNA, 25 bp, Homo sapien
ctagagacatcagccaccccctgcc

SEQ ID NO: 1040581 - DNA, 25 bp, Homo sapien
ccacagcaaggcataaagcagggag

SEQ ID NO: 1040582 - DNA, 25 bp, Homo sapien
ctactgagctatttcagtgcccaca

SEQ ID NO: 1040583 - DNA, 25 bp, Homo sapien
agtgcccacagcaaggcataaagca

SEQ ID NO: 1040584 - DNA, 25 bp, Homo sapien
tactgagctatttcagtgcccacag

SEQ ID NO: 1040585 - DNA, 25 bp, Homo sapien
caaagaagtggcaatagatgcgaga

SEQ ID NO: 1040586 - DNA, 25 bp, Homo sapien
gactcatacttggtcataaggatta

SEQ ID NO: 1040587 - DNA, 25 bp, Homo sapien
ccaacatgttcagcaagtcttgctt

SEQ ID NO: 1040588 - DNA, 25 bp, Homo sapien
gattaaaaccaaaagggcatcagtg

SEQ ID NO: 1040589 - DNA, 25 bp, Homo sapien
atcggatgtggaggcgatcttttcc

SEQ ID NO: 1040590 - DNA, 25 bp, Homo sapien
cgttaccaacaagatggatcctcac

SEQ ID NO: 1040591 - DNA, 25 bp, Homo sapien
tcggatgtggaggcgatcttttcca

SEQ ID NO: 1040592 - DNA, 25 bp, Homo sapien
acgttaccaacaagatggatcctca

SEQ ID NO: 1040593 - DNA, 25 bp, Homo sapien
cagcgctggactcactttgcagagt

SEQ ID NO: 1040594 - DNA, 25 bp, Homo sapien
cctgatggatctgcaagaaaaatct

SEQ ID NO: 1040595 - DNA, 25 bp, Homo sapien
caccgtcagagtctggaagtgtctc

SEQ ID NO: 1040596 - DNA, 25 bp, Homo sapien
accgtcagagtctggaagtgtctcc

SEQ ID NO: 1040597 - DNA, 25 bp, Homo sapien
aatggctccagatgaagcgtcttca

SEQ ID NO: 1040598 - DNA, 25 bp, Homo sapien
tcaatggctccagatgaagcgtctt

SEQ ID NO: 1040599 - DNA, 25 bp, Homo sapien
caatggctccagatgaagcgtcttc

SEQ ID NO: 1040600 - DNA, 25 bp, Homo sapien
ttcaatggctccagatgaagcgtct

SEQ ID NO: 1040601 - DNA, 25 bp, Homo sapien
aggcattcatcctggggtatttcct

SEQ ID NO: 1040602 - DNA, 25 bp, Homo sapien
caggcattcatcctggggtatttcc

SEQ ID NO: 1040603 - DNA, 25 bp, Homo sapien
tggccagcacgtgttgtgaatttcc

SEQ ID NO: 1040604 - DNA, 25 bp, Homo sapien
agatgtggccagcacgtgttgtgaa

SEQ ID NO: 1040605 - DNA, 25 bp, Homo sapien
gcacgtgttgtgaatttccagctcc

SEQ ID NO: 1040606 - DNA, 25 bp, Homo sapien
ttccagctccccaatactattaatg

SEQ ID NO: 1040607 - DNA, 25 bp, Homo sapien
attatctgacgtgtaatgatggcac

SEQ ID NO: 1040608 - DNA, 25 bp, Homo sapien
cctcgagttcattatctgacgtgta

SEQ ID NO: 1040609 - DNA, 25 bp, Homo sapien
cgagttcattatctgacgtgtaatg

SEQ ID NO: 1040610 - DNA, 25 bp, Homo sapien
catccctcgagttcattatctgacg

SEQ ID NO: 1040611 - DNA, 25 bp, Homo sapien
ggaacacagaggtgaatctggtgac

SEQ ID NO: 1040612 - DNA, 25 bp, Homo sapien
tgaggaacacagaggtgaatctggt

SEQ ID NO: 1040613 - DNA, 25 bp, Homo sapien
cacagaggtgaatctggtgactaac

SEQ ID NO: 1040614 - DNA, 25 bp, Homo sapien
aacacagaggtgaatctggtgacta

SEQ ID NO: 1040615 - DNA, 25 bp, Homo sapien
ctgaagaaggtgatcaattttattt

SEQ ID NO: 1040616 - DNA, 25 bp, Homo sapien
actgaagaaggtgatcaattttatt

SEQ ID NO: 1040617 - DNA, 25 bp, Homo sapien
gatctgacagccctctaacacgagg

SEQ ID NO: 1040618 - DNA, 25 bp, Homo sapien
taataggttgccacaagttaattcc

SEQ ID NO: 1040619 - DNA, 25 bp, Homo sapien
tctaacacgagggtctcgagagagg

SEQ ID NO: 1040620 - DNA, 25 bp, Homo sapien
gtcaatagacatgcaattgctgcca

SEQ ID NO: 1040621 - DNA, 25 bp, Homo sapien
gaaaaatagtttgcacctacatagt

SEQ ID NO: 1040622 - DNA, 25 bp, Homo sapien
agaaaaatagtttgcacctacatag

SEQ ID NO: 1040623 - DNA, 25 bp, Homo sapien
ccaaaaacaatgagaatgactgtcc

SEQ ID NO: 1040624 - DNA, 25 bp, Homo sapien
atgagaatgactgtcctgtggcccc

SEQ ID NO: 1040625 - DNA, 25 bp, Homo sapien
caaaaacaatgagaatgactgtcct

SEQ ID NO: 1040626 - DNA, 25 bp, Homo sapien
aacaatgagaatgactgtcctgtgg

SEQ ID NO: 1040627 - DNA, 25 bp, Homo sapien
gtggagatggccaaggcctggtccc

SEQ ID NO: 1040628 - DNA, 25 bp, Homo sapien
aaggcctggtccctcagcagcctct

SEQ ID NO: 1040629 - DNA, 25 bp, Homo sapien
caggagtctgggtggggccctgatg

SEQ ID NO: 1040630 - DNA, 25 bp, Homo sapien
gtctgggtggggccctgatgctcat

SEQ ID NO: 1040631 - DNA, 25 bp, Homo sapien
aatgactccagatgaggcgacttca

SEQ ID NO: 1040632 - DNA, 25 bp, Homo sapien
aacagcacatcaaccccttccagca

SEQ ID NO: 1040633 - DNA, 25 bp, Homo sapien
gggcgaacctcttgggtcaacagca

SEQ ID NO: 1040634 - DNA, 25 bp, Homo sapien
tcaaccccttccagcacagatttta

SEQ ID NO: 1040635 - DNA, 25 bp, Homo sapien
ccttcgaggaaagagacggagtgca

SEQ ID NO: 1040636 - DNA, 25 bp, Homo sapien
tctgcttgccccactctaagaggtg

SEQ ID NO: 1040637 - DNA, 25 bp, Homo sapien
tccgggaaggatgcagtagctccag

SEQ ID NO: 1040638 - DNA, 25 bp, Homo sapien
ggtctatgaacaccatgaatggctg

SEQ ID NO: 1040639 - DNA, 25 bp, Homo sapien
ggtcataacgaccatctccaaggag

SEQ ID NO: 1040640 - DNA, 25 bp, Homo sapien
agcaggcagtcggtcataacgacca

SEQ ID NO: 1040641 - DNA, 25 bp, Homo sapien
gtccgactctgacagcaggcagtcg

SEQ ID NO: 1040642 - DNA, 25 bp, Homo sapien
gctcctttaattgacggatgctcgg

SEQ ID NO: 1040643 - DNA, 25 bp, Homo sapien
tggcgctgagttgggaatccatgat

SEQ ID NO: 1040644 - DNA, 25 bp, Homo sapien
ggatggcgctgagttgggaatccat

SEQ ID NO: 1040645 - DNA, 25 bp, Homo sapien
cgctgagttgggaatccatgatccc

SEQ ID NO: 1040646 - DNA, 25 bp, Homo sapien
gcgctgagttgggaatccatgatcc

SEQ ID NO: 1040647 - DNA, 25 bp, Homo sapien
gcaggggacggtgcagaacacaatg

SEQ ID NO: 1040648 - DNA, 25 bp, Homo sapien
gacggtgcagaacacaatgatcttg

SEQ ID NO: 1040649 - DNA, 25 bp, Homo sapien
gggacggtgcagaacacaatgatct

SEQ ID NO: 1040650 - DNA, 25 bp, Homo sapien
caggggacggtgcagaacacaatga

SEQ ID NO: 1040651 - DNA, 25 bp, Homo sapien
aaatatggaacttgtcacgaatttg

SEQ ID NO: 1040652 - DNA, 25 bp, Homo sapien
aacttgtcacgaatttgcacatcat

SEQ ID NO: 1040653 - DNA, 25 bp, Homo sapien
agtatacgtgctgcccaggccaaca

SEQ ID NO: 1040654 - DNA, 25 bp, Homo sapien
atggaacttgtcacgaatttgcaca

SEQ ID NO: 1040655 - DNA, 25 bp, Homo sapien
tggaccctgtatggtgagcagtcct

SEQ ID NO: 1040656 - DNA, 25 bp, Homo sapien
cctgtatggtgagcagtcctttctc

SEQ ID NO: 1040657 - DNA, 25 bp, Homo sapien
cagtggaccctgtatggtgagcagt

SEQ ID NO: 1040658 - DNA, 25 bp, Homo sapien
gaccctgtatggtgagcagtccttt

SEQ ID NO: 1040659 - DNA, 25 bp, Homo sapien
tgaggcagacgtctatgaacacctt

SEQ ID NO: 1040660 - DNA, 25 bp, Homo sapien
cttggggtgtttccttgaggcagac

SEQ ID NO: 1040661 - DNA, 25 bp, Homo sapien
tggaagaggtatctcaggcattcat

SEQ ID NO: 1040662 - DNA, 25 bp, Homo sapien
catccttggatagtcctctgctgtc

SEQ ID NO: 1040663 - DNA, 25 bp, Homo sapien
gcacaggtgtactaaaactctcctt

SEQ ID NO: 1040664 - DNA, 25 bp, Homo sapien
caggtgtactaaaactctcctttgg

SEQ ID NO: 1040665 - DNA, 25 bp, Homo sapien
cagcacaggtgtactaaaactctcc

SEQ ID NO: 1040666 - DNA, 25 bp, Homo sapien
acagcacaggtgtactaaaactctc

SEQ ID NO: 1040667 - DNA, 25 bp, Homo sapien
ctattcaggtggactattttcaatg

SEQ ID NO: 1040668 - DNA, 25 bp, Homo sapien
atttaatgggtgttagataattcac

SEQ ID NO: 1040669 - DNA, 25 bp, Homo sapien
gactttctaagatatttaatgggtg

SEQ ID NO: 1040670 - DNA, 25 bp, Homo sapien
tgagtaaccattcctcgaggtcatt

SEQ ID NO: 1040671 - DNA, 25 bp, Homo sapien
tttaagcaattggaggtgttccagc

SEQ ID NO: 1040672 - DNA, 25 bp, Homo sapien
tcagctgttccaggtgcccactgaa

SEQ ID NO: 1040673 - DNA, 25 bp, Homo sapien
gttccaggtgcccactgaagaaggt

SEQ ID NO: 1040674 - DNA, 25 bp, Homo sapien
ctgatcagctgttccaggtgcccac

SEQ ID NO: 1040675 - DNA, 25 bp, Homo sapien
cccactgaagaaggtgatcaatttt

SEQ ID NO: 1040676 - DNA, 25 bp, Homo sapien
tcagggtgtccgtagacatgcaatt

SEQ ID NO: 1040677 - DNA, 25 bp, Homo sapien
aggtccttcagggtgtccgtagaca

SEQ ID NO: 1040678 - DNA, 25 bp, Homo sapien
ccttcagggtgtccgtagacatgca

SEQ ID NO: 1040679 - DNA, 25 bp, Homo sapien
tccttcagggtgtccgtagacatgc

SEQ ID NO: 1040680 - DNA, 25 bp, Homo sapien
ttcctcagacggtgatgagccacag

SEQ ID NO: 1040681 - DNA, 25 bp, Homo sapien
agttcctcagacggtgatgagccac

SEQ ID NO: 1040682 - DNA, 25 bp, Homo sapien
cctcagacggtgatgagccacagga

SEQ ID NO: 1040683 - DNA, 25 bp, Homo sapien
tagcagcaaagatggagctccagtt

SEQ ID NO: 1040684 - DNA, 25 bp, Homo sapien
tccaggtcgcatttgtgaccgtctt

SEQ ID NO: 1040685 - DNA, 25 bp, Homo sapien
tagtcctcaacaggatctcattcca

SEQ ID NO: 1040686 - DNA, 25 bp, Homo sapien
cagtagaaatcactgttcaggccct

SEQ ID NO: 1040687 - DNA, 25 bp, Homo sapien
cctgctggacttctttagtcctcaa

SEQ ID NO: 1040688 - DNA, 25 bp, Homo sapien
agggggttgttctctggtgggcagg

SEQ ID NO: 1040689 - DNA, 25 bp, Homo sapien
tataggatttgggaaggtaatggaa

SEQ ID NO: 1040690 - DNA, 25 bp, Homo sapien
gaaggtaatggaaaattacagtcaa

SEQ ID NO: 1040691 - DNA, 25 bp, Homo sapien
gtgaagggagatagggttggggcca

SEQ ID NO: 1040692 - DNA, 25 bp, Homo sapien
agcaggagctcaccaggtaattatt

SEQ ID NO: 1040693 - DNA, 25 bp, Homo sapien
gcaggagctcaccaggtaattatta

SEQ ID NO: 1040694 - DNA, 25 bp, Homo sapien
tcatctccccaaggattactcaggg

SEQ ID NO: 1040695 - DNA, 25 bp, Homo sapien
tcatggatgacaagcggctggaaag

SEQ ID NO: 1040696 - DNA, 25 bp, Homo sapien
caatgttggatagattcctcctcca

SEQ ID NO: 1040697 - DNA, 25 bp, Homo sapien
ggatccaattaaaacacccagctca

SEQ ID NO: 1040698 - DNA, 25 bp, Homo sapien
taccaacggtgtaccaaggtcctca

SEQ ID NO: 1040699 - DNA, 25 bp, Homo sapien
gacacacatgtattaggacctggga

SEQ ID NO: 1040700 - DNA, 25 bp, Homo sapien
ctagggatgacccaaaagatgcagc

SEQ ID NO: 1040701 - DNA, 25 bp, Homo sapien
caaggaagctatgactctgggttac

SEQ ID NO: 1040702 - DNA, 25 bp, Homo sapien
atgtgacggtcatggttattcttca

SEQ ID NO: 1040703 - DNA, 25 bp, Homo sapien
gtgacggtcatggttattcttcatc

SEQ ID NO: 1040704 - DNA, 25 bp, Homo sapien
aatgtgacggtcatggttattcttc

SEQ ID NO: 1040705 - DNA, 25 bp, Homo sapien
tgtgacggtcatggttattcttcat

SEQ ID NO: 1040706 - DNA, 25 bp, Homo sapien
tgtaagatctccagatcaggcgtct

SEQ ID NO: 1040707 - DNA, 25 bp, Homo sapien
gcaagcaggcaatcaatcccatcca

SEQ ID NO: 1040708 - DNA, 25 bp, Homo sapien
tcatccaggacggagatggccaagg

SEQ ID NO: 1040709 - DNA, 25 bp, Homo sapien
agcgtctgctagtgaaggcctccac

SEQ ID NO: 1040710 - DNA, 25 bp, Homo sapien
gaagaagctcagatcttcatccacg

SEQ ID NO: 1040711 - DNA, 25 bp, Homo sapien
tcatccacggatttttccttgaggc

SEQ ID NO: 1040712 - DNA, 25 bp, Homo sapien
gctcagatcttcatccacggatttt

SEQ ID NO: 1040713 - DNA, 25 bp, Homo sapien
ttttccttgaggcaaacatccatga

SEQ ID NO: 1040714 - DNA, 25 bp, Homo sapien
gaatgttcattgaataatttaccac

SEQ ID NO: 1040715 - DNA, 25 bp, Homo sapien
gtactgaacgtcttctgtgctgcac

SEQ ID NO: 1040716 - DNA, 25 bp, Homo sapien
tgtactgaacgtcttctgtgctgca

SEQ ID NO: 1040717 - DNA, 25 bp, Homo sapien
taccaccttagtacagcacaggtgt

SEQ ID NO: 1040718 - DNA, 25 bp, Homo sapien
taaccacagccatcggagatgaaga

SEQ ID NO: 1040719 - DNA, 25 bp, Homo sapien
ctggtccaggtagccttcgaagaag

SEQ ID NO: 1040720 - DNA, 25 bp, Homo sapien
tacacggccagcacatgttccaaat

SEQ ID NO: 1040721 - DNA, 25 bp, Homo sapien
tcaaagcttggcaggtaaccacagc

SEQ ID NO: 1040722 - DNA, 25 bp, Homo sapien
caagacggatgaagcgcagtgtacc

SEQ ID NO: 1040723 - DNA, 25 bp, Homo sapien
tccgaaatgacacgacccctgttgt

SEQ ID NO: 1040724 - DNA, 25 bp, Homo sapien
gttaatgccaatgtctccaacgggc

SEQ ID NO: 1040725 - DNA, 25 bp, Homo sapien
ccatggacgtgtcattgccgtgaaa

SEQ ID NO: 1040726 - DNA, 25 bp, Homo sapien
tccccgcaagcaaaaattgaactcc

SEQ ID NO: 1040727 - DNA, 25 bp, Homo sapien
agcaaaaattgaactccagttgctc

SEQ ID NO: 1040728 - DNA, 25 bp, Homo sapien
taggcaggccttccccgcaagcaaa

SEQ ID NO: 1040729 - DNA, 25 bp, Homo sapien
tgggtgacatgccacagcaagggca

SEQ ID NO: 1040730 - DNA, 25 bp, Homo sapien
cttgtgcagtgaagccctttcctga

SEQ ID NO: 1040731 - DNA, 25 bp, Homo sapien
tgtgcagtgaagccctttcctgaca

SEQ ID NO: 1040732 - DNA, 25 bp, Homo sapien
gtgcagtgaagccctttcctgacat

SEQ ID NO: 1040733 - DNA, 25 bp, Homo sapien
ttgtgcagtgaagccctttcctgac

SEQ ID NO: 1040734 - DNA, 25 bp, Homo sapien
tatcactctcatggcaaacacaatc

SEQ ID NO: 1040735 - DNA, 25 bp, Homo sapien
ctcatggcaaacacaatcatctgct

SEQ ID NO: 1040736 - DNA, 25 bp, Homo sapien
tagaagacaaatccagggaaaatgt

SEQ ID NO: 1040737 - DNA, 25 bp, Homo sapien
gcttctactggtaccaggaagaatg

SEQ ID NO: 1040738 - DNA, 25 bp, Homo sapien
tccaaatgaagcgtcttcatcagtg

SEQ ID NO: 1040739 - DNA, 25 bp, Homo sapien
tgtgtaagcagcatatgaagccctt

SEQ ID NO: 1040740 - DNA, 25 bp, Homo sapien
tgcaccatcaccgtcagagtctgga

SEQ ID NO: 1040741 - DNA, 25 bp, Homo sapien
ccagcaatgcttttaaggtctccaa

SEQ ID NO: 1040742 - DNA, 25 bp, Homo sapien
cgtggccaggacatgttgcgaattt

SEQ ID NO: 1040743 - DNA, 25 bp, Homo sapien
cggcgttagataattgaccagctta

SEQ ID NO: 1040744 - DNA, 25 bp, Homo sapien
caacgaagctttcttatcagacgtg

SEQ ID NO: 1040745 - DNA, 25 bp, Homo sapien
ctgaagaaggtgatcaattttattt

SEQ ID NO: 1040746 - DNA, 25 bp, Homo sapien
ttcaagactgatgcggaacagcagc

SEQ ID NO: 1040747 - DNA, 25 bp, Homo sapien
tagcagcaaagatggagctccagtt

SEQ ID NO: 1040748 - DNA, 25 bp, Homo sapien
caatcgacacgaaccaaggaattca

SEQ ID NO: 1040749 - DNA, 25 bp, Homo sapien
tcctcagacggtgatgagccacagg

SEQ ID NO: 1040750 - DNA, 25 bp, Homo sapien
tctcatcactgtagaactttagctt

SEQ ID NO: 1040751 - DNA, 25 bp, Homo sapien
tcatcactgtagaactttagcttct

SEQ ID NO: 1040752 - DNA, 25 bp, Homo sapien
atattccttggtaaccatccttgca

SEQ ID NO: 1040753 - DNA, 25 bp, Homo sapien
ttcctttaagttgcatgtggcctgg

SEQ ID NO: 1040754 - DNA, 25 bp, Homo sapien
tgcttggccacccatcgtctgggat

SEQ ID NO: 1040755 - DNA, 25 bp, Homo sapien
gcttggccacccatcgtctgggata

SEQ ID NO: 1040756 - DNA, 25 bp, Homo sapien
ttggccacccatcgtctgggatatg

SEQ ID NO: 1040757 - DNA, 25 bp, Homo sapien
tctgcttggccacccatcgtctggg

SEQ ID NO: 1040758 - DNA, 25 bp, Homo sapien
ggtatctctttatgcatcctggata

SEQ ID NO: 1040759 - DNA, 25 bp, Homo sapien
tcctgcagactgagctgtcaaggca

SEQ ID NO: 1040760 - DNA, 25 bp, Homo sapien
catcctggatacctcagcccaaatc

SEQ ID NO: 1040761 - DNA, 25 bp, Homo sapien
tatctctttatgcatcctggatacc

SEQ ID NO: 1040762 - DNA, 25 bp, Homo sapien
atgagaatgactgtcctgtggcccc

SEQ ID NO: 1040763 - DNA, 25 bp, Homo sapien
caaaaacaatgagaatgactgtcct

SEQ ID NO: 1040764 - DNA, 25 bp, Homo sapien
aacaatgagaatgactgtcctgtgg

SEQ ID NO: 1040765 - DNA, 25 bp, Homo sapien
ccaaaaacaatgagaatgactgtcc

SEQ ID NO: 1040766 - DNA, 25 bp, Homo sapien
gtggagatggccaaggcctggtccc

SEQ ID NO: 1040767 - DNA, 25 bp, Homo sapien
agtctgggtggggccctgatgctca

SEQ ID NO: 1040768 - DNA, 25 bp, Homo sapien
ctctgccttgccagctccaggagtc

SEQ ID NO: 1040769 - DNA, 25 bp, Homo sapien
aaggcctggtccctcagcagcctct

SEQ ID NO: 1040770 - DNA, 25 bp, Homo sapien
aatgactccagatgaggcgacttca

SEQ ID NO: 1040771 - DNA, 25 bp, Homo sapien
gggcgaacctcttgggtcaacagca

SEQ ID NO: 1040772 - DNA, 25 bp, Homo sapien
tgaggcgacttcatcagggacccta

SEQ ID NO: 1040773 - DNA, 25 bp, Homo sapien
tcaaccccttccagcacagatttta

SEQ ID NO: 1040774 - DNA, 25 bp, Homo sapien
tccgggaaggatgcagtagctccag

SEQ ID NO: 1040775 - DNA, 25 bp, Homo sapien
ccttcgaggaaagagacggagtgca

SEQ ID NO: 1040776 - DNA, 25 bp, Homo sapien
tctgcttgccccactctaagaggtg

SEQ ID NO: 1040777 - DNA, 25 bp, Homo sapien
cagtcaagctccaccatgttcagga

SEQ ID NO: 1040778 - DNA, 25 bp, Homo sapien
ggtgctgacagggaaacataggatt

SEQ ID NO: 1040779 - DNA, 25 bp, Homo sapien
gagctcaaaacagggtgctgacagg

SEQ ID NO: 1040780 - DNA, 25 bp, Homo sapien
ctggagctcaaaacagggtgctgac

SEQ ID NO: 1040781 - DNA, 25 bp, Homo sapien
cagggaaacataggattttgcctgt

SEQ ID NO: 1040782 - DNA, 25 bp, Homo sapien
gagagaacaagaagtagttagagga

SEQ ID NO: 1040783 - DNA, 25 bp, Homo sapien
tgggagagaacaagaagtagttaga

SEQ ID NO: 1040784 - DNA, 25 bp, Homo sapien
agaacaagaagtagttagaggagag

SEQ ID NO: 1040785 - DNA, 25 bp, Homo sapien
gagaacaagaagtagttagaggaga

SEQ ID NO: 1040786 - DNA, 25 bp, Homo sapien
gacggtgcagaacacaatgatcttg

SEQ ID NO: 1040787 - DNA, 25 bp, Homo sapien
ttcaagtccgactctgacagcaggc

SEQ ID NO: 1040788 - DNA, 25 bp, Homo sapien
tttaattgacggatgctcgggcacc

SEQ ID NO: 1040789 - DNA, 25 bp, Homo sapien
gacagcaggcagtcggtcataacga

SEQ ID NO: 1040790 - DNA, 25 bp, Homo sapien
aaatatggaacttgtcacgaatttg

SEQ ID NO: 1040791 - DNA, 25 bp, Homo sapien
agtatacgtgctgcccaggccaaca

SEQ ID NO: 1040792 - DNA, 25 bp, Homo sapien
aacttgtcacgaatttgcacatcat

SEQ ID NO: 1040793 - DNA, 25 bp, Homo sapien
atggaacttgtcacgaatttgcaca

SEQ ID NO: 1040794 - DNA, 25 bp, Homo sapien
cagtggaccctgtatggtgagcagt

SEQ ID NO: 1040795 - DNA, 25 bp, Homo sapien
cctgtatggtgagcagtcctttctc

SEQ ID NO: 1040796 - DNA, 25 bp, Homo sapien
tggaccctgtatggtgagcagtcct

SEQ ID NO: 1040797 - DNA, 25 bp, Homo sapien
gaccctgtatggtgagcagtccttt

SEQ ID NO: 1040798 - DNA, 25 bp, Homo sapien
gaggcagacgtctatgaacaccttt

SEQ ID NO: 1040799 - DNA, 25 bp, Homo sapien
catccttggatagtcctctgctgtc

SEQ ID NO: 1040800 - DNA, 25 bp, Homo sapien
aggtatctcaggcattcatcttggg

SEQ ID NO: 1040801 - DNA, 25 bp, Homo sapien
cttggggtgtttccttgaggcagac

SEQ ID NO: 1040802 - DNA, 25 bp, Homo sapien
caggtgtactaaaactctcctttgg

SEQ ID NO: 1040803 - DNA, 25 bp, Homo sapien
cagcacaggtgtactaaaactctcc

SEQ ID NO: 1040804 - DNA, 25 bp, Homo sapien
acagcacaggtgtactaaaactctc

SEQ ID NO: 1040805 - DNA, 25 bp, Homo sapien
gcacaggtgtactaaaactctcctt

SEQ ID NO: 1040806 - DNA, 25 bp, Homo sapien
ctattcaggtggactattttcaatg

SEQ ID NO: 1040807 - DNA, 25 bp, Homo sapien
tgagtaaccattcctcgaggtcatt

SEQ ID NO: 1040808 - DNA, 25 bp, Homo sapien
atttaatgggtgttagataattcac

SEQ ID NO: 1040809 - DNA, 25 bp, Homo sapien
gactttctaagatatttaatgggtg

SEQ ID NO: 1040810 - DNA, 25 bp, Homo sapien
tttaagcaattggaggtgttccagc

SEQ ID NO: 1040811 - DNA, 25 bp, Homo sapien
cccactgaagaaggtgatcaatttt

SEQ ID NO: 1040812 - DNA, 25 bp, Homo sapien
tcagctgttccaggtgcccactgaa

SEQ ID NO: 1040813 - DNA, 25 bp, Homo sapien
ctgatcagctgttccaggtgcccac

SEQ ID NO: 1040814 - DNA, 25 bp, Homo sapien
gttccaggtgcccactgaagaaggt

SEQ ID NO: 1040815 - DNA, 25 bp, Homo sapien
tcagggtgtccgtagacatgcaatt

SEQ ID NO: 1040816 - DNA, 25 bp, Homo sapien
aggtccttcagggtgtccgtagaca

SEQ ID NO: 1040817 - DNA, 25 bp, Homo sapien
ccttcagggtgtccgtagacatgca

SEQ ID NO: 1040818 - DNA, 25 bp, Homo sapien
tccttcagggtgtccgtagacatgc

SEQ ID NO: 1040819 - DNA, 25 bp, Homo sapien
tgaagatcctcttgggctgcctgac

SEQ ID NO: 1040820 - DNA, 25 bp, Homo sapien
gtgaagatcctcttgggctgcctga

SEQ ID NO: 1040821 - DNA, 25 bp, Homo sapien
agtgaagatcctcttgggctgcctg

SEQ ID NO: 1040822 - DNA, 25 bp, Homo sapien
cagtgaagatcctcttgggctgcct

SEQ ID NO: 1040823 - DNA, 25 bp, Homo sapien
ttcctcagacggtgatgagccacag

SEQ ID NO: 1040824 - DNA, 25 bp, Homo sapien
agttcctcagacggtgatgagccac

SEQ ID NO: 1040825 - DNA, 25 bp, Homo sapien
cctcagacggtgatgagccacagga

SEQ ID NO: 1040826 - DNA, 25 bp, Homo sapien
tagcagcaaagatggagctccagtt

SEQ ID NO: 1040827 - DNA, 25 bp, Homo sapien
ttatcaaccccactaggcacgcctt

SEQ ID NO: 1040828 - DNA, 25 bp, Homo sapien
atttatcaaccccactaggcacgcc

SEQ ID NO: 1040829 - DNA, 25 bp, Homo sapien
tggatttatcaaccccactaggcac

SEQ ID NO: 1040830 - DNA, 25 bp, Homo sapien
ttggatttatcaaccccactaggca

SEQ ID NO: 1040831 - DNA, 25 bp, Homo sapien
gtctgggaactcgctgcaggctgga

SEQ ID NO: 1040832 - DNA, 25 bp, Homo sapien
tctgggaactcgctgcaggctggat

SEQ ID NO: 1040833 - DNA, 25 bp, Homo sapien
ctgggaactcgctgcaggctggatg

SEQ ID NO: 1040834 - DNA, 25 bp, Homo sapien
tagatgcctaagaaggtgcttgtgg

SEQ ID NO: 1040835 - DNA, 25 bp, Homo sapien
aagatctgaggagaagctcactctg

SEQ ID NO: 1040836 - DNA, 25 bp, Homo sapien
tgcctaagaaggtgcttgtggcagc

SEQ ID NO: 1040837 - DNA, 25 bp, Homo sapien
agatctgaggagaagctcactctga

SEQ ID NO: 1040838 - DNA, 25 bp, Homo sapien
gtatggtcccatccaatgctgctca

SEQ ID NO: 1040839 - DNA, 25 bp, Homo sapien
ggtatggtcccatccaatgctgctc

SEQ ID NO: 1040840 - DNA, 25 bp, Homo sapien
tatggtcccatccaatgctgctcat

SEQ ID NO: 1040841 - DNA, 25 bp, Homo sapien
ctggtatggtcccatccaatgctgc

SEQ ID NO: 1040842 - DNA, 25 bp, Homo sapien
accagtgtatcaagtcccctcagga

SEQ ID NO: 1040843 - DNA, 25 bp, Homo sapien
ccagtgtatcaagtcccctcaggac

SEQ ID NO: 1040844 - DNA, 25 bp, Homo sapien
tcattctgacaaatctccgaggaaa

SEQ ID NO: 1040845 - DNA, 25 bp, Homo sapien
ttctgacaaatctccgaggaaaaac

SEQ ID NO: 1040846 - DNA, 25 bp, Homo sapien
gtctgggtatatcctttccaataga

SEQ ID NO: 1040847 - DNA, 25 bp, Homo sapien
caacacaggtgcactaggcctcttc

SEQ ID NO: 1040848 - DNA, 25 bp, Homo sapien
tccacccaaaaaggtagctcaggca

SEQ ID NO: 1040849 - DNA, 25 bp, Homo sapien
gtacaactcacgctcataaccgaag

SEQ ID NO: 1040850 - DNA, 25 bp, Homo sapien
tgctctttgatattactgatctttt

SEQ ID NO: 1040851 - DNA, 25 bp, Homo sapien
tgctccaggtgctctttgatattac

SEQ ID NO: 1040852 - DNA, 25 bp, Homo sapien
ccaggtgctctttgatattactgat

SEQ ID NO: 1040853 - DNA, 25 bp, Homo sapien
gctctttgatattactgatcttttt

SEQ ID NO: 1040854 - DNA, 25 bp, Homo sapien
gtggtccacattaggatatgaatca

SEQ ID NO: 1040855 - DNA, 25 bp, Homo sapien
ctttagctgactgaggcttgggtac

SEQ ID NO: 1040856 - DNA, 25 bp, Homo sapien
ggtggtccacattaggatatgaatc

SEQ ID NO: 1040857 - DNA, 25 bp, Homo sapien
gacatgacccttgtagtcaagactc

SEQ ID NO: 1040858 - DNA, 25 bp, Homo sapien
tgacatgacccttgtagtcaagact

SEQ ID NO: 1040859 - DNA, 25 bp, Homo sapien
tctggatgtagtctagaaggtgctc

SEQ ID NO: 1040860 - DNA, 25 bp, Homo sapien
ctggatgtagtctagaaggtgctca

SEQ ID NO: 1040861 - DNA, 25 bp, Homo sapien
gatctggatgtagtctagaaggtgc

SEQ ID NO: 1040862 - DNA, 25 bp, Homo sapien
cagatctggatgtagtctagaaggt

SEQ ID NO: 1040863 - DNA, 25 bp, Homo sapien
aattctactctgtactcagtggcca

SEQ ID NO: 1040864 - DNA, 25 bp, Homo sapien
tccaattctactctgtactcagtgg

SEQ ID NO: 1040865 - DNA, 25 bp, Homo sapien
agtggccattaagccagcattctgc

SEQ ID NO: 1040866 - DNA, 25 bp, Homo sapien
ctcagtggccattaagccagcattc

SEQ ID NO: 1040867 - DNA, 25 bp, Homo sapien
tggacatggccaaagcttggtccct

SEQ ID NO: 1040868 - DNA, 25 bp, Homo sapien
acatggccaaagcttggtccctcag

SEQ ID NO: 1040869 - DNA, 25 bp, Homo sapien
ggacatggccaaagcttggtccctc

SEQ ID NO: 1040870 - DNA, 25 bp, Homo sapien
gacatggccaaagcttggtccctca

SEQ ID NO: 1040871 - DNA, 25 bp, Homo sapien
tccatgtgggagagaacgagcttct

SEQ ID NO: 1040872 - DNA, 25 bp, Homo sapien
gtggtgaactgggtaacaatctcct

SEQ ID NO: 1040873 - DNA, 25 bp, Homo sapien
gaaacgtagcgagagacatccatgt

SEQ ID NO: 1040874 - DNA, 25 bp, Homo sapien
ttggcattgaggaagcacccatggg

SEQ ID NO: 1040875 - DNA, 25 bp, Homo sapien
cagtcagggcagtagtcagtacaga

SEQ ID NO: 1040876 - DNA, 25 bp, Homo sapien
tcagcaccataactctctcgggggg

SEQ ID NO: 1040877 - DNA, 25 bp, Homo sapien
cataaaatgacctgttgccacagtc

SEQ ID NO: 1040878 - DNA, 25 bp, Homo sapien
aaatgacctgttgccacagtcaggg

SEQ ID NO: 1040879 - DNA, 25 bp, Homo sapien
gcggggaagaggcgcttctcgcttc

SEQ ID NO: 1040880 - DNA, 25 bp, Homo sapien
cctcccagacagggttgcggcccag

SEQ ID NO: 1040881 - DNA, 25 bp, Homo sapien
acagggttgcggcccagcagaggcg

SEQ ID NO: 1040882 - DNA, 25 bp, Homo sapien
ggggaagaggcgcttctcgcttcct

SEQ ID NO: 1040883 - DNA, 25 bp, Homo sapien
tggcccatccccaatgagccgctgg

SEQ ID NO: 1040884 - DNA, 25 bp, Homo sapien
ttgtcatcatggcccatccccaatg

SEQ ID NO: 1040885 - DNA, 25 bp, Homo sapien
ctacttctatccacacagacccagc

SEQ ID NO: 1040886 - DNA, 25 bp, Homo sapien
acttctatccacacagacccagcaa

SEQ ID NO: 1040887 - DNA, 25 bp, Homo sapien
tacaagtgacctgggctccatggtt

SEQ ID NO: 1040888 - DNA, 25 bp, Homo sapien
gaacattaggaagaccagtggcaga

SEQ ID NO: 1040889 - DNA, 25 bp, Homo sapien
actgctgtcttgaaccctctggact

SEQ ID NO: 1040890 - DNA, 25 bp, Homo sapien
tgttgcggactgatcagcactggtc

SEQ ID NO: 1040891 - DNA, 25 bp, Homo sapien
cagtgtccggtggttctgggattca

SEQ ID NO: 1040892 - DNA, 25 bp, Homo sapien
cagcacgtttatggtgtgaactgag

SEQ ID NO: 1040893 - DNA, 25 bp, Homo sapien
cattctcattgctttagggtggtaa

SEQ ID NO: 1040894 - DNA, 25 bp, Homo sapien
aatggcatcgattttagggagtccc

SEQ ID NO: 1040895 - DNA, 25 bp, Homo sapien
gcagctcgtccaggatgaagatggt

SEQ ID NO: 1040896 - DNA, 25 bp, Homo sapien
gggactggaggctcattctgacaaa

SEQ ID NO: 1040897 - DNA, 25 bp, Homo sapien
aaatgtctcatgctggaggcctcca

SEQ ID NO: 1040898 - DNA, 25 bp, Homo sapien
gaggcctccatgaacatcagaggga

SEQ ID NO: 1040899 - DNA, 25 bp, Homo sapien
caaggtctccagatgaggtgtcttc

SEQ ID NO: 1040900 - DNA, 25 bp, Homo sapien
aaggtctccagatgaggtgtcttca

SEQ ID NO: 1040901 - DNA, 25 bp, Homo sapien
gcaaggtctccagatgaggtgtctt

SEQ ID NO: 1040902 - DNA, 25 bp, Homo sapien
taactcatcgtcataaccgaaggct

SEQ ID NO: 1040903 - DNA, 25 bp, Homo sapien
tgctgttggccgcttacatataact

SEQ ID NO: 1040904 - DNA, 25 bp, Homo sapien
aagcatctgagggtagtacaggcag

SEQ ID NO: 1040905 - DNA, 25 bp, Homo sapien
tacatataactcatcgtcataaccg

SEQ ID NO: 1040906 - DNA, 25 bp, Homo sapien
gaaacacgcaggtttgatgcacttt

SEQ ID NO: 1040907 - DNA, 25 bp, Homo sapien
ggagcttctgctgtgaaacacgcag

SEQ ID NO: 1040908 - DNA, 25 bp, Homo sapien
gacagggaattagagacaggttcat

SEQ ID NO: 1040909 - DNA, 25 bp, Homo sapien
ttcattggtgtttactaagctgtga

SEQ ID NO: 1040910 - DNA, 25 bp, Homo sapien
aagcatgacagaatataaaggttcc

SEQ ID NO: 1040911 - DNA, 25 bp, Homo sapien
gcatgacagaatataaaggttccca

SEQ ID NO: 1040912 - DNA, 25 bp, Homo sapien
taagcatgacagaatataaaggttc

SEQ ID NO: 1040913 - DNA, 25 bp, Homo sapien
agcatgacagaatataaaggttccc

SEQ ID NO: 1040914 - DNA, 25 bp, Homo sapien
tcatttccgcgaaagtagaaggtgg

SEQ ID NO: 1040915 - DNA, 25 bp, Homo sapien
ggtctttcagagcattcgtggaggt

SEQ ID NO: 1040916 - DNA, 25 bp, Homo sapien
gcaggtctttcagagcattcgtgga

SEQ ID NO: 1040917 - DNA, 25 bp, Homo sapien
cattcgtggaggtctcatttccgcg

SEQ ID NO: 1040918 - DNA, 25 bp, Homo sapien
ggcaggatacaactccagacctaac

SEQ ID NO: 1040919 - DNA, 25 bp, Homo sapien
gcaggatacaactccagacctaact

SEQ ID NO: 1040920 - DNA, 25 bp, Homo sapien
ggggcaggatacaactccagaccta

SEQ ID NO: 1040921 - DNA, 25 bp, Homo sapien
gggcaggatacaactccagacctaa

SEQ ID NO: 1040922 - DNA, 25 bp, Homo sapien
ctaagagcaaagatggaagtccact

SEQ ID NO: 1040923 - DNA, 25 bp, Homo sapien
tctcagatggccatgagccacagga

SEQ ID NO: 1040924 - DNA, 25 bp, Homo sapien
gcaggggatgggaccaaaaaagatc

SEQ ID NO: 1040925 - DNA, 25 bp, Homo sapien
aagatggaagtccactttctcagat

SEQ ID NO: 1040926 - DNA, 25 bp, Homo sapien
aacacttgagtacttcacgaaggtc

SEQ ID NO: 1040927 - DNA, 25 bp, Homo sapien
taagtttgggttccaatatgatcaa

SEQ ID NO: 1040928 - DNA, 25 bp, Homo sapien
tcacgaaggtcaaggttggtataag

SEQ ID NO: 1040929 - DNA, 25 bp, Homo sapien
tcacataaggaagaagagccaaaac

SEQ ID NO: 1040930 - DNA, 25 bp, Homo sapien
catgcaactcggaaagtcttggtca

SEQ ID NO: 1040931 - DNA, 25 bp, Homo sapien
tcatgcaactcggaaagtcttggtc

SEQ ID NO: 1040932 - DNA, 25 bp, Homo sapien
gtctgggtggagtccggatgctcat

SEQ ID NO: 1040933 - DNA, 25 bp, Homo sapien
ggagatggccaaggcctcgtccctc

SEQ ID NO: 1040934 - DNA, 25 bp, Homo sapien
gaaaaagttccgtgggcagctcctc

SEQ ID NO: 1040935 - DNA, 25 bp, Homo sapien
caggagtctgggtggagtccggatg

SEQ ID NO: 1040936 - DNA, 25 bp, Homo sapien
gcttcagggcctcacagtgtctcct

SEQ ID NO: 1040937 - DNA, 25 bp, Homo sapien
cagggcctcacagtgtctcctgctg

SEQ ID NO: 1040938 - DNA, 25 bp, Homo sapien
gggcctcacagtgtctcctgctgaa

SEQ ID NO: 1040939 - DNA, 25 bp, Homo sapien
ctcacagtgtctcctgctgaaggcc

SEQ ID NO: 1040940 - DNA, 25 bp, Homo sapien
tctgggcaaggccttttcatcagag

SEQ ID NO: 1040941 - DNA, 25 bp, Homo sapien
ctgggcaaggccttttcatcagaga

SEQ ID NO: 1040942 - DNA, 25 bp, Homo sapien
tctctgggcaaggccttttcatcag

SEQ ID NO: 1040943 - DNA, 25 bp, Homo sapien
gtctctgggcaaggccttttcatca

SEQ ID NO: 1040944 - DNA, 25 bp, Homo sapien
tctatgtcagagagaacgagcttcc

SEQ ID NO: 1040945 - DNA, 25 bp, Homo sapien
tacgggccatggcttcagaccaaac

SEQ ID NO: 1040946 - DNA, 25 bp, Homo sapien
gcatttggtaagcacctacgggcca

SEQ ID NO: 1040947 - DNA, 25 bp, Homo sapien
gacgggcagtgtccaattgcaattc

SEQ ID NO: 1040948 - DNA, 25 bp, Homo sapien
ggggagagagagcaggaagttagtt

SEQ ID NO: 1040949 - DNA, 25 bp, Homo sapien
ctggggagagagagcaggaagttag

SEQ ID NO: 1040950 - DNA, 25 bp, Homo sapien
tggggagagagagcaggaagttagt

SEQ ID NO: 1040951 - DNA, 25 bp, Homo sapien
gctcgggtacttggacagatgcttc

SEQ ID NO: 1040952 - DNA, 25 bp, Homo sapien
cactgagggcagtagtcggtacaga

SEQ ID NO: 1040953 - DNA, 25 bp, Homo sapien
caagttgggcaaatctgctccggca

SEQ ID NO: 1040954 - DNA, 25 bp, Homo sapien
ctttagttgaccaatgctcgggtac

SEQ ID NO: 1040955 - DNA, 25 bp, Homo sapien
cgtgtagaagctgagccccattgca

SEQ ID NO: 1040956 - DNA, 25 bp, Homo sapien
aattgtggcggcgtgtagaagctga

SEQ ID NO: 1040957 - DNA, 25 bp, Homo sapien
tgatgaaattgtggcggcgtgtaga

SEQ ID NO: 1040958 - DNA, 25 bp, Homo sapien
gcggcgtgtagaagctgagccccat

SEQ ID NO: 1040959 - DNA, 25 bp, Homo sapien
caggtacctttcatacaccttccaa

SEQ ID NO: 1040960 - DNA, 25 bp, Homo sapien
agccaggtacctttcatacaccttc

SEQ ID NO: 1040961 - DNA, 25 bp, Homo sapien
cacaagccaggtacctttcatacac

SEQ ID NO: 1040962 - DNA, 25 bp, Homo sapien
tgccacaagccaggtacctttcata

SEQ ID NO: 1040963 - DNA, 25 bp, Homo sapien
gacagacgtgatgttggtggcttct

SEQ ID NO: 1040964 - DNA, 25 bp, Homo sapien
agttatgacagctccgagcgccagg

SEQ ID NO: 1040965 - DNA, 25 bp, Homo sapien
tacacctgagaatatggtcatgcct

SEQ ID NO: 1040966 - DNA, 25 bp, Homo sapien
ggatttgttacacctgagaatatgg

SEQ ID NO: 1040967 - DNA, 25 bp, Homo sapien
agtgagatcactgcctcccagaggt

SEQ ID NO: 1040968 - DNA, 25 bp, Homo sapien
ctttggtagccaactcggagatttc

SEQ ID NO: 1040969 - DNA, 25 bp, Homo sapien
ccatctggccctgaaagtgttcaca

SEQ ID NO: 1040970 - DNA, 25 bp, Homo sapien
taggaacattgccaacaggaggaac

SEQ ID NO: 1040971 - DNA, 25 bp, Homo sapien
caggcattgcgcatcttctctgcta

SEQ ID NO: 1040972 - DNA, 25 bp, Homo sapien
tggggcatctccgtgacaaccacat

SEQ ID NO: 1040973 - DNA, 25 bp, Homo sapien
cagctggcactgagcaacatccctg

SEQ ID NO: 1040974 - DNA, 25 bp, Homo sapien
cagcaaacaggcattgcgcatcttc

SEQ ID NO: 1040975 - DNA, 25 bp, Homo sapien
gctttctgtgccaaaagggcttaaa

SEQ ID NO: 1040976 - DNA, 25 bp, Homo sapien
ggctttctgtgccaaaagggcttaa

SEQ ID NO: 1040977 - DNA, 25 bp, Homo sapien
tatgaagtcttcagaatcgctccag

SEQ ID NO: 1040978 - DNA, 25 bp, Homo sapien
taagttggtcaccagccaagaagtg

SEQ ID NO: 1040979 - DNA, 25 bp, Homo sapien
gaacccaaaagtagtgtcttcctga

SEQ ID NO: 1040980 - DNA, 25 bp, Homo sapien
ccatattagtggaaaccagggtgca

SEQ ID NO: 1040981 - DNA, 25 bp, Homo sapien
caactcgctgcgctcgctggaggag

SEQ ID NO: 1040982 - DNA, 25 bp, Homo sapien
agggcacgttcagcggctcggccaa

SEQ ID NO: 1040983 - DNA, 25 bp, Homo sapien
gtgttcctcgacctcagctacaaca

SEQ ID NO: 1040984 - DNA, 25 bp, Homo sapien
ggacttcaggaacaactcgctgcgc

SEQ ID NO: 1040985 - DNA, 25 bp, Homo sapien
catggaaagtgctgactggccctgc

SEQ ID NO: 1040986 - DNA, 25 bp, Homo sapien
tgccagttccatccagaagttcggg

SEQ ID NO: 1040987 - DNA, 25 bp, Homo sapien
aatggagctaccaggtccacagagg

SEQ ID NO: 1040988 - DNA, 25 bp, Homo sapien
tcagcagctggacctctcagaccag

SEQ ID NO: 1040989 - DNA, 25 bp, Homo sapien
atgttcccatacaaatacttcccca

SEQ ID NO: 1040990 - DNA, 25 bp, Homo sapien
catgttcccatacaaatacttcccc

SEQ ID NO: 1040991 - DNA, 25 bp, Homo sapien
ccatacaaatacttccccatgcggc

SEQ ID NO: 1040992 - DNA, 25 bp, Homo sapien
agccacggctgcctggatggcaaat

SEQ ID NO: 1040993 - DNA, 25 bp, Homo sapien
gtgtctctacttctgccattggctg

SEQ ID NO: 1040994 - DNA, 25 bp, Homo sapien
cctggatggcaaatgtgtctctact

SEQ ID NO: 1040995 - DNA, 25 bp, Homo sapien
gtagaagaagccacggctgcctgga

SEQ ID NO: 1040996 - DNA, 25 bp, Homo sapien
tcttcccagattaaagcctttcagg

SEQ ID NO: 1040997 - DNA, 25 bp, Homo sapien
caaagtccagattcccgaccctgca

SEQ ID NO: 1040998 - DNA, 25 bp, Homo sapien
agattcccgaccctgcaaaatatac

SEQ ID NO: 1040999 - DNA, 25 bp, Homo sapien
attcccgaccctgcaaaatatactg

SEQ ID NO: 1041000 - DNA, 25 bp, Homo sapien
caggaaacatcaccccccaacagaa

SEQ ID NO: 1041001 - DNA, 25 bp, Homo sapien
aacatcagctctttgggggttttgg

SEQ ID NO: 1041002 - DNA, 25 bp, Homo sapien
gaaacatcaccccccaacagaaaca

SEQ ID NO: 1041003 - DNA, 25 bp, Homo sapien
tagcaggaaacatcaccccccaaca

SEQ ID NO: 1041004 - DNA, 25 bp, Homo sapien
cgtaggctgcatacatcaggtttcc

SEQ ID NO: 1041005 - DNA, 25 bp, Homo sapien
gctgcatacatcaggtttcctggta

SEQ ID NO: 1041006 - DNA, 25 bp, Homo sapien
gaaagcgtaggctgcatacatcagg

SEQ ID NO: 1041007 - DNA, 25 bp, Homo sapien
aaggaagtaagaaagcgtaggctgc

SEQ ID NO: 1041008 - DNA, 25 bp, Homo sapien
gatgcccggagatgaaaagagtccc

SEQ ID NO: 1041009 - DNA, 25 bp, Homo sapien
aagtttctaataatcacgatgcccg

SEQ ID NO: 1041010 - DNA, 25 bp, Homo sapien
ccttcagggaggaacggttacagct

SEQ ID NO: 1041011 - DNA, 25 bp, Homo sapien
cggttacagctattagtaacaactg

SEQ ID NO: 1041012 - DNA, 25 bp, Homo sapien
gtacttggtccagggctgattaagg

SEQ ID NO: 1041013 - DNA, 25 bp, Homo sapien
ctttcctccgaagtacttggtccag

SEQ ID NO: 1041014 - DNA, 25 bp, Homo sapien
cttggtccagggctgattaagggct

SEQ ID NO: 1041015 - DNA, 25 bp, Homo sapien
cctccgaagtacttggtccagggct

SEQ ID NO: 1041016 - DNA, 25 bp, Homo sapien
cctgcagcgatgtccctgactcaga

SEQ ID NO: 1041017 - DNA, 25 bp, Homo sapien
ctgcctgcagcgatgtccctgactc

SEQ ID NO: 1041018 - DNA, 25 bp, Homo sapien
tgcctgcagcgatgtccctgactca

SEQ ID NO: 1041019 - DNA, 25 bp, Homo sapien
ctgcagcgatgtccctgactcagag

SEQ ID NO: 1041020 - DNA, 25 bp, Homo sapien
tgtcactgaagtagggttgaaggat

SEQ ID NO: 1041021 - DNA, 25 bp, Homo sapien
aggctgctcagtatcgagacaagcc

SEQ ID NO: 1041022 - DNA, 25 bp, Homo sapien
aggagctaggccaggtgtcactgaa

SEQ ID NO: 1041023 - DNA, 25 bp, Homo sapien
gtatcgagacaagccgggcactctg

SEQ ID NO: 1041024 - DNA, 25 bp, Homo sapien
tcaactattgcaaaagtcatatgag

SEQ ID NO: 1041025 - DNA, 25 bp, Homo sapien
tacatatataaatgggctaggcatg

SEQ ID NO: 1041026 - DNA, 25 bp, Homo sapien
taaacagtagtacaggttgtcatca

SEQ ID NO: 1041027 - DNA, 25 bp, Homo sapien
tataaactaatttaatgcctggtcc

SEQ ID NO: 1041028 - DNA, 25 bp, Homo sapien
gtacctgggccgctctctgacacgg

SEQ ID NO: 1041029 - DNA, 25 bp, Homo sapien
gaagtacagctttgactccgcgata

SEQ ID NO: 1041030 - DNA, 25 bp, Homo sapien
tacagctttgactccgcgataggcg

SEQ ID NO: 1041031 - DNA, 25 bp, Homo sapien
tgaggaagtacagctttgactccgc

SEQ ID NO: 1041032 - DNA, 25 bp, Homo sapien
caagaccaattcctcgtagctcctg

SEQ ID NO: 1041033 - DNA, 25 bp, Homo sapien
acaagaccaattcctcgtagctcct

SEQ ID NO: 1041034 - DNA, 25 bp, Homo sapien
gacaagaccaattcctcgtagctcc

SEQ ID NO: 1041035 - DNA, 25 bp, Homo sapien
agatttgcaatagacgatcaggagc

SEQ ID NO: 1041036 - DNA, 25 bp, Homo sapien
cgatgcgctggcagatttgcaatag

SEQ ID NO: 1041037 - DNA, 25 bp, Homo sapien
tttgcaatagacgatcaggagccac

SEQ ID NO: 1041038 - DNA, 25 bp, Homo sapien
gatgcgctggcagatttgcaataga

SEQ ID NO: 1041039 - DNA, 25 bp, Homo sapien
taagtagcaaagactgccttcctgc

SEQ ID NO: 1041040 - DNA, 25 bp, Homo sapien
caccaaagaaagaagcgactcttga

SEQ ID NO: 1041041 - DNA, 25 bp, Homo sapien
aaagaaagaagcgactcttgaaata

SEQ ID NO: 1041042 - DNA, 25 bp, Homo sapien
taagttaccttttgctgtaagtagc

SEQ ID NO: 1041043 - DNA, 25 bp, Homo sapien
cacttagcacagtccgtctcacaga

SEQ ID NO: 1041044 - DNA, 25 bp, Homo sapien
taccatgggtacttgattcttggat

SEQ ID NO: 1041045 - DNA, 25 bp, Homo sapien
tctcacagacctcgacgtgtatggg

SEQ ID NO: 1041046 - DNA, 25 bp, Homo sapien
ctttcccaggaggatgtttcgatga

SEQ ID NO: 1041047 - DNA, 25 bp, Homo sapien
ggatctggaagcatgagaccctgct

SEQ ID NO: 1041048 - DNA, 25 bp, Homo sapien
gatctggaagcatgagaccctgctc

SEQ ID NO: 1041049 - DNA, 25 bp, Homo sapien
gggatctggaagcatgagaccctgc

SEQ ID NO: 1041050 - DNA, 25 bp, Homo sapien
ccttgggcagcgagactcggttagc

SEQ ID NO: 1041051 - DNA, 25 bp, Homo sapien
agatagagccagcagctcatgagag

SEQ ID NO: 1041052 - DNA, 25 bp, Homo sapien
cagcgagactcggttagctaaagga

SEQ ID NO: 1041053 - DNA, 25 bp, Homo sapien
tagagccagcagctcatgagagaag

SEQ ID NO: 1041054 - DNA, 25 bp, Homo sapien
gagcggggtcggccgcaaggtggtc

SEQ ID NO: 1041055 - DNA, 25 bp, Homo sapien
agcggggtcggccgcaaggtggtct

SEQ ID NO: 1041056 - DNA, 25 bp, Homo sapien
ggtcggccgcaaggtggtctccgtc

SEQ ID NO: 1041057 - DNA, 25 bp, Homo sapien
gcggggtcggccgcaaggtggtctc

SEQ ID NO: 1041058 - DNA, 25 bp, Homo sapien
taggcagccggacagcaaactttgc

SEQ ID NO: 1041059 - DNA, 25 bp, Homo sapien
gagaactttccgagcggagtcagca

SEQ ID NO: 1041060 - DNA, 25 bp, Homo sapien
aaattaaaaagcaccgcggccacag

SEQ ID NO: 1041061 - DNA, 25 bp, Homo sapien
ggagggtgcccgagcttcccagacc

SEQ ID NO: 1041062 - DNA, 25 bp, Homo sapien
tgggggccgagcagcaagattctga

SEQ ID NO: 1041063 - DNA, 25 bp, Homo sapien
gggggccgagcagcaagattctgag

SEQ ID NO: 1041064 - DNA, 25 bp, Homo sapien
ctgggggccgagcagcaagattctg

SEQ ID NO: 1041065 - DNA, 25 bp, Homo sapien
cttcccaaaacgaagagcagagctg

SEQ ID NO: 1041066 - DNA, 25 bp, Homo sapien
gacgcgcttcccaaaacgaagagca

SEQ ID NO: 1041067 - DNA, 25 bp, Homo sapien
tgccaggacccagagcgacgcgctt

SEQ ID NO: 1041068 - DNA, 25 bp, Homo sapien
cagagcgacgcgcttcccaaaacga

SEQ ID NO: 1041069 - DNA, 25 bp, Homo sapien
agatgctgaagtgagggcgctccct

SEQ ID NO: 1041070 - DNA, 25 bp, Homo sapien
atgctgaagtgagggcgctcccttg

SEQ ID NO: 1041071 - DNA, 25 bp, Homo sapien
gaagtgagggcgctcccttgctttg

SEQ ID NO: 1041072 - DNA, 25 bp, Homo sapien
tgagatgctgaagtgagggcgctcc

SEQ ID NO: 1041073 - DNA, 25 bp, Homo sapien
ggagccggctgaagggaatcacagc

SEQ ID NO: 1041074 - DNA, 25 bp, Homo sapien
tcaggagccggctgaagggaatcac

SEQ ID NO: 1041075 - DNA, 25 bp, Homo sapien
agccggctgaagggaatcacagcta

SEQ ID NO: 1041076 - DNA, 25 bp, Homo sapien
caggagccggctgaagggaatcaca

SEQ ID NO: 1041077 - DNA, 25 bp, Homo sapien
tcggctgacactcaggggagcttgc

SEQ ID NO: 1041078 - DNA, 25 bp, Homo sapien
tgatggtcgcataactctgtgattt

SEQ ID NO: 1041079 - DNA, 25 bp, Homo sapien
ggaaatgggaatgactgctgacagt

SEQ ID NO: 1041080 - DNA, 25 bp, Homo sapien
tagaaatttggtctcgctgcacatg

SEQ ID NO: 1041081 - DNA, 25 bp, Homo sapien
cagaaagtagatcgatggcggtcag

SEQ ID NO: 1041082 - DNA, 25 bp, Homo sapien
tcaatttcgtgtgagcagcgccatg

SEQ ID NO: 1041083 - DNA, 25 bp, Homo sapien
tgccgttcaatttcgtgtgagcagc

SEQ ID NO: 1041084 - DNA, 25 bp, Homo sapien
ggctgccctgccgttcaatttcgtg

SEQ ID NO: 1041085 - DNA, 25 bp, Homo sapien
tgcaaaggggaacttggctgccctg

SEQ ID NO: 1041086 - DNA, 25 bp, Homo sapien
tagcggtcttcgctggttcctggag

SEQ ID NO: 1041087 - DNA, 25 bp, Homo sapien
tcaagccagacttatagcggtcttc

SEQ ID NO: 1041088 - DNA, 25 bp, Homo sapien
atcttcggcacctggcatggcaacg

SEQ ID NO: 1041089 - DNA, 25 bp, Homo sapien
tggcaacgccgccttccaaacctgt

SEQ ID NO: 1041090 - DNA, 25 bp, Homo sapien
tcttgcgcgtggactgtgctttctg

SEQ ID NO: 1041091 - DNA, 25 bp, Homo sapien
ctcgatgcgaatgcctgttacactg

SEQ ID NO: 1041092 - DNA, 25 bp, Homo sapien
aggctgtggcgcttggactttgttc

SEQ ID NO: 1041093 - DNA, 25 bp, Homo sapien
tgaagttggcagatcctcgatgcga

SEQ ID NO: 1041094 - DNA, 25 bp, Homo sapien
ccccatggaggtggctggttttctt

SEQ ID NO: 1041095 - DNA, 25 bp, Homo sapien
ccatggaggtggctggttttcttac

SEQ ID NO: 1041096 - DNA, 25 bp, Homo sapien
gcccccatggaggtggctggttttc

SEQ ID NO: 1041097 - DNA, 25 bp, Homo sapien
tcagcccccatggaggtggctggtt

SEQ ID NO: 1041098 - DNA, 25 bp, Homo sapien
tctcaactgttgtctgtgtgtctcc

SEQ ID NO: 1041099 - DNA, 25 bp, Homo sapien
tgttgtctgtgtgtctccatccact

SEQ ID NO: 1041100 - DNA, 25 bp, Homo sapien
ctttctcaactgttgtctgtgtgtc

SEQ ID NO: 1041101 - DNA, 25 bp, Homo sapien
tgtctgtgtgtctccatccactttc

SEQ ID NO: 1041102 - DNA, 25 bp, Homo sapien
aaagccactgccctactgcacatag

SEQ ID NO: 1041103 - DNA, 25 bp, Homo sapien
tctgggtctgaggatctatcaacgt

SEQ ID NO: 1041104 - DNA, 25 bp, Homo sapien
tgaactgtgatatgacaccattccc

SEQ ID NO: 1041105 - DNA, 25 bp, Homo sapien
gaaaatttgggctagtctaatccta

SEQ ID NO: 1041106 - DNA, 25 bp, Homo sapien
gaggaaaaaatacatcggtgataaa

SEQ ID NO: 1041107 - DNA, 25 bp, Homo sapien
aatacatcggtgataaaatatgtaa

SEQ ID NO: 1041108 - DNA, 25 bp, Homo sapien
tacatcggtgataaaatatgtaaca

SEQ ID NO: 1041109 - DNA, 25 bp, Homo sapien
atacatcggtgataaaatatgtaac

SEQ ID NO: 1041110 - DNA, 25 bp, Homo sapien
gaagccgatggctagtaagacccca

SEQ ID NO: 1041111 - DNA, 25 bp, Homo sapien
taaccacaacgatgattgcaccaat

SEQ ID NO: 1041112 - DNA, 25 bp, Homo sapien
cttcccgacatttttcgcataacca

SEQ ID NO: 1041113 - DNA, 25 bp, Homo sapien
gattgcaccaatgaagccgatggct

SEQ ID NO: 1041114 - DNA, 25 bp, Homo sapien
tgtggtcagatctcaacagaagtca

SEQ ID NO: 1041115 - DNA, 25 bp, Homo sapien
ctgcactcaagaggcccaagtaagg

SEQ ID NO: 1041116 - DNA, 25 bp, Homo sapien
catttgcctatcacatgggtgtaag

SEQ ID NO: 1041117 - DNA, 25 bp, Homo sapien
ggaacatgaccattgtaccagagat

SEQ ID NO: 1041118 - DNA, 25 bp, Homo sapien
ggtcaaactgcctggcttttccaaa

SEQ ID NO: 1041119 - DNA, 25 bp, Homo sapien
cacgctaagtccacagctgtgttgt

SEQ ID NO: 1041120 - DNA, 25 bp, Homo sapien
cagcagggtcaaactgcctggcttt

SEQ ID NO: 1041121 - DNA, 25 bp, Homo sapien
ttccaaacacgctaagtccacagct

SEQ ID NO: 1041122 - DNA, 25 bp, Homo sapien
ctaaatcttccaagttctgacacct

SEQ ID NO: 1041123 - DNA, 25 bp, Homo sapien
tgaatagtaactccgtgagtccttt

SEQ ID NO: 1041124 - DNA, 25 bp, Homo sapien
ctctaaatcttccaagttctgacac

SEQ ID NO: 1041125 - DNA, 25 bp, Homo sapien
gtgaatagtaactccgtgagtcctt

SEQ ID NO: 1041126 - DNA, 25 bp, Homo sapien
tagagaagggtgacggtcgtgtctc

SEQ ID NO: 1041127 - DNA, 25 bp, Homo sapien
agaagggtgacggtcgtgtctctta

SEQ ID NO: 1041128 - DNA, 25 bp, Homo sapien
gaagggtgacggtcgtgtctcttac

SEQ ID NO: 1041129 - DNA, 25 bp, Homo sapien
aatagagaagggtgacggtcgtgtc

SEQ ID NO: 1041130 - DNA, 25 bp, Homo sapien
gagactatcgacttcctgcttgtga

SEQ ID NO: 1041131 - DNA, 25 bp, Homo sapien
tactgacgtagcactggatccaagg

SEQ ID NO: 1041132 - DNA, 25 bp, Homo sapien
ttttggcaagcggagaggtcaccgt

SEQ ID NO: 1041133 - DNA, 25 bp, Homo sapien
gctaaaggcagttgttcaccacgtg

SEQ ID NO: 1041134 - DNA, 25 bp, Homo sapien
gacacatgtataattgccgggaggc

SEQ ID NO: 1041135 - DNA, 25 bp, Homo sapien
tagagatcatcctcgccgatacggt

SEQ ID NO: 1041136 - DNA, 25 bp, Homo sapien
tgagacagaatgaccccttgggctc

SEQ ID NO: 1041137 - DNA, 25 bp, Homo sapien
gaggataccagaattgcacaaccgc

SEQ ID NO: 1041138 - DNA, 25 bp, Homo sapien
ggaaatgtagagtgaatcagtctgc

SEQ ID NO: 1041139 - DNA, 25 bp, Homo sapien
cggaaatgtagagtgaatcagtctg

SEQ ID NO: 1041140 - DNA, 25 bp, Homo sapien
ccggaaatgtagagtgaatcagtct

SEQ ID NO: 1041141 - DNA, 25 bp, Homo sapien
cccggaaatgtagagtgaatcagtc

SEQ ID NO: 1041142 - DNA, 25 bp, Homo sapien
caggcgttcatcttcccatagctac

SEQ ID NO: 1041143 - DNA, 25 bp, Homo sapien
ggcgttcatcttcccatagctaccc

SEQ ID NO: 1041144 - DNA, 25 bp, Homo sapien
aggcgttcatcttcccatagctacc

SEQ ID NO: 1041145 - DNA, 25 bp, Homo sapien
tcaggcgttcatcttcccatagcta

SEQ ID NO: 1041146 - DNA, 25 bp, Homo sapien
ctttgtcaggcccttccctggagga

SEQ ID NO: 1041147 - DNA, 25 bp, Homo sapien
ttccctggaggaaccatgccatacc

SEQ ID NO: 1041148 - DNA, 25 bp, Homo sapien
aggcccttccctggaggaaccatgc

SEQ ID NO: 1041149 - DNA, 25 bp, Homo sapien
acctgccatgccctttgtcaggccc

SEQ ID NO: 1041150 - DNA, 25 bp, Homo sapien
gacagtagcttgtttctggattgac

SEQ ID NO: 1041151 - DNA, 25 bp, Homo sapien
aagcctggtccaagaatttctaagg

SEQ ID NO: 1041152 - DNA, 25 bp, Homo sapien
acagcaatgattctagagcacacta

SEQ ID NO: 1041153 - DNA, 25 bp, Homo sapien
tctggattgactgatcaatgtttgg

SEQ ID NO: 1041154 - DNA, 25 bp, Homo sapien
gacgaaccctcatgacacgagttta

SEQ ID NO: 1041155 - DNA, 25 bp, Homo sapien
tggtgtcaaagatacgccttaaatg

SEQ ID NO: 1041156 - DNA, 25 bp, Homo sapien
gatacgccttaaatgacgaactaag

SEQ ID NO: 1041157 - DNA, 25 bp, Homo sapien
tttgaggtgaagtgacatggtgtca

SEQ ID NO: 1041158 - DNA, 25 bp, Homo sapien
catttatcctttgatgtggcaatcc

SEQ ID NO: 1041159 - DNA, 25 bp, Homo sapien
aatatgtcagtaaggccaggagcgg

SEQ ID NO: 1041160 - DNA, 25 bp, Homo sapien
tagacattgatgtggagtgatatcc

SEQ ID NO: 1041161 - DNA, 25 bp, Homo sapien
taatgacgaaagattagaaaccacc

SEQ ID NO: 1041162 - DNA, 25 bp, Homo sapien
tggagcattgtaagtatttcaccat

SEQ ID NO: 1041163 - DNA, 25 bp, Homo sapien
gaggtcaatgaaaatactgctatag

SEQ ID NO: 1041164 - DNA, 25 bp, Homo sapien
gaaaatactgctatagctttggagc

SEQ ID NO: 1041165 - DNA, 25 bp, Homo sapien
atggctacagtcagccactttacag

SEQ ID NO: 1041166 - DNA, 25 bp, Homo sapien
tttgcaggtcacataagccactatc

SEQ ID NO: 1041167 - DNA, 25 bp, Homo sapien
acctggtccccttgacaaatggtga

SEQ ID NO: 1041168 - DNA, 25 bp, Homo sapien
gtcaattacttttcagaggccagag

SEQ ID NO: 1041169 - DNA, 25 bp, Homo sapien
gaggccagagcacaccaataggaag

SEQ ID NO: 1041170 - DNA, 25 bp, Homo sapien
tgtaattgttacaggtgtatactcc

SEQ ID NO: 1041171 - DNA, 25 bp, Homo sapien
ggccaagactcaactattgtaattg

SEQ ID NO: 1041172 - DNA, 25 bp, Homo sapien
cacaggggctcgaatatagaagtac

SEQ ID NO: 1041173 - DNA, 25 bp, Homo sapien
tgcatgattccccaatcaggcagcc

SEQ ID NO: 1041174 - DNA, 25 bp, Homo sapien
cattcaccagcggttcccactttgc

SEQ ID NO: 1041175 - DNA, 25 bp, Homo sapien
ggccattcaccagcggttcccactt

SEQ ID NO: 1041176 - DNA, 25 bp, Homo sapien
aggccattcaccagcggttcccact

SEQ ID NO: 1041177 - DNA, 25 bp, Homo sapien
tcaccagcggttcccactttgcaag

SEQ ID NO: 1041178 - DNA, 25 bp, Homo sapien
cgcgtcataggcacttttggctgcg

SEQ ID NO: 1041179 - DNA, 25 bp, Homo sapien
ctagattaataccttccaactggat

SEQ ID NO: 1041180 - DNA, 25 bp, Homo sapien
agattaataccttccaactggatcc

SEQ ID NO: 1041181 - DNA, 25 bp, Homo sapien
actggatccatgcatcgaaattatc

SEQ ID NO: 1041182 - DNA, 25 bp, Homo sapien
gatccatgcatcgaaattatctggg

SEQ ID NO: 1041183 - DNA, 25 bp, Homo sapien
gcgccagcgcctcagagcaccgagg

SEQ ID NO: 1041184 - DNA, 25 bp, Homo sapien
cgccgctgtttcgccggccccggcg

SEQ ID NO: 1041185 - DNA, 25 bp, Homo sapien
ctgagggggcgcgtccgccgacccg

SEQ ID NO: 1041186 - DNA, 25 bp, Homo sapien
ggccagcacgaaatttctgttaggg

SEQ ID NO: 1041187 - DNA, 25 bp, Homo sapien
gattcagcaaaagacgttccacgtc

SEQ ID NO: 1041188 - DNA, 25 bp, Homo sapien
ggaaatttcagctgcgtagttaagg

SEQ ID NO: 1041189 - DNA, 25 bp, Homo sapien
acaaagctacaagcccggagggtcg

SEQ ID NO: 1041190 - DNA, 25 bp, Homo sapien
tatttacctccccaagcaggtgagc

SEQ ID NO: 1041191 - DNA, 25 bp, Homo sapien
taacaaggtcttgggcaatgtacag

SEQ ID NO: 1041192 - DNA, 25 bp, Homo sapien
taaaaaataagcctcgcagagtgag

SEQ ID NO: 1041193 - DNA, 25 bp, Homo sapien
gagctgacctgccttctaacaagtg

SEQ ID NO: 1041194 - DNA, 25 bp, Homo sapien
tagccgaaaatcactcgtactccat

SEQ ID NO: 1041195 - DNA, 25 bp, Homo sapien
ccaccatagccgaaaatcactcgta

SEQ ID NO: 1041196 - DNA, 25 bp, Homo sapien
cattcttgatctgtgatactgtcat

SEQ ID NO: 1041197 - DNA, 25 bp, Homo sapien
tcactcgtactccattcttgatctg

SEQ ID NO: 1041198 - DNA, 25 bp, Homo sapien
gaagaacacgtccaagcacaaacgg

SEQ ID NO: 1041199 - DNA, 25 bp, Homo sapien
gtagaaaacatagtggccccttcca

SEQ ID NO: 1041200 - DNA, 25 bp, Homo sapien
gactcaatacataactgggaaggct

SEQ ID NO: 1041201 - DNA, 25 bp, Homo sapien
gagattcagatgtcccaagtgggtg

SEQ ID NO: 1041202 - DNA, 25 bp, Homo sapien
ggtcctggcaccaaagtcttcatgt

SEQ ID NO: 1041203 - DNA, 25 bp, Homo sapien
ttacaaggagctgctcgaagctctt

SEQ ID NO: 1041204 - DNA, 25 bp, Homo sapien
tctctgagcaacagaggcatcttac

SEQ ID NO: 1041205 - DNA, 25 bp, Homo sapien
tcatgtctcacatgaagactctctg

SEQ ID NO: 1041206 - DNA, 25 bp, Homo sapien
gaggaaccctgcattttggactggc

SEQ ID NO: 1041207 - DNA, 25 bp, Homo sapien
gactccccgaatgcatagagcagag

SEQ ID NO: 1041208 - DNA, 25 bp, Homo sapien
tggtaaccatgtgacgagctgcaat

SEQ ID NO: 1041209 - DNA, 25 bp, Homo sapien
cagtgaggcctagaacacgacagac

SEQ ID NO: 1041210 - DNA, 25 bp, Homo sapien
cataattggcataaggatgtattcc

SEQ ID NO: 1041211 - DNA, 25 bp, Homo sapien
gacagctcactgctagccaaaccaa

SEQ ID NO: 1041212 - DNA, 25 bp, Homo sapien
gattgcatcttgttagacagctcac

SEQ ID NO: 1041213 - DNA, 25 bp, Homo sapien
ctatatttaagttagggcctggccg

SEQ ID NO: 1041214 - DNA, 25 bp, Homo sapien
gatacacacaacaaagaaacttctt

SEQ ID NO: 1041215 - DNA, 25 bp, Homo sapien
taaagatacacacaacaaagaaact

SEQ ID NO: 1041216 - DNA, 25 bp, Homo sapien
ctgtaaagatacacacaacaaagaa

SEQ ID NO: 1041217 - DNA, 25 bp, Homo sapien
cacacaacaaagaaacttctttgat

SEQ ID NO: 1041218 - DNA, 25 bp, Homo sapien
gccatcccagggtttcgctaactct

SEQ ID NO: 1041219 - DNA, 25 bp, Homo sapien
aacagctcccgtaaagaaatgaact

SEQ ID NO: 1041220 - DNA, 25 bp, Homo sapien
aatgagatttcaagggctaccacta

SEQ ID NO: 1041221 - DNA, 25 bp, Homo sapien
catatctacatggtcagatggtctc

SEQ ID NO: 1041222 - DNA, 25 bp, Homo sapien
atcccctcctcttgtccagaagatt

SEQ ID NO: 1041223 - DNA, 25 bp, Homo sapien
ctcatcccctcctcttgtccagaag

SEQ ID NO: 1041224 - DNA, 25 bp, Homo sapien
tgagggctcatcccctcctcttgtc

SEQ ID NO: 1041225 - DNA, 25 bp, Homo sapien
ctgagggctcatcccctcctcttgt

SEQ ID NO: 1041226 - DNA, 25 bp, Homo sapien
taggcacttctatgatctccacgtt

SEQ ID NO: 1041227 - DNA, 25 bp, Homo sapien
aaagagtacacaggacttgggccgg

SEQ ID NO: 1041228 - DNA, 25 bp, Homo sapien
gaataaggcctgtagtctaactagc

SEQ ID NO: 1041229 - DNA, 25 bp, Homo sapien
caatccagacaatctcgcttcaggg

SEQ ID NO: 1041230 - DNA, 25 bp, Homo sapien
caatccgggtcttgtcaacagcaga

SEQ ID NO: 1041231 - DNA, 25 bp, Homo sapien
catgttcgggtacctcagccagggt

SEQ ID NO: 1041232 - DNA, 25 bp, Homo sapien
tccgggtcttgtcaacagcagaagg

SEQ ID NO: 1041233 - DNA, 25 bp, Homo sapien
tccggaagtcctcgcagcacatgtt

SEQ ID NO: 1041234 - DNA, 25 bp, Homo sapien
tttcttatcaccaacaaatggccca

SEQ ID NO: 1041235 - DNA, 25 bp, Homo sapien
cattattcttaacctgagatctttt

SEQ ID NO: 1041236 - DNA, 25 bp, Homo sapien
ttcttatcaccaacaaatggcccaa

SEQ ID NO: 1041237 - DNA, 25 bp, Homo sapien
gtatacattattcttaacctgagat

SEQ ID NO: 1041238 - DNA, 25 bp, Homo sapien
tttccagtgggaataaattttgctc

SEQ ID NO: 1041239 - DNA, 25 bp, Homo sapien
acatatcgcagccagtttcccttct

SEQ ID NO: 1041240 - DNA, 25 bp, Homo sapien
ctggatcagtggcatcaatgcacat

SEQ ID NO: 1041241 - DNA, 25 bp, Homo sapien
gagcaagcccaattcacatatcgca

SEQ ID NO: 1041242 - DNA, 25 bp, Homo sapien
gcctcaactcgccagtgggtgaaca

SEQ ID NO: 1041243 - DNA, 25 bp, Homo sapien
cagtgggtgaacagcacttaagcct

SEQ ID NO: 1041244 - DNA, 25 bp, Homo sapien
taggtcagatctcggcctcaactcg

SEQ ID NO: 1041245 - DNA, 25 bp, Homo sapien
taaaaaatcataggtcagatctcgg

SEQ ID NO: 1041246 - DNA, 25 bp, Homo sapien
cggaccggacatcaaacttccacat

SEQ ID NO: 1041247 - DNA, 25 bp, Homo sapien
cttcggaccggacatcaaacttcca

SEQ ID NO: 1041248 - DNA, 25 bp, Homo sapien
ctctggtccagggaggtccgtgcct

SEQ ID NO: 1041249 - DNA, 25 bp, Homo sapien
ggaggtccgtgcctcgcccttcgga

SEQ ID NO: 1041250 - DNA, 25 bp, Homo sapien
tccccattgtaccagaccaggagct

SEQ ID NO: 1041251 - DNA, 25 bp, Homo sapien
gggagctccgcttgctccgggcgct

SEQ ID NO: 1041252 - DNA, 25 bp, Homo sapien
tcaatcgcagctgctatctcagggt

SEQ ID NO: 1041253 - DNA, 25 bp, Homo sapien
aggagctcctcgcccggcgcgattg

SEQ ID NO: 1041254 - DNA, 25 bp, Homo sapien
tgcggagcgcggcttggggtgccag

SEQ ID NO: 1041255 - DNA, 25 bp, Homo sapien
tcaagctagccgcgagaaagctcgg

SEQ ID NO: 1041256 - DNA, 25 bp, Homo sapien
aagctagccgcgagaaagctcgggc

SEQ ID NO: 1041257 - DNA, 25 bp, Homo sapien
tagccgcgagaaagctcgggcgccc

SEQ ID NO: 1041258 - DNA, 25 bp, Homo sapien
taaacgccagccatgttctaaggag

SEQ ID NO: 1041259 - DNA, 25 bp, Homo sapien
taagcccatttgtagaaagccactg

SEQ ID NO: 1041260 - DNA, 25 bp, Homo sapien
caagtagcagggaagtaaacgccag

SEQ ID NO: 1041261 - DNA, 25 bp, Homo sapien
tcagtagttcctccgcaagtagcag

SEQ ID NO: 1041262 - DNA, 25 bp, Homo sapien
taaacaattctgatcgtagagacag

SEQ ID NO: 1041263 - DNA, 25 bp, Homo sapien
acagcgaggtcaataggttagaacc

SEQ ID NO: 1041264 - DNA, 25 bp, Homo sapien
gagtgtcgtcacagtaccaaggttt

SEQ ID NO: 1041265 - DNA, 25 bp, Homo sapien
gatattctcaggcactactgacggt

SEQ ID NO: 1041266 - DNA, 25 bp, Homo sapien
taatgctagaaacgagtgtaactgc

SEQ ID NO: 1041267 - DNA, 25 bp, Homo sapien
tcaacagaagtgagcaattcatggc

SEQ ID NO: 1041268 - DNA, 25 bp, Homo sapien
gaggattagctatggtatacacaga

SEQ ID NO: 1041269 - DNA, 25 bp, Homo sapien
ggatatggatctcaacttcgcagga

SEQ ID NO: 1041270 - DNA, 25 bp, Homo sapien
gaaactgcattgttgcccattctaa

SEQ ID NO: 1041271 - DNA, 25 bp, Homo sapien
gaaatctacaaaagactgccccaag

SEQ ID NO: 1041272 - DNA, 25 bp, Homo sapien
acattgcacataattccgtcttggg

SEQ ID NO: 1041273 - DNA, 25 bp, Homo sapien
ggtaacagacagctaattcactaag

SEQ ID NO: 1041274 - DNA, 25 bp, Homo sapien
gaatgtattttgctggtgcccacca

SEQ ID NO: 1041275 - DNA, 25 bp, Homo sapien
acactcaaggtatagctgggtcagc

SEQ ID NO: 1041276 - DNA, 25 bp, Homo sapien
gagagtaacccatccgaagtcacaa

SEQ ID NO: 1041277 - DNA, 25 bp, Homo sapien
gagaacggcagttaccacagaatgt

SEQ ID NO: 1041278 - DNA, 25 bp, Homo sapien
tcataaagaagacgccaacaaaagt

SEQ ID NO: 1041279 - DNA, 25 bp, Homo sapien
tactttgtacttggcctagatggca

SEQ ID NO: 1041280 - DNA, 25 bp, Homo sapien
cagtaacatcaaacccacaatggac

SEQ ID NO: 1041281 - DNA, 25 bp, Homo sapien
tactgcctacccataaaactcagga

SEQ ID NO: 1041282 - DNA, 25 bp, Homo sapien
gtcaaaggtgtctttcgtgacagca

SEQ ID NO: 1041283 - DNA, 25 bp, Homo sapien
cagctgtggcactagtatcactcag

SEQ ID NO: 1041284 - DNA, 25 bp, Homo sapien
cagcaggccagctgtggcactagta

SEQ ID NO: 1041285 - DNA, 25 bp, Homo sapien
ggatacatctggtttggagtaaagt

SEQ ID NO: 1041286 - DNA, 25 bp, Homo sapien
cgtcccagccttaagacactactat

SEQ ID NO: 1041287 - DNA, 25 bp, Homo sapien
tcaggctttatttgccccaagtttc

SEQ ID NO: 1041288 - DNA, 25 bp, Homo sapien
tacaaaacccaacagttcttcaggc

SEQ ID NO: 1041289 - DNA, 25 bp, Homo sapien
attcttagaattcctcgtcccagcc

SEQ ID NO: 1041290 - DNA, 25 bp, Homo sapien
taggtccatccgatcttcacttggg

SEQ ID NO: 1041291 - DNA, 25 bp, Homo sapien
tctgtgcacagaagttaggtccatc

SEQ ID NO: 1041292 - DNA, 25 bp, Homo sapien
cagttggttccaaagcagacaagac

SEQ ID NO: 1041293 - DNA, 25 bp, Homo sapien
tatatgtaactctagatgtgctgcc

SEQ ID NO: 1041294 - DNA, 25 bp, Homo sapien
gggtcctacagggcgctactgccag

SEQ ID NO: 1041295 - DNA, 25 bp, Homo sapien
tgggggtcctacagggcgctactgc

SEQ ID NO: 1041296 - DNA, 25 bp, Homo sapien
ggggtcctacagggcgctactgcca

SEQ ID NO: 1041297 - DNA, 25 bp, Homo sapien
ctgggggtcctacagggcgctactg

SEQ ID NO: 1041298 - DNA, 25 bp, Homo sapien
ttcagatccagacagatccccattc

SEQ ID NO: 1041299 - DNA, 25 bp, Homo sapien
taaagctgctatatacacgtaaagt

SEQ ID NO: 1041300 - DNA, 25 bp, Homo sapien
gaactacaagcctctgacacctttt

SEQ ID NO: 1041301 - DNA, 25 bp, Homo sapien
tcactaccgggaagcataattagct

SEQ ID NO: 1041302 - DNA, 25 bp, Homo sapien
gggcccttttagctaagacatgatt

SEQ ID NO: 1041303 - DNA, 25 bp, Homo sapien
tattcctgggcaattaccactttgg

SEQ ID NO: 1041304 - DNA, 25 bp, Homo sapien
caatggctcaaataccaaatgcaga

SEQ ID NO: 1041305 - DNA, 25 bp, Homo sapien
tttcaatgccacacagctaataggg

SEQ ID NO: 1041306 - DNA, 25 bp, Homo sapien
atttgcagaggtgaaatctggctca

SEQ ID NO: 1041307 - DNA, 25 bp, Homo sapien
cttcagttgtatgtcttggattttg

SEQ ID NO: 1041308 - DNA, 25 bp, Homo sapien
gaaatctggctcacttgtcttcagt

SEQ ID NO: 1041309 - DNA, 25 bp, Homo sapien
acttgtcttcagttgtatgtcttgg

SEQ ID NO: 1041310 - DNA, 25 bp, Homo sapien
ataatagaaaacagcgagcacccca

SEQ ID NO: 1041311 - DNA, 25 bp, Homo sapien
gctgtttaacctcgtaaagatccta

SEQ ID NO: 1041312 - DNA, 25 bp, Homo sapien
gaaggctcagcttaccacattaaat

SEQ ID NO: 1041313 - DNA, 25 bp, Homo sapien
tacccatgtgaccattccacagatg

SEQ ID NO: 1041314 - DNA, 25 bp, Homo sapien
accgcgccaggccagcaagtgtcat

SEQ ID NO: 1041315 - DNA, 25 bp, Homo sapien
catgggacctgatgttgtgtcagga

SEQ ID NO: 1041316 - DNA, 25 bp, Homo sapien
cgccaggccagcaagtgtcattttt

SEQ ID NO: 1041317 - DNA, 25 bp, Homo sapien
tttttcatgggacctgatgttgtgt

SEQ ID NO: 1041318 - DNA, 25 bp, Homo sapien
cagcggaagcctacgacaccacttt

SEQ ID NO: 1041319 - DNA, 25 bp, Homo sapien
gaagcctacgacaccactttgacca

SEQ ID NO: 1041320 - DNA, 25 bp, Homo sapien
ggaagcctacgacaccactttgacc

SEQ ID NO: 1041321 - DNA, 25 bp, Homo sapien
tcagcggaagcctacgacaccactt

SEQ ID NO: 1041322 - DNA, 25 bp, Homo sapien
ggggcaggggttgctagttctggag

SEQ ID NO: 1041323 - DNA, 25 bp, Homo sapien
gccgcttctaatcgctcgtctggtt

SEQ ID NO: 1041324 - DNA, 25 bp, Homo sapien
aagctgccgcttctaatcgctcgtc

SEQ ID NO: 1041325 - DNA, 25 bp, Homo sapien
gcttctaatcgctcgtctggttctg

SEQ ID NO: 1041326 - DNA, 25 bp, Homo sapien
tccccctcgtcttccaactcatcat

SEQ ID NO: 1041327 - DNA, 25 bp, Homo sapien
ttcttccccctcgtcttccaactca

SEQ ID NO: 1041328 - DNA, 25 bp, Homo sapien
tcttcccccaaatcattcacctcac

SEQ ID NO: 1041329 - DNA, 25 bp, Homo sapien
ctcttcccccaaatcattcacctca

SEQ ID NO: 1041330 - DNA, 25 bp, Homo sapien
gtacatacacgttctgggtggcctg

SEQ ID NO: 1041331 - DNA, 25 bp, Homo sapien
gccgccggttaatctgtgtgccaaa

SEQ ID NO: 1041332 - DNA, 25 bp, Homo sapien
gatatgcatgtgacgctcaagcccc

SEQ ID NO: 1041333 - DNA, 25 bp, Homo sapien
cccaagactgggaggactcgaatca

SEQ ID NO: 1041334 - DNA, 25 bp, Homo sapien
tgttgttgatatgctaagaggaaga

SEQ ID NO: 1041335 - DNA, 25 bp, Homo sapien
cacaaacaggacctaatttagctat

SEQ ID NO: 1041336 - DNA, 25 bp, Homo sapien
caacattgatgcaggagcagacaca

SEQ ID NO: 1041337 - DNA, 25 bp, Homo sapien
tccctgcaggagttagtttatcttg

SEQ ID NO: 1041338 - DNA, 25 bp, Homo sapien
ttctttacagcactacacgtaggct

SEQ ID NO: 1041339 - DNA, 25 bp, Homo sapien
cacgtaggctgcactgaatgacttt

SEQ ID NO: 1041340 - DNA, 25 bp, Homo sapien
ctttccaaagtctcgaagggcagga

SEQ ID NO: 1041341 - DNA, 25 bp, Homo sapien
tctagggatttacaaggacttgggc

SEQ ID NO: 1041342 - DNA, 25 bp, Homo sapien
caggtgatgaaggacaaacatcagg

SEQ ID NO: 1041343 - DNA, 25 bp, Homo sapien
gatgaaggacaaacatcaggtgtgg

SEQ ID NO: 1041344 - DNA, 25 bp, Homo sapien
aggacaaacatcaggtgtggactca

SEQ ID NO: 1041345 - DNA, 25 bp, Homo sapien
tggactcaacagtaggggcagggaa

SEQ ID NO: 1041346 - DNA, 25 bp, Homo sapien
caacagatgatattgcggagagagg

SEQ ID NO: 1041347 - DNA, 25 bp, Homo sapien
ggaaacaacagatgatattgcggag

SEQ ID NO: 1041348 - DNA, 25 bp, Homo sapien
gggcggagtggcaacagttaatacc

SEQ ID NO: 1041349 - DNA, 25 bp, Homo sapien
gaagcctccagattatcaccagagg

SEQ ID NO: 1041350 - DNA, 25 bp, Homo sapien
ctcttccctgggtttcagaccttca

SEQ ID NO: 1041351 - DNA, 25 bp, Homo sapien
aagaaaaggtgattcacagacgttg

SEQ ID NO: 1041352 - DNA, 25 bp, Homo sapien
tccctgggtttcagaccttcattct

SEQ ID NO: 1041353 - DNA, 25 bp, Homo sapien
ggtgattcacagacgttgcaaacaa

SEQ ID NO: 1041354 - DNA, 25 bp, Homo sapien
gattgaggcccaatcgaacatctgg

SEQ ID NO: 1041355 - DNA, 25 bp, Homo sapien
tcaaactcgtgatgtgtgcacacct

SEQ ID NO: 1041356 - DNA, 25 bp, Homo sapien
ccttatctgggtggagatctcgctg

SEQ ID NO: 1041357 - DNA, 25 bp, Homo sapien
gcaactccggcatattgtcgacacc

SEQ ID NO: 1041358 - DNA, 25 bp, Homo sapien
tttcaccgaagctgcaaacttgacg

SEQ ID NO: 1041359 - DNA, 25 bp, Homo sapien
aacttgacgttctgcttggacctga

SEQ ID NO: 1041360 - DNA, 25 bp, Homo sapien
tacttgcaggtgatgagtgtccacc

SEQ ID NO: 1041361 - DNA, 25 bp, Homo sapien
ggtcttgcccaacggagtctgcatg

SEQ ID NO: 1041362 - DNA, 25 bp, Homo sapien
cccgtaggcaaggatactgtcgcct

SEQ ID NO: 1041363 - DNA, 25 bp, Homo sapien
taggcaaggatactgtcgccttccc

SEQ ID NO: 1041364 - DNA, 25 bp, Homo sapien
gcaatgacccttcatgcctttaact

SEQ ID NO: 1041365 - DNA, 25 bp, Homo sapien
taacttatacaacagctatttcctt

SEQ ID NO: 1041366 - DNA, 25 bp, Homo sapien
tatcacacaggcctgaaagagctgc

SEQ ID NO: 1041367 - DNA, 25 bp, Homo sapien
gctacctatgtatgtgccgcggcca

SEQ ID NO: 1041368 - DNA, 25 bp, Homo sapien
ttctaaagcatcaaccgcctgggag

SEQ ID NO: 1041369 - DNA, 25 bp, Homo sapien
gatcatgtcctgttggtgtggcacc

SEQ ID NO: 1041370 - DNA, 25 bp, Homo sapien
catatggctgattgcaagcatgtac

SEQ ID NO: 1041371 - DNA, 25 bp, Homo sapien
gcttgtgttccaggaaatgaccctc

SEQ ID NO: 1041372 - DNA, 25 bp, Homo sapien
cccaacagggtaagtaaagcaagct

SEQ ID NO: 1041373 - DNA, 25 bp, Homo sapien
aatgaccctcagtgttaagtagaaa

SEQ ID NO: 1041374 - DNA, 25 bp, Homo sapien
gaatgactgtggcatgcctgctttc

SEQ ID NO: 1041375 - DNA, 25 bp, Homo sapien
tgaatgactgtggcatgcctgcttt

SEQ ID NO: 1041376 - DNA, 25 bp, Homo sapien
tttcttgactgcgatgggaactcgg

SEQ ID NO: 1041377 - DNA, 25 bp, Homo sapien
taggaacgagcgtcctacccagaag

SEQ ID NO: 1041378 - DNA, 25 bp, Homo sapien
taagacgacaacacatacatgactg

SEQ ID NO: 1041379 - DNA, 25 bp, Homo sapien
tctgctttactggagcccatggaaa

SEQ ID NO: 1041380 - DNA, 25 bp, Homo sapien
tgaggtaccagtcccatgacgagga

SEQ ID NO: 1041381 - DNA, 25 bp, Homo sapien
tctttggatctcaatcacccgggcg

SEQ ID NO: 1041382 - DNA, 25 bp, Homo sapien
agatgcctgactctaagcctgccgg

SEQ ID NO: 1041383 - DNA, 25 bp, Homo sapien
tctgctacgtgccaaaaacaagggc

SEQ ID NO: 1041384 - DNA, 25 bp, Homo sapien
actaacagcaaagttcaatacagga

SEQ ID NO: 1041385 - DNA, 25 bp, Homo sapien
cagcaaagttcaatacaggagcact

SEQ ID NO: 1041386 - DNA, 25 bp, Homo sapien
gaatagtcttttatagcactctcca

SEQ ID NO: 1041387 - DNA, 25 bp, Homo sapien
agcactctccgggttaacaacgcca

SEQ ID NO: 1041388 - DNA, 25 bp, Homo sapien
tgtctatctataattaacctctctc

SEQ ID NO: 1041389 - DNA, 25 bp, Homo sapien
tctctctcagtgctacattggttaa

SEQ ID NO: 1041390 - DNA, 25 bp, Homo sapien
ttaatacatctgacaagccccaatg

SEQ ID NO: 1041391 - DNA, 25 bp, Homo sapien
gcagcaatagcacaacaaatctttt

SEQ ID NO: 1041392 - DNA, 25 bp, Homo sapien
cactgaggctgcctgaagcggcagc

SEQ ID NO: 1041393 - DNA, 25 bp, Homo sapien
aggctgacggggaacgataaaccat

SEQ ID NO: 1041394 - DNA, 25 bp, Homo sapien
aggccctcgaacatacgctcaacag

SEQ ID NO: 1041395 - DNA, 25 bp, Homo sapien
cctgtaaaggctgacggggaacgat

SEQ ID NO: 1041396 - DNA, 25 bp, Homo sapien
cttttatggagaaggtactgcgtcc

SEQ ID NO: 1041397 - DNA, 25 bp, Homo sapien
tggaaaagcttttatggagaaggta

SEQ ID NO: 1041398 - DNA, 25 bp, Homo sapien
gttccacttgttcactaatgcttgg

SEQ ID NO: 1041399 - DNA, 25 bp, Homo sapien
aagcttttatggagaaggtactgcg

SEQ ID NO: 1041400 - DNA, 25 bp, Homo sapien
acgttgccgttgatgaaccacatgg

SEQ ID NO: 1041401 - DNA, 25 bp, Homo sapien
aacagtcacgttgccgttgatgaac

SEQ ID NO: 1041402 - DNA, 25 bp, Homo sapien
agtcacgttgccgttgatgaaccac

SEQ ID NO: 1041403 - DNA, 25 bp, Homo sapien
ttaaacagtcacgttgccgttgatg

SEQ ID NO: 1041404 - DNA, 25 bp, Homo sapien
gacatgggaaggcacatttaggcac

SEQ ID NO: 1041405 - DNA, 25 bp, Homo sapien
tctgtggttgctgaaatgacactcc

SEQ ID NO: 1041406 - DNA, 25 bp, Homo sapien
taggcaccagtcttccgtaaaatgt

SEQ ID NO: 1041407 - DNA, 25 bp, Homo sapien
tattacccgcaacaggtcgacaagt

SEQ ID NO: 1041408 - DNA, 25 bp, Homo sapien
tcagccattggatcctcactgggaa

SEQ ID NO: 1041409 - DNA, 25 bp, Homo sapien
taagacctggcaatttccttagcgg

SEQ ID NO: 1041410 - DNA, 25 bp, Homo sapien
aaagtgagtcgtttctgcaacagcc

SEQ ID NO: 1041411 - DNA, 25 bp, Homo sapien
gacttgagcacctgacgcggattaa

SEQ ID NO: 1041412 - DNA, 25 bp, Homo sapien
catgccggacttagtgacgaagtaa

SEQ ID NO: 1041413 - DNA, 25 bp, Homo sapien
taggcaatggtgaacatgccggact

SEQ ID NO: 1041414 - DNA, 25 bp, Homo sapien
gtgaacatgccggacttagtgacga

SEQ ID NO: 1041415 - DNA, 25 bp, Homo sapien
acttagtgacgaagtaagtggcgga

SEQ ID NO: 1041416 - DNA, 25 bp, Homo sapien
ggaggcttttgacccatctggtttg

SEQ ID NO: 1041417 - DNA, 25 bp, Homo sapien
ctactggaacactaggtacgtggag

SEQ ID NO: 1041418 - DNA, 25 bp, Homo sapien
tacgtggaggcttttgacccatctg

SEQ ID NO: 1041419 - DNA, 25 bp, Homo sapien
cactaggtacgtggaggcttttgac

SEQ ID NO: 1041420 - DNA, 25 bp, Homo sapien
gaagtcagtgtctgatattctgcac

SEQ ID NO: 1041421 - DNA, 25 bp, Homo sapien
gaaagctggttaggccacatcgctg

SEQ ID NO: 1041422 - DNA, 25 bp, Homo sapien
ttctcagagtgcaattcatttgaag

SEQ ID NO: 1041423 - DNA, 25 bp, Homo sapien
cagccatacagaaagctggttaggc

SEQ ID NO: 1041424 - DNA, 25 bp, Homo sapien
ccataaaatcccggcaaaatgaatg

SEQ ID NO: 1041425 - DNA, 25 bp, Homo sapien
cctccataaaatcccggcaaaatga

SEQ ID NO: 1041426 - DNA, 25 bp, Homo sapien
ataaaatcccggcaaaatgaatgag

SEQ ID NO: 1041427 - DNA, 25 bp, Homo sapien
aaaatcccggcaaaatgaatgagat

SEQ ID NO: 1041428 - DNA, 25 bp, Homo sapien
tccaggtgtttgcagagccagctct

SEQ ID NO: 1041429 - DNA, 25 bp, Homo sapien
ctccaggtgtttgcagagccagctc

SEQ ID NO: 1041430 - DNA, 25 bp, Homo sapien
ctgctccaggtgtttgcagagccag

SEQ ID NO: 1041431 - DNA, 25 bp, Homo sapien
caggtgtttgcagagccagctctgc

SEQ ID NO: 1041432 - DNA, 25 bp, Homo sapien
cagctggagctttgaccttcctata

SEQ ID NO: 1041433 - DNA, 25 bp, Homo sapien
actctttgaagaatggtccctggaa

SEQ ID NO: 1041434 - DNA, 25 bp, Homo sapien
atcgggacgccaagcggaggctgta

SEQ ID NO: 1041435 - DNA, 25 bp, Homo sapien
cctatactgcctggtgatgtacggg

SEQ ID NO: 1041436 - DNA, 25 bp, Homo sapien
cacagttttgcaaggaggcacggcc

SEQ ID NO: 1041437 - DNA, 25 bp, Homo sapien
taaatctggagctatgttaaacagt

SEQ ID NO: 1041438 - DNA, 25 bp, Homo sapien
tccgtgtcagtttccgtctctgtaa

SEQ ID NO: 1041439 - DNA, 25 bp, Homo sapien
aattagaagtcgaagatccgtcccg

SEQ ID NO: 1041440 - DNA, 25 bp, Homo sapien
tctgtgttcattctcgctgcattca

SEQ ID NO: 1041441 - DNA, 25 bp, Homo sapien
cttgaatccggaatgggcaagagca

SEQ ID NO: 1041442 - DNA, 25 bp, Homo sapien
gagacgggtgacgaagccttgaatc

SEQ ID NO: 1041443 - DNA, 25 bp, Homo sapien
tgcattcaaactgtccgggagacgg

SEQ ID NO: 1041444 - DNA, 25 bp, Homo sapien
tgttcacaacaaccctcatggcagg

SEQ ID NO: 1041445 - DNA, 25 bp, Homo sapien
tgaatacacctgcagagctggcacc

SEQ ID NO: 1041446 - DNA, 25 bp, Homo sapien
tccaccgagtgtttgtgagagccac

SEQ ID NO: 1041447 - DNA, 25 bp, Homo sapien
tattatagaaagacaccacctcggc

SEQ ID NO: 1041448 - DNA, 25 bp, Homo sapien
tgttgattcccagagatgttgccgg

SEQ ID NO: 1041449 - DNA, 25 bp, Homo sapien
gatcgggaccctcgtttgaagacca

SEQ ID NO: 1041450 - DNA, 25 bp, Homo sapien
cacacaactgggataggtcggtact

SEQ ID NO: 1041451 - DNA, 25 bp, Homo sapien
tcccaaaggacagcgtggagtcggc

SEQ ID NO: 1041452 - DNA, 25 bp, Homo sapien
actgagaggccggggtatgcttcat

SEQ ID NO: 1041453 - DNA, 25 bp, Homo sapien
gtggggaggccctcaagaactgaga

SEQ ID NO: 1041454 - DNA, 25 bp, Homo sapien
aactgagaggccggggtatgcttca

SEQ ID NO: 1041455 - DNA, 25 bp, Homo sapien
ctgcaggtgacttgccaggtttggg

SEQ ID NO: 1041456 - DNA, 25 bp, Homo sapien
cttgccaggtttggggttcgtgagc

SEQ ID NO: 1041457 - DNA, 25 bp, Homo sapien
tttggggttcgtgagctttccttgc

SEQ ID NO: 1041458 - DNA, 25 bp, Homo sapien
gggctgcaggtgacttgccaggttt

SEQ ID NO: 1041459 - DNA, 25 bp, Homo sapien
cacaatcgctcttcacacttttatt

SEQ ID NO: 1041460 - DNA, 25 bp, Homo sapien
tcctgaccgtctgggagcgttgaag

SEQ ID NO: 1041461 - DNA, 25 bp, Homo sapien
tacagagctgtcgtcttgaagacca

SEQ ID NO: 1041462 - DNA, 25 bp, Homo sapien
tgcaaaaaaggagtgaccccaaggc

SEQ ID NO: 1041463 - DNA, 25 bp, Homo sapien
gaagacaggtgatcaggttcagcag

SEQ ID NO: 1041464 - DNA, 25 bp, Homo sapien
gacaggtgatcaggttcagcaggct

SEQ ID NO: 1041465 - DNA, 25 bp, Homo sapien
agacaggtgatcaggttcagcaggc

SEQ ID NO: 1041466 - DNA, 25 bp, Homo sapien
ctgaagacaggtgatcaggttcagc

SEQ ID NO: 1041467 - DNA, 25 bp, Homo sapien
tgccacagaggtctatgggggctcc

SEQ ID NO: 1041468 - DNA, 25 bp, Homo sapien
tttcctgatccctgtctcagtaccg

SEQ ID NO: 1041469 - DNA, 25 bp, Homo sapien
tgatccctgtctcagtaccgctgtc

SEQ ID NO: 1041470 - DNA, 25 bp, Homo sapien
actgtccacattctgcgtgctgctg

SEQ ID NO: 1041471 - DNA, 25 bp, Homo sapien
gaccccacttgacatttggcgacct

SEQ ID NO: 1041472 - DNA, 25 bp, Homo sapien
tcaggaccccacttgacatttggcg

SEQ ID NO: 1041473 - DNA, 25 bp, Homo sapien
ttgacatttggcgacctccgcatcc

SEQ ID NO: 1041474 - DNA, 25 bp, Homo sapien
ggcgacctccgcatccaaggcatga

SEQ ID NO: 1041475 - DNA, 25 bp, Homo sapien
caagatttaggtttgaccttcagga

SEQ ID NO: 1041476 - DNA, 25 bp, Homo sapien
gtgccacaagatttaggtttgacct

SEQ ID NO: 1041477 - DNA, 25 bp, Homo sapien
ttaggtttgaccttcaggagcagca

SEQ ID NO: 1041478 - DNA, 25 bp, Homo sapien
gatttaggtttgaccttcaggagca

SEQ ID NO: 1041479 - DNA, 25 bp, Homo sapien
gccatcactgtcaaatatccctgaa

SEQ ID NO: 1041480 - DNA, 25 bp, Homo sapien
tgtcaaatatccctgaacctctacc

SEQ ID NO: 1041481 - DNA, 25 bp, Homo sapien
ctgccatcactgtcaaatatccctg

SEQ ID NO: 1041482 - DNA, 25 bp, Homo sapien
tcactgtcaaatatccctgaacctc

SEQ ID NO: 1041483 - DNA, 25 bp, Homo sapien
ttcgtggccagtcctcgataaactg

SEQ ID NO: 1041484 - DNA, 25 bp, Homo sapien
gaaagtagaaaatgctcttcgtggc

SEQ ID NO: 1041485 - DNA, 25 bp, Homo sapien
aagtgctggtgactttgctcactgc

SEQ ID NO: 1041486 - DNA, 25 bp, Homo sapien
ttcaatgcgaactgccagctccagg

SEQ ID NO: 1041487 - DNA, 25 bp, Homo sapien
acatatgtgcaagttacccatttaa

SEQ ID NO: 1041488 - DNA, 25 bp, Homo sapien
cacatatgtgcaagttacccattta

SEQ ID NO: 1041489 - DNA, 25 bp, Homo sapien
gtaaattcagagttatgtggctaac

SEQ ID NO: 1041490 - DNA, 25 bp, Homo sapien
tttagtaaattcagagttatgtggc

SEQ ID NO: 1041491 - DNA, 25 bp, Homo sapien
catgccaggattccagaaggaggtt

SEQ ID NO: 1041492 - DNA, 25 bp, Homo sapien
tcctcctggatttgtccctgagagc

SEQ ID NO: 1041493 - DNA, 25 bp, Homo sapien
gtctcataggcacactaggagccaa

SEQ ID NO: 1041494 - DNA, 25 bp, Homo sapien
taggatagtgcccaccctgagaaga

SEQ ID NO: 1041495 - DNA, 25 bp, Homo sapien
gaccaaagacgtgggagaaggtgac

SEQ ID NO: 1041496 - DNA, 25 bp, Homo sapien
gcctgtggcagaattggatgtcgcc

SEQ ID NO: 1041497 - DNA, 25 bp, Homo sapien
tggatgtcgccagcgtggattccat

SEQ ID NO: 1041498 - DNA, 25 bp, Homo sapien
gttggcactgctgaccaaagacgtg

SEQ ID NO: 1041499 - DNA, 25 bp, Homo sapien
tcacaggactattaagtgagatgaa

SEQ ID NO: 1041500 - DNA, 25 bp, Homo sapien
caggactattaagtgagatgaagga

SEQ ID NO: 1041501 - DNA, 25 bp, Homo sapien
aggactattaagtgagatgaaggac

SEQ ID NO: 1041502 - DNA, 25 bp, Homo sapien
cacaggactattaagtgagatgaag

SEQ ID NO: 1041503 - DNA, 25 bp, Homo sapien
gtcaccagataggagatgttccaac

SEQ ID NO: 1041504 - DNA, 25 bp, Homo sapien
tcctccttcatctggaatggtcacc

SEQ ID NO: 1041505 - DNA, 25 bp, Homo sapien
tccttcatctggaatggtcaccaga

SEQ ID NO: 1041506 - DNA, 25 bp, Homo sapien
tctggaatggtcaccagataggaga

SEQ ID NO: 1041507 - DNA, 25 bp, Homo sapien
tctctctctctagtgctaaaaagcg

SEQ ID NO: 1041508 - DNA, 25 bp, Homo sapien
aatagcaaggtctttggcctcatga

SEQ ID NO: 1041509 - DNA, 25 bp, Homo sapien
aaaaagcgaatagcaaggtctttgg

SEQ ID NO: 1041510 - DNA, 25 bp, Homo sapien
ctctctctagtgctaaaaagcgaat

SEQ ID NO: 1041511 - DNA, 25 bp, Homo sapien
ggacacgttgtcctcatgccagctg

SEQ ID NO: 1041512 - DNA, 25 bp, Homo sapien
gagtcatgctttctcagggtgcctt

SEQ ID NO: 1041513 - DNA, 25 bp, Homo sapien
ttccaaaagagccagatttctgagc

SEQ ID NO: 1041514 - DNA, 25 bp, Homo sapien
ctctaagcacagcaagcacaagcag

SEQ ID NO: 1041515 - DNA, 25 bp, Homo sapien
acccccagccatggtaattatattt

SEQ ID NO: 1041516 - DNA, 25 bp, Homo sapien
cacccccagccatggtaattatatt

SEQ ID NO: 1041517 - DNA, 25 bp, Homo sapien
aattgattgtgtatattatcagtaa

SEQ ID NO: 1041518 - DNA, 25 bp, Homo sapien
aaatatgtgctaattgattgtgtat

SEQ ID NO: 1041519 - DNA, 25 bp, Homo sapien
gaaaaaacatgaatggacatttttc

SEQ ID NO: 1041520 - DNA, 25 bp, Homo sapien
tatacaagtggccaaaaaacataca

SEQ ID NO: 1041521 - DNA, 25 bp, Homo sapien
agtggggaaaaaacatgaatggaca

SEQ ID NO: 1041522 - DNA, 25 bp, Homo sapien
atatacaagtggccaaaaaacatac

SEQ ID NO: 1041523 - DNA, 25 bp, Homo sapien
taaacagacaacctatgcaatggga

SEQ ID NO: 1041524 - DNA, 25 bp, Homo sapien
aactcaaacaactcatcaaggaaaa

SEQ ID NO: 1041525 - DNA, 25 bp, Homo sapien
cagacaacctatgcaatgggagaaa

SEQ ID NO: 1041526 - DNA, 25 bp, Homo sapien
tcaaggaaaacaacaaataacacca

SEQ ID NO: 1041527 - DNA, 25 bp, Homo sapien
actcaacttctatttttccttcctg

SEQ ID NO: 1041528 - DNA, 25 bp, Homo sapien
ttttccttcctgtgaatcagcaata

SEQ ID NO: 1041529 - DNA, 25 bp, Homo sapien
ttctatttttccttcctgtgaatca

SEQ ID NO: 1041530 - DNA, 25 bp, Homo sapien
tatttttccttcctgtgaatcagca

SEQ ID NO: 1041531 - DNA, 25 bp, Homo sapien
caatgtgatgtcttgtgccatatga

SEQ ID NO: 1041532 - DNA, 25 bp, Homo sapien
gcacaaaggttctcaacagatgcca

SEQ ID NO: 1041533 - DNA, 25 bp, Homo sapien
tacaaaagtccctcctgcagaacag

SEQ ID NO: 1041534 - DNA, 25 bp, Homo sapien
tatgatgacacaataagcaggccct

SEQ ID NO: 1041535 - DNA, 25 bp, Homo sapien
ctgtgtaaggcacggagggttggga

SEQ ID NO: 1041536 - DNA, 25 bp, Homo sapien
gtaaggcacggagggttgggaatga

SEQ ID NO: 1041537 - DNA, 25 bp, Homo sapien
ggaatgaggtacactgcgtctgtat

SEQ ID NO: 1041538 - DNA, 25 bp, Homo sapien
gggaatgaggtacactgcgtctgta

SEQ ID NO: 1041539 - DNA, 25 bp, Homo sapien
ggaactgcaagttatctggttggta

SEQ ID NO: 1041540 - DNA, 25 bp, Homo sapien
caggaagacgataaagacggagaca

SEQ ID NO: 1041541 - DNA, 25 bp, Homo sapien
tagaagttagctgggggaactgcaa

SEQ ID NO: 1041542 - DNA, 25 bp, Homo sapien
tagtagagagtgaggactatgatgg

SEQ ID NO: 1041543 - DNA, 25 bp, Homo sapien
gctgatgaagcaacctctttctggg

SEQ ID NO: 1041544 - DNA, 25 bp, Homo sapien
ggaaatcacatggtcaagcctgaca

SEQ ID NO: 1041545 - DNA, 25 bp, Homo sapien
ccccaatgagaaggcagcatcagta

SEQ ID NO: 1041546 - DNA, 25 bp, Homo sapien
taatatgttcagaagcagccctcgg

SEQ ID NO: 1041547 - DNA, 25 bp, Homo sapien
tttaactggagaacagaattggtgc

SEQ ID NO: 1041548 - DNA, 25 bp, Homo sapien
agccagttggtatgcttttgtgcct

SEQ ID NO: 1041549 - DNA, 25 bp, Homo sapien
tcaacttttgatgaatgtgaacaat

SEQ ID NO: 1041550 - DNA, 25 bp, Homo sapien
tctacttttctggtcccattggctc

SEQ ID NO: 1041551 - DNA, 25 bp, Homo sapien
tgctgcattcccatccaccagaatt

SEQ ID NO: 1041552 - DNA, 25 bp, Homo sapien
tattctcctactctgagtcagcatg

SEQ ID NO: 1041553 - DNA, 25 bp, Homo sapien
catctccagccttggaaggatctta

SEQ ID NO: 1041554 - DNA, 25 bp, Homo sapien
catgagtctctctagagccccaatc

SEQ ID NO: 1041555 - DNA, 25 bp, Homo sapien
tccaagatgtactttttctgttaga

SEQ ID NO: 1041556 - DNA, 25 bp, Homo sapien
ccaagatgtactttttctgttagac

SEQ ID NO: 1041557 - DNA, 25 bp, Homo sapien
atgtgttcttggcaatatctgctgg

SEQ ID NO: 1041558 - DNA, 25 bp, Homo sapien
gagtctatctcctacaatacttgag

SEQ ID NO: 1041559 - DNA, 25 bp, Homo sapien
ttccccagggaacataaagagtcta

SEQ ID NO: 1041560 - DNA, 25 bp, Homo sapien
tgaccatcaggacactttgcttggg

SEQ ID NO: 1041561 - DNA, 25 bp, Homo sapien
tgttggaacaaattggcttccccag

SEQ ID NO: 1041562 - DNA, 25 bp, Homo sapien
aagcaggttcttgataggatgtcaa

SEQ ID NO: 1041563 - DNA, 25 bp, Homo sapien
gcaggttcttgataggatgtcaaga

SEQ ID NO: 1041564 - DNA, 25 bp, Homo sapien
gataggatgtcaagacggttttcat

SEQ ID NO: 1041565 - DNA, 25 bp, Homo sapien
tcttgataggatgtcaagacggttt

SEQ ID NO: 1041566 - DNA, 25 bp, Homo sapien
agaccccagcagaagtaccaagttt

SEQ ID NO: 1041567 - DNA, 25 bp, Homo sapien
gagaccccagcagaagtaccaagtt

SEQ ID NO: 1041568 - DNA, 25 bp, Homo sapien
tccagacgtaacattcaagttacca

SEQ ID NO: 1041569 - DNA, 25 bp, Homo sapien
ccagccatccagacgtaacattcaa

SEQ ID NO: 1041570 - DNA, 25 bp, Homo sapien
cagtgtctaacacaaagcaaacagc

SEQ ID NO: 1041571 - DNA, 25 bp, Homo sapien
tgcatgtaatgcacttagaacagtg

SEQ ID NO: 1041572 - DNA, 25 bp, Homo sapien
tagaacagtgtctaacacaaagcaa

SEQ ID NO: 1041573 - DNA, 25 bp, Homo sapien
caagtgttgcttattgttatgagaa

SEQ ID NO: 1041574 - DNA, 25 bp, Homo sapien
tacagggaactgttagctgaacccc

SEQ ID NO: 1041575 - DNA, 25 bp, Homo sapien
taccttctgtggagcgacagcactg

SEQ ID NO: 1041576 - DNA, 25 bp, Homo sapien
gctgaacccctgtctgatgatccaa

SEQ ID NO: 1041577 - DNA, 25 bp, Homo sapien
gacagtgaagggaacgattaagacc

SEQ ID NO: 1041578 - DNA, 25 bp, Homo sapien
ggctcattcttaaaagaactataca

SEQ ID NO: 1041579 - DNA, 25 bp, Homo sapien
ccactgcccccaggctcattcttaa

SEQ ID NO: 1041580 - DNA, 25 bp, Homo sapien
tgcccccaggctcattcttaaaaga

SEQ ID NO: 1041581 - DNA, 25 bp, Homo sapien
caggctcattcttaaaagaactata

SEQ ID NO: 1041582 - DNA, 25 bp, Homo sapien
gggcaagcgacagtcctcctctgca

SEQ ID NO: 1041583 - DNA, 25 bp, Homo sapien
ccagggcaagcgacagtcctcctct

SEQ ID NO: 1041584 - DNA, 25 bp, Homo sapien
atcccagggcaagcgacagtcctcc

SEQ ID NO: 1041585 - DNA, 25 bp, Homo sapien
gacagtcctcctctgcacaacggca

SEQ ID NO: 1041586 - DNA, 25 bp, Homo sapien
taactgctgctgctgcgatcaaggg

SEQ ID NO: 1041587 - DNA, 25 bp, Homo sapien
ttaactgctgctgctgcgatcaagg

SEQ ID NO: 1041588 - DNA, 25 bp, Homo sapien
aactgctgctgctgcgatcaagggg

SEQ ID NO: 1041589 - DNA, 25 bp, Homo sapien
ccaggcatatggaggttcggcaaaa

SEQ ID NO: 1041590 - DNA, 25 bp, Homo sapien
tctccgggcagtcatttaagaaggc

SEQ ID NO: 1041591 - DNA, 25 bp, Homo sapien
gacttggcccgaagattcagatgct

SEQ ID NO: 1041592 - DNA, 25 bp, Homo sapien
aagggttgacttgcatctccgggca

SEQ ID NO: 1041593 - DNA, 25 bp, Homo sapien
aactgcaacactggaacgtggagcc

SEQ ID NO: 1041594 - DNA, 25 bp, Homo sapien
actggaacgtggagccacacgccat

SEQ ID NO: 1041595 - DNA, 25 bp, Homo sapien
tgcaacactggaacgtggagccaca

SEQ ID NO: 1041596 - DNA, 25 bp, Homo sapien
aacactggaacgtggagccacacgc

SEQ ID NO: 1041597 - DNA, 25 bp, Homo sapien
tgcacttgtctgtgtagcctgaaaa

SEQ ID NO: 1041598 - DNA, 25 bp, Homo sapien
tattcggtcacccacatgcacttgt

SEQ ID NO: 1041599 - DNA, 25 bp, Homo sapien
cctgaaaataatggggccgtctgct

SEQ ID NO: 1041600 - DNA, 25 bp, Homo sapien
tgaatcggtccagggatgcttccca

SEQ ID NO: 1041601 - DNA, 25 bp, Homo sapien
tcaaaagtgcactgatccccccaat

SEQ ID NO: 1041602 - DNA, 25 bp, Homo sapien
tgatccccccaatgccggcccccca

SEQ ID NO: 1041603 - DNA, 25 bp, Homo sapien
gcactgatccccccaatgccggccc

SEQ ID NO: 1041604 - DNA, 25 bp, Homo sapien
aaaagtgcactgatccccccaatgc

SEQ ID NO: 1041605 - DNA, 25 bp, Homo sapien
cacagagatgctaggagggaatggt

SEQ ID NO: 1041606 - DNA, 25 bp, Homo sapien
tgaggaaaactggagtcacagagat

SEQ ID NO: 1041607 - DNA, 25 bp, Homo sapien
caaagcactcatttccaatgaggaa

SEQ ID NO: 1041608 - DNA, 25 bp, Homo sapien
tcttctctgcaacaaagcactcatt

SEQ ID NO: 1041609 - DNA, 25 bp, Homo sapien
ttgcatctggacaatgaaattgaac

SEQ ID NO: 1041610 - DNA, 25 bp, Homo sapien
tttgcatctggacaatgaaattgaa

SEQ ID NO: 1041611 - DNA, 25 bp, Homo sapien
gcatctggacaatgaaattgaactt

SEQ ID NO: 1041612 - DNA, 25 bp, Homo sapien
tgcatctggacaatgaaattgaact

SEQ ID NO: 1041613 - DNA, 25 bp, Homo sapien
ggccgagacattggaacatgcagta

SEQ ID NO: 1041614 - DNA, 25 bp, Homo sapien
aaaacacgccattatccatgcacag

SEQ ID NO: 1041615 - DNA, 25 bp, Homo sapien
agatgtaacctccaaacacagagat

SEQ ID NO: 1041616 - DNA, 25 bp, Homo sapien
acctcaaactgaatagcatccagcc

SEQ ID NO: 1041617 - DNA, 25 bp, Homo sapien
caacaatgggttcatgcatggctcc

SEQ ID NO: 1041618 - DNA, 25 bp, Homo sapien
catttgggtggtttgaggatcagca

SEQ ID NO: 1041619 - DNA, 25 bp, Homo sapien
tgtcaggtgataaagcaaaggaaac

SEQ ID NO: 1041620 - DNA, 25 bp, Homo sapien
agtgaggtcaaaagcctgttgttgc

SEQ ID NO: 1041621 - DNA, 25 bp, Homo sapien
cttctcagtgggtagaaaagggtct

SEQ ID NO: 1041622 - DNA, 25 bp, Homo sapien
gaaatctggtcattgagggtgtgca

SEQ ID NO: 1041623 - DNA, 25 bp, Homo sapien
gcatccattaagaggtgcctcatca

SEQ ID NO: 1041624 - DNA, 25 bp, Homo sapien
tccagtgccttcgacttggtgacaa

SEQ ID NO: 1041625 - DNA, 25 bp, Homo sapien
gaccacagtatcaacttcggaaaga

SEQ ID NO: 1041626 - DNA, 25 bp, Homo sapien
ccacagtatcaacttcggaaagaat

SEQ ID NO: 1041627 - DNA, 25 bp, Homo sapien
accacagtatcaacttcggaaagaa

SEQ ID NO: 1041628 - DNA, 25 bp, Homo sapien
gcccaggatccttctgatgtctcag

SEQ ID NO: 1041629 - DNA, 25 bp, Homo sapien
gatgtctcagtttgtataaagtgag

SEQ ID NO: 1041630 - DNA, 25 bp, Homo sapien
taaagtgagggcaagacattctcta

SEQ ID NO: 1041631 - DNA, 25 bp, Homo sapien
tgtgcggtaccatccatagccgcag

SEQ ID NO: 1041632 - DNA, 25 bp, Homo sapien
gctgaacctttctaggagtctgaga

SEQ ID NO: 1041633 - DNA, 25 bp, Homo sapien
gaggtattctatatctgaagccagg

SEQ ID NO: 1041634 - DNA, 25 bp, Homo sapien
tctgagagggtagtgtgtagcttta

SEQ ID NO: 1041635 - DNA, 25 bp, Homo sapien
aaaccatattcttggaagctgaacc

SEQ ID NO: 1041636 - DNA, 25 bp, Homo sapien
ggttttttaaggcagcagtcacgga

SEQ ID NO: 1041637 - DNA, 25 bp, Homo sapien
cacaatgtatgagggacaccagtca

SEQ ID NO: 1041638 - DNA, 25 bp, Homo sapien
caggcaatccatagacttacaggaa

SEQ ID NO: 1041639 - DNA, 25 bp, Homo sapien
gaatcaagcctgtccgtattagcag

SEQ ID NO: 1041640 - DNA, 25 bp, Homo sapien
tgctgcagagactggctaaaacctc

SEQ ID NO: 1041641 - DNA, 25 bp, Homo sapien
caattgtgtcagctagctcttgcta

SEQ ID NO: 1041642 - DNA, 25 bp, Homo sapien
tgctacgttacaaaacaccttggaa

SEQ ID NO: 1041643 - DNA, 25 bp, Homo sapien
tcctgagaacatgactagaccactt

SEQ ID NO: 1041644 - DNA, 25 bp, Homo sapien
tttcaaatagccaaatataaccata

SEQ ID NO: 1041645 - DNA, 25 bp, Homo sapien
gcattcaatgcacccttttgcttaa

SEQ ID NO: 1041646 - DNA, 25 bp, Homo sapien
gccaaatataaccataacatccctt

SEQ ID NO: 1041647 - DNA, 25 bp, Homo sapien
aatagccaaatataaccataacatc

SEQ ID NO: 1041648 - DNA, 25 bp, Homo sapien
aaactgcctcctgttctcagtctca

SEQ ID NO: 1041649 - DNA, 25 bp, Homo sapien
caaactgcctcctgttctcagtctc

SEQ ID NO: 1041650 - DNA, 25 bp, Homo sapien
aatttcaagtgaccagacacctctg

SEQ ID NO: 1041651 - DNA, 25 bp, Homo sapien
ggattttcttgcctactccacagag

SEQ ID NO: 1041652 - DNA, 25 bp, Homo sapien
ggtaccacgaattggctcaggccac

SEQ ID NO: 1041653 - DNA, 25 bp, Homo sapien
tgtcctgtggctaaccaagtatgga

SEQ ID NO: 1041654 - DNA, 25 bp, Homo sapien
tcagcaacgcagaatgaagaggagg

SEQ ID NO: 1041655 - DNA, 25 bp, Homo sapien
cagcaacgcagaatgaagaggaggt

SEQ ID NO: 1041656 - DNA, 25 bp, Homo sapien
gcaacgcagaatgaagaggaggtat

SEQ ID NO: 1041657 - DNA, 25 bp, Homo sapien
aacgcagaatgaagaggaggtatcg

SEQ ID NO: 1041658 - DNA, 25 bp, Homo sapien
caggaagactgggattttgcctcac

SEQ ID NO: 1041659 - DNA, 25 bp, Homo sapien
tttggaccaccctacatatattgga

SEQ ID NO: 1041660 - DNA, 25 bp, Homo sapien
tagtgccttaactatgcctagcata

SEQ ID NO: 1041661 - DNA, 25 bp, Homo sapien
tctacaatacatcgcctgacacata

SEQ ID NO: 1041662 - DNA, 25 bp, Homo sapien
gtctgcagagtccatacacaaaggt

SEQ ID NO: 1041663 - DNA, 25 bp, Homo sapien
ggagtccaaatgaaccaatgatgag

SEQ ID NO: 1041664 - DNA, 25 bp, Homo sapien
aatgatgagatgcactgatgctggg

SEQ ID NO: 1041665 - DNA, 25 bp, Homo sapien
tcttagattgagtgagttggagtcc

SEQ ID NO: 1041666 - DNA, 25 bp, Homo sapien
taccatccttctgcgaaccattagc

SEQ ID NO: 1041667 - DNA, 25 bp, Homo sapien
tccttctgcgaaccattagcctttg

SEQ ID NO: 1041668 - DNA, 25 bp, Homo sapien
gaaccattagcctttgtctcctcca

SEQ ID NO: 1041669 - DNA, 25 bp, Homo sapien
ttatgtccggttaccatccttctgc

SEQ ID NO: 1041670 - DNA, 25 bp, Homo sapien
tctcagtgggtaccaataacaggcc

SEQ ID NO: 1041671 - DNA, 25 bp, Homo sapien
agctcgtctggaagggcaactctca

SEQ ID NO: 1041672 - DNA, 25 bp, Homo sapien
aggcctggctgtatgctgatgtcca

SEQ ID NO: 1041673 - DNA, 25 bp, Homo sapien
taggccacctttgcatgggtataca

SEQ ID NO: 1041674 - DNA, 25 bp, Homo sapien
tctacgtgtctcttatgaagcctca

SEQ ID NO: 1041675 - DNA, 25 bp, Homo sapien
gaggctacattgacatatgaacagt

SEQ ID NO: 1041676 - DNA, 25 bp, Homo sapien
gagcagatttaagattctacgtgtc

SEQ ID NO: 1041677 - DNA, 25 bp, Homo sapien
tcacagattaattgtaggagcagat

SEQ ID NO: 1041678 - DNA, 25 bp, Homo sapien
gcactgagtctaaaacatattgaaa

SEQ ID NO: 1041679 - DNA, 25 bp, Homo sapien
gaaggtcaagcactgagtctaaaac

SEQ ID NO: 1041680 - DNA, 25 bp, Homo sapien
tatagttgtgaaggtcaagcactga

SEQ ID NO: 1041681 - DNA, 25 bp, Homo sapien
ctttcgaatatagttgtgaaggtca

SEQ ID NO: 1041682 - DNA, 25 bp, Homo sapien
gcccctttggcctttatgaaatctg

SEQ ID NO: 1041683 - DNA, 25 bp, Homo sapien
tcatttgcccttgactagaccctgc

SEQ ID NO: 1041684 - DNA, 25 bp, Homo sapien
gggcattacaccgaaataactactg

SEQ ID NO: 1041685 - DNA, 25 bp, Homo sapien
tcaatgacagttgggtatgagacat

SEQ ID NO: 1041686 - DNA, 25 bp, Homo sapien
agtggcaccaaaatccaggtgctgt

SEQ ID NO: 1041687 - DNA, 25 bp, Homo sapien
tggcaccaaaatccaggtgctgtcc

SEQ ID NO: 1041688 - DNA, 25 bp, Homo sapien
gaaagtggcaccaaaatccaggtgc

SEQ ID NO: 1041689 - DNA, 25 bp, Homo sapien
aagtggcaccaaaatccaggtgctg

SEQ ID NO: 1041690 - DNA, 25 bp, Homo sapien
aactgagcaaggccccctggtgtga

SEQ ID NO: 1041691 - DNA, 25 bp, Homo sapien
actgagcaaggccccctggtgtgac

SEQ ID NO: 1041692 - DNA, 25 bp, Homo sapien
agatgatccttcaatgtcattggca

SEQ ID NO: 1041693 - DNA, 25 bp, Homo sapien
gcaatgtcaatgttccccattccgt

SEQ ID NO: 1041694 - DNA, 25 bp, Homo sapien
ttccgtggatggaattctgagaacc

SEQ ID NO: 1041695 - DNA, 25 bp, Homo sapien
tcacagtgggtaaacagatgatcct

SEQ ID NO: 1041696 - DNA, 25 bp, Homo sapien
gaatgtcacgtctcgcttgctcata

SEQ ID NO: 1041697 - DNA, 25 bp, Homo sapien
gaagtccgaggcctattttgtatgc

SEQ ID NO: 1041698 - DNA, 25 bp, Homo sapien
tctgcgacatgaatatctggccggg

SEQ ID NO: 1041699 - DNA, 25 bp, Homo sapien
gaaagcaccctgataaggaagtccg

SEQ ID NO: 1041700 - DNA, 25 bp, Homo sapien
ggaaatacaggtttggagagctcat

SEQ ID NO: 1041701 - DNA, 25 bp, Homo sapien
acaaagtaaagtgggatgaagtcat

SEQ ID NO: 1041702 - DNA, 25 bp, Homo sapien
cagctgctgtgtgtctagccctgca

SEQ ID NO: 1041703 - DNA, 25 bp, Homo sapien
gaagtcattgagaaaaccttctagt

SEQ ID NO: 1041704 - DNA, 25 bp, Homo sapien
tgtctagccctgcatcaaagattcc

SEQ ID NO: 1041705 - DNA, 25 bp, Homo sapien
tataacaatcttggtgccttttcca

SEQ ID NO: 1041706 - DNA, 25 bp, Homo sapien
tctctccatacttattggagttgtg

SEQ ID NO: 1041707 - DNA, 25 bp, Homo sapien
tccatacttattggagttgtgataa

SEQ ID NO: 1041708 - DNA, 25 bp, Homo sapien
tgtgataatgcgtaggtggtataac

SEQ ID NO: 1041709 - DNA, 25 bp, Homo sapien
tgctaggcactgcaacgggccttgg

SEQ ID NO: 1041710 - DNA, 25 bp, Homo sapien
tcatctgaggatatgagtcggccct

SEQ ID NO: 1041711 - DNA, 25 bp, Homo sapien
tgtattgccatccttctcattctat

SEQ ID NO: 1041712 - DNA, 25 bp, Homo sapien
cagttagctcttacagagcactatg

SEQ ID NO: 1041713 - DNA, 25 bp, Homo sapien
agcagaatggaaggttttctccttc

SEQ ID NO: 1041714 - DNA, 25 bp, Homo sapien
agagggaaattatcacccacaggta

SEQ ID NO: 1041715 - DNA, 25 bp, Homo sapien
gaaattatcacccacaggtaatgca

SEQ ID NO: 1041716 - DNA, 25 bp, Homo sapien
ttatcacccacaggtaatgcatcat

SEQ ID NO: 1041717 - DNA, 25 bp, Homo sapien
cataggaaccgtagtgggtgctgca

SEQ ID NO: 1041718 - DNA, 25 bp, Homo sapien
ctttgtgtgtcctagcacgggtacc

SEQ ID NO: 1041719 - DNA, 25 bp, Homo sapien
agcctttgtgtgtcctagcacgggt

SEQ ID NO: 1041720 - DNA, 25 bp, Homo sapien
cagacaacaaagacataggaaccgt

SEQ ID NO: 1041721 - DNA, 25 bp, Homo sapien
taaaaatgccttcgtgtgactctga

SEQ ID NO: 1041722 - DNA, 25 bp, Homo sapien
caaacaagtctaggagacgggcatc

SEQ ID NO: 1041723 - DNA, 25 bp, Homo sapien
tactcagggctatggctttggacca

SEQ ID NO: 1041724 - DNA, 25 bp, Homo sapien
tactgcactaacaagagatgtctgc

SEQ ID NO: 1041725 - DNA, 25 bp, Homo sapien
tgggcccctgtactttccagagcag

SEQ ID NO: 1041726 - DNA, 25 bp, Homo sapien
ggacacgattcccaatccctaacag

SEQ ID NO: 1041727 - DNA, 25 bp, Homo sapien
gatgaccgtaggtccaaatagggcc

SEQ ID NO: 1041728 - DNA, 25 bp, Homo sapien
tcttaactaagtccatatgccgatg

SEQ ID NO: 1041729 - DNA, 25 bp, Homo sapien
taggttgatcaagtaacaaagggag

SEQ ID NO: 1041730 - DNA, 25 bp, Homo sapien
caatgactaagtatttccctaagaa

SEQ ID NO: 1041731 - DNA, 25 bp, Homo sapien
gagacatcactagagaccctgcaga

SEQ ID NO: 1041732 - DNA, 25 bp, Homo sapien
aaacgaatagcttaaaatcaatgac

SEQ ID NO: 1041733 - DNA, 25 bp, Homo sapien
gctaataggtcaataatgaagatgg

SEQ ID NO: 1041734 - DNA, 25 bp, Homo sapien
gctacagtagctatattgacatcaa

SEQ ID NO: 1041735 - DNA, 25 bp, Homo sapien
aagactcactgtatagctaataggt

SEQ ID NO: 1041736 - DNA, 25 bp, Homo sapien
ggcagagactgttaagctaattttt

SEQ ID NO: 1041737 - DNA, 25 bp, Homo sapien
aacctctgcttcttgggtttgagcg

SEQ ID NO: 1041738 - DNA, 25 bp, Homo sapien
cctctgcttcttgggtttgagcgat

SEQ ID NO: 1041739 - DNA, 25 bp, Homo sapien
taggattacaggcatgagccaacct

SEQ ID NO: 1041740 - DNA, 25 bp, Homo sapien
gcaacctctgcttcttgggtttgag

SEQ ID NO: 1041741 - DNA, 25 bp, Homo sapien
tctgtagttcgactatccagagaac

SEQ ID NO: 1041742 - DNA, 25 bp, Homo sapien
ttcaggagacacagataatcaaaga

SEQ ID NO: 1041743 - DNA, 25 bp, Homo sapien
tcactttgtaggagtcatacactca

SEQ ID NO: 1041744 - DNA, 25 bp, Homo sapien
cacacaccctttacatagtctaggt

SEQ ID NO: 1041745 - DNA, 25 bp, Homo sapien
ctggctgctggcgaaatgatgaaca

SEQ ID NO: 1041746 - DNA, 25 bp, Homo sapien
ggctgctggcgaaatgatgaacatg

SEQ ID NO: 1041747 - DNA, 25 bp, Homo sapien
gagattcgatgagaacagaaacaca

SEQ ID NO: 1041748 - DNA, 25 bp, Homo sapien
gaacatgttgagctttacaagccag

SEQ ID NO: 1041749 - DNA, 25 bp, Homo sapien
gataggtggaatttacagatcaact

SEQ ID NO: 1041750 - DNA, 25 bp, Homo sapien
ctccaatgcagaagatggcatatct

SEQ ID NO: 1041751 - DNA, 25 bp, Homo sapien
tctacatagaaagtgacgtcggccg

SEQ ID NO: 1041752 - DNA, 25 bp, Homo sapien
ggtacattcacttactacgtctagt

SEQ ID NO: 1041753 - DNA, 25 bp, Homo sapien
gatgcatcccgtctgtaaacactgg

SEQ ID NO: 1041754 - DNA, 25 bp, Homo sapien
caaagctaaaatccggctctcaggg

SEQ ID NO: 1041755 - DNA, 25 bp, Homo sapien
gatgaccacatcatgggagtgccta

SEQ ID NO: 1041756 - DNA, 25 bp, Homo sapien
acttctaggtaaacagctgcttgca

SEQ ID NO: 1041757 - DNA, 25 bp, Homo sapien
acacatacatacctgggtgctccag

SEQ ID NO: 1041758 - DNA, 25 bp, Homo sapien
gatggccatgggatgagactcctct

SEQ ID NO: 1041759 - DNA, 25 bp, Homo sapien
gggaaggactatgttgccagatgta

SEQ ID NO: 1041760 - DNA, 25 bp, Homo sapien
tttagaatggctcatggttcagtcc

SEQ ID NO: 1041761 - DNA, 25 bp, Homo sapien
tgagcaggcagttgtgtatgtgacc

SEQ ID NO: 1041762 - DNA, 25 bp, Homo sapien
gaatctggatacctcaacatttgga

SEQ ID NO: 1041763 - DNA, 25 bp, Homo sapien
aaaggatccctcaaaagtgcccaag

SEQ ID NO: 1041764 - DNA, 25 bp, Homo sapien
tattataattgcctcctaagtggcc

SEQ ID NO: 1041765 - DNA, 25 bp, Homo sapien
gaggatcctcagtaccaaacggctt

SEQ ID NO: 1041766 - DNA, 25 bp, Homo sapien
tgtcccctggaataagcaactatgg

SEQ ID NO: 1041767 - DNA, 25 bp, Homo sapien
tatggcaaactcttcgtgaggctac

SEQ ID NO: 1041768 - DNA, 25 bp, Homo sapien
gatacacgagatggttccttgggca

SEQ ID NO: 1041769 - DNA, 25 bp, Homo sapien
cctgggagagtacagctaggcaaca

SEQ ID NO: 1041770 - DNA, 25 bp, Homo sapien
gcagcctcagaccattgtgttcaca

SEQ ID NO: 1041771 - DNA, 25 bp, Homo sapien
cagtccctggcatagcctggagaca

SEQ ID NO: 1041772 - DNA, 25 bp, Homo sapien
cacacacggcagataggaatgtcat

SEQ ID NO: 1041773 - DNA, 25 bp, Homo sapien
cacaaaaggcttataaaattgaaat

SEQ ID NO: 1041774 - DNA, 25 bp, Homo sapien
acctacttcgagtctgtggtttgtc

SEQ ID NO: 1041775 - DNA, 25 bp, Homo sapien
gttcacaaaaggcttataaaattga

SEQ ID NO: 1041776 - DNA, 25 bp, Homo sapien
tatgttgcaaatacctacttcgagt

SEQ ID NO: 1041777 - DNA, 25 bp, Homo sapien
cataaaagtttattcctagacacct

SEQ ID NO: 1041778 - DNA, 25 bp, Homo sapien
gagcttgttctcagcaaaactgctg

SEQ ID NO: 1041779 - DNA, 25 bp, Homo sapien
gattcttttcactaatgaacaggag

SEQ ID NO: 1041780 - DNA, 25 bp, Homo sapien
taatgaacaggagctatcacccagc

SEQ ID NO: 1041781 - DNA, 25 bp, Homo sapien
cgcctccggtttcacgccattctcc

SEQ ID NO: 1041782 - DNA, 25 bp, Homo sapien
gcaagctccgcctccggtttcacgc

SEQ ID NO: 1041783 - DNA, 25 bp, Homo sapien
caggcgtgagccacagtgcctggcc

SEQ ID NO: 1041784 - DNA, 25 bp, Homo sapien
acaggcgtgagccacagtgcctggc

SEQ ID NO: 1041785 - DNA, 25 bp, Homo sapien
agctgcccattgctcctcggaattt

SEQ ID NO: 1041786 - DNA, 25 bp, Homo sapien
cagggaatccctgaatgaggcactg

SEQ ID NO: 1041787 - DNA, 25 bp, Homo sapien
cacttaagttcatgaagcaggagag

SEQ ID NO: 1041788 - DNA, 25 bp, Homo sapien
cctagagttagatgtaaggtgacac

SEQ ID NO: 1041789 - DNA, 25 bp, Homo sapien
gtacagcaaattgatcctgttggaa

SEQ ID NO: 1041790 - DNA, 25 bp, Homo sapien
gaaagagcgagaacaaagacgcagg

SEQ ID NO: 1041791 - DNA, 25 bp, Homo sapien
ataaaagtacagcaaattgatcctg

SEQ ID NO: 1041792 - DNA, 25 bp, Homo sapien
caatgcattgtttctgactgccagg

SEQ ID NO: 1041793 - DNA, 25 bp, Homo sapien
atgtccgacccacgggctgcagcga

SEQ ID NO: 1041794 - DNA, 25 bp, Homo sapien
gtccgacccacgggctgcagcgact

SEQ ID NO: 1041795 - DNA, 25 bp, Homo sapien
tcatgtccgacccacgggctgcagc

SEQ ID NO: 1041796 - DNA, 25 bp, Homo sapien
tccgacccacgggctgcagcgactg

SEQ ID NO: 1041797 - DNA, 25 bp, Homo sapien
cacacttgatgtccggggtttgtaa

SEQ ID NO: 1041798 - DNA, 25 bp, Homo sapien
aaacttggcaaagtggtagttgaca

SEQ ID NO: 1041799 - DNA, 25 bp, Homo sapien
aagtggtagttgacatcatttttcc

SEQ ID NO: 1041800 - DNA, 25 bp, Homo sapien
tggcaaagtggtagttgacatcatt

SEQ ID NO: 1041801 - DNA, 25 bp, Homo sapien
gtagatcaagagcttcaggttggtc

SEQ ID NO: 1041802 - DNA, 25 bp, Homo sapien
cacgggtctgtcttgggcccatctg

SEQ ID NO: 1041803 - DNA, 25 bp, Homo sapien
tgccgtttgctcttgtaccactggg

SEQ ID NO: 1041804 - DNA, 25 bp, Homo sapien
tccatgcaggcatgccgtttgctct

SEQ ID NO: 1041805 - DNA, 25 bp, Homo sapien
tgctcttgtaccactgggcctgcat

SEQ ID NO: 1041806 - DNA, 25 bp, Homo sapien
ctcctcaagctgtccgacattgcct

SEQ ID NO: 1041807 - DNA, 25 bp, Homo sapien
tcctcaagctgtccgacattgcctg

SEQ ID NO: 1041808 - DNA, 25 bp, Homo sapien
gaagacaaagccagaagacatggcc

SEQ ID NO: 1041809 - DNA, 25 bp, Homo sapien
ttagaagacaaagccagaagacatg

SEQ ID NO: 1041810 - DNA, 25 bp, Homo sapien
ggcccaaggagaagaagaatagaac

SEQ ID NO: 1041811 - DNA, 25 bp, Homo sapien
gccagaagacatggcccaaggagaa

SEQ ID NO: 1041812 - DNA, 25 bp, Homo sapien
atttcattttcgagaagccctcctc

SEQ ID NO: 1041813 - DNA, 25 bp, Homo sapien
cactgactccctgatgataaatgat

SEQ ID NO: 1041814 - DNA, 25 bp, Homo sapien
tcaactggcaagacctgaaggcaat

SEQ ID NO: 1041815 - DNA, 25 bp, Homo sapien
gaaagaacgttggttccactgactc

SEQ ID NO: 1041816 - DNA, 25 bp, Homo sapien
gaaactacagcagagttcgattgtg

SEQ ID NO: 1041817 - DNA, 25 bp, Homo sapien
ccctaacactgtggttaacgagtct

SEQ ID NO: 1041818 - DNA, 25 bp, Homo sapien
tctattttgattcttgataagcaga

SEQ ID NO: 1041819 - DNA, 25 bp, Homo sapien
ttttatattcgcatgcacaagcacc

SEQ ID NO: 1041820 - DNA, 25 bp, Homo sapien
gggtcacaagaattgggtccatctg

SEQ ID NO: 1041821 - DNA, 25 bp, Homo sapien
caagaattgggtccatctgagagag

SEQ ID NO: 1041822 - DNA, 25 bp, Homo sapien
ctccaagtactgcaacgtcacattt

SEQ ID NO: 1041823 - DNA, 25 bp, Homo sapien
caagtactgcaacgtcacatttttt

SEQ ID NO: 1041824 - DNA, 25 bp, Homo sapien
gccccaggaataacaactgcttcag

SEQ ID NO: 1041825 - DNA, 25 bp, Homo sapien
ctaggctctcttggggtagcacttc

SEQ ID NO: 1041826 - DNA, 25 bp, Homo sapien
cagggactcctcaatgatggcagga

SEQ ID NO: 1041827 - DNA, 25 bp, Homo sapien
caatgtcatttaagccagagtcctt

SEQ ID NO: 1041828 - DNA, 25 bp, Homo sapien
tagtgacgggaacagatgagctctc

SEQ ID NO: 1041829 - DNA, 25 bp, Homo sapien
cagcgtggagcccagaactatctct

SEQ ID NO: 1041830 - DNA, 25 bp, Homo sapien
ggttggctgtctcgggaacacctga

SEQ ID NO: 1041831 - DNA, 25 bp, Homo sapien
cagcctgatggctttgcacgaacat

SEQ ID NO: 1041832 - DNA, 25 bp, Homo sapien
ggagagcgcctctattgaaaccagg

SEQ ID NO: 1041833 - DNA, 25 bp, Homo sapien
ggcaactcttgatgtcatgtgggct

SEQ ID NO: 1041834 - DNA, 25 bp, Homo sapien
aggtgattccaccaggttgctgcta

SEQ ID NO: 1041835 - DNA, 25 bp, Homo sapien
aactattatccgtctagtagggaat

SEQ ID NO: 1041836 - DNA, 25 bp, Homo sapien
gctgttaccatggtgactattatgg

SEQ ID NO: 1041837 - DNA, 25 bp, Homo sapien
taccatggtgactattatggccgag

SEQ ID NO: 1041838 - DNA, 25 bp, Homo sapien
ggtgactattatggccgagattttt

SEQ ID NO: 1041839 - DNA, 25 bp, Homo sapien
catggtgactattatggccgagatt

SEQ ID NO: 1041840 - DNA, 25 bp, Homo sapien
ttcctgtctgatcgggttctgatcc

SEQ ID NO: 1041841 - DNA, 25 bp, Homo sapien
tgttcctgtctgatcgggttctgat

SEQ ID NO: 1041842 - DNA, 25 bp, Homo sapien
gttcctgtctgatcgggttctgatc

SEQ ID NO: 1041843 - DNA, 25 bp, Homo sapien
ctgttcctgtctgatcgggttctga

SEQ ID NO: 1041844 - DNA, 25 bp, Homo sapien
gatgcaagctcacggaatcatttgt

SEQ ID NO: 1041845 - DNA, 25 bp, Homo sapien
tatttggcaactgtactcaccggag

SEQ ID NO: 1041846 - DNA, 25 bp, Homo sapien
ggaggcttcacatgcgtaaaggcca

SEQ ID NO: 1041847 - DNA, 25 bp, Homo sapien
taaaggccatggcagtttcacccat

SEQ ID NO: 1041848 - DNA, 25 bp, Homo sapien
tgagcagctgtcttgcacgggcaga

SEQ ID NO: 1041849 - DNA, 25 bp, Homo sapien
tatttgtgactcatgcccggattgg

SEQ ID NO: 1041850 - DNA, 25 bp, Homo sapien
gcatgttacccaagccaactggaga

SEQ ID NO: 1041851 - DNA, 25 bp, Homo sapien
tctagcctgctccagtaattaggga

SEQ ID NO: 1041852 - DNA, 25 bp, Homo sapien
tgagcccctccatatccactaacgt

SEQ ID NO: 1041853 - DNA, 25 bp, Homo sapien
tataggcctcttatcctgagcccct

SEQ ID NO: 1041854 - DNA, 25 bp, Homo sapien
catatccactaacgtcagccacaca

SEQ ID NO: 1041855 - DNA, 25 bp, Homo sapien
cagccacacattcgtcattacacat

SEQ ID NO: 1041856 - DNA, 25 bp, Homo sapien
gaacagccagctgccgatgtctttc

SEQ ID NO: 1041857 - DNA, 25 bp, Homo sapien
aggaacagccagctgccgatgtctt

SEQ ID NO: 1041858 - DNA, 25 bp, Homo sapien
ggaacagccagctgccgatgtcttt

SEQ ID NO: 1041859 - DNA, 25 bp, Homo sapien
caaaaggttcagatctgaggcagaa

SEQ ID NO: 1041860 - DNA, 25 bp, Homo sapien
ggctcataaaatggtaccccagtga

SEQ ID NO: 1041861 - DNA, 25 bp, Homo sapien
ccaggatgctttactcaccgaataa

SEQ ID NO: 1041862 - DNA, 25 bp, Homo sapien
tgcattcgatttggtgaggagctga

SEQ ID NO: 1041863 - DNA, 25 bp, Homo sapien
cccagtaggctgatgttaagaacca

SEQ ID NO: 1041864 - DNA, 25 bp, Homo sapien
aaaatgggtccacttcatagggact

SEQ ID NO: 1041865 - DNA, 25 bp, Homo sapien
cacagctatgagaatttggcagtac

SEQ ID NO: 1041866 - DNA, 25 bp, Homo sapien
tgggagaaggattccagagaagtct

SEQ ID NO: 1041867 - DNA, 25 bp, Homo sapien
cggttcctccggcacaggaatgaca

SEQ ID NO: 1041868 - DNA, 25 bp, Homo sapien
ggaggaggagcagcgatcgccgaga

SEQ ID NO: 1041869 - DNA, 25 bp, Homo sapien
aggagcagcgatcgccgagaccccg

SEQ ID NO: 1041870 - DNA, 25 bp, Homo sapien
tgacagcggcgcctccagccctagc

SEQ ID NO: 1041871 - DNA, 25 bp, Homo sapien
gggcgagagaggtgacaaagagctg

SEQ ID NO: 1041872 - DNA, 25 bp, Homo sapien
tgggggcgagagaggtgacaaagag

SEQ ID NO: 1041873 - DNA, 25 bp, Homo sapien
tgacaaagagctgcatgatgcgcgg

SEQ ID NO: 1041874 - DNA, 25 bp, Homo sapien
agagaggtgacaaagagctgcatga

SEQ ID NO: 1041875 - DNA, 25 bp, Homo sapien
cttccatcatgctcaggattttggc

SEQ ID NO: 1041876 - DNA, 25 bp, Homo sapien
tcctggctggccgactggaccgccc

SEQ ID NO: 1041877 - DNA, 25 bp, Homo sapien
tgcggagcgcgagctgcttattgtc

SEQ ID NO: 1041878 - DNA, 25 bp, Homo sapien
actggaccgccccatcgatgcggag

SEQ ID NO: 1041879 - DNA, 25 bp, Homo sapien
tgagttcggctcgcaggttggtcac

SEQ ID NO: 1041880 - DNA, 25 bp, Homo sapien
ttggtggccgtgagttcggctcgca

SEQ ID NO: 1041881 - DNA, 25 bp, Homo sapien
tgcgctccaagctgggggttctcca

SEQ ID NO: 1041882 - DNA, 25 bp, Homo sapien
gctcagttccgccagtctccggttg

SEQ ID NO: 1041883 - DNA, 25 bp, Homo sapien
ttcgacataaaactgcacgtgggca

SEQ ID NO: 1041884 - DNA, 25 bp, Homo sapien
taagacttccaacaggctccgggag

SEQ ID NO: 1041885 - DNA, 25 bp, Homo sapien
ttagacaagtggacctcatggactg

SEQ ID NO: 1041886 - DNA, 25 bp, Homo sapien
aaagaaagcacaccttcccaggaag

SEQ ID NO: 1041887 - DNA, 25 bp, Homo sapien
tctgcagagggtttctgtgctagca

SEQ ID NO: 1041888 - DNA, 25 bp, Homo sapien
ctaccagaccacctctgcagagggt

SEQ ID NO: 1041889 - DNA, 25 bp, Homo sapien
gagggtttctgtgctagcaggatgc

SEQ ID NO: 1041890 - DNA, 25 bp, Homo sapien
gtttctgtgctagcaggatgctgcc

SEQ ID NO: 1041891 - DNA, 25 bp, Homo sapien
tgaacatctaaacccagcgcgggag

SEQ ID NO: 1041892 - DNA, 25 bp, Homo sapien
gcctcaccgagctaggaagtgttaa

SEQ ID NO: 1041893 - DNA, 25 bp, Homo sapien
tcaaatgacaacataccgtggctgc

SEQ ID NO: 1041894 - DNA, 25 bp, Homo sapien
tgcacttggcaatggactccagaga

SEQ ID NO: 1041895 - DNA, 25 bp, Homo sapien
aattaggttgtacaagaggctccgc

SEQ ID NO: 1041896 - DNA, 25 bp, Homo sapien
gctgggagatttccaaggcgtcacc

SEQ ID NO: 1041897 - DNA, 25 bp, Homo sapien
ttttcacttggcagctcccctggga

SEQ ID NO: 1041898 - DNA, 25 bp, Homo sapien
cctggtggaccagcacatgaaggat

SEQ ID NO: 1041899 - DNA, 25 bp, Homo sapien
gctgcacgcgtttttctggctccat

SEQ ID NO: 1041900 - DNA, 25 bp, Homo sapien
gatgagctgctgcacgcgtttttct

SEQ ID NO: 1041901 - DNA, 25 bp, Homo sapien
tgagctgctgcacgcgtttttctgg

SEQ ID NO: 1041902 - DNA, 25 bp, Homo sapien
gctgctgcacgcgtttttctggctc

SEQ ID NO: 1041903 - DNA, 25 bp, Homo sapien
ccagtgccaatagcactgcagttga

SEQ ID NO: 1041904 - DNA, 25 bp, Homo sapien
agccccacgcaacagagaagtatct

SEQ ID NO: 1041905 - DNA, 25 bp, Homo sapien
aggaaagggaatgccactggcatct

SEQ ID NO: 1041906 - DNA, 25 bp, Homo sapien
ggcagccccacgcaacagagaagta

SEQ ID NO: 1041907 - DNA, 25 bp, Homo sapien
ctgttttccactgcagaggaggctc

SEQ ID NO: 1041908 - DNA, 25 bp, Homo sapien
actgcagaggaggctcacagtgtga

SEQ ID NO: 1041909 - DNA, 25 bp, Homo sapien
ttttccactgcagaggaggctcaca

SEQ ID NO: 1041910 - DNA, 25 bp, Homo sapien
ctgcagaggaggctcacagtgtgac

SEQ ID NO: 1041911 - DNA, 25 bp, Homo sapien
ggcttagagagccaaactccctgtc

SEQ ID NO: 1041912 - DNA, 25 bp, Homo sapien
aaaggttataggtactgaggccagc

SEQ ID NO: 1041913 - DNA, 25 bp, Homo sapien
gaattttactcccattcacagatag

SEQ ID NO: 1041914 - DNA, 25 bp, Homo sapien
tctaaatctgattcaagagatggct

SEQ ID NO: 1041915 - DNA, 25 bp, Homo sapien
ggatcacagatgtgcaccgccatgc

SEQ ID NO: 1041916 - DNA, 25 bp, Homo sapien
ggctcactacaacggggttcaagca

SEQ ID NO: 1041917 - DNA, 25 bp, Homo sapien
tattttaagacaagagtcttgatct

SEQ ID NO: 1041918 - DNA, 25 bp, Homo sapien
ttggctcactacaacggggttcaag

SEQ ID NO: 1041919 - DNA, 25 bp, Homo sapien
ttctagaagtttatggtgccatcgg

SEQ ID NO: 1041920 - DNA, 25 bp, Homo sapien
taaagtgctgcctacggagatagca

SEQ ID NO: 1041921 - DNA, 25 bp, Homo sapien
tgaaaattgccttgttgtagggcca

SEQ ID NO: 1041922 - DNA, 25 bp, Homo sapien
tactttcccacacagaaccaaggtg

SEQ ID NO: 1041923 - DNA, 25 bp, Homo sapien
tcattggccacgatttcagcagcaa

SEQ ID NO: 1041924 - DNA, 25 bp, Homo sapien
aacgggcccattagatagaggtgca

SEQ ID NO: 1041925 - DNA, 25 bp, Homo sapien
taatcagtgacgttattctgcgact

SEQ ID NO: 1041926 - DNA, 25 bp, Homo sapien
tctccggtgaaagtacagtgctgtg

SEQ ID NO: 1041927 - DNA, 25 bp, Homo sapien
tgactttgtcccgaactaggcagcc

SEQ ID NO: 1041928 - DNA, 25 bp, Homo sapien
cagtgtctaatggtctccgggcttt

SEQ ID NO: 1041929 - DNA, 25 bp, Homo sapien
gattcaggcttgacagtgggccaag

SEQ ID NO: 1041930 - DNA, 25 bp, Homo sapien
taggcagccgtgtgctttaacagaa

SEQ ID NO: 1041931 - DNA, 25 bp, Homo sapien
aataaccacacacgagatcttctct

SEQ ID NO: 1041932 - DNA, 25 bp, Homo sapien
taataaccacacacgagatcttctc

SEQ ID NO: 1041933 - DNA, 25 bp, Homo sapien
tataataaccacacacgagatcttc

SEQ ID NO: 1041934 - DNA, 25 bp, Homo sapien
ataaccacacacgagatcttctctg

SEQ ID NO: 1041935 - DNA, 25 bp, Homo sapien
tcaagaggttggagcaaactgatgc

SEQ ID NO: 1041936 - DNA, 25 bp, Homo sapien
gattgcagccagcagttatccgggt

SEQ ID NO: 1041937 - DNA, 25 bp, Homo sapien
tatccgggtcaacttcagtacactg

SEQ ID NO: 1041938 - DNA, 25 bp, Homo sapien
gaggtatcattgttcccactgggat

SEQ ID NO: 1041939 - DNA, 25 bp, Homo sapien
cagccctggtcagttcctcgcagaa

SEQ ID NO: 1041940 - DNA, 25 bp, Homo sapien
ctcgcagaatccaccttcagtcaag

SEQ ID NO: 1041941 - DNA, 25 bp, Homo sapien
caccttcagtcaaggactggaagag

SEQ ID NO: 1041942 - DNA, 25 bp, Homo sapien
gctgtgggttgtaggcatggttatg

SEQ ID NO: 1041943 - DNA, 25 bp, Homo sapien
tgtggatgtaacttaatgctgctga

SEQ ID NO: 1041944 - DNA, 25 bp, Homo sapien
tttaatggggatagctgctctttga

SEQ ID NO: 1041945 - DNA, 25 bp, Homo sapien
atgtggatgtaacttaatgctgctg

SEQ ID NO: 1041946 - DNA, 25 bp, Homo sapien
gggatagctgctctttgagaagatg

SEQ ID NO: 1041947 - DNA, 25 bp, Homo sapien
tgctaggtcgcttttgccagaaggt

SEQ ID NO: 1041948 - DNA, 25 bp, Homo sapien
tgtggctgtcgtagtcccagaggta

SEQ ID NO: 1041949 - DNA, 25 bp, Homo sapien
cagcccagggcgttaatagcttggt

SEQ ID NO: 1041950 - DNA, 25 bp, Homo sapien
ccgatattaggcaaagctgagggag

SEQ ID NO: 1041951 - DNA, 25 bp, Homo sapien
tgacggtgttgacgcagcaggttgc

SEQ ID NO: 1041952 - DNA, 25 bp, Homo sapien
cggtgttgacgcagcaggttgcttt

SEQ ID NO: 1041953 - DNA, 25 bp, Homo sapien
ctgattgtaggaggtgacggtgttg

SEQ ID NO: 1041954 - DNA, 25 bp, Homo sapien
ggtgacggtgttgacgcagcaggtt

SEQ ID NO: 1041955 - DNA, 25 bp, Homo sapien
gctcggtctgcagcgtgaatacata

SEQ ID NO: 1041956 - DNA, 25 bp, Homo sapien
caagtcagtcatgtgaaccaccgat

SEQ ID NO: 1041957 - DNA, 25 bp, Homo sapien
gcttagtggcctccctaaatctggg

SEQ ID NO: 1041958 - DNA, 25 bp, Homo sapien
ccatttcagactggccgcagagaac

SEQ ID NO: 1041959 - DNA, 25 bp, Homo sapien
ggtgatggctctcaacacgcaggct

SEQ ID NO: 1041960 - DNA, 25 bp, Homo sapien
gcgcctggagagcaagcacaactta

SEQ ID NO: 1041961 - DNA, 25 bp, Homo sapien
taccagcagtggttagaccgccgtt

SEQ ID NO: 1041962 - DNA, 25 bp, Homo sapien
tcctgttgccgggagaaacaactgc

SEQ ID NO: 1041963 - DNA, 25 bp, Homo sapien
tttgtgactatgagctccctggagg

SEQ ID NO: 1041964 - DNA, 25 bp, Homo sapien
gtgtatcaacacgtctcctggaagg

SEQ ID NO: 1041965 - DNA, 25 bp, Homo sapien
gctgtagtgggaggtatagcacccc

SEQ ID NO: 1041966 - DNA, 25 bp, Homo sapien
caagacttggcacagagggttgctc

SEQ ID NO: 1041967 - DNA, 25 bp, Homo sapien
tgacctcatcaatgcccaaccagtg

SEQ ID NO: 1041968 - DNA, 25 bp, Homo sapien
gttgactcccaggaaacgtcacctg

SEQ ID NO: 1041969 - DNA, 25 bp, Homo sapien
tccctggagcaacaggatcagcctc

SEQ ID NO: 1041970 - DNA, 25 bp, Homo sapien
ccaagaatgtgaactcaaggacccc

SEQ ID NO: 1041971 - DNA, 25 bp, Homo sapien
cctggtgggtactaagcatgaaaac

SEQ ID NO: 1041972 - DNA, 25 bp, Homo sapien
catgccaccatgtgtaagcagagct

SEQ ID NO: 1041973 - DNA, 25 bp, Homo sapien
tgctactcagggatctgaagccggg

SEQ ID NO: 1041974 - DNA, 25 bp, Homo sapien
aaacaatccttgctggctgctacca

SEQ ID NO: 1041975 - DNA, 25 bp, Homo sapien
aaaggtcaaatgctgatcactgctg

SEQ ID NO: 1041976 - DNA, 25 bp, Homo sapien
ttcagaaccctgcaggaagtgagga

SEQ ID NO: 1041977 - DNA, 25 bp, Homo sapien
tacaatagaccaagacctcgctgtc

SEQ ID NO: 1041978 - DNA, 25 bp, Homo sapien
gaggatcaatccatgctggtaccgg

SEQ ID NO: 1041979 - DNA, 25 bp, Homo sapien
gagatagtggtatcttgccatgttg

SEQ ID NO: 1041980 - DNA, 25 bp, Homo sapien
ttttgtggagatagtggtatcttgc

SEQ ID NO: 1041981 - DNA, 25 bp, Homo sapien
acttcttttcgaaaatagagacaag

SEQ ID NO: 1041982 - DNA, 25 bp, Homo sapien
taatacttcttttcgaaaatagaga

SEQ ID NO: 1041983 - DNA, 25 bp, Homo sapien
tctagtcagatagggttagcactcc

SEQ ID NO: 1041984 - DNA, 25 bp, Homo sapien
tagccttggcaatactgacacttgg

SEQ ID NO: 1041985 - DNA, 25 bp, Homo sapien
acccacaggtattgagcaggctcag

SEQ ID NO: 1041986 - DNA, 25 bp, Homo sapien
tggagcatacttcgcaccacgaggg

SEQ ID NO: 1041987 - DNA, 25 bp, Homo sapien
ttattgagaccataggccacgaggg

SEQ ID NO: 1041988 - DNA, 25 bp, Homo sapien
taacttaatgacctgagaatgctgt

SEQ ID NO: 1041989 - DNA, 25 bp, Homo sapien
tcatggcacccagctaaatggaggt

SEQ ID NO: 1041990 - DNA, 25 bp, Homo sapien
aatctaggtgtggatagggcaagac

SEQ ID NO: 1041991 - DNA, 25 bp, Homo sapien
catgagtctcgatgaggccacaggc

SEQ ID NO: 1041992 - DNA, 25 bp, Homo sapien
gtgatgagcaagctcaggccacccc

SEQ ID NO: 1041993 - DNA, 25 bp, Homo sapien
tccctcgtgttaaactcatgagtct

SEQ ID NO: 1041994 - DNA, 25 bp, Homo sapien
cattccccatcgtggccatagaggc

SEQ ID NO: 1041995 - DNA, 25 bp, Homo sapien
cactcgaggaaggatgactttggac

SEQ ID NO: 1041996 - DNA, 25 bp, Homo sapien
gacaccataatctttgcagggcttg

SEQ ID NO: 1041997 - DNA, 25 bp, Homo sapien
tgttgttctatgtaggggacaccat

SEQ ID NO: 1041998 - DNA, 25 bp, Homo sapien
ccacagacactcgaggaaggatgac

SEQ ID NO: 1041999 - DNA, 25 bp, Homo sapien
gaagggcattactctatggaccaca

SEQ ID NO: 1042000 - DNA, 25 bp, Homo sapien
taaaagtgaacgcttccccagtgga

SEQ ID NO: 1042001 - DNA, 25 bp, Homo sapien
caatacaggaacgaatgggcgtgcc

SEQ ID NO: 1042002 - DNA, 25 bp, Homo sapien
tcataggccacacggaaacaggctg

SEQ ID NO: 1042003 - DNA, 25 bp, Homo sapien
gatgagattagagccacctgggtct

SEQ ID NO: 1042004 - DNA, 25 bp, Homo sapien
ggagggccaccatcttggagaatga

SEQ ID NO: 1042005 - DNA, 25 bp, Homo sapien
catgaggcctgagcatctgggttct

SEQ ID NO: 1042006 - DNA, 25 bp, Homo sapien
aaacagaacaatagccagggccttc

SEQ ID NO: 1042007 - DNA, 25 bp, Homo sapien
ctactatggacctctctgatcctga

SEQ ID NO: 1042008 - DNA, 25 bp, Homo sapien
gaacctactatggacctctctgatc

SEQ ID NO: 1042009 - DNA, 25 bp, Homo sapien
acacctgaacctactatggacctct

SEQ ID NO: 1042010 - DNA, 25 bp, Homo sapien
caccacacctgaacctactatggac

SEQ ID NO: 1042011 - DNA, 25 bp, Homo sapien
cagggcactgtccagatcaggatct

SEQ ID NO: 1042012 - DNA, 25 bp, Homo sapien
tgcagatcggtcttggcgctgtata

SEQ ID NO: 1042013 - DNA, 25 bp, Homo sapien
gcgctgtatactcccaggtccaggg

SEQ ID NO: 1042014 - DNA, 25 bp, Homo sapien
ggtcataaggcgattcaatggtcct

SEQ ID NO: 1042015 - DNA, 25 bp, Homo sapien
ggatcctctcagtaaacagtcggca

SEQ ID NO: 1042016 - DNA, 25 bp, Homo sapien
tatataaccaaataccgcctgcttc

SEQ ID NO: 1042017 - DNA, 25 bp, Homo sapien
tcagtgccctccaatgatggatcct

SEQ ID NO: 1042018 - DNA, 25 bp, Homo sapien
caggaggtgctcactaaagaactta

SEQ ID NO: 1042019 - DNA, 25 bp, Homo sapien
aagtcacctgaataaggtcacacag

SEQ ID NO: 1042020 - DNA, 25 bp, Homo sapien
cggtcatgcgagacttgtttcactt

SEQ ID NO: 1042021 - DNA, 25 bp, Homo sapien
ccactgggcccggtcatgcgagact

SEQ ID NO: 1042022 - DNA, 25 bp, Homo sapien
ggttaagtcacctgaataaggtcac

SEQ ID NO: 1042023 - DNA, 25 bp, Homo sapien
ggcacctcggtaatattctctggaa

SEQ ID NO: 1042024 - DNA, 25 bp, Homo sapien
gaaatatgtaaatctcgacggcgac

SEQ ID NO: 1042025 - DNA, 25 bp, Homo sapien
caatgtcagccaagtggtgcctgct

SEQ ID NO: 1042026 - DNA, 25 bp, Homo sapien
caaagctaaagctcgtaggtgctcc

SEQ ID NO: 1042027 - DNA, 25 bp, Homo sapien
aaagcagattgtggagataaggtct

SEQ ID NO: 1042028 - DNA, 25 bp, Homo sapien
ctcaggaagctggcgtgaacccggg

SEQ ID NO: 1042029 - DNA, 25 bp, Homo sapien
gaaataccgacttcaaagacgtctc

SEQ ID NO: 1042030 - DNA, 25 bp, Homo sapien
ctcattgtcccggactcaaatgatc

SEQ ID NO: 1042031 - DNA, 25 bp, Homo sapien
caagtaatctatcccttatttagca

SEQ ID NO: 1042032 - DNA, 25 bp, Homo sapien
cgtcctcatggctcattatatgcta

SEQ ID NO: 1042033 - DNA, 25 bp, Homo sapien
ggttaaggcactctttttcacagga

SEQ ID NO: 1042034 - DNA, 25 bp, Homo sapien
atggtggcgagagtgacctttgatc

SEQ ID NO: 1042035 - DNA, 25 bp, Homo sapien
ccggaggctcccacatgttatgcaa

SEQ ID NO: 1042036 - DNA, 25 bp, Homo sapien
gcctaggccccatgaaagaactaag

SEQ ID NO: 1042037 - DNA, 25 bp, Homo sapien
caaatgcctgctagagagatgcgct

SEQ ID NO: 1042038 - DNA, 25 bp, Homo sapien
tatacctcagtcaatagcggagctc

SEQ ID NO: 1042039 - DNA, 25 bp, Homo sapien
ggactgtcaggaaaaattagccctc

SEQ ID NO: 1042040 - DNA, 25 bp, Homo sapien
cttggtattgcctctatctgctggg

SEQ ID NO: 1042041 - DNA, 25 bp, Homo sapien
ggaaatgagacctacgtccttggta

SEQ ID NO: 1042042 - DNA, 25 bp, Homo sapien
atcagcaaacaaaggtcagcaggac

SEQ ID NO: 1042043 - DNA, 25 bp, Homo sapien
gaatgaacgaatgctcccgacatgt

SEQ ID NO: 1042044 - DNA, 25 bp, Homo sapien
gcaccagaggagcaaaggttcagcc

SEQ ID NO: 1042045 - DNA, 25 bp, Homo sapien
aaatgcttcccaaggctggttcagg

SEQ ID NO: 1042046 - DNA, 25 bp, Homo sapien
gaggagggtcttgcacatcagctga

SEQ ID NO: 1042047 - DNA, 25 bp, Homo sapien
gcagaatctaacaagcgcagcgtgt

SEQ ID NO: 1042048 - DNA, 25 bp, Homo sapien
ccagcagattaagggtgaagggaca

SEQ ID NO: 1042049 - DNA, 25 bp, Homo sapien
gcctcccgggtgatgaaatcttaat

SEQ ID NO: 1042050 - DNA, 25 bp, Homo sapien
tgtgcaggtgttggcgactcagccc

SEQ ID NO: 1042051 - DNA, 25 bp, Homo sapien
gaggataggccataaagaaacacac

SEQ ID NO: 1042052 - DNA, 25 bp, Homo sapien
gacatgacacgtggcttcactaaga

SEQ ID NO: 1042053 - DNA, 25 bp, Homo sapien
ggcttacctagcatgtccgactgga

SEQ ID NO: 1042054 - DNA, 25 bp, Homo sapien
gagtgagacccaggcttatctgtgg

SEQ ID NO: 1042055 - DNA, 25 bp, Homo sapien
caatggagagtcttccctggtgcca

SEQ ID NO: 1042056 - DNA, 25 bp, Homo sapien
gactctcgtgttatgccaaaggcag

SEQ ID NO: 1042057 - DNA, 25 bp, Homo sapien
ccactccttcaggtgatgggggcga

SEQ ID NO: 1042058 - DNA, 25 bp, Homo sapien
caaaggcagtactttgaggaaacac

SEQ ID NO: 1042059 - DNA, 25 bp, Homo sapien
aaatgaaagttagcctcgaacctgg

SEQ ID NO: 1042060 - DNA, 25 bp, Homo sapien
gtcggtccacgtcaatattctaaag

SEQ ID NO: 1042061 - DNA, 25 bp, Homo sapien
taacgaacacatgtcttactgggtc

SEQ ID NO: 1042062 - DNA, 25 bp, Homo sapien
tggctaacgtgaaagcggaacaggc

SEQ ID NO: 1042063 - DNA, 25 bp, Homo sapien
tacagagggcacactatgggccagg

SEQ ID NO: 1042064 - DNA, 25 bp, Homo sapien
aacaaagcagtacccattgagaggc

SEQ ID NO: 1042065 - DNA, 25 bp, Homo sapien
catgatgagcacaaggagtgtttcc

SEQ ID NO: 1042066 - DNA, 25 bp, Homo sapien
tgtagtccagctcaacaggcatttg

SEQ ID NO: 1042067 - DNA, 25 bp, Homo sapien
tatcatagagagttagctccagctc

SEQ ID NO: 1042068 - DNA, 25 bp, Homo sapien
tgaacgagtccttctataccggtac

SEQ ID NO: 1042069 - DNA, 25 bp, Homo sapien
taagaacaacggtcctcaccttgac

SEQ ID NO: 1042070 - DNA, 25 bp, Homo sapien
tgtttgatggaacaactgggcccca

SEQ ID NO: 1042071 - DNA, 25 bp, Homo sapien
tgtcctcccagatcaagttcaaaga

SEQ ID NO: 1042072 - DNA, 25 bp, Homo sapien
tccgggaacagaggcaatgacttgg

SEQ ID NO: 1042073 - DNA, 25 bp, Homo sapien
cactgtgggcgagagtggaaaaccc

SEQ ID NO: 1042074 - DNA, 25 bp, Homo sapien
aaattggcagatggctccgggaaca

SEQ ID NO: 1042075 - DNA, 25 bp, Homo sapien
catccttcagcaggtgcatgttggg

SEQ ID NO: 1042076 - DNA, 25 bp, Homo sapien
ccttcagcaggtgcatgttgggcat

SEQ ID NO: 1042077 - DNA, 25 bp, Homo sapien
atccttcagcaggtgcatgttgggc

SEQ ID NO: 1042078 - DNA, 25 bp, Homo sapien
tccttcagcaggtgcatgttgggca

SEQ ID NO: 1042079 - DNA, 25 bp, Homo sapien
caagccctaaaggaatgagcacgct

SEQ ID NO: 1042080 - DNA, 25 bp, Homo sapien
tcagctgtgcaagccatatagtcca

SEQ ID NO: 1042081 - DNA, 25 bp, Homo sapien
acaaaagcggccttcgacaagccct

SEQ ID NO: 1042082 - DNA, 25 bp, Homo sapien
ccaataagtctttatggacactgaa

SEQ ID NO: 1042083 - DNA, 25 bp, Homo sapien
atcagagccttggagcggcaacacc

SEQ ID NO: 1042084 - DNA, 25 bp, Homo sapien
tccagggtctattagcaagggttcc

SEQ ID NO: 1042085 - DNA, 25 bp, Homo sapien
tccgggacgaggaacaagagagctc

SEQ ID NO: 1042086 - DNA, 25 bp, Homo sapien
ttgtatgaactgaacgaggcggcca

SEQ ID NO: 1042087 - DNA, 25 bp, Homo sapien
tcaggtctcctgctagcggggcgga

SEQ ID NO: 1042088 - DNA, 25 bp, Homo sapien
caagggtctgtttgcctaatgagat

SEQ ID NO: 1042089 - DNA, 25 bp, Homo sapien
cccacaagggtctgtttgcctaatg

SEQ ID NO: 1042090 - DNA, 25 bp, Homo sapien
actggcccacaagggtctgtttgcc

SEQ ID NO: 1042091 - DNA, 25 bp, Homo sapien
aatggagcatctacgctgtgctggc

SEQ ID NO: 1042092 - DNA, 25 bp, Homo sapien
tcatttcatcaatggagcatctacg

SEQ ID NO: 1042093 - DNA, 25 bp, Homo sapien
ccatcaaggacgtcagggtgaggat

SEQ ID NO: 1042094 - DNA, 25 bp, Homo sapien
agggtgaggattagtcagagaaaaa

SEQ ID NO: 1042095 - DNA, 25 bp, Homo sapien
catcagagcggctggcaactaatgc

SEQ ID NO: 1042096 - DNA, 25 bp, Homo sapien
tgagaatattggctggaccctaaca

SEQ ID NO: 1042097 - DNA, 25 bp, Homo sapien
ctagtgttgctatttctgaaagccg

SEQ ID NO: 1042098 - DNA, 25 bp, Homo sapien
tctggaataattgcacctgtgtgtc

SEQ ID NO: 1042099 - DNA, 25 bp, Homo sapien
aaattttatctcatggatcttcacg

SEQ ID NO: 1042100 - DNA, 25 bp, Homo sapien
gaaattttatctcatggatcttcac

SEQ ID NO: 1042101 - DNA, 25 bp, Homo sapien
gaattgcagttcttaatacatggaa

SEQ ID NO: 1042102 - DNA, 25 bp, Homo sapien
acaggcgtgagaattgcagttctta

SEQ ID NO: 1042103 - DNA, 25 bp, Homo sapien
aaacagcagccccattattctgcat

SEQ ID NO: 1042104 - DNA, 25 bp, Homo sapien
cccacactctggtttagccatgcta

SEQ ID NO: 1042105 - DNA, 25 bp, Homo sapien
ccaaagagaccaccctatgtgaaac

SEQ ID NO: 1042106 - DNA, 25 bp, Homo sapien
cacactctggtttagccatgctagc

SEQ ID NO: 1042107 - DNA, 25 bp, Homo sapien
ggcctcaggaactagatcgatatca

SEQ ID NO: 1042108 - DNA, 25 bp, Homo sapien
tcttggcagatacgagcagggattt

SEQ ID NO: 1042109 - DNA, 25 bp, Homo sapien
tgctagaaaccacctcacgagatgg

SEQ ID NO: 1042110 - DNA, 25 bp, Homo sapien
caagaggccgcaaaaggtggacctg

SEQ ID NO: 1042111 - DNA, 25 bp, Homo sapien
tgcttacacggtactgcttaattga

SEQ ID NO: 1042112 - DNA, 25 bp, Homo sapien
gacttgcttacacggtactgcttaa

SEQ ID NO: 1042113 - DNA, 25 bp, Homo sapien
gcttacacggtactgcttaattgat

SEQ ID NO: 1042114 - DNA, 25 bp, Homo sapien
ctgggacttgcttacacggtactgc

SEQ ID NO: 1042115 - DNA, 25 bp, Homo sapien
tcagtgattcttaactgggagcaat

SEQ ID NO: 1042116 - DNA, 25 bp, Homo sapien
gacaaagaatgacctggctatgtac

SEQ ID NO: 1042117 - DNA, 25 bp, Homo sapien
tgtgtctggcctacacaggtgtatt

SEQ ID NO: 1042118 - DNA, 25 bp, Homo sapien
ctgaagttgagaaacctgtagtcat

SEQ ID NO: 1042119 - DNA, 25 bp, Homo sapien
ggtctacacattcactggctgcctg

SEQ ID NO: 1042120 - DNA, 25 bp, Homo sapien
tgaggttggaacgtgagtctgctaa

SEQ ID NO: 1042121 - DNA, 25 bp, Homo sapien
tcaggtgactaaccaacccgttgac

SEQ ID NO: 1042122 - DNA, 25 bp, Homo sapien
taactcaagactgagcctctaggcc

SEQ ID NO: 1042123 - DNA, 25 bp, Homo sapien
acatgtggcgcacgggcctgtctgt

SEQ ID NO: 1042124 - DNA, 25 bp, Homo sapien
tgctgcctggagtgcgtgcagacat

SEQ ID NO: 1042125 - DNA, 25 bp, Homo sapien
tcgggaatctgacatgtggcgcacg

SEQ ID NO: 1042126 - DNA, 25 bp, Homo sapien
tgagcactggcttctctagtcggga

SEQ ID NO: 1042127 - DNA, 25 bp, Homo sapien
tgaaagccttgggatccaccaaaag

SEQ ID NO: 1042128 - DNA, 25 bp, Homo sapien
gactggcaggagctaggtaagcccc

SEQ ID NO: 1042129 - DNA, 25 bp, Homo sapien
gatggatatggagcgctcactcgca

SEQ ID NO: 1042130 - DNA, 25 bp, Homo sapien
gccactcatggctaaaggtcaggaa

SEQ ID NO: 1042131 - DNA, 25 bp, Homo sapien
gcttaggcccacagcaaatcagtac

SEQ ID NO: 1042132 - DNA, 25 bp, Homo sapien
gcaaatcagtacagagctgggcaag

SEQ ID NO: 1042133 - DNA, 25 bp, Homo sapien
ctctctccctcggaatttagaacct

SEQ ID NO: 1042134 - DNA, 25 bp, Homo sapien
gcctagagagggaacgtgattgctt

SEQ ID NO: 1042135 - DNA, 25 bp, Homo sapien
tcccagggacatagagagcatgaat

SEQ ID NO: 1042136 - DNA, 25 bp, Homo sapien
tcccactcggaaatgcaggatgccg

SEQ ID NO: 1042137 - DNA, 25 bp, Homo sapien
agtgctcgctctttcaagtcccagg

SEQ ID NO: 1042138 - DNA, 25 bp, Homo sapien
cacagaggaggagtccatcagggac

SEQ ID NO: 1042139 - DNA, 25 bp, Homo sapien
ttttgaaaaaattaggctgggcatg

SEQ ID NO: 1042140 - DNA, 25 bp, Homo sapien
ggagttggagaccagcctgggcaac

SEQ ID NO: 1042141 - DNA, 25 bp, Homo sapien
aaggcaggaggattgcttgagcccc

SEQ ID NO: 1042142 - DNA, 25 bp, Homo sapien
ggctgaggtgggagggaggtattat

SEQ ID NO: 1042143 - DNA, 25 bp, Homo sapien
tctaagtccctttttgaagagttca

SEQ ID NO: 1042144 - DNA, 25 bp, Homo sapien
tggctgcagtcgccatccgctcgga

SEQ ID NO: 1042145 - DNA, 25 bp, Homo sapien
gaccagggctctcagtccggccgga

SEQ ID NO: 1042146 - DNA, 25 bp, Homo sapien
ctgctgcacgcgaggaattcggccg

SEQ ID NO: 1042147 - DNA, 25 bp, Homo sapien
ccgcggagcctctcacgtgggaacg

SEQ ID NO: 1042148 - DNA, 25 bp, Homo sapien
tacatgcaaatgtgctgacgttcca

SEQ ID NO: 1042149 - DNA, 25 bp, Homo sapien
acgggatccccagggcgatggcttc

SEQ ID NO: 1042150 - DNA, 25 bp, Homo sapien
tatctgctgggactaaaatctgtct

SEQ ID NO: 1042151 - DNA, 25 bp, Homo sapien
ttcggccgggtttaatgacatgttg

SEQ ID NO: 1042152 - DNA, 25 bp, Homo sapien
tggcacccgcaacataagacgcact

SEQ ID NO: 1042153 - DNA, 25 bp, Homo sapien
gcactcacggagagtaaatccatta

SEQ ID NO: 1042154 - DNA, 25 bp, Homo sapien
attaaaataactccacgcccgcaca

SEQ ID NO: 1042155 - DNA, 25 bp, Homo sapien
aggaggcaagcctgaccttccctct

SEQ ID NO: 1042156 - DNA, 25 bp, Homo sapien
agagaaagcctggagtccccacctt

SEQ ID NO: 1042157 - DNA, 25 bp, Homo sapien
tccaaaaagcagacgagagaaagcc

SEQ ID NO: 1042158 - DNA, 25 bp, Homo sapien
tagaagccgccacaagggagacaga

SEQ ID NO: 1042159 - DNA, 25 bp, Homo sapien
gatatcctctaactggcctctcttg

SEQ ID NO: 1042160 - DNA, 25 bp, Homo sapien
tcttctggttccgaatttcctccaa

SEQ ID NO: 1042161 - DNA, 25 bp, Homo sapien
acactcttctggttccgaatttcct

SEQ ID NO: 1042162 - DNA, 25 bp, Homo sapien
tccccagtgtccagcacgtagactg

SEQ ID NO: 1042163 - DNA, 25 bp, Homo sapien
gtgccaggtggagggtgtttcccaa

SEQ ID NO: 1042164 - DNA, 25 bp, Homo sapien
tgcttaggccagactcagtgtcagc

SEQ ID NO: 1042165 - DNA, 25 bp, Homo sapien
tccagcacgtagactgaggacgggc

SEQ ID NO: 1042166 - DNA, 25 bp, Homo sapien
gcctccgaatccaagaagcaacaaa

SEQ ID NO: 1042167 - DNA, 25 bp, Homo sapien
aagcaacaaaagacgagaccacggg

SEQ ID NO: 1042168 - DNA, 25 bp, Homo sapien
gcccaaactagctgggagcctgagc

SEQ ID NO: 1042169 - DNA, 25 bp, Homo sapien
tgcctgtgataaagttacagcccaa

SEQ ID NO: 1042170 - DNA, 25 bp, Homo sapien
gggatgcaggtttgccccttggtca

SEQ ID NO: 1042171 - DNA, 25 bp, Homo sapien
ttgccccttggtcagccgctggtgc

SEQ ID NO: 1042172 - DNA, 25 bp, Homo sapien
tggtcagccgctggtgcacccagga

SEQ ID NO: 1042173 - DNA, 25 bp, Homo sapien
cagggatgcaggtttgccccttggt

SEQ ID NO: 1042174 - DNA, 25 bp, Homo sapien
gggaggcatccgtgactgctccaga

SEQ ID NO: 1042175 - DNA, 25 bp, Homo sapien
ggaggcatccgtgactgctccagaa

SEQ ID NO: 1042176 - DNA, 25 bp, Homo sapien
gaggcatccgtgactgctccagaac

SEQ ID NO: 1042177 - DNA, 25 bp, Homo sapien
ctggtgggagggagaagtcaggcca

SEQ ID NO: 1042178 - DNA, 25 bp, Homo sapien
tggtgggagggagaagtcaggccag

SEQ ID NO: 1042179 - DNA, 25 bp, Homo sapien
cctggtgggagggagaagtcaggcc

SEQ ID NO: 1042180 - DNA, 25 bp, Homo sapien
gtgggagggagaagtcaggccagac

SEQ ID NO: 1042181 - DNA, 25 bp, Homo sapien
tgacagcaagtgcttatgcagcccc

SEQ ID NO: 1042182 - DNA, 25 bp, Homo sapien
ctcagcgtgctcagctctatcaggg

SEQ ID NO: 1042183 - DNA, 25 bp, Homo sapien
cagcaagtgcttatgcagccccttg

SEQ ID NO: 1042184 - DNA, 25 bp, Homo sapien
gctcagctctatcagggatgtgcca

SEQ ID NO: 1042185 - DNA, 25 bp, Homo sapien
agcacccaaaacaccagctgctgtt

SEQ ID NO: 1042186 - DNA, 25 bp, Homo sapien
actgagaggagccagatgccgtctg

SEQ ID NO: 1042187 - DNA, 25 bp, Homo sapien
tggagcacccaaaacaccagctgct

SEQ ID NO: 1042188 - DNA, 25 bp, Homo sapien
gactgagaggagccagatgccgtct

SEQ ID NO: 1042189 - DNA, 25 bp, Homo sapien
gggaacattcttccttaggacgtgc

SEQ ID NO: 1042190 - DNA, 25 bp, Homo sapien
cattcttccttaggacgtgcaagag

SEQ ID NO: 1042191 - DNA, 25 bp, Homo sapien
ccttaggacgtgcaagagaaggtac

SEQ ID NO: 1042192 - DNA, 25 bp, Homo sapien
caaagagctcccagtaggggacgag

SEQ ID NO: 1042193 - DNA, 25 bp, Homo sapien
cagtggttctggaactggatggcct

SEQ ID NO: 1042194 - DNA, 25 bp, Homo sapien
gaagatcacaatagtattcatctcc

SEQ ID NO: 1042195 - DNA, 25 bp, Homo sapien
taaaaagccccagcaagcggcctgg

SEQ ID NO: 1042196 - DNA, 25 bp, Homo sapien
cttgggtagttgtttgaccctggca

SEQ ID NO: 1042197 - DNA, 25 bp, Homo sapien
cagacaaaggtaccacactcaccag

SEQ ID NO: 1042198 - DNA, 25 bp, Homo sapien
caggtccccttgagaataaacagac

SEQ ID NO: 1042199 - DNA, 25 bp, Homo sapien
tattcattaagcaggtccccttgag

SEQ ID NO: 1042200 - DNA, 25 bp, Homo sapien
gagaataaacagacaaaggtaccac

SEQ ID NO: 1042201 - DNA, 25 bp, Homo sapien
tgagcagtgacaaggtgacaccgtg

SEQ ID NO: 1042202 - DNA, 25 bp, Homo sapien
gtttctgcagcacttaaatccaacc

SEQ ID NO: 1042203 - DNA, 25 bp, Homo sapien
aggaaaatagggtctaatgagcagt

SEQ ID NO: 1042204 - DNA, 25 bp, Homo sapien
tgacaccgtgggcagaggtttctgc

SEQ ID NO: 1042205 - DNA, 25 bp, Homo sapien
aaacagaacttgtgcatttgcacct

SEQ ID NO: 1042206 - DNA, 25 bp, Homo sapien
tacaaacagaacttgtgcatttgca

SEQ ID NO: 1042207 - DNA, 25 bp, Homo sapien
acagaacttgtgcatttgcacctga

SEQ ID NO: 1042208 - DNA, 25 bp, Homo sapien
caaacagaacttgtgcatttgcacc

SEQ ID NO: 1042209 - DNA, 25 bp, Homo sapien
cctggagccgcgacacttcttcccg

SEQ ID NO: 1042210 - DNA, 25 bp, Homo sapien
ctggagccgcgacacttcttcccgc

SEQ ID NO: 1042211 - DNA, 25 bp, Homo sapien
tggagccgcgacacttcttcccgca

SEQ ID NO: 1042212 - DNA, 25 bp, Homo sapien
ggagccgcgacacttcttcccgcag

SEQ ID NO: 1042213 - DNA, 25 bp, Homo sapien
tggaccctgagctcggtggccgaga

SEQ ID NO: 1042214 - DNA, 25 bp, Homo sapien
tttggctctggctagctcctgctcc

SEQ ID NO: 1042215 - DNA, 25 bp, Homo sapien
tcctccaggtccttcgccaacatct

SEQ ID NO: 1042216 - DNA, 25 bp, Homo sapien
tcagaggacttgccgccctgcgact

SEQ ID NO: 1042217 - DNA, 25 bp, Homo sapien
cctgtgtccatctgcgtcacttccc

SEQ ID NO: 1042218 - DNA, 25 bp, Homo sapien
aagatgcagaattccactcgaagaa

SEQ ID NO: 1042219 - DNA, 25 bp, Homo sapien
gagacccctgtgtccatctgcgtca

SEQ ID NO: 1042220 - DNA, 25 bp, Homo sapien
tccactcgaagaagggacagggcag

SEQ ID NO: 1042221 - DNA, 25 bp, Homo sapien
catatggacaatgtgtgatggtcac

SEQ ID NO: 1042222 - DNA, 25 bp, Homo sapien
ctcacatccagccatatggacaatg

SEQ ID NO: 1042223 - DNA, 25 bp, Homo sapien
caatgtgtgatggtcacactggagg

SEQ ID NO: 1042224 - DNA, 25 bp, Homo sapien
tgatggtcacactggaggaaggaat

SEQ ID NO: 1042225 - DNA, 25 bp, Homo sapien
gcagagaaatcagcgtagccacact

SEQ ID NO: 1042226 - DNA, 25 bp, Homo sapien
tgcctgagttctccaagcactgtgg

SEQ ID NO: 1042227 - DNA, 25 bp, Homo sapien
cactgacaggttacatgatggcttc

SEQ ID NO: 1042228 - DNA, 25 bp, Homo sapien
gaatcaatgcagaccccaaaggctg

SEQ ID NO: 1042229 - DNA, 25 bp, Homo sapien
ctggtcaaagacgtggaggttggcg

SEQ ID NO: 1042230 - DNA, 25 bp, Homo sapien
gtcaaagacgtggaggttggcgtct

SEQ ID NO: 1042231 - DNA, 25 bp, Homo sapien
caaagacgtggaggttggcgtctct

SEQ ID NO: 1042232 - DNA, 25 bp, Homo sapien
tggtcaaagacgtggaggttggcgt

SEQ ID NO: 1042233 - DNA, 25 bp, Homo sapien
gaagagcacataggggtgagaatcc

SEQ ID NO: 1042234 - DNA, 25 bp, Homo sapien
gcacataggggtgagaatcctgtac

SEQ ID NO: 1042235 - DNA, 25 bp, Homo sapien
aagagcacataggggtgagaatcct

SEQ ID NO: 1042236 - DNA, 25 bp, Homo sapien
gagcacataggggtgagaatcctgt

SEQ ID NO: 1042237 - DNA, 25 bp, Homo sapien
cctggtgacatctgcaaaggcagcc

SEQ ID NO: 1042238 - DNA, 25 bp, Homo sapien
tgtctgcaggcctggtgacatctgc

SEQ ID NO: 1042239 - DNA, 25 bp, Homo sapien
ggtgacatctgcaaaggcagccagg

SEQ ID NO: 1042240 - DNA, 25 bp, Homo sapien
caggcctggtgacatctgcaaaggc

SEQ ID NO: 1042241 - DNA, 25 bp, Homo sapien
accactggcatttccgggggctgga

SEQ ID NO: 1042242 - DNA, 25 bp, Homo sapien
agccgagaccactggcatttccggg

SEQ ID NO: 1042243 - DNA, 25 bp, Homo sapien
ctgcagccgagaccactggcatttc

SEQ ID NO: 1042244 - DNA, 25 bp, Homo sapien
ccgggggctggagcatgctcaatgc

SEQ ID NO: 1042245 - DNA, 25 bp, Homo sapien
ttctgcagaatccatctctgacctt

SEQ ID NO: 1042246 - DNA, 25 bp, Homo sapien
cattctgcagaatccatctctgacc

SEQ ID NO: 1042247 - DNA, 25 bp, Homo sapien
tcattctgcagaatccatctctgac

SEQ ID NO: 1042248 - DNA, 25 bp, Homo sapien
ctgcagaatccatctctgacctttc

SEQ ID NO: 1042249 - DNA, 25 bp, Homo sapien
gctgcggggacaggagcaatcctgt

SEQ ID NO: 1042250 - DNA, 25 bp, Homo sapien
tgcggggacaggagcaatcctgtgg

SEQ ID NO: 1042251 - DNA, 25 bp, Homo sapien
ccagctgcggggacaggagcaatcc

SEQ ID NO: 1042252 - DNA, 25 bp, Homo sapien
cagctgcggggacaggagcaatcct

SEQ ID NO: 1042253 - DNA, 25 bp, Homo sapien
ctgaagttgctcacccatctgagcc

SEQ ID NO: 1042254 - DNA, 25 bp, Homo sapien
gaagatcttgaagaaaagctctgat

SEQ ID NO: 1042255 - DNA, 25 bp, Homo sapien
tgctcccaaaccacatccactgtct

SEQ ID NO: 1042256 - DNA, 25 bp, Homo sapien
agatcttgaagaaaagctctgattc

SEQ ID NO: 1042257 - DNA, 25 bp, Homo sapien
ggagtccctttcagccagtgcctgg

SEQ ID NO: 1042258 - DNA, 25 bp, Homo sapien
caaaagagcataatgatggccccaa

SEQ ID NO: 1042259 - DNA, 25 bp, Homo sapien
cattccatatgagaaggcccttttc

SEQ ID NO: 1042260 - DNA, 25 bp, Homo sapien
gagagaaccctggtacctaacagta

SEQ ID NO: 1042261 - DNA, 25 bp, Homo sapien
tcgcatgcagtggtaagcgtgccca

SEQ ID NO: 1042262 - DNA, 25 bp, Homo sapien
acagctggctggacggacttttcaa

SEQ ID NO: 1042263 - DNA, 25 bp, Homo sapien
tcctgactattggatgtaccccggg

SEQ ID NO: 1042264 - DNA, 25 bp, Homo sapien
tgtggcacaacgagggacaaactgc

SEQ ID NO: 1042265 - DNA, 25 bp, Homo sapien
taacatgcaatgctcgattctgatg

SEQ ID NO: 1042266 - DNA, 25 bp, Homo sapien
ttaaacatcgatgcctatctcctct

SEQ ID NO: 1042267 - DNA, 25 bp, Homo sapien
gcaccacttgctctcgtctaacatg

SEQ ID NO: 1042268 - DNA, 25 bp, Homo sapien
tctgctccaatgcaaagcgccttct

SEQ ID NO: 1042269 - DNA, 25 bp, Homo sapien
caacaacatgaaagccctggcaagg

SEQ ID NO: 1042270 - DNA, 25 bp, Homo sapien
taaagtcacacgcagtaagacctgg

SEQ ID NO: 1042271 - DNA, 25 bp, Homo sapien
tccgaggtagcagccaaagccattt

SEQ ID NO: 1042272 - DNA, 25 bp, Homo sapien
gagcattgtgagcaccttggaggca

SEQ ID NO: 1042273 - DNA, 25 bp, Homo sapien
atcataaaaagtcgattctcaggtg

SEQ ID NO: 1042274 - DNA, 25 bp, Homo sapien
cagctcaaaagaataatcaccttta

SEQ ID NO: 1042275 - DNA, 25 bp, Homo sapien
agaataatcacctttaataatggca

SEQ ID NO: 1042276 - DNA, 25 bp, Homo sapien
caatcataaaaagtcgattctcagg

SEQ ID NO: 1042277 - DNA, 25 bp, Homo sapien
gagttctccataagcacactgtcac

SEQ ID NO: 1042278 - DNA, 25 bp, Homo sapien
agcacactgtcacatggcgccctcc

SEQ ID NO: 1042279 - DNA, 25 bp, Homo sapien
cacactgtcacatggcgccctccct

SEQ ID NO: 1042280 - DNA, 25 bp, Homo sapien
cactgtcacatggcgccctccctct

SEQ ID NO: 1042281 - DNA, 25 bp, Homo sapien
gtagaacccgcagctgtgcacagag

SEQ ID NO: 1042282 - DNA, 25 bp, Homo sapien
caggaccatccaggtagaacccgca

SEQ ID NO: 1042283 - DNA, 25 bp, Homo sapien
aggtagaacccgcagctgtgcacag

SEQ ID NO: 1042284 - DNA, 25 bp, Homo sapien
accatccaggtagaacccgcagctg

SEQ ID NO: 1042285 - DNA, 25 bp, Homo sapien
caggcgatgcaggtgatgacaagtc

SEQ ID NO: 1042286 - DNA, 25 bp, Homo sapien
gggttgaccgtatcaccgtctccat

SEQ ID NO: 1042287 - DNA, 25 bp, Homo sapien
tgaggcctccccttttctacaagag

SEQ ID NO: 1042288 - DNA, 25 bp, Homo sapien
acaagtcttcgcttgacctccaggg

SEQ ID NO: 1042289 - DNA, 25 bp, Homo sapien
caaacatgcgctcagaggtgaggag

SEQ ID NO: 1042290 - DNA, 25 bp, Homo sapien
cctggacaaacatgcgctcagaggt

SEQ ID NO: 1042291 - DNA, 25 bp, Homo sapien
agggaggaatcggtccacgtcagac

SEQ ID NO: 1042292 - DNA, 25 bp, Homo sapien
ggtccacgtcagacgatcccagctg

SEQ ID NO: 1042293 - DNA, 25 bp, Homo sapien
ctcatagttgcggatgaagtctcgg

SEQ ID NO: 1042294 - DNA, 25 bp, Homo sapien
ttaagcgcttccgatcagctttcat

SEQ ID NO: 1042295 - DNA, 25 bp, Homo sapien
ggctcaccaggtctgtcttctcgcc

SEQ ID NO: 1042296 - DNA, 25 bp, Homo sapien
atagttgcggatgaagtctcggagc

SEQ ID NO: 1042297 - DNA, 25 bp, Homo sapien
tatgggctggttctctggccccact

SEQ ID NO: 1042298 - DNA, 25 bp, Homo sapien
ggtcagcttggagcctgtcttctgc

SEQ ID NO: 1042299 - DNA, 25 bp, Homo sapien
tcagcttggagcctgtcttctgccc

SEQ ID NO: 1042300 - DNA, 25 bp, Homo sapien
agcacgtcactgaaggctatgggct

SEQ ID NO: 1042301 - DNA, 25 bp, Homo sapien
tccagctccttcatccggttgtcct

SEQ ID NO: 1042302 - DNA, 25 bp, Homo sapien
gcctccttggcttggcgccgcagct

SEQ ID NO: 1042303 - DNA, 25 bp, Homo sapien
ttggccagcgctttgaccgcatcct

SEQ ID NO: 1042304 - DNA, 25 bp, Homo sapien
gagcgcagtgccgtggcgtggtctg

SEQ ID NO: 1042305 - DNA, 25 bp, Homo sapien
tctccgatgtgagtcggtgccagac

SEQ ID NO: 1042306 - DNA, 25 bp, Homo sapien
ctaggtctccgatgtgagtcggtgc

SEQ ID NO: 1042307 - DNA, 25 bp, Homo sapien
aggtctccgatgtgagtcggtgcca

SEQ ID NO: 1042308 - DNA, 25 bp, Homo sapien
tgagtcggtgccagacgtcccggct

SEQ ID NO: 1042309 - DNA, 25 bp, Homo sapien
tagggtgggattaagactccactcc

SEQ ID NO: 1042310 - DNA, 25 bp, Homo sapien
caaagggtacgcatctcctgggaaa

SEQ ID NO: 1042311 - DNA, 25 bp, Homo sapien
taaaagttgctaccactctgagaga

SEQ ID NO: 1042312 - DNA, 25 bp, Homo sapien
cagaacagttgagtgggcagcccaa

SEQ ID NO: 1042313 - DNA, 25 bp, Homo sapien
tgccaacattcacacgggcagatgc

SEQ ID NO: 1042314 - DNA, 25 bp, Homo sapien
aacctgagttgccaacattcacacg

SEQ ID NO: 1042315 - DNA, 25 bp, Homo sapien
ccaacattcacacgggcagatgcat

SEQ ID NO: 1042316 - DNA, 25 bp, Homo sapien
gagttgccaacattcacacgggcag

SEQ ID NO: 1042317 - DNA, 25 bp, Homo sapien
tcctggttgccattgagcaccgtct

SEQ ID NO: 1042318 - DNA, 25 bp, Homo sapien
gggacgtccttggtcagcgtagcta

SEQ ID NO: 1042319 - DNA, 25 bp, Homo sapien
tgagtggtagagagtctgttgactc

SEQ ID NO: 1042320 - DNA, 25 bp, Homo sapien
ttgactctgccggatggctgcggtc

SEQ ID NO: 1042321 - DNA, 25 bp, Homo sapien
ctgcagacgtgcaacaggacagcga

SEQ ID NO: 1042322 - DNA, 25 bp, Homo sapien
cgtgcaacaggacagcgagaagttt

SEQ ID NO: 1042323 - DNA, 25 bp, Homo sapien
aagtttggagcctgttccatgggca

SEQ ID NO: 1042324 - DNA, 25 bp, Homo sapien
tccatgggcagtaggtgcagatgct

SEQ ID NO: 1042325 - DNA, 25 bp, Homo sapien
gttcccaacttgcatctatcacata

SEQ ID NO: 1042326 - DNA, 25 bp, Homo sapien
tgttcccaacttgcatctatcacat

SEQ ID NO: 1042327 - DNA, 25 bp, Homo sapien
atctatcacataagggcaactactt

SEQ ID NO: 1042328 - DNA, 25 bp, Homo sapien
acataagggcaactacttgcagaag

SEQ ID NO: 1042329 - DNA, 25 bp, Homo sapien
gatgcgtcggagatgacagagggct

SEQ ID NO: 1042330 - DNA, 25 bp, Homo sapien
gagttgatgtcgctcggtgtggacg

SEQ ID NO: 1042331 - DNA, 25 bp, Homo sapien
accggtcgccttcggcggcagatgc

SEQ ID NO: 1042332 - DNA, 25 bp, Homo sapien
agagggagtgtgtccggtgtcgagg

SEQ ID NO: 1042333 - DNA, 25 bp, Homo sapien
ggtggacgagaggaaacagcgagta

SEQ ID NO: 1042334 - DNA, 25 bp, Homo sapien
agaggaaacagcgagtatggcttca

SEQ ID NO: 1042335 - DNA, 25 bp, Homo sapien
aacagcgagtatggcttcaccccgc

SEQ ID NO: 1042336 - DNA, 25 bp, Homo sapien
acgagaggaaacagcgagtatggct

SEQ ID NO: 1042337 - DNA, 25 bp, Homo sapien
aggaaatgcattcgccagagtgctc

SEQ ID NO: 1042338 - DNA, 25 bp, Homo sapien
caggaaatgcattcgccagagtgct

SEQ ID NO: 1042339 - DNA, 25 bp, Homo sapien
ctccccacatccatcgcttcttgca

SEQ ID NO: 1042340 - DNA, 25 bp, Homo sapien
cacatccatcgcttcttgcaaaagg

SEQ ID NO: 1042341 - DNA, 25 bp, Homo sapien
cactgctggctgtaggtataactcc

SEQ ID NO: 1042342 - DNA, 25 bp, Homo sapien
gaaaaagccgtctcgtgcatttgag

SEQ ID NO: 1042343 - DNA, 25 bp, Homo sapien
tgaggaggccatctaaagtccccgg

SEQ ID NO: 1042344 - DNA, 25 bp, Homo sapien
tataaaacagagaatcccgccaggt

SEQ ID NO: 1042345 - DNA, 25 bp, Homo sapien
caagcataatgccaaggtccgtcaa

SEQ ID NO: 1042346 - DNA, 25 bp, Homo sapien
caaacttgggagaccacgtagcctc

SEQ ID NO: 1042347 - DNA, 25 bp, Homo sapien
taattggatgcagagctacagctcc

SEQ ID NO: 1042348 - DNA, 25 bp, Homo sapien
tcttgctggtggacgtcagatgccc

SEQ ID NO: 1042349 - DNA, 25 bp, Homo sapien
ttcttctgaactgggccgggactgt

SEQ ID NO: 1042350 - DNA, 25 bp, Homo sapien
tagggttgtgcaggttcttctgaac

SEQ ID NO: 1042351 - DNA, 25 bp, Homo sapien
tgtgcaggttcttctgaactgggcc

SEQ ID NO: 1042352 - DNA, 25 bp, Homo sapien
tacaatagggttgtgcaggttcttc

SEQ ID NO: 1042353 - DNA, 25 bp, Homo sapien
catcaggacggaggacatgtgtgca

SEQ ID NO: 1042354 - DNA, 25 bp, Homo sapien
ggaattttatagagctggctgccag

SEQ ID NO: 1042355 - DNA, 25 bp, Homo sapien
aggacggaggacatgtgtgcactca

SEQ ID NO: 1042356 - DNA, 25 bp, Homo sapien
tgcctgggctatgagcttttcaata

SEQ ID NO: 1042357 - DNA, 25 bp, Homo sapien
gagatggagccgaatcccatcttct

SEQ ID NO: 1042358 - DNA, 25 bp, Homo sapien
gggacttccgctgcttccctctggc

SEQ ID NO: 1042359 - DNA, 25 bp, Homo sapien
tccctctggcgaagacgcgggagat

SEQ ID NO: 1042360 - DNA, 25 bp, Homo sapien
acttccgctgcttccctctggcgaa

SEQ ID NO: 1042361 - DNA, 25 bp, Homo sapien
gcgtcctcctctatgtaataatcag

SEQ ID NO: 1042362 - DNA, 25 bp, Homo sapien
tctatgtaataatcaggggcggtac

SEQ ID NO: 1042363 - DNA, 25 bp, Homo sapien
gtcctcctctatgtaataatcaggg

SEQ ID NO: 1042364 - DNA, 25 bp, Homo sapien
gtccgcgtcctcctctatgtaataa

SEQ ID NO: 1042365 - DNA, 25 bp, Homo sapien
catcaattacagaggtggcgacgca

SEQ ID NO: 1042366 - DNA, 25 bp, Homo sapien
ttttcacttgttagaggcgctcggc

SEQ ID NO: 1042367 - DNA, 25 bp, Homo sapien
tcggagaacagactcaggccagggt

SEQ ID NO: 1042368 - DNA, 25 bp, Homo sapien
tgacaggttcacacacggtttgcgg

SEQ ID NO: 1042369 - DNA, 25 bp, Homo sapien
cctatttcaacaagccgaatacact

SEQ ID NO: 1042370 - DNA, 25 bp, Homo sapien
tgcagacccgtcattcacacctatt

SEQ ID NO: 1042371 - DNA, 25 bp, Homo sapien
gacccgtcattcacacctatttcaa

SEQ ID NO: 1042372 - DNA, 25 bp, Homo sapien
caagccgaatacactggagtttagg

SEQ ID NO: 1042373 - DNA, 25 bp, Homo sapien
tggtgcccggctcccacggaccggc

SEQ ID NO: 1042374 - DNA, 25 bp, Homo sapien
gtgcccggctcccacggaccggcat

SEQ ID NO: 1042375 - DNA, 25 bp, Homo sapien
tgacagggctgtcaggccggggtgc

SEQ ID NO: 1042376 - DNA, 25 bp, Homo sapien
gtgcaggccggcagccagtgctggt

SEQ ID NO: 1042377 - DNA, 25 bp, Homo sapien
tgggggcaggggctgggcaggccat

SEQ ID NO: 1042378 - DNA, 25 bp, Homo sapien
tgctgggggcaggggctgggcaggc

SEQ ID NO: 1042379 - DNA, 25 bp, Homo sapien
gctgctgggggcaggggctgggcag

SEQ ID NO: 1042380 - DNA, 25 bp, Homo sapien
ctgggggacgaggctgctgggggca

SEQ ID NO: 1042381 - DNA, 25 bp, Homo sapien
ctgcaacacacaagtgcaggccatg

SEQ ID NO: 1042382 - DNA, 25 bp, Homo sapien
cttgacgtacataggcatggccatc

SEQ ID NO: 1042383 - DNA, 25 bp, Homo sapien
tgctcctcgccttccgacaggctga

SEQ ID NO: 1042384 - DNA, 25 bp, Homo sapien
tgggacataggggtggtcctcacca

SEQ ID NO: 1042385 - DNA, 25 bp, Homo sapien
tcttcacgttctccgtgcaggcctt

SEQ ID NO: 1042386 - DNA, 25 bp, Homo sapien
ctcggcatcacggtagtcctcgatg

SEQ ID NO: 1042387 - DNA, 25 bp, Homo sapien
ggcatcacggtagtcctcgatggcc

SEQ ID NO: 1042388 - DNA, 25 bp, Homo sapien
cagggagctgcacaccccaaggccc

SEQ ID NO: 1042389 - DNA, 25 bp, Homo sapien
catcacggtagtcctcgatggccag

SEQ ID NO: 1042390 - DNA, 25 bp, Homo sapien
gggcccatccataatcagcaatctc

SEQ ID NO: 1042391 - DNA, 25 bp, Homo sapien
catgcccacaattaatgtgctcctg

SEQ ID NO: 1042392 - DNA, 25 bp, Homo sapien
taatcagcaatctccatctgcatgc

SEQ ID NO: 1042393 - DNA, 25 bp, Homo sapien
gggccgcagcttggcgatacgttcc

SEQ ID NO: 1042394 - DNA, 25 bp, Homo sapien
cgcaagtcctttgaatggtccacaa

SEQ ID NO: 1042395 - DNA, 25 bp, Homo sapien
gctgatagcccgtccttgtctgtcg

SEQ ID NO: 1042396 - DNA, 25 bp, Homo sapien
gtgaactcctatggactctgcagag

SEQ ID NO: 1042397 - DNA, 25 bp, Homo sapien
catactgaacctaagcaattgctgg

SEQ ID NO: 1042398 - DNA, 25 bp, Homo sapien
agaaacagacggacgggcagaaatg

SEQ ID NO: 1042399 - DNA, 25 bp, Homo sapien
gacagggatggagccgagagatcaa

SEQ ID NO: 1042400 - DNA, 25 bp, Homo sapien
gaaaggcggcagaaacagacggacg

SEQ ID NO: 1042401 - DNA, 25 bp, Homo sapien
gatggagccgagagatcaagaggaa

SEQ ID NO: 1042402 - DNA, 25 bp, Homo sapien
tcaaccaggtggttctgaaaggcct

SEQ ID NO: 1042403 - DNA, 25 bp, Homo sapien
cctgggagtactgggacaggccaat

SEQ ID NO: 1042404 - DNA, 25 bp, Homo sapien
ggccaatgtcattcagccaggcctt

SEQ ID NO: 1042405 - DNA, 25 bp, Homo sapien
ccagtgatggtccagctcggcagct

SEQ ID NO: 1042406 - DNA, 25 bp, Homo sapien
acttggtacagcagctcgatcccca

SEQ ID NO: 1042407 - DNA, 25 bp, Homo sapien
acttcttggacacgttcaggtgctt

SEQ ID NO: 1042408 - DNA, 25 bp, Homo sapien
gtctcgcttcatcagggaattcagc

SEQ ID NO: 1042409 - DNA, 25 bp, Homo sapien
tggacacgttcaggtgcttctccag

SEQ ID NO: 1042410 - DNA, 25 bp, Homo sapien
cttcaggtcgatgtctcgaacccac

SEQ ID NO: 1042411 - DNA, 25 bp, Homo sapien
gggtcaatgttctgcgtctcgcagc

SEQ ID NO: 1042412 - DNA, 25 bp, Homo sapien
tcgatgtctcgaacccacttgagca

SEQ ID NO: 1042413 - DNA, 25 bp, Homo sapien
tggttggtccacaccacggggtcaa

SEQ ID NO: 1042414 - DNA, 25 bp, Homo sapien
tctgccaggtgtctccggaggatgt

SEQ ID NO: 1042415 - DNA, 25 bp, Homo sapien
gtctccggaggatgtgcttcccact

SEQ ID NO: 1042416 - DNA, 25 bp, Homo sapien
ccatggacgccgctgttggtcaggt

SEQ ID NO: 1042417 - DNA, 25 bp, Homo sapien
ctgggtggaagacggcgctcatctc

SEQ ID NO: 1042418 - DNA, 25 bp, Homo sapien
taaaatcacacgatgatggcggagg

SEQ ID NO: 1042419 - DNA, 25 bp, Homo sapien
ggaagaaggagtgatcatccccatt

SEQ ID NO: 1042420 - DNA, 25 bp, Homo sapien
caagctgaaaaaaccgtggctcaga

SEQ ID NO: 1042421 - DNA, 25 bp, Homo sapien
aaatttcttgtctaaaatcacacga

SEQ ID NO: 1042422 - DNA, 25 bp, Homo sapien
catatacccacataaacatacaaac

SEQ ID NO: 1042423 - DNA, 25 bp, Homo sapien
acatacacaaacaccatctacacat

SEQ ID NO: 1042424 - DNA, 25 bp, Homo sapien
caaacaccatctacacatacataca

SEQ ID NO: 1042425 - DNA, 25 bp, Homo sapien
acatatacccacataaacatacaaa

SEQ ID NO: 1042426 - DNA, 25 bp, Homo sapien
ccacataacagggagggccttgctc

SEQ ID NO: 1042427 - DNA, 25 bp, Homo sapien
caagacgacacagctgttagcggca

SEQ ID NO: 1042428 - DNA, 25 bp, Homo sapien
taggatttggccaactacagcctgc

SEQ ID NO: 1042429 - DNA, 25 bp, Homo sapien
tcaggaaatgccctcatgaatggcc

SEQ ID NO: 1042430 - DNA, 25 bp, Homo sapien
ggccagccttgtacttgagaccgct

SEQ ID NO: 1042431 - DNA, 25 bp, Homo sapien
ccgcgtgacgctggaggccctgcca

SEQ ID NO: 1042432 - DNA, 25 bp, Homo sapien
tacttgagaccgctgctgttctcct

SEQ ID NO: 1042433 - DNA, 25 bp, Homo sapien
tgccagggggcgttccaaaacgctc

SEQ ID NO: 1042434 - DNA, 25 bp, Homo sapien
tctgggcagcctagctgaatgcagg

SEQ ID NO: 1042435 - DNA, 25 bp, Homo sapien
ccttgaaggtacatccagggcatct

SEQ ID NO: 1042436 - DNA, 25 bp, Homo sapien
gcactgtacccaaagcatcgtgaag

SEQ ID NO: 1042437 - DNA, 25 bp, Homo sapien
tgagatccaggtgctactcgaagcc

SEQ ID NO: 1042438 - DNA, 25 bp, Homo sapien
gggtcatcgtctccgcaatcttcgt

SEQ ID NO: 1042439 - DNA, 25 bp, Homo sapien
cgttttgaagagagccatagtcatc

SEQ ID NO: 1042440 - DNA, 25 bp, Homo sapien
tcatcatggaaatcgggatctttgc

SEQ ID NO: 1042441 - DNA, 25 bp, Homo sapien
tgttgtagccttccagacggcactg

SEQ ID NO: 1042442 - DNA, 25 bp, Homo sapien
tatgtacagtgagaacgacacctgg

SEQ ID NO: 1042443 - DNA, 25 bp, Homo sapien
gctgaaaccgcagagtccatcggga

SEQ ID NO: 1042444 - DNA, 25 bp, Homo sapien
tgggcccatctccagctgaacagga

SEQ ID NO: 1042445 - DNA, 25 bp, Homo sapien
gacactgtgacaggtcctctgggcc

SEQ ID NO: 1042446 - DNA, 25 bp, Homo sapien
ggctgctccacagtgacggtcactc

SEQ ID NO: 1042447 - DNA, 25 bp, Homo sapien
agctccgtttaaggctccagggact

SEQ ID NO: 1042448 - DNA, 25 bp, Homo sapien
gctgctccacagtgacggtcactct

SEQ ID NO: 1042449 - DNA, 25 bp, Homo sapien
tcctgggtggatcggcaaacagctc

SEQ ID NO: 1042450 - DNA, 25 bp, Homo sapien
taagatgctgtagccgagagttccc

SEQ ID NO: 1042451 - DNA, 25 bp, Homo sapien
gaatctcagtaaagccaaaccacag

SEQ ID NO: 1042452 - DNA, 25 bp, Homo sapien
tatctgcatctcctagaaatgtggc

SEQ ID NO: 1042453 - DNA, 25 bp, Homo sapien
tgagtcaaactggttttcaaggctg

SEQ ID NO: 1042454 - DNA, 25 bp, Homo sapien
tgtgctcatgggatttatatgtttc

SEQ ID NO: 1042455 - DNA, 25 bp, Homo sapien
gaggcccgaaggcttgagtcaaact

SEQ ID NO: 1042456 - DNA, 25 bp, Homo sapien
catctggtcaatgaactgaggcccg

SEQ ID NO: 1042457 - DNA, 25 bp, Homo sapien
gaacaccacggtcttcggcatgaga

SEQ ID NO: 1042458 - DNA, 25 bp, Homo sapien
gaaggaggtcgagcatcatggttcc

SEQ ID NO: 1042459 - DNA, 25 bp, Homo sapien
gcccaggatcagaagtgtgccctta

SEQ ID NO: 1042460 - DNA, 25 bp, Homo sapien
tcatggttccaacaagtgactcgct

SEQ ID NO: 1042461 - DNA, 25 bp, Homo sapien
ctgagctgtggactgcagcttcagg

SEQ ID NO: 1042462 - DNA, 25 bp, Homo sapien
tcctttctgagctgtggactgcagc

SEQ ID NO: 1042463 - DNA, 25 bp, Homo sapien
agctgtggactgcagcttcaggacc

SEQ ID NO: 1042464 - DNA, 25 bp, Homo sapien
tctcctttctgagctgtggactgca

SEQ ID NO: 1042465 - DNA, 25 bp, Homo sapien
caaaagaggcattcgcggttgcccg

SEQ ID NO: 1042466 - DNA, 25 bp, Homo sapien
gtctccagcaagatcgaaccatgta

SEQ ID NO: 1042467 - DNA, 25 bp, Homo sapien
gaaccatgtaagtgccatttctgac

SEQ ID NO: 1042468 - DNA, 25 bp, Homo sapien
ttcaagtgccctgctacaattctgg

SEQ ID NO: 1042469 - DNA, 25 bp, Homo sapien
cttggacaggatgtagctggtcact

SEQ ID NO: 1042470 - DNA, 25 bp, Homo sapien
ttgccctgcagggaccaagaccaca

SEQ ID NO: 1042471 - DNA, 25 bp, Homo sapien
tacaacagctttccaagaagtgcat

SEQ ID NO: 1042472 - DNA, 25 bp, Homo sapien
ccctctgtagcctgtgacaatcagc

SEQ ID NO: 1042473 - DNA, 25 bp, Homo sapien
tgacgtcaagcttttgggtccctgt

SEQ ID NO: 1042474 - DNA, 25 bp, Homo sapien
cagaaagctgagagtctaccaggca

SEQ ID NO: 1042475 - DNA, 25 bp, Homo sapien
gaggtcacctctggccaaatcttcc

SEQ ID NO: 1042476 - DNA, 25 bp, Homo sapien
ccgggctgtgtagagacgcccttct

SEQ ID NO: 1042477 - DNA, 25 bp, Homo sapien
gagccctccggagcctcgaaaagca

SEQ ID NO: 1042478 - DNA, 25 bp, Homo sapien
gcagtagtatttattgttacagtgt

SEQ ID NO: 1042479 - DNA, 25 bp, Homo sapien
tgttaaaattcactctcggggaagc

SEQ ID NO: 1042480 - DNA, 25 bp, Homo sapien
gaggttgccattgcccacaggcttt

SEQ ID NO: 1042481 - DNA, 25 bp, Homo sapien
tcagggctcgggagattctcctcgc

SEQ ID NO: 1042482 - DNA, 25 bp, Homo sapien
ttgccgaccccactgatgtttctgg

SEQ ID NO: 1042483 - DNA, 25 bp, Homo sapien
tcaaattttgccgaccccactgatg

SEQ ID NO: 1042484 - DNA, 25 bp, Homo sapien
ttttgccgaccccactgatgtttct

SEQ ID NO: 1042485 - DNA, 25 bp, Homo sapien
cgaccccactgatgtttctggcatc

SEQ ID NO: 1042486 - DNA, 25 bp, Homo sapien
cttgggccgtcccacatcagagggc

SEQ ID NO: 1042487 - DNA, 25 bp, Homo sapien
gccttgagggccagcctggattttc

SEQ ID NO: 1042488 - DNA, 25 bp, Homo sapien
ttgggccgtcccacatcagagggcc

SEQ ID NO: 1042489 - DNA, 25 bp, Homo sapien
tgagggccagcctggattttctgct

SEQ ID NO: 1042490 - DNA, 25 bp, Homo sapien
gcaggtaacctcgagcccagggaag

SEQ ID NO: 1042491 - DNA, 25 bp, Homo sapien
tgcagcaggtaacctcgagcccagg

SEQ ID NO: 1042492 - DNA, 25 bp, Homo sapien
accaaatggaggctttgacaacaga

SEQ ID NO: 1042493 - DNA, 25 bp, Homo sapien
aaatggaggctttgacaacagaaac

SEQ ID NO: 1042494 - DNA, 25 bp, Homo sapien
ctgtgtggcagacaaattgtgctca

SEQ ID NO: 1042495 - DNA, 25 bp, Homo sapien
gcaaaattggatagttggaccatta

SEQ ID NO: 1042496 - DNA, 25 bp, Homo sapien
cccactgaaggctgaatcaggtctg

SEQ ID NO: 1042497 - DNA, 25 bp, Homo sapien
gctcacgtagcgcaaagcaaaattg

SEQ ID NO: 1042498 - DNA, 25 bp, Homo sapien
tctggcgcccgaactagggtgggct

SEQ ID NO: 1042499 - DNA, 25 bp, Homo sapien
cagccagaccgccaaaaaacgtgga

SEQ ID NO: 1042500 - DNA, 25 bp, Homo sapien
ttgaattccgagagaggtcaggccg

SEQ ID NO: 1042501 - DNA, 25 bp, Homo sapien
gaactgcgttgctctggcgcccgaa

SEQ ID NO: 1042502 - DNA, 25 bp, Homo sapien
agtctctgctcggatccacggaggc

SEQ ID NO: 1042503 - DNA, 25 bp, Homo sapien
ttcccagcgaggtgagtgaccggca

SEQ ID NO: 1042504 - DNA, 25 bp, Homo sapien
taaaaactgagtcagctcacgccct

SEQ ID NO: 1042505 - DNA, 25 bp, Homo sapien
cgttttcccagcctgcgagtggcag

SEQ ID NO: 1042506 - DNA, 25 bp, Homo sapien
ggcggtgccggccaggagcggcctc

SEQ ID NO: 1042507 - DNA, 25 bp, Homo sapien
tcggctgggcggtccgggactgcgg

SEQ ID NO: 1042508 - DNA, 25 bp, Homo sapien
gttggggacgcaggaagcgcggcct

SEQ ID NO: 1042509 - DNA, 25 bp, Homo sapien
tagccgagggaacgcagtggtggag

SEQ ID NO: 1042510 - DNA, 25 bp, Homo sapien
tgttaaggtacaatccctgctgcct

SEQ ID NO: 1042511 - DNA, 25 bp, Homo sapien
tttgtttaaagtgatggcgccggtg

SEQ ID NO: 1042512 - DNA, 25 bp, Homo sapien
gaaaacaataattacccacaggcag

SEQ ID NO: 1042513 - DNA, 25 bp, Homo sapien
cagtattggcctgtgttaacgaagc

SEQ ID NO: 1042514 - DNA, 25 bp, Homo sapien
gaactgagactctaaagactttaaa

SEQ ID NO: 1042515 - DNA, 25 bp, Homo sapien
caatgcctggaatatgaactgagac

SEQ ID NO: 1042516 - DNA, 25 bp, Homo sapien
caatctgtgttaagaatactatcag

SEQ ID NO: 1042517 - DNA, 25 bp, Homo sapien
ttaagaatactatcaggttggccag

SEQ ID NO: 1042518 - DNA, 25 bp, Homo sapien
gatttgtagtgattgccacggccca

SEQ ID NO: 1042519 - DNA, 25 bp, Homo sapien
tgtttgcaaacctggatcccgctgt

SEQ ID NO: 1042520 - DNA, 25 bp, Homo sapien
gaagaaatctttgcagccggcagac

SEQ ID NO: 1042521 - DNA, 25 bp, Homo sapien
tactgcccagtaagggtggaccctg

SEQ ID NO: 1042522 - DNA, 25 bp, Homo sapien
ataagatgggacgatggaaagcagc

SEQ ID NO: 1042523 - DNA, 25 bp, Homo sapien
ccatgaacttgaacgtgaagacaac

SEQ ID NO: 1042524 - DNA, 25 bp, Homo sapien
tgtagaccctcacgtgaccactgag

SEQ ID NO: 1042525 - DNA, 25 bp, Homo sapien
gggctccttgagcattctccctgca

SEQ ID NO: 1042526 - DNA, 25 bp, Homo sapien
agaaggcaactcttcatgctagtct

SEQ ID NO: 1042527 - DNA, 25 bp, Homo sapien
ttatttgaggagactcagggcaggc

SEQ ID NO: 1042528 - DNA, 25 bp, Homo sapien
ctgttgttatttgaggagactcagg

SEQ ID NO: 1042529 - DNA, 25 bp, Homo sapien
cttcatgctagtcttgagttaaaga

SEQ ID NO: 1042530 - DNA, 25 bp, Homo sapien
taaatgcgctccacaaaatctctcg

SEQ ID NO: 1042531 - DNA, 25 bp, Homo sapien
atggttccgagcaatcgcgaggcct

SEQ ID NO: 1042532 - DNA, 25 bp, Homo sapien
gaaaatatcagctgaactcctgcgg

SEQ ID NO: 1042533 - DNA, 25 bp, Homo sapien
gcagcagtcacaacaaaaacccctt

SEQ ID NO: 1042534 - DNA, 25 bp, Homo sapien
gcggtcagcgcatagtgcgagccat

SEQ ID NO: 1042535 - DNA, 25 bp, Homo sapien
tagtgcgagccattggccttggact

SEQ ID NO: 1042536 - DNA, 25 bp, Homo sapien
ctgttggcttctcggccgcgctgaa

SEQ ID NO: 1042537 - DNA, 25 bp, Homo sapien
aagccgggtaccaggttccacatgg

SEQ ID NO: 1042538 - DNA, 25 bp, Homo sapien
caggtcctcgccctgccgctgcttc

SEQ ID NO: 1042539 - DNA, 25 bp, Homo sapien
atactcaggcagatagaaagcagca

SEQ ID NO: 1042540 - DNA, 25 bp, Homo sapien
tcctcctgggcgtgaggcccagcgc

SEQ ID NO: 1042541 - DNA, 25 bp, Homo sapien
ggccccgaccagcacgtaggccaca

SEQ ID NO: 1042542 - DNA, 25 bp, Homo sapien
taacttctgggtcgttaccatggaa

SEQ ID NO: 1042543 - DNA, 25 bp, Homo sapien
tgagagtgtcccatgctgatgagca

SEQ ID NO: 1042544 - DNA, 25 bp, Homo sapien
gatcaccctcgttcccgtttgctgg

SEQ ID NO: 1042545 - DNA, 25 bp, Homo sapien
gatggtaactgccaggtcgttgtca

SEQ ID NO: 1042546 - DNA, 25 bp, Homo sapien
catagtaccttgaggcagcctcctc

SEQ ID NO: 1042547 - DNA, 25 bp, Homo sapien
tagctgggaacatagtaccttgagg

SEQ ID NO: 1042548 - DNA, 25 bp, Homo sapien
ggaacatagtaccttgaggcagcct

SEQ ID NO: 1042549 - DNA, 25 bp, Homo sapien
tgggaacatagtaccttgaggcagc

SEQ ID NO: 1042550 - DNA, 25 bp, Homo sapien
cttgcttctgagtagtttgtgttca

SEQ ID NO: 1042551 - DNA, 25 bp, Homo sapien
ctccccttgcttctgagtagtttgt

SEQ ID NO: 1042552 - DNA, 25 bp, Homo sapien
tcctctccccttgcttctgagtagt

SEQ ID NO: 1042553 - DNA, 25 bp, Homo sapien
ccccttgcttctgagtagtttgtgt

SEQ ID NO: 1042554 - DNA, 25 bp, Homo sapien
tcgagccccgtcagtgactcatagg

SEQ ID NO: 1042555 - DNA, 25 bp, Homo sapien
cagtgactcataggacgggagagag

SEQ ID NO: 1042556 - DNA, 25 bp, Homo sapien
agagatgctcaacctcgggttctgc

SEQ ID NO: 1042557 - DNA, 25 bp, Homo sapien
ggtggtctcgtcgagccccgtcagt

SEQ ID NO: 1042558 - DNA, 25 bp, Homo sapien
agtcaaaggctctatcgagggagga

SEQ ID NO: 1042559 - DNA, 25 bp, Homo sapien
ccttcgaactttcagcggtttcagt

SEQ ID NO: 1042560 - DNA, 25 bp, Homo sapien
gacgtttttgtctgggaggttgatc

SEQ ID NO: 1042561 - DNA, 25 bp, Homo sapien
catcatactgcggtggaggagtcaa

SEQ ID NO: 1042562 - DNA, 25 bp, Homo sapien
gccaggtcgtgttttctacccacag

SEQ ID NO: 1042563 - DNA, 25 bp, Homo sapien
ttcaggactccagcgtagacagcaa

SEQ ID NO: 1042564 - DNA, 25 bp, Homo sapien
ggtccacagattcaccagctccaag

SEQ ID NO: 1042565 - DNA, 25 bp, Homo sapien
tgaagactattatgcatcacgtgcc

SEQ ID NO: 1042566 - DNA, 25 bp, Homo sapien
aaaagctccattgcatggcatttca

SEQ ID NO: 1042567 - DNA, 25 bp, Homo sapien
agctccattgcatggcatttcaaaa

SEQ ID NO: 1042568 - DNA, 25 bp, Homo sapien
ttttattacaaaaagctccattgca

SEQ ID NO: 1042569 - DNA, 25 bp, Homo sapien
tacaaaaagctccattgcatggcat

SEQ ID NO: 1042570 - DNA, 25 bp, Homo sapien
tttctcaactcatctgggtccttac

SEQ ID NO: 1042571 - DNA, 25 bp, Homo sapien
tttccagcgatacagctgcgtccca

SEQ ID NO: 1042572 - DNA, 25 bp, Homo sapien
gtggattgatttcggctttgccatc

SEQ ID NO: 1042573 - DNA, 25 bp, Homo sapien
agtatctcaggacgcttgtggattg

SEQ ID NO: 1042574 - DNA, 25 bp, Homo sapien
catgcttgtccatgcggaagtgagt

SEQ ID NO: 1042575 - DNA, 25 bp, Homo sapien
tctgaacacacttgtagaagtgagt

SEQ ID NO: 1042576 - DNA, 25 bp, Homo sapien
ttggccttcattacgcggcctggct

SEQ ID NO: 1042577 - DNA, 25 bp, Homo sapien
cagacttgtggcgtttggtgaattt

SEQ ID NO: 1042578 - DNA, 25 bp, Homo sapien
cagggagaagcgcttagatctcagg

SEQ ID NO: 1042579 - DNA, 25 bp, Homo sapien
gcaatacttttgaccacgtggatcc

SEQ ID NO: 1042580 - DNA, 25 bp, Homo sapien
gctcaagtgatgtcatcagacctca

SEQ ID NO: 1042581 - DNA, 25 bp, Homo sapien
tgcagctccagtccttacatcttct

SEQ ID NO: 1042582 - DNA, 25 bp, Homo sapien
cagaatctctgtataatggtcccag

SEQ ID NO: 1042583 - DNA, 25 bp, Homo sapien
cggagtctccagctcgcacccggca

SEQ ID NO: 1042584 - DNA, 25 bp, Homo sapien
ccggcctgtgtacgcgcgttgccat

SEQ ID NO: 1042585 - DNA, 25 bp, Homo sapien
tgccagctcgggaggcgtcgggcca

SEQ ID NO: 1042586 - DNA, 25 bp, Homo sapien
aggaagcccacgctccgacctccgc

SEQ ID NO: 1042587 - DNA, 25 bp, Homo sapien
gaattttcatgccttccaattgtgg

SEQ ID NO: 1042588 - DNA, 25 bp, Homo sapien
tcatgccttccaattgtggtacttt

SEQ ID NO: 1042589 - DNA, 25 bp, Homo sapien
aagccttctgcgctctttagatagg

SEQ ID NO: 1042590 - DNA, 25 bp, Homo sapien
ttctgcgctctttagataggccttc

SEQ ID NO: 1042591 - DNA, 25 bp, Homo sapien
gacacctgagacaggatcctcgtgg

SEQ ID NO: 1042592 - DNA, 25 bp, Homo sapien
gtctgctctgaggagctgtccccga

SEQ ID NO: 1042593 - DNA, 25 bp, Homo sapien
tctcttgtaagaggcagctccagct

SEQ ID NO: 1042594 - DNA, 25 bp, Homo sapien
ggatcctcgtgggtcatccacgcag

SEQ ID NO: 1042595 - DNA, 25 bp, Homo sapien
tgaatgtggcactcgttgacaaacg

SEQ ID NO: 1042596 - DNA, 25 bp, Homo sapien
gatgagcttcacagccacgttttga

SEQ ID NO: 1042597 - DNA, 25 bp, Homo sapien
caatgagtgcatggtggttgtcgat

SEQ ID NO: 1042598 - DNA, 25 bp, Homo sapien
caaacgtgccgttgcgggaattgaa

SEQ ID NO: 1042599 - DNA, 25 bp, Homo sapien
cctttgtcactaagaggaagcctgc

SEQ ID NO: 1042600 - DNA, 25 bp, Homo sapien
cgaatgtctcttgatctaggaatgc

SEQ ID NO: 1042601 - DNA, 25 bp, Homo sapien
aagcctgcacgaatgtctcttgatc

SEQ ID NO: 1042602 - DNA, 25 bp, Homo sapien
gaccctttgtcactaagaggaagcc

SEQ ID NO: 1042603 - DNA, 25 bp, Homo sapien
ctttataagaacagcactagtgttc

SEQ ID NO: 1042604 - DNA, 25 bp, Homo sapien
ctagctgctttataagaacagcact

SEQ ID NO: 1042605 - DNA, 25 bp, Homo sapien
taagaacagcactagtgttcacagg

SEQ ID NO: 1042606 - DNA, 25 bp, Homo sapien
caggacaaccctcactcacagctcc

SEQ ID NO: 1042607 - DNA, 25 bp, Homo sapien
cctaggctgtctgcacactctgtag

SEQ ID NO: 1042608 - DNA, 25 bp, Homo sapien
tgcagtcccctaggctgtctgcaca

SEQ ID NO: 1042609 - DNA, 25 bp, Homo sapien
taggctgtctgcacactctgtagac

SEQ ID NO: 1042610 - DNA, 25 bp, Homo sapien
ccctgcagtcccctaggctgtctgc

SEQ ID NO: 1042611 - DNA, 25 bp, Homo sapien
gagtttgcccagagtcctacaggac

SEQ ID NO: 1042612 - DNA, 25 bp, Homo sapien
aaacgccaagggagtttgcccagag

SEQ ID NO: 1042613 - DNA, 25 bp, Homo sapien
ccaagggagtttgcccagagtccta

SEQ ID NO: 1042614 - DNA, 25 bp, Homo sapien
ctacaggacccatgcattcttccag

SEQ ID NO: 1042615 - DNA, 25 bp, Homo sapien
ccaaatccattgtttccggatgatc

SEQ ID NO: 1042616 - DNA, 25 bp, Homo sapien
gcttctgaccctgtcaaggcttcag

SEQ ID NO: 1042617 - DNA, 25 bp, Homo sapien
gttattacgctaacatctgcttctg

SEQ ID NO: 1042618 - DNA, 25 bp, Homo sapien
ccagtaatgtactcgagaactccaa

SEQ ID NO: 1042619 - DNA, 25 bp, Homo sapien
tctatcataagcaaggtcaaggttt

SEQ ID NO: 1042620 - DNA, 25 bp, Homo sapien
ttttctcagaaattgctgctggtaa

SEQ ID NO: 1042621 - DNA, 25 bp, Homo sapien
taagcaaggtcaaggttttctcaga

SEQ ID NO: 1042622 - DNA, 25 bp, Homo sapien
tcataagcaaggtcaaggttttctc

SEQ ID NO: 1042623 - DNA, 25 bp, Homo sapien
gctgacttctccgtccatcatgtcc

SEQ ID NO: 1042624 - DNA, 25 bp, Homo sapien
ctgggctgacttctccgtccatcat

SEQ ID NO: 1042625 - DNA, 25 bp, Homo sapien
gggctgacttctccgtccatcatgt

SEQ ID NO: 1042626 - DNA, 25 bp, Homo sapien
tgacttctccgtccatcatgtcctt

SEQ ID NO: 1042627 - DNA, 25 bp, Homo sapien
tggccctggccatggtgctgggccc

SEQ ID NO: 1042628 - DNA, 25 bp, Homo sapien
tgtgtggcacgaggtggctgtggcc

SEQ ID NO: 1042629 - DNA, 25 bp, Homo sapien
ggctgtggccctggccatggtgctg

SEQ ID NO: 1042630 - DNA, 25 bp, Homo sapien
ctgtgtggcacgaggtggctgtggc

SEQ ID NO: 1042631 - DNA, 25 bp, Homo sapien
cttggtggaaggggatatgtgatgg

SEQ ID NO: 1042632 - DNA, 25 bp, Homo sapien
gtggaaggggatatgtgatggtggg

SEQ ID NO: 1042633 - DNA, 25 bp, Homo sapien
tgatggtgggggggcctggtttggc

SEQ ID NO: 1042634 - DNA, 25 bp, Homo sapien
gggatatgtgatggtgggggggcct

SEQ ID NO: 1042635 - DNA, 25 bp, Homo sapien
gaccagctcctttgcatcggtgctg

SEQ ID NO: 1042636 - DNA, 25 bp, Homo sapien
gtgggaggccggcaggaccacggtg

SEQ ID NO: 1042637 - DNA, 25 bp, Homo sapien
tgggaccagctcctttgcatcggtg

SEQ ID NO: 1042638 - DNA, 25 bp, Homo sapien
ccagctcctttgcatcggtgctggc

SEQ ID NO: 1042639 - DNA, 25 bp, Homo sapien
cttgatgacgggtggcttgcgggcg

SEQ ID NO: 1042640 - DNA, 25 bp, Homo sapien
catctccttgttggcgctcacaggc

SEQ ID NO: 1042641 - DNA, 25 bp, Homo sapien
gggcgtcgtccaccacgaacgagaa

SEQ ID NO: 1042642 - DNA, 25 bp, Homo sapien
gaacgagaacatctccttgttggcg

SEQ ID NO: 1042643 - DNA, 25 bp, Homo sapien
ccctgaaggttgtgtgtgtcccaga

SEQ ID NO: 1042644 - DNA, 25 bp, Homo sapien
gaccttgatgccataggctagggag

SEQ ID NO: 1042645 - DNA, 25 bp, Homo sapien
gagctcaccagcctttaaatgggac

SEQ ID NO: 1042646 - DNA, 25 bp, Homo sapien
gattagacgggactgaatacacttc

SEQ ID NO: 1042647 - DNA, 25 bp, Homo sapien
ctgtatgagctttgccattaagatt

SEQ ID NO: 1042648 - DNA, 25 bp, Homo sapien
tgccattaagattcggccttagagc

SEQ ID NO: 1042649 - DNA, 25 bp, Homo sapien
ggccttagagctgcggccttactgc

SEQ ID NO: 1042650 - DNA, 25 bp, Homo sapien
taagattcggccttagagctgcggc

SEQ ID NO: 1042651 - DNA, 25 bp, Homo sapien
gcacaaaagacatcatgagtttccc

SEQ ID NO: 1042652 - DNA, 25 bp, Homo sapien
agcagagagcacaaaagacatcatg

SEQ ID NO: 1042653 - DNA, 25 bp, Homo sapien
ctaaggcgtgagatcagcagagagc

SEQ ID NO: 1042654 - DNA, 25 bp, Homo sapien
aaagacatcatgagtttccctgagg

SEQ ID NO: 1042655 - DNA, 25 bp, Homo sapien
aatcccctcggccactgatttttct

SEQ ID NO: 1042656 - DNA, 25 bp, Homo sapien
cccaggaatcccctcggccactgat

SEQ ID NO: 1042657 - DNA, 25 bp, Homo sapien
ccacataaatctccgcagggggaac

SEQ ID NO: 1042658 - DNA, 25 bp, Homo sapien
tcctccacataaatctccgcagggg

SEQ ID NO: 1042659 - DNA, 25 bp, Homo sapien
ctattatgacgtctttgtatttgga

SEQ ID NO: 1042660 - DNA, 25 bp, Homo sapien
tcataatctgagagacggctgacct

SEQ ID NO: 1042661 - DNA, 25 bp, Homo sapien
gacggctgacctcttttcccagcag

SEQ ID NO: 1042662 - DNA, 25 bp, Homo sapien
cattctgcaggtttgctattatgac

SEQ ID NO: 1042663 - DNA, 25 bp, Homo sapien
acctgacacttctgcgagatctcct

SEQ ID NO: 1042664 - DNA, 25 bp, Homo sapien
tctgtttggcatcgatgtcttcatc

SEQ ID NO: 1042665 - DNA, 25 bp, Homo sapien
gtttggcatcgatgtcttcatccag

SEQ ID NO: 1042666 - DNA, 25 bp, Homo sapien
gaacctgacacttctgcgagatctc

SEQ ID NO: 1042667 - DNA, 25 bp, Homo sapien
tctctttaagttctcgccctcattc

SEQ ID NO: 1042668 - DNA, 25 bp, Homo sapien
ttctgagttccgctctgacagggtc

SEQ ID NO: 1042669 - DNA, 25 bp, Homo sapien
tgatttctgagttccgctctgacag

SEQ ID NO: 1042670 - DNA, 25 bp, Homo sapien
tgtgatagcgttgtctctctttaag

SEQ ID NO: 1042671 - DNA, 25 bp, Homo sapien
tggtgggaaagtgagctactctcag

SEQ ID NO: 1042672 - DNA, 25 bp, Homo sapien
atgcacgtgctcatcacacctgact

SEQ ID NO: 1042673 - DNA, 25 bp, Homo sapien
gtgagctactctcaggcctacgtgg

SEQ ID NO: 1042674 - DNA, 25 bp, Homo sapien
gcctacgtgggcttcgagatggttc

SEQ ID NO: 1042675 - DNA, 25 bp, Homo sapien
taaaaatgagcttcgtccggggaca

SEQ ID NO: 1042676 - DNA, 25 bp, Homo sapien
acatgattcagaatttcattgtaaa

SEQ ID NO: 1042677 - DNA, 25 bp, Homo sapien
aatctttattgcacaatcaaggatg

SEQ ID NO: 1042678 - DNA, 25 bp, Homo sapien
cacagttaagttccttagaaacaga

SEQ ID NO: 1042679 - DNA, 25 bp, Homo sapien
tggaagtggtgaatgtgacttccca

SEQ ID NO: 1042680 - DNA, 25 bp, Homo sapien
taactcatatggcactgtggaagtg

SEQ ID NO: 1042681 - DNA, 25 bp, Homo sapien
gctgacgtgtgtaactcatatggca

SEQ ID NO: 1042682 - DNA, 25 bp, Homo sapien
ctgaatagggctgacgtgtgtaact

SEQ ID NO: 1042683 - DNA, 25 bp, Homo sapien
ctttagttgttgaacttgctcatcc

SEQ ID NO: 1042684 - DNA, 25 bp, Homo sapien
gttgttgaacttgctcatcctttgc

SEQ ID NO: 1042685 - DNA, 25 bp, Homo sapien
tgctcatcctttgctaatatgtctt

SEQ ID NO: 1042686 - DNA, 25 bp, Homo sapien
atcctttgctaatatgtctttttgc

SEQ ID NO: 1042687 - DNA, 25 bp, Homo sapien
tgttctgactttttaggtgactgac

SEQ ID NO: 1042688 - DNA, 25 bp, Homo sapien
ctcgggggacggatgcagagggctg

SEQ ID NO: 1042689 - DNA, 25 bp, Homo sapien
aggcgggctaaccagccgcagaggc

SEQ ID NO: 1042690 - DNA, 25 bp, Homo sapien
caaaccggcctctcacttctcaaaa

SEQ ID NO: 1042691 - DNA, 25 bp, Homo sapien
gaggcggaagcgcacaatgcaaacc

SEQ ID NO: 1042692 - DNA, 25 bp, Homo sapien
atgttcacatgagcaatacccttgg

SEQ ID NO: 1042693 - DNA, 25 bp, Homo sapien
cacgtgctgatgaacgccaggtgcg

SEQ ID NO: 1042694 - DNA, 25 bp, Homo sapien
aatacccttggtcacgaggagccca

SEQ ID NO: 1042695 - DNA, 25 bp, Homo sapien
taaagacagtcattcggatgttcac

SEQ ID NO: 1042696 - DNA, 25 bp, Homo sapien
tgcagagttttaactctttctcctg

SEQ ID NO: 1042697 - DNA, 25 bp, Homo sapien
tttgcagagttttaactctttctcc

SEQ ID NO: 1042698 - DNA, 25 bp, Homo sapien
cagagttttaactctttctcctggg

SEQ ID NO: 1042699 - DNA, 25 bp, Homo sapien
ttgcagagttttaactctttctcct

SEQ ID NO: 1042700 - DNA, 25 bp, Homo sapien
gctctgccctaagcttcttcatttc

SEQ ID NO: 1042701 - DNA, 25 bp, Homo sapien
tcacgctttgttcagtacaactctt

SEQ ID NO: 1042702 - DNA, 25 bp, Homo sapien
ttctctcagagtcctagagatcacg

SEQ ID NO: 1042703 - DNA, 25 bp, Homo sapien
cagagtcctagagatcacgctttgt

SEQ ID NO: 1042704 - DNA, 25 bp, Homo sapien
taagcgaagttaaagtgtcaatctc

SEQ ID NO: 1042705 - DNA, 25 bp, Homo sapien
gataaaaaactgtcaactcgcccag

SEQ ID NO: 1042706 - DNA, 25 bp, Homo sapien
cacgaatgcgtgctattgtcttatg

SEQ ID NO: 1042707 - DNA, 25 bp, Homo sapien
taacaatggcatataagtctggatg

SEQ ID NO: 1042708 - DNA, 25 bp, Homo sapien
gacctactgccctctccaaattgat

SEQ ID NO: 1042709 - DNA, 25 bp, Homo sapien
tttcttgcagctgaagcaatttcct

SEQ ID NO: 1042710 - DNA, 25 bp, Homo sapien
tgacctactgccctctccaaattga

SEQ ID NO: 1042711 - DNA, 25 bp, Homo sapien
tgcagctgaagcaatttccttctgg

SEQ ID NO: 1042712 - DNA, 25 bp, Homo sapien
taaactattcgagtgggaggcctcc

SEQ ID NO: 1042713 - DNA, 25 bp, Homo sapien
ggtcatcttagacatggcctcgggc

SEQ ID NO: 1042714 - DNA, 25 bp, Homo sapien
gaaacctgttaagcgatgtccatgg

SEQ ID NO: 1042715 - DNA, 25 bp, Homo sapien
taaactttcgtctgcacattccggc

SEQ ID NO: 1042716 - DNA, 25 bp, Homo sapien
aaaggagcccgactttctctgagaa

SEQ ID NO: 1042717 - DNA, 25 bp, Homo sapien
tgaagggaccaaaagggctactgcc

SEQ ID NO: 1042718 - DNA, 25 bp, Homo sapien
agacacaggtatttactgcacaggg

SEQ ID NO: 1042719 - DNA, 25 bp, Homo sapien
tctaatgggaaacgtcttacggaca

SEQ ID NO: 1042720 - DNA, 25 bp, Homo sapien
tgcctaacccgaacgatgcctgtgg

SEQ ID NO: 1042721 - DNA, 25 bp, Homo sapien
taattactttttaggcacgcctgcc

SEQ ID NO: 1042722 - DNA, 25 bp, Homo sapien
ttgtgtagtcagcaaggaagcccgg

SEQ ID NO: 1042723 - DNA, 25 bp, Homo sapien
tatcagaatcttcaccgctcacggg

SEQ ID NO: 1042724 - DNA, 25 bp, Homo sapien
tgacttgacttctgaagtgctccag

SEQ ID NO: 1042725 - DNA, 25 bp, Homo sapien
tgttggtcggtgacgggcttgtccc

SEQ ID NO: 1042726 - DNA, 25 bp, Homo sapien
cggaacggcttcgcccgtccatagg

SEQ ID NO: 1042727 - DNA, 25 bp, Homo sapien
gcttcgcccgtccataggtggcctt

SEQ ID NO: 1042728 - DNA, 25 bp, Homo sapien
agcttctcgatgttctcggtggtct

SEQ ID NO: 1042729 - DNA, 25 bp, Homo sapien
tggcagctgtccagcgacgtcctca

SEQ ID NO: 1042730 - DNA, 25 bp, Homo sapien
ttctcggtggtctcctcctgcttgg

SEQ ID NO: 1042731 - DNA, 25 bp, Homo sapien
aaaattgatgttgtcctcagtgacc

SEQ ID NO: 1042732 - DNA, 25 bp, Homo sapien
tgcgggccgctcaaagtcagtaatt

SEQ ID NO: 1042733 - DNA, 25 bp, Homo sapien
gatcaacacacaagctggtcggaaa

SEQ ID NO: 1042734 - DNA, 25 bp, Homo sapien
tcctccagagtcaaaagcaacggtg

SEQ ID NO: 1042735 - DNA, 25 bp, Homo sapien
gaacagcgttcttgactctgccacg

SEQ ID NO: 1042736 - DNA, 25 bp, Homo sapien
tcaggtcatggctgcaacaggatat

SEQ ID NO: 1042737 - DNA, 25 bp, Homo sapien
tcttcaggtcatggctgcaacagga

SEQ ID NO: 1042738 - DNA, 25 bp, Homo sapien
ttcttcaggtcatggctgcaacagg

SEQ ID NO: 1042739 - DNA, 25 bp, Homo sapien
ccttcttcaggtcatggctgcaaca

SEQ ID NO: 1042740 - DNA, 25 bp, Homo sapien
cctccagccaggacagcgcgtgcct

SEQ ID NO: 1042741 - DNA, 25 bp, Homo sapien
ggagccccgagacaggtgggctcac

SEQ ID NO: 1042742 - DNA, 25 bp, Homo sapien
aggacagcgcgtgcctcaggacgtc

SEQ ID NO: 1042743 - DNA, 25 bp, Homo sapien
gcaggatcccgaggtcccggaggag

SEQ ID NO: 1042744 - DNA, 25 bp, Homo sapien
catgtgagaaaaaaagtcccagtaa

SEQ ID NO: 1042745 - DNA, 25 bp, Homo sapien
ccatgtgagaaaaaaagtcccagta

SEQ ID NO: 1042746 - DNA, 25 bp, Homo sapien
tcatgcaaccatgtgagaaaaaaag

SEQ ID NO: 1042747 - DNA, 25 bp, Homo sapien
gcaaccatgtgagaaaaaaagtccc

SEQ ID NO: 1042748 - DNA, 25 bp, Homo sapien
gaatcacgcggttatttccatggga

SEQ ID NO: 1042749 - DNA, 25 bp, Homo sapien
taatggaaaattacgcctcaagcag

SEQ ID NO: 1042750 - DNA, 25 bp, Homo sapien
taactgccgtcggtaacagcgatga

SEQ ID NO: 1042751 - DNA, 25 bp, Homo sapien
taagtcacttgcctggaatcacgcg

SEQ ID NO: 1042752 - DNA, 25 bp, Homo sapien
catatgccgctaggagactggatgg

SEQ ID NO: 1042753 - DNA, 25 bp, Homo sapien
gagtcccagcttggaacatcactgt

SEQ ID NO: 1042754 - DNA, 25 bp, Homo sapien
gatggccatttcacgagcaagtaaa

SEQ ID NO: 1042755 - DNA, 25 bp, Homo sapien
tacgagctaactgtgaccagcactg

SEQ ID NO: 1042756 - DNA, 25 bp, Homo sapien
tgggtgcaagtaaaccaggctatgc

SEQ ID NO: 1042757 - DNA, 25 bp, Homo sapien
ggctatgcggtccacatgcctacct

SEQ ID NO: 1042758 - DNA, 25 bp, Homo sapien
taaaccaggctatgcggtccacatg

SEQ ID NO: 1042759 - DNA, 25 bp, Homo sapien
cacatgcctacctgcctggtggcta

SEQ ID NO: 1042760 - DNA, 25 bp, Homo sapien
tttcagttaaagacacagtgtatct

SEQ ID NO: 1042761 - DNA, 25 bp, Homo sapien
cacaaacgacggagcttgcagagaa

SEQ ID NO: 1042762 - DNA, 25 bp, Homo sapien
tggatagttgagtgatttgccatgc

SEQ ID NO: 1042763 - DNA, 25 bp, Homo sapien
tcccttatcagaggaaccctgagaa

SEQ ID NO: 1042764 - DNA, 25 bp, Homo sapien
ctgggcctggctcataagtttttta

SEQ ID NO: 1042765 - DNA, 25 bp, Homo sapien
cctgggcctggctcataagtttttt

SEQ ID NO: 1042766 - DNA, 25 bp, Homo sapien
cctggctcataagttttttataatg

SEQ ID NO: 1042767 - DNA, 25 bp, Homo sapien
tttcctgagaactgttgaacttgat

SEQ ID NO: 1042768 - DNA, 25 bp, Homo sapien
gagtttcctgagaactgttgaactt

SEQ ID NO: 1042769 - DNA, 25 bp, Homo sapien
gtttcctgagaactgttgaacttga

SEQ ID NO: 1042770 - DNA, 25 bp, Homo sapien
ctgagtttcctgagaactgttgaac

SEQ ID NO: 1042771 - DNA, 25 bp, Homo sapien
tctgccagatgctcccgcagctttt

SEQ ID NO: 1042772 - DNA, 25 bp, Homo sapien
agatgctcccgcagcttttcctgca

SEQ ID NO: 1042773 - DNA, 25 bp, Homo sapien
tctagcctctcctcgttcagcttct

SEQ ID NO: 1042774 - DNA, 25 bp, Homo sapien
gccttctcttccgtcagttgcctga

SEQ ID NO: 1042775 - DNA, 25 bp, Homo sapien
ctctcttgagtaatgtactcctcca

SEQ ID NO: 1042776 - DNA, 25 bp, Homo sapien
cttgagtaatgtactcctccaaagc

SEQ ID NO: 1042777 - DNA, 25 bp, Homo sapien
tcttgagtaatgtactcctccaaag

SEQ ID NO: 1042778 - DNA, 25 bp, Homo sapien
tctcttgagtaatgtactcctccaa

SEQ ID NO: 1042779 - DNA, 25 bp, Homo sapien
tccttctggcgggccaagcgttcct

SEQ ID NO: 1042780 - DNA, 25 bp, Homo sapien
ctccttctggcgggccaagcgttcc

SEQ ID NO: 1042781 - DNA, 25 bp, Homo sapien
acatgtaaacgtctctctgtcctgg

SEQ ID NO: 1042782 - DNA, 25 bp, Homo sapien
cagatcaaatggcacaggctttgcc

SEQ ID NO: 1042783 - DNA, 25 bp, Homo sapien
tgccagagacgccaagggagaaccg

SEQ ID NO: 1042784 - DNA, 25 bp, Homo sapien
gggtcagatcaaatggcacaggctt

SEQ ID NO: 1042785 - DNA, 25 bp, Homo sapien
catgggctatgctgctctccaaaac

SEQ ID NO: 1042786 - DNA, 25 bp, Homo sapien
ctcttttccgactccaaggcttcct

SEQ ID NO: 1042787 - DNA, 25 bp, Homo sapien
tctcttttccgactccaaggcttcc

SEQ ID NO: 1042788 - DNA, 25 bp, Homo sapien
ggatgatgctcactaagcccctgac

SEQ ID NO: 1042789 - DNA, 25 bp, Homo sapien
cgaagcccagctcatggagatgcca

SEQ ID NO: 1042790 - DNA, 25 bp, Homo sapien
tctaatccgatgaggcagggactgt

SEQ ID NO: 1042791 - DNA, 25 bp, Homo sapien
gatcttggccacttcaaagggaggc

SEQ ID NO: 1042792 - DNA, 25 bp, Homo sapien
gggcctgtgccctcaaagggaaatg

SEQ ID NO: 1042793 - DNA, 25 bp, Homo sapien
aagtcaatgaaagtggtttgagggc

SEQ ID NO: 1042794 - DNA, 25 bp, Homo sapien
ctggaagtcaatgaaagtggtttga

SEQ ID NO: 1042795 - DNA, 25 bp, Homo sapien
tggaagtcaatgaaagtggtttgag

SEQ ID NO: 1042796 - DNA, 25 bp, Homo sapien
ggcctcctttgctttgcgtttctcg

SEQ ID NO: 1042797 - DNA, 25 bp, Homo sapien
cgtacgcaatgttgctctctgagat

SEQ ID NO: 1042798 - DNA, 25 bp, Homo sapien
gcgtttctcgtacgcaatgttgctc

SEQ ID NO: 1042799 - DNA, 25 bp, Homo sapien
tgctttgcgtttctcgtacgcaatg

SEQ ID NO: 1042800 - DNA, 25 bp, Homo sapien
tctccaggtcttgcacctttttctt

SEQ ID NO: 1042801 - DNA, 25 bp, Homo sapien
ctttctgcttggttaagcgattctc

SEQ ID NO: 1042802 - DNA, 25 bp, Homo sapien
ctctttctgcttggttaagcgattc

SEQ ID NO: 1042803 - DNA, 25 bp, Homo sapien
agcgattctccaggtcttgcacctt

SEQ ID NO: 1042804 - DNA, 25 bp, Homo sapien
gttctgtcacctggagctcattgag

SEQ ID NO: 1042805 - DNA, 25 bp, Homo sapien
tctttatattcagcggagatctgtc

SEQ ID NO: 1042806 - DNA, 25 bp, Homo sapien
tcaggaatacatatttacccagccc

SEQ ID NO: 1042807 - DNA, 25 bp, Homo sapien
tattctgtcgattcttttaaagcac

SEQ ID NO: 1042808 - DNA, 25 bp, Homo sapien
tgagtctcttcaaccatggccagtg

SEQ ID NO: 1042809 - DNA, 25 bp, Homo sapien
catggccagtgcgtcacttaattta

SEQ ID NO: 1042810 - DNA, 25 bp, Homo sapien
catttaatttcaaggcgaggctctc

SEQ ID NO: 1042811 - DNA, 25 bp, Homo sapien
cttggtagtttccagttcggctaat

SEQ ID NO: 1042812 - DNA, 25 bp, Homo sapien
gattctggtctacaccacgttccac

SEQ ID NO: 1042813 - DNA, 25 bp, Homo sapien
tcctgccagcagttatcaagtcctg

SEQ ID NO: 1042814 - DNA, 25 bp, Homo sapien
caccttcatgaattccttgcccaga

SEQ ID NO: 1042815 - DNA, 25 bp, Homo sapien
aggtcagctccttatgattctggtc

SEQ ID NO: 1042816 - DNA, 25 bp, Homo sapien
gggtcattgtccttcaatgttgcaa

SEQ ID NO: 1042817 - DNA, 25 bp, Homo sapien
tcgaggctcacaattgtctgggcgt

SEQ ID NO: 1042818 - DNA, 25 bp, Homo sapien
aggattagccgctcttccaccatga

SEQ ID NO: 1042819 - DNA, 25 bp, Homo sapien
gagggcctttaccatcttctgctgc

SEQ ID NO: 1042820 - DNA, 25 bp, Homo sapien
gccaccagagggtcttgcggccttt

SEQ ID NO: 1042821 - DNA, 25 bp, Homo sapien
accagagggtcttgcggcctttcct

SEQ ID NO: 1042822 - DNA, 25 bp, Homo sapien
ccaccagagggtcttgcggcctttc

SEQ ID NO: 1042823 - DNA, 25 bp, Homo sapien
ccagagggtcttgcggcctttcctc

SEQ ID NO: 1042824 - DNA, 25 bp, Homo sapien
cagatgttcgtacgccatgtctttg

SEQ ID NO: 1042825 - DNA, 25 bp, Homo sapien
atcagatgttcgtacgccatgtctt

SEQ ID NO: 1042826 - DNA, 25 bp, Homo sapien
tacgccatgtctttggcactgctct

SEQ ID NO: 1042827 - DNA, 25 bp, Homo sapien
tgttcgtacgccatgtctttggcac

SEQ ID NO: 1042828 - DNA, 25 bp, Homo sapien
caaggaagtggaccagagcagagct

SEQ ID NO: 1042829 - DNA, 25 bp, Homo sapien
tgggcaccaccgtttctagatttta

SEQ ID NO: 1042830 - DNA, 25 bp, Homo sapien
caagcatgttcacacgccaaggaag

SEQ ID NO: 1042831 - DNA, 25 bp, Homo sapien
ggaacttttcacaatgcggaggctg

SEQ ID NO: 1042832 - DNA, 25 bp, Homo sapien
ctctcaaatccgacattctgctgtg

SEQ ID NO: 1042833 - DNA, 25 bp, Homo sapien
ccttctgagcagccaataagtcatc

SEQ ID NO: 1042834 - DNA, 25 bp, Homo sapien
tgctgtgggcttcggtaaggtcttt

SEQ ID NO: 1042835 - DNA, 25 bp, Homo sapien
tcaaatccgacattctgctgtgggc

SEQ ID NO: 1042836 - DNA, 25 bp, Homo sapien
gctgctggaccagcaccacgttctg

SEQ ID NO: 1042837 - DNA, 25 bp, Homo sapien
gctggaccagcaccacgttctgctc

SEQ ID NO: 1042838 - DNA, 25 bp, Homo sapien
ctttcttttctaccaggctgctcat

SEQ ID NO: 1042839 - DNA, 25 bp, Homo sapien
tgctggaccagcaccacgttctgct

SEQ ID NO: 1042840 - DNA, 25 bp, Homo sapien
tctctctgcaatactcagcggctcc

SEQ ID NO: 1042841 - DNA, 25 bp, Homo sapien
cctctctctgcaatactcagcggct

SEQ ID NO: 1042842 - DNA, 25 bp, Homo sapien
tctgcaatactcagcggctccccac

SEQ ID NO: 1042843 - DNA, 25 bp, Homo sapien
cacggcaggcaaaccatccccccaa

SEQ ID NO: 1042844 - DNA, 25 bp, Homo sapien
tggacgggttctatctgcacagagg

SEQ ID NO: 1042845 - DNA, 25 bp, Homo sapien
agaggtgtcacacgtctgggtcttc

SEQ ID NO: 1042846 - DNA, 25 bp, Homo sapien
aaggcctcagtgtggacgggttcta

SEQ ID NO: 1042847 - DNA, 25 bp, Homo sapien
ggtgtcacacgtctgggtcttcttc

SEQ ID NO: 1042848 - DNA, 25 bp, Homo sapien
ctgagcaaccaggagacaattctgt

SEQ ID NO: 1042849 - DNA, 25 bp, Homo sapien
attctgttaaagtgctctggacagc

SEQ ID NO: 1042850 - DNA, 25 bp, Homo sapien
gacagcaatcgatgccaaggacagc

SEQ ID NO: 1042851 - DNA, 25 bp, Homo sapien
gctggacctcgagccctttcgttca

SEQ ID NO: 1042852 - DNA, 25 bp, Homo sapien
tgacgctgaatgacctcctcgtgcc

SEQ ID NO: 1042853 - DNA, 25 bp, Homo sapien
tgacccctagatcgctgaaggattg

SEQ ID NO: 1042854 - DNA, 25 bp, Homo sapien
cgctcgaagttcagataaggccttt

SEQ ID NO: 1042855 - DNA, 25 bp, Homo sapien
tggtgagcgcgccttctcgagttct

SEQ ID NO: 1042856 - DNA, 25 bp, Homo sapien
aaatgattcattctggtggtcttta

SEQ ID NO: 1042857 - DNA, 25 bp, Homo sapien
aaatccggttttgcatccagtagta

SEQ ID NO: 1042858 - DNA, 25 bp, Homo sapien
tcttgagagagttggcaaatccggt

SEQ ID NO: 1042859 - DNA, 25 bp, Homo sapien
cgctaggatctctattcttgagaga

SEQ ID NO: 1042860 - DNA, 25 bp, Homo sapien
cactgacatgtatggctgtgccagg

SEQ ID NO: 1042861 - DNA, 25 bp, Homo sapien
tctgtgcaaaccctggacaacgggt

SEQ ID NO: 1042862 - DNA, 25 bp, Homo sapien
ccagggaacgaagctagtgtctgcc

SEQ ID NO: 1042863 - DNA, 25 bp, Homo sapien
gggccccagctagtgagtatagaca

SEQ ID NO: 1042864 - DNA, 25 bp, Homo sapien
tgttgtgtcggaagattgaggactt

SEQ ID NO: 1042865 - DNA, 25 bp, Homo sapien
gtcggaagattgaggacttctgaga

SEQ ID NO: 1042866 - DNA, 25 bp, Homo sapien
tgccagtgttgtgtcggaagattga

SEQ ID NO: 1042867 - DNA, 25 bp, Homo sapien
gctgccagtgttgtgtcggaagatt

SEQ ID NO: 1042868 - DNA, 25 bp, Homo sapien
gccgaaccttgcgttgcaaaggcca

SEQ ID NO: 1042869 - DNA, 25 bp, Homo sapien
tgagccgaaccttgcgttgcaaagg

SEQ ID NO: 1042870 - DNA, 25 bp, Homo sapien
ccttgcgttgcaaaggccattctga

SEQ ID NO: 1042871 - DNA, 25 bp, Homo sapien
ggctgagccgaaccttgcgttgcaa

SEQ ID NO: 1042872 - DNA, 25 bp, Homo sapien
ctgagctctaaagcctcagccacat

SEQ ID NO: 1042873 - DNA, 25 bp, Homo sapien
cactgagctctaaagcctcagccac

SEQ ID NO: 1042874 - DNA, 25 bp, Homo sapien
actgagctctaaagcctcagccaca

SEQ ID NO: 1042875 - DNA, 25 bp, Homo sapien
gacacgtggcctgacatattcttga

SEQ ID NO: 1042876 - DNA, 25 bp, Homo sapien
gagaggtatttcatggacacgtggc

SEQ ID NO: 1042877 - DNA, 25 bp, Homo sapien
caaacaccaggtcgaggtccctttg

SEQ ID NO: 1042878 - DNA, 25 bp, Homo sapien
gatgttcatgagacttccgagggtt

SEQ ID NO: 1042879 - DNA, 25 bp, Homo sapien
catctcaatggacactttgctccgc

SEQ ID NO: 1042880 - DNA, 25 bp, Homo sapien
agctttgccacctgcgactggtaca

SEQ ID NO: 1042881 - DNA, 25 bp, Homo sapien
tgccggatggccctgttgatcctct

SEQ ID NO: 1042882 - DNA, 25 bp, Homo sapien
ggccctgttgatcctcttctcctgg

SEQ ID NO: 1042883 - DNA, 25 bp, Homo sapien
ccaccctcggccattgctaatggga

SEQ ID NO: 1042884 - DNA, 25 bp, Homo sapien
agggaccaccctcggccattgctaa

SEQ ID NO: 1042885 - DNA, 25 bp, Homo sapien
ggatcctccagggaccaccctcggc

SEQ ID NO: 1042886 - DNA, 25 bp, Homo sapien
cggccattgctaatgggagctgcag

SEQ ID NO: 1042887 - DNA, 25 bp, Homo sapien
cactggcggcattgtggctttggca

SEQ ID NO: 1042888 - DNA, 25 bp, Homo sapien
aggccctcgctgcatgttctaacca

SEQ ID NO: 1042889 - DNA, 25 bp, Homo sapien
cctttgcggtcactggcggcattgt

SEQ ID NO: 1042890 - DNA, 25 bp, Homo sapien
tccctttggtggacaaactccagct

SEQ ID NO: 1042891 - DNA, 25 bp, Homo sapien
acttggctcctgaggtatgacgaca

SEQ ID NO: 1042892 - DNA, 25 bp, Homo sapien
cgacagcgagagtggacagcagata

SEQ ID NO: 1042893 - DNA, 25 bp, Homo sapien
cagatagcgagggatgcctgcattc

SEQ ID NO: 1042894 - DNA, 25 bp, Homo sapien
acagcagatagcgagggatgcctgc

SEQ ID NO: 1042895 - DNA, 25 bp, Homo sapien
cttcagagacgggacaagcaccctc

SEQ ID NO: 1042896 - DNA, 25 bp, Homo sapien
agaccacctgcatgggtcacgggca

SEQ ID NO: 1042897 - DNA, 25 bp, Homo sapien
cctgcatgggtcacgggcagcatgg

SEQ ID NO: 1042898 - DNA, 25 bp, Homo sapien
accacctgcatgggtcacgggcagc

SEQ ID NO: 1042899 - DNA, 25 bp, Homo sapien
gagaccacctgcatgggtcacgggc

SEQ ID NO: 1042900 - DNA, 25 bp, Homo sapien
taccaggcagggctattagaggcat

SEQ ID NO: 1042901 - DNA, 25 bp, Homo sapien
tatcacggctgcaaagctcaggtga

SEQ ID NO: 1042902 - DNA, 25 bp, Homo sapien
gaaactttccagtgtgtagacccta

SEQ ID NO: 1042903 - DNA, 25 bp, Homo sapien
taaaatagggatcatcgtaccaggc

SEQ ID NO: 1042904 - DNA, 25 bp, Homo sapien
gccgctgtgtgcacttgggcgcctc

SEQ ID NO: 1042905 - DNA, 25 bp, Homo sapien
cctcttaactctctgaggcgcagtt

SEQ ID NO: 1042906 - DNA, 25 bp, Homo sapien
gcacttgggcgcctcttaactctct

SEQ ID NO: 1042907 - DNA, 25 bp, Homo sapien
tcttaactctctgaggcgcagtttc

SEQ ID NO: 1042908 - DNA, 25 bp, Homo sapien
agaaccagggtcagagggatctggg

SEQ ID NO: 1042909 - DNA, 25 bp, Homo sapien
ggccaaccctgcagacagcaggaga

SEQ ID NO: 1042910 - DNA, 25 bp, Homo sapien
cagacagcaggagaaccagggtcag

SEQ ID NO: 1042911 - DNA, 25 bp, Homo sapien
ggatctggggtcaggtcccagctgt

SEQ ID NO: 1042912 - DNA, 25 bp, Homo sapien
tctgcaaggagctcacctggttggt

SEQ ID NO: 1042913 - DNA, 25 bp, Homo sapien
gaactctcctgtgggtacatcaaag

SEQ ID NO: 1042914 - DNA, 25 bp, Homo sapien
tgcctcgggaaggagcgaactctcc

SEQ ID NO: 1042915 - DNA, 25 bp, Homo sapien
catggcacagcgtaaaaggaaacgg

SEQ ID NO: 1042916 - DNA, 25 bp, Homo sapien
ctggggatgaaccccgagagaaatg

SEQ ID NO: 1042917 - DNA, 25 bp, Homo sapien
atgaaccccgagagaaatggtgatg

SEQ ID NO: 1042918 - DNA, 25 bp, Homo sapien
ggatgaaccccgagagaaatggtga

SEQ ID NO: 1042919 - DNA, 25 bp, Homo sapien
gggatgaaccccgagagaaatggtg

SEQ ID NO: 1042920 - DNA, 25 bp, Homo sapien
caaggtgtcgattcttttgcgtttc

SEQ ID NO: 1042921 - DNA, 25 bp, Homo sapien
tttgcgtttctcagttcgtgctcct

SEQ ID NO: 1042922 - DNA, 25 bp, Homo sapien
gaaggcacagttgcaaggtgtcgat

SEQ ID NO: 1042923 - DNA, 25 bp, Homo sapien
ttcttttgcgtttctcagttcgtgc

SEQ ID NO: 1042924 - DNA, 25 bp, Homo sapien
gcttgtctcttaggtcatccgttca

SEQ ID NO: 1042925 - DNA, 25 bp, Homo sapien
gggctggacgcgtgcttgtctctta

SEQ ID NO: 1042926 - DNA, 25 bp, Homo sapien
ttaggtcatccgttcaaactgcagg

SEQ ID NO: 1042927 - DNA, 25 bp, Homo sapien
gtcatccgttcaaactgcaggcagg

SEQ ID NO: 1042928 - DNA, 25 bp, Homo sapien
catggacactgtgaactgtgaccaa

SEQ ID NO: 1042929 - DNA, 25 bp, Homo sapien
tgtgaactgtgaccaagttggtttc

SEQ ID NO: 1042930 - DNA, 25 bp, Homo sapien
ccatccattgtatctcatggacact

SEQ ID NO: 1042931 - DNA, 25 bp, Homo sapien
agcatccatccattgtatctcatgg

SEQ ID NO: 1042932 - DNA, 25 bp, Homo sapien
ttggtttacagttgctgaccctggg

SEQ ID NO: 1042933 - DNA, 25 bp, Homo sapien
catgatggttgaactccctttaggg

SEQ ID NO: 1042934 - DNA, 25 bp, Homo sapien
caagatgtggcacctcagcaacagt

SEQ ID NO: 1042935 - DNA, 25 bp, Homo sapien
gggcctgtttgaatgtcatcgtcac

SEQ ID NO: 1042936 - DNA, 25 bp, Homo sapien
aagaacaaaatctagcttagattcc

SEQ ID NO: 1042937 - DNA, 25 bp, Homo sapien
tttgccttttgcatcaaagaaaaat

SEQ ID NO: 1042938 - DNA, 25 bp, Homo sapien
agaacaaaatctagcttagattcct

SEQ ID NO: 1042939 - DNA, 25 bp, Homo sapien
gaacaaaatctagcttagattcctc

SEQ ID NO: 1042940 - DNA, 25 bp, Homo sapien
gaatttgagttctgcatcctgttct

SEQ ID NO: 1042941 - DNA, 25 bp, Homo sapien
tcaccatctctacaaatactcgtct

SEQ ID NO: 1042942 - DNA, 25 bp, Homo sapien
tcttcaccatctctacaaatactcg

SEQ ID NO: 1042943 - DNA, 25 bp, Homo sapien
ctgggaatttgagttctgcatcctg

SEQ ID NO: 1042944 - DNA, 25 bp, Homo sapien
ggccctttgaactgggggactgtga

SEQ ID NO: 1042945 - DNA, 25 bp, Homo sapien
ctaggagtcggggtaatgggctgtg

SEQ ID NO: 1042946 - DNA, 25 bp, Homo sapien
ctgtgagatgccactcgctccctgg

SEQ ID NO: 1042947 - DNA, 25 bp, Homo sapien
gaggctgtcccttcttgtcatacca

SEQ ID NO: 1042948 - DNA, 25 bp, Homo sapien
gtccatctttagggaggcttttctg

SEQ ID NO: 1042949 - DNA, 25 bp, Homo sapien
ctgggcttagaatgcaaaaggctct

SEQ ID NO: 1042950 - DNA, 25 bp, Homo sapien
tcacatgaggcctggtgggacgagg

SEQ ID NO: 1042951 - DNA, 25 bp, Homo sapien
tgaggcctggtgggacgaggtttct

SEQ ID NO: 1042952 - DNA, 25 bp, Homo sapien
catgaggcctggtgggacgaggttt

SEQ ID NO: 1042953 - DNA, 25 bp, Homo sapien
ggatcacatgaggcctggtgggacg

SEQ ID NO: 1042954 - DNA, 25 bp, Homo sapien
tgccaggccataacggagacttgaa

SEQ ID NO: 1042955 - DNA, 25 bp, Homo sapien
ggaacatcatgacccaacgtggacc

SEQ ID NO: 1042956 - DNA, 25 bp, Homo sapien
tgaattcactatcccaaggccctga

SEQ ID NO: 1042957 - DNA, 25 bp, Homo sapien
tgaggctccagtacaagtcttaggt

SEQ ID NO: 1042958 - DNA, 25 bp, Homo sapien
caaaggtaccaagggtgaatgcttt

SEQ ID NO: 1042959 - DNA, 25 bp, Homo sapien
attggtccaacatggcccgtcctag

SEQ ID NO: 1042960 - DNA, 25 bp, Homo sapien
tatatgtcattagccagattggtcc

SEQ ID NO: 1042961 - DNA, 25 bp, Homo sapien
cacaggagcttttccttatatgtca

SEQ ID NO: 1042962 - DNA, 25 bp, Homo sapien
cctatacaacaggaagtacagaggt

SEQ ID NO: 1042963 - DNA, 25 bp, Homo sapien
catggttcagagctcagtgattctc

SEQ ID NO: 1042964 - DNA, 25 bp, Homo sapien
tacagaggtaggcagttcattcatg

SEQ ID NO: 1042965 - DNA, 25 bp, Homo sapien
aaatacatagacctgactacagtgg

SEQ ID NO: 1042966 - DNA, 25 bp, Homo sapien
acactttggaatgcagatctggaag

SEQ ID NO: 1042967 - DNA, 25 bp, Homo sapien
ggaagctattttttccctccagaca

SEQ ID NO: 1042968 - DNA, 25 bp, Homo sapien
aggagcacactttggaatgcagatc

SEQ ID NO: 1042969 - DNA, 25 bp, Homo sapien
tttggaatgcagatctggaagctat

SEQ ID NO: 1042970 - DNA, 25 bp, Homo sapien
caggagcttccggacagctgagcag

SEQ ID NO: 1042971 - DNA, 25 bp, Homo sapien
ttatccaatgaagtttccataacag

SEQ ID NO: 1042972 - DNA, 25 bp, Homo sapien
tgtccatgctccaatcatgcttatc

SEQ ID NO: 1042973 - DNA, 25 bp, Homo sapien
taaatgtgttactctgacttctgtg

SEQ ID NO: 1042974 - DNA, 25 bp, Homo sapien
gagagcagcacaggatcacagcctg

SEQ ID NO: 1042975 - DNA, 25 bp, Homo sapien
tcacagcctgatttggcctcagagg

SEQ ID NO: 1042976 - DNA, 25 bp, Homo sapien
ggagcagcaccaatattcatccggg

SEQ ID NO: 1042977 - DNA, 25 bp, Homo sapien
gatgctgcacagagatcgaagttca

SEQ ID NO: 1042978 - DNA, 25 bp, Homo sapien
cccgcgcggcactcgccttggccgg

SEQ ID NO: 1042979 - DNA, 25 bp, Homo sapien
ccgcgcggcactcgccttggccggg

SEQ ID NO: 1042980 - DNA, 25 bp, Homo sapien
gcgcggcactcgccttggccgggcc

SEQ ID NO: 1042981 - DNA, 25 bp, Homo sapien
gcccgcgcggcactcgccttggccg

SEQ ID NO: 1042982 - DNA, 25 bp, Homo sapien
gggctcgccgatgccctggttgagg

SEQ ID NO: 1042983 - DNA, 25 bp, Homo sapien
ccctggttgaggtctgcgcgccgca

SEQ ID NO: 1042984 - DNA, 25 bp, Homo sapien
agcttggcgctcagctcgcagtccg

SEQ ID NO: 1042985 - DNA, 25 bp, Homo sapien
gagaactccttgaactcggtgtagg

SEQ ID NO: 1042986 - DNA, 25 bp, Homo sapien
gggtgggcactcccgaggctctcca

SEQ ID NO: 1042987 - DNA, 25 bp, Homo sapien
cccccgctaggctgttgtcagccca

SEQ ID NO: 1042988 - DNA, 25 bp, Homo sapien
tctttgcctctctgacaggagggtt

SEQ ID NO: 1042989 - DNA, 25 bp, Homo sapien
tgggcactcccgaggctctccaggg

SEQ ID NO: 1042990 - DNA, 25 bp, Homo sapien
tcagcttgctgtcaaagtcctcatc

SEQ ID NO: 1042991 - DNA, 25 bp, Homo sapien
tgatcatgtttttcaggcccaggtg

SEQ ID NO: 1042992 - DNA, 25 bp, Homo sapien
tcgatgaagccgtcccgcccggcat

SEQ ID NO: 1042993 - DNA, 25 bp, Homo sapien
ggccccaagtttctccatcatgagt

SEQ ID NO: 1042994 - DNA, 25 bp, Homo sapien
tgtctcggagtgagatcctgggcgt

SEQ ID NO: 1042995 - DNA, 25 bp, Homo sapien
tgggcgtgaagtcacccagtgccgt

SEQ ID NO: 1042996 - DNA, 25 bp, Homo sapien
ctgcgaaaccggcttgcccctagct

SEQ ID NO: 1042997 - DNA, 25 bp, Homo sapien
cagtatcatcgctgtctggcttggg

SEQ ID NO: 1042998 - DNA, 25 bp, Homo sapien
gccgccgccttgcggaagatcagga

SEQ ID NO: 1042999 - DNA, 25 bp, Homo sapien
aaagaagctcttggcccccttgaca

SEQ ID NO: 1043000 - DNA, 25 bp, Homo sapien
cttgacaccctcactggagacgtcg

SEQ ID NO: 1043001 - DNA, 25 bp, Homo sapien
ctggagacgtcgatctcagagaggc

SEQ ID NO: 1043002 - DNA, 25 bp, Homo sapien
gcgctcgaagggagtcgctcaagct

SEQ ID NO: 1043003 - DNA, 25 bp, Homo sapien
tgtggctgctgcaaagcaagggcgc

SEQ ID NO: 1043004 - DNA, 25 bp, Homo sapien
gaagggagtcgctcaagctgctgcc

SEQ ID NO: 1043005 - DNA, 25 bp, Homo sapien
aaagcaagggcgctcgaagggagtc

SEQ ID NO: 1043006 - DNA, 25 bp, Homo sapien
accatgttggccatgttagctgatc

SEQ ID NO: 1043007 - DNA, 25 bp, Homo sapien
attatgggtgccctccaccatgccc

SEQ ID NO: 1043008 - DNA, 25 bp, Homo sapien
tgttggccatgttagctgatctcga

SEQ ID NO: 1043009 - DNA, 25 bp, Homo sapien
ttatgggtgccctccaccatgcccg

SEQ ID NO: 1043010 - DNA, 25 bp, Homo sapien
agctccttgaaggccgctttccgct

SEQ ID NO: 1043011 - DNA, 25 bp, Homo sapien
cgaagcggctggacacgttgatggc

SEQ ID NO: 1043012 - DNA, 25 bp, Homo sapien
gaaggccgctttccgctgcttcatc

SEQ ID NO: 1043013 - DNA, 25 bp, Homo sapien
aagcggctggacacgttgatggcct

SEQ ID NO: 1043014 - DNA, 25 bp, Homo sapien
tgtggcggcctcgtgcagagtggaa

SEQ ID NO: 1043015 - DNA, 25 bp, Homo sapien
gacacaggcaaggattcaggctcgg

SEQ ID NO: 1043016 - DNA, 25 bp, Homo sapien
tgcaagagagcccagggattgccag

SEQ ID NO: 1043017 - DNA, 25 bp, Homo sapien
ttttagtagtggtcccgtcagacac

SEQ ID NO: 1043018 - DNA, 25 bp, Homo sapien
tcgtgcctccaattagccccttggg

SEQ ID NO: 1043019 - DNA, 25 bp, Homo sapien
gggtcccctcgtgcctccaattagc

SEQ ID NO: 1043020 - DNA, 25 bp, Homo sapien
ttcagtagatggaagacgcagagga

SEQ ID NO: 1043021 - DNA, 25 bp, Homo sapien
ctctcccatttcagtagatggaaga

SEQ ID NO: 1043022 - DNA, 25 bp, Homo sapien
ggtgggcctgtgaggtagattggca

SEQ ID NO: 1043023 - DNA, 25 bp, Homo sapien
tgggcctgtgaggtagattggcaca

SEQ ID NO: 1043024 - DNA, 25 bp, Homo sapien
gtgggcctgtgaggtagattggcac

SEQ ID NO: 1043025 - DNA, 25 bp, Homo sapien
gggtgggcctgtgaggtagattggc

SEQ ID NO: 1043026 - DNA, 25 bp, Homo sapien
taaagcacttctcggaggcttctcg

SEQ ID NO: 1043027 - DNA, 25 bp, Homo sapien
gcctggcgcatgcaaacacacttaa

SEQ ID NO: 1043028 - DNA, 25 bp, Homo sapien
aagcgctcgtctccttccctaggaa

SEQ ID NO: 1043029 - DNA, 25 bp, Homo sapien
tctcggagaatcaaggcgaagcgct

SEQ ID NO: 1043030 - DNA, 25 bp, Homo sapien
tatccgctaaggcaaacgcaatccg

SEQ ID NO: 1043031 - DNA, 25 bp, Homo sapien
gttgcataactgtggcctcgagggc

SEQ ID NO: 1043032 - DNA, 25 bp, Homo sapien
catgacaggcaggtcgctggtgaca

SEQ ID NO: 1043033 - DNA, 25 bp, Homo sapien
taaaacctctgcaagtccgcgtagc

SEQ ID NO: 1043034 - DNA, 25 bp, Homo sapien
taggcacaaagcacctagactcatg

SEQ ID NO: 1043035 - DNA, 25 bp, Homo sapien
agaaccatacacacataagaatata

SEQ ID NO: 1043036 - DNA, 25 bp, Homo sapien
acagcatctgggcataaaacaccaa

SEQ ID NO: 1043037 - DNA, 25 bp, Homo sapien
accaacctcctccactagggcaggt

SEQ ID NO: 1043038 - DNA, 25 bp, Homo sapien
cctctaaaggtgtcatgggctccag

SEQ ID NO: 1043039 - DNA, 25 bp, Homo sapien
tatggatatcggctgacggaagccc

SEQ ID NO: 1043040 - DNA, 25 bp, Homo sapien
gaggttctagacgacccaagggctg

SEQ ID NO: 1043041 - DNA, 25 bp, Homo sapien
tctggccttgatcaccgagactgaa

SEQ ID NO: 1043042 - DNA, 25 bp, Homo sapien
cacaggccaagagcgcagcgaggac

SEQ ID NO: 1043043 - DNA, 25 bp, Homo sapien
ccaagagcgcagcgaggacagtgat

SEQ ID NO: 1043044 - DNA, 25 bp, Homo sapien
cagcgaggacagtgatgcccaacat

SEQ ID NO: 1043045 - DNA, 25 bp, Homo sapien
agcgcagcgaggacagtgatgccca

SEQ ID NO: 1043046 - DNA, 25 bp, Homo sapien
ctggagagcagaggcccccccactc

SEQ ID NO: 1043047 - DNA, 25 bp, Homo sapien
agagcagaggcccccccactcccca

SEQ ID NO: 1043048 - DNA, 25 bp, Homo sapien
ggagagcagaggcccccccactccc

SEQ ID NO: 1043049 - DNA, 25 bp, Homo sapien
gagcagaggcccccccactccccat

SEQ ID NO: 1043050 - DNA, 25 bp, Homo sapien
cactcgggcggataggttgggcggg

SEQ ID NO: 1043051 - DNA, 25 bp, Homo sapien
ctcctcccaccactcgggcggatag

SEQ ID NO: 1043052 - DNA, 25 bp, Homo sapien
ggcggataggttgggcgggaagctg

SEQ ID NO: 1043053 - DNA, 25 bp, Homo sapien
tcccaccactcgggcggataggttg

SEQ ID NO: 1043054 - DNA, 25 bp, Homo sapien
cacacgtatgcctccacgtgtcgtt

SEQ ID NO: 1043055 - DNA, 25 bp, Homo sapien
cagtgaggacgaagttgctagcaat

SEQ ID NO: 1043056 - DNA, 25 bp, Homo sapien
tgctagcaatcaaagtcccgccaca

SEQ ID NO: 1043057 - DNA, 25 bp, Homo sapien
cacgtgtcgttcttgaggtactgga

SEQ ID NO: 1043058 - DNA, 25 bp, Homo sapien
aacagggatccttcttcgtcttcca

SEQ ID NO: 1043059 - DNA, 25 bp, Homo sapien
gtggacgtggatggtgtccacaccc

SEQ ID NO: 1043060 - DNA, 25 bp, Homo sapien
tgttctttcccacggccacacggta

SEQ ID NO: 1043061 - DNA, 25 bp, Homo sapien
caggagggcattccatctcttgtgg

SEQ ID NO: 1043062 - DNA, 25 bp, Homo sapien
atgatcacccgcactgttgacatag

SEQ ID NO: 1043063 - DNA, 25 bp, Homo sapien
gattcaccatctaacatgatcaccc

SEQ ID NO: 1043064 - DNA, 25 bp, Homo sapien
tggcctttgggaatatcaggacaaa

SEQ ID NO: 1043065 - DNA, 25 bp, Homo sapien
cacaagctcaggctaaggggctcgg

SEQ ID NO: 1043066 - DNA, 25 bp, Homo sapien
ccacatgctctgcaagcttgatgag

SEQ ID NO: 1043067 - DNA, 25 bp, Homo sapien
agccggtgacatagcaggggtagtc

SEQ ID NO: 1043068 - DNA, 25 bp, Homo sapien
cacatgctctgcaagcttgatgagg

SEQ ID NO: 1043069 - DNA, 25 bp, Homo sapien
cggtgacatagcaggggtagtcctt

SEQ ID NO: 1043070 - DNA, 25 bp, Homo sapien
ctctcaggatttgccagggacgata

SEQ ID NO: 1043071 - DNA, 25 bp, Homo sapien
ctcaggatttgccagggacgatact

SEQ ID NO: 1043072 - DNA, 25 bp, Homo sapien
aggatttgccagggacgatactcac

SEQ ID NO: 1043073 - DNA, 25 bp, Homo sapien
caggatttgccagggacgatactca

SEQ ID NO: 1043074 - DNA, 25 bp, Homo sapien
agagtgtctgtcacatggtatgtgc

SEQ ID NO: 1043075 - DNA, 25 bp, Homo sapien
tcagagacccttgctagagtgtctg

SEQ ID NO: 1043076 - DNA, 25 bp, Homo sapien
tcacatggtatgtgcttagtaaata

SEQ ID NO: 1043077 - DNA, 25 bp, Homo sapien
aaaggcaaagtggtggacaaatgtg

SEQ ID NO: 1043078 - DNA, 25 bp, Homo sapien
tacggtataccacagatgtcatccc

SEQ ID NO: 1043079 - DNA, 25 bp, Homo sapien
tctaagtctcccatagtttcatgat

SEQ ID NO: 1043080 - DNA, 25 bp, Homo sapien
gtgtgagccgccacagctgacttct

SEQ ID NO: 1043081 - DNA, 25 bp, Homo sapien
agctgggacctatttgggcatacgg

SEQ ID NO: 1043082 - DNA, 25 bp, Homo sapien
caggctgagatgacgccatcgcccc

SEQ ID NO: 1043083 - DNA, 25 bp, Homo sapien
aatcctggagcacgtggcgtgatcc

SEQ ID NO: 1043084 - DNA, 25 bp, Homo sapien
ccaccagtcaatcctggagcacgtg

SEQ ID NO: 1043085 - DNA, 25 bp, Homo sapien
tgcagcttatcagcaatggggccgt

SEQ ID NO: 1043086 - DNA, 25 bp, Homo sapien
tccctggactggtggagcaaatgca

SEQ ID NO: 1043087 - DNA, 25 bp, Homo sapien
tgttttatggttctggtctccctgg

SEQ ID NO: 1043088 - DNA, 25 bp, Homo sapien
taagactctgtgagctactcagagc

SEQ ID NO: 1043089 - DNA, 25 bp, Homo sapien
gatgatgttaatcctctccgtgcct

SEQ ID NO: 1043090 - DNA, 25 bp, Homo sapien
taccggcttcttgcgggtgttgcag

SEQ ID NO: 1043091 - DNA, 25 bp, Homo sapien
caggaaccgttctccaactggcagt

SEQ ID NO: 1043092 - DNA, 25 bp, Homo sapien
gagccaaagctgacgatgccaaaca

SEQ ID NO: 1043093 - DNA, 25 bp, Homo sapien
gatccagtcgatgtaggcggacacc

SEQ ID NO: 1043094 - DNA, 25 bp, Homo sapien
agtttattgctgttgcagggactcg

SEQ ID NO: 1043095 - DNA, 25 bp, Homo sapien
tttattgctgttgcagggactcgct

SEQ ID NO: 1043096 - DNA, 25 bp, Homo sapien
aggaagtttattgctgttgcaggga

SEQ ID NO: 1043097 - DNA, 25 bp, Homo sapien
ggagaaggaagtttattgctgttgc

SEQ ID NO: 1043098 - DNA, 25 bp, Homo sapien
cagaagctgcacaaatcaaggatcc

SEQ ID NO: 1043099 - DNA, 25 bp, Homo sapien
taggatcggagaagcgagtgatttc

SEQ ID NO: 1043100 - DNA, 25 bp, Homo sapien
acctgttcgcagcttgtgagatgga

SEQ ID NO: 1043101 - DNA, 25 bp, Homo sapien
tctctttggctccatagtgtggaaa

SEQ ID NO: 1043102 - DNA, 25 bp, Homo sapien
gagcggacttatcagtgagagatac

SEQ ID NO: 1043103 - DNA, 25 bp, Homo sapien
gatacagtaagagcacgcaagatgg

SEQ ID NO: 1043104 - DNA, 25 bp, Homo sapien
aggccctggttttatgagcggactt

SEQ ID NO: 1043105 - DNA, 25 bp, Homo sapien
tgtaagcgtggccctggataaggcc

SEQ ID NO: 1043106 - DNA, 25 bp, Homo sapien
tggacagcagcagcgtccttatcat

SEQ ID NO: 1043107 - DNA, 25 bp, Homo sapien
agccaccaaagtggacagcagcagc

SEQ ID NO: 1043108 - DNA, 25 bp, Homo sapien
cagccaccaaagtggacagcagcag

SEQ ID NO: 1043109 - DNA, 25 bp, Homo sapien
ctccagccaccaaagtggacagcag

SEQ ID NO: 1043110 - DNA, 25 bp, Homo sapien
cttcttcaccgccaaccaccctagt

SEQ ID NO: 1043111 - DNA, 25 bp, Homo sapien
caccctagtcacataaggtgggtaa

SEQ ID NO: 1043112 - DNA, 25 bp, Homo sapien
gccaaccaccctagtcacataaggt

SEQ ID NO: 1043113 - DNA, 25 bp, Homo sapien
ctagtcacataaggtgggtaagtgg

SEQ ID NO: 1043114 - DNA, 25 bp, Homo sapien
accctccgcaggtgtggtaccactt

SEQ ID NO: 1043115 - DNA, 25 bp, Homo sapien
tccgcaggtgtggtaccacttgcca

SEQ ID NO: 1043116 - DNA, 25 bp, Homo sapien
cgcaggtgtggtaccacttgccatt

SEQ ID NO: 1043117 - DNA, 25 bp, Homo sapien
ccctccgcaggtgtggtaccacttg

SEQ ID NO: 1043118 - DNA, 25 bp, Homo sapien
gccagcgagccggactccgcaacgt

SEQ ID NO: 1043119 - DNA, 25 bp, Homo sapien
gactccgcaacgtagaggttgtgcc

SEQ ID NO: 1043120 - DNA, 25 bp, Homo sapien
ttggagatttggttggagttccagt

SEQ ID NO: 1043121 - DNA, 25 bp, Homo sapien
atcttagagacactgactgccagcg

SEQ ID NO: 1043122 - DNA, 25 bp, Homo sapien
tcacccccaagtgcacccagacaga

SEQ ID NO: 1043123 - DNA, 25 bp, Homo sapien
gtgtggttgagacccttgcctctgt

SEQ ID NO: 1043124 - DNA, 25 bp, Homo sapien
tggtgtggttgagacccttgcctct

SEQ ID NO: 1043125 - DNA, 25 bp, Homo sapien
ggtgtggtgtggttgagacccttgc

SEQ ID NO: 1043126 - DNA, 25 bp, Homo sapien
gccccagggcatgtttgaaaatgca

SEQ ID NO: 1043127 - DNA, 25 bp, Homo sapien
gtgtcctactccagggacagtcaca

SEQ ID NO: 1043128 - DNA, 25 bp, Homo sapien
aggttgctctgactggcagggcccc

SEQ ID NO: 1043129 - DNA, 25 bp, Homo sapien
gagagattgtgtcctactccaggga

SEQ ID NO: 1043130 - DNA, 25 bp, Homo sapien
catgaggaccgggttgacttttcct

SEQ ID NO: 1043131 - DNA, 25 bp, Homo sapien
gggtgagtgtggaggcgaagcatga

SEQ ID NO: 1043132 - DNA, 25 bp, Homo sapien
gcgaagcatgaggaccgggttgact

SEQ ID NO: 1043133 - DNA, 25 bp, Homo sapien
tgaggaccgggttgacttttcctgc

SEQ ID NO: 1043134 - DNA, 25 bp, Homo sapien
ttccccagcccgtgacgtagcaggg

SEQ ID NO: 1043135 - DNA, 25 bp, Homo sapien
ttgggtagaatggtgccggcaggag

SEQ ID NO: 1043136 - DNA, 25 bp, Homo sapien
gacggggttagccagtttgagcagg

SEQ ID NO: 1043137 - DNA, 25 bp, Homo sapien
gctggatcttgtcggtgagggagac

SEQ ID NO: 1043138 - DNA, 25 bp, Homo sapien
gcagggactcctgagaaaaaggaag

SEQ ID NO: 1043139 - DNA, 25 bp, Homo sapien
ggatgcagggactcctgagaaaaag

SEQ ID NO: 1043140 - DNA, 25 bp, Homo sapien
cagagagaagccattagggatgcag

SEQ ID NO: 1043141 - DNA, 25 bp, Homo sapien
gatgcagggactcctgagaaaaagg

SEQ ID NO: 1043142 - DNA, 25 bp, Homo sapien
aggacatcaggaacagccccgttgg

SEQ ID NO: 1043143 - DNA, 25 bp, Homo sapien
cacagatcatactggttttcacgct

SEQ ID NO: 1043144 - DNA, 25 bp, Homo sapien
tggcatagtccacaaccagcaaccg

SEQ ID NO: 1043145 - DNA, 25 bp, Homo sapien
catactggttttcacgctgctgccc

SEQ ID NO: 1043146 - DNA, 25 bp, Homo sapien
ccaaggttgcacaggcagtttgtaa

SEQ ID NO: 1043147 - DNA, 25 bp, Homo sapien
ggtaaatattcgtagcatccccagg

SEQ ID NO: 1043148 - DNA, 25 bp, Homo sapien
gatctgaagggcgtgtggaactctt

SEQ ID NO: 1043149 - DNA, 25 bp, Homo sapien
gcaggtcactgtcctcggaagctga

SEQ ID NO: 1043150 - DNA, 25 bp, Homo sapien
cagccgaggcgagacccgaagctga

SEQ ID NO: 1043151 - DNA, 25 bp, Homo sapien
gaagctgacgatgccgtgcacctgc

SEQ ID NO: 1043152 - DNA, 25 bp, Homo sapien
cttgtggtagtagttgcagccgagg

SEQ ID NO: 1043153 - DNA, 25 bp, Homo sapien
acagttcagtggcccgccagagtct

SEQ ID NO: 1043154 - DNA, 25 bp, Homo sapien
ccttctgtgacctttccaagtctga

SEQ ID NO: 1043155 - DNA, 25 bp, Homo sapien
tgacctttccaagtctgaaacagtc

SEQ ID NO: 1043156 - DNA, 25 bp, Homo sapien
tttgcatagttgtcactttattata

SEQ ID NO: 1043157 - DNA, 25 bp, Homo sapien
gcatagttgtcactttattatatta

SEQ ID NO: 1043158 - DNA, 25 bp, Homo sapien
tggacagcagcagggtcctaatcat

SEQ ID NO: 1043159 - DNA, 25 bp, Homo sapien
agccaccaaagtggacagcagcagg

SEQ ID NO: 1043160 - DNA, 25 bp, Homo sapien
cagccaccaaagtggacagcagcag

SEQ ID NO: 1043161 - DNA, 25 bp, Homo sapien
ctccagccaccaaagtggacagcag

SEQ ID NO: 1043162 - DNA, 25 bp, Homo sapien
aggcgcgtaagtggagaccccacaa

SEQ ID NO: 1043163 - DNA, 25 bp, Homo sapien
catatcaggcgcgtaagtggagacc

SEQ ID NO: 1043164 - DNA, 25 bp, Homo sapien
cgcgtaagtggagaccccacaactg

SEQ ID NO: 1043165 - DNA, 25 bp, Homo sapien
ctagacatatcaggcgcgtaagtgg

SEQ ID NO: 1043166 - DNA, 25 bp, Homo sapien
ctgttgggcctcgcttcttcacctc

SEQ ID NO: 1043167 - DNA, 25 bp, Homo sapien
tgttgggcctcgcttcttcacctcc

SEQ ID NO: 1043168 - DNA, 25 bp, Homo sapien
gttgggcctcgcttcttcacctcca

SEQ ID NO: 1043169 - DNA, 25 bp, Homo sapien
ttgggcctcgcttcttcacctccaa

SEQ ID NO: 1043170 - DNA, 25 bp, Homo sapien
tccgcaggtgtggtaccactggcca

SEQ ID NO: 1043171 - DNA, 25 bp, Homo sapien
accctccgcaggtgtggtaccactg

SEQ ID NO: 1043172 - DNA, 25 bp, Homo sapien
gcaggtgtggtaccactggccattg

SEQ ID NO: 1043173 - DNA, 25 bp, Homo sapien
cctccgcaggtgtggtaccactggc

SEQ ID NO: 1043174 - DNA, 25 bp, Homo sapien
tgcagaaccttgtgggcctttataa

SEQ ID NO: 1043175 - DNA, 25 bp, Homo sapien
gataagtgaacaacgttgcagaacc

SEQ ID NO: 1043176 - DNA, 25 bp, Homo sapien
agaaactccggtgagttccagctgt

SEQ ID NO: 1043177 - DNA, 25 bp, Homo sapien
tgtgatgagcagaggtcacggacaa

SEQ ID NO: 1043178 - DNA, 25 bp, Homo sapien
tggagacctggtcggagttccagtc

SEQ ID NO: 1043179 - DNA, 25 bp, Homo sapien
caccacaatcttagagacactgacg

SEQ ID NO: 1043180 - DNA, 25 bp, Homo sapien
gactctgcaacgtagaggttatgct

SEQ ID NO: 1043181 - DNA, 25 bp, Homo sapien
catcacgcggtagatcccggaggag

SEQ ID NO: 1043182 - DNA, 25 bp, Homo sapien
gacggggttagccagtttgagcagg

SEQ ID NO: 1043183 - DNA, 25 bp, Homo sapien
gctggatcttgtcggtgagggagac

SEQ ID NO: 1043184 - DNA, 25 bp, Homo sapien
ttgggtagaatggtgccggcaggag

SEQ ID NO: 1043185 - DNA, 25 bp, Homo sapien
ttccccagcccgtgacgtagcaggg

SEQ ID NO: 1043186 - DNA, 25 bp, Homo sapien
agagagaagccattagggacgcagg

SEQ ID NO: 1043187 - DNA, 25 bp, Homo sapien
gagagaagccattagggacgcaggg

SEQ ID NO: 1043188 - DNA, 25 bp, Homo sapien
agagaagccattagggacgcaggga

SEQ ID NO: 1043189 - DNA, 25 bp, Homo sapien
cagagagaagccattagggacgcag

SEQ ID NO: 1043190 - DNA, 25 bp, Homo sapien
cccagcacagatcatattcgtcttc

SEQ ID NO: 1043191 - DNA, 25 bp, Homo sapien
ggcatagtccacaaccagcaactgg

SEQ ID NO: 1043192 - DNA, 25 bp, Homo sapien
gcaggtgcatatcacgccatcaccc

SEQ ID NO: 1043193 - DNA, 25 bp, Homo sapien
tattcgtcttcacggtgctgcccca

SEQ ID NO: 1043194 - DNA, 25 bp, Homo sapien
gtagtagtagttgcaaccaaggacc

SEQ ID NO: 1043195 - DNA, 25 bp, Homo sapien
cgacgtgaggctgccgatgccatgc

SEQ ID NO: 1043196 - DNA, 25 bp, Homo sapien
agatgcctgacagttcagcggccca

SEQ ID NO: 1043197 - DNA, 25 bp, Homo sapien
tagttgcaaccaaggaccgacgtga

SEQ ID NO: 1043198 - DNA, 25 bp, Homo sapien
tgccacgaataccataactccctct

SEQ ID NO: 1043199 - DNA, 25 bp, Homo sapien
ggctctgccacgaataccataactc

SEQ ID NO: 1043200 - DNA, 25 bp, Homo sapien
ggggctctgccacgaataccataac

SEQ ID NO: 1043201 - DNA, 25 bp, Homo sapien
tctgccacgaataccataactccct

SEQ ID NO: 1043202 - DNA, 25 bp, Homo sapien
ttgcatagttgtcactttatataat

SEQ ID NO: 1043203 - DNA, 25 bp, Homo sapien
tgcatagttgtcactttatataata

SEQ ID NO: 1043204 - DNA, 25 bp, Homo sapien
tttgcatagttgtcactttatataa

SEQ ID NO: 1043205 - DNA, 25 bp, Homo sapien
caccctgaggtcttttaagctgtcc

SEQ ID NO: 1043206 - DNA, 25 bp, Homo sapien
actgcagtgtgaacgtgctgtgcaa

SEQ ID NO: 1043207 - DNA, 25 bp, Homo sapien
ggtcccctgagtcctagccatgctt

SEQ ID NO: 1043208 - DNA, 25 bp, Homo sapien
tgtgcaatagtgacacgctgggctt

SEQ ID NO: 1043209 - DNA, 25 bp, Homo sapien
gcttcgtatcctgctaatatgctaa

SEQ ID NO: 1043210 - DNA, 25 bp, Homo sapien
tcaactgcttggactcaagtggttc

SEQ ID NO: 1043211 - DNA, 25 bp, Homo sapien
gatgctattgtcaatggaaccattt

SEQ ID NO: 1043212 - DNA, 25 bp, Homo sapien
taaaatcataccatttgtgagtaga

SEQ ID NO: 1043213 - DNA, 25 bp, Homo sapien
gcccagcaacaaggtttccaggtga

SEQ ID NO: 1043214 - DNA, 25 bp, Homo sapien
aagttcccaagcgatattgatgccg

SEQ ID NO: 1043215 - DNA, 25 bp, Homo sapien
cctggaggaccatactgctgattag

SEQ ID NO: 1043216 - DNA, 25 bp, Homo sapien
cagatggatgccctgtgtcggtcga

SEQ ID NO: 1043217 - DNA, 25 bp, Homo sapien
ttacatcctgagcatggagccctgt

SEQ ID NO: 1043218 - DNA, 25 bp, Homo sapien
caacaatgtgaacttctgccgtgag

SEQ ID NO: 1043219 - DNA, 25 bp, Homo sapien
gttgcggcgtcgcttctcctcgctg

SEQ ID NO: 1043220 - DNA, 25 bp, Homo sapien
catcgactgtgagaagttgcggcgt

SEQ ID NO: 1043221 - DNA, 25 bp, Homo sapien
cggaaacacccagaccagtggacat

SEQ ID NO: 1043222 - DNA, 25 bp, Homo sapien
aaaccttaccccagtggtgctcaga

SEQ ID NO: 1043223 - DNA, 25 bp, Homo sapien
caagcagcaaagttgtcgaagccaa

SEQ ID NO: 1043224 - DNA, 25 bp, Homo sapien
ccagagattcgcaaaccagaggttc

SEQ ID NO: 1043225 - DNA, 25 bp, Homo sapien
gccaaaaggctgatcgtgaccaaag

SEQ ID NO: 1043226 - DNA, 25 bp, Homo sapien
gacgcttaaaggtctatcgcactga

SEQ ID NO: 1043227 - DNA, 25 bp, Homo sapien
gctccgtgctccagttagttcgccg

SEQ ID NO: 1043228 - DNA, 25 bp, Homo sapien
ttgctatagaaacgaggcgcgctct

SEQ ID NO: 1043229 - DNA, 25 bp, Homo sapien
tagctgacatgcgagatagacggcg

SEQ ID NO: 1043230 - DNA, 25 bp, Homo sapien
tgggcagcatatccaggaccaggaa

SEQ ID NO: 1043231 - DNA, 25 bp, Homo sapien
aaacacctgcccaacaggtaggctg

SEQ ID NO: 1043232 - DNA, 25 bp, Homo sapien
ttccttccagctagagggccgaagt

SEQ ID NO: 1043233 - DNA, 25 bp, Homo sapien
gcccagagtcaacagtcaacaaatg

SEQ ID NO: 1043234 - DNA, 25 bp, Homo sapien
gaagactaggatctattctccacta

SEQ ID NO: 1043235 - DNA, 25 bp, Homo sapien
ctactggttaagcatatgggttgaa

SEQ ID NO: 1043236 - DNA, 25 bp, Homo sapien
taaacttactaagcatcagcgtcct

SEQ ID NO: 1043237 - DNA, 25 bp, Homo sapien
taagtgcaagtttaatgccgcctgg

SEQ ID NO: 1043238 - DNA, 25 bp, Homo sapien
taaaagtttcaagctccatctctgg

SEQ ID NO: 1043239 - DNA, 25 bp, Homo sapien
cagtggtggatttccgtaagtgcaa

SEQ ID NO: 1043240 - DNA, 25 bp, Homo sapien
taatgaacagggtagtgctggaact

SEQ ID NO: 1043241 - DNA, 25 bp, Homo sapien
cctaaataggataatcaggacgact

SEQ ID NO: 1043242 - DNA, 25 bp, Homo sapien
tacaaacatggacgtgaaacactct

SEQ ID NO: 1043243 - DNA, 25 bp, Homo sapien
taaacaaactcatgaaactgtaaga

SEQ ID NO: 1043244 - DNA, 25 bp, Homo sapien
actacaaaatgagatagttgtggca

SEQ ID NO: 1043245 - DNA, 25 bp, Homo sapien
ggctgacccctaggactctgtatgg

SEQ ID NO: 1043246 - DNA, 25 bp, Homo sapien
tcccgggcgagcttcttataagcct

SEQ ID NO: 1043247 - DNA, 25 bp, Homo sapien
tgggtcaaaatccaacgcagacaga

SEQ ID NO: 1043248 - DNA, 25 bp, Homo sapien
gcctgactggctgttcggctgaccc

SEQ ID NO: 1043249 - DNA, 25 bp, Homo sapien
ctcgtaagccttactgatttgaatg

SEQ ID NO: 1043250 - DNA, 25 bp, Homo sapien
tcgtaagccttactgatttgaatga

SEQ ID NO: 1043251 - DNA, 25 bp, Homo sapien
cgtaagccttactgatttgaatgaa

SEQ ID NO: 1043252 - DNA, 25 bp, Homo sapien
gtaagccttactgatttgaatgaac

SEQ ID NO: 1043253 - DNA, 25 bp, Homo sapien
gcgtctccatattgatcataatttg

SEQ ID NO: 1043254 - DNA, 25 bp, Homo sapien
cttctggtagccctggttctctcca

SEQ ID NO: 1043255 - DNA, 25 bp, Homo sapien
tgttgctgcttctggtagccctggt

SEQ ID NO: 1043256 - DNA, 25 bp, Homo sapien
tggttctctccagcgtctccatatt

SEQ ID NO: 1043257 - DNA, 25 bp, Homo sapien
cacacaggctcgatatgaatgcagc

SEQ ID NO: 1043258 - DNA, 25 bp, Homo sapien
tgcagctaaagcaccaatcggaggt

SEQ ID NO: 1043259 - DNA, 25 bp, Homo sapien
tgagtcccgccgttcagaattaaaa

SEQ ID NO: 1043260 - DNA, 25 bp, Homo sapien
gaaatggcggaagcgatactctcgc

SEQ ID NO: 1043261 - DNA, 25 bp, Homo sapien
cccctaggtgatgggccaggcgtct

SEQ ID NO: 1043262 - DNA, 25 bp, Homo sapien
cccgttaatgattcctaggatagag

SEQ ID NO: 1043263 - DNA, 25 bp, Homo sapien
tacaaattgtcgcagattttcacgg

SEQ ID NO: 1043264 - DNA, 25 bp, Homo sapien
gattttcacggacaactgcattgtg

SEQ ID NO: 1043265 - DNA, 25 bp, Homo sapien
tggaaataaccacccgcttgggagc

SEQ ID NO: 1043266 - DNA, 25 bp, Homo sapien
gctatgttaatctatgccgggcaca

SEQ ID NO: 1043267 - DNA, 25 bp, Homo sapien
caactcattacgatgggctccaaca

SEQ ID NO: 1043268 - DNA, 25 bp, Homo sapien
caaagcgggctatttcatgtctcca

SEQ ID NO: 1043269 - DNA, 25 bp, Homo sapien
gagaggaatctgacgtaatttttat

SEQ ID NO: 1043270 - DNA, 25 bp, Homo sapien
aacagtggcacaatgggcgtttggt

SEQ ID NO: 1043271 - DNA, 25 bp, Homo sapien
cacaatgggcgtttggtcaaacaga

SEQ ID NO: 1043272 - DNA, 25 bp, Homo sapien
ccagagaggaatctgacgtaatttt

SEQ ID NO: 1043273 - DNA, 25 bp, Homo sapien
atacatatccaaatgataaataatc

SEQ ID NO: 1043274 - DNA, 25 bp, Homo sapien
ctcttccgtccctctcaaacccaca

SEQ ID NO: 1043275 - DNA, 25 bp, Homo sapien
ccacatatacatatccaaatgataa

SEQ ID NO: 1043276 - DNA, 25 bp, Homo sapien
gggcgtagatattgatgttgtaccg

SEQ ID NO: 1043277 - DNA, 25 bp, Homo sapien
cgtagatattgatgttgtaccgcct

SEQ ID NO: 1043278 - DNA, 25 bp, Homo sapien
gaccaagagggtaggggcgtagata

SEQ ID NO: 1043279 - DNA, 25 bp, Homo sapien
gatattgatgttgtaccgccttgtc

SEQ ID NO: 1043280 - DNA, 25 bp, Homo sapien
cagacctgtttgagcgaataaacat

SEQ ID NO: 1043281 - DNA, 25 bp, Homo sapien
tgaccttggctaaagtaatataacc

SEQ ID NO: 1043282 - DNA, 25 bp, Homo sapien
gagcgaataaacatgtggtgatcta

SEQ ID NO: 1043283 - DNA, 25 bp, Homo sapien
atataaccaaacaagacagacctgt

SEQ ID NO: 1043284 - DNA, 25 bp, Homo sapien
cgaccgtttcacagggcagagttca

SEQ ID NO: 1043285 - DNA, 25 bp, Homo sapien
gagcctggctgccaatagatatttg

SEQ ID NO: 1043286 - DNA, 25 bp, Homo sapien
gcagagttcatggaacaacttctgg

SEQ ID NO: 1043287 - DNA, 25 bp, Homo sapien
tgtttcgggtgatgaagtcgtcaat

SEQ ID NO: 1043288 - DNA, 25 bp, Homo sapien
gtaaagtgacccagtctatcccaga

SEQ ID NO: 1043289 - DNA, 25 bp, Homo sapien
cactaggacaggctggcacatctga

SEQ ID NO: 1043290 - DNA, 25 bp, Homo sapien
caatttggtgctaaagtgccctgga

SEQ ID NO: 1043291 - DNA, 25 bp, Homo sapien
ggaatgctttagtagggacagtcac

SEQ ID NO: 1043292 - DNA, 25 bp, Homo sapien
tgtagacatgcacaaatctcactgt

SEQ ID NO: 1043293 - DNA, 25 bp, Homo sapien
gaaacgcctcactgtctggtagtaa

SEQ ID NO: 1043294 - DNA, 25 bp, Homo sapien
tggtagtaaggtgtcggcaaactcc

SEQ ID NO: 1043295 - DNA, 25 bp, Homo sapien
actcctgctgccgattgctgtagac

SEQ ID NO: 1043296 - DNA, 25 bp, Homo sapien
tctaggatctaggatgctgcaagac

SEQ ID NO: 1043297 - DNA, 25 bp, Homo sapien
ggcaggagagatcaaccaggatgaa

SEQ ID NO: 1043298 - DNA, 25 bp, Homo sapien
tgacctttaccgttcactgatagaa

SEQ ID NO: 1043299 - DNA, 25 bp, Homo sapien
tttccagagcacattaccagtggcc

SEQ ID NO: 1043300 - DNA, 25 bp, Homo sapien
gtcgagatagcccaagaggataaat

SEQ ID NO: 1043301 - DNA, 25 bp, Homo sapien
tgtgttgcgcctttctaaaatagac

SEQ ID NO: 1043302 - DNA, 25 bp, Homo sapien
gcaagttcatcggtcaggtcaggaa

SEQ ID NO: 1043303 - DNA, 25 bp, Homo sapien
gctggatctttacgcagctggtcga

SEQ ID NO: 1043304 - DNA, 25 bp, Homo sapien
cctcctggtgtcccacccttcccag

SEQ ID NO: 1043305 - DNA, 25 bp, Homo sapien
tcccacccttcccagccccgatgct

SEQ ID NO: 1043306 - DNA, 25 bp, Homo sapien
cacccttcccagccccgatgctcac

SEQ ID NO: 1043307 - DNA, 25 bp, Homo sapien
ctcctggtgtcccacccttcccagc

SEQ ID NO: 1043308 - DNA, 25 bp, Homo sapien
cagttgttgtgaaaaatgctatccc

SEQ ID NO: 1043309 - DNA, 25 bp, Homo sapien
tatcccagcagtctgagatgtagtc

SEQ ID NO: 1043310 - DNA, 25 bp, Homo sapien
gagatgtagtcagaagcagagtaga

SEQ ID NO: 1043311 - DNA, 25 bp, Homo sapien
gagtagaaccatcgaaggagaaaaa

SEQ ID NO: 1043312 - DNA, 25 bp, Homo sapien
ttacatctatacactggactccacg

SEQ ID NO: 1043313 - DNA, 25 bp, Homo sapien
gggtgccaggaatcacaaacacgaa

SEQ ID NO: 1043314 - DNA, 25 bp, Homo sapien
cacgaatgagatgtggttctgtcct

SEQ ID NO: 1043315 - DNA, 25 bp, Homo sapien
ctcatggtctcatcagtaggtggga

SEQ ID NO: 1043316 - DNA, 25 bp, Homo sapien
ttactaatttcaggcaaacagagct

SEQ ID NO: 1043317 - DNA, 25 bp, Homo sapien
tgtatctcagtataataggctatgc

SEQ ID NO: 1043318 - DNA, 25 bp, Homo sapien
gctcagtgttctaattcacagacag

SEQ ID NO: 1043319 - DNA, 25 bp, Homo sapien
taggctatgctcaataagttctgca

SEQ ID NO: 1043320 - DNA, 25 bp, Homo sapien
cctgaacgatgacagtgccgaagag

SEQ ID NO: 1043321 - DNA, 25 bp, Homo sapien
gcctgaacgatgacagtgccgaaga

SEQ ID NO: 1043322 - DNA, 25 bp, Homo sapien
tttctttggtgaagcttggctcagt

SEQ ID NO: 1043323 - DNA, 25 bp, Homo sapien
ttggtgaagcttggctcagttttcc

SEQ ID NO: 1043324 - DNA, 25 bp, Homo sapien
tttctggagggcttgactctcgctc

SEQ ID NO: 1043325 - DNA, 25 bp, Homo sapien
tgactctcgctcatcattagagtcg

SEQ ID NO: 1043326 - DNA, 25 bp, Homo sapien
cacagtttacatgggaggaggtgca

SEQ ID NO: 1043327 - DNA, 25 bp, Homo sapien
taaggcatctaaacacctacagggt

SEQ ID NO: 1043328 - DNA, 25 bp, Homo sapien
tacactctatgttccaatgctgcgt

SEQ ID NO: 1043329 - DNA, 25 bp, Homo sapien
tagtaaacacaaatcacagtgactt

SEQ ID NO: 1043330 - DNA, 25 bp, Homo sapien
gataaaccacgtcctgcttctggct

SEQ ID NO: 1043331 - DNA, 25 bp, Homo sapien
tgtgtgcgcacaagactggttacgt

SEQ ID NO: 1043332 - DNA, 25 bp, Homo sapien
caggtgcagaagttgctctaggaca

SEQ ID NO: 1043333 - DNA, 25 bp, Homo sapien
tctatgttctttgtctcggagaccc

SEQ ID NO: 1043334 - DNA, 25 bp, Homo sapien
tggagaaatattgaggagttaagat

SEQ ID NO: 1043335 - DNA, 25 bp, Homo sapien
ctgtggagaaatattgaggagttaa

SEQ ID NO: 1043336 - DNA, 25 bp, Homo sapien
gtggagaaatattgaggagttaaga

SEQ ID NO: 1043337 - DNA, 25 bp, Homo sapien
tgtgtagacctccaaagcaaatttc

SEQ ID NO: 1043338 - DNA, 25 bp, Homo sapien
gtagaattcgacaggatgaggacca

SEQ ID NO: 1043339 - DNA, 25 bp, Homo sapien
tggcctcagacgtaccaagttactg

SEQ ID NO: 1043340 - DNA, 25 bp, Homo sapien
cacaaagccttttttaggaatcttg

SEQ ID NO: 1043341 - DNA, 25 bp, Homo sapien
taaaacctctgtaaggagccctcca

SEQ ID NO: 1043342 - DNA, 25 bp, Homo sapien
cagcaggcgttccatccataaagag

SEQ ID NO: 1043343 - DNA, 25 bp, Homo sapien
gaaggtttccctcgagattcaccca

SEQ ID NO: 1043344 - DNA, 25 bp, Homo sapien
ccaggtagagggaagagtcaacatc

SEQ ID NO: 1043345 - DNA, 25 bp, Homo sapien
tgttcacaggggcatgttaaaaagt

SEQ ID NO: 1043346 - DNA, 25 bp, Homo sapien
gttcacaggggcatgttaaaaagtc

SEQ ID NO: 1043347 - DNA, 25 bp, Homo sapien
ctgttcacaggggcatgttaaaaag

SEQ ID NO: 1043348 - DNA, 25 bp, Homo sapien
tgcacgacaggctcatgagggtccg

SEQ ID NO: 1043349 - DNA, 25 bp, Homo sapien
tagaagctgccgtgggttgttcaga

SEQ ID NO: 1043350 - DNA, 25 bp, Homo sapien
gttcagagttaggagcatgcgccat

SEQ ID NO: 1043351 - DNA, 25 bp, Homo sapien
tagccatggttctagaagagcaatc

SEQ ID NO: 1043352 - DNA, 25 bp, Homo sapien
tgcagaactcccgtttattcctttc

SEQ ID NO: 1043353 - DNA, 25 bp, Homo sapien
gggatgctcacagcgtgtctcaagg

SEQ ID NO: 1043354 - DNA, 25 bp, Homo sapien
cggatgggatgctcacagcgtgtct

SEQ ID NO: 1043355 - DNA, 25 bp, Homo sapien
tcaaggctgcatcgcttcagccact

SEQ ID NO: 1043356 - DNA, 25 bp, Homo sapien
agtacttctcgctgtgcagacccct

SEQ ID NO: 1043357 - DNA, 25 bp, Homo sapien
taaaatcgacagaggcagaaaggca

SEQ ID NO: 1043358 - DNA, 25 bp, Homo sapien
aaaggtatgctctctaactggctgg

SEQ ID NO: 1043359 - DNA, 25 bp, Homo sapien
gctttgacatttgaacggaccactc

SEQ ID NO: 1043360 - DNA, 25 bp, Homo sapien
gattccttaagcctgactcatagca

SEQ ID NO: 1043361 - DNA, 25 bp, Homo sapien
ccgggctaattacatggtggcacat

SEQ ID NO: 1043362 - DNA, 25 bp, Homo sapien
ccatttctagttggaccaggtgcca

SEQ ID NO: 1043363 - DNA, 25 bp, Homo sapien
tatggaagaatgaagcctggcagtg

SEQ ID NO: 1043364 - DNA, 25 bp, Homo sapien
gactgatgtatcaaggagccaaatg

SEQ ID NO: 1043365 - DNA, 25 bp, Homo sapien
ggcaccagctctaaaccggtctgta

SEQ ID NO: 1043366 - DNA, 25 bp, Homo sapien
gataaaaattgtgcaacacctgagc

SEQ ID NO: 1043367 - DNA, 25 bp, Homo sapien
gcttttgggctgaaacatctgccag

SEQ ID NO: 1043368 - DNA, 25 bp, Homo sapien
cagtgagaccatggcccctaatgga

SEQ ID NO: 1043369 - DNA, 25 bp, Homo sapien
caagttgatgtaccctctatgactg

SEQ ID NO: 1043370 - DNA, 25 bp, Homo sapien
gcagctgggctcttaatgttactta

SEQ ID NO: 1043371 - DNA, 25 bp, Homo sapien
ctgtggtgatcttaagcgtgtcttg

SEQ ID NO: 1043372 - DNA, 25 bp, Homo sapien
tcttgcaatgcaagggctaccccat

SEQ ID NO: 1043373 - DNA, 25 bp, Homo sapien
tagaattacagtcatgcgtcaccac

SEQ ID NO: 1043374 - DNA, 25 bp, Homo sapien
gctagaattacagtcatgcgtcacc

SEQ ID NO: 1043375 - DNA, 25 bp, Homo sapien
tagctagaattacagtcatgcgtca

SEQ ID NO: 1043376 - DNA, 25 bp, Homo sapien
agaattacagtcatgcgtcaccacg

SEQ ID NO: 1043377 - DNA, 25 bp, Homo sapien
gtggctcacgcctgtaatcccaggc

SEQ ID NO: 1043378 - DNA, 25 bp, Homo sapien
ccagtggctcacgcctgtaatccca

SEQ ID NO: 1043379 - DNA, 25 bp, Homo sapien
aaaagcaggccggacccagtggctc

SEQ ID NO: 1043380 - DNA, 25 bp, Homo sapien
aaaaagcaggccggacccagtggct

SEQ ID NO: 1043381 - DNA, 25 bp, Homo sapien
gatgatctgcttcctagagtattga

SEQ ID NO: 1043382 - DNA, 25 bp, Homo sapien
taggaccactgtgaacgtaagtaaa

SEQ ID NO: 1043383 - DNA, 25 bp, Homo sapien
aaaatacagcttctcctatgaggtg

SEQ ID NO: 1043384 - DNA, 25 bp, Homo sapien
agctcctcctcggacgctgcagtga

SEQ ID NO: 1043385 - DNA, 25 bp, Homo sapien
tcagcgggtcgtctgcagggtattc

SEQ ID NO: 1043386 - DNA, 25 bp, Homo sapien
gattgcgtcgctgacaagttctcaa

SEQ ID NO: 1043387 - DNA, 25 bp, Homo sapien
tggaattaggcctatcgacctcaga

SEQ ID NO: 1043388 - DNA, 25 bp, Homo sapien
aagcgtgttcacagctggcgggcac

SEQ ID NO: 1043389 - DNA, 25 bp, Homo sapien
gaagcccttggtgcatgacattgaa

SEQ ID NO: 1043390 - DNA, 25 bp, Homo sapien
tgtcaaggcctgaacgtgatgggct

SEQ ID NO: 1043391 - DNA, 25 bp, Homo sapien
tgatcttgtcgaagtttcaccaccg

SEQ ID NO: 1043392 - DNA, 25 bp, Homo sapien
aattccaagtcaaagggtggcgtgg

SEQ ID NO: 1043393 - DNA, 25 bp, Homo sapien
tcttactacctgaacttttcccatc

SEQ ID NO: 1043394 - DNA, 25 bp, Homo sapien
tgaacttttcccatcttggtgcctt

SEQ ID NO: 1043395 - DNA, 25 bp, Homo sapien
tgcaggatgggaaccctttcagaca

SEQ ID NO: 1043396 - DNA, 25 bp, Homo sapien
ctgcaggatgggaaccctttcagac

SEQ ID NO: 1043397 - DNA, 25 bp, Homo sapien
ctctctcttgaaatggctgtaacca

SEQ ID NO: 1043398 - DNA, 25 bp, Homo sapien
taagatcttaaaggagggtggccat

SEQ ID NO: 1043399 - DNA, 25 bp, Homo sapien
ctctcttctcatgagggatttctga

SEQ ID NO: 1043400 - DNA, 25 bp, Homo sapien
tctgcttagcaaccttctgggcttt

SEQ ID NO: 1043401 - DNA, 25 bp, Homo sapien
cctgccaaggtaagctcaagagttt

SEQ ID NO: 1043402 - DNA, 25 bp, Homo sapien
gaatggttatgactagaatctcccc

SEQ ID NO: 1043403 - DNA, 25 bp, Homo sapien
caagggcaggacctatgtattgttc

SEQ ID NO: 1043404 - DNA, 25 bp, Homo sapien
taaaagtgcatacaacgggccaggc

SEQ ID NO: 1043405 - DNA, 25 bp, Homo sapien
tgaagtagatattggaaattatagt

SEQ ID NO: 1043406 - DNA, 25 bp, Homo sapien
gatattggaaattatagtttactag

SEQ ID NO: 1043407 - DNA, 25 bp, Homo sapien
aattatagtttactagatgggtact

SEQ ID NO: 1043408 - DNA, 25 bp, Homo sapien
tgtgttttacaaggtactgcccttg

SEQ ID NO: 1043409 - DNA, 25 bp, Homo sapien
gactttgtaaaaggatacggcgcaa

SEQ ID NO: 1043410 - DNA, 25 bp, Homo sapien
tttggtcgcaccagccaaagccagg

SEQ ID NO: 1043411 - DNA, 25 bp, Homo sapien
gacaagtctcaagcgccggtttcct

SEQ ID NO: 1043412 - DNA, 25 bp, Homo sapien
tgtcaggaaatttctggccagccta

SEQ ID NO: 1043413 - DNA, 25 bp, Homo sapien
tcggcctccggacgtgtgacaacca

SEQ ID NO: 1043414 - DNA, 25 bp, Homo sapien
cctccggacgtgtgacaaccagcga

SEQ ID NO: 1043415 - DNA, 25 bp, Homo sapien
taggtacgcgacggctcggcctccg

SEQ ID NO: 1043416 - DNA, 25 bp, Homo sapien
acggctcggcctccggacgtgtgac

SEQ ID NO: 1043417 - DNA, 25 bp, Homo sapien
gcagaagagccaactgtagatggcg

SEQ ID NO: 1043418 - DNA, 25 bp, Homo sapien
ggtgtggcttcggcttccaggtatc

SEQ ID NO: 1043419 - DNA, 25 bp, Homo sapien
aagagccaactgtagatggcggtgc

SEQ ID NO: 1043420 - DNA, 25 bp, Homo sapien
ggaggtgtggcttcggcttccaggt

SEQ ID NO: 1043421 - DNA, 25 bp, Homo sapien
gaagcccccagtaatggcatgaccc

SEQ ID NO: 1043422 - DNA, 25 bp, Homo sapien
ctgaagcccccagtaatggcatgac

SEQ ID NO: 1043423 - DNA, 25 bp, Homo sapien
aatggcatgacccagtatgtgcccc

SEQ ID NO: 1043424 - DNA, 25 bp, Homo sapien
tggcatgacccagtatgtgccccac

SEQ ID NO: 1043425 - DNA, 25 bp, Homo sapien
cagaaactgtttgatctcacagaag

SEQ ID NO: 1043426 - DNA, 25 bp, Homo sapien
actccagaaactgtttgatctcaca

SEQ ID NO: 1043427 - DNA, 25 bp, Homo sapien
aactgtttgatctcacagaagcaag

SEQ ID NO: 1043428 - DNA, 25 bp, Homo sapien
ggttctcggcacactccagaaactg

SEQ ID NO: 1043429 - DNA, 25 bp, Homo sapien
taacagctagtttaaggaggccaca

SEQ ID NO: 1043430 - DNA, 25 bp, Homo sapien
ctagtttaaggaggccacacaaaca

SEQ ID NO: 1043431 - DNA, 25 bp, Homo sapien
cagctagtttaaggaggccacacaa

SEQ ID NO: 1043432 - DNA, 25 bp, Homo sapien
cataacagctagtttaaggaggcca

SEQ ID NO: 1043433 - DNA, 25 bp, Homo sapien
tgccaccaccaaggcagttggctgt

SEQ ID NO: 1043434 - DNA, 25 bp, Homo sapien
caccaaggcagttggctgtgccctg

SEQ ID NO: 1043435 - DNA, 25 bp, Homo sapien
accaccaaggcagttggctgtgccc

SEQ ID NO: 1043436 - DNA, 25 bp, Homo sapien
ccaccaccaaggcagttggctgtgc

SEQ ID NO: 1043437 - DNA, 25 bp, Homo sapien
ggtgctgcgggaggacggcgccggc

SEQ ID NO: 1043438 - DNA, 25 bp, Homo sapien
gccctcactagcaagcacggccgcc

SEQ ID NO: 1043439 - DNA, 25 bp, Homo sapien
acggcgccggctgctcgttcgctcg

SEQ ID NO: 1043440 - DNA, 25 bp, Homo sapien
tgagtcactccctcccgccctcact

SEQ ID NO: 1043441 - DNA, 25 bp, Homo sapien
aggtcacctcggagaggtccctccg

SEQ ID NO: 1043442 - DNA, 25 bp, Homo sapien
ctggagggaaaaggtcacctcggag

SEQ ID NO: 1043443 - DNA, 25 bp, Homo sapien
tcggagaggtccctccgcacacagt

SEQ ID NO: 1043444 - DNA, 25 bp, Homo sapien
tccctccgcacacagtacacggtga

SEQ ID NO: 1043445 - DNA, 25 bp, Homo sapien
ttgtgcagctcgaagtcggcgtcga

SEQ ID NO: 1043446 - DNA, 25 bp, Homo sapien
tgtgcagctcgaagtcggcgtcgac

SEQ ID NO: 1043447 - DNA, 25 bp, Homo sapien
ctgcggggatgccagactcgagctc

SEQ ID NO: 1043448 - DNA, 25 bp, Homo sapien
cacagcgcgcggaagttgtgcagct

SEQ ID NO: 1043449 - DNA, 25 bp, Homo sapien
gatcataaccagggtaatataacag

SEQ ID NO: 1043450 - DNA, 25 bp, Homo sapien
tgatcataaccagggtaatataaca

SEQ ID NO: 1043451 - DNA, 25 bp, Homo sapien
agccggtgatcataaccagggtaat

SEQ ID NO: 1043452 - DNA, 25 bp, Homo sapien
cagccggtgatcataaccagggtaa

SEQ ID NO: 1043453 - DNA, 25 bp, Homo sapien
tctttcaagccataagaagccaatg

SEQ ID NO: 1043454 - DNA, 25 bp, Homo sapien
tgagaggtctttccgcatagacgat

SEQ ID NO: 1043455 - DNA, 25 bp, Homo sapien
tctgtcgtaaaatcacaacgtcccc

SEQ ID NO: 1043456 - DNA, 25 bp, Homo sapien
gaagccaatgatctgtggttgtctg

SEQ ID NO: 1043457 - DNA, 25 bp, Homo sapien
tgccaggcacagctatactactgaa

SEQ ID NO: 1043458 - DNA, 25 bp, Homo sapien
tcagcaaggacagctcatgcgggtt

SEQ ID NO: 1043459 - DNA, 25 bp, Homo sapien
gtggattgcgttccttcagcaagga

SEQ ID NO: 1043460 - DNA, 25 bp, Homo sapien
caacatatctcggagcaaggctgga

SEQ ID NO: 1043461 - DNA, 25 bp, Homo sapien
tatctttgcctgagcttcaaggtca

SEQ ID NO: 1043462 - DNA, 25 bp, Homo sapien
gctctctccgggctcggtcctgctg

SEQ ID NO: 1043463 - DNA, 25 bp, Homo sapien
caaggtcaaagggatcagcagaaaa

SEQ ID NO: 1043464 - DNA, 25 bp, Homo sapien
ctccaccaggactctagaaaatttc

SEQ ID NO: 1043465 - DNA, 25 bp, Homo sapien
gaggagagactaacctaaaagactg

SEQ ID NO: 1043466 - DNA, 25 bp, Homo sapien
gagaagctacctccaagcagatgcc

SEQ ID NO: 1043467 - DNA, 25 bp, Homo sapien
gactgaggttactatctcaactgca

SEQ ID NO: 1043468 - DNA, 25 bp, Homo sapien
tgcccaaccaatgtcagataacctg

SEQ ID NO: 1043469 - DNA, 25 bp, Homo sapien
tcagtccgggggtcatttatctaaa

SEQ ID NO: 1043470 - DNA, 25 bp, Homo sapien
gctctgtctgctagtcagggagtcc

SEQ ID NO: 1043471 - DNA, 25 bp, Homo sapien
tatctaaagctgtgttatgatgctc

SEQ ID NO: 1043472 - DNA, 25 bp, Homo sapien
agatggtggcttctgctcagtccgg

SEQ ID NO: 1043473 - DNA, 25 bp, Homo sapien
gcaggaaaacagacttaggactacc

SEQ ID NO: 1043474 - DNA, 25 bp, Homo sapien
gagaaccaccgcattacagaaactg

SEQ ID NO: 1043475 - DNA, 25 bp, Homo sapien
tgtgattttactatagccccaggtg

SEQ ID NO: 1043476 - DNA, 25 bp, Homo sapien
taggactaccaacgttccatcggcg

SEQ ID NO: 1043477 - DNA, 25 bp, Homo sapien
ctttccggagcctcttccatagcta

SEQ ID NO: 1043478 - DNA, 25 bp, Homo sapien
aacaaaggctttcacaggatgtcca

SEQ ID NO: 1043479 - DNA, 25 bp, Homo sapien
gcatcactacttggccaaaactttc

SEQ ID NO: 1043480 - DNA, 25 bp, Homo sapien
catgttttcctcaatgttctgttgc

SEQ ID NO: 1043481 - DNA, 25 bp, Homo sapien
gccctgacctctgccgtcaccacag

SEQ ID NO: 1043482 - DNA, 25 bp, Homo sapien
aagccctgacctctgccgtcaccac

SEQ ID NO: 1043483 - DNA, 25 bp, Homo sapien
ctgacctctgccgtcaccacaggct

SEQ ID NO: 1043484 - DNA, 25 bp, Homo sapien
gacctctgccgtcaccacaggctca

SEQ ID NO: 1043485 - DNA, 25 bp, Homo sapien
ttagaagtggactcccatactctgc

SEQ ID NO: 1043486 - DNA, 25 bp, Homo sapien
gtgtctggccctatcaagttgtttt

SEQ ID NO: 1043487 - DNA, 25 bp, Homo sapien
cctttaaatatgagggcacttaggt

SEQ ID NO: 1043488 - DNA, 25 bp, Homo sapien
tacacggcgggttggcctatgtaga

SEQ ID NO: 1043489 - DNA, 25 bp, Homo sapien
ccaataatcttctgggtgcccactc

SEQ ID NO: 1043490 - DNA, 25 bp, Homo sapien
gttacacctttctgcacaagcttgg

SEQ ID NO: 1043491 - DNA, 25 bp, Homo sapien
acaagcttggctcatgatagtcatc

SEQ ID NO: 1043492 - DNA, 25 bp, Homo sapien
gacggtccaccagtctcattatgtt

SEQ ID NO: 1043493 - DNA, 25 bp, Homo sapien
ccatgggctgttcctcaagtataga

SEQ ID NO: 1043494 - DNA, 25 bp, Homo sapien
ccgtttaagcatgtccagtcccaga

SEQ ID NO: 1043495 - DNA, 25 bp, Homo sapien
tagagaaggaacatggcaaaaaatc

SEQ ID NO: 1043496 - DNA, 25 bp, Homo sapien
gcaaaaaatctccttcaatctgaac

SEQ ID NO: 1043497 - DNA, 25 bp, Homo sapien
tggtctgcaatctcctctggccgta

SEQ ID NO: 1043498 - DNA, 25 bp, Homo sapien
caaccgggcacactctggtagctct

SEQ ID NO: 1043499 - DNA, 25 bp, Homo sapien
catcctctgctgatttttgaagggc

SEQ ID NO: 1043500 - DNA, 25 bp, Homo sapien
gcctgtggtgccgatcacgagtaca

SEQ ID NO: 1043501 - DNA, 25 bp, Homo sapien
acaagtattgaagagtttggccatc

SEQ ID NO: 1043502 - DNA, 25 bp, Homo sapien
aagtattgaagagtttggccatccc

SEQ ID NO: 1043503 - DNA, 25 bp, Homo sapien
tattgaagagtttggccatcccaaa

SEQ ID NO: 1043504 - DNA, 25 bp, Homo sapien
agtattgaagagtttggccatccca

SEQ ID NO: 1043505 - DNA, 25 bp, Homo sapien
tgaagcccacacttcccgggcttac

SEQ ID NO: 1043506 - DNA, 25 bp, Homo sapien
ctgaagcccacacttcccgggctta

SEQ ID NO: 1043507 - DNA, 25 bp, Homo sapien
ccttctgaagcccacacttcccggg

SEQ ID NO: 1043508 - DNA, 25 bp, Homo sapien
ctaccccttctgaagcccacacttc

SEQ ID NO: 1043509 - DNA, 25 bp, Homo sapien
gttggactcaaaagttaacatctgc

SEQ ID NO: 1043510 - DNA, 25 bp, Homo sapien
taaaccaggcctaagaggcatggtg

SEQ ID NO: 1043511 - DNA, 25 bp, Homo sapien
cttgagcctgtgagactgagactga

SEQ ID NO: 1043512 - DNA, 25 bp, Homo sapien
gtcttcggtgaagttagggctgctc

SEQ ID NO: 1043513 - DNA, 25 bp, Homo sapien
tggtctcaaatccataggttcaagt

SEQ ID NO: 1043514 - DNA, 25 bp, Homo sapien
tttgaagttggtacatccccttcac

SEQ ID NO: 1043515 - DNA, 25 bp, Homo sapien
tactttcacctactatgtccagagt

SEQ ID NO: 1043516 - DNA, 25 bp, Homo sapien
gctatactaccagcaacaaaaggtt

SEQ ID NO: 1043517 - DNA, 25 bp, Homo sapien
ccacacagcatgcagggttatagtt

SEQ ID NO: 1043518 - DNA, 25 bp, Homo sapien
ttaaaatcaggaactggtagattcc

SEQ ID NO: 1043519 - DNA, 25 bp, Homo sapien
tgtttctgtagtttggacatccaaa

SEQ ID NO: 1043520 - DNA, 25 bp, Homo sapien
acaagcaaacttgggttaacaatgc

SEQ ID NO: 1043521 - DNA, 25 bp, Homo sapien
cacacacactacatgcatcatggct

SEQ ID NO: 1043522 - DNA, 25 bp, Homo sapien
tggtctggggcccactccagctgca

SEQ ID NO: 1043523 - DNA, 25 bp, Homo sapien
tacatgcatcatggcttctgacgct

SEQ ID NO: 1043524 - DNA, 25 bp, Homo sapien
tccagctgcagtacacacacactac

SEQ ID NO: 1043525 - DNA, 25 bp, Homo sapien
ccctgttggatggttctaataacga

SEQ ID NO: 1043526 - DNA, 25 bp, Homo sapien
taggctagttgtaaccagattgaac

SEQ ID NO: 1043527 - DNA, 25 bp, Homo sapien
ggtgaatgacaaatgctaacttccc

SEQ ID NO: 1043528 - DNA, 25 bp, Homo sapien
caaactgctgcggatacagactgtc

SEQ ID NO: 1043529 - DNA, 25 bp, Homo sapien
tacccattagagtctagaaacacag

SEQ ID NO: 1043530 - DNA, 25 bp, Homo sapien
gttaacatccaacaagagggcttga

SEQ ID NO: 1043531 - DNA, 25 bp, Homo sapien
gagggcttgatcttaaaaagcagca

SEQ ID NO: 1043532 - DNA, 25 bp, Homo sapien
gaagctattgacttcccatgaaaca

SEQ ID NO: 1043533 - DNA, 25 bp, Homo sapien
gacaggagtacaatggcgccatctg

SEQ ID NO: 1043534 - DNA, 25 bp, Homo sapien
ccagacaggagtacaatggcgccat

SEQ ID NO: 1043535 - DNA, 25 bp, Homo sapien
cccagacaggagtacaatggcgcca

SEQ ID NO: 1043536 - DNA, 25 bp, Homo sapien
aggagtacaatggcgccatctgagc

SEQ ID NO: 1043537 - DNA, 25 bp, Homo sapien
cacagcatcagaataagaggtagac

SEQ ID NO: 1043538 - DNA, 25 bp, Homo sapien
caccagggacgcttgtgaagtatgc

SEQ ID NO: 1043539 - DNA, 25 bp, Homo sapien
gccactaaattaccagaggatacaa

SEQ ID NO: 1043540 - DNA, 25 bp, Homo sapien
gaggatacaaatctaaacagcgtag

SEQ ID NO: 1043541 - DNA, 25 bp, Homo sapien
ccagtgaggtagattctttaccact

SEQ ID NO: 1043542 - DNA, 25 bp, Homo sapien
tgaggtagattctttaccacttttc

SEQ ID NO: 1043543 - DNA, 25 bp, Homo sapien
tcccagtgaggtagattctttacca

SEQ ID NO: 1043544 - DNA, 25 bp, Homo sapien
agtgaggtagattctttaccacttt

SEQ ID NO: 1043545 - DNA, 25 bp, Homo sapien
cgggcgggatggttaaacccatctg

SEQ ID NO: 1043546 - DNA, 25 bp, Homo sapien
cagagcgagcaagactcataggatt

SEQ ID NO: 1043547 - DNA, 25 bp, Homo sapien
gactcataggattaccaacatcagg

SEQ ID NO: 1043548 - DNA, 25 bp, Homo sapien
ctctgtcctgaagaacgggcgggat

SEQ ID NO: 1043549 - DNA, 25 bp, Homo sapien
ggttcaatgcgatctgagtcactgg

SEQ ID NO: 1043550 - DNA, 25 bp, Homo sapien
tcttcggatgaattctgcataggca

SEQ ID NO: 1043551 - DNA, 25 bp, Homo sapien
tctggtctgttggagcatggtctgc

SEQ ID NO: 1043552 - DNA, 25 bp, Homo sapien
tagctggaattcagctgaagccttc

SEQ ID NO: 1043553 - DNA, 25 bp, Homo sapien
caaggctgccgttatagacgggcaa

SEQ ID NO: 1043554 - DNA, 25 bp, Homo sapien
tgacaactgccacagagacttggag

SEQ ID NO: 1043555 - DNA, 25 bp, Homo sapien
gatgaaatttgaggccctgggtgct

SEQ ID NO: 1043556 - DNA, 25 bp, Homo sapien
gaatacttttcttcgcacttggagg

SEQ ID NO: 1043557 - DNA, 25 bp, Homo sapien
tatcggttgacaggccatcacctag

SEQ ID NO: 1043558 - DNA, 25 bp, Homo sapien
tccagtgtcagatgaagtacctgtt

SEQ ID NO: 1043559 - DNA, 25 bp, Homo sapien
tggacactgttcattctgggtaaga

SEQ ID NO: 1043560 - DNA, 25 bp, Homo sapien
ggtgaaatttctacacctaaggtgc

SEQ ID NO: 1043561 - DNA, 25 bp, Homo sapien
ggtaggtggttcatattcaagtaat

SEQ ID NO: 1043562 - DNA, 25 bp, Homo sapien
atggcctcgaagcatcaggacagac

SEQ ID NO: 1043563 - DNA, 25 bp, Homo sapien
aatcaatggtggaagaatggcagga

SEQ ID NO: 1043564 - DNA, 25 bp, Homo sapien
tgaattctgtatgccctgacctaag

SEQ ID NO: 1043565 - DNA, 25 bp, Homo sapien
caccaactcgatgcaaagctccaag

SEQ ID NO: 1043566 - DNA, 25 bp, Homo sapien
ccagcacggagaatgcggtcaatat

SEQ ID NO: 1043567 - DNA, 25 bp, Homo sapien
tcctgcaaagtaaagccagcacgga

SEQ ID NO: 1043568 - DNA, 25 bp, Homo sapien
ttttgcgagcaaaacaagaagtgca

SEQ ID NO: 1043569 - DNA, 25 bp, Homo sapien
tttaacaagtaggatagacaaattc

SEQ ID NO: 1043570 - DNA, 25 bp, Homo sapien
tgcttgcaggtttctatatatactg

SEQ ID NO: 1043571 - DNA, 25 bp, Homo sapien
gaatggagaacggtctagcccactt

SEQ ID NO: 1043572 - DNA, 25 bp, Homo sapien
ccaggatacatcttaatgagaataa

SEQ ID NO: 1043573 - DNA, 25 bp, Homo sapien
ctggatgggtagtgggatttctcat

SEQ ID NO: 1043574 - DNA, 25 bp, Homo sapien
gacacacagtcacagtgtggagagt

SEQ ID NO: 1043575 - DNA, 25 bp, Homo sapien
cactgggtagaattccaaacaccaa

SEQ ID NO: 1043576 - DNA, 25 bp, Homo sapien
tctaaattgacaactgagccagcaa

SEQ ID NO: 1043577 - DNA, 25 bp, Homo sapien
catgatgaatctacgtgacacgcca

SEQ ID NO: 1043578 - DNA, 25 bp, Homo sapien
gaagaaacagagaccgcccttgtag

SEQ ID NO: 1043579 - DNA, 25 bp, Homo sapien
tactcagaaggatgattaagcccca

SEQ ID NO: 1043580 - DNA, 25 bp, Homo sapien
gagctgtccggtaaaggtgcccatt

SEQ ID NO: 1043581 - DNA, 25 bp, Homo sapien
tgtagtaagacaaccagcagattcc

SEQ ID NO: 1043582 - DNA, 25 bp, Homo sapien
taagtcgtgctagcccagatggtca

SEQ ID NO: 1043583 - DNA, 25 bp, Homo sapien
tatgttcagcccctaaacgaatggc

SEQ ID NO: 1043584 - DNA, 25 bp, Homo sapien
gatggtcagtattccggagcagccg

SEQ ID NO: 1043585 - DNA, 25 bp, Homo sapien
tacagcaacaaggcgaggctctgtc

SEQ ID NO: 1043586 - DNA, 25 bp, Homo sapien
ctgaagcatttatttggagaattat

SEQ ID NO: 1043587 - DNA, 25 bp, Homo sapien
ctacagcaacaaggcgaggctctgt

SEQ ID NO: 1043588 - DNA, 25 bp, Homo sapien
ggtatgtgagctggtacaacagaca

SEQ ID NO: 1043589 - DNA, 25 bp, Homo sapien
gcattgatgtgcagctaattgctcc

SEQ ID NO: 1043590 - DNA, 25 bp, Homo sapien
tcaaatatggaatccgttctgcgtg

SEQ ID NO: 1043591 - DNA, 25 bp, Homo sapien
gttctgcgtgtcaaacacagggcga

SEQ ID NO: 1043592 - DNA, 25 bp, Homo sapien
agccaccccctcaatgtgcagaccc

SEQ ID NO: 1043593 - DNA, 25 bp, Homo sapien
ccaccccctcaatgtgcagacccag

SEQ ID NO: 1043594 - DNA, 25 bp, Homo sapien
accccctcaatgtgcagacccaggc

SEQ ID NO: 1043595 - DNA, 25 bp, Homo sapien
ccccctcaatgtgcagacccaggcc

SEQ ID NO: 1043596 - DNA, 25 bp, Homo sapien
gctgccgccggccgtacgggggctc

SEQ ID NO: 1043597 - DNA, 25 bp, Homo sapien
tccaggatccggtccttcacctccc

SEQ ID NO: 1043598 - DNA, 25 bp, Homo sapien
ttcttcaccgacagcgagatgttct

SEQ ID NO: 1043599 - DNA, 25 bp, Homo sapien
tcttcaccgacagcgagatgttctc

SEQ ID NO: 1043600 - DNA, 25 bp, Homo sapien
cttcttcaccgacagcgagatgttc

SEQ ID NO: 1043601 - DNA, 25 bp, Homo sapien
tatggattctaccttctagcacgga

SEQ ID NO: 1043602 - DNA, 25 bp, Homo sapien
tatatccagcccaaaaacgtcagaa

SEQ ID NO: 1043603 - DNA, 25 bp, Homo sapien
cagtgatgtttactgcggcaagccc

SEQ ID NO: 1043604 - DNA, 25 bp, Homo sapien
cacggacccttttgcggatatgcca

SEQ ID NO: 1043605 - DNA, 25 bp, Homo sapien
ccccgcataagaaccaatcagagat

SEQ ID NO: 1043606 - DNA, 25 bp, Homo sapien
tctcaatggcaatcaaattatagtg

SEQ ID NO: 1043607 - DNA, 25 bp, Homo sapien
tgcgtcaagcctactcccctaattt

SEQ ID NO: 1043608 - DNA, 25 bp, Homo sapien
acaaacctgcacacctatgtaacaa

SEQ ID NO: 1043609 - DNA, 25 bp, Homo sapien
gggatctcatcctcacatgcagcaa

SEQ ID NO: 1043610 - DNA, 25 bp, Homo sapien
gaccttgtcatggttccggatggca

SEQ ID NO: 1043611 - DNA, 25 bp, Homo sapien
catggttccggatggcagggatctc

SEQ ID NO: 1043612 - DNA, 25 bp, Homo sapien
ggtgctcacacagacgctgtaggac

SEQ ID NO: 1043613 - DNA, 25 bp, Homo sapien
aaaacaggacaggagctgctgtgac

SEQ ID NO: 1043614 - DNA, 25 bp, Homo sapien
gagaaaacaggacaggagctgctgt

SEQ ID NO: 1043615 - DNA, 25 bp, Homo sapien
gaaaacaggacaggagctgctgtga

SEQ ID NO: 1043616 - DNA, 25 bp, Homo sapien
ctgagaaaacaggacaggagctgct

SEQ ID NO: 1043617 - DNA, 25 bp, Homo sapien
tgatggcctctctccgagtaaaatg

SEQ ID NO: 1043618 - DNA, 25 bp, Homo sapien
aaaatgcaccacgagcacccagtag

SEQ ID NO: 1043619 - DNA, 25 bp, Homo sapien
tgcagcacctcgatctgcttgatgg

SEQ ID NO: 1043620 - DNA, 25 bp, Homo sapien
gcacccagtagccagaggagaggtc

SEQ ID NO: 1043621 - DNA, 25 bp, Homo sapien
caggttctcctggaacaaccgcagg

SEQ ID NO: 1043622 - DNA, 25 bp, Homo sapien
gagttctcgttgagggccaggtaca

SEQ ID NO: 1043623 - DNA, 25 bp, Homo sapien
ggaacaaccgcaggtagctctccaa

SEQ ID NO: 1043624 - DNA, 25 bp, Homo sapien
gtagtacttatgcagcaggcccagg

SEQ ID NO: 1043625 - DNA, 25 bp, Homo sapien
cagatccagctcgaaacgaatgaac

SEQ ID NO: 1043626 - DNA, 25 bp, Homo sapien
tcaggtgatcgtggctgcagaccag

SEQ ID NO: 1043627 - DNA, 25 bp, Homo sapien
aacgaatgaactctagcccggacac

SEQ ID NO: 1043628 - DNA, 25 bp, Homo sapien
acaccaaggtcaggaagagcgtcag

SEQ ID NO: 1043629 - DNA, 25 bp, Homo sapien
tgaaagagttgagggacagactgtc

SEQ ID NO: 1043630 - DNA, 25 bp, Homo sapien
ctagatggggcaatcgcactgtcat

SEQ ID NO: 1043631 - DNA, 25 bp, Homo sapien
acagactgtctgagccgtggaccga

SEQ ID NO: 1043632 - DNA, 25 bp, Homo sapien
caggtactgaggtttgtagtagtcg

SEQ ID NO: 1043633 - DNA, 25 bp, Homo sapien
ggaaacacatctccaaaatcataat

SEQ ID NO: 1043634 - DNA, 25 bp, Homo sapien
tctaagatacagaaaaccgcgtctc

SEQ ID NO: 1043635 - DNA, 25 bp, Homo sapien
caactgggctgttagttctcaggcc

SEQ ID NO: 1043636 - DNA, 25 bp, Homo sapien
taacagggatttggaccaggtgcag

SEQ ID NO: 1043637 - DNA, 25 bp, Homo sapien
cacattatctgggaacggatcacct

SEQ ID NO: 1043638 - DNA, 25 bp, Homo sapien
gctgtgtcgctcggactggagcgca

SEQ ID NO: 1043639 - DNA, 25 bp, Homo sapien
ctgtgtcgctcggactggagcgcag

SEQ ID NO: 1043640 - DNA, 25 bp, Homo sapien
gtgcccctgcaagggtggtgctgag

SEQ ID NO: 1043641 - DNA, 25 bp, Homo sapien
aggcaggctggccagttcctcccag

SEQ ID NO: 1043642 - DNA, 25 bp, Homo sapien
gaagccacaacctaacaggacatgg

SEQ ID NO: 1043643 - DNA, 25 bp, Homo sapien
tgtactttaggagcaacttggaagg

SEQ ID NO: 1043644 - DNA, 25 bp, Homo sapien
gggtggccccatttcgagtagaagc

SEQ ID NO: 1043645 - DNA, 25 bp, Homo sapien
ccttgctgctggtcaggtcggaggc

SEQ ID NO: 1043646 - DNA, 25 bp, Homo sapien
tctctgccggctcctcgttgaaggg

SEQ ID NO: 1043647 - DNA, 25 bp, Homo sapien
ctgatgacctcgagctccgtgcagg

SEQ ID NO: 1043648 - DNA, 25 bp, Homo sapien
tccgtgcaggcatccggcgggtcca

SEQ ID NO: 1043649 - DNA, 25 bp, Homo sapien
tcactaaagtcgcaaagcggcggcc

SEQ ID NO: 1043650 - DNA, 25 bp, Homo sapien
tgcccgttgagctggtcgataacct

SEQ ID NO: 1043651 - DNA, 25 bp, Homo sapien
caagcatagtgtctggcgagtcccg

SEQ ID NO: 1043652 - DNA, 25 bp, Homo sapien
tgtaacagtgcttggactctcgacg

SEQ ID NO: 1043653 - DNA, 25 bp, Homo sapien
gaacatgcagcggttggccaagccc

SEQ ID NO: 1043654 - DNA, 25 bp, Homo sapien
gcagcctcagggctactaggaacat

SEQ ID NO: 1043655 - DNA, 25 bp, Homo sapien
acatgcagcggttggccaagccctg

SEQ ID NO: 1043656 - DNA, 25 bp, Homo sapien
gggctactaggaacatgcagcggtt

SEQ ID NO: 1043657 - DNA, 25 bp, Homo sapien
agctggcagagaacctcctgggtcc

SEQ ID NO: 1043658 - DNA, 25 bp, Homo sapien
gctggcagagaacctcctgggtccc

SEQ ID NO: 1043659 - DNA, 25 bp, Homo sapien
cagaatcctcagcgctactcagaca

SEQ ID NO: 1043660 - DNA, 25 bp, Homo sapien
tcagcgctactcagacacgggctgg

SEQ ID NO: 1043661 - DNA, 25 bp, Homo sapien
atcctcagcgctactcagacacggg

SEQ ID NO: 1043662 - DNA, 25 bp, Homo sapien
ctcagcgctactcagacacgggctg

SEQ ID NO: 1043663 - DNA, 25 bp, Homo sapien
gttttctcggaacacgtggatcatg

SEQ ID NO: 1043664 - DNA, 25 bp, Homo sapien
acagctgctcttcgttttctcggaa

SEQ ID NO: 1043665 - DNA, 25 bp, Homo sapien
tcttcgttttctcggaacacgtgga

SEQ ID NO: 1043666 - DNA, 25 bp, Homo sapien
tgaacagctgctcttcgttttctcg

SEQ ID NO: 1043667 - DNA, 25 bp, Homo sapien
tcactcctgagttcctaggacttac

SEQ ID NO: 1043668 - DNA, 25 bp, Homo sapien
ctcactcctgagttcctaggactta

SEQ ID NO: 1043669 - DNA, 25 bp, Homo sapien
ggttgccctccatgtgcccggtgct

SEQ ID NO: 1043670 - DNA, 25 bp, Homo sapien
caggtagacatagcagtctgtgagc

SEQ ID NO: 1043671 - DNA, 25 bp, Homo sapien
tgtgcccggtgctcatccggatcat

SEQ ID NO: 1043672 - DNA, 25 bp, Homo sapien
tctgtgagcagcacgtacagcagct

SEQ ID NO: 1043673 - DNA, 25 bp, Homo sapien
accccaaggcctattatccccacag

SEQ ID NO: 1043674 - DNA, 25 bp, Homo sapien
caagttcattgtaagaaacggcctc

SEQ ID NO: 1043675 - DNA, 25 bp, Homo sapien
aagttcattgtaagaaacggcctct

SEQ ID NO: 1043676 - DNA, 25 bp, Homo sapien
gtcaagttcattgtaagaaacggcc

SEQ ID NO: 1043677 - DNA, 25 bp, Homo sapien
gttcattgtaagaaacggcctcttc

SEQ ID NO: 1043678 - DNA, 25 bp, Homo sapien
cagcatcgtgtacagaagcctctct

SEQ ID NO: 1043679 - DNA, 25 bp, Homo sapien
ctgagagttaagttggtgcccaacc

SEQ ID NO: 1043680 - DNA, 25 bp, Homo sapien
tgcctcgccctgcagttctatgggt

SEQ ID NO: 1043681 - DNA, 25 bp, Homo sapien
tgagaagccctgtacctacagcagg

SEQ ID NO: 1043682 - DNA, 25 bp, Homo sapien
tcagccagcgccacatcagccgtgt

SEQ ID NO: 1043683 - DNA, 25 bp, Homo sapien
gcttcaccgtctgctggtcaaggcc

SEQ ID NO: 1043684 - DNA, 25 bp, Homo sapien
cctgcggttggtgcacaccagcttc

SEQ ID NO: 1043685 - DNA, 25 bp, Homo sapien
ctgcttcctgcggttggtgcacacc

SEQ ID NO: 1043686 - DNA, 25 bp, Homo sapien
cgattcttgggccacaaatttggcc

SEQ ID NO: 1043687 - DNA, 25 bp, Homo sapien
tagggaggttctcgacagcctttga

SEQ ID NO: 1043688 - DNA, 25 bp, Homo sapien
tccatggtggcatccgtcaggatgc

SEQ ID NO: 1043689 - DNA, 25 bp, Homo sapien
ctcacacttcgattcttgggccaca

SEQ ID NO: 1043690 - DNA, 25 bp, Homo sapien
tagaagcgcacggtgacagcagatg

SEQ ID NO: 1043691 - DNA, 25 bp, Homo sapien
cacgaagcacgtcttccagtgttcc

SEQ ID NO: 1043692 - DNA, 25 bp, Homo sapien
tgagcaccacgaagcacgtcttcca

SEQ ID NO: 1043693 - DNA, 25 bp, Homo sapien
gggtcctcccagtgcacaaggccgt

SEQ ID NO: 1043694 - DNA, 25 bp, Homo sapien
cagagggatgacgtcggtgcggtcc

SEQ ID NO: 1043695 - DNA, 25 bp, Homo sapien
cgggtactggtagaggatcccgttg

SEQ ID NO: 1043696 - DNA, 25 bp, Homo sapien
tgcggtccgggtactggtagaggat

SEQ ID NO: 1043697 - DNA, 25 bp, Homo sapien
ccatgttcaccgagagcagagggat

SEQ ID NO: 1043698 - DNA, 25 bp, Homo sapien
ggtgttggctctccggcagccaccg

SEQ ID NO: 1043699 - DNA, 25 bp, Homo sapien
aggcgtggggccgatccgtggtgtt

SEQ ID NO: 1043700 - DNA, 25 bp, Homo sapien
tctccggcagccaccgcactgctcc

SEQ ID NO: 1043701 - DNA, 25 bp, Homo sapien
gatccgtggtgttggctctccggca

SEQ ID NO: 1043702 - DNA, 25 bp, Homo sapien
tcggcctcgctctcggcacttagct

SEQ ID NO: 1043703 - DNA, 25 bp, Homo sapien
ctctcggcacttagctccaggcagg

SEQ ID NO: 1043704 - DNA, 25 bp, Homo sapien
caggcagggccggtcggagagaatg

SEQ ID NO: 1043705 - DNA, 25 bp, Homo sapien
gctgcatccactcggccatctcggc

SEQ ID NO: 1043706 - DNA, 25 bp, Homo sapien
tgtgcccaaagagcggaagaagctg

SEQ ID NO: 1043707 - DNA, 25 bp, Homo sapien
tggcacgtaaagaggcggtcatccg

SEQ ID NO: 1043708 - DNA, 25 bp, Homo sapien
gacggcgctgatgtcgcccagcttg

SEQ ID NO: 1043709 - DNA, 25 bp, Homo sapien
aagacgcagtactccttgcccggct

SEQ ID NO: 1043710 - DNA, 25 bp, Homo sapien
ctgatagatggttttccacccagag

SEQ ID NO: 1043711 - DNA, 25 bp, Homo sapien
aatcggtccagttcagaagtgcagc

SEQ ID NO: 1043712 - DNA, 25 bp, Homo sapien
cagctcaggtagatgacccagggcg

SEQ ID NO: 1043713 - DNA, 25 bp, Homo sapien
agttcagtgcagacagcaatcggtc

SEQ ID NO: 1043714 - DNA, 25 bp, Homo sapien
gggctagagcgtagcatgtgctcaa

SEQ ID NO: 1043715 - DNA, 25 bp, Homo sapien
ctcaaaacccgcttgtgcagggctc

SEQ ID NO: 1043716 - DNA, 25 bp, Homo sapien
tagtccaggcttccacggggctaga

SEQ ID NO: 1043717 - DNA, 25 bp, Homo sapien
gggctctcatgagcacgctcccaca

SEQ ID NO: 1043718 - DNA, 25 bp, Homo sapien
gccacaggagtcttcagggcttgtg

SEQ ID NO: 1043719 - DNA, 25 bp, Homo sapien
ggccacaggagtcttcagggcttgt

SEQ ID NO: 1043720 - DNA, 25 bp, Homo sapien
ccacaggagtcttcagggcttgtgg

SEQ ID NO: 1043721 - DNA, 25 bp, Homo sapien
gccaggcgctgtggatgaggctcaa

SEQ ID NO: 1043722 - DNA, 25 bp, Homo sapien
caggcgctgtggatgaggctcaagg

SEQ ID NO: 1043723 - DNA, 25 bp, Homo sapien
gaggcttcctggatcgccgtgtggg

SEQ ID NO: 1043724 - DNA, 25 bp, Homo sapien
agagactgtcgctccgctgccaggc

SEQ ID NO: 1043725 - DNA, 25 bp, Homo sapien
accagggacgccaaccagctctgcc

SEQ ID NO: 1043726 - DNA, 25 bp, Homo sapien
gacagcatgacaacagccgtgacag

SEQ ID NO: 1043727 - DNA, 25 bp, Homo sapien
tgtgcctgccggctggcgtgccttc

SEQ ID NO: 1043728 - DNA, 25 bp, Homo sapien
tggactgtaggctcccgacagcatg

SEQ ID NO: 1043729 - DNA, 25 bp, Homo sapien
cctgtcttaagccacactcggtggt

SEQ ID NO: 1043730 - DNA, 25 bp, Homo sapien
gccgggcacctgatctggatccctg

SEQ ID NO: 1043731 - DNA, 25 bp, Homo sapien
ggtgccgggcacctgatctggatcc

SEQ ID NO: 1043732 - DNA, 25 bp, Homo sapien
gggaccctgtcttaagccacactcg

SEQ ID NO: 1043733 - DNA, 25 bp, Homo sapien
ggtgccactcggcagaaattctgca

SEQ ID NO: 1043734 - DNA, 25 bp, Homo sapien
tgacgaaactctagggaagggcctg

SEQ ID NO: 1043735 - DNA, 25 bp, Homo sapien
tcaaacacgaacaaggatggctggg

SEQ ID NO: 1043736 - DNA, 25 bp, Homo sapien
tccccaggaggctcttgacgaaact

SEQ ID NO: 1043737 - DNA, 25 bp, Homo sapien
gtgggcggcggtgcagacgtgccct

SEQ ID NO: 1043738 - DNA, 25 bp, Homo sapien
ggcaggagcgtcctgccccggggtg

SEQ ID NO: 1043739 - DNA, 25 bp, Homo sapien
ggcggcggtgcagacgtgccctggg

SEQ ID NO: 1043740 - DNA, 25 bp, Homo sapien
ggggcttgagctggtggctgctcct

SEQ ID NO: 1043741 - DNA, 25 bp, Homo sapien
tgagtaggacttgaggagtgacctt

SEQ ID NO: 1043742 - DNA, 25 bp, Homo sapien
cctttgtgcccgctgagaagagaac

SEQ ID NO: 1043743 - DNA, 25 bp, Homo sapien
ggcctgccctgggatgccctttgtg

SEQ ID NO: 1043744 - DNA, 25 bp, Homo sapien
gtgaccttggctggtaaggacttgc

SEQ ID NO: 1043745 - DNA, 25 bp, Homo sapien
gtaagggtcctggtctgacaggcct

SEQ ID NO: 1043746 - DNA, 25 bp, Homo sapien
aagggtcctggtctgacaggcctgt

SEQ ID NO: 1043747 - DNA, 25 bp, Homo sapien
tagagggtaagggtcctggtctgac

SEQ ID NO: 1043748 - DNA, 25 bp, Homo sapien
gagggtaagggtcctggtctgacag

SEQ ID NO: 1043749 - DNA, 25 bp, Homo sapien
tggggtttgcaggggaccgaggcca

SEQ ID NO: 1043750 - DNA, 25 bp, Homo sapien
ggtttgcaggggaccgaggccatgt

SEQ ID NO: 1043751 - DNA, 25 bp, Homo sapien
gggtttgcaggggaccgaggccatg

SEQ ID NO: 1043752 - DNA, 25 bp, Homo sapien
tggtggcgtttaggctgtctgtaac

SEQ ID NO: 1043753 - DNA, 25 bp, Homo sapien
tttaggctgtctgtaacctcgcagg

SEQ ID NO: 1043754 - DNA, 25 bp, Homo sapien
tgtggtggtggcgtttaggctgtct

SEQ ID NO: 1043755 - DNA, 25 bp, Homo sapien
ggcgtttaggctgtctgtaacctcg

SEQ ID NO: 1043756 - DNA, 25 bp, Homo sapien
tgcccgggtcaggggcacggcacag

SEQ ID NO: 1043757 - DNA, 25 bp, Homo sapien
aggtaagcagggctccccacgaagg

SEQ ID NO: 1043758 - DNA, 25 bp, Homo sapien
cagcagcgacagaggctatgaagcc

SEQ ID NO: 1043759 - DNA, 25 bp, Homo sapien
cctggttgctgcgtgaggccagcct

SEQ ID NO: 1043760 - DNA, 25 bp, Homo sapien
gctgtagcagtagaaacgaacgcca

SEQ ID NO: 1043761 - DNA, 25 bp, Homo sapien
tggacgatggagacaagccactcac

SEQ ID NO: 1043762 - DNA, 25 bp, Homo sapien
agggtggacgatggagacaagccac

SEQ ID NO: 1043763 - DNA, 25 bp, Homo sapien
gtggacgatggagacaagccactca

SEQ ID NO: 1043764 - DNA, 25 bp, Homo sapien
ggtggacgatggagacaagccactc

SEQ ID NO: 1043765 - DNA, 25 bp, Homo sapien
tgcccccgtgcccctgaaactcaca

SEQ ID NO: 1043766 - DNA, 25 bp, Homo sapien
ggagcagagaggacacgggtgtggg

SEQ ID NO: 1043767 - DNA, 25 bp, Homo sapien
aaactcacagctccatggtcccgag

SEQ ID NO: 1043768 - DNA, 25 bp, Homo sapien
tgtgtgttgagggcgccctgccccc

SEQ ID NO: 1043769 - DNA, 25 bp, Homo sapien
actgcggccactgtctgagcttgca

SEQ ID NO: 1043770 - DNA, 25 bp, Homo sapien
ggccactgcggccactgtctgagct

SEQ ID NO: 1043771 - DNA, 25 bp, Homo sapien
ctgcggccactgtctgagcttgcag

SEQ ID NO: 1043772 - DNA, 25 bp, Homo sapien
ccactgcggccactgtctgagcttg

SEQ ID NO: 1043773 - DNA, 25 bp, Homo sapien
tgccacagccccaagagcccttgct

SEQ ID NO: 1043774 - DNA, 25 bp, Homo sapien
gggcacagccccaccaacgccctgc

SEQ ID NO: 1043775 - DNA, 25 bp, Homo sapien
agctgagcccaccatgactcggggc

SEQ ID NO: 1043776 - DNA, 25 bp, Homo sapien
cccttgctgccgccagatggtctcc

SEQ ID NO: 1043777 - DNA, 25 bp, Homo sapien
ccctcccggcctcctaccacacagg

SEQ ID NO: 1043778 - DNA, 25 bp, Homo sapien
gctctctacccacccacgtcgtgcc

SEQ ID NO: 1043779 - DNA, 25 bp, Homo sapien
cacccacgtcgtgccctcccggcct

SEQ ID NO: 1043780 - DNA, 25 bp, Homo sapien
ctcctaccacacaggggctaaaagg

SEQ ID NO: 1043781 - DNA, 25 bp, Homo sapien
gctgattgtatagccgcgtgctgac

SEQ ID NO: 1043782 - DNA, 25 bp, Homo sapien
aaccacggctatgctgctgatcatg

SEQ ID NO: 1043783 - DNA, 25 bp, Homo sapien
cagctgtgtccaccggctgattgta

SEQ ID NO: 1043784 - DNA, 25 bp, Homo sapien
gaccacatcgaagggagtcatgacg

SEQ ID NO: 1043785 - DNA, 25 bp, Homo sapien
ctgcggcgccatgggaaggctgtgg

SEQ ID NO: 1043786 - DNA, 25 bp, Homo sapien
ctgtgaggctgcggcgccatgggaa

SEQ ID NO: 1043787 - DNA, 25 bp, Homo sapien
aggctgcggcgccatgggaaggctg

SEQ ID NO: 1043788 - DNA, 25 bp, Homo sapien
tgtgaggctgcggcgccatgggaag

SEQ ID NO: 1043789 - DNA, 25 bp, Homo sapien
ggcccaggcccttgtagagtgccag

SEQ ID NO: 1043790 - DNA, 25 bp, Homo sapien
taggtgcccttgtgctgggcccgcc

SEQ ID NO: 1043791 - DNA, 25 bp, Homo sapien
tccgaagctcgtcccagaagagcat

SEQ ID NO: 1043792 - DNA, 25 bp, Homo sapien
tgccgccagatcttcaccatgcagt

SEQ ID NO: 1043793 - DNA, 25 bp, Homo sapien
taacttgaagtggatgctctggacc

SEQ ID NO: 1043794 - DNA, 25 bp, Homo sapien
tgtggtgacccagtacgcagtacag

SEQ ID NO: 1043795 - DNA, 25 bp, Homo sapien
aaaagtgcctgcctcgtgctgctgt

SEQ ID NO: 1043796 - DNA, 25 bp, Homo sapien
acttgtcaagcgcataggtctaggg

SEQ ID NO: 1043797 - DNA, 25 bp, Homo sapien
gaactgcggcccctgcagaagtgca

SEQ ID NO: 1043798 - DNA, 25 bp, Homo sapien
gcgggcggcaaggtcaggcattcaa

SEQ ID NO: 1043799 - DNA, 25 bp, Homo sapien
aagtcctaccccctagtagctcagg

SEQ ID NO: 1043800 - DNA, 25 bp, Homo sapien
ggctcttgacagagataattaagtt

SEQ ID NO: 1043801 - DNA, 25 bp, Homo sapien
gccctccgtgagagcccttagatga

SEQ ID NO: 1043802 - DNA, 25 bp, Homo sapien
tcaggcttgtcaggatatgtgcaaa

SEQ ID NO: 1043803 - DNA, 25 bp, Homo sapien
ctcagtcccgggaacaatgggcacc

SEQ ID NO: 1043804 - DNA, 25 bp, Homo sapien
tgggcacctggactgaacaatgggc

SEQ ID NO: 1043805 - DNA, 25 bp, Homo sapien
cccctgccagggagttggcatccat

SEQ ID NO: 1043806 - DNA, 25 bp, Homo sapien
gggctgctcggcagcagtcctgccc

SEQ ID NO: 1043807 - DNA, 25 bp, Homo sapien
ctgctcggcagcagtcctgcccctg

SEQ ID NO: 1043808 - DNA, 25 bp, Homo sapien
ctgcccctgccagggagttggcatc

SEQ ID NO: 1043809 - DNA, 25 bp, Homo sapien
tggagtgtgcagtagcaggtgttcc

SEQ ID NO: 1043810 - DNA, 25 bp, Homo sapien
tattggtttggagtgtgcagtagca

SEQ ID NO: 1043811 - DNA, 25 bp, Homo sapien
actttattggtttggagtgtgcagt

SEQ ID NO: 1043812 - DNA, 25 bp, Homo sapien
caggtgttcctgggagcggccctta

SEQ ID NO: 1043813 - DNA, 25 bp, Homo sapien
tgaacaggtggaccacggctcccat

SEQ ID NO: 1043814 - DNA, 25 bp, Homo sapien
tccagcagggcggagctgaacaggt

SEQ ID NO: 1043815 - DNA, 25 bp, Homo sapien
gagctgaacaggtggaccacggctc

SEQ ID NO: 1043816 - DNA, 25 bp, Homo sapien
cagggcggagctgaacaggtggacc

SEQ ID NO: 1043817 - DNA, 25 bp, Homo sapien
ccgggctccccatttgggcagtgtg

SEQ ID NO: 1043818 - DNA, 25 bp, Homo sapien
gcccagaagggcaaggtcccagctc

SEQ ID NO: 1043819 - DNA, 25 bp, Homo sapien
cagaccaacgtcactgggcaaaggt

SEQ ID NO: 1043820 - DNA, 25 bp, Homo sapien
ctttacttgaaatcttccttgaggg

SEQ ID NO: 1043821 - DNA, 25 bp, Homo sapien
agtcaaggaggctagagccccactc

SEQ ID NO: 1043822 - DNA, 25 bp, Homo sapien
aaggaggctagagccccactcgagg

SEQ ID NO: 1043823 - DNA, 25 bp, Homo sapien
tcaaggaggctagagccccactcga

SEQ ID NO: 1043824 - DNA, 25 bp, Homo sapien
ggagtcaaggaggctagagccccac

SEQ ID NO: 1043825 - DNA, 25 bp, Homo sapien
ttcaggaccaagactccaagggccc

SEQ ID NO: 1043826 - DNA, 25 bp, Homo sapien
ctgccaccttcgacccctggtgggg

SEQ ID NO: 1043827 - DNA, 25 bp, Homo sapien
ctccttttcgggtcgccgctgcggg

SEQ ID NO: 1043828 - DNA, 25 bp, Homo sapien
ggagaactcgagcaccacgagggca

SEQ ID NO: 1043829 - DNA, 25 bp, Homo sapien
gacacggcccggagggagaactcga

SEQ ID NO: 1043830 - DNA, 25 bp, Homo sapien
acgaccgtcagaaacagggccagcc

SEQ ID NO: 1043831 - DNA, 25 bp, Homo sapien
tcgtagaggcggcagacgtggcggt

SEQ ID NO: 1043832 - DNA, 25 bp, Homo sapien
gtcacccacggcaaaggctatggcc

SEQ ID NO: 1043833 - DNA, 25 bp, Homo sapien
acaccccacagtagcgctggctgct

SEQ ID NO: 1043834 - DNA, 25 bp, Homo sapien
tgagcggtgtccagaaccgcatggc

SEQ ID NO: 1043835 - DNA, 25 bp, Homo sapien
accagcaccgtctgcacctggctct

SEQ ID NO: 1043836 - DNA, 25 bp, Homo sapien
cgcccagtagggagacaaggatgcc

SEQ ID NO: 1043837 - DNA, 25 bp, Homo sapien
acgagacaccagagctcgcccagta

SEQ ID NO: 1043838 - DNA, 25 bp, Homo sapien
agaggtcaagcagggtgcggacgcc

SEQ ID NO: 1043839 - DNA, 25 bp, Homo sapien
tccagtgacccgggcacttcctccc

SEQ ID NO: 1043840 - DNA, 25 bp, Homo sapien
cctccagtgacccgggcacttcctc

SEQ ID NO: 1043841 - DNA, 25 bp, Homo sapien
ctccagtgacccgggcacttcctcc

SEQ ID NO: 1043842 - DNA, 25 bp, Homo sapien
tcaaggcctcggagatcaggctagt

SEQ ID NO: 1043843 - DNA, 25 bp, Homo sapien
tctgagaggctgcatcattgcccac

SEQ ID NO: 1043844 - DNA, 25 bp, Homo sapien
gcttggtgttgacactggaggcctc

SEQ ID NO: 1043845 - DNA, 25 bp, Homo sapien
gctagtgggcttgagacagactcca

SEQ ID NO: 1043846 - DNA, 25 bp, Homo sapien
caccgatcggcaggtgccaaacttc

SEQ ID NO: 1043847 - DNA, 25 bp, Homo sapien
atggagggattcgtcctggcccgca

SEQ ID NO: 1043848 - DNA, 25 bp, Homo sapien
gcagctcgggtgtcgatgtcaccga

SEQ ID NO: 1043849 - DNA, 25 bp, Homo sapien
actgctcccggatggagggattcgt

SEQ ID NO: 1043850 - DNA, 25 bp, Homo sapien
cctgagcggtaagccctctgcaggt

SEQ ID NO: 1043851 - DNA, 25 bp, Homo sapien
tctcctgagcggtaagccctctgca

SEQ ID NO: 1043852 - DNA, 25 bp, Homo sapien
gctctcctgagcggtaagccctctg

SEQ ID NO: 1043853 - DNA, 25 bp, Homo sapien
tcctgagcggtaagccctctgcagg

SEQ ID NO: 1043854 - DNA, 25 bp, Homo sapien
tttactaagcgtgagacccggagca

SEQ ID NO: 1043855 - DNA, 25 bp, Homo sapien
gttctgcggccgtttactaagcgtg

SEQ ID NO: 1043856 - DNA, 25 bp, Homo sapien
ggatccgccagggtcttgcgtcaaa

SEQ ID NO: 1043857 - DNA, 25 bp, Homo sapien
gtcaaaccgaccagggttctgcggc

SEQ ID NO: 1043858 - DNA, 25 bp, Homo sapien
cctgtccggcggaggtgagcgctta

SEQ ID NO: 1043859 - DNA, 25 bp, Homo sapien
ctgtccggcggaggtgagcgcttac

SEQ ID NO: 1043860 - DNA, 25 bp, Homo sapien
ctttaccataaaaggtgaggctcgg

SEQ ID NO: 1043861 - DNA, 25 bp, Homo sapien
gccgctttaccataaaaggtgaggc

SEQ ID NO: 1043862 - DNA, 25 bp, Homo sapien
ccgcgccgctttaccataaaaggtg

SEQ ID NO: 1043863 - DNA, 25 bp, Homo sapien
gatccgacgcccgagccagcggagc

SEQ ID NO: 1043864 - DNA, 25 bp, Homo sapien
gggggtcccggctggcgaccgagca

SEQ ID NO: 1043865 - DNA, 25 bp, Homo sapien
cgagcaggctccggccgagcactgc

SEQ ID NO: 1043866 - DNA, 25 bp, Homo sapien
cggccgagcactgccggcgctgtca

SEQ ID NO: 1043867 - DNA, 25 bp, Homo sapien
gtcccggctggcgaccgagcaggct

SEQ ID NO: 1043868 - DNA, 25 bp, Homo sapien
ctgggacgcaaagggcgtgaggacc

SEQ ID NO: 1043869 - DNA, 25 bp, Homo sapien
gcaaagggcgtgaggaccgcacccc

SEQ ID NO: 1043870 - DNA, 25 bp, Homo sapien
acgcaaagggcgtgaggaccgcacc

SEQ ID NO: 1043871 - DNA, 25 bp, Homo sapien
ggacgcaaagggcgtgaggaccgca

SEQ ID NO: 1043872 - DNA, 25 bp, Homo sapien
atccatgtgcgggactccggccttt

SEQ ID NO: 1043873 - DNA, 25 bp, Homo sapien
tccggccttttgtgcgggagcttcc

SEQ ID NO: 1043874 - DNA, 25 bp, Homo sapien
ggaaacgcgggaccctccgcaggca

SEQ ID NO: 1043875 - DNA, 25 bp, Homo sapien
gggcgccgccggagctttaattcga

SEQ ID NO: 1043876 - DNA, 25 bp, Homo sapien
ctgtggcccaggctgcgcagtggtg

SEQ ID NO: 1043877 - DNA, 25 bp, Homo sapien
ttatttatttattttgagacagagt

SEQ ID NO: 1043878 - DNA, 25 bp, Homo sapien
ctcattctgtggcccaggctgcgca

SEQ ID NO: 1043879 - DNA, 25 bp, Homo sapien
ctacacccggcttaagctttgttat

SEQ ID NO: 1043880 - DNA, 25 bp, Homo sapien
cagtcctccttcctactccttgttc

SEQ ID NO: 1043881 - DNA, 25 bp, Homo sapien
cacagtcctccttcctactccttgt

SEQ ID NO: 1043882 - DNA, 25 bp, Homo sapien
ccacagtcctccttcctactccttg

SEQ ID NO: 1043883 - DNA, 25 bp, Homo sapien
ccccacagtcctccttcctactcct

SEQ ID NO: 1043884 - DNA, 25 bp, Homo sapien
cacacccgcgaggaaggaacagatg

SEQ ID NO: 1043885 - DNA, 25 bp, Homo sapien
tcctagaagggctgaagtcctggag

SEQ ID NO: 1043886 - DNA, 25 bp, Homo sapien
agcagggctgacttccgttcccagt

SEQ ID NO: 1043887 - DNA, 25 bp, Homo sapien
tgggatcagattctcctagaagggc

SEQ ID NO: 1043888 - DNA, 25 bp, Homo sapien
acaggggtgagacccaaaagtcctg

SEQ ID NO: 1043889 - DNA, 25 bp, Homo sapien
tgagacccaaaagtcctgactgccc

SEQ ID NO: 1043890 - DNA, 25 bp, Homo sapien
gggtgagacccaaaagtcctgactg

SEQ ID NO: 1043891 - DNA, 25 bp, Homo sapien
tggccacaggggtgagacccaaaag

SEQ ID NO: 1043892 - DNA, 25 bp, Homo sapien
agggtgataaagacagacgatgcca

SEQ ID NO: 1043893 - DNA, 25 bp, Homo sapien
gggtgataaagacagacgatgccac

SEQ ID NO: 1043894 - DNA, 25 bp, Homo sapien
gggcggccacgccgggcctcacaaa

SEQ ID NO: 1043895 - DNA, 25 bp, Homo sapien
gccacgccgggcctcacaaactgcc

SEQ ID NO: 1043896 - DNA, 25 bp, Homo sapien
acgccgggcctcacaaactgcctgc

SEQ ID NO: 1043897 - DNA, 25 bp, Homo sapien
gccgggcctcacaaactgcctgcct

SEQ ID NO: 1043898 - DNA, 25 bp, Homo sapien
ccaagccagcctcgggtgtcttcat

SEQ ID NO: 1043899 - DNA, 25 bp, Homo sapien
ccccgccaagccagcctcgggtgtc

SEQ ID NO: 1043900 - DNA, 25 bp, Homo sapien
cgccaagccagcctcgggtgtcttc

SEQ ID NO: 1043901 - DNA, 25 bp, Homo sapien
gcctccccgccaagccagcctcggg

SEQ ID NO: 1043902 - DNA, 25 bp, Homo sapien
gaagcacgtcctcaccatccaggac

SEQ ID NO: 1043903 - DNA, 25 bp, Homo sapien
ctcttcagaaggcagaagcactgga

SEQ ID NO: 1043904 - DNA, 25 bp, Homo sapien
agaaggcagaagcactggagggggc

SEQ ID NO: 1043905 - DNA, 25 bp, Homo sapien
gctgctctaagtctgcaatgagtga

SEQ ID NO: 1043906 - DNA, 25 bp, Homo sapien
ggcagctcttcctccatgggcctga

SEQ ID NO: 1043907 - DNA, 25 bp, Homo sapien
ctgtggatgcccctttctcaacagg

SEQ ID NO: 1043908 - DNA, 25 bp, Homo sapien
tgaggggaccgggctggactgaagg

SEQ ID NO: 1043909 - DNA, 25 bp, Homo sapien
ggatgcccctttctcaacaggttct

SEQ ID NO: 1043910 - DNA, 25 bp, Homo sapien
gctctcggggggacacggtcttgtg

SEQ ID NO: 1043911 - DNA, 25 bp, Homo sapien
agctctcggggggacacggtcttgt

SEQ ID NO: 1043912 - DNA, 25 bp, Homo sapien
cagctctcggggggacacggtcttg

SEQ ID NO: 1043913 - DNA, 25 bp, Homo sapien
tctcggggggacacggtcttgtggc

SEQ ID NO: 1043914 - DNA, 25 bp, Homo sapien
tagaagtcgtccaggcagtacacct

SEQ ID NO: 1043915 - DNA, 25 bp, Homo sapien
ctgtagaagtcgtccaggcagtaca

SEQ ID NO: 1043916 - DNA, 25 bp, Homo sapien
gtagaagtcgtccaggcagtacacc

SEQ ID NO: 1043917 - DNA, 25 bp, Homo sapien
agaagtcgtccaggcagtacacctc

SEQ ID NO: 1043918 - DNA, 25 bp, Homo sapien
taataaaccagtagacaggaaactc

SEQ ID NO: 1043919 - DNA, 25 bp, Homo sapien
tataataaaccagtagacaggaaac

SEQ ID NO: 1043920 - DNA, 25 bp, Homo sapien
ccctgcttgggtctcgccctgtccc

SEQ ID NO: 1043921 - DNA, 25 bp, Homo sapien
aataaaccagtagacaggaaactct

SEQ ID NO: 1043922 - DNA, 25 bp, Homo sapien
gcagggattgagtccagcggttatc

SEQ ID NO: 1043923 - DNA, 25 bp, Homo sapien
ttgagtggtgagcaactcatgggca

SEQ ID NO: 1043924 - DNA, 25 bp, Homo sapien
ggcacatctgtctctccgcttgagt

SEQ ID NO: 1043925 - DNA, 25 bp, Homo sapien
gcagaccccgaggtctgggctttca

SEQ ID NO: 1043926 - DNA, 25 bp, Homo sapien
tcagtcccgttgctatgggactgca

SEQ ID NO: 1043927 - DNA, 25 bp, Homo sapien
aatttcagtcccgttgctatgggac

SEQ ID NO: 1043928 - DNA, 25 bp, Homo sapien
tcccgttgctatgggactgcagaga

SEQ ID NO: 1043929 - DNA, 25 bp, Homo sapien
agcaatttcagtcccgttgctatgg

SEQ ID NO: 1043930 - DNA, 25 bp, Homo sapien
tagaagcaaaggaacccatgcttgg

SEQ ID NO: 1043931 - DNA, 25 bp, Homo sapien
agaagcaaaggaacccatgcttggg

SEQ ID NO: 1043932 - DNA, 25 bp, Homo sapien
ctagaagcaaaggaacccatgcttg

SEQ ID NO: 1043933 - DNA, 25 bp, Homo sapien
gaagcaaaggaacccatgcttggga

SEQ ID NO: 1043934 - DNA, 25 bp, Homo sapien
tcccatgcattcgattttgaaggca

SEQ ID NO: 1043935 - DNA, 25 bp, Homo sapien
ccatcccgagggatgatgggatttt

SEQ ID NO: 1043936 - DNA, 25 bp, Homo sapien
gaagtttcttcccatgcattcgatt

SEQ ID NO: 1043937 - DNA, 25 bp, Homo sapien
tttcacagatgctgcagacgggggc

SEQ ID NO: 1043938 - DNA, 25 bp, Homo sapien
tgggctttcaaaatgcattatcagc

SEQ ID NO: 1043939 - DNA, 25 bp, Homo sapien
gggctttcaaaatgcattatcagca

SEQ ID NO: 1043940 - DNA, 25 bp, Homo sapien
aaaatgcattatcagcaggactttg

SEQ ID NO: 1043941 - DNA, 25 bp, Homo sapien
tttcaaaatgcattatcagcaggac

SEQ ID NO: 1043942 - DNA, 25 bp, Homo sapien
tgaaatggggacaataaatcccatc

SEQ ID NO: 1043943 - DNA, 25 bp, Homo sapien
gaaatggggacaataaatcccatct

SEQ ID NO: 1043944 - DNA, 25 bp, Homo sapien
cactccgcttcacatggcatggctt

SEQ ID NO: 1043945 - DNA, 25 bp, Homo sapien
ctccgcttcacatggcatggcttgc

SEQ ID NO: 1043946 - DNA, 25 bp, Homo sapien
gcagcactccgcttcacatggcatg

SEQ ID NO: 1043947 - DNA, 25 bp, Homo sapien
agcactccgcttcacatggcatggc

SEQ ID NO: 1043948 - DNA, 25 bp, Homo sapien
aaccccacaggcgaggctggtccta

SEQ ID NO: 1043949 - DNA, 25 bp, Homo sapien
cccactgtatcctggacaggctggg

SEQ ID NO: 1043950 - DNA, 25 bp, Homo sapien
attctgggggtgaagctcatggtcc

SEQ ID NO: 1043951 - DNA, 25 bp, Homo sapien
aaagtgtgcaagagcaggttaggaa

SEQ ID NO: 1043952 - DNA, 25 bp, Homo sapien
tgaatgcagaagttcgggactccct

SEQ ID NO: 1043953 - DNA, 25 bp, Homo sapien
tgcatggatacacggctcagcacga

SEQ ID NO: 1043954 - DNA, 25 bp, Homo sapien
cattctcgtgggagcgtgtgagacc

SEQ ID NO: 1043955 - DNA, 25 bp, Homo sapien
tgaggacgcagaggttacaacacag

SEQ ID NO: 1043956 - DNA, 25 bp, Homo sapien
agatgcccagggctactaccaaacg

SEQ ID NO: 1043957 - DNA, 25 bp, Homo sapien
aacgccagcgtttacctgtgtgaga

SEQ ID NO: 1043958 - DNA, 25 bp, Homo sapien
tacctgtgtgagagcctacacacaa

SEQ ID NO: 1043959 - DNA, 25 bp, Homo sapien
ccgccacagcgagcagatgcccagg

SEQ ID NO: 1043960 - DNA, 25 bp, Homo sapien
gagggttactaacttgtccacgcta

SEQ ID NO: 1043961 - DNA, 25 bp, Homo sapien
tgcaagcttgaaaagggagagcagc

SEQ ID NO: 1043962 - DNA, 25 bp, Homo sapien
tctgggcctgtgctcaccaagtgag

SEQ ID NO: 1043963 - DNA, 25 bp, Homo sapien
cagcctagttatgtgcagggagcac

SEQ ID NO: 1043964 - DNA, 25 bp, Homo sapien
ctctctggggtcaaacttcacggca

SEQ ID NO: 1043965 - DNA, 25 bp, Homo sapien
ctctggggtcaaacttcacggcatg

SEQ ID NO: 1043966 - DNA, 25 bp, Homo sapien
tctctggggtcaaacttcacggcat

SEQ ID NO: 1043967 - DNA, 25 bp, Homo sapien
tctctctggggtcaaacttcacggc

SEQ ID NO: 1043968 - DNA, 25 bp, Homo sapien
gcgcagaagcagcgacttcacctcc

SEQ ID NO: 1043969 - DNA, 25 bp, Homo sapien
agcgcagaagcagcgacttcacctc

SEQ ID NO: 1043970 - DNA, 25 bp, Homo sapien
gcagaagcagcgacttcacctccag

SEQ ID NO: 1043971 - DNA, 25 bp, Homo sapien
cgcagaagcagcgacttcacctcca

SEQ ID NO: 1043972 - DNA, 25 bp, Homo sapien
tctgtctcttagtggttccctgagg

SEQ ID NO: 1043973 - DNA, 25 bp, Homo sapien
tctttctgtctcttagtggttccct

SEQ ID NO: 1043974 - DNA, 25 bp, Homo sapien
ccggtaacccgttgccttggcaatg

SEQ ID NO: 1043975 - DNA, 25 bp, Homo sapien
tgtctcttagtggttccctgagggc

SEQ ID NO: 1043976 - DNA, 25 bp, Homo sapien
tcggtgccacgtgtgtcaagcaatg

SEQ ID NO: 1043977 - DNA, 25 bp, Homo sapien
gatcggtgccacgtgtgtcaagcaa

SEQ ID NO: 1043978 - DNA, 25 bp, Homo sapien
aaagatcggtgccacgtgtgtcaag

SEQ ID NO: 1043979 - DNA, 25 bp, Homo sapien
gtgccacgtgtgtcaagcaatgttg

SEQ ID NO: 1043980 - DNA, 25 bp, Homo sapien
tgagggtagcggccatcaacattac

SEQ ID NO: 1043981 - DNA, 25 bp, Homo sapien
gggtagcggccatcaacattacagc

SEQ ID NO: 1043982 - DNA, 25 bp, Homo sapien
tatgatgtcatgagggtagcggcca

SEQ ID NO: 1043983 - DNA, 25 bp, Homo sapien
gtcatgagggtagcggccatcaaca

SEQ ID NO: 1043984 - DNA, 25 bp, Homo sapien
ttattgaaatattttcctttctgct

SEQ ID NO: 1043985 - DNA, 25 bp, Homo sapien
agttgtcaagtgatcctttattgaa

SEQ ID NO: 1043986 - DNA, 25 bp, Homo sapien
ctttattgaaatattttcctttctg

SEQ ID NO: 1043987 - DNA, 25 bp, Homo sapien
attgaaatattttcctttctgcttc

SEQ ID NO: 1043988 - DNA, 25 bp, Homo sapien
ctaccacgcctgtacccaactaact

SEQ ID NO: 1043989 - DNA, 25 bp, Homo sapien
gcctgtacccaactaacttcttgta

SEQ ID NO: 1043990 - DNA, 25 bp, Homo sapien
cacgcctgtacccaactaacttctt

SEQ ID NO: 1043991 - DNA, 25 bp, Homo sapien
agctaccacgcctgtacccaactaa

SEQ ID NO: 1043992 - DNA, 25 bp, Homo sapien
ggtcatgttgaaggatcgtgccaca

SEQ ID NO: 1043993 - DNA, 25 bp, Homo sapien
caagtttcctatggcccagttctgg

SEQ ID NO: 1043994 - DNA, 25 bp, Homo sapien
tgctgagtaatgtgacttggtcccc

SEQ ID NO: 1043995 - DNA, 25 bp, Homo sapien
tagacatgactgtgcctcacgaaat

SEQ ID NO: 1043996 - DNA, 25 bp, Homo sapien
agttttgccctataaaaccatatag

SEQ ID NO: 1043997 - DNA, 25 bp, Homo sapien
ttttaaaagcatagaggaatacacc

SEQ ID NO: 1043998 - DNA, 25 bp, Homo sapien
gactctaatgattctgtcaactgct

SEQ ID NO: 1043999 - DNA, 25 bp, Homo sapien
gctttgaaattcatggatggagtat

SEQ ID NO: 1044000 - DNA, 25 bp, Homo sapien
tacattgatttatactggtagtgat

SEQ ID NO: 1044001 - DNA, 25 bp, Homo sapien
tagcacacactatacttctgtcatt

SEQ ID NO: 1044002 - DNA, 25 bp, Homo sapien
gattgagggattggattcaattttg

SEQ ID NO: 1044003 - DNA, 25 bp, Homo sapien
tgttgctctccagcttatgtagaat

SEQ ID NO: 1044004 - DNA, 25 bp, Homo sapien
tgcagcgggcccttggtcggcatgg

SEQ ID NO: 1044005 - DNA, 25 bp, Homo sapien
ctgcagcgggcccttggtcggcatg

SEQ ID NO: 1044006 - DNA, 25 bp, Homo sapien
gcagcgggcccttggtcggcatggc

SEQ ID NO: 1044007 - DNA, 25 bp, Homo sapien
ccggcaacgaggatcagctaccagc

SEQ ID NO: 1044008 - DNA, 25 bp, Homo sapien
ttttggactcccggcaacgaggatc

SEQ ID NO: 1044009 - DNA, 25 bp, Homo sapien
gactcccggcaacgaggatcagcta

SEQ ID NO: 1044010 - DNA, 25 bp, Homo sapien
ttggactcccggcaacgaggatcag

SEQ ID NO: 1044011 - DNA, 25 bp, Homo sapien
aaactgtttattatacaggtgaatt

SEQ ID NO: 1044012 - DNA, 25 bp, Homo sapien
gtgaattttgatagtcatgatgggc

SEQ ID NO: 1044013 - DNA, 25 bp, Homo sapien
tacaggtgaattttgatagtcatga

SEQ ID NO: 1044014 - DNA, 25 bp, Homo sapien
gtttattatacaggtgaattttgat

SEQ ID NO: 1044015 - DNA, 25 bp, Homo sapien
gatgcctagaactcagccgtgggaa

SEQ ID NO: 1044016 - DNA, 25 bp, Homo sapien
gcgttccagcgtcatttcaaagagc

SEQ ID NO: 1044017 - DNA, 25 bp, Homo sapien
cgtgggaagtgcctgtctaaagcct

SEQ ID NO: 1044018 - DNA, 25 bp, Homo sapien
tgctggtgccagtagcaaacccgtg

SEQ ID NO: 1044019 - DNA, 25 bp, Homo sapien
gtttcgagaaggctccatcacactc

SEQ ID NO: 1044020 - DNA, 25 bp, Homo sapien
gccgttccaaacatggcgcgggaag

SEQ ID NO: 1044021 - DNA, 25 bp, Homo sapien
actccacacgggatccagtcaacag

SEQ ID NO: 1044022 - DNA, 25 bp, Homo sapien
tttcccgtttcgagaaggctccatc

SEQ ID NO: 1044023 - DNA, 25 bp, Homo sapien
tacgcagtgcctaatataagccggc

SEQ ID NO: 1044024 - DNA, 25 bp, Homo sapien
agtgcctaatataagccggcccagg

SEQ ID NO: 1044025 - DNA, 25 bp, Homo sapien
ctacgcagtgcctaatataagccgg

SEQ ID NO: 1044026 - DNA, 25 bp, Homo sapien
gcagtgcctaatataagccggccca

SEQ ID NO: 1044027 - DNA, 25 bp, Homo sapien
cggaaggatctcttgacgtcaggac

SEQ ID NO: 1044028 - DNA, 25 bp, Homo sapien
gccctggcggaaggatctcttgacg

SEQ ID NO: 1044029 - DNA, 25 bp, Homo sapien
tctcttgacgtcaggacttccaaaa

SEQ ID NO: 1044030 - DNA, 25 bp, Homo sapien
ggatctcttgacgtcaggacttcca

SEQ ID NO: 1044031 - DNA, 25 bp, Homo sapien
ggctcaccccgcgattgcggcgtcc

SEQ ID NO: 1044032 - DNA, 25 bp, Homo sapien
ccttccgagagccatagggtcgtcg

SEQ ID NO: 1044033 - DNA, 25 bp, Homo sapien
cggcgtccacgctggcctctaagag

SEQ ID NO: 1044034 - DNA, 25 bp, Homo sapien
tgtgctttcttctcgaaaaagctcc

SEQ ID NO: 1044035 - DNA, 25 bp, Homo sapien
cgaattcaagagacagttaacctgg

SEQ ID NO: 1044036 - DNA, 25 bp, Homo sapien
tcatatactgagttcctaggaggac

SEQ ID NO: 1044037 - DNA, 25 bp, Homo sapien
tatcattaccgtaggaacgccgatt

SEQ ID NO: 1044038 - DNA, 25 bp, Homo sapien
tgcaggtgggcgaatccattgagcc

SEQ ID NO: 1044039 - DNA, 25 bp, Homo sapien
ccaatggcactaatatctcaggtca

SEQ ID NO: 1044040 - DNA, 25 bp, Homo sapien
tacaaacgacactatttgaattcga

SEQ ID NO: 1044041 - DNA, 25 bp, Homo sapien
tcaggtcacctatgcataactaaat

SEQ ID NO: 1044042 - DNA, 25 bp, Homo sapien
aattttaaatacttggcctcatcga

SEQ ID NO: 1044043 - DNA, 25 bp, Homo sapien
tctgactctcgggcctcgcagctca

SEQ ID NO: 1044044 - DNA, 25 bp, Homo sapien
cggcttcgtacgagaccgtcagcgc

SEQ ID NO: 1044045 - DNA, 25 bp, Homo sapien
tcgtacgagaccgtcagcgccggga

SEQ ID NO: 1044046 - DNA, 25 bp, Homo sapien
tcgccggcttcgtacgagaccgtca

SEQ ID NO: 1044047 - DNA, 25 bp, Homo sapien
tctcgggtaagttgcccacccagag

SEQ ID NO: 1044048 - DNA, 25 bp, Homo sapien
cgtttgaaatgctcgatgatcttct

SEQ ID NO: 1044049 - DNA, 25 bp, Homo sapien
tctcttcccgcacgttctcgggtaa

SEQ ID NO: 1044050 - DNA, 25 bp, Homo sapien
atgatcttctcttcccgcacgttct

SEQ ID NO: 1044051 - DNA, 25 bp, Homo sapien
cggacccggctgtcgggcgggctcg

SEQ ID NO: 1044052 - DNA, 25 bp, Homo sapien
gcagcttggagtggcggcgccggac

SEQ ID NO: 1044053 - DNA, 25 bp, Homo sapien
gggccgggcactgcgcgcaaggacg

SEQ ID NO: 1044054 - DNA, 25 bp, Homo sapien
tcagacattgccgagcgcccgcaga

SEQ ID NO: 1044055 - DNA, 25 bp, Homo sapien
aggccgaggcgcacaaatcacgaga

SEQ ID NO: 1044056 - DNA, 25 bp, Homo sapien
gaggcgcacaaatcacgagatcagg

SEQ ID NO: 1044057 - DNA, 25 bp, Homo sapien
gggaggccgaggcgcacaaatcacg

SEQ ID NO: 1044058 - DNA, 25 bp, Homo sapien
gccgaggcgcacaaatcacgagatc

SEQ ID NO: 1044059 - DNA, 25 bp, Homo sapien
tataatccgtgcgtaggtctctgtc

SEQ ID NO: 1044060 - DNA, 25 bp, Homo sapien
gaattttgacactttccacgcggcc

SEQ ID NO: 1044061 - DNA, 25 bp, Homo sapien
tactacgagatgctatggaaactgt

SEQ ID NO: 1044062 - DNA, 25 bp, Homo sapien
gaccgagttgtgagctttctgtgca

SEQ ID NO: 1044063 - DNA, 25 bp, Homo sapien
tggaagcaagtagtcccagacaaac

SEQ ID NO: 1044064 - DNA, 25 bp, Homo sapien
gggtaatccaccttcttaatgggca

SEQ ID NO: 1044065 - DNA, 25 bp, Homo sapien
tacctttgattggacagcaacttgc

SEQ ID NO: 1044066 - DNA, 25 bp, Homo sapien
ttccagccctaagtatgaatcaggt

SEQ ID NO: 1044067 - DNA, 25 bp, Homo sapien
agcgatttggacttcgactccgaga

SEQ ID NO: 1044068 - DNA, 25 bp, Homo sapien
gtgtaaactgctcgcgagccctagg

SEQ ID NO: 1044069 - DNA, 25 bp, Homo sapien
tccgagaagcgtaatagagcccatg

SEQ ID NO: 1044070 - DNA, 25 bp, Homo sapien
catgttgtaaagtccgctctcgagg

SEQ ID NO: 1044071 - DNA, 25 bp, Homo sapien
ctgggatgaatgtggtgaccgactc

SEQ ID NO: 1044072 - DNA, 25 bp, Homo sapien
aatgtggtgaccgactcctgctgtg

SEQ ID NO: 1044073 - DNA, 25 bp, Homo sapien
gactcctgctgtgctggtaattccg

SEQ ID NO: 1044074 - DNA, 25 bp, Homo sapien
gtaattccgctctggccttctgcct

SEQ ID NO: 1044075 - DNA, 25 bp, Homo sapien
gaatcactactggaggatctacttc

SEQ ID NO: 1044076 - DNA, 25 bp, Homo sapien
aggatctacttctagagccgctgcc

SEQ ID NO: 1044077 - DNA, 25 bp, Homo sapien
gaccttgtgggtctagatgcttggc

SEQ ID NO: 1044078 - DNA, 25 bp, Homo sapien
cttggctagccagtctctgaggaga

SEQ ID NO: 1044079 - DNA, 25 bp, Homo sapien
aaagacgtcgagcagtacatagcag

SEQ ID NO: 1044080 - DNA, 25 bp, Homo sapien
caataaacggccatgacagagaaac

SEQ ID NO: 1044081 - DNA, 25 bp, Homo sapien
tataaggacttcacaactagactgc

SEQ ID NO: 1044082 - DNA, 25 bp, Homo sapien
catggagccatgaaggcccagttct

SEQ ID NO: 1044083 - DNA, 25 bp, Homo sapien
gactgcagactttcatgctttttta

SEQ ID NO: 1044084 - DNA, 25 bp, Homo sapien
taacccataaaacaagccgagcgct

SEQ ID NO: 1044085 - DNA, 25 bp, Homo sapien
aaatgcttcttattagactgcagac

SEQ ID NO: 1044086 - DNA, 25 bp, Homo sapien
caaaaggatatgtgagtaaaattcc

SEQ ID NO: 1044087 - DNA, 25 bp, Homo sapien
agcagttttacagaagccgtagctt

SEQ ID NO: 1044088 - DNA, 25 bp, Homo sapien
tggccaagcactggcagtgcagaag

SEQ ID NO: 1044089 - DNA, 25 bp, Homo sapien
tggcagtgcagaagcagttttacag

SEQ ID NO: 1044090 - DNA, 25 bp, Homo sapien
catgttgtgatgtggccaagcactg

SEQ ID NO: 1044091 - DNA, 25 bp, Homo sapien
gcatgtctatagtctcggctactta

SEQ ID NO: 1044092 - DNA, 25 bp, Homo sapien
gtggcatgtctatagtctcggctac

SEQ ID NO: 1044093 - DNA, 25 bp, Homo sapien
tggcatgtctatagtctcggctact

SEQ ID NO: 1044094 - DNA, 25 bp, Homo sapien
ggtggcatgtctatagtctcggcta

SEQ ID NO: 1044095 - DNA, 25 bp, Homo sapien
gaaagcctaagccatccgctatttg

SEQ ID NO: 1044096 - DNA, 25 bp, Homo sapien
tctccattagggcagttgcagggac

SEQ ID NO: 1044097 - DNA, 25 bp, Homo sapien
gatggctccacacaccatgacacag

SEQ ID NO: 1044098 - DNA, 25 bp, Homo sapien
gcttgagtgtactggccttttttca

SEQ ID NO: 1044099 - DNA, 25 bp, Homo sapien
gaaatccttccaacgtggcagcagt

SEQ ID NO: 1044100 - DNA, 25 bp, Homo sapien
gatgtaacatgtctgcctaagaaca

SEQ ID NO: 1044101 - DNA, 25 bp, Homo sapien
ggattttctcattcccttagtcaca

SEQ ID NO: 1044102 - DNA, 25 bp, Homo sapien
ggtgggctttactggacccttcaca

SEQ ID NO: 1044103 - DNA, 25 bp, Homo sapien
caagtagtttgttggccgccaggcc

SEQ ID NO: 1044104 - DNA, 25 bp, Homo sapien
cattgtgatatgctaacctaaacta

SEQ ID NO: 1044105 - DNA, 25 bp, Homo sapien
taaactacaatgtaccatggatttc

SEQ ID NO: 1044106 - DNA, 25 bp, Homo sapien
tcccaagtagtttgttggccgccag

SEQ ID NO: 1044107 - DNA, 25 bp, Homo sapien
ggactgctgcagactgaactgatcg

SEQ ID NO: 1044108 - DNA, 25 bp, Homo sapien
tgccaaaacttttacggggctcatc

SEQ ID NO: 1044109 - DNA, 25 bp, Homo sapien
ctgatcgagctggagaatcatcact

SEQ ID NO: 1044110 - DNA, 25 bp, Homo sapien
gaagattctggaccttgatgccaaa

SEQ ID NO: 1044111 - DNA, 25 bp, Homo sapien
tatactaatgtcataacaaggtctg

SEQ ID NO: 1044112 - DNA, 25 bp, Homo sapien
gtaatatactaatgtcataacaagg

SEQ ID NO: 1044113 - DNA, 25 bp, Homo sapien
acaggtaatatactaatgtcataac

SEQ ID NO: 1044114 - DNA, 25 bp, Homo sapien
tcagacaggtaatatactaatgtca

SEQ ID NO: 1044115 - DNA, 25 bp, Homo sapien
tgttacttcaatctgcatgccaaag

SEQ ID NO: 1044116 - DNA, 25 bp, Homo sapien
gaagttccatgtatctgcactgaag

SEQ ID NO: 1044117 - DNA, 25 bp, Homo sapien
cttttgatgcagtcaaggctttttc

SEQ ID NO: 1044118 - DNA, 25 bp, Homo sapien
tcttgctgccgaaagaataccagac

SEQ ID NO: 1044119 - DNA, 25 bp, Homo sapien
gtcttcaaggtcatgcaagctggaa

SEQ ID NO: 1044120 - DNA, 25 bp, Homo sapien
tttaaacaagtactgcaggcggtcc

SEQ ID NO: 1044121 - DNA, 25 bp, Homo sapien
tgggttgcacccataaggcttattc

SEQ ID NO: 1044122 - DNA, 25 bp, Homo sapien
tgccttataacaggttccacaggta

SEQ ID NO: 1044123 - DNA, 25 bp, Homo sapien
tatgcaaagttaggtttcttggatt

SEQ ID NO: 1044124 - DNA, 25 bp, Homo sapien
aagatcggaaattcagttagcaaaa

SEQ ID NO: 1044125 - DNA, 25 bp, Homo sapien
acttaaccttcacaaccagtcaaag

SEQ ID NO: 1044126 - DNA, 25 bp, Homo sapien
tagaagccaccaatgggtctatatg

SEQ ID NO: 1044127 - DNA, 25 bp, Homo sapien
tcccacctcagcctggctacctggc

SEQ ID NO: 1044128 - DNA, 25 bp, Homo sapien
cacctcagcctggctacctggctga

SEQ ID NO: 1044129 - DNA, 25 bp, Homo sapien
ccctttgttgcccaggcacatctca

SEQ ID NO: 1044130 - DNA, 25 bp, Homo sapien
cctcagcctggctacctggctgatt

SEQ ID NO: 1044131 - DNA, 25 bp, Homo sapien
cacaatttctccaaagcgctggaag

SEQ ID NO: 1044132 - DNA, 25 bp, Homo sapien
cgaaggtcatggtaagtagtggttt

SEQ ID NO: 1044133 - DNA, 25 bp, Homo sapien
gggtgaaattcatctatcctttcat

SEQ ID NO: 1044134 - DNA, 25 bp, Homo sapien
cgctggaagatgttgcgaaggtcat

SEQ ID NO: 1044135 - DNA, 25 bp, Homo sapien
tatcacagtattgcagaaacgcata

SEQ ID NO: 1044136 - DNA, 25 bp, Homo sapien
gaaacgcatactgaggaactccatt

SEQ ID NO: 1044137 - DNA, 25 bp, Homo sapien
gaggcgattatttccaagatattcc

SEQ ID NO: 1044138 - DNA, 25 bp, Homo sapien
ttacaaacgctagcaatatcacagt

SEQ ID NO: 1044139 - DNA, 25 bp, Homo sapien
aaatactgatctgacacattcgaag

SEQ ID NO: 1044140 - DNA, 25 bp, Homo sapien
cacattcgaagaaagcccatctagc

SEQ ID NO: 1044141 - DNA, 25 bp, Homo sapien
tcggcagaaatgtcgtgttaaatac

SEQ ID NO: 1044142 - DNA, 25 bp, Homo sapien
ccacaggcccatatcggcagaaatg

SEQ ID NO: 1044143 - DNA, 25 bp, Homo sapien
catgccttttaagcggtcaaacacc

SEQ ID NO: 1044144 - DNA, 25 bp, Homo sapien
ttcaatttcattgtagagaaccagg

SEQ ID NO: 1044145 - DNA, 25 bp, Homo sapien
tggtctcttttacagctgcttgtgc

SEQ ID NO: 1044146 - DNA, 25 bp, Homo sapien
gagaaccagggccatgccttttaag

SEQ ID NO: 1044147 - DNA, 25 bp, Homo sapien
gaccagatttctccatgcagtgata

SEQ ID NO: 1044148 - DNA, 25 bp, Homo sapien
ctccatgcagtgataaaaagccagc

SEQ ID NO: 1044149 - DNA, 25 bp, Homo sapien
tttcggctaacatttcataaaagtc

SEQ ID NO: 1044150 - DNA, 25 bp, Homo sapien
ccagctgactttcccgatttgcaaa

SEQ ID NO: 1044151 - DNA, 25 bp, Homo sapien
gtatgagcacatacaacctggttgt

SEQ ID NO: 1044152 - DNA, 25 bp, Homo sapien
taagaagtaactgtaagcaagatga

SEQ ID NO: 1044153 - DNA, 25 bp, Homo sapien
acctggttgttgtcattactaaata

SEQ ID NO: 1044154 - DNA, 25 bp, Homo sapien
gtacataaagcagaccaggtgtggt

SEQ ID NO: 1044155 - DNA, 25 bp, Homo sapien
gctggagcactgttcagcttaacaa

SEQ ID NO: 1044156 - DNA, 25 bp, Homo sapien
tctgaggaactgcagaaagtcaggt

SEQ ID NO: 1044157 - DNA, 25 bp, Homo sapien
aatacttattttgctgggccccatg

SEQ ID NO: 1044158 - DNA, 25 bp, Homo sapien
aactggcacttggaccatgtacggg

SEQ ID NO: 1044159 - DNA, 25 bp, Homo sapien
acactagaacttggccggacacggt

SEQ ID NO: 1044160 - DNA, 25 bp, Homo sapien
gactgcaagcaccatgagagaactc

SEQ ID NO: 1044161 - DNA, 25 bp, Homo sapien
taacaaaccagggatgactgcaagc

SEQ ID NO: 1044162 - DNA, 25 bp, Homo sapien
cacagggacctgtctggtgcattca

SEQ ID NO: 1044163 - DNA, 25 bp, Homo sapien
cttttttgaaagcacgcgagcatcc

SEQ ID NO: 1044164 - DNA, 25 bp, Homo sapien
taattccgttctcgcttggtgcaga

SEQ ID NO: 1044165 - DNA, 25 bp, Homo sapien
tgtatagcgctccaaacgagacttg

SEQ ID NO: 1044166 - DNA, 25 bp, Homo sapien
tctctagaggacacgtcaggctgct

SEQ ID NO: 1044167 - DNA, 25 bp, Homo sapien
gagggatttagctctttcaagcaaa

SEQ ID NO: 1044168 - DNA, 25 bp, Homo sapien
tgagtgggatttgtgttcaccatct

SEQ ID NO: 1044169 - DNA, 25 bp, Homo sapien
tcaccatcttcgtcagaatcagaag

SEQ ID NO: 1044170 - DNA, 25 bp, Homo sapien
gagtctttcatctcgctcacgtagc

SEQ ID NO: 1044171 - DNA, 25 bp, Homo sapien
tcttggagcagagtcaaccttttct

SEQ ID NO: 1044172 - DNA, 25 bp, Homo sapien
gaaaatttgcaaatcgggagtccca

SEQ ID NO: 1044173 - DNA, 25 bp, Homo sapien
ccaggatggaataggtcttggagca

SEQ ID NO: 1044174 - DNA, 25 bp, Homo sapien
aaacgagaagcaaacaattcctgcc

SEQ ID NO: 1044175 - DNA, 25 bp, Homo sapien
catagatcctaccagaaatgaagtc

SEQ ID NO: 1044176 - DNA, 25 bp, Homo sapien
tttattctcaggagcagattctggg

SEQ ID NO: 1044177 - DNA, 25 bp, Homo sapien
gactgtgacacttggaggcccaacg

SEQ ID NO: 1044178 - DNA, 25 bp, Homo sapien
tttctgttgcatccgtgtgagctcc

SEQ ID NO: 1044179 - DNA, 25 bp, Homo sapien
gcatcatggcagcttctttatcggg

SEQ ID NO: 1044180 - DNA, 25 bp, Homo sapien
tcttctgagacggtagctggctcca

SEQ ID NO: 1044181 - DNA, 25 bp, Homo sapien
tcttctgttaccaaaggcgcctcta

SEQ ID NO: 1044182 - DNA, 25 bp, Homo sapien
caggagcaggttcagatgcaggctt

SEQ ID NO: 1044183 - DNA, 25 bp, Homo sapien
ggagagcggttttcatggtcaccca

SEQ ID NO: 1044184 - DNA, 25 bp, Homo sapien
ccccgaggagaattggaccgcttga

SEQ ID NO: 1044185 - DNA, 25 bp, Homo sapien
tgttcggctgagaggcaaacttggt

SEQ ID NO: 1044186 - DNA, 25 bp, Homo sapien
tgcatagacgctccttacattccgg

SEQ ID NO: 1044187 - DNA, 25 bp, Homo sapien
catggagctctctttcacgcctatt

SEQ ID NO: 1044188 - DNA, 25 bp, Homo sapien
ttcaggggggtttttgtctgtgcca

SEQ ID NO: 1044189 - DNA, 25 bp, Homo sapien
gagctctctttcacgcctatttggg

SEQ ID NO: 1044190 - DNA, 25 bp, Homo sapien
tacaacttcaacaggggcggtttca

SEQ ID NO: 1044191 - DNA, 25 bp, Homo sapien
ggagactgccaccaccccagattcc

SEQ ID NO: 1044192 - DNA, 25 bp, Homo sapien
ttttctcaggggagactgccaccac

SEQ ID NO: 1044193 - DNA, 25 bp, Homo sapien
ggggagactgccaccaccccagatt

SEQ ID NO: 1044194 - DNA, 25 bp, Homo sapien
acttttctcaggggagactgccacc

SEQ ID NO: 1044195 - DNA, 25 bp, Homo sapien
ggtcaccgggtcactttcaatgatg

SEQ ID NO: 1044196 - DNA, 25 bp, Homo sapien
cgagctttgcgatgtgttccacggc

SEQ ID NO: 1044197 - DNA, 25 bp, Homo sapien
gactggaggcctagaagattctgta

SEQ ID NO: 1044198 - DNA, 25 bp, Homo sapien
tgatggaatgcaccctgaacctggc

SEQ ID NO: 1044199 - DNA, 25 bp, Homo sapien
tgacctgggacttggacactgactg

SEQ ID NO: 1044200 - DNA, 25 bp, Homo sapien
cacttggtcgaggagaatgagcatc

SEQ ID NO: 1044201 - DNA, 25 bp, Homo sapien
ggcatccggctaataacagaggtaa

SEQ ID NO: 1044202 - DNA, 25 bp, Homo sapien
cagtaccaacgtggaatgggtggcc

SEQ ID NO: 1044203 - DNA, 25 bp, Homo sapien
tgtaggtgatactgggcagcgtggg

SEQ ID NO: 1044204 - DNA, 25 bp, Homo sapien
tctggccggatgctgtaggtgatac

SEQ ID NO: 1044205 - DNA, 25 bp, Homo sapien
gcagcgtgggagtgttcattctcac

SEQ ID NO: 1044206 - DNA, 25 bp, Homo sapien
agcccgaggagagtgaagcgcttct

SEQ ID NO: 1044207 - DNA, 25 bp, Homo sapien
ctgcggggtgctggcacgctgtggg

SEQ ID NO: 1044208 - DNA, 25 bp, Homo sapien
tgctggcacgctgtggggccctgac

SEQ ID NO: 1044209 - DNA, 25 bp, Homo sapien
gggtgctggcacgctgtggggccct

SEQ ID NO: 1044210 - DNA, 25 bp, Homo sapien
cggggtgctggcacgctgtggggcc

SEQ ID NO: 1044211 - DNA, 25 bp, Homo sapien
gactagtacctctgactgcacaggg

SEQ ID NO: 1044212 - DNA, 25 bp, Homo sapien
tcccgtggcacagtataggggtgca

SEQ ID NO: 1044213 - DNA, 25 bp, Homo sapien
ttcctcctcgggagggtgctgggag

SEQ ID NO: 1044214 - DNA, 25 bp, Homo sapien
gctcgagcgacaggaaggtgataat

SEQ ID NO: 1044215 - DNA, 25 bp, Homo sapien
tcgctgactgccgtcacatgtggat

SEQ ID NO: 1044216 - DNA, 25 bp, Homo sapien
tgctcgctgactgccgtcacatgtg

SEQ ID NO: 1044217 - DNA, 25 bp, Homo sapien
tgccgtcacatgtggatgcaccatg

SEQ ID NO: 1044218 - DNA, 25 bp, Homo sapien
gactgccgtcacatgtggatgcacc

SEQ ID NO: 1044219 - DNA, 25 bp, Homo sapien
gatacgggcctcaccatgaggggca

SEQ ID NO: 1044220 - DNA, 25 bp, Homo sapien
gtaactgtgaggatacgggcctcac

SEQ ID NO: 1044221 - DNA, 25 bp, Homo sapien
actgtgaggatacgggcctcaccat

SEQ ID NO: 1044222 - DNA, 25 bp, Homo sapien
gaggatacgggcctcaccatgaggg

SEQ ID NO: 1044223 - DNA, 25 bp, Homo sapien
tcttgaaacagctccccgctggagt

SEQ ID NO: 1044224 - DNA, 25 bp, Homo sapien
aggaagcggcgggaaactgagtgtg

SEQ ID NO: 1044225 - DNA, 25 bp, Homo sapien
tgcacaatctgcaccccatgggtca

SEQ ID NO: 1044226 - DNA, 25 bp, Homo sapien
gcggatgtcgccgtaccggtactct

SEQ ID NO: 1044227 - DNA, 25 bp, Homo sapien
tgcaggggctcaccttcaggaggag

SEQ ID NO: 1044228 - DNA, 25 bp, Homo sapien
gtggactgcacaggctgaggaggct

SEQ ID NO: 1044229 - DNA, 25 bp, Homo sapien
tgcaggctgggcaggctgtgtggac

SEQ ID NO: 1044230 - DNA, 25 bp, Homo sapien
agggcgggcagggtggtgcaggctg

SEQ ID NO: 1044231 - DNA, 25 bp, Homo sapien
ctcctgggacacttgaggcatcttg

SEQ ID NO: 1044232 - DNA, 25 bp, Homo sapien
gaggcgaggctgctctactcccgtc

SEQ ID NO: 1044233 - DNA, 25 bp, Homo sapien
aggctgctctactcccgtctgggtc

SEQ ID NO: 1044234 - DNA, 25 bp, Homo sapien
tcctgggacacttgaggcatcttgc

SEQ ID NO: 1044235 - DNA, 25 bp, Homo sapien
gaaggaagtcgggcctgtttctgct

SEQ ID NO: 1044236 - DNA, 25 bp, Homo sapien
gagagactggaaggtcaggcttcat

SEQ ID NO: 1044237 - DNA, 25 bp, Homo sapien
agactggaaggtcaggcttcatgga

SEQ ID NO: 1044238 - DNA, 25 bp, Homo sapien
aagagagactggaaggtcaggcttc

SEQ ID NO: 1044239 - DNA, 25 bp, Homo sapien
cttcagaagttgaaccatatccacg

SEQ ID NO: 1044240 - DNA, 25 bp, Homo sapien
tgaaccatatccacgggtctctggg

SEQ ID NO: 1044241 - DNA, 25 bp, Homo sapien
gaagttgaaccatatccacgggtct

SEQ ID NO: 1044242 - DNA, 25 bp, Homo sapien
tccacgggtctctgggaagtcaggt

SEQ ID NO: 1044243 - DNA, 25 bp, Homo sapien
catcctctgggcgatccttagtggg

SEQ ID NO: 1044244 - DNA, 25 bp, Homo sapien
ccgatgggccaggacgttgttgcca

SEQ ID NO: 1044245 - DNA, 25 bp, Homo sapien
agccgcatcctctgggcgatcctta

SEQ ID NO: 1044246 - DNA, 25 bp, Homo sapien
agagacgaagtggagctgcacagca

SEQ ID NO: 1044247 - DNA, 25 bp, Homo sapien
caccaagtagaagcatagtggaccc

SEQ ID NO: 1044248 - DNA, 25 bp, Homo sapien
gttaatgcttccatgacaggccagg

SEQ ID NO: 1044249 - DNA, 25 bp, Homo sapien
ggctggcagggactacctacgtctt

SEQ ID NO: 1044250 - DNA, 25 bp, Homo sapien
caagaataccgttactggccaggca

SEQ ID NO: 1044251 - DNA, 25 bp, Homo sapien
ggaacgttgatgatccctgccgcct

SEQ ID NO: 1044252 - DNA, 25 bp, Homo sapien
tcttggtcacggccacagggcagag

SEQ ID NO: 1044253 - DNA, 25 bp, Homo sapien
ccagggttgggaacgttgatgatcc

SEQ ID NO: 1044254 - DNA, 25 bp, Homo sapien
gccttgagggactcggtctggctca

SEQ ID NO: 1044255 - DNA, 25 bp, Homo sapien
acaggatagagagcaaagtgggacc

SEQ ID NO: 1044256 - DNA, 25 bp, Homo sapien
gaagaggcccaatgctaagagccag

SEQ ID NO: 1044257 - DNA, 25 bp, Homo sapien
gcaaatgtgccaggactatgtctac

SEQ ID NO: 1044258 - DNA, 25 bp, Homo sapien
gaagacctagcaggtgtcagaaaac

SEQ ID NO: 1044259 - DNA, 25 bp, Homo sapien
ctcacagggcgggaagatctgcagc

SEQ ID NO: 1044260 - DNA, 25 bp, Homo sapien
tctcagagaactcacagggcgggaa

SEQ ID NO: 1044261 - DNA, 25 bp, Homo sapien
ccaggcgggacaggtgactctcaga

SEQ ID NO: 1044262 - DNA, 25 bp, Homo sapien
tcacacggaggcaatgacaatcatg

SEQ ID NO: 1044263 - DNA, 25 bp, Homo sapien
tgtacatcccggtgaatcaaagacg

SEQ ID NO: 1044264 - DNA, 25 bp, Homo sapien
cactcctagaggaagtctggccgac

SEQ ID NO: 1044265 - DNA, 25 bp, Homo sapien
tccttcctgcgttaagagtctgcaa

SEQ ID NO: 1044266 - DNA, 25 bp, Homo sapien
gcaggagaattaaggtgacgcatcc

SEQ ID NO: 1044267 - DNA, 25 bp, Homo sapien
gcagagacgggatcaaatgagcccc

SEQ ID NO: 1044268 - DNA, 25 bp, Homo sapien
aatggttaagttcagtgtccgtgac

SEQ ID NO: 1044269 - DNA, 25 bp, Homo sapien
tccacattacctaagaaccagttag

SEQ ID NO: 1044270 - DNA, 25 bp, Homo sapien
ggcagaagggaaacagttcccatgt

SEQ ID NO: 1044271 - DNA, 25 bp, Homo sapien
gctggcggcccttctgactgtttat

SEQ ID NO: 1044272 - DNA, 25 bp, Homo sapien
gtcatgttccagacagacgcggact

SEQ ID NO: 1044273 - DNA, 25 bp, Homo sapien
gacgcggacttctatcagcagtatg

SEQ ID NO: 1044274 - DNA, 25 bp, Homo sapien
tatttaaggatggatggcaccctgg

SEQ ID NO: 1044275 - DNA, 25 bp, Homo sapien
agtttgcagaccccggcgctctgca

SEQ ID NO: 1044276 - DNA, 25 bp, Homo sapien
cactgccagcgacagtttgcagacc

SEQ ID NO: 1044277 - DNA, 25 bp, Homo sapien
aagccctacgtgtgcatccactgcc

SEQ ID NO: 1044278 - DNA, 25 bp, Homo sapien
caccttcggatccacagcggggaga

SEQ ID NO: 1044279 - DNA, 25 bp, Homo sapien
gtgggaagcagttcaccacctcagg

SEQ ID NO: 1044280 - DNA, 25 bp, Homo sapien
acgggcccctcaagtgccgagagtg

SEQ ID NO: 1044281 - DNA, 25 bp, Homo sapien
ccctcaagtgccgagagtgtgggaa

SEQ ID NO: 1044282 - DNA, 25 bp, Homo sapien
ccgagagtgtgggaagcagttcacc

SEQ ID NO: 1044283 - DNA, 25 bp, Homo sapien
aagtgcccacactgcgacaagaagt

SEQ ID NO: 1044284 - DNA, 25 bp, Homo sapien
gacacggacaaggagcacaagtgcc

SEQ ID NO: 1044285 - DNA, 25 bp, Homo sapien
cctggcaagcctgagagtcaattgt

SEQ ID NO: 1044286 - DNA, 25 bp, Homo sapien
gacaagaagttcaaccaggtgtgcg

SEQ ID NO: 1044287 - DNA, 25 bp, Homo sapien
cagccctggtgagcatggccgggag

SEQ ID NO: 1044288 - DNA, 25 bp, Homo sapien
gcagccctggtgagcatggccggga

SEQ ID NO: 1044289 - DNA, 25 bp, Homo sapien
tccgaaaatactgctgaaccttggc

SEQ ID NO: 1044290 - DNA, 25 bp, Homo sapien
aatatcagaatcaggttgtcgggag

SEQ ID NO: 1044291 - DNA, 25 bp, Homo sapien
gcacttggcctaaatctgaaagata

SEQ ID NO: 1044292 - DNA, 25 bp, Homo sapien
tcttatgctgggaatgggtactctc

SEQ ID NO: 1044293 - DNA, 25 bp, Homo sapien
cattgcacactcgtatttatggtgg

SEQ ID NO: 1044294 - DNA, 25 bp, Homo sapien
tgggcaacacttcctatctgctagt

SEQ ID NO: 1044295 - DNA, 25 bp, Homo sapien
cactgtgttaagtttggagctggga

SEQ ID NO: 1044296 - DNA, 25 bp, Homo sapien
ggatatcttgttccaccttgtggct

SEQ ID NO: 1044297 - DNA, 25 bp, Homo sapien
catccggcccttcctttgtgattgt

SEQ ID NO: 1044298 - DNA, 25 bp, Homo sapien
ggccatccggcccttcctttgtgat

SEQ ID NO: 1044299 - DNA, 25 bp, Homo sapien
cagtgagagcctctttgctcctgca

SEQ ID NO: 1044300 - DNA, 25 bp, Homo sapien
ttgatcttcaagagcatcatgggcc

SEQ ID NO: 1044301 - DNA, 25 bp, Homo sapien
tgccgcaggtggtagggatttgagg

SEQ ID NO: 1044302 - DNA, 25 bp, Homo sapien
ctgccgcaggtggtagggatttgag

SEQ ID NO: 1044303 - DNA, 25 bp, Homo sapien
gccgcaggtggtagggatttgaggg

SEQ ID NO: 1044304 - DNA, 25 bp, Homo sapien
ccgcaggtggtagggatttgagggg

SEQ ID NO: 1044305 - DNA, 25 bp, Homo sapien
ttgcacttcaaagcggctggcgggt

SEQ ID NO: 1044306 - DNA, 25 bp, Homo sapien
tctctcagaagtttgcacttcaaag

SEQ ID NO: 1044307 - DNA, 25 bp, Homo sapien
tcagaagtttgcacttcaaagcggc

SEQ ID NO: 1044308 - DNA, 25 bp, Homo sapien
gaagtttgcacttcaaagcggctgg

SEQ ID NO: 1044309 - DNA, 25 bp, Homo sapien
ggctcattgaaccttgctgcgtgtg

SEQ ID NO: 1044310 - DNA, 25 bp, Homo sapien
cccagggtgattaaggttgacctca

SEQ ID NO: 1044311 - DNA, 25 bp, Homo sapien
cccattgttgggtttgacatcacag

SEQ ID NO: 1044312 - DNA, 25 bp, Homo sapien
gacctcagtaatgcagtcagcacag

SEQ ID NO: 1044313 - DNA, 25 bp, Homo sapien
ggggacgccaggttgccatcctgcc

SEQ ID NO: 1044314 - DNA, 25 bp, Homo sapien
tgtggggacgccaggttgccatcct

SEQ ID NO: 1044315 - DNA, 25 bp, Homo sapien
aacctgtggggacgccaggttgcca

SEQ ID NO: 1044316 - DNA, 25 bp, Homo sapien
ccaaacctgtggggacgccaggttg

SEQ ID NO: 1044317 - DNA, 25 bp, Homo sapien
acatcccctctcgtccacgcattgt

SEQ ID NO: 1044318 - DNA, 25 bp, Homo sapien
cctctcgtccacgcattgtttgaca

SEQ ID NO: 1044319 - DNA, 25 bp, Homo sapien
cgatggcgaagatattggcagtcag

SEQ ID NO: 1044320 - DNA, 25 bp, Homo sapien
atattggcagtcagaaagagacatc

SEQ ID NO: 1044321 - DNA, 25 bp, Homo sapien
aatgattcccatgatgataaaaaac

SEQ ID NO: 1044322 - DNA, 25 bp, Homo sapien
tcaatgaaatgattcccatgatgat

SEQ ID NO: 1044323 - DNA, 25 bp, Homo sapien
caatgaaatgattcccatgatgata

SEQ ID NO: 1044324 - DNA, 25 bp, Homo sapien
tcccatgatgataaaaaacagcatg

SEQ ID NO: 1044325 - DNA, 25 bp, Homo sapien
aaaccacatgtgacaatcaatggga

SEQ ID NO: 1044326 - DNA, 25 bp, Homo sapien
aaccacatgtgacaatcaatgggag

SEQ ID NO: 1044327 - DNA, 25 bp, Homo sapien
accacatgtgacaatcaatgggagg

SEQ ID NO: 1044328 - DNA, 25 bp, Homo sapien
ccacatgtgacaatcaatgggaggg

SEQ ID NO: 1044329 - DNA, 25 bp, Homo sapien
gagtgtcaacaatcgcccggggccg

SEQ ID NO: 1044330 - DNA, 25 bp, Homo sapien
aggtgagtgtcaacaatcgcccggg

SEQ ID NO: 1044331 - DNA, 25 bp, Homo sapien
ggcaggtgagtgtcaacaatcgccc

SEQ ID NO: 1044332 - DNA, 25 bp, Homo sapien
agtgtcaacaatcgcccggggccgg

SEQ ID NO: 1044333 - DNA, 25 bp, Homo sapien
tttgtctgctctggagtgccgtccc

SEQ ID NO: 1044334 - DNA, 25 bp, Homo sapien
atggcggcgccctttgtctgctctg

SEQ ID NO: 1044335 - DNA, 25 bp, Homo sapien
cttctcgcggccgtgatgcacctcc

SEQ ID NO: 1044336 - DNA, 25 bp, Homo sapien
gtccccggccttctcgcggccgtga

SEQ ID NO: 1044337 - DNA, 25 bp, Homo sapien
gcgaggtcggttccgcccgactcta

SEQ ID NO: 1044338 - DNA, 25 bp, Homo sapien
agttgcagccgggaagcctgcgagg

SEQ ID NO: 1044339 - DNA, 25 bp, Homo sapien
tatgggcgctctcctagcgaggacg

SEQ ID NO: 1044340 - DNA, 25 bp, Homo sapien
tgcgcatgcgccggaagttgcagcc

SEQ ID NO: 1044341 - DNA, 25 bp, Homo sapien
cgccgaagtactgtaaggtggaact

SEQ ID NO: 1044342 - DNA, 25 bp, Homo sapien
aggtggaacttttggatagctaggc

SEQ ID NO: 1044343 - DNA, 25 bp, Homo sapien
aggacaactctgagcgccgaagtac

SEQ ID NO: 1044344 - DNA, 25 bp, Homo sapien
tttggatagctaggcgcatgcgtct

SEQ ID NO: 1044345 - DNA, 25 bp, Homo sapien
ttgatagtcacattctcagtaactg

SEQ ID NO: 1044346 - DNA, 25 bp, Homo sapien
agcgccttcgctcttgatagtcaca

SEQ ID NO: 1044347 - DNA, 25 bp, Homo sapien
gaagttgaactgaatagcgccttcg

SEQ ID NO: 1044348 - DNA, 25 bp, Homo sapien
gatagtcacattctcagtaactgga

SEQ ID NO: 1044349 - DNA, 25 bp, Homo sapien
cgattcatgtcatcggagagggcag

SEQ ID NO: 1044350 - DNA, 25 bp, Homo sapien
ctgggacgattcatgtcatcggaga

SEQ ID NO: 1044351 - DNA, 25 bp, Homo sapien
acttcctttgaagaagaggcttcct

SEQ ID NO: 1044352 - DNA, 25 bp, Homo sapien
gacgattcatgtcatcggagagggc

SEQ ID NO: 1044353 - DNA, 25 bp, Homo sapien
cagccagcatctgggccagtgccca

SEQ ID NO: 1044354 - DNA, 25 bp, Homo sapien
tgggccagtgcccagaatatgtcct

SEQ ID NO: 1044355 - DNA, 25 bp, Homo sapien
agcatctgggccagtgcccagaata

SEQ ID NO: 1044356 - DNA, 25 bp, Homo sapien
atctgggccagtgcccagaatatgt

SEQ ID NO: 1044357 - DNA, 25 bp, Homo sapien
cccaggtatgggaaaactggtcctg

SEQ ID NO: 1044358 - DNA, 25 bp, Homo sapien
cccaagggtgtctgagaactgcatc

SEQ ID NO: 1044359 - DNA, 25 bp, Homo sapien
tcatagaggcccaagggtgtctgag

SEQ ID NO: 1044360 - DNA, 25 bp, Homo sapien
cacacctggatatcttcacgaggtg

SEQ ID NO: 1044361 - DNA, 25 bp, Homo sapien
gggatcagggacatagattcccttg

SEQ ID NO: 1044362 - DNA, 25 bp, Homo sapien
tctggttcctccaatgaccctgagg

SEQ ID NO: 1044363 - DNA, 25 bp, Homo sapien
gggagtcccatagatggatctggtt

SEQ ID NO: 1044364 - DNA, 25 bp, Homo sapien
aggctgtcagtgctcgcagggaggg

SEQ ID NO: 1044365 - DNA, 25 bp, Homo sapien
atcgcagacggaggggtctgtgcct

SEQ ID NO: 1044366 - DNA, 25 bp, Homo sapien
acctgcaggctgctgatcgcagacg

SEQ ID NO: 1044367 - DNA, 25 bp, Homo sapien
agggtctctgtgtagcccctgtggt

SEQ ID NO: 1044368 - DNA, 25 bp, Homo sapien
tagcccctgtggtctgacactgagg

SEQ ID NO: 1044369 - DNA, 25 bp, Homo sapien
tgaccccttccagacttgccagtca

SEQ ID NO: 1044370 - DNA, 25 bp, Homo sapien
ctgtggtgcagcttgcggggtgcca

SEQ ID NO: 1044371 - DNA, 25 bp, Homo sapien
ctcgtggccttgatgggactggctt

SEQ ID NO: 1044372 - DNA, 25 bp, Homo sapien
attttccgaggtgtctggggctgtg

SEQ ID NO: 1044373 - DNA, 25 bp, Homo sapien
ggcagacagtggccagggtgaggct

SEQ ID NO: 1044374 - DNA, 25 bp, Homo sapien
catcctcatcctagaggtggttgtt

SEQ ID NO: 1044375 - DNA, 25 bp, Homo sapien
cccactgctgaagacgctgcctttg

SEQ ID NO: 1044376 - DNA, 25 bp, Homo sapien
tggggagttgagagccatcctcatc

SEQ ID NO: 1044377 - DNA, 25 bp, Homo sapien
gaatagggtctagtgtctgggctct

SEQ ID NO: 1044378 - DNA, 25 bp, Homo sapien
cgagatgagttttaagggccactga

SEQ ID NO: 1044379 - DNA, 25 bp, Homo sapien
tgcacagttggagcaaaaccgagat

SEQ ID NO: 1044380 - DNA, 25 bp, Homo sapien
ttcacaggagtggatgggctgcaca

SEQ ID NO: 1044381 - DNA, 25 bp, Homo sapien
gcggctacttcggcgcctgcctagc

SEQ ID NO: 1044382 - DNA, 25 bp, Homo sapien
tacttcggcgcctgcctagctctgg

SEQ ID NO: 1044383 - DNA, 25 bp, Homo sapien
gtcctaggccactcttccaggatgt

SEQ ID NO: 1044384 - DNA, 25 bp, Homo sapien
tgtcctaggccactcttccaggatg

SEQ ID NO: 1044385 - DNA, 25 bp, Homo sapien
tccaggcctgtctcacggatggtgc

SEQ ID NO: 1044386 - DNA, 25 bp, Homo sapien
caggcctgtctcacggatggtgcct

SEQ ID NO: 1044387 - DNA, 25 bp, Homo sapien
tctccaggcctgtctcacggatggt

SEQ ID NO: 1044388 - DNA, 25 bp, Homo sapien
gtctccaggcctgtctcacggatgg

SEQ ID NO: 1044389 - DNA, 25 bp, Homo sapien
cgtgggtgcagtcaataacaaaagt

SEQ ID NO: 1044390 - DNA, 25 bp, Homo sapien
gaacacgatgtaggtcttcattggt

SEQ ID NO: 1044391 - DNA, 25 bp, Homo sapien
tgacaagccctcgattgggactggg

SEQ ID NO: 1044392 - DNA, 25 bp, Homo sapien
gagctgcttcccgtgggtgcagtca

SEQ ID NO: 1044393 - DNA, 25 bp, Homo sapien
accctctgcagagcggcagggtggc

SEQ ID NO: 1044394 - DNA, 25 bp, Homo sapien
tctgcagagcggcagggtggccctg

SEQ ID NO: 1044395 - DNA, 25 bp, Homo sapien
gagggctttcagtgagtccttgact

SEQ ID NO: 1044396 - DNA, 25 bp, Homo sapien
actgttccccaagttgaagacctca

SEQ ID NO: 1044397 - DNA, 25 bp, Homo sapien
aggagagggctttcagtgagtcctt

SEQ ID NO: 1044398 - DNA, 25 bp, Homo sapien
cagtgagtccttgactgttccccaa

SEQ ID NO: 1044399 - DNA, 25 bp, Homo sapien
gggcatcagagcccggcccttccag

SEQ ID NO: 1044400 - DNA, 25 bp, Homo sapien
aattgcagcctctgggcatcagagc

SEQ ID NO: 1044401 - DNA, 25 bp, Homo sapien
ctgggcatcagagcccggcccttcc

SEQ ID NO: 1044402 - DNA, 25 bp, Homo sapien
gccctgggaattgcagcctctgggc

SEQ ID NO: 1044403 - DNA, 25 bp, Homo sapien
cagatgccccttagcggatctaatg

SEQ ID NO: 1044404 - DNA, 25 bp, Homo sapien
actcgacggatgtttcagatgcccc

SEQ ID NO: 1044405 - DNA, 25 bp, Homo sapien
caggtgacttatcctgcctctgcca

SEQ ID NO: 1044406 - DNA, 25 bp, Homo sapien
gaatgagtctcttcatgtgcaggtg

SEQ ID NO: 1044407 - DNA, 25 bp, Homo sapien
taaattaatgaccagatacggtggc

SEQ ID NO: 1044408 - DNA, 25 bp, Homo sapien
gatcacactttgttgcctgcgcaga

SEQ ID NO: 1044409 - DNA, 25 bp, Homo sapien
tctgcctagaagagacgctaccagg

SEQ ID NO: 1044410 - DNA, 25 bp, Homo sapien
tatagcttagtcaccggtcagatct

SEQ ID NO: 1044411 - DNA, 25 bp, Homo sapien
ctgctggtgaaaagccggatgtgca

SEQ ID NO: 1044412 - DNA, 25 bp, Homo sapien
aagccggatgtgcagccacaggtct

SEQ ID NO: 1044413 - DNA, 25 bp, Homo sapien
ggtgaaaagccggatgtgcagccac

SEQ ID NO: 1044414 - DNA, 25 bp, Homo sapien
aaaagccggatgtgcagccacaggt

SEQ ID NO: 1044415 - DNA, 25 bp, Homo sapien
gacccagtgtcctctagtctgatga

SEQ ID NO: 1044416 - DNA, 25 bp, Homo sapien
cagtgtcctctagtctgatgagagg

SEQ ID NO: 1044417 - DNA, 25 bp, Homo sapien
ggcctggacccagtgtcctctagtc

SEQ ID NO: 1044418 - DNA, 25 bp, Homo sapien
ctggacccagtgtcctctagtctga

SEQ ID NO: 1044419 - DNA, 25 bp, Homo sapien
cttcttccacagttgggaaggagag

SEQ ID NO: 1044420 - DNA, 25 bp, Homo sapien
gatgtcacaagcagttcaaagaagg

SEQ ID NO: 1044421 - DNA, 25 bp, Homo sapien
gaatgtgcacagaggtaacactggc

SEQ ID NO: 1044422 - DNA, 25 bp, Homo sapien
cagatgatatctgtaggtcagggaa

SEQ ID NO: 1044423 - DNA, 25 bp, Homo sapien
gccgctggggcacgtcgggtctgaa

SEQ ID NO: 1044424 - DNA, 25 bp, Homo sapien
cacgtcgggtctgaaggagcccttg

SEQ ID NO: 1044425 - DNA, 25 bp, Homo sapien
tcaggggaccaagcggccgctgggc

SEQ ID NO: 1044426 - DNA, 25 bp, Homo sapien
ggaccaagcggccgctgggccgctg

SEQ ID NO: 1044427 - DNA, 25 bp, Homo sapien
cctctaaggaacagttgtggccctg

SEQ ID NO: 1044428 - DNA, 25 bp, Homo sapien
catgaaaacaggtgggcctctaagg

SEQ ID NO: 1044429 - DNA, 25 bp, Homo sapien
ccttccgagcggagagaagtttcca

SEQ ID NO: 1044430 - DNA, 25 bp, Homo sapien
catgttttccgatgactttggcagc

SEQ ID NO: 1044431 - DNA, 25 bp, Homo sapien
ctttccaagaggcttcgcttccccg

SEQ ID NO: 1044432 - DNA, 25 bp, Homo sapien
caactgcgagccccgccctttccaa

SEQ ID NO: 1044433 - DNA, 25 bp, Homo sapien
gcttcgcttccccgtccgtaacatg

SEQ ID NO: 1044434 - DNA, 25 bp, Homo sapien
tccccgtccgtaacatgggaagagc

SEQ ID NO: 1044435 - DNA, 25 bp, Homo sapien
ttcatcactggcctatgagctggct

SEQ ID NO: 1044436 - DNA, 25 bp, Homo sapien
ctgggtgactgggattcaaaggact

SEQ ID NO: 1044437 - DNA, 25 bp, Homo sapien
ccagatcccaaatcaaaatcctggg

SEQ ID NO: 1044438 - DNA, 25 bp, Homo sapien
gactgggattcaaaggactgcatca

SEQ ID NO: 1044439 - DNA, 25 bp, Homo sapien
tgtcaggagcgtcacatctgcagct

SEQ ID NO: 1044440 - DNA, 25 bp, Homo sapien
gcgtcacatctgcagctcaagtcct

SEQ ID NO: 1044441 - DNA, 25 bp, Homo sapien
tgcctgcgacgtgtcaggagcgtca

SEQ ID NO: 1044442 - DNA, 25 bp, Homo sapien
ctgccgtgtgcctgcgacgtgtcag

SEQ ID NO: 1044443 - DNA, 25 bp, Homo sapien
cctgtctaagatcacggaggccgag

SEQ ID NO: 1044444 - DNA, 25 bp, Homo sapien
cgtgatcccgttgtagagaaatggt

SEQ ID NO: 1044445 - DNA, 25 bp, Homo sapien
atcctgatgacccatcttgtccagg

SEQ ID NO: 1044446 - DNA, 25 bp, Homo sapien
tgagtgcccacggaaatcccacgag

SEQ ID NO: 1044447 - DNA, 25 bp, Homo sapien
tggagattaaaaacgtccttgacaa

SEQ ID NO: 1044448 - DNA, 25 bp, Homo sapien
ggtatatgctctaccaatcatcact

SEQ ID NO: 1044449 - DNA, 25 bp, Homo sapien
aggtatatgctctaccaatcatcac

SEQ ID NO: 1044450 - DNA, 25 bp, Homo sapien
gtatatgctctaccaatcatcactc

SEQ ID NO: 1044451 - DNA, 25 bp, Homo sapien
caggtatatgctctaccaatcatca

SEQ ID NO: 1044452 - DNA, 25 bp, Homo sapien
tcacagagcctcctttgctcccagc

SEQ ID NO: 1044453 - DNA, 25 bp, Homo sapien
ctcctgctgcggctgaactggccct

SEQ ID NO: 1044454 - DNA, 25 bp, Homo sapien
ctcctctcacagagcctcctttgct

SEQ ID NO: 1044455 - DNA, 25 bp, Homo sapien
ctgtcagtcctcctgctgcggctga

SEQ ID NO: 1044456 - DNA, 25 bp, Homo sapien
ttggatggctcggcggatgtgggga

SEQ ID NO: 1044457 - DNA, 25 bp, Homo sapien
cttggatggctcggcggatgtgggg

SEQ ID NO: 1044458 - DNA, 25 bp, Homo sapien
tggatggctcggcggatgtggggac

SEQ ID NO: 1044459 - DNA, 25 bp, Homo sapien
agctcctgcagagtcacagggtccc

SEQ ID NO: 1044460 - DNA, 25 bp, Homo sapien
accacacacccgatggcaaagttca

SEQ ID NO: 1044461 - DNA, 25 bp, Homo sapien
aaagttcatggcatagctgaccagg

SEQ ID NO: 1044462 - DNA, 25 bp, Homo sapien
cccgatggcaaagttcatggcatag

SEQ ID NO: 1044463 - DNA, 25 bp, Homo sapien
gtaccagtcttctcccaggcggaac

SEQ ID NO: 1044464 - DNA, 25 bp, Homo sapien
gccacagggtacacagtccaggaaa

SEQ ID NO: 1044465 - DNA, 25 bp, Homo sapien
ggccacagggtacacagtccaggaa

SEQ ID NO: 1044466 - DNA, 25 bp, Homo sapien
gaggagggcgtgatgctctgggaga

SEQ ID NO: 1044467 - DNA, 25 bp, Homo sapien
ctccagaggagggcgtgatgctctg

SEQ ID NO: 1044468 - DNA, 25 bp, Homo sapien
cagaggagggcgtgatgctctggga

SEQ ID NO: 1044469 - DNA, 25 bp, Homo sapien
aggagggcgtgatgctctgggagaa

SEQ ID NO: 1044470 - DNA, 25 bp, Homo sapien
caaagttcttgatatccaggtagtc

SEQ ID NO: 1044471 - DNA, 25 bp, Homo sapien
agttcttgatatccaggtagtcctc

SEQ ID NO: 1044472 - DNA, 25 bp, Homo sapien
aaagttcttgatatccaggtagtcc

SEQ ID NO: 1044473 - DNA, 25 bp, Homo sapien
gttcttgatatccaggtagtcctcc

SEQ ID NO: 1044474 - DNA, 25 bp, Homo sapien
ccccgatggtcgtggtgcgcacacg

SEQ ID NO: 1044475 - DNA, 25 bp, Homo sapien
ctcaggctccccgatggtcgtggtg

SEQ ID NO: 1044476 - DNA, 25 bp, Homo sapien
gctccccgatggtcgtggtgcgcac

SEQ ID NO: 1044477 - DNA, 25 bp, Homo sapien
gtcgtggtgcgcacacggcccaggt

SEQ ID NO: 1044478 - DNA, 25 bp, Homo sapien
accagcatttcgttttgcttgctct

SEQ ID NO: 1044479 - DNA, 25 bp, Homo sapien
ctgccaccagcatttcgttttgctt

SEQ ID NO: 1044480 - DNA, 25 bp, Homo sapien
gccaccagcatttcgttttgcttgc

SEQ ID NO: 1044481 - DNA, 25 bp, Homo sapien
caccagcatttcgttttgcttgctc

SEQ ID NO: 1044482 - DNA, 25 bp, Homo sapien
agcccctccagtaatcccggacaga

SEQ ID NO: 1044483 - DNA, 25 bp, Homo sapien
cctgctcgctgttgaagactgccag

SEQ ID NO: 1044484 - DNA, 25 bp, Homo sapien
tgctcgctgttgaagactgccagga

SEQ ID NO: 1044485 - DNA, 25 bp, Homo sapien
gaagcccctccagtaatcccggaca

SEQ ID NO: 1044486 - DNA, 25 bp, Homo sapien
gaagatctcaggcaggtcgaaggga

SEQ ID NO: 1044487 - DNA, 25 bp, Homo sapien
gatctcaggcaggtcgaagggaacg

SEQ ID NO: 1044488 - DNA, 25 bp, Homo sapien
aagaagatctcaggcaggtcgaagg

SEQ ID NO: 1044489 - DNA, 25 bp, Homo sapien
atctcaggcaggtcgaagggaacgt

SEQ ID NO: 1044490 - DNA, 25 bp, Homo sapien
tgacagaagaggtaagcacagctca

SEQ ID NO: 1044491 - DNA, 25 bp, Homo sapien
aagaggtaagcacagctcaggacgc

SEQ ID NO: 1044492 - DNA, 25 bp, Homo sapien
agcagtttggagctgtaccgattgg

SEQ ID NO: 1044493 - DNA, 25 bp, Homo sapien
gattggtcttgatgaagctgaggaa

SEQ ID NO: 1044494 - DNA, 25 bp, Homo sapien
tgggtgagctctagggctggccctc

SEQ ID NO: 1044495 - DNA, 25 bp, Homo sapien
gagctctagggctggccctcccttt

SEQ ID NO: 1044496 - DNA, 25 bp, Homo sapien
ggggtgggtgagctctagggctggc

SEQ ID NO: 1044497 - DNA, 25 bp, Homo sapien
tggggggtgggtgagctctagggct

SEQ ID NO: 1044498 - DNA, 25 bp, Homo sapien
tggccagagcggagtacacaggctt

SEQ ID NO: 1044499 - DNA, 25 bp, Homo sapien
gtggccagagcggagtacacaggct

SEQ ID NO: 1044500 - DNA, 25 bp, Homo sapien
agaaggcaagggtcccaaagatggt

SEQ ID NO: 1044501 - DNA, 25 bp, Homo sapien
tcgaacagcgagtccagatgctgct

SEQ ID NO: 1044502 - DNA, 25 bp, Homo sapien
tcccaaagatggtgaaccgcgggtg

SEQ ID NO: 1044503 - DNA, 25 bp, Homo sapien
agcgcccaggagtggttgtcgaaca

SEQ ID NO: 1044504 - DNA, 25 bp, Homo sapien
agcccagggcagaggttagaggccg

SEQ ID NO: 1044505 - DNA, 25 bp, Homo sapien
gggagcccagggcagaggttagagg

SEQ ID NO: 1044506 - DNA, 25 bp, Homo sapien
agggggagcccagggcagaggttag

SEQ ID NO: 1044507 - DNA, 25 bp, Homo sapien
gagcccagggcagaggttagaggcc

SEQ ID NO: 1044508 - DNA, 25 bp, Homo sapien
gtggtggccagaatcagcatccaga

SEQ ID NO: 1044509 - DNA, 25 bp, Homo sapien
aaagatgggcatgaagtacccggca

SEQ ID NO: 1044510 - DNA, 25 bp, Homo sapien
tgggcatgaagtacccggcaggcat

SEQ ID NO: 1044511 - DNA, 25 bp, Homo sapien
tggtggccagaatcagcatccagaa

SEQ ID NO: 1044512 - DNA, 25 bp, Homo sapien
tcccaagaggcgcccgatggcagct

SEQ ID NO: 1044513 - DNA, 25 bp, Homo sapien
agtcacaatgccctcagggaaggcg

SEQ ID NO: 1044514 - DNA, 25 bp, Homo sapien
ggaaggcgacggcaagagcctctcc

SEQ ID NO: 1044515 - DNA, 25 bp, Homo sapien
gagcctctcccaagaggcgcccgat

SEQ ID NO: 1044516 - DNA, 25 bp, Homo sapien
tgggaattgtaagaggccacagcct

SEQ ID NO: 1044517 - DNA, 25 bp, Homo sapien
caaggcctgggcttggtgagaggag

SEQ ID NO: 1044518 - DNA, 25 bp, Homo sapien
cacgaggaagtgatgggccccgggg

SEQ ID NO: 1044519 - DNA, 25 bp, Homo sapien
ccacagcctgggcactgtgggaagt

SEQ ID NO: 1044520 - DNA, 25 bp, Homo sapien
tccgtggcaggtatggcagcttctt

SEQ ID NO: 1044521 - DNA, 25 bp, Homo sapien
atgttgcggcccagaatccgtggca

SEQ ID NO: 1044522 - DNA, 25 bp, Homo sapien
tgccatcatagaaggagggctggca

SEQ ID NO: 1044523 - DNA, 25 bp, Homo sapien
ggcagtgcatgcactatctggccgg

SEQ ID NO: 1044524 - DNA, 25 bp, Homo sapien
aagtgctccaccctcacatggtggg

SEQ ID NO: 1044525 - DNA, 25 bp, Homo sapien
gtgctccaccctcacatggtgggag

SEQ ID NO: 1044526 - DNA, 25 bp, Homo sapien
agtgctccaccctcacatggtggga

SEQ ID NO: 1044527 - DNA, 25 bp, Homo sapien
gaagtgctccaccctcacatggtgg

SEQ ID NO: 1044528 - DNA, 25 bp, Homo sapien
cgtctgtggaggtcacaaccttgac

SEQ ID NO: 1044529 - DNA, 25 bp, Homo sapien
gtggaggtcacaaccttgaccacct

SEQ ID NO: 1044530 - DNA, 25 bp, Homo sapien
cacgtctgtggaggtcacaaccttg

SEQ ID NO: 1044531 - DNA, 25 bp, Homo sapien
tctgtggaggtcacaaccttgacca

SEQ ID NO: 1044532 - DNA, 25 bp, Homo sapien
cgacttcctcctcccttccagctgg

SEQ ID NO: 1044533 - DNA, 25 bp, Homo sapien
acttcctcctcccttccagctgggc

SEQ ID NO: 1044534 - DNA, 25 bp, Homo sapien
cccgacttcctcctcccttccagct

SEQ ID NO: 1044535 - DNA, 25 bp, Homo sapien
ttcctcctcccttccagctgggcac

SEQ ID NO: 1044536 - DNA, 25 bp, Homo sapien
agccctggaaggaggctcagcctgg

SEQ ID NO: 1044537 - DNA, 25 bp, Homo sapien
gctgggccctctgcacgatgcctac

SEQ ID NO: 1044538 - DNA, 25 bp, Homo sapien
cagctgggccctctgcacgatgcct

SEQ ID NO: 1044539 - DNA, 25 bp, Homo sapien
ggctcagcctggagggcctgcacca

SEQ ID NO: 1044540 - DNA, 25 bp, Homo sapien
ccgccccatccccacgcccctcagg

SEQ ID NO: 1044541 - DNA, 25 bp, Homo sapien
ccatccccacgcccctcaggagtaa

SEQ ID NO: 1044542 - DNA, 25 bp, Homo sapien
tccccacgcccctcaggagtaacca

SEQ ID NO: 1044543 - DNA, 25 bp, Homo sapien
gccccatccccacgcccctcaggag

SEQ ID NO: 1044544 - DNA, 25 bp, Homo sapien
tgagaatagcgtcagggtcactggt

SEQ ID NO: 1044545 - DNA, 25 bp, Homo sapien
tggtctctgagaatagcgtcagggt

SEQ ID NO: 1044546 - DNA, 25 bp, Homo sapien
tctctgagaatagcgtcagggtcac

SEQ ID NO: 1044547 - DNA, 25 bp, Homo sapien
tcactggttccgtggggcagcccct

SEQ ID NO: 1044548 - DNA, 25 bp, Homo sapien
cccgcgatgtcacgaagagggactg

SEQ ID NO: 1044549 - DNA, 25 bp, Homo sapien
gcccacagctctgccccgcgatgtc

SEQ ID NO: 1044550 - DNA, 25 bp, Homo sapien
gccccgcgatgtcacgaagagggac

SEQ ID NO: 1044551 - DNA, 25 bp, Homo sapien
cgcgatgtcacgaagagggactgaa

SEQ ID NO: 1044552 - DNA, 25 bp, Homo sapien
ctttgctctgcccccgggaccctgg

SEQ ID NO: 1044553 - DNA, 25 bp, Homo sapien
ttgctctgcccccgggaccctggta

SEQ ID NO: 1044554 - DNA, 25 bp, Homo sapien
tgctctgcccccgggaccctggtac

SEQ ID NO: 1044555 - DNA, 25 bp, Homo sapien
gggggggatgtagaggaggttgtga

SEQ ID NO: 1044556 - DNA, 25 bp, Homo sapien
gtagaggaggttgtgaggggggctc

SEQ ID NO: 1044557 - DNA, 25 bp, Homo sapien
ggctccagcatttttagtcccctaa

SEQ ID NO: 1044558 - DNA, 25 bp, Homo sapien
tgaggggggctccagcatttttagt

SEQ ID NO: 1044559 - DNA, 25 bp, Homo sapien
gctggcggatttgtcaggttggaaa

SEQ ID NO: 1044560 - DNA, 25 bp, Homo sapien
gcccaacctcagtaccaggtcagct

SEQ ID NO: 1044561 - DNA, 25 bp, Homo sapien
caacctcagtaccaggtcagctggg

SEQ ID NO: 1044562 - DNA, 25 bp, Homo sapien
cagcccaacctcagtaccaggtcag

SEQ ID NO: 1044563 - DNA, 25 bp, Homo sapien
ccaacctcagtaccaggtcagctgg

SEQ ID NO: 1044564 - DNA, 25 bp, Homo sapien
tcctcttctgggctaggttagagtt

SEQ ID NO: 1044565 - DNA, 25 bp, Homo sapien
cactgggaaccagacaaccccagag

SEQ ID NO: 1044566 - DNA, 25 bp, Homo sapien
ggaaccagacaaccccagagggcat

SEQ ID NO: 1044567 - DNA, 25 bp, Homo sapien
ctcttctgggctaggttagagttgc

SEQ ID NO: 1044568 - DNA, 25 bp, Homo sapien
tgtcaacatccggatccccagtgtc

SEQ ID NO: 1044569 - DNA, 25 bp, Homo sapien
caacatccggatccccagtgtctgg

SEQ ID NO: 1044570 - DNA, 25 bp, Homo sapien
ctgctggctactgtcccacagccgg

SEQ ID NO: 1044571 - DNA, 25 bp, Homo sapien
tccggatccccagtgtctggtctgg

SEQ ID NO: 1044572 - DNA, 25 bp, Homo sapien
gtggtgcccagctgtactcaggctc

SEQ ID NO: 1044573 - DNA, 25 bp, Homo sapien
acagagggtggtgcccagctgtact

SEQ ID NO: 1044574 - DNA, 25 bp, Homo sapien
cagctgtactcaggctcctgggtgc

SEQ ID NO: 1044575 - DNA, 25 bp, Homo sapien
catagctgcacagagggtggtgccc

SEQ ID NO: 1044576 - DNA, 25 bp, Homo sapien
tgttccaacaatcaacatcctcccc

SEQ ID NO: 1044577 - DNA, 25 bp, Homo sapien
cacctggacaggtgtgtgttccaac

SEQ ID NO: 1044578 - DNA, 25 bp, Homo sapien
tggacaggtgtgtgttccaacaatc

SEQ ID NO: 1044579 - DNA, 25 bp, Homo sapien
ggtgtgtgttccaacaatcaacatc

SEQ ID NO: 1044580 - DNA, 25 bp, Homo sapien
agggagggaccgcggtgagctgctg

SEQ ID NO: 1044581 - DNA, 25 bp, Homo sapien
tgaagaggaaagattgtgcgtgtgt

SEQ ID NO: 1044582 - DNA, 25 bp, Homo sapien
ctggagaagcggatagagggaggga

SEQ ID NO: 1044583 - DNA, 25 bp, Homo sapien
tggagaagcggatagagggagggac

SEQ ID NO: 1044584 - DNA, 25 bp, Homo sapien
gctcctgcagagtcacagggttccc

SEQ ID NO: 1044585 - DNA, 25 bp, Homo sapien
agctcctgcagagtcacagggttcc

SEQ ID NO: 1044586 - DNA, 25 bp, Homo sapien
gaggagccttcacgcagccccacaa

SEQ ID NO: 1044587 - DNA, 25 bp, Homo sapien
gagccttcacgcagccccacaaact

SEQ ID NO: 1044588 - DNA, 25 bp, Homo sapien
agccaagtccatggcacagctgacc

SEQ ID NO: 1044589 - DNA, 25 bp, Homo sapien
tctcaacagccaagtccatggcaca

SEQ ID NO: 1044590 - DNA, 25 bp, Homo sapien
aacagccaagtccatggcacagctg

SEQ ID NO: 1044591 - DNA, 25 bp, Homo sapien
tcggaccacactctcaacagccaag

SEQ ID NO: 1044592 - DNA, 25 bp, Homo sapien
cagggtacacagtccaggagagata

SEQ ID NO: 1044593 - DNA, 25 bp, Homo sapien
ggccacagggtacacagtccaggag

SEQ ID NO: 1044594 - DNA, 25 bp, Homo sapien
cacagggtacacagtccaggagaga

SEQ ID NO: 1044595 - DNA, 25 bp, Homo sapien
gggtacacagtccaggagagatacc

SEQ ID NO: 1044596 - DNA, 25 bp, Homo sapien
gaggagggtgtgatgctctgagaga

SEQ ID NO: 1044597 - DNA, 25 bp, Homo sapien
gagggtgtgatgctctgagagaagc

SEQ ID NO: 1044598 - DNA, 25 bp, Homo sapien
aggagggtgtgatgctctgagagaa

SEQ ID NO: 1044599 - DNA, 25 bp, Homo sapien
ccagaggagggtgtgatgctctgag

SEQ ID NO: 1044600 - DNA, 25 bp, Homo sapien
agttcttgatatccaggtagtcctc

SEQ ID NO: 1044601 - DNA, 25 bp, Homo sapien
caaagttcttgatatccaggtagtc

SEQ ID NO: 1044602 - DNA, 25 bp, Homo sapien
aaagttcttgatatccaggtagtcc

SEQ ID NO: 1044603 - DNA, 25 bp, Homo sapien
gttcttgatatccaggtagtcctcc

SEQ ID NO: 1044604 - DNA, 25 bp, Homo sapien
gctccccgatggtcgtggtgcgcac

SEQ ID NO: 1044605 - DNA, 25 bp, Homo sapien
ccccgatggtcgtggtgcgcacacg

SEQ ID NO: 1044606 - DNA, 25 bp, Homo sapien
ctcaggctccccgatggtcgtggtg

SEQ ID NO: 1044607 - DNA, 25 bp, Homo sapien
gtcgtggtgcgcacacggcccaggt

SEQ ID NO: 1044608 - DNA, 25 bp, Homo sapien
tgccaccagcatttcgttttgcttg

SEQ ID NO: 1044609 - DNA, 25 bp, Homo sapien
ctgccaccagcatttcgttttgctt

SEQ ID NO: 1044610 - DNA, 25 bp, Homo sapien
gacggttgcgatctccattttgtag

SEQ ID NO: 1044611 - DNA, 25 bp, Homo sapien
caacgggccagggtcatacgtggat

SEQ ID NO: 1044612 - DNA, 25 bp, Homo sapien
tgtgcgccctctcgctatcgggtgg

SEQ ID NO: 1044613 - DNA, 25 bp, Homo sapien
gcgacactgatctcaggtgggccct

SEQ ID NO: 1044614 - DNA, 25 bp, Homo sapien
cctgctcgctgttgaagaccgccag

SEQ ID NO: 1044615 - DNA, 25 bp, Homo sapien
ctgctcgctgttgaagaccgccagg

SEQ ID NO: 1044616 - DNA, 25 bp, Homo sapien
tgctcgctgttgaagaccgccagga

SEQ ID NO: 1044617 - DNA, 25 bp, Homo sapien
aagaagatctcaggcaggtcgaagg

SEQ ID NO: 1044618 - DNA, 25 bp, Homo sapien
atctcaggcaggtcgaagggaacgt

SEQ ID NO: 1044619 - DNA, 25 bp, Homo sapien
gatctcaggcaggtcgaagggaacg

SEQ ID NO: 1044620 - DNA, 25 bp, Homo sapien
gaagatctcaggcaggtcgaaggga

SEQ ID NO: 1044621 - DNA, 25 bp, Homo sapien
tgacagaagaggtaagcgctgccca

SEQ ID NO: 1044622 - DNA, 25 bp, Homo sapien
gccaaagaagattcgctgacagaag

SEQ ID NO: 1044623 - DNA, 25 bp, Homo sapien
cagtttggagctgaacctattgttc

SEQ ID NO: 1044624 - DNA, 25 bp, Homo sapien
gaacctattgttcctgatgaagcca

SEQ ID NO: 1044625 - DNA, 25 bp, Homo sapien
gtggccagagcggagtacacaggct

SEQ ID NO: 1044626 - DNA, 25 bp, Homo sapien
tggccagagcggagtacacaggctt

SEQ ID NO: 1044627 - DNA, 25 bp, Homo sapien
agcgcccaggagtggttgtcgaaca

SEQ ID NO: 1044628 - DNA, 25 bp, Homo sapien
agaaggcaagggtcccaaagatggt

SEQ ID NO: 1044629 - DNA, 25 bp, Homo sapien
tcgaacagcgagtccagatgctgct

SEQ ID NO: 1044630 - DNA, 25 bp, Homo sapien
tcccaaagatggtgaaccgcgggtg

SEQ ID NO: 1044631 - DNA, 25 bp, Homo sapien
tgggcatgaagtacccggcaggcat

SEQ ID NO: 1044632 - DNA, 25 bp, Homo sapien
aaagatgggcatgaagtacccggca

SEQ ID NO: 1044633 - DNA, 25 bp, Homo sapien
gatgggcatgaagtacccggcaggc

SEQ ID NO: 1044634 - DNA, 25 bp, Homo sapien
aagatgggcatgaagtacccggcag

SEQ ID NO: 1044635 - DNA, 25 bp, Homo sapien
ggccacagacttagggtgaggggga

SEQ ID NO: 1044636 - DNA, 25 bp, Homo sapien
agccctccatccctgaggaccgtcc

SEQ ID NO: 1044637 - DNA, 25 bp, Homo sapien
tgagggggagccaggctgacccggc

SEQ ID NO: 1044638 - DNA, 25 bp, Homo sapien
tccctgaggaccgtcctcagtacaa

SEQ ID NO: 1044639 - DNA, 25 bp, Homo sapien
agataaaagagagagtctccccaaa

SEQ ID NO: 1044640 - DNA, 25 bp, Homo sapien
aagagagagtctccccaaagaggcg

SEQ ID NO: 1044641 - DNA, 25 bp, Homo sapien
gtctccccaaagaggcgcccgatag

SEQ ID NO: 1044642 - DNA, 25 bp, Homo sapien
gatgggattggtgatccctccagcc

SEQ ID NO: 1044643 - DNA, 25 bp, Homo sapien
tccgtggcaggtatggcagcttctt

SEQ ID NO: 1044644 - DNA, 25 bp, Homo sapien
atgttgcggcccagaatccgtggca

SEQ ID NO: 1044645 - DNA, 25 bp, Homo sapien
ggcagtgcatgcactatctggccgg

SEQ ID NO: 1044646 - DNA, 25 bp, Homo sapien
tgccatcatagaaggagggctggca

SEQ ID NO: 1044647 - DNA, 25 bp, Homo sapien
tttagcctgttttacccagcagcct

SEQ ID NO: 1044648 - DNA, 25 bp, Homo sapien
cagaccagctccactttagcctgtt

SEQ ID NO: 1044649 - DNA, 25 bp, Homo sapien
gaccacatcgccgatgacccagttg

SEQ ID NO: 1044650 - DNA, 25 bp, Homo sapien
gatgacccagttgcgaattcccagc

SEQ ID NO: 1044651 - DNA, 25 bp, Homo sapien
gtgctccaccctcacgcggtgggaa

SEQ ID NO: 1044652 - DNA, 25 bp, Homo sapien
gatgctgtggttcatgaagtgctcc

SEQ ID NO: 1044653 - DNA, 25 bp, Homo sapien
atgaagtgctccaccctcacgcggt

SEQ ID NO: 1044654 - DNA, 25 bp, Homo sapien
gtggtgatgctgtggttcatgaagt

SEQ ID NO: 1044655 - DNA, 25 bp, Homo sapien
cgtctgtggaggtcacaaccttgac

SEQ ID NO: 1044656 - DNA, 25 bp, Homo sapien
cacgtctgtggaggtcacaaccttg

SEQ ID NO: 1044657 - DNA, 25 bp, Homo sapien
ctgtggaggtcacaaccttgaccac

SEQ ID NO: 1044658 - DNA, 25 bp, Homo sapien
tctgtggaggtcacaaccttgacca

SEQ ID NO: 1044659 - DNA, 25 bp, Homo sapien
ttcctcctcccttccggctgggcac

SEQ ID NO: 1044660 - DNA, 25 bp, Homo sapien
ccgacttcctcctcccttccggctg

SEQ ID NO: 1044661 - DNA, 25 bp, Homo sapien
cttcctcctcccttccggctgggca

SEQ ID NO: 1044662 - DNA, 25 bp, Homo sapien
cgacttcctcctcccttccggctgg

SEQ ID NO: 1044663 - DNA, 25 bp, Homo sapien
accagctgggcccttcgcactatgc

SEQ ID NO: 1044664 - DNA, 25 bp, Homo sapien
ccttcgcactatgcccaccaggatc

SEQ ID NO: 1044665 - DNA, 25 bp, Homo sapien
tgggcccttcgcactatgcccacca

SEQ ID NO: 1044666 - DNA, 25 bp, Homo sapien
agctgggcccttcgcactatgccca

SEQ ID NO: 1044667 - DNA, 25 bp, Homo sapien
ctgcagccaagatgtcctggagaca

SEQ ID NO: 1044668 - DNA, 25 bp, Homo sapien
ctcatgcagggaagtctctggggac

SEQ ID NO: 1044669 - DNA, 25 bp, Homo sapien
tcatgcagggaagtctctggggaca

SEQ ID NO: 1044670 - DNA, 25 bp, Homo sapien
gcagcctgcagccaagatgtcctgg

SEQ ID NO: 1044671 - DNA, 25 bp, Homo sapien
gaatgaaggttcaacagctcaaaga

SEQ ID NO: 1044672 - DNA, 25 bp, Homo sapien
gcccacagctctgccccgcgacgtc

SEQ ID NO: 1044673 - DNA, 25 bp, Homo sapien
gccccgcgacgtcacaaagagggaa

SEQ ID NO: 1044674 - DNA, 25 bp, Homo sapien
acgtcacaaagagggaatgaaggtt

SEQ ID NO: 1044675 - DNA, 25 bp, Homo sapien
tccccagtcttctcaggcataggtt

SEQ ID NO: 1044676 - DNA, 25 bp, Homo sapien
tcttctcaggcataggttccctgct

SEQ ID NO: 1044677 - DNA, 25 bp, Homo sapien
ccagtcttctcaggcataggttccc

SEQ ID NO: 1044678 - DNA, 25 bp, Homo sapien
ctccccagtcttctcaggcataggt

SEQ ID NO: 1044679 - DNA, 25 bp, Homo sapien
gctggcggatttgtcaggttggaaa

SEQ ID NO: 1044680 - DNA, 25 bp, Homo sapien
tcttctgggctaggttaaagttgcc

SEQ ID NO: 1044681 - DNA, 25 bp, Homo sapien
atcctcttctgggctaggttaaagt

SEQ ID NO: 1044682 - DNA, 25 bp, Homo sapien
cctcttctgggctaggttaaagttg

SEQ ID NO: 1044683 - DNA, 25 bp, Homo sapien
ctcttctgggctaggttaaagttgc

SEQ ID NO: 1044684 - DNA, 25 bp, Homo sapien
tgggaaccagacaaccccagaaggc

SEQ ID NO: 1044685 - DNA, 25 bp, Homo sapien
ctgggaaccagacaaccccagaagg

SEQ ID NO: 1044686 - DNA, 25 bp, Homo sapien
cactgggaaccagacaaccccagaa

SEQ ID NO: 1044687 - DNA, 25 bp, Homo sapien
actgggaaccagacaaccccagaag

SEQ ID NO: 1044688 - DNA, 25 bp, Homo sapien
gggcttccctctgcggagcctccag

SEQ ID NO: 1044689 - DNA, 25 bp, Homo sapien
tccctctgcggagcctccagagcca

SEQ ID NO: 1044690 - DNA, 25 bp, Homo sapien
tcaagggcttccctctgcggagcct

SEQ ID NO: 1044691 - DNA, 25 bp, Homo sapien
ctcaagggcttccctctgcggagcc

SEQ ID NO: 1044692 - DNA, 25 bp, Homo sapien
attagagaccgagaattttcttctg

SEQ ID NO: 1044693 - DNA, 25 bp, Homo sapien
ctggaaactcagacatctgatcatg

SEQ ID NO: 1044694 - DNA, 25 bp, Homo sapien
tatccaatgcactgggggccggtgg

SEQ ID NO: 1044695 - DNA, 25 bp, Homo sapien
atctgatcatgtctgggtgaaggca

SEQ ID NO: 1044696 - DNA, 25 bp, Homo sapien
tcctctggactcgaagggcttctgc

SEQ ID NO: 1044697 - DNA, 25 bp, Homo sapien
catcctctggactcgaagggcttct

SEQ ID NO: 1044698 - DNA, 25 bp, Homo sapien
cctctggactcgaagggcttctgct

SEQ ID NO: 1044699 - DNA, 25 bp, Homo sapien
ccatcctctggactcgaagggcttc

SEQ ID NO: 1044700 - DNA, 25 bp, Homo sapien
cagggcatccaaggtgatagcaggc

SEQ ID NO: 1044701 - DNA, 25 bp, Homo sapien
ctggcaccagggcatccaaggtgat

SEQ ID NO: 1044702 - DNA, 25 bp, Homo sapien
atagcaggctgtcctttctgagcca

SEQ ID NO: 1044703 - DNA, 25 bp, Homo sapien
tgatagcaggctgtcctttctgagc

SEQ ID NO: 1044704 - DNA, 25 bp, Homo sapien
agagccctccttccaagccagatcc

SEQ ID NO: 1044705 - DNA, 25 bp, Homo sapien
caagccagatccagtcactccgtga

SEQ ID NO: 1044706 - DNA, 25 bp, Homo sapien
tccagtcactccgtgacaggaagaa

SEQ ID NO: 1044707 - DNA, 25 bp, Homo sapien
tggcacaggcagatccgcctttcct

SEQ ID NO: 1044708 - DNA, 25 bp, Homo sapien
tcagctgccatgacggagcatcctg

SEQ ID NO: 1044709 - DNA, 25 bp, Homo sapien
gctgccatgacggagcatcctgcgt

SEQ ID NO: 1044710 - DNA, 25 bp, Homo sapien
tgccatgacggagcatcctgcgtca

SEQ ID NO: 1044711 - DNA, 25 bp, Homo sapien
agcatcagctgccatgacggagcat

SEQ ID NO: 1044712 - DNA, 25 bp, Homo sapien
ttcaaaatccgcttctagggtcacg

SEQ ID NO: 1044713 - DNA, 25 bp, Homo sapien
tatttatgcacgtggctcctgcagc

SEQ ID NO: 1044714 - DNA, 25 bp, Homo sapien
tggatccccgaaatcatggcaagag

SEQ ID NO: 1044715 - DNA, 25 bp, Homo sapien
tagggtcacgatcgcctgaaagcca

SEQ ID NO: 1044716 - DNA, 25 bp, Homo sapien
tgtggcggcctctgacatcacagca

SEQ ID NO: 1044717 - DNA, 25 bp, Homo sapien
gcagcgtgatgtcacagggccccat

SEQ ID NO: 1044718 - DNA, 25 bp, Homo sapien
cagggggcagcgtgatgtcacaggg

SEQ ID NO: 1044719 - DNA, 25 bp, Homo sapien
gggcagcgtgatgtcacagggcccc

SEQ ID NO: 1044720 - DNA, 25 bp, Homo sapien
cagtctgggcggctgggaaggtcca

SEQ ID NO: 1044721 - DNA, 25 bp, Homo sapien
agtctgggcggctgggaaggtccat

SEQ ID NO: 1044722 - DNA, 25 bp, Homo sapien
cgcagtctgggcggctgggaaggtc

SEQ ID NO: 1044723 - DNA, 25 bp, Homo sapien
ccgcagtctgggcggctgggaaggt

SEQ ID NO: 1044724 - DNA, 25 bp, Homo sapien
gagccaccgaggacgcaggtgtcct

SEQ ID NO: 1044725 - DNA, 25 bp, Homo sapien
tgtccttagtggcattgcagccaat

SEQ ID NO: 1044726 - DNA, 25 bp, Homo sapien
tatttgcctgtccttagtggcattg

SEQ ID NO: 1044727 - DNA, 25 bp, Homo sapien
gctcttcagaaccacggccggtggg

SEQ ID NO: 1044728 - DNA, 25 bp, Homo sapien
accttggtgggcctttgatgcatcc

SEQ ID NO: 1044729 - DNA, 25 bp, Homo sapien
gaccttggtgggcctttgatgcatc

SEQ ID NO: 1044730 - DNA, 25 bp, Homo sapien
ccttggtgggcctttgatgcatcca

SEQ ID NO: 1044731 - DNA, 25 bp, Homo sapien
taacccctggctgttgtgtcaggag

SEQ ID NO: 1044732 - DNA, 25 bp, Homo sapien
accctaacccctggctgttgtgtca

SEQ ID NO: 1044733 - DNA, 25 bp, Homo sapien
tgtcaggagcagctgtaggacagca

SEQ ID NO: 1044734 - DNA, 25 bp, Homo sapien
agcagctgtaggacagcagccctgc

SEQ ID NO: 1044735 - DNA, 25 bp, Homo sapien
agctgtctgcagtctccaatggacc

SEQ ID NO: 1044736 - DNA, 25 bp, Homo sapien
tgggtgagacccaaagcggtccctg

SEQ ID NO: 1044737 - DNA, 25 bp, Homo sapien
tagtgccttctttagaccctcgggc

SEQ ID NO: 1044738 - DNA, 25 bp, Homo sapien
cagagggtgtcaaacattcgtgagc

SEQ ID NO: 1044739 - DNA, 25 bp, Homo sapien
tggcccagcgccaagtaaacagggt

SEQ ID NO: 1044740 - DNA, 25 bp, Homo sapien
ttttgcggagaaggcatactgtgca

SEQ ID NO: 1044741 - DNA, 25 bp, Homo sapien
tgacctgaattcactaacccgcttg

SEQ ID NO: 1044742 - DNA, 25 bp, Homo sapien
taagcggtttcagcttggtcgcacg

SEQ ID NO: 1044743 - DNA, 25 bp, Homo sapien
tactgtgcaggcctcgcattttggg

SEQ ID NO: 1044744 - DNA, 25 bp, Homo sapien
tggtgattggccaacaggcagccgt

SEQ ID NO: 1044745 - DNA, 25 bp, Homo sapien
caggagagatgtctggacccgcttc

SEQ ID NO: 1044746 - DNA, 25 bp, Homo sapien
agatgtccacatccggcagagaaga

SEQ ID NO: 1044747 - DNA, 25 bp, Homo sapien
ttcccaagagtaggcaccaaggcga

SEQ ID NO: 1044748 - DNA, 25 bp, Homo sapien
tccattagggctgattatgtcacta

SEQ ID NO: 1044749 - DNA, 25 bp, Homo sapien
tggtgccgctttataagactcactg

SEQ ID NO: 1044750 - DNA, 25 bp, Homo sapien
tatgtcactataaataccgcgtttt

SEQ ID NO: 1044751 - DNA, 25 bp, Homo sapien
tctgctgcagtggcgctgaggccct

SEQ ID NO: 1044752 - DNA, 25 bp, Homo sapien
tctagtaggagctgcccagatggaa

SEQ ID NO: 1044753 - DNA, 25 bp, Homo sapien
caaaggcatgaaagtccaggaagtg

SEQ ID NO: 1044754 - DNA, 25 bp, Homo sapien
tgttgggcgcacactatagaccagg

SEQ ID NO: 1044755 - DNA, 25 bp, Homo sapien
caaaaaagagcaggtctactcggct

SEQ ID NO: 1044756 - DNA, 25 bp, Homo sapien
gagaaaagcctgtggttccgatggt

SEQ ID NO: 1044757 - DNA, 25 bp, Homo sapien
aaggcaaggccgagcagaatgaggg

SEQ ID NO: 1044758 - DNA, 25 bp, Homo sapien
tcccgtaggatgagatgctttttga

SEQ ID NO: 1044759 - DNA, 25 bp, Homo sapien
tagttgaagactggcactcagaggc

SEQ ID NO: 1044760 - DNA, 25 bp, Homo sapien
gtggggtgagaggctgctatatttt

SEQ ID NO: 1044761 - DNA, 25 bp, Homo sapien
gctggtggtggtaattgctatggag

SEQ ID NO: 1044762 - DNA, 25 bp, Homo sapien
ctggtggtggtaattgctatggaga

SEQ ID NO: 1044763 - DNA, 25 bp, Homo sapien
agtggggtgagaggctgctatattt

SEQ ID NO: 1044764 - DNA, 25 bp, Homo sapien
caagaatggacaagtggcctgtggc

SEQ ID NO: 1044765 - DNA, 25 bp, Homo sapien
cattgatgcctatggtgcaacagac

SEQ ID NO: 1044766 - DNA, 25 bp, Homo sapien
tatctactgacatgaacacacgccc

SEQ ID NO: 1044767 - DNA, 25 bp, Homo sapien
tatttttgagcaggccattgatgcc

SEQ ID NO: 1044768 - DNA, 25 bp, Homo sapien
ccttcccatcccaccagcggagtgg

SEQ ID NO: 1044769 - DNA, 25 bp, Homo sapien
gggtccagccgggggccatggtcag

SEQ ID NO: 1044770 - DNA, 25 bp, Homo sapien
tccagccgggggccatggtcagcag

SEQ ID NO: 1044771 - DNA, 25 bp, Homo sapien
tcccatcccaccagcggagtggaaa

SEQ ID NO: 1044772 - DNA, 25 bp, Homo sapien
gacgattgtgtatcagctaggctgc

SEQ ID NO: 1044773 - DNA, 25 bp, Homo sapien
gctggttgctgtgtcttgtctgtaa

SEQ ID NO: 1044774 - DNA, 25 bp, Homo sapien
agctaaagaccaggagagtctccgg

SEQ ID NO: 1044775 - DNA, 25 bp, Homo sapien
gagtctgtgatccatctgatgctgc

SEQ ID NO: 1044776 - DNA, 25 bp, Homo sapien
actgatacctggcaaagactggggc

SEQ ID NO: 1044777 - DNA, 25 bp, Homo sapien
ccctctcctttctatgtcctcaatc

SEQ ID NO: 1044778 - DNA, 25 bp, Homo sapien
cactgatacctggcaaagactgggg

SEQ ID NO: 1044779 - DNA, 25 bp, Homo sapien
gccctcttgctgatgcccttcttat

SEQ ID NO: 1044780 - DNA, 25 bp, Homo sapien
ggcatgggactgtgacccgtccagt

SEQ ID NO: 1044781 - DNA, 25 bp, Homo sapien
catgcacgtgttcaggctgatggca

SEQ ID NO: 1044782 - DNA, 25 bp, Homo sapien
tctgctgttgccctcttgctgatgc

SEQ ID NO: 1044783 - DNA, 25 bp, Homo sapien
cctgatggttcctgcgcctgtgccg

SEQ ID NO: 1044784 - DNA, 25 bp, Homo sapien
tcctgctcgcctgatggttcctgcg

SEQ ID NO: 1044785 - DNA, 25 bp, Homo sapien
tcgcctgatggttcctgcgcctgtg

SEQ ID NO: 1044786 - DNA, 25 bp, Homo sapien
tgctcgcctgatggttcctgcgcct

SEQ ID NO: 1044787 - DNA, 25 bp, Homo sapien
ctgtcaagttggtgactgtgtccct

SEQ ID NO: 1044788 - DNA, 25 bp, Homo sapien
tggagtcctctcaaggtcttgtggg

SEQ ID NO: 1044789 - DNA, 25 bp, Homo sapien
gtggattaatcacagggctctaggc

SEQ ID NO: 1044790 - DNA, 25 bp, Homo sapien
gccttgtggagtcctctcaaggtct

SEQ ID NO: 1044791 - DNA, 25 bp, Homo sapien
tgtctgtccacagcatccggacctc

SEQ ID NO: 1044792 - DNA, 25 bp, Homo sapien
ctgtctgtccacagcatccggacct

SEQ ID NO: 1044793 - DNA, 25 bp, Homo sapien
gtcgttgtcattgcccaggtggcat

SEQ ID NO: 1044794 - DNA, 25 bp, Homo sapien
ctcgtcgttgtcattgcccaggtgg

SEQ ID NO: 1044795 - DNA, 25 bp, Homo sapien
gacatccaagagtggtcatgagctt

SEQ ID NO: 1044796 - DNA, 25 bp, Homo sapien
tcagtaccagcctgcaatggacatc

SEQ ID NO: 1044797 - DNA, 25 bp, Homo sapien
cctgcaatggacatccaagagtggt

SEQ ID NO: 1044798 - DNA, 25 bp, Homo sapien
ccaggggccaggacgacatttgcat

SEQ ID NO: 1044799 - DNA, 25 bp, Homo sapien
tcaccttggcgttagggcttcacca

SEQ ID NO: 1044800 - DNA, 25 bp, Homo sapien
gaggacacaattccatctataccag

SEQ ID NO: 1044801 - DNA, 25 bp, Homo sapien
gattcatcttatgagggctaccctc

SEQ ID NO: 1044802 - DNA, 25 bp, Homo sapien
tctaaacctcattgtcttccaaagg

SEQ ID NO: 1044803 - DNA, 25 bp, Homo sapien
ctcctgttttggcttactaaagtgt

SEQ ID NO: 1044804 - DNA, 25 bp, Homo sapien
ctgttttggcttactaaagtgttgg

SEQ ID NO: 1044805 - DNA, 25 bp, Homo sapien
cctgttttggcttactaaagtgttg

SEQ ID NO: 1044806 - DNA, 25 bp, Homo sapien
actgtgcctgcccattcttctgtct

SEQ ID NO: 1044807 - DNA, 25 bp, Homo sapien
cgttttaggataggaatttgggctg

SEQ ID NO: 1044808 - DNA, 25 bp, Homo sapien
tctgttgtttgaaaggcctccctct

SEQ ID NO: 1044809 - DNA, 25 bp, Homo sapien
accatgctcggcgactgtacgtttt

SEQ ID NO: 1044810 - DNA, 25 bp, Homo sapien
gtttgaaaggcctccctctagcgag

SEQ ID NO: 1044811 - DNA, 25 bp, Homo sapien
aatttgtcctactggcaagtaggag

SEQ ID NO: 1044812 - DNA, 25 bp, Homo sapien
actggcaagtaggagtacggtattt

SEQ ID NO: 1044813 - DNA, 25 bp, Homo sapien
tgtcctactggcaagtaggagtacg

SEQ ID NO: 1044814 - DNA, 25 bp, Homo sapien
gtggcagagtaggaatttgtcctac

SEQ ID NO: 1044815 - DNA, 25 bp, Homo sapien
gcgcgtggccattattaaaatagtt

SEQ ID NO: 1044816 - DNA, 25 bp, Homo sapien
cactgcgcgtggccattattaaaat

SEQ ID NO: 1044817 - DNA, 25 bp, Homo sapien
ctgcgcgtggccattattaaaatag

SEQ ID NO: 1044818 - DNA, 25 bp, Homo sapien
gaaccactgcgcgtggccattatta

SEQ ID NO: 1044819 - DNA, 25 bp, Homo sapien
ccgcgcctggctcagaaaatatata

SEQ ID NO: 1044820 - DNA, 25 bp, Homo sapien
agctgccgcgcctggctcagaaaat

SEQ ID NO: 1044821 - DNA, 25 bp, Homo sapien
tgccgcgcctggctcagaaaatata

SEQ ID NO: 1044822 - DNA, 25 bp, Homo sapien
atggcataatcttgggtcactataa

SEQ ID NO: 1044823 - DNA, 25 bp, Homo sapien
gggtgagtcctacctattatggaga

SEQ ID NO: 1044824 - DNA, 25 bp, Homo sapien
caggtattgatgcaacttcatgaca

SEQ ID NO: 1044825 - DNA, 25 bp, Homo sapien
ggtggctcatcattatgcttcttgg

SEQ ID NO: 1044826 - DNA, 25 bp, Homo sapien
taaaccctgagtaagattcagagca

SEQ ID NO: 1044827 - DNA, 25 bp, Homo sapien
tcttcccagctctcagcgacctcct

SEQ ID NO: 1044828 - DNA, 25 bp, Homo sapien
cgcctcttcccagctctcagcgacc

SEQ ID NO: 1044829 - DNA, 25 bp, Homo sapien
gtctgccgcctcttcccagctctca

SEQ ID NO: 1044830 - DNA, 25 bp, Homo sapien
tcccagctctcagcgacctcctcat

SEQ ID NO: 1044831 - DNA, 25 bp, Homo sapien
tgccatgggacggcggctcctcctt

SEQ ID NO: 1044832 - DNA, 25 bp, Homo sapien
gggagaactatctccagacccgctc

SEQ ID NO: 1044833 - DNA, 25 bp, Homo sapien
gaggctcccctcacgccaggtctcg

SEQ ID NO: 1044834 - DNA, 25 bp, Homo sapien
ttaagaggccttcacggcgctcagg

SEQ ID NO: 1044835 - DNA, 25 bp, Homo sapien
tagcccaaagaggattcaatttccc

SEQ ID NO: 1044836 - DNA, 25 bp, Homo sapien
ctttggcagagtccccgtgagacct

SEQ ID NO: 1044837 - DNA, 25 bp, Homo sapien
cagagctttcggttgctttggcaga

SEQ ID NO: 1044838 - DNA, 25 bp, Homo sapien
tggactccgacaagcgaactcctag

SEQ ID NO: 1044839 - DNA, 25 bp, Homo sapien
gctggaatttctagcccacggcaac

SEQ ID NO: 1044840 - DNA, 25 bp, Homo sapien
tcctgacagaacacaccttgtagag

SEQ ID NO: 1044841 - DNA, 25 bp, Homo sapien
ccagaaactgatgctagctgtcggg

SEQ ID NO: 1044842 - DNA, 25 bp, Homo sapien
tgcaggactgcaccaacagttttag

SEQ ID NO: 1044843 - DNA, 25 bp, Homo sapien
tatacctgaaagtaacgggataggc

SEQ ID NO: 1044844 - DNA, 25 bp, Homo sapien
aataagttgccaaaagcacggtggc

SEQ ID NO: 1044845 - DNA, 25 bp, Homo sapien
tgcaagcccaggtttcctaaggcct

SEQ ID NO: 1044846 - DNA, 25 bp, Homo sapien
tcaaagggtctccatgccggaggga

SEQ ID NO: 1044847 - DNA, 25 bp, Homo sapien
cttatatcgatataatgtattatgg

SEQ ID NO: 1044848 - DNA, 25 bp, Homo sapien
gatataatgtattatggctgtcaac

SEQ ID NO: 1044849 - DNA, 25 bp, Homo sapien
tcgatataatgtattatggctgtca

SEQ ID NO: 1044850 - DNA, 25 bp, Homo sapien
tatcgatataatgtattatggctgt

SEQ ID NO: 1044851 - DNA, 25 bp, Homo sapien
agacagggccagatctagcgcagaa

SEQ ID NO: 1044852 - DNA, 25 bp, Homo sapien
gccctgcctaatgacggccaacaag

SEQ ID NO: 1044853 - DNA, 25 bp, Homo sapien
ccaacaagctttggcagacagggcc

SEQ ID NO: 1044854 - DNA, 25 bp, Homo sapien
gctgcagggcaccaaagagcacttg

SEQ ID NO: 1044855 - DNA, 25 bp, Homo sapien
tgagggttgagaccaaatgccttca

SEQ ID NO: 1044856 - DNA, 25 bp, Homo sapien
ccttcatagaccaggcaagcagcca

SEQ ID NO: 1044857 - DNA, 25 bp, Homo sapien
caagactgcctattcgagtttctcc

SEQ ID NO: 1044858 - DNA, 25 bp, Homo sapien
gggcttctcacaagtaacttcttgt

SEQ ID NO: 1044859 - DNA, 25 bp, Homo sapien
cagaatctatgtccactacgtactc

SEQ ID NO: 1044860 - DNA, 25 bp, Homo sapien
cactacgtactctgtcctgaaaatg

SEQ ID NO: 1044861 - DNA, 25 bp, Homo sapien
ctacagctcatattagtctattgcc

SEQ ID NO: 1044862 - DNA, 25 bp, Homo sapien
tattacctgagtaagtactacagct

SEQ ID NO: 1044863 - DNA, 25 bp, Homo sapien
ttctagccccatggccgccatgaca

SEQ ID NO: 1044864 - DNA, 25 bp, Homo sapien
gccgccatgacagttctaaacctca

SEQ ID NO: 1044865 - DNA, 25 bp, Homo sapien
tagccccatggccgccatgacagtt

SEQ ID NO: 1044866 - DNA, 25 bp, Homo sapien
ccatggccgccatgacagttctaaa

SEQ ID NO: 1044867 - DNA, 25 bp, Homo sapien
gtgtgatcttcagttttttttccaa

SEQ ID NO: 1044868 - DNA, 25 bp, Homo sapien
ttgtgtgatcttcagttttttttcc

SEQ ID NO: 1044869 - DNA, 25 bp, Homo sapien
ctctttttgtgtgatcttcagtttt

SEQ ID NO: 1044870 - DNA, 25 bp, Homo sapien
ctctctttttgtgtgatcttcagtt

SEQ ID NO: 1044871 - DNA, 25 bp, Homo sapien
agaaccaaacaagcctgcttccaga

SEQ ID NO: 1044872 - DNA, 25 bp, Homo sapien
cttcagaaccaaacaagcctgcttc

SEQ ID NO: 1044873 - DNA, 25 bp, Homo sapien
tcagaaccaaacaagcctgcttcca

SEQ ID NO: 1044874 - DNA, 25 bp, Homo sapien
cagagcagtcaaccagcttctcttc

SEQ ID NO: 1044875 - DNA, 25 bp, Homo sapien
gaaaagcattgtccaaggctggtgg

SEQ ID NO: 1044876 - DNA, 25 bp, Homo sapien
gatgctcctagaaacagtgcttggc

SEQ ID NO: 1044877 - DNA, 25 bp, Homo sapien
gtgcttggcaatgctcaaaagaaaa

SEQ ID NO: 1044878 - DNA, 25 bp, Homo sapien
tccctggtcttttggacagcggcgg

SEQ ID NO: 1044879 - DNA, 25 bp, Homo sapien
tcctgaatcacaatgggcactttgg

SEQ ID NO: 1044880 - DNA, 25 bp, Homo sapien
ctatcgtcctgaatcacaatgggca

SEQ ID NO: 1044881 - DNA, 25 bp, Homo sapien
ctgaatcacaatgggcactttggga

SEQ ID NO: 1044882 - DNA, 25 bp, Homo sapien
cgtcctgaatcacaatgggcacttt

SEQ ID NO: 1044883 - DNA, 25 bp, Homo sapien
tgaccacaccgttgctggtgggcct

SEQ ID NO: 1044884 - DNA, 25 bp, Homo sapien
gctgctgaccacaccgttgctggtg

SEQ ID NO: 1044885 - DNA, 25 bp, Homo sapien
gggctgctgaccacaccgttgctgg

SEQ ID NO: 1044886 - DNA, 25 bp, Homo sapien
cacaccgttgctggtgggcctcttg

SEQ ID NO: 1044887 - DNA, 25 bp, Homo sapien
tcggcgtactcggcctctcgctgtg

SEQ ID NO: 1044888 - DNA, 25 bp, Homo sapien
cgtactcggcctctcgctgtgctag

SEQ ID NO: 1044889 - DNA, 25 bp, Homo sapien
cctcggcgtactcggcctctcgctg

SEQ ID NO: 1044890 - DNA, 25 bp, Homo sapien
ggcgtactcggcctctcgctgtgct

SEQ ID NO: 1044891 - DNA, 25 bp, Homo sapien
gctgtttgaagccttgagacccatc

SEQ ID NO: 1044892 - DNA, 25 bp, Homo sapien
ttgagacccatcaggacccaaaggc

SEQ ID NO: 1044893 - DNA, 25 bp, Homo sapien
ttatctgcgctgtttgaagccttga

SEQ ID NO: 1044894 - DNA, 25 bp, Homo sapien
tctgcgctgtttgaagccttgagac

SEQ ID NO: 1044895 - DNA, 25 bp, Homo sapien
agtgcaacccgtggcggacgaccca

SEQ ID NO: 1044896 - DNA, 25 bp, Homo sapien
gcaagtaagtcaggtcgttccctct

SEQ ID NO: 1044897 - DNA, 25 bp, Homo sapien
ccagctgtctgccacggcagtgcaa

SEQ ID NO: 1044898 - DNA, 25 bp, Homo sapien
caaggtcacagtgggcggagcaagg

SEQ ID NO: 1044899 - DNA, 25 bp, Homo sapien
ttccattgacttgggacagcccttg

SEQ ID NO: 1044900 - DNA, 25 bp, Homo sapien
cagatgccctgggacttagctcggg

SEQ ID NO: 1044901 - DNA, 25 bp, Homo sapien
tctagaagtagtaagcctggctggt

SEQ ID NO: 1044902 - DNA, 25 bp, Homo sapien
taaactgttattgctggcactggct

SEQ ID NO: 1044903 - DNA, 25 bp, Homo sapien
tctgaacatacgaggcagaaggctc

SEQ ID NO: 1044904 - DNA, 25 bp, Homo sapien
agtgggaagacctatccaccttctg

SEQ ID NO: 1044905 - DNA, 25 bp, Homo sapien
ccctaagagttcaagccatgctgga

SEQ ID NO: 1044906 - DNA, 25 bp, Homo sapien
ccatgctggagtgggaagacctatc

SEQ ID NO: 1044907 - DNA, 25 bp, Homo sapien
cttcaaggtactgattgcacacagg

SEQ ID NO: 1044908 - DNA, 25 bp, Homo sapien
gaatgttctgccttcaaggtactga

SEQ ID NO: 1044909 - DNA, 25 bp, Homo sapien
tattcagaatgttctgccttcaagg

SEQ ID NO: 1044910 - DNA, 25 bp, Homo sapien
caaggtactgattgcacacaggaaa

SEQ ID NO: 1044911 - DNA, 25 bp, Homo sapien
tgcaacggaagggatcaggaagcct

SEQ ID NO: 1044912 - DNA, 25 bp, Homo sapien
tgggcaatcagcacttctggcgttc

SEQ ID NO: 1044913 - DNA, 25 bp, Homo sapien
tgggcgggaaaccactattacataa

SEQ ID NO: 1044914 - DNA, 25 bp, Homo sapien
ccacagggaaccaacgagggagtga

SEQ ID NO: 1044915 - DNA, 25 bp, Homo sapien
cagctcctttggttataggctgaca

SEQ ID NO: 1044916 - DNA, 25 bp, Homo sapien
gacagtaccgtgaaggcagataaag

SEQ ID NO: 1044917 - DNA, 25 bp, Homo sapien
tttccaagccaaagcctgcaactta

SEQ ID NO: 1044918 - DNA, 25 bp, Homo sapien
gcacttaggaaagttacagacaact

SEQ ID NO: 1044919 - DNA, 25 bp, Homo sapien
taaaatgcttaatctgccgactcag

SEQ ID NO: 1044920 - DNA, 25 bp, Homo sapien
tataaaatgcttaatctgccgactc

SEQ ID NO: 1044921 - DNA, 25 bp, Homo sapien
aatgcttaatctgccgactcaggag

SEQ ID NO: 1044922 - DNA, 25 bp, Homo sapien
ttaatctgccgactcaggagcccgc

SEQ ID NO: 1044923 - DNA, 25 bp, Homo sapien
tctcagcctagctgagtgttgtagc

SEQ ID NO: 1044924 - DNA, 25 bp, Homo sapien
tagctgagtgttgtagctgggacaa

SEQ ID NO: 1044925 - DNA, 25 bp, Homo sapien
cagcctagctgagtgttgtagctgg

SEQ ID NO: 1044926 - DNA, 25 bp, Homo sapien
ctatctcagcctagctgagtgttgt

SEQ ID NO: 1044927 - DNA, 25 bp, Homo sapien
tccggcgacttccaccgttcctctg

SEQ ID NO: 1044928 - DNA, 25 bp, Homo sapien
ctggagcccaccgaacttccggcga

SEQ ID NO: 1044929 - DNA, 25 bp, Homo sapien
cgttcctctgtccgacggacggaag

SEQ ID NO: 1044930 - DNA, 25 bp, Homo sapien
tcctctgtccgacggacggaagcgg

SEQ ID NO: 1044931 - DNA, 25 bp, Homo sapien
gagggatgcggtagacgtggacgtc

SEQ ID NO: 1044932 - DNA, 25 bp, Homo sapien
ctgtagccacggttggtagcccgcg

SEQ ID NO: 1044933 - DNA, 25 bp, Homo sapien
ccgcggagggatgcggtagacgtgg

SEQ ID NO: 1044934 - DNA, 25 bp, Homo sapien
gacgtggacgtcaggcttgacacag

SEQ ID NO: 1044935 - DNA, 25 bp, Homo sapien
ggtccctaagcgctagatacggctt

SEQ ID NO: 1044936 - DNA, 25 bp, Homo sapien
gagtcccgtgcgtcgaactgagacg

SEQ ID NO: 1044937 - DNA, 25 bp, Homo sapien
taaattggagctagcctggtctggc

SEQ ID NO: 1044938 - DNA, 25 bp, Homo sapien
gagacgggcgaaactctggatccac

SEQ ID NO: 1044939 - DNA, 25 bp, Homo sapien
caggctgtgatcaagggtgaaattc

SEQ ID NO: 1044940 - DNA, 25 bp, Homo sapien
taaggcttttcgaggatcccttcaa

SEQ ID NO: 1044941 - DNA, 25 bp, Homo sapien
aaattcgtgcgaagggatctgggta

SEQ ID NO: 1044942 - DNA, 25 bp, Homo sapien
gatttccgtctgtgatagggcacct

SEQ ID NO: 1044943 - DNA, 25 bp, Homo sapien
cagcttgatgtaggccatctgtccc

SEQ ID NO: 1044944 - DNA, 25 bp, Homo sapien
ctcagccggccactccatgatggct

SEQ ID NO: 1044945 - DNA, 25 bp, Homo sapien
cctccagcttgatgtaggccatctg

SEQ ID NO: 1044946 - DNA, 25 bp, Homo sapien
cagtgatcctcagccggccactcca

SEQ ID NO: 1044947 - DNA, 25 bp, Homo sapien
tcgatgcggatcacgaagtacctgc

SEQ ID NO: 1044948 - DNA, 25 bp, Homo sapien
ggaaactgatccaccggggcctgag

SEQ ID NO: 1044949 - DNA, 25 bp, Homo sapien
tacctgctggaatccgtcacactct

SEQ ID NO: 1044950 - DNA, 25 bp, Homo sapien
catttccatcttcgatgcggatcac

SEQ ID NO: 1044951 - DNA, 25 bp, Homo sapien
gaaatggtcctgcaatgcaacattg

SEQ ID NO: 1044952 - DNA, 25 bp, Homo sapien
agccaattccaataaacgcccgtcg

SEQ ID NO: 1044953 - DNA, 25 bp, Homo sapien
cattgaagtcaaaggcatcacctcg

SEQ ID NO: 1044954 - DNA, 25 bp, Homo sapien
aaaggcatcacctcggtccccgaag

SEQ ID NO: 1044955 - DNA, 25 bp, Homo sapien
atggtctggccctccttgaagccca

SEQ ID NO: 1044956 - DNA, 25 bp, Homo sapien
gatggtctggccctccttgaagccc

SEQ ID NO: 1044957 - DNA, 25 bp, Homo sapien
tggtctggccctccttgaagcccag

SEQ ID NO: 1044958 - DNA, 25 bp, Homo sapien
tgggtggccacaagtatcacgtcac

SEQ ID NO: 1044959 - DNA, 25 bp, Homo sapien
cagggcatcccttagtcatggaacc

SEQ ID NO: 1044960 - DNA, 25 bp, Homo sapien
tccttattcaagacacagcctggga

SEQ ID NO: 1044961 - DNA, 25 bp, Homo sapien
tgaactgtaagaagagcaatgggct

SEQ ID NO: 1044962 - DNA, 25 bp, Homo sapien
ccaagcgagagaaagaatcacatcc

SEQ ID NO: 1044963 - DNA, 25 bp, Homo sapien
tagtttcctccaagcgagagaaaga

SEQ ID NO: 1044964 - DNA, 25 bp, Homo sapien
acatcccaaccagtccactggattg

SEQ ID NO: 1044965 - DNA, 25 bp, Homo sapien
ttcctccaagcgagagaaagaatca

SEQ ID NO: 1044966 - DNA, 25 bp, Homo sapien
taaaatcgtaagtccagccctgaag

SEQ ID NO: 1044967 - DNA, 25 bp, Homo sapien
gaaagcagcacaagttacacagatg

SEQ ID NO: 1044968 - DNA, 25 bp, Homo sapien
gaagtaaccattcacgcgctgctgg

SEQ ID NO: 1044969 - DNA, 25 bp, Homo sapien
tccctacttgtaaggaaagcagcag

SEQ ID NO: 1044970 - DNA, 25 bp, Homo sapien
gctggctggacgagggatcccccca

SEQ ID NO: 1044971 - DNA, 25 bp, Homo sapien
ggctggacgagggatccccccacag

SEQ ID NO: 1044972 - DNA, 25 bp, Homo sapien
ctgctggctggacgagggatccccc

SEQ ID NO: 1044973 - DNA, 25 bp, Homo sapien
actgctggctggacgagggatcccc

SEQ ID NO: 1044974 - DNA, 25 bp, Homo sapien
agatttggtaaagtctccccagatg

SEQ ID NO: 1044975 - DNA, 25 bp, Homo sapien
gtagatttggtaaagtctccccaga

SEQ ID NO: 1044976 - DNA, 25 bp, Homo sapien
gatttggtaaagtctccccagatgt

SEQ ID NO: 1044977 - DNA, 25 bp, Homo sapien
tagatttggtaaagtctccccagat

SEQ ID NO: 1044978 - DNA, 25 bp, Homo sapien
cagaactggacccagcctgtgcctg

SEQ ID NO: 1044979 - DNA, 25 bp, Homo sapien
tgcctggctgggtctggctggaagt

SEQ ID NO: 1044980 - DNA, 25 bp, Homo sapien
tcagaactggacccagcctgtgcct

SEQ ID NO: 1044981 - DNA, 25 bp, Homo sapien
ctggctgggtctggctggaagttga

SEQ ID NO: 1044982 - DNA, 25 bp, Homo sapien
gggagcgccttcccagaagtcacat

SEQ ID NO: 1044983 - DNA, 25 bp, Homo sapien
gcccagatgagggagcgccttccca

SEQ ID NO: 1044984 - DNA, 25 bp, Homo sapien
cacatgaggaaaaaccgtgctcagg

SEQ ID NO: 1044985 - DNA, 25 bp, Homo sapien
tcacatgaggaaaaaccgtgctcag

SEQ ID NO: 1044986 - DNA, 25 bp, Homo sapien
caatttactgccaaacatgcccggt

SEQ ID NO: 1044987 - DNA, 25 bp, Homo sapien
tactgccaaacatgcccggtttgtc

SEQ ID NO: 1044988 - DNA, 25 bp, Homo sapien
aaacatgcccggtttgtcaacagag

SEQ ID NO: 1044989 - DNA, 25 bp, Homo sapien
ggtgccaatttactgccaaacatgc

SEQ ID NO: 1044990 - DNA, 25 bp, Homo sapien
tgtgttctggttgcatacttgaatc

SEQ ID NO: 1044991 - DNA, 25 bp, Homo sapien
gttctggttgcatacttgaatccca

SEQ ID NO: 1044992 - DNA, 25 bp, Homo sapien
ggttgcatacttgaatcccaggaaa

SEQ ID NO: 1044993 - DNA, 25 bp, Homo sapien
tctggttgcatacttgaatcccagg

SEQ ID NO: 1044994 - DNA, 25 bp, Homo sapien
tcattgcgatggaagaagtctcaga

SEQ ID NO: 1044995 - DNA, 25 bp, Homo sapien
aatacaggtcattgcgatggaagaa

SEQ ID NO: 1044996 - DNA, 25 bp, Homo sapien
ggtcattgcgatggaagaagtctca

SEQ ID NO: 1044997 - DNA, 25 bp, Homo sapien
acaggtcattgcgatggaagaagtc

SEQ ID NO: 1044998 - DNA, 25 bp, Homo sapien
agaccctgggaagggctgatctgaa

SEQ ID NO: 1044999 - DNA, 25 bp, Homo sapien
ctgggaagggctgatctgaatcctg

SEQ ID NO: 1045000 - DNA, 25 bp, Homo sapien
atcctggcagcaaactcaacctctt

SEQ ID NO: 1045001 - DNA, 25 bp, Homo sapien
gaagggctgatctgaatcctggcag

SEQ ID NO: 1045002 - DNA, 25 bp, Homo sapien
aatcaggaagaaacccctcctctgg

SEQ ID NO: 1045003 - DNA, 25 bp, Homo sapien
gcacgccgagggagcagttcctttt

SEQ ID NO: 1045004 - DNA, 25 bp, Homo sapien
gctgcccacagtgaggaatcccttc

SEQ ID NO: 1045005 - DNA, 25 bp, Homo sapien
tacggaaagcctcccgctgaactgt

SEQ ID NO: 1045006 - DNA, 25 bp, Homo sapien
gcactttagaaaccaccaaagagaa

SEQ ID NO: 1045007 - DNA, 25 bp, Homo sapien
ggcactttagaaaccaccaaagaga

SEQ ID NO: 1045008 - DNA, 25 bp, Homo sapien
aggcactttagaaaccaccaaagag

SEQ ID NO: 1045009 - DNA, 25 bp, Homo sapien
atctggtcccgcaaaaaggccaaca

SEQ ID NO: 1045010 - DNA, 25 bp, Homo sapien
cagtaaaccaagcaaccctggactt

SEQ ID NO: 1045011 - DNA, 25 bp, Homo sapien
caactgagaggtgagttaataaaag

SEQ ID NO: 1045012 - DNA, 25 bp, Homo sapien
taataaaaggaatgtcagaggtgct

SEQ ID NO: 1045013 - DNA, 25 bp, Homo sapien
cacaggagagaaggtaccgattgcc

SEQ ID NO: 1045014 - DNA, 25 bp, Homo sapien
tgagtctagctgtggcaccctgaag

SEQ ID NO: 1045015 - DNA, 25 bp, Homo sapien
cgattgccttagacaacaaggttgc

SEQ ID NO: 1045016 - DNA, 25 bp, Homo sapien
tgaagagtttaacagccacgcggcc

SEQ ID NO: 1045017 - DNA, 25 bp, Homo sapien
tagaacggcctgtatcatgagacgc

SEQ ID NO: 1045018 - DNA, 25 bp, Homo sapien
tactttcacatcaaccaaaggatga

SEQ ID NO: 1045019 - DNA, 25 bp, Homo sapien
tactacttagggagatgctctgccg

SEQ ID NO: 1045020 - DNA, 25 bp, Homo sapien
tgagacgccacaagagaattaagcc

SEQ ID NO: 1045021 - DNA, 25 bp, Homo sapien
gaaggcttacctgggagtgatcagc

SEQ ID NO: 1045022 - DNA, 25 bp, Homo sapien
tagccggaagtactggcacacgtct

SEQ ID NO: 1045023 - DNA, 25 bp, Homo sapien
tcgcaagtagttaggattccaagca

SEQ ID NO: 1045024 - DNA, 25 bp, Homo sapien
ccaaaggagcatcataagggacctc

SEQ ID NO: 1045025 - DNA, 25 bp, Homo sapien
ttcatctgttggcctcgtgatcggc

SEQ ID NO: 1045026 - DNA, 25 bp, Homo sapien
cccggatggtcttcatctgttggcc

SEQ ID NO: 1045027 - DNA, 25 bp, Homo sapien
ggcccggatggtcttcatctgttgg

SEQ ID NO: 1045028 - DNA, 25 bp, Homo sapien
catctgttggcctcgtgatcggccc

SEQ ID NO: 1045029 - DNA, 25 bp, Homo sapien
gagattggcgtgatgctgccacaca

SEQ ID NO: 1045030 - DNA, 25 bp, Homo sapien
gattctggcctagaccctctggaag

SEQ ID NO: 1045031 - DNA, 25 bp, Homo sapien
gaggacacacatggaaacacaggga

SEQ ID NO: 1045032 - DNA, 25 bp, Homo sapien
cacaggtagacttgttttgagacga

SEQ ID NO: 1045033 - DNA, 25 bp, Homo sapien
taatttttacggacatagccgctgc

SEQ ID NO: 1045034 - DNA, 25 bp, Homo sapien
cttcagttaagccaggagggtgcct

SEQ ID NO: 1045035 - DNA, 25 bp, Homo sapien
gctgtaagggtccaggtctgcacaa

SEQ ID NO: 1045036 - DNA, 25 bp, Homo sapien
gacacacgacacttgttcaccacgg

SEQ ID NO: 1045037 - DNA, 25 bp, Homo sapien
gagtaaggcgtacaagggacctctc

SEQ ID NO: 1045038 - DNA, 25 bp, Homo sapien
tgatgaatcccggtgttgacggaaa

SEQ ID NO: 1045039 - DNA, 25 bp, Homo sapien
gattgatacccacaataacctggac

SEQ ID NO: 1045040 - DNA, 25 bp, Homo sapien
tcctggtactgtggcatttgcaata

SEQ ID NO: 1045041 - DNA, 25 bp, Homo sapien
tggcctaagtataccagttgcaaga

SEQ ID NO: 1045042 - DNA, 25 bp, Homo sapien
gatatacgaatgtctggaaaaacca

SEQ ID NO: 1045043 - DNA, 25 bp, Homo sapien
cacaggctggcagagtaggtcaatg

SEQ ID NO: 1045044 - DNA, 25 bp, Homo sapien
tactcaaaagcactatggataaggc

SEQ ID NO: 1045045 - DNA, 25 bp, Homo sapien
cttaagggagaaccaaatgaagtat

SEQ ID NO: 1045046 - DNA, 25 bp, Homo sapien
gaagcgctgggattgtctgacaaac

SEQ ID NO: 1045047 - DNA, 25 bp, Homo sapien
tcgacagtctgataacataataccc

SEQ ID NO: 1045048 - DNA, 25 bp, Homo sapien
tagcgagtaattatgagcacacttg

SEQ ID NO: 1045049 - DNA, 25 bp, Homo sapien
gcctgggactgagcacgggcctgtg

SEQ ID NO: 1045050 - DNA, 25 bp, Homo sapien
tggcccggacatcacgagctgtcca

SEQ ID NO: 1045051 - DNA, 25 bp, Homo sapien
acatcacgagctgtccaggaggcgg

SEQ ID NO: 1045052 - DNA, 25 bp, Homo sapien
ccggacatcacgagctgtccaggag

SEQ ID NO: 1045053 - DNA, 25 bp, Homo sapien
tggaccgacgcgctccgggcgaagg

SEQ ID NO: 1045054 - DNA, 25 bp, Homo sapien
tgcggagaaggcgagcgaaggtagg

SEQ ID NO: 1045055 - DNA, 25 bp, Homo sapien
cggagaaggcgagcgaaggtaggag

SEQ ID NO: 1045056 - DNA, 25 bp, Homo sapien
tccgggcgaaggaggccgctcgcct

SEQ ID NO: 1045057 - DNA, 25 bp, Homo sapien
ggtgcgaggctgcaagcgggagggc

SEQ ID NO: 1045058 - DNA, 25 bp, Homo sapien
tcaccaggcgtttccgcccagggtg

SEQ ID NO: 1045059 - DNA, 25 bp, Homo sapien
ccagggtggtccctgtaagcgccgc

SEQ ID NO: 1045060 - DNA, 25 bp, Homo sapien
ttgcccggcggtgcgaggctgcaag

SEQ ID NO: 1045061 - DNA, 25 bp, Homo sapien
gggtttcgatcctgcgctgcggtct

SEQ ID NO: 1045062 - DNA, 25 bp, Homo sapien
tggaatcctccttcgtgcgtgcagg

SEQ ID NO: 1045063 - DNA, 25 bp, Homo sapien
gctgcggtcttacaactgcgaaacc

SEQ ID NO: 1045064 - DNA, 25 bp, Homo sapien
ggctggcatgaaacgtcccctcgtt

SEQ ID NO: 1045065 - DNA, 25 bp, Homo sapien
gagttgcagatttagagccctctgc

SEQ ID NO: 1045066 - DNA, 25 bp, Homo sapien
tgcagatttagagccctctgcagtg

SEQ ID NO: 1045067 - DNA, 25 bp, Homo sapien
tgagcaggtgagcacctggcatgat

SEQ ID NO: 1045068 - DNA, 25 bp, Homo sapien
ctgagttgcagatttagagccctct

SEQ ID NO: 1045069 - DNA, 25 bp, Homo sapien
ctggcaggcagtaacattctgtgtg

SEQ ID NO: 1045070 - DNA, 25 bp, Homo sapien
aactcgcccaggctccttatgcttg

SEQ ID NO: 1045071 - DNA, 25 bp, Homo sapien
taatggtcctggtagtttggtacaa

SEQ ID NO: 1045072 - DNA, 25 bp, Homo sapien
ctcgcccaggctccttatgcttgaa

SEQ ID NO: 1045073 - DNA, 25 bp, Homo sapien
taatagatttagctgtagattaaat

SEQ ID NO: 1045074 - DNA, 25 bp, Homo sapien
tattcacccactgttgcatgccctg

SEQ ID NO: 1045075 - DNA, 25 bp, Homo sapien
gaagttcagcccttaatggaaatga

SEQ ID NO: 1045076 - DNA, 25 bp, Homo sapien
caattgtaaaggagtcactgcccca

SEQ ID NO: 1045077 - DNA, 25 bp, Homo sapien
aaggccctccaaggatctaatgatg

SEQ ID NO: 1045078 - DNA, 25 bp, Homo sapien
gacaactgtctttataacattacca

SEQ ID NO: 1045079 - DNA, 25 bp, Homo sapien
taacattaccagtgataaaaccagt

SEQ ID NO: 1045080 - DNA, 25 bp, Homo sapien
ctgtctttataacattaccagtgat

SEQ ID NO: 1045081 - DNA, 25 bp, Homo sapien
gctgtgcaagagatgacaaagtcca

SEQ ID NO: 1045082 - DNA, 25 bp, Homo sapien
ctgggtcgcccaccagggagtttct

SEQ ID NO: 1045083 - DNA, 25 bp, Homo sapien
gctgggtcgcccaccagggagtttc

SEQ ID NO: 1045084 - DNA, 25 bp, Homo sapien
tgggtcgcccaccagggagtttctg

SEQ ID NO: 1045085 - DNA, 25 bp, Homo sapien
gctggggtcgcagatccaggcattt

SEQ ID NO: 1045086 - DNA, 25 bp, Homo sapien
aggctggggtcgcagatccaggcat

SEQ ID NO: 1045087 - DNA, 25 bp, Homo sapien
ggctggggtcgcagatccaggcatt

SEQ ID NO: 1045088 - DNA, 25 bp, Homo sapien
tcaggctggggtcgcagatccaggc

SEQ ID NO: 1045089 - DNA, 25 bp, Homo sapien
tccgttgccagcgaaggcgctcgtt

SEQ ID NO: 1045090 - DNA, 25 bp, Homo sapien
cgttgccagcgaaggcgctcgttag

SEQ ID NO: 1045091 - DNA, 25 bp, Homo sapien
ggcgatgcccgcgaatttgttaggg

SEQ ID NO: 1045092 - DNA, 25 bp, Homo sapien
cagcgaaggcgctcgttaggccttg

SEQ ID NO: 1045093 - DNA, 25 bp, Homo sapien
cagccagtcagcggagcctcctcac

SEQ ID NO: 1045094 - DNA, 25 bp, Homo sapien
accccggagacgcccatcgggctga

SEQ ID NO: 1045095 - DNA, 25 bp, Homo sapien
cgcccatcgggctgagctgcgaata

SEQ ID NO: 1045096 - DNA, 25 bp, Homo sapien
gtcgccaccccggagacgcccatcg

SEQ ID NO: 1045097 - DNA, 25 bp, Homo sapien
ccggagacgcccatcgggctgagct

SEQ ID NO: 1045098 - DNA, 25 bp, Homo sapien
atccgcgggagcagctttagagagc

SEQ ID NO: 1045099 - DNA, 25 bp, Homo sapien
cgtggagctgcacccaataagccca

SEQ ID NO: 1045100 - DNA, 25 bp, Homo sapien
cgtcatccgcgggagcagctttaga

SEQ ID NO: 1045101 - DNA, 25 bp, Homo sapien
tcatccgcgggagcagctttagaga

SEQ ID NO: 1045102 - DNA, 25 bp, Homo sapien
acttgctgccacctcgcaaaggcgc

SEQ ID NO: 1045103 - DNA, 25 bp, Homo sapien
agctgcggccgggtcgctgcaactc

SEQ ID NO: 1045104 - DNA, 25 bp, Homo sapien
gccctcggtgtgtcgcttgcaggct

SEQ ID NO: 1045105 - DNA, 25 bp, Homo sapien
ggactcgtggcctcggtgtccctcg

SEQ ID NO: 1045106 - DNA, 25 bp, Homo sapien
gaaattacgaattgatgaccagttg

SEQ ID NO: 1045107 - DNA, 25 bp, Homo sapien
tgatgaccagttggctcttggatct

SEQ ID NO: 1045108 - DNA, 25 bp, Homo sapien
tgcccacgcacttagccgatgggaa

SEQ ID NO: 1045109 - DNA, 25 bp, Homo sapien
aatgcccacgcacttagccgatggg

SEQ ID NO: 1045110 - DNA, 25 bp, Homo sapien
tgctaaccccctggcatgtatctag

SEQ ID NO: 1045111 - DNA, 25 bp, Homo sapien
ggacaacgcgcatcagtggttctca

SEQ ID NO: 1045112 - DNA, 25 bp, Homo sapien
tccacgctgggacactaggtcacga

SEQ ID NO: 1045113 - DNA, 25 bp, Homo sapien
agacagcaggacaacgcgcatcagt

SEQ ID NO: 1045114 - DNA, 25 bp, Homo sapien
cggggatgccgaaggaagtggccca

SEQ ID NO: 1045115 - DNA, 25 bp, Homo sapien
gatgccgaaggaagtggcccataaa

SEQ ID NO: 1045116 - DNA, 25 bp, Homo sapien
gggatgccgaaggaagtggcccata

SEQ ID NO: 1045117 - DNA, 25 bp, Homo sapien
ctgcccccggggatgccgaaggaag

SEQ ID NO: 1045118 - DNA, 25 bp, Homo sapien
ggtcgagaaccgcagtcaaaccctc

SEQ ID NO: 1045119 - DNA, 25 bp, Homo sapien
gccgggggtcgagaaccgcagtcaa

SEQ ID NO: 1045120 - DNA, 25 bp, Homo sapien
tggtcgccgggggtcgagaaccgca

SEQ ID NO: 1045121 - DNA, 25 bp, Homo sapien
tcgagaaccgcagtcaaaccctctt

SEQ ID NO: 1045122 - DNA, 25 bp, Homo sapien
gaccaaagtgagcagctggtttccc

SEQ ID NO: 1045123 - DNA, 25 bp, Homo sapien
acaagaccaaagtgagcagctggtt

SEQ ID NO: 1045124 - DNA, 25 bp, Homo sapien
ggacaagaccaaagtgagcagctgg

SEQ ID NO: 1045125 - DNA, 25 bp, Homo sapien
aagaccaaagtgagcagctggtttc

SEQ ID NO: 1045126 - DNA, 25 bp, Homo sapien
tggagacggaaactcgattcaccat

SEQ ID NO: 1045127 - DNA, 25 bp, Homo sapien
ccatcgccagccacgggaggactgg

SEQ ID NO: 1045128 - DNA, 25 bp, Homo sapien
agggacctcggggagctctctcgcc

SEQ ID NO: 1045129 - DNA, 25 bp, Homo sapien
ggccctcaccataaacctaccatgt

SEQ ID NO: 1045130 - DNA, 25 bp, Homo sapien
ttgctgacttgtgacggaagattct

SEQ ID NO: 1045131 - DNA, 25 bp, Homo sapien
gctgacttgtgacggaagattctct

SEQ ID NO: 1045132 - DNA, 25 bp, Homo sapien
gacttgtgacggaagattctctatt

SEQ ID NO: 1045133 - DNA, 25 bp, Homo sapien
gattctctattgtaccctctgggga

SEQ ID NO: 1045134 - DNA, 25 bp, Homo sapien
ttcatccctttctgacatggtttgg

SEQ ID NO: 1045135 - DNA, 25 bp, Homo sapien
tcacacacatcaggatatgctgtca

SEQ ID NO: 1045136 - DNA, 25 bp, Homo sapien
ggactaatacactctcatttctgag

SEQ ID NO: 1045137 - DNA, 25 bp, Homo sapien
cccatttattgaccgtatagctgtg

SEQ ID NO: 1045138 - DNA, 25 bp, Homo sapien
aggacagcaagatccccagcccttg

SEQ ID NO: 1045139 - DNA, 25 bp, Homo sapien
caagctcctcctcgacccccttgct

SEQ ID NO: 1045140 - DNA, 25 bp, Homo sapien
ccccttgctcagctgttctcaggac

SEQ ID NO: 1045141 - DNA, 25 bp, Homo sapien
cagcccttggaaaagccccatctcc

SEQ ID NO: 1045142 - DNA, 25 bp, Homo sapien
ttcagccctgtgtagggaatcaggt

SEQ ID NO: 1045143 - DNA, 25 bp, Homo sapien
tgtgtagggaatcaggtctgcgccc

SEQ ID NO: 1045144 - DNA, 25 bp, Homo sapien
ctgaggaacctgaatggatgagccg

SEQ ID NO: 1045145 - DNA, 25 bp, Homo sapien
ccctgtgtagggaatcaggtctgcg

SEQ ID NO: 1045146 - DNA, 25 bp, Homo sapien
gagcccgaagcccgggtatgtgtcc

SEQ ID NO: 1045147 - DNA, 25 bp, Homo sapien
gggaggatgcgggagcccgaagccc

SEQ ID NO: 1045148 - DNA, 25 bp, Homo sapien
atgcgggagcccgaagcccgggtat

SEQ ID NO: 1045149 - DNA, 25 bp, Homo sapien
cgggagcccgaagcccgggtatgtg

SEQ ID NO: 1045150 - DNA, 25 bp, Homo sapien
gattcaggatcaggcccgggaactg

SEQ ID NO: 1045151 - DNA, 25 bp, Homo sapien
tatgattccctgattcaggatcagg

SEQ ID NO: 1045152 - DNA, 25 bp, Homo sapien
cctgattcaggatcaggcccgggaa

SEQ ID NO: 1045153 - DNA, 25 bp, Homo sapien
taggaaatatgattccctgattcag

SEQ ID NO: 1045154 - DNA, 25 bp, Homo sapien
gaaacgcagaactatcttcattctc

SEQ ID NO: 1045155 - DNA, 25 bp, Homo sapien
tgctgtaagggatgtgaaacgcaga

SEQ ID NO: 1045156 - DNA, 25 bp, Homo sapien
cattctcacagaccttacgatttat

SEQ ID NO: 1045157 - DNA, 25 bp, Homo sapien
gatgctggtgctgtaagggatgtga

SEQ ID NO: 1045158 - DNA, 25 bp, Homo sapien
ggagattatcaatggcaaatgcagg

SEQ ID NO: 1045159 - DNA, 25 bp, Homo sapien
tacagataccttgtcccaactaagg

SEQ ID NO: 1045160 - DNA, 25 bp, Homo sapien
gagatgagagtacacaatccctgac

SEQ ID NO: 1045161 - DNA, 25 bp, Homo sapien
cgcaggtgaacccttgctgaagcag

SEQ ID NO: 1045162 - DNA, 25 bp, Homo sapien
gagacttgaacgctgatcaccgtac

SEQ ID NO: 1045163 - DNA, 25 bp, Homo sapien
gacttgaacgctgatcaccgtactc

SEQ ID NO: 1045164 - DNA, 25 bp, Homo sapien
gaacgctgatcaccgtactcagagt

SEQ ID NO: 1045165 - DNA, 25 bp, Homo sapien
ttgaacgctgatcaccgtactcaga

SEQ ID NO: 1045166 - DNA, 25 bp, Homo sapien
tccagccgggactcatccctgggca

SEQ ID NO: 1045167 - DNA, 25 bp, Homo sapien
aaggcatctccagccgggactcatc

SEQ ID NO: 1045168 - DNA, 25 bp, Homo sapien
atctccagccgggactcatccctgg

SEQ ID NO: 1045169 - DNA, 25 bp, Homo sapien
agccaaggcatctccagccgggact

SEQ ID NO: 1045170 - DNA, 25 bp, Homo sapien
agtactggatctgatgggcccagct

SEQ ID NO: 1045171 - DNA, 25 bp, Homo sapien
aagtactggatctgatgggcccagc

SEQ ID NO: 1045172 - DNA, 25 bp, Homo sapien
tagggctaaatggaatccctgaagg

SEQ ID NO: 1045173 - DNA, 25 bp, Homo sapien
ggaatagaagttgaaactaacataa

SEQ ID NO: 1045174 - DNA, 25 bp, Homo sapien
cccagtatagggctaaatggaatcc

SEQ ID NO: 1045175 - DNA, 25 bp, Homo sapien
tttaaaacatactggatgaaagatt

SEQ ID NO: 1045176 - DNA, 25 bp, Homo sapien
agtttgtccatcagcattatcatga

SEQ ID NO: 1045177 - DNA, 25 bp, Homo sapien
tccatcagcattatcatgatatcag

SEQ ID NO: 1045178 - DNA, 25 bp, Homo sapien
tagtttgtccatcagcattatcatg

SEQ ID NO: 1045179 - DNA, 25 bp, Homo sapien
cagcattatcatgatatcaggactg

SEQ ID NO: 1045180 - DNA, 25 bp, Homo sapien
gactcaggcagggaatatggcatta

SEQ ID NO: 1045181 - DNA, 25 bp, Homo sapien
tatggcattatggtctacacgtaga

SEQ ID NO: 1045182 - DNA, 25 bp, Homo sapien
tcttgcactgagaatagttatgtcc

SEQ ID NO: 1045183 - DNA, 25 bp, Homo sapien
gcttaatgtgacctgcttctctgaa

SEQ ID NO: 1045184 - DNA, 25 bp, Homo sapien
aggcacctcgaaccttgtttttgtg

SEQ ID NO: 1045185 - DNA, 25 bp, Homo sapien
cacctcgaaccttgtttttgtggtg

SEQ ID NO: 1045186 - DNA, 25 bp, Homo sapien
tacttaaagccgttgatacgtctta

SEQ ID NO: 1045187 - DNA, 25 bp, Homo sapien
tacatttacttaaagccgttgatac

SEQ ID NO: 1045188 - DNA, 25 bp, Homo sapien
aagccgttgatacgtcttaaagcgg

SEQ ID NO: 1045189 - DNA, 25 bp, Homo sapien
cagagagacatgctttgaaatggga

SEQ ID NO: 1045190 - DNA, 25 bp, Homo sapien
cataaagtgacatatgatgcagcaa

SEQ ID NO: 1045191 - DNA, 25 bp, Homo sapien
ccaaattgtatgtttgacacaggtc

SEQ ID NO: 1045192 - DNA, 25 bp, Homo sapien
tgagcaataaacgacaaccacattt

SEQ ID NO: 1045193 - DNA, 25 bp, Homo sapien
cacccagcagtatgacttaagaaaa

SEQ ID NO: 1045194 - DNA, 25 bp, Homo sapien
taagctcaatagaagtagtcttttg

SEQ ID NO: 1045195 - DNA, 25 bp, Homo sapien
gtaatgttgcagaatataagctcaa

SEQ ID NO: 1045196 - DNA, 25 bp, Homo sapien
gactgtgtatgttaataatcctaga

SEQ ID NO: 1045197 - DNA, 25 bp, Homo sapien
ttagtgagtttggtaatgttgcaga

SEQ ID NO: 1045198 - DNA, 25 bp, Homo sapien
taattaggatcgacagcctgggacc

SEQ ID NO: 1045199 - DNA, 25 bp, Homo sapien
cagtgattctagttcaaaatgaggc

SEQ ID NO: 1045200 - DNA, 25 bp, Homo sapien
ggaagggataaagaagtcactgacc

SEQ ID NO: 1045201 - DNA, 25 bp, Homo sapien
tatggcttctatcgcactccaaatg

SEQ ID NO: 1045202 - DNA, 25 bp, Homo sapien
tcgaacccgttgtgcagaagaggcc

SEQ ID NO: 1045203 - DNA, 25 bp, Homo sapien
tgggttatcctgacacgcccatcgg

SEQ ID NO: 1045204 - DNA, 25 bp, Homo sapien
cccatcgggatcctgaggagccagt

SEQ ID NO: 1045205 - DNA, 25 bp, Homo sapien
gaatgggaagttacgcgaagtccac

SEQ ID NO: 1045206 - DNA, 25 bp, Homo sapien
tcctctcatctctacgccgattcct

SEQ ID NO: 1045207 - DNA, 25 bp, Homo sapien
cccacgggtgccacggtggtggacg

SEQ ID NO: 1045208 - DNA, 25 bp, Homo sapien
ggtgtctgggcacacctctgcgtga

SEQ ID NO: 1045209 - DNA, 25 bp, Homo sapien
cgacgcctctccgaccaacagtctc

SEQ ID NO: 1045210 - DNA, 25 bp, Homo sapien
tggccaacctatgaatgtatacacg

SEQ ID NO: 1045211 - DNA, 25 bp, Homo sapien
tactacatcagatcaaggactctgg

SEQ ID NO: 1045212 - DNA, 25 bp, Homo sapien
cacatgtatcgtggcagatgtaggc

SEQ ID NO: 1045213 - DNA, 25 bp, Homo sapien
ttgccagcaatcaaagccttcaggg

SEQ ID NO: 1045214 - DNA, 25 bp, Homo sapien
tgcgggggctctcgggccagcggac

SEQ ID NO: 1045215 - DNA, 25 bp, Homo sapien
ggctctcgggccagcggaccccgtc

SEQ ID NO: 1045216 - DNA, 25 bp, Homo sapien
ggaccccgtctccaccgcggcgctc

SEQ ID NO: 1045217 - DNA, 25 bp, Homo sapien
tcgggccagcggaccccgtctccac

SEQ ID NO: 1045218 - DNA, 25 bp, Homo sapien
tttagtagacatgggagcttcacca

SEQ ID NO: 1045219 - DNA, 25 bp, Homo sapien
tcctgggttcagcaattctatggct

SEQ ID NO: 1045220 - DNA, 25 bp, Homo sapien
ctgggttcagcaattctatggcttc

SEQ ID NO: 1045221 - DNA, 25 bp, Homo sapien
gggttcagcaattctatggcttcag

SEQ ID NO: 1045222 - DNA, 25 bp, Homo sapien
gccacctttgagagcggacaggtta

SEQ ID NO: 1045223 - DNA, 25 bp, Homo sapien
gagggctgagcctttcatacttcca

SEQ ID NO: 1045224 - DNA, 25 bp, Homo sapien
caggttatgtggtatgcagacagca

SEQ ID NO: 1045225 - DNA, 25 bp, Homo sapien
gacagcacttgttattccctgggct

SEQ ID NO: 1045226 - DNA, 25 bp, Homo sapien
gcctccctacttagtggtcaggtgt

SEQ ID NO: 1045227 - DNA, 25 bp, Homo sapien
gaggcctccctacttagtggtcagg

SEQ ID NO: 1045228 - DNA, 25 bp, Homo sapien
ctccctacttagtggtcaggtgtta

SEQ ID NO: 1045229 - DNA, 25 bp, Homo sapien
tgagaggcctccctacttagtggtc

SEQ ID NO: 1045230 - DNA, 25 bp, Homo sapien
tagagcagacgtgctaatagaggcc

SEQ ID NO: 1045231 - DNA, 25 bp, Homo sapien
ggcccagacttggtagttatcaccg

SEQ ID NO: 1045232 - DNA, 25 bp, Homo sapien
tatcaccggtgcctctgtgtagtgg

SEQ ID NO: 1045233 - DNA, 25 bp, Homo sapien
tgcacaaaggcatacgctaggttag

SEQ ID NO: 1045234 - DNA, 25 bp, Homo sapien
ccaccgcttgtagcggcgctgtagc

SEQ ID NO: 1045235 - DNA, 25 bp, Homo sapien
gcaccaccgcttgtagcggcgctgt

SEQ ID NO: 1045236 - DNA, 25 bp, Homo sapien
caccaccgcttgtagcggcgctgta

SEQ ID NO: 1045237 - DNA, 25 bp, Homo sapien
gggcaccaccgcttgtagcggcgct

SEQ ID NO: 1045238 - DNA, 25 bp, Homo sapien
cattaagggcccacagcgaccagca

SEQ ID NO: 1045239 - DNA, 25 bp, Homo sapien
cggcagtccattaagggcccacagc

SEQ ID NO: 1045240 - DNA, 25 bp, Homo sapien
ttaagggcccacagcgaccagcaca

SEQ ID NO: 1045241 - DNA, 25 bp, Homo sapien
gcagtccattaagggcccacagcga

SEQ ID NO: 1045242 - DNA, 25 bp, Homo sapien
gcagttggcaaccatggctgctcac

SEQ ID NO: 1045243 - DNA, 25 bp, Homo sapien
gcagcagttggcaaccatggctgct

SEQ ID NO: 1045244 - DNA, 25 bp, Homo sapien
agcagttggcaaccatggctgctca

SEQ ID NO: 1045245 - DNA, 25 bp, Homo sapien
cagcagttggcaaccatggctgctc

SEQ ID NO: 1045246 - DNA, 25 bp, Homo sapien
cagaagatcaacttgggctgaggtc

SEQ ID NO: 1045247 - DNA, 25 bp, Homo sapien
agagacagaagatcaacttgggctg

SEQ ID NO: 1045248 - DNA, 25 bp, Homo sapien
aagagacagaagatcaacttgggct

SEQ ID NO: 1045249 - DNA, 25 bp, Homo sapien
gaagatcaacttgggctgaggtccc

SEQ ID NO: 1045250 - DNA, 25 bp, Homo sapien
ccccattgttcatgatgcaggtccg

SEQ ID NO: 1045251 - DNA, 25 bp, Homo sapien
ccattgttcatgatgcaggtccgta

SEQ ID NO: 1045252 - DNA, 25 bp, Homo sapien
aggccacccacggtcgtggccatgg

SEQ ID NO: 1045253 - DNA, 25 bp, Homo sapien
gtcgtggccatggtgccccggtacc

SEQ ID NO: 1045254 - DNA, 25 bp, Homo sapien
gagcatcactatagtgtgtgctggg

SEQ ID NO: 1045255 - DNA, 25 bp, Homo sapien
cccagagcatcactatagtgtgtgc

SEQ ID NO: 1045256 - DNA, 25 bp, Homo sapien
ggcccagagcatcactatagtgtgt

SEQ ID NO: 1045257 - DNA, 25 bp, Homo sapien
agggcccagagcatcactatagtgt

SEQ ID NO: 1045258 - DNA, 25 bp, Homo sapien
ttccaggccattccggagcgtgggc

SEQ ID NO: 1045259 - DNA, 25 bp, Homo sapien
ttgtgtggcaccaaggacctccggg

SEQ ID NO: 1045260 - DNA, 25 bp, Homo sapien
tcagggttacggcagaagttctctt

SEQ ID NO: 1045261 - DNA, 25 bp, Homo sapien
cacccggcaggatttgatgccgcag

SEQ ID NO: 1045262 - DNA, 25 bp, Homo sapien
gatgggcgtgggcttgtccctccac

SEQ ID NO: 1045263 - DNA, 25 bp, Homo sapien
agtgggttcgtggatgggcgtgggc

SEQ ID NO: 1045264 - DNA, 25 bp, Homo sapien
gggcgtgggcttgtccctccactct

SEQ ID NO: 1045265 - DNA, 25 bp, Homo sapien
gagacaaagagccagtgggttcgtg

SEQ ID NO: 1045266 - DNA, 25 bp, Homo sapien
gtattcctcgccattgcaccagaca

SEQ ID NO: 1045267 - DNA, 25 bp, Homo sapien
agcgctggcactcgcgccctgactc

SEQ ID NO: 1045268 - DNA, 25 bp, Homo sapien
cgccgcggtattcctcgccattgca

SEQ ID NO: 1045269 - DNA, 25 bp, Homo sapien
gtgcggtctaccgcgccgcggtatt

SEQ ID NO: 1045270 - DNA, 25 bp, Homo sapien
gtaatggggcgtgaagaagaccctg

SEQ ID NO: 1045271 - DNA, 25 bp, Homo sapien
taatggggcgtgaagaagaccctgg

SEQ ID NO: 1045272 - DNA, 25 bp, Homo sapien
ggatccgtagtgtagcaccatggcc

SEQ ID NO: 1045273 - DNA, 25 bp, Homo sapien
tagttgtcgtccagaccttggtcga

SEQ ID NO: 1045274 - DNA, 25 bp, Homo sapien
tctcgctcgatctgcggatccgtag

SEQ ID NO: 1045275 - DNA, 25 bp, Homo sapien
tcggagccgtcaggattccggcaat

SEQ ID NO: 1045276 - DNA, 25 bp, Homo sapien
tttctggcgtaaatcggtgctgatg

SEQ ID NO: 1045277 - DNA, 25 bp, Homo sapien
gggatttgcgcgtcccaacgctggc

SEQ ID NO: 1045278 - DNA, 25 bp, Homo sapien
acccttcccgcggaagcagctgaca

SEQ ID NO: 1045279 - DNA, 25 bp, Homo sapien
gcgtcccaacgctggcaaggtacgc

SEQ ID NO: 1045280 - DNA, 25 bp, Homo sapien
gcagcagcacgtcccaacgcccgcc

SEQ ID NO: 1045281 - DNA, 25 bp, Homo sapien
cgcagcagcacgtcccaacgcccgc

SEQ ID NO: 1045282 - DNA, 25 bp, Homo sapien
agcagcacgtcccaacgcccgcccc

SEQ ID NO: 1045283 - DNA, 25 bp, Homo sapien
gtacaacgccggatctggtagcaaa

SEQ ID NO: 1045284 - DNA, 25 bp, Homo sapien
tgtacaacgccggatctggtagcaa

SEQ ID NO: 1045285 - DNA, 25 bp, Homo sapien
cgcacgtcgtctgtacaacgccgga

SEQ ID NO: 1045286 - DNA, 25 bp, Homo sapien
tcgtctgtacaacgccggatctggt

SEQ ID NO: 1045287 - DNA, 25 bp, Homo sapien
ctctgtagcccccaagcttgggcct

SEQ ID NO: 1045288 - DNA, 25 bp, Homo sapien
cccggctctgtagcccccaagcttg

SEQ ID NO: 1045289 - DNA, 25 bp, Homo sapien
cggctctgtagcccccaagcttggg

SEQ ID NO: 1045290 - DNA, 25 bp, Homo sapien
ggctctgtagcccccaagcttgggc

SEQ ID NO: 1045291 - DNA, 25 bp, Homo sapien
actggacacccttgcgggtcttgct

SEQ ID NO: 1045292 - DNA, 25 bp, Homo sapien
cccttgcgggtcttgctgaccgtgc

SEQ ID NO: 1045293 - DNA, 25 bp, Homo sapien
cttgctgaccgtgccgcggtactgc

SEQ ID NO: 1045294 - DNA, 25 bp, Homo sapien
gcgctggcactggacacccttgcgg

SEQ ID NO: 1045295 - DNA, 25 bp, Homo sapien
cggcttgtgcggcgtctcagcggac

SEQ ID NO: 1045296 - DNA, 25 bp, Homo sapien
gcggcttgtgcggcgtctcagcgga

SEQ ID NO: 1045297 - DNA, 25 bp, Homo sapien
tgcggcttgtgcggcgtctcagcgg

SEQ ID NO: 1045298 - DNA, 25 bp, Homo sapien
tggcggggccgggagcaccagggat

SEQ ID NO: 1045299 - DNA, 25 bp, Homo sapien
ctggcggggccgggagcaccaggga

SEQ ID NO: 1045300 - DNA, 25 bp, Homo sapien
ctggtcccagacatcaaagcatgcc

SEQ ID NO: 1045301 - DNA, 25 bp, Homo sapien
acatcaaagcatgccgccccagggt

SEQ ID NO: 1045302 - DNA, 25 bp, Homo sapien
ggtcccagacatcaaagcatgccgc

SEQ ID NO: 1045303 - DNA, 25 bp, Homo sapien
agacatcaaagcatgccgccccagg

SEQ ID NO: 1045304 - DNA, 25 bp, Homo sapien
gggtccttgggtccatcgtgtagca

SEQ ID NO: 1045305 - DNA, 25 bp, Homo sapien
gaagttctcctccagttgtgcatgc

SEQ ID NO: 1045306 - DNA, 25 bp, Homo sapien
ggcccatggctatccccatctgggt

SEQ ID NO: 1045307 - DNA, 25 bp, Homo sapien
gcgtcgcagggcacagtagtcgaat

SEQ ID NO: 1045308 - DNA, 25 bp, Homo sapien
gtccaggattgatggcggctggtca

SEQ ID NO: 1045309 - DNA, 25 bp, Homo sapien
ggggggtccaggattgatggcggct

SEQ ID NO: 1045310 - DNA, 25 bp, Homo sapien
gggtccaggattgatggcggctggt

SEQ ID NO: 1045311 - DNA, 25 bp, Homo sapien
tccaggattgatggcggctggtcat

SEQ ID NO: 1045312 - DNA, 25 bp, Homo sapien
tgtgtggatgtcgtgggctaaaggg

SEQ ID NO: 1045313 - DNA, 25 bp, Homo sapien
aacccagactgtgtggatgtcgtgg

SEQ ID NO: 1045314 - DNA, 25 bp, Homo sapien
ctgtgtggatgtcgtgggctaaagg

SEQ ID NO: 1045315 - DNA, 25 bp, Homo sapien
tgaaacccagactgtgtggatgtcg

SEQ ID NO: 1045316 - DNA, 25 bp, Homo sapien
gctgatccagccgatccaccctctt

SEQ ID NO: 1045317 - DNA, 25 bp, Homo sapien
aagctgactgtccagggtgagttgc

SEQ ID NO: 1045318 - DNA, 25 bp, Homo sapien
tgatccagccgatccaccctcttgc

SEQ ID NO: 1045319 - DNA, 25 bp, Homo sapien
gctgactgtccagggtgagttgccc

SEQ ID NO: 1045320 - DNA, 25 bp, Homo sapien
ataaccacagaggacacaacctcag

SEQ ID NO: 1045321 - DNA, 25 bp, Homo sapien
tgggagacaggcagttgtgcctcac

SEQ ID NO: 1045322 - DNA, 25 bp, Homo sapien
aaccacagaggacacaacctcagct

SEQ ID NO: 1045323 - DNA, 25 bp, Homo sapien
taaccacagaggacacaacctcagc

SEQ ID NO: 1045324 - DNA, 25 bp, Homo sapien
ccatcttctggctaggacctctggg

SEQ ID NO: 1045325 - DNA, 25 bp, Homo sapien
gagaagcactgccgggcagtcagta

SEQ ID NO: 1045326 - DNA, 25 bp, Homo sapien
ggaggagaagcactgccgggcagtc

SEQ ID NO: 1045327 - DNA, 25 bp, Homo sapien
actgccgggcagtcagtatccactg

SEQ ID NO: 1045328 - DNA, 25 bp, Homo sapien
agcactgccgggcagtcagtatcca

SEQ ID NO: 1045329 - DNA, 25 bp, Homo sapien
ggagagaagctctgctaggtcattt

SEQ ID NO: 1045330 - DNA, 25 bp, Homo sapien
tgggagagaagctctgctaggtcat

SEQ ID NO: 1045331 - DNA, 25 bp, Homo sapien
gagagaagctctgctaggtcatttg

SEQ ID NO: 1045332 - DNA, 25 bp, Homo sapien
agaagctctgctaggtcatttgtga

SEQ ID NO: 1045333 - DNA, 25 bp, Homo sapien
cctcatagcccgtgagaggcatatg

SEQ ID NO: 1045334 - DNA, 25 bp, Homo sapien
catcttggctactgggacccgctgt

SEQ ID NO: 1045335 - DNA, 25 bp, Homo sapien
ttggctactgggacccgctgtaggc

SEQ ID NO: 1045336 - DNA, 25 bp, Homo sapien
ggttctggaacagggtgcccaacca

SEQ ID NO: 1045337 - DNA, 25 bp, Homo sapien
ctgaggccacaaggctcagccccac

SEQ ID NO: 1045338 - DNA, 25 bp, Homo sapien
gggtctgaggccacaaggctcagcc

SEQ ID NO: 1045339 - DNA, 25 bp, Homo sapien
gtctgaggccacaaggctcagcccc

SEQ ID NO: 1045340 - DNA, 25 bp, Homo sapien
ggtctgaggccacaaggctcagccc

SEQ ID NO: 1045341 - DNA, 25 bp, Homo sapien
agggccacacgctggttcagggtca

SEQ ID NO: 1045342 - DNA, 25 bp, Homo sapien
caccccggcctgcaatctcacactt

SEQ ID NO: 1045343 - DNA, 25 bp, Homo sapien
cccggcctgcaatctcacacttggt

SEQ ID NO: 1045344 - DNA, 25 bp, Homo sapien
cggcctgcaatctcacacttggtcc

SEQ ID NO: 1045345 - DNA, 25 bp, Homo sapien
ccccggcctgcaatctcacacttgg

SEQ ID NO: 1045346 - DNA, 25 bp, Homo sapien
acatttaggactgtgtcattacccg

SEQ ID NO: 1045347 - DNA, 25 bp, Homo sapien
cacaggggccaacagtccctcagtg

SEQ ID NO: 1045348 - DNA, 25 bp, Homo sapien
tcggtgcttgatgttacactcctgg

SEQ ID NO: 1045349 - DNA, 25 bp, Homo sapien
tgttacactcctggttggagatgac

SEQ ID NO: 1045350 - DNA, 25 bp, Homo sapien
ccagggctggcccagggccctgcca

SEQ ID NO: 1045351 - DNA, 25 bp, Homo sapien
ccttccagggctggcccagggccct

SEQ ID NO: 1045352 - DNA, 25 bp, Homo sapien
agggctggcccagggccctgccacc

SEQ ID NO: 1045353 - DNA, 25 bp, Homo sapien
gctggcccagggccctgccaccaac

SEQ ID NO: 1045354 - DNA, 25 bp, Homo sapien
actagcctgcttcatgataaaatag

SEQ ID NO: 1045355 - DNA, 25 bp, Homo sapien
gactagcctgcttcatgataaaata

SEQ ID NO: 1045356 - DNA, 25 bp, Homo sapien
tagcctgcttcatgataaaatagtt

SEQ ID NO: 1045357 - DNA, 25 bp, Homo sapien
atgactagcctgcttcatgataaaa

SEQ ID NO: 1045358 - DNA, 25 bp, Homo sapien
tgggtaaagcaggcaagtgggcccc

SEQ ID NO: 1045359 - DNA, 25 bp, Homo sapien
taaagcaggcaagtgggcccccgta

SEQ ID NO: 1045360 - DNA, 25 bp, Homo sapien
aagcaggcaagtgggcccccgtagt

SEQ ID NO: 1045361 - DNA, 25 bp, Homo sapien
aaagcaggcaagtgggcccccgtag

SEQ ID NO: 1045362 - DNA, 25 bp, Homo sapien
tacaagtcttgtccttgactgtact

SEQ ID NO: 1045363 - DNA, 25 bp, Homo sapien
ttgagtacaagtcttgtccttgact

SEQ ID NO: 1045364 - DNA, 25 bp, Homo sapien
tgagtacaagtcttgtccttgactg

SEQ ID NO: 1045365 - DNA, 25 bp, Homo sapien
agtacaagtcttgtccttgactgta

SEQ ID NO: 1045366 - DNA, 25 bp, Homo sapien
tctcttctttattactgtttacttg

SEQ ID NO: 1045367 - DNA, 25 bp, Homo sapien
tcatttaagaaagtccttggtgaag

SEQ ID NO: 1045368 - DNA, 25 bp, Homo sapien
tttcatttaagaaagtccttggtga

SEQ ID NO: 1045369 - DNA, 25 bp, Homo sapien
taattctcttctttattactgttta

SEQ ID NO: 1045370 - DNA, 25 bp, Homo sapien
tcttgtaaggtgtaacggacagact

SEQ ID NO: 1045371 - DNA, 25 bp, Homo sapien
cactagctttaggtaaacgtaagag

SEQ ID NO: 1045372 - DNA, 25 bp, Homo sapien
caaagtggttctcagagcaacagca

SEQ ID NO: 1045373 - DNA, 25 bp, Homo sapien
gaaaactcatatctgtccaccaagg

SEQ ID NO: 1045374 - DNA, 25 bp, Homo sapien
tgtggatttcttgaactcaaaccag

SEQ ID NO: 1045375 - DNA, 25 bp, Homo sapien
gagatgtacaagtgacacctcctca

SEQ ID NO: 1045376 - DNA, 25 bp, Homo sapien
tattttgggctcagccaagcatggg

SEQ ID NO: 1045377 - DNA, 25 bp, Homo sapien
ggtgagtgtatctttgcctaaaaca

SEQ ID NO: 1045378 - DNA, 25 bp, Homo sapien
accaggcaggtttggccaaccaggc

SEQ ID NO: 1045379 - DNA, 25 bp, Homo sapien
tctaaacttataccctctgcctggg

SEQ ID NO: 1045380 - DNA, 25 bp, Homo sapien
aagaacttgtcccacaaatcaggca

SEQ ID NO: 1045381 - DNA, 25 bp, Homo sapien
tgccccattcaggagtgccagcctg

SEQ ID NO: 1045382 - DNA, 25 bp, Homo sapien
aagaggttctcggagctggagcagc

SEQ ID NO: 1045383 - DNA, 25 bp, Homo sapien
gaagaggttctcggagctggagcag

SEQ ID NO: 1045384 - DNA, 25 bp, Homo sapien
agaggttctcggagctggagcagct

SEQ ID NO: 1045385 - DNA, 25 bp, Homo sapien
gcggctgcagggcaaggtcagggcc

SEQ ID NO: 1045386 - DNA, 25 bp, Homo sapien
cagcggctgcagggcaaggtcaggg

SEQ ID NO: 1045387 - DNA, 25 bp, Homo sapien
caggcccagcttgtgcagcggctgc

SEQ ID NO: 1045388 - DNA, 25 bp, Homo sapien
ccagcagcggcaggcccagcttgtg

SEQ ID NO: 1045389 - DNA, 25 bp, Homo sapien
ctagtggcgcaagctgcaggcctac

SEQ ID NO: 1045390 - DNA, 25 bp, Homo sapien
gagcgtggagttgcggaggcagctg

SEQ ID NO: 1045391 - DNA, 25 bp, Homo sapien
ctggtactccagagcgtggagttgc

SEQ ID NO: 1045392 - DNA, 25 bp, Homo sapien
caatctggtgagctggagacgcaag

SEQ ID NO: 1045393 - DNA, 25 bp, Homo sapien
ctgcaatctggtgagctggagacgc

SEQ ID NO: 1045394 - DNA, 25 bp, Homo sapien
tggaggttactgtgagccgagatcg

SEQ ID NO: 1045395 - DNA, 25 bp, Homo sapien
cccaactactcgggaggctgaggca

SEQ ID NO: 1045396 - DNA, 25 bp, Homo sapien
aggagaatcgcttgaacccgggagg

SEQ ID NO: 1045397 - DNA, 25 bp, Homo sapien
cgggcgcagtggtgtgtgtctgtaa

SEQ ID NO: 1045398 - DNA, 25 bp, Homo sapien
tgtaaagagtgaggcgtatgaggct

SEQ ID NO: 1045399 - DNA, 25 bp, Homo sapien
gatcggaagtgagaatcccagctgt

SEQ ID NO: 1045400 - DNA, 25 bp, Homo sapien
ggctggaaagggctcgggagtgcgc

SEQ ID NO: 1045401 - DNA, 25 bp, Homo sapien
gggcagagcccgaagatctcatact

SEQ ID NO: 1045402 - DNA, 25 bp, Homo sapien
ctctggcagcagattggtcggttga

SEQ ID NO: 1045403 - DNA, 25 bp, Homo sapien
gattggtcggttgagtggcagaaag

SEQ ID NO: 1045404 - DNA, 25 bp, Homo sapien
gcagcagattggtcggttgagtggc

SEQ ID NO: 1045405 - DNA, 25 bp, Homo sapien
cagattggtcggttgagtggcagaa

SEQ ID NO: 1045406 - DNA, 25 bp, Homo sapien
ttctttgggagagaacagacgcagg

SEQ ID NO: 1045407 - DNA, 25 bp, Homo sapien
taggtaaaacctccatccaatccag

SEQ ID NO: 1045408 - DNA, 25 bp, Homo sapien
ggagcttgggcatacccaagagaga

SEQ ID NO: 1045409 - DNA, 25 bp, Homo sapien
tgttatcctgtgaccaccctgtagt

SEQ ID NO: 1045410 - DNA, 25 bp, Homo sapien
accacgttgggtccactcagcctta

SEQ ID NO: 1045411 - DNA, 25 bp, Homo sapien
gaatagaatctgatactggtgggct

SEQ ID NO: 1045412 - DNA, 25 bp, Homo sapien
gtgggatctcgaccccagccgtggt

SEQ ID NO: 1045413 - DNA, 25 bp, Homo sapien
gaactctccactcgatgttttgtga

SEQ ID NO: 1045414 - DNA, 25 bp, Homo sapien
tggtcagatacccagaaaacatttc

SEQ ID NO: 1045415 - DNA, 25 bp, Homo sapien
ggctgtaaaattcggttctcagaga

SEQ ID NO: 1045416 - DNA, 25 bp, Homo sapien
tctcagagatgaacttgcagattcg

SEQ ID NO: 1045417 - DNA, 25 bp, Homo sapien
gaacttgcagattcggactttcaat

SEQ ID NO: 1045418 - DNA, 25 bp, Homo sapien
tatctacgaatgtaggcatcacttt

SEQ ID NO: 1045419 - DNA, 25 bp, Homo sapien
gttggtcaatgtggagtctttccca

SEQ ID NO: 1045420 - DNA, 25 bp, Homo sapien
tggtcaatgtggagtctttcccact

SEQ ID NO: 1045421 - DNA, 25 bp, Homo sapien
aggttggtcaatgtggagtctttcc

SEQ ID NO: 1045422 - DNA, 25 bp, Homo sapien
ggtcaatgtggagtctttcccactg

SEQ ID NO: 1045423 - DNA, 25 bp, Homo sapien
gaaaagcattcagaggtgtgggctg

SEQ ID NO: 1045424 - DNA, 25 bp, Homo sapien
ggaaaagcattcagaggtgtgggct

SEQ ID NO: 1045425 - DNA, 25 bp, Homo sapien
cctgggaaatcaggccggcgccctg

SEQ ID NO: 1045426 - DNA, 25 bp, Homo sapien
cctgcctgggaaatcaggccggcgc

SEQ ID NO: 1045427 - DNA, 25 bp, Homo sapien
gccctgcctgggaaatcaggccggc

SEQ ID NO: 1045428 - DNA, 25 bp, Homo sapien
tgcctgggaaatcaggccggcgccc

SEQ ID NO: 1045429 - DNA, 25 bp, Homo sapien
acacttctgaggaaggtggtcaggg

SEQ ID NO: 1045430 - DNA, 25 bp, Homo sapien
ttgagccactatggagaggatcaag

SEQ ID NO: 1045431 - DNA, 25 bp, Homo sapien
cgttgagccactatggagaggatca

SEQ ID NO: 1045432 - DNA, 25 bp, Homo sapien
aaatgacactcttggaaggagagaa

SEQ ID NO: 1045433 - DNA, 25 bp, Homo sapien
gttgagccactatggagaggatcaa

SEQ ID NO: 1045434 - DNA, 25 bp, Homo sapien
gagcccgaagcccgggtatgtgtcc

SEQ ID NO: 1045435 - DNA, 25 bp, Homo sapien
gggaggatgcgggagcccgaagccc

SEQ ID NO: 1045436 - DNA, 25 bp, Homo sapien
atgcgggagcccgaagcccgggtat

SEQ ID NO: 1045437 - DNA, 25 bp, Homo sapien
cgggagcccgaagcccgggtatgtg

SEQ ID NO: 1045438 - DNA, 25 bp, Homo sapien
ttcctgggaggacgagaagagccaa

SEQ ID NO: 1045439 - DNA, 25 bp, Homo sapien
gcatccctggaagggcggcgtccac

SEQ ID NO: 1045440 - DNA, 25 bp, Homo sapien
agaagagccaagagccccgacggcc

SEQ ID NO: 1045441 - DNA, 25 bp, Homo sapien
ttctacggttcctgggaggacgaga

SEQ ID NO: 1045442 - DNA, 25 bp, Homo sapien
gattcaggatcaggcccgggaactg

SEQ ID NO: 1045443 - DNA, 25 bp, Homo sapien
tatgattccctgattcaggatcagg

SEQ ID NO: 1045444 - DNA, 25 bp, Homo sapien
taggaaatatgattccctgattcag

SEQ ID NO: 1045445 - DNA, 25 bp, Homo sapien
cctgattcaggatcaggcccgggaa

SEQ ID NO: 1045446 - DNA, 25 bp, Homo sapien
gaacgctggctagttcctctgagag

SEQ ID NO: 1045447 - DNA, 25 bp, Homo sapien
gctgaacgctggctagttcctctga

SEQ ID NO: 1045448 - DNA, 25 bp, Homo sapien
cggggctgaacgctggctagttcct

SEQ ID NO: 1045449 - DNA, 25 bp, Homo sapien
tgtgctctgagcaggggcgccgggg

SEQ ID NO: 1045450 - DNA, 25 bp, Homo sapien
ttatttaggaagacatctttgtctt

SEQ ID NO: 1045451 - DNA, 25 bp, Homo sapien
atttaggaagacatctttgtctttt

SEQ ID NO: 1045452 - DNA, 25 bp, Homo sapien
tatttaggaagacatctttgtcttt

SEQ ID NO: 1045453 - DNA, 25 bp, Homo sapien
tcatagtcgtattttgccaccgtaa

SEQ ID NO: 1045454 - DNA, 25 bp, Homo sapien
tgtcatatttaagtagcctgtggct

SEQ ID NO: 1045455 - DNA, 25 bp, Homo sapien
acggaatctgattaagccctggcct

SEQ ID NO: 1045456 - DNA, 25 bp, Homo sapien
taatggagcttatgggtagaagacc

SEQ ID NO: 1045457 - DNA, 25 bp, Homo sapien
aaaatacaatgcagacgaagctaga

SEQ ID NO: 1045458 - DNA, 25 bp, Homo sapien
ctgatacatttggtcctggagatga

SEQ ID NO: 1045459 - DNA, 25 bp, Homo sapien
tagaagtctgcaggcatacggcgag

SEQ ID NO: 1045460 - DNA, 25 bp, Homo sapien
ggcgagcttccagagcatgctaaaa

SEQ ID NO: 1045461 - DNA, 25 bp, Homo sapien
aaatgttgggaaatggacggctaga

SEQ ID NO: 1045462 - DNA, 25 bp, Homo sapien
tggtcaggagtatgctcaggtaatc

SEQ ID NO: 1045463 - DNA, 25 bp, Homo sapien
tacccggaaagaagtcagagacgcc

SEQ ID NO: 1045464 - DNA, 25 bp, Homo sapien
ggatctccgaagagctgggtcgcca

SEQ ID NO: 1045465 - DNA, 25 bp, Homo sapien
agttagccgggatcacgccattttg

SEQ ID NO: 1045466 - DNA, 25 bp, Homo sapien
aattagctgggtgggccgggctcag

SEQ ID NO: 1045467 - DNA, 25 bp, Homo sapien
attagctgggtgggccgggctcagt

SEQ ID NO: 1045468 - DNA, 25 bp, Homo sapien
ccgggatcacgccattttgtactcc

SEQ ID NO: 1045469 - DNA, 25 bp, Homo sapien
tcgacccgcgccgaatgcatggccg

SEQ ID NO: 1045470 - DNA, 25 bp, Homo sapien
agcctgcccgcctggtgcagcaaga

SEQ ID NO: 1045471 - DNA, 25 bp, Homo sapien
tgctcaagagcatggccacgctgct

SEQ ID NO: 1045472 - DNA, 25 bp, Homo sapien
cagcaagatctccacgctgctcaag

SEQ ID NO: 1045473 - DNA, 25 bp, Homo sapien
ccagtagctgccctcttcacgccac

SEQ ID NO: 1045474 - DNA, 25 bp, Homo sapien
gctgccctcttcacgccaccttaga

SEQ ID NO: 1045475 - DNA, 25 bp, Homo sapien
cgccaccttagaccaagctcccaca

SEQ ID NO: 1045476 - DNA, 25 bp, Homo sapien
tcttcacgccaccttagaccaagct

SEQ ID NO: 1045477 - DNA, 25 bp, Homo sapien
ccatggcatattcaagagtcaaagc

SEQ ID NO: 1045478 - DNA, 25 bp, Homo sapien
tgaaggacgcaggtccagacagctg

SEQ ID NO: 1045479 - DNA, 25 bp, Homo sapien
cctcaagaaggaggtagtgagccct

SEQ ID NO: 1045480 - DNA, 25 bp, Homo sapien
tacatgcagaccaagaacaaactcc

SEQ ID NO: 1045481 - DNA, 25 bp, Homo sapien
tacatggacatgctgaacccagagc

SEQ ID NO: 1045482 - DNA, 25 bp, Homo sapien
agagctacatggacatgctgaaccc

SEQ ID NO: 1045483 - DNA, 25 bp, Homo sapien
atggacatgctgaacccagagctgg

SEQ ID NO: 1045484 - DNA, 25 bp, Homo sapien
gctacatggacatgctgaacccaga

SEQ ID NO: 1045485 - DNA, 25 bp, Homo sapien
ctcggcaagttgtttccaggtggtg

SEQ ID NO: 1045486 - DNA, 25 bp, Homo sapien
cttggccctcggcaagttgtttcca

SEQ ID NO: 1045487 - DNA, 25 bp, Homo sapien
ctgtctgcatgcttccaaatctggc

SEQ ID NO: 1045488 - DNA, 25 bp, Homo sapien
gctgtctgcatgcttccaaatctgg

SEQ ID NO: 1045489 - DNA, 25 bp, Homo sapien
tgtggtcagacgcacagaccgggca

SEQ ID NO: 1045490 - DNA, 25 bp, Homo sapien
tctggcaaggagagctggcttgcca

SEQ ID NO: 1045491 - DNA, 25 bp, Homo sapien
atcactgctcagctggccatccagg

SEQ ID NO: 1045492 - DNA, 25 bp, Homo sapien
tggcttgccagccaggtcactaggg

SEQ ID NO: 1045493 - DNA, 25 bp, Homo sapien
actgagccaagaccgcgccactgta

SEQ ID NO: 1045494 - DNA, 25 bp, Homo sapien
ctgggcaacaagaacaaaactccgt

SEQ ID NO: 1045495 - DNA, 25 bp, Homo sapien
ctccagcctgggcaacaagaacaaa

SEQ ID NO: 1045496 - DNA, 25 bp, Homo sapien
cactgagccaagaccgcgccactgt

SEQ ID NO: 1045497 - DNA, 25 bp, Homo sapien
ggagaaatcacaagacaggccccat

SEQ ID NO: 1045498 - DNA, 25 bp, Homo sapien
tgcagaagagagtgtaagtgtcccg

SEQ ID NO: 1045499 - DNA, 25 bp, Homo sapien
cacatatgggtaaagggagtctgcg

SEQ ID NO: 1045500 - DNA, 25 bp, Homo sapien
tggagaacctggtacgatccctgcg

SEQ ID NO: 1045501 - DNA, 25 bp, Homo sapien
cggcagcatcggcacaaggataata

SEQ ID NO: 1045502 - DNA, 25 bp, Homo sapien
aaaggtgctgggcaattgttcctgc

SEQ ID NO: 1045503 - DNA, 25 bp, Homo sapien
tagagagagtttgtccggcagcatc

SEQ ID NO: 1045504 - DNA, 25 bp, Homo sapien
caaaaagtgaggttggctgctcggc

SEQ ID NO: 1045505 - DNA, 25 bp, Homo sapien
ccctccagtctcgagccaagggtct

SEQ ID NO: 1045506 - DNA, 25 bp, Homo sapien
tcacatgtgaggcaaacatgataac

SEQ ID NO: 1045507 - DNA, 25 bp, Homo sapien
ctccagtctcgagccaagggtcttt

SEQ ID NO: 1045508 - DNA, 25 bp, Homo sapien
tttcacatgtgaggcaaacatgata

SEQ ID NO: 1045509 - DNA, 25 bp, Homo sapien
tgcattggccgggaattgaacccgg

SEQ ID NO: 1045510 - DNA, 25 bp, Homo sapien
gggtctcccacgtgggaggcgagaa

SEQ ID NO: 1045511 - DNA, 25 bp, Homo sapien
tctcccacgtgggaggcgagaattc

SEQ ID NO: 1045512 - DNA, 25 bp, Homo sapien
ccgggtctcccacgtgggaggcgag

SEQ ID NO: 1045513 - DNA, 25 bp, Homo sapien
gtagtttcatcagaatctacaaaga

SEQ ID NO: 1045514 - DNA, 25 bp, Homo sapien
gaatctgcaagttcatctctgagaa

SEQ ID NO: 1045515 - DNA, 25 bp, Homo sapien
gaacaattgaaagtccgaatctgca

SEQ ID NO: 1045516 - DNA, 25 bp, Homo sapien
tgagaaccgaattttacagccactc

SEQ ID NO: 1045517 - DNA, 25 bp, Homo sapien
tgaaggatgagcctttagaaacctc

SEQ ID NO: 1045518 - DNA, 25 bp, Homo sapien
gatggaggttttacctaggccctca

SEQ ID NO: 1045519 - DNA, 25 bp, Homo sapien
tactacagggtggtcacaggataac

SEQ ID NO: 1045520 - DNA, 25 bp, Homo sapien
gctgtgggctgttaagacgctgaaa

SEQ ID NO: 1045521 - DNA, 25 bp, Homo sapien
caagctggctaaggctgagtggacc

SEQ ID NO: 1045522 - DNA, 25 bp, Homo sapien
atccgcggtcctgaacccgctccca

SEQ ID NO: 1045523 - DNA, 25 bp, Homo sapien
cgatccgcggtcctgaacccgctcc

SEQ ID NO: 1045524 - DNA, 25 bp, Homo sapien
ccgctcccagggcacgggaactcct

SEQ ID NO: 1045525 - DNA, 25 bp, Homo sapien
ttccgatccgcggtcctgaacccgc

SEQ ID NO: 1045526 - DNA, 25 bp, Homo sapien
cacagcctcatacgcctcactcttt

SEQ ID NO: 1045527 - DNA, 25 bp, Homo sapien
ccgacacagcctcatacgcctcact

SEQ ID NO: 1045528 - DNA, 25 bp, Homo sapien
gacacagcctcatacgcctcactct

SEQ ID NO: 1045529 - DNA, 25 bp, Homo sapien
atacgcctcactctttacacacacg

SEQ ID NO: 1045530 - DNA, 25 bp, Homo sapien
catccggagtgcaatggataagcct

SEQ ID NO: 1045531 - DNA, 25 bp, Homo sapien
agtgcaatggataagcctcgccctg

SEQ ID NO: 1045532 - DNA, 25 bp, Homo sapien
caggggaaagcgcgaacgcagtccc

SEQ ID NO: 1045533 - DNA, 25 bp, Homo sapien
gggaaagcgcgaacgcagtccccca

SEQ ID NO: 1045534 - DNA, 25 bp, Homo sapien
tagccatactcagtgggtaaaagcc

SEQ ID NO: 1045535 - DNA, 25 bp, Homo sapien
ggactggatccttgttaacacgacc

SEQ ID NO: 1045536 - DNA, 25 bp, Homo sapien
tcatgtatcaccaaacagggactgg

SEQ ID NO: 1045537 - DNA, 25 bp, Homo sapien
taatagaacatagggaacatgagcc

SEQ ID NO: 1045538 - DNA, 25 bp, Homo sapien
gtactaagatgtcttttagatacag

SEQ ID NO: 1045539 - DNA, 25 bp, Homo sapien
ttcttcctgtactaagatgtctttt

SEQ ID NO: 1045540 - DNA, 25 bp, Homo sapien
cctgtactaagatgtcttttagata

SEQ ID NO: 1045541 - DNA, 25 bp, Homo sapien
cttcctgtactaagatgtcttttag

SEQ ID NO: 1045542 - DNA, 25 bp, Homo sapien
ggcttactgcactcaccacttgctg

SEQ ID NO: 1045543 - DNA, 25 bp, Homo sapien
tctgacaatgacagacatgggctgc

SEQ ID NO: 1045544 - DNA, 25 bp, Homo sapien
tccggctccttgtacattagggaag

SEQ ID NO: 1045545 - DNA, 25 bp, Homo sapien
gatgtcaccacacggtaggaagggt

SEQ ID NO: 1045546 - DNA, 25 bp, Homo sapien
ctcttgtcgtgcccccggcccgcga

SEQ ID NO: 1045547 - DNA, 25 bp, Homo sapien
ttgtcgtgcccccggcccgcgacaa

SEQ ID NO: 1045548 - DNA, 25 bp, Homo sapien
gcctcttgtcgtgcccccggcccgc

SEQ ID NO: 1045549 - DNA, 25 bp, Homo sapien
tcttgtcgtgcccccggcccgcgac

SEQ ID NO: 1045550 - DNA, 25 bp, Homo sapien
cctgcaggccgctgcgtccgggcag

SEQ ID NO: 1045551 - DNA, 25 bp, Homo sapien
tatttgtctcatgggctgagcgagg

SEQ ID NO: 1045552 - DNA, 25 bp, Homo sapien
tgccgctgctggccctccaggtagg

SEQ ID NO: 1045553 - DNA, 25 bp, Homo sapien
ccctgcagccgctgcacaagctggg

SEQ ID NO: 1045554 - DNA, 25 bp, Homo sapien
tgggcctgccgctgctggccctcca

SEQ ID NO: 1045555 - DNA, 25 bp, Homo sapien
gctggccctccaggtaggcctgcag

SEQ ID NO: 1045556 - DNA, 25 bp, Homo sapien
gctccgagaacctcttcttgtactg

SEQ ID NO: 1045557 - DNA, 25 bp, Homo sapien
cagctctccggatctctccaacagc

SEQ ID NO: 1045558 - DNA, 25 bp, Homo sapien
gctccagctctccggatctctccaa

SEQ ID NO: 1045559 - DNA, 25 bp, Homo sapien
gctgctccagctccgagaacctctt

SEQ ID NO: 1045560 - DNA, 25 bp, Homo sapien
agaggttaaagcatcaggctgggca

SEQ ID NO: 1045561 - DNA, 25 bp, Homo sapien
ggcagagaggttaaagcatcaggct

SEQ ID NO: 1045562 - DNA, 25 bp, Homo sapien
cagagaggttaaagcatcaggctgg

SEQ ID NO: 1045563 - DNA, 25 bp, Homo sapien
gagaggttaaagcatcaggctgggc

SEQ ID NO: 1045564 - DNA, 25 bp, Homo sapien
acaggggatcagtaggcgctcgccc

SEQ ID NO: 1045565 - DNA, 25 bp, Homo sapien
ggcacaggggatcagtaggcgctcg

SEQ ID NO: 1045566 - DNA, 25 bp, Homo sapien
cacaggggatcagtaggcgctcgcc

SEQ ID NO: 1045567 - DNA, 25 bp, Homo sapien
caggggatcagtaggcgctcgccca

SEQ ID NO: 1045568 - DNA, 25 bp, Homo sapien
ctggttggccaaacctgcctggtcc

SEQ ID NO: 1045569 - DNA, 25 bp, Homo sapien
ggttggccaaacctgcctggtccag

SEQ ID NO: 1045570 - DNA, 25 bp, Homo sapien
tcactcagagcctggttggccaaac

SEQ ID NO: 1045571 - DNA, 25 bp, Homo sapien
tcagagcctggttggccaaacctgc

SEQ ID NO: 1045572 - DNA, 25 bp, Homo sapien
cttgcagctgcgagtccagtcactg

SEQ ID NO: 1045573 - DNA, 25 bp, Homo sapien
agctccttgcagctgcgagtccagt

SEQ ID NO: 1045574 - DNA, 25 bp, Homo sapien
cagctgcgagtccagtcactggtca

SEQ ID NO: 1045575 - DNA, 25 bp, Homo sapien
tgcgagtccagtcactggtcacctt

SEQ ID NO: 1045576 - DNA, 25 bp, Homo sapien
gagagtctcactagcataattgtgc

SEQ ID NO: 1045577 - DNA, 25 bp, Homo sapien
tgagaagtgcaaacattattggaaa

SEQ ID NO: 1045578 - DNA, 25 bp, Homo sapien
tatcttcctcttatatcgccggcct

SEQ ID NO: 1045579 - DNA, 25 bp, Homo sapien
taaccgttcaagtgctcctatttcc

SEQ ID NO: 1045580 - DNA, 25 bp, Homo sapien
taaggaaactatctcttggccatcc

SEQ ID NO: 1045581 - DNA, 25 bp, Homo sapien
gttcgttttatagttccaggccagc

SEQ ID NO: 1045582 - DNA, 25 bp, Homo sapien
tagacggctatcctactgtgagtcc

SEQ ID NO: 1045583 - DNA, 25 bp, Homo sapien
gaaactcagtgtgggctacatacaa

SEQ ID NO: 1045584 - DNA, 25 bp, Homo sapien
ctctggagcttgtcacagggggatt

SEQ ID NO: 1045585 - DNA, 25 bp, Homo sapien
gagagccatacaccacaagaaacaa

SEQ ID NO: 1045586 - DNA, 25 bp, Homo sapien
cctctccggctgataggttcttaat

SEQ ID NO: 1045587 - DNA, 25 bp, Homo sapien
tccacatccctgagactgacaatgg

SEQ ID NO: 1045588 - DNA, 25 bp, Homo sapien
gcagctttgaagtgcggttcaccat

SEQ ID NO: 1045589 - DNA, 25 bp, Homo sapien
caagcagctttgaagtgcggttcac

SEQ ID NO: 1045590 - DNA, 25 bp, Homo sapien
tttcaagcagctttgaagtgcggtt

SEQ ID NO: 1045591 - DNA, 25 bp, Homo sapien
agcagctttgaagtgcggttcacca

SEQ ID NO: 1045592 - DNA, 25 bp, Homo sapien
cctctccgttgccatttctcctggg

SEQ ID NO: 1045593 - DNA, 25 bp, Homo sapien
tttccctcaaatgggtgctcctgaa

SEQ ID NO: 1045594 - DNA, 25 bp, Homo sapien
ttcacccaaaggatgtgggagggcc

SEQ ID NO: 1045595 - DNA, 25 bp, Homo sapien
cacccaaaggatgtgggagggcctt

SEQ ID NO: 1045596 - DNA, 25 bp, Homo sapien
tattgccttgccaaccatcctaatg

SEQ ID NO: 1045597 - DNA, 25 bp, Homo sapien
ggccacaatgatgctaatgatgatg

SEQ ID NO: 1045598 - DNA, 25 bp, Homo sapien
tcagtagtgccaacctattgccttg

SEQ ID NO: 1045599 - DNA, 25 bp, Homo sapien
ggcagtgttgatgctggatatgtta

SEQ ID NO: 1045600 - DNA, 25 bp, Homo sapien
tttggctgggtgtagggcttccgtg

SEQ ID NO: 1045601 - DNA, 25 bp, Homo sapien
ggcttccgtggtgtagctggcccat

SEQ ID NO: 1045602 - DNA, 25 bp, Homo sapien
cagtgggcccactgcatttcccaaa

SEQ ID NO: 1045603 - DNA, 25 bp, Homo sapien
tttgggtttgacttgccagtgagca

SEQ ID NO: 1045604 - DNA, 25 bp, Homo sapien
gggaggttgtgtagcaggcttctgc

SEQ ID NO: 1045605 - DNA, 25 bp, Homo sapien
gaccagggaggttgtgtagcaggct

SEQ ID NO: 1045606 - DNA, 25 bp, Homo sapien
gggaccagggaggttgtgtagcagg

SEQ ID NO: 1045607 - DNA, 25 bp, Homo sapien
ccagggaggttgtgtagcaggcttc

SEQ ID NO: 1045608 - DNA, 25 bp, Homo sapien
gggagggcagatccacagtgcgaga

SEQ ID NO: 1045609 - DNA, 25 bp, Homo sapien
gaatttctttccacaggaggagcct

SEQ ID NO: 1045610 - DNA, 25 bp, Homo sapien
cagatccacagtgcgagagaagctt

SEQ ID NO: 1045611 - DNA, 25 bp, Homo sapien
gaagcttctttgaactggtgggaga

SEQ ID NO: 1045612 - DNA, 25 bp, Homo sapien
tcctgttcagcctcattcttgcttt

SEQ ID NO: 1045613 - DNA, 25 bp, Homo sapien
tcatagcccaggtcgtggaggtcca

SEQ ID NO: 1045614 - DNA, 25 bp, Homo sapien
cgggactggtggattcctcctgttc

SEQ ID NO: 1045615 - DNA, 25 bp, Homo sapien
cttgctttgaccacaagtctcatag

SEQ ID NO: 1045616 - DNA, 25 bp, Homo sapien
taaaagttggatgtgctgttgtggc

SEQ ID NO: 1045617 - DNA, 25 bp, Homo sapien
aataaaagttggatgtgctgttgtg

SEQ ID NO: 1045618 - DNA, 25 bp, Homo sapien
agttggatgtgctgttgtggccact

SEQ ID NO: 1045619 - DNA, 25 bp, Homo sapien
aaagttggatgtgctgttgtggcca

SEQ ID NO: 1045620 - DNA, 25 bp, Homo sapien
tccttgcggctgctgtgctcctcat

SEQ ID NO: 1045621 - DNA, 25 bp, Homo sapien
catttccttgcggctgctgtgctcc

SEQ ID NO: 1045622 - DNA, 25 bp, Homo sapien
atttccttgcggctgctgtgctcct

SEQ ID NO: 1045623 - DNA, 25 bp, Homo sapien
ttgcggctgctgtgctcctcatgct

SEQ ID NO: 1045624 - DNA, 25 bp, Homo sapien
tcagccccggcgcccctgctcagag

SEQ ID NO: 1045625 - DNA, 25 bp, Homo sapien
agccccggcgcccctgctcagagca

SEQ ID NO: 1045626 - DNA, 25 bp, Homo sapien
ccccggcgcccctgctcagagcaca

SEQ ID NO: 1045627 - DNA, 25 bp, Homo sapien
cccggcgcccctgctcagagcacag

SEQ ID NO: 1045628 - DNA, 25 bp, Homo sapien
gacactatgaggtgaagacccctcc

SEQ ID NO: 1045629 - DNA, 25 bp, Homo sapien
cctggagagtagaaagccccagtgc

SEQ ID NO: 1045630 - DNA, 25 bp, Homo sapien
acactatgaggtgaagacccctcca

SEQ ID NO: 1045631 - DNA, 25 bp, Homo sapien
agccccagtgccatcagacagccac

SEQ ID NO: 1045632 - DNA, 25 bp, Homo sapien
tcaattttttgggagctgggcctcc

SEQ ID NO: 1045633 - DNA, 25 bp, Homo sapien
ttgggagctgggcctccagctggga

SEQ ID NO: 1045634 - DNA, 25 bp, Homo sapien
caattttttgggagctgggcctcca

SEQ ID NO: 1045635 - DNA, 25 bp, Homo sapien
ggagctgggcctccagctgggatac

SEQ ID NO: 1045636 - DNA, 25 bp, Homo sapien
ccaggccatgaggctgatctcagct

SEQ ID NO: 1045637 - DNA, 25 bp, Homo sapien
ccatgaggctgatctcagctcctca

SEQ ID NO: 1045638 - DNA, 25 bp, Homo sapien
ggccatgaggctgatctcagctcct

SEQ ID NO: 1045639 - DNA, 25 bp, Homo sapien
caggccatgaggctgatctcagctc

SEQ ID NO: 1045640 - DNA, 25 bp, Homo sapien
ctggtgagcctctctgtcagctggc

SEQ ID NO: 1045641 - DNA, 25 bp, Homo sapien
gttcccacgcagtctcgaaccagag

SEQ ID NO: 1045642 - DNA, 25 bp, Homo sapien
ttcccacgcagtctcgaaccagaga

SEQ ID NO: 1045643 - DNA, 25 bp, Homo sapien
tgttcccacgcagtctcgaaccaga

SEQ ID NO: 1045644 - DNA, 25 bp, Homo sapien
gcgtgggaggcgagaattctaccac

SEQ ID NO: 1045645 - DNA, 25 bp, Homo sapien
tgcattggccgggaattgaacccgg

SEQ ID NO: 1045646 - DNA, 25 bp, Homo sapien
attctaccactgaaccaccaatgcc

SEQ ID NO: 1045647 - DNA, 25 bp, Homo sapien
ccgggtctcccgcgtgggaggcgag

SEQ ID NO: 1045648 - DNA, 25 bp, Homo sapien
tgagggtctactggccacctctgcg

SEQ ID NO: 1045649 - DNA, 25 bp, Homo sapien
ccgcggtcgctgacgatgttagcaa

SEQ ID NO: 1045650 - DNA, 25 bp, Homo sapien
tagcaaattcggttcacggtgtctg

SEQ ID NO: 1045651 - DNA, 25 bp, Homo sapien
ttgccagacacacggaatttctcgg

SEQ ID NO: 1045652 - DNA, 25 bp, Homo sapien
tcaggcctctttcggttgcagagaa

SEQ ID NO: 1045653 - DNA, 25 bp, Homo sapien
tgagaaccactgatgcgcgttgtcc

SEQ ID NO: 1045654 - DNA, 25 bp, Homo sapien
cactttggtcttgtccgcaacggac

SEQ ID NO: 1045655 - DNA, 25 bp, Homo sapien
tcgtgacctagtgtcccagcgtgga

SEQ ID NO: 1045656 - DNA, 25 bp, Homo sapien
tcttctgtcagaagcgacagcttcc

SEQ ID NO: 1045657 - DNA, 25 bp, Homo sapien
acaccgagggctccgcgagggacac

SEQ ID NO: 1045658 - DNA, 25 bp, Homo sapien
aagagcctgcaagcgacacaccgag

SEQ ID NO: 1045659 - DNA, 25 bp, Homo sapien
gagttgcagcgacccggccgcagct

SEQ ID NO: 1045660 - DNA, 25 bp, Homo sapien
gtgaaagcgccgaatcctagccact

SEQ ID NO: 1045661 - DNA, 25 bp, Homo sapien
cggcggtgaaagcgccgaatcctag

SEQ ID NO: 1045662 - DNA, 25 bp, Homo sapien
ccgggccgcggcggtgaaagcgccg

SEQ ID NO: 1045663 - DNA, 25 bp, Homo sapien
gccgcggcggtgaaagcgccgaatc

SEQ ID NO: 1045664 - DNA, 25 bp, Homo sapien
tgagataaacaggaacggtgtgtcg

SEQ ID NO: 1045665 - DNA, 25 bp, Homo sapien
gaggaggctccgctgactggctggt

SEQ ID NO: 1045666 - DNA, 25 bp, Homo sapien
tgggcttattgggtgcagctccacg

SEQ ID NO: 1045667 - DNA, 25 bp, Homo sapien
tctctaaagctgctcccgcggatga

SEQ ID NO: 1045668 - DNA, 25 bp, Homo sapien
caaggcctaacgagcgccttcgctg

SEQ ID NO: 1045669 - DNA, 25 bp, Homo sapien
cccctaacaaattcgcgggcatcgc

SEQ ID NO: 1045670 - DNA, 25 bp, Homo sapien
aattcgcgggcatcgcctccggtcg

SEQ ID NO: 1045671 - DNA, 25 bp, Homo sapien
taacaaattcgcgggcatcgcctcc

SEQ ID NO: 1045672 - DNA, 25 bp, Homo sapien
caaattcgcgggcatcgcctccggt

SEQ ID NO: 1045673 - DNA, 25 bp, Homo sapien
tcccctgagcttacaatggactcgg

SEQ ID NO: 1045674 - DNA, 25 bp, Homo sapien
cctggccggtcgctcagggtcacca

SEQ ID NO: 1045675 - DNA, 25 bp, Homo sapien
tctccaccaaagattccaccgacag

SEQ ID NO: 1045676 - DNA, 25 bp, Homo sapien
ccatcgcttcgacgtcctagtgctg

SEQ ID NO: 1045677 - DNA, 25 bp, Homo sapien
gatgaagaagcttcactctgggaga

SEQ ID NO: 1045678 - DNA, 25 bp, Homo sapien
ttattgcagtctttctggttgagat

SEQ ID NO: 1045679 - DNA, 25 bp, Homo sapien
tattgcagtctttctggttgagata

SEQ ID NO: 1045680 - DNA, 25 bp, Homo sapien
tttattgcagtctttctggttgaga

SEQ ID NO: 1045681 - DNA, 25 bp, Homo sapien
cttatggttaacagccgaacgcgct

SEQ ID NO: 1045682 - DNA, 25 bp, Homo sapien
gtccctgggtggtctctaaccacca

SEQ ID NO: 1045683 - DNA, 25 bp, Homo sapien
tctctaaccaccaaccttatggtta

SEQ ID NO: 1045684 - DNA, 25 bp, Homo sapien
ttatggttaacagccgaacgcgcta

SEQ ID NO: 1045685 - DNA, 25 bp, Homo sapien
cggcccagaggaggcggactttctc

SEQ ID NO: 1045686 - DNA, 25 bp, Homo sapien
gaggacgcggcccagaggaggcgga

SEQ ID NO: 1045687 - DNA, 25 bp, Homo sapien
cagaggaggcggactttctcttcat

SEQ ID NO: 1045688 - DNA, 25 bp, Homo sapien
agcgacgtgaggacgcggcccagag

SEQ ID NO: 1045689 - DNA, 25 bp, Homo sapien
tgtcgaatgaattcattgtcgcctt

SEQ ID NO: 1045690 - DNA, 25 bp, Homo sapien
cgaatgaattcattgtcgcctttag

SEQ ID NO: 1045691 - DNA, 25 bp, Homo sapien
aatgaattcattgtcgcctttagct

SEQ ID NO: 1045692 - DNA, 25 bp, Homo sapien
acttgtcgaatgaattcattgtcgc

SEQ ID NO: 1045693 - DNA, 25 bp, Homo sapien
agtcgctctcggggccgcggaggag

SEQ ID NO: 1045694 - DNA, 25 bp, Homo sapien
gatcctgtgttccgcacgggggctc

SEQ ID NO: 1045695 - DNA, 25 bp, Homo sapien
gcccagtcgctctcggggccgcgga

SEQ ID NO: 1045696 - DNA, 25 bp, Homo sapien
ctcggggccgcggaggagcttccgc

SEQ ID NO: 1045697 - DNA, 25 bp, Homo sapien
tggagccagaacagcggaattgcct

SEQ ID NO: 1045698 - DNA, 25 bp, Homo sapien
ccagaacagcggaattgccttcgcc

SEQ ID NO: 1045699 - DNA, 25 bp, Homo sapien
gagccagaacagcggaattgccttc

SEQ ID NO: 1045700 - DNA, 25 bp, Homo sapien
gccagaacagcggaattgccttcgc

SEQ ID NO: 1045701 - DNA, 25 bp, Homo sapien
cgcccggcaggaccaccgagcaagg

SEQ ID NO: 1045702 - DNA, 25 bp, Homo sapien
accagagagattagagcggtgagtc

SEQ ID NO: 1045703 - DNA, 25 bp, Homo sapien
caggaccaccgagcaaggccttgga

SEQ ID NO: 1045704 - DNA, 25 bp, Homo sapien
gtcgcgccggtcacgttggacgcct

SEQ ID NO: 1045705 - DNA, 25 bp, Homo sapien
ctgggtgggctcgaaccaccaatct

SEQ ID NO: 1045706 - DNA, 25 bp, Homo sapien
gctcgaaccaccaatctttcggtta

SEQ ID NO: 1045707 - DNA, 25 bp, Homo sapien
gtgggctcgaaccaccaatctttcg

SEQ ID NO: 1045708 - DNA, 25 bp, Homo sapien
ccaccaatctttcggttaacagccg

SEQ ID NO: 1045709 - DNA, 25 bp, Homo sapien
catccggagtgcaatggataagcct

SEQ ID NO: 1045710 - DNA, 25 bp, Homo sapien
caggggaaagcgcgaacgcagtccc

SEQ ID NO: 1045711 - DNA, 25 bp, Homo sapien
gggaaagcgcgaacgcagtccccca

SEQ ID NO: 1045712 - DNA, 25 bp, Homo sapien
agtgcaatggataagcctcgccctg

SEQ ID NO: 1045713 - DNA, 25 bp, Homo sapien
ctgtaggattaacatttaagacgcc

SEQ ID NO: 1045714 - DNA, 25 bp, Homo sapien
aaaaagatatgacccttagcgtaca

SEQ ID NO: 1045715 - DNA, 25 bp, Homo sapien
ccagccctccactgtaggattaaca

SEQ ID NO: 1045716 - DNA, 25 bp, Homo sapien
catttaagacgccaaccaagacaca

SEQ ID NO: 1045717 - DNA, 25 bp, Homo sapien
gattccattgcttatatgtgatcat

SEQ ID NO: 1045718 - DNA, 25 bp, Homo sapien
aagggctgaacttccttaatgttct

SEQ ID NO: 1045719 - DNA, 25 bp, Homo sapien
tgctgattccattgcttatatgtga

SEQ ID NO: 1045720 - DNA, 25 bp, Homo sapien
taagggctgaacttccttaatgttc

SEQ ID NO: 1045721 - DNA, 25 bp, Homo sapien
aggcagataattctcaggttttgcc

SEQ ID NO: 1045722 - DNA, 25 bp, Homo sapien
taattctcaggttttgccccacaga

SEQ ID NO: 1045723 - DNA, 25 bp, Homo sapien
agatttgtaatcctgggaggaaaca

SEQ ID NO: 1045724 - DNA, 25 bp, Homo sapien
ttctcaggttttgccccacagaatc

SEQ ID NO: 1045725 - DNA, 25 bp, Homo sapien
cctgaccttgcagccaagcaagtac

SEQ ID NO: 1045726 - DNA, 25 bp, Homo sapien
tctaccttattactacaagttacaa

SEQ ID NO: 1045727 - DNA, 25 bp, Homo sapien
aaaataagagacaacaacatagcca

SEQ ID NO: 1045728 - DNA, 25 bp, Homo sapien
gccaagcaagtacaggaaaatactt

SEQ ID NO: 1045729 - DNA, 25 bp, Homo sapien
caatggagaccggaactcggttcac

SEQ ID NO: 1045730 - DNA, 25 bp, Homo sapien
tccaatggagaccggaactcggttc

SEQ ID NO: 1045731 - DNA, 25 bp, Homo sapien
ccaatggagaccggaactcggttca

SEQ ID NO: 1045732 - DNA, 25 bp, Homo sapien
catacatacatcgtgaatgtcttag

SEQ ID NO: 1045733 - DNA, 25 bp, Homo sapien
taaaatgtgcccaacctgagggtca

SEQ ID NO: 1045734 - DNA, 25 bp, Homo sapien
cctacctgctgacatgtaatttgtg

SEQ ID NO: 1045735 - DNA, 25 bp, Homo sapien
gattcatcttaagttccaccgacag

SEQ ID NO: 1045736 - DNA, 25 bp, Homo sapien
caggagggagctcgttcaaaatgcc

SEQ ID NO: 1045737 - DNA, 25 bp, Homo sapien
caggcttaagtctgtgtgaaaatca

SEQ ID NO: 1045738 - DNA, 25 bp, Homo sapien
aaaatgcccactccagagacgctgc

SEQ ID NO: 1045739 - DNA, 25 bp, Homo sapien
cagtcaatcgtcttcccaagggagc

SEQ ID NO: 1045740 - DNA, 25 bp, Homo sapien
ggagctaccccgactctcagctaaa

SEQ ID NO: 1045741 - DNA, 25 bp, Homo sapien
cactttctgagggagctaccccgac

SEQ ID NO: 1045742 - DNA, 25 bp, Homo sapien
cagctaaagaggtccctccagtggc

SEQ ID NO: 1045743 - DNA, 25 bp, Homo sapien
gactctcagctaaagaggtccctcc

SEQ ID NO: 1045744 - DNA, 25 bp, Homo sapien
acagcgggtaagtgttggctattac

SEQ ID NO: 1045745 - DNA, 25 bp, Homo sapien
agtattattggctctttctagtccc

SEQ ID NO: 1045746 - DNA, 25 bp, Homo sapien
tactgttatcattactatcatgagt

SEQ ID NO: 1045747 - DNA, 25 bp, Homo sapien
ttaattactacctgcagttcaacag

SEQ ID NO: 1045748 - DNA, 25 bp, Homo sapien
cccagccaggcgcaggcactcatgc

SEQ ID NO: 1045749 - DNA, 25 bp, Homo sapien
ctggataaccgtctctagtgtcagc

SEQ ID NO: 1045750 - DNA, 25 bp, Homo sapien
gaggctgtgggcatgcctccagccc

SEQ ID NO: 1045751 - DNA, 25 bp, Homo sapien
cagccccaagctcatgggggggagg

SEQ ID NO: 1045752 - DNA, 25 bp, Homo sapien
taaccgtctctagtgtcagctccac

SEQ ID NO: 1045753 - DNA, 25 bp, Homo sapien
ggttgcgggtgacaatctccctgat

SEQ ID NO: 1045754 - DNA, 25 bp, Homo sapien
gaggttgcgggtgacaatctccctg

SEQ ID NO: 1045755 - DNA, 25 bp, Homo sapien
gagaggttgcgggtgacaatctccc

SEQ ID NO: 1045756 - DNA, 25 bp, Homo sapien
gggagaggttgcgggtgacaatctc

SEQ ID NO: 1045757 - DNA, 25 bp, Homo sapien
gacttccgcaaaaccctggtctgag

SEQ ID NO: 1045758 - DNA, 25 bp, Homo sapien
ttcctgtatcttgggttcagccagc

SEQ ID NO: 1045759 - DNA, 25 bp, Homo sapien
tttggggttcacatctctgcagcag

SEQ ID NO: 1045760 - DNA, 25 bp, Homo sapien
ggaaacggatggacggcgccatcca

SEQ ID NO: 1045761 - DNA, 25 bp, Homo sapien
taatggcgagctcatcgcgctcggc

SEQ ID NO: 1045762 - DNA, 25 bp, Homo sapien
gtacttaatggcgagctcatcgcgc

SEQ ID NO: 1045763 - DNA, 25 bp, Homo sapien
tggcgagctcatcgcgctcggcacg

SEQ ID NO: 1045764 - DNA, 25 bp, Homo sapien
tctcgctgaccgcattgtacttaat

SEQ ID NO: 1045765 - DNA, 25 bp, Homo sapien
agtccaccacctgggcggcacccac

SEQ ID NO: 1045766 - DNA, 25 bp, Homo sapien
ctagtccaccacctgggcggcaccc

SEQ ID NO: 1045767 - DNA, 25 bp, Homo sapien
tagtccaccacctgggcggcaccca

SEQ ID NO: 1045768 - DNA, 25 bp, Homo sapien
ccaatagggaggagctaactgtgac

SEQ ID NO: 1045769 - DNA, 25 bp, Homo sapien
tctatgagccacagacaaagcaagg

SEQ ID NO: 1045770 - DNA, 25 bp, Homo sapien
gctcatctcgggtcttgggtccagg

SEQ ID NO: 1045771 - DNA, 25 bp, Homo sapien
caggcctgtcaagcgtctgtgccaa

SEQ ID NO: 1045772 - DNA, 25 bp, Homo sapien
tctgatgctagccctgcactcacca

SEQ ID NO: 1045773 - DNA, 25 bp, Homo sapien
gggcacctggcagcgacaacacccc

SEQ ID NO: 1045774 - DNA, 25 bp, Homo sapien
atgctagccctgcactcaccatctg

SEQ ID NO: 1045775 - DNA, 25 bp, Homo sapien
tgatgctagccctgcactcaccatc

SEQ ID NO: 1045776 - DNA, 25 bp, Homo sapien
atagaaccctctcaactcccttaag

SEQ ID NO: 1045777 - DNA, 25 bp, Homo sapien
catagaaccctctcaactcccttaa

SEQ ID NO: 1045778 - DNA, 25 bp, Homo sapien
ccatagaaccctctcaactccctta

SEQ ID NO: 1045779 - DNA, 25 bp, Homo sapien
gcttccatcccgcacatcctcagac

SEQ ID NO: 1045780 - DNA, 25 bp, Homo sapien
cagcatccggcccaagactccatct

SEQ ID NO: 1045781 - DNA, 25 bp, Homo sapien
cccgcacatcctcagacccctgtgg

SEQ ID NO: 1045782 - DNA, 25 bp, Homo sapien
gcatccggcccaagactccatctta

SEQ ID NO: 1045783 - DNA, 25 bp, Homo sapien
cagggaagggccctgggtgagagtc

SEQ ID NO: 1045784 - DNA, 25 bp, Homo sapien
ggaagggccctgggtgagagtcctg

SEQ ID NO: 1045785 - DNA, 25 bp, Homo sapien
agggccctgggtgagagtcctgggc

SEQ ID NO: 1045786 - DNA, 25 bp, Homo sapien
gcagggaagggccctgggtgagagt

SEQ ID NO: 1045787 - DNA, 25 bp, Homo sapien
tccccaggctccagccgcagagcct

SEQ ID NO: 1045788 - DNA, 25 bp, Homo sapien
gctccccaggctccagccgcagagc

SEQ ID NO: 1045789 - DNA, 25 bp, Homo sapien
tgggctcctgcgtctccagctcccc

SEQ ID NO: 1045790 - DNA, 25 bp, Homo sapien
gctcctgcgtctccagctccccagg

SEQ ID NO: 1045791 - DNA, 25 bp, Homo sapien
ggcctgcagcttgcgccggtaggag

SEQ ID NO: 1045792 - DNA, 25 bp, Homo sapien
tggtaggcctgcagcttgcgccggt

SEQ ID NO: 1045793 - DNA, 25 bp, Homo sapien
agcttgcgccggtaggaggcctgct

SEQ ID NO: 1045794 - DNA, 25 bp, Homo sapien
ttgcgccggtaggaggcctgctcct

SEQ ID NO: 1045795 - DNA, 25 bp, Homo sapien
tgctccagctctccggatctctcca

SEQ ID NO: 1045796 - DNA, 25 bp, Homo sapien
gctgctccagctccgagcacctctt

SEQ ID NO: 1045797 - DNA, 25 bp, Homo sapien
tccagctctccggatctctccagca

SEQ ID NO: 1045798 - DNA, 25 bp, Homo sapien
gctccgagcacctcttcttgtactg

SEQ ID NO: 1045799 - DNA, 25 bp, Homo sapien
ctcctccagccggatgagggcgctt

SEQ ID NO: 1045800 - DNA, 25 bp, Homo sapien
ctccagccggatgagggcgctttcc

SEQ ID NO: 1045801 - DNA, 25 bp, Homo sapien
cggatgagggcgctttccaggtctt

SEQ ID NO: 1045802 - DNA, 25 bp, Homo sapien
ccagccggatgagggcgctttccag

SEQ ID NO: 1045803 - DNA, 25 bp, Homo sapien
tcacctttcgtatgtcctcactcag

SEQ ID NO: 1045804 - DNA, 25 bp, Homo sapien
tcctcactcagagcctggttggccg

SEQ ID NO: 1045805 - DNA, 25 bp, Homo sapien
ttgcggcagcgtgtccagtcattgg

SEQ ID NO: 1045806 - DNA, 25 bp, Homo sapien
gccgagcctgcctggtccagctgtt

SEQ ID NO: 1045807 - DNA, 25 bp, Homo sapien
ctcgttgctgaagtaggcgttgaag

SEQ ID NO: 1045808 - DNA, 25 bp, Homo sapien
actgtgctcgttgctgaagtaggcg

SEQ ID NO: 1045809 - DNA, 25 bp, Homo sapien
ggaggagcaggcgactgtgctcgtt

SEQ ID NO: 1045810 - DNA, 25 bp, Homo sapien
aggcgactgtgctcgttgctgaagt

SEQ ID NO: 1045811 - DNA, 25 bp, Homo sapien
ccctggaaggtcacttaagaaactg

SEQ ID NO: 1045812 - DNA, 25 bp, Homo sapien
tatgtaagataaccctggaaggtca

SEQ ID NO: 1045813 - DNA, 25 bp, Homo sapien
tatttgattatgtaagataaccctg

SEQ ID NO: 1045814 - DNA, 25 bp, Homo sapien
tcacttaagaaactgataggccagg

SEQ ID NO: 1045815 - DNA, 25 bp, Homo sapien
cgcctcctggacagctcgtgatgtc

SEQ ID NO: 1045816 - DNA, 25 bp, Homo sapien
tcctggacagctcgtgatgtccggg

SEQ ID NO: 1045817 - DNA, 25 bp, Homo sapien
agctcgtgatgtccgggccagctcc

SEQ ID NO: 1045818 - DNA, 25 bp, Homo sapien
tggacagctcgtgatgtccgggcca

SEQ ID NO: 1045819 - DNA, 25 bp, Homo sapien
attctgcttctcaagacgcttcact

SEQ ID NO: 1045820 - DNA, 25 bp, Homo sapien
tgatccttctccagattctgcttct

SEQ ID NO: 1045821 - DNA, 25 bp, Homo sapien
agattctgcttctcaagacgcttca

SEQ ID NO: 1045822 - DNA, 25 bp, Homo sapien
ttctcaagacgcttcactgccaggc

SEQ ID NO: 1045823 - DNA, 25 bp, Homo sapien
gcttctcagtgaggtccttgttgac

SEQ ID NO: 1045824 - DNA, 25 bp, Homo sapien
aagcttctcagtgaggtccttgttg

SEQ ID NO: 1045825 - DNA, 25 bp, Homo sapien
gggcctcaagcttctcagtgaggtc

SEQ ID NO: 1045826 - DNA, 25 bp, Homo sapien
cagggcctcaagcttctcagtgagg

SEQ ID NO: 1045827 - DNA, 25 bp, Homo sapien
ggtcccttagggtctgctgtagccc

SEQ ID NO: 1045828 - DNA, 25 bp, Homo sapien
tgtgccaggtcccttagggtctgct

SEQ ID NO: 1045829 - DNA, 25 bp, Homo sapien
agggtctgctgtagcccctctccat

SEQ ID NO: 1045830 - DNA, 25 bp, Homo sapien
gcctgctcctgtagccgcagggatt

SEQ ID NO: 1045831 - DNA, 25 bp, Homo sapien
gctgcctcttacaagaagccttcct

SEQ ID NO: 1045832 - DNA, 25 bp, Homo sapien
gctgctgagttaggaaccgcggggt

SEQ ID NO: 1045833 - DNA, 25 bp, Homo sapien
tcagtcctcggctcgccgctgaggc

SEQ ID NO: 1045834 - DNA, 25 bp, Homo sapien
ccgcggggttagctgggcaaagacg

SEQ ID NO: 1045835 - DNA, 25 bp, Homo sapien
cgcaggctgccgttggaagcatccg

SEQ ID NO: 1045836 - DNA, 25 bp, Homo sapien
ccgttggaagcatccgcggtgcgct

SEQ ID NO: 1045837 - DNA, 25 bp, Homo sapien
ccgctctcagagtctgacaagacgg

SEQ ID NO: 1045838 - DNA, 25 bp, Homo sapien
cgctctcagagtctgacaagacggc

SEQ ID NO: 1045839 - DNA, 25 bp, Homo sapien
tgcttccgcagggtgcccagtaggt

SEQ ID NO: 1045840 - DNA, 25 bp, Homo sapien
atggcgccgtcggtcttgtcccgca

SEQ ID NO: 1045841 - DNA, 25 bp, Homo sapien
tcaggagctcgttggcgctccgcag

SEQ ID NO: 1045842 - DNA, 25 bp, Homo sapien
cgctctcgctgtcgctaagctgctt

SEQ ID NO: 1045843 - DNA, 25 bp, Homo sapien
gaagggagtggaaacctaactctca

SEQ ID NO: 1045844 - DNA, 25 bp, Homo sapien
ggcttcggtcccatatccttcccca

SEQ ID NO: 1045845 - DNA, 25 bp, Homo sapien
caggcccccaactaggggcagttgg

SEQ ID NO: 1045846 - DNA, 25 bp, Homo sapien
tgtgatggaccaattgtgccccagc

SEQ ID NO: 1045847 - DNA, 25 bp, Homo sapien
ggcggcttgtctactatcctcgagg

SEQ ID NO: 1045848 - DNA, 25 bp, Homo sapien
aatttagaaatgttggcggcttgtc

SEQ ID NO: 1045849 - DNA, 25 bp, Homo sapien
ttgtctactatcctcgaggctgaga

SEQ ID NO: 1045850 - DNA, 25 bp, Homo sapien
aaatgttggcggcttgtctactatc

SEQ ID NO: 1045851 - DNA, 25 bp, Homo sapien
acagccatgtgccaccacggatggc

SEQ ID NO: 1045852 - DNA, 25 bp, Homo sapien
attacagccatgtgccaccacggat

SEQ ID NO: 1045853 - DNA, 25 bp, Homo sapien
gcagtgcacgatctcggcttgctgc

SEQ ID NO: 1045854 - DNA, 25 bp, Homo sapien
tgcagtgcacgatctcggcttgctg

SEQ ID NO: 1045855 - DNA, 25 bp, Homo sapien
cccgccaccatgtccgggtaatttg

SEQ ID NO: 1045856 - DNA, 25 bp, Homo sapien
ccgccaccatgtccgggtaatttgt

SEQ ID NO: 1045857 - DNA, 25 bp, Homo sapien
gccaccatgtccgggtaatttgttg

SEQ ID NO: 1045858 - DNA, 25 bp, Homo sapien
gcgcccgccaccatgtccgggtaat

SEQ ID NO: 1045859 - DNA, 25 bp, Homo sapien
gccatcctgcactgcgtcctcctgc

SEQ ID NO: 1045860 - DNA, 25 bp, Homo sapien
gctgtgggccaggttgctcttctcc

SEQ ID NO: 1045861 - DNA, 25 bp, Homo sapien
tgcgctcaagctcccggcgcacccg

SEQ ID NO: 1045862 - DNA, 25 bp, Homo sapien
agccggtcccgctggcgccgcagct

SEQ ID NO: 1045863 - DNA, 25 bp, Homo sapien
cagtgggtgtcacctaaccccaggg

SEQ ID NO: 1045864 - DNA, 25 bp, Homo sapien
tctgactccaggtaagtgactatac

SEQ ID NO: 1045865 - DNA, 25 bp, Homo sapien
aaaatggtatctggcacttagtgaa

SEQ ID NO: 1045866 - DNA, 25 bp, Homo sapien
tctggttagaaaacccgacatcgga

SEQ ID NO: 1045867 - DNA, 25 bp, Homo sapien
tcccgttgcagtgtggcgcggctca

SEQ ID NO: 1045868 - DNA, 25 bp, Homo sapien
tgtcccgttgcagtgtggcgcggct

SEQ ID NO: 1045869 - DNA, 25 bp, Homo sapien
gcatgtcccgttgcagtgtggcgcg

SEQ ID NO: 1045870 - DNA, 25 bp, Homo sapien
catgtcccgttgcagtgtggcgcgg

SEQ ID NO: 1045871 - DNA, 25 bp, Homo sapien
aaggcggttcagatccaacttgtcc

SEQ ID NO: 1045872 - DNA, 25 bp, Homo sapien
ggttcagatccaacttgtcctgagc

SEQ ID NO: 1045873 - DNA, 25 bp, Homo sapien
gacaaggcggttcagatccaacttg

SEQ ID NO: 1045874 - DNA, 25 bp, Homo sapien
ggcggttcagatccaacttgtcctg

SEQ ID NO: 1045875 - DNA, 25 bp, Homo sapien
cgctcatggcgcagcgtggggagct

SEQ ID NO: 1045876 - DNA, 25 bp, Homo sapien
ggctgcgctcatggcgcagcgtggg

SEQ ID NO: 1045877 - DNA, 25 bp, Homo sapien
tgcagctggctgcgctcatggcgca

SEQ ID NO: 1045878 - DNA, 25 bp, Homo sapien
cagctggctgcgctcatggcgcagc

SEQ ID NO: 1045879 - DNA, 25 bp, Homo sapien
ccaggccagcgtgctccttggctag

SEQ ID NO: 1045880 - DNA, 25 bp, Homo sapien
cggcgggcctcaagctgggccagct

SEQ ID NO: 1045881 - DNA, 25 bp, Homo sapien
agctgctcccggcgggcctcaagct

SEQ ID NO: 1045882 - DNA, 25 bp, Homo sapien
tgggccagctgccgttgcacctcaa

SEQ ID NO: 1045883 - DNA, 25 bp, Homo sapien
ctgccgttgcacctcaaacaggctg

SEQ ID NO: 1045884 - DNA, 25 bp, Homo sapien
cttttcacgctggagtcgctgtaag

SEQ ID NO: 1045885 - DNA, 25 bp, Homo sapien
acgctggagtcgctgtaagtcctcc

SEQ ID NO: 1045886 - DNA, 25 bp, Homo sapien
gctgtaagtcctcctcgtgagctgc

SEQ ID NO: 1045887 - DNA, 25 bp, Homo sapien
gagtcgctgtaagtcctcctcgtga

SEQ ID NO: 1045888 - DNA, 25 bp, Homo sapien
gagcaagaacgatgatgaaacactg

SEQ ID NO: 1045889 - DNA, 25 bp, Homo sapien
cgaggcagagcaagaacgatgatga

SEQ ID NO: 1045890 - DNA, 25 bp, Homo sapien
gcaagaacgatgatgaaacactggc

SEQ ID NO: 1045891 - DNA, 25 bp, Homo sapien
ggcagagcaagaacgatgatgaaac

SEQ ID NO: 1045892 - DNA, 25 bp, Homo sapien
gcccccataccctcagagatggagg

SEQ ID NO: 1045893 - DNA, 25 bp, Homo sapien
ggcccccataccctcagagatggag

SEQ ID NO: 1045894 - DNA, 25 bp, Homo sapien
ccccataccctcagagatggagggt

SEQ ID NO: 1045895 - DNA, 25 bp, Homo sapien
tggcccccataccctcagagatgga

SEQ ID NO: 1045896 - DNA, 25 bp, Homo sapien
ccaggcagaccccccaaaacatcag

SEQ ID NO: 1045897 - DNA, 25 bp, Homo sapien
cccaaaacatcagggcagcaagagc

SEQ ID NO: 1045898 - DNA, 25 bp, Homo sapien
cccaggcagaccccccaaaacatca

SEQ ID NO: 1045899 - DNA, 25 bp, Homo sapien
aaaacatcagggcagcaagagccat

SEQ ID NO: 1045900 - DNA, 25 bp, Homo sapien
ccaggaccggatgcctgtgacacac

SEQ ID NO: 1045901 - DNA, 25 bp, Homo sapien
ggggccaggaccggatgcctgtgac

SEQ ID NO: 1045902 - DNA, 25 bp, Homo sapien
ctagggggccaggaccggatgcctg

SEQ ID NO: 1045903 - DNA, 25 bp, Homo sapien
ggccaggaccggatgcctgtgacac

SEQ ID NO: 1045904 - DNA, 25 bp, Homo sapien
ttctcactctctgctaggaggaggc

SEQ ID NO: 1045905 - DNA, 25 bp, Homo sapien
agggcagcaatctcctcactcagct

SEQ ID NO: 1045906 - DNA, 25 bp, Homo sapien
aggaggaggccctcgtcgcgctcct

SEQ ID NO: 1045907 - DNA, 25 bp, Homo sapien
tgctcacgctgcagctgactctgca

SEQ ID NO: 1045908 - DNA, 25 bp, Homo sapien
aacagctttcctggtgtcacgactg

SEQ ID NO: 1045909 - DNA, 25 bp, Homo sapien
gggcacaacggcagtcacaagaatc

SEQ ID NO: 1045910 - DNA, 25 bp, Homo sapien
caagaatcccggacgtggataccac

SEQ ID NO: 1045911 - DNA, 25 bp, Homo sapien
catgggagaatatggaacagctttc

SEQ ID NO: 1045912 - DNA, 25 bp, Homo sapien
ggctgtgccgtgtacccatcaactt

SEQ ID NO: 1045913 - DNA, 25 bp, Homo sapien
tcaacttctctgacagcgccgtctt

SEQ ID NO: 1045914 - DNA, 25 bp, Homo sapien
ccggctctgggcatctcgtttctgc

SEQ ID NO: 1045915 - DNA, 25 bp, Homo sapien
gggcatctcgtttctgccgctccat

SEQ ID NO: 1045916 - DNA, 25 bp, Homo sapien
agctcagacgtcagagcgttcacgg

SEQ ID NO: 1045917 - DNA, 25 bp, Homo sapien
cgcagctcagacgtcagagcgttca

SEQ ID NO: 1045918 - DNA, 25 bp, Homo sapien
ggtcccgcagctcagacgtcagagc

SEQ ID NO: 1045919 - DNA, 25 bp, Homo sapien
cgtaggtcccgcagctcagacgtca

SEQ ID NO: 1045920 - DNA, 25 bp, Homo sapien
cgcagcccgtcacgggcatcctcca

SEQ ID NO: 1045921 - DNA, 25 bp, Homo sapien
ttcttcacagcagaccgaagctcct

SEQ ID NO: 1045922 - DNA, 25 bp, Homo sapien
aggctgcgtcgcagctcgcctgcct

SEQ ID NO: 1045923 - DNA, 25 bp, Homo sapien
tcctcattggaacgccgcagggcct

SEQ ID NO: 1045924 - DNA, 25 bp, Homo sapien
ggactcaggactggtcctcctgcga

SEQ ID NO: 1045925 - DNA, 25 bp, Homo sapien
atgaggactcaggactggtcctcct

SEQ ID NO: 1045926 - DNA, 25 bp, Homo sapien
aggactcaggactggtcctcctgcg

SEQ ID NO: 1045927 - DNA, 25 bp, Homo sapien
actcaggactggtcctcctgcgaca

SEQ ID NO: 1045928 - DNA, 25 bp, Homo sapien
cctgggagtagtcagtggctctaca

SEQ ID NO: 1045929 - DNA, 25 bp, Homo sapien
tggagtggatcaggcactgcctgcc

SEQ ID NO: 1045930 - DNA, 25 bp, Homo sapien
tacacaaaagccgtctcctccaatt

SEQ ID NO: 1045931 - DNA, 25 bp, Homo sapien
tctgaagagctaagccctgagccct

SEQ ID NO: 1045932 - DNA, 25 bp, Homo sapien
cctctaggagtgccagcttctgctc

SEQ ID NO: 1045933 - DNA, 25 bp, Homo sapien
cagccgtgagcgctccacctcctgc

SEQ ID NO: 1045934 - DNA, 25 bp, Homo sapien
tgagaactggacaaggacaccagct

SEQ ID NO: 1045935 - DNA, 25 bp, Homo sapien
actgtgtggcccgtaaagctggaaa

SEQ ID NO: 1045936 - DNA, 25 bp, Homo sapien
gtttcagggattcaaggactcctca

SEQ ID NO: 1045937 - DNA, 25 bp, Homo sapien
gcagacttttgcacagtttcaggga

SEQ ID NO: 1045938 - DNA, 25 bp, Homo sapien
ctcctgccgcatcacctccaggctg

SEQ ID NO: 1045939 - DNA, 25 bp, Homo sapien
aggcccagggtctcccgcctgctct

SEQ ID NO: 1045940 - DNA, 25 bp, Homo sapien
agctcccggcccagtctggtgttct

SEQ ID NO: 1045941 - DNA, 25 bp, Homo sapien
ttcagcagcctctgccggaggccca

SEQ ID NO: 1045942 - DNA, 25 bp, Homo sapien
tactgagcagctggttgccaggacc

SEQ ID NO: 1045943 - DNA, 25 bp, Homo sapien
tcctgatgggatgcatggtcacaca

SEQ ID NO: 1045944 - DNA, 25 bp, Homo sapien
aaagccacccctgccatttagagag

SEQ ID NO: 1045945 - DNA, 25 bp, Homo sapien
gctgtgggctgcacttgagaacaca

SEQ ID NO: 1045946 - DNA, 25 bp, Homo sapien
ctcgcgggtccggaactcgccttct

SEQ ID NO: 1045947 - DNA, 25 bp, Homo sapien
tccggaactcgccttcttgttcctg

SEQ ID NO: 1045948 - DNA, 25 bp, Homo sapien
cgcgggtccggaactcgccttcttg

SEQ ID NO: 1045949 - DNA, 25 bp, Homo sapien
ccagctgggcctccgccgcgcgccg

SEQ ID NO: 1045950 - DNA, 25 bp, Homo sapien
cagctgggcctccgccgcgcgccgc

SEQ ID NO: 1045951 - DNA, 25 bp, Homo sapien
cctccgccgcgcgccgctgcacctc

SEQ ID NO: 1045952 - DNA, 25 bp, Homo sapien
ccgccgcgcgccgctgcacctccac

SEQ ID NO: 1045953 - DNA, 25 bp, Homo sapien
caggggaaccgggcactggccgcgg

SEQ ID NO: 1045954 - DNA, 25 bp, Homo sapien
gcaggggaaccgggcactggccgcg

SEQ ID NO: 1045955 - DNA, 25 bp, Homo sapien
ggcaggggaaccgggcactggccgc

SEQ ID NO: 1045956 - DNA, 25 bp, Homo sapien
aagtgtacaactgagcggcatgaat

SEQ ID NO: 1045957 - DNA, 25 bp, Homo sapien
tgagcggcatgaattacattcacac

SEQ ID NO: 1045958 - DNA, 25 bp, Homo sapien
tgagccaacgtgtctggccattttc

SEQ ID NO: 1045959 - DNA, 25 bp, Homo sapien
aacgtgtctggccattttcatcatt

SEQ ID NO: 1045960 - DNA, 25 bp, Homo sapien
ccaacttctctgctatagcttaggg

SEQ ID NO: 1045961 - DNA, 25 bp, Homo sapien
tatagcttaggggtcttcttgccca

SEQ ID NO: 1045962 - DNA, 25 bp, Homo sapien
tctcactcactgtcatccctgcctt

SEQ ID NO: 1045963 - DNA, 25 bp, Homo sapien
tcactcactgtcatccctgcctttc

SEQ ID NO: 1045964 - DNA, 25 bp, Homo sapien
gggctgttgagcccttccccgcttc

SEQ ID NO: 1045965 - DNA, 25 bp, Homo sapien
tgggcactccgcagctcttgcagga

SEQ ID NO: 1045966 - DNA, 25 bp, Homo sapien
agctcttgcaggaattcccggaggg

SEQ ID NO: 1045967 - DNA, 25 bp, Homo sapien
agggccccgcgcactgcctccgggt

SEQ ID NO: 1045968 - DNA, 25 bp, Homo sapien
caaagacagacccctgctctgacac

SEQ ID NO: 1045969 - DNA, 25 bp, Homo sapien
cactggtctgggtccgaagttcgtc

SEQ ID NO: 1045970 - DNA, 25 bp, Homo sapien
catctcggccagctggcgattcagg

SEQ ID NO: 1045971 - DNA, 25 bp, Homo sapien
cagctggcgattcagggcactggtc

SEQ ID NO: 1045972 - DNA, 25 bp, Homo sapien
gctgcctggccctcgaggttgcgct

SEQ ID NO: 1045973 - DNA, 25 bp, Homo sapien
ggcgctcccgctcactgcgccgcac

SEQ ID NO: 1045974 - DNA, 25 bp, Homo sapien
ctccagctttgtctcattggccttc

SEQ ID NO: 1045975 - DNA, 25 bp, Homo sapien
gcagggaatccacccgatcctggag

SEQ ID NO: 1045976 - DNA, 25 bp, Homo sapien
tctcggaggcgtccagaacctcctt

SEQ ID NO: 1045977 - DNA, 25 bp, Homo sapien
cagcttgacagtgcggctctcggag

SEQ ID NO: 1045978 - DNA, 25 bp, Homo sapien
cccagatgactcctatgtatgcaga

SEQ ID NO: 1045979 - DNA, 25 bp, Homo sapien
gcaaggctagccgtattatttaaca

SEQ ID NO: 1045980 - DNA, 25 bp, Homo sapien
gatgctgtcatcaaatagtcctgaa

SEQ ID NO: 1045981 - DNA, 25 bp, Homo sapien
tgcgtagtgcctacaaagctcttgg

SEQ ID NO: 1045982 - DNA, 25 bp, Homo sapien
cagtgttcctaagcactcctgctgg

SEQ ID NO: 1045983 - DNA, 25 bp, Homo sapien
gctggctaactactagtgcccagag

SEQ ID NO: 1045984 - DNA, 25 bp, Homo sapien
tccatcattgagacccagtgttcct

SEQ ID NO: 1045985 - DNA, 25 bp, Homo sapien
catcccattgctggctaactactag

SEQ ID NO: 1045986 - DNA, 25 bp, Homo sapien
agccagaacaatcggggctgttccc

SEQ ID NO: 1045987 - DNA, 25 bp, Homo sapien
acagccagaacaatcggggctgttc

SEQ ID NO: 1045988 - DNA, 25 bp, Homo sapien
cagccagaacaatcggggctgttcc

SEQ ID NO: 1045989 - DNA, 25 bp, Homo sapien
cgcagggccccctcgctttcctcca

SEQ ID NO: 1045990 - DNA, 25 bp, Homo sapien
ctgccttcacctcgctgtcggccac

SEQ ID NO: 1045991 - DNA, 25 bp, Homo sapien
tccaccttagccagggccccattca

SEQ ID NO: 1045992 - DNA, 25 bp, Homo sapien
gggccccattcagccgctccacggt

SEQ ID NO: 1045993 - DNA, 25 bp, Homo sapien
atgttcacaggcggtcagagccttc

SEQ ID NO: 1045994 - DNA, 25 bp, Homo sapien
gtcatgttcacaggcggtcagagcc

SEQ ID NO: 1045995 - DNA, 25 bp, Homo sapien
ttcacaggcggtcagagccttctgc

SEQ ID NO: 1045996 - DNA, 25 bp, Homo sapien
cttctgcagatgcaggttcttgtcc

SEQ ID NO: 1045997 - DNA, 25 bp, Homo sapien
tcagataatgcctgccgggcggcat

SEQ ID NO: 1045998 - DNA, 25 bp, Homo sapien
tctgcttccgtgcctcagataatgc

SEQ ID NO: 1045999 - DNA, 25 bp, Homo sapien
cagataatgcctgccgggcggcatc

SEQ ID NO: 1046000 - DNA, 25 bp, Homo sapien
gcttccgtgcctcagataatgcctg

SEQ ID NO: 1046001 - DNA, 25 bp, Homo sapien
gccgccgctcgtcttgcagcttctg

SEQ ID NO: 1046002 - DNA, 25 bp, Homo sapien
tgtccagcgtcctcctgagggctac

SEQ ID NO: 1046003 - DNA, 25 bp, Homo sapien
agcgtcctcctgagggctacacggt

SEQ ID NO: 1046004 - DNA, 25 bp, Homo sapien
gagggctacacggtccttctccagc

SEQ ID NO: 1046005 - DNA, 25 bp, Homo sapien
tgtcctcatggctacgaagcttctc

SEQ ID NO: 1046006 - DNA, 25 bp, Homo sapien
cctcatggctacgaagcttctcccg

SEQ ID NO: 1046007 - DNA, 25 bp, Homo sapien
tcatggctacgaagcttctcccgct

SEQ ID NO: 1046008 - DNA, 25 bp, Homo sapien
tggctacgaagcttctcccgctcca

SEQ ID NO: 1046009 - DNA, 25 bp, Homo sapien
gaattgctgagcactcatactaggg

SEQ ID NO: 1046010 - DNA, 25 bp, Homo sapien
tacacacaggcacaaaggcaagcat

SEQ ID NO: 1046011 - DNA, 25 bp, Homo sapien
actcaggcaggtgcatggacacaca

SEQ ID NO: 1046012 - DNA, 25 bp, Homo sapien
tctgtacaccttagggagaacccat

SEQ ID NO: 1046013 - DNA, 25 bp, Homo sapien
tcagtctgcgcctgggcgctgcgca

SEQ ID NO: 1046014 - DNA, 25 bp, Homo sapien
gctcccgagcctccagggtgcgctc

SEQ ID NO: 1046015 - DNA, 25 bp, Homo sapien
tccagggtgcgctcagtctgcgcct

SEQ ID NO: 1046016 - DNA, 25 bp, Homo sapien
gctgctgctgcgcatccacctccag

SEQ ID NO: 1046017 - DNA, 25 bp, Homo sapien
ggaatttcccgacacatgctcttaa

SEQ ID NO: 1046018 - DNA, 25 bp, Homo sapien
gatctacagtggctcatcctagaag

SEQ ID NO: 1046019 - DNA, 25 bp, Homo sapien
ggctgaccagagacaagggctctcc

SEQ ID NO: 1046020 - DNA, 25 bp, Homo sapien
ttaactaaggcggagagatctctgg

SEQ ID NO: 1046021 - DNA, 25 bp, Homo sapien
gacagtcccccgaggtaggctacat

SEQ ID NO: 1046022 - DNA, 25 bp, Homo sapien
tcagcccgttttgaggacagacagt

SEQ ID NO: 1046023 - DNA, 25 bp, Homo sapien
tgtaaaaagttagtggactgcagcc

SEQ ID NO: 1046024 - DNA, 25 bp, Homo sapien
gctggtctgcttggatttcctacag

SEQ ID NO: 1046025 - DNA, 25 bp, Homo sapien
gtgttcgtacagtgtgtgcccatga

SEQ ID NO: 1046026 - DNA, 25 bp, Homo sapien
cgtacagtgtgtgcccatgaggagc

SEQ ID NO: 1046027 - DNA, 25 bp, Homo sapien
tctgtgttcgtacagtgtgtgccca

SEQ ID NO: 1046028 - DNA, 25 bp, Homo sapien
ggagatctgtgttcgtacagtgtgt

SEQ ID NO: 1046029 - DNA, 25 bp, Homo sapien
gctcttatgggcctgaccttgtgac

SEQ ID NO: 1046030 - DNA, 25 bp, Homo sapien
gggattcagcgatgaaccaggcaga

SEQ ID NO: 1046031 - DNA, 25 bp, Homo sapien
cagcagcgatgtgttgagtccctac

SEQ ID NO: 1046032 - DNA, 25 bp, Homo sapien
catgtggagtcctaggagcagccag

SEQ ID NO: 1046033 - DNA, 25 bp, Homo sapien
agcctgggtgatgtcacggcccctt

SEQ ID NO: 1046034 - DNA, 25 bp, Homo sapien
tcgtgagcctgtgatgcacacagcc

SEQ ID NO: 1046035 - DNA, 25 bp, Homo sapien
tgggtgatgtcacggccccttcagt

SEQ ID NO: 1046036 - DNA, 25 bp, Homo sapien
ttcctgctgctgcaaatagcccggg

SEQ ID NO: 1046037 - DNA, 25 bp, Homo sapien
tgtgcggcgctgcaacatctgggtt

SEQ ID NO: 1046038 - DNA, 25 bp, Homo sapien
gtttccgcggctgattgttcccagc

SEQ ID NO: 1046039 - DNA, 25 bp, Homo sapien
tccgtctgatgtctgagcgagcgtc

SEQ ID NO: 1046040 - DNA, 25 bp, Homo sapien
tagaagagctcggagatgtggtccc

SEQ ID NO: 1046041 - DNA, 25 bp, Homo sapien
gggcctagagcccatagtctccagc

SEQ ID NO: 1046042 - DNA, 25 bp, Homo sapien
accatggccgctcttgtgacgacgt

SEQ ID NO: 1046043 - DNA, 25 bp, Homo sapien
atctctcgctgttctccttcttcag

SEQ ID NO: 1046044 - DNA, 25 bp, Homo sapien
tccaggaaggccatttacggcccca

SEQ ID NO: 1046045 - DNA, 25 bp, Homo sapien
ccagctccacaagagcgaggaggcg

SEQ ID NO: 1046046 - DNA, 25 bp, Homo sapien
agagctcgagagtaaccctcacctg

SEQ ID NO: 1046047 - DNA, 25 bp, Homo sapien
cctctctcggcctcggtttcatgat

SEQ ID NO: 1046048 - DNA, 25 bp, Homo sapien
tctggcgcctcccatcctagggagg

SEQ ID NO: 1046049 - DNA, 25 bp, Homo sapien
gcttggacactgaaccagctgagga

SEQ ID NO: 1046050 - DNA, 25 bp, Homo sapien
cagctgaggaaggagtttcacccaa

SEQ ID NO: 1046051 - DNA, 25 bp, Homo sapien
cctgtttacctgttagagtgagcca

SEQ ID NO: 1046052 - DNA, 25 bp, Homo sapien
tagacagaagagagcccttagccca

SEQ ID NO: 1046053 - DNA, 25 bp, Homo sapien
tactcctctgcgaagaagtcttctc

SEQ ID NO: 1046054 - DNA, 25 bp, Homo sapien
gtaaaatcttaaagcggaggcatca

SEQ ID NO: 1046055 - DNA, 25 bp, Homo sapien
taggccctggcgcatgttattttat

SEQ ID NO: 1046056 - DNA, 25 bp, Homo sapien
catacttgtggacgtgaggtaggaa

SEQ ID NO: 1046057 - DNA, 25 bp, Homo sapien
gaatgcattcattaccacccagcgc

SEQ ID NO: 1046058 - DNA, 25 bp, Homo sapien
caggtccaagtcatgctcagcgtga

SEQ ID NO: 1046059 - DNA, 25 bp, Homo sapien
gaaaagtcacatgcaggtctagggt

SEQ ID NO: 1046060 - DNA, 25 bp, Homo sapien
cagagaagggtgacatcagtgcact

SEQ ID NO: 1046061 - DNA, 25 bp, Homo sapien
ggtcctatcctgagtccacattgag

SEQ ID NO: 1046062 - DNA, 25 bp, Homo sapien
cacattgagcagaaagagccttggc

SEQ ID NO: 1046063 - DNA, 25 bp, Homo sapien
tgggtgcttagtcaatgctccgcct

SEQ ID NO: 1046064 - DNA, 25 bp, Homo sapien
caaccccaatatcttgagaggctgg

SEQ ID NO: 1046065 - DNA, 25 bp, Homo sapien
caccgcggccggcctgtttgtttgt

SEQ ID NO: 1046066 - DNA, 25 bp, Homo sapien
cctgttgagaggctagccccttgtc

SEQ ID NO: 1046067 - DNA, 25 bp, Homo sapien
agaggctagccccttgtcaagggtc

SEQ ID NO: 1046068 - DNA, 25 bp, Homo sapien
ccaaacatcacctgcacagggatgt

SEQ ID NO: 1046069 - DNA, 25 bp, Homo sapien
cccaaacatcacctgcacagggatg

SEQ ID NO: 1046070 - DNA, 25 bp, Homo sapien
ttaattaggcagcatcccattgatg

SEQ ID NO: 1046071 - DNA, 25 bp, Homo sapien
aaaagacatcccaatgagaagaggg

SEQ ID NO: 1046072 - DNA, 25 bp, Homo sapien
caaagagtagactgggcatttcaaa

SEQ ID NO: 1046073 - DNA, 25 bp, Homo sapien
tgattacgtggcacctaacatgagt

SEQ ID NO: 1046074 - DNA, 25 bp, Homo sapien
tttcagacctttgaccttgagctgc

SEQ ID NO: 1046075 - DNA, 25 bp, Homo sapien
tgcacgtccccattccttctttcag

SEQ ID NO: 1046076 - DNA, 25 bp, Homo sapien
ctttcagacctttgaccttgagctg

SEQ ID NO: 1046077 - DNA, 25 bp, Homo sapien
tcctaagtgcaccagagggaagtct

SEQ ID NO: 1046078 - DNA, 25 bp, Homo sapien
gagggaagtctgacccattaaccag

SEQ ID NO: 1046079 - DNA, 25 bp, Homo sapien
aggaagagcacatcaaacacagttc

SEQ ID NO: 1046080 - DNA, 25 bp, Homo sapien
actccaattatcagtgggaaggaac

SEQ ID NO: 1046081 - DNA, 25 bp, Homo sapien
taatgacgatgaagaaggggaaaat

SEQ ID NO: 1046082 - DNA, 25 bp, Homo sapien
tagggcatggggaactgcgacgagc

SEQ ID NO: 1046083 - DNA, 25 bp, Homo sapien
gggcatggggaactgcgacgagcat

SEQ ID NO: 1046084 - DNA, 25 bp, Homo sapien
gggaaaatcactccgcacatccaca

SEQ ID NO: 1046085 - DNA, 25 bp, Homo sapien
caaactgtagccaggtgtctcaacc

SEQ ID NO: 1046086 - DNA, 25 bp, Homo sapien
ccaaaaggccatgggcaggaatccg

SEQ ID NO: 1046087 - DNA, 25 bp, Homo sapien
gaatccgaatcaaggcccgaaggaa

SEQ ID NO: 1046088 - DNA, 25 bp, Homo sapien
caacaggtgcaagctcacatcactc

SEQ ID NO: 1046089 - DNA, 25 bp, Homo sapien
ggacggccgcacaagtcctcgggag

SEQ ID NO: 1046090 - DNA, 25 bp, Homo sapien
gacggccgcacaagtcctcgggagc

SEQ ID NO: 1046091 - DNA, 25 bp, Homo sapien
ctggacggccgcacaagtcctcggg

SEQ ID NO: 1046092 - DNA, 25 bp, Homo sapien
tggacggccgcacaagtcctcggga

SEQ ID NO: 1046093 - DNA, 25 bp, Homo sapien
ctgctgaaggcacggccgacaacat

SEQ ID NO: 1046094 - DNA, 25 bp, Homo sapien
attactgctgaaggcacggccgaca

SEQ ID NO: 1046095 - DNA, 25 bp, Homo sapien
tccaattactgctgaaggcacggcc

SEQ ID NO: 1046096 - DNA, 25 bp, Homo sapien
aaggcacggccgacaacatcaaggt

SEQ ID NO: 1046097 - DNA, 25 bp, Homo sapien
ttcactggttgccacatcagcaact

SEQ ID NO: 1046098 - DNA, 25 bp, Homo sapien
gccacatcagcaactctaccagagt

SEQ ID NO: 1046099 - DNA, 25 bp, Homo sapien
gttgccacatcagcaactctaccag

SEQ ID NO: 1046100 - DNA, 25 bp, Homo sapien
tcagcaactctaccagagtggaggg

SEQ ID NO: 1046101 - DNA, 25 bp, Homo sapien
ccctcagttgtagccccggctgtgg

SEQ ID NO: 1046102 - DNA, 25 bp, Homo sapien
tcacctcaacccctgacttgcaggg

SEQ ID NO: 1046103 - DNA, 25 bp, Homo sapien
gcccagagcatcctgtcacctcaac

SEQ ID NO: 1046104 - DNA, 25 bp, Homo sapien
gctctgtccatggttcagagctggc

SEQ ID NO: 1046105 - DNA, 25 bp, Homo sapien
ggggagctgaccccttaacagccac

SEQ ID NO: 1046106 - DNA, 25 bp, Homo sapien
caaaagtgactttggtgaggggagc

SEQ ID NO: 1046107 - DNA, 25 bp, Homo sapien
tgtctcctccatcacggtcgagctg

SEQ ID NO: 1046108 - DNA, 25 bp, Homo sapien
gctgaccccttaacagccaccttta

SEQ ID NO: 1046109 - DNA, 25 bp, Homo sapien
caggaactggattccagggccaaga

SEQ ID NO: 1046110 - DNA, 25 bp, Homo sapien
tcctggtgggtccagcctaacattc

SEQ ID NO: 1046111 - DNA, 25 bp, Homo sapien
aaccaagggagggatcagcagatga

SEQ ID NO: 1046112 - DNA, 25 bp, Homo sapien
gagggatcagcagatgagcacgcat

SEQ ID NO: 1046113 - DNA, 25 bp, Homo sapien
tcagggagcatctaggcatggacgc

SEQ ID NO: 1046114 - DNA, 25 bp, Homo sapien
gagcatctaggcatggacgctgtga

SEQ ID NO: 1046115 - DNA, 25 bp, Homo sapien
gcatggacgctgtgatctgcctggc

SEQ ID NO: 1046116 - DNA, 25 bp, Homo sapien
tctaggcatggacgctgtgatctgc

SEQ ID NO: 1046117 - DNA, 25 bp, Homo sapien
gccttcaggagacagcacttctggt

SEQ ID NO: 1046118 - DNA, 25 bp, Homo sapien
tggccctggtgcctcgtaggctgat

SEQ ID NO: 1046119 - DNA, 25 bp, Homo sapien
tcctgaacttcacctcgcctgcatg

SEQ ID NO: 1046120 - DNA, 25 bp, Homo sapien
cgtaggctgattccgggtttccaga

SEQ ID NO: 1046121 - DNA, 25 bp, Homo sapien
cacacttacgccctgtgtcctggga

SEQ ID NO: 1046122 - DNA, 25 bp, Homo sapien
tccacacttacgccctgtgtcctgg

SEQ ID NO: 1046123 - DNA, 25 bp, Homo sapien
tcctccacacttacgccctgtgtcc

SEQ ID NO: 1046124 - DNA, 25 bp, Homo sapien
ctcctccacacttacgccctgtgtc

SEQ ID NO: 1046125 - DNA, 25 bp, Homo sapien
ccaggacagccacccgaccctgagc

SEQ ID NO: 1046126 - DNA, 25 bp, Homo sapien
ttttcccatatgtcccggtcccatc

SEQ ID NO: 1046127 - DNA, 25 bp, Homo sapien
tgagctcatgctcctgccattaccc

SEQ ID NO: 1046128 - DNA, 25 bp, Homo sapien
atatgtcccggtcccatccctgtcc

SEQ ID NO: 1046129 - DNA, 25 bp, Homo sapien
ttggcacatgccttcgctcgccgtg

SEQ ID NO: 1046130 - DNA, 25 bp, Homo sapien
tggcacatgccttcgctcgccgtgg

SEQ ID NO: 1046131 - DNA, 25 bp, Homo sapien
caaggaagggacagttgaggaaagc

SEQ ID NO: 1046132 - DNA, 25 bp, Homo sapien
gaagggacagttgaggaaagcgtgg

SEQ ID NO: 1046133 - DNA, 25 bp, Homo sapien
gtgacatcagcgaagcatgtcctca

SEQ ID NO: 1046134 - DNA, 25 bp, Homo sapien
tatagaaccaacgagcagcagggtg

SEQ ID NO: 1046135 - DNA, 25 bp, Homo sapien
tgtacactccacacagtgacatcag

SEQ ID NO: 1046136 - DNA, 25 bp, Homo sapien
taagtctttggtaatgaggctccag

SEQ ID NO: 1046137 - DNA, 25 bp, Homo sapien
tcccagggcatgagtacggaccttc

SEQ ID NO: 1046138 - DNA, 25 bp, Homo sapien
taatccttgcaactgacccgggaag

SEQ ID NO: 1046139 - DNA, 25 bp, Homo sapien
gagataactcgcaagtcccagggac

SEQ ID NO: 1046140 - DNA, 25 bp, Homo sapien
gatacttataaagcaccaccaggca

SEQ ID NO: 1046141 - DNA, 25 bp, Homo sapien
tctacttgtgttgccgacaccagct

SEQ ID NO: 1046142 - DNA, 25 bp, Homo sapien
gaccaatcagggtaggttctgggtc

SEQ ID NO: 1046143 - DNA, 25 bp, Homo sapien
taggttctgggtctacttgtgttgc

SEQ ID NO: 1046144 - DNA, 25 bp, Homo sapien
tcaggccttgggaccaatcagggta

SEQ ID NO: 1046145 - DNA, 25 bp, Homo sapien
agcctcctagatcagccctggctcc

SEQ ID NO: 1046146 - DNA, 25 bp, Homo sapien
tgtgaatgtccacatgtgcctcgac

SEQ ID NO: 1046147 - DNA, 25 bp, Homo sapien
atgtgcctcgactcccaccacacac

SEQ ID NO: 1046148 - DNA, 25 bp, Homo sapien
cacggcatgggtaggcatcttcagg

SEQ ID NO: 1046149 - DNA, 25 bp, Homo sapien
agctgcacaactctctttggggcca

SEQ ID NO: 1046150 - DNA, 25 bp, Homo sapien
gggtggtgcctgtgatcttcttgtc

SEQ ID NO: 1046151 - DNA, 25 bp, Homo sapien
gcggcaaggcgaggggggtggtgcc

SEQ ID NO: 1046152 - DNA, 25 bp, Homo sapien
gcaaggcgaggggggtggtgcctgt

SEQ ID NO: 1046153 - DNA, 25 bp, Homo sapien
gtggtgcctgtgatcttcttgtcct

SEQ ID NO: 1046154 - DNA, 25 bp, Homo sapien
cagcccctcagcaaatcccatcagc

SEQ ID NO: 1046155 - DNA, 25 bp, Homo sapien
tcctcttgttccctcactcgcacag

SEQ ID NO: 1046156 - DNA, 25 bp, Homo sapien
ttgttccctcactcgcacagccagc

SEQ ID NO: 1046157 - DNA, 25 bp, Homo sapien
tcccatcagctccaccttcatagca

SEQ ID NO: 1046158 - DNA, 25 bp, Homo sapien
gagagatgggaagagaaccagtctt

SEQ ID NO: 1046159 - DNA, 25 bp, Homo sapien
atgggaagagaaccagtcttcccat

SEQ ID NO: 1046160 - DNA, 25 bp, Homo sapien
gagatgggaagagaaccagtcttcc

SEQ ID NO: 1046161 - DNA, 25 bp, Homo sapien
agatgggaagagaaccagtcttccc

SEQ ID NO: 1046162 - DNA, 25 bp, Homo sapien
gtgtctagcggccaacgggccttgc

SEQ ID NO: 1046163 - DNA, 25 bp, Homo sapien
cacacgtgtgcggttgtagaccatg

SEQ ID NO: 1046164 - DNA, 25 bp, Homo sapien
ttgcctatgggctctttcacacgtg

SEQ ID NO: 1046165 - DNA, 25 bp, Homo sapien
tgtgcccacagatacgaccatgtct

SEQ ID NO: 1046166 - DNA, 25 bp, Homo sapien
gtcctgcccacacgagagcactggg

SEQ ID NO: 1046167 - DNA, 25 bp, Homo sapien
tgcacgggttgttgttgtgcggtcc

SEQ ID NO: 1046168 - DNA, 25 bp, Homo sapien
ttgtgcggtcctgcccacacgagag

SEQ ID NO: 1046169 - DNA, 25 bp, Homo sapien
ggttgttgttgtgcggtcctgccca

SEQ ID NO: 1046170 - DNA, 25 bp, Homo sapien
gccctacttagaggcacaggaggcc

SEQ ID NO: 1046171 - DNA, 25 bp, Homo sapien
cacatcctgacagccctacttagag

SEQ ID NO: 1046172 - DNA, 25 bp, Homo sapien
gcagaggtgatgagggacacatcct

SEQ ID NO: 1046173 - DNA, 25 bp, Homo sapien
agaacatagccctaagcctgcacgg

SEQ ID NO: 1046174 - DNA, 25 bp, Homo sapien
cgacgccagtgaggtaaagcacgct

SEQ ID NO: 1046175 - DNA, 25 bp, Homo sapien
gtaaagcacgctgcggcccagagct

SEQ ID NO: 1046176 - DNA, 25 bp, Homo sapien
cggcccagagcttggtcttcctgct

SEQ ID NO: 1046177 - DNA, 25 bp, Homo sapien
ccagtgaggtaaagcacgctgcggc

SEQ ID NO: 1046178 - DNA, 25 bp, Homo sapien
gcctgtgtcaacctcaagggaaata

SEQ ID NO: 1046179 - DNA, 25 bp, Homo sapien
tcaccttgcctgtgcggcctgtgtc

SEQ ID NO: 1046180 - DNA, 25 bp, Homo sapien
tgcctgtgcggcctgtgtcaacctc

SEQ ID NO: 1046181 - DNA, 25 bp, Homo sapien
tgcggcctgtgtcaacctcaaggga

SEQ ID NO: 1046182 - DNA, 25 bp, Homo sapien
ttcaccagcaagatagccccatagc

SEQ ID NO: 1046183 - DNA, 25 bp, Homo sapien
agcgacatcagccagctgtgggtga

SEQ ID NO: 1046184 - DNA, 25 bp, Homo sapien
gtgattgtcccggtcacagttcacc

SEQ ID NO: 1046185 - DNA, 25 bp, Homo sapien
aggtcaggctctgcggacctgtgat

SEQ ID NO: 1046186 - DNA, 25 bp, Homo sapien
tttggaatcagaaaagggcacgttc

SEQ ID NO: 1046187 - DNA, 25 bp, Homo sapien
cttgtggctgtcgaagagcttgtcg

SEQ ID NO: 1046188 - DNA, 25 bp, Homo sapien
gaaaagggcacgttcaagacaagct

SEQ ID NO: 1046189 - DNA, 25 bp, Homo sapien
ctcagcagcattggggacatgtcct

SEQ ID NO: 1046190 - DNA, 25 bp, Homo sapien
gacacctgggttggaatgcctgctc

SEQ ID NO: 1046191 - DNA, 25 bp, Homo sapien
aaaggaggagctttggtgcacccaa

SEQ ID NO: 1046192 - DNA, 25 bp, Homo sapien
ttcagtccacgctgattgaccagag

SEQ ID NO: 1046193 - DNA, 25 bp, Homo sapien
ggttgtgccatagtgaattcctgca

SEQ ID NO: 1046194 - DNA, 25 bp, Homo sapien
ctggctgtcgctcaacttcatagga

SEQ ID NO: 1046195 - DNA, 25 bp, Homo sapien
ttgtagtccgagagagaattcccac

SEQ ID NO: 1046196 - DNA, 25 bp, Homo sapien
gacactgagggaaaccagccctagg

SEQ ID NO: 1046197 - DNA, 25 bp, Homo sapien
ccagccctaggaaatcggcatcggg

SEQ ID NO: 1046198 - DNA, 25 bp, Homo sapien
ggccatgcggaagcccacagtgtct

SEQ ID NO: 1046199 - DNA, 25 bp, Homo sapien
gggccatgcggaagcccacagtgtc

SEQ ID NO: 1046200 - DNA, 25 bp, Homo sapien
tctgtgaagagggtcacctcgggca

SEQ ID NO: 1046201 - DNA, 25 bp, Homo sapien
ccatgcggaagcccacagtgtctgt

SEQ ID NO: 1046202 - DNA, 25 bp, Homo sapien
tgtcagataagacatgtcctccagg

SEQ ID NO: 1046203 - DNA, 25 bp, Homo sapien
cagcttgcagttggctttcaatgtc

SEQ ID NO: 1046204 - DNA, 25 bp, Homo sapien
ggatccagcggtcatttcgattttc

SEQ ID NO: 1046205 - DNA, 25 bp, Homo sapien
ctggatccagcggtcatttcgattt

SEQ ID NO: 1046206 - DNA, 25 bp, Homo sapien
gcagggcagcgggtcttccctaaga

SEQ ID NO: 1046207 - DNA, 25 bp, Homo sapien
agccacagtgacctttttcgggtgg

SEQ ID NO: 1046208 - DNA, 25 bp, Homo sapien
cagggcagcgggtcttccctaagac

SEQ ID NO: 1046209 - DNA, 25 bp, Homo sapien
gatcctcttataggggaaatctttc

SEQ ID NO: 1046210 - DNA, 25 bp, Homo sapien
aggatttgtgaggggcctcgatgta

SEQ ID NO: 1046211 - DNA, 25 bp, Homo sapien
ggatttgtgaggggcctcgatgtag

SEQ ID NO: 1046212 - DNA, 25 bp, Homo sapien
gggtaacatatccaaagtcaggacc

SEQ ID NO: 1046213 - DNA, 25 bp, Homo sapien
ggatctcccgggtaacatatccaaa

SEQ ID NO: 1046214 - DNA, 25 bp, Homo sapien
ggagcgggatctcccgggtaacata

SEQ ID NO: 1046215 - DNA, 25 bp, Homo sapien
tcccgggtaacatatccaaagtcag

SEQ ID NO: 1046216 - DNA, 25 bp, Homo sapien
gacgtccaggttgccgaaggagtca

SEQ ID NO: 1046217 - DNA, 25 bp, Homo sapien
gtgacgggcgggctgacgtccaggt

SEQ ID NO: 1046218 - DNA, 25 bp, Homo sapien
gggtattccgtgccgcccaccgtga

SEQ ID NO: 1046219 - DNA, 25 bp, Homo sapien
cgggctgacgtccaggttgccgaag

SEQ ID NO: 1046220 - DNA, 25 bp, Homo sapien
gctgtgccttcaggaagttccgcac

SEQ ID NO: 1046221 - DNA, 25 bp, Homo sapien
gggctgcctccccataaccctcttc

SEQ ID NO: 1046222 - DNA, 25 bp, Homo sapien
tcttggaagagtttgaggcaagcgc

SEQ ID NO: 1046223 - DNA, 25 bp, Homo sapien
gctgcctccccataaccctcttctt

SEQ ID NO: 1046224 - DNA, 25 bp, Homo sapien
caagcgctggggctagccaggagca

SEQ ID NO: 1046225 - DNA, 25 bp, Homo sapien
aaagacagtacatagctcagggagc

SEQ ID NO: 1046226 - DNA, 25 bp, Homo sapien
gagaaagacagtacatagctcaggg

SEQ ID NO: 1046227 - DNA, 25 bp, Homo sapien
agaagagaaagacagtacatagctc

SEQ ID NO: 1046228 - DNA, 25 bp, Homo sapien
gaagagaaagacagtacatagctca

SEQ ID NO: 1046229 - DNA, 25 bp, Homo sapien
aggtgtctgtctgccagcatctcat

SEQ ID NO: 1046230 - DNA, 25 bp, Homo sapien
gaagagcataacactggccaagcac

SEQ ID NO: 1046231 - DNA, 25 bp, Homo sapien
tgccattaactgagcaccgactctg

SEQ ID NO: 1046232 - DNA, 25 bp, Homo sapien
gaaaataggtcattgccccagcgtg

SEQ ID NO: 1046233 - DNA, 25 bp, Homo sapien
tgctcaagtgcacaaggctaggatg

SEQ ID NO: 1046234 - DNA, 25 bp, Homo sapien
cttcagcacattacggttccagtca

SEQ ID NO: 1046235 - DNA, 25 bp, Homo sapien
agaagagctggggaatgtccacgat

SEQ ID NO: 1046236 - DNA, 25 bp, Homo sapien
gcttccgcgtagaagtttttcagga

SEQ ID NO: 1046237 - DNA, 25 bp, Homo sapien
tgtccacgatgtcactctctgccag

SEQ ID NO: 1046238 - DNA, 25 bp, Homo sapien
ctgcaccgcctgacacaggaccccc

SEQ ID NO: 1046239 - DNA, 25 bp, Homo sapien
tgcccaggtacttgcctaagaccac

SEQ ID NO: 1046240 - DNA, 25 bp, Homo sapien
ctgcagctcgtggtaggacaagtag

SEQ ID NO: 1046241 - DNA, 25 bp, Homo sapien
cagcggccattgatgatgggcccgt

SEQ ID NO: 1046242 - DNA, 25 bp, Homo sapien
aagggaaagggcttcctgcgcacgt

SEQ ID NO: 1046243 - DNA, 25 bp, Homo sapien
cattcttctcgggttgggtaggcca

SEQ ID NO: 1046244 - DNA, 25 bp, Homo sapien
ggtaggtggtatccatccctgtgtc

SEQ ID NO: 1046245 - DNA, 25 bp, Homo sapien
cagccattctggaacatgctaacat

SEQ ID NO: 1046246 - DNA, 25 bp, Homo sapien
ttcaccctggcagggttccctagca

SEQ ID NO: 1046247 - DNA, 25 bp, Homo sapien
tctatttaaattggcccttggacac

SEQ ID NO: 1046248 - DNA, 25 bp, Homo sapien
caggcctcacgttggcttctcagca

SEQ ID NO: 1046249 - DNA, 25 bp, Homo sapien
gtaagtgtcacagccttgggtcccc

SEQ ID NO: 1046250 - DNA, 25 bp, Homo sapien
ggtagcaatcactcttctgaggtcg

SEQ ID NO: 1046251 - DNA, 25 bp, Homo sapien
tgaaaacctagatggaccgaagccc

SEQ ID NO: 1046252 - DNA, 25 bp, Homo sapien
aaacctaagctatgtgcagggtccc

SEQ ID NO: 1046253 - DNA, 25 bp, Homo sapien
tattaacctcccgtggcagctgtct

SEQ ID NO: 1046254 - DNA, 25 bp, Homo sapien
gcacagcggtttattcagggatgaa

SEQ ID NO: 1046255 - DNA, 25 bp, Homo sapien
ttggacttagctgtggccgccaacc

SEQ ID NO: 1046256 - DNA, 25 bp, Homo sapien
tggtgttggacttagctgtggccgc

SEQ ID NO: 1046257 - DNA, 25 bp, Homo sapien
gctggtgttggacttagctgtggcc

SEQ ID NO: 1046258 - DNA, 25 bp, Homo sapien
tgttggacttagctgtggccgccaa

SEQ ID NO: 1046259 - DNA, 25 bp, Homo sapien
gctccagggacacacgcacgattct

SEQ ID NO: 1046260 - DNA, 25 bp, Homo sapien
acacacaccgcgctggtgggatgct

SEQ ID NO: 1046261 - DNA, 25 bp, Homo sapien
acaccgcgctggtgggatgctccag

SEQ ID NO: 1046262 - DNA, 25 bp, Homo sapien
ccataaatgtccacgagggtctcca

SEQ ID NO: 1046263 - DNA, 25 bp, Homo sapien
gagcataatgcatgggcattgagtg

SEQ ID NO: 1046264 - DNA, 25 bp, Homo sapien
ggcctcaaaggcatgacctggcaca

SEQ ID NO: 1046265 - DNA, 25 bp, Homo sapien
tctaccatgggcctcaaaggcatga

SEQ ID NO: 1046266 - DNA, 25 bp, Homo sapien
ctccctctaccatgggcctcaaagg

SEQ ID NO: 1046267 - DNA, 25 bp, Homo sapien
ccatcctctatcctctaaggaagct

SEQ ID NO: 1046268 - DNA, 25 bp, Homo sapien
gtggctgtcccaccgatggccttct

SEQ ID NO: 1046269 - DNA, 25 bp, Homo sapien
ggcctttatctcttattgccccaat

SEQ ID NO: 1046270 - DNA, 25 bp, Homo sapien
tccaggaagctatggcctttatctc

SEQ ID NO: 1046271 - DNA, 25 bp, Homo sapien
gccctctaggctgctgtgtgcgctg

SEQ ID NO: 1046272 - DNA, 25 bp, Homo sapien
catctgagaacacctggagctctgg

SEQ ID NO: 1046273 - DNA, 25 bp, Homo sapien
cagatgggacctgacccttccagga

SEQ ID NO: 1046274 - DNA, 25 bp, Homo sapien
tgactgcagggcttacacagccgtg

SEQ ID NO: 1046275 - DNA, 25 bp, Homo sapien
ccaggccacctcgagctgccagcat

SEQ ID NO: 1046276 - DNA, 25 bp, Homo sapien
tctccaggccacctcgagctgccag

SEQ ID NO: 1046277 - DNA, 25 bp, Homo sapien
tccaggccacctcgagctgccagca

SEQ ID NO: 1046278 - DNA, 25 bp, Homo sapien
ctccaggccacctcgagctgccagc

SEQ ID NO: 1046279 - DNA, 25 bp, Homo sapien
cactcaccagaatggcgagctcttc

SEQ ID NO: 1046280 - DNA, 25 bp, Homo sapien
tcttcggaagtcagaagccagccat

SEQ ID NO: 1046281 - DNA, 25 bp, Homo sapien
catgtgctcgataaatccccagtgc

SEQ ID NO: 1046282 - DNA, 25 bp, Homo sapien
cagaagccagccatgtgctcgataa

SEQ ID NO: 1046283 - DNA, 25 bp, Homo sapien
gagttcatgaccacgatgatctcca

SEQ ID NO: 1046284 - DNA, 25 bp, Homo sapien
tgatctccaaagtcgcgtcaaagcg

SEQ ID NO: 1046285 - DNA, 25 bp, Homo sapien
atgtagatgtccacgccaggcgtcc

SEQ ID NO: 1046286 - DNA, 25 bp, Homo sapien
ggcgtcccatagacctcaaacattt

SEQ ID NO: 1046287 - DNA, 25 bp, Homo sapien
tagtcctgggagcccctaaatcctg

SEQ ID NO: 1046288 - DNA, 25 bp, Homo sapien
gacctccatgtgtcaatcaccagca

SEQ ID NO: 1046289 - DNA, 25 bp, Homo sapien
cccctaaatcctgcaattactgacc

SEQ ID NO: 1046290 - DNA, 25 bp, Homo sapien
atgcttgcctcaaacatacaattac

SEQ ID NO: 1046291 - DNA, 25 bp, Homo sapien
gagagttgggcgcagagtaatacca

SEQ ID NO: 1046292 - DNA, 25 bp, Homo sapien
tgggcgcagagtaataccagcagaa

SEQ ID NO: 1046293 - DNA, 25 bp, Homo sapien
agagctcccgccccaaaagatagct

SEQ ID NO: 1046294 - DNA, 25 bp, Homo sapien
gaagccaagagctcccgccccaaaa

SEQ ID NO: 1046295 - DNA, 25 bp, Homo sapien
acaggtgaggtagagcaccgcatag

SEQ ID NO: 1046296 - DNA, 25 bp, Homo sapien
agaggctcatggctggagtggtagg

SEQ ID NO: 1046297 - DNA, 25 bp, Homo sapien
acacaggtgaggtagagcaccgcat

SEQ ID NO: 1046298 - DNA, 25 bp, Homo sapien
tgaggtagagcaccgcataggccag

SEQ ID NO: 1046299 - DNA, 25 bp, Homo sapien
cacagttcaggtcgcaatccagaga

SEQ ID NO: 1046300 - DNA, 25 bp, Homo sapien
gccttccctcacagttcaggtcgca

SEQ ID NO: 1046301 - DNA, 25 bp, Homo sapien
cttccctcacagttcaggtcgcaat

SEQ ID NO: 1046302 - DNA, 25 bp, Homo sapien
cctcacagttcaggtcgcaatccag

SEQ ID NO: 1046303 - DNA, 25 bp, Homo sapien
gcaagatgccgccatacccactggg

SEQ ID NO: 1046304 - DNA, 25 bp, Homo sapien
gtcctggacatcacagctcggatca

SEQ ID NO: 1046305 - DNA, 25 bp, Homo sapien
acagctcggatcatcacggtcacag

SEQ ID NO: 1046306 - DNA, 25 bp, Homo sapien
caggcagtgcacgtgctggtcacaa

SEQ ID NO: 1046307 - DNA, 25 bp, Homo sapien
tccgcaggaccatgacagacatgtc

SEQ ID NO: 1046308 - DNA, 25 bp, Homo sapien
cagatgtggaagacctgtgcccgtt

SEQ ID NO: 1046309 - DNA, 25 bp, Homo sapien
gacctgtgcccgtttggcatcatag

SEQ ID NO: 1046310 - DNA, 25 bp, Homo sapien
gtttgtggtcatcaaagagggctgc

SEQ ID NO: 1046311 - DNA, 25 bp, Homo sapien
aggacaccttatcttggcccagcac

SEQ ID NO: 1046312 - DNA, 25 bp, Homo sapien
gcaagcggggtacctcataggacac

SEQ ID NO: 1046313 - DNA, 25 bp, Homo sapien
tggagtcgtccagcagagtgacatg

SEQ ID NO: 1046314 - DNA, 25 bp, Homo sapien
tgacatggaaggagatgagtcctgt

SEQ ID NO: 1046315 - DNA, 25 bp, Homo sapien
tgaagataggggatgccgagaaatc

SEQ ID NO: 1046316 - DNA, 25 bp, Homo sapien
acacctctaggggtggcagagtgct

SEQ ID NO: 1046317 - DNA, 25 bp, Homo sapien
cggcacacatacacctctaggggtg

SEQ ID NO: 1046318 - DNA, 25 bp, Homo sapien
gggcgtcatgatccagggtgccact

SEQ ID NO: 1046319 - DNA, 25 bp, Homo sapien
ctggatccagcggtcgttgcggttc

SEQ ID NO: 1046320 - DNA, 25 bp, Homo sapien
atggtcagcttgcagccggccttcc

SEQ ID NO: 1046321 - DNA, 25 bp, Homo sapien
ccagcggtcgttgcggttctcggcc

SEQ ID NO: 1046322 - DNA, 25 bp, Homo sapien
tgccaccgcatccacaaaacacgtg

SEQ ID NO: 1046323 - DNA, 25 bp, Homo sapien
tgcggcgcctgaacgtagcccagct

SEQ ID NO: 1046324 - DNA, 25 bp, Homo sapien
tttgtaagggaaatcctgcagttcc

SEQ ID NO: 1046325 - DNA, 25 bp, Homo sapien
ttttgtaagggaaatcctgcagttc

SEQ ID NO: 1046326 - DNA, 25 bp, Homo sapien
accaccgggagggtcttgtgcggcg

SEQ ID NO: 1046327 - DNA, 25 bp, Homo sapien
agacctgtcgcgtggttcccgagtc

SEQ ID NO: 1046328 - DNA, 25 bp, Homo sapien
gccactcacagacctgtcgcgtggt

SEQ ID NO: 1046329 - DNA, 25 bp, Homo sapien
gcgtggttcccgagtcacgtaacca

SEQ ID NO: 1046330 - DNA, 25 bp, Homo sapien
tgtcgcgtggttcccgagtcacgta

SEQ ID NO: 1046331 - DNA, 25 bp, Homo sapien
atccacatggcccacggccaaccag

SEQ ID NO: 1046332 - DNA, 25 bp, Homo sapien
tccacaaagagctccacggggggct

SEQ ID NO: 1046333 - DNA, 25 bp, Homo sapien
ccacggccaaccagtccacaaagag

SEQ ID NO: 1046334 - DNA, 25 bp, Homo sapien
ccatcgggggcagggacaaagctca

SEQ ID NO: 1046335 - DNA, 25 bp, Homo sapien
tggaagagcttgaagcaggccccag

SEQ ID NO: 1046336 - DNA, 25 bp, Homo sapien
cctggaacaggagggccctcccgtg

SEQ ID NO: 1046337 - DNA, 25 bp, Homo sapien
ggctggccaggagcatccggaagcc

SEQ ID NO: 1046338 - DNA, 25 bp, Homo sapien
ctcccgtggccacacttctgctttt

SEQ ID NO: 1046339 - DNA, 25 bp, Homo sapien
caaacttattgtagttgatgaggtc

SEQ ID NO: 1046340 - DNA, 25 bp, Homo sapien
cacaaacttattgtagttgatgagg

SEQ ID NO: 1046341 - DNA, 25 bp, Homo sapien
tagttgatgaggtctttattggaga

SEQ ID NO: 1046342 - DNA, 25 bp, Homo sapien
ctgcacaaacttattgtagttgatg

SEQ ID NO: 1046343 - DNA, 25 bp, Homo sapien
cttttttcctctcggtcttgaagag

SEQ ID NO: 1046344 - DNA, 25 bp, Homo sapien
tttcctctcggtcttgaagagctgt

SEQ ID NO: 1046345 - DNA, 25 bp, Homo sapien
ttttcctctcggtcttgaagagctg

SEQ ID NO: 1046346 - DNA, 25 bp, Homo sapien
tttttcctctcggtcttgaagagct

SEQ ID NO: 1046347 - DNA, 25 bp, Homo sapien
tctggcaacgtgctctggaaactgc

SEQ ID NO: 1046348 - DNA, 25 bp, Homo sapien
gaaactgccctaatgtgaatttgga

SEQ ID NO: 1046349 - DNA, 25 bp, Homo sapien
ctggaaactgccctaatgtgaattt

SEQ ID NO: 1046350 - DNA, 25 bp, Homo sapien
tgtgaatttggaattgtggattgtg

SEQ ID NO: 1046351 - DNA, 25 bp, Homo sapien
ccccatgcagcatgtggtatggagt

SEQ ID NO: 1046352 - DNA, 25 bp, Homo sapien
cagccattgatgatgggcccaaagg

SEQ ID NO: 1046353 - DNA, 25 bp, Homo sapien
cagcatgtggtatggagtgaagtca

SEQ ID NO: 1046354 - DNA, 25 bp, Homo sapien
catgcagcatgtggtatggagtgaa

SEQ ID NO: 1046355 - DNA, 25 bp, Homo sapien
tttctgcacacattggtgccacagt

SEQ ID NO: 1046356 - DNA, 25 bp, Homo sapien
gctttctgcacacattggtgccaca

SEQ ID NO: 1046357 - DNA, 25 bp, Homo sapien
ggctttctgcacacattggtgccac

SEQ ID NO: 1046358 - DNA, 25 bp, Homo sapien
gggctttctgcacacattggtgcca

SEQ ID NO: 1046359 - DNA, 25 bp, Homo sapien
tcacgctgggtgagggtcaacatct

SEQ ID NO: 1046360 - DNA, 25 bp, Homo sapien
ggtgaaagatggttccgccctgatc

SEQ ID NO: 1046361 - DNA, 25 bp, Homo sapien
ggatgtttctagaccccaatgtgga

SEQ ID NO: 1046362 - DNA, 25 bp, Homo sapien
cgagtgatggaaacgcagctggacc

SEQ ID NO: 1046363 - DNA, 25 bp, Homo sapien
cacagtggaacaagggccacgggct

SEQ ID NO: 1046364 - DNA, 25 bp, Homo sapien
tcacagtggaacaagggccacgggc

SEQ ID NO: 1046365 - DNA, 25 bp, Homo sapien
gtcgggctagctcgtccctctggct

SEQ ID NO: 1046366 - DNA, 25 bp, Homo sapien
cgtcgggctagctcgtccctctggc

SEQ ID NO: 1046367 - DNA, 25 bp, Homo sapien
tctggggtcacacggatcaatgtcc

SEQ ID NO: 1046368 - DNA, 25 bp, Homo sapien
aagctgagtcaaggtgcccagcaca

SEQ ID NO: 1046369 - DNA, 25 bp, Homo sapien
gggtcacacggatcaatgtcccctg

SEQ ID NO: 1046370 - DNA, 25 bp, Homo sapien
tcacacggatcaatgtcccctgggc

SEQ ID NO: 1046371 - DNA, 25 bp, Homo sapien
tgttgcctcgatgaagacagggaga

SEQ ID NO: 1046372 - DNA, 25 bp, Homo sapien
cacgctattatgcacccactgaggg

SEQ ID NO: 1046373 - DNA, 25 bp, Homo sapien
gcccatgatgtgagtattatcccca

SEQ ID NO: 1046374 - DNA, 25 bp, Homo sapien
taaccttacttccagggcacacgtg

SEQ ID NO: 1046375 - DNA, 25 bp, Homo sapien
gatagagtgacaggctcaacgtgtg

SEQ ID NO: 1046376 - DNA, 25 bp, Homo sapien
gatgttcaggggatagagtgacagg

SEQ ID NO: 1046377 - DNA, 25 bp, Homo sapien
gggatagagtgacaggctcaacgtg

SEQ ID NO: 1046378 - DNA, 25 bp, Homo sapien
gtgagatgttcaggggatagagtga

SEQ ID NO: 1046379 - DNA, 25 bp, Homo sapien
tcttggttctgtgtgctgttgtttt

SEQ ID NO: 1046380 - DNA, 25 bp, Homo sapien
acagcaggccagtctgtctacacca

SEQ ID NO: 1046381 - DNA, 25 bp, Homo sapien
agcaggccagtctgtctacaccagc

SEQ ID NO: 1046382 - DNA, 25 bp, Homo sapien
cttgtggttttgcactcagccatca

SEQ ID NO: 1046383 - DNA, 25 bp, Homo sapien
tttgcactcagccatcaccagctgg

SEQ ID NO: 1046384 - DNA, 25 bp, Homo sapien
tggacaagacacatgggaaagcaga

SEQ ID NO: 1046385 - DNA, 25 bp, Homo sapien
gtggacaagacacatgggaaagcag

SEQ ID NO: 1046386 - DNA, 25 bp, Homo sapien
ggacaagacacatgggaaagcagag

SEQ ID NO: 1046387 - DNA, 25 bp, Homo sapien
gggaggcgttgatgctgaaggacgt

SEQ ID NO: 1046388 - DNA, 25 bp, Homo sapien
gaggcgttgatgctgaaggacgtgc

SEQ ID NO: 1046389 - DNA, 25 bp, Homo sapien
ggcgttgatgctgaaggacgtgcag

SEQ ID NO: 1046390 - DNA, 25 bp, Homo sapien
ggacgtgcagtcctcaggggcagag

SEQ ID NO: 1046391 - DNA, 25 bp, Homo sapien
ccatgtggaggaacctgtggatttc

SEQ ID NO: 1046392 - DNA, 25 bp, Homo sapien
ttctggtcgcctgtgctaccactgg

SEQ ID NO: 1046393 - DNA, 25 bp, Homo sapien
gagggccgtgggcaatatccacgac

SEQ ID NO: 1046394 - DNA, 25 bp, Homo sapien
cactttcatcgtcagggtcacctct

SEQ ID NO: 1046395 - DNA, 25 bp, Homo sapien
gccaccccacagctatgacactcac

SEQ ID NO: 1046396 - DNA, 25 bp, Homo sapien
tgccaccccacagctatgacactca

SEQ ID NO: 1046397 - DNA, 25 bp, Homo sapien
ctgccaccccacagctatgacactc

SEQ ID NO: 1046398 - DNA, 25 bp, Homo sapien
tagagctttgactggtggagtcttg

SEQ ID NO: 1046399 - DNA, 25 bp, Homo sapien
tgggtccgtagtatgaaatctgaac

SEQ ID NO: 1046400 - DNA, 25 bp, Homo sapien
ccccggtgaggtagagtagagcttt

SEQ ID NO: 1046401 - DNA, 25 bp, Homo sapien
tggagtcttgggtccgtagtatgaa

SEQ ID NO: 1046402 - DNA, 25 bp, Homo sapien
tatattcttgtataagacagtgtca

SEQ ID NO: 1046403 - DNA, 25 bp, Homo sapien
tataggtggatcattgatatggcag

SEQ ID NO: 1046404 - DNA, 25 bp, Homo sapien
cagaaatggtgaagatgagatataa

SEQ ID NO: 1046405 - DNA, 25 bp, Homo sapien
taaataatggaatttgaggaacact

SEQ ID NO: 1046406 - DNA, 25 bp, Homo sapien
acagctctggttggcttcactttgc

SEQ ID NO: 1046407 - DNA, 25 bp, Homo sapien
ttcacagctctggttggcttcactt

SEQ ID NO: 1046408 - DNA, 25 bp, Homo sapien
gcttcactttgccggtgcgggtgat

SEQ ID NO: 1046409 - DNA, 25 bp, Homo sapien
ttcactttgccggtgcgggtgatgt

SEQ ID NO: 1046410 - DNA, 25 bp, Homo sapien
taggaaaggagcgtttgggtgagtg

SEQ ID NO: 1046411 - DNA, 25 bp, Homo sapien
agtaggaaaggagcgtttgggtgag

SEQ ID NO: 1046412 - DNA, 25 bp, Homo sapien
ccatggcagaagattcgagattgtc

SEQ ID NO: 1046413 - DNA, 25 bp, Homo sapien
gcagaagattcgagattgtctctgt

SEQ ID NO: 1046414 - DNA, 25 bp, Homo sapien
gcagtccatggcagaagattcgaga

SEQ ID NO: 1046415 - DNA, 25 bp, Homo sapien
caggatggcaccctgtccacaaggg

SEQ ID NO: 1046416 - DNA, 25 bp, Homo sapien
ttcccgttagctagcaaatgctctt

SEQ ID NO: 1046417 - DNA, 25 bp, Homo sapien
gcccttcccgttagctagcaaatgc

SEQ ID NO: 1046418 - DNA, 25 bp, Homo sapien
aagcccttcccgttagctagcaaat

SEQ ID NO: 1046419 - DNA, 25 bp, Homo sapien
ccgttagctagcaaatgctctttac

SEQ ID NO: 1046420 - DNA, 25 bp, Homo sapien
agggtcatcagcgacatgtcctgca

SEQ ID NO: 1046421 - DNA, 25 bp, Homo sapien
ggtcatcagcgacatgtcctgcagg

SEQ ID NO: 1046422 - DNA, 25 bp, Homo sapien
ggggtcttcgtgctcagggtcatca

SEQ ID NO: 1046423 - DNA, 25 bp, Homo sapien
gctcagggtcatcagcgacatgtcc

SEQ ID NO: 1046424 - DNA, 25 bp, Homo sapien
tgttgtgctttccaccggggaccat

SEQ ID NO: 1046425 - DNA, 25 bp, Homo sapien
gagagggccacttgggacccaagac

SEQ ID NO: 1046426 - DNA, 25 bp, Homo sapien
agatggtgagggtaatgagccccgg

SEQ ID NO: 1046427 - DNA, 25 bp, Homo sapien
caagactacgctgcacttggaggac

SEQ ID NO: 1046428 - DNA, 25 bp, Homo sapien
tgcacgcgtacacctcctgcggggg

SEQ ID NO: 1046429 - DNA, 25 bp, Homo sapien
tgtcttggaacaccacagcctcggg

SEQ ID NO: 1046430 - DNA, 25 bp, Homo sapien
gatccagggcgccacgcggaagacc

SEQ ID NO: 1046431 - DNA, 25 bp, Homo sapien
gggtcatgatccagggcgccacgcg

SEQ ID NO: 1046432 - DNA, 25 bp, Homo sapien
tttcatggccagagtagtcactgac

SEQ ID NO: 1046433 - DNA, 25 bp, Homo sapien
gatggtcagcttgcacttggctttc

SEQ ID NO: 1046434 - DNA, 25 bp, Homo sapien
ctgacttcaggaagtcctcattttc

SEQ ID NO: 1046435 - DNA, 25 bp, Homo sapien
cctcagggcagatggtcagcttgca

SEQ ID NO: 1046436 - DNA, 25 bp, Homo sapien
aagaccacgggcagcgttttgtgtg

SEQ ID NO: 1046437 - DNA, 25 bp, Homo sapien
cgtttgatgggaaactccttcaggc

SEQ ID NO: 1046438 - DNA, 25 bp, Homo sapien
gggcttggatgtagccgatctccat

SEQ ID NO: 1046439 - DNA, 25 bp, Homo sapien
cttggagagtcgaagaccacgggca

SEQ ID NO: 1046440 - DNA, 25 bp, Homo sapien
taggaattccacctccttgcactgg

SEQ ID NO: 1046441 - DNA, 25 bp, Homo sapien
actgggctactcagctacaggcgcg

SEQ ID NO: 1046442 - DNA, 25 bp, Homo sapien
acaagagggtttcggcagctgtgcc

SEQ ID NO: 1046443 - DNA, 25 bp, Homo sapien
gcaggctaaaaggagggagtctcaa

SEQ ID NO: 1046444 - DNA, 25 bp, Homo sapien
caagcatgagtcagcaatacgtcac

SEQ ID NO: 1046445 - DNA, 25 bp, Homo sapien
gtggctgataaagtcacacccagga

SEQ ID NO: 1046446 - DNA, 25 bp, Homo sapien
taaagaatgcagcactggctaacac

SEQ ID NO: 1046447 - DNA, 25 bp, Homo sapien
aacctgccaggctagtcaagcatga

SEQ ID NO: 1046448 - DNA, 25 bp, Homo sapien
caagccggactggccgggtttgaat

SEQ ID NO: 1046449 - DNA, 25 bp, Homo sapien
agcgagactcgggacaagttgttga

SEQ ID NO: 1046450 - DNA, 25 bp, Homo sapien
actgctcagcgcacagcttggccag

SEQ ID NO: 1046451 - DNA, 25 bp, Homo sapien
gatgcttgtcggaaagccatttgtc

SEQ ID NO: 1046452 - DNA, 25 bp, Homo sapien
ttgtcctagcaaaccttggacccca

SEQ ID NO: 1046453 - DNA, 25 bp, Homo sapien
cggcatatgcaaagaccgtgaggtg

SEQ ID NO: 1046454 - DNA, 25 bp, Homo sapien
gatggacagcgtaaggcataacagc

SEQ ID NO: 1046455 - DNA, 25 bp, Homo sapien
gcagcgcaggcaacgaaaagtagat

SEQ ID NO: 1046456 - DNA, 25 bp, Homo sapien
tactgacgatgcttacaggaagaac

SEQ ID NO: 1046457 - DNA, 25 bp, Homo sapien
ccaccagactcggctttaagaatgt

SEQ ID NO: 1046458 - DNA, 25 bp, Homo sapien
ctcggctttaagaatgtaacctaat

SEQ ID NO: 1046459 - DNA, 25 bp, Homo sapien
caccagactcggctttaagaatgta

SEQ ID NO: 1046460 - DNA, 25 bp, Homo sapien
cagactcggctttaagaatgtaacc

SEQ ID NO: 1046461 - DNA, 25 bp, Homo sapien
tctaatagccgccttggctggcagc

SEQ ID NO: 1046462 - DNA, 25 bp, Homo sapien
cagcttctaatagccgccttggctg

SEQ ID NO: 1046463 - DNA, 25 bp, Homo sapien
tttcagcttctaatagccgccttgg

SEQ ID NO: 1046464 - DNA, 25 bp, Homo sapien
ttctaatagccgccttggctggcag

SEQ ID NO: 1046465 - DNA, 25 bp, Homo sapien
gtttggggccctcgagttacatagc

SEQ ID NO: 1046466 - DNA, 25 bp, Homo sapien
agctgtccccgaagagaatcctgcc

SEQ ID NO: 1046467 - DNA, 25 bp, Homo sapien
cccaaaggagtccagtccactgata

SEQ ID NO: 1046468 - DNA, 25 bp, Homo sapien
cccctgactgtgactggggggctca

SEQ ID NO: 1046469 - DNA, 25 bp, Homo sapien
tgttcaataggttctagccatcctg

SEQ ID NO: 1046470 - DNA, 25 bp, Homo sapien
ccttgcacgcaggagctcattcctg

SEQ ID NO: 1046471 - DNA, 25 bp, Homo sapien
ctttcatttgccaggaactctctgt

SEQ ID NO: 1046472 - DNA, 25 bp, Homo sapien
cctggccttgcacgcaggagctcat

SEQ ID NO: 1046473 - DNA, 25 bp, Homo sapien
cggacagccagtcagaatagagctt

SEQ ID NO: 1046474 - DNA, 25 bp, Homo sapien
ggaactcgtccacgtggcccacgga

SEQ ID NO: 1046475 - DNA, 25 bp, Homo sapien
tcgggtgctggcacaaagctcagga

SEQ ID NO: 1046476 - DNA, 25 bp, Homo sapien
cctggtgcatctgccggctgtcatt

SEQ ID NO: 1046477 - DNA, 25 bp, Homo sapien
tgatcccttcgaacagcagggcctc

SEQ ID NO: 1046478 - DNA, 25 bp, Homo sapien
tcttgatcccttcgaacagcagggc

SEQ ID NO: 1046479 - DNA, 25 bp, Homo sapien
tggaacagtttgtagcaggacctgg

SEQ ID NO: 1046480 - DNA, 25 bp, Homo sapien
tgctcctggaacagtttgtagcagg

SEQ ID NO: 1046481 - DNA, 25 bp, Homo sapien
ggagaacaaggcagggccgacttac

SEQ ID NO: 1046482 - DNA, 25 bp, Homo sapien
aggagaacaaggcagggccgactta

SEQ ID NO: 1046483 - DNA, 25 bp, Homo sapien
gtcttgtttgacagaatgttcttta

SEQ ID NO: 1046484 - DNA, 25 bp, Homo sapien
gttctctcaatgtcttgtttgacag

SEQ ID NO: 1046485 - DNA, 25 bp, Homo sapien
caatgtcttgtttgacagaatgttc

SEQ ID NO: 1046486 - DNA, 25 bp, Homo sapien
tctcaatgtcttgtttgacagaatg

SEQ ID NO: 1046487 - DNA, 25 bp, Homo sapien
ccttagagaactctttgagcttgaa

SEQ ID NO: 1046488 - DNA, 25 bp, Homo sapien
gcttccgccttagagaactctttga

SEQ ID NO: 1046489 - DNA, 25 bp, Homo sapien
aaaagcttccgccttagagaactct

SEQ ID NO: 1046490 - DNA, 25 bp, Homo sapien
tccgccttagagaactctttgagct

SEQ ID NO: 1046491 - DNA, 25 bp, Homo sapien
cggccgttgatgacgggcccgaagg

SEQ ID NO: 1046492 - DNA, 25 bp, Homo sapien
tgaagaagtcgttgatgaaggtgca

SEQ ID NO: 1046493 - DNA, 25 bp, Homo sapien
ggtaggtgaagaagtcgttgatgaa

SEQ ID NO: 1046494 - DNA, 25 bp, Homo sapien
gcgcacgttggtgccgcagtgcacc

SEQ ID NO: 1046495 - DNA, 25 bp, Homo sapien
cagggagccacaatattcacaagag

SEQ ID NO: 1046496 - DNA, 25 bp, Homo sapien
aggacccagcgacatctggccagga

SEQ ID NO: 1046497 - DNA, 25 bp, Homo sapien
catgttgggatcttcagagtgggaa

SEQ ID NO: 1046498 - DNA, 25 bp, Homo sapien
ctgagtgtgcagtgctaggaccatg

SEQ ID NO: 1046499 - DNA, 25 bp, Homo sapien
cgaactaggatcatgcaaaatttta

SEQ ID NO: 1046500 - DNA, 25 bp, Homo sapien
ccgtgggaaactcagaacgaactag

SEQ ID NO: 1046501 - DNA, 25 bp, Homo sapien
tcagaacgaactaggatcatgcaaa

SEQ ID NO: 1046502 - DNA, 25 bp, Homo sapien
tgggaaactcagaacgaactaggat

SEQ ID NO: 1046503 - DNA, 25 bp, Homo sapien
caacccatacgtggctggggtaaca

SEQ ID NO: 1046504 - DNA, 25 bp, Homo sapien
ccaggggtgccttatccaccagctt

SEQ ID NO: 1046505 - DNA, 25 bp, Homo sapien
tgccttatccaccagcttgtctctg

SEQ ID NO: 1046506 - DNA, 25 bp, Homo sapien
gtaacatctgcgcatctgcatgtcc

SEQ ID NO: 1046507 - DNA, 25 bp, Homo sapien
cctcacgcacaagcggccagaggca

SEQ ID NO: 1046508 - DNA, 25 bp, Homo sapien
ctcacgcacaagcggccagaggcag

SEQ ID NO: 1046509 - DNA, 25 bp, Homo sapien
ctgcagagggcagttgggaggagtt

SEQ ID NO: 1046510 - DNA, 25 bp, Homo sapien
gcagagggcagttgggaggagttga

SEQ ID NO: 1046511 - DNA, 25 bp, Homo sapien
gaggagttgatggtagcagtcagga

SEQ ID NO: 1046512 - DNA, 25 bp, Homo sapien
tcaggatggcaatgtgtggcagcat

SEQ ID NO: 1046513 - DNA, 25 bp, Homo sapien
ctgcccttccctgttatacagtcca

SEQ ID NO: 1046514 - DNA, 25 bp, Homo sapien
cccttccctgttatacagtccaggc

SEQ ID NO: 1046515 - DNA, 25 bp, Homo sapien
atttctgtgcccaacacacaaacgg

SEQ ID NO: 1046516 - DNA, 25 bp, Homo sapien
ccgctgagatccaagcagatttctg

SEQ ID NO: 1046517 - DNA, 25 bp, Homo sapien
cagggacaggtggatgatactctgg

SEQ ID NO: 1046518 - DNA, 25 bp, Homo sapien
ccaacacacaaacggcatggacagg

SEQ ID NO: 1046519 - DNA, 25 bp, Homo sapien
cagatggtggcgtcctccttctcag

SEQ ID NO: 1046520 - DNA, 25 bp, Homo sapien
tatccgcatccacggaagggctggg

SEQ ID NO: 1046521 - DNA, 25 bp, Homo sapien
cactgtggcgtacgtgggatcagac

SEQ ID NO: 1046522 - DNA, 25 bp, Homo sapien
tgggcgatgtcatcttcactgtggc

SEQ ID NO: 1046523 - DNA, 25 bp, Homo sapien
aatgccagtgaggtacagcacagct

SEQ ID NO: 1046524 - DNA, 25 bp, Homo sapien
caatgccagtgaggtacagcacagc

SEQ ID NO: 1046525 - DNA, 25 bp, Homo sapien
gggcatcctcgttgggcccatagta

SEQ ID NO: 1046526 - DNA, 25 bp, Homo sapien
tgggcccatagtatgtgaccgagac

SEQ ID NO: 1046527 - DNA, 25 bp, Homo sapien
gagacacttcactgactggaagcag

SEQ ID NO: 1046528 - DNA, 25 bp, Homo sapien
ttcactgactggaagcagcgggaca

SEQ ID NO: 1046529 - DNA, 25 bp, Homo sapien
actgactggaagcagcgggacaaag

SEQ ID NO: 1046530 - DNA, 25 bp, Homo sapien
tgactggaagcagcgggacaaagga

SEQ ID NO: 1046531 - DNA, 25 bp, Homo sapien
ggtagatgtctacctctagagagac

SEQ ID NO: 1046532 - DNA, 25 bp, Homo sapien
tagatgtctacctctagagagacct

SEQ ID NO: 1046533 - DNA, 25 bp, Homo sapien
caacttgcccattgcggtagatgtc

SEQ ID NO: 1046534 - DNA, 25 bp, Homo sapien
ttgtcacttgacatctcaacttgcc

SEQ ID NO: 1046535 - DNA, 25 bp, Homo sapien
aagcaggatggcaccccaaccgctg

SEQ ID NO: 1046536 - DNA, 25 bp, Homo sapien
cctcaagttgctggcccacatcagc

SEQ ID NO: 1046537 - DNA, 25 bp, Homo sapien
aggatggcaccccaaccgctgggac

SEQ ID NO: 1046538 - DNA, 25 bp, Homo sapien
gcaattcacaagcaggatggcaccc

SEQ ID NO: 1046539 - DNA, 25 bp, Homo sapien
gggccagtagactctcgccttcttc

SEQ ID NO: 1046540 - DNA, 25 bp, Homo sapien
gccttcttcgactcttccttggagg

SEQ ID NO: 1046541 - DNA, 25 bp, Homo sapien
gaggtatggaggactagccgatatt

SEQ ID NO: 1046542 - DNA, 25 bp, Homo sapien
gaggactagccgatatttctttaag

SEQ ID NO: 1046543 - DNA, 25 bp, Homo sapien
tatagcttcaacgtagaaagtctcc

SEQ ID NO: 1046544 - DNA, 25 bp, Homo sapien
cagcaccaactcaaaggtactggag

SEQ ID NO: 1046545 - DNA, 25 bp, Homo sapien
agtctccttcaagtggttcccgagg

SEQ ID NO: 1046546 - DNA, 25 bp, Homo sapien
tcggcagatgggaatgctatagctt

SEQ ID NO: 1046547 - DNA, 25 bp, Homo sapien
cggaacaccaccgtgtctttgtaca

SEQ ID NO: 1046548 - DNA, 25 bp, Homo sapien
accaccgtgtctttgtacagcacag

SEQ ID NO: 1046549 - DNA, 25 bp, Homo sapien
accgtgtctttgtacagcacagtct

SEQ ID NO: 1046550 - DNA, 25 bp, Homo sapien
acacagggagccacccggaacacca

SEQ ID NO: 1046551 - DNA, 25 bp, Homo sapien
ctgcacaggtaaacctccagaggca

SEQ ID NO: 1046552 - DNA, 25 bp, Homo sapien
tgcacaggtaaacctccagaggcac

SEQ ID NO: 1046553 - DNA, 25 bp, Homo sapien
tgtgtccacaaaaccctgcagctgc

SEQ ID NO: 1046554 - DNA, 25 bp, Homo sapien
cacaaaaccctgcagctgcagctcc

SEQ ID NO: 1046555 - DNA, 25 bp, Homo sapien
tccacaaaaccctgcagctgcagct

SEQ ID NO: 1046556 - DNA, 25 bp, Homo sapien
tgtccacaaaaccctgcagctgcag

SEQ ID NO: 1046557 - DNA, 25 bp, Homo sapien
gttggggtcctcatagacagatgcc

SEQ ID NO: 1046558 - DNA, 25 bp, Homo sapien
gggtcctcatagacagatgccaccc

SEQ ID NO: 1046559 - DNA, 25 bp, Homo sapien
tcctcatagacagatgccaccctgg

SEQ ID NO: 1046560 - DNA, 25 bp, Homo sapien
atagacagatgccaccctggctgtt

SEQ ID NO: 1046561 - DNA, 25 bp, Homo sapien
cggcctgaggtgtgtcgaggatcaa

SEQ ID NO: 1046562 - DNA, 25 bp, Homo sapien
cgaggatcaaggacgttgtcttgtg

SEQ ID NO: 1046563 - DNA, 25 bp, Homo sapien
gggaactcatcgagatcggcggcct

SEQ ID NO: 1046564 - DNA, 25 bp, Homo sapien
gggtgtagcagaaggccatctcatc

SEQ ID NO: 1046565 - DNA, 25 bp, Homo sapien
ggatcatgtagccaataccagggct

SEQ ID NO: 1046566 - DNA, 25 bp, Homo sapien
ttatggtcctcagtgtcctggatca

SEQ ID NO: 1046567 - DNA, 25 bp, Homo sapien
ggactctgcccagcgggtactcttt

SEQ ID NO: 1046568 - DNA, 25 bp, Homo sapien
ggtaaaagctgctgccaatgaggac

SEQ ID NO: 1046569 - DNA, 25 bp, Homo sapien
gggatgaagcacatgaactcatcca

SEQ ID NO: 1046570 - DNA, 25 bp, Homo sapien
tccaccggcgcttggacctgctggg

SEQ ID NO: 1046571 - DNA, 25 bp, Homo sapien
catccacgtggccagtcattagcca

SEQ ID NO: 1046572 - DNA, 25 bp, Homo sapien
aagtctcggagggtcttactcatgg

SEQ ID NO: 1046573 - DNA, 25 bp, Homo sapien
atcaaacagaagagcgtcgccatag

SEQ ID NO: 1046574 - DNA, 25 bp, Homo sapien
gagctgatctgctctaagctcatca

SEQ ID NO: 1046575 - DNA, 25 bp, Homo sapien
ccttctgtttctctcggaacagttt

SEQ ID NO: 1046576 - DNA, 25 bp, Homo sapien
ctctcggaacagtttatagcaggca

SEQ ID NO: 1046577 - DNA, 25 bp, Homo sapien
ccagaagttggtcgatggttttggc

SEQ ID NO: 1046578 - DNA, 25 bp, Homo sapien
tcagccagaagttggtcgatggttt

SEQ ID NO: 1046579 - DNA, 25 bp, Homo sapien
tcatcagccagaagttggtcgatgg

SEQ ID NO: 1046580 - DNA, 25 bp, Homo sapien
cagaagttggtcgatggttttggct

SEQ ID NO: 1046581 - DNA, 25 bp, Homo sapien
tcaggatgtcacggttcaggtgaat

SEQ ID NO: 1046582 - DNA, 25 bp, Homo sapien
caggatgtcacggttcaggtgaatg

SEQ ID NO: 1046583 - DNA, 25 bp, Homo sapien
ggatgtcacggttcaggtgaatgca

SEQ ID NO: 1046584 - DNA, 25 bp, Homo sapien
aggatgtcacggttcaggtgaatgc

SEQ ID NO: 1046585 - DNA, 25 bp, Homo sapien
aggtcagggaagtatggcctcgcaa

SEQ ID NO: 1046586 - DNA, 25 bp, Homo sapien
gggaatctcgatgatgtcctgttcc

SEQ ID NO: 1046587 - DNA, 25 bp, Homo sapien
ggatgttagtcagcttctccaagca

SEQ ID NO: 1046588 - DNA, 25 bp, Homo sapien
caagcagaacagctggggaatctcg

SEQ ID NO: 1046589 - DNA, 25 bp, Homo sapien
acagatgtctccgacctctgtcagg

SEQ ID NO: 1046590 - DNA, 25 bp, Homo sapien
catttgaaggcaaagggcacccggc

SEQ ID NO: 1046591 - DNA, 25 bp, Homo sapien
acccggcggatgttggcacaggcac

SEQ ID NO: 1046592 - DNA, 25 bp, Homo sapien
gatgaaggtgcacttgaagcccagg

SEQ ID NO: 1046593 - DNA, 25 bp, Homo sapien
ggggcagagctggcagctccagggc

SEQ ID NO: 1046594 - DNA, 25 bp, Homo sapien
cagagctggcagctccagggcctgg

SEQ ID NO: 1046595 - DNA, 25 bp, Homo sapien
ggcagagctggcagctccagggcct

SEQ ID NO: 1046596 - DNA, 25 bp, Homo sapien
gctggggcagagctggcagctccag

SEQ ID NO: 1046597 - DNA, 25 bp, Homo sapien
gtcccagttgcttaaaccagagcag

SEQ ID NO: 1046598 - DNA, 25 bp, Homo sapien
gtccatttggataagtccaaccact

SEQ ID NO: 1046599 - DNA, 25 bp, Homo sapien
tggataatcttaaatccatttggat

SEQ ID NO: 1046600 - DNA, 25 bp, Homo sapien
tccatttggataatctaagtccatt

SEQ ID NO: 1046601 - DNA, 25 bp, Homo sapien
gtgcaagcatggcgccaaatgacca

SEQ ID NO: 1046602 - DNA, 25 bp, Homo sapien
tagtgcaagcatggcgccaaatgac

SEQ ID NO: 1046603 - DNA, 25 bp, Homo sapien
aagcatggcgccaaatgaccactga

SEQ ID NO: 1046604 - DNA, 25 bp, Homo sapien
gcaagcatggcgccaaatgaccact

SEQ ID NO: 1046605 - DNA, 25 bp, Homo sapien
tcttgcctttggccagtacagggag

SEQ ID NO: 1046606 - DNA, 25 bp, Homo sapien
cttgcctttggccagtacagggagc

SEQ ID NO: 1046607 - DNA, 25 bp, Homo sapien
gttttcttgcctttggccagtacag

SEQ ID NO: 1046608 - DNA, 25 bp, Homo sapien
tttcttgcctttggccagtacaggg

SEQ ID NO: 1046609 - DNA, 25 bp, Homo sapien
cctgctttgccccgaacacctgccc

SEQ ID NO: 1046610 - DNA, 25 bp, Homo sapien
ctttgccccgaacacctgccccagc

SEQ ID NO: 1046611 - DNA, 25 bp, Homo sapien
tgctttgccccgaacacctgcccca

SEQ ID NO: 1046612 - DNA, 25 bp, Homo sapien
gctttgccccgaacacctgccccag

SEQ ID NO: 1046613 - DNA, 25 bp, Homo sapien
ggcagtgtaggtggccaatacagag

SEQ ID NO: 1046614 - DNA, 25 bp, Homo sapien
tggccaatacagagcagccggggcc

SEQ ID NO: 1046615 - DNA, 25 bp, Homo sapien
cagtgtaggtggccaatacagagca

SEQ ID NO: 1046616 - DNA, 25 bp, Homo sapien
caatacagagcagccggggcctgcc

SEQ ID NO: 1046617 - DNA, 25 bp, Homo sapien
cactggctgttgtgtattgggcaca

SEQ ID NO: 1046618 - DNA, 25 bp, Homo sapien
gaaacggtctcccatggcctgttag

SEQ ID NO: 1046619 - DNA, 25 bp, Homo sapien
cctgttagctgcagaaggagcatgt

SEQ ID NO: 1046620 - DNA, 25 bp, Homo sapien
aattgagtgtcgtgtgtctcgcccc

SEQ ID NO: 1046621 - DNA, 25 bp, Homo sapien
gcggtgactgcatgtgcacccactc

SEQ ID NO: 1046622 - DNA, 25 bp, Homo sapien
gcatccagcgcggtgactgcatgtg

SEQ ID NO: 1046623 - DNA, 25 bp, Homo sapien
ttttcactggggctttgagaggaaa

SEQ ID NO: 1046624 - DNA, 25 bp, Homo sapien
aataagtcatgggaggcatccagcg

SEQ ID NO: 1046625 - DNA, 25 bp, Homo sapien
gaagggtgtcgtgcactcctagaga

SEQ ID NO: 1046626 - DNA, 25 bp, Homo sapien
tcttctagaaccctagcccagggac

SEQ ID NO: 1046627 - DNA, 25 bp, Homo sapien
tagagaaaggtacacagttgcccgg

SEQ ID NO: 1046628 - DNA, 25 bp, Homo sapien
tgggaatgtgcttggcgctgaccct

SEQ ID NO: 1046629 - DNA, 25 bp, Homo sapien
gcctccctgggcttagctggactta

SEQ ID NO: 1046630 - DNA, 25 bp, Homo sapien
ctgggcttagctggacttagatctt

SEQ ID NO: 1046631 - DNA, 25 bp, Homo sapien
ggagcctccctgggcttagctggac

SEQ ID NO: 1046632 - DNA, 25 bp, Homo sapien
ccctgggcttagctggacttagatc

SEQ ID NO: 1046633 - DNA, 25 bp, Homo sapien
tgctaaactaacctaatttgtccaa

SEQ ID NO: 1046634 - DNA, 25 bp, Homo sapien
cgtaagcttccatgcgacagcctga

SEQ ID NO: 1046635 - DNA, 25 bp, Homo sapien
catctctgacgtaagcttccatgcg

SEQ ID NO: 1046636 - DNA, 25 bp, Homo sapien
aaccaccatctctgacgtaagcttc

SEQ ID NO: 1046637 - DNA, 25 bp, Homo sapien
aagttaaatattggtctcttcaagt

SEQ ID NO: 1046638 - DNA, 25 bp, Homo sapien
gactagaacttaagtgtgagacttg

SEQ ID NO: 1046639 - DNA, 25 bp, Homo sapien
tggacccaagagaggcgacagctgt

SEQ ID NO: 1046640 - DNA, 25 bp, Homo sapien
tatttagttcagtggtgcttatggg

SEQ ID NO: 1046641 - DNA, 25 bp, Homo sapien
agtgagttatgaggtgcctttcccg

SEQ ID NO: 1046642 - DNA, 25 bp, Homo sapien
gagtgagttatgaggtgcctttccc

SEQ ID NO: 1046643 - DNA, 25 bp, Homo sapien
tgagtgagttatgaggtgcctttcc

SEQ ID NO: 1046644 - DNA, 25 bp, Homo sapien
tgccacctgcgtcctcgtcaagtgc

SEQ ID NO: 1046645 - DNA, 25 bp, Homo sapien
agtgcccgagctcgccgccgtgtgt

SEQ ID NO: 1046646 - DNA, 25 bp, Homo sapien
aagagtccccttccttgcgtgtcag

SEQ ID NO: 1046647 - DNA, 25 bp, Homo sapien
ttgcgtgtcagcacggatgctgtga

SEQ ID NO: 1046648 - DNA, 25 bp, Homo sapien
aaatgtcccttacaggaaccggcag

SEQ ID NO: 1046649 - DNA, 25 bp, Homo sapien
caattagcatcgtgatccaagcaga

SEQ ID NO: 1046650 - DNA, 25 bp, Homo sapien
acattatagaatcggccgtgtcccc

SEQ ID NO: 1046651 - DNA, 25 bp, Homo sapien
taagagatggaccagccagcagtca

SEQ ID NO: 1046652 - DNA, 25 bp, Homo sapien
tgatctgcctacactagtcatggtt

SEQ ID NO: 1046653 - DNA, 25 bp, Homo sapien
tccgcttaactcttggtggtcttag

SEQ ID NO: 1046654 - DNA, 25 bp, Homo sapien
tgtggagtgcatcctgatctgccta

SEQ ID NO: 1046655 - DNA, 25 bp, Homo sapien
cactagtcatggtttgattctccgc

SEQ ID NO: 1046656 - DNA, 25 bp, Homo sapien
ttatcagtgctctggtgcggaaccg

SEQ ID NO: 1046657 - DNA, 25 bp, Homo sapien
gaacacttgtttgccatcccgtcct

SEQ ID NO: 1046658 - DNA, 25 bp, Homo sapien
tgcggaaccgtgtagccattgtcct

SEQ ID NO: 1046659 - DNA, 25 bp, Homo sapien
gacaggaactcgttgtgttgtccag

SEQ ID NO: 1046660 - DNA, 25 bp, Homo sapien
tgctgaaaccttgtccggaagagtg

SEQ ID NO: 1046661 - DNA, 25 bp, Homo sapien
gaaaagtagcgacatatccggaaat

SEQ ID NO: 1046662 - DNA, 25 bp, Homo sapien
cagggaagcccgctgttcgatgttt

SEQ ID NO: 1046663 - DNA, 25 bp, Homo sapien
tacattcatcgtagcctagaaggtg

SEQ ID NO: 1046664 - DNA, 25 bp, Homo sapien
cctaagtgcggttccctgaagtgcg

SEQ ID NO: 1046665 - DNA, 25 bp, Homo sapien
gattatttcgggttgccacgtgagg

SEQ ID NO: 1046666 - DNA, 25 bp, Homo sapien
tgaagtgcgcttcccggttgtggct

SEQ ID NO: 1046667 - DNA, 25 bp, Homo sapien
caggcatcagttctcagttagtggg

SEQ ID NO: 1046668 - DNA, 25 bp, Homo sapien
gccttggtttttctcgtccattcca

SEQ ID NO: 1046669 - DNA, 25 bp, Homo sapien
ttttctcgtccattccaactctcat

SEQ ID NO: 1046670 - DNA, 25 bp, Homo sapien
gtttttctcgtccattccaactctc

SEQ ID NO: 1046671 - DNA, 25 bp, Homo sapien
tggtttttctcgtccattccaactc

SEQ ID NO: 1046672 - DNA, 25 bp, Homo sapien
atacattaaacaggcggcactcctt

SEQ ID NO: 1046673 - DNA, 25 bp, Homo sapien
attaaacaggcggcactccttctgg

SEQ ID NO: 1046674 - DNA, 25 bp, Homo sapien
ttaaacaggcggcactccttctggc

SEQ ID NO: 1046675 - DNA, 25 bp, Homo sapien
ctgatacattaaacaggcggcactc

SEQ ID NO: 1046676 - DNA, 25 bp, Homo sapien
gatggtatgggacgaaaatgcttct

SEQ ID NO: 1046677 - DNA, 25 bp, Homo sapien
tatgggacgaaaatgcttctgtgtc

SEQ ID NO: 1046678 - DNA, 25 bp, Homo sapien
ggacgaaaatgcttctgtgtcagcc

SEQ ID NO: 1046679 - DNA, 25 bp, Homo sapien
gtgatggtatgggacgaaaatgctt

SEQ ID NO: 1046680 - DNA, 25 bp, Homo sapien
gcatctggagagtccgggctgccta

SEQ ID NO: 1046681 - DNA, 25 bp, Homo sapien
catctggagagtccgggctgcctag

SEQ ID NO: 1046682 - DNA, 25 bp, Homo sapien
ctggcatctggagagtccgggctgc

SEQ ID NO: 1046683 - DNA, 25 bp, Homo sapien
caggctggcatctggagagtccggg

SEQ ID NO: 1046684 - DNA, 25 bp, Homo sapien
ggggattttgcctgaagcatcctcc

SEQ ID NO: 1046685 - DNA, 25 bp, Homo sapien
gaagccagcatcttgcatgtgggga

SEQ ID NO: 1046686 - DNA, 25 bp, Homo sapien
gcatgtggggattttgcctgaagca

SEQ ID NO: 1046687 - DNA, 25 bp, Homo sapien
gcatcttgcatgtggggattttgcc

SEQ ID NO: 1046688 - DNA, 25 bp, Homo sapien
agcctccgcggccagccccattgat

SEQ ID NO: 1046689 - DNA, 25 bp, Homo sapien
gagcctccgcggccagccccattga

SEQ ID NO: 1046690 - DNA, 25 bp, Homo sapien
gcctccgcggccagccccattgatc

SEQ ID NO: 1046691 - DNA, 25 bp, Homo sapien
aaaccatctccgcagaaatcggtcg

SEQ ID NO: 1046692 - DNA, 25 bp, Homo sapien
catctccgcagaaatcggtcgaaga

SEQ ID NO: 1046693 - DNA, 25 bp, Homo sapien
tctccgcagaaatcggtcgaagaag

SEQ ID NO: 1046694 - DNA, 25 bp, Homo sapien
cgcagaaatcggtcgaagaaggcag

SEQ ID NO: 1046695 - DNA, 25 bp, Homo sapien
aagggtcccgtctgtcagttgaagt

SEQ ID NO: 1046696 - DNA, 25 bp, Homo sapien
tccgggaagggagcacaagtgacag

SEQ ID NO: 1046697 - DNA, 25 bp, Homo sapien
ctcaatcctgtgcagtccaatcgca

SEQ ID NO: 1046698 - DNA, 25 bp, Homo sapien
tcctgtgcagtccaatcgcagtcct

SEQ ID NO: 1046699 - DNA, 25 bp, Homo sapien
agggtaatttgccaaggaggcaaag

SEQ ID NO: 1046700 - DNA, 25 bp, Homo sapien
tagggtaatttgccaaggaggcaaa

SEQ ID NO: 1046701 - DNA, 25 bp, Homo sapien
gggtaatttgccaaggaggcaaagc

SEQ ID NO: 1046702 - DNA, 25 bp, Homo sapien
ggtcctggactctggtagctggggg

SEQ ID NO: 1046703 - DNA, 25 bp, Homo sapien
tggtcctggactctggtagctgggg

SEQ ID NO: 1046704 - DNA, 25 bp, Homo sapien
tgttgttgcacacaaccgtccgtcc

SEQ ID NO: 1046705 - DNA, 25 bp, Homo sapien
cgtccgtcctgggagtcatgagcca

SEQ ID NO: 1046706 - DNA, 25 bp, Homo sapien
ccctgacagtggtatcgaagatcct

SEQ ID NO: 1046707 - DNA, 25 bp, Homo sapien
ggacactccaaggaaaccctgacag

SEQ ID NO: 1046708 - DNA, 25 bp, Homo sapien
gtgtggtccggagagctccctgttt

SEQ ID NO: 1046709 - DNA, 25 bp, Homo sapien
tggttccccttgaaacaaaggctgc

SEQ ID NO: 1046710 - DNA, 25 bp, Homo sapien
gtcacagtgtggtccggagagctcc

SEQ ID NO: 1046711 - DNA, 25 bp, Homo sapien
cccttgaaacaaaggctgcctctgt

SEQ ID NO: 1046712 - DNA, 25 bp, Homo sapien
cgaccacatgaattctgatcagcgg

SEQ ID NO: 1046713 - DNA, 25 bp, Homo sapien
gaattctgatcagcggcgtcagcca

SEQ ID NO: 1046714 - DNA, 25 bp, Homo sapien
aaatcctccgaccacatgaattctg

SEQ ID NO: 1046715 - DNA, 25 bp, Homo sapien
cacatgaattctgatcagcggcgtc

SEQ ID NO: 1046716 - DNA, 25 bp, Homo sapien
gcttgagggcagctatgatacagcc

SEQ ID NO: 1046717 - DNA, 25 bp, Homo sapien
tgtctgagaaccaacacaaggccca

SEQ ID NO: 1046718 - DNA, 25 bp, Homo sapien
gtagtgcctatattgccaggtagcc

SEQ ID NO: 1046719 - DNA, 25 bp, Homo sapien
tgatttgacccatctagcttgaggg

SEQ ID NO: 1046720 - DNA, 25 bp, Homo sapien
gaaaccctagacttatgacctgccc

SEQ ID NO: 1046721 - DNA, 25 bp, Homo sapien
ggcgcgcagggtgctggcttctcct

SEQ ID NO: 1046722 - DNA, 25 bp, Homo sapien
ccaaaagggtgagaatcctggaccg

SEQ ID NO: 1046723 - DNA, 25 bp, Homo sapien
cacttcaacattttgccctgaggtt

SEQ ID NO: 1046724 - DNA, 25 bp, Homo sapien
gcccgccgcgctccgaggcctggtc

SEQ ID NO: 1046725 - DNA, 25 bp, Homo sapien
ccgccgcgctccgaggcctggtccc

SEQ ID NO: 1046726 - DNA, 25 bp, Homo sapien
gcgctccgaggcctggtcccgccgc

SEQ ID NO: 1046727 - DNA, 25 bp, Homo sapien
gccgcgctccgaggcctggtcccgc

SEQ ID NO: 1046728 - DNA, 25 bp, Homo sapien
tccagctccgcaggccgccgcgggc

SEQ ID NO: 1046729 - DNA, 25 bp, Homo sapien
cgcgcctccagctccgcaggccgcc

SEQ ID NO: 1046730 - DNA, 25 bp, Homo sapien
cctggcggccggcgccgcgcctcca

SEQ ID NO: 1046731 - DNA, 25 bp, Homo sapien
cctccagctccgcaggccgccgcgg

SEQ ID NO: 1046732 - DNA, 25 bp, Homo sapien
gcgcctttgtcgtccgcgccgctca

SEQ ID NO: 1046733 - DNA, 25 bp, Homo sapien
cgcctttgtcgtccgcgccgctcac

SEQ ID NO: 1046734 - DNA, 25 bp, Homo sapien
ctgctttctagtctgtgtgtccagg

SEQ ID NO: 1046735 - DNA, 25 bp, Homo sapien
tggagatttccggaggctgacctgc

SEQ ID NO: 1046736 - DNA, 25 bp, Homo sapien
agcttggagatttccggaggctgac

SEQ ID NO: 1046737 - DNA, 25 bp, Homo sapien
gctgacctgctttctagtctgtgtg

SEQ ID NO: 1046738 - DNA, 25 bp, Homo sapien
ttacaggagggttctgagcttcagc

SEQ ID NO: 1046739 - DNA, 25 bp, Homo sapien
gagcatcagattcgggcaccccagg

SEQ ID NO: 1046740 - DNA, 25 bp, Homo sapien
cctggatagagagaacagcccacag

SEQ ID NO: 1046741 - DNA, 25 bp, Homo sapien
ttcctggatagagagaacagcccac

SEQ ID NO: 1046742 - DNA, 25 bp, Homo sapien
cagagcgagcatcagattcgggcac

SEQ ID NO: 1046743 - DNA, 25 bp, Homo sapien
cactaagatcagtcctggagcgcca

SEQ ID NO: 1046744 - DNA, 25 bp, Homo sapien
cttcctggtgcatggtaacaactca

SEQ ID NO: 1046745 - DNA, 25 bp, Homo sapien
aatttgtccacggtctgtcctcaga

SEQ ID NO: 1046746 - DNA, 25 bp, Homo sapien
ggagcgccatcacaccaaaatgtaa

SEQ ID NO: 1046747 - DNA, 25 bp, Homo sapien
aataggacgtacttgcaggatcggc

SEQ ID NO: 1046748 - DNA, 25 bp, Homo sapien
ttgagaatccaccagccacagatgc

SEQ ID NO: 1046749 - DNA, 25 bp, Homo sapien
tgggatgcataccaatcagccagcg

SEQ ID NO: 1046750 - DNA, 25 bp, Homo sapien
caggacttttacagagaggagggca

SEQ ID NO: 1046751 - DNA, 25 bp, Homo sapien
ccaaatcttgcagggcatcaggcat

SEQ ID NO: 1046752 - DNA, 25 bp, Homo sapien
gtgagagactgctcccgggctgcca

SEQ ID NO: 1046753 - DNA, 25 bp, Homo sapien
ccacagaaccgtgagagactgctcc

SEQ ID NO: 1046754 - DNA, 25 bp, Homo sapien
ctgtggagctgacgcccgcttctgc

SEQ ID NO: 1046755 - DNA, 25 bp, Homo sapien
cactgtggagctgacgcccgcttct

SEQ ID NO: 1046756 - DNA, 25 bp, Homo sapien
gagggctcattggggctgcctctga

SEQ ID NO: 1046757 - DNA, 25 bp, Homo sapien
agggctcattggggctgcctctgac

SEQ ID NO: 1046758 - DNA, 25 bp, Homo sapien
gggctcattggggctgcctctgact

SEQ ID NO: 1046759 - DNA, 25 bp, Homo sapien
agagggctcattggggctgcctctg

SEQ ID NO: 1046760 - DNA, 25 bp, Homo sapien
gagggcattggtgaagtcctctggg

SEQ ID NO: 1046761 - DNA, 25 bp, Homo sapien
ttctccagagaaccccagaccctca

SEQ ID NO: 1046762 - DNA, 25 bp, Homo sapien
ccctgtgatggggcaccgtggctcc

SEQ ID NO: 1046763 - DNA, 25 bp, Homo sapien
ccacatcaggggtgtccctgtgatg

SEQ ID NO: 1046764 - DNA, 25 bp, Homo sapien
cccctcttctccagagaaccccaga

SEQ ID NO: 1046765 - DNA, 25 bp, Homo sapien
ctcctagggagcccctggtgaggat

SEQ ID NO: 1046766 - DNA, 25 bp, Homo sapien
gcagaaagtccaatgtcctcccctt

SEQ ID NO: 1046767 - DNA, 25 bp, Homo sapien
cttccagggcagaaagtccaatgtc

SEQ ID NO: 1046768 - DNA, 25 bp, Homo sapien
cagggcagaaagtccaatgtcctcc

SEQ ID NO: 1046769 - DNA, 25 bp, Homo sapien
ccttccagggcagaaagtccaatgt

SEQ ID NO: 1046770 - DNA, 25 bp, Homo sapien
ccagtgccaagggacctgcagggac

SEQ ID NO: 1046771 - DNA, 25 bp, Homo sapien
tgttgccagtgccaagggacctgca

SEQ ID NO: 1046772 - DNA, 25 bp, Homo sapien
ggacctgctgggtgtccgtcctcat

SEQ ID NO: 1046773 - DNA, 25 bp, Homo sapien
tcctgttgccagtgccaagggacct

SEQ ID NO: 1046774 - DNA, 25 bp, Homo sapien
gctcagaccagcaccgtcccagcta

SEQ ID NO: 1046775 - DNA, 25 bp, Homo sapien
gaccagcaccgtcccagctacacac

SEQ ID NO: 1046776 - DNA, 25 bp, Homo sapien
cagacaaggtccagctcagaccagc

SEQ ID NO: 1046777 - DNA, 25 bp, Homo sapien
cagaccagcaccgtcccagctacac

SEQ ID NO: 1046778 - DNA, 25 bp, Homo sapien
ggctgtggaggagggttggaggaag

SEQ ID NO: 1046779 - DNA, 25 bp, Homo sapien
ctgtggaggagggttggaggaagcc

SEQ ID NO: 1046780 - DNA, 25 bp, Homo sapien
tggcaggctgtggaggagggttgga

SEQ ID NO: 1046781 - DNA, 25 bp, Homo sapien
gtggaggagggttggaggaagccat

SEQ ID NO: 1046782 - DNA, 25 bp, Homo sapien
gacagacccggtccttgtgagaaaa

SEQ ID NO: 1046783 - DNA, 25 bp, Homo sapien
aaatacaagcgagtccaggaggcga

SEQ ID NO: 1046784 - DNA, 25 bp, Homo sapien
gatgataagcactcccgtcagtgag

SEQ ID NO: 1046785 - DNA, 25 bp, Homo sapien
aacgtgagatagaggatgcggccca

SEQ ID NO: 1046786 - DNA, 25 bp, Homo sapien
tgttcaggttcaggcctcttggtgg

SEQ ID NO: 1046787 - DNA, 25 bp, Homo sapien
gagaggaaagggaacaggtgcccat

SEQ ID NO: 1046788 - DNA, 25 bp, Homo sapien
aagggaacaggtgcccatggcagca

SEQ ID NO: 1046789 - DNA, 25 bp, Homo sapien
ccatgttcaggttcaggcctcttgg

SEQ ID NO: 1046790 - DNA, 25 bp, Homo sapien
tatccatgcatgcagtgagcagctc

SEQ ID NO: 1046791 - DNA, 25 bp, Homo sapien
tgaagacacgcgcaggaatgaaggt

SEQ ID NO: 1046792 - DNA, 25 bp, Homo sapien
tgccctcgcactgagccttaaagga

SEQ ID NO: 1046793 - DNA, 25 bp, Homo sapien
ccaactaaagcgtggattccaggca

SEQ ID NO: 1046794 - DNA, 25 bp, Homo sapien
aggcagccagcttgcaggtactagg

SEQ ID NO: 1046795 - DNA, 25 bp, Homo sapien
cagcttgcaggtactagggcacaga

SEQ ID NO: 1046796 - DNA, 25 bp, Homo sapien
cagccagcttgcaggtactagggca

SEQ ID NO: 1046797 - DNA, 25 bp, Homo sapien
ttgcaggtactagggcacagactgg

SEQ ID NO: 1046798 - DNA, 25 bp, Homo sapien
tgcctcagaggaggggcctgggact

SEQ ID NO: 1046799 - DNA, 25 bp, Homo sapien
ctgcctcagaggaggggcctgggac

SEQ ID NO: 1046800 - DNA, 25 bp, Homo sapien
gcctcagaggaggggcctgggactc

SEQ ID NO: 1046801 - DNA, 25 bp, Homo sapien
gggatggagtccaagtggatcagtg

SEQ ID NO: 1046802 - DNA, 25 bp, Homo sapien
atcaaactcaaacgcctctcctggg

SEQ ID NO: 1046803 - DNA, 25 bp, Homo sapien
ggtctgtgtccctctcaggagcaag

SEQ ID NO: 1046804 - DNA, 25 bp, Homo sapien
gtgtccctctcaggagcaaggctgg

SEQ ID NO: 1046805 - DNA, 25 bp, Homo sapien
caccaggcatccctgagagcctgga

SEQ ID NO: 1046806 - DNA, 25 bp, Homo sapien
aggcatccctgagagcctggagctt

SEQ ID NO: 1046807 - DNA, 25 bp, Homo sapien
ctgagagcctggagcttccgcccag

SEQ ID NO: 1046808 - DNA, 25 bp, Homo sapien
gagcctggagcttccgcccagttct

SEQ ID NO: 1046809 - DNA, 25 bp, Homo sapien
gaagccacagactgcagcttcttcc

SEQ ID NO: 1046810 - DNA, 25 bp, Homo sapien
cagggaagccacagactgcagcttc

SEQ ID NO: 1046811 - DNA, 25 bp, Homo sapien
acagactgcagcttcttcccactgg

SEQ ID NO: 1046812 - DNA, 25 bp, Homo sapien
tcccactggcttttcccttcctgct

SEQ ID NO: 1046813 - DNA, 25 bp, Homo sapien
gccgggtggagcagctgctgggtct

SEQ ID NO: 1046814 - DNA, 25 bp, Homo sapien
cctgtgccgggtggagcagctgctg

SEQ ID NO: 1046815 - DNA, 25 bp, Homo sapien
ggtggagcagctgctgggtctgggt

SEQ ID NO: 1046816 - DNA, 25 bp, Homo sapien
cgggtggagcagctgctgggtctgg

SEQ ID NO: 1046817 - DNA, 25 bp, Homo sapien
ccatgagaatccctgcgaccagggc

SEQ ID NO: 1046818 - DNA, 25 bp, Homo sapien
ggagcccatgagaatccctgcgacc

SEQ ID NO: 1046819 - DNA, 25 bp, Homo sapien
atgagaatccctgcgaccagggcca

SEQ ID NO: 1046820 - DNA, 25 bp, Homo sapien
agcccatgagaatccctgcgaccag

SEQ ID NO: 1046821 - DNA, 25 bp, Homo sapien
taccggccagtcagcagagcaccat

SEQ ID NO: 1046822 - DNA, 25 bp, Homo sapien
agggcaggggaataccggccagtca

SEQ ID NO: 1046823 - DNA, 25 bp, Homo sapien
aaaggacaggaagacgcaagggaag

SEQ ID NO: 1046824 - DNA, 25 bp, Homo sapien
cccccatcgcagtcactcagtaaag

SEQ ID NO: 1046825 - DNA, 25 bp, Homo sapien
agcaccacacaggatcctggcatct

SEQ ID NO: 1046826 - DNA, 25 bp, Homo sapien
cttcccagcaccacacaggatcctg

SEQ ID NO: 1046827 - DNA, 25 bp, Homo sapien
ccacacaggatcctggcatcttctg

SEQ ID NO: 1046828 - DNA, 25 bp, Homo sapien
acacaggatcctggcatcttctgca

SEQ ID NO: 1046829 - DNA, 25 bp, Homo sapien
ctggtcagcgggacatgatgggcaa

SEQ ID NO: 1046830 - DNA, 25 bp, Homo sapien
tgccgggccccggagaaggctgcgt

SEQ ID NO: 1046831 - DNA, 25 bp, Homo sapien
gctgcgtccgctgcatccccattgc

SEQ ID NO: 1046832 - DNA, 25 bp, Homo sapien
ttccgcttccagctggagtgccggg

SEQ ID NO: 1046833 - DNA, 25 bp, Homo sapien
tgcgacgggaactcttccgcttcca

SEQ ID NO: 1046834 - DNA, 25 bp, Homo sapien
tgatgcgcatctgggctctcgcagg

SEQ ID NO: 1046835 - DNA, 25 bp, Homo sapien
gctctcgcaggggacgtcgtcataa

SEQ ID NO: 1046836 - DNA, 25 bp, Homo sapien
cgggctgatgcgcatctgggctctc

SEQ ID NO: 1046837 - DNA, 25 bp, Homo sapien
gggacgtcgtcataaatcacatcct

SEQ ID NO: 1046838 - DNA, 25 bp, Homo sapien
cattgcgctctgtgctgctcaagga

SEQ ID NO: 1046839 - DNA, 25 bp, Homo sapien
ggataagcatatccttggcccaggt

SEQ ID NO: 1046840 - DNA, 25 bp, Homo sapien
tcagactcggagctcctcaaaagca

SEQ ID NO: 1046841 - DNA, 25 bp, Homo sapien
tcctttgcctcctaatacagtggga

SEQ ID NO: 1046842 - DNA, 25 bp, Homo sapien
acagcagggtgtgaatgatcactcc

SEQ ID NO: 1046843 - DNA, 25 bp, Homo sapien
cagcagggtgtgaatgatcactcct

SEQ ID NO: 1046844 - DNA, 25 bp, Homo sapien
agcagggtgtgaatgatcactcctc

SEQ ID NO: 1046845 - DNA, 25 bp, Homo sapien
tcctcgtagagcaggttcctctctg

SEQ ID NO: 1046846 - DNA, 25 bp, Homo sapien
gctctcgaactcactggagctccag

SEQ ID NO: 1046847 - DNA, 25 bp, Homo sapien
aaggacactcggtgcttggcgggct

SEQ ID NO: 1046848 - DNA, 25 bp, Homo sapien
cagcccggtgcgcatcctcgtagag

SEQ ID NO: 1046849 - DNA, 25 bp, Homo sapien
atgtctctcttagtcctggcgtatc

SEQ ID NO: 1046850 - DNA, 25 bp, Homo sapien
cctttagcctagtcaggtctggaga

SEQ ID NO: 1046851 - DNA, 25 bp, Homo sapien
tagtcctggcgtatctctcctttag

SEQ ID NO: 1046852 - DNA, 25 bp, Homo sapien
cttacaatcgtacttgtgcttcagc

SEQ ID NO: 1046853 - DNA, 25 bp, Homo sapien
gaatccagttcctgtcctggcagaa

SEQ ID NO: 1046854 - DNA, 25 bp, Homo sapien
ccatcagtggtgctgtcctgcgagc

SEQ ID NO: 1046855 - DNA, 25 bp, Homo sapien
tgcgagcccccaaagtggtctttca

SEQ ID NO: 1046856 - DNA, 25 bp, Homo sapien
ctctgttccagaatccagttcctgt

SEQ ID NO: 1046857 - DNA, 25 bp, Homo sapien
ttactgagccaccatccgggaaaag

SEQ ID NO: 1046858 - DNA, 25 bp, Homo sapien
tatctgccctgtccaaaatgggagc

SEQ ID NO: 1046859 - DNA, 25 bp, Homo sapien
tgagcaccaaacattccgggtctgg

SEQ ID NO: 1046860 - DNA, 25 bp, Homo sapien
catgagacgtaaggagaccgcgtgc

SEQ ID NO: 1046861 - DNA, 25 bp, Homo sapien
ttggtcccgctcttggcggccttca

SEQ ID NO: 1046862 - DNA, 25 bp, Homo sapien
actttgcgcatcacggccatccgtg

SEQ ID NO: 1046863 - DNA, 25 bp, Homo sapien
tcttggcggccttcatgagctgggt

SEQ ID NO: 1046864 - DNA, 25 bp, Homo sapien
cgaggacgtccttcctgtgcaggaa

SEQ ID NO: 1046865 - DNA, 25 bp, Homo sapien
gtggtgcagaccctcctgccgggcc

SEQ ID NO: 1046866 - DNA, 25 bp, Homo sapien
acgagctgctgggtaacattcttgg

SEQ ID NO: 1046867 - DNA, 25 bp, Homo sapien
aggaggagggacagcggatgacggc

SEQ ID NO: 1046868 - DNA, 25 bp, Homo sapien
gagggacagcggatgacggcgtggg

SEQ ID NO: 1046869 - DNA, 25 bp, Homo sapien
gtccgaaacgctgacctccaggagc

SEQ ID NO: 1046870 - DNA, 25 bp, Homo sapien
tgagggctcaggccctctggcatgg

SEQ ID NO: 1046871 - DNA, 25 bp, Homo sapien
ggcttgatgtccgaaacgctgacct

SEQ ID NO: 1046872 - DNA, 25 bp, Homo sapien
tgatgtccgaaacgctgacctccag

SEQ ID NO: 1046873 - DNA, 25 bp, Homo sapien
ctggagtatccgcttcagagactcc

SEQ ID NO: 1046874 - DNA, 25 bp, Homo sapien
cttcgctctgcacgatggagcccag

SEQ ID NO: 1046875 - DNA, 25 bp, Homo sapien
agactccacgtagctgccttcgctc

SEQ ID NO: 1046876 - DNA, 25 bp, Homo sapien
tggagcccaggatatgcctccggac

SEQ ID NO: 1046877 - DNA, 25 bp, Homo sapien
ggatctccttcacgcggaagaacac

SEQ ID NO: 1046878 - DNA, 25 bp, Homo sapien
cacttgcgggcgctcagcgccttgg

SEQ ID NO: 1046879 - DNA, 25 bp, Homo sapien
gatctggaacatggagtggcagtgc

SEQ ID NO: 1046880 - DNA, 25 bp, Homo sapien
gatcttctcggtggaatcccactca

SEQ ID NO: 1046881 - DNA, 25 bp, Homo sapien
ttgaggaactcgaggaaggcaggct

SEQ ID NO: 1046882 - DNA, 25 bp, Homo sapien
cactggtgaagttgttcacgtagtc

SEQ ID NO: 1046883 - DNA, 25 bp, Homo sapien
cactgtacacatctagcaccatgga

SEQ ID NO: 1046884 - DNA, 25 bp, Homo sapien
tgatgatggacatggcactggtgaa

SEQ ID NO: 1046885 - DNA, 25 bp, Homo sapien
agacaaggttccgtcattcgctgac

SEQ ID NO: 1046886 - DNA, 25 bp, Homo sapien
tggagacaaggttccgtcattcgct

SEQ ID NO: 1046887 - DNA, 25 bp, Homo sapien
ggtggagacaaggttccgtcattcg

SEQ ID NO: 1046888 - DNA, 25 bp, Homo sapien
gacaaggttccgtcattcgctgacc

SEQ ID NO: 1046889 - DNA, 25 bp, Homo sapien
tcagcccgtagagggtgacacggtc

SEQ ID NO: 1046890 - DNA, 25 bp, Homo sapien
gtgacacggtctgggctgcacacct

SEQ ID NO: 1046891 - DNA, 25 bp, Homo sapien
tctggatgggcttgaccatcagccc

SEQ ID NO: 1046892 - DNA, 25 bp, Homo sapien
gaccatcagcccgtagagggtgaca

SEQ ID NO: 1046893 - DNA, 25 bp, Homo sapien
ggaatagacccacatgaactgaaag

SEQ ID NO: 1046894 - DNA, 25 bp, Homo sapien
aaatgtccgtcgacagactaacgcg

SEQ ID NO: 1046895 - DNA, 25 bp, Homo sapien
gcatggatctttctaggaatagacc

SEQ ID NO: 1046896 - DNA, 25 bp, Homo sapien
cattagccacagtcgccaaaatgtg

SEQ ID NO: 1046897 - DNA, 25 bp, Homo sapien
tgttgaggctgctgcggtcactgac

SEQ ID NO: 1046898 - DNA, 25 bp, Homo sapien
tgcagcgacagcctgtccggatggc

SEQ ID NO: 1046899 - DNA, 25 bp, Homo sapien
ggtcactgacgctcttggtcagctg

SEQ ID NO: 1046900 - DNA, 25 bp, Homo sapien
tgctgcggtcactgacgctcttggt

SEQ ID NO: 1046901 - DNA, 25 bp, Homo sapien
tgttaaggacaatcacgaagccact

SEQ ID NO: 1046902 - DNA, 25 bp, Homo sapien
ctcttttgcggcagcagccctaggg

SEQ ID NO: 1046903 - DNA, 25 bp, Homo sapien
gagaacactgccacctagtgtgggt

SEQ ID NO: 1046904 - DNA, 25 bp, Homo sapien
tagggctccggtgctattaaatgct

SEQ ID NO: 1046905 - DNA, 25 bp, Homo sapien
ggtcaccgtacacggtctccgtcaa

SEQ ID NO: 1046906 - DNA, 25 bp, Homo sapien
gatgttggcacagacaagcatgtcg

SEQ ID NO: 1046907 - DNA, 25 bp, Homo sapien
ggacttaattagctgcccgcggtca

SEQ ID NO: 1046908 - DNA, 25 bp, Homo sapien
ttgagcaggaagacccgacgctcct

SEQ ID NO: 1046909 - DNA, 25 bp, Homo sapien
aggctcctctgggccgatgatgatg

SEQ ID NO: 1046910 - DNA, 25 bp, Homo sapien
gggctttgggcatttccacaatccc

SEQ ID NO: 1046911 - DNA, 25 bp, Homo sapien
tctgggccgatgatgatgctccggt

SEQ ID NO: 1046912 - DNA, 25 bp, Homo sapien
cagccgggctttgggcatttccaca

SEQ ID NO: 1046913 - DNA, 25 bp, Homo sapien
tattacaatggagtggctaatctgg

SEQ ID NO: 1046914 - DNA, 25 bp, Homo sapien
caacagccccgctaggaagcttaga

SEQ ID NO: 1046915 - DNA, 25 bp, Homo sapien
ggaatagaaggagagacagcctcct

SEQ ID NO: 1046916 - DNA, 25 bp, Homo sapien
gaagcttagatgatcccagacaagg

SEQ ID NO: 1046917 - DNA, 25 bp, Homo sapien
gttccacttcaccacatacttgggc

SEQ ID NO: 1046918 - DNA, 25 bp, Homo sapien
tgtcataggtgccaccgtcctggcc

SEQ ID NO: 1046919 - DNA, 25 bp, Homo sapien
cgcctgagtgctggatgagcacatt

SEQ ID NO: 1046920 - DNA, 25 bp, Homo sapien
gcagaggccttcttggcgcctgagt

SEQ ID NO: 1046921 - DNA, 25 bp, Homo sapien
gtggaatgagtttaaagccacactc

SEQ ID NO: 1046922 - DNA, 25 bp, Homo sapien
aaggcttccatggactatggcacct

SEQ ID NO: 1046923 - DNA, 25 bp, Homo sapien
caaggcttccatggactatggcacc

SEQ ID NO: 1046924 - DNA, 25 bp, Homo sapien
cctggaagaggcgtggggggccgag

SEQ ID NO: 1046925 - DNA, 25 bp, Homo sapien
ctggtaggtgccgtgcagcgtgctg

SEQ ID NO: 1046926 - DNA, 25 bp, Homo sapien
agcgtgctgatgagaagcgtgatct

SEQ ID NO: 1046927 - DNA, 25 bp, Homo sapien
ggtaggtgccgtgcagcgtgctgat

SEQ ID NO: 1046928 - DNA, 25 bp, Homo sapien
tcagcagcgacagttgccaacagga

SEQ ID NO: 1046929 - DNA, 25 bp, Homo sapien
agcggccgcaaaagagacttccagg

SEQ ID NO: 1046930 - DNA, 25 bp, Homo sapien
acataacggaatggccactgtgcag

SEQ ID NO: 1046931 - DNA, 25 bp, Homo sapien
cagggacatggagcttcagcagcga

SEQ ID NO: 1046932 - DNA, 25 bp, Homo sapien
aagcaggagcctgagacggcacttg

SEQ ID NO: 1046933 - DNA, 25 bp, Homo sapien
gcaccagtcttgagccacagtcatg

SEQ ID NO: 1046934 - DNA, 25 bp, Homo sapien
caggagcctgagacggcacttgttg

SEQ ID NO: 1046935 - DNA, 25 bp, Homo sapien
ctgagacggcacttgttggccgagt

SEQ ID NO: 1046936 - DNA, 25 bp, Homo sapien
tgtgactccacctggtcagcggtca

SEQ ID NO: 1046937 - DNA, 25 bp, Homo sapien
aatgggtctcacttgggtctgttcc

SEQ ID NO: 1046938 - DNA, 25 bp, Homo sapien
tgtccacaggtcttagacaccttac

SEQ ID NO: 1046939 - DNA, 25 bp, Homo sapien
gtctgaccacgtgcctctagaggga

SEQ ID NO: 1046940 - DNA, 25 bp, Homo sapien
tgtaacctgttgacccaggaaatct

SEQ ID NO: 1046941 - DNA, 25 bp, Homo sapien
ccaaatgtaacctgttgacccagga

SEQ ID NO: 1046942 - DNA, 25 bp, Homo sapien
tgaaaaccaccatgaagctaatggg

SEQ ID NO: 1046943 - DNA, 25 bp, Homo sapien
ggagtccgattttggccaaatgtaa

SEQ ID NO: 1046944 - DNA, 25 bp, Homo sapien
cttaatgaatgcagtctgcagacag

SEQ ID NO: 1046945 - DNA, 25 bp, Homo sapien
gaggggacataagcctctcaccaac

SEQ ID NO: 1046946 - DNA, 25 bp, Homo sapien
taattataacttaatgaatgcagtc

SEQ ID NO: 1046947 - DNA, 25 bp, Homo sapien
aatggatggggatcgagactgggct

SEQ ID NO: 1046948 - DNA, 25 bp, Homo sapien
gaactgtagtacatcatagggaata

SEQ ID NO: 1046949 - DNA, 25 bp, Homo sapien
ctattggctggcatcggcaaatggg

SEQ ID NO: 1046950 - DNA, 25 bp, Homo sapien
gctggcatcggcaaatgggaactgt

SEQ ID NO: 1046951 - DNA, 25 bp, Homo sapien
cggcaaatgggaactgtagtacatc

SEQ ID NO: 1046952 - DNA, 25 bp, Homo sapien
tgtaagcttctctatagaaagatca

SEQ ID NO: 1046953 - DNA, 25 bp, Homo sapien
aagcttctctatagaaagatcatac

SEQ ID NO: 1046954 - DNA, 25 bp, Homo sapien
aaatgtaagcttctctatagaaaga

SEQ ID NO: 1046955 - DNA, 25 bp, Homo sapien
ttctctatagaaagatcataccaga

SEQ ID NO: 1046956 - DNA, 25 bp, Homo sapien
actcctactgggctcagtcccagta

SEQ ID NO: 1046957 - DNA, 25 bp, Homo sapien
gctcagtcccagtatcgtgccttta

SEQ ID NO: 1046958 - DNA, 25 bp, Homo sapien
tttactgctcttcccgaacttccca

SEQ ID NO: 1046959 - DNA, 25 bp, Homo sapien
taaagccaccttcaagataccgctc

SEQ ID NO: 1046960 - DNA, 25 bp, Homo sapien
tagcctctgctagtgtgccagcgct

SEQ ID NO: 1046961 - DNA, 25 bp, Homo sapien
gcctctgctagtgtgccagcgctcg

SEQ ID NO: 1046962 - DNA, 25 bp, Homo sapien
ctctgctagtgtgccagcgctcgcc

SEQ ID NO: 1046963 - DNA, 25 bp, Homo sapien
ctgctagtgtgccagcgctcgccat

SEQ ID NO: 1046964 - DNA, 25 bp, Homo sapien
tcacagccatcacgggagatacgtc

SEQ ID NO: 1046965 - DNA, 25 bp, Homo sapien
tcacgggagatacgtccttctatcc

SEQ ID NO: 1046966 - DNA, 25 bp, Homo sapien
cagccatcacgggagatacgtcctt

SEQ ID NO: 1046967 - DNA, 25 bp, Homo sapien
ggagatacgtccttctatccgcact

SEQ ID NO: 1046968 - DNA, 25 bp, Homo sapien
ttaatctgactcgctttcatcaaag

SEQ ID NO: 1046969 - DNA, 25 bp, Homo sapien
taatctgactcgctttcatcaaaga

SEQ ID NO: 1046970 - DNA, 25 bp, Homo sapien
aatctgactcgctttcatcaaagag

SEQ ID NO: 1046971 - DNA, 25 bp, Homo sapien
tctgactcgctttcatcaaagagat

SEQ ID NO: 1046972 - DNA, 25 bp, Homo sapien
ccagggacccgttacaagtacagat

SEQ ID NO: 1046973 - DNA, 25 bp, Homo sapien
gagtgctcggaaaacatggctggaa

SEQ ID NO: 1046974 - DNA, 25 bp, Homo sapien
cctgaaattaggaagccgcctgcct

SEQ ID NO: 1046975 - DNA, 25 bp, Homo sapien
tcctgaagaattctccctgcggagg

SEQ ID NO: 1046976 - DNA, 25 bp, Homo sapien
ggagacagaccatgaacgatcagag

SEQ ID NO: 1046977 - DNA, 25 bp, Homo sapien
ccatgaacgatcagaggacaggagg

SEQ ID NO: 1046978 - DNA, 25 bp, Homo sapien
acaggaggtcgccattgcggcactc

SEQ ID NO: 1046979 - DNA, 25 bp, Homo sapien
gaatttctgttgcagagtaggagac

SEQ ID NO: 1046980 - DNA, 25 bp, Homo sapien
tgggtagagctggtcagagtccaag

SEQ ID NO: 1046981 - DNA, 25 bp, Homo sapien
taggaatgctagaaatgccttcgtc

SEQ ID NO: 1046982 - DNA, 25 bp, Homo sapien
taccgctgaacaaccctgtgccagt

SEQ ID NO: 1046983 - DNA, 25 bp, Homo sapien
tactcctgccggactgagatgaaat

SEQ ID NO: 1046984 - DNA, 25 bp, Homo sapien
tgcaggctgagtgcccgggaggaga

SEQ ID NO: 1046985 - DNA, 25 bp, Homo sapien
ttcttgtcctcatccgggcatagcc

SEQ ID NO: 1046986 - DNA, 25 bp, Homo sapien
tccgggcatagccagcctggctggt

SEQ ID NO: 1046987 - DNA, 25 bp, Homo sapien
agcaggccaggatcgggcaccagaa

SEQ ID NO: 1046988 - DNA, 25 bp, Homo sapien
cattccatgatgagggcaatccctg

SEQ ID NO: 1046989 - DNA, 25 bp, Homo sapien
gcaggtaacccgtgaaggctgaaca

SEQ ID NO: 1046990 - DNA, 25 bp, Homo sapien
caggtgctcaatacacgggaggcct

SEQ ID NO: 1046991 - DNA, 25 bp, Homo sapien
tgattcccgaagcaacaaaaaggct

SEQ ID NO: 1046992 - DNA, 25 bp, Homo sapien
ggtgtgcaccatcaagctcagctaa

SEQ ID NO: 1046993 - DNA, 25 bp, Homo sapien
acctcagcctctccagtagctagga

SEQ ID NO: 1046994 - DNA, 25 bp, Homo sapien
atcctgggattacagacgtgagcta

SEQ ID NO: 1046995 - DNA, 25 bp, Homo sapien
gttcaagtgttttttccacctcagc

SEQ ID NO: 1046996 - DNA, 25 bp, Homo sapien
cactggggtctgatctgtcagggct

SEQ ID NO: 1046997 - DNA, 25 bp, Homo sapien
gggtctgatctgtcagggctcagcc

SEQ ID NO: 1046998 - DNA, 25 bp, Homo sapien
ctgtgactccaccactggggtctga

SEQ ID NO: 1046999 - DNA, 25 bp, Homo sapien
gactccaccactggggtctgatctg

SEQ ID NO: 1047000 - DNA, 25 bp, Homo sapien
gaaacccagcaggggacagttgaca

SEQ ID NO: 1047001 - DNA, 25 bp, Homo sapien
gacaggactgtggaccagggcccca

SEQ ID NO: 1047002 - DNA, 25 bp, Homo sapien
caggactgtggaccagggccccaag

SEQ ID NO: 1047003 - DNA, 25 bp, Homo sapien
cccagcaggggacagttgacaggac

SEQ ID NO: 1047004 - DNA, 25 bp, Homo sapien
ccgggatatactccatgcagagcac

SEQ ID NO: 1047005 - DNA, 25 bp, Homo sapien
atcctggagcccgaggcagatggtt

SEQ ID NO: 1047006 - DNA, 25 bp, Homo sapien
cagatggttggatgcaccgtggccg

SEQ ID NO: 1047007 - DNA, 25 bp, Homo sapien
gggtcagcaactgtcgggctctcgt

SEQ ID NO: 1047008 - DNA, 25 bp, Homo sapien
gtccgagggtaagcagcaagggtcc

SEQ ID NO: 1047009 - DNA, 25 bp, Homo sapien
tgtccacactgctgtagaggaggat

SEQ ID NO: 1047010 - DNA, 25 bp, Homo sapien
ggccagcgagcaggtggaaggggct

SEQ ID NO: 1047011 - DNA, 25 bp, Homo sapien
gctggtccgagggtaagcagcaagg

SEQ ID NO: 1047012 - DNA, 25 bp, Homo sapien
cctggccgcatgtaatccaggtgga

SEQ ID NO: 1047013 - DNA, 25 bp, Homo sapien
ggaccaggtggatgattcaagacct

SEQ ID NO: 1047014 - DNA, 25 bp, Homo sapien
tcccacagctggtcacggaccaggt

SEQ ID NO: 1047015 - DNA, 25 bp, Homo sapien
gatgagggccaagctgatgccagtc

SEQ ID NO: 1047016 - DNA, 25 bp, Homo sapien
caacagggtgcggacaggcccgggc

SEQ ID NO: 1047017 - DNA, 25 bp, Homo sapien
acggcatcctccaggctcaacaggg

SEQ ID NO: 1047018 - DNA, 25 bp, Homo sapien
acagctggcccacacggcatcctcc

SEQ ID NO: 1047019 - DNA, 25 bp, Homo sapien
gcacacgggagggctctccaggtcc

SEQ ID NO: 1047020 - DNA, 25 bp, Homo sapien
caggcagcaaccgacacaactcagg

SEQ ID NO: 1047021 - DNA, 25 bp, Homo sapien
tgcagctgggcactttctgttcttg

SEQ ID NO: 1047022 - DNA, 25 bp, Homo sapien
agtcctgggtaccagtccaaggaca

SEQ ID NO: 1047023 - DNA, 25 bp, Homo sapien
aaccgacacaactcaggatccaggc

SEQ ID NO: 1047024 - DNA, 25 bp, Homo sapien
tgcagacatcacacgcgaggcacag

SEQ ID NO: 1047025 - DNA, 25 bp, Homo sapien
tggctgccagcaaggaatgcccttc

SEQ ID NO: 1047026 - DNA, 25 bp, Homo sapien
aggcacagcccacagatgctgagcc

SEQ ID NO: 1047027 - DNA, 25 bp, Homo sapien
tgaaggcaggcattctgctgcagac

SEQ ID NO: 1047028 - DNA, 25 bp, Homo sapien
cggaggcagacctacagggttcagc

SEQ ID NO: 1047029 - DNA, 25 bp, Homo sapien
tccaaccttgccctgtacaagcagg

SEQ ID NO: 1047030 - DNA, 25 bp, Homo sapien
ggaccaccgagcctctagtcagaga

SEQ ID NO: 1047031 - DNA, 25 bp, Homo sapien
caaccacctttgctgcgagtcttac

SEQ ID NO: 1047032 - DNA, 25 bp, Homo sapien
cgagcctggagtcctgcctgagcct

SEQ ID NO: 1047033 - DNA, 25 bp, Homo sapien
accacgagcctggagtcctgcctga

SEQ ID NO: 1047034 - DNA, 25 bp, Homo sapien
agggcagggagtaggtggagccaga

SEQ ID NO: 1047035 - DNA, 25 bp, Homo sapien
ggagtaggtggagccagagagacat

SEQ ID NO: 1047036 - DNA, 25 bp, Homo sapien
ctctgggctcctgggtccccttctc

SEQ ID NO: 1047037 - DNA, 25 bp, Homo sapien
ctgggctcctgggtccccttctcac

SEQ ID NO: 1047038 - DNA, 25 bp, Homo sapien
tctgggctcctgggtccccttctca

SEQ ID NO: 1047039 - DNA, 25 bp, Homo sapien
gcaggacgggatgattttcctcttt

SEQ ID NO: 1047040 - DNA, 25 bp, Homo sapien
ccaggagcaggacgggatgattttc

SEQ ID NO: 1047041 - DNA, 25 bp, Homo sapien
tccaggagcaggacgggatgatttt

SEQ ID NO: 1047042 - DNA, 25 bp, Homo sapien
ggagcaggacgggatgattttcctc

SEQ ID NO: 1047043 - DNA, 25 bp, Homo sapien
gggaggagtgtcgatactggctggg

SEQ ID NO: 1047044 - DNA, 25 bp, Homo sapien
gcacaaagggaggagtgtcgatact

SEQ ID NO: 1047045 - DNA, 25 bp, Homo sapien
cacaaagggaggagtgtcgatactg

SEQ ID NO: 1047046 - DNA, 25 bp, Homo sapien
aggagtgtcgatactggctgggcct

SEQ ID NO: 1047047 - DNA, 25 bp, Homo sapien
acgctcactgcctcgtcctggtgcg

SEQ ID NO: 1047048 - DNA, 25 bp, Homo sapien
gtcacgctcactgcctcgtcctggt

SEQ ID NO: 1047049 - DNA, 25 bp, Homo sapien
ctgcccgccttcaccatgtgtgtca

SEQ ID NO: 1047050 - DNA, 25 bp, Homo sapien
atgtgtgtcacgctcactgcctcgt

SEQ ID NO: 1047051 - DNA, 25 bp, Homo sapien
gatgctccagggtctcagtgtggaa

SEQ ID NO: 1047052 - DNA, 25 bp, Homo sapien
gtcctggtggcgatgttgatctctt

SEQ ID NO: 1047053 - DNA, 25 bp, Homo sapien
aagaggcggatggaggtgccggagg

SEQ ID NO: 1047054 - DNA, 25 bp, Homo sapien
gatgttgatctcttgcagatgctcc

SEQ ID NO: 1047055 - DNA, 25 bp, Homo sapien
tgtgactgtccgctcccccgtgccc

SEQ ID NO: 1047056 - DNA, 25 bp, Homo sapien
ccgtggaaggtgctctgtgactgtc

SEQ ID NO: 1047057 - DNA, 25 bp, Homo sapien
tggccgtggaaggtgctctgtgact

SEQ ID NO: 1047058 - DNA, 25 bp, Homo sapien
ctggccgtggaaggtgctctgtgac

SEQ ID NO: 1047059 - DNA, 25 bp, Homo sapien
cattacatacagtaggatgctggac

SEQ ID NO: 1047060 - DNA, 25 bp, Homo sapien
gacgcccggcctgctgaaccaatct

SEQ ID NO: 1047061 - DNA, 25 bp, Homo sapien
ctgagtccggcctgatgtgactgtg

SEQ ID NO: 1047062 - DNA, 25 bp, Homo sapien
taatgtggggataatccccagctcg

SEQ ID NO: 1047063 - DNA, 25 bp, Homo sapien
tatcagcactgcgatagcagaccag

SEQ ID NO: 1047064 - DNA, 25 bp, Homo sapien
ggcaggagtggctgttctaactaca

SEQ ID NO: 1047065 - DNA, 25 bp, Homo sapien
tgtgaggaagctctaacgagagtcc

SEQ ID NO: 1047066 - DNA, 25 bp, Homo sapien
caaagagtaagtaagacaacgggcg

SEQ ID NO: 1047067 - DNA, 25 bp, Homo sapien
tctgccaaaagagcggtcacctctg

SEQ ID NO: 1047068 - DNA, 25 bp, Homo sapien
tgcgcttctgcaaaggcacaacgtg

SEQ ID NO: 1047069 - DNA, 25 bp, Homo sapien
gctccactgggttactgattgggaa

SEQ ID NO: 1047070 - DNA, 25 bp, Homo sapien
cagctgatgcgacaggaatggcaca

SEQ ID NO: 1047071 - DNA, 25 bp, Homo sapien
ccaagccatctatctggagatatac

SEQ ID NO: 1047072 - DNA, 25 bp, Homo sapien
gctcttggagaacattttattaatg

SEQ ID NO: 1047073 - DNA, 25 bp, Homo sapien
tacaactttaaaaagctcaggctct

SEQ ID NO: 1047074 - DNA, 25 bp, Homo sapien
ggctcttggagaacattttattaat

SEQ ID NO: 1047075 - DNA, 25 bp, Homo sapien
tagagtcctgtcttaaggagcagac

SEQ ID NO: 1047076 - DNA, 25 bp, Homo sapien
gatgcctactgcatggcagacccca

SEQ ID NO: 1047077 - DNA, 25 bp, Homo sapien
cagtggaggattcccgggtcttcag

SEQ ID NO: 1047078 - DNA, 25 bp, Homo sapien
gatggacatgttccctaccgtgctg

SEQ ID NO: 1047079 - DNA, 25 bp, Homo sapien
gcttccatcacctctccctccttgg

SEQ ID NO: 1047080 - DNA, 25 bp, Homo sapien
cactgcccagtgcttccatcacctc

SEQ ID NO: 1047081 - DNA, 25 bp, Homo sapien
actgcccagtgcttccatcacctct

SEQ ID NO: 1047082 - DNA, 25 bp, Homo sapien
tccatcacctctccctccttgggca

SEQ ID NO: 1047083 - DNA, 25 bp, Homo sapien
ggagtttccaaagcactcgtatacc

SEQ ID NO: 1047084 - DNA, 25 bp, Homo sapien
gctctcatctgacacaaggcttgca

SEQ ID NO: 1047085 - DNA, 25 bp, Homo sapien
cagccaagacgtatgcaagacacaa

SEQ ID NO: 1047086 - DNA, 25 bp, Homo sapien
gcttctggtccatggatcacatttg

SEQ ID NO: 1047087 - DNA, 25 bp, Homo sapien
tgtgtgcgctctcaatacacggcgg

SEQ ID NO: 1047088 - DNA, 25 bp, Homo sapien
caggtcatccggcacaaagggttgt

SEQ ID NO: 1047089 - DNA, 25 bp, Homo sapien
gaagcacaaaactcgctggtgggaa

SEQ ID NO: 1047090 - DNA, 25 bp, Homo sapien
tgtccaagggcaatccatgcaggga

SEQ ID NO: 1047091 - DNA, 25 bp, Homo sapien
aagagagggcggctgagcagtgccc

SEQ ID NO: 1047092 - DNA, 25 bp, Homo sapien
gagggcggctgagcagtgccctcct

SEQ ID NO: 1047093 - DNA, 25 bp, Homo sapien
cagaaagagagggcggctgagcagt

SEQ ID NO: 1047094 - DNA, 25 bp, Homo sapien
gccctcctggggagacagcatgggc

SEQ ID NO: 1047095 - DNA, 25 bp, Homo sapien
cacgggcagcaggacgatgacaccc

SEQ ID NO: 1047096 - DNA, 25 bp, Homo sapien
agcaggacgatgacaccctggtcag

SEQ ID NO: 1047097 - DNA, 25 bp, Homo sapien
tgccttccagccgaggcacgggcag

SEQ ID NO: 1047098 - DNA, 25 bp, Homo sapien
acgatgacaccctggtcagtgccca

SEQ ID NO: 1047099 - DNA, 25 bp, Homo sapien
catgggctcgtgtgcctgcccgtct

SEQ ID NO: 1047100 - DNA, 25 bp, Homo sapien
gagcgcaggcggtactgcaagagga

SEQ ID NO: 1047101 - DNA, 25 bp, Homo sapien
ccacgtggctatcgggcatgggctc

SEQ ID NO: 1047102 - DNA, 25 bp, Homo sapien
gaggatgcccttcttgcgggtcagc

SEQ ID NO: 1047103 - DNA, 25 bp, Homo sapien
gcaaatctccttgcggtgggcgtcg

SEQ ID NO: 1047104 - DNA, 25 bp, Homo sapien
taaatggagccgtcctcctcgctgt

SEQ ID NO: 1047105 - DNA, 25 bp, Homo sapien
gggtcgtcggccatctcgtaaatgg

SEQ ID NO: 1047106 - DNA, 25 bp, Homo sapien
gccggctgcgcacccagatgtcggg

SEQ ID NO: 1047107 - DNA, 25 bp, Homo sapien
ctgcccagagcgctgccaaagttgc

SEQ ID NO: 1047108 - DNA, 25 bp, Homo sapien
tgcggtagccctgcccgccggagat

SEQ ID NO: 1047109 - DNA, 25 bp, Homo sapien
atgaggagggtgctgtccgtctccc

SEQ ID NO: 1047110 - DNA, 25 bp, Homo sapien
ggagggtgctgtccgtctccccaca

SEQ ID NO: 1047111 - DNA, 25 bp, Homo sapien
gagagtccaggcccatccacaagtc

SEQ ID NO: 1047112 - DNA, 25 bp, Homo sapien
cccaagtagtttctggagagtccag

SEQ ID NO: 1047113 - DNA, 25 bp, Homo sapien
tgcaggtcctagagcacgagagccg

SEQ ID NO: 1047114 - DNA, 25 bp, Homo sapien
tccacaagtcccgtgcaggtcctag

SEQ ID NO: 1047115 - DNA, 25 bp, Homo sapien
cttttattccagcatctcccagagc

SEQ ID NO: 1047116 - DNA, 25 bp, Homo sapien
cccgctagggcccaaacaagtgata

SEQ ID NO: 1047117 - DNA, 25 bp, Homo sapien
gcttgccaggcagttgtgaggtttt

SEQ ID NO: 1047118 - DNA, 25 bp, Homo sapien
cccagagctccaatatgtacagact

SEQ ID NO: 1047119 - DNA, 25 bp, Homo sapien
tttggagcgaggatataaggaacca

SEQ ID NO: 1047120 - DNA, 25 bp, Homo sapien
aaccactggcctcaaatcgtttgga

SEQ ID NO: 1047121 - DNA, 25 bp, Homo sapien
taggtctaggatctaacaggcccac

SEQ ID NO: 1047122 - DNA, 25 bp, Homo sapien
tccgtgacgtgatttaacgggctcc

SEQ ID NO: 1047123 - DNA, 25 bp, Homo sapien
ccccaagcctgtgagcactcctgca

SEQ ID NO: 1047124 - DNA, 25 bp, Homo sapien
gccactgcatccaccgaggcttcat

SEQ ID NO: 1047125 - DNA, 25 bp, Homo sapien
aggccactgcatccaccgaggcttc

SEQ ID NO: 1047126 - DNA, 25 bp, Homo sapien
tgtgagcactcctgcaggccactgc

SEQ ID NO: 1047127 - DNA, 25 bp, Homo sapien
ccacttcagcccggggatcggattg

SEQ ID NO: 1047128 - DNA, 25 bp, Homo sapien
cagcccggggatcggattggagcat

SEQ ID NO: 1047129 - DNA, 25 bp, Homo sapien
acttcagcccggggatcggattgga

SEQ ID NO: 1047130 - DNA, 25 bp, Homo sapien
ttcagcccggggatcggattggagc

SEQ ID NO: 1047131 - DNA, 25 bp, Homo sapien
ggttgggcgacctgtctcccattca

SEQ ID NO: 1047132 - DNA, 25 bp, Homo sapien
tctttcacggttgggcgacctgtct

SEQ ID NO: 1047133 - DNA, 25 bp, Homo sapien
tgggtctctttcacggttgggcgac

SEQ ID NO: 1047134 - DNA, 25 bp, Homo sapien
tattgggtctctttcacggttgggc

SEQ ID NO: 1047135 - DNA, 25 bp, Homo sapien
aaacagaagaagagaagtcctttct

SEQ ID NO: 1047136 - DNA, 25 bp, Homo sapien
ctgaggcaatccagtgaaacagaag

SEQ ID NO: 1047137 - DNA, 25 bp, Homo sapien
gtgaaacagaagaagagaagtcctt

SEQ ID NO: 1047138 - DNA, 25 bp, Homo sapien
tgaggcaatccagtgaaacagaaga

SEQ ID NO: 1047139 - DNA, 25 bp, Homo sapien
taatctggtactattccctttctga

SEQ ID NO: 1047140 - DNA, 25 bp, Homo sapien
caaaatattcgataattggtgtaat

SEQ ID NO: 1047141 - DNA, 25 bp, Homo sapien
caagcttgagctgccggtaatatcg

SEQ ID NO: 1047142 - DNA, 25 bp, Homo sapien
tctgacagcctctgccgtgttgtcc

SEQ ID NO: 1047143 - DNA, 25 bp, Homo sapien
tgctggtgaaccagcgacccagcac

SEQ ID NO: 1047144 - DNA, 25 bp, Homo sapien
ccagcacggaattgtacatgttggg

SEQ ID NO: 1047145 - DNA, 25 bp, Homo sapien
cagcaactcagcacgggattgtaca

SEQ ID NO: 1047146 - DNA, 25 bp, Homo sapien
gggatgaaccagcaactcagcacgg

SEQ ID NO: 1047147 - DNA, 25 bp, Homo sapien
cacggaggagccatttgcagccata

SEQ ID NO: 1047148 - DNA, 25 bp, Homo sapien
ccatttgcagccataaatgttcaat

SEQ ID NO: 1047149 - DNA, 25 bp, Homo sapien
agccatttgcagccataaatgttca

SEQ ID NO: 1047150 - DNA, 25 bp, Homo sapien
ctgcacggaggagccatttgcagcc

SEQ ID NO: 1047151 - DNA, 25 bp, Homo sapien
tcttcatgcaagattccgtgacgcc

SEQ ID NO: 1047152 - DNA, 25 bp, Homo sapien
ttgggcgagtggcataacctccctg

SEQ ID NO: 1047153 - DNA, 25 bp, Homo sapien
tataaagtgtaggttctgcagtcca

SEQ ID NO: 1047154 - DNA, 25 bp, Homo sapien
cactgattagttgtctttgggcgag

SEQ ID NO: 1047155 - DNA, 25 bp, Homo sapien
gggacatgcctgctgtgaatgatgc

SEQ ID NO: 1047156 - DNA, 25 bp, Homo sapien
tggtgactctcttggaggcaggagg

SEQ ID NO: 1047157 - DNA, 25 bp, Homo sapien
ctgctgtgaatgatgctgacactga

SEQ ID NO: 1047158 - DNA, 25 bp, Homo sapien
aagctgctggtgactctcttggagg

SEQ ID NO: 1047159 - DNA, 25 bp, Homo sapien
ttaaggaatttccaggtagtggctg

SEQ ID NO: 1047160 - DNA, 25 bp, Homo sapien
tgggtttcccgtgatgttgtagtca

SEQ ID NO: 1047161 - DNA, 25 bp, Homo sapien
ctcactggctattggccatgtgggc

SEQ ID NO: 1047162 - DNA, 25 bp, Homo sapien
ggactgtggtctcacctcaagactt

SEQ ID NO: 1047163 - DNA, 25 bp, Homo sapien
gcttccaagctcatccaagtggtca

SEQ ID NO: 1047164 - DNA, 25 bp, Homo sapien
ctagaattttccaccccagtcactc

SEQ ID NO: 1047165 - DNA, 25 bp, Homo sapien
tagaattttccaccccagtcactcc

SEQ ID NO: 1047166 - DNA, 25 bp, Homo sapien
aacagtgtctcacaagaggcaccca

SEQ ID NO: 1047167 - DNA, 25 bp, Homo sapien
tgcacactgcaaacgcctgcacgag

SEQ ID NO: 1047168 - DNA, 25 bp, Homo sapien
tgtgagctgccgaactcagctgcac

SEQ ID NO: 1047169 - DNA, 25 bp, Homo sapien
ccgcagcctactctgtgagcacgtg

SEQ ID NO: 1047170 - DNA, 25 bp, Homo sapien
agaggcacccactacaaaactgcct

SEQ ID NO: 1047171 - DNA, 25 bp, Homo sapien
tcacaggaggtgtctcaccagaggc

SEQ ID NO: 1047172 - DNA, 25 bp, Homo sapien
ggcacccactacaaaactgcctaaa

SEQ ID NO: 1047173 - DNA, 25 bp, Homo sapien
gccccgcagggtgccacaaaagctg

SEQ ID NO: 1047174 - DNA, 25 bp, Homo sapien
caacagatggaaattttatttgact

SEQ ID NO: 1047175 - DNA, 25 bp, Homo sapien
catctttctcctcagatcggtttta

SEQ ID NO: 1047176 - DNA, 25 bp, Homo sapien
ataactctcgtaaattcttcaacag

SEQ ID NO: 1047177 - DNA, 25 bp, Homo sapien
gatcggttttatagccagtaataac

SEQ ID NO: 1047178 - DNA, 25 bp, Homo sapien
acacacaaggaggccagagttgcga

SEQ ID NO: 1047179 - DNA, 25 bp, Homo sapien
acacaaggaggccagagttgcgaag

SEQ ID NO: 1047180 - DNA, 25 bp, Homo sapien
agggacacacaaggaggccagagtt

SEQ ID NO: 1047181 - DNA, 25 bp, Homo sapien
ctcagggacacacaaggaggccaga

SEQ ID NO: 1047182 - DNA, 25 bp, Homo sapien
acacacaggtgcacgcatgcacaga

SEQ ID NO: 1047183 - DNA, 25 bp, Homo sapien
cacacacacaggtgcacgcatgcac

SEQ ID NO: 1047184 - DNA, 25 bp, Homo sapien
acacacacacaggtgcacgcatgca

SEQ ID NO: 1047185 - DNA, 25 bp, Homo sapien
cacacacacacacaggtgcacgcat

SEQ ID NO: 1047186 - DNA, 25 bp, Homo sapien
cgtgccagccttcaaaaagccagac

SEQ ID NO: 1047187 - DNA, 25 bp, Homo sapien
cgtggtcaatgataacggttcttgc

SEQ ID NO: 1047188 - DNA, 25 bp, Homo sapien
caatgataacggttcttgcagccat

SEQ ID NO: 1047189 - DNA, 25 bp, Homo sapien
gatgttcgggaagaccatctgaggc

SEQ ID NO: 1047190 - DNA, 25 bp, Homo sapien
agggttctccttgcacggtaggtag

SEQ ID NO: 1047191 - DNA, 25 bp, Homo sapien
tggcaaatgtcgatgcccaggctca

SEQ ID NO: 1047192 - DNA, 25 bp, Homo sapien
tcaagggtgtctccgtgatgatcac

SEQ ID NO: 1047193 - DNA, 25 bp, Homo sapien
cacaccctcccagttgaggatgcgg

SEQ ID NO: 1047194 - DNA, 25 bp, Homo sapien
ggacatgcagcaactcaaacaggat

SEQ ID NO: 1047195 - DNA, 25 bp, Homo sapien
cgggtcaggccatagccagaatcaa

SEQ ID NO: 1047196 - DNA, 25 bp, Homo sapien
gattctgcggcacgtagcacttgtt

SEQ ID NO: 1047197 - DNA, 25 bp, Homo sapien
tgttcatctgagtcacggcgactgt

SEQ ID NO: 1047198 - DNA, 25 bp, Homo sapien
aggcgctttgtgaacccgggataga

SEQ ID NO: 1047199 - DNA, 25 bp, Homo sapien
atccactcagactggtaggtagaaa

SEQ ID NO: 1047200 - DNA, 25 bp, Homo sapien
gtggaggagacgtgatcccccatca

SEQ ID NO: 1047201 - DNA, 25 bp, Homo sapien
ggtagaaaggtgagccaccacggac

SEQ ID NO: 1047202 - DNA, 25 bp, Homo sapien
gcaggagtgctaccccagttaaaac

SEQ ID NO: 1047203 - DNA, 25 bp, Homo sapien
tgctaaaattaatccgcccgtgccc

SEQ ID NO: 1047204 - DNA, 25 bp, Homo sapien
ccctgcagggtttccaaggatgaca

SEQ ID NO: 1047205 - DNA, 25 bp, Homo sapien
aaacaagatccaaccacgggtggca

SEQ ID NO: 1047206 - DNA, 25 bp, Homo sapien
agaggatgagcctcctcgagctctg

SEQ ID NO: 1047207 - DNA, 25 bp, Homo sapien
cagaggatgagcctcctcgagctct

SEQ ID NO: 1047208 - DNA, 25 bp, Homo sapien
catgttttgactggtagagttatgg

SEQ ID NO: 1047209 - DNA, 25 bp, Homo sapien
attccgactgccaagcctttattag

SEQ ID NO: 1047210 - DNA, 25 bp, Homo sapien
gcagtcccaggaattagtcatgttt

SEQ ID NO: 1047211 - DNA, 25 bp, Homo sapien
ggtagagttatggaattcataatgg

SEQ ID NO: 1047212 - DNA, 25 bp, Homo sapien
tagccagatgatggtgctttaagcc

SEQ ID NO: 1047213 - DNA, 25 bp, Homo sapien
ccagatgatggtgctttaagccaga

SEQ ID NO: 1047214 - DNA, 25 bp, Homo sapien
ttagccagatgatggtgctttaagc

SEQ ID NO: 1047215 - DNA, 25 bp, Homo sapien
gccagatgatggtgctttaagccag

SEQ ID NO: 1047216 - DNA, 25 bp, Homo sapien
gggcacagccatgggccaagctgca

SEQ ID NO: 1047217 - DNA, 25 bp, Homo sapien
ggcacagccatgggccaagctgcat

SEQ ID NO: 1047218 - DNA, 25 bp, Homo sapien
cagcccgcagcaccagacccaagac

SEQ ID NO: 1047219 - DNA, 25 bp, Homo sapien
cgcagcaccagacccaagacccgga

SEQ ID NO: 1047220 - DNA, 25 bp, Homo sapien
accagacccaagacccggagctcag

SEQ ID NO: 1047221 - DNA, 25 bp, Homo sapien
cccggagctcagtgaacccctccgt

SEQ ID NO: 1047222 - DNA, 25 bp, Homo sapien
ccctgggcagccactccatgagaca

SEQ ID NO: 1047223 - DNA, 25 bp, Homo sapien
ggcagccactccatgagacacactg

SEQ ID NO: 1047224 - DNA, 25 bp, Homo sapien
gggcagccactccatgagacacact

SEQ ID NO: 1047225 - DNA, 25 bp, Homo sapien
ctgggcagccactccatgagacaca

SEQ ID NO: 1047226 - DNA, 25 bp, Homo sapien
atgaatcccaaagcgctttgcaaac

SEQ ID NO: 1047227 - DNA, 25 bp, Homo sapien
ctgagatgtctgaaaccagccaatg

SEQ ID NO: 1047228 - DNA, 25 bp, Homo sapien
tgtctgaaaccagccaatgaatccc

SEQ ID NO: 1047229 - DNA, 25 bp, Homo sapien
tgcaaacagaacttgagcaggctgc

SEQ ID NO: 1047230 - DNA, 25 bp, Homo sapien
gccatgacaggtgaccgggagcaac

SEQ ID NO: 1047231 - DNA, 25 bp, Homo sapien
gtctgcattgaacgttgccatgaca

SEQ ID NO: 1047232 - DNA, 25 bp, Homo sapien
gatgtagccattgcagagagtattc

SEQ ID NO: 1047233 - DNA, 25 bp, Homo sapien
tgaccgggagcaactgatgtagcca

SEQ ID NO: 1047234 - DNA, 25 bp, Homo sapien
gagattgtcatcaagtgtcccccgg

SEQ ID NO: 1047235 - DNA, 25 bp, Homo sapien
ggctaccactggatggtgattgaga

SEQ ID NO: 1047236 - DNA, 25 bp, Homo sapien
cactggatggtgattgagattgtca

SEQ ID NO: 1047237 - DNA, 25 bp, Homo sapien
ttgtcatcaagtgtcccccggtgtc

SEQ ID NO: 1047238 - DNA, 25 bp, Homo sapien
ctttgtgctgttttgcccatttatc

SEQ ID NO: 1047239 - DNA, 25 bp, Homo sapien
tttgcccatttatctgtcagcagcc

SEQ ID NO: 1047240 - DNA, 25 bp, Homo sapien
tgcccatttatctgtcagcagccct

SEQ ID NO: 1047241 - DNA, 25 bp, Homo sapien
ctgttttgcccatttatctgtcagc

SEQ ID NO: 1047242 - DNA, 25 bp, Homo sapien
gctccctgtggctcccgttcagcac

SEQ ID NO: 1047243 - DNA, 25 bp, Homo sapien
cctgtggctcccgttcagcaccaca

SEQ ID NO: 1047244 - DNA, 25 bp, Homo sapien
tgtggctcccgttcagcaccacagc

SEQ ID NO: 1047245 - DNA, 25 bp, Homo sapien
ctccctgtggctcccgttcagcacc

SEQ ID NO: 1047246 - DNA, 25 bp, Homo sapien
gacatgaaaacgctgcctcaaggtt

SEQ ID NO: 1047247 - DNA, 25 bp, Homo sapien
gtggatcacgttcccactaggcaag

SEQ ID NO: 1047248 - DNA, 25 bp, Homo sapien
taggcaagactggaccggcaatgtg

SEQ ID NO: 1047249 - DNA, 25 bp, Homo sapien
tatctgccacatgaagggcctcgtg

SEQ ID NO: 1047250 - DNA, 25 bp, Homo sapien
tgatgaggagccaacatctactccg

SEQ ID NO: 1047251 - DNA, 25 bp, Homo sapien
gcagctgacttgcagagccactgat

SEQ ID NO: 1047252 - DNA, 25 bp, Homo sapien
tgctccacccctgggcttagataca

SEQ ID NO: 1047253 - DNA, 25 bp, Homo sapien
cctgggcttagatacagcaccaggc

SEQ ID NO: 1047254 - DNA, 25 bp, Homo sapien
agacaaagcccacgcaggcagtgct

SEQ ID NO: 1047255 - DNA, 25 bp, Homo sapien
tgcttgctcgtcctcgcagacaaag

SEQ ID NO: 1047256 - DNA, 25 bp, Homo sapien
attccctgcttgctcgtcctcgcag

SEQ ID NO: 1047257 - DNA, 25 bp, Homo sapien
ggcagtgctgagctcccctctggtc

SEQ ID NO: 1047258 - DNA, 25 bp, Homo sapien
gaggtggcgggccacaagcttgaaa

SEQ ID NO: 1047259 - DNA, 25 bp, Homo sapien
tggcgggccacaagcttgaaagtat

SEQ ID NO: 1047260 - DNA, 25 bp, Homo sapien
gtggcgggccacaagcttgaaagta

SEQ ID NO: 1047261 - DNA, 25 bp, Homo sapien
ggtggcgggccacaagcttgaaagt

SEQ ID NO: 1047262 - DNA, 25 bp, Homo sapien
aggaggtatgacagccacggaggag

SEQ ID NO: 1047263 - DNA, 25 bp, Homo sapien
caggaggtatgacagccacggagga

SEQ ID NO: 1047264 - DNA, 25 bp, Homo sapien
atgtgttgagaggccagtaagtgct

SEQ ID NO: 1047265 - DNA, 25 bp, Homo sapien
gttgagaggccagtaagtgctcctg

SEQ ID NO: 1047266 - DNA, 25 bp, Homo sapien
tcggaggagacgttgggtccccaga

SEQ ID NO: 1047267 - DNA, 25 bp, Homo sapien
gtccccagaggatgtgttgagaggc

SEQ ID NO: 1047268 - DNA, 25 bp, Homo sapien
taaccacaagtgcagaggagccaat

SEQ ID NO: 1047269 - DNA, 25 bp, Homo sapien
tgtaggatgcccacagggaccctct

SEQ ID NO: 1047270 - DNA, 25 bp, Homo sapien
acatcctctcgtttcctgcctggag

SEQ ID NO: 1047271 - DNA, 25 bp, Homo sapien
acacgtgtaaccacaagtgcagagg

SEQ ID NO: 1047272 - DNA, 25 bp, Homo sapien
agtgacaatgctcgacacctcctca

SEQ ID NO: 1047273 - DNA, 25 bp, Homo sapien
tggagctcagtgacaatgctcgaca

SEQ ID NO: 1047274 - DNA, 25 bp, Homo sapien
caccaacttttgaggagagaatgaa

SEQ ID NO: 1047275 - DNA, 25 bp, Homo sapien
gctcagtgacaatgctcgacacctc

SEQ ID NO: 1047276 - DNA, 25 bp, Homo sapien
agagggtgccatctgctggccccag

SEQ ID NO: 1047277 - DNA, 25 bp, Homo sapien
ggacagagggtgccatctgctggcc

SEQ ID NO: 1047278 - DNA, 25 bp, Homo sapien
tggacacaggacagagggtgccatc

SEQ ID NO: 1047279 - DNA, 25 bp, Homo sapien
acagagggtgccatctgctggcccc

SEQ ID NO: 1047280 - DNA, 25 bp, Homo sapien
ctcagcggtgtcttgtgggtggcca

SEQ ID NO: 1047281 - DNA, 25 bp, Homo sapien
tcctcagcggtgtcttgtgggtggc

SEQ ID NO: 1047282 - DNA, 25 bp, Homo sapien
agatcctcagcggtgtcttgtgggt

SEQ ID NO: 1047283 - DNA, 25 bp, Homo sapien
tttcagatcctcagcggtgtcttgt

SEQ ID NO: 1047284 - DNA, 25 bp, Homo sapien
ctgtgctggaccaacccagaacgtc

SEQ ID NO: 1047285 - DNA, 25 bp, Homo sapien
ctccactgtgctggaccaacccaga

SEQ ID NO: 1047286 - DNA, 25 bp, Homo sapien
taccctatggctccactgtgctgga

SEQ ID NO: 1047287 - DNA, 25 bp, Homo sapien
ctaccctatggctccactgtgctgg

SEQ ID NO: 1047288 - DNA, 25 bp, Homo sapien
atttccacttcttgacctcctgtga

SEQ ID NO: 1047289 - DNA, 25 bp, Homo sapien
cttcttgacctcctgtgactcagag

SEQ ID NO: 1047290 - DNA, 25 bp, Homo sapien
tcctgtgactcagagagcatcacct

SEQ ID NO: 1047291 - DNA, 25 bp, Homo sapien
cctgtgactcagagagcatcacctc

SEQ ID NO: 1047292 - DNA, 25 bp, Homo sapien
cagggaagtcgcaaacctctgggct

SEQ ID NO: 1047293 - DNA, 25 bp, Homo sapien
catgtctgggtatgcatctatattc

SEQ ID NO: 1047294 - DNA, 25 bp, Homo sapien
acatgtgggtcgttgtgtgcataca

SEQ ID NO: 1047295 - DNA, 25 bp, Homo sapien
ctacatgtgggtcgttgtgtgcata

SEQ ID NO: 1047296 - DNA, 25 bp, Homo sapien
tgtgtgcatacatgtctgggtatgc

SEQ ID NO: 1047297 - DNA, 25 bp, Homo sapien
atgggggtcccatgatgtatctttc

SEQ ID NO: 1047298 - DNA, 25 bp, Homo sapien
tgctttggcttcttgtagccccaac

SEQ ID NO: 1047299 - DNA, 25 bp, Homo sapien
agaagaccactggctgtgtacatgc

SEQ ID NO: 1047300 - DNA, 25 bp, Homo sapien
ggcatgccccccaaatgccaggagg

SEQ ID NO: 1047301 - DNA, 25 bp, Homo sapien
gagcagcagcgattgaaattccggg

SEQ ID NO: 1047302 - DNA, 25 bp, Homo sapien
aaaggctgcgcgtgactcctgtgtc

SEQ ID NO: 1047303 - DNA, 25 bp, Homo sapien
gcaaagtccccaggataatgccgcc

SEQ ID NO: 1047304 - DNA, 25 bp, Homo sapien
gatgtcccctgagtcacttgaaaga

SEQ ID NO: 1047305 - DNA, 25 bp, Homo sapien
aagttgaagaactggtcagtgagag

SEQ ID NO: 1047306 - DNA, 25 bp, Homo sapien
agttgaagaactggtcagtgagagc

SEQ ID NO: 1047307 - DNA, 25 bp, Homo sapien
tgacacctctctgggatctgcagct

SEQ ID NO: 1047308 - DNA, 25 bp, Homo sapien
tgtttcttcctgtaactcatggtct

SEQ ID NO: 1047309 - DNA, 25 bp, Homo sapien
tgtagcttggattcaggataaaacc

SEQ ID NO: 1047310 - DNA, 25 bp, Homo sapien
ccctgcatggcatccatcagtgcaa

SEQ ID NO: 1047311 - DNA, 25 bp, Homo sapien
taactcatggtctggaaggctgaaa

SEQ ID NO: 1047312 - DNA, 25 bp, Homo sapien
acggtcgttggggatgcatctctct

SEQ ID NO: 1047313 - DNA, 25 bp, Homo sapien
gctccagcacagaggacggtcgttg

SEQ ID NO: 1047314 - DNA, 25 bp, Homo sapien
tccctcttgttagcatgtcctccat

SEQ ID NO: 1047315 - DNA, 25 bp, Homo sapien
tgttagcatgtcctccatggctggc

SEQ ID NO: 1047316 - DNA, 25 bp, Homo sapien
accctcgcatacagaggagtgagga

SEQ ID NO: 1047317 - DNA, 25 bp, Homo sapien
aaccctcgcatacagaggagtgagg

SEQ ID NO: 1047318 - DNA, 25 bp, Homo sapien
gaaaccctcgcatacagaggagtga

SEQ ID NO: 1047319 - DNA, 25 bp, Homo sapien
aagaaaccctcgcatacagaggagt

SEQ ID NO: 1047320 - DNA, 25 bp, Homo sapien
gcagtttgtggcagtcagtgtcggg

SEQ ID NO: 1047321 - DNA, 25 bp, Homo sapien
gagtcaaaggggctgtctagggtgt

SEQ ID NO: 1047322 - DNA, 25 bp, Homo sapien
gtcaaaggggctgtctagggtgtgg

SEQ ID NO: 1047323 - DNA, 25 bp, Homo sapien
tgtggcagtcagtgtcggggagtca

SEQ ID NO: 1047324 - DNA, 25 bp, Homo sapien
ctgcatcgatcagtggccaggcttc

SEQ ID NO: 1047325 - DNA, 25 bp, Homo sapien
gcactgcatcgatcagtggccaggc

SEQ ID NO: 1047326 - DNA, 25 bp, Homo sapien
gcatcgatcagtggccaggcttcca

SEQ ID NO: 1047327 - DNA, 25 bp, Homo sapien
actgcatcgatcagtggccaggctt

SEQ ID NO: 1047328 - DNA, 25 bp, Homo sapien
ctgcaaaggctttatctctgataag

SEQ ID NO: 1047329 - DNA, 25 bp, Homo sapien
tgataaggctctttctgagctcctc

SEQ ID NO: 1047330 - DNA, 25 bp, Homo sapien
ctgtgagtgacggttgacgacccac

SEQ ID NO: 1047331 - DNA, 25 bp, Homo sapien
ggttgacgacccactgcaaaggctt

SEQ ID NO: 1047332 - DNA, 25 bp, Homo sapien
aaggtcacgttgagggtgatgctta

SEQ ID NO: 1047333 - DNA, 25 bp, Homo sapien
aaggtcacgttgagggtgatgctta

SEQ ID NO: 1047334 - DNA, 25 bp, Homo sapien
aacaccaaggtgttcacatgactgg

SEQ ID NO: 1047335 - DNA, 25 bp, Homo sapien
cattttcgaagccatcagcatggca

SEQ ID NO: 1047336 - DNA, 25 bp, Homo sapien
tgattctgcctctcgtgttgcatgg

SEQ ID NO: 1047337 - DNA, 25 bp, Homo sapien
gtttcctgactttcctagctcctag

SEQ ID NO: 1047338 - DNA, 25 bp, Homo sapien
tcctcctcctctgatgatgatcaca

SEQ ID NO: 1047339 - DNA, 25 bp, Homo sapien
cctcctcctctgatgatgatcacac

SEQ ID NO: 1047340 - DNA, 25 bp, Homo sapien
tggtgtaaatactcagcccctgtga

SEQ ID NO: 1047341 - DNA, 25 bp, Homo sapien
tatcactctgagaagaccgaacgcc

SEQ ID NO: 1047342 - DNA, 25 bp, Homo sapien
gacttaacgatgacgagcacagcag

SEQ ID NO: 1047343 - DNA, 25 bp, Homo sapien
tttccatgagcaggtagtgcccacc

SEQ ID NO: 1047344 - DNA, 25 bp, Homo sapien
tcaagctttatccacgctgcagcat

SEQ ID NO: 1047345 - DNA, 25 bp, Homo sapien
ttggtgatttcaaggcggcagctgc

SEQ ID NO: 1047346 - DNA, 25 bp, Homo sapien
tccctcagagcagaatagttgtcca

SEQ ID NO: 1047347 - DNA, 25 bp, Homo sapien
tgcatccgtcaatgaacgcctgggt

SEQ ID NO: 1047348 - DNA, 25 bp, Homo sapien
tgtggtagcacaccgtctcttgtct

SEQ ID NO: 1047349 - DNA, 25 bp, Homo sapien
agattgctttgctgtggtagcacac

SEQ ID NO: 1047350 - DNA, 25 bp, Homo sapien
gctttgctgtggtagcacaccgtct

SEQ ID NO: 1047351 - DNA, 25 bp, Homo sapien
tagcacaccgtctcttgtctctgca

SEQ ID NO: 1047352 - DNA, 25 bp, Homo sapien
cttctcctgtttgacgcacactggg

SEQ ID NO: 1047353 - DNA, 25 bp, Homo sapien
tctcctgtttgacgcacactgggtg

SEQ ID NO: 1047354 - DNA, 25 bp, Homo sapien
ctgtttgacgcacactgggtgagag

SEQ ID NO: 1047355 - DNA, 25 bp, Homo sapien
tcctgtttgacgcacactgggtgag

SEQ ID NO: 1047356 - DNA, 25 bp, Homo sapien
acttcctcttcttccctctctgatt

SEQ ID NO: 1047357 - DNA, 25 bp, Homo sapien
tcacttcctcttcttccctctctga

SEQ ID NO: 1047358 - DNA, 25 bp, Homo sapien
ctctcacttcctcttcttccctctc

SEQ ID NO: 1047359 - DNA, 25 bp, Homo sapien
ctcacttcctcttcttccctctctg

SEQ ID NO: 1047360 - DNA, 25 bp, Homo sapien
gatctgggaaacagtgtagtgatga

SEQ ID NO: 1047361 - DNA, 25 bp, Homo sapien
tggatctgggaaacagtgtagtgat

SEQ ID NO: 1047362 - DNA, 25 bp, Homo sapien
gttggatctgggaaacagtgtagtg

SEQ ID NO: 1047363 - DNA, 25 bp, Homo sapien
ctgggaaacagtgtagtgatgaaga

SEQ ID NO: 1047364 - DNA, 25 bp, Homo sapien
gctgaagtcagctgtgatcagtggt

SEQ ID NO: 1047365 - DNA, 25 bp, Homo sapien
taagaggaaaggtgtgtccatagtc

SEQ ID NO: 1047366 - DNA, 25 bp, Homo sapien
aaagctggaagtagcagctgaagtc

SEQ ID NO: 1047367 - DNA, 25 bp, Homo sapien
tcaggccactgacaaacaagggagg

SEQ ID NO: 1047368 - DNA, 25 bp, Homo sapien
ggtcccctcgccatgggctcagacg

SEQ ID NO: 1047369 - DNA, 25 bp, Homo sapien
ttctcggctccctagctgcgcgcgg

SEQ ID NO: 1047370 - DNA, 25 bp, Homo sapien
cagcgccggagtttggagccgaatc

SEQ ID NO: 1047371 - DNA, 25 bp, Homo sapien
gcggcccagagtccgatcggctgca

SEQ ID NO: 1047372 - DNA, 25 bp, Homo sapien
ggcagacgcagcggcggaggctcgg

SEQ ID NO: 1047373 - DNA, 25 bp, Homo sapien
ggcggaggctcggggcggttcgcat

SEQ ID NO: 1047374 - DNA, 25 bp, Homo sapien
cggcggaggctcggggcggttcgca

SEQ ID NO: 1047375 - DNA, 25 bp, Homo sapien
tcccaacaagcccttctcatcagtc

SEQ ID NO: 1047376 - DNA, 25 bp, Homo sapien
gcccttctcatcagtcctctccttc

SEQ ID NO: 1047377 - DNA, 25 bp, Homo sapien
ctgacggagccagggtttcccaaca

SEQ ID NO: 1047378 - DNA, 25 bp, Homo sapien
aacaagcccttctcatcagtcctct

SEQ ID NO: 1047379 - DNA, 25 bp, Homo sapien
tcccgggttccagggagagctcgca

SEQ ID NO: 1047380 - DNA, 25 bp, Homo sapien
ctgctcccgggttccagggagagct

SEQ ID NO: 1047381 - DNA, 25 bp, Homo sapien
tgctcccgggttccagggagagctc

SEQ ID NO: 1047382 - DNA, 25 bp, Homo sapien
cgggttccagggagagctcgcaggg

SEQ ID NO: 1047383 - DNA, 25 bp, Homo sapien
cgcagaggcgggcaaagggatttga

SEQ ID NO: 1047384 - DNA, 25 bp, Homo sapien
gcgctggctgcaccggcccagatgc

SEQ ID NO: 1047385 - DNA, 25 bp, Homo sapien
aggatgccgggtcagctctctgcag

SEQ ID NO: 1047386 - DNA, 25 bp, Homo sapien
ccagatgcgctcaccctcaggcacg

SEQ ID NO: 1047387 - DNA, 25 bp, Homo sapien
ccagacgcggaaagtttcccattcg

SEQ ID NO: 1047388 - DNA, 25 bp, Homo sapien
cgcgatccgcgtctgcgctcttcct

SEQ ID NO: 1047389 - DNA, 25 bp, Homo sapien
cccaccctcgtgtgctctcctctgc

SEQ ID NO: 1047390 - DNA, 25 bp, Homo sapien
aaagtttcccattcgcgatccgcgt

SEQ ID NO: 1047391 - DNA, 25 bp, Homo sapien
cagaaccggcgagggcgttctggcc

SEQ ID NO: 1047392 - DNA, 25 bp, Homo sapien
ccagtacgttcgtgaaggccggcgc

SEQ ID NO: 1047393 - DNA, 25 bp, Homo sapien
tagcgtcgggcacccttgctctgcc

SEQ ID NO: 1047394 - DNA, 25 bp, Homo sapien
cccgagcagtgaccgccagtacgtt

SEQ ID NO: 1047395 - DNA, 25 bp, Homo sapien
tcctgtctgcatggggcaaacagca

SEQ ID NO: 1047396 - DNA, 25 bp, Homo sapien
cttcttgctctgaagccctgtccct

SEQ ID NO: 1047397 - DNA, 25 bp, Homo sapien
tgtctgcatggggcaaacagcacca

SEQ ID NO: 1047398 - DNA, 25 bp, Homo sapien
ctgcatggggcaaacagcaccagtg

SEQ ID NO: 1047399 - DNA, 25 bp, Homo sapien
gggccacctccagctgtagctggag

SEQ ID NO: 1047400 - DNA, 25 bp, Homo sapien
gggtccggggccacctccagctgta

SEQ ID NO: 1047401 - DNA, 25 bp, Homo sapien
cacagcagcccagccacggggtccg

SEQ ID NO: 1047402 - DNA, 25 bp, Homo sapien
agcagcccagccacggggtccgggg

SEQ ID NO: 1047403 - DNA, 25 bp, Homo sapien
gaacgttgcacagtagtttctctct

SEQ ID NO: 1047404 - DNA, 25 bp, Homo sapien
tcccagaacgttgcacagtagtttc

SEQ ID NO: 1047405 - DNA, 25 bp, Homo sapien
acgttgcacagtagtttctctctga

SEQ ID NO: 1047406 - DNA, 25 bp, Homo sapien
tcttcttcccagaacgttgcacagt

SEQ ID NO: 1047407 - DNA, 25 bp, Homo sapien
ctgacaccctggctgttcctggtgg

SEQ ID NO: 1047408 - DNA, 25 bp, Homo sapien
taggggtggaggatgggtggcagct

SEQ ID NO: 1047409 - DNA, 25 bp, Homo sapien
ggtggaggatgggtggcagctgtcg

SEQ ID NO: 1047410 - DNA, 25 bp, Homo sapien
ggaggatgggtggcagctgtcggct

SEQ ID NO: 1047411 - DNA, 25 bp, Homo sapien
aggatttcccttcatctcatcagca

SEQ ID NO: 1047412 - DNA, 25 bp, Homo sapien
gcaggatttcccttcatctcatcag

SEQ ID NO: 1047413 - DNA, 25 bp, Homo sapien
ggatttcccttcatctcatcagcac

SEQ ID NO: 1047414 - DNA, 25 bp, Homo sapien
ctgcaggatttcccttcatctcatc

SEQ ID NO: 1047415 - DNA, 25 bp, Homo sapien
ttcatcctgactgctccgtttctgt

SEQ ID NO: 1047416 - DNA, 25 bp, Homo sapien
cccacaggaacttctcatcctggtg

SEQ ID NO: 1047417 - DNA, 25 bp, Homo sapien
gaacttctcatcctggtgtgaagag

SEQ ID NO: 1047418 - DNA, 25 bp, Homo sapien
caggaacttctcatcctggtgtgaa

SEQ ID NO: 1047419 - DNA, 25 bp, Homo sapien
aaccggactgatttatgcttttcct

SEQ ID NO: 1047420 - DNA, 25 bp, Homo sapien
cggactgatttatgcttttccttaa

SEQ ID NO: 1047421 - DNA, 25 bp, Homo sapien
tatgcttttccttaattgctccaaa

SEQ ID NO: 1047422 - DNA, 25 bp, Homo sapien
ttccttaattgctccaaaaaagtgc

SEQ ID NO: 1047423 - DNA, 25 bp, Homo sapien
cagttgtccaatagtgaaggatttg

SEQ ID NO: 1047424 - DNA, 25 bp, Homo sapien
gggatcggcagttgtccaatagtga

SEQ ID NO: 1047425 - DNA, 25 bp, Homo sapien
cataacggggatcggcagttgtcca

SEQ ID NO: 1047426 - DNA, 25 bp, Homo sapien
ccagccccataacggggatcggcag

SEQ ID NO: 1047427 - DNA, 25 bp, Homo sapien
cactgaggaggccaggccaatgccc

SEQ ID NO: 1047428 - DNA, 25 bp, Homo sapien
ctgaggaggccaggccaatgcccat

SEQ ID NO: 1047429 - DNA, 25 bp, Homo sapien
tggggaagaggggggtgggcactga

SEQ ID NO: 1047430 - DNA, 25 bp, Homo sapien
gaagaggggggtgggcactgaggag

SEQ ID NO: 1047431 - DNA, 25 bp, Homo sapien
ctgtgaggtccaccctgaaggtgtg

SEQ ID NO: 1047432 - DNA, 25 bp, Homo sapien
aaggtgtgggctggacaggtctttg

SEQ ID NO: 1047433 - DNA, 25 bp, Homo sapien
tgtgggctggacaggtctttgtggt

SEQ ID NO: 1047434 - DNA, 25 bp, Homo sapien
ggctggacaggtctttgtggtgggt

SEQ ID NO: 1047435 - DNA, 25 bp, Homo sapien
tccccagcatggatcatgtgtcctg

SEQ ID NO: 1047436 - DNA, 25 bp, Homo sapien
gtccccagcatggatcatgtgtcct

SEQ ID NO: 1047437 - DNA, 25 bp, Homo sapien
ccccagcatggatcatgtgtcctgt

SEQ ID NO: 1047438 - DNA, 25 bp, Homo sapien
ttctcaggccatcgtaaggatggat

SEQ ID NO: 1047439 - DNA, 25 bp, Homo sapien
tctcaggccatcgtaaggatggatt

SEQ ID NO: 1047440 - DNA, 25 bp, Homo sapien
gccatcgtaaggatggattgagata

SEQ ID NO: 1047441 - DNA, 25 bp, Homo sapien
caggccatcgtaaggatggattgag

SEQ ID NO: 1047442 - DNA, 25 bp, Homo sapien
cctgggaaggggctgtgggccaggc

SEQ ID NO: 1047443 - DNA, 25 bp, Homo sapien
gtcctgggaaggggctgtgggccag

SEQ ID NO: 1047444 - DNA, 25 bp, Homo sapien
caaggtgctgctctgtcctgggaag

SEQ ID NO: 1047445 - DNA, 25 bp, Homo sapien
ctgtcctgggaaggggctgtgggcc

SEQ ID NO: 1047446 - DNA, 25 bp, Homo sapien
tgttgtggcaagaggatgtgtgtgc

SEQ ID NO: 1047447 - DNA, 25 bp, Homo sapien
cagttggggcggcaggtatcaggct

SEQ ID NO: 1047448 - DNA, 25 bp, Homo sapien
tgtgtgcttcgtgtcctcggtggaa

SEQ ID NO: 1047449 - DNA, 25 bp, Homo sapien
cgtgtcctcggtggaaagaaggtca

SEQ ID NO: 1047450 - DNA, 25 bp, Homo sapien
ggtgccctgcgcattccttatgaac

SEQ ID NO: 1047451 - DNA, 25 bp, Homo sapien
gtgccctgcgcattccttatgaacc

SEQ ID NO: 1047452 - DNA, 25 bp, Homo sapien
aggtgccctgcgcattccttatgaa

SEQ ID NO: 1047453 - DNA, 25 bp, Homo sapien
caggtgccctgcgcattccttatga

SEQ ID NO: 1047454 - DNA, 25 bp, Homo sapien
aaaggagcaaccaaagttcctcctg

SEQ ID NO: 1047455 - DNA, 25 bp, Homo sapien
agcccaagggcatcatttggacttc

SEQ ID NO: 1047456 - DNA, 25 bp, Homo sapien
agggcatcatttggacttccctaac

SEQ ID NO: 1047457 - DNA, 25 bp, Homo sapien
cctggcagagcgtcgaccttggcag

SEQ ID NO: 1047458 - DNA, 25 bp, Homo sapien
tagcttcccgttcttgatcccgcag

SEQ ID NO: 1047459 - DNA, 25 bp, Homo sapien
cttgatcccgcagggatgggagcat

SEQ ID NO: 1047460 - DNA, 25 bp, Homo sapien
tcccgttcttgatcccgcagggatg

SEQ ID NO: 1047461 - DNA, 25 bp, Homo sapien
tcttagcttcccgttcttgatcccg

SEQ ID NO: 1047462 - DNA, 25 bp, Homo sapien
tgagtccggatttcagtcccactgt

SEQ ID NO: 1047463 - DNA, 25 bp, Homo sapien
ccctgcccggtcacctgcagtggat

SEQ ID NO: 1047464 - DNA, 25 bp, Homo sapien
gctgtaaacactcagagacaaaagc

SEQ ID NO: 1047465 - DNA, 25 bp, Homo sapien
tgaatgtctttttgacgggaactgc

SEQ ID NO: 1047466 - DNA, 25 bp, Homo sapien
gtgcaggatgtgaacaccatcaggg

SEQ ID NO: 1047467 - DNA, 25 bp, Homo sapien
caggatgtgaacaccatcaggggtg

SEQ ID NO: 1047468 - DNA, 25 bp, Homo sapien
atcaggggtgccatggcagggggtc

SEQ ID NO: 1047469 - DNA, 25 bp, Homo sapien
ctgtgcaggatgtgaacaccatcag

SEQ ID NO: 1047470 - DNA, 25 bp, Homo sapien
ttggcagcttctgctccggctgagg

SEQ ID NO: 1047471 - DNA, 25 bp, Homo sapien
ttagtggcctgttggcagcttctgc

SEQ ID NO: 1047472 - DNA, 25 bp, Homo sapien
tggcctgttggcagcttctgctccg

SEQ ID NO: 1047473 - DNA, 25 bp, Homo sapien
cctgttggcagcttctgctccggct

SEQ ID NO: 1047474 - DNA, 25 bp, Homo sapien
ctaattaatgccgagggtgcactgt

SEQ ID NO: 1047475 - DNA, 25 bp, Homo sapien
aattaatgccgagggtgcactgtgg

SEQ ID NO: 1047476 - DNA, 25 bp, Homo sapien
attaatgccgagggtgcactgtggt

SEQ ID NO: 1047477 - DNA, 25 bp, Homo sapien
taattaatgccgagggtgcactgtg

SEQ ID NO: 1047478 - DNA, 25 bp, Homo sapien
gatttgcataaatgggaagaaacac

SEQ ID NO: 1047479 - DNA, 25 bp, Homo sapien
tgatttgcataaatgggaagaaaca

SEQ ID NO: 1047480 - DNA, 25 bp, Homo sapien
ctgctctatacagcaggcattgtgt

SEQ ID NO: 1047481 - DNA, 25 bp, Homo sapien
cagcaggcattgtgtgaatgctggc

SEQ ID NO: 1047482 - DNA, 25 bp, Homo sapien
tggctttcccttctcgttcatgcca

SEQ ID NO: 1047483 - DNA, 25 bp, Homo sapien
tcccttctcgttcatgccagtggag

SEQ ID NO: 1047484 - DNA, 25 bp, Homo sapien
ttagctaaatccatcagtgccccta

SEQ ID NO: 1047485 - DNA, 25 bp, Homo sapien
agctaaatccatcagtgcccctagg

SEQ ID NO: 1047486 - DNA, 25 bp, Homo sapien
tagctaaatccatcagtgcccctag

SEQ ID NO: 1047487 - DNA, 25 bp, Homo sapien
cttacaaggctcagatatgagtctc

SEQ ID NO: 1047488 - DNA, 25 bp, Homo sapien
atgcattccaggtcatggtcctgac

SEQ ID NO: 1047489 - DNA, 25 bp, Homo sapien
tacaaggctcagatatgagtctccc

SEQ ID NO: 1047490 - DNA, 25 bp, Homo sapien
caggtcatggtcctgaccatgagtc

SEQ ID NO: 1047491 - DNA, 25 bp, Homo sapien
tcctaagatctgtggccttcatggc

SEQ ID NO: 1047492 - DNA, 25 bp, Homo sapien
gggcactcacagctaccacttcctg

SEQ ID NO: 1047493 - DNA, 25 bp, Homo sapien
tctgttgaacttctcccggttccat

SEQ ID NO: 1047494 - DNA, 25 bp, Homo sapien
tgttggcaccgctgctctgttgaac

SEQ ID NO: 1047495 - DNA, 25 bp, Homo sapien
gacctaaaggatgggatctgagttt

SEQ ID NO: 1047496 - DNA, 25 bp, Homo sapien
gcagagtgtgctattcattcatact

SEQ ID NO: 1047497 - DNA, 25 bp, Homo sapien
tacttaatttcaatctgtgatctgg

SEQ ID NO: 1047498 - DNA, 25 bp, Homo sapien
agccagagagttgccgcctccatca

SEQ ID NO: 1047499 - DNA, 25 bp, Homo sapien
cttttcctgaaaatctcctccccat

SEQ ID NO: 1047500 - DNA, 25 bp, Homo sapien
aaaaacacttctgcttgggacacat

SEQ ID NO: 1047501 - DNA, 25 bp, Homo sapien
caaaaacacttctgcttgggacaca

SEQ ID NO: 1047502 - DNA, 25 bp, Homo sapien
acttcaaagtcacggcgtctccagc

SEQ ID NO: 1047503 - DNA, 25 bp, Homo sapien
tgtcttgaagttacacttcaaagtc

SEQ ID NO: 1047504 - DNA, 25 bp, Homo sapien
gaagttacacttcaaagtcacggcg

SEQ ID NO: 1047505 - DNA, 25 bp, Homo sapien
cgatctcccgcatgcgcccatctgt

SEQ ID NO: 1047506 - DNA, 25 bp, Homo sapien
cattcacggaggatggagaaaggaa

SEQ ID NO: 1047507 - DNA, 25 bp, Homo sapien
attcacggaggatggagaaaggaag

SEQ ID NO: 1047508 - DNA, 25 bp, Homo sapien
tcattcacggaggatggagaaagga

SEQ ID NO: 1047509 - DNA, 25 bp, Homo sapien
ttaggtgatccctatggcttcagat

SEQ ID NO: 1047510 - DNA, 25 bp, Homo sapien
tccctatggcttcagataatttcat

SEQ ID NO: 1047511 - DNA, 25 bp, Homo sapien
gctgccctgatttacccaaagaatc

SEQ ID NO: 1047512 - DNA, 25 bp, Homo sapien
catcagctgccctgatttacccaaa

SEQ ID NO: 1047513 - DNA, 25 bp, Homo sapien
cattctcgatgaggagagcgaggct

SEQ ID NO: 1047514 - DNA, 25 bp, Homo sapien
tcacattctcgatgaggagagcgag

SEQ ID NO: 1047515 - DNA, 25 bp, Homo sapien
tgccactttcacattctcgatgagg

SEQ ID NO: 1047516 - DNA, 25 bp, Homo sapien
taaacgctctcggctgccactttca

SEQ ID NO: 1047517 - DNA, 25 bp, Homo sapien
ggattcagcgcattcgagggtccag

SEQ ID NO: 1047518 - DNA, 25 bp, Homo sapien
gattcagcgcattcgagggtccagt

SEQ ID NO: 1047519 - DNA, 25 bp, Homo sapien
agggattcagcgcattcgagggtcc

SEQ ID NO: 1047520 - DNA, 25 bp, Homo sapien
ttcagcgcattcgagggtccagtcc

SEQ ID NO: 1047521 - DNA, 25 bp, Homo sapien
gtgccgcagcactactgcagacaga

SEQ ID NO: 1047522 - DNA, 25 bp, Homo sapien
tcatttgacgttgacagcctctgtg

SEQ ID NO: 1047523 - DNA, 25 bp, Homo sapien
gtgtggatctgtgccgcagcactac

SEQ ID NO: 1047524 - DNA, 25 bp, Homo sapien
agacagatggctccggcagggtgat

SEQ ID NO: 1047525 - DNA, 25 bp, Homo sapien
ctaggtgggatcaaggcccatggtc

SEQ ID NO: 1047526 - DNA, 25 bp, Homo sapien
taggtgggatcaaggcccatggtcc

SEQ ID NO: 1047527 - DNA, 25 bp, Homo sapien
gtgggatcaaggcccatggtccatg

SEQ ID NO: 1047528 - DNA, 25 bp, Homo sapien
aggtgggatcaaggcccatggtcca

SEQ ID NO: 1047529 - DNA, 25 bp, Homo sapien
agaagcctgacagagctggccccca

SEQ ID NO: 1047530 - DNA, 25 bp, Homo sapien
cagaagcctgacagagctggccccc

SEQ ID NO: 1047531 - DNA, 25 bp, Homo sapien
gaagcctgacagagctggcccccat

SEQ ID NO: 1047532 - DNA, 25 bp, Homo sapien
tccccagctgtttgtactcttggac

SEQ ID NO: 1047533 - DNA, 25 bp, Homo sapien
ccccagctgtttgtactcttggact

SEQ ID NO: 1047534 - DNA, 25 bp, Homo sapien
cccagctgtttgtactcttggactt

SEQ ID NO: 1047535 - DNA, 25 bp, Homo sapien
ccagctgtttgtactcttggacttg

SEQ ID NO: 1047536 - DNA, 25 bp, Homo sapien
cggggttgttcctgtcagaggaagc

SEQ ID NO: 1047537 - DNA, 25 bp, Homo sapien
ctggcctgggcctttaattggtgtt

SEQ ID NO: 1047538 - DNA, 25 bp, Homo sapien
caggcgcccagtgactgtgcggggt

SEQ ID NO: 1047539 - DNA, 25 bp, Homo sapien
cttccagataaaatgctagtaataa

SEQ ID NO: 1047540 - DNA, 25 bp, Homo sapien
ctctgagcctgagttacatacatac

SEQ ID NO: 1047541 - DNA, 25 bp, Homo sapien
ttacatacatacagctctccacagc

SEQ ID NO: 1047542 - DNA, 25 bp, Homo sapien
tctccaagggcagagactgagtctc

SEQ ID NO: 1047543 - DNA, 25 bp, Homo sapien
gcagagactgagtctcctccatcat

SEQ ID NO: 1047544 - DNA, 25 bp, Homo sapien
ggcctgtcctatatgtgtttcaact

SEQ ID NO: 1047545 - DNA, 25 bp, Homo sapien
ctgggagctatcatcaagagtgagg

SEQ ID NO: 1047546 - DNA, 25 bp, Homo sapien
tcaagagtgaggtgggcctgtccta

SEQ ID NO: 1047547 - DNA, 25 bp, Homo sapien
aagagtgaggtgggcctgtcctata

SEQ ID NO: 1047548 - DNA, 25 bp, Homo sapien
caaggtctggagtgttgagcaagaa

SEQ ID NO: 1047549 - DNA, 25 bp, Homo sapien
ggcctttgccatagatacctgatag

SEQ ID NO: 1047550 - DNA, 25 bp, Homo sapien
tggaaccattttgcccaacaccgtg

SEQ ID NO: 1047551 - DNA, 25 bp, Homo sapien
caacaccgtgtatctccagtcctag

SEQ ID NO: 1047552 - DNA, 25 bp, Homo sapien
caacccctggtctagcttataagcc

SEQ ID NO: 1047553 - DNA, 25 bp, Homo sapien
ggctacacagcgtctgtcacaatta

SEQ ID NO: 1047554 - DNA, 25 bp, Homo sapien
gatcagtggacagcaaactttctct

SEQ ID NO: 1047555 - DNA, 25 bp, Homo sapien
catgcccagtcattaggtggccaat

SEQ ID NO: 1047556 - DNA, 25 bp, Homo sapien
gagagggcccttgctgtgccaatct

SEQ ID NO: 1047557 - DNA, 25 bp, Homo sapien
ccagcaagggctcatcatgggacag

SEQ ID NO: 1047558 - DNA, 25 bp, Homo sapien
tagacaggttgtgtccagcaagggc

SEQ ID NO: 1047559 - DNA, 25 bp, Homo sapien
taccagtctggctgaccaatgcagt

SEQ ID NO: 1047560 - DNA, 25 bp, Homo sapien
tgaaaatgtcagtttccccggaagc

SEQ ID NO: 1047561 - DNA, 25 bp, Homo sapien
tatcagacacatgcatgggagctct

SEQ ID NO: 1047562 - DNA, 25 bp, Homo sapien
caggcattttcagggctgcgtgtca

SEQ ID NO: 1047563 - DNA, 25 bp, Homo sapien
gatgccagacattcgaacttcagtg

SEQ ID NO: 1047564 - DNA, 25 bp, Homo sapien
tgggagatccggttttgacagagac

SEQ ID NO: 1047565 - DNA, 25 bp, Homo sapien
tgggctcaaggtaattggcttcccc

SEQ ID NO: 1047566 - DNA, 25 bp, Homo sapien
ggttaccgtgcgatggcagacagca

SEQ ID NO: 1047567 - DNA, 25 bp, Homo sapien
cagctggtgtcataaattgcctgtc

SEQ ID NO: 1047568 - DNA, 25 bp, Homo sapien
gcactgaagaattatccgagtcgta

SEQ ID NO: 1047569 - DNA, 25 bp, Homo sapien
caaggacgagactagttttcctttg

SEQ ID NO: 1047570 - DNA, 25 bp, Homo sapien
gccagaggagtaaataactgcttct

SEQ ID NO: 1047571 - DNA, 25 bp, Homo sapien
ggaaatgggaggctcagacacgctc

SEQ ID NO: 1047572 - DNA, 25 bp, Homo sapien
cagcacaggcccagcttctgaaacg

SEQ ID NO: 1047573 - DNA, 25 bp, Homo sapien
acaggcccagcttctgaaacgggac

SEQ ID NO: 1047574 - DNA, 25 bp, Homo sapien
ggcccagcttctgaaacgggaccat

SEQ ID NO: 1047575 - DNA, 25 bp, Homo sapien
gcacaggcccagcttctgaaacggg

SEQ ID NO: 1047576 - DNA, 25 bp, Homo sapien
agtggactggtacaccaggtcctct

SEQ ID NO: 1047577 - DNA, 25 bp, Homo sapien
cttttgcttgatggtgccaccatcc

SEQ ID NO: 1047578 - DNA, 25 bp, Homo sapien
tctcgcttgcggtagttctccatgt

SEQ ID NO: 1047579 - DNA, 25 bp, Homo sapien
gcttgatggtgccaccatccgtcac

SEQ ID NO: 1047580 - DNA, 25 bp, Homo sapien
cctttacaatcttcttgtcccgctt

SEQ ID NO: 1047581 - DNA, 25 bp, Homo sapien
ctttacaatcttcttgtcccgcttt

SEQ ID NO: 1047582 - DNA, 25 bp, Homo sapien
cttcacacaccttcacgtccacatt

SEQ ID NO: 1047583 - DNA, 25 bp, Homo sapien
ttcacacaccttcacgtccacattc

SEQ ID NO: 1047584 - DNA, 25 bp, Homo sapien
tcttcacacaccttcacgtccacat

SEQ ID NO: 1047585 - DNA, 25 bp, Homo sapien
tcaggagaaatcataactaggggga

SEQ ID NO: 1047586 - DNA, 25 bp, Homo sapien
caggagaaatcataactagggggat

SEQ ID NO: 1047587 - DNA, 25 bp, Homo sapien
gagaaatcataactagggggatgaa

SEQ ID NO: 1047588 - DNA, 25 bp, Homo sapien
gaaggagtttgtgcggctgttcaca

SEQ ID NO: 1047589 - DNA, 25 bp, Homo sapien
tgtgaccttacggaagtcatccaca

SEQ ID NO: 1047590 - DNA, 25 bp, Homo sapien
gacttttgattctgcggctggcttg

SEQ ID NO: 1047591 - DNA, 25 bp, Homo sapien
tatcagcaattctgcccagcaggct

SEQ ID NO: 1047592 - DNA, 25 bp, Homo sapien
aaacagttctcctttaggagtcaga

SEQ ID NO: 1047593 - DNA, 25 bp, Homo sapien
ctgagaatccaaatgcgaatacgca

SEQ ID NO: 1047594 - DNA, 25 bp, Homo sapien
cgcagaaccaatcggctgactgggt

SEQ ID NO: 1047595 - DNA, 25 bp, Homo sapien
aaggaaattgccattgagagggcag

SEQ ID NO: 1047596 - DNA, 25 bp, Homo sapien
aattgccattgagagggcaggccac

SEQ ID NO: 1047597 - DNA, 25 bp, Homo sapien
ggcccctccctccaggagccacaga

SEQ ID NO: 1047598 - DNA, 25 bp, Homo sapien
ctctgtgggaaccggggtgagcgtt

SEQ ID NO: 1047599 - DNA, 25 bp, Homo sapien
tggcggtgatgagggagatgtggac

SEQ ID NO: 1047600 - DNA, 25 bp, Homo sapien
cgtttggcggtgatgagggagatgt

SEQ ID NO: 1047601 - DNA, 25 bp, Homo sapien
gggtgagcgtttggcggtgatgagg

SEQ ID NO: 1047602 - DNA, 25 bp, Homo sapien
ttccccaaagggcaatgacagtagc

SEQ ID NO: 1047603 - DNA, 25 bp, Homo sapien
ccacagacaaactccctacagctac

SEQ ID NO: 1047604 - DNA, 25 bp, Homo sapien
gcaatgacagtagcatttccacttg

SEQ ID NO: 1047605 - DNA, 25 bp, Homo sapien
caaagggcaatgacagtagcatttc

SEQ ID NO: 1047606 - DNA, 25 bp, Homo sapien
tccaacaaatgttcagggccaggat

SEQ ID NO: 1047607 - DNA, 25 bp, Homo sapien
tgtcctcaccggtcatgcacggtac

SEQ ID NO: 1047608 - DNA, 25 bp, Homo sapien
tgctcggtccaacaaatgttcaggg

SEQ ID NO: 1047609 - DNA, 25 bp, Homo sapien
gtacccggcgggtctgctcggtcca

SEQ ID NO: 1047610 - DNA, 25 bp, Homo sapien
tcaaagcggagctaaaaacagcttt

SEQ ID NO: 1047611 - DNA, 25 bp, Homo sapien
tagggcaggccaattatgtttgact

SEQ ID NO: 1047612 - DNA, 25 bp, Homo sapien
tggaaaattgaaactccgagcttcc

SEQ ID NO: 1047613 - DNA, 25 bp, Homo sapien
ttaaggctcttaaacaggtcagccc

SEQ ID NO: 1047614 - DNA, 25 bp, Homo sapien
tgaagggtgagaacgaggggacaac

SEQ ID NO: 1047615 - DNA, 25 bp, Homo sapien
cttgaagggtgagaacgaggggaca

SEQ ID NO: 1047616 - DNA, 25 bp, Homo sapien
agggtgagaacgaggggacaactct

SEQ ID NO: 1047617 - DNA, 25 bp, Homo sapien
ttgaagggtgagaacgaggggacaa

SEQ ID NO: 1047618 - DNA, 25 bp, Homo sapien
tggcctgatcgttggcggcccagct

SEQ ID NO: 1047619 - DNA, 25 bp, Homo sapien
acccctgccatagacgtctcttaaa

SEQ ID NO: 1047620 - DNA, 25 bp, Homo sapien
catagacgtctcttaaattggcctg

SEQ ID NO: 1047621 - DNA, 25 bp, Homo sapien
tcttaaattggcctgatcgttggcg

SEQ ID NO: 1047622 - DNA, 25 bp, Homo sapien
tgcatccctgatgggctgcttcttc

SEQ ID NO: 1047623 - DNA, 25 bp, Homo sapien
tgtttctgcgcctgccatgcatccc

SEQ ID NO: 1047624 - DNA, 25 bp, Homo sapien
tgcgcctgccatgcatccctgatgg

SEQ ID NO: 1047625 - DNA, 25 bp, Homo sapien
tgccatgcatccctgatgggctgct

SEQ ID NO: 1047626 - DNA, 25 bp, Homo sapien
cataacctcagcttcgctcttttct

SEQ ID NO: 1047627 - DNA, 25 bp, Homo sapien
caacataacctcagcttcgctcttt

SEQ ID NO: 1047628 - DNA, 25 bp, Homo sapien
agcaacataacctcagcttcgctct

SEQ ID NO: 1047629 - DNA, 25 bp, Homo sapien
tcttctctccttttagctacctgct

SEQ ID NO: 1047630 - DNA, 25 bp, Homo sapien
ctgactaacctgcctgacaaggacc

SEQ ID NO: 1047631 - DNA, 25 bp, Homo sapien
tagagaagctgatctgggttccaca

SEQ ID NO: 1047632 - DNA, 25 bp, Homo sapien
taaacaaattggtgcaactgtgctc

SEQ ID NO: 1047633 - DNA, 25 bp, Homo sapien
ggctcaggacggaactcaattgcta

SEQ ID NO: 1047634 - DNA, 25 bp, Homo sapien
tgggaccaaaactgtcactggaggc

SEQ ID NO: 1047635 - DNA, 25 bp, Homo sapien
tagggaccattgtctgagatccgga

SEQ ID NO: 1047636 - DNA, 25 bp, Homo sapien
ccatgacgttgaggaagatgttgcc

SEQ ID NO: 1047637 - DNA, 25 bp, Homo sapien
cccacatggcactcatagggaccat

SEQ ID NO: 1047638 - DNA, 25 bp, Homo sapien
gtggcgcggtcgtagatgcccacat

SEQ ID NO: 1047639 - DNA, 25 bp, Homo sapien
tcaagcatactcgtcctcctcactg

SEQ ID NO: 1047640 - DNA, 25 bp, Homo sapien
tcactgagacaccaggggccagtgg

SEQ ID NO: 1047641 - DNA, 25 bp, Homo sapien
ctcactgagacaccaggggccagtg

SEQ ID NO: 1047642 - DNA, 25 bp, Homo sapien
agcatactcgtcctcctcactgaga

SEQ ID NO: 1047643 - DNA, 25 bp, Homo sapien
aacggcccattttctgcgatcgctg

SEQ ID NO: 1047644 - DNA, 25 bp, Homo sapien
cttctcagaagctccggctggcagg

SEQ ID NO: 1047645 - DNA, 25 bp, Homo sapien
gcattggaaccttctcagaggacca

SEQ ID NO: 1047646 - DNA, 25 bp, Homo sapien
atcgctggctgctgagtgagatcac

SEQ ID NO: 1047647 - DNA, 25 bp, Homo sapien
taagatgggccacgtccatgctggg

SEQ ID NO: 1047648 - DNA, 25 bp, Homo sapien
tttttgtgccagagcccgcagtagg

SEQ ID NO: 1047649 - DNA, 25 bp, Homo sapien
gaggaacacgtccttgctgggaata

SEQ ID NO: 1047650 - DNA, 25 bp, Homo sapien
tgtgaagtgcatcagatccccggag

SEQ ID NO: 1047651 - DNA, 25 bp, Homo sapien
tttcctccagacacgatgcagacca

SEQ ID NO: 1047652 - DNA, 25 bp, Homo sapien
tccagacacgatgcagaccagcgtg

SEQ ID NO: 1047653 - DNA, 25 bp, Homo sapien
tggttttcctccagacacgatgcag

SEQ ID NO: 1047654 - DNA, 25 bp, Homo sapien
gacacgatgcagaccagcgtgaagt

SEQ ID NO: 1047655 - DNA, 25 bp, Homo sapien
cctgcatgggcatcgacagagctgg

SEQ ID NO: 1047656 - DNA, 25 bp, Homo sapien
tgggtgcttgacctcgcagctgaag

SEQ ID NO: 1047657 - DNA, 25 bp, Homo sapien
gagcagggcacgtacttccacagtg

SEQ ID NO: 1047658 - DNA, 25 bp, Homo sapien
ggcactgcgtcgattggttccccat

SEQ ID NO: 1047659 - DNA, 25 bp, Homo sapien
tctgcaagggctctacagaagggcc

SEQ ID NO: 1047660 - DNA, 25 bp, Homo sapien
caagggctctacagaagggccccca

SEQ ID NO: 1047661 - DNA, 25 bp, Homo sapien
ctgcaagggctctacagaagggccc

SEQ ID NO: 1047662 - DNA, 25 bp, Homo sapien
tgcaagggctctacagaagggcccc

SEQ ID NO: 1047663 - DNA, 25 bp, Homo sapien
ctagaaaaatcttgacctcccctgg

SEQ ID NO: 1047664 - DNA, 25 bp, Homo sapien
gatgtagaaaactcccctgagcatg

SEQ ID NO: 1047665 - DNA, 25 bp, Homo sapien
tcagaattctcgaacccgatccagc

SEQ ID NO: 1047666 - DNA, 25 bp, Homo sapien
tatctggactgtacaaactccctga

SEQ ID NO: 1047667 - DNA, 25 bp, Homo sapien
gcaagggtgccaccccgctggaagc

SEQ ID NO: 1047668 - DNA, 25 bp, Homo sapien
ttcaccagctgccttgaagtctgta

SEQ ID NO: 1047669 - DNA, 25 bp, Homo sapien
tctcctccttattcttggtggggtg

SEQ ID NO: 1047670 - DNA, 25 bp, Homo sapien
gaagtctgtatctggcctttcatct

SEQ ID NO: 1047671 - DNA, 25 bp, Homo sapien
gaggtcatctaatccgtcccactgt

SEQ ID NO: 1047672 - DNA, 25 bp, Homo sapien
aatatgatagcaactctcagcggcc

SEQ ID NO: 1047673 - DNA, 25 bp, Homo sapien
ggtgcaaggtgcatacactcacgac

SEQ ID NO: 1047674 - DNA, 25 bp, Homo sapien
cgaaggctcattgcagggagacaca

SEQ ID NO: 1047675 - DNA, 25 bp, Homo sapien
ttttgggcgggtgtcatgatctgat

SEQ ID NO: 1047676 - DNA, 25 bp, Homo sapien
taacccaggcttgaactgatggtgc

SEQ ID NO: 1047677 - DNA, 25 bp, Homo sapien
tgaaagtggaagcagaacgatcagt

SEQ ID NO: 1047678 - DNA, 25 bp, Homo sapien
tctgaagttgagctgccagggctta

SEQ ID NO: 1047679 - DNA, 25 bp, Homo sapien
ctggggcggcattgttggctgcagc

SEQ ID NO: 1047680 - DNA, 25 bp, Homo sapien
tgctggggcggcattgttggctgca

SEQ ID NO: 1047681 - DNA, 25 bp, Homo sapien
ggtctagggaagcatccgtgggaag

SEQ ID NO: 1047682 - DNA, 25 bp, Homo sapien
gggaagcatccgtgggaagagcagg

SEQ ID NO: 1047683 - DNA, 25 bp, Homo sapien
cttgcaccaaggagagggaatcgct

SEQ ID NO: 1047684 - DNA, 25 bp, Homo sapien
ggcttgcaccaaggagagggaatcg

SEQ ID NO: 1047685 - DNA, 25 bp, Homo sapien
cgcaaagctcttagaacggaaatca

SEQ ID NO: 1047686 - DNA, 25 bp, Homo sapien
ggacctctctttctgacgcaaagct

SEQ ID NO: 1047687 - DNA, 25 bp, Homo sapien
aaatcagagcagttggcagatgtgg

SEQ ID NO: 1047688 - DNA, 25 bp, Homo sapien
tcccaggcactgccaatttcattct

SEQ ID NO: 1047689 - DNA, 25 bp, Homo sapien
tgcagatcactagaccaagggaggg

SEQ ID NO: 1047690 - DNA, 25 bp, Homo sapien
tggctatcctctgaacgacacctga

SEQ ID NO: 1047691 - DNA, 25 bp, Homo sapien
caaaacaggatgagagtgacagtgc

SEQ ID NO: 1047692 - DNA, 25 bp, Homo sapien
ccattgagtttccagggccggagga

SEQ ID NO: 1047693 - DNA, 25 bp, Homo sapien
agtgccatgagggacaagatcagag

SEQ ID NO: 1047694 - DNA, 25 bp, Homo sapien
cagtgccatgagggacaagatcaga

SEQ ID NO: 1047695 - DNA, 25 bp, Homo sapien
gtgccatgagggacaagatcagaga

SEQ ID NO: 1047696 - DNA, 25 bp, Homo sapien
tgccatgagggacaagatcagagag

SEQ ID NO: 1047697 - DNA, 25 bp, Homo sapien
ttcagacatattccctaagcccatg

SEQ ID NO: 1047698 - DNA, 25 bp, Homo sapien
tgtatataggacatgattcctgctc

SEQ ID NO: 1047699 - DNA, 25 bp, Homo sapien
ctagtctagcaatcaacatccttgg

SEQ ID NO: 1047700 - DNA, 25 bp, Homo sapien
taagcccatgcaatgaatcagatgc

SEQ ID NO: 1047701 - DNA, 25 bp, Homo sapien
gggcgtcatcacaattttgggtcct

SEQ ID NO: 1047702 - DNA, 25 bp, Homo sapien
tcatcacaattttgggtcctttggg

SEQ ID NO: 1047703 - DNA, 25 bp, Homo sapien
tgctgggcgtcatcacaattttggg

SEQ ID NO: 1047704 - DNA, 25 bp, Homo sapien
gctctgctgggcgtcatcacaattt

SEQ ID NO: 1047705 - DNA, 25 bp, Homo sapien
ctgaaacccatggaccagaatcctc

SEQ ID NO: 1047706 - DNA, 25 bp, Homo sapien
gaccagaatcctcactgtgtcccct

SEQ ID NO: 1047707 - DNA, 25 bp, Homo sapien
ccagaatcctcactgtgtcccctac

SEQ ID NO: 1047708 - DNA, 25 bp, Homo sapien
tggaccagaatcctcactgtgtccc

SEQ ID NO: 1047709 - DNA, 25 bp, Homo sapien
tacacattgggaaactgaaacccac

SEQ ID NO: 1047710 - DNA, 25 bp, Homo sapien
gagggcccattctgccagatcagca

SEQ ID NO: 1047711 - DNA, 25 bp, Homo sapien
ggcacagcattctcatccgacgggt

SEQ ID NO: 1047712 - DNA, 25 bp, Homo sapien
tctcgttgaagagctaggtttactc

SEQ ID NO: 1047713 - DNA, 25 bp, Homo sapien
caaacacgatgagccgggtgtgcgt

SEQ ID NO: 1047714 - DNA, 25 bp, Homo sapien
gcggtgcagcgatacatggagccat

SEQ ID NO: 1047715 - DNA, 25 bp, Homo sapien
gagccattgagctcggcgggaaccc

SEQ ID NO: 1047716 - DNA, 25 bp, Homo sapien
tccacgtgaacatgggctccgggaa

SEQ ID NO: 1047717 - DNA, 25 bp, Homo sapien
agtcctccgttcctcttgggatatt

SEQ ID NO: 1047718 - DNA, 25 bp, Homo sapien
tcctccgttcctcttgggatatttg

SEQ ID NO: 1047719 - DNA, 25 bp, Homo sapien
ctccgttcctcttgggatatttggg

SEQ ID NO: 1047720 - DNA, 25 bp, Homo sapien
cctccgttcctcttgggatatttgg

SEQ ID NO: 1047721 - DNA, 25 bp, Homo sapien
atcactgtcagggcgagcaccaagg

SEQ ID NO: 1047722 - DNA, 25 bp, Homo sapien
gaatcactgtcagggcgagcaccaa

SEQ ID NO: 1047723 - DNA, 25 bp, Homo sapien
actgtcagggcgagcaccaaggtga

SEQ ID NO: 1047724 - DNA, 25 bp, Homo sapien
agaatcactgtcagggcgagcacca

SEQ ID NO: 1047725 - DNA, 25 bp, Homo sapien
aaccggtcgtggagatgtcagtgcc

SEQ ID NO: 1047726 - DNA, 25 bp, Homo sapien
ttaattaaaccgactgaagaagcca

SEQ ID NO: 1047727 - DNA, 25 bp, Homo sapien
gactaagaacaagactggaaatagt

SEQ ID NO: 1047728 - DNA, 25 bp, Homo sapien
gaagccaagacacagatggaaagag

SEQ ID NO: 1047729 - DNA, 25 bp, Homo sapien
tcctggccaaatggaccaccataga

SEQ ID NO: 1047730 - DNA, 25 bp, Homo sapien
aggctcctggccaaatggaccacca

SEQ ID NO: 1047731 - DNA, 25 bp, Homo sapien
aaatggaccaccatagagccagcgc

SEQ ID NO: 1047732 - DNA, 25 bp, Homo sapien
gccaaatggaccaccatagagccag

SEQ ID NO: 1047733 - DNA, 25 bp, Homo sapien
gccccagaagcacagtgccccaatg

SEQ ID NO: 1047734 - DNA, 25 bp, Homo sapien
taagcaagagggataaaggtctcca

SEQ ID NO: 1047735 - DNA, 25 bp, Homo sapien
aaaggtctccagtctgcggaggcga

SEQ ID NO: 1047736 - DNA, 25 bp, Homo sapien
gagccctggccagggtataagcaag

SEQ ID NO: 1047737 - DNA, 25 bp, Homo sapien
gaagttagtaaagtgccgaagccat

SEQ ID NO: 1047738 - DNA, 25 bp, Homo sapien
tggtcagaaaaggatggtccctgga

SEQ ID NO: 1047739 - DNA, 25 bp, Homo sapien
agtgacttcagacgcaggctgggtc

SEQ ID NO: 1047740 - DNA, 25 bp, Homo sapien
taattctccgaggtgaacgccatgg

SEQ ID NO: 1047741 - DNA, 25 bp, Homo sapien
aactcctcctctctggttcaagcga

SEQ ID NO: 1047742 - DNA, 25 bp, Homo sapien
ccatgcctgctaacttttatgtttt

SEQ ID NO: 1047743 - DNA, 25 bp, Homo sapien
gcaaactcctcctctctggttcaag

SEQ ID NO: 1047744 - DNA, 25 bp, Homo sapien
caccatgcctgctaacttttatgtt

SEQ ID NO: 1047745 - DNA, 25 bp, Homo sapien
tgctcgctgggtggtctccgtcttc

SEQ ID NO: 1047746 - DNA, 25 bp, Homo sapien
ctgcacagcagttctgttcaggctg

SEQ ID NO: 1047747 - DNA, 25 bp, Homo sapien
gctgggtggtctccgtcttcacttc

SEQ ID NO: 1047748 - DNA, 25 bp, Homo sapien
tcctgcacagcagttctgttcaggc

SEQ ID NO: 1047749 - DNA, 25 bp, Homo sapien
gaagctctaagagcatccccagggc

SEQ ID NO: 1047750 - DNA, 25 bp, Homo sapien
gtggatccattgggcctttgagcat

SEQ ID NO: 1047751 - DNA, 25 bp, Homo sapien
gctctaagagcatccccagggcttg

SEQ ID NO: 1047752 - DNA, 25 bp, Homo sapien
ggagtggatccattgggcctttgag

SEQ ID NO: 1047753 - DNA, 25 bp, Homo sapien
cctggcacatagagaatatctggta

SEQ ID NO: 1047754 - DNA, 25 bp, Homo sapien
cgctggatagatttgagagccgtcc

SEQ ID NO: 1047755 - DNA, 25 bp, Homo sapien
cacattgggaacgtggcaaagttgc

SEQ ID NO: 1047756 - DNA, 25 bp, Homo sapien
tgattcatgcaaggtgcttagcaca

SEQ ID NO: 1047757 - DNA, 25 bp, Homo sapien
ggcactgtgggccattggccagcat

SEQ ID NO: 1047758 - DNA, 25 bp, Homo sapien
tgggcactgtgggccattggccagc

SEQ ID NO: 1047759 - DNA, 25 bp, Homo sapien
gggcactgtgggccattggccagca

SEQ ID NO: 1047760 - DNA, 25 bp, Homo sapien
ctgggcactgtgggccattggccag

SEQ ID NO: 1047761 - DNA, 25 bp, Homo sapien
gatgcggtgccgctgagacacctcc

SEQ ID NO: 1047762 - DNA, 25 bp, Homo sapien
tggaaaggtggtgatgcggtgccgc

SEQ ID NO: 1047763 - DNA, 25 bp, Homo sapien
gctgagacacctccaaagtgcccat

SEQ ID NO: 1047764 - DNA, 25 bp, Homo sapien
tgaggaggaaccaagtggaaaggtg

SEQ ID NO: 1047765 - DNA, 25 bp, Homo sapien
actgaagctgctgcattaatagctt

SEQ ID NO: 1047766 - DNA, 25 bp, Homo sapien
agggtgattagggactgcctgatgg

SEQ ID NO: 1047767 - DNA, 25 bp, Homo sapien
gaagctgctgcattaatagcttcag

SEQ ID NO: 1047768 - DNA, 25 bp, Homo sapien
cctgatggagcgggacaaggacact

SEQ ID NO: 1047769 - DNA, 25 bp, Homo sapien
gctgtaaactgccatttgcccatct

SEQ ID NO: 1047770 - DNA, 25 bp, Homo sapien
taaactgccatttgcccatcttatc

SEQ ID NO: 1047771 - DNA, 25 bp, Homo sapien
ggtggctgtaaactgccatttgccc

SEQ ID NO: 1047772 - DNA, 25 bp, Homo sapien
tgcccatcttatcctgttgagctgc

SEQ ID NO: 1047773 - DNA, 25 bp, Homo sapien
tgtcctgctgttcatacatgaattc

SEQ ID NO: 1047774 - DNA, 25 bp, Homo sapien
tcatacatgaattcaggtggcccca

SEQ ID NO: 1047775 - DNA, 25 bp, Homo sapien
ggctgcaggtgcgttgaattgtcct

SEQ ID NO: 1047776 - DNA, 25 bp, Homo sapien
cttgccacggggcatgtcttaagtg

SEQ ID NO: 1047777 - DNA, 25 bp, Homo sapien
caggtgcccgcagcacccctcggat

SEQ ID NO: 1047778 - DNA, 25 bp, Homo sapien
atcaggtgcccgcagcacccctcgg

SEQ ID NO: 1047779 - DNA, 25 bp, Homo sapien
tcaggtgcccgcagcacccctcgga

SEQ ID NO: 1047780 - DNA, 25 bp, Homo sapien
agagtgttcatttgtgggctgtcca

SEQ ID NO: 1047781 - DNA, 25 bp, Homo sapien
tcagtcctgccttcactggtggagg

SEQ ID NO: 1047782 - DNA, 25 bp, Homo sapien
ggggggccaaatgctatccatcagt

SEQ ID NO: 1047783 - DNA, 25 bp, Homo sapien
gaggatttccctccagagtgttcat

SEQ ID NO: 1047784 - DNA, 25 bp, Homo sapien
tagcagacgggcttaaaagcctcaa

SEQ ID NO: 1047785 - DNA, 25 bp, Homo sapien
ctggaactctgggatgcatggatgg

SEQ ID NO: 1047786 - DNA, 25 bp, Homo sapien
gtttgtagcagacgggcttaaaagc

SEQ ID NO: 1047787 - DNA, 25 bp, Homo sapien
cctcaataggttgttttgatttctc

SEQ ID NO: 1047788 - DNA, 25 bp, Homo sapien
ctgggtaataaggtggtgagggctg

SEQ ID NO: 1047789 - DNA, 25 bp, Homo sapien
gaactgtcaggcgatgtgtcctgga

SEQ ID NO: 1047790 - DNA, 25 bp, Homo sapien
ggcgatgtgtcctggacccattttt

SEQ ID NO: 1047791 - DNA, 25 bp, Homo sapien
tccagaactgtcaggcgatgtgtcc

SEQ ID NO: 1047792 - DNA, 25 bp, Homo sapien
ctgtttgtagtggagaactccagaa

SEQ ID NO: 1047793 - DNA, 25 bp, Homo sapien
ggtgattatggggtgctccccactt

SEQ ID NO: 1047794 - DNA, 25 bp, Homo sapien
cataatgctggtgattatggggtgc

SEQ ID NO: 1047795 - DNA, 25 bp, Homo sapien
gctggtgattatggggtgctcccca

SEQ ID NO: 1047796 - DNA, 25 bp, Homo sapien
aatgctggtgattatggggtgctcc

SEQ ID NO: 1047797 - DNA, 25 bp, Homo sapien
cattgcttgcaatcattaggtgcat

SEQ ID NO: 1047798 - DNA, 25 bp, Homo sapien
tgattgcattgcttgcaatcattag

SEQ ID NO: 1047799 - DNA, 25 bp, Homo sapien
gcattgcttgcaatcattaggtgca

SEQ ID NO: 1047800 - DNA, 25 bp, Homo sapien
ttgcattgcttgcaatcattaggtg

SEQ ID NO: 1047801 - DNA, 25 bp, Homo sapien
gcctggctccttgcattgaccagct

SEQ ID NO: 1047802 - DNA, 25 bp, Homo sapien
atctggggttgctgcaccccaggtc

SEQ ID NO: 1047803 - DNA, 25 bp, Homo sapien
tggctccttgcattgaccagcttca

SEQ ID NO: 1047804 - DNA, 25 bp, Homo sapien
tatctggggttgctgcaccccaggt

SEQ ID NO: 1047805 - DNA, 25 bp, Homo sapien
caagtttcaggagatccggagtcgt

SEQ ID NO: 1047806 - DNA, 25 bp, Homo sapien
cacagagagttgcagacaagtttca

SEQ ID NO: 1047807 - DNA, 25 bp, Homo sapien
aatacttcgtgacttgcacagagag

SEQ ID NO: 1047808 - DNA, 25 bp, Homo sapien
agaggaatctgtcgacagcaatact

SEQ ID NO: 1047809 - DNA, 25 bp, Homo sapien
aggaatctccctggatccagttgcc

SEQ ID NO: 1047810 - DNA, 25 bp, Homo sapien
gatccagttgcccatggagcgccgt

SEQ ID NO: 1047811 - DNA, 25 bp, Homo sapien
atggagcgccgtcctcatagcacat

SEQ ID NO: 1047812 - DNA, 25 bp, Homo sapien
gcaggaatctccctggatccagttg

SEQ ID NO: 1047813 - DNA, 25 bp, Homo sapien
gagacacggtactgttgctccttta

SEQ ID NO: 1047814 - DNA, 25 bp, Homo sapien
cagagagacacggtactgttgctcc

SEQ ID NO: 1047815 - DNA, 25 bp, Homo sapien
tccccagagagacacggtactgttg

SEQ ID NO: 1047816 - DNA, 25 bp, Homo sapien
gaacacaagggagaaccagtgttgt

SEQ ID NO: 1047817 - DNA, 25 bp, Homo sapien
cgtaaagtgcattgtgtgcaagatc

SEQ ID NO: 1047818 - DNA, 25 bp, Homo sapien
gctgcattctaagtccttgaggaca

SEQ ID NO: 1047819 - DNA, 25 bp, Homo sapien
gctgtggaccctaagcctatgtggg

SEQ ID NO: 1047820 - DNA, 25 bp, Homo sapien
ccacagctgctgcatcgtaaagtgc

SEQ ID NO: 1047821 - DNA, 25 bp, Homo sapien
gctcttaaccaaacagtcacccgat

SEQ ID NO: 1047822 - DNA, 25 bp, Homo sapien
gttggttattctttatgtgtgtgct

SEQ ID NO: 1047823 - DNA, 25 bp, Homo sapien
tccagtgggcatacaaaagaggagg

SEQ ID NO: 1047824 - DNA, 25 bp, Homo sapien
cacccgatgccaggaaatgcatggg

SEQ ID NO: 1047825 - DNA, 25 bp, Homo sapien
ttgcccagtagggaccagttcctgg

SEQ ID NO: 1047826 - DNA, 25 bp, Homo sapien
caagaatctgattaataattgccca

SEQ ID NO: 1047827 - DNA, 25 bp, Homo sapien
gagaggagcaaaggtgactttgagc

SEQ ID NO: 1047828 - DNA, 25 bp, Homo sapien
ggctgaggaatgtcaagaatctgat

SEQ ID NO: 1047829 - DNA, 25 bp, Homo sapien
tcagctgcatatccaaatgccagtc

SEQ ID NO: 1047830 - DNA, 25 bp, Homo sapien
cagctgcatatccaaatgccagtcc

SEQ ID NO: 1047831 - DNA, 25 bp, Homo sapien
agctgcatatccaaatgccagtcct

SEQ ID NO: 1047832 - DNA, 25 bp, Homo sapien
gtcagctgcatatccaaatgccagt

SEQ ID NO: 1047833 - DNA, 25 bp, Homo sapien
ggtcagggttactgccaacagctgt

SEQ ID NO: 1047834 - DNA, 25 bp, Homo sapien
ggaggttctagttgccccagtcctg

SEQ ID NO: 1047835 - DNA, 25 bp, Homo sapien
agctgccgtcggctgctgcaatgag

SEQ ID NO: 1047836 - DNA, 25 bp, Homo sapien
tgcaagggagccacgtagtgacagt

SEQ ID NO: 1047837 - DNA, 25 bp, Homo sapien
tcctccattcggacgcgggctatgg

SEQ ID NO: 1047838 - DNA, 25 bp, Homo sapien
gctgatgcagggtcaggtcaacatc

SEQ ID NO: 1047839 - DNA, 25 bp, Homo sapien
agtagtcgtacaccttgcccttgag

SEQ ID NO: 1047840 - DNA, 25 bp, Homo sapien
ggtcaacatcggaggcagcctcgag

SEQ ID NO: 1047841 - DNA, 25 bp, Homo sapien
agatggcctgagaggtagattccac

SEQ ID NO: 1047842 - DNA, 25 bp, Homo sapien
gaagatggcctgagaggtagattcc

SEQ ID NO: 1047843 - DNA, 25 bp, Homo sapien
cctaggggatggaacctcagtcagg

SEQ ID NO: 1047844 - DNA, 25 bp, Homo sapien
gaccctggcggtggcctaggggatg

SEQ ID NO: 1047845 - DNA, 25 bp, Homo sapien
aggcggctctttcggctgcaccctt

SEQ ID NO: 1047846 - DNA, 25 bp, Homo sapien
gcggggaggcggctctttcggctgc

SEQ ID NO: 1047847 - DNA, 25 bp, Homo sapien
ggaggcggctctttcggctgcaccc

SEQ ID NO: 1047848 - DNA, 25 bp, Homo sapien
cggctctttcggctgcaccctttgt

SEQ ID NO: 1047849 - DNA, 25 bp, Homo sapien
gagccgccggtgacgaagatttcct

SEQ ID NO: 1047850 - DNA, 25 bp, Homo sapien
tatggaagaaattggtcccggccac

SEQ ID NO: 1047851 - DNA, 25 bp, Homo sapien
tagcaattgcccagatccaggcgga

SEQ ID NO: 1047852 - DNA, 25 bp, Homo sapien
agatttccttggcacgcaccgtggc

SEQ ID NO: 1047853 - DNA, 25 bp, Homo sapien
ggccgggaaactccgcagctccttg

SEQ ID NO: 1047854 - DNA, 25 bp, Homo sapien
tagaccctggtctgaggcaaatcgg

SEQ ID NO: 1047855 - DNA, 25 bp, Homo sapien
gggaaactccgcagctccttgggca

SEQ ID NO: 1047856 - DNA, 25 bp, Homo sapien
tgggcaaggtcaggacggtgggcag

SEQ ID NO: 1047857 - DNA, 25 bp, Homo sapien
gaaaggaccggaattcacctcttga

SEQ ID NO: 1047858 - DNA, 25 bp, Homo sapien
gagttgaagcaagggcggtcatccc

SEQ ID NO: 1047859 - DNA, 25 bp, Homo sapien
gcctctgcagcccatgaagggtaag

SEQ ID NO: 1047860 - DNA, 25 bp, Homo sapien
gaagggtaagactcatctaagatcc

SEQ ID NO: 1047861 - DNA, 25 bp, Homo sapien
ctgtgtgtcccggtgcttctgggaa

SEQ ID NO: 1047862 - DNA, 25 bp, Homo sapien
gagacctccgtgtatccttagcaga

SEQ ID NO: 1047863 - DNA, 25 bp, Homo sapien
ttagcagacctccaccagaagatag

SEQ ID NO: 1047864 - DNA, 25 bp, Homo sapien
tattttctcgcaagcaagagtctcc

SEQ ID NO: 1047865 - DNA, 25 bp, Homo sapien
aatggtcagttaacatgggcagggc

SEQ ID NO: 1047866 - DNA, 25 bp, Homo sapien
tccagacaggaagacggctacagat

SEQ ID NO: 1047867 - DNA, 25 bp, Homo sapien
gactggtggtggttgccccagcttc

SEQ ID NO: 1047868 - DNA, 25 bp, Homo sapien
aggagggcaaattatgctgtcaccc

SEQ ID NO: 1047869 - DNA, 25 bp, Homo sapien
tcaccctgaagtgctgactggtggt

SEQ ID NO: 1047870 - DNA, 25 bp, Homo sapien
caagggctgtggtaatacactgggt

SEQ ID NO: 1047871 - DNA, 25 bp, Homo sapien
ccagatgtgaaaggagatccagtct

SEQ ID NO: 1047872 - DNA, 25 bp, Homo sapien
tggctgggaccaagagcatcactgc

SEQ ID NO: 1047873 - DNA, 25 bp, Homo sapien
ccttcattcggagtttatcaaacca

SEQ ID NO: 1047874 - DNA, 25 bp, Homo sapien
aggtccaaagcatccttattttctt

SEQ ID NO: 1047875 - DNA, 25 bp, Homo sapien
cttgtcaggccctgctctggtgtac

SEQ ID NO: 1047876 - DNA, 25 bp, Homo sapien
tccttgtcaggccctgctctggtgt

SEQ ID NO: 1047877 - DNA, 25 bp, Homo sapien
ttcttccttgtcaggccctgctctg

SEQ ID NO: 1047878 - DNA, 25 bp, Homo sapien
agctctcctcttatgtccatgccaa

SEQ ID NO: 1047879 - DNA, 25 bp, Homo sapien
gaccagggatggtggtcttcggtgg

SEQ ID NO: 1047880 - DNA, 25 bp, Homo sapien
tatgtccatgccaacctccttttca

SEQ ID NO: 1047881 - DNA, 25 bp, Homo sapien
ggtggtcttcggtggtccagtgcaa

SEQ ID NO: 1047882 - DNA, 25 bp, Homo sapien
tatgaagccattgtgagcgctcgcc

SEQ ID NO: 1047883 - DNA, 25 bp, Homo sapien
taaactgcaaggacgattgtgccct

SEQ ID NO: 1047884 - DNA, 25 bp, Homo sapien
gagctaccttgttccaccctgatgg

SEQ ID NO: 1047885 - DNA, 25 bp, Homo sapien
caaataagatgctacgggttccgct

SEQ ID NO: 1047886 - DNA, 25 bp, Homo sapien
cagggaggcctgatcacatgattta

SEQ ID NO: 1047887 - DNA, 25 bp, Homo sapien
tgaagtcgtctcagctgcacacctg

SEQ ID NO: 1047888 - DNA, 25 bp, Homo sapien
cagatgtcactctgaggctaagggc

SEQ ID NO: 1047889 - DNA, 25 bp, Homo sapien
cattctggtaacgacactggctctc

SEQ ID NO: 1047890 - DNA, 25 bp, Homo sapien
ggagaacagagagggtgattttcct

SEQ ID NO: 1047891 - DNA, 25 bp, Homo sapien
aacagagagggtgattttccttttg

SEQ ID NO: 1047892 - DNA, 25 bp, Homo sapien
tggagaacagagagggtgattttcc

SEQ ID NO: 1047893 - DNA, 25 bp, Homo sapien
agagagggtgattttccttttgtct

SEQ ID NO: 1047894 - DNA, 25 bp, Homo sapien
ccacgtacccaaaagtgcctgtcat

SEQ ID NO: 1047895 - DNA, 25 bp, Homo sapien
tccatgatcgtagttacttagttcc

SEQ ID NO: 1047896 - DNA, 25 bp, Homo sapien
agttccacgtacccaaaagtgcctg

SEQ ID NO: 1047897 - DNA, 25 bp, Homo sapien
gatcgtagttacttagttccacgta

SEQ ID NO: 1047898 - DNA, 25 bp, Homo sapien
caactgtcccccaaactatgtgtcc

SEQ ID NO: 1047899 - DNA, 25 bp, Homo sapien
aactgtcccccaaactatgtgtcct

SEQ ID NO: 1047900 - DNA, 25 bp, Homo sapien
gcagagggtgtggacatctccaact

SEQ ID NO: 1047901 - DNA, 25 bp, Homo sapien
gactgtgggtgatgtgttggttacc

SEQ ID NO: 1047902 - DNA, 25 bp, Homo sapien
cggggactgtgggtgatgtgttggt

SEQ ID NO: 1047903 - DNA, 25 bp, Homo sapien
tgcggggactgtgggtgatgtgttg

SEQ ID NO: 1047904 - DNA, 25 bp, Homo sapien
gggactgtgggtgatgtgttggtta

SEQ ID NO: 1047905 - DNA, 25 bp, Homo sapien
tctttcatcagcgttcaccttccgg

SEQ ID NO: 1047906 - DNA, 25 bp, Homo sapien
tagcatctttcatcagcgttcacct

SEQ ID NO: 1047907 - DNA, 25 bp, Homo sapien
ccagatagcatctttcatcagcgtt

SEQ ID NO: 1047908 - DNA, 25 bp, Homo sapien
tcagcgttcaccttccggctgcctg

SEQ ID NO: 1047909 - DNA, 25 bp, Homo sapien
ggagaagggggctggccgacggcaa

SEQ ID NO: 1047910 - DNA, 25 bp, Homo sapien
agaagggggctggccgacggcaaca

SEQ ID NO: 1047911 - DNA, 25 bp, Homo sapien
ggggctggccgacggcaacagtctc

SEQ ID NO: 1047912 - DNA, 25 bp, Homo sapien
agggggctggccgacggcaacagtc

SEQ ID NO: 1047913 - DNA, 25 bp, Homo sapien
gaagtgtttgatttcacgtgtcatg

SEQ ID NO: 1047914 - DNA, 25 bp, Homo sapien
taagatgagctgcaatatccttctc

SEQ ID NO: 1047915 - DNA, 25 bp, Homo sapien
agctgcaatatccttctctatgtta

SEQ ID NO: 1047916 - DNA, 25 bp, Homo sapien
tgatcatggtctctcggtggcacat

SEQ ID NO: 1047917 - DNA, 25 bp, Homo sapien
gatgatacataaagccacctccaac

SEQ ID NO: 1047918 - DNA, 25 bp, Homo sapien
agtctgttccgctgataaatttgtc

SEQ ID NO: 1047919 - DNA, 25 bp, Homo sapien
tagaggtagctaattgtccgacact

SEQ ID NO: 1047920 - DNA, 25 bp, Homo sapien
tttggaggagaactgacatctgtat

SEQ ID NO: 1047921 - DNA, 25 bp, Homo sapien
tggatatcccccaggtaagcaaatg

SEQ ID NO: 1047922 - DNA, 25 bp, Homo sapien
caggtaagcaaatggcatctgccaa

SEQ ID NO: 1047923 - DNA, 25 bp, Homo sapien
tatcccccaggtaagcaaatggcat

SEQ ID NO: 1047924 - DNA, 25 bp, Homo sapien
ccccaggtaagcaaatggcatctgc

SEQ ID NO: 1047925 - DNA, 25 bp, Homo sapien
cggctttcccgcatggtgcatggtt

SEQ ID NO: 1047926 - DNA, 25 bp, Homo sapien
ggactgctgtcagcccgctccatag

SEQ ID NO: 1047927 - DNA, 25 bp, Homo sapien
gcccgctccatagctgtgtcagtga

SEQ ID NO: 1047928 - DNA, 25 bp, Homo sapien
tcagtgaacaaaagctgactgctgg

SEQ ID NO: 1047929 - DNA, 25 bp, Homo sapien
tggcattgaaaaagagtttgctgtt

SEQ ID NO: 1047930 - DNA, 25 bp, Homo sapien
actggcattgaaaaagagtttgctg

SEQ ID NO: 1047931 - DNA, 25 bp, Homo sapien
ctggcattgaaaaagagtttgctgt

SEQ ID NO: 1047932 - DNA, 25 bp, Homo sapien
ggcatgttgcgctcagttcatcgta

SEQ ID NO: 1047933 - DNA, 25 bp, Homo sapien
gacggctgtcaaggtgatatccata

SEQ ID NO: 1047934 - DNA, 25 bp, Homo sapien
tagcttcccctagcaagacggctgt

SEQ ID NO: 1047935 - DNA, 25 bp, Homo sapien
tgagagtacctagcatgtgcctggg

SEQ ID NO: 1047936 - DNA, 25 bp, Homo sapien
ctccgctagtgggtggggtcagctg

SEQ ID NO: 1047937 - DNA, 25 bp, Homo sapien
ttctccgctagtgggtggggtcagc

SEQ ID NO: 1047938 - DNA, 25 bp, Homo sapien
tctccgctagtgggtggggtcagct

SEQ ID NO: 1047939 - DNA, 25 bp, Homo sapien
tttctccgctagtgggtggggtcag

SEQ ID NO: 1047940 - DNA, 25 bp, Homo sapien
ccccagggccgaggcatctcctgca

SEQ ID NO: 1047941 - DNA, 25 bp, Homo sapien
cccccagggccgaggcatctcctgc

SEQ ID NO: 1047942 - DNA, 25 bp, Homo sapien
accctaggcactgggaacgcagcag

SEQ ID NO: 1047943 - DNA, 25 bp, Homo sapien
gaacgcagcagtaagggtgatgctt

SEQ ID NO: 1047944 - DNA, 25 bp, Homo sapien
cagcagtaagggtgatgcttgcttt

SEQ ID NO: 1047945 - DNA, 25 bp, Homo sapien
tgtgccccgcagcaccctaggcact

SEQ ID NO: 1047946 - DNA, 25 bp, Homo sapien
agagcccgcatataggccaagagcc

SEQ ID NO: 1047947 - DNA, 25 bp, Homo sapien
gtccaggcaatttccgagcttctcc

SEQ ID NO: 1047948 - DNA, 25 bp, Homo sapien
agaccggattgtttggcagagcctg

SEQ ID NO: 1047949 - DNA, 25 bp, Homo sapien
caatttccgagcttctcccagggct

SEQ ID NO: 1047950 - DNA, 25 bp, Homo sapien
ccaacgaagagggtgacctgggtga

SEQ ID NO: 1047951 - DNA, 25 bp, Homo sapien
tgggaggtaggtggaccaacgaaga

SEQ ID NO: 1047952 - DNA, 25 bp, Homo sapien
acctgggtgagcaatgctgaggcct

SEQ ID NO: 1047953 - DNA, 25 bp, Homo sapien
tagactgagtctccgttgactgtgg

SEQ ID NO: 1047954 - DNA, 25 bp, Homo sapien
gctcaatacggccattctttcaact

SEQ ID NO: 1047955 - DNA, 25 bp, Homo sapien
cccgaattcatcctggtggtatagt

SEQ ID NO: 1047956 - DNA, 25 bp, Homo sapien
tttgcatcaggtaaagagactttgg

SEQ ID NO: 1047957 - DNA, 25 bp, Homo sapien
gtccctagccagcttgtaaatagct

SEQ ID NO: 1047958 - DNA, 25 bp, Homo sapien
tagagaccggtgctggtcatggctc

SEQ ID NO: 1047959 - DNA, 25 bp, Homo sapien
catggctccgttgattgatggccga

SEQ ID NO: 1047960 - DNA, 25 bp, Homo sapien
gtcagctggcgcatcctcactctga

SEQ ID NO: 1047961 - DNA, 25 bp, Homo sapien
gctgggaatctgtcagctggcgcat

SEQ ID NO: 1047962 - DNA, 25 bp, Homo sapien
ggtctccatgtactacgttttcagg

SEQ ID NO: 1047963 - DNA, 25 bp, Homo sapien
tgccgtggagtccttggcttgccct

SEQ ID NO: 1047964 - DNA, 25 bp, Homo sapien
gaagacacatatcacctgccgtgga

SEQ ID NO: 1047965 - DNA, 25 bp, Homo sapien
tctaggccggctttggcaccttgac

SEQ ID NO: 1047966 - DNA, 25 bp, Homo sapien
caaccaacaaggagctgatccctgt

SEQ ID NO: 1047967 - DNA, 25 bp, Homo sapien
gcatcgaggtgggatgaacagctca

SEQ ID NO: 1047968 - DNA, 25 bp, Homo sapien
aggagctgatccctgtccactgtgt

SEQ ID NO: 1047969 - DNA, 25 bp, Homo sapien
gtctctgcggtcttgagatatctgc

SEQ ID NO: 1047970 - DNA, 25 bp, Homo sapien
caacatctctgttggacaccgagct

SEQ ID NO: 1047971 - DNA, 25 bp, Homo sapien
cccatcgtatttcttgctgcatctt

SEQ ID NO: 1047972 - DNA, 25 bp, Homo sapien
gcagggtggacacccatcgtatttc

SEQ ID NO: 1047973 - DNA, 25 bp, Homo sapien
tctctgttggacaccgagctcaggg

SEQ ID NO: 1047974 - DNA, 25 bp, Homo sapien
tggtggagagtcctggcccaagtgg

SEQ ID NO: 1047975 - DNA, 25 bp, Homo sapien
gcagtggtggtggagagtcctggcc

SEQ ID NO: 1047976 - DNA, 25 bp, Homo sapien
tggtggtggagagtcctggcccaag

SEQ ID NO: 1047977 - DNA, 25 bp, Homo sapien
ggtggagagtcctggcccaagtggg

SEQ ID NO: 1047978 - DNA, 25 bp, Homo sapien
gcctgggcgaatccgtcccaaggag

SEQ ID NO: 1047979 - DNA, 25 bp, Homo sapien
ggcctgggcgaatccgtcccaagga

SEQ ID NO: 1047980 - DNA, 25 bp, Homo sapien
ctgggcgaatccgtcccaaggagct

SEQ ID NO: 1047981 - DNA, 25 bp, Homo sapien
gggcgaatccgtcccaaggagctgg

SEQ ID NO: 1047982 - DNA, 25 bp, Homo sapien
tgtacaagctgcagtttgttccgtt

SEQ ID NO: 1047983 - DNA, 25 bp, Homo sapien
tacaagctgcagtttgttccgtttt

SEQ ID NO: 1047984 - DNA, 25 bp, Homo sapien
gctgcagtttgttccgttttgaact

SEQ ID NO: 1047985 - DNA, 25 bp, Homo sapien
caagctgcagtttgttccgttttga

SEQ ID NO: 1047986 - DNA, 25 bp, Homo sapien
cttcacagagcccaaagcctgggtc

SEQ ID NO: 1047987 - DNA, 25 bp, Homo sapien
acagctgtggtctcctggaccaggg

SEQ ID NO: 1047988 - DNA, 25 bp, Homo sapien
acagggcgtggagatgcttccacag

SEQ ID NO: 1047989 - DNA, 25 bp, Homo sapien
ggaggagggacatgaagccttcaca

SEQ ID NO: 1047990 - DNA, 25 bp, Homo sapien
tttgtagggactgctttgccccaca

SEQ ID NO: 1047991 - DNA, 25 bp, Homo sapien
accatttgtagggactgctttgccc

SEQ ID NO: 1047992 - DNA, 25 bp, Homo sapien
gtagggactgctttgccccacactg

SEQ ID NO: 1047993 - DNA, 25 bp, Homo sapien
catttgtagggactgctttgcccca

SEQ ID NO: 1047994 - DNA, 25 bp, Homo sapien
ttggtcttgataggcgatagggacc

SEQ ID NO: 1047995 - DNA, 25 bp, Homo sapien
tcaaatcataaggttccatttcctt

SEQ ID NO: 1047996 - DNA, 25 bp, Homo sapien
tcttgataggcgatagggaccagca

SEQ ID NO: 1047997 - DNA, 25 bp, Homo sapien
ggcgatagggaccagcatggaaaat

SEQ ID NO: 1047998 - DNA, 25 bp, Homo sapien
cccagccagggtacaaagcctgaaa

SEQ ID NO: 1047999 - DNA, 25 bp, Homo sapien
tgcacgatgaccaagaggaacaagg

SEQ ID NO: 1048000 - DNA, 25 bp, Homo sapien
agcagccctctgaagagttcaggag

SEQ ID NO: 1048001 - DNA, 25 bp, Homo sapien
caatccacggttgtccaggctgtaa

SEQ ID NO: 1048002 - DNA, 25 bp, Homo sapien
tttgggcctggcaagatgcgggatt

SEQ ID NO: 1048003 - DNA, 25 bp, Homo sapien
ggagatttgggcctggcaagatgcg

SEQ ID NO: 1048004 - DNA, 25 bp, Homo sapien
gagagtggtccagagcgaggagatt

SEQ ID NO: 1048005 - DNA, 25 bp, Homo sapien
gagtggtccagagcgaggagatttg

SEQ ID NO: 1048006 - DNA, 25 bp, Homo sapien
caactctgatctaaaatgaccctcg

SEQ ID NO: 1048007 - DNA, 25 bp, Homo sapien
tggtgctggtaggaggctgtgtgtt

SEQ ID NO: 1048008 - DNA, 25 bp, Homo sapien
aatgaccctcggattctctgtgaga

SEQ ID NO: 1048009 - DNA, 25 bp, Homo sapien
cagcggagccgcttctctgcctgtg

SEQ ID NO: 1048010 - DNA, 25 bp, Homo sapien
caagatgtggatcccctgaacctgg

SEQ ID NO: 1048011 - DNA, 25 bp, Homo sapien
tgaacacctacactttctccgtggg

SEQ ID NO: 1048012 - DNA, 25 bp, Homo sapien
tctgggtgcaccatgatgtatggaa

SEQ ID NO: 1048013 - DNA, 25 bp, Homo sapien
cacgtgcctacagctgcaagtggtc

SEQ ID NO: 1048014 - DNA, 25 bp, Homo sapien
gttagagcagatcaaaaagtacctt

SEQ ID NO: 1048015 - DNA, 25 bp, Homo sapien
tccatctaattctctatagtggcag

SEQ ID NO: 1048016 - DNA, 25 bp, Homo sapien
tagtttccagctcgcctgagtaccc

SEQ ID NO: 1048017 - DNA, 25 bp, Homo sapien
tgaacccgattctctccatagccat

SEQ ID NO: 1048018 - DNA, 25 bp, Homo sapien
ggaagctgatggaattgagttttct

SEQ ID NO: 1048019 - DNA, 25 bp, Homo sapien
attggcttgttgagacgaggaagct

SEQ ID NO: 1048020 - DNA, 25 bp, Homo sapien
ttgagacgaggaagctgatggaatt

SEQ ID NO: 1048021 - DNA, 25 bp, Homo sapien
cttagattggcttgttgagacgagg

SEQ ID NO: 1048022 - DNA, 25 bp, Homo sapien
tcttcttcccaagtttccaagtggc

SEQ ID NO: 1048023 - DNA, 25 bp, Homo sapien
aatgctaataggaattcttcttccc

SEQ ID NO: 1048024 - DNA, 25 bp, Homo sapien
cccgtctggtctgaaatctctgcat

SEQ ID NO: 1048025 - DNA, 25 bp, Homo sapien
aaaggcaacaacaatgctaatagga

SEQ ID NO: 1048026 - DNA, 25 bp, Homo sapien
tctattggaatgagcgtggccgttc

SEQ ID NO: 1048027 - DNA, 25 bp, Homo sapien
ctattggaatgagcgtggccgttct

SEQ ID NO: 1048028 - DNA, 25 bp, Homo sapien
ttgtctattggaatgagcgtggccg

SEQ ID NO: 1048029 - DNA, 25 bp, Homo sapien
ttggaatgagcgtggccgttcttgc

SEQ ID NO: 1048030 - DNA, 25 bp, Homo sapien
ggtttctgcagctccgggattccat

SEQ ID NO: 1048031 - DNA, 25 bp, Homo sapien
acacaggcccccagggtttctgcag

SEQ ID NO: 1048032 - DNA, 25 bp, Homo sapien
agtagtgggtgcagtagcgacacag

SEQ ID NO: 1048033 - DNA, 25 bp, Homo sapien
gtgggtgcagtagcgacacaggccc

SEQ ID NO: 1048034 - DNA, 25 bp, Homo sapien
cgtgcagacgtctccagccgccgcc

SEQ ID NO: 1048035 - DNA, 25 bp, Homo sapien
cctataactcctttccagcaggtag

SEQ ID NO: 1048036 - DNA, 25 bp, Homo sapien
gccgggcctataactcctttccagc

SEQ ID NO: 1048037 - DNA, 25 bp, Homo sapien
cgccccgtgcagacgtctccagccg

SEQ ID NO: 1048038 - DNA, 25 bp, Homo sapien
aacgcggccggaatcgaggccgcca

SEQ ID NO: 1048039 - DNA, 25 bp, Homo sapien
tggcgacgacgaggaagttcaaaca

SEQ ID NO: 1048040 - DNA, 25 bp, Homo sapien
cagtcaaacgcgtccagaagctggg

SEQ ID NO: 1048041 - DNA, 25 bp, Homo sapien
gactgcggagtggatttcgttctcg

SEQ ID NO: 1048042 - DNA, 25 bp, Homo sapien
gcgcacgccggggacgaatccaaag

SEQ ID NO: 1048043 - DNA, 25 bp, Homo sapien
cacgccggggacgaatccaaagtcg

SEQ ID NO: 1048044 - DNA, 25 bp, Homo sapien
cgaatccaaagtcggcaaaaatcgc

SEQ ID NO: 1048045 - DNA, 25 bp, Homo sapien
gcaaaaatcgcttcccgtccgctcc

SEQ ID NO: 1048046 - DNA, 25 bp, Homo sapien
ggccgcatcattctcggtaccgtgc

SEQ ID NO: 1048047 - DNA, 25 bp, Homo sapien
ggagccggccgcatcattctcggta

SEQ ID NO: 1048048 - DNA, 25 bp, Homo sapien
tcattctcggtaccgtgccgggaag

SEQ ID NO: 1048049 - DNA, 25 bp, Homo sapien
gcatcattctcggtaccgtgccggg

SEQ ID NO: 1048050 - DNA, 25 bp, Homo sapien
gaagattagaacgatttcacagccg

SEQ ID NO: 1048051 - DNA, 25 bp, Homo sapien
gatctggaagattagaacgatttca

SEQ ID NO: 1048052 - DNA, 25 bp, Homo sapien
gctgcggagatctggaagattagaa

SEQ ID NO: 1048053 - DNA, 25 bp, Homo sapien
aacgatttcacagccgcgggagtgg

SEQ ID NO: 1048054 - DNA, 25 bp, Homo sapien
caggccggatggacccggtctcctg

SEQ ID NO: 1048055 - DNA, 25 bp, Homo sapien
cagccgtgggagacacgcagctgtc

SEQ ID NO: 1048056 - DNA, 25 bp, Homo sapien
gcggcaaagaatcttggagacgcag

SEQ ID NO: 1048057 - DNA, 25 bp, Homo sapien
gacacgcagctgtcgggagatgaca

SEQ ID NO: 1048058 - DNA, 25 bp, Homo sapien
tttttctctacatccggagtcgcca

SEQ ID NO: 1048059 - DNA, 25 bp, Homo sapien
gagggcacagtgcttcggtcacagt

SEQ ID NO: 1048060 - DNA, 25 bp, Homo sapien
gtgcttcggtcacagtgcccatcct

SEQ ID NO: 1048061 - DNA, 25 bp, Homo sapien
aacatgcctgggttttccctcttgt

SEQ ID NO: 1048062 - DNA, 25 bp, Homo sapien
agctctgccggctcagctgccttct

SEQ ID NO: 1048063 - DNA, 25 bp, Homo sapien
ccctggccacactctgggccagctc

SEQ ID NO: 1048064 - DNA, 25 bp, Homo sapien
agccctccacactggacccctggcc

SEQ ID NO: 1048065 - DNA, 25 bp, Homo sapien
tccagccctccacactggacccctg

SEQ ID NO: 1048066 - DNA, 25 bp, Homo sapien
tggccttcttttcgccgtcgtcctc

SEQ ID NO: 1048067 - DNA, 25 bp, Homo sapien
ctttgtcgcccaggatgccgtcgat

SEQ ID NO: 1048068 - DNA, 25 bp, Homo sapien
tttgtcgcccaggatgccgtcgatg

SEQ ID NO: 1048069 - DNA, 25 bp, Homo sapien
gagcgaaccactggcccgcacaccg

SEQ ID NO: 1048070 - DNA, 25 bp, Homo sapien
accactggcccgcacaccggagcgt

SEQ ID NO: 1048071 - DNA, 25 bp, Homo sapien
cctcgcagcccagggaagttcccta

SEQ ID NO: 1048072 - DNA, 25 bp, Homo sapien
gcccgcacaccggagcgtgggaaaa

SEQ ID NO: 1048073 - DNA, 25 bp, Homo sapien
tgccccgcagcatgagagtttctcc

SEQ ID NO: 1048074 - DNA, 25 bp, Homo sapien
gagtttctccgctggagttctggtc

SEQ ID NO: 1048075 - DNA, 25 bp, Homo sapien
tgcccggcctccatagcgcaaagaa

SEQ ID NO: 1048076 - DNA, 25 bp, Homo sapien
gcttcgcatctagccggcatccggg

SEQ ID NO: 1048077 - DNA, 25 bp, Homo sapien
tccccgcagtattggggtagaccag

SEQ ID NO: 1048078 - DNA, 25 bp, Homo sapien
tggggtagaccaggcgcgcagcccc

SEQ ID NO: 1048079 - DNA, 25 bp, Homo sapien
ccccgcagtattggggtagaccagg

SEQ ID NO: 1048080 - DNA, 25 bp, Homo sapien
tcgacgccgagagtagcagccaaaa

SEQ ID NO: 1048081 - DNA, 25 bp, Homo sapien
ataattgatcgacgccgagagtagc

SEQ ID NO: 1048082 - DNA, 25 bp, Homo sapien
ctataaataattgatcgacgccgag

SEQ ID NO: 1048083 - DNA, 25 bp, Homo sapien
tagcagccaaaacgccagcccggga

SEQ ID NO: 1048084 - DNA, 25 bp, Homo sapien
acttggacatgaaactgatgtctgg

SEQ ID NO: 1048085 - DNA, 25 bp, Homo sapien
ttaacttggacatgaaactgatgtc

SEQ ID NO: 1048086 - DNA, 25 bp, Homo sapien
taacttggacatgaaactgatgtct

SEQ ID NO: 1048087 - DNA, 25 bp, Homo sapien
ctttaacttggacatgaaactgatg

SEQ ID NO: 1048088 - DNA, 25 bp, Homo sapien
ctcggatggagattggaaggtcttt

SEQ ID NO: 1048089 - DNA, 25 bp, Homo sapien
ttactcggatggagattggaaggtc

SEQ ID NO: 1048090 - DNA, 25 bp, Homo sapien
gatggagattggaaggtcttttcac

SEQ ID NO: 1048091 - DNA, 25 bp, Homo sapien
cggatggagattggaaggtcttttc

SEQ ID NO: 1048092 - DNA, 25 bp, Homo sapien
actgctttaaggctactgttatatg

SEQ ID NO: 1048093 - DNA, 25 bp, Homo sapien
cttactgctttaaggctactgttat

SEQ ID NO: 1048094 - DNA, 25 bp, Homo sapien
gctttaaggctactgttatatgtgc

SEQ ID NO: 1048095 - DNA, 25 bp, Homo sapien
tgctttaaggctactgttatatgtg

SEQ ID NO: 1048096 - DNA, 25 bp, Homo sapien
caggaccagggcgaccaagccatgg

SEQ ID NO: 1048097 - DNA, 25 bp, Homo sapien
gggaaatcggccaattcactggcag

SEQ ID NO: 1048098 - DNA, 25 bp, Homo sapien
caagccatggaaaggtccgttcgct

SEQ ID NO: 1048099 - DNA, 25 bp, Homo sapien
tccgttcgctgaccctcagactggg

SEQ ID NO: 1048100 - DNA, 25 bp, Homo sapien
gctgtgaccacagattcgcaggcca

SEQ ID NO: 1048101 - DNA, 25 bp, Homo sapien
cagcggggatgacttttggagacct

SEQ ID NO: 1048102 - DNA, 25 bp, Homo sapien
cagcatccactatagctgtgaccac

SEQ ID NO: 1048103 - DNA, 25 bp, Homo sapien
ttcaggcatctcctctacagcatcc

SEQ ID NO: 1048104 - DNA, 25 bp, Homo sapien
tctttcagaatccagggtcctcctc

SEQ ID NO: 1048105 - DNA, 25 bp, Homo sapien
ccagatctttcagaatccagggtcc

SEQ ID NO: 1048106 - DNA, 25 bp, Homo sapien
tctttctccttcaatctcctgcctc

SEQ ID NO: 1048107 - DNA, 25 bp, Homo sapien
gatctttcagaatccagggtcctcc

SEQ ID NO: 1048108 - DNA, 25 bp, Homo sapien
tccaaatcactggagtcagggcccc

SEQ ID NO: 1048109 - DNA, 25 bp, Homo sapien
aaatcactggagtcagggccccttt

SEQ ID NO: 1048110 - DNA, 25 bp, Homo sapien
tcactggagtcagggccccttttct

SEQ ID NO: 1048111 - DNA, 25 bp, Homo sapien
aacttccaaatcactggagtcaggg

SEQ ID NO: 1048112 - DNA, 25 bp, Homo sapien
cgggcggcgttcatctttggcgtat

SEQ ID NO: 1048113 - DNA, 25 bp, Homo sapien
gctcctcgggcaatttcttcacttc

SEQ ID NO: 1048114 - DNA, 25 bp, Homo sapien
ggtcttgccattgttcagggctgca

SEQ ID NO: 1048115 - DNA, 25 bp, Homo sapien
cgtatttgcagtcccgagaaagaaa

SEQ ID NO: 1048116 - DNA, 25 bp, Homo sapien
tcagatggcacctgccaccttgcca

SEQ ID NO: 1048117 - DNA, 25 bp, Homo sapien
cagatggcacctgccaccttgccac

SEQ ID NO: 1048118 - DNA, 25 bp, Homo sapien
atggcacctgccaccttgccactcg

SEQ ID NO: 1048119 - DNA, 25 bp, Homo sapien
gatggcacctgccaccttgccactc

SEQ ID NO: 1048120 - DNA, 25 bp, Homo sapien
gtcaagttgagatttccgagtcaaa

SEQ ID NO: 1048121 - DNA, 25 bp, Homo sapien
gagcaaccctcaggtgcctgggtcc

SEQ ID NO: 1048122 - DNA, 25 bp, Homo sapien
agcggaggccgccagacttcagctg

SEQ ID NO: 1048123 - DNA, 25 bp, Homo sapien
gagggtgtctgagcaaccctcaggt

SEQ ID NO: 1048124 - DNA, 25 bp, Homo sapien
ggccattgagaggtattcatgcgtc

SEQ ID NO: 1048125 - DNA, 25 bp, Homo sapien
taacaagctgttgtctggcttgatc

SEQ ID NO: 1048126 - DNA, 25 bp, Homo sapien
tgtcactctaaagagggccattgag

SEQ ID NO: 1048127 - DNA, 25 bp, Homo sapien
attgagaggtattcatgcgtcggcc

SEQ ID NO: 1048128 - DNA, 25 bp, Homo sapien
tttgtgttcagcaatcaggtgtgtc

SEQ ID NO: 1048129 - DNA, 25 bp, Homo sapien
tccaccctggctctttccctaagtc

SEQ ID NO: 1048130 - DNA, 25 bp, Homo sapien
taagtcccgtttctcctcaccatct

SEQ ID NO: 1048131 - DNA, 25 bp, Homo sapien
ttttcctttgtgttcagcaatcagg

SEQ ID NO: 1048132 - DNA, 25 bp, Homo sapien
gggcagttgctgtaatggaggccat

SEQ ID NO: 1048133 - DNA, 25 bp, Homo sapien
cactggggcagttgctgtaatggag

SEQ ID NO: 1048134 - DNA, 25 bp, Homo sapien
ctggggcagttgctgtaatggaggc

SEQ ID NO: 1048135 - DNA, 25 bp, Homo sapien
ggggcagttgctgtaatggaggcca

SEQ ID NO: 1048136 - DNA, 25 bp, Homo sapien
ataggccccggtgttgagctgcggc

SEQ ID NO: 1048137 - DNA, 25 bp, Homo sapien
tttaatcaagtaattcgggcagagc

SEQ ID NO: 1048138 - DNA, 25 bp, Homo sapien
ggccaggcgtctctgaataccaaac

SEQ ID NO: 1048139 - DNA, 25 bp, Homo sapien
tgcggcagagaaacgaatcacataa

SEQ ID NO: 1048140 - DNA, 25 bp, Homo sapien
ggaagccatcactgactgccagcat

SEQ ID NO: 1048141 - DNA, 25 bp, Homo sapien
ctctggaagccatcactgactgcca

SEQ ID NO: 1048142 - DNA, 25 bp, Homo sapien
tggaagccatcactgactgccagca

SEQ ID NO: 1048143 - DNA, 25 bp, Homo sapien
tctggaagccatcactgactgccag

SEQ ID NO: 1048144 - DNA, 25 bp, Homo sapien
ggaggaaacactgccagatgaaccg

SEQ ID NO: 1048145 - DNA, 25 bp, Homo sapien
cagcttgtggctcgttaaagcagca

SEQ ID NO: 1048146 - DNA, 25 bp, Homo sapien
cagacgtaaaacatcaaggcagctt

SEQ ID NO: 1048147 - DNA, 25 bp, Homo sapien
gggcacaggacagacgtaaaacatc

SEQ ID NO: 1048148 - DNA, 25 bp, Homo sapien
tcattaaacggcagccagattcggg

SEQ ID NO: 1048149 - DNA, 25 bp, Homo sapien
gaacgcattcattaaacggcagcca

SEQ ID NO: 1048150 - DNA, 25 bp, Homo sapien
catgggaacgcattcattaaacggc

SEQ ID NO: 1048151 - DNA, 25 bp, Homo sapien
gggagtgaacatgggaacgcattca

SEQ ID NO: 1048152 - DNA, 25 bp, Homo sapien
gatctggggaactccgtggatccag

SEQ ID NO: 1048153 - DNA, 25 bp, Homo sapien
aactccgtggatccagagagatgcc

SEQ ID NO: 1048154 - DNA, 25 bp, Homo sapien
ctccgtggatccagagagatgccca

SEQ ID NO: 1048155 - DNA, 25 bp, Homo sapien
gggaactccgtggatccagagagat

SEQ ID NO: 1048156 - DNA, 25 bp, Homo sapien
cctcgcgggtgtatatgtctgggta

SEQ ID NO: 1048157 - DNA, 25 bp, Homo sapien
gaatgtggtccgactgcgtcgctgc

SEQ ID NO: 1048158 - DNA, 25 bp, Homo sapien
agtgggaggtcaggttccgactcca

SEQ ID NO: 1048159 - DNA, 25 bp, Homo sapien
tctgggtagtgggtcctctcaaagg

SEQ ID NO: 1048160 - DNA, 25 bp, Homo sapien
tgaatctctggagtatatctgcagc

SEQ ID NO: 1048161 - DNA, 25 bp, Homo sapien
aatctctggagtatatctgcagcac

SEQ ID NO: 1048162 - DNA, 25 bp, Homo sapien
ctggagtatatctgcagcaccgaca

SEQ ID NO: 1048163 - DNA, 25 bp, Homo sapien
tctctggagtatatctgcagcaccg

SEQ ID NO: 1048164 - DNA, 25 bp, Homo sapien
tcaaggtggtgggaagccgccgtgg

SEQ ID NO: 1048165 - DNA, 25 bp, Homo sapien
tgggaacgagaaagcgcccaggaat

SEQ ID NO: 1048166 - DNA, 25 bp, Homo sapien
gtggccgccagacgtgggaacgaga

SEQ ID NO: 1048167 - DNA, 25 bp, Homo sapien
agaaagcgcccaggaatgtgcccag

SEQ ID NO: 1048168 - DNA, 25 bp, Homo sapien
gttgaacgccgccagctggttggct

SEQ ID NO: 1048169 - DNA, 25 bp, Homo sapien
ggtaggtggagtccggcagctggta

SEQ ID NO: 1048170 - DNA, 25 bp, Homo sapien
tgggcatgccggtgggtgggaagcc

SEQ ID NO: 1048171 - DNA, 25 bp, Homo sapien
tgcttacgccaacgggcgcggcggt

SEQ ID NO: 1048172 - DNA, 25 bp, Homo sapien
ccgggttcatgtggttggagggcgc

SEQ ID NO: 1048173 - DNA, 25 bp, Homo sapien
gacaggccgttgctgaccgggttca

SEQ ID NO: 1048174 - DNA, 25 bp, Homo sapien
gcgccgccggattcatgaagctgtc

SEQ ID NO: 1048175 - DNA, 25 bp, Homo sapien
cgtaggcagagctggtgtcggcggc

SEQ ID NO: 1048176 - DNA, 25 bp, Homo sapien
tctctcttttgtcctgtgacagagt

SEQ ID NO: 1048177 - DNA, 25 bp, Homo sapien
tggggccccttctttgctaagtctc

SEQ ID NO: 1048178 - DNA, 25 bp, Homo sapien
ttgctaagtctctcttttgtcctgt

SEQ ID NO: 1048179 - DNA, 25 bp, Homo sapien
tcccatccccgacccacactctgga

SEQ ID NO: 1048180 - DNA, 25 bp, Homo sapien
ggaaaacacgtcatccaaccctgaa

SEQ ID NO: 1048181 - DNA, 25 bp, Homo sapien
aaccctgaagtctccttgccatggg

SEQ ID NO: 1048182 - DNA, 25 bp, Homo sapien
gctgggcgtccaacttaggaacttc

SEQ ID NO: 1048183 - DNA, 25 bp, Homo sapien
ccatgggggagatacttccccttga

SEQ ID NO: 1048184 - DNA, 25 bp, Homo sapien
tccctgcagatccttatacacagag

SEQ ID NO: 1048185 - DNA, 25 bp, Homo sapien
acagaggattcctggccccacacct

SEQ ID NO: 1048186 - DNA, 25 bp, Homo sapien
gatgtgctgatggtgtcaagtccac

SEQ ID NO: 1048187 - DNA, 25 bp, Homo sapien
acagtgatgtgctgatggtgtcaag

SEQ ID NO: 1048188 - DNA, 25 bp, Homo sapien
cctgctaagccggagaaatgaattc

SEQ ID NO: 1048189 - DNA, 25 bp, Homo sapien
gaaaatgtgcgagagaagggtctcc

SEQ ID NO: 1048190 - DNA, 25 bp, Homo sapien
aggatgtccccaatctgctttgagg

SEQ ID NO: 1048191 - DNA, 25 bp, Homo sapien
taattgtggacaaacgcagcattca

SEQ ID NO: 1048192 - DNA, 25 bp, Homo sapien
cagcgggaattaagcaggccgccga

SEQ ID NO: 1048193 - DNA, 25 bp, Homo sapien
gggagacagttgttgggaatcactt

SEQ ID NO: 1048194 - DNA, 25 bp, Homo sapien
gagcccgagggcgtccttatctcgg

SEQ ID NO: 1048195 - DNA, 25 bp, Homo sapien
cgcgaccaagactggacgagcgagc

SEQ ID NO: 1048196 - DNA, 25 bp, Homo sapien
taatccttcgatgccgctggtcaga

SEQ ID NO: 1048197 - DNA, 25 bp, Homo sapien
tcagagacccctggtctggtgagag

SEQ ID NO: 1048198 - DNA, 25 bp, Homo sapien
gtcagagacccctggtctggtgaga

SEQ ID NO: 1048199 - DNA, 25 bp, Homo sapien
ggaccttaatccttcgatgccgctg

SEQ ID NO: 1048200 - DNA, 25 bp, Homo sapien
cagttgggacagctgtttcacccca

SEQ ID NO: 1048201 - DNA, 25 bp, Homo sapien
accatgctgggataccaacttcact

SEQ ID NO: 1048202 - DNA, 25 bp, Homo sapien
tatgacccagttgggacagctgttt

SEQ ID NO: 1048203 - DNA, 25 bp, Homo sapien
aaaagcagaatatgacccagttggg

SEQ ID NO: 1048204 - DNA, 25 bp, Homo sapien
aagagatgcgggaggagatagtagc

SEQ ID NO: 1048205 - DNA, 25 bp, Homo sapien
ggagatagtagctttctcgctggcg

SEQ ID NO: 1048206 - DNA, 25 bp, Homo sapien
gtagctttctcgctggcgatgcagg

SEQ ID NO: 1048207 - DNA, 25 bp, Homo sapien
gatagtagctttctcgctggcgatg

SEQ ID NO: 1048208 - DNA, 25 bp, Homo sapien
acgcagcggcctgagccgggagaac

SEQ ID NO: 1048209 - DNA, 25 bp, Homo sapien
gcacgcagcggcctgagccgggaga

SEQ ID NO: 1048210 - DNA, 25 bp, Homo sapien
cagcggcctgagccgggagaaccct

SEQ ID NO: 1048211 - DNA, 25 bp, Homo sapien
cgagcacgcagcggcctgagccggg

SEQ ID NO: 1048212 - DNA, 25 bp, Homo sapien
gctgacgccactccttgccggctgg

SEQ ID NO: 1048213 - DNA, 25 bp, Homo sapien
tcaatttcgaagcttaatgagtttg

SEQ ID NO: 1048214 - DNA, 25 bp, Homo sapien
aggagccgggtgagcccgctgacgc

SEQ ID NO: 1048215 - DNA, 25 bp, Homo sapien
atttcgaagcttaatgagtttgcag

SEQ ID NO: 1048216 - DNA, 25 bp, Homo sapien
aatgtatctggccttactaagcatg

SEQ ID NO: 1048217 - DNA, 25 bp, Homo sapien
ttactaagcatgaaagatcccatct

SEQ ID NO: 1048218 - DNA, 25 bp, Homo sapien
gcaaatggccgttttgtaattaatg

SEQ ID NO: 1048219 - DNA, 25 bp, Homo sapien
ttagcacactttcacgcggcaaatg

SEQ ID NO: 1048220 - DNA, 25 bp, Homo sapien
tcttgtggccatgacgtgcctggat

SEQ ID NO: 1048221 - DNA, 25 bp, Homo sapien
tgtggccatgacgtgcctggatttg

SEQ ID NO: 1048222 - DNA, 25 bp, Homo sapien
ggccatgacgtgcctggatttggcc

SEQ ID NO: 1048223 - DNA, 25 bp, Homo sapien
cttgtggccatgacgtgcctggatt

SEQ ID NO: 1048224 - DNA, 25 bp, Homo sapien
gacttccccaagaggtgagaagagg

SEQ ID NO: 1048225 - DNA, 25 bp, Homo sapien
aggagatattttcagagccctctgt

SEQ ID NO: 1048226 - DNA, 25 bp, Homo sapien
gagaagaggagatattttcagagcc

SEQ ID NO: 1048227 - DNA, 25 bp, Homo sapien
cgttttgacttccccaagaggtgag

SEQ ID NO: 1048228 - DNA, 25 bp, Homo sapien
tgaaaatatctctggtcccaatcgc

SEQ ID NO: 1048229 - DNA, 25 bp, Homo sapien
tctctggtcccaatcgccaaatagc

SEQ ID NO: 1048230 - DNA, 25 bp, Homo sapien
gaatccaggacgatgagtccattga

SEQ ID NO: 1048231 - DNA, 25 bp, Homo sapien
ggtcccaatcgccaaatagcctttc

SEQ ID NO: 1048232 - DNA, 25 bp, Homo sapien
cctatgggcctaaatgcccctcgct

SEQ ID NO: 1048233 - DNA, 25 bp, Homo sapien
atgggcctaaatgcccctcgctggc

SEQ ID NO: 1048234 - DNA, 25 bp, Homo sapien
acagagccctatgggcctaaatgcc

SEQ ID NO: 1048235 - DNA, 25 bp, Homo sapien
cacagagccctatgggcctaaatgc

SEQ ID NO: 1048236 - DNA, 25 bp, Homo sapien
cttccagctatcccaaacaatgtgg

SEQ ID NO: 1048237 - DNA, 25 bp, Homo sapien
cagctatcccaaacaatgtggtatt

SEQ ID NO: 1048238 - DNA, 25 bp, Homo sapien
cccaaacaatgtggtatttcttgaa

SEQ ID NO: 1048239 - DNA, 25 bp, Homo sapien
tccagctatcccaaacaatgtggta

SEQ ID NO: 1048240 - DNA, 25 bp, Homo sapien
ttattattggcttgtgccacaggca

SEQ ID NO: 1048241 - DNA, 25 bp, Homo sapien
tcgttttgccgactagacaccttct

SEQ ID NO: 1048242 - DNA, 25 bp, Homo sapien
tggcttgtgccacaggcattgaggc

SEQ ID NO: 1048243 - DNA, 25 bp, Homo sapien
ctgcgggcattcgagcagtgatcgt

SEQ ID NO: 1048244 - DNA, 25 bp, Homo sapien
ctgtaggtgggtgggcagtaggcct

SEQ ID NO: 1048245 - DNA, 25 bp, Homo sapien
tctcctggcttgatggagtcggccc

SEQ ID NO: 1048246 - DNA, 25 bp, Homo sapien
tctggccgtactggccgtactgata

SEQ ID NO: 1048247 - DNA, 25 bp, Homo sapien
gtggccgagtccaggccgccatgca

SEQ ID NO: 1048248 - DNA, 25 bp, Homo sapien
ggtgaactgttccatctggctggac

SEQ ID NO: 1048249 - DNA, 25 bp, Homo sapien
ctgtgaaatggacattccccaccct

SEQ ID NO: 1048250 - DNA, 25 bp, Homo sapien
ttaggtgaactgttccatctggctg

SEQ ID NO: 1048251 - DNA, 25 bp, Homo sapien
gtagctctccataaacaagcaggag

SEQ ID NO: 1048252 - DNA, 25 bp, Homo sapien
gcttagccaggagatgtcctgggtt

SEQ ID NO: 1048253 - DNA, 25 bp, Homo sapien
agaggcttagccaggagatgtcctg

SEQ ID NO: 1048254 - DNA, 25 bp, Homo sapien
ttatttctgttggagccatagtacg

SEQ ID NO: 1048255 - DNA, 25 bp, Homo sapien
tgttggagccatagtacggaagcag

SEQ ID NO: 1048256 - DNA, 25 bp, Homo sapien
tcttgccacacgcccttctgattag

SEQ ID NO: 1048257 - DNA, 25 bp, Homo sapien
accctcttgccacacgcccttctga

SEQ ID NO: 1048258 - DNA, 25 bp, Homo sapien
tgccacacgcccttctgattagttt

SEQ ID NO: 1048259 - DNA, 25 bp, Homo sapien
atgggggcctcaccctcttgccaca

SEQ ID NO: 1048260 - DNA, 25 bp, Homo sapien
gagaatgacatgaatgaggagcatg

SEQ ID NO: 1048261 - DNA, 25 bp, Homo sapien
gaatgacatgaatgaggagcatgca

SEQ ID NO: 1048262 - DNA, 25 bp, Homo sapien
atgaatgaggagcatgcattttgcc

SEQ ID NO: 1048263 - DNA, 25 bp, Homo sapien
tgacatgaatgaggagcatgcattt

SEQ ID NO: 1048264 - DNA, 25 bp, Homo sapien
tgtccacagaagagcaacatttgca

SEQ ID NO: 1048265 - DNA, 25 bp, Homo sapien
gcactgtgtacaggtgagttccaac

SEQ ID NO: 1048266 - DNA, 25 bp, Homo sapien
ggatgacccttgacctgcatgtaca

SEQ ID NO: 1048267 - DNA, 25 bp, Homo sapien
tgaatagatgaaccttgggaatgcc

SEQ ID NO: 1048268 - DNA, 25 bp, Homo sapien
tttttggccagataatcaacagcag

SEQ ID NO: 1048269 - DNA, 25 bp, Homo sapien
acagcagagtgctccccgagcttca

SEQ ID NO: 1048270 - DNA, 25 bp, Homo sapien
cccgagcttcatgcgacgctgggtg

SEQ ID NO: 1048271 - DNA, 25 bp, Homo sapien
cacatttttggccagataatcaaca

SEQ ID NO: 1048272 - DNA, 25 bp, Homo sapien
gggagcagactccaagggcatcact

SEQ ID NO: 1048273 - DNA, 25 bp, Homo sapien
caaagggctgtaggacctcctctca

SEQ ID NO: 1048274 - DNA, 25 bp, Homo sapien
agaggccaccatgggatttgacagg

SEQ ID NO: 1048275 - DNA, 25 bp, Homo sapien
taaccacaggtgagtgacaagctgg

SEQ ID NO: 1048276 - DNA, 25 bp, Homo sapien
tccagaagcctgagttgggtccttg

SEQ ID NO: 1048277 - DNA, 25 bp, Homo sapien
tccttgtatcctgggcgggcccacg

SEQ ID NO: 1048278 - DNA, 25 bp, Homo sapien
catctgattcagctaatgaaggaaa

SEQ ID NO: 1048279 - DNA, 25 bp, Homo sapien
ggcttcaggataagagccctctgct

SEQ ID NO: 1048280 - DNA, 25 bp, Homo sapien
ttgggcaaaatctcaactccctggg

SEQ ID NO: 1048281 - DNA, 25 bp, Homo sapien
agccttgggcaacaaaggcttgccc

SEQ ID NO: 1048282 - DNA, 25 bp, Homo sapien
ctgcggaaggctttgggcaaaatct

SEQ ID NO: 1048283 - DNA, 25 bp, Homo sapien
cagagagctgaagccttgggcaaca

SEQ ID NO: 1048284 - DNA, 25 bp, Homo sapien
ttggggaagatggagacctcttcct

SEQ ID NO: 1048285 - DNA, 25 bp, Homo sapien
gggaagatggagacctcttcctaga

SEQ ID NO: 1048286 - DNA, 25 bp, Homo sapien
gaagatggagacctcttcctagagg

SEQ ID NO: 1048287 - DNA, 25 bp, Homo sapien
aagatggagacctcttcctagagga

SEQ ID NO: 1048288 - DNA, 25 bp, Homo sapien
tagcattggaatgtcgcctcctggg

SEQ ID NO: 1048289 - DNA, 25 bp, Homo sapien
taaaagcatggaacttcaggaggcc

SEQ ID NO: 1048290 - DNA, 25 bp, Homo sapien
tccttagagaggaccaacggcgact

SEQ ID NO: 1048291 - DNA, 25 bp, Homo sapien
taaaccagagatatgagccagcctg

SEQ ID NO: 1048292 - DNA, 25 bp, Homo sapien
gggaattggccacgtcagagctgac

SEQ ID NO: 1048293 - DNA, 25 bp, Homo sapien
tagtgcgagacacattcgggagctt

SEQ ID NO: 1048294 - DNA, 25 bp, Homo sapien
tctcagagcgtttcaagttggcggc

SEQ ID NO: 1048295 - DNA, 25 bp, Homo sapien
tcaaatacacagaagtctcagagcg

SEQ ID NO: 1048296 - DNA, 25 bp, Homo sapien
tccacaggcttcgtttaggtagaag

SEQ ID NO: 1048297 - DNA, 25 bp, Homo sapien
aaccccctgaagtggaggagacttg

SEQ ID NO: 1048298 - DNA, 25 bp, Homo sapien
caatgggctttaagcgctgcatctc

SEQ ID NO: 1048299 - DNA, 25 bp, Homo sapien
cagactagactagccaggatggagg

SEQ ID NO: 1048300 - DNA, 25 bp, Homo sapien
gccaataagcttttatgggcaatga

SEQ ID NO: 1048301 - DNA, 25 bp, Homo sapien
acctgatggtgccaataagctttta

SEQ ID NO: 1048302 - DNA, 25 bp, Homo sapien
ataagcttttatgggcaatgacagg

SEQ ID NO: 1048303 - DNA, 25 bp, Homo sapien
tgggctcctttaaagaactacctga

SEQ ID NO: 1048304 - DNA, 25 bp, Homo sapien
ccagctaggccctgtaacaggatcc

SEQ ID NO: 1048305 - DNA, 25 bp, Homo sapien
cccagggtccctggcataatccgtg

SEQ ID NO: 1048306 - DNA, 25 bp, Homo sapien
tggcataatccgtgacagttgaggg

SEQ ID NO: 1048307 - DNA, 25 bp, Homo sapien
ctgtaacaggatccagatgtttgct

SEQ ID NO: 1048308 - DNA, 25 bp, Homo sapien
cacggccacgctgtggaatttccaa

SEQ ID NO: 1048309 - DNA, 25 bp, Homo sapien
ccacgctgtggaatttccaattttc

SEQ ID NO: 1048310 - DNA, 25 bp, Homo sapien
gccatggccacggccacgctgtgga

SEQ ID NO: 1048311 - DNA, 25 bp, Homo sapien
gcggccacggccatggccacggcca

SEQ ID NO: 1048312 - DNA, 25 bp, Homo sapien
tccccttgtccattcgccttgcccc

SEQ ID NO: 1048313 - DNA, 25 bp, Homo sapien
tctcggtttccgagccctgctctgg

SEQ ID NO: 1048314 - DNA, 25 bp, Homo sapien
tgtccattcgccttgcccctgggcg

SEQ ID NO: 1048315 - DNA, 25 bp, Homo sapien
tgcctctcggtttccgagccctgct

SEQ ID NO: 1048316 - DNA, 25 bp, Homo sapien
aatcgattcttggtgcagaaaacca

SEQ ID NO: 1048317 - DNA, 25 bp, Homo sapien
aacacccttgaaaatcgattcttgg

SEQ ID NO: 1048318 - DNA, 25 bp, Homo sapien
ttctgcgaggttcccaaggaaccac

SEQ ID NO: 1048319 - DNA, 25 bp, Homo sapien
gaaccactgcccgtctggatgtaca

SEQ ID NO: 1048320 - DNA, 25 bp, Homo sapien
acaagaggcggtcagggcagagagg

SEQ ID NO: 1048321 - DNA, 25 bp, Homo sapien
ttacaagaggcggtcagggcagaga

SEQ ID NO: 1048322 - DNA, 25 bp, Homo sapien
tacaagaggcggtcagggcagagag

SEQ ID NO: 1048323 - DNA, 25 bp, Homo sapien
cctccccgtataccagcttcccagt

SEQ ID NO: 1048324 - DNA, 25 bp, Homo sapien
ttggtcctccccgtataccagcttc

SEQ ID NO: 1048325 - DNA, 25 bp, Homo sapien
tggtcctccccgtataccagcttcc

SEQ ID NO: 1048326 - DNA, 25 bp, Homo sapien
ccgtataccagcttcccagtcccag

SEQ ID NO: 1048327 - DNA, 25 bp, Homo sapien
atctggttttctttgccgttccttg

SEQ ID NO: 1048328 - DNA, 25 bp, Homo sapien
ggttgtcccagtgtcttcaatgtgg

SEQ ID NO: 1048329 - DNA, 25 bp, Homo sapien
tcttcaatgtgggtgaaactggcct

SEQ ID NO: 1048330 - DNA, 25 bp, Homo sapien
ggtgaaactggccttgggctccacc

SEQ ID NO: 1048331 - DNA, 25 bp, Homo sapien
tggttgtcccagtgtcttcaatgtg

SEQ ID NO: 1048332 - DNA, 25 bp, Homo sapien
aggaacctgaaatggtttgcacggt

SEQ ID NO: 1048333 - DNA, 25 bp, Homo sapien
tgaaatggtttgcacggtttctgtc

SEQ ID NO: 1048334 - DNA, 25 bp, Homo sapien
acctgaaatggtttgcacggtttct

SEQ ID NO: 1048335 - DNA, 25 bp, Homo sapien
agaggaacctgaaatggtttgcacg

SEQ ID NO: 1048336 - DNA, 25 bp, Homo sapien
gcgctgggatacagcacttgctcca

SEQ ID NO: 1048337 - DNA, 25 bp, Homo sapien
ccgcccctcgcagcaggcgggcgct

SEQ ID NO: 1048338 - DNA, 25 bp, Homo sapien
ggcgctgggatacagcacttgctcc

SEQ ID NO: 1048339 - DNA, 25 bp, Homo sapien
gggtttctcccggcctgtgtgatcc

SEQ ID NO: 1048340 - DNA, 25 bp, Homo sapien
cccttgtctacagaacacctggctg

SEQ ID NO: 1048341 - DNA, 25 bp, Homo sapien
acccttgtctacagaacacctggct

SEQ ID NO: 1048342 - DNA, 25 bp, Homo sapien
caaataaaatggccgtgggcccaga

SEQ ID NO: 1048343 - DNA, 25 bp, Homo sapien
ttcaaataaaatggccgtgggccca

SEQ ID NO: 1048344 - DNA, 25 bp, Homo sapien
taagaaagcacattccatgccagtg

SEQ ID NO: 1048345 - DNA, 25 bp, Homo sapien
acaggtgaaagccacggtgtgaccc

SEQ ID NO: 1048346 - DNA, 25 bp, Homo sapien
gacacaggtgaaagccacggtgtga

SEQ ID NO: 1048347 - DNA, 25 bp, Homo sapien
aagtctaagaaagcacattccatgc

SEQ ID NO: 1048348 - DNA, 25 bp, Homo sapien
gaggtggttccgaggctgggtgttc

SEQ ID NO: 1048349 - DNA, 25 bp, Homo sapien
caggaaaggggtaagcgcagggatg

SEQ ID NO: 1048350 - DNA, 25 bp, Homo sapien
aggggtaagcgcagggatggtgctt

SEQ ID NO: 1048351 - DNA, 25 bp, Homo sapien
ccagggggaggtggttccgaggctg

SEQ ID NO: 1048352 - DNA, 25 bp, Homo sapien
tcatgaggaagagaatgggtctgct

SEQ ID NO: 1048353 - DNA, 25 bp, Homo sapien
tcaaaggcctgatcttttggccgtg

SEQ ID NO: 1048354 - DNA, 25 bp, Homo sapien
tcttttggccgtgacaatgtccctc

SEQ ID NO: 1048355 - DNA, 25 bp, Homo sapien
aatgtccctccccgcaatcatgagg

SEQ ID NO: 1048356 - DNA, 25 bp, Homo sapien
cagcttgttgtcaggatagcggcca

SEQ ID NO: 1048357 - DNA, 25 bp, Homo sapien
ccaggtgtgcgctctctgcagggca

SEQ ID NO: 1048358 - DNA, 25 bp, Homo sapien
ttgttgtcaggatagcggccacagc

SEQ ID NO: 1048359 - DNA, 25 bp, Homo sapien
ttctggaaagctgatccgagagcca

SEQ ID NO: 1048360 - DNA, 25 bp, Homo sapien
gcgtcaggtatgtgtacctcggtgt

SEQ ID NO: 1048361 - DNA, 25 bp, Homo sapien
cgtcaggtatgtgtacctcggtgtg

SEQ ID NO: 1048362 - DNA, 25 bp, Homo sapien
ggcgtcaggtatgtgtacctcggtg

SEQ ID NO: 1048363 - DNA, 25 bp, Homo sapien
agggcgtcaggtatgtgtacctcgg

SEQ ID NO: 1048364 - DNA, 25 bp, Homo sapien
tgggggatgtgagagagtccatagc

SEQ ID NO: 1048365 - DNA, 25 bp, Homo sapien
tcactgggggatgtgagagagtcca

SEQ ID NO: 1048366 - DNA, 25 bp, Homo sapien
atgtgagagagtccatagctatggg

SEQ ID NO: 1048367 - DNA, 25 bp, Homo sapien
gggatgtgagagagtccatagctat

SEQ ID NO: 1048368 - DNA, 25 bp, Homo sapien
tgctaaacaggccatagcgtgactg

SEQ ID NO: 1048369 - DNA, 25 bp, Homo sapien
tagcgtgactgactctgatacagca

SEQ ID NO: 1048370 - DNA, 25 bp, Homo sapien
ggccatagcgtgactgactctgata

SEQ ID NO: 1048371 - DNA, 25 bp, Homo sapien
attgatcttgctaaacaggccatag

SEQ ID NO: 1048372 - DNA, 25 bp, Homo sapien
tgttgtggtcacctacggcccattg

SEQ ID NO: 1048373 - DNA, 25 bp, Homo sapien
gcttgaagccttgagcacttgttgg

SEQ ID NO: 1048374 - DNA, 25 bp, Homo sapien
tgggcagggcaatccctggagccat

SEQ ID NO: 1048375 - DNA, 25 bp, Homo sapien
ggtgaaatgggccagaatttcctcc

SEQ ID NO: 1048376 - DNA, 25 bp, Homo sapien
gtggcaatgggatttgctcagatgc

SEQ ID NO: 1048377 - DNA, 25 bp, Homo sapien
ggcacaggctggagtattcttagtt

SEQ ID NO: 1048378 - DNA, 25 bp, Homo sapien
tattcttagttctactggttctaca

SEQ ID NO: 1048379 - DNA, 25 bp, Homo sapien
tctactggttctacactgtgaggtg

SEQ ID NO: 1048380 - DNA, 25 bp, Homo sapien
tgacgcagccaatctgtgaccacga

SEQ ID NO: 1048381 - DNA, 25 bp, Homo sapien
gccgaggacgttgcctgtagaatcc

SEQ ID NO: 1048382 - DNA, 25 bp, Homo sapien
gagtggctctgtgtggaccagtccc

SEQ ID NO: 1048383 - DNA, 25 bp, Homo sapien
ccttgggttcgtcagcatgggccga

SEQ ID NO: 1048384 - DNA, 25 bp, Homo sapien
acctgccaaggcgtgggatgggatg

SEQ ID NO: 1048385 - DNA, 25 bp, Homo sapien
cctgccggtttaggccgtgattctg

SEQ ID NO: 1048386 - DNA, 25 bp, Homo sapien
gcgtgggatgggatggtcctgccgg

SEQ ID NO: 1048387 - DNA, 25 bp, Homo sapien
atggtcctgccggtttaggccgtga

SEQ ID NO: 1048388 - DNA, 25 bp, Homo sapien
ttatcccatcggccatgtgggaggt

SEQ ID NO: 1048389 - DNA, 25 bp, Homo sapien
gccatgtgggaggtatgaccctggt

SEQ ID NO: 1048390 - DNA, 25 bp, Homo sapien
taagcgttggccagctcaggtttta

SEQ ID NO: 1048391 - DNA, 25 bp, Homo sapien
aatgaaaagctaagcgttggccagc

SEQ ID NO: 1048392 - DNA, 25 bp, Homo sapien
ctcaggaacaactggttttgcggcc

SEQ ID NO: 1048393 - DNA, 25 bp, Homo sapien
acaactggttttgcggccaaaggct

SEQ ID NO: 1048394 - DNA, 25 bp, Homo sapien
cagctgggtctagcatcacagggaa

SEQ ID NO: 1048395 - DNA, 25 bp, Homo sapien
ggagactttataccccatgatcctg

SEQ ID NO: 1048396 - DNA, 25 bp, Homo sapien
gatcctgccccaccgttgctgttgt

SEQ ID NO: 1048397 - DNA, 25 bp, Homo sapien
gactactgatcctaccggaaaccaa

SEQ ID NO: 1048398 - DNA, 25 bp, Homo sapien
tctgactctggtctgccgagatcca

SEQ ID NO: 1048399 - DNA, 25 bp, Homo sapien
catttccaacccagttgcgttggga

SEQ ID NO: 1048400 - DNA, 25 bp, Homo sapien
ggagcacacgacttccttggagcct

SEQ ID NO: 1048401 - DNA, 25 bp, Homo sapien
gcttaagatgctcatagcccagccc

SEQ ID NO: 1048402 - DNA, 25 bp, Homo sapien
ccggcctcgtcttctgtcctcactt

SEQ ID NO: 1048403 - DNA, 25 bp, Homo sapien
gcagagtgtaggtcccacttcaccc

SEQ ID NO: 1048404 - DNA, 25 bp, Homo sapien
ttttggtcatccacacccatgagca

SEQ ID NO: 1048405 - DNA, 25 bp, Homo sapien
tgtcctcacttttggtcatccacac

SEQ ID NO: 1048406 - DNA, 25 bp, Homo sapien
ggagtttgaaaactgcaggagccag

SEQ ID NO: 1048407 - DNA, 25 bp, Homo sapien
tggcctgagagtcccttctggctgg

SEQ ID NO: 1048408 - DNA, 25 bp, Homo sapien
gccagagtgtgatgggcctgcctcc

SEQ ID NO: 1048409 - DNA, 25 bp, Homo sapien
catttgtctttgaggactagggtac

SEQ ID NO: 1048410 - DNA, 25 bp, Homo sapien
tttgacgacgactgtgacagcctga

SEQ ID NO: 1048411 - DNA, 25 bp, Homo sapien
actttgacgacgactgtgacagcct

SEQ ID NO: 1048412 - DNA, 25 bp, Homo sapien
cgggagacctttgactttgacgacg

SEQ ID NO: 1048413 - DNA, 25 bp, Homo sapien
gcgggagacctttgactttgacgac

SEQ ID NO: 1048414 - DNA, 25 bp, Homo sapien
acatcaccgatgagatgaagcgcat

SEQ ID NO: 1048415 - DNA, 25 bp, Homo sapien
cggacgatgaggtcggctccatgaa

SEQ ID NO: 1048416 - DNA, 25 bp, Homo sapien
aggtgaaccggttctcggacgatga

SEQ ID NO: 1048417 - DNA, 25 bp, Homo sapien
ggctccatgaacatcaccgatgaga

SEQ ID NO: 1048418 - DNA, 25 bp, Homo sapien
gccgctcgccttcccgcaaggtgtg

SEQ ID NO: 1048419 - DNA, 25 bp, Homo sapien
gagtgagtcggcctaggcgtgccgg

SEQ ID NO: 1048420 - DNA, 25 bp, Homo sapien
tgagtcggcctaggcgtgccggccg

SEQ ID NO: 1048421 - DNA, 25 bp, Homo sapien
cgccttcccgcaaggtgtgggccat

SEQ ID NO: 1048422 - DNA, 25 bp, Homo sapien
aaagtcaggaggcaaggcatccaca

SEQ ID NO: 1048423 - DNA, 25 bp, Homo sapien
gctgtccattttcgggggagaagac

SEQ ID NO: 1048424 - DNA, 25 bp, Homo sapien
agaagacgggcttgcagcgtgccat

SEQ ID NO: 1048425 - DNA, 25 bp, Homo sapien
catccacacgtgcatcagtgctgag

SEQ ID NO: 1048426 - DNA, 25 bp, Homo sapien
ggcccttgttaggacagacctcaaa

SEQ ID NO: 1048427 - DNA, 25 bp, Homo sapien
cacagtggcccttgttaggacagac

SEQ ID NO: 1048428 - DNA, 25 bp, Homo sapien
cttgttaggacagacctcaaagggc

SEQ ID NO: 1048429 - DNA, 25 bp, Homo sapien
gctgggcatgcccattagttcctgg

SEQ ID NO: 1048430 - DNA, 25 bp, Homo sapien
gtgagatgctggttgagacaatttc

SEQ ID NO: 1048431 - DNA, 25 bp, Homo sapien
ctgtgagatgctggttgagacaatt

SEQ ID NO: 1048432 - DNA, 25 bp, Homo sapien
actgtgagatgctggttgagacaat

SEQ ID NO: 1048433 - DNA, 25 bp, Homo sapien
gagatgctggttgagacaatttcct

SEQ ID NO: 1048434 - DNA, 25 bp, Homo sapien
agggttgaattgtctgcctgcctga

SEQ ID NO: 1048435 - DNA, 25 bp, Homo sapien
cttggttgtctggtgcgggccgggc

SEQ ID NO: 1048436 - DNA, 25 bp, Homo sapien
tgcccttggcctgaaagggttgaat

SEQ ID NO: 1048437 - DNA, 25 bp, Homo sapien
tgcagggaatgccagcccggctgcc

SEQ ID NO: 1048438 - DNA, 25 bp, Homo sapien
ccagcagcatgcatttgtgctccat

SEQ ID NO: 1048439 - DNA, 25 bp, Homo sapien
ttggtagccagtcgtcaccagcagc

SEQ ID NO: 1048440 - DNA, 25 bp, Homo sapien
cagggctggagaatgactaagctga

SEQ ID NO: 1048441 - DNA, 25 bp, Homo sapien
catgcatttgtgctccatcagggct

SEQ ID NO: 1048442 - DNA, 25 bp, Homo sapien
cttcacctccgcggcagtgaaaggc

SEQ ID NO: 1048443 - DNA, 25 bp, Homo sapien
ctggtggcctcacggatgccgtttc

SEQ ID NO: 1048444 - DNA, 25 bp, Homo sapien
ccctggtggcctcacggatgccgtt

SEQ ID NO: 1048445 - DNA, 25 bp, Homo sapien
cctggtggcctcacggatgccgttt

SEQ ID NO: 1048446 - DNA, 25 bp, Homo sapien
cgtggttctgctgtgacctccggaa

SEQ ID NO: 1048447 - DNA, 25 bp, Homo sapien
gaagtccccgcagaacctggagctc

SEQ ID NO: 1048448 - DNA, 25 bp, Homo sapien
gtgacctccggaagtccccgcagaa

SEQ ID NO: 1048449 - DNA, 25 bp, Homo sapien
ctcgggaagaggcagcgcctggatc

SEQ ID NO: 1048450 - DNA, 25 bp, Homo sapien
gcccgtcgggctgccaccttgaggt

SEQ ID NO: 1048451 - DNA, 25 bp, Homo sapien
gagtggagtttatggatccccttct

SEQ ID NO: 1048452 - DNA, 25 bp, Homo sapien
gaggtcgcatttccttggatgttgc

SEQ ID NO: 1048453 - DNA, 25 bp, Homo sapien
tccttgatgacaagcccgtcgggct

SEQ ID NO: 1048454 - DNA, 25 bp, Homo sapien
agtcctgcagcacgagactcaaagc

SEQ ID NO: 1048455 - DNA, 25 bp, Homo sapien
acagggcgcgaccagcagacatcca

SEQ ID NO: 1048456 - DNA, 25 bp, Homo sapien
tgtcattaaccaccacacgaccgtt

SEQ ID NO: 1048457 - DNA, 25 bp, Homo sapien
ccgttattgtgagccacccacagca

SEQ ID NO: 1048458 - DNA, 25 bp, Homo sapien
ctggaagcccctgtgagcgtcccct

SEQ ID NO: 1048459 - DNA, 25 bp, Homo sapien
cagagtccctagcaggtccagagga

SEQ ID NO: 1048460 - DNA, 25 bp, Homo sapien
aggccggtgtccttcagagtcccta

SEQ ID NO: 1048461 - DNA, 25 bp, Homo sapien
cttcagagtccctagcaggtccaga

SEQ ID NO: 1048462 - DNA, 25 bp, Homo sapien
gaaaagttgctaagccctggctgag

SEQ ID NO: 1048463 - DNA, 25 bp, Homo sapien
cttgggcacttgaattcacctctct

SEQ ID NO: 1048464 - DNA, 25 bp, Homo sapien
agggatctctggaggattacaggag

SEQ ID NO: 1048465 - DNA, 25 bp, Homo sapien
gtcagacagactgagttccaggtgg

SEQ ID NO: 1048466 - DNA, 25 bp, Homo sapien
aaatatacagacttgactggccagg

SEQ ID NO: 1048467 - DNA, 25 bp, Homo sapien
ctgggaaatatacagacttgactgg

SEQ ID NO: 1048468 - DNA, 25 bp, Homo sapien
gaaatatacagacttgactggccag

SEQ ID NO: 1048469 - DNA, 25 bp, Homo sapien
gggaaatatacagacttgactggcc

SEQ ID NO: 1048470 - DNA, 25 bp, Homo sapien
catgtaaacctctgacggtggcggg

SEQ ID NO: 1048471 - DNA, 25 bp, Homo sapien
cacaggtgctcacaggacgtgctga

SEQ ID NO: 1048472 - DNA, 25 bp, Homo sapien
cagaattagatccaggtgccaagtt

SEQ ID NO: 1048473 - DNA, 25 bp, Homo sapien
tattgactaaatctggcagtcctgg

SEQ ID NO: 1048474 - DNA, 25 bp, Homo sapien
ctggctactcctggctctgagtcgg

SEQ ID NO: 1048475 - DNA, 25 bp, Homo sapien
gcagcctctcgggacattgccagag

SEQ ID NO: 1048476 - DNA, 25 bp, Homo sapien
gcatctgcagcaggttgcgggcttc

SEQ ID NO: 1048477 - DNA, 25 bp, Homo sapien
agtcggtgccgatctccggccactg

SEQ ID NO: 1048478 - DNA, 25 bp, Homo sapien
gaggcctggacgaatcctccgcctt

SEQ ID NO: 1048479 - DNA, 25 bp, Homo sapien
tgcaatagggggagcagagtagcct

SEQ ID NO: 1048480 - DNA, 25 bp, Homo sapien
ctggggcgaggcctggacgaatcct

SEQ ID NO: 1048481 - DNA, 25 bp, Homo sapien
ggctggtggctcagatgcaataggg

SEQ ID NO: 1048482 - DNA, 25 bp, Homo sapien
tcagggcagcgagagtggacctggt

SEQ ID NO: 1048483 - DNA, 25 bp, Homo sapien
cagggcagcgagagtggacctggtg

SEQ ID NO: 1048484 - DNA, 25 bp, Homo sapien
agggcagcgagagtggacctggtgc

SEQ ID NO: 1048485 - DNA, 25 bp, Homo sapien
tatctcgtgtgtgtggtgcaccagc

SEQ ID NO: 1048486 - DNA, 25 bp, Homo sapien
ccagctatgaggttgtctgtaaccc

SEQ ID NO: 1048487 - DNA, 25 bp, Homo sapien
caaagggcctgtacatacctaggag

SEQ ID NO: 1048488 - DNA, 25 bp, Homo sapien
ttgtgcattaagttccctccgcggg

SEQ ID NO: 1048489 - DNA, 25 bp, Homo sapien
tgtggcttcgtaaccctattgggat

SEQ ID NO: 1048490 - DNA, 25 bp, Homo sapien
gctattacctggagagcgatccctg

SEQ ID NO: 1048491 - DNA, 25 bp, Homo sapien
tgggctcactttggctcacattgag

SEQ ID NO: 1048492 - DNA, 25 bp, Homo sapien
tgtccttgagttctcactagggtgg

SEQ ID NO: 1048493 - DNA, 25 bp, Homo sapien
gcagtcaggcatcagagacatttaa

SEQ ID NO: 1048494 - DNA, 25 bp, Homo sapien
catttaaagggggcatcaaagagtg

SEQ ID NO: 1048495 - DNA, 25 bp, Homo sapien
gaactatatgatttctatcaggtaa

SEQ ID NO: 1048496 - DNA, 25 bp, Homo sapien
atggtgcctgatgcagtcaggcatc

SEQ ID NO: 1048497 - DNA, 25 bp, Homo sapien
tattgagcgtgggtagccttctcgc

SEQ ID NO: 1048498 - DNA, 25 bp, Homo sapien
catggagcataacctagccctggtg

SEQ ID NO: 1048499 - DNA, 25 bp, Homo sapien
caaaaccgagggtaagccagtgact

SEQ ID NO: 1048500 - DNA, 25 bp, Homo sapien
tgactgggcccctggtttgtactta

SEQ ID NO: 1048501 - DNA, 25 bp, Homo sapien
aactgccttatgtcctttgccttgg

SEQ ID NO: 1048502 - DNA, 25 bp, Homo sapien
agagtcactttgtctcctaggctag

SEQ ID NO: 1048503 - DNA, 25 bp, Homo sapien
gagattttggacaggaggaaaacac

SEQ ID NO: 1048504 - DNA, 25 bp, Homo sapien
gcttgtcttagaggagagaatgcta

SEQ ID NO: 1048505 - DNA, 25 bp, Homo sapien
gatccgttccctcgccgcggctcga

SEQ ID NO: 1048506 - DNA, 25 bp, Homo sapien
tccgcgcgtcgcgtttttgacccat

SEQ ID NO: 1048507 - DNA, 25 bp, Homo sapien
aggcgcagcgtctccgatccgttcc

SEQ ID NO: 1048508 - DNA, 25 bp, Homo sapien
accccggtgagagcaaaggccgctc

SEQ ID NO: 1048509 - DNA, 25 bp, Homo sapien
gaagccaagtcgctaccacctgctt

SEQ ID NO: 1048510 - DNA, 25 bp, Homo sapien
tcccaccgcgcaggctcagaagtta

SEQ ID NO: 1048511 - DNA, 25 bp, Homo sapien
aagtcgctaccacctgcttgagcaa

SEQ ID NO: 1048512 - DNA, 25 bp, Homo sapien
cagaagttaacgctctcccgccttt

SEQ ID NO: 1048513 - DNA, 25 bp, Homo sapien
caggccagggccattctatacgccg

SEQ ID NO: 1048514 - DNA, 25 bp, Homo sapien
tacgccgaggcgtagtcaactctgc

SEQ ID NO: 1048515 - DNA, 25 bp, Homo sapien
tgaaagcgttttaggcttcggcctc

SEQ ID NO: 1048516 - DNA, 25 bp, Homo sapien
ggcctcctcttgtcgtccttagctg

SEQ ID NO: 1048517 - DNA, 25 bp, Homo sapien
cagaagagatttgagtgctaaggga

SEQ ID NO: 1048518 - DNA, 25 bp, Homo sapien
ggcaaattgcaaagagggatgcatt

SEQ ID NO: 1048519 - DNA, 25 bp, Homo sapien
gctggtcagattgttaatgagggca

SEQ ID NO: 1048520 - DNA, 25 bp, Homo sapien
ggatgcattgtacgagctggtcaga

SEQ ID NO: 1048521 - DNA, 25 bp, Homo sapien
aaagcttacattctttccttgccag

SEQ ID NO: 1048522 - DNA, 25 bp, Homo sapien
aataaaagcttacattctttccttg

SEQ ID NO: 1048523 - DNA, 25 bp, Homo sapien
taaaagcttacattctttccttgcc

SEQ ID NO: 1048524 - DNA, 25 bp, Homo sapien
gtgaataaaagcttacattctttcc

SEQ ID NO: 1048525 - DNA, 25 bp, Homo sapien
gaatacctttcctcgagcaaactgc

SEQ ID NO: 1048526 - DNA, 25 bp, Homo sapien
caggactgtccttaatgcacgaata

SEQ ID NO: 1048527 - DNA, 25 bp, Homo sapien
gagcttgaagccgtccaccaatatc

SEQ ID NO: 1048528 - DNA, 25 bp, Homo sapien
tttaccggcaaaagtctcagacatc

SEQ ID NO: 1048529 - DNA, 25 bp, Homo sapien
gattgacctctgttggctcctacgg

SEQ ID NO: 1048530 - DNA, 25 bp, Homo sapien
gggctaaaatactcatgctgctgga

SEQ ID NO: 1048531 - DNA, 25 bp, Homo sapien
tttgaagctctgtagtgaggcacac

SEQ ID NO: 1048532 - DNA, 25 bp, Homo sapien
caaacagtgctaaagggtacacaca

SEQ ID NO: 1048533 - DNA, 25 bp, Homo sapien
taaagcagcattcggttctgagcag

SEQ ID NO: 1048534 - DNA, 25 bp, Homo sapien
taatggctgctgagactatgtttcc

SEQ ID NO: 1048535 - DNA, 25 bp, Homo sapien
tagttaatgctaatgccacagtcca

SEQ ID NO: 1048536 - DNA, 25 bp, Homo sapien
gaatctgaaacaagctactgggagg

SEQ ID NO: 1048537 - DNA, 25 bp, Homo sapien
gactgtgcctaaaagtggagagcca

SEQ ID NO: 1048538 - DNA, 25 bp, Homo sapien
gaccttcacgcagaactccttttgg

SEQ ID NO: 1048539 - DNA, 25 bp, Homo sapien
ttgaagtccaaaggcgtctgcattg

SEQ ID NO: 1048540 - DNA, 25 bp, Homo sapien
cacaggtgaagctcctgaatcgggc

SEQ ID NO: 1048541 - DNA, 25 bp, Homo sapien
ccactgtaccgcagctgcatgaaca

SEQ ID NO: 1048542 - DNA, 25 bp, Homo sapien
gaacagctgcgtttgctcaatggga

SEQ ID NO: 1048543 - DNA, 25 bp, Homo sapien
ccgcgactggcctattgaattctta

SEQ ID NO: 1048544 - DNA, 25 bp, Homo sapien
gccagccctgttggcagtttatcag

SEQ ID NO: 1048545 - DNA, 25 bp, Homo sapien
gaagtacagcggatcgtcaaggtga

SEQ ID NO: 1048546 - DNA, 25 bp, Homo sapien
cagtgagcacgttcattcccagggc

SEQ ID NO: 1048547 - DNA, 25 bp, Homo sapien
ggataatataccctcctcctgggct

SEQ ID NO: 1048548 - DNA, 25 bp, Homo sapien
tacaaggtacatacagccagctgtc

SEQ ID NO: 1048549 - DNA, 25 bp, Homo sapien
atttcttcataaactagatctctat

SEQ ID NO: 1048550 - DNA, 25 bp, Homo sapien
cacgcccggtctagtatctatctta

SEQ ID NO: 1048551 - DNA, 25 bp, Homo sapien
gtatctatcttaatcaaaccgagag

SEQ ID NO: 1048552 - DNA, 25 bp, Homo sapien
tagatctctattgctgtttttctgg

SEQ ID NO: 1048553 - DNA, 25 bp, Homo sapien
cctgtaaggccttttgagaggcata

SEQ ID NO: 1048554 - DNA, 25 bp, Homo sapien
tgtaaacagtaatacacgctggctg

SEQ ID NO: 1048555 - DNA, 25 bp, Homo sapien
ctggcatggccttgttagcaggact

SEQ ID NO: 1048556 - DNA, 25 bp, Homo sapien
tgtggtgtgtactcacaaacagctc

SEQ ID NO: 1048557 - DNA, 25 bp, Homo sapien
gaagtgaattatgctactcattcta

SEQ ID NO: 1048558 - DNA, 25 bp, Homo sapien
gattagcataatcctgatgtctgat

SEQ ID NO: 1048559 - DNA, 25 bp, Homo sapien
tttgttgggcagctactacatggca

SEQ ID NO: 1048560 - DNA, 25 bp, Homo sapien
tgtctgatacaaagtcaatcatttg

SEQ ID NO: 1048561 - DNA, 25 bp, Homo sapien
cagccactcggaatgtcttgcgaca

SEQ ID NO: 1048562 - DNA, 25 bp, Homo sapien
tttgggctctaaggccatcccgaag

SEQ ID NO: 1048563 - DNA, 25 bp, Homo sapien
gagaacatgctagcggagtccggtt

SEQ ID NO: 1048564 - DNA, 25 bp, Homo sapien
tcatggatcaagactacgccaaggt

SEQ ID NO: 1048565 - DNA, 25 bp, Homo sapien
cagtatctacccaatgtcaagccag

SEQ ID NO: 1048566 - DNA, 25 bp, Homo sapien
gtgcaccctgctggtgaaggacaag

SEQ ID NO: 1048567 - DNA, 25 bp, Homo sapien
tctggcaccatcctgtggaaacagt

SEQ ID NO: 1048568 - DNA, 25 bp, Homo sapien
gatggtccagagaactactgctcat

SEQ ID NO: 1048569 - DNA, 25 bp, Homo sapien
tgctgcaagcatggacttcccacct

SEQ ID NO: 1048570 - DNA, 25 bp, Homo sapien
agatcaacattgacaccctggccag

SEQ ID NO: 1048571 - DNA, 25 bp, Homo sapien
ccccggagtcagattaagaatgaga

SEQ ID NO: 1048572 - DNA, 25 bp, Homo sapien
tgttttatgatgctcggaagccccg

SEQ ID NO: 1048573 - DNA, 25 bp, Homo sapien
cctgggaactcgttgcaagtacgtc

SEQ ID NO: 1048574 - DNA, 25 bp, Homo sapien
ggcagtggcttcattgacggaatca

SEQ ID NO: 1048575 - DNA, 25 bp, Homo sapien
tacatttctcagtgttaccccgcag

SEQ ID NO: 1048576 - DNA, 25 bp, Homo sapien
gaagctgggatcttaatctgggcct

SEQ ID NO: 1048577 - DNA, 25 bp, Homo sapien
tgctgtggagccgtgaggagtccct

SEQ ID NO: 1048578 - DNA, 25 bp, Homo sapien
cagaagtggtgtgcctagagatggt

SEQ ID NO: 1048579 - DNA, 25 bp, Homo sapien
gcaaaaaggcaggtatgaacctaag

SEQ ID NO: 1048580 - DNA, 25 bp, Homo sapien
cagccccaggcttagctttgtaaaa

SEQ ID NO: 1048581 - DNA, 25 bp, Homo sapien
cttgaagaaggatgactcagtgggc

SEQ ID NO: 1048582 - DNA, 25 bp, Homo sapien
ggtgcagacagaggatcatctgcta

SEQ ID NO: 1048583 - DNA, 25 bp, Homo sapien
actcagtgggctaccgggctttggt

SEQ ID NO: 1048584 - DNA, 25 bp, Homo sapien
gaggatcatctgctacttttcctgc

SEQ ID NO: 1048585 - DNA, 25 bp, Homo sapien
gaacagagcggcactcggcctgagc

SEQ ID NO: 1048586 - DNA, 25 bp, Homo sapien
gcttgcttcaatcagacctacacca

SEQ ID NO: 1048587 - DNA, 25 bp, Homo sapien
tatacctcgtggagacaggtcggcg

SEQ ID NO: 1048588 - DNA, 25 bp, Homo sapien
cacgataacatttagcctggaacag

SEQ ID NO: 1048589 - DNA, 25 bp, Homo sapien
gagcttttcggagaagtctagttca

SEQ ID NO: 1048590 - DNA, 25 bp, Homo sapien
ggagcttttcggagaagtctagttc

SEQ ID NO: 1048591 - DNA, 25 bp, Homo sapien
aagatgggtcaatggggagcttttc

SEQ ID NO: 1048592 - DNA, 25 bp, Homo sapien
cttttcggagaagtctagttcaaag

SEQ ID NO: 1048593 - DNA, 25 bp, Homo sapien
tggctgcagtcatggcctgtcggaa

SEQ ID NO: 1048594 - DNA, 25 bp, Homo sapien
cagtcatggcctgtcggaatgaagt

SEQ ID NO: 1048595 - DNA, 25 bp, Homo sapien
tgcagtcatggcctgtcggaatgaa

SEQ ID NO: 1048596 - DNA, 25 bp, Homo sapien
tgccctagtgagctttgccaccact

SEQ ID NO: 1048597 - DNA, 25 bp, Homo sapien
tgcacttgtccccaagccactatgc

SEQ ID NO: 1048598 - DNA, 25 bp, Homo sapien
taccattatggaacgctgagtttgc

SEQ ID NO: 1048599 - DNA, 25 bp, Homo sapien
agcccaacccagtggacgcttcccg

SEQ ID NO: 1048600 - DNA, 25 bp, Homo sapien
tgagtttgcttaaaaacttcccaca

SEQ ID NO: 1048601 - DNA, 25 bp, Homo sapien
cggaatgggagttgagacagatccc

SEQ ID NO: 1048602 - DNA, 25 bp, Homo sapien
ctgtcctggtgtgtcctgacccgag

SEQ ID NO: 1048603 - DNA, 25 bp, Homo sapien
cacgagcttcctgttaacgatgact

SEQ ID NO: 1048604 - DNA, 25 bp, Homo sapien
tagggtttcaactccgtggctgcag

SEQ ID NO: 1048605 - DNA, 25 bp, Homo sapien
cactaccagatggtgtattcttacg

SEQ ID NO: 1048606 - DNA, 25 bp, Homo sapien
tgacagcatccactaccagatggtg

SEQ ID NO: 1048607 - DNA, 25 bp, Homo sapien
ggccctcggagttgttcccttcagc

SEQ ID NO: 1048608 - DNA, 25 bp, Homo sapien
ccagatggtgtattcttacggctct

SEQ ID NO: 1048609 - DNA, 25 bp, Homo sapien
tgcaggagtctgtaaggtacatcgc

SEQ ID NO: 1048610 - DNA, 25 bp, Homo sapien
cctcaagtgggtggaacatctccca

SEQ ID NO: 1048611 - DNA, 25 bp, Homo sapien
tcctgaagaagactacacttgccct

SEQ ID NO: 1048612 - DNA, 25 bp, Homo sapien
taaggtacatcgcagtcctgaagaa

SEQ ID NO: 1048613 - DNA, 25 bp, Homo sapien
atcatgcgttcctgggagactaaca

SEQ ID NO: 1048614 - DNA, 25 bp, Homo sapien
ggagactaacatcgggggcctgaac

SEQ ID NO: 1048615 - DNA, 25 bp, Homo sapien
tgtgatcactgtgtccaatggaggc

SEQ ID NO: 1048616 - DNA, 25 bp, Homo sapien
tgggagataaccctggacagtggca

SEQ ID NO: 1048617 - DNA, 25 bp, Homo sapien
ggcgccatgttgacaagggcacggc

SEQ ID NO: 1048618 - DNA, 25 bp, Homo sapien
gccatgttgacaagggcacggcaga

SEQ ID NO: 1048619 - DNA, 25 bp, Homo sapien
tgtggcgccatgttgacaagggcac

SEQ ID NO: 1048620 - DNA, 25 bp, Homo sapien
ccatgttgacaagggcacggcagaa

SEQ ID NO: 1048621 - DNA, 25 bp, Homo sapien
tgcagcattaaattcccgaactggg

SEQ ID NO: 1048622 - DNA, 25 bp, Homo sapien
acagagaagaatgtgattgcagcat

SEQ ID NO: 1048623 - DNA, 25 bp, Homo sapien
ggatccaagaagttggttgtagcca

SEQ ID NO: 1048624 - DNA, 25 bp, Homo sapien
attttcccctggatccaagaagttg

SEQ ID NO: 1048625 - DNA, 25 bp, Homo sapien
tttaaagtcgttggaagcagagcct

SEQ ID NO: 1048626 - DNA, 25 bp, Homo sapien
tgtcacttaacaggattggccgcat

SEQ ID NO: 1048627 - DNA, 25 bp, Homo sapien
taagctgatccttgcgtgtaagccg

SEQ ID NO: 1048628 - DNA, 25 bp, Homo sapien
tctaccaggtgtcagaggtcgccaa

SEQ ID NO: 1048629 - DNA, 25 bp, Homo sapien
cgctgaatccacgtgcggcggaaga

SEQ ID NO: 1048630 - DNA, 25 bp, Homo sapien
tcgcgtgtgcctgacccaatgtgca

SEQ ID NO: 1048631 - DNA, 25 bp, Homo sapien
ggcaacttcccgtgtgccgaggcag

SEQ ID NO: 1048632 - DNA, 25 bp, Homo sapien
ttctcccgcgcctgtagggcaactt

SEQ ID NO: 1048633 - DNA, 25 bp, Homo sapien
tcttgtcgcgcttggatttgggcat

SEQ ID NO: 1048634 - DNA, 25 bp, Homo sapien
ctttcttgtcgcgcttggatttggg

SEQ ID NO: 1048635 - DNA, 25 bp, Homo sapien
tttcttgtcgcgcttggatttgggc

SEQ ID NO: 1048636 - DNA, 25 bp, Homo sapien
ttcttgtcgcgcttggatttgggca

SEQ ID NO: 1048637 - DNA, 25 bp, Homo sapien
tgaaactaggcaaaacgagtctccg

SEQ ID NO: 1048638 - DNA, 25 bp, Homo sapien
gatgtcctggcgttccaatctgcgc

SEQ ID NO: 1048639 - DNA, 25 bp, Homo sapien
gacccagttggccttgcaagagcac

SEQ ID NO: 1048640 - DNA, 25 bp, Homo sapien
tctggcggttttacagccccgaagc

SEQ ID NO: 1048641 - DNA, 25 bp, Homo sapien
gcaaacgaaatatagcgggccactt

SEQ ID NO: 1048642 - DNA, 25 bp, Homo sapien
tgttatacctttggctcaagccagc

SEQ ID NO: 1048643 - DNA, 25 bp, Homo sapien
ttggcatttgccagacctgacccag

SEQ ID NO: 1048644 - DNA, 25 bp, Homo sapien
taactaggtaccacacagacaaaga

SEQ ID NO: 1048645 - DNA, 25 bp, Homo sapien
attccaagcctttcttggcagtttt

SEQ ID NO: 1048646 - DNA, 25 bp, Homo sapien
ttcttggcagttttggttaaggaga

SEQ ID NO: 1048647 - DNA, 25 bp, Homo sapien
ctcttctatcaggttttgtttcaat

SEQ ID NO: 1048648 - DNA, 25 bp, Homo sapien
tcaggttttgtttcaattccaagcc

SEQ ID NO: 1048649 - DNA, 25 bp, Homo sapien
tgacattaggcaggctaacaaatct

SEQ ID NO: 1048650 - DNA, 25 bp, Homo sapien
tacgagctagtcaaagctggaaatc

SEQ ID NO: 1048651 - DNA, 25 bp, Homo sapien
tggagtggaacaacgcataagaaac

SEQ ID NO: 1048652 - DNA, 25 bp, Homo sapien
tctgtaagcttcagtgaccccaaat

SEQ ID NO: 1048653 - DNA, 25 bp, Homo sapien
tgtaggtgtccacacatttccgaag

SEQ ID NO: 1048654 - DNA, 25 bp, Homo sapien
gaaaaggtacttgtaggtgtccaca

SEQ ID NO: 1048655 - DNA, 25 bp, Homo sapien
gatgaaaaggtacttgtaggtgtcc

SEQ ID NO: 1048656 - DNA, 25 bp, Homo sapien
gagaagatgaaaaggtacttgtagg

SEQ ID NO: 1048657 - DNA, 25 bp, Homo sapien
ttccggatgtccttcagcttgctgt

SEQ ID NO: 1048658 - DNA, 25 bp, Homo sapien
gtattcatcagatgggctccgaccc

SEQ ID NO: 1048659 - DNA, 25 bp, Homo sapien
tattcatcagatgggctccgaccca

SEQ ID NO: 1048660 - DNA, 25 bp, Homo sapien
tgtattcatcagatgggctccgacc

SEQ ID NO: 1048661 - DNA, 25 bp, Homo sapien
tttgccttagctccaccccgtgagg

SEQ ID NO: 1048662 - DNA, 25 bp, Homo sapien
tgagcctccggcctgccaatggctg

SEQ ID NO: 1048663 - DNA, 25 bp, Homo sapien
gctgtcacatgggagtagtgggaga

SEQ ID NO: 1048664 - DNA, 25 bp, Homo sapien
gctattccttgggtccggaggtgaa

SEQ ID NO: 1048665 - DNA, 25 bp, Homo sapien
tcctttgtgcggttggtgaacagga

SEQ ID NO: 1048666 - DNA, 25 bp, Homo sapien
ctcctttgtgcggttggtgaacagg

SEQ ID NO: 1048667 - DNA, 25 bp, Homo sapien
cctcctttgtgcggttggtgaacag

SEQ ID NO: 1048668 - DNA, 25 bp, Homo sapien
ccaccagcccatgagtcaggctccc

SEQ ID NO: 1048669 - DNA, 25 bp, Homo sapien
ccatgagtcaggctcccccaagtgt

SEQ ID NO: 1048670 - DNA, 25 bp, Homo sapien
atgagtcaggctcccccaagtgtcc

SEQ ID NO: 1048671 - DNA, 25 bp, Homo sapien
ctcccccaagtgtcccgtggccctg

SEQ ID NO: 1048672 - DNA, 25 bp, Homo sapien
accagctcgggcgtagtccatttct

SEQ ID NO: 1048673 - DNA, 25 bp, Homo sapien
ttgttaccagctcgggcgtagtcca

SEQ ID NO: 1048674 - DNA, 25 bp, Homo sapien
agctcgggcgtagtccatttctgtg

SEQ ID NO: 1048675 - DNA, 25 bp, Homo sapien
tgctttgttaccagctcgggcgtag

SEQ ID NO: 1048676 - DNA, 25 bp, Homo sapien
ccatggagtgggggaactgctccag

SEQ ID NO: 1048677 - DNA, 25 bp, Homo sapien
ccactgtgaggcatgcactcttagc

SEQ ID NO: 1048678 - DNA, 25 bp, Homo sapien
ctgtgaccttttggctccagggctg

SEQ ID NO: 1048679 - DNA, 25 bp, Homo sapien
tgctcttggactctaggctgtgacc

SEQ ID NO: 1048680 - DNA, 25 bp, Homo sapien
taacttgctcagctagaaagggatg

SEQ ID NO: 1048681 - DNA, 25 bp, Homo sapien
ctcgtagtcagacagcagagtcacc

SEQ ID NO: 1048682 - DNA, 25 bp, Homo sapien
ccgactgtgaatcccacatgtattt

SEQ ID NO: 1048683 - DNA, 25 bp, Homo sapien
ctgtggactcagatgcgctctctgg

SEQ ID NO: 1048684 - DNA, 25 bp, Homo sapien
cttcccgactgtgaatcccacatgt

SEQ ID NO: 1048685 - DNA, 25 bp, Homo sapien
agatgcgctctctggcaagtcgtct

SEQ ID NO: 1048686 - DNA, 25 bp, Homo sapien
cagttttattctttacaggaggtca

SEQ ID NO: 1048687 - DNA, 25 bp, Homo sapien
gggcggcagcagtcctgatggtcca

SEQ ID NO: 1048688 - DNA, 25 bp, Homo sapien
gcttccaggagaccttcagtcccga

SEQ ID NO: 1048689 - DNA, 25 bp, Homo sapien
ggtcagtgcccatcatgttccctgt

SEQ ID NO: 1048690 - DNA, 25 bp, Homo sapien
catcagatccgcagccctggtttgg

SEQ ID NO: 1048691 - DNA, 25 bp, Homo sapien
ggcaaactgaggcaatccacgcaga

SEQ ID NO: 1048692 - DNA, 25 bp, Homo sapien
gatgccgtggacactttagacgctg

SEQ ID NO: 1048693 - DNA, 25 bp, Homo sapien
ccagtggaagttggctgacaaggca

SEQ ID NO: 1048694 - DNA, 25 bp, Homo sapien
ggctttaaagcccaacggtcatggc

SEQ ID NO: 1048695 - DNA, 25 bp, Homo sapien
taaatggttgtaggctgctttcccc

SEQ ID NO: 1048696 - DNA, 25 bp, Homo sapien
ccttacagggcatgcatagggacgt

SEQ ID NO: 1048697 - DNA, 25 bp, Homo sapien
catacgtgaataaccagagcccagt

SEQ ID NO: 1048698 - DNA, 25 bp, Homo sapien
cacaaattacttaagcggccaggta

SEQ ID NO: 1048699 - DNA, 25 bp, Homo sapien
tacatgaggcaactggctcagaggc

SEQ ID NO: 1048700 - DNA, 25 bp, Homo sapien
aacactagttattgcgatggccatg

SEQ ID NO: 1048701 - DNA, 25 bp, Homo sapien
ctacacatggtagggaacgaacgtg

SEQ ID NO: 1048702 - DNA, 25 bp, Homo sapien
tcttggctgacttctaacttccggc

SEQ ID NO: 1048703 - DNA, 25 bp, Homo sapien
ttagaagccattagcccctcagtgc

SEQ ID NO: 1048704 - DNA, 25 bp, Homo sapien
caaatgcaaggattctcgcccactg

SEQ ID NO: 1048705 - DNA, 25 bp, Homo sapien
tagccacccaagaacacggatgagg

SEQ ID NO: 1048706 - DNA, 25 bp, Homo sapien
tctcaagcaatctaggcagaagcca

SEQ ID NO: 1048707 - DNA, 25 bp, Homo sapien
cccggtgtctgaggcgtgatttagc

SEQ ID NO: 1048708 - DNA, 25 bp, Homo sapien
ttagcagctgtaggctagggtcacc

SEQ ID NO: 1048709 - DNA, 25 bp, Homo sapien
tgtggcttccaagggagcacatctc

SEQ ID NO: 1048710 - DNA, 25 bp, Homo sapien
gacagacaggggaggaaattcacac

SEQ ID NO: 1048711 - DNA, 25 bp, Homo sapien
gcagaaggggaaacggagccagcgt

SEQ ID NO: 1048712 - DNA, 25 bp, Homo sapien
aaaaacttgggtatgagatttcaca

SEQ ID NO: 1048713 - DNA, 25 bp, Homo sapien
cataggattcagcagttccacttgt

SEQ ID NO: 1048714 - DNA, 25 bp, Homo sapien
aggctgatctagagaacccctaacc

SEQ ID NO: 1048715 - DNA, 25 bp, Homo sapien
ttttgggatagtcgccacccttgga

SEQ ID NO: 1048716 - DNA, 25 bp, Homo sapien
ccatttcgctgcttgctcggtgcaa

SEQ ID NO: 1048717 - DNA, 25 bp, Homo sapien
tcctagtagccgagcgtggagtcga

SEQ ID NO: 1048718 - DNA, 25 bp, Homo sapien
aaatctccaagacgcgagtcaccgg

SEQ ID NO: 1048719 - DNA, 25 bp, Homo sapien
taagagtggacatcattggttccca

SEQ ID NO: 1048720 - DNA, 25 bp, Homo sapien
tcctgggatgaaactaacttggtca

SEQ ID NO: 1048721 - DNA, 25 bp, Homo sapien
ccaatcttagggcaaaactttctga

SEQ ID NO: 1048722 - DNA, 25 bp, Homo sapien
gctcctggcctatggatgcccttta

SEQ ID NO: 1048723 - DNA, 25 bp, Homo sapien
gccttggcaaccttcacgatgcact

SEQ ID NO: 1048724 - DNA, 25 bp, Homo sapien
accttcacgatgcactccctgtcca

SEQ ID NO: 1048725 - DNA, 25 bp, Homo sapien
tgccttggcaaccttcacgatgcac

SEQ ID NO: 1048726 - DNA, 25 bp, Homo sapien
cactgccttggcaaccttcacgatg

SEQ ID NO: 1048727 - DNA, 25 bp, Homo sapien
taaaacaatcaattagctcagaaat

SEQ ID NO: 1048728 - DNA, 25 bp, Homo sapien
agaaatctgttagagcagggctcag

SEQ ID NO: 1048729 - DNA, 25 bp, Homo sapien
tcagtgtctcagaggtgatctagca

SEQ ID NO: 1048730 - DNA, 25 bp, Homo sapien
ggtcagttgtatatagtgcctcaat

SEQ ID NO: 1048731 - DNA, 25 bp, Homo sapien
tttcttaatactgaaattgacaaac

SEQ ID NO: 1048732 - DNA, 25 bp, Homo sapien
caaactaatcctaaagctcatatgg

SEQ ID NO: 1048733 - DNA, 25 bp, Homo sapien
ctggaggctgaggtgggaggatcgc

SEQ ID NO: 1048734 - DNA, 25 bp, Homo sapien
aatacaaaaaattaatctgtgtgtg

SEQ ID NO: 1048735 - DNA, 25 bp, Homo sapien
attaatctgtgtgtggtggcacata

SEQ ID NO: 1048736 - DNA, 25 bp, Homo sapien
cctgtggtcccagctactctggagg

SEQ ID NO: 1048737 - DNA, 25 bp, Homo sapien
tgaaaagataaaatccaaggctggc

SEQ ID NO: 1048738 - DNA, 25 bp, Homo sapien
caaaacagatgctcacccatgtgga

SEQ ID NO: 1048739 - DNA, 25 bp, Homo sapien
ccctatgttgtcaccgtcttttctg

SEQ ID NO: 1048740 - DNA, 25 bp, Homo sapien
cccatgtggaatggtgtatcagtta

SEQ ID NO: 1048741 - DNA, 25 bp, Homo sapien
cacgtccagatccgccgccagggcc

SEQ ID NO: 1048742 - DNA, 25 bp, Homo sapien
ttctgggtcaaggcccgccgggtca

SEQ ID NO: 1048743 - DNA, 25 bp, Homo sapien
agcttctgggtcaaggcccgccggg

SEQ ID NO: 1048744 - DNA, 25 bp, Homo sapien
tgggtcaaggcccgccgggtcagct

SEQ ID NO: 1048745 - DNA, 25 bp, Homo sapien
actggctgcggattcccgagggcca

SEQ ID NO: 1048746 - DNA, 25 bp, Homo sapien
gatatcgcgccacaaggagggcgca

SEQ ID NO: 1048747 - DNA, 25 bp, Homo sapien
gagggataatgataggacagctgct

SEQ ID NO: 1048748 - DNA, 25 bp, Homo sapien
gcccgggaaaaacgaagccatcaga

SEQ ID NO: 1048749 - DNA, 25 bp, Homo sapien
ggcctcggcgtcctcggccacagct

SEQ ID NO: 1048750 - DNA, 25 bp, Homo sapien
gagggaggagcgtcccagctcgggg

SEQ ID NO: 1048751 - DNA, 25 bp, Homo sapien
gaggcagtgtaggccctcggtccct

SEQ ID NO: 1048752 - DNA, 25 bp, Homo sapien
cctaagcacggcgtgggaggaggca

SEQ ID NO: 1048753 - DNA, 25 bp, Homo sapien
ccatcagcacagatgatgttggaag

SEQ ID NO: 1048754 - DNA, 25 bp, Homo sapien
cagcacagatgatgttggaagcctt

SEQ ID NO: 1048755 - DNA, 25 bp, Homo sapien
atcagcacagatgatgttggaagcc

SEQ ID NO: 1048756 - DNA, 25 bp, Homo sapien
gaccatcagcacagatgatgttgga

SEQ ID NO: 1048757 - DNA, 25 bp, Homo sapien
gctacccgggcaccctggacagtga

SEQ ID NO: 1048758 - DNA, 25 bp, Homo sapien
ccagaatatggctgatcgcaggggt

SEQ ID NO: 1048759 - DNA, 25 bp, Homo sapien
ccgggcaccctggacagtgagtaga

SEQ ID NO: 1048760 - DNA, 25 bp, Homo sapien
ggcaccctggacagtgagtagagca

SEQ ID NO: 1048761 - DNA, 25 bp, Homo sapien
ctgcaccggagggagggcgctggtg

SEQ ID NO: 1048762 - DNA, 25 bp, Homo sapien
tgcaccggagggagggcgctggtgt

SEQ ID NO: 1048763 - DNA, 25 bp, Homo sapien
gcaccggagggagggcgctggtgtt

SEQ ID NO: 1048764 - DNA, 25 bp, Homo sapien
ctgtggaggaggggcccccggccag

SEQ ID NO: 1048765 - DNA, 25 bp, Homo sapien
tggaggaggggcccccggccaggca

SEQ ID NO: 1048766 - DNA, 25 bp, Homo sapien
cacatcccatatccactggatggag

SEQ ID NO: 1048767 - DNA, 25 bp, Homo sapien
cagctggagaagttgcgggagccca

SEQ ID NO: 1048768 - DNA, 25 bp, Homo sapien
gtcccagccgtcctgggcacattca

SEQ ID NO: 1048769 - DNA, 25 bp, Homo sapien
aaagcagagaatggagatcaagccc

SEQ ID NO: 1048770 - DNA, 25 bp, Homo sapien
tgcccgtcttgtaggctttgatgaa

SEQ ID NO: 1048771 - DNA, 25 bp, Homo sapien
gttgcccgtcttgtaggctttgatg

SEQ ID NO: 1048772 - DNA, 25 bp, Homo sapien
cgtcttgtaggctttgatgaactgg

SEQ ID NO: 1048773 - DNA, 25 bp, Homo sapien
gcccgtcttgtaggctttgatgaac

SEQ ID NO: 1048774 - DNA, 25 bp, Homo sapien
cagcaaggaaggagccgatgaggtt

SEQ ID NO: 1048775 - DNA, 25 bp, Homo sapien
aggttgcaggagtctccgccaatcc

SEQ ID NO: 1048776 - DNA, 25 bp, Homo sapien
agccgatgaggttgcaggagtctcc

SEQ ID NO: 1048777 - DNA, 25 bp, Homo sapien
gatgaggttgcaggagtctccgcca

SEQ ID NO: 1048778 - DNA, 25 bp, Homo sapien
agacataatacacagccgtgtaggt

SEQ ID NO: 1048779 - DNA, 25 bp, Homo sapien
ccaagacataatacacagccgtgta

SEQ ID NO: 1048780 - DNA, 25 bp, Homo sapien
tgccaagacataatacacagccgtg

SEQ ID NO: 1048781 - DNA, 25 bp, Homo sapien
ctgccaagacataatacacagccgt

SEQ ID NO: 1048782 - DNA, 25 bp, Homo sapien
ggcgcgtcctgaacttgtagtaaaa

SEQ ID NO: 1048783 - DNA, 25 bp, Homo sapien
gaacttgtagtaaaagtacagcgtc

SEQ ID NO: 1048784 - DNA, 25 bp, Homo sapien
agtaaaagtacagcgtcagcatcac

SEQ ID NO: 1048785 - DNA, 25 bp, Homo sapien
gggcgcgtcctgaacttgtagtaaa

SEQ ID NO: 1048786 - DNA, 25 bp, Homo sapien
gacagagagcggtccccatactcac

SEQ ID NO: 1048787 - DNA, 25 bp, Homo sapien
ctgacagagagcggtccccatactc

SEQ ID NO: 1048788 - DNA, 25 bp, Homo sapien
tgacagagagcggtccccatactca

SEQ ID NO: 1048789 - DNA, 25 bp, Homo sapien
tctgacagagagcggtccccatact

SEQ ID NO: 1048790 - DNA, 25 bp, Homo sapien
gaggaacaacagcacggagttgatg

SEQ ID NO: 1048791 - DNA, 25 bp, Homo sapien
tgtggcgcacgccatccccatgagg

SEQ ID NO: 1048792 - DNA, 25 bp, Homo sapien
cagcactcagcagcggtgtggcgca

SEQ ID NO: 1048793 - DNA, 25 bp, Homo sapien
ttgctgcccgactccacggacagga

SEQ ID NO: 1048794 - DNA, 25 bp, Homo sapien
gttggtgcggatctgaggcagccgg

SEQ ID NO: 1048795 - DNA, 25 bp, Homo sapien
gaagccaatgacttcctgccgggtg

SEQ ID NO: 1048796 - DNA, 25 bp, Homo sapien
gtacaacacgctggagatggagccg

SEQ ID NO: 1048797 - DNA, 25 bp, Homo sapien
ggaaagcaggtacaacacgctggag

SEQ ID NO: 1048798 - DNA, 25 bp, Homo sapien
gggtttttgagcagcacgctcagcc

SEQ ID NO: 1048799 - DNA, 25 bp, Homo sapien
ccagcatcaccagcgcgaacagaga

SEQ ID NO: 1048800 - DNA, 25 bp, Homo sapien
tcagcccatacagcgtgttccccag

SEQ ID NO: 1048801 - DNA, 25 bp, Homo sapien
acagagagtaggagatcccctgggt

SEQ ID NO: 1048802 - DNA, 25 bp, Homo sapien
ttaactgaggtgaagacacggcagc

SEQ ID NO: 1048803 - DNA, 25 bp, Homo sapien
tacttgctccgaaatgagacccagg

SEQ ID NO: 1048804 - DNA, 25 bp, Homo sapien
gatgatagcgttgtgtcctctctgc

SEQ ID NO: 1048805 - DNA, 25 bp, Homo sapien
cgcccggcagggacttaacaaatat

SEQ ID NO: 1048806 - DNA, 25 bp, Homo sapien
tgctgcgcctgtacaccaggaactg

SEQ ID NO: 1048807 - DNA, 25 bp, Homo sapien
gcggtgctgcgcctgtacaccagga

SEQ ID NO: 1048808 - DNA, 25 bp, Homo sapien
tgtacaccaggaactggatggagat

SEQ ID NO: 1048809 - DNA, 25 bp, Homo sapien
gcctgtacaccaggaactggatgga

SEQ ID NO: 1048810 - DNA, 25 bp, Homo sapien
agaggccacccgcaggctgatgcag

SEQ ID NO: 1048811 - DNA, 25 bp, Homo sapien
ttcggtccacggaggatccagaggc

SEQ ID NO: 1048812 - DNA, 25 bp, Homo sapien
tgcagggccgccgtaccatcactgt

SEQ ID NO: 1048813 - DNA, 25 bp, Homo sapien
tggcatccggtggtgcctgtcctcc

SEQ ID NO: 1048814 - DNA, 25 bp, Homo sapien
gctccagccccggccttgaggcttc

SEQ ID NO: 1048815 - DNA, 25 bp, Homo sapien
tgtctcctgagaggccctggggtct

SEQ ID NO: 1048816 - DNA, 25 bp, Homo sapien
ccagccccggccttgaggcttcggg

SEQ ID NO: 1048817 - DNA, 25 bp, Homo sapien
aggccctggggtctccgctccagcc

SEQ ID NO: 1048818 - DNA, 25 bp, Homo sapien
gggtgagtaggcagaatgaggtagg

SEQ ID NO: 1048819 - DNA, 25 bp, Homo sapien
aatgaggtaggtggtaggaggggca

SEQ ID NO: 1048820 - DNA, 25 bp, Homo sapien
tgagtaggcagaatgaggtaggtgg

SEQ ID NO: 1048821 - DNA, 25 bp, Homo sapien
cctggggtgagtaggcagaatgagg

SEQ ID NO: 1048822 - DNA, 25 bp, Homo sapien
ttcagttgtctggagttgacaggac

SEQ ID NO: 1048823 - DNA, 25 bp, Homo sapien
tctcgaactacggacgtcaagtggt

SEQ ID NO: 1048824 - DNA, 25 bp, Homo sapien
gaactacggacgtcaagtggtccac

SEQ ID NO: 1048825 - DNA, 25 bp, Homo sapien
tgtctggagttgacaggacagtcct

SEQ ID NO: 1048826 - DNA, 25 bp, Homo sapien
tatcctgaaatctcggcagggccag

SEQ ID NO: 1048827 - DNA, 25 bp, Homo sapien
gcgagacatctagctggcacctgag

SEQ ID NO: 1048828 - DNA, 25 bp, Homo sapien
gaaagtgctatcaccccaaaagctg

SEQ ID NO: 1048829 - DNA, 25 bp, Homo sapien
gaaacggcttcggacatctgctcaa

SEQ ID NO: 1048830 - DNA, 25 bp, Homo sapien
gaggttccaggcattggtaagcccc

SEQ ID NO: 1048831 - DNA, 25 bp, Homo sapien
aacacggccccatcagtatggcaga

SEQ ID NO: 1048832 - DNA, 25 bp, Homo sapien
ggtaacatgtttgcccaccatcagc

SEQ ID NO: 1048833 - DNA, 25 bp, Homo sapien
gtatggcagaatcccatcgatgaga

SEQ ID NO: 1048834 - DNA, 25 bp, Homo sapien
agacaagcatcctgccatcccatga

SEQ ID NO: 1048835 - DNA, 25 bp, Homo sapien
gacaagcatcctgccatcccatgac

SEQ ID NO: 1048836 - DNA, 25 bp, Homo sapien
tcaggccacacctggagacaagcat

SEQ ID NO: 1048837 - DNA, 25 bp, Homo sapien
ggccacacctggagacaagcatcct

SEQ ID NO: 1048838 - DNA, 25 bp, Homo sapien
ttggttacatccaccagactgaggg

SEQ ID NO: 1048839 - DNA, 25 bp, Homo sapien
caagggcaactggtaagcgtggttc

SEQ ID NO: 1048840 - DNA, 25 bp, Homo sapien
tgaactgagttaatccacggtggaa

SEQ ID NO: 1048841 - DNA, 25 bp, Homo sapien
tccatgtgggcgtcctaagggagcc

SEQ ID NO: 1048842 - DNA, 25 bp, Homo sapien
gttttaatgctaaactcagctggtg

SEQ ID NO: 1048843 - DNA, 25 bp, Homo sapien
agattggggacagtgggcctcgagg

SEQ ID NO: 1048844 - DNA, 25 bp, Homo sapien
atgcctttccctgctcgttccttgg

SEQ ID NO: 1048845 - DNA, 25 bp, Homo sapien
ggatgtgtttggtgaccctctccca

SEQ ID NO: 1048846 - DNA, 25 bp, Homo sapien
tacatcttatacttgagcctccata

SEQ ID NO: 1048847 - DNA, 25 bp, Homo sapien
ctacatcttatacttgagcctccat

SEQ ID NO: 1048848 - DNA, 25 bp, Homo sapien
cacatttccatagagaccgtgtggt

SEQ ID NO: 1048849 - DNA, 25 bp, Homo sapien
tccctgagaataaagccgatagcca

SEQ ID NO: 1048850 - DNA, 25 bp, Homo sapien
tgtttcatgctaaccagacacgccg

SEQ ID NO: 1048851 - DNA, 25 bp, Homo sapien
tataggcataaaatccactgtctgc

SEQ ID NO: 1048852 - DNA, 25 bp, Homo sapien
tgaagtctccgtcagaggttgtctg

SEQ ID NO: 1048853 - DNA, 25 bp, Homo sapien
caggtaccctgtgcgttatgaggca

SEQ ID NO: 1048854 - DNA, 25 bp, Homo sapien
caacattagtcatcgtagctgcgta

SEQ ID NO: 1048855 - DNA, 25 bp, Homo sapien
tcgcagagtagaacgaacaggccct

SEQ ID NO: 1048856 - DNA, 25 bp, Homo sapien
agtgggggcggagatgagggaggag

SEQ ID NO: 1048857 - DNA, 25 bp, Homo sapien
agggcagtgggggcggagatgaggg

SEQ ID NO: 1048858 - DNA, 25 bp, Homo sapien
ctggcagaaggccagaggtggagaa

SEQ ID NO: 1048859 - DNA, 25 bp, Homo sapien
agaaggcagtgaggggagggcagtg

SEQ ID NO: 1048860 - DNA, 25 bp, Homo sapien
cacacgcgggctgccgtaggtacct

SEQ ID NO: 1048861 - DNA, 25 bp, Homo sapien
tcatgccccggggatgcagcaggca

SEQ ID NO: 1048862 - DNA, 25 bp, Homo sapien
gggactcctataggtgagctcatgc

SEQ ID NO: 1048863 - DNA, 25 bp, Homo sapien
ttttgtgtgactacaacagagatgg

SEQ ID NO: 1048864 - DNA, 25 bp, Homo sapien
gatgcccctgttatttttccctgca

SEQ ID NO: 1048865 - DNA, 25 bp, Homo sapien
tgcagtcttggagggccggctcctt

SEQ ID NO: 1048866 - DNA, 25 bp, Homo sapien
ggtcattattcacatgtcatctctg

SEQ ID NO: 1048867 - DNA, 25 bp, Homo sapien
gaggtgctgcgtgctgcctcactgg

SEQ ID NO: 1048868 - DNA, 25 bp, Homo sapien
aaaaagctctttgttgttaatggca

SEQ ID NO: 1048869 - DNA, 25 bp, Homo sapien
aaagcagccgggagcttagagagac

SEQ ID NO: 1048870 - DNA, 25 bp, Homo sapien
gcagccgggagcttagagagaccct

SEQ ID NO: 1048871 - DNA, 25 bp, Homo sapien
agcagccgggagcttagagagaccc

SEQ ID NO: 1048872 - DNA, 25 bp, Homo sapien
aagcagccgggagcttagagagacc

SEQ ID NO: 1048873 - DNA, 25 bp, Homo sapien
gtatgttgtgcttcatctctcaggg

SEQ ID NO: 1048874 - DNA, 25 bp, Homo sapien
gatgacttccattctggtgactcga

SEQ ID NO: 1048875 - DNA, 25 bp, Homo sapien
ttagcctgaggccatcgcctggctg

SEQ ID NO: 1048876 - DNA, 25 bp, Homo sapien
gcagttctcagcactaagtccaaga

SEQ ID NO: 1048877 - DNA, 25 bp, Homo sapien
tggtttttagcacacgcaagagttg

SEQ ID NO: 1048878 - DNA, 25 bp, Homo sapien
tgaggagaaagacaacactgcccat

SEQ ID NO: 1048879 - DNA, 25 bp, Homo sapien
tgtagcaccgtttcatggcagaacc

SEQ ID NO: 1048880 - DNA, 25 bp, Homo sapien
caaacagctacgactgagagtgagg

SEQ ID NO: 1048881 - DNA, 25 bp, Homo sapien
agtgctcctctctcagagaaccatc

SEQ ID NO: 1048882 - DNA, 25 bp, Homo sapien
aagtgctcctctctcagagaaccat

SEQ ID NO: 1048883 - DNA, 25 bp, Homo sapien
aaagtgctcctctctcagagaacca

SEQ ID NO: 1048884 - DNA, 25 bp, Homo sapien
gtgctcctctctcagagaaccatcc

SEQ ID NO: 1048885 - DNA, 25 bp, Homo sapien
tcctaaggctgtgaaccgaagagct

SEQ ID NO: 1048886 - DNA, 25 bp, Homo sapien
tagaaggtggtaggcccagacttcc

SEQ ID NO: 1048887 - DNA, 25 bp, Homo sapien
gaaacttcgtaggatgtcaacacta

SEQ ID NO: 1048888 - DNA, 25 bp, Homo sapien
catttggaaaattggtacagccctt

SEQ ID NO: 1048889 - DNA, 25 bp, Homo sapien
taaaaatacttgaggagggcatggc

SEQ ID NO: 1048890 - DNA, 25 bp, Homo sapien
tgtgccatgggtagcgggaaaaact

SEQ ID NO: 1048891 - DNA, 25 bp, Homo sapien
caacatctcgcggttggcaggcact

SEQ ID NO: 1048892 - DNA, 25 bp, Homo sapien
gaagggcacactgaaattgacgaag

SEQ ID NO: 1048893 - DNA, 25 bp, Homo sapien
tcaagtgaagtgcatataggcccgt

SEQ ID NO: 1048894 - DNA, 25 bp, Homo sapien
gatgcccctggtgtccgtgctgtta

SEQ ID NO: 1048895 - DNA, 25 bp, Homo sapien
ttagcgaggaatctgaaccaggtca

SEQ ID NO: 1048896 - DNA, 25 bp, Homo sapien
gagtgtctctcaccatggcattgga

SEQ ID NO: 1048897 - DNA, 25 bp, Homo sapien
ttcattcccagcaagagtgtcaggc

SEQ ID NO: 1048898 - DNA, 25 bp, Homo sapien
ccttgatcacccattggtttccaca

SEQ ID NO: 1048899 - DNA, 25 bp, Homo sapien
gagtgtcaggcaaaattcgaactcc

SEQ ID NO: 1048900 - DNA, 25 bp, Homo sapien
caaaattcgaactccttgatcaccc

SEQ ID NO: 1048901 - DNA, 25 bp, Homo sapien
tgttgattccttcgcagccctggtg

SEQ ID NO: 1048902 - DNA, 25 bp, Homo sapien
tcctgaactcgtagattttggcaga

SEQ ID NO: 1048903 - DNA, 25 bp, Homo sapien
gagttaagatttggcaacccttctc

SEQ ID NO: 1048904 - DNA, 25 bp, Homo sapien
tgctcttgagggaacctaaagtaaa

SEQ ID NO: 1048905 - DNA, 25 bp, Homo sapien
taaagggcagcgattgactgggaga

SEQ ID NO: 1048906 - DNA, 25 bp, Homo sapien
tgagtctcttgagggataaagggca

SEQ ID NO: 1048907 - DNA, 25 bp, Homo sapien
aaatccagagtctggataatcagac

SEQ ID NO: 1048908 - DNA, 25 bp, Homo sapien
cagcgattgactgggagaaatccag

SEQ ID NO: 1048909 - DNA, 25 bp, Homo sapien
tacatgcagcgtaatggttcctcat

SEQ ID NO: 1048910 - DNA, 25 bp, Homo sapien
tctgttacatgcagcgtaatggttc

SEQ ID NO: 1048911 - DNA, 25 bp, Homo sapien
ggccagaagtgatttcagattctga

SEQ ID NO: 1048912 - DNA, 25 bp, Homo sapien
cagctccctcatagatttggccaga

SEQ ID NO: 1048913 - DNA, 25 bp, Homo sapien
ggtaatatgcaccagcccctacata

SEQ ID NO: 1048914 - DNA, 25 bp, Homo sapien
tgcctgcctcaaggagagcattgta

SEQ ID NO: 1048915 - DNA, 25 bp, Homo sapien
ccatcctagggtctgcctggaagtt

SEQ ID NO: 1048916 - DNA, 25 bp, Homo sapien
tagacaacactgctatagttcccgt

SEQ ID NO: 1048917 - DNA, 25 bp, Homo sapien
tggattctctcaggccattggtcat

SEQ ID NO: 1048918 - DNA, 25 bp, Homo sapien
tgccttctcctccacgggtcaaaat

SEQ ID NO: 1048919 - DNA, 25 bp, Homo sapien
ttggtcattgaccagtgaataagct

SEQ ID NO: 1048920 - DNA, 25 bp, Homo sapien
ggtcaaaatgcaaggattcttcagc

SEQ ID NO: 1048921 - DNA, 25 bp, Homo sapien
ttgaaattatccctgtcacccccgc

SEQ ID NO: 1048922 - DNA, 25 bp, Homo sapien
catcgccacccccatcggggcagca

SEQ ID NO: 1048923 - DNA, 25 bp, Homo sapien
agcggtagccatgctttgaaattat

SEQ ID NO: 1048924 - DNA, 25 bp, Homo sapien
tcagcggtagccatgctttgaaatt

SEQ ID NO: 1048925 - DNA, 25 bp, Homo sapien
tatggccttactctgcacactggca

SEQ ID NO: 1048926 - DNA, 25 bp, Homo sapien
ggcctttgtctcgtgtaatctggga

SEQ ID NO: 1048927 - DNA, 25 bp, Homo sapien
cccattgtgctagagtgaatccagc

SEQ ID NO: 1048928 - DNA, 25 bp, Homo sapien
tatgcacctgtctaaaggcaaagga

SEQ ID NO: 1048929 - DNA, 25 bp, Homo sapien
tgttgaatacctgccgtgtgcccag

SEQ ID NO: 1048930 - DNA, 25 bp, Homo sapien
tcctttgggttagtcacactgaaag

SEQ ID NO: 1048931 - DNA, 25 bp, Homo sapien
tctgtagaatgtatgctagagctgg

SEQ ID NO: 1048932 - DNA, 25 bp, Homo sapien
cacccctgtaaggtacatatggcca

SEQ ID NO: 1048933 - DNA, 25 bp, Homo sapien
gtgcggacacctgatgggcatagca

SEQ ID NO: 1048934 - DNA, 25 bp, Homo sapien
tccgtttctgtcctgggccggttca

SEQ ID NO: 1048935 - DNA, 25 bp, Homo sapien
cctgctccgtttctgtcctgggccg

SEQ ID NO: 1048936 - DNA, 25 bp, Homo sapien
tgcggacacctgatgggcatagcac

SEQ ID NO: 1048937 - DNA, 25 bp, Homo sapien
ttaagtgagcagtccaaagcacaca

SEQ ID NO: 1048938 - DNA, 25 bp, Homo sapien
tagtgacagggcataccttggaccc

SEQ ID NO: 1048939 - DNA, 25 bp, Homo sapien
aaggagtcttagagttcatctgggc

SEQ ID NO: 1048940 - DNA, 25 bp, Homo sapien
tcccaggccacgaggttaagtgagc

SEQ ID NO: 1048941 - DNA, 25 bp, Homo sapien
tcattgtacacaccacacgaccttg

SEQ ID NO: 1048942 - DNA, 25 bp, Homo sapien
tagcccagttgctggcctgcaagcg

SEQ ID NO: 1048943 - DNA, 25 bp, Homo sapien
cctgcaagcggccaaatccaggatg

SEQ ID NO: 1048944 - DNA, 25 bp, Homo sapien
gtctcatttgttgggccggattcag

SEQ ID NO: 1048945 - DNA, 25 bp, Homo sapien
tcataataccgtcggatgtctgaac

SEQ ID NO: 1048946 - DNA, 25 bp, Homo sapien
tgcagatgatttcataataccgtcg

SEQ ID NO: 1048947 - DNA, 25 bp, Homo sapien
gatttcataataccgtcggatgtct

SEQ ID NO: 1048948 - DNA, 25 bp, Homo sapien
gttttcctgtatgcagatgatttca

SEQ ID NO: 1048949 - DNA, 25 bp, Homo sapien
cagaatttggtagtagatgacattg

SEQ ID NO: 1048950 - DNA, 25 bp, Homo sapien
gatgacattgtccataatttgttca

SEQ ID NO: 1048951 - DNA, 25 bp, Homo sapien
gatagtgtttgtgagaataccgtct

SEQ ID NO: 1048952 - DNA, 25 bp, Homo sapien
gtaatccacggtgacagatttcaga

SEQ ID NO: 1048953 - DNA, 25 bp, Homo sapien
gactgatttgattttcaggccccat

SEQ ID NO: 1048954 - DNA, 25 bp, Homo sapien
cccatcaagtctttaagactgtgga

SEQ ID NO: 1048955 - DNA, 25 bp, Homo sapien
aggctagcggacttagcattctgta

SEQ ID NO: 1048956 - DNA, 25 bp, Homo sapien
gactgtggaaggtacacaggctttc

SEQ ID NO: 1048957 - DNA, 25 bp, Homo sapien
aatgagtctcgtgcccatggtgttc

SEQ ID NO: 1048958 - DNA, 25 bp, Homo sapien
acgctgtggtcctgtcccgctctct

SEQ ID NO: 1048959 - DNA, 25 bp, Homo sapien
ctgtggtcctgtcccgctctctttg

SEQ ID NO: 1048960 - DNA, 25 bp, Homo sapien
gctgtggtcctgtcccgctctcttt

SEQ ID NO: 1048961 - DNA, 25 bp, Homo sapien
gccacgctgtggtcctgtcccgctc

SEQ ID NO: 1048962 - DNA, 25 bp, Homo sapien
tttgcgccgcacagaggaggtgtat

SEQ ID NO: 1048963 - DNA, 25 bp, Homo sapien
tctggacgctgataggatggatgca

SEQ ID NO: 1048964 - DNA, 25 bp, Homo sapien
gatgcaagtagcgaaggcctccttc

SEQ ID NO: 1048965 - DNA, 25 bp, Homo sapien
caagctgaaggcaggagcaacggaa

SEQ ID NO: 1048966 - DNA, 25 bp, Homo sapien
ctttgggaagcatgacctttcaggc

SEQ ID NO: 1048967 - DNA, 25 bp, Homo sapien
cctcttctggctgtcatcggaattt

SEQ ID NO: 1048968 - DNA, 25 bp, Homo sapien
atctcgccaggccagtgcatttcct

SEQ ID NO: 1048969 - DNA, 25 bp, Homo sapien
gctgtcatcggaattttcaagtgtc

SEQ ID NO: 1048970 - DNA, 25 bp, Homo sapien
tcaagtgtcaagaccccactttgtt

SEQ ID NO: 1048971 - DNA, 25 bp, Homo sapien
ctggcaaaatcttccccgttcctca

SEQ ID NO: 1048972 - DNA, 25 bp, Homo sapien
ggatgctagtggatggcatagagac

SEQ ID NO: 1048973 - DNA, 25 bp, Homo sapien
acaaggtctgattcactggcaaaat

SEQ ID NO: 1048974 - DNA, 25 bp, Homo sapien
atgctagtggatggcatagagacaa

SEQ ID NO: 1048975 - DNA, 25 bp, Homo sapien
tgccagctcttttggaaggacctga

SEQ ID NO: 1048976 - DNA, 25 bp, Homo sapien
gaaggacctgagatgagtgacaatt

SEQ ID NO: 1048977 - DNA, 25 bp, Homo sapien
tgacaattggcgtcagggccaatct

SEQ ID NO: 1048978 - DNA, 25 bp, Homo sapien
tttttatcaagcaggatgcaaatcc

SEQ ID NO: 1048979 - DNA, 25 bp, Homo sapien
aggaagtgtatgtgttgtagcctgt

SEQ ID NO: 1048980 - DNA, 25 bp, Homo sapien
actggatgtggcagtgtccatggac

SEQ ID NO: 1048981 - DNA, 25 bp, Homo sapien
atggcttagaaaggaagtgtatgtg

SEQ ID NO: 1048982 - DNA, 25 bp, Homo sapien
tgtgttgtagcctgtggtactggat

SEQ ID NO: 1048983 - DNA, 25 bp, Homo sapien
catgcaacaataccttttgctgaag

SEQ ID NO: 1048984 - DNA, 25 bp, Homo sapien
ggaatacagatgacccatgcaacaa

SEQ ID NO: 1048985 - DNA, 25 bp, Homo sapien
tctgtcctggaggaatacagatgac

SEQ ID NO: 1048986 - DNA, 25 bp, Homo sapien
tgaagttgtgtttgagatttaagca

SEQ ID NO: 1048987 - DNA, 25 bp, Homo sapien
tgaggactgcttttagaccactcta

SEQ ID NO: 1048988 - DNA, 25 bp, Homo sapien
tcacatgtgtttacagatctgtcct

SEQ ID NO: 1048989 - DNA, 25 bp, Homo sapien
tattaaaccttgcataaggctgggc

SEQ ID NO: 1048990 - DNA, 25 bp, Homo sapien
gatctgtccttagacattgaagagg

SEQ ID NO: 1048991 - DNA, 25 bp, Homo sapien
aagcaaacatcctttaagactctgg

SEQ ID NO: 1048992 - DNA, 25 bp, Homo sapien
gccctatcccgtcttcaccgccaag

SEQ ID NO: 1048993 - DNA, 25 bp, Homo sapien
ccttcgtacccgtctccctgtccat

SEQ ID NO: 1048994 - DNA, 25 bp, Homo sapien
cctttgactactgctggccttcgta

SEQ ID NO: 1048995 - DNA, 25 bp, Homo sapien
gcttggccctatcccgtcttcaccg

SEQ ID NO: 1048996 - DNA, 25 bp, Homo sapien
tccagtgtcagtttgaggcattggg

SEQ ID NO: 1048997 - DNA, 25 bp, Homo sapien
cacttgaatttcattacatgtcaga

SEQ ID NO: 1048998 - DNA, 25 bp, Homo sapien
gtttgaggcattgggttaactgata

SEQ ID NO: 1048999 - DNA, 25 bp, Homo sapien
ggcattgggttaactgataaaattc

SEQ ID NO: 1049000 - DNA, 25 bp, Homo sapien
tagagcatagtatgaggataaagct

SEQ ID NO: 1049001 - DNA, 25 bp, Homo sapien
aggaccagctggttccttgccctgg

SEQ ID NO: 1049002 - DNA, 25 bp, Homo sapien
caggcagactctggaataatagagc

SEQ ID NO: 1049003 - DNA, 25 bp, Homo sapien
gataaagctgtcattggctaagctg

SEQ ID NO: 1049004 - DNA, 25 bp, Homo sapien
cttgggtactgcatagtcctgcccc

SEQ ID NO: 1049005 - DNA, 25 bp, Homo sapien
tgagtccttgggtactgcatagtcc

SEQ ID NO: 1049006 - DNA, 25 bp, Homo sapien
agtccttgggtactgcatagtcctg

SEQ ID NO: 1049007 - DNA, 25 bp, Homo sapien
ctttgagtccttgggtactgcatag

SEQ ID NO: 1049008 - DNA, 25 bp, Homo sapien
ctactaatcggtagtcagggtctgg

SEQ ID NO: 1049009 - DNA, 25 bp, Homo sapien
agtaactactaatcggtagtcaggg

SEQ ID NO: 1049010 - DNA, 25 bp, Homo sapien
ctacatagtaactactaatcggtag

SEQ ID NO: 1049011 - DNA, 25 bp, Homo sapien
taatcggtagtcagggtctggaatc

SEQ ID NO: 1049012 - DNA, 25 bp, Homo sapien
tgggctgtcgttggtttcacatgag

SEQ ID NO: 1049013 - DNA, 25 bp, Homo sapien
gcttctccgtcgtgaggctttgacc

SEQ ID NO: 1049014 - DNA, 25 bp, Homo sapien
cagtgattggcaggtagagtgttgc

SEQ ID NO: 1049015 - DNA, 25 bp, Homo sapien
ctgctgaaggcttctccgtcgtgag

SEQ ID NO: 1049016 - DNA, 25 bp, Homo sapien
tgcccagaaggcagcgcgctgctct

SEQ ID NO: 1049017 - DNA, 25 bp, Homo sapien
tgcgtgcgaagcattctgcagggca

SEQ ID NO: 1049018 - DNA, 25 bp, Homo sapien
ccgtgggtgctgtgcgtgcgaagca

SEQ ID NO: 1049019 - DNA, 25 bp, Homo sapien
gctctgcgggcccttctcgaggctg

SEQ ID NO: 1049020 - DNA, 25 bp, Homo sapien
cttctcagttgccgcttctagggag

SEQ ID NO: 1049021 - DNA, 25 bp, Homo sapien
tctttgcagcctttggggagcgagg

SEQ ID NO: 1049022 - DNA, 25 bp, Homo sapien
ctcagttgccgcttctagggaggcc

SEQ ID NO: 1049023 - DNA, 25 bp, Homo sapien
gccttctcagttgccgcttctaggg

SEQ ID NO: 1049024 - DNA, 25 bp, Homo sapien
gacagccaggagacctttccgcccc

SEQ ID NO: 1049025 - DNA, 25 bp, Homo sapien
tcggggactggacctcagacagcca

SEQ ID NO: 1049026 - DNA, 25 bp, Homo sapien
gggtgcggttccctcgccgccactc

SEQ ID NO: 1049027 - DNA, 25 bp, Homo sapien
tcccagccgcggtgccttccgcatc

SEQ ID NO: 1049028 - DNA, 25 bp, Homo sapien
ccggtccgcgctcggcggcagttcc

SEQ ID NO: 1049029 - DNA, 25 bp, Homo sapien
gggccggtccgcgctcggcggcagt

SEQ ID NO: 1049030 - DNA, 25 bp, Homo sapien
ggccggtccgcgctcggcggcagtt

SEQ ID NO: 1049031 - DNA, 25 bp, Homo sapien
ggtccgcgctcggcggcagttccgg

SEQ ID NO: 1049032 - DNA, 25 bp, Homo sapien
cagatcctgccgtagcgagcggcag

SEQ ID NO: 1049033 - DNA, 25 bp, Homo sapien
gatcctgccgtagcgagcggcagcg

SEQ ID NO: 1049034 - DNA, 25 bp, Homo sapien
tcctgccgtagcgagcggcagcgct

SEQ ID NO: 1049035 - DNA, 25 bp, Homo sapien
ctgccgtagcgagcggcagcgctgg

SEQ ID NO: 1049036 - DNA, 25 bp, Homo sapien
tattctgtctgcagctataccggca

SEQ ID NO: 1049037 - DNA, 25 bp, Homo sapien
tgtgtcatcctcacagatattctgt

SEQ ID NO: 1049038 - DNA, 25 bp, Homo sapien
tataccggcagggatctttatgtct

SEQ ID NO: 1049039 - DNA, 25 bp, Homo sapien
ttccggtgcctaaacaaggcctggc

SEQ ID NO: 1049040 - DNA, 25 bp, Homo sapien
cataacagctagcatttgttgaact

SEQ ID NO: 1049041 - DNA, 25 bp, Homo sapien
aacagctagcatttgttgaacttaa

SEQ ID NO: 1049042 - DNA, 25 bp, Homo sapien
tcataacagctagcatttgttgaac

SEQ ID NO: 1049043 - DNA, 25 bp, Homo sapien
actcataacagctagcatttgttga

SEQ ID NO: 1049044 - DNA, 25 bp, Homo sapien
tgaaagcttcgacttgtctatgagc

SEQ ID NO: 1049045 - DNA, 25 bp, Homo sapien
ctacctgtgaaagcttcgacttgtc

SEQ ID NO: 1049046 - DNA, 25 bp, Homo sapien
tgccagtggctacctgtgaaagctt

SEQ ID NO: 1049047 - DNA, 25 bp, Homo sapien
aagcttcgacttgtctatgagctcc

SEQ ID NO: 1049048 - DNA, 25 bp, Homo sapien
actatgttggcaggcttgtgtggaa

SEQ ID NO: 1049049 - DNA, 25 bp, Homo sapien
tgcccggcccacaagatcattcatt

SEQ ID NO: 1049050 - DNA, 25 bp, Homo sapien
gaataatactacctgcctttcctgg

SEQ ID NO: 1049051 - DNA, 25 bp, Homo sapien
tcctggttgttatcagagctggaca

SEQ ID NO: 1049052 - DNA, 25 bp, Homo sapien
aattgccaatgctgaatatgttgca

SEQ ID NO: 1049053 - DNA, 25 bp, Homo sapien
atgatactgccacagcacaaaactt

SEQ ID NO: 1049054 - DNA, 25 bp, Homo sapien
tgaatatgttgcaagttgtcatggt

SEQ ID NO: 1049055 - DNA, 25 bp, Homo sapien
tggataaacttcatcggctatgata

SEQ ID NO: 1049056 - DNA, 25 bp, Homo sapien
tattcctggttgcatgagagtttgc

SEQ ID NO: 1049057 - DNA, 25 bp, Homo sapien
cacagctattggcagaaggtctcag

SEQ ID NO: 1049058 - DNA, 25 bp, Homo sapien
gacccctcgctagagctgcttgaga

SEQ ID NO: 1049059 - DNA, 25 bp, Homo sapien
gttctgctgagtggttcttattcct

SEQ ID NO: 1049060 - DNA, 25 bp, Homo sapien
tgaagtgaaggaattcattaacaac

SEQ ID NO: 1049061 - DNA, 25 bp, Homo sapien
agcatttttggagcttgaaaggtca

SEQ ID NO: 1049062 - DNA, 25 bp, Homo sapien
aagtgaaggaattcattaacaactt

SEQ ID NO: 1049063 - DNA, 25 bp, Homo sapien
ttgaaaggtcaatgccttcagcttt

SEQ ID NO: 1049064 - DNA, 25 bp, Homo sapien
gatgcataagcgctcaagcagtggc

SEQ ID NO: 1049065 - DNA, 25 bp, Homo sapien
agaacatgtttagaccaccaggact

SEQ ID NO: 1049066 - DNA, 25 bp, Homo sapien
catgggatgcataagcgctcaagca

SEQ ID NO: 1049067 - DNA, 25 bp, Homo sapien
gttgctccttcgtcaatcttgattt

SEQ ID NO: 1049068 - DNA, 25 bp, Homo sapien
ggttggttttgagatcccattttca

SEQ ID NO: 1049069 - DNA, 25 bp, Homo sapien
cccgcgctccgacccctgaaagtct

SEQ ID NO: 1049070 - DNA, 25 bp, Homo sapien
gctccgacccctgaaagtctcgcga

SEQ ID NO: 1049071 - DNA, 25 bp, Homo sapien
cagctttcctctcggccggcccccg

SEQ ID NO: 1049072 - DNA, 25 bp, Homo sapien
ccgacccctgaaagtctcgcgagag

SEQ ID NO: 1049073 - DNA, 25 bp, Homo sapien
catccgccagacaccggtcccactt

SEQ ID NO: 1049074 - DNA, 25 bp, Homo sapien
gaccgcatccgccagacaccggtcc

SEQ ID NO: 1049075 - DNA, 25 bp, Homo sapien
ttcacgaccgcatccgccagacacc

SEQ ID NO: 1049076 - DNA, 25 bp, Homo sapien
ctatcttcacgaccgcatccgccag

SEQ ID NO: 1049077 - DNA, 25 bp, Homo sapien
caaaggtcagttgaaggcccttcca

SEQ ID NO: 1049078 - DNA, 25 bp, Homo sapien
tcttattgaatgacctcagcccatc

SEQ ID NO: 1049079 - DNA, 25 bp, Homo sapien
tcccaagccattctacaaaggtcag

SEQ ID NO: 1049080 - DNA, 25 bp, Homo sapien
caggcaactcaaacacctccaagat

SEQ ID NO: 1049081 - DNA, 25 bp, Homo sapien
tgcttgaaaccatcccatgattacc

SEQ ID NO: 1049082 - DNA, 25 bp, Homo sapien
tacgtcaattccctgttgagggcag

SEQ ID NO: 1049083 - DNA, 25 bp, Homo sapien
tatgcttctctatttgcccgctgac

SEQ ID NO: 1049084 - DNA, 25 bp, Homo sapien
tatgcctagtgagccctggaagcaa

SEQ ID NO: 1049085 - DNA, 25 bp, Homo sapien
caagccagagtatgaaattatcaag

SEQ ID NO: 1049086 - DNA, 25 bp, Homo sapien
cccttcagtctttgccaagccagag

SEQ ID NO: 1049087 - DNA, 25 bp, Homo sapien
aattatcaagatggaccaggtgtgg

SEQ ID NO: 1049088 - DNA, 25 bp, Homo sapien
ggatcgtttggaccctgagttcaag

SEQ ID NO: 1049089 - DNA, 25 bp, Homo sapien
ttgctgcaatgggtctaactatgtt

SEQ ID NO: 1049090 - DNA, 25 bp, Homo sapien
aagatattattcaagcctcagggtg

SEQ ID NO: 1049091 - DNA, 25 bp, Homo sapien
taatagtcatcgtacagcaaacagg

SEQ ID NO: 1049092 - DNA, 25 bp, Homo sapien
tacaacacctatgctaaacacgagt

SEQ ID NO: 1049093 - DNA, 25 bp, Homo sapien
ggtgcaagccttcggcattcaagaa

SEQ ID NO: 1049094 - DNA, 25 bp, Homo sapien
tcaacttggtcaaaaggtccacagc

SEQ ID NO: 1049095 - DNA, 25 bp, Homo sapien
cattcaagaagagtaagttgtaaca

SEQ ID NO: 1049096 - DNA, 25 bp, Homo sapien
tcacacaagcaacatcaacttggtc

SEQ ID NO: 1049097 - DNA, 25 bp, Homo sapien
cctaaaggagggattctgccaccat

SEQ ID NO: 1049098 - DNA, 25 bp, Homo sapien
gctgtagcctgtgatcctaaaggag

SEQ ID NO: 1049099 - DNA, 25 bp, Homo sapien
tcaaagaagccgatacaaaagacta

SEQ ID NO: 1049100 - DNA, 25 bp, Homo sapien
cctgcattaacatgtgatagctaca

SEQ ID NO: 1049101 - DNA, 25 bp, Homo sapien
catactttcgtaacaaggaagaagc

SEQ ID NO: 1049102 - DNA, 25 bp, Homo sapien
acaaggaagaagcaaggccgaatcc

SEQ ID NO: 1049103 - DNA, 25 bp, Homo sapien
agaagcaaggccgaatcctttcttt

SEQ ID NO: 1049104 - DNA, 25 bp, Homo sapien
cctggccatactttcgtaacaagga

SEQ ID NO: 1049105 - DNA, 25 bp, Homo sapien
gatatcactccatgaaatagagagg

SEQ ID NO: 1049106 - DNA, 25 bp, Homo sapien
tgagccaccaatgctttgtggtaac

SEQ ID NO: 1049107 - DNA, 25 bp, Homo sapien
aacaggcaatttttggtgagccacc

SEQ ID NO: 1049108 - DNA, 25 bp, Homo sapien
caaaatgtggctacccaattcaaca

SEQ ID NO: 1049109 - DNA, 25 bp, Homo sapien
cattaaattgccttgtcaaaaacga

SEQ ID NO: 1049110 - DNA, 25 bp, Homo sapien
tccacacgggaaagctcttataggt

SEQ ID NO: 1049111 - DNA, 25 bp, Homo sapien
tctacgacccttttaagcgaggctc

SEQ ID NO: 1049112 - DNA, 25 bp, Homo sapien
tggaaacctagtcgttttagcatgg

SEQ ID NO: 1049113 - DNA, 25 bp, Homo sapien
gttggatgtgtagggcaatgatacc

SEQ ID NO: 1049114 - DNA, 25 bp, Homo sapien
gagttggatgtgtagggcaatgata

SEQ ID NO: 1049115 - DNA, 25 bp, Homo sapien
agttggatgtgtagggcaatgatac

SEQ ID NO: 1049116 - DNA, 25 bp, Homo sapien
caagggctctgagggccgactgggc

SEQ ID NO: 1049117 - DNA, 25 bp, Homo sapien
aggcaagggctctgagggccgactg

SEQ ID NO: 1049118 - DNA, 25 bp, Homo sapien
caggcaagggctctgagggccgact

SEQ ID NO: 1049119 - DNA, 25 bp, Homo sapien
ccgagcaggcaagggctctgagggc

SEQ ID NO: 1049120 - DNA, 25 bp, Homo sapien
gtcctcaatcctcccgatcttcata

SEQ ID NO: 1049121 - DNA, 25 bp, Homo sapien
tcctcaatcctcccgatcttcatac

SEQ ID NO: 1049122 - DNA, 25 bp, Homo sapien
tgagagtgctgtcagaggggatggg

SEQ ID NO: 1049123 - DNA, 25 bp, Homo sapien
ccttcctgagagtgctgtcagaggg

SEQ ID NO: 1049124 - DNA, 25 bp, Homo sapien
cctgagagtgctgtcagaggggatg

SEQ ID NO: 1049125 - DNA, 25 bp, Homo sapien
ccccttcctgagagtgctgtcagag

SEQ ID NO: 1049126 - DNA, 25 bp, Homo sapien
gaaggcaatttattaacagaaaata

SEQ ID NO: 1049127 - DNA, 25 bp, Homo sapien
attttgaggaatcttgttcacagac

SEQ ID NO: 1049128 - DNA, 25 bp, Homo sapien
aatattttgaggaatcttgttcaca

SEQ ID NO: 1049129 - DNA, 25 bp, Homo sapien
tgaaggcaatttattaacagaaaat

SEQ ID NO: 1049130 - DNA, 25 bp, Homo sapien
gaaagaatgtgcctgagtttcaggc

SEQ ID NO: 1049131 - DNA, 25 bp, Homo sapien
tgatatccgaagtcagcatctgaaa

SEQ ID NO: 1049132 - DNA, 25 bp, Homo sapien
gtgttgatacaaatgatgatatccg

SEQ ID NO: 1049133 - DNA, 25 bp, Homo sapien
aaaggtgttgaaagaatgtgcctga

SEQ ID NO: 1049134 - DNA, 25 bp, Homo sapien
ctgcagggatttctcgggtggacat

SEQ ID NO: 1049135 - DNA, 25 bp, Homo sapien
ccttcctgtggctatctggactaga

SEQ ID NO: 1049136 - DNA, 25 bp, Homo sapien
cctgtggctatctggactagacaga

SEQ ID NO: 1049137 - DNA, 25 bp, Homo sapien
ttctcgggtggacatcaattaccag

SEQ ID NO: 1049138 - DNA, 25 bp, Homo sapien
gtgagaaaacaattcctaatccaaa

SEQ ID NO: 1049139 - DNA, 25 bp, Homo sapien
gtaagtgagaaaacaattcctaatc

SEQ ID NO: 1049140 - DNA, 25 bp, Homo sapien
aagtgagaaaacaattcctaatcca

SEQ ID NO: 1049141 - DNA, 25 bp, Homo sapien
tgagaaaacaattcctaatccaaaa

SEQ ID NO: 1049142 - DNA, 25 bp, Homo sapien
catgtagaagatatggagcctggaa

SEQ ID NO: 1049143 - DNA, 25 bp, Homo sapien
tgctgacagttggaataagccattc

SEQ ID NO: 1049144 - DNA, 25 bp, Homo sapien
cagaaccgaaggctaatggccacat

SEQ ID NO: 1049145 - DNA, 25 bp, Homo sapien
gaaatcatgctgacagttggaataa

SEQ ID NO: 1049146 - DNA, 25 bp, Homo sapien
cattgatgataaacattcaagcagg

SEQ ID NO: 1049147 - DNA, 25 bp, Homo sapien
tatatatctgaacgtacatacgcat

SEQ ID NO: 1049148 - DNA, 25 bp, Homo sapien
ttccaatcggctagcacatgagtat

SEQ ID NO: 1049149 - DNA, 25 bp, Homo sapien
cattcaagcaggctccttaattcca

SEQ ID NO: 1049150 - DNA, 25 bp, Homo sapien
tgctacacacgaagccctgaggaag

SEQ ID NO: 1049151 - DNA, 25 bp, Homo sapien
gaatcatggctgagtcccggaagtc

SEQ ID NO: 1049152 - DNA, 25 bp, Homo sapien
tgtgagacttacagtccagactgcc

SEQ ID NO: 1049153 - DNA, 25 bp, Homo sapien
acaggacttcagtagaatgtgagac

SEQ ID NO: 1049154 - DNA, 25 bp, Homo sapien
tactgctactttggatttggtggcc

SEQ ID NO: 1049155 - DNA, 25 bp, Homo sapien
caagtgacaggcttgcacctaggtc

SEQ ID NO: 1049156 - DNA, 25 bp, Homo sapien
gattctagcccaagagtaacctgga

SEQ ID NO: 1049157 - DNA, 25 bp, Homo sapien
cttagtaagcctgaggccatcggca

SEQ ID NO: 1049158 - DNA, 25 bp, Homo sapien
aggcagctgacggtttcagcaggtt

SEQ ID NO: 1049159 - DNA, 25 bp, Homo sapien
gcctcttcttgcatggtccctgtga

SEQ ID NO: 1049160 - DNA, 25 bp, Homo sapien
cagctgcgcctcttcttgcatggtc

SEQ ID NO: 1049161 - DNA, 25 bp, Homo sapien
gccggctgccggcttcagtgccaca

SEQ ID NO: 1049162 - DNA, 25 bp, Homo sapien
agtgccacacagctgcgcctcttct

SEQ ID NO: 1049163 - DNA, 25 bp, Homo sapien
tgtctgctcctttcggttctcccca

SEQ ID NO: 1049164 - DNA, 25 bp, Homo sapien
gtctgctcctttcggttctccccac

SEQ ID NO: 1049165 - DNA, 25 bp, Homo sapien
tctgctcctttcggttctccccaca

SEQ ID NO: 1049166 - DNA, 25 bp, Homo sapien
tctgtctgctcctttcggttctccc

SEQ ID NO: 1049167 - DNA, 25 bp, Homo sapien
tatgcatataatcacccctgagcca

SEQ ID NO: 1049168 - DNA, 25 bp, Homo sapien
tataatcacccctgagccattatcc

SEQ ID NO: 1049169 - DNA, 25 bp, Homo sapien
actcagtttggaacaatggaaatgt

SEQ ID NO: 1049170 - DNA, 25 bp, Homo sapien
gagccattatccctgacaactcagt

SEQ ID NO: 1049171 - DNA, 25 bp, Homo sapien
caattcctaaaacctgtcgaaggcg

SEQ ID NO: 1049172 - DNA, 25 bp, Homo sapien
tcaactggcaggtctagagggaaag

SEQ ID NO: 1049173 - DNA, 25 bp, Homo sapien
ttctcaaccccggtaagagtctgct

SEQ ID NO: 1049174 - DNA, 25 bp, Homo sapien
taattgctgtatcaggtcagaccca

SEQ ID NO: 1049175 - DNA, 25 bp, Homo sapien
gatttctcttgtcctcccgctggga

SEQ ID NO: 1049176 - DNA, 25 bp, Homo sapien
cacctccttacaacttccagagaga

SEQ ID NO: 1049177 - DNA, 25 bp, Homo sapien
tcaaatgcataaccaggtgctggag

SEQ ID NO: 1049178 - DNA, 25 bp, Homo sapien
gcagcttactccagggcacttcagt

SEQ ID NO: 1049179 - DNA, 25 bp, Homo sapien
tgagttgtaccctattgcccagcct

SEQ ID NO: 1049180 - DNA, 25 bp, Homo sapien
gaaaggcgccttaagacatcagtca

SEQ ID NO: 1049181 - DNA, 25 bp, Homo sapien
gacttgacttcaatggagtgggcca

SEQ ID NO: 1049182 - DNA, 25 bp, Homo sapien
cagttctgaaaactacgcctgaggg

SEQ ID NO: 1049183 - DNA, 25 bp, Homo sapien
tagaactaaagcaactggccagtgc

SEQ ID NO: 1049184 - DNA, 25 bp, Homo sapien
tcaagtgtgctttgggccagcctcc

SEQ ID NO: 1049185 - DNA, 25 bp, Homo sapien
ctaagggcaacaaggcgggaataca

SEQ ID NO: 1049186 - DNA, 25 bp, Homo sapien
cctgataaagcttcccctagtgggt

SEQ ID NO: 1049187 - DNA, 25 bp, Homo sapien
ggttggcagtggtgttccagctgcc

SEQ ID NO: 1049188 - DNA, 25 bp, Homo sapien
tggttggcagtggtgttccagctgc

SEQ ID NO: 1049189 - DNA, 25 bp, Homo sapien
ctggttggcagtggtgttccagctg

SEQ ID NO: 1049190 - DNA, 25 bp, Homo sapien
gcttgtctgactcatgaggttgccg

SEQ ID NO: 1049191 - DNA, 25 bp, Homo sapien
tgttttacctagcttggctggaaac

SEQ ID NO: 1049192 - DNA, 25 bp, Homo sapien
gactcatgaggttgccgggcatcct

SEQ ID NO: 1049193 - DNA, 25 bp, Homo sapien
catcctgggtggctcctagtggcct

SEQ ID NO: 1049194 - DNA, 25 bp, Homo sapien
cgcccgccggtcctgcggagctggg

SEQ ID NO: 1049195 - DNA, 25 bp, Homo sapien
gggcgccccaggaggctcggcgagg

SEQ ID NO: 1049196 - DNA, 25 bp, Homo sapien
gcggccccgcgacgctcggctgggc

SEQ ID NO: 1049197 - DNA, 25 bp, Homo sapien
gggcggccccgcgacgctcggctgg

SEQ ID NO: 1049198 - DNA, 25 bp, Homo sapien
cattccgcagtaacaaagggtgagg

SEQ ID NO: 1049199 - DNA, 25 bp, Homo sapien
ggagtctagggaggccccattccgc

SEQ ID NO: 1049200 - DNA, 25 bp, Homo sapien
ggtcaccgaggaaacgctgcagcct

SEQ ID NO: 1049201 - DNA, 25 bp, Homo sapien
tgttgacaaattgcttccccgccag

SEQ ID NO: 1049202 - DNA, 25 bp, Homo sapien
tgttaacaccctagcgttcagccac

SEQ ID NO: 1049203 - DNA, 25 bp, Homo sapien
gactccctagccaaccgtcttgtgg

SEQ ID NO: 1049204 - DNA, 25 bp, Homo sapien
caagaaacgatggaatctggagtca

SEQ ID NO: 1049205 - DNA, 25 bp, Homo sapien
ccctggtaaaggtatgtgtgacacg

SEQ ID NO: 1049206 - DNA, 25 bp, Homo sapien
tataagagcgcaactatagtcatgc

SEQ ID NO: 1049207 - DNA, 25 bp, Homo sapien
agccaagtctccctgctctgcaagg

SEQ ID NO: 1049208 - DNA, 25 bp, Homo sapien
tagtcatgcgtcagttagccatggg

SEQ ID NO: 1049209 - DNA, 25 bp, Homo sapien
acagcaagtcatgggactccccaaa

SEQ ID NO: 1049210 - DNA, 25 bp, Homo sapien
cccagcccagagccaagtactttat

SEQ ID NO: 1049211 - DNA, 25 bp, Homo sapien
ccagcccagagccaagtactttata

SEQ ID NO: 1049212 - DNA, 25 bp, Homo sapien
gcacctggcctgcagtgaattcctg

SEQ ID NO: 1049213 - DNA, 25 bp, Homo sapien
ggctggccagacctcaggcaaaaaa

SEQ ID NO: 1049214 - DNA, 25 bp, Homo sapien
tctgtaaagaccaggtttcgccgtg

SEQ ID NO: 1049215 - DNA, 25 bp, Homo sapien
cagtgaattcctgggccaccttggc

SEQ ID NO: 1049216 - DNA, 25 bp, Homo sapien
aacagtgccagcttgttgatgggtg

SEQ ID NO: 1049217 - DNA, 25 bp, Homo sapien
tgatgttcttggcttcgcaccaggc

SEQ ID NO: 1049218 - DNA, 25 bp, Homo sapien
cgctgtggcccacgatctgggtgat

SEQ ID NO: 1049219 - DNA, 25 bp, Homo sapien
atggacttggcctcacagccgctgt

SEQ ID NO: 1049220 - DNA, 25 bp, Homo sapien
gctggcatgcaggagtcacagtgaa

SEQ ID NO: 1049221 - DNA, 25 bp, Homo sapien
gaaccagggactctgtggactgtgg

SEQ ID NO: 1049222 - DNA, 25 bp, Homo sapien
tctgtggactgtgggaaggtgttgg

SEQ ID NO: 1049223 - DNA, 25 bp, Homo sapien
tgttggggacgctgtagctgaagca

SEQ ID NO: 1049224 - DNA, 25 bp, Homo sapien
tcgtggcccgggcactccagcgtca

SEQ ID NO: 1049225 - DNA, 25 bp, Homo sapien
ggcacctcctcgtggcccgggcact

SEQ ID NO: 1049226 - DNA, 25 bp, Homo sapien
cctgggcacctcctcgtggcccggg

SEQ ID NO: 1049227 - DNA, 25 bp, Homo sapien
tgggcacctcctcgtggcccgggca

SEQ ID NO: 1049228 - DNA, 25 bp, Homo sapien
gcagctacagtgcaggatcttctcc

SEQ ID NO: 1049229 - DNA, 25 bp, Homo sapien
taggctccttgccgcaggcctggca

SEQ ID NO: 1049230 - DNA, 25 bp, Homo sapien
gcctggcagctacagtgcaggatct

SEQ ID NO: 1049231 - DNA, 25 bp, Homo sapien
ccgcaggcctggcagctacagtgca

SEQ ID NO: 1049232 - DNA, 25 bp, Homo sapien
tcaggggtctgcccgccaggatggg

SEQ ID NO: 1049233 - DNA, 25 bp, Homo sapien
ctcaggggtctgcccgccaggatgg

SEQ ID NO: 1049234 - DNA, 25 bp, Homo sapien
aagtccgagtctgaagccaagtcca

SEQ ID NO: 1049235 - DNA, 25 bp, Homo sapien
gagtgagacccaacattccacaggg

SEQ ID NO: 1049236 - DNA, 25 bp, Homo sapien
agagagcccaagtgaaccctgactg

SEQ ID NO: 1049237 - DNA, 25 bp, Homo sapien
gcacagaagagcagacgcagacagt

SEQ ID NO: 1049238 - DNA, 25 bp, Homo sapien
ttcatgagaagactgagggtccatc

SEQ ID NO: 1049239 - DNA, 25 bp, Homo sapien
tcatgagaagactgagggtccatca

SEQ ID NO: 1049240 - DNA, 25 bp, Homo sapien
gactgtgccgccattaagtgtccag

SEQ ID NO: 1049241 - DNA, 25 bp, Homo sapien
tgaggacaatatccgcatcactggg

SEQ ID NO: 1049242 - DNA, 25 bp, Homo sapien
tgggaaacttactagcacctgctct

SEQ ID NO: 1049243 - DNA, 25 bp, Homo sapien
tgcgagtttatacgagtcacctgtg

SEQ ID NO: 1049244 - DNA, 25 bp, Homo sapien
ctttcccgcagaaaccatcccgatc

SEQ ID NO: 1049245 - DNA, 25 bp, Homo sapien
tccctgagctgttggcgctcctagt

SEQ ID NO: 1049246 - DNA, 25 bp, Homo sapien
aggatgaagtccctgagctgttggc

SEQ ID NO: 1049247 - DNA, 25 bp, Homo sapien
ccaaaggggccaggtactaaggatg

SEQ ID NO: 1049248 - DNA, 25 bp, Homo sapien
cacccggcagcagggtcgcctccgt

SEQ ID NO: 1049249 - DNA, 25 bp, Homo sapien
tctcccgcccgcactggtacctggg

SEQ ID NO: 1049250 - DNA, 25 bp, Homo sapien
ctgcgactgcggcaagcgccgcggg

SEQ ID NO: 1049251 - DNA, 25 bp, Homo sapien
cactggtacctggggcgctctggct

SEQ ID NO: 1049252 - DNA, 25 bp, Homo sapien
ccgatgagccgaggcccctgaagga

SEQ ID NO: 1049253 - DNA, 25 bp, Homo sapien
gaactcctggagcaaacgggttgga

SEQ ID NO: 1049254 - DNA, 25 bp, Homo sapien
gtccgtgagaacagaccgcgactca

SEQ ID NO: 1049255 - DNA, 25 bp, Homo sapien
tcaagcagaggtcggatgggctccc

SEQ ID NO: 1049256 - DNA, 25 bp, Homo sapien
tgctattggcggttgggcccggctc

SEQ ID NO: 1049257 - DNA, 25 bp, Homo sapien
gtcagcgcgatgaccacgcacagcg

SEQ ID NO: 1049258 - DNA, 25 bp, Homo sapien
tgagtgcagatgagcgcgatcagca

SEQ ID NO: 1049259 - DNA, 25 bp, Homo sapien
agcagcgagttggccgccgccgtca

SEQ ID NO: 1049260 - DNA, 25 bp, Homo sapien
tgcagcacatcacgtcgaaggcggt

SEQ ID NO: 1049261 - DNA, 25 bp, Homo sapien
taggtgaagcatatggcacccgagg

SEQ ID NO: 1049262 - DNA, 25 bp, Homo sapien
cccgacgccacaaggacaaaaggca

SEQ ID NO: 1049263 - DNA, 25 bp, Homo sapien
gtcagacgtgaagagcgacaccagg

SEQ ID NO: 1049264 - DNA, 25 bp, Homo sapien
ccacagcccgggtctccctgcgcac

SEQ ID NO: 1049265 - DNA, 25 bp, Homo sapien
cccacagcccgggtctccctgcgca

SEQ ID NO: 1049266 - DNA, 25 bp, Homo sapien
ctatcccacagcccgggtctccctg

SEQ ID NO: 1049267 - DNA, 25 bp, Homo sapien
atcccacagcccgggtctccctgcg

SEQ ID NO: 1049268 - DNA, 25 bp, Homo sapien
ccctccagggggtcaataggagtca

SEQ ID NO: 1049269 - DNA, 25 bp, Homo sapien
ggtcaataggagtcaggtgcactgt

SEQ ID NO: 1049270 - DNA, 25 bp, Homo sapien
ggggtcaataggagtcaggtgcact

SEQ ID NO: 1049271 - DNA, 25 bp, Homo sapien
caataggagtcaggtgcactgtggc

SEQ ID NO: 1049272 - DNA, 25 bp, Homo sapien
taggtccaaacattgagggggcctc

SEQ ID NO: 1049273 - DNA, 25 bp, Homo sapien
tctcatcacttcctttaggtccaaa

SEQ ID NO: 1049274 - DNA, 25 bp, Homo sapien
tcacttcctttaggtccaaacattg

SEQ ID NO: 1049275 - DNA, 25 bp, Homo sapien
cttcctttaggtccaaacattgagg

SEQ ID NO: 1049276 - DNA, 25 bp, Homo sapien
cagcagttaagagttgagttaggga

SEQ ID NO: 1049277 - DNA, 25 bp, Homo sapien
ctcaggaacaccactctgcccactt

SEQ ID NO: 1049278 - DNA, 25 bp, Homo sapien
ctgtcactagtccacaccccggcat

SEQ ID NO: 1049279 - DNA, 25 bp, Homo sapien
gctcggagaggcaaaatgacttgcc

SEQ ID NO: 1049280 - DNA, 25 bp, Homo sapien
agcaggatgcccagcgtcaggctgg

SEQ ID NO: 1049281 - DNA, 25 bp, Homo sapien
gaagggcaaccaggtcacaaagaac

SEQ ID NO: 1049282 - DNA, 25 bp, Homo sapien
ctggactatgttggccacaaagaag

SEQ ID NO: 1049283 - DNA, 25 bp, Homo sapien
tgtgcttcgtggctagacgcctgct

SEQ ID NO: 1049284 - DNA, 25 bp, Homo sapien
catgtgaggacatcgaagaggcctg

SEQ ID NO: 1049285 - DNA, 25 bp, Homo sapien
gttacagtaacccagccatgtgagg

SEQ ID NO: 1049286 - DNA, 25 bp, Homo sapien
tgttgaagaaattgacggcggcagc

SEQ ID NO: 1049287 - DNA, 25 bp, Homo sapien
tgagcctgcgtctgagtccgaatct

SEQ ID NO: 1049288 - DNA, 25 bp, Homo sapien
gttaaataactcgtgtcaggcccca

SEQ ID NO: 1049289 - DNA, 25 bp, Homo sapien
tacacatgggataaccgaggctcgg

SEQ ID NO: 1049290 - DNA, 25 bp, Homo sapien
agtttattgagagtccccttgggca

SEQ ID NO: 1049291 - DNA, 25 bp, Homo sapien
cctatggcaggtaaactggcgacca

SEQ ID NO: 1049292 - DNA, 25 bp, Homo sapien
gctcacgcctgtaatcccaacactt

SEQ ID NO: 1049293 - DNA, 25 bp, Homo sapien
ctaaagatacaaaaaattactggca

SEQ ID NO: 1049294 - DNA, 25 bp, Homo sapien
aagatacaaaaaattactggcatgg

SEQ ID NO: 1049295 - DNA, 25 bp, Homo sapien
aaaaaaaaagctgccgggcacagtg

SEQ ID NO: 1049296 - DNA, 25 bp, Homo sapien
tgctattttaacaaaaagcccatcc

SEQ ID NO: 1049297 - DNA, 25 bp, Homo sapien
gagagagagaacccatctctctctc

SEQ ID NO: 1049298 - DNA, 25 bp, Homo sapien
tcttttttctcatgctattttaaca

SEQ ID NO: 1049299 - DNA, 25 bp, Homo sapien
tttctcatgctattttaacaaaaag

SEQ ID NO: 1049300 - DNA, 25 bp, Homo sapien
tattcctagctgcaaggaagcctgg

SEQ ID NO: 1049301 - DNA, 25 bp, Homo sapien
ggagtgtgcccagctataaatgtga

SEQ ID NO: 1049302 - DNA, 25 bp, Homo sapien
ccttctggagtagcctagagctgca

SEQ ID NO: 1049303 - DNA, 25 bp, Homo sapien
taaacggcagagtgagttgtagcca

SEQ ID NO: 1049304 - DNA, 25 bp, Homo sapien
gccaggtggcctagaacttagcaaa

SEQ ID NO: 1049305 - DNA, 25 bp, Homo sapien
gaccagcagttttggagactccgct

SEQ ID NO: 1049306 - DNA, 25 bp, Homo sapien
gaatcttcacgcagtatcggctaca

SEQ ID NO: 1049307 - DNA, 25 bp, Homo sapien
gtttatcagggaacgcaacctcatg

SEQ ID NO: 1049308 - DNA, 25 bp, Homo sapien
gggatgagtggatggttcccctacc

SEQ ID NO: 1049309 - DNA, 25 bp, Homo sapien
acccaccccgtctgcctaggcattt

SEQ ID NO: 1049310 - DNA, 25 bp, Homo sapien
tcacaggtttcatgtgggaccagca

SEQ ID NO: 1049311 - DNA, 25 bp, Homo sapien
tgagtggatggttcccctacccaaa

SEQ ID NO: 1049312 - DNA, 25 bp, Homo sapien
actagactcctttctgggcatctaa

SEQ ID NO: 1049313 - DNA, 25 bp, Homo sapien
agactcctttctgggcatctaaaaa

SEQ ID NO: 1049314 - DNA, 25 bp, Homo sapien
tcctttctgggcatctaaaaatccc

SEQ ID NO: 1049315 - DNA, 25 bp, Homo sapien
tctgggcatctaaaaatcccctggt

SEQ ID NO: 1049316 - DNA, 25 bp, Homo sapien
gaaagtgtctgtagacctctcagtg

SEQ ID NO: 1049317 - DNA, 25 bp, Homo sapien
aagctctctctatctgtcagcacaa

SEQ ID NO: 1049318 - DNA, 25 bp, Homo sapien
tgtagacctctcagtgataagctct

SEQ ID NO: 1049319 - DNA, 25 bp, Homo sapien
agataagatgacagagagtaagacc

SEQ ID NO: 1049320 - DNA, 25 bp, Homo sapien
gcataactcagccaaggtcgcatgg

SEQ ID NO: 1049321 - DNA, 25 bp, Homo sapien
cgtaagaacgttgccagcatcagat

SEQ ID NO: 1049322 - DNA, 25 bp, Homo sapien
gaaagataccgctcacatcgtaaga

SEQ ID NO: 1049323 - DNA, 25 bp, Homo sapien
cacgatgtccagtctgaatggctct

SEQ ID NO: 1049324 - DNA, 25 bp, Homo sapien
tgatctcttcccaaaggtgtgggct

SEQ ID NO: 1049325 - DNA, 25 bp, Homo sapien
tggagccattactgggaacaggctg

SEQ ID NO: 1049326 - DNA, 25 bp, Homo sapien
tgaacccattcagctagtaggaact

SEQ ID NO: 1049327 - DNA, 25 bp, Homo sapien
tctgggttccttcgctttggtctgg

SEQ ID NO: 1049328 - DNA, 25 bp, Homo sapien
gccatgtggaacaggccatgccaga

SEQ ID NO: 1049329 - DNA, 25 bp, Homo sapien
gatagacatattgaagatccctccc

SEQ ID NO: 1049330 - DNA, 25 bp, Homo sapien
tctggtagctgagcccactgcagag

SEQ ID NO: 1049331 - DNA, 25 bp, Homo sapien
tcctgaacccgaacacaggtgagtt

SEQ ID NO: 1049332 - DNA, 25 bp, Homo sapien
tttgttttcagagccggaagtgctt

SEQ ID NO: 1049333 - DNA, 25 bp, Homo sapien
tcccttgacaaatgaggacgctggt

SEQ ID NO: 1049334 - DNA, 25 bp, Homo sapien
cccgcagactctcaaacagagaatt

SEQ ID NO: 1049335 - DNA, 25 bp, Homo sapien
tcggcctccgagttcttagaggtca

SEQ ID NO: 1049336 - DNA, 25 bp, Homo sapien
tcttccattgcctgagtgccctctg

SEQ ID NO: 1049337 - DNA, 25 bp, Homo sapien
tgccctctgatgaggctatccctgc

SEQ ID NO: 1049338 - DNA, 25 bp, Homo sapien
gcctgagtgccctctgatgaggcta

SEQ ID NO: 1049339 - DNA, 25 bp, Homo sapien
ccctgctgatgtccaccctcttctg

SEQ ID NO: 1049340 - DNA, 25 bp, Homo sapien
cgggattctaatgttgcagtaagca

SEQ ID NO: 1049341 - DNA, 25 bp, Homo sapien
gaagcattggccgaatcagtcacca

SEQ ID NO: 1049342 - DNA, 25 bp, Homo sapien
cggagacacttttgaattcccctgg

SEQ ID NO: 1049343 - DNA, 25 bp, Homo sapien
gattcgtgcatgcttcgggattcta

SEQ ID NO: 1049344 - DNA, 25 bp, Homo sapien
ccttgaattctgtatcacatttgga

SEQ ID NO: 1049345 - DNA, 25 bp, Homo sapien
aattctgtatcacatttggaaaaca

SEQ ID NO: 1049346 - DNA, 25 bp, Homo sapien
catttggaaaacattgtgtctttct

SEQ ID NO: 1049347 - DNA, 25 bp, Homo sapien
gaaaacattgtgtctttctttcctc

SEQ ID NO: 1049348 - DNA, 25 bp, Homo sapien
ccagatggccatgaatggagcaagt

SEQ ID NO: 1049349 - DNA, 25 bp, Homo sapien
cagatggccatgaatggagcaagtt

SEQ ID NO: 1049350 - DNA, 25 bp, Homo sapien
gatggccatgaatggagcaagttct

SEQ ID NO: 1049351 - DNA, 25 bp, Homo sapien
agatggccatgaatggagcaagttc

SEQ ID NO: 1049352 - DNA, 25 bp, Homo sapien
gctccatagcaatgtctttgtttgg

SEQ ID NO: 1049353 - DNA, 25 bp, Homo sapien
tcgtcatcctgtgtaaactcattat

SEQ ID NO: 1049354 - DNA, 25 bp, Homo sapien
tggtgtctgtgccagagatcctaat

SEQ ID NO: 1049355 - DNA, 25 bp, Homo sapien
taatggcccacagtatttgcagtca

SEQ ID NO: 1049356 - DNA, 25 bp, Homo sapien
tccgcctcaagcgttgggaaggtaa

SEQ ID NO: 1049357 - DNA, 25 bp, Homo sapien
ctcaagcgttgggaaggtaaaacag

SEQ ID NO: 1049358 - DNA, 25 bp, Homo sapien
ccagcgtccgcctcaagcgttggga

SEQ ID NO: 1049359 - DNA, 25 bp, Homo sapien
caagcgttgggaaggtaaaacagcg

SEQ ID NO: 1049360 - DNA, 25 bp, Homo sapien
ctccggccgattccgccgctccttg

SEQ ID NO: 1049361 - DNA, 25 bp, Homo sapien
ggcctcggctttccggctgccgctg

SEQ ID NO: 1049362 - DNA, 25 bp, Homo sapien
tcttcgccgcctgctttcgggacat

SEQ ID NO: 1049363 - DNA, 25 bp, Homo sapien
gctggttggcgaagctgacgaactc

SEQ ID NO: 1049364 - DNA, 25 bp, Homo sapien
gctgctttatcatgtagtccactgt

SEQ ID NO: 1049365 - DNA, 25 bp, Homo sapien
tcctgtctgtgcttgagatgatttc

SEQ ID NO: 1049366 - DNA, 25 bp, Homo sapien
aaggaatgtcatcttctacaaaggg

SEQ ID NO: 1049367 - DNA, 25 bp, Homo sapien
cttgagatgatttcgtgagtgtccc

SEQ ID NO: 1049368 - DNA, 25 bp, Homo sapien
ggggaaagatgttgctgattctctg

SEQ ID NO: 1049369 - DNA, 25 bp, Homo sapien
gatgaatcactacattcaactgatg

SEQ ID NO: 1049370 - DNA, 25 bp, Homo sapien
aggctacaattgcatcattgccagc

SEQ ID NO: 1049371 - DNA, 25 bp, Homo sapien
tcaactgatgatttcttgcaaaggc

SEQ ID NO: 1049372 - DNA, 25 bp, Homo sapien
tgccagcaaaagtaccaggctttgc

SEQ ID NO: 1049373 - DNA, 25 bp, Homo sapien
taccgatatgcgatgtgtaactccc

SEQ ID NO: 1049374 - DNA, 25 bp, Homo sapien
gaacactgtcgtagtgctctccata

SEQ ID NO: 1049375 - DNA, 25 bp, Homo sapien
tgtgtaactccctcacgctgctttt

SEQ ID NO: 1049376 - DNA, 25 bp, Homo sapien
tgagttgtcattgatcctccgaaca

SEQ ID NO: 1049377 - DNA, 25 bp, Homo sapien
aatcaggcccacagattctcaatgc

SEQ ID NO: 1049378 - DNA, 25 bp, Homo sapien
gaatacgggagaaatccgaggcctc

SEQ ID NO: 1049379 - DNA, 25 bp, Homo sapien
tagcgccagatatacagctctcaat

SEQ ID NO: 1049380 - DNA, 25 bp, Homo sapien
tctcaatctgtttcctgtagggcgg

SEQ ID NO: 1049381 - DNA, 25 bp, Homo sapien
tctcaggtcgtcttcagagtccatt

SEQ ID NO: 1049382 - DNA, 25 bp, Homo sapien
atctctcaggtcgtcttcagagtcc

SEQ ID NO: 1049383 - DNA, 25 bp, Homo sapien
ctggacagcatcctctacttcatct

SEQ ID NO: 1049384 - DNA, 25 bp, Homo sapien
tacttcatctctcaggtcgtcttca

SEQ ID NO: 1049385 - DNA, 25 bp, Homo sapien
atttctcttcccttggttcatccga

SEQ ID NO: 1049386 - DNA, 25 bp, Homo sapien
tggttcatccgaagcacggcaatta

SEQ ID NO: 1049387 - DNA, 25 bp, Homo sapien
tccaggttctggactattaaattaa

SEQ ID NO: 1049388 - DNA, 25 bp, Homo sapien
gaagcacggcaattattgcagattc

SEQ ID NO: 1049389 - DNA, 25 bp, Homo sapien
catttaaaacgtagctctccagtct

SEQ ID NO: 1049390 - DNA, 25 bp, Homo sapien
gtatctgacacgtaacatctggcaa

SEQ ID NO: 1049391 - DNA, 25 bp, Homo sapien
tgaacagcacagatcactggagggt

SEQ ID NO: 1049392 - DNA, 25 bp, Homo sapien
cacatggagcactatgatgccagaa

SEQ ID NO: 1049393 - DNA, 25 bp, Homo sapien
cgaccactgggctcaagattctctt

SEQ ID NO: 1049394 - DNA, 25 bp, Homo sapien
actgcttcagcactcgaccactggg

SEQ ID NO: 1049395 - DNA, 25 bp, Homo sapien
tgccttcatttaagccctgatttcc

SEQ ID NO: 1049396 - DNA, 25 bp, Homo sapien
ggctggcctgtgccttattgttttc

SEQ ID NO: 1049397 - DNA, 25 bp, Homo sapien
ttccaactgtcacggcatacaccaa

SEQ ID NO: 1049398 - DNA, 25 bp, Homo sapien
gctttatgcattccccagattttcc

SEQ ID NO: 1049399 - DNA, 25 bp, Homo sapien
tgggaagagcccacatgtacagtaa

SEQ ID NO: 1049400 - DNA, 25 bp, Homo sapien
ccaaacaggataagtgaggtcattc

SEQ ID NO: 1049401 - DNA, 25 bp, Homo sapien
tgttattgtccctgtggctacctct

SEQ ID NO: 1049402 - DNA, 25 bp, Homo sapien
tgagagcggcgaaggtcttcaccaa

SEQ ID NO: 1049403 - DNA, 25 bp, Homo sapien
gacctgcgtgttcgcctctgcttcg

SEQ ID NO: 1049404 - DNA, 25 bp, Homo sapien
ctctccagggctttgtggcggtgcc

SEQ ID NO: 1049405 - DNA, 25 bp, Homo sapien
tatgctgacccagtaaaacccaggc

SEQ ID NO: 1049406 - DNA, 25 bp, Homo sapien
taaaggagactgacgcatgccaaca

SEQ ID NO: 1049407 - DNA, 25 bp, Homo sapien
taatatgtgagcaactccccgactg

SEQ ID NO: 1049408 - DNA, 25 bp, Homo sapien
cactgaagttggatgcatgtacccg

SEQ ID NO: 1049409 - DNA, 25 bp, Homo sapien
tttattgtaggtgccgaggttgtca

SEQ ID NO: 1049410 - DNA, 25 bp, Homo sapien
cagcactgaggaaccagttttcaca

SEQ ID NO: 1049411 - DNA, 25 bp, Homo sapien
ttgtcaaaggaacagtgggcagcct

SEQ ID NO: 1049412 - DNA, 25 bp, Homo sapien
tctgtcccagacaaggctagagaga

SEQ ID NO: 1049413 - DNA, 25 bp, Homo sapien
gattagcaccgggagtttcgacctg

SEQ ID NO: 1049414 - DNA, 25 bp, Homo sapien
tctttatgccacttggtggtctccc

SEQ ID NO: 1049415 - DNA, 25 bp, Homo sapien
tgcccaacttagtgcggaacacccg

SEQ ID NO: 1049416 - DNA, 25 bp, Homo sapien
cactcccgcgaagtcatcatattga

SEQ ID NO: 1049417 - DNA, 25 bp, Homo sapien
tggaaaccttccacccagtgctgaa

SEQ ID NO: 1049418 - DNA, 25 bp, Homo sapien
ttttgctagaaacaagacgacctac

SEQ ID NO: 1049419 - DNA, 25 bp, Homo sapien
agggagcacccctcgttgctgagtc

SEQ ID NO: 1049420 - DNA, 25 bp, Homo sapien
aactgtgtgagtgtgataaggctgc

SEQ ID NO: 1049421 - DNA, 25 bp, Homo sapien
taagtccagtatcagcgcttccagg

SEQ ID NO: 1049422 - DNA, 25 bp, Homo sapien
cacgttccaccacaacaagggtcag

SEQ ID NO: 1049423 - DNA, 25 bp, Homo sapien
tacagtgcccctaattcgacaggaa

SEQ ID NO: 1049424 - DNA, 25 bp, Homo sapien
tattccacagggattcaggccatga

SEQ ID NO: 1049425 - DNA, 25 bp, Homo sapien
cactacaagaactactaaagaggag

SEQ ID NO: 1049426 - DNA, 25 bp, Homo sapien
agcactacaagaactactaaagagg

SEQ ID NO: 1049427 - DNA, 25 bp, Homo sapien
actactaaagaggagttctaaatct

SEQ ID NO: 1049428 - DNA, 25 bp, Homo sapien
caagaactactaaagaggagttcta

SEQ ID NO: 1049429 - DNA, 25 bp, Homo sapien
cacttctaggaatctgtccagaaga

SEQ ID NO: 1049430 - DNA, 25 bp, Homo sapien
ctaggaatctgtccagaagatataa

SEQ ID NO: 1049431 - DNA, 25 bp, Homo sapien
cttttgagccagtaatcccacttct

SEQ ID NO: 1049432 - DNA, 25 bp, Homo sapien
ttgagccagtaatcccacttctagg

SEQ ID NO: 1049433 - DNA, 25 bp, Homo sapien
caattttgcacaccctaataaaggc

SEQ ID NO: 1049434 - DNA, 25 bp, Homo sapien
ggccctgacacaatcaataaaccag

SEQ ID NO: 1049435 - DNA, 25 bp, Homo sapien
taataaaggcattcctcacttggct

SEQ ID NO: 1049436 - DNA, 25 bp, Homo sapien
ttgtcaaatcgagaagctgctgctg

SEQ ID NO: 1049437 - DNA, 25 bp, Homo sapien
agcctctgcagagtagaaaggtaca

SEQ ID NO: 1049438 - DNA, 25 bp, Homo sapien
tttccagcctctgcagagtagaaag

SEQ ID NO: 1049439 - DNA, 25 bp, Homo sapien
cagcctctgcagagtagaaaggtac

SEQ ID NO: 1049440 - DNA, 25 bp, Homo sapien
tccagcctctgcagagtagaaaggt

SEQ ID NO: 1049441 - DNA, 25 bp, Homo sapien
gctcatcctgcctttggtccataga

SEQ ID NO: 1049442 - DNA, 25 bp, Homo sapien
tcatcctgcctttggtccatagaac

SEQ ID NO: 1049443 - DNA, 25 bp, Homo sapien
catgctcatcctgcctttggtccat

SEQ ID NO: 1049444 - DNA, 25 bp, Homo sapien
atcctgcctttggtccatagaacag

SEQ ID NO: 1049445 - DNA, 25 bp, Homo sapien
ctgtgttaagagctcctccaactct

SEQ ID NO: 1049446 - DNA, 25 bp, Homo sapien
tgatagctagggcaccgggcaaagc

SEQ ID NO: 1049447 - DNA, 25 bp, Homo sapien
catttctgccatgaacttgctgagc

SEQ ID NO: 1049448 - DNA, 25 bp, Homo sapien
cagaggattggagccccatttctgc

SEQ ID NO: 1049449 - DNA, 25 bp, Homo sapien
agatttcgtgttccctgatagctag

SEQ ID NO: 1049450 - DNA, 25 bp, Homo sapien
gaaactcagcgaaaggtccataatg

SEQ ID NO: 1049451 - DNA, 25 bp, Homo sapien
ttctagaggcgatcaaggtcactgc

SEQ ID NO: 1049452 - DNA, 25 bp, Homo sapien
tttgtggtcagtaagaacatgctgc

SEQ ID NO: 1049453 - DNA, 25 bp, Homo sapien
cagtcaaagggccactaagtgttgg

SEQ ID NO: 1049454 - DNA, 25 bp, Homo sapien
cagggactctcattcaatgccagtg

SEQ ID NO: 1049455 - DNA, 25 bp, Homo sapien
gggactctcattcaatgccagtgga

SEQ ID NO: 1049456 - DNA, 25 bp, Homo sapien
caatgccagtggaaattcaaaatgg

SEQ ID NO: 1049457 - DNA, 25 bp, Homo sapien
caccacaaatgctgccaaggatgtg

SEQ ID NO: 1049458 - DNA, 25 bp, Homo sapien
acttccatccgggtccttcctggct

SEQ ID NO: 1049459 - DNA, 25 bp, Homo sapien
tgttggtatctgtgccaattctggg

SEQ ID NO: 1049460 - DNA, 25 bp, Homo sapien
tcttcaacgaatggtctgttggtat

SEQ ID NO: 1049461 - DNA, 25 bp, Homo sapien
aatggtctgttggtatctgtgccaa

SEQ ID NO: 1049462 - DNA, 25 bp, Homo sapien
atgatgaggacaaacccggaggtgg

SEQ ID NO: 1049463 - DNA, 25 bp, Homo sapien
gggagtgaccgatgatgaggacaaa

SEQ ID NO: 1049464 - DNA, 25 bp, Homo sapien
ggtatccacagaccatggatccggg

SEQ ID NO: 1049465 - DNA, 25 bp, Homo sapien
ttggcctggcctcaaatcctgctct

SEQ ID NO: 1049466 - DNA, 25 bp, Homo sapien
gaggtctgctcccatgagcaacttc

SEQ ID NO: 1049467 - DNA, 25 bp, Homo sapien
tccagtcggaacattggtatccaca

SEQ ID NO: 1049468 - DNA, 25 bp, Homo sapien
tgtttttccacatggttaatgtccc

SEQ ID NO: 1049469 - DNA, 25 bp, Homo sapien
tcatctgatatgctgtccactctgg

SEQ ID NO: 1049470 - DNA, 25 bp, Homo sapien
gaactcatctgatatgctgtccact

SEQ ID NO: 1049471 - DNA, 25 bp, Homo sapien
atctgatatgctgtccactctggca

SEQ ID NO: 1049472 - DNA, 25 bp, Homo sapien
tagaactcatctgatatgctgtcca

SEQ ID NO: 1049473 - DNA, 25 bp, Homo sapien
gtcttccatgatccttctttccaca

SEQ ID NO: 1049474 - DNA, 25 bp, Homo sapien
ggaagtcttccatgatccttctttc

SEQ ID NO: 1049475 - DNA, 25 bp, Homo sapien
ctccgggaagtcttccatgatcctt

SEQ ID NO: 1049476 - DNA, 25 bp, Homo sapien
gatccttctttccacagggagctta

SEQ ID NO: 1049477 - DNA, 25 bp, Homo sapien
gaagcatttgcagggacactgtccc

SEQ ID NO: 1049478 - DNA, 25 bp, Homo sapien
tactcaccccgttggcaaaatggct

SEQ ID NO: 1049479 - DNA, 25 bp, Homo sapien
aaactgtaggtccactgagggccct

SEQ ID NO: 1049480 - DNA, 25 bp, Homo sapien
gattatggctcttatgggccccaag

SEQ ID NO: 1049481 - DNA, 25 bp, Homo sapien
gccaggaaccaagccagtgggagga

SEQ ID NO: 1049482 - DNA, 25 bp, Homo sapien
agccaggaaccaagccagtgggagg

SEQ ID NO: 1049483 - DNA, 25 bp, Homo sapien
tacaagccaggaaccaagccagtgg

SEQ ID NO: 1049484 - DNA, 25 bp, Homo sapien
ccaggaaccaagccagtgggaggag

SEQ ID NO: 1049485 - DNA, 25 bp, Homo sapien
aagtctctacgacctcaatggctgg

SEQ ID NO: 1049486 - DNA, 25 bp, Homo sapien
tctccagggatctagcaagacatca

SEQ ID NO: 1049487 - DNA, 25 bp, Homo sapien
tggaagatagcccatgtccccaggt

SEQ ID NO: 1049488 - DNA, 25 bp, Homo sapien
gactcttagaaatcgctgaagccag

SEQ ID NO: 1049489 - DNA, 25 bp, Homo sapien
tgtcagggcgttcttccctgtcacc

SEQ ID NO: 1049490 - DNA, 25 bp, Homo sapien
cagccgcagtaacagccgtagaagc

SEQ ID NO: 1049491 - DNA, 25 bp, Homo sapien
cgtagaagccgtagtttgtcagggc

SEQ ID NO: 1049492 - DNA, 25 bp, Homo sapien
cctgtcaccttctcgatcattgatt

SEQ ID NO: 1049493 - DNA, 25 bp, Homo sapien
ttagcacttcccgatcaagaggtgg

SEQ ID NO: 1049494 - DNA, 25 bp, Homo sapien
gagtcaccatgctgggaggaatccc

SEQ ID NO: 1049495 - DNA, 25 bp, Homo sapien
ggaatcccgaacatccttggagagg

SEQ ID NO: 1049496 - DNA, 25 bp, Homo sapien
tgaggaccacttgttacgccacagt

SEQ ID NO: 1049497 - DNA, 25 bp, Homo sapien
agctgagatcgcaccattgcactcc

SEQ ID NO: 1049498 - DNA, 25 bp, Homo sapien
cagcctgggcaaccagagtgagacc

SEQ ID NO: 1049499 - DNA, 25 bp, Homo sapien
agtgcagaaggtctaggatgcagtg

SEQ ID NO: 1049500 - DNA, 25 bp, Homo sapien
ctgagtgcagaaggtctaggatgca

SEQ ID NO: 1049501 - DNA, 25 bp, Homo sapien
gagccaacgtgtgattcctactgaa

SEQ ID NO: 1049502 - DNA, 25 bp, Homo sapien
taaacttctcgtatcacaggtccca

SEQ ID NO: 1049503 - DNA, 25 bp, Homo sapien
tatggatggaaaatgtaagcaggcc

SEQ ID NO: 1049504 - DNA, 25 bp, Homo sapien
taaagtatgtgatcgcagctgggcg

SEQ ID NO: 1049505 - DNA, 25 bp, Homo sapien
aagagacttagatcccgagtgggag

SEQ ID NO: 1049506 - DNA, 25 bp, Homo sapien
tgcaagagacttagatcccgagtgg

SEQ ID NO: 1049507 - DNA, 25 bp, Homo sapien
tccgtgcaagagacttagatcccga

SEQ ID NO: 1049508 - DNA, 25 bp, Homo sapien
ctgtccgtgcaagagacttagatcc

SEQ ID NO: 1049509 - DNA, 25 bp, Homo sapien
atagcagtggtcatgcgcccaacag

SEQ ID NO: 1049510 - DNA, 25 bp, Homo sapien
cacgcgaatctgtatttgtaggact

SEQ ID NO: 1049511 - DNA, 25 bp, Homo sapien
ttgtaggactgtgtgcgaatgttgc

SEQ ID NO: 1049512 - DNA, 25 bp, Homo sapien
tgtgcgaatgttgcagcccttctcc

SEQ ID NO: 1049513 - DNA, 25 bp, Homo sapien
cagaggccctgagcttgaatcctgc

SEQ ID NO: 1049514 - DNA, 25 bp, Homo sapien
tttgcacccagtggatgattcagcc

SEQ ID NO: 1049515 - DNA, 25 bp, Homo sapien
taaagtcaggtgctcttccaatggc

SEQ ID NO: 1049516 - DNA, 25 bp, Homo sapien
gaagaggcatggctcctaaatcggg

SEQ ID NO: 1049517 - DNA, 25 bp, Homo sapien
gtagacgagcttccggtcacaggca

SEQ ID NO: 1049518 - DNA, 25 bp, Homo sapien
agctccgtaggtttctcttgaggca

SEQ ID NO: 1049519 - DNA, 25 bp, Homo sapien
tttctcttgaggcagtagacgagct

SEQ ID NO: 1049520 - DNA, 25 bp, Homo sapien
gttgtagctccgtaggtttctcttg

SEQ ID NO: 1049521 - DNA, 25 bp, Homo sapien
gagccaggacgctgtcttcagagaa

SEQ ID NO: 1049522 - DNA, 25 bp, Homo sapien
caaccctgagttggaggagagctct

SEQ ID NO: 1049523 - DNA, 25 bp, Homo sapien
tccgccaagcttcgagaaagactga

SEQ ID NO: 1049524 - DNA, 25 bp, Homo sapien
taagtgcatctcaggaaagtgttcc

SEQ ID NO: 1049525 - DNA, 25 bp, Homo sapien
tcaaagaggttcagtaacgggtcca

SEQ ID NO: 1049526 - DNA, 25 bp, Homo sapien
tccatatcagcatcaaggtgggctt

SEQ ID NO: 1049527 - DNA, 25 bp, Homo sapien
tgagacccaatactggagaggaccc

SEQ ID NO: 1049528 - DNA, 25 bp, Homo sapien
tgaccccatcgaggaagaatgagac

SEQ ID NO: 1049529 - DNA, 25 bp, Homo sapien
gataactagagccactccaacgtag

SEQ ID NO: 1049530 - DNA, 25 bp, Homo sapien
gagccactccaacgtaggtcgagga

SEQ ID NO: 1049531 - DNA, 25 bp, Homo sapien
tccaacgtaggtcgaggaggccaag

SEQ ID NO: 1049532 - DNA, 25 bp, Homo sapien
ctgcagataactagagccactccaa

SEQ ID NO: 1049533 - DNA, 25 bp, Homo sapien
agaaggtctgagatgcgctccagag

SEQ ID NO: 1049534 - DNA, 25 bp, Homo sapien
ccagcaacataggtctcagaaggtc

SEQ ID NO: 1049535 - DNA, 25 bp, Homo sapien
catctgccatgttgcgggttctggg

SEQ ID NO: 1049536 - DNA, 25 bp, Homo sapien
gagaagcatctatccagcaccttct

SEQ ID NO: 1049537 - DNA, 25 bp, Homo sapien
tcaatgctgtcccttgatgtcctag

SEQ ID NO: 1049538 - DNA, 25 bp, Homo sapien
tagcgctgtcatcagtacctgccca

SEQ ID NO: 1049539 - DNA, 25 bp, Homo sapien
gacgaaacccggagcttgagtccat

SEQ ID NO: 1049540 - DNA, 25 bp, Homo sapien
cccttgatgtcctagttgctgctcc

SEQ ID NO: 1049541 - DNA, 25 bp, Homo sapien
gatggccacggtgaagaacttcttc

SEQ ID NO: 1049542 - DNA, 25 bp, Homo sapien
aggatggccacggtgaagaacttct

SEQ ID NO: 1049543 - DNA, 25 bp, Homo sapien
caaggatggccacggtgaagaactt

SEQ ID NO: 1049544 - DNA, 25 bp, Homo sapien
agcaaggatggccacggtgaagaac

SEQ ID NO: 1049545 - DNA, 25 bp, Homo sapien
tcagtggaaccataactcaggcgcc

SEQ ID NO: 1049546 - DNA, 25 bp, Homo sapien
tattacaggctgatactggctggag

SEQ ID NO: 1049547 - DNA, 25 bp, Homo sapien
caagaagtctacgtggccatgcaca

SEQ ID NO: 1049548 - DNA, 25 bp, Homo sapien
gacaattcggtgctctgatcgctaa

SEQ ID NO: 1049549 - DNA, 25 bp, Homo sapien
tcatccttgggctggccacggcccc

SEQ ID NO: 1049550 - DNA, 25 bp, Homo sapien
caaccgtagcccacgaaggacagga

SEQ ID NO: 1049551 - DNA, 25 bp, Homo sapien
aggatggcgctcctccctgtgacgg

SEQ ID NO: 1049552 - DNA, 25 bp, Homo sapien
acagtagcaaccgtagcccacgaag

SEQ ID NO: 1049553 - DNA, 25 bp, Homo sapien
gaacatagtcaaagaccaggctctg

SEQ ID NO: 1049554 - DNA, 25 bp, Homo sapien
tgtgtgactgctctcccatgtgtgt

SEQ ID NO: 1049555 - DNA, 25 bp, Homo sapien
gtgatacaaacttggtgctgcctgc

SEQ ID NO: 1049556 - DNA, 25 bp, Homo sapien
caaaggtcccttcctagagagagga

SEQ ID NO: 1049557 - DNA, 25 bp, Homo sapien
atagtggtccacataggggtgacag

SEQ ID NO: 1049558 - DNA, 25 bp, Homo sapien
cagtgttgttctcgatggtgtgatc

SEQ ID NO: 1049559 - DNA, 25 bp, Homo sapien
gttgttctcgatggtgtgatcatag

SEQ ID NO: 1049560 - DNA, 25 bp, Homo sapien
actatctcagtgttgttctcgatgg

SEQ ID NO: 1049561 - DNA, 25 bp, Homo sapien
cctcagggggcggttcatagatgct

SEQ ID NO: 1049562 - DNA, 25 bp, Homo sapien
ggccctggcagtagacattgaggaa

SEQ ID NO: 1049563 - DNA, 25 bp, Homo sapien
ctcggtacgtctggttcatgaggca

SEQ ID NO: 1049564 - DNA, 25 bp, Homo sapien
cattgaggaagccacggtactcctc

SEQ ID NO: 1049565 - DNA, 25 bp, Homo sapien
gggcgctggggattggtgactgcag

SEQ ID NO: 1049566 - DNA, 25 bp, Homo sapien
gcgctggggattggtgactgcaggt

SEQ ID NO: 1049567 - DNA, 25 bp, Homo sapien
cgctggggattggtgactgcaggtg

SEQ ID NO: 1049568 - DNA, 25 bp, Homo sapien
gggggcgctggggattggtgactgc

SEQ ID NO: 1049569 - DNA, 25 bp, Homo sapien
tagggtctgaacctggactcatggc

SEQ ID NO: 1049570 - DNA, 25 bp, Homo sapien
ggaacccatgctttgtgaccagcaa

SEQ ID NO: 1049571 - DNA, 25 bp, Homo sapien
tcttgggccgaggatgcatccagct

SEQ ID NO: 1049572 - DNA, 25 bp, Homo sapien
caccaatgggacttgtgacgcctgc

SEQ ID NO: 1049573 - DNA, 25 bp, Homo sapien
gggagtcactgtgtcctcccccgac

SEQ ID NO: 1049574 - DNA, 25 bp, Homo sapien
cagggggagtcactgtgtcctcccc

SEQ ID NO: 1049575 - DNA, 25 bp, Homo sapien
gagtcactgtgtcctcccccgacac

SEQ ID NO: 1049576 - DNA, 25 bp, Homo sapien
aagcagggggagtcactgtgtcctc

SEQ ID NO: 1049577 - DNA, 25 bp, Homo sapien
gcatcaggacctcggtctctcctcc

SEQ ID NO: 1049578 - DNA, 25 bp, Homo sapien
caggtgcccacatcataattcagga

SEQ ID NO: 1049579 - DNA, 25 bp, Homo sapien
aggtgcccacatcataattcaggag

SEQ ID NO: 1049580 - DNA, 25 bp, Homo sapien
ggagaactggatgggccggcatcag

SEQ ID NO: 1049581 - DNA, 25 bp, Homo sapien
ctgcctccaccgtccatcagtcacc

SEQ ID NO: 1049582 - DNA, 25 bp, Homo sapien
agagccgcccacagggatacttcac

SEQ ID NO: 1049583 - DNA, 25 bp, Homo sapien
gccagagccgcccacagggatactt

SEQ ID NO: 1049584 - DNA, 25 bp, Homo sapien
ccgcccacagggatacttcacaggg

SEQ ID NO: 1049585 - DNA, 25 bp, Homo sapien
gcctgccatgcaccactctgataag

SEQ ID NO: 1049586 - DNA, 25 bp, Homo sapien
tgccatgcaccactctgataaggca

SEQ ID NO: 1049587 - DNA, 25 bp, Homo sapien
cgtattccagttgtccagactccaa

SEQ ID NO: 1049588 - DNA, 25 bp, Homo sapien
tgcaccactctgataaggcatccca

SEQ ID NO: 1049589 - DNA, 25 bp, Homo sapien
ttatgacttcgtacagaggtttggc

SEQ ID NO: 1049590 - DNA, 25 bp, Homo sapien
taaagaaagcgtccttcaggcccag

SEQ ID NO: 1049591 - DNA, 25 bp, Homo sapien
tcccaagtaacgtacctcctgttga

SEQ ID NO: 1049592 - DNA, 25 bp, Homo sapien
ggtgccagagcagggtatccattcc

SEQ ID NO: 1049593 - DNA, 25 bp, Homo sapien
ttccaacagggataaactagttcca

SEQ ID NO: 1049594 - DNA, 25 bp, Homo sapien
catgggttgtccaagcttggtctca

SEQ ID NO: 1049595 - DNA, 25 bp, Homo sapien
tggtcacttcttgggctgcatatct

SEQ ID NO: 1049596 - DNA, 25 bp, Homo sapien
actagttccaatgggttatagcaca

SEQ ID NO: 1049597 - DNA, 25 bp, Homo sapien
gtccccagataaggtcctccagcag

SEQ ID NO: 1049598 - DNA, 25 bp, Homo sapien
aggtgagccctttctagtccccaga

SEQ ID NO: 1049599 - DNA, 25 bp, Homo sapien
cagcctgtgttgaacagctaccagt

SEQ ID NO: 1049600 - DNA, 25 bp, Homo sapien
taccagttccacatcgtcaatggcg

SEQ ID NO: 1049601 - DNA, 25 bp, Homo sapien
tcgcagggaatgcacgagacagtga

SEQ ID NO: 1049602 - DNA, 25 bp, Homo sapien
ccttggaagggcaactgacgcttat

SEQ ID NO: 1049603 - DNA, 25 bp, Homo sapien
ggactggcgattggcatacaaacct

SEQ ID NO: 1049604 - DNA, 25 bp, Homo sapien
gagacagtgataccagcccatttga

SEQ ID NO: 1049605 - DNA, 25 bp, Homo sapien
tctctttcaattgagtcacaataac

SEQ ID NO: 1049606 - DNA, 25 bp, Homo sapien
tctttcaattgagtcacaataactt

SEQ ID NO: 1049607 - DNA, 25 bp, Homo sapien
ctgtctctttcaattgagtcacaat

SEQ ID NO: 1049608 - DNA, 25 bp, Homo sapien
gtctctttcaattgagtcacaataa

SEQ ID NO: 1049609 - DNA, 25 bp, Homo sapien
ctgggaaacagtttggggtctactg

SEQ ID NO: 1049610 - DNA, 25 bp, Homo sapien
ctactggagactgatagactctttt

SEQ ID NO: 1049611 - DNA, 25 bp, Homo sapien
tgagtggaggtttgtccagatccat

SEQ ID NO: 1049612 - DNA, 25 bp, Homo sapien
cttttgctggattcgttgagtggag

SEQ ID NO: 1049613 - DNA, 25 bp, Homo sapien
aatgaagctgagcagcttgttagaa

SEQ ID NO: 1049614 - DNA, 25 bp, Homo sapien
tgagaaatgaagctgagcagcttgt

SEQ ID NO: 1049615 - DNA, 25 bp, Homo sapien
gagaaatgaagctgagcagcttgtt

SEQ ID NO: 1049616 - DNA, 25 bp, Homo sapien
gaaatgaagctgagcagcttgttag

SEQ ID NO: 1049617 - DNA, 25 bp, Homo sapien
cttggctactgttgaccaagtattt

SEQ ID NO: 1049618 - DNA, 25 bp, Homo sapien
ctgttgaccaagtattttcaccttc

SEQ ID NO: 1049619 - DNA, 25 bp, Homo sapien
ggccagaatcattgtctccacctct

SEQ ID NO: 1049620 - DNA, 25 bp, Homo sapien
gagcttgtggaatcttgctggcatt

SEQ ID NO: 1049621 - DNA, 25 bp, Homo sapien
gctctccagtgttgtgtaatgccca

SEQ ID NO: 1049622 - DNA, 25 bp, Homo sapien
agtgttgtgtaatgcccagccccag

SEQ ID NO: 1049623 - DNA, 25 bp, Homo sapien
gccttttgctctccagtgttgtgta

SEQ ID NO: 1049624 - DNA, 25 bp, Homo sapien
ggaggaaaggaaggcgccagtccat

SEQ ID NO: 1049625 - DNA, 25 bp, Homo sapien
tgcgcccgggctctgtcctgctggt

SEQ ID NO: 1049626 - DNA, 25 bp, Homo sapien
tctgtcctgctggtaaacaaccctg

SEQ ID NO: 1049627 - DNA, 25 bp, Homo sapien
ctagccgttccgctccatccgccgc

SEQ ID NO: 1049628 - DNA, 25 bp, Homo sapien
tgctggtaaacaaccctggtctccc

SEQ ID NO: 1049629 - DNA, 25 bp, Homo sapien
ctagaaggcaacaggcttaagaggc

SEQ ID NO: 1049630 - DNA, 25 bp, Homo sapien
tagaaggcaacaggcttaagaggca

SEQ ID NO: 1049631 - DNA, 25 bp, Homo sapien
caggcttaagaggcagaggagggat

SEQ ID NO: 1049632 - DNA, 25 bp, Homo sapien
caacaggcttaagaggcagaggagg

SEQ ID NO: 1049633 - DNA, 25 bp, Homo sapien
tcaattaagtccaagttccagcgcc

SEQ ID NO: 1049634 - DNA, 25 bp, Homo sapien
tggggatgattccagcgtcagaagg

SEQ ID NO: 1049635 - DNA, 25 bp, Homo sapien
gggatgattccagcgtcagaagggc

SEQ ID NO: 1049636 - DNA, 25 bp, Homo sapien
gatgattccagcgtcagaagggcag

SEQ ID NO: 1049637 - DNA, 25 bp, Homo sapien
atgattccagcgtcagaagggcagg

SEQ ID NO: 1049638 - DNA, 25 bp, Homo sapien
atttattttaggcacttgcgagaga

SEQ ID NO: 1049639 - DNA, 25 bp, Homo sapien
aattattatagtgaggaaagacagg

SEQ ID NO: 1049640 - DNA, 25 bp, Homo sapien
ccgaagtccttgcaatgtaaattat

SEQ ID NO: 1049641 - DNA, 25 bp, Homo sapien
gagagatcagcaaaccgaagtcctt

SEQ ID NO: 1049642 - DNA, 25 bp, Homo sapien
tgacaacagtgctacactcaggtgg

SEQ ID NO: 1049643 - DNA, 25 bp, Homo sapien
catggtgcccgtctcgtcttggtaa

SEQ ID NO: 1049644 - DNA, 25 bp, Homo sapien
ggtatatgatgagcgcacacctcca

SEQ ID NO: 1049645 - DNA, 25 bp, Homo sapien
tcttggtaaagagcccggatactgc

SEQ ID NO: 1049646 - DNA, 25 bp, Homo sapien
tgttggtgatctaacagcaagcagc

SEQ ID NO: 1049647 - DNA, 25 bp, Homo sapien
aaatcatctgttggccggaaatggc

SEQ ID NO: 1049648 - DNA, 25 bp, Homo sapien
ccctgtttcttggttcggacgatga

SEQ ID NO: 1049649 - DNA, 25 bp, Homo sapien
gttcttggtccgatggttcctccag

SEQ ID NO: 1049650 - DNA, 25 bp, Homo sapien
gatttggtgaggtcagaaaatcgcc

SEQ ID NO: 1049651 - DNA, 25 bp, Homo sapien
tggtgaggtcagaaaatcgcctcct

SEQ ID NO: 1049652 - DNA, 25 bp, Homo sapien
aggtcagaaaatcgcctcctgggca

SEQ ID NO: 1049653 - DNA, 25 bp, Homo sapien
ccagcacagacttgtgggggattct

SEQ ID NO: 1049654 - DNA, 25 bp, Homo sapien
ggagacttcttagcgcgctcggcat

SEQ ID NO: 1049655 - DNA, 25 bp, Homo sapien
gctcggcataggcacagacttcact

SEQ ID NO: 1049656 - DNA, 25 bp, Homo sapien
caagccggtgttcgaaaaggaccat

SEQ ID NO: 1049657 - DNA, 25 bp, Homo sapien
tccacatggcacttgaaacaggctg

SEQ ID NO: 1049658 - DNA, 25 bp, Homo sapien
gatgctcgggcacatggtctctcag

SEQ ID NO: 1049659 - DNA, 25 bp, Homo sapien
gaagttggaaacacaagaccccatg

SEQ ID NO: 1049660 - DNA, 25 bp, Homo sapien
tcatgccggtcaaccagatgctcgg

SEQ ID NO: 1049661 - DNA, 25 bp, Homo sapien
ccatgcatggtaaagggctacttcc

SEQ ID NO: 1049662 - DNA, 25 bp, Homo sapien
caaaaaaaaaatgtttattatgatg

SEQ ID NO: 1049663 - DNA, 25 bp, Homo sapien
tcaggtgactcttatccagacaagc

SEQ ID NO: 1049664 - DNA, 25 bp, Homo sapien
gcaatgcaacatgtggagccatcag

SEQ ID NO: 1049665 - DNA, 25 bp, Homo sapien
gctgggtccccagatattctcaggg

SEQ ID NO: 1049666 - DNA, 25 bp, Homo sapien
caggagtgccctgccttgaaggctg

SEQ ID NO: 1049667 - DNA, 25 bp, Homo sapien
gatattggtcaagctaagtccacct

SEQ ID NO: 1049668 - DNA, 25 bp, Homo sapien
cagagatttgtgcttccgcgtcgac

SEQ ID NO: 1049669 - DNA, 25 bp, Homo sapien
tgattgctaactcctccgaagcgac

SEQ ID NO: 1049670 - DNA, 25 bp, Homo sapien
taaaggcacacagatgaacgtcaga

SEQ ID NO: 1049671 - DNA, 25 bp, Homo sapien
cagagtggacccatgacatctacat

SEQ ID NO: 1049672 - DNA, 25 bp, Homo sapien
gagtggacccatgacatctacatct

SEQ ID NO: 1049673 - DNA, 25 bp, Homo sapien
cagccagagtggacccatgacatct

SEQ ID NO: 1049674 - DNA, 25 bp, Homo sapien
ccagagtggacccatgacatctaca

SEQ ID NO: 1049675 - DNA, 25 bp, Homo sapien
gcatctgacccagagtgacactgtg

SEQ ID NO: 1049676 - DNA, 25 bp, Homo sapien
tttgaagacatccatcgggcaccac

SEQ ID NO: 1049677 - DNA, 25 bp, Homo sapien
tggtccttcccctaacaggctggaa

SEQ ID NO: 1049678 - DNA, 25 bp, Homo sapien
tcggcagccaagagcggatttgaag

SEQ ID NO: 1049679 - DNA, 25 bp, Homo sapien
tgcatgtgtgcctactggcaagaaa

SEQ ID NO: 1049680 - DNA, 25 bp, Homo sapien
tatctctgaccaaaaggattatgga

SEQ ID NO: 1049681 - DNA, 25 bp, Homo sapien
caacatgttgaagtattactcagtc

SEQ ID NO: 1049682 - DNA, 25 bp, Homo sapien
ttaactgtgtttgctaagattacaa

SEQ ID NO: 1049683 - DNA, 25 bp, Homo sapien
tgaagttgttacgtgctttgctata

SEQ ID NO: 1049684 - DNA, 25 bp, Homo sapien
cctaaagaagtaattcaaaagatgc

SEQ ID NO: 1049685 - DNA, 25 bp, Homo sapien
tgctatataatgcattgaaaagtaa

SEQ ID NO: 1049686 - DNA, 25 bp, Homo sapien
tcatgtaatttgacctaccaatcct

SEQ ID NO: 1049687 - DNA, 25 bp, Homo sapien
tagacaggttgatgccagatgcctt

SEQ ID NO: 1049688 - DNA, 25 bp, Homo sapien
gtacatgtcaatttctctcttgagc

SEQ ID NO: 1049689 - DNA, 25 bp, Homo sapien
ggactgaggactctagacaggttga

SEQ ID NO: 1049690 - DNA, 25 bp, Homo sapien
acagcctcttgggtggactgtgaat

SEQ ID NO: 1049691 - DNA, 25 bp, Homo sapien
tcaatatgtgcttaccagccaggca

SEQ ID NO: 1049692 - DNA, 25 bp, Homo sapien
tggcgcccggtgtaaatgcttcaga

SEQ ID NO: 1049693 - DNA, 25 bp, Homo sapien
gaaatgacacgctggtacagcaggc

SEQ ID NO: 1049694 - DNA, 25 bp, Homo sapien
tcagagggctcgatagcaattgttg

SEQ ID NO: 1049695 - DNA, 25 bp, Homo sapien
gcagcactggcttagagaagataca

SEQ ID NO: 1049696 - DNA, 25 bp, Homo sapien
tagttgaggtaaggtcagcagcact

SEQ ID NO: 1049697 - DNA, 25 bp, Homo sapien
gagacctggaattgagccctggtga

SEQ ID NO: 1049698 - DNA, 25 bp, Homo sapien
gagcttgcacttcaccacccatgat

SEQ ID NO: 1049699 - DNA, 25 bp, Homo sapien
gcgcctggccgagtaaaggaatttc

SEQ ID NO: 1049700 - DNA, 25 bp, Homo sapien
cgcgcctggccgagtaaaggaattt

SEQ ID NO: 1049701 - DNA, 25 bp, Homo sapien
cgcctggccgagtaaaggaatttct

SEQ ID NO: 1049702 - DNA, 25 bp, Homo sapien
gaagtgttggaagaagcccagactg

SEQ ID NO: 1049703 - DNA, 25 bp, Homo sapien
tcacaggccagtgacaatgacagtg

SEQ ID NO: 1049704 - DNA, 25 bp, Homo sapien
ggaagaagcccagactgcatgtcca

SEQ ID NO: 1049705 - DNA, 25 bp, Homo sapien
cagtgttggaggaagtgttggaaga

SEQ ID NO: 1049706 - DNA, 25 bp, Homo sapien
gccctgaaactcacacaggataaga

SEQ ID NO: 1049707 - DNA, 25 bp, Homo sapien
gaggggccacagagggtcactcgtg

SEQ ID NO: 1049708 - DNA, 25 bp, Homo sapien
aaattacactgggttagggagcagg

SEQ ID NO: 1049709 - DNA, 25 bp, Homo sapien
caatcggccctgaaactcacacagg

SEQ ID NO: 1049710 - DNA, 25 bp, Homo sapien
tgaacaaatgccctcgggagcgctc

SEQ ID NO: 1049711 - DNA, 25 bp, Homo sapien
tcggccaagtggaacccctgaacaa

SEQ ID NO: 1049712 - DNA, 25 bp, Homo sapien
gcctccgctgtgctcggccaagtgg

SEQ ID NO: 1049713 - DNA, 25 bp, Homo sapien
gcagagccggattgcaccctcttgg

SEQ ID NO: 1049714 - DNA, 25 bp, Homo sapien
ttcagatggaggacgcagaaaggtt

SEQ ID NO: 1049715 - DNA, 25 bp, Homo sapien
ctttcagatggaggacgcagaaagg

SEQ ID NO: 1049716 - DNA, 25 bp, Homo sapien
tttcagatggaggacgcagaaaggt

SEQ ID NO: 1049717 - DNA, 25 bp, Homo sapien
gagaggccggctattctcttctgcc

SEQ ID NO: 1049718 - DNA, 25 bp, Homo sapien
ggctgtgacccttgatataggagga

SEQ ID NO: 1049719 - DNA, 25 bp, Homo sapien
gcaagaatttttgtcagcctaccaa

SEQ ID NO: 1049720 - DNA, 25 bp, Homo sapien
caagcacttgtcttctgccatcagt

SEQ ID NO: 1049721 - DNA, 25 bp, Homo sapien
taggtgctattgtcaaggccgatgc

SEQ ID NO: 1049722 - DNA, 25 bp, Homo sapien
tgctcccaaagtcagcatgtcaaag

SEQ ID NO: 1049723 - DNA, 25 bp, Homo sapien
tgccgtttgcatgaataaccagagc

SEQ ID NO: 1049724 - DNA, 25 bp, Homo sapien
taaccagagcatttcccatttgggc

SEQ ID NO: 1049725 - DNA, 25 bp, Homo sapien
ctaaagtagcccgcgagtcccgccg

SEQ ID NO: 1049726 - DNA, 25 bp, Homo sapien
ctctccccacccacgaacatggccg

SEQ ID NO: 1049727 - DNA, 25 bp, Homo sapien
tagcccgcgagtcccgccgtccgag

SEQ ID NO: 1049728 - DNA, 25 bp, Homo sapien
tctccccacccacgaacatggccgt

SEQ ID NO: 1049729 - DNA, 25 bp, Homo sapien
tggagtcaggatttgaacccaggta

SEQ ID NO: 1049730 - DNA, 25 bp, Homo sapien
gtagcgtgtggtggagtcaggattt

SEQ ID NO: 1049731 - DNA, 25 bp, Homo sapien
tggtggagtcaggatttgaacccag

SEQ ID NO: 1049732 - DNA, 25 bp, Homo sapien
tagcgtgtggtggagtcaggatttg

SEQ ID NO: 1049733 - DNA, 25 bp, Homo sapien
gctattatctggtgactggactggg

SEQ ID NO: 1049734 - DNA, 25 bp, Homo sapien
caagtagggtgatcagccatgctgc

SEQ ID NO: 1049735 - DNA, 25 bp, Homo sapien
gctgctttgcatgggactatcctgg

SEQ ID NO: 1049736 - DNA, 25 bp, Homo sapien
tcagccttgggcagatcaggatcat

SEQ ID NO: 1049737 - DNA, 25 bp, Homo sapien
caccaaccccaggccggagaagcca

SEQ ID NO: 1049738 - DNA, 25 bp, Homo sapien
gcactggtgttgaggacaccaaccc

SEQ ID NO: 1049739 - DNA, 25 bp, Homo sapien
taagaggtgaactcagaacccgaga

SEQ ID NO: 1049740 - DNA, 25 bp, Homo sapien
gggctgtcaatcgaggtatcctgtc

SEQ ID NO: 1049741 - DNA, 25 bp, Homo sapien
tatgataagacagccctgatgctcc

SEQ ID NO: 1049742 - DNA, 25 bp, Homo sapien
tgtgaaaataatggaccccttggcg

SEQ ID NO: 1049743 - DNA, 25 bp, Homo sapien
gcttgtgcctcacaaatggctcctt

SEQ ID NO: 1049744 - DNA, 25 bp, Homo sapien
tgggagagactttgtctggcagaca

SEQ ID NO: 1049745 - DNA, 25 bp, Homo sapien
atgggagagactttgtctggcagac

SEQ ID NO: 1049746 - DNA, 25 bp, Homo sapien
gtgcctcacaaatggctcctttcca

SEQ ID NO: 1049747 - DNA, 25 bp, Homo sapien
cattgggcctcctgtggggtttgtt

SEQ ID NO: 1049748 - DNA, 25 bp, Homo sapien
tgggcctcctgtggggtttgttgta

SEQ ID NO: 1049749 - DNA, 25 bp, Homo sapien
tcattgggcctcctgtggggtttgt

SEQ ID NO: 1049750 - DNA, 25 bp, Homo sapien
attgggcctcctgtggggtttgttg

SEQ ID NO: 1049751 - DNA, 25 bp, Homo sapien
agttcgatacttacacttgctcacc

SEQ ID NO: 1049752 - DNA, 25 bp, Homo sapien
ttcgatacttacacttgctcacctt

SEQ ID NO: 1049753 - DNA, 25 bp, Homo sapien
cttcagttcgatacttacacttgct

SEQ ID NO: 1049754 - DNA, 25 bp, Homo sapien
tcagttcgatacttacacttgctca

SEQ ID NO: 1049755 - DNA, 25 bp, Homo sapien
cttaccccagaagcaacacgtgtct

SEQ ID NO: 1049756 - DNA, 25 bp, Homo sapien
acattgcgatagctgtttaggtggc

SEQ ID NO: 1049757 - DNA, 25 bp, Homo sapien
gcagctggcttgatcaatgcccaca

SEQ ID NO: 1049758 - DNA, 25 bp, Homo sapien
gaagcaacacgtgtctgggtacaca

SEQ ID NO: 1049759 - DNA, 25 bp, Homo sapien
gagccataaccagcattcgcatcat

SEQ ID NO: 1049760 - DNA, 25 bp, Homo sapien
tcacagagccataaccagcattcgc

SEQ ID NO: 1049761 - DNA, 25 bp, Homo sapien
ccagcattcgcatcattggtaacaa

SEQ ID NO: 1049762 - DNA, 25 bp, Homo sapien
cataaccagcattcgcatcattggt

SEQ ID NO: 1049763 - DNA, 25 bp, Homo sapien
ggcaaggttggtattgcccctcttc

SEQ ID NO: 1049764 - DNA, 25 bp, Homo sapien
caaggttggtattgcccctcttctt

SEQ ID NO: 1049765 - DNA, 25 bp, Homo sapien
tcaggcaaggttggtattgcccctc

SEQ ID NO: 1049766 - DNA, 25 bp, Homo sapien
caggcaaggttggtattgcccctct

SEQ ID NO: 1049767 - DNA, 25 bp, Homo sapien
gtgtgccacacagcgtgtctttgtc

SEQ ID NO: 1049768 - DNA, 25 bp, Homo sapien
agtgtgccacacagcgtgtctttgt

SEQ ID NO: 1049769 - DNA, 25 bp, Homo sapien
ctactcatccttcatggtcaacttg

SEQ ID NO: 1049770 - DNA, 25 bp, Homo sapien
ccttcatggtcaacttgggtcccct

SEQ ID NO: 1049771 - DNA, 25 bp, Homo sapien
atccttcatggtcaacttgggtccc

SEQ ID NO: 1049772 - DNA, 25 bp, Homo sapien
ctcatccttcatggtcaacttgggt

SEQ ID NO: 1049773 - DNA, 25 bp, Homo sapien
cccgctggctactcagccttcagaa

SEQ ID NO: 1049774 - DNA, 25 bp, Homo sapien
cgtgatccaattcagcaagccgggc

SEQ ID NO: 1049775 - DNA, 25 bp, Homo sapien
ttaggcccagggcataaccgctgac

SEQ ID NO: 1049776 - DNA, 25 bp, Homo sapien
cttccaggttgccataggtgaggga

SEQ ID NO: 1049777 - DNA, 25 bp, Homo sapien
gaggtaacatcagacgcggtgaggg

SEQ ID NO: 1049778 - DNA, 25 bp, Homo sapien
tcaaagccgatcaccgtggtgcact

SEQ ID NO: 1049779 - DNA, 25 bp, Homo sapien
tttgtccttgatctgtactgtcacg

SEQ ID NO: 1049780 - DNA, 25 bp, Homo sapien
gacacggtcggcaatgactgcctca

SEQ ID NO: 1049781 - DNA, 25 bp, Homo sapien
gatcgaacatgggaggcatcgaagt

SEQ ID NO: 1049782 - DNA, 25 bp, Homo sapien
tttcccggtgtgcaggaatgagggg

SEQ ID NO: 1049783 - DNA, 25 bp, Homo sapien
ctttcccggtgtgcaggaatgaggg

SEQ ID NO: 1049784 - DNA, 25 bp, Homo sapien
cgctccaaatcctcgtccaaggtca

SEQ ID NO: 1049785 - DNA, 25 bp, Homo sapien
tgaagatggtgacattctccatggg

SEQ ID NO: 1049786 - DNA, 25 bp, Homo sapien
agcaggcagaaggaccctcacagcc

SEQ ID NO: 1049787 - DNA, 25 bp, Homo sapien
agcgttgggagctccgaggaggtgc

SEQ ID NO: 1049788 - DNA, 25 bp, Homo sapien
cctgggcctgttggttggaggtgcc

SEQ ID NO: 1049789 - DNA, 25 bp, Homo sapien
ccctgggcctgttggttggaggtgc

SEQ ID NO: 1049790 - DNA, 25 bp, Homo sapien
ggaggtgccagtgctcttggtgcag

SEQ ID NO: 1049791 - DNA, 25 bp, Homo sapien
ccagtgctcttggtgcagaactggg

SEQ ID NO: 1049792 - DNA, 25 bp, Homo sapien
gcacaacttattccaggagcccggg

SEQ ID NO: 1049793 - DNA, 25 bp, Homo sapien
atggcccacggatctccagctggaa

SEQ ID NO: 1049794 - DNA, 25 bp, Homo sapien
cagctggaagttgaactcatactcc

SEQ ID NO: 1049795 - DNA, 25 bp, Homo sapien
acttcggtgttcaggagagtcgcca

SEQ ID NO: 1049796 - DNA, 25 bp, Homo sapien
agatgagtgacatgccagccccgtt

SEQ ID NO: 1049797 - DNA, 25 bp, Homo sapien
gagtgacatgccagccccgttaggg

SEQ ID NO: 1049798 - DNA, 25 bp, Homo sapien
ccagagatgagtgacatgccagccc

SEQ ID NO: 1049799 - DNA, 25 bp, Homo sapien
ggccagagatgagtgacatgccagc

SEQ ID NO: 1049800 - DNA, 25 bp, Homo sapien
acaggccggtcaaaggtgtgcttgt

SEQ ID NO: 1049801 - DNA, 25 bp, Homo sapien
gcggcgtcggcacgaatctcatgag

SEQ ID NO: 1049802 - DNA, 25 bp, Homo sapien
aatctcatgagtgggactctccacc

SEQ ID NO: 1049803 - DNA, 25 bp, Homo sapien
tccacaggccggtcaaaggtgtgct

SEQ ID NO: 1049804 - DNA, 25 bp, Homo sapien
cagcccaggggcccgttgtggggca

SEQ ID NO: 1049805 - DNA, 25 bp, Homo sapien
tatcaggacatggggcatatggggc

SEQ ID NO: 1049806 - DNA, 25 bp, Homo sapien
ctatcaggacatggggcatatgggg

SEQ ID NO: 1049807 - DNA, 25 bp, Homo sapien
atcaggacatggggcatatggggct

SEQ ID NO: 1049808 - DNA, 25 bp, Homo sapien
tcttcccttcaagtgctggtcaaac

SEQ ID NO: 1049809 - DNA, 25 bp, Homo sapien
tcttcatccctttaatgaaatctgt

SEQ ID NO: 1049810 - DNA, 25 bp, Homo sapien
ctctcccagggtcatgtcccctttc

SEQ ID NO: 1049811 - DNA, 25 bp, Homo sapien
aagtgctggtcaaactctcccaggg

SEQ ID NO: 1049812 - DNA, 25 bp, Homo sapien
tgtctctctcccacgtgaagccgct

SEQ ID NO: 1049813 - DNA, 25 bp, Homo sapien
ttgatgttcaccctgtggataccca

SEQ ID NO: 1049814 - DNA, 25 bp, Homo sapien
tgtggatacccacaacccactcttc

SEQ ID NO: 1049815 - DNA, 25 bp, Homo sapien
cctgccaagggatctcgctgtctct

SEQ ID NO: 1049816 - DNA, 25 bp, Homo sapien
tgctgatcccgctcatgctgctgct

SEQ ID NO: 1049817 - DNA, 25 bp, Homo sapien
tggaggcgttttcgaatgatttctg

SEQ ID NO: 1049818 - DNA, 25 bp, Homo sapien
tgaggaagatgaactccccgtgggc

SEQ ID NO: 1049819 - DNA, 25 bp, Homo sapien
cttgactcggtgcatgctgatcccg

SEQ ID NO: 1049820 - DNA, 25 bp, Homo sapien
agcttgctgccctggaaacaagagc

SEQ ID NO: 1049821 - DNA, 25 bp, Homo sapien
gagcttgctgccctggaaacaagag

SEQ ID NO: 1049822 - DNA, 25 bp, Homo sapien
gcttgctgccctggaaacaagagct

SEQ ID NO: 1049823 - DNA, 25 bp, Homo sapien
ggatccaaacccaatgatattgaag

SEQ ID NO: 1049824 - DNA, 25 bp, Homo sapien
aaaggctcttaaatgtggatccaaa

SEQ ID NO: 1049825 - DNA, 25 bp, Homo sapien
ctggcatgaggctcttaagggccac

SEQ ID NO: 1049826 - DNA, 25 bp, Homo sapien
tgaggctcttaagggccaccaacat

SEQ ID NO: 1049827 - DNA, 25 bp, Homo sapien
cagcgccatctgtgatcacgaagag

SEQ ID NO: 1049828 - DNA, 25 bp, Homo sapien
gagaaggcgtgatttcgcaccagct

SEQ ID NO: 1049829 - DNA, 25 bp, Homo sapien
gctgcctgatgacccacttgagagg

SEQ ID NO: 1049830 - DNA, 25 bp, Homo sapien
ggaaaggatgttggtcccacccatg

SEQ ID NO: 1049831 - DNA, 25 bp, Homo sapien
gtctgtggcagacgttgggtccaat

SEQ ID NO: 1049832 - DNA, 25 bp, Homo sapien
ccagtctgtggcagacgttgggtcc

SEQ ID NO: 1049833 - DNA, 25 bp, Homo sapien
gtggcagacgttgggtccaattcca

SEQ ID NO: 1049834 - DNA, 25 bp, Homo sapien
tcaccagtctgtggcagacgttggg

SEQ ID NO: 1049835 - DNA, 25 bp, Homo sapien
ccaggacctcagtggtctcagggaa

SEQ ID NO: 1049836 - DNA, 25 bp, Homo sapien
gtgcaaagaagcatcacatacaatg

SEQ ID NO: 1049837 - DNA, 25 bp, Homo sapien
agaagcatcacatacaatgccatac

SEQ ID NO: 1049838 - DNA, 25 bp, Homo sapien
agatctgggattggagatgtgcaaa

SEQ ID NO: 1049839 - DNA, 25 bp, Homo sapien
caaagaagcatcacatacaatgcca

SEQ ID NO: 1049840 - DNA, 25 bp, Homo sapien
cgggtccgtcatcctgagagtggta

SEQ ID NO: 1049841 - DNA, 25 bp, Homo sapien
cagcccgggtccgtcatcctgagag

SEQ ID NO: 1049842 - DNA, 25 bp, Homo sapien
tccgtcatcctgagagtggtagaag

SEQ ID NO: 1049843 - DNA, 25 bp, Homo sapien
cgtcatcctgagagtggtagaagac

SEQ ID NO: 1049844 - DNA, 25 bp, Homo sapien
catttttggcctgccctaggatgaa

SEQ ID NO: 1049845 - DNA, 25 bp, Homo sapien
tagagtctccgctggctagccgggc

SEQ ID NO: 1049846 - DNA, 25 bp, Homo sapien
ccccgagttcttggcacagtctcca

SEQ ID NO: 1049847 - DNA, 25 bp, Homo sapien
agggtgcccccgagttcttggcaca

SEQ ID NO: 1049848 - DNA, 25 bp, Homo sapien
gccctccgtcgctgagagaggttca

SEQ ID NO: 1049849 - DNA, 25 bp, Homo sapien
aatcaatctgccaccgctggacatc

SEQ ID NO: 1049850 - DNA, 25 bp, Homo sapien
ccgcagtgggtatctcttggcagct

SEQ ID NO: 1049851 - DNA, 25 bp, Homo sapien
gatctggttggtgctgtatgccctc

SEQ ID NO: 1049852 - DNA, 25 bp, Homo sapien
ttggcagtgtaagttgtggatggcc

SEQ ID NO: 1049853 - DNA, 25 bp, Homo sapien
cctgatttggaaggtgtcctcggag

SEQ ID NO: 1049854 - DNA, 25 bp, Homo sapien
aaggtgtcctcggaggtaaggcaga

SEQ ID NO: 1049855 - DNA, 25 bp, Homo sapien
cggtgggtgtcctgatttggaaggt

SEQ ID NO: 1049856 - DNA, 25 bp, Homo sapien
ggtgtcctcggaggtaaggcagatg

SEQ ID NO: 1049857 - DNA, 25 bp, Homo sapien
tcaaccaggtgatttagctccccag

SEQ ID NO: 1049858 - DNA, 25 bp, Homo sapien
tgttattcccaggaggcctctagcg

SEQ ID NO: 1049859 - DNA, 25 bp, Homo sapien
tctgtactgagccaaggtgggcccc

SEQ ID NO: 1049860 - DNA, 25 bp, Homo sapien
ccaagggatgctgccgaacattcta

SEQ ID NO: 1049861 - DNA, 25 bp, Homo sapien
tgtgttaagggcatttgcaggccgt

SEQ ID NO: 1049862 - DNA, 25 bp, Homo sapien
taagtgtttgatggcacccctgtgg

SEQ ID NO: 1049863 - DNA, 25 bp, Homo sapien
caggccgtttatagcaaaagtatcc

SEQ ID NO: 1049864 - DNA, 25 bp, Homo sapien
tggtacaaacagacatcaaaaggca

SEQ ID NO: 1049865 - DNA, 25 bp, Homo sapien
gtactcagggacgcatgacccagtc

SEQ ID NO: 1049866 - DNA, 25 bp, Homo sapien
tcagggacgcatgacccagtctcca

SEQ ID NO: 1049867 - DNA, 25 bp, Homo sapien
actcagggacgcatgacccagtctc

SEQ ID NO: 1049868 - DNA, 25 bp, Homo sapien
tactcagggacgcatgacccagtct

SEQ ID NO: 1049869 - DNA, 25 bp, Homo sapien
agaagtccgctctctcacagggctc

SEQ ID NO: 1049870 - DNA, 25 bp, Homo sapien
ggctgtcagaagtccgctctctcac

SEQ ID NO: 1049871 - DNA, 25 bp, Homo sapien
ctggttcaggtcctgaccactgttc

SEQ ID NO: 1049872 - DNA, 25 bp, Homo sapien
cagggcttcggctgtcagaagtccg

SEQ ID NO: 1049873 - DNA, 25 bp, Homo sapien
aggcctttgaccagggccttgccca

SEQ ID NO: 1049874 - DNA, 25 bp, Homo sapien
aggacgtctctgtctcgaaggcaga

SEQ ID NO: 1049875 - DNA, 25 bp, Homo sapien
cactgcaggcgttggctgtcgtgca

SEQ ID NO: 1049876 - DNA, 25 bp, Homo sapien
tctcgctccataggtcggcatcctg

SEQ ID NO: 1049877 - DNA, 25 bp, Homo sapien
ggcaggtaccggctcttgctcacgt

SEQ ID NO: 1049878 - DNA, 25 bp, Homo sapien
ctaatgatgttgcaggccttgctgg

SEQ ID NO: 1049879 - DNA, 25 bp, Homo sapien
ccacaggcacgaaggctgtgtattt

SEQ ID NO: 1049880 - DNA, 25 bp, Homo sapien
tgcaaggcgctcacttggtagcggc

SEQ ID NO: 1049881 - DNA, 25 bp, Homo sapien
gaagaggtgcccctccactgttggg

SEQ ID NO: 1049882 - DNA, 25 bp, Homo sapien
cgtctgcggccttccaaagccagaa

SEQ ID NO: 1049883 - DNA, 25 bp, Homo sapien
atcttctccaagcatcgtctgcggc

SEQ ID NO: 1049884 - DNA, 25 bp, Homo sapien
agagccaagcatacgcagggcagct

SEQ ID NO: 1049885 - DNA, 25 bp, Homo sapien
ccccctcacactgtgttctgtttct

SEQ ID NO: 1049886 - DNA, 25 bp, Homo sapien
aaaacccatcaatgtctgtgagcac

SEQ ID NO: 1049887 - DNA, 25 bp, Homo sapien
cccatcaatgtctgtgagcactttc

SEQ ID NO: 1049888 - DNA, 25 bp, Homo sapien
aacccatcaatgtctgtgagcactt

SEQ ID NO: 1049889 - DNA, 25 bp, Homo sapien
cagcaatttcctgaagactggaagt

SEQ ID NO: 1049890 - DNA, 25 bp, Homo sapien
agagagcagtgggacttgcctccat

SEQ ID NO: 1049891 - DNA, 25 bp, Homo sapien
aagcaccgtgcttctcgcggccggg

SEQ ID NO: 1049892 - DNA, 25 bp, Homo sapien
gagagcagtgggacttgcctccatg

SEQ ID NO: 1049893 - DNA, 25 bp, Homo sapien
ttcagaagcaccgtgcttctcgcgg

SEQ ID NO: 1049894 - DNA, 25 bp, Homo sapien
ctccttggcacgttgctagaggact

SEQ ID NO: 1049895 - DNA, 25 bp, Homo sapien
aagaaagagtatttgtagccaggct

SEQ ID NO: 1049896 - DNA, 25 bp, Homo sapien
acagctttgatcagtggcttgctca

SEQ ID NO: 1049897 - DNA, 25 bp, Homo sapien
tggttcccggaggtcgactccacag

SEQ ID NO: 1049898 - DNA, 25 bp, Homo sapien
cagaggtatgtagtcgaagctctgg

SEQ ID NO: 1049899 - DNA, 25 bp, Homo sapien
tgctcgcgtcagtagcctggacttg

SEQ ID NO: 1049900 - DNA, 25 bp, Homo sapien
gatgtgcgtggcctcacagaaggct

SEQ ID NO: 1049901 - DNA, 25 bp, Homo sapien
tcttggactcagacgggcgggtggt

SEQ ID NO: 1049902 - DNA, 25 bp, Homo sapien
tgagggacactcgatggcaggtgaa

SEQ ID NO: 1049903 - DNA, 25 bp, Homo sapien
tgaagggggacgtccacttgagctt

SEQ ID NO: 1049904 - DNA, 25 bp, Homo sapien
gagaagctgtcacaggacgggtgcc

SEQ ID NO: 1049905 - DNA, 25 bp, Homo sapien
ggacgggtgcctaggcggggagctg

SEQ ID NO: 1049906 - DNA, 25 bp, Homo sapien
gacgggtgcctaggcggggagctgg

SEQ ID NO: 1049907 - DNA, 25 bp, Homo sapien
aagctgtcacaggacgggtgcctag

SEQ ID NO: 1049908 - DNA, 25 bp, Homo sapien
cagtgccgcagaagcacaaacagct

SEQ ID NO: 1049909 - DNA, 25 bp, Homo sapien
tcagtgaagtaggaggccgaactgt

SEQ ID NO: 1049910 - DNA, 25 bp, Homo sapien
cataattcgggttatagcagagcat

SEQ ID NO: 1049911 - DNA, 25 bp, Homo sapien
cagccatgagttggccttggcagcc

SEQ ID NO: 1049912 - DNA, 25 bp, Homo sapien
caagcccctgaccttggacagatct

SEQ ID NO: 1049913 - DNA, 25 bp, Homo sapien
gcagagaggtccacggttgggagct

SEQ ID NO: 1049914 - DNA, 25 bp, Homo sapien
tgcggatcagattacccagctgcaa

SEQ ID NO: 1049915 - DNA, 25 bp, Homo sapien
ttgagaggctaaagtcaacgggctg

SEQ ID NO: 1049916 - DNA, 25 bp, Homo sapien
caaagcctagataatggtagccacc

SEQ ID NO: 1049917 - DNA, 25 bp, Homo sapien
tgtaattggctaccaggcaagcagg

SEQ ID NO: 1049918 - DNA, 25 bp, Homo sapien
tattagtggacattagacggctgac

SEQ ID NO: 1049919 - DNA, 25 bp, Homo sapien
cattacagatgagcaggcaagggca

SEQ ID NO: 1049920 - DNA, 25 bp, Homo sapien
gtggtctggatgcttctaggatgaa

SEQ ID NO: 1049921 - DNA, 25 bp, Homo sapien
aaatgagggcaactgctgcttgatg

SEQ ID NO: 1049922 - DNA, 25 bp, Homo sapien
agctaggctggactcgacttggcat

SEQ ID NO: 1049923 - DNA, 25 bp, Homo sapien
ttatcatagaggacgtgtgccgcct

SEQ ID NO: 1049924 - DNA, 25 bp, Homo sapien
cgcctggatcttccgacgtcagcag

SEQ ID NO: 1049925 - DNA, 25 bp, Homo sapien
gaccctggaggagcgtggagagatg

SEQ ID NO: 1049926 - DNA, 25 bp, Homo sapien
ccggagggagcggtttaattggcag

SEQ ID NO: 1049927 - DNA, 25 bp, Homo sapien
ttaaggacagctgcggctttgcggg

SEQ ID NO: 1049928 - DNA, 25 bp, Homo sapien
tccggctcccgcaaaatattctttg

SEQ ID NO: 1049929 - DNA, 25 bp, Homo sapien
ggtaaagcatgtctgtcaccaggca

SEQ ID NO: 1049930 - DNA, 25 bp, Homo sapien
tctccctgcttgttaggtgccaaaa

SEQ ID NO: 1049931 - DNA, 25 bp, Homo sapien
agaggtcctcagttgcctccggctc

SEQ ID NO: 1049932 - DNA, 25 bp, Homo sapien
tcattcagaactgaagacctgagct

SEQ ID NO: 1049933 - DNA, 25 bp, Homo sapien
cattcagaactgaagacctgagctg

SEQ ID NO: 1049934 - DNA, 25 bp, Homo sapien
ctcggcatctgggccattagcagag

SEQ ID NO: 1049935 - DNA, 25 bp, Homo sapien
tgggccattagcagagggactggca

SEQ ID NO: 1049936 - DNA, 25 bp, Homo sapien
cagttcttcaatattctgttatccg

SEQ ID NO: 1049937 - DNA, 25 bp, Homo sapien
atattctgttatccgcagggccacg

SEQ ID NO: 1049938 - DNA, 25 bp, Homo sapien
gttcctagtgcttcactcatacata

SEQ ID NO: 1049939 - DNA, 25 bp, Homo sapien
agggccacgcgctgttcctagtgct

SEQ ID NO: 1049940 - DNA, 25 bp, Homo sapien
taagcttttcggtcatgtaagagcc

SEQ ID NO: 1049941 - DNA, 25 bp, Homo sapien
tcattagcacataggatacggtacc

SEQ ID NO: 1049942 - DNA, 25 bp, Homo sapien
tcttcgagagataaggtaaactacc

SEQ ID NO: 1049943 - DNA, 25 bp, Homo sapien
taattaatacaacacagcctacagg

SEQ ID NO: 1049944 - DNA, 25 bp, Homo sapien
agaaactgggctatgttctctcctt

SEQ ID NO: 1049945 - DNA, 25 bp, Homo sapien
gctggggtgggatctgtgtccttca

SEQ ID NO: 1049946 - DNA, 25 bp, Homo sapien
gagccccaggcagcttgagcaaagc

SEQ ID NO: 1049947 - DNA, 25 bp, Homo sapien
cttgtgggaaccgtgggtaggtctg

SEQ ID NO: 1049948 - DNA, 25 bp, Homo sapien
agaaggcactgtgcccacggcagcc

SEQ ID NO: 1049949 - DNA, 25 bp, Homo sapien
tttgggccccgctgactctgagtgg

SEQ ID NO: 1049950 - DNA, 25 bp, Homo sapien
tcagacagagctgaggggttttcct

SEQ ID NO: 1049951 - DNA, 25 bp, Homo sapien
tttcctttgggccccgctgactctg

SEQ ID NO: 1049952 - DNA, 25 bp, Homo sapien
acagagctgaggggttttcctttgg

SEQ ID NO: 1049953 - DNA, 25 bp, Homo sapien
gagggtcatacaaatttctagcttc

SEQ ID NO: 1049954 - DNA, 25 bp, Homo sapien
ggagagggtcatacaaatttctagc

SEQ ID NO: 1049955 - DNA, 25 bp, Homo sapien
tggagagggtcatacaaatttctag

SEQ ID NO: 1049956 - DNA, 25 bp, Homo sapien
gagagggtcatacaaatttctagct

SEQ ID NO: 1049957 - DNA, 25 bp, Homo sapien
tcttaagtgctaaacgagcaggagg

SEQ ID NO: 1049958 - DNA, 25 bp, Homo sapien
gggtttgtggtcttgtataactgct

SEQ ID NO: 1049959 - DNA, 25 bp, Homo sapien
tcctccttgctacttgggtttgtgg

SEQ ID NO: 1049960 - DNA, 25 bp, Homo sapien
tataactgctgatagcttgaggcac

SEQ ID NO: 1049961 - DNA, 25 bp, Homo sapien
attggggaagggtcaacttgcagac

SEQ ID NO: 1049962 - DNA, 25 bp, Homo sapien
gaagggtcaacttgcagacaggaag

SEQ ID NO: 1049963 - DNA, 25 bp, Homo sapien
ggaagggtcaacttgcagacaggaa

SEQ ID NO: 1049964 - DNA, 25 bp, Homo sapien
ggggaagggtcaacttgcagacagg

SEQ ID NO: 1049965 - DNA, 25 bp, Homo sapien
tagggtgcggttggcatcaagagca

SEQ ID NO: 1049966 - DNA, 25 bp, Homo sapien
agggtgcggttggcatcaagagcag

SEQ ID NO: 1049967 - DNA, 25 bp, Homo sapien
ggtagggtgcggttggcatcaagag

SEQ ID NO: 1049968 - DNA, 25 bp, Homo sapien
agggtagggtgcggttggcatcaag

SEQ ID NO: 1049969 - DNA, 25 bp, Homo sapien
ctgggtctttgattcctgggtcaga

SEQ ID NO: 1049970 - DNA, 25 bp, Homo sapien
gcaggaggccccgtgtcatggtgtg

SEQ ID NO: 1049971 - DNA, 25 bp, Homo sapien
gtgtgagctgtgaccccggccaggg

SEQ ID NO: 1049972 - DNA, 25 bp, Homo sapien
cttctgggtctttgattcctgggtc

SEQ ID NO: 1049973 - DNA, 25 bp, Homo sapien
catgccaggagctttacaccaaaat

SEQ ID NO: 1049974 - DNA, 25 bp, Homo sapien
aattgccaatattgtagagctggcc

SEQ ID NO: 1049975 - DNA, 25 bp, Homo sapien
tgttggtgccctctacatgccagga

SEQ ID NO: 1049976 - DNA, 25 bp, Homo sapien
catggacccggactgtctgtcttct

SEQ ID NO: 1049977 - DNA, 25 bp, Homo sapien
caagtgaagagcagcgcctggggta

SEQ ID NO: 1049978 - DNA, 25 bp, Homo sapien
aagtgaagagcagcgcctggggtac

SEQ ID NO: 1049979 - DNA, 25 bp, Homo sapien
tcaagtgaagagcagcgcctggggt

SEQ ID NO: 1049980 - DNA, 25 bp, Homo sapien
gtggggcttctccactcgatgtcct

SEQ ID NO: 1049981 - DNA, 25 bp, Homo sapien
gctccagagctaaacccaatttctt

SEQ ID NO: 1049982 - DNA, 25 bp, Homo sapien
ttctccactcgatgtcctccaagca

SEQ ID NO: 1049983 - DNA, 25 bp, Homo sapien
ttccccagctccagagctaaaccca

SEQ ID NO: 1049984 - DNA, 25 bp, Homo sapien
aggagtgtggttcccgatctcaacc

SEQ ID NO: 1049985 - DNA, 25 bp, Homo sapien
ggagtgtggttcccgatctcaacct

SEQ ID NO: 1049986 - DNA, 25 bp, Homo sapien
actaaactctgtagtttatttggat

SEQ ID NO: 1049987 - DNA, 25 bp, Homo sapien
tccttgcttttgatggactgttggt

SEQ ID NO: 1049988 - DNA, 25 bp, Homo sapien
ttgcttttgatggactgttggtcag

SEQ ID NO: 1049989 - DNA, 25 bp, Homo sapien
ggactgttggtcaggtaatttgtag

SEQ ID NO: 1049990 - DNA, 25 bp, Homo sapien
gcacctgggagctgatgggcaccat

SEQ ID NO: 1049991 - DNA, 25 bp, Homo sapien
ccagcacctgggagctgatgggcac

SEQ ID NO: 1049992 - DNA, 25 bp, Homo sapien
cagcacctgggagctgatgggcacc

SEQ ID NO: 1049993 - DNA, 25 bp, Homo sapien
tcccagcacctgggagctgatgggc

SEQ ID NO: 1049994 - DNA, 25 bp, Homo sapien
ggattctcttaaggcacaccagctg

SEQ ID NO: 1049995 - DNA, 25 bp, Homo sapien
tatctggtatcaggccgggagacag

SEQ ID NO: 1049996 - DNA, 25 bp, Homo sapien
gatgacgtgctgaaaaatatgaccg

SEQ ID NO: 1049997 - DNA, 25 bp, Homo sapien
taatgaagcggcaacaccaggtgtt

SEQ ID NO: 1049998 - DNA, 25 bp, Homo sapien
tcatgccccgggaaacagtctttct

SEQ ID NO: 1049999 - DNA, 25 bp, Homo sapien
aggctgggcaggtcaacttgtgttc

SEQ ID NO: 1050000 - DNA, 25 bp, Homo sapien
tacaacggatgccttgggtgctgcc

SEQ ID NO: 1050001 - DNA, 25 bp, Homo sapien
ggccccgggcaacagattgaagaga

SEQ ID NO: 1050002 - DNA, 25 bp, Homo sapien
gcagcttgattgtcacccgggcaac

SEQ ID NO: 1050003 - DNA, 25 bp, Homo sapien
catcgctgggcgactgatttcgagt

SEQ ID NO: 1050004 - DNA, 25 bp, Homo sapien
tcagtcatggccagtgcgccgtgtt

SEQ ID NO: 1050005 - DNA, 25 bp, Homo sapien
taatggcgaagacatggaataaccc

SEQ ID NO: 1050006 - DNA, 25 bp, Homo sapien
tccttcagggcgctttgcttcgcct

SEQ ID NO: 1050007 - DNA, 25 bp, Homo sapien
tcagggcgctttgcttcgccttctc

SEQ ID NO: 1050008 - DNA, 25 bp, Homo sapien
cttcagggcgctttgcttcgccttc

SEQ ID NO: 1050009 - DNA, 25 bp, Homo sapien
cctccttcagggcgctttgcttcgc

SEQ ID NO: 1050010 - DNA, 25 bp, Homo sapien
gaactgggtccctggatacaactcg

SEQ ID NO: 1050011 - DNA, 25 bp, Homo sapien
agcctgaggctgaactgggtccctg

SEQ ID NO: 1050012 - DNA, 25 bp, Homo sapien
cgtgggccacagttagcctcagttt

SEQ ID NO: 1050013 - DNA, 25 bp, Homo sapien
atacaactcggcgtgggccacagtt

SEQ ID NO: 1050014 - DNA, 25 bp, Homo sapien
ggttcctgtcgttctcaggaacgga

SEQ ID NO: 1050015 - DNA, 25 bp, Homo sapien
gacggggttcctgtcgttctcagga

SEQ ID NO: 1050016 - DNA, 25 bp, Homo sapien
agcaggctccttgataaagacgggg

SEQ ID NO: 1050017 - DNA, 25 bp, Homo sapien
aagacggggttcctgtcgttctcag

SEQ ID NO: 1050018 - DNA, 25 bp, Homo sapien
cacttcagatgcttcttgggaccat

SEQ ID NO: 1050019 - DNA, 25 bp, Homo sapien
cttcagatgcttcttgggaccataa

SEQ ID NO: 1050020 - DNA, 25 bp, Homo sapien
tcagatgcttcttgggaccataagc

SEQ ID NO: 1050021 - DNA, 25 bp, Homo sapien
gatgcttcttgggaccataagccat

SEQ ID NO: 1050022 - DNA, 25 bp, Homo sapien
aggagacatactctcagcttgtggg

SEQ ID NO: 1050023 - DNA, 25 bp, Homo sapien
ggaggagacatactctcagcttgtg

SEQ ID NO: 1050024 - DNA, 25 bp, Homo sapien
aatgatgaggaggagacatactctc

SEQ ID NO: 1050025 - DNA, 25 bp, Homo sapien
tgaggaggagacatactctcagctt

SEQ ID NO: 1050026 - DNA, 25 bp, Homo sapien
gagccgcagcatccaaatctttagt

SEQ ID NO: 1050027 - DNA, 25 bp, Homo sapien
tctctgatcagggcatacttaattc

SEQ ID NO: 1050028 - DNA, 25 bp, Homo sapien
tcagtttggaccttgtcgtcaatct

SEQ ID NO: 1050029 - DNA, 25 bp, Homo sapien
aatctttagttcatctctgatcagg

SEQ ID NO: 1050030 - DNA, 25 bp, Homo sapien
caaagtgaccctgatgttacaggtc

SEQ ID NO: 1050031 - DNA, 25 bp, Homo sapien
aaagtgaccctgatgttacaggtca

SEQ ID NO: 1050032 - DNA, 25 bp, Homo sapien
gctgtaatacggtgaatggcaaagt

SEQ ID NO: 1050033 - DNA, 25 bp, Homo sapien
ctcagctgtaatacggtgaatggca

SEQ ID NO: 1050034 - DNA, 25 bp, Homo sapien
ttttgtagccgcaagatttttctca

SEQ ID NO: 1050035 - DNA, 25 bp, Homo sapien
cttttgtagccgcaagatttttctc

SEQ ID NO: 1050036 - DNA, 25 bp, Homo sapien
gccagcatcattggttaccagatga

SEQ ID NO: 1050037 - DNA, 25 bp, Homo sapien
cagcatcattggttaccagatgagg

SEQ ID NO: 1050038 - DNA, 25 bp, Homo sapien
catcattggttaccagatgagggat

SEQ ID NO: 1050039 - DNA, 25 bp, Homo sapien
gtgccagcatcattggttaccagat

SEQ ID NO: 1050040 - DNA, 25 bp, Homo sapien
acttgatgacatcggtactcttgcc

SEQ ID NO: 1050041 - DNA, 25 bp, Homo sapien
gatgacatcggtactcttgccagta

SEQ ID NO: 1050042 - DNA, 25 bp, Homo sapien
catcggtactcttgccagtatccaa

SEQ ID NO: 1050043 - DNA, 25 bp, Homo sapien
accagtatcaaacttgatgacatcg

SEQ ID NO: 1050044 - DNA, 25 bp, Homo sapien
tctgtctcttcagcagtggtgaggt

SEQ ID NO: 1050045 - DNA, 25 bp, Homo sapien
gcagtggtgaggtggataccctttc

SEQ ID NO: 1050046 - DNA, 25 bp, Homo sapien
ttaggctgccagtctcttgtctgtc

SEQ ID NO: 1050047 - DNA, 25 bp, Homo sapien
tccttgggttttgttgcccttgcca

SEQ ID NO: 1050048 - DNA, 25 bp, Homo sapien
tgaccgtgccattatcaacaactgc

SEQ ID NO: 1050049 - DNA, 25 bp, Homo sapien
gtcacactcttgaccgtgccattat

SEQ ID NO: 1050050 - DNA, 25 bp, Homo sapien
gcattccccagtacaagaatgtagt

SEQ ID NO: 1050051 - DNA, 25 bp, Homo sapien
attatcaacaactgcagccccttca

SEQ ID NO: 1050052 - DNA, 25 bp, Homo sapien
catgtgtgctgcacattgaaggtct

SEQ ID NO: 1050053 - DNA, 25 bp, Homo sapien
tcctggtgatgtggcttctattccc

SEQ ID NO: 1050054 - DNA, 25 bp, Homo sapien
cagcaggctagagatcaagtggcca

SEQ ID NO: 1050055 - DNA, 25 bp, Homo sapien
gatcaagtggccataggtacatgtg

SEQ ID NO: 1050056 - DNA, 25 bp, Homo sapien
gagtggctgaggaccgcttttcccg

SEQ ID NO: 1050057 - DNA, 25 bp, Homo sapien
gacagtcgttgcctggagatgccca

SEQ ID NO: 1050058 - DNA, 25 bp, Homo sapien
ggctagcttcgcagatgcccggtgc

SEQ ID NO: 1050059 - DNA, 25 bp, Homo sapien
tttcccgggagtgtctccagccgtc

SEQ ID NO: 1050060 - DNA, 25 bp, Homo sapien
cgggggagggaaggcgcgcagaagt

SEQ ID NO: 1050061 - DNA, 25 bp, Homo sapien
gggagggaaggcgcgcagaagtcca

SEQ ID NO: 1050062 - DNA, 25 bp, Homo sapien
agggaaggcgcgcagaagtccaccg

SEQ ID NO: 1050063 - DNA, 25 bp, Homo sapien
ggaaggcgcgcagaagtccaccgcc

SEQ ID NO: 1050064 - DNA, 25 bp, Homo sapien
agatcttgcccacggcgtcgtcggt

SEQ ID NO: 1050065 - DNA, 25 bp, Homo sapien
ccgtccgccgtgcagtaggtgatgc

SEQ ID NO: 1050066 - DNA, 25 bp, Homo sapien
aatttgttacgtctccagggcagca

SEQ ID NO: 1050067 - DNA, 25 bp, Homo sapien
tgcccaggtaccacacggtgtaggt

SEQ ID NO: 1050068 - DNA, 25 bp, Homo sapien
atgctgctgaggcgcggcgccccgc

SEQ ID NO: 1050069 - DNA, 25 bp, Homo sapien
gctcggcggcggccggtaggcgcac

SEQ ID NO: 1050070 - DNA, 25 bp, Homo sapien
ctccctcttgctcctccgcgtcgtc

SEQ ID NO: 1050071 - DNA, 25 bp, Homo sapien
tccctcttgctcctccgcgtcgtcc

SEQ ID NO: 1050072 - DNA, 25 bp, Homo sapien
cctcttgctcctccgcgtcgtcctc

SEQ ID NO: 1050073 - DNA, 25 bp, Homo sapien
tcctccctcttgctcctccgcgtcg

SEQ ID NO: 1050074 - DNA, 25 bp, Homo sapien
ggccaggctgagcacctccggccgc

SEQ ID NO: 1050075 - DNA, 25 bp, Homo sapien
ccaggctgagcacctccggccgctc

SEQ ID NO: 1050076 - DNA, 25 bp, Homo sapien
aggctgcacgtcctcagctcccggg

SEQ ID NO: 1050077 - DNA, 25 bp, Homo sapien
ggctgagcacctccggccgctcgcg

SEQ ID NO: 1050078 - DNA, 25 bp, Homo sapien
cggggctgcgcgggcggcgggggcg

SEQ ID NO: 1050079 - DNA, 25 bp, Homo sapien
ctgcgcgggcggcgggggcgccggg

SEQ ID NO: 1050080 - DNA, 25 bp, Homo sapien
ggggctgcgcgggcggcgggggcgc

SEQ ID NO: 1050081 - DNA, 25 bp, Homo sapien
ggctgcgcgggcggcgggggcgccg

SEQ ID NO: 1050082 - DNA, 25 bp, Homo sapien
agcgcgcctggcccgcccgctccct

SEQ ID NO: 1050083 - DNA, 25 bp, Homo sapien
ctggcccgcccgctccctggggccg

SEQ ID NO: 1050084 - DNA, 25 bp, Homo sapien
tcagcgcgcctggcccgcccgctcc

SEQ ID NO: 1050085 - DNA, 25 bp, Homo sapien
cgcctggcccgcccgctccctgggg

SEQ ID NO: 1050086 - DNA, 25 bp, Homo sapien
ctggggctgcgagtcctgtccttcg

SEQ ID NO: 1050087 - DNA, 25 bp, Homo sapien
ggctgtgagtctggcgggtcgggcc

SEQ ID NO: 1050088 - DNA, 25 bp, Homo sapien
ggctgcgagtcctgtccttcggctc

SEQ ID NO: 1050089 - DNA, 25 bp, Homo sapien
gcctggggctgcgagtcctgtcctt

SEQ ID NO: 1050090 - DNA, 25 bp, Homo sapien
gggccggggcagccgaagcgggcag

SEQ ID NO: 1050091 - DNA, 25 bp, Homo sapien
accctgagccaaaatgaggcggcgg

SEQ ID NO: 1050092 - DNA, 25 bp, Homo sapien
ccctgtgtgtatagcagcggactct

SEQ ID NO: 1050093 - DNA, 25 bp, Homo sapien
ttgaacgtcggtaggactctcccag

SEQ ID NO: 1050094 - DNA, 25 bp, Homo sapien
taaccaagggcgtatcaggcatcac

SEQ ID NO: 1050095 - DNA, 25 bp, Homo sapien
catcttggtcctggttgtggggcac

SEQ ID NO: 1050096 - DNA, 25 bp, Homo sapien
ctcctttgggagccccatcttggtc

SEQ ID NO: 1050097 - DNA, 25 bp, Homo sapien
gccccatcttggtcctggttgtggg

SEQ ID NO: 1050098 - DNA, 25 bp, Homo sapien
ggagccccatcttggtcctggttgt

SEQ ID NO: 1050099 - DNA, 25 bp, Homo sapien
acttgggagcaactctgctgcgtct

SEQ ID NO: 1050100 - DNA, 25 bp, Homo sapien
ctctgaggagcctcgacttgggagc

SEQ ID NO: 1050101 - DNA, 25 bp, Homo sapien
aactctgctgcgtctactttctagg

SEQ ID NO: 1050102 - DNA, 25 bp, Homo sapien
tgcgtctactttctaggtagtcagt

SEQ ID NO: 1050103 - DNA, 25 bp, Homo sapien
aagcaggtccactttatttacaatg

SEQ ID NO: 1050104 - DNA, 25 bp, Homo sapien
taaacacaacacaggagtagtgaca

SEQ ID NO: 1050105 - DNA, 25 bp, Homo sapien
gtgacagggctgtaaaagcaggtcc

SEQ ID NO: 1050106 - DNA, 25 bp, Homo sapien
tacaatgatcagtgacacatagatc

SEQ ID NO: 1050107 - DNA, 25 bp, Homo sapien
ctgagagcacacacacagtctatac

SEQ ID NO: 1050108 - DNA, 25 bp, Homo sapien
gagagcacacacacagtctatacca

SEQ ID NO: 1050109 - DNA, 25 bp, Homo sapien
gagcacacacacagtctataccata

SEQ ID NO: 1050110 - DNA, 25 bp, Homo sapien
acacacacagtctataccatatgct

SEQ ID NO: 1050111 - DNA, 25 bp, Homo sapien
cagagcctctgaaagaaaactgggc

SEQ ID NO: 1050112 - DNA, 25 bp, Homo sapien
gggctgctcaccacattctcttaca

SEQ ID NO: 1050113 - DNA, 25 bp, Homo sapien
tcttacaacctgctcgcactcatcc

SEQ ID NO: 1050114 - DNA, 25 bp, Homo sapien
cacagggtctggacaggtttttcca

SEQ ID NO: 1050115 - DNA, 25 bp, Homo sapien
taactctgggatcagtgcccagctc

SEQ ID NO: 1050116 - DNA, 25 bp, Homo sapien
taaagaagatatccagctgaagact

SEQ ID NO: 1050117 - DNA, 25 bp, Homo sapien
tctgattactggcaatggcggaggc

SEQ ID NO: 1050118 - DNA, 25 bp, Homo sapien
tactctggacatatggagtcaaccc

SEQ ID NO: 1050119 - DNA, 25 bp, Homo sapien
tgcagcccatcgtccattcctaggt

SEQ ID NO: 1050120 - DNA, 25 bp, Homo sapien
ccatcgtccattcctaggtcttaca

SEQ ID NO: 1050121 - DNA, 25 bp, Homo sapien
cattcctaggtcttacatcttccca

SEQ ID NO: 1050122 - DNA, 25 bp, Homo sapien
ttcctaggtcttacatcttcccact

SEQ ID NO: 1050123 - DNA, 25 bp, Homo sapien
cgtgatcttgtttctagacaggtct

SEQ ID NO: 1050124 - DNA, 25 bp, Homo sapien
agtgcctagcagttcgaaactatct

SEQ ID NO: 1050125 - DNA, 25 bp, Homo sapien
tatgcatctcattgcaaatgtaaga

SEQ ID NO: 1050126 - DNA, 25 bp, Homo sapien
gattgaagagggcatgccgtgatct

SEQ ID NO: 1050127 - DNA, 25 bp, Homo sapien
ggagatcaggagacatcccagggcc

SEQ ID NO: 1050128 - DNA, 25 bp, Homo sapien
tcccccatgtatgcttccccaagga

SEQ ID NO: 1050129 - DNA, 25 bp, Homo sapien
gagatcaggagacatcccagggccc

SEQ ID NO: 1050130 - DNA, 25 bp, Homo sapien
cccatggttgtcatcccccatgtat

SEQ ID NO: 1050131 - DNA, 25 bp, Homo sapien
tccttggatcaagcaccagggatgc

SEQ ID NO: 1050132 - DNA, 25 bp, Homo sapien
ccctccttggatcaagcaccaggga

SEQ ID NO: 1050133 - DNA, 25 bp, Homo sapien
actcccctccttggatcaagcacca

SEQ ID NO: 1050134 - DNA, 25 bp, Homo sapien
tcactcccctccttggatcaagcac

SEQ ID NO: 1050135 - DNA, 25 bp, Homo sapien
tgcccaccctatttctccatagata

SEQ ID NO: 1050136 - DNA, 25 bp, Homo sapien
ccatagatattaatgatggaatctt

SEQ ID NO: 1050137 - DNA, 25 bp, Homo sapien
tcaaggtgctgcccaccctatttct

SEQ ID NO: 1050138 - DNA, 25 bp, Homo sapien
ttaaaatgtcgaaagtatgtggtct

SEQ ID NO: 1050139 - DNA, 25 bp, Homo sapien
tggggccccagacacgattgcagct

SEQ ID NO: 1050140 - DNA, 25 bp, Homo sapien
caggtacgcagctttcaggatgcag

SEQ ID NO: 1050141 - DNA, 25 bp, Homo sapien
cagcgggaaacaggagctccggcca

SEQ ID NO: 1050142 - DNA, 25 bp, Homo sapien
agccagaccgcaggctctcaggtac

SEQ ID NO: 1050143 - DNA, 25 bp, Homo sapien
cagcccccacaggaaagtgactgta

SEQ ID NO: 1050144 - DNA, 25 bp, Homo sapien
actgtaggggcagtaggctgacttc

SEQ ID NO: 1050145 - DNA, 25 bp, Homo sapien
agggtgcaggcaggacgcttctggg

SEQ ID NO: 1050146 - DNA, 25 bp, Homo sapien
tgcaggcaggacgcttctgggccat

SEQ ID NO: 1050147 - DNA, 25 bp, Homo sapien
tgaactaggctcgcgccactgtact

SEQ ID NO: 1050148 - DNA, 25 bp, Homo sapien
agtgaactaggctcgcgccactgta

SEQ ID NO: 1050149 - DNA, 25 bp, Homo sapien
gtgaactaggctcgcgccactgtac

SEQ ID NO: 1050150 - DNA, 25 bp, Homo sapien
gatagcggtccgttcagcacagatg

SEQ ID NO: 1050151 - DNA, 25 bp, Homo sapien
tctgagacggccttctggatagcgg

SEQ ID NO: 1050152 - DNA, 25 bp, Homo sapien
aattgccctgaaatccttgtaccct

SEQ ID NO: 1050153 - DNA, 25 bp, Homo sapien
cccagcgggtagcaggcattttcta

SEQ ID NO: 1050154 - DNA, 25 bp, Homo sapien
gactgtttttgtatcctggttcttg

SEQ ID NO: 1050155 - DNA, 25 bp, Homo sapien
tgtttttgtatcctggttcttggac

SEQ ID NO: 1050156 - DNA, 25 bp, Homo sapien
ctgactgtttttgtatcctggttct

SEQ ID NO: 1050157 - DNA, 25 bp, Homo sapien
actgtttttgtatcctggttcttgg

SEQ ID NO: 1050158 - DNA, 25 bp, Homo sapien
gcttcaacaaccaaaagtcgcagga

SEQ ID NO: 1050159 - DNA, 25 bp, Homo sapien
caatggctagctccctggacaaggt

SEQ ID NO: 1050160 - DNA, 25 bp, Homo sapien
gcaagcatgcattccactgggaagg

SEQ ID NO: 1050161 - DNA, 25 bp, Homo sapien
tcagggatttcaaggtgggcaagca

SEQ ID NO: 1050162 - DNA, 25 bp, Homo sapien
gacatgtcgaccaaaatccttctct

SEQ ID NO: 1050163 - DNA, 25 bp, Homo sapien
ttcattccagacatgtcgaccaaaa

SEQ ID NO: 1050164 - DNA, 25 bp, Homo sapien
aaggagcaacaaagaccaatcggac

SEQ ID NO: 1050165 - DNA, 25 bp, Homo sapien
tcggacaattcctggagcttaccct

SEQ ID NO: 1050166 - DNA, 25 bp, Homo sapien
agagataaaatcatcttgcatgtca

SEQ ID NO: 1050167 - DNA, 25 bp, Homo sapien
tctctcatgacttgcctgcaggccc

SEQ ID NO: 1050168 - DNA, 25 bp, Homo sapien
gcagctcctggaccgtcatgacaat

SEQ ID NO: 1050169 - DNA, 25 bp, Homo sapien
tgtacacgggccagttggtgccaaa

SEQ ID NO: 1050170 - DNA, 25 bp, Homo sapien
gacaatatacgtaccatccggcttg

SEQ ID NO: 1050171 - DNA, 25 bp, Homo sapien
catccggcttggtcatgtacacggg

SEQ ID NO: 1050172 - DNA, 25 bp, Homo sapien
ttagaaaagttgctcggaacaggat

SEQ ID NO: 1050173 - DNA, 25 bp, Homo sapien
ggaagcagtccagactaggctggac

SEQ ID NO: 1050174 - DNA, 25 bp, Homo sapien
aacaggatagaaccttgggaaggct

SEQ ID NO: 1050175 - DNA, 25 bp, Homo sapien
gctggactttgaaagagggcccaca

SEQ ID NO: 1050176 - DNA, 25 bp, Homo sapien
catgaagcttgattctttggcagac

SEQ ID NO: 1050177 - DNA, 25 bp, Homo sapien
ctgaagtctgacaggtctgaatcaa

SEQ ID NO: 1050178 - DNA, 25 bp, Homo sapien
tgacaggtctgaatcaagcacagca

SEQ ID NO: 1050179 - DNA, 25 bp, Homo sapien
aatcaagcacagcatgaagcttgat

SEQ ID NO: 1050180 - DNA, 25 bp, Homo sapien
aacaaacttggggcggtgcctctgc

SEQ ID NO: 1050181 - DNA, 25 bp, Homo sapien
acaacaaacttggggcggtgcctct

SEQ ID NO: 1050182 - DNA, 25 bp, Homo sapien
acaaacttggggcggtgcctctgcg

SEQ ID NO: 1050183 - DNA, 25 bp, Homo sapien
cacaacaaacttggggcggtgcctc

SEQ ID NO: 1050184 - DNA, 25 bp, Homo sapien
ctggcggaagaagcggagacggtta

SEQ ID NO: 1050185 - DNA, 25 bp, Homo sapien
agcagcgctcgacccagctgcaggc

SEQ ID NO: 1050186 - DNA, 25 bp, Homo sapien
ccgggcttgcccgtgaagcgcagca

SEQ ID NO: 1050187 - DNA, 25 bp, Homo sapien
gagcccgaccctgcgaggctccgcg

SEQ ID NO: 1050188 - DNA, 25 bp, Homo sapien
acgaactgccgctgcaaccgcgccg

SEQ ID NO: 1050189 - DNA, 25 bp, Homo sapien
ggctctccgcctgtttttcctcgat

SEQ ID NO: 1050190 - DNA, 25 bp, Homo sapien
agaaagactgcccggccgcaagggc

SEQ ID NO: 1050191 - DNA, 25 bp, Homo sapien
gtttttcctcgatgaggcccagccc

SEQ ID NO: 1050192 - DNA, 25 bp, Homo sapien
aagcgtctcgtgtccaacgggtcag

SEQ ID NO: 1050193 - DNA, 25 bp, Homo sapien
aatggactgccctatcagatactcc

SEQ ID NO: 1050194 - DNA, 25 bp, Homo sapien
gcactgcagcccttaccaatggact

SEQ ID NO: 1050195 - DNA, 25 bp, Homo sapien
ccttctcctggtgcactggtacctg

SEQ ID NO: 1050196 - DNA, 25 bp, Homo sapien
aggcccactaagatgggcattttga

SEQ ID NO: 1050197 - DNA, 25 bp, Homo sapien
gggcattttgagaacatctccttta

SEQ ID NO: 1050198 - DNA, 25 bp, Homo sapien
caggcccactaagatgggcattttg

SEQ ID NO: 1050199 - DNA, 25 bp, Homo sapien
attttgagaacatctcctttaaaga

SEQ ID NO: 1050200 - DNA, 25 bp, Homo sapien
tgagactagttactcctgggaggca

SEQ ID NO: 1050201 - DNA, 25 bp, Homo sapien
tctagggcccaccatgaacggctgt

SEQ ID NO: 1050202 - DNA, 25 bp, Homo sapien
aactcttgcagcctagatgccaggg

SEQ ID NO: 1050203 - DNA, 25 bp, Homo sapien
gaggcagacagaggtaccatccatg

SEQ ID NO: 1050204 - DNA, 25 bp, Homo sapien
accagctcctggctcattgtgttca

SEQ ID NO: 1050205 - DNA, 25 bp, Homo sapien
cctggctcattgtgttcaagatggc

SEQ ID NO: 1050206 - DNA, 25 bp, Homo sapien
aaggccactcggctcgctgggacca

SEQ ID NO: 1050207 - DNA, 25 bp, Homo sapien
agtgactgctccatactccccagcc

SEQ ID NO: 1050208 - DNA, 25 bp, Homo sapien
tcccatgtggcagaacacaggtgga

SEQ ID NO: 1050209 - DNA, 25 bp, Homo sapien
tggctgagttgcagtagccccaacc

SEQ ID NO: 1050210 - DNA, 25 bp, Homo sapien
gccaggtactgtacatggtgttgga

SEQ ID NO: 1050211 - DNA, 25 bp, Homo sapien
gaaaccctggtatcagactgcctgg

SEQ ID NO: 1050212 - DNA, 25 bp, Homo sapien
agggcagcacatcagggtagtcgac

SEQ ID NO: 1050213 - DNA, 25 bp, Homo sapien
aaggcgcggagaacccggatgatgt

SEQ ID NO: 1050214 - DNA, 25 bp, Homo sapien
tcttcataacgaggaacagcgtccg

SEQ ID NO: 1050215 - DNA, 25 bp, Homo sapien
cggcacggaagaggtgaaggcgcgg

SEQ ID NO: 1050216 - DNA, 25 bp, Homo sapien
tcaaatggaccaaaaggactaggtg

SEQ ID NO: 1050217 - DNA, 25 bp, Homo sapien
aatcgtcctacagggaaaatgctct

SEQ ID NO: 1050218 - DNA, 25 bp, Homo sapien
gactaggtgacaagtatgttctgga

SEQ ID NO: 1050219 - DNA, 25 bp, Homo sapien
tgttaaaaacagataagtccagcca

SEQ ID NO: 1050220 - DNA, 25 bp, Homo sapien
cggcctcctaataaccttaatcact

SEQ ID NO: 1050221 - DNA, 25 bp, Homo sapien
ggcctcctaataaccttaatcactg

SEQ ID NO: 1050222 - DNA, 25 bp, Homo sapien
gagagggcctctggctaccacacat

SEQ ID NO: 1050223 - DNA, 25 bp, Homo sapien
ggggagagggcctctggctaccaca

SEQ ID NO: 1050224 - DNA, 25 bp, Homo sapien
ggagagggcctctggctaccacaca

SEQ ID NO: 1050225 - DNA, 25 bp, Homo sapien
agggcctctggctaccacacatcga

SEQ ID NO: 1050226 - DNA, 25 bp, Homo sapien
tgttgtcggatttcaggtctctgtg

SEQ ID NO: 1050227 - DNA, 25 bp, Homo sapien
ggtactggcgcagggtacagggata

SEQ ID NO: 1050228 - DNA, 25 bp, Homo sapien
gccctgttgaaccagatggtccacg

SEQ ID NO: 1050229 - DNA, 25 bp, Homo sapien
tccacaaggatgttgtcggatttca

SEQ ID NO: 1050230 - DNA, 25 bp, Homo sapien
cccgttctaagggagagattgctaa

SEQ ID NO: 1050231 - DNA, 25 bp, Homo sapien
gaagagtcagtcctaaatgctcctg

SEQ ID NO: 1050232 - DNA, 25 bp, Homo sapien
gctaacctcttgtgtgcggagctaa

SEQ ID NO: 1050233 - DNA, 25 bp, Homo sapien
caaaaccagagaggacctgaagagt

SEQ ID NO: 1050234 - DNA, 25 bp, Homo sapien
gagaatcacttcagcctgagcaaca

SEQ ID NO: 1050235 - DNA, 25 bp, Homo sapien
cctgggaggtgaaggaggctgagac

SEQ ID NO: 1050236 - DNA, 25 bp, Homo sapien
cctttaaaaagccagttcctggctg

SEQ ID NO: 1050237 - DNA, 25 bp, Homo sapien
tgggaggtgaaggaggctgagacag

SEQ ID NO: 1050238 - DNA, 25 bp, Homo sapien
agggcaactgcaggccgatgctctc

SEQ ID NO: 1050239 - DNA, 25 bp, Homo sapien
ggccgatgctctcatcagccaggca

SEQ ID NO: 1050240 - DNA, 25 bp, Homo sapien
caaaatctgcgatcaccagccaggg

SEQ ID NO: 1050241 - DNA, 25 bp, Homo sapien
cagcagccaaaatctgcgatcacca

SEQ ID NO: 1050242 - DNA, 25 bp, Homo sapien
gctaatctgaactctgtcccaagga

SEQ ID NO: 1050243 - DNA, 25 bp, Homo sapien
caaggaacccagagcttgagtgagc

SEQ ID NO: 1050244 - DNA, 25 bp, Homo sapien
gaccacctggtttatgtgacaggac

SEQ ID NO: 1050245 - DNA, 25 bp, Homo sapien
cagtgggtgagacatcacgctgccc

SEQ ID NO: 1050246 - DNA, 25 bp, Homo sapien
cctcttggtagctgcggctttcaag

SEQ ID NO: 1050247 - DNA, 25 bp, Homo sapien
ccctggccgtagaagggattgacaa

SEQ ID NO: 1050248 - DNA, 25 bp, Homo sapien
gatttcataggcgatggctcccact

SEQ ID NO: 1050249 - DNA, 25 bp, Homo sapien
gccttgctgtagtcaatcactgccc

SEQ ID NO: 1050250 - DNA, 25 bp, Homo sapien
tggtggctagtgctcctactcctac

SEQ ID NO: 1050251 - DNA, 25 bp, Homo sapien
aaagccacaggagttgaactgctag

SEQ ID NO: 1050252 - DNA, 25 bp, Homo sapien
tgctaggattctgactatgctgtgg

SEQ ID NO: 1050253 - DNA, 25 bp, Homo sapien
actatgctgtggtggctagtgctcc

SEQ ID NO: 1050254 - DNA, 25 bp, Homo sapien
gccgattgttggaggagccagccaa

SEQ ID NO: 1050255 - DNA, 25 bp, Homo sapien
tccaggttagccagaaagagcatct

SEQ ID NO: 1050256 - DNA, 25 bp, Homo sapien
gcacatttgcggctactcgggcaga

SEQ ID NO: 1050257 - DNA, 25 bp, Homo sapien
tagaatatgttcaccccagaggctt

SEQ ID NO: 1050258 - DNA, 25 bp, Homo sapien
attcacagaccatcacgacacagag

SEQ ID NO: 1050259 - DNA, 25 bp, Homo sapien
gaccatcacgacacagaggatgcca

SEQ ID NO: 1050260 - DNA, 25 bp, Homo sapien
taaccagccctctctgcgctgtctt

SEQ ID NO: 1050261 - DNA, 25 bp, Homo sapien
ctctctgcgctgtcttgtctcctga

SEQ ID NO: 1050262 - DNA, 25 bp, Homo sapien
cagcttggccattcacttttcagat

SEQ ID NO: 1050263 - DNA, 25 bp, Homo sapien
ctagaccagcttggccattcacttt

SEQ ID NO: 1050264 - DNA, 25 bp, Homo sapien
agaccagcttggccattcacttttc

SEQ ID NO: 1050265 - DNA, 25 bp, Homo sapien
accagcttggccattcacttttcag

SEQ ID NO: 1050266 - DNA, 25 bp, Homo sapien
tcctctctgtggatgcaggcctacc

SEQ ID NO: 1050267 - DNA, 25 bp, Homo sapien
ccaggtggcaaatcagacatgctac

SEQ ID NO: 1050268 - DNA, 25 bp, Homo sapien
cagccaaactctgccactgacagcc

SEQ ID NO: 1050269 - DNA, 25 bp, Homo sapien
cttcaaacgagttcctcgtgttagg

SEQ ID NO: 1050270 - DNA, 25 bp, Homo sapien
actgaacgtgctgacccatgttgat

SEQ ID NO: 1050271 - DNA, 25 bp, Homo sapien
cactcccgtaactgaacgtgctgac

SEQ ID NO: 1050272 - DNA, 25 bp, Homo sapien
tcccgtaactgaacgtgctgaccca

SEQ ID NO: 1050273 - DNA, 25 bp, Homo sapien
cgtaactgaacgtgctgacccatgt

SEQ ID NO: 1050274 - DNA, 25 bp, Homo sapien
agaacgcacagcttgggaacgcaga

SEQ ID NO: 1050275 - DNA, 25 bp, Homo sapien
tgctcatccgtcactttcgctaagt

SEQ ID NO: 1050276 - DNA, 25 bp, Homo sapien
aggctagtcaggagggaaaccctca

SEQ ID NO: 1050277 - DNA, 25 bp, Homo sapien
caattcctgtaagagaggctagtca

SEQ ID NO: 1050278 - DNA, 25 bp, Homo sapien
gaaatgatggttctccctaacgtct

SEQ ID NO: 1050279 - DNA, 25 bp, Homo sapien
aacctttactgcatgttgacgctga

SEQ ID NO: 1050280 - DNA, 25 bp, Homo sapien
gaaagttgttgttgctagtagaccg

SEQ ID NO: 1050281 - DNA, 25 bp, Homo sapien
tcctcaaaggatacaagaaagttgt

SEQ ID NO: 1050282 - DNA, 25 bp, Homo sapien
actttgaattgctaaaagtggcatt

SEQ ID NO: 1050283 - DNA, 25 bp, Homo sapien
ggagatgcaacactgagagccaagg

SEQ ID NO: 1050284 - DNA, 25 bp, Homo sapien
tctaaaatagggacgtggccaggca

SEQ ID NO: 1050285 - DNA, 25 bp, Homo sapien
cctctccgcacagcgtggagacggg

SEQ ID NO: 1050286 - DNA, 25 bp, Homo sapien
tcggcctacccctactacgccagcg

SEQ ID NO: 1050287 - DNA, 25 bp, Homo sapien
cagtatgagcgcttcatcccctcgg

SEQ ID NO: 1050288 - DNA, 25 bp, Homo sapien
acacgcagtatgagcgcttcatccc

SEQ ID NO: 1050289 - DNA, 25 bp, Homo sapien
cagcacacgcagtatgagcgcttca

SEQ ID NO: 1050290 - DNA, 25 bp, Homo sapien
caggagtatgaagagcgcctggccc

SEQ ID NO: 1050291 - DNA, 25 bp, Homo sapien
ccaggagtatgaagagcgcctggcc

SEQ ID NO: 1050292 - DNA, 25 bp, Homo sapien
aggagtatgaagagcgcctggcccg

SEQ ID NO: 1050293 - DNA, 25 bp, Homo sapien
tgcctgatttccagaggcggagctg

SEQ ID NO: 1050294 - DNA, 25 bp, Homo sapien
ggagctgatccccagagcgggactt

SEQ ID NO: 1050295 - DNA, 25 bp, Homo sapien
cagcagccgacgacaagtctgagag

SEQ ID NO: 1050296 - DNA, 25 bp, Homo sapien
taaatgctgcatcctgagacctgag

SEQ ID NO: 1050297 - DNA, 25 bp, Homo sapien
gatatcaccgtaccttcaccgtggg

SEQ ID NO: 1050298 - DNA, 25 bp, Homo sapien
tcaccgtgggtttggtcctgagaaa

SEQ ID NO: 1050299 - DNA, 25 bp, Homo sapien
gagtctggaacatcgaggtgctcca

SEQ ID NO: 1050300 - DNA, 25 bp, Homo sapien
tgatccagcatgacgtggaggccga

SEQ ID NO: 1050301 - DNA, 25 bp, Homo sapien
tactgtcaccgtgtcttcatgacca

SEQ ID NO: 1050302 - DNA, 25 bp, Homo sapien
aacataactgaaatcttacgccatg

SEQ ID NO: 1050303 - DNA, 25 bp, Homo sapien
tgtcactaagcatttctgcacttta

SEQ ID NO: 1050304 - DNA, 25 bp, Homo sapien
atcttacgccatgtaggtttcccct

SEQ ID NO: 1050305 - DNA, 25 bp, Homo sapien
ttggtctcccaggctcaaccaatcc

SEQ ID NO: 1050306 - DNA, 25 bp, Homo sapien
accttggtctcccaggctcaaccaa

SEQ ID NO: 1050307 - DNA, 25 bp, Homo sapien
ccttggtctcccaggctcaaccaat

SEQ ID NO: 1050308 - DNA, 25 bp, Homo sapien
caaccttggtctcccaggctcaacc

SEQ ID NO: 1050309 - DNA, 25 bp, Homo sapien
tgtgactcccgctttctcagaaggg

SEQ ID NO: 1050310 - DNA, 25 bp, Homo sapien
cacggtggactcctgtgtgcagaaa

SEQ ID NO: 1050311 - DNA, 25 bp, Homo sapien
gcagacagggccaagaatctccatg

SEQ ID NO: 1050312 - DNA, 25 bp, Homo sapien
gacagagggctgtacctaacgctca

SEQ ID NO: 1050313 - DNA, 25 bp, Homo sapien
ggtgtggtgcatgggcaggttccgg

SEQ ID NO: 1050314 - DNA, 25 bp, Homo sapien
ctttgcgcccccactggccctgagc

SEQ ID NO: 1050315 - DNA, 25 bp, Homo sapien
ggtctgcagcctttgcgcccccact

SEQ ID NO: 1050316 - DNA, 25 bp, Homo sapien
tctctgtggtgtggtgcatgggcag

SEQ ID NO: 1050317 - DNA, 25 bp, Homo sapien
tgtgggtcaggtactgcgctacgca

SEQ ID NO: 1050318 - DNA, 25 bp, Homo sapien
tcgttggaatcctcacgtggctgtg

SEQ ID NO: 1050319 - DNA, 25 bp, Homo sapien
tgatgaaggcgtttgcccaaagccc

SEQ ID NO: 1050320 - DNA, 25 bp, Homo sapien
ccacgtttgtaagaagaagagccca

SEQ ID NO: 1050321 - DNA, 25 bp, Homo sapien
gggtgacttgtaaaccatcttgttc

SEQ ID NO: 1050322 - DNA, 25 bp, Homo sapien
tgtggtgaagtgttgcccagagcac

SEQ ID NO: 1050323 - DNA, 25 bp, Homo sapien
tccctcttgtcactggactcaaggc

SEQ ID NO: 1050324 - DNA, 25 bp, Homo sapien
gatttgcagagaataggggtgactt

SEQ ID NO: 1050325 - DNA, 25 bp, Homo sapien
ccccttgagtactgccagaggcaaa

SEQ ID NO: 1050326 - DNA, 25 bp, Homo sapien
ttttgatatcaagcaagtggcttcc

SEQ ID NO: 1050327 - DNA, 25 bp, Homo sapien
cctaaagtatggctgggaaatggac

SEQ ID NO: 1050328 - DNA, 25 bp, Homo sapien
tcctgagttgggtcctacaggcgca

SEQ ID NO: 1050329 - DNA, 25 bp, Homo sapien
gaggcacaatatagcactgactgag

SEQ ID NO: 1050330 - DNA, 25 bp, Homo sapien
gagttgtaaagcctcctgcctggag

SEQ ID NO: 1050331 - DNA, 25 bp, Homo sapien
tctaggtatttttcactggcccaaa

SEQ ID NO: 1050332 - DNA, 25 bp, Homo sapien
tcaagaacggtatgccagtcaggtc

SEQ ID NO: 1050333 - DNA, 25 bp, Homo sapien
ctttcatgtaggtaggctacaggca

SEQ ID NO: 1050334 - DNA, 25 bp, Homo sapien
tttttataactacagctgacccttg

SEQ ID NO: 1050335 - DNA, 25 bp, Homo sapien
ggcatgccgccattcatagctagtt

SEQ ID NO: 1050336 - DNA, 25 bp, Homo sapien
taccgtgctccctgataccctaaat

SEQ ID NO: 1050337 - DNA, 25 bp, Homo sapien
tcaggaacccagacaattgtaacca

SEQ ID NO: 1050338 - DNA, 25 bp, Homo sapien
aacagttttgtagagcatttctggt

SEQ ID NO: 1050339 - DNA, 25 bp, Homo sapien
cagacaattgtaaccagaccattct

SEQ ID NO: 1050340 - DNA, 25 bp, Homo sapien
ctgcgtctggcatatcttagtttta

SEQ ID NO: 1050341 - DNA, 25 bp, Homo sapien
tgtcaaaatagtgaaaaggccaggt

SEQ ID NO: 1050342 - DNA, 25 bp, Homo sapien
aatgtcaaaatagtgaaaaggccag

SEQ ID NO: 1050343 - DNA, 25 bp, Homo sapien
gcaaatgtcaaaatagtgaaaaggc

SEQ ID NO: 1050344 - DNA, 25 bp, Homo sapien
caaatgtcaaaatagtgaaaaggcc

SEQ ID NO: 1050345 - DNA, 25 bp, Homo sapien
atttggaattataagccctctaact

SEQ ID NO: 1050346 - DNA, 25 bp, Homo sapien
tctgtaggtgtatccttcatgctaa

SEQ ID NO: 1050347 - DNA, 25 bp, Homo sapien
gcactgtcttactgactgtagcttt

SEQ ID NO: 1050348 - DNA, 25 bp, Homo sapien
tatgccgggtcctgtacagttccat

SEQ ID NO: 1050349 - DNA, 25 bp, Homo sapien
tgaccagggctcgagtttctccata

SEQ ID NO: 1050350 - DNA, 25 bp, Homo sapien
cagtagtatcttttgaagcgtttac

SEQ ID NO: 1050351 - DNA, 25 bp, Homo sapien
catactagtggatatagggtatctc

SEQ ID NO: 1050352 - DNA, 25 bp, Homo sapien
gggttcagtgaagtagtctgcctgc

SEQ ID NO: 1050353 - DNA, 25 bp, Homo sapien
caggaaggcacgaagccattcacga

SEQ ID NO: 1050354 - DNA, 25 bp, Homo sapien
taaacaacccgctcattacggccag

SEQ ID NO: 1050355 - DNA, 25 bp, Homo sapien
ccaaggttaagattgtgcccgtgac

SEQ ID NO: 1050356 - DNA, 25 bp, Homo sapien
tctgaaaacttgtgcccagggtggt

SEQ ID NO: 1050357 - DNA, 25 bp, Homo sapien
cgcgcccagccaatatgctatattt

SEQ ID NO: 1050358 - DNA, 25 bp, Homo sapien
accgcgcccagccaatatgctatat

SEQ ID NO: 1050359 - DNA, 25 bp, Homo sapien
cccaggttggagtgtggagtgcagt

SEQ ID NO: 1050360 - DNA, 25 bp, Homo sapien
tcaccgcgcccagccaatatgctat

SEQ ID NO: 1050361 - DNA, 25 bp, Homo sapien
gcaacacacatggacctgtcatttc

SEQ ID NO: 1050362 - DNA, 25 bp, Homo sapien
gccggacgcaatggtgcacagctgt

SEQ ID NO: 1050363 - DNA, 25 bp, Homo sapien
gattgggcaacgttgtgagacctca

SEQ ID NO: 1050364 - DNA, 25 bp, Homo sapien
caccttaacctaggcctgcacaagg

SEQ ID NO: 1050365 - DNA, 25 bp, Homo sapien
gctttatgggatagtctgttgcttc

SEQ ID NO: 1050366 - DNA, 25 bp, Homo sapien
gaatgcaaaggcctaggactactgt

SEQ ID NO: 1050367 - DNA, 25 bp, Homo sapien
cattctgagagatacatctttaggc

SEQ ID NO: 1050368 - DNA, 25 bp, Homo sapien
cctgtgtaggacacctaccatgaat

SEQ ID NO: 1050369 - DNA, 25 bp, Homo sapien
tagaattgtacttatgtgatttggt

SEQ ID NO: 1050370 - DNA, 25 bp, Homo sapien
tgggaaacaattctagaagcagaga

SEQ ID NO: 1050371 - DNA, 25 bp, Homo sapien
ggaaatcactcgcttagtataagtg

SEQ ID NO: 1050372 - DNA, 25 bp, Homo sapien
taagtgttagaattgtacttatgtg

SEQ ID NO: 1050373 - DNA, 25 bp, Homo sapien
tttttcagggataagcacactgtgc

SEQ ID NO: 1050374 - DNA, 25 bp, Homo sapien
gaaacatagacccatcaacatggag

SEQ ID NO: 1050375 - DNA, 25 bp, Homo sapien
tattaggaatagagggccgggcaca

SEQ ID NO: 1050376 - DNA, 25 bp, Homo sapien
tagagagaagattggccagtcagtg

SEQ ID NO: 1050377 - DNA, 25 bp, Homo sapien
gactctttcgagaacagtaacaaca

SEQ ID NO: 1050378 - DNA, 25 bp, Homo sapien
tggtctaaatttgcttctgtgggtc

SEQ ID NO: 1050379 - DNA, 25 bp, Homo sapien
taggttccttaggagcttccttgcc

SEQ ID NO: 1050380 - DNA, 25 bp, Homo sapien
tctttgttcatgtggaaggtgcaac

SEQ ID NO: 1050381 - DNA, 25 bp, Homo sapien
gatattctggttccctaagtatgag

SEQ ID NO: 1050382 - DNA, 25 bp, Homo sapien
tgtaggttgggactgttacttgcca

SEQ ID NO: 1050383 - DNA, 25 bp, Homo sapien
tattttcccgataagtgtgaatgca

SEQ ID NO: 1050384 - DNA, 25 bp, Homo sapien
tagaagttgcatgactgtcattccc

SEQ ID NO: 1050385 - DNA, 25 bp, Homo sapien
gtatctatgcccaaaacagacactg

SEQ ID NO: 1050386 - DNA, 25 bp, Homo sapien
tgtgacatgactcgttaaatctgag

SEQ ID NO: 1050387 - DNA, 25 bp, Homo sapien
tggtgtcagcagtcaaattacaggc

SEQ ID NO: 1050388 - DNA, 25 bp, Homo sapien
aacaatgtgaggtgttcagcgcatc

SEQ ID NO: 1050389 - DNA, 25 bp, Homo sapien
ccagatctgagggttggtactgcat

SEQ ID NO: 1050390 - DNA, 25 bp, Homo sapien
gaccgggtgaactgtgctgccgcat

SEQ ID NO: 1050391 - DNA, 25 bp, Homo sapien
agaaagagttgtctcccgtacggag

SEQ ID NO: 1050392 - DNA, 25 bp, Homo sapien
tactgcattaacagctgtgaccggg

SEQ ID NO: 1050393 - DNA, 25 bp, Homo sapien
gaaacgtagaactggttactcgcca

SEQ ID NO: 1050394 - DNA, 25 bp, Homo sapien
tcgtcagaaagttacagtcgcccat

SEQ ID NO: 1050395 - DNA, 25 bp, Homo sapien
gctgtggcctgtagctacctcgcct

SEQ ID NO: 1050396 - DNA, 25 bp, Homo sapien
cggtgcctcggtaggtcgtcagaaa

SEQ ID NO: 1050397 - DNA, 25 bp, Homo sapien
cttcaaaccttagggcgggagcact

SEQ ID NO: 1050398 - DNA, 25 bp, Homo sapien
tattttaaggactgcaaatgccagt

SEQ ID NO: 1050399 - DNA, 25 bp, Homo sapien
taaggtatagcatttagtccagatt

SEQ ID NO: 1050400 - DNA, 25 bp, Homo sapien
tccccttcaagatgcacctcatgtt

SEQ ID NO: 1050401 - DNA, 25 bp, Homo sapien
gatgcctggttgtctcaagcgtgga

SEQ ID NO: 1050402 - DNA, 25 bp, Homo sapien
cagagaacccagatctaaccagcta

SEQ ID NO: 1050403 - DNA, 25 bp, Homo sapien
gacaaatagctgctccgcctacaga

SEQ ID NO: 1050404 - DNA, 25 bp, Homo sapien
tgaaggcagctcataacatctgaaa

SEQ ID NO: 1050405 - DNA, 25 bp, Homo sapien
gcatcatttctcacacctatattcg

SEQ ID NO: 1050406 - DNA, 25 bp, Homo sapien
gatagctgctgagtaccaatactaa

SEQ ID NO: 1050407 - DNA, 25 bp, Homo sapien
aaaactatgtatctaagtgctaaac

SEQ ID NO: 1050408 - DNA, 25 bp, Homo sapien
gaaatggccacaacttaacaaagcc

SEQ ID NO: 1050409 - DNA, 25 bp, Homo sapien
catcaaattgctaaatgtaccagat

SEQ ID NO: 1050410 - DNA, 25 bp, Homo sapien
taaccatttatgagggcaattgggc

SEQ ID NO: 1050411 - DNA, 25 bp, Homo sapien
taccagatatttacaaacgtgaaac

SEQ ID NO: 1050412 - DNA, 25 bp, Homo sapien
caagaactctcgcatactgattgca

SEQ ID NO: 1050413 - DNA, 25 bp, Homo sapien
gctgtcatctattataacagtgcct

SEQ ID NO: 1050414 - DNA, 25 bp, Homo sapien
gattaggtcttactacatcgcccag

SEQ ID NO: 1050415 - DNA, 25 bp, Homo sapien
cataagccagtaacgtagttatttc

SEQ ID NO: 1050416 - DNA, 25 bp, Homo sapien
tatacacggtcaagatcatcaacat

SEQ ID NO: 1050417 - DNA, 25 bp, Homo sapien
tgtattgagtacctgcagtatggga

SEQ ID NO: 1050418 - DNA, 25 bp, Homo sapien
tcttcagataccatcaaatgcatta

SEQ ID NO: 1050419 - DNA, 25 bp, Homo sapien
gaagttccctgtggtaaatatgtat

SEQ ID NO: 1050420 - DNA, 25 bp, Homo sapien
gagtacctgcagtatgggaagttcc

SEQ ID NO: 1050421 - DNA, 25 bp, Homo sapien
tctttattgtgctttcactgatacg

SEQ ID NO: 1050422 - DNA, 25 bp, Homo sapien
tattgtgctttcactgatacggttt

SEQ ID NO: 1050423 - DNA, 25 bp, Homo sapien
agaaagcctgttaatgccattttcc

SEQ ID NO: 1050424 - DNA, 25 bp, Homo sapien
tggtaactctgtgttgagaaagcct

SEQ ID NO: 1050425 - DNA, 25 bp, Homo sapien
aaggagactgtaggatctttagttc

SEQ ID NO: 1050426 - DNA, 25 bp, Homo sapien
tatacctatgtactggatacttgga

SEQ ID NO: 1050427 - DNA, 25 bp, Homo sapien
cattgactctagtagccttttactg

SEQ ID NO: 1050428 - DNA, 25 bp, Homo sapien
catagctgtgagacctgagaagtac

SEQ ID NO: 1050429 - DNA, 25 bp, Homo sapien
tcttttatgtgtgtactggatccca

SEQ ID NO: 1050430 - DNA, 25 bp, Homo sapien
tacctgtgtgaactaccctcgtaca

SEQ ID NO: 1050431 - DNA, 25 bp, Homo sapien
gaattctggtactgcaaatcatggt

SEQ ID NO: 1050432 - DNA, 25 bp, Homo sapien
tgaaatcatagtcatgccctctgct

SEQ ID NO: 1050433 - DNA, 25 bp, Homo sapien
ttggtggcaagcgttgaaattgtgc

SEQ ID NO: 1050434 - DNA, 25 bp, Homo sapien
ggtggcaagcgttgaaattgtgcat

SEQ ID NO: 1050435 - DNA, 25 bp, Homo sapien
tggtggcaagcgttgaaattgtgca

SEQ ID NO: 1050436 - DNA, 25 bp, Homo sapien
taatttctttgttcacatgcttgtg

SEQ ID NO: 1050437 - DNA, 25 bp, Homo sapien
catgcttgtgtttttcaaaccttgg

SEQ ID NO: 1050438 - DNA, 25 bp, Homo sapien
tttctttgttcacatgcttgtgttt

SEQ ID NO: 1050439 - DNA, 25 bp, Homo sapien
ctgttaatttctttgttcacatgct

SEQ ID NO: 1050440 - DNA, 25 bp, Homo sapien
gtttttgaagcagatacacatgttt

SEQ ID NO: 1050441 - DNA, 25 bp, Homo sapien
cttggtgttttcattgggtgatgtg

SEQ ID NO: 1050442 - DNA, 25 bp, Homo sapien
caaaggtactttggtcggtatgttg

SEQ ID NO: 1050443 - DNA, 25 bp, Homo sapien
cctggatcatcgtagtctgttatct

SEQ ID NO: 1050444 - DNA, 25 bp, Homo sapien
ggtcggtatgttgttcacttggtgt

SEQ ID NO: 1050445 - DNA, 25 bp, Homo sapien
tcctattggcttctgttctccagtt

SEQ ID NO: 1050446 - DNA, 25 bp, Homo sapien
attctttgtgaatcctattggcttc

SEQ ID NO: 1050447 - DNA, 25 bp, Homo sapien
gaatcctattggcttctgttctcca

SEQ ID NO: 1050448 - DNA, 25 bp, Homo sapien
tgtgaatcctattggcttctgttct

SEQ ID NO: 1050449 - DNA, 25 bp, Homo sapien
tttttacaccagtactgcacttttc

SEQ ID NO: 1050450 - DNA, 25 bp, Homo sapien
ccagtgtttcagagcgttttctctc

SEQ ID NO: 1050451 - DNA, 25 bp, Homo sapien
ccaaatccagtgtttcagagcgttt

SEQ ID NO: 1050452 - DNA, 25 bp, Homo sapien
tatttggtgttaagtgagggtctaa

SEQ ID NO: 1050453 - DNA, 25 bp, Homo sapien
gtaaagatatacttgacactgggca

SEQ ID NO: 1050454 - DNA, 25 bp, Homo sapien
tggtcgctattagagccactgtggc

SEQ ID NO: 1050455 - DNA, 25 bp, Homo sapien
tatttttgttacgagcactggcctg

SEQ ID NO: 1050456 - DNA, 25 bp, Homo sapien
tcagcaatctatatggacacagtct

SEQ ID NO: 1050457 - DNA, 25 bp, Homo sapien
gtgatgtcgttgcagggtccccctg

SEQ ID NO: 1050458 - DNA, 25 bp, Homo sapien
cctggcttacgaccctgccagggtg

SEQ ID NO: 1050459 - DNA, 25 bp, Homo sapien
ccagggcaggggtgatgtcgttgca

SEQ ID NO: 1050460 - DNA, 25 bp, Homo sapien
ccccttgcctggcttacgaccctgc

SEQ ID NO: 1050461 - DNA, 25 bp, Homo sapien
agtacactggtgcttttagcccaca

SEQ ID NO: 1050462 - DNA, 25 bp, Homo sapien
cactggtgcttttagcccacagtct

SEQ ID NO: 1050463 - DNA, 25 bp, Homo sapien
tcagtacactggtgcttttagccca

SEQ ID NO: 1050464 - DNA, 25 bp, Homo sapien
tacactggtgcttttagcccacagt

SEQ ID NO: 1050465 - DNA, 25 bp, Homo sapien
caaactggcgctgattaactaggat

SEQ ID NO: 1050466 - DNA, 25 bp, Homo sapien
cttagttaattttcacgaagtagca

SEQ ID NO: 1050467 - DNA, 25 bp, Homo sapien
acttattgcttaattggtgatgcac

SEQ ID NO: 1050468 - DNA, 25 bp, Homo sapien
tgtctagacttccaggcttttggag

SEQ ID NO: 1050469 - DNA, 25 bp, Homo sapien
tggcaagacagccgggaacccctac

SEQ ID NO: 1050470 - DNA, 25 bp, Homo sapien
agtggcaagacagccgggaacccct

SEQ ID NO: 1050471 - DNA, 25 bp, Homo sapien
acaagtggcaagacagccgggaacc

SEQ ID NO: 1050472 - DNA, 25 bp, Homo sapien
caagtggcaagacagccgggaaccc

SEQ ID NO: 1050473 - DNA, 25 bp, Homo sapien
gatcgaatcttcactcccgctgtct

SEQ ID NO: 1050474 - DNA, 25 bp, Homo sapien
aattcctagaggacctgtgcaacaa

SEQ ID NO: 1050475 - DNA, 25 bp, Homo sapien
cgctgtctcagcagtctacagcacg

SEQ ID NO: 1050476 - DNA, 25 bp, Homo sapien
caacctcttgaggatcgaatcttca

SEQ ID NO: 1050477 - DNA, 25 bp, Homo sapien
ttgacttgggtttattggctgtgga

SEQ ID NO: 1050478 - DNA, 25 bp, Homo sapien
taggtatattgacagtcttcatctg

SEQ ID NO: 1050479 - DNA, 25 bp, Homo sapien
ttcatctgatttagtataagcgtgc

SEQ ID NO: 1050480 - DNA, 25 bp, Homo sapien
tataagcgtgctttgacttgggttt

SEQ ID NO: 1050481 - DNA, 25 bp, Homo sapien
aagcagtataggagtagagttcagc

SEQ ID NO: 1050482 - DNA, 25 bp, Homo sapien
tggagtagggaagatttaggattcc

SEQ ID NO: 1050483 - DNA, 25 bp, Homo sapien
tagatggtaatagtcaagagtatgg

SEQ ID NO: 1050484 - DNA, 25 bp, Homo sapien
tgtaagtttatcctcatagtcacca

SEQ ID NO: 1050485 - DNA, 25 bp, Homo sapien
cttgggaatagctgttaaatcagaa

SEQ ID NO: 1050486 - DNA, 25 bp, Homo sapien
tgttaaatcagaattaacagctttc

SEQ ID NO: 1050487 - DNA, 25 bp, Homo sapien
gggaatagctgttaaatcagaatta

SEQ ID NO: 1050488 - DNA, 25 bp, Homo sapien
gaatagctgttaaatcagaattaac

SEQ ID NO: 1050489 - DNA, 25 bp, Homo sapien
taagtagtgattagattgtgctgaa

SEQ ID NO: 1050490 - DNA, 25 bp, Homo sapien
agtctttataagttggctatctttg

SEQ ID NO: 1050491 - DNA, 25 bp, Homo sapien
ttataagttggctatctttgagaaa

SEQ ID NO: 1050492 - DNA, 25 bp, Homo sapien
ttaaatttggacttacgatactgga

SEQ ID NO: 1050493 - DNA, 25 bp, Homo sapien
cattgttggtgcttgatactcattc

SEQ ID NO: 1050494 - DNA, 25 bp, Homo sapien
tgtgtgtgaccgtatctcatctaac

SEQ ID NO: 1050495 - DNA, 25 bp, Homo sapien
tacactgttatagctgagtgccaca

SEQ ID NO: 1050496 - DNA, 25 bp, Homo sapien
ttataatgaacaatgcaaagcaaag

SEQ ID NO: 1050497 - DNA, 25 bp, Homo sapien
tccctcagtcttattattcatactt

SEQ ID NO: 1050498 - DNA, 25 bp, Homo sapien
ttcatactttgcagcagcaactgta

SEQ ID NO: 1050499 - DNA, 25 bp, Homo sapien
tattcatactttgcagcagcaactg

SEQ ID NO: 1050500 - DNA, 25 bp, Homo sapien
tattattcatactttgcagcagcaa

SEQ ID NO: 1050501 - DNA, 25 bp, Homo sapien
cagtgaaaggccttccattgaccag

SEQ ID NO: 1050502 - DNA, 25 bp, Homo sapien
tacagggcttttgttagggcttgca

SEQ ID NO: 1050503 - DNA, 25 bp, Homo sapien
ggtttagccatacccagtgtacagg

SEQ ID NO: 1050504 - DNA, 25 bp, Homo sapien
tttttactatatactgggacagtga

SEQ ID NO: 1050505 - DNA, 25 bp, Homo sapien
cactgcaaccgctgtctcccaagtg

SEQ ID NO: 1050506 - DNA, 25 bp, Homo sapien
gcaagtgattctccttcctcagcct

SEQ ID NO: 1050507 - DNA, 25 bp, Homo sapien
caaccgctgtctcccaagtgcaagt

SEQ ID NO: 1050508 - DNA, 25 bp, Homo sapien
tctcaagctcctgaccttagtgatc

SEQ ID NO: 1050509 - DNA, 25 bp, Homo sapien
tttcgaaagctttgagttaccagca

SEQ ID NO: 1050510 - DNA, 25 bp, Homo sapien
ttcgaaagctttgagttaccagcat

SEQ ID NO: 1050511 - DNA, 25 bp, Homo sapien
ttttcgaaagctttgagttaccagc

SEQ ID NO: 1050512 - DNA, 25 bp, Homo sapien
ggagtacggttgtacgatctcaact

SEQ ID NO: 1050513 - DNA, 25 bp, Homo sapien
gagtacggttgtacgatctcaactc

SEQ ID NO: 1050514 - DNA, 25 bp, Homo sapien
tggagtacggttgtacgatctcaac

SEQ ID NO: 1050515 - DNA, 25 bp, Homo sapien
gtacggttgtacgatctcaactcac

SEQ ID NO: 1050516 - DNA, 25 bp, Homo sapien
ctgtgtcagttgatgacagatacat

SEQ ID NO: 1050517 - DNA, 25 bp, Homo sapien
tctgtgtcagttgatgacagataca

SEQ ID NO: 1050518 - DNA, 25 bp, Homo sapien
taaaagtcctttgccatcttgtcct

SEQ ID NO: 1050519 - DNA, 25 bp, Homo sapien
agcaggggcgggcatagtataggac

SEQ ID NO: 1050520 - DNA, 25 bp, Homo sapien
catagtataggacttggctgctgtg

SEQ ID NO: 1050521 - DNA, 25 bp, Homo sapien
ccttgccgtcctggctttcatctgg

SEQ ID NO: 1050522 - DNA, 25 bp, Homo sapien
tctgctatacacttcaggagaactg

SEQ ID NO: 1050523 - DNA, 25 bp, Homo sapien
aaaaatgaagagtggccattgtccc

SEQ ID NO: 1050524 - DNA, 25 bp, Homo sapien
tgtacatcgtgcttggcttgaatgg

SEQ ID NO: 1050525 - DNA, 25 bp, Homo sapien
cgaaagctactaggggcagcacaca

SEQ ID NO: 1050526 - DNA, 25 bp, Homo sapien
tcaggctcacgcagtacttctgcct

SEQ ID NO: 1050527 - DNA, 25 bp, Homo sapien
caggtggtcccaggttgatattttg

SEQ ID NO: 1050528 - DNA, 25 bp, Homo sapien
gggtagtccgaagatccactgggat

SEQ ID NO: 1050529 - DNA, 25 bp, Homo sapien
tacgagatcagaaccttgaaagtca

SEQ ID NO: 1050530 - DNA, 25 bp, Homo sapien
agcctaggagtaggaagaccaacct

SEQ ID NO: 1050531 - DNA, 25 bp, Homo sapien
tgagcaggagggtcactctagccca

SEQ ID NO: 1050532 - DNA, 25 bp, Homo sapien
caactagtaatggtaaactgaagga

SEQ ID NO: 1050533 - DNA, 25 bp, Homo sapien
tacagattaagctaaccacagtacc

SEQ ID NO: 1050534 - DNA, 25 bp, Homo sapien
taatcttattagtggagacaacccc

SEQ ID NO: 1050535 - DNA, 25 bp, Homo sapien
aagaggaacaacatctgtagtcaaa

SEQ ID NO: 1050536 - DNA, 25 bp, Homo sapien
ggagagagtgttgccctgtttccca

SEQ ID NO: 1050537 - DNA, 25 bp, Homo sapien
aacttatgattataagagcaagaca

SEQ ID NO: 1050538 - DNA, 25 bp, Homo sapien
gggacagcggctcaagcccctgcat

SEQ ID NO: 1050539 - DNA, 25 bp, Homo sapien
aagggacagcggctcaagcccctgc

SEQ ID NO: 1050540 - DNA, 25 bp, Homo sapien
ggaaagggacagcggctcaagcccc

SEQ ID NO: 1050541 - DNA, 25 bp, Homo sapien
gaaagggacagcggctcaagcccct

SEQ ID NO: 1050542 - DNA, 25 bp, Homo sapien
cttcggttctcgtcgtcgcagtcca

SEQ ID NO: 1050543 - DNA, 25 bp, Homo sapien
cggttctcgtcgtcgcagtccaggg

SEQ ID NO: 1050544 - DNA, 25 bp, Homo sapien
ctgtcggcccttcggttctcgtcgt

SEQ ID NO: 1050545 - DNA, 25 bp, Homo sapien
ggcccttcggttctcgtcgtcgcag

SEQ ID NO: 1050546 - DNA, 25 bp, Homo sapien
ctcaggcgccccaacagtatccttt

SEQ ID NO: 1050547 - DNA, 25 bp, Homo sapien
actcaggcgccccaacagtatcctt

SEQ ID NO: 1050548 - DNA, 25 bp, Homo sapien
agactcaggcgccccaacagtatcc

SEQ ID NO: 1050549 - DNA, 25 bp, Homo sapien
tccagactcaggcgccccaacagta

SEQ ID NO: 1050550 - DNA, 25 bp, Homo sapien
ccggcggcggcagcagcggcggcgg

SEQ ID NO: 1050551 - DNA, 25 bp, Homo sapien
gcggcggcagcggtcccccctcctc

SEQ ID NO: 1050552 - DNA, 25 bp, Homo sapien
cgcctcctcacccggcggcggcagc

SEQ ID NO: 1050553 - DNA, 25 bp, Homo sapien
ggcggcagcggtcccccctcctcac

SEQ ID NO: 1050554 - DNA, 25 bp, Homo sapien
tgcagcaggaaccggacccggcacc

SEQ ID NO: 1050555 - DNA, 25 bp, Homo sapien
ctgcagcaggaaccggacccggcac

SEQ ID NO: 1050556 - DNA, 25 bp, Homo sapien
gcagcaggaaccggacccggcaccg

SEQ ID NO: 1050557 - DNA, 25 bp, Homo sapien
cagcaggaaccggacccggcaccgg

SEQ ID NO: 1050558 - DNA, 25 bp, Homo sapien
tgagtttaccgcagaaaccggctct

SEQ ID NO: 1050559 - DNA, 25 bp, Homo sapien
gtttaccgcagaaaccggctctgaa

SEQ ID NO: 1050560 - DNA, 25 bp, Homo sapien
gagtttaccgcagaaaccggctctg

SEQ ID NO: 1050561 - DNA, 25 bp, Homo sapien
ttaccgcagaaaccggctctgaaat

SEQ ID NO: 1050562 - DNA, 25 bp, Homo sapien
tattgccgtgaaaggtccggtctct

SEQ ID NO: 1050563 - DNA, 25 bp, Homo sapien
ggtcgcgttgtcacggagaccggca

SEQ ID NO: 1050564 - DNA, 25 bp, Homo sapien
cgcgttgtcacggagaccggcagcc

SEQ ID NO: 1050565 - DNA, 25 bp, Homo sapien
aggatattgccgtgaaaggtccggt

SEQ ID NO: 1050566 - DNA, 25 bp, Homo sapien
aagtccgaagttttccgagcagccg

SEQ ID NO: 1050567 - DNA, 25 bp, Homo sapien
ctgctcgttgagtgaagaaaatcca

SEQ ID NO: 1050568 - DNA, 25 bp, Homo sapien
cgagccattccgaaaaagtccgaag

SEQ ID NO: 1050569 - DNA, 25 bp, Homo sapien
cggccacagcgccatgttggatgct

SEQ ID NO: 1050570 - DNA, 25 bp, Homo sapien
ggaaagagccgaagaggcttcccac

SEQ ID NO: 1050571 - DNA, 25 bp, Homo sapien
ccctagcagtctccggaaagagccg

SEQ ID NO: 1050572 - DNA, 25 bp, Homo sapien
ccgagcgtctccgaagaatcccgac

SEQ ID NO: 1050573 - DNA, 25 bp, Homo sapien
gaagaatcccgacccctagcagtct

SEQ ID NO: 1050574 - DNA, 25 bp, Homo sapien
gcgccgctgtaagccagcgaagcct

SEQ ID NO: 1050575 - DNA, 25 bp, Homo sapien
tcgccgatctttgccgaggaagcga

SEQ ID NO: 1050576 - DNA, 25 bp, Homo sapien
gggccattaccattgttcttcgagg

SEQ ID NO: 1050577 - DNA, 25 bp, Homo sapien
ggaggactctcgcaagccagacctc

SEQ ID NO: 1050578 - DNA, 25 bp, Homo sapien
taggggggttgtggtatcactctct

SEQ ID NO: 1050579 - DNA, 25 bp, Homo sapien
ctagctagaaagacgccgtaggggg

SEQ ID NO: 1050580 - DNA, 25 bp, Homo sapien
cgtaggggggttgtggtatcactct

SEQ ID NO: 1050581 - DNA, 25 bp, Homo sapien
gtaggggggttgtggtatcactctc

SEQ ID NO: 1050582 - DNA, 25 bp, Homo sapien
gatcccacatggtaacaagcaacac

SEQ ID NO: 1050583 - DNA, 25 bp, Homo sapien
caaaaagactttgttgccaggacac

SEQ ID NO: 1050584 - DNA, 25 bp, Homo sapien
ccatcacccagctatgaggaaatgt

SEQ ID NO: 1050585 - DNA, 25 bp, Homo sapien
ccaaggctcatggacttaattaaga

SEQ ID NO: 1050586 - DNA, 25 bp, Homo sapien
tagtggtgcaaccatagcttactac

SEQ ID NO: 1050587 - DNA, 25 bp, Homo sapien
ttcccaatagatgggactacagaca

SEQ ID NO: 1050588 - DNA, 25 bp, Homo sapien
caccatgtttggctaattatttatt

SEQ ID NO: 1050589 - DNA, 25 bp, Homo sapien
aaagacagggtcttgtcttgtagcc

SEQ ID NO: 1050590 - DNA, 25 bp, Homo sapien
gataggatcacatcgtgagagacac

SEQ ID NO: 1050591 - DNA, 25 bp, Homo sapien
gccactgcgctcagtaggatcctac

SEQ ID NO: 1050592 - DNA, 25 bp, Homo sapien
gagacaccttagagaggtcgttccg

SEQ ID NO: 1050593 - DNA, 25 bp, Homo sapien
cttccgaatgagaggataggatcac

SEQ ID NO: 1050594 - DNA, 25 bp, Homo sapien
gggaaaaggcagagcatagcaacgc

SEQ ID NO: 1050595 - DNA, 25 bp, Homo sapien
tagcaacgcttcagtctctttccag

SEQ ID NO: 1050596 - DNA, 25 bp, Homo sapien
ctcccacagagatcactggagccag

SEQ ID NO: 1050597 - DNA, 25 bp, Homo sapien
tccaggtgtctggagtatgggcagg

SEQ ID NO: 1050598 - DNA, 25 bp, Homo sapien
aacaaggagagaaggattgccaaat

SEQ ID NO: 1050599 - DNA, 25 bp, Homo sapien
gagagaaggattgccaaatttggga

SEQ ID NO: 1050600 - DNA, 25 bp, Homo sapien
aggtgagaaccaagcatcttcttca

SEQ ID NO: 1050601 - DNA, 25 bp, Homo sapien
aaggtgagaaccaagcatcttcttc

SEQ ID NO: 1050602 - DNA, 25 bp, Homo sapien
ctgagggagctgaaggtcaaacttg

SEQ ID NO: 1050603 - DNA, 25 bp, Homo sapien
aacttggtgactggcagagcaagat

SEQ ID NO: 1050604 - DNA, 25 bp, Homo sapien
caaacttggtgactggcagagcaag

SEQ ID NO: 1050605 - DNA, 25 bp, Homo sapien
cttgtcaaatgtgagtgaatttgac

SEQ ID NO: 1050606 - DNA, 25 bp, Homo sapien
tgcagggtatcgagagtggattcca

SEQ ID NO: 1050607 - DNA, 25 bp, Homo sapien
tgcccgagaggaagcagacggcaca

SEQ ID NO: 1050608 - DNA, 25 bp, Homo sapien
gcacgcagcagtcctggtagctctg

SEQ ID NO: 1050609 - DNA, 25 bp, Homo sapien
tggattccagatggaggtcctggtc

SEQ ID NO: 1050610 - DNA, 25 bp, Homo sapien
tgcagggctaacctccacgggagcc

SEQ ID NO: 1050611 - DNA, 25 bp, Homo sapien
gcaaaactgctggacttaccctggg

SEQ ID NO: 1050612 - DNA, 25 bp, Homo sapien
tgggctgcagtccattgtcggcccc

SEQ ID NO: 1050613 - DNA, 25 bp, Homo sapien
ggcacagggcatcggaagactgcaa

SEQ ID NO: 1050614 - DNA, 25 bp, Homo sapien
ccaggaccagtccagtcctctagtg

SEQ ID NO: 1050615 - DNA, 25 bp, Homo sapien
accgtcatccaccacatggctgggc

SEQ ID NO: 1050616 - DNA, 25 bp, Homo sapien
ctagtgccttatctgaggctgcagc

SEQ ID NO: 1050617 - DNA, 25 bp, Homo sapien
cccaaggagacagcccctgctccta

SEQ ID NO: 1050618 - DNA, 25 bp, Homo sapien
aggcaagagaatctcttgagctcag

SEQ ID NO: 1050619 - DNA, 25 bp, Homo sapien
tgaggcaagagaatctcttgagctc

SEQ ID NO: 1050620 - DNA, 25 bp, Homo sapien
aagagaatctcttgagctcaggagg

SEQ ID NO: 1050621 - DNA, 25 bp, Homo sapien
cagaggttgcagtgagctgagattg

SEQ ID NO: 1050622 - DNA, 25 bp, Homo sapien
tccgtcccctgagtccaacagtggg

SEQ ID NO: 1050623 - DNA, 25 bp, Homo sapien
tgtcacctcatgcaagggcgtggag

SEQ ID NO: 1050624 - DNA, 25 bp, Homo sapien
tgggaacaccaagcaccctgaatcg

SEQ ID NO: 1050625 - DNA, 25 bp, Homo sapien
ttctaaataacctgtggacaaggga

SEQ ID NO: 1050626 - DNA, 25 bp, Homo sapien
ggatactgatgacacacacagaggg

SEQ ID NO: 1050627 - DNA, 25 bp, Homo sapien
gcagtggggatactgatgacacaca

SEQ ID NO: 1050628 - DNA, 25 bp, Homo sapien
ttggcagtggggatactgatgacac

SEQ ID NO: 1050629 - DNA, 25 bp, Homo sapien
ccagcattggcagtggggatactga

SEQ ID NO: 1050630 - DNA, 25 bp, Homo sapien
cagcatagtgccaggagccacactg

SEQ ID NO: 1050631 - DNA, 25 bp, Homo sapien
aaaatgtgtccccagcatagtgcca

SEQ ID NO: 1050632 - DNA, 25 bp, Homo sapien
cacactgttgggtgttggcttcttc

SEQ ID NO: 1050633 - DNA, 25 bp, Homo sapien
tcatagtacaaggaggccgcagaag

SEQ ID NO: 1050634 - DNA, 25 bp, Homo sapien
ccacagctctgcctgcctgggcgtt

SEQ ID NO: 1050635 - DNA, 25 bp, Homo sapien
ctctgcctgcctgggcgttcatttc

SEQ ID NO: 1050636 - DNA, 25 bp, Homo sapien
acagctctgcctgcctgggcgttca

SEQ ID NO: 1050637 - DNA, 25 bp, Homo sapien
agctctgcctgcctgggcgttcatt

SEQ ID NO: 1050638 - DNA, 25 bp, Homo sapien
tggtcaggacaagatgcacacacag

SEQ ID NO: 1050639 - DNA, 25 bp, Homo sapien
aatgggatggtgatatccgcctcag

SEQ ID NO: 1050640 - DNA, 25 bp, Homo sapien
tgataggccagtttcttcacgcacc

SEQ ID NO: 1050641 - DNA, 25 bp, Homo sapien
gaggaagcagttcactttctcagga

SEQ ID NO: 1050642 - DNA, 25 bp, Homo sapien
ttcacctccggttttctgagccaac

SEQ ID NO: 1050643 - DNA, 25 bp, Homo sapien
gatggcaccatgaactgtgtcttca

SEQ ID NO: 1050644 - DNA, 25 bp, Homo sapien
tcacatggcatatgggactgaagag

SEQ ID NO: 1050645 - DNA, 25 bp, Homo sapien
caagatcaaggcacgggcttgttca

SEQ ID NO: 1050646 - DNA, 25 bp, Homo sapien
gaattttgctctggactgaccccat

SEQ ID NO: 1050647 - DNA, 25 bp, Homo sapien
agtcatttaaagtcaggcatctggg

SEQ ID NO: 1050648 - DNA, 25 bp, Homo sapien
tcacagtcgacttgctctcaaaggc

SEQ ID NO: 1050649 - DNA, 25 bp, Homo sapien
tcttgctaagatgtgaggagtgccc

SEQ ID NO: 1050650 - DNA, 25 bp, Homo sapien
tgccaaagccagctgcctgatcttc

SEQ ID NO: 1050651 - DNA, 25 bp, Homo sapien
tacacctgcagcctgaactgaggag

SEQ ID NO: 1050652 - DNA, 25 bp, Homo sapien
gaagggatatagctgaagttacacc

SEQ ID NO: 1050653 - DNA, 25 bp, Homo sapien
gaacatacaccattttcagcggcag

SEQ ID NO: 1050654 - DNA, 25 bp, Homo sapien
gccttgacctgtgattctctcacct

SEQ ID NO: 1050655 - DNA, 25 bp, Homo sapien
agccttgacctgtgattctctcacc

SEQ ID NO: 1050656 - DNA, 25 bp, Homo sapien
cagccttgacctgtgattctctcac

SEQ ID NO: 1050657 - DNA, 25 bp, Homo sapien
ggttcagtttcactaccgggctgag

SEQ ID NO: 1050658 - DNA, 25 bp, Homo sapien
taaggagacagggtcccgtgagacc

SEQ ID NO: 1050659 - DNA, 25 bp, Homo sapien
tgatttctgcttgggagttccgtga

SEQ ID NO: 1050660 - DNA, 25 bp, Homo sapien
gggttctcctgtctaaaatgctgtg

SEQ ID NO: 1050661 - DNA, 25 bp, Homo sapien
tccatcttccacaaggagcacagga

SEQ ID NO: 1050662 - DNA, 25 bp, Homo sapien
tgattctcatctcagggacgaggca

SEQ ID NO: 1050663 - DNA, 25 bp, Homo sapien
gaagattcgcattatggctccctca

SEQ ID NO: 1050664 - DNA, 25 bp, Homo sapien
gacccaggttcgaggcccagctcta

SEQ ID NO: 1050665 - DNA, 25 bp, Homo sapien
gccaattaccagcaccaaaagtagt

SEQ ID NO: 1050666 - DNA, 25 bp, Homo sapien
gaaatataagtgtttagctaccaga

SEQ ID NO: 1050667 - DNA, 25 bp, Homo sapien
tgaaatgaggtttagatccagagat

SEQ ID NO: 1050668 - DNA, 25 bp, Homo sapien
tgtaaagattgaacagatcccagcc

SEQ ID NO: 1050669 - DNA, 25 bp, Homo sapien
acgtccgtggaaagatgtgaaagcc

SEQ ID NO: 1050670 - DNA, 25 bp, Homo sapien
gaaagcgcgttaagctgaggagcca

SEQ ID NO: 1050671 - DNA, 25 bp, Homo sapien
tgtttcacacttgcaaggagctgac

SEQ ID NO: 1050672 - DNA, 25 bp, Homo sapien
cactgtgttgggatgagatgccaga

SEQ ID NO: 1050673 - DNA, 25 bp, Homo sapien
gctgaagagggaaccctggctctgt

SEQ ID NO: 1050674 - DNA, 25 bp, Homo sapien
tgctgtccaagacatcgcctgggct

SEQ ID NO: 1050675 - DNA, 25 bp, Homo sapien
ttagaatccaaggagcctagctccc

SEQ ID NO: 1050676 - DNA, 25 bp, Homo sapien
gaactgggaccgagatgtggatctc

SEQ ID NO: 1050677 - DNA, 25 bp, Homo sapien
caaatgttcctctcgagggcaaggg

SEQ ID NO: 1050678 - DNA, 25 bp, Homo sapien
caccttggctatcagttggtggagc

SEQ ID NO: 1050679 - DNA, 25 bp, Homo sapien
tggttatgccacttgggcggagctt

SEQ ID NO: 1050680 - DNA, 25 bp, Homo sapien
tggctcgggcactttgcatgtctgg

SEQ ID NO: 1050681 - DNA, 25 bp, Homo sapien
cagaatcaagatagagggtatttcc

SEQ ID NO: 1050682 - DNA, 25 bp, Homo sapien
acagtgaaatgcacaagtgagggct

SEQ ID NO: 1050683 - DNA, 25 bp, Homo sapien
tcccagtcgtcagtatgttcagcac

SEQ ID NO: 1050684 - DNA, 25 bp, Homo sapien
gaagatgtcgttcaaggccttaacc

SEQ ID NO: 1050685 - DNA, 25 bp, Homo sapien
ggcaggccctgtatcagtctgccct

SEQ ID NO: 1050686 - DNA, 25 bp, Homo sapien
acacagacaatgacattgacatccc

SEQ ID NO: 1050687 - DNA, 25 bp, Homo sapien
ctggtgggaagctcattttttggca

SEQ ID NO: 1050688 - DNA, 25 bp, Homo sapien
attgacatccccagcgtccaggagg

SEQ ID NO: 1050689 - DNA, 25 bp, Homo sapien
taggatatgttgctgattgtgggtt

SEQ ID NO: 1050690 - DNA, 25 bp, Homo sapien
agtagtttatgatcagggacagagc

SEQ ID NO: 1050691 - DNA, 25 bp, Homo sapien
gcagaatgtgtctttgacagaagct

SEQ ID NO: 1050692 - DNA, 25 bp, Homo sapien
ggtgatggtttccttgtcaacatgt

SEQ ID NO: 1050693 - DNA, 25 bp, Homo sapien
gctcttttctcacttgccctggaag

SEQ ID NO: 1050694 - DNA, 25 bp, Homo sapien
tgttgggcaacaaaagggaggcact

SEQ ID NO: 1050695 - DNA, 25 bp, Homo sapien
cacgcctactgagtttataaatggg

SEQ ID NO: 1050696 - DNA, 25 bp, Homo sapien
ttggtggtgcatgggacacgcctac

SEQ ID NO: 1050697 - DNA, 25 bp, Homo sapien
tgccagggcacaggttgactctcct

SEQ ID NO: 1050698 - DNA, 25 bp, Homo sapien
tgtcgagaacagtgctaacacgtag

SEQ ID NO: 1050699 - DNA, 25 bp, Homo sapien
gtgagcccctggcagagtatccggc

SEQ ID NO: 1050700 - DNA, 25 bp, Homo sapien
cataccagtgtgtgagattgccctg

SEQ ID NO: 1050701 - DNA, 25 bp, Homo sapien
agctgagtctgggaagcagctattg

SEQ ID NO: 1050702 - DNA, 25 bp, Homo sapien
tttgctcagggagctcgtgctgtgt

SEQ ID NO: 1050703 - DNA, 25 bp, Homo sapien
atgggtatttttgctcagggagctc

SEQ ID NO: 1050704 - DNA, 25 bp, Homo sapien
ctgagtctgggaagcagctattgtt

SEQ ID NO: 1050705 - DNA, 25 bp, Homo sapien
ttccatgagagtcctttgcagccag

SEQ ID NO: 1050706 - DNA, 25 bp, Homo sapien
cttccatgagagtcctttgcagcca

SEQ ID NO: 1050707 - DNA, 25 bp, Homo sapien
caccatccgcccaccccacccccat

SEQ ID NO: 1050708 - DNA, 25 bp, Homo sapien
tcaccatccgcccaccccaccccca

SEQ ID NO: 1050709 - DNA, 25 bp, Homo sapien
cagtgggtggttactcggcatcctg

SEQ ID NO: 1050710 - DNA, 25 bp, Homo sapien
tggccatgagaaagcggcacttcat

SEQ ID NO: 1050711 - DNA, 25 bp, Homo sapien
tcctgttgggcttccggtgtggtgg

SEQ ID NO: 1050712 - DNA, 25 bp, Homo sapien
gagaaagcggcacttcatcttcctt

SEQ ID NO: 1050713 - DNA, 25 bp, Homo sapien
ctgccaagcccgagggcgcctggat

SEQ ID NO: 1050714 - DNA, 25 bp, Homo sapien
agagctggagtccccttacaacccg

SEQ ID NO: 1050715 - DNA, 25 bp, Homo sapien
ctgtaaagccgaagagtcccacagt

SEQ ID NO: 1050716 - DNA, 25 bp, Homo sapien
gatgctgccaagcccgagggcgcct

SEQ ID NO: 1050717 - DNA, 25 bp, Homo sapien
gctaggtcggtgctgtcagagacca

SEQ ID NO: 1050718 - DNA, 25 bp, Homo sapien
tctcccggtgatgggtcctcagagg

SEQ ID NO: 1050719 - DNA, 25 bp, Homo sapien
cattcggagggctaggttgcggccc

SEQ ID NO: 1050720 - DNA, 25 bp, Homo sapien
gggtgtatgtggtggcgacgcagct

SEQ ID NO: 1050721 - DNA, 25 bp, Homo sapien
cgtcccgggacactgaggtcggtct

SEQ ID NO: 1050722 - DNA, 25 bp, Homo sapien
agcgtcccgggacactgaggtcggt

SEQ ID NO: 1050723 - DNA, 25 bp, Homo sapien
ctgagcgtcccgggacactgaggtc

SEQ ID NO: 1050724 - DNA, 25 bp, Homo sapien
tgagcgtcccgggacactgaggtcg

SEQ ID NO: 1050725 - DNA, 25 bp, Homo sapien
gagcttggttctggtcccagccgga

SEQ ID NO: 1050726 - DNA, 25 bp, Homo sapien
ccggctctcggaaggcgtggagtcg

SEQ ID NO: 1050727 - DNA, 25 bp, Homo sapien
aagtccctggactcagcttggcttg

SEQ ID NO: 1050728 - DNA, 25 bp, Homo sapien
cggcgatttcgaggtgcctggatgc

SEQ ID NO: 1050729 - DNA, 25 bp, Homo sapien
agcctcgacggtcgcgggcagcggt

SEQ ID NO: 1050730 - DNA, 25 bp, Homo sapien
gaacccggagctgggaatcgggagc

SEQ ID NO: 1050731 - DNA, 25 bp, Homo sapien
agctatggtgagtgctgcgcgcgga

SEQ ID NO: 1050732 - DNA, 25 bp, Homo sapien
cgagccgtccgagcagctgggctgg

SEQ ID NO: 1050733 - DNA, 25 bp, Homo sapien
ctcaaatatagcggacacaggttgt

SEQ ID NO: 1050734 - DNA, 25 bp, Homo sapien
tcaaatatagcggacacaggttgtc

SEQ ID NO: 1050735 - DNA, 25 bp, Homo sapien
caaatatagcggacacaggttgtcc

SEQ ID NO: 1050736 - DNA, 25 bp, Homo sapien
tggtcaccttgcagacacggccaga

SEQ ID NO: 1050737 - DNA, 25 bp, Homo sapien
aaggagcttttcgacctccctgagt

SEQ ID NO: 1050738 - DNA, 25 bp, Homo sapien
aggtctggtcaccttgcagacacgg

SEQ ID NO: 1050739 - DNA, 25 bp, Homo sapien
ccttcaccatgctcccaactgctgc

SEQ ID NO: 1050740 - DNA, 25 bp, Homo sapien
gaagacacttgaggaatagtcagga

SEQ ID NO: 1050741 - DNA, 25 bp, Homo sapien
gctgatagtttaagtaccccatgat

SEQ ID NO: 1050742 - DNA, 25 bp, Homo sapien
gccagggcagctgatagtttaagta

SEQ ID NO: 1050743 - DNA, 25 bp, Homo sapien
gaggaatagtcaggaatcggacacc

SEQ ID NO: 1050744 - DNA, 25 bp, Homo sapien
tgtttggatgaggtgatctctgaag

SEQ ID NO: 1050745 - DNA, 25 bp, Homo sapien
ggctggccgttcccagaaagctgtt

SEQ ID NO: 1050746 - DNA, 25 bp, Homo sapien
agctcccctttccagcagtttttct

SEQ ID NO: 1050747 - DNA, 25 bp, Homo sapien
gcttggggcaccccaatccactcct

SEQ ID NO: 1050748 - DNA, 25 bp, Homo sapien
tggggcaccccaatccactcctagc

SEQ ID NO: 1050749 - DNA, 25 bp, Homo sapien
caacccagacttgtgatagataagg

SEQ ID NO: 1050750 - DNA, 25 bp, Homo sapien
tcttccttgcttgcctgcgcgttgc

SEQ ID NO: 1050751 - DNA, 25 bp, Homo sapien
ttgcctgcgcgttgcaacccagact

SEQ ID NO: 1050752 - DNA, 25 bp, Homo sapien
tgcgcgttgcaacccagacttgtga

SEQ ID NO: 1050753 - DNA, 25 bp, Homo sapien
aatttcccttctaaatggaggtcag

SEQ ID NO: 1050754 - DNA, 25 bp, Homo sapien
atttcccttctaaatggaggtcagc

SEQ ID NO: 1050755 - DNA, 25 bp, Homo sapien
tttcccttctaaatggaggtcagcc

SEQ ID NO: 1050756 - DNA, 25 bp, Homo sapien
agcattttgatgagcggcggcgcat

SEQ ID NO: 1050757 - DNA, 25 bp, Homo sapien
gcattttgatgagcggcggcgcatg

SEQ ID NO: 1050758 - DNA, 25 bp, Homo sapien
gccatcctttgcggtggccacgtac

SEQ ID NO: 1050759 - DNA, 25 bp, Homo sapien
aggatctctgtccaccctcctcttc

SEQ ID NO: 1050760 - DNA, 25 bp, Homo sapien
ggagtctaggttctgaaatagcagc

SEQ ID NO: 1050761 - DNA, 25 bp, Homo sapien
caggagtctaggttctgaaatagca

SEQ ID NO: 1050762 - DNA, 25 bp, Homo sapien
agcaagtcagaattccaggatctct

SEQ ID NO: 1050763 - DNA, 25 bp, Homo sapien
aatgctgatcacgttactcagagtc

SEQ ID NO: 1050764 - DNA, 25 bp, Homo sapien
tgagacttgaatgctgatcacgtta

SEQ ID NO: 1050765 - DNA, 25 bp, Homo sapien
gacttgaatgctgatcacgttactc

SEQ ID NO: 1050766 - DNA, 25 bp, Homo sapien
tgaatgctgatcacgttactcagag

SEQ ID NO: 1050767 - DNA, 25 bp, Homo sapien
acgtctttaactgctcttagcaata

SEQ ID NO: 1050768 - DNA, 25 bp, Homo sapien
aaatgcaagaaggaacgttctctat

SEQ ID NO: 1050769 - DNA, 25 bp, Homo sapien
atgcaagaaggaacgttctctattc

SEQ ID NO: 1050770 - DNA, 25 bp, Homo sapien
aaacgtctttaactgctcttagcaa

SEQ ID NO: 1050771 - DNA, 25 bp, Homo sapien
gtcctgtattccagtgatcatcctg

SEQ ID NO: 1050772 - DNA, 25 bp, Homo sapien
cttatgatgaagtatttgggagagt

SEQ ID NO: 1050773 - DNA, 25 bp, Homo sapien
taaaagtagaaatgtcctgtattcc

SEQ ID NO: 1050774 - DNA, 25 bp, Homo sapien
cagtgatcatcctgtaaacatttta

SEQ ID NO: 1050775 - DNA, 25 bp, Homo sapien
acgaacttgctggcgcgctcaacca

SEQ ID NO: 1050776 - DNA, 25 bp, Homo sapien
cgccaccaccagcacgaacttgctg

SEQ ID NO: 1050777 - DNA, 25 bp, Homo sapien
cgaacttgctggcgcgctcaaccat

SEQ ID NO: 1050778 - DNA, 25 bp, Homo sapien
tgggcccgcgtactggtacaagatg

SEQ ID NO: 1050779 - DNA, 25 bp, Homo sapien
tgtgcaggaagacgatcacgtcgtc

SEQ ID NO: 1050780 - DNA, 25 bp, Homo sapien
tcgaggcgtacgttctgcacgaggt

SEQ ID NO: 1050781 - DNA, 25 bp, Homo sapien
ccttcatgtcgaagcgcagcgagcg

SEQ ID NO: 1050782 - DNA, 25 bp, Homo sapien
ttgggccggtagcaggtgcacttct

SEQ ID NO: 1050783 - DNA, 25 bp, Homo sapien
agaagagccaagtctcgcggcggtt

SEQ ID NO: 1050784 - DNA, 25 bp, Homo sapien
gtgcacttcttctggccgggccggc

SEQ ID NO: 1050785 - DNA, 25 bp, Homo sapien
cagcacgccgggcacgcagttggtg

SEQ ID NO: 1050786 - DNA, 25 bp, Homo sapien
gttgtacgggcagtccatgaactcc

SEQ ID NO: 1050787 - DNA, 25 bp, Homo sapien
atgaactcctgtagcgtgcagcccg

SEQ ID NO: 1050788 - DNA, 25 bp, Homo sapien
ttgtactgcatgaagggccggatga

SEQ ID NO: 1050789 - DNA, 25 bp, Homo sapien
tgaacgtccgctcgaacaggtactg

SEQ ID NO: 1050790 - DNA, 25 bp, Homo sapien
tttttgcgataaatccaaggaggcc

SEQ ID NO: 1050791 - DNA, 25 bp, Homo sapien
ggtctcactcctagtagcccggaca

SEQ ID NO: 1050792 - DNA, 25 bp, Homo sapien
ggactcgagtcttctctgcctcaga

SEQ ID NO: 1050793 - DNA, 25 bp, Homo sapien
catggcatccttcgagcacgctttc

SEQ ID NO: 1050794 - DNA, 25 bp, Homo sapien
acaagtggcagcatgcctggccaaa

SEQ ID NO: 1050795 - DNA, 25 bp, Homo sapien
ccggaaatgcagctcgggcctacta

SEQ ID NO: 1050796 - DNA, 25 bp, Homo sapien
ttggcccacggaaggccggaaatgc

SEQ ID NO: 1050797 - DNA, 25 bp, Homo sapien
ctacccaaaccctccttggtctgag

SEQ ID NO: 1050798 - DNA, 25 bp, Homo sapien
cggtccccagcccttccagtctgag

SEQ ID NO: 1050799 - DNA, 25 bp, Homo sapien
ggatggtcacctccaagggccagcc

SEQ ID NO: 1050800 - DNA, 25 bp, Homo sapien
ctgctagcaaatcccagtgggtcag

SEQ ID NO: 1050801 - DNA, 25 bp, Homo sapien
ccagtgggtcagaaaggagaacaga

SEQ ID NO: 1050802 - DNA, 25 bp, Homo sapien
taatccgtacgctggtgggagcagt

SEQ ID NO: 1050803 - DNA, 25 bp, Homo sapien
gagctcttgagtatgtgtttcggtg

SEQ ID NO: 1050804 - DNA, 25 bp, Homo sapien
gaagcctgatgaacttaatccgtac

SEQ ID NO: 1050805 - DNA, 25 bp, Homo sapien
gttgagaatctgaaagctcgagtcc

SEQ ID NO: 1050806 - DNA, 25 bp, Homo sapien
ccccatgttgagtgtccgagcagat

SEQ ID NO: 1050807 - DNA, 25 bp, Homo sapien
agtgtgatgcatccacccagggagg

SEQ ID NO: 1050808 - DNA, 25 bp, Homo sapien
cacagggcacgtgcttacaacggat

SEQ ID NO: 1050809 - DNA, 25 bp, Homo sapien
gacaagacccgtgcttccgtgtgag

SEQ ID NO: 1050810 - DNA, 25 bp, Homo sapien
ttctggacagctcccctcccagctg

SEQ ID NO: 1050811 - DNA, 25 bp, Homo sapien
gctcagtcccaggccgaccttctgg

SEQ ID NO: 1050812 - DNA, 25 bp, Homo sapien
agtcccaggccgaccttctggacag

SEQ ID NO: 1050813 - DNA, 25 bp, Homo sapien
tcagtcccaggccgaccttctggac

SEQ ID NO: 1050814 - DNA, 25 bp, Homo sapien
gccaggtcccttctcgtgaagcacc

SEQ ID NO: 1050815 - DNA, 25 bp, Homo sapien
caggtcccttctcgtgaagcacctt

SEQ ID NO: 1050816 - DNA, 25 bp, Homo sapien
gtcccttctcgtgaagcaccttgtc

SEQ ID NO: 1050817 - DNA, 25 bp, Homo sapien
ggtcccttctcgtgaagcaccttgt

SEQ ID NO: 1050818 - DNA, 25 bp, Homo sapien
ctggcactgaggtgagccttgtcca

SEQ ID NO: 1050819 - DNA, 25 bp, Homo sapien
gagccttgtccaggtcgctttgcat

SEQ ID NO: 1050820 - DNA, 25 bp, Homo sapien
gcactgaggtgagccttgtccaggt

SEQ ID NO: 1050821 - DNA, 25 bp, Homo sapien
tgaggtgagccttgtccaggtcgct

SEQ ID NO: 1050822 - DNA, 25 bp, Homo sapien
gggacacctgcctcgtgtggcaccc

SEQ ID NO: 1050823 - DNA, 25 bp, Homo sapien
ggacacctgcctcgtgtggcaccca

SEQ ID NO: 1050824 - DNA, 25 bp, Homo sapien
agggacacctgcctcgtgtggcacc

SEQ ID NO: 1050825 - DNA, 25 bp, Homo sapien
gacacctgcctcgtgtggcacccac

SEQ ID NO: 1050826 - DNA, 25 bp, Homo sapien
ggtccttgttgacctgatccttctc

SEQ ID NO: 1050827 - DNA, 25 bp, Homo sapien
cagggcctcaagcttcttggtgagg

SEQ ID NO: 1050828 - DNA, 25 bp, Homo sapien
tccagattctgcttctgaagacgct

SEQ ID NO: 1050829 - DNA, 25 bp, Homo sapien
ttctgaagacgctccactgccaggc

SEQ ID NO: 1050830 - DNA, 25 bp, Homo sapien
tgctgtagctcctctccgtcctctg

SEQ ID NO: 1050831 - DNA, 25 bp, Homo sapien
gtcccttaggctctgctgtagctcc

SEQ ID NO: 1050832 - DNA, 25 bp, Homo sapien
cgcctgctcctgtagccacagggat

SEQ ID NO: 1050833 - DNA, 25 bp, Homo sapien
tgtagctcctctccgtcctctgtct

SEQ ID NO: 1050834 - DNA, 25 bp, Homo sapien
tctgcctggcgagtagcaccgcggt

SEQ ID NO: 1050835 - DNA, 25 bp, Homo sapien
aggctgcgctccgacgcatccacgg

SEQ ID NO: 1050836 - DNA, 25 bp, Homo sapien
tccgacgcatccacggtgcacttgg

SEQ ID NO: 1050837 - DNA, 25 bp, Homo sapien
ccacggtgcacttggagccgctcag

SEQ ID NO: 1050838 - DNA, 25 bp, Homo sapien
ctgcatggtgccctcggtcttgtcc

SEQ ID NO: 1050839 - DNA, 25 bp, Homo sapien
atggtgccctcggtcttgtcccgca

SEQ ID NO: 1050840 - DNA, 25 bp, Homo sapien
gcatggtgccctcggtcttgtcccg

SEQ ID NO: 1050841 - DNA, 25 bp, Homo sapien
ggtgccctcggtcttgtcccgcagg

SEQ ID NO: 1050842 - DNA, 25 bp, Homo sapien
gcttcttggctctccgcagccgctg

SEQ ID NO: 1050843 - DNA, 25 bp, Homo sapien
agcttcttggctctccgcagccgct

SEQ ID NO: 1050844 - DNA, 25 bp, Homo sapien
gactggtgttatgcccaaacgctga

SEQ ID NO: 1050845 - DNA, 25 bp, Homo sapien
tcacacgcataaggctcgactggtg

SEQ ID NO: 1050846 - DNA, 25 bp, Homo sapien
gacttattcttcagtagcccccagc

SEQ ID NO: 1050847 - DNA, 25 bp, Homo sapien
tgcccaaacgctgacttattcttca

SEQ ID NO: 1050848 - DNA, 25 bp, Homo sapien
ggatcctcacctacccatcccagta

SEQ ID NO: 1050849 - DNA, 25 bp, Homo sapien
gcagaagctcactcagtctcgggat

SEQ ID NO: 1050850 - DNA, 25 bp, Homo sapien
agctcactcagtctcgggatcctca

SEQ ID NO: 1050851 - DNA, 25 bp, Homo sapien
gaagctcactcagtctcgggatcct

SEQ ID NO: 1050852 - DNA, 25 bp, Homo sapien
ggaggacggcaagggacaattggct

SEQ ID NO: 1050853 - DNA, 25 bp, Homo sapien
ggatctcgcagctcttgatgtcggc

SEQ ID NO: 1050854 - DNA, 25 bp, Homo sapien
gatgtcggcccacaccatgtgaggc

SEQ ID NO: 1050855 - DNA, 25 bp, Homo sapien
tgttggatctcgcagctcttgatgt

SEQ ID NO: 1050856 - DNA, 25 bp, Homo sapien
agctcttgatgtcggcccacaccat

SEQ ID NO: 1050857 - DNA, 25 bp, Homo sapien
gagctggcaatgcctcgggattttt

SEQ ID NO: 1050858 - DNA, 25 bp, Homo sapien
gctggcaatgcctcgggatttttac

SEQ ID NO: 1050859 - DNA, 25 bp, Homo sapien
cgagctggcaatgcctcgggatttt

SEQ ID NO: 1050860 - DNA, 25 bp, Homo sapien
agctggcaatgcctcgggattttta

SEQ ID NO: 1050861 - DNA, 25 bp, Homo sapien
tcactggacttctctccttgcactg

SEQ ID NO: 1050862 - DNA, 25 bp, Homo sapien
cttgcactggctcctactcccccag

SEQ ID NO: 1050863 - DNA, 25 bp, Homo sapien
gcactggctcctactcccccaggac

SEQ ID NO: 1050864 - DNA, 25 bp, Homo sapien
cactggacttctctccttgcactgg

SEQ ID NO: 1050865 - DNA, 25 bp, Homo sapien
caaggcctgtgccatttacctctaa

SEQ ID NO: 1050866 - DNA, 25 bp, Homo sapien
catttacctctaaccctgcggtgcc

SEQ ID NO: 1050867 - DNA, 25 bp, Homo sapien
gccatttacctctaaccctgcggtg

SEQ ID NO: 1050868 - DNA, 25 bp, Homo sapien
agttggagatttcaaggcctgtgcc

SEQ ID NO: 1050869 - DNA, 25 bp, Homo sapien
tgtggctgtttcagagcccttgcca

SEQ ID NO: 1050870 - DNA, 25 bp, Homo sapien
ttatgtggctgtttcagagcccttg

SEQ ID NO: 1050871 - DNA, 25 bp, Homo sapien
gtggctgtttcagagcccttgccac

SEQ ID NO: 1050872 - DNA, 25 bp, Homo sapien
tatgtggctgtttcagagcccttgc

SEQ ID NO: 1050873 - DNA, 25 bp, Homo sapien
cgtcttggtaaggagaatgtctctg

SEQ ID NO: 1050874 - DNA, 25 bp, Homo sapien
ctgtgcatttcttaacgtcttggta

SEQ ID NO: 1050875 - DNA, 25 bp, Homo sapien
tcttaacgtcttggtaaggagaatg

SEQ ID NO: 1050876 - DNA, 25 bp, Homo sapien
aacgtcttggtaaggagaatgtctc

SEQ ID NO: 1050877 - DNA, 25 bp, Homo sapien
gggtgccacaggacctttacacgca

SEQ ID NO: 1050878 - DNA, 25 bp, Homo sapien
gagggcaaatccatgcagcatctcc

SEQ ID NO: 1050879 - DNA, 25 bp, Homo sapien
accctgttgttctcactgacagcgg

SEQ ID NO: 1050880 - DNA, 25 bp, Homo sapien
tagatggccaagtcccatggcctgt

SEQ ID NO: 1050881 - DNA, 25 bp, Homo sapien
ggtttccatgcagggcgatcctcct

SEQ ID NO: 1050882 - DNA, 25 bp, Homo sapien
gatgtaatcgagatcccaaatcggt

SEQ ID NO: 1050883 - DNA, 25 bp, Homo sapien
gagatctcagtcctacagtcacaag

SEQ ID NO: 1050884 - DNA, 25 bp, Homo sapien
aacatgggaggcctctaggagcagc

SEQ ID NO: 1050885 - DNA, 25 bp, Homo sapien
ttaattttgctctagtgggcgtaaa

SEQ ID NO: 1050886 - DNA, 25 bp, Homo sapien
tgtggattttgtcagggtttggctt

SEQ ID NO: 1050887 - DNA, 25 bp, Homo sapien
gctttaggctttaccaggttggtga

SEQ ID NO: 1050888 - DNA, 25 bp, Homo sapien
taaatgtcgacttggctaacttgtg

SEQ ID NO: 1050889 - DNA, 25 bp, Homo sapien
tctaggattattaacatacacagtc

SEQ ID NO: 1050890 - DNA, 25 bp, Homo sapien
taggattattaacatacacagtcat

SEQ ID NO: 1050891 - DNA, 25 bp, Homo sapien
caaaagactacttctattgagctta

SEQ ID NO: 1050892 - DNA, 25 bp, Homo sapien
atacaaaagactacttctattgagc

SEQ ID NO: 1050893 - DNA, 25 bp, Homo sapien
gagttgaagtcgagacctctctgag

SEQ ID NO: 1050894 - DNA, 25 bp, Homo sapien
tctaaggctggagcaaacttcctcc

SEQ ID NO: 1050895 - DNA, 25 bp, Homo sapien
caggccctttagagttgaagtcgag

SEQ ID NO: 1050896 - DNA, 25 bp, Homo sapien
taaggctggagcaaacttcctccat

SEQ ID NO: 1050897 - DNA, 25 bp, Homo sapien
agcatccatggcctgtgacagagct

SEQ ID NO: 1050898 - DNA, 25 bp, Homo sapien
catccatggcctgtgacagagctct

SEQ ID NO: 1050899 - DNA, 25 bp, Homo sapien
tggggactgatatccttccactgac

SEQ ID NO: 1050900 - DNA, 25 bp, Homo sapien
tgtgacagagctctggggactgata

SEQ ID NO: 1050901 - DNA, 25 bp, Homo sapien
tcattttagattcccaatagtaata

SEQ ID NO: 1050902 - DNA, 25 bp, Homo sapien
ttttttcttaagtcatactgctggg

SEQ ID NO: 1050903 - DNA, 25 bp, Homo sapien
tttcctaatgacgaaaaacattgaa

SEQ ID NO: 1050904 - DNA, 25 bp, Homo sapien
ctaatgacgaaaaacattgaacatc

SEQ ID NO: 1050905 - DNA, 25 bp, Homo sapien
gccacttactattaaagtgagatgc

SEQ ID NO: 1050906 - DNA, 25 bp, Homo sapien
catattttggccacttactattaaa

SEQ ID NO: 1050907 - DNA, 25 bp, Homo sapien
ccagcatcatattttggccacttac

SEQ ID NO: 1050908 - DNA, 25 bp, Homo sapien
gcgatccttccacctagttctccaa

SEQ ID NO: 1050909 - DNA, 25 bp, Homo sapien
ccatgactgctgaagtttgaattct

SEQ ID NO: 1050910 - DNA, 25 bp, Homo sapien
tgaattcttagcagtacgattcttt

SEQ ID NO: 1050911 - DNA, 25 bp, Homo sapien
gattctttttcttgtaaggtcagca

SEQ ID NO: 1050912 - DNA, 25 bp, Homo sapien
cagtacgattctttttcttgtaagg

SEQ ID NO: 1050913 - DNA, 25 bp, Homo sapien
tgtccgattccatcagtgattcggg

SEQ ID NO: 1050914 - DNA, 25 bp, Homo sapien
agtgattcgggctcctcccaaggct

SEQ ID NO: 1050915 - DNA, 25 bp, Homo sapien
atctccatgcactgtccgattccat

SEQ ID NO: 1050916 - DNA, 25 bp, Homo sapien
ttccatcagtgattcgggctcctcc

SEQ ID NO: 1050917 - DNA, 25 bp, Homo sapien
cttttcataagcacaatgtgcattt

SEQ ID NO: 1050918 - DNA, 25 bp, Homo sapien
cagaatgagtcataggaagagtata

SEQ ID NO: 1050919 - DNA, 25 bp, Homo sapien
tcataggaagagtatacattcctgt

SEQ ID NO: 1050920 - DNA, 25 bp, Homo sapien
aaatatgagcagtggtttaggtttt

SEQ ID NO: 1050921 - DNA, 25 bp, Homo sapien
taagacgtatcaacggctttaagta

SEQ ID NO: 1050922 - DNA, 25 bp, Homo sapien
cgtatcaacggctttaagtaaatgt

SEQ ID NO: 1050923 - DNA, 25 bp, Homo sapien
acgtatcaacggctttaagtaaatg

SEQ ID NO: 1050924 - DNA, 25 bp, Homo sapien
gcagtgagtgtgatcctgggctgcc

SEQ ID NO: 1050925 - DNA, 25 bp, Homo sapien
ggaggactggatcaatcccatttca

SEQ ID NO: 1050926 - DNA, 25 bp, Homo sapien
caatcccatttcaaagcatgtctct

SEQ ID NO: 1050927 - DNA, 25 bp, Homo sapien
atgtctctctgcactccacgctgtc

SEQ ID NO: 1050928 - DNA, 25 bp, Homo sapien
gaatgagtaggaaagagtgatcccc

SEQ ID NO: 1050929 - DNA, 25 bp, Homo sapien
tgagtaggaaagagtgatcccctga

SEQ ID NO: 1050930 - DNA, 25 bp, Homo sapien
aggaatgagtaggaaagagtgatcc

SEQ ID NO: 1050931 - DNA, 25 bp, Homo sapien
aggaaagagtgatcccctgaaccac

SEQ ID NO: 1050932 - DNA, 25 bp, Homo sapien
tctccgacaagagtgaggccagtgt

SEQ ID NO: 1050933 - DNA, 25 bp, Homo sapien
aaggcactgccaatagctcagtctc

SEQ ID NO: 1050934 - DNA, 25 bp, Homo sapien
aggatccttaacgacaaaaacaatg

SEQ ID NO: 1050935 - DNA, 25 bp, Homo sapien
aacgacaaaaacaatgttcgaggtg

SEQ ID NO: 1050936 - DNA, 25 bp, Homo sapien
gctgacgtttgtggcagaagaggtg

SEQ ID NO: 1050937 - DNA, 25 bp, Homo sapien
cggaccaagggccggcagataccac

SEQ ID NO: 1050938 - DNA, 25 bp, Homo sapien
tgacgtttgtggcagaagaggtggg

SEQ ID NO: 1050939 - DNA, 25 bp, Homo sapien
cagataccaccatgctgacgtttgt

SEQ ID NO: 1050940 - DNA, 25 bp, Homo sapien
tattttgccggttggccaggaagta

SEQ ID NO: 1050941 - DNA, 25 bp, Homo sapien
ttgccggttggccaggaagtaggcc

SEQ ID NO: 1050942 - DNA, 25 bp, Homo sapien
attattttgccggttggccaggaag

SEQ ID NO: 1050943 - DNA, 25 bp, Homo sapien
attttgccggttggccaggaagtag

SEQ ID NO: 1050944 - DNA, 25 bp, Homo sapien
ctcttctgtgagcagccgctcatcc

SEQ ID NO: 1050945 - DNA, 25 bp, Homo sapien
tcttctgtgagcagccgctcatccc

SEQ ID NO: 1050946 - DNA, 25 bp, Homo sapien
cttctgtgagcagccgctcatccct

SEQ ID NO: 1050947 - DNA, 25 bp, Homo sapien
ctgttctcggaggtcccgtccctgg

SEQ ID NO: 1050948 - DNA, 25 bp, Homo sapien
gctgttctcggaggtcccgtccctg

SEQ ID NO: 1050949 - DNA, 25 bp, Homo sapien
cttttggacgaggtgctgtgccagc

SEQ ID NO: 1050950 - DNA, 25 bp, Homo sapien
ctgggctgagcttttggacgaggtg

SEQ ID NO: 1050951 - DNA, 25 bp, Homo sapien
gagcttttggacgaggtgctgtgcc

SEQ ID NO: 1050952 - DNA, 25 bp, Homo sapien
ttggacgaggtgctgtgccagccta

SEQ ID NO: 1050953 - DNA, 25 bp, Homo sapien
agcctcctcaactttaacatcttca

SEQ ID NO: 1050954 - DNA, 25 bp, Homo sapien
gcctcctcaactttaacatcttcat

SEQ ID NO: 1050955 - DNA, 25 bp, Homo sapien
ctgggggcatataattcctgtactt

SEQ ID NO: 1050956 - DNA, 25 bp, Homo sapien
ggggcatataattcctgtactttct

SEQ ID NO: 1050957 - DNA, 25 bp, Homo sapien
gctagctggtttcgacaggaggcat

SEQ ID NO: 1050958 - DNA, 25 bp, Homo sapien
tgctagctggtttcgacaggaggca

SEQ ID NO: 1050959 - DNA, 25 bp, Homo sapien
gagtgctagctggtttcgacaggag

SEQ ID NO: 1050960 - DNA, 25 bp, Homo sapien
agtgctagctggtttcgacaggagg

SEQ ID NO: 1050961 - DNA, 25 bp, Homo sapien
ctgggataatgcatacagcatccaa

SEQ ID NO: 1050962 - DNA, 25 bp, Homo sapien
ggctggttggactcacaagggtggt

SEQ ID NO: 1050963 - DNA, 25 bp, Homo sapien
caaatgtgattctggtgttcccgta

SEQ ID NO: 1050964 - DNA, 25 bp, Homo sapien
gattctggtgttcccgtaaggctgg

SEQ ID NO: 1050965 - DNA, 25 bp, Homo sapien
aaccaatctgtgtgtatagagcctg

SEQ ID NO: 1050966 - DNA, 25 bp, Homo sapien
agagtttatattcctcagcatagga

SEQ ID NO: 1050967 - DNA, 25 bp, Homo sapien
gagtttatattcctcagcataggaa

SEQ ID NO: 1050968 - DNA, 25 bp, Homo sapien
taaaaccaatctgtgtgtatagagc

SEQ ID NO: 1050969 - DNA, 25 bp, Homo sapien
ctgggagacactggccctttttctt

SEQ ID NO: 1050970 - DNA, 25 bp, Homo sapien
tcttcctcttgctcatgatcacttt

SEQ ID NO: 1050971 - DNA, 25 bp, Homo sapien
tcctcttgctcatgatcactttcat

SEQ ID NO: 1050972 - DNA, 25 bp, Homo sapien
tttcttcctcttgctcatgatcact

SEQ ID NO: 1050973 - DNA, 25 bp, Homo sapien
ttagacaacaaaaccttccagatga

SEQ ID NO: 1050974 - DNA, 25 bp, Homo sapien
tagacaacaaaaccttccagatgat

SEQ ID NO: 1050975 - DNA, 25 bp, Homo sapien
atgacagaagatataaccaacagag

SEQ ID NO: 1050976 - DNA, 25 bp, Homo sapien
tgacagaagatataaccaacagaga

SEQ ID NO: 1050977 - DNA, 25 bp, Homo sapien
ctcctcttcagactcctgcagattc

SEQ ID NO: 1050978 - DNA, 25 bp, Homo sapien
gcttcctcctcttcagactcctgca

SEQ ID NO: 1050979 - DNA, 25 bp, Homo sapien
ttcctcctcttcagactcctgcaga

SEQ ID NO: 1050980 - DNA, 25 bp, Homo sapien
cttcatcccaggactcctggggggc

SEQ ID NO: 1050981 - DNA, 25 bp, Homo sapien
cagactggtatgaggcagacatgtc

SEQ ID NO: 1050982 - DNA, 25 bp, Homo sapien
gctcctgtcagactggtatgaggca

SEQ ID NO: 1050983 - DNA, 25 bp, Homo sapien
ctggtatgaggcagacatgtcagga

SEQ ID NO: 1050984 - DNA, 25 bp, Homo sapien
cctgtcagactggtatgaggcagac

SEQ ID NO: 1050985 - DNA, 25 bp, Homo sapien
ctgggacatgaactggagctttatc

SEQ ID NO: 1050986 - DNA, 25 bp, Homo sapien
atcaccttcaaaatggagtactcac

SEQ ID NO: 1050987 - DNA, 25 bp, Homo sapien
actggagctttatcaccttcaaaat

SEQ ID NO: 1050988 - DNA, 25 bp, Homo sapien
tggagctttatcaccttcaaaatgg

SEQ ID NO: 1050989 - DNA, 25 bp, Homo sapien
taggttccacccacagtgatggcaa

SEQ ID NO: 1050990 - DNA, 25 bp, Homo sapien
tggcaactctcagcccaaccagggt

SEQ ID NO: 1050991 - DNA, 25 bp, Homo sapien
ttgatatataggttccacccacagt

SEQ ID NO: 1050992 - DNA, 25 bp, Homo sapien
ggtcacaaggcccaaagattatggg

SEQ ID NO: 1050993 - DNA, 25 bp, Homo sapien
gatgagctatgacaagccaacttag

SEQ ID NO: 1050994 - DNA, 25 bp, Homo sapien
tggacagatgagctatgacaagcca

SEQ ID NO: 1050995 - DNA, 25 bp, Homo sapien
gacagatgagctatgacaagccaac

SEQ ID NO: 1050996 - DNA, 25 bp, Homo sapien
tatgacaagccaacttagaagacac

SEQ ID NO: 1050997 - DNA, 25 bp, Homo sapien
tcctttttcacttgatcacaccaat

SEQ ID NO: 1050998 - DNA, 25 bp, Homo sapien
gtggcctcttggtcctcctttttca

SEQ ID NO: 1050999 - DNA, 25 bp, Homo sapien
ctgggacttgtggcctcttggtcct

SEQ ID NO: 1051000 - DNA, 25 bp, Homo sapien
tttttcacttgatcacaccaatgtc

SEQ ID NO: 1051001 - DNA, 25 bp, Homo sapien
ctcaaaaggagttgaataaaatcta

SEQ ID NO: 1051002 - DNA, 25 bp, Homo sapien
actcaaaaggagttgaataaaatct

SEQ ID NO: 1051003 - DNA, 25 bp, Homo sapien
tatcaccttcatagtaaggtactca

SEQ ID NO: 1051004 - DNA, 25 bp, Homo sapien
acatctctcgggtcaataagggcca

SEQ ID NO: 1051005 - DNA, 25 bp, Homo sapien
acaggaatatcacccatatctggag

SEQ ID NO: 1051006 - DNA, 25 bp, Homo sapien
ccacttggaacaggaatatcaccca

SEQ ID NO: 1051007 - DNA, 25 bp, Homo sapien
aagctggtcatgatagagattcttt

SEQ ID NO: 1051008 - DNA, 25 bp, Homo sapien
cgtggttgcaagacactgaaatttg

SEQ ID NO: 1051009 - DNA, 25 bp, Homo sapien
catgatagagattctttggtttgca

SEQ ID NO: 1051010 - DNA, 25 bp, Homo sapien
aatgcccagctcattcgtggttgca

SEQ ID NO: 1051011 - DNA, 25 bp, Homo sapien
gcatggtgggccttggtcttcttcc

SEQ ID NO: 1051012 - DNA, 25 bp, Homo sapien
cttcctcttcttggtcctttttcat

SEQ ID NO: 1051013 - DNA, 25 bp, Homo sapien
ctggggcatggtgggccttggtctt

SEQ ID NO: 1051014 - DNA, 25 bp, Homo sapien
tcctcttcttggtcctttttcattc

SEQ ID NO: 1051015 - DNA, 25 bp, Homo sapien
ggctggcatgaatcaggcagttctg

SEQ ID NO: 1051016 - DNA, 25 bp, Homo sapien
ctggggcatggtggcttttgatctt

SEQ ID NO: 1051017 - DNA, 25 bp, Homo sapien
gggcatggtggcttttgatcttctt

SEQ ID NO: 1051018 - DNA, 25 bp, Homo sapien
ggggcatggtggcttttgatcttct

SEQ ID NO: 1051019 - DNA, 25 bp, Homo sapien
tgatcttcttccccttcttggtact

SEQ ID NO: 1051020 - DNA, 25 bp, Homo sapien
ctgcttccatcagcacctcgttgag

SEQ ID NO: 1051021 - DNA, 25 bp, Homo sapien
tactgctggaatgaggcatgtagtt

SEQ ID NO: 1051022 - DNA, 25 bp, Homo sapien
gaaagtaagttgaagtagtcgaata

SEQ ID NO: 1051023 - DNA, 25 bp, Homo sapien
gaaggccaggtggtgccttatcact

SEQ ID NO: 1051024 - DNA, 25 bp, Homo sapien
aggactatggcttctctactcaaag

SEQ ID NO: 1051025 - DNA, 25 bp, Homo sapien
tgtgctacatagtcgtgtgaacgtg

SEQ ID NO: 1051026 - DNA, 25 bp, Homo sapien
tttgttgtgtgattcgtggtgacgt

SEQ ID NO: 1051027 - DNA, 25 bp, Homo sapien
agtgttcttgatgaaacgtttaggc

SEQ ID NO: 1051028 - DNA, 25 bp, Homo sapien
cagagcactggcgagggtccgtcca

SEQ ID NO: 1051029 - DNA, 25 bp, Homo sapien
ggagccaggatagcgggcgcggagt

SEQ ID NO: 1051030 - DNA, 25 bp, Homo sapien
gtccaggcacaagcgcgtgggagca

SEQ ID NO: 1051031 - DNA, 25 bp, Homo sapien
cggagtggcgggagcgcaacgcggc

SEQ ID NO: 1051032 - DNA, 25 bp, Homo sapien
gattctaagatgcttgctgcagcca

SEQ ID NO: 1051033 - DNA, 25 bp, Homo sapien
ggcgattctaagatgcttgctgcag

SEQ ID NO: 1051034 - DNA, 25 bp, Homo sapien
ccccgcatgtaaccatcaggcttca

SEQ ID NO: 1051035 - DNA, 25 bp, Homo sapien
gacatggcgattctaagatgcttgc

SEQ ID NO: 1051036 - DNA, 25 bp, Homo sapien
taagtgagaccggactctggagcaa

SEQ ID NO: 1051037 - DNA, 25 bp, Homo sapien
caggttcaagaagagtgtacccatc

SEQ ID NO: 1051038 - DNA, 25 bp, Homo sapien
taaactccgcacttctaagctcagg

SEQ ID NO: 1051039 - DNA, 25 bp, Homo sapien
ctccaaaagaactagcaggttcaag

SEQ ID NO: 1051040 - DNA, 25 bp, Homo sapien
gcctcagccaggctaattgctctgg

SEQ ID NO: 1051041 - DNA, 25 bp, Homo sapien
gtttctgagttagcagaggcctcag

SEQ ID NO: 1051042 - DNA, 25 bp, Homo sapien
ggagacaccaggactgccccgccat

SEQ ID NO: 1051043 - DNA, 25 bp, Homo sapien
ctgaccctggtcctggagacaccag

SEQ ID NO: 1051044 - DNA, 25 bp, Homo sapien
gttcctcgcattcccagaggacgct

SEQ ID NO: 1051045 - DNA, 25 bp, Homo sapien
gctgggctccagataacagcgttcc

SEQ ID NO: 1051046 - DNA, 25 bp, Homo sapien
cagaaggctccggtggcttttgcgt

SEQ ID NO: 1051047 - DNA, 25 bp, Homo sapien
ttttgcgtttgatctccgcggcgac

SEQ ID NO: 1051048 - DNA, 25 bp, Homo sapien
tcttaagcggcagaggtcctattct

SEQ ID NO: 1051049 - DNA, 25 bp, Homo sapien
ggcagaggtcctattcttacagtca

SEQ ID NO: 1051050 - DNA, 25 bp, Homo sapien
taagcggcagaggtcctattcttac

SEQ ID NO: 1051051 - DNA, 25 bp, Homo sapien
gcggcagaggtcctattcttacagt

SEQ ID NO: 1051052 - DNA, 25 bp, Homo sapien
cttccagctctgagactctagaacc

SEQ ID NO: 1051053 - DNA, 25 bp, Homo sapien
acctggatggctgcagacagtcctt

SEQ ID NO: 1051054 - DNA, 25 bp, Homo sapien
aacccagaagctcacctgcctgctg

SEQ ID NO: 1051055 - DNA, 25 bp, Homo sapien
tgagactctagaacccagaagctca

SEQ ID NO: 1051056 - DNA, 25 bp, Homo sapien
ccgtgaggaccacatccaggatggg

SEQ ID NO: 1051057 - DNA, 25 bp, Homo sapien
tggccaggcggcaagtgaagaaaca

SEQ ID NO: 1051058 - DNA, 25 bp, Homo sapien
ccaccgtgaggaccacatccaggat

SEQ ID NO: 1051059 - DNA, 25 bp, Homo sapien
gagcggcctggccaggcggcaagtg

SEQ ID NO: 1051060 - DNA, 25 bp, Homo sapien
atctcagctgccacaccgggagttt

SEQ ID NO: 1051061 - DNA, 25 bp, Homo sapien
gccctcctagtgcttggcatagtaa

SEQ ID NO: 1051062 - DNA, 25 bp, Homo sapien
tgtgcaggaaagtccaagagttcgt

SEQ ID NO: 1051063 - DNA, 25 bp, Homo sapien
cgcatgggaaaaccggcaggatcta

SEQ ID NO: 1051064 - DNA, 25 bp, Homo sapien
gaaaaatgttattaactgaatacga

SEQ ID NO: 1051065 - DNA, 25 bp, Homo sapien
tatttctatagcaaatcctaaaatc

SEQ ID NO: 1051066 - DNA, 25 bp, Homo sapien
taactgaatacgaaatactaattca

SEQ ID NO: 1051067 - DNA, 25 bp, Homo sapien
tgttattaactgaatacgaaatact

SEQ ID NO: 1051068 - DNA, 25 bp, Homo sapien
tcagatgttaactgatgttccaatc

SEQ ID NO: 1051069 - DNA, 25 bp, Homo sapien
gagcccagagatgcaatcgacgtgg

SEQ ID NO: 1051070 - DNA, 25 bp, Homo sapien
ggagcccagagatgcaatcgacgtg

SEQ ID NO: 1051071 - DNA, 25 bp, Homo sapien
cccagagatgcaatcgacgtgggtg

SEQ ID NO: 1051072 - DNA, 25 bp, Homo sapien
ccccaagacctgctttatccctgga

SEQ ID NO: 1051073 - DNA, 25 bp, Homo sapien
ctggcactaaggagttagtaaggca

SEQ ID NO: 1051074 - DNA, 25 bp, Homo sapien
ctaaggagttagtaaggcaggtgcc

SEQ ID NO: 1051075 - DNA, 25 bp, Homo sapien
gcactaaggagttagtaaggcaggt

SEQ ID NO: 1051076 - DNA, 25 bp, Homo sapien
actaaggagttagtaaggcaggtgc

SEQ ID NO: 1051077 - DNA, 25 bp, Homo sapien
ttggaggtcccagggctgggctgac

SEQ ID NO: 1051078 - DNA, 25 bp, Homo sapien
ctgacttaacagcttggaggtccca

SEQ ID NO: 1051079 - DNA, 25 bp, Homo sapien
gcttggaggtcccagggctgggctg

SEQ ID NO: 1051080 - DNA, 25 bp, Homo sapien
ggaggtcccagggctgggctgacat

SEQ ID NO: 1051081 - DNA, 25 bp, Homo sapien
catcaatttcagatgtccccacgca

SEQ ID NO: 1051082 - DNA, 25 bp, Homo sapien
ccacgcagtccccactgggaattgg

SEQ ID NO: 1051083 - DNA, 25 bp, Homo sapien
tcaatttcagatgtccccacgcagt

SEQ ID NO: 1051084 - DNA, 25 bp, Homo sapien
actgggaattgggagcaccttggcc

SEQ ID NO: 1051085 - DNA, 25 bp, Homo sapien
ccgtggctctgccccagcctagcat

SEQ ID NO: 1051086 - DNA, 25 bp, Homo sapien
gcgtcgccgtggctctgccccagcc

SEQ ID NO: 1051087 - DNA, 25 bp, Homo sapien
cgccgtggctctgccccagcctagc

SEQ ID NO: 1051088 - DNA, 25 bp, Homo sapien
gtcgccgtggctctgccccagccta

SEQ ID NO: 1051089 - DNA, 25 bp, Homo sapien
gttaggattagttatcaaggacgac

SEQ ID NO: 1051090 - DNA, 25 bp, Homo sapien
ttgttaggattagttatcaaggacg

SEQ ID NO: 1051091 - DNA, 25 bp, Homo sapien
tcttgttaggattagttatcaagga

SEQ ID NO: 1051092 - DNA, 25 bp, Homo sapien
taggattagttatcaaggacgacat

SEQ ID NO: 1051093 - DNA, 25 bp, Homo sapien
gcttctgaagctccagggcatattt

SEQ ID NO: 1051094 - DNA, 25 bp, Homo sapien
tgcgcttggtctcgccagtacttgg

SEQ ID NO: 1051095 - DNA, 25 bp, Homo sapien
ccacgttggtgttgagcttctgaag

SEQ ID NO: 1051096 - DNA, 25 bp, Homo sapien
gaacatgatgacattcttagccacg

SEQ ID NO: 1051097 - DNA, 25 bp, Homo sapien
gctgacccttgaggatgcgggcagc

SEQ ID NO: 1051098 - DNA, 25 bp, Homo sapien
tgggtggtgttgcaccgggaacgct

SEQ ID NO: 1051099 - DNA, 25 bp, Homo sapien
ttcaccccacacaggtaggcggtgg

SEQ ID NO: 1051100 - DNA, 25 bp, Homo sapien
ggaacgctcagtggctgcgcttacc

SEQ ID NO: 1051101 - DNA, 25 bp, Homo sapien
cccagcgcaggatggaggtgacctc

SEQ ID NO: 1051102 - DNA, 25 bp, Homo sapien
taggcgatgtccttacagccctggc

SEQ ID NO: 1051103 - DNA, 25 bp, Homo sapien
tcactctcgtggtggtcacaatgcc

SEQ ID NO: 1051104 - DNA, 25 bp, Homo sapien
caatgtccctgatgttatgcatgag

SEQ ID NO: 1051105 - DNA, 25 bp, Homo sapien
tgtctgagtaccagtcccggtcagc

SEQ ID NO: 1051106 - DNA, 25 bp, Homo sapien
tgcccggctgcccccgagcactcac

SEQ ID NO: 1051107 - DNA, 25 bp, Homo sapien
tcttccaggtgtcaacgaggtccag

SEQ ID NO: 1051108 - DNA, 25 bp, Homo sapien
ctggctttctcgtcactctcatact

SEQ ID NO: 1051109 - DNA, 25 bp, Homo sapien
gtatctcggtttgaagctcttccag

SEQ ID NO: 1051110 - DNA, 25 bp, Homo sapien
gaggtccaggccgtccagcctcgtg

SEQ ID NO: 1051111 - DNA, 25 bp, Homo sapien
tcaagggtcaggagttccgtgcggt

SEQ ID NO: 1051112 - DNA, 25 bp, Homo sapien
gagttccgtgcggttccagatgaag

SEQ ID NO: 1051113 - DNA, 25 bp, Homo sapien
tcaggagttccgtgcggttccagat

SEQ ID NO: 1051114 - DNA, 25 bp, Homo sapien
ttccgtgcggttccagatgaagtgg

SEQ ID NO: 1051115 - DNA, 25 bp, Homo sapien
gaaaacccggatagctgcatggtgg

SEQ ID NO: 1051116 - DNA, 25 bp, Homo sapien
gggaaatgtctgcaggagattttgc

SEQ ID NO: 1051117 - DNA, 25 bp, Homo sapien
cagctggaaaagaaaacccggatag

SEQ ID NO: 1051118 - DNA, 25 bp, Homo sapien
ggagattttgccaccacttgcttgg

SEQ ID NO: 1051119 - DNA, 25 bp, Homo sapien
ccagaggtgttccataacttgctat

SEQ ID NO: 1051120 - DNA, 25 bp, Homo sapien
tgggatcaccatgcccgtttcacag

SEQ ID NO: 1051121 - DNA, 25 bp, Homo sapien
tcccaccactatggcgcggtgggat

SEQ ID NO: 1051122 - DNA, 25 bp, Homo sapien
tgctattgtcagctgagaagtggca

SEQ ID NO: 1051123 - DNA, 25 bp, Homo sapien
accaccaccatctcggagagtgacg

SEQ ID NO: 1051124 - DNA, 25 bp, Homo sapien
tttggggttcttccgcaggatctgg

SEQ ID NO: 1051125 - DNA, 25 bp, Homo sapien
tgacgggtccgtcacgttgttcctg

SEQ ID NO: 1051126 - DNA, 25 bp, Homo sapien
tgttcagctcgtactgcatgtcccc

SEQ ID NO: 1051127 - DNA, 25 bp, Homo sapien
gtgtgtatacataccgatgttagca

SEQ ID NO: 1051128 - DNA, 25 bp, Homo sapien
tacataccgatgttagcagggcaac

SEQ ID NO: 1051129 - DNA, 25 bp, Homo sapien
ccgatgttagcagggcaacatgagg

SEQ ID NO: 1051130 - DNA, 25 bp, Homo sapien
ctggaaggcggaggcgctgagcatg

SEQ ID NO: 1051131 - DNA, 25 bp, Homo sapien
tccttggcgtcagaggcctgttcgg

SEQ ID NO: 1051132 - DNA, 25 bp, Homo sapien
aagaccgctgtgctcgagtgggaac

SEQ ID NO: 1051133 - DNA, 25 bp, Homo sapien
gggccaggccaagaccgctgtgctc

SEQ ID NO: 1051134 - DNA, 25 bp, Homo sapien
ccggggtttggcaagaaagcagcca

SEQ ID NO: 1051135 - DNA, 25 bp, Homo sapien
tgtctctagctgcttgaaggaggca

SEQ ID NO: 1051136 - DNA, 25 bp, Homo sapien
tctctagctgcttgaaggaggcact

SEQ ID NO: 1051137 - DNA, 25 bp, Homo sapien
ctctagctgcttgaaggaggcactg

SEQ ID NO: 1051138 - DNA, 25 bp, Homo sapien
cactgtctctagctgcttgaaggag

SEQ ID NO: 1051139 - DNA, 25 bp, Homo sapien
aggaggggaggaagatctgctcccc

SEQ ID NO: 1051140 - DNA, 25 bp, Homo sapien
gggtgtatccaccaaatgtgaagac

SEQ ID NO: 1051141 - DNA, 25 bp, Homo sapien
catggtgcccgtggtcaattctgcc

SEQ ID NO: 1051142 - DNA, 25 bp, Homo sapien
gtgtcttccgaggaggtcaagctgc

SEQ ID NO: 1051143 - DNA, 25 bp, Homo sapien
gaatggtccgcagtgaccacggtca

SEQ ID NO: 1051144 - DNA, 25 bp, Homo sapien
cccaggagtgtccaccccaaagaag

SEQ ID NO: 1051145 - DNA, 25 bp, Homo sapien
tcccaggtgggtagacaggagaccc

SEQ ID NO: 1051146 - DNA, 25 bp, Homo sapien
catgctctgggcttgctggctctcc

SEQ ID NO: 1051147 - DNA, 25 bp, Homo sapien
cactcctgctcccaggtgggtagac

SEQ ID NO: 1051148 - DNA, 25 bp, Homo sapien
tggagacattctctcgttcaccgcc

SEQ ID NO: 1051149 - DNA, 25 bp, Homo sapien
gcagtgaagggcttcttgtctgtgt

SEQ ID NO: 1051150 - DNA, 25 bp, Homo sapien
aagggcttcttgtctgtgtcactca

SEQ ID NO: 1051151 - DNA, 25 bp, Homo sapien
caggcccattgccatacaggatggc

SEQ ID NO: 1051152 - DNA, 25 bp, Homo sapien
gggatgaactaactgcaaagtctcg

SEQ ID NO: 1051153 - DNA, 25 bp, Homo sapien
gacacaggagtctgcattctcaacc

SEQ ID NO: 1051154 - DNA, 25 bp, Homo sapien
ctaaggccacgggatttgaacctga

SEQ ID NO: 1051155 - DNA, 25 bp, Homo sapien
cactgggagtatcaagaacgaatga

SEQ ID NO: 1051156 - DNA, 25 bp, Homo sapien
gacgtagttctgctcgtggacgccg

SEQ ID NO: 1051157 - DNA, 25 bp, Homo sapien
aggttggccccgatgcaggctgcat

SEQ ID NO: 1051158 - DNA, 25 bp, Homo sapien
cacagtggccgaggttggccccgat

SEQ ID NO: 1051159 - DNA, 25 bp, Homo sapien
agactgcgcctggtagttgttgtga

SEQ ID NO: 1051160 - DNA, 25 bp, Homo sapien
tctgggtctggagaaatacgttcgc

SEQ ID NO: 1051161 - DNA, 25 bp, Homo sapien
tctgcctgcccaagagaaatctacc

SEQ ID NO: 1051162 - DNA, 25 bp, Homo sapien
ggccttgtcctgaggagaaagacct

SEQ ID NO: 1051163 - DNA, 25 bp, Homo sapien
gctttgagaatgtctgcagtctgta

SEQ ID NO: 1051164 - DNA, 25 bp, Homo sapien
tgcatggctagagtcctggctccag

SEQ ID NO: 1051165 - DNA, 25 bp, Homo sapien
gcagggaacgccgtagaaatgtcca

SEQ ID NO: 1051166 - DNA, 25 bp, Homo sapien
tgtgaggcacgtgagaacagcgcct

SEQ ID NO: 1051167 - DNA, 25 bp, Homo sapien
cagtgattctaagcctcggttccag

SEQ ID NO: 1051168 - DNA, 25 bp, Homo sapien
ttaatcattgcaaggcccccatggg

SEQ ID NO: 1051169 - DNA, 25 bp, Homo sapien
aggctgttctgggaagcgcccgctt

SEQ ID NO: 1051170 - DNA, 25 bp, Homo sapien
catgtccaggtcatgccgaggctgt

SEQ ID NO: 1051171 - DNA, 25 bp, Homo sapien
gggtgtcagcgttttggcttctaga

SEQ ID NO: 1051172 - DNA, 25 bp, Homo sapien
tctggctggatttcgatgggtgccc

SEQ ID NO: 1051173 - DNA, 25 bp, Homo sapien
ggctggatttcgatgggtgcccgga

SEQ ID NO: 1051174 - DNA, 25 bp, Homo sapien
ctggatttcgatgggtgcccggaag

SEQ ID NO: 1051175 - DNA, 25 bp, Homo sapien
gatttcgatgggtgcccggaagcat

SEQ ID NO: 1051176 - DNA, 25 bp, Homo sapien
ttgaggtgctggatcgtgttcctga

SEQ ID NO: 1051177 - DNA, 25 bp, Homo sapien
tggatcgtgttcctgagctggaagt

SEQ ID NO: 1051178 - DNA, 25 bp, Homo sapien
tgctggatcgtgttcctgagctgga

SEQ ID NO: 1051179 - DNA, 25 bp, Homo sapien
aggtgctggatcgtgttcctgagct

SEQ ID NO: 1051180 - DNA, 25 bp, Homo sapien
tcagctgtgtcggccgttgctgttg

SEQ ID NO: 1051181 - DNA, 25 bp, Homo sapien
cagctgtgtcggccgttgctgttgt

SEQ ID NO: 1051182 - DNA, 25 bp, Homo sapien
agctgtgtcggccgttgctgttgtt

SEQ ID NO: 1051183 - DNA, 25 bp, Homo sapien
cttcggggtggaagcttggaagtca

SEQ ID NO: 1051184 - DNA, 25 bp, Homo sapien
catgtatgggctgacgggtgctggg

SEQ ID NO: 1051185 - DNA, 25 bp, Homo sapien
cccagacttgcccatcagtgggagc

SEQ ID NO: 1051186 - DNA, 25 bp, Homo sapien
gggtgctgggaaggtcaccctggcc

SEQ ID NO: 1051187 - DNA, 25 bp, Homo sapien
tggtgaccttgtctatccccgtggg

SEQ ID NO: 1051188 - DNA, 25 bp, Homo sapien
ctctgtaggatgagagagccggcct

SEQ ID NO: 1051189 - DNA, 25 bp, Homo sapien
gagccggcctgagacccaattttta

SEQ ID NO: 1051190 - DNA, 25 bp, Homo sapien
gcagagctagggcttccccatgtca

SEQ ID NO: 1051191 - DNA, 25 bp, Homo sapien
cttctcacaacttccacctaggagt

SEQ ID NO: 1051192 - DNA, 25 bp, Homo sapien
ggagtcttgtctcagtcctcaggca

SEQ ID NO: 1051193 - DNA, 25 bp, Homo sapien
tccacctaggagtcttgtctcagtc

SEQ ID NO: 1051194 - DNA, 25 bp, Homo sapien
tcacaacttccacctaggagtcttg

SEQ ID NO: 1051195 - DNA, 25 bp, Homo sapien
tgtaatggacattgaagtggcgtcc

SEQ ID NO: 1051196 - DNA, 25 bp, Homo sapien
gccctcagttacagggatcctagag

SEQ ID NO: 1051197 - DNA, 25 bp, Homo sapien
gatcctagagtcatcaagaggcaaa

SEQ ID NO: 1051198 - DNA, 25 bp, Homo sapien
ggcgtccagatgtttgcggttgcaa

SEQ ID NO: 1051199 - DNA, 25 bp, Homo sapien
gatgagcctagtgccagagagacgc

SEQ ID NO: 1051200 - DNA, 25 bp, Homo sapien
cacatgcgttgtggctctgggactg

SEQ ID NO: 1051201 - DNA, 25 bp, Homo sapien
tccaggaaggatcctctatagcttc

SEQ ID NO: 1051202 - DNA, 25 bp, Homo sapien
agaaaaatcccctccacatgcgttg

SEQ ID NO: 1051203 - DNA, 25 bp, Homo sapien
ctcgggatacatcgtggcaccctga

SEQ ID NO: 1051204 - DNA, 25 bp, Homo sapien
gatacatcgtggcaccctgatgccc

SEQ ID NO: 1051205 - DNA, 25 bp, Homo sapien
gagagccccccgacggctctggctg

SEQ ID NO: 1051206 - DNA, 25 bp, Homo sapien
gggatacatcgtggcaccctgatgc

SEQ ID NO: 1051207 - DNA, 25 bp, Homo sapien
cagcggcaccaaggtgccctcagag

SEQ ID NO: 1051208 - DNA, 25 bp, Homo sapien
ttgttgtcccaacagctgctcagcc

SEQ ID NO: 1051209 - DNA, 25 bp, Homo sapien
agcggcaccaaggtgccctcagagg

SEQ ID NO: 1051210 - DNA, 25 bp, Homo sapien
gggcaggaggcgagttgtttgttgt

SEQ ID NO: 1051211 - DNA, 25 bp, Homo sapien
tggggattgtgtccaagctgccttc

SEQ ID NO: 1051212 - DNA, 25 bp, Homo sapien
ccttccccttgtggacgctcaactt

SEQ ID NO: 1051213 - DNA, 25 bp, Homo sapien
cagtgttctctgagctatggggatt

SEQ ID NO: 1051214 - DNA, 25 bp, Homo sapien
tgccttccccttgtggacgctcaac

SEQ ID NO: 1051215 - DNA, 25 bp, Homo sapien
gcgtttgacctcagtgcgcgcatgg

SEQ ID NO: 1051216 - DNA, 25 bp, Homo sapien
tgtgtgtgttcccattgcgtgtcca

SEQ ID NO: 1051217 - DNA, 25 bp, Homo sapien
gtgggcctgggctatgactgctgtg

SEQ ID NO: 1051218 - DNA, 25 bp, Homo sapien
gctgtcgtgctgtggcgcctgtgtg

SEQ ID NO: 1051219 - DNA, 25 bp, Homo sapien
aggtgcggccccgtgatctgcgcac

SEQ ID NO: 1051220 - DNA, 25 bp, Homo sapien
cagagatcccggaacgcgtaggtgc

SEQ ID NO: 1051221 - DNA, 25 bp, Homo sapien
gggctgttgtcaggatcacagagat

SEQ ID NO: 1051222 - DNA, 25 bp, Homo sapien
gatctgcgcaccgagagaacgggtc

SEQ ID NO: 1051223 - DNA, 25 bp, Homo sapien
ttggcagcgtcagggaccctcgaga

SEQ ID NO: 1051224 - DNA, 25 bp, Homo sapien
cctgcctgcaagctcggtgccagaa

SEQ ID NO: 1051225 - DNA, 25 bp, Homo sapien
tcggtgccagaactgccagggcagc

SEQ ID NO: 1051226 - DNA, 25 bp, Homo sapien
gaggtggctgatggagggtgacctt

SEQ ID NO: 1051227 - DNA, 25 bp, Homo sapien
tgaggatcagatgcctgagccacct

SEQ ID NO: 1051228 - DNA, 25 bp, Homo sapien
cacgggagccatgtgtctgccgcag

SEQ ID NO: 1051229 - DNA, 25 bp, Homo sapien
gctgtgaccttctcaaggccacggg

SEQ ID NO: 1051230 - DNA, 25 bp, Homo sapien
gactcccctgagacggtggatctgc

SEQ ID NO: 1051231 - DNA, 25 bp, Homo sapien
agcgggttgccacgggagcctctcc

SEQ ID NO: 1051232 - DNA, 25 bp, Homo sapien
gggttgccacgggagcctctcccca

SEQ ID NO: 1051233 - DNA, 25 bp, Homo sapien
ccagcgggttgccacgggagcctct

SEQ ID NO: 1051234 - DNA, 25 bp, Homo sapien
ggttgccacgggagcctctccccag

SEQ ID NO: 1051235 - DNA, 25 bp, Homo sapien
tgttggacttggtccaggccgcggc

SEQ ID NO: 1051236 - DNA, 25 bp, Homo sapien
ggtgggcgcagctgggctcgcgcag

SEQ ID NO: 1051237 - DNA, 25 bp, Homo sapien
cgcagcccggtcttgacagcagctg

SEQ ID NO: 1051238 - DNA, 25 bp, Homo sapien
gactcccgtcggctcgcagcgaaga

SEQ ID NO: 1051239 - DNA, 25 bp, Homo sapien
gagcgccggccgcatctgagcagag

SEQ ID NO: 1051240 - DNA, 25 bp, Homo sapien
ccttgggtgagtgcgccccgccagg

SEQ ID NO: 1051241 - DNA, 25 bp, Homo sapien
ggcggccgcgggcaccagagtgccg

SEQ ID NO: 1051242 - DNA, 25 bp, Homo sapien
gggcaccagagtgccgagcccagga

SEQ ID NO: 1051243 - DNA, 25 bp, Homo sapien
agacaaagtccaagagccgcgaatg

SEQ ID NO: 1051244 - DNA, 25 bp, Homo sapien
gctttctcgcccagcgaagcctgtg

SEQ ID NO: 1051245 - DNA, 25 bp, Homo sapien
cgcgaatgggctggcgagggtcaac

SEQ ID NO: 1051246 - DNA, 25 bp, Homo sapien
ccgagcgcccgggtgaggagggcgt

SEQ ID NO: 1051247 - DNA, 25 bp, Homo sapien
gcatatggtccctacccttcagaaa

SEQ ID NO: 1051248 - DNA, 25 bp, Homo sapien
gtggggcatatggtccctacccttc

SEQ ID NO: 1051249 - DNA, 25 bp, Homo sapien
tacccttcagaaattcatattttgc

SEQ ID NO: 1051250 - DNA, 25 bp, Homo sapien
ggtccctacccttcagaaattcata

SEQ ID NO: 1051251 - DNA, 25 bp, Homo sapien
gaatcacagaatcaacatggtcttg

SEQ ID NO: 1051252 - DNA, 25 bp, Homo sapien
caggcttcagacaattaaaggagga

SEQ ID NO: 1051253 - DNA, 25 bp, Homo sapien
tccatgcttcaagtacttccagagg

SEQ ID NO: 1051254 - DNA, 25 bp, Homo sapien
cgtgatatacgagaaggtagaatgc

SEQ ID NO: 1051255 - DNA, 25 bp, Homo sapien
ttggatgccataatagaaagtgcct

SEQ ID NO: 1051256 - DNA, 25 bp, Homo sapien
gaaagtgccttcatgttggcatagc

SEQ ID NO: 1051257 - DNA, 25 bp, Homo sapien
tatcagtgtcccttcatttttagta

SEQ ID NO: 1051258 - DNA, 25 bp, Homo sapien
aaaggcctctttatatatcagtgtc

SEQ ID NO: 1051259 - DNA, 25 bp, Homo sapien
aaactctttgagctgtgattaacat

SEQ ID NO: 1051260 - DNA, 25 bp, Homo sapien
tttaaactctttgagctgtgattaa

SEQ ID NO: 1051261 - DNA, 25 bp, Homo sapien
taaactctttgagctgtgattaaca

SEQ ID NO: 1051262 - DNA, 25 bp, Homo sapien
ttaaactctttgagctgtgattaac

SEQ ID NO: 1051263 - DNA, 25 bp, Homo sapien
cacttgttgcccacgctctagtgca

SEQ ID NO: 1051264 - DNA, 25 bp, Homo sapien
acttgttgcccacgctctagtgcaa

SEQ ID NO: 1051265 - DNA, 25 bp, Homo sapien
cagtcacatggtcccaaattgttca

SEQ ID NO: 1051266 - DNA, 25 bp, Homo sapien
gcatgcgtgaagtagtgtgagaaac

SEQ ID NO: 1051267 - DNA, 25 bp, Homo sapien
tggagttacaaacgtgtaccaccac

SEQ ID NO: 1051268 - DNA, 25 bp, Homo sapien
cagtcttcagcctgtagctggagtt

SEQ ID NO: 1051269 - DNA, 25 bp, Homo sapien
taatgatatcgttatatatcacaac

SEQ ID NO: 1051270 - DNA, 25 bp, Homo sapien
gatatcgttatatatcacaacatta

SEQ ID NO: 1051271 - DNA, 25 bp, Homo sapien
tcaactaatgatatcgttatatatc

SEQ ID NO: 1051272 - DNA, 25 bp, Homo sapien
caactaatgatatcgttatatatca

SEQ ID NO: 1051273 - DNA, 25 bp, Homo sapien
aggtgcctgccactatgcctgggta

SEQ ID NO: 1051274 - DNA, 25 bp, Homo sapien
ggtgcctgccactatgcctgggtaa

SEQ ID NO: 1051275 - DNA, 25 bp, Homo sapien
gtgcctgccactatgcctgggtaat

SEQ ID NO: 1051276 - DNA, 25 bp, Homo sapien
cccaaacggaaggagggcataatga

SEQ ID NO: 1051277 - DNA, 25 bp, Homo sapien
acttttgagtaccttggccaaggag

SEQ ID NO: 1051278 - DNA, 25 bp, Homo sapien
gaagcttttgcagtaatccgggtga

SEQ ID NO: 1051279 - DNA, 25 bp, Homo sapien
tccgggtgagaccagagtgataatg

SEQ ID NO: 1051280 - DNA, 25 bp, Homo sapien
agaaggaacatcccagtctgatcca

SEQ ID NO: 1051281 - DNA, 25 bp, Homo sapien
gaaggaacatcccagtctgatccat

SEQ ID NO: 1051282 - DNA, 25 bp, Homo sapien
ggggcaactgcagaagacaacaagc

SEQ ID NO: 1051283 - DNA, 25 bp, Homo sapien
cagttgcagtcagggcggctgcccc

SEQ ID NO: 1051284 - DNA, 25 bp, Homo sapien
gggaggcaagtcttcactatgatct

SEQ ID NO: 1051285 - DNA, 25 bp, Homo sapien
tgatcttagtgctttgccttccaga

SEQ ID NO: 1051286 - DNA, 25 bp, Homo sapien
gatgtgggagcactttccaatattt

SEQ ID NO: 1051287 - DNA, 25 bp, Homo sapien
ggatgtgggagcactttccaatatt

SEQ ID NO: 1051288 - DNA, 25 bp, Homo sapien
tgtgggagcactttccaatatttgg

SEQ ID NO: 1051289 - DNA, 25 bp, Homo sapien
aaatccttcatcagagctcaggatg

SEQ ID NO: 1051290 - DNA, 25 bp, Homo sapien
gcgatgcggcgtgcgagcgcagcag

SEQ ID NO: 1051291 - DNA, 25 bp, Homo sapien
gcgcgatgcggcgtgcgagcgcagc

SEQ ID NO: 1051292 - DNA, 25 bp, Homo sapien
gcagcagcccgtccccctgccacgt

SEQ ID NO: 1051293 - DNA, 25 bp, Homo sapien
ctgcgcgatgcggcgtgcgagcgca

SEQ ID NO: 1051294 - DNA, 25 bp, Homo sapien
agtcggtgtccggagccacgaagta

SEQ ID NO: 1051295 - DNA, 25 bp, Homo sapien
ccagagcccgcagtcggtgtccgga

SEQ ID NO: 1051296 - DNA, 25 bp, Homo sapien
agcccgcagtcggtgtccggagcca

SEQ ID NO: 1051297 - DNA, 25 bp, Homo sapien
ggtgtccggagccacgaagtagaac

SEQ ID NO: 1051298 - DNA, 25 bp, Homo sapien
cccggcgggccctcgtagaactgca

SEQ ID NO: 1051299 - DNA, 25 bp, Homo sapien
ctagaaagggtccggaggatgccac

SEQ ID NO: 1051300 - DNA, 25 bp, Homo sapien
cacaggcaccgggatgttcaggccg

SEQ ID NO: 1051301 - DNA, 25 bp, Homo sapien
accgggatgttcaggccgcacagtg

SEQ ID NO: 1051302 - DNA, 25 bp, Homo sapien
ggtgacttcgcccacgaagtccacg

SEQ ID NO: 1051303 - DNA, 25 bp, Homo sapien
acggaaagaggtgacttcgcccacg

SEQ ID NO: 1051304 - DNA, 25 bp, Homo sapien
gaaagaggtgacttcgcccacgaag

SEQ ID NO: 1051305 - DNA, 25 bp, Homo sapien
agacggaaagaggtgacttcgccca

SEQ ID NO: 1051306 - DNA, 25 bp, Homo sapien
gcagagggtcccgtcccggccttca

SEQ ID NO: 1051307 - DNA, 25 bp, Homo sapien
ctgcagagggtcccgtcccggcctt

SEQ ID NO: 1051308 - DNA, 25 bp, Homo sapien
tctgcagagggtcccgtcccggcct

SEQ ID NO: 1051309 - DNA, 25 bp, Homo sapien
tgcagagggtcccgtcccggccttc

SEQ ID NO: 1051310 - DNA, 25 bp, Homo sapien
tggtcactgccatcgccacagttgt

SEQ ID NO: 1051311 - DNA, 25 bp, Homo sapien
cccaggggtcacacacgaggcttga

SEQ ID NO: 1051312 - DNA, 25 bp, Homo sapien
tgccattctggcagcggaagtaggc

SEQ ID NO: 1051313 - DNA, 25 bp, Homo sapien
gcttgaggggatgcacctgccattc

SEQ ID NO: 1051314 - DNA, 25 bp, Homo sapien
ggcccagtccacaccccgcactgac

SEQ ID NO: 1051315 - DNA, 25 bp, Homo sapien
tcagtagggcccagtccacaccccg

SEQ ID NO: 1051316 - DNA, 25 bp, Homo sapien
tagggcccagtccacaccccgcact

SEQ ID NO: 1051317 - DNA, 25 bp, Homo sapien
gtagggcccagtccacaccccgcac

SEQ ID NO: 1051318 - DNA, 25 bp, Homo sapien
gctgcaatccagagggatcctgcag

SEQ ID NO: 1051319 - DNA, 25 bp, Homo sapien
cctgctggggaactcctctcagctg

SEQ ID NO: 1051320 - DNA, 25 bp, Homo sapien
tgcgtcttgtctcgtggggtccctg

SEQ ID NO: 1051321 - DNA, 25 bp, Homo sapien
gatctggaggtatgggcatctgtac

SEQ ID NO: 1051322 - DNA, 25 bp, Homo sapien
cctgatcctataaggctgggccact

SEQ ID NO: 1051323 - DNA, 25 bp, Homo sapien
tgcccgaagcccctctagggatggc

SEQ ID NO: 1051324 - DNA, 25 bp, Homo sapien
aagcaagctggcttgggatcagcga

SEQ ID NO: 1051325 - DNA, 25 bp, Homo sapien
tagtatcattcccatgtgcccgaag

SEQ ID NO: 1051326 - DNA, 25 bp, Homo sapien
gaaggcaggactcacgactgagaga

SEQ ID NO: 1051327 - DNA, 25 bp, Homo sapien
tccaacagacaacggacggacggat

SEQ ID NO: 1051328 - DNA, 25 bp, Homo sapien
cctgagacgggcatcgcaggagtct

SEQ ID NO: 1051329 - DNA, 25 bp, Homo sapien
ttaataaacggtgctatccccgcca

SEQ ID NO: 1051330 - DNA, 25 bp, Homo sapien
tatttccacgatgatggcttcctcg

SEQ ID NO: 1051331 - DNA, 25 bp, Homo sapien
gaggttccatccaagtcgacggtga

SEQ ID NO: 1051332 - DNA, 25 bp, Homo sapien
ttttgtaagaaaccgaggcgatgcc

SEQ ID NO: 1051333 - DNA, 25 bp, Homo sapien
accatcgagctggaggttcggacca

SEQ ID NO: 1051334 - DNA, 25 bp, Homo sapien
tagtaacaaagttgcaggtcctacc

SEQ ID NO: 1051335 - DNA, 25 bp, Homo sapien
gaaagaactgctcaatttcagtgag

SEQ ID NO: 1051336 - DNA, 25 bp, Homo sapien
gaaattgaggtgtaatgctttccca

SEQ ID NO: 1051337 - DNA, 25 bp, Homo sapien
caaggtcataggctccctgaattct

SEQ ID NO: 1051338 - DNA, 25 bp, Homo sapien
gcttgccagccagacaccatttgat

SEQ ID NO: 1051339 - DNA, 25 bp, Homo sapien
cacctgcatggccatatcgtggtta

SEQ ID NO: 1051340 - DNA, 25 bp, Homo sapien
ggattggagatcgtgcctggcacat

SEQ ID NO: 1051341 - DNA, 25 bp, Homo sapien
catagacattggtctgaaccccagc

SEQ ID NO: 1051342 - DNA, 25 bp, Homo sapien
ctttccctttgtgttcgtcattttg

SEQ ID NO: 1051343 - DNA, 25 bp, Homo sapien
ctattgggtgcctctcctctttccc

SEQ ID NO: 1051344 - DNA, 25 bp, Homo sapien
ctcctctttccctttgtgttcgtca

SEQ ID NO: 1051345 - DNA, 25 bp, Homo sapien
ctctttccctttgtgttcgtcattt

SEQ ID NO: 1051346 - DNA, 25 bp, Homo sapien
actccatgttttctaaaaggcctgg

SEQ ID NO: 1051347 - DNA, 25 bp, Homo sapien
tccatgttttctaaaaggcctggag

SEQ ID NO: 1051348 - DNA, 25 bp, Homo sapien
catgttttctaaaaggcctggagaa

SEQ ID NO: 1051349 - DNA, 25 bp, Homo sapien
tgttttctaaaaggcctggagaaca

SEQ ID NO: 1051350 - DNA, 25 bp, Homo sapien
acaatatcacctttcttatagattc

SEQ ID NO: 1051351 - DNA, 25 bp, Homo sapien
tatcacctttcttatagattcgcat

SEQ ID NO: 1051352 - DNA, 25 bp, Homo sapien
aatatcacctttcttatagattcgc

SEQ ID NO: 1051353 - DNA, 25 bp, Homo sapien
caatatcacctttcttatagattcg

SEQ ID NO: 1051354 - DNA, 25 bp, Homo sapien
ttgccatggtaacacttgtggggcg

SEQ ID NO: 1051355 - DNA, 25 bp, Homo sapien
atggtaacacttgtggggcgttcct

SEQ ID NO: 1051356 - DNA, 25 bp, Homo sapien
ctggataacattgtagactcttcca

SEQ ID NO: 1051357 - DNA, 25 bp, Homo sapien
gccatggtaacacttgtggggcgtt

SEQ ID NO: 1051358 - DNA, 25 bp, Homo sapien
tgtttacaacaatgctagcagcata

SEQ ID NO: 1051359 - DNA, 25 bp, Homo sapien
ctcacaaagtgtgctttgctgggtg

SEQ ID NO: 1051360 - DNA, 25 bp, Homo sapien
atgccgtgaattcatagagaatagg

SEQ ID NO: 1051361 - DNA, 25 bp, Homo sapien
caaagtgtgctttgctgggtggagc

SEQ ID NO: 1051362 - DNA, 25 bp, Homo sapien
ttatgccgtgaattcatagagaata

SEQ ID NO: 1051363 - DNA, 25 bp, Homo sapien
agggtcatggtcagcagactctgag

SEQ ID NO: 1051364 - DNA, 25 bp, Homo sapien
gagaagggtgccagacaagcctgtc

SEQ ID NO: 1051365 - DNA, 25 bp, Homo sapien
ggcttcagcttcaaagggtcatggt

SEQ ID NO: 1051366 - DNA, 25 bp, Homo sapien
gctccctgaatctttgatcactgta

SEQ ID NO: 1051367 - DNA, 25 bp, Homo sapien
tgagggcaggtggacaggatgttcc

SEQ ID NO: 1051368 - DNA, 25 bp, Homo sapien
ctgagggcaggtggacaggatgttc

SEQ ID NO: 1051369 - DNA, 25 bp, Homo sapien
agtgggtccaggttcctggctgtcc

SEQ ID NO: 1051370 - DNA, 25 bp, Homo sapien
ggtccaggttcctggctgtccgtgg

SEQ ID NO: 1051371 - DNA, 25 bp, Homo sapien
aggttcctggctgtccgtgggctgt

SEQ ID NO: 1051372 - DNA, 25 bp, Homo sapien
agcagagagtgggtccaggttcctg

SEQ ID NO: 1051373 - DNA, 25 bp, Homo sapien
tgatgggtggagaagtccaagccca

SEQ ID NO: 1051374 - DNA, 25 bp, Homo sapien
gctgatgggtggagaagtccaagcc

SEQ ID NO: 1051375 - DNA, 25 bp, Homo sapien
agtgggtgtcgtccagttcttagga

SEQ ID NO: 1051376 - DNA, 25 bp, Homo sapien
cctgagtgggtgtcgtccagttctt

SEQ ID NO: 1051377 - DNA, 25 bp, Homo sapien
ggcacagctggacaaaggtcatttc

SEQ ID NO: 1051378 - DNA, 25 bp, Homo sapien
ggcaggaaagcggttctctactgac

SEQ ID NO: 1051379 - DNA, 25 bp, Homo sapien
caggctcggcacagctggacaaagg

SEQ ID NO: 1051380 - DNA, 25 bp, Homo sapien
ttctctactgacatggcctgtaggg

SEQ ID NO: 1051381 - DNA, 25 bp, Homo sapien
tgaatcttcgtcttgggtaaccagg

SEQ ID NO: 1051382 - DNA, 25 bp, Homo sapien
taaccagggtgacaatggccgttgg

SEQ ID NO: 1051383 - DNA, 25 bp, Homo sapien
ggaatggcagcaattgttatattac

SEQ ID NO: 1051384 - DNA, 25 bp, Homo sapien
aaagggaaattgaatcttcgtcttg

SEQ ID NO: 1051385 - DNA, 25 bp, Homo sapien
ccaaggcatccggagagtagggacc

SEQ ID NO: 1051386 - DNA, 25 bp, Homo sapien
caagatccaaggcatccggagagta

SEQ ID NO: 1051387 - DNA, 25 bp, Homo sapien
ctgcctctccaacaagatccaaggc

SEQ ID NO: 1051388 - DNA, 25 bp, Homo sapien
aaggcatccggagagtagggaccat

SEQ ID NO: 1051389 - DNA, 25 bp, Homo sapien
ttgttgcatgtgcaagagcaggaag

SEQ ID NO: 1051390 - DNA, 25 bp, Homo sapien
ggaagacactcgcttgctgccagag

SEQ ID NO: 1051391 - DNA, 25 bp, Homo sapien
caagagcaggaagacactcgcttgc

SEQ ID NO: 1051392 - DNA, 25 bp, Homo sapien
tgccagagtcgttaaggttgggaaa

SEQ ID NO: 1051393 - DNA, 25 bp, Homo sapien
cccatgggtgcagaaaggatgttcg

SEQ ID NO: 1051394 - DNA, 25 bp, Homo sapien
gccgcagctgtaggacagagtccat

SEQ ID NO: 1051395 - DNA, 25 bp, Homo sapien
tctgagcaacaggaggtgtggccag

SEQ ID NO: 1051396 - DNA, 25 bp, Homo sapien
gaaaggctggagtctttggacgcct

SEQ ID NO: 1051397 - DNA, 25 bp, Homo sapien
ggctgtgtcaatagcagccttgaga

SEQ ID NO: 1051398 - DNA, 25 bp, Homo sapien
tgtgtcaatagcagccttgagaggg

SEQ ID NO: 1051399 - DNA, 25 bp, Homo sapien
gcctggtggcgtcagggctgtgtca

SEQ ID NO: 1051400 - DNA, 25 bp, Homo sapien
cagcctggtggcgtcagggctgtgt

SEQ ID NO: 1051401 - DNA, 25 bp, Homo sapien
cctttttctcctctcgctcctgctc

SEQ ID NO: 1051402 - DNA, 25 bp, Homo sapien
ggcctttttctcctctcgctcctgc

SEQ ID NO: 1051403 - DNA, 25 bp, Homo sapien
cctggcctttttctcctctcgctcc

SEQ ID NO: 1051404 - DNA, 25 bp, Homo sapien
tggcctttttctcctctcgctcctg

SEQ ID NO: 1051405 - DNA, 25 bp, Homo sapien
agtgtgccctggacattcccggagg

SEQ ID NO: 1051406 - DNA, 25 bp, Homo sapien
gggttttgagtgtgccctggacatt

SEQ ID NO: 1051407 - DNA, 25 bp, Homo sapien
tttgagtgtgccctggacattcccg

SEQ ID NO: 1051408 - DNA, 25 bp, Homo sapien
tgccctggacattcccggagggaag

SEQ ID NO: 1051409 - DNA, 25 bp, Homo sapien
tgacactagcctacttgttccgtac

SEQ ID NO: 1051410 - DNA, 25 bp, Homo sapien
agctgctctgtcacctgacactagc

SEQ ID NO: 1051411 - DNA, 25 bp, Homo sapien
tgtcacctgacactagcctacttgt

SEQ ID NO: 1051412 - DNA, 25 bp, Homo sapien
tgctctgtcacctgacactagccta

SEQ ID NO: 1051413 - DNA, 25 bp, Homo sapien
gatcatcactgagcgacattccatg

SEQ ID NO: 1051414 - DNA, 25 bp, Homo sapien
ggaccgtggcagatcatctcattca

SEQ ID NO: 1051415 - DNA, 25 bp, Homo sapien
cctccatgcccgggtgcggtaggat

SEQ ID NO: 1051416 - DNA, 25 bp, Homo sapien
tgctgtgtgcatgaggaatttccac

SEQ ID NO: 1051417 - DNA, 25 bp, Homo sapien
ctgggcatggtccggcctaccattc

SEQ ID NO: 1051418 - DNA, 25 bp, Homo sapien
ggctggcccgtgtgggagcccgtgg

SEQ ID NO: 1051419 - DNA, 25 bp, Homo sapien
gagcccgtgggtctctcggccacgt

SEQ ID NO: 1051420 - DNA, 25 bp, Homo sapien
ccacgttgccgagtgctggagtctc

SEQ ID NO: 1051421 - DNA, 25 bp, Homo sapien
cgtgcagtaaagttatggtgtgaag

SEQ ID NO: 1051422 - DNA, 25 bp, Homo sapien
tgggaaggagatcccgggatcttca

SEQ ID NO: 1051423 - DNA, 25 bp, Homo sapien
gcgcacaagtgtgttcgtgcagtaa

SEQ ID NO: 1051424 - DNA, 25 bp, Homo sapien
aagtgttcccgggtagcgcacaagt

SEQ ID NO: 1051425 - DNA, 25 bp, Homo sapien
ttcagtactatcttcttgttttttc

SEQ ID NO: 1051426 - DNA, 25 bp, Homo sapien
cctcttcttcagtactatcttcttg

SEQ ID NO: 1051427 - DNA, 25 bp, Homo sapien
cttcagtactatcttcttgtttttt

SEQ ID NO: 1051428 - DNA, 25 bp, Homo sapien
cttcttcagtactatcttcttgttt

SEQ ID NO: 1051429 - DNA, 25 bp, Homo sapien
cggagccgtaagaattccagcctgg

SEQ ID NO: 1051430 - DNA, 25 bp, Homo sapien
ctagtaggcaggaatgtgagagtgt

SEQ ID NO: 1051431 - DNA, 25 bp, Homo sapien
gaatgtgagagtgtgtacggagccg

SEQ ID NO: 1051432 - DNA, 25 bp, Homo sapien
agtgtgtacggagccgtaagaattc

SEQ ID NO: 1051433 - DNA, 25 bp, Homo sapien
cacaggactggtcctgcttgctcta

SEQ ID NO: 1051434 - DNA, 25 bp, Homo sapien
acaggactggtcctgcttgctctac

SEQ ID NO: 1051435 - DNA, 25 bp, Homo sapien
tacacaggactggtcctgcttgctc

SEQ ID NO: 1051436 - DNA, 25 bp, Homo sapien
ctacacaggactggtcctgcttgct

SEQ ID NO: 1051437 - DNA, 25 bp, Homo sapien
acatagagtaaagcttcctggtggc

SEQ ID NO: 1051438 - DNA, 25 bp, Homo sapien
tgtgagaggcactggaacagtccac

SEQ ID NO: 1051439 - DNA, 25 bp, Homo sapien
cagtagcagatagtgggatggccct

SEQ ID NO: 1051440 - DNA, 25 bp, Homo sapien
gaaggatcaagatgagctggtcccc

SEQ ID NO: 1051441 - DNA, 25 bp, Homo sapien
ggctgcagccactcgtaaggtaatc

SEQ ID NO: 1051442 - DNA, 25 bp, Homo sapien
taaggtaatcaagcactcggaagtg

SEQ ID NO: 1051443 - DNA, 25 bp, Homo sapien
gattgcgagccagtcaagtcaacag

SEQ ID NO: 1051444 - DNA, 25 bp, Homo sapien
cgttgtgaacactcgctgtgattgc

SEQ ID NO: 1051445 - DNA, 25 bp, Homo sapien
aacgctaatcacggccggggcgttg

SEQ ID NO: 1051446 - DNA, 25 bp, Homo sapien
taatcacggccggggcgttgtctct

SEQ ID NO: 1051447 - DNA, 25 bp, Homo sapien
ggccggggcgttgtctctcacacct

SEQ ID NO: 1051448 - DNA, 25 bp, Homo sapien
cacggccggggcgttgtctctcaca

SEQ ID NO: 1051449 - DNA, 25 bp, Homo sapien
gctcgctgccaccttcacctcccga

SEQ ID NO: 1051450 - DNA, 25 bp, Homo sapien
gctgccaccttcacctcccgagtgc

SEQ ID NO: 1051451 - DNA, 25 bp, Homo sapien
ccaccttcacctcccgagtgcaagt

SEQ ID NO: 1051452 - DNA, 25 bp, Homo sapien
tgccaccttcacctcccgagtgcaa

SEQ ID NO: 1051453 - DNA, 25 bp, Homo sapien
ataggaaaagggcacagaacctggg

SEQ ID NO: 1051454 - DNA, 25 bp, Homo sapien
cactcccagaacaggtggtggaaat

SEQ ID NO: 1051455 - DNA, 25 bp, Homo sapien
tggtggaaatgcaggtctcccatgg

SEQ ID NO: 1051456 - DNA, 25 bp, Homo sapien
ctaatatagggcagaaggtaagcaa

SEQ ID NO: 1051457 - DNA, 25 bp, Homo sapien
caacggccacaaggaggagggaact

SEQ ID NO: 1051458 - DNA, 25 bp, Homo sapien
gccacaaggaggagggaactgagca

SEQ ID NO: 1051459 - DNA, 25 bp, Homo sapien
acggccacaaggaggagggaactga

SEQ ID NO: 1051460 - DNA, 25 bp, Homo sapien
gaggagggaactgagcagccggagc

SEQ ID NO: 1051461 - DNA, 25 bp, Homo sapien
aatcctagtgctttgagaggccgag

SEQ ID NO: 1051462 - DNA, 25 bp, Homo sapien
gcgggaggatcgcttgagcccggga

SEQ ID NO: 1051463 - DNA, 25 bp, Homo sapien
gtaatcctagtgctttgagaggccg

SEQ ID NO: 1051464 - DNA, 25 bp, Homo sapien
cccgggagtttgagaccagcctggg

SEQ ID NO: 1051465 - DNA, 25 bp, Homo sapien
gaggaaggtgggccatagcctgagg

SEQ ID NO: 1051466 - DNA, 25 bp, Homo sapien
gcgagaggaaggtgggccatagcct

SEQ ID NO: 1051467 - DNA, 25 bp, Homo sapien
ggaagggcgagaggaaggtgggcca

SEQ ID NO: 1051468 - DNA, 25 bp, Homo sapien
ctggaagggcgagaggaaggtgggc

SEQ ID NO: 1051469 - DNA, 25 bp, Homo sapien
aggggaccgcatcctcaccattgac

SEQ ID NO: 1051470 - DNA, 25 bp, Homo sapien
tgtaggggaccgcatcctcaccatt

SEQ ID NO: 1051471 - DNA, 25 bp, Homo sapien
gtaggggaccgcatcctcaccattg

SEQ ID NO: 1051472 - DNA, 25 bp, Homo sapien
taggggaccgcatcctcaccattga

SEQ ID NO: 1051473 - DNA, 25 bp, Homo sapien
gctgggccccaccatgagagttgcc

SEQ ID NO: 1051474 - DNA, 25 bp, Homo sapien
tgcagcatacaacctgcgacctggg

SEQ ID NO: 1051475 - DNA, 25 bp, Homo sapien
cactgtgcaactctagagggcgcca

SEQ ID NO: 1051476 - DNA, 25 bp, Homo sapien
ccaatggctgtataggttgtgcact

SEQ ID NO: 1051477 - DNA, 25 bp, Homo sapien
ccgcttttctcatactgcagggaaa

SEQ ID NO: 1051478 - DNA, 25 bp, Homo sapien
cagtggccggcagtcacaacccagt

SEQ ID NO: 1051479 - DNA, 25 bp, Homo sapien
acaggtgtggtagaagcttccgctt

SEQ ID NO: 1051480 - DNA, 25 bp, Homo sapien
gcgatgaggctaccgccacaggtgt

SEQ ID NO: 1051481 - DNA, 25 bp, Homo sapien
acaggcagggacagggtagagaact

SEQ ID NO: 1051482 - DNA, 25 bp, Homo sapien
ccacaggcagggacagggtagagaa

SEQ ID NO: 1051483 - DNA, 25 bp, Homo sapien
caggcagggacagggtagagaactc

SEQ ID NO: 1051484 - DNA, 25 bp, Homo sapien
ggccacaggcagggacagggtagag

SEQ ID NO: 1051485 - DNA, 25 bp, Homo sapien
tggatgcacaaagaggtccccagag

SEQ ID NO: 1051486 - DNA, 25 bp, Homo sapien
tccttcacagcacggtcgtactcgc

SEQ ID NO: 1051487 - DNA, 25 bp, Homo sapien
caacaccacctggtaggtccgggag

SEQ ID NO: 1051488 - DNA, 25 bp, Homo sapien
caaagaggtccccagagttgatggg

SEQ ID NO: 1051489 - DNA, 25 bp, Homo sapien
gaggcgagctggacggcgtctccca

SEQ ID NO: 1051490 - DNA, 25 bp, Homo sapien
agtgaggcgagctggacggcgtctc

SEQ ID NO: 1051491 - DNA, 25 bp, Homo sapien
ggagtgaggcgagctggacggcgtc

SEQ ID NO: 1051492 - DNA, 25 bp, Homo sapien
agggagtgaggcgagctggacggcg

SEQ ID NO: 1051493 - DNA, 25 bp, Homo sapien
tatagagacggccccagccggtgat

SEQ ID NO: 1051494 - DNA, 25 bp, Homo sapien
agagacggccccagccggtgatgta

SEQ ID NO: 1051495 - DNA, 25 bp, Homo sapien
gagacggccccagccggtgatgtag

SEQ ID NO: 1051496 - DNA, 25 bp, Homo sapien
tagagacggccccagccggtgatgt

SEQ ID NO: 1051497 - DNA, 25 bp, Homo sapien
ctgcagcgataaaaagcaccgagtc

SEQ ID NO: 1051498 - DNA, 25 bp, Homo sapien
agcttgtctgggagtggcccgttgg

SEQ ID NO: 1051499 - DNA, 25 bp, Homo sapien
tgcagcttgtctgggagtggcccgt

SEQ ID NO: 1051500 - DNA, 25 bp, Homo sapien
ctgcagcttgtctgggagtggcccg

SEQ ID NO: 1051501 - DNA, 25 bp, Homo sapien
ctcctgcagcttgtctgggagtggc

SEQ ID NO: 1051502 - DNA, 25 bp, Homo sapien
ggagcagtgttcatagtccaccacc

SEQ ID NO: 1051503 - DNA, 25 bp, Homo sapien
agtgttcatagtccaccaccggcag

SEQ ID NO: 1051504 - DNA, 25 bp, Homo sapien
ccaccagttccacctggagcagtgt

SEQ ID NO: 1051505 - DNA, 25 bp, Homo sapien
ttgcagccggagcggatgtcccctc

SEQ ID NO: 1051506 - DNA, 25 bp, Homo sapien
agtgaacaccgtgggcttcctgcgg

SEQ ID NO: 1051507 - DNA, 25 bp, Homo sapien
gtgaacaccgtgggcttcctgcggg

SEQ ID NO: 1051508 - DNA, 25 bp, Homo sapien
tgaacaccgtgggcttcctgcgggt

SEQ ID NO: 1051509 - DNA, 25 bp, Homo sapien
gagtgaacaccgtgggcttcctgcg

SEQ ID NO: 1051510 - DNA, 25 bp, Homo sapien
cctccgggccgccctgccctcctca

SEQ ID NO: 1051511 - DNA, 25 bp, Homo sapien
ctccgggccgccctgccctcctcac

SEQ ID NO: 1051512 - DNA, 25 bp, Homo sapien
aaacttggtgcagaaccagatgggt

SEQ ID NO: 1051513 - DNA, 25 bp, Homo sapien
gcgcaggggccgtgctaatctctat

SEQ ID NO: 1051514 - DNA, 25 bp, Homo sapien
atggaagccttcatgactttgcatg

SEQ ID NO: 1051515 - DNA, 25 bp, Homo sapien
gggccgtgctaatctctatatcatt

SEQ ID NO: 1051516 - DNA, 25 bp, Homo sapien
ggaagccttcatgactttgcatgtc

SEQ ID NO: 1051517 - DNA, 25 bp, Homo sapien
tttattcaggatgtgggatcgatca

SEQ ID NO: 1051518 - DNA, 25 bp, Homo sapien
aggatgtgggatcgatcagcactgc

SEQ ID NO: 1051519 - DNA, 25 bp, Homo sapien
ttcaggatgtgggatcgatcagcac

SEQ ID NO: 1051520 - DNA, 25 bp, Homo sapien
atgtgggatcgatcagcactgccag

SEQ ID NO: 1051521 - DNA, 25 bp, Homo sapien
cacagtggtcctaagtccgggactc

SEQ ID NO: 1051522 - DNA, 25 bp, Homo sapien
tgtggcctcggctcccagaatataa

SEQ ID NO: 1051523 - DNA, 25 bp, Homo sapien
taaatggacccactagaacggagcc

SEQ ID NO: 1051524 - DNA, 25 bp, Homo sapien
ctttaatatgccagtgttcacggtg

SEQ ID NO: 1051525 - DNA, 25 bp, Homo sapien
ctggagggtgtcccctctgtgtggc

SEQ ID NO: 1051526 - DNA, 25 bp, Homo sapien
gaaagcacggttgagcctgatattc

SEQ ID NO: 1051527 - DNA, 25 bp, Homo sapien
gaaaggactcttcaaatgccctccg

SEQ ID NO: 1051528 - DNA, 25 bp, Homo sapien
catttattcaaggagacaacaaatg

SEQ ID NO: 1051529 - DNA, 25 bp, Homo sapien
cgcttcctaccctgaaagcacggtt

SEQ ID NO: 1051530 - DNA, 25 bp, Homo sapien
caggtctcccatggtccaaggccac

SEQ ID NO: 1051531 - DNA, 25 bp, Homo sapien
aggtctcccatggtccaaggccaca

SEQ ID NO: 1051532 - DNA, 25 bp, Homo sapien
ccaggtctcccatggtccaaggcca

SEQ ID NO: 1051533 - DNA, 25 bp, Homo sapien
caacggccacaaggaggagggaact

SEQ ID NO: 1051534 - DNA, 25 bp, Homo sapien
acggccacaaggaggagggaactga

SEQ ID NO: 1051535 - DNA, 25 bp, Homo sapien
gaggagggaactgagcagccggagc

SEQ ID NO: 1051536 - DNA, 25 bp, Homo sapien
gccacaaggaggagggaactgagca

SEQ ID NO: 1051537 - DNA, 25 bp, Homo sapien
ggaagagtgagaggaaggtgggcca

SEQ ID NO: 1051538 - DNA, 25 bp, Homo sapien
tgagaggaaggtgggccatagcctg

SEQ ID NO: 1051539 - DNA, 25 bp, Homo sapien
ctggaagagtgagaggaaggtgggc

SEQ ID NO: 1051540 - DNA, 25 bp, Homo sapien
gaggaaggtgggccatagcctgagg

SEQ ID NO: 1051541 - DNA, 25 bp, Homo sapien
cagctgtaggggaccgcatcctcac

SEQ ID NO: 1051542 - DNA, 25 bp, Homo sapien
ccagctgtaggggaccgcatcctca

SEQ ID NO: 1051543 - DNA, 25 bp, Homo sapien
taagttgcaaatagcccagtgaggg

SEQ ID NO: 1051544 - DNA, 25 bp, Homo sapien
ttacagatgaaacgggcaaaacctc

SEQ ID NO: 1051545 - DNA, 25 bp, Homo sapien
ccatcagtgtgccaactccttgagt

SEQ ID NO: 1051546 - DNA, 25 bp, Homo sapien
caaagccctgtagtatcatcctagg

SEQ ID NO: 1051547 - DNA, 25 bp, Homo sapien
ctatcacttttccatgggggtcaca

SEQ ID NO: 1051548 - DNA, 25 bp, Homo sapien
gaaggccctctgttctatcacgcac

SEQ ID NO: 1051549 - DNA, 25 bp, Homo sapien
actctagagggcgccattcacatgg

SEQ ID NO: 1051550 - DNA, 25 bp, Homo sapien
gggtcacattctgattctccaaagc

SEQ ID NO: 1051551 - DNA, 25 bp, Homo sapien
ggggcgatgaggctaccgccacacg

SEQ ID NO: 1051552 - DNA, 25 bp, Homo sapien
ggcgatgaggctaccgccacacgtg

SEQ ID NO: 1051553 - DNA, 25 bp, Homo sapien
atgaggctaccgccacacgtgtggt

SEQ ID NO: 1051554 - DNA, 25 bp, Homo sapien
gcgatgaggctaccgccacacgtgt

SEQ ID NO: 1051555 - DNA, 25 bp, Homo sapien
ccacaggcagggacagggtagagaa

SEQ ID NO: 1051556 - DNA, 25 bp, Homo sapien
caggcagggacagggtagagaactc

SEQ ID NO: 1051557 - DNA, 25 bp, Homo sapien
acaggcagggacagggtagagaact

SEQ ID NO: 1051558 - DNA, 25 bp, Homo sapien
ggccacaggcagggacagggtagag

SEQ ID NO: 1051559 - DNA, 25 bp, Homo sapien
gcaaggttgtactcacccaacacca

SEQ ID NO: 1051560 - DNA, 25 bp, Homo sapien
tcggggccctccttcacagcaaggt

SEQ ID NO: 1051561 - DNA, 25 bp, Homo sapien
ctccttcacagcaaggttgtactca

SEQ ID NO: 1051562 - DNA, 25 bp, Homo sapien
tcacagcaaggttgtactcacccaa

SEQ ID NO: 1051563 - DNA, 25 bp, Homo sapien
gaacactgccatcccctctgtaggg

SEQ ID NO: 1051564 - DNA, 25 bp, Homo sapien
tacgtccctactcagagttggagcc

SEQ ID NO: 1051565 - DNA, 25 bp, Homo sapien
ggttccagaccggagcattcactca

SEQ ID NO: 1051566 - DNA, 25 bp, Homo sapien
tgctggcttcaatcctcagtgtgtg

SEQ ID NO: 1051567 - DNA, 25 bp, Homo sapien
aggccatacacagagttaatgccag

SEQ ID NO: 1051568 - DNA, 25 bp, Homo sapien
acttgctcaggccatacacagagtt

SEQ ID NO: 1051569 - DNA, 25 bp, Homo sapien
atggtcaccttttgacaaatggcaa

SEQ ID NO: 1051570 - DNA, 25 bp, Homo sapien
gacaaatggcaaaactaaggcccag

SEQ ID NO: 1051571 - DNA, 25 bp, Homo sapien
agccggtgatgtagcagggtgtctt

SEQ ID NO: 1051572 - DNA, 25 bp, Homo sapien
gaggcgagctggacggcatctccca

SEQ ID NO: 1051573 - DNA, 25 bp, Homo sapien
ttgggaaggatgtcaccagcgggag

SEQ ID NO: 1051574 - DNA, 25 bp, Homo sapien
gatgtagcagggtgtcttgttggga

SEQ ID NO: 1051575 - DNA, 25 bp, Homo sapien
cttatagtccaccacgggcagccgg

SEQ ID NO: 1051576 - DNA, 25 bp, Homo sapien
cagtgcttatagtccaccacgggca

SEQ ID NO: 1051577 - DNA, 25 bp, Homo sapien
ccaccagttccacctggagcagtgc

SEQ ID NO: 1051578 - DNA, 25 bp, Homo sapien
ggagcagtgcttatagtccaccacg

SEQ ID NO: 1051579 - DNA, 25 bp, Homo sapien
ggagcggatgtaccctccagcacac

SEQ ID NO: 1051580 - DNA, 25 bp, Homo sapien
agcggatgtaccctccagcacacac

SEQ ID NO: 1051581 - DNA, 25 bp, Homo sapien
gagcggatgtaccctccagcacaca

SEQ ID NO: 1051582 - DNA, 25 bp, Homo sapien
gcagttgaggggtcctccagagtca

SEQ ID NO: 1051583 - DNA, 25 bp, Homo sapien
atgaaggcggagactcgagtgaaca

SEQ ID NO: 1051584 - DNA, 25 bp, Homo sapien
gagactcgagtgaacaccgtgggct

SEQ ID NO: 1051585 - DNA, 25 bp, Homo sapien
aggcggagactcgagtgaacaccgt

SEQ ID NO: 1051586 - DNA, 25 bp, Homo sapien
gcagcctcttgtctggcatgtctct

SEQ ID NO: 1051587 - DNA, 25 bp, Homo sapien
caggcagcctcttgtctggcatgtc

SEQ ID NO: 1051588 - DNA, 25 bp, Homo sapien
ccaggcagcctcttgtctggcatgt

SEQ ID NO: 1051589 - DNA, 25 bp, Homo sapien
caccaggcagcctcttgtctggcat

SEQ ID NO: 1051590 - DNA, 25 bp, Homo sapien
aaacttggtgcagaacctgatgggt

SEQ ID NO: 1051591 - DNA, 25 bp, Homo sapien
catccttgcgcaggggccgtgctaa

SEQ ID NO: 1051592 - DNA, 25 bp, Homo sapien
gggccgtgctaatctctatatcatt

SEQ ID NO: 1051593 - DNA, 25 bp, Homo sapien
ccaattttagtacatgtgctgccaa

SEQ ID NO: 1051594 - DNA, 25 bp, Homo sapien
tggaaggcttcatgactttgcatgt

SEQ ID NO: 1051595 - DNA, 25 bp, Homo sapien
atgtgggatcgatcagcactgccag

SEQ ID NO: 1051596 - DNA, 25 bp, Homo sapien
tttattcaggatgtgggatcgatca

SEQ ID NO: 1051597 - DNA, 25 bp, Homo sapien
ttcaggatgtgggatcgatcagcac

SEQ ID NO: 1051598 - DNA, 25 bp, Homo sapien
aggatgtgggatcgatcagcactgc

SEQ ID NO: 1051599 - DNA, 25 bp, Homo sapien
ttatctttctgagccgcagtttgcc

SEQ ID NO: 1051600 - DNA, 25 bp, Homo sapien
tcttagcagctttttcgctccggag

SEQ ID NO: 1051601 - DNA, 25 bp, Homo sapien
tcgctccggagaagttctttatctt

SEQ ID NO: 1051602 - DNA, 25 bp, Homo sapien
gagctcgcccacagctgattcaggg

SEQ ID NO: 1051603 - DNA, 25 bp, Homo sapien
agcgggggacgaggaaagatcagga

SEQ ID NO: 1051604 - DNA, 25 bp, Homo sapien
gataagaccctaactcccacaaatg

SEQ ID NO: 1051605 - DNA, 25 bp, Homo sapien
aagaccctaactcccacaaatgact

SEQ ID NO: 1051606 - DNA, 25 bp, Homo sapien
ggagcgggggacgaggaaagatcag

SEQ ID NO: 1051607 - DNA, 25 bp, Homo sapien
cgagcaagcgtactcgggttaggaa

SEQ ID NO: 1051608 - DNA, 25 bp, Homo sapien
aaggcctagcccgagtgcggaaatg

SEQ ID NO: 1051609 - DNA, 25 bp, Homo sapien
gctgcagtgaggtccaagtcagccc

SEQ ID NO: 1051610 - DNA, 25 bp, Homo sapien
atgctgccgcggctccgaaggccta

SEQ ID NO: 1051611 - DNA, 25 bp, Homo sapien
tgagtactggtaagaaagctgtcca

SEQ ID NO: 1051612 - DNA, 25 bp, Homo sapien
ggtgccgccacgtaaaaaatgaagc

SEQ ID NO: 1051613 - DNA, 25 bp, Homo sapien
tgtccatatcacaacatgactaagg

SEQ ID NO: 1051614 - DNA, 25 bp, Homo sapien
cccgatcgatgtgtagtatgacccc

SEQ ID NO: 1051615 - DNA, 25 bp, Homo sapien
agacagcgtcttgccgtcattcagg

SEQ ID NO: 1051616 - DNA, 25 bp, Homo sapien
caaagctgattgaagaatactggcc

SEQ ID NO: 1051617 - DNA, 25 bp, Homo sapien
gccttgctagagaatcgtgcattca

SEQ ID NO: 1051618 - DNA, 25 bp, Homo sapien
taacacaattgaggaaacatgacag

SEQ ID NO: 1051619 - DNA, 25 bp, Homo sapien
gtctcaattctggaactctaagaaa

SEQ ID NO: 1051620 - DNA, 25 bp, Homo sapien
gtagtgatctcatttgatcattctg

SEQ ID NO: 1051621 - DNA, 25 bp, Homo sapien
ctcctcggcccatcatttcattggg

SEQ ID NO: 1051622 - DNA, 25 bp, Homo sapien
tcagtctcaattctggaactctaag

SEQ ID NO: 1051623 - DNA, 25 bp, Homo sapien
aacctctgccgggaggctttctagc

SEQ ID NO: 1051624 - DNA, 25 bp, Homo sapien
tctagcatggtcttaaagtcttcaa

SEQ ID NO: 1051625 - DNA, 25 bp, Homo sapien
cagaaggctctcgtggaatctggac

SEQ ID NO: 1051626 - DNA, 25 bp, Homo sapien
tcttcactgagggtctctggtggga

SEQ ID NO: 1051627 - DNA, 25 bp, Homo sapien
tttgtgtggatatcaggtctcagcc

SEQ ID NO: 1051628 - DNA, 25 bp, Homo sapien
tcagccaccaccgtccagcaaggtc

SEQ ID NO: 1051629 - DNA, 25 bp, Homo sapien
tgtggatatcaggtctcagccacca

SEQ ID NO: 1051630 - DNA, 25 bp, Homo sapien
gctcctttgtgtggatatcaggtct

SEQ ID NO: 1051631 - DNA, 25 bp, Homo sapien
tcctcgggcaggacagcctggaatt

SEQ ID NO: 1051632 - DNA, 25 bp, Homo sapien
gctcctcgggcaggacagcctggaa

SEQ ID NO: 1051633 - DNA, 25 bp, Homo sapien
agcctggaattgctcctgcaccagc

SEQ ID NO: 1051634 - DNA, 25 bp, Homo sapien
ctcgggcaggacagcctggaattgc

SEQ ID NO: 1051635 - DNA, 25 bp, Homo sapien
ttagccagtgattctgattccaggc

SEQ ID NO: 1051636 - DNA, 25 bp, Homo sapien
tagccagtgattctgattccaggct

SEQ ID NO: 1051637 - DNA, 25 bp, Homo sapien
ccagtgattctgattccaggctgac

SEQ ID NO: 1051638 - DNA, 25 bp, Homo sapien
gccagtgattctgattccaggctga

SEQ ID NO: 1051639 - DNA, 25 bp, Homo sapien
tctttctgtaggaaataaagctgcc

SEQ ID NO: 1051640 - DNA, 25 bp, Homo sapien
gcttggttgacttctcatatgcagg

SEQ ID NO: 1051641 - DNA, 25 bp, Homo sapien
gcagcaggctgattgtcctaacaag

SEQ ID NO: 1051642 - DNA, 25 bp, Homo sapien
tatgcaggctgagcaagaagcaagc

SEQ ID NO: 1051643 - DNA, 25 bp, Homo sapien
ggactacaggggcccaccacggcgc

SEQ ID NO: 1051644 - DNA, 25 bp, Homo sapien
actacaggggcccaccacggcgcct

SEQ ID NO: 1051645 - DNA, 25 bp, Homo sapien
caggggcccaccacggcgcctggct

SEQ ID NO: 1051646 - DNA, 25 bp, Homo sapien
aggcagagtacagtggcgcgatctc

SEQ ID NO: 1051647 - DNA, 25 bp, Homo sapien
tgctgcaccacaaggggttacagct

SEQ ID NO: 1051648 - DNA, 25 bp, Homo sapien
gggctgcctccactaagggatctgc

SEQ ID NO: 1051649 - DNA, 25 bp, Homo sapien
tatgcttgtctagggacctgaaccc

SEQ ID NO: 1051650 - DNA, 25 bp, Homo sapien
gcccacatcattatgcttgtctagg

SEQ ID NO: 1051651 - DNA, 25 bp, Homo sapien
ggctatcatgtttacccacactttt

SEQ ID NO: 1051652 - DNA, 25 bp, Homo sapien
tcccactgccaaaagggattgctgg

SEQ ID NO: 1051653 - DNA, 25 bp, Homo sapien
ttggatgcattgctgtgcccctcac

SEQ ID NO: 1051654 - DNA, 25 bp, Homo sapien
gatccctagaacactttggctgaat

SEQ ID NO: 1051655 - DNA, 25 bp, Homo sapien
agctcgtgagttcggggctatgctc

SEQ ID NO: 1051656 - DNA, 25 bp, Homo sapien
ctccgcccgcctgtcgcgcacgcgc

SEQ ID NO: 1051657 - DNA, 25 bp, Homo sapien
ggccggcgcagctcgtgagttcggg

SEQ ID NO: 1051658 - DNA, 25 bp, Homo sapien
ccgcccgcctgtcgcgcacgcgcgg

SEQ ID NO: 1051659 - DNA, 25 bp, Homo sapien
gagacgcacagttgggtgcccgcgg

SEQ ID NO: 1051660 - DNA, 25 bp, Homo sapien
agacgcacagttgggtgcccgcgga

SEQ ID NO: 1051661 - DNA, 25 bp, Homo sapien
acgcacagttgggtgcccgcggaag

SEQ ID NO: 1051662 - DNA, 25 bp, Homo sapien
gacgcacagttgggtgcccgcggaa

SEQ ID NO: 1051663 - DNA, 25 bp, Homo sapien
ttggcagcactgcgcggggtctcct

SEQ ID NO: 1051664 - DNA, 25 bp, Homo sapien
cggggcgttggcagcactgcgcggg

SEQ ID NO: 1051665 - DNA, 25 bp, Homo sapien
tggcagcactgcgcggggtctcctc

SEQ ID NO: 1051666 - DNA, 25 bp, Homo sapien
gcgttggcagcactgcgcggggtct

SEQ ID NO: 1051667 - DNA, 25 bp, Homo sapien
cgcggaggggagctcggacaggcac

SEQ ID NO: 1051668 - DNA, 25 bp, Homo sapien
cggaggggagctcggacaggcaccg

SEQ ID NO: 1051669 - DNA, 25 bp, Homo sapien
gggagctcggacaggcaccgccgcg

SEQ ID NO: 1051670 - DNA, 25 bp, Homo sapien
ctcggacaggcaccgccgcgagcag

SEQ ID NO: 1051671 - DNA, 25 bp, Homo sapien
gctaaaccggcagggagcgggctgg

SEQ ID NO: 1051672 - DNA, 25 bp, Homo sapien
aagcttcagctaaaccggcagggag

SEQ ID NO: 1051673 - DNA, 25 bp, Homo sapien
gcttcagctaaaccggcagggagcg

SEQ ID NO: 1051674 - DNA, 25 bp, Homo sapien
agctaaaccggcagggagcgggctg

SEQ ID NO: 1051675 - DNA, 25 bp, Homo sapien
gcgatgacgtaatcttccacactac

SEQ ID NO: 1051676 - DNA, 25 bp, Homo sapien
gacgtaatcttccacactacattta

SEQ ID NO: 1051677 - DNA, 25 bp, Homo sapien
ttataccgcgatgacgtaatcttcc

SEQ ID NO: 1051678 - DNA, 25 bp, Homo sapien
aatcttccacactacatttatcttg

SEQ ID NO: 1051679 - DNA, 25 bp, Homo sapien
ctaagtgatggtaaattgtccagac

SEQ ID NO: 1051680 - DNA, 25 bp, Homo sapien
gatggtaaattgtccagacagtgca

SEQ ID NO: 1051681 - DNA, 25 bp, Homo sapien
tgtccagacagtgcagctgcagaag

SEQ ID NO: 1051682 - DNA, 25 bp, Homo sapien
tccagacagtgcagctgcagaagat

SEQ ID NO: 1051683 - DNA, 25 bp, Homo sapien
tttgacaagctaaatgccaagtctg

SEQ ID NO: 1051684 - DNA, 25 bp, Homo sapien
tatgcttagaccattcctcgtcacc

SEQ ID NO: 1051685 - DNA, 25 bp, Homo sapien
aataattttttcaggcgggtagctg

SEQ ID NO: 1051686 - DNA, 25 bp, Homo sapien
aatgtataattaaggccccgtgctg

SEQ ID NO: 1051687 - DNA, 25 bp, Homo sapien
gagaacagtggtgcatccccgctca

SEQ ID NO: 1051688 - DNA, 25 bp, Homo sapien
ttgtaatgaaaatccctgaaaccag

SEQ ID NO: 1051689 - DNA, 25 bp, Homo sapien
aaatgaaccatagctgaaatcttgt

SEQ ID NO: 1051690 - DNA, 25 bp, Homo sapien
ccttccacatggagtaatgaattgc

SEQ ID NO: 1051691 - DNA, 25 bp, Homo sapien
cagagtaagaatccgttctccaaaa

SEQ ID NO: 1051692 - DNA, 25 bp, Homo sapien
acagagtaagaatccgttctccaaa

SEQ ID NO: 1051693 - DNA, 25 bp, Homo sapien
gacagagtaagaatccgttctccaa

SEQ ID NO: 1051694 - DNA, 25 bp, Homo sapien
cctaggcagcaaacgtgacaaattc

SEQ ID NO: 1051695 - DNA, 25 bp, Homo sapien
atgttgaccaggctaccaggctcgt

SEQ ID NO: 1051696 - DNA, 25 bp, Homo sapien
taagtcactacattacctaggcagc

SEQ ID NO: 1051697 - DNA, 25 bp, Homo sapien
tcatgccagcctatatcagaaatcc

SEQ ID NO: 1051698 - DNA, 25 bp, Homo sapien
caagaaacaatgagatgctgtatca

SEQ ID NO: 1051699 - DNA, 25 bp, Homo sapien
cacatacatttccacttcaggtaat

SEQ ID NO: 1051700 - DNA, 25 bp, Homo sapien
taataatacaccacaggatgaaatg

SEQ ID NO: 1051701 - DNA, 25 bp, Homo sapien
tactaaagatgactgtgaaggcctg

SEQ ID NO: 1051702 - DNA, 25 bp, Homo sapien
gaagttcatgcaaagaagactggac

SEQ ID NO: 1051703 - DNA, 25 bp, Homo sapien
tgtacatgaagttcatgcaaagaag

SEQ ID NO: 1051704 - DNA, 25 bp, Homo sapien
gttcatgcaaagaagactggactca

SEQ ID NO: 1051705 - DNA, 25 bp, Homo sapien
catgaagttcatgcaaagaagactg

SEQ ID NO: 1051706 - DNA, 25 bp, Homo sapien
cgcttgaactcggggggcagaggcg

SEQ ID NO: 1051707 - DNA, 25 bp, Homo sapien
cttgaactcggggggcagaggcgca

SEQ ID NO: 1051708 - DNA, 25 bp, Homo sapien
gcttgaactcggggggcagaggcgc

SEQ ID NO: 1051709 - DNA, 25 bp, Homo sapien
aaaagcagcctgaagtaacctgata

SEQ ID NO: 1051710 - DNA, 25 bp, Homo sapien
tgtcaaatcactacggcagcaaaga

SEQ ID NO: 1051711 - DNA, 25 bp, Homo sapien
aatgaagcacactgcccaactctaa

SEQ ID NO: 1051712 - DNA, 25 bp, Homo sapien
tgccttacaagaaaggtagctctga

SEQ ID NO: 1051713 - DNA, 25 bp, Homo sapien
caaagaacagggtgatcgctggcct

SEQ ID NO: 1051714 - DNA, 25 bp, Homo sapien
caaaggccactgctttaaagaatgg

SEQ ID NO: 1051715 - DNA, 25 bp, Homo sapien
agagcaccacacgatcacacggtaa

SEQ ID NO: 1051716 - DNA, 25 bp, Homo sapien
cctcagcagctgttttagcaccaga

SEQ ID NO: 1051717 - DNA, 25 bp, Homo sapien
ctttaaatatttcaaatctgatgat

SEQ ID NO: 1051718 - DNA, 25 bp, Homo sapien
taaatatttcaaatctgatgatgac

SEQ ID NO: 1051719 - DNA, 25 bp, Homo sapien
tttaaatatttcaaatctgatgatg

SEQ ID NO: 1051720 - DNA, 25 bp, Homo sapien
ttaaatatttcaaatctgatgatga

SEQ ID NO: 1051721 - DNA, 25 bp, Homo sapien
atggaaatttgtttgttgtgtagga

SEQ ID NO: 1051722 - DNA, 25 bp, Homo sapien
tggaaatttgtttgttgtgtaggat

SEQ ID NO: 1051723 - DNA, 25 bp, Homo sapien
ggaaatttgtttgttgtgtaggata

SEQ ID NO: 1051724 - DNA, 25 bp, Homo sapien
gatggaaatttgtttgttgtgtagg

SEQ ID NO: 1051725 - DNA, 25 bp, Homo sapien
tacttcaccaaattgagaccaccac

SEQ ID NO: 1051726 - DNA, 25 bp, Homo sapien
tgtctactggagttttgcctcccag

SEQ ID NO: 1051727 - DNA, 25 bp, Homo sapien
cactcgttagaatcttgtctactgg

SEQ ID NO: 1051728 - DNA, 25 bp, Homo sapien
caagatgtagggcatacttcaccaa

SEQ ID NO: 1051729 - DNA, 25 bp, Homo sapien
taaattgggcctgagtaccctcatc

SEQ ID NO: 1051730 - DNA, 25 bp, Homo sapien
cctcatccattaagagatgggtaag

SEQ ID NO: 1051731 - DNA, 25 bp, Homo sapien
ccaaagtctacttatgctagtgtaa

SEQ ID NO: 1051732 - DNA, 25 bp, Homo sapien
gctttccaactaggagaagaatgcc

SEQ ID NO: 1051733 - DNA, 25 bp, Homo sapien
gtccaagagtatatggttctccacc

SEQ ID NO: 1051734 - DNA, 25 bp, Homo sapien
taactgtgactgcatagttgtcaaa

SEQ ID NO: 1051735 - DNA, 25 bp, Homo sapien
ggttctccaccaatcataactgtga

SEQ ID NO: 1051736 - DNA, 25 bp, Homo sapien
tgcagtatcaaaaagtccaagagta

SEQ ID NO: 1051737 - DNA, 25 bp, Homo sapien
cagaaattaagatgtgcagccactc

SEQ ID NO: 1051738 - DNA, 25 bp, Homo sapien
cctatttgccgacccaggtctggga

SEQ ID NO: 1051739 - DNA, 25 bp, Homo sapien
gagattttcctctggctaactgagc

SEQ ID NO: 1051740 - DNA, 25 bp, Homo sapien
caaatagttcctcgtggtacacagt

SEQ ID NO: 1051741 - DNA, 25 bp, Homo sapien
actcagcggtcgtaatctgtcataa

SEQ ID NO: 1051742 - DNA, 25 bp, Homo sapien
gataactcagcggtcgtaatctgtc

SEQ ID NO: 1051743 - DNA, 25 bp, Homo sapien
ttgtggataactcagcggtcgtaat

SEQ ID NO: 1051744 - DNA, 25 bp, Homo sapien
tctgtttgtggataactcagcggtc

SEQ ID NO: 1051745 - DNA, 25 bp, Homo sapien
gacagtggtgagttatctcaggcac

SEQ ID NO: 1051746 - DNA, 25 bp, Homo sapien
cagtggtgagttatctcaggcaccc

SEQ ID NO: 1051747 - DNA, 25 bp, Homo sapien
ctttggacagtggtgagttatctca

SEQ ID NO: 1051748 - DNA, 25 bp, Homo sapien
ttggacagtggtgagttatctcagg

SEQ ID NO: 1051749 - DNA, 25 bp, Homo sapien
agccttcaggtcacgggccagcttt

SEQ ID NO: 1051750 - DNA, 25 bp, Homo sapien
tcacgggccagcttttcagcagtct

SEQ ID NO: 1051751 - DNA, 25 bp, Homo sapien
ttgagtcccaacaagcaagaaagga

SEQ ID NO: 1051752 - DNA, 25 bp, Homo sapien
tctctgagatcaatttgagtcccaa

SEQ ID NO: 1051753 - DNA, 25 bp, Homo sapien
taatgctctaataaatgactcgacc

SEQ ID NO: 1051754 - DNA, 25 bp, Homo sapien
ttcttgctgggcatctttgagcact

SEQ ID NO: 1051755 - DNA, 25 bp, Homo sapien
aatgactcgaccataaatacacatg

SEQ ID NO: 1051756 - DNA, 25 bp, Homo sapien
tttgagcactgctgatcactgttag

SEQ ID NO: 1051757 - DNA, 25 bp, Homo sapien
tatgtgtcttccctcaaagcaaccc

SEQ ID NO: 1051758 - DNA, 25 bp, Homo sapien
tgtcttccctcaaagcaacccatat

SEQ ID NO: 1051759 - DNA, 25 bp, Homo sapien
ctatgtgtcttccctcaaagcaacc

SEQ ID NO: 1051760 - DNA, 25 bp, Homo sapien
tgtgtcttccctcaaagcaacccat

SEQ ID NO: 1051761 - DNA, 25 bp, Homo sapien
tgcttaccatggacgaagatcaaca

SEQ ID NO: 1051762 - DNA, 25 bp, Homo sapien
caaagtagaaatgccacataaaagt

SEQ ID NO: 1051763 - DNA, 25 bp, Homo sapien
tggagtgtatcccttaacaagaagg

SEQ ID NO: 1051764 - DNA, 25 bp, Homo sapien
tctaggaaccaactctggcagtaaa

SEQ ID NO: 1051765 - DNA, 25 bp, Homo sapien
tgagttttagcaagcagtccagtgc

SEQ ID NO: 1051766 - DNA, 25 bp, Homo sapien
tgaagccacaagtttaccacccaag

SEQ ID NO: 1051767 - DNA, 25 bp, Homo sapien
cagcattggtggtacttaggaccca

SEQ ID NO: 1051768 - DNA, 25 bp, Homo sapien
gaaatacacttacacctcagccaga

SEQ ID NO: 1051769 - DNA, 25 bp, Homo sapien
tagaaagactagcaggtacaacagc

SEQ ID NO: 1051770 - DNA, 25 bp, Homo sapien
gtacaacagcagtccggattaaatg

SEQ ID NO: 1051771 - DNA, 25 bp, Homo sapien
caagcaaggttaactgagcaggaaa

SEQ ID NO: 1051772 - DNA, 25 bp, Homo sapien
taaccaggagagtagataactgacc

SEQ ID NO: 1051773 - DNA, 25 bp, Homo sapien
ttgagtttccggaggctcgagggca

SEQ ID NO: 1051774 - DNA, 25 bp, Homo sapien
ttgggttgagtttccggaggctcga

SEQ ID NO: 1051775 - DNA, 25 bp, Homo sapien
gctcgagggcagctaggatagcctc

SEQ ID NO: 1051776 - DNA, 25 bp, Homo sapien
ggcagctaggatagcctcatcaaac

SEQ ID NO: 1051777 - DNA, 25 bp, Homo sapien
aacgatctttctacagtagtgggac

SEQ ID NO: 1051778 - DNA, 25 bp, Homo sapien
gatctttctacagtagtgggacagg

SEQ ID NO: 1051779 - DNA, 25 bp, Homo sapien
tttaaacgatctttctacagtagtg

SEQ ID NO: 1051780 - DNA, 25 bp, Homo sapien
tttctacagtagtgggacaggaagc

SEQ ID NO: 1051781 - DNA, 25 bp, Homo sapien
tcaggcaactcaagcagcagaacgt

SEQ ID NO: 1051782 - DNA, 25 bp, Homo sapien
cacaaagtttcaccgcacaaaggaa

SEQ ID NO: 1051783 - DNA, 25 bp, Homo sapien
tcaaaaactaatacagaggttgctc

SEQ ID NO: 1051784 - DNA, 25 bp, Homo sapien
tctaaggtggtgagtaaaaagacgc

SEQ ID NO: 1051785 - DNA, 25 bp, Homo sapien
gagtcaaggagattcaagggagcaa

SEQ ID NO: 1051786 - DNA, 25 bp, Homo sapien
tatcccaccagttagacagagtcaa

SEQ ID NO: 1051787 - DNA, 25 bp, Homo sapien
tacgtaaaattagagccagtcagtg

SEQ ID NO: 1051788 - DNA, 25 bp, Homo sapien
gagcaaaaatgtgggtacctgatac

SEQ ID NO: 1051789 - DNA, 25 bp, Homo sapien
gaatctcaacacaataatctcactt

SEQ ID NO: 1051790 - DNA, 25 bp, Homo sapien
cattcaaacccccaagagttggcaa

SEQ ID NO: 1051791 - DNA, 25 bp, Homo sapien
acattcaaacccccaagagttggca

SEQ ID NO: 1051792 - DNA, 25 bp, Homo sapien
ggctcttcttcggttctggaggctc

SEQ ID NO: 1051793 - DNA, 25 bp, Homo sapien
ctgcggctcttcttcggttctggag

SEQ ID NO: 1051794 - DNA, 25 bp, Homo sapien
ttgcttcgtcaaatacattctttag

SEQ ID NO: 1051795 - DNA, 25 bp, Homo sapien
agggcagccaatattgcttcgtcaa

SEQ ID NO: 1051796 - DNA, 25 bp, Homo sapien
cattgcttttagtatgatgccgaca

SEQ ID NO: 1051797 - DNA, 25 bp, Homo sapien
aaacattgcttttagtatgatgccg

SEQ ID NO: 1051798 - DNA, 25 bp, Homo sapien
ttaaacattgcttttagtatgatgc

SEQ ID NO: 1051799 - DNA, 25 bp, Homo sapien
acattgcttttagtatgatgccgac

SEQ ID NO: 1051800 - DNA, 25 bp, Homo sapien
cattattgcaaaaacgaattttaat

SEQ ID NO: 1051801 - DNA, 25 bp, Homo sapien
tatactccttcctaagagcaccaga

SEQ ID NO: 1051802 - DNA, 25 bp, Homo sapien
agatgtcccagattactctccagag

SEQ ID NO: 1051803 - DNA, 25 bp, Homo sapien
gaatgtggaatcaatccgtcctcct

SEQ ID NO: 1051804 - DNA, 25 bp, Homo sapien
tctccagagtggaaccagggagcag

SEQ ID NO: 1051805 - DNA, 25 bp, Homo sapien
ctggtccccatgttgttaagtgttc

SEQ ID NO: 1051806 - DNA, 25 bp, Homo sapien
tagcaccacccctcgtatttcctct

SEQ ID NO: 1051807 - DNA, 25 bp, Homo sapien
tgctctagggttcctcatatgcaaa

SEQ ID NO: 1051808 - DNA, 25 bp, Homo sapien
catgttgttaagtgttctccccacc

SEQ ID NO: 1051809 - DNA, 25 bp, Homo sapien
attgagacatgagaaagcattggtt

SEQ ID NO: 1051810 - DNA, 25 bp, Homo sapien
ttgagacatgagaaagcattggttc

SEQ ID NO: 1051811 - DNA, 25 bp, Homo sapien
aattgagacatgagaaagcattggt

SEQ ID NO: 1051812 - DNA, 25 bp, Homo sapien
gtttttgtttgtttaatacatctga

SEQ ID NO: 1051813 - DNA, 25 bp, Homo sapien
ttttgtttgtttaatacatctgaaa

SEQ ID NO: 1051814 - DNA, 25 bp, Homo sapien
tgtttgtttaatacatctgaaaaga

SEQ ID NO: 1051815 - DNA, 25 bp, Homo sapien
ttgtttgtttaatacatctgaaaag

SEQ ID NO: 1051816 - DNA, 25 bp, Homo sapien
gaggaagcccctcactgatacagca

SEQ ID NO: 1051817 - DNA, 25 bp, Homo sapien
tatcacgctatatgtaccagggttc

SEQ ID NO: 1051818 - DNA, 25 bp, Homo sapien
tacagcagtttaagacccagaagtc

SEQ ID NO: 1051819 - DNA, 25 bp, Homo sapien
ccagggttcacggagttttctagca

SEQ ID NO: 1051820 - DNA, 25 bp, Homo sapien
tggctggcgtggcagaagaacttca

SEQ ID NO: 1051821 - DNA, 25 bp, Homo sapien
caggcctgtcagattggctgtcagg

SEQ ID NO: 1051822 - DNA, 25 bp, Homo sapien
gctccaggcctgtcagattggctgt

SEQ ID NO: 1051823 - DNA, 25 bp, Homo sapien
ccctggctggcgtggcagaagaact

SEQ ID NO: 1051824 - DNA, 25 bp, Homo sapien
gaacagttgcctccttgaagcttct

SEQ ID NO: 1051825 - DNA, 25 bp, Homo sapien
caacaatggactttgtagcgacatc

SEQ ID NO: 1051826 - DNA, 25 bp, Homo sapien
ttcttaagtcctcacaggcctcctg

SEQ ID NO: 1051827 - DNA, 25 bp, Homo sapien
gcctcctgccagatataagggtcaa

SEQ ID NO: 1051828 - DNA, 25 bp, Homo sapien
gaagagctgacagtgcccgacagag

SEQ ID NO: 1051829 - DNA, 25 bp, Homo sapien
cagtgcccgacagagcacactctgg

SEQ ID NO: 1051830 - DNA, 25 bp, Homo sapien
cttctctaggttaagaggaggaccg

SEQ ID NO: 1051831 - DNA, 25 bp, Homo sapien
ggtccgccaagaacaacaccaataa

SEQ ID NO: 1051832 - DNA, 25 bp, Homo sapien
agcagcgactgaggtgagggtgtct

SEQ ID NO: 1051833 - DNA, 25 bp, Homo sapien
gagcagcgactgaggtgagggtgtc

SEQ ID NO: 1051834 - DNA, 25 bp, Homo sapien
gcagcgactgaggtgagggtgtctg

SEQ ID NO: 1051835 - DNA, 25 bp, Homo sapien
agagccgtgaaaatgcagtgacaaa

SEQ ID NO: 1051836 - DNA, 25 bp, Homo sapien
taggagagccgtgaaaatgcagtga

SEQ ID NO: 1051837 - DNA, 25 bp, Homo sapien
ggagagccgtgaaaatgcagtgaca

SEQ ID NO: 1051838 - DNA, 25 bp, Homo sapien
ctaggagagccgtgaaaatgcagtg

SEQ ID NO: 1051839 - DNA, 25 bp, Homo sapien
gacctggtgtacttggagcctagcc

SEQ ID NO: 1051840 - DNA, 25 bp, Homo sapien
acatgcaacaagacgtccaaggcca

SEQ ID NO: 1051841 - DNA, 25 bp, Homo sapien
ggtgctgcttcgtcaagtgccggca

SEQ ID NO: 1051842 - DNA, 25 bp, Homo sapien
tagccccgacttctgtgagcaggac

SEQ ID NO: 1051843 - DNA, 25 bp, Homo sapien
gccattgaggagtgccagtaccagt

SEQ ID NO: 1051844 - DNA, 25 bp, Homo sapien
ctggaagtcatggactcggtgcgcc

SEQ ID NO: 1051845 - DNA, 25 bp, Homo sapien
gagacgtgcgagaaactcaagggcc

SEQ ID NO: 1051846 - DNA, 25 bp, Homo sapien
caggtgcagatgtgcaagcggaacc

SEQ ID NO: 1051847 - DNA, 25 bp, Homo sapien
aaaggaggaataagccagagcagaa

SEQ ID NO: 1051848 - DNA, 25 bp, Homo sapien
agaagacttgcctcctagctgagtg

SEQ ID NO: 1051849 - DNA, 25 bp, Homo sapien
cagtggcttgatcaagacacaggtt

SEQ ID NO: 1051850 - DNA, 25 bp, Homo sapien
cagcagagaacacaaatcagtggct

SEQ ID NO: 1051851 - DNA, 25 bp, Homo sapien
tgagggcctgacaactggcacccag

SEQ ID NO: 1051852 - DNA, 25 bp, Homo sapien
caactggcacccagcgaccagcctg

SEQ ID NO: 1051853 - DNA, 25 bp, Homo sapien
aactggcacccagcgaccagcctgg

SEQ ID NO: 1051854 - DNA, 25 bp, Homo sapien
gggcctgacaactggcacccagcga

SEQ ID NO: 1051855 - DNA, 25 bp, Homo sapien
caagccactgtcacttctggtgcct

SEQ ID NO: 1051856 - DNA, 25 bp, Homo sapien
tacagggcctgaccgatcacctggg

SEQ ID NO: 1051857 - DNA, 25 bp, Homo sapien
ctacagggcctgaccgatcacctgg

SEQ ID NO: 1051858 - DNA, 25 bp, Homo sapien
gccactgtcacttctggtgcctgca

SEQ ID NO: 1051859 - DNA, 25 bp, Homo sapien
tgtcagggcccatgctggatactgg

SEQ ID NO: 1051860 - DNA, 25 bp, Homo sapien
tcaatagccatatacgagggcctcc

SEQ ID NO: 1051861 - DNA, 25 bp, Homo sapien
tcaaccagttgggactcagtggaag

SEQ ID NO: 1051862 - DNA, 25 bp, Homo sapien
cctggtgatacggaagctgcagtcc

SEQ ID NO: 1051863 - DNA, 25 bp, Homo sapien
tctggctcatggttaccctggtcac

SEQ ID NO: 1051864 - DNA, 25 bp, Homo sapien
ggctcatggttaccctggtcaccat

SEQ ID NO: 1051865 - DNA, 25 bp, Homo sapien
cctctctggctcatggttaccctgg

SEQ ID NO: 1051866 - DNA, 25 bp, Homo sapien
tacctctctggctcatggttaccct

SEQ ID NO: 1051867 - DNA, 25 bp, Homo sapien
aaggcgtacaggaaaccttggcaga

SEQ ID NO: 1051868 - DNA, 25 bp, Homo sapien
cagcaaagggctgtcttttctcacc

SEQ ID NO: 1051869 - DNA, 25 bp, Homo sapien
ccttggcagagcttcgccaaaagga

SEQ ID NO: 1051870 - DNA, 25 bp, Homo sapien
gaatgttgtccttcagctccactcc

SEQ ID NO: 1051871 - DNA, 25 bp, Homo sapien
taaacaaggacctaccagggtgatg

SEQ ID NO: 1051872 - DNA, 25 bp, Homo sapien
tattgagctcctacactaggtcaga

SEQ ID NO: 1051873 - DNA, 25 bp, Homo sapien
cagtgaagaaccagacaggccctgc

SEQ ID NO: 1051874 - DNA, 25 bp, Homo sapien
catacgtcattcatggccgggtgcg

SEQ ID NO: 1051875 - DNA, 25 bp, Homo sapien
aaatctgtgggttctcaggcccagg

SEQ ID NO: 1051876 - DNA, 25 bp, Homo sapien
tgagctttcaccaaaccaatgtcga

SEQ ID NO: 1051877 - DNA, 25 bp, Homo sapien
tagagggacagtgacgttctgccca

SEQ ID NO: 1051878 - DNA, 25 bp, Homo sapien
ccaatgtcgatgagccctaggatcc

SEQ ID NO: 1051879 - DNA, 25 bp, Homo sapien
tccaaagccaatggacaagccacct

SEQ ID NO: 1051880 - DNA, 25 bp, Homo sapien
tttccaaagccaatggacaagccac

SEQ ID NO: 1051881 - DNA, 25 bp, Homo sapien
aaagccaatggacaagccacctggc

SEQ ID NO: 1051882 - DNA, 25 bp, Homo sapien
ccaaagccaatggacaagccacctg

SEQ ID NO: 1051883 - DNA, 25 bp, Homo sapien
tttggagcttgcaaacacggcggcc

SEQ ID NO: 1051884 - DNA, 25 bp, Homo sapien
gaccgaatctgtgttgctccctggc

SEQ ID NO: 1051885 - DNA, 25 bp, Homo sapien
cgtggccttttcatcctcggtggga

SEQ ID NO: 1051886 - DNA, 25 bp, Homo sapien
caggcgaattcctcccggatcagga

SEQ ID NO: 1051887 - DNA, 25 bp, Homo sapien
agccagggcctaagaggctctctga

SEQ ID NO: 1051888 - DNA, 25 bp, Homo sapien
cacagagcctctgtgggtggctttg

SEQ ID NO: 1051889 - DNA, 25 bp, Homo sapien
tctctgacctcgacgcgggactgtg

SEQ ID NO: 1051890 - DNA, 25 bp, Homo sapien
ggtggctttggacccatttccgctg

SEQ ID NO: 1051891 - DNA, 25 bp, Homo sapien
tcagacccagtaagcgtctggttca

SEQ ID NO: 1051892 - DNA, 25 bp, Homo sapien
agtaagcgtctggttcaggcaccca

SEQ ID NO: 1051893 - DNA, 25 bp, Homo sapien
taagcgtctggttcaggcacccagg

SEQ ID NO: 1051894 - DNA, 25 bp, Homo sapien
cccagtaagcgtctggttcaggcac

SEQ ID NO: 1051895 - DNA, 25 bp, Homo sapien
caaacaaggcttagccagtcatccg

SEQ ID NO: 1051896 - DNA, 25 bp, Homo sapien
ccacctccctgagcatggatccatg

SEQ ID NO: 1051897 - DNA, 25 bp, Homo sapien
tcatttgaacatggatccacctccc

SEQ ID NO: 1051898 - DNA, 25 bp, Homo sapien
cgcaggagcatgcttcaattcttca

SEQ ID NO: 1051899 - DNA, 25 bp, Homo sapien
caggaaggctgggtcaagggtttgg

SEQ ID NO: 1051900 - DNA, 25 bp, Homo sapien
caatcaggaagacccaggaaggctg

SEQ ID NO: 1051901 - DNA, 25 bp, Homo sapien
tcaatcaggaagacccaggaaggct

SEQ ID NO: 1051902 - DNA, 25 bp, Homo sapien
aagacccaggaaggctgggtcaagg

SEQ ID NO: 1051903 - DNA, 25 bp, Homo sapien
ggctggagtacagttgtgaaatcac

SEQ ID NO: 1051904 - DNA, 25 bp, Homo sapien
ggagtacagttgtgaaatcacagct

SEQ ID NO: 1051905 - DNA, 25 bp, Homo sapien
gagtacaggcgcctaccaccacccc

SEQ ID NO: 1051906 - DNA, 25 bp, Homo sapien
caggcgcctaccaccacccccagtt

SEQ ID NO: 1051907 - DNA, 25 bp, Homo sapien
tcagagggcagcaacgtccagggcc

SEQ ID NO: 1051908 - DNA, 25 bp, Homo sapien
gcccaaattgcccaagttctgcagt

SEQ ID NO: 1051909 - DNA, 25 bp, Homo sapien
cccaagttctgcagtttgcaggaga

SEQ ID NO: 1051910 - DNA, 25 bp, Homo sapien
gagagagaactgatggcttccaggt

SEQ ID NO: 1051911 - DNA, 25 bp, Homo sapien
cctcttcatcagcatccggaacgga

SEQ ID NO: 1051912 - DNA, 25 bp, Homo sapien
ttcctcttcatcagcatccggaacg

SEQ ID NO: 1051913 - DNA, 25 bp, Homo sapien
tcttcatcagcatccggaacggaca

SEQ ID NO: 1051914 - DNA, 25 bp, Homo sapien
cttcatcagcatccggaacggacat

SEQ ID NO: 1051915 - DNA, 25 bp, Homo sapien
acttcctgcgcgctgggtcaatatt

SEQ ID NO: 1051916 - DNA, 25 bp, Homo sapien
gagctcatcactcagcgagctgtct

SEQ ID NO: 1051917 - DNA, 25 bp, Homo sapien
gtgatttccactgtgcagcccgcct

SEQ ID NO: 1051918 - DNA, 25 bp, Homo sapien
ttggctccgagctcatcactcagcg

SEQ ID NO: 1051919 - DNA, 25 bp, Homo sapien
atgaggaaatcggtaaagggctgta

SEQ ID NO: 1051920 - DNA, 25 bp, Homo sapien
gaaatcggtaaagggctgtatcttc

SEQ ID NO: 1051921 - DNA, 25 bp, Homo sapien
atcggtaaagggctgtatcttcatg

SEQ ID NO: 1051922 - DNA, 25 bp, Homo sapien
aagtcagttttcaccctggcacaaa

SEQ ID NO: 1051923 - DNA, 25 bp, Homo sapien
atgtttttcaagcagcccacgtggg

SEQ ID NO: 1051924 - DNA, 25 bp, Homo sapien
cacggtgtccttagaatgggccaaa

SEQ ID NO: 1051925 - DNA, 25 bp, Homo sapien
tctgagagggcatcactgggactat

SEQ ID NO: 1051926 - DNA, 25 bp, Homo sapien
gcatttcatgcaggcctcacggtgt

SEQ ID NO: 1051927 - DNA, 25 bp, Homo sapien
tggctttttcgagctgggaattatc

SEQ ID NO: 1051928 - DNA, 25 bp, Homo sapien
gaattatcccacagaggagcgttgt

SEQ ID NO: 1051929 - DNA, 25 bp, Homo sapien
tctcacagaaatgtcgagtggcttt

SEQ ID NO: 1051930 - DNA, 25 bp, Homo sapien
tttcgagctgggaattatcccacag

SEQ ID NO: 1051931 - DNA, 25 bp, Homo sapien
aatgcctgtgtaaaaggtccatctt

SEQ ID NO: 1051932 - DNA, 25 bp, Homo sapien
ggcagaacagaatctcgctgcccag

SEQ ID NO: 1051933 - DNA, 25 bp, Homo sapien
agctgggcccaacaaagccctcagt

SEQ ID NO: 1051934 - DNA, 25 bp, Homo sapien
cctgtgtaaaaggtccatcttgcag

SEQ ID NO: 1051935 - DNA, 25 bp, Homo sapien
taatattcatagtatcacagcagca

SEQ ID NO: 1051936 - DNA, 25 bp, Homo sapien
ccagcaagaaggaagatacaatctc

SEQ ID NO: 1051937 - DNA, 25 bp, Homo sapien
tcccatcgtgcaggaaattacaagc

SEQ ID NO: 1051938 - DNA, 25 bp, Homo sapien
tctcaccaaacgtcatcccagaagt

SEQ ID NO: 1051939 - DNA, 25 bp, Homo sapien
tcttttgcaaggattagggtcaaca

SEQ ID NO: 1051940 - DNA, 25 bp, Homo sapien
acatggcaacagagggccacgcact

SEQ ID NO: 1051941 - DNA, 25 bp, Homo sapien
tctttccttgctcaggaaaaaagca

SEQ ID NO: 1051942 - DNA, 25 bp, Homo sapien
gcccttaattcggtgatgccagagt

SEQ ID NO: 1051943 - DNA, 25 bp, Homo sapien
tggagaatggattgggtcaccagtc

SEQ ID NO: 1051944 - DNA, 25 bp, Homo sapien
tcacctataatcactacaacaaatg

SEQ ID NO: 1051945 - DNA, 25 bp, Homo sapien
caagtacattaagaaaacagagggc

SEQ ID NO: 1051946 - DNA, 25 bp, Homo sapien
ggaggagagcattccggcggtgtgg

SEQ ID NO: 1051947 - DNA, 25 bp, Homo sapien
caccccacgcaggttacagcgtgta

SEQ ID NO: 1051948 - DNA, 25 bp, Homo sapien
cacgcaggttacagcgtgtactcat

SEQ ID NO: 1051949 - DNA, 25 bp, Homo sapien
agccaccccacgcaggttacagcgt

SEQ ID NO: 1051950 - DNA, 25 bp, Homo sapien
ccccacgcaggttacagcgtgtact

SEQ ID NO: 1051951 - DNA, 25 bp, Homo sapien
gcgatgcagcgaagctggatggagc

SEQ ID NO: 1051952 - DNA, 25 bp, Homo sapien
catttcaaggcccatagcgatgcag

SEQ ID NO: 1051953 - DNA, 25 bp, Homo sapien
ttcaaggcccatagcgatgcagcga

SEQ ID NO: 1051954 - DNA, 25 bp, Homo sapien
gggtggacggaacggatgcaccagg

SEQ ID NO: 1051955 - DNA, 25 bp, Homo sapien
ttcccgctgtgttcgagaaatgtcg

SEQ ID NO: 1051956 - DNA, 25 bp, Homo sapien
tacaaaatgaacagactggcctctc

SEQ ID NO: 1051957 - DNA, 25 bp, Homo sapien
gcatagggtaggttgcttaacctcc

SEQ ID NO: 1051958 - DNA, 25 bp, Homo sapien
aaatgccttggttttagatccctgc

SEQ ID NO: 1051959 - DNA, 25 bp, Homo sapien
tctatacccagaatgcgaggcgtcc

SEQ ID NO: 1051960 - DNA, 25 bp, Homo sapien
gagacacagggttgaaatccaggac

SEQ ID NO: 1051961 - DNA, 25 bp, Homo sapien
cattaggactgccacttagggtgaa

SEQ ID NO: 1051962 - DNA, 25 bp, Homo sapien
ggacccagcaaggagcattaggact

SEQ ID NO: 1051963 - DNA, 25 bp, Homo sapien
cacagtgactgatgacggtgatgct

SEQ ID NO: 1051964 - DNA, 25 bp, Homo sapien
gagattccttcacgatcccagtggc

SEQ ID NO: 1051965 - DNA, 25 bp, Homo sapien
gccaggcactgcgattgactctaat

SEQ ID NO: 1051966 - DNA, 25 bp, Homo sapien
cacggtggccctggaatttagctca

SEQ ID NO: 1051967 - DNA, 25 bp, Homo sapien
gagccacagggtctgtgagaacttg

SEQ ID NO: 1051968 - DNA, 25 bp, Homo sapien
gaatccattggaagcggttgggagc

SEQ ID NO: 1051969 - DNA, 25 bp, Homo sapien
cggttgggagccacagggtctgtga

SEQ ID NO: 1051970 - DNA, 25 bp, Homo sapien
ccattggaagcggttgggagccaca

SEQ ID NO: 1051971 - DNA, 25 bp, Homo sapien
caacattggcctgcttgtggagatg

SEQ ID NO: 1051972 - DNA, 25 bp, Homo sapien
ctgcacacccgcttggtggctgtgt

SEQ ID NO: 1051973 - DNA, 25 bp, Homo sapien
tgcctgtgtgacaacattggcctgc

SEQ ID NO: 1051974 - DNA, 25 bp, Homo sapien
tggtggctgtgttggagatctgcct

SEQ ID NO: 1051975 - DNA, 25 bp, Homo sapien
ggcacaccctccagggctcatctca

SEQ ID NO: 1051976 - DNA, 25 bp, Homo sapien
tccagggctcatctcaagcttcctg

SEQ ID NO: 1051977 - DNA, 25 bp, Homo sapien
cagccccacggatgcgacttgtgtg

SEQ ID NO: 1051978 - DNA, 25 bp, Homo sapien
tagggtaaccgaggtcactaggcag

SEQ ID NO: 1051979 - DNA, 25 bp, Homo sapien
ctgaagcgtcagggatggaatggca

SEQ ID NO: 1051980 - DNA, 25 bp, Homo sapien
gaagcgtcagggatggaatggcagg

SEQ ID NO: 1051981 - DNA, 25 bp, Homo sapien
cagggatggaatggcaggggttacc

SEQ ID NO: 1051982 - DNA, 25 bp, Homo sapien
gtcagggatggaatggcaggggtta

SEQ ID NO: 1051983 - DNA, 25 bp, Homo sapien
cctctctgttggagtgggcacaatt

SEQ ID NO: 1051984 - DNA, 25 bp, Homo sapien
ggtacctctctgttggagtgggcac

SEQ ID NO: 1051985 - DNA, 25 bp, Homo sapien
aagttggggtcagtaagagaaaatg

SEQ ID NO: 1051986 - DNA, 25 bp, Homo sapien
cctgtgtggtacctctctgttggag

SEQ ID NO: 1051987 - DNA, 25 bp, Homo sapien
ctaaagcatattgtcttgcagcctt

SEQ ID NO: 1051988 - DNA, 25 bp, Homo sapien
ctttccacctccaagaaaagtccag

SEQ ID NO: 1051989 - DNA, 25 bp, Homo sapien
aagaaaagtccaggaggcttattgc

SEQ ID NO: 1051990 - DNA, 25 bp, Homo sapien
tattgtcttgcagcctttccacctc

SEQ ID NO: 1051991 - DNA, 25 bp, Homo sapien
tgccagcttccactgtgcctgggtc

SEQ ID NO: 1051992 - DNA, 25 bp, Homo sapien
ctgccagcttccactgtgcctgggt

SEQ ID NO: 1051993 - DNA, 25 bp, Homo sapien
tctgccagcttccactgtgcctggg

SEQ ID NO: 1051994 - DNA, 25 bp, Homo sapien
ctctgccagcttccactgtgcctgg

SEQ ID NO: 1051995 - DNA, 25 bp, Homo sapien
acctggcctcccatgttcagcttgg

SEQ ID NO: 1051996 - DNA, 25 bp, Homo sapien
tggcctcccatgttcagcttggcct

SEQ ID NO: 1051997 - DNA, 25 bp, Homo sapien
cctggcctcccatgttcagcttggc

SEQ ID NO: 1051998 - DNA, 25 bp, Homo sapien
gcctcccatgttcagcttggcctgg

SEQ ID NO: 1051999 - DNA, 25 bp, Homo sapien
tccttgagggtagacccatagcttg

SEQ ID NO: 1052000 - DNA, 25 bp, Homo sapien
gtccttttgacggtcagttccttga

SEQ ID NO: 1052001 - DNA, 25 bp, Homo sapien
tagacccatagcttgctcttcttgg

SEQ ID NO: 1052002 - DNA, 25 bp, Homo sapien
tgacggtcagttccttgagggtaga

SEQ ID NO: 1052003 - DNA, 25 bp, Homo sapien
gcagaacctcaggctcattagtggt

SEQ ID NO: 1052004 - DNA, 25 bp, Homo sapien
ggcaccgcgcggctgtcatctgcct

SEQ ID NO: 1052005 - DNA, 25 bp, Homo sapien
taacacttgtgcaggggcaccgcgc

SEQ ID NO: 1052006 - DNA, 25 bp, Homo sapien
gaacctcaggctcattagtggtttc

SEQ ID NO: 1052007 - DNA, 25 bp, Homo sapien
ggaggagaggcggttgctcttccaa

SEQ ID NO: 1052008 - DNA, 25 bp, Homo sapien
gagaggcggttgctcttccaagccc

SEQ ID NO: 1052009 - DNA, 25 bp, Homo sapien
aggcggttgctcttccaagcccagg

SEQ ID NO: 1052010 - DNA, 25 bp, Homo sapien
aggagaggcggttgctcttccaagc

SEQ ID NO: 1052011 - DNA, 25 bp, Homo sapien
agcccatttttagctgaccatctcc

SEQ ID NO: 1052012 - DNA, 25 bp, Homo sapien
aagatatttacatctgatgccctca

SEQ ID NO: 1052013 - DNA, 25 bp, Homo sapien
agagcccatttttagctgaccatct

SEQ ID NO: 1052014 - DNA, 25 bp, Homo sapien
gatatttacatctgatgccctcaga

SEQ ID NO: 1052015 - DNA, 25 bp, Homo sapien
ccaggttcggttctccaatggtggg

SEQ ID NO: 1052016 - DNA, 25 bp, Homo sapien
gcttttattcgggtgactttcagag

SEQ ID NO: 1052017 - DNA, 25 bp, Homo sapien
caggttcggttctccaatggtgggt

SEQ ID NO: 1052018 - DNA, 25 bp, Homo sapien
cttcagccagcacaccagcttttat

SEQ ID NO: 1052019 - DNA, 25 bp, Homo sapien
tgccccctttaaattcacttccatc

SEQ ID NO: 1052020 - DNA, 25 bp, Homo sapien
catgccccctttaaattcacttcca

SEQ ID NO: 1052021 - DNA, 25 bp, Homo sapien
atgccccctttaaattcacttccat

SEQ ID NO: 1052022 - DNA, 25 bp, Homo sapien
ttctttattgacagcgccatagagg

SEQ ID NO: 1052023 - DNA, 25 bp, Homo sapien
gccatagaggacacgaacactcctg

SEQ ID NO: 1052024 - DNA, 25 bp, Homo sapien
cactcctgcccgaagggaacaataa

SEQ ID NO: 1052025 - DNA, 25 bp, Homo sapien
tgttcagcaccgattcaaactgccg

SEQ ID NO: 1052026 - DNA, 25 bp, Homo sapien
gaaccgacgagaggaatagctgaat

SEQ ID NO: 1052027 - DNA, 25 bp, Homo sapien
taaagcgtcgtcataaagtagaaca

SEQ ID NO: 1052028 - DNA, 25 bp, Homo sapien
tctgtcaactaaagtgctctcggtg

SEQ ID NO: 1052029 - DNA, 25 bp, Homo sapien
cactggctgcatggtaccaacgcta

SEQ ID NO: 1052030 - DNA, 25 bp, Homo sapien
tatccttcaaagctagtgttagcac

SEQ ID NO: 1052031 - DNA, 25 bp, Homo sapien
ccttcaaagctagtgttagcacctg

SEQ ID NO: 1052032 - DNA, 25 bp, Homo sapien
agctagtgttagcacctgctcttta

SEQ ID NO: 1052033 - DNA, 25 bp, Homo sapien
tcaaagctagtgttagcacctgctc

SEQ ID NO: 1052034 - DNA, 25 bp, Homo sapien
gccacacttgggttatactcagtct

SEQ ID NO: 1052035 - DNA, 25 bp, Homo sapien
cagttcaaagcatcattgcagacag

SEQ ID NO: 1052036 - DNA, 25 bp, Homo sapien
aagcatcattgcagacagatagtcc

SEQ ID NO: 1052037 - DNA, 25 bp, Homo sapien
ttgccaaagtgtggctcgttttccg

SEQ ID NO: 1052038 - DNA, 25 bp, Homo sapien
gacttctcataacaagacggctggg

SEQ ID NO: 1052039 - DNA, 25 bp, Homo sapien
gaatgagactaagccaggaaagaga

SEQ ID NO: 1052040 - DNA, 25 bp, Homo sapien
caaaggactttgaaatcacctggcc

SEQ ID NO: 1052041 - DNA, 25 bp, Homo sapien
gagtcaatacacataaacagcagtt

SEQ ID NO: 1052042 - DNA, 25 bp, Homo sapien
gcctacgtggtgtgtggtatcccag

SEQ ID NO: 1052043 - DNA, 25 bp, Homo sapien
tcaggtgtcatgtgttcagcatccc

SEQ ID NO: 1052044 - DNA, 25 bp, Homo sapien
gcatccccataaccctacagtggaa

SEQ ID NO: 1052045 - DNA, 25 bp, Homo sapien
gagtgggttacagttcccagccagc

SEQ ID NO: 1052046 - DNA, 25 bp, Homo sapien
gaaataacaggcactctcaacataa

SEQ ID NO: 1052047 - DNA, 25 bp, Homo sapien
ggaccttggagagccctattcattg

SEQ ID NO: 1052048 - DNA, 25 bp, Homo sapien
tgttctcttgtaccgagggcctgaa

SEQ ID NO: 1052049 - DNA, 25 bp, Homo sapien
ttagcagctcacaaacaaccagagt

SEQ ID NO: 1052050 - DNA, 25 bp, Homo sapien
cgtcaactctgccccaagaactgct

SEQ ID NO: 1052051 - DNA, 25 bp, Homo sapien
tagagttggctttgggaggacaggc

SEQ ID NO: 1052052 - DNA, 25 bp, Homo sapien
tgcgtcaactctgccccaagaactg

SEQ ID NO: 1052053 - DNA, 25 bp, Homo sapien
caactctgccccaagaactgctctt

SEQ ID NO: 1052054 - DNA, 25 bp, Homo sapien
ttttgaacaggaggctggcagcagc

SEQ ID NO: 1052055 - DNA, 25 bp, Homo sapien
cacaggtagtttgcccgtgtacatc

SEQ ID NO: 1052056 - DNA, 25 bp, Homo sapien
gcagccaggacaagcttgtgagccc

SEQ ID NO: 1052057 - DNA, 25 bp, Homo sapien
gatggtatctgtgttatccagcagg

SEQ ID NO: 1052058 - DNA, 25 bp, Homo sapien
tgaggatggcgcagagacatccctt

SEQ ID NO: 1052059 - DNA, 25 bp, Homo sapien
ctgaggatggcgcagagacatccct

SEQ ID NO: 1052060 - DNA, 25 bp, Homo sapien
gaggatggcgcagagacatccctta

SEQ ID NO: 1052061 - DNA, 25 bp, Homo sapien
aggatggcgcagagacatcccttac

SEQ ID NO: 1052062 - DNA, 25 bp, Homo sapien
aaaggatttctacttgaggcttctc

SEQ ID NO: 1052063 - DNA, 25 bp, Homo sapien
tctacttgaggcttctctggttcct

SEQ ID NO: 1052064 - DNA, 25 bp, Homo sapien
tgaaaggatttctacttgaggcttc

SEQ ID NO: 1052065 - DNA, 25 bp, Homo sapien
gatttctacttgaggcttctctggt

SEQ ID NO: 1052066 - DNA, 25 bp, Homo sapien
cttctttgcctcactaaaggtttgc

SEQ ID NO: 1052067 - DNA, 25 bp, Homo sapien
ttgcctcactaaaggtttgcacagc

SEQ ID NO: 1052068 - DNA, 25 bp, Homo sapien
gggaacaagcttcagctgtagtagg

SEQ ID NO: 1052069 - DNA, 25 bp, Homo sapien
cagctgtagtaggagtctccgctgg

SEQ ID NO: 1052070 - DNA, 25 bp, Homo sapien
cctgggtaaccatgagtgcatctga

SEQ ID NO: 1052071 - DNA, 25 bp, Homo sapien
catcctgggtaaccatgagtgcatc

SEQ ID NO: 1052072 - DNA, 25 bp, Homo sapien
tttaaaacatcctgggtaaccatga

SEQ ID NO: 1052073 - DNA, 25 bp, Homo sapien
gaagaaaattcagctggtagtgttt

SEQ ID NO: 1052074 - DNA, 25 bp, Homo sapien
ttctgtggacctttaatttctgaac

SEQ ID NO: 1052075 - DNA, 25 bp, Homo sapien
cagtagattgcacacagaaggcgct

SEQ ID NO: 1052076 - DNA, 25 bp, Homo sapien
gaaagggccccacaattcagctggt

SEQ ID NO: 1052077 - DNA, 25 bp, Homo sapien
tacgtgaatgggtttacagcgtccc

SEQ ID NO: 1052078 - DNA, 25 bp, Homo sapien
tgttaatggacacgtgatgccagct

SEQ ID NO: 1052079 - DNA, 25 bp, Homo sapien
catgttaataaggtcacagaagtaa

SEQ ID NO: 1052080 - DNA, 25 bp, Homo sapien
aacagaactccaaaagctgaaccaa

SEQ ID NO: 1052081 - DNA, 25 bp, Homo sapien
gatattaggataggcagggattcat

SEQ ID NO: 1052082 - DNA, 25 bp, Homo sapien
cagtttctctgcctaaacagaaggg

SEQ ID NO: 1052083 - DNA, 25 bp, Homo sapien
tccagaggtctcaggggcgcatata

SEQ ID NO: 1052084 - DNA, 25 bp, Homo sapien
tctcaggggcgcatataaaaccaaa

SEQ ID NO: 1052085 - DNA, 25 bp, Homo sapien
gaggtctcaggggcgcatataaaac

SEQ ID NO: 1052086 - DNA, 25 bp, Homo sapien
ccagaggtctcaggggcgcatataa

SEQ ID NO: 1052087 - DNA, 25 bp, Homo sapien
tcaccctcgaaacatttcactatca

SEQ ID NO: 1052088 - DNA, 25 bp, Homo sapien
acccaggattctctggaatgctgaa

SEQ ID NO: 1052089 - DNA, 25 bp, Homo sapien
tcctctcttactttacccaggattc

SEQ ID NO: 1052090 - DNA, 25 bp, Homo sapien
tcttactttacccaggattctctgg

SEQ ID NO: 1052091 - DNA, 25 bp, Homo sapien
agaatattggtacagcctcaacagg

SEQ ID NO: 1052092 - DNA, 25 bp, Homo sapien
ggattagaatattggtacagcctca

SEQ ID NO: 1052093 - DNA, 25 bp, Homo sapien
gcttcctgtctaatagtgctgtttt

SEQ ID NO: 1052094 - DNA, 25 bp, Homo sapien
ctggcttcctgtctaatagtgctgt

SEQ ID NO: 1052095 - DNA, 25 bp, Homo sapien
ctgtgggatagaaatggagactcaa

SEQ ID NO: 1052096 - DNA, 25 bp, Homo sapien
aacatgtcattggaacaaacttcat

SEQ ID NO: 1052097 - DNA, 25 bp, Homo sapien
gaatttacatgtgaaacttatgtga

SEQ ID NO: 1052098 - DNA, 25 bp, Homo sapien
cattccaatgcataggatcttctcc

SEQ ID NO: 1052099 - DNA, 25 bp, Homo sapien
tgtcagcgaaccagtccaacctggg

SEQ ID NO: 1052100 - DNA, 25 bp, Homo sapien
gctttgtacctaacccaaatgagag

SEQ ID NO: 1052101 - DNA, 25 bp, Homo sapien
tattctccaacttcaaggtgtcaga

SEQ ID NO: 1052102 - DNA, 25 bp, Homo sapien
tttgacgggcaggagaacattgatg

SEQ ID NO: 1052103 - DNA, 25 bp, Homo sapien
acagcatggtttgtcaagagagatc

SEQ ID NO: 1052104 - DNA, 25 bp, Homo sapien
cacacaagagaagctagtcaatttg

SEQ ID NO: 1052105 - DNA, 25 bp, Homo sapien
aatgcagaatcgcttttacagagga

SEQ ID NO: 1052106 - DNA, 25 bp, Homo sapien
cagaatagtaaagtgattttcagct

SEQ ID NO: 1052107 - DNA, 25 bp, Homo sapien
ctccataataggtctcagctgtgtt

SEQ ID NO: 1052108 - DNA, 25 bp, Homo sapien
actccataataggtctcagctgtgt

SEQ ID NO: 1052109 - DNA, 25 bp, Homo sapien
ccataataggtctcagctgtgttac

SEQ ID NO: 1052110 - DNA, 25 bp, Homo sapien
tccataataggtctcagctgtgtta

SEQ ID NO: 1052111 - DNA, 25 bp, Homo sapien
taatttaagctcttctgcttcagct

SEQ ID NO: 1052112 - DNA, 25 bp, Homo sapien
aactaatttaagctcttctgcttca

SEQ ID NO: 1052113 - DNA, 25 bp, Homo sapien
ttataactaatttaagctcttctgc

SEQ ID NO: 1052114 - DNA, 25 bp, Homo sapien
tgtgatttataactaatttaagctc

SEQ ID NO: 1052115 - DNA, 25 bp, Homo sapien
attgtctccttgggtgttctgccct

SEQ ID NO: 1052116 - DNA, 25 bp, Homo sapien
tctattgtctccttgggtgttctgc

SEQ ID NO: 1052117 - DNA, 25 bp, Homo sapien
ctgtgcaacaaattttctattgtct

SEQ ID NO: 1052118 - DNA, 25 bp, Homo sapien
tctgtgcaacaaattttctattgtc

SEQ ID NO: 1052119 - DNA, 25 bp, Homo sapien
aggagttttaccaaaccctcagcag

SEQ ID NO: 1052120 - DNA, 25 bp, Homo sapien
tcagcagtcagcgtcttctcttcag

SEQ ID NO: 1052121 - DNA, 25 bp, Homo sapien
tctgcaacttctctagcagaaggcc

SEQ ID NO: 1052122 - DNA, 25 bp, Homo sapien
gcaacttctctagcagaaggcccag

SEQ ID NO: 1052123 - DNA, 25 bp, Homo sapien
tctggctttcacaggtgatcctgga

SEQ ID NO: 1052124 - DNA, 25 bp, Homo sapien
atttgcgaatatggctgacacagtg

SEQ ID NO: 1052125 - DNA, 25 bp, Homo sapien
gacacagtgctaagccttatgagca

SEQ ID NO: 1052126 - DNA, 25 bp, Homo sapien
ctttcacaggtgatcctggacagcc

SEQ ID NO: 1052127 - DNA, 25 bp, Homo sapien
gaggttttcatgatagcgtctcaat

SEQ ID NO: 1052128 - DNA, 25 bp, Homo sapien
ttgtcatgtgtgagatcatctttaa

SEQ ID NO: 1052129 - DNA, 25 bp, Homo sapien
tagcgtctcaatagctcagtcccat

SEQ ID NO: 1052130 - DNA, 25 bp, Homo sapien
ccataatcatcagggcttggttgga

SEQ ID NO: 1052131 - DNA, 25 bp, Homo sapien
ccagagtcacgtttcacaagcttct

SEQ ID NO: 1052132 - DNA, 25 bp, Homo sapien
gaaccagagtcacgtttcacaagct

SEQ ID NO: 1052133 - DNA, 25 bp, Homo sapien
accagagtcacgtttcacaagcttc

SEQ ID NO: 1052134 - DNA, 25 bp, Homo sapien
ctgaaccagagtcacgtttcacaag

SEQ ID NO: 1052135 - DNA, 25 bp, Homo sapien
gcagagagagtctgcttttctagaa

SEQ ID NO: 1052136 - DNA, 25 bp, Homo sapien
ctgtggcagagagagtctgcttttc

SEQ ID NO: 1052137 - DNA, 25 bp, Homo sapien
tggcagagagagtctgcttttctag

SEQ ID NO: 1052138 - DNA, 25 bp, Homo sapien
tgtggcagagagagtctgcttttct

SEQ ID NO: 1052139 - DNA, 25 bp, Homo sapien
ggaagaaagcatcggcaccaggctc

SEQ ID NO: 1052140 - DNA, 25 bp, Homo sapien
catgagcaggtccaatggacaggtc

SEQ ID NO: 1052141 - DNA, 25 bp, Homo sapien
tggacaggtctttgtctcctgaacc

SEQ ID NO: 1052142 - DNA, 25 bp, Homo sapien
ggctcccttcgtatttcctccatga

SEQ ID NO: 1052143 - DNA, 25 bp, Homo sapien
ctcaggattgtttctaaagtggcat

SEQ ID NO: 1052144 - DNA, 25 bp, Homo sapien
gatggcctccaagatcaactggtta

SEQ ID NO: 1052145 - DNA, 25 bp, Homo sapien
ctcctccgaggtaaagagcttgtac

SEQ ID NO: 1052146 - DNA, 25 bp, Homo sapien
gagcttgtactcaatcttctgttgg

SEQ ID NO: 1052147 - DNA, 25 bp, Homo sapien
tatcagcagaaagagtcggtacact

SEQ ID NO: 1052148 - DNA, 25 bp, Homo sapien
tattatttcaaagccgtcgtcctct

SEQ ID NO: 1052149 - DNA, 25 bp, Homo sapien
gaaaataaagctaaaccatccacag

SEQ ID NO: 1052150 - DNA, 25 bp, Homo sapien
aaaagctataggatttggtcgtcgg

SEQ ID NO: 1052151 - DNA, 25 bp, Homo sapien
ggaggtggcatatttcaatggccgg

SEQ ID NO: 1052152 - DNA, 25 bp, Homo sapien
tggcatatttcaatggccgggactg

SEQ ID NO: 1052153 - DNA, 25 bp, Homo sapien
gcatatttcaatggccgggactgat

SEQ ID NO: 1052154 - DNA, 25 bp, Homo sapien
ggtggcatatttcaatggccgggac

SEQ ID NO: 1052155 - DNA, 25 bp, Homo sapien
gcttcaaggtgaaatttattactca

SEQ ID NO: 1052156 - DNA, 25 bp, Homo sapien
tgttggcttcaaggtgaaatttatt

SEQ ID NO: 1052157 - DNA, 25 bp, Homo sapien
ttggcttcaaggtgaaatttattac

SEQ ID NO: 1052158 - DNA, 25 bp, Homo sapien
tgttgttggcttcaaggtgaaattt

SEQ ID NO: 1052159 - DNA, 25 bp, Homo sapien
catgggcctccagctgatgtttgtc

SEQ ID NO: 1052160 - DNA, 25 bp, Homo sapien
aagcttttgtcgcaggccttacaga

SEQ ID NO: 1052161 - DNA, 25 bp, Homo sapien
gcttcatgtgcacctttaggcggca

SEQ ID NO: 1052162 - DNA, 25 bp, Homo sapien
ctgtttgctcttagccacccggcag

SEQ ID NO: 1052163 - DNA, 25 bp, Homo sapien
gaaaggcctgaaatccaagctataa

SEQ ID NO: 1052164 - DNA, 25 bp, Homo sapien
caatgcaacagagtaagtggtatca

SEQ ID NO: 1052165 - DNA, 25 bp, Homo sapien
taaaatattaccctgcctctgtagg

SEQ ID NO: 1052166 - DNA, 25 bp, Homo sapien
tgtgtgctcactctgttacaggcag

SEQ ID NO: 1052167 - DNA, 25 bp, Homo sapien
tctgtcagcttatggtactgcatgc

SEQ ID NO: 1052168 - DNA, 25 bp, Homo sapien
cagtgcttgcacatgaacgggcggt

SEQ ID NO: 1052169 - DNA, 25 bp, Homo sapien
ttctcatcgaagtgctctgtcagct

SEQ ID NO: 1052170 - DNA, 25 bp, Homo sapien
gttcttcagggtggaattggctgca

SEQ ID NO: 1052171 - DNA, 25 bp, Homo sapien
cccggtgtgggtcctcacgtggcgg

SEQ ID NO: 1052172 - DNA, 25 bp, Homo sapien
cacagcatcacagtactggcatgca

SEQ ID NO: 1052173 - DNA, 25 bp, Homo sapien
cgggacagctcaatagactgggcaa

SEQ ID NO: 1052174 - DNA, 25 bp, Homo sapien
ggccattggcttgccggaagccctt

SEQ ID NO: 1052175 - DNA, 25 bp, Homo sapien
aattgacacgctttcccagtgccag

SEQ ID NO: 1052176 - DNA, 25 bp, Homo sapien
tgagattcttcctgaactaggaatg

SEQ ID NO: 1052177 - DNA, 25 bp, Homo sapien
tctgatggattgacacctctgctgc

SEQ ID NO: 1052178 - DNA, 25 bp, Homo sapien
ggactctgggttttgcagcggaaca

SEQ ID NO: 1052179 - DNA, 25 bp, Homo sapien
atggtagacattaactcagaaagtg

SEQ ID NO: 1052180 - DNA, 25 bp, Homo sapien
gatggtagacattaactcagaaagt

SEQ ID NO: 1052181 - DNA, 25 bp, Homo sapien
ggtagacattaactcagaaagtgtc

SEQ ID NO: 1052182 - DNA, 25 bp, Homo sapien
tggtagacattaactcagaaagtgt

SEQ ID NO: 1052183 - DNA, 25 bp, Homo sapien
cttctaagacactttgatgcagctt

SEQ ID NO: 1052184 - DNA, 25 bp, Homo sapien
ttccctgtggacatgagctcttgaa

SEQ ID NO: 1052185 - DNA, 25 bp, Homo sapien
acatgcagcagcattcggtatcact

SEQ ID NO: 1052186 - DNA, 25 bp, Homo sapien
tgcagcagcattcggtatcactaac

SEQ ID NO: 1052187 - DNA, 25 bp, Homo sapien
atgcagcagcattcggtatcactaa

SEQ ID NO: 1052188 - DNA, 25 bp, Homo sapien
catgcagcagcattcggtatcacta

SEQ ID NO: 1052189 - DNA, 25 bp, Homo sapien
cagagcatcactaattcctttgtca

SEQ ID NO: 1052190 - DNA, 25 bp, Homo sapien
actccccagagcatcactaattcct

SEQ ID NO: 1052191 - DNA, 25 bp, Homo sapien
cccagagcatcactaattcctttgt

SEQ ID NO: 1052192 - DNA, 25 bp, Homo sapien
tccccagagcatcactaattccttt

SEQ ID NO: 1052193 - DNA, 25 bp, Homo sapien
gcacttcttgcagtcataaggatct

SEQ ID NO: 1052194 - DNA, 25 bp, Homo sapien
ttgcagtcataaggatcttctatgt

SEQ ID NO: 1052195 - DNA, 25 bp, Homo sapien
gtggggaaactcatcctgcacttct

SEQ ID NO: 1052196 - DNA, 25 bp, Homo sapien
aactcatcctgcacttcttgcagtc

SEQ ID NO: 1052197 - DNA, 25 bp, Homo sapien
cactgaagatcttcccacacgtggg

SEQ ID NO: 1052198 - DNA, 25 bp, Homo sapien
gctgaagggcttccctccaacgtgg

SEQ ID NO: 1052199 - DNA, 25 bp, Homo sapien
ctttggagtgcacctcatggatgtg

SEQ ID NO: 1052200 - DNA, 25 bp, Homo sapien
caacgtgggtcaccacgtgccgctc

SEQ ID NO: 1052201 - DNA, 25 bp, Homo sapien
tgagcagcaaatacgtcagggtggt

SEQ ID NO: 1052202 - DNA, 25 bp, Homo sapien
tgtggtaccacaaaccagacaattg

SEQ ID NO: 1052203 - DNA, 25 bp, Homo sapien
tgtcacaggagctgcactggagtga

SEQ ID NO: 1052204 - DNA, 25 bp, Homo sapien
gcttcttgtgctcaatggtgttggg

SEQ ID NO: 1052205 - DNA, 25 bp, Homo sapien
cgctacgcttccaggtttgagaacc

SEQ ID NO: 1052206 - DNA, 25 bp, Homo sapien
gcgctacgcttccaggtttgagaac

SEQ ID NO: 1052207 - DNA, 25 bp, Homo sapien
tgcgctacgcttccaggtttgagaa

SEQ ID NO: 1052208 - DNA, 25 bp, Homo sapien
actgcgctacgcttccaggtttgag

SEQ ID NO: 1052209 - DNA, 25 bp, Homo sapien
ctgtgaagtgcataaagaaagacgt

SEQ ID NO: 1052210 - DNA, 25 bp, Homo sapien
tgtgaagtgcataaagaaagacgtg

SEQ ID NO: 1052211 - DNA, 25 bp, Homo sapien
ctgaatgctggcacttgacatgaac

SEQ ID NO: 1052212 - DNA, 25 bp, Homo sapien
tgaatgctggcacttgacatgaacc

SEQ ID NO: 1052213 - DNA, 25 bp, Homo sapien
atgctggcacttgacatgaacctgc

SEQ ID NO: 1052214 - DNA, 25 bp, Homo sapien
gaatgctggcacttgacatgaacct

SEQ ID NO: 1052215 - DNA, 25 bp, Homo sapien
aagtgctccgtggtgacatggtgct

SEQ ID NO: 1052216 - DNA, 25 bp, Homo sapien
tgactgcttgaagtgctccgtggtg

SEQ ID NO: 1052217 - DNA, 25 bp, Homo sapien
caggaaaacggaaagtagcagcaca

SEQ ID NO: 1052218 - DNA, 25 bp, Homo sapien
agcacagtacaagcaccggaatggc

SEQ ID NO: 1052219 - DNA, 25 bp, Homo sapien
ctgcgccatctgtgaggctgcggcc

SEQ ID NO: 1052220 - DNA, 25 bp, Homo sapien
gctgcggcctgggtttccgtgctca

SEQ ID NO: 1052221 - DNA, 25 bp, Homo sapien
cggcctgggtttccgtgctcatcac

SEQ ID NO: 1052222 - DNA, 25 bp, Homo sapien
tgcgccatctgtgaggctgcggcct

SEQ ID NO: 1052223 - DNA, 25 bp, Homo sapien
cattctaatgtagctgatggcccca

SEQ ID NO: 1052224 - DNA, 25 bp, Homo sapien
caaattactgacgatggatggacct

SEQ ID NO: 1052225 - DNA, 25 bp, Homo sapien
cacctttggttgatatgacagcaga

SEQ ID NO: 1052226 - DNA, 25 bp, Homo sapien
gagccacctctagagaagccttagg

SEQ ID NO: 1052227 - DNA, 25 bp, Homo sapien
cagatcagcgtcactgtgccatcca

SEQ ID NO: 1052228 - DNA, 25 bp, Homo sapien
caaagtgatcacctgctctgtcggg

SEQ ID NO: 1052229 - DNA, 25 bp, Homo sapien
gtcaccgccacgagctcagagctgg

SEQ ID NO: 1052230 - DNA, 25 bp, Homo sapien
tggcaacgtcacaaacacctgcgac

SEQ ID NO: 1052231 - DNA, 25 bp, Homo sapien
tgctgcaaacgcaggaaggctctgc

SEQ ID NO: 1052232 - DNA, 25 bp, Homo sapien
tctcactttaaatggccagaggcag

SEQ ID NO: 1052233 - DNA, 25 bp, Homo sapien
tggacagtgtcatagaggccgcagc

SEQ ID NO: 1052234 - DNA, 25 bp, Homo sapien
taagctaagatgctcaccactcagg

SEQ ID NO: 1052235 - DNA, 25 bp, Homo sapien
ctgacaaggggttatcaggcatgga

SEQ ID NO: 1052236 - DNA, 25 bp, Homo sapien
atcaatagggtgctgggcgtggcca

SEQ ID NO: 1052237 - DNA, 25 bp, Homo sapien
gcatggaaatgagggctacctgtcc

SEQ ID NO: 1052238 - DNA, 25 bp, Homo sapien
gccatcaatagggtgctgggcgtgg

SEQ ID NO: 1052239 - DNA, 25 bp, Homo sapien
cagacactgtctagcagctgatgcc

SEQ ID NO: 1052240 - DNA, 25 bp, Homo sapien
aagagctgtgggaaccaggcttcag

SEQ ID NO: 1052241 - DNA, 25 bp, Homo sapien
atgaagatgacacggaagagctgtg

SEQ ID NO: 1052242 - DNA, 25 bp, Homo sapien
caggcttcaggtaaggaataccaag

SEQ ID NO: 1052243 - DNA, 25 bp, Homo sapien
cacagtctgcaccatatgacccaga

SEQ ID NO: 1052244 - DNA, 25 bp, Homo sapien
cagagccacgggcagtcacggctgc

SEQ ID NO: 1052245 - DNA, 25 bp, Homo sapien
tgcaccatatgacccagagggagcc

SEQ ID NO: 1052246 - DNA, 25 bp, Homo sapien
agtctgcaccatatgacccagaggg

SEQ ID NO: 1052247 - DNA, 25 bp, Homo sapien
catggtgaccaaacgtgactcctgc

SEQ ID NO: 1052248 - DNA, 25 bp, Homo sapien
tagtcattctctccaaacggcagga

SEQ ID NO: 1052249 - DNA, 25 bp, Homo sapien
tgacctgcaataagtgtggcggcct

SEQ ID NO: 1052250 - DNA, 25 bp, Homo sapien
tgagacctgaccatgtgggagcaat

SEQ ID NO: 1052251 - DNA, 25 bp, Homo sapien
tgcagatcaagagctctcccagact

SEQ ID NO: 1052252 - DNA, 25 bp, Homo sapien
catgtgccactctacgatctttcag

SEQ ID NO: 1052253 - DNA, 25 bp, Homo sapien
ccaggacggaaaagccttaatacag

SEQ ID NO: 1052254 - DNA, 25 bp, Homo sapien
tagaaacagtgagcccttcacatgg

SEQ ID NO: 1052255 - DNA, 25 bp, Homo sapien
tctatggcagcaattcaggtctctt

SEQ ID NO: 1052256 - DNA, 25 bp, Homo sapien
gcagacagtaaactcgggaagggcc

SEQ ID NO: 1052257 - DNA, 25 bp, Homo sapien
taagctgcaaatctggtgattccga

SEQ ID NO: 1052258 - DNA, 25 bp, Homo sapien
taaaatcagtcagccagtgcggagc

SEQ ID NO: 1052259 - DNA, 25 bp, Homo sapien
agtccagaggccataagggcagcag

SEQ ID NO: 1052260 - DNA, 25 bp, Homo sapien
gttcagtccagaggccataagggca

SEQ ID NO: 1052261 - DNA, 25 bp, Homo sapien
gagttcagtccagaggccataaggg

SEQ ID NO: 1052262 - DNA, 25 bp, Homo sapien
ttcacaccaccccaaaggccccaga

SEQ ID NO: 1052263 - DNA, 25 bp, Homo sapien
tatcagaactctagcccgaggcatg

SEQ ID NO: 1052264 - DNA, 25 bp, Homo sapien
gattgatcccgcaaataaagggcag

SEQ ID NO: 1052265 - DNA, 25 bp, Homo sapien
ggaaacctggtactcacactgcaga

SEQ ID NO: 1052266 - DNA, 25 bp, Homo sapien
cagcttccaggcacgtgaggtttaa

SEQ ID NO: 1052267 - DNA, 25 bp, Homo sapien
gaaagcaggtctataacatcacagt

SEQ ID NO: 1052268 - DNA, 25 bp, Homo sapien
cacaatgtcagttagacagcgggac

SEQ ID NO: 1052269 - DNA, 25 bp, Homo sapien
gccatgttaacacggcctcaaggta

SEQ ID NO: 1052270 - DNA, 25 bp, Homo sapien
tgagactccaagtgacaggagagct

SEQ ID NO: 1052271 - DNA, 25 bp, Homo sapien
gctgcgggatctgatgcccctcccc

SEQ ID NO: 1052272 - DNA, 25 bp, Homo sapien
atgtacatcccatccgggtctcctg

SEQ ID NO: 1052273 - DNA, 25 bp, Homo sapien
ctcccctcgtcttaaacactgggtg

SEQ ID NO: 1052274 - DNA, 25 bp, Homo sapien
tcatgtacatcccatccgggtctcc

SEQ ID NO: 1052275 - DNA, 25 bp, Homo sapien
tagcccggtaacaggacctcaccga

SEQ ID NO: 1052276 - DNA, 25 bp, Homo sapien
gcaccattttagcccggtaacagga

SEQ ID NO: 1052277 - DNA, 25 bp, Homo sapien
caccgagtcccagaacttcaggtct

SEQ ID NO: 1052278 - DNA, 25 bp, Homo sapien
tgagtcctgtaggagcgggagccag

SEQ ID NO: 1052279 - DNA, 25 bp, Homo sapien
tcttgtgcatgcagcacaaaagcgt

SEQ ID NO: 1052280 - DNA, 25 bp, Homo sapien
tatcaggaccttcactgagcacgcg

SEQ ID NO: 1052281 - DNA, 25 bp, Homo sapien
gggcatgtttctcctcccagttgag

SEQ ID NO: 1052282 - DNA, 25 bp, Homo sapien
atcttggcccgaagagggcatgttt

SEQ ID NO: 1052283 - DNA, 25 bp, Homo sapien
gaatgaattctaggagttttggagc

SEQ ID NO: 1052284 - DNA, 25 bp, Homo sapien
tgctcagtcactagtcacaaggccc

SEQ ID NO: 1052285 - DNA, 25 bp, Homo sapien
taagacgtgaacatatgctgggtgc

SEQ ID NO: 1052286 - DNA, 25 bp, Homo sapien
agaccgcttaatttcctagagaccg

SEQ ID NO: 1052287 - DNA, 25 bp, Homo sapien
cacctggttcagtggattctgagct

SEQ ID NO: 1052288 - DNA, 25 bp, Homo sapien
caggttctaagatcgattttcccca

SEQ ID NO: 1052289 - DNA, 25 bp, Homo sapien
gatttgtgccaagggcttagcccag

SEQ ID NO: 1052290 - DNA, 25 bp, Homo sapien
aaatttcacaggactcttgggaggg

SEQ ID NO: 1052291 - DNA, 25 bp, Homo sapien
gaaaggcgggaggccgagaggagcg

SEQ ID NO: 1052292 - DNA, 25 bp, Homo sapien
ggaaaggcgggaggccgagaggagc

SEQ ID NO: 1052293 - DNA, 25 bp, Homo sapien
ctctaatttgaatttcaggcgctgg

SEQ ID NO: 1052294 - DNA, 25 bp, Homo sapien
acagctccgagggatgcttgggctc

SEQ ID NO: 1052295 - DNA, 25 bp, Homo sapien
tggtgtgtgatttcctcggtgacag

SEQ ID NO: 1052296 - DNA, 25 bp, Homo sapien
gctcggctgtcatccagtggggctt

SEQ ID NO: 1052297 - DNA, 25 bp, Homo sapien
cgaggatgcagcacacacctggcac

SEQ ID NO: 1052298 - DNA, 25 bp, Homo sapien
cggtcggatgctattcagtatctgc

SEQ ID NO: 1052299 - DNA, 25 bp, Homo sapien
ttgttcctcggcatagcccccgagg

SEQ ID NO: 1052300 - DNA, 25 bp, Homo sapien
aaaggttttgatgtcggtcggatgc

SEQ ID NO: 1052301 - DNA, 25 bp, Homo sapien
gacagccgtgaccactgtggctcca

SEQ ID NO: 1052302 - DNA, 25 bp, Homo sapien
gatgataaagtcgtctgggaagaag

SEQ ID NO: 1052303 - DNA, 25 bp, Homo sapien
gagcccatgaaatccccgttgacag

SEQ ID NO: 1052304 - DNA, 25 bp, Homo sapien
gggaagaaggaagctaaagatgtaa

SEQ ID NO: 1052305 - DNA, 25 bp, Homo sapien
ctccaatttcgcctccaaccacagc

SEQ ID NO: 1052306 - DNA, 25 bp, Homo sapien
tgctgggtgctacatactggtgaca

SEQ ID NO: 1052307 - DNA, 25 bp, Homo sapien
catctgtcacatgggcaaagaagac

SEQ ID NO: 1052308 - DNA, 25 bp, Homo sapien
tgcagacactcctaatctgatggtt

SEQ ID NO: 1052309 - DNA, 25 bp, Homo sapien
gacttatgtagaccatttcctggca

SEQ ID NO: 1052310 - DNA, 25 bp, Homo sapien
ccaaccaaatctgggttttgcccat

SEQ ID NO: 1052311 - DNA, 25 bp, Homo sapien
gagagaggctttgctggcggttggg

SEQ ID NO: 1052312 - DNA, 25 bp, Homo sapien
gagtccttgagggacttggtgggca

SEQ ID NO: 1052313 - DNA, 25 bp, Homo sapien
gatctgcatccccacatgtatgtga

SEQ ID NO: 1052314 - DNA, 25 bp, Homo sapien
gctgcgcacttggactcagggctca

SEQ ID NO: 1052315 - DNA, 25 bp, Homo sapien
gggccccagtgcgcgaagccaccat

SEQ ID NO: 1052316 - DNA, 25 bp, Homo sapien
gcgctgcgcacttggactcagggct

SEQ ID NO: 1052317 - DNA, 25 bp, Homo sapien
ccgcgctgcgcacttggactcaggg

SEQ ID NO: 1052318 - DNA, 25 bp, Homo sapien
ggggcgccacgcaccctcgggcttg

SEQ ID NO: 1052319 - DNA, 25 bp, Homo sapien
cgctgcggcccgcgcgtcgggaggg

SEQ ID NO: 1052320 - DNA, 25 bp, Homo sapien
gctccctcgctctccgcacacccgg

SEQ ID NO: 1052321 - DNA, 25 bp, Homo sapien
cccgcgcgtcgggagggagcgcgct

SEQ ID NO: 1052322 - DNA, 25 bp, Homo sapien
gccgccgcggccgtgacgacccaga

SEQ ID NO: 1052323 - DNA, 25 bp, Homo sapien
cggccgtgacgacccagagcgcagg

SEQ ID NO: 1052324 - DNA, 25 bp, Homo sapien
tgacgacccagagcgcagggggcag

SEQ ID NO: 1052325 - DNA, 25 bp, Homo sapien
cgcggccgtgacgacccagagcgca

SEQ ID NO: 1052326 - DNA, 25 bp, Homo sapien
tgggagcctgcacagagacgctctg

SEQ ID NO: 1052327 - DNA, 25 bp, Homo sapien
cctgggagcctgcacagagacgctc

SEQ ID NO: 1052328 - DNA, 25 bp, Homo sapien
ctgggagcctgcacagagacgctct

SEQ ID NO: 1052329 - DNA, 25 bp, Homo sapien
taccctgctgcattgatcggagagg

SEQ ID NO: 1052330 - DNA, 25 bp, Homo sapien
ggactctcgcccttgggctatgcct

SEQ ID NO: 1052331 - DNA, 25 bp, Homo sapien
atcggagagggcgtggactctcgcc

SEQ ID NO: 1052332 - DNA, 25 bp, Homo sapien
ggcgtggactctcgcccttgggcta

SEQ ID NO: 1052333 - DNA, 25 bp, Homo sapien
gccggatacgtgagccagccccagt

SEQ ID NO: 1052334 - DNA, 25 bp, Homo sapien
gatggtcgacgtgtccagcaaattc

SEQ ID NO: 1052335 - DNA, 25 bp, Homo sapien
cccatgagccggatacgtgagccag

SEQ ID NO: 1052336 - DNA, 25 bp, Homo sapien
cccagtccccgtggatggtcgacgt

SEQ ID NO: 1052337 - DNA, 25 bp, Homo sapien
tccgtgttgagcttgagacgccgca

SEQ ID NO: 1052338 - DNA, 25 bp, Homo sapien
cttgatctcagcatagacgcgccgg

SEQ ID NO: 1052339 - DNA, 25 bp, Homo sapien
caaacctggtacgtgtggatgggct

SEQ ID NO: 1052340 - DNA, 25 bp, Homo sapien
ccaggcatgctgttgcagtcgcgca

SEQ ID NO: 1052341 - DNA, 25 bp, Homo sapien
ccatgcccaggccatggcgcgctca

SEQ ID NO: 1052342 - DNA, 25 bp, Homo sapien
accgctgccggctgacccatgccca

SEQ ID NO: 1052343 - DNA, 25 bp, Homo sapien
ccaagaccaagcaccgctgccggct

SEQ ID NO: 1052344 - DNA, 25 bp, Homo sapien
tgtgtgggtcactcaggtgcctgtg

SEQ ID NO: 1052345 - DNA, 25 bp, Homo sapien
ttgtggcctaaagaataaggagtcc

SEQ ID NO: 1052346 - DNA, 25 bp, Homo sapien
cactgttcatgagcacaactctgga

SEQ ID NO: 1052347 - DNA, 25 bp, Homo sapien
ggtgactatccaagaagcgcaggct

SEQ ID NO: 1052348 - DNA, 25 bp, Homo sapien
taccctaggttgagggagtctccaa

SEQ ID NO: 1052349 - DNA, 25 bp, Homo sapien
gctgcacggtagtagctgaggtcac

SEQ ID NO: 1052350 - DNA, 25 bp, Homo sapien
gggctgcacggtagtagctgaggtc

SEQ ID NO: 1052351 - DNA, 25 bp, Homo sapien
gggctgacttgtagaagcccagctc

SEQ ID NO: 1052352 - DNA, 25 bp, Homo sapien
ggggctgacttgtagaagcccagct

SEQ ID NO: 1052353 - DNA, 25 bp, Homo sapien
gggccagactcgacttgcctgaggt

SEQ ID NO: 1052354 - DNA, 25 bp, Homo sapien
cagactcgacttgcctgaggtgccc

SEQ ID NO: 1052355 - DNA, 25 bp, Homo sapien
cctgaggtgcccacgctgtcacctg

SEQ ID NO: 1052356 - DNA, 25 bp, Homo sapien
tggggccagactcgacttgcctgag

SEQ ID NO: 1052357 - DNA, 25 bp, Homo sapien
tggagatcaggttcactggtgccga

SEQ ID NO: 1052358 - DNA, 25 bp, Homo sapien
cattgtaggtgatgtcactgcggcc

SEQ ID NO: 1052359 - DNA, 25 bp, Homo sapien
gacggcctcgatccagaaggagtag

SEQ ID NO: 1052360 - DNA, 25 bp, Homo sapien
aaggagtagttcatgtgggccagca

SEQ ID NO: 1052361 - DNA, 25 bp, Homo sapien
gacgctgcgggacggagtttctccg

SEQ ID NO: 1052362 - DNA, 25 bp, Homo sapien
gctgcgggacggagtttctccgcct

SEQ ID NO: 1052363 - DNA, 25 bp, Homo sapien
ctaaaggcaatgaagagcctccagc

SEQ ID NO: 1052364 - DNA, 25 bp, Homo sapien
aggacgctgcgggacggagtttctc

SEQ ID NO: 1052365 - DNA, 25 bp, Homo sapien
ggaacctaggctttcgacggccaca

SEQ ID NO: 1052366 - DNA, 25 bp, Homo sapien
aggtgctgggctaagcaatttcatt

SEQ ID NO: 1052367 - DNA, 25 bp, Homo sapien
ttgagcatttaccacgggccaggtg

SEQ ID NO: 1052368 - DNA, 25 bp, Homo sapien
tattattcccattgcaccagggagg

SEQ ID NO: 1052369 - DNA, 25 bp, Homo sapien
aggatgatgccgttcggctgctcgg

SEQ ID NO: 1052370 - DNA, 25 bp, Homo sapien
agcagcgagacgctggtctgccccg

SEQ ID NO: 1052371 - DNA, 25 bp, Homo sapien
ctcttgacggatcaccaccacctgg

SEQ ID NO: 1052372 - DNA, 25 bp, Homo sapien
tagtacttgatctcatactccagga

SEQ ID NO: 1052373 - DNA, 25 bp, Homo sapien
ctcggacctggaacacgtagcgggt

SEQ ID NO: 1052374 - DNA, 25 bp, Homo sapien
gcctgctgaggtgcgggctcggacc

SEQ ID NO: 1052375 - DNA, 25 bp, Homo sapien
aacacgtagcgggtgcccggcttga

SEQ ID NO: 1052376 - DNA, 25 bp, Homo sapien
gcttgaggccggagacggtggctct

SEQ ID NO: 1052377 - DNA, 25 bp, Homo sapien
tcaggcagatccagacaatggtcct

SEQ ID NO: 1052378 - DNA, 25 bp, Homo sapien
cgtcaggcagatccagacaatggtc

SEQ ID NO: 1052379 - DNA, 25 bp, Homo sapien
ccaccaggcccgtgatgagcgtcag

SEQ ID NO: 1052380 - DNA, 25 bp, Homo sapien
ggcagatccagacaatggtcctggt

SEQ ID NO: 1052381 - DNA, 25 bp, Homo sapien
ccattctgatagtgcatcttctcct

SEQ ID NO: 1052382 - DNA, 25 bp, Homo sapien
cagagccgatgattttctcgatgtg

SEQ ID NO: 1052383 - DNA, 25 bp, Homo sapien
ccggcctggctcctcgtaggtgtgg

SEQ ID NO: 1052384 - DNA, 25 bp, Homo sapien
tagaggcctcgatctcccgagtgaa

SEQ ID NO: 1052385 - DNA, 25 bp, Homo sapien
tctcgatgtggatcctagaggcctc

SEQ ID NO: 1052386 - DNA, 25 bp, Homo sapien
ccgtgtagccggctttgagggcctt

SEQ ID NO: 1052387 - DNA, 25 bp, Homo sapien
gatgttgggatggtcgaattgcccc

SEQ ID NO: 1052388 - DNA, 25 bp, Homo sapien
cgacaccctcgaggcggatgatgtt

SEQ ID NO: 1052389 - DNA, 25 bp, Homo sapien
gaattgccccatgatggacgcctcg

SEQ ID NO: 1052390 - DNA, 25 bp, Homo sapien
tccatgtactcagtcacaatcattg

SEQ ID NO: 1052391 - DNA, 25 bp, Homo sapien
ggaaggtgtccagagagccgttctc

SEQ ID NO: 1052392 - DNA, 25 bp, Homo sapien
cagagagccgttctccatgtactca

SEQ ID NO: 1052393 - DNA, 25 bp, Homo sapien
tcagtcacaatcattgccaggcggc

SEQ ID NO: 1052394 - DNA, 25 bp, Homo sapien
ccgtgagagcccgaagtcagacacc

SEQ ID NO: 1052395 - DNA, 25 bp, Homo sapien
tgagaggtagcgcatgccggcaccc

SEQ ID NO: 1052396 - DNA, 25 bp, Homo sapien
ggttgctgtcaaccaggacgttgcg

SEQ ID NO: 1052397 - DNA, 25 bp, Homo sapien
catgatggtgaactgcccgtcgtgg

SEQ ID NO: 1052398 - DNA, 25 bp, Homo sapien
ccacacgtcgctggccgaggagaag

SEQ ID NO: 1052399 - DNA, 25 bp, Homo sapien
tggtcatgttccagtagggccgctc

SEQ ID NO: 1052400 - DNA, 25 bp, Homo sapien
gaaggtgcggaaggcgatggcctct

SEQ ID NO: 1052401 - DNA, 25 bp, Homo sapien
ctcccacatgaccacgccgaagctc

SEQ ID NO: 1052402 - DNA, 25 bp, Homo sapien
gcaggggatcagcgctgggctcagc

SEQ ID NO: 1052403 - DNA, 25 bp, Homo sapien
ggcagcccatgggtgcgggcaggcg

SEQ ID NO: 1052404 - DNA, 25 bp, Homo sapien
ctcagggctgcggatgagcgcatcg

SEQ ID NO: 1052405 - DNA, 25 bp, Homo sapien
aatctgggagaagcgaggccgctgc

SEQ ID NO: 1052406 - DNA, 25 bp, Homo sapien
catcgaggacactgacaatctggga

SEQ ID NO: 1052407 - DNA, 25 bp, Homo sapien
cacaggggctcttggtaagtggcca

SEQ ID NO: 1052408 - DNA, 25 bp, Homo sapien
ctcttggtaagtggccagagggttc

SEQ ID NO: 1052409 - DNA, 25 bp, Homo sapien
gggctcttggtaagtggccagaggg

SEQ ID NO: 1052410 - DNA, 25 bp, Homo sapien
gaggcacaggggctcttggtaagtg

SEQ ID NO: 1052411 - DNA, 25 bp, Homo sapien
tccggacgaaggcagggggtgggca

SEQ ID NO: 1052412 - DNA, 25 bp, Homo sapien
agtatccgcccgcagcgaagtggtc

SEQ ID NO: 1052413 - DNA, 25 bp, Homo sapien
ccgcagcgaagtggtctcggtaccg

SEQ ID NO: 1052414 - DNA, 25 bp, Homo sapien
gcccagagaggagtatccgcccgca

SEQ ID NO: 1052415 - DNA, 25 bp, Homo sapien
gtaccggcccatgcggatggagtcc

SEQ ID NO: 1052416 - DNA, 25 bp, Homo sapien
tgggcccgcatggtctgaatgctgc

SEQ ID NO: 1052417 - DNA, 25 bp, Homo sapien
cagctgggcccgcatggtctgaatg

SEQ ID NO: 1052418 - DNA, 25 bp, Homo sapien
ggggcccctgggtgctggtcagctg

SEQ ID NO: 1052419 - DNA, 25 bp, Homo sapien
cccgcatggtctgaatgctgcccag

SEQ ID NO: 1052420 - DNA, 25 bp, Homo sapien
tagtctccccatatgctacaggaag

SEQ ID NO: 1052421 - DNA, 25 bp, Homo sapien
gatcccatgaccttgtgagaacacc

SEQ ID NO: 1052422 - DNA, 25 bp, Homo sapien
tgcagttcagaagtggcccctggct

SEQ ID NO: 1052423 - DNA, 25 bp, Homo sapien
catgactgtgaggatccagagccca

SEQ ID NO: 1052424 - DNA, 25 bp, Homo sapien
aaatcactgcacaagaatccctgac

SEQ ID NO: 1052425 - DNA, 25 bp, Homo sapien
ccaatcggattggtgtaatgagcca

SEQ ID NO: 1052426 - DNA, 25 bp, Homo sapien
caagaacatatcactgcctagcgct

SEQ ID NO: 1052427 - DNA, 25 bp, Homo sapien
gttggctggatcctagatttgctcg

SEQ ID NO: 1052428 - DNA, 25 bp, Homo sapien
tgcagcagctggtccggcaagtccc

SEQ ID NO: 1052429 - DNA, 25 bp, Homo sapien
tctgaagttgctcgctgtttatgca

SEQ ID NO: 1052430 - DNA, 25 bp, Homo sapien
tccagtctgtctgaagttgctcgct

SEQ ID NO: 1052431 - DNA, 25 bp, Homo sapien
aagttgctcgctgtttatgcagcag

SEQ ID NO: 1052432 - DNA, 25 bp, Homo sapien
tccaaggtttgctgtgccccacata

SEQ ID NO: 1052433 - DNA, 25 bp, Homo sapien
cgggggccagcgttttcagcttctc

SEQ ID NO: 1052434 - DNA, 25 bp, Homo sapien
tgcctccaaggtttgctgtgcccca

SEQ ID NO: 1052435 - DNA, 25 bp, Homo sapien
ttcctgctgcctcacgggggccagc

SEQ ID NO: 1052436 - DNA, 25 bp, Homo sapien
cttgtcagggctgtcgttgtctctg

SEQ ID NO: 1052437 - DNA, 25 bp, Homo sapien
tctgacaacatcctcatagaaccct

SEQ ID NO: 1052438 - DNA, 25 bp, Homo sapien
ctgacaacatcctcatagaaccctt

SEQ ID NO: 1052439 - DNA, 25 bp, Homo sapien
gggctgtcgttgtctctgacaacat

SEQ ID NO: 1052440 - DNA, 25 bp, Homo sapien
tacatgaacattgttgtcctcatag

SEQ ID NO: 1052441 - DNA, 25 bp, Homo sapien
gaacattgttgtcctcatagtcttc

SEQ ID NO: 1052442 - DNA, 25 bp, Homo sapien
cattgttgtcctcatagtcttcatc

SEQ ID NO: 1052443 - DNA, 25 bp, Homo sapien
gattattacatgaacattgttgtcc

SEQ ID NO: 1052444 - DNA, 25 bp, Homo sapien
gcacacctgcagcccttccatggga

SEQ ID NO: 1052445 - DNA, 25 bp, Homo sapien
cagcacacctgcagcccttccatgg

SEQ ID NO: 1052446 - DNA, 25 bp, Homo sapien
acacctgcagcccttccatgggaca

SEQ ID NO: 1052447 - DNA, 25 bp, Homo sapien
cttgagggtctccagcacacctgca

SEQ ID NO: 1052448 - DNA, 25 bp, Homo sapien
cctgccctggacctttggacatgac

SEQ ID NO: 1052449 - DNA, 25 bp, Homo sapien
ttggcacgttagctgggcctgccct

SEQ ID NO: 1052450 - DNA, 25 bp, Homo sapien
cttggcacgttagctgggcctgccc

SEQ ID NO: 1052451 - DNA, 25 bp, Homo sapien
gaccttttggtatctgacaagtggg

SEQ ID NO: 1052452 - DNA, 25 bp, Homo sapien
tgagagtgtgccgttggcatccgtc

SEQ ID NO: 1052453 - DNA, 25 bp, Homo sapien
cttcctgagagtgtgccgttggcat

SEQ ID NO: 1052454 - DNA, 25 bp, Homo sapien
cagattggggtctgaaacagcaacc

SEQ ID NO: 1052455 - DNA, 25 bp, Homo sapien
gttggcatccgtcctgcagattggg

SEQ ID NO: 1052456 - DNA, 25 bp, Homo sapien
tcacaacagggacaccttcaggcgg

SEQ ID NO: 1052457 - DNA, 25 bp, Homo sapien
aacagggacaccttcaggcggagag

SEQ ID NO: 1052458 - DNA, 25 bp, Homo sapien
ggagaggaagggcatattcttccat

SEQ ID NO: 1052459 - DNA, 25 bp, Homo sapien
cggagaggaagggcatattcttcca

SEQ ID NO: 1052460 - DNA, 25 bp, Homo sapien
tgcctcctgttgtcaactccaactg

SEQ ID NO: 1052461 - DNA, 25 bp, Homo sapien
ttgtcaactccaactggatgctcct

SEQ ID NO: 1052462 - DNA, 25 bp, Homo sapien
cctgttgtcaactccaactggatgc

SEQ ID NO: 1052463 - DNA, 25 bp, Homo sapien
cctcctgttgtcaactccaactgga

SEQ ID NO: 1052464 - DNA, 25 bp, Homo sapien
tcctagaatcaggcacagttatttc

SEQ ID NO: 1052465 - DNA, 25 bp, Homo sapien
tgggtcctggatcagtgctgcaccc

SEQ ID NO: 1052466 - DNA, 25 bp, Homo sapien
tctggtgctcggcacaagtcctcgg

SEQ ID NO: 1052467 - DNA, 25 bp, Homo sapien
agtcctcggtcaccatagaggccag

SEQ ID NO: 1052468 - DNA, 25 bp, Homo sapien
ggccagcgatatggccagcacacag

SEQ ID NO: 1052469 - DNA, 25 bp, Homo sapien
ctttcttcccgtctggtgctcggca

SEQ ID NO: 1052470 - DNA, 25 bp, Homo sapien
tttcttctagaatgtgagtctctga

SEQ ID NO: 1052471 - DNA, 25 bp, Homo sapien
tagccgggtacagtgcagacgaatc

SEQ ID NO: 1052472 - DNA, 25 bp, Homo sapien
ttcttcctggttggtgatgaccgtg

SEQ ID NO: 1052473 - DNA, 25 bp, Homo sapien
tggtgcctttaattcccgggatgcc

SEQ ID NO: 1052474 - DNA, 25 bp, Homo sapien
gatgaccgtgtcgaagatgaccacg

SEQ ID NO: 1052475 - DNA, 25 bp, Homo sapien
gaggagacgatggacaggcagattt

SEQ ID NO: 1052476 - DNA, 25 bp, Homo sapien
cagagccctggtaaatgtgaccctt

SEQ ID NO: 1052477 - DNA, 25 bp, Homo sapien
agaagcccagggagcgtcggacctg

SEQ ID NO: 1052478 - DNA, 25 bp, Homo sapien
tgaagacgctgtcggcctcagagcc

SEQ ID NO: 1052479 - DNA, 25 bp, Homo sapien
tgtttattccaggaagaggtctaag

SEQ ID NO: 1052480 - DNA, 25 bp, Homo sapien
cattttacaggcggagcatggaagc

SEQ ID NO: 1052481 - DNA, 25 bp, Homo sapien
cgagcttcttagagcatgtgtcacg

SEQ ID NO: 1052482 - DNA, 25 bp, Homo sapien
agctgaagcaatagcgcccccattt

SEQ ID NO: 1052483 - DNA, 25 bp, Homo sapien
tccctctcaatgctccgagtagcaa

SEQ ID NO: 1052484 - DNA, 25 bp, Homo sapien
tctcaatgctccgagtagcaactga

SEQ ID NO: 1052485 - DNA, 25 bp, Homo sapien
tgctccgagtagcaactgaagctca

SEQ ID NO: 1052486 - DNA, 25 bp, Homo sapien
caatgctccgagtagcaactgaagc

SEQ ID NO: 1052487 - DNA, 25 bp, Homo sapien
gcctggcacagagatgtcctcagat

SEQ ID NO: 1052488 - DNA, 25 bp, Homo sapien
tctcccaggcaagaggacacggtgt

SEQ ID NO: 1052489 - DNA, 25 bp, Homo sapien
agatgtcctcagatctgcttcccct

SEQ ID NO: 1052490 - DNA, 25 bp, Homo sapien
ggtgggcggtttctggcctggcaca

SEQ ID NO: 1052491 - DNA, 25 bp, Homo sapien
tcccctcacacaccaagctgcccct

SEQ ID NO: 1052492 - DNA, 25 bp, Homo sapien
atttcaggaaggtggcggaaggtgg

SEQ ID NO: 1052493 - DNA, 25 bp, Homo sapien
gatggtggggccttttcttcagccc

SEQ ID NO: 1052494 - DNA, 25 bp, Homo sapien
ggaggaaacggccatctgcccatac

SEQ ID NO: 1052495 - DNA, 25 bp, Homo sapien
gcagcttcagcccaaggtggggcag

SEQ ID NO: 1052496 - DNA, 25 bp, Homo sapien
cagcttcagcccaaggtggggcagg

SEQ ID NO: 1052497 - DNA, 25 bp, Homo sapien
ggcaggccgggcatccctgggatcc

SEQ ID NO: 1052498 - DNA, 25 bp, Homo sapien
ggcagtccgtcgtacccatccttcc

SEQ ID NO: 1052499 - DNA, 25 bp, Homo sapien
gggcatccctgggatcccgtagcag

SEQ ID NO: 1052500 - DNA, 25 bp, Homo sapien
ctgggatcccgtagcagcctgtgtt

SEQ ID NO: 1052501 - DNA, 25 bp, Homo sapien
tgaggaccgcgttgaatctgatcag

SEQ ID NO: 1052502 - DNA, 25 bp, Homo sapien
tgcgacgcgtggtagacaaagtagt

SEQ ID NO: 1052503 - DNA, 25 bp, Homo sapien
gaacttgccagtgctcgtgtcataa

SEQ ID NO: 1052504 - DNA, 25 bp, Homo sapien
cctgattggttttggacgtgtggcc

SEQ ID NO: 1052505 - DNA, 25 bp, Homo sapien
catgtcgtagtagtcattgacagcc

SEQ ID NO: 1052506 - DNA, 25 bp, Homo sapien
gtagtagtcattgacagccagccac

SEQ ID NO: 1052507 - DNA, 25 bp, Homo sapien
gatgcccaccatgtcgtagtagtca

SEQ ID NO: 1052508 - DNA, 25 bp, Homo sapien
ggaagccggagaagacgctgtcaga

SEQ ID NO: 1052509 - DNA, 25 bp, Homo sapien
aggcaaggatgcagactggccagta

SEQ ID NO: 1052510 - DNA, 25 bp, Homo sapien
cccgtggggctcgagcgcatctgcc

SEQ ID NO: 1052511 - DNA, 25 bp, Homo sapien
gcaaggatgcagactggccagtaag

SEQ ID NO: 1052512 - DNA, 25 bp, Homo sapien
aaggatgcagactggccagtaaggt

SEQ ID NO: 1052513 - DNA, 25 bp, Homo sapien
acacaagcagtgactcctaaagaag

SEQ ID NO: 1052514 - DNA, 25 bp, Homo sapien
cacacaagcagtgactcctaaagaa

SEQ ID NO: 1052515 - DNA, 25 bp, Homo sapien
ccacacaagcagtgactcctaaaga

SEQ ID NO: 1052516 - DNA, 25 bp, Homo sapien
aaccacacaagcagtgactcctaaa

SEQ ID NO: 1052517 - DNA, 25 bp, Homo sapien
tcttagcaaatcagccatggtccct

SEQ ID NO: 1052518 - DNA, 25 bp, Homo sapien
taacgtgcttagtgtaatggctggc

SEQ ID NO: 1052519 - DNA, 25 bp, Homo sapien
taaacacggaatgacatgaggcatc

SEQ ID NO: 1052520 - DNA, 25 bp, Homo sapien
tcaaaacttgatggccggtgggcag

SEQ ID NO: 1052521 - DNA, 25 bp, Homo sapien
ggtcctatttctgcaacccactgga

SEQ ID NO: 1052522 - DNA, 25 bp, Homo sapien
tgccctcggtccgaagcggaagttc

SEQ ID NO: 1052523 - DNA, 25 bp, Homo sapien
gccctcaggcagtttcaggtcctat

SEQ ID NO: 1052524 - DNA, 25 bp, Homo sapien
caagtttggttctgccaactcagca

SEQ ID NO: 1052525 - DNA, 25 bp, Homo sapien
ttaaagccccatctgctaccggctg

SEQ ID NO: 1052526 - DNA, 25 bp, Homo sapien
caatgctgatttcaacctgacaggg

SEQ ID NO: 1052527 - DNA, 25 bp, Homo sapien
taccggctgcataacctcaggcaag

SEQ ID NO: 1052528 - DNA, 25 bp, Homo sapien
cagcagtccctttccgcaacatgga

SEQ ID NO: 1052529 - DNA, 25 bp, Homo sapien
gaggttaccaccgtggtgatcctat

SEQ ID NO: 1052530 - DNA, 25 bp, Homo sapien
gaagacaatgtgagaggttaccacc

SEQ ID NO: 1052531 - DNA, 25 bp, Homo sapien
tgtgagaggttaccaccgtggtgat

SEQ ID NO: 1052532 - DNA, 25 bp, Homo sapien
caatgtgagaggttaccaccgtggt

SEQ ID NO: 1052533 - DNA, 25 bp, Homo sapien
gctgggcctgggagatatcgattag

SEQ ID NO: 1052534 - DNA, 25 bp, Homo sapien
gcaggagcaacatcagtactgggat

SEQ ID NO: 1052535 - DNA, 25 bp, Homo sapien
tcagtactgggatgctgccccatgg

SEQ ID NO: 1052536 - DNA, 25 bp, Homo sapien
gagatatcgattaggcccaggagca

SEQ ID NO: 1052537 - DNA, 25 bp, Homo sapien
gatacccgggatgccagggatggct

SEQ ID NO: 1052538 - DNA, 25 bp, Homo sapien
agggatacccgggatgccagggatg

SEQ ID NO: 1052539 - DNA, 25 bp, Homo sapien
ttggccatcggggccaggtgtccca

SEQ ID NO: 1052540 - DNA, 25 bp, Homo sapien
cccaggttggccatcggggccaggt

SEQ ID NO: 1052541 - DNA, 25 bp, Homo sapien
cttgtggcagagaaggcgattttct

SEQ ID NO: 1052542 - DNA, 25 bp, Homo sapien
tgtagtctcccgattcacctttggg

SEQ ID NO: 1052543 - DNA, 25 bp, Homo sapien
atcacgtggtcgaagcggatggtct

SEQ ID NO: 1052544 - DNA, 25 bp, Homo sapien
taattgttgttcatgttggtgatca

SEQ ID NO: 1052545 - DNA, 25 bp, Homo sapien
cggccacgcatgaggttcacgcaca

SEQ ID NO: 1052546 - DNA, 25 bp, Homo sapien
aaggtgaccaccttctgtgcacgct

SEQ ID NO: 1052547 - DNA, 25 bp, Homo sapien
acaggttccctcgagagctggcgtg

SEQ ID NO: 1052548 - DNA, 25 bp, Homo sapien
aggtgaagtagtagagaccgggcac

SEQ ID NO: 1052549 - DNA, 25 bp, Homo sapien
tgaggaccatgccaccggtggtgac

SEQ ID NO: 1052550 - DNA, 25 bp, Homo sapien
cttgaggaccatgccaccggtggtg

SEQ ID NO: 1052551 - DNA, 25 bp, Homo sapien
cctgctccagcttgaggaccatgcc

SEQ ID NO: 1052552 - DNA, 25 bp, Homo sapien
ccccctgctccagcttgaggaccat

SEQ ID NO: 1052553 - DNA, 25 bp, Homo sapien
cagtagtgagttcttgtcggtggcc

SEQ ID NO: 1052554 - DNA, 25 bp, Homo sapien
catgcccagtagtgagttcttgtcg

SEQ ID NO: 1052555 - DNA, 25 bp, Homo sapien
tgcccagtagtgagttcttgtcggt

SEQ ID NO: 1052556 - DNA, 25 bp, Homo sapien
cctccatgcccagtagtgagttctt

SEQ ID NO: 1052557 - DNA, 25 bp, Homo sapien
tatctggaaagagcaggaacccgga

SEQ ID NO: 1052558 - DNA, 25 bp, Homo sapien
gcaggaacccggaaaagatgctgtt

SEQ ID NO: 1052559 - DNA, 25 bp, Homo sapien
gcctccatatctggaaagagcagga

SEQ ID NO: 1052560 - DNA, 25 bp, Homo sapien
aaagagcaggaacccggaaaagatg

SEQ ID NO: 1052561 - DNA, 25 bp, Homo sapien
ggagccggggtggatgtgaagcagc

SEQ ID NO: 1052562 - DNA, 25 bp, Homo sapien
actcagcagcattcaccaagcccta

SEQ ID NO: 1052563 - DNA, 25 bp, Homo sapien
agcattcaccaagccctactgtgtg

SEQ ID NO: 1052564 - DNA, 25 bp, Homo sapien
ccctactgtgtgcattggttgggca

SEQ ID NO: 1052565 - DNA, 25 bp, Homo sapien
gacacagagttgaattagaccactg

SEQ ID NO: 1052566 - DNA, 25 bp, Homo sapien
tgggacacagagttgaattagacca

SEQ ID NO: 1052567 - DNA, 25 bp, Homo sapien
acatttctgagcatggcacttctgg

SEQ ID NO: 1052568 - DNA, 25 bp, Homo sapien
tggcacttctggtgtgccaggtgct

SEQ ID NO: 1052569 - DNA, 25 bp, Homo sapien
cagaaaggcccagtagagtgaggct

SEQ ID NO: 1052570 - DNA, 25 bp, Homo sapien
taaagccttggaggatgaccccttg

SEQ ID NO: 1052571 - DNA, 25 bp, Homo sapien
gcttctaggtaagggaacagtgcga

SEQ ID NO: 1052572 - DNA, 25 bp, Homo sapien
aaggtctcaggccatcaatgggcag

SEQ ID NO: 1052573 - DNA, 25 bp, Homo sapien
gagggcccgacaagggcactgttat

SEQ ID NO: 1052574 - DNA, 25 bp, Homo sapien
ggcactgttatgagtgtcctgactg

SEQ ID NO: 1052575 - DNA, 25 bp, Homo sapien
gcctggatttctggcaggtctggaa

SEQ ID NO: 1052576 - DNA, 25 bp, Homo sapien
gatttctggcaggtctggaagctcc

SEQ ID NO: 1052577 - DNA, 25 bp, Homo sapien
gtctgcgtagagcaagggatgttgg

SEQ ID NO: 1052578 - DNA, 25 bp, Homo sapien
gatgttggactatgatggccatggc

SEQ ID NO: 1052579 - DNA, 25 bp, Homo sapien
caagggatgttggactatgatggcc

SEQ ID NO: 1052580 - DNA, 25 bp, Homo sapien
actatgatggccatggctagacaca

SEQ ID NO: 1052581 - DNA, 25 bp, Homo sapien
ttgggggtccagacgtcatctgggg

SEQ ID NO: 1052582 - DNA, 25 bp, Homo sapien
ggggcatccgcttgccttcacagtt

SEQ ID NO: 1052583 - DNA, 25 bp, Homo sapien
tgccttcacagttgagagggcagtt

SEQ ID NO: 1052584 - DNA, 25 bp, Homo sapien
ggtccagacgtcatctgggggcatc

SEQ ID NO: 1052585 - DNA, 25 bp, Homo sapien
actggggattggagatgttagactc

SEQ ID NO: 1052586 - DNA, 25 bp, Homo sapien
tcctcagctgattgggcgaggagta

SEQ ID NO: 1052587 - DNA, 25 bp, Homo sapien
attgggcgaggagtatcctgattcc

SEQ ID NO: 1052588 - DNA, 25 bp, Homo sapien
ctgtgtcacttctatgaaagatggg

SEQ ID NO: 1052589 - DNA, 25 bp, Homo sapien
gatatgggcaaatagcatccctccc

SEQ ID NO: 1052590 - DNA, 25 bp, Homo sapien
ggtcatagcaatagtacgggcccac

SEQ ID NO: 1052591 - DNA, 25 bp, Homo sapien
tcaacacgtgattaaatagacctgg

SEQ ID NO: 1052592 - DNA, 25 bp, Homo sapien
ggcccaccacggattaaacgagata

SEQ ID NO: 1052593 - DNA, 25 bp, Homo sapien
tctcctttcctctcgtaactgactt

SEQ ID NO: 1052594 - DNA, 25 bp, Homo sapien
ctctcgtaactgacttaaagcattg

SEQ ID NO: 1052595 - DNA, 25 bp, Homo sapien
tttcctctcgtaactgacttaaagc

SEQ ID NO: 1052596 - DNA, 25 bp, Homo sapien
taactgacttaaagcattgtgggtc

SEQ ID NO: 1052597 - DNA, 25 bp, Homo sapien
catagcccacccagagagtgggaag

SEQ ID NO: 1052598 - DNA, 25 bp, Homo sapien
ctccctggaagttcatagcccaccc

SEQ ID NO: 1052599 - DNA, 25 bp, Homo sapien
gacttgtttacgtcctctcttgctc

SEQ ID NO: 1052600 - DNA, 25 bp, Homo sapien
tggtggttgacttgtttacgtcctc

SEQ ID NO: 1052601 - DNA, 25 bp, Homo sapien
ctgacacgtcggagttgcttggtgc

SEQ ID NO: 1052602 - DNA, 25 bp, Homo sapien
gttgacttgtttacgtcctctcttg

SEQ ID NO: 1052603 - DNA, 25 bp, Homo sapien
ttactccgcgtagctgtggggacca

SEQ ID NO: 1052604 - DNA, 25 bp, Homo sapien
tactccgcgtagctgtggggaccag

SEQ ID NO: 1052605 - DNA, 25 bp, Homo sapien
gtggcaccccagtgcgcggcagagc

SEQ ID NO: 1052606 - DNA, 25 bp, Homo sapien
cttggagacggtggcaccccagtgc

SEQ ID NO: 1052607 - DNA, 25 bp, Homo sapien
agagccgggagcacctggatcaccc

SEQ ID NO: 1052608 - DNA, 25 bp, Homo sapien
tcacagctgacagcggcgcccttgg

SEQ ID NO: 1052609 - DNA, 25 bp, Homo sapien
acaaaggccgcttgtttggccgcct

SEQ ID NO: 1052610 - DNA, 25 bp, Homo sapien
aacgcacagaccacaaaggccgctt

SEQ ID NO: 1052611 - DNA, 25 bp, Homo sapien
gagggccgccaacgcacagaccaca

SEQ ID NO: 1052612 - DNA, 25 bp, Homo sapien
cctttgtgacgctccccgagggccg

SEQ ID NO: 1052613 - DNA, 25 bp, Homo sapien
ccctaagaggattggcggcctttct

SEQ ID NO: 1052614 - DNA, 25 bp, Homo sapien
ttttgcttgctttgcgcgccgtggg

SEQ ID NO: 1052615 - DNA, 25 bp, Homo sapien
ggcggttatgcccgctccccaggag

SEQ ID NO: 1052616 - DNA, 25 bp, Homo sapien
tcattcccgggcagcttttgcttgc

SEQ ID NO: 1052617 - DNA, 25 bp, Homo sapien
tagccccacgctgtttgctagggaa

SEQ ID NO: 1052618 - DNA, 25 bp, Homo sapien
tgagaattcggacgccttgctaggc

SEQ ID NO: 1052619 - DNA, 25 bp, Homo sapien
tgtcctcctagcaacaagctatggg

SEQ ID NO: 1052620 - DNA, 25 bp, Homo sapien
tgatgctggaggtgtgccacgtacc

SEQ ID NO: 1052621 - DNA, 25 bp, Homo sapien
ctttggatgcccctctgagcacaga

SEQ ID NO: 1052622 - DNA, 25 bp, Homo sapien
ctgcgaacccagctccactttggat

SEQ ID NO: 1052623 - DNA, 25 bp, Homo sapien
cagctccactttggatgcccctctg

SEQ ID NO: 1052624 - DNA, 25 bp, Homo sapien
tgcgaacccagctccactttggatg

SEQ ID NO: 1052625 - DNA, 25 bp, Homo sapien
tgccaatgagctctaggctcccttt

SEQ ID NO: 1052626 - DNA, 25 bp, Homo sapien
accagaggatgccaatgagctctag

SEQ ID NO: 1052627 - DNA, 25 bp, Homo sapien
tcagccataccagaggatgccaatg

SEQ ID NO: 1052628 - DNA, 25 bp, Homo sapien
gagctctaggctccctttgctttcc

SEQ ID NO: 1052629 - DNA, 25 bp, Homo sapien
atccatctaaggtttggaaagttgg

SEQ ID NO: 1052630 - DNA, 25 bp, Homo sapien
agttgggtcgtctcttgaagctcca

SEQ ID NO: 1052631 - DNA, 25 bp, Homo sapien
ttggaaagttgggtcgtctcttgaa

SEQ ID NO: 1052632 - DNA, 25 bp, Homo sapien
aaagttgggtcgtctcttgaagctc

SEQ ID NO: 1052633 - DNA, 25 bp, Homo sapien
gggagcccactcctgactgaggaga

SEQ ID NO: 1052634 - DNA, 25 bp, Homo sapien
agcccactcctgactgaggagactt

SEQ ID NO: 1052635 - DNA, 25 bp, Homo sapien
gggggcctgcggcaatcacccaggc

SEQ ID NO: 1052636 - DNA, 25 bp, Homo sapien
tgaacccctggcagttgggagccca

SEQ ID NO: 1052637 - DNA, 25 bp, Homo sapien
ccatccagcccgggcagaacgggga

SEQ ID NO: 1052638 - DNA, 25 bp, Homo sapien
gagccatccagcccgggcagaacgg

SEQ ID NO: 1052639 - DNA, 25 bp, Homo sapien
agccatccagcccgggcagaacggg

SEQ ID NO: 1052640 - DNA, 25 bp, Homo sapien
tgagccatccagcccgggcagaacg

SEQ ID NO: 1052641 - DNA, 25 bp, Homo sapien
aaggcgcggcgcacacacagccgcc

SEQ ID NO: 1052642 - DNA, 25 bp, Homo sapien
caaggcgcggcgcacacacagccgc

SEQ ID NO: 1052643 - DNA, 25 bp, Homo sapien
gggcggcaaggcgcggcgcacacac

SEQ ID NO: 1052644 - DNA, 25 bp, Homo sapien
ggcggcaaggcgcggcgcacacaca

SEQ ID NO: 1052645 - DNA, 25 bp, Homo sapien
cggacggcccgggcgggagcgcgcg

SEQ ID NO: 1052646 - DNA, 25 bp, Homo sapien
ctgcgcttcccggggcctcgggccg

SEQ ID NO: 1052647 - DNA, 25 bp, Homo sapien
gctgcgcttcccggggcctcgggcc

SEQ ID NO: 1052648 - DNA, 25 bp, Homo sapien
ggctgcgcttcccggggcctcgggc

SEQ ID NO: 1052649 - DNA, 25 bp, Homo sapien
agcagcagcgcggcccccagcctcc

SEQ ID NO: 1052650 - DNA, 25 bp, Homo sapien
gcagcgcggcccccagcctccgcag

SEQ ID NO: 1052651 - DNA, 25 bp, Homo sapien
gcgcggcccccagcctccgcagagc

SEQ ID NO: 1052652 - DNA, 25 bp, Homo sapien
cggcccccagcctccgcagagccat

SEQ ID NO: 1052653 - DNA, 25 bp, Homo sapien
attattcacgttcgcttcttgccct

SEQ ID NO: 1052654 - DNA, 25 bp, Homo sapien
gagaaccattattcacgttcgcttc

SEQ ID NO: 1052655 - DNA, 25 bp, Homo sapien
aaagtgcagtacacgtgagaaccat

SEQ ID NO: 1052656 - DNA, 25 bp, Homo sapien
gcagtacacgtgagaaccattattc

SEQ ID NO: 1052657 - DNA, 25 bp, Homo sapien
cgttgtaaaccacagagagctgcgt

SEQ ID NO: 1052658 - DNA, 25 bp, Homo sapien
cagagagctgcgtatagtgcgaagt

SEQ ID NO: 1052659 - DNA, 25 bp, Homo sapien
gctgcgtatagtgcgaagtacttca

SEQ ID NO: 1052660 - DNA, 25 bp, Homo sapien
cttgtcaactgtgcagcacgttgta

SEQ ID NO: 1052661 - DNA, 25 bp, Homo sapien
agccgaaggacagctgcctcagtgc

SEQ ID NO: 1052662 - DNA, 25 bp, Homo sapien
ctaaagtgctcattaccgaaagaga

SEQ ID NO: 1052663 - DNA, 25 bp, Homo sapien
ccccacgtctggtctgatatgcgtt

SEQ ID NO: 1052664 - DNA, 25 bp, Homo sapien
ccctgactgcggtcactaaagtgct

SEQ ID NO: 1052665 - DNA, 25 bp, Homo sapien
gcatgagtcatttccccaaagccag

SEQ ID NO: 1052666 - DNA, 25 bp, Homo sapien
gccaagctccccataatactgtaaa

SEQ ID NO: 1052667 - DNA, 25 bp, Homo sapien
tactgtaaacatcccaatgtatagc

SEQ ID NO: 1052668 - DNA, 25 bp, Homo sapien
tatagcgggccaacgcatgagtcat

SEQ ID NO: 1052669 - DNA, 25 bp, Homo sapien
agacaggcaagaggatgtaccggcc

SEQ ID NO: 1052670 - DNA, 25 bp, Homo sapien
gccagagccctgactcgaacagact

SEQ ID NO: 1052671 - DNA, 25 bp, Homo sapien
gccctgactcgaacagactccctgg

SEQ ID NO: 1052672 - DNA, 25 bp, Homo sapien
agagccctgactcgaacagactccc

SEQ ID NO: 1052673 - DNA, 25 bp, Homo sapien
tttccactgttctcccgagagctgc

SEQ ID NO: 1052674 - DNA, 25 bp, Homo sapien
tggcagctcaggagcccttttccac

SEQ ID NO: 1052675 - DNA, 25 bp, Homo sapien
gctcaggagcccttttccactgttc

SEQ ID NO: 1052676 - DNA, 25 bp, Homo sapien
ttccactgttctcccgagagctgcg

SEQ ID NO: 1052677 - DNA, 25 bp, Homo sapien
catagtcaatggctcagaaggtttc

SEQ ID NO: 1052678 - DNA, 25 bp, Homo sapien
gtttgctagctctttccagggccag

SEQ ID NO: 1052679 - DNA, 25 bp, Homo sapien
cattattaactattacgggctgggc

SEQ ID NO: 1052680 - DNA, 25 bp, Homo sapien
gacttaacggtggaggctgctatga

SEQ ID NO: 1052681 - DNA, 25 bp, Homo sapien
cagagttattctatgcatcaggcag

SEQ ID NO: 1052682 - DNA, 25 bp, Homo sapien
tcattccaaacctccgaacaggagg

SEQ ID NO: 1052683 - DNA, 25 bp, Homo sapien
atagatgggctacagggtcctttca

SEQ ID NO: 1052684 - DNA, 25 bp, Homo sapien
caggcagtgagcacctaggatgtaa

SEQ ID NO: 1052685 - DNA, 25 bp, Homo sapien
cagttgatcactatgtatttggagg

SEQ ID NO: 1052686 - DNA, 25 bp, Homo sapien
gattgtcacagaatccagagcagcg

SEQ ID NO: 1052687 - DNA, 25 bp, Homo sapien
gagaagttaaacatcctgatcctgc

SEQ ID NO: 1052688 - DNA, 25 bp, Homo sapien
gaaagataagctgcagattgtcaca

SEQ ID NO: 1052689 - DNA, 25 bp, Homo sapien
cactagtatctcacatatgtatcca

SEQ ID NO: 1052690 - DNA, 25 bp, Homo sapien
catccactagtatctcacatatgta

SEQ ID NO: 1052691 - DNA, 25 bp, Homo sapien
acctgttcatccactagtatctcac

SEQ ID NO: 1052692 - DNA, 25 bp, Homo sapien
tgttcatccactagtatctcacata

SEQ ID NO: 1052693 - DNA, 25 bp, Homo sapien
cacacaggcagggctaggactggaa

SEQ ID NO: 1052694 - DNA, 25 bp, Homo sapien
tgcataagtgcacacaggcagggct

SEQ ID NO: 1052695 - DNA, 25 bp, Homo sapien
cacaggcagggctaggactggaacc

SEQ ID NO: 1052696 - DNA, 25 bp, Homo sapien
gtgcacacaggcagggctaggactg

SEQ ID NO: 1052697 - DNA, 25 bp, Homo sapien
gtctcttgctccgtggctacagcct

SEQ ID NO: 1052698 - DNA, 25 bp, Homo sapien
tcccagatatgcctgccaacatctg

SEQ ID NO: 1052699 - DNA, 25 bp, Homo sapien
gcctgccaacatctgacaagcatca

SEQ ID NO: 1052700 - DNA, 25 bp, Homo sapien
gacaagcatcagtctcttgctccgt

SEQ ID NO: 1052701 - DNA, 25 bp, Homo sapien
tggagagaacaagggctgaactttt

SEQ ID NO: 1052702 - DNA, 25 bp, Homo sapien
ccccacttgcctcccccgattccag

SEQ ID NO: 1052703 - DNA, 25 bp, Homo sapien
cccacttgcctcccccgattccagc

SEQ ID NO: 1052704 - DNA, 25 bp, Homo sapien
gccccacttgcctcccccgattcca

SEQ ID NO: 1052705 - DNA, 25 bp, Homo sapien
gtgggggttcaggagacatgtcagc

SEQ ID NO: 1052706 - DNA, 25 bp, Homo sapien
gggggttcaggagacatgtcagcac

SEQ ID NO: 1052707 - DNA, 25 bp, Homo sapien
cctgtgggggttcaggagacatgtc

SEQ ID NO: 1052708 - DNA, 25 bp, Homo sapien
tggcctgtgggggttcaggagacat

SEQ ID NO: 1052709 - DNA, 25 bp, Homo sapien
gctcagcagtcgctgtagtggagtc

SEQ ID NO: 1052710 - DNA, 25 bp, Homo sapien
ccagctcagcagtcgctgtagtgga

SEQ ID NO: 1052711 - DNA, 25 bp, Homo sapien
gcagtcgctgtagtggagtccatta

SEQ ID NO: 1052712 - DNA, 25 bp, Homo sapien
gctgtagtggagtccattagcgttt

SEQ ID NO: 1052713 - DNA, 25 bp, Homo sapien
ctgcgtgagtgcccagtacactcag

SEQ ID NO: 1052714 - DNA, 25 bp, Homo sapien
tgcgtgagtgcccagtacactcagc

SEQ ID NO: 1052715 - DNA, 25 bp, Homo sapien
ctggggcatcgtctctggtctcctc

SEQ ID NO: 1052716 - DNA, 25 bp, Homo sapien
cttttgcacacttctgtgccctcct

SEQ ID NO: 1052717 - DNA, 25 bp, Homo sapien
gcattcaccaactttcccgagggcc

SEQ ID NO: 1052718 - DNA, 25 bp, Homo sapien
cattcaccaactttcccgagggcct

SEQ ID NO: 1052719 - DNA, 25 bp, Homo sapien
gcccttgggaactctcggtctgatg

SEQ ID NO: 1052720 - DNA, 25 bp, Homo sapien
ctcaatgaacgcctaggatgatggg

SEQ ID NO: 1052721 - DNA, 25 bp, Homo sapien
tcagctgctaacatttcctcttggg

SEQ ID NO: 1052722 - DNA, 25 bp, Homo sapien
agagagatgctaagcctcaccgctg

SEQ ID NO: 1052723 - DNA, 25 bp, Homo sapien
tgtcaggggtacactaatctgataa

SEQ ID NO: 1052724 - DNA, 25 bp, Homo sapien
aggggtacactaatctgataaagga

SEQ ID NO: 1052725 - DNA, 25 bp, Homo sapien
tcaggggtacactaatctgataaag

SEQ ID NO: 1052726 - DNA, 25 bp, Homo sapien
acactaatctgataaaggagacagg

SEQ ID NO: 1052727 - DNA, 25 bp, Homo sapien
tgctttgcacatgcagcgcccgatg

SEQ ID NO: 1052728 - DNA, 25 bp, Homo sapien
gcacttgcggtagaagacacgcacg

SEQ ID NO: 1052729 - DNA, 25 bp, Homo sapien
tctcgtcggctgcaatggtatccac

SEQ ID NO: 1052730 - DNA, 25 bp, Homo sapien
tgttgattttcatgacgcggccacc

SEQ ID NO: 1052731 - DNA, 25 bp, Homo sapien
catttgcaggggcacgtgccccacc

SEQ ID NO: 1052732 - DNA, 25 bp, Homo sapien
aaccctggccctagagtgcctcatg

SEQ ID NO: 1052733 - DNA, 25 bp, Homo sapien
gattatctggtataccacctgcggc

SEQ ID NO: 1052734 - DNA, 25 bp, Homo sapien
tcagaaagtgctatattcaagtgcc

SEQ ID NO: 1052735 - DNA, 25 bp, Homo sapien
tccctctaagaagctgaacgatggt

SEQ ID NO: 1052736 - DNA, 25 bp, Homo sapien
aatcatgctcactgcggaactgcct

SEQ ID NO: 1052737 - DNA, 25 bp, Homo sapien
taaaaatcccattacgtccgatagc

SEQ ID NO: 1052738 - DNA, 25 bp, Homo sapien
gatagcatcgcagcaatcatgctca

SEQ ID NO: 1052739 - DNA, 25 bp, Homo sapien
gatccctcgcagatgcgggttggcc

SEQ ID NO: 1052740 - DNA, 25 bp, Homo sapien
ccacaatgatgttatagctctgaca

SEQ ID NO: 1052741 - DNA, 25 bp, Homo sapien
tacggtacatttattctatgggatc

SEQ ID NO: 1052742 - DNA, 25 bp, Homo sapien
cctaagagcttctccacaatgatgt

SEQ ID NO: 1052743 - DNA, 25 bp, Homo sapien
catgatatgcaaagatgtccacaaa

SEQ ID NO: 1052744 - DNA, 25 bp, Homo sapien
tactgcaagcaatctatctgtcaat

SEQ ID NO: 1052745 - DNA, 25 bp, Homo sapien
gaaatactgcaagcaatctatctgt

SEQ ID NO: 1052746 - DNA, 25 bp, Homo sapien
gatagtgaaatactgcaagcaatct

SEQ ID NO: 1052747 - DNA, 25 bp, Homo sapien
caagcaatctatctgtcaatcaaca

SEQ ID NO: 1052748 - DNA, 25 bp, Homo sapien
ggcttaaactgttaaatgcataaac

SEQ ID NO: 1052749 - DNA, 25 bp, Homo sapien
tgcataaacttcctcaatcaacggg

SEQ ID NO: 1052750 - DNA, 25 bp, Homo sapien
ttcctcaatcaacgggcctctcttg

SEQ ID NO: 1052751 - DNA, 25 bp, Homo sapien
actgttaaatgcataaacttcctca

SEQ ID NO: 1052752 - DNA, 25 bp, Homo sapien
caccctgagaaaccatccatcctgc

SEQ ID NO: 1052753 - DNA, 25 bp, Homo sapien
tgagaaaccatccatcctgcggccg

SEQ ID NO: 1052754 - DNA, 25 bp, Homo sapien
cctgagaaaccatccatcctgcggc

SEQ ID NO: 1052755 - DNA, 25 bp, Homo sapien
agaaaccatccatcctgcggccgga

SEQ ID NO: 1052756 - DNA, 25 bp, Homo sapien
tgtgctcggacttgcttaaaactga

SEQ ID NO: 1052757 - DNA, 25 bp, Homo sapien
acttgcttaaaactgaaggctcatc

SEQ ID NO: 1052758 - DNA, 25 bp, Homo sapien
tcggacttgcttaaaactgaaggct

SEQ ID NO: 1052759 - DNA, 25 bp, Homo sapien
ctgctgtgtgctcggacttgcttaa

SEQ ID NO: 1052760 - DNA, 25 bp, Homo sapien
tccagggccacataggtagcagatg

SEQ ID NO: 1052761 - DNA, 25 bp, Homo sapien
tattcaatcaatgcaccctggctgg

SEQ ID NO: 1052762 - DNA, 25 bp, Homo sapien
tcaaggcttgggtaggtgagtcacc

SEQ ID NO: 1052763 - DNA, 25 bp, Homo sapien
tgttaggcacattctacagacggtg

SEQ ID NO: 1052764 - DNA, 25 bp, Homo sapien
cttgcagcttggctgagcgtgctcg

SEQ ID NO: 1052765 - DNA, 25 bp, Homo sapien
aacacgcagaggtcagcagaaacgc

SEQ ID NO: 1052766 - DNA, 25 bp, Homo sapien
tgtccgctcctctaattggattccc

SEQ ID NO: 1052767 - DNA, 25 bp, Homo sapien
tctgggagataaagagaggcattct

SEQ ID NO: 1052768 - DNA, 25 bp, Homo sapien
tgaacatccagtggctgccaactcc

SEQ ID NO: 1052769 - DNA, 25 bp, Homo sapien
gaagatcctgaacatccagtggctg

SEQ ID NO: 1052770 - DNA, 25 bp, Homo sapien
cagtggctgccaactccacagcggc

SEQ ID NO: 1052771 - DNA, 25 bp, Homo sapien
gtggctgccaactccacagcggctg

SEQ ID NO: 1052772 - DNA, 25 bp, Homo sapien
gagttggcctcgggccccttctgga

SEQ ID NO: 1052773 - DNA, 25 bp, Homo sapien
cagctcccaggagttggcctcgggc

SEQ ID NO: 1052774 - DNA, 25 bp, Homo sapien
gctcccaggagttggcctcgggccc

SEQ ID NO: 1052775 - DNA, 25 bp, Homo sapien
caggagttggcctcgggccccttct

SEQ ID NO: 1052776 - DNA, 25 bp, Homo sapien
tctgcaaaatgtgagcattggactt

SEQ ID NO: 1052777 - DNA, 25 bp, Homo sapien
ttgactctgcggtgacacgtcagtt

SEQ ID NO: 1052778 - DNA, 25 bp, Homo sapien
gactctgcggtgacacgtcagtttc

SEQ ID NO: 1052779 - DNA, 25 bp, Homo sapien
gagcattggacttgactctgcggtg

SEQ ID NO: 1052780 - DNA, 25 bp, Homo sapien
gaaatatgaacagcccttctccggg

SEQ ID NO: 1052781 - DNA, 25 bp, Homo sapien
ctggaaccatcgcactccaagatgt

SEQ ID NO: 1052782 - DNA, 25 bp, Homo sapien
atcgcactccaagatgttaattagc

SEQ ID NO: 1052783 - DNA, 25 bp, Homo sapien
tgacactggaaccatcgcactccaa

SEQ ID NO: 1052784 - DNA, 25 bp, Homo sapien
ggttgatccctgacctagcagtagc

SEQ ID NO: 1052785 - DNA, 25 bp, Homo sapien
tggttgatccctgacctagcagtag

SEQ ID NO: 1052786 - DNA, 25 bp, Homo sapien
gttgatccctgacctagcagtagcc

SEQ ID NO: 1052787 - DNA, 25 bp, Homo sapien
ctggttgatccctgacctagcagta

SEQ ID NO: 1052788 - DNA, 25 bp, Homo sapien
tgggtaaacaagagccagcccttcc

SEQ ID NO: 1052789 - DNA, 25 bp, Homo sapien
gctgccggtctgttgctaagaattc

SEQ ID NO: 1052790 - DNA, 25 bp, Homo sapien
aaatggctgaaacttggcgttcacc

SEQ ID NO: 1052791 - DNA, 25 bp, Homo sapien
cctgggttcacaccagctgggtaaa

SEQ ID NO: 1052792 - DNA, 25 bp, Homo sapien
tcaaacccaggtttttcagtgccaa

SEQ ID NO: 1052793 - DNA, 25 bp, Homo sapien
taatgcctatactattccctgggtc

SEQ ID NO: 1052794 - DNA, 25 bp, Homo sapien
gcatgggatctgctagggtcacaca

SEQ ID NO: 1052795 - DNA, 25 bp, Homo sapien
gaacatggatgtccagagagggcat

SEQ ID NO: 1052796 - DNA, 25 bp, Homo sapien
ctgaggcatctggaccctatccagg

SEQ ID NO: 1052797 - DNA, 25 bp, Homo sapien
gatgccttctaatgtcagttcatag

SEQ ID NO: 1052798 - DNA, 25 bp, Homo sapien
tggtggccctgctacgatgccttct

SEQ ID NO: 1052799 - DNA, 25 bp, Homo sapien
tctaatgtcagttcatagatgtcct

SEQ ID NO: 1052800 - DNA, 25 bp, Homo sapien
gctacgatgccttctaatgtcagtt

SEQ ID NO: 1052801 - DNA, 25 bp, Homo sapien
gaacaggagccacttgaatagggta

SEQ ID NO: 1052802 - DNA, 25 bp, Homo sapien
cattttaaggaggtccaccgagcga

SEQ ID NO: 1052803 - DNA, 25 bp, Homo sapien
caccgagcgatagtggacaggccat

SEQ ID NO: 1052804 - DNA, 25 bp, Homo sapien
tctggaggcctacttgtcctggaaa

SEQ ID NO: 1052805 - DNA, 25 bp, Homo sapien
ctgcttggtgagctcggttaaggca

SEQ ID NO: 1052806 - DNA, 25 bp, Homo sapien
gcttggtgagctcggttaaggcaac

SEQ ID NO: 1052807 - DNA, 25 bp, Homo sapien
tttcagtgtgggttctgcaggcctg

SEQ ID NO: 1052808 - DNA, 25 bp, Homo sapien
tgagctcggttaaggcaacaaaccc

SEQ ID NO: 1052809 - DNA, 25 bp, Homo sapien
gcagcaccactgctggaaaatctca

SEQ ID NO: 1052810 - DNA, 25 bp, Homo sapien
cagcaccactgctggaaaatctcat

SEQ ID NO: 1052811 - DNA, 25 bp, Homo sapien
tgcagcaccactgctggaaaatctc

SEQ ID NO: 1052812 - DNA, 25 bp, Homo sapien
catgcagcaccactgctggaaaatc

SEQ ID NO: 1052813 - DNA, 25 bp, Homo sapien
ggctgttgatgggacagtgggtaca

SEQ ID NO: 1052814 - DNA, 25 bp, Homo sapien
gtagtagccattgcggcagacacag

SEQ ID NO: 1052815 - DNA, 25 bp, Homo sapien
ggtacaggcctcatccccttggttg

SEQ ID NO: 1052816 - DNA, 25 bp, Homo sapien
agtggtccggctgttgatgggacag

SEQ ID NO: 1052817 - DNA, 25 bp, Homo sapien
cctagctggcgtggtgcgtactgta

SEQ ID NO: 1052818 - DNA, 25 bp, Homo sapien
actgtacattgtccccgcagcgggt

SEQ ID NO: 1052819 - DNA, 25 bp, Homo sapien
gttcacagcctggatctcgaaggtg

SEQ ID NO: 1052820 - DNA, 25 bp, Homo sapien
taaatgcgtggctcggtcaggccta

SEQ ID NO: 1052821 - DNA, 25 bp, Homo sapien
catcctcaagggcagatactgtgtc

SEQ ID NO: 1052822 - DNA, 25 bp, Homo sapien
tcaaccacgggaactagaaggccat

SEQ ID NO: 1052823 - DNA, 25 bp, Homo sapien
tagtaggacctagcataaatgactc

SEQ ID NO: 1052824 - DNA, 25 bp, Homo sapien
catgtgccaagactctgcgtcaggg

SEQ ID NO: 1052825 - DNA, 25 bp, Homo sapien
tgcatgatggacactgccgatggag

SEQ ID NO: 1052826 - DNA, 25 bp, Homo sapien
tactgcagctcatagtccaggatca

SEQ ID NO: 1052827 - DNA, 25 bp, Homo sapien
ggtaatgctgtccacggtgcggctc

SEQ ID NO: 1052828 - DNA, 25 bp, Homo sapien
ggtgcggctcacctgatgcatgatg

SEQ ID NO: 1052829 - DNA, 25 bp, Homo sapien
ccagtgcgtctcatcttgcggtggg

SEQ ID NO: 1052830 - DNA, 25 bp, Homo sapien
gatgtgactgttgcatttcactgag

SEQ ID NO: 1052831 - DNA, 25 bp, Homo sapien
actgagattgctgggtgtatcctcc

SEQ ID NO: 1052832 - DNA, 25 bp, Homo sapien
agtttttcccaacatcaagccactg

SEQ ID NO: 1052833 - DNA, 25 bp, Homo sapien
gttggtcaggcccgtgatccaccca

SEQ ID NO: 1052834 - DNA, 25 bp, Homo sapien
atgttggtcaggcccgtgatccacc

SEQ ID NO: 1052835 - DNA, 25 bp, Homo sapien
tggtcaggcccgtgatccacccacc

SEQ ID NO: 1052836 - DNA, 25 bp, Homo sapien
catgttggtcaggcccgtgatccac

SEQ ID NO: 1052837 - DNA, 25 bp, Homo sapien
tggaggttaagatcacaagctggag

SEQ ID NO: 1052838 - DNA, 25 bp, Homo sapien
acaggctttatagcatggaggttaa

SEQ ID NO: 1052839 - DNA, 25 bp, Homo sapien
taagatcacaagctggagccagact

SEQ ID NO: 1052840 - DNA, 25 bp, Homo sapien
tggctctagtatatatgacctctgt

SEQ ID NO: 1052841 - DNA, 25 bp, Homo sapien
ttttatggctgtggcgttgtactca

SEQ ID NO: 1052842 - DNA, 25 bp, Homo sapien
gaagacatagatggcgccggctttg

SEQ ID NO: 1052843 - DNA, 25 bp, Homo sapien
gaagtacatcttgccgctgtagcgc

SEQ ID NO: 1052844 - DNA, 25 bp, Homo sapien
ttgaggccctgcacggtgaccgtgt

SEQ ID NO: 1052845 - DNA, 25 bp, Homo sapien
aggagccgatgatgagtggcaactt

SEQ ID NO: 1052846 - DNA, 25 bp, Homo sapien
ccagcggccgaggagccgatgatga

SEQ ID NO: 1052847 - DNA, 25 bp, Homo sapien
tcctggatgcttgtctggtactcgg

SEQ ID NO: 1052848 - DNA, 25 bp, Homo sapien
gatgagtggcaacttctcctggatg

SEQ ID NO: 1052849 - DNA, 25 bp, Homo sapien
tgtactccgagtcagcacgctcaaa

SEQ ID NO: 1052850 - DNA, 25 bp, Homo sapien
gcttgtccgtgtactccgagtcagc

SEQ ID NO: 1052851 - DNA, 25 bp, Homo sapien
agtgttgcagcttgtccgtgtactc

SEQ ID NO: 1052852 - DNA, 25 bp, Homo sapien
cactggtgtagtgttgcagcttgtc

SEQ ID NO: 1052853 - DNA, 25 bp, Homo sapien
cattcttacgtatccacatccagtc

SEQ ID NO: 1052854 - DNA, 25 bp, Homo sapien
tcctgcagcaaatctagtggctctg

SEQ ID NO: 1052855 - DNA, 25 bp, Homo sapien
tcaaaccatgtcttacccagaggct

SEQ ID NO: 1052856 - DNA, 25 bp, Homo sapien
gtacctggagctcctagactctgct

SEQ ID NO: 1052857 - DNA, 25 bp, Homo sapien
ggtcctcgtaggtgaaaggatcgat

SEQ ID NO: 1052858 - DNA, 25 bp, Homo sapien
taggtgaaaggatcgatgtagatct

SEQ ID NO: 1052859 - DNA, 25 bp, Homo sapien
gctccgatcacctgctcaattttga

SEQ ID NO: 1052860 - DNA, 25 bp, Homo sapien
ctgctccgatcacctgctcaatttt

SEQ ID NO: 1052861 - DNA, 25 bp, Homo sapien
tgcttctccgtgtagcccgacttga

SEQ ID NO: 1052862 - DNA, 25 bp, Homo sapien
ccctccaggtggatgacgttgggat

SEQ ID NO: 1052863 - DNA, 25 bp, Homo sapien
gaactcggtgatgatcatcacaggt

SEQ ID NO: 1052864 - DNA, 25 bp, Homo sapien
caggtgtgctcttggtcacgacacc

SEQ ID NO: 1052865 - DNA, 25 bp, Homo sapien
tcatgggcccctggccctcttggct

SEQ ID NO: 1052866 - DNA, 25 bp, Homo sapien
catgggcccctggccctcttggctt

SEQ ID NO: 1052867 - DNA, 25 bp, Homo sapien
tgggcccctggccctcttggcttcc

SEQ ID NO: 1052868 - DNA, 25 bp, Homo sapien
atgggcccctggccctcttggcttc

SEQ ID NO: 1052869 - DNA, 25 bp, Homo sapien
gagtaaacagaagagcaggcatcag

SEQ ID NO: 1052870 - DNA, 25 bp, Homo sapien
ctgaggtatcgtcctctagaaagcg

SEQ ID NO: 1052871 - DNA, 25 bp, Homo sapien
agcgtgagagcccaaagtccgacac

SEQ ID NO: 1052872 - DNA, 25 bp, Homo sapien
gggtctgaggtatcgtcctctagaa

SEQ ID NO: 1052873 - DNA, 25 bp, Homo sapien
aaagcgtgagagcccaaagtccgac

SEQ ID NO: 1052874 - DNA, 25 bp, Homo sapien
tgcacccatctctgggctctttgtc

SEQ ID NO: 1052875 - DNA, 25 bp, Homo sapien
ttgcacccatctctgggctctttgt

SEQ ID NO: 1052876 - DNA, 25 bp, Homo sapien
agacagaaagaggagggtttgtggg

SEQ ID NO: 1052877 - DNA, 25 bp, Homo sapien
ggagacagaaagaggagggtttgtg

SEQ ID NO: 1052878 - DNA, 25 bp, Homo sapien
acagaaagaggagggtttgtgggtg

SEQ ID NO: 1052879 - DNA, 25 bp, Homo sapien
ctgggagacagaaagaggagggttt

SEQ ID NO: 1052880 - DNA, 25 bp, Homo sapien
tggccgaggtgaacttccggtactg

SEQ ID NO: 1052881 - DNA, 25 bp, Homo sapien
aacttccggtactggatggcttccg

SEQ ID NO: 1052882 - DNA, 25 bp, Homo sapien
atgacaatgccgtagctccacacat

SEQ ID NO: 1052883 - DNA, 25 bp, Homo sapien
gctccacacatcactggccgaggtg

SEQ ID NO: 1052884 - DNA, 25 bp, Homo sapien
gcggatcatcttgtctagcgtgttg

SEQ ID NO: 1052885 - DNA, 25 bp, Homo sapien
gcatgagttggtgcagggcgctcgg

SEQ ID NO: 1052886 - DNA, 25 bp, Homo sapien
ctcgggcagtccatgggcggtggca

SEQ ID NO: 1052887 - DNA, 25 bp, Homo sapien
caatttggccgaacttgggccggtg

SEQ ID NO: 1052888 - DNA, 25 bp, Homo sapien
tcgtccaccgtgttaaagctggtgt

SEQ ID NO: 1052889 - DNA, 25 bp, Homo sapien
catcatctgagacacgacgtcaaag

SEQ ID NO: 1052890 - DNA, 25 bp, Homo sapien
cgtcaaaggaggtgaagccggcatt

SEQ ID NO: 1052891 - DNA, 25 bp, Homo sapien
ccggcattggcgaagctctccttgt

SEQ ID NO: 1052892 - DNA, 25 bp, Homo sapien
caaagtgaccccaacccggagaatg

SEQ ID NO: 1052893 - DNA, 25 bp, Homo sapien
tggtggccagccaaagtgaccccaa

SEQ ID NO: 1052894 - DNA, 25 bp, Homo sapien
cagccaaagtgaccccaacccggag

SEQ ID NO: 1052895 - DNA, 25 bp, Homo sapien
tggccagccaaagtgaccccaaccc

SEQ ID NO: 1052896 - DNA, 25 bp, Homo sapien
tctgcgcccgcatcacctggatact

SEQ ID NO: 1052897 - DNA, 25 bp, Homo sapien
tgaatctggttcatctgcgcccgca

SEQ ID NO: 1052898 - DNA, 25 bp, Homo sapien
atctggttcatctgcgcccgcatca

SEQ ID NO: 1052899 - DNA, 25 bp, Homo sapien
atctgcgcccgcatcacctggatac

SEQ ID NO: 1052900 - DNA, 25 bp, Homo sapien
ggaagaggtgagccgaggcaggtga

SEQ ID NO: 1052901 - DNA, 25 bp, Homo sapien
gaacagtcattgctttccttatgag

SEQ ID NO: 1052902 - DNA, 25 bp, Homo sapien
tcgtggctggcaccgcttggttctt

SEQ ID NO: 1052903 - DNA, 25 bp, Homo sapien
tgcatgttttcttggtgacgtctcg

SEQ ID NO: 1052904 - DNA, 25 bp, Homo sapien
tccgtcgtttgagttgcatgttttc

SEQ ID NO: 1052905 - DNA, 25 bp, Homo sapien
aggatcaacccttctcagcggcagt

SEQ ID NO: 1052906 - DNA, 25 bp, Homo sapien
aaaagcccctttcagccctgtgagc

SEQ ID NO: 1052907 - DNA, 25 bp, Homo sapien
gattggacacatcgcatgaatctcc

SEQ ID NO: 1052908 - DNA, 25 bp, Homo sapien
gctgtgcgcgtgatatgtacctgga

SEQ ID NO: 1052909 - DNA, 25 bp, Homo sapien
taaaatctcgcccttggtgtattgc

SEQ ID NO: 1052910 - DNA, 25 bp, Homo sapien
gaagtgggcaaggacttccagccct

SEQ ID NO: 1052911 - DNA, 25 bp, Homo sapien
tgtccctttcatcaacagtcctgga

SEQ ID NO: 1052912 - DNA, 25 bp, Homo sapien
tatttgcctgggaagtactagatag

SEQ ID NO: 1052913 - DNA, 25 bp, Homo sapien
gaaaactgggttttgaccatctgag

SEQ ID NO: 1052914 - DNA, 25 bp, Homo sapien
atcacagtgaatgatccgggtcctg

SEQ ID NO: 1052915 - DNA, 25 bp, Homo sapien
gaagaggcatgcttgcccgtgtctc

SEQ ID NO: 1052916 - DNA, 25 bp, Homo sapien
ctggcctccgatgcagcctggttta

SEQ ID NO: 1052917 - DNA, 25 bp, Homo sapien
aagcgtttatttccattcaattcac

SEQ ID NO: 1052918 - DNA, 25 bp, Homo sapien
ttcactaactgattgctctgcttgg

SEQ ID NO: 1052919 - DNA, 25 bp, Homo sapien
gagtctgtggccagatccctagact

SEQ ID NO: 1052920 - DNA, 25 bp, Homo sapien
gttcacaggagggagtctgtggcca

SEQ ID NO: 1052921 - DNA, 25 bp, Homo sapien
ggagctgtcgttctccatgtgtttt

SEQ ID NO: 1052922 - DNA, 25 bp, Homo sapien
cccagggcatcgaaggctgagttct

SEQ ID NO: 1052923 - DNA, 25 bp, Homo sapien
cacgtggagctgtcgttctccatgt

SEQ ID NO: 1052924 - DNA, 25 bp, Homo sapien
ctgtgcttttgacaagccagggcca

SEQ ID NO: 1052925 - DNA, 25 bp, Homo sapien
ctcttccgagtgcactctcgtcaat

SEQ ID NO: 1052926 - DNA, 25 bp, Homo sapien
gagtgcactctcgtcaattctctgc

SEQ ID NO: 1052927 - DNA, 25 bp, Homo sapien
actcagaccctcttccgagtgcact

SEQ ID NO: 1052928 - DNA, 25 bp, Homo sapien
actctcgtcaattctctgctactta

SEQ ID NO: 1052929 - DNA, 25 bp, Homo sapien
taagaatcaggtagcacaagaccca

SEQ ID NO: 1052930 - DNA, 25 bp, Homo sapien
tgttccaagcagctgaagtgactct

SEQ ID NO: 1052931 - DNA, 25 bp, Homo sapien
taattgagcacggtagaggagacat

SEQ ID NO: 1052932 - DNA, 25 bp, Homo sapien
tcctggaataaatgagggccgctcc

SEQ ID NO: 1052933 - DNA, 25 bp, Homo sapien
tctaccagggaaagacgttctgcac

SEQ ID NO: 1052934 - DNA, 25 bp, Homo sapien
tgtataaaaagttgggcacggtgcc

SEQ ID NO: 1052935 - DNA, 25 bp, Homo sapien
tcatgggtcctaatctgcgtctggg

SEQ ID NO: 1052936 - DNA, 25 bp, Homo sapien
gaagctatgtcccaaatgtcagagg

SEQ ID NO: 1052937 - DNA, 25 bp, Homo sapien
cccccggggatctgggatttgactg

SEQ ID NO: 1052938 - DNA, 25 bp, Homo sapien
gaggccacgctcaaagagggtgcca

SEQ ID NO: 1052939 - DNA, 25 bp, Homo sapien
agggaggccacgctcaaagagggtg

SEQ ID NO: 1052940 - DNA, 25 bp, Homo sapien
aggccacgctcaaagagggtgccac

SEQ ID NO: 1052941 - DNA, 25 bp, Homo sapien
cataccctggttgagagctccggtc

SEQ ID NO: 1052942 - DNA, 25 bp, Homo sapien
gggttctgggaaaccctgccagaca

SEQ ID NO: 1052943 - DNA, 25 bp, Homo sapien
tccggtctgcatagctcaggctggg

SEQ ID NO: 1052944 - DNA, 25 bp, Homo sapien
caggtctgacccacggcggttggaa

SEQ ID NO: 1052945 - DNA, 25 bp, Homo sapien
tagacccctgtgagattgtactgga

SEQ ID NO: 1052946 - DNA, 25 bp, Homo sapien
aaaggggatccaggcttctcagagg

SEQ ID NO: 1052947 - DNA, 25 bp, Homo sapien
gagagtctaaggaaagcccagtttg

SEQ ID NO: 1052948 - DNA, 25 bp, Homo sapien
ctaaggaaagcccagtttggtccag

SEQ ID NO: 1052949 - DNA, 25 bp, Homo sapien
ctcgcagcaagtgtgattggtagag

SEQ ID NO: 1052950 - DNA, 25 bp, Homo sapien
ggcagggctgatccaggcagacact

SEQ ID NO: 1052951 - DNA, 25 bp, Homo sapien
aggaggtgctcgcagcaagtgtgat

SEQ ID NO: 1052952 - DNA, 25 bp, Homo sapien
agggctgatccaggcagacactttg

SEQ ID NO: 1052953 - DNA, 25 bp, Homo sapien
agactttgatggcatggaggatgga

SEQ ID NO: 1052954 - DNA, 25 bp, Homo sapien
catttcactggctatcaagatatca

SEQ ID NO: 1052955 - DNA, 25 bp, Homo sapien
gaggatggagttaccctccatttca

SEQ ID NO: 1052956 - DNA, 25 bp, Homo sapien
ccatttcactggctatcaagatatc

SEQ ID NO: 1052957 - DNA, 25 bp, Homo sapien
ttcttcacgtgatccctaattttct

SEQ ID NO: 1052958 - DNA, 25 bp, Homo sapien
tcttcacgtgatccctaattttctc

SEQ ID NO: 1052959 - DNA, 25 bp, Homo sapien
cttcacgtgatccctaattttctcc

SEQ ID NO: 1052960 - DNA, 25 bp, Homo sapien
agctgttaaatcaggaccaccccag

SEQ ID NO: 1052961 - DNA, 25 bp, Homo sapien
catggacgaacatagatacgtatct

SEQ ID NO: 1052962 - DNA, 25 bp, Homo sapien
catgctttggcaagagtaacaacta

SEQ ID NO: 1052963 - DNA, 25 bp, Homo sapien
tctacagcttcctcttaggtggtgc

SEQ ID NO: 1052964 - DNA, 25 bp, Homo sapien
cgctccgtgggtccgaaaagccttg

SEQ ID NO: 1052965 - DNA, 25 bp, Homo sapien
cttcttcccagataacatctcgggc

SEQ ID NO: 1052966 - DNA, 25 bp, Homo sapien
tcgctctgtcgctccgtgggtccga

SEQ ID NO: 1052967 - DNA, 25 bp, Homo sapien
gcctccgtcccggttgctgccgctg

SEQ ID NO: 1052968 - DNA, 25 bp, Homo sapien
ccctccggagtctctgctattccag

SEQ ID NO: 1052969 - DNA, 25 bp, Homo sapien
ggccacctcagacccgttctcggag

SEQ ID NO: 1052970 - DNA, 25 bp, Homo sapien
cttcgcccgcttgcgccggctggtc

SEQ ID NO: 1052971 - DNA, 25 bp, Homo sapien
ggtcgcagacccaggcacgacagta

SEQ ID NO: 1052972 - DNA, 25 bp, Homo sapien
tcaatcagcagcttcctcatctgca

SEQ ID NO: 1052973 - DNA, 25 bp, Homo sapien
tcagcagcttcctcatctgcaaaat

SEQ ID NO: 1052974 - DNA, 25 bp, Homo sapien
aatcagcagcttcctcatctgcaaa

SEQ ID NO: 1052975 - DNA, 25 bp, Homo sapien
cagcagcttcctcatctgcaaaatt

SEQ ID NO: 1052976 - DNA, 25 bp, Homo sapien
ttcttctgaataatactcatcttct

SEQ ID NO: 1052977 - DNA, 25 bp, Homo sapien
cttctgagaggttggccaagctttc

SEQ ID NO: 1052978 - DNA, 25 bp, Homo sapien
tctcttcttctgaataatactcatc

SEQ ID NO: 1052979 - DNA, 25 bp, Homo sapien
tctgagaggttggccaagctttcat

SEQ ID NO: 1052980 - DNA, 25 bp, Homo sapien
gtctccataccctccagaactgtcg

SEQ ID NO: 1052981 - DNA, 25 bp, Homo sapien
ccagaactgtcgtcttgaagtcctc

SEQ ID NO: 1052982 - DNA, 25 bp, Homo sapien
gatgcttggccgtctccataccctc

SEQ ID NO: 1052983 - DNA, 25 bp, Homo sapien
cataccctccagaactgtcgtcttg

SEQ ID NO: 1052984 - DNA, 25 bp, Homo sapien
ttggcggctcttgctactaagtggc

SEQ ID NO: 1052985 - DNA, 25 bp, Homo sapien
cggctcttgctactaagtggcaagc

SEQ ID NO: 1052986 - DNA, 25 bp, Homo sapien
ggcggctcttgctactaagtggcaa

SEQ ID NO: 1052987 - DNA, 25 bp, Homo sapien
ctaagtggcaagcatctaatgccac

SEQ ID NO: 1052988 - DNA, 25 bp, Homo sapien
ctgagctcaagtagctgggctgcct

SEQ ID NO: 1052989 - DNA, 25 bp, Homo sapien
gagctcaagcgatacaccatctcgg

SEQ ID NO: 1052990 - DNA, 25 bp, Homo sapien
caggtacaagccactatgtctaatt

SEQ ID NO: 1052991 - DNA, 25 bp, Homo sapien
tgagctcaagtagctgggctgcctc

SEQ ID NO: 1052992 - DNA, 25 bp, Homo sapien
tccccatgttggctagactagtctg

SEQ ID NO: 1052993 - DNA, 25 bp, Homo sapien
cccatgttggctagactagtctgga

SEQ ID NO: 1052994 - DNA, 25 bp, Homo sapien
agtctggaactcctggcctcaagtg

SEQ ID NO: 1052995 - DNA, 25 bp, Homo sapien
agtgatccacccacctcagcctccc

SEQ ID NO: 1052996 - DNA, 25 bp, Homo sapien
ttgagaagtcatccggtcatgagga

SEQ ID NO: 1052997 - DNA, 25 bp, Homo sapien
tctgggtctgttgtggtccactgat

SEQ ID NO: 1052998 - DNA, 25 bp, Homo sapien
tgtggtccactgataatatctggaa

SEQ ID NO: 1052999 - DNA, 25 bp, Homo sapien
gctgcttcttgagaagtcatccggt

SEQ ID NO: 1053000 - DNA, 25 bp, Homo sapien
cttctaattgttggagagtagcctc

SEQ ID NO: 1053001 - DNA, 25 bp, Homo sapien
gaatctttggattatccaaccacaa

SEQ ID NO: 1053002 - DNA, 25 bp, Homo sapien
tgttggagagtagcctcaaatgtca

SEQ ID NO: 1053003 - DNA, 25 bp, Homo sapien
tgttataaggtgcttctaattgttg

SEQ ID NO: 1053004 - DNA, 25 bp, Homo sapien
gaccatgacgctctaaataactgtg

SEQ ID NO: 1053005 - DNA, 25 bp, Homo sapien
atagatgccgaagttgataagacca

SEQ ID NO: 1053006 - DNA, 25 bp, Homo sapien
gctctaaataactgtgaactcggtg

SEQ ID NO: 1053007 - DNA, 25 bp, Homo sapien
tgaactcggtggacaagcacagtat

SEQ ID NO: 1053008 - DNA, 25 bp, Homo sapien
gatataaaatacagtcctgaaaccg

SEQ ID NO: 1053009 - DNA, 25 bp, Homo sapien
gcacatttattaagagactatattt

SEQ ID NO: 1053010 - DNA, 25 bp, Homo sapien
tactaagtagctatcaaactagaaa

SEQ ID NO: 1053011 - DNA, 25 bp, Homo sapien
aataaaatcctaacgtcatcataga

SEQ ID NO: 1053012 - DNA, 25 bp, Homo sapien
tccaaaagtgtgacatccattccaa

SEQ ID NO: 1053013 - DNA, 25 bp, Homo sapien
gcctgagaccccagagcctataata

SEQ ID NO: 1053014 - DNA, 25 bp, Homo sapien
tccaaaactttgtaactgtcgagct

SEQ ID NO: 1053015 - DNA, 25 bp, Homo sapien
tgtaactgtcgagctgctgccaagc

SEQ ID NO: 1053016 - DNA, 25 bp, Homo sapien
ggctccaagatcagctacatagttt

SEQ ID NO: 1053017 - DNA, 25 bp, Homo sapien
caagacctgttaccaccatggctcc

SEQ ID NO: 1053018 - DNA, 25 bp, Homo sapien
gtttcctttgcgaaatgtggcaact

SEQ ID NO: 1053019 - DNA, 25 bp, Homo sapien
gaaatgtggcaactcgtccacccac

SEQ ID NO: 1053020 - DNA, 25 bp, Homo sapien
ctgaccacagccataggattccctc

SEQ ID NO: 1053021 - DNA, 25 bp, Homo sapien
ttgctgaccacagccataggattcc

SEQ ID NO: 1053022 - DNA, 25 bp, Homo sapien
gccagttccatatttacttgtttgc

SEQ ID NO: 1053023 - DNA, 25 bp, Homo sapien
gctgaccacagccataggattccct

SEQ ID NO: 1053024 - DNA, 25 bp, Homo sapien
gaggacattgaagtctagttgatga

SEQ ID NO: 1053025 - DNA, 25 bp, Homo sapien
gacacaggcttattattgaggacat

SEQ ID NO: 1053026 - DNA, 25 bp, Homo sapien
gcaaccggttaaactcttgctctac

SEQ ID NO: 1053027 - DNA, 25 bp, Homo sapien
taagatgtagcttctagcaaccggt

SEQ ID NO: 1053028 - DNA, 25 bp, Homo sapien
caatgttcaatctgctcatctttga

SEQ ID NO: 1053029 - DNA, 25 bp, Homo sapien
catttatcaataatgccacactgaa

SEQ ID NO: 1053030 - DNA, 25 bp, Homo sapien
aaacagtctctttcgttagtcatta

SEQ ID NO: 1053031 - DNA, 25 bp, Homo sapien
ctggacacccctgagccaaagggaa

SEQ ID NO: 1053032 - DNA, 25 bp, Homo sapien
tggaggaaaaaatctcggaaatgct

SEQ ID NO: 1053033 - DNA, 25 bp, Homo sapien
gaatcttaaggaaccattgttaatg

SEQ ID NO: 1053034 - DNA, 25 bp, Homo sapien
aatcttaaggaaccattgttaatgt

SEQ ID NO: 1053035 - DNA, 25 bp, Homo sapien
aggaaccattgttaatgttagcttt

SEQ ID NO: 1053036 - DNA, 25 bp, Homo sapien
taaggaaccattgttaatgttagct

SEQ ID NO: 1053037 - DNA, 25 bp, Homo sapien
gcctggtcctataatgtgtttttta

SEQ ID NO: 1053038 - DNA, 25 bp, Homo sapien
tgcctggtcctataatgtgtttttt

SEQ ID NO: 1053039 - DNA, 25 bp, Homo sapien
catgcctggtcctataatgtgtttt

SEQ ID NO: 1053040 - DNA, 25 bp, Homo sapien
accatgcctggtcctataatgtgtt

SEQ ID NO: 1053041 - DNA, 25 bp, Homo sapien
ttgcatagggcggtcagatccctgt

SEQ ID NO: 1053042 - DNA, 25 bp, Homo sapien
ctcggcagtaatatctctgggtggc

SEQ ID NO: 1053043 - DNA, 25 bp, Homo sapien
tgtattgctgatggagttctttaat

SEQ ID NO: 1053044 - DNA, 25 bp, Homo sapien
tctgggtggctttacttcagatgct

SEQ ID NO: 1053045 - DNA, 25 bp, Homo sapien
ttgggggattcgcttccaactcctg

SEQ ID NO: 1053046 - DNA, 25 bp, Homo sapien
tgtgtttcagctaattcatcatatt

SEQ ID NO: 1053047 - DNA, 25 bp, Homo sapien
tccttgtgtttcagctaattcatca

SEQ ID NO: 1053048 - DNA, 25 bp, Homo sapien
gggggattcgcttccaactcctgaa

SEQ ID NO: 1053049 - DNA, 25 bp, Homo sapien
gtctcttgatgagagatatacatca

SEQ ID NO: 1053050 - DNA, 25 bp, Homo sapien
ctgatcccagtgcttaagggagaga

SEQ ID NO: 1053051 - DNA, 25 bp, Homo sapien
attcaagatttgcaaaatgccaatc

SEQ ID NO: 1053052 - DNA, 25 bp, Homo sapien
cccagtgcttaagggagagagttga

SEQ ID NO: 1053053 - DNA, 25 bp, Homo sapien
ctttgtgaccacaggtaagacaaag

SEQ ID NO: 1053054 - DNA, 25 bp, Homo sapien
aacataagagctaaacccatacaat

SEQ ID NO: 1053055 - DNA, 25 bp, Homo sapien
aagagctaaacccatacaatttctg

SEQ ID NO: 1053056 - DNA, 25 bp, Homo sapien
gaccacaggtaagacaaagattctt

SEQ ID NO: 1053057 - DNA, 25 bp, Homo sapien
tgataaatcaatgactagaagggcc

SEQ ID NO: 1053058 - DNA, 25 bp, Homo sapien
taatctaggaccataaagagtggcc

SEQ ID NO: 1053059 - DNA, 25 bp, Homo sapien
tccagtccaataccactaagtccgg

SEQ ID NO: 1053060 - DNA, 25 bp, Homo sapien
aattagatcaaaatactgggctggc

SEQ ID NO: 1053061 - DNA, 25 bp, Homo sapien
tgtccctaaatcttcgggtagtgag

SEQ ID NO: 1053062 - DNA, 25 bp, Homo sapien
tctgtgtcatttgcacctagttctg

SEQ ID NO: 1053063 - DNA, 25 bp, Homo sapien
cactcagtatttagctacagttacc

SEQ ID NO: 1053064 - DNA, 25 bp, Homo sapien
cctagttctgtacaacaacaatgaa

SEQ ID NO: 1053065 - DNA, 25 bp, Homo sapien
aatgtctaggccttctgctaaagcc

SEQ ID NO: 1053066 - DNA, 25 bp, Homo sapien
cacgagtagccattccttactgtca

SEQ ID NO: 1053067 - DNA, 25 bp, Homo sapien
gaacctgtcgcactgctgtattcag

SEQ ID NO: 1053068 - DNA, 25 bp, Homo sapien
ctgaagccgtgtagcgaacctgtcg

SEQ ID NO: 1053069 - DNA, 25 bp, Homo sapien
aggtggcacaaactgaacggctggt

SEQ ID NO: 1053070 - DNA, 25 bp, Homo sapien
gactgcagatgttttccactcaggg

SEQ ID NO: 1053071 - DNA, 25 bp, Homo sapien
aaataaaggtttgactcgtggagcg

SEQ ID NO: 1053072 - DNA, 25 bp, Homo sapien
ggtacagagaactgcgtcgcattta

SEQ ID NO: 1053073 - DNA, 25 bp, Homo sapien
aattgacacttggatcccagaacac

SEQ ID NO: 1053074 - DNA, 25 bp, Homo sapien
agagctcacccctgctggcagtcgt

SEQ ID NO: 1053075 - DNA, 25 bp, Homo sapien
agaacacccgatcaaaacacaacac

SEQ ID NO: 1053076 - DNA, 25 bp, Homo sapien
ggcagtcgtactgccaacatgcccg

SEQ ID NO: 1053077 - DNA, 25 bp, Homo sapien
tgatgacaagacacacgcagtacca

SEQ ID NO: 1053078 - DNA, 25 bp, Homo sapien
taagcatcgctttactttggcacag

SEQ ID NO: 1053079 - DNA, 25 bp, Homo sapien
ctagaccacagtacacgcagaggct

SEQ ID NO: 1053080 - DNA, 25 bp, Homo sapien
gcaacagacttaggtggtaggcaca

SEQ ID NO: 1053081 - DNA, 25 bp, Homo sapien
gcatcggccaacaatcacatcgtca

SEQ ID NO: 1053082 - DNA, 25 bp, Homo sapien
caaaaatccctttgagaatggccag

SEQ ID NO: 1053083 - DNA, 25 bp, Homo sapien
gccactagtgccaacagtattggag

SEQ ID NO: 1053084 - DNA, 25 bp, Homo sapien
cacatcgtcacttatgttttccatg

SEQ ID NO: 1053085 - DNA, 25 bp, Homo sapien
gcacgccaacgagacaccacagttt

SEQ ID NO: 1053086 - DNA, 25 bp, Homo sapien
gccattaaatcatagtcatttccag

SEQ ID NO: 1053087 - DNA, 25 bp, Homo sapien
ccaggagtgattggctgagccatta

SEQ ID NO: 1053088 - DNA, 25 bp, Homo sapien
aacataggaataagagccccgagcc

SEQ ID NO: 1053089 - DNA, 25 bp, Homo sapien
aattcttaccgctctttggagtggg

SEQ ID NO: 1053090 - DNA, 25 bp, Homo sapien
tggaagcccctagtaattgagacct

SEQ ID NO: 1053091 - DNA, 25 bp, Homo sapien
caggtctgggctatgacactaagga

SEQ ID NO: 1053092 - DNA, 25 bp, Homo sapien
ttagatacccagttgtaaagcgtcc

SEQ ID NO: 1053093 - DNA, 25 bp, Homo sapien
attgctgttgacctttttaaaggct

SEQ ID NO: 1053094 - DNA, 25 bp, Homo sapien
ttcatcattctatcgaagagtctcc

SEQ ID NO: 1053095 - DNA, 25 bp, Homo sapien
gaaaaagagaaaattggcaggctgc

SEQ ID NO: 1053096 - DNA, 25 bp, Homo sapien
tcttgtacttaaattgctaagtact

SEQ ID NO: 1053097 - DNA, 25 bp, Homo sapien
tggcgaggcagcgtatacatggccc

SEQ ID NO: 1053098 - DNA, 25 bp, Homo sapien
tgttctcccgcaaagaagagtcgtg

SEQ ID NO: 1053099 - DNA, 25 bp, Homo sapien
cactgtggctgggtagttacggatc

SEQ ID NO: 1053100 - DNA, 25 bp, Homo sapien
ggtctgcaattcttcccgcttctcg

SEQ ID NO: 1053101 - DNA, 25 bp, Homo sapien
gtattgctagaagagccttccttac

SEQ ID NO: 1053102 - DNA, 25 bp, Homo sapien
tattgctagaagagccttccttaca

SEQ ID NO: 1053103 - DNA, 25 bp, Homo sapien
tgctagaagagccttccttacatgg

SEQ ID NO: 1053104 - DNA, 25 bp, Homo sapien
tagaagagccttccttacatggcag

SEQ ID NO: 1053105 - DNA, 25 bp, Homo sapien
catgtatcctctggcgcgaatgctc

SEQ ID NO: 1053106 - DNA, 25 bp, Homo sapien
tcagggctccttgggtgcatgtgta

SEQ ID NO: 1053107 - DNA, 25 bp, Homo sapien
gaacctgtcgctggaaaccagggca

SEQ ID NO: 1053108 - DNA, 25 bp, Homo sapien
tactctgtgcgagtctgtgatgcca

SEQ ID NO: 1053109 - DNA, 25 bp, Homo sapien
taatcaagccaaatagtcccactgc

SEQ ID NO: 1053110 - DNA, 25 bp, Homo sapien
tctgggcttcaaatggctggcaagg

SEQ ID NO: 1053111 - DNA, 25 bp, Homo sapien
tgtgactgtttggacccaggcctca

SEQ ID NO: 1053112 - DNA, 25 bp, Homo sapien
tatagctcctggtgccaaagtctgg

SEQ ID NO: 1053113 - DNA, 25 bp, Homo sapien
tgtcttccagttgtggttctacaca

SEQ ID NO: 1053114 - DNA, 25 bp, Homo sapien
catgtcttccagttgtggttctaca

SEQ ID NO: 1053115 - DNA, 25 bp, Homo sapien
atgtcttccagttgtggttctacac

SEQ ID NO: 1053116 - DNA, 25 bp, Homo sapien
agaaagtatgcactgttttctccat

SEQ ID NO: 1053117 - DNA, 25 bp, Homo sapien
aagaaagtatgcactgttttctcca

SEQ ID NO: 1053118 - DNA, 25 bp, Homo sapien
gaagaaagtatgcactgttttctcc

SEQ ID NO: 1053119 - DNA, 25 bp, Homo sapien
tttagtgggcatacttttgaagaaa

SEQ ID NO: 1053120 - DNA, 25 bp, Homo sapien
tggttgtgcatctgcaagatccagg

SEQ ID NO: 1053121 - DNA, 25 bp, Homo sapien
tgaccagggagagatgtagctctga

SEQ ID NO: 1053122 - DNA, 25 bp, Homo sapien
gggctcacagtagatccagtcgagc

SEQ ID NO: 1053123 - DNA, 25 bp, Homo sapien
cgagcatgcctgtcttgcacaccag

SEQ ID NO: 1053124 - DNA, 25 bp, Homo sapien
gcagacactgctgtaggccctgagt

SEQ ID NO: 1053125 - DNA, 25 bp, Homo sapien
ccagagcaggccaacgttggagatg

SEQ ID NO: 1053126 - DNA, 25 bp, Homo sapien
agcatgagcctggtgtggcgtgact

SEQ ID NO: 1053127 - DNA, 25 bp, Homo sapien
agccagcctgtgaggtgcttgagca

SEQ ID NO: 1053128 - DNA, 25 bp, Homo sapien
cctggtgtggcgtgactggctctga

SEQ ID NO: 1053129 - DNA, 25 bp, Homo sapien
caggtagctgtggttgtacttggcc

SEQ ID NO: 1053130 - DNA, 25 bp, Homo sapien
tagctgtggttgtacttggcctctt

SEQ ID NO: 1053131 - DNA, 25 bp, Homo sapien
gtacttggcctctttgccgtacagc

SEQ ID NO: 1053132 - DNA, 25 bp, Homo sapien
ctctttgccgtacagctccaggagg

SEQ ID NO: 1053133 - DNA, 25 bp, Homo sapien
acgcatgggtggctccaacctgctg

SEQ ID NO: 1053134 - DNA, 25 bp, Homo sapien
gtggtagggactgttcgtctcccag

SEQ ID NO: 1053135 - DNA, 25 bp, Homo sapien
tagggactgttcgtctcccagccca

SEQ ID NO: 1053136 - DNA, 25 bp, Homo sapien
ctagttgtcacgcatgggtggctcc

SEQ ID NO: 1053137 - DNA, 25 bp, Homo sapien
gcagtatgtactgcaagatctctgc

SEQ ID NO: 1053138 - DNA, 25 bp, Homo sapien
tgaaaagatatagcattggagactc

SEQ ID NO: 1053139 - DNA, 25 bp, Homo sapien
gattttgctgcagtatgtactgcaa

SEQ ID NO: 1053140 - DNA, 25 bp, Homo sapien
gatcttggtcagatgtactctttcc

SEQ ID NO: 1053141 - DNA, 25 bp, Homo sapien
tgttgtctgtggtatccagcagttt

SEQ ID NO: 1053142 - DNA, 25 bp, Homo sapien
gatgattccacttgaaaattagggc

SEQ ID NO: 1053143 - DNA, 25 bp, Homo sapien
taaaggatatttcaggtccagcttc

SEQ ID NO: 1053144 - DNA, 25 bp, Homo sapien
gccataaagttctttagattactct

SEQ ID NO: 1053145 - DNA, 25 bp, Homo sapien
gcctggccggctttatttgcatagg

SEQ ID NO: 1053146 - DNA, 25 bp, Homo sapien
tttgcataggctttctacagatgct

SEQ ID NO: 1053147 - DNA, 25 bp, Homo sapien
tcaccagtgaatgagcagctcattt

SEQ ID NO: 1053148 - DNA, 25 bp, Homo sapien
gcgggtatttatctgatttaggcca

SEQ ID NO: 1053149 - DNA, 25 bp, Homo sapien
tatttgtgttgtggaagtgagcact

SEQ ID NO: 1053150 - DNA, 25 bp, Homo sapien
tgcagggcacatactaatcttccct

SEQ ID NO: 1053151 - DNA, 25 bp, Homo sapien
aatatggactgctttatgaattagc

SEQ ID NO: 1053152 - DNA, 25 bp, Homo sapien
agtatttgtgttgtggaagtgagca

SEQ ID NO: 1053153 - DNA, 25 bp, Homo sapien
aatagtgttccctccttgagcgggg

SEQ ID NO: 1053154 - DNA, 25 bp, Homo sapien
tagtgttccctccttgagcggggga

SEQ ID NO: 1053155 - DNA, 25 bp, Homo sapien
gttccctccttgagcgggggacatg

SEQ ID NO: 1053156 - DNA, 25 bp, Homo sapien
cctccttgagcgggggacatgctaa

SEQ ID NO: 1053157 - DNA, 25 bp, Homo sapien
aaagagcttacacaagagatgtctc

SEQ ID NO: 1053158 - DNA, 25 bp, Homo sapien
ctgtgtcctggcttgtgaatgctgc

SEQ ID NO: 1053159 - DNA, 25 bp, Homo sapien
tccataggcaataaagagcttacac

SEQ ID NO: 1053160 - DNA, 25 bp, Homo sapien
tctcaagagaccaaccatgctgctg

SEQ ID NO: 1053161 - DNA, 25 bp, Homo sapien
cactcgagtgaaatttgtctggctt

SEQ ID NO: 1053162 - DNA, 25 bp, Homo sapien
ttctcatcggtgaaggggcactcga

SEQ ID NO: 1053163 - DNA, 25 bp, Homo sapien
gagatcttcgatataatcagacggc

SEQ ID NO: 1053164 - DNA, 25 bp, Homo sapien
caggtgtgtccagggagatcttcga

SEQ ID NO: 1053165 - DNA, 25 bp, Homo sapien
ctacgagtcgcaggccggggctcgg

SEQ ID NO: 1053166 - DNA, 25 bp, Homo sapien
tgctacgagtcgcaggccggggctc

SEQ ID NO: 1053167 - DNA, 25 bp, Homo sapien
gctgctacgagtcgcaggccggggc

SEQ ID NO: 1053168 - DNA, 25 bp, Homo sapien
ggctgctacgagtcgcaggccgggg

SEQ ID NO: 1053169 - DNA, 25 bp, Homo sapien
tcatctcttctctgcattcttcctg

SEQ ID NO: 1053170 - DNA, 25 bp, Homo sapien
catctcttctctgcattcttcctgc

SEQ ID NO: 1053171 - DNA, 25 bp, Homo sapien
gtgtggttcttggacttggccatat

SEQ ID NO: 1053172 - DNA, 25 bp, Homo sapien
ggtgtggttcttggacttggccata

SEQ ID NO: 1053173 - DNA, 25 bp, Homo sapien
catttctttgccattttcgggactg

SEQ ID NO: 1053174 - DNA, 25 bp, Homo sapien
ctttgccattttcgggactggttgt

SEQ ID NO: 1053175 - DNA, 25 bp, Homo sapien
cttaagggattcgtatctttgtgat

SEQ ID NO: 1053176 - DNA, 25 bp, Homo sapien
aagggattcgtatctttgtgatcgg

SEQ ID NO: 1053177 - DNA, 25 bp, Homo sapien
ctttgtgatcggggtttcttgagac

SEQ ID NO: 1053178 - DNA, 25 bp, Homo sapien
tctttgtgatcggggtttcttgaga

SEQ ID NO: 1053179 - DNA, 25 bp, Homo sapien
ttggcaaacacgtgttcctcaggaa

SEQ ID NO: 1053180 - DNA, 25 bp, Homo sapien
tggcaaacacgtgttcctcaggaac

SEQ ID NO: 1053181 - DNA, 25 bp, Homo sapien
cttggcaaacacgtgttcctcagga

SEQ ID NO: 1053182 - DNA, 25 bp, Homo sapien
gagggcctcgatagcctcggcacgt

SEQ ID NO: 1053183 - DNA, 25 bp, Homo sapien
gcctcgatagcctcggcacgtgcac

SEQ ID NO: 1053184 - DNA, 25 bp, Homo sapien
cactcacggccttggcactgttggc

SEQ ID NO: 1053185 - DNA, 25 bp, Homo sapien
atagcctcggcacgtgcactcacgg

SEQ ID NO: 1053186 - DNA, 25 bp, Homo sapien
tgcagctgtagcctgggccttcatt

SEQ ID NO: 1053187 - DNA, 25 bp, Homo sapien
tgacaatgcgggcatgagcacgctt

SEQ ID NO: 1053188 - DNA, 25 bp, Homo sapien
cccgaactggaactgaagctgcagc

SEQ ID NO: 1053189 - DNA, 25 bp, Homo sapien
ctctgggagcccgaactggaactga

SEQ ID NO: 1053190 - DNA, 25 bp, Homo sapien
tactctgaagcctttgtaggggcct

SEQ ID NO: 1053191 - DNA, 25 bp, Homo sapien
tgaagcctttgtaggggcctgggca

SEQ ID NO: 1053192 - DNA, 25 bp, Homo sapien
ctctgaagcctttgtaggggcctgg

SEQ ID NO: 1053193 - DNA, 25 bp, Homo sapien
ctactctgaagcctttgtaggggcc

SEQ ID NO: 1053194 - DNA, 25 bp, Homo sapien
aagccaaccactgcagaaatttggg

SEQ ID NO: 1053195 - DNA, 25 bp, Homo sapien
atttcgtgactgatgctgaaatgga

SEQ ID NO: 1053196 - DNA, 25 bp, Homo sapien
caagatttcgtgactgatgctgaaa

SEQ ID NO: 1053197 - DNA, 25 bp, Homo sapien
cttcaagatttcgtgactgatgctg

SEQ ID NO: 1053198 - DNA, 25 bp, Homo sapien
ttataggtgttaccactgaccccga

SEQ ID NO: 1053199 - DNA, 25 bp, Homo sapien
tacaaaccaggatgtctaagagcag

SEQ ID NO: 1053200 - DNA, 25 bp, Homo sapien
tactgcccatggattagctttgagc

SEQ ID NO: 1053201 - DNA, 25 bp, Homo sapien
ctaagagcagaagtccgtggttgcc

SEQ ID NO: 1053202 - DNA, 25 bp, Homo sapien
gactctgcttactgtgtccagggca

SEQ ID NO: 1053203 - DNA, 25 bp, Homo sapien
ccaaggactagcctacaggttcagt

SEQ ID NO: 1053204 - DNA, 25 bp, Homo sapien
gaaagacatgttactgagcccaacc

SEQ ID NO: 1053205 - DNA, 25 bp, Homo sapien
gactttggccctgaattgagaactg

SEQ ID NO: 1053206 - DNA, 25 bp, Homo sapien
ctcgaacttttgacctcaggtcatc

SEQ ID NO: 1053207 - DNA, 25 bp, Homo sapien
gtttcactgcgttggtcacgctggt

SEQ ID NO: 1053208 - DNA, 25 bp, Homo sapien
ggggtttcactgcgttggtcacgct

SEQ ID NO: 1053209 - DNA, 25 bp, Homo sapien
cgaacttttgacctcaggtcatcca

SEQ ID NO: 1053210 - DNA, 25 bp, Homo sapien
gctggttctgtttgatccataattc

SEQ ID NO: 1053211 - DNA, 25 bp, Homo sapien
tttgttggccctataacacctcttc

SEQ ID NO: 1053212 - DNA, 25 bp, Homo sapien
ttcctcccggttgttattcttgatc

SEQ ID NO: 1053213 - DNA, 25 bp, Homo sapien
cataattccgtgtattttgttggcc

SEQ ID NO: 1053214 - DNA, 25 bp, Homo sapien
tctttgtaggtaccctggtgagacc

SEQ ID NO: 1053215 - DNA, 25 bp, Homo sapien
gggttattctgcataagaaagccca

SEQ ID NO: 1053216 - DNA, 25 bp, Homo sapien
tggtgagaccgatacaaatatgccc

SEQ ID NO: 1053217 - DNA, 25 bp, Homo sapien
aaatatgcccctccccataatggaa

SEQ ID NO: 1053218 - DNA, 25 bp, Homo sapien
tcgtaatccttgcaaggaatattgt

SEQ ID NO: 1053219 - DNA, 25 bp, Homo sapien
ttcgtaatccttgcaaggaatattg

SEQ ID NO: 1053220 - DNA, 25 bp, Homo sapien
taactgcctatgtgagtgatcaaat

SEQ ID NO: 1053221 - DNA, 25 bp, Homo sapien
tataactgcctatgtgagtgatcaa

SEQ ID NO: 1053222 - DNA, 25 bp, Homo sapien
ggcttaaacgtcaaaagccgtgaca

SEQ ID NO: 1053223 - DNA, 25 bp, Homo sapien
tgccctacaaaatttgtttggctta

SEQ ID NO: 1053224 - DNA, 25 bp, Homo sapien
cttaaacgtcaaaagccgtgacaat

SEQ ID NO: 1053225 - DNA, 25 bp, Homo sapien
aacgtcaaaagccgtgacaatttgt

SEQ ID NO: 1053226 - DNA, 25 bp, Homo sapien
tacaatgcttttatcgtttcaggct

SEQ ID NO: 1053227 - DNA, 25 bp, Homo sapien
tgcattcctagaagtaggttaactg

SEQ ID NO: 1053228 - DNA, 25 bp, Homo sapien
cattattgggcttgcagagttccct

SEQ ID NO: 1053229 - DNA, 25 bp, Homo sapien
cataggagtatggagtatgctgtaa

SEQ ID NO: 1053230 - DNA, 25 bp, Homo sapien
tcaggatacttatgggcaacagtgg

SEQ ID NO: 1053231 - DNA, 25 bp, Homo sapien
gatgggtacaaccagcctgattcca

SEQ ID NO: 1053232 - DNA, 25 bp, Homo sapien
gattccaagcgtcgtcagaccaaca

SEQ ID NO: 1053233 - DNA, 25 bp, Homo sapien
tgatactggcaagatacgattggct

SEQ ID NO: 1053234 - DNA, 25 bp, Homo sapien
caagacagcaacacgtgccaaggtt

SEQ ID NO: 1053235 - DNA, 25 bp, Homo sapien
gatattattcctagcgctctgtgga

SEQ ID NO: 1053236 - DNA, 25 bp, Homo sapien
tacatcgggtaagaacgtaggcaca

SEQ ID NO: 1053237 - DNA, 25 bp, Homo sapien
gatgacatgtcaaccagcacctgaa

SEQ ID NO: 1053238 - DNA, 25 bp, Homo sapien
taaaaacactgcgttagaccgctgc

SEQ ID NO: 1053239 - DNA, 25 bp, Homo sapien
ttttatatcacagttctatacacat

SEQ ID NO: 1053240 - DNA, 25 bp, Homo sapien
ccatggaattgattgagaagtagat

SEQ ID NO: 1053241 - DNA, 25 bp, Homo sapien
gccaattgtgatctaatactaccta

SEQ ID NO: 1053242 - DNA, 25 bp, Homo sapien
tcattcagactttgtggattacaaa

SEQ ID NO: 1053243 - DNA, 25 bp, Homo sapien
gttgcttacattggaaaaacttgaa

SEQ ID NO: 1053244 - DNA, 25 bp, Homo sapien
gaatagattgaagcactggagtttc

SEQ ID NO: 1053245 - DNA, 25 bp, Homo sapien
taatgtccataataatgtcggcata

SEQ ID NO: 1053246 - DNA, 25 bp, Homo sapien
taggagaaagatgcattcttctgta

SEQ ID NO: 1053247 - DNA, 25 bp, Homo sapien
aacacatacgcattctcttagattg

SEQ ID NO: 1053248 - DNA, 25 bp, Homo sapien
catgtctggcctaataaactcggag

SEQ ID NO: 1053249 - DNA, 25 bp, Homo sapien
gagataaccaattcgaaacaaatag

SEQ ID NO: 1053250 - DNA, 25 bp, Homo sapien
agtgacacggtctcagcaaactgca

SEQ ID NO: 1053251 - DNA, 25 bp, Homo sapien
ccattttagatacttggagtaaagt

SEQ ID NO: 1053252 - DNA, 25 bp, Homo sapien
aaagttatttggaagacgcaattgc

SEQ ID NO: 1053253 - DNA, 25 bp, Homo sapien
tgctactagcagcacaccattttag

SEQ ID NO: 1053254 - DNA, 25 bp, Homo sapien
tagaggcgaaaagatgaccgaaaga

SEQ ID NO: 1053255 - DNA, 25 bp, Homo sapien
aacgcgtggctatgggcgtgtctgg

SEQ ID NO: 1053256 - DNA, 25 bp, Homo sapien
gaaaagatgaccgaaagaggcccga

SEQ ID NO: 1053257 - DNA, 25 bp, Homo sapien
aaagaggcccgaacgcgtggctatg

SEQ ID NO: 1053258 - DNA, 25 bp, Homo sapien
cattgatataccagctcagacaaca

SEQ ID NO: 1053259 - DNA, 25 bp, Homo sapien
tcattgatataccagctcagacaac

SEQ ID NO: 1053260 - DNA, 25 bp, Homo sapien
taagatttgataagggccacatccc

SEQ ID NO: 1053261 - DNA, 25 bp, Homo sapien
gtttatcttagcttgcatcagggca

SEQ ID NO: 1053262 - DNA, 25 bp, Homo sapien
gataggaccatcagtgacagttaag

SEQ ID NO: 1053263 - DNA, 25 bp, Homo sapien
caagtggaattgagtccttcaggga

SEQ ID NO: 1053264 - DNA, 25 bp, Homo sapien
gaccctcagctttgggaatgttatc

SEQ ID NO: 1053265 - DNA, 25 bp, Homo sapien
cactcaatgggttacttcattaaaa

SEQ ID NO: 1053266 - DNA, 25 bp, Homo sapien
aaatgctggtgaatgcttaggcctg

SEQ ID NO: 1053267 - DNA, 25 bp, Homo sapien
gtaactggaaatctgaagaccaggg

SEQ ID NO: 1053268 - DNA, 25 bp, Homo sapien
tgaatgtaccgaatgtgagaagagt

SEQ ID NO: 1053269 - DNA, 25 bp, Homo sapien
caatgaacgccctcaagactgagct

SEQ ID NO: 1053270 - DNA, 25 bp, Homo sapien
taagagagttcatacggactaagct

SEQ ID NO: 1053271 - DNA, 25 bp, Homo sapien
catcacacatcaaagagttcacacg

SEQ ID NO: 1053272 - DNA, 25 bp, Homo sapien
ttctacagtttagccccaaaagcac

SEQ ID NO: 1053273 - DNA, 25 bp, Homo sapien
ctggtttcttgcccaaataagtttg

SEQ ID NO: 1053274 - DNA, 25 bp, Homo sapien
cacttgttagaaggatgaaagcgcc

SEQ ID NO: 1053275 - DNA, 25 bp, Homo sapien
ccaaaagcacttgttagaaggatga

SEQ ID NO: 1053276 - DNA, 25 bp, Homo sapien
taagccggaggtggcttctcagacc

SEQ ID NO: 1053277 - DNA, 25 bp, Homo sapien
gaacccttgtgctcgagatggcagc

SEQ ID NO: 1053278 - DNA, 25 bp, Homo sapien
tgtcctagtagattccggcattgcc

SEQ ID NO: 1053279 - DNA, 25 bp, Homo sapien
cagggcctgttttccgtgcctcacg

SEQ ID NO: 1053280 - DNA, 25 bp, Homo sapien
gccgaagccaagacaccgccaggct

SEQ ID NO: 1053281 - DNA, 25 bp, Homo sapien
gaagccaagacaccgccaggctcta

SEQ ID NO: 1053282 - DNA, 25 bp, Homo sapien
agcgccgaagccaagacaccgccag

SEQ ID NO: 1053283 - DNA, 25 bp, Homo sapien
cgaagccaagacaccgccaggctct

SEQ ID NO: 1053284 - DNA, 25 bp, Homo sapien
gctgggagcccctgtagcagacaag

SEQ ID NO: 1053285 - DNA, 25 bp, Homo sapien
caagccctctgggacgctaaggagg

SEQ ID NO: 1053286 - DNA, 25 bp, Homo sapien
agacgcccagggtcccttcggtgcg

SEQ ID NO: 1053287 - DNA, 25 bp, Homo sapien
ccccttgagaaggacgcagtcgcac

SEQ ID NO: 1053288 - DNA, 25 bp, Homo sapien
gaatcttcctgaacgccaggtctga

SEQ ID NO: 1053289 - DNA, 25 bp, Homo sapien
cgttcgcggtctctcaggttttgga

SEQ ID NO: 1053290 - DNA, 25 bp, Homo sapien
caggtctgagagaacgctgcggctc

SEQ ID NO: 1053291 - DNA, 25 bp, Homo sapien
ctagtggatcttttgcgggacagga

SEQ ID NO: 1053292 - DNA, 25 bp, Homo sapien
ttagttgctggtggtttctcggcca

SEQ ID NO: 1053293 - DNA, 25 bp, Homo sapien
taggatcagcctacgatatctgggc

SEQ ID NO: 1053294 - DNA, 25 bp, Homo sapien
gaggcctcgggaatctgagtcttta

SEQ ID NO: 1053295 - DNA, 25 bp, Homo sapien
tcgcctgcaagtctacgaattcgag

SEQ ID NO: 1053296 - DNA, 25 bp, Homo sapien
tgggagtccctaataagctgctata

SEQ ID NO: 1053297 - DNA, 25 bp, Homo sapien
ttccgggcacgtagccaaggttctg

SEQ ID NO: 1053298 - DNA, 25 bp, Homo sapien
gttagagacaacaggcttccgggca

SEQ ID NO: 1053299 - DNA, 25 bp, Homo sapien
taatcataaataaccgggcactggg

SEQ ID NO: 1053300 - DNA, 25 bp, Homo sapien
ctaactttagagttattaatgttat

SEQ ID NO: 1053301 - DNA, 25 bp, Homo sapien
taacggctatcatccaagagcgcac

SEQ ID NO: 1053302 - DNA, 25 bp, Homo sapien
ccagaagtttccctgagcgtgaagc

SEQ ID NO: 1053303 - DNA, 25 bp, Homo sapien
tccaaggagcgtggttattaacctc

SEQ ID NO: 1053304 - DNA, 25 bp, Homo sapien
tacttcagctagtcagaaaggctcc

SEQ ID NO: 1053305 - DNA, 25 bp, Homo sapien
agacaaagaagggcttaaagcactg

SEQ ID NO: 1053306 - DNA, 25 bp, Homo sapien
agaagggcttaaagcactggggcaa

SEQ ID NO: 1053307 - DNA, 25 bp, Homo sapien
acaaagaagggcttaaagcactggg

SEQ ID NO: 1053308 - DNA, 25 bp, Homo sapien
aagggcttaaagcactggggcaaag

SEQ ID NO: 1053309 - DNA, 25 bp, Homo sapien
tgagcccggggagtcgtcctgggcg

SEQ ID NO: 1053310 - DNA, 25 bp, Homo sapien
gcccggggagtcgtcctgggcgcca

SEQ ID NO: 1053311 - DNA, 25 bp, Homo sapien
ggagtcgtcctgggcgccaccccgc

SEQ ID NO: 1053312 - DNA, 25 bp, Homo sapien
gagtcgtcctgggcgccaccccgcc

SEQ ID NO: 1053313 - DNA, 25 bp, Homo sapien
cctgagtccagctgaaggctgcaac

SEQ ID NO: 1053314 - DNA, 25 bp, Homo sapien
tgaatcatgggaacaaatacagctt

SEQ ID NO: 1053315 - DNA, 25 bp, Homo sapien
ccaagttggttactgaaaatccaca

SEQ ID NO: 1053316 - DNA, 25 bp, Homo sapien
cctctagagggtcccaggtgaagaa

SEQ ID NO: 1053317 - DNA, 25 bp, Homo sapien
tgaaagcctaaattggagaccctgg

SEQ ID NO: 1053318 - DNA, 25 bp, Homo sapien
tacaaggagggtctttgatcccatc

SEQ ID NO: 1053319 - DNA, 25 bp, Homo sapien
ctttcccagtgatgacaggctgtcc

SEQ ID NO: 1053320 - DNA, 25 bp, Homo sapien
tcagccagtggagccgacataatgt

SEQ ID NO: 1053321 - DNA, 25 bp, Homo sapien
ttctgatacaaaaaactatgacaat

SEQ ID NO: 1053322 - DNA, 25 bp, Homo sapien
gtttctgatacaaaaaactatgaca

SEQ ID NO: 1053323 - DNA, 25 bp, Homo sapien
caaattaatgtttctgatacaaaaa

SEQ ID NO: 1053324 - DNA, 25 bp, Homo sapien
aatgtttctgatacaaaaaactatg

SEQ ID NO: 1053325 - DNA, 25 bp, Homo sapien
tatagtggcctactggtttagagca

SEQ ID NO: 1053326 - DNA, 25 bp, Homo sapien
tcatgccagggtacggagcaaacag

SEQ ID NO: 1053327 - DNA, 25 bp, Homo sapien
gacctgaactcactaagcctggatt

SEQ ID NO: 1053328 - DNA, 25 bp, Homo sapien
tattcatatctagcccacagagctg

SEQ ID NO: 1053329 - DNA, 25 bp, Homo sapien
ggctgcaggtgctccaaaagttcta

SEQ ID NO: 1053330 - DNA, 25 bp, Homo sapien
gaagtacaagataagtcaggatccc

SEQ ID NO: 1053331 - DNA, 25 bp, Homo sapien
ctgacttgcatgtgcaccatgtgat

SEQ ID NO: 1053332 - DNA, 25 bp, Homo sapien
catgtgcaccatgtgatgtctgggc

SEQ ID NO: 1053333 - DNA, 25 bp, Homo sapien
cagctggaaccatgaactgtgggcc

SEQ ID NO: 1053334 - DNA, 25 bp, Homo sapien
tgggccaaggataggaacatacagg

SEQ ID NO: 1053335 - DNA, 25 bp, Homo sapien
ttcatccactcagggagcactggac

SEQ ID NO: 1053336 - DNA, 25 bp, Homo sapien
ggcctggcagctcacagattttcaa

SEQ ID NO: 1053337 - DNA, 25 bp, Homo sapien
tgggcaggaagtacatagagttacc

SEQ ID NO: 1053338 - DNA, 25 bp, Homo sapien
cactctctggatgcatgacaatttc

SEQ ID NO: 1053339 - DNA, 25 bp, Homo sapien
catttggcaagagtacgtttagtta

SEQ ID NO: 1053340 - DNA, 25 bp, Homo sapien
tagagttaccatatacacacagcct

SEQ ID NO: 1053341 - DNA, 25 bp, Homo sapien
ctgccctcctggctggggtgcaatg

SEQ ID NO: 1053342 - DNA, 25 bp, Homo sapien
gctgagattgtgtcttttttgtttg

SEQ ID NO: 1053343 - DNA, 25 bp, Homo sapien
tttagtagagacgtgttagccagga

SEQ ID NO: 1053344 - DNA, 25 bp, Homo sapien
cggagtctcacactgccctcctggc

SEQ ID NO: 1053345 - DNA, 25 bp, Homo sapien
tgtccccagggacttctaaagcttg

SEQ ID NO: 1053346 - DNA, 25 bp, Homo sapien
cacttttcgagggtgagctggaacc

SEQ ID NO: 1053347 - DNA, 25 bp, Homo sapien
tagaatagaccagagggtgtccctt

SEQ ID NO: 1053348 - DNA, 25 bp, Homo sapien
gagctgaagaaccttgcctgtggca

SEQ ID NO: 1053349 - DNA, 25 bp, Homo sapien
aagataagacgcctcgcaggctttg

SEQ ID NO: 1053350 - DNA, 25 bp, Homo sapien
gagaagataagacgcctcgcaggct

SEQ ID NO: 1053351 - DNA, 25 bp, Homo sapien
gataagacgcctcgcaggctttggc

SEQ ID NO: 1053352 - DNA, 25 bp, Homo sapien
atgagaagataagacgcctcgcagg

SEQ ID NO: 1053353 - DNA, 25 bp, Homo sapien
caaaagatccttgtagttccgtact

SEQ ID NO: 1053354 - DNA, 25 bp, Homo sapien
taaccgttgaatggtcaaccagtca

SEQ ID NO: 1053355 - DNA, 25 bp, Homo sapien
gatccttgtagttccgtactggtga

SEQ ID NO: 1053356 - DNA, 25 bp, Homo sapien
taaaagggcccagcacaattcttaa

SEQ ID NO: 1053357 - DNA, 25 bp, Homo sapien
cacatggctttgtgagacccgacag

SEQ ID NO: 1053358 - DNA, 25 bp, Homo sapien
gagccccagctttgtcatttgtgaa

SEQ ID NO: 1053359 - DNA, 25 bp, Homo sapien
tcccaaatgggctgaaacaagtcct

SEQ ID NO: 1053360 - DNA, 25 bp, Homo sapien
tttgagaaggccatgctacgccggg

SEQ ID NO: 1053361 - DNA, 25 bp, Homo sapien
ccttcctggagactaaacctggtgc

SEQ ID NO: 1053362 - DNA, 25 bp, Homo sapien
tgctctccaaactatgccaaggcgg

SEQ ID NO: 1053363 - DNA, 25 bp, Homo sapien
ctgtgaacttgtggcctgaagagcc

SEQ ID NO: 1053364 - DNA, 25 bp, Homo sapien
tgctcaggagcgaaggactgtgaac

SEQ ID NO: 1053365 - DNA, 25 bp, Homo sapien
gctgagcttgctggacgacatgaac

SEQ ID NO: 1053366 - DNA, 25 bp, Homo sapien
tgtgctgcctgtcggaacgcagtct

SEQ ID NO: 1053367 - DNA, 25 bp, Homo sapien
cgcggctgctacgaggcggtgtgct

SEQ ID NO: 1053368 - DNA, 25 bp, Homo sapien
ccggagtcccgagaggcactcagct

SEQ ID NO: 1053369 - DNA, 25 bp, Homo sapien
ggcggtccgaacagccacattcctt

SEQ ID NO: 1053370 - DNA, 25 bp, Homo sapien
tccttcgggtttcccacacactcgc

SEQ ID NO: 1053371 - DNA, 25 bp, Homo sapien
cacacactcgctatcaaagagtccc

SEQ ID NO: 1053372 - DNA, 25 bp, Homo sapien
gaacagccacattccttcgggtttc

SEQ ID NO: 1053373 - DNA, 25 bp, Homo sapien
aggaggctttcccagcatccccact

SEQ ID NO: 1053374 - DNA, 25 bp, Homo sapien
catccccactcttccccaggccttc

SEQ ID NO: 1053375 - DNA, 25 bp, Homo sapien
cactcttccccaggccttctgccat

SEQ ID NO: 1053376 - DNA, 25 bp, Homo sapien
caggaggctttcccagcatccccac

SEQ ID NO: 1053377 - DNA, 25 bp, Homo sapien
ggctctgcaggttctgggggatgga

SEQ ID NO: 1053378 - DNA, 25 bp, Homo sapien
aggctctgcaggttctgggggatgg

SEQ ID NO: 1053379 - DNA, 25 bp, Homo sapien
acaggctctgcaggttctgggggat

SEQ ID NO: 1053380 - DNA, 25 bp, Homo sapien
caggctctgcaggttctgggggatg

SEQ ID NO: 1053381 - DNA, 25 bp, Homo sapien
tcttcctggattgtcccctcctgaa

SEQ ID NO: 1053382 - DNA, 25 bp, Homo sapien
tgtcccctcctgaaccagcatcttc

SEQ ID NO: 1053383 - DNA, 25 bp, Homo sapien
ctgaaccagcatcttcagcagtagc

SEQ ID NO: 1053384 - DNA, 25 bp, Homo sapien
tggattgtcccctcctgaaccagca

SEQ ID NO: 1053385 - DNA, 25 bp, Homo sapien
tgctgtcccaacttgcagatgagcg

SEQ ID NO: 1053386 - DNA, 25 bp, Homo sapien
cagatgagcgttgctttctgagctg

SEQ ID NO: 1053387 - DNA, 25 bp, Homo sapien
caacttgcagatgagcgttgctttc

SEQ ID NO: 1053388 - DNA, 25 bp, Homo sapien
ggcctctgctgtcccaacttgcaga

SEQ ID NO: 1053389 - DNA, 25 bp, Homo sapien
tggtgttcagtaaaccttcatgtcc

SEQ ID NO: 1053390 - DNA, 25 bp, Homo sapien
cagagttagtgatgtgtgaaacagt

SEQ ID NO: 1053391 - DNA, 25 bp, Homo sapien
gtatgtgaagttcttagcagggcac

SEQ ID NO: 1053392 - DNA, 25 bp, Homo sapien
tgtcctgctactagctctgagccag

SEQ ID NO: 1053393 - DNA, 25 bp, Homo sapien
tgcattgggcacatcttctttgcct

SEQ ID NO: 1053394 - DNA, 25 bp, Homo sapien
ctgtgtgcattgggcacatcttctt

SEQ ID NO: 1053395 - DNA, 25 bp, Homo sapien
gcattgggcacatcttctttgcctg

SEQ ID NO: 1053396 - DNA, 25 bp, Homo sapien
tgtgcattgggcacatcttctttgc

SEQ ID NO: 1053397 - DNA, 25 bp, Homo sapien
tagccttgaatgttctggcccccaa

SEQ ID NO: 1053398 - DNA, 25 bp, Homo sapien
atagccttgaatgttctggccccca

SEQ ID NO: 1053399 - DNA, 25 bp, Homo sapien
gccttgaatgttctggcccccaatg

SEQ ID NO: 1053400 - DNA, 25 bp, Homo sapien
ccttgaatgttctggcccccaatgg

SEQ ID NO: 1053401 - DNA, 25 bp, Homo sapien
taccagtaatcataacaatctgggt

SEQ ID NO: 1053402 - DNA, 25 bp, Homo sapien
gttttggacaacaataccagtaatc

SEQ ID NO: 1053403 - DNA, 25 bp, Homo sapien
cagtggaaataagcaccctccatga

SEQ ID NO: 1053404 - DNA, 25 bp, Homo sapien
tccatatgggcgttgggataattgt

SEQ ID NO: 1053405 - DNA, 25 bp, Homo sapien
tgggacaatatccaggtgtgttgcc

SEQ ID NO: 1053406 - DNA, 25 bp, Homo sapien
ctgggacaatatccaggtgtgttgc

SEQ ID NO: 1053407 - DNA, 25 bp, Homo sapien
tgttatagatagctgcgccttccgc

SEQ ID NO: 1053408 - DNA, 25 bp, Homo sapien
ttccacaaggcgtccaggtaacagg

SEQ ID NO: 1053409 - DNA, 25 bp, Homo sapien
ggcaggtcacattccctctcaaggg

SEQ ID NO: 1053410 - DNA, 25 bp, Homo sapien
ccagtggagggcgtagaattcaagt

SEQ ID NO: 1053411 - DNA, 25 bp, Homo sapien
aaacagtggtgcctcggacacaggt

SEQ ID NO: 1053412 - DNA, 25 bp, Homo sapien
gctattcctgatgggtcagtttggg

SEQ ID NO: 1053413 - DNA, 25 bp, Homo sapien
tgtcagcgggaggtcatcgatgacc

SEQ ID NO: 1053414 - DNA, 25 bp, Homo sapien
ggtggagctcatgctattcctgatg

SEQ ID NO: 1053415 - DNA, 25 bp, Homo sapien
tcctggctaacacggtgaaatcccg

SEQ ID NO: 1053416 - DNA, 25 bp, Homo sapien
gtcaggagatcgagaccatcctggc

SEQ ID NO: 1053417 - DNA, 25 bp, Homo sapien
gaggtcgagacaggcggatcacgag

SEQ ID NO: 1053418 - DNA, 25 bp, Homo sapien
tggctaacacggtgaaatcccgtct

SEQ ID NO: 1053419 - DNA, 25 bp, Homo sapien
cttcaggataatatagcagaggatg

SEQ ID NO: 1053420 - DNA, 25 bp, Homo sapien
agttcaccagcagtctccgttctct

SEQ ID NO: 1053421 - DNA, 25 bp, Homo sapien
cctcttgagagttcaccagcagtct

SEQ ID NO: 1053422 - DNA, 25 bp, Homo sapien
tctctcaataaaatccgcagcctgg

SEQ ID NO: 1053423 - DNA, 25 bp, Homo sapien
tccgttctctcaataaaatccgcag

SEQ ID NO: 1053424 - DNA, 25 bp, Homo sapien
tgtggaggcgacagccaggtcttaa

SEQ ID NO: 1053425 - DNA, 25 bp, Homo sapien
cccctcatagctggactgctattca

SEQ ID NO: 1053426 - DNA, 25 bp, Homo sapien
ctgccacgggcacctcccctcatag

SEQ ID NO: 1053427 - DNA, 25 bp, Homo sapien
agctgtggaggcgacagccaggtct

SEQ ID NO: 1053428 - DNA, 25 bp, Homo sapien
tctctccctgggtttgcagacagcc

SEQ ID NO: 1053429 - DNA, 25 bp, Homo sapien
acatggacatgagcctgaccatggc

SEQ ID NO: 1053430 - DNA, 25 bp, Homo sapien
tgttgctatgtcttcctcatggtca

SEQ ID NO: 1053431 - DNA, 25 bp, Homo sapien
tgttggctgaaggtcgctactgtag

SEQ ID NO: 1053432 - DNA, 25 bp, Homo sapien
ctcatggtcaagtacaccccacaca

SEQ ID NO: 1053433 - DNA, 25 bp, Homo sapien
tgtgagtctccttcaagctctgacc

SEQ ID NO: 1053434 - DNA, 25 bp, Homo sapien
ttctctctatgaactgtgggcagag

SEQ ID NO: 1053435 - DNA, 25 bp, Homo sapien
aaccagaaggttctattgaacagca

SEQ ID NO: 1053436 - DNA, 25 bp, Homo sapien
tgggatcaggcaatatgtgagtctc

SEQ ID NO: 1053437 - DNA, 25 bp, Homo sapien
cttggttgagtgtggtcaaggtcat

SEQ ID NO: 1053438 - DNA, 25 bp, Homo sapien
agaccaatagggcagggcctcgcat

SEQ ID NO: 1053439 - DNA, 25 bp, Homo sapien
catgatgagaaagaacgagatgact

SEQ ID NO: 1053440 - DNA, 25 bp, Homo sapien
gaacgagatgactgagatgatgcag

SEQ ID NO: 1053441 - DNA, 25 bp, Homo sapien
tagcatgaggctgtgatttcgaggt

SEQ ID NO: 1053442 - DNA, 25 bp, Homo sapien
ggaatactccccagcaatagcaaag

SEQ ID NO: 1053443 - DNA, 25 bp, Homo sapien
tgcagcaacctagatggacatcaag

SEQ ID NO: 1053444 - DNA, 25 bp, Homo sapien
tactggaaacaacccttcagtggga

SEQ ID NO: 1053445 - DNA, 25 bp, Homo sapien
attggcaatctgctgctttacattc

SEQ ID NO: 1053446 - DNA, 25 bp, Homo sapien
gctgctttacattcttcttataaaa

SEQ ID NO: 1053447 - DNA, 25 bp, Homo sapien
cattcttcttataaaacatcaacat

SEQ ID NO: 1053448 - DNA, 25 bp, Homo sapien
cattggcaatctgctgctttacatt

SEQ ID NO: 1053449 - DNA, 25 bp, Homo sapien
gatggtgacatagtattgctttgtc

SEQ ID NO: 1053450 - DNA, 25 bp, Homo sapien
tggtgacatagtattgctttgtccc

SEQ ID NO: 1053451 - DNA, 25 bp, Homo sapien
atggtgacatagtattgctttgtcc

SEQ ID NO: 1053452 - DNA, 25 bp, Homo sapien
ggtgacatagtattgctttgtcccg

SEQ ID NO: 1053453 - DNA, 25 bp, Homo sapien
cagggccgaggcaaccctggtggta

SEQ ID NO: 1053454 - DNA, 25 bp, Homo sapien
ggtagctgtaaggtgactgtgatca

SEQ ID NO: 1053455 - DNA, 25 bp, Homo sapien
aaccctggtggtagctgtaaggtga

SEQ ID NO: 1053456 - DNA, 25 bp, Homo sapien
ccgaggcaaccctggtggtagctgt

SEQ ID NO: 1053457 - DNA, 25 bp, Homo sapien
tactactgtaaggtggctctgtgat

SEQ ID NO: 1053458 - DNA, 25 bp, Homo sapien
gcccagtgtataggccagcagtgtg

SEQ ID NO: 1053459 - DNA, 25 bp, Homo sapien
ggcagagtctgggagttgtaactaa

SEQ ID NO: 1053460 - DNA, 25 bp, Homo sapien
aatgagctgcttcatgcccagtgta

SEQ ID NO: 1053461 - DNA, 25 bp, Homo sapien
caggttccagcatgttgtccccatg

SEQ ID NO: 1053462 - DNA, 25 bp, Homo sapien
gccaggttccagcatgttgtcccca

SEQ ID NO: 1053463 - DNA, 25 bp, Homo sapien
gctgccaggttccagcatgttgtcc

SEQ ID NO: 1053464 - DNA, 25 bp, Homo sapien
tgccaggttccagcatgttgtcccc

SEQ ID NO: 1053465 - DNA, 25 bp, Homo sapien
agtccagtgcttttagcagtgtcac

SEQ ID NO: 1053466 - DNA, 25 bp, Homo sapien
gtagcagtgtgattgagtccagtgc

SEQ ID NO: 1053467 - DNA, 25 bp, Homo sapien
cctggtgaccttacagccttcaaac

SEQ ID NO: 1053468 - DNA, 25 bp, Homo sapien
aggcatgaacttatccccagtcttg

SEQ ID NO: 1053469 - DNA, 25 bp, Homo sapien
tgttgcatggggcgaaggtcaccac

SEQ ID NO: 1053470 - DNA, 25 bp, Homo sapien
catggtgatgttgcatggggcgaag

SEQ ID NO: 1053471 - DNA, 25 bp, Homo sapien
ctgcttccacctgccccacaagcac

SEQ ID NO: 1053472 - DNA, 25 bp, Homo sapien
gtgatgttgcatggggcgaaggtca

SEQ ID NO: 1053473 - DNA, 25 bp, Homo sapien
tcgccacctctgagggcgggtcatt

SEQ ID NO: 1053474 - DNA, 25 bp, Homo sapien
aggtcacctcgcctgatgtccttta

SEQ ID NO: 1053475 - DNA, 25 bp, Homo sapien
caccaggcagggccttggtgcatct

SEQ ID NO: 1053476 - DNA, 25 bp, Homo sapien
tgtcctttactgatacgttcttcac

SEQ ID NO: 1053477 - DNA, 25 bp, Homo sapien
tggtgcagccaaggtagttgagaat

SEQ ID NO: 1053478 - DNA, 25 bp, Homo sapien
acaaaactggtgagtagccagctgt

SEQ ID NO: 1053479 - DNA, 25 bp, Homo sapien
ctgtggtgcagccaaggtagttgag

SEQ ID NO: 1053480 - DNA, 25 bp, Homo sapien
ggctgtgtggcagtacaaaactggt

SEQ ID NO: 1053481 - DNA, 25 bp, Homo sapien
tgggcgatggccaagtccccagact

SEQ ID NO: 1053482 - DNA, 25 bp, Homo sapien
tttgttgcccaagcgctggtttgca

SEQ ID NO: 1053483 - DNA, 25 bp, Homo sapien
cagacttcaaagctctggggttgtc

SEQ ID NO: 1053484 - DNA, 25 bp, Homo sapien
atgggcttgcccaggatcatctggg

SEQ ID NO: 1053485 - DNA, 25 bp, Homo sapien
gaggggcgggtagtctgagaagctt

SEQ ID NO: 1053486 - DNA, 25 bp, Homo sapien
gtagtctgagaagctttccacgcac

SEQ ID NO: 1053487 - DNA, 25 bp, Homo sapien
gggtagtctgagaagctttccacgc

SEQ ID NO: 1053488 - DNA, 25 bp, Homo sapien
ggcgggtagtctgagaagctttcca

SEQ ID NO: 1053489 - DNA, 25 bp, Homo sapien
gtggccaggtgctgttgggtcttac

SEQ ID NO: 1053490 - DNA, 25 bp, Homo sapien
tccttgtgactaggttctactgcct

SEQ ID NO: 1053491 - DNA, 25 bp, Homo sapien
cttgctgtgataccaggcaagcccc

SEQ ID NO: 1053492 - DNA, 25 bp, Homo sapien
tcagatccttgtgactaggttctac

SEQ ID NO: 1053493 - DNA, 25 bp, Homo sapien
acctggctctcagatccttgtgact

SEQ ID NO: 1053494 - DNA, 25 bp, Homo sapien
ccttggtgaccttgctgccagtagc

SEQ ID NO: 1053495 - DNA, 25 bp, Homo sapien
tgccttggtgaccttgctgccagta

SEQ ID NO: 1053496 - DNA, 25 bp, Homo sapien
ggctgccttggtgaccttgctgcca

SEQ ID NO: 1053497 - DNA, 25 bp, Homo sapien
ttggtgaccttgctgccagtagctg

SEQ ID NO: 1053498 - DNA, 25 bp, Homo sapien
tgttcatcgtgatagatcttgcttg

SEQ ID NO: 1053499 - DNA, 25 bp, Homo sapien
gtttcaccttcagtataccattaag

SEQ ID NO: 1053500 - DNA, 25 bp, Homo sapien
ggatggatccatcagtgcaatgctg

SEQ ID NO: 1053501 - DNA, 25 bp, Homo sapien
taagcggcacatgttggatggatcc

SEQ ID NO: 1053502 - DNA, 25 bp, Homo sapien
ttccggaccttgaggacgttctctc

SEQ ID NO: 1053503 - DNA, 25 bp, Homo sapien
aatcagcacgtccttgagtttccgg

SEQ ID NO: 1053504 - DNA, 25 bp, Homo sapien
gtttttgaaagctcccgaatcagca

SEQ ID NO: 1053505 - DNA, 25 bp, Homo sapien
ggtccttgtgtgatgagaacgccaa

SEQ ID NO: 1053506 - DNA, 25 bp, Homo sapien
gagcttccggccgagggccttatgg

SEQ ID NO: 1053507 - DNA, 25 bp, Homo sapien
ttccggccgagggccttatgggcca

SEQ ID NO: 1053508 - DNA, 25 bp, Homo sapien
gaaagcggagcttccggccgagggc

SEQ ID NO: 1053509 - DNA, 25 bp, Homo sapien
cggagcttccggccgagggccttat

SEQ ID NO: 1053510 - DNA, 25 bp, Homo sapien
ggagccgctcctaaaacgatggcag

SEQ ID NO: 1053511 - DNA, 25 bp, Homo sapien
tgcttctgagcactccgggcaagtg

SEQ ID NO: 1053512 - DNA, 25 bp, Homo sapien
ccttggctcgaacggctctgctagt

SEQ ID NO: 1053513 - DNA, 25 bp, Homo sapien
cattgcgggctccatattcctcggg

SEQ ID NO: 1053514 - DNA, 25 bp, Homo sapien
tgctgtgcagatagaaagtagtaaa

SEQ ID NO: 1053515 - DNA, 25 bp, Homo sapien
cctcagctgtgagtgtattgactgc

SEQ ID NO: 1053516 - DNA, 25 bp, Homo sapien
tcttcgttacgatttgggatgagca

SEQ ID NO: 1053517 - DNA, 25 bp, Homo sapien
gataggttccgagctgtcttcttcc

SEQ ID NO: 1053518 - DNA, 25 bp, Homo sapien
gtcttcttcccttgatgtcccctaa

SEQ ID NO: 1053519 - DNA, 25 bp, Homo sapien
ctcttcacccgttccgttcgtggag

SEQ ID NO: 1053520 - DNA, 25 bp, Homo sapien
gaagaagacagctcggaacctatcc

SEQ ID NO: 1053521 - DNA, 25 bp, Homo sapien
ctccacgaacggaacgggtgaagag

SEQ ID NO: 1053522 - DNA, 25 bp, Homo sapien
gcagtcaatacactcacagctgagg

SEQ ID NO: 1053523 - DNA, 25 bp, Homo sapien
tttactactttctatctgcacagca

SEQ ID NO: 1053524 - DNA, 25 bp, Homo sapien
aaatcgtaacgaagaccctgaatgt

SEQ ID NO: 1053525 - DNA, 25 bp, Homo sapien
tgctcatcccaaatcgtaacgaaga

SEQ ID NO: 1053526 - DNA, 25 bp, Homo sapien
gggaacttcgcatccgcaaactctg

SEQ ID NO: 1053527 - DNA, 25 bp, Homo sapien
gcgggaacttcgcatccgcaaactc

SEQ ID NO: 1053528 - DNA, 25 bp, Homo sapien
catgcgggaacttcgcatccgcaaa

SEQ ID NO: 1053529 - DNA, 25 bp, Homo sapien
ccatgcgggaacttcgcatccgcaa

SEQ ID NO: 1053530 - DNA, 25 bp, Homo sapien
ggaacttcgcatccgcaaactctgt

SEQ ID NO: 1053531 - DNA, 25 bp, Homo sapien
cttcgcatccgcaaactctgtctca

SEQ ID NO: 1053532 - DNA, 25 bp, Homo sapien
tttgcggatgcgaagttcccgcatg

SEQ ID NO: 1053533 - DNA, 25 bp, Homo sapien
acagagtttgcggatgcgaagttcc

SEQ ID NO: 1053534 - DNA, 25 bp, Homo sapien
cagagtttgcggatgcgaagttccc

SEQ ID NO: 1053535 - DNA, 25 bp, Homo sapien
gagtttgcggatgcgaagttcccgc

SEQ ID NO: 1053536 - DNA, 25 bp, Homo sapien
tgagacagagtttgcggatgcgaag

SEQ ID NO: 1053537 - DNA, 25 bp, Homo sapien
ttgcggatgcgaagttcccgcatgg

SEQ ID NO: 1053538 - DNA, 25 bp, Homo sapien
ctgtcagatcctttggcatccggag

SEQ ID NO: 1053539 - DNA, 25 bp, Homo sapien
cagatcctttggcatccggagaaat

SEQ ID NO: 1053540 - DNA, 25 bp, Homo sapien
atttctccggatgccaaaggatctg

SEQ ID NO: 1053541 - DNA, 25 bp, Homo sapien
ctccggatgccaaaggatctgacag

SEQ ID NO: 1053542 - DNA, 25 bp, Homo sapien
tgcactccagcttaggccacagagt

SEQ ID NO: 1053543 - DNA, 25 bp, Homo sapien
agctgaggcacgacaattgctagaa

SEQ ID NO: 1053544 - DNA, 25 bp, Homo sapien
gttggatcatttgtggccaggagtt

SEQ ID NO: 1053545 - DNA, 25 bp, Homo sapien
aaggcggttggatcatttgtggcca

SEQ ID NO: 1053546 - DNA, 25 bp, Homo sapien
gaggcacgacaattgctagaacctg

SEQ ID NO: 1053547 - DNA, 25 bp, Homo sapien
ggaagctgaggcacgacaattgcta

SEQ ID NO: 1053548 - DNA, 25 bp, Homo sapien
ttctagcaattgtcgtgcctcagct

SEQ ID NO: 1053549 - DNA, 25 bp, Homo sapien
caggttctagcaattgtcgtgcctc

SEQ ID NO: 1053550 - DNA, 25 bp, Homo sapien
actctgtggcctaagctggagtgca

SEQ ID NO: 1053551 - DNA, 25 bp, Homo sapien
tggccacaaatgatccaaccgcctt

SEQ ID NO: 1053552 - DNA, 25 bp, Homo sapien
tagcaattgtcgtgcctcagcttcc

SEQ ID NO: 1053553 - DNA, 25 bp, Homo sapien
aactcctggccacaaatgatccaac

SEQ ID NO: 1053554 - DNA, 25 bp, Homo sapien
tggttttgggatccaggaacacatc

SEQ ID NO: 1053555 - DNA, 25 bp, Homo sapien
tgagttaagaaaaaacaacttctca

SEQ ID NO: 1053556 - DNA, 25 bp, Homo sapien
gtgcgggagtatgagttaagaaaaa

SEQ ID NO: 1053557 - DNA, 25 bp, Homo sapien
caacttctcagatactggaaacttt

SEQ ID NO: 1053558 - DNA, 25 bp, Homo sapien
cagatactggaaactttggttttgg

SEQ ID NO: 1053559 - DNA, 25 bp, Homo sapien
ttttgggatccaggaacacatcgat

SEQ ID NO: 1053560 - DNA, 25 bp, Homo sapien
tgagaagttgttttttcttaactca

SEQ ID NO: 1053561 - DNA, 25 bp, Homo sapien
gatgtgttcctggatcccaaaacca

SEQ ID NO: 1053562 - DNA, 25 bp, Homo sapien
aaaaccaaagtttccagtatctgag

SEQ ID NO: 1053563 - DNA, 25 bp, Homo sapien
tttttcttaactcatactcccgcac

SEQ ID NO: 1053564 - DNA, 25 bp, Homo sapien
atcgatgtgttcctggatcccaaaa

SEQ ID NO: 1053565 - DNA, 25 bp, Homo sapien
aaagtttccagtatctgagaagttg

SEQ ID NO: 1053566 - DNA, 25 bp, Homo sapien
atgacccaagcattggtatctacgg

SEQ ID NO: 1053567 - DNA, 25 bp, Homo sapien
ccgtagataccaatgcttgggtcat

SEQ ID NO: 1053568 - DNA, 25 bp, Homo sapien
taataagacttggatactcacagga

SEQ ID NO: 1053569 - DNA, 25 bp, Homo sapien
ggaacagcacacctttgggaagcat

SEQ ID NO: 1053570 - DNA, 25 bp, Homo sapien
gcagtcgaggatctgtaaagcaccc

SEQ ID NO: 1053571 - DNA, 25 bp, Homo sapien
ggcaccctcattagacagacaagta

SEQ ID NO: 1053572 - DNA, 25 bp, Homo sapien
cctgactagtgtggaacctgaaaga

SEQ ID NO: 1053573 - DNA, 25 bp, Homo sapien
gaggatcctcagcaccactggaaaa

SEQ ID NO: 1053574 - DNA, 25 bp, Homo sapien
tctttcaggttccacactagtcagg

SEQ ID NO: 1053575 - DNA, 25 bp, Homo sapien
aagtttcaaatcactggctggaggg

SEQ ID NO: 1053576 - DNA, 25 bp, Homo sapien
ttgttggaccaaaacacggcagtaa

SEQ ID NO: 1053577 - DNA, 25 bp, Homo sapien
ggtgctttacagatcctcgactgca

SEQ ID NO: 1053578 - DNA, 25 bp, Homo sapien
tacttgtctgtctaatgagggtgcc

SEQ ID NO: 1053579 - DNA, 25 bp, Homo sapien
tcaaagagtcacttggcagcccaat

SEQ ID NO: 1053580 - DNA, 25 bp, Homo sapien
acacagaatcagcaaagaggaggcc

SEQ ID NO: 1053581 - DNA, 25 bp, Homo sapien
gccaggtttcagcatcgcagacaag

SEQ ID NO: 1053582 - DNA, 25 bp, Homo sapien
acaagaagcgcaggacaggctgcat

SEQ ID NO: 1053583 - DNA, 25 bp, Homo sapien
tgggtaggccaggtttcagcatcgc

SEQ ID NO: 1053584 - DNA, 25 bp, Homo sapien
agcatcgcagacaagaagcgcagga

SEQ ID NO: 1053585 - DNA, 25 bp, Homo sapien
tttcagcatcgcagacaagaagcgc

SEQ ID NO: 1053586 - DNA, 25 bp, Homo sapien
tcctgcgcttcttgtctgcgatgct

SEQ ID NO: 1053587 - DNA, 25 bp, Homo sapien
ggcctcctctttgctgattctgtgt

SEQ ID NO: 1053588 - DNA, 25 bp, Homo sapien
tcttgtctgcgatgctgaaacctgg

SEQ ID NO: 1053589 - DNA, 25 bp, Homo sapien
tctgcgatgctgaaacctggcctac

SEQ ID NO: 1053590 - DNA, 25 bp, Homo sapien
gattctgtgtttggccccaatgcag

SEQ ID NO: 1053591 - DNA, 25 bp, Homo sapien
aatgcagcctgtcctgcgcttcttg

SEQ ID NO: 1053592 - DNA, 25 bp, Homo sapien
aaagaacatccagaactaggccttc

SEQ ID NO: 1053593 - DNA, 25 bp, Homo sapien
cagccagcttcctatttagtccaga

SEQ ID NO: 1053594 - DNA, 25 bp, Homo sapien
tcagcacagtgtaaaaaccagccag

SEQ ID NO: 1053595 - DNA, 25 bp, Homo sapien
gagcccaagttcatgtatcaatcag

SEQ ID NO: 1053596 - DNA, 25 bp, Homo sapien
tctcagatgatagtgcagttcagca

SEQ ID NO: 1053597 - DNA, 25 bp, Homo sapien
tattgggcatcttgacaaatcaggg

SEQ ID NO: 1053598 - DNA, 25 bp, Homo sapien
ctggctggtttttacactgtgctga

SEQ ID NO: 1053599 - DNA, 25 bp, Homo sapien
acaggaggcaacagcagagattgca

SEQ ID NO: 1053600 - DNA, 25 bp, Homo sapien
tctggactaaataggaagctggctg

SEQ ID NO: 1053601 - DNA, 25 bp, Homo sapien
ccctgatttgtcaagatgcccaata

SEQ ID NO: 1053602 - DNA, 25 bp, Homo sapien
tgctgaactgcactatcatctgaga

SEQ ID NO: 1053603 - DNA, 25 bp, Homo sapien
gattgatacatgaacttgggctctg

SEQ ID NO: 1053604 - DNA, 25 bp, Homo sapien
tatgatgggatcatccttcctggca

SEQ ID NO: 1053605 - DNA, 25 bp, Homo sapien
tgccaggaaggatgatcccatcata

SEQ ID NO: 1053606 - DNA, 25 bp, Homo sapien
cgtttctatccaaaagagcaataaa

SEQ ID NO: 1053607 - DNA, 25 bp, Homo sapien
gtttctatccaaaagagcaataaaa

SEQ ID NO: 1053608 - DNA, 25 bp, Homo sapien
ccgtttctatccaaaagagcaataa

SEQ ID NO: 1053609 - DNA, 25 bp, Homo sapien
attcccgtttctatccaaaagagca

SEQ ID NO: 1053610 - DNA, 25 bp, Homo sapien
tcccgtttctatccaaaagagcaat

SEQ ID NO: 1053611 - DNA, 25 bp, Homo sapien
cccgtttctatccaaaagagcaata

SEQ ID NO: 1053612 - DNA, 25 bp, Homo sapien
ttattgctcttttggatagaaacgg

SEQ ID NO: 1053613 - DNA, 25 bp, Homo sapien
tttattgctcttttggatagaaacg

SEQ ID NO: 1053614 - DNA, 25 bp, Homo sapien
ttttattgctcttttggatagaaac

SEQ ID NO: 1053615 - DNA, 25 bp, Homo sapien
ttgctcttttggatagaaacgggaa

SEQ ID NO: 1053616 - DNA, 25 bp, Homo sapien
tattgctcttttggatagaaacggg

SEQ ID NO: 1053617 - DNA, 25 bp, Homo sapien
tgctcttttggatagaaacgggaat

SEQ ID NO: 1053618 - DNA, 25 bp, Homo sapien
tgcaccacagcacatcaaccaaggt

SEQ ID NO: 1053619 - DNA, 25 bp, Homo sapien
gcaccctgcttaaccaaggctctaa

SEQ ID NO: 1053620 - DNA, 25 bp, Homo sapien
ctatgaagcttggacttggatctgc

SEQ ID NO: 1053621 - DNA, 25 bp, Homo sapien
tcctggaacacaggagcactgcacc

SEQ ID NO: 1053622 - DNA, 25 bp, Homo sapien
tgaaaccccttttgagcactacgtg

SEQ ID NO: 1053623 - DNA, 25 bp, Homo sapien
cactacgtggctggtgctagtctga

SEQ ID NO: 1053624 - DNA, 25 bp, Homo sapien
ggcagattaacaactcacccgaggt

SEQ ID NO: 1053625 - DNA, 25 bp, Homo sapien
gctggaaacggaaagactgccctct

SEQ ID NO: 1053626 - DNA, 25 bp, Homo sapien
ggttagctctttgaactcccaacag

SEQ ID NO: 1053627 - DNA, 25 bp, Homo sapien
tagtatgcgtacaaatcacccgcag

SEQ ID NO: 1053628 - DNA, 25 bp, Homo sapien
gcaagtcaagcttctagccagaata

SEQ ID NO: 1053629 - DNA, 25 bp, Homo sapien
gagctaggactaaaacctggttagc

SEQ ID NO: 1053630 - DNA, 25 bp, Homo sapien
tgttgacaagtaaaggccaactcca

SEQ ID NO: 1053631 - DNA, 25 bp, Homo sapien
tggaagtacaccctcctctggagtt

SEQ ID NO: 1053632 - DNA, 25 bp, Homo sapien
ggcagttacaggctcttcacggaaa

SEQ ID NO: 1053633 - DNA, 25 bp, Homo sapien
taagtgaccaccctgagagtaacaa

SEQ ID NO: 1053634 - DNA, 25 bp, Homo sapien
gcagaagaggcacaagtattaatac

SEQ ID NO: 1053635 - DNA, 25 bp, Homo sapien
tatttttgctcacctagcagcaggg

SEQ ID NO: 1053636 - DNA, 25 bp, Homo sapien
ggttcaatgctatgcttcaggtagg

SEQ ID NO: 1053637 - DNA, 25 bp, Homo sapien
cagcagggactatatatccatctgg

SEQ ID NO: 1053638 - DNA, 25 bp, Homo sapien
aagagttcaggaatctgtgtatata

SEQ ID NO: 1053639 - DNA, 25 bp, Homo sapien
tcagtgttgtaagaatgtgaattct

SEQ ID NO: 1053640 - DNA, 25 bp, Homo sapien
tgtgaactgtagtcaaaaacctttg

SEQ ID NO: 1053641 - DNA, 25 bp, Homo sapien
caaccttcagtgttgtaagaatgtg

SEQ ID NO: 1053642 - DNA, 25 bp, Homo sapien
tggctgtgcatacaactcacctagg

SEQ ID NO: 1053643 - DNA, 25 bp, Homo sapien
cccagtactgtgcaaggcttaagga

SEQ ID NO: 1053644 - DNA, 25 bp, Homo sapien
ttcaaactgagaaagcctgccctcc

SEQ ID NO: 1053645 - DNA, 25 bp, Homo sapien
ggtgattctcctatacccagcccag

SEQ ID NO: 1053646 - DNA, 25 bp, Homo sapien
acaggtgtcccactcttacccagga

SEQ ID NO: 1053647 - DNA, 25 bp, Homo sapien
tttttaagacacaggtgtcccactc

SEQ ID NO: 1053648 - DNA, 25 bp, Homo sapien
aagacacaggtgtcccactcttacc

SEQ ID NO: 1053649 - DNA, 25 bp, Homo sapien
gtcccactcttacccaggatgaagt

SEQ ID NO: 1053650 - DNA, 25 bp, Homo sapien
gattcatttcgctcccagtaaaggc

SEQ ID NO: 1053651 - DNA, 25 bp, Homo sapien
tacagttgcacaagagcactgagct

SEQ ID NO: 1053652 - DNA, 25 bp, Homo sapien
tctgccaacctagcaaggagtgatt

SEQ ID NO: 1053653 - DNA, 25 bp, Homo sapien
gcactgagctgacaatactttctga

SEQ ID NO: 1053654 - DNA, 25 bp, Homo sapien
tatatagtctaacacagttccttca

SEQ ID NO: 1053655 - DNA, 25 bp, Homo sapien
gtatatagtctaacacagttccttc

SEQ ID NO: 1053656 - DNA, 25 bp, Homo sapien
cctgaatccaagagggatgtatata

SEQ ID NO: 1053657 - DNA, 25 bp, Homo sapien
gagggatgtatataatctaacacag

SEQ ID NO: 1053658 - DNA, 25 bp, Homo sapien
gggatgtatatagtctaacacagtt

SEQ ID NO: 1053659 - DNA, 25 bp, Homo sapien
tgtatatagtctaacacagttcctt

SEQ ID NO: 1053660 - DNA, 25 bp, Homo sapien
gagggatgtatatagtctaacacag

SEQ ID NO: 1053661 - DNA, 25 bp, Homo sapien
gatgtatatagtctaacacagttcc

SEQ ID NO: 1053662 - DNA, 25 bp, Homo sapien
cttcacgaacctgaatccaagaggg

SEQ ID NO: 1053663 - DNA, 25 bp, Homo sapien
ccaggagggatgtatatagtctaac

SEQ ID NO: 1053664 - DNA, 25 bp, Homo sapien
tcacgaacctgaatccaagagggat

SEQ ID NO: 1053665 - DNA, 25 bp, Homo sapien
tcacgaacctgaatccaagagagat

SEQ ID NO: 1053666 - DNA, 25 bp, Homo sapien
gagaattcccaagtatatgcctcca

SEQ ID NO: 1053667 - DNA, 25 bp, Homo sapien
gattaactatctcaagccaagctct

SEQ ID NO: 1053668 - DNA, 25 bp, Homo sapien
gaaaaagactctcggatacccactg

SEQ ID NO: 1053669 - DNA, 25 bp, Homo sapien
gtactttgaaagactggaccaggat

SEQ ID NO: 1053670 - DNA, 25 bp, Homo sapien
taagtacgtggacttgaacggccca

SEQ ID NO: 1053671 - DNA, 25 bp, Homo sapien
tgagctccttgcaagcagggactgt

SEQ ID NO: 1053672 - DNA, 25 bp, Homo sapien
cagggactgtgactaaaccatctct

SEQ ID NO: 1053673 - DNA, 25 bp, Homo sapien
tccgcatagggcaatacacggtgtg

SEQ ID NO: 1053674 - DNA, 25 bp, Homo sapien
gaacatagatagcaaactggcagct

SEQ ID NO: 1053675 - DNA, 25 bp, Homo sapien
gagctacaggtacagcaggcgctta

SEQ ID NO: 1053676 - DNA, 25 bp, Homo sapien
tgagaaacagtaagatccagcagct

SEQ ID NO: 1053677 - DNA, 25 bp, Homo sapien
tagtacctgataggatgactgagcc

SEQ ID NO: 1053678 - DNA, 25 bp, Homo sapien
cagtacaacctgatgaaacgagttg

SEQ ID NO: 1053679 - DNA, 25 bp, Homo sapien
gtgctgagcccaagcctggaagacc

SEQ ID NO: 1053680 - DNA, 25 bp, Homo sapien
cctaggctgagcacacgatgcgtca

SEQ ID NO: 1053681 - DNA, 25 bp, Homo sapien
tacttcaagacggaatgaggccacc

SEQ ID NO: 1053682 - DNA, 25 bp, Homo sapien
gagacggaagcgcgcctggcccctt

SEQ ID NO: 1053683 - DNA, 25 bp, Homo sapien
cggcggagacggaagcgcgcctggc

SEQ ID NO: 1053684 - DNA, 25 bp, Homo sapien
gcggagacggaagcgcgcctggccc

SEQ ID NO: 1053685 - DNA, 25 bp, Homo sapien
ccccggcggagacggaagcgcgcct

SEQ ID NO: 1053686 - DNA, 25 bp, Homo sapien
ctgggctcgcgtcgcgtcctcgggc

SEQ ID NO: 1053687 - DNA, 25 bp, Homo sapien
gctcgcgtcgcgtcctcgggccgca

SEQ ID NO: 1053688 - DNA, 25 bp, Homo sapien
ggctcgcgtcgcgtcctcgggccgc

SEQ ID NO: 1053689 - DNA, 25 bp, Homo sapien
tgggctcgcgtcgcgtcctcgggcc

SEQ ID NO: 1053690 - DNA, 25 bp, Homo sapien
cgctgtcactggcgcggcctcctcg

SEQ ID NO: 1053691 - DNA, 25 bp, Homo sapien
ctgtcactggcgcggcctcctcgcc

SEQ ID NO: 1053692 - DNA, 25 bp, Homo sapien
cactggcgcggcctcctcgccggaa

SEQ ID NO: 1053693 - DNA, 25 bp, Homo sapien
gtcactggcgcggcctcctcgccgg

SEQ ID NO: 1053694 - DNA, 25 bp, Homo sapien
ggtccgggttcgcggccaggcgcgc

SEQ ID NO: 1053695 - DNA, 25 bp, Homo sapien
cttctccacaacttggagcgccgac

SEQ ID NO: 1053696 - DNA, 25 bp, Homo sapien
ccacaacttggagcgccgactccgc

SEQ ID NO: 1053697 - DNA, 25 bp, Homo sapien
ctccacaacttggagcgccgactcc

SEQ ID NO: 1053698 - DNA, 25 bp, Homo sapien
ttcactgagaaagcgaaaggtccac

SEQ ID NO: 1053699 - DNA, 25 bp, Homo sapien
tttcaggagtatgcttaggtgacgc

SEQ ID NO: 1053700 - DNA, 25 bp, Homo sapien
tatccagccggagagtagtaaccgc

SEQ ID NO: 1053701 - DNA, 25 bp, Homo sapien
taggtgacgcgaggctttattctgt

SEQ ID NO: 1053702 - DNA, 25 bp, Homo sapien
cttcatagatgagtgaaaattatcc

SEQ ID NO: 1053703 - DNA, 25 bp, Homo sapien
aattatcccccacttcaaatcctat

SEQ ID NO: 1053704 - DNA, 25 bp, Homo sapien
ccacttcaaatcctatcaccaccat

SEQ ID NO: 1053705 - DNA, 25 bp, Homo sapien
tcatagatgagtgaaaattatcccc

SEQ ID NO: 1053706 - DNA, 25 bp, Homo sapien
gaatgtctactgtaataggcagggt

SEQ ID NO: 1053707 - DNA, 25 bp, Homo sapien
cgcaagaatgtctactgtaataggc

SEQ ID NO: 1053708 - DNA, 25 bp, Homo sapien
tgtctactgtaataggcagggtgga

SEQ ID NO: 1053709 - DNA, 25 bp, Homo sapien
gcaagaatgtctactgtaataggca

SEQ ID NO: 1053710 - DNA, 25 bp, Homo sapien
ttcgcaagctatttactgttttccc

SEQ ID NO: 1053711 - DNA, 25 bp, Homo sapien
tccaacatgctcgtgttttcgcaag

SEQ ID NO: 1053712 - DNA, 25 bp, Homo sapien
tcgtgttttcgcaagctatttactg

SEQ ID NO: 1053713 - DNA, 25 bp, Homo sapien
gtccctggcaaagcttccaacatgc

SEQ ID NO: 1053714 - DNA, 25 bp, Homo sapien
tctggtgtgaaacaatgggctcctg

SEQ ID NO: 1053715 - DNA, 25 bp, Homo sapien
cctccagggatctgtagtggtcgac

SEQ ID NO: 1053716 - DNA, 25 bp, Homo sapien
tcctcaactttagggagggagccca

SEQ ID NO: 1053717 - DNA, 25 bp, Homo sapien
tggtcagggctataggatcggctcc

SEQ ID NO: 1053718 - DNA, 25 bp, Homo sapien
taacgggaggtctggcaacactggc

SEQ ID NO: 1053719 - DNA, 25 bp, Homo sapien
taattggcctgtatcgcgggtaacg

SEQ ID NO: 1053720 - DNA, 25 bp, Homo sapien
ttggctggaaggaggatatcagctc

SEQ ID NO: 1053721 - DNA, 25 bp, Homo sapien
gatatcagctcgagggaaggcagtg

SEQ ID NO: 1053722 - DNA, 25 bp, Homo sapien
cacacttggaaccagaatacacctg

SEQ ID NO: 1053723 - DNA, 25 bp, Homo sapien
cttggaattcattctgcgcccagta

SEQ ID NO: 1053724 - DNA, 25 bp, Homo sapien
tttaagtactcggatgcattgctgg

SEQ ID NO: 1053725 - DNA, 25 bp, Homo sapien
tgcaaggtcatcattttagggagat

SEQ ID NO: 1053726 - DNA, 25 bp, Homo sapien
tctccaaaacgggttcaagaacaga

SEQ ID NO: 1053727 - DNA, 25 bp, Homo sapien
gatacagctgatcaggtgtacacct

SEQ ID NO: 1053728 - DNA, 25 bp, Homo sapien
caggtgtacacctctccaaaacggg

SEQ ID NO: 1053729 - DNA, 25 bp, Homo sapien
atgattgtattcctctatgcgatac

SEQ ID NO: 1053730 - DNA, 25 bp, Homo sapien
actcatactcttcgggtctttcttc

SEQ ID NO: 1053731 - DNA, 25 bp, Homo sapien
agtctcggtgacaatgaactttcca

SEQ ID NO: 1053732 - DNA, 25 bp, Homo sapien
tttcttccttaaagtctcggtgaca

SEQ ID NO: 1053733 - DNA, 25 bp, Homo sapien
tcgccacgactcatactcttcgggt

SEQ ID NO: 1053734 - DNA, 25 bp, Homo sapien
ctttgggcttattggcatgtgcgaa

SEQ ID NO: 1053735 - DNA, 25 bp, Homo sapien
gcatgtgcgaactggatattctttg

SEQ ID NO: 1053736 - DNA, 25 bp, Homo sapien
tattctttgttagtactcgtagccg

SEQ ID NO: 1053737 - DNA, 25 bp, Homo sapien
ttagtactcgtagccgctgctctcg

SEQ ID NO: 1053738 - DNA, 25 bp, Homo sapien
tgaacatctgccttcttgagcagag

SEQ ID NO: 1053739 - DNA, 25 bp, Homo sapien
gagatgaacatctgccttcttgagc

SEQ ID NO: 1053740 - DNA, 25 bp, Homo sapien
ctgtggaattatggagatgaacatc

SEQ ID NO: 1053741 - DNA, 25 bp, Homo sapien
tctgccttcttgagcagagatgcta

SEQ ID NO: 1053742 - DNA, 25 bp, Homo sapien
tcacgaggtggcttggccacagagt

SEQ ID NO: 1053743 - DNA, 25 bp, Homo sapien
tgcctcctccggacgtcacgaggtg

SEQ ID NO: 1053744 - DNA, 25 bp, Homo sapien
cctccggacgtcacgaggtggcttg

SEQ ID NO: 1053745 - DNA, 25 bp, Homo sapien
agagttgacaaaggccatctttgct

SEQ ID NO: 1053746 - DNA, 25 bp, Homo sapien
gcactgctggtgcttgggccatcat

SEQ ID NO: 1053747 - DNA, 25 bp, Homo sapien
ctaggatcataggaaacagtgctgc

SEQ ID NO: 1053748 - DNA, 25 bp, Homo sapien
tcttcacagtgggtttcctaggatc

SEQ ID NO: 1053749 - DNA, 25 bp, Homo sapien
tgctactggcggaagcatggctgct

SEQ ID NO: 1053750 - DNA, 25 bp, Homo sapien
tgttcttgaaagctttaattgtctt

SEQ ID NO: 1053751 - DNA, 25 bp, Homo sapien
gaaagctttaattgtcttggccatc

SEQ ID NO: 1053752 - DNA, 25 bp, Homo sapien
gctttaattgtcttggccatcattg

SEQ ID NO: 1053753 - DNA, 25 bp, Homo sapien
cttgaaagctttaattgtcttggcc

SEQ ID NO: 1053754 - DNA, 25 bp, Homo sapien
tgcaggactcggagaccaaaaggat

SEQ ID NO: 1053755 - DNA, 25 bp, Homo sapien
ggagaccaaaaggatccacaaagca

SEQ ID NO: 1053756 - DNA, 25 bp, Homo sapien
tccatttccaaggcaagtcctcagt

SEQ ID NO: 1053757 - DNA, 25 bp, Homo sapien
gcagactgcaggactcggagaccaa

SEQ ID NO: 1053758 - DNA, 25 bp, Homo sapien
tctacctgggtcacaaccaagtggg

SEQ ID NO: 1053759 - DNA, 25 bp, Homo sapien
caaggttctgcgtcctctagtgagc

SEQ ID NO: 1053760 - DNA, 25 bp, Homo sapien
gaatagacttcctacgttgctctgg

SEQ ID NO: 1053761 - DNA, 25 bp, Homo sapien
gaagttggcctaactgaggtctcca

SEQ ID NO: 1053762 - DNA, 25 bp, Homo sapien
tcgaattatcctcccccgacgagga

SEQ ID NO: 1053763 - DNA, 25 bp, Homo sapien
tgtcttccttgatcgccacgtttct

SEQ ID NO: 1053764 - DNA, 25 bp, Homo sapien
cccgacgaggatggagccttcgctg

SEQ ID NO: 1053765 - DNA, 25 bp, Homo sapien
tttgcgagccgatgaaggaaagcgt

SEQ ID NO: 1053766 - DNA, 25 bp, Homo sapien
ggctcggctcgcctcagaccagctc

SEQ ID NO: 1053767 - DNA, 25 bp, Homo sapien
gctccgcgccgttcagctccggcaa

SEQ ID NO: 1053768 - DNA, 25 bp, Homo sapien
tccggcaactaagcgcgccgcgcct

SEQ ID NO: 1053769 - DNA, 25 bp, Homo sapien
ctgcgcgtcctctcggccccaccgc

SEQ ID NO: 1053770 - DNA, 25 bp, Homo sapien
tgccctcgcggctctcgttaaggca

SEQ ID NO: 1053771 - DNA, 25 bp, Homo sapien
cgttaaggcattgcagccgctccag

SEQ ID NO: 1053772 - DNA, 25 bp, Homo sapien
ctcccacggcttgaagacgccgcgg

SEQ ID NO: 1053773 - DNA, 25 bp, Homo sapien
cgctccaggtcgatgcgcaggtaca

SEQ ID NO: 1053774 - DNA, 25 bp, Homo sapien
atatttgctgagagcctacaatttc

SEQ ID NO: 1053775 - DNA, 25 bp, Homo sapien
aatatttgctgagagcctacaattt

SEQ ID NO: 1053776 - DNA, 25 bp, Homo sapien
cttcatctgcatcactttcaacaaa

SEQ ID NO: 1053777 - DNA, 25 bp, Homo sapien
ggaatattaaacagaagctcttcat

SEQ ID NO: 1053778 - DNA, 25 bp, Homo sapien
tcttcatctgcatcactttcaacaa

SEQ ID NO: 1053779 - DNA, 25 bp, Homo sapien
atattaaacagaagctcttcatctg

SEQ ID NO: 1053780 - DNA, 25 bp, Homo sapien
cctgaggtaggcaccaaggagatac

SEQ ID NO: 1053781 - DNA, 25 bp, Homo sapien
aaatgtgtgctcttgacaccagtga

SEQ ID NO: 1053782 - DNA, 25 bp, Homo sapien
catctgtttccagtctgcaccaaga

SEQ ID NO: 1053783 - DNA, 25 bp, Homo sapien
tgaatgaatccatctgaggcaactg

SEQ ID NO: 1053784 - DNA, 25 bp, Homo sapien
ctcagaggggtgtgagtcatcatcc

SEQ ID NO: 1053785 - DNA, 25 bp, Homo sapien
tctcatctcagaggggtgtgagtca

SEQ ID NO: 1053786 - DNA, 25 bp, Homo sapien
tttgagcttgacattgcccgtaaat

SEQ ID NO: 1053787 - DNA, 25 bp, Homo sapien
tcctctcccattataatgatgcctt

SEQ ID NO: 1053788 - DNA, 25 bp, Homo sapien
gtgattctcatgcttcagcttctcc

SEQ ID NO: 1053789 - DNA, 25 bp, Homo sapien
caacctgcacctccgcggttcaagt

SEQ ID NO: 1053790 - DNA, 25 bp, Homo sapien
ttcagcttctccagtagctaggatt

SEQ ID NO: 1053791 - DNA, 25 bp, Homo sapien
aacctgcacctccgcggttcaagtg

SEQ ID NO: 1053792 - DNA, 25 bp, Homo sapien
ggtgatccgcctacgtcggtctccg

SEQ ID NO: 1053793 - DNA, 25 bp, Homo sapien
acaggcatgagccaccgcgtctagc

SEQ ID NO: 1053794 - DNA, 25 bp, Homo sapien
gatccgcctacgtcggtctccgaaa

SEQ ID NO: 1053795 - DNA, 25 bp, Homo sapien
gaaagtgctggaattacaggcatga

SEQ ID NO: 1053796 - DNA, 25 bp, Homo sapien
tgtaagatcccggttcagactaaag

SEQ ID NO: 1053797 - DNA, 25 bp, Homo sapien
catcaaaggacatctgtggaatatt

SEQ ID NO: 1053798 - DNA, 25 bp, Homo sapien
gtatcatcaaaggacatctgtggaa

SEQ ID NO: 1053799 - DNA, 25 bp, Homo sapien
tcctgtaagatcccggttcagacta

SEQ ID NO: 1053800 - DNA, 25 bp, Homo sapien
taaaagacctttgtcgtatctgctc

SEQ ID NO: 1053801 - DNA, 25 bp, Homo sapien
tcctctcaggccaatataaaagacc

SEQ ID NO: 1053802 - DNA, 25 bp, Homo sapien
tatctgctccgaagttttttgaaat

SEQ ID NO: 1053803 - DNA, 25 bp, Homo sapien
gacctttgtcgtatctgctccgaag

SEQ ID NO: 1053804 - DNA, 25 bp, Homo sapien
gggtcagccagccattaaaagaact

SEQ ID NO: 1053805 - DNA, 25 bp, Homo sapien
cacacattgcggtagtccttattca

SEQ ID NO: 1053806 - DNA, 25 bp, Homo sapien
gattcagtctccctactataatggg

SEQ ID NO: 1053807 - DNA, 25 bp, Homo sapien
ggtaccatgagaataggaacttgtc

SEQ ID NO: 1053808 - DNA, 25 bp, Homo sapien
agatggtcacctcgtgtcggcgaag

SEQ ID NO: 1053809 - DNA, 25 bp, Homo sapien
ggttggcagatgcttcgtaattgca

SEQ ID NO: 1053810 - DNA, 25 bp, Homo sapien
ctgatggaccctatggtctgctggg

SEQ ID NO: 1053811 - DNA, 25 bp, Homo sapien
tgcttcgtaattgcagatggtcacc

SEQ ID NO: 1053812 - DNA, 25 bp, Homo sapien
ggaaataaagtgtgtctgtggggta

SEQ ID NO: 1053813 - DNA, 25 bp, Homo sapien
taggaaataaagtgtgtctgtgggg

SEQ ID NO: 1053814 - DNA, 25 bp, Homo sapien
gaaataaagtgtgtctgtggggtaa

SEQ ID NO: 1053815 - DNA, 25 bp, Homo sapien
ttaggaaataaagtgtgtctgtggg

SEQ ID NO: 1053816 - DNA, 25 bp, Homo sapien
ggtgtcgtatcttccgtaggccagg

SEQ ID NO: 1053817 - DNA, 25 bp, Homo sapien
gcaagtgttacccatgactgccaga

SEQ ID NO: 1053818 - DNA, 25 bp, Homo sapien
tactaacacaatccggaggcatcag

SEQ ID NO: 1053819 - DNA, 25 bp, Homo sapien
tgacacagcgcctctatgggagcct

SEQ ID NO: 1053820 - DNA, 25 bp, Homo sapien
tataatctacctagtccaaaacaac

SEQ ID NO: 1053821 - DNA, 25 bp, Homo sapien
ccagtcttgatttaattgtggcact

SEQ ID NO: 1053822 - DNA, 25 bp, Homo sapien
aaagttcagtacagttccccatgaa

SEQ ID NO: 1053823 - DNA, 25 bp, Homo sapien
gaaagttgcatcagtggctatcaag

SEQ ID NO: 1053824 - DNA, 25 bp, Homo sapien
ttccgaggccgcttgggcgattctc

SEQ ID NO: 1053825 - DNA, 25 bp, Homo sapien
agtagcctggccgacagtacggaac

SEQ ID NO: 1053826 - DNA, 25 bp, Homo sapien
cattcagccgcgcagtcgctgggtt

SEQ ID NO: 1053827 - DNA, 25 bp, Homo sapien
cttcgctggatagaagctgccatgt

SEQ ID NO: 1053828 - DNA, 25 bp, Homo sapien
ctgctgctgccactgactgcaaacg

SEQ ID NO: 1053829 - DNA, 25 bp, Homo sapien
gctgctgccactgactgcaaacgag

SEQ ID NO: 1053830 - DNA, 25 bp, Homo sapien
tgctgctgccactgactgcaaacga

SEQ ID NO: 1053831 - DNA, 25 bp, Homo sapien
ggcccaagaggccaccaggccatca

SEQ ID NO: 1053832 - DNA, 25 bp, Homo sapien
ctggcccaagaggccaccaggccat

SEQ ID NO: 1053833 - DNA, 25 bp, Homo sapien
gccaccaggccatcagccccacaca

SEQ ID NO: 1053834 - DNA, 25 bp, Homo sapien
aagaggccaccaggccatcagcccc

SEQ ID NO: 1053835 - DNA, 25 bp, Homo sapien
gggcggcggtcaagagcaaaaccag

SEQ ID NO: 1053836 - DNA, 25 bp, Homo sapien
ggcggcggtcaagagcaaaaccagg

SEQ ID NO: 1053837 - DNA, 25 bp, Homo sapien
ggggcggcggtcaagagcaaaacca

SEQ ID NO: 1053838 - DNA, 25 bp, Homo sapien
acaccacacggctccacggcggggg

SEQ ID NO: 1053839 - DNA, 25 bp, Homo sapien
caccacacggctccacggcgggggc

SEQ ID NO: 1053840 - DNA, 25 bp, Homo sapien
catcggtgagcaggggcacagacat

SEQ ID NO: 1053841 - DNA, 25 bp, Homo sapien
tcagctccagacacggtggcagcat

SEQ ID NO: 1053842 - DNA, 25 bp, Homo sapien
tccagacacggtggcagcatcggtg

SEQ ID NO: 1053843 - DNA, 25 bp, Homo sapien
cgcggccgtttcccgctcagctcca

SEQ ID NO: 1053844 - DNA, 25 bp, Homo sapien
tctccaagtccatgtaaaaaaataa

SEQ ID NO: 1053845 - DNA, 25 bp, Homo sapien
cctgtgtctccaagtccatgtaaaa

SEQ ID NO: 1053846 - DNA, 25 bp, Homo sapien
gtgtctccaagtccatgtaaaaaaa

SEQ ID NO: 1053847 - DNA, 25 bp, Homo sapien
ctgtgtctccaagtccatgtaaaaa

SEQ ID NO: 1053848 - DNA, 25 bp, Homo sapien
tacttgacgtgagggagccggatgg

SEQ ID NO: 1053849 - DNA, 25 bp, Homo sapien
gcatggggacagatgtacttgacgt

SEQ ID NO: 1053850 - DNA, 25 bp, Homo sapien
gagccggatggtggagagggcgtca

SEQ ID NO: 1053851 - DNA, 25 bp, Homo sapien
cagatgtacttgacgtgagggagcc

SEQ ID NO: 1053852 - DNA, 25 bp, Homo sapien
aagagagccagagggcccatcatgc

SEQ ID NO: 1053853 - DNA, 25 bp, Homo sapien
gaaagagagccagagggcccatcat

SEQ ID NO: 1053854 - DNA, 25 bp, Homo sapien
ctggggaaagagagccagagggccc

SEQ ID NO: 1053855 - DNA, 25 bp, Homo sapien
gggaaagagagccagagggcccatc

SEQ ID NO: 1053856 - DNA, 25 bp, Homo sapien
atgttgagggtcacagggatcctag

SEQ ID NO: 1053857 - DNA, 25 bp, Homo sapien
tcttcatgttgagggtcacagggat

SEQ ID NO: 1053858 - DNA, 25 bp, Homo sapien
ttcatgttgagggtcacagggatcc

SEQ ID NO: 1053859 - DNA, 25 bp, Homo sapien
caggagggcatcaccatcttcatgt

SEQ ID NO: 1053860 - DNA, 25 bp, Homo sapien
tcttgatgccagcctcgtcctctgg

SEQ ID NO: 1053861 - DNA, 25 bp, Homo sapien
ccttcttgatgccagcctcgtcctc

SEQ ID NO: 1053862 - DNA, 25 bp, Homo sapien
ttcttgatgccagcctcgtcctctg

SEQ ID NO: 1053863 - DNA, 25 bp, Homo sapien
cttgatgccagcctcgtcctctggg

SEQ ID NO: 1053864 - DNA, 25 bp, Homo sapien
tggggggcaggggaaggaggatgtg

SEQ ID NO: 1053865 - DNA, 25 bp, Homo sapien
ggggcaggggaaggaggatgtggag

SEQ ID NO: 1053866 - DNA, 25 bp, Homo sapien
ctggggggcaggggaaggaggatgt

SEQ ID NO: 1053867 - DNA, 25 bp, Homo sapien
gcaggggaaggaggatgtggaggag

SEQ ID NO: 1053868 - DNA, 25 bp, Homo sapien
agctaggctgaggaaccgcccagcg

SEQ ID NO: 1053869 - DNA, 25 bp, Homo sapien
ggagctaggctgaggaaccgcccag

SEQ ID NO: 1053870 - DNA, 25 bp, Homo sapien
caaggggcccaataagggagctagg

SEQ ID NO: 1053871 - DNA, 25 bp, Homo sapien
taggctgaggaaccgcccagcgctt

SEQ ID NO: 1053872 - DNA, 25 bp, Homo sapien
ggagggggcatgagtgggtagaggg

SEQ ID NO: 1053873 - DNA, 25 bp, Homo sapien
agggggcatgagtgggtagagggaa

SEQ ID NO: 1053874 - DNA, 25 bp, Homo sapien
gggggcatgagtgggtagagggaag

SEQ ID NO: 1053875 - DNA, 25 bp, Homo sapien
ggggagggggcatgagtgggtagag

SEQ ID NO: 1053876 - DNA, 25 bp, Homo sapien
catttcatgctcaatcaaggccttg

SEQ ID NO: 1053877 - DNA, 25 bp, Homo sapien
cgattggcagggatcccgttcttca

SEQ ID NO: 1053878 - DNA, 25 bp, Homo sapien
tcccaggacgattcgattggcaggg

SEQ ID NO: 1053879 - DNA, 25 bp, Homo sapien
ctgtgaaaagcctcccaggacgatt

SEQ ID NO: 1053880 - DNA, 25 bp, Homo sapien
ctgggggaaggcccggtgcagaggc

SEQ ID NO: 1053881 - DNA, 25 bp, Homo sapien
tccccaagccacgaggatgcagaca

SEQ ID NO: 1053882 - DNA, 25 bp, Homo sapien
caggactcagggcaaagctagtgct

SEQ ID NO: 1053883 - DNA, 25 bp, Homo sapien
gcagcagtccccaagccacgaggat

SEQ ID NO: 1053884 - DNA, 25 bp, Homo sapien
caaagctagtgctgcagcagtcccc

SEQ ID NO: 1053885 - DNA, 25 bp, Homo sapien
tgtgacaacagaccggagcttctca

SEQ ID NO: 1053886 - DNA, 25 bp, Homo sapien
gacaacagaccggagcttctcagcc

SEQ ID NO: 1053887 - DNA, 25 bp, Homo sapien
caggtgtgacaacagaccggagctt

SEQ ID NO: 1053888 - DNA, 25 bp, Homo sapien
ggtgtgacaacagaccggagcttct

SEQ ID NO: 1053889 - DNA, 25 bp, Homo sapien
tgacacccgggtatgtcttgaactg

SEQ ID NO: 1053890 - DNA, 25 bp, Homo sapien
agctgtgcatgacacccgggtatgt

SEQ ID NO: 1053891 - DNA, 25 bp, Homo sapien
catgacacccgggtatgtcttgaac

SEQ ID NO: 1053892 - DNA, 25 bp, Homo sapien
ggacaggagctgtgcatgacacccg

SEQ ID NO: 1053893 - DNA, 25 bp, Homo sapien
ggattaagaggggatcacgagaggc

SEQ ID NO: 1053894 - DNA, 25 bp, Homo sapien
attaagaggggatcacgagaggcac

SEQ ID NO: 1053895 - DNA, 25 bp, Homo sapien
taagaggggatcacgagaggcacct

SEQ ID NO: 1053896 - DNA, 25 bp, Homo sapien
ctgaggggattaagaggggatcacg

SEQ ID NO: 1053897 - DNA, 25 bp, Homo sapien
cagcagcttctcaagaaattccttc

SEQ ID NO: 1053898 - DNA, 25 bp, Homo sapien
agcagcttctcaagaaattccttca

SEQ ID NO: 1053899 - DNA, 25 bp, Homo sapien
gcagcagcttctcaagaaattcctt

SEQ ID NO: 1053900 - DNA, 25 bp, Homo sapien
gatggtgccacgcttgcttgctgag

SEQ ID NO: 1053901 - DNA, 25 bp, Homo sapien
gggctcgaccggctcagatccaaga

SEQ ID NO: 1053902 - DNA, 25 bp, Homo sapien
tgcttgctgagtcccccatgagctg

SEQ ID NO: 1053903 - DNA, 25 bp, Homo sapien
cccagaggcctgtgggaaaaggaca

SEQ ID NO: 1053904 - DNA, 25 bp, Homo sapien
gataagaaagcagcctgcccctgct

SEQ ID NO: 1053905 - DNA, 25 bp, Homo sapien
gggcccgcctccagggaaatggata

SEQ ID NO: 1053906 - DNA, 25 bp, Homo sapien
agtgagtgggtcagcggctgggccc

SEQ ID NO: 1053907 - DNA, 25 bp, Homo sapien
gtagcccctccaatactgctgccag

SEQ ID NO: 1053908 - DNA, 25 bp, Homo sapien
cctgaggtcacaggagggggcccaa

SEQ ID NO: 1053909 - DNA, 25 bp, Homo sapien
tgaggtcacaggagggggcccaaag

SEQ ID NO: 1053910 - DNA, 25 bp, Homo sapien
caaagcggggctagtgagtgaggtc

SEQ ID NO: 1053911 - DNA, 25 bp, Homo sapien
ccccatgggccaaaccctgaggtca

SEQ ID NO: 1053912 - DNA, 25 bp, Homo sapien
gggcagaatcagttggggcaggggc

SEQ ID NO: 1053913 - DNA, 25 bp, Homo sapien
tgggcagaatcagttggggcagggg

SEQ ID NO: 1053914 - DNA, 25 bp, Homo sapien
ctgggcagaatcagttggggcaggg

SEQ ID NO: 1053915 - DNA, 25 bp, Homo sapien
catggccacattcatgactgagaag

SEQ ID NO: 1053916 - DNA, 25 bp, Homo sapien
ggccatggccacattcatgactgag

SEQ ID NO: 1053917 - DNA, 25 bp, Homo sapien
agcagcaaggggaccccggggccat

SEQ ID NO: 1053918 - DNA, 25 bp, Homo sapien
ggccacattcatgactgagaagcag

SEQ ID NO: 1053919 - DNA, 25 bp, Homo sapien
tggggaaacagctgagggaaggccc

SEQ ID NO: 1053920 - DNA, 25 bp, Homo sapien
acagctgagggaaggcccccctcaa

SEQ ID NO: 1053921 - DNA, 25 bp, Homo sapien
agtgtggggaaacagctgagggaag

SEQ ID NO: 1053922 - DNA, 25 bp, Homo sapien
gccccccagtgtggggaaacagctg

SEQ ID NO: 1053923 - DNA, 25 bp, Homo sapien
gggggagacctgaacctcagtccag

SEQ ID NO: 1053924 - DNA, 25 bp, Homo sapien
gggagacctgaacctcagtccagcc

SEQ ID NO: 1053925 - DNA, 25 bp, Homo sapien
tggggggagacctgaacctcagtcc

SEQ ID NO: 1053926 - DNA, 25 bp, Homo sapien
ctccctgctctagagtggggacaaa

SEQ ID NO: 1053927 - DNA, 25 bp, Homo sapien
ttccacagggtccaagagttcatca

SEQ ID NO: 1053928 - DNA, 25 bp, Homo sapien
gcaaggctctggcacaaaacctcct

SEQ ID NO: 1053929 - DNA, 25 bp, Homo sapien
tttggcacgcaagcctgaggaccct

SEQ ID NO: 1053930 - DNA, 25 bp, Homo sapien
ggaggctctgcattccaccgtgggc

SEQ ID NO: 1053931 - DNA, 25 bp, Homo sapien
ccaacagtctttctgcaaagggcag

SEQ ID NO: 1053932 - DNA, 25 bp, Homo sapien
ctaaatggaccaaagatctgagatc

SEQ ID NO: 1053933 - DNA, 25 bp, Homo sapien
tatttagttagcatcagttgtcacc

SEQ ID NO: 1053934 - DNA, 25 bp, Homo sapien
taaaggaactgagtacattaccctg

SEQ ID NO: 1053935 - DNA, 25 bp, Homo sapien
taaccatgcctctatcagtggacat

SEQ ID NO: 1053936 - DNA, 25 bp, Homo sapien
agtatttaataccatgtgctgccag

SEQ ID NO: 1053937 - DNA, 25 bp, Homo sapien
cagtggacatatgggcagtttccta

SEQ ID NO: 1053938 - DNA, 25 bp, Homo sapien
taatgaccattcatcatccttgttg

SEQ ID NO: 1053939 - DNA, 25 bp, Homo sapien
tccaggctgcatggtgcaggcagac

SEQ ID NO: 1053940 - DNA, 25 bp, Homo sapien
caggctgcatggtgcaggcagacca

SEQ ID NO: 1053941 - DNA, 25 bp, Homo sapien
aggctgcatggtgcaggcagaccag

SEQ ID NO: 1053942 - DNA, 25 bp, Homo sapien
cttccaggctgcatggtgcaggcag

SEQ ID NO: 1053943 - DNA, 25 bp, Homo sapien
catgtgacagcgtgtgtccaggcac

SEQ ID NO: 1053944 - DNA, 25 bp, Homo sapien
tagggacaacctgtaccagggtcac

SEQ ID NO: 1053945 - DNA, 25 bp, Homo sapien
gacaagatagaacccaggatgtgag

SEQ ID NO: 1053946 - DNA, 25 bp, Homo sapien
caagaacaagtatggctccgagacg

SEQ ID NO: 1053947 - DNA, 25 bp, Homo sapien
ccatattggacctcacgggtgacgg

SEQ ID NO: 1053948 - DNA, 25 bp, Homo sapien
aggacaagggaatttacagagcgat

SEQ ID NO: 1053949 - DNA, 25 bp, Homo sapien
gggaggacgacaccatattggacct

SEQ ID NO: 1053950 - DNA, 25 bp, Homo sapien
tttacagagcgatggtttctgacga

SEQ ID NO: 1053951 - DNA, 25 bp, Homo sapien
gtaggattcgtgtgaggtggaccag

SEQ ID NO: 1053952 - DNA, 25 bp, Homo sapien
gggtaggattcgtgtgaggtggacc

SEQ ID NO: 1053953 - DNA, 25 bp, Homo sapien
cccagcgcccatggggtaggattcg

SEQ ID NO: 1053954 - DNA, 25 bp, Homo sapien
cttcccagcgcccatggggtaggat

SEQ ID NO: 1053955 - DNA, 25 bp, Homo sapien
cagaactgtttagagccaccaagct

SEQ ID NO: 1053956 - DNA, 25 bp, Homo sapien
tgaacagaactgtttagagccacca

SEQ ID NO: 1053957 - DNA, 25 bp, Homo sapien
gagaccagtctgcaacatgttcaaa

SEQ ID NO: 1053958 - DNA, 25 bp, Homo sapien
tgtttagagccaccaagcttgagct

SEQ ID NO: 1053959 - DNA, 25 bp, Homo sapien
agtcgtacaaccggctgtttgcaag

SEQ ID NO: 1053960 - DNA, 25 bp, Homo sapien
tcgtacaaccggctgtttgcaagct

SEQ ID NO: 1053961 - DNA, 25 bp, Homo sapien
taaagtcgtacaaccggctgtttgc

SEQ ID NO: 1053962 - DNA, 25 bp, Homo sapien
caaagtaaagtcgtacaaccggctg

SEQ ID NO: 1053963 - DNA, 25 bp, Homo sapien
taccgaaactctctgaacctgactt

SEQ ID NO: 1053964 - DNA, 25 bp, Homo sapien
taggcgctaaggagaaagacattga

SEQ ID NO: 1053965 - DNA, 25 bp, Homo sapien
tatccaccagttattagatgcagga

SEQ ID NO: 1053966 - DNA, 25 bp, Homo sapien
cacagtagtgagtggtaggcgctaa

SEQ ID NO: 1053967 - DNA, 25 bp, Homo sapien
cagcagcacttgcagagcctatggt

SEQ ID NO: 1053968 - DNA, 25 bp, Homo sapien
gagtgagtgtcctaaactctctgag

SEQ ID NO: 1053969 - DNA, 25 bp, Homo sapien
cagcatggtgtcaaaatctattcaa

SEQ ID NO: 1053970 - DNA, 25 bp, Homo sapien
cagtttcctccagcatagaatagag

SEQ ID NO: 1053971 - DNA, 25 bp, Homo sapien
cattttggtcatcagggtcagtcac

SEQ ID NO: 1053972 - DNA, 25 bp, Homo sapien
tgttggttaactttacctgggctgc

SEQ ID NO: 1053973 - DNA, 25 bp, Homo sapien
tggtttcatccggttttggtaggca

SEQ ID NO: 1053974 - DNA, 25 bp, Homo sapien
tggagtctaccccattcatgcctac

SEQ ID NO: 1053975 - DNA, 25 bp, Homo sapien
cagaggcctgaagaatgaatcggag

SEQ ID NO: 1053976 - DNA, 25 bp, Homo sapien
tcagcaaatcttacgaagtacctgc

SEQ ID NO: 1053977 - DNA, 25 bp, Homo sapien
cactgagatacccaggagagcgagc

SEQ ID NO: 1053978 - DNA, 25 bp, Homo sapien
tgggaaagcaccatgcaatgcatac

SEQ ID NO: 1053979 - DNA, 25 bp, Homo sapien
tgcacaccagcagtctaggtttttt

SEQ ID NO: 1053980 - DNA, 25 bp, Homo sapien
cagactcaaacttctaagggaatgt

SEQ ID NO: 1053981 - DNA, 25 bp, Homo sapien
ctgcacaccagcagtctaggttttt

SEQ ID NO: 1053982 - DNA, 25 bp, Homo sapien
acttctaagggaatgttatcattgc

SEQ ID NO: 1053983 - DNA, 25 bp, Homo sapien
tttggaaagggcatgataatcagta

SEQ ID NO: 1053984 - DNA, 25 bp, Homo sapien
gcatatcccgtgaaaagtgttagtg

SEQ ID NO: 1053985 - DNA, 25 bp, Homo sapien
taataatttgccttgtgtggtcagc

SEQ ID NO: 1053986 - DNA, 25 bp, Homo sapien
ccctttcacgtgcacagcaggtggg

SEQ ID NO: 1053987 - DNA, 25 bp, Homo sapien
gaccccaagatggaaagcctgaaga

SEQ ID NO: 1053988 - DNA, 25 bp, Homo sapien
tgaagaatctgctcctcgaagtagg

SEQ ID NO: 1053989 - DNA, 25 bp, Homo sapien
gctgatagactaggagaccccaaga

SEQ ID NO: 1053990 - DNA, 25 bp, Homo sapien
catactcagtagtcacgcgtggcca

SEQ ID NO: 1053991 - DNA, 25 bp, Homo sapien
taccgctagtaaccagtggacttga

SEQ ID NO: 1053992 - DNA, 25 bp, Homo sapien
gtggacttgataccgctagtaaccg

SEQ ID NO: 1053993 - DNA, 25 bp, Homo sapien
tagtaaccggtggacatagatgtga

SEQ ID NO: 1053994 - DNA, 25 bp, Homo sapien
tgaggttcatttccatcaacctgag

SEQ ID NO: 1053995 - DNA, 25 bp, Homo sapien
taccactatggagtccaatatgaaa

SEQ ID NO: 1053996 - DNA, 25 bp, Homo sapien
taagcacacctaggtataaatatgc

SEQ ID NO: 1053997 - DNA, 25 bp, Homo sapien
tatgaaattctcacaactatgcaaa

SEQ ID NO: 1053998 - DNA, 25 bp, Homo sapien
acatagtccattaattacatcaggg

SEQ ID NO: 1053999 - DNA, 25 bp, Homo sapien
tacgtagcagcagacaagagggaat

SEQ ID NO: 1054000 - DNA, 25 bp, Homo sapien
aggcacgtcttacgtagcagcagac

SEQ ID NO: 1054001 - DNA, 25 bp, Homo sapien
gggaatgaatgagagctaagcaaaa

SEQ ID NO: 1054002 - DNA, 25 bp, Homo sapien
gtcttacgtagcagcagacaagagg

SEQ ID NO: 1054003 - DNA, 25 bp, Homo sapien
aggcttaggagacccacctcccagg

SEQ ID NO: 1054004 - DNA, 25 bp, Homo sapien
ccaggttccctttagctcgctgtga

SEQ ID NO: 1054005 - DNA, 25 bp, Homo sapien
cttgggagcatcgtggaacaggtcc

SEQ ID NO: 1054006 - DNA, 25 bp, Homo sapien
cacagcagggttagtcctgcccggc

SEQ ID NO: 1054007 - DNA, 25 bp, Homo sapien
catgtggaaccacccagagagaggg

SEQ ID NO: 1054008 - DNA, 25 bp, Homo sapien
tatccagtgcgtgtcctttccagag

SEQ ID NO: 1054009 - DNA, 25 bp, Homo sapien
tccaggaagcgggtagcaagtctgc

SEQ ID NO: 1054010 - DNA, 25 bp, Homo sapien
catctgacacatgggaacaccgagg

SEQ ID NO: 1054011 - DNA, 25 bp, Homo sapien
ggaatttcaggcaccatcatgatga

SEQ ID NO: 1054012 - DNA, 25 bp, Homo sapien
tgagaatgcgcacaagaggcacgtg

SEQ ID NO: 1054013 - DNA, 25 bp, Homo sapien
gatgaatgtggactaagcctgacag

SEQ ID NO: 1054014 - DNA, 25 bp, Homo sapien
cagaagtcctgagggtctaagcaga

SEQ ID NO: 1054015 - DNA, 25 bp, Homo sapien
aacacaggccccgctgaattcactg

SEQ ID NO: 1054016 - DNA, 25 bp, Homo sapien
agcctgggaatcctcaacacaggcc

SEQ ID NO: 1054017 - DNA, 25 bp, Homo sapien
aatcctcaacacaggccccgctgaa

SEQ ID NO: 1054018 - DNA, 25 bp, Homo sapien
cacaggccccgctgaattcactggg

SEQ ID NO: 1054019 - DNA, 25 bp, Homo sapien
gattgctgttcccagggctgggctc

SEQ ID NO: 1054020 - DNA, 25 bp, Homo sapien
ctcgattgctgttcccagggctggg

SEQ ID NO: 1054021 - DNA, 25 bp, Homo sapien
tcgattgctgttcccagggctgggc

SEQ ID NO: 1054022 - DNA, 25 bp, Homo sapien
ttgctgttcccagggctgggctcat

SEQ ID NO: 1054023 - DNA, 25 bp, Homo sapien
cgacggtggcgaccgcggcgacagc

SEQ ID NO: 1054024 - DNA, 25 bp, Homo sapien
gctgtcgccgcggtcgccaccgtcg

SEQ ID NO: 1054025 - DNA, 25 bp, Homo sapien
caaggcccctcttcatctgataatt

SEQ ID NO: 1054026 - DNA, 25 bp, Homo sapien
catggagagtgttaaactgtggtca

SEQ ID NO: 1054027 - DNA, 25 bp, Homo sapien
cctttcgaaactgctaactaagctg

SEQ ID NO: 1054028 - DNA, 25 bp, Homo sapien
gactcctatgcagaggctagagaga

SEQ ID NO: 1054029 - DNA, 25 bp, Homo sapien
tagttagcgcctcaaaatctgcaga

SEQ ID NO: 1054030 - DNA, 25 bp, Homo sapien
ggtcactctgagttatggcactagt

SEQ ID NO: 1054031 - DNA, 25 bp, Homo sapien
agatgacaaatcaggtgaagtcttc

SEQ ID NO: 1054032 - DNA, 25 bp, Homo sapien
tatggcactagttagcgcctcaaaa

SEQ ID NO: 1054033 - DNA, 25 bp, Homo sapien
ggctgccgtaacctaagcaccaggt

SEQ ID NO: 1054034 - DNA, 25 bp, Homo sapien
tcaagatgatgcacacgtgcccgtg

SEQ ID NO: 1054035 - DNA, 25 bp, Homo sapien
acgtgcccgtgtccacaaagagcat

SEQ ID NO: 1054036 - DNA, 25 bp, Homo sapien
ctggacaggactcgattgatggctg

SEQ ID NO: 1054037 - DNA, 25 bp, Homo sapien
ttttctctcacagtcttttccactc

SEQ ID NO: 1054038 - DNA, 25 bp, Homo sapien
ttctctcacagtcttttccactctc

SEQ ID NO: 1054039 - DNA, 25 bp, Homo sapien
tctcacagtcttttccactctcagc

SEQ ID NO: 1054040 - DNA, 25 bp, Homo sapien
cacagtcttttccactctcagccag

SEQ ID NO: 1054041 - DNA, 25 bp, Homo sapien
tcacatggggtgtgttttcttccct

SEQ ID NO: 1054042 - DNA, 25 bp, Homo sapien
cacatggggtgtgttttcttcccta

SEQ ID NO: 1054043 - DNA, 25 bp, Homo sapien
cgtgtattcgttggcctgtctgtgt

SEQ ID NO: 1054044 - DNA, 25 bp, Homo sapien
aaagagaaatatttgggcccataca

SEQ ID NO: 1054045 - DNA, 25 bp, Homo sapien
tctgtacgtgcgtgcgcgtacgtgt

SEQ ID NO: 1054046 - DNA, 25 bp, Homo sapien
gagggctgggccttgcccagaagtt

SEQ ID NO: 1054047 - DNA, 25 bp, Homo sapien
catccagtacgaagaggtttcccaa

SEQ ID NO: 1054048 - DNA, 25 bp, Homo sapien
tctggaagaaattggagaatgtatg

SEQ ID NO: 1054049 - DNA, 25 bp, Homo sapien
tatgatcaaatctcgcctgtggcac

SEQ ID NO: 1054050 - DNA, 25 bp, Homo sapien
tctgtgtagacggtgatttcatcac

SEQ ID NO: 1054051 - DNA, 25 bp, Homo sapien
caagttcagcggtacaaaagcacat

SEQ ID NO: 1054052 - DNA, 25 bp, Homo sapien
cctcaccaggggcaagttcagcggt

SEQ ID NO: 1054053 - DNA, 25 bp, Homo sapien
caggggcaagttcagcggtacaaaa

SEQ ID NO: 1054054 - DNA, 25 bp, Homo sapien
gggcaagttcagcggtacaaaagca

SEQ ID NO: 1054055 - DNA, 25 bp, Homo sapien
gaggtcctgagtggccatcctctac

SEQ ID NO: 1054056 - DNA, 25 bp, Homo sapien
tctgagagctcgctgcccctggatg

SEQ ID NO: 1054057 - DNA, 25 bp, Homo sapien
caaatgaggtcctgagtggccatcc

SEQ ID NO: 1054058 - DNA, 25 bp, Homo sapien
tgccaaatgaggtcctgagtggcca

SEQ ID NO: 1054059 - DNA, 25 bp, Homo sapien
tgaagattttcttagcaggatttga

SEQ ID NO: 1054060 - DNA, 25 bp, Homo sapien
gaagattttcttagcaggatttgat

SEQ ID NO: 1054061 - DNA, 25 bp, Homo sapien
aagattttcttagcaggatttgatg

SEQ ID NO: 1054062 - DNA, 25 bp, Homo sapien
tctgaattgactgatgacccaacat

SEQ ID NO: 1054063 - DNA, 25 bp, Homo sapien
cccaacatagggtcacagtatttca

SEQ ID NO: 1054064 - DNA, 25 bp, Homo sapien
ggtcacagtatttcatttggctgct

SEQ ID NO: 1054065 - DNA, 25 bp, Homo sapien
gctttgcctgtttcgccatatttca

SEQ ID NO: 1054066 - DNA, 25 bp, Homo sapien
tgacacagacattctctgcccggga

SEQ ID NO: 1054067 - DNA, 25 bp, Homo sapien
gattttgctgacaggtaggttccca

SEQ ID NO: 1054068 - DNA, 25 bp, Homo sapien
tgaggctctgctgaccgcttgtctc

SEQ ID NO: 1054069 - DNA, 25 bp, Homo sapien
tctctaattcttgcctgacacagac

SEQ ID NO: 1054070 - DNA, 25 bp, Homo sapien
gcttgccttgacacgccaaagtaag

SEQ ID NO: 1054071 - DNA, 25 bp, Homo sapien
gagagcggcaggtatccaccgatgt

SEQ ID NO: 1054072 - DNA, 25 bp, Homo sapien
caaagtaagatcgtcagcccattca

SEQ ID NO: 1054073 - DNA, 25 bp, Homo sapien
aattgctctgtgaatcccggtgccg

SEQ ID NO: 1054074 - DNA, 25 bp, Homo sapien
ttcaggaaaacccgacgctgggcag

SEQ ID NO: 1054075 - DNA, 25 bp, Homo sapien
atcccttgcgccctgcggtagcccg

SEQ ID NO: 1054076 - DNA, 25 bp, Homo sapien
tgttttcctgcgagacccaggcggt

SEQ ID NO: 1054077 - DNA, 25 bp, Homo sapien
gctcgcgggcgccggctgttttcct

SEQ ID NO: 1054078 - DNA, 25 bp, Homo sapien
taaccactcttaacagtttggcaca

SEQ ID NO: 1054079 - DNA, 25 bp, Homo sapien
ctcttaacagtttggcacatctcct

SEQ ID NO: 1054080 - DNA, 25 bp, Homo sapien
tcttctgctcagaaataaccactct

SEQ ID NO: 1054081 - DNA, 25 bp, Homo sapien
aataaccactcttaacagtttggca

SEQ ID NO: 1054082 - DNA, 25 bp, Homo sapien
aaaataggaagaatggaattcatcc

SEQ ID NO: 1054083 - DNA, 25 bp, Homo sapien
aataggaagaatggaattcatccac

SEQ ID NO: 1054084 - DNA, 25 bp, Homo sapien
taggaagaatggaattcatccacat

SEQ ID NO: 1054085 - DNA, 25 bp, Homo sapien
gaaaaataggaagaatggaattcat

SEQ ID NO: 1054086 - DNA, 25 bp, Homo sapien
taaggagctcatccaagtcacccaa

SEQ ID NO: 1054087 - DNA, 25 bp, Homo sapien
tacaacttggacacgcatcagaatc

SEQ ID NO: 1054088 - DNA, 25 bp, Homo sapien
tcagtagtggatttgggaacctcct

SEQ ID NO: 1054089 - DNA, 25 bp, Homo sapien
tgtgaaaacacataacgctgagcca

SEQ ID NO: 1054090 - DNA, 25 bp, Homo sapien
tggccacgtactgggtgctgaggac

SEQ ID NO: 1054091 - DNA, 25 bp, Homo sapien
ccattcatgtggctacactgttctg

SEQ ID NO: 1054092 - DNA, 25 bp, Homo sapien
caaataacggagagataatttccct

SEQ ID NO: 1054093 - DNA, 25 bp, Homo sapien
aggcagccagccaggattatttgcg

SEQ ID NO: 1054094 - DNA, 25 bp, Homo sapien
gggatactctgcctgaggttcttaa

SEQ ID NO: 1054095 - DNA, 25 bp, Homo sapien
tcatcatcccagaacctccaaatgg

SEQ ID NO: 1054096 - DNA, 25 bp, Homo sapien
tgtttaacctagagcctgccagaga

SEQ ID NO: 1054097 - DNA, 25 bp, Homo sapien
ctgccagagaataattgctcagtta

SEQ ID NO: 1054098 - DNA, 25 bp, Homo sapien
gccccaaggtgtgaggagctgggct

SEQ ID NO: 1054099 - DNA, 25 bp, Homo sapien
ctcagcatacaggaggcggcagctc

SEQ ID NO: 1054100 - DNA, 25 bp, Homo sapien
cagcggcttcatccaggacagtgtc

SEQ ID NO: 1054101 - DNA, 25 bp, Homo sapien
gaggcggcagctctcccagcggctt

SEQ ID NO: 1054102 - DNA, 25 bp, Homo sapien
ccagcggcttcatccaggacagtgt

SEQ ID NO: 1054103 - DNA, 25 bp, Homo sapien
gaagttgtcctcaagactgtgaaag

SEQ ID NO: 1054104 - DNA, 25 bp, Homo sapien
taacccatcatgagttctactgaag

SEQ ID NO: 1054105 - DNA, 25 bp, Homo sapien
cacagaaggcgtagatcatttcaag

SEQ ID NO: 1054106 - DNA, 25 bp, Homo sapien
tgggaaatgccaatgataagctgca

SEQ ID NO: 1054107 - DNA, 25 bp, Homo sapien
tgggtcgttctttagcagccgcaca

SEQ ID NO: 1054108 - DNA, 25 bp, Homo sapien
cctcactagtgtaagagaatttctg

SEQ ID NO: 1054109 - DNA, 25 bp, Homo sapien
tggcagctgtcaacgggttttctag

SEQ ID NO: 1054110 - DNA, 25 bp, Homo sapien
tctaggtacgtcttccaggcctcat

SEQ ID NO: 1054111 - DNA, 25 bp, Homo sapien
agaggaagctcaaggccgcaacact

SEQ ID NO: 1054112 - DNA, 25 bp, Homo sapien
tgtagtaatcatagaggaagctcaa

SEQ ID NO: 1054113 - DNA, 25 bp, Homo sapien
taatcatagaggaagctcaaggccg

SEQ ID NO: 1054114 - DNA, 25 bp, Homo sapien
aaggccgcaacactgtcatcatctc

SEQ ID NO: 1054115 - DNA, 25 bp, Homo sapien
aaactcctcttccatcgacctgggc

SEQ ID NO: 1054116 - DNA, 25 bp, Homo sapien
tcttccatcgacctgggctgaacac

SEQ ID NO: 1054117 - DNA, 25 bp, Homo sapien
tcctcttccatcgacctgggctgaa

SEQ ID NO: 1054118 - DNA, 25 bp, Homo sapien
ttccatcgacctgggctgaacactc

SEQ ID NO: 1054119 - DNA, 25 bp, Homo sapien
agtgctggaggacaatatccgcttc

SEQ ID NO: 1054120 - DNA, 25 bp, Homo sapien
tgctggaggacaatatccgcttctc

SEQ ID NO: 1054121 - DNA, 25 bp, Homo sapien
cccagtgctggaggacaatatccgc

SEQ ID NO: 1054122 - DNA, 25 bp, Homo sapien
ccagtgctggaggacaatatccgct

SEQ ID NO: 1054123 - DNA, 25 bp, Homo sapien
tcatgaggtgtgtggggctttcaag

SEQ ID NO: 1054124 - DNA, 25 bp, Homo sapien
ttcaaggggagtgaggtccgtctca

SEQ ID NO: 1054125 - DNA, 25 bp, Homo sapien
catgaggtgtgtggggctttcaagg

SEQ ID NO: 1054126 - DNA, 25 bp, Homo sapien
gctttcaaggggagtgaggtccgtc

SEQ ID NO: 1054127 - DNA, 25 bp, Homo sapien
tcatacatatcagtggtgggtaaca

SEQ ID NO: 1054128 - DNA, 25 bp, Homo sapien
ggagttgagggagccattatcatac

SEQ ID NO: 1054129 - DNA, 25 bp, Homo sapien
aagctcatcaggttattcttcttga

SEQ ID NO: 1054130 - DNA, 25 bp, Homo sapien
ccagcgctgtgtgggcggcacccca

SEQ ID NO: 1054131 - DNA, 25 bp, Homo sapien
gaggctggggtagtcctctggacat

SEQ ID NO: 1054132 - DNA, 25 bp, Homo sapien
ttcaggatatctgggaagagcatcg

SEQ ID NO: 1054133 - DNA, 25 bp, Homo sapien
cttttgaggctggggtagtcctctg

SEQ ID NO: 1054134 - DNA, 25 bp, Homo sapien
gctggggtagtcctctggacatggg

SEQ ID NO: 1054135 - DNA, 25 bp, Homo sapien
cctgaggctatgttacagacttgct

SEQ ID NO: 1054136 - DNA, 25 bp, Homo sapien
gcctgaggctatgttacagacttgc

SEQ ID NO: 1054137 - DNA, 25 bp, Homo sapien
ccatgggtgactcgcctgacttgat

SEQ ID NO: 1054138 - DNA, 25 bp, Homo sapien
gggagcccagggtgtattcaaagtc

SEQ ID NO: 1054139 - DNA, 25 bp, Homo sapien
tgaggtaggccatgggtgactcgcc

SEQ ID NO: 1054140 - DNA, 25 bp, Homo sapien
ggagcccagggtgtattcaaagtca

SEQ ID NO: 1054141 - DNA, 25 bp, Homo sapien
tgtcgaagacaaccatcaccacact

SEQ ID NO: 1054142 - DNA, 25 bp, Homo sapien
gttgccgggaatgccagtgcttcca

SEQ ID NO: 1054143 - DNA, 25 bp, Homo sapien
cagctgctctactgggaccttctca

SEQ ID NO: 1054144 - DNA, 25 bp, Homo sapien
gtcaatgacccgctgcttggcagtg

SEQ ID NO: 1054145 - DNA, 25 bp, Homo sapien
aatgtgctccacagtgttgaagttt

SEQ ID NO: 1054146 - DNA, 25 bp, Homo sapien
tgctccacagtgttgaagttttctt

SEQ ID NO: 1054147 - DNA, 25 bp, Homo sapien
caaaggacagtgcattataggccac

SEQ ID NO: 1054148 - DNA, 25 bp, Homo sapien
ggacagtgcattataggccacctcc

SEQ ID NO: 1054149 - DNA, 25 bp, Homo sapien
gacagagggggccgctgggtaagtg

SEQ ID NO: 1054150 - DNA, 25 bp, Homo sapien
cagagggggccgctgggtaagtggc

SEQ ID NO: 1054151 - DNA, 25 bp, Homo sapien
acagagggggccgctgggtaagtgg

SEQ ID NO: 1054152 - DNA, 25 bp, Homo sapien
agcacggtgtaccaggcgctcagtg

SEQ ID NO: 1054153 - DNA, 25 bp, Homo sapien
agaagatcttgatctggcagacagc

SEQ ID NO: 1054154 - DNA, 25 bp, Homo sapien
cataggtgtcaatctgcaggttcag

SEQ ID NO: 1054155 - DNA, 25 bp, Homo sapien
tcagacagtttacgccgatgaacac

SEQ ID NO: 1054156 - DNA, 25 bp, Homo sapien
gacccagtatagggtctgcccagtc

SEQ ID NO: 1054157 - DNA, 25 bp, Homo sapien
cgggacccagtatagggtctgccca

SEQ ID NO: 1054158 - DNA, 25 bp, Homo sapien
gggacccagtatagggtctgcccag

SEQ ID NO: 1054159 - DNA, 25 bp, Homo sapien
ggacccagtatagggtctgcccagt

SEQ ID NO: 1054160 - DNA, 25 bp, Homo sapien
gggcctggccctgcttgcctgaggt

SEQ ID NO: 1054161 - DNA, 25 bp, Homo sapien
ggcctggccctgcttgcctgaggtc

SEQ ID NO: 1054162 - DNA, 25 bp, Homo sapien
agtggggcctggccctgcttgcctg

SEQ ID NO: 1054163 - DNA, 25 bp, Homo sapien
tggggcctggccctgcttgcctgag

SEQ ID NO: 1054164 - DNA, 25 bp, Homo sapien
ttcctccggaactgcttccgctcgt

SEQ ID NO: 1054165 - DNA, 25 bp, Homo sapien
cttgaccttcctccggaactgcttc

SEQ ID NO: 1054166 - DNA, 25 bp, Homo sapien
tccgctcgtcatcgcgcatcttcct

SEQ ID NO: 1054167 - DNA, 25 bp, Homo sapien
ggaactgcttccgctcgtcatcgcg

SEQ ID NO: 1054168 - DNA, 25 bp, Homo sapien
acgggtggcgtctccaggtcagtct

SEQ ID NO: 1054169 - DNA, 25 bp, Homo sapien
tggccgaaggtaggtcgtctcattg

SEQ ID NO: 1054170 - DNA, 25 bp, Homo sapien
ccctccagagcgctgcaggctggag

SEQ ID NO: 1054171 - DNA, 25 bp, Homo sapien
gagaagtgcacattggggatgaaca

SEQ ID NO: 1054172 - DNA, 25 bp, Homo sapien
tacatgtttaaacccctatgattca

SEQ ID NO: 1054173 - DNA, 25 bp, Homo sapien
caataaaggtcttgaaactggctga

SEQ ID NO: 1054174 - DNA, 25 bp, Homo sapien
tcaatacaataggtcactgaagcta

SEQ ID NO: 1054175 - DNA, 25 bp, Homo sapien
tgccctaagcatgaacgttttaatg

SEQ ID NO: 1054176 - DNA, 25 bp, Homo sapien
tgcagatggtcctgcggccggtaac

SEQ ID NO: 1054177 - DNA, 25 bp, Homo sapien
tggtcctgcggccggtaactaggca

SEQ ID NO: 1054178 - DNA, 25 bp, Homo sapien
gcagatggtcctgcggccggtaact

SEQ ID NO: 1054179 - DNA, 25 bp, Homo sapien
cctgcggccggtaactaggcagttg

SEQ ID NO: 1054180 - DNA, 25 bp, Homo sapien
gttggagctgctgggtcctgccgag

SEQ ID NO: 1054181 - DNA, 25 bp, Homo sapien
ctgttggagctgctgggtcctgccg

SEQ ID NO: 1054182 - DNA, 25 bp, Homo sapien
agctgctgggtcctgccgagggggc

SEQ ID NO: 1054183 - DNA, 25 bp, Homo sapien
ggagctgctgggtcctgccgagggg

SEQ ID NO: 1054184 - DNA, 25 bp, Homo sapien
ttggagggcagaggctcaaactcct

SEQ ID NO: 1054185 - DNA, 25 bp, Homo sapien
ctctctgaaggtcgccttccttggc

SEQ ID NO: 1054186 - DNA, 25 bp, Homo sapien
tcaaactcctcagtgaagggcgagc

SEQ ID NO: 1054187 - DNA, 25 bp, Homo sapien
ggcgagcaggtacgcttcagaggca

SEQ ID NO: 1054188 - DNA, 25 bp, Homo sapien
atgagcgcgtcaaacacctcctcag

SEQ ID NO: 1054189 - DNA, 25 bp, Homo sapien
gtctccctccgcacatacagcagaa

SEQ ID NO: 1054190 - DNA, 25 bp, Homo sapien
gggtcttcaacatgagcgcgtcaaa

SEQ ID NO: 1054191 - DNA, 25 bp, Homo sapien
tcttcaacatgagcgcgtcaaacac

SEQ ID NO: 1054192 - DNA, 25 bp, Homo sapien
tttcttgtagactttgtaaatgttc

SEQ ID NO: 1054193 - DNA, 25 bp, Homo sapien
gtagactttgtaaatgttctcttca

SEQ ID NO: 1054194 - DNA, 25 bp, Homo sapien
tcttgtagactttgtaaatgttctc

SEQ ID NO: 1054195 - DNA, 25 bp, Homo sapien
cctcgcttgcatttcttgtagactt

SEQ ID NO: 1054196 - DNA, 25 bp, Homo sapien
gaaggcgacgtggttgctgtaatgc

SEQ ID NO: 1054197 - DNA, 25 bp, Homo sapien
taaggatgatctgaattttgccgtc

SEQ ID NO: 1054198 - DNA, 25 bp, Homo sapien
gatctgaattttgccgtccagctcc

SEQ ID NO: 1054199 - DNA, 25 bp, Homo sapien
gatgttgttgtccatgttgactaag

SEQ ID NO: 1054200 - DNA, 25 bp, Homo sapien
ggcagtagttttacacagcggtcac

SEQ ID NO: 1054201 - DNA, 25 bp, Homo sapien
caggagcaccactgcagacaagggt

SEQ ID NO: 1054202 - DNA, 25 bp, Homo sapien
ggcattcaagtaacagcgctgaggc

SEQ ID NO: 1054203 - DNA, 25 bp, Homo sapien
tatacaacagtgagtggcaaggcag

SEQ ID NO: 1054204 - DNA, 25 bp, Homo sapien
catgttcctcacttgagtcacagga

SEQ ID NO: 1054205 - DNA, 25 bp, Homo sapien
tgggaacattcaagacagtcaggtg

SEQ ID NO: 1054206 - DNA, 25 bp, Homo sapien
tccaggtgggtgtgtcattccgagt

SEQ ID NO: 1054207 - DNA, 25 bp, Homo sapien
ccacatactctgagctgagagctct

SEQ ID NO: 1054208 - DNA, 25 bp, Homo sapien
cacatctggtagttcgatttggatc

SEQ ID NO: 1054209 - DNA, 25 bp, Homo sapien
tatgaaatacagttagtgcagcagt

SEQ ID NO: 1054210 - DNA, 25 bp, Homo sapien
ggcgaaaccctcctgcatactctat

SEQ ID NO: 1054211 - DNA, 25 bp, Homo sapien
ttatgaggttttcccgctgtgactc

SEQ ID NO: 1054212 - DNA, 25 bp, Homo sapien
tcctccgcatgggacgcccgcggag

SEQ ID NO: 1054213 - DNA, 25 bp, Homo sapien
ctccgggtgcttgcggaattccagg

SEQ ID NO: 1054214 - DNA, 25 bp, Homo sapien
ctccgcatgggacgcccgcggagac

SEQ ID NO: 1054215 - DNA, 25 bp, Homo sapien
ccggcctccgggtgcttgcggaatt

SEQ ID NO: 1054216 - DNA, 25 bp, Homo sapien
tgaggtcgtggggaagaggacacgg

SEQ ID NO: 1054217 - DNA, 25 bp, Homo sapien
caggtaggaagcagttccggcgggg

SEQ ID NO: 1054218 - DNA, 25 bp, Homo sapien
ttgggctggccagattcagctgccg

SEQ ID NO: 1054219 - DNA, 25 bp, Homo sapien
cgggaggttgggctggccagattca

SEQ ID NO: 1054220 - DNA, 25 bp, Homo sapien
gctggccagattcagctgccgggac

SEQ ID NO: 1054221 - DNA, 25 bp, Homo sapien
ggctggccagattcagctgccggga

SEQ ID NO: 1054222 - DNA, 25 bp, Homo sapien
gacggcggaaggtggactcgcgaat

SEQ ID NO: 1054223 - DNA, 25 bp, Homo sapien
gcggaaggtggactcgcgaatgtta

SEQ ID NO: 1054224 - DNA, 25 bp, Homo sapien
ggaaggtggactcgcgaatgttagg

SEQ ID NO: 1054225 - DNA, 25 bp, Homo sapien
tcgcggacggcggaaggtggactcg

SEQ ID NO: 1054226 - DNA, 25 bp, Homo sapien
ctcctttcctgccctcctggaacac

SEQ ID NO: 1054227 - DNA, 25 bp, Homo sapien
atctctcctttcctgccctcctgga

SEQ ID NO: 1054228 - DNA, 25 bp, Homo sapien
ctctcctttcctgccctcctggaac

SEQ ID NO: 1054229 - DNA, 25 bp, Homo sapien
tctctcctttcctgccctcctggaa

SEQ ID NO: 1054230 - DNA, 25 bp, Homo sapien
tcaaatccaaaacgtccttgaagac

SEQ ID NO: 1054231 - DNA, 25 bp, Homo sapien
cagagccctcgcgagacttgggacc

SEQ ID NO: 1054232 - DNA, 25 bp, Homo sapien
atccaaaacgtccttgaagacccag

SEQ ID NO: 1054233 - DNA, 25 bp, Homo sapien
cctcgcgagacttgggaccaaacat

SEQ ID NO: 1054234 - DNA, 25 bp, Homo sapien
aggaagaatggtgcggcgactcccc

SEQ ID NO: 1054235 - DNA, 25 bp, Homo sapien
ccacaggaagaatggtgcggcgact

SEQ ID NO: 1054236 - DNA, 25 bp, Homo sapien
ctcccgctgtcccagagagcttagg

SEQ ID NO: 1054237 - DNA, 25 bp, Homo sapien
gagcttaggtggttgctcgcctcca

SEQ ID NO: 1054238 - DNA, 25 bp, Homo sapien
ttcaaaggtcgcgatttgatttgcc

SEQ ID NO: 1054239 - DNA, 25 bp, Homo sapien
actcttcgtgcaacccggaggcaca

SEQ ID NO: 1054240 - DNA, 25 bp, Homo sapien
ttctgagaaatgactcggactcttc

SEQ ID NO: 1054241 - DNA, 25 bp, Homo sapien
ttggcaggcatttcgcgcaggcaag

SEQ ID NO: 1054242 - DNA, 25 bp, Homo sapien
gaacattccaaggcaacgggaccca

SEQ ID NO: 1054243 - DNA, 25 bp, Homo sapien
aggcaacgggacccaggttggcgag

SEQ ID NO: 1054244 - DNA, 25 bp, Homo sapien
caaggcaacgggacccaggttggcg

SEQ ID NO: 1054245 - DNA, 25 bp, Homo sapien
cattccaaggcaacgggacccaggt

SEQ ID NO: 1054246 - DNA, 25 bp, Homo sapien
tagtaaggtagcccatgcccccgct

SEQ ID NO: 1054247 - DNA, 25 bp, Homo sapien
ccatgcccccgctcctcttggcctc

SEQ ID NO: 1054248 - DNA, 25 bp, Homo sapien
cgctcctcttggcctcgatgcaaaa

SEQ ID NO: 1054249 - DNA, 25 bp, Homo sapien
ttagtaaggtagcccatgcccccgc

SEQ ID NO: 1054250 - DNA, 25 bp, Homo sapien
ctggtttggtagagcctggcatcac

SEQ ID NO: 1054251 - DNA, 25 bp, Homo sapien
aagcccgagccgctcggcacgaaga

SEQ ID NO: 1054252 - DNA, 25 bp, Homo sapien
gcgggcttagaccaagaacgcctcc

SEQ ID NO: 1054253 - DNA, 25 bp, Homo sapien
gctcggcacgaagaggagaaattct

SEQ ID NO: 1054254 - DNA, 25 bp, Homo sapien
tccagaagcgggcttagaccaagaa

SEQ ID NO: 1054255 - DNA, 25 bp, Homo sapien
tcacgagaaggttacattcttccgt

SEQ ID NO: 1054256 - DNA, 25 bp, Homo sapien
ttccgtcccgtcccactgagctgga

SEQ ID NO: 1054257 - DNA, 25 bp, Homo sapien
tcttccgtcccgtcccactgagctg

SEQ ID NO: 1054258 - DNA, 25 bp, Homo sapien
cacgagaaggttacattcttccgtc

SEQ ID NO: 1054259 - DNA, 25 bp, Homo sapien
caggtttagcatagggacagctaca

SEQ ID NO: 1054260 - DNA, 25 bp, Homo sapien
ttattgctactacctgcagacgagg

SEQ ID NO: 1054261 - DNA, 25 bp, Homo sapien
gcaggcatagcaaatggtccatgaa

SEQ ID NO: 1054262 - DNA, 25 bp, Homo sapien
taatgttcccactccacatggcagt

SEQ ID NO: 1054263 - DNA, 25 bp, Homo sapien
ggtctagtggcgcatcccacagggc

SEQ ID NO: 1054264 - DNA, 25 bp, Homo sapien
tgacaaaagaatacttcaaggctgt

SEQ ID NO: 1054265 - DNA, 25 bp, Homo sapien
tcagagaagtgccaatttccgtggc

SEQ ID NO: 1054266 - DNA, 25 bp, Homo sapien
gtgccaatttccgtggctctcccag

SEQ ID NO: 1054267 - DNA, 25 bp, Homo sapien
ggcgctggagctacttgtgggaggc

SEQ ID NO: 1054268 - DNA, 25 bp, Homo sapien
gcgctggagctacttgtgggaggca

SEQ ID NO: 1054269 - DNA, 25 bp, Homo sapien
gggctgcgctgtgggatccgtccat

SEQ ID NO: 1054270 - DNA, 25 bp, Homo sapien
cgctggagctacttgtgggaggcag

SEQ ID NO: 1054271 - DNA, 25 bp, Homo sapien
ttgtaggagaaggaggcctcgctta

SEQ ID NO: 1054272 - DNA, 25 bp, Homo sapien
tgtaggagaaggaggcctcgcttac

SEQ ID NO: 1054273 - DNA, 25 bp, Homo sapien
cttgtaggagaaggaggcctcgctt

SEQ ID NO: 1054274 - DNA, 25 bp, Homo sapien
gcactgtgtaacttccttgctagga

SEQ ID NO: 1054275 - DNA, 25 bp, Homo sapien
tgtgaagagcctgcctgtttctacc

SEQ ID NO: 1054276 - DNA, 25 bp, Homo sapien
tgtttctaccagtgacaggcatgca

SEQ ID NO: 1054277 - DNA, 25 bp, Homo sapien
tctgttagccaatgcagagcactgt

SEQ ID NO: 1054278 - DNA, 25 bp, Homo sapien
cagagatcagcacagagatttacac

SEQ ID NO: 1054279 - DNA, 25 bp, Homo sapien
gatttacactccaggatgttcatgg

SEQ ID NO: 1054280 - DNA, 25 bp, Homo sapien
ggtgcattccctttgacctattcgt

SEQ ID NO: 1054281 - DNA, 25 bp, Homo sapien
gcactgataggtatttaggaacact

SEQ ID NO: 1054282 - DNA, 25 bp, Homo sapien
gaccaaggagcgagatgccaatgct

SEQ ID NO: 1054283 - DNA, 25 bp, Homo sapien
cagttaggagcatgggttctgcagc

SEQ ID NO: 1054284 - DNA, 25 bp, Homo sapien
tcaggacaccggagagtcagagcag

SEQ ID NO: 1054285 - DNA, 25 bp, Homo sapien
caacagagccctagatgaatacagt

SEQ ID NO: 1054286 - DNA, 25 bp, Homo sapien
taggatttccgaaggcagaagcagg

SEQ ID NO: 1054287 - DNA, 25 bp, Homo sapien
aaaggtgacacttgcgctggaaggc

SEQ ID NO: 1054288 - DNA, 25 bp, Homo sapien
tgcaggcagcttcggtttgcttatc

SEQ ID NO: 1054289 - DNA, 25 bp, Homo sapien
tattgccaggaagactgacaaaggc

SEQ ID NO: 1054290 - DNA, 25 bp, Homo sapien
gactcggacatatctttgggcattt

SEQ ID NO: 1054291 - DNA, 25 bp, Homo sapien
taacggtacttactcctcagggcag

SEQ ID NO: 1054292 - DNA, 25 bp, Homo sapien
tcatgacactgtgactcggacatat

SEQ ID NO: 1054293 - DNA, 25 bp, Homo sapien
ttaacggtacttactcctcagggca

SEQ ID NO: 1054294 - DNA, 25 bp, Homo sapien
tttactctgggcacaagacctgaac

SEQ ID NO: 1054295 - DNA, 25 bp, Homo sapien
aaattatatctaactggagcctcca

SEQ ID NO: 1054296 - DNA, 25 bp, Homo sapien
ggaatgtcaaaggaggaatttactc

SEQ ID NO: 1054297 - DNA, 25 bp, Homo sapien
tcccaatcaataaaaggaactcagt

SEQ ID NO: 1054298 - DNA, 25 bp, Homo sapien
cagtttgtctcgaggtagttcctat

SEQ ID NO: 1054299 - DNA, 25 bp, Homo sapien
gatttctgtcaggtctagttgcttt

SEQ ID NO: 1054300 - DNA, 25 bp, Homo sapien
tgtcctaatatatgctctatcccag

SEQ ID NO: 1054301 - DNA, 25 bp, Homo sapien
taggagcgtgttgttaaatttatac

SEQ ID NO: 1054302 - DNA, 25 bp, Homo sapien
ttgtgacaatagcatcatgggtggg

SEQ ID NO: 1054303 - DNA, 25 bp, Homo sapien
tccccatggtgtcaacggagaccac

SEQ ID NO: 1054304 - DNA, 25 bp, Homo sapien
cacagagaggctagacttctacctt

SEQ ID NO: 1054305 - DNA, 25 bp, Homo sapien
gagatggagctatataggtgcgaca

SEQ ID NO: 1054306 - DNA, 25 bp, Homo sapien
atgctaatggggtgccaaggcaaga

SEQ ID NO: 1054307 - DNA, 25 bp, Homo sapien
gggtgccaaggcaagaaaagcacca

SEQ ID NO: 1054308 - DNA, 25 bp, Homo sapien
aatggggtgccaaggcaagaaaagc

SEQ ID NO: 1054309 - DNA, 25 bp, Homo sapien
ggtgccaaggcaagaaaagcaccat

SEQ ID NO: 1054310 - DNA, 25 bp, Homo sapien
gggatgacaggatctcagagctaaa

SEQ ID NO: 1054311 - DNA, 25 bp, Homo sapien
gccacctgcaggcagaacacgtcct

SEQ ID NO: 1054312 - DNA, 25 bp, Homo sapien
cagagctaaaaggctcgctggagac

SEQ ID NO: 1054313 - DNA, 25 bp, Homo sapien
gcaagacagaataaagccacctgca

SEQ ID NO: 1054314 - DNA, 25 bp, Homo sapien
atgctgaccacgaggtgcccgaaga

SEQ ID NO: 1054315 - DNA, 25 bp, Homo sapien
taagtgcaatgctgaccacgaggtg

SEQ ID NO: 1054316 - DNA, 25 bp, Homo sapien
cgaggtgcccgaagatcgccaagag

SEQ ID NO: 1054317 - DNA, 25 bp, Homo sapien
ccaagagggcgccaatcaggttttc

SEQ ID NO: 1054318 - DNA, 25 bp, Homo sapien
tcatgagcggattagtcccgtgggc

SEQ ID NO: 1054319 - DNA, 25 bp, Homo sapien
tgcatagagtacaggtgaacaaggc

SEQ ID NO: 1054320 - DNA, 25 bp, Homo sapien
tcccgtgggcaactgggactcagtc

SEQ ID NO: 1054321 - DNA, 25 bp, Homo sapien
gaagcagtccctgagacaagaatgt

SEQ ID NO: 1054322 - DNA, 25 bp, Homo sapien
cttgaaataggcccggggatccttg

SEQ ID NO: 1054323 - DNA, 25 bp, Homo sapien
tgtcttggtcttgaaataggcccgg

SEQ ID NO: 1054324 - DNA, 25 bp, Homo sapien
tggtcttgaaataggcccggggatc

SEQ ID NO: 1054325 - DNA, 25 bp, Homo sapien
ccatgtcttggtcttgaaataggcc

SEQ ID NO: 1054326 - DNA, 25 bp, Homo sapien
cgaacacacccagctcgcccagaag

SEQ ID NO: 1054327 - DNA, 25 bp, Homo sapien
acagcggcgcgaaggcgtaggaggc

SEQ ID NO: 1054328 - DNA, 25 bp, Homo sapien
gggcacgatgagtgacagcggcgcg

SEQ ID NO: 1054329 - DNA, 25 bp, Homo sapien
aaactgcgctgaggggcacgatgag

SEQ ID NO: 1054330 - DNA, 25 bp, Homo sapien
tgaatatgattcctatgatggcact

SEQ ID NO: 1054331 - DNA, 25 bp, Homo sapien
gaatatgattcctatgatggcacta

SEQ ID NO: 1054332 - DNA, 25 bp, Homo sapien
aatatgattcctatgatggcactag

SEQ ID NO: 1054333 - DNA, 25 bp, Homo sapien
gatgaatatgattcctatgatggca

SEQ ID NO: 1054334 - DNA, 25 bp, Homo sapien
ggtgcctggtgacattctcgcctgt

SEQ ID NO: 1054335 - DNA, 25 bp, Homo sapien
ccaacaaaggacaagacgtagcgcc

SEQ ID NO: 1054336 - DNA, 25 bp, Homo sapien
tcaccagcaggtaggtacccacgac

SEQ ID NO: 1054337 - DNA, 25 bp, Homo sapien
tgactgttgggtgcgaatgtcacca

SEQ ID NO: 1054338 - DNA, 25 bp, Homo sapien
catgtacaaaaggaaaggccagctc

SEQ ID NO: 1054339 - DNA, 25 bp, Homo sapien
atgtacaaaaggaaaggccagctca

SEQ ID NO: 1054340 - DNA, 25 bp, Homo sapien
tgtacaaaaggaaaggccagctcac

SEQ ID NO: 1054341 - DNA, 25 bp, Homo sapien
cttctccttgtagaagtagagcagc

SEQ ID NO: 1054342 - DNA, 25 bp, Homo sapien
ccttgtagaagtagagcagcaagca

SEQ ID NO: 1054343 - DNA, 25 bp, Homo sapien
gagaagaatcacgacaatgttgttg

SEQ ID NO: 1054344 - DNA, 25 bp, Homo sapien
gaagaatcacgacaatgttgttggc

SEQ ID NO: 1054345 - DNA, 25 bp, Homo sapien
tgacttggatgttctcataggcccc

SEQ ID NO: 1054346 - DNA, 25 bp, Homo sapien
tggattccccacagctctatttagc

SEQ ID NO: 1054347 - DNA, 25 bp, Homo sapien
ctttagagaagtggacagcgtggct

SEQ ID NO: 1054348 - DNA, 25 bp, Homo sapien
tatgcagttctagccaggtacaggg

SEQ ID NO: 1054349 - DNA, 25 bp, Homo sapien
tgtgaccctgaacttaaatggtagg

SEQ ID NO: 1054350 - DNA, 25 bp, Homo sapien
aactgcagactttcagactgccctg

SEQ ID NO: 1054351 - DNA, 25 bp, Homo sapien
cacacccctgtgcatatgtgcaaac

SEQ ID NO: 1054352 - DNA, 25 bp, Homo sapien
tctctgtgtacccagcgaagcatcc

SEQ ID NO: 1054353 - DNA, 25 bp, Homo sapien
ttgactgtcaccactgtcatggagc

SEQ ID NO: 1054354 - DNA, 25 bp, Homo sapien
gccttgactgtcaccactgtcatgg

SEQ ID NO: 1054355 - DNA, 25 bp, Homo sapien
cttgactgtcaccactgtcatggag

SEQ ID NO: 1054356 - DNA, 25 bp, Homo sapien
ccttgactgtcaccactgtcatgga

SEQ ID NO: 1054357 - DNA, 25 bp, Homo sapien
gcagcctgatagacggcggttgcca

SEQ ID NO: 1054358 - DNA, 25 bp, Homo sapien
gggtagtcaagctgcaggttccctt

SEQ ID NO: 1054359 - DNA, 25 bp, Homo sapien
cacacgaacatcacgtagaagatgg

SEQ ID NO: 1054360 - DNA, 25 bp, Homo sapien
gaatggacaagacaagcatcccagc

SEQ ID NO: 1054361 - DNA, 25 bp, Homo sapien
ctggcctggcttcgtcttttgagtg

SEQ ID NO: 1054362 - DNA, 25 bp, Homo sapien
agaagcagcccgaatggcagggccc

SEQ ID NO: 1054363 - DNA, 25 bp, Homo sapien
tccaggtgacaactcagcaaattag

SEQ ID NO: 1054364 - DNA, 25 bp, Homo sapien
ggcttcacagcatacgtcatcaggc

SEQ ID NO: 1054365 - DNA, 25 bp, Homo sapien
atgtgattctcttaggtagggactg

SEQ ID NO: 1054366 - DNA, 25 bp, Homo sapien
cctagagacattctcataagagctt

SEQ ID NO: 1054367 - DNA, 25 bp, Homo sapien
tagagacattctcataagagcttca

SEQ ID NO: 1054368 - DNA, 25 bp, Homo sapien
taggtagggactgttgttctcatta

SEQ ID NO: 1054369 - DNA, 25 bp, Homo sapien
cactggcaatcaaagaggagtcgta

SEQ ID NO: 1054370 - DNA, 25 bp, Homo sapien
tagcaatggttgtggacagaatgta

SEQ ID NO: 1054371 - DNA, 25 bp, Homo sapien
caaagaggagtcgtacatctgtgag

SEQ ID NO: 1054372 - DNA, 25 bp, Homo sapien
ggttgtggacagaatgtagcccaca

SEQ ID NO: 1054373 - DNA, 25 bp, Homo sapien
acgtcctccccgatgaagtccaggt

SEQ ID NO: 1054374 - DNA, 25 bp, Homo sapien
acatgcagatgtgcagcacgtcctc

SEQ ID NO: 1054375 - DNA, 25 bp, Homo sapien
caaacatgcagatgtgcagcacgtc

SEQ ID NO: 1054376 - DNA, 25 bp, Homo sapien
gcagcacgtcctccccgatgaagtc

SEQ ID NO: 1054377 - DNA, 25 bp, Homo sapien
tgtgtcagcacctacagactggcct

SEQ ID NO: 1054378 - DNA, 25 bp, Homo sapien
gcatggcatgctattatctggatat

SEQ ID NO: 1054379 - DNA, 25 bp, Homo sapien
tatgctaacagtgtggtagtaggcg

SEQ ID NO: 1054380 - DNA, 25 bp, Homo sapien
tcttagatccgaggtgaggttgaga

SEQ ID NO: 1054381 - DNA, 25 bp, Homo sapien
ggttgtttccaatttagacctatga

SEQ ID NO: 1054382 - DNA, 25 bp, Homo sapien
tagacctatgatgaataaagctact

SEQ ID NO: 1054383 - DNA, 25 bp, Homo sapien
tactatataaatactcatgtgcgag

SEQ ID NO: 1054384 - DNA, 25 bp, Homo sapien
tattttaattgttgcgtagaaccca

SEQ ID NO: 1054385 - DNA, 25 bp, Homo sapien
ggaatcatcaaccagttcaagacag

SEQ ID NO: 1054386 - DNA, 25 bp, Homo sapien
agaaaatacgtccatccccctcaga

SEQ ID NO: 1054387 - DNA, 25 bp, Homo sapien
gatgaaattagtctgttctttaatt

SEQ ID NO: 1054388 - DNA, 25 bp, Homo sapien
ccccagaggtaactactatcttgac

SEQ ID NO: 1054389 - DNA, 25 bp, Homo sapien
cgtgattaagaagacgcccaagaat

SEQ ID NO: 1054390 - DNA, 25 bp, Homo sapien
gaagacgcccaagaatgcaatgagg

SEQ ID NO: 1054391 - DNA, 25 bp, Homo sapien
taagaagacgcccaagaatgcaatg

SEQ ID NO: 1054392 - DNA, 25 bp, Homo sapien
ttacgcgtgattaagaagacgccca

SEQ ID NO: 1054393 - DNA, 25 bp, Homo sapien
tggaaatatagggctcaaatggaat

SEQ ID NO: 1054394 - DNA, 25 bp, Homo sapien
gaaatatagggctcaaatggaatgg

SEQ ID NO: 1054395 - DNA, 25 bp, Homo sapien
ggaaatatagggctcaaatggaatg

SEQ ID NO: 1054396 - DNA, 25 bp, Homo sapien
catggaaatatagggctcaaatgga

SEQ ID NO: 1054397 - DNA, 25 bp, Homo sapien
gatgtgctcaaaaccaaccgaggtg

SEQ ID NO: 1054398 - DNA, 25 bp, Homo sapien
tatggatgttcagctagacccacgg

SEQ ID NO: 1054399 - DNA, 25 bp, Homo sapien
cactagcctgaaagaaggaatccca

SEQ ID NO: 1054400 - DNA, 25 bp, Homo sapien
gaacagtcacacgataaaggcacag

SEQ ID NO: 1054401 - DNA, 25 bp, Homo sapien
gggctgtttctcgatctcattttta

SEQ ID NO: 1054402 - DNA, 25 bp, Homo sapien
tgaattactcaaaggctctccaaat

SEQ ID NO: 1054403 - DNA, 25 bp, Homo sapien
gctctccaaattgtgatgtggtaaa

SEQ ID NO: 1054404 - DNA, 25 bp, Homo sapien
gtctttcaggtgcttgaattactca

SEQ ID NO: 1054405 - DNA, 25 bp, Homo sapien
gaagcggcagtctctcacattagca

SEQ ID NO: 1054406 - DNA, 25 bp, Homo sapien
gaagcagggctaattccataattgg

SEQ ID NO: 1054407 - DNA, 25 bp, Homo sapien
cctagattgaagctaaagctgtgcc

SEQ ID NO: 1054408 - DNA, 25 bp, Homo sapien
ggagatcttagcttttacctagaag

SEQ ID NO: 1054409 - DNA, 25 bp, Homo sapien
gaccccagaggcacttctggagccg

SEQ ID NO: 1054410 - DNA, 25 bp, Homo sapien
tcttggtgtgctctaggactcggta

SEQ ID NO: 1054411 - DNA, 25 bp, Homo sapien
catccctttatcgtgcatgttctgc

SEQ ID NO: 1054412 - DNA, 25 bp, Homo sapien
gtggcaggagcgtagatctcagaaa

SEQ ID NO: 1054413 - DNA, 25 bp, Homo sapien
tctcaagaaagctggctggcccaag

SEQ ID NO: 1054414 - DNA, 25 bp, Homo sapien
tgagtaacaataacgaaccagggct

SEQ ID NO: 1054415 - DNA, 25 bp, Homo sapien
agttaagaatgcagacccgtgggcc

SEQ ID NO: 1054416 - DNA, 25 bp, Homo sapien
aagacagtcacatatgcggccagga

SEQ ID NO: 1054417 - DNA, 25 bp, Homo sapien
gatggagtcctgtatccgcaccgtg

SEQ ID NO: 1054418 - DNA, 25 bp, Homo sapien
tggttccccaacactagcctgatgg

SEQ ID NO: 1054419 - DNA, 25 bp, Homo sapien
ctttggaattcacatggaaggctgc

SEQ ID NO: 1054420 - DNA, 25 bp, Homo sapien
gcaccgtgccgtcaaactggctggt

SEQ ID NO: 1054421 - DNA, 25 bp, Homo sapien
gatctgtactgttaatatacgaact

SEQ ID NO: 1054422 - DNA, 25 bp, Homo sapien
cttttaaccacggtgaaggttgcag

SEQ ID NO: 1054423 - DNA, 25 bp, Homo sapien
tatacgaactatatggaaatgtaat

SEQ ID NO: 1054424 - DNA, 25 bp, Homo sapien
cagctgcaataatgggcatctctag

SEQ ID NO: 1054425 - DNA, 25 bp, Homo sapien
gtaccatactacacctgcctttgca

SEQ ID NO: 1054426 - DNA, 25 bp, Homo sapien
taaatatataggtaccatactacac

SEQ ID NO: 1054427 - DNA, 25 bp, Homo sapien
gaggtcttaatatatcatgtggcat

SEQ ID NO: 1054428 - DNA, 25 bp, Homo sapien
gtaagtgcttaatatatgagtatgt

SEQ ID NO: 1054429 - DNA, 25 bp, Homo sapien
tgagaacaagattaactataaacag

SEQ ID NO: 1054430 - DNA, 25 bp, Homo sapien
aaagtctgagagttgtggatgattc

SEQ ID NO: 1054431 - DNA, 25 bp, Homo sapien
ctggtttgcaggtgggaccattgca

SEQ ID NO: 1054432 - DNA, 25 bp, Homo sapien
cgcacctggccggtagactgaattt

SEQ ID NO: 1054433 - DNA, 25 bp, Homo sapien
gaaggcgtaccatcatcccctgaat

SEQ ID NO: 1054434 - DNA, 25 bp, Homo sapien
gcgtaccatcatcccctgaatgtga

SEQ ID NO: 1054435 - DNA, 25 bp, Homo sapien
tgtttacccgaaggcgtaccatcat

SEQ ID NO: 1054436 - DNA, 25 bp, Homo sapien
tgtgtgcatttgtttacccgaaggc

SEQ ID NO: 1054437 - DNA, 25 bp, Homo sapien
ggacccattgacttcgcagttccct

SEQ ID NO: 1054438 - DNA, 25 bp, Homo sapien
tacctcatataagaggagtcacata

SEQ ID NO: 1054439 - DNA, 25 bp, Homo sapien
tcttgagactggctgatcggacttg

SEQ ID NO: 1054440 - DNA, 25 bp, Homo sapien
tgtacccatgaaaccctggacccat

SEQ ID NO: 1054441 - DNA, 25 bp, Homo sapien
tacttacgggtccacactggaagga

SEQ ID NO: 1054442 - DNA, 25 bp, Homo sapien
tcttcgagggcatcagtacttacgg

SEQ ID NO: 1054443 - DNA, 25 bp, Homo sapien
tgctgaattaactacagatccgtta

SEQ ID NO: 1054444 - DNA, 25 bp, Homo sapien
tgcccaaagattcggaagctgctga

SEQ ID NO: 1054445 - DNA, 25 bp, Homo sapien
ggtgtctcttcccttagccggcaga

SEQ ID NO: 1054446 - DNA, 25 bp, Homo sapien
ctattacgcaaagggaagagccggg

SEQ ID NO: 1054447 - DNA, 25 bp, Homo sapien
taggaccgaggcttacattggcagg

SEQ ID NO: 1054448 - DNA, 25 bp, Homo sapien
tccgacgccttaggagaccatggga

SEQ ID NO: 1054449 - DNA, 25 bp, Homo sapien
ctagggcggtgtcccggctgagcta

SEQ ID NO: 1054450 - DNA, 25 bp, Homo sapien
ggagccggacggcgcgagctgcggg

SEQ ID NO: 1054451 - DNA, 25 bp, Homo sapien
ccctgggctgggactagggcggtgt

SEQ ID NO: 1054452 - DNA, 25 bp, Homo sapien
cgccgcaggacgggagccgggaggg

SEQ ID NO: 1054453 - DNA, 25 bp, Homo sapien
ctggagaggccgggcgccgtggggc

SEQ ID NO: 1054454 - DNA, 25 bp, Homo sapien
ctgctggagaggccgggcgccgtgg

SEQ ID NO: 1054455 - DNA, 25 bp, Homo sapien
gagaggccgggcgccgtggggcctc

SEQ ID NO: 1054456 - DNA, 25 bp, Homo sapien
gaggccgggcgccgtggggcctcac

SEQ ID NO: 1054457 - DNA, 25 bp, Homo sapien
gcaaaatgtcaagcacatggcatgg

SEQ ID NO: 1054458 - DNA, 25 bp, Homo sapien
gaaagggctgaaccgatatcctcca

SEQ ID NO: 1054459 - DNA, 25 bp, Homo sapien
ctaactacggctggcttctggcaaa

SEQ ID NO: 1054460 - DNA, 25 bp, Homo sapien
tccagggaactcttgactggcccag

SEQ ID NO: 1054461 - DNA, 25 bp, Homo sapien
tctccaatctggaaaggggccctgc

SEQ ID NO: 1054462 - DNA, 25 bp, Homo sapien
tcttcaagacaaagttgtcaggtgg

SEQ ID NO: 1054463 - DNA, 25 bp, Homo sapien
catttatcgtgccagaaatctccaa

SEQ ID NO: 1054464 - DNA, 25 bp, Homo sapien
gagtgacagtgtatctcactgtggc

SEQ ID NO: 1054465 - DNA, 25 bp, Homo sapien
tatagtcctaggatgtctatcaggc

SEQ ID NO: 1054466 - DNA, 25 bp, Homo sapien
ccttctgtatagtcctaggatgtct

SEQ ID NO: 1054467 - DNA, 25 bp, Homo sapien
ccttttccttctgtatagtcctagg

SEQ ID NO: 1054468 - DNA, 25 bp, Homo sapien
tcctaggatgtctatcaggcaccca

SEQ ID NO: 1054469 - DNA, 25 bp, Homo sapien
tggacgctgcaagcaaaaagtgagg

SEQ ID NO: 1054470 - DNA, 25 bp, Homo sapien
tgctctcgtgcctcaaacactgctt

SEQ ID NO: 1054471 - DNA, 25 bp, Homo sapien
cctcttcttggtcagtgctacacag

SEQ ID NO: 1054472 - DNA, 25 bp, Homo sapien
gtaggcagatcacttaaatccatca

SEQ ID NO: 1054473 - DNA, 25 bp, Homo sapien
ggagtacgctggcgcaatctccgct

SEQ ID NO: 1054474 - DNA, 25 bp, Homo sapien
ttggcctcccaaagtactgggacta

SEQ ID NO: 1054475 - DNA, 25 bp, Homo sapien
cccaaagtactgggactacaagcat

SEQ ID NO: 1054476 - DNA, 25 bp, Homo sapien
cgctcactgcaacctctgcctccca

SEQ ID NO: 1054477 - DNA, 25 bp, Homo sapien
tccatttctgcctgggggtaggcaa

SEQ ID NO: 1054478 - DNA, 25 bp, Homo sapien
tccactaatatcaaaggcaaggcct

SEQ ID NO: 1054479 - DNA, 25 bp, Homo sapien
ggtaggcaaagtgcttttggttctc

SEQ ID NO: 1054480 - DNA, 25 bp, Homo sapien
tttggttctcatcaatcaccactga

SEQ ID NO: 1054481 - DNA, 25 bp, Homo sapien
catactgggactatgtaattccaca

SEQ ID NO: 1054482 - DNA, 25 bp, Homo sapien
gcagtacgtgtatatctcctgagta

SEQ ID NO: 1054483 - DNA, 25 bp, Homo sapien
tatttgagtcgttcatgaggctgag

SEQ ID NO: 1054484 - DNA, 25 bp, Homo sapien
taaagatgcctaactccctatagcc

SEQ ID NO: 1054485 - DNA, 25 bp, Homo sapien
gcaactgcgccagttgattctaaat

SEQ ID NO: 1054486 - DNA, 25 bp, Homo sapien
caactgcgccagttgattctaaata

SEQ ID NO: 1054487 - DNA, 25 bp, Homo sapien
gagcaactgcgccagttgattctaa

SEQ ID NO: 1054488 - DNA, 25 bp, Homo sapien
aactgcgccagttgattctaaatac

SEQ ID NO: 1054489 - DNA, 25 bp, Homo sapien
catcatagatggtgaagagtgcttc

SEQ ID NO: 1054490 - DNA, 25 bp, Homo sapien
catagatggtgaagagtgcttcaaa

SEQ ID NO: 1054491 - DNA, 25 bp, Homo sapien
ctggtcatcatagatggtgaagagt

SEQ ID NO: 1054492 - DNA, 25 bp, Homo sapien
gtcatcatagatggtgaagagtgct

SEQ ID NO: 1054493 - DNA, 25 bp, Homo sapien
tgtttcgtggagttctattcgcgct

SEQ ID NO: 1054494 - DNA, 25 bp, Homo sapien
tggagttctattcgcgctcttgctg

SEQ ID NO: 1054495 - DNA, 25 bp, Homo sapien
ctcttgctgccgcttcaggtttgct

SEQ ID NO: 1054496 - DNA, 25 bp, Homo sapien
ctgcccattgaagtctgtttcgtgg

SEQ ID NO: 1054497 - DNA, 25 bp, Homo sapien
caatttcaaagtcgaagacagccct

SEQ ID NO: 1054498 - DNA, 25 bp, Homo sapien
ttgtacagttccgtgacctccctgg

SEQ ID NO: 1054499 - DNA, 25 bp, Homo sapien
tagtttccgaacactagggtgtcag

SEQ ID NO: 1054500 - DNA, 25 bp, Homo sapien
tcagagagtcacaccaatgcaggat

SEQ ID NO: 1054501 - DNA, 25 bp, Homo sapien
gtcccgcacttcgccggacatctgc

SEQ ID NO: 1054502 - DNA, 25 bp, Homo sapien
tgtcccgcacttcgccggacatctg

SEQ ID NO: 1054503 - DNA, 25 bp, Homo sapien
cccgcacttcgccggacatctgcac

SEQ ID NO: 1054504 - DNA, 25 bp, Homo sapien
cttgtcccgcacttcgccggacatc

SEQ ID NO: 1054505 - DNA, 25 bp, Homo sapien
caggcatcgcatcttcgctctgctt

SEQ ID NO: 1054506 - DNA, 25 bp, Homo sapien
tataacaggcatcgcatcttcgctc

SEQ ID NO: 1054507 - DNA, 25 bp, Homo sapien
ggagatgaggaactgcttgacaggc

SEQ ID NO: 1054508 - DNA, 25 bp, Homo sapien
atttataacaggcatcgcatcttcg

SEQ ID NO: 1054509 - DNA, 25 bp, Homo sapien
ccaccacgctgggtgtcgactctgt

SEQ ID NO: 1054510 - DNA, 25 bp, Homo sapien
tcattcaacgctgcggtcggagggt

SEQ ID NO: 1054511 - DNA, 25 bp, Homo sapien
tcgtctgggcaattttctgtttggg

SEQ ID NO: 1054512 - DNA, 25 bp, Homo sapien
tcacagcgcgcaatcaaaggtctgg

SEQ ID NO: 1054513 - DNA, 25 bp, Homo sapien
agccgcctcgcaccacaaccaaggg

SEQ ID NO: 1054514 - DNA, 25 bp, Homo sapien
ctatgctgttcgcagcaacgcatcg

SEQ ID NO: 1054515 - DNA, 25 bp, Homo sapien
ttcgcagcaacgcatcggccgcagg

SEQ ID NO: 1054516 - DNA, 25 bp, Homo sapien
ggcacagagcgccatggccagagcc

SEQ ID NO: 1054517 - DNA, 25 bp, Homo sapien
agaagacctatacctcactcggcag

SEQ ID NO: 1054518 - DNA, 25 bp, Homo sapien
tacacgaccgtgtctgcagtacagg

SEQ ID NO: 1054519 - DNA, 25 bp, Homo sapien
tatcacttaaaatctgggacaggtc

SEQ ID NO: 1054520 - DNA, 25 bp, Homo sapien
tcatgtgatacagaatcaggaggac

SEQ ID NO: 1054521 - DNA, 25 bp, Homo sapien
caagcttactggtgatacgtcccac

SEQ ID NO: 1054522 - DNA, 25 bp, Homo sapien
gaatttacattgaggcctagcagtg

SEQ ID NO: 1054523 - DNA, 25 bp, Homo sapien
tctaaagtggccgtccttcctgggc

SEQ ID NO: 1054524 - DNA, 25 bp, Homo sapien
tacaggctagaacacggtcacgaac

SEQ ID NO: 1054525 - DNA, 25 bp, Homo sapien
tcggtcaaagctatgcaggagtgcc

SEQ ID NO: 1054526 - DNA, 25 bp, Homo sapien
gaagggcacgcacattatagcagaa

SEQ ID NO: 1054527 - DNA, 25 bp, Homo sapien
gggcctgacgcaccatagcattgag

SEQ ID NO: 1054528 - DNA, 25 bp, Homo sapien
taggccagtcatagcagttccgtct

SEQ ID NO: 1054529 - DNA, 25 bp, Homo sapien
ctcccagccagggtccccgccgccg

SEQ ID NO: 1054530 - DNA, 25 bp, Homo sapien
ggcaccgccgcgctcccagccaggg

SEQ ID NO: 1054531 - DNA, 25 bp, Homo sapien
ctgctctgtcgagccccgctcggcc

SEQ ID NO: 1054532 - DNA, 25 bp, Homo sapien
cgctcggcctcccgccggcaccgcc

SEQ ID NO: 1054533 - DNA, 25 bp, Homo sapien
gtggacttgcccgagactgttggac

SEQ ID NO: 1054534 - DNA, 25 bp, Homo sapien
tgaggggtaaagcagggactccaaa

SEQ ID NO: 1054535 - DNA, 25 bp, Homo sapien
tttaaggagcacatcaaactgaaac

SEQ ID NO: 1054536 - DNA, 25 bp, Homo sapien
ccgagactgttggacggccttggct

SEQ ID NO: 1054537 - DNA, 25 bp, Homo sapien
tgagttatctgatttaatctgtcag

SEQ ID NO: 1054538 - DNA, 25 bp, Homo sapien
gagttatctgatttaatctgtcaga

SEQ ID NO: 1054539 - DNA, 25 bp, Homo sapien
tttatgagttatctgatttaatctg

SEQ ID NO: 1054540 - DNA, 25 bp, Homo sapien
tatgagttatctgatttaatctgtc

SEQ ID NO: 1054541 - DNA, 25 bp, Homo sapien
taatagctcatgttcattgagtgcc

SEQ ID NO: 1054542 - DNA, 25 bp, Homo sapien
aatagctcatgttcattgagtgcct

SEQ ID NO: 1054543 - DNA, 25 bp, Homo sapien
tagctcatgttcattgagtgcctac

SEQ ID NO: 1054544 - DNA, 25 bp, Homo sapien
tgctggggatacaagggtgaaccaa

SEQ ID NO: 1054545 - DNA, 25 bp, Homo sapien
acagctcatctcggccccagccagc

SEQ ID NO: 1054546 - DNA, 25 bp, Homo sapien
cagctcatctcggccccagccagca

SEQ ID NO: 1054547 - DNA, 25 bp, Homo sapien
agctcatctcggccccagccagcac

SEQ ID NO: 1054548 - DNA, 25 bp, Homo sapien
ttacaattcctggagaacgccaccg

SEQ ID NO: 1054549 - DNA, 25 bp, Homo sapien
gaggcctcccctcatgtgtcaatgt

SEQ ID NO: 1054550 - DNA, 25 bp, Homo sapien
aacagtgacatagtgtgaggcctcc

SEQ ID NO: 1054551 - DNA, 25 bp, Homo sapien
gctccgctccctgtagagatcctgt

SEQ ID NO: 1054552 - DNA, 25 bp, Homo sapien
gggtggacacttcccacacagtcat

SEQ ID NO: 1054553 - DNA, 25 bp, Homo sapien
cagtgtctactgggcccctgatgtt

SEQ ID NO: 1054554 - DNA, 25 bp, Homo sapien
agtgtctactgggcccctgatgttg

SEQ ID NO: 1054555 - DNA, 25 bp, Homo sapien
gtctactgggcccctgatgttgtct

SEQ ID NO: 1054556 - DNA, 25 bp, Homo sapien
tgtctactgggcccctgatgttgtc

SEQ ID NO: 1054557 - DNA, 25 bp, Homo sapien
caagcaccacgggaggcactgaggt

SEQ ID NO: 1054558 - DNA, 25 bp, Homo sapien
ggtggtcggcacgagcaacgaatca

SEQ ID NO: 1054559 - DNA, 25 bp, Homo sapien
cgaatcaggaggttgcgcatgagaa

SEQ ID NO: 1054560 - DNA, 25 bp, Homo sapien
cactgaggtggatccgatgtgtgca

SEQ ID NO: 1054561 - DNA, 25 bp, Homo sapien
tgtaaatctccaggtgtcccgctgt

SEQ ID NO: 1054562 - DNA, 25 bp, Homo sapien
tcaagccaaggacccaactcttgag

SEQ ID NO: 1054563 - DNA, 25 bp, Homo sapien
aggagctcccatgtaaatctccagg

SEQ ID NO: 1054564 - DNA, 25 bp, Homo sapien
aactcttgagagtcctcgacctcca

SEQ ID NO: 1054565 - DNA, 25 bp, Homo sapien
cgagccgcctgaatccttcatggcc

SEQ ID NO: 1054566 - DNA, 25 bp, Homo sapien
agccgcctgaatccttcatggccat

SEQ ID NO: 1054567 - DNA, 25 bp, Homo sapien
gagccgcctgaatccttcatggcca

SEQ ID NO: 1054568 - DNA, 25 bp, Homo sapien
ccgagccgcctgaatccttcatggc

SEQ ID NO: 1054569 - DNA, 25 bp, Homo sapien
gaccctcaggagagacatttccgct

SEQ ID NO: 1054570 - DNA, 25 bp, Homo sapien
gatggtctgctgtccattcgccagg

SEQ ID NO: 1054571 - DNA, 25 bp, Homo sapien
tgaccagcttgataaactgagccgc

SEQ ID NO: 1054572 - DNA, 25 bp, Homo sapien
gaccgtgttgatttggaccctcagg

SEQ ID NO: 1054573 - DNA, 25 bp, Homo sapien
gtaatgcagccacctaaggccacca

SEQ ID NO: 1054574 - DNA, 25 bp, Homo sapien
aggctcctctacaggtcctgcaggg

SEQ ID NO: 1054575 - DNA, 25 bp, Homo sapien
tgggtgccgagttccaggtgcagac

SEQ ID NO: 1054576 - DNA, 25 bp, Homo sapien
gcagactgtcttttggatgggccca

SEQ ID NO: 1054577 - DNA, 25 bp, Homo sapien
gaatactagacgaactccttgcctt

SEQ ID NO: 1054578 - DNA, 25 bp, Homo sapien
tgagcacgacagactataggtttga

SEQ ID NO: 1054579 - DNA, 25 bp, Homo sapien
tatcaacgtggcacctactaagtga

SEQ ID NO: 1054580 - DNA, 25 bp, Homo sapien
gaaagcccttcactcgctggttcta

SEQ ID NO: 1054581 - DNA, 25 bp, Homo sapien
ccctggtggtcatgttcagtgagaa

SEQ ID NO: 1054582 - DNA, 25 bp, Homo sapien
tggtcatgttcagtgagaagaaggt

SEQ ID NO: 1054583 - DNA, 25 bp, Homo sapien
agaagaaggtggtatcccccagagg

SEQ ID NO: 1054584 - DNA, 25 bp, Homo sapien
tgagaagaaggtggtatcccccaga

SEQ ID NO: 1054585 - DNA, 25 bp, Homo sapien
tcagaaccacggtgaagatgatgat

SEQ ID NO: 1054586 - DNA, 25 bp, Homo sapien
gacaaccaccacaacggcagcaaca

SEQ ID NO: 1054587 - DNA, 25 bp, Homo sapien
caccacaacggcagcaacaatggct

SEQ ID NO: 1054588 - DNA, 25 bp, Homo sapien
tgttgtacatcttcagcaggatcag

SEQ ID NO: 1054589 - DNA, 25 bp, Homo sapien
ggaccgtccaggcagttccaaagcc

SEQ ID NO: 1054590 - DNA, 25 bp, Homo sapien
gaccgtccaggcagttccaaagccc

SEQ ID NO: 1054591 - DNA, 25 bp, Homo sapien
gggaccgtccaggcagttccaaagc

SEQ ID NO: 1054592 - DNA, 25 bp, Homo sapien
agggaccgtccaggcagttccaaag

SEQ ID NO: 1054593 - DNA, 25 bp, Homo sapien
ttgggctctagttcccgcctcgtcc

SEQ ID NO: 1054594 - DNA, 25 bp, Homo sapien
ccgttgctgtttgggcccacggcag

SEQ ID NO: 1054595 - DNA, 25 bp, Homo sapien
aacaggactgaaggtcacagttgct

SEQ ID NO: 1054596 - DNA, 25 bp, Homo sapien
ctggacgtcaacaggactgaaggtc

SEQ ID NO: 1054597 - DNA, 25 bp, Homo sapien
aagatgtctctgtcgacctgaccag

SEQ ID NO: 1054598 - DNA, 25 bp, Homo sapien
ggtgccaggcgctatactccagatg

SEQ ID NO: 1054599 - DNA, 25 bp, Homo sapien
gaccgtcagggttgatacagcccag

SEQ ID NO: 1054600 - DNA, 25 bp, Homo sapien
gaaccccgtgacagatcctattgtg

SEQ ID NO: 1054601 - DNA, 25 bp, Homo sapien
gcctggtgaggtgacacatacctgt

SEQ ID NO: 1054602 - DNA, 25 bp, Homo sapien
ttagcctggtgaggtgacacatacc

SEQ ID NO: 1054603 - DNA, 25 bp, Homo sapien
aattagcctggtgaggtgacacata

SEQ ID NO: 1054604 - DNA, 25 bp, Homo sapien
tagcctggtgaggtgacacatacct

SEQ ID NO: 1054605 - DNA, 25 bp, Homo sapien
cctcagaagggatttctgaccccaa

SEQ ID NO: 1054606 - DNA, 25 bp, Homo sapien
acctggcctcagaagggatttctga

SEQ ID NO: 1054607 - DNA, 25 bp, Homo sapien
gagggagagactcctaaaatttgag

SEQ ID NO: 1054608 - DNA, 25 bp, Homo sapien
tgtgtcactttctttaacagaatag

SEQ ID NO: 1054609 - DNA, 25 bp, Homo sapien
ttttggccgtgagcatggatgccca

SEQ ID NO: 1054610 - DNA, 25 bp, Homo sapien
tccttgggcctaagtagtagcttga

SEQ ID NO: 1054611 - DNA, 25 bp, Homo sapien
gcttgagccctcaaagaaatggctt

SEQ ID NO: 1054612 - DNA, 25 bp, Homo sapien
tcaaacacatggacaaacccgtact

SEQ ID NO: 1054613 - DNA, 25 bp, Homo sapien
gcagcatctgctaagaaaggcacct

SEQ ID NO: 1054614 - DNA, 25 bp, Homo sapien
ggtaacccttagaagactgcactgt

SEQ ID NO: 1054615 - DNA, 25 bp, Homo sapien
ggtgagatccctgcatgagaccagc

SEQ ID NO: 1054616 - DNA, 25 bp, Homo sapien
gagaccagctgctaactccttgaga

SEQ ID NO: 1054617 - DNA, 25 bp, Homo sapien
tatctgctgaaccacaggagtttgc

SEQ ID NO: 1054618 - DNA, 25 bp, Homo sapien
catatcgccagcgacctgaaggtca

SEQ ID NO: 1054619 - DNA, 25 bp, Homo sapien
tggacagtctggcaacggccgggat

SEQ ID NO: 1054620 - DNA, 25 bp, Homo sapien
tcagtcttgtttctacctgcttctc

SEQ ID NO: 1054621 - DNA, 25 bp, Homo sapien
ctagagattaagatactgtggcctt

SEQ ID NO: 1054622 - DNA, 25 bp, Homo sapien
tagagattaagatactgtggccttg

SEQ ID NO: 1054623 - DNA, 25 bp, Homo sapien
agagattaagatactgtggccttgg

SEQ ID NO: 1054624 - DNA, 25 bp, Homo sapien
tccatctgcttagggttaagaccac

SEQ ID NO: 1054625 - DNA, 25 bp, Homo sapien
ttcagggtttggtccatctgcttag

SEQ ID NO: 1054626 - DNA, 25 bp, Homo sapien
cattcatgtaggtgttaaagcaaat

SEQ ID NO: 1054627 - DNA, 25 bp, Homo sapien
gaccacattaccagttgcttgacat

SEQ ID NO: 1054628 - DNA, 25 bp, Homo sapien
tgccaaagctgaagatttacatcgt

SEQ ID NO: 1054629 - DNA, 25 bp, Homo sapien
gctggagtgcaatatcgatgcttta

SEQ ID NO: 1054630 - DNA, 25 bp, Homo sapien
tacatcgtacaataaacttttgaga

SEQ ID NO: 1054631 - DNA, 25 bp, Homo sapien
ccatggtcaataattgcatgacact

SEQ ID NO: 1054632 - DNA, 25 bp, Homo sapien
ttttgtttccatcgtttgcctcttc

SEQ ID NO: 1054633 - DNA, 25 bp, Homo sapien
ttcacttttgtttccatcgtttgcc

SEQ ID NO: 1054634 - DNA, 25 bp, Homo sapien
ttttgttatcatcttcacttttgtt

SEQ ID NO: 1054635 - DNA, 25 bp, Homo sapien
cacttttgtttccatcgtttgcctc

SEQ ID NO: 1054636 - DNA, 25 bp, Homo sapien
acgcgtgcgcacgagcgccagcggg

SEQ ID NO: 1054637 - DNA, 25 bp, Homo sapien
gaccggcggagggaaagccgagcgc

SEQ ID NO: 1054638 - DNA, 25 bp, Homo sapien
cgggcttctgtcaggccctaaactc

SEQ ID NO: 1054639 - DNA, 25 bp, Homo sapien
acgcagcgcgcgtcgttgcgcccgc

SEQ ID NO: 1054640 - DNA, 25 bp, Homo sapien
tgccgcctcgctcggagatcgctcc

SEQ ID NO: 1054641 - DNA, 25 bp, Homo sapien
ttgccgcctcgctcggagatcgctc

SEQ ID NO: 1054642 - DNA, 25 bp, Homo sapien
cttgccgcctcgctcggagatcgct

SEQ ID NO: 1054643 - DNA, 25 bp, Homo sapien
gagaagtccctggcctcaccccggc

SEQ ID NO: 1054644 - DNA, 25 bp, Homo sapien
caccccggcgcccggcgcttctact

SEQ ID NO: 1054645 - DNA, 25 bp, Homo sapien
cctcaccccggcgcccggcgcttct

SEQ ID NO: 1054646 - DNA, 25 bp, Homo sapien
agaagtccctggcctcaccccggcg

SEQ ID NO: 1054647 - DNA, 25 bp, Homo sapien
ggcgggcagcgaggtaccatcccgg

SEQ ID NO: 1054648 - DNA, 25 bp, Homo sapien
cgggcagcgaggtaccatcccggcc

SEQ ID NO: 1054649 - DNA, 25 bp, Homo sapien
gcgggcagcgaggtaccatcccggc

SEQ ID NO: 1054650 - DNA, 25 bp, Homo sapien
agctcccgcgaaccctgacctggcg

SEQ ID NO: 1054651 - DNA, 25 bp, Homo sapien
cgcgaaccctgacctggcgcctcca

SEQ ID NO: 1054652 - DNA, 25 bp, Homo sapien
gggagctcccgcgaaccctgacctg

SEQ ID NO: 1054653 - DNA, 25 bp, Homo sapien
gggcgggagctcccgcgaaccctga

SEQ ID NO: 1054654 - DNA, 25 bp, Homo sapien
caactacgacggagtaacttccctg

SEQ ID NO: 1054655 - DNA, 25 bp, Homo sapien
cctgataaagtgtgggccccgagaa

SEQ ID NO: 1054656 - DNA, 25 bp, Homo sapien
ggctccagcacgagcctgataaagt

SEQ ID NO: 1054657 - DNA, 25 bp, Homo sapien
tgtgggccccgagaaccaactacga

SEQ ID NO: 1054658 - DNA, 25 bp, Homo sapien
ctaggcattctgcaaatttcagctg

SEQ ID NO: 1054659 - DNA, 25 bp, Homo sapien
tctaggcattctgcaaatttcagct

SEQ ID NO: 1054660 - DNA, 25 bp, Homo sapien
tctttttgttatccaaggctttata

SEQ ID NO: 1054661 - DNA, 25 bp, Homo sapien
ttttcacctgtgtagctttcaaaac

SEQ ID NO: 1054662 - DNA, 25 bp, Homo sapien
ttgcactccatagaaaaaattcagt

SEQ ID NO: 1054663 - DNA, 25 bp, Homo sapien
caaaactatgcaccttcactaaact

SEQ ID NO: 1054664 - DNA, 25 bp, Homo sapien
ccagccttaatagttgtttacaaag

SEQ ID NO: 1054665 - DNA, 25 bp, Homo sapien
ttttaaatcataaatcacattatca

SEQ ID NO: 1054666 - DNA, 25 bp, Homo sapien
aaatcacattatcattagaaaattg

SEQ ID NO: 1054667 - DNA, 25 bp, Homo sapien
tttaaatcataaatcacattatcat

SEQ ID NO: 1054668 - DNA, 25 bp, Homo sapien
tcataaatcacattatcattagaaa

SEQ ID NO: 1054669 - DNA, 25 bp, Homo sapien
ggtgctatacttcagacgcaaggaa

SEQ ID NO: 1054670 - DNA, 25 bp, Homo sapien
gctatacttcagacgcaaggaataa

SEQ ID NO: 1054671 - DNA, 25 bp, Homo sapien
ctgtgacctaataaggtgatggtgc

SEQ ID NO: 1054672 - DNA, 25 bp, Homo sapien
ggtgatggtgctatacttcagacgc

SEQ ID NO: 1054673 - DNA, 25 bp, Homo sapien
catcaagggagttgggtcagagcga

SEQ ID NO: 1054674 - DNA, 25 bp, Homo sapien
ttgggtcagagcgacattgggacac

SEQ ID NO: 1054675 - DNA, 25 bp, Homo sapien
gtcagagcgacattgggacactcac

SEQ ID NO: 1054676 - DNA, 25 bp, Homo sapien
caagggagttgggtcagagcgacat

SEQ ID NO: 1054677 - DNA, 25 bp, Homo sapien
taactgatgactagctgacatgcag

SEQ ID NO: 1054678 - DNA, 25 bp, Homo sapien
tgacatgcagctacaaagaccttag

SEQ ID NO: 1054679 - DNA, 25 bp, Homo sapien
aagagcagtgtacagctttacccaa

SEQ ID NO: 1054680 - DNA, 25 bp, Homo sapien
caaaacatagggtgaactctttggg

SEQ ID NO: 1054681 - DNA, 25 bp, Homo sapien
gaatcgccaagtcccctgtagagaa

SEQ ID NO: 1054682 - DNA, 25 bp, Homo sapien
gagcagcctgttaatcctttgtgga

SEQ ID NO: 1054683 - DNA, 25 bp, Homo sapien
gtccacaaagtgctaagaggtcaag

SEQ ID NO: 1054684 - DNA, 25 bp, Homo sapien
tccgttggtcaagcaacaaggtctg

SEQ ID NO: 1054685 - DNA, 25 bp, Homo sapien
gttttcttgtgcacttagcagcagg

SEQ ID NO: 1054686 - DNA, 25 bp, Homo sapien
atgttttcttgtgcacttagcagca

SEQ ID NO: 1054687 - DNA, 25 bp, Homo sapien
ttttcttgtgcacttagcagcaggg

SEQ ID NO: 1054688 - DNA, 25 bp, Homo sapien
tgttttcttgtgcacttagcagcag

SEQ ID NO: 1054689 - DNA, 25 bp, Homo sapien
ttcatagatgccagtttttcttgtt

SEQ ID NO: 1054690 - DNA, 25 bp, Homo sapien
tttcatagatgccagtttttcttgt

SEQ ID NO: 1054691 - DNA, 25 bp, Homo sapien
cttcttgggctacgagaccgctccc

SEQ ID NO: 1054692 - DNA, 25 bp, Homo sapien
cttgggctacgagaccgctcccttt

SEQ ID NO: 1054693 - DNA, 25 bp, Homo sapien
cctgtaaaacatcagttatgcatct

SEQ ID NO: 1054694 - DNA, 25 bp, Homo sapien
taaaacatcagttatgcatctattg

SEQ ID NO: 1054695 - DNA, 25 bp, Homo sapien
cagttatgcatctattgtatgatac

SEQ ID NO: 1054696 - DNA, 25 bp, Homo sapien
agtacctgtaaaacatcagttatgc

SEQ ID NO: 1054697 - DNA, 25 bp, Homo sapien
ttagtccagaggcaaggcacaggtc

SEQ ID NO: 1054698 - DNA, 25 bp, Homo sapien
actcatggctaaattatctgtctca

SEQ ID NO: 1054699 - DNA, 25 bp, Homo sapien
gatttctttagtccagaggcaaggc

SEQ ID NO: 1054700 - DNA, 25 bp, Homo sapien
agacactcatggctaaattatctgt

SEQ ID NO: 1054701 - DNA, 25 bp, Homo sapien
aaaaatgtgaacctaacaatagtct

SEQ ID NO: 1054702 - DNA, 25 bp, Homo sapien
agctgagccgtggatttaaaaatgt

SEQ ID NO: 1054703 - DNA, 25 bp, Homo sapien
aaatgtgaacctaacaatagtctca

SEQ ID NO: 1054704 - DNA, 25 bp, Homo sapien
aaatatagaagctgagccgtggatt

SEQ ID NO: 1054705 - DNA, 25 bp, Homo sapien
cagtagcctgcctaactcgaagggt

SEQ ID NO: 1054706 - DNA, 25 bp, Homo sapien
gcttttttgcgagaggagaagccct

SEQ ID NO: 1054707 - DNA, 25 bp, Homo sapien
caatggagttcatcaggaagagcct

SEQ ID NO: 1054708 - DNA, 25 bp, Homo sapien
gaaaagcactaacttgggactctag

SEQ ID NO: 1054709 - DNA, 25 bp, Homo sapien
tcgagaatgactgcgctttctctct

SEQ ID NO: 1054710 - DNA, 25 bp, Homo sapien
tctctcctgacaggggaagatcgtc

SEQ ID NO: 1054711 - DNA, 25 bp, Homo sapien
gaagatcgtcttctaggggaaggag

SEQ ID NO: 1054712 - DNA, 25 bp, Homo sapien
gggagatcgagaatgactgcgcttt

SEQ ID NO: 1054713 - DNA, 25 bp, Homo sapien
tgtactgaaggttcttttactttca

SEQ ID NO: 1054714 - DNA, 25 bp, Homo sapien
tgaaacccagagagcaactaataat

SEQ ID NO: 1054715 - DNA, 25 bp, Homo sapien
tccaaaagacacataagtatgtatg

SEQ ID NO: 1054716 - DNA, 25 bp, Homo sapien
gtatgtacctatcactgaaacccag

SEQ ID NO: 1054717 - DNA, 25 bp, Homo sapien
cagacttgtctctatctccaaaaga

SEQ ID NO: 1054718 - DNA, 25 bp, Homo sapien
tcttgatttggagcgtgaccgagat

SEQ ID NO: 1054719 - DNA, 25 bp, Homo sapien
gaccgcgtccgggatcttgatttgg

SEQ ID NO: 1054720 - DNA, 25 bp, Homo sapien
tccgggatcttgatttggagcgtga

SEQ ID NO: 1054721 - DNA, 25 bp, Homo sapien
gagcgggaccgcgtccgggatcttg

SEQ ID NO: 1054722 - DNA, 25 bp, Homo sapien
ttactggagatctactccttctatg

SEQ ID NO: 1054723 - DNA, 25 bp, Homo sapien
tcttactggagatctactccttcta

SEQ ID NO: 1054724 - DNA, 25 bp, Homo sapien
cttactggagatctactccttctat

SEQ ID NO: 1054725 - DNA, 25 bp, Homo sapien
ctttggcggaagaattcctgagaac

SEQ ID NO: 1054726 - DNA, 25 bp, Homo sapien
tgctgaaggagataacctacgagtt

SEQ ID NO: 1054727 - DNA, 25 bp, Homo sapien
caaggatgctgacgaacgtcttctt

SEQ ID NO: 1054728 - DNA, 25 bp, Homo sapien
tgatgagctactcccagacaaggat

SEQ ID NO: 1054729 - DNA, 25 bp, Homo sapien
gcttctttggtggtgaccgtgaacg

SEQ ID NO: 1054730 - DNA, 25 bp, Homo sapien
ggaatgccgagttttgggtggtgga

SEQ ID NO: 1054731 - DNA, 25 bp, Homo sapien
tttgggtggtggagttgcaggaggt

SEQ ID NO: 1054732 - DNA, 25 bp, Homo sapien
gttgcaggaggtgatggcctgtgcc

SEQ ID NO: 1054733 - DNA, 25 bp, Homo sapien
tggcctgtgccttcgccttggagga

SEQ ID NO: 1054734 - DNA, 25 bp, Homo sapien
tggagacacagaaacacgacttttt

SEQ ID NO: 1054735 - DNA, 25 bp, Homo sapien
ggagacacagaaacacgactttttc

SEQ ID NO: 1054736 - DNA, 25 bp, Homo sapien
gacacagaaacacgactttttcttg

SEQ ID NO: 1054737 - DNA, 25 bp, Homo sapien
cagaaacacgactttttcttgtacg

SEQ ID NO: 1054738 - DNA, 25 bp, Homo sapien
gggcaataactgactacgctttgta

SEQ ID NO: 1054739 - DNA, 25 bp, Homo sapien
tgatcccttatcatgccaacgcaaa

SEQ ID NO: 1054740 - DNA, 25 bp, Homo sapien
cagcccacggctggtaaaagatttc

SEQ ID NO: 1054741 - DNA, 25 bp, Homo sapien
aaaagatttctccacctgcgcaatg

SEQ ID NO: 1054742 - DNA, 25 bp, Homo sapien
cagcgtgtgttaacctacagattgc

SEQ ID NO: 1054743 - DNA, 25 bp, Homo sapien
tgatcataataaccccagcgtgtgt

SEQ ID NO: 1054744 - DNA, 25 bp, Homo sapien
tgtatatcattccagccctaagctc

SEQ ID NO: 1054745 - DNA, 25 bp, Homo sapien
taagctccagagagcctggttcaaa

SEQ ID NO: 1054746 - DNA, 25 bp, Homo sapien
taccacaccttagagaactgggttc

SEQ ID NO: 1054747 - DNA, 25 bp, Homo sapien
caaagatattatgggcacgtcgtta

SEQ ID NO: 1054748 - DNA, 25 bp, Homo sapien
cacgtcgttaaaaagtgcatgtcca

SEQ ID NO: 1054749 - DNA, 25 bp, Homo sapien
cgcgcccagcgacttttcttaaaat

SEQ ID NO: 1054750 - DNA, 25 bp, Homo sapien
ggtgaaggggattctcttttctcag

SEQ ID NO: 1054751 - DNA, 25 bp, Homo sapien
gtcttagctcttaccctatacttaa

SEQ ID NO: 1054752 - DNA, 25 bp, Homo sapien
gcagaaggggatgaccaaatgtgca

SEQ ID NO: 1054753 - DNA, 25 bp, Homo sapien
gctcttaccctatacttaatcttca

SEQ ID NO: 1054754 - DNA, 25 bp, Homo sapien
cagagtcttagctcttaccctatac

SEQ ID NO: 1054755 - DNA, 25 bp, Homo sapien
agatggatgcatttagaaagtgttt

SEQ ID NO: 1054756 - DNA, 25 bp, Homo sapien
gaaagatggatgcatttagaaagtg

SEQ ID NO: 1054757 - DNA, 25 bp, Homo sapien
aaagatggatgcatttagaaagtgt

SEQ ID NO: 1054758 - DNA, 25 bp, Homo sapien
ctgaaagatggatgcatttagaaag

SEQ ID NO: 1054759 - DNA, 25 bp, Homo sapien
gttttgtcgtctgtattggcgtctc

SEQ ID NO: 1054760 - DNA, 25 bp, Homo sapien
tggttttgtcgtctgtattggcgtc

SEQ ID NO: 1054761 - DNA, 25 bp, Homo sapien
tgctggttttgtcgtctgtattggc

SEQ ID NO: 1054762 - DNA, 25 bp, Homo sapien
tttgtcgtctgtattggcgtctctg

SEQ ID NO: 1054763 - DNA, 25 bp, Homo sapien
ttcttcacatgggatctcttgggtc

SEQ ID NO: 1054764 - DNA, 25 bp, Homo sapien
tcttcacatgggatctcttgggtcg

SEQ ID NO: 1054765 - DNA, 25 bp, Homo sapien
tcacatgggatctcttgggtcgttc

SEQ ID NO: 1054766 - DNA, 25 bp, Homo sapien
catgggatctcttgggtcgttcatc

SEQ ID NO: 1054767 - DNA, 25 bp, Homo sapien
gaaggggaatgtctccgccgcctgc

SEQ ID NO: 1054768 - DNA, 25 bp, Homo sapien
tttttggcgctttcgtggtgatgga

SEQ ID NO: 1054769 - DNA, 25 bp, Homo sapien
cgaggggaagtctctttttggcgct

SEQ ID NO: 1054770 - DNA, 25 bp, Homo sapien
gaagtctctttttggcgctttcgtg

SEQ ID NO: 1054771 - DNA, 25 bp, Homo sapien
aaccaaattctcaaataatcccaag

SEQ ID NO: 1054772 - DNA, 25 bp, Homo sapien
aataatcccaagttatcaaatttca

SEQ ID NO: 1054773 - DNA, 25 bp, Homo sapien
tccaaatacttgaaggagttaacca

SEQ ID NO: 1054774 - DNA, 25 bp, Homo sapien
tatttttctaatcatgcacacatat

SEQ ID NO: 1054775 - DNA, 25 bp, Homo sapien
cttttagtcactggcgattgccatc

SEQ ID NO: 1054776 - DNA, 25 bp, Homo sapien
tagtcactggcgattgccatcgctt

SEQ ID NO: 1054777 - DNA, 25 bp, Homo sapien
actggcgattgccatcgctttccca

SEQ ID NO: 1054778 - DNA, 25 bp, Homo sapien
tcactggcgattgccatcgctttcc

SEQ ID NO: 1054779 - DNA, 25 bp, Homo sapien
tcctggagtagagcaataaacatta

SEQ ID NO: 1054780 - DNA, 25 bp, Homo sapien
gaaaggaatgctttagcagccaaac

SEQ ID NO: 1054781 - DNA, 25 bp, Homo sapien
cagaacagaaagtagtgccataatt

SEQ ID NO: 1054782 - DNA, 25 bp, Homo sapien
aaataccccgtgctttgctccatca

SEQ ID NO: 1054783 - DNA, 25 bp, Homo sapien
aaccaggctctatctccccttcttt

SEQ ID NO: 1054784 - DNA, 25 bp, Homo sapien
accaggctctatctccccttctttt

SEQ ID NO: 1054785 - DNA, 25 bp, Homo sapien
tggggatggacttctcctccgtcta

SEQ ID NO: 1054786 - DNA, 25 bp, Homo sapien
ggtggtggggatggacttctcctcc

SEQ ID NO: 1054787 - DNA, 25 bp, Homo sapien
ggatggacttctcctccgtctacca

SEQ ID NO: 1054788 - DNA, 25 bp, Homo sapien
tggtggggatggacttctcctccgt

SEQ ID NO: 1054789 - DNA, 25 bp, Homo sapien
gccgtcgaggaggaggggcgggaga

SEQ ID NO: 1054790 - DNA, 25 bp, Homo sapien
tgcgccgtcgaggaggaggggcggg

SEQ ID NO: 1054791 - DNA, 25 bp, Homo sapien
gcgccgtcgaggaggaggggcggga

SEQ ID NO: 1054792 - DNA, 25 bp, Homo sapien
ttcgtcgtggtggtggtgtgggagt

SEQ ID NO: 1054793 - DNA, 25 bp, Homo sapien
cttcgtcgtggtggtggtgtgggag

SEQ ID NO: 1054794 - DNA, 25 bp, Homo sapien
tcgtcgtggtggtggtgtgggagtc

SEQ ID NO: 1054795 - DNA, 25 bp, Homo sapien
tgggagacccgccgctttggtggtg

SEQ ID NO: 1054796 - DNA, 25 bp, Homo sapien
atgggagacccgccgctttggtggt

SEQ ID NO: 1054797 - DNA, 25 bp, Homo sapien
gaggtctgaggagctcgaggccgtg

SEQ ID NO: 1054798 - DNA, 25 bp, Homo sapien
atggtgatgctcttcgtttaggagg

SEQ ID NO: 1054799 - DNA, 25 bp, Homo sapien
ctttggggtgatgacgacgctcctc

SEQ ID NO: 1054800 - DNA, 25 bp, Homo sapien
tggagactctcctaatgggcctagt

SEQ ID NO: 1054801 - DNA, 25 bp, Homo sapien
gtgatgacgacgctcctcttcgaac

SEQ ID NO: 1054802 - DNA, 25 bp, Homo sapien
cctagtacttggagacggggactgc

SEQ ID NO: 1054803 - DNA, 25 bp, Homo sapien
cattacctatgtttcccagagggtg

SEQ ID NO: 1054804 - DNA, 25 bp, Homo sapien
gagggtggctaaagccccataatcc

SEQ ID NO: 1054805 - DNA, 25 bp, Homo sapien
gaaccaagtaaaagcctgtggcatt

SEQ ID NO: 1054806 - DNA, 25 bp, Homo sapien
cattcagcattgagaacagccatct

SEQ ID NO: 1054807 - DNA, 25 bp, Homo sapien
ctgctggctcaggagacccggagac

SEQ ID NO: 1054808 - DNA, 25 bp, Homo sapien
tggctcaggagacccggagacagat

SEQ ID NO: 1054809 - DNA, 25 bp, Homo sapien
gacagatcgggaggatgagaccctt

SEQ ID NO: 1054810 - DNA, 25 bp, Homo sapien
tgagacccttcttacagactgtggg

SEQ ID NO: 1054811 - DNA, 25 bp, Homo sapien
tgatgggctcggtgttgggcttttg

SEQ ID NO: 1054812 - DNA, 25 bp, Homo sapien
gtgatgggctcggtgttgggctttt

SEQ ID NO: 1054813 - DNA, 25 bp, Homo sapien
tacatatttataaaagggtgtccaa

SEQ ID NO: 1054814 - DNA, 25 bp, Homo sapien
tctttccacctccttcctgatctga

SEQ ID NO: 1054815 - DNA, 25 bp, Homo sapien
tttctttccacctccttcctgatct

SEQ ID NO: 1054816 - DNA, 25 bp, Homo sapien
ttccacctccttcctgatctgaatt

SEQ ID NO: 1054817 - DNA, 25 bp, Homo sapien
tttccacctccttcctgatctgaat

SEQ ID NO: 1054818 - DNA, 25 bp, Homo sapien
cactggctcttcctgtgctaatgtg

SEQ ID NO: 1054819 - DNA, 25 bp, Homo sapien
ggttgtggcagctgcaatggctgca

SEQ ID NO: 1054820 - DNA, 25 bp, Homo sapien
tgcaatggctgcaggggtcacagca

SEQ ID NO: 1054821 - DNA, 25 bp, Homo sapien
cctgtgctaatgtggttgtggcagc

SEQ ID NO: 1054822 - DNA, 25 bp, Homo sapien
taaactgcaagacagccatatacag

SEQ ID NO: 1054823 - DNA, 25 bp, Homo sapien
atgactttgctatctgtacgtaaac

SEQ ID NO: 1054824 - DNA, 25 bp, Homo sapien
gctatctgtacgtaaactgcaagac

SEQ ID NO: 1054825 - DNA, 25 bp, Homo sapien
caagacagccatatacagagttcat

SEQ ID NO: 1054826 - DNA, 25 bp, Homo sapien
gactgtggggacacttgggccttcc

SEQ ID NO: 1054827 - DNA, 25 bp, Homo sapien
tgggccttcctcattgatctcaggg

SEQ ID NO: 1054828 - DNA, 25 bp, Homo sapien
tcacgcaggtgcttttctaaatcat

SEQ ID NO: 1054829 - DNA, 25 bp, Homo sapien
taaatcatcaaggttatcttcagct

SEQ ID NO: 1054830 - DNA, 25 bp, Homo sapien
aatgtcactaatacactgtggacac

SEQ ID NO: 1054831 - DNA, 25 bp, Homo sapien
aaaggtttacataagcactactaag

SEQ ID NO: 1054832 - DNA, 25 bp, Homo sapien
acacaccaaaaggtttacataagca

SEQ ID NO: 1054833 - DNA, 25 bp, Homo sapien
ccaaaaggtttacataagcactact

SEQ ID NO: 1054834 - DNA, 25 bp, Homo sapien
caccaaaaggtttacataagcacta

SEQ ID NO: 1054835 - DNA, 25 bp, Homo sapien
gaacagcggcatgggctgctcgact

SEQ ID NO: 1054836 - DNA, 25 bp, Homo sapien
tggatttcttgggactgagggtccc

SEQ ID NO: 1054837 - DNA, 25 bp, Homo sapien
aagttgtaaactgtcaccgtgctgg

SEQ ID NO: 1054838 - DNA, 25 bp, Homo sapien
tacttcataggcagaacagcggcat

SEQ ID NO: 1054839 - DNA, 25 bp, Homo sapien
cttccaagtcttgaccaggtgcgtc

SEQ ID NO: 1054840 - DNA, 25 bp, Homo sapien
ccaagtcttgaccaggtgcgtcctg

SEQ ID NO: 1054841 - DNA, 25 bp, Homo sapien
ttccaagtcttgaccaggtgcgtcc

SEQ ID NO: 1054842 - DNA, 25 bp, Homo sapien
tgcttccaagtcttgaccaggtgcg

SEQ ID NO: 1054843 - DNA, 25 bp, Homo sapien
gccttccccatggactcttggcagg

SEQ ID NO: 1054844 - DNA, 25 bp, Homo sapien
cttccccatggactcttggcaggtg

SEQ ID NO: 1054845 - DNA, 25 bp, Homo sapien
cagccttccccatggactcttggca

SEQ ID NO: 1054846 - DNA, 25 bp, Homo sapien
agccttccccatggactcttggcag

SEQ ID NO: 1054847 - DNA, 25 bp, Homo sapien
ccagggacagtccattacagaagga

SEQ ID NO: 1054848 - DNA, 25 bp, Homo sapien
gagcgcaccagggacagtccattac

SEQ ID NO: 1054849 - DNA, 25 bp, Homo sapien
ccattacagaaggacaacagccttg

SEQ ID NO: 1054850 - DNA, 25 bp, Homo sapien
ctgagagcgcaccagggacagtcca

SEQ ID NO: 1054851 - DNA, 25 bp, Homo sapien
caggtccttgcgtggaacactgggt

SEQ ID NO: 1054852 - DNA, 25 bp, Homo sapien
taatctcctcacgtagagctaagct

SEQ ID NO: 1054853 - DNA, 25 bp, Homo sapien
tcccgcatggaacagtcgctaatct

SEQ ID NO: 1054854 - DNA, 25 bp, Homo sapien
cagcttgggagagacttgcaggctt

SEQ ID NO: 1054855 - DNA, 25 bp, Homo sapien
aagctgacaagtgcccttgacgctt

SEQ ID NO: 1054856 - DNA, 25 bp, Homo sapien
ctgacaagtgcccttgacgcttcaa

SEQ ID NO: 1054857 - DNA, 25 bp, Homo sapien
caagtgcccttgacgcttcaaaaga

SEQ ID NO: 1054858 - DNA, 25 bp, Homo sapien
tgcccttgacgcttcaaaagaataa

SEQ ID NO: 1054859 - DNA, 25 bp, Homo sapien
cagaatcacctaggtgctacacgca

SEQ ID NO: 1054860 - DNA, 25 bp, Homo sapien
cacgcagccccgctttttgtgtttc

SEQ ID NO: 1054861 - DNA, 25 bp, Homo sapien
agaatcacctaggtgctacacgcag

SEQ ID NO: 1054862 - DNA, 25 bp, Homo sapien
tgctacacgcagccccgctttttgt

SEQ ID NO: 1054863 - DNA, 25 bp, Homo sapien
ccgagccgcttcaaacggctgggag

SEQ ID NO: 1054864 - DNA, 25 bp, Homo sapien
agcccgagccgcttcaaacggctgg

SEQ ID NO: 1054865 - DNA, 25 bp, Homo sapien
cgtgctgctcgctggactgtccggc

SEQ ID NO: 1054866 - DNA, 25 bp, Homo sapien
cgtcgagctggccacggcttcagct

SEQ ID NO: 1054867 - DNA, 25 bp, Homo sapien
gctgcgctccgcgaacggcgagggc

SEQ ID NO: 1054868 - DNA, 25 bp, Homo sapien
gcgctccgcgaacggcgagggctgc

SEQ ID NO: 1054869 - DNA, 25 bp, Homo sapien
ctcggctgcgctccgcgaacggcga

SEQ ID NO: 1054870 - DNA, 25 bp, Homo sapien
tgctgcttctgctccgggactgctc

SEQ ID NO: 1054871 - DNA, 25 bp, Homo sapien
cattcagcggcatcgacaacgccat

SEQ ID NO: 1054872 - DNA, 25 bp, Homo sapien
tccttcagcccattcagcggcatcg

SEQ ID NO: 1054873 - DNA, 25 bp, Homo sapien
tcagcccattcagcggcatcgacaa

SEQ ID NO: 1054874 - DNA, 25 bp, Homo sapien
tcgatgaggggctctttgtcctcct

SEQ ID NO: 1054875 - DNA, 25 bp, Homo sapien
agtggcgcaatctccgcacaccaca

SEQ ID NO: 1054876 - DNA, 25 bp, Homo sapien
acagtggcgcaatctccgcacacca

SEQ ID NO: 1054877 - DNA, 25 bp, Homo sapien
acaccacaacctctgcctcccgggt

SEQ ID NO: 1054878 - DNA, 25 bp, Homo sapien
ctgcccacctcagcctcccaaagtg

SEQ ID NO: 1054879 - DNA, 25 bp, Homo sapien
ctgagagcttaaaaacttgcctgac

SEQ ID NO: 1054880 - DNA, 25 bp, Homo sapien
ttcaagtcaagcagtgtggctccag

SEQ ID NO: 1054881 - DNA, 25 bp, Homo sapien
gactcttatgtgttatgccaccctg

SEQ ID NO: 1054882 - DNA, 25 bp, Homo sapien
cataaaactgaactccgcaaaggga

SEQ ID NO: 1054883 - DNA, 25 bp, Homo sapien
tatacggttagaccacacttgccag

SEQ ID NO: 1054884 - DNA, 25 bp, Homo sapien
ccaatagaatgtgaccggaagtaac

SEQ ID NO: 1054885 - DNA, 25 bp, Homo sapien
tctaagacattctcctggactgagg

SEQ ID NO: 1054886 - DNA, 25 bp, Homo sapien
ggaaagccaccctaacatctaagac

SEQ ID NO: 1054887 - DNA, 25 bp, Homo sapien
cctactaatagagcccacatttaaa

SEQ ID NO: 1054888 - DNA, 25 bp, Homo sapien
tccctgatcctactaatagagccca

SEQ ID NO: 1054889 - DNA, 25 bp, Homo sapien
tctaagaattccactatttacttct

SEQ ID NO: 1054890 - DNA, 25 bp, Homo sapien
aagtattcttgactctaagaattcc

SEQ ID NO: 1054891 - DNA, 25 bp, Homo sapien
cccaagtgccactgaaaagttatta

SEQ ID NO: 1054892 - DNA, 25 bp, Homo sapien
tatagatctgaatcactcctggttc

SEQ ID NO: 1054893 - DNA, 25 bp, Homo sapien
tagccctacttaatgtgagccccac

SEQ ID NO: 1054894 - DNA, 25 bp, Homo sapien
taaggagtttccacataatgtcaaa

SEQ ID NO: 1054895 - DNA, 25 bp, Homo sapien
gaagcggaaaaggatggctcaccat

SEQ ID NO: 1054896 - DNA, 25 bp, Homo sapien
gggacatcagaacacggaggctcca

SEQ ID NO: 1054897 - DNA, 25 bp, Homo sapien
gaaaattcactagctgatgccctaa

SEQ ID NO: 1054898 - DNA, 25 bp, Homo sapien
gtcttcaggaacagctcaggcaaaa

SEQ ID NO: 1054899 - DNA, 25 bp, Homo sapien
aagatggtgctaagaacctaccacc

SEQ ID NO: 1054900 - DNA, 25 bp, Homo sapien
tcaactgttcctaggcaaagactgg

SEQ ID NO: 1054901 - DNA, 25 bp, Homo sapien
gatcccctatactgtgctcaactgt

SEQ ID NO: 1054902 - DNA, 25 bp, Homo sapien
tacttggttataatagagctccttg

SEQ ID NO: 1054903 - DNA, 25 bp, Homo sapien
atactagcaacccttaaactgttag

SEQ ID NO: 1054904 - DNA, 25 bp, Homo sapien
ctagcaacccttaaactgttagaat

SEQ ID NO: 1054905 - DNA, 25 bp, Homo sapien
tactagcaacccttaaactgttaga

SEQ ID NO: 1054906 - DNA, 25 bp, Homo sapien
tagcaacccttaaactgttagaata

SEQ ID NO: 1054907 - DNA, 25 bp, Homo sapien
catgcctggtcaaaagtttctttaa

SEQ ID NO: 1054908 - DNA, 25 bp, Homo sapien
tgttcactaggtgtatccaagcacc

SEQ ID NO: 1054909 - DNA, 25 bp, Homo sapien
gcagagcatgtttaagaccaatcta

SEQ ID NO: 1054910 - DNA, 25 bp, Homo sapien
gaaatatcagcaaaagtcttccatg

SEQ ID NO: 1054911 - DNA, 25 bp, Homo sapien
ccaatctagatacaatatgaggcat

SEQ ID NO: 1054912 - DNA, 25 bp, Homo sapien
ctcatgcctggattactggaaaagt

SEQ ID NO: 1054913 - DNA, 25 bp, Homo sapien
aattgtcattctccacagggataat

SEQ ID NO: 1054914 - DNA, 25 bp, Homo sapien
agtcacctctaattagtctccctgc

SEQ ID NO: 1054915 - DNA, 25 bp, Homo sapien
cagggataatggaatgccccgttaa

SEQ ID NO: 1054916 - DNA, 25 bp, Homo sapien
ataggccaagccaacatggtcttaa

SEQ ID NO: 1054917 - DNA, 25 bp, Homo sapien
cataggccaagccaacatggtctta

SEQ ID NO: 1054918 - DNA, 25 bp, Homo sapien
cctaatatggataaagtcttgaacc

SEQ ID NO: 1054919 - DNA, 25 bp, Homo sapien
ggcaggcagactataagactaatca

SEQ ID NO: 1054920 - DNA, 25 bp, Homo sapien
ccccaaaatgcaacgaggtgaggta

SEQ ID NO: 1054921 - DNA, 25 bp, Homo sapien
tttggtaagtgagccaaaagcaagg

SEQ ID NO: 1054922 - DNA, 25 bp, Homo sapien
catcaaagacatattctttagtggt

SEQ ID NO: 1054923 - DNA, 25 bp, Homo sapien
aggcatgagacaccgtgcccagctg

SEQ ID NO: 1054924 - DNA, 25 bp, Homo sapien
caggcatgagacaccgtgcccagct

SEQ ID NO: 1054925 - DNA, 25 bp, Homo sapien
atgagacaccgtgcccagctgtcct

SEQ ID NO: 1054926 - DNA, 25 bp, Homo sapien
gcatgagacaccgtgcccagctgtc

SEQ ID NO: 1054927 - DNA, 25 bp, Homo sapien
gagtttcagttttatgggcttgcca

SEQ ID NO: 1054928 - DNA, 25 bp, Homo sapien
gcattacctatagcatccaaagtct

SEQ ID NO: 1054929 - DNA, 25 bp, Homo sapien
cctatacgaaacaccagagatctgg

SEQ ID NO: 1054930 - DNA, 25 bp, Homo sapien
cagtggttcctcctctgagttagta

SEQ ID NO: 1054931 - DNA, 25 bp, Homo sapien
aaacagctaagcagaggatactgca

SEQ ID NO: 1054932 - DNA, 25 bp, Homo sapien
tccttactcagcatcaccaattcat

SEQ ID NO: 1054933 - DNA, 25 bp, Homo sapien
caccaattcatgaaatctgctcttc

SEQ ID NO: 1054934 - DNA, 25 bp, Homo sapien
tactgcaaagacttcggttgctacc

SEQ ID NO: 1054935 - DNA, 25 bp, Homo sapien
ccagaatactgtcagagatggccag

SEQ ID NO: 1054936 - DNA, 25 bp, Homo sapien
tcagaggaggcctaacagagtcagg

SEQ ID NO: 1054937 - DNA, 25 bp, Homo sapien
tccactagtgtaccagggaggtcac

SEQ ID NO: 1054938 - DNA, 25 bp, Homo sapien
taaccagtggtaatgaggccacctc

SEQ ID NO: 1054939 - DNA, 25 bp, Homo sapien
ttccaattagcctgataatccaaat

SEQ ID NO: 1054940 - DNA, 25 bp, Homo sapien
tccaattagcctgataatccaaatt

SEQ ID NO: 1054941 - DNA, 25 bp, Homo sapien
tttccaattagcctgataatccaaa

SEQ ID NO: 1054942 - DNA, 25 bp, Homo sapien
tgtgggcaaccgacatgaagacact

SEQ ID NO: 1054943 - DNA, 25 bp, Homo sapien
caacgaaagttgacaaacaggatct

SEQ ID NO: 1054944 - DNA, 25 bp, Homo sapien
tggaagacaacctagtcagtgccat

SEQ ID NO: 1054945 - DNA, 25 bp, Homo sapien
gaaaagggaacactatacgctgctg

SEQ ID NO: 1054946 - DNA, 25 bp, Homo sapien
tgcagtttcaaattcgtggacttaa

SEQ ID NO: 1054947 - DNA, 25 bp, Homo sapien
catacccggcccatatcctgttgta

SEQ ID NO: 1054948 - DNA, 25 bp, Homo sapien
tccttcagagagcaagaaaatagca

SEQ ID NO: 1054949 - DNA, 25 bp, Homo sapien
tcgtggacttaagaaatactcccgc

SEQ ID NO: 1054950 - DNA, 25 bp, Homo sapien
tttcctatgctttcaccatcactgc

SEQ ID NO: 1054951 - DNA, 25 bp, Homo sapien
ggggcagtttcctatgctttcacca

SEQ ID NO: 1054952 - DNA, 25 bp, Homo sapien
tgggaaaaggggcagtttcctatgc

SEQ ID NO: 1054953 - DNA, 25 bp, Homo sapien
ggcagtttcctatgctttcaccatc

SEQ ID NO: 1054954 - DNA, 25 bp, Homo sapien
cttttcaggtcaacagtcgtcacac

SEQ ID NO: 1054955 - DNA, 25 bp, Homo sapien
ctaaatacaactcctttgagccaaa

SEQ ID NO: 1054956 - DNA, 25 bp, Homo sapien
aacagtcgtcacactaaatacaact

SEQ ID NO: 1054957 - DNA, 25 bp, Homo sapien
tttgagccaaagaatcatgaagagc

SEQ ID NO: 1054958 - DNA, 25 bp, Homo sapien
ttgcaacaattggaggaagctgggc

SEQ ID NO: 1054959 - DNA, 25 bp, Homo sapien
tgagtgcagcatagctagagaacac

SEQ ID NO: 1054960 - DNA, 25 bp, Homo sapien
gaactcatgccttgcaacagggtgc

SEQ ID NO: 1054961 - DNA, 25 bp, Homo sapien
tagagaacaccggagctggctcttg

SEQ ID NO: 1054962 - DNA, 25 bp, Homo sapien
ccaaggattaactgttgagatgaca

SEQ ID NO: 1054963 - DNA, 25 bp, Homo sapien
ccttcaaacgtattagtagacttca

SEQ ID NO: 1054964 - DNA, 25 bp, Homo sapien
catggcaggtcctgattccaaatga

SEQ ID NO: 1054965 - DNA, 25 bp, Homo sapien
gagatgacagacaaccatggcaggt

SEQ ID NO: 1054966 - DNA, 25 bp, Homo sapien
tggttacctagcattaactgattgg

SEQ ID NO: 1054967 - DNA, 25 bp, Homo sapien
gggagaaaactagcgtatcagagaa

SEQ ID NO: 1054968 - DNA, 25 bp, Homo sapien
catttaccagctacatgactaagta

SEQ ID NO: 1054969 - DNA, 25 bp, Homo sapien
caaataaggcacgtgaaagtgaact

SEQ ID NO: 1054970 - DNA, 25 bp, Homo sapien
aaacaattttctcactccaaattca

SEQ ID NO: 1054971 - DNA, 25 bp, Homo sapien
tccaaattcataaaacatatccatt

SEQ ID NO: 1054972 - DNA, 25 bp, Homo sapien
ctggaaaacaattttctcactccaa

SEQ ID NO: 1054973 - DNA, 25 bp, Homo sapien
aattcataaaacatatccattaaca

SEQ ID NO: 1054974 - DNA, 25 bp, Homo sapien
ttctatgactacattccaaccaaag

SEQ ID NO: 1054975 - DNA, 25 bp, Homo sapien
tttcccttggtcttattcatattct

SEQ ID NO: 1054976 - DNA, 25 bp, Homo sapien
caatttaggttagaaagcctcaggt

SEQ ID NO: 1054977 - DNA, 25 bp, Homo sapien
aagttctagagcctatcttgcttcc

SEQ ID NO: 1054978 - DNA, 25 bp, Homo sapien
gggaccagaggcacactccatcaag

SEQ ID NO: 1054979 - DNA, 25 bp, Homo sapien
agaggcacactccatcaagcccagc

SEQ ID NO: 1054980 - DNA, 25 bp, Homo sapien
ccagaggcacactccatcaagccca

SEQ ID NO: 1054981 - DNA, 25 bp, Homo sapien
caccaaagcaggagtgcagtgtcac

SEQ ID NO: 1054982 - DNA, 25 bp, Homo sapien
tctcctctcgtgcacatatagtaaa

SEQ ID NO: 1054983 - DNA, 25 bp, Homo sapien
caggtgatccattaggtcagaacta

SEQ ID NO: 1054984 - DNA, 25 bp, Homo sapien
ctcaaattgtaagccaggagaccct

SEQ ID NO: 1054985 - DNA, 25 bp, Homo sapien
ttataatactaaggcatcatttgcc

SEQ ID NO: 1054986 - DNA, 25 bp, Homo sapien
tgacaactactaacagcaagaagtg

SEQ ID NO: 1054987 - DNA, 25 bp, Homo sapien
tatggcaccatgaagtattcttacc

SEQ ID NO: 1054988 - DNA, 25 bp, Homo sapien
taccaaagaagttgaccctgaatct

SEQ ID NO: 1054989 - DNA, 25 bp, Homo sapien
tagaagtccaggcttgacaaggaaa

SEQ ID NO: 1054990 - DNA, 25 bp, Homo sapien
tgttgaaagttataaatggtgggtg

SEQ ID NO: 1054991 - DNA, 25 bp, Homo sapien
ccgggagccaagttctgcaggtctg

SEQ ID NO: 1054992 - DNA, 25 bp, Homo sapien
tcctcaatcttatttacatccgttt

SEQ ID NO: 1054993 - DNA, 25 bp, Homo sapien
tccgttttgacttcactgttgaaag

SEQ ID NO: 1054994 - DNA, 25 bp, Homo sapien
tcttcattgtccagtacagtagcca

SEQ ID NO: 1054995 - DNA, 25 bp, Homo sapien
gaatgagattgctagagcagtgctg

SEQ ID NO: 1054996 - DNA, 25 bp, Homo sapien
tcagtagtcaccagacagcacagct

SEQ ID NO: 1054997 - DNA, 25 bp, Homo sapien
cagtagccactagtgccatgtacct

SEQ ID NO: 1054998 - DNA, 25 bp, Homo sapien
gcagtatttgattctgggtgttttg

SEQ ID NO: 1054999 - DNA, 25 bp, Homo sapien
cagtatttgattctgggtgttttgg

SEQ ID NO: 1055000 - DNA, 25 bp, Homo sapien
gtatttgattctgggtgttttggtg

SEQ ID NO: 1055001 - DNA, 25 bp, Homo sapien
cagcagtatttgattctgggtgttt

SEQ ID NO: 1055002 - DNA, 25 bp, Homo sapien
ggccttgaattcttgatatatgcag

SEQ ID NO: 1055003 - DNA, 25 bp, Homo sapien
cagtttggcttatattttcaggtta

SEQ ID NO: 1055004 - DNA, 25 bp, Homo sapien
cctttttaaatcagtctggaacacg

SEQ ID NO: 1055005 - DNA, 25 bp, Homo sapien
ggtaagttaagatcccccactatga

SEQ ID NO: 1055006 - DNA, 25 bp, Homo sapien
tggaacacgcttcattatctcataa

SEQ ID NO: 1055007 - DNA, 25 bp, Homo sapien
ctaaaaaattccctctaagcacagt

SEQ ID NO: 1055008 - DNA, 25 bp, Homo sapien
actgtgccccgttctagctgtactt

SEQ ID NO: 1055009 - DNA, 25 bp, Homo sapien
ggcccagctttaccatcaattttgt

SEQ ID NO: 1055010 - DNA, 25 bp, Homo sapien
taagcacagttttagccatatctca

SEQ ID NO: 1055011 - DNA, 25 bp, Homo sapien
tgcagggttttcaggagacccctct

SEQ ID NO: 1055012 - DNA, 25 bp, Homo sapien
cttgacaatatgcagtttgggcagc

SEQ ID NO: 1055013 - DNA, 25 bp, Homo sapien
gccatccagaaatttacgtgtagaa

SEQ ID NO: 1055014 - DNA, 25 bp, Homo sapien
gggcagcaggttgcaatcagctaat

SEQ ID NO: 1055015 - DNA, 25 bp, Homo sapien
tggtgaactcgtccctactgtatgc

SEQ ID NO: 1055016 - DNA, 25 bp, Homo sapien
gtatgcattagttaggtatctccag

SEQ ID NO: 1055017 - DNA, 25 bp, Homo sapien
aagttgcgatattttttggccacca

SEQ ID NO: 1055018 - DNA, 25 bp, Homo sapien
ccttatcactgggacaggtattggt

SEQ ID NO: 1055019 - DNA, 25 bp, Homo sapien
ccaggaagtgcaatgagtgagatca

SEQ ID NO: 1055020 - DNA, 25 bp, Homo sapien
tatttagacagagtatcaggtgccc

SEQ ID NO: 1055021 - DNA, 25 bp, Homo sapien
gaaaagtttgtggtggagtgtctcc

SEQ ID NO: 1055022 - DNA, 25 bp, Homo sapien
gctcctgagagatggcaagctacct

SEQ ID NO: 1055023 - DNA, 25 bp, Homo sapien
gctatgaggcaaggttcagaatcac

SEQ ID NO: 1055024 - DNA, 25 bp, Homo sapien
gaatagtgcatcttccttgaaccag

SEQ ID NO: 1055025 - DNA, 25 bp, Homo sapien
tagagggatggccaggtgtaatcac

SEQ ID NO: 1055026 - DNA, 25 bp, Homo sapien
gaatagagagctttccaactgctga

SEQ ID NO: 1055027 - DNA, 25 bp, Homo sapien
caatagctgccagcaatatactggt

SEQ ID NO: 1055028 - DNA, 25 bp, Homo sapien
ttgcctgttcaagaaattataaaga

SEQ ID NO: 1055029 - DNA, 25 bp, Homo sapien
ataataagctttcatttgcctgttc

SEQ ID NO: 1055030 - DNA, 25 bp, Homo sapien
ttctataataagctttcatttgcct

SEQ ID NO: 1055031 - DNA, 25 bp, Homo sapien
tgttgtttattttcatgagggggga

SEQ ID NO: 1055032 - DNA, 25 bp, Homo sapien
ccccaagttgttgtttattttcatg

SEQ ID NO: 1055033 - DNA, 25 bp, Homo sapien
caagttgttgtttattttcatgagg

SEQ ID NO: 1055034 - DNA, 25 bp, Homo sapien
agttgttgtttattttcatgagggg

SEQ ID NO: 1055035 - DNA, 25 bp, Homo sapien
taacctattaaatgtgctgaatcac

SEQ ID NO: 1055036 - DNA, 25 bp, Homo sapien
tgtgctgaatcactcatagaaaaaa

SEQ ID NO: 1055037 - DNA, 25 bp, Homo sapien
ctcctttaacctattaaatgtgctg

SEQ ID NO: 1055038 - DNA, 25 bp, Homo sapien
taaatgtgctgaatcactcatagaa

SEQ ID NO: 1055039 - DNA, 25 bp, Homo sapien
taatcaagttattttctgtacctat

SEQ ID NO: 1055040 - DNA, 25 bp, Homo sapien
ttgctaagaatgagtagcatgaata

SEQ ID NO: 1055041 - DNA, 25 bp, Homo sapien
taggttctcaataaaagtctttatc

SEQ ID NO: 1055042 - DNA, 25 bp, Homo sapien
ctaagaatgagtagcatgaatattt

SEQ ID NO: 1055043 - DNA, 25 bp, Homo sapien
tcaggcacccaattctcctccagaa

SEQ ID NO: 1055044 - DNA, 25 bp, Homo sapien
tattggctttcaatgtgcttactat

SEQ ID NO: 1055045 - DNA, 25 bp, Homo sapien
taaaagtatacattgataatttccc

SEQ ID NO: 1055046 - DNA, 25 bp, Homo sapien
ttctctattggctttcaatgtgctt

SEQ ID NO: 1055047 - DNA, 25 bp, Homo sapien
ctgcagattctttatgtctctgccc

SEQ ID NO: 1055048 - DNA, 25 bp, Homo sapien
gattctttatgtctctgcccaacat

SEQ ID NO: 1055049 - DNA, 25 bp, Homo sapien
tctttatgtctctgcccaacatcgc

SEQ ID NO: 1055050 - DNA, 25 bp, Homo sapien
tccctgatggggtttacaggcccag

SEQ ID NO: 1055051 - DNA, 25 bp, Homo sapien
caaactgatggccgcggccagggta

SEQ ID NO: 1055052 - DNA, 25 bp, Homo sapien
gccttcccaggaccaaactgatggc

SEQ ID NO: 1055053 - DNA, 25 bp, Homo sapien
ttcccaggaccaaactgatggccgc

SEQ ID NO: 1055054 - DNA, 25 bp, Homo sapien
aggaccaaactgatggccgcggcca

SEQ ID NO: 1055055 - DNA, 25 bp, Homo sapien
gaaacgattcaaggccgtagctcgc

SEQ ID NO: 1055056 - DNA, 25 bp, Homo sapien
gcgagtgcagccttgaaacgattca

SEQ ID NO: 1055057 - DNA, 25 bp, Homo sapien
taagcacctctccaaactgcggtgc

SEQ ID NO: 1055058 - DNA, 25 bp, Homo sapien
cagcaaagaagactggcgagtgcag

SEQ ID NO: 1055059 - DNA, 25 bp, Homo sapien
caccgagttttcatgcaggccacag

SEQ ID NO: 1055060 - DNA, 25 bp, Homo sapien
gccaccgagttttcatgcaggccac

SEQ ID NO: 1055061 - DNA, 25 bp, Homo sapien
cagccaccgagttttcatgcaggcc

SEQ ID NO: 1055062 - DNA, 25 bp, Homo sapien
aacagccaccgagttttcatgcagg

SEQ ID NO: 1055063 - DNA, 25 bp, Homo sapien
aggcctcctgctgcgatgagtaaga

SEQ ID NO: 1055064 - DNA, 25 bp, Homo sapien
tgtgccggaagccaggcctcctgct

SEQ ID NO: 1055065 - DNA, 25 bp, Homo sapien
gattccagtagtggctgtgtacaat

SEQ ID NO: 1055066 - DNA, 25 bp, Homo sapien
tgtacaattggcattcacaaaggca

SEQ ID NO: 1055067 - DNA, 25 bp, Homo sapien
aacagagaagtccacgttgaacata

SEQ ID NO: 1055068 - DNA, 25 bp, Homo sapien
cccctatgaatgaggcagaacaaac

SEQ ID NO: 1055069 - DNA, 25 bp, Homo sapien
agtccacgttgaacataatgttcgc

SEQ ID NO: 1055070 - DNA, 25 bp, Homo sapien
gtaggcaacgtcaggttctccaagc

SEQ ID NO: 1055071 - DNA, 25 bp, Homo sapien
tcaccatggtaagacagctccaggg

SEQ ID NO: 1055072 - DNA, 25 bp, Homo sapien
atcaccatggtaagacagctccagg

SEQ ID NO: 1055073 - DNA, 25 bp, Homo sapien
ggggtcacgaatatccaggcactct

SEQ ID NO: 1055074 - DNA, 25 bp, Homo sapien
agctccaggggtcacgaatatccag

SEQ ID NO: 1055075 - DNA, 25 bp, Homo sapien
aacaggagggccagatagataggtc

SEQ ID NO: 1055076 - DNA, 25 bp, Homo sapien
tagataggtcctagcagaaggcatt

SEQ ID NO: 1055077 - DNA, 25 bp, Homo sapien
tatggcatcaggttcttaaacccag

SEQ ID NO: 1055078 - DNA, 25 bp, Homo sapien
gagggatcattttgggtcagacatc

SEQ ID NO: 1055079 - DNA, 25 bp, Homo sapien
tcctctcagaggtccataaccagtc

SEQ ID NO: 1055080 - DNA, 25 bp, Homo sapien
ggttttcatgcccacagaccttgag

SEQ ID NO: 1055081 - DNA, 25 bp, Homo sapien
gacgacgattttctgagttaccgag

SEQ ID NO: 1055082 - DNA, 25 bp, Homo sapien
taaccagtctcagtggtcctgggag

SEQ ID NO: 1055083 - DNA, 25 bp, Homo sapien
actgtgatggcaggcaatgacgaga

SEQ ID NO: 1055084 - DNA, 25 bp, Homo sapien
gaactactccgctgagctgcgcaat

SEQ ID NO: 1055085 - DNA, 25 bp, Homo sapien
caggcaatgacgagaactactccgc

SEQ ID NO: 1055086 - DNA, 25 bp, Homo sapien
acgtgccggatggtacggtggtgac

SEQ ID NO: 1055087 - DNA, 25 bp, Homo sapien
gttatgcgtattcccgtagacccaa

SEQ ID NO: 1055088 - DNA, 25 bp, Homo sapien
gaccacgcaggcgagctcgtgcgca

SEQ ID NO: 1055089 - DNA, 25 bp, Homo sapien
gcaagatgggcgagaacagcggcgc

SEQ ID NO: 1055090 - DNA, 25 bp, Homo sapien
ggtgcgctcgatggtggacgtgctg

SEQ ID NO: 1055091 - DNA, 25 bp, Homo sapien
tgggtccgcaatcgacaactgccag

SEQ ID NO: 1055092 - DNA, 25 bp, Homo sapien
gtccttcctttcgacacggcctgag

SEQ ID NO: 1055093 - DNA, 25 bp, Homo sapien
ctgtgaggtcccgaggtgggtaggg

SEQ ID NO: 1055094 - DNA, 25 bp, Homo sapien
caggcgcaggctctcttaaaaggtt

SEQ ID NO: 1055095 - DNA, 25 bp, Homo sapien
tgcacttaactgtttgcacctgtgg

SEQ ID NO: 1055096 - DNA, 25 bp, Homo sapien
ctgcacttaactgtttgcacctgtg

SEQ ID NO: 1055097 - DNA, 25 bp, Homo sapien
tgctctagctccgtttggctgtacc

SEQ ID NO: 1055098 - DNA, 25 bp, Homo sapien
ctctagctccgtttggctgtaccca

SEQ ID NO: 1055099 - DNA, 25 bp, Homo sapien
gcctgctctagctccgtttggctgt

SEQ ID NO: 1055100 - DNA, 25 bp, Homo sapien
ctagctccgtttggctgtacccaca

SEQ ID NO: 1055101 - DNA, 25 bp, Homo sapien
tccagaaggattcagggaactccag

SEQ ID NO: 1055102 - DNA, 25 bp, Homo sapien
gctccagaaggattcagggaactcc

SEQ ID NO: 1055103 - DNA, 25 bp, Homo sapien
ggggagctccagaaggattcaggga

SEQ ID NO: 1055104 - DNA, 25 bp, Homo sapien
gggaactccaggtgaagcccacata

SEQ ID NO: 1055105 - DNA, 25 bp, Homo sapien
ggcagacaggggccactcaggccct

SEQ ID NO: 1055106 - DNA, 25 bp, Homo sapien
ctggcagacaggggccactcaggcc

SEQ ID NO: 1055107 - DNA, 25 bp, Homo sapien
ggctctgggtccctcgcctggcaga

SEQ ID NO: 1055108 - DNA, 25 bp, Homo sapien
cagacaggggccactcaggccctgc

SEQ ID NO: 1055109 - DNA, 25 bp, Homo sapien
gtggcgcaatcgcactcactgcaag

SEQ ID NO: 1055110 - DNA, 25 bp, Homo sapien
ctctgaggcacgtagagggctccgt

SEQ ID NO: 1055111 - DNA, 25 bp, Homo sapien
atggccacgtccgtggttggacaag

SEQ ID NO: 1055112 - DNA, 25 bp, Homo sapien
tgagcagccgaagcacacttgctct

SEQ ID NO: 1055113 - DNA, 25 bp, Homo sapien
acaaggacaagggcgaaggcttaga

SEQ ID NO: 1055114 - DNA, 25 bp, Homo sapien
ccgccatgatggcaggtaaccttta

SEQ ID NO: 1055115 - DNA, 25 bp, Homo sapien
tacagagcagctatatcccttccca

SEQ ID NO: 1055116 - DNA, 25 bp, Homo sapien
cactgaaaagtccatagtagttaat

SEQ ID NO: 1055117 - DNA, 25 bp, Homo sapien
tgataaagagcccatggagagagcc

SEQ ID NO: 1055118 - DNA, 25 bp, Homo sapien
aatcggtgcaggcagcgtgaaggtt

SEQ ID NO: 1055119 - DNA, 25 bp, Homo sapien
gcagcgtgaaggtttaggttcctct

SEQ ID NO: 1055120 - DNA, 25 bp, Homo sapien
tgagcactccggtccaatcggtgca

SEQ ID NO: 1055121 - DNA, 25 bp, Homo sapien
tgaaacacttgttggcgcgagcctg

SEQ ID NO: 1055122 - DNA, 25 bp, Homo sapien
gcctggaggtggccgcatcaaagcg

SEQ ID NO: 1055123 - DNA, 25 bp, Homo sapien
tagagggctcattgacgcctgggcc

SEQ ID NO: 1055124 - DNA, 25 bp, Homo sapien
gtggccgcatcaaagcggaggctcc

SEQ ID NO: 1055125 - DNA, 25 bp, Homo sapien
agagggctcattgacgcctgggcct

SEQ ID NO: 1055126 - DNA, 25 bp, Homo sapien
tctcatgagtaaaagggcacgagtg

SEQ ID NO: 1055127 - DNA, 25 bp, Homo sapien
ccagggtggtccctagaattatcac

SEQ ID NO: 1055128 - DNA, 25 bp, Homo sapien
tcccctaaagcgattctgatgtgcc

SEQ ID NO: 1055129 - DNA, 25 bp, Homo sapien
ttttctgaaatcaccgcccctagag

SEQ ID NO: 1055130 - DNA, 25 bp, Homo sapien
actcactgagtgacaagaccccgcg

SEQ ID NO: 1055131 - DNA, 25 bp, Homo sapien
cactggtggaaaatcgccatggaat

SEQ ID NO: 1055132 - DNA, 25 bp, Homo sapien
ctgaccccgctgtgataccagagaa

SEQ ID NO: 1055133 - DNA, 25 bp, Homo sapien
tgtgcctcttcaagaactcactgag

SEQ ID NO: 1055134 - DNA, 25 bp, Homo sapien
ggagttgctgctattataacgttgt

SEQ ID NO: 1055135 - DNA, 25 bp, Homo sapien
attggcctgccctgccgctggctga

SEQ ID NO: 1055136 - DNA, 25 bp, Homo sapien
gaccgagtgattcagggctgctgcc

SEQ ID NO: 1055137 - DNA, 25 bp, Homo sapien
tagctgatgatgagcggcagcccca

SEQ ID NO: 1055138 - DNA, 25 bp, Homo sapien
ggtggagacagtccttagtttgtcc

SEQ ID NO: 1055139 - DNA, 25 bp, Homo sapien
cgaggcagacgctgcgggtggagac

SEQ ID NO: 1055140 - DNA, 25 bp, Homo sapien
gggtccctggcgaggcagacgctgc

SEQ ID NO: 1055141 - DNA, 25 bp, Homo sapien
acgctgcgggtggagacagtcctta

SEQ ID NO: 1055142 - DNA, 25 bp, Homo sapien
tctcctcatcacaccaaaccttgcc

SEQ ID NO: 1055143 - DNA, 25 bp, Homo sapien
accaaaccttgccacagagcacctt

SEQ ID NO: 1055144 - DNA, 25 bp, Homo sapien
ctcctcatcacaccaaaccttgcca

SEQ ID NO: 1055145 - DNA, 25 bp, Homo sapien
tcacccagcagggtgacttccatgg

SEQ ID NO: 1055146 - DNA, 25 bp, Homo sapien
cacccagcagggtgacttccatgga

SEQ ID NO: 1055147 - DNA, 25 bp, Homo sapien
ctcacccagcagggtgacttccatg

SEQ ID NO: 1055148 - DNA, 25 bp, Homo sapien
tggatctccgtgtcttgggcaccgg

SEQ ID NO: 1055149 - DNA, 25 bp, Homo sapien
caccggggaaccaggaattttgctg

SEQ ID NO: 1055150 - DNA, 25 bp, Homo sapien
tctccgtgtcttgggcaccggggaa

SEQ ID NO: 1055151 - DNA, 25 bp, Homo sapien
ggcaggagctgatcagacatgtgct

SEQ ID NO: 1055152 - DNA, 25 bp, Homo sapien
tgtctgagcacaggcaggttctgag

SEQ ID NO: 1055153 - DNA, 25 bp, Homo sapien
tctgagcacaggcaggttctgagct

SEQ ID NO: 1055154 - DNA, 25 bp, Homo sapien
ctgagcacaggcaggttctgagctg

SEQ ID NO: 1055155 - DNA, 25 bp, Homo sapien
cttgtctgagcacaggcaggttctg

SEQ ID NO: 1055156 - DNA, 25 bp, Homo sapien
ctggggagggcctgggatgagggac

SEQ ID NO: 1055157 - DNA, 25 bp, Homo sapien
actggggagggcctgggatgaggga

SEQ ID NO: 1055158 - DNA, 25 bp, Homo sapien
cactggggagggcctgggatgaggg

SEQ ID NO: 1055159 - DNA, 25 bp, Homo sapien
tcactggggagggcctgggatgagg

SEQ ID NO: 1055160 - DNA, 25 bp, Homo sapien
tgggcgtctgtcctgtgccaacaat

SEQ ID NO: 1055161 - DNA, 25 bp, Homo sapien
aagagcatgccccaacatcagctgc

SEQ ID NO: 1055162 - DNA, 25 bp, Homo sapien
cagtggcaaggctgaagagcatgcc

SEQ ID NO: 1055163 - DNA, 25 bp, Homo sapien
ggcgtctgtcctgtgccaacaattc

SEQ ID NO: 1055164 - DNA, 25 bp, Homo sapien
gagactgtcttggagggagcattca

SEQ ID NO: 1055165 - DNA, 25 bp, Homo sapien
gtatgaatgagttcatcaaacttca

SEQ ID NO: 1055166 - DNA, 25 bp, Homo sapien
acctcaggcagcacatgggagactc

SEQ ID NO: 1055167 - DNA, 25 bp, Homo sapien
aacttcacctctggcagtagaaaaa

SEQ ID NO: 1055168 - DNA, 25 bp, Homo sapien
ctgctgccactccaagatttgggga

SEQ ID NO: 1055169 - DNA, 25 bp, Homo sapien
aagccctcccaattggcccagtgtc

SEQ ID NO: 1055170 - DNA, 25 bp, Homo sapien
cactccaagatttggggagcctaga

SEQ ID NO: 1055171 - DNA, 25 bp, Homo sapien
catgatctctgagcatgtctgctgc

SEQ ID NO: 1055172 - DNA, 25 bp, Homo sapien
gactagatgctttcccaccagcctg

SEQ ID NO: 1055173 - DNA, 25 bp, Homo sapien
gctgctgtggcttcttccgtggtca

SEQ ID NO: 1055174 - DNA, 25 bp, Homo sapien
gctgctgctgtggcttcttccgtgg

SEQ ID NO: 1055175 - DNA, 25 bp, Homo sapien
ctgctgtggcttcttccgtggtcat

SEQ ID NO: 1055176 - DNA, 25 bp, Homo sapien
tgctgctgtggcttcttccgtggtc

SEQ ID NO: 1055177 - DNA, 25 bp, Homo sapien
acaggctctggcgcagtcatcttcc

SEQ ID NO: 1055178 - DNA, 25 bp, Homo sapien
ggctctggcgcagtcatcttccttc

SEQ ID NO: 1055179 - DNA, 25 bp, Homo sapien
cacgagctcatctctctttgggttc

SEQ ID NO: 1055180 - DNA, 25 bp, Homo sapien
acgagctcatctctctttgggttct

SEQ ID NO: 1055181 - DNA, 25 bp, Homo sapien
ttggttggtcctcctggtttccaca

SEQ ID NO: 1055182 - DNA, 25 bp, Homo sapien
tggtttccacaggtcctgagactgg

SEQ ID NO: 1055183 - DNA, 25 bp, Homo sapien
agtgagaaggagaacttggttggtc

SEQ ID NO: 1055184 - DNA, 25 bp, Homo sapien
cacaggtcctgagactggccagggt

SEQ ID NO: 1055185 - DNA, 25 bp, Homo sapien
gcaggtgctcgcgacactggcagaa

SEQ ID NO: 1055186 - DNA, 25 bp, Homo sapien
ttctccttcctgttagatcctggaa

SEQ ID NO: 1055187 - DNA, 25 bp, Homo sapien
gctcgcgacactggcagaaacacaa

SEQ ID NO: 1055188 - DNA, 25 bp, Homo sapien
tcctgttagatcctggaacccagcc

SEQ ID NO: 1055189 - DNA, 25 bp, Homo sapien
tggccacttcctggtctgggctgcc

SEQ ID NO: 1055190 - DNA, 25 bp, Homo sapien
aagctggccacttcctggtctgggc

SEQ ID NO: 1055191 - DNA, 25 bp, Homo sapien
ctgggctgccttcccctttctgagc

SEQ ID NO: 1055192 - DNA, 25 bp, Homo sapien
tcagaagctggccacttcctggtct

SEQ ID NO: 1055193 - DNA, 25 bp, Homo sapien
taacagacgaggaacaggtccagac

SEQ ID NO: 1055194 - DNA, 25 bp, Homo sapien
ggtgggtgatcaccccatttaacag

SEQ ID NO: 1055195 - DNA, 25 bp, Homo sapien
tgaggcttgggccaagtgctacctc

SEQ ID NO: 1055196 - DNA, 25 bp, Homo sapien
tgcctcctctgtaaggactcttcgg

SEQ ID NO: 1055197 - DNA, 25 bp, Homo sapien
tcacagacaccagggggcggcctgg

SEQ ID NO: 1055198 - DNA, 25 bp, Homo sapien
ccagtcacagacaccagggggcggc

SEQ ID NO: 1055199 - DNA, 25 bp, Homo sapien
agtcacagacaccagggggcggcct

SEQ ID NO: 1055200 - DNA, 25 bp, Homo sapien
tgccagtcacagacaccagggggcg

SEQ ID NO: 1055201 - DNA, 25 bp, Homo sapien
tgctgcttccattatgagggaggtc

SEQ ID NO: 1055202 - DNA, 25 bp, Homo sapien
gctgcttccattatgagggaggtcc

SEQ ID NO: 1055203 - DNA, 25 bp, Homo sapien
gggttgggagctcaacagccacttc

SEQ ID NO: 1055204 - DNA, 25 bp, Homo sapien
tctcggaaatgcacagctactcagg

SEQ ID NO: 1055205 - DNA, 25 bp, Homo sapien
taagggttgaataaatggcagcgat

SEQ ID NO: 1055206 - DNA, 25 bp, Homo sapien
cccaggacgaggtcagagctggtca

SEQ ID NO: 1055207 - DNA, 25 bp, Homo sapien
cgacgctggaaggattgaatgagac

SEQ ID NO: 1055208 - DNA, 25 bp, Homo sapien
gatgaacatcgtaggagcccaagac

SEQ ID NO: 1055209 - DNA, 25 bp, Homo sapien
tcagaagatcttaggctgcgcctca

SEQ ID NO: 1055210 - DNA, 25 bp, Homo sapien
tggaatgggattgtcacagcaccgc

SEQ ID NO: 1055211 - DNA, 25 bp, Homo sapien
tcaggtcctgttgcctgtgggggtc

SEQ ID NO: 1055212 - DNA, 25 bp, Homo sapien
gagatctgggctcctgcccgcagga

SEQ ID NO: 1055213 - DNA, 25 bp, Homo sapien
cttgagagatctgggctcctgcccg

SEQ ID NO: 1055214 - DNA, 25 bp, Homo sapien
caacaccctctccccggtggtggtg

SEQ ID NO: 1055215 - DNA, 25 bp, Homo sapien
agcacttcccagcttatgcagcaga

SEQ ID NO: 1055216 - DNA, 25 bp, Homo sapien
acttctcccctgcatggagtacgca

SEQ ID NO: 1055217 - DNA, 25 bp, Homo sapien
gcagcagatcatccatagtcccact

SEQ ID NO: 1055218 - DNA, 25 bp, Homo sapien
gcaactgagcgccagctctctggat

SEQ ID NO: 1055219 - DNA, 25 bp, Homo sapien
gggcatcagcggctgtgcggccggg

SEQ ID NO: 1055220 - DNA, 25 bp, Homo sapien
ctgtgcggccgggaggatggccagt

SEQ ID NO: 1055221 - DNA, 25 bp, Homo sapien
atcagcggctgtgcggccgggagga

SEQ ID NO: 1055222 - DNA, 25 bp, Homo sapien
tgcggccgggaggatggccagtgtg

SEQ ID NO: 1055223 - DNA, 25 bp, Homo sapien
tctgagttcccacagccagaatcac

SEQ ID NO: 1055224 - DNA, 25 bp, Homo sapien
agagccgttctggacttggtctctg

SEQ ID NO: 1055225 - DNA, 25 bp, Homo sapien
ttcccacagccagaatcaccctctc

SEQ ID NO: 1055226 - DNA, 25 bp, Homo sapien
ctcctgggagagccgttctggactt

SEQ ID NO: 1055227 - DNA, 25 bp, Homo sapien
tcacacaaactcagggggcctgtgg

SEQ ID NO: 1055228 - DNA, 25 bp, Homo sapien
tgcagcagaatctttacgtccaaag

SEQ ID NO: 1055229 - DNA, 25 bp, Homo sapien
tttacgtccaaagggatgtagctcc

SEQ ID NO: 1055230 - DNA, 25 bp, Homo sapien
gaatctttacgtccaaagggatgta

SEQ ID NO: 1055231 - DNA, 25 bp, Homo sapien
gtgaaagaggcaggaaagacagtgg

SEQ ID NO: 1055232 - DNA, 25 bp, Homo sapien
ctgagggtgaaagaggcaggaaaga

SEQ ID NO: 1055233 - DNA, 25 bp, Homo sapien
agggtgaaagaggcaggaaagacag

SEQ ID NO: 1055234 - DNA, 25 bp, Homo sapien
gaaagaggcaggaaagacagtggcc

SEQ ID NO: 1055235 - DNA, 25 bp, Homo sapien
ggtcctttagggcagtttcgatgtg

SEQ ID NO: 1055236 - DNA, 25 bp, Homo sapien
tcaggtcctttagggcagtttcgat

SEQ ID NO: 1055237 - DNA, 25 bp, Homo sapien
ttcaggtcctttagggcagtttcga

SEQ ID NO: 1055238 - DNA, 25 bp, Homo sapien
tcctttagggcagtttcgatgtggg

SEQ ID NO: 1055239 - DNA, 25 bp, Homo sapien
tcagctgtcaacgacagcggggctg

SEQ ID NO: 1055240 - DNA, 25 bp, Homo sapien
ggctgtccaaatgggtgtctgcaga

SEQ ID NO: 1055241 - DNA, 25 bp, Homo sapien
tccagccgtcggctgtccaaatggg

SEQ ID NO: 1055242 - DNA, 25 bp, Homo sapien
ccgtcggctgtccaaatgggtgtct

SEQ ID NO: 1055243 - DNA, 25 bp, Homo sapien
tgccctgtcctgtcccattaacttc

SEQ ID NO: 1055244 - DNA, 25 bp, Homo sapien
tcctgtcccattaacttccaattca

SEQ ID NO: 1055245 - DNA, 25 bp, Homo sapien
ctgtcctgtcccattaacttccaat

SEQ ID NO: 1055246 - DNA, 25 bp, Homo sapien
ttccaattcaacagccatccctgac

SEQ ID NO: 1055247 - DNA, 25 bp, Homo sapien
ccgatgatacatttgctccctaatg

SEQ ID NO: 1055248 - DNA, 25 bp, Homo sapien
aggtgcctgctttattgggcctcca

SEQ ID NO: 1055249 - DNA, 25 bp, Homo sapien
ttgggcctccagtcaccgatgatac

SEQ ID NO: 1055250 - DNA, 25 bp, Homo sapien
gaatactaaatttctcgaggtgcct

SEQ ID NO: 1055251 - DNA, 25 bp, Homo sapien
ctgacccactgggaggttcgcctct

SEQ ID NO: 1055252 - DNA, 25 bp, Homo sapien
tcagaccctaatcatggtacaaatc

SEQ ID NO: 1055253 - DNA, 25 bp, Homo sapien
gaggcctcatatggctcagagccag

SEQ ID NO: 1055254 - DNA, 25 bp, Homo sapien
tagtgattgtcatgacaaggccagc

SEQ ID NO: 1055255 - DNA, 25 bp, Homo sapien
gaagtgacgtgggtgggcaaggaca

SEQ ID NO: 1055256 - DNA, 25 bp, Homo sapien
ctgcaatgccacctgggtgtgggaa

SEQ ID NO: 1055257 - DNA, 25 bp, Homo sapien
cctgcaatgccacctgggtgtggga

SEQ ID NO: 1055258 - DNA, 25 bp, Homo sapien
cttctggttgtgagtgaagtgacgt

SEQ ID NO: 1055259 - DNA, 25 bp, Homo sapien
gagctggacagtctctgtggttgaa

SEQ ID NO: 1055260 - DNA, 25 bp, Homo sapien
tctgtggttgaaggataccaagctg

SEQ ID NO: 1055261 - DNA, 25 bp, Homo sapien
ccaggctgtagggaacaagagccaa

SEQ ID NO: 1055262 - DNA, 25 bp, Homo sapien
acagcctaggccaggctgtagggaa

SEQ ID NO: 1055263 - DNA, 25 bp, Homo sapien
agttgccaaccctctctgtgcattg

SEQ ID NO: 1055264 - DNA, 25 bp, Homo sapien
ccttcaggctgttggaggaagttcc

SEQ ID NO: 1055265 - DNA, 25 bp, Homo sapien
gaatggtctcaggtgaagacattga

SEQ ID NO: 1055266 - DNA, 25 bp, Homo sapien
taggactcacttctttgtaggcttc

SEQ ID NO: 1055267 - DNA, 25 bp, Homo sapien
tctctgtgagcgcacatgtgggtct

SEQ ID NO: 1055268 - DNA, 25 bp, Homo sapien
gcagaagcattgcccactgaccagc

SEQ ID NO: 1055269 - DNA, 25 bp, Homo sapien
tgtgagcgcacatgtgggtcttccc

SEQ ID NO: 1055270 - DNA, 25 bp, Homo sapien
gcgcacatgtgggtcttcccattca

SEQ ID NO: 1055271 - DNA, 25 bp, Homo sapien
tcagcgcacccagaatgggacatgg

SEQ ID NO: 1055272 - DNA, 25 bp, Homo sapien
gaagatttctcatcattagactctc

SEQ ID NO: 1055273 - DNA, 25 bp, Homo sapien
tccacattgtcatctgaagatttct

SEQ ID NO: 1055274 - DNA, 25 bp, Homo sapien
tcatcattagactctctcagcgcac

SEQ ID NO: 1055275 - DNA, 25 bp, Homo sapien
tagagcggtggatcccaaatgccat

SEQ ID NO: 1055276 - DNA, 25 bp, Homo sapien
tcaaccagcgttctctagagcggtg

SEQ ID NO: 1055277 - DNA, 25 bp, Homo sapien
gcagcatccggtaagatccaagaaa

SEQ ID NO: 1055278 - DNA, 25 bp, Homo sapien
cagcagcagcatccggtaagatcca

SEQ ID NO: 1055279 - DNA, 25 bp, Homo sapien
taacagagaacaaagtaggatggcc

SEQ ID NO: 1055280 - DNA, 25 bp, Homo sapien
gaggaaataagaagcttctctctca

SEQ ID NO: 1055281 - DNA, 25 bp, Homo sapien
taatgctgaatcaatagtgacagcc

SEQ ID NO: 1055282 - DNA, 25 bp, Homo sapien
gacagccacgtcacactcaataaca

SEQ ID NO: 1055283 - DNA, 25 bp, Homo sapien
caaaggatcgtgtcattccctgtgg

SEQ ID NO: 1055284 - DNA, 25 bp, Homo sapien
gaccacatgcgtgagctaacgcgcc

SEQ ID NO: 1055285 - DNA, 25 bp, Homo sapien
ctaacgcgcccagccagagttactg

SEQ ID NO: 1055286 - DNA, 25 bp, Homo sapien
gaaatggacttgtttgctatgatca

SEQ ID NO: 1055287 - DNA, 25 bp, Homo sapien
ggggtgaggcgtacagcttggaagc

SEQ ID NO: 1055288 - DNA, 25 bp, Homo sapien
gggtgaggcgtacagcttggaagct

SEQ ID NO: 1055289 - DNA, 25 bp, Homo sapien
caaaggggtgaggcgtacagcttgg

SEQ ID NO: 1055290 - DNA, 25 bp, Homo sapien
aaggggtgaggcgtacagcttggaa

SEQ ID NO: 1055291 - DNA, 25 bp, Homo sapien
gaagcagcagtacaggagcctaccc

SEQ ID NO: 1055292 - DNA, 25 bp, Homo sapien
gacaatggtccatgaccacccctga

SEQ ID NO: 1055293 - DNA, 25 bp, Homo sapien
catttaccacatgaagacaatggtc

SEQ ID NO: 1055294 - DNA, 25 bp, Homo sapien
ggagcctacccctatcatatccctc

SEQ ID NO: 1055295 - DNA, 25 bp, Homo sapien
ggcagtaaatgcttgagccttctct

SEQ ID NO: 1055296 - DNA, 25 bp, Homo sapien
caagttctttgctgtaggcagtaaa

SEQ ID NO: 1055297 - DNA, 25 bp, Homo sapien
gtaaatgcttgagccttctctttgc

SEQ ID NO: 1055298 - DNA, 25 bp, Homo sapien
caggtgatgtgggaagaggttggtg

SEQ ID NO: 1055299 - DNA, 25 bp, Homo sapien
tctggatccattgaaagacaagttg

SEQ ID NO: 1055300 - DNA, 25 bp, Homo sapien
aacggttgtaccagtgtcctcagcc

SEQ ID NO: 1055301 - DNA, 25 bp, Homo sapien
tgtgtttggctctcatggcaagtag

SEQ ID NO: 1055302 - DNA, 25 bp, Homo sapien
agtagcatgcagtccaacggttgta

SEQ ID NO: 1055303 - DNA, 25 bp, Homo sapien
ggtgcggtacctgaccctgcttcag

SEQ ID NO: 1055304 - DNA, 25 bp, Homo sapien
gaaaatgtcctcaaggcggagagag

SEQ ID NO: 1055305 - DNA, 25 bp, Homo sapien
ttattattaagagggctgcttccac

SEQ ID NO: 1055306 - DNA, 25 bp, Homo sapien
gcttcccctgcatataagtcctgag

SEQ ID NO: 1055307 - DNA, 25 bp, Homo sapien
ggacatgcagggacagggccctggc

SEQ ID NO: 1055308 - DNA, 25 bp, Homo sapien
tggacatgcagggacagggccctgg

SEQ ID NO: 1055309 - DNA, 25 bp, Homo sapien
ctatggacatgcagggacagggccc

SEQ ID NO: 1055310 - DNA, 25 bp, Homo sapien
tatggacatgcagggacagggccct

SEQ ID NO: 1055311 - DNA, 25 bp, Homo sapien
cagcctcggtgtctccttctgtgga

SEQ ID NO: 1055312 - DNA, 25 bp, Homo sapien
tgagtaggcatgaccttccaccatc

SEQ ID NO: 1055313 - DNA, 25 bp, Homo sapien
tgtagagctgacgtggcatttgcca

SEQ ID NO: 1055314 - DNA, 25 bp, Homo sapien
ggtgctgtttctctagaggcctgag

SEQ ID NO: 1055315 - DNA, 25 bp, Homo sapien
gtgtcgtcctgtgagcacgccatcc

SEQ ID NO: 1055316 - DNA, 25 bp, Homo sapien
gtagatgcttctcccctacagacct

SEQ ID NO: 1055317 - DNA, 25 bp, Homo sapien
gcttgggcgaatgtcgactcgtgtc

SEQ ID NO: 1055318 - DNA, 25 bp, Homo sapien
gcttggataccacgtggtacttggc

SEQ ID NO: 1055319 - DNA, 25 bp, Homo sapien
agagagcctgttcccgacaggcgac

SEQ ID NO: 1055320 - DNA, 25 bp, Homo sapien
ctgttgaccggatcttgtggagggc

SEQ ID NO: 1055321 - DNA, 25 bp, Homo sapien
tgaccggatcttgtggagggctcca

SEQ ID NO: 1055322 - DNA, 25 bp, Homo sapien
gttgaccggatcttgtggagggctc

SEQ ID NO: 1055323 - DNA, 25 bp, Homo sapien
gaatggctttggccgttagcagcag

SEQ ID NO: 1055324 - DNA, 25 bp, Homo sapien
ctttggccgttagcagcagaaatct

SEQ ID NO: 1055325 - DNA, 25 bp, Homo sapien
tttggccgttagcagcagaaatctc

SEQ ID NO: 1055326 - DNA, 25 bp, Homo sapien
gagcttcaagtagaaatgcagcagc

SEQ ID NO: 1055327 - DNA, 25 bp, Homo sapien
gtcaactgtaaattgctccctccgg

SEQ ID NO: 1055328 - DNA, 25 bp, Homo sapien
tattagcaagaatttgtgacttctc

SEQ ID NO: 1055329 - DNA, 25 bp, Homo sapien
caagtagtagcaggtattgattgaa

SEQ ID NO: 1055330 - DNA, 25 bp, Homo sapien
atctgagggccggaggttctccttg

SEQ ID NO: 1055331 - DNA, 25 bp, Homo sapien
gaaatggcgactctttgcagaaccc

SEQ ID NO: 1055332 - DNA, 25 bp, Homo sapien
tctccaatccaaagcagttagagtc

SEQ ID NO: 1055333 - DNA, 25 bp, Homo sapien
taattttacacgctcgctggtcagc

SEQ ID NO: 1055334 - DNA, 25 bp, Homo sapien
taaacgcttagttccccaggctgac

SEQ ID NO: 1055335 - DNA, 25 bp, Homo sapien
taattctggctaataggacacacgc

SEQ ID NO: 1055336 - DNA, 25 bp, Homo sapien
tagcaagcatgagggcgaaagtcag

SEQ ID NO: 1055337 - DNA, 25 bp, Homo sapien
gcagaagcccttttgtgtcatgaag

SEQ ID NO: 1055338 - DNA, 25 bp, Homo sapien
tgtactccaaagctaaggacagtga

SEQ ID NO: 1055339 - DNA, 25 bp, Homo sapien
tagagtctagactcgggccacttgg

SEQ ID NO: 1055340 - DNA, 25 bp, Homo sapien
tgggcttaagattgccagcagcaca

SEQ ID NO: 1055341 - DNA, 25 bp, Homo sapien
gaggagtggagctatccttccatga

SEQ ID NO: 1055342 - DNA, 25 bp, Homo sapien
tcagttagttgccagaatgcgaaag

SEQ ID NO: 1055343 - DNA, 25 bp, Homo sapien
tatgcccaggaatgagcgaagacag

SEQ ID NO: 1055344 - DNA, 25 bp, Homo sapien
tccaggaacagcgtgcagaataggg

SEQ ID NO: 1055345 - DNA, 25 bp, Homo sapien
gatgtcctccgaaacaatggctggt

SEQ ID NO: 1055346 - DNA, 25 bp, Homo sapien
gaaagtgacaacaccttaagctcta

SEQ ID NO: 1055347 - DNA, 25 bp, Homo sapien
tagagactgattcttactttgttgt

SEQ ID NO: 1055348 - DNA, 25 bp, Homo sapien
tggagaaagtgacaacaccttaagc

SEQ ID NO: 1055349 - DNA, 25 bp, Homo sapien
gacaacaccttaagctctaaatgga

SEQ ID NO: 1055350 - DNA, 25 bp, Homo sapien
agctctgcctgccggattcccgcca

SEQ ID NO: 1055351 - DNA, 25 bp, Homo sapien
gcaagctctgcctgccggattcccg

SEQ ID NO: 1055352 - DNA, 25 bp, Homo sapien
ctctgcctgccggattcccgccatt

SEQ ID NO: 1055353 - DNA, 25 bp, Homo sapien
caagctctgcctgccggattcccgc

SEQ ID NO: 1055354 - DNA, 25 bp, Homo sapien
agaaacccggacctgtgctggagac

SEQ ID NO: 1055355 - DNA, 25 bp, Homo sapien
tctgagctggtgtccgagactatgc

SEQ ID NO: 1055356 - DNA, 25 bp, Homo sapien
gagactatgcatccgtttccggcgc

SEQ ID NO: 1055357 - DNA, 25 bp, Homo sapien
tctaggacagacgtagccacaaacg

SEQ ID NO: 1055358 - DNA, 25 bp, Homo sapien
ggattacaggcttgtatttttagta

SEQ ID NO: 1055359 - DNA, 25 bp, Homo sapien
tatgagagatagcacagatggacca

SEQ ID NO: 1055360 - DNA, 25 bp, Homo sapien
taatatctctaaggctcatacatgg

SEQ ID NO: 1055361 - DNA, 25 bp, Homo sapien
ccaaaggttatgcacaggtgggagt

SEQ ID NO: 1055362 - DNA, 25 bp, Homo sapien
cagaattctgtagcaaagccaatac

SEQ ID NO: 1055363 - DNA, 25 bp, Homo sapien
ctacgtgaacgacatgtggccgggc

SEQ ID NO: 1055364 - DNA, 25 bp, Homo sapien
gacaaaataataggacgctcaggcc

SEQ ID NO: 1055365 - DNA, 25 bp, Homo sapien
caagtataaagtggaccagcgcagc

SEQ ID NO: 1055366 - DNA, 25 bp, Homo sapien
cagctactagtgttcaagggcaacc

SEQ ID NO: 1055367 - DNA, 25 bp, Homo sapien
tcgccgttcgaaagcagggactaaa

SEQ ID NO: 1055368 - DNA, 25 bp, Homo sapien
ggtctctcaggaccaccgcagtggt

SEQ ID NO: 1055369 - DNA, 25 bp, Homo sapien
gacggcgtgcggtaagttttctgct

SEQ ID NO: 1055370 - DNA, 25 bp, Homo sapien
tgctaacgtagtccctcagtgcgca

SEQ ID NO: 1055371 - DNA, 25 bp, Homo sapien
cgccgcggtacctaggacaggagga

SEQ ID NO: 1055372 - DNA, 25 bp, Homo sapien
ctcaggccgggtctgcgacttgccg

SEQ ID NO: 1055373 - DNA, 25 bp, Homo sapien
tgggtggcggcaacgaccctgtggg

SEQ ID NO: 1055374 - DNA, 25 bp, Homo sapien
catcttttctacgttaatactgcat

SEQ ID NO: 1055375 - DNA, 25 bp, Homo sapien
tatgctttattacaagaagtgtttg

SEQ ID NO: 1055376 - DNA, 25 bp, Homo sapien
catcccatttgtagatccctagaag

SEQ ID NO: 1055377 - DNA, 25 bp, Homo sapien
aatagtcacctttgtttacactcac

SEQ ID NO: 1055378 - DNA, 25 bp, Homo sapien
tggaagagatatcgcagacttcatt

SEQ ID NO: 1055379 - DNA, 25 bp, Homo sapien
ggttttcactgcaatcagctgctcc

SEQ ID NO: 1055380 - DNA, 25 bp, Homo sapien
caccaccgttggaggaaactcctgg

SEQ ID NO: 1055381 - DNA, 25 bp, Homo sapien
gatacgctcctctaatcctgtctga

SEQ ID NO: 1055382 - DNA, 25 bp, Homo sapien
gtagctctcacactttggatacgct

SEQ ID NO: 1055383 - DNA, 25 bp, Homo sapien
cattctagtctaggcaacaggtgag

SEQ ID NO: 1055384 - DNA, 25 bp, Homo sapien
gccaggaatattataggtattgggt

SEQ ID NO: 1055385 - DNA, 25 bp, Homo sapien
aagagtactagccaggaatattata

SEQ ID NO: 1055386 - DNA, 25 bp, Homo sapien
gattaaaaatcagttgcggccaggt

SEQ ID NO: 1055387 - DNA, 25 bp, Homo sapien
ggaagatcgcctcgcttgagaacca

SEQ ID NO: 1055388 - DNA, 25 bp, Homo sapien
cactactgaggttttgggccggcta

SEQ ID NO: 1055389 - DNA, 25 bp, Homo sapien
atgcaagtagcagccccagtgaacc

SEQ ID NO: 1055390 - DNA, 25 bp, Homo sapien
ggtgctgtcccgtgcttcgcaggtt

SEQ ID NO: 1055391 - DNA, 25 bp, Homo sapien
tgagcgttctaaaggaaggcgtccg

SEQ ID NO: 1055392 - DNA, 25 bp, Homo sapien
tcgtacccgtcttgagtgaggtgac

SEQ ID NO: 1055393 - DNA, 25 bp, Homo sapien
ttcacagctggacgtcgggagtgct

SEQ ID NO: 1055394 - DNA, 25 bp, Homo sapien
tgggttcaggtttgcggccacacag

SEQ ID NO: 1055395 - DNA, 25 bp, Homo sapien
gctcagtcgcgcatgcggacacggg

SEQ ID NO: 1055396 - DNA, 25 bp, Homo sapien
catccacccggctcagtcgcgcatg

SEQ ID NO: 1055397 - DNA, 25 bp, Homo sapien
ccaccacaacaacgcgtctgcgcat

SEQ ID NO: 1055398 - DNA, 25 bp, Homo sapien
gcgccgggtccggagggagccacgc

SEQ ID NO: 1055399 - DNA, 25 bp, Homo sapien
caagaaaacaaaacggccacagcct

SEQ ID NO: 1055400 - DNA, 25 bp, Homo sapien
ccccgtcgtgcagtggttccggagc

SEQ ID NO: 1055401 - DNA, 25 bp, Homo sapien
agtggttccggagcccggtgtcgcg

SEQ ID NO: 1055402 - DNA, 25 bp, Homo sapien
cagccccgtcgtgcagtggttccgg

SEQ ID NO: 1055403 - DNA, 25 bp, Homo sapien
ccgtcgtgcagtggttccggagccc

SEQ ID NO: 1055404 - DNA, 25 bp, Homo sapien
agcctgcggccgctactctcttacc

SEQ ID NO: 1055405 - DNA, 25 bp, Homo sapien
gagaggtccgcggcggctcagcccg

SEQ ID NO: 1055406 - DNA, 25 bp, Homo sapien
tggcgccgccggacccaggagagga

SEQ ID NO: 1055407 - DNA, 25 bp, Homo sapien
gaggagaggtccgcggcggctcagc

SEQ ID NO: 1055408 - DNA, 25 bp, Homo sapien
gagaggagaggtccgcggcggctca

SEQ ID NO: 1055409 - DNA, 25 bp, Homo sapien
ggagctggccgggtcacgctccttt

SEQ ID NO: 1055410 - DNA, 25 bp, Homo sapien
cggggcacccctcgctgagggagct

SEQ ID NO: 1055411 - DNA, 25 bp, Homo sapien
cctctccgtcttggcggggtctgga

SEQ ID NO: 1055412 - DNA, 25 bp, Homo sapien
acgctcctttctcggggcttcggct

SEQ ID NO: 1055413 - DNA, 25 bp, Homo sapien
catctcaagccctctagaaatccag

SEQ ID NO: 1055414 - DNA, 25 bp, Homo sapien
aagcaatagtattgcgcttttcccc

SEQ ID NO: 1055415 - DNA, 25 bp, Homo sapien
cccagtcaatgcattctgagcatct

SEQ ID NO: 1055416 - DNA, 25 bp, Homo sapien
gcaatggaagcaatagtattgcgct

SEQ ID NO: 1055417 - DNA, 25 bp, Homo sapien
tattccaatcttagtgtatgtgttg

SEQ ID NO: 1055418 - DNA, 25 bp, Homo sapien
attattccaatcttagtgtatgtgt

SEQ ID NO: 1055419 - DNA, 25 bp, Homo sapien
caatcttagtgtatgtgttgccaaa

SEQ ID NO: 1055420 - DNA, 25 bp, Homo sapien
tccaatcttagtgtatgtgttgcca

SEQ ID NO: 1055421 - DNA, 25 bp, Homo sapien
taatttgcacatggcctaataactg

SEQ ID NO: 1055422 - DNA, 25 bp, Homo sapien
tctaatttggtgaactagaaaccag

SEQ ID NO: 1055423 - DNA, 25 bp, Homo sapien
gcaattctgtatctcactggctaaa

SEQ ID NO: 1055424 - DNA, 25 bp, Homo sapien
tgactccaattccaactgacagaag

SEQ ID NO: 1055425 - DNA, 25 bp, Homo sapien
gggataaataacagctgcatctatg

SEQ ID NO: 1055426 - DNA, 25 bp, Homo sapien
cagctgcatctatgataatccacca

SEQ ID NO: 1055427 - DNA, 25 bp, Homo sapien
ggtgggataaataacagctgcatct

SEQ ID NO: 1055428 - DNA, 25 bp, Homo sapien
atctatgataatccaccagcctgta

SEQ ID NO: 1055429 - DNA, 25 bp, Homo sapien
tgctataacaccacaggcatggtat

SEQ ID NO: 1055430 - DNA, 25 bp, Homo sapien
catggtatgagtggttgaaatcttt

SEQ ID NO: 1055431 - DNA, 25 bp, Homo sapien
cacaggcatggtatgagtggttgaa

SEQ ID NO: 1055432 - DNA, 25 bp, Homo sapien
ggaaggctatggttgctataacacc

SEQ ID NO: 1055433 - DNA, 25 bp, Homo sapien
ctatagaggatgcctctcatgcttg

SEQ ID NO: 1055434 - DNA, 25 bp, Homo sapien
ctctgggccaccacaacttgtcttt

SEQ ID NO: 1055435 - DNA, 25 bp, Homo sapien
tatagaggatgcctctcatgcttga

SEQ ID NO: 1055436 - DNA, 25 bp, Homo sapien
gcatcccatgtagggctgccttctt

SEQ ID NO: 1055437 - DNA, 25 bp, Homo sapien
agcggacagagctgccacactgctt

SEQ ID NO: 1055438 - DNA, 25 bp, Homo sapien
gttctgggcactcttagcggacaga

SEQ ID NO: 1055439 - DNA, 25 bp, Homo sapien
ccatcccacgctccgctgcatggat

SEQ ID NO: 1055440 - DNA, 25 bp, Homo sapien
cggacttgtccattcgatactgcat

SEQ ID NO: 1055441 - DNA, 25 bp, Homo sapien
tgacccagacaaccttcactgtaac

SEQ ID NO: 1055442 - DNA, 25 bp, Homo sapien
gtaactatcacctcggacttgtcca

SEQ ID NO: 1055443 - DNA, 25 bp, Homo sapien
ccttcactgtaactatcacctcgga

SEQ ID NO: 1055444 - DNA, 25 bp, Homo sapien
tgagaaaacctatactcaaccttcc

SEQ ID NO: 1055445 - DNA, 25 bp, Homo sapien
ctgtttcaccatatttagaggctca

SEQ ID NO: 1055446 - DNA, 25 bp, Homo sapien
tccccaactgcctacactgagaaaa

SEQ ID NO: 1055447 - DNA, 25 bp, Homo sapien
taagtgcatatacttactttcccca

SEQ ID NO: 1055448 - DNA, 25 bp, Homo sapien
catcagtgtacctgttggccttttt

SEQ ID NO: 1055449 - DNA, 25 bp, Homo sapien
cagtgtacctgttggcctttttctt

SEQ ID NO: 1055450 - DNA, 25 bp, Homo sapien
tcagtgtacctgttggcctttttct

SEQ ID NO: 1055451 - DNA, 25 bp, Homo sapien
ttcatcagtgtacctgttggccttt

SEQ ID NO: 1055452 - DNA, 25 bp, Homo sapien
cttcaaagaaataatattttaccag

SEQ ID NO: 1055453 - DNA, 25 bp, Homo sapien
agaaataatattttaccagaattct

SEQ ID NO: 1055454 - DNA, 25 bp, Homo sapien
caaagaaataatattttaccagaat

SEQ ID NO: 1055455 - DNA, 25 bp, Homo sapien
tcaaagaaataatattttaccagaa

SEQ ID NO: 1055456 - DNA, 25 bp, Homo sapien
tagcaacataacctccaaaaagaat

SEQ ID NO: 1055457 - DNA, 25 bp, Homo sapien
ctttagcaacataacctccaaaaag

SEQ ID NO: 1055458 - DNA, 25 bp, Homo sapien
gcaacataacctccaaaaagaatcc

SEQ ID NO: 1055459 - DNA, 25 bp, Homo sapien
caacataacctccaaaaagaatcca

SEQ ID NO: 1055460 - DNA, 25 bp, Homo sapien
gggtcccggatataaatgcatcgct

SEQ ID NO: 1055461 - DNA, 25 bp, Homo sapien
aatgcaaaattccagtattccactg

SEQ ID NO: 1055462 - DNA, 25 bp, Homo sapien
caaagcttgctaactagctagataa

SEQ ID NO: 1055463 - DNA, 25 bp, Homo sapien
tagtagttggcccaactataggaaa

SEQ ID NO: 1055464 - DNA, 25 bp, Homo sapien
catgcacgtcaccatagtcggctaa

SEQ ID NO: 1055465 - DNA, 25 bp, Homo sapien
caccatagtcggctaaatatttatt

SEQ ID NO: 1055466 - DNA, 25 bp, Homo sapien
gcacgtcaccatagtcggctaaata

SEQ ID NO: 1055467 - DNA, 25 bp, Homo sapien
gaccacacatgcacgtcaccatagt

SEQ ID NO: 1055468 - DNA, 25 bp, Homo sapien
aatacagcaattccagggtatacta

SEQ ID NO: 1055469 - DNA, 25 bp, Homo sapien
acagcaattccagggtatactatgt

SEQ ID NO: 1055470 - DNA, 25 bp, Homo sapien
aaaatacagcaattccagggtatac

SEQ ID NO: 1055471 - DNA, 25 bp, Homo sapien
gcaattccagggtatactatgtctt

SEQ ID NO: 1055472 - DNA, 25 bp, Homo sapien
ctggttggaggaacagcatgggtag

SEQ ID NO: 1055473 - DNA, 25 bp, Homo sapien
ttgtggggtttttcggccagtgatg

SEQ ID NO: 1055474 - DNA, 25 bp, Homo sapien
tgtggggtttttcggccagtgatgg

SEQ ID NO: 1055475 - DNA, 25 bp, Homo sapien
ttaaaagaggcaagagcgcaactgt

SEQ ID NO: 1055476 - DNA, 25 bp, Homo sapien
tcggtgagggaacgtctacagttgt

SEQ ID NO: 1055477 - DNA, 25 bp, Homo sapien
caagggtggcaaattacccacaggt

SEQ ID NO: 1055478 - DNA, 25 bp, Homo sapien
cccacaggtgccttagatgagccag

SEQ ID NO: 1055479 - DNA, 25 bp, Homo sapien
tcactgccataagtcttcagtgcgg

SEQ ID NO: 1055480 - DNA, 25 bp, Homo sapien
cataagtcttcagtgcggccaaact

SEQ ID NO: 1055481 - DNA, 25 bp, Homo sapien
actgccataagtcttcagtgcggcc

SEQ ID NO: 1055482 - DNA, 25 bp, Homo sapien
tgccataagtcttcagtgcggccaa

SEQ ID NO: 1055483 - DNA, 25 bp, Homo sapien
caaacaaacccatgcagggctgttg

SEQ ID NO: 1055484 - DNA, 25 bp, Homo sapien
atggcattacaaaaggttgggagtg

SEQ ID NO: 1055485 - DNA, 25 bp, Homo sapien
gttaatcaagtgcataccacaatag

SEQ ID NO: 1055486 - DNA, 25 bp, Homo sapien
cacaactttaagctgagactacact

SEQ ID NO: 1055487 - DNA, 25 bp, Homo sapien
ccttgggagaccctcaaaagccagt

SEQ ID NO: 1055488 - DNA, 25 bp, Homo sapien
gaatgagaggcacagcggaagacct

SEQ ID NO: 1055489 - DNA, 25 bp, Homo sapien
caccagaaccacgtgtcatggctga

SEQ ID NO: 1055490 - DNA, 25 bp, Homo sapien
agaaattgtcccctgtctaagactg

SEQ ID NO: 1055491 - DNA, 25 bp, Homo sapien
tcaggagttcatgtgggatgacagc

SEQ ID NO: 1055492 - DNA, 25 bp, Homo sapien
ggagagtcttgatcaccaggcaata

SEQ ID NO: 1055493 - DNA, 25 bp, Homo sapien
aatcacccagcaaatattccgaagg

SEQ ID NO: 1055494 - DNA, 25 bp, Homo sapien
aagagtgtatcccatcttgcagagg

SEQ ID NO: 1055495 - DNA, 25 bp, Homo sapien
cattccctgagcatattctgaattg

SEQ ID NO: 1055496 - DNA, 25 bp, Homo sapien
ggcattccctgagcatattctgaat

SEQ ID NO: 1055497 - DNA, 25 bp, Homo sapien
ctggcattccctgagcatattctga

SEQ ID NO: 1055498 - DNA, 25 bp, Homo sapien
ttccctgagcatattctgaattgca

SEQ ID NO: 1055499 - DNA, 25 bp, Homo sapien
acaaatcactgatacttagtccttg

SEQ ID NO: 1055500 - DNA, 25 bp, Homo sapien
tacttagtccttgtgggaatcatgc

SEQ ID NO: 1055501 - DNA, 25 bp, Homo sapien
gcttaataaagcatgctactcagtt

SEQ ID NO: 1055502 - DNA, 25 bp, Homo sapien
agttaactcttgtctacatcagcaa

SEQ ID NO: 1055503 - DNA, 25 bp, Homo sapien
aaatgtttagtttcattaggatgat

SEQ ID NO: 1055504 - DNA, 25 bp, Homo sapien
ttagtttcattaggatgatgctatc

SEQ ID NO: 1055505 - DNA, 25 bp, Homo sapien
agtttcattaggatgatgctatcaa

SEQ ID NO: 1055506 - DNA, 25 bp, Homo sapien
taaatgtttagtttcattaggatga

SEQ ID NO: 1055507 - DNA, 25 bp, Homo sapien
tcatatggcagtagtgagtcctctg

SEQ ID NO: 1055508 - DNA, 25 bp, Homo sapien
ttaggctgtttcaagagatcaagcc

SEQ ID NO: 1055509 - DNA, 25 bp, Homo sapien
gccaaaatcagtatgtgggttcatc

SEQ ID NO: 1055510 - DNA, 25 bp, Homo sapien
caatctcaactgtctgccaaatgga

SEQ ID NO: 1055511 - DNA, 25 bp, Homo sapien
cacgatgtgaagtaccagagagata

SEQ ID NO: 1055512 - DNA, 25 bp, Homo sapien
gaatttcatagaactgactgccagg

SEQ ID NO: 1055513 - DNA, 25 bp, Homo sapien
tgctaattcattccactacgtgtat

SEQ ID NO: 1055514 - DNA, 25 bp, Homo sapien
atcctccgaaggtttatgaaaatgc

SEQ ID NO: 1055515 - DNA, 25 bp, Homo sapien
gccggcgacctagagacgactagtg

SEQ ID NO: 1055516 - DNA, 25 bp, Homo sapien
ggcgacctagagacgactagtgctc

SEQ ID NO: 1055517 - DNA, 25 bp, Homo sapien
tagccggcgacctagagacgactag

SEQ ID NO: 1055518 - DNA, 25 bp, Homo sapien
gggagggggaattgagctgaagcaa

SEQ ID NO: 1055519 - DNA, 25 bp, Homo sapien
cttcttctaagtggatggatctttc

SEQ ID NO: 1055520 - DNA, 25 bp, Homo sapien
tggtccaggtcgtgtccacttctga

SEQ ID NO: 1055521 - DNA, 25 bp, Homo sapien
cagcaaatcctgatcgttccagaat

SEQ ID NO: 1055522 - DNA, 25 bp, Homo sapien
aaaaggagtagattttcgaaggctg

SEQ ID NO: 1055523 - DNA, 25 bp, Homo sapien
gaggatgccgacactcactgctctt

SEQ ID NO: 1055524 - DNA, 25 bp, Homo sapien
gaacaccagtctcgtggcttcaagt

SEQ ID NO: 1055525 - DNA, 25 bp, Homo sapien
gactaccacatgaacctgaggcact

SEQ ID NO: 1055526 - DNA, 25 bp, Homo sapien
tacgtgttcgcagcctattttgggc

SEQ ID NO: 1055527 - DNA, 25 bp, Homo sapien
gaggattgaacaagtgaccgaacac

SEQ ID NO: 1055528 - DNA, 25 bp, Homo sapien
tgaggcttcggaggcaacagttact

SEQ ID NO: 1055529 - DNA, 25 bp, Homo sapien
caggtgcgatgcttgaaactgaggc

SEQ ID NO: 1055530 - DNA, 25 bp, Homo sapien
tcaggctgcgttgattggagctgct

SEQ ID NO: 1055531 - DNA, 25 bp, Homo sapien
catgtactaatcataataaagctgg

SEQ ID NO: 1055532 - DNA, 25 bp, Homo sapien
tgtactaatcataataaagctggat

SEQ ID NO: 1055533 - DNA, 25 bp, Homo sapien
tctcatctggcacaactcagcggct

SEQ ID NO: 1055534 - DNA, 25 bp, Homo sapien
cattgggagagcctgtcgaaagtct

SEQ ID NO: 1055535 - DNA, 25 bp, Homo sapien
gcagtgggtccagcaagtttgtaca

SEQ ID NO: 1055536 - DNA, 25 bp, Homo sapien
catagcaagatagtggcagaaccca

SEQ ID NO: 1055537 - DNA, 25 bp, Homo sapien
gtcaacttggcgcagttggtggtga

SEQ ID NO: 1055538 - DNA, 25 bp, Homo sapien
gaaggtcaacttggcgcagttggtg

SEQ ID NO: 1055539 - DNA, 25 bp, Homo sapien
tggggaaggtcaacttggcgcagtt

SEQ ID NO: 1055540 - DNA, 25 bp, Homo sapien
tcaacttggcgcagttggtggtgat

SEQ ID NO: 1055541 - DNA, 25 bp, Homo sapien
tgcagaggccaccttaacgggagaa

SEQ ID NO: 1055542 - DNA, 25 bp, Homo sapien
gagaagagatggtcactccactctg

SEQ ID NO: 1055543 - DNA, 25 bp, Homo sapien
cgcccaggtgggtagaaatcttgtc

SEQ ID NO: 1055544 - DNA, 25 bp, Homo sapien
cagaaagtaggtgcccaacagtgtt

SEQ ID NO: 1055545 - DNA, 25 bp, Homo sapien
aacctcttcatgctggcgcttggtg

SEQ ID NO: 1055546 - DNA, 25 bp, Homo sapien
agcagtgtggccttcaacctcttca

SEQ ID NO: 1055547 - DNA, 25 bp, Homo sapien
cctcttcatgctggcgcttggtgtg

SEQ ID NO: 1055548 - DNA, 25 bp, Homo sapien
gcagtgtggccttcaacctcttcat

SEQ ID NO: 1055549 - DNA, 25 bp, Homo sapien
gggcccaggttagcagaggtcacat

SEQ ID NO: 1055550 - DNA, 25 bp, Homo sapien
catttctgttctgcgaggagcggga

SEQ ID NO: 1055551 - DNA, 25 bp, Homo sapien
ttgacaaatctgttgggagaggcca

SEQ ID NO: 1055552 - DNA, 25 bp, Homo sapien
ttacagagcttgtactgggcccagg

SEQ ID NO: 1055553 - DNA, 25 bp, Homo sapien
tagctaagtcatcgttgcttccggc

SEQ ID NO: 1055554 - DNA, 25 bp, Homo sapien
gagacccaaactgacggcttctaga

SEQ ID NO: 1055555 - DNA, 25 bp, Homo sapien
gccgcaagtctttcacgtagctaag

SEQ ID NO: 1055556 - DNA, 25 bp, Homo sapien
tccttgacggtgattccagacgcga

SEQ ID NO: 1055557 - DNA, 25 bp, Homo sapien
accggcggctgcaggatcgcgagcg

SEQ ID NO: 1055558 - DNA, 25 bp, Homo sapien
caatcacgataaacctcctgagtgg

SEQ ID NO: 1055559 - DNA, 25 bp, Homo sapien
tactaatcggctaatatcccgccaa

SEQ ID NO: 1055560 - DNA, 25 bp, Homo sapien
actgcctgcactagattcctccacc

SEQ ID NO: 1055561 - DNA, 25 bp, Homo sapien
tcctccaccctgagacattaaacaa

SEQ ID NO: 1055562 - DNA, 25 bp, Homo sapien
tgaaagccattaattatagggaaaa

SEQ ID NO: 1055563 - DNA, 25 bp, Homo sapien
tatttgacaatcatgttaaggccac

SEQ ID NO: 1055564 - DNA, 25 bp, Homo sapien
ggagttagtatcttttctcccgcac

SEQ ID NO: 1055565 - DNA, 25 bp, Homo sapien
gtaatataaagatgctcactcctat

SEQ ID NO: 1055566 - DNA, 25 bp, Homo sapien
ttggctcctgttactcatgcaaatt

SEQ ID NO: 1055567 - DNA, 25 bp, Homo sapien
ttttcctgatatctctggacctgtg

SEQ ID NO: 1055568 - DNA, 25 bp, Homo sapien
gggcttgcactccccgaagctacag

SEQ ID NO: 1055569 - DNA, 25 bp, Homo sapien
tctttaatctaggcgaaggtttcca

SEQ ID NO: 1055570 - DNA, 25 bp, Homo sapien
cagcacgggtaagacctgtccccat

SEQ ID NO: 1055571 - DNA, 25 bp, Homo sapien
tcctgttagacttatcactatcacg

SEQ ID NO: 1055572 - DNA, 25 bp, Homo sapien
ccctcaaagtcttaaatgatttcag

SEQ ID NO: 1055573 - DNA, 25 bp, Homo sapien
cagatcctgttagacttatcactat

SEQ ID NO: 1055574 - DNA, 25 bp, Homo sapien
tccaagagagtaagaccaatttgcc

SEQ ID NO: 1055575 - DNA, 25 bp, Homo sapien
gaagcgtgtattccagctccaagag

SEQ ID NO: 1055576 - DNA, 25 bp, Homo sapien
tgacggaaaggctgatgtaggtcct

SEQ ID NO: 1055577 - DNA, 25 bp, Homo sapien
ggttccctcttagcccattcagtca

SEQ ID NO: 1055578 - DNA, 25 bp, Homo sapien
caaacaaaagtatacgtagtcaggg

SEQ ID NO: 1055579 - DNA, 25 bp, Homo sapien
gagacacagccaatcgatacataga

SEQ ID NO: 1055580 - DNA, 25 bp, Homo sapien
gagtgccaactttgagcctaagata

SEQ ID NO: 1055581 - DNA, 25 bp, Homo sapien
cctgtccccatgaaacttgtattct

SEQ ID NO: 1055582 - DNA, 25 bp, Homo sapien
gttattaagtaatccgtagtctgac

SEQ ID NO: 1055583 - DNA, 25 bp, Homo sapien
gaatgaactatagtccctgttatta

SEQ ID NO: 1055584 - DNA, 25 bp, Homo sapien
gagcactcaagcgtattctagaaac

SEQ ID NO: 1055585 - DNA, 25 bp, Homo sapien
gagtcccacactgcgaaccatatta

SEQ ID NO: 1055586 - DNA, 25 bp, Homo sapien
tttctctgccactctttgaggagaa

SEQ ID NO: 1055587 - DNA, 25 bp, Homo sapien
caaagtctccaatgttcgcgcaggc

SEQ ID NO: 1055588 - DNA, 25 bp, Homo sapien
gagaatctcaccatttattatgcac

SEQ ID NO: 1055589 - DNA, 25 bp, Homo sapien
aatgttcgcgcaggcactggagtca

SEQ ID NO: 1055590 - DNA, 25 bp, Homo sapien
ctgtaattgcagcagtttgggagac

SEQ ID NO: 1055591 - DNA, 25 bp, Homo sapien
gtaattgcagcagtttgggagaccg

SEQ ID NO: 1055592 - DNA, 25 bp, Homo sapien
taattgcagcagtttgggagaccga

SEQ ID NO: 1055593 - DNA, 25 bp, Homo sapien
tgtaattgcagcagtttgggagacc

SEQ ID NO: 1055594 - DNA, 25 bp, Homo sapien
cagcatgctttgtgtgttgagggaa

SEQ ID NO: 1055595 - DNA, 25 bp, Homo sapien
tagcttttaagcagagaccccaatg

SEQ ID NO: 1055596 - DNA, 25 bp, Homo sapien
cccttataaaagatgggaagccact

SEQ ID NO: 1055597 - DNA, 25 bp, Homo sapien
gccactggagatctttcaacaaagg

SEQ ID NO: 1055598 - DNA, 25 bp, Homo sapien
tgcccagggtcttgcagctagtaag

SEQ ID NO: 1055599 - DNA, 25 bp, Homo sapien
gcaatggcactactgacaccgacag

SEQ ID NO: 1055600 - DNA, 25 bp, Homo sapien
ggaactcagcttggccatcgtgata

SEQ ID NO: 1055601 - DNA, 25 bp, Homo sapien
gaggtgctgggaactaaaataagcc

SEQ ID NO: 1055602 - DNA, 25 bp, Homo sapien
agtggtttatatacagagtggaata

SEQ ID NO: 1055603 - DNA, 25 bp, Homo sapien
tcatctttgcaaggggaacaaattt

SEQ ID NO: 1055604 - DNA, 25 bp, Homo sapien
cgtatcaatacttcgattaaccaaa

SEQ ID NO: 1055605 - DNA, 25 bp, Homo sapien
attaaccaaaaccagggcaaatctg

SEQ ID NO: 1055606 - DNA, 25 bp, Homo sapien
tgaggcttcggaggcaacagttact

SEQ ID NO: 1055607 - DNA, 25 bp, Homo sapien
tcaggctgcgttgattggagctgct

SEQ ID NO: 1055608 - DNA, 25 bp, Homo sapien
caggtgcgatgcttgaaactgaggc

SEQ ID NO: 1055609 - DNA, 25 bp, Homo sapien
gaggattgaacaagtgaccgaacac

SEQ ID NO: 1055610 - DNA, 25 bp, Homo sapien
tgggataggtcggtcctgaagaaat

SEQ ID NO: 1055611 - DNA, 25 bp, Homo sapien
ttctgggataggtcggtcctgaaga

SEQ ID NO: 1055612 - DNA, 25 bp, Homo sapien
tctgggataggtcggtcctgaagaa

SEQ ID NO: 1055613 - DNA, 25 bp, Homo sapien
cattctgggataggtcggtcctgaa

SEQ ID NO: 1055614 - DNA, 25 bp, Homo sapien
gctgcagccagggaatagtccgtcg

SEQ ID NO: 1055615 - DNA, 25 bp, Homo sapien
aataagcagccggaagcagacccgg

SEQ ID NO: 1055616 - DNA, 25 bp, Homo sapien
cccagtgaccatgaagagtgagggc

SEQ ID NO: 1055617 - DNA, 25 bp, Homo sapien
caaccctctcgctagtccagtggag

SEQ ID NO: 1055618 - DNA, 25 bp, Homo sapien
ccctgccttggcagctttctgcgag

SEQ ID NO: 1055619 - DNA, 25 bp, Homo sapien
ttggcagctttctgcgaggcatccc

SEQ ID NO: 1055620 - DNA, 25 bp, Homo sapien
ccccatgaacatagtcagtaacaac

SEQ ID NO: 1055621 - DNA, 25 bp, Homo sapien
gcgaggcatccccatgaacatagtc

SEQ ID NO: 1055622 - DNA, 25 bp, Homo sapien
tagcaaagcccagcaaaggttaaag

SEQ ID NO: 1055623 - DNA, 25 bp, Homo sapien
tcgtgatagttgaaatagcaaagcc

SEQ ID NO: 1055624 - DNA, 25 bp, Homo sapien
gatgcccacatcgtgatagttgaaa

SEQ ID NO: 1055625 - DNA, 25 bp, Homo sapien
tttgcagatgcccacatcgtgatag

SEQ ID NO: 1055626 - DNA, 25 bp, Homo sapien
tcttccttattgtgagcttaatggc

SEQ ID NO: 1055627 - DNA, 25 bp, Homo sapien
tgtgattaagagaagaaggctgtcc

SEQ ID NO: 1055628 - DNA, 25 bp, Homo sapien
gtcttataagaagctgggaggcaac

SEQ ID NO: 1055629 - DNA, 25 bp, Homo sapien
ggcaaccccattaactcaccagaat

SEQ ID NO: 1055630 - DNA, 25 bp, Homo sapien
tattcccaaggcaaatatggaagtt

SEQ ID NO: 1055631 - DNA, 25 bp, Homo sapien
ccaaggcaaatatggaagtttgatc

SEQ ID NO: 1055632 - DNA, 25 bp, Homo sapien
ttcccaaggcaaatatggaagtttg

SEQ ID NO: 1055633 - DNA, 25 bp, Homo sapien
tcccaaggcaaatatggaagtttga

SEQ ID NO: 1055634 - DNA, 25 bp, Homo sapien
tgtagccccacgcggggccgttcca

SEQ ID NO: 1055635 - DNA, 25 bp, Homo sapien
cagccccgcccgtgcagtgaggcca

SEQ ID NO: 1055636 - DNA, 25 bp, Homo sapien
tccagccccgcccgtgcagtgaggc

SEQ ID NO: 1055637 - DNA, 25 bp, Homo sapien
ctggtgtagccccacgcggggccgt

SEQ ID NO: 1055638 - DNA, 25 bp, Homo sapien
catggcggggtgtggacgcggtcgc

SEQ ID NO: 1055639 - DNA, 25 bp, Homo sapien
ggctctttgaccttgggcttgtgga

SEQ ID NO: 1055640 - DNA, 25 bp, Homo sapien
gcctgtggaggagctctgtgactgc

SEQ ID NO: 1055641 - DNA, 25 bp, Homo sapien
aggagctctgtgactgctctgatat

SEQ ID NO: 1055642 - DNA, 25 bp, Homo sapien
gcttgtggattaggggcctgtggag

SEQ ID NO: 1055643 - DNA, 25 bp, Homo sapien
caccaccgttggaggaaactcctgg

SEQ ID NO: 1055644 - DNA, 25 bp, Homo sapien
gatacgctcctctaatcctgtctga

SEQ ID NO: 1055645 - DNA, 25 bp, Homo sapien
ggttttcactgcaatcagctgctcc

SEQ ID NO: 1055646 - DNA, 25 bp, Homo sapien
gtagctctcacactttggatacgct

SEQ ID NO: 1055647 - DNA, 25 bp, Homo sapien
gccctcaacgtgcaggtggcttgaa

SEQ ID NO: 1055648 - DNA, 25 bp, Homo sapien
ggagctggaatacacgcttccattc

SEQ ID NO: 1055649 - DNA, 25 bp, Homo sapien
tgactgaatggactaagagggaacc

SEQ ID NO: 1055650 - DNA, 25 bp, Homo sapien
caaattggtcttactctcttggagc

SEQ ID NO: 1055651 - DNA, 25 bp, Homo sapien
cattctagtctaggcaacaggtgag

SEQ ID NO: 1055652 - DNA, 25 bp, Homo sapien
gccaggaatattataggtattgggt

SEQ ID NO: 1055653 - DNA, 25 bp, Homo sapien
aagagtactagccaggaatattata

SEQ ID NO: 1055654 - DNA, 25 bp, Homo sapien
gattaaaaatcagttgcggccaggt

SEQ ID NO: 1055655 - DNA, 25 bp, Homo sapien
gatgtcagcaagatgaacactaaag

SEQ ID NO: 1055656 - DNA, 25 bp, Homo sapien
aatgccaacccccggacctgatggg

SEQ ID NO: 1055657 - DNA, 25 bp, Homo sapien
ctgcccgagggcaccagatgtcagc

SEQ ID NO: 1055658 - DNA, 25 bp, Homo sapien
cagatgtcagcaagatgaacactaa

SEQ ID NO: 1055659 - DNA, 25 bp, Homo sapien
tgtgcaggggttccaccagcaccag

SEQ ID NO: 1055660 - DNA, 25 bp, Homo sapien
tgtccgtctctgtgcaggggttcca

SEQ ID NO: 1055661 - DNA, 25 bp, Homo sapien
cctgtgtccgtctctgtgcaggggt

SEQ ID NO: 1055662 - DNA, 25 bp, Homo sapien
ccgtctctgtgcaggggttccacca

SEQ ID NO: 1055663 - DNA, 25 bp, Homo sapien
taggatgccacgagccccttttgat

SEQ ID NO: 1055664 - DNA, 25 bp, Homo sapien
taaggaagcgtcatagtgggtaaaa

SEQ ID NO: 1055665 - DNA, 25 bp, Homo sapien
cttttgatcctctaaggaagcgtca

SEQ ID NO: 1055666 - DNA, 25 bp, Homo sapien
cagaccgcgggtacttagagctcat

SEQ ID NO: 1055667 - DNA, 25 bp, Homo sapien
tacattgttggctgaatttcggtgc

SEQ ID NO: 1055668 - DNA, 25 bp, Homo sapien
cattgttggctgaatttcggtgcaa

SEQ ID NO: 1055669 - DNA, 25 bp, Homo sapien
acattgttggctgaatttcggtgca

SEQ ID NO: 1055670 - DNA, 25 bp, Homo sapien
tttcccggtctcagaccctgagcag

SEQ ID NO: 1055671 - DNA, 25 bp, Homo sapien
ctgctgtggcaggtgagtggaagag

SEQ ID NO: 1055672 - DNA, 25 bp, Homo sapien
ctttcccggtctcagaccctgagca

SEQ ID NO: 1055673 - DNA, 25 bp, Homo sapien
tggcaggtgagtggaagagacgcac

SEQ ID NO: 1055674 - DNA, 25 bp, Homo sapien
tgctgcgagggacctggtgagctgg

SEQ ID NO: 1055675 - DNA, 25 bp, Homo sapien
ctgcgagggacctggtgagctggct

SEQ ID NO: 1055676 - DNA, 25 bp, Homo sapien
gcgagggacctggtgagctggctgg

SEQ ID NO: 1055677 - DNA, 25 bp, Homo sapien
cctgctgcgagggacctggtgagct

SEQ ID NO: 1055678 - DNA, 25 bp, Homo sapien
tccagctgtgtctccggaaactcga

SEQ ID NO: 1055679 - DNA, 25 bp, Homo sapien
ggaagcccaagccaatggccgccat

SEQ ID NO: 1055680 - DNA, 25 bp, Homo sapien
gtgtgatgaccaccttcccagaagg

SEQ ID NO: 1055681 - DNA, 25 bp, Homo sapien
gtccagcaggattgcccactgcaca

SEQ ID NO: 1055682 - DNA, 25 bp, Homo sapien
gactatgcccgcttaagcctcaagg

SEQ ID NO: 1055683 - DNA, 25 bp, Homo sapien
tctctgtaaaatcgtgctagctcac

SEQ ID NO: 1055684 - DNA, 25 bp, Homo sapien
catgccagctgatcacaaatgtgag

SEQ ID NO: 1055685 - DNA, 25 bp, Homo sapien
ccattttacagagggtcacgtagag

SEQ ID NO: 1055686 - DNA, 25 bp, Homo sapien
atcaccaccaactgcgccaagttga

SEQ ID NO: 1055687 - DNA, 25 bp, Homo sapien
ttgaagatattactgatgaccatcc

SEQ ID NO: 1055688 - DNA, 25 bp, Homo sapien
catcctcaggttgcctaaagctgtc

SEQ ID NO: 1055689 - DNA, 25 bp, Homo sapien
tcagcaccgacaaagcactcatggt

SEQ ID NO: 1055690 - DNA, 25 bp, Homo sapien
ccaccaaatggagcttttggccctt

SEQ ID NO: 1055691 - DNA, 25 bp, Homo sapien
tctcccaatgagaggacatatgcag

SEQ ID NO: 1055692 - DNA, 25 bp, Homo sapien
aatttagactttcgacaggctctcc

SEQ ID NO: 1055693 - DNA, 25 bp, Homo sapien
gctggctgtacaaacttgctggacc

SEQ ID NO: 1055694 - DNA, 25 bp, Homo sapien
ctgacacgcactgactgaaagaaga

SEQ ID NO: 1055695 - DNA, 25 bp, Homo sapien
ctgcccggggcaagccctgatagtc

SEQ ID NO: 1055696 - DNA, 25 bp, Homo sapien
aataaaacccagtaagagcagtgag

SEQ ID NO: 1055697 - DNA, 25 bp, Homo sapien
tctgcccggggcaagccctgatagt

SEQ ID NO: 1055698 - DNA, 25 bp, Homo sapien
ccaaaataggctgcgaacacgtaga

SEQ ID NO: 1055699 - DNA, 25 bp, Homo sapien
gacagcccaaaataggctgcgaaca

SEQ ID NO: 1055700 - DNA, 25 bp, Homo sapien
taggctgcgaacacgtagatgtgca

SEQ ID NO: 1055701 - DNA, 25 bp, Homo sapien
cacagacagcccaaaataggctgcg

SEQ ID NO: 1055702 - DNA, 25 bp, Homo sapien
tatcgttgctgtctgatctttatcc

SEQ ID NO: 1055703 - DNA, 25 bp, Homo sapien
gacaaactgggtatcgttgctgtct

SEQ ID NO: 1055704 - DNA, 25 bp, Homo sapien
tgatctttatcctccgttccctcgg

SEQ ID NO: 1055705 - DNA, 25 bp, Homo sapien
aactgggtatcgttgctgtctgatc

SEQ ID NO: 1055706 - DNA, 25 bp, Homo sapien
tggccagaacatccacaagaagagg

SEQ ID NO: 1055707 - DNA, 25 bp, Homo sapien
caaggatgaccctgagatggctgtc

SEQ ID NO: 1055708 - DNA, 25 bp, Homo sapien
cagagcagagttgaaacttggccag

SEQ ID NO: 1055709 - DNA, 25 bp, Homo sapien
taggtgttgaacacggcattcttcc

SEQ ID NO: 1055710 - DNA, 25 bp, Homo sapien
cgacggagatcagcccagccacaag

SEQ ID NO: 1055711 - DNA, 25 bp, Homo sapien
gatcaggtgacacgaggtacccaca

SEQ ID NO: 1055712 - DNA, 25 bp, Homo sapien
caggtacttggctcccccgacggag

SEQ ID NO: 1055713 - DNA, 25 bp, Homo sapien
ccatggcaagccacggagaagggat

SEQ ID NO: 1055714 - DNA, 25 bp, Homo sapien
aatatccagactcctcaactagccc

SEQ ID NO: 1055715 - DNA, 25 bp, Homo sapien
tctgggtccaccatgctcctgggtg

SEQ ID NO: 1055716 - DNA, 25 bp, Homo sapien
ctcaactagcccaggaagtgtgcct

SEQ ID NO: 1055717 - DNA, 25 bp, Homo sapien
ggtggaccctatgcctttagaatgt

SEQ ID NO: 1055718 - DNA, 25 bp, Homo sapien
cagacccagcaagctgaagttgtag

SEQ ID NO: 1055719 - DNA, 25 bp, Homo sapien
caagcaccagcagcacaatgtagat

SEQ ID NO: 1055720 - DNA, 25 bp, Homo sapien
ttgccggctccgacggtatcaagca

SEQ ID NO: 1055721 - DNA, 25 bp, Homo sapien
gaatccccagcactcggttacaaca

SEQ ID NO: 1055722 - DNA, 25 bp, Homo sapien
gcaaagctctgcatcacgacctgaa

SEQ ID NO: 1055723 - DNA, 25 bp, Homo sapien
cacagtctcaattggcttgggccta

SEQ ID NO: 1055724 - DNA, 25 bp, Homo sapien
ccagctagtacgcagtgggagcacg

SEQ ID NO: 1055725 - DNA, 25 bp, Homo sapien
cctcagggatgggttgtgcttagca

SEQ ID NO: 1055726 - DNA, 25 bp, Homo sapien
ctggaacccatcacagaggcgcctt

SEQ ID NO: 1055727 - DNA, 25 bp, Homo sapien
gaaggcatccaagaaccggtaggaa

SEQ ID NO: 1055728 - DNA, 25 bp, Homo sapien
cacagttattaagacagtggcagac

SEQ ID NO: 1055729 - DNA, 25 bp, Homo sapien
tacaggcatgtgagtaggaccttgc

SEQ ID NO: 1055730 - DNA, 25 bp, Homo sapien
cctctggctgtaagcctgtaaagtc

SEQ ID NO: 1055731 - DNA, 25 bp, Homo sapien
aattcattctatgggagattccctc

SEQ ID NO: 1055732 - DNA, 25 bp, Homo sapien
gatgtgggtgagacttaaggtacaa

SEQ ID NO: 1055733 - DNA, 25 bp, Homo sapien
cagtggaacaggcataggacagaca

SEQ ID NO: 1055734 - DNA, 25 bp, Homo sapien
gagctatcacgatggccaagctgag

SEQ ID NO: 1055735 - DNA, 25 bp, Homo sapien
gagagctatcacgatggccaagctg

SEQ ID NO: 1055736 - DNA, 25 bp, Homo sapien
agagctatcacgatggccaagctga

SEQ ID NO: 1055737 - DNA, 25 bp, Homo sapien
tgagagctatcacgatggccaagct

SEQ ID NO: 1055738 - DNA, 25 bp, Homo sapien
ggctaattagcaactcccctagatt

SEQ ID NO: 1055739 - DNA, 25 bp, Homo sapien
tagctgggatccaacaccacgcctg

SEQ ID NO: 1055740 - DNA, 25 bp, Homo sapien
tcccctttgttgaaagatctccagt

SEQ ID NO: 1055741 - DNA, 25 bp, Homo sapien
cacctggcatataagtaaaactggc

SEQ ID NO: 1055742 - DNA, 25 bp, Homo sapien
agtggtgcaacctcgactcactata

SEQ ID NO: 1055743 - DNA, 25 bp, Homo sapien
ctggggtcaagccattcccctactt

SEQ ID NO: 1055744 - DNA, 25 bp, Homo sapien
gggtcaagccattcccctacttcag

SEQ ID NO: 1055745 - DNA, 25 bp, Homo sapien
gtggtgcaacctcgactcactataa

SEQ ID NO: 1055746 - DNA, 25 bp, Homo sapien
gaacctcagcttaagattccacttg

SEQ ID NO: 1055747 - DNA, 25 bp, Homo sapien
gacgcccttccccagatggagtaaa

SEQ ID NO: 1055748 - DNA, 25 bp, Homo sapien
tacatgagagccacagatctgacgc

SEQ ID NO: 1055749 - DNA, 25 bp, Homo sapien
gggccccacgaaagctgatccatgt

SEQ ID NO: 1055750 - DNA, 25 bp, Homo sapien
tccagaaaacttggtcatcaaaata

SEQ ID NO: 1055751 - DNA, 25 bp, Homo sapien
cctcatgaggtgctttccatatttt

SEQ ID NO: 1055752 - DNA, 25 bp, Homo sapien
tagcctcatgaggtgctttccatat

SEQ ID NO: 1055753 - DNA, 25 bp, Homo sapien
cttccagaaaacttggtcatcaaaa

SEQ ID NO: 1055754 - DNA, 25 bp, Homo sapien
aacacttgcaggggataaagagaga

SEQ ID NO: 1055755 - DNA, 25 bp, Homo sapien
cacttgcaggggataaagagagatt

SEQ ID NO: 1055756 - DNA, 25 bp, Homo sapien
gctaaataggcaagaacacttgcag

SEQ ID NO: 1055757 - DNA, 25 bp, Homo sapien
taaataggcaagaacacttgcaggg

SEQ ID NO: 1055758 - DNA, 25 bp, Homo sapien
aactgtaggcttgcaatatgatagc

SEQ ID NO: 1055759 - DNA, 25 bp, Homo sapien
cattcccttgtggttggctaaatcc

SEQ ID NO: 1055760 - DNA, 25 bp, Homo sapien
ggaaaagcacctagcacaaaatcag

SEQ ID NO: 1055761 - DNA, 25 bp, Homo sapien
gcacctgggcgacatacttactttt

SEQ ID NO: 1055762 - DNA, 25 bp, Homo sapien
cccaggggttcaagtaattctgcct

SEQ ID NO: 1055763 - DNA, 25 bp, Homo sapien
gggattacaggtatgcaccaccaca

SEQ ID NO: 1055764 - DNA, 25 bp, Homo sapien
gattacaggtatgcaccaccacacc

SEQ ID NO: 1055765 - DNA, 25 bp, Homo sapien
attctgcctcagcttcccaagtagc

SEQ ID NO: 1055766 - DNA, 25 bp, Homo sapien
ggcagtggtagaacccagatctgtc

SEQ ID NO: 1055767 - DNA, 25 bp, Homo sapien
ggaaatcagggtagctaacacttgt

SEQ ID NO: 1055768 - DNA, 25 bp, Homo sapien
cctgccagtgggtgaactaggacta

SEQ ID NO: 1055769 - DNA, 25 bp, Homo sapien
tttaaaccctaacaacacagtgaga

SEQ ID NO: 1055770 - DNA, 25 bp, Homo sapien
gcctacatgccggtctttcaagtgt

SEQ ID NO: 1055771 - DNA, 25 bp, Homo sapien
catgccggtctttcaagtgttcgaa

SEQ ID NO: 1055772 - DNA, 25 bp, Homo sapien
aattctgcctcaaccaccggagtag

SEQ ID NO: 1055773 - DNA, 25 bp, Homo sapien
cccggcctacatgccggtctttcaa

SEQ ID NO: 1055774 - DNA, 25 bp, Homo sapien
gattttggcttgatctcttgaaaca

SEQ ID NO: 1055775 - DNA, 25 bp, Homo sapien
agatgaacccacatactgattttgg

SEQ ID NO: 1055776 - DNA, 25 bp, Homo sapien
aatgtctcattacaaagaccttaga

SEQ ID NO: 1055777 - DNA, 25 bp, Homo sapien
gcttgatctcttgaaacagcctaaa

SEQ ID NO: 1055778 - DNA, 25 bp, Homo sapien
aaaatccaacagccaaatgaggaaa

SEQ ID NO: 1055779 - DNA, 25 bp, Homo sapien
taaaatccaacagccaaatgaggaa

SEQ ID NO: 1055780 - DNA, 25 bp, Homo sapien
ttaaaatccaacagccaaatgagga

SEQ ID NO: 1055781 - DNA, 25 bp, Homo sapien
cgtttctcacgtacaaatgcaggca

SEQ ID NO: 1055782 - DNA, 25 bp, Homo sapien
atgagcgtttctcacgtacaaatgc

SEQ ID NO: 1055783 - DNA, 25 bp, Homo sapien
gcgtttctcacgtacaaatgcaggc

SEQ ID NO: 1055784 - DNA, 25 bp, Homo sapien
gagcgtttctcacgtacaaatgcag

SEQ ID NO: 1055785 - DNA, 25 bp, Homo sapien
ctgactccagtgcctgcgcgaacat

SEQ ID NO: 1055786 - DNA, 25 bp, Homo sapien
tgactccagtgcctgcgcgaacatt

SEQ ID NO: 1055787 - DNA, 25 bp, Homo sapien
tctgactccagtgcctgcgcgaaca

SEQ ID NO: 1055788 - DNA, 25 bp, Homo sapien
gagcacactgttatctgttaaaaaa

SEQ ID NO: 1055789 - DNA, 25 bp, Homo sapien
tctgaagactctagtggtataatct

SEQ ID NO: 1055790 - DNA, 25 bp, Homo sapien
gattgcagtcatgtcaaagcagttt

SEQ ID NO: 1055791 - DNA, 25 bp, Homo sapien
gatcctggtgaaactatcctagcca

SEQ ID NO: 1055792 - DNA, 25 bp, Homo sapien
ctgccacgttcacaaagctgttaat

SEQ ID NO: 1055793 - DNA, 25 bp, Homo sapien
tgccacgttcacaaagctgttaatt

SEQ ID NO: 1055794 - DNA, 25 bp, Homo sapien
tgtcgtatcagccttcagaagagca

SEQ ID NO: 1055795 - DNA, 25 bp, Homo sapien
gcatttaaacactgccacacgctgt

SEQ ID NO: 1055796 - DNA, 25 bp, Homo sapien
tcaatggaagcctgaatcacaagca

SEQ ID NO: 1055797 - DNA, 25 bp, Homo sapien
tatgcaatcagtgcacagagagctg

SEQ ID NO: 1055798 - DNA, 25 bp, Homo sapien
gaccaattgtctgttaagaagtgcc

SEQ ID NO: 1055799 - DNA, 25 bp, Homo sapien
caagatttcccatagtaacaaccat

SEQ ID NO: 1055800 - DNA, 25 bp, Homo sapien
catatagctatgttcagtgactaaa

SEQ ID NO: 1055801 - DNA, 25 bp, Homo sapien
gtttcttaagcaatggagttcattt

SEQ ID NO: 1055802 - DNA, 25 bp, Homo sapien
aagagtactagccaggaatattata

SEQ ID NO: 1055803 - DNA, 25 bp, Homo sapien
gattaaaaatcagttgcggccaggt

SEQ ID NO: 1055804 - DNA, 25 bp, Homo sapien
gccaggaatattataggtattgggt

SEQ ID NO: 1055805 - DNA, 25 bp, Homo sapien
cattctagtctaggcaacaggtgag

SEQ ID NO: 1055806 - DNA, 25 bp, Homo sapien
ggaagatcgcctcgcttgagaacca

SEQ ID NO: 1055807 - DNA, 25 bp, Homo sapien
ggtgctgtcccgtgcttcgcaggtt

SEQ ID NO: 1055808 - DNA, 25 bp, Homo sapien
atgcaagtagcagccccagtgaacc

SEQ ID NO: 1055809 - DNA, 25 bp, Homo sapien
cactactgaggttttgggccggcta

SEQ ID NO: 1055810 - DNA, 25 bp, Homo sapien
tcgtacccgtcttgagtgaggtgac

SEQ ID NO: 1055811 - DNA, 25 bp, Homo sapien
ttcacagctggacgtcgggagtgct

SEQ ID NO: 1055812 - DNA, 25 bp, Homo sapien
tgagcgttctaaaggaaggcgtccg

SEQ ID NO: 1055813 - DNA, 25 bp, Homo sapien
tgggttcaggtttgcggccacacag

SEQ ID NO: 1055814 - DNA, 25 bp, Homo sapien
ccaccacaacaacgcgtctgcgcat

SEQ ID NO: 1055815 - DNA, 25 bp, Homo sapien
catccacccggctcagtcgcgcatg

SEQ ID NO: 1055816 - DNA, 25 bp, Homo sapien
gcgccgggtccggagggagccacgc

SEQ ID NO: 1055817 - DNA, 25 bp, Homo sapien
gctcagtcgcgcatgcggacacggg

SEQ ID NO: 1055818 - DNA, 25 bp, Homo sapien
caagaaaacaaaacggccacagcct

SEQ ID NO: 1055819 - DNA, 25 bp, Homo sapien
ccccgtcgtgcagtggttccggagc

SEQ ID NO: 1055820 - DNA, 25 bp, Homo sapien
agtggttccggagcccggtgtcgcg

SEQ ID NO: 1055821 - DNA, 25 bp, Homo sapien
ccgtcgtgcagtggttccggagccc

SEQ ID NO: 1055822 - DNA, 25 bp, Homo sapien
cagccccgtcgtgcagtggttccgg

SEQ ID NO: 1055823 - DNA, 25 bp, Homo sapien
gagaggtccgcggcggctcagcccg

SEQ ID NO: 1055824 - DNA, 25 bp, Homo sapien
gagaggagaggtccgcggcggctca

SEQ ID NO: 1055825 - DNA, 25 bp, Homo sapien
gaggagaggtccgcggcggctcagc

SEQ ID NO: 1055826 - DNA, 25 bp, Homo sapien
tggcgccgccggacccaggagagga

SEQ ID NO: 1055827 - DNA, 25 bp, Homo sapien
cggggcacccctcgctgagggagct

SEQ ID NO: 1055828 - DNA, 25 bp, Homo sapien
ggagctggccgggtcacgctccttt

SEQ ID NO: 1055829 - DNA, 25 bp, Homo sapien
cctctccgtcttggcggggtctgga

SEQ ID NO: 1055830 - DNA, 25 bp, Homo sapien
acgctcctttctcggggcttcggct

SEQ ID NO: 1055831 - DNA, 25 bp, Homo sapien
cccagtcaatgcattctgagcatct

SEQ ID NO: 1055832 - DNA, 25 bp, Homo sapien
catctcaagccctctagaaatccag

SEQ ID NO: 1055833 - DNA, 25 bp, Homo sapien
gcaatggaagcaatagtattgcgct

SEQ ID NO: 1055834 - DNA, 25 bp, Homo sapien
aagcaatagtattgcgcttttcccc

SEQ ID NO: 1055835 - DNA, 25 bp, Homo sapien
tccaatcttagtgtatgtgttgcca

SEQ ID NO: 1055836 - DNA, 25 bp, Homo sapien
tattccaatcttagtgtatgtgttg

SEQ ID NO: 1055837 - DNA, 25 bp, Homo sapien
caatcttagtgtatgtgttgccaaa

SEQ ID NO: 1055838 - DNA, 25 bp, Homo sapien
attattccaatcttagtgtatgtgt

SEQ ID NO: 1055839 - DNA, 25 bp, Homo sapien
ggtgggataaataacagctgcatct

SEQ ID NO: 1055840 - DNA, 25 bp, Homo sapien
gggataaataacagctgcatctatg

SEQ ID NO: 1055841 - DNA, 25 bp, Homo sapien
atctatgataatccaccagcctgta

SEQ ID NO: 1055842 - DNA, 25 bp, Homo sapien
cagctgcatctatgataatccacca

SEQ ID NO: 1055843 - DNA, 25 bp, Homo sapien
cacaggcatggtatgagtggttgaa

SEQ ID NO: 1055844 - DNA, 25 bp, Homo sapien
tgctataacaccacaggcatggtat

SEQ ID NO: 1055845 - DNA, 25 bp, Homo sapien
ggaaggctatggttgctataacacc

SEQ ID NO: 1055846 - DNA, 25 bp, Homo sapien
catggtatgagtggttgaaatcttt

SEQ ID NO: 1055847 - DNA, 25 bp, Homo sapien
ctctgggccaccacaacttgtcttt

SEQ ID NO: 1055848 - DNA, 25 bp, Homo sapien
ctatagaggatgcctctcatgcttg

SEQ ID NO: 1055849 - DNA, 25 bp, Homo sapien
tatagaggatgcctctcatgcttga

SEQ ID NO: 1055850 - DNA, 25 bp, Homo sapien
gttctgggcactcttagcggacaga

SEQ ID NO: 1055851 - DNA, 25 bp, Homo sapien
gcatcccatgtagggctgccttctt

SEQ ID NO: 1055852 - DNA, 25 bp, Homo sapien
agcggacagagctgccacactgctt

SEQ ID NO: 1055853 - DNA, 25 bp, Homo sapien
ccatcccacgctccgctgcatggat

SEQ ID NO: 1055854 - DNA, 25 bp, Homo sapien
tgacccagacaaccttcactgtaac

SEQ ID NO: 1055855 - DNA, 25 bp, Homo sapien
gtaactatcacctcggacttgtcca

SEQ ID NO: 1055856 - DNA, 25 bp, Homo sapien
cggacttgtccattcgatactgcat

SEQ ID NO: 1055857 - DNA, 25 bp, Homo sapien
ccttcactgtaactatcacctcgga

SEQ ID NO: 1055858 - DNA, 25 bp, Homo sapien
taagtgcatatacttactttcccca

SEQ ID NO: 1055859 - DNA, 25 bp, Homo sapien
tgagaaaacctatactcaaccttcc

SEQ ID NO: 1055860 - DNA, 25 bp, Homo sapien
ctgtttcaccatatttagaggctca

SEQ ID NO: 1055861 - DNA, 25 bp, Homo sapien
tccccaactgcctacactgagaaaa

SEQ ID NO: 1055862 - DNA, 25 bp, Homo sapien
cagtgtacctgttggcctttttctt

SEQ ID NO: 1055863 - DNA, 25 bp, Homo sapien
tcagtgtacctgttggcctttttct

SEQ ID NO: 1055864 - DNA, 25 bp, Homo sapien
ttcatcagtgtacctgttggccttt

SEQ ID NO: 1055865 - DNA, 25 bp, Homo sapien
catcagtgtacctgttggccttttt

SEQ ID NO: 1055866 - DNA, 25 bp, Homo sapien
agaaataatattttaccagaattct

SEQ ID NO: 1055867 - DNA, 25 bp, Homo sapien
tcaaagaaataatattttaccagaa

SEQ ID NO: 1055868 - DNA, 25 bp, Homo sapien
caaagaaataatattttaccagaat

SEQ ID NO: 1055869 - DNA, 25 bp, Homo sapien
cttcaaagaaataatattttaccag

SEQ ID NO: 1055870 - DNA, 25 bp, Homo sapien
tagcaacataacctccaaaaagaat

SEQ ID NO: 1055871 - DNA, 25 bp, Homo sapien
ctttagcaacataacctccaaaaag

SEQ ID NO: 1055872 - DNA, 25 bp, Homo sapien
caacataacctccaaaaagaatcca

SEQ ID NO: 1055873 - DNA, 25 bp, Homo sapien
gcaacataacctccaaaaagaatcc

SEQ ID NO: 1055874 - DNA, 25 bp, Homo sapien
gggtcccggatataaatgcatcgct

SEQ ID NO: 1055875 - DNA, 25 bp, Homo sapien
aatgcaaaattccagtattccactg

SEQ ID NO: 1055876 - DNA, 25 bp, Homo sapien
tagtagttggcccaactataggaaa

SEQ ID NO: 1055877 - DNA, 25 bp, Homo sapien
caaagcttgctaactagctagataa

SEQ ID NO: 1055878 - DNA, 25 bp, Homo sapien
gaccacacatgcacgtcaccatagt

SEQ ID NO: 1055879 - DNA, 25 bp, Homo sapien
catgcacgtcaccatagtcggctaa

SEQ ID NO: 1055880 - DNA, 25 bp, Homo sapien
caccatagtcggctaaatatttatt

SEQ ID NO: 1055881 - DNA, 25 bp, Homo sapien
gcacgtcaccatagtcggctaaata

SEQ ID NO: 1055882 - DNA, 25 bp, Homo sapien
aatacagcaattccagggtatacta

SEQ ID NO: 1055883 - DNA, 25 bp, Homo sapien
aaaatacagcaattccagggtatac

SEQ ID NO: 1055884 - DNA, 25 bp, Homo sapien
acagcaattccagggtatactatgt

SEQ ID NO: 1055885 - DNA, 25 bp, Homo sapien
gcaattccagggtatactatgtctt

SEQ ID NO: 1055886 - DNA, 25 bp, Homo sapien
ctctacgatatcaaggacagaagaa

SEQ ID NO: 1055887 - DNA, 25 bp, Homo sapien
taggcaggctttcacttaaagcaac

SEQ ID NO: 1055888 - DNA, 25 bp, Homo sapien
tgggcttttcctccacacctcaaat

SEQ ID NO: 1055889 - DNA, 25 bp, Homo sapien
agattactgataaaagccttgaggt

SEQ ID NO: 1055890 - DNA, 25 bp, Homo sapien
ctggttggaggaacagcatgggtag

SEQ ID NO: 1055891 - DNA, 25 bp, Homo sapien
ttgtggggtttttcggccagtgatg

SEQ ID NO: 1055892 - DNA, 25 bp, Homo sapien
tgtggggtttttcggccagtgatgg

SEQ ID NO: 1055893 - DNA, 25 bp, Homo sapien
aaaagaactcctgatgcaggctggg

SEQ ID NO: 1055894 - DNA, 25 bp, Homo sapien
gaaacacagaattcggtcaccctga

SEQ ID NO: 1055895 - DNA, 25 bp, Homo sapien
caaggtataacccaaagaggctgtg

SEQ ID NO: 1055896 - DNA, 25 bp, Homo sapien
gcccaggagactagtatgacaggaa

SEQ ID NO: 1055897 - DNA, 25 bp, Homo sapien
tcactgccataagtcttcagtgcgg

SEQ ID NO: 1055898 - DNA, 25 bp, Homo sapien
tgccataagtcttcagtgcggccaa

SEQ ID NO: 1055899 - DNA, 25 bp, Homo sapien
actgccataagtcttcagtgcggcc

SEQ ID NO: 1055900 - DNA, 25 bp, Homo sapien
cataagtcttcagtgcggccaaact

SEQ ID NO: 1055901 - DNA, 25 bp, Homo sapien
atggcattacaaaaggttgggagtg

SEQ ID NO: 1055902 - DNA, 25 bp, Homo sapien
cacaactttaagctgagactacact

SEQ ID NO: 1055903 - DNA, 25 bp, Homo sapien
gttaatcaagtgcataccacaatag

SEQ ID NO: 1055904 - DNA, 25 bp, Homo sapien
caaacaaacccatgcagggctgttg

SEQ ID NO: 1055905 - DNA, 25 bp, Homo sapien
caccagaaccacgtgtcatggctga

SEQ ID NO: 1055906 - DNA, 25 bp, Homo sapien
agaaattgtcccctgtctaagactg

SEQ ID NO: 1055907 - DNA, 25 bp, Homo sapien
ccttgggagaccctcaaaagccagt

SEQ ID NO: 1055908 - DNA, 25 bp, Homo sapien
gaatgagaggcacagcggaagacct

SEQ ID NO: 1055909 - DNA, 25 bp, Homo sapien
aagagtgtatcccatcttgcagagg

SEQ ID NO: 1055910 - DNA, 25 bp, Homo sapien
tcaggagttcatgtgggatgacagc

SEQ ID NO: 1055911 - DNA, 25 bp, Homo sapien
ggagagtcttgatcaccaggcaata

SEQ ID NO: 1055912 - DNA, 25 bp, Homo sapien
aatcacccagcaaatattccgaagg

SEQ ID NO: 1055913 - DNA, 25 bp, Homo sapien
tggcattccctgagcatattctgaa

SEQ ID NO: 1055914 - DNA, 25 bp, Homo sapien
taaagcatgctactcagttaactct

SEQ ID NO: 1055915 - DNA, 25 bp, Homo sapien
tacttagtccttgtgggaatcatgc

SEQ ID NO: 1055916 - DNA, 25 bp, Homo sapien
cagcagttttacaaggtggctggca

SEQ ID NO: 1055917 - DNA, 25 bp, Homo sapien
aaatgtttagtttcattaggatgat

SEQ ID NO: 1055918 - DNA, 25 bp, Homo sapien
agtttcattaggatgatgctatcaa

SEQ ID NO: 1055919 - DNA, 25 bp, Homo sapien
taaatgtttagtttcattaggatga

SEQ ID NO: 1055920 - DNA, 25 bp, Homo sapien
ttagtttcattaggatgatgctatc

SEQ ID NO: 1055921 - DNA, 25 bp, Homo sapien
caatctcaactgtctgccaaatgga

SEQ ID NO: 1055922 - DNA, 25 bp, Homo sapien
gccaaaatcagtatgtgggttcatc

SEQ ID NO: 1055923 - DNA, 25 bp, Homo sapien
ttaggctgtttcaagagatcaagcc

SEQ ID NO: 1055924 - DNA, 25 bp, Homo sapien
tcatatggcagtagtgagtcctctg

SEQ ID NO: 1055925 - DNA, 25 bp, Homo sapien
cacgatgtgaagtaccagagagata

SEQ ID NO: 1055926 - DNA, 25 bp, Homo sapien
atcctccgaaggtttatgaaaatgc

SEQ ID NO: 1055927 - DNA, 25 bp, Homo sapien
gaatttcatagaactgactgccagg

SEQ ID NO: 1055928 - DNA, 25 bp, Homo sapien
tgctaattcattccactacgtgtat

SEQ ID NO: 1055929 - DNA, 25 bp, Homo sapien
ggcgacctagagacgactagtgctc

SEQ ID NO: 1055930 - DNA, 25 bp, Homo sapien
gccggcgacctagagacgactagtg

SEQ ID NO: 1055931 - DNA, 25 bp, Homo sapien
gggagggggaattgagctgaagcaa

SEQ ID NO: 1055932 - DNA, 25 bp, Homo sapien
tagccggcgacctagagacgactag

SEQ ID NO: 1055933 - DNA, 25 bp, Homo sapien
gagggtcccgtgttacattgtagca

SEQ ID NO: 1055934 - DNA, 25 bp, Homo sapien
cataaagttcaaacagctcagcagc

SEQ ID NO: 1055935 - DNA, 25 bp, Homo sapien
tagcaaagggacataaagttcaaac

SEQ ID NO: 1055936 - DNA, 25 bp, Homo sapien
gctgctgagggtcccgtgttacatt

SEQ ID NO: 1055937 - DNA, 25 bp, Homo sapien
cttcttctaagtggatggatctttc

SEQ ID NO: 1055938 - DNA, 25 bp, Homo sapien
aaaaggagtagattttcgaaggctg

SEQ ID NO: 1055939 - DNA, 25 bp, Homo sapien
tggtccaggtcgtgtccacttctga

SEQ ID NO: 1055940 - DNA, 25 bp, Homo sapien
cagcaaatcctgatcgttccagaat

SEQ ID NO: 1055941 - DNA, 25 bp, Homo sapien
gactaccacatgaacctgaggcact

SEQ ID NO: 1055942 - DNA, 25 bp, Homo sapien
gaggatgccgacactcactgctctt

SEQ ID NO: 1055943 - DNA, 25 bp, Homo sapien
gaacaccagtctcgtggcttcaagt

SEQ ID NO: 1055944 - DNA, 25 bp, Homo sapien
tacgtgttcgcagcctattttgggc

SEQ ID NO: 1055945 - DNA, 25 bp, Homo sapien
tgggataggtcggtcctgaagaaat

SEQ ID NO: 1055946 - DNA, 25 bp, Homo sapien
cattctgggataggtcggtcctgaa

SEQ ID NO: 1055947 - DNA, 25 bp, Homo sapien
tctgggataggtcggtcctgaagaa

SEQ ID NO: 1055948 - DNA, 25 bp, Homo sapien
ttctgggataggtcggtcctgaaga

SEQ ID NO: 1055949 - DNA, 25 bp, Homo sapien
gctgcagccagggaatagtccgtcg

SEQ ID NO: 1055950 - DNA, 25 bp, Homo sapien
cccagtgaccatgaagagtgagggc

SEQ ID NO: 1055951 - DNA, 25 bp, Homo sapien
aataagcagccggaagcagacccgg

SEQ ID NO: 1055952 - DNA, 25 bp, Homo sapien
caaccctctcgctagtccagtggag

SEQ ID NO: 1055953 - DNA, 25 bp, Homo sapien
ccccatgaacatagtcagtaacaac

SEQ ID NO: 1055954 - DNA, 25 bp, Homo sapien
gcgaggcatccccatgaacatagtc

SEQ ID NO: 1055955 - DNA, 25 bp, Homo sapien
ttggcagctttctgcgaggcatccc

SEQ ID NO: 1055956 - DNA, 25 bp, Homo sapien
ccctgccttggcagctttctgcgag

SEQ ID NO: 1055957 - DNA, 25 bp, Homo sapien
tcgtgatagttgaaatagcaaagcc

SEQ ID NO: 1055958 - DNA, 25 bp, Homo sapien
gatgcccacatcgtgatagttgaaa

SEQ ID NO: 1055959 - DNA, 25 bp, Homo sapien
tttgcagatgcccacatcgtgatag

SEQ ID NO: 1055960 - DNA, 25 bp, Homo sapien
tagcaaagcccagcaaaggttaaag

SEQ ID NO: 1055961 - DNA, 25 bp, Homo sapien
ggcaaccccattaactcaccagaat

SEQ ID NO: 1055962 - DNA, 25 bp, Homo sapien
tcttccttattgtgagcttaatggc

SEQ ID NO: 1055963 - DNA, 25 bp, Homo sapien
tgtgattaagagaagaaggctgtcc

SEQ ID NO: 1055964 - DNA, 25 bp, Homo sapien
gtcttataagaagctgggaggcaac

SEQ ID NO: 1055965 - DNA, 25 bp, Homo sapien
ccaaggcaaatatggaagtttgatc

SEQ ID NO: 1055966 - DNA, 25 bp, Homo sapien
tattcccaaggcaaatatggaagtt

SEQ ID NO: 1055967 - DNA, 25 bp, Homo sapien
ttcccaaggcaaatatggaagtttg

SEQ ID NO: 1055968 - DNA, 25 bp, Homo sapien
tcccaaggcaaatatggaagtttga

SEQ ID NO: 1055969 - DNA, 25 bp, Homo sapien
tcaacttggcgcagttggtggtgat

SEQ ID NO: 1055970 - DNA, 25 bp, Homo sapien
tggggaaggtcaacttggcgcagtt

SEQ ID NO: 1055971 - DNA, 25 bp, Homo sapien
gaaggtcaacttggcgcagttggtg

SEQ ID NO: 1055972 - DNA, 25 bp, Homo sapien
gtcaacttggcgcagttggtggtga

SEQ ID NO: 1055973 - DNA, 25 bp, Homo sapien
aacctcttcatgctggcgcttggtg

SEQ ID NO: 1055974 - DNA, 25 bp, Homo sapien
agcagtgtggccttcaacctcttca

SEQ ID NO: 1055975 - DNA, 25 bp, Homo sapien
cctcttcatgctggcgcttggtgtg

SEQ ID NO: 1055976 - DNA, 25 bp, Homo sapien
gcagtgtggccttcaacctcttcat

SEQ ID NO: 1055977 - DNA, 25 bp, Homo sapien
gctgtcagaagaagtgcaaagagtt

SEQ ID NO: 1055978 - DNA, 25 bp, Homo sapien
tctggcagaccctgggtgtgtgtac

SEQ ID NO: 1055979 - DNA, 25 bp, Homo sapien
aagagttgaatccttcctaatgccc

SEQ ID NO: 1055980 - DNA, 25 bp, Homo sapien
gaaatgtcagtgtcctcccttgtcc

SEQ ID NO: 1055981 - DNA, 25 bp, Homo sapien
aaaaggagtagattttcgaaggctg

SEQ ID NO: 1055982 - DNA, 25 bp, Homo sapien
tggtccaggtcgtgtccacttctga

SEQ ID NO: 1055983 - DNA, 25 bp, Homo sapien
cttcttctaagtggatggatctttc

SEQ ID NO: 1055984 - DNA, 25 bp, Homo sapien
cagcaaatcctgatcgttccagaat

SEQ ID NO: 1055985 - DNA, 25 bp, Homo sapien
gactaccacatgaacctgaggcact

SEQ ID NO: 1055986 - DNA, 25 bp, Homo sapien
gaggatgccgacactcactgctctt

SEQ ID NO: 1055987 - DNA, 25 bp, Homo sapien
gaacaccagtctcgtggcttcaagt

SEQ ID NO: 1055988 - DNA, 25 bp, Homo sapien
tacgtgttcgcagcctattttgggc

SEQ ID NO: 1055989 - DNA, 25 bp, Homo sapien
cattctgggataggtcggtcctgaa

SEQ ID NO: 1055990 - DNA, 25 bp, Homo sapien
tgggataggtcggtcctgaagaaat

SEQ ID NO: 1055991 - DNA, 25 bp, Homo sapien
tctgggataggtcggtcctgaagaa

SEQ ID NO: 1055992 - DNA, 25 bp, Homo sapien
ttctgggataggtcggtcctgaaga

SEQ ID NO: 1055993 - DNA, 25 bp, Homo sapien
gctgcagccagggaatagtccgtcg

SEQ ID NO: 1055994 - DNA, 25 bp, Homo sapien
aataagcagccggaagcagacccgg

SEQ ID NO: 1055995 - DNA, 25 bp, Homo sapien
caaccctctcgctagtccagtggag

SEQ ID NO: 1055996 - DNA, 25 bp, Homo sapien
cccagtgaccatgaagagtgagggc

SEQ ID NO: 1055997 - DNA, 25 bp, Homo sapien
ccccatgaacatagtcagtaacaac

SEQ ID NO: 1055998 - DNA, 25 bp, Homo sapien
gcgaggcatccccatgaacatagtc

SEQ ID NO: 1055999 - DNA, 25 bp, Homo sapien
ttggcagctttctgcgaggcatccc

SEQ ID NO: 1056000 - DNA, 25 bp, Homo sapien
ccctgccttggcagctttctgcgag

SEQ ID NO: 1056001 - DNA, 25 bp, Homo sapien
tcgtgatagttgaaatagcaaagcc

SEQ ID NO: 1056002 - DNA, 25 bp, Homo sapien
tagcaaagcccagcaaaggttaaag

SEQ ID NO: 1056003 - DNA, 25 bp, Homo sapien
gatgcccacatcgtgatagttgaaa

SEQ ID NO: 1056004 - DNA, 25 bp, Homo sapien
tttgcagatgcccacatcgtgatag

SEQ ID NO: 1056005 - DNA, 25 bp, Homo sapien
ggcaaccccattaactcaccagaat

SEQ ID NO: 1056006 - DNA, 25 bp, Homo sapien
gtcttataagaagctgggaggcaac

SEQ ID NO: 1056007 - DNA, 25 bp, Homo sapien
tgtgattaagagaagaaggctgtcc

SEQ ID NO: 1056008 - DNA, 25 bp, Homo sapien
tcttccttattgtgagcttaatggc

SEQ ID NO: 1056009 - DNA, 25 bp, Homo sapien
ccaaggcaaatatggaagtttgatc

SEQ ID NO: 1056010 - DNA, 25 bp, Homo sapien
tattcccaaggcaaatatggaagtt

SEQ ID NO: 1056011 - DNA, 25 bp, Homo sapien
tcccaaggcaaatatggaagtttga

SEQ ID NO: 1056012 - DNA, 25 bp, Homo sapien
ttcccaaggcaaatatggaagtttg

SEQ ID NO: 1056013 - DNA, 25 bp, Homo sapien
gtcaacttggcgcagttggtggtga

SEQ ID NO: 1056014 - DNA, 25 bp, Homo sapien
tcaacttggcgcagttggtggtgat

SEQ ID NO: 1056015 - DNA, 25 bp, Homo sapien
gaaggtcaacttggcgcagttggtg

SEQ ID NO: 1056016 - DNA, 25 bp, Homo sapien
tggggaaggtcaacttggcgcagtt

SEQ ID NO: 1056017 - DNA, 25 bp, Homo sapien
cctcttcatgctggcgcttggtgtg

SEQ ID NO: 1056018 - DNA, 25 bp, Homo sapien
aacctcttcatgctggcgcttggtg

SEQ ID NO: 1056019 - DNA, 25 bp, Homo sapien
agcagtgtggccttcaacctcttca

SEQ ID NO: 1056020 - DNA, 25 bp, Homo sapien
gcagtgtggccttcaacctcttcat

SEQ ID NO: 1056021 - DNA, 25 bp, Homo sapien
gaaatgtcagtgtcctcccttgtcc

SEQ ID NO: 1056022 - DNA, 25 bp, Homo sapien
aagagttgaatccttcctaatgccc

SEQ ID NO: 1056023 - DNA, 25 bp, Homo sapien
tctggcagaccctgggtgtgtgtac

SEQ ID NO: 1056024 - DNA, 25 bp, Homo sapien
gctgtcagaagaagtgcaaagagtt

SEQ ID NO: 1056025 - DNA, 25 bp, Homo sapien
taggctgctggagtatagtgatgtg

SEQ ID NO: 1056026 - DNA, 25 bp, Homo sapien
aggctgctggagtatagtgatgtga

SEQ ID NO: 1056027 - DNA, 25 bp, Homo sapien
taaccttctaggcacaagccatcct

SEQ ID NO: 1056028 - DNA, 25 bp, Homo sapien
agccttaaccttctaggcacaagcc

SEQ ID NO: 1056029 - DNA, 25 bp, Homo sapien
aaggcccgggtttgcggcatgtgcg

SEQ ID NO: 1056030 - DNA, 25 bp, Homo sapien
ggtgtctgcgctgacgtgcgcttca

SEQ ID NO: 1056031 - DNA, 25 bp, Homo sapien
cggcatggcattgtaggctctcgtc

SEQ ID NO: 1056032 - DNA, 25 bp, Homo sapien
caatgtatgaaatcggaaggcccgg

SEQ ID NO: 1056033 - DNA, 25 bp, Homo sapien
tggactctacccctgaggccggtca

SEQ ID NO: 1056034 - DNA, 25 bp, Homo sapien
cgccgtctctcacctcagctgccgc

SEQ ID NO: 1056035 - DNA, 25 bp, Homo sapien
cctgaggccggtcacacagacatgg

SEQ ID NO: 1056036 - DNA, 25 bp, Homo sapien
gtcgggcctggactctacccctgag

SEQ ID NO: 1056037 - DNA, 25 bp, Homo sapien
tgcagtcggcgttccgccgcttcat

SEQ ID NO: 1056038 - DNA, 25 bp, Homo sapien
gccgtaaatgccctcggtgatccgg

SEQ ID NO: 1056039 - DNA, 25 bp, Homo sapien
ctcggtgatccggttccgctttagg

SEQ ID NO: 1056040 - DNA, 25 bp, Homo sapien
gcggagcttactgcagtcggcgttc

SEQ ID NO: 1056041 - DNA, 25 bp, Homo sapien
cccggcccagcggcatggccgggat

SEQ ID NO: 1056042 - DNA, 25 bp, Homo sapien
agtgtttacatcagtcagctgcttg

SEQ ID NO: 1056043 - DNA, 25 bp, Homo sapien
ccagtgtttacatcagtcagctgct

SEQ ID NO: 1056044 - DNA, 25 bp, Homo sapien
tccccagtgtttacatcagtcagct

SEQ ID NO: 1056045 - DNA, 25 bp, Homo sapien
agctgcttgtggaaagcaatcattc

SEQ ID NO: 1056046 - DNA, 25 bp, Homo sapien
cccttatccattttagcagcaacat

SEQ ID NO: 1056047 - DNA, 25 bp, Homo sapien
caacatagagttccacatagaattt

SEQ ID NO: 1056048 - DNA, 25 bp, Homo sapien
cacggggcccagtcatgtccacttc

SEQ ID NO: 1056049 - DNA, 25 bp, Homo sapien
gtcatgtccacttctttatatagaa

SEQ ID NO: 1056050 - DNA, 25 bp, Homo sapien
ccacagtgtccagcctcaatcattt

SEQ ID NO: 1056051 - DNA, 25 bp, Homo sapien
cagtgtccagcctcaatcattttta

SEQ ID NO: 1056052 - DNA, 25 bp, Homo sapien
gagccacagtgtccagcctcaatca

SEQ ID NO: 1056053 - DNA, 25 bp, Homo sapien
gccacagtgtccagcctcaatcatt

SEQ ID NO: 1056054 - DNA, 25 bp, Homo sapien
tgtccttctcataactgggaacatt

SEQ ID NO: 1056055 - DNA, 25 bp, Homo sapien
ctgtccttctcataactgggaacat

SEQ ID NO: 1056056 - DNA, 25 bp, Homo sapien
gtccttctcataactgggaacattc

SEQ ID NO: 1056057 - DNA, 25 bp, Homo sapien
caaatggttgactgtccttctcata

SEQ ID NO: 1056058 - DNA, 25 bp, Homo sapien
atgaagatagagccctcgtaattct

SEQ ID NO: 1056059 - DNA, 25 bp, Homo sapien
agatagagccctcgtaattctcact

SEQ ID NO: 1056060 - DNA, 25 bp, Homo sapien
agccctcgtaattctcactcattaa

SEQ ID NO: 1056061 - DNA, 25 bp, Homo sapien
cgtaattctcactcattaaatccat

SEQ ID NO: 1056062 - DNA, 25 bp, Homo sapien
tctgaactccaggacaaaatctgct

SEQ ID NO: 1056063 - DNA, 25 bp, Homo sapien
aatctgctaggaggacaagtgccca

SEQ ID NO: 1056064 - DNA, 25 bp, Homo sapien
ctggtatctgaaggaatcatagacg

SEQ ID NO: 1056065 - DNA, 25 bp, Homo sapien
gaatcatagacgcttctgatgaaaa

SEQ ID NO: 1056066 - DNA, 25 bp, Homo sapien
gaggagggaatatgccatccccaga

SEQ ID NO: 1056067 - DNA, 25 bp, Homo sapien
tccaatcactaacctagcaacaggg

SEQ ID NO: 1056068 - DNA, 25 bp, Homo sapien
gaacggcctttatggttgcaatggg

SEQ ID NO: 1056069 - DNA, 25 bp, Homo sapien
gaaacacttcaaagcaggactgagc

SEQ ID NO: 1056070 - DNA, 25 bp, Homo sapien
ttgacgtgaatgctacacaaacaaa

SEQ ID NO: 1056071 - DNA, 25 bp, Homo sapien
gcaggcatattatatttgacgtgaa

SEQ ID NO: 1056072 - DNA, 25 bp, Homo sapien
tgtgtgccatacgtactgaacccat

SEQ ID NO: 1056073 - DNA, 25 bp, Homo sapien
aaaaagccactgtatggggatgaac

SEQ ID NO: 1056074 - DNA, 25 bp, Homo sapien
tcagcaagctgtggcttagtccaga

SEQ ID NO: 1056075 - DNA, 25 bp, Homo sapien
caacgagcccaaaaacagtgaagac

SEQ ID NO: 1056076 - DNA, 25 bp, Homo sapien
gagattacattcattcagtgtggct

SEQ ID NO: 1056077 - DNA, 25 bp, Homo sapien
tagatcctctaagaaatcagcaagc

SEQ ID NO: 1056078 - DNA, 25 bp, Homo sapien
gagcaagtctgcactggagggctgg

SEQ ID NO: 1056079 - DNA, 25 bp, Homo sapien
agggcagagcaagtctgcactggag

SEQ ID NO: 1056080 - DNA, 25 bp, Homo sapien
gggaggggtgcagtgtcagccaggg

SEQ ID NO: 1056081 - DNA, 25 bp, Homo sapien
cagggcagagcaagtctgcactgga

SEQ ID NO: 1056082 - DNA, 25 bp, Homo sapien
tgccaaaactcaaaggcgactttga

SEQ ID NO: 1056083 - DNA, 25 bp, Homo sapien
aactcaaaggcgactttgaaggcct

SEQ ID NO: 1056084 - DNA, 25 bp, Homo sapien
caaaactcaaaggcgactttgaagg

SEQ ID NO: 1056085 - DNA, 25 bp, Homo sapien
gccaaaactcaaaggcgactttgaa

SEQ ID NO: 1056086 - DNA, 25 bp, Homo sapien
ggcacaacatgttggagcctcagac

SEQ ID NO: 1056087 - DNA, 25 bp, Homo sapien
cagtttcaggtttccagccgggagg

SEQ ID NO: 1056088 - DNA, 25 bp, Homo sapien
gagacggctgttcccatttttcaga

SEQ ID NO: 1056089 - DNA, 25 bp, Homo sapien
ggtgattagcggtggccaacctcaa

SEQ ID NO: 1056090 - DNA, 25 bp, Homo sapien
ggggtgcagtcttggcgggccccca

SEQ ID NO: 1056091 - DNA, 25 bp, Homo sapien
gtcccctccctcttggctggctttg

SEQ ID NO: 1056092 - DNA, 25 bp, Homo sapien
agctcttcaaggggggggtgcagtc

SEQ ID NO: 1056093 - DNA, 25 bp, Homo sapien
gccgtctcctctaagtccagcaggt

SEQ ID NO: 1056094 - DNA, 25 bp, Homo sapien
gccgcggcacctcgtccatgttggt

SEQ ID NO: 1056095 - DNA, 25 bp, Homo sapien
ccactcaaggcttgtggccgcggca

SEQ ID NO: 1056096 - DNA, 25 bp, Homo sapien
cctcgtccatgttggtggtgttggc

SEQ ID NO: 1056097 - DNA, 25 bp, Homo sapien
aaattccaagttcatgagggataac

SEQ ID NO: 1056098 - DNA, 25 bp, Homo sapien
aagttcatgagggataactgatgcc

SEQ ID NO: 1056099 - DNA, 25 bp, Homo sapien
tcatgagggataactgatgccagga

SEQ ID NO: 1056100 - DNA, 25 bp, Homo sapien
ttccaagttcatgagggataactga

SEQ ID NO: 1056101 - DNA, 25 bp, Homo sapien
gcttcatccaggccatcatccagct

SEQ ID NO: 1056102 - DNA, 25 bp, Homo sapien
cttcatccaggccatcatccagctc

SEQ ID NO: 1056103 - DNA, 25 bp, Homo sapien
ctcgaaaacgcttcatccaggccat

SEQ ID NO: 1056104 - DNA, 25 bp, Homo sapien
gaaaacgcttcatccaggccatcat

SEQ ID NO: 1056105 - DNA, 25 bp, Homo sapien
gatcaaagcacctccccttgagagt

SEQ ID NO: 1056106 - DNA, 25 bp, Homo sapien
actgtgtcaacaccgtgctgttcga

SEQ ID NO: 1056107 - DNA, 25 bp, Homo sapien
tggagcaatgcttctgacacatcgc

SEQ ID NO: 1056108 - DNA, 25 bp, Homo sapien
caaagggagacaacctacatgtcca

SEQ ID NO: 1056109 - DNA, 25 bp, Homo sapien
gagggtttgtccgagactgggcaag

SEQ ID NO: 1056110 - DNA, 25 bp, Homo sapien
agggtttgtccgagactgggcaagc

SEQ ID NO: 1056111 - DNA, 25 bp, Homo sapien
tgagggtttgtccgagactgggcaa

SEQ ID NO: 1056112 - DNA, 25 bp, Homo sapien
ctgagggtttgtccgagactgggca

SEQ ID NO: 1056113 - DNA, 25 bp, Homo sapien
tgctctgtgccgctgctgtcaggct

SEQ ID NO: 1056114 - DNA, 25 bp, Homo sapien
tgtcccagtcgacaggcgagaggca

SEQ ID NO: 1056115 - DNA, 25 bp, Homo sapien
actgggcgtaatgcatgtcctgggc

SEQ ID NO: 1056116 - DNA, 25 bp, Homo sapien
gcgagaggcactgggcgtaatgcat

SEQ ID NO: 1056117 - DNA, 25 bp, Homo sapien
tttggtccatcacgtgtcagggccg

SEQ ID NO: 1056118 - DNA, 25 bp, Homo sapien
tccctagggctgatgaaacttgctc

SEQ ID NO: 1056119 - DNA, 25 bp, Homo sapien
cgtctaaggtgtccggttactccag

SEQ ID NO: 1056120 - DNA, 25 bp, Homo sapien
tatcgtctttggtcaggagctgccc

SEQ ID NO: 1056121 - DNA, 25 bp, Homo sapien
tttcctcattaaagtttcacaaata

SEQ ID NO: 1056122 - DNA, 25 bp, Homo sapien
ctcattaaagtttcacaaataaagc

SEQ ID NO: 1056123 - DNA, 25 bp, Homo sapien
tcctcattaaagtttcacaaataaa

SEQ ID NO: 1056124 - DNA, 25 bp, Homo sapien
cattaaagtttcacaaataaagcac

SEQ ID NO: 1056125 - DNA, 25 bp, Homo sapien
tcaagtgtcacagcctccaagtggc

SEQ ID NO: 1056126 - DNA, 25 bp, Homo sapien
tcagcccggagcaagtctgtggaat

SEQ ID NO: 1056127 - DNA, 25 bp, Homo sapien
tcacagacgggaaaatcaaggctca

SEQ ID NO: 1056128 - DNA, 25 bp, Homo sapien
gatccctggtgtagcctccatgagt

SEQ ID NO: 1056129 - DNA, 25 bp, Homo sapien
cgggatgcggtccaggtcagctact

SEQ ID NO: 1056130 - DNA, 25 bp, Homo sapien
ttggaacacttagcccttcaggtgc

SEQ ID NO: 1056131 - DNA, 25 bp, Homo sapien
cctagttggagggaagagacgccct

SEQ ID NO: 1056132 - DNA, 25 bp, Homo sapien
tcagcatagtcaggtttcatccagc

SEQ ID NO: 1056133 - DNA, 25 bp, Homo sapien
tagagtatagtaagggcccagcctg

SEQ ID NO: 1056134 - DNA, 25 bp, Homo sapien
cacagatcagctaaggacggaggtc

SEQ ID NO: 1056135 - DNA, 25 bp, Homo sapien
tcccaccgtggatagcagttctcag

SEQ ID NO: 1056136 - DNA, 25 bp, Homo sapien
taaaagtgagtcatggccggatgca

SEQ ID NO: 1056137 - DNA, 25 bp, Homo sapien
tatgagagacaagtgtggaggcccc

SEQ ID NO: 1056138 - DNA, 25 bp, Homo sapien
agactcaacccctgtccttgtggag

SEQ ID NO: 1056139 - DNA, 25 bp, Homo sapien
gccctgggccttggcgtattagtca

SEQ ID NO: 1056140 - DNA, 25 bp, Homo sapien
tgacatcagcttcggcggatagcag

SEQ ID NO: 1056141 - DNA, 25 bp, Homo sapien
aggctcccctaggcctgagaacatg

SEQ ID NO: 1056142 - DNA, 25 bp, Homo sapien
ggctcccctaggcctgagaacatgt

SEQ ID NO: 1056143 - DNA, 25 bp, Homo sapien
agggtgaacttccaggatgcggcaa

SEQ ID NO: 1056144 - DNA, 25 bp, Homo sapien
catactgaagtagggtgaacttcca

SEQ ID NO: 1056145 - DNA, 25 bp, Homo sapien
actgcatactgaagtagggtgaact

SEQ ID NO: 1056146 - DNA, 25 bp, Homo sapien
tccaggatgcggcaagcctgggact

SEQ ID NO: 1056147 - DNA, 25 bp, Homo sapien
ctgcataactgggtctgaccgcaca

SEQ ID NO: 1056148 - DNA, 25 bp, Homo sapien
gtctgaccgcacaccgcatccctgc

SEQ ID NO: 1056149 - DNA, 25 bp, Homo sapien
ccctgcataactgggtctgaccgca

SEQ ID NO: 1056150 - DNA, 25 bp, Homo sapien
tccctgcataactgggtctgaccgc

SEQ ID NO: 1056151 - DNA, 25 bp, Homo sapien
tgtgctcagctctcacaactttaac

SEQ ID NO: 1056152 - DNA, 25 bp, Homo sapien
catgcctgtgagtagctactgtact

SEQ ID NO: 1056153 - DNA, 25 bp, Homo sapien
cagaatttgtaaggcaaagagacag

SEQ ID NO: 1056154 - DNA, 25 bp, Homo sapien
gagtttggagttgtagcatgctatg

SEQ ID NO: 1056155 - DNA, 25 bp, Homo sapien
gagctagaggagtacaaaaatcccc

SEQ ID NO: 1056156 - DNA, 25 bp, Homo sapien
catgttatacaaaggtgagttcacc

SEQ ID NO: 1056157 - DNA, 25 bp, Homo sapien
aaggtcgcaggacaaggtcagatgc

SEQ ID NO: 1056158 - DNA, 25 bp, Homo sapien
tcagatgctagagagcttggcccta

SEQ ID NO: 1056159 - DNA, 25 bp, Homo sapien
tatatccgatacctgagcccttgct

SEQ ID NO: 1056160 - DNA, 25 bp, Homo sapien
taggcaggtagaactcacacagaga

SEQ ID NO: 1056161 - DNA, 25 bp, Homo sapien
cttgcccgaggtaacacagcaggtg

SEQ ID NO: 1056162 - DNA, 25 bp, Homo sapien
tgactctgtagaggtacgaggccct

SEQ ID NO: 1056163 - DNA, 25 bp, Homo sapien
gaccctgcggccttgtgtccctggg

SEQ ID NO: 1056164 - DNA, 25 bp, Homo sapien
accctgcggccttgtgtccctgggt

SEQ ID NO: 1056165 - DNA, 25 bp, Homo sapien
ggaccctgcggccttgtgtccctgg

SEQ ID NO: 1056166 - DNA, 25 bp, Homo sapien
ccctgcggccttgtgtccctgggta

SEQ ID NO: 1056167 - DNA, 25 bp, Homo sapien
taggcgcccaaagtttcagcttcag

SEQ ID NO: 1056168 - DNA, 25 bp, Homo sapien
tatcgggacacgtccacaactttct

SEQ ID NO: 1056169 - DNA, 25 bp, Homo sapien
agcgcccgggctcgactatcgggac

SEQ ID NO: 1056170 - DNA, 25 bp, Homo sapien
tcagaagcagtttccggaggggacc

SEQ ID NO: 1056171 - DNA, 25 bp, Homo sapien
ccgcgcgccgcagcctcccctccgg

SEQ ID NO: 1056172 - DNA, 25 bp, Homo sapien
ggcccgcagcgaccggccgcgcgcc

SEQ ID NO: 1056173 - DNA, 25 bp, Homo sapien
ccgcagcgaccggccgcgcgccgca

SEQ ID NO: 1056174 - DNA, 25 bp, Homo sapien
cccgggcccgcagcgaccggccgcg

SEQ ID NO: 1056175 - DNA, 25 bp, Homo sapien
ggcccgggcgagcggagcggcacgg

SEQ ID NO: 1056176 - DNA, 25 bp, Homo sapien
ctgtccccgaagttcagggagtttg

SEQ ID NO: 1056177 - DNA, 25 bp, Homo sapien
agcgagtcctcccgcgaggaggcgg

SEQ ID NO: 1056178 - DNA, 25 bp, Homo sapien
agagtttcgccgcttcgggggactg

SEQ ID NO: 1056179 - DNA, 25 bp, Homo sapien
gcgcggtgaggggagggcgtccgga

SEQ ID NO: 1056180 - DNA, 25 bp, Homo sapien
gtgaggggagggcgtccggagcgcc

SEQ ID NO: 1056181 - DNA, 25 bp, Homo sapien
cgtccggagcgccgcccgggatggg

SEQ ID NO: 1056182 - DNA, 25 bp, Homo sapien
gcgtccggagcgccgcccgggatgg

SEQ ID NO: 1056183 - DNA, 25 bp, Homo sapien
tccagaagccctcggagtccaggca

SEQ ID NO: 1056184 - DNA, 25 bp, Homo sapien
aagccctcggagtccaggcacgtgt

SEQ ID NO: 1056185 - DNA, 25 bp, Homo sapien
ggccggtggctccagaagccctcgg

SEQ ID NO: 1056186 - DNA, 25 bp, Homo sapien
ggtggctccagaagccctcggagtc

SEQ ID NO: 1056187 - DNA, 25 bp, Homo sapien
ggaagaggcgcttgaggcgagagga

SEQ ID NO: 1056188 - DNA, 25 bp, Homo sapien
aagaggaacttctgcggcagccgca

SEQ ID NO: 1056189 - DNA, 25 bp, Homo sapien
gccccgaagcacagggtgaccaggc

SEQ ID NO: 1056190 - DNA, 25 bp, Homo sapien
aagccgggcactttcctcatgagca

SEQ ID NO: 1056191 - DNA, 25 bp, Homo sapien
aggcggctcctgctcgcgggccggg

SEQ ID NO: 1056192 - DNA, 25 bp, Homo sapien
gggcatggccggcgatttcagccac

SEQ ID NO: 1056193 - DNA, 25 bp, Homo sapien
gctggggtcatcctcgcccggggcc

SEQ ID NO: 1056194 - DNA, 25 bp, Homo sapien
ctttcctgcggcggggactggccca

SEQ ID NO: 1056195 - DNA, 25 bp, Homo sapien
agtggggcgggtgcgccgcagcccc

SEQ ID NO: 1056196 - DNA, 25 bp, Homo sapien
gcggggtccagtggggcgggtgcgc

SEQ ID NO: 1056197 - DNA, 25 bp, Homo sapien
ctcgcggggtccagtggggcgggtg

SEQ ID NO: 1056198 - DNA, 25 bp, Homo sapien
ggtccagtggggcgggtgcgccgca

SEQ ID NO: 1056199 - DNA, 25 bp, Homo sapien
tccttgattttctcccgctgggctc

SEQ ID NO: 1056200 - DNA, 25 bp, Homo sapien
cggctccggaatgcgttgaagtcaa

SEQ ID NO: 1056201 - DNA, 25 bp, Homo sapien
tgaagtcaaagcggaaagggacgcc

SEQ ID NO: 1056202 - DNA, 25 bp, Homo sapien
cctggaggccgggatgctattgccc

SEQ ID NO: 1056203 - DNA, 25 bp, Homo sapien
ggactgtactattccacttattttg

SEQ ID NO: 1056204 - DNA, 25 bp, Homo sapien
agtactgatacgcacaatatggatc

SEQ ID NO: 1056205 - DNA, 25 bp, Homo sapien
tactgatacgcacaatatggatcaa

SEQ ID NO: 1056206 - DNA, 25 bp, Homo sapien
tgatacgcacaatatggatcaattt

SEQ ID NO: 1056207 - DNA, 25 bp, Homo sapien
gaacttcaacttgataaaaggcatc

SEQ ID NO: 1056208 - DNA, 25 bp, Homo sapien
gcgtgtgccaagaagcccggctgat

SEQ ID NO: 1056209 - DNA, 25 bp, Homo sapien
gtgtccagcctagcattcttttaaa

SEQ ID NO: 1056210 - DNA, 25 bp, Homo sapien
taatcccaatacagataaaaacctc

SEQ ID NO: 1056211 - DNA, 25 bp, Homo sapien
gtcatcttcaggtgactccgcagcc

SEQ ID NO: 1056212 - DNA, 25 bp, Homo sapien
cttcaggtgactccgcagccctttg

SEQ ID NO: 1056213 - DNA, 25 bp, Homo sapien
tcatcttcaggtgactccgcagccc

SEQ ID NO: 1056214 - DNA, 25 bp, Homo sapien
atcttcaggtgactccgcagccctt

SEQ ID NO: 1056215 - DNA, 25 bp, Homo sapien
cagcaggcagtcaggtttggcagaa

SEQ ID NO: 1056216 - DNA, 25 bp, Homo sapien
aggcagtcaggtttggcagaatcag

SEQ ID NO: 1056217 - DNA, 25 bp, Homo sapien
taccgttcaagtcgaggattccagg

SEQ ID NO: 1056218 - DNA, 25 bp, Homo sapien
acataagtggatggcagtttcagca

SEQ ID NO: 1056219 - DNA, 25 bp, Homo sapien
tggcatcgagccttcaagacctcct

SEQ ID NO: 1056220 - DNA, 25 bp, Homo sapien
ggtttcaagtgaatgctaccgttca

SEQ ID NO: 1056221 - DNA, 25 bp, Homo sapien
gaatagacatgcaccggccccatct

SEQ ID NO: 1056222 - DNA, 25 bp, Homo sapien
cagtgaactggaatagacatgcacc

SEQ ID NO: 1056223 - DNA, 25 bp, Homo sapien
tggaatagacatgcaccggccccat

SEQ ID NO: 1056224 - DNA, 25 bp, Homo sapien
gaactggaatagacatgcaccggcc

SEQ ID NO: 1056225 - DNA, 25 bp, Homo sapien
cacagaggagaaagtccccgcacat

SEQ ID NO: 1056226 - DNA, 25 bp, Homo sapien
ggctgctgaaaacgcagcgaacaca

SEQ ID NO: 1056227 - DNA, 25 bp, Homo sapien
agaaagtccccgcacatttctcagt

SEQ ID NO: 1056228 - DNA, 25 bp, Homo sapien
tgaaaacgcagcgaacacagaggag

SEQ ID NO: 1056229 - DNA, 25 bp, Homo sapien
ggggaccagcacggaggaaggaaca

SEQ ID NO: 1056230 - DNA, 25 bp, Homo sapien
gcggggaccagcacggaggaaggaa

SEQ ID NO: 1056231 - DNA, 25 bp, Homo sapien
ctgcggggaccagcacggaggaagg

SEQ ID NO: 1056232 - DNA, 25 bp, Homo sapien
caggaactccggttagctttccgca

SEQ ID NO: 1056233 - DNA, 25 bp, Homo sapien
tcagatgcgtttcggtgtagttggt

SEQ ID NO: 1056234 - DNA, 25 bp, Homo sapien
cgtttcggtgtagttggtgagatgg

SEQ ID NO: 1056235 - DNA, 25 bp, Homo sapien
tgcgtttcggtgtagttggtgagat

SEQ ID NO: 1056236 - DNA, 25 bp, Homo sapien
tttcggtgtagttggtgagatggcc

SEQ ID NO: 1056237 - DNA, 25 bp, Homo sapien
tgtattatacctagtgccattgagt

SEQ ID NO: 1056238 - DNA, 25 bp, Homo sapien
gcagtggtgatggtcacgtaacact

SEQ ID NO: 1056239 - DNA, 25 bp, Homo sapien
tagtgggtctggagtgactgcctaa

SEQ ID NO: 1056240 - DNA, 25 bp, Homo sapien
cagccatctatgcagttcctcagtg

SEQ ID NO: 1056241 - DNA, 25 bp, Homo sapien
ccccatgggtaacagggcatgacaa

SEQ ID NO: 1056242 - DNA, 25 bp, Homo sapien
caaagcccccatgggtaacagggca

SEQ ID NO: 1056243 - DNA, 25 bp, Homo sapien
aggccaaagcccccatgggtaacag

SEQ ID NO: 1056244 - DNA, 25 bp, Homo sapien
tgggtaacagggcatgacaaaaggt

SEQ ID NO: 1056245 - DNA, 25 bp, Homo sapien
taagagttacatgggtgttttcatt

SEQ ID NO: 1056246 - DNA, 25 bp, Homo sapien
tgaaagtgagcagtggtccggctgg

SEQ ID NO: 1056247 - DNA, 25 bp, Homo sapien
aagtgagcagtggtccggctggtgg

SEQ ID NO: 1056248 - DNA, 25 bp, Homo sapien
gcagtggtccggctggtgggtcacg

SEQ ID NO: 1056249 - DNA, 25 bp, Homo sapien
gtgagcagtggtccggctggtgggt

SEQ ID NO: 1056250 - DNA, 25 bp, Homo sapien
caggcaaggagatggtgtagagcac

SEQ ID NO: 1056251 - DNA, 25 bp, Homo sapien
catcttcagacaggtcaaggccagg

SEQ ID NO: 1056252 - DNA, 25 bp, Homo sapien
tggtgtagagcaccacagggccttg

SEQ ID NO: 1056253 - DNA, 25 bp, Homo sapien
agcaggaaaggtggtctcatcttca

SEQ ID NO: 1056254 - DNA, 25 bp, Homo sapien
cgctgtttaacacctctgagcctca

SEQ ID NO: 1056255 - DNA, 25 bp, Homo sapien
cactgccactttcaagctgtgtaac

SEQ ID NO: 1056256 - DNA, 25 bp, Homo sapien
ctgtgtaactctgggcacgctgttt

SEQ ID NO: 1056257 - DNA, 25 bp, Homo sapien
gctccaggttcacaacctgacactg

SEQ ID NO: 1056258 - DNA, 25 bp, Homo sapien
tcgacacagtaatccccgatgcagt

SEQ ID NO: 1056259 - DNA, 25 bp, Homo sapien
cagctctatgtaggccatggcaaac

SEQ ID NO: 1056260 - DNA, 25 bp, Homo sapien
gagtgctaccactctgctcaagtgg

SEQ ID NO: 1056261 - DNA, 25 bp, Homo sapien
caatggaattgtcagctcagctcta

SEQ ID NO: 1056262 - DNA, 25 bp, Homo sapien
ccactagtgtgacctttcaagagaa

SEQ ID NO: 1056263 - DNA, 25 bp, Homo sapien
aaagccaatgccaagtattacctga

SEQ ID NO: 1056264 - DNA, 25 bp, Homo sapien
ccacttttgtggagttacagccata

SEQ ID NO: 1056265 - DNA, 25 bp, Homo sapien
tatgccaatcagtccatctcaagag

SEQ ID NO: 1056266 - DNA, 25 bp, Homo sapien
gggcctgagaactaccaacattcat

SEQ ID NO: 1056267 - DNA, 25 bp, Homo sapien
cattcatgggtagtaaagggccttg

SEQ ID NO: 1056268 - DNA, 25 bp, Homo sapien
tcttggaaccgaaagaggatcagca

SEQ ID NO: 1056269 - DNA, 25 bp, Homo sapien
cattttctggtagttcttggaaccg

SEQ ID NO: 1056270 - DNA, 25 bp, Homo sapien
tccccaccacgcttcagccacaggg

SEQ ID NO: 1056271 - DNA, 25 bp, Homo sapien
ttggactttccccaccacgcttcag

SEQ ID NO: 1056272 - DNA, 25 bp, Homo sapien
gactttccccaccacgcttcagcca

SEQ ID NO: 1056273 - DNA, 25 bp, Homo sapien
ctcttggactttccccaccacgctt

SEQ ID NO: 1056274 - DNA, 25 bp, Homo sapien
taacgcttatagctctgccaagcaa

SEQ ID NO: 1056275 - DNA, 25 bp, Homo sapien
catcttttgttagtggacggagttc

SEQ ID NO: 1056276 - DNA, 25 bp, Homo sapien
cggagttcgtttttccccattgcat

SEQ ID NO: 1056277 - DNA, 25 bp, Homo sapien
gaacatgttaccctcgtagccatct

SEQ ID NO: 1056278 - DNA, 25 bp, Homo sapien
tgtgaactcattacccttccccgca

SEQ ID NO: 1056279 - DNA, 25 bp, Homo sapien
aggcttgggcatccgactgccctcg

SEQ ID NO: 1056280 - DNA, 25 bp, Homo sapien
aaaactaggcacctgtgtgaactca

SEQ ID NO: 1056281 - DNA, 25 bp, Homo sapien
ctgtaaatctcagcaaaactaggca

SEQ ID NO: 1056282 - DNA, 25 bp, Homo sapien
agatttctgccatgggcatttgagg

SEQ ID NO: 1056283 - DNA, 25 bp, Homo sapien
gatttctgccatgggcatttgaggg

SEQ ID NO: 1056284 - DNA, 25 bp, Homo sapien
caagatttctgccatgggcatttga

SEQ ID NO: 1056285 - DNA, 25 bp, Homo sapien
ccaagatttctgccatgggcatttg

SEQ ID NO: 1056286 - DNA, 25 bp, Homo sapien
gagtcttctgttcgacccctgagta

SEQ ID NO: 1056287 - DNA, 25 bp, Homo sapien
tcactgggagacatggcagcatggt

SEQ ID NO: 1056288 - DNA, 25 bp, Homo sapien
tattaggcacgcataaaagatgttc

SEQ ID NO: 1056289 - DNA, 25 bp, Homo sapien
cagtggtgtacaggacgtggcacac

SEQ ID NO: 1056290 - DNA, 25 bp, Homo sapien
taccaggaaggtttgcttgctgccc

SEQ ID NO: 1056291 - DNA, 25 bp, Homo sapien
tctgatcatcagaaggtggccgagg

SEQ ID NO: 1056292 - DNA, 25 bp, Homo sapien
gacttttatatcctctggcctccgg

SEQ ID NO: 1056293 - DNA, 25 bp, Homo sapien
catgtcactcaaggccacaaggaga

SEQ ID NO: 1056294 - DNA, 25 bp, Homo sapien
tgagtggtcggtcggcggtgtgagt

SEQ ID NO: 1056295 - DNA, 25 bp, Homo sapien
tctttgaagaaggaaagcgcagagt

SEQ ID NO: 1056296 - DNA, 25 bp, Homo sapien
ctgcagcaagctaatttcgaggcgt

SEQ ID NO: 1056297 - DNA, 25 bp, Homo sapien
tgtgagtgcacgacactgcagcaag

SEQ ID NO: 1056298 - DNA, 25 bp, Homo sapien
tcttcactggaagtatgattcatgc

SEQ ID NO: 1056299 - DNA, 25 bp, Homo sapien
tgaagctcacccctccaagaatgag

SEQ ID NO: 1056300 - DNA, 25 bp, Homo sapien
acagcactcgcacggacggtcttca

SEQ ID NO: 1056301 - DNA, 25 bp, Homo sapien
gcccttggtgtaagcctgtacctca

SEQ ID NO: 1056302 - DNA, 25 bp, Homo sapien
taaagttgacaagatgcttacccag

SEQ ID NO: 1056303 - DNA, 25 bp, Homo sapien
aaaatgcaagtgtctccagctatcc

SEQ ID NO: 1056304 - DNA, 25 bp, Homo sapien
cgcatctgcagggatacacggtagt

SEQ ID NO: 1056305 - DNA, 25 bp, Homo sapien
tcatctgtatgggaacgcatctgca

SEQ ID NO: 1056306 - DNA, 25 bp, Homo sapien
ttagccggtcttactgcctcctccg

SEQ ID NO: 1056307 - DNA, 25 bp, Homo sapien
agcttagccggtcttactgcctcct

SEQ ID NO: 1056308 - DNA, 25 bp, Homo sapien
agccggtcttactgcctcctccgtg

SEQ ID NO: 1056309 - DNA, 25 bp, Homo sapien
ctagcttagccggtcttactgcctc

SEQ ID NO: 1056310 - DNA, 25 bp, Homo sapien
ttctgctagaaaggctaacgttacg

SEQ ID NO: 1056311 - DNA, 25 bp, Homo sapien
caagaatatagtgtttccagctggg

SEQ ID NO: 1056312 - DNA, 25 bp, Homo sapien
taacgttacgaagactgacagtatc

SEQ ID NO: 1056313 - DNA, 25 bp, Homo sapien
tatcaggcattggtgaggaatcttc

SEQ ID NO: 1056314 - DNA, 25 bp, Homo sapien
atctttactaagtcatcagccttca

SEQ ID NO: 1056315 - DNA, 25 bp, Homo sapien
catctttactaagtcatcagccttc

SEQ ID NO: 1056316 - DNA, 25 bp, Homo sapien
tctttactaagtcatcagccttcag

SEQ ID NO: 1056317 - DNA, 25 bp, Homo sapien
tcatctttactaagtcatcagcctt

SEQ ID NO: 1056318 - DNA, 25 bp, Homo sapien
ctggctgagaattttatactcttaa

SEQ ID NO: 1056319 - DNA, 25 bp, Homo sapien
ctgcagtgtaggtggttatattatc

SEQ ID NO: 1056320 - DNA, 25 bp, Homo sapien
ggctgagaattttatactcttaatc

SEQ ID NO: 1056321 - DNA, 25 bp, Homo sapien
cagtgtaggtggttatattatctcc

SEQ ID NO: 1056322 - DNA, 25 bp, Homo sapien
cttgtcttctctggttttccccagc

SEQ ID NO: 1056323 - DNA, 25 bp, Homo sapien
tggttttccccagccttcatcacca

SEQ ID NO: 1056324 - DNA, 25 bp, Homo sapien
tctggttttccccagccttcatcac

SEQ ID NO: 1056325 - DNA, 25 bp, Homo sapien
tgtctccttgtcttctctggttttc

SEQ ID NO: 1056326 - DNA, 25 bp, Homo sapien
gtcaatgactgttgccccgctgagg

SEQ ID NO: 1056327 - DNA, 25 bp, Homo sapien
gggagtcaatgactgttgccccgct

SEQ ID NO: 1056328 - DNA, 25 bp, Homo sapien
tgaggtagagggtatcgagggagtc

SEQ ID NO: 1056329 - DNA, 25 bp, Homo sapien
agagggtatcgagggagtcaatgac

SEQ ID NO: 1056330 - DNA, 25 bp, Homo sapien
cccagctcctaaggcactgtgggca

SEQ ID NO: 1056331 - DNA, 25 bp, Homo sapien
tgcctgagcccgttctgtatcccaa

SEQ ID NO: 1056332 - DNA, 25 bp, Homo sapien
cccccagctcctaaggcactgtggg

SEQ ID NO: 1056333 - DNA, 25 bp, Homo sapien
agctgcctgagcccgttctgtatcc

SEQ ID NO: 1056334 - DNA, 25 bp, Homo sapien
aggaagacagcaaggccctttcctg

SEQ ID NO: 1056335 - DNA, 25 bp, Homo sapien
aggagaccccaaggctcagcaggaa

SEQ ID NO: 1056336 - DNA, 25 bp, Homo sapien
cttcttggaggagaccccaaggctc

SEQ ID NO: 1056337 - DNA, 25 bp, Homo sapien
agacagcaaggccctttcctggttc

SEQ ID NO: 1056338 - DNA, 25 bp, Homo sapien
cctcaaacaaggatgcttctccgct

SEQ ID NO: 1056339 - DNA, 25 bp, Homo sapien
gctgagaggagtcccccgatgtagc

SEQ ID NO: 1056340 - DNA, 25 bp, Homo sapien
cacctcaaacaaggatgcttctccg

SEQ ID NO: 1056341 - DNA, 25 bp, Homo sapien
ccccgatgtagcggatgttcacctc

SEQ ID NO: 1056342 - DNA, 25 bp, Homo sapien
ggcatatgccctgaagaacacagat

SEQ ID NO: 1056343 - DNA, 25 bp, Homo sapien
tccactgaccacggccaagtaggaa

SEQ ID NO: 1056344 - DNA, 25 bp, Homo sapien
ctgaccacggccaagtaggaaggct

SEQ ID NO: 1056345 - DNA, 25 bp, Homo sapien
tgggcatatgccctgaagaacacag

SEQ ID NO: 1056346 - DNA, 25 bp, Homo sapien
tctcggtaggactggcctacccagc

SEQ ID NO: 1056347 - DNA, 25 bp, Homo sapien
ggttatacgagttactcccatgggc

SEQ ID NO: 1056348 - DNA, 25 bp, Homo sapien
cactggctctcggtaggactggcct

SEQ ID NO: 1056349 - DNA, 25 bp, Homo sapien
gtgcagctgtggttatacgagttac

SEQ ID NO: 1056350 - DNA, 25 bp, Homo sapien
gcctgatggcctttattcggaacac

SEQ ID NO: 1056351 - DNA, 25 bp, Homo sapien
cttttgaagctcaccacgccctttg

SEQ ID NO: 1056352 - DNA, 25 bp, Homo sapien
tgaagctcaccacgccctttgggat

SEQ ID NO: 1056353 - DNA, 25 bp, Homo sapien
gtgttgaacgccggcaggagcttct

SEQ ID NO: 1056354 - DNA, 25 bp, Homo sapien
cttttcagcgaagacctggttgcca

SEQ ID NO: 1056355 - DNA, 25 bp, Homo sapien
tcagcgaagacctggttgccagaga

SEQ ID NO: 1056356 - DNA, 25 bp, Homo sapien
ttcagtgaggtgtaagaattccaag

SEQ ID NO: 1056357 - DNA, 25 bp, Homo sapien
gagagttcagtgaggtgtaagaatt

SEQ ID NO: 1056358 - DNA, 25 bp, Homo sapien
cagccgcacgctcatccctctgctc

SEQ ID NO: 1056359 - DNA, 25 bp, Homo sapien
aaccctgtggcagccgcacgctcat

SEQ ID NO: 1056360 - DNA, 25 bp, Homo sapien
catccctctgctccgcaggaagaag

SEQ ID NO: 1056361 - DNA, 25 bp, Homo sapien
tcgcctctgaaaaccctgtggcagc

SEQ ID NO: 1056362 - DNA, 25 bp, Homo sapien
ttagtggtagcttgggctcccgggc

SEQ ID NO: 1056363 - DNA, 25 bp, Homo sapien
ctgccctcctgctgatccatgaggg

SEQ ID NO: 1056364 - DNA, 25 bp, Homo sapien
tgctgatccatgagggaggacccac

SEQ ID NO: 1056365 - DNA, 25 bp, Homo sapien
tggtagcttgggctcccgggctccc

SEQ ID NO: 1056366 - DNA, 25 bp, Homo sapien
gcgttggggtataggtagctactat

SEQ ID NO: 1056367 - DNA, 25 bp, Homo sapien
ccacctggcgttggggtataggtag

SEQ ID NO: 1056368 - DNA, 25 bp, Homo sapien
gtataggtagctactatttgctacc

SEQ ID NO: 1056369 - DNA, 25 bp, Homo sapien
tggggtataggtagctactatttgc

SEQ ID NO: 1056370 - DNA, 25 bp, Homo sapien
tactggtctaagaggcgggcattcc

SEQ ID NO: 1056371 - DNA, 25 bp, Homo sapien
gagtagagccattataaagtgccca

SEQ ID NO: 1056372 - DNA, 25 bp, Homo sapien
cacatcctgggcttgaatcacggct

SEQ ID NO: 1056373 - DNA, 25 bp, Homo sapien
tcctgccaatgcaaggtggtgccta

SEQ ID NO: 1056374 - DNA, 25 bp, Homo sapien
taaccgacaagggattatctcagtg

SEQ ID NO: 1056375 - DNA, 25 bp, Homo sapien
agaaaggcccttgggaccacactgt

SEQ ID NO: 1056376 - DNA, 25 bp, Homo sapien
gaataaccccatgtcctaacaggcg

SEQ ID NO: 1056377 - DNA, 25 bp, Homo sapien
tatctatagtgcctgctctccgaca

SEQ ID NO: 1056378 - DNA, 25 bp, Homo sapien
gaggatgggaggcagctggttcaga

SEQ ID NO: 1056379 - DNA, 25 bp, Homo sapien
ggatgggaggcagctggttcagatg

SEQ ID NO: 1056380 - DNA, 25 bp, Homo sapien
ctgaggatgggaggcagctggttca

SEQ ID NO: 1056381 - DNA, 25 bp, Homo sapien
ctgctgaggatgggaggcagctggt

SEQ ID NO: 1056382 - DNA, 25 bp, Homo sapien
cttccgaagaagccgactgcaccca

SEQ ID NO: 1056383 - DNA, 25 bp, Homo sapien
gcttccgaagaagccgactgcaccc

SEQ ID NO: 1056384 - DNA, 25 bp, Homo sapien
ttccgaagaagccgactgcacccag

SEQ ID NO: 1056385 - DNA, 25 bp, Homo sapien
ctgccgagagacggacaccaggtga

SEQ ID NO: 1056386 - DNA, 25 bp, Homo sapien
gccgagagacggacaccaggtgagc

SEQ ID NO: 1056387 - DNA, 25 bp, Homo sapien
tgccgagagacggacaccaggtgag

SEQ ID NO: 1056388 - DNA, 25 bp, Homo sapien
tcgatcttcctgaggaccttgcgga

SEQ ID NO: 1056389 - DNA, 25 bp, Homo sapien
tcttcctgaggaccttgcggatgtt

SEQ ID NO: 1056390 - DNA, 25 bp, Homo sapien
ggcttttcgatcttcctgaggacct

SEQ ID NO: 1056391 - DNA, 25 bp, Homo sapien
aagggcttttcgatcttcctgagga

SEQ ID NO: 1056392 - DNA, 25 bp, Homo sapien
cctgtacgggtaggaagcgggcatc

SEQ ID NO: 1056393 - DNA, 25 bp, Homo sapien
ccggtgcctgtacgggtaggaagcg

SEQ ID NO: 1056394 - DNA, 25 bp, Homo sapien
gaagcgggcatctcgccagcagcca

SEQ ID NO: 1056395 - DNA, 25 bp, Homo sapien
tgacctcaggggcccggtgcctgta

SEQ ID NO: 1056396 - DNA, 25 bp, Homo sapien
tctgtcttgcccgacatcaaccagg

SEQ ID NO: 1056397 - DNA, 25 bp, Homo sapien
ccgagtcctccaactgagacatggt

SEQ ID NO: 1056398 - DNA, 25 bp, Homo sapien
tccatatctgtcttgcccgacatca

SEQ ID NO: 1056399 - DNA, 25 bp, Homo sapien
caaccaggatttgatcaaatattca

SEQ ID NO: 1056400 - DNA, 25 bp, Homo sapien
taagtagaggccagcccaatggatc

SEQ ID NO: 1056401 - DNA, 25 bp, Homo sapien
cagacccgtgtttgtgtcctggctc

SEQ ID NO: 1056402 - DNA, 25 bp, Homo sapien
gaggatattcgaagcctggctcagt

SEQ ID NO: 1056403 - DNA, 25 bp, Homo sapien
cacttgttgctatatggaccttggg

SEQ ID NO: 1056404 - DNA, 25 bp, Homo sapien
ggttggccccaagctaagtaattgc

SEQ ID NO: 1056405 - DNA, 25 bp, Homo sapien
tcagggctcagaaacctgggtccga

SEQ ID NO: 1056406 - DNA, 25 bp, Homo sapien
tgggtccgagtcaccagttgtcaac

SEQ ID NO: 1056407 - DNA, 25 bp, Homo sapien
agggagacctcaggatgctgcgcac

SEQ ID NO: 1056408 - DNA, 25 bp, Homo sapien
tggaaaagcgctgacaatgtgacat

SEQ ID NO: 1056409 - DNA, 25 bp, Homo sapien
gcagatggaaaagcgctgacaatgt

SEQ ID NO: 1056410 - DNA, 25 bp, Homo sapien
caatgtgacatgccagggcacctgc

SEQ ID NO: 1056411 - DNA, 25 bp, Homo sapien
aaaagcgctgacaatgtgacatgcc

SEQ ID NO: 1056412 - DNA, 25 bp, Homo sapien
cgagctctcggtagtgggccctctt

SEQ ID NO: 1056413 - DNA, 25 bp, Homo sapien
gccaggtgccccatcttgtggtcca

SEQ ID NO: 1056414 - DNA, 25 bp, Homo sapien
tgagcgggcgtatgactcgtgacac

SEQ ID NO: 1056415 - DNA, 25 bp, Homo sapien
cacgtcttggtgatctgggctgcga

SEQ ID NO: 1056416 - DNA, 25 bp, Homo sapien
tggactgctgtgtaaggctgcaccg

SEQ ID NO: 1056417 - DNA, 25 bp, Homo sapien
caaatgagctactcagcagtctggg

SEQ ID NO: 1056418 - DNA, 25 bp, Homo sapien
caatagctctgcaagaggttagcca

SEQ ID NO: 1056419 - DNA, 25 bp, Homo sapien
tatgatttcaaaggccgtgctgggt

SEQ ID NO: 1056420 - DNA, 25 bp, Homo sapien
gggtctgtcgccacaggtacatgta

SEQ ID NO: 1056421 - DNA, 25 bp, Homo sapien
tccaccacctctggccggaggatgt

SEQ ID NO: 1056422 - DNA, 25 bp, Homo sapien
tagtagctctcgctcagctgggtgg

SEQ ID NO: 1056423 - DNA, 25 bp, Homo sapien
gcctctctgccggagttaaaccaga

SEQ ID NO: 1056424 - DNA, 25 bp, Homo sapien
ttggatcccagagaaaccggcttct

SEQ ID NO: 1056425 - DNA, 25 bp, Homo sapien
tgtctccgctagaaagaagctctgc

SEQ ID NO: 1056426 - DNA, 25 bp, Homo sapien
gctactgtacacgtcttggatccca

SEQ ID NO: 1056427 - DNA, 25 bp, Homo sapien
gctctgctgcttgttgtcgtggttg

SEQ ID NO: 1056428 - DNA, 25 bp, Homo sapien
ttcagagaacagaagatagagatac

SEQ ID NO: 1056429 - DNA, 25 bp, Homo sapien
gtgggcctcggtgttgaacacccag

SEQ ID NO: 1056430 - DNA, 25 bp, Homo sapien
tccagggagagcaagtcatcttcag

SEQ ID NO: 1056431 - DNA, 25 bp, Homo sapien
ggagtgggtgggcctcggtgttgaa

SEQ ID NO: 1056432 - DNA, 25 bp, Homo sapien
ggctctgccggagctgtctgagtgg

SEQ ID NO: 1056433 - DNA, 25 bp, Homo sapien
caggctctgccggagctgtctgagt

SEQ ID NO: 1056434 - DNA, 25 bp, Homo sapien
aggctctgccggagctgtctgagtg

SEQ ID NO: 1056435 - DNA, 25 bp, Homo sapien
gctctgccggagctgtctgagtggt

SEQ ID NO: 1056436 - DNA, 25 bp, Homo sapien
tagtaatttgtaacactgaggccca

SEQ ID NO: 1056437 - DNA, 25 bp, Homo sapien
ggcctgacatcgctgagtctccaag

SEQ ID NO: 1056438 - DNA, 25 bp, Homo sapien
ccaagtcttgtctcctcacagagga

SEQ ID NO: 1056439 - DNA, 25 bp, Homo sapien
cctgaaaaggcaaggcatccctgcg

SEQ ID NO: 1056440 - DNA, 25 bp, Homo sapien
gaatatatcaggaccgatttcaggg

SEQ ID NO: 1056441 - DNA, 25 bp, Homo sapien
aattataccttaaatcaactgctgg

SEQ ID NO: 1056442 - DNA, 25 bp, Homo sapien
ctggcctcatgcttctcgaatatat

SEQ ID NO: 1056443 - DNA, 25 bp, Homo sapien
gccttttttgggctgtgtgacctca

SEQ ID NO: 1056444 - DNA, 25 bp, Homo sapien
catagtaggataccacggtggcaaa

SEQ ID NO: 1056445 - DNA, 25 bp, Homo sapien
cagcagggatttaaagccgggtcac

SEQ ID NO: 1056446 - DNA, 25 bp, Homo sapien
tgggagtcacgctctcatgctgcct

SEQ ID NO: 1056447 - DNA, 25 bp, Homo sapien
gatttccgctgtgttgacaagctgc

SEQ ID NO: 1056448 - DNA, 25 bp, Homo sapien
tcctcaaagcagagggaacggaact

SEQ ID NO: 1056449 - DNA, 25 bp, Homo sapien
cttggatgctgcctttaaatcagat

SEQ ID NO: 1056450 - DNA, 25 bp, Homo sapien
gaacggaactgagcatccatcttgg

SEQ ID NO: 1056451 - DNA, 25 bp, Homo sapien
ttttcttcccaatgcatttggctgg

SEQ ID NO: 1056452 - DNA, 25 bp, Homo sapien
tctttgtgccacatgaccaatgacc

SEQ ID NO: 1056453 - DNA, 25 bp, Homo sapien
attagtcacagagggccgagcatct

SEQ ID NO: 1056454 - DNA, 25 bp, Homo sapien
ttaagcattagtcacagagggccga

SEQ ID NO: 1056455 - DNA, 25 bp, Homo sapien
acagagggccgagcatctttgtgcc

SEQ ID NO: 1056456 - DNA, 25 bp, Homo sapien
aaattacagcatgatgaaggcagac

SEQ ID NO: 1056457 - DNA, 25 bp, Homo sapien
gatcgggagatattagggatccaaa

SEQ ID NO: 1056458 - DNA, 25 bp, Homo sapien
gctgggcttgctagggcacagtcat

SEQ ID NO: 1056459 - DNA, 25 bp, Homo sapien
tgactgctccaaagataggctaagg

SEQ ID NO: 1056460 - DNA, 25 bp, Homo sapien
gcggctgccggcggcccgggaagcg

SEQ ID NO: 1056461 - DNA, 25 bp, Homo sapien
tgccggcggcccgggaagcgaaaga

SEQ ID NO: 1056462 - DNA, 25 bp, Homo sapien
ctgccggcggcccgggaagcgaaag

SEQ ID NO: 1056463 - DNA, 25 bp, Homo sapien
ggctgccggcggcccgggaagcgaa

SEQ ID NO: 1056464 - DNA, 25 bp, Homo sapien
gcagcgccagggaacgggcgcggcg

SEQ ID NO: 1056465 - DNA, 25 bp, Homo sapien
ctgggcctcggcgtggcgggcgcag

SEQ ID NO: 1056466 - DNA, 25 bp, Homo sapien
gggcctcggcgtggcgggcgcagac

SEQ ID NO: 1056467 - DNA, 25 bp, Homo sapien
gtggcgggcgcagacccggacggcg

SEQ ID NO: 1056468 - DNA, 25 bp, Homo sapien
acaggcagttgcttccgcatggagc

SEQ ID NO: 1056469 - DNA, 25 bp, Homo sapien
aggcagttgcttccgcatggagccc

SEQ ID NO: 1056470 - DNA, 25 bp, Homo sapien
ccaacaggcagttgcttccgcatgg

SEQ ID NO: 1056471 - DNA, 25 bp, Homo sapien
gttgcttccgcatggagccccttct

SEQ ID NO: 1056472 - DNA, 25 bp, Homo sapien
ggaggagagactgggctgggcacca

SEQ ID NO: 1056473 - DNA, 25 bp, Homo sapien
ctgcttgggaggagagactgggctg

SEQ ID NO: 1056474 - DNA, 25 bp, Homo sapien
gggaggagagactgggctgggcacc

SEQ ID NO: 1056475 - DNA, 25 bp, Homo sapien
cttgggaggagagactgggctgggc

SEQ ID NO: 1056476 - DNA, 25 bp, Homo sapien
cagggctgatgtacatatccccgtc

SEQ ID NO: 1056477 - DNA, 25 bp, Homo sapien
cttctcagcaatgggtttgaactcc

SEQ ID NO: 1056478 - DNA, 25 bp, Homo sapien
aatgggtttgaactcctcagggctg

SEQ ID NO: 1056479 - DNA, 25 bp, Homo sapien
catatccccgtcagtgtccaaggag

SEQ ID NO: 1056480 - DNA, 25 bp, Homo sapien
ccagtctgggtgacagaacaagacc

SEQ ID NO: 1056481 - DNA, 25 bp, Homo sapien
cactgcactccagtctgggtgacag

SEQ ID NO: 1056482 - DNA, 25 bp, Homo sapien
aggatcaattgagccagggaagttg

SEQ ID NO: 1056483 - DNA, 25 bp, Homo sapien
aggctgcagtgagctgtgactgcac

SEQ ID NO: 1056484 - DNA, 25 bp, Homo sapien
tagtggtacagagatgatgcctggc

SEQ ID NO: 1056485 - DNA, 25 bp, Homo sapien
tagtcaccagtaacaaagtgtagcc

SEQ ID NO: 1056486 - DNA, 25 bp, Homo sapien
gactgactggctagcaggctgaatg

SEQ ID NO: 1056487 - DNA, 25 bp, Homo sapien
caggatgcctttaaactacagatgc

SEQ ID NO: 1056488 - DNA, 25 bp, Homo sapien
cttggtcatggtctccgggagcaga

SEQ ID NO: 1056489 - DNA, 25 bp, Homo sapien
ttgctcttggtcatggtctccggga

SEQ ID NO: 1056490 - DNA, 25 bp, Homo sapien
gcttctatggtgagcgtctcctcgc

SEQ ID NO: 1056491 - DNA, 25 bp, Homo sapien
tgagcgtctcctcgctagggtcagg

SEQ ID NO: 1056492 - DNA, 25 bp, Homo sapien
ccttgggcggcggtggatagaagcg

SEQ ID NO: 1056493 - DNA, 25 bp, Homo sapien
cagtgaacatgctcagctcactggg

SEQ ID NO: 1056494 - DNA, 25 bp, Homo sapien
ttgttggacaggtagccagtgaaca

SEQ ID NO: 1056495 - DNA, 25 bp, Homo sapien
tggcgggtggcaaacactgcacttg

SEQ ID NO: 1056496 - DNA, 25 bp, Homo sapien
tgctcaggagccggtggatgatgac

SEQ ID NO: 1056497 - DNA, 25 bp, Homo sapien
ctgaggggcaaagcgggtcttcaca

SEQ ID NO: 1056498 - DNA, 25 bp, Homo sapien
cggaacatcacagtgtagtagaagt

SEQ ID NO: 1056499 - DNA, 25 bp, Homo sapien
catcacagtgtagtagaagtcgctg

SEQ ID NO: 1056500 - DNA, 25 bp, Homo sapien
gaacatcacagtgtagtagaagtcg

SEQ ID NO: 1056501 - DNA, 25 bp, Homo sapien
agtcgctgatggcagtcaggcaggc

SEQ ID NO: 1056502 - DNA, 25 bp, Homo sapien
gagaggatgatgtggccggtgaact

SEQ ID NO: 1056503 - DNA, 25 bp, Homo sapien
aactgagcaggggagaaccaaaagg

SEQ ID NO: 1056504 - DNA, 25 bp, Homo sapien
cgtgggtggcgtctttggagaggat

SEQ ID NO: 1056505 - DNA, 25 bp, Homo sapien
ttgggcacgaagagccggaagtcgc

SEQ ID NO: 1056506 - DNA, 25 bp, Homo sapien
actggccccgtaaagccactccatg

SEQ ID NO: 1056507 - DNA, 25 bp, Homo sapien
gccccgtaaagccactccatgtcca

SEQ ID NO: 1056508 - DNA, 25 bp, Homo sapien
tcactggccccgtaaagccactcca

SEQ ID NO: 1056509 - DNA, 25 bp, Homo sapien
tggccccgtaaagccactccatgtc

SEQ ID NO: 1056510 - DNA, 25 bp, Homo sapien
tggatgggagcctcctgtgcgctca

SEQ ID NO: 1056511 - DNA, 25 bp, Homo sapien
ggatgggagcctcctgtgcgctcac

SEQ ID NO: 1056512 - DNA, 25 bp, Homo sapien
ctggatgggagcctcctgtgcgctc

SEQ ID NO: 1056513 - DNA, 25 bp, Homo sapien
tcatccaggatcacggagggcacag

SEQ ID NO: 1056514 - DNA, 25 bp, Homo sapien
gctgtcgatcatgctgccatcctca

SEQ ID NO: 1056515 - DNA, 25 bp, Homo sapien
cttcttgaaggggtacatggccacc

SEQ ID NO: 1056516 - DNA, 25 bp, Homo sapien
acagaggggcccgtggcctccagct

SEQ ID NO: 1056517 - DNA, 25 bp, Homo sapien
tcgaaggcctcagtgaacggcaagt

SEQ ID NO: 1056518 - DNA, 25 bp, Homo sapien
tctcagccttggctcggtcgaaggc

SEQ ID NO: 1056519 - DNA, 25 bp, Homo sapien
cacagcaggattgagtgcaccagct

SEQ ID NO: 1056520 - DNA, 25 bp, Homo sapien
ccccacagcaggattgagtgcacca

SEQ ID NO: 1056521 - DNA, 25 bp, Homo sapien
gtgagggtggggcactgttttgttc

SEQ ID NO: 1056522 - DNA, 25 bp, Homo sapien
ttgacggggtgagggtggggcactg

SEQ ID NO: 1056523 - DNA, 25 bp, Homo sapien
tgacggggtgagggtggggcactgt

SEQ ID NO: 1056524 - DNA, 25 bp, Homo sapien
gagggtggggcactgttttgttcat

SEQ ID NO: 1056525 - DNA, 25 bp, Homo sapien
cttaaatccaatgaacgctctgtgt

SEQ ID NO: 1056526 - DNA, 25 bp, Homo sapien
taaatccaatgaacgctctgtgtcc

SEQ ID NO: 1056527 - DNA, 25 bp, Homo sapien
atccaatgaacgctctgtgtcccag

SEQ ID NO: 1056528 - DNA, 25 bp, Homo sapien
aaatccaatgaacgctctgtgtccc

SEQ ID NO: 1056529 - DNA, 25 bp, Homo sapien
ctgatgaagctctcgttgagcaggg

SEQ ID NO: 1056530 - DNA, 25 bp, Homo sapien
tgggcgaactttccaggacagtctc

SEQ ID NO: 1056531 - DNA, 25 bp, Homo sapien
ggatgggcgaactttccaggacagt

SEQ ID NO: 1056532 - DNA, 25 bp, Homo sapien
tcaccagggaccaggtgctgatgaa

SEQ ID NO: 1056533 - DNA, 25 bp, Homo sapien
cttctggtgggacgagttctcctgg

SEQ ID NO: 1056534 - DNA, 25 bp, Homo sapien
ttctggtgggacgagttctcctggt

SEQ ID NO: 1056535 - DNA, 25 bp, Homo sapien
ctgtacttctccaggtgcaggccag

SEQ ID NO: 1056536 - DNA, 25 bp, Homo sapien
gtacttctccaggtgcaggccagcc

SEQ ID NO: 1056537 - DNA, 25 bp, Homo sapien
agctgtacttctccaggtgcaggcc

SEQ ID NO: 1056538 - DNA, 25 bp, Homo sapien
gaagctgtacttctccaggtgcagg

SEQ ID NO: 1056539 - DNA, 25 bp, Homo sapien
cggtgccattgggcaggcagatcat

SEQ ID NO: 1056540 - DNA, 25 bp, Homo sapien
tgccattgggcaggcagatcatcat

SEQ ID NO: 1056541 - DNA, 25 bp, Homo sapien
cacggtgccattgggcaggcagatc

SEQ ID NO: 1056542 - DNA, 25 bp, Homo sapien
gtgccattgggcaggcagatcatca

SEQ ID NO: 1056543 - DNA, 25 bp, Homo sapien
ttcctcgggcttcacggaggtgatg

SEQ ID NO: 1056544 - DNA, 25 bp, Homo sapien
gaactgcatgtaggtggccgtggac

SEQ ID NO: 1056545 - DNA, 25 bp, Homo sapien
aggtgatgtccaagaagtagttggc

SEQ ID NO: 1056546 - DNA, 25 bp, Homo sapien
gctgaagagattgctctcgatttcc

SEQ ID NO: 1056547 - DNA, 25 bp, Homo sapien
ctagggctggaggaggggcaggcca

SEQ ID NO: 1056548 - DNA, 25 bp, Homo sapien
tagggctggaggaggggcaggccac

SEQ ID NO: 1056549 - DNA, 25 bp, Homo sapien
tagtgaaccccattgctaaaggcag

SEQ ID NO: 1056550 - DNA, 25 bp, Homo sapien
ttgtaccctccaaggcagcctagga

SEQ ID NO: 1056551 - DNA, 25 bp, Homo sapien
gaacgaaggctctagataaacaggg

SEQ ID NO: 1056552 - DNA, 25 bp, Homo sapien
tccactctgatggagggttctgccc

SEQ ID NO: 1056553 - DNA, 25 bp, Homo sapien
cctggttgccgggacagtgccggct

SEQ ID NO: 1056554 - DNA, 25 bp, Homo sapien
gttgccgggacagtgccggctctgg

SEQ ID NO: 1056555 - DNA, 25 bp, Homo sapien
tggtgtttggctgggttgtgcttct

SEQ ID NO: 1056556 - DNA, 25 bp, Homo sapien
tggctgggttgtgcttctgtggatg

SEQ ID NO: 1056557 - DNA, 25 bp, Homo sapien
ggacccatcgaggatttcggattca

SEQ ID NO: 1056558 - DNA, 25 bp, Homo sapien
tggctcaggacgtggaccaaagtcc

SEQ ID NO: 1056559 - DNA, 25 bp, Homo sapien
gagactggccgtggtcagtggctca

SEQ ID NO: 1056560 - DNA, 25 bp, Homo sapien
gcaaagacatcaagctggacccatc

SEQ ID NO: 1056561 - DNA, 25 bp, Homo sapien
tcatgccccatctggtctggaggtc

SEQ ID NO: 1056562 - DNA, 25 bp, Homo sapien
gcagcctgacttcaagaccttaatg

SEQ ID NO: 1056563 - DNA, 25 bp, Homo sapien
ggctcaatgtggaactggccctccc

SEQ ID NO: 1056564 - DNA, 25 bp, Homo sapien
ggtaactcggcacataaaaggccca

SEQ ID NO: 1056565 - DNA, 25 bp, Homo sapien
taggctccgataccgcggagcacac

SEQ ID NO: 1056566 - DNA, 25 bp, Homo sapien
aggcgggtccagctcggtggcgagg

SEQ ID NO: 1056567 - DNA, 25 bp, Homo sapien
cgctggcggctgtaggctccgatac

SEQ ID NO: 1056568 - DNA, 25 bp, Homo sapien
cggctgtaggctccgataccgcgga

SEQ ID NO: 1056569 - DNA, 25 bp, Homo sapien
ctcaagctcgggctcccggactctc

SEQ ID NO: 1056570 - DNA, 25 bp, Homo sapien
tcgggctcccggactctctcacctc

SEQ ID NO: 1056571 - DNA, 25 bp, Homo sapien
ttgggccgcccagcctcaaccgccc

SEQ ID NO: 1056572 - DNA, 25 bp, Homo sapien
caagctcgggctcccggactctctc

SEQ ID NO: 1056573 - DNA, 25 bp, Homo sapien
gctcccgcgagaactcgcgcgggaa

SEQ ID NO: 1056574 - DNA, 25 bp, Homo sapien
cgcgcgggaacaggagctgcgggct

SEQ ID NO: 1056575 - DNA, 25 bp, Homo sapien
ccggcacgtagacccagtctactaa

SEQ ID NO: 1056576 - DNA, 25 bp, Homo sapien
taacgggctggaaggtcgcgctccc

SEQ ID NO: 1056577 - DNA, 25 bp, Homo sapien
agccgcggccaggtctcagaatgcg

SEQ ID NO: 1056578 - DNA, 25 bp, Homo sapien
cgtcaagcagcgaagccgaaactag

SEQ ID NO: 1056579 - DNA, 25 bp, Homo sapien
ctgggccaaggtcggccaagtgctc

SEQ ID NO: 1056580 - DNA, 25 bp, Homo sapien
aagccgaaactagaagcctgaggtc

SEQ ID NO: 1056581 - DNA, 25 bp, Homo sapien
cctgcgacagggtcaggtcctttcc

SEQ ID NO: 1056582 - DNA, 25 bp, Homo sapien
ctcagagctcagcttaagcatcacc

SEQ ID NO: 1056583 - DNA, 25 bp, Homo sapien
tgtccctcggagtcctcgcgagagg

SEQ ID NO: 1056584 - DNA, 25 bp, Homo sapien
gtcctttcctgtgcgctccgcagca

SEQ ID NO: 1056585 - DNA, 25 bp, Homo sapien
cctagtgccctgtagtaagttgcga

SEQ ID NO: 1056586 - DNA, 25 bp, Homo sapien
caagtcatgaggtccgggtcactgg

SEQ ID NO: 1056587 - DNA, 25 bp, Homo sapien
tctgttaaagatctgcggccaggcg

SEQ ID NO: 1056588 - DNA, 25 bp, Homo sapien
gaaaataggagaacgaacaccagct

SEQ ID NO: 1056589 - DNA, 25 bp, Homo sapien
gcgtgactccttcatatcaggccat

SEQ ID NO: 1056590 - DNA, 25 bp, Homo sapien
gggaggcgtgactccttcatatcag

SEQ ID NO: 1056591 - DNA, 25 bp, Homo sapien
gaggcgtgactccttcatatcaggc

SEQ ID NO: 1056592 - DNA, 25 bp, Homo sapien
aggcgggaggcgtgactccttcata

SEQ ID NO: 1056593 - DNA, 25 bp, Homo sapien
gaaaggagtgctcaactggagagtc

SEQ ID NO: 1056594 - DNA, 25 bp, Homo sapien
ctctggagaaaggagtgctcaactg

SEQ ID NO: 1056595 - DNA, 25 bp, Homo sapien
gagagtctcagaaccttttacagta

SEQ ID NO: 1056596 - DNA, 25 bp, Homo sapien
cttgctccaattccaggcctctgga

SEQ ID NO: 1056597 - DNA, 25 bp, Homo sapien
cctgaagtgccccaggatcatagtt

SEQ ID NO: 1056598 - DNA, 25 bp, Homo sapien
ccaggatcatagttggttcttctta

SEQ ID NO: 1056599 - DNA, 25 bp, Homo sapien
actgactcctgaagtgccccaggat

SEQ ID NO: 1056600 - DNA, 25 bp, Homo sapien
tgccccaggatcatagttggttctt

SEQ ID NO: 1056601 - DNA, 25 bp, Homo sapien
tgctgctaaggcagtcaatgttggg

SEQ ID NO: 1056602 - DNA, 25 bp, Homo sapien
gcagtcaatgttgggagggtcaggg

SEQ ID NO: 1056603 - DNA, 25 bp, Homo sapien
ctgctgctaaggcagtcaatgttgg

SEQ ID NO: 1056604 - DNA, 25 bp, Homo sapien
taaggcagtcaatgttgggagggtc

SEQ ID NO: 1056605 - DNA, 25 bp, Homo sapien
tgaattccacaaacctagggacagg

SEQ ID NO: 1056606 - DNA, 25 bp, Homo sapien
gagaatgaatccaactactgtcctt

SEQ ID NO: 1056607 - DNA, 25 bp, Homo sapien
tctaggtttgtggagactgaattcc

SEQ ID NO: 1056608 - DNA, 25 bp, Homo sapien
ctcaattatagtgagggcaggttcc

SEQ ID NO: 1056609 - DNA, 25 bp, Homo sapien
cttcttactacacttcgagcagccc

SEQ ID NO: 1056610 - DNA, 25 bp, Homo sapien
actacacttcgagcagccccatgtg

SEQ ID NO: 1056611 - DNA, 25 bp, Homo sapien
cacacggcttcaagggtaggttggt

SEQ ID NO: 1056612 - DNA, 25 bp, Homo sapien
tcaaaggacgcccgggcacacggct

SEQ ID NO: 1056613 - DNA, 25 bp, Homo sapien
gcaccccagtaaaggatgcccagat

SEQ ID NO: 1056614 - DNA, 25 bp, Homo sapien
ctgctgagtgggtgctaaaggatcc

SEQ ID NO: 1056615 - DNA, 25 bp, Homo sapien
cctgggccaggtaggaatctctgct

SEQ ID NO: 1056616 - DNA, 25 bp, Homo sapien
gacacagaggtaagaccaaagcacc

SEQ ID NO: 1056617 - DNA, 25 bp, Homo sapien
gacggcctctatgcagtgagccaca

SEQ ID NO: 1056618 - DNA, 25 bp, Homo sapien
gaacttccagtgacccaggaactag

SEQ ID NO: 1056619 - DNA, 25 bp, Homo sapien
caggaactagtgctaaaatagggca

SEQ ID NO: 1056620 - DNA, 25 bp, Homo sapien
cctgaatgctcctttgctcttggca

SEQ ID NO: 1056621 - DNA, 25 bp, Homo sapien
tacctaatccggcactgggtgtcag

SEQ ID NO: 1056622 - DNA, 25 bp, Homo sapien
gaaggttcctggtcgaaaacattga

SEQ ID NO: 1056623 - DNA, 25 bp, Homo sapien
ttacagatgccatgatgagccaatc

SEQ ID NO: 1056624 - DNA, 25 bp, Homo sapien
cagaaactgcagaatacacaggagg

SEQ ID NO: 1056625 - DNA, 25 bp, Homo sapien
aacacaggtcagagatgttgggcag

SEQ ID NO: 1056626 - DNA, 25 bp, Homo sapien
caatccaggcgatgtcagccagggt

SEQ ID NO: 1056627 - DNA, 25 bp, Homo sapien
gacccgggcatatgtctcctcttca

SEQ ID NO: 1056628 - DNA, 25 bp, Homo sapien
tcttcatccgcagcaatccaggcga

SEQ ID NO: 1056629 - DNA, 25 bp, Homo sapien
gatcagttagagacagcaggccact

SEQ ID NO: 1056630 - DNA, 25 bp, Homo sapien
gggaagttctccattccttagcaga

SEQ ID NO: 1056631 - DNA, 25 bp, Homo sapien
caggccactgtgctcctaaggttcc

SEQ ID NO: 1056632 - DNA, 25 bp, Homo sapien
cccacttctgtgagagtagtatagt

SEQ ID NO: 1056633 - DNA, 25 bp, Homo sapien
tgggaacagaggcattgcgctgcat

SEQ ID NO: 1056634 - DNA, 25 bp, Homo sapien
tttgcaatctggctgcgcaagtggc

SEQ ID NO: 1056635 - DNA, 25 bp, Homo sapien
cctgcagctcagtagtgcggcttag

SEQ ID NO: 1056636 - DNA, 25 bp, Homo sapien
catgacaatcagagggctgggtttc

SEQ ID NO: 1056637 - DNA, 25 bp, Homo sapien
aaatctggcgttaatgaagccgaag

SEQ ID NO: 1056638 - DNA, 25 bp, Homo sapien
aagaaatctggcgttaatgaagccg

SEQ ID NO: 1056639 - DNA, 25 bp, Homo sapien
gataagaaatctggcgttaatgaag

SEQ ID NO: 1056640 - DNA, 25 bp, Homo sapien
ctggagataagaaatctggcgttaa

SEQ ID NO: 1056641 - DNA, 25 bp, Homo sapien
gacaaaggaagttgtagagtggaat

SEQ ID NO: 1056642 - DNA, 25 bp, Homo sapien
ttgtagagtggaatgaggatccaaa

SEQ ID NO: 1056643 - DNA, 25 bp, Homo sapien
atgacaaaggaagttgtagagtgga

SEQ ID NO: 1056644 - DNA, 25 bp, Homo sapien
aagttgtagagtggaatgaggatcc

SEQ ID NO: 1056645 - DNA, 25 bp, Homo sapien
cagctttgtgttctggtttgcaaca

SEQ ID NO: 1056646 - DNA, 25 bp, Homo sapien
tcatcctcttcagacgaactgcagg

SEQ ID NO: 1056647 - DNA, 25 bp, Homo sapien
gccttggacaaagagacgcagtcat

SEQ ID NO: 1056648 - DNA, 25 bp, Homo sapien
ttcattcggtgaaagtccttcagga

SEQ ID NO: 1056649 - DNA, 25 bp, Homo sapien
gtgggccatgaagacactgtcacta

SEQ ID NO: 1056650 - DNA, 25 bp, Homo sapien
tcactagcagtatgaggactgaagt

SEQ ID NO: 1056651 - DNA, 25 bp, Homo sapien
ggttggtgacatatctgaacctttg

SEQ ID NO: 1056652 - DNA, 25 bp, Homo sapien
gactgcgtttggttggtgacatatc

SEQ ID NO: 1056653 - DNA, 25 bp, Homo sapien
ttcttattcactgacccagctcctt

SEQ ID NO: 1056654 - DNA, 25 bp, Homo sapien
attcttattcactgacccagctcct

SEQ ID NO: 1056655 - DNA, 25 bp, Homo sapien
aaacttcctccttaggacctcagag

SEQ ID NO: 1056656 - DNA, 25 bp, Homo sapien
taggacctcagagataagcacagca

SEQ ID NO: 1056657 - DNA, 25 bp, Homo sapien
cctccttaggacctcagagataagc

SEQ ID NO: 1056658 - DNA, 25 bp, Homo sapien
tcctttagagcaaacttcctcctta

SEQ ID NO: 1056659 - DNA, 25 bp, Homo sapien
taatgtcaggtagtgcttcaaccca

SEQ ID NO: 1056660 - DNA, 25 bp, Homo sapien
tatacataccatagagaaagggacc

SEQ ID NO: 1056661 - DNA, 25 bp, Homo sapien
caaaggagcagtcaagggcctggaa

SEQ ID NO: 1056662 - DNA, 25 bp, Homo sapien
tcagtggaactgataaggcctcagg

SEQ ID NO: 1056663 - DNA, 25 bp, Homo sapien
acttttatcgtgtatgtcatctctc

SEQ ID NO: 1056664 - DNA, 25 bp, Homo sapien
aaattctacttttatcgtgtatgtc

SEQ ID NO: 1056665 - DNA, 25 bp, Homo sapien
ttaagaatgtatggggcttagtgcg

SEQ ID NO: 1056666 - DNA, 25 bp, Homo sapien
atcgtgtatgtcatctctccagtca

SEQ ID NO: 1056667 - DNA, 25 bp, Homo sapien
tcctaacagtccttgggctcagtgc

SEQ ID NO: 1056668 - DNA, 25 bp, Homo sapien
tgccaggaggatgggccaactcaaa

SEQ ID NO: 1056669 - DNA, 25 bp, Homo sapien
gattctcaaggccagcgggtcattg

SEQ ID NO: 1056670 - DNA, 25 bp, Homo sapien
tcagtgaaacaaagccgtagtccag

SEQ ID NO: 1056671 - DNA, 25 bp, Homo sapien
caaatccttgcgcatatttattcca

SEQ ID NO: 1056672 - DNA, 25 bp, Homo sapien
tacaagtgctacattaagtatctgg

SEQ ID NO: 1056673 - DNA, 25 bp, Homo sapien
tgtagtctccaatctgtcgttaagc

SEQ ID NO: 1056674 - DNA, 25 bp, Homo sapien
ttgtgttactattgtcttcaggttc

SEQ ID NO: 1056675 - DNA, 25 bp, Homo sapien
tctgaggctgtcgagaaccgttcac

SEQ ID NO: 1056676 - DNA, 25 bp, Homo sapien
cgcgaagattcagcgatgacacgaa

SEQ ID NO: 1056677 - DNA, 25 bp, Homo sapien
tctggtaaccacttaggtcgaggac

SEQ ID NO: 1056678 - DNA, 25 bp, Homo sapien
tgacacgaacaaattcctaagcccg

SEQ ID NO: 1056679 - DNA, 25 bp, Homo sapien
gactgaaatctagttcctgacccca

SEQ ID NO: 1056680 - DNA, 25 bp, Homo sapien
tcctctcccatgtggcttcgtagtt

SEQ ID NO: 1056681 - DNA, 25 bp, Homo sapien
cacagtaaacggtgaaagcaggact

SEQ ID NO: 1056682 - DNA, 25 bp, Homo sapien
catctatggagattgtggttaggga

SEQ ID NO: 1056683 - DNA, 25 bp, Homo sapien
ggtggctgagcttctatcctccctc

SEQ ID NO: 1056684 - DNA, 25 bp, Homo sapien
ggctgcagagatggttgaggttcct

SEQ ID NO: 1056685 - DNA, 25 bp, Homo sapien
gacaaagcgagatggctctgtccac

SEQ ID NO: 1056686 - DNA, 25 bp, Homo sapien
gcagagatggttgaggttcctggct

SEQ ID NO: 1056687 - DNA, 25 bp, Homo sapien
cagaatgaactgtcaagggaggtgc

SEQ ID NO: 1056688 - DNA, 25 bp, Homo sapien
gcagatggagaataggaagggcatt

SEQ ID NO: 1056689 - DNA, 25 bp, Homo sapien
cgcctggccgacaaaggctttgata

SEQ ID NO: 1056690 - DNA, 25 bp, Homo sapien
tgcctgggaccctcagggtcttagg

SEQ ID NO: 1056691 - DNA, 25 bp, Homo sapien
cattggctcctgctataacaagtac

SEQ ID NO: 1056692 - DNA, 25 bp, Homo sapien
tcctggcctacgcactggacattag

SEQ ID NO: 1056693 - DNA, 25 bp, Homo sapien
tcttctctaccacaagtgccaggtg

SEQ ID NO: 1056694 - DNA, 25 bp, Homo sapien
tcttggtgctgtgcacgctggctca

SEQ ID NO: 1056695 - DNA, 25 bp, Homo sapien
cctgtcttcacggtggatcgagctg

SEQ ID NO: 1056696 - DNA, 25 bp, Homo sapien
tcagccacctcctgccgagtctgcg

SEQ ID NO: 1056697 - DNA, 25 bp, Homo sapien
ccgagtctgcggcaggtcatccagg

SEQ ID NO: 1056698 - DNA, 25 bp, Homo sapien
gccagagcctgtcttcacggtggat

SEQ ID NO: 1056699 - DNA, 25 bp, Homo sapien
tgaggaggggtaaagagtcgaacaa

SEQ ID NO: 1056700 - DNA, 25 bp, Homo sapien
gtgaggaggggtaaagagtcgaaca

SEQ ID NO: 1056701 - DNA, 25 bp, Homo sapien
caccgtgctcccatcaccttgtgct

SEQ ID NO: 1056702 - DNA, 25 bp, Homo sapien
ctactgcaccgtgctcccatcacct

SEQ ID NO: 1056703 - DNA, 25 bp, Homo sapien
ctgcaccgtgctcccatcaccttgt

SEQ ID NO: 1056704 - DNA, 25 bp, Homo sapien
tgctcctactgcaccgtgctcccat

SEQ ID NO: 1056705 - DNA, 25 bp, Homo sapien
tgactgttctaaaagagccctgccg

SEQ ID NO: 1056706 - DNA, 25 bp, Homo sapien
gcagtgaagtcggaaaaatgatctc

SEQ ID NO: 1056707 - DNA, 25 bp, Homo sapien
tgggtctccgtttctctagctgtga

SEQ ID NO: 1056708 - DNA, 25 bp, Homo sapien
tctcagttccaagcaggaaaattga

SEQ ID NO: 1056709 - DNA, 25 bp, Homo sapien
gaccttctccgcatagattctctga

SEQ ID NO: 1056710 - DNA, 25 bp, Homo sapien
aagaagaccttctccgcatagattc

SEQ ID NO: 1056711 - DNA, 25 bp, Homo sapien
tgccaactacaaccacactggaaga

SEQ ID NO: 1056712 - DNA, 25 bp, Homo sapien
agcaatgccaactacaaccacactg

SEQ ID NO: 1056713 - DNA, 25 bp, Homo sapien
cagttgctctgagagcagaccactc

SEQ ID NO: 1056714 - DNA, 25 bp, Homo sapien
tatttttgtgcgtggcaagtgggac

SEQ ID NO: 1056715 - DNA, 25 bp, Homo sapien
ttgccttgatggtagggaactattt

SEQ ID NO: 1056716 - DNA, 25 bp, Homo sapien
tgagagcagaccactcttgccttga

SEQ ID NO: 1056717 - DNA, 25 bp, Homo sapien
caccacgatggcagagaaagggaga

SEQ ID NO: 1056718 - DNA, 25 bp, Homo sapien
cttgaccaggaagtcttgtgagaag

SEQ ID NO: 1056719 - DNA, 25 bp, Homo sapien
acatggcaagaagcggagtcaagca

SEQ ID NO: 1056720 - DNA, 25 bp, Homo sapien
cggagtcaagcacacaccacgatgg

SEQ ID NO: 1056721 - DNA, 25 bp, Homo sapien
tcatcctaatccactggagaatgga

SEQ ID NO: 1056722 - DNA, 25 bp, Homo sapien
taatccactggagaatggaacgatt

SEQ ID NO: 1056723 - DNA, 25 bp, Homo sapien
cctaatccactggagaatggaacga

SEQ ID NO: 1056724 - DNA, 25 bp, Homo sapien
tcctaatccactggagaatggaacg

SEQ ID NO: 1056725 - DNA, 25 bp, Homo sapien
cctcaggatgcaacatctaaacacc

SEQ ID NO: 1056726 - DNA, 25 bp, Homo sapien
gagacccctcaggatgcaacatcta

SEQ ID NO: 1056727 - DNA, 25 bp, Homo sapien
tcaggatgcaacatctaaacaccat

SEQ ID NO: 1056728 - DNA, 25 bp, Homo sapien
gacccctcaggatgcaacatctaaa

SEQ ID NO: 1056729 - DNA, 25 bp, Homo sapien
agagcagtacctgcccagtccttgg

SEQ ID NO: 1056730 - DNA, 25 bp, Homo sapien
ttccatcgtggccaagagcagagca

SEQ ID NO: 1056731 - DNA, 25 bp, Homo sapien
ggttcatagttagaaaggcctggcc

SEQ ID NO: 1056732 - DNA, 25 bp, Homo sapien
tagttgtagggtttgatgagctcca

SEQ ID NO: 1056733 - DNA, 25 bp, Homo sapien
ggctctcgaccacatacttgtactc

SEQ ID NO: 1056734 - DNA, 25 bp, Homo sapien
tctcgaccacatacttgtactcacc

SEQ ID NO: 1056735 - DNA, 25 bp, Homo sapien
ccagggtgctttagtgctttggtga

SEQ ID NO: 1056736 - DNA, 25 bp, Homo sapien
cagggtgctttagtgctttggtgaa

SEQ ID NO: 1056737 - DNA, 25 bp, Homo sapien
agcacctagattgtgctccacactg

SEQ ID NO: 1056738 - DNA, 25 bp, Homo sapien
aaattaacatttgacaagcacctag

SEQ ID NO: 1056739 - DNA, 25 bp, Homo sapien
catttgacaagcacctagattgtgc

SEQ ID NO: 1056740 - DNA, 25 bp, Homo sapien
gacaagcacctagattgtgctccac

SEQ ID NO: 1056741 - DNA, 25 bp, Homo sapien
taaatatccaaagactgtactggcc

SEQ ID NO: 1056742 - DNA, 25 bp, Homo sapien
aaagaccctgctgacgagactgaag

SEQ ID NO: 1056743 - DNA, 25 bp, Homo sapien
tttgcttgctctacgttacaggtgg

SEQ ID NO: 1056744 - DNA, 25 bp, Homo sapien
ggtagaaatacccaacgcacaaatg

SEQ ID NO: 1056745 - DNA, 25 bp, Homo sapien
gttattctaaggcacggtcagacca

SEQ ID NO: 1056746 - DNA, 25 bp, Homo sapien
cctatcatccgcagaaggcttggaa

SEQ ID NO: 1056747 - DNA, 25 bp, Homo sapien
cacaatatgggtgacacgccggtgt

SEQ ID NO: 1056748 - DNA, 25 bp, Homo sapien
gaggatgctggcaagaacgcacaca

SEQ ID NO: 1056749 - DNA, 25 bp, Homo sapien
tcagaaaaatgacagacggaagcac

SEQ ID NO: 1056750 - DNA, 25 bp, Homo sapien
tcaagataaaaagcctgttcagtgg

SEQ ID NO: 1056751 - DNA, 25 bp, Homo sapien
ttcagtgggtaaggacctcttgggc

SEQ ID NO: 1056752 - DNA, 25 bp, Homo sapien
tgcattaaatgagtgggaccttcct

SEQ ID NO: 1056753 - DNA, 25 bp, Homo sapien
gatgagaggcaacttcagctttctt

SEQ ID NO: 1056754 - DNA, 25 bp, Homo sapien
agcagaactgtggattttctgtgat

SEQ ID NO: 1056755 - DNA, 25 bp, Homo sapien
ttgggatagcaagtggagatgagag

SEQ ID NO: 1056756 - DNA, 25 bp, Homo sapien
ccagttcactcctaattcatctgag

SEQ ID NO: 1056757 - DNA, 25 bp, Homo sapien
cacgtgtcagtactgcggtcgggct

SEQ ID NO: 1056758 - DNA, 25 bp, Homo sapien
tggagcgcagcgaagccattttctg

SEQ ID NO: 1056759 - DNA, 25 bp, Homo sapien
acaacgcttgtgtgtcgctgtgcaa

SEQ ID NO: 1056760 - DNA, 25 bp, Homo sapien
gaaaaatcagctgttagagacgcca

SEQ ID NO: 1056761 - DNA, 25 bp, Homo sapien
ccggaggttgtgtctcagcatctca

SEQ ID NO: 1056762 - DNA, 25 bp, Homo sapien
ctgggctttcgatgtgagtaggatc

SEQ ID NO: 1056763 - DNA, 25 bp, Homo sapien
aaacgaggctggtattatctagggc

SEQ ID NO: 1056764 - DNA, 25 bp, Homo sapien
tgagtccactttcgcagcccggagg

SEQ ID NO: 1056765 - DNA, 25 bp, Homo sapien
agccacagcaggacttctggaccca

SEQ ID NO: 1056766 - DNA, 25 bp, Homo sapien
tctggacccagccataggccagcgg

SEQ ID NO: 1056767 - DNA, 25 bp, Homo sapien
ttagaaccagacaagccacagcagg

SEQ ID NO: 1056768 - DNA, 25 bp, Homo sapien
cagccataggccagcggacagcagg

SEQ ID NO: 1056769 - DNA, 25 bp, Homo sapien
cttctctgtgagcacctggtgttgg

SEQ ID NO: 1056770 - DNA, 25 bp, Homo sapien
cagacaagtaattgtccctcaggcc

SEQ ID NO: 1056771 - DNA, 25 bp, Homo sapien
caaagccttataagatttgatgatg

SEQ ID NO: 1056772 - DNA, 25 bp, Homo sapien
ttttctggggccttcagacaagtaa

SEQ ID NO: 1056773 - DNA, 25 bp, Homo sapien
gccttataagatttgatgatgagta

SEQ ID NO: 1056774 - DNA, 25 bp, Homo sapien
cttcctggacttcagactaaggctg

SEQ ID NO: 1056775 - DNA, 25 bp, Homo sapien
gtttctgtgcatgggatggcaagcc

SEQ ID NO: 1056776 - DNA, 25 bp, Homo sapien
aagactctgtgcctatggaggcctc

SEQ ID NO: 1056777 - DNA, 25 bp, Homo sapien
gaggcctcctagtggtataatgtga

SEQ ID NO: 1056778 - DNA, 25 bp, Homo sapien
gccattctaagaggtgaaacagcag

SEQ ID NO: 1056779 - DNA, 25 bp, Homo sapien
gggaaatgcatctctacacaatggc

SEQ ID NO: 1056780 - DNA, 25 bp, Homo sapien
cgtgcctcagtccaagtaggtaaga

SEQ ID NO: 1056781 - DNA, 25 bp, Homo sapien
tgttcgcttactacttgggcccatg

SEQ ID NO: 1056782 - DNA, 25 bp, Homo sapien
tgtgaagactcagcccagcgaagct

SEQ ID NO: 1056783 - DNA, 25 bp, Homo sapien
tacacagaggtacctcagaagctct

SEQ ID NO: 1056784 - DNA, 25 bp, Homo sapien
gtaagttatacttgtgagcccacag

SEQ ID NO: 1056785 - DNA, 25 bp, Homo sapien
tatgtaaatttctaggtgtgagccg

SEQ ID NO: 1056786 - DNA, 25 bp, Homo sapien
gtggggaacaagcagtagagtggga

SEQ ID NO: 1056787 - DNA, 25 bp, Homo sapien
tggagtggggaacaagcagtagagt

SEQ ID NO: 1056788 - DNA, 25 bp, Homo sapien
gggaccttgatggagtggggaacaa

SEQ ID NO: 1056789 - DNA, 25 bp, Homo sapien
ggaccttgatggagtggggaacaag

SEQ ID NO: 1056790 - DNA, 25 bp, Homo sapien
ttgtgcaagcgccgtgctcatctct

SEQ ID NO: 1056791 - DNA, 25 bp, Homo sapien
atccttgtgcaagcgccgtgctcat

SEQ ID NO: 1056792 - DNA, 25 bp, Homo sapien
cttgtgcaagcgccgtgctcatctc

SEQ ID NO: 1056793 - DNA, 25 bp, Homo sapien
ccttgtgcaagcgccgtgctcatct

SEQ ID NO: 1056794 - DNA, 25 bp, Homo sapien
cttttatgacagttgaacttgcagc

SEQ ID NO: 1056795 - DNA, 25 bp, Homo sapien
ctgtttcttctcagaactcctgtgg

SEQ ID NO: 1056796 - DNA, 25 bp, Homo sapien
ttgtggccccagcagtaggtcttcc

SEQ ID NO: 1056797 - DNA, 25 bp, Homo sapien
cattgtcatgtgagtgacaggtgtc

SEQ ID NO: 1056798 - DNA, 25 bp, Homo sapien
cttgcgttgtttctcacacaagctt

SEQ ID NO: 1056799 - DNA, 25 bp, Homo sapien
cagactgcactaatggtgacttcat

SEQ ID NO: 1056800 - DNA, 25 bp, Homo sapien
aactcagactgcactaatggtgact

SEQ ID NO: 1056801 - DNA, 25 bp, Homo sapien
ctcagactgcactaatggtgacttc

SEQ ID NO: 1056802 - DNA, 25 bp, Homo sapien
gactgcactaatggtgacttcatca

SEQ ID NO: 1056803 - DNA, 25 bp, Homo sapien
cctgtggaggaggctctcaggccag

SEQ ID NO: 1056804 - DNA, 25 bp, Homo sapien
ccctgtggaggaggctctcaggcca

SEQ ID NO: 1056805 - DNA, 25 bp, Homo sapien
agacagcaatgtggtttttagaaaa

SEQ ID NO: 1056806 - DNA, 25 bp, Homo sapien
gacctgaaagacagcaatgtggttt

SEQ ID NO: 1056807 - DNA, 25 bp, Homo sapien
cctaagacctgaaagacagcaatgt

SEQ ID NO: 1056808 - DNA, 25 bp, Homo sapien
tgaaagacagcaatgtggtttttag

SEQ ID NO: 1056809 - DNA, 25 bp, Homo sapien
cccatggagggatttccccggtcag

SEQ ID NO: 1056810 - DNA, 25 bp, Homo sapien
atggagggatttccccggtcagtgc

SEQ ID NO: 1056811 - DNA, 25 bp, Homo sapien
tcttccatagtccaggccccatgga

SEQ ID NO: 1056812 - DNA, 25 bp, Homo sapien
gactcttccatagtccaggccccat

SEQ ID NO: 1056813 - DNA, 25 bp, Homo sapien
gatcatcggcgtcagctgaggtcac

SEQ ID NO: 1056814 - DNA, 25 bp, Homo sapien
tctggcttggagctatcacagtgca

SEQ ID NO: 1056815 - DNA, 25 bp, Homo sapien
tcagatagtgagtcaccagccaggc

SEQ ID NO: 1056816 - DNA, 25 bp, Homo sapien
ctgtccagaatgcagggccgtgtcc

SEQ ID NO: 1056817 - DNA, 25 bp, Homo sapien
aggcaatgccaggcggagaagggag

SEQ ID NO: 1056818 - DNA, 25 bp, Homo sapien
gaggcaatgccaggcggagaaggga

SEQ ID NO: 1056819 - DNA, 25 bp, Homo sapien
gggaggcaatgccaggcggagaagg

SEQ ID NO: 1056820 - DNA, 25 bp, Homo sapien
ctgggaggcaatgccaggcggagaa

SEQ ID NO: 1056821 - DNA, 25 bp, Homo sapien
tggttccaaccgctgggtacacgaa

SEQ ID NO: 1056822 - DNA, 25 bp, Homo sapien
gaatgtgtagaagcgagagccctca

SEQ ID NO: 1056823 - DNA, 25 bp, Homo sapien
ccaggatcctgcgatgagtctcaga

SEQ ID NO: 1056824 - DNA, 25 bp, Homo sapien
caagattcccagttgcagctgccac

SEQ ID NO: 1056825 - DNA, 25 bp, Homo sapien
ggagacggaggaccagatggttcct

SEQ ID NO: 1056826 - DNA, 25 bp, Homo sapien
gtggagacggaggaccagatggttc

SEQ ID NO: 1056827 - DNA, 25 bp, Homo sapien
tggagacggaggaccagatggttcc

SEQ ID NO: 1056828 - DNA, 25 bp, Homo sapien
aggagccccacctcgcaacgggtgg

SEQ ID NO: 1056829 - DNA, 25 bp, Homo sapien
cctcgcaacgggtgggcttcaggga

SEQ ID NO: 1056830 - DNA, 25 bp, Homo sapien
accatagcctgtcccagctggaagg

SEQ ID NO: 1056831 - DNA, 25 bp, Homo sapien
ggctagcagggctaccccgggctgg

SEQ ID NO: 1056832 - DNA, 25 bp, Homo sapien
agccagtgtctgctgtgcgccaccc

SEQ ID NO: 1056833 - DNA, 25 bp, Homo sapien
tgcccaggtccagggtcttgctcac

SEQ ID NO: 1056834 - DNA, 25 bp, Homo sapien
ccagtgtctgctgtgcgccacccac

SEQ ID NO: 1056835 - DNA, 25 bp, Homo sapien
gagccagtgtctgctgtgcgccacc

SEQ ID NO: 1056836 - DNA, 25 bp, Homo sapien
agccctttggccgagagaagtcccg

SEQ ID NO: 1056837 - DNA, 25 bp, Homo sapien
tggaggcctccatgtaccttcagga

SEQ ID NO: 1056838 - DNA, 25 bp, Homo sapien
attcccacgagagccctttggccga

SEQ ID NO: 1056839 - DNA, 25 bp, Homo sapien
agaagtcccgggagccccaagcaga

SEQ ID NO: 1056840 - DNA, 25 bp, Homo sapien
ccttgaagggtgcatgacaggatca

SEQ ID NO: 1056841 - DNA, 25 bp, Homo sapien
ccggcacttcggagaaactgaggct

SEQ ID NO: 1056842 - DNA, 25 bp, Homo sapien
tccaagcgcctgattagaaaagtga

SEQ ID NO: 1056843 - DNA, 25 bp, Homo sapien
caagagaccgttcaaccaaggtgga

SEQ ID NO: 1056844 - DNA, 25 bp, Homo sapien
ttaatgtctaagctgaaacatcacc

SEQ ID NO: 1056845 - DNA, 25 bp, Homo sapien
tgcagtagtaatgatccaagctaac

SEQ ID NO: 1056846 - DNA, 25 bp, Homo sapien
cacctcccagtggactgcagtagta

SEQ ID NO: 1056847 - DNA, 25 bp, Homo sapien
ccagagatggctttctctactccca

SEQ ID NO: 1056848 - DNA, 25 bp, Homo sapien
agatgaggcagaaggtggcattggg

SEQ ID NO: 1056849 - DNA, 25 bp, Homo sapien
gatgaggcagaaggtggcattgggc

SEQ ID NO: 1056850 - DNA, 25 bp, Homo sapien
gggcttggaggaagcgcgaggcagc

SEQ ID NO: 1056851 - DNA, 25 bp, Homo sapien
aggcagcctcgggacggtggccaga

SEQ ID NO: 1056852 - DNA, 25 bp, Homo sapien
agcctctcatcagctacgatggctg

SEQ ID NO: 1056853 - DNA, 25 bp, Homo sapien
tccagtcgatgacctcggagaaggg

SEQ ID NO: 1056854 - DNA, 25 bp, Homo sapien
catcagctacgatggctgccttggt

SEQ ID NO: 1056855 - DNA, 25 bp, Homo sapien
ttggtccagtcgatgacctcggaga

SEQ ID NO: 1056856 - DNA, 25 bp, Homo sapien
aagtaggcatcccatagaaactggg

SEQ ID NO: 1056857 - DNA, 25 bp, Homo sapien
gaggacccgtgcaggggacatctcc

SEQ ID NO: 1056858 - DNA, 25 bp, Homo sapien
tgggtctgctgacgcagggcgagga

SEQ ID NO: 1056859 - DNA, 25 bp, Homo sapien
ccagagtggtatggatgaccttctc

SEQ ID NO: 1056860 - DNA, 25 bp, Homo sapien
ctccatgatgttgctccagaggtgg

SEQ ID NO: 1056861 - DNA, 25 bp, Homo sapien
ttctttcaggactcagaatccctcc

SEQ ID NO: 1056862 - DNA, 25 bp, Homo sapien
tagggggcactccatgatgttgctc

SEQ ID NO: 1056863 - DNA, 25 bp, Homo sapien
tttcaggactcagaatccctcccaa

SEQ ID NO: 1056864 - DNA, 25 bp, Homo sapien
tgttccacagcagtgaggggtgagc

SEQ ID NO: 1056865 - DNA, 25 bp, Homo sapien
gggctgttccacagcagtgaggggt

SEQ ID NO: 1056866 - DNA, 25 bp, Homo sapien
tccacagcagtgaggggtgagctga

SEQ ID NO: 1056867 - DNA, 25 bp, Homo sapien
ggctgttccacagcagtgaggggtg

SEQ ID NO: 1056868 - DNA, 25 bp, Homo sapien
gggagggaacagaaccccatgaaga

SEQ ID NO: 1056869 - DNA, 25 bp, Homo sapien
ccatgaagaatgacctgagtaggga

SEQ ID NO: 1056870 - DNA, 25 bp, Homo sapien
tgagacacaggctattagagtggga

SEQ ID NO: 1056871 - DNA, 25 bp, Homo sapien
aatgacctgagtagggaatccccgg

SEQ ID NO: 1056872 - DNA, 25 bp, Homo sapien
ctgaatctgccctcagggcgggagc

SEQ ID NO: 1056873 - DNA, 25 bp, Homo sapien
cagatcagggcgctgaatctgccct

SEQ ID NO: 1056874 - DNA, 25 bp, Homo sapien
agggcgctgaatctgccctcagggc

SEQ ID NO: 1056875 - DNA, 25 bp, Homo sapien
ccacccagatcagggcgctgaatct

SEQ ID NO: 1056876 - DNA, 25 bp, Homo sapien
agagttgtctgtggtagtccctagc

SEQ ID NO: 1056877 - DNA, 25 bp, Homo sapien
gatccatggtcctttcaccgctgct

SEQ ID NO: 1056878 - DNA, 25 bp, Homo sapien
ggagtgatctttctcaaggtggaag

SEQ ID NO: 1056879 - DNA, 25 bp, Homo sapien
catgagggtagtgacctgtggcttc

SEQ ID NO: 1056880 - DNA, 25 bp, Homo sapien
tgggagtggcctctcattgctccag

SEQ ID NO: 1056881 - DNA, 25 bp, Homo sapien
cccatcaatgactgtcaagggcaca

SEQ ID NO: 1056882 - DNA, 25 bp, Homo sapien
cttgtggaaagactgctgcgggcat

SEQ ID NO: 1056883 - DNA, 25 bp, Homo sapien
atggtgctatatgggtagaagcgat

SEQ ID NO: 1056884 - DNA, 25 bp, Homo sapien
tatatgggtagaagcgatcactaac

SEQ ID NO: 1056885 - DNA, 25 bp, Homo sapien
tgctgcgggcatcgaggctgaggat

SEQ ID NO: 1056886 - DNA, 25 bp, Homo sapien
tgccacaccagaaaggcaaagtcca

SEQ ID NO: 1056887 - DNA, 25 bp, Homo sapien
ctgccacaccagaaaggcaaagtcc

SEQ ID NO: 1056888 - DNA, 25 bp, Homo sapien
gccacaccagaaaggcaaagtccac

SEQ ID NO: 1056889 - DNA, 25 bp, Homo sapien
cagaaatggctcgacgtcaggaagc

SEQ ID NO: 1056890 - DNA, 25 bp, Homo sapien
aggaagcccaccatccgctctggga

SEQ ID NO: 1056891 - DNA, 25 bp, Homo sapien
tgtggtgagaaccatggagaattcg

SEQ ID NO: 1056892 - DNA, 25 bp, Homo sapien
ttggtcctctcagcagtgtagcccc

SEQ ID NO: 1056893 - DNA, 25 bp, Homo sapien
gggacttcatttaatgttcacacca

SEQ ID NO: 1056894 - DNA, 25 bp, Homo sapien
tctcggccttgaacctggatccctg

SEQ ID NO: 1056895 - DNA, 25 bp, Homo sapien
cctgggaggtgaatccatcccattt

SEQ ID NO: 1056896 - DNA, 25 bp, Homo sapien
tgatactctgatccctgtgcagggt

SEQ ID NO: 1056897 - DNA, 25 bp, Homo sapien
tactatgaaattcatcaggacgtcc

SEQ ID NO: 1056898 - DNA, 25 bp, Homo sapien
cttggtgactgctgctactatgaaa

SEQ ID NO: 1056899 - DNA, 25 bp, Homo sapien
tgcctcatctgccagggtcctcaga

SEQ ID NO: 1056900 - DNA, 25 bp, Homo sapien
attcatcaggacgtccacacaggtg

SEQ ID NO: 1056901 - DNA, 25 bp, Homo sapien
cctggcgctgcttgccatagggcac

SEQ ID NO: 1056902 - DNA, 25 bp, Homo sapien
gcctcctggcgctgcttgccatagg

SEQ ID NO: 1056903 - DNA, 25 bp, Homo sapien
tcctggcgctgcttgccatagggca

SEQ ID NO: 1056904 - DNA, 25 bp, Homo sapien
cagtggagcagcctcctggcgctgc

SEQ ID NO: 1056905 - DNA, 25 bp, Homo sapien
tgcggtacttcttgcgctgcacgga

SEQ ID NO: 1056906 - DNA, 25 bp, Homo sapien
gctgcacggacaccgggtccttaaa

SEQ ID NO: 1056907 - DNA, 25 bp, Homo sapien
gtccttaaacagcaccgggtccaga

SEQ ID NO: 1056908 - DNA, 25 bp, Homo sapien
tgccgctatctggttgatgcagtcg

SEQ ID NO: 1056909 - DNA, 25 bp, Homo sapien
tgtgggcccgctggctgacatgata

SEQ ID NO: 1056910 - DNA, 25 bp, Homo sapien
gctgagttccaagtgtgcaggcgaa

SEQ ID NO: 1056911 - DNA, 25 bp, Homo sapien
caaacactggactgcgaaagcgcaa

SEQ ID NO: 1056912 - DNA, 25 bp, Homo sapien
catgataggttctccggtgtcccaa

SEQ ID NO: 1056913 - DNA, 25 bp, Homo sapien
gccccgtatcttgtcacttatggaa

SEQ ID NO: 1056914 - DNA, 25 bp, Homo sapien
tatgaagggttcttgatcaacatgc

SEQ ID NO: 1056915 - DNA, 25 bp, Homo sapien
aagcagcaagcatttcagccccgta

SEQ ID NO: 1056916 - DNA, 25 bp, Homo sapien
catgggctgctacatcagaattgcc

SEQ ID NO: 1056917 - DNA, 25 bp, Homo sapien
tgtttgcttccgagggaggccttca

SEQ ID NO: 1056918 - DNA, 25 bp, Homo sapien
caagattcttttcggcctctctgcg

SEQ ID NO: 1056919 - DNA, 25 bp, Homo sapien
gagggaagcaagtacaaggtgtcac

SEQ ID NO: 1056920 - DNA, 25 bp, Homo sapien
tagaaatacggttggacaaaagagc

SEQ ID NO: 1056921 - DNA, 25 bp, Homo sapien
gagctgagctatacccgaaagaggg

SEQ ID NO: 1056922 - DNA, 25 bp, Homo sapien
tgtccgtgcagtaagccgtagccac

SEQ ID NO: 1056923 - DNA, 25 bp, Homo sapien
cctgctgttggcctcacctgtaaaa

SEQ ID NO: 1056924 - DNA, 25 bp, Homo sapien
gatccctactggaggctctttctag

SEQ ID NO: 1056925 - DNA, 25 bp, Homo sapien
cattcccccggccttgacctggctg

SEQ ID NO: 1056926 - DNA, 25 bp, Homo sapien
cggccttgacctggctgttccaggg

SEQ ID NO: 1056927 - DNA, 25 bp, Homo sapien
ctctcagggtccattcccccggcct

SEQ ID NO: 1056928 - DNA, 25 bp, Homo sapien
tcagggtccattcccccggccttga

SEQ ID NO: 1056929 - DNA, 25 bp, Homo sapien
gaaacgcctttcttatcagcataga

SEQ ID NO: 1056930 - DNA, 25 bp, Homo sapien
cagagtcgagttattaatacccagc

SEQ ID NO: 1056931 - DNA, 25 bp, Homo sapien
agccagcccaccagctttgcattta

SEQ ID NO: 1056932 - DNA, 25 bp, Homo sapien
tcagcatagacgtcagagtctgtca

SEQ ID NO: 1056933 - DNA, 25 bp, Homo sapien
ggcttcctggaagctcgtcccctcc

SEQ ID NO: 1056934 - DNA, 25 bp, Homo sapien
aaccaggcacagaacttcccttgcg

SEQ ID NO: 1056935 - DNA, 25 bp, Homo sapien
accagccagccggagcagcgtgcct

SEQ ID NO: 1056936 - DNA, 25 bp, Homo sapien
ctctctgccgcatcctagtccactc

SEQ ID NO: 1056937 - DNA, 25 bp, Homo sapien
tcctcccgctgtgattttccctatt

SEQ ID NO: 1056938 - DNA, 25 bp, Homo sapien
gcctcggacaaatgggctgctctgc

SEQ ID NO: 1056939 - DNA, 25 bp, Homo sapien
ctgtgactgagagcctcggacaaat

SEQ ID NO: 1056940 - DNA, 25 bp, Homo sapien
cctgggagactccaaatgtcaagca

SEQ ID NO: 1056941 - DNA, 25 bp, Homo sapien
ttctcagcagggtgatgattcctcc

SEQ ID NO: 1056942 - DNA, 25 bp, Homo sapien
tgttagtcagatcccgcacgctgtt

SEQ ID NO: 1056943 - DNA, 25 bp, Homo sapien
tgttagatcagtaagcatccgccag

SEQ ID NO: 1056944 - DNA, 25 bp, Homo sapien
aaatccctgtcgctgtgctcaaaga

SEQ ID NO: 1056945 - DNA, 25 bp, Homo sapien
agcttttctccgagtcactgagcca

SEQ ID NO: 1056946 - DNA, 25 bp, Homo sapien
cactgagccatgtttgcgggcggtg

SEQ ID NO: 1056947 - DNA, 25 bp, Homo sapien
gtggaacgcccggtgcatcttccgc

SEQ ID NO: 1056948 - DNA, 25 bp, Homo sapien
tcttccgcgcgggtctcgggtgcct

SEQ ID NO: 1056949 - DNA, 25 bp, Homo sapien
ctctgcaggccgccattatcgggca

SEQ ID NO: 1056950 - DNA, 25 bp, Homo sapien
ggccgccattatcgggcagctcgcg

SEQ ID NO: 1056951 - DNA, 25 bp, Homo sapien
caggccgccattatcgggcagctcg

SEQ ID NO: 1056952 - DNA, 25 bp, Homo sapien
tgcaggccgccattatcgggcagct

SEQ ID NO: 1056953 - DNA, 25 bp, Homo sapien
gtgtctctgaagcagtgccatgtcc

SEQ ID NO: 1056954 - DNA, 25 bp, Homo sapien
gatcgccaatcacatccactcaagg

SEQ ID NO: 1056955 - DNA, 25 bp, Homo sapien
cactcaaggtggttcgtgtctctga

SEQ ID NO: 1056956 - DNA, 25 bp, Homo sapien
gctgcacagcagacgagctttcctg

SEQ ID NO: 1056957 - DNA, 25 bp, Homo sapien
ttggatacttagaatacagttacct

SEQ ID NO: 1056958 - DNA, 25 bp, Homo sapien
tggatacttagaatacagttacctt

SEQ ID NO: 1056959 - DNA, 25 bp, Homo sapien
aagtaagctacttggatacttagaa

SEQ ID NO: 1056960 - DNA, 25 bp, Homo sapien
aaataaagtaagctacttggatact

SEQ ID NO: 1056961 - DNA, 25 bp, Homo sapien
tagagccgtgggacatcttttgcac

SEQ ID NO: 1056962 - DNA, 25 bp, Homo sapien
tagatcgtactttggctggctactc

SEQ ID NO: 1056963 - DNA, 25 bp, Homo sapien
gccacccgtgcagaggtctttctga

SEQ ID NO: 1056964 - DNA, 25 bp, Homo sapien
caacattttcaggtgcgtgacatcg

SEQ ID NO: 1056965 - DNA, 25 bp, Homo sapien
tggcccaagaatgactagctttaag

SEQ ID NO: 1056966 - DNA, 25 bp, Homo sapien
ggcccaagaatgactagctttaaga

SEQ ID NO: 1056967 - DNA, 25 bp, Homo sapien
ctggcccaagaatgactagctttaa

SEQ ID NO: 1056968 - DNA, 25 bp, Homo sapien
cctggcccaagaatgactagcttta

SEQ ID NO: 1056969 - DNA, 25 bp, Homo sapien
cagccactttgagggtaggttccaa

SEQ ID NO: 1056970 - DNA, 25 bp, Homo sapien
taataggcgcttctgggatcaaagg

SEQ ID NO: 1056971 - DNA, 25 bp, Homo sapien
taatccccagagcaaagatgtcagc

SEQ ID NO: 1056972 - DNA, 25 bp, Homo sapien
tttatgcaagaaagccagggcactg

SEQ ID NO: 1056973 - DNA, 25 bp, Homo sapien
aagctcaagtgcagacgtcccaatg

SEQ ID NO: 1056974 - DNA, 25 bp, Homo sapien
tctatgaatctctgctgaagtgcca

SEQ ID NO: 1056975 - DNA, 25 bp, Homo sapien
aactcttgcagctatagggcactgg

SEQ ID NO: 1056976 - DNA, 25 bp, Homo sapien
taactattttacatgaggcaggacc

SEQ ID NO: 1056977 - DNA, 25 bp, Homo sapien
ctctgcatgggaggcctaattgcag

SEQ ID NO: 1056978 - DNA, 25 bp, Homo sapien
cttgggcaggtccagactgagggca

SEQ ID NO: 1056979 - DNA, 25 bp, Homo sapien
actagaagtaactttggtggcagcc

SEQ ID NO: 1056980 - DNA, 25 bp, Homo sapien
gtggacagcaaggactagaagtaac

SEQ ID NO: 1056981 - DNA, 25 bp, Homo sapien
agctggtcaggacagtgccccataa

SEQ ID NO: 1056982 - DNA, 25 bp, Homo sapien
tagagcaattggcttgggctctcac

SEQ ID NO: 1056983 - DNA, 25 bp, Homo sapien
tgccccataagtagccagccacggg

SEQ ID NO: 1056984 - DNA, 25 bp, Homo sapien
gcctagagcaattggcttgggctct

SEQ ID NO: 1056985 - DNA, 25 bp, Homo sapien
ggggtggagggaggggccaggagca

SEQ ID NO: 1056986 - DNA, 25 bp, Homo sapien
gggtggagggaggggccaggagcat

SEQ ID NO: 1056987 - DNA, 25 bp, Homo sapien
tgtcgcctagctatcacctggtgcg

SEQ ID NO: 1056988 - DNA, 25 bp, Homo sapien
aagaagcgctccttctccgacaggg

SEQ ID NO: 1056989 - DNA, 25 bp, Homo sapien
tccaggccgcagtagttgaagaagc

SEQ ID NO: 1056990 - DNA, 25 bp, Homo sapien
tttgttcaccgaagccttgcagtcc

SEQ ID NO: 1056991 - DNA, 25 bp, Homo sapien
ggcggcgaagttccggcctgcgggc

SEQ ID NO: 1056992 - DNA, 25 bp, Homo sapien
gcccctgtcgctggatgtccagtcg

SEQ ID NO: 1056993 - DNA, 25 bp, Homo sapien
gcgggctggcgtcggctccccagct

SEQ ID NO: 1056994 - DNA, 25 bp, Homo sapien
gggagaagcgctctgcgcccagcac

SEQ ID NO: 1056995 - DNA, 25 bp, Homo sapien
gccggtcccgcgccgagcccgctgc

SEQ ID NO: 1056996 - DNA, 25 bp, Homo sapien
ccgcgccgagcccgctgcctccgag

SEQ ID NO: 1056997 - DNA, 25 bp, Homo sapien
cggtcccgcgccgagcccgctgcct

SEQ ID NO: 1056998 - DNA, 25 bp, Homo sapien
ggcgccggtcccgcgccgagcccgc

SEQ ID NO: 1056999 - DNA, 25 bp, Homo sapien
ggactcgcgcggcggtccgcgggcg

SEQ ID NO: 1057000 - DNA, 25 bp, Homo sapien
ctcggactcgcgcggcggtccgcgg

SEQ ID NO: 1057001 - DNA, 25 bp, Homo sapien
cgggcgcgctggcagccgtacagcc

SEQ ID NO: 1057002 - DNA, 25 bp, Homo sapien
gggcgcgctggcagccgtacagcca

SEQ ID NO: 1057003 - DNA, 25 bp, Homo sapien
tccccaaggttcagacgcgaaactg

SEQ ID NO: 1057004 - DNA, 25 bp, Homo sapien
cacagcagttatcgtttattgagca

SEQ ID NO: 1057005 - DNA, 25 bp, Homo sapien
gaaggaagggcttacgcaaaggcac

SEQ ID NO: 1057006 - DNA, 25 bp, Homo sapien
cgtccagggaggtcaagttcttgcc

SEQ ID NO: 1057007 - DNA, 25 bp, Homo sapien
aaagcgcattattcccagctcccag

SEQ ID NO: 1057008 - DNA, 25 bp, Homo sapien
gatttctggagcagacgcctcctcg

SEQ ID NO: 1057009 - DNA, 25 bp, Homo sapien
gggccttttaggatctggtggagcc

SEQ ID NO: 1057010 - DNA, 25 bp, Homo sapien
actggggcagcaaaactccgggaat

SEQ ID NO: 1057011 - DNA, 25 bp, Homo sapien
gtgatgaaaataggcgaacttgtgt

SEQ ID NO: 1057012 - DNA, 25 bp, Homo sapien
aataggcgaacttgtgtgtccttgc

SEQ ID NO: 1057013 - DNA, 25 bp, Homo sapien
acggcaacccaggcaaaggaaggag

SEQ ID NO: 1057014 - DNA, 25 bp, Homo sapien
cttggaggtgcgaacctgtgatgaa

SEQ ID NO: 1057015 - DNA, 25 bp, Homo sapien
tagagaacccagagtaccagcgggt

SEQ ID NO: 1057016 - DNA, 25 bp, Homo sapien
ttggagagctccagaggactgcgtc

SEQ ID NO: 1057017 - DNA, 25 bp, Homo sapien
aaataggactgtacttgggagctca

SEQ ID NO: 1057018 - DNA, 25 bp, Homo sapien
tatgtgcgccgtccctgtactagga

SEQ ID NO: 1057019 - DNA, 25 bp, Homo sapien
tctctgaccccaaccaaatccgtga

SEQ ID NO: 1057020 - DNA, 25 bp, Homo sapien
ctgaccccaaccaaatccgtgaagg

SEQ ID NO: 1057021 - DNA, 25 bp, Homo sapien
tctgaccccaaccaaatccgtgaag

SEQ ID NO: 1057022 - DNA, 25 bp, Homo sapien
tctctctgaccccaaccaaatccgt

SEQ ID NO: 1057023 - DNA, 25 bp, Homo sapien
ggctcccgttattcccttgagtctc

SEQ ID NO: 1057024 - DNA, 25 bp, Homo sapien
gctcccgttattcccttgagtctcc

SEQ ID NO: 1057025 - DNA, 25 bp, Homo sapien
gaagggcatggccccgcgggccctc

SEQ ID NO: 1057026 - DNA, 25 bp, Homo sapien
tgaagggcatggccccgcgggccct

SEQ ID NO: 1057027 - DNA, 25 bp, Homo sapien
aagggcatggccccgcgggccctcg

SEQ ID NO: 1057028 - DNA, 25 bp, Homo sapien
ctgaagggcatggccccgcgggccc

SEQ ID NO: 1057029 - DNA, 25 bp, Homo sapien
tcaggacgggctcccagaagtgtgc

SEQ ID NO: 1057030 - DNA, 25 bp, Homo sapien
acgtcagtgaccgagctcaggacgg

SEQ ID NO: 1057031 - DNA, 25 bp, Homo sapien
ctctgatgacgtcactctcggccag

SEQ ID NO: 1057032 - DNA, 25 bp, Homo sapien
ccaggcggccgtcgacgtcagtgac

SEQ ID NO: 1057033 - DNA, 25 bp, Homo sapien
agcacacgtgtgagcacttccgggc

SEQ ID NO: 1057034 - DNA, 25 bp, Homo sapien
cagggagcacacgtgtgagcacttc

SEQ ID NO: 1057035 - DNA, 25 bp, Homo sapien
gggagcacacgtgtgagcacttccg

SEQ ID NO: 1057036 - DNA, 25 bp, Homo sapien
gagcacacgtgtgagcacttccggg

SEQ ID NO: 1057037 - DNA, 25 bp, Homo sapien
tgccgggctagagagtgcgctcggt

SEQ ID NO: 1057038 - DNA, 25 bp, Homo sapien
ctgccgggctagagagtgcgctcgg

SEQ ID NO: 1057039 - DNA, 25 bp, Homo sapien
gggctagagagtgcgctcggtgcgc

SEQ ID NO: 1057040 - DNA, 25 bp, Homo sapien
ccgggctagagagtgcgctcggtgc

SEQ ID NO: 1057041 - DNA, 25 bp, Homo sapien
ggtcgtgcggatccctgaggccgca

SEQ ID NO: 1057042 - DNA, 25 bp, Homo sapien
cgcaggccagacagcggtgcagacc

SEQ ID NO: 1057043 - DNA, 25 bp, Homo sapien
gcagctcgcggtgaatctcatccaa

SEQ ID NO: 1057044 - DNA, 25 bp, Homo sapien
cgaactcggcgtttgggtcgggctg

SEQ ID NO: 1057045 - DNA, 25 bp, Homo sapien
gttggtggaatcgatgaagtacctc

SEQ ID NO: 1057046 - DNA, 25 bp, Homo sapien
tctttggatcggaagtgggtcttca

SEQ ID NO: 1057047 - DNA, 25 bp, Homo sapien
tcttcaggttggtggaatcgatgaa

SEQ ID NO: 1057048 - DNA, 25 bp, Homo sapien
tcttgtggtctttggatcggaagtg

SEQ ID NO: 1057049 - DNA, 25 bp, Homo sapien
agagccctatctgctgagcacccat

SEQ ID NO: 1057050 - DNA, 25 bp, Homo sapien
tgagagccctatctgctgagcaccc

SEQ ID NO: 1057051 - DNA, 25 bp, Homo sapien
caggtgagagccctatctgctgagc

SEQ ID NO: 1057052 - DNA, 25 bp, Homo sapien
gtgagagccctatctgctgagcacc

SEQ ID NO: 1057053 - DNA, 25 bp, Homo sapien
agaaaaacaggagttgggagctgac

SEQ ID NO: 1057054 - DNA, 25 bp, Homo sapien
aaagaaaaacaggagttgggagctg

SEQ ID NO: 1057055 - DNA, 25 bp, Homo sapien
aagaaaaacaggagttgggagctga

SEQ ID NO: 1057056 - DNA, 25 bp, Homo sapien
ctgggagaaagaaaaacaggagttg

SEQ ID NO: 1057057 - DNA, 25 bp, Homo sapien
tggggggcacataggatcccatacc

SEQ ID NO: 1057058 - DNA, 25 bp, Homo sapien
gggcacataggatcccatacccgct

SEQ ID NO: 1057059 - DNA, 25 bp, Homo sapien
ctgactgtagggctcgacgctcagc

SEQ ID NO: 1057060 - DNA, 25 bp, Homo sapien
agggctcgacgctcagctgcttcag

SEQ ID NO: 1057061 - DNA, 25 bp, Homo sapien
gaggtatccatctcagggacctcag

SEQ ID NO: 1057062 - DNA, 25 bp, Homo sapien
tcaggtagaggtatccatctcaggg

SEQ ID NO: 1057063 - DNA, 25 bp, Homo sapien
gtggacacttccgtgggcactgcca

SEQ ID NO: 1057064 - DNA, 25 bp, Homo sapien
gtagaggtatccatctcagggacct

SEQ ID NO: 1057065 - DNA, 25 bp, Homo sapien
agggcaccaagaagaggccctccgc

SEQ ID NO: 1057066 - DNA, 25 bp, Homo sapien
ttggcacgctccctcccagcctagt

SEQ ID NO: 1057067 - DNA, 25 bp, Homo sapien
gtcactgtccatgggcaattcctct

SEQ ID NO: 1057068 - DNA, 25 bp, Homo sapien
agcctagtccttgcgtcactgtcca

SEQ ID NO: 1057069 - DNA, 25 bp, Homo sapien
ccctaggcctggtgtacagaaagta

SEQ ID NO: 1057070 - DNA, 25 bp, Homo sapien
tacagtgctagctgtcctcggcctg

SEQ ID NO: 1057071 - DNA, 25 bp, Homo sapien
tggcagtctcaactgacccctgagg

SEQ ID NO: 1057072 - DNA, 25 bp, Homo sapien
cagttcagatgctaggacctcagag

SEQ ID NO: 1057073 - DNA, 25 bp, Homo sapien
cttgcgtatgtggaaggtcagagac

SEQ ID NO: 1057074 - DNA, 25 bp, Homo sapien
gcctgatgctgatctcttttgacag

SEQ ID NO: 1057075 - DNA, 25 bp, Homo sapien
agtgccgcccaccatgcgatttcga

SEQ ID NO: 1057076 - DNA, 25 bp, Homo sapien
gcgatttcgacgcttgacccctggt

SEQ ID NO: 1057077 - DNA, 25 bp, Homo sapien
gaaaaggcatactgttgtgggagct

SEQ ID NO: 1057078 - DNA, 25 bp, Homo sapien
catccttccttcgataatgctgatt

SEQ ID NO: 1057079 - DNA, 25 bp, Homo sapien
aaatcaaatggaaaaggcatactgt

SEQ ID NO: 1057080 - DNA, 25 bp, Homo sapien
tgggagctaataacacatccttcct

SEQ ID NO: 1057081 - DNA, 25 bp, Homo sapien
atcacgggcagcttccttaattggt

SEQ ID NO: 1057082 - DNA, 25 bp, Homo sapien
cagcttccttaattggtatatgcag

SEQ ID NO: 1057083 - DNA, 25 bp, Homo sapien
ggtatatgcagatatgcttttatta

SEQ ID NO: 1057084 - DNA, 25 bp, Homo sapien
ccttaattggtatatgcagatatgc

SEQ ID NO: 1057085 - DNA, 25 bp, Homo sapien
acttggtattaacagcctctttcat

SEQ ID NO: 1057086 - DNA, 25 bp, Homo sapien
catgtagtgtacgtgtgttgtcatc

SEQ ID NO: 1057087 - DNA, 25 bp, Homo sapien
tgtcatcatttaataacgtcacatc

SEQ ID NO: 1057088 - DNA, 25 bp, Homo sapien
tgaatttcgcccatggttggcccat

SEQ ID NO: 1057089 - DNA, 25 bp, Homo sapien
atccaaattgagatttccagcttct

SEQ ID NO: 1057090 - DNA, 25 bp, Homo sapien
tcatcaaagcctgtcacgaccttac

SEQ ID NO: 1057091 - DNA, 25 bp, Homo sapien
cagtcatcaaagcctgtcacgacct

SEQ ID NO: 1057092 - DNA, 25 bp, Homo sapien
cccagtcatcaaagcctgtcacgac

SEQ ID NO: 1057093 - DNA, 25 bp, Homo sapien
gtcatcaaagcctgtcacgacctta

SEQ ID NO: 1057094 - DNA, 25 bp, Homo sapien
ctgccagctcgaatcagctcctgtt

SEQ ID NO: 1057095 - DNA, 25 bp, Homo sapien
tctgccagctcgaatcagctcctgt

SEQ ID NO: 1057096 - DNA, 25 bp, Homo sapien
gtcgccggaatttccgctcccagag

SEQ ID NO: 1057097 - DNA, 25 bp, Homo sapien
tgctgtcgccggaatttccgctccc

SEQ ID NO: 1057098 - DNA, 25 bp, Homo sapien
tctagtctaaccctaatgacaactc

SEQ ID NO: 1057099 - DNA, 25 bp, Homo sapien
tagtctaaccctaatgacaactctg

SEQ ID NO: 1057100 - DNA, 25 bp, Homo sapien
tttccctctagtctaaccctaatga

SEQ ID NO: 1057101 - DNA, 25 bp, Homo sapien
taaccctaatgacaactctgacacc

SEQ ID NO: 1057102 - DNA, 25 bp, Homo sapien
ccagtcctcaaagggatagtcctgc

SEQ ID NO: 1057103 - DNA, 25 bp, Homo sapien
tcaaagggatagtcctgcagggagt

SEQ ID NO: 1057104 - DNA, 25 bp, Homo sapien
tcctcaaagggatagtcctgcaggg

SEQ ID NO: 1057105 - DNA, 25 bp, Homo sapien
agctgccagtcctcaaagggatagt

SEQ ID NO: 1057106 - DNA, 25 bp, Homo sapien
ggcagccttggactatgctctggaa

SEQ ID NO: 1057107 - DNA, 25 bp, Homo sapien
gaagtccctctgtcaggctttgcag

SEQ ID NO: 1057108 - DNA, 25 bp, Homo sapien
gcttcatgcaacagctccacagctg

SEQ ID NO: 1057109 - DNA, 25 bp, Homo sapien
aggagggcgtcagcttcatgcaaca

SEQ ID NO: 1057110 - DNA, 25 bp, Homo sapien
ggatgacaatagtccctcactcgtc

SEQ ID NO: 1057111 - DNA, 25 bp, Homo sapien
ccacgcctggctcaccatatctgaa

SEQ ID NO: 1057112 - DNA, 25 bp, Homo sapien
ttctctcccacgccctgaaggaggc

SEQ ID NO: 1057113 - DNA, 25 bp, Homo sapien
gcctggctcaccatatctgaacaag

SEQ ID NO: 1057114 - DNA, 25 bp, Homo sapien
catgctgagaaatcatttaagtggg

SEQ ID NO: 1057115 - DNA, 25 bp, Homo sapien
tctcctggcatgctgagaaatcatt

SEQ ID NO: 1057116 - DNA, 25 bp, Homo sapien
gctcctccaacaagtctcggatctc

SEQ ID NO: 1057117 - DNA, 25 bp, Homo sapien
tctcggatctcctggcatgctgaga

SEQ ID NO: 1057118 - DNA, 25 bp, Homo sapien
ccctccttctcagccgctggaccat

SEQ ID NO: 1057119 - DNA, 25 bp, Homo sapien
gatcctcaggactgtgccctccttc

SEQ ID NO: 1057120 - DNA, 25 bp, Homo sapien
cctcaggactgtgccctccttctca

SEQ ID NO: 1057121 - DNA, 25 bp, Homo sapien
tgccctccttctcagccgctggacc

SEQ ID NO: 1057122 - DNA, 25 bp, Homo sapien
gcagaccaggatgttgtggcagatc

SEQ ID NO: 1057123 - DNA, 25 bp, Homo sapien
cagcagaccaggatgttgtggcaga

SEQ ID NO: 1057124 - DNA, 25 bp, Homo sapien
tgctcgagcacggccttctgttcca

SEQ ID NO: 1057125 - DNA, 25 bp, Homo sapien
gggcagcagaccaggatgttgtggc

SEQ ID NO: 1057126 - DNA, 25 bp, Homo sapien
gacacaaagtgctggcaattgctgg

SEQ ID NO: 1057127 - DNA, 25 bp, Homo sapien
gtgtccacttgggacacaaagtgct

SEQ ID NO: 1057128 - DNA, 25 bp, Homo sapien
tgtccacttgggacacaaagtgctg

SEQ ID NO: 1057129 - DNA, 25 bp, Homo sapien
tgctcgttgatctggacaacctcgt

SEQ ID NO: 1057130 - DNA, 25 bp, Homo sapien
tcgttgatctggacaacctcgtctc

SEQ ID NO: 1057131 - DNA, 25 bp, Homo sapien
tgatctggacaacctcgtctccagg

SEQ ID NO: 1057132 - DNA, 25 bp, Homo sapien
tctggacaacctcgtctccaggctg

SEQ ID NO: 1057133 - DNA, 25 bp, Homo sapien
cagacttgggttccactcggtgacc

SEQ ID NO: 1057134 - DNA, 25 bp, Homo sapien
tccactcggtgaccccttcacctcc

SEQ ID NO: 1057135 - DNA, 25 bp, Homo sapien
ccactcggtgaccccttcacctcct

SEQ ID NO: 1057136 - DNA, 25 bp, Homo sapien
tgggttccactcggtgaccccttca

SEQ ID NO: 1057137 - DNA, 25 bp, Homo sapien
ggtctccggtatcgggatcttcttc

SEQ ID NO: 1057138 - DNA, 25 bp, Homo sapien
gtctccggtatcgggatcttcttca

SEQ ID NO: 1057139 - DNA, 25 bp, Homo sapien
gcaggtacctgtgggggggtctgaa

SEQ ID NO: 1057140 - DNA, 25 bp, Homo sapien
tgaagggagctaggggggcgcagca

SEQ ID NO: 1057141 - DNA, 25 bp, Homo sapien
cagcaggagcaggtacctgtggggg

SEQ ID NO: 1057142 - DNA, 25 bp, Homo sapien
gggcaacaggggtaggggagcagca

SEQ ID NO: 1057143 - DNA, 25 bp, Homo sapien
aaccaggaacaaagcaatggagaca

SEQ ID NO: 1057144 - DNA, 25 bp, Homo sapien
aggaacaaagcaatggagacagggg

SEQ ID NO: 1057145 - DNA, 25 bp, Homo sapien
caggaacaaagcaatggagacaggg

SEQ ID NO: 1057146 - DNA, 25 bp, Homo sapien
ccaggaacaaagcaatggagacagg

SEQ ID NO: 1057147 - DNA, 25 bp, Homo sapien
cagtgatgggctcctctggtgcggg

SEQ ID NO: 1057148 - DNA, 25 bp, Homo sapien
ccagagacagtgatgggctcctctg

SEQ ID NO: 1057149 - DNA, 25 bp, Homo sapien
tctggtgcggggagtccaggacctg

SEQ ID NO: 1057150 - DNA, 25 bp, Homo sapien
agacagtgatgggctcctctggtgc

SEQ ID NO: 1057151 - DNA, 25 bp, Homo sapien
aaaggcaaagacgtcttcagatggg

SEQ ID NO: 1057152 - DNA, 25 bp, Homo sapien
gggtttgaagacaggtcaaaggcaa

SEQ ID NO: 1057153 - DNA, 25 bp, Homo sapien
tcaaaggcaaagacgtcttcagatg

SEQ ID NO: 1057154 - DNA, 25 bp, Homo sapien
ggtcaaaggcaaagacgtcttcaga

SEQ ID NO: 1057155 - DNA, 25 bp, Homo sapien
cctggagtccctgctacccctgctg

SEQ ID NO: 1057156 - DNA, 25 bp, Homo sapien
tggagtccctgctacccctgctggg

SEQ ID NO: 1057157 - DNA, 25 bp, Homo sapien
ctggagtccctgctacccctgctgg

SEQ ID NO: 1057158 - DNA, 25 bp, Homo sapien
ccctggagtccctgctacccctgct

SEQ ID NO: 1057159 - DNA, 25 bp, Homo sapien
ttttgatttcttccgaccaacagga

SEQ ID NO: 1057160 - DNA, 25 bp, Homo sapien
cttttgatttcttccgaccaacagg

SEQ ID NO: 1057161 - DNA, 25 bp, Homo sapien
ttgatttcttccgaccaacaggact

SEQ ID NO: 1057162 - DNA, 25 bp, Homo sapien
tttgatttcttccgaccaacaggac

SEQ ID NO: 1057163 - DNA, 25 bp, Homo sapien
tttcgcaacaggagccagccgtcac

SEQ ID NO: 1057164 - DNA, 25 bp, Homo sapien
tgaagccgcccggtgcctttcgcaa

SEQ ID NO: 1057165 - DNA, 25 bp, Homo sapien
cggtaccagtagagcgtgtgtccct

SEQ ID NO: 1057166 - DNA, 25 bp, Homo sapien
ccagtagagcgtgtgtcccttgagc

SEQ ID NO: 1057167 - DNA, 25 bp, Homo sapien
ctaagccaggaaaggggagccaaag

SEQ ID NO: 1057168 - DNA, 25 bp, Homo sapien
gaaaggggagccaaagatatcagag

SEQ ID NO: 1057169 - DNA, 25 bp, Homo sapien
ccaggaaaggggagccaaagatatc

SEQ ID NO: 1057170 - DNA, 25 bp, Homo sapien
aaggggagccaaagatatcagagaa

SEQ ID NO: 1057171 - DNA, 25 bp, Homo sapien
ccctcgggctcctgagagttgtgga

SEQ ID NO: 1057172 - DNA, 25 bp, Homo sapien
ctcctgggctctctaacaagtctct

SEQ ID NO: 1057173 - DNA, 25 bp, Homo sapien
tgggctctctaacaagtctctctgt

SEQ ID NO: 1057174 - DNA, 25 bp, Homo sapien
aggagaaggcatctcctgggctctc

SEQ ID NO: 1057175 - DNA, 25 bp, Homo sapien
tgagggtcaggttggaaccccaata

SEQ ID NO: 1057176 - DNA, 25 bp, Homo sapien
caaggcccagtcagctcctagttac

SEQ ID NO: 1057177 - DNA, 25 bp, Homo sapien
atcacagcatgagggtcaggttgga

SEQ ID NO: 1057178 - DNA, 25 bp, Homo sapien
tcaaggcccagtcagctcctagtta

SEQ ID NO: 1057179 - DNA, 25 bp, Homo sapien
catgtccactttccagactatagtt

SEQ ID NO: 1057180 - DNA, 25 bp, Homo sapien
tgtccactttccagactatagttgg

SEQ ID NO: 1057181 - DNA, 25 bp, Homo sapien
ctttccagactatagttggagacat

SEQ ID NO: 1057182 - DNA, 25 bp, Homo sapien
cactttccagactatagttggagac

SEQ ID NO: 1057183 - DNA, 25 bp, Homo sapien
ggagcatcactcagcctgggcgtgc

SEQ ID NO: 1057184 - DNA, 25 bp, Homo sapien
gagcatcactcagcctgggcgtgcc

SEQ ID NO: 1057185 - DNA, 25 bp, Homo sapien
tcagatctgtcagggtatcagcagc

SEQ ID NO: 1057186 - DNA, 25 bp, Homo sapien
tcagcagcgaagatgaagggtttgt

SEQ ID NO: 1057187 - DNA, 25 bp, Homo sapien
cagcagcgaagatgaagggtttgta

SEQ ID NO: 1057188 - DNA, 25 bp, Homo sapien
tgcaggtaatgagatgacgcaccca

SEQ ID NO: 1057189 - DNA, 25 bp, Homo sapien
agatgcaggtaatgagatgacgcac

SEQ ID NO: 1057190 - DNA, 25 bp, Homo sapien
gcaggtaatgagatgacgcacccac

SEQ ID NO: 1057191 - DNA, 25 bp, Homo sapien
gcctggagactggtacttggagatg

SEQ ID NO: 1057192 - DNA, 25 bp, Homo sapien
agggttcctcccactcaaccctgcg

SEQ ID NO: 1057193 - DNA, 25 bp, Homo sapien
gttcctcccactcaaccctgcgaga

SEQ ID NO: 1057194 - DNA, 25 bp, Homo sapien
atttgagttcctagcccccatccca

SEQ ID NO: 1057195 - DNA, 25 bp, Homo sapien
ccactcaaccctgcgagacacctac

SEQ ID NO: 1057196 - DNA, 25 bp, Homo sapien
tcatcgtccgggtcctctgcttcgg

SEQ ID NO: 1057197 - DNA, 25 bp, Homo sapien
tctgcttcggtctcactgtagcagt

SEQ ID NO: 1057198 - DNA, 25 bp, Homo sapien
gtccgggtcctctgcttcggtctca

SEQ ID NO: 1057199 - DNA, 25 bp, Homo sapien
gggacccagcctcatcgtccgggtc

SEQ ID NO: 1057200 - DNA, 25 bp, Homo sapien
tgtctccatggaggggactcccagc

SEQ ID NO: 1057201 - DNA, 25 bp, Homo sapien
aggtccgtgggctgcgctgtgtggg

SEQ ID NO: 1057202 - DNA, 25 bp, Homo sapien
gtcagagagccaaaggaggtccgtg

SEQ ID NO: 1057203 - DNA, 25 bp, Homo sapien
gtgtctccatggaggggactcccag

SEQ ID NO: 1057204 - DNA, 25 bp, Homo sapien
tcgctcattgagctgagggtctcgg

SEQ ID NO: 1057205 - DNA, 25 bp, Homo sapien
ggtgcactcgctcattgagctgagg

SEQ ID NO: 1057206 - DNA, 25 bp, Homo sapien
aagagctccgccactgttcctgggt

SEQ ID NO: 1057207 - DNA, 25 bp, Homo sapien
agggtctcggttgcgccgcatgaaa

SEQ ID NO: 1057208 - DNA, 25 bp, Homo sapien
ggtcacccagcacttcttctaggac

SEQ ID NO: 1057209 - DNA, 25 bp, Homo sapien
gtcacccagcacttcttctaggacc

SEQ ID NO: 1057210 - DNA, 25 bp, Homo sapien
gggtcacccagcacttcttctagga

SEQ ID NO: 1057211 - DNA, 25 bp, Homo sapien
cagagatgggagtgctcttcagggt

SEQ ID NO: 1057212 - DNA, 25 bp, Homo sapien
tcaaaggtcaggagctagagtgctg

SEQ ID NO: 1057213 - DNA, 25 bp, Homo sapien
ggtgagaccatgactagcagtacta

SEQ ID NO: 1057214 - DNA, 25 bp, Homo sapien
ataaagaacacctgtacagacctgg

SEQ ID NO: 1057215 - DNA, 25 bp, Homo sapien
cctgaacagaatccagggatgctct

SEQ ID NO: 1057216 - DNA, 25 bp, Homo sapien
tatccctcatgtttgctcagtctct

SEQ ID NO: 1057217 - DNA, 25 bp, Homo sapien
agctactgcccctccaaaccccata

SEQ ID NO: 1057218 - DNA, 25 bp, Homo sapien
ctgtatgggaggtccattgctgcca

SEQ ID NO: 1057219 - DNA, 25 bp, Homo sapien
ccacccctcgaggcctgtatgggag

SEQ ID NO: 1057220 - DNA, 25 bp, Homo sapien
acttgctcctctggccgaccgtagg

SEQ ID NO: 1057221 - DNA, 25 bp, Homo sapien
tttcctggcggttgatgagcacttg

SEQ ID NO: 1057222 - DNA, 25 bp, Homo sapien
cgctttgttcgtgatttcctggcgg

SEQ ID NO: 1057223 - DNA, 25 bp, Homo sapien
gaccgtaggactcgtgaatggtact

SEQ ID NO: 1057224 - DNA, 25 bp, Homo sapien
gatgtacatgtgagtgatgaactcc

SEQ ID NO: 1057225 - DNA, 25 bp, Homo sapien
ccaggtaggagttggtacggagagc

SEQ ID NO: 1057226 - DNA, 25 bp, Homo sapien
tacggagagcgatggtgatggcatt

SEQ ID NO: 1057227 - DNA, 25 bp, Homo sapien
catgtgagtgatgaactcctgcatg

SEQ ID NO: 1057228 - DNA, 25 bp, Homo sapien
cagcacaatgtcatctatggtagag

SEQ ID NO: 1057229 - DNA, 25 bp, Homo sapien
gccaaggagaacctcacaaagaagg

SEQ ID NO: 1057230 - DNA, 25 bp, Homo sapien
tatggtagagaacaactcatagtgt

SEQ ID NO: 1057231 - DNA, 25 bp, Homo sapien
tccagaagccattgagccagccaag

SEQ ID NO: 1057232 - DNA, 25 bp, Homo sapien
tcattaatgaagaaccgcaagagca

SEQ ID NO: 1057233 - DNA, 25 bp, Homo sapien
agataaagacgataatgaagttgag

SEQ ID NO: 1057234 - DNA, 25 bp, Homo sapien
tgaagaaccgcaagagcaagataaa

SEQ ID NO: 1057235 - DNA, 25 bp, Homo sapien
gagcaagataaagacgataatgaag

SEQ ID NO: 1057236 - DNA, 25 bp, Homo sapien
cgactgcaggatgacgcggatgatc

SEQ ID NO: 1057237 - DNA, 25 bp, Homo sapien
ggccatgtcaggcaccgactgcagg

SEQ ID NO: 1057238 - DNA, 25 bp, Homo sapien
gcacacatgcaccagacgaagcgcc

SEQ ID NO: 1057239 - DNA, 25 bp, Homo sapien
gaggatgaggaccatgatattggcc

SEQ ID NO: 1057240 - DNA, 25 bp, Homo sapien
cagatgaagagggtgtacagcgcaa

SEQ ID NO: 1057241 - DNA, 25 bp, Homo sapien
gaatgcaccaaagagtgttactcca

SEQ ID NO: 1057242 - DNA, 25 bp, Homo sapien
gcgcaacctgtatgttctggaaatg

SEQ ID NO: 1057243 - DNA, 25 bp, Homo sapien
gaaatgcttgggcacgaatgcacca

SEQ ID NO: 1057244 - DNA, 25 bp, Homo sapien
ggtaaagtagatggcacccccaatc

SEQ ID NO: 1057245 - DNA, 25 bp, Homo sapien
cgatgacgaacaggttgatgccaat

SEQ ID NO: 1057246 - DNA, 25 bp, Homo sapien
caatctccattgcatattccctctt

SEQ ID NO: 1057247 - DNA, 25 bp, Homo sapien
cacgatgacgaacaggttgatgcca

SEQ ID NO: 1057248 - DNA, 25 bp, Homo sapien
taaaggttattcgttgctgttgtcc

SEQ ID NO: 1057249 - DNA, 25 bp, Homo sapien
tcatttgctccaggttggtggtcac

SEQ ID NO: 1057250 - DNA, 25 bp, Homo sapien
ctcactaaaggttattcgttgctgt

SEQ ID NO: 1057251 - DNA, 25 bp, Homo sapien
aaggttattcgttgctgttgtccct

SEQ ID NO: 1057252 - DNA, 25 bp, Homo sapien
gagaccagatttctccgagcgggcg

SEQ ID NO: 1057253 - DNA, 25 bp, Homo sapien
aggttctcctgtattgcctcaagca

SEQ ID NO: 1057254 - DNA, 25 bp, Homo sapien
gagttcatctcggatctccttgtac

SEQ ID NO: 1057255 - DNA, 25 bp, Homo sapien
caccaagcaaaagttgtcacacgtg

SEQ ID NO: 1057256 - DNA, 25 bp, Homo sapien
ggttgaagcggattgcgcgcacctc

SEQ ID NO: 1057257 - DNA, 25 bp, Homo sapien
tctggcggatgtccttggatgacgt

SEQ ID NO: 1057258 - DNA, 25 bp, Homo sapien
taacgagcgcactgagcaagtcttg

SEQ ID NO: 1057259 - DNA, 25 bp, Homo sapien
ggatgacgtagtctccaacgacccg

SEQ ID NO: 1057260 - DNA, 25 bp, Homo sapien
aactaagtaacgtgggtgtgtgcct

SEQ ID NO: 1057261 - DNA, 25 bp, Homo sapien
tgtgcaccttagataggatcctggg

SEQ ID NO: 1057262 - DNA, 25 bp, Homo sapien
tggctcatgccacacacactaagaa

SEQ ID NO: 1057263 - DNA, 25 bp, Homo sapien
gcccagggtatatcccaggctgatg

SEQ ID NO: 1057264 - DNA, 25 bp, Homo sapien
aggacacaggaagacgcagcggctg

SEQ ID NO: 1057265 - DNA, 25 bp, Homo sapien
caggaagacgcagcggctgggtgtg

SEQ ID NO: 1057266 - DNA, 25 bp, Homo sapien
cacaggaagacgcagcggctgggtg

SEQ ID NO: 1057267 - DNA, 25 bp, Homo sapien
aggctctgccaagccacactaagga

SEQ ID NO: 1057268 - DNA, 25 bp, Homo sapien
ggctcacaggcaccagacctgcagg

SEQ ID NO: 1057269 - DNA, 25 bp, Homo sapien
ggggctcacaggcaccagacctgca

SEQ ID NO: 1057270 - DNA, 25 bp, Homo sapien
ctcacaggcaccagacctgcaggtg

SEQ ID NO: 1057271 - DNA, 25 bp, Homo sapien
ctggggctcacaggcaccagacctg

SEQ ID NO: 1057272 - DNA, 25 bp, Homo sapien
cttgctgctagggttcccactctca

SEQ ID NO: 1057273 - DNA, 25 bp, Homo sapien
taggtcaaatcctggctgcgttggc

SEQ ID NO: 1057274 - DNA, 25 bp, Homo sapien
cccttctgtgctcatccttgctgct

SEQ ID NO: 1057275 - DNA, 25 bp, Homo sapien
aatcctggctgcgttggccagcacc

SEQ ID NO: 1057276 - DNA, 25 bp, Homo sapien
gcaaaatccgctgggtgcccttctc

SEQ ID NO: 1057277 - DNA, 25 bp, Homo sapien
cagcaaaatccgctgggtgcccttc

SEQ ID NO: 1057278 - DNA, 25 bp, Homo sapien
agcaaaatccgctgggtgcccttct

SEQ ID NO: 1057279 - DNA, 25 bp, Homo sapien
ctcagtaaggcatggggagtggtag

SEQ ID NO: 1057280 - DNA, 25 bp, Homo sapien
taactcaggctcagtaaggcatggg

SEQ ID NO: 1057281 - DNA, 25 bp, Homo sapien
tcagtaaggcatggggagtggtagt

SEQ ID NO: 1057282 - DNA, 25 bp, Homo sapien
tcctaactcaggctcagtaaggcat

SEQ ID NO: 1057283 - DNA, 25 bp, Homo sapien
tgtctgctcagtggacccattagag

SEQ ID NO: 1057284 - DNA, 25 bp, Homo sapien
gcagtgtacccttggaggttgtgct

SEQ ID NO: 1057285 - DNA, 25 bp, Homo sapien
atttggcagcagtgtacccttggag

SEQ ID NO: 1057286 - DNA, 25 bp, Homo sapien
gtggacccattagagctgctgtttg

SEQ ID NO: 1057287 - DNA, 25 bp, Homo sapien
tagttgttccaagaagagttgtccc

SEQ ID NO: 1057288 - DNA, 25 bp, Homo sapien
cagtggttgccatggacccagatga

SEQ ID NO: 1057289 - DNA, 25 bp, Homo sapien
cagtggttgccatggacccggatga

SEQ ID NO: 1057290 - DNA, 25 bp, Homo sapien
cataacttcgctggctgtcatgggt

SEQ ID NO: 1057291 - DNA, 25 bp, Homo sapien
gaccactactctgggtgtgtttagg

SEQ ID NO: 1057292 - DNA, 25 bp, Homo sapien
attgcacatacaaactcccctgcta

SEQ ID NO: 1057293 - DNA, 25 bp, Homo sapien
ccgcgtggaagtagtagctgtcatt

SEQ ID NO: 1057294 - DNA, 25 bp, Homo sapien
ggaggtttgactggccccagttaca

SEQ ID NO: 1057295 - DNA, 25 bp, Homo sapien
aggctcaccgacaccctggacagtt

SEQ ID NO: 1057296 - DNA, 25 bp, Homo sapien
agtgtaggctcaccgacaccctgga

SEQ ID NO: 1057297 - DNA, 25 bp, Homo sapien
gcagtgtaggctcaccgacaccctg

SEQ ID NO: 1057298 - DNA, 25 bp, Homo sapien
tgtaggctcaccgacaccctggaca

SEQ ID NO: 1057299 - DNA, 25 bp, Homo sapien
tccagcggcgagtctgcaggatgca

SEQ ID NO: 1057300 - DNA, 25 bp, Homo sapien
gagaccctgttctatcttgctgatg

SEQ ID NO: 1057301 - DNA, 25 bp, Homo sapien
cagctgctcaggaccacctcgattt

SEQ ID NO: 1057302 - DNA, 25 bp, Homo sapien
tctaacaggaagacctggacacgga

SEQ ID NO: 1057303 - DNA, 25 bp, Homo sapien
tcaggtgacctctcccagtttgctt

SEQ ID NO: 1057304 - DNA, 25 bp, Homo sapien
aggtgacctctcccagtttgcttac

SEQ ID NO: 1057305 - DNA, 25 bp, Homo sapien
caggtgacctctcccagtttgctta

SEQ ID NO: 1057306 - DNA, 25 bp, Homo sapien
agcattggtgctgatactacttttc

SEQ ID NO: 1057307 - DNA, 25 bp, Homo sapien
caacgggttcctgtggctggtcgcc

SEQ ID NO: 1057308 - DNA, 25 bp, Homo sapien
ctactgatgggcgtcggtccctgct

SEQ ID NO: 1057309 - DNA, 25 bp, Homo sapien
cacagcaagtctaactactgatggg

SEQ ID NO: 1057310 - DNA, 25 bp, Homo sapien
cctcgcaacgggttcctgtggctgg

SEQ ID NO: 1057311 - DNA, 25 bp, Homo sapien
ccagggtatacgtgcagctgaagct

SEQ ID NO: 1057312 - DNA, 25 bp, Homo sapien
ggtgggtctggctgacattcaccac

SEQ ID NO: 1057313 - DNA, 25 bp, Homo sapien
cagaagctgcacctccagagagtac

SEQ ID NO: 1057314 - DNA, 25 bp, Homo sapien
tgctgatgaagccagggagaacctg

SEQ ID NO: 1057315 - DNA, 25 bp, Homo sapien
gagagggacaggagtgaaaccctca

SEQ ID NO: 1057316 - DNA, 25 bp, Homo sapien
gagggacaggagtgaaaccctcatc

SEQ ID NO: 1057317 - DNA, 25 bp, Homo sapien
gggacaggagtgaaaccctcatcat

SEQ ID NO: 1057318 - DNA, 25 bp, Homo sapien
ctggagagggacaggagtgaaaccc

SEQ ID NO: 1057319 - DNA, 25 bp, Homo sapien
cagttctgttttcaagcagagttaa

SEQ ID NO: 1057320 - DNA, 25 bp, Homo sapien
gaaggtctgtgaagatgcccaagat

SEQ ID NO: 1057321 - DNA, 25 bp, Homo sapien
tattgtcttgaggactacgtagaag

SEQ ID NO: 1057322 - DNA, 25 bp, Homo sapien
gcatgccaagaggaacagttctgtt

SEQ ID NO: 1057323 - DNA, 25 bp, Homo sapien
ggccttaacagcacctgtcctggag

SEQ ID NO: 1057324 - DNA, 25 bp, Homo sapien
tgttcacaaagtggtaggtggcctt

SEQ ID NO: 1057325 - DNA, 25 bp, Homo sapien
tggtaggtggccttaacagcacctg

SEQ ID NO: 1057326 - DNA, 25 bp, Homo sapien
caaagtggtaggtggccttaacagc

SEQ ID NO: 1057327 - DNA, 25 bp, Homo sapien
gtcttgcccgcgtgtcacacagggt

SEQ ID NO: 1057328 - DNA, 25 bp, Homo sapien
aggtcacctccagagaggccccgtt

SEQ ID NO: 1057329 - DNA, 25 bp, Homo sapien
agaagcggatcaggttgaaggccaa

SEQ ID NO: 1057330 - DNA, 25 bp, Homo sapien
tacagtgtatcgctggtcgagaagc

SEQ ID NO: 1057331 - DNA, 25 bp, Homo sapien
cagcctgcccggcaggaactgcttt

SEQ ID NO: 1057332 - DNA, 25 bp, Homo sapien
caggaactgctttgcaggcaaggct

SEQ ID NO: 1057333 - DNA, 25 bp, Homo sapien
aactgctttgcaggcaaggctgcgg

SEQ ID NO: 1057334 - DNA, 25 bp, Homo sapien
ctgcggcggctgcgcaggaggtccc

SEQ ID NO: 1057335 - DNA, 25 bp, Homo sapien
gatgggcccgaatgctatccagctg

SEQ ID NO: 1057336 - DNA, 25 bp, Homo sapien
caggcgagttcttctgactacaagc

SEQ ID NO: 1057337 - DNA, 25 bp, Homo sapien
tcagcaccgcttccgtgaagacggc

SEQ ID NO: 1057338 - DNA, 25 bp, Homo sapien
gactacaagcttgtgggcaacgcaa

SEQ ID NO: 1057339 - DNA, 25 bp, Homo sapien
ttgtaccaacctgccgagcttctgc

SEQ ID NO: 1057340 - DNA, 25 bp, Homo sapien
gcaatatctttgtaccaacctgccg

SEQ ID NO: 1057341 - DNA, 25 bp, Homo sapien
catcacagcaatatctttgtaccaa

SEQ ID NO: 1057342 - DNA, 25 bp, Homo sapien
aacttcatcacagcaatatctttgt

SEQ ID NO: 1057343 - DNA, 25 bp, Homo sapien
tgtggtggcgccatcatagttcact

SEQ ID NO: 1057344 - DNA, 25 bp, Homo sapien
gagtgtggtggcgccatcatagttc

SEQ ID NO: 1057345 - DNA, 25 bp, Homo sapien
tctggctctgtatcttgaattttct

SEQ ID NO: 1057346 - DNA, 25 bp, Homo sapien
ctgtctggctctgtatcttgaattt

SEQ ID NO: 1057347 - DNA, 25 bp, Homo sapien
cagaagaaagatggccatccaggct

SEQ ID NO: 1057348 - DNA, 25 bp, Homo sapien
tcagaagaaagatggccatccaggc

SEQ ID NO: 1057349 - DNA, 25 bp, Homo sapien
agaagaaagatggccatccaggctc

SEQ ID NO: 1057350 - DNA, 25 bp, Homo sapien
tatcccagcatccagcttattgcta

SEQ ID NO: 1057351 - DNA, 25 bp, Homo sapien
ggcttctatcccagcatccagctta

SEQ ID NO: 1057352 - DNA, 25 bp, Homo sapien
tctatcccagcatccagcttattgc

SEQ ID NO: 1057353 - DNA, 25 bp, Homo sapien
tcaggcttctatcccagcatccagc

SEQ ID NO: 1057354 - DNA, 25 bp, Homo sapien
gcgagtaaactagaggccaaggact

SEQ ID NO: 1057355 - DNA, 25 bp, Homo sapien
ctctctggtccgtaacaataaaacg

SEQ ID NO: 1057356 - DNA, 25 bp, Homo sapien
aactagaggccaaggactagggttg

SEQ ID NO: 1057357 - DNA, 25 bp, Homo sapien
tctacccttgcctcaggcgagtaaa

SEQ ID NO: 1057358 - DNA, 25 bp, Homo sapien
ttgtagagaagaaggtctcaagaag

SEQ ID NO: 1057359 - DNA, 25 bp, Homo sapien
gaagaaggtctcaagaaggtctcac

SEQ ID NO: 1057360 - DNA, 25 bp, Homo sapien
agaaggtctcaagaaggtctcacta

SEQ ID NO: 1057361 - DNA, 25 bp, Homo sapien
tagagaagaaggtctcaagaaggtc

SEQ ID NO: 1057362 - DNA, 25 bp, Homo sapien
gtgtgagccaccgtgcccggccaac

SEQ ID NO: 1057363 - DNA, 25 bp, Homo sapien
aggtgtgagccaccgtgcccggcca

SEQ ID NO: 1057364 - DNA, 25 bp, Homo sapien
cctgagtaactgagactacaggctc

SEQ ID NO: 1057365 - DNA, 25 bp, Homo sapien
tgagtaactgagactacaggctccc

SEQ ID NO: 1057366 - DNA, 25 bp, Homo sapien
aaagcgggcggcgaaatccctcact

SEQ ID NO: 1057367 - DNA, 25 bp, Homo sapien
acgtctgcggtgagcggtggttccc

SEQ ID NO: 1057368 - DNA, 25 bp, Homo sapien
cactcgggaagactgactgcagcca

SEQ ID NO: 1057369 - DNA, 25 bp, Homo sapien
tcagctcctctaacggccgttgcac

SEQ ID NO: 1057370 - DNA, 25 bp, Homo sapien
catgaatcttcttagccatggggac

SEQ ID NO: 1057371 - DNA, 25 bp, Homo sapien
agagatcccctcagttggatatttc

SEQ ID NO: 1057372 - DNA, 25 bp, Homo sapien
gaagtgacgtgagagatcccctcag

SEQ ID NO: 1057373 - DNA, 25 bp, Homo sapien
gacgtgagagatcccctcagttgga

SEQ ID NO: 1057374 - DNA, 25 bp, Homo sapien
tcggtgaagtgacgtgagagatccc

SEQ ID NO: 1057375 - DNA, 25 bp, Homo sapien
gttactactactaatcttccactct

SEQ ID NO: 1057376 - DNA, 25 bp, Homo sapien
tggttcccactcactgaatgccagc

SEQ ID NO: 1057377 - DNA, 25 bp, Homo sapien
gcgccaagcctgagctagttaattt

SEQ ID NO: 1057378 - DNA, 25 bp, Homo sapien
gacccatgaagaatccaggagtact

SEQ ID NO: 1057379 - DNA, 25 bp, Homo sapien
caggaccttacaaacataatcttgc

SEQ ID NO: 1057380 - DNA, 25 bp, Homo sapien
tgagcatgatgtaccaatggctgtg

SEQ ID NO: 1057381 - DNA, 25 bp, Homo sapien
tccgaaagggctccgagataactgg

SEQ ID NO: 1057382 - DNA, 25 bp, Homo sapien
gctacacttgaacagcggctgaagc

SEQ ID NO: 1057383 - DNA, 25 bp, Homo sapien
gtctgccattcagtccccagggaac

SEQ ID NO: 1057384 - DNA, 25 bp, Homo sapien
agtaacatactacagaaacgatccc

SEQ ID NO: 1057385 - DNA, 25 bp, Homo sapien
gtaacatactacagaaacgatccct

SEQ ID NO: 1057386 - DNA, 25 bp, Homo sapien
ttctttttcttaacggtgctctaca

SEQ ID NO: 1057387 - DNA, 25 bp, Homo sapien
gagttaggtcctactcttctggaag

SEQ ID NO: 1057388 - DNA, 25 bp, Homo sapien
cccaggaaggtgagcaacgagtcca

SEQ ID NO: 1057389 - DNA, 25 bp, Homo sapien
ggacaactctcagctataatcaaat

SEQ ID NO: 1057390 - DNA, 25 bp, Homo sapien
tatctgaagaatgaagcgaactaga

SEQ ID NO: 1057391 - DNA, 25 bp, Homo sapien
ggcaggagaggtccctaaagtagaa

SEQ ID NO: 1057392 - DNA, 25 bp, Homo sapien
aaggcatcacatgggctgttggaat

SEQ ID NO: 1057393 - DNA, 25 bp, Homo sapien
aacaggtgtagaatttggcttggca

SEQ ID NO: 1057394 - DNA, 25 bp, Homo sapien
ctgttggaatggttacgtggctttt

SEQ ID NO: 1057395 - DNA, 25 bp, Homo sapien
gccgactgattgagggtagattcca

SEQ ID NO: 1057396 - DNA, 25 bp, Homo sapien
ttcatggcccactgctggaaaccag

SEQ ID NO: 1057397 - DNA, 25 bp, Homo sapien
gaataaagtgtctccatcattgccg

SEQ ID NO: 1057398 - DNA, 25 bp, Homo sapien
gaatgtttcattgcaccgaggtctc

SEQ ID NO: 1057399 - DNA, 25 bp, Homo sapien
ggcaagtaggcccagatgagcttga

SEQ ID NO: 1057400 - DNA, 25 bp, Homo sapien
agtaggcccagatgagcttgatctt

SEQ ID NO: 1057401 - DNA, 25 bp, Homo sapien
ctgaaaggcaagtaggcccagatga

SEQ ID NO: 1057402 - DNA, 25 bp, Homo sapien
gaaaggcaagtaggcccagatgagc

SEQ ID NO: 1057403 - DNA, 25 bp, Homo sapien
tcattactgttcaagatgctgatcc

SEQ ID NO: 1057404 - DNA, 25 bp, Homo sapien
gaaggaccaaaagcagcaggatggt

SEQ ID NO: 1057405 - DNA, 25 bp, Homo sapien
tgctggctctaagatgggcagtgaa

SEQ ID NO: 1057406 - DNA, 25 bp, Homo sapien
gatccactgtgctggctctaagatg

SEQ ID NO: 1057407 - DNA, 25 bp, Homo sapien
agttcgctctctcgcactttctgct

SEQ ID NO: 1057408 - DNA, 25 bp, Homo sapien
gcagttcgctctctcgcactttctg

SEQ ID NO: 1057409 - DNA, 25 bp, Homo sapien
ttgcagttcgctctctcgcactttc

SEQ ID NO: 1057410 - DNA, 25 bp, Homo sapien
gacttgcagttcgctctctcgcact

SEQ ID NO: 1057411 - DNA, 25 bp, Homo sapien
ctgtgcacgtaagaaagtgttttct

SEQ ID NO: 1057412 - DNA, 25 bp, Homo sapien
tgcacgtaagaaagtgttttctcgc

SEQ ID NO: 1057413 - DNA, 25 bp, Homo sapien
aagaaagtgttttctcgctgcaatt

SEQ ID NO: 1057414 - DNA, 25 bp, Homo sapien
cgtaagaaagtgttttctcgctgca

SEQ ID NO: 1057415 - DNA, 25 bp, Homo sapien
acttcctcagaatgcttctgcaacg

SEQ ID NO: 1057416 - DNA, 25 bp, Homo sapien
cagagagtttcttttcaaggtcaat

SEQ ID NO: 1057417 - DNA, 25 bp, Homo sapien
tctgatgagctggacttcaacttca

SEQ ID NO: 1057418 - DNA, 25 bp, Homo sapien
cttctgcaacgccactttgagcgac

SEQ ID NO: 1057419 - DNA, 25 bp, Homo sapien
gaactagggctatcagctactcagc

SEQ ID NO: 1057420 - DNA, 25 bp, Homo sapien
tggtggtacattgcacagcacaacc

SEQ ID NO: 1057421 - DNA, 25 bp, Homo sapien
tgcaatggcatgatggcgtgatcct

SEQ ID NO: 1057422 - DNA, 25 bp, Homo sapien
cacaggtgtattttgcaacagtgcc

SEQ ID NO: 1057423 - DNA, 25 bp, Homo sapien
gggaatgcctggctataagctggct

SEQ ID NO: 1057424 - DNA, 25 bp, Homo sapien
tgtagcttttgccatccggcagcca

SEQ ID NO: 1057425 - DNA, 25 bp, Homo sapien
ccctgatgaacagaggagcaatagt

SEQ ID NO: 1057426 - DNA, 25 bp, Homo sapien
gctttaatcttgacagccatgccgc

SEQ ID NO: 1057427 - DNA, 25 bp, Homo sapien
cttctgatggtcttccagtgtgggc

SEQ ID NO: 1057428 - DNA, 25 bp, Homo sapien
ggtctcaatacgctgctgcttctcc

SEQ ID NO: 1057429 - DNA, 25 bp, Homo sapien
ccaggtagcgctccaaggtctcaat

SEQ ID NO: 1057430 - DNA, 25 bp, Homo sapien
tgatatgtttatcacgacctttgac

SEQ ID NO: 1057431 - DNA, 25 bp, Homo sapien
ctatatttaatttcctcagcaaggc

SEQ ID NO: 1057432 - DNA, 25 bp, Homo sapien
tatgtccagcggaggagaattctgc

SEQ ID NO: 1057433 - DNA, 25 bp, Homo sapien
ctatgtccagcggaggagaattctg

SEQ ID NO: 1057434 - DNA, 25 bp, Homo sapien
ctctctgcagattgcctgggtctcc

SEQ ID NO: 1057435 - DNA, 25 bp, Homo sapien
atgtccagcggaggagaattctgct

SEQ ID NO: 1057436 - DNA, 25 bp, Homo sapien
ctccacagactgtttatcttgcagg

SEQ ID NO: 1057437 - DNA, 25 bp, Homo sapien
ttctccactggtctcctccacagac

SEQ ID NO: 1057438 - DNA, 25 bp, Homo sapien
cactggtctcctccacagactgttt

SEQ ID NO: 1057439 - DNA, 25 bp, Homo sapien
ggtctcctccacagactgtttatct

SEQ ID NO: 1057440 - DNA, 25 bp, Homo sapien
gaatcgtatcgcttctgccaggact

SEQ ID NO: 1057441 - DNA, 25 bp, Homo sapien
ggagcgaatcgtatcgcttctgcca

SEQ ID NO: 1057442 - DNA, 25 bp, Homo sapien
agcgaatcgtatcgcttctgccagg

SEQ ID NO: 1057443 - DNA, 25 bp, Homo sapien
cttttggagcgaatcgtatcgcttc

SEQ ID NO: 1057444 - DNA, 25 bp, Homo sapien
gttacagcctggacaccctcagtca

SEQ ID NO: 1057445 - DNA, 25 bp, Homo sapien
ccgttacagcctggacaccctcagt

SEQ ID NO: 1057446 - DNA, 25 bp, Homo sapien
ttacagcctggacaccctcagtcac

SEQ ID NO: 1057447 - DNA, 25 bp, Homo sapien
cctccgttacagcctggacaccctc

SEQ ID NO: 1057448 - DNA, 25 bp, Homo sapien
tctttggtacaaggacatggctaaa

SEQ ID NO: 1057449 - DNA, 25 bp, Homo sapien
gtgtgaacacataaccactactggg

SEQ ID NO: 1057450 - DNA, 25 bp, Homo sapien
cagctctggtcgtactgattatcca

SEQ ID NO: 1057451 - DNA, 25 bp, Homo sapien
ggaactctcaccctaataactgcag

SEQ ID NO: 1057452 - DNA, 25 bp, Homo sapien
tgacggtgaggacagagggcaaggg

SEQ ID NO: 1057453 - DNA, 25 bp, Homo sapien
gacggtgaggacagagggcaagggg

SEQ ID NO: 1057454 - DNA, 25 bp, Homo sapien
ctgacggtgaggacagagggcaagg

SEQ ID NO: 1057455 - DNA, 25 bp, Homo sapien
acggtgaggacagagggcaaggggg

SEQ ID NO: 1057456 - DNA, 25 bp, Homo sapien
tgaaaggcaaagttatcaaggaagg

SEQ ID NO: 1057457 - DNA, 25 bp, Homo sapien
ctgaaaggcaaagttatcaaggaag

SEQ ID NO: 1057458 - DNA, 25 bp, Homo sapien
ctgtacttgtgagcgcaactgatcc

SEQ ID NO: 1057459 - DNA, 25 bp, Homo sapien
gtacttgtgagcgcaactgatccat

SEQ ID NO: 1057460 - DNA, 25 bp, Homo sapien
acttgtgagcgcaactgatccatct

SEQ ID NO: 1057461 - DNA, 25 bp, Homo sapien
ttgtgagcgcaactgatccatcttc

SEQ ID NO: 1057462 - DNA, 25 bp, Homo sapien
tccttgtaggttcaggatctccaga

SEQ ID NO: 1057463 - DNA, 25 bp, Homo sapien
tcattaagttctgcccaccatgtcc

SEQ ID NO: 1057464 - DNA, 25 bp, Homo sapien
tccctaacactgagcaacctgcatg

SEQ ID NO: 1057465 - DNA, 25 bp, Homo sapien
gggactgctctcacagtactgtgct

SEQ ID NO: 1057466 - DNA, 25 bp, Homo sapien
tccttcacggctgtgcgcagctgct

SEQ ID NO: 1057467 - DNA, 25 bp, Homo sapien
ctgctgcagggctgaatcccttcgc

SEQ ID NO: 1057468 - DNA, 25 bp, Homo sapien
agggcctggcttgttccttcttctt

SEQ ID NO: 1057469 - DNA, 25 bp, Homo sapien
tgaatcccttcgctgggcctcctct

SEQ ID NO: 1057470 - DNA, 25 bp, Homo sapien
tcttgaaggcaactggccaactcct

SEQ ID NO: 1057471 - DNA, 25 bp, Homo sapien
agatcttgaaggcaactggccaact

SEQ ID NO: 1057472 - DNA, 25 bp, Homo sapien
cacaatgctacagacagcctgcaga

SEQ ID NO: 1057473 - DNA, 25 bp, Homo sapien
tgggccctctgggtcacaatgctac

SEQ ID NO: 1057474 - DNA, 25 bp, Homo sapien
caagtaccccatagcttgtttccaa

SEQ ID NO: 1057475 - DNA, 25 bp, Homo sapien
gccaggactatgtactctgtctaca

SEQ ID NO: 1057476 - DNA, 25 bp, Homo sapien
ccaaaaacagatttgtgaacaccta

SEQ ID NO: 1057477 - DNA, 25 bp, Homo sapien
tagtttgtcctgcatgcaagtaccc

SEQ ID NO: 1057478 - DNA, 25 bp, Homo sapien
gacatggtggtccttaagtcctcaa

SEQ ID NO: 1057479 - DNA, 25 bp, Homo sapien
tgggcatatctgtctgacatggtgg

SEQ ID NO: 1057480 - DNA, 25 bp, Homo sapien
tagtttcctcttgatcacatctggc

SEQ ID NO: 1057481 - DNA, 25 bp, Homo sapien
gacgcagctgttgaacctcttctag

SEQ ID NO: 1057482 - DNA, 25 bp, Homo sapien
gaaacctgctggactaggctctcag

SEQ ID NO: 1057483 - DNA, 25 bp, Homo sapien
aacgtaatccaacatgccagtgtgg

SEQ ID NO: 1057484 - DNA, 25 bp, Homo sapien
tagagtcctggctataatccctagg

SEQ ID NO: 1057485 - DNA, 25 bp, Homo sapien
gatgagctctctaatcagcaggacc

SEQ ID NO: 1057486 - DNA, 25 bp, Homo sapien
caggaggcaagaaaaaccagagggc

SEQ ID NO: 1057487 - DNA, 25 bp, Homo sapien
aaatcttgtagtggctgactggccc

SEQ ID NO: 1057488 - DNA, 25 bp, Homo sapien
taagaaagagcctcattcaggccca

SEQ ID NO: 1057489 - DNA, 25 bp, Homo sapien
gtgtgagatgctccctaaaccagga

SEQ ID NO: 1057490 - DNA, 25 bp, Homo sapien
ttatgaggaaaaatacccgtcagca

SEQ ID NO: 1057491 - DNA, 25 bp, Homo sapien
ttataatcaaaatacgcaatacaaa

SEQ ID NO: 1057492 - DNA, 25 bp, Homo sapien
tgaggaaaaatacccgtcagcatgg

SEQ ID NO: 1057493 - DNA, 25 bp, Homo sapien
caaatggacataacaaagattcata

SEQ ID NO: 1057494 - DNA, 25 bp, Homo sapien
gaaccagatggagaccaaggctgac

SEQ ID NO: 1057495 - DNA, 25 bp, Homo sapien
gagcccatgcttagagattttcccc

SEQ ID NO: 1057496 - DNA, 25 bp, Homo sapien
tctatagaacgacagaggagcagag

SEQ ID NO: 1057497 - DNA, 25 bp, Homo sapien
gatgatgtcaggactcgagagccta

SEQ ID NO: 1057498 - DNA, 25 bp, Homo sapien
tccaccacccaacacgcaccactaa

SEQ ID NO: 1057499 - DNA, 25 bp, Homo sapien
ctccaccacccaacacgcaccacta

SEQ ID NO: 1057500 - DNA, 25 bp, Homo sapien
ccaccacccaacacgcaccactaac

SEQ ID NO: 1057501 - DNA, 25 bp, Homo sapien
caccacccaacacgcaccactaacc

SEQ ID NO: 1057502 - DNA, 25 bp, Homo sapien
ctctaatagcacagggaagcttggg

SEQ ID NO: 1057503 - DNA, 25 bp, Homo sapien
tctccagccgcacacaggtttggtg

SEQ ID NO: 1057504 - DNA, 25 bp, Homo sapien
gagctgctttcagacccaaagttct

SEQ ID NO: 1057505 - DNA, 25 bp, Homo sapien
aggtttggtgcatccaactccccag

SEQ ID NO: 1057506 - DNA, 25 bp, Homo sapien
agtcatcgcgctcgggaccaatggg

SEQ ID NO: 1057507 - DNA, 25 bp, Homo sapien
cctcggttaccaggcgcgcaacgga

SEQ ID NO: 1057508 - DNA, 25 bp, Homo sapien
tctgcggctgccctgatcgtccttt

SEQ ID NO: 1057509 - DNA, 25 bp, Homo sapien
ttttcggcccttccctgatctggag

SEQ ID NO: 1057510 - DNA, 25 bp, Homo sapien
ggtagacagacgggccggcgggcag

SEQ ID NO: 1057511 - DNA, 25 bp, Homo sapien
gggtagacagacgggccggcgggca

SEQ ID NO: 1057512 - DNA, 25 bp, Homo sapien
tcgcgggagccggtgaccgacgtgc

SEQ ID NO: 1057513 - DNA, 25 bp, Homo sapien
agccggtgaccgacgtgctgtagac

SEQ ID NO: 1057514 - DNA, 25 bp, Homo sapien
gtgaccgacgtgctgtagacgcgca

SEQ ID NO: 1057515 - DNA, 25 bp, Homo sapien
accgacgtgctgtagacgcgcaggc

SEQ ID NO: 1057516 - DNA, 25 bp, Homo sapien
gcaccgggatacagccctgcgcttt

SEQ ID NO: 1057517 - DNA, 25 bp, Homo sapien
gtcccgggcgctagggtccaaagca

SEQ ID NO: 1057518 - DNA, 25 bp, Homo sapien
tgcccgatgaagacattcaggatgg

SEQ ID NO: 1057519 - DNA, 25 bp, Homo sapien
acgggaagttcatgccgcggctgca

SEQ ID NO: 1057520 - DNA, 25 bp, Homo sapien
ctcgcatctcatccctcagggcgtt

SEQ ID NO: 1057521 - DNA, 25 bp, Homo sapien
gcatctcatccctcagggcgttgtc

SEQ ID NO: 1057522 - DNA, 25 bp, Homo sapien
tcgcatctcatccctcagggcgttg

SEQ ID NO: 1057523 - DNA, 25 bp, Homo sapien
cgcatctcatccctcagggcgttgt

SEQ ID NO: 1057524 - DNA, 25 bp, Homo sapien
tatgaccctggctagagtcctcttc

SEQ ID NO: 1057525 - DNA, 25 bp, Homo sapien
tttgtggcagatatgaccctggcta

SEQ ID NO: 1057526 - DNA, 25 bp, Homo sapien
gggcccaagtgctttgtggcagata

SEQ ID NO: 1057527 - DNA, 25 bp, Homo sapien
tggctagagtcctcttccaacactc

SEQ ID NO: 1057528 - DNA, 25 bp, Homo sapien
acagcctccacgaagagctcatagt

SEQ ID NO: 1057529 - DNA, 25 bp, Homo sapien
cagcctccacgaagagctcatagtc

SEQ ID NO: 1057530 - DNA, 25 bp, Homo sapien
ctctaaggttaggttaggaatgaca

SEQ ID NO: 1057531 - DNA, 25 bp, Homo sapien
tggaaccaacagaggtgcccatcag

SEQ ID NO: 1057532 - DNA, 25 bp, Homo sapien
gactaatgggtaaggaatgttgcct

SEQ ID NO: 1057533 - DNA, 25 bp, Homo sapien
ggacatcatttaattgcctctaggg

SEQ ID NO: 1057534 - DNA, 25 bp, Homo sapien
ttgaggcaggcattgtatgagatga

SEQ ID NO: 1057535 - DNA, 25 bp, Homo sapien
tatgagatgatctattctgctattg

SEQ ID NO: 1057536 - DNA, 25 bp, Homo sapien
gtatcatgactgtgccgctatactc

SEQ ID NO: 1057537 - DNA, 25 bp, Homo sapien
cgggaggtcacggttgcagtatcat

SEQ ID NO: 1057538 - DNA, 25 bp, Homo sapien
cagggttacagagctcggaagtgcc

SEQ ID NO: 1057539 - DNA, 25 bp, Homo sapien
agcagccctgtgaagtgtggaaact

SEQ ID NO: 1057540 - DNA, 25 bp, Homo sapien
tctcattttaatacactcgtgggct

SEQ ID NO: 1057541 - DNA, 25 bp, Homo sapien
gaaccaatattgagaggcagcctat

SEQ ID NO: 1057542 - DNA, 25 bp, Homo sapien
gatcttcgtggctgtcttggtagca

SEQ ID NO: 1057543 - DNA, 25 bp, Homo sapien
atcttcgtggctgtcttggtagcag

SEQ ID NO: 1057544 - DNA, 25 bp, Homo sapien
tgtaccataaccaggaggctgatgg

SEQ ID NO: 1057545 - DNA, 25 bp, Homo sapien
ctgtaccataaccaggaggctgatg

SEQ ID NO: 1057546 - DNA, 25 bp, Homo sapien
tgggggttagagtgtcccctgtcac

SEQ ID NO: 1057547 - DNA, 25 bp, Homo sapien
gtgggggttagagtgtcccctgtca

SEQ ID NO: 1057548 - DNA, 25 bp, Homo sapien
ttgcattcctgaacatccaggcttc

SEQ ID NO: 1057549 - DNA, 25 bp, Homo sapien
cttctttgcattcctgaacatccag

SEQ ID NO: 1057550 - DNA, 25 bp, Homo sapien
tttgcattcctgaacatccaggctt

SEQ ID NO: 1057551 - DNA, 25 bp, Homo sapien
tctttgcattcctgaacatccaggc

SEQ ID NO: 1057552 - DNA, 25 bp, Homo sapien
tggaatagcagtcgcttttgagact

SEQ ID NO: 1057553 - DNA, 25 bp, Homo sapien
ggaatagcagtcgcttttgagactc

SEQ ID NO: 1057554 - DNA, 25 bp, Homo sapien
ctggaatagcagtcgcttttgagac

SEQ ID NO: 1057555 - DNA, 25 bp, Homo sapien
ctgttcttgatggagattaagctgg

SEQ ID NO: 1057556 - DNA, 25 bp, Homo sapien
ttgatggagctgcaactagaactgt

SEQ ID NO: 1057557 - DNA, 25 bp, Homo sapien
gatggctccggtctgctgtactgac

SEQ ID NO: 1057558 - DNA, 25 bp, Homo sapien
tgatggtgatcaagctgttcttgat

SEQ ID NO: 1057559 - DNA, 25 bp, Homo sapien
gcacttggcaaagcgtgggtggctg

SEQ ID NO: 1057560 - DNA, 25 bp, Homo sapien
acagttgtgaaggtcacatgagcca

SEQ ID NO: 1057561 - DNA, 25 bp, Homo sapien
gcaaagggcttagcttccctgagcc

SEQ ID NO: 1057562 - DNA, 25 bp, Homo sapien
tggccagatggtgatcgagctgtcc

SEQ ID NO: 1057563 - DNA, 25 bp, Homo sapien
aaaatgcctccgcttatgttgctgg

SEQ ID NO: 1057564 - DNA, 25 bp, Homo sapien
tggctggtgtcgttttgtcctgaga

SEQ ID NO: 1057565 - DNA, 25 bp, Homo sapien
ggcattggccacgaagaaaaggaaa

SEQ ID NO: 1057566 - DNA, 25 bp, Homo sapien
aagaggtggattatggcattggcca

SEQ ID NO: 1057567 - DNA, 25 bp, Homo sapien
gcactgcttggcccctacatcatta

SEQ ID NO: 1057568 - DNA, 25 bp, Homo sapien
catggcactgcctgtcaacttctac

SEQ ID NO: 1057569 - DNA, 25 bp, Homo sapien
atcattacccccctattttggctgt

SEQ ID NO: 1057570 - DNA, 25 bp, Homo sapien
tctcttgcgagtgatggtggcagct

SEQ ID NO: 1057571 - DNA, 25 bp, Homo sapien
tctctttcgaagatgaccaggccgc

SEQ ID NO: 1057572 - DNA, 25 bp, Homo sapien
tctgcacttcgtctcaaaggtaagg

SEQ ID NO: 1057573 - DNA, 25 bp, Homo sapien
gactttctgggcgaccacttctctt

SEQ ID NO: 1057574 - DNA, 25 bp, Homo sapien
ccttcctttggctaccttgcgatga

SEQ ID NO: 1057575 - DNA, 25 bp, Homo sapien
gggccggacttgagaacctgcattt

SEQ ID NO: 1057576 - DNA, 25 bp, Homo sapien
catctcccctacagggcagcagaaa

SEQ ID NO: 1057577 - DNA, 25 bp, Homo sapien
tcccaaagtgtgataccagcactgc

SEQ ID NO: 1057578 - DNA, 25 bp, Homo sapien
attacagccacgagagtgtgcccag

SEQ ID NO: 1057579 - DNA, 25 bp, Homo sapien
atcactgtctccctgtcatcatcaa

SEQ ID NO: 1057580 - DNA, 25 bp, Homo sapien
ccctgtcatcatcaatgcctatctt

SEQ ID NO: 1057581 - DNA, 25 bp, Homo sapien
ccatcactgtctccctgtcatcatc

SEQ ID NO: 1057582 - DNA, 25 bp, Homo sapien
actgtctccctgtcatcatcaatgc

SEQ ID NO: 1057583 - DNA, 25 bp, Homo sapien
aagccaagggccaactcaaatgcat

SEQ ID NO: 1057584 - DNA, 25 bp, Homo sapien
gccaagggccaactcaaatgcatct

SEQ ID NO: 1057585 - DNA, 25 bp, Homo sapien
gggccaactcaaatgcatctgacag

SEQ ID NO: 1057586 - DNA, 25 bp, Homo sapien
aagggccaactcaaatgcatctgac

SEQ ID NO: 1057587 - DNA, 25 bp, Homo sapien
tttggtggaaacttcagctgttccc

SEQ ID NO: 1057588 - DNA, 25 bp, Homo sapien
gacccagggtctgctttttgtgtgg

SEQ ID NO: 1057589 - DNA, 25 bp, Homo sapien
tataggttttggtggaaacttcagc

SEQ ID NO: 1057590 - DNA, 25 bp, Homo sapien
ctgacccagggtctgctttttgtgt

SEQ ID NO: 1057591 - DNA, 25 bp, Homo sapien
ttttctgccctgtaagacgatataa

SEQ ID NO: 1057592 - DNA, 25 bp, Homo sapien
tttctgccctgtaagacgatataat

SEQ ID NO: 1057593 - DNA, 25 bp, Homo sapien
tggccccggagaagtccgaaggcaa

SEQ ID NO: 1057594 - DNA, 25 bp, Homo sapien
gcaaactgctggttggacacggagc

SEQ ID NO: 1057595 - DNA, 25 bp, Homo sapien
actgctggttggacacggagcccat

SEQ ID NO: 1057596 - DNA, 25 bp, Homo sapien
ctgcaaactgctggttggacacgga

SEQ ID NO: 1057597 - DNA, 25 bp, Homo sapien
aaactgctggttggacacggagccc

SEQ ID NO: 1057598 - DNA, 25 bp, Homo sapien
aagtgtccccgctaagtcccgagct

SEQ ID NO: 1057599 - DNA, 25 bp, Homo sapien
ggccgcccctgaatcctaaagtgtc

SEQ ID NO: 1057600 - DNA, 25 bp, Homo sapien
cctggccgcccctgaatcctaaagt

SEQ ID NO: 1057601 - DNA, 25 bp, Homo sapien
ggctcctggccgcccctgaatccta

SEQ ID NO: 1057602 - DNA, 25 bp, Homo sapien
tcatggacaggaagccgaaccccat

SEQ ID NO: 1057603 - DNA, 25 bp, Homo sapien
caggaagccgaaccccatgcgcacg

SEQ ID NO: 1057604 - DNA, 25 bp, Homo sapien
catggacaggaagccgaaccccatg

SEQ ID NO: 1057605 - DNA, 25 bp, Homo sapien
gaagccgaaccccatgcgcacgttg

SEQ ID NO: 1057606 - DNA, 25 bp, Homo sapien
gatctgcgcttctgcatgctctttc

SEQ ID NO: 1057607 - DNA, 25 bp, Homo sapien
acagaatactccaccaggtccggtg

SEQ ID NO: 1057608 - DNA, 25 bp, Homo sapien
tctgcgcttctgcatgctctttcct

SEQ ID NO: 1057609 - DNA, 25 bp, Homo sapien
ttgatctgcgcttctgcatgctctt

SEQ ID NO: 1057610 - DNA, 25 bp, Homo sapien
tccttggcatgatgatctagacctc

SEQ ID NO: 1057611 - DNA, 25 bp, Homo sapien
tggcagaagtggcacttcttgggct

SEQ ID NO: 1057612 - DNA, 25 bp, Homo sapien
catatggctgatgctctggcagaag

SEQ ID NO: 1057613 - DNA, 25 bp, Homo sapien
gatctagacctccacagttgtagca

SEQ ID NO: 1057614 - DNA, 25 bp, Homo sapien
gttggctttccctgtgcactagggc

SEQ ID NO: 1057615 - DNA, 25 bp, Homo sapien
ggctttccctgtgcactagggccct

SEQ ID NO: 1057616 - DNA, 25 bp, Homo sapien
ttggctttccctgtgcactagggcc

SEQ ID NO: 1057617 - DNA, 25 bp, Homo sapien
tggctttccctgtgcactagggccc

SEQ ID NO: 1057618 - DNA, 25 bp, Homo sapien
tcgacagcacaggattaagtacagg

SEQ ID NO: 1057619 - DNA, 25 bp, Homo sapien
cactactgtagcagggcaggacaca

SEQ ID NO: 1057620 - DNA, 25 bp, Homo sapien
tgtgccataggattagacaaccctc

SEQ ID NO: 1057621 - DNA, 25 bp, Homo sapien
tgaacccaagcctgagatacatggc

SEQ ID NO: 1057622 - DNA, 25 bp, Homo sapien
ctgaatagctaggactaaaggcatg

SEQ ID NO: 1057623 - DNA, 25 bp, Homo sapien
cctgaatagctaggactaaaggcat

SEQ ID NO: 1057624 - DNA, 25 bp, Homo sapien
gaccccactttctacatggaaggcc

SEQ ID NO: 1057625 - DNA, 25 bp, Homo sapien
taaacaatcttgtggccactttgac

SEQ ID NO: 1057626 - DNA, 25 bp, Homo sapien
acatggagttacattcgttcgtctc

SEQ ID NO: 1057627 - DNA, 25 bp, Homo sapien
tagcacctgcataaaagttcctgag

SEQ ID NO: 1057628 - DNA, 25 bp, Homo sapien
agtgggccggcacttcctcatgacg

SEQ ID NO: 1057629 - DNA, 25 bp, Homo sapien
tgggcgcgtccccacggcttcagtg

SEQ ID NO: 1057630 - DNA, 25 bp, Homo sapien
ctgattagctccgctgggcgcgtcc

SEQ ID NO: 1057631 - DNA, 25 bp, Homo sapien
tggcgctggcagaacacgtcatctt

SEQ ID NO: 1057632 - DNA, 25 bp, Homo sapien
tccttcagttatcgcacgcctagta

SEQ ID NO: 1057633 - DNA, 25 bp, Homo sapien
tgattattccctcagtcgtcccttt

SEQ ID NO: 1057634 - DNA, 25 bp, Homo sapien
tctcctctagttcaccccttcagtt

SEQ ID NO: 1057635 - DNA, 25 bp, Homo sapien
gcctagtacttcacgcctcagtggt

SEQ ID NO: 1057636 - DNA, 25 bp, Homo sapien
gaacatctaagtcggtttcctgcca

SEQ ID NO: 1057637 - DNA, 25 bp, Homo sapien
atcttcccctaagctgtttccaact

SEQ ID NO: 1057638 - DNA, 25 bp, Homo sapien
tgccacatcatggtgcccacatctt

SEQ ID NO: 1057639 - DNA, 25 bp, Homo sapien
tctggaggcaaaagcctttcctcgg

SEQ ID NO: 1057640 - DNA, 25 bp, Homo sapien
tcaccaaggtttgcgaagagctata

SEQ ID NO: 1057641 - DNA, 25 bp, Homo sapien
gagcagccagcattagaatccaaag

SEQ ID NO: 1057642 - DNA, 25 bp, Homo sapien
cccagagttttataacgcaatgtga

SEQ ID NO: 1057643 - DNA, 25 bp, Homo sapien
ctataatcttttaccacccagagtt

SEQ ID NO: 1057644 - DNA, 25 bp, Homo sapien
agtcagaagatcactccagaacaag

SEQ ID NO: 1057645 - DNA, 25 bp, Homo sapien
gaagatcactccagaacaagcaaac

SEQ ID NO: 1057646 - DNA, 25 bp, Homo sapien
agatcactccagaacaagcaaacac

SEQ ID NO: 1057647 - DNA, 25 bp, Homo sapien
tcagaagatcactccagaacaagca

SEQ ID NO: 1057648 - DNA, 25 bp, Homo sapien
ggcacagaaccgctcccaaagtgac

SEQ ID NO: 1057649 - DNA, 25 bp, Homo sapien
gatgttggcacagaaccgctcccaa

SEQ ID NO: 1057650 - DNA, 25 bp, Homo sapien
gcacagaaccgctcccaaagtgaca

SEQ ID NO: 1057651 - DNA, 25 bp, Homo sapien
gttggcacagaaccgctcccaaagt

SEQ ID NO: 1057652 - DNA, 25 bp, Homo sapien
ggaactggggcacaacattgctgga

SEQ ID NO: 1057653 - DNA, 25 bp, Homo sapien
tggtgatcttgcaagaaaaccaaac

SEQ ID NO: 1057654 - DNA, 25 bp, Homo sapien
caactgctgacacacaggaactggg

SEQ ID NO: 1057655 - DNA, 25 bp, Homo sapien
attttgcttttcagccgggcgcagt

SEQ ID NO: 1057656 - DNA, 25 bp, Homo sapien
tacaggcttggtttagttggtctcc

SEQ ID NO: 1057657 - DNA, 25 bp, Homo sapien
agttaatctttcaaccatatgctct

SEQ ID NO: 1057658 - DNA, 25 bp, Homo sapien
ccatatgctcttaaatacaggcttg

SEQ ID NO: 1057659 - DNA, 25 bp, Homo sapien
agggattcaaactgatgtccatctg

SEQ ID NO: 1057660 - DNA, 25 bp, Homo sapien
tatgaatgcaatgtgtttcggcatt

SEQ ID NO: 1057661 - DNA, 25 bp, Homo sapien
ggcacttcttggcatagcgacggtt

SEQ ID NO: 1057662 - DNA, 25 bp, Homo sapien
tgcaatgtgtttcggcattgggcct

SEQ ID NO: 1057663 - DNA, 25 bp, Homo sapien
acggttcccgtccattatgaatgca

SEQ ID NO: 1057664 - DNA, 25 bp, Homo sapien
gatgagatctatagctagcaagcaa

SEQ ID NO: 1057665 - DNA, 25 bp, Homo sapien
caaactcagagcctggttttctagc

SEQ ID NO: 1057666 - DNA, 25 bp, Homo sapien
cacagactgttcactttgggctctg

SEQ ID NO: 1057667 - DNA, 25 bp, Homo sapien
cacgtctggccaatgtcaagatgag

SEQ ID NO: 1057668 - DNA, 25 bp, Homo sapien
gggttggaacccaccactgacatca

SEQ ID NO: 1057669 - DNA, 25 bp, Homo sapien
tgacacttgaatagcctcaggccct

SEQ ID NO: 1057670 - DNA, 25 bp, Homo sapien
taaacgtagacaacagaagacattc

SEQ ID NO: 1057671 - DNA, 25 bp, Homo sapien
gaaaattgccagtgagaacctgaca

SEQ ID NO: 1057672 - DNA, 25 bp, Homo sapien
taggatgcccaggttcaaacaccac

SEQ ID NO: 1057673 - DNA, 25 bp, Homo sapien
ttttcttccatcaagcggctgaact

SEQ ID NO: 1057674 - DNA, 25 bp, Homo sapien
tgctgaatgcgtagactgtcacctc

SEQ ID NO: 1057675 - DNA, 25 bp, Homo sapien
tacctcactcttggagcgtttgaag

SEQ ID NO: 1057676 - DNA, 25 bp, Homo sapien
gccacccaagatatctaactaacat

SEQ ID NO: 1057677 - DNA, 25 bp, Homo sapien
gttgcaagtcccttaagtaagcctc

SEQ ID NO: 1057678 - DNA, 25 bp, Homo sapien
taaagaatgaaagactatcttgtat

SEQ ID NO: 1057679 - DNA, 25 bp, Homo sapien
aatttcaagggttaggataaggctg

SEQ ID NO: 1057680 - DNA, 25 bp, Homo sapien
aatctgatagaatttagggatccca

SEQ ID NO: 1057681 - DNA, 25 bp, Homo sapien
taagaatggtactgatgcttcccca

SEQ ID NO: 1057682 - DNA, 25 bp, Homo sapien
actttttagggttcactgtgcagca

SEQ ID NO: 1057683 - DNA, 25 bp, Homo sapien
taaatgtctcttatgcatcatccta

SEQ ID NO: 1057684 - DNA, 25 bp, Homo sapien
agatcgcccaggacccggatacaca

SEQ ID NO: 1057685 - DNA, 25 bp, Homo sapien
ctggagatccaagggcaacaagtgc

SEQ ID NO: 1057686 - DNA, 25 bp, Homo sapien
ctgtacagcttgtgcaatcagctcc

SEQ ID NO: 1057687 - DNA, 25 bp, Homo sapien
tgttgtagttcttcgtggcctgtac

SEQ ID NO: 1057688 - DNA, 25 bp, Homo sapien
gtcagggataagaactgctgtattc

SEQ ID NO: 1057689 - DNA, 25 bp, Homo sapien
tatccataggttaaaggagtggaac

SEQ ID NO: 1057690 - DNA, 25 bp, Homo sapien
taagaactgctgtattccgatccca

SEQ ID NO: 1057691 - DNA, 25 bp, Homo sapien
atttcttgaaggatctgtcttcaaa

SEQ ID NO: 1057692 - DNA, 25 bp, Homo sapien
cactgattacagagaagcccttcca

SEQ ID NO: 1057693 - DNA, 25 bp, Homo sapien
ctgaaaggtgaaattatgagttttt

SEQ ID NO: 1057694 - DNA, 25 bp, Homo sapien
aatgttaattgtggatacctctgaa

SEQ ID NO: 1057695 - DNA, 25 bp, Homo sapien
gacagggactgatgattgaagtcac

SEQ ID NO: 1057696 - DNA, 25 bp, Homo sapien
ggatgtgtatgcaaaacagacattc

SEQ ID NO: 1057697 - DNA, 25 bp, Homo sapien
cattgctgatctcatgacgggatgt

SEQ ID NO: 1057698 - DNA, 25 bp, Homo sapien
tctcatgacgggatgtgtatgcaaa

SEQ ID NO: 1057699 - DNA, 25 bp, Homo sapien
gacgggatgtgtatgcaaaacagac

SEQ ID NO: 1057700 - DNA, 25 bp, Homo sapien
gctttatggtttggtacaggcctgc

SEQ ID NO: 1057701 - DNA, 25 bp, Homo sapien
tgtggaactagaacatgagagacct

SEQ ID NO: 1057702 - DNA, 25 bp, Homo sapien
gaactctagccccaacaaactgcat

SEQ ID NO: 1057703 - DNA, 25 bp, Homo sapien
caattaccatgcaaaacaactcggg

SEQ ID NO: 1057704 - DNA, 25 bp, Homo sapien
gaaaaatccctgaatcggctgggca

SEQ ID NO: 1057705 - DNA, 25 bp, Homo sapien
taattaggattccactatgttgaca

SEQ ID NO: 1057706 - DNA, 25 bp, Homo sapien
taacatgagagggaccaaatattta

SEQ ID NO: 1057707 - DNA, 25 bp, Homo sapien
tttgaaaaatccctgaatcggctgg

SEQ ID NO: 1057708 - DNA, 25 bp, Homo sapien
taaaatagcctcaaaaactgtctcc

SEQ ID NO: 1057709 - DNA, 25 bp, Homo sapien
caatcgaatcgggaagggaaccaga

SEQ ID NO: 1057710 - DNA, 25 bp, Homo sapien
gaatgaatgaactatgtgacagaga

SEQ ID NO: 1057711 - DNA, 25 bp, Homo sapien
ttcccaagatcccacataatagagg

SEQ ID NO: 1057712 - DNA, 25 bp, Homo sapien
ccaagttatgtgagactctgtacaa

SEQ ID NO: 1057713 - DNA, 25 bp, Homo sapien
agaatattcgtgaaactgcccaggc

SEQ ID NO: 1057714 - DNA, 25 bp, Homo sapien
cttggcagcatggtcttaattctcc

SEQ ID NO: 1057715 - DNA, 25 bp, Homo sapien
tttgctctttccctaagcggcctga

SEQ ID NO: 1057716 - DNA, 25 bp, Homo sapien
aatgcactgatttggaaagatgtcc

SEQ ID NO: 1057717 - DNA, 25 bp, Homo sapien
catcctatggcccagtatttgatga

SEQ ID NO: 1057718 - DNA, 25 bp, Homo sapien
cattcacacgtgcatataagtatac

SEQ ID NO: 1057719 - DNA, 25 bp, Homo sapien
tgaaagtcatttagcctcaggccta

SEQ ID NO: 1057720 - DNA, 25 bp, Homo sapien
ttttgccttttttgacatgttctga

SEQ ID NO: 1057721 - DNA, 25 bp, Homo sapien
gccttttttgacatgttctgataca

SEQ ID NO: 1057722 - DNA, 25 bp, Homo sapien
ttgccttttttgacatgttctgata

SEQ ID NO: 1057723 - DNA, 25 bp, Homo sapien
tttttgacatgttctgatacataag

SEQ ID NO: 1057724 - DNA, 25 bp, Homo sapien
ctctttctgtagtgttctcatggtg

SEQ ID NO: 1057725 - DNA, 25 bp, Homo sapien
tctgtagtgttctcatggtgaactt

SEQ ID NO: 1057726 - DNA, 25 bp, Homo sapien
tttctgtagtgttctcatggtgaac

SEQ ID NO: 1057727 - DNA, 25 bp, Homo sapien
atcctgtagtattctctttctgtag

SEQ ID NO: 1057728 - DNA, 25 bp, Homo sapien
cacttctccagaagtccgtatcaag

SEQ ID NO: 1057729 - DNA, 25 bp, Homo sapien
tatcaagatgtcaggatgaggagag

SEQ ID NO: 1057730 - DNA, 25 bp, Homo sapien
tagcaagaagtcactcagccgcact

SEQ ID NO: 1057731 - DNA, 25 bp, Homo sapien
tagaggcacttatcaagcagagact

SEQ ID NO: 1057732 - DNA, 25 bp, Homo sapien
atgacaatgttacaggcatcctgag

SEQ ID NO: 1057733 - DNA, 25 bp, Homo sapien
cctgtggtaaagcagaactaaaacg

SEQ ID NO: 1057734 - DNA, 25 bp, Homo sapien
tgggccgcatccctggtcagtcctc

SEQ ID NO: 1057735 - DNA, 25 bp, Homo sapien
cattcactagtagggggaggcgtca

SEQ ID NO: 1057736 - DNA, 25 bp, Homo sapien
tgaagcacgctatggttcatctgga

SEQ ID NO: 1057737 - DNA, 25 bp, Homo sapien
gaagcacgctatggttcatctggaa

SEQ ID NO: 1057738 - DNA, 25 bp, Homo sapien
gccacagaacgggttggaacaccag

SEQ ID NO: 1057739 - DNA, 25 bp, Homo sapien
aaaatgtatactctggccacagaac

SEQ ID NO: 1057740 - DNA, 25 bp, Homo sapien
aatgtactacaggaagcttcgtggg

SEQ ID NO: 1057741 - DNA, 25 bp, Homo sapien
catccttggagatgaggtgaacact

SEQ ID NO: 1057742 - DNA, 25 bp, Homo sapien
tcctgaggagaagatagtgacaacc

SEQ ID NO: 1057743 - DNA, 25 bp, Homo sapien
ctaggtgaccacctggagactgtca

SEQ ID NO: 1057744 - DNA, 25 bp, Homo sapien
caaatgagaattctggactgtcccc

SEQ ID NO: 1057745 - DNA, 25 bp, Homo sapien
gcttgaacagttgccgtagagctct

SEQ ID NO: 1057746 - DNA, 25 bp, Homo sapien
tagagctctccgtcttgctggaagg

SEQ ID NO: 1057747 - DNA, 25 bp, Homo sapien
tacatgtggagctatgaggacttcg

SEQ ID NO: 1057748 - DNA, 25 bp, Homo sapien
cagtcagctcgcttgagttccaagg

SEQ ID NO: 1057749 - DNA, 25 bp, Homo sapien
tctggccgagagtttgtgcaagcgt

SEQ ID NO: 1057750 - DNA, 25 bp, Homo sapien
tgcaggaagccttggactcgctctt

SEQ ID NO: 1057751 - DNA, 25 bp, Homo sapien
cgctcctctgcatacatgtctcggg

SEQ ID NO: 1057752 - DNA, 25 bp, Homo sapien
ttggattgtaatcgcccgcctggct

SEQ ID NO: 1057753 - DNA, 25 bp, Homo sapien
ggattcagttcaccagggcctacag

SEQ ID NO: 1057754 - DNA, 25 bp, Homo sapien
tactagcagatccaaggtagagcca

SEQ ID NO: 1057755 - DNA, 25 bp, Homo sapien
catattacggaaagtcagacccagg

SEQ ID NO: 1057756 - DNA, 25 bp, Homo sapien
agagcccaggctgacgccaaagtgg

SEQ ID NO: 1057757 - DNA, 25 bp, Homo sapien
gggaaaccagcttggcgcagccgga

SEQ ID NO: 1057758 - DNA, 25 bp, Homo sapien
caggctgacgccaaagtgggaaaaa

SEQ ID NO: 1057759 - DNA, 25 bp, Homo sapien
ctgacgccaaagtgggaaaaaggcg

SEQ ID NO: 1057760 - DNA, 25 bp, Homo sapien
cccagaagaggggtttgcgaggcct

SEQ ID NO: 1057761 - DNA, 25 bp, Homo sapien
gcgcatctcagcggctttccttcct

SEQ ID NO: 1057762 - DNA, 25 bp, Homo sapien
gaagaggggtttgcgaggcctggct

SEQ ID NO: 1057763 - DNA, 25 bp, Homo sapien
ggcgcatctcagcggctttccttcc

SEQ ID NO: 1057764 - DNA, 25 bp, Homo sapien
ggctcccgccaagagctgtcttttg

SEQ ID NO: 1057765 - DNA, 25 bp, Homo sapien
gttccttccaccttatgcaacccag

SEQ ID NO: 1057766 - DNA, 25 bp, Homo sapien
ccacttctccaagccgtgcgacact

SEQ ID NO: 1057767 - DNA, 25 bp, Homo sapien
gtggcgcgcgtcgaaggcagtaaat

SEQ ID NO: 1057768 - DNA, 25 bp, Homo sapien
cgccgccgttcattggcccagctgg

SEQ ID NO: 1057769 - DNA, 25 bp, Homo sapien
ggatttcacctcccgccgccgttca

SEQ ID NO: 1057770 - DNA, 25 bp, Homo sapien
ttcacctcccgccgccgttcattgg

SEQ ID NO: 1057771 - DNA, 25 bp, Homo sapien
ctcccgccgccgttcattggcccag

SEQ ID NO: 1057772 - DNA, 25 bp, Homo sapien
agtttttatagcgctgggagccccg

SEQ ID NO: 1057773 - DNA, 25 bp, Homo sapien
tataaagtttttatagcgctgggag

SEQ ID NO: 1057774 - DNA, 25 bp, Homo sapien
ataaagtttttatagcgctgggagc

SEQ ID NO: 1057775 - DNA, 25 bp, Homo sapien
taaagtttttatagcgctgggagcc

SEQ ID NO: 1057776 - DNA, 25 bp, Homo sapien
cggcgacggcagcgggacgtaggtg

SEQ ID NO: 1057777 - DNA, 25 bp, Homo sapien
ggacgtaggtgctggacgcgggatg

SEQ ID NO: 1057778 - DNA, 25 bp, Homo sapien
acgtaggtgctggacgcgggatgca

SEQ ID NO: 1057779 - DNA, 25 bp, Homo sapien
gcagcgggacgtaggtgctggacgc

SEQ ID NO: 1057780 - DNA, 25 bp, Homo sapien
tcgggtttgaattgcccgcccgcag

SEQ ID NO: 1057781 - DNA, 25 bp, Homo sapien
tcgtataagaacgaagcgcgcgcag

SEQ ID NO: 1057782 - DNA, 25 bp, Homo sapien
gagtgagcccgacgttcgtataaga

SEQ ID NO: 1057783 - DNA, 25 bp, Homo sapien
caacagctgcagatggcgcaaacaa

SEQ ID NO: 1057784 - DNA, 25 bp, Homo sapien
ctttatctcccttagcatccccttc

SEQ ID NO: 1057785 - DNA, 25 bp, Homo sapien
tttgctttatctcccttagcatccc

SEQ ID NO: 1057786 - DNA, 25 bp, Homo sapien
tatctcccttagcatccccttcagc

SEQ ID NO: 1057787 - DNA, 25 bp, Homo sapien
ctttgctttatctcccttagcatcc

SEQ ID NO: 1057788 - DNA, 25 bp, Homo sapien
ccaaggctttgacccttgaagagag

SEQ ID NO: 1057789 - DNA, 25 bp, Homo sapien
gtccaaggctttgacccttgaagag

SEQ ID NO: 1057790 - DNA, 25 bp, Homo sapien
ggctttgacccttgaagagagaatg

SEQ ID NO: 1057791 - DNA, 25 bp, Homo sapien
ctttgacccttgaagagagaatgac

SEQ ID NO: 1057792 - DNA, 25 bp, Homo sapien
caggacacaggttacggttaatcac

SEQ ID NO: 1057793 - DNA, 25 bp, Homo sapien
gttagaaataggacaggtaagtcgc

SEQ ID NO: 1057794 - DNA, 25 bp, Homo sapien
ctattaaagacaacgagaaagttag

SEQ ID NO: 1057795 - DNA, 25 bp, Homo sapien
caatttgctctagattataggagtg

SEQ ID NO: 1057796 - DNA, 25 bp, Homo sapien
agacaacctcgcggatcttctctgt

SEQ ID NO: 1057797 - DNA, 25 bp, Homo sapien
gcagacaacctcgcggatcttctct

SEQ ID NO: 1057798 - DNA, 25 bp, Homo sapien
acaacctcgcggatcttctctgtgg

SEQ ID NO: 1057799 - DNA, 25 bp, Homo sapien
agcagacaacctcgcggatcttctc

SEQ ID NO: 1057800 - DNA, 25 bp, Homo sapien
gggacaagcacgaaaattcaaaagc

SEQ ID NO: 1057801 - DNA, 25 bp, Homo sapien
ggacaagcacgaaaattcaaaagca

SEQ ID NO: 1057802 - DNA, 25 bp, Homo sapien
gacaagcacgaaaattcaaaagcat

SEQ ID NO: 1057803 - DNA, 25 bp, Homo sapien
cagggacaagcacgaaaattcaaaa

SEQ ID NO: 1057804 - DNA, 25 bp, Homo sapien
ggcaagagtcccaagtagaggcaat

SEQ ID NO: 1057805 - DNA, 25 bp, Homo sapien
agcccactcaaatgtcccactttgg

SEQ ID NO: 1057806 - DNA, 25 bp, Homo sapien
tgaacatcagtacaatggactgaag

SEQ ID NO: 1057807 - DNA, 25 bp, Homo sapien
cccactttggctacaggcatcagaa

SEQ ID NO: 1057808 - DNA, 25 bp, Homo sapien
cttgggctctggctttggaggagca

SEQ ID NO: 1057809 - DNA, 25 bp, Homo sapien
aggcttgggctctggctttggagga

SEQ ID NO: 1057810 - DNA, 25 bp, Homo sapien
ctttgcaggggcctttttaggcttg

SEQ ID NO: 1057811 - DNA, 25 bp, Homo sapien
tgcaggggcctttttaggcttgggc

SEQ ID NO: 1057812 - DNA, 25 bp, Homo sapien
gaattcttgatcaggaaaccaacgt

SEQ ID NO: 1057813 - DNA, 25 bp, Homo sapien
tgacacggacgaggtaagctatcca

SEQ ID NO: 1057814 - DNA, 25 bp, Homo sapien
tggaggcaccattatgctaattaag

SEQ ID NO: 1057815 - DNA, 25 bp, Homo sapien
caaggtatggtctgcaaagttctgc

SEQ ID NO: 1057816 - DNA, 25 bp, Homo sapien
ttgccagcatcagcttttccctttt

SEQ ID NO: 1057817 - DNA, 25 bp, Homo sapien
cttgccagcatcagcttttcccttt

SEQ ID NO: 1057818 - DNA, 25 bp, Homo sapien
agcatcagcttttccctttttccct

SEQ ID NO: 1057819 - DNA, 25 bp, Homo sapien
tctccattttctgcagggttattcc

SEQ ID NO: 1057820 - DNA, 25 bp, Homo sapien
ctggtctgttttggcatctccattt

SEQ ID NO: 1057821 - DNA, 25 bp, Homo sapien
cattttctgcagggttattcccctc

SEQ ID NO: 1057822 - DNA, 25 bp, Homo sapien
tccattttctgcagggttattcccc

SEQ ID NO: 1057823 - DNA, 25 bp, Homo sapien
caagcacactggaccaaatggtaca

SEQ ID NO: 1057824 - DNA, 25 bp, Homo sapien
gcccttcagctgacagtagagattt

SEQ ID NO: 1057825 - DNA, 25 bp, Homo sapien
gacctgaggttactcctagcttgaa

SEQ ID NO: 1057826 - DNA, 25 bp, Homo sapien
tctgggcctcactgtaaaattgagg

SEQ ID NO: 1057827 - DNA, 25 bp, Homo sapien
atctccagcaccttcagctttctgt

SEQ ID NO: 1057828 - DNA, 25 bp, Homo sapien
gcatctccagcaccttcagctttct

SEQ ID NO: 1057829 - DNA, 25 bp, Homo sapien
tcacttggcatctccagcaccttca

SEQ ID NO: 1057830 - DNA, 25 bp, Homo sapien
ctccagcaccttcagctttctgtgc

SEQ ID NO: 1057831 - DNA, 25 bp, Homo sapien
tgactaggggtcaggtctcaacaga

SEQ ID NO: 1057832 - DNA, 25 bp, Homo sapien
tctatgctgaacgatggaaagggag

SEQ ID NO: 1057833 - DNA, 25 bp, Homo sapien
tgtgctaacaacatagcttttaaaa

SEQ ID NO: 1057834 - DNA, 25 bp, Homo sapien
tctccacatcaatccagctttggag

SEQ ID NO: 1057835 - DNA, 25 bp, Homo sapien
ccataaacaatcatggtatttcagg

SEQ ID NO: 1057836 - DNA, 25 bp, Homo sapien
tccataaacaatcatggtatttcag

SEQ ID NO: 1057837 - DNA, 25 bp, Homo sapien
aagatactttccataaacaatcatg

SEQ ID NO: 1057838 - DNA, 25 bp, Homo sapien
tactttccataaacaatcatggtat

SEQ ID NO: 1057839 - DNA, 25 bp, Homo sapien
tacctcaaagcagaacgtaccctgt

SEQ ID NO: 1057840 - DNA, 25 bp, Homo sapien
cgtaccctgttccaagagacttgga

SEQ ID NO: 1057841 - DNA, 25 bp, Homo sapien
aggaatcaggaaagaccccattgtc

SEQ ID NO: 1057842 - DNA, 25 bp, Homo sapien
ggagcaaagtgtcatctaccttaca

SEQ ID NO: 1057843 - DNA, 25 bp, Homo sapien
gctgttagcatagcccagggcttag

SEQ ID NO: 1057844 - DNA, 25 bp, Homo sapien
gctgtcttagtgaatggtccttacc

SEQ ID NO: 1057845 - DNA, 25 bp, Homo sapien
gcccagctactttcatggtccagag

SEQ ID NO: 1057846 - DNA, 25 bp, Homo sapien
tcaagtttaacctcagccagtcgct

SEQ ID NO: 1057847 - DNA, 25 bp, Homo sapien
gatggctctgaagtgaccaacgggc

SEQ ID NO: 1057848 - DNA, 25 bp, Homo sapien
cacagacagtatggacatgctggac

SEQ ID NO: 1057849 - DNA, 25 bp, Homo sapien
gcagtacctcaaccagcgatctgat

SEQ ID NO: 1057850 - DNA, 25 bp, Homo sapien
taaagaaagcactttgcggcggctt

SEQ ID NO: 1057851 - DNA, 25 bp, Homo sapien
ccaggagtggggttgaggttgccat

SEQ ID NO: 1057852 - DNA, 25 bp, Homo sapien
tccaggagtggggttgaggttgcca

SEQ ID NO: 1057853 - DNA, 25 bp, Homo sapien
ggtccaggagtggggttgaggttgc

SEQ ID NO: 1057854 - DNA, 25 bp, Homo sapien
ctagggtccaggagtggggttgagg

SEQ ID NO: 1057855 - DNA, 25 bp, Homo sapien
agggggcagcgcctgcttggtgcca

SEQ ID NO: 1057856 - DNA, 25 bp, Homo sapien
aggcaccgaggagcctctggcgatc

SEQ ID NO: 1057857 - DNA, 25 bp, Homo sapien
tctggcgatcggctttcgataccct

SEQ ID NO: 1057858 - DNA, 25 bp, Homo sapien
gggactcgcacgaggcaccgaggag

SEQ ID NO: 1057859 - DNA, 25 bp, Homo sapien
aggtggggcgcggagctcggctctg

SEQ ID NO: 1057860 - DNA, 25 bp, Homo sapien
cgcggagctcggctctgcgccgcca

SEQ ID NO: 1057861 - DNA, 25 bp, Homo sapien
tggggcgcggagctcggctctgcgc

SEQ ID NO: 1057862 - DNA, 25 bp, Homo sapien
cgcctcccaggtggggcgcggagct

SEQ ID NO: 1057863 - DNA, 25 bp, Homo sapien
gtcgggccgtatccttgtcgaggct

SEQ ID NO: 1057864 - DNA, 25 bp, Homo sapien
ggttaagccccagcgacgctcctgg

SEQ ID NO: 1057865 - DNA, 25 bp, Homo sapien
acggcggttaagccccagcgacgct

SEQ ID NO: 1057866 - DNA, 25 bp, Homo sapien
ggcctggatgtcgggccgtatcctt

SEQ ID NO: 1057867 - DNA, 25 bp, Homo sapien
caatgtccgggacccgcggtcagag

SEQ ID NO: 1057868 - DNA, 25 bp, Homo sapien
cccacgagagttcttcgagggtggc

SEQ ID NO: 1057869 - DNA, 25 bp, Homo sapien
tctagctggcggctggccagatgcc

SEQ ID NO: 1057870 - DNA, 25 bp, Homo sapien
cttgggagctggacaggacgctctt

SEQ ID NO: 1057871 - DNA, 25 bp, Homo sapien
gccgccaggtcacccgcgctcctcc

SEQ ID NO: 1057872 - DNA, 25 bp, Homo sapien
tccctggctctgcgacccgaaccgc

SEQ ID NO: 1057873 - DNA, 25 bp, Homo sapien
ctggctctgcgacccgaaccgccgc

SEQ ID NO: 1057874 - DNA, 25 bp, Homo sapien
ccgccgccaggtcacccgcgctcct

SEQ ID NO: 1057875 - DNA, 25 bp, Homo sapien
gggtccagaggcactagctccatga

SEQ ID NO: 1057876 - DNA, 25 bp, Homo sapien
tccagaggcactagctccatgagcg

SEQ ID NO: 1057877 - DNA, 25 bp, Homo sapien
gaggcactagctccatgagcggcca

SEQ ID NO: 1057878 - DNA, 25 bp, Homo sapien
tccgggtccagaggcactagctcca

SEQ ID NO: 1057879 - DNA, 25 bp, Homo sapien
tgcacgcttagggactggagccaca

SEQ ID NO: 1057880 - DNA, 25 bp, Homo sapien
gccttctgcacgcttagggactgga

SEQ ID NO: 1057881 - DNA, 25 bp, Homo sapien
ttctgcacgcttagggactggagcc

SEQ ID NO: 1057882 - DNA, 25 bp, Homo sapien
tctgcacgcttagggactggagcca

SEQ ID NO: 1057883 - DNA, 25 bp, Homo sapien
agaggcaggacacttggtggctgcc

SEQ ID NO: 1057884 - DNA, 25 bp, Homo sapien
ctgagaggcaggacacttggtggct

SEQ ID NO: 1057885 - DNA, 25 bp, Homo sapien
cctgatctaagcctgtggtcctgag

SEQ ID NO: 1057886 - DNA, 25 bp, Homo sapien
tgtggtcctgagaggcaggacactt

SEQ ID NO: 1057887 - DNA, 25 bp, Homo sapien
taagaacagcgaggccctgttctcc

SEQ ID NO: 1057888 - DNA, 25 bp, Homo sapien
gtgagaacagcccaacctgcgccgt

SEQ ID NO: 1057889 - DNA, 25 bp, Homo sapien
caacctgcgccgtggctgccctgtg

SEQ ID NO: 1057890 - DNA, 25 bp, Homo sapien
ctgggctaagaacagcgaggccctg

SEQ ID NO: 1057891 - DNA, 25 bp, Homo sapien
aggcggctgtatcgcttacatgtca

SEQ ID NO: 1057892 - DNA, 25 bp, Homo sapien
tggtggtgcctgtacgtgcaggtca

SEQ ID NO: 1057893 - DNA, 25 bp, Homo sapien
aggtcaggcggctgtatcgcttaca

SEQ ID NO: 1057894 - DNA, 25 bp, Homo sapien
cctgtacgtgcaggtcaggcggctg

SEQ ID NO: 1057895 - DNA, 25 bp, Homo sapien
tggggtgctggcttcccactcagag

SEQ ID NO: 1057896 - DNA, 25 bp, Homo sapien
gcatagcaatccttgaaagaacaca

SEQ ID NO: 1057897 - DNA, 25 bp, Homo sapien
gccacttattctgcccttgggtctg

SEQ ID NO: 1057898 - DNA, 25 bp, Homo sapien
cctctggcctgactgctgcatagca

SEQ ID NO: 1057899 - DNA, 25 bp, Homo sapien
ctagaggtgtgggtttcttgagcag

SEQ ID NO: 1057900 - DNA, 25 bp, Homo sapien
ggtgtcattcttatggaacgccaaa

SEQ ID NO: 1057901 - DNA, 25 bp, Homo sapien
tctggcttgggtgtcattcttatgg

SEQ ID NO: 1057902 - DNA, 25 bp, Homo sapien
gtggcctggatgacttagggacccc

SEQ ID NO: 1057903 - DNA, 25 bp, Homo sapien
taacccaaagtcacgtggctgcaag

SEQ ID NO: 1057904 - DNA, 25 bp, Homo sapien
aagcatgctgcaggttaactcggga

SEQ ID NO: 1057905 - DNA, 25 bp, Homo sapien
cctgcgtgacccctagaaggttagt

SEQ ID NO: 1057906 - DNA, 25 bp, Homo sapien
agtaacatacctcaatggtggcggc

SEQ ID NO: 1057907 - DNA, 25 bp, Homo sapien
aaatgttctacaggcccctccatgc

SEQ ID NO: 1057908 - DNA, 25 bp, Homo sapien
ggcaagtaacctaccctatctgggc

SEQ ID NO: 1057909 - DNA, 25 bp, Homo sapien
gaggttcccaacagctaggaaggcc

SEQ ID NO: 1057910 - DNA, 25 bp, Homo sapien
taggaaggcctgctctagaacaggt

SEQ ID NO: 1057911 - DNA, 25 bp, Homo sapien
cttcttcccctgaggtctgtccatt

SEQ ID NO: 1057912 - DNA, 25 bp, Homo sapien
cagcttcttcccctgaggtctgtcc

SEQ ID NO: 1057913 - DNA, 25 bp, Homo sapien
ttggacggctgaagtccagcttctt

SEQ ID NO: 1057914 - DNA, 25 bp, Homo sapien
cttggacggctgaagtccagcttct

SEQ ID NO: 1057915 - DNA, 25 bp, Homo sapien
tcgctcagggtgctggccatggtcc

SEQ ID NO: 1057916 - DNA, 25 bp, Homo sapien
tccaaagccatgcaaacaggatccc

SEQ ID NO: 1057917 - DNA, 25 bp, Homo sapien
tggagccctcaacctcctccaaagc

SEQ ID NO: 1057918 - DNA, 25 bp, Homo sapien
cacagcccctcgctcagggtgctgg

SEQ ID NO: 1057919 - DNA, 25 bp, Homo sapien
ggccatgcacggcaatgaccatgtc

SEQ ID NO: 1057920 - DNA, 25 bp, Homo sapien
cactcagccctgaactcagatgcca

SEQ ID NO: 1057921 - DNA, 25 bp, Homo sapien
ttcttcctcggccatgcacggcaat

SEQ ID NO: 1057922 - DNA, 25 bp, Homo sapien
ggcaatgaccatgtctctggtccac

SEQ ID NO: 1057923 - DNA, 25 bp, Homo sapien
gggctcaagccggtgaccagagggc

SEQ ID NO: 1057924 - DNA, 25 bp, Homo sapien
ttctgggacagggaaccaagtctct

SEQ ID NO: 1057925 - DNA, 25 bp, Homo sapien
gggaaccaagtctctctcaaccctg

SEQ ID NO: 1057926 - DNA, 25 bp, Homo sapien
ggacagggaaccaagtctctctcaa

SEQ ID NO: 1057927 - DNA, 25 bp, Homo sapien
agcagggccacggcaccatggcagg

SEQ ID NO: 1057928 - DNA, 25 bp, Homo sapien
gggccacggcaccatggcaggagca

SEQ ID NO: 1057929 - DNA, 25 bp, Homo sapien
cagggccacggcaccatggcaggag

SEQ ID NO: 1057930 - DNA, 25 bp, Homo sapien
ggccacggcaccatggcaggagcag

SEQ ID NO: 1057931 - DNA, 25 bp, Homo sapien
tgggaagccaggggatcagggccca

SEQ ID NO: 1057932 - DNA, 25 bp, Homo sapien
acggggcggcttgggatcctgctcc

SEQ ID NO: 1057933 - DNA, 25 bp, Homo sapien
cgcagacggggcggcttgggatcct

SEQ ID NO: 1057934 - DNA, 25 bp, Homo sapien
agacggggcggcttgggatcctgct

SEQ ID NO: 1057935 - DNA, 25 bp, Homo sapien
gagtcccgctgggggccagagccag

SEQ ID NO: 1057936 - DNA, 25 bp, Homo sapien
ctggctgatcctgggccgctgcttc

SEQ ID NO: 1057937 - DNA, 25 bp, Homo sapien
gtctggctgatcctgggccgctgct

SEQ ID NO: 1057938 - DNA, 25 bp, Homo sapien
aggcagagaggtctggctgatcctg

SEQ ID NO: 1057939 - DNA, 25 bp, Homo sapien
gcgtgatggagatctccttgaggac

SEQ ID NO: 1057940 - DNA, 25 bp, Homo sapien
gatggagatctccttgaggacgccc

SEQ ID NO: 1057941 - DNA, 25 bp, Homo sapien
acgtggtgcgtgatggagatctcct

SEQ ID NO: 1057942 - DNA, 25 bp, Homo sapien
ggagatctccttgaggacgccctca

SEQ ID NO: 1057943 - DNA, 25 bp, Homo sapien
aaatgggatggatcagccttctcag

SEQ ID NO: 1057944 - DNA, 25 bp, Homo sapien
tctaacatgacgagtgttgccttca

SEQ ID NO: 1057945 - DNA, 25 bp, Homo sapien
gtgttgccttcacagctatgggctc

SEQ ID NO: 1057946 - DNA, 25 bp, Homo sapien
ctctaacatgacgagtgttgccttc

SEQ ID NO: 1057947 - DNA, 25 bp, Homo sapien
ttgccttcacagctatgggctcatg

SEQ ID NO: 1057948 - DNA, 25 bp, Homo sapien
tttcagcgttgccttcttcagcacc

SEQ ID NO: 1057949 - DNA, 25 bp, Homo sapien
tcaggccgggtgactttccgcacca

SEQ ID NO: 1057950 - DNA, 25 bp, Homo sapien
ccgggtgactttccgcaccaggaag

SEQ ID NO: 1057951 - DNA, 25 bp, Homo sapien
aggtgcccactgtcaggccgggtga

SEQ ID NO: 1057952 - DNA, 25 bp, Homo sapien
ctataggtgtgcataccagcatacc

SEQ ID NO: 1057953 - DNA, 25 bp, Homo sapien
tataggtgtgcataccagcataccc

SEQ ID NO: 1057954 - DNA, 25 bp, Homo sapien
actataggtgtgcataccagcatac

SEQ ID NO: 1057955 - DNA, 25 bp, Homo sapien
atcttggtccggacgcggtcacgta

SEQ ID NO: 1057956 - DNA, 25 bp, Homo sapien
tctctccatcttggtccggacgcgg

SEQ ID NO: 1057957 - DNA, 25 bp, Homo sapien
tacatcagccaggatgtctctctcc

SEQ ID NO: 1057958 - DNA, 25 bp, Homo sapien
caccacgaatgggtgatttacatca

SEQ ID NO: 1057959 - DNA, 25 bp, Homo sapien
aatgagatagagcttgccctcggtc

SEQ ID NO: 1057960 - DNA, 25 bp, Homo sapien
agtccagaatgagatagagcttgcc

SEQ ID NO: 1057961 - DNA, 25 bp, Homo sapien
cagaatgagatagagcttgccctcg

SEQ ID NO: 1057962 - DNA, 25 bp, Homo sapien
aggaagtccagaatgagatagagct

SEQ ID NO: 1057963 - DNA, 25 bp, Homo sapien
ttttcttttgaatcatgtatattac

SEQ ID NO: 1057964 - DNA, 25 bp, Homo sapien
tatagatgggaatagagggggctgg

SEQ ID NO: 1057965 - DNA, 25 bp, Homo sapien
gggaggaagacttcttcatgaatat

SEQ ID NO: 1057966 - DNA, 25 bp, Homo sapien
gaagacttcttcatgaatatttttc

SEQ ID NO: 1057967 - DNA, 25 bp, Homo sapien
cagctcagccaggtaaaacttcaca

SEQ ID NO: 1057968 - DNA, 25 bp, Homo sapien
gtaaatgatacccaggctgtgcagg

SEQ ID NO: 1057969 - DNA, 25 bp, Homo sapien
ggtctctgtaaatgatacccaggct

SEQ ID NO: 1057970 - DNA, 25 bp, Homo sapien
tctcaggcttgaggtctctgtaaat

SEQ ID NO: 1057971 - DNA, 25 bp, Homo sapien
gatttgaatacagggctgcctaaca

SEQ ID NO: 1057972 - DNA, 25 bp, Homo sapien
gcattagtgactgggcagctggcac

SEQ ID NO: 1057973 - DNA, 25 bp, Homo sapien
tacctgcatgcaaagtacctggccc

SEQ ID NO: 1057974 - DNA, 25 bp, Homo sapien
caggatggccctgtcctagaagagg

SEQ ID NO: 1057975 - DNA, 25 bp, Homo sapien
tgatgtggccctcctcatccagaag

SEQ ID NO: 1057976 - DNA, 25 bp, Homo sapien
gtggccctcctcatccagaaggatg

SEQ ID NO: 1057977 - DNA, 25 bp, Homo sapien
gatgtggccctcctcatccagaagg

SEQ ID NO: 1057978 - DNA, 25 bp, Homo sapien
tttgatgtggccctcctcatccaga

SEQ ID NO: 1057979 - DNA, 25 bp, Homo sapien
gtggccctggcggttgacgacctca

SEQ ID NO: 1057980 - DNA, 25 bp, Homo sapien
taggaccaccagtccgcactatggg

SEQ ID NO: 1057981 - DNA, 25 bp, Homo sapien
tgtcccgcagaaagaataggccttc

SEQ ID NO: 1057982 - DNA, 25 bp, Homo sapien
gggccatgtactccactgtcccgca

SEQ ID NO: 1057983 - DNA, 25 bp, Homo sapien
ggcagggagcccgtcagcatctcaa

SEQ ID NO: 1057984 - DNA, 25 bp, Homo sapien
agggcagggagcccgtcagcatctc

SEQ ID NO: 1057985 - DNA, 25 bp, Homo sapien
gcagggagcccgtcagcatctcaaa

SEQ ID NO: 1057986 - DNA, 25 bp, Homo sapien
gaagggcagggagcccgtcagcatc

SEQ ID NO: 1057987 - DNA, 25 bp, Homo sapien
tgtcatggtctccttccggtccttc

SEQ ID NO: 1057988 - DNA, 25 bp, Homo sapien
cagaatcagtgtcatggtctccttc

SEQ ID NO: 1057989 - DNA, 25 bp, Homo sapien
cagtgtcatggtctccttccggtcc

SEQ ID NO: 1057990 - DNA, 25 bp, Homo sapien
gaatcagtgtcatggtctccttccg

SEQ ID NO: 1057991 - DNA, 25 bp, Homo sapien
attccgcttgaacagggcccgcaag

SEQ ID NO: 1057992 - DNA, 25 bp, Homo sapien
cgagccggttggcaggattccgctt

SEQ ID NO: 1057993 - DNA, 25 bp, Homo sapien
ggttggcaggattccgcttgaacag

SEQ ID NO: 1057994 - DNA, 25 bp, Homo sapien
gaaactggggcatgcctagcttcgc

SEQ ID NO: 1057995 - DNA, 25 bp, Homo sapien
agccctgaagcaagcttgggatcat

SEQ ID NO: 1057996 - DNA, 25 bp, Homo sapien
aagcaagcttgggatcatcatctcc

SEQ ID NO: 1057997 - DNA, 25 bp, Homo sapien
tacatgccggcatgttcacacaacc

SEQ ID NO: 1057998 - DNA, 25 bp, Homo sapien
catcatctcccattgagacgaggaa

SEQ ID NO: 1057999 - DNA, 25 bp, Homo sapien
tggtggagtagaagacatgccgctt

SEQ ID NO: 1058000 - DNA, 25 bp, Homo sapien
gagtagaagacatgccgcttgattt

SEQ ID NO: 1058001 - DNA, 25 bp, Homo sapien
caatggtggagtagaagacatgccg

SEQ ID NO: 1058002 - DNA, 25 bp, Homo sapien
aagacatgccgcttgatttcctctg

SEQ ID NO: 1058003 - DNA, 25 bp, Homo sapien
ttgggtgtgcgggacgtgaactcgg

SEQ ID NO: 1058004 - DNA, 25 bp, Homo sapien
cgtgaactcggtgtcaaagtagaag

SEQ ID NO: 1058005 - DNA, 25 bp, Homo sapien
aaggtgtcatcaggctgagccactg

SEQ ID NO: 1058006 - DNA, 25 bp, Homo sapien
agggtggcttgatctcacgacggta

SEQ ID NO: 1058007 - DNA, 25 bp, Homo sapien
tgtgtttattagaccagcccagtcc

SEQ ID NO: 1058008 - DNA, 25 bp, Homo sapien
ccagtcctgtcgcatgaggaacaaa

SEQ ID NO: 1058009 - DNA, 25 bp, Homo sapien
ccgtctgccttcaggagtaagtcca

SEQ ID NO: 1058010 - DNA, 25 bp, Homo sapien
agtctggcaattgagggccctgtga

SEQ ID NO: 1058011 - DNA, 25 bp, Homo sapien
gggcacgaggcttgccgtcgtcttc

SEQ ID NO: 1058012 - DNA, 25 bp, Homo sapien
aacagctgatgggccccagcgctgg

SEQ ID NO: 1058013 - DNA, 25 bp, Homo sapien
taccaccgagtgcaggggtgcctgc

SEQ ID NO: 1058014 - DNA, 25 bp, Homo sapien
cacgaagctgaagccccggaacagc

SEQ ID NO: 1058015 - DNA, 25 bp, Homo sapien
ttaactctaataatcctcataacag

SEQ ID NO: 1058016 - DNA, 25 bp, Homo sapien
gcccagcccacatgaactttacatg

SEQ ID NO: 1058017 - DNA, 25 bp, Homo sapien
gatgggtctgtttaaattcctggcc

SEQ ID NO: 1058018 - DNA, 25 bp, Homo sapien
aggaagcttctatcatttcccccat

SEQ ID NO: 1058019 - DNA, 25 bp, Homo sapien
ttgacagcatactccatgttggtgg

SEQ ID NO: 1058020 - DNA, 25 bp, Homo sapien
gagtaggagcccacaccaattgtct

SEQ ID NO: 1058021 - DNA, 25 bp, Homo sapien
cttgtggacacagcgcttgcactca

SEQ ID NO: 1058022 - DNA, 25 bp, Homo sapien
aattgtctcctttaccacgtagccg

SEQ ID NO: 1058023 - DNA, 25 bp, Homo sapien
gaaggatcccgcttgctcttatcaa

SEQ ID NO: 1058024 - DNA, 25 bp, Homo sapien
tgaaggatcccgcttgctcttatca

SEQ ID NO: 1058025 - DNA, 25 bp, Homo sapien
tcttctgaaggatcccgcttgctct

SEQ ID NO: 1058026 - DNA, 25 bp, Homo sapien
aatctcttctgaaggatcccgcttg

SEQ ID NO: 1058027 - DNA, 25 bp, Homo sapien
tgagtgcagatactccacagttttg

SEQ ID NO: 1058028 - DNA, 25 bp, Homo sapien
tgtcaccaggtacacgtgtttgcca

SEQ ID NO: 1058029 - DNA, 25 bp, Homo sapien
ccacagttttgccaatggtgtgcag

SEQ ID NO: 1058030 - DNA, 25 bp, Homo sapien
tgagaagaacttctgccgcaggatc

SEQ ID NO: 1058031 - DNA, 25 bp, Homo sapien
ccccaggcttatagagaaggacagg

SEQ ID NO: 1058032 - DNA, 25 bp, Homo sapien
cactggagcaataggccgtgacctc

SEQ ID NO: 1058033 - DNA, 25 bp, Homo sapien
gataatagtattcaaccccaggctt

SEQ ID NO: 1058034 - DNA, 25 bp, Homo sapien
caggagagttgggattccagtcaca

SEQ ID NO: 1058035 - DNA, 25 bp, Homo sapien
tagcaaggtgtcatgaggagcccat

SEQ ID NO: 1058036 - DNA, 25 bp, Homo sapien
tctcagcccgcagctgtttggcaaa

SEQ ID NO: 1058037 - DNA, 25 bp, Homo sapien
aaaccaaagtcacagatgcgcaggc

SEQ ID NO: 1058038 - DNA, 25 bp, Homo sapien
catacaggatgttgctgggcttcag

SEQ ID NO: 1058039 - DNA, 25 bp, Homo sapien
caggctccagatgtcgcagccttca

SEQ ID NO: 1058040 - DNA, 25 bp, Homo sapien
ccagcatggtgtacagcagaatgcc

SEQ ID NO: 1058041 - DNA, 25 bp, Homo sapien
atggtgtacagcagaatgcccaggc

SEQ ID NO: 1058042 - DNA, 25 bp, Homo sapien
tcatcgtagccctggcgcttcagca

SEQ ID NO: 1058043 - DNA, 25 bp, Homo sapien
cccactgccgatccgggttaggatt

SEQ ID NO: 1058044 - DNA, 25 bp, Homo sapien
gttaggatttcctctggtgtgtcac

SEQ ID NO: 1058045 - DNA, 25 bp, Homo sapien
gtgtgtcactgggaccgttggcaaa

SEQ ID NO: 1058046 - DNA, 25 bp, Homo sapien
actgagggtaaacttcccactgccg

SEQ ID NO: 1058047 - DNA, 25 bp, Homo sapien
tcatcaaatgagtgccctgggcaag

SEQ ID NO: 1058048 - DNA, 25 bp, Homo sapien
aaaacttgccttctgcactcatcaa

SEQ ID NO: 1058049 - DNA, 25 bp, Homo sapien
tttgccttcaaaaagccatgtggga

SEQ ID NO: 1058050 - DNA, 25 bp, Homo sapien
acagccaaggttcctgtcgctgggc

SEQ ID NO: 1058051 - DNA, 25 bp, Homo sapien
aagcttgtctttctgggtgacccat

SEQ ID NO: 1058052 - DNA, 25 bp, Homo sapien
gtaggtcctggtgggacagctggct

SEQ ID NO: 1058053 - DNA, 25 bp, Homo sapien
gaacctgcttagctgtgaggcgctg

SEQ ID NO: 1058054 - DNA, 25 bp, Homo sapien
tggggatccacgtgtagcatcttgg

SEQ ID NO: 1058055 - DNA, 25 bp, Homo sapien
ctgggccaggatggatgactcgatg

SEQ ID NO: 1058056 - DNA, 25 bp, Homo sapien
cttggagctgttgagtgcggagtac

SEQ ID NO: 1058057 - DNA, 25 bp, Homo sapien
tgagtgcggagtacgtggcagccat

SEQ ID NO: 1058058 - DNA, 25 bp, Homo sapien
caggatggatgactcgatgggcttc

SEQ ID NO: 1058059 - DNA, 25 bp, Homo sapien
gggtggtggatggcaacttcctcac

SEQ ID NO: 1058060 - DNA, 25 bp, Homo sapien
agggtggtggatggcaacttcctca

SEQ ID NO: 1058061 - DNA, 25 bp, Homo sapien
aagcatgctgactgtgtcaagctag

SEQ ID NO: 1058062 - DNA, 25 bp, Homo sapien
gtgtcaagctagcaccgccctgtgg

SEQ ID NO: 1058063 - DNA, 25 bp, Homo sapien
tgctgactgtgtcaagctagcaccg

SEQ ID NO: 1058064 - DNA, 25 bp, Homo sapien
ctgactgtgtcaagctagcaccgcc

SEQ ID NO: 1058065 - DNA, 25 bp, Homo sapien
cagcaggacatgagacccctcctgt

SEQ ID NO: 1058066 - DNA, 25 bp, Homo sapien
cactggcagagccaaggtggatgct

SEQ ID NO: 1058067 - DNA, 25 bp, Homo sapien
agcagagcctgagccgagaagagtc

SEQ ID NO: 1058068 - DNA, 25 bp, Homo sapien
gctaaacagccagatgctctgagag

SEQ ID NO: 1058069 - DNA, 25 bp, Homo sapien
gccatggacagatgaaccctgagta

SEQ ID NO: 1058070 - DNA, 25 bp, Homo sapien
atggacagatgaaccctgagtaacc

SEQ ID NO: 1058071 - DNA, 25 bp, Homo sapien
aaggccatggacagatgaaccctga

SEQ ID NO: 1058072 - DNA, 25 bp, Homo sapien
aaaggccatggacagatgaaccctg

SEQ ID NO: 1058073 - DNA, 25 bp, Homo sapien
ctctaacctctttctcctgggagac

SEQ ID NO: 1058074 - DNA, 25 bp, Homo sapien
ctctttctcctgggagacaaaggca

SEQ ID NO: 1058075 - DNA, 25 bp, Homo sapien
tcctgggagacaaaggcacctttgg

SEQ ID NO: 1058076 - DNA, 25 bp, Homo sapien
cctgggagacaaaggcacctttggg

SEQ ID NO: 1058077 - DNA, 25 bp, Homo sapien
ggtgtttttgccaaggataaggcaa

SEQ ID NO: 1058078 - DNA, 25 bp, Homo sapien
ccaaggataaggcaacaagttccaa

SEQ ID NO: 1058079 - DNA, 25 bp, Homo sapien
tacgtagagcggaaaggatccagtg

SEQ ID NO: 1058080 - DNA, 25 bp, Homo sapien
ttacgtagagcggaaaggatccagt

SEQ ID NO: 1058081 - DNA, 25 bp, Homo sapien
ctcctggggtacttgtgttttagag

SEQ ID NO: 1058082 - DNA, 25 bp, Homo sapien
ccagctcaagtgttaaacgaagaag

SEQ ID NO: 1058083 - DNA, 25 bp, Homo sapien
tcatatcctaaatccagctcaagtg

SEQ ID NO: 1058084 - DNA, 25 bp, Homo sapien
tgttaaacgaagaaggattaagctg

SEQ ID NO: 1058085 - DNA, 25 bp, Homo sapien
cctgcgcgtgatggtcctggtgctg

SEQ ID NO: 1058086 - DNA, 25 bp, Homo sapien
ggtgctggttgctatctagttgctt

SEQ ID NO: 1058087 - DNA, 25 bp, Homo sapien
acaggtcctggcctgcgcgtgatgg

SEQ ID NO: 1058088 - DNA, 25 bp, Homo sapien
tctagttgcttcaactttaatgtga

SEQ ID NO: 1058089 - DNA, 25 bp, Homo sapien
tgacaacatcagtaatatcagcagc

SEQ ID NO: 1058090 - DNA, 25 bp, Homo sapien
atcagcagcatctgagagcaacgcc

SEQ ID NO: 1058091 - DNA, 25 bp, Homo sapien
ctctgacaacatcagtaatatcagc

SEQ ID NO: 1058092 - DNA, 25 bp, Homo sapien
cagcagcatctgagagcaacgccat

SEQ ID NO: 1058093 - DNA, 25 bp, Homo sapien
gcccatccccatcgtcatgaatgta

SEQ ID NO: 1058094 - DNA, 25 bp, Homo sapien
gatcctgcatcccaatcctgagaca

SEQ ID NO: 1058095 - DNA, 25 bp, Homo sapien
gggtgctgaggagcaccgtggccac

SEQ ID NO: 1058096 - DNA, 25 bp, Homo sapien
aatgccgcccatcacctcctgatcc

SEQ ID NO: 1058097 - DNA, 25 bp, Homo sapien
tggtagcagcagtaggactctggca

SEQ ID NO: 1058098 - DNA, 25 bp, Homo sapien
gtagcagcagtaggactctggcagc

SEQ ID NO: 1058099 - DNA, 25 bp, Homo sapien
ctggtagcagcagtaggactctggc

SEQ ID NO: 1058100 - DNA, 25 bp, Homo sapien
tcaagtttgaaaatatgtgttcaac

SEQ ID NO: 1058101 - DNA, 25 bp, Homo sapien
agcagaacagttacctgaagaaatt

SEQ ID NO: 1058102 - DNA, 25 bp, Homo sapien
gcattgactatgtagaccccttgtt

SEQ ID NO: 1058103 - DNA, 25 bp, Homo sapien
tagcagcgacacaaagcagaacagt

SEQ ID NO: 1058104 - DNA, 25 bp, Homo sapien
gaaaaatcagactgagttttggcac

SEQ ID NO: 1058105 - DNA, 25 bp, Homo sapien
cagactgagttttggcacttttcca

SEQ ID NO: 1058106 - DNA, 25 bp, Homo sapien
ggaaagctgccaggaaaaatcagac

SEQ ID NO: 1058107 - DNA, 25 bp, Homo sapien
caatgacaccaagggaaagctgcca

SEQ ID NO: 1058108 - DNA, 25 bp, Homo sapien
catggccacaggagcattatcttag

SEQ ID NO: 1058109 - DNA, 25 bp, Homo sapien
tactgcatcctacaccagaaaggca

SEQ ID NO: 1058110 - DNA, 25 bp, Homo sapien
ggcaatgtccctggtcactatgaat

SEQ ID NO: 1058111 - DNA, 25 bp, Homo sapien
tatcttagattatgcaggacccggg

SEQ ID NO: 1058112 - DNA, 25 bp, Homo sapien
gtggagtcaccaaagctgccttcgg

SEQ ID NO: 1058113 - DNA, 25 bp, Homo sapien
tgtcacttaaagtcagagggcagag

SEQ ID NO: 1058114 - DNA, 25 bp, Homo sapien
tgccttcggtctacttgcctttaaa

SEQ ID NO: 1058115 - DNA, 25 bp, Homo sapien
aaagaagtggagtcaccaaagctgc

SEQ ID NO: 1058116 - DNA, 25 bp, Homo sapien
cactcgcctgccctcattagccggt

SEQ ID NO: 1058117 - DNA, 25 bp, Homo sapien
tagccggtccttacaaggctctggg

SEQ ID NO: 1058118 - DNA, 25 bp, Homo sapien
tgttcagacgattcgtttcccactc

SEQ ID NO: 1058119 - DNA, 25 bp, Homo sapien
agacgattcgtttcccactcgcctg

SEQ ID NO: 1058120 - DNA, 25 bp, Homo sapien
tgcaagcccgaaagaatgactgatc

SEQ ID NO: 1058121 - DNA, 25 bp, Homo sapien
cctctttgcaagcccgaaagaatga

SEQ ID NO: 1058122 - DNA, 25 bp, Homo sapien
caagcccgaaagaatgactgatcat

SEQ ID NO: 1058123 - DNA, 25 bp, Homo sapien
ctttgcaagcccgaaagaatgactg

SEQ ID NO: 1058124 - DNA, 25 bp, Homo sapien
tcaaagccttctacggaccccgcta

SEQ ID NO: 1058125 - DNA, 25 bp, Homo sapien
tggccagagcctgagaccgcggccg

SEQ ID NO: 1058126 - DNA, 25 bp, Homo sapien
gcccggtccgttggctgctgcttag

SEQ ID NO: 1058127 - DNA, 25 bp, Homo sapien
tacagcacttttcgtcttcaaagcc

SEQ ID NO: 1058128 - DNA, 25 bp, Homo sapien
ccgcctggcaaacccggagtggaga

SEQ ID NO: 1058129 - DNA, 25 bp, Homo sapien
tgccattttacccagcgccgtcgcg

SEQ ID NO: 1058130 - DNA, 25 bp, Homo sapien
agtggagagcggagcgggcgcaggc

SEQ ID NO: 1058131 - DNA, 25 bp, Homo sapien
acacgaggctcagcactgccatttt

SEQ ID NO: 1058132 - DNA, 25 bp, Homo sapien
gctctgtaggctcgggacccggctc

SEQ ID NO: 1058133 - DNA, 25 bp, Homo sapien
ccccgctgtgactctccgctttctg

SEQ ID NO: 1058134 - DNA, 25 bp, Homo sapien
gctgctcccggctctgtaggctcgg

SEQ ID NO: 1058135 - DNA, 25 bp, Homo sapien
gcggtggaggctccgctccccaggg

SEQ ID NO: 1058136 - DNA, 25 bp, Homo sapien
gcggagagacccggccctgtcttcg

SEQ ID NO: 1058137 - DNA, 25 bp, Homo sapien
tgtctcgtccgcggagagacccggc

SEQ ID NO: 1058138 - DNA, 25 bp, Homo sapien
gatccccgctgtctcgtccgcggag

SEQ ID NO: 1058139 - DNA, 25 bp, Homo sapien
ggagagacccggccctgtcttcgtc

SEQ ID NO: 1058140 - DNA, 25 bp, Homo sapien
tcggctttcttcagctccgagggcg

SEQ ID NO: 1058141 - DNA, 25 bp, Homo sapien
ggcggctgccttcatttccccgcgc

SEQ ID NO: 1058142 - DNA, 25 bp, Homo sapien
cgcgttcccgttcgagttcttcagg

SEQ ID NO: 1058143 - DNA, 25 bp, Homo sapien
ggcggctccgtgaggttattgttca

SEQ ID NO: 1058144 - DNA, 25 bp, Homo sapien
ctgagtgaggaggcgcccccacccc

SEQ ID NO: 1058145 - DNA, 25 bp, Homo sapien
tgagtgaggaggcgcccccacccca

SEQ ID NO: 1058146 - DNA, 25 bp, Homo sapien
gtgaggaggcgcccccaccccatcg

SEQ ID NO: 1058147 - DNA, 25 bp, Homo sapien
gagtgaggaggcgcccccaccccat

SEQ ID NO: 1058148 - DNA, 25 bp, Homo sapien
gttgttggtggaagacggcggccgc

SEQ ID NO: 1058149 - DNA, 25 bp, Homo sapien
tgttgttggtggaagacggcggccg

SEQ ID NO: 1058150 - DNA, 25 bp, Homo sapien
atgttgttggtggaagacggcggcc

SEQ ID NO: 1058151 - DNA, 25 bp, Homo sapien
ctctcggggagctcagcgcgtaggc

SEQ ID NO: 1058152 - DNA, 25 bp, Homo sapien
tggggtagtaggagttgtactggtg

SEQ ID NO: 1058153 - DNA, 25 bp, Homo sapien
taggcgctgcggttggggtagtagg

SEQ ID NO: 1058154 - DNA, 25 bp, Homo sapien
aagccgtggtcgtgagagttctgct

SEQ ID NO: 1058155 - DNA, 25 bp, Homo sapien
cccgggccgagctgggcgacgtgag

SEQ ID NO: 1058156 - DNA, 25 bp, Homo sapien
tgggcgacgtgagcagttggttgag

SEQ ID NO: 1058157 - DNA, 25 bp, Homo sapien
atgtccgccgggcccttgccggcgc

SEQ ID NO: 1058158 - DNA, 25 bp, Homo sapien
ctgctgagcgaaggacgaagacgac

SEQ ID NO: 1058159 - DNA, 25 bp, Homo sapien
tggtggctcctttgttgggcccctc

SEQ ID NO: 1058160 - DNA, 25 bp, Homo sapien
tgctcccggggctcatgggcgcgtg

SEQ ID NO: 1058161 - DNA, 25 bp, Homo sapien
tgggcgcgtggtggctcctttgttg

SEQ ID NO: 1058162 - DNA, 25 bp, Homo sapien
tcccggggctcatgggcgcgtggtg

SEQ ID NO: 1058163 - DNA, 25 bp, Homo sapien
actgtctcttacacaactgaatgct

SEQ ID NO: 1058164 - DNA, 25 bp, Homo sapien
gcactgtctcttacacaactgaatg

SEQ ID NO: 1058165 - DNA, 25 bp, Homo sapien
gctgcactgtctcttacacaactga

SEQ ID NO: 1058166 - DNA, 25 bp, Homo sapien
tgcactgtctcttacacaactgaat

SEQ ID NO: 1058167 - DNA, 25 bp, Homo sapien
tcccaggaccacaggtccagattat

SEQ ID NO: 1058168 - DNA, 25 bp, Homo sapien
atcaaaatcccaggaccacaggtcc

SEQ ID NO: 1058169 - DNA, 25 bp, Homo sapien
aggaccacaggtccagattatcttc

SEQ ID NO: 1058170 - DNA, 25 bp, Homo sapien
atcttcatgccatattgccgaagaa

SEQ ID NO: 1058171 - DNA, 25 bp, Homo sapien
cctgatggtacgcaaagacacactg

SEQ ID NO: 1058172 - DNA, 25 bp, Homo sapien
ccacatgcccaactgaatattgctg

SEQ ID NO: 1058173 - DNA, 25 bp, Homo sapien
ttagaaaatttgtccccatgtgagg

SEQ ID NO: 1058174 - DNA, 25 bp, Homo sapien
caggactgggcaattaagtgaactt

SEQ ID NO: 1058175 - DNA, 25 bp, Homo sapien
cataatatctacgttgtatgaggta

SEQ ID NO: 1058176 - DNA, 25 bp, Homo sapien
tatcgccgcacagataagggaggac

SEQ ID NO: 1058177 - DNA, 25 bp, Homo sapien
ggtctggtactttcaggcacccact

SEQ ID NO: 1058178 - DNA, 25 bp, Homo sapien
caggagaatgtacgtattaatggtt

SEQ ID NO: 1058179 - DNA, 25 bp, Homo sapien
aaggcagcagtacaaccaggtgcaa

SEQ ID NO: 1058180 - DNA, 25 bp, Homo sapien
agattcttaattagcaggtctggga

SEQ ID NO: 1058181 - DNA, 25 bp, Homo sapien
tggtcaagacaatcaaccaggttga

SEQ ID NO: 1058182 - DNA, 25 bp, Homo sapien
tcagaccaacttcctgagggagtgg

SEQ ID NO: 1058183 - DNA, 25 bp, Homo sapien
acaaaaggctaaggacaagtcacct

SEQ ID NO: 1058184 - DNA, 25 bp, Homo sapien
tagacatctgctcaaatcagaaggg

SEQ ID NO: 1058185 - DNA, 25 bp, Homo sapien
gagcagggacataactcacacttat

SEQ ID NO: 1058186 - DNA, 25 bp, Homo sapien
ttttcctctctcacacggaggcctg

SEQ ID NO: 1058187 - DNA, 25 bp, Homo sapien
aaactatctagccataaagccaggg

SEQ ID NO: 1058188 - DNA, 25 bp, Homo sapien
aatgctgtcctattccaaaaaaggg

SEQ ID NO: 1058189 - DNA, 25 bp, Homo sapien
tcaagactaacttctgggaagccag

SEQ ID NO: 1058190 - DNA, 25 bp, Homo sapien
tcagtgactgttcaatgtgcaatgc

SEQ ID NO: 1058191 - DNA, 25 bp, Homo sapien
caattcgttctctgtacgtgtttgt

SEQ ID NO: 1058192 - DNA, 25 bp, Homo sapien
gggagatccaaacaattcgttctct

SEQ ID NO: 1058193 - DNA, 25 bp, Homo sapien
agactgctagaacccacctcccagg

SEQ ID NO: 1058194 - DNA, 25 bp, Homo sapien
caaacaattcgttctctgtacgtgt

SEQ ID NO: 1058195 - DNA, 25 bp, Homo sapien
gcctctggccactgaatatataacc

SEQ ID NO: 1058196 - DNA, 25 bp, Homo sapien
tgtgaaaacaccttgtaagctaaaa

SEQ ID NO: 1058197 - DNA, 25 bp, Homo sapien
gagcaatgagaccaacctagtaacc

SEQ ID NO: 1058198 - DNA, 25 bp, Homo sapien
tttaagtcaactgacccgcctcaga

SEQ ID NO: 1058199 - DNA, 25 bp, Homo sapien
cttgctgcggtcctgacggaggtcc

SEQ ID NO: 1058200 - DNA, 25 bp, Homo sapien
acggaggtccctgttgctgcgagta

SEQ ID NO: 1058201 - DNA, 25 bp, Homo sapien
gccctgggtacccatgtccttgctg

SEQ ID NO: 1058202 - DNA, 25 bp, Homo sapien
gtctgggacccgtatggctgccctg

SEQ ID NO: 1058203 - DNA, 25 bp, Homo sapien
tgtgtataagagaggccgcccatgg

SEQ ID NO: 1058204 - DNA, 25 bp, Homo sapien
cccggccctgcatggtcatcgggta

SEQ ID NO: 1058205 - DNA, 25 bp, Homo sapien
ccggccctgcatggtcatcgggtac

SEQ ID NO: 1058206 - DNA, 25 bp, Homo sapien
gccgcccatggcactctgcgcccgg

SEQ ID NO: 1058207 - DNA, 25 bp, Homo sapien
ggccctgttgaccatacccgctggg

SEQ ID NO: 1058208 - DNA, 25 bp, Homo sapien
tgaccatacccgctggggccttgtt

SEQ ID NO: 1058209 - DNA, 25 bp, Homo sapien
ctggccctgttgaccatacccgctg

SEQ ID NO: 1058210 - DNA, 25 bp, Homo sapien
tacccgctggggccttgttgtccat

SEQ ID NO: 1058211 - DNA, 25 bp, Homo sapien
gctgctgtgtcgtcgactgctggga

SEQ ID NO: 1058212 - DNA, 25 bp, Homo sapien
cgctgctgggaataggcagtttgct

SEQ ID NO: 1058213 - DNA, 25 bp, Homo sapien
cctgctgggagagcgtcgagggtgc

SEQ ID NO: 1058214 - DNA, 25 bp, Homo sapien
ctgctgctgatacgaaggttgggca

SEQ ID NO: 1058215 - DNA, 25 bp, Homo sapien
gacccaaatgaatcttgagatagct

SEQ ID NO: 1058216 - DNA, 25 bp, Homo sapien
ggatgcctgagacccaaatgaatct

SEQ ID NO: 1058217 - DNA, 25 bp, Homo sapien
cctgagacccaaatgaatcttgaga

SEQ ID NO: 1058218 - DNA, 25 bp, Homo sapien
gctgaggatgcctgagacccaaatg

SEQ ID NO: 1058219 - DNA, 25 bp, Homo sapien
cttgactgaaggctcaggttcatat

SEQ ID NO: 1058220 - DNA, 25 bp, Homo sapien
gatttagccacagaccacagatgat

SEQ ID NO: 1058221 - DNA, 25 bp, Homo sapien
caaggcatgtagcatctctggatac

SEQ ID NO: 1058222 - DNA, 25 bp, Homo sapien
tgaacaccaggtactaagggactct

SEQ ID NO: 1058223 - DNA, 25 bp, Homo sapien
tacagatctatcaaaaggtcaccag

SEQ ID NO: 1058224 - DNA, 25 bp, Homo sapien
ttcaaagaataaccactttttgatg

SEQ ID NO: 1058225 - DNA, 25 bp, Homo sapien
ctagcctgcgtaggcaaatctggca

SEQ ID NO: 1058226 - DNA, 25 bp, Homo sapien
gcctgcgtaggcaaatctggcatca

SEQ ID NO: 1058227 - DNA, 25 bp, Homo sapien
tcaaagaataaccactttttgatgc

SEQ ID NO: 1058228 - DNA, 25 bp, Homo sapien
cactataatggatgctgctcaggtt

SEQ ID NO: 1058229 - DNA, 25 bp, Homo sapien
taagcaagacagcaagtcagtcctc

SEQ ID NO: 1058230 - DNA, 25 bp, Homo sapien
gaatttactataggctgggcaccgt

SEQ ID NO: 1058231 - DNA, 25 bp, Homo sapien
tctggtaatacagtcaagctgctcc

SEQ ID NO: 1058232 - DNA, 25 bp, Homo sapien
gcaccatagagcagaggagctccca

SEQ ID NO: 1058233 - DNA, 25 bp, Homo sapien
ccgctgtggcttcctagtctagtaa

SEQ ID NO: 1058234 - DNA, 25 bp, Homo sapien
gccacagctacaggaagtctagttt

SEQ ID NO: 1058235 - DNA, 25 bp, Homo sapien
aacagtcagaagtttgtggcaagac

SEQ ID NO: 1058236 - DNA, 25 bp, Homo sapien
tgattgccccagttacctatctgca

SEQ ID NO: 1058237 - DNA, 25 bp, Homo sapien
tggcttaagctcagcaggatccctg

SEQ ID NO: 1058238 - DNA, 25 bp, Homo sapien
taagactctcccgttttcaaagcat

SEQ ID NO: 1058239 - DNA, 25 bp, Homo sapien
caggtggctatgcaaatgagacaga

SEQ ID NO: 1058240 - DNA, 25 bp, Homo sapien
tgaattgctcacacaggatggaggg

SEQ ID NO: 1058241 - DNA, 25 bp, Homo sapien
caaaataagtatcacctgggcttca

SEQ ID NO: 1058242 - DNA, 25 bp, Homo sapien
cataccagtcccgatagctctgtgt

SEQ ID NO: 1058243 - DNA, 25 bp, Homo sapien
gccagagaggataccaagtgtcttc

SEQ ID NO: 1058244 - DNA, 25 bp, Homo sapien
gggacaggttcgctgactctcaaga

SEQ ID NO: 1058245 - DNA, 25 bp, Homo sapien
gaaacactttcaggccatcgagtag

SEQ ID NO: 1058246 - DNA, 25 bp, Homo sapien
tcaaagctggccttaagggacaggt

SEQ ID NO: 1058247 - DNA, 25 bp, Homo sapien
gaaacagattctcaccttggcttaa

SEQ ID NO: 1058248 - DNA, 25 bp, Homo sapien
ggcactgctgaggtaaaaaggtggg

SEQ ID NO: 1058249 - DNA, 25 bp, Homo sapien
gtggtagcccctgcaaacagcggct

SEQ ID NO: 1058250 - DNA, 25 bp, Homo sapien
tgcaaacagcggctgggtcactgca

SEQ ID NO: 1058251 - DNA, 25 bp, Homo sapien
tgcattcctgtggtggtagcccctg

SEQ ID NO: 1058252 - DNA, 25 bp, Homo sapien
gattggttgcccagccctagtgagt

SEQ ID NO: 1058253 - DNA, 25 bp, Homo sapien
tagtgagtgccagcatgagtttgtc

SEQ ID NO: 1058254 - DNA, 25 bp, Homo sapien
gatcaaaagcgctggagcagatcca

SEQ ID NO: 1058255 - DNA, 25 bp, Homo sapien
gacgataaccgtcccagctgtgatt

SEQ ID NO: 1058256 - DNA, 25 bp, Homo sapien
caaggagagccactgtaagtagaaa

SEQ ID NO: 1058257 - DNA, 25 bp, Homo sapien
taagttataccatggacatctagcc

SEQ ID NO: 1058258 - DNA, 25 bp, Homo sapien
aagaagcactcgttaggccctacag

SEQ ID NO: 1058259 - DNA, 25 bp, Homo sapien
taaaagaggcagcaagatgacaagg

SEQ ID NO: 1058260 - DNA, 25 bp, Homo sapien
caggcgagagtggtcctgagcgaga

SEQ ID NO: 1058261 - DNA, 25 bp, Homo sapien
gaaatccctgatgtgctcactccag

SEQ ID NO: 1058262 - DNA, 25 bp, Homo sapien
gtcctgagcgagactgagcaacact

SEQ ID NO: 1058263 - DNA, 25 bp, Homo sapien
ccccatggggaggtcatctattgaa

SEQ ID NO: 1058264 - DNA, 25 bp, Homo sapien
tgcatgatgctgtccgactggccac

SEQ ID NO: 1058265 - DNA, 25 bp, Homo sapien
ggatgcatgatgctgtccgactggc

SEQ ID NO: 1058266 - DNA, 25 bp, Homo sapien
caatgcttgattggttcatggaagg

SEQ ID NO: 1058267 - DNA, 25 bp, Homo sapien
gattggttcatggaaggatgcatga

SEQ ID NO: 1058268 - DNA, 25 bp, Homo sapien
atctgggggttcctctgcatataac

SEQ ID NO: 1058269 - DNA, 25 bp, Homo sapien
ctggggggaactgtactggggcatc

SEQ ID NO: 1058270 - DNA, 25 bp, Homo sapien
ctgacgcggagataaggctgagccg

SEQ ID NO: 1058271 - DNA, 25 bp, Homo sapien
acgcggagataaggctgagccgggc

SEQ ID NO: 1058272 - DNA, 25 bp, Homo sapien
gcctgtgtgtatctgtcctccggaa

SEQ ID NO: 1058273 - DNA, 25 bp, Homo sapien
cctgtgtgtatctgtcctccggaag

SEQ ID NO: 1058274 - DNA, 25 bp, Homo sapien
ctgtgtgtatctgtcctccggaagg

SEQ ID NO: 1058275 - DNA, 25 bp, Homo sapien
tgtgggccatactgacccccctggg

SEQ ID NO: 1058276 - DNA, 25 bp, Homo sapien
atagctccccatggagttctgctgg

SEQ ID NO: 1058277 - DNA, 25 bp, Homo sapien
gggaccatagctccccatggagttc

SEQ ID NO: 1058278 - DNA, 25 bp, Homo sapien
ctccccatggagttctgctggtagg

SEQ ID NO: 1058279 - DNA, 25 bp, Homo sapien
actcctaactgggtagtatactgac

SEQ ID NO: 1058280 - DNA, 25 bp, Homo sapien
cactggggtagttggcattgggcaa

SEQ ID NO: 1058281 - DNA, 25 bp, Homo sapien
aggcattatagtttggctgcctggg

SEQ ID NO: 1058282 - DNA, 25 bp, Homo sapien
tggggtttatgcctccagccatgcc

SEQ ID NO: 1058283 - DNA, 25 bp, Homo sapien
tatagtttggctgcctggggtagcc

SEQ ID NO: 1058284 - DNA, 25 bp, Homo sapien
ggagtgtgccataaggtgggatgcc

SEQ ID NO: 1058285 - DNA, 25 bp, Homo sapien
gggagtgtgccataaggtgggatgc

SEQ ID NO: 1058286 - DNA, 25 bp, Homo sapien
agtgtgccataaggtgggatgccag

SEQ ID NO: 1058287 - DNA, 25 bp, Homo sapien
gagtgtgccataaggtgggatgcca

SEQ ID NO: 1058288 - DNA, 25 bp, Homo sapien
gttttggatagagttggcagcaaca

SEQ ID NO: 1058289 - DNA, 25 bp, Homo sapien
tgttagggccataaggccggttgcc

SEQ ID NO: 1058290 - DNA, 25 bp, Homo sapien
catgcatggcgacagcagtttcttg

SEQ ID NO: 1058291 - DNA, 25 bp, Homo sapien
ccggttgcccatggaggcgtgactc

SEQ ID NO: 1058292 - DNA, 25 bp, Homo sapien
caagctctagatagcaaacaatagt

SEQ ID NO: 1058293 - DNA, 25 bp, Homo sapien
tatcttctacctcccacgaaagata

SEQ ID NO: 1058294 - DNA, 25 bp, Homo sapien
gatactaagagagttcaagctctag

SEQ ID NO: 1058295 - DNA, 25 bp, Homo sapien
gagcccggccaacacccagattttc

SEQ ID NO: 1058296 - DNA, 25 bp, Homo sapien
cctgagggttgatcatgccagccat

SEQ ID NO: 1058297 - DNA, 25 bp, Homo sapien
tattaatcccttgtccataaggagg

SEQ ID NO: 1058298 - DNA, 25 bp, Homo sapien
catggttccacccatggaatatggg

SEQ ID NO: 1058299 - DNA, 25 bp, Homo sapien
tcatgcccccttgattcatattggg

SEQ ID NO: 1058300 - DNA, 25 bp, Homo sapien
agtttagctgtgatgtgactcttga

SEQ ID NO: 1058301 - DNA, 25 bp, Homo sapien
tgtgatgtgactcttgaagaaatcc

SEQ ID NO: 1058302 - DNA, 25 bp, Homo sapien
tttagctgtgatgtgactcttgaag

SEQ ID NO: 1058303 - DNA, 25 bp, Homo sapien
tagctgtgatgtgactcttgaagaa

SEQ ID NO: 1058304 - DNA, 25 bp, Homo sapien
tggctggagttaactttacatcccc

SEQ ID NO: 1058305 - DNA, 25 bp, Homo sapien
gctggagttaactttacatccccaa

SEQ ID NO: 1058306 - DNA, 25 bp, Homo sapien
tcattttggtggctggagttaactt

SEQ ID NO: 1058307 - DNA, 25 bp, Homo sapien
tttggtggctggagttaactttaca

SEQ ID NO: 1058308 - DNA, 25 bp, Homo sapien
gtgaaggccagataacggtccaccc

SEQ ID NO: 1058309 - DNA, 25 bp, Homo sapien
cacagacacatagaggcgatagagg

SEQ ID NO: 1058310 - DNA, 25 bp, Homo sapien
gtccagaggtttcctacccacagca

SEQ ID NO: 1058311 - DNA, 25 bp, Homo sapien
cagcaggcagatttgtcatgcccat

SEQ ID NO: 1058312 - DNA, 25 bp, Homo sapien
actgtcctgatggtccgggtgttca

SEQ ID NO: 1058313 - DNA, 25 bp, Homo sapien
attgacaaataaccacaggtccctt

SEQ ID NO: 1058314 - DNA, 25 bp, Homo sapien
tcgagtgtagtgacgccatttcggc

SEQ ID NO: 1058315 - DNA, 25 bp, Homo sapien
tgataatatcagtgaccaccctgct

SEQ ID NO: 1058316 - DNA, 25 bp, Homo sapien
caatcttgcattcaaaggcatagag

SEQ ID NO: 1058317 - DNA, 25 bp, Homo sapien
ggcagcactgcttgatgtgcccaca

SEQ ID NO: 1058318 - DNA, 25 bp, Homo sapien
gagacactggatatactgctttttc

SEQ ID NO: 1058319 - DNA, 25 bp, Homo sapien
tgaggttggttgcaagttcccgcca

SEQ ID NO: 1058320 - DNA, 25 bp, Homo sapien
tggcaatggggggatctgactgtgt

SEQ ID NO: 1058321 - DNA, 25 bp, Homo sapien
tggtggctttaagtctcctccttct

SEQ ID NO: 1058322 - DNA, 25 bp, Homo sapien
gggcccctgcatagatcctgatccc

SEQ ID NO: 1058323 - DNA, 25 bp, Homo sapien
ttggtggctttaagtctcctccttc

SEQ ID NO: 1058324 - DNA, 25 bp, Homo sapien
ggcatcctggatcccaactgaattg

SEQ ID NO: 1058325 - DNA, 25 bp, Homo sapien
cctcatgctgccataaggatcctta

SEQ ID NO: 1058326 - DNA, 25 bp, Homo sapien
tatttggctcataggacatgcgccc

SEQ ID NO: 1058327 - DNA, 25 bp, Homo sapien
ggagtcacttccatcattaaaggca

SEQ ID NO: 1058328 - DNA, 25 bp, Homo sapien
tgtcgtggtcccatcgccacatttc

SEQ ID NO: 1058329 - DNA, 25 bp, Homo sapien
gcagcacgactgtaggggtcaccca

SEQ ID NO: 1058330 - DNA, 25 bp, Homo sapien
gacctccatagggatagtgctgtcg

SEQ ID NO: 1058331 - DNA, 25 bp, Homo sapien
ctgtcataaggacctccatagggat

SEQ ID NO: 1058332 - DNA, 25 bp, Homo sapien
ggaaggcatgagattcggctgtggg

SEQ ID NO: 1058333 - DNA, 25 bp, Homo sapien
gggttggaaggcatgagattcggct

SEQ ID NO: 1058334 - DNA, 25 bp, Homo sapien
gttggaaggcatgagattcggctgt

SEQ ID NO: 1058335 - DNA, 25 bp, Homo sapien
ttggaaggcatgagattcggctgtg

SEQ ID NO: 1058336 - DNA, 25 bp, Homo sapien
ctgctgcggggggtagcggctagga

SEQ ID NO: 1058337 - DNA, 25 bp, Homo sapien
ctgcggggggtagcggctaggagaa

SEQ ID NO: 1058338 - DNA, 25 bp, Homo sapien
gcggggggtagcggctaggagaata

SEQ ID NO: 1058339 - DNA, 25 bp, Homo sapien
tgctgcggggggtagcggctaggag

SEQ ID NO: 1058340 - DNA, 25 bp, Homo sapien
tggagaactgattgccataggaatc

SEQ ID NO: 1058341 - DNA, 25 bp, Homo sapien
gatacattgtagtctgctggctggg

SEQ ID NO: 1058342 - DNA, 25 bp, Homo sapien
gccttgggtggagaactgattgcca

SEQ ID NO: 1058343 - DNA, 25 bp, Homo sapien
gttgatacattgtagtctgctggct

SEQ ID NO: 1058344 - DNA, 25 bp, Homo sapien
catttcatctgttcggttcacgcca

SEQ ID NO: 1058345 - DNA, 25 bp, Homo sapien
ccagtgctgtatggcacgctgtaca

SEQ ID NO: 1058346 - DNA, 25 bp, Homo sapien
tataggtcatgtcattacgcccctg

SEQ ID NO: 1058347 - DNA, 25 bp, Homo sapien
cggtctcggccaaactggaatggaa

SEQ ID NO: 1058348 - DNA, 25 bp, Homo sapien
caggtgctatgtgcgaggcaggtac

SEQ ID NO: 1058349 - DNA, 25 bp, Homo sapien
agagtgcaggaatggagacttgcta

SEQ ID NO: 1058350 - DNA, 25 bp, Homo sapien
tgggaaggtgatatcccgccgaatc

SEQ ID NO: 1058351 - DNA, 25 bp, Homo sapien
aatgtctttcattgtgagccgcctc

SEQ ID NO: 1058352 - DNA, 25 bp, Homo sapien
tgccaggagaccagacttgagggac

SEQ ID NO: 1058353 - DNA, 25 bp, Homo sapien
aggagaccagacttgagggacatca

SEQ ID NO: 1058354 - DNA, 25 bp, Homo sapien
ctgccaggagaccagacttgaggga

SEQ ID NO: 1058355 - DNA, 25 bp, Homo sapien
ccaggagaccagacttgagggacat

SEQ ID NO: 1058356 - DNA, 25 bp, Homo sapien
catgatgctgttgtcatcatacagc

SEQ ID NO: 1058357 - DNA, 25 bp, Homo sapien
tgtcatcatacagcaggatgttgat

SEQ ID NO: 1058358 - DNA, 25 bp, Homo sapien
tgaaggtcatgatgctgttgtcatc

SEQ ID NO: 1058359 - DNA, 25 bp, Homo sapien
tgttgtcatcatacagcaggatgtt

SEQ ID NO: 1058360 - DNA, 25 bp, Homo sapien
catgggagctggactagacaccttg

SEQ ID NO: 1058361 - DNA, 25 bp, Homo sapien
tatggagataggtccaactgccccg

SEQ ID NO: 1058362 - DNA, 25 bp, Homo sapien
cgaatggtattggacacacagacgc

SEQ ID NO: 1058363 - DNA, 25 bp, Homo sapien
tgctatacaacttctccaggcggct

SEQ ID NO: 1058364 - DNA, 25 bp, Homo sapien
ctggaactgtgtggcggcaaggctg

SEQ ID NO: 1058365 - DNA, 25 bp, Homo sapien
caggaggttgccgatactgcccttc

SEQ ID NO: 1058366 - DNA, 25 bp, Homo sapien
ggttgccgatactgcccttctgcac

SEQ ID NO: 1058367 - DNA, 25 bp, Homo sapien
agcccaggaggttgccgatactgcc

SEQ ID NO: 1058368 - DNA, 25 bp, Homo sapien
gagatgtccaacagccgtgattcgt

SEQ ID NO: 1058369 - DNA, 25 bp, Homo sapien
gtaaactctgagtggttctcgtcca

SEQ ID NO: 1058370 - DNA, 25 bp, Homo sapien
ccgcatcatgtccacactagttggc

SEQ ID NO: 1058371 - DNA, 25 bp, Homo sapien
ccgtgattcgtacagagtaaactct

SEQ ID NO: 1058372 - DNA, 25 bp, Homo sapien
atgactggccaatcaaaaacagtac

SEQ ID NO: 1058373 - DNA, 25 bp, Homo sapien
ctggccaatcaaaaacagtacatca

SEQ ID NO: 1058374 - DNA, 25 bp, Homo sapien
cagtacatcacaaatgacttgtgaa

SEQ ID NO: 1058375 - DNA, 25 bp, Homo sapien
ccaatgagttcatcaacggtgatac

SEQ ID NO: 1058376 - DNA, 25 bp, Homo sapien
tatatacacacgtggcagcgtagcc

SEQ ID NO: 1058377 - DNA, 25 bp, Homo sapien
cctgtacagcatcgcaccaagaggg

SEQ ID NO: 1058378 - DNA, 25 bp, Homo sapien
tacagtacagtacatgaaagggtct

SEQ ID NO: 1058379 - DNA, 25 bp, Homo sapien
aagggtctacactctactgcacagg

SEQ ID NO: 1058380 - DNA, 25 bp, Homo sapien
tcctaggaacgcatcttggttgaca

SEQ ID NO: 1058381 - DNA, 25 bp, Homo sapien
tccttggagtcaggtggaacttgct

SEQ ID NO: 1058382 - DNA, 25 bp, Homo sapien
tgggagccacatactgacttcacag

SEQ ID NO: 1058383 - DNA, 25 bp, Homo sapien
aacggagctcgaggcctagaacaaa

SEQ ID NO: 1058384 - DNA, 25 bp, Homo sapien
gacacctgaagagttctctcgcact

SEQ ID NO: 1058385 - DNA, 25 bp, Homo sapien
ccttcaaatagtgagcggaggctgc

SEQ ID NO: 1058386 - DNA, 25 bp, Homo sapien
ctcttgtagtcggaggctgacccgc

SEQ ID NO: 1058387 - DNA, 25 bp, Homo sapien
cacaatagatgtcctctgaatagcc

SEQ ID NO: 1058388 - DNA, 25 bp, Homo sapien
ccccgcctccctgcgcggcggccat

SEQ ID NO: 1058389 - DNA, 25 bp, Homo sapien
gcagccccgcctccctgcgcggcgg

SEQ ID NO: 1058390 - DNA, 25 bp, Homo sapien
ctgcccggacttggagcagccccgc

SEQ ID NO: 1058391 - DNA, 25 bp, Homo sapien
agccccgcctccctgcgcggcggcc

SEQ ID NO: 1058392 - DNA, 25 bp, Homo sapien
tggctccgccgacggcgtccccgcc

SEQ ID NO: 1058393 - DNA, 25 bp, Homo sapien
tcccaagctggcgcggggtcctcag

SEQ ID NO: 1058394 - DNA, 25 bp, Homo sapien
aagctggcgcggggtcctcagcccc

SEQ ID NO: 1058395 - DNA, 25 bp, Homo sapien
gctcccaagctggcgcggggtcctc

SEQ ID NO: 1058396 - DNA, 25 bp, Homo sapien
agggctcccaagctggcgcggggtc

SEQ ID NO: 1058397 - DNA, 25 bp, Homo sapien
ttgacagcttccctcccgccagaac

SEQ ID NO: 1058398 - DNA, 25 bp, Homo sapien
cggcgcccgaggctgctatggcgga

SEQ ID NO: 1058399 - DNA, 25 bp, Homo sapien
atttctaccggcttccatttgacag

SEQ ID NO: 1058400 - DNA, 25 bp, Homo sapien
gctccccgcttctccgggcgtctgt

SEQ ID NO: 1058401 - DNA, 25 bp, Homo sapien
accaggccacagggccggaagcaga

SEQ ID NO: 1058402 - DNA, 25 bp, Homo sapien
gccggaagcagacgagggcgggagg

SEQ ID NO: 1058403 - DNA, 25 bp, Homo sapien
ggaccactcccgagggagcctgcag

SEQ ID NO: 1058404 - DNA, 25 bp, Homo sapien
gaccactcccgagggagcctgcaga

SEQ ID NO: 1058405 - DNA, 25 bp, Homo sapien
tctgggtactaatcatccacgctca

SEQ ID NO: 1058406 - DNA, 25 bp, Homo sapien
agccgtgtccgcaacccgtttctgg

SEQ ID NO: 1058407 - DNA, 25 bp, Homo sapien
ttctggccggctccttttggacaca

SEQ ID NO: 1058408 - DNA, 25 bp, Homo sapien
tccttttggacacagtcccttctgg

SEQ ID NO: 1058409 - DNA, 25 bp, Homo sapien
tccgagccaggattatgacccaggt

SEQ ID NO: 1058410 - DNA, 25 bp, Homo sapien
tctgggacatcctgttgaacggcag

SEQ ID NO: 1058411 - DNA, 25 bp, Homo sapien
ttcccgtgagataaataggctccag

SEQ ID NO: 1058412 - DNA, 25 bp, Homo sapien
gtcaagtgacgtacccagggctact

SEQ ID NO: 1058413 - DNA, 25 bp, Homo sapien
cactttgcttacaggtaaaccaagt

SEQ ID NO: 1058414 - DNA, 25 bp, Homo sapien
tttcctctctcgagtcaagctctag

SEQ ID NO: 1058415 - DNA, 25 bp, Homo sapien
aaacaaagctagtcaattctccctc

SEQ ID NO: 1058416 - DNA, 25 bp, Homo sapien
tagcctcagcgactacagatgtgtg

SEQ ID NO: 1058417 - DNA, 25 bp, Homo sapien
cttcccacgcgcatgcagaagagaa

SEQ ID NO: 1058418 - DNA, 25 bp, Homo sapien
gctgggatcagaaaagcacctaacc

SEQ ID NO: 1058419 - DNA, 25 bp, Homo sapien
tccttggcttcccacgcgcatgcag

SEQ ID NO: 1058420 - DNA, 25 bp, Homo sapien
agctgggatcagaaaagcacctaac

SEQ ID NO: 1058421 - DNA, 25 bp, Homo sapien
tataaacaatcgcaaagccactccg

SEQ ID NO: 1058422 - DNA, 25 bp, Homo sapien
gactaccagggatggagaaaactgt

SEQ ID NO: 1058423 - DNA, 25 bp, Homo sapien
cagaccaaagtgtgaagttctactc

SEQ ID NO: 1058424 - DNA, 25 bp, Homo sapien
ggcagggaatgcaccttaaggcatc

SEQ ID NO: 1058425 - DNA, 25 bp, Homo sapien
tgttgctaccaggattgagctccct

SEQ ID NO: 1058426 - DNA, 25 bp, Homo sapien
caggggtgttgctaccaggattgag

SEQ ID NO: 1058427 - DNA, 25 bp, Homo sapien
gggtgttgctaccaggattgagctc

SEQ ID NO: 1058428 - DNA, 25 bp, Homo sapien
gttgctaccaggattgagctccctc

SEQ ID NO: 1058429 - DNA, 25 bp, Homo sapien
cctcagcacctccttccgggatggg

SEQ ID NO: 1058430 - DNA, 25 bp, Homo sapien
ctcagcacctccttccgggatgggt

SEQ ID NO: 1058431 - DNA, 25 bp, Homo sapien
aacctcagcacctccttccgggatg

SEQ ID NO: 1058432 - DNA, 25 bp, Homo sapien
acctcagcacctccttccgggatgg

SEQ ID NO: 1058433 - DNA, 25 bp, Homo sapien
taactaatctcgaaacccagcagag

SEQ ID NO: 1058434 - DNA, 25 bp, Homo sapien
gataaacagccctagcctgcaggtg

SEQ ID NO: 1058435 - DNA, 25 bp, Homo sapien
tccacaaagggaccagttatgagcc

SEQ ID NO: 1058436 - DNA, 25 bp, Homo sapien
caaacaggataggagtgacagtcac

SEQ ID NO: 1058437 - DNA, 25 bp, Homo sapien
cataggtaggctgaagaatgtgatg

SEQ ID NO: 1058438 - DNA, 25 bp, Homo sapien
tgatgggcgcatatggaaggtctct

SEQ ID NO: 1058439 - DNA, 25 bp, Homo sapien
cacaaaggtgcagacataggtaggc

SEQ ID NO: 1058440 - DNA, 25 bp, Homo sapien
ggtctcttctaatgccttctattgt

SEQ ID NO: 1058441 - DNA, 25 bp, Homo sapien
aggcttctgcatggtgatctgggat

SEQ ID NO: 1058442 - DNA, 25 bp, Homo sapien
catggtgatctgggatgatggcatt

SEQ ID NO: 1058443 - DNA, 25 bp, Homo sapien
aaggcttctgcatggtgatctggga

SEQ ID NO: 1058444 - DNA, 25 bp, Homo sapien
atctgggatgatggcattgaagagg

SEQ ID NO: 1058445 - DNA, 25 bp, Homo sapien
cccagtgagacaggccgcccagaag

SEQ ID NO: 1058446 - DNA, 25 bp, Homo sapien
agaagtgttcagcatcccagtgaga

SEQ ID NO: 1058447 - DNA, 25 bp, Homo sapien
cagtgagacaggccgcccagaagac

SEQ ID NO: 1058448 - DNA, 25 bp, Homo sapien
atcccagtgagacaggccgcccaga

SEQ ID NO: 1058449 - DNA, 25 bp, Homo sapien
gcaggcaactgcgtagactcagtaa

SEQ ID NO: 1058450 - DNA, 25 bp, Homo sapien
caggtcatgaagtgcaactgcagcc

SEQ ID NO: 1058451 - DNA, 25 bp, Homo sapien
cccgtaagggtctcaacagttcagt

SEQ ID NO: 1058452 - DNA, 25 bp, Homo sapien
caagaaattgagtgatgctaccgaa

SEQ ID NO: 1058453 - DNA, 25 bp, Homo sapien
caggagggcaaacaaagcttctgag

SEQ ID NO: 1058454 - DNA, 25 bp, Homo sapien
gctgccccatggcactgaatgtcag

SEQ ID NO: 1058455 - DNA, 25 bp, Homo sapien
ggcaaagaggagtacactagtccag

SEQ ID NO: 1058456 - DNA, 25 bp, Homo sapien
agcgtaccccagtggcaaaggcaaa

SEQ ID NO: 1058457 - DNA, 25 bp, Homo sapien
taaagagctgtctcagaggattcag

SEQ ID NO: 1058458 - DNA, 25 bp, Homo sapien
tgtgaacaccgacagaaacagagag

SEQ ID NO: 1058459 - DNA, 25 bp, Homo sapien
cagagaggccatcagcttaaagagc

SEQ ID NO: 1058460 - DNA, 25 bp, Homo sapien
aaaaagccttggcattgagaatgca

SEQ ID NO: 1058461 - DNA, 25 bp, Homo sapien
aaaattgggcacctgcttgagctca

SEQ ID NO: 1058462 - DNA, 25 bp, Homo sapien
cagtatagccactggtgcagccagt

SEQ ID NO: 1058463 - DNA, 25 bp, Homo sapien
tccaagatcgggcttctctagggtc

SEQ ID NO: 1058464 - DNA, 25 bp, Homo sapien
tgcagcccaagtgtaaggcagagcc

SEQ ID NO: 1058465 - DNA, 25 bp, Homo sapien
gccaaggggttttgcctgtattcac

SEQ ID NO: 1058466 - DNA, 25 bp, Homo sapien
tatggatcactcaaacgggagatgt

SEQ ID NO: 1058467 - DNA, 25 bp, Homo sapien
gaataaattcagtatggatcactca

SEQ ID NO: 1058468 - DNA, 25 bp, Homo sapien
aaacgggagatgttagctgccttcc

SEQ ID NO: 1058469 - DNA, 25 bp, Homo sapien
gaggtggttcccttatcccatggga

SEQ ID NO: 1058470 - DNA, 25 bp, Homo sapien
agggcctggactctaaactctgtga

SEQ ID NO: 1058471 - DNA, 25 bp, Homo sapien
tctactgctgggtgaactatggtcc

SEQ ID NO: 1058472 - DNA, 25 bp, Homo sapien
ctgactcaaattggaccagcccggg

SEQ ID NO: 1058473 - DNA, 25 bp, Homo sapien
agtggaggagcccaaaaacctggtg

SEQ ID NO: 1058474 - DNA, 25 bp, Homo sapien
tggaggagcccaaaaacctggtgag

SEQ ID NO: 1058475 - DNA, 25 bp, Homo sapien
gaggagcccaaaaacctggtgagaa

SEQ ID NO: 1058476 - DNA, 25 bp, Homo sapien
ggaggagcccaaaaacctggtgaga

SEQ ID NO: 1058477 - DNA, 25 bp, Homo sapien
ggctcttgatcctgaagcaagtgag

SEQ ID NO: 1058478 - DNA, 25 bp, Homo sapien
gcggctcttgatcctgaagcaagtg

SEQ ID NO: 1058479 - DNA, 25 bp, Homo sapien
tcaacagcggctcttgatcctgaag

SEQ ID NO: 1058480 - DNA, 25 bp, Homo sapien
acagcggctcttgatcctgaagcaa

SEQ ID NO: 1058481 - DNA, 25 bp, Homo sapien
catgtccaaggcaggaagttgcaat

SEQ ID NO: 1058482 - DNA, 25 bp, Homo sapien
gagccagtaagtcaggaagtagcct

SEQ ID NO: 1058483 - DNA, 25 bp, Homo sapien
caatgtaggagtagtcccaggagcc

SEQ ID NO: 1058484 - DNA, 25 bp, Homo sapien
gaagtagcctagaatgtatcgtgtg

SEQ ID NO: 1058485 - DNA, 25 bp, Homo sapien
tgtctaaaatttgccctagccagga

SEQ ID NO: 1058486 - DNA, 25 bp, Homo sapien
gacacagtaatgatcccagggcagc

SEQ ID NO: 1058487 - DNA, 25 bp, Homo sapien
tgttcaggcctataccatcttgtgt

SEQ ID NO: 1058488 - DNA, 25 bp, Homo sapien
tgtggactgttaccagcctgtcagc

SEQ ID NO: 1058489 - DNA, 25 bp, Homo sapien
aaatacatgcacaaatcataaaaaa

SEQ ID NO: 1058490 - DNA, 25 bp, Homo sapien
tttaccaattcctgccgccgtgttg

SEQ ID NO: 1058491 - DNA, 25 bp, Homo sapien
ctgacccatgtctactgatcaagta

SEQ ID NO: 1058492 - DNA, 25 bp, Homo sapien
ccgtgttggcgcctctgacccatgt

SEQ ID NO: 1058493 - DNA, 25 bp, Homo sapien
gtctactgatcaagtaagcaggcat

SEQ ID NO: 1058494 - DNA, 25 bp, Homo sapien
ggcgatggatgggaaatgcttattg

SEQ ID NO: 1058495 - DNA, 25 bp, Homo sapien
ggctcagccaggagcttcccttcag

SEQ ID NO: 1058496 - DNA, 25 bp, Homo sapien
ggctgaccagaagctccaacagagg

SEQ ID NO: 1058497 - DNA, 25 bp, Homo sapien
ttcccttcagctggcaagttgagct

SEQ ID NO: 1058498 - DNA, 25 bp, Homo sapien
caagaagggcacttggtgtcttggc

SEQ ID NO: 1058499 - DNA, 25 bp, Homo sapien
aagaagggcacttggtgtcttggca

SEQ ID NO: 1058500 - DNA, 25 bp, Homo sapien
ccaagaagggcacttggtgtcttgg

SEQ ID NO: 1058501 - DNA, 25 bp, Homo sapien
gccaagaagggcacttggtgtcttg

SEQ ID NO: 1058502 - DNA, 25 bp, Homo sapien
cccaacacttcctgcacgcaaggtg

SEQ ID NO: 1058503 - DNA, 25 bp, Homo sapien
aagagctgaaacaggaccccaacac

SEQ ID NO: 1058504 - DNA, 25 bp, Homo sapien
taaagagctgaaacaggaccccaac

SEQ ID NO: 1058505 - DNA, 25 bp, Homo sapien
cctgcacgcaaggtggaagtctctg

SEQ ID NO: 1058506 - DNA, 25 bp, Homo sapien
gccacagcatgctatggatcacatt

SEQ ID NO: 1058507 - DNA, 25 bp, Homo sapien
tcacaaataaccacaggcgatgatt

SEQ ID NO: 1058508 - DNA, 25 bp, Homo sapien
gggccactcctagtaccaatttctg

SEQ ID NO: 1058509 - DNA, 25 bp, Homo sapien
gatgcaactggaagaatcggtccca

SEQ ID NO: 1058510 - DNA, 25 bp, Homo sapien
tatctcagtattgatcatcacagga

SEQ ID NO: 1058511 - DNA, 25 bp, Homo sapien
aggtgctatctcagtattgatcatc

SEQ ID NO: 1058512 - DNA, 25 bp, Homo sapien
tgagtacccgggactactttcattc

SEQ ID NO: 1058513 - DNA, 25 bp, Homo sapien
tcagaatagtgcagtatagctcaga

SEQ ID NO: 1058514 - DNA, 25 bp, Homo sapien
tggtgggaggtttgcctgagtccag

SEQ ID NO: 1058515 - DNA, 25 bp, Homo sapien
ggtttgcctgagtccaggaagtcaa

SEQ ID NO: 1058516 - DNA, 25 bp, Homo sapien
gctgtggtgggaggtttgcctgagt

SEQ ID NO: 1058517 - DNA, 25 bp, Homo sapien
gaggtttgcctgagtccaggaagtc

SEQ ID NO: 1058518 - DNA, 25 bp, Homo sapien
gtagcacataatgtagaggggtcat

SEQ ID NO: 1058519 - DNA, 25 bp, Homo sapien
ctaggtagcacataatgtagagggg

SEQ ID NO: 1058520 - DNA, 25 bp, Homo sapien
aggtagcacataatgtagaggggtc

SEQ ID NO: 1058521 - DNA, 25 bp, Homo sapien
ggtagcacataatgtagaggggtca

SEQ ID NO: 1058522 - DNA, 25 bp, Homo sapien
tggcctcgttcaccaagttctgtgt

SEQ ID NO: 1058523 - DNA, 25 bp, Homo sapien
agagtgcccactggaggtgtgtggc

SEQ ID NO: 1058524 - DNA, 25 bp, Homo sapien
gtgtggcacaccctctggcctcgtt

SEQ ID NO: 1058525 - DNA, 25 bp, Homo sapien
gaggtgtgtggcacaccctctggcc

SEQ ID NO: 1058526 - DNA, 25 bp, Homo sapien
actccgggaccgggccgagcagcgg

SEQ ID NO: 1058527 - DNA, 25 bp, Homo sapien
ggccactccgggaccgggccgagca

SEQ ID NO: 1058528 - DNA, 25 bp, Homo sapien
ccgggaccgggccgagcagcggagg

SEQ ID NO: 1058529 - DNA, 25 bp, Homo sapien
gccactccgggaccgggccgagcag

SEQ ID NO: 1058530 - DNA, 25 bp, Homo sapien
gggctgatctgctggtactcgcagt

SEQ ID NO: 1058531 - DNA, 25 bp, Homo sapien
tctgctggtactcgcagtccttcat

SEQ ID NO: 1058532 - DNA, 25 bp, Homo sapien
ccccggggctgatctgctggtactc

SEQ ID NO: 1058533 - DNA, 25 bp, Homo sapien
tgatctgctggtactcgcagtcctt

SEQ ID NO: 1058534 - DNA, 25 bp, Homo sapien
gccgcagtagaagcgattgcgaccc

SEQ ID NO: 1058535 - DNA, 25 bp, Homo sapien
agaagcgattgcgacccgggaacac

SEQ ID NO: 1058536 - DNA, 25 bp, Homo sapien
cggccgccgcagtagaagcgattgc

SEQ ID NO: 1058537 - DNA, 25 bp, Homo sapien
agtagaagcgattgcgacccgggaa

SEQ ID NO: 1058538 - DNA, 25 bp, Homo sapien
agcgtgagcgcgaagacgccgccgt

SEQ ID NO: 1058539 - DNA, 25 bp, Homo sapien
tgagcgcgaagacgccgccgtggcc

SEQ ID NO: 1058540 - DNA, 25 bp, Homo sapien
gcgtgagcgcgaagacgccgccgtg

SEQ ID NO: 1058541 - DNA, 25 bp, Homo sapien
gaagacgccgccgtggccggccagc

SEQ ID NO: 1058542 - DNA, 25 bp, Homo sapien
cagggcggctgcttcacagacagtg

SEQ ID NO: 1058543 - DNA, 25 bp, Homo sapien
cagcaggcagctcatgacgaagaag

SEQ ID NO: 1058544 - DNA, 25 bp, Homo sapien
cagcttgcgagccaggtagggacag

SEQ ID NO: 1058545 - DNA, 25 bp, Homo sapien
ccagggtcggtgaagcttgtctgca

SEQ ID NO: 1058546 - DNA, 25 bp, Homo sapien
gggtcaagtcataccttcataggat

SEQ ID NO: 1058547 - DNA, 25 bp, Homo sapien
tgccatgaccctccaggatgcagaa

SEQ ID NO: 1058548 - DNA, 25 bp, Homo sapien
gacattgctcctgaccaactgttca

SEQ ID NO: 1058549 - DNA, 25 bp, Homo sapien
tagagatgggtcaagtcataccttc

SEQ ID NO: 1058550 - DNA, 25 bp, Homo sapien
cgggtatgacggcgtgtgactatag

SEQ ID NO: 1058551 - DNA, 25 bp, Homo sapien
aattagggaacaattggccaggtgt

SEQ ID NO: 1058552 - DNA, 25 bp, Homo sapien
gccgggtatgacggcgtgtgactat

SEQ ID NO: 1058553 - DNA, 25 bp, Homo sapien
gcatgagccaggatcactccattgc

SEQ ID NO: 1058554 - DNA, 25 bp, Homo sapien
gcagtgtgaggttcggggtggccgg

SEQ ID NO: 1058555 - DNA, 25 bp, Homo sapien
tgatcagcacctcccgggtccgagg

SEQ ID NO: 1058556 - DNA, 25 bp, Homo sapien
gtggccggtatgtagaactgcctgt

SEQ ID NO: 1058557 - DNA, 25 bp, Homo sapien
accatctgcccgttgatcagcacct

SEQ ID NO: 1058558 - DNA, 25 bp, Homo sapien
gcaacgtcaggtgggtgaccacaca

SEQ ID NO: 1058559 - DNA, 25 bp, Homo sapien
agagggagagaataaacgcgtagaa

SEQ ID NO: 1058560 - DNA, 25 bp, Homo sapien
aagaagcgatagttccgtctcccca

SEQ ID NO: 1058561 - DNA, 25 bp, Homo sapien
cacaggcgaagatgaaggccgtcag

SEQ ID NO: 1058562 - DNA, 25 bp, Homo sapien
tctccttcagagtggagaggaagtt

SEQ ID NO: 1058563 - DNA, 25 bp, Homo sapien
cttcagagtggagaggaagttgctt

SEQ ID NO: 1058564 - DNA, 25 bp, Homo sapien
tccttcagagtggagaggaagttgc

SEQ ID NO: 1058565 - DNA, 25 bp, Homo sapien
gagaggaagttgcttccctgagcgc

SEQ ID NO: 1058566 - DNA, 25 bp, Homo sapien
ggagggtggggagcctcccagccac

SEQ ID NO: 1058567 - DNA, 25 bp, Homo sapien
cttcaatgggtggagggtggggagc

SEQ ID NO: 1058568 - DNA, 25 bp, Homo sapien
agggtggggagcctcccagccacac

SEQ ID NO: 1058569 - DNA, 25 bp, Homo sapien
gtggagggtggggagcctcccagcc

SEQ ID NO: 1058570 - DNA, 25 bp, Homo sapien
gcccagaatggaccagatggagaag

SEQ ID NO: 1058571 - DNA, 25 bp, Homo sapien
aggcccagaatggaccagatggaga

SEQ ID NO: 1058572 - DNA, 25 bp, Homo sapien
ggcccagaatggaccagatggagaa

SEQ ID NO: 1058573 - DNA, 25 bp, Homo sapien
tggaggcgacgaggtacgtgtgaaa

SEQ ID NO: 1058574 - DNA, 25 bp, Homo sapien
gaggcgacgaggtacgtgtgaaacc

SEQ ID NO: 1058575 - DNA, 25 bp, Homo sapien
cattagtagtcaggttggaggcgac

SEQ ID NO: 1058576 - DNA, 25 bp, Homo sapien
cttcattagtagtcaggttggaggc

SEQ ID NO: 1058577 - DNA, 25 bp, Homo sapien
gcacagcagttggtgataatacttt

SEQ ID NO: 1058578 - DNA, 25 bp, Homo sapien
gacagaggcctcaccgcccctcttg

SEQ ID NO: 1058579 - DNA, 25 bp, Homo sapien
tgtaggggttgacagaggcctcacc

SEQ ID NO: 1058580 - DNA, 25 bp, Homo sapien
tcttgctggaccacgagcctttgat

SEQ ID NO: 1058581 - DNA, 25 bp, Homo sapien
ttcaaacatggctgaaacagtcatg

SEQ ID NO: 1058582 - DNA, 25 bp, Homo sapien
gaacactttgatcactggccaggca

SEQ ID NO: 1058583 - DNA, 25 bp, Homo sapien
ggaggtcggctgatatccaggaaca

SEQ ID NO: 1058584 - DNA, 25 bp, Homo sapien
gtcacatgacaaatgccctccaggg

SEQ ID NO: 1058585 - DNA, 25 bp, Homo sapien
tctgcaggctggctcatcgcttctg

SEQ ID NO: 1058586 - DNA, 25 bp, Homo sapien
agggcaacacggtgtcggactgcac

SEQ ID NO: 1058587 - DNA, 25 bp, Homo sapien
acggtgtcggactgcacaaatcccc

SEQ ID NO: 1058588 - DNA, 25 bp, Homo sapien
gctggcatcaggcttggctctgcag

SEQ ID NO: 1058589 - DNA, 25 bp, Homo sapien
gagccagccacattcatacagggca

SEQ ID NO: 1058590 - DNA, 25 bp, Homo sapien
cagggttttctcgtgaccagtgcac

SEQ ID NO: 1058591 - DNA, 25 bp, Homo sapien
ggctgggatcccttaaagagctctc

SEQ ID NO: 1058592 - DNA, 25 bp, Homo sapien
agttcagggaaagccacgcaggatg

SEQ ID NO: 1058593 - DNA, 25 bp, Homo sapien
gtggcagagtccccagacactggct

SEQ ID NO: 1058594 - DNA, 25 bp, Homo sapien
ggcagagtccccagacactggctgt

SEQ ID NO: 1058595 - DNA, 25 bp, Homo sapien
gggctgggggtagagtggcagagtc

SEQ ID NO: 1058596 - DNA, 25 bp, Homo sapien
agagtggcagagtccccagacactg

SEQ ID NO: 1058597 - DNA, 25 bp, Homo sapien
atcctctgagtttccggcccagact

SEQ ID NO: 1058598 - DNA, 25 bp, Homo sapien
gtcccatattcagagctcagaggag

SEQ ID NO: 1058599 - DNA, 25 bp, Homo sapien
tggaggtccccgtttggcagaaaca

SEQ ID NO: 1058600 - DNA, 25 bp, Homo sapien
tgtggcttgtaggatggcagccgct

SEQ ID NO: 1058601 - DNA, 25 bp, Homo sapien
ggctctcaaactggaatctactgtc

SEQ ID NO: 1058602 - DNA, 25 bp, Homo sapien
cactcattggggatcggagtggaaa

SEQ ID NO: 1058603 - DNA, 25 bp, Homo sapien
ggaatctactgtctcaaacattttc

SEQ ID NO: 1058604 - DNA, 25 bp, Homo sapien
tggtagccagggaagctccggctct

SEQ ID NO: 1058605 - DNA, 25 bp, Homo sapien
ctgcaaagaggcctgttagctcccc

SEQ ID NO: 1058606 - DNA, 25 bp, Homo sapien
aagaggcctgttagctcccctcagg

SEQ ID NO: 1058607 - DNA, 25 bp, Homo sapien
cagctaaccctctgcaaagaggcct

SEQ ID NO: 1058608 - DNA, 25 bp, Homo sapien
caaagaggcctgttagctcccctca

SEQ ID NO: 1058609 - DNA, 25 bp, Homo sapien
taagagtgttagtgaccggtggccc

SEQ ID NO: 1058610 - DNA, 25 bp, Homo sapien
atccccggcaggacagcaaagaagg

SEQ ID NO: 1058611 - DNA, 25 bp, Homo sapien
ggagagctgctctgcgagaagctac

SEQ ID NO: 1058612 - DNA, 25 bp, Homo sapien
gcttttagccttgccctatatcccg

SEQ ID NO: 1058613 - DNA, 25 bp, Homo sapien
cagagagcagcggtcctcaggaggt

SEQ ID NO: 1058614 - DNA, 25 bp, Homo sapien
gagagcagcggtcctcaggaggtcc

SEQ ID NO: 1058615 - DNA, 25 bp, Homo sapien
tgggccacaggttaggcaggtggag

SEQ ID NO: 1058616 - DNA, 25 bp, Homo sapien
ggcagagagcagcggtcctcaggag

SEQ ID NO: 1058617 - DNA, 25 bp, Homo sapien
tagcttggtccctcagtgcctagag

SEQ ID NO: 1058618 - DNA, 25 bp, Homo sapien
ggtacaggatagcagacaagcagcc

SEQ ID NO: 1058619 - DNA, 25 bp, Homo sapien
gacaggccgtgggaacagtatcaag

SEQ ID NO: 1058620 - DNA, 25 bp, Homo sapien
caaacttgttcagcagcgtcatcca

SEQ ID NO: 1058621 - DNA, 25 bp, Homo sapien
tgctgcctgggaccaatgccggact

SEQ ID NO: 1058622 - DNA, 25 bp, Homo sapien
gaccaatgccggactctgtgtctct

SEQ ID NO: 1058623 - DNA, 25 bp, Homo sapien
cctgggaccaatgccggactctgtg

SEQ ID NO: 1058624 - DNA, 25 bp, Homo sapien
cgggcggcgggctaactgctgcctg

SEQ ID NO: 1058625 - DNA, 25 bp, Homo sapien
ttcttataggctactgagagcaggt

SEQ ID NO: 1058626 - DNA, 25 bp, Homo sapien
tggccgcccaccacgttcttatagg

SEQ ID NO: 1058627 - DNA, 25 bp, Homo sapien
agcaggtttcgctcttcgcaggaga

SEQ ID NO: 1058628 - DNA, 25 bp, Homo sapien
tgaaggctgccatgtcctcatagcg

SEQ ID NO: 1058629 - DNA, 25 bp, Homo sapien
ccagcacggtgtcgcacacgccctg

SEQ ID NO: 1058630 - DNA, 25 bp, Homo sapien
agcacggtgtcgcacacgccctgga

SEQ ID NO: 1058631 - DNA, 25 bp, Homo sapien
acggtgtcgcacacgccctggagct

SEQ ID NO: 1058632 - DNA, 25 bp, Homo sapien
caggcccagcacggtgtcgcacacg

SEQ ID NO: 1058633 - DNA, 25 bp, Homo sapien
gtgctgtctttgtaggagtcctcgc

SEQ ID NO: 1058634 - DNA, 25 bp, Homo sapien
tgaccgggctgagtcaatgatgcgc

SEQ ID NO: 1058635 - DNA, 25 bp, Homo sapien
tcagccatggcctcgtcgaaagtgg

SEQ ID NO: 1058636 - DNA, 25 bp, Homo sapien
gatgcgcttcttgtcgtcaccggtg

SEQ ID NO: 1058637 - DNA, 25 bp, Homo sapien
ctccacggagccctttggagcaaga

SEQ ID NO: 1058638 - DNA, 25 bp, Homo sapien
catgaccagtggttaggtgcgctca

SEQ ID NO: 1058639 - DNA, 25 bp, Homo sapien
cccatactagtcctctcggcagggt

SEQ ID NO: 1058640 - DNA, 25 bp, Homo sapien
caaggcgggacactcctcaattcct

SEQ ID NO: 1058641 - DNA, 25 bp, Homo sapien
cagcagacatgctttccctcaatct

SEQ ID NO: 1058642 - DNA, 25 bp, Homo sapien
tcggtcttgcactggcgcgcgcgca

SEQ ID NO: 1058643 - DNA, 25 bp, Homo sapien
tcaatctcggtcttgcactggcgcg

SEQ ID NO: 1058644 - DNA, 25 bp, Homo sapien
gctttccctcaatctcggtcttgca

SEQ ID NO: 1058645 - DNA, 25 bp, Homo sapien
aggttccggcgtgttgctggctgca

SEQ ID NO: 1058646 - DNA, 25 bp, Homo sapien
agcgggctcggtaggcacagctccc

SEQ ID NO: 1058647 - DNA, 25 bp, Homo sapien
cctcctgtgattgggcggtattggc

SEQ ID NO: 1058648 - DNA, 25 bp, Homo sapien
gagcaaggcggctgcaggttccggc

SEQ ID NO: 1058649 - DNA, 25 bp, Homo sapien
catcaggcctgctaaagatgtggaa

SEQ ID NO: 1058650 - DNA, 25 bp, Homo sapien
caggcctgctaaagatgtggaaacc

SEQ ID NO: 1058651 - DNA, 25 bp, Homo sapien
gcatcaggcctgctaaagatgtgga

SEQ ID NO: 1058652 - DNA, 25 bp, Homo sapien
tcaggcctgctaaagatgtggaaac

SEQ ID NO: 1058653 - DNA, 25 bp, Homo sapien
tagcaaaatgctcacccgctggtgg

SEQ ID NO: 1058654 - DNA, 25 bp, Homo sapien
cagtctgcctggattagcaaaatgc

SEQ ID NO: 1058655 - DNA, 25 bp, Homo sapien
tataggaagtatggtcccattagga

SEQ ID NO: 1058656 - DNA, 25 bp, Homo sapien
gctgagaatataggaagtatggtcc

SEQ ID NO: 1058657 - DNA, 25 bp, Homo sapien
aaaacgaaaatgagtcacccagaat

SEQ ID NO: 1058658 - DNA, 25 bp, Homo sapien
tctatggggtcatctgtttaagaga

SEQ ID NO: 1058659 - DNA, 25 bp, Homo sapien
aatcccataacggaaactttctatg

SEQ ID NO: 1058660 - DNA, 25 bp, Homo sapien
cacccagaatcccataacggaaact

SEQ ID NO: 1058661 - DNA, 25 bp, Homo sapien
actactgacctcatgatttacccgc

SEQ ID NO: 1058662 - DNA, 25 bp, Homo sapien
acaggcgcctaccacatgcccggct

SEQ ID NO: 1058663 - DNA, 25 bp, Homo sapien
gaactactgacctcatgatttaccc

SEQ ID NO: 1058664 - DNA, 25 bp, Homo sapien
ttgaactactgacctcatgatttac

SEQ ID NO: 1058665 - DNA, 25 bp, Homo sapien
tggcaccccaacctaattttttgca

SEQ ID NO: 1058666 - DNA, 25 bp, Homo sapien
gctggatgcagttcatatatttttc

SEQ ID NO: 1058667 - DNA, 25 bp, Homo sapien
tcaaccagtaggtggcaccccaacc

SEQ ID NO: 1058668 - DNA, 25 bp, Homo sapien
ttcaaccagtaggtggcaccccaac

SEQ ID NO: 1058669 - DNA, 25 bp, Homo sapien
ttttgcccaaatgcagctaacgtaa

SEQ ID NO: 1058670 - DNA, 25 bp, Homo sapien
gcagctaacgtaagtgttctaagaa

SEQ ID NO: 1058671 - DNA, 25 bp, Homo sapien
gtaggcgaaactaagctatgatgtg

SEQ ID NO: 1058672 - DNA, 25 bp, Homo sapien
cgaaactaagctatgatgtgtggta

SEQ ID NO: 1058673 - DNA, 25 bp, Homo sapien
tttgagacggaccgtcaatcttgtt

SEQ ID NO: 1058674 - DNA, 25 bp, Homo sapien
gagtaagtgggataataggcgcccg

SEQ ID NO: 1058675 - DNA, 25 bp, Homo sapien
cgagtaagtgggataataggcgccc

SEQ ID NO: 1058676 - DNA, 25 bp, Homo sapien
ggtaggtgtccatcaggtcacagag

SEQ ID NO: 1058677 - DNA, 25 bp, Homo sapien
cagaaaagtccaggccctctaggct

SEQ ID NO: 1058678 - DNA, 25 bp, Homo sapien
cagaggccatgcgtgaagcaggaca

SEQ ID NO: 1058679 - DNA, 25 bp, Homo sapien
gatgtttctcgagccatatgtggga

SEQ ID NO: 1058680 - DNA, 25 bp, Homo sapien
gcatgagtgagttcctgcgcgcgct

SEQ ID NO: 1058681 - DNA, 25 bp, Homo sapien
gctggccgccaacgaggtatacgta

SEQ ID NO: 1058682 - DNA, 25 bp, Homo sapien
gaagaccacgtactgcctgggcatg

SEQ ID NO: 1058683 - DNA, 25 bp, Homo sapien
tgcatggagtacctggaagccaacc

SEQ ID NO: 1058684 - DNA, 25 bp, Homo sapien
gatcatgtgacaatccaagatggcg

SEQ ID NO: 1058685 - DNA, 25 bp, Homo sapien
ttttagccagttccgagaagagcgc

SEQ ID NO: 1058686 - DNA, 25 bp, Homo sapien
attttcacaatctcgcaacgcaggg

SEQ ID NO: 1058687 - DNA, 25 bp, Homo sapien
tagtgagcggtatcccctccgtgtt

SEQ ID NO: 1058688 - DNA, 25 bp, Homo sapien
tcttttgcgaagtatcttcggccca

SEQ ID NO: 1058689 - DNA, 25 bp, Homo sapien
cgatttgtgggagttcatcaacaca

SEQ ID NO: 1058690 - DNA, 25 bp, Homo sapien
ttgagattaggtgtgcaatatccac

SEQ ID NO: 1058691 - DNA, 25 bp, Homo sapien
tcattgtaaattggacctgcgtgtt

SEQ ID NO: 1058692 - DNA, 25 bp, Homo sapien
gaggagatgtgcgctggctcaagct

SEQ ID NO: 1058693 - DNA, 25 bp, Homo sapien
gatgtgcgctggctcaagctgaggg

SEQ ID NO: 1058694 - DNA, 25 bp, Homo sapien
gagatgtgcgctggctcaagctgag

SEQ ID NO: 1058695 - DNA, 25 bp, Homo sapien
aggaggagatgtgcgctggctcaag

SEQ ID NO: 1058696 - DNA, 25 bp, Homo sapien
gaaagcccaatcacagccaatcagg

SEQ ID NO: 1058697 - DNA, 25 bp, Homo sapien
gtagtttgagatcattcacttcccc

SEQ ID NO: 1058698 - DNA, 25 bp, Homo sapien
ccactcccgaattgaaacagacaag

SEQ ID NO: 1058699 - DNA, 25 bp, Homo sapien
aagcagcccactcccgaattgaaac

SEQ ID NO: 1058700 - DNA, 25 bp, Homo sapien
gtgagagcagatccctaaccatgag

SEQ ID NO: 1058701 - DNA, 25 bp, Homo sapien
gaatataaatagcacccacagcgca

SEQ ID NO: 1058702 - DNA, 25 bp, Homo sapien
gtccagctatgtgcacctcatcgca

SEQ ID NO: 1058703 - DNA, 25 bp, Homo sapien
gatgttctggccaagacagtggcct

SEQ ID NO: 1058704 - DNA, 25 bp, Homo sapien
cgggcccaacgactctagtcgtccg

SEQ ID NO: 1058705 - DNA, 25 bp, Homo sapien
tagtcgtccgccttccgcagcggag

SEQ ID NO: 1058706 - DNA, 25 bp, Homo sapien
cggagctctgcactctagtcccgcg

SEQ ID NO: 1058707 - DNA, 25 bp, Homo sapien
gctctctacgctcctgcgggtcgcg

SEQ ID NO: 1058708 - DNA, 25 bp, Homo sapien
acatgccgtcgaaccgctcctcctc

SEQ ID NO: 1058709 - DNA, 25 bp, Homo sapien
ctcgtgctgctgagccatggccagc

SEQ ID NO: 1058710 - DNA, 25 bp, Homo sapien
catggccagcaacatgccgtcgaac

SEQ ID NO: 1058711 - DNA, 25 bp, Homo sapien
gccgccctcgtgctgctgagccatg

SEQ ID NO: 1058712 - DNA, 25 bp, Homo sapien
gaaactaatcgtgaacacaggcctc

SEQ ID NO: 1058713 - DNA, 25 bp, Homo sapien
tactctctggaaaccggtattcgca

SEQ ID NO: 1058714 - DNA, 25 bp, Homo sapien
taacaagaccacgtgctaacatcag

SEQ ID NO: 1058715 - DNA, 25 bp, Homo sapien
taagggatgctccttggaagccgcc

SEQ ID NO: 1058716 - DNA, 25 bp, Homo sapien
ttcttctcctccaatgaaaaagtct

SEQ ID NO: 1058717 - DNA, 25 bp, Homo sapien
cttcttctcctccaatgaaaaagtc

SEQ ID NO: 1058718 - DNA, 25 bp, Homo sapien
gcatgactgctagaacatacgatag

SEQ ID NO: 1058719 - DNA, 25 bp, Homo sapien
gcagagcccacggatacaaaggatc

SEQ ID NO: 1058720 - DNA, 25 bp, Homo sapien
taaggcagaataacatcccagagta

SEQ ID NO: 1058721 - DNA, 25 bp, Homo sapien
ggtacatccatgtagcaatggacag

SEQ ID NO: 1058722 - DNA, 25 bp, Homo sapien
gactggatgtggatctctggtaata

SEQ ID NO: 1058723 - DNA, 25 bp, Homo sapien
gaatcatgatcgcactactggacac

SEQ ID NO: 1058724 - DNA, 25 bp, Homo sapien
accgcctgagcctagtggtcatggc

SEQ ID NO: 1058725 - DNA, 25 bp, Homo sapien
aaccctgactggatgtggatctctg

SEQ ID NO: 1058726 - DNA, 25 bp, Homo sapien
tttattagcgtctggcatttcttct

SEQ ID NO: 1058727 - DNA, 25 bp, Homo sapien
gttttattagcgtctggcatttctt

SEQ ID NO: 1058728 - DNA, 25 bp, Homo sapien
attagcgtctggcatttcttctgct

SEQ ID NO: 1058729 - DNA, 25 bp, Homo sapien
ttattagcgtctggcatttcttctg

SEQ ID NO: 1058730 - DNA, 25 bp, Homo sapien
tccttggccagtctggccgcccgct

SEQ ID NO: 1058731 - DNA, 25 bp, Homo sapien
tcatcagttagctccttgatctggg

SEQ ID NO: 1058732 - DNA, 25 bp, Homo sapien
tgccagctgattgtggtggctgaaa

SEQ ID NO: 1058733 - DNA, 25 bp, Homo sapien
gggccctgaggtctctgacttggct

SEQ ID NO: 1058734 - DNA, 25 bp, Homo sapien
gccgttcttgagctgggcctcatga

SEQ ID NO: 1058735 - DNA, 25 bp, Homo sapien
gagctgggcctcatgattctctgca

SEQ ID NO: 1058736 - DNA, 25 bp, Homo sapien
ggagtcaaggctgccgttcttgagc

SEQ ID NO: 1058737 - DNA, 25 bp, Homo sapien
caaggctgccgttcttgagctgggc

SEQ ID NO: 1058738 - DNA, 25 bp, Homo sapien
atcttcctcctcatcttcctcagta

SEQ ID NO: 1058739 - DNA, 25 bp, Homo sapien
tcagttttcctttgtccttctcatc

SEQ ID NO: 1058740 - DNA, 25 bp, Homo sapien
cttcctcctcatcttcctcagtatc

SEQ ID NO: 1058741 - DNA, 25 bp, Homo sapien
tcatcttcctcctcatcttcctcag

SEQ ID NO: 1058742 - DNA, 25 bp, Homo sapien
cggtaattgggcaggtctgccccgt

SEQ ID NO: 1058743 - DNA, 25 bp, Homo sapien
caggtctgccccgttgcctaggttg

SEQ ID NO: 1058744 - DNA, 25 bp, Homo sapien
aattgggcaggtctgccccgttgcc

SEQ ID NO: 1058745 - DNA, 25 bp, Homo sapien
ccagcggtaattgggcaggtctgcc

SEQ ID NO: 1058746 - DNA, 25 bp, Homo sapien
gaggcagtcagaagaggccactaag

SEQ ID NO: 1058747 - DNA, 25 bp, Homo sapien
cctaagctttacctctggtccctga

SEQ ID NO: 1058748 - DNA, 25 bp, Homo sapien
taagctttacctctggtccctgaca

SEQ ID NO: 1058749 - DNA, 25 bp, Homo sapien
agaggccactaagtgctgctggtac

SEQ ID NO: 1058750 - DNA, 25 bp, Homo sapien
cagccggaagttcacacagaaaggg

SEQ ID NO: 1058751 - DNA, 25 bp, Homo sapien
ttcagccggaagttcacacagaaag

SEQ ID NO: 1058752 - DNA, 25 bp, Homo sapien
aagttcacacagaaagggaccgcca

SEQ ID NO: 1058753 - DNA, 25 bp, Homo sapien
ccctttcagccggaagttcacacag

SEQ ID NO: 1058754 - DNA, 25 bp, Homo sapien
tccaccttcacttcattgtagagct

SEQ ID NO: 1058755 - DNA, 25 bp, Homo sapien
aatgatcgctggctgccccttgagc

SEQ ID NO: 1058756 - DNA, 25 bp, Homo sapien
tgccgtcctcaatgagccacgagct

SEQ ID NO: 1058757 - DNA, 25 bp, Homo sapien
cgccgctggatgtccaccaccatgt

SEQ ID NO: 1058758 - DNA, 25 bp, Homo sapien
aaaatagagacagatctactttaaa

SEQ ID NO: 1058759 - DNA, 25 bp, Homo sapien
taagaaggtgttactgcacttcagc

SEQ ID NO: 1058760 - DNA, 25 bp, Homo sapien
tgagtaaactaagcacacatcctcc

SEQ ID NO: 1058761 - DNA, 25 bp, Homo sapien
ctactttaaagagtgttgtcatggg

SEQ ID NO: 1058762 - DNA, 25 bp, Homo sapien
tctctttccagcacttagaacaaga

SEQ ID NO: 1058763 - DNA, 25 bp, Homo sapien
cagcacttagaacaagaacagtacc

SEQ ID NO: 1058764 - DNA, 25 bp, Homo sapien
aaggcttcctgagggcacatatttt

SEQ ID NO: 1058765 - DNA, 25 bp, Homo sapien
tctttccagcacttagaacaagaac

SEQ ID NO: 1058766 - DNA, 25 bp, Homo sapien
gatccagaggtacaagactgtgccc

SEQ ID NO: 1058767 - DNA, 25 bp, Homo sapien
tgcaggcctacactggatccagagg

SEQ ID NO: 1058768 - DNA, 25 bp, Homo sapien
tcgggctgagtcttaagacacaaag

SEQ ID NO: 1058769 - DNA, 25 bp, Homo sapien
cacagaggcaaagagttacaaatca

SEQ ID NO: 1058770 - DNA, 25 bp, Homo sapien
attctcagggttaatcttcttggtg

SEQ ID NO: 1058771 - DNA, 25 bp, Homo sapien
ttcttggtgttgatctcagggtcac

SEQ ID NO: 1058772 - DNA, 25 bp, Homo sapien
cagggtcactggacaccaagcggct

SEQ ID NO: 1058773 - DNA, 25 bp, Homo sapien
cttggaattctcagggttaatcttc

SEQ ID NO: 1058774 - DNA, 25 bp, Homo sapien
gacaggaatcggtgaagctctggaa

SEQ ID NO: 1058775 - DNA, 25 bp, Homo sapien
gcagtgacaggaatcggtgaagctc

SEQ ID NO: 1058776 - DNA, 25 bp, Homo sapien
agctctggaaacaacgaggcccctc

SEQ ID NO: 1058777 - DNA, 25 bp, Homo sapien
gctctggaaacaacgaggcccctca

SEQ ID NO: 1058778 - DNA, 25 bp, Homo sapien
ctgaagttggcagccccatggactt

SEQ ID NO: 1058779 - DNA, 25 bp, Homo sapien
tcttctgttcgtctgaagttggcag

SEQ ID NO: 1058780 - DNA, 25 bp, Homo sapien
acttctgtcgctggtcatacatcat

SEQ ID NO: 1058781 - DNA, 25 bp, Homo sapien
ttccaccatgctgcgagtctcactg

SEQ ID NO: 1058782 - DNA, 25 bp, Homo sapien
caaatgacaagagtaggcaagccaa

SEQ ID NO: 1058783 - DNA, 25 bp, Homo sapien
tcactgctgtcaccgaagtctaagc

SEQ ID NO: 1058784 - DNA, 25 bp, Homo sapien
tatcatgcaccatgagccggccttg

SEQ ID NO: 1058785 - DNA, 25 bp, Homo sapien
taggtggcaatgaccgcctgttacc

SEQ ID NO: 1058786 - DNA, 25 bp, Homo sapien
tttagacctcagcaacaccaagcca

SEQ ID NO: 1058787 - DNA, 25 bp, Homo sapien
agcacccccgtgtcaagtctaatct

SEQ ID NO: 1058788 - DNA, 25 bp, Homo sapien
ccccgtgtcaagtctaatctcttta

SEQ ID NO: 1058789 - DNA, 25 bp, Homo sapien
aaacggaagcaagatgaaacagctc

SEQ ID NO: 1058790 - DNA, 25 bp, Homo sapien
ggaaaaatccatctccggatgttga

SEQ ID NO: 1058791 - DNA, 25 bp, Homo sapien
aatccatctccggatgttgatccat

SEQ ID NO: 1058792 - DNA, 25 bp, Homo sapien
gccttggaaaaatccatctccggat

SEQ ID NO: 1058793 - DNA, 25 bp, Homo sapien
catctccggatgttgatccatgaac

SEQ ID NO: 1058794 - DNA, 25 bp, Homo sapien
ggaggacaaggtcccaagacccagc

SEQ ID NO: 1058795 - DNA, 25 bp, Homo sapien
caaggtcccaagacccagcctttct

SEQ ID NO: 1058796 - DNA, 25 bp, Homo sapien
gaggacaaggtcccaagacccagcc

SEQ ID NO: 1058797 - DNA, 25 bp, Homo sapien
aggacaaggtcccaagacccagcct

SEQ ID NO: 1058798 - DNA, 25 bp, Homo sapien
tctgggctagaagccaaactcccag

SEQ ID NO: 1058799 - DNA, 25 bp, Homo sapien
aggatgtgccctaggtcacatggca

SEQ ID NO: 1058800 - DNA, 25 bp, Homo sapien
gcagccgtaagaggcctgtgcccca

SEQ ID NO: 1058801 - DNA, 25 bp, Homo sapien
ccagcagcagccgtaagaggcctgt

SEQ ID NO: 1058802 - DNA, 25 bp, Homo sapien
aggttccctctgcattcaacaagtt

SEQ ID NO: 1058803 - DNA, 25 bp, Homo sapien
aaggttccctctgcattcaacaagt

SEQ ID NO: 1058804 - DNA, 25 bp, Homo sapien
cattagtacccgaaagagccgtgct

SEQ ID NO: 1058805 - DNA, 25 bp, Homo sapien
taccccgatgttaagctcaaaggca

SEQ ID NO: 1058806 - DNA, 25 bp, Homo sapien
tgttcagcgtacaccagatcgatga

SEQ ID NO: 1058807 - DNA, 25 bp, Homo sapien
tattctttccatgagtcggacctgg

SEQ ID NO: 1058808 - DNA, 25 bp, Homo sapien
ggagggagggccacaagagataagg

SEQ ID NO: 1058809 - DNA, 25 bp, Homo sapien
tttgaaatctgggttagaccacaga

SEQ ID NO: 1058810 - DNA, 25 bp, Homo sapien
agggagggccacaagagataagggt

SEQ ID NO: 1058811 - DNA, 25 bp, Homo sapien
gaattttgaaatctgggttagacca

SEQ ID NO: 1058812 - DNA, 25 bp, Homo sapien
aggctggtgcggccgggcctgtcct

SEQ ID NO: 1058813 - DNA, 25 bp, Homo sapien
gaggctggtgcggccgggcctgtcc

SEQ ID NO: 1058814 - DNA, 25 bp, Homo sapien
tagctgcccgcggatatgggactct

SEQ ID NO: 1058815 - DNA, 25 bp, Homo sapien
tgggacaaacgctggtgctcacccc

SEQ ID NO: 1058816 - DNA, 25 bp, Homo sapien
tcaccccgaggaacagcgtcgggac

SEQ ID NO: 1058817 - DNA, 25 bp, Homo sapien
gacggctgtttctcgagcaggactg

SEQ ID NO: 1058818 - DNA, 25 bp, Homo sapien
caccctcctacttccggggtgcgcg

SEQ ID NO: 1058819 - DNA, 25 bp, Homo sapien
tggcgggacaggtaagcccggcgcg

SEQ ID NO: 1058820 - DNA, 25 bp, Homo sapien
ccccgaagctgagcccggacaggag

SEQ ID NO: 1058821 - DNA, 25 bp, Homo sapien
gggcgcaagccagggcggcgccggt

SEQ ID NO: 1058822 - DNA, 25 bp, Homo sapien
ctgcgccccaggtgagcggcgaggg

SEQ ID NO: 1058823 - DNA, 25 bp, Homo sapien
gcgggggaggggctgagccggaggc

SEQ ID NO: 1058824 - DNA, 25 bp, Homo sapien
aggggctgagccggaggcggctcac

SEQ ID NO: 1058825 - DNA, 25 bp, Homo sapien
gggaggggctgagccggaggcggct

SEQ ID NO: 1058826 - DNA, 25 bp, Homo sapien
tttcagagctgcatatccggtcccc

SEQ ID NO: 1058827 - DNA, 25 bp, Homo sapien
ttttggatgtagtgaccatggccca

SEQ ID NO: 1058828 - DNA, 25 bp, Homo sapien
ttttggccaccacttctgatcctgg

SEQ ID NO: 1058829 - DNA, 25 bp, Homo sapien
gaggttcctgtctttacctgcagat

SEQ ID NO: 1058830 - DNA, 25 bp, Homo sapien
tctgggatggcttatgtgtcattga

SEQ ID NO: 1058831 - DNA, 25 bp, Homo sapien
gatggcttatgtgtcattgagctcc

SEQ ID NO: 1058832 - DNA, 25 bp, Homo sapien
tgtgtcattgagctcccgtgctgca

SEQ ID NO: 1058833 - DNA, 25 bp, Homo sapien
cattcatattcctctgggatggctt

SEQ ID NO: 1058834 - DNA, 25 bp, Homo sapien
gatgaacccggatttgggacgacca

SEQ ID NO: 1058835 - DNA, 25 bp, Homo sapien
tgtcggatgaacccggatttgggac

SEQ ID NO: 1058836 - DNA, 25 bp, Homo sapien
tgggacgaccaaagaaagttgcacc

SEQ ID NO: 1058837 - DNA, 25 bp, Homo sapien
tttgggacgaccaaagaaagttgca

SEQ ID NO: 1058838 - DNA, 25 bp, Homo sapien
tctcgttggggtcaaacttccatgg

SEQ ID NO: 1058839 - DNA, 25 bp, Homo sapien
cagaagtggcaccaacttcactcct

SEQ ID NO: 1058840 - DNA, 25 bp, Homo sapien
tggcaccaacttcactcctggtgca

SEQ ID NO: 1058841 - DNA, 25 bp, Homo sapien
gatctcgttggggtcaaacttccat

SEQ ID NO: 1058842 - DNA, 25 bp, Homo sapien
gttgaagatttcatcaaacgtgata

SEQ ID NO: 1058843 - DNA, 25 bp, Homo sapien
tgttgaagatttcatcaaacgtgat

SEQ ID NO: 1058844 - DNA, 25 bp, Homo sapien
ttgaagatttcatcaaacgtgatat

SEQ ID NO: 1058845 - DNA, 25 bp, Homo sapien
gggtggtggccatcaacattgcagc

SEQ ID NO: 1058846 - DNA, 25 bp, Homo sapien
ctctttaatggttccagggaactct

SEQ ID NO: 1058847 - DNA, 25 bp, Homo sapien
agtccccgagatctctttaatggtt

SEQ ID NO: 1058848 - DNA, 25 bp, Homo sapien
gatctctttaatggttccagggaac

SEQ ID NO: 1058849 - DNA, 25 bp, Homo sapien
gactgtatgctctggtggtggtgtc

SEQ ID NO: 1058850 - DNA, 25 bp, Homo sapien
tatgctctggtggtggtgtcttcct

SEQ ID NO: 1058851 - DNA, 25 bp, Homo sapien
gctctggtggtggtgtcttcctcat

SEQ ID NO: 1058852 - DNA, 25 bp, Homo sapien
actgtatgctctggtggtggtgtct

SEQ ID NO: 1058853 - DNA, 25 bp, Homo sapien
ctgaagaagccgccctggctgcaca

SEQ ID NO: 1058854 - DNA, 25 bp, Homo sapien
gaagctgaagaagccgccctggctg

SEQ ID NO: 1058855 - DNA, 25 bp, Homo sapien
agaagccgccctggctgcacatgct

SEQ ID NO: 1058856 - DNA, 25 bp, Homo sapien
ctgaagctgaagaagccgccctggc

SEQ ID NO: 1058857 - DNA, 25 bp, Homo sapien
cccagaggcgcgcccgccgtccgcg

SEQ ID NO: 1058858 - DNA, 25 bp, Homo sapien
cccaccccagaggcgcgcccgccgt

SEQ ID NO: 1058859 - DNA, 25 bp, Homo sapien
ccccaccccagaggcgcgcccgccg

SEQ ID NO: 1058860 - DNA, 25 bp, Homo sapien
gcggctgtaggtgcgcagggaggat

SEQ ID NO: 1058861 - DNA, 25 bp, Homo sapien
ggctgtaggtgcgcagggaggatga

SEQ ID NO: 1058862 - DNA, 25 bp, Homo sapien
tgcggctgtaggtgcgcagggagga

SEQ ID NO: 1058863 - DNA, 25 bp, Homo sapien
ctgtaggtgcgcagggaggatgacc

SEQ ID NO: 1058864 - DNA, 25 bp, Homo sapien
cgggccgcaggcgctgatgcggcag

SEQ ID NO: 1058865 - DNA, 25 bp, Homo sapien
ccgggccgcaggcgctgatgcggca

SEQ ID NO: 1058866 - DNA, 25 bp, Homo sapien
gggccgcaggcgctgatgcggcagc

SEQ ID NO: 1058867 - DNA, 25 bp, Homo sapien
cgagccccgcgatcccgctagcgcc

SEQ ID NO: 1058868 - DNA, 25 bp, Homo sapien
tggtcctcggccgcgcctgctgaag

SEQ ID NO: 1058869 - DNA, 25 bp, Homo sapien
gggctgagaggacggcatgggatcc

SEQ ID NO: 1058870 - DNA, 25 bp, Homo sapien
gcgatcccgctagcgccctggcgcc

SEQ ID NO: 1058871 - DNA, 25 bp, Homo sapien
caagaaaacgcggtgcagctgcagc

SEQ ID NO: 1058872 - DNA, 25 bp, Homo sapien
agctcggccgccaagaaaacgcggt

SEQ ID NO: 1058873 - DNA, 25 bp, Homo sapien
tcaggcggctcaggctctccgcgcg

SEQ ID NO: 1058874 - DNA, 25 bp, Homo sapien
tgagccgccaggtagagctcggcct

SEQ ID NO: 1058875 - DNA, 25 bp, Homo sapien
ccgcggcgcgggcccttcttgaggc

SEQ ID NO: 1058876 - DNA, 25 bp, Homo sapien
cggcgcgggcccttcttgaggcgcg

SEQ ID NO: 1058877 - DNA, 25 bp, Homo sapien
ccagggcacgcagccgcccaggccc

SEQ ID NO: 1058878 - DNA, 25 bp, Homo sapien
gccgaggccagcagcgcggggggtc

SEQ ID NO: 1058879 - DNA, 25 bp, Homo sapien
gggccgtggccgcgccgcagtcgcc

SEQ ID NO: 1058880 - DNA, 25 bp, Homo sapien
gctgcggcggaagggcgagtcgggc

SEQ ID NO: 1058881 - DNA, 25 bp, Homo sapien
tggccgcgccgcagtcgcccggcac

SEQ ID NO: 1058882 - DNA, 25 bp, Homo sapien
cggcggaagggcgagtcgggctcgg

SEQ ID NO: 1058883 - DNA, 25 bp, Homo sapien
ctcttcctgcggatccgtagtcctt

SEQ ID NO: 1058884 - DNA, 25 bp, Homo sapien
tccgcgatcagtcggtcggtcggca

SEQ ID NO: 1058885 - DNA, 25 bp, Homo sapien
cggtcggcacctcggcgaagcttgt

SEQ ID NO: 1058886 - DNA, 25 bp, Homo sapien
gatccgtagtccttccagccggcgt

SEQ ID NO: 1058887 - DNA, 25 bp, Homo sapien
aaaatacaaaatgagatgggcatag

SEQ ID NO: 1058888 - DNA, 25 bp, Homo sapien
aatacaaaatgagatgggcatagtg

SEQ ID NO: 1058889 - DNA, 25 bp, Homo sapien
tacaaaatgagatgggcatagtggc

SEQ ID NO: 1058890 - DNA, 25 bp, Homo sapien
caaaatgagatgggcatagtggcac

SEQ ID NO: 1058891 - DNA, 25 bp, Homo sapien
catcaagtgattggccctcgtgggc

SEQ ID NO: 1058892 - DNA, 25 bp, Homo sapien
ggttcaagtctacatgtgtgtgccc

SEQ ID NO: 1058893 - DNA, 25 bp, Homo sapien
gacatagcactaactaggagctggg

SEQ ID NO: 1058894 - DNA, 25 bp, Homo sapien
gaataaagccagacgggtgagcttc

SEQ ID NO: 1058895 - DNA, 25 bp, Homo sapien
aagggtcactatacacagccttgaa

SEQ ID NO: 1058896 - DNA, 25 bp, Homo sapien
aggttgctgactcagcctgactcac

SEQ ID NO: 1058897 - DNA, 25 bp, Homo sapien
gttagccagcccagatctacaggga

SEQ ID NO: 1058898 - DNA, 25 bp, Homo sapien
aaacggacctctctttagcctgata

SEQ ID NO: 1058899 - DNA, 25 bp, Homo sapien
agtgcccagggagaaagccgaatcc

SEQ ID NO: 1058900 - DNA, 25 bp, Homo sapien
gccgaatccagaggtccagatccat

SEQ ID NO: 1058901 - DNA, 25 bp, Homo sapien
cgctgggattgtgtaaggtcaattc

SEQ ID NO: 1058902 - DNA, 25 bp, Homo sapien
aattctcaacgtcttcctgaaggca

SEQ ID NO: 1058903 - DNA, 25 bp, Homo sapien
gcaatgcttgctacgcttaatctga

SEQ ID NO: 1058904 - DNA, 25 bp, Homo sapien
cactcccacgtggagaacaagggca

SEQ ID NO: 1058905 - DNA, 25 bp, Homo sapien
cccggcgccgttagacttgaagcaa

SEQ ID NO: 1058906 - DNA, 25 bp, Homo sapien
taatctgattgcatctcagggacct

SEQ ID NO: 1058907 - DNA, 25 bp, Homo sapien
ggccagactgccaaacgaaactaaa

SEQ ID NO: 1058908 - DNA, 25 bp, Homo sapien
tcaggtcaagggagaattggtctgc

SEQ ID NO: 1058909 - DNA, 25 bp, Homo sapien
taaagagccataatagacacagagg

SEQ ID NO: 1058910 - DNA, 25 bp, Homo sapien
ggtctgcaaatcaaagtcaacaggg

SEQ ID NO: 1058911 - DNA, 25 bp, Homo sapien
catcacatcctttaatgaggaagac

SEQ ID NO: 1058912 - DNA, 25 bp, Homo sapien
cgtcatcacatcctttaatgaggaa

SEQ ID NO: 1058913 - DNA, 25 bp, Homo sapien
gtcatcacatcctttaatgaggaag

SEQ ID NO: 1058914 - DNA, 25 bp, Homo sapien
tcacatcctttaatgaggaagactt

SEQ ID NO: 1058915 - DNA, 25 bp, Homo sapien
cagttcgcacaaccctccttggtgt

SEQ ID NO: 1058916 - DNA, 25 bp, Homo sapien
agttcgcacaaccctccttggtgtc

SEQ ID NO: 1058917 - DNA, 25 bp, Homo sapien
gttcgcacaaccctccttggtgtca

SEQ ID NO: 1058918 - DNA, 25 bp, Homo sapien
taagcccagcccacgcctttggaaa

SEQ ID NO: 1058919 - DNA, 25 bp, Homo sapien
cgcctttggaaatagtctgttttat

SEQ ID NO: 1058920 - DNA, 25 bp, Homo sapien
ttcttaagcccagcccacgcctttg

SEQ ID NO: 1058921 - DNA, 25 bp, Homo sapien
ttagtttcttaagcccagcccacgc

SEQ ID NO: 1058922 - DNA, 25 bp, Homo sapien
gtttgcccagactctttgatccagg

SEQ ID NO: 1058923 - DNA, 25 bp, Homo sapien
gccagtcagtcatgggcctggacgc

SEQ ID NO: 1058924 - DNA, 25 bp, Homo sapien
tattcagcctcattaggggcctctg

SEQ ID NO: 1058925 - DNA, 25 bp, Homo sapien
cagggattgcaaagcccttaacata

SEQ ID NO: 1058926 - DNA, 25 bp, Homo sapien
ggctagcagggcgggggacgcccat

SEQ ID NO: 1058927 - DNA, 25 bp, Homo sapien
gaaggagatggggctagcagggcgg

SEQ ID NO: 1058928 - DNA, 25 bp, Homo sapien
agatggggctagcagggcgggggac

SEQ ID NO: 1058929 - DNA, 25 bp, Homo sapien
gacagggaaggagatggggctagca

SEQ ID NO: 1058930 - DNA, 25 bp, Homo sapien
aaccatcacaatcacaatgtcaact

SEQ ID NO: 1058931 - DNA, 25 bp, Homo sapien
caaccatcacaatcacaatgtcaac

SEQ ID NO: 1058932 - DNA, 25 bp, Homo sapien
agggtaccctaacttggcaagccag

SEQ ID NO: 1058933 - DNA, 25 bp, Homo sapien
ggtaccctaacttggcaagccagca

SEQ ID NO: 1058934 - DNA, 25 bp, Homo sapien
tcttctccccgtcactgaaaacaca

SEQ ID NO: 1058935 - DNA, 25 bp, Homo sapien
cttctccccgtcactgaaaacacac

SEQ ID NO: 1058936 - DNA, 25 bp, Homo sapien
cctcttctccccgtcactgaaaaca

SEQ ID NO: 1058937 - DNA, 25 bp, Homo sapien
tggcctcttctccccgtcactgaaa

SEQ ID NO: 1058938 - DNA, 25 bp, Homo sapien
ttaggtcacatcaggtttccagttt

SEQ ID NO: 1058939 - DNA, 25 bp, Homo sapien
taggtcacatcaggtttccagtttc

SEQ ID NO: 1058940 - DNA, 25 bp, Homo sapien
gcttttaagcctcggagggagagcc

SEQ ID NO: 1058941 - DNA, 25 bp, Homo sapien
caagattgcatacaacaggctccta

SEQ ID NO: 1058942 - DNA, 25 bp, Homo sapien
ggcaccagtttttaggaggacagaa

SEQ ID NO: 1058943 - DNA, 25 bp, Homo sapien
ccttgaggtgtacagaggcaccagt

SEQ ID NO: 1058944 - DNA, 25 bp, Homo sapien
tgcatgcactggtaactagatcgga

SEQ ID NO: 1058945 - DNA, 25 bp, Homo sapien
actagatcggaacaaaacagatagg

SEQ ID NO: 1058946 - DNA, 25 bp, Homo sapien
gtaactagatcggaacaaaacagat

SEQ ID NO: 1058947 - DNA, 25 bp, Homo sapien
tgcactggtaactagatcggaacaa

SEQ ID NO: 1058948 - DNA, 25 bp, Homo sapien
tagctcttgggcctgacctccagtc

SEQ ID NO: 1058949 - DNA, 25 bp, Homo sapien
tggaacctttcccttgtgtgtacca

SEQ ID NO: 1058950 - DNA, 25 bp, Homo sapien
tttcccttgtgtgtaccacaccctg

SEQ ID NO: 1058951 - DNA, 25 bp, Homo sapien
gctcttgggcctgacctccagtcct

SEQ ID NO: 1058952 - DNA, 25 bp, Homo sapien
cctcctcattcagaccaatcttagt

SEQ ID NO: 1058953 - DNA, 25 bp, Homo sapien
tcctcattcagaccaatcttagttt

SEQ ID NO: 1058954 - DNA, 25 bp, Homo sapien
tcattcagaccaatcttagtttcta

SEQ ID NO: 1058955 - DNA, 25 bp, Homo sapien
cagaccaatcttagtttctaaccaa

SEQ ID NO: 1058956 - DNA, 25 bp, Homo sapien
tctgtggacctggtgaatgaagagc

SEQ ID NO: 1058957 - DNA, 25 bp, Homo sapien
caaagtcttagggttgagccgggat

SEQ ID NO: 1058958 - DNA, 25 bp, Homo sapien
gatgcggagcaaggagacttcgtcc

SEQ ID NO: 1058959 - DNA, 25 bp, Homo sapien
tccccaggaaccgacgatgtcttca

SEQ ID NO: 1058960 - DNA, 25 bp, Homo sapien
ggttcaaatccgtagtctgagtcca

SEQ ID NO: 1058961 - DNA, 25 bp, Homo sapien
tgagtacgcacctgctaagaggctg

SEQ ID NO: 1058962 - DNA, 25 bp, Homo sapien
ccatgtggtagaccatgaggaccca

SEQ ID NO: 1058963 - DNA, 25 bp, Homo sapien
ccaggaatgagtttagcccacggct

SEQ ID NO: 1058964 - DNA, 25 bp, Homo sapien
cagtaagacctggacagtggaccga

SEQ ID NO: 1058965 - DNA, 25 bp, Homo sapien
tgaggcagcagacgcaagagaaagc

SEQ ID NO: 1058966 - DNA, 25 bp, Homo sapien
tcaggagtccctaggcagtaagacc

SEQ ID NO: 1058967 - DNA, 25 bp, Homo sapien
tggccccaggccactcgtgaattaa

SEQ ID NO: 1058968 - DNA, 25 bp, Homo sapien
gaccccagagtgagtaagctgtgtc

SEQ ID NO: 1058969 - DNA, 25 bp, Homo sapien
aatcaaagcagatgcaacatgctcc

SEQ ID NO: 1058970 - DNA, 25 bp, Homo sapien
tagaggactaactggtctgggatga

SEQ ID NO: 1058971 - DNA, 25 bp, Homo sapien
gcagaataccttccaggcaaggaga

SEQ ID NO: 1058972 - DNA, 25 bp, Homo sapien
tatatttctacttggcctgcttgag

SEQ ID NO: 1058973 - DNA, 25 bp, Homo sapien
ccagtgcaatttatgacaggcttca

SEQ ID NO: 1058974 - DNA, 25 bp, Homo sapien
tccaggagtaaggatctgaactacc

SEQ ID NO: 1058975 - DNA, 25 bp, Homo sapien
gatcctaggtcccttcagtaaggct

SEQ ID NO: 1058976 - DNA, 25 bp, Homo sapien
atacgaagtaccagaagcgggactc

SEQ ID NO: 1058977 - DNA, 25 bp, Homo sapien
ggcccacagtagacaatctcccctg

SEQ ID NO: 1058978 - DNA, 25 bp, Homo sapien
ggactcggcgacgacatgattaggc

SEQ ID NO: 1058979 - DNA, 25 bp, Homo sapien
gcgggactcggcgacgacatgatta

SEQ ID NO: 1058980 - DNA, 25 bp, Homo sapien
gagtcatagtgcagccagatgccga

SEQ ID NO: 1058981 - DNA, 25 bp, Homo sapien
atgttgtggatgccgctccgggagt

SEQ ID NO: 1058982 - DNA, 25 bp, Homo sapien
atgccgctccgggagtcatagtgca

SEQ ID NO: 1058983 - DNA, 25 bp, Homo sapien
ccgggagtcatagtgcagccagatg

SEQ ID NO: 1058984 - DNA, 25 bp, Homo sapien
ctggatggaatgggtccaggcgcgg

SEQ ID NO: 1058985 - DNA, 25 bp, Homo sapien
ggatggaatgggtccaggcgcggtg

SEQ ID NO: 1058986 - DNA, 25 bp, Homo sapien
gatggaatgggtccaggcgcggtgc

SEQ ID NO: 1058987 - DNA, 25 bp, Homo sapien
ggaatgggtccaggcgcggtgccgg

SEQ ID NO: 1058988 - DNA, 25 bp, Homo sapien
tgcttgacggccggccgcgggcact

SEQ ID NO: 1058989 - DNA, 25 bp, Homo sapien
ttgacggccggccgcgggcacttgc

SEQ ID NO: 1058990 - DNA, 25 bp, Homo sapien
gacggccggccgcgggcacttgctg

SEQ ID NO: 1058991 - DNA, 25 bp, Homo sapien
aactgcttgacggccggccgcgggc

SEQ ID NO: 1058992 - DNA, 25 bp, Homo sapien
cagagatagtcaagggagctgggtg

SEQ ID NO: 1058993 - DNA, 25 bp, Homo sapien
agttgcagagatagtcaagggagct

SEQ ID NO: 1058994 - DNA, 25 bp, Homo sapien
tgcagagatagtcaagggagctggg

SEQ ID NO: 1058995 - DNA, 25 bp, Homo sapien
ttgcagagatagtcaagggagctgg

SEQ ID NO: 1058996 - DNA, 25 bp, Homo sapien
tgccaatgagcagttaaccagagcc

SEQ ID NO: 1058997 - DNA, 25 bp, Homo sapien
gatatctagcgaggaggaacgcgct

SEQ ID NO: 1058998 - DNA, 25 bp, Homo sapien
gatgcattctacaacgaacagctgg

SEQ ID NO: 1058999 - DNA, 25 bp, Homo sapien
catctggttcgaagtctcagcggta

SEQ ID NO: 1059000 - DNA, 25 bp, Homo sapien
gaacagccgctcaggatggaatcat

SEQ ID NO: 1059001 - DNA, 25 bp, Homo sapien
ggatggaatcataccaggagacatt

SEQ ID NO: 1059002 - DNA, 25 bp, Homo sapien
gccgctcaggatggaatcataccag

SEQ ID NO: 1059003 - DNA, 25 bp, Homo sapien
taccaggagacattaactattaaca

SEQ ID NO: 1059004 - DNA, 25 bp, Homo sapien
ccacacttaaatcttaagaccactg

SEQ ID NO: 1059005 - DNA, 25 bp, Homo sapien
gaaccacacttaaatcttaagacca

SEQ ID NO: 1059006 - DNA, 25 bp, Homo sapien
acttaaatcttaagaccactggtgg

SEQ ID NO: 1059007 - DNA, 25 bp, Homo sapien
cacttaaatcttaagaccactggtg

SEQ ID NO: 1059008 - DNA, 25 bp, Homo sapien
tagatttcttcactggcactttttc

SEQ ID NO: 1059009 - DNA, 25 bp, Homo sapien
tcactggcactttttcttcagcttc

SEQ ID NO: 1059010 - DNA, 25 bp, Homo sapien
ctggcactttttcttcagcttcctc

SEQ ID NO: 1059011 - DNA, 25 bp, Homo sapien
cttcactggcactttttcttcagct

SEQ ID NO: 1059012 - DNA, 25 bp, Homo sapien
cttgtgtgcatttttggctggagta

SEQ ID NO: 1059013 - DNA, 25 bp, Homo sapien
ttgtgtgcatttttggctggagtat

SEQ ID NO: 1059014 - DNA, 25 bp, Homo sapien
tcttcacaaaattgatgaactcggc

SEQ ID NO: 1059015 - DNA, 25 bp, Homo sapien
cacaaaattgatgaactcggcttcc

SEQ ID NO: 1059016 - DNA, 25 bp, Homo sapien
ttcacaaaattgatgaactcggctt

SEQ ID NO: 1059017 - DNA, 25 bp, Homo sapien
tacagaaatgaaatatgatggaaaa

SEQ ID NO: 1059018 - DNA, 25 bp, Homo sapien
catgtctgaccaccgctactactat

SEQ ID NO: 1059019 - DNA, 25 bp, Homo sapien
accaagcaaagggtgagttccatct

SEQ ID NO: 1059020 - DNA, 25 bp, Homo sapien
ggaaagttctcactctgcattataa

SEQ ID NO: 1059021 - DNA, 25 bp, Homo sapien
aggcatatttttgtcttcccacaat

SEQ ID NO: 1059022 - DNA, 25 bp, Homo sapien
gctgtaccataaccttctgcacttt

SEQ ID NO: 1059023 - DNA, 25 bp, Homo sapien
ctgtaccataaccttctgcactttc

SEQ ID NO: 1059024 - DNA, 25 bp, Homo sapien
ctgaagagaggttgatgggctgtac

SEQ ID NO: 1059025 - DNA, 25 bp, Homo sapien
aagagaggttgatgggctgtaccat

SEQ ID NO: 1059026 - DNA, 25 bp, Homo sapien
tgaatccgggatctgttttgtaaat

SEQ ID NO: 1059027 - DNA, 25 bp, Homo sapien
ctgaatccgggatctgttttgtaaa

SEQ ID NO: 1059028 - DNA, 25 bp, Homo sapien
cacgccttgtccacttggaaggcaa

SEQ ID NO: 1059029 - DNA, 25 bp, Homo sapien
tcacgccttgtccacttggaaggca

SEQ ID NO: 1059030 - DNA, 25 bp, Homo sapien
aaggcaaaagagaggtggttgagat

SEQ ID NO: 1059031 - DNA, 25 bp, Homo sapien
tcacacccgcgctcacacacactca

SEQ ID NO: 1059032 - DNA, 25 bp, Homo sapien
gcaccgcctcacacccgcgctcaca

SEQ ID NO: 1059033 - DNA, 25 bp, Homo sapien
cctgcgcaccgcctcacacccgcgc

SEQ ID NO: 1059034 - DNA, 25 bp, Homo sapien
ctcacacccgcgctcacacacactc

SEQ ID NO: 1059035 - DNA, 25 bp, Homo sapien
cagcggcgcaacttcaggagcccat

SEQ ID NO: 1059036 - DNA, 25 bp, Homo sapien
ccggcagcggcgcaacttcaggagc

SEQ ID NO: 1059037 - DNA, 25 bp, Homo sapien
cgaccggcagcggcgcaacttcagg

SEQ ID NO: 1059038 - DNA, 25 bp, Homo sapien
gcggcgcaacttcaggagcccatgt

SEQ ID NO: 1059039 - DNA, 25 bp, Homo sapien
ctgcgcccagcccaggcttaaaagt

SEQ ID NO: 1059040 - DNA, 25 bp, Homo sapien
tgcgcccagcccaggcttaaaagtt

SEQ ID NO: 1059041 - DNA, 25 bp, Homo sapien
actgcgcccagcccaggcttaaaag

SEQ ID NO: 1059042 - DNA, 25 bp, Homo sapien
tcttaatggttcaacagaaggaagc

SEQ ID NO: 1059043 - DNA, 25 bp, Homo sapien
caacagaaggaagctataataggat

SEQ ID NO: 1059044 - DNA, 25 bp, Homo sapien
caagcccaggtccacaaaatacaca

SEQ ID NO: 1059045 - DNA, 25 bp, Homo sapien
aggacccctgagcattccagccaag

SEQ ID NO: 1059046 - DNA, 25 bp, Homo sapien
ctctagttatgttgactttcgccat

SEQ ID NO: 1059047 - DNA, 25 bp, Homo sapien
tgcctacggatgaggtctctagtta

SEQ ID NO: 1059048 - DNA, 25 bp, Homo sapien
tacggatgaggtctctagttatgtt

SEQ ID NO: 1059049 - DNA, 25 bp, Homo sapien
gatctgcctacggatgaggtctcta

SEQ ID NO: 1059050 - DNA, 25 bp, Homo sapien
agtgacatggtagcgccgctcaaag

SEQ ID NO: 1059051 - DNA, 25 bp, Homo sapien
ccagccgccggataaaggggtcagt

SEQ ID NO: 1059052 - DNA, 25 bp, Homo sapien
ggtcagtgacatggtagcgccgctc

SEQ ID NO: 1059053 - DNA, 25 bp, Homo sapien
gtagcgccgctcaaagctcagggca

SEQ ID NO: 1059054 - DNA, 25 bp, Homo sapien
ttccactccagacagttgacacatc

SEQ ID NO: 1059055 - DNA, 25 bp, Homo sapien
tccagacagttgacacatcctgagt

SEQ ID NO: 1059056 - DNA, 25 bp, Homo sapien
gacagttgacacatcctgagtgacc

SEQ ID NO: 1059057 - DNA, 25 bp, Homo sapien
tttctcattccactccagacagttg

SEQ ID NO: 1059058 - DNA, 25 bp, Homo sapien
tgctggtcatcggaaccagaggcca

SEQ ID NO: 1059059 - DNA, 25 bp, Homo sapien
tgtgtcccgtgtgcatggagagcag

SEQ ID NO: 1059060 - DNA, 25 bp, Homo sapien
gagaagatatttgcggtgtgtcccg

SEQ ID NO: 1059061 - DNA, 25 bp, Homo sapien
cagcgggtcccacacaatcgtgtgc

SEQ ID NO: 1059062 - DNA, 25 bp, Homo sapien
tctccaaacatgtggatggtctcct

SEQ ID NO: 1059063 - DNA, 25 bp, Homo sapien
tgcacatgcaccttagagtcggctg

SEQ ID NO: 1059064 - DNA, 25 bp, Homo sapien
cagcactccagaatgtgttgggcca

SEQ ID NO: 1059065 - DNA, 25 bp, Homo sapien
atcaagatgcggtccccagcgtgag

SEQ ID NO: 1059066 - DNA, 25 bp, Homo sapien
tcaatcagcacctccgagtgtttgc

SEQ ID NO: 1059067 - DNA, 25 bp, Homo sapien
tgcggatgtcatagagcctcacgaa

SEQ ID NO: 1059068 - DNA, 25 bp, Homo sapien
gctgttctctcgaaggtcatactgg

SEQ ID NO: 1059069 - DNA, 25 bp, Homo sapien
cacagtactctgtcaggtcaatcag

SEQ ID NO: 1059070 - DNA, 25 bp, Homo sapien
ctgctacgtaatactgggctgcacc

SEQ ID NO: 1059071 - DNA, 25 bp, Homo sapien
atactgggctgcaccgtccggaagg

SEQ ID NO: 1059072 - DNA, 25 bp, Homo sapien
aaggtgtgcacacccgctgaagggc

SEQ ID NO: 1059073 - DNA, 25 bp, Homo sapien
agaaggtgtgcacacccgctgaagg

SEQ ID NO: 1059074 - DNA, 25 bp, Homo sapien
ccagcactctcaaacggttgttgta

SEQ ID NO: 1059075 - DNA, 25 bp, Homo sapien
tagtcaggaagcttcactggcaggt

SEQ ID NO: 1059076 - DNA, 25 bp, Homo sapien
tgactagtagctctgtgccattggg

SEQ ID NO: 1059077 - DNA, 25 bp, Homo sapien
catgttgactagtagctctgtgcca

SEQ ID NO: 1059078 - DNA, 25 bp, Homo sapien
gctgcttgtaagtcaagtcaaacaa

SEQ ID NO: 1059079 - DNA, 25 bp, Homo sapien
tgtaagtcaagtcaaacaaatagac

SEQ ID NO: 1059080 - DNA, 25 bp, Homo sapien
gccgctgcttgtaagtcaagtcaaa

SEQ ID NO: 1059081 - DNA, 25 bp, Homo sapien
ggccgctgcttgtaagtcaagtcaa

SEQ ID NO: 1059082 - DNA, 25 bp, Homo sapien
tggacacaccgttggacacaccgtt

SEQ ID NO: 1059083 - DNA, 25 bp, Homo sapien
acaccgttggacacaccgttggtgg

SEQ ID NO: 1059084 - DNA, 25 bp, Homo sapien
ggtgcaggccattggacacaccgtt

SEQ ID NO: 1059085 - DNA, 25 bp, Homo sapien
gcaggccattggacacaccgttgga

SEQ ID NO: 1059086 - DNA, 25 bp, Homo sapien
cccctactctccggcagccggaagc

SEQ ID NO: 1059087 - DNA, 25 bp, Homo sapien
atgtcccctactctccggcagccgg

SEQ ID NO: 1059088 - DNA, 25 bp, Homo sapien
tgtcccctactctccggcagccgga

SEQ ID NO: 1059089 - DNA, 25 bp, Homo sapien
gtcccctactctccggcagccggaa

SEQ ID NO: 1059090 - DNA, 25 bp, Homo sapien
gcacagccttgctgtaaagctgaat

SEQ ID NO: 1059091 - DNA, 25 bp, Homo sapien
aagctgaatggcttgggtccactgc

SEQ ID NO: 1059092 - DNA, 25 bp, Homo sapien
gctgctgctcggtttccataaagca

SEQ ID NO: 1059093 - DNA, 25 bp, Homo sapien
cacttgcgcttcatgtaggctgctg

SEQ ID NO: 1059094 - DNA, 25 bp, Homo sapien
gacacataccaactgaattcaccaa

SEQ ID NO: 1059095 - DNA, 25 bp, Homo sapien
tgtactcagtccaaagggtctaaga

SEQ ID NO: 1059096 - DNA, 25 bp, Homo sapien
tttccacttagcaagattccactgc

SEQ ID NO: 1059097 - DNA, 25 bp, Homo sapien
ataccctagcgtgacccatagccag

SEQ ID NO: 1059098 - DNA, 25 bp, Homo sapien
tagactcactgccagatcaatctcc

SEQ ID NO: 1059099 - DNA, 25 bp, Homo sapien
ccttcctagactcactgccagatca

SEQ ID NO: 1059100 - DNA, 25 bp, Homo sapien
cttcctagactcactgccagatcaa

SEQ ID NO: 1059101 - DNA, 25 bp, Homo sapien
tcctagactcactgccagatcaatc

SEQ ID NO: 1059102 - DNA, 25 bp, Homo sapien
tctggaagctgatggtaaggggggt

SEQ ID NO: 1059103 - DNA, 25 bp, Homo sapien
acctcctgaagcatggatgaaggga

SEQ ID NO: 1059104 - DNA, 25 bp, Homo sapien
taaggggggttgtgcacaccaggag

SEQ ID NO: 1059105 - DNA, 25 bp, Homo sapien
ccactcacttctccaacctcctgaa

SEQ ID NO: 1059106 - DNA, 25 bp, Homo sapien
cctcagggcatcatagtggtcacca

SEQ ID NO: 1059107 - DNA, 25 bp, Homo sapien
aatgcatcacaagcgctgctgtggg

SEQ ID NO: 1059108 - DNA, 25 bp, Homo sapien
tgtgggcctgctccggaaatttccc

SEQ ID NO: 1059109 - DNA, 25 bp, Homo sapien
cgggccaggcgaaagtgtgccttca

SEQ ID NO: 1059110 - DNA, 25 bp, Homo sapien
cacagaaattccacgtgacttagtc

SEQ ID NO: 1059111 - DNA, 25 bp, Homo sapien
gatcctttagatcttagtttaaatg

SEQ ID NO: 1059112 - DNA, 25 bp, Homo sapien
tgtatctagttaatgcttcctttgg

SEQ ID NO: 1059113 - DNA, 25 bp, Homo sapien
tctcctttatcacttggttccttca

SEQ ID NO: 1059114 - DNA, 25 bp, Homo sapien
agatggagtccttgcggctcgtgct

SEQ ID NO: 1059115 - DNA, 25 bp, Homo sapien
tagcggaactgatagtcgtagcttc

SEQ ID NO: 1059116 - DNA, 25 bp, Homo sapien
ttgcagtggccgcagtagcggaact

SEQ ID NO: 1059117 - DNA, 25 bp, Homo sapien
ttggcctctttgatatccgtggtgg

SEQ ID NO: 1059118 - DNA, 25 bp, Homo sapien
gaaaccaagctctggcacatgcaga

SEQ ID NO: 1059119 - DNA, 25 bp, Homo sapien
tacacagggcacagttttgagcaca

SEQ ID NO: 1059120 - DNA, 25 bp, Homo sapien
tgttctcttaaacctagggccagcg

SEQ ID NO: 1059121 - DNA, 25 bp, Homo sapien
aacagatgtgccaagattcccagcc

SEQ ID NO: 1059122 - DNA, 25 bp, Homo sapien
agaaggagccatcgtcagagccact

SEQ ID NO: 1059123 - DNA, 25 bp, Homo sapien
cagagccactgacgatatactgagc

SEQ ID NO: 1059124 - DNA, 25 bp, Homo sapien
gatgaagaaggagccatcgtcagag

SEQ ID NO: 1059125 - DNA, 25 bp, Homo sapien
cgtcagagccactgacgatatactg

SEQ ID NO: 1059126 - DNA, 25 bp, Homo sapien
caacaggatcgatgccactggtggc

SEQ ID NO: 1059127 - DNA, 25 bp, Homo sapien
atccccttggagcacacggaccagg

SEQ ID NO: 1059128 - DNA, 25 bp, Homo sapien
gcacacggaccaggttggtggtctc

SEQ ID NO: 1059129 - DNA, 25 bp, Homo sapien
gcagttgacaatggactcatcccct

SEQ ID NO: 1059130 - DNA, 25 bp, Homo sapien
ctccaacgggtctgcattcatgcgc

SEQ ID NO: 1059131 - DNA, 25 bp, Homo sapien
gatccggtagcccatgttgagcagc

SEQ ID NO: 1059132 - DNA, 25 bp, Homo sapien
tcatgcgccgctggttggcctgtga

SEQ ID NO: 1059133 - DNA, 25 bp, Homo sapien
tatcttccacgactcggcctgtgag

SEQ ID NO: 1059134 - DNA, 25 bp, Homo sapien
ttgtagcaacctccacccctaacgc

SEQ ID NO: 1059135 - DNA, 25 bp, Homo sapien
aaacagaatcccctgacctcctgcc

SEQ ID NO: 1059136 - DNA, 25 bp, Homo sapien
gaaggggttttgaggcaggccagag

SEQ ID NO: 1059137 - DNA, 25 bp, Homo sapien
caatcagcccagagtccgaaagcca

SEQ ID NO: 1059138 - DNA, 25 bp, Homo sapien
tgctgccagctaaagggcaggacag

SEQ ID NO: 1059139 - DNA, 25 bp, Homo sapien
ttgggctccgctctaacactggtgg

SEQ ID NO: 1059140 - DNA, 25 bp, Homo sapien
tctggcagaaaggtcacagtgaggc

SEQ ID NO: 1059141 - DNA, 25 bp, Homo sapien
cagagaagggcccttagcaggaagc

SEQ ID NO: 1059142 - DNA, 25 bp, Homo sapien
ctttggtctttgtggcggctcagca

SEQ ID NO: 1059143 - DNA, 25 bp, Homo sapien
ggagcagctggagctaagagccggg

SEQ ID NO: 1059144 - DNA, 25 bp, Homo sapien
aaaagcttttaacatggccctcctg

SEQ ID NO: 1059145 - DNA, 25 bp, Homo sapien
tgggattaaagcaatgagatggtgc

SEQ ID NO: 1059146 - DNA, 25 bp, Homo sapien
tccacttgtcttcttaaaactgtga

SEQ ID NO: 1059147 - DNA, 25 bp, Homo sapien
gctgtttccttcaccaataaatata

SEQ ID NO: 1059148 - DNA, 25 bp, Homo sapien
ccaataaatatacttcattaccaag

SEQ ID NO: 1059149 - DNA, 25 bp, Homo sapien
acggagaagagacaggggagcaggt

SEQ ID NO: 1059150 - DNA, 25 bp, Homo sapien
gcagctgtttccttcaccaataaat

SEQ ID NO: 1059151 - DNA, 25 bp, Homo sapien
ctgcccccagaggacagtaaggctt

SEQ ID NO: 1059152 - DNA, 25 bp, Homo sapien
cagccccaatactcctgctctccct

SEQ ID NO: 1059153 - DNA, 25 bp, Homo sapien
ccccagaggacagtaaggcttatgt

SEQ ID NO: 1059154 - DNA, 25 bp, Homo sapien
cagaggacagtaaggcttatgtgtc

SEQ ID NO: 1059155 - DNA, 25 bp, Homo sapien
caaaatggttttaatcaattgcgtc

SEQ ID NO: 1059156 - DNA, 25 bp, Homo sapien
gcggagcaacaaaaaggctcggctc

SEQ ID NO: 1059157 - DNA, 25 bp, Homo sapien
actctcctgggagcggagcaacaaa

SEQ ID NO: 1059158 - DNA, 25 bp, Homo sapien
taatcaattgcgtcaccctcactct

SEQ ID NO: 1059159 - DNA, 25 bp, Homo sapien
catagagctacagaggtgagggacc

SEQ ID NO: 1059160 - DNA, 25 bp, Homo sapien
aggtgccctcactttggttccaaga

SEQ ID NO: 1059161 - DNA, 25 bp, Homo sapien
tctgtccagtagaggtgtggttact

SEQ ID NO: 1059162 - DNA, 25 bp, Homo sapien
tgctcacggtgacccttcaaggcag

SEQ ID NO: 1059163 - DNA, 25 bp, Homo sapien
tcagtagacacttcttgtctgttgc

SEQ ID NO: 1059164 - DNA, 25 bp, Homo sapien
gtagacacttcttgtctgttgctga

SEQ ID NO: 1059165 - DNA, 25 bp, Homo sapien
tcttgtctgttgctgaaacacatca

SEQ ID NO: 1059166 - DNA, 25 bp, Homo sapien
ttcttgtctgttgctgaaacacatc

SEQ ID NO: 1059167 - DNA, 25 bp, Homo sapien
cttggtctataagaacaaagttcta

SEQ ID NO: 1059168 - DNA, 25 bp, Homo sapien
atgtaatcttggtctataagaacaa

SEQ ID NO: 1059169 - DNA, 25 bp, Homo sapien
tactatagtaatagtcatgatgtgg

SEQ ID NO: 1059170 - DNA, 25 bp, Homo sapien
actatactatagtaatagtcatgat

SEQ ID NO: 1059171 - DNA, 25 bp, Homo sapien
cctacatgtaagagctatatacacg

SEQ ID NO: 1059172 - DNA, 25 bp, Homo sapien
gagctatatacacgaaaagttataa

SEQ ID NO: 1059173 - DNA, 25 bp, Homo sapien
caagaatcggtatttttccccacag

SEQ ID NO: 1059174 - DNA, 25 bp, Homo sapien
tgatggagaaagggaggtaattttc

SEQ ID NO: 1059175 - DNA, 25 bp, Homo sapien
tccattcaccttttgaggggcatct

SEQ ID NO: 1059176 - DNA, 25 bp, Homo sapien
ccattcaccttttgaggggcatctt

SEQ ID NO: 1059177 - DNA, 25 bp, Homo sapien
cctccattcaccttttgaggggcat

SEQ ID NO: 1059178 - DNA, 25 bp, Homo sapien
cattcaccttttgaggggcatcttg

SEQ ID NO: 1059179 - DNA, 25 bp, Homo sapien
gctctggtgccgctcgtccccatgg

SEQ ID NO: 1059180 - DNA, 25 bp, Homo sapien
gactggccccggctctggtgccgct

SEQ ID NO: 1059181 - DNA, 25 bp, Homo sapien
ggccccggctctggtgccgctcgtc

SEQ ID NO: 1059182 - DNA, 25 bp, Homo sapien
ctccgactggccccggctctggtgc

SEQ ID NO: 1059183 - DNA, 25 bp, Homo sapien
agagcagagaactcccttccgcttc

SEQ ID NO: 1059184 - DNA, 25 bp, Homo sapien
caacaagagcagagaactcccttcc

SEQ ID NO: 1059185 - DNA, 25 bp, Homo sapien
caagagcagagaactcccttccgct

SEQ ID NO: 1059186 - DNA, 25 bp, Homo sapien
gcggcggcaacaagagcagagaact

SEQ ID NO: 1059187 - DNA, 25 bp, Homo sapien
ccgccgtcggcgcctccacttccgc

SEQ ID NO: 1059188 - DNA, 25 bp, Homo sapien
gatgggcgtccacaccacgcagtag

SEQ ID NO: 1059189 - DNA, 25 bp, Homo sapien
cgccggagccttgatattgcttcat

SEQ ID NO: 1059190 - DNA, 25 bp, Homo sapien
cacgcagtaggggaagcgactccgt

SEQ ID NO: 1059191 - DNA, 25 bp, Homo sapien
ggaagcgactccgttccacatccat

SEQ ID NO: 1059192 - DNA, 25 bp, Homo sapien
ccgaggaaaaggcttgctgcgcgtt

SEQ ID NO: 1059193 - DNA, 25 bp, Homo sapien
ctgggcgaggcgtgcgggccagacc

SEQ ID NO: 1059194 - DNA, 25 bp, Homo sapien
cgtgcgggccagacccgaggaaaag

SEQ ID NO: 1059195 - DNA, 25 bp, Homo sapien
ttgctgcgcgttggggccggaggct

SEQ ID NO: 1059196 - DNA, 25 bp, Homo sapien
cgtgtcccagccgtgtgcacaaact

SEQ ID NO: 1059197 - DNA, 25 bp, Homo sapien
tattgagagcagggagcgtgtccca

SEQ ID NO: 1059198 - DNA, 25 bp, Homo sapien
aaactggcactacatggatggcggg

SEQ ID NO: 1059199 - DNA, 25 bp, Homo sapien
gccgtgtgcacaaactggcactaca

SEQ ID NO: 1059200 - DNA, 25 bp, Homo sapien
cctgctggcctacaactctctccct

SEQ ID NO: 1059201 - DNA, 25 bp, Homo sapien
ctcgagtctcccagccacttgccct

SEQ ID NO: 1059202 - DNA, 25 bp, Homo sapien
tttcctgctggcctacaactctctc

SEQ ID NO: 1059203 - DNA, 25 bp, Homo sapien
tgctggcctacaactctctccctgg

SEQ ID NO: 1059204 - DNA, 25 bp, Homo sapien
tcagatccgataaggggctccctct

SEQ ID NO: 1059205 - DNA, 25 bp, Homo sapien
cagatccgataaggggctccctctt

SEQ ID NO: 1059206 - DNA, 25 bp, Homo sapien
caactgagatggcacgtgagacaaa

SEQ ID NO: 1059207 - DNA, 25 bp, Homo sapien
ttggcaaactatccagcacggtgag

SEQ ID NO: 1059208 - DNA, 25 bp, Homo sapien
caaaaggcgccaagtagtaccagag

SEQ ID NO: 1059209 - DNA, 25 bp, Homo sapien
tgaaccctttgacaggaacacagtg

SEQ ID NO: 1059210 - DNA, 25 bp, Homo sapien
tagtatatgtgctgctgaggcgagc

SEQ ID NO: 1059211 - DNA, 25 bp, Homo sapien
aatcttctctgtatcgttccaattt

SEQ ID NO: 1059212 - DNA, 25 bp, Homo sapien
tatggaacgcttcacgaatctgcat

SEQ ID NO: 1059213 - DNA, 25 bp, Homo sapien
gtcatccttgcgcaggggccatgct

SEQ ID NO: 1059214 - DNA, 25 bp, Homo sapien
tggtgcctctggatagccctatgtt

SEQ ID NO: 1059215 - DNA, 25 bp, Homo sapien
ggatagccctatgttggtgtacagg

SEQ ID NO: 1059216 - DNA, 25 bp, Homo sapien
tctggatagccctatgttggtgtac

SEQ ID NO: 1059217 - DNA, 25 bp, Homo sapien
tgcctctggatagccctatgttggt

SEQ ID NO: 1059218 - DNA, 25 bp, Homo sapien
tgcggtggacgatacaggggcctga

SEQ ID NO: 1059219 - DNA, 25 bp, Homo sapien
gcggtggacgatacaggggcctgac

SEQ ID NO: 1059220 - DNA, 25 bp, Homo sapien
ttgcggtggacgatacaggggcctg

SEQ ID NO: 1059221 - DNA, 25 bp, Homo sapien
ccagaacactcagccatgacatatt

SEQ ID NO: 1059222 - DNA, 25 bp, Homo sapien
gccatgacatattaataccctgcaa

SEQ ID NO: 1059223 - DNA, 25 bp, Homo sapien
agcacattcttaccttgccacgcag

SEQ ID NO: 1059224 - DNA, 25 bp, Homo sapien
tgcagactcaccaagtcgcacttgt

SEQ ID NO: 1059225 - DNA, 25 bp, Homo sapien
ctttcatctgcttgggaggaagtct

SEQ ID NO: 1059226 - DNA, 25 bp, Homo sapien
tctgccccctaatcctttcatctgc

SEQ ID NO: 1059227 - DNA, 25 bp, Homo sapien
ctctgccccctaatcctttcatctg

SEQ ID NO: 1059228 - DNA, 25 bp, Homo sapien
ggaggaagtctgggtccaaccagga

SEQ ID NO: 1059229 - DNA, 25 bp, Homo sapien
gccacaggatggacattcaggatta

SEQ ID NO: 1059230 - DNA, 25 bp, Homo sapien
cacaggatggacattcaggattatg

SEQ ID NO: 1059231 - DNA, 25 bp, Homo sapien
gggaaagtagctcatcctgatctca

SEQ ID NO: 1059232 - DNA, 25 bp, Homo sapien
aaagtagctcatcctgatctcagga

SEQ ID NO: 1059233 - DNA, 25 bp, Homo sapien
caatgttgtcatctcgaggtgttca

SEQ ID NO: 1059234 - DNA, 25 bp, Homo sapien
tgcctaggactctgccttccgcttg

SEQ ID NO: 1059235 - DNA, 25 bp, Homo sapien
gacttatccatttacacagtgccta

SEQ ID NO: 1059236 - DNA, 25 bp, Homo sapien
gaggattaaatggatagacttatcc

SEQ ID NO: 1059237 - DNA, 25 bp, Homo sapien
gaaaggacacaacatcaacaggcag

SEQ ID NO: 1059238 - DNA, 25 bp, Homo sapien
tttaaggagaactcacagggccagt

SEQ ID NO: 1059239 - DNA, 25 bp, Homo sapien
tcttccaggtctacagcttgagcgc

SEQ ID NO: 1059240 - DNA, 25 bp, Homo sapien
tgggcacgagcataaagcacctggc

SEQ ID NO: 1059241 - DNA, 25 bp, Homo sapien
tacacagagtacgtaacatagcact

SEQ ID NO: 1059242 - DNA, 25 bp, Homo sapien
tctatggctagaggtccacagcggg

SEQ ID NO: 1059243 - DNA, 25 bp, Homo sapien
gcactctgtttacgtgaagtccaag

SEQ ID NO: 1059244 - DNA, 25 bp, Homo sapien
ccccgtctgggtggcggttacatga

SEQ ID NO: 1059245 - DNA, 25 bp, Homo sapien
gtggccgatgatggggaaaaaccac

SEQ ID NO: 1059246 - DNA, 25 bp, Homo sapien
cccgaatgactcctgtggatgtgca

SEQ ID NO: 1059247 - DNA, 25 bp, Homo sapien
gaagtcccgaatgactcctgtggat

SEQ ID NO: 1059248 - DNA, 25 bp, Homo sapien
ccgcgaagtcccgaatgactcctgt

SEQ ID NO: 1059249 - DNA, 25 bp, Homo sapien
gggcccgcgaagtcccgaatgactc

SEQ ID NO: 1059250 - DNA, 25 bp, Homo sapien
tctaatccctacccatgtctcggta

SEQ ID NO: 1059251 - DNA, 25 bp, Homo sapien
ccatgtctcggtaccccaggggtgg

SEQ ID NO: 1059252 - DNA, 25 bp, Homo sapien
tacttaagaatccttctggccacac

SEQ ID NO: 1059253 - DNA, 25 bp, Homo sapien
ggcaaagggctgggtcagttactta

SEQ ID NO: 1059254 - DNA, 25 bp, Homo sapien
aggctttccaaaggccatgttgtcc

SEQ ID NO: 1059255 - DNA, 25 bp, Homo sapien
ttggcaggctttccaaaggccatgt

SEQ ID NO: 1059256 - DNA, 25 bp, Homo sapien
caggctttccaaaggccatgttgtc

SEQ ID NO: 1059257 - DNA, 25 bp, Homo sapien
ggcaggctttccaaaggccatgttg

SEQ ID NO: 1059258 - DNA, 25 bp, Homo sapien
ctagagggagacagatctgggtgtg

SEQ ID NO: 1059259 - DNA, 25 bp, Homo sapien
tgaagagcagtctggcagcgaacac

SEQ ID NO: 1059260 - DNA, 25 bp, Homo sapien
catttgttcccaaagggcaggagag

SEQ ID NO: 1059261 - DNA, 25 bp, Homo sapien
gctactgcttggaaaatgatgccct

SEQ ID NO: 1059262 - DNA, 25 bp, Homo sapien
caaggtgggtgagaattgctgttcc

SEQ ID NO: 1059263 - DNA, 25 bp, Homo sapien
aagatggggtgtgagaaggcttcct

SEQ ID NO: 1059264 - DNA, 25 bp, Homo sapien
gactaagatggggtgtgagaaggct

SEQ ID NO: 1059265 - DNA, 25 bp, Homo sapien
aacggactaagatggggtgtgagaa

SEQ ID NO: 1059266 - DNA, 25 bp, Homo sapien
cagaacggactaagatggggtgtga

SEQ ID NO: 1059267 - DNA, 25 bp, Homo sapien
aggactgtccagtcttcggaactgt

SEQ ID NO: 1059268 - DNA, 25 bp, Homo sapien
ggcaagtgttatgtggcagtcaact

SEQ ID NO: 1059269 - DNA, 25 bp, Homo sapien
tatgctctgaaagtctgtgtcccca

SEQ ID NO: 1059270 - DNA, 25 bp, Homo sapien
gggacacagtggaaaggcacctcag

SEQ ID NO: 1059271 - DNA, 25 bp, Homo sapien
agctgggtgctgagatgtacagtaa

SEQ ID NO: 1059272 - DNA, 25 bp, Homo sapien
tgctgagatgtacagtaagccagat

SEQ ID NO: 1059273 - DNA, 25 bp, Homo sapien
tcagctctacgcacgtcctctgagg

SEQ ID NO: 1059274 - DNA, 25 bp, Homo sapien
tttgtgccctcagctctacgcacgt

SEQ ID NO: 1059275 - DNA, 25 bp, Homo sapien
acagccgtgtcccatgcgttgggcc

SEQ ID NO: 1059276 - DNA, 25 bp, Homo sapien
gcgttgggcccgctagcatagacct

SEQ ID NO: 1059277 - DNA, 25 bp, Homo sapien
tgtactcctcagaggcgtcgtgcac

SEQ ID NO: 1059278 - DNA, 25 bp, Homo sapien
cctgagcagggtccaacttccagta

SEQ ID NO: 1059279 - DNA, 25 bp, Homo sapien
tccccacctggggagtgccggtgcc

SEQ ID NO: 1059280 - DNA, 25 bp, Homo sapien
ccccacctggggagtgccggtgccg

SEQ ID NO: 1059281 - DNA, 25 bp, Homo sapien
ccacgtgcgagtggcagttgtcaca

SEQ ID NO: 1059282 - DNA, 25 bp, Homo sapien
ttcagggccaatgccacgtgcgagt

SEQ ID NO: 1059283 - DNA, 25 bp, Homo sapien
ttgtagcgcatcagattcagggcca

SEQ ID NO: 1059284 - DNA, 25 bp, Homo sapien
gcagaagaagcagagcgtcaccata

SEQ ID NO: 1059285 - DNA, 25 bp, Homo sapien
cctgaggagccggaatcattgcctg

SEQ ID NO: 1059286 - DNA, 25 bp, Homo sapien
cctggctgactgaaggacgctagga

SEQ ID NO: 1059287 - DNA, 25 bp, Homo sapien
tcactttaccggagcacagggatcc

SEQ ID NO: 1059288 - DNA, 25 bp, Homo sapien
taggatccttgggagagcagcctct

SEQ ID NO: 1059289 - DNA, 25 bp, Homo sapien
tgggcgactcactcaatctctctgc

SEQ ID NO: 1059290 - DNA, 25 bp, Homo sapien
tcaatctctctgcctaggaagggac

SEQ ID NO: 1059291 - DNA, 25 bp, Homo sapien
catgctgtggcgaccatgggcgact

SEQ ID NO: 1059292 - DNA, 25 bp, Homo sapien
ctatgctggctcacgagtctgggct

SEQ ID NO: 1059293 - DNA, 25 bp, Homo sapien
aacttggccaatcaaggaagcaggc

SEQ ID NO: 1059294 - DNA, 25 bp, Homo sapien
gaattgcagtttgggtatggaagcc

SEQ ID NO: 1059295 - DNA, 25 bp, Homo sapien
aaagcttggagaggcggccagatca

SEQ ID NO: 1059296 - DNA, 25 bp, Homo sapien
tccgcgctcctggtgatttactgac

SEQ ID NO: 1059297 - DNA, 25 bp, Homo sapien
agagaaaggagcgagcataggtggg

SEQ ID NO: 1059298 - DNA, 25 bp, Homo sapien
ggagcgagcataggtgggcagggcc

SEQ ID NO: 1059299 - DNA, 25 bp, Homo sapien
agaaaggagcgagcataggtgggca

SEQ ID NO: 1059300 - DNA, 25 bp, Homo sapien
aaaggagcgagcataggtgggcagg

SEQ ID NO: 1059301 - DNA, 25 bp, Homo sapien
gcagccaggtcttcacgaaggcccc

SEQ ID NO: 1059302 - DNA, 25 bp, Homo sapien
cggaggttaaagaccaggctgacgg

SEQ ID NO: 1059303 - DNA, 25 bp, Homo sapien
agccaggtcttcacgaaggccccaa

SEQ ID NO: 1059304 - DNA, 25 bp, Homo sapien
aggttaaagaccaggctgacggtga

SEQ ID NO: 1059305 - DNA, 25 bp, Homo sapien
cacggttactctggcacttgtcagg

SEQ ID NO: 1059306 - DNA, 25 bp, Homo sapien
ttctagaggccagtggtgaaggtcc

SEQ ID NO: 1059307 - DNA, 25 bp, Homo sapien
tctggaaccaaaagggatggcggct

SEQ ID NO: 1059308 - DNA, 25 bp, Homo sapien
gacacgttaagtgtacccggtgcac

SEQ ID NO: 1059309 - DNA, 25 bp, Homo sapien
aaaactctttattgtcctgcccagg

SEQ ID NO: 1059310 - DNA, 25 bp, Homo sapien
gagtcaaaactctttattgtcctgc

SEQ ID NO: 1059311 - DNA, 25 bp, Homo sapien
aactctttattgtcctgcccaggga

SEQ ID NO: 1059312 - DNA, 25 bp, Homo sapien
tctttattgtcctgcccagggagcc

SEQ ID NO: 1059313 - DNA, 25 bp, Homo sapien
tggacgcagactcaaccatggtgct

SEQ ID NO: 1059314 - DNA, 25 bp, Homo sapien
tgtcaagggtaatagggtcccaaga

SEQ ID NO: 1059315 - DNA, 25 bp, Homo sapien
cccaagaataccaagacgctatgag

SEQ ID NO: 1059316 - DNA, 25 bp, Homo sapien
ccatggtgctggcaactagaccctt

SEQ ID NO: 1059317 - DNA, 25 bp, Homo sapien
agcaggccctctagaacgggtagca

SEQ ID NO: 1059318 - DNA, 25 bp, Homo sapien
gggctgataggaactcgctttgaaa

SEQ ID NO: 1059319 - DNA, 25 bp, Homo sapien
aaacacctcggcagggcctgatgca

SEQ ID NO: 1059320 - DNA, 25 bp, Homo sapien
gcctgatgcaaaaccgggcctggac

SEQ ID NO: 1059321 - DNA, 25 bp, Homo sapien
cagtatgggaggacaccttcgcagg

SEQ ID NO: 1059322 - DNA, 25 bp, Homo sapien
gaagaaggctgactcaacaggcagc

SEQ ID NO: 1059323 - DNA, 25 bp, Homo sapien
cagccgagtttcagggaccgggaga

SEQ ID NO: 1059324 - DNA, 25 bp, Homo sapien
agaagagccgtgagggaagaaggct

SEQ ID NO: 1059325 - DNA, 25 bp, Homo sapien
acacggtgggacagacccattggtc

SEQ ID NO: 1059326 - DNA, 25 bp, Homo sapien
aggtaggagtttggtcttctctgct

SEQ ID NO: 1059327 - DNA, 25 bp, Homo sapien
ggtgctggagggtgctcaggatacc

SEQ ID NO: 1059328 - DNA, 25 bp, Homo sapien
gggaccctggcaccgacacgtgtta

SEQ ID NO: 1059329 - DNA, 25 bp, Homo sapien
cacagtgactccggaaagaaagcat

SEQ ID NO: 1059330 - DNA, 25 bp, Homo sapien
ggcatagatatggtcgcacatgcac

SEQ ID NO: 1059331 - DNA, 25 bp, Homo sapien
catagatatggtcgcacatgcacac

SEQ ID NO: 1059332 - DNA, 25 bp, Homo sapien
tagatatggtcgcacatgcacacag

SEQ ID NO: 1059333 - DNA, 25 bp, Homo sapien
gtaggcatagatatggtcgcacatg

SEQ ID NO: 1059334 - DNA, 25 bp, Homo sapien
aggactgcagcgatggaacacacag

SEQ ID NO: 1059335 - DNA, 25 bp, Homo sapien
gccacacaggactgcagcgatggaa

SEQ ID NO: 1059336 - DNA, 25 bp, Homo sapien
actgcagcgatggaacacacagaca

SEQ ID NO: 1059337 - DNA, 25 bp, Homo sapien
ggactgcagcgatggaacacacaga

SEQ ID NO: 1059338 - DNA, 25 bp, Homo sapien
gcagaccgagggtcaggtcaagccc

SEQ ID NO: 1059339 - DNA, 25 bp, Homo sapien
ttggccgggtatgggtagggtgcca

SEQ ID NO: 1059340 - DNA, 25 bp, Homo sapien
catcctagaaccaacagcccttttc

SEQ ID NO: 1059341 - DNA, 25 bp, Homo sapien
ggggcagaccgagggtcaggtcaag

SEQ ID NO: 1059342 - DNA, 25 bp, Homo sapien
gctggggctgtgccccagctgggca

SEQ ID NO: 1059343 - DNA, 25 bp, Homo sapien
agctggggctgtgccccagctgggc

SEQ ID NO: 1059344 - DNA, 25 bp, Homo sapien
cagctggggctgtgccccagctggg

SEQ ID NO: 1059345 - DNA, 25 bp, Homo sapien
ctggggctgtgccccagctgggcac

SEQ ID NO: 1059346 - DNA, 25 bp, Homo sapien
aaagcccctcttgcgatgggtggcc

SEQ ID NO: 1059347 - DNA, 25 bp, Homo sapien
aggacgccagcaatggcctcctgct

SEQ ID NO: 1059348 - DNA, 25 bp, Homo sapien
cagtctcaggctttggcccatgcgc

SEQ ID NO: 1059349 - DNA, 25 bp, Homo sapien
catctcgttggaggacgccagcaat

SEQ ID NO: 1059350 - DNA, 25 bp, Homo sapien
attgtggtgccgctgggagcgtgct

SEQ ID NO: 1059351 - DNA, 25 bp, Homo sapien
ccagggtctgccactgaggcccgga

SEQ ID NO: 1059352 - DNA, 25 bp, Homo sapien
tcagagccgaagtgggcattgtggt

SEQ ID NO: 1059353 - DNA, 25 bp, Homo sapien
gacgctcggacaaggtcagagccga

SEQ ID NO: 1059354 - DNA, 25 bp, Homo sapien
ccctggtgctcttcttcctgcgcat

SEQ ID NO: 1059355 - DNA, 25 bp, Homo sapien
ccctggacggcacatggcttgccct

SEQ ID NO: 1059356 - DNA, 25 bp, Homo sapien
cagcgccctggacggcacatggctt

SEQ ID NO: 1059357 - DNA, 25 bp, Homo sapien
tggacggcacatggcttgccctgcc

SEQ ID NO: 1059358 - DNA, 25 bp, Homo sapien
agccagcgccctggacggcacatgg

SEQ ID NO: 1059359 - DNA, 25 bp, Homo sapien
tcagcctccctgtcgtggcctggag

SEQ ID NO: 1059360 - DNA, 25 bp, Homo sapien
tccttctctttcacagcagcctcag

SEQ ID NO: 1059361 - DNA, 25 bp, Homo sapien
cttctctttcacagcagcctcagcc

SEQ ID NO: 1059362 - DNA, 25 bp, Homo sapien
cctcagcctccctgtcgtggcctgg

SEQ ID NO: 1059363 - DNA, 25 bp, Homo sapien
ctcctgaggggcctcatcaatggtg

SEQ ID NO: 1059364 - DNA, 25 bp, Homo sapien
ctcagtctccctgagcctctcctga

SEQ ID NO: 1059365 - DNA, 25 bp, Homo sapien
ctgaggggcctcatcaatggtgagc

SEQ ID NO: 1059366 - DNA, 25 bp, Homo sapien
agtctccctgagcctctcctgaggg

SEQ ID NO: 1059367 - DNA, 25 bp, Homo sapien
cagattcagaagttcccttagaggc

SEQ ID NO: 1059368 - DNA, 25 bp, Homo sapien
gctgagattccaggttatgcaccat

SEQ ID NO: 1059369 - DNA, 25 bp, Homo sapien
gagattccaggttatgcaccatcat

SEQ ID NO: 1059370 - DNA, 25 bp, Homo sapien
cacttcaccccttaatagccagatt

SEQ ID NO: 1059371 - DNA, 25 bp, Homo sapien
gccagctaccccagtttcaggttta

SEQ ID NO: 1059372 - DNA, 25 bp, Homo sapien
ggtcaaaggtcatattggggtcaga

SEQ ID NO: 1059373 - DNA, 25 bp, Homo sapien
gaggtcatagggctccagccagcta

SEQ ID NO: 1059374 - DNA, 25 bp, Homo sapien
tagaggtcacagtacgggggctggt

SEQ ID NO: 1059375 - DNA, 25 bp, Homo sapien
cagaaggcgatgggaaatcaggtcc

SEQ ID NO: 1059376 - DNA, 25 bp, Homo sapien
cttcctgggcctgggacgcctcctc

SEQ ID NO: 1059377 - DNA, 25 bp, Homo sapien
tgggacgcctcctcaggatctgaag

SEQ ID NO: 1059378 - DNA, 25 bp, Homo sapien
ggcctgggacgcctcctcaggatct

SEQ ID NO: 1059379 - DNA, 25 bp, Homo sapien
ctgggcctgggacgcctcctcagga

SEQ ID NO: 1059380 - DNA, 25 bp, Homo sapien
tgctctccccccgacgcgggctcca

SEQ ID NO: 1059381 - DNA, 25 bp, Homo sapien
gcctcctcggcacagacctgttggt

SEQ ID NO: 1059382 - DNA, 25 bp, Homo sapien
tcagcctcctcggcacagacctgtt

SEQ ID NO: 1059383 - DNA, 25 bp, Homo sapien
ggtcagcctcctcggcacagacctg

SEQ ID NO: 1059384 - DNA, 25 bp, Homo sapien
gcccggagtccgctccggatgttga

SEQ ID NO: 1059385 - DNA, 25 bp, Homo sapien
agtccgctccggatgttgagagcag

SEQ ID NO: 1059386 - DNA, 25 bp, Homo sapien
gcagccacgggccactcccgcctac

SEQ ID NO: 1059387 - DNA, 25 bp, Homo sapien
gccctgggtcgcgggcggctcgcag

SEQ ID NO: 1059388 - DNA, 25 bp, Homo sapien
gctgctgagcatgcggtcgagagag

SEQ ID NO: 1059389 - DNA, 25 bp, Homo sapien
tggaggagttaaggctggacaccga

SEQ ID NO: 1059390 - DNA, 25 bp, Homo sapien
agttaaggctggacaccgaggagct

SEQ ID NO: 1059391 - DNA, 25 bp, Homo sapien
cattctccaggatctgggacgcggc

SEQ ID NO: 1059392 - DNA, 25 bp, Homo sapien
gcgcggaggcttcagacccgggtca

SEQ ID NO: 1059393 - DNA, 25 bp, Homo sapien
tgcggacgggagtgggtgggagtca

SEQ ID NO: 1059394 - DNA, 25 bp, Homo sapien
ggctacgcatcggaacgggtccacc

SEQ ID NO: 1059395 - DNA, 25 bp, Homo sapien
ctgcagcggtgggtcccgcggcgag

SEQ ID NO: 1059396 - DNA, 25 bp, Homo sapien
tccgcgtcgcctgacaggctcatct

SEQ ID NO: 1059397 - DNA, 25 bp, Homo sapien
tgacaggctcatctggctgccgctc

SEQ ID NO: 1059398 - DNA, 25 bp, Homo sapien
cctccgcgtcgcctgacaggctcat

SEQ ID NO: 1059399 - DNA, 25 bp, Homo sapien
acaggctcatctggctgccgctcag

SEQ ID NO: 1059400 - DNA, 25 bp, Homo sapien
gccgggcggcggccaggccctggca

SEQ ID NO: 1059401 - DNA, 25 bp, Homo sapien
ggcgccgggcggcggccaggccctg

SEQ ID NO: 1059402 - DNA, 25 bp, Homo sapien
ccgggcggcggccaggccctggcac

SEQ ID NO: 1059403 - DNA, 25 bp, Homo sapien
ggtccgagcggcggcgccgggcggc

SEQ ID NO: 1059404 - DNA, 25 bp, Homo sapien
acgaggaggccgagaccctgtgaat

SEQ ID NO: 1059405 - DNA, 25 bp, Homo sapien
taagcgctttacagggattgtctcg

SEQ ID NO: 1059406 - DNA, 25 bp, Homo sapien
gcacgcctcccaataacgctgttgt

SEQ ID NO: 1059407 - DNA, 25 bp, Homo sapien
gattgtctcgcttaatcgcacgcct

SEQ ID NO: 1059408 - DNA, 25 bp, Homo sapien
ttatccgggaggaggtagcttttga

SEQ ID NO: 1059409 - DNA, 25 bp, Homo sapien
atccgggaggaggtagcttttgacg

SEQ ID NO: 1059410 - DNA, 25 bp, Homo sapien
cgggaggaggtagcttttgacgtag

SEQ ID NO: 1059411 - DNA, 25 bp, Homo sapien
tatccgggaggaggtagcttttgac

SEQ ID NO: 1059412 - DNA, 25 bp, Homo sapien
cggagagtctcgttgaaaaccggat

SEQ ID NO: 1059413 - DNA, 25 bp, Homo sapien
tctcgttgaaaaccggattcagatt

SEQ ID NO: 1059414 - DNA, 25 bp, Homo sapien
accggattcagattccgtttcttca

SEQ ID NO: 1059415 - DNA, 25 bp, Homo sapien
tcttcaccgccgtcttgcgcttgct

SEQ ID NO: 1059416 - DNA, 25 bp, Homo sapien
taccgcgttcctaccatgatggaat

SEQ ID NO: 1059417 - DNA, 25 bp, Homo sapien
gggaaccgcatcgtggtcacagcct

SEQ ID NO: 1059418 - DNA, 25 bp, Homo sapien
cacgaggctgacaacactggataac

SEQ ID NO: 1059419 - DNA, 25 bp, Homo sapien
gatcctccgggcaatgacgttactg

SEQ ID NO: 1059420 - DNA, 25 bp, Homo sapien
ccagaaagatgttgcgacccaggct

SEQ ID NO: 1059421 - DNA, 25 bp, Homo sapien
ggctttcgcggtgccacacagacag

SEQ ID NO: 1059422 - DNA, 25 bp, Homo sapien
ggcacttcaacttcgcccagaaaga

SEQ ID NO: 1059423 - DNA, 25 bp, Homo sapien
acaggctcagcacgcggccctgaag

SEQ ID NO: 1059424 - DNA, 25 bp, Homo sapien
gccaggtgggctcagagccccagtc

SEQ ID NO: 1059425 - DNA, 25 bp, Homo sapien
aggtgggctcagagccccagtccca

SEQ ID NO: 1059426 - DNA, 25 bp, Homo sapien
ggagccaggtgggctcagagcccca

SEQ ID NO: 1059427 - DNA, 25 bp, Homo sapien
tgcagggggagccaggtgggctcag

SEQ ID NO: 1059428 - DNA, 25 bp, Homo sapien
ctggtggggtaaatgcaggagaccc

SEQ ID NO: 1059429 - DNA, 25 bp, Homo sapien
ggccgcaggtctccccacgcggcct

SEQ ID NO: 1059430 - DNA, 25 bp, Homo sapien
gggtgcggctagaagagacggcggg

SEQ ID NO: 1059431 - DNA, 25 bp, Homo sapien
cgagaggcgggcttatcgtggagca

SEQ ID NO: 1059432 - DNA, 25 bp, Homo sapien
acgtacttgagggacagggcgagta

SEQ ID NO: 1059433 - DNA, 25 bp, Homo sapien
ctcggaaggtcgtcgggagagggtg

SEQ ID NO: 1059434 - DNA, 25 bp, Homo sapien
ccgcggctcggaaggtcgtcgggag

SEQ ID NO: 1059435 - DNA, 25 bp, Homo sapien
cagggcgagtaacccgcggctcgga

SEQ ID NO: 1059436 - DNA, 25 bp, Homo sapien
ggactggagtctcccgcttttcagg

SEQ ID NO: 1059437 - DNA, 25 bp, Homo sapien
caggcccgcacacggatggagtcca

SEQ ID NO: 1059438 - DNA, 25 bp, Homo sapien
gagtctcccgcttttcagggcgtgt

SEQ ID NO: 1059439 - DNA, 25 bp, Homo sapien
ctcaggcccgcacacggatggagtc

SEQ ID NO: 1059440 - DNA, 25 bp, Homo sapien
aagtgtccagggatcctgcccgcag

SEQ ID NO: 1059441 - DNA, 25 bp, Homo sapien
tacgtaagtgtccagggatcctgcc

SEQ ID NO: 1059442 - DNA, 25 bp, Homo sapien
gcagcggcaggaggtcccgagcctc

SEQ ID NO: 1059443 - DNA, 25 bp, Homo sapien
cattgtacgtaagtgtccagggatc

SEQ ID NO: 1059444 - DNA, 25 bp, Homo sapien
tttcaacaagtcctataggcgccag

SEQ ID NO: 1059445 - DNA, 25 bp, Homo sapien
gaagtcccctagaagcttacactga

SEQ ID NO: 1059446 - DNA, 25 bp, Homo sapien
cccaggctgcgtgatcaaaggttga

SEQ ID NO: 1059447 - DNA, 25 bp, Homo sapien
taggcgccagtcacgctgaaatgca

SEQ ID NO: 1059448 - DNA, 25 bp, Homo sapien
ataatgttacaactcctattcacag

SEQ ID NO: 1059449 - DNA, 25 bp, Homo sapien
gctattctcgctggctcagtgactt

SEQ ID NO: 1059450 - DNA, 25 bp, Homo sapien
gtctctgaaatgcagttctgctatt

SEQ ID NO: 1059451 - DNA, 25 bp, Homo sapien
gggctgcagagcaatgtctctgaaa

SEQ ID NO: 1059452 - DNA, 25 bp, Homo sapien
aaaagttacagctcctggccgggcg

SEQ ID NO: 1059453 - DNA, 25 bp, Homo sapien
cacactccctagagtcatccagtca

SEQ ID NO: 1059454 - DNA, 25 bp, Homo sapien
aggtggcctggcatcaggtgacccc

SEQ ID NO: 1059455 - DNA, 25 bp, Homo sapien
tgccctgggacctttgcaccagcct

SEQ ID NO: 1059456 - DNA, 25 bp, Homo sapien
aggcccaaagccatcgtacaccatg

SEQ ID NO: 1059457 - DNA, 25 bp, Homo sapien
acaacccttgtacgctggcggctgg

SEQ ID NO: 1059458 - DNA, 25 bp, Homo sapien
gtcccagagggagagctcggcacaa

SEQ ID NO: 1059459 - DNA, 25 bp, Homo sapien
ccatggtgtgattgaacacagggct

SEQ ID NO: 1059460 - DNA, 25 bp, Homo sapien
tggtcccagattatgcactgtcccc

SEQ ID NO: 1059461 - DNA, 25 bp, Homo sapien
gagggcatgatcacactggacacct

SEQ ID NO: 1059462 - DNA, 25 bp, Homo sapien
aaaggacagagaggtatccagggcc

SEQ ID NO: 1059463 - DNA, 25 bp, Homo sapien
agttctcagtagatatcaaagctca

SEQ ID NO: 1059464 - DNA, 25 bp, Homo sapien
ctgcttctcctcaggtgtggaatcc

SEQ ID NO: 1059465 - DNA, 25 bp, Homo sapien
ttctgaggggtagaaggccatccac

SEQ ID NO: 1059466 - DNA, 25 bp, Homo sapien
ttctcctcaggtgtggaatccatcc

SEQ ID NO: 1059467 - DNA, 25 bp, Homo sapien
gtagaaggccatccacccattcgca

SEQ ID NO: 1059468 - DNA, 25 bp, Homo sapien
ggtccagagagagaggcttggtggg

SEQ ID NO: 1059469 - DNA, 25 bp, Homo sapien
actttattgactttagccaagggca

SEQ ID NO: 1059470 - DNA, 25 bp, Homo sapien
attgactttagccaagggcaggccc

SEQ ID NO: 1059471 - DNA, 25 bp, Homo sapien
aagggcaggccctgagatgggggtc

SEQ ID NO: 1059472 - DNA, 25 bp, Homo sapien
gattccgaacggattccagatccca

SEQ ID NO: 1059473 - DNA, 25 bp, Homo sapien
tattccggatccctagatcccgtgg

SEQ ID NO: 1059474 - DNA, 25 bp, Homo sapien
gatcccgtgggagattctccgattc

SEQ ID NO: 1059475 - DNA, 25 bp, Homo sapien
cggattccagatcccaagattcctg

SEQ ID NO: 1059476 - DNA, 25 bp, Homo sapien
tatatctccaaaggtgccaggcgtg

SEQ ID NO: 1059477 - DNA, 25 bp, Homo sapien
tttaccacctatgacgctgaccacg

SEQ ID NO: 1059478 - DNA, 25 bp, Homo sapien
tatgcagtgtctgaggctgccgccc

SEQ ID NO: 1059479 - DNA, 25 bp, Homo sapien
caaatatggcattgactgggcctca

SEQ ID NO: 1059480 - DNA, 25 bp, Homo sapien
tcctttgtcagatgttggctgggac

SEQ ID NO: 1059481 - DNA, 25 bp, Homo sapien
taccagacgctgtgagtacctggcc

SEQ ID NO: 1059482 - DNA, 25 bp, Homo sapien
acggtgacagcgtgctccatgtgag

SEQ ID NO: 1059483 - DNA, 25 bp, Homo sapien
cagtacccagggtgctgtcttctcc

SEQ ID NO: 1059484 - DNA, 25 bp, Homo sapien
cttgctctctaaaggaagagatagt

SEQ ID NO: 1059485 - DNA, 25 bp, Homo sapien
cgcatacttgctctctaaaggaaga

SEQ ID NO: 1059486 - DNA, 25 bp, Homo sapien
attccccgcatacttgctctctaaa

SEQ ID NO: 1059487 - DNA, 25 bp, Homo sapien
cccgcatacttgctctctaaaggaa

SEQ ID NO: 1059488 - DNA, 25 bp, Homo sapien
ctccagatgtgacagatgtggccag

SEQ ID NO: 1059489 - DNA, 25 bp, Homo sapien
ttccccaacgccatctgcccttagt

SEQ ID NO: 1059490 - DNA, 25 bp, Homo sapien
ttctccagatgtgacagatgtggcc

SEQ ID NO: 1059491 - DNA, 25 bp, Homo sapien
ttagtccaggggaaccactctgggc

SEQ ID NO: 1059492 - DNA, 25 bp, Homo sapien
tcataaaaagcgaccgtggctgcgg

SEQ ID NO: 1059493 - DNA, 25 bp, Homo sapien
aggctgacgagatccaggtgacgaa

SEQ ID NO: 1059494 - DNA, 25 bp, Homo sapien
ggcgccggtgcgagagccttgaagt

SEQ ID NO: 1059495 - DNA, 25 bp, Homo sapien
gctgcagggaacgtggtggaagagt

SEQ ID NO: 1059496 - DNA, 25 bp, Homo sapien
gtgacgtcagcggtccgatcagcca

SEQ ID NO: 1059497 - DNA, 25 bp, Homo sapien
gttcggtgacgtcagcggtccgatc

SEQ ID NO: 1059498 - DNA, 25 bp, Homo sapien
agcggtccgatcagccaatgggcgc

SEQ ID NO: 1059499 - DNA, 25 bp, Homo sapien
cgtcagcggtccgatcagccaatgg

SEQ ID NO: 1059500 - DNA, 25 bp, Homo sapien
tgcgtggaccccgagaagcccccgc

SEQ ID NO: 1059501 - DNA, 25 bp, Homo sapien
gcgtgcgtggaccccgagaagcccc

SEQ ID NO: 1059502 - DNA, 25 bp, Homo sapien
agggcgtgcgtggaccccgagaagc

SEQ ID NO: 1059503 - DNA, 25 bp, Homo sapien
actcaaccccagcactcgagcactt

SEQ ID NO: 1059504 - DNA, 25 bp, Homo sapien
agcactcgagcacttgggcccaagc

SEQ ID NO: 1059505 - DNA, 25 bp, Homo sapien
ccttcgccgggtcatccaactcaac

SEQ ID NO: 1059506 - DNA, 25 bp, Homo sapien
gccgggtcatccaactcaaccccag

SEQ ID NO: 1059507 - DNA, 25 bp, Homo sapien
gggaaacatctaccccatcagggag

SEQ ID NO: 1059508 - DNA, 25 bp, Homo sapien
tcaggatacgtggtgggagtctctc

SEQ ID NO: 1059509 - DNA, 25 bp, Homo sapien
tgcaggtctctttttcccacgtgtg

SEQ ID NO: 1059510 - DNA, 25 bp, Homo sapien
gatgatgatgctagctcgtgcctga

SEQ ID NO: 1059511 - DNA, 25 bp, Homo sapien
tccgctgagccgatgcagaagacag

SEQ ID NO: 1059512 - DNA, 25 bp, Homo sapien
cgctgaagggcaatctgctgggcat

SEQ ID NO: 1059513 - DNA, 25 bp, Homo sapien
cagtagactgccgatgctggcggta

SEQ ID NO: 1059514 - DNA, 25 bp, Homo sapien
taaggccagcatcacataggtccgt

SEQ ID NO: 1059515 - DNA, 25 bp, Homo sapien
cctggatatcaaggtgtgggcctct

SEQ ID NO: 1059516 - DNA, 25 bp, Homo sapien
ggaccccagcgcagaggaatttttg

SEQ ID NO: 1059517 - DNA, 25 bp, Homo sapien
gaagccctggagagcctaacattct

SEQ ID NO: 1059518 - DNA, 25 bp, Homo sapien
tgtcctagaactccagaaccagctg

SEQ ID NO: 1059519 - DNA, 25 bp, Homo sapien
tgagttgggttggagacgggaacag

SEQ ID NO: 1059520 - DNA, 25 bp, Homo sapien
ttattgagttgggttggagacggga

SEQ ID NO: 1059521 - DNA, 25 bp, Homo sapien
tattgagttgggttggagacgggaa

SEQ ID NO: 1059522 - DNA, 25 bp, Homo sapien
cattttttattgagttgggttggag

SEQ ID NO: 1059523 - DNA, 25 bp, Homo sapien
cctggtgcccagttttataagggca

SEQ ID NO: 1059524 - DNA, 25 bp, Homo sapien
tttataagggcagtgaacggtgatg

SEQ ID NO: 1059525 - DNA, 25 bp, Homo sapien
ccactccctggtgcccagttttata

SEQ ID NO: 1059526 - DNA, 25 bp, Homo sapien
gcccagttttataagggcagtgaac

SEQ ID NO: 1059527 - DNA, 25 bp, Homo sapien
ttttgaattgtcagcaactgctgcg

SEQ ID NO: 1059528 - DNA, 25 bp, Homo sapien
agaggcggcagaagttttgaattgt

SEQ ID NO: 1059529 - DNA, 25 bp, Homo sapien
ttgtcagcaactgctgcgccagccg

SEQ ID NO: 1059530 - DNA, 25 bp, Homo sapien
aggcggcagaagttttgaattgtca

SEQ ID NO: 1059531 - DNA, 25 bp, Homo sapien
atttatgagcagacacccagttccg

SEQ ID NO: 1059532 - DNA, 25 bp, Homo sapien
acacagtgtagtggcccccgggaga

SEQ ID NO: 1059533 - DNA, 25 bp, Homo sapien
tatgagcagacacccagttccgggc

SEQ ID NO: 1059534 - DNA, 25 bp, Homo sapien
agacacagtgtagtggcccccggga

SEQ ID NO: 1059535 - DNA, 25 bp, Homo sapien
ggaagcaacggttgttccgagcaca

SEQ ID NO: 1059536 - DNA, 25 bp, Homo sapien
caggaagcaacggttgttccgagca

SEQ ID NO: 1059537 - DNA, 25 bp, Homo sapien
aggaagcaacggttgttccgagcac

SEQ ID NO: 1059538 - DNA, 25 bp, Homo sapien
ccaggaagcaacggttgttccgagc

SEQ ID NO: 1059539 - DNA, 25 bp, Homo sapien
aaaaggtttaggctgctgcacgccc

SEQ ID NO: 1059540 - DNA, 25 bp, Homo sapien
caatggaatccgataaaaggtttag

SEQ ID NO: 1059541 - DNA, 25 bp, Homo sapien
taaatagaacgatttacaatggaat

SEQ ID NO: 1059542 - DNA, 25 bp, Homo sapien
gtttaggctgctgcacgccccttct

SEQ ID NO: 1059543 - DNA, 25 bp, Homo sapien
tgccaggctcatcgtgtgtatacca

SEQ ID NO: 1059544 - DNA, 25 bp, Homo sapien
gaaaggagctcttcagttggagatc

SEQ ID NO: 1059545 - DNA, 25 bp, Homo sapien
ttttaaatccctgtagctccaagcc

SEQ ID NO: 1059546 - DNA, 25 bp, Homo sapien
taggcagtgggttaagccagacccc

SEQ ID NO: 1059547 - DNA, 25 bp, Homo sapien
taagatgataaaggacccaatgcag

SEQ ID NO: 1059548 - DNA, 25 bp, Homo sapien
gtacattccaaaggagcagcctggg

SEQ ID NO: 1059549 - DNA, 25 bp, Homo sapien
gggcccagcttccaatagtgtcaga

SEQ ID NO: 1059550 - DNA, 25 bp, Homo sapien
cataaggactcctaagcgccgaagc

SEQ ID NO: 1059551 - DNA, 25 bp, Homo sapien
gcctgacgctctcattaaaatctat

SEQ ID NO: 1059552 - DNA, 25 bp, Homo sapien
taaaatctatgcagccaagctcggc

SEQ ID NO: 1059553 - DNA, 25 bp, Homo sapien
agctctgcctgacgctctcattaaa

SEQ ID NO: 1059554 - DNA, 25 bp, Homo sapien
gtagcagccggccttgcgaagcctc

SEQ ID NO: 1059555 - DNA, 25 bp, Homo sapien
ggcttctggaatggactgagtccat

SEQ ID NO: 1059556 - DNA, 25 bp, Homo sapien
atggactgagtccatcgtggaaagg

SEQ ID NO: 1059557 - DNA, 25 bp, Homo sapien
tctggaatggactgagtccatcgtg

SEQ ID NO: 1059558 - DNA, 25 bp, Homo sapien
tgaagggggcggtgttggcctggct

SEQ ID NO: 1059559 - DNA, 25 bp, Homo sapien
ccaggccagggtttgggcctaatgg

SEQ ID NO: 1059560 - DNA, 25 bp, Homo sapien
agggcagtggttctcccaaatagga

SEQ ID NO: 1059561 - DNA, 25 bp, Homo sapien
cagggtttgggcctaatggctttga

SEQ ID NO: 1059562 - DNA, 25 bp, Homo sapien
tcccaaataggagacctggggcctg

SEQ ID NO: 1059563 - DNA, 25 bp, Homo sapien
ctgcaccttagaagccgaaggtgct

SEQ ID NO: 1059564 - DNA, 25 bp, Homo sapien
gcctgcaccttagaagccgaaggtg

SEQ ID NO: 1059565 - DNA, 25 bp, Homo sapien
cagcctgcaccttagaagccgaagg

SEQ ID NO: 1059566 - DNA, 25 bp, Homo sapien
tcccagcctgcaccttagaagccga

SEQ ID NO: 1059567 - DNA, 25 bp, Homo sapien
tgagacaccaggctatgtgggcccc

SEQ ID NO: 1059568 - DNA, 25 bp, Homo sapien
caggacttggcactaagctccatgc

SEQ ID NO: 1059569 - DNA, 25 bp, Homo sapien
ttacacatcaggtgtctctggcaca

SEQ ID NO: 1059570 - DNA, 25 bp, Homo sapien
cagcatgccgtcttgctgtggccac

SEQ ID NO: 1059571 - DNA, 25 bp, Homo sapien
aatggttgtagtaattgccaaagcc

SEQ ID NO: 1059572 - DNA, 25 bp, Homo sapien
ccagcacagcaaatggttgtagtaa

SEQ ID NO: 1059573 - DNA, 25 bp, Homo sapien
ccaaagccctcataaagccctccgg

SEQ ID NO: 1059574 - DNA, 25 bp, Homo sapien
attgccaaagccctcataaagccct

SEQ ID NO: 1059575 - DNA, 25 bp, Homo sapien
caaagagaaacaggatctgtcccta

SEQ ID NO: 1059576 - DNA, 25 bp, Homo sapien
aaacaaagagaaacaggatctgtcc

SEQ ID NO: 1059577 - DNA, 25 bp, Homo sapien
aaagagaaacaggatctgtccctac

SEQ ID NO: 1059578 - DNA, 25 bp, Homo sapien
ctgaaacaaagagaaacaggatctg

SEQ ID NO: 1059579 - DNA, 25 bp, Homo sapien
ctgctggcttctccggctttcagag

SEQ ID NO: 1059580 - DNA, 25 bp, Homo sapien
gcttttcccagagctaatacacagg

SEQ ID NO: 1059581 - DNA, 25 bp, Homo sapien
gctctagccaacagtgaggtttctt

SEQ ID NO: 1059582 - DNA, 25 bp, Homo sapien
actggtcagctctagccaacagtga

SEQ ID NO: 1059583 - DNA, 25 bp, Homo sapien
tctgccctaactattgtgtagcctc

SEQ ID NO: 1059584 - DNA, 25 bp, Homo sapien
ggtggggggtgcctggcagccatga

SEQ ID NO: 1059585 - DNA, 25 bp, Homo sapien
tggggggtgcctggcagccatgaag

SEQ ID NO: 1059586 - DNA, 25 bp, Homo sapien
gggtgcctggcagccatgaagcagg

SEQ ID NO: 1059587 - DNA, 25 bp, Homo sapien
gggggtgcctggcagccatgaagca

SEQ ID NO: 1059588 - DNA, 25 bp, Homo sapien
gctgctttcaattcctctgcaactc

SEQ ID NO: 1059589 - DNA, 25 bp, Homo sapien
taaacaaagattctgccaactgtgg

SEQ ID NO: 1059590 - DNA, 25 bp, Homo sapien
tggaaacttcagtccctcaggctgg

SEQ ID NO: 1059591 - DNA, 25 bp, Homo sapien
aaggaaggggataggcagctttgac

SEQ ID NO: 1059592 - DNA, 25 bp, Homo sapien
gtgccagccctgtcggtgctgctca

SEQ ID NO: 1059593 - DNA, 25 bp, Homo sapien
cagaccttcatagcctctcttgtca

SEQ ID NO: 1059594 - DNA, 25 bp, Homo sapien
gttggggtcccagtaggaaggctca

SEQ ID NO: 1059595 - DNA, 25 bp, Homo sapien
gccaaccacatagccttgggaccag

SEQ ID NO: 1059596 - DNA, 25 bp, Homo sapien
gacatagctagagcgcagagttcct

SEQ ID NO: 1059597 - DNA, 25 bp, Homo sapien
cacacaattggatagtgacatagct

SEQ ID NO: 1059598 - DNA, 25 bp, Homo sapien
ccgggcagagctttctcagttgtat

SEQ ID NO: 1059599 - DNA, 25 bp, Homo sapien
cagagttcctgattccaagtcacct

SEQ ID NO: 1059600 - DNA, 25 bp, Homo sapien
ttcgagacaagtctgggctacatgg

SEQ ID NO: 1059601 - DNA, 25 bp, Homo sapien
agttcgagacaagtctgggctacat

SEQ ID NO: 1059602 - DNA, 25 bp, Homo sapien
cgagacaagtctgggctacatggca

SEQ ID NO: 1059603 - DNA, 25 bp, Homo sapien
caaaacctcatctctacaaaaaaat

SEQ ID NO: 1059604 - DNA, 25 bp, Homo sapien
gaccacacagtgtgtttgtgtattg

SEQ ID NO: 1059605 - DNA, 25 bp, Homo sapien
cagtgtgtttgtgtattgccctgaa

SEQ ID NO: 1059606 - DNA, 25 bp, Homo sapien
tgtttgtgtattgccctgaagtgtc

SEQ ID NO: 1059607 - DNA, 25 bp, Homo sapien
tattgccctgaagtgtcaacaaaac

SEQ ID NO: 1059608 - DNA, 25 bp, Homo sapien
cactgctcccgaccctactaatcaa

SEQ ID NO: 1059609 - DNA, 25 bp, Homo sapien
gctcccgaccctactaatcaattta

SEQ ID NO: 1059610 - DNA, 25 bp, Homo sapien
aaaatggacaagctcctaggaaaag

SEQ ID NO: 1059611 - DNA, 25 bp, Homo sapien
aatactgtgccagttaatttgagga

SEQ ID NO: 1059612 - DNA, 25 bp, Homo sapien
taaatttcctattcttggtggctgt

SEQ ID NO: 1059613 - DNA, 25 bp, Homo sapien
gcccagcaggatggctcaatgcctg

SEQ ID NO: 1059614 - DNA, 25 bp, Homo sapien
ggtatgatggcacatacccatattc

SEQ ID NO: 1059615 - DNA, 25 bp, Homo sapien
gtcagatttatgaatgtggcccagc

SEQ ID NO: 1059616 - DNA, 25 bp, Homo sapien
cctccagaccactcaggaaatattc

SEQ ID NO: 1059617 - DNA, 25 bp, Homo sapien
ttccctccagaccactcaggaaata

SEQ ID NO: 1059618 - DNA, 25 bp, Homo sapien
cagaccactcaggaaatattctttg

SEQ ID NO: 1059619 - DNA, 25 bp, Homo sapien
tccagaccactcaggaaatattctt

SEQ ID NO: 1059620 - DNA, 25 bp, Homo sapien
actgcatcctgttaatgttcaaatt

SEQ ID NO: 1059621 - DNA, 25 bp, Homo sapien
gaaacaagtcccagacatcatatca

SEQ ID NO: 1059622 - DNA, 25 bp, Homo sapien
ttcagacaaggttgatacattgatt

SEQ ID NO: 1059623 - DNA, 25 bp, Homo sapien
tggtttacatagcttctatgtctcc

SEQ ID NO: 1059624 - DNA, 25 bp, Homo sapien
gagaacctgtggtcagattgtacag

SEQ ID NO: 1059625 - DNA, 25 bp, Homo sapien
ttgagaacctgtggtcagattgtac

SEQ ID NO: 1059626 - DNA, 25 bp, Homo sapien
gaacctgtggtcagattgtacaggt

SEQ ID NO: 1059627 - DNA, 25 bp, Homo sapien
ttttgagaacctgtggtcagattgt

SEQ ID NO: 1059628 - DNA, 25 bp, Homo sapien
cgattcttccgtcacagcttctcag

SEQ ID NO: 1059629 - DNA, 25 bp, Homo sapien
gagaggtcatctactctttgtgtgt

SEQ ID NO: 1059630 - DNA, 25 bp, Homo sapien
gcgattcttccgtcacagcttctca

SEQ ID NO: 1059631 - DNA, 25 bp, Homo sapien
ataggctcatgccaccatgcgcagc

SEQ ID NO: 1059632 - DNA, 25 bp, Homo sapien
ctataggctcatgccaccatgcgca

SEQ ID NO: 1059633 - DNA, 25 bp, Homo sapien
tataggctcatgccaccatgcgcag

SEQ ID NO: 1059634 - DNA, 25 bp, Homo sapien
gcagtggtgctatctaatctcactg

SEQ ID NO: 1059635 - DNA, 25 bp, Homo sapien
ggtgcttgccaccatactcggctaa

SEQ ID NO: 1059636 - DNA, 25 bp, Homo sapien
gggtccaagcgattcttgtgcctta

SEQ ID NO: 1059637 - DNA, 25 bp, Homo sapien
aatctcactgcaacctctgcctccc

SEQ ID NO: 1059638 - DNA, 25 bp, Homo sapien
gcattcttaaatatgtcgtgtggct

SEQ ID NO: 1059639 - DNA, 25 bp, Homo sapien
gcacctggcccaacacatgcattct

SEQ ID NO: 1059640 - DNA, 25 bp, Homo sapien
gagcagttcatttactctcaagtat

SEQ ID NO: 1059641 - DNA, 25 bp, Homo sapien
tatgtcgtgtggcttgtgtgaattt

SEQ ID NO: 1059642 - DNA, 25 bp, Homo sapien
tagcagtggagccagtatgtatttc

SEQ ID NO: 1059643 - DNA, 25 bp, Homo sapien
aaagagggcgtttcttagcagtgga

SEQ ID NO: 1059644 - DNA, 25 bp, Homo sapien
ctcatatgtcagtagtggagaagaa

SEQ ID NO: 1059645 - DNA, 25 bp, Homo sapien
gacggctatgggtattgttctcata

SEQ ID NO: 1059646 - DNA, 25 bp, Homo sapien
aagtaattgaggtgctcgttgaggc

SEQ ID NO: 1059647 - DNA, 25 bp, Homo sapien
catgaagtaattgaggtgctcgttg

SEQ ID NO: 1059648 - DNA, 25 bp, Homo sapien
aattgaggtgctcgttgaggccccg

SEQ ID NO: 1059649 - DNA, 25 bp, Homo sapien
gtaattgaggtgctcgttgaggccc

SEQ ID NO: 1059650 - DNA, 25 bp, Homo sapien
gcgttttactcaggccaatggaatg

SEQ ID NO: 1059651 - DNA, 25 bp, Homo sapien
agcacactctgtgcggagactgggc

SEQ ID NO: 1059652 - DNA, 25 bp, Homo sapien
gaatcgcgtaatggcggacacaggc

SEQ ID NO: 1059653 - DNA, 25 bp, Homo sapien
cgacccttcctgtcgctgacggcga

SEQ ID NO: 1059654 - DNA, 25 bp, Homo sapien
gccctcatcaaaggatgtccttttc

SEQ ID NO: 1059655 - DNA, 25 bp, Homo sapien
catcaaaggatgtccttttccccca

SEQ ID NO: 1059656 - DNA, 25 bp, Homo sapien
ctcatcaaaggatgtccttttcccc

SEQ ID NO: 1059657 - DNA, 25 bp, Homo sapien
cagccctcatcaaaggatgtccttt

SEQ ID NO: 1059658 - DNA, 25 bp, Homo sapien
gagaagaggcctttgtccctttgcc

SEQ ID NO: 1059659 - DNA, 25 bp, Homo sapien
tgttctgccagctgatccagggggc

SEQ ID NO: 1059660 - DNA, 25 bp, Homo sapien
aggcctttgtccctttgccggctgg

SEQ ID NO: 1059661 - DNA, 25 bp, Homo sapien
ttctgccagctgatccagggggctg

SEQ ID NO: 1059662 - DNA, 25 bp, Homo sapien
ccatgtaggtcaggctcaaacccct

SEQ ID NO: 1059663 - DNA, 25 bp, Homo sapien
gatggggtctcgcaggccaggcgtg

SEQ ID NO: 1059664 - DNA, 25 bp, Homo sapien
atggggtctcgcaggccaggcgtgg

SEQ ID NO: 1059665 - DNA, 25 bp, Homo sapien
ttcaccatgtaggtcaggctcaaac

SEQ ID NO: 1059666 - DNA, 25 bp, Homo sapien
tgctctgtggagctccagtctgatg

SEQ ID NO: 1059667 - DNA, 25 bp, Homo sapien
atgggggccatatctccttgccagg

SEQ ID NO: 1059668 - DNA, 25 bp, Homo sapien
gctccagtctgatgggggccatatc

SEQ ID NO: 1059669 - DNA, 25 bp, Homo sapien
tctccttgccaggtagacagacaca

SEQ ID NO: 1059670 - DNA, 25 bp, Homo sapien
gattgaccacagtgcccaaggcagg

SEQ ID NO: 1059671 - DNA, 25 bp, Homo sapien
caggagcccgacatgtggagaggca

SEQ ID NO: 1059672 - DNA, 25 bp, Homo sapien
aacttgtaccgattgaccacagtgc

SEQ ID NO: 1059673 - DNA, 25 bp, Homo sapien
aatacactcaacttgtaccgattga

SEQ ID NO: 1059674 - DNA, 25 bp, Homo sapien
ctcaggcaccaagcgggcacggcag

SEQ ID NO: 1059675 - DNA, 25 bp, Homo sapien
tgagccccttgcctaaggcctaggg

SEQ ID NO: 1059676 - DNA, 25 bp, Homo sapien
cagagaagtcccaggccgggcaaag

SEQ ID NO: 1059677 - DNA, 25 bp, Homo sapien
tgcctggcccggactcaggcaccaa

SEQ ID NO: 1059678 - DNA, 25 bp, Homo sapien
ctaggcgcccgagccgagtgtgcgt

SEQ ID NO: 1059679 - DNA, 25 bp, Homo sapien
gggacacgcccatgggcggctgcac

SEQ ID NO: 1059680 - DNA, 25 bp, Homo sapien
gcggctgcacgggcggcaggacgcc

SEQ ID NO: 1059681 - DNA, 25 bp, Homo sapien
gcaggacgccccagcgcacctggcg

SEQ ID NO: 1059682 - DNA, 25 bp, Homo sapien
ccaggacaatcggagaccgacataa

SEQ ID NO: 1059683 - DNA, 25 bp, Homo sapien
gagaccgacataaaagcacagcagg

SEQ ID NO: 1059684 - DNA, 25 bp, Homo sapien
agaccctccaggacaatcggagacc

SEQ ID NO: 1059685 - DNA, 25 bp, Homo sapien
caatcggagaccgacataaaagcac

SEQ ID NO: 1059686 - DNA, 25 bp, Homo sapien
ggctcgtacagacacagatacagag

SEQ ID NO: 1059687 - DNA, 25 bp, Homo sapien
acagaggcacaggtacgctcggtta

SEQ ID NO: 1059688 - DNA, 25 bp, Homo sapien
taactggcagtcactcaggcactcg

SEQ ID NO: 1059689 - DNA, 25 bp, Homo sapien
cccttgggctcgtacagacacagat

SEQ ID NO: 1059690 - DNA, 25 bp, Homo sapien
ggacatagacgtacaaaagtccaca

SEQ ID NO: 1059691 - DNA, 25 bp, Homo sapien
caaaggcgcacacacaggtactcat

SEQ ID NO: 1059692 - DNA, 25 bp, Homo sapien
ggtactcattctggcacacacggac

SEQ ID NO: 1059693 - DNA, 25 bp, Homo sapien
gatgccagacagatatccacgggcc

SEQ ID NO: 1059694 - DNA, 25 bp, Homo sapien
gcctgcgtgacagatccagactcca

SEQ ID NO: 1059695 - DNA, 25 bp, Homo sapien
agcctgcgtgacagatccagactcc

SEQ ID NO: 1059696 - DNA, 25 bp, Homo sapien
gtattaatgcatttggtctccacca

SEQ ID NO: 1059697 - DNA, 25 bp, Homo sapien
cactcagtgagtacattcaaaccag

SEQ ID NO: 1059698 - DNA, 25 bp, Homo sapien
gaacttactaagtggtgacaccaga

SEQ ID NO: 1059699 - DNA, 25 bp, Homo sapien
taaaagtgaaaatccttgggcgcag

SEQ ID NO: 1059700 - DNA, 25 bp, Homo sapien
ggtgtccttgcccaaatgatgccca

SEQ ID NO: 1059701 - DNA, 25 bp, Homo sapien
tttcccactaggattggagtgcccc

SEQ ID NO: 1059702 - DNA, 25 bp, Homo sapien
cagaacctgggatatgacgaggcca

SEQ ID NO: 1059703 - DNA, 25 bp, Homo sapien
tatgtatctcccatttgccccaggt

SEQ ID NO: 1059704 - DNA, 25 bp, Homo sapien
ctcgccctttaattcggatggagat

SEQ ID NO: 1059705 - DNA, 25 bp, Homo sapien
ttaattcggatggagatggtcgcac

SEQ ID NO: 1059706 - DNA, 25 bp, Homo sapien
ctttaattcggatggagatggtcgc

SEQ ID NO: 1059707 - DNA, 25 bp, Homo sapien
ggagatggtcgcacactgagggtgg

SEQ ID NO: 1059708 - DNA, 25 bp, Homo sapien
ggctgactgcccagcagacagcagc

SEQ ID NO: 1059709 - DNA, 25 bp, Homo sapien
agacagcagccgaggctgagcagaa

SEQ ID NO: 1059710 - DNA, 25 bp, Homo sapien
caaaagtcgtccccggggctgactg

SEQ ID NO: 1059711 - DNA, 25 bp, Homo sapien
tgggggagtcctggcaagtccagcc

SEQ ID NO: 1059712 - DNA, 25 bp, Homo sapien
tcagagctcactgggcctgtggacc

SEQ ID NO: 1059713 - DNA, 25 bp, Homo sapien
aacgggatgggacaatttcaccctg

SEQ ID NO: 1059714 - DNA, 25 bp, Homo sapien
aaaccagttcaaattctcagagctc

SEQ ID NO: 1059715 - DNA, 25 bp, Homo sapien
aatagggagaattctaagaggaaag

SEQ ID NO: 1059716 - DNA, 25 bp, Homo sapien
cctataaaatcaaggcccagcttcc

SEQ ID NO: 1059717 - DNA, 25 bp, Homo sapien
cctcccttaacagccaggagcatgt

SEQ ID NO: 1059718 - DNA, 25 bp, Homo sapien
tgactccattgctctacaccttctg

SEQ ID NO: 1059719 - DNA, 25 bp, Homo sapien
tcccagcatggtattcaaggtattc

SEQ ID NO: 1059720 - DNA, 25 bp, Homo sapien
aaccctcgcctcttgtaccttcatg

SEQ ID NO: 1059721 - DNA, 25 bp, Homo sapien
tccaaccctcgcctcttgtaccttc

SEQ ID NO: 1059722 - DNA, 25 bp, Homo sapien
ctcttgtaccttcatgcaggaccat

SEQ ID NO: 1059723 - DNA, 25 bp, Homo sapien
tcgcctcttgtaccttcatgcagga

SEQ ID NO: 1059724 - DNA, 25 bp, Homo sapien
gcacccactagaagccaggcattgg

SEQ ID NO: 1059725 - DNA, 25 bp, Homo sapien
taactgcgctgtcctcaaaccaatg

SEQ ID NO: 1059726 - DNA, 25 bp, Homo sapien
tagaagcttgtgagcgcacacagca

SEQ ID NO: 1059727 - DNA, 25 bp, Homo sapien
tgaccggaccttgaagctgaggcct

SEQ ID NO: 1059728 - DNA, 25 bp, Homo sapien
ggggagatgtctcatggataatcca

SEQ ID NO: 1059729 - DNA, 25 bp, Homo sapien
gctcagtgaagtacataatggaacc

SEQ ID NO: 1059730 - DNA, 25 bp, Homo sapien
actcttgatccttctcactggcggg

SEQ ID NO: 1059731 - DNA, 25 bp, Homo sapien
ctctgggtgggaaaatggacgggtg

SEQ ID NO: 1059732 - DNA, 25 bp, Homo sapien
tggccaccttccctagccggggagc

SEQ ID NO: 1059733 - DNA, 25 bp, Homo sapien
tcccaccaggacgagcagcaagcta

SEQ ID NO: 1059734 - DNA, 25 bp, Homo sapien
accaggacgagcagcaagctatggg

SEQ ID NO: 1059735 - DNA, 25 bp, Homo sapien
agcctgtcctgtccgcgcgccagac

SEQ ID NO: 1059736 - DNA, 25 bp, Homo sapien
gaatgggactctgttcccagagcag

SEQ ID NO: 1059737 - DNA, 25 bp, Homo sapien
tagacgctgtgactgggaagccaaa

SEQ ID NO: 1059738 - DNA, 25 bp, Homo sapien
actgggaagccaaagcgcaagagac

SEQ ID NO: 1059739 - DNA, 25 bp, Homo sapien
cgcaagagacggtcccggaagaatg

SEQ ID NO: 1059740 - DNA, 25 bp, Homo sapien
atgcggccaagtcagcccgatgctc

SEQ ID NO: 1059741 - DNA, 25 bp, Homo sapien
gccaacgacagcaaggccgagtact

SEQ ID NO: 1059742 - DNA, 25 bp, Homo sapien
agccagtgcgctggacggtgctcac

SEQ ID NO: 1059743 - DNA, 25 bp, Homo sapien
gagtactcagacgtcctggccaagc

SEQ ID NO: 1059744 - DNA, 25 bp, Homo sapien
tggtagtggtcttcccacccggtga

SEQ ID NO: 1059745 - DNA, 25 bp, Homo sapien
cccaccccgctgctgaagatgaaga

SEQ ID NO: 1059746 - DNA, 25 bp, Homo sapien
agatggccaagatccccgtatcgct

SEQ ID NO: 1059747 - DNA, 25 bp, Homo sapien
ttattctcaaacgtaagcgcggccg

SEQ ID NO: 1059748 - DNA, 25 bp, Homo sapien
ccgagggccgcctactgcccctgcc

SEQ ID NO: 1059749 - DNA, 25 bp, Homo sapien
tggtggctgccctggccgaaccccc

SEQ ID NO: 1059750 - DNA, 25 bp, Homo sapien
aagccggacggggacgcaaggcaga

SEQ ID NO: 1059751 - DNA, 25 bp, Homo sapien
acgcaaggcagacgccggacccgag

SEQ ID NO: 1059752 - DNA, 25 bp, Homo sapien
ggtcaccccaagtacgccttgcggc

SEQ ID NO: 1059753 - DNA, 25 bp, Homo sapien
accccaagtacgccttgcggcgcac

SEQ ID NO: 1059754 - DNA, 25 bp, Homo sapien
tcaccccaagtacgccttgcggcgc

SEQ ID NO: 1059755 - DNA, 25 bp, Homo sapien
gtcaccccaagtacgccttgcggcg

SEQ ID NO: 1059756 - DNA, 25 bp, Homo sapien
cgaccagtggtgcagctgattgaca

SEQ ID NO: 1059757 - DNA, 25 bp, Homo sapien
catcatgaaggacctgacacgcctc

SEQ ID NO: 1059758 - DNA, 25 bp, Homo sapien
tcccgacgctgctgggacaacgggc

SEQ ID NO: 1059759 - DNA, 25 bp, Homo sapien
caacgggcgggtgaacctgcgacca

SEQ ID NO: 1059760 - DNA, 25 bp, Homo sapien
ggaggcagacaaatgggcaggaagc

SEQ ID NO: 1059761 - DNA, 25 bp, Homo sapien
gaggcagacaaatgggcaggaagca

SEQ ID NO: 1059762 - DNA, 25 bp, Homo sapien
aggcagacaaatgggcaggaagcag

SEQ ID NO: 1059763 - DNA, 25 bp, Homo sapien
ggcagacaaatgggcaggaagcagg

SEQ ID NO: 1059764 - DNA, 25 bp, Homo sapien
catacagtgacatagcacaaggacc

SEQ ID NO: 1059765 - DNA, 25 bp, Homo sapien
acatgttgacgctgacacacggcca

SEQ ID NO: 1059766 - DNA, 25 bp, Homo sapien
ggacccactgacatacacagagaca

SEQ ID NO: 1059767 - DNA, 25 bp, Homo sapien
ggccatactggcacaatcatacagt

SEQ ID NO: 1059768 - DNA, 25 bp, Homo sapien
ggctctgcgttaggattacagatcc

SEQ ID NO: 1059769 - DNA, 25 bp, Homo sapien
tcgccttggcaactggagcccggta

SEQ ID NO: 1059770 - DNA, 25 bp, Homo sapien
cccggtaggcctgggctctgcgtta

SEQ ID NO: 1059771 - DNA, 25 bp, Homo sapien
gattacagatcctgaattcacaatc

SEQ ID NO: 1059772 - DNA, 25 bp, Homo sapien
cttcctctgcaatccacaaatctgg

SEQ ID NO: 1059773 - DNA, 25 bp, Homo sapien
gcaaagggttaaaggagctctccca

SEQ ID NO: 1059774 - DNA, 25 bp, Homo sapien
ccttgcgttggtatgtgagctcccc

SEQ ID NO: 1059775 - DNA, 25 bp, Homo sapien
cacaggaagtagagtaccctgcctt

SEQ ID NO: 1059776 - DNA, 25 bp, Homo sapien
tcctgaaagtcaggctgcaaagggt

SEQ ID NO: 1059777 - DNA, 25 bp, Homo sapien
tggctggctagggtacggacgtgta

SEQ ID NO: 1059778 - DNA, 25 bp, Homo sapien
tggaattggagttgtcatgtactgt

SEQ ID NO: 1059779 - DNA, 25 bp, Homo sapien
ctgggtttgtcagttgtttatggat

SEQ ID NO: 1059780 - DNA, 25 bp, Homo sapien
cagggcctctgaacagtgcatgtgt

SEQ ID NO: 1059781 - DNA, 25 bp, Homo sapien
tcctccaggagccagaaactctgtg

SEQ ID NO: 1059782 - DNA, 25 bp, Homo sapien
ggagccagaaactctgtggcctcat

SEQ ID NO: 1059783 - DNA, 25 bp, Homo sapien
ctcctccaggagccagaaactctgt

SEQ ID NO: 1059784 - DNA, 25 bp, Homo sapien
ccaggagccagaaactctgtggcct

SEQ ID NO: 1059785 - DNA, 25 bp, Homo sapien
cctccactgttgtaagggtgacact

SEQ ID NO: 1059786 - DNA, 25 bp, Homo sapien
ggtgacactggtgtgatccccccat

SEQ ID NO: 1059787 - DNA, 25 bp, Homo sapien
agggccagggtcacgggtcaccaca

SEQ ID NO: 1059788 - DNA, 25 bp, Homo sapien
gggtcaccacatgcccaaaagcagc

SEQ ID NO: 1059789 - DNA, 25 bp, Homo sapien
gaatgatttgtattggatgcccacg

SEQ ID NO: 1059790 - DNA, 25 bp, Homo sapien
gctgtcaccagtgcaaggtagggta

SEQ ID NO: 1059791 - DNA, 25 bp, Homo sapien
gatttggactgtgagctactggaga

SEQ ID NO: 1059792 - DNA, 25 bp, Homo sapien
tcatttatgatcctatccccgggtc

SEQ ID NO: 1059793 - DNA, 25 bp, Homo sapien
aattaatgacgggtaatcgcctatc

SEQ ID NO: 1059794 - DNA, 25 bp, Homo sapien
tatcataacctactgccgctggctc

SEQ ID NO: 1059795 - DNA, 25 bp, Homo sapien
ggtaatcgcctatcataacctactg

SEQ ID NO: 1059796 - DNA, 25 bp, Homo sapien
ctgggccaggtgattgccgggttag

SEQ ID NO: 1059797 - DNA, 25 bp, Homo sapien
aggtggtgcgggtgcgaggcaggca

SEQ ID NO: 1059798 - DNA, 25 bp, Homo sapien
aggcggctccggtgacaggctgggt

SEQ ID NO: 1059799 - DNA, 25 bp, Homo sapien
gggtgggtgacaggtggtgcgggtg

SEQ ID NO: 1059800 - DNA, 25 bp, Homo sapien
ccagatgtctgtcaggcggctccgg

SEQ ID NO: 1059801 - DNA, 25 bp, Homo sapien
ctgggtcccagcctgcctgggggta

SEQ ID NO: 1059802 - DNA, 25 bp, Homo sapien
tcccagcctgcctgggggtagtggt

SEQ ID NO: 1059803 - DNA, 25 bp, Homo sapien
cctgggggtagtggtggcggcagca

SEQ ID NO: 1059804 - DNA, 25 bp, Homo sapien
cctgcctgggggtagtggtggcggc

SEQ ID NO: 1059805 - DNA, 25 bp, Homo sapien
ggccacattttgtccgctgctgctg

SEQ ID NO: 1059806 - DNA, 25 bp, Homo sapien
tcagggtgtgaggacaagctttgcc

SEQ ID NO: 1059807 - DNA, 25 bp, Homo sapien
agggccggactgtaccagcctggtc

SEQ ID NO: 1059808 - DNA, 25 bp, Homo sapien
tttcccgccggaccagttggtgtca

SEQ ID NO: 1059809 - DNA, 25 bp, Homo sapien
ggctgagcctggtgccctcggttct

SEQ ID NO: 1059810 - DNA, 25 bp, Homo sapien
ctgagcctggtgccctcggttctgc

SEQ ID NO: 1059811 - DNA, 25 bp, Homo sapien
gctgagcctggtgccctcggttctg

SEQ ID NO: 1059812 - DNA, 25 bp, Homo sapien
tggggatgaggactgatgggagctt

SEQ ID NO: 1059813 - DNA, 25 bp, Homo sapien
aaaagggacagcaacccagagtttg

SEQ ID NO: 1059814 - DNA, 25 bp, Homo sapien
ggatgaggactgatgggagcttggg

SEQ ID NO: 1059815 - DNA, 25 bp, Homo sapien
aagggacagcaacccagagtttggg

SEQ ID NO: 1059816 - DNA, 25 bp, Homo sapien
tcgcctatcaatgcgtttcctctgg

SEQ ID NO: 1059817 - DNA, 25 bp, Homo sapien
ctggcgaacaaagtcggctcacttt

SEQ ID NO: 1059818 - DNA, 25 bp, Homo sapien
taaataatcgcctatcaatgcgttt

SEQ ID NO: 1059819 - DNA, 25 bp, Homo sapien
gctctgattgaatcggccccctctt

SEQ ID NO: 1059820 - DNA, 25 bp, Homo sapien
gacccggtggctgcggtgcccgcgg

SEQ ID NO: 1059821 - DNA, 25 bp, Homo sapien
agcactccggtgagtggcgcctcct

SEQ ID NO: 1059822 - DNA, 25 bp, Homo sapien
tgcccgcggtgcgatcggtctttgt

SEQ ID NO: 1059823 - DNA, 25 bp, Homo sapien
tgccaccgccggaagacagacgtcc

SEQ ID NO: 1059824 - DNA, 25 bp, Homo sapien
caccggagagggctgtgtatatctg

SEQ ID NO: 1059825 - DNA, 25 bp, Homo sapien
tcagattctggagccaaacaccagg

SEQ ID NO: 1059826 - DNA, 25 bp, Homo sapien
tgtgcatgctagcaggaatggctgc

SEQ ID NO: 1059827 - DNA, 25 bp, Homo sapien
tatgtgggtccatgtcaccggagag

SEQ ID NO: 1059828 - DNA, 25 bp, Homo sapien
gccccgacggaaatcctgcctttga

SEQ ID NO: 1059829 - DNA, 25 bp, Homo sapien
ctggatccgggaattgctgccgccc

SEQ ID NO: 1059830 - DNA, 25 bp, Homo sapien
cccttgcggtaggttccgggctgca

SEQ ID NO: 1059831 - DNA, 25 bp, Homo sapien
cctttgaccgcgagtgcccgcaggg

SEQ ID NO: 1059832 - DNA, 25 bp, Homo sapien
tcagccgccgtacttggcccaggtt

SEQ ID NO: 1059833 - DNA, 25 bp, Homo sapien
gccccaagaggtagtcccacaggct

SEQ ID NO: 1059834 - DNA, 25 bp, Homo sapien
agaggtagtcccacaggctcagccg

SEQ ID NO: 1059835 - DNA, 25 bp, Homo sapien
gtcagccccaagaggtagtcccaca

SEQ ID NO: 1059836 - DNA, 25 bp, Homo sapien
tggcacatgcagaaggactgctgtg

SEQ ID NO: 1059837 - DNA, 25 bp, Homo sapien
atgctctgcattgggtgccctggga

SEQ ID NO: 1059838 - DNA, 25 bp, Homo sapien
cccaaagctcaagcaggatgctctg

SEQ ID NO: 1059839 - DNA, 25 bp, Homo sapien
gactggctgctccttagtgccactg

SEQ ID NO: 1059840 - DNA, 25 bp, Homo sapien
tccaggtactccttgctgctatggc

SEQ ID NO: 1059841 - DNA, 25 bp, Homo sapien
ctcaagagtccagtgggaaaggcag

SEQ ID NO: 1059842 - DNA, 25 bp, Homo sapien
tcaagagtccagtgggaaaggcaga

SEQ ID NO: 1059843 - DNA, 25 bp, Homo sapien
caagagtccagtgggaaaggcagat

SEQ ID NO: 1059844 - DNA, 25 bp, Homo sapien
gcacctgccgccccttccgcagacc

SEQ ID NO: 1059845 - DNA, 25 bp, Homo sapien
ggcacctgccgccccttccgcagac

SEQ ID NO: 1059846 - DNA, 25 bp, Homo sapien
tccccgcggccttcgcttttagctc

SEQ ID NO: 1059847 - DNA, 25 bp, Homo sapien
ttttcgccagatttcttaattccac

SEQ ID NO: 1059848 - DNA, 25 bp, Homo sapien
cttttcgccagatttcttaattcca

SEQ ID NO: 1059849 - DNA, 25 bp, Homo sapien
taacactttattccagctatacggg

SEQ ID NO: 1059850 - DNA, 25 bp, Homo sapien
atcttagaggatttcagcacaccct

SEQ ID NO: 1059851 - DNA, 25 bp, Homo sapien
caagatggtggacatggttgtgggc

SEQ ID NO: 1059852 - DNA, 25 bp, Homo sapien
gggacaagatggtggacatggttgt

SEQ ID NO: 1059853 - DNA, 25 bp, Homo sapien
tagaggatttcagcacaccctgcag

SEQ ID NO: 1059854 - DNA, 25 bp, Homo sapien
agccaaccagcatctgctgaagaca

SEQ ID NO: 1059855 - DNA, 25 bp, Homo sapien
cctgggacttgagccgccatcgcag

SEQ ID NO: 1059856 - DNA, 25 bp, Homo sapien
tacccatttgtaggcctgggacttg

SEQ ID NO: 1059857 - DNA, 25 bp, Homo sapien
acagcctgtacccatttgtaggcct

SEQ ID NO: 1059858 - DNA, 25 bp, Homo sapien
tggtctctacctggatgccttcaga

SEQ ID NO: 1059859 - DNA, 25 bp, Homo sapien
tctcaagaagcgctagtgatcaccc

SEQ ID NO: 1059860 - DNA, 25 bp, Homo sapien
ttctgggccttagcacatgttggtc

SEQ ID NO: 1059861 - DNA, 25 bp, Homo sapien
agtgagaagcccaaaacaatctggc

SEQ ID NO: 1059862 - DNA, 25 bp, Homo sapien
tgatgcggagaggaaacggattccc

SEQ ID NO: 1059863 - DNA, 25 bp, Homo sapien
acgtgccaaacaccgtgcgaatccg

SEQ ID NO: 1059864 - DNA, 25 bp, Homo sapien
tgcgaatccgcacagaatccgcaca

SEQ ID NO: 1059865 - DNA, 25 bp, Homo sapien
agaatccgcacacccaccggttggg

SEQ ID NO: 1059866 - DNA, 25 bp, Homo sapien
cctagggctttcgattggcagtctg

SEQ ID NO: 1059867 - DNA, 25 bp, Homo sapien
gggatcggccactatctacccatag

SEQ ID NO: 1059868 - DNA, 25 bp, Homo sapien
gaaccccagtttatagtcagtcaga

SEQ ID NO: 1059869 - DNA, 25 bp, Homo sapien
tgtcagaagcctctcgtacggtgag

SEQ ID NO: 1059870 - DNA, 25 bp, Homo sapien
gctagtgatcccctaacaacttggt

SEQ ID NO: 1059871 - DNA, 25 bp, Homo sapien
ggttccaacaatagtcaagttcatg

SEQ ID NO: 1059872 - DNA, 25 bp, Homo sapien
ggccttcaccataactgactgagct

SEQ ID NO: 1059873 - DNA, 25 bp, Homo sapien
aagccttcttattcagtctactggg

SEQ ID NO: 1059874 - DNA, 25 bp, Homo sapien
tgtcatccttccacaggggcctggt

SEQ ID NO: 1059875 - DNA, 25 bp, Homo sapien
catccttccacaggggcctggtaat

SEQ ID NO: 1059876 - DNA, 25 bp, Homo sapien
ccttccacaggggcctggtaatctt

SEQ ID NO: 1059877 - DNA, 25 bp, Homo sapien
gtgtcatccttccacaggggcctgg

SEQ ID NO: 1059878 - DNA, 25 bp, Homo sapien
gagtcttttatcatcccagaaggga

SEQ ID NO: 1059879 - DNA, 25 bp, Homo sapien
caaaccaggcttccagaactacagg

SEQ ID NO: 1059880 - DNA, 25 bp, Homo sapien
ttaagccaggtatgcagaccaaaca

SEQ ID NO: 1059881 - DNA, 25 bp, Homo sapien
tcaagggagtactgcaccctggttc

SEQ ID NO: 1059882 - DNA, 25 bp, Homo sapien
tagaagctgtataattctgagcaca

SEQ ID NO: 1059883 - DNA, 25 bp, Homo sapien
ccagctctactacttagaagctgta

SEQ ID NO: 1059884 - DNA, 25 bp, Homo sapien
gcatctggtgagtgctcgttatccc

SEQ ID NO: 1059885 - DNA, 25 bp, Homo sapien
gaaaaatgcaagctcagagccagac

SEQ ID NO: 1059886 - DNA, 25 bp, Homo sapien
ctgaggcacaacccggcggcggctg

SEQ ID NO: 1059887 - DNA, 25 bp, Homo sapien
gggccgcgctcaccgacccgccggc

SEQ ID NO: 1059888 - DNA, 25 bp, Homo sapien
gcccgccgatttatctgacagtctg

SEQ ID NO: 1059889 - DNA, 25 bp, Homo sapien
gcccggcccgccgatttatctgaca

SEQ ID NO: 1059890 - DNA, 25 bp, Homo sapien
gagacagcgcctcgaaggggaagcg

SEQ ID NO: 1059891 - DNA, 25 bp, Homo sapien
tgagacagcgcctcgaaggggaagc

SEQ ID NO: 1059892 - DNA, 25 bp, Homo sapien
ctgagacagcgcctcgaaggggaag

SEQ ID NO: 1059893 - DNA, 25 bp, Homo sapien
ccgggcgtccccacagaatctggag

SEQ ID NO: 1059894 - DNA, 25 bp, Homo sapien
tcctgcgtccccagttcccggccgc

SEQ ID NO: 1059895 - DNA, 25 bp, Homo sapien
ctcctgcgtccccagttcccggccg

SEQ ID NO: 1059896 - DNA, 25 bp, Homo sapien
acagaatctggagctccgggccgcg

SEQ ID NO: 1059897 - DNA, 25 bp, Homo sapien
tcacaacagggtgtgcaatccgaca

SEQ ID NO: 1059898 - DNA, 25 bp, Homo sapien
gtactcagtcctgcagtaggtgcac

SEQ ID NO: 1059899 - DNA, 25 bp, Homo sapien
ggtactcagtcctgcagtaggtgca

SEQ ID NO: 1059900 - DNA, 25 bp, Homo sapien
cacaacagggtgtgcaatccgacat

SEQ ID NO: 1059901 - DNA, 25 bp, Homo sapien
ttgaacctgggagggaagggttgca

SEQ ID NO: 1059902 - DNA, 25 bp, Homo sapien
aacctgggagggaagggttgcagtg

SEQ ID NO: 1059903 - DNA, 25 bp, Homo sapien
aatcgcttgaacctgggagggaagg

SEQ ID NO: 1059904 - DNA, 25 bp, Homo sapien
tgggagggaagggttgcagtgagct

SEQ ID NO: 1059905 - DNA, 25 bp, Homo sapien
aactgcacgttctgagcacatttct

SEQ ID NO: 1059906 - DNA, 25 bp, Homo sapien
gcacatttcttgcatattgtattgg

SEQ ID NO: 1059907 - DNA, 25 bp, Homo sapien
catacaactgcacgttctgagcaca

SEQ ID NO: 1059908 - DNA, 25 bp, Homo sapien
cgttccatacaactgcacgttctga

SEQ ID NO: 1059909 - DNA, 25 bp, Homo sapien
agagtcaagtaagtattactttcat

SEQ ID NO: 1059910 - DNA, 25 bp, Homo sapien
taagtattactttcataaaatacca

SEQ ID NO: 1059911 - DNA, 25 bp, Homo sapien
gtcaagtaagtattactttcataaa

SEQ ID NO: 1059912 - DNA, 25 bp, Homo sapien
caagtaagtattactttcataaaat

SEQ ID NO: 1059913 - DNA, 25 bp, Homo sapien
ttctgaatttgtgcagcgctggcat

SEQ ID NO: 1059914 - DNA, 25 bp, Homo sapien
gcagcgctggcatttattcccaata

SEQ ID NO: 1059915 - DNA, 25 bp, Homo sapien
caagaatagggtggtccatacttct

SEQ ID NO: 1059916 - DNA, 25 bp, Homo sapien
tgcactgttcacaagaatagggtgg

SEQ ID NO: 1059917 - DNA, 25 bp, Homo sapien
ggtacctgagctgaaacctgacatg

SEQ ID NO: 1059918 - DNA, 25 bp, Homo sapien
cagtgcaaaggtcggagtgagatcc

SEQ ID NO: 1059919 - DNA, 25 bp, Homo sapien
caagatgagactgagagctgcgcat

SEQ ID NO: 1059920 - DNA, 25 bp, Homo sapien
gcacaactggaaacccgtggaggat

SEQ ID NO: 1059921 - DNA, 25 bp, Homo sapien
ctggttcagcatgcatacaataggg

SEQ ID NO: 1059922 - DNA, 25 bp, Homo sapien
tcagcatgcatacaataggggcacc

SEQ ID NO: 1059923 - DNA, 25 bp, Homo sapien
cagcatgcatacaataggggcacca

SEQ ID NO: 1059924 - DNA, 25 bp, Homo sapien
catgcatacaataggggcaccagct

SEQ ID NO: 1059925 - DNA, 25 bp, Homo sapien
tttcttctacttggcagtaggcgaa

SEQ ID NO: 1059926 - DNA, 25 bp, Homo sapien
ttctacttggcagtaggcgaacaca

SEQ ID NO: 1059927 - DNA, 25 bp, Homo sapien
tcttctacttggcagtaggcgaaca

SEQ ID NO: 1059928 - DNA, 25 bp, Homo sapien
cttttcttctacttggcagtaggcg

SEQ ID NO: 1059929 - DNA, 25 bp, Homo sapien
cggaggcacttgacccctaaactgg

SEQ ID NO: 1059930 - DNA, 25 bp, Homo sapien
catgtatgtcaaagaaaaggtcctg

SEQ ID NO: 1059931 - DNA, 25 bp, Homo sapien
gacccagagtctagaatacggaggc

SEQ ID NO: 1059932 - DNA, 25 bp, Homo sapien
agtgcccatccatgacatccaggtg

SEQ ID NO: 1059933 - DNA, 25 bp, Homo sapien
ctgagtacttagtagcctcaagatg

SEQ ID NO: 1059934 - DNA, 25 bp, Homo sapien
gactggcttctgctatagctattga

SEQ ID NO: 1059935 - DNA, 25 bp, Homo sapien
aaagcctctgagtacttagtagcct

SEQ ID NO: 1059936 - DNA, 25 bp, Homo sapien
gtactgactggcttctgctatagct

SEQ ID NO: 1059937 - DNA, 25 bp, Homo sapien
ccttccaaacccaggttccactgtg

SEQ ID NO: 1059938 - DNA, 25 bp, Homo sapien
tcctcaaccagtgaatgtttggcac

SEQ ID NO: 1059939 - DNA, 25 bp, Homo sapien
tcactcctcataacaacgcttccag

SEQ ID NO: 1059940 - DNA, 25 bp, Homo sapien
taacaacgcttccagacataatcat

SEQ ID NO: 1059941 - DNA, 25 bp, Homo sapien
cgcttccagacataatcatgttagc

SEQ ID NO: 1059942 - DNA, 25 bp, Homo sapien
tcctcataacaacgcttccagacat

SEQ ID NO: 1059943 - DNA, 25 bp, Homo sapien
caacattgggctccttgtggtctca

SEQ ID NO: 1059944 - DNA, 25 bp, Homo sapien
aggacccgtttgtatgaaagtgtgc

SEQ ID NO: 1059945 - DNA, 25 bp, Homo sapien
ctggtggccagcacgagaagagcta

SEQ ID NO: 1059946 - DNA, 25 bp, Homo sapien
caccactcaggcgactatactgctc

SEQ ID NO: 1059947 - DNA, 25 bp, Homo sapien
tggtcttctgaaggacccgtttgta

SEQ ID NO: 1059948 - DNA, 25 bp, Homo sapien
ttttgaattgaagatgtagaaagtg

SEQ ID NO: 1059949 - DNA, 25 bp, Homo sapien
ctgtctccattagttgtgattgact

SEQ ID NO: 1059950 - DNA, 25 bp, Homo sapien
gtctccattagttgtgattgactca

SEQ ID NO: 1059951 - DNA, 25 bp, Homo sapien
ctccattagttgtgattgactcaaa

SEQ ID NO: 1059952 - DNA, 25 bp, Homo sapien
cttcttcagggtagccacttcttcc

SEQ ID NO: 1059953 - DNA, 25 bp, Homo sapien
cttcagggtagccacttcttccttc

SEQ ID NO: 1059954 - DNA, 25 bp, Homo sapien
tcttcagggtagccacttcttcctt

SEQ ID NO: 1059955 - DNA, 25 bp, Homo sapien
ggcacgaagttagcatccaataaaa

SEQ ID NO: 1059956 - DNA, 25 bp, Homo sapien
gagctaggcacgaagttagcatcca

SEQ ID NO: 1059957 - DNA, 25 bp, Homo sapien
gctaggcacgaagttagcatccaat

SEQ ID NO: 1059958 - DNA, 25 bp, Homo sapien
aacagagctaggcacgaagttagca

SEQ ID NO: 1059959 - DNA, 25 bp, Homo sapien
gggagatcagaaacccctaagaaga

SEQ ID NO: 1059960 - DNA, 25 bp, Homo sapien
ggacatattaacctcttcgggtctg

SEQ ID NO: 1059961 - DNA, 25 bp, Homo sapien
cccttgttccgccatttactagctg

SEQ ID NO: 1059962 - DNA, 25 bp, Homo sapien
tactggaggcattcttcatctatga

SEQ ID NO: 1059963 - DNA, 25 bp, Homo sapien
ggctctcatctgcgattcctggtac

SEQ ID NO: 1059964 - DNA, 25 bp, Homo sapien
tggctctcatctgcgattcctggta

SEQ ID NO: 1059965 - DNA, 25 bp, Homo sapien
ttcctggtactgaaaatcagccttc

SEQ ID NO: 1059966 - DNA, 25 bp, Homo sapien
ttagcacataaaataagcagagtca

SEQ ID NO: 1059967 - DNA, 25 bp, Homo sapien
acataaaataagcagagtcagtcac

SEQ ID NO: 1059968 - DNA, 25 bp, Homo sapien
gcacataaaataagcagagtcagtc

SEQ ID NO: 1059969 - DNA, 25 bp, Homo sapien
tagcacataaaataagcagagtcag

SEQ ID NO: 1059970 - DNA, 25 bp, Homo sapien
gcccaggcaatatagcgagagccca

SEQ ID NO: 1059971 - DNA, 25 bp, Homo sapien
aggggaaaagatcagaacacatcca

SEQ ID NO: 1059972 - DNA, 25 bp, Homo sapien
cacatccaagagtgaaacaatacaa

SEQ ID NO: 1059973 - DNA, 25 bp, Homo sapien
cccaggcaatatagcgagagcccat

SEQ ID NO: 1059974 - DNA, 25 bp, Homo sapien
gacttcttgctcttggacaaagcag

SEQ ID NO: 1059975 - DNA, 25 bp, Homo sapien
ctctgacttcttgctcttggacaaa

SEQ ID NO: 1059976 - DNA, 25 bp, Homo sapien
ctgcttcaggagctctcggtttttg

SEQ ID NO: 1059977 - DNA, 25 bp, Homo sapien
gcttcaggagctctcggtttttggc

SEQ ID NO: 1059978 - DNA, 25 bp, Homo sapien
catttgctgttgctagggagcctcc

SEQ ID NO: 1059979 - DNA, 25 bp, Homo sapien
aaaccgaagagtataccctgaagca

SEQ ID NO: 1059980 - DNA, 25 bp, Homo sapien
gagagaagtgtccagtacaacctgg

SEQ ID NO: 1059981 - DNA, 25 bp, Homo sapien
caaactgtttgctcatgggtatggc

SEQ ID NO: 1059982 - DNA, 25 bp, Homo sapien
gataggcagggcatacataactctg

SEQ ID NO: 1059983 - DNA, 25 bp, Homo sapien
cctagtagggtgatatataagcgac

SEQ ID NO: 1059984 - DNA, 25 bp, Homo sapien
gacctgagagtatgcctagaaatgt

SEQ ID NO: 1059985 - DNA, 25 bp, Homo sapien
cataactctggttgaggcaaagtgc

SEQ ID NO: 1059986 - DNA, 25 bp, Homo sapien
caaaactggccaaattaaatctatg

SEQ ID NO: 1059987 - DNA, 25 bp, Homo sapien
tactatcagtatggtgagcttcctg

SEQ ID NO: 1059988 - DNA, 25 bp, Homo sapien
gggaaattcacttaggttgcaaata

SEQ ID NO: 1059989 - DNA, 25 bp, Homo sapien
tattaaaagtcagaatagggccaag

SEQ ID NO: 1059990 - DNA, 25 bp, Homo sapien
cgccagccgggacccgcaggctgac

SEQ ID NO: 1059991 - DNA, 25 bp, Homo sapien
cgctctacaccgctctcctaccgga

SEQ ID NO: 1059992 - DNA, 25 bp, Homo sapien
accgctctcctaccggaagcagccg

SEQ ID NO: 1059993 - DNA, 25 bp, Homo sapien
gagctgagacctgctcgctctacac

SEQ ID NO: 1059994 - DNA, 25 bp, Homo sapien
ggctgatccgctggatgttgccgct

SEQ ID NO: 1059995 - DNA, 25 bp, Homo sapien
tggatgttgccgctgcacgtctgga

SEQ ID NO: 1059996 - DNA, 25 bp, Homo sapien
ccgctgcacgtctggatgatgctgc

SEQ ID NO: 1059997 - DNA, 25 bp, Homo sapien
ttggctgatccgctggatgttgccg

SEQ ID NO: 1059998 - DNA, 25 bp, Homo sapien
ccaggcctgtccccgggacagctcc

SEQ ID NO: 1059999 - DNA, 25 bp, Homo sapien
tccaaactggtctaagaggaaagcg

SEQ ID NO: 1060000 - DNA, 25 bp, Homo sapien
caagtcggctgttttggtcccagca

SEQ ID NO: 1060001 - DNA, 25 bp, Homo sapien
aaagttgctgatttccgaggagcca

SEQ ID NO: 1060002 - DNA, 25 bp, Homo sapien
gaagaactgtgtatgaagtcaccca

SEQ ID NO: 1060003 - DNA, 25 bp, Homo sapien
attctcagtggagaactcttcttca

SEQ ID NO: 1060004 - DNA, 25 bp, Homo sapien
ttctcagtggagaactcttcttcat

SEQ ID NO: 1060005 - DNA, 25 bp, Homo sapien
tagttcctagctggctcatcaaatt

SEQ ID NO: 1060006 - DNA, 25 bp, Homo sapien
tcctgtagcttgcttgagtcctgct

SEQ ID NO: 1060007 - DNA, 25 bp, Homo sapien
ctgcttagttcctagctggctcatc

SEQ ID NO: 1060008 - DNA, 25 bp, Homo sapien
tagctggctcatcaaattctttatc

SEQ ID NO: 1060009 - DNA, 25 bp, Homo sapien
ctgctctttatacctgagtttctgg

SEQ ID NO: 1060010 - DNA, 25 bp, Homo sapien
gctctttatacctgagtttctggct

SEQ ID NO: 1060011 - DNA, 25 bp, Homo sapien
ctttatacctgagtttctggctctt

SEQ ID NO: 1060012 - DNA, 25 bp, Homo sapien
tctttatacctgagtttctggctct

SEQ ID NO: 1060013 - DNA, 25 bp, Homo sapien
agctgatttgtggagtgttgtaact

SEQ ID NO: 1060014 - DNA, 25 bp, Homo sapien
ctgttctgaagtagataagggaagg

SEQ ID NO: 1060015 - DNA, 25 bp, Homo sapien
atttgtttccttggcgagctgattt

SEQ ID NO: 1060016 - DNA, 25 bp, Homo sapien
ccttggcgagctgatttgtggagtg

SEQ ID NO: 1060017 - DNA, 25 bp, Homo sapien
gtaagaactcaagcggccaagaaag

SEQ ID NO: 1060018 - DNA, 25 bp, Homo sapien
gggtaaggcaaatccaagcaagaga

SEQ ID NO: 1060019 - DNA, 25 bp, Homo sapien
ggtggtacacatcagctactcagag

SEQ ID NO: 1060020 - DNA, 25 bp, Homo sapien
ccaattggtactacaggagttcaga

SEQ ID NO: 1060021 - DNA, 25 bp, Homo sapien
agcctggaaattgtttaaggctgca

SEQ ID NO: 1060022 - DNA, 25 bp, Homo sapien
aaagacgagatccagctcttgctct

SEQ ID NO: 1060023 - DNA, 25 bp, Homo sapien
taaggctgcagagaagtcattcatg

SEQ ID NO: 1060024 - DNA, 25 bp, Homo sapien
tcatgaggcgttccttctgaagtct

SEQ ID NO: 1060025 - DNA, 25 bp, Homo sapien
aaagaacattctgatattgcaaagg

SEQ ID NO: 1060026 - DNA, 25 bp, Homo sapien
cagattcctttctaggctttgatca

SEQ ID NO: 1060027 - DNA, 25 bp, Homo sapien
tttacataggttacaccaacctgcc

SEQ ID NO: 1060028 - DNA, 25 bp, Homo sapien
tcacagcagctaacttacatgttta

SEQ ID NO: 1060029 - DNA, 25 bp, Homo sapien
tgaaggcagtggcaccgaattgcac

SEQ ID NO: 1060030 - DNA, 25 bp, Homo sapien
cacttgtgtaatggaactgcaggct

SEQ ID NO: 1060031 - DNA, 25 bp, Homo sapien
tgaaaagaagtatgagcctgtcact

SEQ ID NO: 1060032 - DNA, 25 bp, Homo sapien
taaaagccaatgtattcttgaagcc

SEQ ID NO: 1060033 - DNA, 25 bp, Homo sapien
tatccataatgacaactcccagtgt

SEQ ID NO: 1060034 - DNA, 25 bp, Homo sapien
tgttctaacttataccaccggccag

SEQ ID NO: 1060035 - DNA, 25 bp, Homo sapien
ctcctggtgggcatgaaatagtatt

SEQ ID NO: 1060036 - DNA, 25 bp, Homo sapien
caccggccagataaaaaagttcctg

SEQ ID NO: 1060037 - DNA, 25 bp, Homo sapien
caaaacaagggcttccttagcacag

SEQ ID NO: 1060038 - DNA, 25 bp, Homo sapien
tcctttgacacccacagaatctgta

SEQ ID NO: 1060039 - DNA, 25 bp, Homo sapien
ctgtaagattacataggactctggc

SEQ ID NO: 1060040 - DNA, 25 bp, Homo sapien
gaaaccatactgaacagggtggaga

SEQ ID NO: 1060041 - DNA, 25 bp, Homo sapien
caaatgagaccagctgctcctctct

SEQ ID NO: 1060042 - DNA, 25 bp, Homo sapien
gaccagctgctcctctctttgcctc

SEQ ID NO: 1060043 - DNA, 25 bp, Homo sapien
gagaccagctgctcctctctttgcc

SEQ ID NO: 1060044 - DNA, 25 bp, Homo sapien
aatgagaccagctgctcctctcttt

SEQ ID NO: 1060045 - DNA, 25 bp, Homo sapien
taacgagatagattcccatctcaac

SEQ ID NO: 1060046 - DNA, 25 bp, Homo sapien
ttaaaatataacgagatagattccc

SEQ ID NO: 1060047 - DNA, 25 bp, Homo sapien
tagattcccatctcaactatccagc

SEQ ID NO: 1060048 - DNA, 25 bp, Homo sapien
ccagcaggttgtatgaataattcta

SEQ ID NO: 1060049 - DNA, 25 bp, Homo sapien
attactccttccaataactcaaaga

SEQ ID NO: 1060050 - DNA, 25 bp, Homo sapien
aattactccttccaataactcaaag

SEQ ID NO: 1060051 - DNA, 25 bp, Homo sapien
gaagtggcgcttacttcactccgcc

SEQ ID NO: 1060052 - DNA, 25 bp, Homo sapien
aataacgtcctcttcgtgctagaga

SEQ ID NO: 1060053 - DNA, 25 bp, Homo sapien
tgctagagatacaaaactaagtaag

SEQ ID NO: 1060054 - DNA, 25 bp, Homo sapien
tgccccaacgcctctttattttcaa

SEQ ID NO: 1060055 - DNA, 25 bp, Homo sapien
agtcctctgctatcaataaagtctt

SEQ ID NO: 1060056 - DNA, 25 bp, Homo sapien
gtcctctgctatcaataaagtcttg

SEQ ID NO: 1060057 - DNA, 25 bp, Homo sapien
tgctatcaataaagtcttggagggc

SEQ ID NO: 1060058 - DNA, 25 bp, Homo sapien
ctgctatcaataaagtcttggaggg

SEQ ID NO: 1060059 - DNA, 25 bp, Homo sapien
tcctctcaaaggcataacaagacat

SEQ ID NO: 1060060 - DNA, 25 bp, Homo sapien
ctccagctgccgaattgccgtttct

SEQ ID NO: 1060061 - DNA, 25 bp, Homo sapien
tgccgaattgccgtttctctttctt

SEQ ID NO: 1060062 - DNA, 25 bp, Homo sapien
cagctgccgaattgccgtttctctt

SEQ ID NO: 1060063 - DNA, 25 bp, Homo sapien
tccaaatcctgctcagtgatggcca

SEQ ID NO: 1060064 - DNA, 25 bp, Homo sapien
aatcagatcaccctggtcatggatc

SEQ ID NO: 1060065 - DNA, 25 bp, Homo sapien
catggatcatcatggccaaatcttt

SEQ ID NO: 1060066 - DNA, 25 bp, Homo sapien
aaatatctgattgacatccaaaatg

SEQ ID NO: 1060067 - DNA, 25 bp, Homo sapien
ctttaaatatctgattgacatccaa

SEQ ID NO: 1060068 - DNA, 25 bp, Homo sapien
tgccaaatactatcaactcaccttg

SEQ ID NO: 1060069 - DNA, 25 bp, Homo sapien
ggttaaaggtatcaataatacatac

SEQ ID NO: 1060070 - DNA, 25 bp, Homo sapien
cagatgcatgccaaatactatcaac

SEQ ID NO: 1060071 - DNA, 25 bp, Homo sapien
aactcctagatggtgcttcagcctc

SEQ ID NO: 1060072 - DNA, 25 bp, Homo sapien
gtggctcacgcctgtaatcccacca

SEQ ID NO: 1060073 - DNA, 25 bp, Homo sapien
gggcagatcacctgaggtcgagagt

SEQ ID NO: 1060074 - DNA, 25 bp, Homo sapien
aaaaaagagttactggccaggcgtg

SEQ ID NO: 1060075 - DNA, 25 bp, Homo sapien
aatcccaccacctgggaggccaagg

SEQ ID NO: 1060076 - DNA, 25 bp, Homo sapien
ccttggtaagagactagccttttct

SEQ ID NO: 1060077 - DNA, 25 bp, Homo sapien
tacatgtcctggtttcactaccact

SEQ ID NO: 1060078 - DNA, 25 bp, Homo sapien
tatccaaactatccagccatgaaat

SEQ ID NO: 1060079 - DNA, 25 bp, Homo sapien
gccatgaaatcgagttactaccttg

SEQ ID NO: 1060080 - DNA, 25 bp, Homo sapien
ggctctttcgacgtgcacctctgag

SEQ ID NO: 1060081 - DNA, 25 bp, Homo sapien
gcagctcgctgtaactgttcagtgg

SEQ ID NO: 1060082 - DNA, 25 bp, Homo sapien
ctgatagtaagcagctcgctgtaac

SEQ ID NO: 1060083 - DNA, 25 bp, Homo sapien
tgttcagtggctctttcgacgtgca

SEQ ID NO: 1060084 - DNA, 25 bp, Homo sapien
taaaaagtctgcaacacagagtgac

SEQ ID NO: 1060085 - DNA, 25 bp, Homo sapien
agagtgactttctttggtacccgct

SEQ ID NO: 1060086 - DNA, 25 bp, Homo sapien
ctaaaaagtctgcaacacagagtga

SEQ ID NO: 1060087 - DNA, 25 bp, Homo sapien
cacagagtgactttctttggtaccc

SEQ ID NO: 1060088 - DNA, 25 bp, Homo sapien
gctgtagctgttctcaatatgtcaa

SEQ ID NO: 1060089 - DNA, 25 bp, Homo sapien
taaacctaagcaaaggctgtagctg

SEQ ID NO: 1060090 - DNA, 25 bp, Homo sapien
tatgactactttcctttagcttaaa

SEQ ID NO: 1060091 - DNA, 25 bp, Homo sapien
gaactgggactgcaattatgactac

SEQ ID NO: 1060092 - DNA, 25 bp, Homo sapien
ggtgtgattattttttgtagatcta

SEQ ID NO: 1060093 - DNA, 25 bp, Homo sapien
aaggtgtgattattttttgtagatc

SEQ ID NO: 1060094 - DNA, 25 bp, Homo sapien
tcaaggtgtgattattttttgtaga

SEQ ID NO: 1060095 - DNA, 25 bp, Homo sapien
gtgtgattattttttgtagatctat

SEQ ID NO: 1060096 - DNA, 25 bp, Homo sapien
gaaggatttcactttacaggaacag

SEQ ID NO: 1060097 - DNA, 25 bp, Homo sapien
caacaccaaattgaagggaagtgag

SEQ ID NO: 1060098 - DNA, 25 bp, Homo sapien
tataaatagcagtcgaagttgattc

SEQ ID NO: 1060099 - DNA, 25 bp, Homo sapien
cagagtttcaactaacatgtagaag

SEQ ID NO: 1060100 - DNA, 25 bp, Homo sapien
tcacccatagataataccgtcaaca

SEQ ID NO: 1060101 - DNA, 25 bp, Homo sapien
atacagcaagcggagggagaaaaaa

SEQ ID NO: 1060102 - DNA, 25 bp, Homo sapien
tacagctatcccaggaacacggaaa

SEQ ID NO: 1060103 - DNA, 25 bp, Homo sapien
gaatttctttacgagcactcccagg

SEQ ID NO: 1060104 - DNA, 25 bp, Homo sapien
ggatacacatcttcttgcgagattt

SEQ ID NO: 1060105 - DNA, 25 bp, Homo sapien
tataaactagccagataataagtcc

SEQ ID NO: 1060106 - DNA, 25 bp, Homo sapien
caggatacacatcttcttgcgagat

SEQ ID NO: 1060107 - DNA, 25 bp, Homo sapien
tagccagataataagtcccaagatt

SEQ ID NO: 1060108 - DNA, 25 bp, Homo sapien
cctttctatgcagacaggtgggaga

SEQ ID NO: 1060109 - DNA, 25 bp, Homo sapien
tcaccaggaatgtagaaccacaagt

SEQ ID NO: 1060110 - DNA, 25 bp, Homo sapien
tctccataggtcacgaattccaaag

SEQ ID NO: 1060111 - DNA, 25 bp, Homo sapien
acagctcagcgggagaacgatcgga

SEQ ID NO: 1060112 - DNA, 25 bp, Homo sapien
ctgtggaaaagggaagtggacaaca

SEQ ID NO: 1060113 - DNA, 25 bp, Homo sapien
gcttccctactgttcacattagttt

SEQ ID NO: 1060114 - DNA, 25 bp, Homo sapien
caaagaaacttatgcatttgggccc

SEQ ID NO: 1060115 - DNA, 25 bp, Homo sapien
cagggtagccaaatcctctaattca

SEQ ID NO: 1060116 - DNA, 25 bp, Homo sapien
tgtattaagtaagtgcaacagtgca

SEQ ID NO: 1060117 - DNA, 25 bp, Homo sapien
caaatgatgtatccaagtccgactg

SEQ ID NO: 1060118 - DNA, 25 bp, Homo sapien
cttgggctcagacgtaccgatatac

SEQ ID NO: 1060119 - DNA, 25 bp, Homo sapien
ttaaacagggatcatagaaccaagg

SEQ ID NO: 1060120 - DNA, 25 bp, Homo sapien
aaggaattatctctgaagctgctct

SEQ ID NO: 1060121 - DNA, 25 bp, Homo sapien
ttggcaactaccacaaattctaggc

SEQ ID NO: 1060122 - DNA, 25 bp, Homo sapien
tgaataggtttattaagaccaccta

SEQ ID NO: 1060123 - DNA, 25 bp, Homo sapien
tttgctctccatgatcaccattaca

SEQ ID NO: 1060124 - DNA, 25 bp, Homo sapien
cattacaacaaccacaggtcacaca

SEQ ID NO: 1060125 - DNA, 25 bp, Homo sapien
tattgttcccattttatatacgtgc

SEQ ID NO: 1060126 - DNA, 25 bp, Homo sapien
tcccattttatatacgtgctgccaa

SEQ ID NO: 1060127 - DNA, 25 bp, Homo sapien
ttcccattttatatacgtgctgcca

SEQ ID NO: 1060128 - DNA, 25 bp, Homo sapien
tgttcccattttatatacgtgctgc

SEQ ID NO: 1060129 - DNA, 25 bp, Homo sapien
gtctccccctcccatttggcgcgcc

SEQ ID NO: 1060130 - DNA, 25 bp, Homo sapien
ggcagtcgaacagcgggaggctaga

SEQ ID NO: 1060131 - DNA, 25 bp, Homo sapien
gggcagtcgaacagcgggaggctag

SEQ ID NO: 1060132 - DNA, 25 bp, Homo sapien
cgggaggctagagccggagttcgcg

SEQ ID NO: 1060133 - DNA, 25 bp, Homo sapien
ctagagccggagttcgcggctgccg

SEQ ID NO: 1060134 - DNA, 25 bp, Homo sapien
tcagtcaagagttgggcgtaagttc

SEQ ID NO: 1060135 - DNA, 25 bp, Homo sapien
gagccgttcggctcgcagcagaaaa

SEQ ID NO: 1060136 - DNA, 25 bp, Homo sapien
ctgcctaagtgagcgcctttgagcc

SEQ ID NO: 1060137 - DNA, 25 bp, Homo sapien
cggcccggtgcagcaaacagttttt

SEQ ID NO: 1060138 - DNA, 25 bp, Homo sapien
caaccacagagggatgcggggcttg

SEQ ID NO: 1060139 - DNA, 25 bp, Homo sapien
gatgcggggcttggaggtagggttg

SEQ ID NO: 1060140 - DNA, 25 bp, Homo sapien
cagacagacaagtgccgcacgaggg

SEQ ID NO: 1060141 - DNA, 25 bp, Homo sapien
gggctggctcgagcgcgctcgggac

SEQ ID NO: 1060142 - DNA, 25 bp, Homo sapien
tacatccagatgtaaaccgggaggg

SEQ ID NO: 1060143 - DNA, 25 bp, Homo sapien
aattagtttgtctcctttgactaca

SEQ ID NO: 1060144 - DNA, 25 bp, Homo sapien
ctcaattagtttgtctcctttgact

SEQ ID NO: 1060145 - DNA, 25 bp, Homo sapien
ctcctttgactacatccagatgtaa

SEQ ID NO: 1060146 - DNA, 25 bp, Homo sapien
cactggcaaaaatctttagtgtggc

SEQ ID NO: 1060147 - DNA, 25 bp, Homo sapien
actggcaaaaatctttagtgtggca

SEQ ID NO: 1060148 - DNA, 25 bp, Homo sapien
cagagtgtatctttacacactgggc

SEQ ID NO: 1060149 - DNA, 25 bp, Homo sapien
cactgggcttaaaagactcatggct

SEQ ID NO: 1060150 - DNA, 25 bp, Homo sapien
tatcacaacacatcacaagcctttg

SEQ ID NO: 1060151 - DNA, 25 bp, Homo sapien
tagacagctcggttagtatcaagtg

SEQ ID NO: 1060152 - DNA, 25 bp, Homo sapien
ctggtggtcaatggtaaagtcacac

SEQ ID NO: 1060153 - DNA, 25 bp, Homo sapien
caaatcagggtttctcccaaataag

SEQ ID NO: 1060154 - DNA, 25 bp, Homo sapien
tggtaaagtcacacaaatcagggtt

SEQ ID NO: 1060155 - DNA, 25 bp, Homo sapien
aagtcacacaaatcagggtttctcc

SEQ ID NO: 1060156 - DNA, 25 bp, Homo sapien
acaagtgcagcatggacccgagagc

SEQ ID NO: 1060157 - DNA, 25 bp, Homo sapien
tagacaagtgcagcatggacccgag

SEQ ID NO: 1060158 - DNA, 25 bp, Homo sapien
gtgcagcatggacccgagagcaaga

SEQ ID NO: 1060159 - DNA, 25 bp, Homo sapien
tgtggtagacaagtgcagcatggac

SEQ ID NO: 1060160 - DNA, 25 bp, Homo sapien
ggatcatggtcagaaactccagctt

SEQ ID NO: 1060161 - DNA, 25 bp, Homo sapien
tagaaggaagagtatgatcgccaac

SEQ ID NO: 1060162 - DNA, 25 bp, Homo sapien
tgagccttgaatctcctcggtgggt

SEQ ID NO: 1060163 - DNA, 25 bp, Homo sapien
tgttacagtgagaaggaaactccct

SEQ ID NO: 1060164 - DNA, 25 bp, Homo sapien
ctgggaataaccaaatcagaaacgt

SEQ ID NO: 1060165 - DNA, 25 bp, Homo sapien
tgggaataaccaaatcagaaacgta

SEQ ID NO: 1060166 - DNA, 25 bp, Homo sapien
tgtctgaggcttctcgcgcagagtg

SEQ ID NO: 1060167 - DNA, 25 bp, Homo sapien
cacagccgatggcaatgtctgaggc

SEQ ID NO: 1060168 - DNA, 25 bp, Homo sapien
ttgtggatgcgccaaatgagaccgt

SEQ ID NO: 1060169 - DNA, 25 bp, Homo sapien
ggttccaaccgaatgtgacccaaga

SEQ ID NO: 1060170 - DNA, 25 bp, Homo sapien
agccccagtaagcccttgagttcat

SEQ ID NO: 1060171 - DNA, 25 bp, Homo sapien
ccccagtaagcccttgagttcatca

SEQ ID NO: 1060172 - DNA, 25 bp, Homo sapien
agtaagcccttgagttcatcatcct

SEQ ID NO: 1060173 - DNA, 25 bp, Homo sapien
tggaagccccagtaagcccttgagt

SEQ ID NO: 1060174 - DNA, 25 bp, Homo sapien
aagagaaccccctgctgctaagtca

SEQ ID NO: 1060175 - DNA, 25 bp, Homo sapien
gactcaagagaaccccctgctgcta

SEQ ID NO: 1060176 - DNA, 25 bp, Homo sapien
cagattgccaaaggcccattactgg

SEQ ID NO: 1060177 - DNA, 25 bp, Homo sapien
aaaggcccattactggactcaagag

SEQ ID NO: 1060178 - DNA, 25 bp, Homo sapien
gaaactgccttggtgtacaggaata

SEQ ID NO: 1060179 - DNA, 25 bp, Homo sapien
tgcccggcctaagttgtacaatttc

SEQ ID NO: 1060180 - DNA, 25 bp, Homo sapien
gaccaatcacaccagtgcagtgaca

SEQ ID NO: 1060181 - DNA, 25 bp, Homo sapien
tgcagtgacagctatgtaaaggact

SEQ ID NO: 1060182 - DNA, 25 bp, Homo sapien
aaagccatggaagtatagcagcagc

SEQ ID NO: 1060183 - DNA, 25 bp, Homo sapien
ctaaaagccatggaagtatagcagc

SEQ ID NO: 1060184 - DNA, 25 bp, Homo sapien
ccatggaagtatagcagcagcctgg

SEQ ID NO: 1060185 - DNA, 25 bp, Homo sapien
gccatggaagtatagcagcagcctg

SEQ ID NO: 1060186 - DNA, 25 bp, Homo sapien
taagggtagaaatccgcttgttgtg

SEQ ID NO: 1060187 - DNA, 25 bp, Homo sapien
aagggtagaaatccgcttgttgtgg

SEQ ID NO: 1060188 - DNA, 25 bp, Homo sapien
aatggtaagggtagaaatccgcttg

SEQ ID NO: 1060189 - DNA, 25 bp, Homo sapien
cctcaatggtaagggtagaaatccg

SEQ ID NO: 1060190 - DNA, 25 bp, Homo sapien
tcctgaatcgaccaactgagggatc

SEQ ID NO: 1060191 - DNA, 25 bp, Homo sapien
cctgaatcgaccaactgagggatcc

SEQ ID NO: 1060192 - DNA, 25 bp, Homo sapien
tgaatcgaccaactgagggatccac

SEQ ID NO: 1060193 - DNA, 25 bp, Homo sapien
gttcctgaatcgaccaactgaggga

SEQ ID NO: 1060194 - DNA, 25 bp, Homo sapien
ctgggaccactgcagtttgcaccat

SEQ ID NO: 1060195 - DNA, 25 bp, Homo sapien
gactgggaccactgcagtttgcacc

SEQ ID NO: 1060196 - DNA, 25 bp, Homo sapien
tgactgggaccactgcagtttgcac

SEQ ID NO: 1060197 - DNA, 25 bp, Homo sapien
cttgactgggaccactgcagtttgc

SEQ ID NO: 1060198 - DNA, 25 bp, Homo sapien
tttgggtatggcatgggcaagccac

SEQ ID NO: 1060199 - DNA, 25 bp, Homo sapien
ggcacaacaggagtcaagtccacat

SEQ ID NO: 1060200 - DNA, 25 bp, Homo sapien
cagcttcagggttatagactgcagg

SEQ ID NO: 1060201 - DNA, 25 bp, Homo sapien
tcatgttcactgctgacggcacaac

SEQ ID NO: 1060202 - DNA, 25 bp, Homo sapien
agcaaggaaggtgtgggcttcttgc

SEQ ID NO: 1060203 - DNA, 25 bp, Homo sapien
aatcagcaaggaaggtgtgggcttc

SEQ ID NO: 1060204 - DNA, 25 bp, Homo sapien
tcagcaaggaaggtgtgggcttctt

SEQ ID NO: 1060205 - DNA, 25 bp, Homo sapien
tcaaatcagcaaggaaggtgtgggc

SEQ ID NO: 1060206 - DNA, 25 bp, Homo sapien
tataaacctgtgtctatggcaccag

SEQ ID NO: 1060207 - DNA, 25 bp, Homo sapien
tacatggttaggatgccaggagaca

SEQ ID NO: 1060208 - DNA, 25 bp, Homo sapien
tgaaagacgataccgcacacatgga

SEQ ID NO: 1060209 - DNA, 25 bp, Homo sapien
tctgctacccgggacttggaaggat

SEQ ID NO: 1060210 - DNA, 25 bp, Homo sapien
taatataatggggatggagcattgc

SEQ ID NO: 1060211 - DNA, 25 bp, Homo sapien
ggatggagcattgcctcccaagccc

SEQ ID NO: 1060212 - DNA, 25 bp, Homo sapien
ggagcattgcctcccaagcccagtg

SEQ ID NO: 1060213 - DNA, 25 bp, Homo sapien
gtaatataatggggatggagcattg

SEQ ID NO: 1060214 - DNA, 25 bp, Homo sapien
aggcggggtccaaggcgcgcacgaa

SEQ ID NO: 1060215 - DNA, 25 bp, Homo sapien
gagggaggcggggtccaaggcgcgc

SEQ ID NO: 1060216 - DNA, 25 bp, Homo sapien
gtccaaggcgcgcacgaagtcctgc

SEQ ID NO: 1060217 - DNA, 25 bp, Homo sapien
gggtccaaggcgcgcacgaagtcct

SEQ ID NO: 1060218 - DNA, 25 bp, Homo sapien
cctcgaagtagacccccgagcagac

SEQ ID NO: 1060219 - DNA, 25 bp, Homo sapien
tgggacctcaaacactctgctggaa

SEQ ID NO: 1060220 - DNA, 25 bp, Homo sapien
caatgactagtgactgtgcgcctgc

SEQ ID NO: 1060221 - DNA, 25 bp, Homo sapien
ttcgctctctaaggaaggaacccgc

SEQ ID NO: 1060222 - DNA, 25 bp, Homo sapien
tactgcccatggtcaaacagaaggc

SEQ ID NO: 1060223 - DNA, 25 bp, Homo sapien
catttccaccatcccgcgtcaggca

SEQ ID NO: 1060224 - DNA, 25 bp, Homo sapien
caggtgttgtaacaccagcaggcaa

SEQ ID NO: 1060225 - DNA, 25 bp, Homo sapien
aaacaggtgttgtaacaccagcagg

SEQ ID NO: 1060226 - DNA, 25 bp, Homo sapien
ctgggaggacgaagacgcttggtcc

SEQ ID NO: 1060227 - DNA, 25 bp, Homo sapien
cacagaccaccttctggaggcggac

SEQ ID NO: 1060228 - DNA, 25 bp, Homo sapien
gcgagctccatggtctggctggtct

SEQ ID NO: 1060229 - DNA, 25 bp, Homo sapien
cccgtggagaggcagcactcattcc

SEQ ID NO: 1060230 - DNA, 25 bp, Homo sapien
cattcccagagatctcatagatgga

SEQ ID NO: 1060231 - DNA, 25 bp, Homo sapien
gacatgaagcaagtgggcagctgct

SEQ ID NO: 1060232 - DNA, 25 bp, Homo sapien
agagcggatcccgaggtgcatcacc

SEQ ID NO: 1060233 - DNA, 25 bp, Homo sapien
ctcaagcatgaggagctggtcctca

SEQ ID NO: 1060234 - DNA, 25 bp, Homo sapien
caatcctgtgggtcgacatgaagca

SEQ ID NO: 1060235 - DNA, 25 bp, Homo sapien
gacgaggtctttcagggctggatcc

SEQ ID NO: 1060236 - DNA, 25 bp, Homo sapien
catgatggcttggatctcatactgg

SEQ ID NO: 1060237 - DNA, 25 bp, Homo sapien
gcaggtgcaggatgacctgctgacc

SEQ ID NO: 1060238 - DNA, 25 bp, Homo sapien
ctaggctcccatgtccagaagggcc

SEQ ID NO: 1060239 - DNA, 25 bp, Homo sapien
atggagtgcccttgtcgcacaggct

SEQ ID NO: 1060240 - DNA, 25 bp, Homo sapien
actacgccacattcccacacatgct

SEQ ID NO: 1060241 - DNA, 25 bp, Homo sapien
cttccaatttacactacgccacatt

SEQ ID NO: 1060242 - DNA, 25 bp, Homo sapien
gagtttcactcgagatggagtgccc

SEQ ID NO: 1060243 - DNA, 25 bp, Homo sapien
cgggaggaggcggtgacgtcctcca

SEQ ID NO: 1060244 - DNA, 25 bp, Homo sapien
cagcagcagcggtttgataaagtgg

SEQ ID NO: 1060245 - DNA, 25 bp, Homo sapien
ttgataaagtggacgtgccgggagg

SEQ ID NO: 1060246 - DNA, 25 bp, Homo sapien
aggcggtgacgtcctccacgtcgac

SEQ ID NO: 1060247 - DNA, 25 bp, Homo sapien
aaagcacctaggaggtcataggccg

SEQ ID NO: 1060248 - DNA, 25 bp, Homo sapien
aaagcctctggcctttttgcaagga

SEQ ID NO: 1060249 - DNA, 25 bp, Homo sapien
tgaggctaggccatagacgcaaagc

SEQ ID NO: 1060250 - DNA, 25 bp, Homo sapien
agggacgtgaactcgggattctcct

SEQ ID NO: 1060251 - DNA, 25 bp, Homo sapien
tggccttcacaacagtcaggtccag

SEQ ID NO: 1060252 - DNA, 25 bp, Homo sapien
tcagagtctaggctcaccaccaaga

SEQ ID NO: 1060253 - DNA, 25 bp, Homo sapien
gggagagacccctctggcaagtctg

SEQ ID NO: 1060254 - DNA, 25 bp, Homo sapien
tcacaggctggtaacttccgaagac

SEQ ID NO: 1060255 - DNA, 25 bp, Homo sapien
gctgctgagtgagaaatccgagtcc

SEQ ID NO: 1060256 - DNA, 25 bp, Homo sapien
caacctgtcctgagctacgtagagc

SEQ ID NO: 1060257 - DNA, 25 bp, Homo sapien
tactggtgagaaaaaggacgctcgg

SEQ ID NO: 1060258 - DNA, 25 bp, Homo sapien
tctcaactgtgaagcaggacaccgg

SEQ ID NO: 1060259 - DNA, 25 bp, Homo sapien
tcttgctgtacgtactggagccatc

SEQ ID NO: 1060260 - DNA, 25 bp, Homo sapien
tcttcgccttgggtttgggcagccg

SEQ ID NO: 1060261 - DNA, 25 bp, Homo sapien
gatgaactctggcaaggtcttcgcc

SEQ ID NO: 1060262 - DNA, 25 bp, Homo sapien
cagccgagcgtgttgctgcaatcct

SEQ ID NO: 1060263 - DNA, 25 bp, Homo sapien
tttctgaaattgctcaagtatttct

SEQ ID NO: 1060264 - DNA, 25 bp, Homo sapien
tggttttctgaaattgctcaagtat

SEQ ID NO: 1060265 - DNA, 25 bp, Homo sapien
ggttttctgaaattgctcaagtatt

SEQ ID NO: 1060266 - DNA, 25 bp, Homo sapien
ttctgaaattgctcaagtatttctt

SEQ ID NO: 1060267 - DNA, 25 bp, Homo sapien
cagtttctgtgagacttgcccgagg

SEQ ID NO: 1060268 - DNA, 25 bp, Homo sapien
aaatctcccatgcagtgtgatcagc

SEQ ID NO: 1060269 - DNA, 25 bp, Homo sapien
tcacgtgcgagatgttaggtccaaa

SEQ ID NO: 1060270 - DNA, 25 bp, Homo sapien
aatggttggctggtgtcggattccc

SEQ ID NO: 1060271 - DNA, 25 bp, Homo sapien
ccaaggtcctaaggttgtgttcttg

SEQ ID NO: 1060272 - DNA, 25 bp, Homo sapien
caactttgacgactttaaccacctg

SEQ ID NO: 1060273 - DNA, 25 bp, Homo sapien
tctatcaggcttggtgctacagaga

SEQ ID NO: 1060274 - DNA, 25 bp, Homo sapien
taaccacctgatgaaacctaccagt

SEQ ID NO: 1060275 - DNA, 25 bp, Homo sapien
ccatctcagctggagtctcagttca

SEQ ID NO: 1060276 - DNA, 25 bp, Homo sapien
gaccgcatcagtccataaaccaaag

SEQ ID NO: 1060277 - DNA, 25 bp, Homo sapien
gaaaactgggttagtctctgcacgg

SEQ ID NO: 1060278 - DNA, 25 bp, Homo sapien
tcttgtctcactgaacgggccttga

SEQ ID NO: 1060279 - DNA, 25 bp, Homo sapien
ctttgcagcgcaggttgacttctct

SEQ ID NO: 1060280 - DNA, 25 bp, Homo sapien
tcctttgcagcgcaggttgacttct

SEQ ID NO: 1060281 - DNA, 25 bp, Homo sapien
ggtcctcctttgcagcgcaggttga

SEQ ID NO: 1060282 - DNA, 25 bp, Homo sapien
tcagggtcctcctttgcagcgcagg

SEQ ID NO: 1060283 - DNA, 25 bp, Homo sapien
caacccattgataagtttttgagca

SEQ ID NO: 1060284 - DNA, 25 bp, Homo sapien
gggaatccctagtcccattataaca

SEQ ID NO: 1060285 - DNA, 25 bp, Homo sapien
tatctacctctagttggatccctgc

SEQ ID NO: 1060286 - DNA, 25 bp, Homo sapien
tctgtctcccagtgatcatcttgtg

SEQ ID NO: 1060287 - DNA, 25 bp, Homo sapien
gggttgtgtgatttctgaccgctgc

SEQ ID NO: 1060288 - DNA, 25 bp, Homo sapien
ctcatgggggttgtgtgatttctga

SEQ ID NO: 1060289 - DNA, 25 bp, Homo sapien
gttgtgtgatttctgaccgctgctg

SEQ ID NO: 1060290 - DNA, 25 bp, Homo sapien
tgtgtgatttctgaccgctgctggg

SEQ ID NO: 1060291 - DNA, 25 bp, Homo sapien
taccaggagagtacttacatagtgc

SEQ ID NO: 1060292 - DNA, 25 bp, Homo sapien
tgggcaattgacagggatgcaatcc

SEQ ID NO: 1060293 - DNA, 25 bp, Homo sapien
gcgttataggcagagccctagccga

SEQ ID NO: 1060294 - DNA, 25 bp, Homo sapien
gaagttctgcggtagtgcctccagg

SEQ ID NO: 1060295 - DNA, 25 bp, Homo sapien
tttacgcttcagtcatgcatgagag

SEQ ID NO: 1060296 - DNA, 25 bp, Homo sapien
cagttagtttccatacccttaacat

SEQ ID NO: 1060297 - DNA, 25 bp, Homo sapien
tgtcttctctaaaggtaccagttta

SEQ ID NO: 1060298 - DNA, 25 bp, Homo sapien
aaggtaccagtttacgcttcagtca

SEQ ID NO: 1060299 - DNA, 25 bp, Homo sapien
tcctccaaggcgtctggatcctctg

SEQ ID NO: 1060300 - DNA, 25 bp, Homo sapien
gagccgtgggattctcaggcactgt

SEQ ID NO: 1060301 - DNA, 25 bp, Homo sapien
cacaggcttcctaagtagttttctg

SEQ ID NO: 1060302 - DNA, 25 bp, Homo sapien
actgttgttgttctcaccacaggct

SEQ ID NO: 1060303 - DNA, 25 bp, Homo sapien
gttagccaggaaaatcagccaggcg

SEQ ID NO: 1060304 - DNA, 25 bp, Homo sapien
ccagttagccaggaaaatcagccag

SEQ ID NO: 1060305 - DNA, 25 bp, Homo sapien
agccaggaaaatcagccaggcgagc

SEQ ID NO: 1060306 - DNA, 25 bp, Homo sapien
tccccagttagccaggaaaatcagc

SEQ ID NO: 1060307 - DNA, 25 bp, Homo sapien
cccaccatcccaagaggacatgaag

SEQ ID NO: 1060308 - DNA, 25 bp, Homo sapien
catgaagcatagtacagccaggcac

SEQ ID NO: 1060309 - DNA, 25 bp, Homo sapien
cagctgggagatcttcagcaagtgc

SEQ ID NO: 1060310 - DNA, 25 bp, Homo sapien
caagtgcaatgtcccctctgagact

SEQ ID NO: 1060311 - DNA, 25 bp, Homo sapien
ccatcttccctgtttacaatgtcag

SEQ ID NO: 1060312 - DNA, 25 bp, Homo sapien
catgagagcaccaagcccgtcttgt

SEQ ID NO: 1060313 - DNA, 25 bp, Homo sapien
aagcccgtcttgtttacctctatgt

SEQ ID NO: 1060314 - DNA, 25 bp, Homo sapien
tttacaatgtcagttccatgagagc

SEQ ID NO: 1060315 - DNA, 25 bp, Homo sapien
cttccaagcccggagccaggctggc

SEQ ID NO: 1060316 - DNA, 25 bp, Homo sapien
tgggcacatggtccttgcgcttcct

SEQ ID NO: 1060317 - DNA, 25 bp, Homo sapien
ttctcttgggcacatggtccttgcg

SEQ ID NO: 1060318 - DNA, 25 bp, Homo sapien
tggatgttgggggaggccctttgcc

SEQ ID NO: 1060319 - DNA, 25 bp, Homo sapien
ctattgcaatcacttcctcccccat

SEQ ID NO: 1060320 - DNA, 25 bp, Homo sapien
tctgctattgcaatcacttcctccc

SEQ ID NO: 1060321 - DNA, 25 bp, Homo sapien
tgctattgcaatcacttcctccccc

SEQ ID NO: 1060322 - DNA, 25 bp, Homo sapien
gctattgcaatcacttcctccccca

SEQ ID NO: 1060323 - DNA, 25 bp, Homo sapien
gtttctcgataaaacaagaatgacg

SEQ ID NO: 1060324 - DNA, 25 bp, Homo sapien
aaacaagaatgacgcccaggatttc

SEQ ID NO: 1060325 - DNA, 25 bp, Homo sapien
tcatcctgtttctcgataaaacaag

SEQ ID NO: 1060326 - DNA, 25 bp, Homo sapien
gataaaacaagaatgacgcccagga

SEQ ID NO: 1060327 - DNA, 25 bp, Homo sapien
ctctgagccacttaggagctgtgtg

SEQ ID NO: 1060328 - DNA, 25 bp, Homo sapien
gatgggcagccacaacattagagct

SEQ ID NO: 1060329 - DNA, 25 bp, Homo sapien
tttctaagcccattaactagagcca

SEQ ID NO: 1060330 - DNA, 25 bp, Homo sapien
ggtatgggttaagtgctcaggctct

SEQ ID NO: 1060331 - DNA, 25 bp, Homo sapien
tccttcaaagctggtctctctctca

SEQ ID NO: 1060332 - DNA, 25 bp, Homo sapien
ctgcaggggaaaaaacatcctcctt

SEQ ID NO: 1060333 - DNA, 25 bp, Homo sapien
ccttcaaagctggtctctctctcag

SEQ ID NO: 1060334 - DNA, 25 bp, Homo sapien
aaaaacatcctccttcaaagctggt

SEQ ID NO: 1060335 - DNA, 25 bp, Homo sapien
agaatcacagaggtagtcaccccag

SEQ ID NO: 1060336 - DNA, 25 bp, Homo sapien
ccttcatggcatagatggaggagtt

SEQ ID NO: 1060337 - DNA, 25 bp, Homo sapien
tggataccttgtagtcagggtcaag

SEQ ID NO: 1060338 - DNA, 25 bp, Homo sapien
gcaggtcagcgatgtgccagaactt

SEQ ID NO: 1060339 - DNA, 25 bp, Homo sapien
aactgagcacgacttgttgccctgc

SEQ ID NO: 1060340 - DNA, 25 bp, Homo sapien
ggtgtccatcatctcagatccctag

SEQ ID NO: 1060341 - DNA, 25 bp, Homo sapien
tgcattgcccacaagaacgtgagct

SEQ ID NO: 1060342 - DNA, 25 bp, Homo sapien
tgttgccctgccaagtgagggagca

SEQ ID NO: 1060343 - DNA, 25 bp, Homo sapien
catcgggcacatgaggcgtgtcatc

SEQ ID NO: 1060344 - DNA, 25 bp, Homo sapien
tcccagtttctcatcgggcacatga

SEQ ID NO: 1060345 - DNA, 25 bp, Homo sapien
tctgatgagcttggtcaggcgttcc

SEQ ID NO: 1060346 - DNA, 25 bp, Homo sapien
caggcgttccacaatttccagtaca

SEQ ID NO: 1060347 - DNA, 25 bp, Homo sapien
cttttttgaagagagcgatggactc

SEQ ID NO: 1060348 - DNA, 25 bp, Homo sapien
catagttctgctatctgattgtaga

SEQ ID NO: 1060349 - DNA, 25 bp, Homo sapien
tagatgttgttacttccagctggga

SEQ ID NO: 1060350 - DNA, 25 bp, Homo sapien
cattactaagccagggtttccatag

SEQ ID NO: 1060351 - DNA, 25 bp, Homo sapien
ccccagctttggatgcatcggtcag

SEQ ID NO: 1060352 - DNA, 25 bp, Homo sapien
cagggtccgccatgtctgctgtcag

SEQ ID NO: 1060353 - DNA, 25 bp, Homo sapien
cagcgcattgctggtatagtacaga

SEQ ID NO: 1060354 - DNA, 25 bp, Homo sapien
tgttgaggaccacaattcgcccagc

SEQ ID NO: 1060355 - DNA, 25 bp, Homo sapien
catagagcatccgaaagctgtcggt

SEQ ID NO: 1060356 - DNA, 25 bp, Homo sapien
gtggtggtgcccgaagaactgccct

SEQ ID NO: 1060357 - DNA, 25 bp, Homo sapien
gaactgccctgctatgacgcgatga

SEQ ID NO: 1060358 - DNA, 25 bp, Homo sapien
tcccggaaccatgccttgttttgcg

SEQ ID NO: 1060359 - DNA, 25 bp, Homo sapien
tcaggagagagacagcaggactgag

SEQ ID NO: 1060360 - DNA, 25 bp, Homo sapien
ctgtcaggagagagacagcaggact

SEQ ID NO: 1060361 - DNA, 25 bp, Homo sapien
agagagacagcaggactgagcgggt

SEQ ID NO: 1060362 - DNA, 25 bp, Homo sapien
ggagagagacagcaggactgagcgg

SEQ ID NO: 1060363 - DNA, 25 bp, Homo sapien
gggtgactccaggtgtgatgaacat

SEQ ID NO: 1060364 - DNA, 25 bp, Homo sapien
catattcgaacacccggatggctgg

SEQ ID NO: 1060365 - DNA, 25 bp, Homo sapien
ttgttggccccattgaccactccag

SEQ ID NO: 1060366 - DNA, 25 bp, Homo sapien
ggctcagtgtggctcggtcatattc

SEQ ID NO: 1060367 - DNA, 25 bp, Homo sapien
ggtcaggggaaggtggataagctga

SEQ ID NO: 1060368 - DNA, 25 bp, Homo sapien
ggtgatgcatttaagcccctcccac

SEQ ID NO: 1060369 - DNA, 25 bp, Homo sapien
gtggtgatgcatttaagcccctccc

SEQ ID NO: 1060370 - DNA, 25 bp, Homo sapien
aggtggtgatgcatttaagcccctc

SEQ ID NO: 1060371 - DNA, 25 bp, Homo sapien
cagggttctgatcctgagctggaga

SEQ ID NO: 1060372 - DNA, 25 bp, Homo sapien
gacttggtgaggcactgccctgact

SEQ ID NO: 1060373 - DNA, 25 bp, Homo sapien
tatgaagctgtgacagtcatccagg

SEQ ID NO: 1060374 - DNA, 25 bp, Homo sapien
tctctcttgtgtagcggatgggcca

SEQ ID NO: 1060375 - DNA, 25 bp, Homo sapien
ggtagaccggctgtgagcagttgtc

SEQ ID NO: 1060376 - DNA, 25 bp, Homo sapien
gtttggggtagaccggctgtgagca

SEQ ID NO: 1060377 - DNA, 25 bp, Homo sapien
ggtttggggtagaccggctgtgagc

SEQ ID NO: 1060378 - DNA, 25 bp, Homo sapien
ttggggtagaccggctgtgagcagt

SEQ ID NO: 1060379 - DNA, 25 bp, Homo sapien
ctcaggttcatgaagtaggtcacca

SEQ ID NO: 1060380 - DNA, 25 bp, Homo sapien
gcgatgcggtccagcactgtgtgca

SEQ ID NO: 1060381 - DNA, 25 bp, Homo sapien
tgagttatagacgtagtagcgctgc

SEQ ID NO: 1060382 - DNA, 25 bp, Homo sapien
taggcctcggtcagctggtactcga

SEQ ID NO: 1060383 - DNA, 25 bp, Homo sapien
gcgtcaatgtccacctggcgcatgg

SEQ ID NO: 1060384 - DNA, 25 bp, Homo sapien
ggtggtgtaagcgtcaatgtccacc

SEQ ID NO: 1060385 - DNA, 25 bp, Homo sapien
tggcgcatggcacacacgtgctgca

SEQ ID NO: 1060386 - DNA, 25 bp, Homo sapien
tgcatgctgcaggcctcgtcgcaga

SEQ ID NO: 1060387 - DNA, 25 bp, Homo sapien
cgggagctggggcacgggcgtggtg

SEQ ID NO: 1060388 - DNA, 25 bp, Homo sapien
agcacgagcgtgcacaggcccagca

SEQ ID NO: 1060389 - DNA, 25 bp, Homo sapien
cacagcacgagcgtgcacaggccca

SEQ ID NO: 1060390 - DNA, 25 bp, Homo sapien
ggcgtggtgccagaggcatacagac

SEQ ID NO: 1060391 - DNA, 25 bp, Homo sapien
gggcttcgcttcctgattcggttgt

SEQ ID NO: 1060392 - DNA, 25 bp, Homo sapien
cataatacgcaaaagaagtatgctt

SEQ ID NO: 1060393 - DNA, 25 bp, Homo sapien
gtcttgggtcgtcatttcttttctg

SEQ ID NO: 1060394 - DNA, 25 bp, Homo sapien
tatttcagttcactcctcaggcgcg

SEQ ID NO: 1060395 - DNA, 25 bp, Homo sapien
tcgatccagggatacccggagagca

SEQ ID NO: 1060396 - DNA, 25 bp, Homo sapien
taacctcatttccatacggaaggga

SEQ ID NO: 1060397 - DNA, 25 bp, Homo sapien
gctgcgatccctcacacctgtattg

SEQ ID NO: 1060398 - DNA, 25 bp, Homo sapien
gagactttgcaacaacgcgtgcgcc

SEQ ID NO: 1060399 - DNA, 25 bp, Homo sapien
gctaaaagccgctcgatgctctgct

SEQ ID NO: 1060400 - DNA, 25 bp, Homo sapien
agcccgctaggcctgaagaccgact

SEQ ID NO: 1060401 - DNA, 25 bp, Homo sapien
cttcgcttcgcaggcttcaaatggc

SEQ ID NO: 1060402 - DNA, 25 bp, Homo sapien
tgaagaccgactgcccttcgcttcg

SEQ ID NO: 1060403 - DNA, 25 bp, Homo sapien
caggaccaggtcccgaaggagggcg

SEQ ID NO: 1060404 - DNA, 25 bp, Homo sapien
gggcgccgcgggacgaccagggcat

SEQ ID NO: 1060405 - DNA, 25 bp, Homo sapien
caggtcggtgcccaggtcgagcagg

SEQ ID NO: 1060406 - DNA, 25 bp, Homo sapien
tggacggcggcccacaggtcggtgc

SEQ ID NO: 1060407 - DNA, 25 bp, Homo sapien
accagcgccgcccacaggtagcggc

SEQ ID NO: 1060408 - DNA, 25 bp, Homo sapien
tgcagcgccacggaggccaggccca

SEQ ID NO: 1060409 - DNA, 25 bp, Homo sapien
caggtaacccagctgcaggagatgc

SEQ ID NO: 1060410 - DNA, 25 bp, Homo sapien
tgcgacccgtgcaggccggcagggt

SEQ ID NO: 1060411 - DNA, 25 bp, Homo sapien
ttgtcaaggccagatctcaagagtt

SEQ ID NO: 1060412 - DNA, 25 bp, Homo sapien
aaagccaaagctagtacagtctgtc

SEQ ID NO: 1060413 - DNA, 25 bp, Homo sapien
gagactccgtgtggctttgtcaagg

SEQ ID NO: 1060414 - DNA, 25 bp, Homo sapien
gttacagattcacggctcatggagg

SEQ ID NO: 1060415 - DNA, 25 bp, Homo sapien
caccacacacaaatgcccagagggc

SEQ ID NO: 1060416 - DNA, 25 bp, Homo sapien
accacacacaaatgcccagagggcc

SEQ ID NO: 1060417 - DNA, 25 bp, Homo sapien
ccacacacaaatgcccagagggcca

SEQ ID NO: 1060418 - DNA, 25 bp, Homo sapien
gggcgaggaagtcggcgtaggccaa

SEQ ID NO: 1060419 - DNA, 25 bp, Homo sapien
gtgccgtctccaagaaggtctcgaa

SEQ ID NO: 1060420 - DNA, 25 bp, Homo sapien
tgtccagggcgaggaagtcggcgta

SEQ ID NO: 1060421 - DNA, 25 bp, Homo sapien
ccgtctccaagaaggtctcgaagag

SEQ ID NO: 1060422 - DNA, 25 bp, Homo sapien
cagcctgggtaacaaagtgggacct

SEQ ID NO: 1060423 - DNA, 25 bp, Homo sapien
aggatgtgacctgtggcccacccag

SEQ ID NO: 1060424 - DNA, 25 bp, Homo sapien
cacagcgctttgctgcgtaggtgct

SEQ ID NO: 1060425 - DNA, 25 bp, Homo sapien
gtgctatccgggtggtatttgtcaa

SEQ ID NO: 1060426 - DNA, 25 bp, Homo sapien
tttgctgcgtaggtgctatccgggt

SEQ ID NO: 1060427 - DNA, 25 bp, Homo sapien
gagcagtgcccacgagatgcccagg

SEQ ID NO: 1060428 - DNA, 25 bp, Homo sapien
agcagtgcccacgagatgcccagga

SEQ ID NO: 1060429 - DNA, 25 bp, Homo sapien
tcgagcagtgcccacgagatgccca

SEQ ID NO: 1060430 - DNA, 25 bp, Homo sapien
cgagcagtgcccacgagatgcccag

SEQ ID NO: 1060431 - DNA, 25 bp, Homo sapien
tggtagtacacaagccgcagagcca

SEQ ID NO: 1060432 - DNA, 25 bp, Homo sapien
acccggtacagccactcggagctgg

SEQ ID NO: 1060433 - DNA, 25 bp, Homo sapien
ctagggtgcagccagtggtagtaca

SEQ ID NO: 1060434 - DNA, 25 bp, Homo sapien
aaggcgaagtggatgatggcccggc

SEQ ID NO: 1060435 - DNA, 25 bp, Homo sapien
gatacccctctggagaaagcagact

SEQ ID NO: 1060436 - DNA, 25 bp, Homo sapien
taaatgggtcatgcgcctgttctga

SEQ ID NO: 1060437 - DNA, 25 bp, Homo sapien
tctgtgctaaatgggtcatgcgcct

SEQ ID NO: 1060438 - DNA, 25 bp, Homo sapien
gctgatacccctctggagaaagcag

SEQ ID NO: 1060439 - DNA, 25 bp, Homo sapien
cggatgaagctaggctggtagctgg

SEQ ID NO: 1060440 - DNA, 25 bp, Homo sapien
tgcaagtagcggatgaagctaggct

SEQ ID NO: 1060441 - DNA, 25 bp, Homo sapien
caggcgtcccgctcttgctgagtgc

SEQ ID NO: 1060442 - DNA, 25 bp, Homo sapien
ttgaaaggaggcctctgcccgactc

SEQ ID NO: 1060443 - DNA, 25 bp, Homo sapien
ggctttattcataacctaataatac

SEQ ID NO: 1060444 - DNA, 25 bp, Homo sapien
tattcataacctaataatactgttg

SEQ ID NO: 1060445 - DNA, 25 bp, Homo sapien
catgaggctttattcataacctaat

SEQ ID NO: 1060446 - DNA, 25 bp, Homo sapien
gatttcatgaggctttattcataac

SEQ ID NO: 1060447 - DNA, 25 bp, Homo sapien
tctgtcccgtttctccaaaccatgg

SEQ ID NO: 1060448 - DNA, 25 bp, Homo sapien
ctgtcccgtttctccaaaccatgga

SEQ ID NO: 1060449 - DNA, 25 bp, Homo sapien
tgtcccgtttctccaaaccatggac

SEQ ID NO: 1060450 - DNA, 25 bp, Homo sapien
ttctgtcccgtttctccaaaccatg

SEQ ID NO: 1060451 - DNA, 25 bp, Homo sapien
taaagctagtgagttgtcccaagag

SEQ ID NO: 1060452 - DNA, 25 bp, Homo sapien
tttgtggctgtagaatccgtgaccg

SEQ ID NO: 1060453 - DNA, 25 bp, Homo sapien
caggagccctcccattaaggacgac

SEQ ID NO: 1060454 - DNA, 25 bp, Homo sapien
gaatctgacttgcaaactctagctg

SEQ ID NO: 1060455 - DNA, 25 bp, Homo sapien
tatttccagcgaatgtgtatgttat

SEQ ID NO: 1060456 - DNA, 25 bp, Homo sapien
tctgatctttgacgcaggtttcccc

SEQ ID NO: 1060457 - DNA, 25 bp, Homo sapien
agggtctgatctttgacgcaggttt

SEQ ID NO: 1060458 - DNA, 25 bp, Homo sapien
tatttttataggtaagggtctgatc

SEQ ID NO: 1060459 - DNA, 25 bp, Homo sapien
caatatgaattgatgaaagcgccac

SEQ ID NO: 1060460 - DNA, 25 bp, Homo sapien
aatcatgggcttccagacttcagga

SEQ ID NO: 1060461 - DNA, 25 bp, Homo sapien
tctgagcctactttggagaatagat

SEQ ID NO: 1060462 - DNA, 25 bp, Homo sapien
tgtaaccctgtgtgagaatcctctg

SEQ ID NO: 1060463 - DNA, 25 bp, Homo sapien
gttgaatgaaccatccttacatcct

SEQ ID NO: 1060464 - DNA, 25 bp, Homo sapien
ctcacttggttatgatgtttaattc

SEQ ID NO: 1060465 - DNA, 25 bp, Homo sapien
tgaaccatccttacatccttatgtt

SEQ ID NO: 1060466 - DNA, 25 bp, Homo sapien
tatgttctgagaactaatctcactt

SEQ ID NO: 1060467 - DNA, 25 bp, Homo sapien
actttgtgggggtgagacagttgga

SEQ ID NO: 1060468 - DNA, 25 bp, Homo sapien
tgtgggggtgagacagttggattac

SEQ ID NO: 1060469 - DNA, 25 bp, Homo sapien
tgggggtgagacagttggattactt

SEQ ID NO: 1060470 - DNA, 25 bp, Homo sapien
ggggtgagacagttggattacttga

SEQ ID NO: 1060471 - DNA, 25 bp, Homo sapien
atccgggtcacgctaacgccgcggt

SEQ ID NO: 1060472 - DNA, 25 bp, Homo sapien
cctagcgatgcgcatccgggtcacg

SEQ ID NO: 1060473 - DNA, 25 bp, Homo sapien
ttccggttcctagcgatgcgcatcc

SEQ ID NO: 1060474 - DNA, 25 bp, Homo sapien
cggttcctagcgatgcgcatccggg

SEQ ID NO: 1060475 - DNA, 25 bp, Homo sapien
gactttctgcctgttacattttgtg

SEQ ID NO: 1060476 - DNA, 25 bp, Homo sapien
tgtgcttttaaccaattaaagaagc

SEQ ID NO: 1060477 - DNA, 25 bp, Homo sapien
tatccctgttgatttgtttgtgcct

SEQ ID NO: 1060478 - DNA, 25 bp, Homo sapien
ccaattaaagaagccaatggcattt

SEQ ID NO: 1060479 - DNA, 25 bp, Homo sapien
gacaggttgtgctggtcagcaaaag

SEQ ID NO: 1060480 - DNA, 25 bp, Homo sapien
cagatcaattcctacgtcctttgga

SEQ ID NO: 1060481 - DNA, 25 bp, Homo sapien
ggaagtgccccagaatgatcatgat

SEQ ID NO: 1060482 - DNA, 25 bp, Homo sapien
tgaaaattgaggatgttgctcttcc

SEQ ID NO: 1060483 - DNA, 25 bp, Homo sapien
cttggctgggaagactagggcatct

SEQ ID NO: 1060484 - DNA, 25 bp, Homo sapien
tagggcatctgggtctgttccttca

SEQ ID NO: 1060485 - DNA, 25 bp, Homo sapien
ttccttcagtaggaaagtctggcat

SEQ ID NO: 1060486 - DNA, 25 bp, Homo sapien
tgttccttcagtaggaaagtctggc

SEQ ID NO: 1060487 - DNA, 25 bp, Homo sapien
gggtgtctgtttctcgcagccaaaa

SEQ ID NO: 1060488 - DNA, 25 bp, Homo sapien
ttacctgaacacatagaaaccctgg

SEQ ID NO: 1060489 - DNA, 25 bp, Homo sapien
aagtgcttctgtgctaactccccgc

SEQ ID NO: 1060490 - DNA, 25 bp, Homo sapien
tcagagggaagatacgcatagcaag

SEQ ID NO: 1060491 - DNA, 25 bp, Homo sapien
taaccgcttccaggcagtaactcgg

SEQ ID NO: 1060492 - DNA, 25 bp, Homo sapien
gcattacgagaagggcagcgtgcca

SEQ ID NO: 1060493 - DNA, 25 bp, Homo sapien
agtaactcggcccatcaagactgct

SEQ ID NO: 1060494 - DNA, 25 bp, Homo sapien
ggtcttggcggtgttcatcatctgc

SEQ ID NO: 1060495 - DNA, 25 bp, Homo sapien
taaaaatggagcaacgtgagtgacc

SEQ ID NO: 1060496 - DNA, 25 bp, Homo sapien
agtaccatgtcctagcctgtctgca

SEQ ID NO: 1060497 - DNA, 25 bp, Homo sapien
accaatcagtgtggcatgaggccca

SEQ ID NO: 1060498 - DNA, 25 bp, Homo sapien
caaccagtattagaaggtgccacca

SEQ ID NO: 1060499 - DNA, 25 bp, Homo sapien
ttacgcgctaatggcagggacggcc

SEQ ID NO: 1060500 - DNA, 25 bp, Homo sapien
taatggcagggacggccaagcaccc

SEQ ID NO: 1060501 - DNA, 25 bp, Homo sapien
gcaagcagtctctcgttacgcgcta

SEQ ID NO: 1060502 - DNA, 25 bp, Homo sapien
agtctctcgttacgcgctaatggca

SEQ ID NO: 1060503 - DNA, 25 bp, Homo sapien
gtccgcgccgccaacgccgtcactg

SEQ ID NO: 1060504 - DNA, 25 bp, Homo sapien
gccaagccacgtccgcgccgccaac

SEQ ID NO: 1060505 - DNA, 25 bp, Homo sapien
gtcctcacgccccacacgccaagcc

SEQ ID NO: 1060506 - DNA, 25 bp, Homo sapien
acacgccaagccacgtccgcgccgc

SEQ ID NO: 1060507 - DNA, 25 bp, Homo sapien
tgatccgagccgaagcctcgggctt

SEQ ID NO: 1060508 - DNA, 25 bp, Homo sapien
atccgagccgaagcctcgggcttgc

SEQ ID NO: 1060509 - DNA, 25 bp, Homo sapien
ctgatccgagccgaagcctcgggct

SEQ ID NO: 1060510 - DNA, 25 bp, Homo sapien
ccgagccgaagcctcgggcttgcat

SEQ ID NO: 1060511 - DNA, 25 bp, Homo sapien
taaaggtacggaagcaaagatggga

SEQ ID NO: 1060512 - DNA, 25 bp, Homo sapien
aagcaaagatgggatccgcccgcgg

SEQ ID NO: 1060513 - DNA, 25 bp, Homo sapien
ggacactggtaaaggtacggaagca

SEQ ID NO: 1060514 - DNA, 25 bp, Homo sapien
tacggaagcaaagatgggatccgcc

SEQ ID NO: 1060515 - DNA, 25 bp, Homo sapien
accggcttcccggatggagcccgcg

SEQ ID NO: 1060516 - DNA, 25 bp, Homo sapien
ctgctctctctttccgaaggcccca

SEQ ID NO: 1060517 - DNA, 25 bp, Homo sapien
gccccaccggcttcccggatggagc

SEQ ID NO: 1060518 - DNA, 25 bp, Homo sapien
ccgcgccccggtcgacattctcgga

SEQ ID NO: 1060519 - DNA, 25 bp, Homo sapien
tgaggtgtagccatcttaagaagac

SEQ ID NO: 1060520 - DNA, 25 bp, Homo sapien
gatagtctctaacggctgtaccttg

SEQ ID NO: 1060521 - DNA, 25 bp, Homo sapien
aacgttgggcggtcggatctagaca

SEQ ID NO: 1060522 - DNA, 25 bp, Homo sapien
tatacgtggcaacggtcgggacatc

SEQ ID NO: 1060523 - DNA, 25 bp, Homo sapien
aagagatctcaaagcataacctgta

SEQ ID NO: 1060524 - DNA, 25 bp, Homo sapien
gatctcaaagcataacctgtaatgt

SEQ ID NO: 1060525 - DNA, 25 bp, Homo sapien
gagatctcaaagcataacctgtaat

SEQ ID NO: 1060526 - DNA, 25 bp, Homo sapien
ccaaagagatctcaaagcataacct

SEQ ID NO: 1060527 - DNA, 25 bp, Homo sapien
cggtggctcagggtttaatttcaat

SEQ ID NO: 1060528 - DNA, 25 bp, Homo sapien
ggtggctcagggtttaatttcaatc

SEQ ID NO: 1060529 - DNA, 25 bp, Homo sapien
tggctcagggtttaatttcaatcct

SEQ ID NO: 1060530 - DNA, 25 bp, Homo sapien
gtggctcagggtttaatttcaatcc

SEQ ID NO: 1060531 - DNA, 25 bp, Homo sapien
tgccagttgttctctactctgtgct

SEQ ID NO: 1060532 - DNA, 25 bp, Homo sapien
ccttcttatgatgaacgatttcttc

SEQ ID NO: 1060533 - DNA, 25 bp, Homo sapien
cattttgatcttctgcttatggcgc

SEQ ID NO: 1060534 - DNA, 25 bp, Homo sapien
tttctgcagacgctcaatctccttc

SEQ ID NO: 1060535 - DNA, 25 bp, Homo sapien
aagtgggcaatgacatgtgccattc

SEQ ID NO: 1060536 - DNA, 25 bp, Homo sapien
cagaaccatgtctacacagaagtgg

SEQ ID NO: 1060537 - DNA, 25 bp, Homo sapien
ccattctatggcacacggtgtgcac

SEQ ID NO: 1060538 - DNA, 25 bp, Homo sapien
atattagttaaaccagaaccatgtc

SEQ ID NO: 1060539 - DNA, 25 bp, Homo sapien
ttataatctgttagtagcacacaga

SEQ ID NO: 1060540 - DNA, 25 bp, Homo sapien
agatgtttgctaatacttgtttcca

SEQ ID NO: 1060541 - DNA, 25 bp, Homo sapien
tacacctttactgaggaaacaattc

SEQ ID NO: 1060542 - DNA, 25 bp, Homo sapien
taaacttttcaagtgttgcactgtt

SEQ ID NO: 1060543 - DNA, 25 bp, Homo sapien
aggaacatcactcttagtaaggcaa

SEQ ID NO: 1060544 - DNA, 25 bp, Homo sapien
gaaacagaaggtagctccaagtgct

SEQ ID NO: 1060545 - DNA, 25 bp, Homo sapien
aaccggacgtgacccaaatgtctat

SEQ ID NO: 1060546 - DNA, 25 bp, Homo sapien
gagctcgtattactgctgttcactg

SEQ ID NO: 1060547 - DNA, 25 bp, Homo sapien
taaacggatttgttcacacaacggc

SEQ ID NO: 1060548 - DNA, 25 bp, Homo sapien
cgcaccggccaatgagcaggaagat

SEQ ID NO: 1060549 - DNA, 25 bp, Homo sapien
tcttggcagccaatagtagcccgca

SEQ ID NO: 1060550 - DNA, 25 bp, Homo sapien
cccagtgcggtttcagcgttaacaa

SEQ ID NO: 1060551 - DNA, 25 bp, Homo sapien
tccaggctgcgtacggaaacgaatc

SEQ ID NO: 1060552 - DNA, 25 bp, Homo sapien
tcccattcttaccacctgcaacatc

SEQ ID NO: 1060553 - DNA, 25 bp, Homo sapien
ccattcttaccacctgcaacatcca

SEQ ID NO: 1060554 - DNA, 25 bp, Homo sapien
cctcccattcttaccacctgcaaca

SEQ ID NO: 1060555 - DNA, 25 bp, Homo sapien
cattcttaccacctgcaacatccat

SEQ ID NO: 1060556 - DNA, 25 bp, Homo sapien
ccgcggaactgccagcgctcgccgg

SEQ ID NO: 1060557 - DNA, 25 bp, Homo sapien
cgcagcgcaggggttttcacggcct

SEQ ID NO: 1060558 - DNA, 25 bp, Homo sapien
ttcacggcctcggaagtccgcaggg

SEQ ID NO: 1060559 - DNA, 25 bp, Homo sapien
ggctgctcccggacccagcgctcct

SEQ ID NO: 1060560 - DNA, 25 bp, Homo sapien
gcgccgccggggagcttctagaacc

SEQ ID NO: 1060561 - DNA, 25 bp, Homo sapien
agaacggccgctttggtgctggact

SEQ ID NO: 1060562 - DNA, 25 bp, Homo sapien
cggaatccgagaacggccgctttgg

SEQ ID NO: 1060563 - DNA, 25 bp, Homo sapien
tcggggctccagaacgctccggaat

SEQ ID NO: 1060564 - DNA, 25 bp, Homo sapien
gagggacgcccgaatgaagccggga

SEQ ID NO: 1060565 - DNA, 25 bp, Homo sapien
cgacgacccgtgcacccgagtgggt

SEQ ID NO: 1060566 - DNA, 25 bp, Homo sapien
cgccgacgacccgtgcacccgagtg

SEQ ID NO: 1060567 - DNA, 25 bp, Homo sapien
tttcggagggacgcccgaatgaagc

SEQ ID NO: 1060568 - DNA, 25 bp, Homo sapien
ggtgcgcgccaggacccggtcgcgg

SEQ ID NO: 1060569 - DNA, 25 bp, Homo sapien
gcaggtagtccttgagctctgcgcg

SEQ ID NO: 1060570 - DNA, 25 bp, Homo sapien
aggtagtccttgagctctgcgcggc

SEQ ID NO: 1060571 - DNA, 25 bp, Homo sapien
ggcgaaccgcaggtagtccttgagc

SEQ ID NO: 1060572 - DNA, 25 bp, Homo sapien
gaaccgcaggtagtccttgagctct

SEQ ID NO: 1060573 - DNA, 25 bp, Homo sapien
aagtagctgggagtataggcatgcg

SEQ ID NO: 1060574 - DNA, 25 bp, Homo sapien
gggagtataggcatgcgccaccaag

SEQ ID NO: 1060575 - DNA, 25 bp, Homo sapien
cctaagtagctgggagtataggcat

SEQ ID NO: 1060576 - DNA, 25 bp, Homo sapien
tgggagtataggcatgcgccaccaa

SEQ ID NO: 1060577 - DNA, 25 bp, Homo sapien
gccagggtgaggaccattgtttaca

SEQ ID NO: 1060578 - DNA, 25 bp, Homo sapien
ggccccagcataacagccagggtga

SEQ ID NO: 1060579 - DNA, 25 bp, Homo sapien
caagggcttctcaacccaagcggta

SEQ ID NO: 1060580 - DNA, 25 bp, Homo sapien
gatagcagtaactacttccactggc

SEQ ID NO: 1060581 - DNA, 25 bp, Homo sapien
catgctctcactggacagggatagg

SEQ ID NO: 1060582 - DNA, 25 bp, Homo sapien
tagtaccagccctcaggtatccggg

SEQ ID NO: 1060583 - DNA, 25 bp, Homo sapien
ttctcagatggccaaaagcccactg

SEQ ID NO: 1060584 - DNA, 25 bp, Homo sapien
tacaaagtctctggaataggtacca

SEQ ID NO: 1060585 - DNA, 25 bp, Homo sapien
ctgacaccagatcacatttagtgga

SEQ ID NO: 1060586 - DNA, 25 bp, Homo sapien
ctttttctggccctcacctatgacc

SEQ ID NO: 1060587 - DNA, 25 bp, Homo sapien
gcagcgccaggtcattcatactagt

SEQ ID NO: 1060588 - DNA, 25 bp, Homo sapien
ccagatcacatttagtggagagcag

SEQ ID NO: 1060589 - DNA, 25 bp, Homo sapien
ctgggccctcgagggcctcgccgag

SEQ ID NO: 1060590 - DNA, 25 bp, Homo sapien
ctcctccacggggatgaaggcgctg

SEQ ID NO: 1060591 - DNA, 25 bp, Homo sapien
gggatgaaggcgctgggccctcgag

SEQ ID NO: 1060592 - DNA, 25 bp, Homo sapien
cctcgccgagcccggctctccctct

SEQ ID NO: 1060593 - DNA, 25 bp, Homo sapien
catgatggcaatgtagtggcgccag

SEQ ID NO: 1060594 - DNA, 25 bp, Homo sapien
cgccagaagctggtaaagtagtcag

SEQ ID NO: 1060595 - DNA, 25 bp, Homo sapien
caggttgtctactcgcccagaggac

SEQ ID NO: 1060596 - DNA, 25 bp, Homo sapien
tggccaagggaccatccgtgtgcag

SEQ ID NO: 1060597 - DNA, 25 bp, Homo sapien
gccgatgcgccagcaacttgttgat

SEQ ID NO: 1060598 - DNA, 25 bp, Homo sapien
tctgcagaaactcggccatgtggga

SEQ ID NO: 1060599 - DNA, 25 bp, Homo sapien
ccatgtgggagcctaccaggtaaga

SEQ ID NO: 1060600 - DNA, 25 bp, Homo sapien
ccaggtaagaacactgatggcgggc

SEQ ID NO: 1060601 - DNA, 25 bp, Homo sapien
gctccctcagacacccgcctctctg

SEQ ID NO: 1060602 - DNA, 25 bp, Homo sapien
tgtgctccctcagacacccgcctct

SEQ ID NO: 1060603 - DNA, 25 bp, Homo sapien
ggcctctgtgctccctcagacaccc

SEQ ID NO: 1060604 - DNA, 25 bp, Homo sapien
tctgtgctccctcagacacccgcct

SEQ ID NO: 1060605 - DNA, 25 bp, Homo sapien
tgtgctcgccggtcttcagcaaggc

SEQ ID NO: 1060606 - DNA, 25 bp, Homo sapien
gagagcgagtggcagtgggtgagca

SEQ ID NO: 1060607 - DNA, 25 bp, Homo sapien
tgagctcggccagggaccaagtgtg

SEQ ID NO: 1060608 - DNA, 25 bp, Homo sapien
ggaccagagcctgaatgagctcggc

SEQ ID NO: 1060609 - DNA, 25 bp, Homo sapien
ccagagttgttcaacgggtccctgc

SEQ ID NO: 1060610 - DNA, 25 bp, Homo sapien
agagttgttcaacgggtccctgctt

SEQ ID NO: 1060611 - DNA, 25 bp, Homo sapien
cagagttgttcaacgggtccctgct

SEQ ID NO: 1060612 - DNA, 25 bp, Homo sapien
cccagagttgttcaacgggtccctg

SEQ ID NO: 1060613 - DNA, 25 bp, Homo sapien
gggacgtcccctcatcccgcagcag

SEQ ID NO: 1060614 - DNA, 25 bp, Homo sapien
ccacgtcgcgggcagactcaaagcc

SEQ ID NO: 1060615 - DNA, 25 bp, Homo sapien
tccacgtcgcgggcagactcaaagc

SEQ ID NO: 1060616 - DNA, 25 bp, Homo sapien
cctcctgggacgtcccctcatcccg

SEQ ID NO: 1060617 - DNA, 25 bp, Homo sapien
gagtgaagtcctcatatccgaaagt

SEQ ID NO: 1060618 - DNA, 25 bp, Homo sapien
ccctctccgagtgaagtcctcatat

SEQ ID NO: 1060619 - DNA, 25 bp, Homo sapien
tcatatccgaaagtagggtcttcca

SEQ ID NO: 1060620 - DNA, 25 bp, Homo sapien
gaaagtagggtcttccacaaagcac

SEQ ID NO: 1060621 - DNA, 25 bp, Homo sapien
tattgtaggtgaggctataggctgc

SEQ ID NO: 1060622 - DNA, 25 bp, Homo sapien
ggatcagcgagtagccatggtcttc

SEQ ID NO: 1060623 - DNA, 25 bp, Homo sapien
ccaaagacgcagtggatatagttcc

SEQ ID NO: 1060624 - DNA, 25 bp, Homo sapien
caccctcagggtaaagccgctggat

SEQ ID NO: 1060625 - DNA, 25 bp, Homo sapien
cagcagcattactcatgctttcttc

SEQ ID NO: 1060626 - DNA, 25 bp, Homo sapien
gtcccagcagcattactcatgcttt

SEQ ID NO: 1060627 - DNA, 25 bp, Homo sapien
aggtcccagcagcattactcatgct

SEQ ID NO: 1060628 - DNA, 25 bp, Homo sapien
agcattactcatgctttcttcccaa

SEQ ID NO: 1060629 - DNA, 25 bp, Homo sapien
gaggttgtacattcttcgggtggtc

SEQ ID NO: 1060630 - DNA, 25 bp, Homo sapien
ctctgagtggcggaagtgcctccag

SEQ ID NO: 1060631 - DNA, 25 bp, Homo sapien
gttcacctccccataatcatagtca

SEQ ID NO: 1060632 - DNA, 25 bp, Homo sapien
gatatagaccttgaggttccgctcc

SEQ ID NO: 1060633 - DNA, 25 bp, Homo sapien
tgttggcaactgatgtcactcctca

SEQ ID NO: 1060634 - DNA, 25 bp, Homo sapien
tgagcagtttagtacaaggacaagc

SEQ ID NO: 1060635 - DNA, 25 bp, Homo sapien
gactaagctctgtattccctaaagg

SEQ ID NO: 1060636 - DNA, 25 bp, Homo sapien
gcacattcattcctatcatgactaa

SEQ ID NO: 1060637 - DNA, 25 bp, Homo sapien
gcacggagggcgtacagcagagcgg

SEQ ID NO: 1060638 - DNA, 25 bp, Homo sapien
tgtagcgggtgatggcacggagggc

SEQ ID NO: 1060639 - DNA, 25 bp, Homo sapien
acagcagagcggcttgcatgcgcgc

SEQ ID NO: 1060640 - DNA, 25 bp, Homo sapien
agcggcttgcatgcgcgcctccagg

SEQ ID NO: 1060641 - DNA, 25 bp, Homo sapien
acattaattccgagcttggcccggc

SEQ ID NO: 1060642 - DNA, 25 bp, Homo sapien
tgaactaggattcgggcaacagcct

SEQ ID NO: 1060643 - DNA, 25 bp, Homo sapien
tacagaaagtgcctggaatcggtcc

SEQ ID NO: 1060644 - DNA, 25 bp, Homo sapien
caggcttttagggaactggacacac

SEQ ID NO: 1060645 - DNA, 25 bp, Homo sapien
caacttgtcgcaatggtggtgtcca

SEQ ID NO: 1060646 - DNA, 25 bp, Homo sapien
gaaagaattcttgttccgagtggga

SEQ ID NO: 1060647 - DNA, 25 bp, Homo sapien
tcagtcgattgataaacactctctc

SEQ ID NO: 1060648 - DNA, 25 bp, Homo sapien
ggcccggatatgaagtagactccct

SEQ ID NO: 1060649 - DNA, 25 bp, Homo sapien
tgccgagaaggccgaagagcttcat

SEQ ID NO: 1060650 - DNA, 25 bp, Homo sapien
atgggtgccgagaaggccgaagagc

SEQ ID NO: 1060651 - DNA, 25 bp, Homo sapien
cgaaactgccgttcccaaacgtatg

SEQ ID NO: 1060652 - DNA, 25 bp, Homo sapien
gggtgccgagaaggccgaagagctt

SEQ ID NO: 1060653 - DNA, 25 bp, Homo sapien
ccgggaagcccccagatcggtgcaa

SEQ ID NO: 1060654 - DNA, 25 bp, Homo sapien
ctaggagcttttgagcgacgattag

SEQ ID NO: 1060655 - DNA, 25 bp, Homo sapien
ttgagcgacgattagataccagcac

SEQ ID NO: 1060656 - DNA, 25 bp, Homo sapien
agatcggtgcaaccagccaacttcc

SEQ ID NO: 1060657 - DNA, 25 bp, Homo sapien
gccgggaattatatccacccgcgca

SEQ ID NO: 1060658 - DNA, 25 bp, Homo sapien
cgagaagccgggaattatatccacc

SEQ ID NO: 1060659 - DNA, 25 bp, Homo sapien
gaggctgtagtgtcttctcgagaag

SEQ ID NO: 1060660 - DNA, 25 bp, Homo sapien
tagtgtcttctcgagaagccgggaa

SEQ ID NO: 1060661 - DNA, 25 bp, Homo sapien
gggactcaatgtcttccttataaaa

SEQ ID NO: 1060662 - DNA, 25 bp, Homo sapien
ctgtgcaatcttgagaaagtcctat

SEQ ID NO: 1060663 - DNA, 25 bp, Homo sapien
tcaccctgggactcaatgtcttcct

SEQ ID NO: 1060664 - DNA, 25 bp, Homo sapien
gaaagtcctatctataacccctcac

SEQ ID NO: 1060665 - DNA, 25 bp, Homo sapien
caactggactcagagcccccagtca

SEQ ID NO: 1060666 - DNA, 25 bp, Homo sapien
taagttgaagacaacacaactggac

SEQ ID NO: 1060667 - DNA, 25 bp, Homo sapien
ggtgtctaagttgaagacaacacaa

SEQ ID NO: 1060668 - DNA, 25 bp, Homo sapien
tctaagttgaagacaacacaactgg

SEQ ID NO: 1060669 - DNA, 25 bp, Homo sapien
tgcccccagtgacaggcatcatggt

SEQ ID NO: 1060670 - DNA, 25 bp, Homo sapien
tactccatcatgttaatggtgcccc

SEQ ID NO: 1060671 - DNA, 25 bp, Homo sapien
ggtactccatcatgttaatggtgcc

SEQ ID NO: 1060672 - DNA, 25 bp, Homo sapien
aatggtgcccccagtgacaggcatc

SEQ ID NO: 1060673 - DNA, 25 bp, Homo sapien
caggtaatccaagttccctagttca

SEQ ID NO: 1060674 - DNA, 25 bp, Homo sapien
taatccaagttccctagttcactta

SEQ ID NO: 1060675 - DNA, 25 bp, Homo sapien
tgttgtcacacaaaccacgaaggcg

SEQ ID NO: 1060676 - DNA, 25 bp, Homo sapien
tgctggcccttaaggaggaatacca

SEQ ID NO: 1060677 - DNA, 25 bp, Homo sapien
ttcgcaccagggcatggcggttctt

SEQ ID NO: 1060678 - DNA, 25 bp, Homo sapien
gcaatgtccacgcagtttcgcacca

SEQ ID NO: 1060679 - DNA, 25 bp, Homo sapien
acaagtaaggataggccccaaatgt

SEQ ID NO: 1060680 - DNA, 25 bp, Homo sapien
agtaaggataggccccaaatgtgga

SEQ ID NO: 1060681 - DNA, 25 bp, Homo sapien
ttcaaacaagtaaggataggcccca

SEQ ID NO: 1060682 - DNA, 25 bp, Homo sapien
tcaaacaagtaaggataggccccaa

SEQ ID NO: 1060683 - DNA, 25 bp, Homo sapien
gggattagatagattctccgtgaca

SEQ ID NO: 1060684 - DNA, 25 bp, Homo sapien
catgaggagaacagtgcaaagaacc

SEQ ID NO: 1060685 - DNA, 25 bp, Homo sapien
tgaaagtgaaatcgccacatgagga

SEQ ID NO: 1060686 - DNA, 25 bp, Homo sapien
tccgtgacatcctgagcctttaata

SEQ ID NO: 1060687 - DNA, 25 bp, Homo sapien
cattggctttattaccatgtaacac

SEQ ID NO: 1060688 - DNA, 25 bp, Homo sapien
ctaatgttaccaaccttatacacaa

SEQ ID NO: 1060689 - DNA, 25 bp, Homo sapien
tcattggctttattaccatgtaaca

SEQ ID NO: 1060690 - DNA, 25 bp, Homo sapien
cctctagagttaaatgttggttctt

SEQ ID NO: 1060691 - DNA, 25 bp, Homo sapien
tctgcctctagagttaaatgttggt

SEQ ID NO: 1060692 - DNA, 25 bp, Homo sapien
tgcctctagagttaaatgttggttc

SEQ ID NO: 1060693 - DNA, 25 bp, Homo sapien
gtctctgcctctagagttaaatgtt

SEQ ID NO: 1060694 - DNA, 25 bp, Homo sapien
aaggttgagcagcacaggttgcaaa

SEQ ID NO: 1060695 - DNA, 25 bp, Homo sapien
aaaggttgagcagcacaggttgcaa

SEQ ID NO: 1060696 - DNA, 25 bp, Homo sapien
taaaggttgagcagcacaggttgca

SEQ ID NO: 1060697 - DNA, 25 bp, Homo sapien
acaaaatggcgggaagcgtgcgtcc

SEQ ID NO: 1060698 - DNA, 25 bp, Homo sapien
ggcgggaagcgtgcgtcctttctct

SEQ ID NO: 1060699 - DNA, 25 bp, Homo sapien
gcaccttgtgtgtaaaagaacttgg

SEQ ID NO: 1060700 - DNA, 25 bp, Homo sapien
gctggccgctctgcgcaccttgtgt

SEQ ID NO: 1060701 - DNA, 25 bp, Homo sapien
tacgggacttgtagtccccagcagg

SEQ ID NO: 1060702 - DNA, 25 bp, Homo sapien
acagtgtagggtaggacgtgccgcc

SEQ ID NO: 1060703 - DNA, 25 bp, Homo sapien
ctggacagtgtagggtaggacgtgc

SEQ ID NO: 1060704 - DNA, 25 bp, Homo sapien
cgtgccgccgcggaggcttacggga

SEQ ID NO: 1060705 - DNA, 25 bp, Homo sapien
tccacagcagcctctcccggaaatc

SEQ ID NO: 1060706 - DNA, 25 bp, Homo sapien
ctccacagcagcctctcccggaaat

SEQ ID NO: 1060707 - DNA, 25 bp, Homo sapien
cagcagcctctcccggaaatcctac

SEQ ID NO: 1060708 - DNA, 25 bp, Homo sapien
cacagcagcctctcccggaaatcct

SEQ ID NO: 1060709 - DNA, 25 bp, Homo sapien
cccgccctggcccgaagcgacggcg

SEQ ID NO: 1060710 - DNA, 25 bp, Homo sapien
gagagggcgagcctgcgcgggccct

SEQ ID NO: 1060711 - DNA, 25 bp, Homo sapien
cgccctggcccgaagcgacggcgac

SEQ ID NO: 1060712 - DNA, 25 bp, Homo sapien
ccgccctggcccgaagcgacggcga

SEQ ID NO: 1060713 - DNA, 25 bp, Homo sapien
tttacagaaactccgcctggctccg

SEQ ID NO: 1060714 - DNA, 25 bp, Homo sapien
agaggtctgaggcaggacggttttg

SEQ ID NO: 1060715 - DNA, 25 bp, Homo sapien
tgaggcaggacggttttgaaaaatg

SEQ ID NO: 1060716 - DNA, 25 bp, Homo sapien
tttttacagaaactccgcctggctc

SEQ ID NO: 1060717 - DNA, 25 bp, Homo sapien
ttggtccaccgatcacagatgtgag

SEQ ID NO: 1060718 - DNA, 25 bp, Homo sapien
gtgagctgcacagacatcgcagcaa

SEQ ID NO: 1060719 - DNA, 25 bp, Homo sapien
gcagcaaattcgatgccttcccggt

SEQ ID NO: 1060720 - DNA, 25 bp, Homo sapien
actggttctttggtccaccgatcac

SEQ ID NO: 1060721 - DNA, 25 bp, Homo sapien
gctgagtgtccgaatgaagcactgg

SEQ ID NO: 1060722 - DNA, 25 bp, Homo sapien
aagtcactctcctccgagatttggg

SEQ ID NO: 1060723 - DNA, 25 bp, Homo sapien
ggaggtgcgtgaactgccattctac

SEQ ID NO: 1060724 - DNA, 25 bp, Homo sapien
tcagtgatgccctgtaagtcactct

SEQ ID NO: 1060725 - DNA, 25 bp, Homo sapien
cacctcatcccctaaactggcttca

SEQ ID NO: 1060726 - DNA, 25 bp, Homo sapien
cacacctcatcccctaaactggctt

SEQ ID NO: 1060727 - DNA, 25 bp, Homo sapien
ctcatcccctaaactggcttcattt

SEQ ID NO: 1060728 - DNA, 25 bp, Homo sapien
acctcatcccctaaactggcttcat

SEQ ID NO: 1060729 - DNA, 25 bp, Homo sapien
aacagagtgggaccccaatcaatac

SEQ ID NO: 1060730 - DNA, 25 bp, Homo sapien
ttatcttaaggtttaataccagcac

SEQ ID NO: 1060731 - DNA, 25 bp, Homo sapien
tatcttaaggtttaataccagcact

SEQ ID NO: 1060732 - DNA, 25 bp, Homo sapien
gagtgggaccccaatcaatacaaaa

SEQ ID NO: 1060733 - DNA, 25 bp, Homo sapien
taaatatatagctagacacactggc

SEQ ID NO: 1060734 - DNA, 25 bp, Homo sapien
ggtggtgggaggatggaatcttgct

SEQ ID NO: 1060735 - DNA, 25 bp, Homo sapien
gcaggggtggtgggaggatggaatc

SEQ ID NO: 1060736 - DNA, 25 bp, Homo sapien
aggggtggtgggaggatggaatctt

SEQ ID NO: 1060737 - DNA, 25 bp, Homo sapien
gggtggtgggaggatggaatcttgc

SEQ ID NO: 1060738 - DNA, 25 bp, Homo sapien
ccaccttgtggcctcatgatcctag

SEQ ID NO: 1060739 - DNA, 25 bp, Homo sapien
tgtggcctcatgatcctaggattac

SEQ ID NO: 1060740 - DNA, 25 bp, Homo sapien
tgggactcatagaagcgtgccacat

SEQ ID NO: 1060741 - DNA, 25 bp, Homo sapien
atagaagcgtgccacatgccaagct

SEQ ID NO: 1060742 - DNA, 25 bp, Homo sapien
tctctgtgcacatctccaatatctg

SEQ ID NO: 1060743 - DNA, 25 bp, Homo sapien
ctctgtgcacatctccaatatctgc

SEQ ID NO: 1060744 - DNA, 25 bp, Homo sapien
tctgtgcacatctccaatatctgcc

SEQ ID NO: 1060745 - DNA, 25 bp, Homo sapien
ctgtgcacatctccaatatctgcct

SEQ ID NO: 1060746 - DNA, 25 bp, Homo sapien
cattatttggtgtcttacaaggttc

SEQ ID NO: 1060747 - DNA, 25 bp, Homo sapien
tgccctcacaaatcaattgctactg

SEQ ID NO: 1060748 - DNA, 25 bp, Homo sapien
ttaaatatcgttggtcctatataaa

SEQ ID NO: 1060749 - DNA, 25 bp, Homo sapien
tatctaatgacctaggtggatacta

SEQ ID NO: 1060750 - DNA, 25 bp, Homo sapien
cagttggctcaccactattaggcag

SEQ ID NO: 1060751 - DNA, 25 bp, Homo sapien
tgaaaaaaccagaactccagacagg

SEQ ID NO: 1060752 - DNA, 25 bp, Homo sapien
ccatgggaacaagatttgaaggcct

SEQ ID NO: 1060753 - DNA, 25 bp, Homo sapien
gagagccagttgcagaatcctccca

SEQ ID NO: 1060754 - DNA, 25 bp, Homo sapien
caaagctttaatggaggtgaggata

SEQ ID NO: 1060755 - DNA, 25 bp, Homo sapien
gatcttccatgccactattaaccag

SEQ ID NO: 1060756 - DNA, 25 bp, Homo sapien
gatactcaccaaatggatcttccat

SEQ ID NO: 1060757 - DNA, 25 bp, Homo sapien
tattaaccagtttagggaggtgaga

SEQ ID NO: 1060758 - DNA, 25 bp, Homo sapien
tcatgttgctagatgaaatatacac

SEQ ID NO: 1060759 - DNA, 25 bp, Homo sapien
cctttactcatgttgctagatgaaa

SEQ ID NO: 1060760 - DNA, 25 bp, Homo sapien
gatgaaatatacacaggctaaactt

SEQ ID NO: 1060761 - DNA, 25 bp, Homo sapien
cacaggctaaacttaattagaaata

SEQ ID NO: 1060762 - DNA, 25 bp, Homo sapien
aacacagtgatatccagtcttggaa

SEQ ID NO: 1060763 - DNA, 25 bp, Homo sapien
tcctagctacgtgggaaatatgcat

SEQ ID NO: 1060764 - DNA, 25 bp, Homo sapien
gactttatcgccaaaaaggcagaca

SEQ ID NO: 1060765 - DNA, 25 bp, Homo sapien
ggcagacattaaacctttgtatatc

SEQ ID NO: 1060766 - DNA, 25 bp, Homo sapien
tatagcaactctcacgttgatactc

SEQ ID NO: 1060767 - DNA, 25 bp, Homo sapien
ggtcaactataacttctatagcaac

SEQ ID NO: 1060768 - DNA, 25 bp, Homo sapien
tataacttctatagcaactctcacg

SEQ ID NO: 1060769 - DNA, 25 bp, Homo sapien
ctactggtcaactataacttctata

SEQ ID NO: 1060770 - DNA, 25 bp, Homo sapien
accatcatccaagccgtgtacactg

SEQ ID NO: 1060771 - DNA, 25 bp, Homo sapien
tgtcaaatgacactgagtacaccaa

SEQ ID NO: 1060772 - DNA, 25 bp, Homo sapien
tctaagattctggtgcaaccatcat

SEQ ID NO: 1060773 - DNA, 25 bp, Homo sapien
tctacttaattattagctaacttga

SEQ ID NO: 1060774 - DNA, 25 bp, Homo sapien
aatggaagagaattaagtgaaaata

SEQ ID NO: 1060775 - DNA, 25 bp, Homo sapien
attaaaaatggaagagaattaagtg

SEQ ID NO: 1060776 - DNA, 25 bp, Homo sapien
ggaagagaattaagtgaaaatatgc

SEQ ID NO: 1060777 - DNA, 25 bp, Homo sapien
taaaaatggaagagaattaagtgaa

SEQ ID NO: 1060778 - DNA, 25 bp, Homo sapien
taaattgcataactttagccatcct

SEQ ID NO: 1060779 - DNA, 25 bp, Homo sapien
agccatcctagtgtactcgtggtgg

SEQ ID NO: 1060780 - DNA, 25 bp, Homo sapien
tatagtgataacacttactatgaga

SEQ ID NO: 1060781 - DNA, 25 bp, Homo sapien
cgtggtggtctcttattgtgtgtgt

SEQ ID NO: 1060782 - DNA, 25 bp, Homo sapien
acaatttggccacttttgccatata

SEQ ID NO: 1060783 - DNA, 25 bp, Homo sapien
catgtacaatttggccacttttgcc

SEQ ID NO: 1060784 - DNA, 25 bp, Homo sapien
tttgccatatatcacctgtgaaatc

SEQ ID NO: 1060785 - DNA, 25 bp, Homo sapien
tacttaacatgtacaatttggccac

SEQ ID NO: 1060786 - DNA, 25 bp, Homo sapien
ctggtgttggtctttgactcagtcg

SEQ ID NO: 1060787 - DNA, 25 bp, Homo sapien
tgcgttgttctagttcttctggtgt

SEQ ID NO: 1060788 - DNA, 25 bp, Homo sapien
gttgcaatatattgcgttgttctag

SEQ ID NO: 1060789 - DNA, 25 bp, Homo sapien
tggtgttggtctttgactcagtcgc

SEQ ID NO: 1060790 - DNA, 25 bp, Homo sapien
tcttgtcaacgatacaaatacttaa

SEQ ID NO: 1060791 - DNA, 25 bp, Homo sapien
tgtaaggacctattacgtatagttg

SEQ ID NO: 1060792 - DNA, 25 bp, Homo sapien
gatatttcttataggcccaaatcag

SEQ ID NO: 1060793 - DNA, 25 bp, Homo sapien
tatggcaccacatctcgccagttgc

SEQ ID NO: 1060794 - DNA, 25 bp, Homo sapien
atttctcgtttttctgcctgacgat

SEQ ID NO: 1060795 - DNA, 25 bp, Homo sapien
ttctagtgagccgacgtttaatttc

SEQ ID NO: 1060796 - DNA, 25 bp, Homo sapien
tagtgagccgacgtttaatttctcg

SEQ ID NO: 1060797 - DNA, 25 bp, Homo sapien
tgcctgacgatcagcttcattttta

SEQ ID NO: 1060798 - DNA, 25 bp, Homo sapien
ctggcaaggagttcagcgacagttg

SEQ ID NO: 1060799 - DNA, 25 bp, Homo sapien
ggagttcagcgacagttggcctttg

SEQ ID NO: 1060800 - DNA, 25 bp, Homo sapien
gcaaggagttcagcgacagttggcc

SEQ ID NO: 1060801 - DNA, 25 bp, Homo sapien
gttcagcgacagttggcctttgact

SEQ ID NO: 1060802 - DNA, 25 bp, Homo sapien
cgccggtcataatcttgagcatctg

SEQ ID NO: 1060803 - DNA, 25 bp, Homo sapien
tcagtttggtccaaggtttgtcggc

SEQ ID NO: 1060804 - DNA, 25 bp, Homo sapien
tgagcatctgttacctctacatatt

SEQ ID NO: 1060805 - DNA, 25 bp, Homo sapien
tccaaggtttgtcggctcgccggtc

SEQ ID NO: 1060806 - DNA, 25 bp, Homo sapien
cctccatctcggagcttttaaattc

SEQ ID NO: 1060807 - DNA, 25 bp, Homo sapien
gaacctccatctcggagcttttaaa

SEQ ID NO: 1060808 - DNA, 25 bp, Homo sapien
tcatgaacctccatctcggagcttt

SEQ ID NO: 1060809 - DNA, 25 bp, Homo sapien
gtttgctctcttcatgaacctccat

SEQ ID NO: 1060810 - DNA, 25 bp, Homo sapien
agcagccatgttgattcctctctca

SEQ ID NO: 1060811 - DNA, 25 bp, Homo sapien
gcagccatgttgattcctctctcaa

SEQ ID NO: 1060812 - DNA, 25 bp, Homo sapien
gccatgttgattcctctctcaacct

SEQ ID NO: 1060813 - DNA, 25 bp, Homo sapien
cagccatgttgattcctctctcaac

SEQ ID NO: 1060814 - DNA, 25 bp, Homo sapien
tggccagtaagggaaaaactcctca

SEQ ID NO: 1060815 - DNA, 25 bp, Homo sapien
taaggctaatggtgcaaactgtgtc

SEQ ID NO: 1060816 - DNA, 25 bp, Homo sapien
agtaaaacctggaacctgcaagtgg

SEQ ID NO: 1060817 - DNA, 25 bp, Homo sapien
tgccagtgtggtaagaaggctttcc

SEQ ID NO: 1060818 - DNA, 25 bp, Homo sapien
catgctttctcatctaaccgatttt

SEQ ID NO: 1060819 - DNA, 25 bp, Homo sapien
acaggggctcaaaacgcctttcttg

SEQ ID NO: 1060820 - DNA, 25 bp, Homo sapien
atatacatgctttctcatctaaccg

SEQ ID NO: 1060821 - DNA, 25 bp, Homo sapien
caggggctcaaaacgcctttcttgt

SEQ ID NO: 1060822 - DNA, 25 bp, Homo sapien
gatacaactctgctttaaggaggag

SEQ ID NO: 1060823 - DNA, 25 bp, Homo sapien
gaccttattgtgattctggctagaa

SEQ ID NO: 1060824 - DNA, 25 bp, Homo sapien
taaatgctcccacagagttgataca

SEQ ID NO: 1060825 - DNA, 25 bp, Homo sapien
acctgctagttttctgccacgttag

SEQ ID NO: 1060826 - DNA, 25 bp, Homo sapien
aggtaggagaatcgcctcaacccgg

SEQ ID NO: 1060827 - DNA, 25 bp, Homo sapien
gtaatcctagctacttgggaggctg

SEQ ID NO: 1060828 - DNA, 25 bp, Homo sapien
ctcatctctactagaaatataaaat

SEQ ID NO: 1060829 - DNA, 25 bp, Homo sapien
tagccaggcgtggtggctcatgcct

SEQ ID NO: 1060830 - DNA, 25 bp, Homo sapien
tacttggtgacgcacagaaggcgaa

SEQ ID NO: 1060831 - DNA, 25 bp, Homo sapien
caaatcctgtttcaagcttggcaca

SEQ ID NO: 1060832 - DNA, 25 bp, Homo sapien
ggcgaacaagtagctcaggaaatca

SEQ ID NO: 1060833 - DNA, 25 bp, Homo sapien
tattgtgtggctaccttatatccag

SEQ ID NO: 1060834 - DNA, 25 bp, Homo sapien
taataattaatattgatgggaagac

SEQ ID NO: 1060835 - DNA, 25 bp, Homo sapien
gggatagagtgtaatgtaaaagaaa

SEQ ID NO: 1060836 - DNA, 25 bp, Homo sapien
cttttgggatagagtgtaatgtaaa

SEQ ID NO: 1060837 - DNA, 25 bp, Homo sapien
aatacctcacaccagaatagtatag

SEQ ID NO: 1060838 - DNA, 25 bp, Homo sapien
aaagaaaatacctcacaccagaata

SEQ ID NO: 1060839 - DNA, 25 bp, Homo sapien
ctggagacaatttaacctcaaaagg

SEQ ID NO: 1060840 - DNA, 25 bp, Homo sapien
tttggcaaacactgggcaatcttca

SEQ ID NO: 1060841 - DNA, 25 bp, Homo sapien
gctttctggagacaatttaacctca

SEQ ID NO: 1060842 - DNA, 25 bp, Homo sapien
aaaagggcaatagcaatttgaggct

SEQ ID NO: 1060843 - DNA, 25 bp, Homo sapien
tgtattttggcttcaaggataggat

SEQ ID NO: 1060844 - DNA, 25 bp, Homo sapien
tcatgcctcctagggctgaaatgga

SEQ ID NO: 1060845 - DNA, 25 bp, Homo sapien
gaacgttgaaacagtggtgctggct

SEQ ID NO: 1060846 - DNA, 25 bp, Homo sapien
tgttcctgtcagatgacctctatgc

SEQ ID NO: 1060847 - DNA, 25 bp, Homo sapien
ttacgaagtgcccggaagtcctgga

SEQ ID NO: 1060848 - DNA, 25 bp, Homo sapien
ggagagagaaaacgcgaagcatcct

SEQ ID NO: 1060849 - DNA, 25 bp, Homo sapien
cgaccactgcgaatctgtctccaaa

SEQ ID NO: 1060850 - DNA, 25 bp, Homo sapien
agtcctggaatgtctattgcgcgtg

SEQ ID NO: 1060851 - DNA, 25 bp, Homo sapien
aattacatgatttccggccaggcgc

SEQ ID NO: 1060852 - DNA, 25 bp, Homo sapien
tatgaaaatcttcggcctggcgtgg

SEQ ID NO: 1060853 - DNA, 25 bp, Homo sapien
tagcattagacccacaactccggtg

SEQ ID NO: 1060854 - DNA, 25 bp, Homo sapien
ctttagagttgggaccgatgccgcc

SEQ ID NO: 1060855 - DNA, 25 bp, Homo sapien
gcccagctttatttccaacgttgtg

SEQ ID NO: 1060856 - DNA, 25 bp, Homo sapien
cagctttatttccaacgttgtggaa

SEQ ID NO: 1060857 - DNA, 25 bp, Homo sapien
ccagctttatttccaacgttgtgga

SEQ ID NO: 1060858 - DNA, 25 bp, Homo sapien
cccagctttatttccaacgttgtgg

SEQ ID NO: 1060859 - DNA, 25 bp, Homo sapien
ttaagacttcaatccagccaggtgt

SEQ ID NO: 1060860 - DNA, 25 bp, Homo sapien
cagtggcactggagtataggtttga

SEQ ID NO: 1060861 - DNA, 25 bp, Homo sapien
tgagtataggtcactcctgggctcc

SEQ ID NO: 1060862 - DNA, 25 bp, Homo sapien
gagaatcacttagcataatcacttg

SEQ ID NO: 1060863 - DNA, 25 bp, Homo sapien
taagagttacttggaatccttaaca

SEQ ID NO: 1060864 - DNA, 25 bp, Homo sapien
cgacaaatccaatattgctaatcac

SEQ ID NO: 1060865 - DNA, 25 bp, Homo sapien
gctaatcacccacagtattttcaag

SEQ ID NO: 1060866 - DNA, 25 bp, Homo sapien
cattagtgaggaattggagtaaccg

SEQ ID NO: 1060867 - DNA, 25 bp, Homo sapien
ggagtaaccgacaaatccaatattg

SEQ ID NO: 1060868 - DNA, 25 bp, Homo sapien
agcttcatcttcaacgttgtggaaa

SEQ ID NO: 1060869 - DNA, 25 bp, Homo sapien
gcttcatcttcaacgttgtggaaag

SEQ ID NO: 1060870 - DNA, 25 bp, Homo sapien
tagactcctgaagatcctacttcaa

SEQ ID NO: 1060871 - DNA, 25 bp, Homo sapien
gaaataatgattagactcctgaaga

SEQ ID NO: 1060872 - DNA, 25 bp, Homo sapien
cctgaagatcctacttcaacttaaa

SEQ ID NO: 1060873 - DNA, 25 bp, Homo sapien
tgattagactcctgaagatcctact

SEQ ID NO: 1060874 - DNA, 25 bp, Homo sapien
ccaaaatgcgaagtgcagatcgtct

SEQ ID NO: 1060875 - DNA, 25 bp, Homo sapien
aattaaatgtcaatgccaaaatgcg

SEQ ID NO: 1060876 - DNA, 25 bp, Homo sapien
tcaatgccaaaatgcgaagtgcaga

SEQ ID NO: 1060877 - DNA, 25 bp, Homo sapien
tgcgaagtgcagatcgtcttctctc

SEQ ID NO: 1060878 - DNA, 25 bp, Homo sapien
aaggaggcatgaaatgcacctcaat

SEQ ID NO: 1060879 - DNA, 25 bp, Homo sapien
tgctccaagtctgccaaagattgtc

SEQ ID NO: 1060880 - DNA, 25 bp, Homo sapien
gaaatgcacctcaatcttttgctcc

SEQ ID NO: 1060881 - DNA, 25 bp, Homo sapien
atcttttgctccaagtctgccaaag

SEQ ID NO: 1060882 - DNA, 25 bp, Homo sapien
tcttaaagtatgaatgaggtgaaag

SEQ ID NO: 1060883 - DNA, 25 bp, Homo sapien
tactcaaggacttttaatataacca

SEQ ID NO: 1060884 - DNA, 25 bp, Homo sapien
ttctgcaaaacaggtcgacttttaa

SEQ ID NO: 1060885 - DNA, 25 bp, Homo sapien
atgtgcattcctagctaaatgccaa

SEQ ID NO: 1060886 - DNA, 25 bp, Homo sapien
gcagattaggcaatttgttaggtaa

SEQ ID NO: 1060887 - DNA, 25 bp, Homo sapien
cattaacatagcagattaggcaatt

SEQ ID NO: 1060888 - DNA, 25 bp, Homo sapien
tacattaacatagcagattaggcaa

SEQ ID NO: 1060889 - DNA, 25 bp, Homo sapien
taggcaatttgttaggtaaattaca

SEQ ID NO: 1060890 - DNA, 25 bp, Homo sapien
caactcatcagctagggatacaacc

SEQ ID NO: 1060891 - DNA, 25 bp, Homo sapien
tcttgcactcaacccagacttacgg

SEQ ID NO: 1060892 - DNA, 25 bp, Homo sapien
ttccaaatggcttaacggctgtccc

SEQ ID NO: 1060893 - DNA, 25 bp, Homo sapien
caagcctggctgcatttaacatgcc

SEQ ID NO: 1060894 - DNA, 25 bp, Homo sapien
cagaggtgccacttctagttgtgga

SEQ ID NO: 1060895 - DNA, 25 bp, Homo sapien
cccacttagtgcttacctagaacag

SEQ ID NO: 1060896 - DNA, 25 bp, Homo sapien
cctggcacaggtaagcacaaataca

SEQ ID NO: 1060897 - DNA, 25 bp, Homo sapien
tggaatatgctgtattaaagcccac

SEQ ID NO: 1060898 - DNA, 25 bp, Homo sapien
taagataggcaaccaatactgtctg

SEQ ID NO: 1060899 - DNA, 25 bp, Homo sapien
agctgaagtttagcagagtgggacc

SEQ ID NO: 1060900 - DNA, 25 bp, Homo sapien
gagtaactcacccaaagtctcatga

SEQ ID NO: 1060901 - DNA, 25 bp, Homo sapien
tgcactccatctagagaccctaaga

SEQ ID NO: 1060902 - DNA, 25 bp, Homo sapien
ctcctcttttggatgatgtactgtg

SEQ ID NO: 1060903 - DNA, 25 bp, Homo sapien
tctccaagtttacctctgcctccat

SEQ ID NO: 1060904 - DNA, 25 bp, Homo sapien
tgctgtcttcctccaagatcttaca

SEQ ID NO: 1060905 - DNA, 25 bp, Homo sapien
atgatgtactgtgaaatttctccaa

SEQ ID NO: 1060906 - DNA, 25 bp, Homo sapien
tcatcttcttatgagctacaagagc

SEQ ID NO: 1060907 - DNA, 25 bp, Homo sapien
cttggtgcacgtcggccacaaggaa

SEQ ID NO: 1060908 - DNA, 25 bp, Homo sapien
gtcggccacaaggaactccggcgct

SEQ ID NO: 1060909 - DNA, 25 bp, Homo sapien
cgggccgcgaactgccccagagcat

SEQ ID NO: 1060910 - DNA, 25 bp, Homo sapien
gtgcacgtcggccacaaggaactcc

SEQ ID NO: 1060911 - DNA, 25 bp, Homo sapien
cagtagcgtccgtcgcctgggttca

SEQ ID NO: 1060912 - DNA, 25 bp, Homo sapien
tagcgtccgtcgcctgggttcaagg

SEQ ID NO: 1060913 - DNA, 25 bp, Homo sapien
cccgttctatacaacctgtgcctgg

SEQ ID NO: 1060914 - DNA, 25 bp, Homo sapien
cgttctatacaacctgtgcctgggc

SEQ ID NO: 1060915 - DNA, 25 bp, Homo sapien
ggatccccgttctatacaacctgtg

SEQ ID NO: 1060916 - DNA, 25 bp, Homo sapien
ctgggatccccgttctatacaacct

SEQ ID NO: 1060917 - DNA, 25 bp, Homo sapien
gcctctactgcacaaatgggtcttg

SEQ ID NO: 1060918 - DNA, 25 bp, Homo sapien
tgttcccggtacctgcctgcacagc

SEQ ID NO: 1060919 - DNA, 25 bp, Homo sapien
tgcacagcctctactgcacaaatgg

SEQ ID NO: 1060920 - DNA, 25 bp, Homo sapien
gtggagccctgttcccggtacctgc

SEQ ID NO: 1060921 - DNA, 25 bp, Homo sapien
tcgcccagtctggaggcaatggcgc

SEQ ID NO: 1060922 - DNA, 25 bp, Homo sapien
gcgcctgccaccacacccagctaat

SEQ ID NO: 1060923 - DNA, 25 bp, Homo sapien
cgcctgccaccacacccagctaatt

SEQ ID NO: 1060924 - DNA, 25 bp, Homo sapien
ccagtctggaggcaatggcgcgata

SEQ ID NO: 1060925 - DNA, 25 bp, Homo sapien
ctctcagcttgcctggaactgtgtc

SEQ ID NO: 1060926 - DNA, 25 bp, Homo sapien
tagtctctcagcttgcctggaactg

SEQ ID NO: 1060927 - DNA, 25 bp, Homo sapien
gtagtctctcagcttgcctggaact

SEQ ID NO: 1060928 - DNA, 25 bp, Homo sapien
gtctctcagcttgcctggaactgtg

SEQ ID NO: 1060929 - DNA, 25 bp, Homo sapien
gtttcactacaagctggccacaatg

SEQ ID NO: 1060930 - DNA, 25 bp, Homo sapien
gccaagatctgaaccaagttagtca

SEQ ID NO: 1060931 - DNA, 25 bp, Homo sapien
cagcccggaatggagtcagacacat

SEQ ID NO: 1060932 - DNA, 25 bp, Homo sapien
ggccacaatgatcccactctacaga

SEQ ID NO: 1060933 - DNA, 25 bp, Homo sapien
acgatgtgaactttgaagttgttgc

SEQ ID NO: 1060934 - DNA, 25 bp, Homo sapien
tcacgatgtgaactttgaagttgtt

SEQ ID NO: 1060935 - DNA, 25 bp, Homo sapien
cacgatgtgaactttgaagttgttg

SEQ ID NO: 1060936 - DNA, 25 bp, Homo sapien
gagttcaaagacctaagccttgatg

SEQ ID NO: 1060937 - DNA, 25 bp, Homo sapien
tggagagttcaaagacctaagcctt

SEQ ID NO: 1060938 - DNA, 25 bp, Homo sapien
caatggagagttcaaagacctaagc

SEQ ID NO: 1060939 - DNA, 25 bp, Homo sapien
tcaaagacctaagccttgatgactt

SEQ ID NO: 1060940 - DNA, 25 bp, Homo sapien
catcagttgcccggcatgtgagtgc

SEQ ID NO: 1060941 - DNA, 25 bp, Homo sapien
gagcatcagttgcccggcatgtgag

SEQ ID NO: 1060942 - DNA, 25 bp, Homo sapien
ctgtgggaaggttactctgagcatc

SEQ ID NO: 1060943 - DNA, 25 bp, Homo sapien
tgagcatcagttgcccggcatgtga

SEQ ID NO: 1060944 - DNA, 25 bp, Homo sapien
tcttttagctatgcgcttgggtgac

SEQ ID NO: 1060945 - DNA, 25 bp, Homo sapien
accttcttttagctatgcgcttggg

SEQ ID NO: 1060946 - DNA, 25 bp, Homo sapien
ttgcttttggggatggcatctgctg

SEQ ID NO: 1060947 - DNA, 25 bp, Homo sapien
cttcttttagctatgcgcttgggtg

SEQ ID NO: 1060948 - DNA, 25 bp, Homo sapien
gggcgccaggaacgcggcgggaggc

SEQ ID NO: 1060949 - DNA, 25 bp, Homo sapien
gagcgggcgccaggaacgcggcggg

SEQ ID NO: 1060950 - DNA, 25 bp, Homo sapien
agcgggcgccaggaacgcggcggga

SEQ ID NO: 1060951 - DNA, 25 bp, Homo sapien
cgccaggaacgcggcgggaggcagc

SEQ ID NO: 1060952 - DNA, 25 bp, Homo sapien
ttttctggtcaggagggctcggccc

SEQ ID NO: 1060953 - DNA, 25 bp, Homo sapien
ggttttctggtcaggagggctcggc

SEQ ID NO: 1060954 - DNA, 25 bp, Homo sapien
tcgggttttctggtcaggagggctc

SEQ ID NO: 1060955 - DNA, 25 bp, Homo sapien
ctggtcgggttttctggtcaggagg

SEQ ID NO: 1060956 - DNA, 25 bp, Homo sapien
gcctgcacaacatcctccggaatgg

SEQ ID NO: 1060957 - DNA, 25 bp, Homo sapien
ttttgcttagacacacggtgtgcat

SEQ ID NO: 1060958 - DNA, 25 bp, Homo sapien
acgtcgccctggcctagtgtcagca

SEQ ID NO: 1060959 - DNA, 25 bp, Homo sapien
gaatggataccagggccggcttctt

SEQ ID NO: 1060960 - DNA, 25 bp, Homo sapien
cggccatcatcggtgagggctgctg

SEQ ID NO: 1060961 - DNA, 25 bp, Homo sapien
accctcatcattgcagccgaaggaa

SEQ ID NO: 1060962 - DNA, 25 bp, Homo sapien
ctcatcattgcagccgaaggaatag

SEQ ID NO: 1060963 - DNA, 25 bp, Homo sapien
acggccatcatcggtgagggctgct

SEQ ID NO: 1060964 - DNA, 25 bp, Homo sapien
catccaagcctctgggaagtgtgga

SEQ ID NO: 1060965 - DNA, 25 bp, Homo sapien
ttggaaactctgagatgcgacaatc

SEQ ID NO: 1060966 - DNA, 25 bp, Homo sapien
ttgccccatccaagcctctgggaag

SEQ ID NO: 1060967 - DNA, 25 bp, Homo sapien
tctgagatgcgacaatccctgcctc

SEQ ID NO: 1060968 - DNA, 25 bp, Homo sapien
aacagtccaatcacaccgttattgt

SEQ ID NO: 1060969 - DNA, 25 bp, Homo sapien
acagtccaatcacaccgttattgtc

SEQ ID NO: 1060970 - DNA, 25 bp, Homo sapien
caacagtccaatcacaccgttattg

SEQ ID NO: 1060971 - DNA, 25 bp, Homo sapien
cacaggcacatccagctgcacctgc

SEQ ID NO: 1060972 - DNA, 25 bp, Homo sapien
agctgcacctgcacaggcaccatgc

SEQ ID NO: 1060973 - DNA, 25 bp, Homo sapien
cacctgcacaggcaccatgctcttc

SEQ ID NO: 1060974 - DNA, 25 bp, Homo sapien
gcacaggcaccatgctcttcttcat

SEQ ID NO: 1060975 - DNA, 25 bp, Homo sapien
ttggcaaataactcaggcacacggc

SEQ ID NO: 1060976 - DNA, 25 bp, Homo sapien
ggcacacggcctagctggccctgtt

SEQ ID NO: 1060977 - DNA, 25 bp, Homo sapien
cgcagcccaaggtgtagaggtcacc

SEQ ID NO: 1060978 - DNA, 25 bp, Homo sapien
caaggtgtagaggtcaccatcagct

SEQ ID NO: 1060979 - DNA, 25 bp, Homo sapien
tctgcctgatattcttctcattaac

SEQ ID NO: 1060980 - DNA, 25 bp, Homo sapien
catctgcctgatattcttctcatta

SEQ ID NO: 1060981 - DNA, 25 bp, Homo sapien
tgcctgatattcttctcattaactc

SEQ ID NO: 1060982 - DNA, 25 bp, Homo sapien
cctgatattcttctcattaactcat

SEQ ID NO: 1060983 - DNA, 25 bp, Homo sapien
ctggaatctcacgtggccccggctt

SEQ ID NO: 1060984 - DNA, 25 bp, Homo sapien
aggtgaaataggcaccacaaaaggc

SEQ ID NO: 1060985 - DNA, 25 bp, Homo sapien
acgtggccctcatgggagatggcaa

SEQ ID NO: 1060986 - DNA, 25 bp, Homo sapien
cgtggccctcatgggagatggcaaa

SEQ ID NO: 1060987 - DNA, 25 bp, Homo sapien
tgaaataggcaccacaaaaggcatc

SEQ ID NO: 1060988 - DNA, 25 bp, Homo sapien
ctgatggtagttggagaggccgaag

SEQ ID NO: 1060989 - DNA, 25 bp, Homo sapien
catcaggggtgaaggtgttctgaga

SEQ ID NO: 1060990 - DNA, 25 bp, Homo sapien
catcaggatatggacattctcactt

SEQ ID NO: 1060991 - DNA, 25 bp, Homo sapien
agatgacaaaactggcttggagggg

SEQ ID NO: 1060992 - DNA, 25 bp, Homo sapien
aggatatggacattctcactttaca

SEQ ID NO: 1060993 - DNA, 25 bp, Homo sapien
ggggtatgaagcaagattctgtgcc

SEQ ID NO: 1060994 - DNA, 25 bp, Homo sapien
agactgtatggtgctggccaccaga

SEQ ID NO: 1060995 - DNA, 25 bp, Homo sapien
ggcccagccgcccatactcagcccg

SEQ ID NO: 1060996 - DNA, 25 bp, Homo sapien
acaagccaccgaggagacagcaggc

SEQ ID NO: 1060997 - DNA, 25 bp, Homo sapien
ttggtcacagcataccccacagagg

SEQ ID NO: 1060998 - DNA, 25 bp, Homo sapien
agggtgggtatgctcttctcctcag

SEQ ID NO: 1060999 - DNA, 25 bp, Homo sapien
acagataagaccacacggttctcca

SEQ ID NO: 1061000 - DNA, 25 bp, Homo sapien
ccttgactaataagactgtatgctg

SEQ ID NO: 1061001 - DNA, 25 bp, Homo sapien
cgctggacacagataagaccacacg

SEQ ID NO: 1061002 - DNA, 25 bp, Homo sapien
tgcccatgccccaggcgaaaacacg

SEQ ID NO: 1061003 - DNA, 25 bp, Homo sapien
gatggagccccaacttctcagagag

SEQ ID NO: 1061004 - DNA, 25 bp, Homo sapien
ttttctagtaggcaaagccagggcc

SEQ ID NO: 1061005 - DNA, 25 bp, Homo sapien
tctttgcgattccaggccgttggct

SEQ ID NO: 1061006 - DNA, 25 bp, Homo sapien
ccgaatggatgggtacgatgtacac

SEQ ID NO: 1061007 - DNA, 25 bp, Homo sapien
cataatatgtgctcccttaaaaagc

SEQ ID NO: 1061008 - DNA, 25 bp, Homo sapien
ccaggtttatagtttattctgtctt

SEQ ID NO: 1061009 - DNA, 25 bp, Homo sapien
taaaaagcagggaatgtgtagaaaa

SEQ ID NO: 1061010 - DNA, 25 bp, Homo sapien
ttaaaaagcagggaatgtgtagaaa

SEQ ID NO: 1061011 - DNA, 25 bp, Homo sapien
cactgacagctggttggcacctcag

SEQ ID NO: 1061012 - DNA, 25 bp, Homo sapien
ccttacttcttgacagatttgaagc

SEQ ID NO: 1061013 - DNA, 25 bp, Homo sapien
tccaccctgcctctattgtactatg

SEQ ID NO: 1061014 - DNA, 25 bp, Homo sapien
ggacatcttgacatcacttaagttg

SEQ ID NO: 1061015 - DNA, 25 bp, Homo sapien
cactaaagggcggtaacggcagtgc

SEQ ID NO: 1061016 - DNA, 25 bp, Homo sapien
agaaataatgacgtacgctgtcccc

SEQ ID NO: 1061017 - DNA, 25 bp, Homo sapien
tgcctgtagccatccggaggcctaa

SEQ ID NO: 1061018 - DNA, 25 bp, Homo sapien
tggcctagcagtagcgccagtgcct

SEQ ID NO: 1061019 - DNA, 25 bp, Homo sapien
ccgcgcaccggggtggggctttgcg

SEQ ID NO: 1061020 - DNA, 25 bp, Homo sapien
ctctgcgggcggggctcgaaggccc

SEQ ID NO: 1061021 - DNA, 25 bp, Homo sapien
tggggctttgcgggcggggctctgc

SEQ ID NO: 1061022 - DNA, 25 bp, Homo sapien
gcggggctcgaaggcccgcgcgggc

SEQ ID NO: 1061023 - DNA, 25 bp, Homo sapien
gtcgcccatccacaggctggccgcc

SEQ ID NO: 1061024 - DNA, 25 bp, Homo sapien
tcgcccatccacaggctggccgcca

SEQ ID NO: 1061025 - DNA, 25 bp, Homo sapien
cgcccatccacaggctggccgccat

SEQ ID NO: 1061026 - DNA, 25 bp, Homo sapien
cagcctcttcacttagatgctggaa

SEQ ID NO: 1061027 - DNA, 25 bp, Homo sapien
cttgtcttcagaccccggacggctg

SEQ ID NO: 1061028 - DNA, 25 bp, Homo sapien
ggaacccgcttctgtgtcaccaaaa

SEQ ID NO: 1061029 - DNA, 25 bp, Homo sapien
tcgcgaaaccgagatgcttccttgt

SEQ ID NO: 1061030 - DNA, 25 bp, Homo sapien
agcgcgcctcagtccttggattgct

SEQ ID NO: 1061031 - DNA, 25 bp, Homo sapien
ccccagctcttttggttcaagcttg

SEQ ID NO: 1061032 - DNA, 25 bp, Homo sapien
ccttggattgctcccattctatgtc

SEQ ID NO: 1061033 - DNA, 25 bp, Homo sapien
agcttgccccgctttagggagcctc

SEQ ID NO: 1061034 - DNA, 25 bp, Homo sapien
ccagtgaggcggtttcggataattt

SEQ ID NO: 1061035 - DNA, 25 bp, Homo sapien
ttttgacgctcattacggtctcccc

SEQ ID NO: 1061036 - DNA, 25 bp, Homo sapien
aggctctggagatgaagttctcatc

SEQ ID NO: 1061037 - DNA, 25 bp, Homo sapien
agttctcatccatgtagggttccag

SEQ ID NO: 1061038 - DNA, 25 bp, Homo sapien
tacattctcgtacatgacagctgca

SEQ ID NO: 1061039 - DNA, 25 bp, Homo sapien
gcaacgagatgtattaagagagacc

SEQ ID NO: 1061040 - DNA, 25 bp, Homo sapien
tagtgagaagccatgactacgatgt

SEQ ID NO: 1061041 - DNA, 25 bp, Homo sapien
gagtcacaacgcctggcaagtccta

SEQ ID NO: 1061042 - DNA, 25 bp, Homo sapien
aaatctgcaaattctacaaagcagt

SEQ ID NO: 1061043 - DNA, 25 bp, Homo sapien
gcaaattctacaaagcagtagccag

SEQ ID NO: 1061044 - DNA, 25 bp, Homo sapien
tacaaagcagtagccagctgggatc

SEQ ID NO: 1061045 - DNA, 25 bp, Homo sapien
cttctcagctgtggccaaatctgca

SEQ ID NO: 1061046 - DNA, 25 bp, Homo sapien
gtatacagtagggattcaatagatg

SEQ ID NO: 1061047 - DNA, 25 bp, Homo sapien
tcaatagatggtagtaagcaatgac

SEQ ID NO: 1061048 - DNA, 25 bp, Homo sapien
gggattcaatagatggtagtaagca

SEQ ID NO: 1061049 - DNA, 25 bp, Homo sapien
cagtagggattcaatagatggtagt

SEQ ID NO: 1061050 - DNA, 25 bp, Homo sapien
catggatttgggaggcaaccaatct

SEQ ID NO: 1061051 - DNA, 25 bp, Homo sapien
ttcccaatcaggcaagaggtctaga

SEQ ID NO: 1061052 - DNA, 25 bp, Homo sapien
tcaagtcttcggttatgggaggcag

SEQ ID NO: 1061053 - DNA, 25 bp, Homo sapien
tgggaagagcagaatgcaactctct

SEQ ID NO: 1061054 - DNA, 25 bp, Homo sapien
gggttgcacggatgaccgctaaggg

SEQ ID NO: 1061055 - DNA, 25 bp, Homo sapien
aaaatgagggggttgcacggatgac

SEQ ID NO: 1061056 - DNA, 25 bp, Homo sapien
acggatgaccgctaagggcactgcc

SEQ ID NO: 1061057 - DNA, 25 bp, Homo sapien
ttgcacggatgaccgctaagggcac

SEQ ID NO: 1061058 - DNA, 25 bp, Homo sapien
gagaaaggtgtttcaagagttgaac

SEQ ID NO: 1061059 - DNA, 25 bp, Homo sapien
ttcaagagttgaacaatatttgaag

SEQ ID NO: 1061060 - DNA, 25 bp, Homo sapien
ggtgtttcaagagttgaacaatatt

SEQ ID NO: 1061061 - DNA, 25 bp, Homo sapien
gaaaggtgtttcaagagttgaacaa

SEQ ID NO: 1061062 - DNA, 25 bp, Homo sapien
ctgttatctggttgtttcccgtaag

SEQ ID NO: 1061063 - DNA, 25 bp, Homo sapien
ccgtaagtggcatagttcagtttaa

SEQ ID NO: 1061064 - DNA, 25 bp, Homo sapien
tggttgtttcccgtaagtggcatag

SEQ ID NO: 1061065 - DNA, 25 bp, Homo sapien
tttcccgtaagtggcatagttcagt

SEQ ID NO: 1061066 - DNA, 25 bp, Homo sapien
atcatccacgtccggggtcaggtcc

SEQ ID NO: 1061067 - DNA, 25 bp, Homo sapien
catcatccacgtccggggtcaggtc

SEQ ID NO: 1061068 - DNA, 25 bp, Homo sapien
tcatccacgtccggggtcaggtccc

SEQ ID NO: 1061069 - DNA, 25 bp, Homo sapien
tcaggtcccccacaaagagggaata

SEQ ID NO: 1061070 - DNA, 25 bp, Homo sapien
ctttgacgaagaattcatacagcat

SEQ ID NO: 1061071 - DNA, 25 bp, Homo sapien
ttagacacgcctgtctggtccaaaa

SEQ ID NO: 1061072 - DNA, 25 bp, Homo sapien
ccgacaggaggggtagactttgacg

SEQ ID NO: 1061073 - DNA, 25 bp, Homo sapien
gggtagactttgacgaagaattcat

SEQ ID NO: 1061074 - DNA, 25 bp, Homo sapien
taagcatcagtaacaagtaaggcct

SEQ ID NO: 1061075 - DNA, 25 bp, Homo sapien
cagagcttgtggtcttaatcgccat

SEQ ID NO: 1061076 - DNA, 25 bp, Homo sapien
gagcttcaattctacaatactggca

SEQ ID NO: 1061077 - DNA, 25 bp, Homo sapien
tttctaaaacacctccactcaggag

SEQ ID NO: 1061078 - DNA, 25 bp, Homo sapien
gagagtcccatcaacaggtgtccac

SEQ ID NO: 1061079 - DNA, 25 bp, Homo sapien
ttaaagtctaagaatggacacatga

SEQ ID NO: 1061080 - DNA, 25 bp, Homo sapien
cacatagtgtcaagatccaagtaca

SEQ ID NO: 1061081 - DNA, 25 bp, Homo sapien
gagagtccattaaactagaggaaga

SEQ ID NO: 1061082 - DNA, 25 bp, Homo sapien
cagccgcacaggcttagaccccagt

SEQ ID NO: 1061083 - DNA, 25 bp, Homo sapien
cgtcagggctcgcttctgttccagt

SEQ ID NO: 1061084 - DNA, 25 bp, Homo sapien
gctttagggattgccacgctcagcc

SEQ ID NO: 1061085 - DNA, 25 bp, Homo sapien
tggcactccgtcagggctcgcttct

SEQ ID NO: 1061086 - DNA, 25 bp, Homo sapien
tgtacatctgactatattccactgg

SEQ ID NO: 1061087 - DNA, 25 bp, Homo sapien
tggtgctctgggtatagccatactg

SEQ ID NO: 1061088 - DNA, 25 bp, Homo sapien
tgcctgtgttctggtcatagcccca

SEQ ID NO: 1061089 - DNA, 25 bp, Homo sapien
tagccccactgagcatagtagttct

SEQ ID NO: 1061090 - DNA, 25 bp, Homo sapien
tccaatgcatcatctccaacttctt

SEQ ID NO: 1061091 - DNA, 25 bp, Homo sapien
catcatctccaacttcttcatatgt

SEQ ID NO: 1061092 - DNA, 25 bp, Homo sapien
cttccaatgcatcatctccaacttc

SEQ ID NO: 1061093 - DNA, 25 bp, Homo sapien
tgcatcatctccaacttcttcatat

SEQ ID NO: 1061094 - DNA, 25 bp, Homo sapien
ttagtaccggcagaatttcaccatg

SEQ ID NO: 1061095 - DNA, 25 bp, Homo sapien
ggtgagattataggcgcgcaacacc

SEQ ID NO: 1061096 - DNA, 25 bp, Homo sapien
tatttttagtaccggcagaatttca

SEQ ID NO: 1061097 - DNA, 25 bp, Homo sapien
aggaggtgagattataggcgcgcaa

SEQ ID NO: 1061098 - DNA, 25 bp, Homo sapien
gggcagatcacttgaacctaggagt

SEQ ID NO: 1061099 - DNA, 25 bp, Homo sapien
gtggctcatgcctataatgccagca

SEQ ID NO: 1061100 - DNA, 25 bp, Homo sapien
tcaaaaaaagttttggccaggagca

SEQ ID NO: 1061101 - DNA, 25 bp, Homo sapien
ctttggaaggccgagatgggcagat

SEQ ID NO: 1061102 - DNA, 25 bp, Homo sapien
tctcaagaactgacaataagtgcat

SEQ ID NO: 1061103 - DNA, 25 bp, Homo sapien
actctgttctatggtaaggtcccta

SEQ ID NO: 1061104 - DNA, 25 bp, Homo sapien
taagtccagagcatcatctcaagaa

SEQ ID NO: 1061105 - DNA, 25 bp, Homo sapien
taagtgcatagtggaagaacttcag

SEQ ID NO: 1061106 - DNA, 25 bp, Homo sapien
gacagtccatcagagcgtcatacag

SEQ ID NO: 1061107 - DNA, 25 bp, Homo sapien
gtgacagtccatcagagcgtcatac

SEQ ID NO: 1061108 - DNA, 25 bp, Homo sapien
ccagtgacagtccatcagagcgtca

SEQ ID NO: 1061109 - DNA, 25 bp, Homo sapien
cagtgacagtccatcagagcgtcat

SEQ ID NO: 1061110 - DNA, 25 bp, Homo sapien
gatccaggccttgtatatgcagatg

SEQ ID NO: 1061111 - DNA, 25 bp, Homo sapien
cagtataaagttcacacggagggtc

SEQ ID NO: 1061112 - DNA, 25 bp, Homo sapien
caagttaggactcaaatatggcagg

SEQ ID NO: 1061113 - DNA, 25 bp, Homo sapien
taactacctggacaaaggattcctg

SEQ ID NO: 1061114 - DNA, 25 bp, Homo sapien
atttacatttggcctccctcgtgtg

SEQ ID NO: 1061115 - DNA, 25 bp, Homo sapien
agctattcattaccagagggcaaag

SEQ ID NO: 1061116 - DNA, 25 bp, Homo sapien
tgtgccgggccagaaagtcttagca

SEQ ID NO: 1061117 - DNA, 25 bp, Homo sapien
ccctcgtgtgcccttagctattcat

SEQ ID NO: 1061118 - DNA, 25 bp, Homo sapien
gaagctctggaggttggtatagtaa

SEQ ID NO: 1061119 - DNA, 25 bp, Homo sapien
aaagttgatcagcttaatcctcctg

SEQ ID NO: 1061120 - DNA, 25 bp, Homo sapien
catcggatctgaacactggtcttgg

SEQ ID NO: 1061121 - DNA, 25 bp, Homo sapien
gctggcctaaatgttgtaatctggt

SEQ ID NO: 1061122 - DNA, 25 bp, Homo sapien
tccacagaacagcagaacggttggg

SEQ ID NO: 1061123 - DNA, 25 bp, Homo sapien
ttggcccttatcgaagctgcagctg

SEQ ID NO: 1061124 - DNA, 25 bp, Homo sapien
gcttaaggcatcagtattgggacca

SEQ ID NO: 1061125 - DNA, 25 bp, Homo sapien
cataagactcgtactgggaaaatcc

SEQ ID NO: 1061126 - DNA, 25 bp, Homo sapien
ggataaaacggtcccatcaagactg

SEQ ID NO: 1061127 - DNA, 25 bp, Homo sapien
gataaaacggtcccatcaagactga

SEQ ID NO: 1061128 - DNA, 25 bp, Homo sapien
ttttgggactggtgactacgcgcga

SEQ ID NO: 1061129 - DNA, 25 bp, Homo sapien
gagacctctggaggtcgccctggta

SEQ ID NO: 1061130 - DNA, 25 bp, Homo sapien
ggatggcctccagttgaatctgtga

SEQ ID NO: 1061131 - DNA, 25 bp, Homo sapien
ccctgggcctgaagtgtcttaattc

SEQ ID NO: 1061132 - DNA, 25 bp, Homo sapien
ccatccattcattccgtcaaacacc

SEQ ID NO: 1061133 - DNA, 25 bp, Homo sapien
catccattcattccgtcaaacacca

SEQ ID NO: 1061134 - DNA, 25 bp, Homo sapien
tggccaagtttctctctctcgaagc

SEQ ID NO: 1061135 - DNA, 25 bp, Homo sapien
cctacttcacaggataaagggacta

SEQ ID NO: 1061136 - DNA, 25 bp, Homo sapien
ggaggagactaacagcgctgaagca

SEQ ID NO: 1061137 - DNA, 25 bp, Homo sapien
gaccgagtggaaactcctggccaag

SEQ ID NO: 1061138 - DNA, 25 bp, Homo sapien
cttgcccaccgccgcgtcccccagc

SEQ ID NO: 1061139 - DNA, 25 bp, Homo sapien
ccaccgccgcgtcccccagcagcgc

SEQ ID NO: 1061140 - DNA, 25 bp, Homo sapien
ttgcccaccgccgcgtcccccagca

SEQ ID NO: 1061141 - DNA, 25 bp, Homo sapien
gcccaccgccgcgtcccccagcagc

SEQ ID NO: 1061142 - DNA, 25 bp, Homo sapien
ggcggtagcactcggcgcccaccgt

SEQ ID NO: 1061143 - DNA, 25 bp, Homo sapien
tgcagcgcgcggcggtagcactcgg

SEQ ID NO: 1061144 - DNA, 25 bp, Homo sapien
ccacgtagctccgcagcagcgacgt

SEQ ID NO: 1061145 - DNA, 25 bp, Homo sapien
cactcggcgcccaccgtgggctcgg

SEQ ID NO: 1061146 - DNA, 25 bp, Homo sapien
agttgcagcttgacccgcggcccgg

SEQ ID NO: 1061147 - DNA, 25 bp, Homo sapien
ctgaagcgctcgtggcccgcggtgt

SEQ ID NO: 1061148 - DNA, 25 bp, Homo sapien
agagttgcagcttgacccgcggccc

SEQ ID NO: 1061149 - DNA, 25 bp, Homo sapien
tggcccgcggtgtcccagagttgca

SEQ ID NO: 1061150 - DNA, 25 bp, Homo sapien
acatcaaagaccagcaggacaccca

SEQ ID NO: 1061151 - DNA, 25 bp, Homo sapien
tgtcacatcaaagaccagcaggaca

SEQ ID NO: 1061152 - DNA, 25 bp, Homo sapien
tggatgtgttcaaaggacttcctgt

SEQ ID NO: 1061153 - DNA, 25 bp, Homo sapien
cagtcttggatgtgttcaaaggact

SEQ ID NO: 1061154 - DNA, 25 bp, Homo sapien
ttgtggccaaccagcaggaagatga

SEQ ID NO: 1061155 - DNA, 25 bp, Homo sapien
atgaccttgtccgggccctgagtgg

SEQ ID NO: 1061156 - DNA, 25 bp, Homo sapien
ggtcttgtggatgagccggacaccc

SEQ ID NO: 1061157 - DNA, 25 bp, Homo sapien
aggtctccacgaaggccatgcccag

SEQ ID NO: 1061158 - DNA, 25 bp, Homo sapien
tttctgtagaaagcctcgactccaa

SEQ ID NO: 1061159 - DNA, 25 bp, Homo sapien
tgtagaaagcctcgactccaaaatc

SEQ ID NO: 1061160 - DNA, 25 bp, Homo sapien
agaaagcctcgactccaaaatccag

SEQ ID NO: 1061161 - DNA, 25 bp, Homo sapien
cttttctgtagaaagcctcgactcc

SEQ ID NO: 1061162 - DNA, 25 bp, Homo sapien
attcaattcacagcgcggcaggctc

SEQ ID NO: 1061163 - DNA, 25 bp, Homo sapien
gaactttggatacaagctgccctga

SEQ ID NO: 1061164 - DNA, 25 bp, Homo sapien
gcaaccctgggtttgacgtcacata

SEQ ID NO: 1061165 - DNA, 25 bp, Homo sapien
tatgagccccatcgatagataggga

SEQ ID NO: 1061166 - DNA, 25 bp, Homo sapien
tatcagtctcatgttactgactgag

SEQ ID NO: 1061167 - DNA, 25 bp, Homo sapien
ccctaggagggagggattatcagtc

SEQ ID NO: 1061168 - DNA, 25 bp, Homo sapien
aggcaggaccaagtgcacaggaaga

SEQ ID NO: 1061169 - DNA, 25 bp, Homo sapien
tgaggtaatggatattccccacccc

SEQ ID NO: 1061170 - DNA, 25 bp, Homo sapien
cagtattagcaggatttgtaaaggg

SEQ ID NO: 1061171 - DNA, 25 bp, Homo sapien
gaggagcaatgtatcttccagagaa

SEQ ID NO: 1061172 - DNA, 25 bp, Homo sapien
gacaaagcattatggtctttttggg

SEQ ID NO: 1061173 - DNA, 25 bp, Homo sapien
taagtgactgaatatgggacaaagc

SEQ ID NO: 1061174 - DNA, 25 bp, Homo sapien
ggagctattccttaaggttatttgc

SEQ ID NO: 1061175 - DNA, 25 bp, Homo sapien
acttatttcattaaagtgactgctg

SEQ ID NO: 1061176 - DNA, 25 bp, Homo sapien
ccagcctccacttatttcattaaag

SEQ ID NO: 1061177 - DNA, 25 bp, Homo sapien
aagtgactgctgttggagctattcc

SEQ ID NO: 1061178 - DNA, 25 bp, Homo sapien
ggagttcgcgaccagtctaacatgg

SEQ ID NO: 1061179 - DNA, 25 bp, Homo sapien
gcctcctgctgaccacttgttacca

SEQ ID NO: 1061180 - DNA, 25 bp, Homo sapien
agcctcctgctgaccacttgttacc

SEQ ID NO: 1061181 - DNA, 25 bp, Homo sapien
ggcatccagccctcttgatttgggt

SEQ ID NO: 1061182 - DNA, 25 bp, Homo sapien
gatggcatccagccctcttgatttg

SEQ ID NO: 1061183 - DNA, 25 bp, Homo sapien
gcaaacatttactagggatggctgc

SEQ ID NO: 1061184 - DNA, 25 bp, Homo sapien
tagtgcaaacatttactagggatgg

SEQ ID NO: 1061185 - DNA, 25 bp, Homo sapien
aataagtgtgtcctgtatttttagt

SEQ ID NO: 1061186 - DNA, 25 bp, Homo sapien
ttttagtgcaaacatttactaggga

SEQ ID NO: 1061187 - DNA, 25 bp, Homo sapien
aggagcaggattatgaggacccgca

SEQ ID NO: 1061188 - DNA, 25 bp, Homo sapien
gaagacccgggctcctaaggattca

SEQ ID NO: 1061189 - DNA, 25 bp, Homo sapien
ggatccgggctttgagactccgagt

SEQ ID NO: 1061190 - DNA, 25 bp, Homo sapien
cactcctacgaggaaagggtcagaa

SEQ ID NO: 1061191 - DNA, 25 bp, Homo sapien
gctgctgagacgaacgcttcactgg

SEQ ID NO: 1061192 - DNA, 25 bp, Homo sapien
acagctcaatatcgccaccacgtgt

SEQ ID NO: 1061193 - DNA, 25 bp, Homo sapien
gccggccggaagagccgcgcgtttc

SEQ ID NO: 1061194 - DNA, 25 bp, Homo sapien
caccacgtgtcggagggcagtctgc

SEQ ID NO: 1061195 - DNA, 25 bp, Homo sapien
ctagtgaaggattcttaacgccggg

SEQ ID NO: 1061196 - DNA, 25 bp, Homo sapien
taacgccgggttggaatacgcagag

SEQ ID NO: 1061197 - DNA, 25 bp, Homo sapien
caattacccgtcatgctaccgatag

SEQ ID NO: 1061198 - DNA, 25 bp, Homo sapien
tagataaataagcagcgtcgggaag

SEQ ID NO: 1061199 - DNA, 25 bp, Homo sapien
tcctcgttgaggtccaacaggatac

SEQ ID NO: 1061200 - DNA, 25 bp, Homo sapien
tctcctggttcctctgttgccaact

SEQ ID NO: 1061201 - DNA, 25 bp, Homo sapien
tcctggttcctctgttgccaacttc

SEQ ID NO: 1061202 - DNA, 25 bp, Homo sapien
caacttcctcgttgaggtccaacag

SEQ ID NO: 1061203 - DNA, 25 bp, Homo sapien
cagatgtgttgtataaacttgtgag

SEQ ID NO: 1061204 - DNA, 25 bp, Homo sapien
tgtataaacttgtgagaagcccaga

SEQ ID NO: 1061205 - DNA, 25 bp, Homo sapien
gaagcccagagatggtgctgtcaat

SEQ ID NO: 1061206 - DNA, 25 bp, Homo sapien
ttcctatcatccaccagtgttatct

SEQ ID NO: 1061207 - DNA, 25 bp, Homo sapien
tctcatggcgttggaataccggctc

SEQ ID NO: 1061208 - DNA, 25 bp, Homo sapien
tcaactgctcacgacagaaggcgtc

SEQ ID NO: 1061209 - DNA, 25 bp, Homo sapien
tccttccggttgcagtaagtgctgg

SEQ ID NO: 1061210 - DNA, 25 bp, Homo sapien
tcctgaagttgaagagcgaattcca

SEQ ID NO: 1061211 - DNA, 25 bp, Homo sapien
agggcgccgggaccaacgatcacca

SEQ ID NO: 1061212 - DNA, 25 bp, Homo sapien
ccgaaatctcttgatgtcgattccg

SEQ ID NO: 1061213 - DNA, 25 bp, Homo sapien
tccgaaatctcttgatgtcgattcc

SEQ ID NO: 1061214 - DNA, 25 bp, Homo sapien
ggcgccgggaccaacgatcaccagc

SEQ ID NO: 1061215 - DNA, 25 bp, Homo sapien
tcagagcccagtcggtgctgcctcc

SEQ ID NO: 1061216 - DNA, 25 bp, Homo sapien
gcctcccttgtcgtaggaccttcat

SEQ ID NO: 1061217 - DNA, 25 bp, Homo sapien
gctgcctcccttgtcgtaggacctt

SEQ ID NO: 1061218 - DNA, 25 bp, Homo sapien
gtgctgcctcccttgtcgtaggacc

SEQ ID NO: 1061219 - DNA, 25 bp, Homo sapien
tgcatgaaaagtgcttcagagagtt

SEQ ID NO: 1061220 - DNA, 25 bp, Homo sapien
ctgcatgaaaagtgcttcagagagt

SEQ ID NO: 1061221 - DNA, 25 bp, Homo sapien
gcatgaaaagtgcttcagagagttc

SEQ ID NO: 1061222 - DNA, 25 bp, Homo sapien
ttgtctgacccgtgcctgtttgcca

SEQ ID NO: 1061223 - DNA, 25 bp, Homo sapien
tggtcacgagtccttgagcaagccc

SEQ ID NO: 1061224 - DNA, 25 bp, Homo sapien
ccctgctggaagtgtaaacgactct

SEQ ID NO: 1061225 - DNA, 25 bp, Homo sapien
gaatttcttgacagctctaaacctg

SEQ ID NO: 1061226 - DNA, 25 bp, Homo sapien
aggcgacggagcatgcgcagaggcc

SEQ ID NO: 1061227 - DNA, 25 bp, Homo sapien
ggagcatgcgcagaggccgccacgg

SEQ ID NO: 1061228 - DNA, 25 bp, Homo sapien
gggcgggcaggcgacggagcatgcg

SEQ ID NO: 1061229 - DNA, 25 bp, Homo sapien
gggcaggcgacggagcatgcgcaga

SEQ ID NO: 1061230 - DNA, 25 bp, Homo sapien
gcgttaactactaatctgtgggatt

SEQ ID NO: 1061231 - DNA, 25 bp, Homo sapien
tcaatgtcactctaagtcatgggtc

SEQ ID NO: 1061232 - DNA, 25 bp, Homo sapien
ggtctgattcaacatggcaattctg

SEQ ID NO: 1061233 - DNA, 25 bp, Homo sapien
caccatacattagtacccaagagga

SEQ ID NO: 1061234 - DNA, 25 bp, Homo sapien
cacctcagcctccacagtagctggg

SEQ ID NO: 1061235 - DNA, 25 bp, Homo sapien
ggttcaagtgattctcccacctcag

SEQ ID NO: 1061236 - DNA, 25 bp, Homo sapien
attacaggcatgccccaccatgtcc

SEQ ID NO: 1061237 - DNA, 25 bp, Homo sapien
agctcactataacctccgccttctg

SEQ ID NO: 1061238 - DNA, 25 bp, Homo sapien
tccagagagttggtttgtagcacat

SEQ ID NO: 1061239 - DNA, 25 bp, Homo sapien
cagagagttggtttgtagcacatta

SEQ ID NO: 1061240 - DNA, 25 bp, Homo sapien
gagttggtttgtagcacattaccag

SEQ ID NO: 1061241 - DNA, 25 bp, Homo sapien
ggtttgtagcacattaccagttcca

SEQ ID NO: 1061242 - DNA, 25 bp, Homo sapien
ttcacatgaagtcagatagctggga

SEQ ID NO: 1061243 - DNA, 25 bp, Homo sapien
tttcacatgaagtcagatagctggg

SEQ ID NO: 1061244 - DNA, 25 bp, Homo sapien
ctttcacatgaagtcagatagctgg

SEQ ID NO: 1061245 - DNA, 25 bp, Homo sapien
acttgggttttagtgtcttcaggat

SEQ ID NO: 1061246 - DNA, 25 bp, Homo sapien
ggacactcacttctgcattagccat

SEQ ID NO: 1061247 - DNA, 25 bp, Homo sapien
ttcagtaggtaccacaaccacatcc

SEQ ID NO: 1061248 - DNA, 25 bp, Homo sapien
tttccttcagtaggtaccacaacca

SEQ ID NO: 1061249 - DNA, 25 bp, Homo sapien
agtaaattgcacttaacggtggcaa

SEQ ID NO: 1061250 - DNA, 25 bp, Homo sapien
gtaggaggtagtctatatttttaca

SEQ ID NO: 1061251 - DNA, 25 bp, Homo sapien
ggcaagtaggaggtagtctatattt

SEQ ID NO: 1061252 - DNA, 25 bp, Homo sapien
tgcacttaacggtggcaagtaggag

SEQ ID NO: 1061253 - DNA, 25 bp, Homo sapien
aatctcagtagtggaacagtccatg

SEQ ID NO: 1061254 - DNA, 25 bp, Homo sapien
agctacaatatttctctaggacatc

SEQ ID NO: 1061255 - DNA, 25 bp, Homo sapien
atctcagtagtggaacagtccatgc

SEQ ID NO: 1061256 - DNA, 25 bp, Homo sapien
caatatttctctaggacatctacaa

SEQ ID NO: 1061257 - DNA, 25 bp, Homo sapien
aactccaaacctcccaggattgctt

SEQ ID NO: 1061258 - DNA, 25 bp, Homo sapien
caggattgcttagcagcttctacca

SEQ ID NO: 1061259 - DNA, 25 bp, Homo sapien
tataactctgactagtttcccattg

SEQ ID NO: 1061260 - DNA, 25 bp, Homo sapien
cacttgctactgtattacaccagac

SEQ ID NO: 1061261 - DNA, 25 bp, Homo sapien
ctgttgtaaaagtgtccatcgataa

SEQ ID NO: 1061262 - DNA, 25 bp, Homo sapien
tgttgtaaaagtgtccatcgataaa

SEQ ID NO: 1061263 - DNA, 25 bp, Homo sapien
ttgtaaaagtgtccatcgataaaca

SEQ ID NO: 1061264 - DNA, 25 bp, Homo sapien
gtaaaagtgtccatcgataaacaaa

SEQ ID NO: 1061265 - DNA, 25 bp, Homo sapien
caattttgtgtatcgtgtgagtttc

SEQ ID NO: 1061266 - DNA, 25 bp, Homo sapien
tgttctccgacccagcttcataaat

SEQ ID NO: 1061267 - DNA, 25 bp, Homo sapien
aactgccgtgttgttctccgaccca

SEQ ID NO: 1061268 - DNA, 25 bp, Homo sapien
gtttctactgctacaactgccgtgt

SEQ ID NO: 1061269 - DNA, 25 bp, Homo sapien
tgtctcaagatgtaccaccatcaaa

SEQ ID NO: 1061270 - DNA, 25 bp, Homo sapien
caaaatcgagggctgtagtactggt

SEQ ID NO: 1061271 - DNA, 25 bp, Homo sapien
gtcaaaggtattagaatgacaaaaa

SEQ ID NO: 1061272 - DNA, 25 bp, Homo sapien
tcaaccaaggaagctaaagtcaaag

SEQ ID NO: 1061273 - DNA, 25 bp, Homo sapien
tttgctctccccacaagttatgggg

SEQ ID NO: 1061274 - DNA, 25 bp, Homo sapien
acgtttattcctggacatacaaact

SEQ ID NO: 1061275 - DNA, 25 bp, Homo sapien
caagttatggggtaagcaatttcca

SEQ ID NO: 1061276 - DNA, 25 bp, Homo sapien
gacatacaaacttcttccagaggag

SEQ ID NO: 1061277 - DNA, 25 bp, Homo sapien
cagagtggacttgccagccagatga

SEQ ID NO: 1061278 - DNA, 25 bp, Homo sapien
cagacgaatagctctcttccagtcc

SEQ ID NO: 1061279 - DNA, 25 bp, Homo sapien
catgatcccacccagacgaatagct

SEQ ID NO: 1061280 - DNA, 25 bp, Homo sapien
aacaaagtgcttggggctgatcaac

SEQ ID NO: 1061281 - DNA, 25 bp, Homo sapien
taaaaatcaatctgtccggagtcca

SEQ ID NO: 1061282 - DNA, 25 bp, Homo sapien
catcagccgaagtgggtgtctgcac

SEQ ID NO: 1061283 - DNA, 25 bp, Homo sapien
tgtcctggcactggagctcttgcac

SEQ ID NO: 1061284 - DNA, 25 bp, Homo sapien
tcttgcactgctgatcagaagatca

SEQ ID NO: 1061285 - DNA, 25 bp, Homo sapien
tgagatggcaatctgcgtgatgcta

SEQ ID NO: 1061286 - DNA, 25 bp, Homo sapien
cttctgagatggcaatctgcgtgat

SEQ ID NO: 1061287 - DNA, 25 bp, Homo sapien
tcttctgagatggcaatctgcgtga

SEQ ID NO: 1061288 - DNA, 25 bp, Homo sapien
tctgagatggcaatctgcgtgatgc

SEQ ID NO: 1061289 - DNA, 25 bp, Homo sapien
tatattgcagacaacctcttccatc

SEQ ID NO: 1061290 - DNA, 25 bp, Homo sapien
cagctattcctttccagaacatcaa

SEQ ID NO: 1061291 - DNA, 25 bp, Homo sapien
tattgcagacaacctcttccatcag

SEQ ID NO: 1061292 - DNA, 25 bp, Homo sapien
ttccatcagccctacatcagctatt

SEQ ID NO: 1061293 - DNA, 25 bp, Homo sapien
atgtgtgtgctacattgttgagaac

SEQ ID NO: 1061294 - DNA, 25 bp, Homo sapien
tccctgctctacttggttccttctg

SEQ ID NO: 1061295 - DNA, 25 bp, Homo sapien
ttcttgactgtgtccattaggccaa

SEQ ID NO: 1061296 - DNA, 25 bp, Homo sapien
ttctccctgctctacttggttcctt

SEQ ID NO: 1061297 - DNA, 25 bp, Homo sapien
ccacattttgaactgtctgagattt

SEQ ID NO: 1061298 - DNA, 25 bp, Homo sapien
tgctcctccaactggcgttccaagt

SEQ ID NO: 1061299 - DNA, 25 bp, Homo sapien
cacattttgaactgtctgagatttc

SEQ ID NO: 1061300 - DNA, 25 bp, Homo sapien
ctgctcctccaactggcgttccaag

SEQ ID NO: 1061301 - DNA, 25 bp, Homo sapien
cagcagcgccaagctagatgaaggg

SEQ ID NO: 1061302 - DNA, 25 bp, Homo sapien
cctgaattgccgaggttaggccgga

SEQ ID NO: 1061303 - DNA, 25 bp, Homo sapien
ggtcatgttgcccagtgtactccca

SEQ ID NO: 1061304 - DNA, 25 bp, Homo sapien
gaccactgtggcatagcggaagagc

SEQ ID NO: 1061305 - DNA, 25 bp, Homo sapien
ggcactcacggtactaacttttgga

SEQ ID NO: 1061306 - DNA, 25 bp, Homo sapien
gaagtaagatgatttccctgcccca

SEQ ID NO: 1061307 - DNA, 25 bp, Homo sapien
gcgtcagttgcacctctggaagtaa

SEQ ID NO: 1061308 - DNA, 25 bp, Homo sapien
taaagtgcccttcagcatccacatg

SEQ ID NO: 1061309 - DNA, 25 bp, Homo sapien
gaacaaggtaagctattaccttgaa

SEQ ID NO: 1061310 - DNA, 25 bp, Homo sapien
aaagtgtggaacaaggtaagctatt

SEQ ID NO: 1061311 - DNA, 25 bp, Homo sapien
caaagtgtggaacaaggtaagctat

SEQ ID NO: 1061312 - DNA, 25 bp, Homo sapien
ggaacaaggtaagctattaccttga

SEQ ID NO: 1061313 - DNA, 25 bp, Homo sapien
gggaacctgagctagcacgttggta

SEQ ID NO: 1061314 - DNA, 25 bp, Homo sapien
cacgttggtattcacgagggctctt

SEQ ID NO: 1061315 - DNA, 25 bp, Homo sapien
acaatagggatgagatgtgccttcc

SEQ ID NO: 1061316 - DNA, 25 bp, Homo sapien
taggatcatctagaccagggctgta

SEQ ID NO: 1061317 - DNA, 25 bp, Homo sapien
tgactctcaggccttcgtggaaacc

SEQ ID NO: 1061318 - DNA, 25 bp, Homo sapien
caaaagtggtctctcctaaatcagc

SEQ ID NO: 1061319 - DNA, 25 bp, Homo sapien
tacaccgctaagctgggttaggcac

SEQ ID NO: 1061320 - DNA, 25 bp, Homo sapien
cgtggaaaccatatggcaggaaggc

SEQ ID NO: 1061321 - DNA, 25 bp, Homo sapien
tttgggacgaccagggtcgcaccac

SEQ ID NO: 1061322 - DNA, 25 bp, Homo sapien
caccgccccaggattaaggcctagg

SEQ ID NO: 1061323 - DNA, 25 bp, Homo sapien
gcgcgagcgctgactctcacattca

SEQ ID NO: 1061324 - DNA, 25 bp, Homo sapien
gtctctatgcttttacgcgcgcgcc

SEQ ID NO: 1061325 - DNA, 25 bp, Homo sapien
gctccaagaggctgctggccgacat

SEQ ID NO: 1061326 - DNA, 25 bp, Homo sapien
ctgctccaagaggctgctggccgac

SEQ ID NO: 1061327 - DNA, 25 bp, Homo sapien
tgctccaagaggctgctggccgaca

SEQ ID NO: 1061328 - DNA, 25 bp, Homo sapien
cgtcgccgagcagcaagttgtccaa

SEQ ID NO: 1061329 - DNA, 25 bp, Homo sapien
gccggcctgagaggcccgaaacctg

SEQ ID NO: 1061330 - DNA, 25 bp, Homo sapien
ttctcgcctcacacaatggccgagg

SEQ ID NO: 1061331 - DNA, 25 bp, Homo sapien
aaacctggcccgcaagagacgacgc

SEQ ID NO: 1061332 - DNA, 25 bp, Homo sapien
cctgcgaactaagcggcttccgaaa

SEQ ID NO: 1061333 - DNA, 25 bp, Homo sapien
aaatacttaagtgtgcggcacctgc

SEQ ID NO: 1061334 - DNA, 25 bp, Homo sapien
taagtgtgcggcacctgcgaactaa

SEQ ID NO: 1061335 - DNA, 25 bp, Homo sapien
gcggcacctgcgaactaagcggctt

SEQ ID NO: 1061336 - DNA, 25 bp, Homo sapien
ttcaaaatcatcatcgtttaatcca

SEQ ID NO: 1061337 - DNA, 25 bp, Homo sapien
caaaatcatcatcgtttaatccatc

SEQ ID NO: 1061338 - DNA, 25 bp, Homo sapien
tcaaaatcatcatcgtttaatccat

SEQ ID NO: 1061339 - DNA, 25 bp, Homo sapien
cacaggtatgatcgtagatagctca

SEQ ID NO: 1061340 - DNA, 25 bp, Homo sapien
acaggtatgatcgtagatagctcac

SEQ ID NO: 1061341 - DNA, 25 bp, Homo sapien
caggtatgatcgtagatagctcact

SEQ ID NO: 1061342 - DNA, 25 bp, Homo sapien
aaactacttcaatagcaggaaccta

SEQ ID NO: 1061343 - DNA, 25 bp, Homo sapien
ccaactctccctgttataatgatta

SEQ ID NO: 1061344 - DNA, 25 bp, Homo sapien
tatgcttctaaatgctccaactctc

SEQ ID NO: 1061345 - DNA, 25 bp, Homo sapien
ttacacaatgttttacaagaactac

SEQ ID NO: 1061346 - DNA, 25 bp, Homo sapien
tatcacaggttatgccaagacacag

SEQ ID NO: 1061347 - DNA, 25 bp, Homo sapien
caagacacagttgaatgtctgtacc

SEQ ID NO: 1061348 - DNA, 25 bp, Homo sapien
tgaatgtctgtacctgaactggcag

SEQ ID NO: 1061349 - DNA, 25 bp, Homo sapien
gcacttaatatcacaggttatgcca

SEQ ID NO: 1061350 - DNA, 25 bp, Homo sapien
gattctcaggttacccttcctcatc

SEQ ID NO: 1061351 - DNA, 25 bp, Homo sapien
acttgaagtattattccaaaatagg

SEQ ID NO: 1061352 - DNA, 25 bp, Homo sapien
tggctaaaaagtagatgacttactc

SEQ ID NO: 1061353 - DNA, 25 bp, Homo sapien
tagacaatgaactagattctcaggt

SEQ ID NO: 1061354 - DNA, 25 bp, Homo sapien
caagaaatggagtgctacctagggc

SEQ ID NO: 1061355 - DNA, 25 bp, Homo sapien
tccagagctctgagtagactgtccc

SEQ ID NO: 1061356 - DNA, 25 bp, Homo sapien
tgctgagaagtcaatcccactggga

SEQ ID NO: 1061357 - DNA, 25 bp, Homo sapien
gcagcttcacccaaagaataggaga

SEQ ID NO: 1061358 - DNA, 25 bp, Homo sapien
ttattaacggttcactatataatac

SEQ ID NO: 1061359 - DNA, 25 bp, Homo sapien
tttattaacggttcactatataata

SEQ ID NO: 1061360 - DNA, 25 bp, Homo sapien
tatacttctataaagccttgaactg

SEQ ID NO: 1061361 - DNA, 25 bp, Homo sapien
ccttgaactgttaggtgatactgta

SEQ ID NO: 1061362 - DNA, 25 bp, Homo sapien
tctgtcctctactaatgttctcaca

SEQ ID NO: 1061363 - DNA, 25 bp, Homo sapien
ttcaaagtccgtatttctgtcctct

SEQ ID NO: 1061364 - DNA, 25 bp, Homo sapien
tttattagccaacttttcaataatc

SEQ ID NO: 1061365 - DNA, 25 bp, Homo sapien
tctggttctccattcccaatgcttt

SEQ ID NO: 1061366 - DNA, 25 bp, Homo sapien
gacaagtgtaactcccatttcttat

SEQ ID NO: 1061367 - DNA, 25 bp, Homo sapien
atgcttttagtgtcactgacaagtg

SEQ ID NO: 1061368 - DNA, 25 bp, Homo sapien
ccaaagttgagtcaaaagagaaaca

SEQ ID NO: 1061369 - DNA, 25 bp, Homo sapien
ttccaaagttgagtcaaaagagaaa

SEQ ID NO: 1061370 - DNA, 25 bp, Homo sapien
tccaaagttgagtcaaaagagaaac

SEQ ID NO: 1061371 - DNA, 25 bp, Homo sapien
tgaaatgttatcctgagtcagctaa

SEQ ID NO: 1061372 - DNA, 25 bp, Homo sapien
ccttggtttctctagtccagactac

SEQ ID NO: 1061373 - DNA, 25 bp, Homo sapien
tctggcctcagtccgttcttactta

SEQ ID NO: 1061374 - DNA, 25 bp, Homo sapien
tacgtgtaacaaatacttcggtcag

SEQ ID NO: 1061375 - DNA, 25 bp, Homo sapien
tcagtggctctccaggtgtaagttc

SEQ ID NO: 1061376 - DNA, 25 bp, Homo sapien
ctggcaaacttcatagatcatggag

SEQ ID NO: 1061377 - DNA, 25 bp, Homo sapien
ttgagcaacttctttgctaaactgg

SEQ ID NO: 1061378 - DNA, 25 bp, Homo sapien
tagtccatgagcttcggggttagag

SEQ ID NO: 1061379 - DNA, 25 bp, Homo sapien
tgtatgctagacactgtacagagca

SEQ ID NO: 1061380 - DNA, 25 bp, Homo sapien
tctcactcgtgttggctctagaacc

SEQ ID NO: 1061381 - DNA, 25 bp, Homo sapien
gcctttacctatcctgagggttgaa

SEQ ID NO: 1061382 - DNA, 25 bp, Homo sapien
tagaaccacgctgcagaattagaac

SEQ ID NO: 1061383 - DNA, 25 bp, Homo sapien
gtgtaggagaaagaagcaacgatct

SEQ ID NO: 1061384 - DNA, 25 bp, Homo sapien
gaagcaacgatctgagctgccactt

SEQ ID NO: 1061385 - DNA, 25 bp, Homo sapien
atctgagctgccactttttccttgc

SEQ ID NO: 1061386 - DNA, 25 bp, Homo sapien
ggagaaagaagcaacgatctgagct

SEQ ID NO: 1061387 - DNA, 25 bp, Homo sapien
tctattttggccatggtacctcctg

SEQ ID NO: 1061388 - DNA, 25 bp, Homo sapien
tcagttctccaatttaaagcaaggc

SEQ ID NO: 1061389 - DNA, 25 bp, Homo sapien
gactctactagaatttgagacagag

SEQ ID NO: 1061390 - DNA, 25 bp, Homo sapien
atataattaagatgctaacttcccc

SEQ ID NO: 1061391 - DNA, 25 bp, Homo sapien
aatctcagtactttgaggccgaggc

SEQ ID NO: 1061392 - DNA, 25 bp, Homo sapien
taatctcagtactttgaggccgagg

SEQ ID NO: 1061393 - DNA, 25 bp, Homo sapien
tgtaatctcagtactttgaggccga

SEQ ID NO: 1061394 - DNA, 25 bp, Homo sapien
tctgtaatctcagtactttgaggcc

SEQ ID NO: 1061395 - DNA, 25 bp, Homo sapien
gattaatacttagttgtcaggcccc

SEQ ID NO: 1061396 - DNA, 25 bp, Homo sapien
taaacacttaaacaccttaatgcaa

SEQ ID NO: 1061397 - DNA, 25 bp, Homo sapien
aacttcacagaataactcaacagaa

SEQ ID NO: 1061398 - DNA, 25 bp, Homo sapien
tctaagtagaacattccccacaaag

SEQ ID NO: 1061399 - DNA, 25 bp, Homo sapien
gggtggatgcccaaaaccttcacaa

SEQ ID NO: 1061400 - DNA, 25 bp, Homo sapien
cctcttaggatatgcagatgcaacc

SEQ ID NO: 1061401 - DNA, 25 bp, Homo sapien
gaaaactgtatgcacttacggactt

SEQ ID NO: 1061402 - DNA, 25 bp, Homo sapien
aactcaagtgttctccaagtgcaaa

SEQ ID NO: 1061403 - DNA, 25 bp, Homo sapien
cgcttccgcacaggcgcagaagcaa

SEQ ID NO: 1061404 - DNA, 25 bp, Homo sapien
gcgcagaagcaagggcggacaccat

SEQ ID NO: 1061405 - DNA, 25 bp, Homo sapien
gagggccgggcgcttccgcacaggc

SEQ ID NO: 1061406 - DNA, 25 bp, Homo sapien
cgggcgcttccgcacaggcgcagaa

SEQ ID NO: 1061407 - DNA, 25 bp, Homo sapien
catgccaggccttaatcaagttgct

SEQ ID NO: 1061408 - DNA, 25 bp, Homo sapien
caagttgctacaaggctctcggtca

SEQ ID NO: 1061409 - DNA, 25 bp, Homo sapien
acctttgcccagagagggagttgct

SEQ ID NO: 1061410 - DNA, 25 bp, Homo sapien
tttgcccagagagggagttgctatt

SEQ ID NO: 1061411 - DNA, 25 bp, Homo sapien
taaataaatccttgccgtcaatctg

SEQ ID NO: 1061412 - DNA, 25 bp, Homo sapien
aataaatccttgccgtcaatctggc

SEQ ID NO: 1061413 - DNA, 25 bp, Homo sapien
aaataaatccttgccgtcaatctgg

SEQ ID NO: 1061414 - DNA, 25 bp, Homo sapien
ataaatccttgccgtcaatctggcg

SEQ ID NO: 1061415 - DNA, 25 bp, Homo sapien
cgcccggagcgctgtgagccaggag

SEQ ID NO: 1061416 - DNA, 25 bp, Homo sapien
tccctctccaccgtgcgccctgggc

SEQ ID NO: 1061417 - DNA, 25 bp, Homo sapien
gatccgacgcgaggggagcggcaag

SEQ ID NO: 1061418 - DNA, 25 bp, Homo sapien
cccgctgtctctgcgcctcgtccgc

SEQ ID NO: 1061419 - DNA, 25 bp, Homo sapien
tagagcgcggtgatggcgattgcca

SEQ ID NO: 1061420 - DNA, 25 bp, Homo sapien
gaacatgacaagcacgttgcccagc

SEQ ID NO: 1061421 - DNA, 25 bp, Homo sapien
ccacggcgcacacggccgagtagag

SEQ ID NO: 1061422 - DNA, 25 bp, Homo sapien
gctagggtaggcgtccgaggcgttg

SEQ ID NO: 1061423 - DNA, 25 bp, Homo sapien
cctcgatgtaagtggcctcgcctct

SEQ ID NO: 1061424 - DNA, 25 bp, Homo sapien
tgtgttcccctcgatgtaagtggcc

SEQ ID NO: 1061425 - DNA, 25 bp, Homo sapien
cattcctgtgttcccctcgatgtaa

SEQ ID NO: 1061426 - DNA, 25 bp, Homo sapien
ttcccctcgatgtaagtggcctcgc

SEQ ID NO: 1061427 - DNA, 25 bp, Homo sapien
gcactctccataaactccaagaaga

SEQ ID NO: 1061428 - DNA, 25 bp, Homo sapien
agctgacgtcttaggctctctgaga

SEQ ID NO: 1061429 - DNA, 25 bp, Homo sapien
tctctgagaaggtcccagcactctc

SEQ ID NO: 1061430 - DNA, 25 bp, Homo sapien
gggcaagctgacgtcttaggctctc

SEQ ID NO: 1061431 - DNA, 25 bp, Homo sapien
agcagccggctcatgtactggttgt

SEQ ID NO: 1061432 - DNA, 25 bp, Homo sapien
cccagcagccggctcatgtactggt

SEQ ID NO: 1061433 - DNA, 25 bp, Homo sapien
cagcagccggctcatgtactggttg

SEQ ID NO: 1061434 - DNA, 25 bp, Homo sapien
aacccagcagccggctcatgtactg

SEQ ID NO: 1061435 - DNA, 25 bp, Homo sapien
ttgctaaaagcacaattcccagagg

SEQ ID NO: 1061436 - DNA, 25 bp, Homo sapien
gccacaggctgtttgctaaaagcac

SEQ ID NO: 1061437 - DNA, 25 bp, Homo sapien
ctgtccacagaagtcctgctcacgc

SEQ ID NO: 1061438 - DNA, 25 bp, Homo sapien
cgcttcatggaagcctcattccctc

SEQ ID NO: 1061439 - DNA, 25 bp, Homo sapien
caggactctgaggttaatgaaatca

SEQ ID NO: 1061440 - DNA, 25 bp, Homo sapien
aatcatgccttttccttgcacagcc

SEQ ID NO: 1061441 - DNA, 25 bp, Homo sapien
tcttcctgtgcatgttatgacattc

SEQ ID NO: 1061442 - DNA, 25 bp, Homo sapien
gacattccgtgtggccaatttgatt

SEQ ID NO: 1061443 - DNA, 25 bp, Homo sapien
ggggaattgcttgaacccaggaggc

SEQ ID NO: 1061444 - DNA, 25 bp, Homo sapien
cccagctactcaggaggctgaggca

SEQ ID NO: 1061445 - DNA, 25 bp, Homo sapien
tagccaggcatggtgtgcgtacctg

SEQ ID NO: 1061446 - DNA, 25 bp, Homo sapien
aaaagaatagccgggtgtagtggtg

SEQ ID NO: 1061447 - DNA, 25 bp, Homo sapien
gccatgaccatgatgggcacgccaa

SEQ ID NO: 1061448 - DNA, 25 bp, Homo sapien
aagggccacgtctccatcaggtact

SEQ ID NO: 1061449 - DNA, 25 bp, Homo sapien
ttggcactctggaaaggcagcgtgc

SEQ ID NO: 1061450 - DNA, 25 bp, Homo sapien
tagtagtcgatggagagcacagcct

SEQ ID NO: 1061451 - DNA, 25 bp, Homo sapien
tggagcatgcacaccactgccccgt

SEQ ID NO: 1061452 - DNA, 25 bp, Homo sapien
ctggagcatgcacaccactgccccg

SEQ ID NO: 1061453 - DNA, 25 bp, Homo sapien
tctcgtcgaggaaagcgtagagcac

SEQ ID NO: 1061454 - DNA, 25 bp, Homo sapien
gaagcagcgcttgaagttctcgtcg

SEQ ID NO: 1061455 - DNA, 25 bp, Homo sapien
tgctattggcgtagcccagcgcgat

SEQ ID NO: 1061456 - DNA, 25 bp, Homo sapien
tgaggccatagcacacggtgatgat

SEQ ID NO: 1061457 - DNA, 25 bp, Homo sapien
tgtatcccgtatccaaagatgaggc

SEQ ID NO: 1061458 - DNA, 25 bp, Homo sapien
acaggcgccctatctggtgaccaaa

SEQ ID NO: 1061459 - DNA, 25 bp, Homo sapien
taaaggtgtcaagtcggacctggac

SEQ ID NO: 1061460 - DNA, 25 bp, Homo sapien
aagctgtctcaaggttgaagccccg

SEQ ID NO: 1061461 - DNA, 25 bp, Homo sapien
caagaattcggcaaagctaggactc

SEQ ID NO: 1061462 - DNA, 25 bp, Homo sapien
gatcacactgctagcacgtggccaa

SEQ ID NO: 1061463 - DNA, 25 bp, Homo sapien
gaaccctggctccacttgtaagcag

SEQ ID NO: 1061464 - DNA, 25 bp, Homo sapien
gaataagcctgtatcgaggccccac

SEQ ID NO: 1061465 - DNA, 25 bp, Homo sapien
tagatgagccccgttacaggagtgt

SEQ ID NO: 1061466 - DNA, 25 bp, Homo sapien
acaggagtgtatttgcaccggcaca

SEQ ID NO: 1061467 - DNA, 25 bp, Homo sapien
tgcagcattaagaaccatgggttgg

SEQ ID NO: 1061468 - DNA, 25 bp, Homo sapien
tccgagaggagattctagatgagcc

SEQ ID NO: 1061469 - DNA, 25 bp, Homo sapien
tatctatcttcctactccctatctt

SEQ ID NO: 1061470 - DNA, 25 bp, Homo sapien
aatacttactgatcaaatcgggtgt

SEQ ID NO: 1061471 - DNA, 25 bp, Homo sapien
ggtgtccgtcccctgtgtataatac

SEQ ID NO: 1061472 - DNA, 25 bp, Homo sapien
tagtcactcgactctattatcaaac

SEQ ID NO: 1061473 - DNA, 25 bp, Homo sapien
tttaagaggttcctgccactttgcc

SEQ ID NO: 1061474 - DNA, 25 bp, Homo sapien
gcgccgctctcgccctttaagaggt

SEQ ID NO: 1061475 - DNA, 25 bp, Homo sapien
cgggccgaccgcgttctggctccgc

SEQ ID NO: 1061476 - DNA, 25 bp, Homo sapien
cgcgttctggctccgcgccgctctc

SEQ ID NO: 1061477 - DNA, 25 bp, Homo sapien
gctggcccaggatccaagatgttcc

SEQ ID NO: 1061478 - DNA, 25 bp, Homo sapien
aaagttggccacatacccaaggttg

SEQ ID NO: 1061479 - DNA, 25 bp, Homo sapien
aagggactctcgtgtgtcctcaggg

SEQ ID NO: 1061480 - DNA, 25 bp, Homo sapien
caagcctagttaagtggccaaccca

SEQ ID NO: 1061481 - DNA, 25 bp, Homo sapien
gcctggtaccggcaactgtgcaata

SEQ ID NO: 1061482 - DNA, 25 bp, Homo sapien
taccacctacctgacaaagttgctg

SEQ ID NO: 1061483 - DNA, 25 bp, Homo sapien
gggtcaatacatgtaacacgtctgg

SEQ ID NO: 1061484 - DNA, 25 bp, Homo sapien
gaagttgagtacaatgcctggtacc

SEQ ID NO: 1061485 - DNA, 25 bp, Homo sapien
gaaaatcctgacttcactatttatg

SEQ ID NO: 1061486 - DNA, 25 bp, Homo sapien
cttcactatttatggctctaccttt

SEQ ID NO: 1061487 - DNA, 25 bp, Homo sapien
ggaaaatcctgacttcactatttat

SEQ ID NO: 1061488 - DNA, 25 bp, Homo sapien
atttatggctctaccttttgtgaca

SEQ ID NO: 1061489 - DNA, 25 bp, Homo sapien
tgaattacaactgtgatgattgtgt

SEQ ID NO: 1061490 - DNA, 25 bp, Homo sapien
atggcccctgtacttatggagctta

SEQ ID NO: 1061491 - DNA, 25 bp, Homo sapien
aattacaactgtgatgattgtgtca

SEQ ID NO: 1061492 - DNA, 25 bp, Homo sapien
cctgtacttatggagcttacaatgc

SEQ ID NO: 1061493 - DNA, 25 bp, Homo sapien
gggcagacgccctagtcagcaataa

SEQ ID NO: 1061494 - DNA, 25 bp, Homo sapien
tggcacatggaagcaaatgacagca

SEQ ID NO: 1061495 - DNA, 25 bp, Homo sapien
gacagcagtgagacacacagcacag

SEQ ID NO: 1061496 - DNA, 25 bp, Homo sapien
cagcaataatctgataatccaccct

SEQ ID NO: 1061497 - DNA, 25 bp, Homo sapien
agccgtcggggtcacgcagccagtc

SEQ ID NO: 1061498 - DNA, 25 bp, Homo sapien
ccagaagcagccgtcggggtcacgc

SEQ ID NO: 1061499 - DNA, 25 bp, Homo sapien
gtcacgcagccagtccaggagaggc

SEQ ID NO: 1061500 - DNA, 25 bp, Homo sapien
gcagccgtcggggtcacgcagccag

SEQ ID NO: 1061501 - DNA, 25 bp, Homo sapien
ctgctgcagcccgacgaacaatggc

SEQ ID NO: 1061502 - DNA, 25 bp, Homo sapien
tggctgactgactaaacgcaccagc

SEQ ID NO: 1061503 - DNA, 25 bp, Homo sapien
ctgactaaacgcaccagcggaggga

SEQ ID NO: 1061504 - DNA, 25 bp, Homo sapien
agcccgacgaacaatggcaggagga

SEQ ID NO: 1061505 - DNA, 25 bp, Homo sapien
ttaacacaggcaataaggcactaca

SEQ ID NO: 1061506 - DNA, 25 bp, Homo sapien
taaatgaaggatcgtgccattcctc

SEQ ID NO: 1061507 - DNA, 25 bp, Homo sapien
ttttgtgatcacatatataaacaga

SEQ ID NO: 1061508 - DNA, 25 bp, Homo sapien
cctgctcacttaacatgtactaaat

SEQ ID NO: 1061509 - DNA, 25 bp, Homo sapien
tctgacaggcacactacaaggtttg

SEQ ID NO: 1061510 - DNA, 25 bp, Homo sapien
catgaggtcagattttatcaaaggg

SEQ ID NO: 1061511 - DNA, 25 bp, Homo sapien
taataagcattagacagacatccaa

SEQ ID NO: 1061512 - DNA, 25 bp, Homo sapien
ccaggtgcagctatattacacatgt

SEQ ID NO: 1061513 - DNA, 25 bp, Homo sapien
cttactatgcagaagtagatttact

SEQ ID NO: 1061514 - DNA, 25 bp, Homo sapien
tctagttgaacattaaatccaagaa

SEQ ID NO: 1061515 - DNA, 25 bp, Homo sapien
gactaggcatattacaacctcttgg

SEQ ID NO: 1061516 - DNA, 25 bp, Homo sapien
taaccaaacaattgcaataaatgct

SEQ ID NO: 1061517 - DNA, 25 bp, Homo sapien
gccctcaaggaggtagagtacaact

SEQ ID NO: 1061518 - DNA, 25 bp, Homo sapien
aagaccaaggtcaacatcagtagtg

SEQ ID NO: 1061519 - DNA, 25 bp, Homo sapien
cactccttaggtgtgggctatgcat

SEQ ID NO: 1061520 - DNA, 25 bp, Homo sapien
tgataggatgtacccttgataggaa

SEQ ID NO: 1061521 - DNA, 25 bp, Homo sapien
agccgggcaggaaatatgcaagatg

SEQ ID NO: 1061522 - DNA, 25 bp, Homo sapien
tgagcctggagcattttgtagtacc

SEQ ID NO: 1061523 - DNA, 25 bp, Homo sapien
actatgttgtccatgactcaagcaa

SEQ ID NO: 1061524 - DNA, 25 bp, Homo sapien
aatgactgattctaggagccgggca

SEQ ID NO: 1061525 - DNA, 25 bp, Homo sapien
gagacttcactggaataagggcaat

SEQ ID NO: 1061526 - DNA, 25 bp, Homo sapien
tacagtattctgacgttagcctcac

SEQ ID NO: 1061527 - DNA, 25 bp, Homo sapien
ttttgttgccaaacctatgtaagga

SEQ ID NO: 1061528 - DNA, 25 bp, Homo sapien
ccttagggtgatgctatggttgcag

SEQ ID NO: 1061529 - DNA, 25 bp, Homo sapien
cggatacaggaaatagaaatagact

SEQ ID NO: 1061530 - DNA, 25 bp, Homo sapien
ggaagctctcctaacaagtttgatg

SEQ ID NO: 1061531 - DNA, 25 bp, Homo sapien
tttgatgaaagatcatgagagcctg

SEQ ID NO: 1061532 - DNA, 25 bp, Homo sapien
gtggattatagcaccagcttcagag

SEQ ID NO: 1061533 - DNA, 25 bp, Homo sapien
ccctatctgttgagaagttatgcac

SEQ ID NO: 1061534 - DNA, 25 bp, Homo sapien
gactattcaatctggctaagaccac

SEQ ID NO: 1061535 - DNA, 25 bp, Homo sapien
tagcagctagcatgtattgaatacc

SEQ ID NO: 1061536 - DNA, 25 bp, Homo sapien
ttcagatgcttctacctcagagatg

SEQ ID NO: 1061537 - DNA, 25 bp, Homo sapien
gaattccagactagctgaatagggc

SEQ ID NO: 1061538 - DNA, 25 bp, Homo sapien
tgcaatgggcaaagggaattccacg

SEQ ID NO: 1061539 - DNA, 25 bp, Homo sapien
gagatacggttagaaaagagctacc

SEQ ID NO: 1061540 - DNA, 25 bp, Homo sapien
tgaatagggctacaacagggcagca

SEQ ID NO: 1061541 - DNA, 25 bp, Homo sapien
ctttttgctgtaggcccgagtggtt

SEQ ID NO: 1061542 - DNA, 25 bp, Homo sapien
cgctactctggatgcaaagccgtca

SEQ ID NO: 1061543 - DNA, 25 bp, Homo sapien
tacaggtataagttatgagcagaca

SEQ ID NO: 1061544 - DNA, 25 bp, Homo sapien
tgtctggaattgaccactacccctg

SEQ ID NO: 1061545 - DNA, 25 bp, Homo sapien
tgacaagtgcccagattcagtgttc

SEQ ID NO: 1061546 - DNA, 25 bp, Homo sapien
tctttttggcacttaatcagacttt

SEQ ID NO: 1061547 - DNA, 25 bp, Homo sapien
catagagtatggcaaatccaagttt

SEQ ID NO: 1061548 - DNA, 25 bp, Homo sapien
gcacttaatcagactttgtaatctt

SEQ ID NO: 1061549 - DNA, 25 bp, Homo sapien
tgtaagcaccactgcaccagacaag

SEQ ID NO: 1061550 - DNA, 25 bp, Homo sapien
attagctgtaagcaccactgcacca

SEQ ID NO: 1061551 - DNA, 25 bp, Homo sapien
taagcaccactgcaccagacaagcc

SEQ ID NO: 1061552 - DNA, 25 bp, Homo sapien
tagctgtaagcaccactgcaccaga

SEQ ID NO: 1061553 - DNA, 25 bp, Homo sapien
gctgtgaattttcggcctcagtcac

SEQ ID NO: 1061554 - DNA, 25 bp, Homo sapien
ttttcggcctcagtcactaaactct

SEQ ID NO: 1061555 - DNA, 25 bp, Homo sapien
tgaattttcggcctcagtcactaaa

SEQ ID NO: 1061556 - DNA, 25 bp, Homo sapien
gtgctgtgaattttcggcctcagtc

SEQ ID NO: 1061557 - DNA, 25 bp, Homo sapien
cttttgagaaacgaggagaatagtc

SEQ ID NO: 1061558 - DNA, 25 bp, Homo sapien
gagtgtctccattagaagctttcag

SEQ ID NO: 1061559 - DNA, 25 bp, Homo sapien
tcctcggacacctgagatttgggcc

SEQ ID NO: 1061560 - DNA, 25 bp, Homo sapien
gagaatagtcgtgaaagtcctctgc

SEQ ID NO: 1061561 - DNA, 25 bp, Homo sapien
taaatgacattctcagaaaatagtc

SEQ ID NO: 1061562 - DNA, 25 bp, Homo sapien
aaataaactcacaactcgtgtttag

SEQ ID NO: 1061563 - DNA, 25 bp, Homo sapien
ctgagttacagtactaatgttttcc

SEQ ID NO: 1061564 - DNA, 25 bp, Homo sapien
aaatagtctgagttacagtactaat

SEQ ID NO: 1061565 - DNA, 25 bp, Homo sapien
ttttaacgatgcagataatattcac

SEQ ID NO: 1061566 - DNA, 25 bp, Homo sapien
cttttaacgatgcagataatattca

SEQ ID NO: 1061567 - DNA, 25 bp, Homo sapien
tttaacgatgcagataatattcaca

SEQ ID NO: 1061568 - DNA, 25 bp, Homo sapien
acttttaacgatgcagataatattc

SEQ ID NO: 1061569 - DNA, 25 bp, Homo sapien
aatatacaagtaatagttctagaaa

SEQ ID NO: 1061570 - DNA, 25 bp, Homo sapien
taaaactatggagtccaaatctcag

SEQ ID NO: 1061571 - DNA, 25 bp, Homo sapien
caaatctcagacctataatagaaac

SEQ ID NO: 1061572 - DNA, 25 bp, Homo sapien
catgtaatattctaataagactcta

SEQ ID NO: 1061573 - DNA, 25 bp, Homo sapien
gcgcccggccgataatgtaatttaa

SEQ ID NO: 1061574 - DNA, 25 bp, Homo sapien
tgcgcccggccgataatgtaattta

SEQ ID NO: 1061575 - DNA, 25 bp, Homo sapien
gtgatctcggctctcagcaaatttt

SEQ ID NO: 1061576 - DNA, 25 bp, Homo sapien
tcggctctcagcaaattttcctgcc

SEQ ID NO: 1061577 - DNA, 25 bp, Homo sapien
caccatgcctagctagttttttact

SEQ ID NO: 1061578 - DNA, 25 bp, Homo sapien
ttggtctcgaactccggggctctag

SEQ ID NO: 1061579 - DNA, 25 bp, Homo sapien
cagcctcgacctctcagactcaagt

SEQ ID NO: 1061580 - DNA, 25 bp, Homo sapien
gcagtgacataatcatggctcaatg

SEQ ID NO: 1061581 - DNA, 25 bp, Homo sapien
tattttggagcactcttcaagtcct

SEQ ID NO: 1061582 - DNA, 25 bp, Homo sapien
ttacttctattttggagcactcttc

SEQ ID NO: 1061583 - DNA, 25 bp, Homo sapien
tttctgcttttgattgagggctttc

SEQ ID NO: 1061584 - DNA, 25 bp, Homo sapien
ccttaatttcaaaatctggatcttc

SEQ ID NO: 1061585 - DNA, 25 bp, Homo sapien
ccaacaaagaaaccttgcagtgcat

SEQ ID NO: 1061586 - DNA, 25 bp, Homo sapien
atccaacaaagaaaccttgcagtgc

SEQ ID NO: 1061587 - DNA, 25 bp, Homo sapien
tccaacaaagaaaccttgcagtgca

SEQ ID NO: 1061588 - DNA, 25 bp, Homo sapien
catccaacaaagaaaccttgcagtg

SEQ ID NO: 1061589 - DNA, 25 bp, Homo sapien
catgtcctcctctcaatgagatgag

SEQ ID NO: 1061590 - DNA, 25 bp, Homo sapien
tctgaacattagtttgctcagctgt

SEQ ID NO: 1061591 - DNA, 25 bp, Homo sapien
aaacatatatgacatgtcctcctct

SEQ ID NO: 1061592 - DNA, 25 bp, Homo sapien
tatatgacatgtcctcctctcaatg

SEQ ID NO: 1061593 - DNA, 25 bp, Homo sapien
cttcttccaaaagattgagatgctc

SEQ ID NO: 1061594 - DNA, 25 bp, Homo sapien
tagaggttgcgttatcccaaatggc

SEQ ID NO: 1061595 - DNA, 25 bp, Homo sapien
gagatgctcacatactcgtttaagc

SEQ ID NO: 1061596 - DNA, 25 bp, Homo sapien
gctagaccaaaatagtcttcttcca

SEQ ID NO: 1061597 - DNA, 25 bp, Homo sapien
atttctttggcggaatccagccatg

SEQ ID NO: 1061598 - DNA, 25 bp, Homo sapien
tttctttggcggaatccagccatgt

SEQ ID NO: 1061599 - DNA, 25 bp, Homo sapien
gaaaactgcatgactaggacaagga

SEQ ID NO: 1061600 - DNA, 25 bp, Homo sapien
gagagaagggagatttacctcgtac

SEQ ID NO: 1061601 - DNA, 25 bp, Homo sapien
tggaaagagcacgttaccatggttg

SEQ ID NO: 1061602 - DNA, 25 bp, Homo sapien
ccatggttgcttccaggaacgaaaa

SEQ ID NO: 1061603 - DNA, 25 bp, Homo sapien
tgtgctgggtcaggtggataaaact

SEQ ID NO: 1061604 - DNA, 25 bp, Homo sapien
cttgttatgtcttctgttaactgtg

SEQ ID NO: 1061605 - DNA, 25 bp, Homo sapien
gtcaggtggataaaactttacatta

SEQ ID NO: 1061606 - DNA, 25 bp, Homo sapien
tatgtcttctgttaactgtgctggg

SEQ ID NO: 1061607 - DNA, 25 bp, Homo sapien
cctgccgaagctgaagacataaata

SEQ ID NO: 1061608 - DNA, 25 bp, Homo sapien
tatgtcctgccgaagctgaagacat

SEQ ID NO: 1061609 - DNA, 25 bp, Homo sapien
ctaaggttgcaaaggaacagggcag

SEQ ID NO: 1061610 - DNA, 25 bp, Homo sapien
gcagacgtcctgcaactatgtcctg

SEQ ID NO: 1061611 - DNA, 25 bp, Homo sapien
gtcgtagtctcccagttcagactgg

SEQ ID NO: 1061612 - DNA, 25 bp, Homo sapien
cataatccacgccatggagttctgg

SEQ ID NO: 1061613 - DNA, 25 bp, Homo sapien
gactggatggtgtaagaacctaata

SEQ ID NO: 1061614 - DNA, 25 bp, Homo sapien
tatgacttatgcagttccatgacct

SEQ ID NO: 1061615 - DNA, 25 bp, Homo sapien
ccaagtcagcctgagctggagtcat

SEQ ID NO: 1061616 - DNA, 25 bp, Homo sapien
ctttgctttatgaagatcaactcca

SEQ ID NO: 1061617 - DNA, 25 bp, Homo sapien
gatcaactccatacatagacaactt

SEQ ID NO: 1061618 - DNA, 25 bp, Homo sapien
tgaagatcaactccatacatagaca

SEQ ID NO: 1061619 - DNA, 25 bp, Homo sapien
tctcagcttatctttgtaaaccaga

SEQ ID NO: 1061620 - DNA, 25 bp, Homo sapien
gccgaatcttgatgaaaaagctact

SEQ ID NO: 1061621 - DNA, 25 bp, Homo sapien
tagagcagacacctaggatgatatc

SEQ ID NO: 1061622 - DNA, 25 bp, Homo sapien
ccaagggaagcggttaattctcagc

SEQ ID NO: 1061623 - DNA, 25 bp, Homo sapien
gatgttctacacagactttccataa

SEQ ID NO: 1061624 - DNA, 25 bp, Homo sapien
taactgggaagtttgaatccgatgg

SEQ ID NO: 1061625 - DNA, 25 bp, Homo sapien
tttccataatttcttagctgctcgg

SEQ ID NO: 1061626 - DNA, 25 bp, Homo sapien
gaatccgatggtactttcatactgc

SEQ ID NO: 1061627 - DNA, 25 bp, Homo sapien
tcaattagagcactagcttgcctgg

SEQ ID NO: 1061628 - DNA, 25 bp, Homo sapien
tggatcctagcgcaagaaatttgct

SEQ ID NO: 1061629 - DNA, 25 bp, Homo sapien
acttgctgtacgctcgaagtgtggg

SEQ ID NO: 1061630 - DNA, 25 bp, Homo sapien
gagtccggccactgtatcgaaattt

SEQ ID NO: 1061631 - DNA, 25 bp, Homo sapien
cttcggtctgccgaatcgacagctg

SEQ ID NO: 1061632 - DNA, 25 bp, Homo sapien
aggcatctaggacgccaccttctgc

SEQ ID NO: 1061633 - DNA, 25 bp, Homo sapien
cagaagtgggccgaggacttcggtc

SEQ ID NO: 1061634 - DNA, 25 bp, Homo sapien
tgctcaggtggctcgtcttcctttt

SEQ ID NO: 1061635 - DNA, 25 bp, Homo sapien
gtcttactgacataactctacgaaa

SEQ ID NO: 1061636 - DNA, 25 bp, Homo sapien
aagttaaggcctctaaatcagaaag

SEQ ID NO: 1061637 - DNA, 25 bp, Homo sapien
gaagaataactttgttgagtctatg

SEQ ID NO: 1061638 - DNA, 25 bp, Homo sapien
gagtctatgagaataagcaattgct

SEQ ID NO: 1061639 - DNA, 25 bp, Homo sapien
caaggttaatccatctgccaaagcg

SEQ ID NO: 1061640 - DNA, 25 bp, Homo sapien
gagctagcacttcgattccatcacg

SEQ ID NO: 1061641 - DNA, 25 bp, Homo sapien
taagatttgagcaaccacacagatg

SEQ ID NO: 1061642 - DNA, 25 bp, Homo sapien
cagtgactgtgggtgcaattaactc

SEQ ID NO: 1061643 - DNA, 25 bp, Homo sapien
gggcgatctcggtgcactgaagcct

SEQ ID NO: 1061644 - DNA, 25 bp, Homo sapien
tgggcgatctcggtgcactgaagcc

SEQ ID NO: 1061645 - DNA, 25 bp, Homo sapien
agtgggcgatctcggtgcactgaag

SEQ ID NO: 1061646 - DNA, 25 bp, Homo sapien
atctcggtgcactgaagcctcttca

SEQ ID NO: 1061647 - DNA, 25 bp, Homo sapien
catttggctaggtacaaaaatgtaa

SEQ ID NO: 1061648 - DNA, 25 bp, Homo sapien
tggacagtaaaactgtatgtcatat

SEQ ID NO: 1061649 - DNA, 25 bp, Homo sapien
caaggtagtcccaaatggacagtaa

SEQ ID NO: 1061650 - DNA, 25 bp, Homo sapien
cctgatgaccaatgtcataaacatt

SEQ ID NO: 1061651 - DNA, 25 bp, Homo sapien
caccgtgcctgccgccatagttatt

SEQ ID NO: 1061652 - DNA, 25 bp, Homo sapien
gtgcctgccgccatagttattttct

SEQ ID NO: 1061653 - DNA, 25 bp, Homo sapien
cgtgcctgccgccatagttattttc

SEQ ID NO: 1061654 - DNA, 25 bp, Homo sapien
ccgtgcctgccgccatagttatttt

SEQ ID NO: 1061655 - DNA, 25 bp, Homo sapien
ctgtcacctcgatgtgggttttttc

SEQ ID NO: 1061656 - DNA, 25 bp, Homo sapien
ggtactgtcacctcgatgtgggttt

SEQ ID NO: 1061657 - DNA, 25 bp, Homo sapien
tgggtactgtcacctcgatgtgggt

SEQ ID NO: 1061658 - DNA, 25 bp, Homo sapien
gtcaccatttgaggtgggtactgtc

SEQ ID NO: 1061659 - DNA, 25 bp, Homo sapien
ctcattcttatcagatcttcagttt

SEQ ID NO: 1061660 - DNA, 25 bp, Homo sapien
tcttatcagatcttcagttttttct

SEQ ID NO: 1061661 - DNA, 25 bp, Homo sapien
cttatcagatcttcagttttttctg

SEQ ID NO: 1061662 - DNA, 25 bp, Homo sapien
cttcctcattcttatcagatcttca

SEQ ID NO: 1061663 - DNA, 25 bp, Homo sapien
ttgctatgtctgatataaatgtttt

SEQ ID NO: 1061664 - DNA, 25 bp, Homo sapien
tataaatgttttcaccatctagtct

SEQ ID NO: 1061665 - DNA, 25 bp, Homo sapien
gttttcaccatctagtctttctctc

SEQ ID NO: 1061666 - DNA, 25 bp, Homo sapien
ctccaacattaaattgctatgtctg

SEQ ID NO: 1061667 - DNA, 25 bp, Homo sapien
tagtttaatagagttggacagatcc

SEQ ID NO: 1061668 - DNA, 25 bp, Homo sapien
caaatttgcatcttgggacatatgg

SEQ ID NO: 1061669 - DNA, 25 bp, Homo sapien
ggacagatcctaactcacatcttgg

SEQ ID NO: 1061670 - DNA, 25 bp, Homo sapien
ttacaactcctatagcagacagcat

SEQ ID NO: 1061671 - DNA, 25 bp, Homo sapien
caagctattaaagggatattccagg

SEQ ID NO: 1061672 - DNA, 25 bp, Homo sapien
aatttgaatactgggcaacctgagg

SEQ ID NO: 1061673 - DNA, 25 bp, Homo sapien
ttgagatcaaaacatgtgggagccc

SEQ ID NO: 1061674 - DNA, 25 bp, Homo sapien
caacctgaggtacaggcaagctatt

SEQ ID NO: 1061675 - DNA, 25 bp, Homo sapien
gcccattgatgttaagagttcggaa

SEQ ID NO: 1061676 - DNA, 25 bp, Homo sapien
tctggtacagactccatgaagttct

SEQ ID NO: 1061677 - DNA, 25 bp, Homo sapien
ttatcccattcactaggccgtggtt

SEQ ID NO: 1061678 - DNA, 25 bp, Homo sapien
gctcactgatgctggcatgatgttt

SEQ ID NO: 1061679 - DNA, 25 bp, Homo sapien
tacataaaaacatttattccctcca

SEQ ID NO: 1061680 - DNA, 25 bp, Homo sapien
cataaaaacatttattccctccatt

SEQ ID NO: 1061681 - DNA, 25 bp, Homo sapien
aacatttattccctccattttcaca

SEQ ID NO: 1061682 - DNA, 25 bp, Homo sapien
ttattccctccattttcacaattgg

SEQ ID NO: 1061683 - DNA, 25 bp, Homo sapien
taaaattgttcaagtactcccatgg

SEQ ID NO: 1061684 - DNA, 25 bp, Homo sapien
aaaggtggaagaggtatccccagag

SEQ ID NO: 1061685 - DNA, 25 bp, Homo sapien
tagcgtcctgtcatccctggtaact

SEQ ID NO: 1061686 - DNA, 25 bp, Homo sapien
tctcagttcaggatacatgctctag

SEQ ID NO: 1061687 - DNA, 25 bp, Homo sapien
gagggtaggacagaagttttcttca

SEQ ID NO: 1061688 - DNA, 25 bp, Homo sapien
catgcgccgaaataagcaaatcgaa

SEQ ID NO: 1061689 - DNA, 25 bp, Homo sapien
agcttttcaaccagccatgcgccga

SEQ ID NO: 1061690 - DNA, 25 bp, Homo sapien
tatctgcttagtgccatgacaagag

SEQ ID NO: 1061691 - DNA, 25 bp, Homo sapien
tgttatgtgttaggccgaaaggctg

SEQ ID NO: 1061692 - DNA, 25 bp, Homo sapien
tatagcaattagtttttgctccaga

SEQ ID NO: 1061693 - DNA, 25 bp, Homo sapien
cagtatagcaattagtttttgctcc

SEQ ID NO: 1061694 - DNA, 25 bp, Homo sapien
gttcattcagtatagcaattagttt

SEQ ID NO: 1061695 - DNA, 25 bp, Homo sapien
aatccttatatctcttcatatagac

SEQ ID NO: 1061696 - DNA, 25 bp, Homo sapien
cggaaagttcaaggaatcactggct

SEQ ID NO: 1061697 - DNA, 25 bp, Homo sapien
tctgtaacacaatagggtgctcaat

SEQ ID NO: 1061698 - DNA, 25 bp, Homo sapien
tagatacctttttgagtgagtgaac

SEQ ID NO: 1061699 - DNA, 25 bp, Homo sapien
gtgagtgaacattagaacggaaagt

SEQ ID NO: 1061700 - DNA, 25 bp, Homo sapien
tcatcctgtactaacagagcacgtt

SEQ ID NO: 1061701 - DNA, 25 bp, Homo sapien
gatcctcagggattggaatagaaac

SEQ ID NO: 1061702 - DNA, 25 bp, Homo sapien
tcatgaaaggaatacgaggagatgg

SEQ ID NO: 1061703 - DNA, 25 bp, Homo sapien
aaagtactaaagtagaggtggcact

SEQ ID NO: 1061704 - DNA, 25 bp, Homo sapien
tcacagaaagaccaaccaccaaaca

SEQ ID NO: 1061705 - DNA, 25 bp, Homo sapien
tgttaaacttcaatgcagaaaagct

SEQ ID NO: 1061706 - DNA, 25 bp, Homo sapien
tttgggcagtccattgctactcctt

SEQ ID NO: 1061707 - DNA, 25 bp, Homo sapien
tgctactcctttgtaccccacaata

SEQ ID NO: 1061708 - DNA, 25 bp, Homo sapien
gctggctttgggcagtccattgcta

SEQ ID NO: 1061709 - DNA, 25 bp, Homo sapien
catgcaaacagaggacacatacttg

SEQ ID NO: 1061710 - DNA, 25 bp, Homo sapien
caagtacacgaacaaacaggtctga

SEQ ID NO: 1061711 - DNA, 25 bp, Homo sapien
aacaggttaggcatgtgagttgtcc

SEQ ID NO: 1061712 - DNA, 25 bp, Homo sapien
gagagagtgcccacatttacttcag

SEQ ID NO: 1061713 - DNA, 25 bp, Homo sapien
tttgctctaagaggccatcttctca

SEQ ID NO: 1061714 - DNA, 25 bp, Homo sapien
tagacatagcctgtgacataaaaga

SEQ ID NO: 1061715 - DNA, 25 bp, Homo sapien
gacagcgtagcagttttcaggaaat

SEQ ID NO: 1061716 - DNA, 25 bp, Homo sapien
ttgggaaagcctataatgacagcgt

SEQ ID NO: 1061717 - DNA, 25 bp, Homo sapien
ccagcccatttacgctttatgttgc

SEQ ID NO: 1061718 - DNA, 25 bp, Homo sapien
ttggcagtgttacctttaggtaata

SEQ ID NO: 1061719 - DNA, 25 bp, Homo sapien
acgcccagcccatttacgctttatg

SEQ ID NO: 1061720 - DNA, 25 bp, Homo sapien
gcccatttacgctttatgttgcaaa

SEQ ID NO: 1061721 - DNA, 25 bp, Homo sapien
gagagtggcctattaatactatcca

SEQ ID NO: 1061722 - DNA, 25 bp, Homo sapien
gggaaggcaactctgtcaacaaatt

SEQ ID NO: 1061723 - DNA, 25 bp, Homo sapien
taaggcatgaggagtaacagcttca

SEQ ID NO: 1061724 - DNA, 25 bp, Homo sapien
cagatatggtaatgctacatgccac

SEQ ID NO: 1061725 - DNA, 25 bp, Homo sapien
tgctttcatagatctgcaccaatgt

SEQ ID NO: 1061726 - DNA, 25 bp, Homo sapien
catattctgctacagtaaaaggaga

SEQ ID NO: 1061727 - DNA, 25 bp, Homo sapien
tcttaaccatttcaggtatgctttc

SEQ ID NO: 1061728 - DNA, 25 bp, Homo sapien
tttttgtgtcatattctgctacagt

SEQ ID NO: 1061729 - DNA, 25 bp, Homo sapien
tgttaaagggtaagacactgctgcc

SEQ ID NO: 1061730 - DNA, 25 bp, Homo sapien
cacacctggcctaggatttcaatca

SEQ ID NO: 1061731 - DNA, 25 bp, Homo sapien
tattgcagagaagagtcaagcactg

SEQ ID NO: 1061732 - DNA, 25 bp, Homo sapien
gaaacaaagactgcaacactggcct

SEQ ID NO: 1061733 - DNA, 25 bp, Homo sapien
gattacagttcaggtgtaccctgac

SEQ ID NO: 1061734 - DNA, 25 bp, Homo sapien
catttctaatcataaataaagacaa

SEQ ID NO: 1061735 - DNA, 25 bp, Homo sapien
accatcacgcccagcagtatgtatt

SEQ ID NO: 1061736 - DNA, 25 bp, Homo sapien
ccctgactgcttaatagaaatgaat

SEQ ID NO: 1061737 - DNA, 25 bp, Homo sapien
gcatgtctaacagaccagaagcgtt

SEQ ID NO: 1061738 - DNA, 25 bp, Homo sapien
tgtctaacagaccagaagcgtttgg

SEQ ID NO: 1061739 - DNA, 25 bp, Homo sapien
ccagaagcgtttggtggtcagtttt

SEQ ID NO: 1061740 - DNA, 25 bp, Homo sapien
taacagaccagaagcgtttggtggt

SEQ ID NO: 1061741 - DNA, 25 bp, Homo sapien
taaaacctgaagagtctagtaaaca

SEQ ID NO: 1061742 - DNA, 25 bp, Homo sapien
tttgaaagtcaaagtcagctgggtg

SEQ ID NO: 1061743 - DNA, 25 bp, Homo sapien
tgcaagcacttgtatctggtttcag

SEQ ID NO: 1061744 - DNA, 25 bp, Homo sapien
tatgcagaaagtgctaaaaaatcct

SEQ ID NO: 1061745 - DNA, 25 bp, Homo sapien
tataagccacttaggcatgaaatct

SEQ ID NO: 1061746 - DNA, 25 bp, Homo sapien
cagagagctgtatataagccactta

SEQ ID NO: 1061747 - DNA, 25 bp, Homo sapien
aaatcttggtaagagcctttgacca

SEQ ID NO: 1061748 - DNA, 25 bp, Homo sapien
gccacttaggcatgaaatcttggta

SEQ ID NO: 1061749 - DNA, 25 bp, Homo sapien
gaagagctgctgttcactacacatt

SEQ ID NO: 1061750 - DNA, 25 bp, Homo sapien
gaatcttagctgataacatggtcaa

SEQ ID NO: 1061751 - DNA, 25 bp, Homo sapien
tataagtgggagaatgaactctgag

SEQ ID NO: 1061752 - DNA, 25 bp, Homo sapien
gcagcttaagcagttccaacctaag

SEQ ID NO: 1061753 - DNA, 25 bp, Homo sapien
tcagagtcagggttagtagatggcc

SEQ ID NO: 1061754 - DNA, 25 bp, Homo sapien
tttgcagagactccgacgaggtggt

SEQ ID NO: 1061755 - DNA, 25 bp, Homo sapien
taggaactaccgaatgcttgggacc

SEQ ID NO: 1061756 - DNA, 25 bp, Homo sapien
gtagatggcccctttgtcacgacag

SEQ ID NO: 1061757 - DNA, 25 bp, Homo sapien
ctatgatcctgaatgctcttgtggg

SEQ ID NO: 1061758 - DNA, 25 bp, Homo sapien
caccttagcataggaaatcagtgcc

SEQ ID NO: 1061759 - DNA, 25 bp, Homo sapien
cattagtggaataccaaaggccttc

SEQ ID NO: 1061760 - DNA, 25 bp, Homo sapien
tggtacatgaaacagcagtggcaat

SEQ ID NO: 1061761 - DNA, 25 bp, Homo sapien
tgtgaagcagtaaggaaagagttac

SEQ ID NO: 1061762 - DNA, 25 bp, Homo sapien
cagtaaggaaagagttactagagta

SEQ ID NO: 1061763 - DNA, 25 bp, Homo sapien
gaagcagtaaggaaagagttactag

SEQ ID NO: 1061764 - DNA, 25 bp, Homo sapien
ctgtgaagcagtaaggaaagagtta

SEQ ID NO: 1061765 - DNA, 25 bp, Homo sapien
tgggcagcctcataagtgatggtct

SEQ ID NO: 1061766 - DNA, 25 bp, Homo sapien
tggttgggatttcacttttcacagc

SEQ ID NO: 1061767 - DNA, 25 bp, Homo sapien
tctcagtgtggacaatagggacgtc

SEQ ID NO: 1061768 - DNA, 25 bp, Homo sapien
cattggcattatctgagatggtgac

SEQ ID NO: 1061769 - DNA, 25 bp, Homo sapien
caagatcccgccactgtacttccag

SEQ ID NO: 1061770 - DNA, 25 bp, Homo sapien
aagatcccgccactgtacttccagc

SEQ ID NO: 1061771 - DNA, 25 bp, Homo sapien
acttccagcctgggcaacagagtga

SEQ ID NO: 1061772 - DNA, 25 bp, Homo sapien
tccagcctgggcaacagagtgagac

SEQ ID NO: 1061773 - DNA, 25 bp, Homo sapien
ctcctgggtccaagtctccactgtt

SEQ ID NO: 1061774 - DNA, 25 bp, Homo sapien
agatgtgatagtttgagctgtcagc

SEQ ID NO: 1061775 - DNA, 25 bp, Homo sapien
gggtctcagatgtgatagtttgagc

SEQ ID NO: 1061776 - DNA, 25 bp, Homo sapien
tctcagatgtgatagtttgagctgt

SEQ ID NO: 1061777 - DNA, 25 bp, Homo sapien
tccaggactctttgaataatgtggc

SEQ ID NO: 1061778 - DNA, 25 bp, Homo sapien
tactaagtaggcagggatactctca

SEQ ID NO: 1061779 - DNA, 25 bp, Homo sapien
gatactctcagggtatctccctaga

SEQ ID NO: 1061780 - DNA, 25 bp, Homo sapien
ctgcccctgggttccataaagaggt

SEQ ID NO: 1061781 - DNA, 25 bp, Homo sapien
aagttaactttctattgagatagag

SEQ ID NO: 1061782 - DNA, 25 bp, Homo sapien
gttaactttctattgagatagagtc

SEQ ID NO: 1061783 - DNA, 25 bp, Homo sapien
taagttaactttctattgagataga

SEQ ID NO: 1061784 - DNA, 25 bp, Homo sapien
ttaagttaactttctattgagatag

SEQ ID NO: 1061785 - DNA, 25 bp, Homo sapien
tgtgatcacaattctcttttcaata

SEQ ID NO: 1061786 - DNA, 25 bp, Homo sapien
ttttcaatacgtgtctctgaaatcc

SEQ ID NO: 1061787 - DNA, 25 bp, Homo sapien
tcctgtgatcacaattctcttttca

SEQ ID NO: 1061788 - DNA, 25 bp, Homo sapien
aattctcttttcaatacgtgtctct

SEQ ID NO: 1061789 - DNA, 25 bp, Homo sapien
gcttgcagcacacaattagcaccca

SEQ ID NO: 1061790 - DNA, 25 bp, Homo sapien
aaaacaagtttcgagtctgctggtg

SEQ ID NO: 1061791 - DNA, 25 bp, Homo sapien
gaactgggaacattaatcctgacct

SEQ ID NO: 1061792 - DNA, 25 bp, Homo sapien
aatatagaattttagcactcaggcc

SEQ ID NO: 1061793 - DNA, 25 bp, Homo sapien
ctggaggagctttgattactttaga

SEQ ID NO: 1061794 - DNA, 25 bp, Homo sapien
gtcgatcagactttcctctttacca

SEQ ID NO: 1061795 - DNA, 25 bp, Homo sapien
gggattttaactcaagtcgatcaga

SEQ ID NO: 1061796 - DNA, 25 bp, Homo sapien
tacaggtgtccgtgaccacgtctgg

SEQ ID NO: 1061797 - DNA, 25 bp, Homo sapien
tctgagaggattcactcaagatgtg

SEQ ID NO: 1061798 - DNA, 25 bp, Homo sapien
ggtctgagaggattcactcaagatg

SEQ ID NO: 1061799 - DNA, 25 bp, Homo sapien
tgagaggattcactcaagatgtgaa

SEQ ID NO: 1061800 - DNA, 25 bp, Homo sapien
agggtctgagaggattcactcaaga

SEQ ID NO: 1061801 - DNA, 25 bp, Homo sapien
cagcaatctcggtctcctggtggac

SEQ ID NO: 1061802 - DNA, 25 bp, Homo sapien
ggtctcctggtggacgaccaccttg

SEQ ID NO: 1061803 - DNA, 25 bp, Homo sapien
ggtggacgaccaccttggtcactga

SEQ ID NO: 1061804 - DNA, 25 bp, Homo sapien
tctcggtctcctggtggacgaccac

SEQ ID NO: 1061805 - DNA, 25 bp, Homo sapien
tgagccctcggcttataaatacagg

SEQ ID NO: 1061806 - DNA, 25 bp, Homo sapien
caatttacagacaacgaagccgaga

SEQ ID NO: 1061807 - DNA, 25 bp, Homo sapien
catcaaaaggcgtcagtcaggccgc

SEQ ID NO: 1061808 - DNA, 25 bp, Homo sapien
gaactgggattctaaggagccttga

SEQ ID NO: 1061809 - DNA, 25 bp, Homo sapien
gatggaccacgggatgagactctcc

SEQ ID NO: 1061810 - DNA, 25 bp, Homo sapien
gctgtgaagggcatcctgacctgca

SEQ ID NO: 1061811 - DNA, 25 bp, Homo sapien
tctgggcccttctgcaaataagtct

SEQ ID NO: 1061812 - DNA, 25 bp, Homo sapien
taagtggccttagccctaacagggc

SEQ ID NO: 1061813 - DNA, 25 bp, Homo sapien
ggcacctggcatggagatcaggaag

SEQ ID NO: 1061814 - DNA, 25 bp, Homo sapien
ctggcatggagatcaggaaggtatt

SEQ ID NO: 1061815 - DNA, 25 bp, Homo sapien
cctggcatggagatcaggaaggtat

SEQ ID NO: 1061816 - DNA, 25 bp, Homo sapien
cacctggcatggagatcaggaaggt

SEQ ID NO: 1061817 - DNA, 25 bp, Homo sapien
gcgcccaccactgtacccggctaat

SEQ ID NO: 1061818 - DNA, 25 bp, Homo sapien
cgtgtcaaaggagcgggaacatgcc

SEQ ID NO: 1061819 - DNA, 25 bp, Homo sapien
gtcagcttcaaaaacccgatctcgg

SEQ ID NO: 1061820 - DNA, 25 bp, Homo sapien
gaatcacgctccagatcaaagtcag

SEQ ID NO: 1061821 - DNA, 25 bp, Homo sapien
tgagaatgctggcaccaatcaggag

SEQ ID NO: 1061822 - DNA, 25 bp, Homo sapien
gccaccgtgcccgtcgagaaaatgc

SEQ ID NO: 1061823 - DNA, 25 bp, Homo sapien
agctaatatagagaggtaacgggag

SEQ ID NO: 1061824 - DNA, 25 bp, Homo sapien
ggagaaagttttccagagtagagaa

SEQ ID NO: 1061825 - DNA, 25 bp, Homo sapien
agaaaatgcctatctatctaacaga

SEQ ID NO: 1061826 - DNA, 25 bp, Homo sapien
gcagaagaaaatgcctttctttctt

SEQ ID NO: 1061827 - DNA, 25 bp, Homo sapien
cacccaggctggagtgtagtggcac

SEQ ID NO: 1061828 - DNA, 25 bp, Homo sapien
ccaggctggagtgtagtggcacaat

SEQ ID NO: 1061829 - DNA, 25 bp, Homo sapien
tgagacggagtttctttcactctgt

SEQ ID NO: 1061830 - DNA, 25 bp, Homo sapien
cacacatgttttcggaaggaccaga

SEQ ID NO: 1061831 - DNA, 25 bp, Homo sapien
aatgtgaagaagagtcctagtgggc

SEQ ID NO: 1061832 - DNA, 25 bp, Homo sapien
caccacgtctagatccaagtcttca

SEQ ID NO: 1061833 - DNA, 25 bp, Homo sapien
gttgatatgggacctccagaatggg

SEQ ID NO: 1061834 - DNA, 25 bp, Homo sapien
tgtggactcaataccatgggcttga

SEQ ID NO: 1061835 - DNA, 25 bp, Homo sapien
tactggtattagcacacacacatca

SEQ ID NO: 1061836 - DNA, 25 bp, Homo sapien
tgggtttggttccacttgtagagaa

SEQ ID NO: 1061837 - DNA, 25 bp, Homo sapien
taagatgcttatattcctgtgggca

SEQ ID NO: 1061838 - DNA, 25 bp, Homo sapien
gaaataccttagctgacttagttca

SEQ ID NO: 1061839 - DNA, 25 bp, Homo sapien
tgtcatcaggcaatagttgattccc

SEQ ID NO: 1061840 - DNA, 25 bp, Homo sapien
gggtaatgatagtttgatccacaaa

SEQ ID NO: 1061841 - DNA, 25 bp, Homo sapien
tggacacagatgattgtatctgccc

SEQ ID NO: 1061842 - DNA, 25 bp, Homo sapien
tctcccaggatcatatagaccattc

SEQ ID NO: 1061843 - DNA, 25 bp, Homo sapien
cgccccataaacttcaagagtcact

SEQ ID NO: 1061844 - DNA, 25 bp, Homo sapien
ccatttcccattaaggtctcctact

SEQ ID NO: 1061845 - DNA, 25 bp, Homo sapien
caaatacaacgaagatctcccagga

SEQ ID NO: 1061846 - DNA, 25 bp, Homo sapien
ggtacacaatcgtttggaagctagg

SEQ ID NO: 1061847 - DNA, 25 bp, Homo sapien
gataaaggagggtccgagacatcgc

SEQ ID NO: 1061848 - DNA, 25 bp, Homo sapien
gctctaggaggtgcggacacttccg

SEQ ID NO: 1061849 - DNA, 25 bp, Homo sapien
caagcccaaggtcacgggtacacaa

SEQ ID NO: 1061850 - DNA, 25 bp, Homo sapien
tcttttggctccacaggtggccttg

SEQ ID NO: 1061851 - DNA, 25 bp, Homo sapien
gacatgtcaactggaagagcattca

SEQ ID NO: 1061852 - DNA, 25 bp, Homo sapien
tggtcactacagcagacagtcccaa

SEQ ID NO: 1061853 - DNA, 25 bp, Homo sapien
gcagaatcaggaggccattgaagta

SEQ ID NO: 1061854 - DNA, 25 bp, Homo sapien
gcagtttatgattcccagctaagga

SEQ ID NO: 1061855 - DNA, 25 bp, Homo sapien
caagatcaaaggagcctggctccct

SEQ ID NO: 1061856 - DNA, 25 bp, Homo sapien
tctgttttattcaagcccctagtat

SEQ ID NO: 1061857 - DNA, 25 bp, Homo sapien
caagtcaatctgaagccgaaaaagg

SEQ ID NO: 1061858 - DNA, 25 bp, Homo sapien
ggcctgcatcctgtacctttttctt

SEQ ID NO: 1061859 - DNA, 25 bp, Homo sapien
ggtacacagacatgattcctggagt

SEQ ID NO: 1061860 - DNA, 25 bp, Homo sapien
ttccaccctccttatagctgtggta

SEQ ID NO: 1061861 - DNA, 25 bp, Homo sapien
tttaaaatatagcaggcctgcatcc

SEQ ID NO: 1061862 - DNA, 25 bp, Homo sapien
tacagagagggctgcgacactgatg

SEQ ID NO: 1061863 - DNA, 25 bp, Homo sapien
tcaatagtacggattcagctagcgc

SEQ ID NO: 1061864 - DNA, 25 bp, Homo sapien
cagctagcgcatacttgctgagcac

SEQ ID NO: 1061865 - DNA, 25 bp, Homo sapien
gcacttactagctaccaggtacaga

SEQ ID NO: 1061866 - DNA, 25 bp, Homo sapien
caacaatggagatggttaagggtca

SEQ ID NO: 1061867 - DNA, 25 bp, Homo sapien
gggaatcctcagagctaaagtctgg

SEQ ID NO: 1061868 - DNA, 25 bp, Homo sapien
tacacccactgtgtactaggcatag

SEQ ID NO: 1061869 - DNA, 25 bp, Homo sapien
catatgactgaggaattgggaatcc

SEQ ID NO: 1061870 - DNA, 25 bp, Homo sapien
ttcatcatgaaaccccttggcacag

SEQ ID NO: 1061871 - DNA, 25 bp, Homo sapien
tgatgatggtacacaatagccttga

SEQ ID NO: 1061872 - DNA, 25 bp, Homo sapien
ggatattcctacaactgataacagc

SEQ ID NO: 1061873 - DNA, 25 bp, Homo sapien
catttaatcccgtgaactgagttct

SEQ ID NO: 1061874 - DNA, 25 bp, Homo sapien
gacagactgcaactcccttgtagtg

SEQ ID NO: 1061875 - DNA, 25 bp, Homo sapien
caaaaaatgagtcctgaatggtggg

SEQ ID NO: 1061876 - DNA, 25 bp, Homo sapien
tcctcagcaagttgagtgacagact

SEQ ID NO: 1061877 - DNA, 25 bp, Homo sapien
tcaaaacaattgtgctaaagagcca

SEQ ID NO: 1061878 - DNA, 25 bp, Homo sapien
acactgcagccatggaaattatcat

SEQ ID NO: 1061879 - DNA, 25 bp, Homo sapien
ttcctgccaagacaagacgggccct

SEQ ID NO: 1061880 - DNA, 25 bp, Homo sapien
catccttctcagcataacactgcag

SEQ ID NO: 1061881 - DNA, 25 bp, Homo sapien
gacgtgaatcctctttgctccaaca

SEQ ID NO: 1061882 - DNA, 25 bp, Homo sapien
cactaattatggcagtgaggaaatc

SEQ ID NO: 1061883 - DNA, 25 bp, Homo sapien
ggaaatcacgttagtctccaattat

SEQ ID NO: 1061884 - DNA, 25 bp, Homo sapien
ctctgccactaattatggcagtgag

SEQ ID NO: 1061885 - DNA, 25 bp, Homo sapien
aggaaatcacgttagtctccaatta

SEQ ID NO: 1061886 - DNA, 25 bp, Homo sapien
agcccgagccggagcggagcggcgc

SEQ ID NO: 1061887 - DNA, 25 bp, Homo sapien
gcgcggcgcggagcgggactggcgc

SEQ ID NO: 1061888 - DNA, 25 bp, Homo sapien
gagcccagcccgaggcgagccggag

SEQ ID NO: 1061889 - DNA, 25 bp, Homo sapien
cccgagcccagcccgaggcgagccg

SEQ ID NO: 1061890 - DNA, 25 bp, Homo sapien
ctgccggagtctcggtctccggcgc

SEQ ID NO: 1061891 - DNA, 25 bp, Homo sapien
tctccggcgcgcagagctggaaggt

SEQ ID NO: 1061892 - DNA, 25 bp, Homo sapien
ggtgagtgccagcacgagcgcctgg

SEQ ID NO: 1061893 - DNA, 25 bp, Homo sapien
agtgccagcacgagcgcctgggcac

SEQ ID NO: 1061894 - DNA, 25 bp, Homo sapien
ttggcattcactcggacccacgcgg

SEQ ID NO: 1061895 - DNA, 25 bp, Homo sapien
acgcattcccggcacacttggcatt

SEQ ID NO: 1061896 - DNA, 25 bp, Homo sapien
agcgcacggacacacacgttccgga

SEQ ID NO: 1061897 - DNA, 25 bp, Homo sapien
actcgcaacattcctggacgcgcag

SEQ ID NO: 1061898 - DNA, 25 bp, Homo sapien
agttgcaggctccaccaagggagtg

SEQ ID NO: 1061899 - DNA, 25 bp, Homo sapien
gccgggaggccgcacaaagttgcag

SEQ ID NO: 1061900 - DNA, 25 bp, Homo sapien
aggccgcacaaagttgcaggctcca

SEQ ID NO: 1061901 - DNA, 25 bp, Homo sapien
gctccaccaagggagtgtcccggga

SEQ ID NO: 1061902 - DNA, 25 bp, Homo sapien
agctgtgccctatggccccggagct

SEQ ID NO: 1061903 - DNA, 25 bp, Homo sapien
ggcgaggcccaagcgctggccagtg

SEQ ID NO: 1061904 - DNA, 25 bp, Homo sapien
gagttccggcccgagacaccggagc

SEQ ID NO: 1061905 - DNA, 25 bp, Homo sapien
gaacgctggagccacaggagttccg

SEQ ID NO: 1061906 - DNA, 25 bp, Homo sapien
gccactccctcattcctgccgtcca

SEQ ID NO: 1061907 - DNA, 25 bp, Homo sapien
actccctcattcctgccgtccacaa

SEQ ID NO: 1061908 - DNA, 25 bp, Homo sapien
ctgaaaccactgggcagccactccc

SEQ ID NO: 1061909 - DNA, 25 bp, Homo sapien
tgaaaccactgggcagccactccct

SEQ ID NO: 1061910 - DNA, 25 bp, Homo sapien
gatgctgggatagcctctgtctgca

SEQ ID NO: 1061911 - DNA, 25 bp, Homo sapien
tgctgggatagcctctgtctgcaca

SEQ ID NO: 1061912 - DNA, 25 bp, Homo sapien
tgtctgcacaccctgatcctcccac

SEQ ID NO: 1061913 - DNA, 25 bp, Homo sapien
ctgggatagcctctgtctgcacacc

SEQ ID NO: 1061914 - DNA, 25 bp, Homo sapien
aacacgtccacaccccttgtggaca

SEQ ID NO: 1061915 - DNA, 25 bp, Homo sapien
aggacattcccacccaacacgtcca

SEQ ID NO: 1061916 - DNA, 25 bp, Homo sapien
agtctgaagagcgatcaggaggcaa

SEQ ID NO: 1061917 - DNA, 25 bp, Homo sapien
cgatcaggaggcaagtcccagggaa

SEQ ID NO: 1061918 - DNA, 25 bp, Homo sapien
gctgggtcacttgcctcctcgaagg

SEQ ID NO: 1061919 - DNA, 25 bp, Homo sapien
ggcactgctgggtcacttgcctcct

SEQ ID NO: 1061920 - DNA, 25 bp, Homo sapien
ggaagtcatcgtactgggcctggct

SEQ ID NO: 1061921 - DNA, 25 bp, Homo sapien
cccactggaagtcatcgtactgggc

SEQ ID NO: 1061922 - DNA, 25 bp, Homo sapien
cgtggggcaggtccgcaggtgcccg

SEQ ID NO: 1061923 - DNA, 25 bp, Homo sapien
gtggggcaggtccgcaggtgcccgg

SEQ ID NO: 1061924 - DNA, 25 bp, Homo sapien
tggggcaggtccgcaggtgcccggg

SEQ ID NO: 1061925 - DNA, 25 bp, Homo sapien
ggcaaactgtgatacccactaacac

SEQ ID NO: 1061926 - DNA, 25 bp, Homo sapien
aggcaaactgtgatacccactaaca

SEQ ID NO: 1061927 - DNA, 25 bp, Homo sapien
gaagtgttgaccatcaagtaggagc

SEQ ID NO: 1061928 - DNA, 25 bp, Homo sapien
gacggccgtgggatccagtcatatt

SEQ ID NO: 1061929 - DNA, 25 bp, Homo sapien
tacaggaagtagctgaactgcacac

SEQ ID NO: 1061930 - DNA, 25 bp, Homo sapien
tatcattctcgctcaggctctggaa

SEQ ID NO: 1061931 - DNA, 25 bp, Homo sapien
gctgaccgctgactgaacccagccc

SEQ ID NO: 1061932 - DNA, 25 bp, Homo sapien
cacaggctgaccgctgactgaaccc

SEQ ID NO: 1061933 - DNA, 25 bp, Homo sapien
tgaccgctgactgaacccagcccac

SEQ ID NO: 1061934 - DNA, 25 bp, Homo sapien
aggctgaccgctgactgaacccagc

SEQ ID NO: 1061935 - DNA, 25 bp, Homo sapien
taggcccatgtagcccctgcggtct

SEQ ID NO: 1061936 - DNA, 25 bp, Homo sapien
ggatgtcatctaggcccatgtagcc

SEQ ID NO: 1061937 - DNA, 25 bp, Homo sapien
caggatgtcatctaggcccatgtag

SEQ ID NO: 1061938 - DNA, 25 bp, Homo sapien
gtcatctaggcccatgtagcccctg

SEQ ID NO: 1061939 - DNA, 25 bp, Homo sapien
caagaggaagcgttcggcctcggcc

SEQ ID NO: 1061940 - DNA, 25 bp, Homo sapien
tgcactggaacgacgcgttctggcc

SEQ ID NO: 1061941 - DNA, 25 bp, Homo sapien
aacgacgcgttctggcccgcgttga

SEQ ID NO: 1061942 - DNA, 25 bp, Homo sapien
tgcccgcggccatgcactggaacga

SEQ ID NO: 1061943 - DNA, 25 bp, Homo sapien
ccttgacgatgagctccgcgaagtt

SEQ ID NO: 1061944 - DNA, 25 bp, Homo sapien
aagcgccggtggctgatgtgccgca

SEQ ID NO: 1061945 - DNA, 25 bp, Homo sapien
ctgggacacacagcggtacaggtcc

SEQ ID NO: 1061946 - DNA, 25 bp, Homo sapien
gtacaggtcctgctcggcgcggctc

SEQ ID NO: 1061947 - DNA, 25 bp, Homo sapien
gtctgcaggctgacggcgtgcacct

SEQ ID NO: 1061948 - DNA, 25 bp, Homo sapien
acgatcggcccgtcgccaatgatgg

SEQ ID NO: 1061949 - DNA, 25 bp, Homo sapien
gcgccatgcggtactcaatctcctt

SEQ ID NO: 1061950 - DNA, 25 bp, Homo sapien
tcgaggtgccacagcttgtaggtct

SEQ ID NO: 1061951 - DNA, 25 bp, Homo sapien
ggtggcagcagcagctgctgctgct

SEQ ID NO: 1061952 - DNA, 25 bp, Homo sapien
tggtggcagcagcagctgctgctgc

SEQ ID NO: 1061953 - DNA, 25 bp, Homo sapien
tgggagtgcaccagtaacacagttt

SEQ ID NO: 1061954 - DNA, 25 bp, Homo sapien
ttcagcactcactaggaacaaagcc

SEQ ID NO: 1061955 - DNA, 25 bp, Homo sapien
aggctgctcctatcttgggagtgca

SEQ ID NO: 1061956 - DNA, 25 bp, Homo sapien
catggagccatcgaagagagatttc

SEQ ID NO: 1061957 - DNA, 25 bp, Homo sapien
tgatagcacagcgacacagtatagg

SEQ ID NO: 1061958 - DNA, 25 bp, Homo sapien
cacgtgaacgttccgatagggcagc

SEQ ID NO: 1061959 - DNA, 25 bp, Homo sapien
aacgcgtcacgttgtagcccagtgg

SEQ ID NO: 1061960 - DNA, 25 bp, Homo sapien
acagtataggtgtggcaacgcgtca

SEQ ID NO: 1061961 - DNA, 25 bp, Homo sapien
ctgggtgatgagaccattgggctcc

SEQ ID NO: 1061962 - DNA, 25 bp, Homo sapien
tactgggtgatgagaccattgggct

SEQ ID NO: 1061963 - DNA, 25 bp, Homo sapien
catactgggtgatgagaccattggg

SEQ ID NO: 1061964 - DNA, 25 bp, Homo sapien
ctcatactgggtgatgagaccattg

SEQ ID NO: 1061965 - DNA, 25 bp, Homo sapien
ccaccagggtcccccactgtaatag

SEQ ID NO: 1061966 - DNA, 25 bp, Homo sapien
caccagggtcccccactgtaatagg

SEQ ID NO: 1061967 - DNA, 25 bp, Homo sapien
tccaccagggtcccccactgtaata

SEQ ID NO: 1061968 - DNA, 25 bp, Homo sapien
tacgtcgtgggcctggcacgttcac

SEQ ID NO: 1061969 - DNA, 25 bp, Homo sapien
tctgatgactcgatgctctggtagc

SEQ ID NO: 1061970 - DNA, 25 bp, Homo sapien
catggtaggtctcattgcggagctt

SEQ ID NO: 1061971 - DNA, 25 bp, Homo sapien
ttatctcagtgagtgccgcctggcc

SEQ ID NO: 1061972 - DNA, 25 bp, Homo sapien
ccgaagaggctgggccgggtcaggt

SEQ ID NO: 1061973 - DNA, 25 bp, Homo sapien
ctgggccgggtcaggtggggctcac

SEQ ID NO: 1061974 - DNA, 25 bp, Homo sapien
gaagaggctgggccgggtcaggtgg

SEQ ID NO: 1061975 - DNA, 25 bp, Homo sapien
ctccgaagaggctgggccgggtcag

SEQ ID NO: 1061976 - DNA, 25 bp, Homo sapien
gtgacggcatgtcggcataatcaaa

SEQ ID NO: 1061977 - DNA, 25 bp, Homo sapien
gggtgacggcatgtcggcataatca

SEQ ID NO: 1061978 - DNA, 25 bp, Homo sapien
atggtgttctcagactcgcccaggg

SEQ ID NO: 1061979 - DNA, 25 bp, Homo sapien
cacggtgatggtgttctcagactcg

SEQ ID NO: 1061980 - DNA, 25 bp, Homo sapien
cctcggtaggtctggttgtcaccca

SEQ ID NO: 1061981 - DNA, 25 bp, Homo sapien
agttcggccccgaagtagtgcacca

SEQ ID NO: 1061982 - DNA, 25 bp, Homo sapien
caatggcactgggaagcagtcctgt

SEQ ID NO: 1061983 - DNA, 25 bp, Homo sapien
ttgtcacccacggtaaagggcatgg

SEQ ID NO: 1061984 - DNA, 25 bp, Homo sapien
gcaatgcggatgcaattcagccggg

SEQ ID NO: 1061985 - DNA, 25 bp, Homo sapien
cctggcaatgcggatgcaattcagc

SEQ ID NO: 1061986 - DNA, 25 bp, Homo sapien
aatgcggatgcaattcagccgggtc

SEQ ID NO: 1061987 - DNA, 25 bp, Homo sapien
tggcaatgcggatgcaattcagccg

SEQ ID NO: 1061988 - DNA, 25 bp, Homo sapien
agatgcccaggataagccccatctc

SEQ ID NO: 1061989 - DNA, 25 bp, Homo sapien
acagatgcccaggataagccccatc

SEQ ID NO: 1061990 - DNA, 25 bp, Homo sapien
gacaatgatggcacccaggagaagg

SEQ ID NO: 1061991 - DNA, 25 bp, Homo sapien
atgacaatgatggcacccaggagaa

SEQ ID NO: 1061992 - DNA, 25 bp, Homo sapien
caccaaggccgggctgaggcaatgc

SEQ ID NO: 1061993 - DNA, 25 bp, Homo sapien
tggcagcgtgcaaagagagaacagc

SEQ ID NO: 1061994 - DNA, 25 bp, Homo sapien
gcacagttgtgtccgaggtccgtcc

SEQ ID NO: 1061995 - DNA, 25 bp, Homo sapien
ttgtgtccgaggtccgtccaccaag

SEQ ID NO: 1061996 - DNA, 25 bp, Homo sapien
gtaggagtaggcatagtggtctctc

SEQ ID NO: 1061997 - DNA, 25 bp, Homo sapien
gggtagtaggagtaggcatagtggt

SEQ ID NO: 1061998 - DNA, 25 bp, Homo sapien
ggtagtaggagtaggcatagtggtc

SEQ ID NO: 1061999 - DNA, 25 bp, Homo sapien
tagtaggagtaggcatagtggtctc

SEQ ID NO: 1062000 - DNA, 25 bp, Homo sapien
cggtccacggcgctcatcatgtgtg

SEQ ID NO: 1062001 - DNA, 25 bp, Homo sapien
cacggcgctcatcatgtgtgtcttc

SEQ ID NO: 1062002 - DNA, 25 bp, Homo sapien
cttctcctggcggtagttgacggtg

SEQ ID NO: 1062003 - DNA, 25 bp, Homo sapien
gtgtcttctcctggcggtagttgac

SEQ ID NO: 1062004 - DNA, 25 bp, Homo sapien
cagatcctttaactgctcagaaagc

SEQ ID NO: 1062005 - DNA, 25 bp, Homo sapien
ttctgcaaaggatattcacagatcc

SEQ ID NO: 1062006 - DNA, 25 bp, Homo sapien
gacaaggattccagctacaaccagt

SEQ ID NO: 1062007 - DNA, 25 bp, Homo sapien
tattcaacacagtaccggaggtccc

SEQ ID NO: 1062008 - DNA, 25 bp, Homo sapien
cctcggccgtcttcatctggttgat

SEQ ID NO: 1062009 - DNA, 25 bp, Homo sapien
agccgtaaccctcggccgtcttcat

SEQ ID NO: 1062010 - DNA, 25 bp, Homo sapien
taaccctcggccgtcttcatctggt

SEQ ID NO: 1062011 - DNA, 25 bp, Homo sapien
tactcctgcttgaagccgtaaccct

SEQ ID NO: 1062012 - DNA, 25 bp, Homo sapien
tctttgtggcgtcccagccttcaaa

SEQ ID NO: 1062013 - DNA, 25 bp, Homo sapien
tggcgtcccagccttcaaagaagct

SEQ ID NO: 1062014 - DNA, 25 bp, Homo sapien
gctgcccttgaccttgtctttcttc

SEQ ID NO: 1062015 - DNA, 25 bp, Homo sapien
tgtctttcttctttgtggcgtccca

SEQ ID NO: 1062016 - DNA, 25 bp, Homo sapien
tagttggcattaatgtagtcggcat

SEQ ID NO: 1062017 - DNA, 25 bp, Homo sapien
gtgcagtttcactcggtgccgatca

SEQ ID NO: 1062018 - DNA, 25 bp, Homo sapien
tggcattaatgtagtcggcattggg

SEQ ID NO: 1062019 - DNA, 25 bp, Homo sapien
gggtctcccagcatcgggtgcagtt

SEQ ID NO: 1062020 - DNA, 25 bp, Homo sapien
cacaggagtggccagaatgggcgat

SEQ ID NO: 1062021 - DNA, 25 bp, Homo sapien
agagacagatattaggccaggggca

SEQ ID NO: 1062022 - DNA, 25 bp, Homo sapien
tggaggtggacggagcacaggagtg

SEQ ID NO: 1062023 - DNA, 25 bp, Homo sapien
cagaatgggcgatgtgagcagggca

SEQ ID NO: 1062024 - DNA, 25 bp, Homo sapien
atgaagtggtttgacctgtggtaac

SEQ ID NO: 1062025 - DNA, 25 bp, Homo sapien
tgaagtggtttgacctgtggtaacc

SEQ ID NO: 1062026 - DNA, 25 bp, Homo sapien
tgatcatgacgatgctggaacagtg

SEQ ID NO: 1062027 - DNA, 25 bp, Homo sapien
tcatagaccatctcaggcttcggcc

SEQ ID NO: 1062028 - DNA, 25 bp, Homo sapien
gtcatagaccatctcaggcttcggc

SEQ ID NO: 1062029 - DNA, 25 bp, Homo sapien
ctcgaccagcttggtgatcatgacg

SEQ ID NO: 1062030 - DNA, 25 bp, Homo sapien
aaagtgcgcacgacatactcagcca

SEQ ID NO: 1062031 - DNA, 25 bp, Homo sapien
ccggccagtaccgtgagcatttcac

SEQ ID NO: 1062032 - DNA, 25 bp, Homo sapien
cgctccagggcaaaagtgcgcacga

SEQ ID NO: 1062033 - DNA, 25 bp, Homo sapien
agcataatcttgatgtccccgtagg

SEQ ID NO: 1062034 - DNA, 25 bp, Homo sapien
gggaacaggcggtggggagactcac

SEQ ID NO: 1062035 - DNA, 25 bp, Homo sapien
agggaacaggcggtggggagactca

SEQ ID NO: 1062036 - DNA, 25 bp, Homo sapien
cagggaacaggcggtggggagactc

SEQ ID NO: 1062037 - DNA, 25 bp, Homo sapien
agtggatgacaatgggcccggcatc

SEQ ID NO: 1062038 - DNA, 25 bp, Homo sapien
cctcgtgccgggcagagtagcctct

SEQ ID NO: 1062039 - DNA, 25 bp, Homo sapien
tctggccacgctgtgaagtggaact

SEQ ID NO: 1062040 - DNA, 25 bp, Homo sapien
ttcacgcgccggatgaaagccagca

SEQ ID NO: 1062041 - DNA, 25 bp, Homo sapien
ctggagagagagcagccccagacca

SEQ ID NO: 1062042 - DNA, 25 bp, Homo sapien
tggagagagagcagccccagaccag

SEQ ID NO: 1062043 - DNA, 25 bp, Homo sapien
gagagagagcagccccagaccaggt

SEQ ID NO: 1062044 - DNA, 25 bp, Homo sapien
agagagcagccccagaccaggtcag

SEQ ID NO: 1062045 - DNA, 25 bp, Homo sapien
ggatcatgttgacacgccgggagca

SEQ ID NO: 1062046 - DNA, 25 bp, Homo sapien
gttgtaaatgtccacgacgccctca

SEQ ID NO: 1062047 - DNA, 25 bp, Homo sapien
gatatagcaacctgtgcggccggtg

SEQ ID NO: 1062048 - DNA, 25 bp, Homo sapien
ggagcagagagtcttcacacagttg

SEQ ID NO: 1062049 - DNA, 25 bp, Homo sapien
gcctccaggattgcatcatgaatga

SEQ ID NO: 1062050 - DNA, 25 bp, Homo sapien
tcactgacagggatggtggtctccc

SEQ ID NO: 1062051 - DNA, 25 bp, Homo sapien
aatgcggatcatctccttgtaggtg

SEQ ID NO: 1062052 - DNA, 25 bp, Homo sapien
ctctgaggatcaatgcggatcatct

SEQ ID NO: 1062053 - DNA, 25 bp, Homo sapien
tgtagttgttggagtccccatcagt

SEQ ID NO: 1062054 - DNA, 25 bp, Homo sapien
ttcttgtcgcggttccggggcaaca

SEQ ID NO: 1062055 - DNA, 25 bp, Homo sapien
gcggtcgggcggcaggacgtccatg

SEQ ID NO: 1062056 - DNA, 25 bp, Homo sapien
cagggctgcattaatgtagttgttg

SEQ ID NO: 1062057 - DNA, 25 bp, Homo sapien
caaatgtctatatggctgtctccct

SEQ ID NO: 1062058 - DNA, 25 bp, Homo sapien
ccatttctgatgttggttggcacac

SEQ ID NO: 1062059 - DNA, 25 bp, Homo sapien
cgcgcttcggcatctgctattttgg

SEQ ID NO: 1062060 - DNA, 25 bp, Homo sapien
agttggacggttgtgccccacagga

SEQ ID NO: 1062061 - DNA, 25 bp, Homo sapien
tgagcatgacgatggaggtgcaccc

SEQ ID NO: 1062062 - DNA, 25 bp, Homo sapien
gtaatcgtagaccagccgccagaag

SEQ ID NO: 1062063 - DNA, 25 bp, Homo sapien
caggcggagttggactggttcagct

SEQ ID NO: 1062064 - DNA, 25 bp, Homo sapien
aagtcgggcgtggtgctctgcagcg

SEQ ID NO: 1062065 - DNA, 25 bp, Homo sapien
aggtcgaggctgcacaacttagtga

SEQ ID NO: 1062066 - DNA, 25 bp, Homo sapien
tgatctcccatctgacacccttgtt

SEQ ID NO: 1062067 - DNA, 25 bp, Homo sapien
cacacaataaatagatggcagagct

SEQ ID NO: 1062068 - DNA, 25 bp, Homo sapien
tggccctgaatacacagaggacctg

SEQ ID NO: 1062069 - DNA, 25 bp, Homo sapien
gaaggcactgaacctctttgggtct

SEQ ID NO: 1062070 - DNA, 25 bp, Homo sapien
gattctaaataagaccatgagtgca

SEQ ID NO: 1062071 - DNA, 25 bp, Homo sapien
caaagcagtccctggcttagcaggg

SEQ ID NO: 1062072 - DNA, 25 bp, Homo sapien
gccttccctccaaggtcattataga

SEQ ID NO: 1062073 - DNA, 25 bp, Homo sapien
tgtggctcccacgaaccctggccca

SEQ ID NO: 1062074 - DNA, 25 bp, Homo sapien
ctgtggctcccacgaaccctggccc

SEQ ID NO: 1062075 - DNA, 25 bp, Homo sapien
gggagagctgagtagagcctggccg

SEQ ID NO: 1062076 - DNA, 25 bp, Homo sapien
ctgggcataagcacggagaggggag

SEQ ID NO: 1062077 - DNA, 25 bp, Homo sapien
tcagctgtgcccgacataaactcca

SEQ ID NO: 1062078 - DNA, 25 bp, Homo sapien
gctctggccagtactgcaggcaggg

SEQ ID NO: 1062079 - DNA, 25 bp, Homo sapien
ccggaagactcgagccactaagtct

SEQ ID NO: 1062080 - DNA, 25 bp, Homo sapien
tccatgaggccatattgctgccggc

SEQ ID NO: 1062081 - DNA, 25 bp, Homo sapien
ccttcttggagtcaggtgtgtcccg

SEQ ID NO: 1062082 - DNA, 25 bp, Homo sapien
gaccagcgcaggaactggaagtgcc

SEQ ID NO: 1062083 - DNA, 25 bp, Homo sapien
ggcagtgcacgatggtgcgcccatc

SEQ ID NO: 1062084 - DNA, 25 bp, Homo sapien
aggaactggaagtgccgcaccagca

SEQ ID NO: 1062085 - DNA, 25 bp, Homo sapien
gaatgagagatgcaaaagctgaggg

SEQ ID NO: 1062086 - DNA, 25 bp, Homo sapien
aatgagagatgcaaaagctgagggg

SEQ ID NO: 1062087 - DNA, 25 bp, Homo sapien
tgaatgagagatgcaaaagctgagg

SEQ ID NO: 1062088 - DNA, 25 bp, Homo sapien
caccatgttgggtttgtagttccgg

SEQ ID NO: 1062089 - DNA, 25 bp, Homo sapien
gcagcaaagaaaacgtccaccaagt

SEQ ID NO: 1062090 - DNA, 25 bp, Homo sapien
ccaagttgtggcagcggatcatctc

SEQ ID NO: 1062091 - DNA, 25 bp, Homo sapien
atcatctccaggaccgtggcgcagg

SEQ ID NO: 1062092 - DNA, 25 bp, Homo sapien
cacatcgtagcaaaagtggtactga

SEQ ID NO: 1062093 - DNA, 25 bp, Homo sapien
gggccacatcgtagcaaaagtggta

SEQ ID NO: 1062094 - DNA, 25 bp, Homo sapien
catcgtagcaaaagtggtactgatc

SEQ ID NO: 1062095 - DNA, 25 bp, Homo sapien
ccagggccacatcgtagcaaaagtg

SEQ ID NO: 1062096 - DNA, 25 bp, Homo sapien
accttggcctgggatgctctctgca

SEQ ID NO: 1062097 - DNA, 25 bp, Homo sapien
actgatcttcctcgccagtccagga

SEQ ID NO: 1062098 - DNA, 25 bp, Homo sapien
taaatgccaagtcccagtacatcct

SEQ ID NO: 1062099 - DNA, 25 bp, Homo sapien
tgcttgccccatgggagtgtgtttg

SEQ ID NO: 1062100 - DNA, 25 bp, Homo sapien
tcattctgcaacagtgggtcaggca

SEQ ID NO: 1062101 - DNA, 25 bp, Homo sapien
gaactccagagggtatgaccagccc

SEQ ID NO: 1062102 - DNA, 25 bp, Homo sapien
cccctgcgaggtaggtcagtagtca

SEQ ID NO: 1062103 - DNA, 25 bp, Homo sapien
ggcacagcagtaataggcagatcct

SEQ ID NO: 1062104 - DNA, 25 bp, Homo sapien
ttacaaacatcagcttatgcctccc

SEQ ID NO: 1062105 - DNA, 25 bp, Homo sapien
gctttacaaacatcagcttatgcct

SEQ ID NO: 1062106 - DNA, 25 bp, Homo sapien
caaagcgctttacaaacatcagctt

SEQ ID NO: 1062107 - DNA, 25 bp, Homo sapien
agcgctttacaaacatcagcttatg

SEQ ID NO: 1062108 - DNA, 25 bp, Homo sapien
tccccacgtccaaagccctcatcct

SEQ ID NO: 1062109 - DNA, 25 bp, Homo sapien
cctcatcctctacctgctggccatt

SEQ ID NO: 1062110 - DNA, 25 bp, Homo sapien
catcctctacctgctggccattcat

SEQ ID NO: 1062111 - DNA, 25 bp, Homo sapien
aaagccctcatcctctacctgctgg

SEQ ID NO: 1062112 - DNA, 25 bp, Homo sapien
aactggcaagctctgcgccgatagc

SEQ ID NO: 1062113 - DNA, 25 bp, Homo sapien
gggaatccccggcagagattattca

SEQ ID NO: 1062114 - DNA, 25 bp, Homo sapien
ggagcgaggtgctgtgggaatcccc

SEQ ID NO: 1062115 - DNA, 25 bp, Homo sapien
cagggatgccataaggaaagctgac

SEQ ID NO: 1062116 - DNA, 25 bp, Homo sapien
cactgaattgatctccaaatctttc

SEQ ID NO: 1062117 - DNA, 25 bp, Homo sapien
actgaattgatctccaaatctttcc

SEQ ID NO: 1062118 - DNA, 25 bp, Homo sapien
ttcactgaattgatctccaaatctt

SEQ ID NO: 1062119 - DNA, 25 bp, Homo sapien
ctgaattgatctccaaatctttccc

SEQ ID NO: 1062120 - DNA, 25 bp, Homo sapien
ggagctcttcctcagggagctggtc

SEQ ID NO: 1062121 - DNA, 25 bp, Homo sapien
cttccaccccggtggctgagaccat

SEQ ID NO: 1062122 - DNA, 25 bp, Homo sapien
atctgtgcccaagtcagggagactg

SEQ ID NO: 1062123 - DNA, 25 bp, Homo sapien
gtgtccaccagttcaggggccacac

SEQ ID NO: 1062124 - DNA, 25 bp, Homo sapien
tatctcaatctgtgcccaagtcagg

SEQ ID NO: 1062125 - DNA, 25 bp, Homo sapien
tcaatctgtgcccaagtcagggaga

SEQ ID NO: 1062126 - DNA, 25 bp, Homo sapien
gagattcgagaaacaagatggtgcc

SEQ ID NO: 1062127 - DNA, 25 bp, Homo sapien
gggagattcgagaaacaagatggtg

SEQ ID NO: 1062128 - DNA, 25 bp, Homo sapien
ctgggggagattcgagaaacaagat

SEQ ID NO: 1062129 - DNA, 25 bp, Homo sapien
gattcgagaaacaagatggtgccca

SEQ ID NO: 1062130 - DNA, 25 bp, Homo sapien
ccactggctgcaaattcaccagtga

SEQ ID NO: 1062131 - DNA, 25 bp, Homo sapien
actggctgcaaattcaccagtgagt

SEQ ID NO: 1062132 - DNA, 25 bp, Homo sapien
gaattaatgatatgggcagtgattt

SEQ ID NO: 1062133 - DNA, 25 bp, Homo sapien
aattaatgatatgggcagtgatttc

SEQ ID NO: 1062134 - DNA, 25 bp, Homo sapien
tgaattaatgatatgggcagtgatt

SEQ ID NO: 1062135 - DNA, 25 bp, Homo sapien
attaatgatatgggcagtgatttct

SEQ ID NO: 1062136 - DNA, 25 bp, Homo sapien
aagcagttgaatctcttaatgacca

SEQ ID NO: 1062137 - DNA, 25 bp, Homo sapien
caggaagcagttgaatctcttaatg

SEQ ID NO: 1062138 - DNA, 25 bp, Homo sapien
ctgaaactgaggcaataatagctta

SEQ ID NO: 1062139 - DNA, 25 bp, Homo sapien
aatctcttaatgaccaataacaggc

SEQ ID NO: 1062140 - DNA, 25 bp, Homo sapien
gaatatgcattgttcccagcatcac

SEQ ID NO: 1062141 - DNA, 25 bp, Homo sapien
aaatcaacagaatatgcattgttcc

SEQ ID NO: 1062142 - DNA, 25 bp, Homo sapien
aacagaatatgcattgttcccagca

SEQ ID NO: 1062143 - DNA, 25 bp, Homo sapien
ccagcatcacactgcacctattcca

SEQ ID NO: 1062144 - DNA, 25 bp, Homo sapien
cctgtctggtactcaggccttgaca

SEQ ID NO: 1062145 - DNA, 25 bp, Homo sapien
gacagtgaaggtttgcgtcggattc

SEQ ID NO: 1062146 - DNA, 25 bp, Homo sapien
gggaccatttccaaccacaaatgtg

SEQ ID NO: 1062147 - DNA, 25 bp, Homo sapien
tgtggcagccaatgcttttctctga

SEQ ID NO: 1062148 - DNA, 25 bp, Homo sapien
ggctgggagccaccggctgccctct

SEQ ID NO: 1062149 - DNA, 25 bp, Homo sapien
gtagccaaacaagagcttatgaatc

SEQ ID NO: 1062150 - DNA, 25 bp, Homo sapien
gggtgaggagtccagttgtatccat

SEQ ID NO: 1062151 - DNA, 25 bp, Homo sapien
cctagtggttttgccaaggtctgag

SEQ ID NO: 1062152 - DNA, 25 bp, Homo sapien
cagcgccatagatcagagcctcttg

SEQ ID NO: 1062153 - DNA, 25 bp, Homo sapien
cctttcaaaggctccagtgtcctcg

SEQ ID NO: 1062154 - DNA, 25 bp, Homo sapien
cacagcgccatagatcagagcctct

SEQ ID NO: 1062155 - DNA, 25 bp, Homo sapien
tttcaaaggctccagtgtcctcggc

SEQ ID NO: 1062156 - DNA, 25 bp, Homo sapien
gccagctctttacggttctccagga

SEQ ID NO: 1062157 - DNA, 25 bp, Homo sapien
tcccaactgtccacccaacagagtg

SEQ ID NO: 1062158 - DNA, 25 bp, Homo sapien
acaggccagctctttacggttctcc

SEQ ID NO: 1062159 - DNA, 25 bp, Homo sapien
gctctttacggttctccaggaacca

SEQ ID NO: 1062160 - DNA, 25 bp, Homo sapien
cacacaaatatgtttcatggagaaa

SEQ ID NO: 1062161 - DNA, 25 bp, Homo sapien
gacacacaaatatgtttcatggaga

SEQ ID NO: 1062162 - DNA, 25 bp, Homo sapien
ctggggagacacacaaatatgtttc

SEQ ID NO: 1062163 - DNA, 25 bp, Homo sapien
ggagacacacaaatatgtttcatgg

SEQ ID NO: 1062164 - DNA, 25 bp, Homo sapien
tatgacaccatctgcagctgtgtct

SEQ ID NO: 1062165 - DNA, 25 bp, Homo sapien
ctatgacaccatctgcagctgtgtc

SEQ ID NO: 1062166 - DNA, 25 bp, Homo sapien
tcaggaatgccgcacagcttaaaga

SEQ ID NO: 1062167 - DNA, 25 bp, Homo sapien
gctcaggaatgccgcacagcttaaa

SEQ ID NO: 1062168 - DNA, 25 bp, Homo sapien
tcctgctcaggaatgccgcacagct

SEQ ID NO: 1062169 - DNA, 25 bp, Homo sapien
ggaatgccgcacagcttaaagacag

SEQ ID NO: 1062170 - DNA, 25 bp, Homo sapien
ctgatccgaaatgtggtgcagcagc

SEQ ID NO: 1062171 - DNA, 25 bp, Homo sapien
ctcttgttttgatggatctagatgt

SEQ ID NO: 1062172 - DNA, 25 bp, Homo sapien
tgatggatctagatgttctgatccg

SEQ ID NO: 1062173 - DNA, 25 bp, Homo sapien
gatctagatgttctgatccgaaatg

SEQ ID NO: 1062174 - DNA, 25 bp, Homo sapien
aagacaaacaccagcgcaggaggat

SEQ ID NO: 1062175 - DNA, 25 bp, Homo sapien
gctcattagtgcagcttacacatcc

SEQ ID NO: 1062176 - DNA, 25 bp, Homo sapien
tccatcaccttcagcgaaagacaaa

SEQ ID NO: 1062177 - DNA, 25 bp, Homo sapien
ggatccgggaactatcactcaaggg

SEQ ID NO: 1062178 - DNA, 25 bp, Homo sapien
gaggtgcgtggagatggatggcccc

SEQ ID NO: 1062179 - DNA, 25 bp, Homo sapien
gaagatgcgtggagatggacaactc

SEQ ID NO: 1062180 - DNA, 25 bp, Homo sapien
gacagctgggaggtgcatggagatg

SEQ ID NO: 1062181 - DNA, 25 bp, Homo sapien
gacaactctgtgactgtctcacggc

SEQ ID NO: 1062182 - DNA, 25 bp, Homo sapien
cagcacggctggtcctccagtgaga

SEQ ID NO: 1062183 - DNA, 25 bp, Homo sapien
ccggagaccagctcgttggtgacat

SEQ ID NO: 1062184 - DNA, 25 bp, Homo sapien
agcagcacggctggtcctccagtga

SEQ ID NO: 1062185 - DNA, 25 bp, Homo sapien
ccattgaagggctcttgaggacccc

SEQ ID NO: 1062186 - DNA, 25 bp, Homo sapien
ggagctacaccaacgacttcactgt

SEQ ID NO: 1062187 - DNA, 25 bp, Homo sapien
tctgtgccaacccagagtgagggct

SEQ ID NO: 1062188 - DNA, 25 bp, Homo sapien
gacaatcaccagagagcatggagga

SEQ ID NO: 1062189 - DNA, 25 bp, Homo sapien
gaggaagcgtgaatccaatccctgt

SEQ ID NO: 1062190 - DNA, 25 bp, Homo sapien
gcactgcgtgtgcaagatccagcca

SEQ ID NO: 1062191 - DNA, 25 bp, Homo sapien
cccatggcagaaagcgagaaggtga

SEQ ID NO: 1062192 - DNA, 25 bp, Homo sapien
gagagcaagagatcgaactcgcagc

SEQ ID NO: 1062193 - DNA, 25 bp, Homo sapien
taagttgcctgaaaacagtgggatc

SEQ ID NO: 1062194 - DNA, 25 bp, Homo sapien
ttctccctggaaacttattctgcaa

SEQ ID NO: 1062195 - DNA, 25 bp, Homo sapien
tttctccctggaaacttattctgca

SEQ ID NO: 1062196 - DNA, 25 bp, Homo sapien
gcaaaatgtgccttgtgccatccat

SEQ ID NO: 1062197 - DNA, 25 bp, Homo sapien
attctgcaaaatgtgccttgtgcca

SEQ ID NO: 1062198 - DNA, 25 bp, Homo sapien
cagcaactacacagaagaggagtgt

SEQ ID NO: 1062199 - DNA, 25 bp, Homo sapien
gcagcaactacacagaagaggagtg

SEQ ID NO: 1062200 - DNA, 25 bp, Homo sapien
agcaactacacagaagaggagtgtt

SEQ ID NO: 1062201 - DNA, 25 bp, Homo sapien
ggcagagggaccagtaggagggcat

SEQ ID NO: 1062202 - DNA, 25 bp, Homo sapien
ccagtaggagggcatgaggatgtct

SEQ ID NO: 1062203 - DNA, 25 bp, Homo sapien
ctcggggtgtgcagggtagatggat

SEQ ID NO: 1062204 - DNA, 25 bp, Homo sapien
taggagggcatgaggatgtctgggt

SEQ ID NO: 1062205 - DNA, 25 bp, Homo sapien
ctggcacagagaagaggccacgtgg

SEQ ID NO: 1062206 - DNA, 25 bp, Homo sapien
tggcacagagaagaggccacgtggg

SEQ ID NO: 1062207 - DNA, 25 bp, Homo sapien
gcacagagaagaggccacgtgggtc

SEQ ID NO: 1062208 - DNA, 25 bp, Homo sapien
ggcacagagaagaggccacgtgggt

SEQ ID NO: 1062209 - DNA, 25 bp, Homo sapien
acgtcgaagtcttcatgtgggcaca

SEQ ID NO: 1062210 - DNA, 25 bp, Homo sapien
acagctgcacgtcgaagtcttcatg

SEQ ID NO: 1062211 - DNA, 25 bp, Homo sapien
tcacacacagctgcacgtcgaagtc

SEQ ID NO: 1062212 - DNA, 25 bp, Homo sapien
tgcaagtctacgctctgtccatccc

SEQ ID NO: 1062213 - DNA, 25 bp, Homo sapien
acaaagtccttcgagtcagcatggg

SEQ ID NO: 1062214 - DNA, 25 bp, Homo sapien
cagcacaaagtccttcgagtcagca

SEQ ID NO: 1062215 - DNA, 25 bp, Homo sapien
gcacaaagtccttcgagtcagcatg

SEQ ID NO: 1062216 - DNA, 25 bp, Homo sapien
tcacagcacaaagtccttcgagtca

SEQ ID NO: 1062217 - DNA, 25 bp, Homo sapien
tcagctgggcgcctttaggtctaga

SEQ ID NO: 1062218 - DNA, 25 bp, Homo sapien
ctttaggtctagagacctcagctac

SEQ ID NO: 1062219 - DNA, 25 bp, Homo sapien
agcagccttcgtccaccatcaaggt

SEQ ID NO: 1062220 - DNA, 25 bp, Homo sapien
caaggtcctgctcgcagagacgagc

SEQ ID NO: 1062221 - DNA, 25 bp, Homo sapien
ctctcaagggtcatctcatgcttag

SEQ ID NO: 1062222 - DNA, 25 bp, Homo sapien
ctgaagcagtgaccctctcaagggt

SEQ ID NO: 1062223 - DNA, 25 bp, Homo sapien
gaacaatgtctatgggggagcctcc

SEQ ID NO: 1062224 - DNA, 25 bp, Homo sapien
gtcccatgccatgaagtcctgagtg

SEQ ID NO: 1062225 - DNA, 25 bp, Homo sapien
ggacccacatttacatcaacactca

SEQ ID NO: 1062226 - DNA, 25 bp, Homo sapien
aggacccacatttacatcaacactc

SEQ ID NO: 1062227 - DNA, 25 bp, Homo sapien
gacccacatttacatcaacactcat

SEQ ID NO: 1062228 - DNA, 25 bp, Homo sapien
caggacccacatttacatcaacact

SEQ ID NO: 1062229 - DNA, 25 bp, Homo sapien
cagggaataggagggaatcttgctc

SEQ ID NO: 1062230 - DNA, 25 bp, Homo sapien
cagcaataaagccaataggtccagt

SEQ ID NO: 1062231 - DNA, 25 bp, Homo sapien
gccgaatgccagacgacttaagtat

SEQ ID NO: 1062232 - DNA, 25 bp, Homo sapien
gcaatggtcacatatggctggctcc

SEQ ID NO: 1062233 - DNA, 25 bp, Homo sapien
tctcactaaaccgtgaactgctcca

SEQ ID NO: 1062234 - DNA, 25 bp, Homo sapien
tatttctcttcgtggggtgcttctc

SEQ ID NO: 1062235 - DNA, 25 bp, Homo sapien
tgtatcccgcttctggagcctggcg

SEQ ID NO: 1062236 - DNA, 25 bp, Homo sapien
aaccttgtctttgtatcccgcttct

SEQ ID NO: 1062237 - DNA, 25 bp, Homo sapien
tccttggcatgcagcgttttcagta

SEQ ID NO: 1062238 - DNA, 25 bp, Homo sapien
gagacctagcacagacatggaggaa

SEQ ID NO: 1062239 - DNA, 25 bp, Homo sapien
tggcatgcagcgttttcagtagttg

SEQ ID NO: 1062240 - DNA, 25 bp, Homo sapien
ttcagtagttgctggagacctagca

SEQ ID NO: 1062241 - DNA, 25 bp, Homo sapien
gagtacctgagccaaaggtgcctga

SEQ ID NO: 1062242 - DNA, 25 bp, Homo sapien
tgagtacctgagccaaaggtgcctg

SEQ ID NO: 1062243 - DNA, 25 bp, Homo sapien
ctgagtacctgagccaaaggtgcct

SEQ ID NO: 1062244 - DNA, 25 bp, Homo sapien
agtacctgagccaaaggtgcctgag

SEQ ID NO: 1062245 - DNA, 25 bp, Homo sapien
tcaccaagatgcttgcagtcttgca

SEQ ID NO: 1062246 - DNA, 25 bp, Homo sapien
atacaaagatcataataaccagact

SEQ ID NO: 1062247 - DNA, 25 bp, Homo sapien
cataataaccagacttcaccaagat

SEQ ID NO: 1062248 - DNA, 25 bp, Homo sapien
ttgcagtcttgcacaggacataaaa

SEQ ID NO: 1062249 - DNA, 25 bp, Homo sapien
actggctctgccaaggcaatcctgg

SEQ ID NO: 1062250 - DNA, 25 bp, Homo sapien
tccaggtccagtgtctcagtgacac

SEQ ID NO: 1062251 - DNA, 25 bp, Homo sapien
tcatgtgcagctcatggacaaagga

SEQ ID NO: 1062252 - DNA, 25 bp, Homo sapien
agtgacacccatcatgtgcagctca

SEQ ID NO: 1062253 - DNA, 25 bp, Homo sapien
gattctgaccgattccatctgtggg

SEQ ID NO: 1062254 - DNA, 25 bp, Homo sapien
ctgactgccagtccccgaccctggg

SEQ ID NO: 1062255 - DNA, 25 bp, Homo sapien
tctgtgggaatccatggcccagatc

SEQ ID NO: 1062256 - DNA, 25 bp, Homo sapien
agcccaggattctgaccgattccat

SEQ ID NO: 1062257 - DNA, 25 bp, Homo sapien
agtggggagcacataggacggcagg

SEQ ID NO: 1062258 - DNA, 25 bp, Homo sapien
gggagcacataggacggcaggtgtc

SEQ ID NO: 1062259 - DNA, 25 bp, Homo sapien
gagcacataggacggcaggtgtcat

SEQ ID NO: 1062260 - DNA, 25 bp, Homo sapien
tgcagagatgccacagtggggagca

SEQ ID NO: 1062261 - DNA, 25 bp, Homo sapien
ggtggatctagaacaggaaaaggac

SEQ ID NO: 1062262 - DNA, 25 bp, Homo sapien
tcaggtgtcattgagagccatcttc

SEQ ID NO: 1062263 - DNA, 25 bp, Homo sapien
gagagccatcttcagggctgcctca

SEQ ID NO: 1062264 - DNA, 25 bp, Homo sapien
gagccatcttcagggctgcctcaca

SEQ ID NO: 1062265 - DNA, 25 bp, Homo sapien
gccatcttcagggctgcctcacaca

SEQ ID NO: 1062266 - DNA, 25 bp, Homo sapien
ccttcgaggcccacaaggctgtgtc

SEQ ID NO: 1062267 - DNA, 25 bp, Homo sapien
gatgtgcaagctcatggaggcttcg

SEQ ID NO: 1062268 - DNA, 25 bp, Homo sapien
cagaaacctgaacagccttcgaggc

SEQ ID NO: 1062269 - DNA, 25 bp, Homo sapien
tctgcctacacctcgctcctggatg

SEQ ID NO: 1062270 - DNA, 25 bp, Homo sapien
acttgatgacatttgccaccctggg

SEQ ID NO: 1062271 - DNA, 25 bp, Homo sapien
acagacttgatgacatttgccaccc

SEQ ID NO: 1062272 - DNA, 25 bp, Homo sapien
agacttgatgacatttgccaccctg

SEQ ID NO: 1062273 - DNA, 25 bp, Homo sapien
taacagacttgatgacatttgccac

SEQ ID NO: 1062274 - DNA, 25 bp, Homo sapien
cttgggagccagtttgagacccgca

SEQ ID NO: 1062275 - DNA, 25 bp, Homo sapien
gagccagtttgagacccgcacagcc

SEQ ID NO: 1062276 - DNA, 25 bp, Homo sapien
ggaggagtcagccacggcacgcagg

SEQ ID NO: 1062277 - DNA, 25 bp, Homo sapien
agtcagccacggcacgcaggggctt

SEQ ID NO: 1062278 - DNA, 25 bp, Homo sapien
tccccacgaggtccgatgataagcc

SEQ ID NO: 1062279 - DNA, 25 bp, Homo sapien
gtccaggagcagttgttgctctcca

SEQ ID NO: 1062280 - DNA, 25 bp, Homo sapien
ccgatgataagcctgtctctctggg

SEQ ID NO: 1062281 - DNA, 25 bp, Homo sapien
tttcccggtggtgacgtccaggagc

SEQ ID NO: 1062282 - DNA, 25 bp, Homo sapien
gggccaatgccaacaaaagctcgag

SEQ ID NO: 1062283 - DNA, 25 bp, Homo sapien
atgtaaggcccaggaccaaatttgt

SEQ ID NO: 1062284 - DNA, 25 bp, Homo sapien
gtttagcgtgaaatcaggcatgttc

SEQ ID NO: 1062285 - DNA, 25 bp, Homo sapien
gagatgcaggtcttggacatgtaag

SEQ ID NO: 1062286 - DNA, 25 bp, Homo sapien
cgcagagatgcagtgactgccccag

SEQ ID NO: 1062287 - DNA, 25 bp, Homo sapien
gcgcagagatgcagtgactgcccca

SEQ ID NO: 1062288 - DNA, 25 bp, Homo sapien
tgtgcggccaaacttagcagattcc

SEQ ID NO: 1062289 - DNA, 25 bp, Homo sapien
gacttcatcccatgagcagcgagga

SEQ ID NO: 1062290 - DNA, 25 bp, Homo sapien
acaggcggagagagcacaacggtca

SEQ ID NO: 1062291 - DNA, 25 bp, Homo sapien
gcctggatttccatggcgaggagca

SEQ ID NO: 1062292 - DNA, 25 bp, Homo sapien
tgtccccgctttggggactggactc

SEQ ID NO: 1062293 - DNA, 25 bp, Homo sapien
tgctgatgtggaagaccatgtcata

SEQ ID NO: 1062294 - DNA, 25 bp, Homo sapien
tccttgacttggctatgaacttgct

SEQ ID NO: 1062295 - DNA, 25 bp, Homo sapien
tgtggaagaccatgtcataatcatc

SEQ ID NO: 1062296 - DNA, 25 bp, Homo sapien
tagaaggcacctcttccatgctcac

SEQ ID NO: 1062297 - DNA, 25 bp, Homo sapien
ctagaaggcacctcttccatgctca

SEQ ID NO: 1062298 - DNA, 25 bp, Homo sapien
tctggtaccagaaaatgtcttcctc

SEQ ID NO: 1062299 - DNA, 25 bp, Homo sapien
gggaacatccctggaggattcctgc

SEQ ID NO: 1062300 - DNA, 25 bp, Homo sapien
aatgtcttcctcacagagcaccagc

SEQ ID NO: 1062301 - DNA, 25 bp, Homo sapien
catgcataattcaatgtggggaaca

SEQ ID NO: 1062302 - DNA, 25 bp, Homo sapien
ccctcccattatagcagtggtcctg

SEQ ID NO: 1062303 - DNA, 25 bp, Homo sapien
tcatcatagcagtggtcccgcccat

SEQ ID NO: 1062304 - DNA, 25 bp, Homo sapien
cctctcatcatagcagtggtcccgc

SEQ ID NO: 1062305 - DNA, 25 bp, Homo sapien
agtggtcctgcccatcatagcagca

SEQ ID NO: 1062306 - DNA, 25 bp, Homo sapien
aaccaggtgggccagagcgctgggc

SEQ ID NO: 1062307 - DNA, 25 bp, Homo sapien
ctggtccggaatcccgatggtgtgt

SEQ ID NO: 1062308 - DNA, 25 bp, Homo sapien
ccggaatcccgatggtgtgtaggct

SEQ ID NO: 1062309 - DNA, 25 bp, Homo sapien
gtccggaatcccgatggtgtgtagg

SEQ ID NO: 1062310 - DNA, 25 bp, Homo sapien
tggtccggaatcccgatggtgtgta

SEQ ID NO: 1062311 - DNA, 25 bp, Homo sapien
tggaatgggctgatgagtccctacg

SEQ ID NO: 1062312 - DNA, 25 bp, Homo sapien
tacgacccacaggttaaatgcaaaa

SEQ ID NO: 1062313 - DNA, 25 bp, Homo sapien
tcaaacatgacaaccctgagcacat

SEQ ID NO: 1062314 - DNA, 25 bp, Homo sapien
gcaaaacctacaaccggcattccag

SEQ ID NO: 1062315 - DNA, 25 bp, Homo sapien
tttgcccgtggttccatctgtgcac

SEQ ID NO: 1062316 - DNA, 25 bp, Homo sapien
tggttccatctgtgcactggagctc

SEQ ID NO: 1062317 - DNA, 25 bp, Homo sapien
gcccgtggttccatctgtgcactgg

SEQ ID NO: 1062318 - DNA, 25 bp, Homo sapien
cgtggttccatctgtgcactggagc

SEQ ID NO: 1062319 - DNA, 25 bp, Homo sapien
ctagaggtattggtccacttcactc

SEQ ID NO: 1062320 - DNA, 25 bp, Homo sapien
agaggtattggtccacttcactcac

SEQ ID NO: 1062321 - DNA, 25 bp, Homo sapien
tagaggtattggtccacttcactca

SEQ ID NO: 1062322 - DNA, 25 bp, Homo sapien
tcagttgtcttgatgtgtagtagcc

SEQ ID NO: 1062323 - DNA, 25 bp, Homo sapien
agagccggtgtcagccctgtcagga

SEQ ID NO: 1062324 - DNA, 25 bp, Homo sapien
tacagctgctcacaagcacgctcat

SEQ ID NO: 1062325 - DNA, 25 bp, Homo sapien
tgatgtgtagtagccgagaagcaca

SEQ ID NO: 1062326 - DNA, 25 bp, Homo sapien
catggggagcaagtaggcagccaac

SEQ ID NO: 1062327 - DNA, 25 bp, Homo sapien
tggggagcaagtaggcagccaacca

SEQ ID NO: 1062328 - DNA, 25 bp, Homo sapien
gggagcaagtaggcagccaaccatc

SEQ ID NO: 1062329 - DNA, 25 bp, Homo sapien
agcaagtaggcagccaaccatcagc

SEQ ID NO: 1062330 - DNA, 25 bp, Homo sapien
ctgatcctcacaattagttacctcc

SEQ ID NO: 1062331 - DNA, 25 bp, Homo sapien
tcctcacaattagttacctcccatt

SEQ ID NO: 1062332 - DNA, 25 bp, Homo sapien
ctcacaattagttacctcccatttt

SEQ ID NO: 1062333 - DNA, 25 bp, Homo sapien
gatcctcacaattagttacctccca

SEQ ID NO: 1062334 - DNA, 25 bp, Homo sapien
ggttccgctacacattcaagccaga

SEQ ID NO: 1062335 - DNA, 25 bp, Homo sapien
tctcagctcgaagagagaatggagc

SEQ ID NO: 1062336 - DNA, 25 bp, Homo sapien
caagcttggccctcaatttacatca

SEQ ID NO: 1062337 - DNA, 25 bp, Homo sapien
agcagcctggcatatgttagtgtcc

SEQ ID NO: 1062338 - DNA, 25 bp, Homo sapien
gtcttctcgtcctgtgaaaggggct

SEQ ID NO: 1062339 - DNA, 25 bp, Homo sapien
tcttctcgtcctgtgaaaggggctg

SEQ ID NO: 1062340 - DNA, 25 bp, Homo sapien
cttctcgtcctgtgaaaggggctgc

SEQ ID NO: 1062341 - DNA, 25 bp, Homo sapien
ggtcttctcgtcctgtgaaaggggc

SEQ ID NO: 1062342 - DNA, 25 bp, Homo sapien
gagctgcttctgcatccaacatctt

SEQ ID NO: 1062343 - DNA, 25 bp, Homo sapien
atgagctgcttctgcatccaacatc

SEQ ID NO: 1062344 - DNA, 25 bp, Homo sapien
tgagctgcttctgcatccaacatct

SEQ ID NO: 1062345 - DNA, 25 bp, Homo sapien
ctggtgaaagatgagggagtttacc

SEQ ID NO: 1062346 - DNA, 25 bp, Homo sapien
tcttgtagggagagggagcatctac

SEQ ID NO: 1062347 - DNA, 25 bp, Homo sapien
tcactcaggactcttgtagggagag

SEQ ID NO: 1062348 - DNA, 25 bp, Homo sapien
agaaactcagatgaggaaagcccag

SEQ ID NO: 1062349 - DNA, 25 bp, Homo sapien
gggcagcaactacacaggagaagaa

SEQ ID NO: 1062350 - DNA, 25 bp, Homo sapien
cctgagaagtggctggtttagcaga

SEQ ID NO: 1062351 - DNA, 25 bp, Homo sapien
gtggctggtttagcagagccagttc

SEQ ID NO: 1062352 - DNA, 25 bp, Homo sapien
tggggctgctcctgttcatgagtcc

SEQ ID NO: 1062353 - DNA, 25 bp, Homo sapien
cctgttcatgagtcctgagaagtgg

SEQ ID NO: 1062354 - DNA, 25 bp, Homo sapien
acattccactgcctgagggctcctt

SEQ ID NO: 1062355 - DNA, 25 bp, Homo sapien
ctgagacattccactgcctgagggc

SEQ ID NO: 1062356 - DNA, 25 bp, Homo sapien
ctccttccatgaccccatagaggcc

SEQ ID NO: 1062357 - DNA, 25 bp, Homo sapien
tgagggctccttccatgaccccata

SEQ ID NO: 1062358 - DNA, 25 bp, Homo sapien
tttctatctgactctattcttaggc

SEQ ID NO: 1062359 - DNA, 25 bp, Homo sapien
ttaggcctccatgccctaactcggg

SEQ ID NO: 1062360 - DNA, 25 bp, Homo sapien
tggagcccaggcccgttttctatct

SEQ ID NO: 1062361 - DNA, 25 bp, Homo sapien
gactctattcttaggcctccatgcc

SEQ ID NO: 1062362 - DNA, 25 bp, Homo sapien
tccaggccgccctcacgagagaggg

SEQ ID NO: 1062363 - DNA, 25 bp, Homo sapien
ttgacaatttgggaaaatgcagcca

SEQ ID NO: 1062364 - DNA, 25 bp, Homo sapien
tctttgacaatttgggaaaatgcag

SEQ ID NO: 1062365 - DNA, 25 bp, Homo sapien
gccctcacgagagagggactcatct

SEQ ID NO: 1062366 - DNA, 25 bp, Homo sapien
gtgaatgacaagagcgcagacgtgt

SEQ ID NO: 1062367 - DNA, 25 bp, Homo sapien
atgacaagagcgcagacgtgtcagg

SEQ ID NO: 1062368 - DNA, 25 bp, Homo sapien
tctccatgagcaattgaggcggcat

SEQ ID NO: 1062369 - DNA, 25 bp, Homo sapien
tgtctccatgagcaattgaggcggc

SEQ ID NO: 1062370 - DNA, 25 bp, Homo sapien
cagtcagccagggagggcctatttt

SEQ ID NO: 1062371 - DNA, 25 bp, Homo sapien
ggggtgtcctgggatcccagtcagc

SEQ ID NO: 1062372 - DNA, 25 bp, Homo sapien
gtgtcctgggatcccagtcagccag

SEQ ID NO: 1062373 - DNA, 25 bp, Homo sapien
tagggggtgtcctgggatcccagtc

SEQ ID NO: 1062374 - DNA, 25 bp, Homo sapien
tgtgcagtctgcaatgaggacaact

SEQ ID NO: 1062375 - DNA, 25 bp, Homo sapien
tccccttgtgcagtctgcaatgagg

SEQ ID NO: 1062376 - DNA, 25 bp, Homo sapien
tcaaatccccttgtgcagtctgcaa

SEQ ID NO: 1062377 - DNA, 25 bp, Homo sapien
ggttttcaaatccccttgtgcagtc

SEQ ID NO: 1062378 - DNA, 25 bp, Homo sapien
tccaagggtggagcataggcacttt

SEQ ID NO: 1062379 - DNA, 25 bp, Homo sapien
gaaaggatgcattaggaagagaaag

SEQ ID NO: 1062380 - DNA, 25 bp, Homo sapien
gaagcctgcgttgctgggaccaaaa

SEQ ID NO: 1062381 - DNA, 25 bp, Homo sapien
aattgcaggaatgtgaaaggatgca

SEQ ID NO: 1062382 - DNA, 25 bp, Homo sapien
ggctcctgccaatgtcactatgatg

SEQ ID NO: 1062383 - DNA, 25 bp, Homo sapien
cagttcagcggcctgcccggtgatt

SEQ ID NO: 1062384 - DNA, 25 bp, Homo sapien
aggccacgtccaagggatcccagtt

SEQ ID NO: 1062385 - DNA, 25 bp, Homo sapien
catggtgtagttgttggctcctgcc

SEQ ID NO: 1062386 - DNA, 25 bp, Homo sapien
ccgtggagccctgggagcgaccctt

SEQ ID NO: 1062387 - DNA, 25 bp, Homo sapien
ctccgtggagccctgggagcgaccc

SEQ ID NO: 1062388 - DNA, 25 bp, Homo sapien
tccgtggagccctgggagcgaccct

SEQ ID NO: 1062389 - DNA, 25 bp, Homo sapien
aggcagaaagggcccccgatgcaga

SEQ ID NO: 1062390 - DNA, 25 bp, Homo sapien
cagaaagggcccccgatgcagagct

SEQ ID NO: 1062391 - DNA, 25 bp, Homo sapien
tcaggcagaaagggcccccgatgca

SEQ ID NO: 1062392 - DNA, 25 bp, Homo sapien
gtcaggcagaaagggcccccgatgc

SEQ ID NO: 1062393 - DNA, 25 bp, Homo sapien
cggaagcaggtagagaccctcacag

SEQ ID NO: 1062394 - DNA, 25 bp, Homo sapien
aagcaggtagagaccctcacaggct

SEQ ID NO: 1062395 - DNA, 25 bp, Homo sapien
ggaagcaggtagagaccctcacagg

SEQ ID NO: 1062396 - DNA, 25 bp, Homo sapien
gcaggtagagaccctcacaggctct

SEQ ID NO: 1062397 - DNA, 25 bp, Homo sapien
aaacgccagcttggatttctgccaa

SEQ ID NO: 1062398 - DNA, 25 bp, Homo sapien
cctttttgtcaaaacgccagcttgg

SEQ ID NO: 1062399 - DNA, 25 bp, Homo sapien
tgccaagcatgacacaatctgggag

SEQ ID NO: 1062400 - DNA, 25 bp, Homo sapien
gatttctgccaagcatgacacaatc

SEQ ID NO: 1062401 - DNA, 25 bp, Homo sapien
ggagagatgatgtcacagagtgacc

SEQ ID NO: 1062402 - DNA, 25 bp, Homo sapien
cccagggtaagggcctttctgattg

SEQ ID NO: 1062403 - DNA, 25 bp, Homo sapien
actggccgtgactgggtcgaaccca

SEQ ID NO: 1062404 - DNA, 25 bp, Homo sapien
tcactggccgtgactgggtcgaacc

SEQ ID NO: 1062405 - DNA, 25 bp, Homo sapien
cagtcttctggtgactggccaggcc

SEQ ID NO: 1062406 - DNA, 25 bp, Homo sapien
tctgcccccagtcttctggtgactg

SEQ ID NO: 1062407 - DNA, 25 bp, Homo sapien
ccccagtcttctggtgactggccag

SEQ ID NO: 1062408 - DNA, 25 bp, Homo sapien
tgcccccagtcttctggtgactggc

SEQ ID NO: 1062409 - DNA, 25 bp, Homo sapien
tgatgtcccggcatacagcggcagc

SEQ ID NO: 1062410 - DNA, 25 bp, Homo sapien
cagggaagcggctgtatttccaaca

SEQ ID NO: 1062411 - DNA, 25 bp, Homo sapien
tttattaactcatccacagggaagc

SEQ ID NO: 1062412 - DNA, 25 bp, Homo sapien
tccaacagtccctggacacatgctg

SEQ ID NO: 1062413 - DNA, 25 bp, Homo sapien
tttctccggggcacatttcattcca

SEQ ID NO: 1062414 - DNA, 25 bp, Homo sapien
gctgagagagctcttggctttctcc

SEQ ID NO: 1062415 - DNA, 25 bp, Homo sapien
tggaaaacgcgtgaacacaatgctg

SEQ ID NO: 1062416 - DNA, 25 bp, Homo sapien
ctgtgtggaaaacgcgtgaacacaa

SEQ ID NO: 1062417 - DNA, 25 bp, Homo sapien
ctatagatacggtcctccaggaggg

SEQ ID NO: 1062418 - DNA, 25 bp, Homo sapien
ctcctgaagtctcctatagatacgg

SEQ ID NO: 1062419 - DNA, 25 bp, Homo sapien
ccagtttcttgtggatgccaagggc

SEQ ID NO: 1062420 - DNA, 25 bp, Homo sapien
gcctgagtcccaccgagggttccag

SEQ ID NO: 1062421 - DNA, 25 bp, Homo sapien
ggtgacactggatgtcttgtttgga

SEQ ID NO: 1062422 - DNA, 25 bp, Homo sapien
ggaaaatggggtcacaggaacagcc

SEQ ID NO: 1062423 - DNA, 25 bp, Homo sapien
tgacactggatgtcttgtttggaaa

SEQ ID NO: 1062424 - DNA, 25 bp, Homo sapien
acactggatgtcttgtttggaaaat

SEQ ID NO: 1062425 - DNA, 25 bp, Homo sapien
ttttgctgtttggggcccttggaga

SEQ ID NO: 1062426 - DNA, 25 bp, Homo sapien
cttttgctgtttggggcccttggag

SEQ ID NO: 1062427 - DNA, 25 bp, Homo sapien
ctgcagagaagagggggtttggcat

SEQ ID NO: 1062428 - DNA, 25 bp, Homo sapien
cctctgacgatcaggaagttcttct

SEQ ID NO: 1062429 - DNA, 25 bp, Homo sapien
cttcctcgtgggaatcagggctgct

SEQ ID NO: 1062430 - DNA, 25 bp, Homo sapien
gctctggacccctctgacgatcagg

SEQ ID NO: 1062431 - DNA, 25 bp, Homo sapien
tcttcctcgtgggaatcagggctgc

SEQ ID NO: 1062432 - DNA, 25 bp, Homo sapien
tcagtgcagatctgccagtgcctcc

SEQ ID NO: 1062433 - DNA, 25 bp, Homo sapien
gcagtagctgggcagtagttcctct

SEQ ID NO: 1062434 - DNA, 25 bp, Homo sapien
gtagttcctctttctggaaatgcca

SEQ ID NO: 1062435 - DNA, 25 bp, Homo sapien
tctttctggaaatgccaaaggcttc

SEQ ID NO: 1062436 - DNA, 25 bp, Homo sapien
cagcttttgcatagtcgcgtataat

SEQ ID NO: 1062437 - DNA, 25 bp, Homo sapien
tcagcttttgcatagtcgcgtataa

SEQ ID NO: 1062438 - DNA, 25 bp, Homo sapien
ctcagcttttgcatagtcgcgtata

SEQ ID NO: 1062439 - DNA, 25 bp, Homo sapien
aaaccaatgggcagcagcccctcgt

SEQ ID NO: 1062440 - DNA, 25 bp, Homo sapien
aaccaatgggcagcagcccctcgta

SEQ ID NO: 1062441 - DNA, 25 bp, Homo sapien
tcaaatgaaaccaatgggcagcagc

SEQ ID NO: 1062442 - DNA, 25 bp, Homo sapien
aatgaaaccaatgggcagcagcccc

SEQ ID NO: 1062443 - DNA, 25 bp, Homo sapien
tctcccaccaccttgaaggtctctg

SEQ ID NO: 1062444 - DNA, 25 bp, Homo sapien
ttctcccaccaccttgaaggtctct

SEQ ID NO: 1062445 - DNA, 25 bp, Homo sapien
ccaccaccttgaaggtctctgccat

SEQ ID NO: 1062446 - DNA, 25 bp, Homo sapien
tcccaccaccttgaaggtctctgcc

SEQ ID NO: 1062447 - DNA, 25 bp, Homo sapien
cacctgctgggtacactcataggag

SEQ ID NO: 1062448 - DNA, 25 bp, Homo sapien
cataggagagacacttggataaact

SEQ ID NO: 1062449 - DNA, 25 bp, Homo sapien
cctttctctgaaggtgatggattca

SEQ ID NO: 1062450 - DNA, 25 bp, Homo sapien
cctatagtgggttacaaggcagcca

SEQ ID NO: 1062451 - DNA, 25 bp, Homo sapien
acgggcaagggtgccgctcccattc

SEQ ID NO: 1062452 - DNA, 25 bp, Homo sapien
acggaagacgggcaagggtgccgct

SEQ ID NO: 1062453 - DNA, 25 bp, Homo sapien
ggcgctttgcagcaattgtctgtgt

SEQ ID NO: 1062454 - DNA, 25 bp, Homo sapien
gctgatgaggcgctttgcagcaatt

SEQ ID NO: 1062455 - DNA, 25 bp, Homo sapien
tccaaatttgcgattttcttctctg

SEQ ID NO: 1062456 - DNA, 25 bp, Homo sapien
ctctcacaacctccaaatttgcgat

SEQ ID NO: 1062457 - DNA, 25 bp, Homo sapien
cacaacctccaaatttgcgattttc

SEQ ID NO: 1062458 - DNA, 25 bp, Homo sapien
ccaaatttgcgattttcttctctgt

SEQ ID NO: 1062459 - DNA, 25 bp, Homo sapien
acaggaatggcctgtgtgattgtcc

SEQ ID NO: 1062460 - DNA, 25 bp, Homo sapien
tacaggaatggcctgtgtgattgtc

SEQ ID NO: 1062461 - DNA, 25 bp, Homo sapien
gggacggacaccctgatggccactt

SEQ ID NO: 1062462 - DNA, 25 bp, Homo sapien
ctccatgcctttcggtaggctcagg

SEQ ID NO: 1062463 - DNA, 25 bp, Homo sapien
gctcagggacggacaccctgatggc

SEQ ID NO: 1062464 - DNA, 25 bp, Homo sapien
atgcctttcggtaggctcagggacg

SEQ ID NO: 1062465 - DNA, 25 bp, Homo sapien
caggcaaagggcctcggtgaacaga

SEQ ID NO: 1062466 - DNA, 25 bp, Homo sapien
gcaaagggcctcggtgaacagagag

SEQ ID NO: 1062467 - DNA, 25 bp, Homo sapien
aggcaaagggcctcggtgaacagag

SEQ ID NO: 1062468 - DNA, 25 bp, Homo sapien
ggcaaagggcctcggtgaacagaga

SEQ ID NO: 1062469 - DNA, 25 bp, Homo sapien
atcaccaggtagaagatcaccagcc

SEQ ID NO: 1062470 - DNA, 25 bp, Homo sapien
tagaagatcaccagccttaagcaag

SEQ ID NO: 1062471 - DNA, 25 bp, Homo sapien
caccagctctactgacttcttggaa

SEQ ID NO: 1062472 - DNA, 25 bp, Homo sapien
agccaccagctctactgacttcttg

SEQ ID NO: 1062473 - DNA, 25 bp, Homo sapien
cagcattctggtagtggttcttttc

SEQ ID NO: 1062474 - DNA, 25 bp, Homo sapien
gtgctcagcattctggtagtggttc

SEQ ID NO: 1062475 - DNA, 25 bp, Homo sapien
caatggttgggatgaggaccggaaa

SEQ ID NO: 1062476 - DNA, 25 bp, Homo sapien
cttcatctcaatggttgggatgagg

SEQ ID NO: 1062477 - DNA, 25 bp, Homo sapien
gctcccgtggtaggaccagctctct

SEQ ID NO: 1062478 - DNA, 25 bp, Homo sapien
tctggagctcccgtggtaggaccag

SEQ ID NO: 1062479 - DNA, 25 bp, Homo sapien
cgtgagaaccttccagacagaggtg

SEQ ID NO: 1062480 - DNA, 25 bp, Homo sapien
gctctctccccgtgagaaccttcca

SEQ ID NO: 1062481 - DNA, 25 bp, Homo sapien
cacgtgaaccccctcgtggctgggg

SEQ ID NO: 1062482 - DNA, 25 bp, Homo sapien
catcccacgggataccttgatttgg

SEQ ID NO: 1062483 - DNA, 25 bp, Homo sapien
atcacagggtcctccacgtgaaccc

SEQ ID NO: 1062484 - DNA, 25 bp, Homo sapien
tgcatagacacgctcagcatcccac

SEQ ID NO: 1062485 - DNA, 25 bp, Homo sapien
tgtcaaaaggcacctactgggcatg

SEQ ID NO: 1062486 - DNA, 25 bp, Homo sapien
caagtaacaggttcgttctgcacaa

SEQ ID NO: 1062487 - DNA, 25 bp, Homo sapien
cagaagccatcatagccacggtgac

SEQ ID NO: 1062488 - DNA, 25 bp, Homo sapien
ctcagttgaaggatcagtggtacca

SEQ ID NO: 1062489 - DNA, 25 bp, Homo sapien
tcatgtccagtccatcttgcatgga

SEQ ID NO: 1062490 - DNA, 25 bp, Homo sapien
atgtccagtccatcttgcatggaag

SEQ ID NO: 1062491 - DNA, 25 bp, Homo sapien
catgtccagtccatcttgcatggaa

SEQ ID NO: 1062492 - DNA, 25 bp, Homo sapien
aaaccttgaatccactgcttggagc

SEQ ID NO: 1062493 - DNA, 25 bp, Homo sapien
taaaccttgaatccactgcttggag

SEQ ID NO: 1062494 - DNA, 25 bp, Homo sapien
ttaaaccttgaatccactgcttgga

SEQ ID NO: 1062495 - DNA, 25 bp, Homo sapien
aggtgatacccggaaggtcttcatg

SEQ ID NO: 1062496 - DNA, 25 bp, Homo sapien
gagccttcaggtaggaccagccttc

SEQ ID NO: 1062497 - DNA, 25 bp, Homo sapien
tacccggaaggtcttcatgcagagc

SEQ ID NO: 1062498 - DNA, 25 bp, Homo sapien
ttcaggtaggaccagccttccccag

SEQ ID NO: 1062499 - DNA, 25 bp, Homo sapien
gggcaggtgcctctgccaccagcat

SEQ ID NO: 1062500 - DNA, 25 bp, Homo sapien
ctgggcaggtgcctctgccaccagc

SEQ ID NO: 1062501 - DNA, 25 bp, Homo sapien
tgggcaggtgcctctgccaccagca

SEQ ID NO: 1062502 - DNA, 25 bp, Homo sapien
gatgccattacagggtggtttctgc

SEQ ID NO: 1062503 - DNA, 25 bp, Homo sapien
gtaacagcgatgctcggttcattag

SEQ ID NO: 1062504 - DNA, 25 bp, Homo sapien
gctaatatgtcctcacccttggaga

SEQ ID NO: 1062505 - DNA, 25 bp, Homo sapien
atgccgggcgcagcagtaacagcga

SEQ ID NO: 1062506 - DNA, 25 bp, Homo sapien
gagacccggagacgcgttgtctctt

SEQ ID NO: 1062507 - DNA, 25 bp, Homo sapien
caatgtcggtggcatcagggtcgat

SEQ ID NO: 1062508 - DNA, 25 bp, Homo sapien
cagggtcgatgtggagacccggaga

SEQ ID NO: 1062509 - DNA, 25 bp, Homo sapien
ctcttgtcaatgtcggtggcatcag

SEQ ID NO: 1062510 - DNA, 25 bp, Homo sapien
gaaggtgagcggagttcccttgatc

SEQ ID NO: 1062511 - DNA, 25 bp, Homo sapien
cttggctgttcatgaaggtgagcgg

SEQ ID NO: 1062512 - DNA, 25 bp, Homo sapien
gagttcccttgatctagttcctggg

SEQ ID NO: 1062513 - DNA, 25 bp, Homo sapien
tgttcatgaaggtgagcggagttcc

SEQ ID NO: 1062514 - DNA, 25 bp, Homo sapien
ccatagcctgggatgcagccactgc

SEQ ID NO: 1062515 - DNA, 25 bp, Homo sapien
catccactgcctccactgcctcctc

SEQ ID NO: 1062516 - DNA, 25 bp, Homo sapien
ctccactgcctcctcctcatcatca

SEQ ID NO: 1062517 - DNA, 25 bp, Homo sapien
tcctcatcatcagggactccctgac

SEQ ID NO: 1062518 - DNA, 25 bp, Homo sapien
cctcctcatcatcagggactccctg

SEQ ID NO: 1062519 - DNA, 25 bp, Homo sapien
aatgcagggaatgccctgacagccc

SEQ ID NO: 1062520 - DNA, 25 bp, Homo sapien
gaatgcagggaatgccctgacagcc

SEQ ID NO: 1062521 - DNA, 25 bp, Homo sapien
cctgacagcccagcgccccctgagc

SEQ ID NO: 1062522 - DNA, 25 bp, Homo sapien
cagtttgcctgggtttaaagtctgg

SEQ ID NO: 1062523 - DNA, 25 bp, Homo sapien
gtctggctccgtcacttctgagctg

SEQ ID NO: 1062524 - DNA, 25 bp, Homo sapien
gcagggacccggaagcagtttgcct

SEQ ID NO: 1062525 - DNA, 25 bp, Homo sapien
gagatcttggaaaattcctaatcat

SEQ ID NO: 1062526 - DNA, 25 bp, Homo sapien
actctccattgccggcttccccagg

SEQ ID NO: 1062527 - DNA, 25 bp, Homo sapien
gactctccattgccggcttccccag

SEQ ID NO: 1062528 - DNA, 25 bp, Homo sapien
ctctccattgccggcttccccaggg

SEQ ID NO: 1062529 - DNA, 25 bp, Homo sapien
ggactctccattgccggcttcccca

SEQ ID NO: 1062530 - DNA, 25 bp, Homo sapien
taaggagcactgttcatgggagtac

SEQ ID NO: 1062531 - DNA, 25 bp, Homo sapien
tcatagctggatctgcaagcctggt

SEQ ID NO: 1062532 - DNA, 25 bp, Homo sapien
ttgtaagcccactaagcaagctgat

SEQ ID NO: 1062533 - DNA, 25 bp, Homo sapien
tttcagaagggagacatggtacagg

SEQ ID NO: 1062534 - DNA, 25 bp, Homo sapien
gggtctcttcagctccgagtgtctc

SEQ ID NO: 1062535 - DNA, 25 bp, Homo sapien
cccttgagggtctaacgtggactca

SEQ ID NO: 1062536 - DNA, 25 bp, Homo sapien
gaaacacagtgtgacaggtaagctt

SEQ ID NO: 1062537 - DNA, 25 bp, Homo sapien
gaacctgagggaactgtgccttgca

SEQ ID NO: 1062538 - DNA, 25 bp, Homo sapien
aacagccgctatggtacccttggca

SEQ ID NO: 1062539 - DNA, 25 bp, Homo sapien
tacttggaaagttgatgtgctcaca

SEQ ID NO: 1062540 - DNA, 25 bp, Homo sapien
cagatctgggtaggtaaagtgcagc

SEQ ID NO: 1062541 - DNA, 25 bp, Homo sapien
ggcagcctctgatagctccagggct

SEQ ID NO: 1062542 - DNA, 25 bp, Homo sapien
gggatggaggagaccatataatcaa

SEQ ID NO: 1062543 - DNA, 25 bp, Homo sapien
taggcacagcaattgatgttcttgg

SEQ ID NO: 1062544 - DNA, 25 bp, Homo sapien
tgggaattaacctcaacttctcctc

SEQ ID NO: 1062545 - DNA, 25 bp, Homo sapien
ttaaaactcaagctcataggcacag

SEQ ID NO: 1062546 - DNA, 25 bp, Homo sapien
ggaattaacctcaacttctcctcca

SEQ ID NO: 1062547 - DNA, 25 bp, Homo sapien
taaggaagaccatatccttcggtgg

SEQ ID NO: 1062548 - DNA, 25 bp, Homo sapien
gaccatatccttcggtggtgtgcag

SEQ ID NO: 1062549 - DNA, 25 bp, Homo sapien
gggctccgtcacaatcccaccaggc

SEQ ID NO: 1062550 - DNA, 25 bp, Homo sapien
tatccttcggtggtgtgcaggtcag

SEQ ID NO: 1062551 - DNA, 25 bp, Homo sapien
cacagacagtcttggtagaggccgt

SEQ ID NO: 1062552 - DNA, 25 bp, Homo sapien
tcagttttcgcaagccacagacagt

SEQ ID NO: 1062553 - DNA, 25 bp, Homo sapien
ttttcgcaagccacagacagtcttg

SEQ ID NO: 1062554 - DNA, 25 bp, Homo sapien
gcctctgttcagttttcgcaagcca

SEQ ID NO: 1062555 - DNA, 25 bp, Homo sapien
caatactaatttggacttatcaaca

SEQ ID NO: 1062556 - DNA, 25 bp, Homo sapien
tgaatttgacataaaacatagacct

SEQ ID NO: 1062557 - DNA, 25 bp, Homo sapien
gaatccctacaagttaatcatgaaa

SEQ ID NO: 1062558 - DNA, 25 bp, Homo sapien
tatcattaaagaacctagcgcctat

SEQ ID NO: 1062559 - DNA, 25 bp, Homo sapien
tctgtttctgtagtacatgcagatc

SEQ ID NO: 1062560 - DNA, 25 bp, Homo sapien
ggtgctttgctatgtaccaggtcaa

SEQ ID NO: 1062561 - DNA, 25 bp, Homo sapien
tgcagatcataaagtggtgctttgc

SEQ ID NO: 1062562 - DNA, 25 bp, Homo sapien
tcccaacgacagaggaaatacccaa

SEQ ID NO: 1062563 - DNA, 25 bp, Homo sapien
accaggtcttgcctctttgatgtcc

SEQ ID NO: 1062564 - DNA, 25 bp, Homo sapien
ccaaccaggtcttgcctctttgatg

SEQ ID NO: 1062565 - DNA, 25 bp, Homo sapien
tcccaaccaggtcttgcctctttga

SEQ ID NO: 1062566 - DNA, 25 bp, Homo sapien
caaccaggtcttgcctctttgatgt

SEQ ID NO: 1062567 - DNA, 25 bp, Homo sapien
atacggcccaagagctcttcgctgg

SEQ ID NO: 1062568 - DNA, 25 bp, Homo sapien
ttcgctgggcccgagaagacaagag

SEQ ID NO: 1062569 - DNA, 25 bp, Homo sapien
tgctgggtgtcggtacctgatgtcc

SEQ ID NO: 1062570 - DNA, 25 bp, Homo sapien
tcagcctcacccgtgagctggtgct

SEQ ID NO: 1062571 - DNA, 25 bp, Homo sapien
gtctgcaggagtcccgtcccgtatg

SEQ ID NO: 1062572 - DNA, 25 bp, Homo sapien
ggatactcccacatcttgtcctgga

SEQ ID NO: 1062573 - DNA, 25 bp, Homo sapien
aagacccctttcagttcaggccctg

SEQ ID NO: 1062574 - DNA, 25 bp, Homo sapien
tatgtgtcctggacaacgccaaacc

SEQ ID NO: 1062575 - DNA, 25 bp, Homo sapien
tcagggctcctgtcggggcagagag

SEQ ID NO: 1062576 - DNA, 25 bp, Homo sapien
cagggctcctgtcggggcagagaga

SEQ ID NO: 1062577 - DNA, 25 bp, Homo sapien
ctgaccaagctctgtgaagcagaaa

SEQ ID NO: 1062578 - DNA, 25 bp, Homo sapien
gaccaagctctgtgaagcagaaagt

SEQ ID NO: 1062579 - DNA, 25 bp, Homo sapien
tgaccaagctctgtgaagcagaaag

SEQ ID NO: 1062580 - DNA, 25 bp, Homo sapien
ccaagctctgtgaagcagaaagtct

SEQ ID NO: 1062581 - DNA, 25 bp, Homo sapien
tttggttcctgttctgctacctcct

SEQ ID NO: 1062582 - DNA, 25 bp, Homo sapien
ggtcctgaggatgcaacctcacata

SEQ ID NO: 1062583 - DNA, 25 bp, Homo sapien
cccagcagactttgcactcactttg

SEQ ID NO: 1062584 - DNA, 25 bp, Homo sapien
ctgaggatgcaacctcacatacggg

SEQ ID NO: 1062585 - DNA, 25 bp, Homo sapien
ccattctgggatttggccgtgtgag

SEQ ID NO: 1062586 - DNA, 25 bp, Homo sapien
gagcttgccctgacatgcccatctt

SEQ ID NO: 1062587 - DNA, 25 bp, Homo sapien
cagcaagactcctcgaagaggcaga

SEQ ID NO: 1062588 - DNA, 25 bp, Homo sapien
aagcagatccttgactttcctgcct

SEQ ID NO: 1062589 - DNA, 25 bp, Homo sapien
tgccagcaggaaaagcccagtcctc

SEQ ID NO: 1062590 - DNA, 25 bp, Homo sapien
ccagcaggaaaagcccagtcctcat

SEQ ID NO: 1062591 - DNA, 25 bp, Homo sapien
ctgccagcaggaaaagcccagtcct

SEQ ID NO: 1062592 - DNA, 25 bp, Homo sapien
cctgccagcaggaaaagcccagtcc

SEQ ID NO: 1062593 - DNA, 25 bp, Homo sapien
cctcaaatcctggatgcagcccagg

SEQ ID NO: 1062594 - DNA, 25 bp, Homo sapien
gtcccccctcaaatcctggatgcag

SEQ ID NO: 1062595 - DNA, 25 bp, Homo sapien
aatcctggatgcagcccaggccaat

SEQ ID NO: 1062596 - DNA, 25 bp, Homo sapien
ccccctcaaatcctggatgcagccc

SEQ ID NO: 1062597 - DNA, 25 bp, Homo sapien
tcctgtcccatcctggtgcaggtgc

SEQ ID NO: 1062598 - DNA, 25 bp, Homo sapien
ctgtcccatcctggtgcaggtgcat

SEQ ID NO: 1062599 - DNA, 25 bp, Homo sapien
ctcactcctgtcccatcctggtgca

SEQ ID NO: 1062600 - DNA, 25 bp, Homo sapien
cactcctgtcccatcctggtgcagg

SEQ ID NO: 1062601 - DNA, 25 bp, Homo sapien
ttgtggtcccagttcctcacaccca

SEQ ID NO: 1062602 - DNA, 25 bp, Homo sapien
tggtcccagttcctcacacccattg

SEQ ID NO: 1062603 - DNA, 25 bp, Homo sapien
gtggtcccagttcctcacacccatt

SEQ ID NO: 1062604 - DNA, 25 bp, Homo sapien
ctttgtggtcccagttcctcacacc

SEQ ID NO: 1062605 - DNA, 25 bp, Homo sapien
caattgacaagaaattgccacggac

SEQ ID NO: 1062606 - DNA, 25 bp, Homo sapien
caagaaattgccacggacagcatgc

SEQ ID NO: 1062607 - DNA, 25 bp, Homo sapien
gttccctttgatgcactcatgctca

SEQ ID NO: 1062608 - DNA, 25 bp, Homo sapien
catgctcagcctggctcaattgaca

SEQ ID NO: 1062609 - DNA, 25 bp, Homo sapien
atgagcaactcagggacagctgaca

SEQ ID NO: 1062610 - DNA, 25 bp, Homo sapien
gccaagatcacagaagttcttgcag

SEQ ID NO: 1062611 - DNA, 25 bp, Homo sapien
ggctgttgccaagatcacagaagtt

SEQ ID NO: 1062612 - DNA, 25 bp, Homo sapien
actcagggacagctgacatccaggg

SEQ ID NO: 1062613 - DNA, 25 bp, Homo sapien
tgtagacactggccgtagaagggtg

SEQ ID NO: 1062614 - DNA, 25 bp, Homo sapien
taatgtagacactggccgtagaagg

SEQ ID NO: 1062615 - DNA, 25 bp, Homo sapien
ctaatgtagacactggccgtagaag

SEQ ID NO: 1062616 - DNA, 25 bp, Homo sapien
aatgtagacactggccgtagaaggg

SEQ ID NO: 1062617 - DNA, 25 bp, Homo sapien
tgagggtttatcttccaggaacaat

SEQ ID NO: 1062618 - DNA, 25 bp, Homo sapien
cagtgtctcagttccccgtcagtta

SEQ ID NO: 1062619 - DNA, 25 bp, Homo sapien
cccgtcagttaggtcattgctgtga

SEQ ID NO: 1062620 - DNA, 25 bp, Homo sapien
gcaccattcagggtccatgtaggaa

SEQ ID NO: 1062621 - DNA, 25 bp, Homo sapien
ttttctgcagcatcagggatgacca

SEQ ID NO: 1062622 - DNA, 25 bp, Homo sapien
gcttttctgcagcatcagggatgac

SEQ ID NO: 1062623 - DNA, 25 bp, Homo sapien
ttctgcagcatcagggatgaccacc

SEQ ID NO: 1062624 - DNA, 25 bp, Homo sapien
tcagtttggatgcttttctgcagca

SEQ ID NO: 1062625 - DNA, 25 bp, Homo sapien
atgaagaccacgcagatgtggatgc

SEQ ID NO: 1062626 - DNA, 25 bp, Homo sapien
tgaatgaagaccacgcagatgtgga

SEQ ID NO: 1062627 - DNA, 25 bp, Homo sapien
ctcgtgcaccgagcataaggcctgg

SEQ ID NO: 1062628 - DNA, 25 bp, Homo sapien
ctgcaggtaggaattgaatggctga

SEQ ID NO: 1062629 - DNA, 25 bp, Homo sapien
gggtgggagcaatacctgccgagag

SEQ ID NO: 1062630 - DNA, 25 bp, Homo sapien
aatccctctgagcatcatcacggcc

SEQ ID NO: 1062631 - DNA, 25 bp, Homo sapien
tgttcgggaccatttacctggaatc

SEQ ID NO: 1062632 - DNA, 25 bp, Homo sapien
atacctgccgagagccttctgtgtt

SEQ ID NO: 1062633 - DNA, 25 bp, Homo sapien
aacttgtaccaccttcaggctctgc

SEQ ID NO: 1062634 - DNA, 25 bp, Homo sapien
catacagaccaacttgtaccacctt

SEQ ID NO: 1062635 - DNA, 25 bp, Homo sapien
caacttgtaccaccttcaggctctg

SEQ ID NO: 1062636 - DNA, 25 bp, Homo sapien
agaccaacttgtaccaccttcaggc

SEQ ID NO: 1062637 - DNA, 25 bp, Homo sapien
ggtcgcaaagccatagtagatatcc

SEQ ID NO: 1062638 - DNA, 25 bp, Homo sapien
tgctaagaggtgtgccagagaactc

SEQ ID NO: 1062639 - DNA, 25 bp, Homo sapien
gcttctattgtgcagcggcaagcca

SEQ ID NO: 1062640 - DNA, 25 bp, Homo sapien
gaactcctctgggttgtacacatag

SEQ ID NO: 1062641 - DNA, 25 bp, Homo sapien
tggttgtctggagtaagctggtcca

SEQ ID NO: 1062642 - DNA, 25 bp, Homo sapien
ggttgtctggagtaagctggtccat

SEQ ID NO: 1062643 - DNA, 25 bp, Homo sapien
agcgtaattaattctctggtggtgg

SEQ ID NO: 1062644 - DNA, 25 bp, Homo sapien
tcaggataggagcagcgtaattaat

SEQ ID NO: 1062645 - DNA, 25 bp, Homo sapien
tgcacctgcttatgcctctgatgtt

SEQ ID NO: 1062646 - DNA, 25 bp, Homo sapien
tctgatgttggtgattgtggattcc

SEQ ID NO: 1062647 - DNA, 25 bp, Homo sapien
cctgcagggtagtggattttgtcta

SEQ ID NO: 1062648 - DNA, 25 bp, Homo sapien
gcagtgatttgcttcctttagacct

SEQ ID NO: 1062649 - DNA, 25 bp, Homo sapien
gaagtctttggacactgtgcttggc

SEQ ID NO: 1062650 - DNA, 25 bp, Homo sapien
taagaagtctttggacactgtgctt

SEQ ID NO: 1062651 - DNA, 25 bp, Homo sapien
tccaagttcctaagaagtctttgga

SEQ ID NO: 1062652 - DNA, 25 bp, Homo sapien
tcctaagaagtctttggacactgtg

SEQ ID NO: 1062653 - DNA, 25 bp, Homo sapien
acagcagctccccaacagtagtttt

SEQ ID NO: 1062654 - DNA, 25 bp, Homo sapien
agcagctccccaacagtagttttcc

SEQ ID NO: 1062655 - DNA, 25 bp, Homo sapien
ccgacagcagctccccaacagtagt

SEQ ID NO: 1062656 - DNA, 25 bp, Homo sapien
cagctcccccatggcagtttccccc

SEQ ID NO: 1062657 - DNA, 25 bp, Homo sapien
gtgagctcacaggagcccgcagaaa

SEQ ID NO: 1062658 - DNA, 25 bp, Homo sapien
gagctcacaggagcccgcagaaagg

SEQ ID NO: 1062659 - DNA, 25 bp, Homo sapien
acagtgagctcacaggagcccgcag

SEQ ID NO: 1062660 - DNA, 25 bp, Homo sapien
agtgagctcacaggagcccgcagaa

SEQ ID NO: 1062661 - DNA, 25 bp, Homo sapien
acagacgcccattcacacacaagga

SEQ ID NO: 1062662 - DNA, 25 bp, Homo sapien
gattcacacggagacatacagacac

SEQ ID NO: 1062663 - DNA, 25 bp, Homo sapien
gcacagcacacgcagacatgtacag

SEQ ID NO: 1062664 - DNA, 25 bp, Homo sapien
cagaatcctccgtatgtgcatgcag

SEQ ID NO: 1062665 - DNA, 25 bp, Homo sapien
agctattgtggggatgaggctcatc

SEQ ID NO: 1062666 - DNA, 25 bp, Homo sapien
tcatctgtaaagtggcccgtggtgc

SEQ ID NO: 1062667 - DNA, 25 bp, Homo sapien
gtaaagtggcccgtggtgccctctc

SEQ ID NO: 1062668 - DNA, 25 bp, Homo sapien
gtggcccgtggtgccctctctgtag

SEQ ID NO: 1062669 - DNA, 25 bp, Homo sapien
tggggacatctgtgcaccctcttcc

SEQ ID NO: 1062670 - DNA, 25 bp, Homo sapien
cctcctcctcactggagatggacat

SEQ ID NO: 1062671 - DNA, 25 bp, Homo sapien
gacatctgtgcaccctcttcctggg

SEQ ID NO: 1062672 - DNA, 25 bp, Homo sapien
gggacatctgtgcaccctcttcctg

SEQ ID NO: 1062673 - DNA, 25 bp, Homo sapien
ttggagtttatccttcagttcctgc

SEQ ID NO: 1062674 - DNA, 25 bp, Homo sapien
tgggctggaacagcaaccactcgtc

SEQ ID NO: 1062675 - DNA, 25 bp, Homo sapien
ccctgaccccggttgaaatctgagt

SEQ ID NO: 1062676 - DNA, 25 bp, Homo sapien
accactcgtctggtttggagtttat

SEQ ID NO: 1062677 - DNA, 25 bp, Homo sapien
gagtcaaggtcttcatgccctttgc

SEQ ID NO: 1062678 - DNA, 25 bp, Homo sapien
tggcaaaatgacagggagtcaaggt

SEQ ID NO: 1062679 - DNA, 25 bp, Homo sapien
gacagggagtcaaggtcttcatgcc

SEQ ID NO: 1062680 - DNA, 25 bp, Homo sapien
caaaatgacagggagtcaaggtctt

SEQ ID NO: 1062681 - DNA, 25 bp, Homo sapien
gtcattagcggacgccatggcctgg

SEQ ID NO: 1062682 - DNA, 25 bp, Homo sapien
catgttgatatggactgagaaggct

SEQ ID NO: 1062683 - DNA, 25 bp, Homo sapien
ttttctgctgtccaaggaggctcct

SEQ ID NO: 1062684 - DNA, 25 bp, Homo sapien
ttcttctgagattatccactcccct

SEQ ID NO: 1062685 - DNA, 25 bp, Homo sapien
agctcggccactgacctggtcttcc

SEQ ID NO: 1062686 - DNA, 25 bp, Homo sapien
gctcggccactgacctggtcttcct

SEQ ID NO: 1062687 - DNA, 25 bp, Homo sapien
tagcctataaaacggcgggaactga

SEQ ID NO: 1062688 - DNA, 25 bp, Homo sapien
agttacacggcaacatcagggcggg

SEQ ID NO: 1062689 - DNA, 25 bp, Homo sapien
agagactgagagtccgcgctgaggc

SEQ ID NO: 1062690 - DNA, 25 bp, Homo sapien
cagcgctaaagtgaagacagaaaaa

SEQ ID NO: 1062691 - DNA, 25 bp, Homo sapien
cgtcgattacgtggagagctacagc

SEQ ID NO: 1062692 - DNA, 25 bp, Homo sapien
tacagcgtcatcgagaagctgtcca

SEQ ID NO: 1062693 - DNA, 25 bp, Homo sapien
cgtcgagctgttcgccatcggagtg

SEQ ID NO: 1062694 - DNA, 25 bp, Homo sapien
cagccacgtctctcagtcagaggaa

SEQ ID NO: 1062695 - DNA, 25 bp, Homo sapien
tcttgggttggtcccttgggcatcc

SEQ ID NO: 1062696 - DNA, 25 bp, Homo sapien
tctggtggccaaagcgcagaactgc

SEQ ID NO: 1062697 - DNA, 25 bp, Homo sapien
actgcaccatgtggaaccaccggat

SEQ ID NO: 1062698 - DNA, 25 bp, Homo sapien
gataagggcggcatctttcttgggt

SEQ ID NO: 1062699 - DNA, 25 bp, Homo sapien
gattgtacaaagtcactccccaggt

SEQ ID NO: 1062700 - DNA, 25 bp, Homo sapien
tagagaaatgacgtatcaggcagcc

SEQ ID NO: 1062701 - DNA, 25 bp, Homo sapien
tccagggtacagaccagaggagcct

SEQ ID NO: 1062702 - DNA, 25 bp, Homo sapien
aatttcataattctccgagggcagg

SEQ ID NO: 1062703 - DNA, 25 bp, Homo sapien
aaagtgaaggtattcctgtcccagg

SEQ ID NO: 1062704 - DNA, 25 bp, Homo sapien
gattcccatgatgccccgtgaggtg

SEQ ID NO: 1062705 - DNA, 25 bp, Homo sapien
caccaaagccttcggcgatgcagag

SEQ ID NO: 1062706 - DNA, 25 bp, Homo sapien
tgacatcagcaaggtacgtgcacgc

SEQ ID NO: 1062707 - DNA, 25 bp, Homo sapien
cttgaatcaaccctaggaggcgcta

SEQ ID NO: 1062708 - DNA, 25 bp, Homo sapien
cattggactcaggtatgcctaggct

SEQ ID NO: 1062709 - DNA, 25 bp, Homo sapien
tgctgccagaactatgagggtcctc

SEQ ID NO: 1062710 - DNA, 25 bp, Homo sapien
gagtgaagtgcataggtcccaagtc

SEQ ID NO: 1062711 - DNA, 25 bp, Homo sapien
caggttcgtagttagttttcattca

SEQ ID NO: 1062712 - DNA, 25 bp, Homo sapien
tggtcaccgtggatggcccttgtgt

SEQ ID NO: 1062713 - DNA, 25 bp, Homo sapien
gcattgcgtttctcaccgctggtca

SEQ ID NO: 1062714 - DNA, 25 bp, Homo sapien
ggcacgaggacagcattgcgtttct

SEQ ID NO: 1062715 - DNA, 25 bp, Homo sapien
tctcaccgctggtcaccgtggatgg

SEQ ID NO: 1062716 - DNA, 25 bp, Homo sapien
cgaggagcccatagaactgccattc

SEQ ID NO: 1062717 - DNA, 25 bp, Homo sapien
gagaaggcgcctgtgttcttccgag

SEQ ID NO: 1062718 - DNA, 25 bp, Homo sapien
tgctgcccagctaacggagccttgt

SEQ ID NO: 1062719 - DNA, 25 bp, Homo sapien
tgcagctctgctaatgagcggagaa

SEQ ID NO: 1062720 - DNA, 25 bp, Homo sapien
gataaccaggtttgctctttaggga

SEQ ID NO: 1062721 - DNA, 25 bp, Homo sapien
taagtttctggaagcccgagggatg

SEQ ID NO: 1062722 - DNA, 25 bp, Homo sapien
tggctcataccggacacactgttct

SEQ ID NO: 1062723 - DNA, 25 bp, Homo sapien
caaacagctgatggtgggcaaagag

SEQ ID NO: 1062724 - DNA, 25 bp, Homo sapien
attccagtttggctgaccatgcgtg

SEQ ID NO: 1062725 - DNA, 25 bp, Homo sapien
cagacaggccggcagatgaaagcac

SEQ ID NO: 1062726 - DNA, 25 bp, Homo sapien
tccagtttggctgaccatgcgtggg

SEQ ID NO: 1062727 - DNA, 25 bp, Homo sapien
gcagatgaaagcacacgcctcctca

SEQ ID NO: 1062728 - DNA, 25 bp, Homo sapien
cactggggtcatggcggttgtggca

SEQ ID NO: 1062729 - DNA, 25 bp, Homo sapien
gttcagtcaaagcaggcaaccccct

SEQ ID NO: 1062730 - DNA, 25 bp, Homo sapien
agtcaaagcaggcaacccccttgtg

SEQ ID NO: 1062731 - DNA, 25 bp, Homo sapien
caaagcaggcaacccccttgtgggc

SEQ ID NO: 1062732 - DNA, 25 bp, Homo sapien
tgagctgctcacaactgggtcaacg

SEQ ID NO: 1062733 - DNA, 25 bp, Homo sapien
gacacttgtttagacgattggccat

SEQ ID NO: 1062734 - DNA, 25 bp, Homo sapien
taggcgaatctgttctgcccgaggc

SEQ ID NO: 1062735 - DNA, 25 bp, Homo sapien
tgtggctgcataacagtggattcca

SEQ ID NO: 1062736 - DNA, 25 bp, Homo sapien
catggaggcccatgaggccactgaa

SEQ ID NO: 1062737 - DNA, 25 bp, Homo sapien
gaactcagagttaagccataggacc

SEQ ID NO: 1062738 - DNA, 25 bp, Homo sapien
cacaacaactactgattcgtagtat

SEQ ID NO: 1062739 - DNA, 25 bp, Homo sapien
cagcatgcaccggtcctgttcccat

SEQ ID NO: 1062740 - DNA, 25 bp, Homo sapien
ggccatgcttcaggcacctggaaca

SEQ ID NO: 1062741 - DNA, 25 bp, Homo sapien
acctggaacacaccctgagtccagg

SEQ ID NO: 1062742 - DNA, 25 bp, Homo sapien
tgggccatgcttcaggcacctggaa

SEQ ID NO: 1062743 - DNA, 25 bp, Homo sapien
ttcaggcacctggaacacaccctga

SEQ ID NO: 1062744 - DNA, 25 bp, Homo sapien
tccccggatgatgagaccaggaagg

SEQ ID NO: 1062745 - DNA, 25 bp, Homo sapien
gaagggtcatgtcgtcatccctcac

SEQ ID NO: 1062746 - DNA, 25 bp, Homo sapien
accaggaagggtcatgtcgtcatcc

SEQ ID NO: 1062747 - DNA, 25 bp, Homo sapien
ccccagttgagtccccggatgatga

SEQ ID NO: 1062748 - DNA, 25 bp, Homo sapien
caaacaagggcgcagtgagagttcc

SEQ ID NO: 1062749 - DNA, 25 bp, Homo sapien
tgactcactgcttcaaaccgcaagg

SEQ ID NO: 1062750 - DNA, 25 bp, Homo sapien
agtgcgcctcctcgtcttgtccaaa

SEQ ID NO: 1062751 - DNA, 25 bp, Homo sapien
ccttgacttgcagccagaaggtgac

SEQ ID NO: 1062752 - DNA, 25 bp, Homo sapien
ccttctcctctctctctgcgtgccg

SEQ ID NO: 1062753 - DNA, 25 bp, Homo sapien
ttctcctctctctctgcgtgccgta

SEQ ID NO: 1062754 - DNA, 25 bp, Homo sapien
tctcctctctctctgcgtgccgtac

SEQ ID NO: 1062755 - DNA, 25 bp, Homo sapien
gtccttctcctctctctctgcgtgc

SEQ ID NO: 1062756 - DNA, 25 bp, Homo sapien
tgggccccatcatagtctggaaaga

SEQ ID NO: 1062757 - DNA, 25 bp, Homo sapien
gggccccatcatagtctggaaagag

SEQ ID NO: 1062758 - DNA, 25 bp, Homo sapien
gacccaacagataggcaacttttcc

SEQ ID NO: 1062759 - DNA, 25 bp, Homo sapien
ccaacagataggcaacttttcctcc

SEQ ID NO: 1062760 - DNA, 25 bp, Homo sapien
aacagataggcaacttttcctccct

SEQ ID NO: 1062761 - DNA, 25 bp, Homo sapien
tctgacccaacagataggcaacttt

SEQ ID NO: 1062762 - DNA, 25 bp, Homo sapien
tgctgcttgactattgtcactgccg

SEQ ID NO: 1062763 - DNA, 25 bp, Homo sapien
tgataaaagttagaagcttggactc

SEQ ID NO: 1062764 - DNA, 25 bp, Homo sapien
aaaagttagaagcttggactctctc

SEQ ID NO: 1062765 - DNA, 25 bp, Homo sapien
tgtcactgccgctgataaaagttag

SEQ ID NO: 1062766 - DNA, 25 bp, Homo sapien
gagattctatcaggcacgtcactgg

SEQ ID NO: 1062767 - DNA, 25 bp, Homo sapien
caggcttctgacgagttggcttcca

SEQ ID NO: 1062768 - DNA, 25 bp, Homo sapien
taggaagcttgggtccacgacatgg

SEQ ID NO: 1062769 - DNA, 25 bp, Homo sapien
cagaagattgaaccatgggatacca

SEQ ID NO: 1062770 - DNA, 25 bp, Homo sapien
tgtgtgtaagcactcagatgtgaga

SEQ ID NO: 1062771 - DNA, 25 bp, Homo sapien
caagggagacttacaaatatgatga

SEQ ID NO: 1062772 - DNA, 25 bp, Homo sapien
taccgcaactgtaaacacaacttat

SEQ ID NO: 1062773 - DNA, 25 bp, Homo sapien
aattatccctaagcacttaagcagc

SEQ ID NO: 1062774 - DNA, 25 bp, Homo sapien
ttccggaggaatgcacaagggcggt

SEQ ID NO: 1062775 - DNA, 25 bp, Homo sapien
aggaatgcacaagggcggtgaggga

SEQ ID NO: 1062776 - DNA, 25 bp, Homo sapien
ccggaggaatgcacaagggcggtga

SEQ ID NO: 1062777 - DNA, 25 bp, Homo sapien
cagcttccggaggaatgcacaaggg

SEQ ID NO: 1062778 - DNA, 25 bp, Homo sapien
ctctgtggaccttttgagcagggag

SEQ ID NO: 1062779 - DNA, 25 bp, Homo sapien
cttcgaaaggtccttccattgtgtg

SEQ ID NO: 1062780 - DNA, 25 bp, Homo sapien
aggcgggtgcacagagccctttgtc

SEQ ID NO: 1062781 - DNA, 25 bp, Homo sapien
gctgggtgcagcttcgaaaggtcct

SEQ ID NO: 1062782 - DNA, 25 bp, Homo sapien
tcttgcgatcaaggcagggtctcag

SEQ ID NO: 1062783 - DNA, 25 bp, Homo sapien
tatgaaacacatgcatgcccctgag

SEQ ID NO: 1062784 - DNA, 25 bp, Homo sapien
tgacatagagacaggtacaaggcct

SEQ ID NO: 1062785 - DNA, 25 bp, Homo sapien
cagaaagggccttgactaacatgct

SEQ ID NO: 1062786 - DNA, 25 bp, Homo sapien
cccaacaactacaaccctggacttg

SEQ ID NO: 1062787 - DNA, 25 bp, Homo sapien
aacaactacaaccctggacttgcct

SEQ ID NO: 1062788 - DNA, 25 bp, Homo sapien
ttctcccaacaactacaaccctgga

SEQ ID NO: 1062789 - DNA, 25 bp, Homo sapien
tcttctcccaacaactacaaccctg

SEQ ID NO: 1062790 - DNA, 25 bp, Homo sapien
cccaacagtgggtgcagtttctcag

SEQ ID NO: 1062791 - DNA, 25 bp, Homo sapien
aggatgaggagtctgaccagcccaa

SEQ ID NO: 1062792 - DNA, 25 bp, Homo sapien
gagcacagctctggtgagacggcct

SEQ ID NO: 1062793 - DNA, 25 bp, Homo sapien
caaatgagagggagcttctgtggct

SEQ ID NO: 1062794 - DNA, 25 bp, Homo sapien
gcaacctcttgctcgtatcccaggg

SEQ ID NO: 1062795 - DNA, 25 bp, Homo sapien
gagaggcactcaggctggtttccag

SEQ ID NO: 1062796 - DNA, 25 bp, Homo sapien
aaacatttggtaaacacagcccttg

SEQ ID NO: 1062797 - DNA, 25 bp, Homo sapien
tgaaatcatctagacactgcaacct

SEQ ID NO: 1062798 - DNA, 25 bp, Homo sapien
acaggaagccgtgattacaggggga

SEQ ID NO: 1062799 - DNA, 25 bp, Homo sapien
aggaagccgtgattacagggggagc

SEQ ID NO: 1062800 - DNA, 25 bp, Homo sapien
ccaaacaggaagccgtgattacagg

SEQ ID NO: 1062801 - DNA, 25 bp, Homo sapien
aaacaggaagccgtgattacagggg

SEQ ID NO: 1062802 - DNA, 25 bp, Homo sapien
tcccgccatggccagaggggcagcc

SEQ ID NO: 1062803 - DNA, 25 bp, Homo sapien
cggcccccctcccgccatggccaga

SEQ ID NO: 1062804 - DNA, 25 bp, Homo sapien
ccgccatggccagaggggcagccac

SEQ ID NO: 1062805 - DNA, 25 bp, Homo sapien
cccccctcccgccatggccagaggg

SEQ ID NO: 1062806 - DNA, 25 bp, Homo sapien
tacaagcgggcatagggtccctggg

SEQ ID NO: 1062807 - DNA, 25 bp, Homo sapien
caagcgggcatagggtccctggggg

SEQ ID NO: 1062808 - DNA, 25 bp, Homo sapien
ctcatacaagcgggcatagggtccc

SEQ ID NO: 1062809 - DNA, 25 bp, Homo sapien
catacaagcgggcatagggtccctg

SEQ ID NO: 1062810 - DNA, 25 bp, Homo sapien
gatttgaacctgaagcctcctgctc

SEQ ID NO: 1062811 - DNA, 25 bp, Homo sapien
gctgtgactctatcctcaaggcagg

SEQ ID NO: 1062812 - DNA, 25 bp, Homo sapien
tagcaggctgtaacctgccctgacc

SEQ ID NO: 1062813 - DNA, 25 bp, Homo sapien
tgaaagtggtcatcacatgacagta

SEQ ID NO: 1062814 - DNA, 25 bp, Homo sapien
ttgccggggttccgcaccagaggga

SEQ ID NO: 1062815 - DNA, 25 bp, Homo sapien
ccggggttccgcaccagagggagag

SEQ ID NO: 1062816 - DNA, 25 bp, Homo sapien
gttccgcaccagagggagagggcag

SEQ ID NO: 1062817 - DNA, 25 bp, Homo sapien
ctggttgccggggttccgcaccaga

SEQ ID NO: 1062818 - DNA, 25 bp, Homo sapien
tcaaggaggggcatcatccctcttg

SEQ ID NO: 1062819 - DNA, 25 bp, Homo sapien
tcttgtcctcatctgacttgggagg

SEQ ID NO: 1062820 - DNA, 25 bp, Homo sapien
aaggaggggcatcatccctcttgtc

SEQ ID NO: 1062821 - DNA, 25 bp, Homo sapien
atccctcttgtcctcatctgacttg

SEQ ID NO: 1062822 - DNA, 25 bp, Homo sapien
cgggatcggcgaggccggctgctca

SEQ ID NO: 1062823 - DNA, 25 bp, Homo sapien
ctccagccccgggatcggcgaggcc

SEQ ID NO: 1062824 - DNA, 25 bp, Homo sapien
gccggctgctcactcaggtgtccgg

SEQ ID NO: 1062825 - DNA, 25 bp, Homo sapien
ggcggccgcggaggtgcgtccggcg

SEQ ID NO: 1062826 - DNA, 25 bp, Homo sapien
ttagttctggctgtgaccagtgtct

SEQ ID NO: 1062827 - DNA, 25 bp, Homo sapien
tctggctgtgaccagtgtctttgaa

SEQ ID NO: 1062828 - DNA, 25 bp, Homo sapien
ttgaagagcagcaggtggcgctcct

SEQ ID NO: 1062829 - DNA, 25 bp, Homo sapien
gctgtgaccagtgtctttgaagagc

SEQ ID NO: 1062830 - DNA, 25 bp, Homo sapien
tgtaaagtgtgaatcgcccttccct

SEQ ID NO: 1062831 - DNA, 25 bp, Homo sapien
gaaaagagaattagccagccctgtg

SEQ ID NO: 1062832 - DNA, 25 bp, Homo sapien
aaacctgtgtatgcttatgcctggg

SEQ ID NO: 1062833 - DNA, 25 bp, Homo sapien
caaaaggacgtgcaaaagtctagcc

SEQ ID NO: 1062834 - DNA, 25 bp, Homo sapien
gagagcctctgtctactgcggtaca

SEQ ID NO: 1062835 - DNA, 25 bp, Homo sapien
tctgtgtcctgggaagcatgcgcag

SEQ ID NO: 1062836 - DNA, 25 bp, Homo sapien
catgcgcaggtgatttctagaccgg

SEQ ID NO: 1062837 - DNA, 25 bp, Homo sapien
tgggaatgtgacacccgatgcagct

SEQ ID NO: 1062838 - DNA, 25 bp, Homo sapien
cactagagagtaaccaaagggcagg

SEQ ID NO: 1062839 - DNA, 25 bp, Homo sapien
gagggcacttctctttggtggaaca

SEQ ID NO: 1062840 - DNA, 25 bp, Homo sapien
cagctgctgcttactgtatgggaga

SEQ ID NO: 1062841 - DNA, 25 bp, Homo sapien
caagaactacctgaagacactagag

SEQ ID NO: 1062842 - DNA, 25 bp, Homo sapien
tcttgggttctcttcttcgggtcag

SEQ ID NO: 1062843 - DNA, 25 bp, Homo sapien
cagggttatctcttacgactttata

SEQ ID NO: 1062844 - DNA, 25 bp, Homo sapien
gaaatgaaagtacctgtagatccag

SEQ ID NO: 1062845 - DNA, 25 bp, Homo sapien
gtctccatagcctagccctatcagg

SEQ ID NO: 1062846 - DNA, 25 bp, Homo sapien
agtagctggagttaacaggagcgtg

SEQ ID NO: 1062847 - DNA, 25 bp, Homo sapien
ccggagtagctggagttaacaggag

SEQ ID NO: 1062848 - DNA, 25 bp, Homo sapien
agctggagttaacaggagcgtgcca

SEQ ID NO: 1062849 - DNA, 25 bp, Homo sapien
gagtagctggagttaacaggagcgt

SEQ ID NO: 1062850 - DNA, 25 bp, Homo sapien
acctctgccccctgggttcacacca

SEQ ID NO: 1062851 - DNA, 25 bp, Homo sapien
gtggagtgcaatggtgcaatctcgg

SEQ ID NO: 1062852 - DNA, 25 bp, Homo sapien
tgagctggagtcttggtctgtctcc

SEQ ID NO: 1062853 - DNA, 25 bp, Homo sapien
cagggtggagtgcaatggtgcaatc

SEQ ID NO: 1062854 - DNA, 25 bp, Homo sapien
gatataattcacgtattccaaaatc

SEQ ID NO: 1062855 - DNA, 25 bp, Homo sapien
cattaagcataatcacagttggttt

SEQ ID NO: 1062856 - DNA, 25 bp, Homo sapien
gatgctcagctggtagatataattc

SEQ ID NO: 1062857 - DNA, 25 bp, Homo sapien
gggtactcaacctggactgtgttaa

SEQ ID NO: 1062858 - DNA, 25 bp, Homo sapien
ccacttgctgatgccagatattcca

SEQ ID NO: 1062859 - DNA, 25 bp, Homo sapien
tatttgataacactaccacttgctg

SEQ ID NO: 1062860 - DNA, 25 bp, Homo sapien
cacccactttttgtcagagcactga

SEQ ID NO: 1062861 - DNA, 25 bp, Homo sapien
cacttgcccatttgccacatggtag

SEQ ID NO: 1062862 - DNA, 25 bp, Homo sapien
cagatacagttcttgtaccatatat

SEQ ID NO: 1062863 - DNA, 25 bp, Homo sapien
cagttcttgtaccatatatataagg

SEQ ID NO: 1062864 - DNA, 25 bp, Homo sapien
ggcaacagatacagttcttgtacca

SEQ ID NO: 1062865 - DNA, 25 bp, Homo sapien
ttttcttggcaacagatacagttct

SEQ ID NO: 1062866 - DNA, 25 bp, Homo sapien
gaccagaggtctagtgcagcacata

SEQ ID NO: 1062867 - DNA, 25 bp, Homo sapien
caagaggacaaggaggtacagatgc

SEQ ID NO: 1062868 - DNA, 25 bp, Homo sapien
tactgatgattgtgagggttggacc

SEQ ID NO: 1062869 - DNA, 25 bp, Homo sapien
gaggccttgagaaccagctggaagt

SEQ ID NO: 1062870 - DNA, 25 bp, Homo sapien
gctttcatggatgctatagacagtg

SEQ ID NO: 1062871 - DNA, 25 bp, Homo sapien
gaatgttgccacaggttacactctt

SEQ ID NO: 1062872 - DNA, 25 bp, Homo sapien
taaggtgatggtagaccctgggtta

SEQ ID NO: 1062873 - DNA, 25 bp, Homo sapien
tatgtaccagctactggactacagg

SEQ ID NO: 1062874 - DNA, 25 bp, Homo sapien
acctggctgtgacttttgatacgta

SEQ ID NO: 1062875 - DNA, 25 bp, Homo sapien
gcaaatcatactcttgcagcagaag

SEQ ID NO: 1062876 - DNA, 25 bp, Homo sapien
aagctgtcttggaatgtttgaatgc

SEQ ID NO: 1062877 - DNA, 25 bp, Homo sapien
ttgaatgcagcaaatcatactcttg

SEQ ID NO: 1062878 - DNA, 25 bp, Homo sapien
actgtatgtagatgttaagctgtct

SEQ ID NO: 1062879 - DNA, 25 bp, Homo sapien
aaaaacagctaaccacgccaagtgg

SEQ ID NO: 1062880 - DNA, 25 bp, Homo sapien
cccaggaaatgtggtcataactgat

SEQ ID NO: 1062881 - DNA, 25 bp, Homo sapien
gattgggcactttgaggaacgagat

SEQ ID NO: 1062882 - DNA, 25 bp, Homo sapien
ccaagtggtctggaggaacaagatc

SEQ ID NO: 1062883 - DNA, 25 bp, Homo sapien
ttatgatcttgcataacctgtttgc

SEQ ID NO: 1062884 - DNA, 25 bp, Homo sapien
cctttaggttggcagcattgttact

SEQ ID NO: 1062885 - DNA, 25 bp, Homo sapien
ataacctgtttgctccacctttagg

SEQ ID NO: 1062886 - DNA, 25 bp, Homo sapien
tccacctttaggttggcagcattgt

SEQ ID NO: 1062887 - DNA, 25 bp, Homo sapien
tatggttatctgactcatcaattac

SEQ ID NO: 1062888 - DNA, 25 bp, Homo sapien
tcatatggttatctgactcatcaat

SEQ ID NO: 1062889 - DNA, 25 bp, Homo sapien
ttatctgactcatcaattactctta

SEQ ID NO: 1062890 - DNA, 25 bp, Homo sapien
gttatctgactcatcaattactctt

SEQ ID NO: 1062891 - DNA, 25 bp, Homo sapien
tggtttttccttgtaggatattgtg

SEQ ID NO: 1062892 - DNA, 25 bp, Homo sapien
ccctggctgaatttttgcgagtggc

SEQ ID NO: 1062893 - DNA, 25 bp, Homo sapien
ggctgaatttttgcgagtggctcca

SEQ ID NO: 1062894 - DNA, 25 bp, Homo sapien
agaaccctggctgaatttttgcgag

SEQ ID NO: 1062895 - DNA, 25 bp, Homo sapien
tggctgaatttttgcgagtggctcc

SEQ ID NO: 1062896 - DNA, 25 bp, Homo sapien
tgaggcttctcactcgctgttcctc

SEQ ID NO: 1062897 - DNA, 25 bp, Homo sapien
ctccggacccctaacgagcagattg

SEQ ID NO: 1062898 - DNA, 25 bp, Homo sapien
catattggtgtttgagagtggttgt

SEQ ID NO: 1062899 - DNA, 25 bp, Homo sapien
taacgagcagattgtcccttcatat

SEQ ID NO: 1062900 - DNA, 25 bp, Homo sapien
accgctccgcccgtgagtatccgca

SEQ ID NO: 1062901 - DNA, 25 bp, Homo sapien
gatcggggggctgaaatccatcttc

SEQ ID NO: 1062902 - DNA, 25 bp, Homo sapien
agagcgccagagagagaagatcggg

SEQ ID NO: 1062903 - DNA, 25 bp, Homo sapien
agtccccagtgggccgccatgttgt

SEQ ID NO: 1062904 - DNA, 25 bp, Homo sapien
agaattgcttgagctatgatccacc

SEQ ID NO: 1062905 - DNA, 25 bp, Homo sapien
aattgcttgagctatgatccaccac

SEQ ID NO: 1062906 - DNA, 25 bp, Homo sapien
attgcttgagctatgatccaccact

SEQ ID NO: 1062907 - DNA, 25 bp, Homo sapien
gaattgcttgagctatgatccacca

SEQ ID NO: 1062908 - DNA, 25 bp, Homo sapien
aatctatgctgttgggttgcagccc

SEQ ID NO: 1062909 - DNA, 25 bp, Homo sapien
ccctagttacttgaatgtgccatac

SEQ ID NO: 1062910 - DNA, 25 bp, Homo sapien
acatcttggccggtcaggtctcgaa

SEQ ID NO: 1062911 - DNA, 25 bp, Homo sapien
taggttgacatagtagtgcttccca

SEQ ID NO: 1062912 - DNA, 25 bp, Homo sapien
gggttctaatcgcaggtccatcact

SEQ ID NO: 1062913 - DNA, 25 bp, Homo sapien
gactgtgacgtctagcaaagccctt

SEQ ID NO: 1062914 - DNA, 25 bp, Homo sapien
aagtgggccttgaacacagtgtact

SEQ ID NO: 1062915 - DNA, 25 bp, Homo sapien
tactgtgaactaggagcaggattcc

SEQ ID NO: 1062916 - DNA, 25 bp, Homo sapien
accagggctggcccaatcagtcgca

SEQ ID NO: 1062917 - DNA, 25 bp, Homo sapien
ccagggctggcccaatcagtcgcat

SEQ ID NO: 1062918 - DNA, 25 bp, Homo sapien
gctgcctcctgacaagaccagggct

SEQ ID NO: 1062919 - DNA, 25 bp, Homo sapien
tctgaagtttgacaggacagacctg

SEQ ID NO: 1062920 - DNA, 25 bp, Homo sapien
gacagacctggcttttagacctggt

SEQ ID NO: 1062921 - DNA, 25 bp, Homo sapien
acttcctggctatgcaattttgggc

SEQ ID NO: 1062922 - DNA, 25 bp, Homo sapien
tctggcaggtacagagtgagtactc

SEQ ID NO: 1062923 - DNA, 25 bp, Homo sapien
caatggaaaagttggctcaagtgag

SEQ ID NO: 1062924 - DNA, 25 bp, Homo sapien
actccagacctaagacgatccacgc

SEQ ID NO: 1062925 - DNA, 25 bp, Homo sapien
tccttctgcctgttaattcaatgga

SEQ ID NO: 1062926 - DNA, 25 bp, Homo sapien
gacctaagacgatccacgcacctcg

SEQ ID NO: 1062927 - DNA, 25 bp, Homo sapien
cattggctcagaggattaggaacag

SEQ ID NO: 1062928 - DNA, 25 bp, Homo sapien
tacagattgtgccatatgccacgca

SEQ ID NO: 1062929 - DNA, 25 bp, Homo sapien
gaagtactactttgggacacagtct

SEQ ID NO: 1062930 - DNA, 25 bp, Homo sapien
tctgtggctactgaagaggtggtca

SEQ ID NO: 1062931 - DNA, 25 bp, Homo sapien
tgccatattgttttctggcaggagc

SEQ ID NO: 1062932 - DNA, 25 bp, Homo sapien
aatacaatgtttgaaaccaggttgc

SEQ ID NO: 1062933 - DNA, 25 bp, Homo sapien
tttagtgacaaccatgtcattggac

SEQ ID NO: 1062934 - DNA, 25 bp, Homo sapien
ctcttgtataacagagatggactgg

SEQ ID NO: 1062935 - DNA, 25 bp, Homo sapien
tttacatttctgacctctaaaatct

SEQ ID NO: 1062936 - DNA, 25 bp, Homo sapien
taggtagtctggtaaacattcattg

SEQ ID NO: 1062937 - DNA, 25 bp, Homo sapien
aatctggctatacaaaagtaattac

SEQ ID NO: 1062938 - DNA, 25 bp, Homo sapien
tctaaaatcttagggtgctccatca

SEQ ID NO: 1062939 - DNA, 25 bp, Homo sapien
tcgctgcgctgaactaaacgccgac

SEQ ID NO: 1062940 - DNA, 25 bp, Homo sapien
aaacgccgaccccagtcagccagcg

SEQ ID NO: 1062941 - DNA, 25 bp, Homo sapien
gtcagccagcgcgtttccacccaca

SEQ ID NO: 1062942 - DNA, 25 bp, Homo sapien
aggtccccgagtcgctgcgctgaac

SEQ ID NO: 1062943 - DNA, 25 bp, Homo sapien
tcagactgcacaaccgaggcgtcgc

SEQ ID NO: 1062944 - DNA, 25 bp, Homo sapien
ccgaggcgtcgcctccagactcagg

SEQ ID NO: 1062945 - DNA, 25 bp, Homo sapien
ggttcagactgcacaaccgaggcgt

SEQ ID NO: 1062946 - DNA, 25 bp, Homo sapien
cgaggcgtcgcctccagactcaggc

SEQ ID NO: 1062947 - DNA, 25 bp, Homo sapien
tgcctagcacagtgtaacacacatg

SEQ ID NO: 1062948 - DNA, 25 bp, Homo sapien
catggaaattgtctactaaaatagt

SEQ ID NO: 1062949 - DNA, 25 bp, Homo sapien
tgtagagtgtggaactcttgtaagc

SEQ ID NO: 1062950 - DNA, 25 bp, Homo sapien
gctaagtaaactcgctcaagattgc

SEQ ID NO: 1062951 - DNA, 25 bp, Homo sapien
aattcacaatcgaatatggtttggc

SEQ ID NO: 1062952 - DNA, 25 bp, Homo sapien
catgatagtgacagagttttcacga

SEQ ID NO: 1062953 - DNA, 25 bp, Homo sapien
ggccaagagcctgcattcttaagca

SEQ ID NO: 1062954 - DNA, 25 bp, Homo sapien
tgacaccacttaagacgtgccttgc

SEQ ID NO: 1062955 - DNA, 25 bp, Homo sapien
tgaaccaagatcgtaccattgtact

SEQ ID NO: 1062956 - DNA, 25 bp, Homo sapien
ccagcctgggcgacagagcgagagt

SEQ ID NO: 1062957 - DNA, 25 bp, Homo sapien
cctgggcgacagagcgagagtccgt

SEQ ID NO: 1062958 - DNA, 25 bp, Homo sapien
agtgaaccaagatcgtaccattgta

SEQ ID NO: 1062959 - DNA, 25 bp, Homo sapien
ccttaatattctatggctcctccat

SEQ ID NO: 1062960 - DNA, 25 bp, Homo sapien
cttaatattctatggctcctccatt

SEQ ID NO: 1062961 - DNA, 25 bp, Homo sapien
taatattctatggctcctccatttc

SEQ ID NO: 1062962 - DNA, 25 bp, Homo sapien
ttaatattctatggctcctccattt

SEQ ID NO: 1062963 - DNA, 25 bp, Homo sapien
agtgtagagagcaggcaagttttcc

SEQ ID NO: 1062964 - DNA, 25 bp, Homo sapien
aaatagtgtagagagcaggcaagtt

SEQ ID NO: 1062965 - DNA, 25 bp, Homo sapien
ttggaaaatagtgtagagagcaggc

SEQ ID NO: 1062966 - DNA, 25 bp, Homo sapien
gagagcaggcaagttttccatggtc

SEQ ID NO: 1062967 - DNA, 25 bp, Homo sapien
ttgagcactgtttcagcttcaccat

SEQ ID NO: 1062968 - DNA, 25 bp, Homo sapien
gagcactgtttcagcttcaccataa

SEQ ID NO: 1062969 - DNA, 25 bp, Homo sapien
tgagcactgtttcagcttcaccata

SEQ ID NO: 1062970 - DNA, 25 bp, Homo sapien
cttgagcactgtttcagcttcacca

SEQ ID NO: 1062971 - DNA, 25 bp, Homo sapien
ttcagtgtcttcaattagctgcttc

SEQ ID NO: 1062972 - DNA, 25 bp, Homo sapien
tcagtgtcttcaattagctgcttca

SEQ ID NO: 1062973 - DNA, 25 bp, Homo sapien
cagtgtcttcaattagctgcttcat

SEQ ID NO: 1062974 - DNA, 25 bp, Homo sapien
tttcagtgtcttcaattagctgctt

SEQ ID NO: 1062975 - DNA, 25 bp, Homo sapien
ataaaggccccatagtctgtcacca

SEQ ID NO: 1062976 - DNA, 25 bp, Homo sapien
taaaggccccatagtctgtcaccat

SEQ ID NO: 1062977 - DNA, 25 bp, Homo sapien
gataaaggccccatagtctgtcacc

SEQ ID NO: 1062978 - DNA, 25 bp, Homo sapien
tgataaaggccccatagtctgtcac

SEQ ID NO: 1062979 - DNA, 25 bp, Homo sapien
aagaagaaataacgtaaagcagagg

SEQ ID NO: 1062980 - DNA, 25 bp, Homo sapien
ggccaataagcttcacccacacttt

SEQ ID NO: 1062981 - DNA, 25 bp, Homo sapien
gacatatgagttcgatggaccagac

SEQ ID NO: 1062982 - DNA, 25 bp, Homo sapien
tccacccgacaggatgacatatgag

SEQ ID NO: 1062983 - DNA, 25 bp, Homo sapien
tccaacatctactatctcagagggc

SEQ ID NO: 1062984 - DNA, 25 bp, Homo sapien
tcccagtcccttgattgacaacctt

SEQ ID NO: 1062985 - DNA, 25 bp, Homo sapien
attgttgggatcaaggtctttccca

SEQ ID NO: 1062986 - DNA, 25 bp, Homo sapien
cattgttgggatcaaggtctttccc

SEQ ID NO: 1062987 - DNA, 25 bp, Homo sapien
atgacataattgtcattgagcgtac

SEQ ID NO: 1062988 - DNA, 25 bp, Homo sapien
aaattccttcaaattcaaagtgatt

SEQ ID NO: 1062989 - DNA, 25 bp, Homo sapien
aattccttcaaattcaaagtgattt

SEQ ID NO: 1062990 - DNA, 25 bp, Homo sapien
aatgacataattgtcattgagcgta

SEQ ID NO: 1062991 - DNA, 25 bp, Homo sapien
gtgttcaagacagcctcaagggtga

SEQ ID NO: 1062992 - DNA, 25 bp, Homo sapien
tacagccacacttcttgcaggtagt

SEQ ID NO: 1062993 - DNA, 25 bp, Homo sapien
ctcaagggtgatcttctgcccagtg

SEQ ID NO: 1062994 - DNA, 25 bp, Homo sapien
tgtaatcctggaaggatcgcctccg

SEQ ID NO: 1062995 - DNA, 25 bp, Homo sapien
ctcagcaagtgaatctttccccaag

SEQ ID NO: 1062996 - DNA, 25 bp, Homo sapien
ttctcagcaagtgaatctttcccca

SEQ ID NO: 1062997 - DNA, 25 bp, Homo sapien
cagcaagtgaatctttccccaagtc

SEQ ID NO: 1062998 - DNA, 25 bp, Homo sapien
ctcttctcagcaagtgaatctttcc

SEQ ID NO: 1062999 - DNA, 25 bp, Homo sapien
cctcatcaggtatcagagagtattt

SEQ ID NO: 1063000 - DNA, 25 bp, Homo sapien
cttcctcatcaggtatcagagagta

SEQ ID NO: 1063001 - DNA, 25 bp, Homo sapien
tcttcctcatcaggtatcagagagt

SEQ ID NO: 1063002 - DNA, 25 bp, Homo sapien
tcctcatcaggtatcagagagtatt

SEQ ID NO: 1063003 - DNA, 25 bp, Homo sapien
acaggtgtgtactgctgcatgaggc

SEQ ID NO: 1063004 - DNA, 25 bp, Homo sapien
ggtgtgtactgctgcatgaggcttt

SEQ ID NO: 1063005 - DNA, 25 bp, Homo sapien
tgctgcatgaggcttttcagatttt

SEQ ID NO: 1063006 - DNA, 25 bp, Homo sapien
tactgctgcatgaggcttttcagat

SEQ ID NO: 1063007 - DNA, 25 bp, Homo sapien
gtcctaggtggcctgactacactgc

SEQ ID NO: 1063008 - DNA, 25 bp, Homo sapien
gctgactagtcctgaaacaagtgtc

SEQ ID NO: 1063009 - DNA, 25 bp, Homo sapien
tcaggagcatggactgctaaaggca

SEQ ID NO: 1063010 - DNA, 25 bp, Homo sapien
gattagccgcttgagtgtaggtacc

SEQ ID NO: 1063011 - DNA, 25 bp, Homo sapien
tttccttatcctgggctatttctgg

SEQ ID NO: 1063012 - DNA, 25 bp, Homo sapien
cacaggtagttagtgcatgtattcc

SEQ ID NO: 1063013 - DNA, 25 bp, Homo sapien
catgtattcctattaagtaccaggc

SEQ ID NO: 1063014 - DNA, 25 bp, Homo sapien
tggtggttcctcaacaggtctacca

SEQ ID NO: 1063015 - DNA, 25 bp, Homo sapien
acaacactttatgagaaaggcctgg

SEQ ID NO: 1063016 - DNA, 25 bp, Homo sapien
caaacaacactttatgagaaaggcc

SEQ ID NO: 1063017 - DNA, 25 bp, Homo sapien
caacactttatgagaaaggcctggc

SEQ ID NO: 1063018 - DNA, 25 bp, Homo sapien
aacaacactttatgagaaaggcctg

SEQ ID NO: 1063019 - DNA, 25 bp, Homo sapien
catcttacctagaacacattcatgg

SEQ ID NO: 1063020 - DNA, 25 bp, Homo sapien
gtcagtcaagatggatacagaccat

SEQ ID NO: 1063021 - DNA, 25 bp, Homo sapien
ttaccagtaacctccacgtggccaa

SEQ ID NO: 1063022 - DNA, 25 bp, Homo sapien
caaatctagtggtcaattattgggt

SEQ ID NO: 1063023 - DNA, 25 bp, Homo sapien
ttgcctgtatcactctcagagtctg

SEQ ID NO: 1063024 - DNA, 25 bp, Homo sapien
gtcagatgacttcctatctctatgt

SEQ ID NO: 1063025 - DNA, 25 bp, Homo sapien
tgccctcttgcctgtatcactctca

SEQ ID NO: 1063026 - DNA, 25 bp, Homo sapien
tgtcttttgatgtgtgccttgccct

SEQ ID NO: 1063027 - DNA, 25 bp, Homo sapien
tataagtgatctcccaagaaggcag

SEQ ID NO: 1063028 - DNA, 25 bp, Homo sapien
tccagaattcaggttcagggcacag

SEQ ID NO: 1063029 - DNA, 25 bp, Homo sapien
tacactgaaagctcttgggtctggc

SEQ ID NO: 1063030 - DNA, 25 bp, Homo sapien
gttcacttgcaaagggaccaggagt

SEQ ID NO: 1063031 - DNA, 25 bp, Homo sapien
caatagccctgtggaatgcctaggg

SEQ ID NO: 1063032 - DNA, 25 bp, Homo sapien
gagcacactaagagacaggcctcat

SEQ ID NO: 1063033 - DNA, 25 bp, Homo sapien
gcgagagaacttaagggctttgacc

SEQ ID NO: 1063034 - DNA, 25 bp, Homo sapien
gatggcagtctaccttggataaagg

SEQ ID NO: 1063035 - DNA, 25 bp, Homo sapien
cacttggcccaatagtagcttattc

SEQ ID NO: 1063036 - DNA, 25 bp, Homo sapien
cactgacttgctatggcactgctgt

SEQ ID NO: 1063037 - DNA, 25 bp, Homo sapien
catacccaggcctgagagttattca

SEQ ID NO: 1063038 - DNA, 25 bp, Homo sapien
caaacagaactaagcgcaagactga

SEQ ID NO: 1063039 - DNA, 25 bp, Homo sapien
ccttgggaggtagtatagctgagca

SEQ ID NO: 1063040 - DNA, 25 bp, Homo sapien
gcatgtgcagagtacctagcttcca

SEQ ID NO: 1063041 - DNA, 25 bp, Homo sapien
cagcaagcactatgtagccaggtac

SEQ ID NO: 1063042 - DNA, 25 bp, Homo sapien
tacttggttgcaggacacttaggac

SEQ ID NO: 1063043 - DNA, 25 bp, Homo sapien
aagacttgctggttctatggcaggc

SEQ ID NO: 1063044 - DNA, 25 bp, Homo sapien
caaagaccccatggaccaagggcat

SEQ ID NO: 1063045 - DNA, 25 bp, Homo sapien
agcaaccatagacttagaccctgaa

SEQ ID NO: 1063046 - DNA, 25 bp, Homo sapien
tgggtcagcagagcttctactcagc

SEQ ID NO: 1063047 - DNA, 25 bp, Homo sapien
ctacaggcagcagtccacactgagg

SEQ ID NO: 1063048 - DNA, 25 bp, Homo sapien
cagctgctccagaacagctgggcat

SEQ ID NO: 1063049 - DNA, 25 bp, Homo sapien
tctgcagctgctccagaacagctgg

SEQ ID NO: 1063050 - DNA, 25 bp, Homo sapien
ctctgcagctgctccagaacagctg

SEQ ID NO: 1063051 - DNA, 25 bp, Homo sapien
tgcagctgctccagaacagctgggc

SEQ ID NO: 1063052 - DNA, 25 bp, Homo sapien
ggcttggacacgctcaggccaagcg

SEQ ID NO: 1063053 - DNA, 25 bp, Homo sapien
cagcgagagtgtgggaggctgtttc

SEQ ID NO: 1063054 - DNA, 25 bp, Homo sapien
acacgctcaggccaagcggcgtcat

SEQ ID NO: 1063055 - DNA, 25 bp, Homo sapien
cagcagcgagagtgtgggaggctgt

SEQ ID NO: 1063056 - DNA, 25 bp, Homo sapien
ttaggatcgaggaagggcagccacc

SEQ ID NO: 1063057 - DNA, 25 bp, Homo sapien
agggcagcataagggaccaggaact

SEQ ID NO: 1063058 - DNA, 25 bp, Homo sapien
gccccagggcagcataagggaccag

SEQ ID NO: 1063059 - DNA, 25 bp, Homo sapien
cataagggaccaggaactctgtcac

SEQ ID NO: 1063060 - DNA, 25 bp, Homo sapien
ggctgtccttcctcacaaagcgtgc

SEQ ID NO: 1063061 - DNA, 25 bp, Homo sapien
gctttgagccctcctatcccttggg

SEQ ID NO: 1063062 - DNA, 25 bp, Homo sapien
gaggactcagatgtgtgccggcttt

SEQ ID NO: 1063063 - DNA, 25 bp, Homo sapien
caaagcgtgcatgggatttcagagc

SEQ ID NO: 1063064 - DNA, 25 bp, Homo sapien
gaggacatggataaagagcttcatt

SEQ ID NO: 1063065 - DNA, 25 bp, Homo sapien
ttttaccccagctatctgaggggac

SEQ ID NO: 1063066 - DNA, 25 bp, Homo sapien
cttcatttcttggtgtcctggccag

SEQ ID NO: 1063067 - DNA, 25 bp, Homo sapien
tttactcccagatttgaacctcctg

SEQ ID NO: 1063068 - DNA, 25 bp, Homo sapien
gctgggtccgggtgactcctcctct

SEQ ID NO: 1063069 - DNA, 25 bp, Homo sapien
ggctgggtccgggtgactcctcctc

SEQ ID NO: 1063070 - DNA, 25 bp, Homo sapien
ctgggtccgggtgactcctcctctc

SEQ ID NO: 1063071 - DNA, 25 bp, Homo sapien
tgggtccgggtgactcctcctctct

SEQ ID NO: 1063072 - DNA, 25 bp, Homo sapien
tggggcaggtgcgccaggagggacc

SEQ ID NO: 1063073 - DNA, 25 bp, Homo sapien
ctggggcaggtgcgccaggagggac

SEQ ID NO: 1063074 - DNA, 25 bp, Homo sapien
ctaccgaagccgctcgacgctttcc

SEQ ID NO: 1063075 - DNA, 25 bp, Homo sapien
accgaagccgctcgacgctttccgg

SEQ ID NO: 1063076 - DNA, 25 bp, Homo sapien
cgaagccgctcgacgctttccggcg

SEQ ID NO: 1063077 - DNA, 25 bp, Homo sapien
gaagccgctcgacgctttccggcgg

SEQ ID NO: 1063078 - DNA, 25 bp, Homo sapien
gcgcggacctcgggatccgggtgcc

SEQ ID NO: 1063079 - DNA, 25 bp, Homo sapien
cgcggacctcgggatccgggtgccg

SEQ ID NO: 1063080 - DNA, 25 bp, Homo sapien
gcagggagcaggctcccaggcaggc

SEQ ID NO: 1063081 - DNA, 25 bp, Homo sapien
ggagcaggctcccaggcaggccccc

SEQ ID NO: 1063082 - DNA, 25 bp, Homo sapien
tgagcagggagcaggctcccaggca

SEQ ID NO: 1063083 - DNA, 25 bp, Homo sapien
agggagcaggctcccaggcaggccc

SEQ ID NO: 1063084 - DNA, 25 bp, Homo sapien
tacagaacagaggttggcctcccca

SEQ ID NO: 1063085 - DNA, 25 bp, Homo sapien
cactcgagggcagctaagaaagtcc

SEQ ID NO: 1063086 - DNA, 25 bp, Homo sapien
cacacacgaaaaatggaggcctaat

SEQ ID NO: 1063087 - DNA, 25 bp, Homo sapien
aaagcgagtcccgagattcagcagc

SEQ ID NO: 1063088 - DNA, 25 bp, Homo sapien
agcactcacgatatgccaggaactg

SEQ ID NO: 1063089 - DNA, 25 bp, Homo sapien
cacaaggagcactcacgatatgcca

SEQ ID NO: 1063090 - DNA, 25 bp, Homo sapien
tgttagcaataattcccacaaggag

SEQ ID NO: 1063091 - DNA, 25 bp, Homo sapien
agcattgtgagaaaggccctgttac

SEQ ID NO: 1063092 - DNA, 25 bp, Homo sapien
agttcaccttcagcccagttccaat

SEQ ID NO: 1063093 - DNA, 25 bp, Homo sapien
aacaactccgtaactggctgagccg

SEQ ID NO: 1063094 - DNA, 25 bp, Homo sapien
acaactccgtaactggctgagccgc

SEQ ID NO: 1063095 - DNA, 25 bp, Homo sapien
caactccgtaactggctgagccgcc

SEQ ID NO: 1063096 - DNA, 25 bp, Homo sapien
caccagcagtcaggaacaggacact

SEQ ID NO: 1063097 - DNA, 25 bp, Homo sapien
taagaaggccctcgtggccaaagct

SEQ ID NO: 1063098 - DNA, 25 bp, Homo sapien
ggttttcatcctaagagcggtgggc

SEQ ID NO: 1063099 - DNA, 25 bp, Homo sapien
tcagcggtgagtatgaggtcagaca

SEQ ID NO: 1063100 - DNA, 25 bp, Homo sapien
gcgctaggcaggagcacactgttcc

SEQ ID NO: 1063101 - DNA, 25 bp, Homo sapien
tgcgctaggcaggagcacactgttc

SEQ ID NO: 1063102 - DNA, 25 bp, Homo sapien
ggcaggagcacactgttccccagac

SEQ ID NO: 1063103 - DNA, 25 bp, Homo sapien
gagcacactgttccccagacaccag

SEQ ID NO: 1063104 - DNA, 25 bp, Homo sapien
gggcactgtcactcttccctctccc

SEQ ID NO: 1063105 - DNA, 25 bp, Homo sapien
ggagggcactgtcactcttccctct

SEQ ID NO: 1063106 - DNA, 25 bp, Homo sapien
tgcgggagggcactgtcactcttcc

SEQ ID NO: 1063107 - DNA, 25 bp, Homo sapien
ctgcgggagggcactgtcactcttc

SEQ ID NO: 1063108 - DNA, 25 bp, Homo sapien
acaggatgcagggggcagagccgca

SEQ ID NO: 1063109 - DNA, 25 bp, Homo sapien
atgcagggggcagagccgcagaggc

SEQ ID NO: 1063110 - DNA, 25 bp, Homo sapien
ggatgcagggggcagagccgcagag

SEQ ID NO: 1063111 - DNA, 25 bp, Homo sapien
ctgcacaggatgcagggggcagagc

SEQ ID NO: 1063112 - DNA, 25 bp, Homo sapien
agaacgtgaagatgaggcggctcac

SEQ ID NO: 1063113 - DNA, 25 bp, Homo sapien
tccacgcccgggctcagcataatga

SEQ ID NO: 1063114 - DNA, 25 bp, Homo sapien
cggctcacggtggagttgcggctgg

SEQ ID NO: 1063115 - DNA, 25 bp, Homo sapien
ttgtagagctgactctccacgcccg

SEQ ID NO: 1063116 - DNA, 25 bp, Homo sapien
atgcggtagacagcgcggtagccaa

SEQ ID NO: 1063117 - DNA, 25 bp, Homo sapien
cgtggcgaagcacatgcggtagaca

SEQ ID NO: 1063118 - DNA, 25 bp, Homo sapien
aagaaggccgccgtggcgaagcaca

SEQ ID NO: 1063119 - DNA, 25 bp, Homo sapien
ggtcccggctgctgctcacgcagag

SEQ ID NO: 1063120 - DNA, 25 bp, Homo sapien
caggatcaggaacttaaagaaccaa

SEQ ID NO: 1063121 - DNA, 25 bp, Homo sapien
tagaaggcacccacggtgaggccca

SEQ ID NO: 1063122 - DNA, 25 bp, Homo sapien
gaatgtagaaggcacccacggtgag

SEQ ID NO: 1063123 - DNA, 25 bp, Homo sapien
tgttggtgaaggagccgtcaggaat

SEQ ID NO: 1063124 - DNA, 25 bp, Homo sapien
tgaaggagccgtcaggaatgtagaa

SEQ ID NO: 1063125 - DNA, 25 bp, Homo sapien
ggtggggagcgaggacctagccagc

SEQ ID NO: 1063126 - DNA, 25 bp, Homo sapien
aggagcccacgacgccgaagtagaa

SEQ ID NO: 1063127 - DNA, 25 bp, Homo sapien
gcccacgacgccgaagtagaaccag

SEQ ID NO: 1063128 - DNA, 25 bp, Homo sapien
cccacgacgccgaagtagaaccaga

SEQ ID NO: 1063129 - DNA, 25 bp, Homo sapien
aggaaggagcccacgacgccgaagt

SEQ ID NO: 1063130 - DNA, 25 bp, Homo sapien
gagtgcgcaaagtcgatgagcagca

SEQ ID NO: 1063131 - DNA, 25 bp, Homo sapien
taccaggcacgggaatcgcactcct

SEQ ID NO: 1063132 - DNA, 25 bp, Homo sapien
aggcacgggaatcgcactcctcggc

SEQ ID NO: 1063133 - DNA, 25 bp, Homo sapien
ccagccaccgctggttccaggagtg

SEQ ID NO: 1063134 - DNA, 25 bp, Homo sapien
agtgtagtacatgaacatcagcgcc

SEQ ID NO: 1063135 - DNA, 25 bp, Homo sapien
gacagcagcgatggacacgcagaca

SEQ ID NO: 1063136 - DNA, 25 bp, Homo sapien
cagccgctgggctcagtgtagtaca

SEQ ID NO: 1063137 - DNA, 25 bp, Homo sapien
ggccgcgatcgacagcaagtagaag

SEQ ID NO: 1063138 - DNA, 25 bp, Homo sapien
tggcaagaggacccctggtaagacc

SEQ ID NO: 1063139 - DNA, 25 bp, Homo sapien
ctggcaagaggacccctggtaagac

SEQ ID NO: 1063140 - DNA, 25 bp, Homo sapien
tgtagagggtgatgaccgaggcctg

SEQ ID NO: 1063141 - DNA, 25 bp, Homo sapien
tagggctgaccaggtgacaaacatg

SEQ ID NO: 1063142 - DNA, 25 bp, Homo sapien
cagggatactggatagggctgacca

SEQ ID NO: 1063143 - DNA, 25 bp, Homo sapien
agggtgatgaccgaggcctgcagca

SEQ ID NO: 1063144 - DNA, 25 bp, Homo sapien
gggcctgccacaactgtctcgttgc

SEQ ID NO: 1063145 - DNA, 25 bp, Homo sapien
aactgtctcgttgcccagctgggtt

SEQ ID NO: 1063146 - DNA, 25 bp, Homo sapien
gatgatgaggcccacaatgctcggg

SEQ ID NO: 1063147 - DNA, 25 bp, Homo sapien
accactgggtctcatagccctcggg

SEQ ID NO: 1063148 - DNA, 25 bp, Homo sapien
cacagccacatccactacagtggag

SEQ ID NO: 1063149 - DNA, 25 bp, Homo sapien
gcacctactaagatgcccctttgaa

SEQ ID NO: 1063150 - DNA, 25 bp, Homo sapien
cccagtatgcaggaaagggctgtga

SEQ ID NO: 1063151 - DNA, 25 bp, Homo sapien
ccctttgaaaagaacctctatgtga

SEQ ID NO: 1063152 - DNA, 25 bp, Homo sapien
tatagcccttcaacaatccaatgag

SEQ ID NO: 1063153 - DNA, 25 bp, Homo sapien
tacaaataacttactacttgccaag

SEQ ID NO: 1063154 - DNA, 25 bp, Homo sapien
tggattacaaataacttactacttg

SEQ ID NO: 1063155 - DNA, 25 bp, Homo sapien
caaataacttactacttgccaagtt

SEQ ID NO: 1063156 - DNA, 25 bp, Homo sapien
tcaggtggttttaccaatggcctcc

SEQ ID NO: 1063157 - DNA, 25 bp, Homo sapien
ccccttgctgtgagtcagtgggtcc

SEQ ID NO: 1063158 - DNA, 25 bp, Homo sapien
caaattgagaaatcaccccttgctg

SEQ ID NO: 1063159 - DNA, 25 bp, Homo sapien
aaaggagagctggattccagccccg

SEQ ID NO: 1063160 - DNA, 25 bp, Homo sapien
caggctgttcacctgccggtggtct

SEQ ID NO: 1063161 - DNA, 25 bp, Homo sapien
gctgttcacctgccggtggtctgag

SEQ ID NO: 1063162 - DNA, 25 bp, Homo sapien
ggctgttcacctgccggtggtctga

SEQ ID NO: 1063163 - DNA, 25 bp, Homo sapien
tgttcacctgccggtggtctgagga

SEQ ID NO: 1063164 - DNA, 25 bp, Homo sapien
tggcgtctagcataggtgggcactc

SEQ ID NO: 1063165 - DNA, 25 bp, Homo sapien
gagtagctgtaggtgacgccgtcct

SEQ ID NO: 1063166 - DNA, 25 bp, Homo sapien
gtcctgctcgttgtcaaaggcccgg

SEQ ID NO: 1063167 - DNA, 25 bp, Homo sapien
gtcatcatgacgtgcagtgaggcca

SEQ ID NO: 1063168 - DNA, 25 bp, Homo sapien
cttccccatgagcctggtgcccagt

SEQ ID NO: 1063169 - DNA, 25 bp, Homo sapien
tggtgcccagtctggtgacttccat

SEQ ID NO: 1063170 - DNA, 25 bp, Homo sapien
ttccccatgagcctggtgcccagtc

SEQ ID NO: 1063171 - DNA, 25 bp, Homo sapien
agcctggtgcccagtctggtgactt

SEQ ID NO: 1063172 - DNA, 25 bp, Homo sapien
gctggcacagatcttcacccacacg

SEQ ID NO: 1063173 - DNA, 25 bp, Homo sapien
tcttcacccacacggcggtccacgt

SEQ ID NO: 1063174 - DNA, 25 bp, Homo sapien
ggcggtccacgtgctgatcatcttc

SEQ ID NO: 1063175 - DNA, 25 bp, Homo sapien
cacagatcttcacccacacggcggt

SEQ ID NO: 1063176 - DNA, 25 bp, Homo sapien
cagctgaagtcgcggttgcgcagga

SEQ ID NO: 1063177 - DNA, 25 bp, Homo sapien
gctgaagtcgcggttgcgcaggagg

SEQ ID NO: 1063178 - DNA, 25 bp, Homo sapien
ctgaagtcgcggttgcgcaggagga

SEQ ID NO: 1063179 - DNA, 25 bp, Homo sapien
tcagctgaagtcgcggttgcgcagg

SEQ ID NO: 1063180 - DNA, 25 bp, Homo sapien
cacgcactggcttgtttattagaaa

SEQ ID NO: 1063181 - DNA, 25 bp, Homo sapien
gaccctgaaggcactacgactagaa

SEQ ID NO: 1063182 - DNA, 25 bp, Homo sapien
tccgagatgctgagtatgggcaaca

SEQ ID NO: 1063183 - DNA, 25 bp, Homo sapien
aagggagccctttcatccgagatgc

SEQ ID NO: 1063184 - DNA, 25 bp, Homo sapien
atattcttctacacattcccctgga

SEQ ID NO: 1063185 - DNA, 25 bp, Homo sapien
ccacgaccactaccctcatccaggc

SEQ ID NO: 1063186 - DNA, 25 bp, Homo sapien
attcttctacacattcccctggatc

SEQ ID NO: 1063187 - DNA, 25 bp, Homo sapien
ctccacgaccactaccctcatccag

SEQ ID NO: 1063188 - DNA, 25 bp, Homo sapien
tctgttggctatagttcaaagcatc

SEQ ID NO: 1063189 - DNA, 25 bp, Homo sapien
ttcttgatgacctagtcccgggagt

SEQ ID NO: 1063190 - DNA, 25 bp, Homo sapien
tgatgacctagtcccgggagttatt

SEQ ID NO: 1063191 - DNA, 25 bp, Homo sapien
ctttctgttggctatagttcaaagc

SEQ ID NO: 1063192 - DNA, 25 bp, Homo sapien
ataccaagtcattagacagactcaa

SEQ ID NO: 1063193 - DNA, 25 bp, Homo sapien
ctataccaagtcattagacagactc

SEQ ID NO: 1063194 - DNA, 25 bp, Homo sapien
tataccaagtcattagacagactca

SEQ ID NO: 1063195 - DNA, 25 bp, Homo sapien
actataccaagtcattagacagact

SEQ ID NO: 1063196 - DNA, 25 bp, Homo sapien
actcagcaatgtcgaaagaaaccag

SEQ ID NO: 1063197 - DNA, 25 bp, Homo sapien
gcaatgtcgaaagaaaccagccggc

SEQ ID NO: 1063198 - DNA, 25 bp, Homo sapien
aaacctggactcagcaatgtcgaaa

SEQ ID NO: 1063199 - DNA, 25 bp, Homo sapien
tgtcgaaagaaaccagccggcgacc

SEQ ID NO: 1063200 - DNA, 25 bp, Homo sapien
gagacccacatcatgaactttcgct

SEQ ID NO: 1063201 - DNA, 25 bp, Homo sapien
tcagcatttaagaagcacttgttgg

SEQ ID NO: 1063202 - DNA, 25 bp, Homo sapien
ggagacccacatcatgaactttcgc

SEQ ID NO: 1063203 - DNA, 25 bp, Homo sapien
agacatgggaaaatgatacgtcagc

SEQ ID NO: 1063204 - DNA, 25 bp, Homo sapien
cctcattgtgttcatgctgagttgg

SEQ ID NO: 1063205 - DNA, 25 bp, Homo sapien
catttccaacatgcaccggcagtca

SEQ ID NO: 1063206 - DNA, 25 bp, Homo sapien
tggaagctagcagagccagtgcatg

SEQ ID NO: 1063207 - DNA, 25 bp, Homo sapien
tccaggcagctcatatcatgcccag

SEQ ID NO: 1063208 - DNA, 25 bp, Homo sapien
ccggcagtcagcgatagcttgtgtg

SEQ ID NO: 1063209 - DNA, 25 bp, Homo sapien
gctctgcgatgaccttgacaccacg

SEQ ID NO: 1063210 - DNA, 25 bp, Homo sapien
ttgacaccacgctcctcagggaggt

SEQ ID NO: 1063211 - DNA, 25 bp, Homo sapien
agcggccatgcagacagactccaca

SEQ ID NO: 1063212 - DNA, 25 bp, Homo sapien
ggccatgcagacagactccacatag

SEQ ID NO: 1063213 - DNA, 25 bp, Homo sapien
gaggcggaaggagccatagtggcca

SEQ ID NO: 1063214 - DNA, 25 bp, Homo sapien
tttgagataatacaccagcttccgg

SEQ ID NO: 1063215 - DNA, 25 bp, Homo sapien
cgatgggaacccttgggacaggctc

SEQ ID NO: 1063216 - DNA, 25 bp, Homo sapien
gccatagtggccatctttgagataa

SEQ ID NO: 1063217 - DNA, 25 bp, Homo sapien
ctgatctgtgagcacacatcatgta

SEQ ID NO: 1063218 - DNA, 25 bp, Homo sapien
cacatcatgtacgtgtccacatgtg

SEQ ID NO: 1063219 - DNA, 25 bp, Homo sapien
gtccacatgtgttctaagcagcagg

SEQ ID NO: 1063220 - DNA, 25 bp, Homo sapien
agctgctgcacacgctctgatctgt

SEQ ID NO: 1063221 - DNA, 25 bp, Homo sapien
ctgtcaaaggcatcgcacatgggac

SEQ ID NO: 1063222 - DNA, 25 bp, Homo sapien
catgggacatagagggtgcagggga

SEQ ID NO: 1063223 - DNA, 25 bp, Homo sapien
aaggcatcgcacatgggacatagag

SEQ ID NO: 1063224 - DNA, 25 bp, Homo sapien
agaggggcggctctgagcagaactc

SEQ ID NO: 1063225 - DNA, 25 bp, Homo sapien
gaagccattgaagctggagctcatg

SEQ ID NO: 1063226 - DNA, 25 bp, Homo sapien
aatcgcctacatccagctcgggcag

SEQ ID NO: 1063227 - DNA, 25 bp, Homo sapien
catggaggacatgtaggcacccatg

SEQ ID NO: 1063228 - DNA, 25 bp, Homo sapien
catggtgtagcagatggtggcaggc

SEQ ID NO: 1063229 - DNA, 25 bp, Homo sapien
ctgagttgagtggtagcagagaggg

SEQ ID NO: 1063230 - DNA, 25 bp, Homo sapien
tctgttaccccaatctgctctttgc

SEQ ID NO: 1063231 - DNA, 25 bp, Homo sapien
gagtgtttgggcataagcaagacca

SEQ ID NO: 1063232 - DNA, 25 bp, Homo sapien
agcaagaccattttgcaggcgggaa

SEQ ID NO: 1063233 - DNA, 25 bp, Homo sapien
acctgactggatgggctgttgagct

SEQ ID NO: 1063234 - DNA, 25 bp, Homo sapien
tggaaagtagacacagatgacccca

SEQ ID NO: 1063235 - DNA, 25 bp, Homo sapien
gacttggaggccataagggccaaag

SEQ ID NO: 1063236 - DNA, 25 bp, Homo sapien
caagacttggaggccataagggcca

SEQ ID NO: 1063237 - DNA, 25 bp, Homo sapien
ctatggaaagtagacacagatgacc

SEQ ID NO: 1063238 - DNA, 25 bp, Homo sapien
aggccaccaggctgttatgctggct

SEQ ID NO: 1063239 - DNA, 25 bp, Homo sapien
ccaggctgttatgctggctctggag

SEQ ID NO: 1063240 - DNA, 25 bp, Homo sapien
tctggagagaactagtgaggggctg

SEQ ID NO: 1063241 - DNA, 25 bp, Homo sapien
caccaggctgttatgctggctctgg

SEQ ID NO: 1063242 - DNA, 25 bp, Homo sapien
ttgcatctttaatccaatcaagttg

SEQ ID NO: 1063243 - DNA, 25 bp, Homo sapien
cagtattaaccatggtaagtccacc

SEQ ID NO: 1063244 - DNA, 25 bp, Homo sapien
ttctccagcccgctgacccaaatgt

SEQ ID NO: 1063245 - DNA, 25 bp, Homo sapien
cccgctgacccaaatgttaatcttc

SEQ ID NO: 1063246 - DNA, 25 bp, Homo sapien
tcaactaataacataaggtgatgag

SEQ ID NO: 1063247 - DNA, 25 bp, Homo sapien
aactaataacataaggtgatgagtc

SEQ ID NO: 1063248 - DNA, 25 bp, Homo sapien
taataacataaggtgatgagtctgg

SEQ ID NO: 1063249 - DNA, 25 bp, Homo sapien
aagtcaactaataacataaggtgat

SEQ ID NO: 1063250 - DNA, 25 bp, Homo sapien
cactcattcgtaagaggtgctaaaa

SEQ ID NO: 1063251 - DNA, 25 bp, Homo sapien
tcagacactcattcgtaagaggtgc

SEQ ID NO: 1063252 - DNA, 25 bp, Homo sapien
gctgctcagacactcattcgtaaga

SEQ ID NO: 1063253 - DNA, 25 bp, Homo sapien
gacactcattcgtaagaggtgctaa

SEQ ID NO: 1063254 - DNA, 25 bp, Homo sapien
tccagattcagactaggcccttcca

SEQ ID NO: 1063255 - DNA, 25 bp, Homo sapien
caatgctgcgggatgtaaaacacac

SEQ ID NO: 1063256 - DNA, 25 bp, Homo sapien
taaggcacacagtgggacaagcaga

SEQ ID NO: 1063257 - DNA, 25 bp, Homo sapien
tagaaccactgaggaagcagacagt

SEQ ID NO: 1063258 - DNA, 25 bp, Homo sapien
gacctaactgtacacagcaggatgc

SEQ ID NO: 1063259 - DNA, 25 bp, Homo sapien
cagaaagacgagagaaggtgcctgt

SEQ ID NO: 1063260 - DNA, 25 bp, Homo sapien
ggttaccttccagaaagacgagaga

SEQ ID NO: 1063261 - DNA, 25 bp, Homo sapien
ctgtctcctccacgacctaactgta

SEQ ID NO: 1063262 - DNA, 25 bp, Homo sapien
ggtgtcagtccacagtcacggctca

SEQ ID NO: 1063263 - DNA, 25 bp, Homo sapien
gcaattcacagatagggctcccact

SEQ ID NO: 1063264 - DNA, 25 bp, Homo sapien
tgggtcactgaggtaaagcacactg

SEQ ID NO: 1063265 - DNA, 25 bp, Homo sapien
tttcatctgaggacaccccagtggg

SEQ ID NO: 1063266 - DNA, 25 bp, Homo sapien
aaagctgaagtctcgcctgctaggg

SEQ ID NO: 1063267 - DNA, 25 bp, Homo sapien
gagagcctctcgcattctgaaagga

SEQ ID NO: 1063268 - DNA, 25 bp, Homo sapien
tgcaggctggacaaacaggtactaa

SEQ ID NO: 1063269 - DNA, 25 bp, Homo sapien
taacgtgaggagatattggcatgac

SEQ ID NO: 1063270 - DNA, 25 bp, Homo sapien
gattcttcgtatggttgttattgct

SEQ ID NO: 1063271 - DNA, 25 bp, Homo sapien
gtctgagtttgctagattcttcgta

SEQ ID NO: 1063272 - DNA, 25 bp, Homo sapien
gaagtaaagtctgagtttgctagat

SEQ ID NO: 1063273 - DNA, 25 bp, Homo sapien
gctagattcttcgtatggttgttat

SEQ ID NO: 1063274 - DNA, 25 bp, Homo sapien
tggtgtgggccgcaagcatacttca

SEQ ID NO: 1063275 - DNA, 25 bp, Homo sapien
acatagtcttgaagaattgcgcagt

SEQ ID NO: 1063276 - DNA, 25 bp, Homo sapien
gcaagcatacttcatgtgtgtaatg

SEQ ID NO: 1063277 - DNA, 25 bp, Homo sapien
tcttgaagaattgcgcagtggtgtg

SEQ ID NO: 1063278 - DNA, 25 bp, Homo sapien
taaaataccgtgaaatcaggcaggg

SEQ ID NO: 1063279 - DNA, 25 bp, Homo sapien
tactgtcttcctgaacttgggcaag

SEQ ID NO: 1063280 - DNA, 25 bp, Homo sapien
ggcaagtgatttaacccgtcagtgc

SEQ ID NO: 1063281 - DNA, 25 bp, Homo sapien
tcagaggttaggtgaacgacagcat

SEQ ID NO: 1063282 - DNA, 25 bp, Homo sapien
tctggtaatctgcagggcttttgct

SEQ ID NO: 1063283 - DNA, 25 bp, Homo sapien
gaggtgatgctcaggtactaatgtc

SEQ ID NO: 1063284 - DNA, 25 bp, Homo sapien
ctcagtatgtgattggaaataaagc

SEQ ID NO: 1063285 - DNA, 25 bp, Homo sapien
tcaggtactaatgtctcatggtccc

SEQ ID NO: 1063286 - DNA, 25 bp, Homo sapien
ggcagctgtacttccttcaagaaga

SEQ ID NO: 1063287 - DNA, 25 bp, Homo sapien
aaatgaggacatgtaggtgcccatg

SEQ ID NO: 1063288 - DNA, 25 bp, Homo sapien
aaccgcctatgttcagcttgggcag

SEQ ID NO: 1063289 - DNA, 25 bp, Homo sapien
ccagacaaccgcctatgttcagctt

SEQ ID NO: 1063290 - DNA, 25 bp, Homo sapien
tgtttcaatgcctgtagctgcgacc

SEQ ID NO: 1063291 - DNA, 25 bp, Homo sapien
cgtttacagtgcaactctccgggag

SEQ ID NO: 1063292 - DNA, 25 bp, Homo sapien
catttgagagttgagtgttccgtcc

SEQ ID NO: 1063293 - DNA, 25 bp, Homo sapien
tgtctaatggcagttccggccccaa

SEQ ID NO: 1063294 - DNA, 25 bp, Homo sapien
tccctgtgccagtccgagaagtgtt

SEQ ID NO: 1063295 - DNA, 25 bp, Homo sapien
ataatagtttttcctgccaccggag

SEQ ID NO: 1063296 - DNA, 25 bp, Homo sapien
tacttgttgatggtgtgtccctccc

SEQ ID NO: 1063297 - DNA, 25 bp, Homo sapien
tgacaggtcagtgacatggccctct

SEQ ID NO: 1063298 - DNA, 25 bp, Homo sapien
ggctgccatgacctgtgattgagcc

SEQ ID NO: 1063299 - DNA, 25 bp, Homo sapien
gctgccatgacctgtgattgagcca

SEQ ID NO: 1063300 - DNA, 25 bp, Homo sapien
ctgccatgacctgtgattgagccac

SEQ ID NO: 1063301 - DNA, 25 bp, Homo sapien
tgtgttaggccgtctttgatgctaa

SEQ ID NO: 1063302 - DNA, 25 bp, Homo sapien
cacggaccctccagatgatcatagt

SEQ ID NO: 1063303 - DNA, 25 bp, Homo sapien
tagtcaatatcacgtggagcaaaag

SEQ ID NO: 1063304 - DNA, 25 bp, Homo sapien
cagcagaggcaccagacgtgtgtgt

SEQ ID NO: 1063305 - DNA, 25 bp, Homo sapien
cagccacgtttgtagcagttcatca

SEQ ID NO: 1063306 - DNA, 25 bp, Homo sapien
agggagaatagcctggccgacacct

SEQ ID NO: 1063307 - DNA, 25 bp, Homo sapien
gccacaattcgaggaacacctggag

SEQ ID NO: 1063308 - DNA, 25 bp, Homo sapien
gacaatgtccttatgagagacccca

SEQ ID NO: 1063309 - DNA, 25 bp, Homo sapien
tgcagggtggagaaacgacaagcac

SEQ ID NO: 1063310 - DNA, 25 bp, Homo sapien
gcacacgattgtcctggctgggtct

SEQ ID NO: 1063311 - DNA, 25 bp, Homo sapien
tcctgtggcggaagccgttccctta

SEQ ID NO: 1063312 - DNA, 25 bp, Homo sapien
ctggagtaactaccccacaactcat

SEQ ID NO: 1063313 - DNA, 25 bp, Homo sapien
tcctggctctgcgaccgccggacgc

SEQ ID NO: 1063314 - DNA, 25 bp, Homo sapien
tccgcctcctggctctgcgaccgcc

SEQ ID NO: 1063315 - DNA, 25 bp, Homo sapien
gcctcctggctctgcgaccgccgga

SEQ ID NO: 1063316 - DNA, 25 bp, Homo sapien
ctggctctgcgaccgccggacgctc

SEQ ID NO: 1063317 - DNA, 25 bp, Homo sapien
tcctggagctgtgagttcaagaggg

SEQ ID NO: 1063318 - DNA, 25 bp, Homo sapien
gaacaccagggatgagtctcccagt

SEQ ID NO: 1063319 - DNA, 25 bp, Homo sapien
agtctcccagtttcctggagctgtg

SEQ ID NO: 1063320 - DNA, 25 bp, Homo sapien
tggaacaccagggatgagtctccca

SEQ ID NO: 1063321 - DNA, 25 bp, Homo sapien
gtggcacgccgaggcagaagtccca

SEQ ID NO: 1063322 - DNA, 25 bp, Homo sapien
cgcaggtgcagacccggtgctagct

SEQ ID NO: 1063323 - DNA, 25 bp, Homo sapien
cagcagtcggagaccgtgcggttgc

SEQ ID NO: 1063324 - DNA, 25 bp, Homo sapien
ttgcagaagaggtcacagtaacaga

SEQ ID NO: 1063325 - DNA, 25 bp, Homo sapien
gagtctgaggtggacaaagtgaccc

SEQ ID NO: 1063326 - DNA, 25 bp, Homo sapien
acagctcaggtatgcagtctgccgg

SEQ ID NO: 1063327 - DNA, 25 bp, Homo sapien
tatgtgccttatcagcccaagagtg

SEQ ID NO: 1063328 - DNA, 25 bp, Homo sapien
gatgaccctcaccaacccatatgtg

SEQ ID NO: 1063329 - DNA, 25 bp, Homo sapien
acagttgtcccagtacgttcccaag

SEQ ID NO: 1063330 - DNA, 25 bp, Homo sapien
gactggatagatacgacctccatgc

SEQ ID NO: 1063331 - DNA, 25 bp, Homo sapien
tagatacgacctccatgcatacatc

SEQ ID NO: 1063332 - DNA, 25 bp, Homo sapien
tgtcccagtacgttcccaagactgg

SEQ ID NO: 1063333 - DNA, 25 bp, Homo sapien
taataggtgccgactgaagggctgc

SEQ ID NO: 1063334 - DNA, 25 bp, Homo sapien
gcagcacccgactagactctggaag

SEQ ID NO: 1063335 - DNA, 25 bp, Homo sapien
tattacaagatgctgaactgcctcc

SEQ ID NO: 1063336 - DNA, 25 bp, Homo sapien
agcatcctttgagggctctgacacc

SEQ ID NO: 1063337 - DNA, 25 bp, Homo sapien
tatgctgaattgactaagagcatgg

SEQ ID NO: 1063338 - DNA, 25 bp, Homo sapien
tgtttggtattttcagcgcctagga

SEQ ID NO: 1063339 - DNA, 25 bp, Homo sapien
tagtaagcacccaatgaatatttgt

SEQ ID NO: 1063340 - DNA, 25 bp, Homo sapien
tccctgtttcctcataggctgtaaa

SEQ ID NO: 1063341 - DNA, 25 bp, Homo sapien
tttgatcatgtctggatccaccagg

SEQ ID NO: 1063342 - DNA, 25 bp, Homo sapien
gctttgatcatgtctggatccacca

SEQ ID NO: 1063343 - DNA, 25 bp, Homo sapien
ggttgatggctttgatcatgtctgg

SEQ ID NO: 1063344 - DNA, 25 bp, Homo sapien
ttgatggctttgatcatgtctggat

SEQ ID NO: 1063345 - DNA, 25 bp, Homo sapien
acacacagtcaaatctgggtgtagg

SEQ ID NO: 1063346 - DNA, 25 bp, Homo sapien
agcacagcatgcgtgtatacatgca

SEQ ID NO: 1063347 - DNA, 25 bp, Homo sapien
acgcacagtggctgagcgcacacac

SEQ ID NO: 1063348 - DNA, 25 bp, Homo sapien
gaagtcacagatctgccgaggctca

SEQ ID NO: 1063349 - DNA, 25 bp, Homo sapien
atgttcatgaccgaggaagatgggc

SEQ ID NO: 1063350 - DNA, 25 bp, Homo sapien
cagaaggcgctgtggttcccagcct

SEQ ID NO: 1063351 - DNA, 25 bp, Homo sapien
gtgcccaggcggtagcgaatgccct

SEQ ID NO: 1063352 - DNA, 25 bp, Homo sapien
gtcatgccccagaaggcgctgtggt

SEQ ID NO: 1063353 - DNA, 25 bp, Homo sapien
gagctgatgccaagaccacgaaatt

SEQ ID NO: 1063354 - DNA, 25 bp, Homo sapien
ttagtgcctcccaggtatcaggtgg

SEQ ID NO: 1063355 - DNA, 25 bp, Homo sapien
caagataaaggttgccctgtctgcc

SEQ ID NO: 1063356 - DNA, 25 bp, Homo sapien
gatggacaaatgctccggcacatgt

SEQ ID NO: 1063357 - DNA, 25 bp, Homo sapien
ggccacttctcagaggcctcgaagg

SEQ ID NO: 1063358 - DNA, 25 bp, Homo sapien
tcatgaatcaggttgggccacttct

SEQ ID NO: 1063359 - DNA, 25 bp, Homo sapien
gccttggtcaagaggctcatgaatc

SEQ ID NO: 1063360 - DNA, 25 bp, Homo sapien
cttctcagaggcctcgaaggctgtg

SEQ ID NO: 1063361 - DNA, 25 bp, Homo sapien
atggattgagacacgatcggatgcc

SEQ ID NO: 1063362 - DNA, 25 bp, Homo sapien
attgagacacgatcggatgccacag

SEQ ID NO: 1063363 - DNA, 25 bp, Homo sapien
gagaatggattgagacacgatcgga

SEQ ID NO: 1063364 - DNA, 25 bp, Homo sapien
ggattgagacacgatcggatgccac

SEQ ID NO: 1063365 - DNA, 25 bp, Homo sapien
ggaaccaccaggcaccatcgagacg

SEQ ID NO: 1063366 - DNA, 25 bp, Homo sapien
aggcaccatcgagacgcccaccgcg

SEQ ID NO: 1063367 - DNA, 25 bp, Homo sapien
catcgagacgcccaccgcggcagcc

SEQ ID NO: 1063368 - DNA, 25 bp, Homo sapien
aggaaccaccaggcaccatcgagac

SEQ ID NO: 1063369 - DNA, 25 bp, Homo sapien
actcagtgcatcatggcccaggcca

SEQ ID NO: 1063370 - DNA, 25 bp, Homo sapien
ctcagtgcatcatggcccaggccat

SEQ ID NO: 1063371 - DNA, 25 bp, Homo sapien
agactcagtgcatcatggcccaggc

SEQ ID NO: 1063372 - DNA, 25 bp, Homo sapien
aaagactcagtgcatcatggcccag

SEQ ID NO: 1063373 - DNA, 25 bp, Homo sapien
cattgttattaacatagctgttggg

SEQ ID NO: 1063374 - DNA, 25 bp, Homo sapien
cgaggcggtagacaggagtgacctg

SEQ ID NO: 1063375 - DNA, 25 bp, Homo sapien
ccatggctcggctgtgcatcataca

SEQ ID NO: 1063376 - DNA, 25 bp, Homo sapien
agggccagcctcgtctcgttcacgg

SEQ ID NO: 1063377 - DNA, 25 bp, Homo sapien
cttggacagggccattctccatcag

SEQ ID NO: 1063378 - DNA, 25 bp, Homo sapien
caagcaggcacaagcttctggaacc

SEQ ID NO: 1063379 - DNA, 25 bp, Homo sapien
cctactggacatgctgctgaatgct

SEQ ID NO: 1063380 - DNA, 25 bp, Homo sapien
tactgtgcccactctcaagcaggca

SEQ ID NO: 1063381 - DNA, 25 bp, Homo sapien
cagatgtcaaggtagggtccactca

SEQ ID NO: 1063382 - DNA, 25 bp, Homo sapien
gggtcccatgccggcggtatctctc

SEQ ID NO: 1063383 - DNA, 25 bp, Homo sapien
tcccaaggctcactggcgtgtggct

SEQ ID NO: 1063384 - DNA, 25 bp, Homo sapien
catgccggcggtatctctctggcct

SEQ ID NO: 1063385 - DNA, 25 bp, Homo sapien
gatgcctcccttgtataggaagaag

SEQ ID NO: 1063386 - DNA, 25 bp, Homo sapien
gggccagttctatgggaccacacat

SEQ ID NO: 1063387 - DNA, 25 bp, Homo sapien
cacatctgtaagtcggtgcacccag

SEQ ID NO: 1063388 - DNA, 25 bp, Homo sapien
aaccttcaattcgacccagggcaag

SEQ ID NO: 1063389 - DNA, 25 bp, Homo sapien
ggtacacccttagggctcaggcagg

SEQ ID NO: 1063390 - DNA, 25 bp, Homo sapien
agtatttgagcgtccttccatctgg

SEQ ID NO: 1063391 - DNA, 25 bp, Homo sapien
ccagtatttgagcgtccttccatct

SEQ ID NO: 1063392 - DNA, 25 bp, Homo sapien
gtatttgagcgtccttccatctggc

SEQ ID NO: 1063393 - DNA, 25 bp, Homo sapien
tatttgagcgtccttccatctggca

SEQ ID NO: 1063394 - DNA, 25 bp, Homo sapien
ctgggccccaggagttggccgcagt

SEQ ID NO: 1063395 - DNA, 25 bp, Homo sapien
gcgcacgatgcggaagtggcccctc

SEQ ID NO: 1063396 - DNA, 25 bp, Homo sapien
acgatgcggaagtggcccctctcgc

SEQ ID NO: 1063397 - DNA, 25 bp, Homo sapien
cgatgtcgcactcattgacgccgcg

SEQ ID NO: 1063398 - DNA, 25 bp, Homo sapien
cagcacgaagctctcgatgtcgcac

SEQ ID NO: 1063399 - DNA, 25 bp, Homo sapien
ttccgccggcccttagcctggatcc

SEQ ID NO: 1063400 - DNA, 25 bp, Homo sapien
gggcgctgcgtcagcggaacccgcg

SEQ ID NO: 1063401 - DNA, 25 bp, Homo sapien
cccgggctctgtcgggcgaggctgg

SEQ ID NO: 1063402 - DNA, 25 bp, Homo sapien
acccgcgccgggattagcgccctgg

SEQ ID NO: 1063403 - DNA, 25 bp, Homo sapien
gtggggctggagacttgaggtgtcc

SEQ ID NO: 1063404 - DNA, 25 bp, Homo sapien
tggggctggagacttgaggtgtcct

SEQ ID NO: 1063405 - DNA, 25 bp, Homo sapien
ggggctggagacttgaggtgtcctg

SEQ ID NO: 1063406 - DNA, 25 bp, Homo sapien
tggagacttgaggtgtcctggcttt

SEQ ID NO: 1063407 - DNA, 25 bp, Homo sapien
gaagaataagaatacagggctgggt

SEQ ID NO: 1063408 - DNA, 25 bp, Homo sapien
tgaagaataagaatacagggctggg

SEQ ID NO: 1063409 - DNA, 25 bp, Homo sapien
ctgaagaataagaatacagggctgg

SEQ ID NO: 1063410 - DNA, 25 bp, Homo sapien
gagcgggtgcgaaggggccgccgcc

SEQ ID NO: 1063411 - DNA, 25 bp, Homo sapien
cggggccactgagcgggtgcgaagg

SEQ ID NO: 1063412 - DNA, 25 bp, Homo sapien
cactgagcgggtgcgaaggggccgc

SEQ ID NO: 1063413 - DNA, 25 bp, Homo sapien
gccactgagcgggtgcgaaggggcc

SEQ ID NO: 1063414 - DNA, 25 bp, Homo sapien
atgctgcggaggttgacactgctga

SEQ ID NO: 1063415 - DNA, 25 bp, Homo sapien
ggcttctctccactactcctctagg

SEQ ID NO: 1063416 - DNA, 25 bp, Homo sapien
catccacattcattcgcttcctcca

SEQ ID NO: 1063417 - DNA, 25 bp, Homo sapien
gagattggtgctgccaagtgaacat

SEQ ID NO: 1063418 - DNA, 25 bp, Homo sapien
ttgaatatagtgactgtaacaaaga

SEQ ID NO: 1063419 - DNA, 25 bp, Homo sapien
gaatatagtgactgtaacaaagagc

SEQ ID NO: 1063420 - DNA, 25 bp, Homo sapien
tgaacccagggaacggaggtgcagt

SEQ ID NO: 1063421 - DNA, 25 bp, Homo sapien
tatagtgactgtaacaaagagcccc

SEQ ID NO: 1063422 - DNA, 25 bp, Homo sapien
gcccatgtccaagggagggccctag

SEQ ID NO: 1063423 - DNA, 25 bp, Homo sapien
caggattttggtcctcgggcacaac

SEQ ID NO: 1063424 - DNA, 25 bp, Homo sapien
tgcaggattttggtcctcgggcaca

SEQ ID NO: 1063425 - DNA, 25 bp, Homo sapien
ggaaccctggccaaatgcccatgtc

SEQ ID NO: 1063426 - DNA, 25 bp, Homo sapien
ggcaaacaaggttcagcccgcagtg

SEQ ID NO: 1063427 - DNA, 25 bp, Homo sapien
acagttgcggcaaacaaggttcagc

SEQ ID NO: 1063428 - DNA, 25 bp, Homo sapien
gggacactccaataacagttgcggc

SEQ ID NO: 1063429 - DNA, 25 bp, Homo sapien
gttcagcccgcagtgtggaaggtac

SEQ ID NO: 1063430 - DNA, 25 bp, Homo sapien
gagggagacgctcgttccttctagc

SEQ ID NO: 1063431 - DNA, 25 bp, Homo sapien
acgatccgcggcaactgcgcgggct

SEQ ID NO: 1063432 - DNA, 25 bp, Homo sapien
tccattcatgcgtccatccgttcat

SEQ ID NO: 1063433 - DNA, 25 bp, Homo sapien
tgggagcccccagacggtcttggct

SEQ ID NO: 1063434 - DNA, 25 bp, Homo sapien
gggacccgggcgttctcggctgctg

SEQ ID NO: 1063435 - DNA, 25 bp, Homo sapien
ggacccgggcgttctcggctgctgg

SEQ ID NO: 1063436 - DNA, 25 bp, Homo sapien
actgaacgccggcaggcccgctccg

SEQ ID NO: 1063437 - DNA, 25 bp, Homo sapien
cccactgaacgccggcaggcccgct

SEQ ID NO: 1063438 - DNA, 25 bp, Homo sapien
cgcgggaccttcctgcacctcgggg

SEQ ID NO: 1063439 - DNA, 25 bp, Homo sapien
ctgaacgccggcaggcccgctccgt

SEQ ID NO: 1063440 - DNA, 25 bp, Homo sapien
taatgagctccgatgcgtgccaagt

SEQ ID NO: 1063441 - DNA, 25 bp, Homo sapien
tgaggagtaatgagctccgatgcgt

SEQ ID NO: 1063442 - DNA, 25 bp, Homo sapien
ggaccacgatgaggagtaatgagct

SEQ ID NO: 1063443 - DNA, 25 bp, Homo sapien
tgcgtgccaagtgcttcaccaagaa

SEQ ID NO: 1063444 - DNA, 25 bp, Homo sapien
ttttcgggtctcagcctcaaacttc

SEQ ID NO: 1063445 - DNA, 25 bp, Homo sapien
gtgcctggaggcttgcacccaggtc

SEQ ID NO: 1063446 - DNA, 25 bp, Homo sapien
cccaggtcttttcgggtctcagcct

SEQ ID NO: 1063447 - DNA, 25 bp, Homo sapien
tgcctggaggcttgcacccaggtct

SEQ ID NO: 1063448 - DNA, 25 bp, Homo sapien
ctgcagcagaggggcatcctaggct

SEQ ID NO: 1063449 - DNA, 25 bp, Homo sapien
cacagatagcggagaaactcatctt

SEQ ID NO: 1063450 - DNA, 25 bp, Homo sapien
cacgacgaacacagccacataggct

SEQ ID NO: 1063451 - DNA, 25 bp, Homo sapien
tgttttgggtacagataatcgcgcc

SEQ ID NO: 1063452 - DNA, 25 bp, Homo sapien
acataggctgcgatgaggacccact

SEQ ID NO: 1063453 - DNA, 25 bp, Homo sapien
tcatgtggtggttccgccacacggc

SEQ ID NO: 1063454 - DNA, 25 bp, Homo sapien
ggcaggcagatagcagtcaccagaa

SEQ ID NO: 1063455 - DNA, 25 bp, Homo sapien
cagccaggactcagtgatgtccacc

SEQ ID NO: 1063456 - DNA, 25 bp, Homo sapien
ttgcagagggcatggccgaacagcc

SEQ ID NO: 1063457 - DNA, 25 bp, Homo sapien
tgtgtcctcgagtgtctgatctggt

SEQ ID NO: 1063458 - DNA, 25 bp, Homo sapien
tgtctgtgtcctcgagtgtctgatc

SEQ ID NO: 1063459 - DNA, 25 bp, Homo sapien
tgatctggtggcttgcccttgctag

SEQ ID NO: 1063460 - DNA, 25 bp, Homo sapien
gatgacacttcaggggtcatgagcc

SEQ ID NO: 1063461 - DNA, 25 bp, Homo sapien
ctgcccagcgttcatcacagactga

SEQ ID NO: 1063462 - DNA, 25 bp, Homo sapien
gagagttagcactgccactgacacg

SEQ ID NO: 1063463 - DNA, 25 bp, Homo sapien
ccgccgggctgtgctcttgaacaat

SEQ ID NO: 1063464 - DNA, 25 bp, Homo sapien
tggcagatggcataccagcggtcca

SEQ ID NO: 1063465 - DNA, 25 bp, Homo sapien
tgcggaatatctggaaataggccat

SEQ ID NO: 1063466 - DNA, 25 bp, Homo sapien
tggcggccccagagcttgcggaata

SEQ ID NO: 1063467 - DNA, 25 bp, Homo sapien
gccaggtaggtgacaataaagaagc

SEQ ID NO: 1063468 - DNA, 25 bp, Homo sapien
caactgtggtagatcttgggataga

SEQ ID NO: 1063469 - DNA, 25 bp, Homo sapien
accagtgctgaggtggtgccgggga

SEQ ID NO: 1063470 - DNA, 25 bp, Homo sapien
tggctgtcttcctccgtgcacgcat

SEQ ID NO: 1063471 - DNA, 25 bp, Homo sapien
gtctgaggggcgcttccagttccgc

SEQ ID NO: 1063472 - DNA, 25 bp, Homo sapien
gggcgcttccagttccgcaccagtg

SEQ ID NO: 1063473 - DNA, 25 bp, Homo sapien
tggcttggcggaacatcccgaacac

SEQ ID NO: 1063474 - DNA, 25 bp, Homo sapien
ggcagcgctgttggcgtacaccagc

SEQ ID NO: 1063475 - DNA, 25 bp, Homo sapien
ctgttggcgtacaccagccagtggg

SEQ ID NO: 1063476 - DNA, 25 bp, Homo sapien
tgaagcaggcgtagacagcttcgcg

SEQ ID NO: 1063477 - DNA, 25 bp, Homo sapien
cttggttgggagacaaaagacacag

SEQ ID NO: 1063478 - DNA, 25 bp, Homo sapien
cccagggacacccacgcagctccag

SEQ ID NO: 1063479 - DNA, 25 bp, Homo sapien
gggccttcagagagccgcagggacc

SEQ ID NO: 1063480 - DNA, 25 bp, Homo sapien
cagccttaaactgctcccggaattt

SEQ ID NO: 1063481 - DNA, 25 bp, Homo sapien
tctgcaaggacaaggacttgtggct

SEQ ID NO: 1063482 - DNA, 25 bp, Homo sapien
tttggagatggagcatcggctctgc

SEQ ID NO: 1063483 - DNA, 25 bp, Homo sapien
gggacacaagctcagacagaggaag

SEQ ID NO: 1063484 - DNA, 25 bp, Homo sapien
taggaggatgaccaagctctggaag

SEQ ID NO: 1063485 - DNA, 25 bp, Homo sapien
cttgcttcagcatgcttaatcctca

SEQ ID NO: 1063486 - DNA, 25 bp, Homo sapien
gaggaagtgacttatccagagtcac

SEQ ID NO: 1063487 - DNA, 25 bp, Homo sapien
caagatggaaatgcctgttgggacc

SEQ ID NO: 1063488 - DNA, 25 bp, Homo sapien
tgttgggacctttagagcagactcc

SEQ ID NO: 1063489 - DNA, 25 bp, Homo sapien
caaagccaacaaggtcgggtctgtg

SEQ ID NO: 1063490 - DNA, 25 bp, Homo sapien
taattacagttgcttcgggctgctg

SEQ ID NO: 1063491 - DNA, 25 bp, Homo sapien
gatgcaacactgttccaaaagaggg

SEQ ID NO: 1063492 - DNA, 25 bp, Homo sapien
catgagcagttgagtggcacagcct

SEQ ID NO: 1063493 - DNA, 25 bp, Homo sapien
tagccaccaaatagtgaggaccggg

SEQ ID NO: 1063494 - DNA, 25 bp, Homo sapien
tctgaccaagcatgagagagatctg

SEQ ID NO: 1063495 - DNA, 25 bp, Homo sapien
ggggccttgggcgggggcatcagcc

SEQ ID NO: 1063496 - DNA, 25 bp, Homo sapien
gggccttgggcgggggcatcagcca

SEQ ID NO: 1063497 - DNA, 25 bp, Homo sapien
gggggccttgggcgggggcatcagc

SEQ ID NO: 1063498 - DNA, 25 bp, Homo sapien
ggccttgggcgggggcatcagccat

SEQ ID NO: 1063499 - DNA, 25 bp, Homo sapien
cccttgacgtcgctcactcgaggat

SEQ ID NO: 1063500 - DNA, 25 bp, Homo sapien
gacgtcgctcactcgaggatttggg

SEQ ID NO: 1063501 - DNA, 25 bp, Homo sapien
ttgacgtcgctcactcgaggatttg

SEQ ID NO: 1063502 - DNA, 25 bp, Homo sapien
gcgaggtcgtgtcgcgcccccttga

SEQ ID NO: 1063503 - DNA, 25 bp, Homo sapien
ggaccgtcggtcgcgccctgctcac

SEQ ID NO: 1063504 - DNA, 25 bp, Homo sapien
gggaccgtcggtcgcgccctgctca

SEQ ID NO: 1063505 - DNA, 25 bp, Homo sapien
agggaccgtcggtcgcgccctgctc

SEQ ID NO: 1063506 - DNA, 25 bp, Homo sapien
aagggaccgtcggtcgcgccctgct

SEQ ID NO: 1063507 - DNA, 25 bp, Homo sapien
gcccgcgaatccaggtagcggcggt

SEQ ID NO: 1063508 - DNA, 25 bp, Homo sapien
tgggttcgcttcagcgaggccttgc

SEQ ID NO: 1063509 - DNA, 25 bp, Homo sapien
tttctccgcgcccttcccacgatgg

SEQ ID NO: 1063510 - DNA, 25 bp, Homo sapien
aggtagcggcggtgccaggcgcagg

SEQ ID NO: 1063511 - DNA, 25 bp, Homo sapien
gaatgcatgtctccccggagtttga

SEQ ID NO: 1063512 - DNA, 25 bp, Homo sapien
ccccggagtttgaaattgctgtatt

SEQ ID NO: 1063513 - DNA, 25 bp, Homo sapien
tgatttgaatgcatgtctccccgga

SEQ ID NO: 1063514 - DNA, 25 bp, Homo sapien
tgtctccccggagtttgaaattgct

SEQ ID NO: 1063515 - DNA, 25 bp, Homo sapien
tccatttcccgagcactcccttgct

SEQ ID NO: 1063516 - DNA, 25 bp, Homo sapien
ccatttcccgagcactcccttgctc

SEQ ID NO: 1063517 - DNA, 25 bp, Homo sapien
caaacaaacatctcctgggtaccag

SEQ ID NO: 1063518 - DNA, 25 bp, Homo sapien
gaaagcagggattctatggacctcc

SEQ ID NO: 1063519 - DNA, 25 bp, Homo sapien
tgaagcccagctgcaagttacggct

SEQ ID NO: 1063520 - DNA, 25 bp, Homo sapien
gaagctcacgagtggatgaagccca

SEQ ID NO: 1063521 - DNA, 25 bp, Homo sapien
ttgggaatgccatatcaagcctggt

SEQ ID NO: 1063522 - DNA, 25 bp, Homo sapien
gaggctatggctctggaacgtgcca

SEQ ID NO: 1063523 - DNA, 25 bp, Homo sapien
cccattggagactcagtagggctga

SEQ ID NO: 1063524 - DNA, 25 bp, Homo sapien
actcagaagcgtggccccattggag

SEQ ID NO: 1063525 - DNA, 25 bp, Homo sapien
tgccaaagctttagggcttcacatt

SEQ ID NO: 1063526 - DNA, 25 bp, Homo sapien
atttctcgcaccatcttgcagcact

SEQ ID NO: 1063527 - DNA, 25 bp, Homo sapien
tgagctcgtgaaccttcctcttaag

SEQ ID NO: 1063528 - DNA, 25 bp, Homo sapien
tcctcttaagctggtgcctctaggg

SEQ ID NO: 1063529 - DNA, 25 bp, Homo sapien
tgactctggagccattccgcatctc

SEQ ID NO: 1063530 - DNA, 25 bp, Homo sapien
tgcaaccggatcttcagttagactc

SEQ ID NO: 1063531 - DNA, 25 bp, Homo sapien
gaaatgggcttctgctgcaaccgga

SEQ ID NO: 1063532 - DNA, 25 bp, Homo sapien
tccgtcaacggaggagccattcttc

SEQ ID NO: 1063533 - DNA, 25 bp, Homo sapien
ggaatcaagagtcacatagcccatc

SEQ ID NO: 1063534 - DNA, 25 bp, Homo sapien
agtaattccccaggttgccttcagg

SEQ ID NO: 1063535 - DNA, 25 bp, Homo sapien
gacactggctaattagtgccctgga

SEQ ID NO: 1063536 - DNA, 25 bp, Homo sapien
gaaggaggcccttatgttcctggac

SEQ ID NO: 1063537 - DNA, 25 bp, Homo sapien
ttcagtccccagagctaatagctgg

SEQ ID NO: 1063538 - DNA, 25 bp, Homo sapien
tccccagagctaatagctggtccat

SEQ ID NO: 1063539 - DNA, 25 bp, Homo sapien
gtcctgtgtttctgattcagtcccc

SEQ ID NO: 1063540 - DNA, 25 bp, Homo sapien
tgtgtttctgattcagtccccagag

SEQ ID NO: 1063541 - DNA, 25 bp, Homo sapien
ggcaagagggcagcgtttatgaggt

SEQ ID NO: 1063542 - DNA, 25 bp, Homo sapien
gcaagagggcagcgtttatgaggtc

SEQ ID NO: 1063543 - DNA, 25 bp, Homo sapien
aggcaagagggcagcgtttatgagg

SEQ ID NO: 1063544 - DNA, 25 bp, Homo sapien
tctgggtagtgtggccggacctggg

SEQ ID NO: 1063545 - DNA, 25 bp, Homo sapien
ctctgggtagtgtggccggacctgg

SEQ ID NO: 1063546 - DNA, 25 bp, Homo sapien
tccaggacgcctggttgggcttgtt

SEQ ID NO: 1063547 - DNA, 25 bp, Homo sapien
tggcatttcccatgaggtgagggct

SEQ ID NO: 1063548 - DNA, 25 bp, Homo sapien
tcacgtacagaccagcaggattggc

SEQ ID NO: 1063549 - DNA, 25 bp, Homo sapien
tctgcctggcttgcgcatggagtcg

SEQ ID NO: 1063550 - DNA, 25 bp, Homo sapien
cgcagccagagcatcagcggtggct

SEQ ID NO: 1063551 - DNA, 25 bp, Homo sapien
agccagagcatcagcggtggctgca

SEQ ID NO: 1063552 - DNA, 25 bp, Homo sapien
ctgcaggactgacgctgggaaatcc

SEQ ID NO: 1063553 - DNA, 25 bp, Homo sapien
ggtttccgcagccagagcatcagcg

SEQ ID NO: 1063554 - DNA, 25 bp, Homo sapien
tcagcttggtccgagggcacagccg

SEQ ID NO: 1063555 - DNA, 25 bp, Homo sapien
cagtcagcttggtccgagggcacag

SEQ ID NO: 1063556 - DNA, 25 bp, Homo sapien
ggttgtaggctgtgaagttggcggc

SEQ ID NO: 1063557 - DNA, 25 bp, Homo sapien
agttggcggccactcccgcagtcag

SEQ ID NO: 1063558 - DNA, 25 bp, Homo sapien
gggcacgatcggctcggctggcgct

SEQ ID NO: 1063559 - DNA, 25 bp, Homo sapien
ggtggggggcacgatcggctcggct

SEQ ID NO: 1063560 - DNA, 25 bp, Homo sapien
ggggggcacgatcggctcggctggc

SEQ ID NO: 1063561 - DNA, 25 bp, Homo sapien
ggaggtggggggcacgatcggctcg

SEQ ID NO: 1063562 - DNA, 25 bp, Homo sapien
tctgcggtccaagaagcagcgggct

SEQ ID NO: 1063563 - DNA, 25 bp, Homo sapien
agcctccggcatgggtatagctgga

SEQ ID NO: 1063564 - DNA, 25 bp, Homo sapien
gtgagcaaatgcttcagcctgcagg

SEQ ID NO: 1063565 - DNA, 25 bp, Homo sapien
tgcaatgcacatgggaaggtgagca

SEQ ID NO: 1063566 - DNA, 25 bp, Homo sapien
aagttgataatctctcacaatcact

SEQ ID NO: 1063567 - DNA, 25 bp, Homo sapien
gttgataatctctcacaatcactca

SEQ ID NO: 1063568 - DNA, 25 bp, Homo sapien
tcacaatcactcacaacaaatgtca

SEQ ID NO: 1063569 - DNA, 25 bp, Homo sapien
ctcacaacaaatgtcaccgaggctg

SEQ ID NO: 1063570 - DNA, 25 bp, Homo sapien
tcctgggcggcattattaccagagt

SEQ ID NO: 1063571 - DNA, 25 bp, Homo sapien
ccaagtcctcctgggcggcattatt

SEQ ID NO: 1063572 - DNA, 25 bp, Homo sapien
ctgggcggcattattaccagagtga

SEQ ID NO: 1063573 - DNA, 25 bp, Homo sapien
cctcctgggcggcattattaccaga

SEQ ID NO: 1063574 - DNA, 25 bp, Homo sapien
aaggctgcactcctactcagactgg

SEQ ID NO: 1063575 - DNA, 25 bp, Homo sapien
ccctgcgagaggtcaagatctttgt

SEQ ID NO: 1063576 - DNA, 25 bp, Homo sapien
tgagcaccacgaagacaggtcttgt

SEQ ID NO: 1063577 - DNA, 25 bp, Homo sapien
tacagcatctgaaggacgtagtctg

SEQ ID NO: 1063578 - DNA, 25 bp, Homo sapien
ctcccggtgggaggaggcgatcctc

SEQ ID NO: 1063579 - DNA, 25 bp, Homo sapien
tatattgatatgtaacctgcttttt

SEQ ID NO: 1063580 - DNA, 25 bp, Homo sapien
ctactgcatatagggatgtaacacc

SEQ ID NO: 1063581 - DNA, 25 bp, Homo sapien
tgtccacatcaacaggtataaaccc

SEQ ID NO: 1063582 - DNA, 25 bp, Homo sapien
gcaacatgaaacattagccctcctt

SEQ ID NO: 1063583 - DNA, 25 bp, Homo sapien
gtatcagtgcctgcctgagttagga

SEQ ID NO: 1063584 - DNA, 25 bp, Homo sapien
agctgaagccagtttgacatagaga

SEQ ID NO: 1063585 - DNA, 25 bp, Homo sapien
tacattcctggttctgtattgagga

SEQ ID NO: 1063586 - DNA, 25 bp, Homo sapien
tatagactcaagatcaaaacagcat

SEQ ID NO: 1063587 - DNA, 25 bp, Homo sapien
tatttcagaatgcaacaatagattc

SEQ ID NO: 1063588 - DNA, 25 bp, Homo sapien
agctaagatagatggtgttgattcc

SEQ ID NO: 1063589 - DNA, 25 bp, Homo sapien
tacctgctaagctaagatagatggt

SEQ ID NO: 1063590 - DNA, 25 bp, Homo sapien
tttcaggaaccgtcaaaggagcagc

SEQ ID NO: 1063591 - DNA, 25 bp, Homo sapien
tagatgtgcgtgcagtctggcagcc

SEQ ID NO: 1063592 - DNA, 25 bp, Homo sapien
gagagacatcgtgcaacccaatgag

SEQ ID NO: 1063593 - DNA, 25 bp, Homo sapien
caagttgtagatggaatagaagccc

SEQ ID NO: 1063594 - DNA, 25 bp, Homo sapien
ggaaatgtaaacgaaggctgacttg

SEQ ID NO: 1063595 - DNA, 25 bp, Homo sapien
tgacttgattgtgccatttagaggg

SEQ ID NO: 1063596 - DNA, 25 bp, Homo sapien
caaagtagtgatggattcagtactc

SEQ ID NO: 1063597 - DNA, 25 bp, Homo sapien
tagagggaactcttggtacctggaa

SEQ ID NO: 1063598 - DNA, 25 bp, Homo sapien
taatgacctattggtaaggcagtcc

SEQ ID NO: 1063599 - DNA, 25 bp, Homo sapien
caacttgttttgacagatggcagag

SEQ ID NO: 1063600 - DNA, 25 bp, Homo sapien
tccttatagcaaatgggagcatcag

SEQ ID NO: 1063601 - DNA, 25 bp, Homo sapien
aatgactttactgtccactgctgga

SEQ ID NO: 1063602 - DNA, 25 bp, Homo sapien
cttaagaagtatggagtgacgactt

SEQ ID NO: 1063603 - DNA, 25 bp, Homo sapien
aacttaagaagtatggagtgacgac

SEQ ID NO: 1063604 - DNA, 25 bp, Homo sapien
gaacttaagaagtatggagtgacga

SEQ ID NO: 1063605 - DNA, 25 bp, Homo sapien
acttaagaagtatggagtgacgact

SEQ ID NO: 1063606 - DNA, 25 bp, Homo sapien
tatacacagcgtacaagttgattct

SEQ ID NO: 1063607 - DNA, 25 bp, Homo sapien
gattctacgcctgtatgccctcaga

SEQ ID NO: 1063608 - DNA, 25 bp, Homo sapien
tcagattgttcagtcacctttaagc

SEQ ID NO: 1063609 - DNA, 25 bp, Homo sapien
ggattccttggccatagtctccaga

SEQ ID NO: 1063610 - DNA, 25 bp, Homo sapien
gagtccgaaggtatccatctgcaga

SEQ ID NO: 1063611 - DNA, 25 bp, Homo sapien
gaaaacactgattgataataggcat

SEQ ID NO: 1063612 - DNA, 25 bp, Homo sapien
cctaccaatgctactctcaacaagt

SEQ ID NO: 1063613 - DNA, 25 bp, Homo sapien
gttttctgataactcacaaccctac

SEQ ID NO: 1063614 - DNA, 25 bp, Homo sapien
gccaggcatagtggtatgaacctgt

SEQ ID NO: 1063615 - DNA, 25 bp, Homo sapien
gcatagtggtatgaacctgtagttc

SEQ ID NO: 1063616 - DNA, 25 bp, Homo sapien
aggctgaagtgagccgagactatgc

SEQ ID NO: 1063617 - DNA, 25 bp, Homo sapien
caacatagagacaacatctctacaa

SEQ ID NO: 1063618 - DNA, 25 bp, Homo sapien
tacgccaaatcatgtattgtctcat

SEQ ID NO: 1063619 - DNA, 25 bp, Homo sapien
cgaatagggtgatggtagagatctt

SEQ ID NO: 1063620 - DNA, 25 bp, Homo sapien
cacattcctttcttacgccaaatca

SEQ ID NO: 1063621 - DNA, 25 bp, Homo sapien
gtggacttagttatgtttatcgaat

SEQ ID NO: 1063622 - DNA, 25 bp, Homo sapien
ccgccgaggtgactgaggagagagg

SEQ ID NO: 1063623 - DNA, 25 bp, Homo sapien
ccagcgtgagtgcgcccctcccggg

SEQ ID NO: 1063624 - DNA, 25 bp, Homo sapien
cgccgccgccgaggtgactgaggag

SEQ ID NO: 1063625 - DNA, 25 bp, Homo sapien
cggacttcaatgcccagtccccagc

SEQ ID NO: 1063626 - DNA, 25 bp, Homo sapien
cgcagagtgcgaactgcagcggctc

SEQ ID NO: 1063627 - DNA, 25 bp, Homo sapien
aggccgcagagtgcgaactgcagcg

SEQ ID NO: 1063628 - DNA, 25 bp, Homo sapien
gctcggggtacgacaccagggcttc

SEQ ID NO: 1063629 - DNA, 25 bp, Homo sapien
cagcggctcggggtacgacaccagg

SEQ ID NO: 1063630 - DNA, 25 bp, Homo sapien
catctcacgatgttgtaattgctgg

SEQ ID NO: 1063631 - DNA, 25 bp, Homo sapien
gaaggaatgagcttctatccactgg

SEQ ID NO: 1063632 - DNA, 25 bp, Homo sapien
ggttgagacatccatcagtttctag

SEQ ID NO: 1063633 - DNA, 25 bp, Homo sapien
cagacctattatatggcagaagctc

SEQ ID NO: 1063634 - DNA, 25 bp, Homo sapien
tctgccaggctcatggaaggccctt

SEQ ID NO: 1063635 - DNA, 25 bp, Homo sapien
cacattaactgcagggatagccaga

SEQ ID NO: 1063636 - DNA, 25 bp, Homo sapien
cacaagaggacagtagtgagctgcc

SEQ ID NO: 1063637 - DNA, 25 bp, Homo sapien
tctctctagtggacaggcgtgctct

SEQ ID NO: 1063638 - DNA, 25 bp, Homo sapien
aaagctttgactaagttttctgcat

SEQ ID NO: 1063639 - DNA, 25 bp, Homo sapien
tgaaagctttgactaagttttctgc

SEQ ID NO: 1063640 - DNA, 25 bp, Homo sapien
gagggtaggtacagaatctttcatt

SEQ ID NO: 1063641 - DNA, 25 bp, Homo sapien
ctgcattgggagtgagggtaggtac

SEQ ID NO: 1063642 - DNA, 25 bp, Homo sapien
gagaaaggaaagtcacggagctgct

SEQ ID NO: 1063643 - DNA, 25 bp, Homo sapien
aggaaagtcacggagctgctgtctg

SEQ ID NO: 1063644 - DNA, 25 bp, Homo sapien
gaaagtcacggagctgctgtctggt

SEQ ID NO: 1063645 - DNA, 25 bp, Homo sapien
aaaggaaagtcacggagctgctgtc

SEQ ID NO: 1063646 - DNA, 25 bp, Homo sapien
tctctctccaggacaagaaagaggg

SEQ ID NO: 1063647 - DNA, 25 bp, Homo sapien
ctctctccaggacaagaaagagggc

SEQ ID NO: 1063648 - DNA, 25 bp, Homo sapien
tgctcacacctctcacaggttgttg

SEQ ID NO: 1063649 - DNA, 25 bp, Homo sapien
ctcacacctctcacaggttgttgtg

SEQ ID NO: 1063650 - DNA, 25 bp, Homo sapien
aagcagtccaaaagtgaaaacgctg

SEQ ID NO: 1063651 - DNA, 25 bp, Homo sapien
aacgctgttgtcttagtgtataaag

SEQ ID NO: 1063652 - DNA, 25 bp, Homo sapien
aagtgaaaacgctgttgtcttagtg

SEQ ID NO: 1063653 - DNA, 25 bp, Homo sapien
tccaaaagtgaaaacgctgttgtct

SEQ ID NO: 1063654 - DNA, 25 bp, Homo sapien
taatagtctgagtcctgcccacagg

SEQ ID NO: 1063655 - DNA, 25 bp, Homo sapien
tttgccaccctcataatagtctgag

SEQ ID NO: 1063656 - DNA, 25 bp, Homo sapien
tttgaggcttgccctttgccaccct

SEQ ID NO: 1063657 - DNA, 25 bp, Homo sapien
ttgccctttgccaccctcataatag

SEQ ID NO: 1063658 - DNA, 25 bp, Homo sapien
acgaaacgaacggagcccactgcct

SEQ ID NO: 1063659 - DNA, 25 bp, Homo sapien
acgtgttccgctagcgccgagtcac

SEQ ID NO: 1063660 - DNA, 25 bp, Homo sapien
gcgccgagtcacgtggaaaacgaaa

SEQ ID NO: 1063661 - DNA, 25 bp, Homo sapien
ctagcgccgagtcacgtggaaaacg

SEQ ID NO: 1063662 - DNA, 25 bp, Homo sapien
gaggagacacgtgttccgctagcgc

SEQ ID NO: 1063663 - DNA, 25 bp, Homo sapien
gagacacgtgttccgctagcgccga

SEQ ID NO: 1063664 - DNA, 25 bp, Homo sapien
ggcgctagcggaacacgtgtctcct

SEQ ID NO: 1063665 - DNA, 25 bp, Homo sapien
aggcagtgggctccgttcgtttcgt

SEQ ID NO: 1063666 - DNA, 25 bp, Homo sapien
tttcgttttccacgtgactcggcgc

SEQ ID NO: 1063667 - DNA, 25 bp, Homo sapien
gttttccacgtgactcggcgctagc

SEQ ID NO: 1063668 - DNA, 25 bp, Homo sapien
gtgactcggcgctagcggaacacgt

SEQ ID NO: 1063669 - DNA, 25 bp, Homo sapien
tcgttttccacgtgactcggcgcta

SEQ ID NO: 1063670 - DNA, 25 bp, Homo sapien
agggaaagccagagtcgggaggcga

SEQ ID NO: 1063671 - DNA, 25 bp, Homo sapien
gccagagtcgggaggcgacttctcg

SEQ ID NO: 1063672 - DNA, 25 bp, Homo sapien
ccagagtcgggaggcgacttctcgg

SEQ ID NO: 1063673 - DNA, 25 bp, Homo sapien
agccagagtcgggaggcgacttctc

SEQ ID NO: 1063674 - DNA, 25 bp, Homo sapien
ggaaagccagagtcgggaggcgact

SEQ ID NO: 1063675 - DNA, 25 bp, Homo sapien
gggaaagccagagtcgggaggcgac

SEQ ID NO: 1063676 - DNA, 25 bp, Homo sapien
gtcgcctcccgactctggctttccc

SEQ ID NO: 1063677 - DNA, 25 bp, Homo sapien
gagaagtcgcctcccgactctggct

SEQ ID NO: 1063678 - DNA, 25 bp, Homo sapien
tcgcctcccgactctggctttccct

SEQ ID NO: 1063679 - DNA, 25 bp, Homo sapien
cgagaagtcgcctcccgactctggc

SEQ ID NO: 1063680 - DNA, 25 bp, Homo sapien
ccgagaagtcgcctcccgactctgg

SEQ ID NO: 1063681 - DNA, 25 bp, Homo sapien
tccgagaagtcgcctcccgactctg

SEQ ID NO: 1063682 - DNA, 25 bp, Homo sapien
atgcgcatcaagctctggcctggcg

SEQ ID NO: 1063683 - DNA, 25 bp, Homo sapien
cgcatcaagctctggcctggcggga

SEQ ID NO: 1063684 - DNA, 25 bp, Homo sapien
ccagagtcgggaggcgacttctcgg

SEQ ID NO: 1063685 - DNA, 25 bp, Homo sapien
agccagagtcgggaggcgacttctc

SEQ ID NO: 1063686 - DNA, 25 bp, Homo sapien
tggcgggagcggagggaaagccaga

SEQ ID NO: 1063687 - DNA, 25 bp, Homo sapien
ggaggcgacttctcggacgccgcgg

SEQ ID NO: 1063688 - DNA, 25 bp, Homo sapien
cgccaggccagagcttgatgcgcat

SEQ ID NO: 1063689 - DNA, 25 bp, Homo sapien
tcccgccaggccagagcttgatgcg

SEQ ID NO: 1063690 - DNA, 25 bp, Homo sapien
gagaagtcgcctcccgactctggct

SEQ ID NO: 1063691 - DNA, 25 bp, Homo sapien
gccgcggcgtccgagaagtcgcctc

SEQ ID NO: 1063692 - DNA, 25 bp, Homo sapien
ccgagaagtcgcctcccgactctgg

SEQ ID NO: 1063693 - DNA, 25 bp, Homo sapien
ctggctttccctccgctcccgccag

SEQ ID NO: 1063694 - DNA, 25 bp, Homo sapien
tggccggactggggactttgttctc

SEQ ID NO: 1063695 - DNA, 25 bp, Homo sapien
cggactggggactttgttctccgcg

SEQ ID NO: 1063696 - DNA, 25 bp, Homo sapien
cgccgtggccggactggggactttg

SEQ ID NO: 1063697 - DNA, 25 bp, Homo sapien
caaagtccccagtccggccacggcg

SEQ ID NO: 1063698 - DNA, 25 bp, Homo sapien
cgcggagaacaaagtccccagtccg

SEQ ID NO: 1063699 - DNA, 25 bp, Homo sapien
gagaacaaagtccccagtccggcca

SEQ ID NO: 1063700 - DNA, 25 bp, Homo sapien
tggccggactggggactttgttctc

SEQ ID NO: 1063701 - DNA, 25 bp, Homo sapien
gactggggactttgttctccgcgga

SEQ ID NO: 1063702 - DNA, 25 bp, Homo sapien
actggggactttgttctccgcggag

SEQ ID NO: 1063703 - DNA, 25 bp, Homo sapien
tggggactttgttctccgcggagaa

SEQ ID NO: 1063704 - DNA, 25 bp, Homo sapien
cggactggggactttgttctccgcg

SEQ ID NO: 1063705 - DNA, 25 bp, Homo sapien
cgccgtggccggactggggactttg

SEQ ID NO: 1063706 - DNA, 25 bp, Homo sapien
tctccgcggagaacaaagtccccag

SEQ ID NO: 1063707 - DNA, 25 bp, Homo sapien
ttctccgcggagaacaaagtcccca

SEQ ID NO: 1063708 - DNA, 25 bp, Homo sapien
tccgcggagaacaaagtccccagtc

SEQ ID NO: 1063709 - DNA, 25 bp, Homo sapien
caaagtccccagtccggccacggcg

SEQ ID NO: 1063710 - DNA, 25 bp, Homo sapien
cgcggagaacaaagtccccagtccg

SEQ ID NO: 1063711 - DNA, 25 bp, Homo sapien
ctccgcggagaacaaagtccccagt

SEQ ID NO: 1063712 - DNA, 25 bp, Homo sapien
atttccggtgctctctctcgctggg

SEQ ID NO: 1063713 - DNA, 25 bp, Homo sapien
gggtcggcttcggtcgctaccgctc

SEQ ID NO: 1063714 - DNA, 25 bp, Homo sapien
ttccggtgctctctctcgctgggtc

SEQ ID NO: 1063715 - DNA, 25 bp, Homo sapien
cggtgctctctctcgctgggtcgct

SEQ ID NO: 1063716 - DNA, 25 bp, Homo sapien
cacgcgcgccgcctcatttccggtg

SEQ ID NO: 1063717 - DNA, 25 bp, Homo sapien
cgctcgggtcggcttcggtcgctac

SEQ ID NO: 1063718 - DNA, 25 bp, Homo sapien
caccggaaatgaggcggcgcgcgtg

SEQ ID NO: 1063719 - DNA, 25 bp, Homo sapien
cagcgagagagagcaccggaaatga

SEQ ID NO: 1063720 - DNA, 25 bp, Homo sapien
gagcggtagcgaccgaagccgaccc

SEQ ID NO: 1063721 - DNA, 25 bp, Homo sapien
agagcgggagcggtagcgaccgaag

SEQ ID NO: 1063722 - DNA, 25 bp, Homo sapien
agcgacccagcgagagagagcaccg

SEQ ID NO: 1063723 - DNA, 25 bp, Homo sapien
gtagcgaccgaagccgacccgagcg

SEQ ID NO: 1063724 - DNA, 25 bp, Homo sapien
cgcatgagccggtcttcgggccgta

SEQ ID NO: 1063725 - DNA, 25 bp, Homo sapien
catgagccggtcttcgggccgtagc

SEQ ID NO: 1063726 - DNA, 25 bp, Homo sapien
tgagccggtcttcgggccgtagcgg

SEQ ID NO: 1063727 - DNA, 25 bp, Homo sapien
cgtagcggctccatggacccctccg

SEQ ID NO: 1063728 - DNA, 25 bp, Homo sapien
ctccatggacccctccggtgcccac

SEQ ID NO: 1063729 - DNA, 25 bp, Homo sapien
gccgtagcggctccatggacccctc

SEQ ID NO: 1063730 - DNA, 25 bp, Homo sapien
gaggggtccatggagccgctacggc

SEQ ID NO: 1063731 - DNA, 25 bp, Homo sapien
gctacggcccgaagaccggctcatg

SEQ ID NO: 1063732 - DNA, 25 bp, Homo sapien
tacggcccgaagaccggctcatgcg

SEQ ID NO: 1063733 - DNA, 25 bp, Homo sapien
ccgctacggcccgaagaccggctca

SEQ ID NO: 1063734 - DNA, 25 bp, Homo sapien
aagaccggctcatgcgcgcggcggg

SEQ ID NO: 1063735 - DNA, 25 bp, Homo sapien
gtgggcaccggaggggtccatggag

SEQ ID NO: 1063736 - DNA, 25 bp, Homo sapien
atggagccgctacggcccgaagacc

SEQ ID NO: 1063737 - DNA, 25 bp, Homo sapien
gctacggcccgaagaccggctcatg

SEQ ID NO: 1063738 - DNA, 25 bp, Homo sapien
tccatggagccgctacggcccgaag

SEQ ID NO: 1063739 - DNA, 25 bp, Homo sapien
tacggcccgaagaccggctcatgcg

SEQ ID NO: 1063740 - DNA, 25 bp, Homo sapien
aagaccggctcatgcgcgcggcggg

SEQ ID NO: 1063741 - DNA, 25 bp, Homo sapien
gtgggcaccggaggggtccatggag

SEQ ID NO: 1063742 - DNA, 25 bp, Homo sapien
gccgctgcctcaccggtcccgggga

SEQ ID NO: 1063743 - DNA, 25 bp, Homo sapien
gcagccgccgctgcctcaccggtcc

SEQ ID NO: 1063744 - DNA, 25 bp, Homo sapien
agccgccgctgcctcaccggtcccg

SEQ ID NO: 1063745 - DNA, 25 bp, Homo sapien
gctgcctcaccggtcccggggaggc

SEQ ID NO: 1063746 - DNA, 25 bp, Homo sapien
gccgccgctgcctcaccggtcccgg

SEQ ID NO: 1063747 - DNA, 25 bp, Homo sapien
ccgccgctgcctcaccggtcccggg

SEQ ID NO: 1063748 - DNA, 25 bp, Homo sapien
ggaccggtgaggcagcggcggctgc

SEQ ID NO: 1063749 - DNA, 25 bp, Homo sapien
cgggaccggtgaggcagcggcggct

SEQ ID NO: 1063750 - DNA, 25 bp, Homo sapien
cgcctccccgggaccggtgaggcag

SEQ ID NO: 1063751 - DNA, 25 bp, Homo sapien
cccgggaccggtgaggcagcggcgg

SEQ ID NO: 1063752 - DNA, 25 bp, Homo sapien
ccccgggaccggtgaggcagcggcg

SEQ ID NO: 1063753 - DNA, 25 bp, Homo sapien
tccccgggaccggtgaggcagcggc

SEQ ID NO: 1063754 - DNA, 25 bp, Homo sapien
aagtacctgcccgaactcatggccg

SEQ ID NO: 1063755 - DNA, 25 bp, Homo sapien
gagaacaagtacctgcccgaactca

SEQ ID NO: 1063756 - DNA, 25 bp, Homo sapien
gagccagagaacaagtacctgcccg

SEQ ID NO: 1063757 - DNA, 25 bp, Homo sapien
gtccttcactcacgccatgcagctg

SEQ ID NO: 1063758 - DNA, 25 bp, Homo sapien
gagaaggactcgctcgacccgtcct

SEQ ID NO: 1063759 - DNA, 25 bp, Homo sapien
tgcccgaactcatggccgagaagga

SEQ ID NO: 1063760 - DNA, 25 bp, Homo sapien
cagctgcatggcgtgagtgaaggac

SEQ ID NO: 1063761 - DNA, 25 bp, Homo sapien
catgagttcgggcaggtacttgttc

SEQ ID NO: 1063762 - DNA, 25 bp, Homo sapien
gggcaggtacttgttctctggctcc

SEQ ID NO: 1063763 - DNA, 25 bp, Homo sapien
aaggacgggtcgagcgagtccttct

SEQ ID NO: 1063764 - DNA, 25 bp, Homo sapien
tccttctcggccatgagttcgggca

SEQ ID NO: 1063765 - DNA, 25 bp, Homo sapien
gggtcgagcgagtccttctcggcca

SEQ ID NO: 1063766 - DNA, 25 bp, Homo sapien
aggcccgaaggcgactttgcgatcc

SEQ ID NO: 1063767 - DNA, 25 bp, Homo sapien
cgctaatgtcttgatggatagtgct

SEQ ID NO: 1063768 - DNA, 25 bp, Homo sapien
cccggagtgcgtgggagaatttcta

SEQ ID NO: 1063769 - DNA, 25 bp, Homo sapien
cagtcgggagttccggtctcatcct

SEQ ID NO: 1063770 - DNA, 25 bp, Homo sapien
tttgcgatcccctagcgctaatgtc

SEQ ID NO: 1063771 - DNA, 25 bp, Homo sapien
ggccatcccgggcatgagtggccct

SEQ ID NO: 1063772 - DNA, 25 bp, Homo sapien
tagaaattctcccacgcactccggg

SEQ ID NO: 1063773 - DNA, 25 bp, Homo sapien
agggccactcatgcccgggatggcc

SEQ ID NO: 1063774 - DNA, 25 bp, Homo sapien
aatgaggatgagaccggaactcccg

SEQ ID NO: 1063775 - DNA, 25 bp, Homo sapien
atgagaccggaactcccgactgcct

SEQ ID NO: 1063776 - DNA, 25 bp, Homo sapien
agcactatccatcaagacattagcg

SEQ ID NO: 1063777 - DNA, 25 bp, Homo sapien
ggatcgcaaagtcgccttcgggcct

SEQ ID NO: 1063778 - DNA, 25 bp, Homo sapien
attcttccagaaatgaaccttcatt

SEQ ID NO: 1063779 - DNA, 25 bp, Homo sapien
tcttccagaaatgaaccttcatttc

SEQ ID NO: 1063780 - DNA, 25 bp, Homo sapien
ttcttccagaaatgaaccttcattt

SEQ ID NO: 1063781 - DNA, 25 bp, Homo sapien
ttccagaaatgaaccttcatttccc

SEQ ID NO: 1063782 - DNA, 25 bp, Homo sapien
tccagaaatgaaccttcatttcccc

SEQ ID NO: 1063783 - DNA, 25 bp, Homo sapien
cagaaatgaaccttcatttccccct

SEQ ID NO: 1063784 - DNA, 25 bp, Homo sapien
gaaatgaaggttcatttctggaaga

SEQ ID NO: 1063785 - DNA, 25 bp, Homo sapien
ggaaatgaaggttcatttctggaag

SEQ ID NO: 1063786 - DNA, 25 bp, Homo sapien
gggaaatgaaggttcatttctggaa

SEQ ID NO: 1063787 - DNA, 25 bp, Homo sapien
aatgaaggttcatttctggaagaat

SEQ ID NO: 1063788 - DNA, 25 bp, Homo sapien
agggggaaatgaaggttcatttctg

SEQ ID NO: 1063789 - DNA, 25 bp, Homo sapien
aaatgaaggttcatttctggaagaa

SEQ ID NO: 1063790 - DNA, 25 bp, Homo sapien
accctttttgatcgcgggtggcgat

SEQ ID NO: 1063791 - DNA, 25 bp, Homo sapien
cctttttgatcgcgggtggcgatga

SEQ ID NO: 1063792 - DNA, 25 bp, Homo sapien
ttgatcgcgggtggcgatgagcgcc

SEQ ID NO: 1063793 - DNA, 25 bp, Homo sapien
cgatgagcgcctcgaccgaggtgta

SEQ ID NO: 1063794 - DNA, 25 bp, Homo sapien
cctcgaccgaggtgtaggaggtgaa

SEQ ID NO: 1063795 - DNA, 25 bp, Homo sapien
tgagcgcctcgaccgaggtgtagga

SEQ ID NO: 1063796 - DNA, 25 bp, Homo sapien
atcgccacccgcgatcaaaaagggt

SEQ ID NO: 1063797 - DNA, 25 bp, Homo sapien
ttcacctcctacacctcggtcgagg

SEQ ID NO: 1063798 - DNA, 25 bp, Homo sapien
tacacctcggtcgaggcgctcatcg

SEQ ID NO: 1063799 - DNA, 25 bp, Homo sapien
tcatcgccacccgcgatcaaaaagg

SEQ ID NO: 1063800 - DNA, 25 bp, Homo sapien
tcctacacctcggtcgaggcgctca

SEQ ID NO: 1063801 - DNA, 25 bp, Homo sapien
gcgctcatcgccacccgcgatcaaa

SEQ ID NO: 1063802 - DNA, 25 bp, Homo sapien
tttaagctctggtaagatcacatgg

SEQ ID NO: 1063803 - DNA, 25 bp, Homo sapien
taagctctggtaagatcacatggaa

SEQ ID NO: 1063804 - DNA, 25 bp, Homo sapien
tagtagtatttaagctctggtaaga

SEQ ID NO: 1063805 - DNA, 25 bp, Homo sapien
gaatagtagtatttaagctctggta

SEQ ID NO: 1063806 - DNA, 25 bp, Homo sapien
tagaatagtagtatttaagctctgg

SEQ ID NO: 1063807 - DNA, 25 bp, Homo sapien
aagctctggtaagatcacatggaag

SEQ ID NO: 1063808 - DNA, 25 bp, Homo sapien
tccatgtgatcttaccagagcttaa

SEQ ID NO: 1063809 - DNA, 25 bp, Homo sapien
tcttaccagagcttaaatactacta

SEQ ID NO: 1063810 - DNA, 25 bp, Homo sapien
taccagagcttaaatactactattc

SEQ ID NO: 1063811 - DNA, 25 bp, Homo sapien
cttccatgtgatcttaccagagctt

SEQ ID NO: 1063812 - DNA, 25 bp, Homo sapien
gatcttaccagagcttaaatactac

SEQ ID NO: 1063813 - DNA, 25 bp, Homo sapien
ccatgtgatcttaccagagcttaaa

SEQ ID NO: 1063814 - DNA, 25 bp, Homo sapien
gaaagtacatcccataagactacat

SEQ ID NO: 1063815 - DNA, 25 bp, Homo sapien
taagactacatacagtataatacta

SEQ ID NO: 1063816 - DNA, 25 bp, Homo sapien
aaatggatgaactatagctgcaggc

SEQ ID NO: 1063817 - DNA, 25 bp, Homo sapien
gaactatagctgcaggcaacaacat

SEQ ID NO: 1063818 - DNA, 25 bp, Homo sapien
ggatgaactatagctgcaggcaaca

SEQ ID NO: 1063819 - DNA, 25 bp, Homo sapien
taaagcagaatatcattaagtatac

SEQ ID NO: 1063820 - DNA, 25 bp, Homo sapien
gtatacttaatgatattctgcttta

SEQ ID NO: 1063821 - DNA, 25 bp, Homo sapien
tgttgcctgcagctatagttcatcc

SEQ ID NO: 1063822 - DNA, 25 bp, Homo sapien
atgttgttgcctgcagctatagttc

SEQ ID NO: 1063823 - DNA, 25 bp, Homo sapien
atgtagtcttatgggatgtactttc

SEQ ID NO: 1063824 - DNA, 25 bp, Homo sapien
aatagtattatactgtatgtagtct

SEQ ID NO: 1063825 - DNA, 25 bp, Homo sapien
gcctgcagctatagttcatccattt

SEQ ID NO: 1063826 - DNA, 25 bp, Homo sapien
ccttgggatatccaaggtctccaga

SEQ ID NO: 1063827 - DNA, 25 bp, Homo sapien
tgacgcatagaaggcattggataag

SEQ ID NO: 1063828 - DNA, 25 bp, Homo sapien
caaaattcctgacgcatagaaggca

SEQ ID NO: 1063829 - DNA, 25 bp, Homo sapien
aagtatctgctatgtcactaattag

SEQ ID NO: 1063830 - DNA, 25 bp, Homo sapien
gattacttaaaggagtcagttccaa

SEQ ID NO: 1063831 - DNA, 25 bp, Homo sapien
caaatgggtcacctcttgtgttgtt

SEQ ID NO: 1063832 - DNA, 25 bp, Homo sapien
taaacaacacaagaggtgacccatt

SEQ ID NO: 1063833 - DNA, 25 bp, Homo sapien
aacaaagctgaggtgtaaacaacac

SEQ ID NO: 1063834 - DNA, 25 bp, Homo sapien
tggaactgactcctttaagtaatct

SEQ ID NO: 1063835 - DNA, 25 bp, Homo sapien
gagctagagtagactgaaatgggaa

SEQ ID NO: 1063836 - DNA, 25 bp, Homo sapien
tggagaccttggatatcccaagggc

SEQ ID NO: 1063837 - DNA, 25 bp, Homo sapien
tatccaatgccttctatgcgtcagg

SEQ ID NO: 1063838 - DNA, 25 bp, Homo sapien
tgaaactgaaagagcgagtgctgat

SEQ ID NO: 1063839 - DNA, 25 bp, Homo sapien
aactgaaagagcgagtgctgatacc

SEQ ID NO: 1063840 - DNA, 25 bp, Homo sapien
gagcgagtgctgatacctgtcaagc

SEQ ID NO: 1063841 - DNA, 25 bp, Homo sapien
gaaagagcgagtgctgatacctgtc

SEQ ID NO: 1063842 - DNA, 25 bp, Homo sapien
tctcataagaacatgaaactgaaag

SEQ ID NO: 1063843 - DNA, 25 bp, Homo sapien
cgagtgctgatacctgtcaagcagt

SEQ ID NO: 1063844 - DNA, 25 bp, Homo sapien
caggtatcagcactcgctctttcag

SEQ ID NO: 1063845 - DNA, 25 bp, Homo sapien
tgacaggtatcagcactcgctcttt

SEQ ID NO: 1063846 - DNA, 25 bp, Homo sapien
actgcttgacaggtatcagcactcg

SEQ ID NO: 1063847 - DNA, 25 bp, Homo sapien
gcttgacaggtatcagcactcgctc

SEQ ID NO: 1063848 - DNA, 25 bp, Homo sapien
atcagcactcgctctttcagtttca

SEQ ID NO: 1063849 - DNA, 25 bp, Homo sapien
tcagtttcatgttcttatgagaaaa

SEQ ID NO: 1063850 - DNA, 25 bp, Homo sapien
tgcttgtagtacctgttactgagag

SEQ ID NO: 1063851 - DNA, 25 bp, Homo sapien
tatcaaagggtgctatatagtctct

SEQ ID NO: 1063852 - DNA, 25 bp, Homo sapien
gtttatccagcgtgttatcaaaggg

SEQ ID NO: 1063853 - DNA, 25 bp, Homo sapien
aactaataacatagctatagccagg

SEQ ID NO: 1063854 - DNA, 25 bp, Homo sapien
aagcctgtgaagcttctctttcatg

SEQ ID NO: 1063855 - DNA, 25 bp, Homo sapien
catgggctataataaagactcctgg

SEQ ID NO: 1063856 - DNA, 25 bp, Homo sapien
gataacacgctggataaactaaatg

SEQ ID NO: 1063857 - DNA, 25 bp, Homo sapien
ttttgacaaagagcaactcttcagg

SEQ ID NO: 1063858 - DNA, 25 bp, Homo sapien
tccccaggagtctttattatagccc

SEQ ID NO: 1063859 - DNA, 25 bp, Homo sapien
gataactcaaagatccaaagcactt

SEQ ID NO: 1063860 - DNA, 25 bp, Homo sapien
gaagagactatatagcaccctttga

SEQ ID NO: 1063861 - DNA, 25 bp, Homo sapien
catgaaagagaagcttcacaggctt

SEQ ID NO: 1063862 - DNA, 25 bp, Homo sapien
gactggtgcaaagatctctgtattg

SEQ ID NO: 1063863 - DNA, 25 bp, Homo sapien
aaagatctctgtattgggaaagggc

SEQ ID NO: 1063864 - DNA, 25 bp, Homo sapien
ggtgcaaagatctctgtattgggaa

SEQ ID NO: 1063865 - DNA, 25 bp, Homo sapien
gggaagattcttggaccacaaggga

SEQ ID NO: 1063866 - DNA, 25 bp, Homo sapien
aggaagagactggtgcaaagatctc

SEQ ID NO: 1063867 - DNA, 25 bp, Homo sapien
ggaccacaagggaatacaatcaaaa

SEQ ID NO: 1063868 - DNA, 25 bp, Homo sapien
caatacagagatctttgcaccagtc

SEQ ID NO: 1063869 - DNA, 25 bp, Homo sapien
gagatctttgcaccagtctcttcct

SEQ ID NO: 1063870 - DNA, 25 bp, Homo sapien
tcccttgtggtccaagaatcttccc

SEQ ID NO: 1063871 - DNA, 25 bp, Homo sapien
tgtggtccaagaatcttccccacaa

SEQ ID NO: 1063872 - DNA, 25 bp, Homo sapien
ttttgattgtattcccttgtggtcc

SEQ ID NO: 1063873 - DNA, 25 bp, Homo sapien
gccctttcccaatacagagatcttt

SEQ ID NO: 1063874 - DNA, 25 bp, Homo sapien
tatgcccacttgaatatggatctgc

SEQ ID NO: 1063875 - DNA, 25 bp, Homo sapien
gaagtctttggacccccatgtgagg

SEQ ID NO: 1063876 - DNA, 25 bp, Homo sapien
aggcttatgctcttatggcccatgc

SEQ ID NO: 1063877 - DNA, 25 bp, Homo sapien
ggtggagaccccaaatatgcccact

SEQ ID NO: 1063878 - DNA, 25 bp, Homo sapien
agctgcgcaaaggtggagaccccaa

SEQ ID NO: 1063879 - DNA, 25 bp, Homo sapien
catgtgaggcttatgctcttatggc

SEQ ID NO: 1063880 - DNA, 25 bp, Homo sapien
gcagatccatattcaagtgggcata

SEQ ID NO: 1063881 - DNA, 25 bp, Homo sapien
cacatgggggtccaaagacttcaat

SEQ ID NO: 1063882 - DNA, 25 bp, Homo sapien
ttggggtctccacctttgcgcagct

SEQ ID NO: 1063883 - DNA, 25 bp, Homo sapien
atgcagatccatattcaagtgggca

SEQ ID NO: 1063884 - DNA, 25 bp, Homo sapien
gcatgggccataagagcataagcct

SEQ ID NO: 1063885 - DNA, 25 bp, Homo sapien
gccataagagcataagcctcacatg

SEQ ID NO: 1063886 - DNA, 25 bp, Homo sapien
tgaatggagtacctgaaccctctcg

SEQ ID NO: 1063887 - DNA, 25 bp, Homo sapien
gatgatatctgtcaggagcaatttc

SEQ ID NO: 1063888 - DNA, 25 bp, Homo sapien
ggagcaatttctagagctgtcctac

SEQ ID NO: 1063889 - DNA, 25 bp, Homo sapien
tagagctgtcctacttgaatggagt

SEQ ID NO: 1063890 - DNA, 25 bp, Homo sapien
atggagtacctgaaccctctcgtgg

SEQ ID NO: 1063891 - DNA, 25 bp, Homo sapien
accctctcgtggacgtggggtgcca

SEQ ID NO: 1063892 - DNA, 25 bp, Homo sapien
aaattgctcctgacagatatcatcc

SEQ ID NO: 1063893 - DNA, 25 bp, Homo sapien
gtaggacagctctagaaattgctcc

SEQ ID NO: 1063894 - DNA, 25 bp, Homo sapien
agagggttcaggtactccattcaag

SEQ ID NO: 1063895 - DNA, 25 bp, Homo sapien
tccattcaagtaggacagctctaga

SEQ ID NO: 1063896 - DNA, 25 bp, Homo sapien
ccacgagagggttcaggtactccat

SEQ ID NO: 1063897 - DNA, 25 bp, Homo sapien
tggcaccccacgtccacgagagggt

SEQ ID NO: 1063898 - DNA, 25 bp, Homo sapien
acggacagcgggcatccagaggata

SEQ ID NO: 1063899 - DNA, 25 bp, Homo sapien
accagaggtgccactgtgactcgag

SEQ ID NO: 1063900 - DNA, 25 bp, Homo sapien
gacagcgggcatccagaggatacct

SEQ ID NO: 1063901 - DNA, 25 bp, Homo sapien
caccagaggtgccactgtgactcga

SEQ ID NO: 1063902 - DNA, 25 bp, Homo sapien
agcgggcatccagaggatacctttg

SEQ ID NO: 1063903 - DNA, 25 bp, Homo sapien
actgtgactcgaggcgtgccacccc

SEQ ID NO: 1063904 - DNA, 25 bp, Homo sapien
tatcctctggatgcccgctgtccgt

SEQ ID NO: 1063905 - DNA, 25 bp, Homo sapien
tcgagtcacagtggcacctctggtg

SEQ ID NO: 1063906 - DNA, 25 bp, Homo sapien
aaaggtatcctctggatgcccgctg

SEQ ID NO: 1063907 - DNA, 25 bp, Homo sapien
ctcgagtcacagtggcacctctggt

SEQ ID NO: 1063908 - DNA, 25 bp, Homo sapien
caaaggtatcctctggatgcccgct

SEQ ID NO: 1063909 - DNA, 25 bp, Homo sapien
gggtggcacgcctcgagtcacagtg

SEQ ID NO: 1063910 - DNA, 25 bp, Homo sapien
ttgaacaatgtgccatttcccagta

SEQ ID NO: 1063911 - DNA, 25 bp, Homo sapien
aatttgaacaatgtgccatttccca

SEQ ID NO: 1063912 - DNA, 25 bp, Homo sapien
taagaaatttgaacaatgtgccatt

SEQ ID NO: 1063913 - DNA, 25 bp, Homo sapien
tttgaacaatgtgccatttcccagt

SEQ ID NO: 1063914 - DNA, 25 bp, Homo sapien
atttgaacaatgtgccatttcccag

SEQ ID NO: 1063915 - DNA, 25 bp, Homo sapien
gtaagaaatttgaacaatgtgccat

SEQ ID NO: 1063916 - DNA, 25 bp, Homo sapien
ctgggaaatggcacattgttcaaat

SEQ ID NO: 1063917 - DNA, 25 bp, Homo sapien
atggcacattgttcaaatttcttac

SEQ ID NO: 1063918 - DNA, 25 bp, Homo sapien
aaatggcacattgttcaaatttctt

SEQ ID NO: 1063919 - DNA, 25 bp, Homo sapien
actgggaaatggcacattgttcaaa

SEQ ID NO: 1063920 - DNA, 25 bp, Homo sapien
tactgggaaatggcacattgttcaa

SEQ ID NO: 1063921 - DNA, 25 bp, Homo sapien
tgggaaatggcacattgttcaaatt

SEQ ID NO: 1063922 - DNA, 25 bp, Homo sapien
ctaggtactgggaaatggcacattg

SEQ ID NO: 1063923 - DNA, 25 bp, Homo sapien
ctgggaaatggcacattgttcaaat

SEQ ID NO: 1063924 - DNA, 25 bp, Homo sapien
atggcacattgttcaaatttcttac

SEQ ID NO: 1063925 - DNA, 25 bp, Homo sapien
actgggaaatggcacattgttcaaa

SEQ ID NO: 1063926 - DNA, 25 bp, Homo sapien
gtactgggaaatggcacattgttca

SEQ ID NO: 1063927 - DNA, 25 bp, Homo sapien
tgggaaatggcacattgttcaaatt

SEQ ID NO: 1063928 - DNA, 25 bp, Homo sapien
gaatgacagggcctcggtcctttat

SEQ ID NO: 1063929 - DNA, 25 bp, Homo sapien
gttgaatgacagggcctcggtcctt

SEQ ID NO: 1063930 - DNA, 25 bp, Homo sapien
gaagttgaatgacagggcctcggtc

SEQ ID NO: 1063931 - DNA, 25 bp, Homo sapien
agttgaatgacagggcctcggtcct

SEQ ID NO: 1063932 - DNA, 25 bp, Homo sapien
aagttgaatgacagggcctcggtcc

SEQ ID NO: 1063933 - DNA, 25 bp, Homo sapien
aaggaagttgaatgacagggcctcg

SEQ ID NO: 1063934 - DNA, 25 bp, Homo sapien
cgaggccctgtcattcaacttcctt

SEQ ID NO: 1063935 - DNA, 25 bp, Homo sapien
ataaaggaccgaggccctgtcattc

SEQ ID NO: 1063936 - DNA, 25 bp, Homo sapien
aaggaccgaggccctgtcattcaac

SEQ ID NO: 1063937 - DNA, 25 bp, Homo sapien
ggaccgaggccctgtcattcaactt

SEQ ID NO: 1063938 - DNA, 25 bp, Homo sapien
aggaccgaggccctgtcattcaact

SEQ ID NO: 1063939 - DNA, 25 bp, Homo sapien
gaccgaggccctgtcattcaacttc

SEQ ID NO: 1063940 - DNA, 25 bp, Homo sapien
atgtaattacctttcctactctcta

SEQ ID NO: 1063941 - DNA, 25 bp, Homo sapien
gatgtaattacctttcctactctct

SEQ ID NO: 1063942 - DNA, 25 bp, Homo sapien
tttcctactctctatgattttgatc

SEQ ID NO: 1063943 - DNA, 25 bp, Homo sapien
tgtaattacctttcctactctctat

SEQ ID NO: 1063944 - DNA, 25 bp, Homo sapien
gtaattacctttcctactctctatg

SEQ ID NO: 1063945 - DNA, 25 bp, Homo sapien
atagagagtaggaaaggtaattaca

SEQ ID NO: 1063946 - DNA, 25 bp, Homo sapien
tagagagtaggaaaggtaattacat

SEQ ID NO: 1063947 - DNA, 25 bp, Homo sapien
agagagtaggaaaggtaattacatc

SEQ ID NO: 1063948 - DNA, 25 bp, Homo sapien
gatcaaaatcatagagagtaggaaa

SEQ ID NO: 1063949 - DNA, 25 bp, Homo sapien
catagagagtaggaaaggtaattac

SEQ ID NO: 1063950 - DNA, 25 bp, Homo sapien
tacgcagaacaaagttacgaaggct

SEQ ID NO: 1063951 - DNA, 25 bp, Homo sapien
tacgaaggctacgaaggctattaca

SEQ ID NO: 1063952 - DNA, 25 bp, Homo sapien
caaagttacgaaggctacgaaggct

SEQ ID NO: 1063953 - DNA, 25 bp, Homo sapien
tacatacgcagaacaaagttacgaa

SEQ ID NO: 1063954 - DNA, 25 bp, Homo sapien
cagaacaaagttacgaaggctacga

SEQ ID NO: 1063955 - DNA, 25 bp, Homo sapien
ggctacgaaggctattacagccaga

SEQ ID NO: 1063956 - DNA, 25 bp, Homo sapien
taatagccttcgtagccttcgtaac

SEQ ID NO: 1063957 - DNA, 25 bp, Homo sapien
tctggctgtaatagccttcgtagcc

SEQ ID NO: 1063958 - DNA, 25 bp, Homo sapien
ccttcgtaactttgttctgcgtatg

SEQ ID NO: 1063959 - DNA, 25 bp, Homo sapien
tgtaatagccttcgtagccttcgta

SEQ ID NO: 1063960 - DNA, 25 bp, Homo sapien
gctgtaatagccttcgtagccttcg

SEQ ID NO: 1063961 - DNA, 25 bp, Homo sapien
gtagccttcgtaactttgttctgcg

SEQ ID NO: 1063962 - DNA, 25 bp, Homo sapien
tgagtcaggcagtataagcactgtt

SEQ ID NO: 1063963 - DNA, 25 bp, Homo sapien
ccctaaggagcagaatggttcgcct

SEQ ID NO: 1063964 - DNA, 25 bp, Homo sapien
gcgtttgacatctgtgaagcacaca

SEQ ID NO: 1063965 - DNA, 25 bp, Homo sapien
tggttcgccttttgagggtatctcc

SEQ ID NO: 1063966 - DNA, 25 bp, Homo sapien
tgccaccatgcaatgctttcctctg

SEQ ID NO: 1063967 - DNA, 25 bp, Homo sapien
tagacagtacaaccctaaggagcag

SEQ ID NO: 1063968 - DNA, 25 bp, Homo sapien
tgtgtgcttcacagatgtcaaacgc

SEQ ID NO: 1063969 - DNA, 25 bp, Homo sapien
cagaggaaagcattgcatggtggca

SEQ ID NO: 1063970 - DNA, 25 bp, Homo sapien
aaaaacagtgcttatactgcctgac

SEQ ID NO: 1063971 - DNA, 25 bp, Homo sapien
ggagataccctcaaaaggcgaacca

SEQ ID NO: 1063972 - DNA, 25 bp, Homo sapien
aggcgaaccattctgctccttaggg

SEQ ID NO: 1063973 - DNA, 25 bp, Homo sapien
cacacaaggaaatggtcttaaagag

SEQ ID NO: 1063974 - DNA, 25 bp, Homo sapien
tggggaggttcaagattcttatgaa

SEQ ID NO: 1063975 - DNA, 25 bp, Homo sapien
agaatattatgactatggacatggg

SEQ ID NO: 1063976 - DNA, 25 bp, Homo sapien
catggggaggttcaagattcttatg

SEQ ID NO: 1063977 - DNA, 25 bp, Homo sapien
gacatggggaggttcaagattctta

SEQ ID NO: 1063978 - DNA, 25 bp, Homo sapien
tattatgactatggacatggggagg

SEQ ID NO: 1063979 - DNA, 25 bp, Homo sapien
tatgactatggacatggggaggttc

SEQ ID NO: 1063980 - DNA, 25 bp, Homo sapien
cccatgtccatagtcataatattct

SEQ ID NO: 1063981 - DNA, 25 bp, Homo sapien
taagaatcttgaacctccccatgtc

SEQ ID NO: 1063982 - DNA, 25 bp, Homo sapien
gaacctccccatgtccatagtcata

SEQ ID NO: 1063983 - DNA, 25 bp, Homo sapien
gaatcttgaacctccccatgtccat

SEQ ID NO: 1063984 - DNA, 25 bp, Homo sapien
cataagaatcttgaacctccccatg

SEQ ID NO: 1063985 - DNA, 25 bp, Homo sapien
ttcataagaatcttgaacctcccca

SEQ ID NO: 1063986 - DNA, 25 bp, Homo sapien
gggaggttcaagattcttatgaagc

SEQ ID NO: 1063987 - DNA, 25 bp, Homo sapien
agaatattatgactatggacatggg

SEQ ID NO: 1063988 - DNA, 25 bp, Homo sapien
gacatggggaggttcaagattctta

SEQ ID NO: 1063989 - DNA, 25 bp, Homo sapien
ggactcagaatattatgactatgga

SEQ ID NO: 1063990 - DNA, 25 bp, Homo sapien
gttcaagattcttatgaagcttatg

SEQ ID NO: 1063991 - DNA, 25 bp, Homo sapien
tatgactatggacatggggaggttc

SEQ ID NO: 1063992 - DNA, 25 bp, Homo sapien
acatcgctcaagtgtgtcctcaaga

SEQ ID NO: 1063993 - DNA, 25 bp, Homo sapien
gcagtggatgcagcgagagctacct

SEQ ID NO: 1063994 - DNA, 25 bp, Homo sapien
taagatactggttgacagtctcccc

SEQ ID NO: 1063995 - DNA, 25 bp, Homo sapien
aacactgtgtgtgattgcacccaag

SEQ ID NO: 1063996 - DNA, 25 bp, Homo sapien
gcacagtatgaagtagccaatcagc

SEQ ID NO: 1063997 - DNA, 25 bp, Homo sapien
tttgtgctcctgatacgacgttgcc

SEQ ID NO: 1063998 - DNA, 25 bp, Homo sapien
tggcaacgtcgtatcaggagcacaa

SEQ ID NO: 1063999 - DNA, 25 bp, Homo sapien
gaaaaggtagctctcgctgcatcca

SEQ ID NO: 1064000 - DNA, 25 bp, Homo sapien
tcttgaggacacacttgagcgatgt

SEQ ID NO: 1064001 - DNA, 25 bp, Homo sapien
gattggctacttcatactgtgctga

SEQ ID NO: 1064002 - DNA, 25 bp, Homo sapien
tacttgggtgcaatcacacacagtg

SEQ ID NO: 1064003 - DNA, 25 bp, Homo sapien
tatcttagcgtgaactgtcaatcgc

SEQ ID NO: 1064004 - DNA, 25 bp, Homo sapien
agaagtcttcccaccttacctgagg

SEQ ID NO: 1064005 - DNA, 25 bp, Homo sapien
gattgcacatccctctaccagagag

SEQ ID NO: 1064006 - DNA, 25 bp, Homo sapien
gaaaggccattgcagactcactaag

SEQ ID NO: 1064007 - DNA, 25 bp, Homo sapien
tatccctaagtgctgtcgccacatg

SEQ ID NO: 1064008 - DNA, 25 bp, Homo sapien
gaacctcgttgtgggagattactcc

SEQ ID NO: 1064009 - DNA, 25 bp, Homo sapien
tcaagcaaggtgttgggtatctcca

SEQ ID NO: 1064010 - DNA, 25 bp, Homo sapien
caaatgtgatctgtacgccagtccc

SEQ ID NO: 1064011 - DNA, 25 bp, Homo sapien
taatcttagtgagtctgcaatggcc

SEQ ID NO: 1064012 - DNA, 25 bp, Homo sapien
aaaacaatttggcaggcaccctcag

SEQ ID NO: 1064013 - DNA, 25 bp, Homo sapien
tataaaccatgtggcgacagcactt

SEQ ID NO: 1064014 - DNA, 25 bp, Homo sapien
ggagtaatctcccacaacgaggttc

SEQ ID NO: 1064015 - DNA, 25 bp, Homo sapien
ggagatacccaacaccttgcttgag

SEQ ID NO: 1064016 - DNA, 25 bp, Homo sapien
gacgactggaatgggaccaggccgt

SEQ ID NO: 1064017 - DNA, 25 bp, Homo sapien
acgactggaatgggaccaggccgtc

SEQ ID NO: 1064018 - DNA, 25 bp, Homo sapien
ggacgactggaatgggaccaggccg

SEQ ID NO: 1064019 - DNA, 25 bp, Homo sapien
aggacgactggaatgggaccaggcc

SEQ ID NO: 1064020 - DNA, 25 bp, Homo sapien
gccaggacgactggaatgggaccag

SEQ ID NO: 1064021 - DNA, 25 bp, Homo sapien
ccaggacgactggaatgggaccagg

SEQ ID NO: 1064022 - DNA, 25 bp, Homo sapien
cggcctggtcccattccagtcgtcc

SEQ ID NO: 1064023 - DNA, 25 bp, Homo sapien
ctggtcccattccagtcgtcctggc

SEQ ID NO: 1064024 - DNA, 25 bp, Homo sapien
cctggtcccattccagtcgtcctgg

SEQ ID NO: 1064025 - DNA, 25 bp, Homo sapien
acggcctggtcccattccagtcgtc

SEQ ID NO: 1064026 - DNA, 25 bp, Homo sapien
ggcctggtcccattccagtcgtcct

SEQ ID NO: 1064027 - DNA, 25 bp, Homo sapien
gacggcctggtcccattccagtcgt

SEQ ID NO: 1064028 - DNA, 25 bp, Homo sapien
ggagcatacagagagcacccatatg

SEQ ID NO: 1064029 - DNA, 25 bp, Homo sapien
gggagcatacagagagcacccatat

SEQ ID NO: 1064030 - DNA, 25 bp, Homo sapien
agcatacagagagcacccatatgga

SEQ ID NO: 1064031 - DNA, 25 bp, Homo sapien
gcatacagagagcacccatatggac

SEQ ID NO: 1064032 - DNA, 25 bp, Homo sapien
gagcatacagagagcacccatatgg

SEQ ID NO: 1064033 - DNA, 25 bp, Homo sapien
aagggagcatacagagagcacccat

SEQ ID NO: 1064034 - DNA, 25 bp, Homo sapien
atatgggtgctctctgtatgctccc

SEQ ID NO: 1064035 - DNA, 25 bp, Homo sapien
ccatatgggtgctctctgtatgctc

SEQ ID NO: 1064036 - DNA, 25 bp, Homo sapien
tatgggtgctctctgtatgctccct

SEQ ID NO: 1064037 - DNA, 25 bp, Homo sapien
tccatatgggtgctctctgtatgct

SEQ ID NO: 1064038 - DNA, 25 bp, Homo sapien
catatgggtgctctctgtatgctcc

SEQ ID NO: 1064039 - DNA, 25 bp, Homo sapien
gtccatatgggtgctctctgtatgc

SEQ ID NO: 1064040 - DNA, 25 bp, Homo sapien
aaaatatcagttatgagcaaagttg

SEQ ID NO: 1064041 - DNA, 25 bp, Homo sapien
cagttatgagcaaagttgttactga

SEQ ID NO: 1064042 - DNA, 25 bp, Homo sapien
tcagttatgagcaaagttgttactg

SEQ ID NO: 1064043 - DNA, 25 bp, Homo sapien
gttatgagcaaagttgttactgatt

SEQ ID NO: 1064044 - DNA, 25 bp, Homo sapien
tatgagcaaagttgttactgatttc

SEQ ID NO: 1064045 - DNA, 25 bp, Homo sapien
tatcagttatgagcaaagttgttac

SEQ ID NO: 1064046 - DNA, 25 bp, Homo sapien
tcagtaacaactttgctcataactg

SEQ ID NO: 1064047 - DNA, 25 bp, Homo sapien
agtaacaactttgctcataactgat

SEQ ID NO: 1064048 - DNA, 25 bp, Homo sapien
gaaatcagtaacaactttgctcata

SEQ ID NO: 1064049 - DNA, 25 bp, Homo sapien
gtaacaactttgctcataactgata

SEQ ID NO: 1064050 - DNA, 25 bp, Homo sapien
caactttgctcataactgatatttt

SEQ ID NO: 1064051 - DNA, 25 bp, Homo sapien
aatcagtaacaactttgctcataac

SEQ ID NO: 1064052 - DNA, 25 bp, Homo sapien
tcctgggagatacaagaaatcagta

SEQ ID NO: 1064053 - DNA, 25 bp, Homo sapien
aactgatattttcccctcatgtttg

SEQ ID NO: 1064054 - DNA, 25 bp, Homo sapien
gaaatcagtaacaactttgctcata

SEQ ID NO: 1064055 - DNA, 25 bp, Homo sapien
gtaacaactttgctcataactgata

SEQ ID NO: 1064056 - DNA, 25 bp, Homo sapien
tgtctgttgtgggtaaagcaacagg

SEQ ID NO: 1064057 - DNA, 25 bp, Homo sapien
tgggtaaagcaacaggaatcctggg

SEQ ID NO: 1064058 - DNA, 25 bp, Homo sapien
tccattcttaactctgcattctggc

SEQ ID NO: 1064059 - DNA, 25 bp, Homo sapien
taagtgtgtagatgcttttttcttt

SEQ ID NO: 1064060 - DNA, 25 bp, Homo sapien
ccattcttaactctgcattctggct

SEQ ID NO: 1064061 - DNA, 25 bp, Homo sapien
ttaagtgtgtagatgcttttttctt

SEQ ID NO: 1064062 - DNA, 25 bp, Homo sapien
ttctggcttctgtatgtagtatttt

SEQ ID NO: 1064063 - DNA, 25 bp, Homo sapien
aaagaaaaaagcatctacacactta

SEQ ID NO: 1064064 - DNA, 25 bp, Homo sapien
gccagaatgcagagttaagaatgga

SEQ ID NO: 1064065 - DNA, 25 bp, Homo sapien
aaaatactacatacagaagccagaa

SEQ ID NO: 1064066 - DNA, 25 bp, Homo sapien
aagaaaaaagcatctacacacttaa

SEQ ID NO: 1064067 - DNA, 25 bp, Homo sapien
agccagaatgcagagttaagaatgg

SEQ ID NO: 1064068 - DNA, 25 bp, Homo sapien
tccattcttaactctgcattctggc

SEQ ID NO: 1064069 - DNA, 25 bp, Homo sapien
taagtgtgtagatgcttttttcttt

SEQ ID NO: 1064070 - DNA, 25 bp, Homo sapien
tgtctaagtgtttttcttcgtggtc

SEQ ID NO: 1064071 - DNA, 25 bp, Homo sapien
tgtttaaatataaacagaagtgtac

SEQ ID NO: 1064072 - DNA, 25 bp, Homo sapien
ttctggcttctgtatgtagtatttt

SEQ ID NO: 1064073 - DNA, 25 bp, Homo sapien
aactctgcattctggcttctgtatg

SEQ ID NO: 1064074 - DNA, 25 bp, Homo sapien
aacattaacggcagtaggcaccacc

SEQ ID NO: 1064075 - DNA, 25 bp, Homo sapien
taaaaagggacactgcagctgaatg

SEQ ID NO: 1064076 - DNA, 25 bp, Homo sapien
gggttttgaaatctagccccagaca

SEQ ID NO: 1064077 - DNA, 25 bp, Homo sapien
cctttataaaagcacatggcggttg

SEQ ID NO: 1064078 - DNA, 25 bp, Homo sapien
catgtaaaagtgagctcagacgtct

SEQ ID NO: 1064079 - DNA, 25 bp, Homo sapien
tgaggcatcccgtaaagttgtagtt

SEQ ID NO: 1064080 - DNA, 25 bp, Homo sapien
tatctctcaacacagtatgtctggg

SEQ ID NO: 1064081 - DNA, 25 bp, Homo sapien
ccttaagattcaaccgccatgtgct

SEQ ID NO: 1064082 - DNA, 25 bp, Homo sapien
gagacatacttgactaacttgggaa

SEQ ID NO: 1064083 - DNA, 25 bp, Homo sapien
aactacaactttacgggatgcctca

SEQ ID NO: 1064084 - DNA, 25 bp, Homo sapien
cattttttagagacgtctgagctca

SEQ ID NO: 1064085 - DNA, 25 bp, Homo sapien
ggtggtgcctactgccgttaatgtt

SEQ ID NO: 1064086 - DNA, 25 bp, Homo sapien
ggtagcttaaacttatgtcaaaatg

SEQ ID NO: 1064087 - DNA, 25 bp, Homo sapien
tgctacatgtgtaagtctgcctaaa

SEQ ID NO: 1064088 - DNA, 25 bp, Homo sapien
taattggatttgtaccgtcctccca

SEQ ID NO: 1064089 - DNA, 25 bp, Homo sapien
tgtctgcagcagtttgtcaataaag

SEQ ID NO: 1064090 - DNA, 25 bp, Homo sapien
ttctcggaagattaaatgctacatg

SEQ ID NO: 1064091 - DNA, 25 bp, Homo sapien
cgtcctcccattttgttctcggaag

SEQ ID NO: 1064092 - DNA, 25 bp, Homo sapien
gaggacggtacaaatccaattagga

SEQ ID NO: 1064093 - DNA, 25 bp, Homo sapien
catgtagcatttaatcttccgagaa

SEQ ID NO: 1064094 - DNA, 25 bp, Homo sapien
ctttattgacaaactgctgcagaca

SEQ ID NO: 1064095 - DNA, 25 bp, Homo sapien
tttaggcagacttacacatgtagca

SEQ ID NO: 1064096 - DNA, 25 bp, Homo sapien
tcttccgagaacaaaatgggaggac

SEQ ID NO: 1064097 - DNA, 25 bp, Homo sapien
cattttgacataagtttaagctacc

SEQ ID NO: 1064098 - DNA, 25 bp, Homo sapien
agttgatggagttgttaagttttag

SEQ ID NO: 1064099 - DNA, 25 bp, Homo sapien
gctgttgtatccaatcctatcaaaa

SEQ ID NO: 1064100 - DNA, 25 bp, Homo sapien
tgtatccaatcctatcaaaaattct

SEQ ID NO: 1064101 - DNA, 25 bp, Homo sapien
tgttggaagctgttgtatccaatcc

SEQ ID NO: 1064102 - DNA, 25 bp, Homo sapien
tcaccccctggaagttgttggaagc

SEQ ID NO: 1064103 - DNA, 25 bp, Homo sapien
gaagctgttgtatccaatcctatca

SEQ ID NO: 1064104 - DNA, 25 bp, Homo sapien
tagaatttttgataggattggatac

SEQ ID NO: 1064105 - DNA, 25 bp, Homo sapien
ggattggatacaacagcttccaaca

SEQ ID NO: 1064106 - DNA, 25 bp, Homo sapien
ctaaaacttaacaactccatcaact

SEQ ID NO: 1064107 - DNA, 25 bp, Homo sapien
gcttccaacaacttccagggggtga

SEQ ID NO: 1064108 - DNA, 25 bp, Homo sapien
ttttgataggattggatacaacagc

SEQ ID NO: 1064109 - DNA, 25 bp, Homo sapien
gataggattggatacaacagcttcc

SEQ ID NO: 1064110 - DNA, 25 bp, Homo sapien
tgtcacactttagagccacctaggg

SEQ ID NO: 1064111 - DNA, 25 bp, Homo sapien
cagtttaggtggctctcttagggaa

SEQ ID NO: 1064112 - DNA, 25 bp, Homo sapien
tacagaaggtgcaaaccaggctggc

SEQ ID NO: 1064113 - DNA, 25 bp, Homo sapien
ggttcagagccagcctatcatgcca

SEQ ID NO: 1064114 - DNA, 25 bp, Homo sapien
tttatgcggcaacatatggtttttc

SEQ ID NO: 1064115 - DNA, 25 bp, Homo sapien
taagagttatggctaatttatgcgg

SEQ ID NO: 1064116 - DNA, 25 bp, Homo sapien
agaattgtttatgcaagttgctgtc

SEQ ID NO: 1064117 - DNA, 25 bp, Homo sapien
aattgtttatgcaagttgctgtcac

SEQ ID NO: 1064118 - DNA, 25 bp, Homo sapien
tctagtccaggaaatgcctcaggag

SEQ ID NO: 1064119 - DNA, 25 bp, Homo sapien
ggtcttcactacccattctagtcca

SEQ ID NO: 1064120 - DNA, 25 bp, Homo sapien
ctgacatgggtcttcactacccatt

SEQ ID NO: 1064121 - DNA, 25 bp, Homo sapien
ctagtccaggaaatgcctcaggagt

SEQ ID NO: 1064122 - DNA, 25 bp, Homo sapien
taaggaagggtcagagtattccctc

SEQ ID NO: 1064123 - DNA, 25 bp, Homo sapien
tgttgatatgcaccctgtcctaatg

SEQ ID NO: 1064124 - DNA, 25 bp, Homo sapien
taacttcattcttagcctgggacag

SEQ ID NO: 1064125 - DNA, 25 bp, Homo sapien
gacagtgagcccatgtgttgcctaa

SEQ ID NO: 1064126 - DNA, 25 bp, Homo sapien
ttgccggtacactggtaaacagatg

SEQ ID NO: 1064127 - DNA, 25 bp, Homo sapien
cagatgtgatgtaagtcactctcat

SEQ ID NO: 1064128 - DNA, 25 bp, Homo sapien
cttgccggtacactggtaaacagat

SEQ ID NO: 1064129 - DNA, 25 bp, Homo sapien
aaaggtccagattcgtacctcggct

SEQ ID NO: 1064130 - DNA, 25 bp, Homo sapien
tattgataagtgctccagcttggat

SEQ ID NO: 1064131 - DNA, 25 bp, Homo sapien
tctgcctataatgtgctgctctatg

SEQ ID NO: 1064132 - DNA, 25 bp, Homo sapien
gttgtataccctcattgcaccctgt

SEQ ID NO: 1064133 - DNA, 25 bp, Homo sapien
ctgtgcctgacaaaagttcttgaat

SEQ ID NO: 1064134 - DNA, 25 bp, Homo sapien
tgtgcctgacaaaagttcttgaatt

SEQ ID NO: 1064135 - DNA, 25 bp, Homo sapien
gacttctctatgtttgcaatattac

SEQ ID NO: 1064136 - DNA, 25 bp, Homo sapien
gtgcctgacaaaagttcttgaattc

SEQ ID NO: 1064137 - DNA, 25 bp, Homo sapien
ctggccagtgcttccgatcttttaa

SEQ ID NO: 1064138 - DNA, 25 bp, Homo sapien
tgggatcctcttaatggcttgccag

SEQ ID NO: 1064139 - DNA, 25 bp, Homo sapien
tcctcttaatggcttgccagagtgc

SEQ ID NO: 1064140 - DNA, 25 bp, Homo sapien
cagcctccatatacgatcacagaca

SEQ ID NO: 1064141 - DNA, 25 bp, Homo sapien
gaagggttcaaggactcacaggctg

SEQ ID NO: 1064142 - DNA, 25 bp, Homo sapien
taattgttagcaccacagtcccctg

SEQ ID NO: 1064143 - DNA, 25 bp, Homo sapien
gcagtgatcaccctcccttgggagc

SEQ ID NO: 1064144 - DNA, 25 bp, Homo sapien
taggaggccatgctagggataccca

SEQ ID NO: 1064145 - DNA, 25 bp, Homo sapien
tctcaaaggaagatcccaagggcca

SEQ ID NO: 1064146 - DNA, 25 bp, Homo sapien
gtgggccaagcccaacaagtcaggg

SEQ ID NO: 1064147 - DNA, 25 bp, Homo sapien
tattgtgtctagaccccatgccagg

SEQ ID NO: 1064148 - DNA, 25 bp, Homo sapien
gaaggcaagcaggtagagcaacagc

SEQ ID NO: 1064149 - DNA, 25 bp, Homo sapien
taggcaataggagtggctctgaggg

SEQ ID NO: 1064150 - DNA, 25 bp, Homo sapien
ctgtaggcaataggagtggctctga

SEQ ID NO: 1064151 - DNA, 25 bp, Homo sapien
aggcaataggagtggctctgagggg

SEQ ID NO: 1064152 - DNA, 25 bp, Homo sapien
tgtaggcaataggagtggctctgag

SEQ ID NO: 1064153 - DNA, 25 bp, Homo sapien
aagagcagcagccaagggcagaagt

SEQ ID NO: 1064154 - DNA, 25 bp, Homo sapien
gcagcagccaagggcagaagtgggc

SEQ ID NO: 1064155 - DNA, 25 bp, Homo sapien
gagcagcagccaagggcagaagtgg

SEQ ID NO: 1064156 - DNA, 25 bp, Homo sapien
ctgaggtcgaagagcagcagccaag

SEQ ID NO: 1064157 - DNA, 25 bp, Homo sapien
aaagcctagggacattgaacaattt

SEQ ID NO: 1064158 - DNA, 25 bp, Homo sapien
atgaaagcctagggacattgaacaa

SEQ ID NO: 1064159 - DNA, 25 bp, Homo sapien
taaaatgaaagcctagggacattga

SEQ ID NO: 1064160 - DNA, 25 bp, Homo sapien
ttaaaatgaaagcctagggacattg

SEQ ID NO: 1064161 - DNA, 25 bp, Homo sapien
tcatctagctggcccgggaacttta

SEQ ID NO: 1064162 - DNA, 25 bp, Homo sapien
tctagctggcccgggaactttagaa

SEQ ID NO: 1064163 - DNA, 25 bp, Homo sapien
ggtcatctagctggcccgggaactt

SEQ ID NO: 1064164 - DNA, 25 bp, Homo sapien
tccttcctgggctaccccatggcag

SEQ ID NO: 1064165 - DNA, 25 bp, Homo sapien
caagtgggaggagatagacatgaac

SEQ ID NO: 1064166 - DNA, 25 bp, Homo sapien
tatgctttacgatgaggctgctgat

SEQ ID NO: 1064167 - DNA, 25 bp, Homo sapien
cagttttagtcatcttgtagctcca

SEQ ID NO: 1064168 - DNA, 25 bp, Homo sapien
tgtcaacaccgtggttcagatcctg

SEQ ID NO: 1064169 - DNA, 25 bp, Homo sapien
tccagcccagccccacgttgcgctt

SEQ ID NO: 1064170 - DNA, 25 bp, Homo sapien
ccagcccagccccacgttgcgcttc

SEQ ID NO: 1064171 - DNA, 25 bp, Homo sapien
cagcccagccccacgttgcgcttca

SEQ ID NO: 1064172 - DNA, 25 bp, Homo sapien
agcccagccccacgttgcgcttcat

SEQ ID NO: 1064173 - DNA, 25 bp, Homo sapien
ttcccgtgcgtgtcttctctcagca

SEQ ID NO: 1064174 - DNA, 25 bp, Homo sapien
cctaggggtggaccatatccctgac

SEQ ID NO: 1064175 - DNA, 25 bp, Homo sapien
ggagccgcctctccgctcccctagg

SEQ ID NO: 1064176 - DNA, 25 bp, Homo sapien
tgctcttcccgtgcgtgtcttctct

SEQ ID NO: 1064177 - DNA, 25 bp, Homo sapien
ccgggagaggactaaccgccgcagc

SEQ ID NO: 1064178 - DNA, 25 bp, Homo sapien
ggcaatatgtcggaggcgacggcgg

SEQ ID NO: 1064179 - DNA, 25 bp, Homo sapien
ctgcgggcaatatgtcggaggcgac

SEQ ID NO: 1064180 - DNA, 25 bp, Homo sapien
agtcccgggtatcagccgcgcgctc

SEQ ID NO: 1064181 - DNA, 25 bp, Homo sapien
cctccccccggtgctctccgcttcg

SEQ ID NO: 1064182 - DNA, 25 bp, Homo sapien
tccccccggtgctctccgcttcgcc

SEQ ID NO: 1064183 - DNA, 25 bp, Homo sapien
ctccccccggtgctctccgcttcgc

SEQ ID NO: 1064184 - DNA, 25 bp, Homo sapien
ccccccggtgctctccgcttcgccg

SEQ ID NO: 1064185 - DNA, 25 bp, Homo sapien
cccgctcgttgccaggccgagcctg

SEQ ID NO: 1064186 - DNA, 25 bp, Homo sapien
caggccgagcctgagccgctctgct

SEQ ID NO: 1064187 - DNA, 25 bp, Homo sapien
ccgtgcgcccgctcgttgccaggcc

SEQ ID NO: 1064188 - DNA, 25 bp, Homo sapien
ggccgagcctgagccgctctgctca

SEQ ID NO: 1064189 - DNA, 25 bp, Homo sapien
atcccggctcacagagcggatttcg

SEQ ID NO: 1064190 - DNA, 25 bp, Homo sapien
gctcacagagcggatttcgacagta

SEQ ID NO: 1064191 - DNA, 25 bp, Homo sapien
tggcttccactagagccccccgagg

SEQ ID NO: 1064192 - DNA, 25 bp, Homo sapien
cagtaagatgtcctgttgggacctc

SEQ ID NO: 1064193 - DNA, 25 bp, Homo sapien
tggtgcgggaacgaacactggtcac

SEQ ID NO: 1064194 - DNA, 25 bp, Homo sapien
ctggtgcgggaacgaacactggtca

SEQ ID NO: 1064195 - DNA, 25 bp, Homo sapien
ctggagaggcctgttccagaactgc

SEQ ID NO: 1064196 - DNA, 25 bp, Homo sapien
ggagaggcctgttccagaactgctc

SEQ ID NO: 1064197 - DNA, 25 bp, Homo sapien
gggctggagaggcctgttccagaac

SEQ ID NO: 1064198 - DNA, 25 bp, Homo sapien
ctgtagaggcacaacagtttgggtg

SEQ ID NO: 1064199 - DNA, 25 bp, Homo sapien
cgaagagtgctatgagctggcagaa

SEQ ID NO: 1064200 - DNA, 25 bp, Homo sapien
ttgatgtagtggacgaagagtgcta

SEQ ID NO: 1064201 - DNA, 25 bp, Homo sapien
tggcagaagaagagctgcaactcaa

SEQ ID NO: 1064202 - DNA, 25 bp, Homo sapien
ggcagaagaagagctgcaactcaaa

SEQ ID NO: 1064203 - DNA, 25 bp, Homo sapien
ggtgggaaggtggataccaccacac

SEQ ID NO: 1064204 - DNA, 25 bp, Homo sapien
gggtgggaaggtggataccaccaca

SEQ ID NO: 1064205 - DNA, 25 bp, Homo sapien
gctaagattgcgccattccactcca

SEQ ID NO: 1064206 - DNA, 25 bp, Homo sapien
agtgagctaagattgcgccattcca

SEQ ID NO: 1064207 - DNA, 25 bp, Homo sapien
tgagctaagattgcgccattccact

SEQ ID NO: 1064208 - DNA, 25 bp, Homo sapien
gagctaagattgcgccattccactc

SEQ ID NO: 1064209 - DNA, 25 bp, Homo sapien
ccaggaaattacctacaggagtagg

SEQ ID NO: 1064210 - DNA, 25 bp, Homo sapien
caggagtaggacaggaccccgagaa

SEQ ID NO: 1064211 - DNA, 25 bp, Homo sapien
caggccaggaaattacctacaggag

SEQ ID NO: 1064212 - DNA, 25 bp, Homo sapien
agtcaggccaggaaattacctacag

SEQ ID NO: 1064213 - DNA, 25 bp, Homo sapien
ccatttctttccacagagactgtcc

SEQ ID NO: 1064214 - DNA, 25 bp, Homo sapien
attctctgaccttcatcggcctcca

SEQ ID NO: 1064215 - DNA, 25 bp, Homo sapien
ttctctgaccttcatcggcctccag

SEQ ID NO: 1064216 - DNA, 25 bp, Homo sapien
cattctctgaccttcatcggcctcc

SEQ ID NO: 1064217 - DNA, 25 bp, Homo sapien
caagttgaagtcgatcagatggaag

SEQ ID NO: 1064218 - DNA, 25 bp, Homo sapien
agttgaagtcgatcagatggaagtt

SEQ ID NO: 1064219 - DNA, 25 bp, Homo sapien
gcaagttgaagtcgatcagatggaa

SEQ ID NO: 1064220 - DNA, 25 bp, Homo sapien
cagcaagttgaagtcgatcagatgg

SEQ ID NO: 1064221 - DNA, 25 bp, Homo sapien
gcggcccagaacgatggtggtcacc

SEQ ID NO: 1064222 - DNA, 25 bp, Homo sapien
ggcccagaacgatggtggtcaccat

SEQ ID NO: 1064223 - DNA, 25 bp, Homo sapien
ctccttcacgatggacccaatgaag

SEQ ID NO: 1064224 - DNA, 25 bp, Homo sapien
atggacccaatgaagcggcggccca

SEQ ID NO: 1064225 - DNA, 25 bp, Homo sapien
agataggacgggatggggccttgga

SEQ ID NO: 1064226 - DNA, 25 bp, Homo sapien
tcggggcaagataggacgggatggg

SEQ ID NO: 1064227 - DNA, 25 bp, Homo sapien
ctgggtcggggcaagataggacggg

SEQ ID NO: 1064228 - DNA, 25 bp, Homo sapien
ggcaagataggacgggatggggcct

SEQ ID NO: 1064229 - DNA, 25 bp, Homo sapien
tggagcgaaagagggagaccttccc

SEQ ID NO: 1064230 - DNA, 25 bp, Homo sapien
tggatgagggatcggcacagactcc

SEQ ID NO: 1064231 - DNA, 25 bp, Homo sapien
cctgttgccgtgagaacggtgaagc

SEQ ID NO: 1064232 - DNA, 25 bp, Homo sapien
acggtgaagcgagtgaggaacagca

SEQ ID NO: 1064233 - DNA, 25 bp, Homo sapien
gaattggaatcaaactcaaactggc

SEQ ID NO: 1064234 - DNA, 25 bp, Homo sapien
aaatctacactgagactgggtgcga

SEQ ID NO: 1064235 - DNA, 25 bp, Homo sapien
taaagaagtactcaaatctccaggt

SEQ ID NO: 1064236 - DNA, 25 bp, Homo sapien
caacactggatactagagacaatgg

SEQ ID NO: 1064237 - DNA, 25 bp, Homo sapien
ctggctgacaatgctacatttcagg

SEQ ID NO: 1064238 - DNA, 25 bp, Homo sapien
tggctgacaatgctacatttcagga

SEQ ID NO: 1064239 - DNA, 25 bp, Homo sapien
attaggcaggtatgggccaggcgca

SEQ ID NO: 1064240 - DNA, 25 bp, Homo sapien
ctggggaagacggtggtgagggaag

SEQ ID NO: 1064241 - DNA, 25 bp, Homo sapien
tgcaggaacggaatgtacatcccaa

SEQ ID NO: 1064242 - DNA, 25 bp, Homo sapien
caggaacggaatgtacatcccaaac

SEQ ID NO: 1064243 - DNA, 25 bp, Homo sapien
ctgcaggaacggaatgtacatccca

SEQ ID NO: 1064244 - DNA, 25 bp, Homo sapien
gcaggaacggaatgtacatcccaaa

SEQ ID NO: 1064245 - DNA, 25 bp, Homo sapien
tgtcaggaggtagtcccggctcttt

SEQ ID NO: 1064246 - DNA, 25 bp, Homo sapien
tccgggccatacagctgtcttgtgt

SEQ ID NO: 1064247 - DNA, 25 bp, Homo sapien
ccacgtctcccgcagtgtcaggagg

SEQ ID NO: 1064248 - DNA, 25 bp, Homo sapien
ccatgtggttgaagaggcttgtctt

SEQ ID NO: 1064249 - DNA, 25 bp, Homo sapien
ggaactccacctcactgcggatgag

SEQ ID NO: 1064250 - DNA, 25 bp, Homo sapien
catgcgccagttgaagtccatcttg

SEQ ID NO: 1064251 - DNA, 25 bp, Homo sapien
tcagcatggagctgacgagcacttc

SEQ ID NO: 1064252 - DNA, 25 bp, Homo sapien
gacgagcacttccttcatgcgccag

SEQ ID NO: 1064253 - DNA, 25 bp, Homo sapien
tgctgcagcacgttggagcacagcg

SEQ ID NO: 1064254 - DNA, 25 bp, Homo sapien
ccagcgcttgtcatagtaatgtgtg

SEQ ID NO: 1064255 - DNA, 25 bp, Homo sapien
tgctgcatgaggatcacggaggtgc

SEQ ID NO: 1064256 - DNA, 25 bp, Homo sapien
gaagagttcacaggaccagcgcttg

SEQ ID NO: 1064257 - DNA, 25 bp, Homo sapien
agatgtgcttccgaggtgatcctgg

SEQ ID NO: 1064258 - DNA, 25 bp, Homo sapien
gtgatcctggccttgaggagcttcc

SEQ ID NO: 1064259 - DNA, 25 bp, Homo sapien
cagatgtgcttccgaggtgatcctg

SEQ ID NO: 1064260 - DNA, 25 bp, Homo sapien
atcctggccttgaggagcttccagt

SEQ ID NO: 1064261 - DNA, 25 bp, Homo sapien
gggatagccacgttgtagtggccta

SEQ ID NO: 1064262 - DNA, 25 bp, Homo sapien
cctgcggccacatgcattcttcagt

SEQ ID NO: 1064263 - DNA, 25 bp, Homo sapien
aagcggaagtgggagacgtcagagg

SEQ ID NO: 1064264 - DNA, 25 bp, Homo sapien
ggctttgtagacgttcttgctgtgc

SEQ ID NO: 1064265 - DNA, 25 bp, Homo sapien
gctgggcctgaacaaattagaatcc

SEQ ID NO: 1064266 - DNA, 25 bp, Homo sapien
tatctttcacgtacaaggttcaggg

SEQ ID NO: 1064267 - DNA, 25 bp, Homo sapien
caacagcaaggtagaacgtagggac

SEQ ID NO: 1064268 - DNA, 25 bp, Homo sapien
tggagagtgcttaacgacatgcctg

SEQ ID NO: 1064269 - DNA, 25 bp, Homo sapien
cagagtatgagtaggccttgcccaa

SEQ ID NO: 1064270 - DNA, 25 bp, Homo sapien
ttcagaggacattagggagtacagc

SEQ ID NO: 1064271 - DNA, 25 bp, Homo sapien
gaaacggtggtccaggtctctctgg

SEQ ID NO: 1064272 - DNA, 25 bp, Homo sapien
gcttgaagaaggcatagtagttgct

SEQ ID NO: 1064273 - DNA, 25 bp, Homo sapien
aaagctctggtggatttttttgtct

SEQ ID NO: 1064274 - DNA, 25 bp, Homo sapien
cctggacgctgtccctgaggtgacc

SEQ ID NO: 1064275 - DNA, 25 bp, Homo sapien
aatacaaagctctggtggatttttt

SEQ ID NO: 1064276 - DNA, 25 bp, Homo sapien
tatcaaagaaacagtacgtaacaaa

SEQ ID NO: 1064277 - DNA, 25 bp, Homo sapien
agggaacgtgggctgaatagatgag

SEQ ID NO: 1064278 - DNA, 25 bp, Homo sapien
ggaacgtgggctgaatagatgagaa

SEQ ID NO: 1064279 - DNA, 25 bp, Homo sapien
ctcagggaacgtgggctgaatagat

SEQ ID NO: 1064280 - DNA, 25 bp, Homo sapien
aacgtgggctgaatagatgagaatg

SEQ ID NO: 1064281 - DNA, 25 bp, Homo sapien
gtgatccgcccgcccccaaagtgct

SEQ ID NO: 1064282 - DNA, 25 bp, Homo sapien
cggtgtttcaaccatgttggctagg

SEQ ID NO: 1064283 - DNA, 25 bp, Homo sapien
ttgagccaccgctccgggccagttt

SEQ ID NO: 1064284 - DNA, 25 bp, Homo sapien
gcttgagccaccgctccgggccagt

SEQ ID NO: 1064285 - DNA, 25 bp, Homo sapien
caggacgaaacgctttattggccca

SEQ ID NO: 1064286 - DNA, 25 bp, Homo sapien
aacggcggcagcttcagcggcagct

SEQ ID NO: 1064287 - DNA, 25 bp, Homo sapien
gacaaaccagttaactccaggacga

SEQ ID NO: 1064288 - DNA, 25 bp, Homo sapien
caatatggcggatctgtaggacggc

SEQ ID NO: 1064289 - DNA, 25 bp, Homo sapien
gtttgtggcaatcctatgttaagca

SEQ ID NO: 1064290 - DNA, 25 bp, Homo sapien
tggagaacttaactgataaatactg

SEQ ID NO: 1064291 - DNA, 25 bp, Homo sapien
tgttaagcaagtctactggtgccat

SEQ ID NO: 1064292 - DNA, 25 bp, Homo sapien
tagtattgcaactgttttggggtgc

SEQ ID NO: 1064293 - DNA, 25 bp, Homo sapien
tgtattagctatgaatttgcccaag

SEQ ID NO: 1064294 - DNA, 25 bp, Homo sapien
gaatgcttatgtacaaacagcccat

SEQ ID NO: 1064295 - DNA, 25 bp, Homo sapien
tcatactgagtaagcgtctcttcca

SEQ ID NO: 1064296 - DNA, 25 bp, Homo sapien
tactgtgattcaccgatactgtgtg

SEQ ID NO: 1064297 - DNA, 25 bp, Homo sapien
tgagacaaaatctagctcttgtccc

SEQ ID NO: 1064298 - DNA, 25 bp, Homo sapien
ggagtgcaatgatatgatctcggct

SEQ ID NO: 1064299 - DNA, 25 bp, Homo sapien
tttgagacaaaatctagctcttgtc

SEQ ID NO: 1064300 - DNA, 25 bp, Homo sapien
gagtgcaatgatatgatctcggctc

SEQ ID NO: 1064301 - DNA, 25 bp, Homo sapien
accaggttcaagcgactgtcctacc

SEQ ID NO: 1064302 - DNA, 25 bp, Homo sapien
tgtcctacctcagcctcctgagtag

SEQ ID NO: 1064303 - DNA, 25 bp, Homo sapien
ctgcacccggcccacccaaacttct

SEQ ID NO: 1064304 - DNA, 25 bp, Homo sapien
ccaaacttcttaaaacagcttgcct

SEQ ID NO: 1064305 - DNA, 25 bp, Homo sapien
acgaggccggccgaacacgttggct

SEQ ID NO: 1064306 - DNA, 25 bp, Homo sapien
gttaagaccaggtgaggtgactcag

SEQ ID NO: 1064307 - DNA, 25 bp, Homo sapien
taaataagttaaacgcaaacagctc

SEQ ID NO: 1064308 - DNA, 25 bp, Homo sapien
ggccggccgaacacgttggctcaca

SEQ ID NO: 1064309 - DNA, 25 bp, Homo sapien
tagaatggtgcgtagccctccaaag

SEQ ID NO: 1064310 - DNA, 25 bp, Homo sapien
ttaaaaggcatacactctcaacggg

SEQ ID NO: 1064311 - DNA, 25 bp, Homo sapien
tatggtgaccagatggccgtgactg

SEQ ID NO: 1064312 - DNA, 25 bp, Homo sapien
tactattacatgagcaggactgaca

SEQ ID NO: 1064313 - DNA, 25 bp, Homo sapien
ctggaattctgaaatcaaaggggct

SEQ ID NO: 1064314 - DNA, 25 bp, Homo sapien
gcctaggcaactaagcaagacccaa

SEQ ID NO: 1064315 - DNA, 25 bp, Homo sapien
aattctgaaatcaaaggggctctca

SEQ ID NO: 1064316 - DNA, 25 bp, Homo sapien
taggcaactaagcaagacccaatct

SEQ ID NO: 1064317 - DNA, 25 bp, Homo sapien
gccactaccactaggtaccacaagg

SEQ ID NO: 1064318 - DNA, 25 bp, Homo sapien
cactgccactaccactaggtaccac

SEQ ID NO: 1064319 - DNA, 25 bp, Homo sapien
tgccactaccactaggtaccacaag

SEQ ID NO: 1064320 - DNA, 25 bp, Homo sapien
cactaccactaggtaccacaaggga

SEQ ID NO: 1064321 - DNA, 25 bp, Homo sapien
tggtagcatcttcactgaactgggc

SEQ ID NO: 1064322 - DNA, 25 bp, Homo sapien
cataataaggctgctcatattctgg

SEQ ID NO: 1064323 - DNA, 25 bp, Homo sapien
tcagtccacaatgggaccataataa

SEQ ID NO: 1064324 - DNA, 25 bp, Homo sapien
catcttcactgaactgggctgaaca

SEQ ID NO: 1064325 - DNA, 25 bp, Homo sapien
ttgtactgagaaccagacacttgtg

SEQ ID NO: 1064326 - DNA, 25 bp, Homo sapien
gaaccagacacttgtgagtgcattt

SEQ ID NO: 1064327 - DNA, 25 bp, Homo sapien
ctgagaaccagacacttgtgagtgc

SEQ ID NO: 1064328 - DNA, 25 bp, Homo sapien
gacacttgtgagtgcattttttcat

SEQ ID NO: 1064329 - DNA, 25 bp, Homo sapien
tgggctgtcctggacgctagcctct

SEQ ID NO: 1064330 - DNA, 25 bp, Homo sapien
gggctgtcctggacgctagcctctc

SEQ ID NO: 1064331 - DNA, 25 bp, Homo sapien
cacctctgcactccttttgaggccc

SEQ ID NO: 1064332 - DNA, 25 bp, Homo sapien
ctctgcactccttttgaggcccgat

SEQ ID NO: 1064333 - DNA, 25 bp, Homo sapien
acctctgcactccttttgaggcccg

SEQ ID NO: 1064334 - DNA, 25 bp, Homo sapien
cctctgcactccttttgaggcccga

SEQ ID NO: 1064335 - DNA, 25 bp, Homo sapien
tagagcattgttcttatagctcttc

SEQ ID NO: 1064336 - DNA, 25 bp, Homo sapien
ttccggagctgaatgccctcttcct

SEQ ID NO: 1064337 - DNA, 25 bp, Homo sapien
ttctgcttccggagctgaatgccct

SEQ ID NO: 1064338 - DNA, 25 bp, Homo sapien
cattcgataattgtctttccctggg

SEQ ID NO: 1064339 - DNA, 25 bp, Homo sapien
gaagactatcgaacatggcagcttc

SEQ ID NO: 1064340 - DNA, 25 bp, Homo sapien
ataagagtccatgagaagactatcg

SEQ ID NO: 1064341 - DNA, 25 bp, Homo sapien
catgagaagactatcgaacatggca

SEQ ID NO: 1064342 - DNA, 25 bp, Homo sapien
gagtccatgagaagactatcgaaca

SEQ ID NO: 1064343 - DNA, 25 bp, Homo sapien
tccaccatctctcttgtgatcacac

SEQ ID NO: 1064344 - DNA, 25 bp, Homo sapien
tggagagcagtttccggaatttctg

SEQ ID NO: 1064345 - DNA, 25 bp, Homo sapien
atctccaccatctctcttgtgatca

SEQ ID NO: 1064346 - DNA, 25 bp, Homo sapien
gcagtttccggaatttctgtgtggt

SEQ ID NO: 1064347 - DNA, 25 bp, Homo sapien
aacttcatctattggaggactaggc

SEQ ID NO: 1064348 - DNA, 25 bp, Homo sapien
ctcttggagtgttgataacttcatc

SEQ ID NO: 1064349 - DNA, 25 bp, Homo sapien
gaaccgatccaccactcttggagtg

SEQ ID NO: 1064350 - DNA, 25 bp, Homo sapien
agaaactccacgaaccgatccacca

SEQ ID NO: 1064351 - DNA, 25 bp, Homo sapien
taagcagctctataaaaatggggac

SEQ ID NO: 1064352 - DNA, 25 bp, Homo sapien
aatattcgttagagcccaggcagct

SEQ ID NO: 1064353 - DNA, 25 bp, Homo sapien
tcctcaaagtctgaattaagcagct

SEQ ID NO: 1064354 - DNA, 25 bp, Homo sapien
agaggcaatattcgttagagcccag

SEQ ID NO: 1064355 - DNA, 25 bp, Homo sapien
tctcggcaaacagagctatctccag

SEQ ID NO: 1064356 - DNA, 25 bp, Homo sapien
cagttcaagacgtaatctcggcaaa

SEQ ID NO: 1064357 - DNA, 25 bp, Homo sapien
gatggaacagttcaagacgtaatct

SEQ ID NO: 1064358 - DNA, 25 bp, Homo sapien
cgtaatctcggcaaacagagctatc

SEQ ID NO: 1064359 - DNA, 25 bp, Homo sapien
cagagtattcatttcaggaccagct

SEQ ID NO: 1064360 - DNA, 25 bp, Homo sapien
tgtccgatgtatgtatgcaaaaccc

SEQ ID NO: 1064361 - DNA, 25 bp, Homo sapien
gaccagctgtggctagttaatacca

SEQ ID NO: 1064362 - DNA, 25 bp, Homo sapien
gataatagggacgaaacagagggct

SEQ ID NO: 1064363 - DNA, 25 bp, Homo sapien
tttttccctcggcagagatttgaca

SEQ ID NO: 1064364 - DNA, 25 bp, Homo sapien
ggcccagactgcattccgtgtcatc

SEQ ID NO: 1064365 - DNA, 25 bp, Homo sapien
cagagatttgacagggcccagactg

SEQ ID NO: 1064366 - DNA, 25 bp, Homo sapien
ccgtgtcatcgtcagtcgtgtggac

SEQ ID NO: 1064367 - DNA, 25 bp, Homo sapien
cagactccggagtctatgactgcct

SEQ ID NO: 1064368 - DNA, 25 bp, Homo sapien
gacagtacaggcaaacaaggagaga

SEQ ID NO: 1064369 - DNA, 25 bp, Homo sapien
tccgagtcgctgctgaagagtaggc

SEQ ID NO: 1064370 - DNA, 25 bp, Homo sapien
aagagtaggcgagacagtacaggca

SEQ ID NO: 1064371 - DNA, 25 bp, Homo sapien
gatgtcatccccagtgacgatgtta

SEQ ID NO: 1064372 - DNA, 25 bp, Homo sapien
tccccagtgacgatgttacccacgg

SEQ ID NO: 1064373 - DNA, 25 bp, Homo sapien
gacgatgttacccacggctctcagg

SEQ ID NO: 1064374 - DNA, 25 bp, Homo sapien
tctggatgtcatccccagtgacgat

SEQ ID NO: 1064375 - DNA, 25 bp, Homo sapien
ggtacttagagcactcaaactcaca

SEQ ID NO: 1064376 - DNA, 25 bp, Homo sapien
tgaagaactcctaaaattgaacaac

SEQ ID NO: 1064377 - DNA, 25 bp, Homo sapien
taaaccagacgagaaagaataaaca

SEQ ID NO: 1064378 - DNA, 25 bp, Homo sapien
taagatggcatagcagctgtgcaga

SEQ ID NO: 1064379 - DNA, 25 bp, Homo sapien
ccagcaagcttccttccggattgac

SEQ ID NO: 1064380 - DNA, 25 bp, Homo sapien
gcaaggtagggctgaacagttaaga

SEQ ID NO: 1064381 - DNA, 25 bp, Homo sapien
gtagggctgaacagttaagaatgac

SEQ ID NO: 1064382 - DNA, 25 bp, Homo sapien
tgggactgctcaacaagtggagaag

SEQ ID NO: 1064383 - DNA, 25 bp, Homo sapien
tcaacacagggaagatatttgcatc

SEQ ID NO: 1064384 - DNA, 25 bp, Homo sapien
aacacagggaagatatttgcatcta

SEQ ID NO: 1064385 - DNA, 25 bp, Homo sapien
tgaaggatttcgatcaacacaggga

SEQ ID NO: 1064386 - DNA, 25 bp, Homo sapien
aaggatttcgatcaacacagggaag

SEQ ID NO: 1064387 - DNA, 25 bp, Homo sapien
gaatccattacagtcagcaagtcac

SEQ ID NO: 1064388 - DNA, 25 bp, Homo sapien
caataaggattgacccctgagccac

SEQ ID NO: 1064389 - DNA, 25 bp, Homo sapien
tctccagtccattgagggccacttg

SEQ ID NO: 1064390 - DNA, 25 bp, Homo sapien
tccaagccgcaggatgttctccagt

SEQ ID NO: 1064391 - DNA, 25 bp, Homo sapien
caccaaagtagtgctcaatgaggtc

SEQ ID NO: 1064392 - DNA, 25 bp, Homo sapien
gaagatgaactgctgttgcgtttca

SEQ ID NO: 1064393 - DNA, 25 bp, Homo sapien
tgctgttgcgtttcatcgacttggg

SEQ ID NO: 1064394 - DNA, 25 bp, Homo sapien
agccaggctgctatcatcgtcttct

SEQ ID NO: 1064395 - DNA, 25 bp, Homo sapien
tcttgtcacaaaacccaaaggtgag

SEQ ID NO: 1064396 - DNA, 25 bp, Homo sapien
ggttaaagacatgtgtgcagccaaa

SEQ ID NO: 1064397 - DNA, 25 bp, Homo sapien
agcaggtcaagagcacagtctccag

SEQ ID NO: 1064398 - DNA, 25 bp, Homo sapien
caaaggtgagcctcagatggttctg

SEQ ID NO: 1064399 - DNA, 25 bp, Homo sapien
tatgggatcagtagctacacgtggg

SEQ ID NO: 1064400 - DNA, 25 bp, Homo sapien
gaggaaaaggaccaagctcaggcct

SEQ ID NO: 1064401 - DNA, 25 bp, Homo sapien
caggtggtggtccagaatccaagca

SEQ ID NO: 1064402 - DNA, 25 bp, Homo sapien
taagagttacacagatcagggcaga

SEQ ID NO: 1064403 - DNA, 25 bp, Homo sapien
cccaaacagggaagatacgcaatag

SEQ ID NO: 1064404 - DNA, 25 bp, Homo sapien
taaggacagagtagcagacttcacc

SEQ ID NO: 1064405 - DNA, 25 bp, Homo sapien
tggatttcacctgagccagaaggag

SEQ ID NO: 1064406 - DNA, 25 bp, Homo sapien
tatcatatgtaatccacccagaggc

SEQ ID NO: 1064407 - DNA, 25 bp, Homo sapien
tttttaatggaggtagcaggccaag

SEQ ID NO: 1064408 - DNA, 25 bp, Homo sapien
actgtaagagaatggttttttaatg

SEQ ID NO: 1064409 - DNA, 25 bp, Homo sapien
tgaaaaaaagattctgccccctgcc

SEQ ID NO: 1064410 - DNA, 25 bp, Homo sapien
gaggtagcaggccaagtgaaaaaaa

SEQ ID NO: 1064411 - DNA, 25 bp, Homo sapien
taccatggtttagcgcactgagccc

SEQ ID NO: 1064412 - DNA, 25 bp, Homo sapien
tttccatctggtacaggacccggag

SEQ ID NO: 1064413 - DNA, 25 bp, Homo sapien
tagggtattccctacagcagactgg

SEQ ID NO: 1064414 - DNA, 25 bp, Homo sapien
tgcagttcagctccaaaaaacaggg

SEQ ID NO: 1064415 - DNA, 25 bp, Homo sapien
gctggcattcagcaacagggttcag

SEQ ID NO: 1064416 - DNA, 25 bp, Homo sapien
tcaggtacgagctaatgtggacatc

SEQ ID NO: 1064417 - DNA, 25 bp, Homo sapien
tcctttgccacggtctaaatcaggg

SEQ ID NO: 1064418 - DNA, 25 bp, Homo sapien
tcagaggttcccagccagtgttagg

SEQ ID NO: 1064419 - DNA, 25 bp, Homo sapien
gttttcttcgcctatgtctgctctg

SEQ ID NO: 1064420 - DNA, 25 bp, Homo sapien
tcaagctgtgtctgtctacccaggg

SEQ ID NO: 1064421 - DNA, 25 bp, Homo sapien
aaataacatttgtctggactcagca

SEQ ID NO: 1064422 - DNA, 25 bp, Homo sapien
tttgtctggactcagcacactcaat

SEQ ID NO: 1064423 - DNA, 25 bp, Homo sapien
aaatccagtctagggtcactccaag

SEQ ID NO: 1064424 - DNA, 25 bp, Homo sapien
ttcccccaaatccagtctagggtca

SEQ ID NO: 1064425 - DNA, 25 bp, Homo sapien
ccagtctagggtcactccaagccaa

SEQ ID NO: 1064426 - DNA, 25 bp, Homo sapien
ccaaatccagtctagggtcactcca

SEQ ID NO: 1064427 - DNA, 25 bp, Homo sapien
gaaaccccgagtaactgctgccggc

SEQ ID NO: 1064428 - DNA, 25 bp, Homo sapien
ccacctctggcctcgcaccggaaac

SEQ ID NO: 1064429 - DNA, 25 bp, Homo sapien
ctcaccgccgacgtccgatggcttc

SEQ ID NO: 1064430 - DNA, 25 bp, Homo sapien
gccgacgtccgatggcttccccacc

SEQ ID NO: 1064431 - DNA, 25 bp, Homo sapien
ttttccagacttcgaaattcttcgc

SEQ ID NO: 1064432 - DNA, 25 bp, Homo sapien
gcagcctggatcagaaatccccaca

SEQ ID NO: 1064433 - DNA, 25 bp, Homo sapien
cacagcaggcgcacaaagcttctta

SEQ ID NO: 1064434 - DNA, 25 bp, Homo sapien
aacaaacacagttgctattttccag

SEQ ID NO: 1064435 - DNA, 25 bp, Homo sapien
tgtgatgagcgatgctgggtcagga

SEQ ID NO: 1064436 - DNA, 25 bp, Homo sapien
cgggtcctgcttccggttgtcctgg

SEQ ID NO: 1064437 - DNA, 25 bp, Homo sapien
tgcttccggttgtcctgggctgctt

SEQ ID NO: 1064438 - DNA, 25 bp, Homo sapien
ttggattggattgtttggcagcccc

SEQ ID NO: 1064439 - DNA, 25 bp, Homo sapien
tggcagccccgttctttttgtcttg

SEQ ID NO: 1064440 - DNA, 25 bp, Homo sapien
agctcctcagagacatcacgaaggg

SEQ ID NO: 1064441 - DNA, 25 bp, Homo sapien
agtatgtgctcagtatgtcttccag

SEQ ID NO: 1064442 - DNA, 25 bp, Homo sapien
ccagttggcggctcagctcctcaga

SEQ ID NO: 1064443 - DNA, 25 bp, Homo sapien
agacatcacgaagggccccagactg

SEQ ID NO: 1064444 - DNA, 25 bp, Homo sapien
tactggagttggttcaggctcccca

SEQ ID NO: 1064445 - DNA, 25 bp, Homo sapien
cattccttgccacataggtccggga

SEQ ID NO: 1064446 - DNA, 25 bp, Homo sapien
tctcctgtggccttcgatggtctcg

SEQ ID NO: 1064447 - DNA, 25 bp, Homo sapien
ctgtgtttggatcccccttggaggg

SEQ ID NO: 1064448 - DNA, 25 bp, Homo sapien
agcttcacaaagagccgccctctgc

SEQ ID NO: 1064449 - DNA, 25 bp, Homo sapien
cttcacaaagagccgccctctgctc

SEQ ID NO: 1064450 - DNA, 25 bp, Homo sapien
gcttcacaaagagccgccctctgct

SEQ ID NO: 1064451 - DNA, 25 bp, Homo sapien
tgcatcagcaacgtgatctccttcc

SEQ ID NO: 1064452 - DNA, 25 bp, Homo sapien
atgtctgcatcagcaacgtgatctc

SEQ ID NO: 1064453 - DNA, 25 bp, Homo sapien
tctgcatcagcaacgtgatctcctt

SEQ ID NO: 1064454 - DNA, 25 bp, Homo sapien
tgtctgcatcagcaacgtgatctcc

SEQ ID NO: 1064455 - DNA, 25 bp, Homo sapien
gcttctgtgaattccggtgctcctc

SEQ ID NO: 1064456 - DNA, 25 bp, Homo sapien
tctgtgaattccggtgctcctccag

SEQ ID NO: 1064457 - DNA, 25 bp, Homo sapien
tccttctcttgcaccagctggctct

SEQ ID NO: 1064458 - DNA, 25 bp, Homo sapien
cttctgtgaattccggtgctcctcc

SEQ ID NO: 1064459 - DNA, 25 bp, Homo sapien
gagggagcggttgtgccgctgcagc

SEQ ID NO: 1064460 - DNA, 25 bp, Homo sapien
tctcaagcttgctgcgggccaggac

SEQ ID NO: 1064461 - DNA, 25 bp, Homo sapien
tcacggcataggctctcaagcttgc

SEQ ID NO: 1064462 - DNA, 25 bp, Homo sapien
cgctgcagctcacggcataggctct

SEQ ID NO: 1064463 - DNA, 25 bp, Homo sapien
aagtcagcccgagagccatcatcca

SEQ ID NO: 1064464 - DNA, 25 bp, Homo sapien
ctgggcaaagaagtcagcccgagag

SEQ ID NO: 1064465 - DNA, 25 bp, Homo sapien
gcaaagaagtcagcccgagagccat

SEQ ID NO: 1064466 - DNA, 25 bp, Homo sapien
agaagtcagcccgagagccatcatc

SEQ ID NO: 1064467 - DNA, 25 bp, Homo sapien
tgcgctcattgtgctgttccatctg

SEQ ID NO: 1064468 - DNA, 25 bp, Homo sapien
cgcgcagctcatactgctcaatcag

SEQ ID NO: 1064469 - DNA, 25 bp, Homo sapien
tcacctggaagtgcgaggtcacctc

SEQ ID NO: 1064470 - DNA, 25 bp, Homo sapien
gctccatgttctcttggcgcagctt

SEQ ID NO: 1064471 - DNA, 25 bp, Homo sapien
gaatggctgtcctgcctactagagg

SEQ ID NO: 1064472 - DNA, 25 bp, Homo sapien
tcagcgctgagggataagaaccaaa

SEQ ID NO: 1064473 - DNA, 25 bp, Homo sapien
gaaggtgcctagcaggtaagtccag

SEQ ID NO: 1064474 - DNA, 25 bp, Homo sapien
gactagacatgtgcatccccaagga

SEQ ID NO: 1064475 - DNA, 25 bp, Homo sapien
gctggagcttggcatccaccagctg

SEQ ID NO: 1064476 - DNA, 25 bp, Homo sapien
tgctgttgtaggtccttgtgtttga

SEQ ID NO: 1064477 - DNA, 25 bp, Homo sapien
taggtccttgtgtttgaagactttg

SEQ ID NO: 1064478 - DNA, 25 bp, Homo sapien
gggcctgctggagcttggcatccac

SEQ ID NO: 1064479 - DNA, 25 bp, Homo sapien
tataacccggctatgagctgagcca

SEQ ID NO: 1064480 - DNA, 25 bp, Homo sapien
ggtctggccagacttctcccatata

SEQ ID NO: 1064481 - DNA, 25 bp, Homo sapien
tttttagccacaagcaccagaccca

SEQ ID NO: 1064482 - DNA, 25 bp, Homo sapien
cagaaccccagatcctgtcagaagc

SEQ ID NO: 1064483 - DNA, 25 bp, Homo sapien
ctgttgcttcaggtgggtctcttgc

SEQ ID NO: 1064484 - DNA, 25 bp, Homo sapien
ttcatcagctcacacatcctctggg

SEQ ID NO: 1064485 - DNA, 25 bp, Homo sapien
ttcaggtgggtctcttgctgcttca

SEQ ID NO: 1064486 - DNA, 25 bp, Homo sapien
atcctctgggactctactgcctctt

SEQ ID NO: 1064487 - DNA, 25 bp, Homo sapien
agtgtgttctggaactcctcaaact

SEQ ID NO: 1064488 - DNA, 25 bp, Homo sapien
aaagtgtgttctggaactcctcaaa

SEQ ID NO: 1064489 - DNA, 25 bp, Homo sapien
ccatctcctgcttgaatgtggtgaa

SEQ ID NO: 1064490 - DNA, 25 bp, Homo sapien
aatgtggtgaatacctcgctgcttt

SEQ ID NO: 1064491 - DNA, 25 bp, Homo sapien
atgaagcagcttatgccccagcagc

SEQ ID NO: 1064492 - DNA, 25 bp, Homo sapien
tgcccttgagacaccccagatggga

SEQ ID NO: 1064493 - DNA, 25 bp, Homo sapien
gaaggcaggcccaacaattttgaat

SEQ ID NO: 1064494 - DNA, 25 bp, Homo sapien
ccctgggacaacctggagtgtatac

SEQ ID NO: 1064495 - DNA, 25 bp, Homo sapien
tttctccagcttcttgatcttctta

SEQ ID NO: 1064496 - DNA, 25 bp, Homo sapien
tccagcttcttgatcttcttagtca

SEQ ID NO: 1064497 - DNA, 25 bp, Homo sapien
tctccagcttcttgatcttcttagt

SEQ ID NO: 1064498 - DNA, 25 bp, Homo sapien
ccagcttcttgatcttcttagtcat

SEQ ID NO: 1064499 - DNA, 25 bp, Homo sapien
tgctctcccaccgggaccggtacat

SEQ ID NO: 1064500 - DNA, 25 bp, Homo sapien
tcctcagccatctcaagcagggcct

SEQ ID NO: 1064501 - DNA, 25 bp, Homo sapien
tgttgctgctctcccaccgggaccg

SEQ ID NO: 1064502 - DNA, 25 bp, Homo sapien
ctcagccatctcaagcagggccttg

SEQ ID NO: 1064503 - DNA, 25 bp, Homo sapien
ggtcattgcgctctgtctgcagtgc

SEQ ID NO: 1064504 - DNA, 25 bp, Homo sapien
tggatttttacctgcaggccctcca

SEQ ID NO: 1064505 - DNA, 25 bp, Homo sapien
cctccagttctttatcccggactgt

SEQ ID NO: 1064506 - DNA, 25 bp, Homo sapien
acagcttctccagccgttggatttt

SEQ ID NO: 1064507 - DNA, 25 bp, Homo sapien
tagcaaggcgcttctgtgaccctgg

SEQ ID NO: 1064508 - DNA, 25 bp, Homo sapien
ctgtcagtgagggagccctggccac

SEQ ID NO: 1064509 - DNA, 25 bp, Homo sapien
gagctgggtgcttgagccccaggcc

SEQ ID NO: 1064510 - DNA, 25 bp, Homo sapien
tgctcggtgctcctgggtagcaagg

SEQ ID NO: 1064511 - DNA, 25 bp, Homo sapien
ggacctgcaggacaatgaactagct

SEQ ID NO: 1064512 - DNA, 25 bp, Homo sapien
caggaaacctcagcatcaagatggc

SEQ ID NO: 1064513 - DNA, 25 bp, Homo sapien
tatgggctcccacacaggaagaagt

SEQ ID NO: 1064514 - DNA, 25 bp, Homo sapien
catttgtgcaggctagagaggcacc

SEQ ID NO: 1064515 - DNA, 25 bp, Homo sapien
gctgcttgagggcacctagatgtga

SEQ ID NO: 1064516 - DNA, 25 bp, Homo sapien
aggcaactctgatgcagatcagtgg

SEQ ID NO: 1064517 - DNA, 25 bp, Homo sapien
tagatgtgaaggatacaccagagaa

SEQ ID NO: 1064518 - DNA, 25 bp, Homo sapien
caactctgatgcagatcagtggtac

SEQ ID NO: 1064519 - DNA, 25 bp, Homo sapien
caggacctgggctactttggaaagc

SEQ ID NO: 1064520 - DNA, 25 bp, Homo sapien
gtagggaacctcatctgcagactgg

SEQ ID NO: 1064521 - DNA, 25 bp, Homo sapien
gaatctggtggacatgaagctctca

SEQ ID NO: 1064522 - DNA, 25 bp, Homo sapien
caaacactctgtgaggttggcagct

SEQ ID NO: 1064523 - DNA, 25 bp, Homo sapien
tgaccacctctgtgctgtgcaaggc

SEQ ID NO: 1064524 - DNA, 25 bp, Homo sapien
gggtgaccacctctgtgctgtgcaa

SEQ ID NO: 1064525 - DNA, 25 bp, Homo sapien
tgggccataaggaaagcagttacag

SEQ ID NO: 1064526 - DNA, 25 bp, Homo sapien
taaggaaagcagttacagggacaga

SEQ ID NO: 1064527 - DNA, 25 bp, Homo sapien
gaaacctcattattctcagagctgc

SEQ ID NO: 1064528 - DNA, 25 bp, Homo sapien
ggatctgcgactagaaataacatgg

SEQ ID NO: 1064529 - DNA, 25 bp, Homo sapien
tagacagtggtaatgctgctgacag

SEQ ID NO: 1064530 - DNA, 25 bp, Homo sapien
tgtcacagtcattgtgggcacatct

SEQ ID NO: 1064531 - DNA, 25 bp, Homo sapien
gggacaacagaaatccctctccttc

SEQ ID NO: 1064532 - DNA, 25 bp, Homo sapien
tggggacaacagaaatccctctcct

SEQ ID NO: 1064533 - DNA, 25 bp, Homo sapien
ctggggacaacagaaatccctctcc

SEQ ID NO: 1064534 - DNA, 25 bp, Homo sapien
gacaacagaaatccctctccttccc

SEQ ID NO: 1064535 - DNA, 25 bp, Homo sapien
aacactcagaacactccacaagggt

SEQ ID NO: 1064536 - DNA, 25 bp, Homo sapien
ttcttcctgggtacttccaacactc

SEQ ID NO: 1064537 - DNA, 25 bp, Homo sapien
ctgggtacttccaacactcagaaca

SEQ ID NO: 1064538 - DNA, 25 bp, Homo sapien
actcagaacactccacaagggtaaa

SEQ ID NO: 1064539 - DNA, 25 bp, Homo sapien
cagccagatcaatgggggcagctat

SEQ ID NO: 1064540 - DNA, 25 bp, Homo sapien
aggctcatgtttggccaggcggctc

SEQ ID NO: 1064541 - DNA, 25 bp, Homo sapien
gcagctatttaaagccctggcagag

SEQ ID NO: 1064542 - DNA, 25 bp, Homo sapien
ctgcctgcagccagatcaatggggg

SEQ ID NO: 1064543 - DNA, 25 bp, Homo sapien
ccaggtcataaggtagaccacgcga

SEQ ID NO: 1064544 - DNA, 25 bp, Homo sapien
cccaggcctaggagacaggtgtggg

SEQ ID NO: 1064545 - DNA, 25 bp, Homo sapien
gcaccaggtcataaggtagaccacg

SEQ ID NO: 1064546 - DNA, 25 bp, Homo sapien
gggagcaccaggtcataaggtagac

SEQ ID NO: 1064547 - DNA, 25 bp, Homo sapien
tcatccccataacaacccttaagga

SEQ ID NO: 1064548 - DNA, 25 bp, Homo sapien
acaacccttaaggaagataccagtg

SEQ ID NO: 1064549 - DNA, 25 bp, Homo sapien
actgaaagtaagcaacagtcttttg

SEQ ID NO: 1064550 - DNA, 25 bp, Homo sapien
ccccattctactgaaagtaagcaac

SEQ ID NO: 1064551 - DNA, 25 bp, Homo sapien
gatgcttcggtgcaagttccctccg

SEQ ID NO: 1064552 - DNA, 25 bp, Homo sapien
tatgctaagcagttcctctcactcg

SEQ ID NO: 1064553 - DNA, 25 bp, Homo sapien
caccaccgggtgaaagctaagctgg

SEQ ID NO: 1064554 - DNA, 25 bp, Homo sapien
gaaagtgaccttctccttagcgcgg

SEQ ID NO: 1064555 - DNA, 25 bp, Homo sapien
gcaaagttagcccttcacccagaaa

SEQ ID NO: 1064556 - DNA, 25 bp, Homo sapien
tgctgctgggatcgtggatgtacac

SEQ ID NO: 1064557 - DNA, 25 bp, Homo sapien
gaagcaaccccacaaagatagccag

SEQ ID NO: 1064558 - DNA, 25 bp, Homo sapien
catctatacggtaggggcagagcca

SEQ ID NO: 1064559 - DNA, 25 bp, Homo sapien
tggctggtaggcacagggaccctcc

SEQ ID NO: 1064560 - DNA, 25 bp, Homo sapien
cagggaccctccgtagtgtgcctgg

SEQ ID NO: 1064561 - DNA, 25 bp, Homo sapien
gatgaggaagtcctagggccaagga

SEQ ID NO: 1064562 - DNA, 25 bp, Homo sapien
tcttgaacttggcccgctgcttggg

SEQ ID NO: 1064563 - DNA, 25 bp, Homo sapien
gaaacacagtggtcttatctggagc

SEQ ID NO: 1064564 - DNA, 25 bp, Homo sapien
tataccaggtaagcctctcagcgtg

SEQ ID NO: 1064565 - DNA, 25 bp, Homo sapien
ccccttaggcaagtggtgtgcaaaa

SEQ ID NO: 1064566 - DNA, 25 bp, Homo sapien
tatgtgatcccagtgacccacctgg

SEQ ID NO: 1064567 - DNA, 25 bp, Homo sapien
gtctgagtgcctcactcatttgttt

SEQ ID NO: 1064568 - DNA, 25 bp, Homo sapien
gtccctgggttcctgtctgagtgcc

SEQ ID NO: 1064569 - DNA, 25 bp, Homo sapien
tcatttgttttatgaccctgaatga

SEQ ID NO: 1064570 - DNA, 25 bp, Homo sapien
ctcatttgttttatgaccctgaatg

SEQ ID NO: 1064571 - DNA, 25 bp, Homo sapien
gggcgtgcctgcagagccgcttcca

SEQ ID NO: 1064572 - DNA, 25 bp, Homo sapien
agacatcagtcacctcggtcaggaa

SEQ ID NO: 1064573 - DNA, 25 bp, Homo sapien
gactgggcggcacttctctttgcct

SEQ ID NO: 1064574 - DNA, 25 bp, Homo sapien
gtggaaatcattgagcaggttcagg

SEQ ID NO: 1064575 - DNA, 25 bp, Homo sapien
gctgaagtgcagccgggctagcttc

SEQ ID NO: 1064576 - DNA, 25 bp, Homo sapien
ccagctgctcaaaggagcattcctt

SEQ ID NO: 1064577 - DNA, 25 bp, Homo sapien
tgcatctcccgaacgtgctccagct

SEQ ID NO: 1064578 - DNA, 25 bp, Homo sapien
gtccaggttacggtcagccattgtc

SEQ ID NO: 1064579 - DNA, 25 bp, Homo sapien
ccaaagcacccagacatgaacccac

SEQ ID NO: 1064580 - DNA, 25 bp, Homo sapien
tcatgcccccaggaaccaaagcacc

SEQ ID NO: 1064581 - DNA, 25 bp, Homo sapien
cttctccacccctcatgcccccagg

SEQ ID NO: 1064582 - DNA, 25 bp, Homo sapien
cccctcatgcccccaggaaccaaag

SEQ ID NO: 1064583 - DNA, 25 bp, Homo sapien
tgcactcccaccttttcacccaggg

SEQ ID NO: 1064584 - DNA, 25 bp, Homo sapien
caaatccccaatgctctgggggcta

SEQ ID NO: 1064585 - DNA, 25 bp, Homo sapien
gcccagagctcttggatccatgcac

SEQ ID NO: 1064586 - DNA, 25 bp, Homo sapien
caggaatggctttgggagtatgtac

SEQ ID NO: 1064587 - DNA, 25 bp, Homo sapien
cacacacacatagacgggttccttg

SEQ ID NO: 1064588 - DNA, 25 bp, Homo sapien
gaaactgacctctcaggaacacaca

SEQ ID NO: 1064589 - DNA, 25 bp, Homo sapien
tgggtttgggcagtctgtggctaaa

SEQ ID NO: 1064590 - DNA, 25 bp, Homo sapien
tgggcagtctgtggctaaatctgac

SEQ ID NO: 1064591 - DNA, 25 bp, Homo sapien
ggcagtctgtggctaaatctgacag

SEQ ID NO: 1064592 - DNA, 25 bp, Homo sapien
tttgggcagtctgtggctaaatctg

SEQ ID NO: 1064593 - DNA, 25 bp, Homo sapien
gatcgtgcaggtcagacacactggg

SEQ ID NO: 1064594 - DNA, 25 bp, Homo sapien
ggaggacatcggacaagctttgcta

SEQ ID NO: 1064595 - DNA, 25 bp, Homo sapien
tcaatgctgaaaggataggaggaca

SEQ ID NO: 1064596 - DNA, 25 bp, Homo sapien
tcgcgctgtttctgactgaggacca

SEQ ID NO: 1064597 - DNA, 25 bp, Homo sapien
catcttgcacaggtttagttccctc

SEQ ID NO: 1064598 - DNA, 25 bp, Homo sapien
tcttgcacaggtttagttccctcac

SEQ ID NO: 1064599 - DNA, 25 bp, Homo sapien
tgtgcccgtcaaggatcgtggcgct

SEQ ID NO: 1064600 - DNA, 25 bp, Homo sapien
ggatcgtggcgctttggaccagtcc

SEQ ID NO: 1064601 - DNA, 25 bp, Homo sapien
cggcgttctcggccaggtgcagctt

SEQ ID NO: 1064602 - DNA, 25 bp, Homo sapien
agcggactgctcctcaggctcggcg

SEQ ID NO: 1064603 - DNA, 25 bp, Homo sapien
tacgcagcggactgctcctcaggct

SEQ ID NO: 1064604 - DNA, 25 bp, Homo sapien
ctcaggctcggcgttctcggccagg

SEQ ID NO: 1064605 - DNA, 25 bp, Homo sapien
aaagtcacagtttgaagagaatgag

SEQ ID NO: 1064606 - DNA, 25 bp, Homo sapien
tcacagtttgaagagaatgagaggg

SEQ ID NO: 1064607 - DNA, 25 bp, Homo sapien
gcagaacacccgcccgagtctgtaa

SEQ ID NO: 1064608 - DNA, 25 bp, Homo sapien
gcccgagtctgtaaaaagtcacagt

SEQ ID NO: 1064609 - DNA, 25 bp, Homo sapien
tctggtttaattccattcaacgccc

SEQ ID NO: 1064610 - DNA, 25 bp, Homo sapien
cattcaacgcccccctcccccatag

SEQ ID NO: 1064611 - DNA, 25 bp, Homo sapien
tttctggtttaattccattcaacgc

SEQ ID NO: 1064612 - DNA, 25 bp, Homo sapien
tctttctggtttaattccattcaac

SEQ ID NO: 1064613 - DNA, 25 bp, Homo sapien
gggcgccaactgccaggcccgcccg

SEQ ID NO: 1064614 - DNA, 25 bp, Homo sapien
ggcgccaactgccaggcccgcccgc

SEQ ID NO: 1064615 - DNA, 25 bp, Homo sapien
tgcaatgcagacaccttccgaacca

SEQ ID NO: 1064616 - DNA, 25 bp, Homo sapien
accttccgaaccagcagctctggct

SEQ ID NO: 1064617 - DNA, 25 bp, Homo sapien
gcaatgcagacaccttccgaaccag

SEQ ID NO: 1064618 - DNA, 25 bp, Homo sapien
agacaccttccgaaccagcagctct

SEQ ID NO: 1064619 - DNA, 25 bp, Homo sapien
gaagtcccttatcacggtaagagag

SEQ ID NO: 1064620 - DNA, 25 bp, Homo sapien
ggtcgtcccggcgaatgcaagaggg

SEQ ID NO: 1064621 - DNA, 25 bp, Homo sapien
ctggtatggagaacgagaggaaaga

SEQ ID NO: 1064622 - DNA, 25 bp, Homo sapien
gaggactgtcctgaagaggtcgtcc

SEQ ID NO: 1064623 - DNA, 25 bp, Homo sapien
atcgcggcctgggaatgcggccctc

SEQ ID NO: 1064624 - DNA, 25 bp, Homo sapien
tggaactggcgtcggaccaagaagc

SEQ ID NO: 1064625 - DNA, 25 bp, Homo sapien
tactcagctcgcaggctctggaact

SEQ ID NO: 1064626 - DNA, 25 bp, Homo sapien
tcggtccactgaagcgtgcccaggt

SEQ ID NO: 1064627 - DNA, 25 bp, Homo sapien
catccttgtcgtgtctctggtcttc

SEQ ID NO: 1064628 - DNA, 25 bp, Homo sapien
tccatccttgtcgtgtctctggtct

SEQ ID NO: 1064629 - DNA, 25 bp, Homo sapien
ctccatccttgtcgtgtctctggtc

SEQ ID NO: 1064630 - DNA, 25 bp, Homo sapien
gctctggatttgctaccctgtctcc

SEQ ID NO: 1064631 - DNA, 25 bp, Homo sapien
agctcttgaagctgaggttggctgt

SEQ ID NO: 1064632 - DNA, 25 bp, Homo sapien
atggccaagtggctgcggtggtact

SEQ ID NO: 1064633 - DNA, 25 bp, Homo sapien
ctccttacggctattgatggcctgt

SEQ ID NO: 1064634 - DNA, 25 bp, Homo sapien
acggctattgatggcctgttgcagc

SEQ ID NO: 1064635 - DNA, 25 bp, Homo sapien
ttgtgtagtggccaaacttcctggg

SEQ ID NO: 1064636 - DNA, 25 bp, Homo sapien
tatagacgacggtggtccagacttg

SEQ ID NO: 1064637 - DNA, 25 bp, Homo sapien
gagaggcccaactcttgtgtcctga

SEQ ID NO: 1064638 - DNA, 25 bp, Homo sapien
ggcaggtccctccaaaggtctgtct

SEQ ID NO: 1064639 - DNA, 25 bp, Homo sapien
gactaggctcattggaggttccatc

SEQ ID NO: 1064640 - DNA, 25 bp, Homo sapien
tttctgtccttcatgactaggctca

SEQ ID NO: 1064641 - DNA, 25 bp, Homo sapien
ctttgatctccatggtatagtcctc

SEQ ID NO: 1064642 - DNA, 25 bp, Homo sapien
tcctccagagatcgaggacactatg

SEQ ID NO: 1064643 - DNA, 25 bp, Homo sapien
ggtaactccttagccacacatttgt

SEQ ID NO: 1064644 - DNA, 25 bp, Homo sapien
tttcatagcattcccctttggaacc

SEQ ID NO: 1064645 - DNA, 25 bp, Homo sapien
tcttggccccactagtcaccaatgg

SEQ ID NO: 1064646 - DNA, 25 bp, Homo sapien
cacaaatttggattgagctacaggc

SEQ ID NO: 1064647 - DNA, 25 bp, Homo sapien
gggcctgcacagctgatgtcacctc

SEQ ID NO: 1064648 - DNA, 25 bp, Homo sapien
gggaagcggcgttgagtcaccacca

SEQ ID NO: 1064649 - DNA, 25 bp, Homo sapien
cattccggtacaccactaccctctt

SEQ ID NO: 1064650 - DNA, 25 bp, Homo sapien
gtcacctcgcagaggaaggcctcca

SEQ ID NO: 1064651 - DNA, 25 bp, Homo sapien
cgttcaaatccagcggccacatact

SEQ ID NO: 1064652 - DNA, 25 bp, Homo sapien
tgtggaatcgttcaaatccagcggc

SEQ ID NO: 1064653 - DNA, 25 bp, Homo sapien
ggagcttgtggaatcgttcaaatcc

SEQ ID NO: 1064654 - DNA, 25 bp, Homo sapien
cagcggccacatactgccctctgtt

SEQ ID NO: 1064655 - DNA, 25 bp, Homo sapien
ccacctgggtccttccctctatggg

SEQ ID NO: 1064656 - DNA, 25 bp, Homo sapien
tcccacctgggtccttccctctatg

SEQ ID NO: 1064657 - DNA, 25 bp, Homo sapien
ttgtagtctgcagctcttcccacct

SEQ ID NO: 1064658 - DNA, 25 bp, Homo sapien
tagtctgcagctcttcccacctggg

SEQ ID NO: 1064659 - DNA, 25 bp, Homo sapien
ccatcaagcatgctggacttctaca

SEQ ID NO: 1064660 - DNA, 25 bp, Homo sapien
catcacacaagtggcgagtcacggg

SEQ ID NO: 1064661 - DNA, 25 bp, Homo sapien
gcacagggccagcaataaccataac

SEQ ID NO: 1064662 - DNA, 25 bp, Homo sapien
tacattcccaacagtaaccagaggc

SEQ ID NO: 1064663 - DNA, 25 bp, Homo sapien
cagactaaatgggggacttaccagg

SEQ ID NO: 1064664 - DNA, 25 bp, Homo sapien
gcttcagactaaatgggggacttac

SEQ ID NO: 1064665 - DNA, 25 bp, Homo sapien
tgcaacttgaccttctcagtcagga

SEQ ID NO: 1064666 - DNA, 25 bp, Homo sapien
caacttgaccttctcagtcaggagc

SEQ ID NO: 1064667 - DNA, 25 bp, Homo sapien
tggggacttttgggccctcgcagtc

SEQ ID NO: 1064668 - DNA, 25 bp, Homo sapien
tcctctccgacagccacatagtaat

SEQ ID NO: 1064669 - DNA, 25 bp, Homo sapien
atagggaaggtccttgaactcatcc

SEQ ID NO: 1064670 - DNA, 25 bp, Homo sapien
taatggccagttaccagctccttcc

SEQ ID NO: 1064671 - DNA, 25 bp, Homo sapien
cagctccagatagggaaggtccttg

SEQ ID NO: 1064672 - DNA, 25 bp, Homo sapien
cagcccctgggcagggaggggctgg

SEQ ID NO: 1064673 - DNA, 25 bp, Homo sapien
cagcagcccctgggcagggaggggc

SEQ ID NO: 1064674 - DNA, 25 bp, Homo sapien
ccctgggcagggaggggctgggcac

SEQ ID NO: 1064675 - DNA, 25 bp, Homo sapien
gcccctgggcagggaggggctgggc

SEQ ID NO: 1064676 - DNA, 25 bp, Homo sapien
cctgtggggcctagacttcgagcct

SEQ ID NO: 1064677 - DNA, 25 bp, Homo sapien
tgtggggcctagacttcgagcctgg

SEQ ID NO: 1064678 - DNA, 25 bp, Homo sapien
cctgcctgtggggcctagacttcga

SEQ ID NO: 1064679 - DNA, 25 bp, Homo sapien
tgcctgtggggcctagacttcgagc

SEQ ID NO: 1064680 - DNA, 25 bp, Homo sapien
agctggatatggtggagcgtgccca

SEQ ID NO: 1064681 - DNA, 25 bp, Homo sapien
ctggatatggtggagcgtgcccata

SEQ ID NO: 1064682 - DNA, 25 bp, Homo sapien
ggatatggtggagcgtgcccataat

SEQ ID NO: 1064683 - DNA, 25 bp, Homo sapien
tgcttgaaccgggacctgggaggcg

SEQ ID NO: 1064684 - DNA, 25 bp, Homo sapien
tattaagtcctgcaaatcagatgag

SEQ ID NO: 1064685 - DNA, 25 bp, Homo sapien
aatataagttcccttggaccctgct

SEQ ID NO: 1064686 - DNA, 25 bp, Homo sapien
tcagatgagaattctggtctggccc

SEQ ID NO: 1064687 - DNA, 25 bp, Homo sapien
ccagcgtccaacctagcaagaaggt

SEQ ID NO: 1064688 - DNA, 25 bp, Homo sapien
ctggggtctggcatagaaagcagat

SEQ ID NO: 1064689 - DNA, 25 bp, Homo sapien
gaaagcagatggcttaattcggtct

SEQ ID NO: 1064690 - DNA, 25 bp, Homo sapien
gcagatggcttaattcggtctggtt

SEQ ID NO: 1064691 - DNA, 25 bp, Homo sapien
gatggcttaattcggtctggttcct

SEQ ID NO: 1064692 - DNA, 25 bp, Homo sapien
ctaaagaggggaggcagcactgggt

SEQ ID NO: 1064693 - DNA, 25 bp, Homo sapien
gaggggaggcagcactgggtgatgc

SEQ ID NO: 1064694 - DNA, 25 bp, Homo sapien
ggaggcagcactgggtgatgcccag

SEQ ID NO: 1064695 - DNA, 25 bp, Homo sapien
ggggaggcagcactgggtgatgccc

SEQ ID NO: 1064696 - DNA, 25 bp, Homo sapien
tggggagctccatatactcctataa

SEQ ID NO: 1064697 - DNA, 25 bp, Homo sapien
gggagctccatatactcctataact

SEQ ID NO: 1064698 - DNA, 25 bp, Homo sapien
ggagctccatatactcctataactc

SEQ ID NO: 1064699 - DNA, 25 bp, Homo sapien
ggtggggagctccatatactcctat

SEQ ID NO: 1064700 - DNA, 25 bp, Homo sapien
tcctctgtctgagtgtcttcatcat

SEQ ID NO: 1064701 - DNA, 25 bp, Homo sapien
gacaaggcctcttccactatctgtg

SEQ ID NO: 1064702 - DNA, 25 bp, Homo sapien
ggagctgctggctctcaagatggca

SEQ ID NO: 1064703 - DNA, 25 bp, Homo sapien
ttattgtgacaaaccctctcccagg

SEQ ID NO: 1064704 - DNA, 25 bp, Homo sapien
tagtggtccccagttgccctctgga

SEQ ID NO: 1064705 - DNA, 25 bp, Homo sapien
cagaacccatctccccagagtgggt

SEQ ID NO: 1064706 - DNA, 25 bp, Homo sapien
ttaactccataaggcctgagcttgg

SEQ ID NO: 1064707 - DNA, 25 bp, Homo sapien
atttttaactccataaggcctgagc

SEQ ID NO: 1064708 - DNA, 25 bp, Homo sapien
acaggtccagcccaatgtcctgaac

SEQ ID NO: 1064709 - DNA, 25 bp, Homo sapien
cccaatgtcctgaacaggtcctgct

SEQ ID NO: 1064710 - DNA, 25 bp, Homo sapien
ttggcatcgacaggtgggtcctggc

SEQ ID NO: 1064711 - DNA, 25 bp, Homo sapien
ggaactgttctgcttagtgtttgag

SEQ ID NO: 1064712 - DNA, 25 bp, Homo sapien
tggcttggaactgttctgcttagtg

SEQ ID NO: 1064713 - DNA, 25 bp, Homo sapien
tgttctgcttagtgtttgaggccac

SEQ ID NO: 1064714 - DNA, 25 bp, Homo sapien
ctcaaccagtgtggatcccttctct

SEQ ID NO: 1064715 - DNA, 25 bp, Homo sapien
cctcaaccagtgtggatcccttctc

SEQ ID NO: 1064716 - DNA, 25 bp, Homo sapien
tcctcaaccagtgtggatcccttct

SEQ ID NO: 1064717 - DNA, 25 bp, Homo sapien
tctcctcaaccagtgtggatccctt

SEQ ID NO: 1064718 - DNA, 25 bp, Homo sapien
ctcaaattggccctgcaggggagga

SEQ ID NO: 1064719 - DNA, 25 bp, Homo sapien
cctccttagagggattagtgttctc

SEQ ID NO: 1064720 - DNA, 25 bp, Homo sapien
gaaggatcctccttagagggattag

SEQ ID NO: 1064721 - DNA, 25 bp, Homo sapien
ttgccctggaaggatcctccttaga

SEQ ID NO: 1064722 - DNA, 25 bp, Homo sapien
cagttgctacaggagatgaagaccc

SEQ ID NO: 1064723 - DNA, 25 bp, Homo sapien
gagtcaaacaggtctgggtcagccc

SEQ ID NO: 1064724 - DNA, 25 bp, Homo sapien
actgaggtgcgtctctgtgaaaggc

SEQ ID NO: 1064725 - DNA, 25 bp, Homo sapien
tggagttgccgccaagaatttggtc

SEQ ID NO: 1064726 - DNA, 25 bp, Homo sapien
ccagtcgcagccgaggcgaagagag

SEQ ID NO: 1064727 - DNA, 25 bp, Homo sapien
gggtcagggtgactcactcgtctgc

SEQ ID NO: 1064728 - DNA, 25 bp, Homo sapien
cactcgtctgcattcagggcaggtg

SEQ ID NO: 1064729 - DNA, 25 bp, Homo sapien
tgccttagccgccagtcgcagccga

SEQ ID NO: 1064730 - DNA, 25 bp, Homo sapien
cgcaacgtgagtaagaccggaaaag

SEQ ID NO: 1064731 - DNA, 25 bp, Homo sapien
gtgctcggaattgggccccagcctc

SEQ ID NO: 1064732 - DNA, 25 bp, Homo sapien
taacgtcagtgctcggaattgggcc

SEQ ID NO: 1064733 - DNA, 25 bp, Homo sapien
gggacaagacagtaacgtcagtgct

SEQ ID NO: 1064734 - DNA, 25 bp, Homo sapien
gacagtaacgtcagtgctcggaatt

SEQ ID NO: 1064735 - DNA, 25 bp, Homo sapien
ctccttcgcggttatacttaatctg

SEQ ID NO: 1064736 - DNA, 25 bp, Homo sapien
cggttatacttaatctgcgtaatgg

SEQ ID NO: 1064737 - DNA, 25 bp, Homo sapien
tctgcgtaatggaccgctcatggcc

SEQ ID NO: 1064738 - DNA, 25 bp, Homo sapien
tacttaatctgcgtaatggaccgct

SEQ ID NO: 1064739 - DNA, 25 bp, Homo sapien
ttcacagagtaccatacattgacga

SEQ ID NO: 1064740 - DNA, 25 bp, Homo sapien
tcacagagtaccatacattgacgat

SEQ ID NO: 1064741 - DNA, 25 bp, Homo sapien
cattcacagagtaccatacattgac

SEQ ID NO: 1064742 - DNA, 25 bp, Homo sapien
attcacagagtaccatacattgacg

SEQ ID NO: 1064743 - DNA, 25 bp, Homo sapien
tccggtatggcccatgtaggtgccc

SEQ ID NO: 1064744 - DNA, 25 bp, Homo sapien
tggcccatgtaggtgcccagcctct

SEQ ID NO: 1064745 - DNA, 25 bp, Homo sapien
acagctccggtatggcccatgtagg

SEQ ID NO: 1064746 - DNA, 25 bp, Homo sapien
cacacagctccggtatggcccatgt

SEQ ID NO: 1064747 - DNA, 25 bp, Homo sapien
gaaatatgacgaagttcacccgagc

SEQ ID NO: 1064748 - DNA, 25 bp, Homo sapien
gttaagaaatatgacgaagttcacc

SEQ ID NO: 1064749 - DNA, 25 bp, Homo sapien
tgacgaagttcacccgagcccttgt

SEQ ID NO: 1064750 - DNA, 25 bp, Homo sapien
ctgaagagttgttaagaaatatgac

SEQ ID NO: 1064751 - DNA, 25 bp, Homo sapien
ccagtgaggacatgcttggtgtccc

SEQ ID NO: 1064752 - DNA, 25 bp, Homo sapien
cagtcccagagacgacagctgttgt

SEQ ID NO: 1064753 - DNA, 25 bp, Homo sapien
ctgtttcacagtcccagagacgaca

SEQ ID NO: 1064754 - DNA, 25 bp, Homo sapien
gagacgacagctgttgtcagctgag

SEQ ID NO: 1064755 - DNA, 25 bp, Homo sapien
gtggagaacatgatgatgttgcccc

SEQ ID NO: 1064756 - DNA, 25 bp, Homo sapien
aagtcaaaaccgcaggtccggacag

SEQ ID NO: 1064757 - DNA, 25 bp, Homo sapien
cttgtccgtggagaacatgatgatg

SEQ ID NO: 1064758 - DNA, 25 bp, Homo sapien
gccgaattggtcttgagaagggcca

SEQ ID NO: 1064759 - DNA, 25 bp, Homo sapien
tcggatcccgcaggtcaaaaaagct

SEQ ID NO: 1064760 - DNA, 25 bp, Homo sapien
ctggctcggatcccgcaggtcaaaa

SEQ ID NO: 1064761 - DNA, 25 bp, Homo sapien
tggctcggatcccgcaggtcaaaaa

SEQ ID NO: 1064762 - DNA, 25 bp, Homo sapien
gctcggatcccgcaggtcaaaaaag

SEQ ID NO: 1064763 - DNA, 25 bp, Homo sapien
gagctctccactctcatggccagcg

SEQ ID NO: 1064764 - DNA, 25 bp, Homo sapien
gctctccactctcatggccagcgat

SEQ ID NO: 1064765 - DNA, 25 bp, Homo sapien
agctctccactctcatggccagcga

SEQ ID NO: 1064766 - DNA, 25 bp, Homo sapien
ctctccactctcatggccagcgatg

SEQ ID NO: 1064767 - DNA, 25 bp, Homo sapien
ctgagtactttgtgacaagtttttc

SEQ ID NO: 1064768 - DNA, 25 bp, Homo sapien
tccttattaacatgtcctgagtact

SEQ ID NO: 1064769 - DNA, 25 bp, Homo sapien
aagtggtgaaatctacatttgaatc

SEQ ID NO: 1064770 - DNA, 25 bp, Homo sapien
caaacatgtgatatcatttgatcct

SEQ ID NO: 1064771 - DNA, 25 bp, Homo sapien
ccgggagtgctccttaacattcacc

SEQ ID NO: 1064772 - DNA, 25 bp, Homo sapien
tgccgggagtgctccttaacattca

SEQ ID NO: 1064773 - DNA, 25 bp, Homo sapien
tgtcgttgatctgccgggagtgctc

SEQ ID NO: 1064774 - DNA, 25 bp, Homo sapien
gataactggatgtcgttgatctgcc

SEQ ID NO: 1064775 - DNA, 25 bp, Homo sapien
ctgtgttgtccttggacgcggtcac

SEQ ID NO: 1064776 - DNA, 25 bp, Homo sapien
gttgtccttggacgcggtcacaaac

SEQ ID NO: 1064777 - DNA, 25 bp, Homo sapien
tgtgttgtccttggacgcggtcaca

SEQ ID NO: 1064778 - DNA, 25 bp, Homo sapien
tgttgtccttggacgcggtcacaaa

SEQ ID NO: 1064779 - DNA, 25 bp, Homo sapien
gcagctgagttgacaggacgttctg

SEQ ID NO: 1064780 - DNA, 25 bp, Homo sapien
caggacgttctgtccggaaagtctt

SEQ ID NO: 1064781 - DNA, 25 bp, Homo sapien
atgttcaagagttgtggagtcaaaa

SEQ ID NO: 1064782 - DNA, 25 bp, Homo sapien
gttcaagagttgtggagtcaaaaag

SEQ ID NO: 1064783 - DNA, 25 bp, Homo sapien
atcctggtggaggttgtggttacat

SEQ ID NO: 1064784 - DNA, 25 bp, Homo sapien
aggttgtggttacatccatggcttc

SEQ ID NO: 1064785 - DNA, 25 bp, Homo sapien
tggcctcaaacttgccaatcctggt

SEQ ID NO: 1064786 - DNA, 25 bp, Homo sapien
ggcttcctgaccaccgcccaggacc

SEQ ID NO: 1064787 - DNA, 25 bp, Homo sapien
caaagtgacccttgactcttccaaa

SEQ ID NO: 1064788 - DNA, 25 bp, Homo sapien
tactgtgggtcgaagtaatggatac

SEQ ID NO: 1064789 - DNA, 25 bp, Homo sapien
caaattcgaagtactgtgggtcgaa

SEQ ID NO: 1064790 - DNA, 25 bp, Homo sapien
gatacggacgtaaccatcttcgccg

SEQ ID NO: 1064791 - DNA, 25 bp, Homo sapien
tcgaagtaatggatacggacgtaac

SEQ ID NO: 1064792 - DNA, 25 bp, Homo sapien
gcctggttggagatccaccttcttc

SEQ ID NO: 1064793 - DNA, 25 bp, Homo sapien
tctggcctggttggagatccacctt

SEQ ID NO: 1064794 - DNA, 25 bp, Homo sapien
ctggcctggttggagatccaccttc

SEQ ID NO: 1064795 - DNA, 25 bp, Homo sapien
caccctgtgctgtaaagacctgcga

SEQ ID NO: 1064796 - DNA, 25 bp, Homo sapien
catacttggtggacgatgatgccct

SEQ ID NO: 1064797 - DNA, 25 bp, Homo sapien
gcttctgttcaaagaggctccgcag

SEQ ID NO: 1064798 - DNA, 25 bp, Homo sapien
tttaagctctccctgtctcgcgtag

SEQ ID NO: 1064799 - DNA, 25 bp, Homo sapien
gggacctcgctaagaaatattggca

SEQ ID NO: 1064800 - DNA, 25 bp, Homo sapien
tataacagtctctggccagggacct

SEQ ID NO: 1064801 - DNA, 25 bp, Homo sapien
ggcacagggttaaggactttaggca

SEQ ID NO: 1064802 - DNA, 25 bp, Homo sapien
caggcagttcctatccctttcggag

SEQ ID NO: 1064803 - DNA, 25 bp, Homo sapien
ggagtgagccaactcgcttggcttt

SEQ ID NO: 1064804 - DNA, 25 bp, Homo sapien
tgagccaactcgcttggcttttttt

SEQ ID NO: 1064805 - DNA, 25 bp, Homo sapien
gagtgagccaactcgcttggctttt

SEQ ID NO: 1064806 - DNA, 25 bp, Homo sapien
tgattctcttgcttgacctcctcag

SEQ ID NO: 1064807 - DNA, 25 bp, Homo sapien
gacttacagggccaagaccccacac

SEQ ID NO: 1064808 - DNA, 25 bp, Homo sapien
ctcttgcttgacctcctcagtagct

SEQ ID NO: 1064809 - DNA, 25 bp, Homo sapien
attctcttgcttgacctcctcagta

SEQ ID NO: 1064810 - DNA, 25 bp, Homo sapien
aattcccagaaaggaagttgctcca

SEQ ID NO: 1064811 - DNA, 25 bp, Homo sapien
caggaaaggactagcctccagggcc

SEQ ID NO: 1064812 - DNA, 25 bp, Homo sapien
ccaagactcatgttaagggagctga

SEQ ID NO: 1064813 - DNA, 25 bp, Homo sapien
ttcaagctaatactctaaggagccc

SEQ ID NO: 1064814 - DNA, 25 bp, Homo sapien
ggaatttcagtagccccagggacat

SEQ ID NO: 1064815 - DNA, 25 bp, Homo sapien
caagggcggagtccattgagtcgaa

SEQ ID NO: 1064816 - DNA, 25 bp, Homo sapien
agctcccgtcggagccactcaaggg

SEQ ID NO: 1064817 - DNA, 25 bp, Homo sapien
ggctgtccactccagatatgagggc

SEQ ID NO: 1064818 - DNA, 25 bp, Homo sapien
aagcgccgggcgctgatgttcatgc

SEQ ID NO: 1064819 - DNA, 25 bp, Homo sapien
gacaggcttggtccatcttcagtcg

SEQ ID NO: 1064820 - DNA, 25 bp, Homo sapien
atcttcagtcggtgcagctgggccc

SEQ ID NO: 1064821 - DNA, 25 bp, Homo sapien
atgttcatgcgcgtgaggcccaggt

SEQ ID NO: 1064822 - DNA, 25 bp, Homo sapien
tattgaggagtttgagggtgtgagc

SEQ ID NO: 1064823 - DNA, 25 bp, Homo sapien
gatgctggggttttgcactcttgga

SEQ ID NO: 1064824 - DNA, 25 bp, Homo sapien
tttgcactcttggaattcagctctc

SEQ ID NO: 1064825 - DNA, 25 bp, Homo sapien
gggaaccagagaaagcgtttattga

SEQ ID NO: 1064826 - DNA, 25 bp, Homo sapien
cagtctcagctcccttcgccgtcgt

SEQ ID NO: 1064827 - DNA, 25 bp, Homo sapien
tctcagctcccttcgccgtcgtagc

SEQ ID NO: 1064828 - DNA, 25 bp, Homo sapien
acatggtcctcctggcctaacctgg

SEQ ID NO: 1064829 - DNA, 25 bp, Homo sapien
cacatggtcctcctggcctaacctg

SEQ ID NO: 1064830 - DNA, 25 bp, Homo sapien
tgcccagcccgggagccctctggcc

SEQ ID NO: 1064831 - DNA, 25 bp, Homo sapien
ctgcccagcccgggagccctctggc

SEQ ID NO: 1064832 - DNA, 25 bp, Homo sapien
tggctttaattccgctctctctctt

SEQ ID NO: 1064833 - DNA, 25 bp, Homo sapien
cacctggctttaattccgctctctc

SEQ ID NO: 1064834 - DNA, 25 bp, Homo sapien
cctggctttaattccgctctctctc

SEQ ID NO: 1064835 - DNA, 25 bp, Homo sapien
gctaaaatagggggtcccagctcca

SEQ ID NO: 1064836 - DNA, 25 bp, Homo sapien
ttgtgagatcctgggatccccattc

SEQ ID NO: 1064837 - DNA, 25 bp, Homo sapien
tccaaaccggtgctccctctgagcc

SEQ ID NO: 1064838 - DNA, 25 bp, Homo sapien
gattgtgagatcctgggatccccat

SEQ ID NO: 1064839 - DNA, 25 bp, Homo sapien
gctcccccaacatcagatataatgg

SEQ ID NO: 1064840 - DNA, 25 bp, Homo sapien
ccaagatctgctcccccaacatcag

SEQ ID NO: 1064841 - DNA, 25 bp, Homo sapien
caacatcagatataatggggccttg

SEQ ID NO: 1064842 - DNA, 25 bp, Homo sapien
ggctgaaggggctcccccaagatct

SEQ ID NO: 1064843 - DNA, 25 bp, Homo sapien
tccagtgggactatgggataatggc

SEQ ID NO: 1064844 - DNA, 25 bp, Homo sapien
taatggcagttctcacacacatcga

SEQ ID NO: 1064845 - DNA, 25 bp, Homo sapien
ctatgggataatggcagttctcaca

SEQ ID NO: 1064846 - DNA, 25 bp, Homo sapien
tgggactatgggataatggcagttc

SEQ ID NO: 1064847 - DNA, 25 bp, Homo sapien
acctcagagccatttcggatgagca

SEQ ID NO: 1064848 - DNA, 25 bp, Homo sapien
gcggattggagccttcgtaggtaac

SEQ ID NO: 1064849 - DNA, 25 bp, Homo sapien
tgggtcccgcacctcagagccattt

SEQ ID NO: 1064850 - DNA, 25 bp, Homo sapien
tcgtaggtaaccagtgggtcccgca

SEQ ID NO: 1064851 - DNA, 25 bp, Homo sapien
gtggaagccaacagccagggatccg

SEQ ID NO: 1064852 - DNA, 25 bp, Homo sapien
gagaaccgagctgggatcggcagga

SEQ ID NO: 1064853 - DNA, 25 bp, Homo sapien
agctgggatcggcaggaagcctgga

SEQ ID NO: 1064854 - DNA, 25 bp, Homo sapien
ccagggatccgcaggccttgtcttt

SEQ ID NO: 1064855 - DNA, 25 bp, Homo sapien
tccgtcgtgagagggctcatagctg

SEQ ID NO: 1064856 - DNA, 25 bp, Homo sapien
aaagcccagatctccgtcgtgagag

SEQ ID NO: 1064857 - DNA, 25 bp, Homo sapien
tcatagctgtgcagagcgataacca

SEQ ID NO: 1064858 - DNA, 25 bp, Homo sapien
aggatgcggagctgttcccccttct

SEQ ID NO: 1064859 - DNA, 25 bp, Homo sapien
ggtcagtgtggctcgctcagccgtc

SEQ ID NO: 1064860 - DNA, 25 bp, Homo sapien
accccgagctggtcaagggccgcag

SEQ ID NO: 1064861 - DNA, 25 bp, Homo sapien
acggactccgccagagcaaggtgga

SEQ ID NO: 1064862 - DNA, 25 bp, Homo sapien
gagcctcgaattttgtcccaagggc

SEQ ID NO: 1064863 - DNA, 25 bp, Homo sapien
agggactgcgccttccaccactcgc

SEQ ID NO: 1064864 - DNA, 25 bp, Homo sapien
ttcctggcccgtggtcagggactgc

SEQ ID NO: 1064865 - DNA, 25 bp, Homo sapien
ggttcgggctccaggctgttcgctt

SEQ ID NO: 1064866 - DNA, 25 bp, Homo sapien
caggctgttcgctttggccacaaaa

SEQ ID NO: 1064867 - DNA, 25 bp, Homo sapien
gcggctcaggttcttgaagaaccag

SEQ ID NO: 1064868 - DNA, 25 bp, Homo sapien
aggaaggagccgtgagtgttcccgg

SEQ ID NO: 1064869 - DNA, 25 bp, Homo sapien
gaggaaggagccgtgagtgttcccg

SEQ ID NO: 1064870 - DNA, 25 bp, Homo sapien
cccggatgaggaaggagccgtgagt

SEQ ID NO: 1064871 - DNA, 25 bp, Homo sapien
gatgaggaaggagccgtgagtgttc

SEQ ID NO: 1064872 - DNA, 25 bp, Homo sapien
gtaatggcggaccagttcatgcagg

SEQ ID NO: 1064873 - DNA, 25 bp, Homo sapien
gatgtagaagccaccgttgtccaga

SEQ ID NO: 1064874 - DNA, 25 bp, Homo sapien
catgcaggccgggaaaagtgattcg

SEQ ID NO: 1064875 - DNA, 25 bp, Homo sapien
tcccggaccgacagtgaaaacgatc

SEQ ID NO: 1064876 - DNA, 25 bp, Homo sapien
caggggcggctcaaccgtgtgcaca

SEQ ID NO: 1064877 - DNA, 25 bp, Homo sapien
gctcaaccgtgtgcacagcccatct

SEQ ID NO: 1064878 - DNA, 25 bp, Homo sapien
tcgtcctcccaccacggcttctggg

SEQ ID NO: 1064879 - DNA, 25 bp, Homo sapien
ccacacctccccgaactgtccagcc

SEQ ID NO: 1064880 - DNA, 25 bp, Homo sapien
gtagagccgaaccagccgctggtgt

SEQ ID NO: 1064881 - DNA, 25 bp, Homo sapien
ccaccttcgtgtgcccgttgtagta

SEQ ID NO: 1064882 - DNA, 25 bp, Homo sapien
ttcaccgccaccttcgtgtgcccgt

SEQ ID NO: 1064883 - DNA, 25 bp, Homo sapien
cttcatgaggttggcctcggccagg

SEQ ID NO: 1064884 - DNA, 25 bp, Homo sapien
gagcagtatcccctggtagccgact

SEQ ID NO: 1064885 - DNA, 25 bp, Homo sapien
tggtagccgactcgggtagcaccca

SEQ ID NO: 1064886 - DNA, 25 bp, Homo sapien
gcagggagagcagtatcccctggta

SEQ ID NO: 1064887 - DNA, 25 bp, Homo sapien
tatcccctggtagccgactcgggta

SEQ ID NO: 1064888 - DNA, 25 bp, Homo sapien
ctggcccaagttgccccagggggag

SEQ ID NO: 1064889 - DNA, 25 bp, Homo sapien
aagagttgctggcccaagttgcccc

SEQ ID NO: 1064890 - DNA, 25 bp, Homo sapien
gagttgctggcccaagttgccccag

SEQ ID NO: 1064891 - DNA, 25 bp, Homo sapien
gttgctggcccaagttgccccaggg

SEQ ID NO: 1064892 - DNA, 25 bp, Homo sapien
catgtccaggagtttgttgatggtc

SEQ ID NO: 1064893 - DNA, 25 bp, Homo sapien
tttgttgatggtcaacttgatgcct

SEQ ID NO: 1064894 - DNA, 25 bp, Homo sapien
atgtccaggagtttgttgatggtca

SEQ ID NO: 1064895 - DNA, 25 bp, Homo sapien
tgttgatggtcaacttgatgcctga

SEQ ID NO: 1064896 - DNA, 25 bp, Homo sapien
tgcccagcccccctccccagtctcc

SEQ ID NO: 1064897 - DNA, 25 bp, Homo sapien
cactggtctgttcccttgcccagcc

SEQ ID NO: 1064898 - DNA, 25 bp, Homo sapien
acgtcactggtctgttcccttgccc

SEQ ID NO: 1064899 - DNA, 25 bp, Homo sapien
gtcactggtctgttcccttgcccag

SEQ ID NO: 1064900 - DNA, 25 bp, Homo sapien
caaacacagatcagcggtcctgagc

SEQ ID NO: 1064901 - DNA, 25 bp, Homo sapien
aaacacagatcagcggtcctgagcc

SEQ ID NO: 1064902 - DNA, 25 bp, Homo sapien
tcttgcagctcagggtgtcagacac

SEQ ID NO: 1064903 - DNA, 25 bp, Homo sapien
cagcccgaaggtcacgatgaatata

SEQ ID NO: 1064904 - DNA, 25 bp, Homo sapien
caatgaggcgtgctaggccaaagtc

SEQ ID NO: 1064905 - DNA, 25 bp, Homo sapien
gacaccagaatgttggcagcccgaa

SEQ ID NO: 1064906 - DNA, 25 bp, Homo sapien
ggcgctgtccacttaatgggaaact

SEQ ID NO: 1064907 - DNA, 25 bp, Homo sapien
tagttaatggcttctggcgctgtcc

SEQ ID NO: 1064908 - DNA, 25 bp, Homo sapien
gacttgatggtgaatgtcccgtagt

SEQ ID NO: 1064909 - DNA, 25 bp, Homo sapien
tgcggccgtgggtgacaatttccgt

SEQ ID NO: 1064910 - DNA, 25 bp, Homo sapien
tagcctcgctccaggttctgaatca

SEQ ID NO: 1064911 - DNA, 25 bp, Homo sapien
tctggacagttgtcagggcgcacca

SEQ ID NO: 1064912 - DNA, 25 bp, Homo sapien
cctctgtggccgtgaagaagtcctc

SEQ ID NO: 1064913 - DNA, 25 bp, Homo sapien
gcacactgcgcaggtagtcaaaggt

SEQ ID NO: 1064914 - DNA, 25 bp, Homo sapien
ccatatgtgcataggccatgtgact

SEQ ID NO: 1064915 - DNA, 25 bp, Homo sapien
tgtgcagagtccacgcaactacagg

SEQ ID NO: 1064916 - DNA, 25 bp, Homo sapien
gcagaagcttctgtcaatcccaggc

SEQ ID NO: 1064917 - DNA, 25 bp, Homo sapien
ttagataaagtcctggcccttgagg

SEQ ID NO: 1064918 - DNA, 25 bp, Homo sapien
cagacatttattgaactcctgatgt

SEQ ID NO: 1064919 - DNA, 25 bp, Homo sapien
acatttattgaactcctgatgtgtg

SEQ ID NO: 1064920 - DNA, 25 bp, Homo sapien
aacagacatttattgaactcctgat

SEQ ID NO: 1064921 - DNA, 25 bp, Homo sapien
gacatttattgaactcctgatgtgt

SEQ ID NO: 1064922 - DNA, 25 bp, Homo sapien
tcagtcggtccgtccgccctcccgc

SEQ ID NO: 1064923 - DNA, 25 bp, Homo sapien
tccgggtgccctgcgtctgcgccat

SEQ ID NO: 1064924 - DNA, 25 bp, Homo sapien
aacagactttcctccgggtgccctg

SEQ ID NO: 1064925 - DNA, 25 bp, Homo sapien
ctttcctccgggtgccctgcgtctg

SEQ ID NO: 1064926 - DNA, 25 bp, Homo sapien
cgtagtagtaacagactttcctccg

SEQ ID NO: 1064927 - DNA, 25 bp, Homo sapien
tgttcttcaggtcctaactaagatg

SEQ ID NO: 1064928 - DNA, 25 bp, Homo sapien
taagatgtcccctccttcgctgact

SEQ ID NO: 1064929 - DNA, 25 bp, Homo sapien
tgtgcctggctaagaactcctgttc

SEQ ID NO: 1064930 - DNA, 25 bp, Homo sapien
gttatctttgccttccctgtgcctg

SEQ ID NO: 1064931 - DNA, 25 bp, Homo sapien
ttcggtgaggcttcattgggtggcc

SEQ ID NO: 1064932 - DNA, 25 bp, Homo sapien
gcaaattatgagtcatgcggattcg

SEQ ID NO: 1064933 - DNA, 25 bp, Homo sapien
attatgagtcatgcggattcggtga

SEQ ID NO: 1064934 - DNA, 25 bp, Homo sapien
tgaggcttcattgggtggccttgtc

SEQ ID NO: 1064935 - DNA, 25 bp, Homo sapien
tatctggacggatggagcgcaagaa

SEQ ID NO: 1064936 - DNA, 25 bp, Homo sapien
tctgcttgctgtactccgacatgtt

SEQ ID NO: 1064937 - DNA, 25 bp, Homo sapien
tgtactccgacatgttatctggacg

SEQ ID NO: 1064938 - DNA, 25 bp, Homo sapien
ccgacatgttatctggacggatgga

SEQ ID NO: 1064939 - DNA, 25 bp, Homo sapien
catgtccagcgcctaggttagatat

SEQ ID NO: 1064940 - DNA, 25 bp, Homo sapien
cactgtactgtaccctggatgacaa

SEQ ID NO: 1064941 - DNA, 25 bp, Homo sapien
gataccccaggttataaagcactgt

SEQ ID NO: 1064942 - DNA, 25 bp, Homo sapien
tagagaggcttattcttcctgcccc

SEQ ID NO: 1064943 - DNA, 25 bp, Homo sapien
gcctggcctgtgtatctaaaatatt

SEQ ID NO: 1064944 - DNA, 25 bp, Homo sapien
cctgcctggcctgtgtatctaaaat

SEQ ID NO: 1064945 - DNA, 25 bp, Homo sapien
accctgcctggcctgtgtatctaaa

SEQ ID NO: 1064946 - DNA, 25 bp, Homo sapien
gctttttgtgtgtgtctaaaatatg

SEQ ID NO: 1064947 - DNA, 25 bp, Homo sapien
tctcaagacacagttgaagctcaag

SEQ ID NO: 1064948 - DNA, 25 bp, Homo sapien
taaacttggagggtgccaagatccg

SEQ ID NO: 1064949 - DNA, 25 bp, Homo sapien
gaagctcaagatctacaataaccac

SEQ ID NO: 1064950 - DNA, 25 bp, Homo sapien
taaccacaagagttaccagctctgg

SEQ ID NO: 1064951 - DNA, 25 bp, Homo sapien
agagaactatcgttcactgcgcacg

SEQ ID NO: 1064952 - DNA, 25 bp, Homo sapien
gcgctacatgcgttaaatacccgag

SEQ ID NO: 1064953 - DNA, 25 bp, Homo sapien
cctcacgccagctgacaaacaaggg

SEQ ID NO: 1064954 - DNA, 25 bp, Homo sapien
tgttccctaggcctcatgcagtctt

SEQ ID NO: 1064955 - DNA, 25 bp, Homo sapien
accagtagacaactgacagaactca

SEQ ID NO: 1064956 - DNA, 25 bp, Homo sapien
cagaactcaaacaggccatcgaata

SEQ ID NO: 1064957 - DNA, 25 bp, Homo sapien
gaatactggacagtcctcaccaacg

SEQ ID NO: 1064958 - DNA, 25 bp, Homo sapien
ccacagaaccaccagtagacaactg

SEQ ID NO: 1064959 - DNA, 25 bp, Homo sapien
gccaagacgatatcattgacgtaac

SEQ ID NO: 1064960 - DNA, 25 bp, Homo sapien
ggatggccaagacgatatcattgac

SEQ ID NO: 1064961 - DNA, 25 bp, Homo sapien
gacgatatcattgacgtaacagaag

SEQ ID NO: 1064962 - DNA, 25 bp, Homo sapien
atatcattgacgtaacagaagccag

SEQ ID NO: 1064963 - DNA, 25 bp, Homo sapien
tagccagcacatcggtaggaaaagc

SEQ ID NO: 1064964 - DNA, 25 bp, Homo sapien
gaaatgggaacctggcctaaggtgc

SEQ ID NO: 1064965 - DNA, 25 bp, Homo sapien
tcatgccgtggctcagatcaaacca

SEQ ID NO: 1064966 - DNA, 25 bp, Homo sapien
gatcttcctactctacagccagggt

SEQ ID NO: 1064967 - DNA, 25 bp, Homo sapien
ccctcaggtatctctaagcaccaga

SEQ ID NO: 1064968 - DNA, 25 bp, Homo sapien
tgcctccctcaggtatctctaagca

SEQ ID NO: 1064969 - DNA, 25 bp, Homo sapien
tagctcccagcttaccgggctggct

SEQ ID NO: 1064970 - DNA, 25 bp, Homo sapien
gggatgggacgtgccaagggcgcta

SEQ ID NO: 1064971 - DNA, 25 bp, Homo sapien
tcttccacgccgtcaccatggtgaa

SEQ ID NO: 1064972 - DNA, 25 bp, Homo sapien
gccgtcaccatggtgaatatcaatg

SEQ ID NO: 1064973 - DNA, 25 bp, Homo sapien
tcatgacccggtccgtggtgtagaa

SEQ ID NO: 1064974 - DNA, 25 bp, Homo sapien
gacacagtcatgacccggtccgtgg

SEQ ID NO: 1064975 - DNA, 25 bp, Homo sapien
aagtagagctgccagctgagggtaa

SEQ ID NO: 1064976 - DNA, 25 bp, Homo sapien
tgagggtaagccggttggctcctaa

SEQ ID NO: 1064977 - DNA, 25 bp, Homo sapien
gttggctcctaaagggcgttctcac

SEQ ID NO: 1064978 - DNA, 25 bp, Homo sapien
cagctgagggtaagccggttggctc

SEQ ID NO: 1064979 - DNA, 25 bp, Homo sapien
cagactgagagctcttgatgggacc

SEQ ID NO: 1064980 - DNA, 25 bp, Homo sapien
agtgagtgcgcctatttaagtccag

SEQ ID NO: 1064981 - DNA, 25 bp, Homo sapien
tgatgggaccagagattgaatagcc

SEQ ID NO: 1064982 - DNA, 25 bp, Homo sapien
ggttcaagagagacaagctaggccc

SEQ ID NO: 1064983 - DNA, 25 bp, Homo sapien
taggactcgtcatcaatcccgtctc

SEQ ID NO: 1064984 - DNA, 25 bp, Homo sapien
atcaatcccgtctcggagcgggtag

SEQ ID NO: 1064985 - DNA, 25 bp, Homo sapien
gtcatcaatcccgtctcggagcggg

SEQ ID NO: 1064986 - DNA, 25 bp, Homo sapien
gactcgtcatcaatcccgtctcgga

SEQ ID NO: 1064987 - DNA, 25 bp, Homo sapien
tagcccaaggggtggataaagccac

SEQ ID NO: 1064988 - DNA, 25 bp, Homo sapien
taaggagagattcctgaggtatggt

SEQ ID NO: 1064989 - DNA, 25 bp, Homo sapien
tagtaaggagagattcctgaggtat

SEQ ID NO: 1064990 - DNA, 25 bp, Homo sapien
ccgccaaccaatcccctgtttgtag

SEQ ID NO: 1064991 - DNA, 25 bp, Homo sapien
gaatctctggatgggctgactggca

SEQ ID NO: 1064992 - DNA, 25 bp, Homo sapien
atagactactgggtatgtgcctgcc

SEQ ID NO: 1064993 - DNA, 25 bp, Homo sapien
tctgtgaaatcatccctggctaccc

SEQ ID NO: 1064994 - DNA, 25 bp, Homo sapien
taacgttactgagaccgagaccaca

SEQ ID NO: 1064995 - DNA, 25 bp, Homo sapien
tggtcaccaccaacctcaagaaagc

SEQ ID NO: 1064996 - DNA, 25 bp, Homo sapien
aaatgatacatcctggtcaccacca

SEQ ID NO: 1064997 - DNA, 25 bp, Homo sapien
agcaatacgaggtttggagtggaaa

SEQ ID NO: 1064998 - DNA, 25 bp, Homo sapien
aaggctgggtgcaacactttcccac

SEQ ID NO: 1064999 - DNA, 25 bp, Homo sapien
ctttgatagttagattgaagcaacc

SEQ ID NO: 1065000 - DNA, 25 bp, Homo sapien
acactgtaagaccaccgcactaggc

SEQ ID NO: 1065001 - DNA, 25 bp, Homo sapien
tagattgaagcaacctaaccgatcc

SEQ ID NO: 1065002 - DNA, 25 bp, Homo sapien
cgatccccagatagggagtctgagc

SEQ ID NO: 1065003 - DNA, 25 bp, Homo sapien
ttacgaatggtgtaaccaccgcctc

SEQ ID NO: 1065004 - DNA, 25 bp, Homo sapien
cagcaccgggcaacgttacgaatgg

SEQ ID NO: 1065005 - DNA, 25 bp, Homo sapien
caggttaaagctcttgacaaattcc

SEQ ID NO: 1065006 - DNA, 25 bp, Homo sapien
ctcccagcatcagcataggcaggtt

SEQ ID NO: 1065007 - DNA, 25 bp, Homo sapien
tattcaaagtagtcattgtatggaa

SEQ ID NO: 1065008 - DNA, 25 bp, Homo sapien
ttcgtgttctggttagtcatattgg

SEQ ID NO: 1065009 - DNA, 25 bp, Homo sapien
tagtcatattggaaggactgatgtg

SEQ ID NO: 1065010 - DNA, 25 bp, Homo sapien
tctccaggtactcattcgtgttctg

SEQ ID NO: 1065011 - DNA, 25 bp, Homo sapien
gaaggactgatgtggagcttgaaat

SEQ ID NO: 1065012 - DNA, 25 bp, Homo sapien
tgtggccaatgggagagagtagcag

SEQ ID NO: 1065013 - DNA, 25 bp, Homo sapien
ctgtggccaatgggagagagtagca

SEQ ID NO: 1065014 - DNA, 25 bp, Homo sapien
tggccaatgggagagagtagcaggg

SEQ ID NO: 1065015 - DNA, 25 bp, Homo sapien
gccaatgggagagagtagcagggct

SEQ ID NO: 1065016 - DNA, 25 bp, Homo sapien
aggaatcgcctgcatttggacccca

SEQ ID NO: 1065017 - DNA, 25 bp, Homo sapien
tctaaggttctcaaacagtcgctgt

SEQ ID NO: 1065018 - DNA, 25 bp, Homo sapien
tgcgtgcggcagcattctaaggttc

SEQ ID NO: 1065019 - DNA, 25 bp, Homo sapien
tcagggatggcgtcctcaggaatcg

SEQ ID NO: 1065020 - DNA, 25 bp, Homo sapien
caggcgggtgctgatttagctcagc

SEQ ID NO: 1065021 - DNA, 25 bp, Homo sapien
ggcactggaactcgaaaacagattt

SEQ ID NO: 1065022 - DNA, 25 bp, Homo sapien
gcctattgaatggaaggcatagggc

SEQ ID NO: 1065023 - DNA, 25 bp, Homo sapien
taacctgttcctacaggcactggaa

SEQ ID NO: 1065024 - DNA, 25 bp, Homo sapien
cttcagaatcggagaactcttcctc

SEQ ID NO: 1065025 - DNA, 25 bp, Homo sapien
ttcagaatcggagaactcttcctca

SEQ ID NO: 1065026 - DNA, 25 bp, Homo sapien
ctcttcagaatcggagaactcttcc

SEQ ID NO: 1065027 - DNA, 25 bp, Homo sapien
tcttcagaatcggagaactcttcct

SEQ ID NO: 1065028 - DNA, 25 bp, Homo sapien
cactgaaaggctcaaggaactgagg

SEQ ID NO: 1065029 - DNA, 25 bp, Homo sapien
gagaacaggttggactggtttccca

SEQ ID NO: 1065030 - DNA, 25 bp, Homo sapien
tatgtgagagccgtgctcaggcagt

SEQ ID NO: 1065031 - DNA, 25 bp, Homo sapien
atcctctcaggctcgagacccaagt

SEQ ID NO: 1065032 - DNA, 25 bp, Homo sapien
tctcctccttggttttctcctcttc

SEQ ID NO: 1065033 - DNA, 25 bp, Homo sapien
tccttggttttctcctcttcggtga

SEQ ID NO: 1065034 - DNA, 25 bp, Homo sapien
cctttggcttctggcttctcctcct

SEQ ID NO: 1065035 - DNA, 25 bp, Homo sapien
tggcttctcctccttggttttctcc

SEQ ID NO: 1065036 - DNA, 25 bp, Homo sapien
agagagcagagactggcatgagatg

SEQ ID NO: 1065037 - DNA, 25 bp, Homo sapien
aaagctactaagcaggcacttggca

SEQ ID NO: 1065038 - DNA, 25 bp, Homo sapien
taagggcacctttccaaagctacta

SEQ ID NO: 1065039 - DNA, 25 bp, Homo sapien
gccagtgggaaggtacgaaaacaga

SEQ ID NO: 1065040 - DNA, 25 bp, Homo sapien
gacctggcaccctttatggttcaaa

SEQ ID NO: 1065041 - DNA, 25 bp, Homo sapien
ggccagttgaagatggtcccttaca

SEQ ID NO: 1065042 - DNA, 25 bp, Homo sapien
ttagtgatgtgaaatgctcctgtcc

SEQ ID NO: 1065043 - DNA, 25 bp, Homo sapien
ggtgggtgatctctaagctgcaaaa

SEQ ID NO: 1065044 - DNA, 25 bp, Homo sapien
ggtgcttatactcccaaaccttgag

SEQ ID NO: 1065045 - DNA, 25 bp, Homo sapien
ggccactggcgatgccatcgagcca

SEQ ID NO: 1065046 - DNA, 25 bp, Homo sapien
aaagcaatggagacttatcccccaa

SEQ ID NO: 1065047 - DNA, 25 bp, Homo sapien
gcctttcaaattgagcggcctgtcc

SEQ ID NO: 1065048 - DNA, 25 bp, Homo sapien
cccctgtgaacggaacagatgaggc

SEQ ID NO: 1065049 - DNA, 25 bp, Homo sapien
gaccgccgaggaggcagcaggcgct

SEQ ID NO: 1065050 - DNA, 25 bp, Homo sapien
agccagagctccaaggctccccggg

SEQ ID NO: 1065051 - DNA, 25 bp, Homo sapien
agacccccatcatgggcagccagag

SEQ ID NO: 1065052 - DNA, 25 bp, Homo sapien
cggggcgacgtgaccgccgaggagg

SEQ ID NO: 1065053 - DNA, 25 bp, Homo sapien
cccgccgtactatcccctgcggcgc

SEQ ID NO: 1065054 - DNA, 25 bp, Homo sapien
cgaccccgccgtactatcccctgcg

SEQ ID NO: 1065055 - DNA, 25 bp, Homo sapien
ccgccgtactatcccctgcggcgcg

SEQ ID NO: 1065056 - DNA, 25 bp, Homo sapien
ccccgccgtactatcccctgcggcg

SEQ ID NO: 1065057 - DNA, 25 bp, Homo sapien
gaatccaggcctcttgataaaatag

SEQ ID NO: 1065058 - DNA, 25 bp, Homo sapien
tccaaagacacccaggcagttcatg

SEQ ID NO: 1065059 - DNA, 25 bp, Homo sapien
tcatggcaggacagaatttgagccc

SEQ ID NO: 1065060 - DNA, 25 bp, Homo sapien
tattgcacatatactcactgccagg

SEQ ID NO: 1065061 - DNA, 25 bp, Homo sapien
aaggccggtgattcacttgagctca

SEQ ID NO: 1065062 - DNA, 25 bp, Homo sapien
ggccggtgattcacttgagctcacg

SEQ ID NO: 1065063 - DNA, 25 bp, Homo sapien
gccaaggccggtgattcacttgagc

SEQ ID NO: 1065064 - DNA, 25 bp, Homo sapien
caaggccggtgattcacttgagctc

SEQ ID NO: 1065065 - DNA, 25 bp, Homo sapien
ttcactgcccgattgtgaacctcag

SEQ ID NO: 1065066 - DNA, 25 bp, Homo sapien
cactgcccgattgtgaacctcagtt

SEQ ID NO: 1065067 - DNA, 25 bp, Homo sapien
ttttgtaggagcaggcagagttgta

SEQ ID NO: 1065068 - DNA, 25 bp, Homo sapien
cagagttgtagaaagcctaggtttt

SEQ ID NO: 1065069 - DNA, 25 bp, Homo sapien
caaggacacacagaagggttgtctc

SEQ ID NO: 1065070 - DNA, 25 bp, Homo sapien
aaggacacacagaagggttgtctca

SEQ ID NO: 1065071 - DNA, 25 bp, Homo sapien
acaaggacacacagaagggttgtct

SEQ ID NO: 1065072 - DNA, 25 bp, Homo sapien
aggacacacagaagggttgtctcac

SEQ ID NO: 1065073 - DNA, 25 bp, Homo sapien
tctgcctatggaagaagccatcagg

SEQ ID NO: 1065074 - DNA, 25 bp, Homo sapien
aagtcagggcctgtactgggctctg

SEQ ID NO: 1065075 - DNA, 25 bp, Homo sapien
tgaggctgaagataaggaaaaatgg

SEQ ID NO: 1065076 - DNA, 25 bp, Homo sapien
aatagcccaaactggcagtgtggga

SEQ ID NO: 1065077 - DNA, 25 bp, Homo sapien
agtgtatgtctatccgtcgggccca

SEQ ID NO: 1065078 - DNA, 25 bp, Homo sapien
ggtggaccgacaagtaacatagaat

SEQ ID NO: 1065079 - DNA, 25 bp, Homo sapien
ctcctcgtttggacccagccttagg

SEQ ID NO: 1065080 - DNA, 25 bp, Homo sapien
aaccctctggtgattctccggtgaa

SEQ ID NO: 1065081 - DNA, 25 bp, Homo sapien
tgtagatgctgtgtgacccttggcc

SEQ ID NO: 1065082 - DNA, 25 bp, Homo sapien
tctctgtctggacacagcggcgggt

SEQ ID NO: 1065083 - DNA, 25 bp, Homo sapien
tgccaggcattgagttgtagtcccg

SEQ ID NO: 1065084 - DNA, 25 bp, Homo sapien
aaactcagcccggattaagtcaccg

SEQ ID NO: 1065085 - DNA, 25 bp, Homo sapien
cttccccaatggtcttgcccagctg

SEQ ID NO: 1065086 - DNA, 25 bp, Homo sapien
tgagtaggtcccttccccaatggtc

SEQ ID NO: 1065087 - DNA, 25 bp, Homo sapien
tggccctcccatcttgtctataact

SEQ ID NO: 1065088 - DNA, 25 bp, Homo sapien
tgtctataactttaattgccacttt

SEQ ID NO: 1065089 - DNA, 25 bp, Homo sapien
gagcagggaatgatcgaatgatcgt

SEQ ID NO: 1065090 - DNA, 25 bp, Homo sapien
tccagagctgccatcgggcttgctt

SEQ ID NO: 1065091 - DNA, 25 bp, Homo sapien
ggttttgcctctgaggatccttcac

SEQ ID NO: 1065092 - DNA, 25 bp, Homo sapien
gaatgatcgttctaacaaacaggag

SEQ ID NO: 1065093 - DNA, 25 bp, Homo sapien
ggttgaagccctgcaacaaggcgtt

SEQ ID NO: 1065094 - DNA, 25 bp, Homo sapien
tcaaccatctgacggaagagggcct

SEQ ID NO: 1065095 - DNA, 25 bp, Homo sapien
accaggcagattttcccgtcggcag

SEQ ID NO: 1065096 - DNA, 25 bp, Homo sapien
tacggacgatttggagctcccgagg

SEQ ID NO: 1065097 - DNA, 25 bp, Homo sapien
tgtgtcgtcaaaaggtaggctggca

SEQ ID NO: 1065098 - DNA, 25 bp, Homo sapien
tcgtcaaaaggtaggctggcacaga

SEQ ID NO: 1065099 - DNA, 25 bp, Homo sapien
tgtcgtcaaaaggtaggctggcaca

SEQ ID NO: 1065100 - DNA, 25 bp, Homo sapien
ctgtgtcgtcaaaaggtaggctggc

SEQ ID NO: 1065101 - DNA, 25 bp, Homo sapien
aggtcctggcaatcggccgagatgc

SEQ ID NO: 1065102 - DNA, 25 bp, Homo sapien
atcggccgagatgctcagatgagtg

SEQ ID NO: 1065103 - DNA, 25 bp, Homo sapien
tcttcaattgaaggccggaggatca

SEQ ID NO: 1065104 - DNA, 25 bp, Homo sapien
gatcatatcgggttccaggagcctc

SEQ ID NO: 1065105 - DNA, 25 bp, Homo sapien
attggagagcacttgccattgcttt

SEQ ID NO: 1065106 - DNA, 25 bp, Homo sapien
ttggagagcacttgccattgctttt

SEQ ID NO: 1065107 - DNA, 25 bp, Homo sapien
tctccccctactttattggagagca

SEQ ID NO: 1065108 - DNA, 25 bp, Homo sapien
aatctgcacgccaaaccgagggcgg

SEQ ID NO: 1065109 - DNA, 25 bp, Homo sapien
ttcagccgcctgaaaagttgcgatt

SEQ ID NO: 1065110 - DNA, 25 bp, Homo sapien
gggttctacaaattacgcagccagt

SEQ ID NO: 1065111 - DNA, 25 bp, Homo sapien
taatgtccgtgttcaacaaccagct

SEQ ID NO: 1065112 - DNA, 25 bp, Homo sapien
tgccactgaacagacaggccaaaaa

SEQ ID NO: 1065113 - DNA, 25 bp, Homo sapien
caacctttttgagtatctcctgcca

SEQ ID NO: 1065114 - DNA, 25 bp, Homo sapien
ctcagctagcaccacaggtgtgagc

SEQ ID NO: 1065115 - DNA, 25 bp, Homo sapien
gagagaaatgcctccatcacgtgac

SEQ ID NO: 1065116 - DNA, 25 bp, Homo sapien
tacctccttgtccagtaaacagagg

SEQ ID NO: 1065117 - DNA, 25 bp, Homo sapien
cacatggcctcccacttagttttta

SEQ ID NO: 1065118 - DNA, 25 bp, Homo sapien
ggcctcccacttagtttttatatca

SEQ ID NO: 1065119 - DNA, 25 bp, Homo sapien
tgcccaactcccacttaatgttttc

SEQ ID NO: 1065120 - DNA, 25 bp, Homo sapien
tcattttctactaagtgtgaaaact

SEQ ID NO: 1065121 - DNA, 25 bp, Homo sapien
tttctactaagtgtgaaaactgctt

SEQ ID NO: 1065122 - DNA, 25 bp, Homo sapien
ctccagatgttctagacccctgaat

SEQ ID NO: 1065123 - DNA, 25 bp, Homo sapien
atctccagatgttctagacccctga

SEQ ID NO: 1065124 - DNA, 25 bp, Homo sapien
ccaggtgggagcacagtagctattc

SEQ ID NO: 1065125 - DNA, 25 bp, Homo sapien
aggtgggagcacagtagctattcac

SEQ ID NO: 1065126 - DNA, 25 bp, Homo sapien
gcccaggtgggagcacagtagctat

SEQ ID NO: 1065127 - DNA, 25 bp, Homo sapien
gtagccgggactataaggcacgtgc

SEQ ID NO: 1065128 - DNA, 25 bp, Homo sapien
tcatttccaaatcctggccatgaca

SEQ ID NO: 1065129 - DNA, 25 bp, Homo sapien
catttccaaatcctggccatgacat

SEQ ID NO: 1065130 - DNA, 25 bp, Homo sapien
cagcaggcgggtggcctccacttca

SEQ ID NO: 1065131 - DNA, 25 bp, Homo sapien
cttgagggacctgccaagtaccggt

SEQ ID NO: 1065132 - DNA, 25 bp, Homo sapien
tcagcgctggcttttcgggtaaaga

SEQ ID NO: 1065133 - DNA, 25 bp, Homo sapien
cggtcttttgagtcccacttgaggg

SEQ ID NO: 1065134 - DNA, 25 bp, Homo sapien
ggaccagtgctagcgaaaggctgca

SEQ ID NO: 1065135 - DNA, 25 bp, Homo sapien
cggctggccaatcgcgggagcgcct

SEQ ID NO: 1065136 - DNA, 25 bp, Homo sapien
gggcggctggccaatcgcgggagcg

SEQ ID NO: 1065137 - DNA, 25 bp, Homo sapien
tcacctggcgccctccgatgagagg

SEQ ID NO: 1065138 - DNA, 25 bp, Homo sapien
acctggcgccctccgatgagaggcg

SEQ ID NO: 1065139 - DNA, 25 bp, Homo sapien
agccacggagcaccgcgcaccgaca

SEQ ID NO: 1065140 - DNA, 25 bp, Homo sapien
agcgcagccacggagcaccgcgcac

SEQ ID NO: 1065141 - DNA, 25 bp, Homo sapien
gggttccagcagcgcagccacggag

SEQ ID NO: 1065142 - DNA, 25 bp, Homo sapien
cagcagcgcagccacggagcaccgc

SEQ ID NO: 1065143 - DNA, 25 bp, Homo sapien
gctgctccagagcaaacctgtatct

SEQ ID NO: 1065144 - DNA, 25 bp, Homo sapien
ctgctgctccagagcaaacctgtat

SEQ ID NO: 1065145 - DNA, 25 bp, Homo sapien
tgctgctccagagcaaacctgtatc

SEQ ID NO: 1065146 - DNA, 25 bp, Homo sapien
tgctgcagtcacagaaaaagtccct

SEQ ID NO: 1065147 - DNA, 25 bp, Homo sapien
gacaatgtccaaggaggcggtgcta

SEQ ID NO: 1065148 - DNA, 25 bp, Homo sapien
gaagatccgcccttccacaatgatg

SEQ ID NO: 1065149 - DNA, 25 bp, Homo sapien
caaaatgttcctgtgggccttgaag

SEQ ID NO: 1065150 - DNA, 25 bp, Homo sapien
tgacctaatgtatgtcttgcagaag

SEQ ID NO: 1065151 - DNA, 25 bp, Homo sapien
tcgagggatgacctaatgtatgtct

SEQ ID NO: 1065152 - DNA, 25 bp, Homo sapien
atctttcggcaaatgtcgagggatg

SEQ ID NO: 1065153 - DNA, 25 bp, Homo sapien
cggcaaatgtcgagggatgacctaa

SEQ ID NO: 1065154 - DNA, 25 bp, Homo sapien
gctgcagccgccgccgctgccgccg

SEQ ID NO: 1065155 - DNA, 25 bp, Homo sapien
ctgatgagccgccgctgctgccgcc

SEQ ID NO: 1065156 - DNA, 25 bp, Homo sapien
ccgctgccgccgccactgctgcagc

SEQ ID NO: 1065157 - DNA, 25 bp, Homo sapien
ctgccgccgccactgctgcagccac

SEQ ID NO: 1065158 - DNA, 25 bp, Homo sapien
ccacaggaggtcccctcccggcctg

SEQ ID NO: 1065159 - DNA, 25 bp, Homo sapien
cacaggaggtcccctcccggcctga

SEQ ID NO: 1065160 - DNA, 25 bp, Homo sapien
tagagaggttgctgtcagccgagcc

SEQ ID NO: 1065161 - DNA, 25 bp, Homo sapien
ttgctgtaagccaagtcaaccgcct

SEQ ID NO: 1065162 - DNA, 25 bp, Homo sapien
caccttgggctctatccgtttgggt

SEQ ID NO: 1065163 - DNA, 25 bp, Homo sapien
ctgcttcacgtggtagttgctgtaa

SEQ ID NO: 1065164 - DNA, 25 bp, Homo sapien
cacaaaactgacctcccagcataga

SEQ ID NO: 1065165 - DNA, 25 bp, Homo sapien
ctcattctccccacacaaaactgac

SEQ ID NO: 1065166 - DNA, 25 bp, Homo sapien
tccccacacaaaactgacctcccag

SEQ ID NO: 1065167 - DNA, 25 bp, Homo sapien
cattctccccacacaaaactgacct

SEQ ID NO: 1065168 - DNA, 25 bp, Homo sapien
gcagtgtaagggcagaaaggacact

SEQ ID NO: 1065169 - DNA, 25 bp, Homo sapien
gtgctcttgtcgagtgaacctcttg

SEQ ID NO: 1065170 - DNA, 25 bp, Homo sapien
cagaaaggacacttgtggagcttga

SEQ ID NO: 1065171 - DNA, 25 bp, Homo sapien
tcgcctgtgtgtgaacggatgtgcc

SEQ ID NO: 1065172 - DNA, 25 bp, Homo sapien
gggcatggccagctcgaacacttac

SEQ ID NO: 1065173 - DNA, 25 bp, Homo sapien
agggcatggccagctcgaacactta

SEQ ID NO: 1065174 - DNA, 25 bp, Homo sapien
acattcctcagatgtgccagcagct

SEQ ID NO: 1065175 - DNA, 25 bp, Homo sapien
ggaaggcagatttgctagggtagac

SEQ ID NO: 1065176 - DNA, 25 bp, Homo sapien
tggattgtttaattattaggaaggc

SEQ ID NO: 1065177 - DNA, 25 bp, Homo sapien
ctagggtagacagctacattcctca

SEQ ID NO: 1065178 - DNA, 25 bp, Homo sapien
cccctgggacaggtgactcgtgaat

SEQ ID NO: 1065179 - DNA, 25 bp, Homo sapien
tgaagcctccaccaagctaaggttg

SEQ ID NO: 1065180 - DNA, 25 bp, Homo sapien
catcatcgggtgtgtctgtaacgca

SEQ ID NO: 1065181 - DNA, 25 bp, Homo sapien
gactccacatagattggccagtcat

SEQ ID NO: 1065182 - DNA, 25 bp, Homo sapien
gtctctcggtctgataagttaggct

SEQ ID NO: 1065183 - DNA, 25 bp, Homo sapien
gataagttaggctgaatttgtggtt

SEQ ID NO: 1065184 - DNA, 25 bp, Homo sapien
cggtctgataagttaggctgaattt

SEQ ID NO: 1065185 - DNA, 25 bp, Homo sapien
ctctcggtctgataagttaggctga

SEQ ID NO: 1065186 - DNA, 25 bp, Homo sapien
ttatgatcatgtagccagaccgccc

SEQ ID NO: 1065187 - DNA, 25 bp, Homo sapien
gccggactcggacatggaccaaatt

SEQ ID NO: 1065188 - DNA, 25 bp, Homo sapien
tataaatataagtgccgacctgcct

SEQ ID NO: 1065189 - DNA, 25 bp, Homo sapien
ccagagtttgagttgcactgttcca

SEQ ID NO: 1065190 - DNA, 25 bp, Homo sapien
aacctgggcaacactgacctatata

SEQ ID NO: 1065191 - DNA, 25 bp, Homo sapien
tcttacttgttaaacaaggtatcag

SEQ ID NO: 1065192 - DNA, 25 bp, Homo sapien
gacctatataaacagacctggtaca

SEQ ID NO: 1065193 - DNA, 25 bp, Homo sapien
agattatatccacgaatttattctc

SEQ ID NO: 1065194 - DNA, 25 bp, Homo sapien
cagtttagattacctaaaagctaca

SEQ ID NO: 1065195 - DNA, 25 bp, Homo sapien
aaagctacaaacttagacacttaga

SEQ ID NO: 1065196 - DNA, 25 bp, Homo sapien
actgatggcccatgttagaaacacc

SEQ ID NO: 1065197 - DNA, 25 bp, Homo sapien
gacacttagacaatatgtttatgat

SEQ ID NO: 1065198 - DNA, 25 bp, Homo sapien
atgaggcagtctcttggcttgtaat

SEQ ID NO: 1065199 - DNA, 25 bp, Homo sapien
actgtggtcaggtggcccttctgag

SEQ ID NO: 1065200 - DNA, 25 bp, Homo sapien
actcctcggaggaagtagcattggg

SEQ ID NO: 1065201 - DNA, 25 bp, Homo sapien
aggcagtctcttggcttgtaattcc

SEQ ID NO: 1065202 - DNA, 25 bp, Homo sapien
gaggcaggaggttggcttaaggcca

SEQ ID NO: 1065203 - DNA, 25 bp, Homo sapien
ggagttccagactagcctgggcaac

SEQ ID NO: 1065204 - DNA, 25 bp, Homo sapien
tgggcaacataatgagacccgatct

SEQ ID NO: 1065205 - DNA, 25 bp, Homo sapien
ctgaggcaggaggttggcttaaggc

SEQ ID NO: 1065206 - DNA, 25 bp, Homo sapien
ttcgaggccgttcctttgcgcccta

SEQ ID NO: 1065207 - DNA, 25 bp, Homo sapien
tatttgctgacgtgggcgttggaca

SEQ ID NO: 1065208 - DNA, 25 bp, Homo sapien
cgttggacagaaacgcccgagggct

SEQ ID NO: 1065209 - DNA, 25 bp, Homo sapien
caagtagccccaacgtgagagaaac

SEQ ID NO: 1065210 - DNA, 25 bp, Homo sapien
tggagtagggccattggaacaatcg

SEQ ID NO: 1065211 - DNA, 25 bp, Homo sapien
taccgcttccaaacgcgtcttagaa

SEQ ID NO: 1065212 - DNA, 25 bp, Homo sapien
caggtgtgtgtgaatctaccgcttc

SEQ ID NO: 1065213 - DNA, 25 bp, Homo sapien
gaacaatcggggatacataagcgca

SEQ ID NO: 1065214 - DNA, 25 bp, Homo sapien
ggtttatcaagcatagaggtgatat

SEQ ID NO: 1065215 - DNA, 25 bp, Homo sapien
gatattgacgtgtgtggttagaagc

SEQ ID NO: 1065216 - DNA, 25 bp, Homo sapien
catagaggtgatattgacgtgtgtg

SEQ ID NO: 1065217 - DNA, 25 bp, Homo sapien
ttgacgtgtgtggttagaagcccac

SEQ ID NO: 1065218 - DNA, 25 bp, Homo sapien
tgaggcatggaggagataagactgg

SEQ ID NO: 1065219 - DNA, 25 bp, Homo sapien
aggagataagactggagcagaagct

SEQ ID NO: 1065220 - DNA, 25 bp, Homo sapien
ctggagcagaagcttgttgaggatt

SEQ ID NO: 1065221 - DNA, 25 bp, Homo sapien
gagcagaagcttgttgaggattttg

SEQ ID NO: 1065222 - DNA, 25 bp, Homo sapien
acaggattcaaagcaatggaggttt

SEQ ID NO: 1065223 - DNA, 25 bp, Homo sapien
gccacaggattcaaagcaatggagg

SEQ ID NO: 1065224 - DNA, 25 bp, Homo sapien
cacaggattcaaagcaatggaggtt

SEQ ID NO: 1065225 - DNA, 25 bp, Homo sapien
ccacaggattcaaagcaatggaggt

SEQ ID NO: 1065226 - DNA, 25 bp, Homo sapien
actcccagctcaccgtaaactcgaa

SEQ ID NO: 1065227 - DNA, 25 bp, Homo sapien
tccagtgtcaaaagcttcatgattg

SEQ ID NO: 1065228 - DNA, 25 bp, Homo sapien
gtcactatttggtaggagttcaggg

SEQ ID NO: 1065229 - DNA, 25 bp, Homo sapien
ggtgaagacaggagtcactatttgg

SEQ ID NO: 1065230 - DNA, 25 bp, Homo sapien
atgctgctcttgaatggagtaaaaa

SEQ ID NO: 1065231 - DNA, 25 bp, Homo sapien
aaagggaagattctaagtcaaacag

SEQ ID NO: 1065232 - DNA, 25 bp, Homo sapien
gattctaagtcaaacagtctgtgtt

SEQ ID NO: 1065233 - DNA, 25 bp, Homo sapien
gctcttgaatggagtaaaaaaggga

SEQ ID NO: 1065234 - DNA, 25 bp, Homo sapien
aaatgcaaacaactaataatccctg

SEQ ID NO: 1065235 - DNA, 25 bp, Homo sapien
taaagaatgaggtactcagtatacc

SEQ ID NO: 1065236 - DNA, 25 bp, Homo sapien
cagtatataactctgtggacatgtc

SEQ ID NO: 1065237 - DNA, 25 bp, Homo sapien
gtacttaaaaatagctcaaggctgg

SEQ ID NO: 1065238 - DNA, 25 bp, Homo sapien
ggaccagtgacagcatgcagtctgc

SEQ ID NO: 1065239 - DNA, 25 bp, Homo sapien
ccagtgacagcatgcagtctgctca

SEQ ID NO: 1065240 - DNA, 25 bp, Homo sapien
ctcaggaccagtgacagcatgcagt

SEQ ID NO: 1065241 - DNA, 25 bp, Homo sapien
tactgcaatgtcctcaggaccagtg

SEQ ID NO: 1065242 - DNA, 25 bp, Homo sapien
ttggactgcagtaggtgatcacagc

SEQ ID NO: 1065243 - DNA, 25 bp, Homo sapien
ggttggactgcagtaggtgatcaca

SEQ ID NO: 1065244 - DNA, 25 bp, Homo sapien
aggttggactgcagtaggtgatcac

SEQ ID NO: 1065245 - DNA, 25 bp, Homo sapien
gttggactgcagtaggtgatcacag

SEQ ID NO: 1065246 - DNA, 25 bp, Homo sapien
tgagtatgcgactgtgatccctgag

SEQ ID NO: 1065247 - DNA, 25 bp, Homo sapien
caagataactaactacaacgtgtga

SEQ ID NO: 1065248 - DNA, 25 bp, Homo sapien
ggaaccaagtgaggtatgtcctact

SEQ ID NO: 1065249 - DNA, 25 bp, Homo sapien
taactggtactagacttggccttct

SEQ ID NO: 1065250 - DNA, 25 bp, Homo sapien
acccagccaggttgagtatccttta

SEQ ID NO: 1065251 - DNA, 25 bp, Homo sapien
tgcacccagccaggttgagtatcct

SEQ ID NO: 1065252 - DNA, 25 bp, Homo sapien
gcacccagccaggttgagtatcctt

SEQ ID NO: 1065253 - DNA, 25 bp, Homo sapien
actgcacccagccaggttgagtatc

SEQ ID NO: 1065254 - DNA, 25 bp, Homo sapien
cataaacattagcatcagtttgaca

SEQ ID NO: 1065255 - DNA, 25 bp, Homo sapien
acattagcatcagtttgacaagctt

SEQ ID NO: 1065256 - DNA, 25 bp, Homo sapien
taaacattagcatcagtttgacaag

SEQ ID NO: 1065257 - DNA, 25 bp, Homo sapien
ctcataaacattagcatcagtttga

SEQ ID NO: 1065258 - DNA, 25 bp, Homo sapien
tgaccgtactgatagccaacaggag

SEQ ID NO: 1065259 - DNA, 25 bp, Homo sapien
tctgaccagtaagagacagtttgcc

SEQ ID NO: 1065260 - DNA, 25 bp, Homo sapien
cagtttgccagaatatacgaagtcc

SEQ ID NO: 1065261 - DNA, 25 bp, Homo sapien
gatgtgacatcagatccttgaccgt

SEQ ID NO: 1065262 - DNA, 25 bp, Homo sapien
cacaagcttgacatggatagggcct

SEQ ID NO: 1065263 - DNA, 25 bp, Homo sapien
ccacatgtgtgcagtacgggcactt

SEQ ID NO: 1065264 - DNA, 25 bp, Homo sapien
tctcctgtatgacaacgaaggtggc

SEQ ID NO: 1065265 - DNA, 25 bp, Homo sapien
gcacttgaatcgcatccgaggcaga

SEQ ID NO: 1065266 - DNA, 25 bp, Homo sapien
tacacagtctgtagcgcctggttcc

SEQ ID NO: 1065267 - DNA, 25 bp, Homo sapien
tacattttctgcagatgagtttaca

SEQ ID NO: 1065268 - DNA, 25 bp, Homo sapien
ctgttagatctgtcacatgacgttt

SEQ ID NO: 1065269 - DNA, 25 bp, Homo sapien
cctgtaccacttgccctgttagatc

SEQ ID NO: 1065270 - DNA, 25 bp, Homo sapien
tccaagtcaatggggaggctgtcta

SEQ ID NO: 1065271 - DNA, 25 bp, Homo sapien
aagtcaatggggaggctgtctatgc

SEQ ID NO: 1065272 - DNA, 25 bp, Homo sapien
tcaatggggaggctgtctatgccaa

SEQ ID NO: 1065273 - DNA, 25 bp, Homo sapien
aatggggaggctgtctatgccaaat

SEQ ID NO: 1065274 - DNA, 25 bp, Homo sapien
caagtgccatctggaatccttatct

SEQ ID NO: 1065275 - DNA, 25 bp, Homo sapien
atcaacctgttggatgaccagatca

SEQ ID NO: 1065276 - DNA, 25 bp, Homo sapien
tacaatctccacataggatctattc

SEQ ID NO: 1065277 - DNA, 25 bp, Homo sapien
gacccatcttctacaatctccacat

SEQ ID NO: 1065278 - DNA, 25 bp, Homo sapien
tggatgaccagatcaccagacccat

SEQ ID NO: 1065279 - DNA, 25 bp, Homo sapien
aaagttcagaatggatacaatggcc

SEQ ID NO: 1065280 - DNA, 25 bp, Homo sapien
ctagactccgaccatagaaagagag

SEQ ID NO: 1065281 - DNA, 25 bp, Homo sapien
aaaagtttgctaagtagatcctcca

SEQ ID NO: 1065282 - DNA, 25 bp, Homo sapien
gcctgttcagaaagcatgcaagtta

SEQ ID NO: 1065283 - DNA, 25 bp, Homo sapien
caggatatcagagtaatgacaggtt

SEQ ID NO: 1065284 - DNA, 25 bp, Homo sapien
tgtatataatctttggccagcctct

SEQ ID NO: 1065285 - DNA, 25 bp, Homo sapien
ttgtttagtaaggtgggttgccaga

SEQ ID NO: 1065286 - DNA, 25 bp, Homo sapien
gacagattgtcttcacaaactacct

SEQ ID NO: 1065287 - DNA, 25 bp, Homo sapien
ggtactgtagggacattacttagca

SEQ ID NO: 1065288 - DNA, 25 bp, Homo sapien
tataatgactgccaactggtgaggt

SEQ ID NO: 1065289 - DNA, 25 bp, Homo sapien
ggagatagtatccacctcactgaga

SEQ ID NO: 1065290 - DNA, 25 bp, Homo sapien
tacataaacgttagaaatcactcac

SEQ ID NO: 1065291 - DNA, 25 bp, Homo sapien
gagtaacgaaatgaggctgcaaggc

SEQ ID NO: 1065292 - DNA, 25 bp, Homo sapien
taagaatcctgatttaggccgggcg

SEQ ID NO: 1065293 - DNA, 25 bp, Homo sapien
tcaacattgtgcacctgagttctgc

SEQ ID NO: 1065294 - DNA, 25 bp, Homo sapien
taagcaccgtgagtaacaggagtaa

SEQ ID NO: 1065295 - DNA, 25 bp, Homo sapien
tgcccggccacaagacatagatttt

SEQ ID NO: 1065296 - DNA, 25 bp, Homo sapien
gccctgatttttctctcacgctttc

SEQ ID NO: 1065297 - DNA, 25 bp, Homo sapien
gaaacaattagacttctctagatag

SEQ ID NO: 1065298 - DNA, 25 bp, Homo sapien
tataggacagagctatcctgtattc

SEQ ID NO: 1065299 - DNA, 25 bp, Homo sapien
gtgacgtgacctctactcactgcaa

SEQ ID NO: 1065300 - DNA, 25 bp, Homo sapien
catcgcgcccagccaacagtttttt

SEQ ID NO: 1065301 - DNA, 25 bp, Homo sapien
gtgattacaggcacatgacgccata

SEQ ID NO: 1065302 - DNA, 25 bp, Homo sapien
cagcctcccaaaagaggcgtgagcc

SEQ ID NO: 1065303 - DNA, 25 bp, Homo sapien
agcttggtactcctaacagtttttg

SEQ ID NO: 1065304 - DNA, 25 bp, Homo sapien
tgcggcacataactgtattctaaat

SEQ ID NO: 1065305 - DNA, 25 bp, Homo sapien
tttgtttatgtgagacagtgccttg

SEQ ID NO: 1065306 - DNA, 25 bp, Homo sapien
acaccaccaattccagcttggtact

SEQ ID NO: 1065307 - DNA, 25 bp, Homo sapien
tagttctctaccatatatcttgcag

SEQ ID NO: 1065308 - DNA, 25 bp, Homo sapien
tcacagaagttgtgtgctattgttt

SEQ ID NO: 1065309 - DNA, 25 bp, Homo sapien
tgactcatatttttagatcttacat

SEQ ID NO: 1065310 - DNA, 25 bp, Homo sapien
gaatacctcccttgaatatgtaaga

SEQ ID NO: 1065311 - DNA, 25 bp, Homo sapien
gaaatgtataactggttatgatgaa

SEQ ID NO: 1065312 - DNA, 25 bp, Homo sapien
gtataactggttatgatgaattaat

SEQ ID NO: 1065313 - DNA, 25 bp, Homo sapien
atgtataactggttatgatgaatta

SEQ ID NO: 1065314 - DNA, 25 bp, Homo sapien
aagaaatgtataactggttatgatg

SEQ ID NO: 1065315 - DNA, 25 bp, Homo sapien
ctcgcttgggtacaacaaggccaag

SEQ ID NO: 1065316 - DNA, 25 bp, Homo sapien
taactcgcttgggtacaacaaggcc

SEQ ID NO: 1065317 - DNA, 25 bp, Homo sapien
ttttctaactcgcttgggtacaaca

SEQ ID NO: 1065318 - DNA, 25 bp, Homo sapien
tctaactcgcttgggtacaacaagg

SEQ ID NO: 1065319 - DNA, 25 bp, Homo sapien
cccccagcgcgagggctgactcgcg

SEQ ID NO: 1065320 - DNA, 25 bp, Homo sapien
cctgcgcccccagcgcgagggctga

SEQ ID NO: 1065321 - DNA, 25 bp, Homo sapien
ccagcgcgagggctgactcgcgcac

SEQ ID NO: 1065322 - DNA, 25 bp, Homo sapien
gcgagggctgactcgcgcaccttcg

SEQ ID NO: 1065323 - DNA, 25 bp, Homo sapien
gctgcaagagctcgctctgtgcgcg

SEQ ID NO: 1065324 - DNA, 25 bp, Homo sapien
tgcaagagctcgctctgtgcgcgcg

SEQ ID NO: 1065325 - DNA, 25 bp, Homo sapien
gaggctgcaagagctcgctctgtgc

SEQ ID NO: 1065326 - DNA, 25 bp, Homo sapien
aggctgcaagagctcgctctgtgcg

SEQ ID NO: 1065327 - DNA, 25 bp, Homo sapien
gactgcactcggcaaactcgggcct

SEQ ID NO: 1065328 - DNA, 25 bp, Homo sapien
actgcactcggcaaactcgggcctg

SEQ ID NO: 1065329 - DNA, 25 bp, Homo sapien
ccctcactgttaggccatgtcgagg

SEQ ID NO: 1065330 - DNA, 25 bp, Homo sapien
ggcctgccctcactgttaggccatg

SEQ ID NO: 1065331 - DNA, 25 bp, Homo sapien
tggcgagccgttagcacgccccgcg

SEQ ID NO: 1065332 - DNA, 25 bp, Homo sapien
ggcgagccgttagcacgccccgcgg

SEQ ID NO: 1065333 - DNA, 25 bp, Homo sapien
ctggcgagccgttagcacgccccgc

SEQ ID NO: 1065334 - DNA, 25 bp, Homo sapien
cgagccgttagcacgccccgcgggg

SEQ ID NO: 1065335 - DNA, 25 bp, Homo sapien
ggtaggaagcggtgtccccacgctc

SEQ ID NO: 1065336 - DNA, 25 bp, Homo sapien
cgaggaggcccgagctccgagcctt

SEQ ID NO: 1065337 - DNA, 25 bp, Homo sapien
cagaggccgagaaaccgatatcgga

SEQ ID NO: 1065338 - DNA, 25 bp, Homo sapien
gcttcgccagctgcgaccgaaatcg

SEQ ID NO: 1065339 - DNA, 25 bp, Homo sapien
gagcacgctcgtgcgcgccgaaact

SEQ ID NO: 1065340 - DNA, 25 bp, Homo sapien
actctccactttcgcggcgccgaaa

SEQ ID NO: 1065341 - DNA, 25 bp, Homo sapien
gtctaaatccccacggcagaggcat

SEQ ID NO: 1065342 - DNA, 25 bp, Homo sapien
gccaggccttcggagcacgctcgtg

SEQ ID NO: 1065343 - DNA, 25 bp, Homo sapien
tgatcactcgttcttccactgcgtc

SEQ ID NO: 1065344 - DNA, 25 bp, Homo sapien
cgttcttccactgcgtcgtcgaagg

SEQ ID NO: 1065345 - DNA, 25 bp, Homo sapien
actcgttcttccactgcgtcgtcga

SEQ ID NO: 1065346 - DNA, 25 bp, Homo sapien
tgtattcctcgttgatcactcgttc

SEQ ID NO: 1065347 - DNA, 25 bp, Homo sapien
gttttgatcacatgccttctccggg

SEQ ID NO: 1065348 - DNA, 25 bp, Homo sapien
gcagtagagacgagggtattcccag

SEQ ID NO: 1065349 - DNA, 25 bp, Homo sapien
tctccgggtgactgaagagcggaaa

SEQ ID NO: 1065350 - DNA, 25 bp, Homo sapien
catcaaaataacgttcgggagagtc

SEQ ID NO: 1065351 - DNA, 25 bp, Homo sapien
tgaaggaatttacttagcatacaat

SEQ ID NO: 1065352 - DNA, 25 bp, Homo sapien
gcatacaatcgcttttgaatgtaat

SEQ ID NO: 1065353 - DNA, 25 bp, Homo sapien
ttgttgagctacatcatagtctaat

SEQ ID NO: 1065354 - DNA, 25 bp, Homo sapien
tgagctacatcatagtctaataaca

SEQ ID NO: 1065355 - DNA, 25 bp, Homo sapien
tgtgatccactagtccaataagcac

SEQ ID NO: 1065356 - DNA, 25 bp, Homo sapien
tgtggaatcaccattccagtacact

SEQ ID NO: 1065357 - DNA, 25 bp, Homo sapien
tcattaagtactctgccacaagttc

SEQ ID NO: 1065358 - DNA, 25 bp, Homo sapien
caataagcacaatttagcatatgac

SEQ ID NO: 1065359 - DNA, 25 bp, Homo sapien
tattttctacttaattactctggag

SEQ ID NO: 1065360 - DNA, 25 bp, Homo sapien
attttctacttaattactctggaga

SEQ ID NO: 1065361 - DNA, 25 bp, Homo sapien
gccaagagccatattttctacttaa

SEQ ID NO: 1065362 - DNA, 25 bp, Homo sapien
ctggccaagagccatattttctact

SEQ ID NO: 1065363 - DNA, 25 bp, Homo sapien
gcatcatcattagggagctgcacac

SEQ ID NO: 1065364 - DNA, 25 bp, Homo sapien
agtgtgacgcatcaaactgagcatc

SEQ ID NO: 1065365 - DNA, 25 bp, Homo sapien
tgtgtccccaggacaagtcgatgaa

SEQ ID NO: 1065366 - DNA, 25 bp, Homo sapien
tgttcatccgatgtgtgtgtcccca

SEQ ID NO: 1065367 - DNA, 25 bp, Homo sapien
taaatacatacgctgttgtgggact

SEQ ID NO: 1065368 - DNA, 25 bp, Homo sapien
ggagtgcaacttagcagtatcaatt

SEQ ID NO: 1065369 - DNA, 25 bp, Homo sapien
gatacatgccccagatatattaggc

SEQ ID NO: 1065370 - DNA, 25 bp, Homo sapien
aacggtcctgccctttgatacaaca

SEQ ID NO: 1065371 - DNA, 25 bp, Homo sapien
agaagccacagttggcacagagccc

SEQ ID NO: 1065372 - DNA, 25 bp, Homo sapien
ccatcatatctctgagatatgcaca

SEQ ID NO: 1065373 - DNA, 25 bp, Homo sapien
actgcagtgattgggaactgaaccc

SEQ ID NO: 1065374 - DNA, 25 bp, Homo sapien
aaaaaagaagcatagctgccagaaa

SEQ ID NO: 1065375 - DNA, 25 bp, Homo sapien
gccgggcctagtgttattctttgaa

SEQ ID NO: 1065376 - DNA, 25 bp, Homo sapien
catagctcgttttattgtgcgtcac

SEQ ID NO: 1065377 - DNA, 25 bp, Homo sapien
tatggtacgtacctcaagaaacttc

SEQ ID NO: 1065378 - DNA, 25 bp, Homo sapien
tcagtctaagtacaggcatagctcg

SEQ ID NO: 1065379 - DNA, 25 bp, Homo sapien
ttgttgcgatgatacaagggttctg

SEQ ID NO: 1065380 - DNA, 25 bp, Homo sapien
tgttgcgatgatacaagggttctgg

SEQ ID NO: 1065381 - DNA, 25 bp, Homo sapien
ctttgttgcgatgatacaagggttc

SEQ ID NO: 1065382 - DNA, 25 bp, Homo sapien
agtctttgttgcgatgatacaaggg

SEQ ID NO: 1065383 - DNA, 25 bp, Homo sapien
cggagacgcaagtctgggttgcact

SEQ ID NO: 1065384 - DNA, 25 bp, Homo sapien
tccacggagacgcaagtctgggttg

SEQ ID NO: 1065385 - DNA, 25 bp, Homo sapien
ctgagatttgggttccaagaaagcc

SEQ ID NO: 1065386 - DNA, 25 bp, Homo sapien
cttccttctgatgtccacggagacg

SEQ ID NO: 1065387 - DNA, 25 bp, Homo sapien
tggaacggcactgatgtcccacagg

SEQ ID NO: 1065388 - DNA, 25 bp, Homo sapien
aacggcactgatgtcccacaggcag

SEQ ID NO: 1065389 - DNA, 25 bp, Homo sapien
ctttggaacggcactgatgtcccac

SEQ ID NO: 1065390 - DNA, 25 bp, Homo sapien
acggcactgatgtcccacaggcaga

SEQ ID NO: 1065391 - DNA, 25 bp, Homo sapien
agatggtcttcgcatctaccacttt

SEQ ID NO: 1065392 - DNA, 25 bp, Homo sapien
aaagatggtcttcgcatctaccact

SEQ ID NO: 1065393 - DNA, 25 bp, Homo sapien
aagatggtcttcgcatctaccactt

SEQ ID NO: 1065394 - DNA, 25 bp, Homo sapien
gatggtcttcgcatctaccactttt

SEQ ID NO: 1065395 - DNA, 25 bp, Homo sapien
agtattgtttgaacgagtatcccaa

SEQ ID NO: 1065396 - DNA, 25 bp, Homo sapien
tttggaagtattgtttgaacgagta

SEQ ID NO: 1065397 - DNA, 25 bp, Homo sapien
aggattgaaagaaaggcagttcact

SEQ ID NO: 1065398 - DNA, 25 bp, Homo sapien
agaaaggcagttcacttcagcagtg

SEQ ID NO: 1065399 - DNA, 25 bp, Homo sapien
cttgtcagctgatcctgtggcaaga

SEQ ID NO: 1065400 - DNA, 25 bp, Homo sapien
tcagctgatcctgtggcaagaatga

SEQ ID NO: 1065401 - DNA, 25 bp, Homo sapien
tgtcagctgatcctgtggcaagaat

SEQ ID NO: 1065402 - DNA, 25 bp, Homo sapien
agctgatcctgtggcaagaatgaac

SEQ ID NO: 1065403 - DNA, 25 bp, Homo sapien
cagatttctcagatcccacaaggca

SEQ ID NO: 1065404 - DNA, 25 bp, Homo sapien
ttcatccttatgtgactcaaaggaa

SEQ ID NO: 1065405 - DNA, 25 bp, Homo sapien
gaatatttcatccttatgtgactca

SEQ ID NO: 1065406 - DNA, 25 bp, Homo sapien
aaaggaatgcaacttaagtttcaga

SEQ ID NO: 1065407 - DNA, 25 bp, Homo sapien
ttaaatcccagacattcagtctgcg

SEQ ID NO: 1065408 - DNA, 25 bp, Homo sapien
cccagacattcagtctgcgatcagt

SEQ ID NO: 1065409 - DNA, 25 bp, Homo sapien
ttcagtctgcgatcagtaccactgg

SEQ ID NO: 1065410 - DNA, 25 bp, Homo sapien
gacattcagtctgcgatcagtacca

SEQ ID NO: 1065411 - DNA, 25 bp, Homo sapien
aacaactctggtggcccgtcttctg

SEQ ID NO: 1065412 - DNA, 25 bp, Homo sapien
aactctggtggcccgtcttctgcat

SEQ ID NO: 1065413 - DNA, 25 bp, Homo sapien
caacaactctggtggcccgtcttct

SEQ ID NO: 1065414 - DNA, 25 bp, Homo sapien
ctctggtggcccgtcttctgcatct

SEQ ID NO: 1065415 - DNA, 25 bp, Homo sapien
gccacacttgcatgatattgtcttc

SEQ ID NO: 1065416 - DNA, 25 bp, Homo sapien
tgatacagaacaaatcacccaaggt

SEQ ID NO: 1065417 - DNA, 25 bp, Homo sapien
gatatcttggcagtatgaccaccat

SEQ ID NO: 1065418 - DNA, 25 bp, Homo sapien
cattgggattccaggagaaatcaga

SEQ ID NO: 1065419 - DNA, 25 bp, Homo sapien
gtaaattgattctatgtctcactta

SEQ ID NO: 1065420 - DNA, 25 bp, Homo sapien
tagacaagtcttaaaatcacacctg

SEQ ID NO: 1065421 - DNA, 25 bp, Homo sapien
cagagatggtagctgtaatcataaa

SEQ ID NO: 1065422 - DNA, 25 bp, Homo sapien
cacacctgggagtaaaatgaacaga

SEQ ID NO: 1065423 - DNA, 25 bp, Homo sapien
agcctgggtgaaaaagtgagagacc

SEQ ID NO: 1065424 - DNA, 25 bp, Homo sapien
cctgggtgaaaaagtgagagaccat

SEQ ID NO: 1065425 - DNA, 25 bp, Homo sapien
gcctgggtgaaaaagtgagagacca

SEQ ID NO: 1065426 - DNA, 25 bp, Homo sapien
gatcactaggaacgacaaagacact

SEQ ID NO: 1065427 - DNA, 25 bp, Homo sapien
cccagtatgtcgagttgttcaccaa

SEQ ID NO: 1065428 - DNA, 25 bp, Homo sapien
ggatacaactgaggaaccacatgga

SEQ ID NO: 1065429 - DNA, 25 bp, Homo sapien
tttctgactaaaccaactatgaggc

SEQ ID NO: 1065430 - DNA, 25 bp, Homo sapien
tcaactcttggatgaaagtatccgg

SEQ ID NO: 1065431 - DNA, 25 bp, Homo sapien
taaaactcaaggtttcaacaacaga

SEQ ID NO: 1065432 - DNA, 25 bp, Homo sapien
caacaacagattaggccaggaagcc

SEQ ID NO: 1065433 - DNA, 25 bp, Homo sapien
tactttatagcttttgggccacaca

SEQ ID NO: 1065434 - DNA, 25 bp, Homo sapien
cttcatcattataaatgttctctgc

SEQ ID NO: 1065435 - DNA, 25 bp, Homo sapien
ggatccacgcttccttcagggtctt

SEQ ID NO: 1065436 - DNA, 25 bp, Homo sapien
gtccttctggatccacgcttccttc

SEQ ID NO: 1065437 - DNA, 25 bp, Homo sapien
tcttcatcattataaatgttctctg

SEQ ID NO: 1065438 - DNA, 25 bp, Homo sapien
gatagctgaataaagtctgtctcaa

SEQ ID NO: 1065439 - DNA, 25 bp, Homo sapien
tctgtctcaaaaccagtgttaaatc

SEQ ID NO: 1065440 - DNA, 25 bp, Homo sapien
gagggatagctgaataaagtctgtc

SEQ ID NO: 1065441 - DNA, 25 bp, Homo sapien
tcaaaaccagtgttaaatcactctc

SEQ ID NO: 1065442 - DNA, 25 bp, Homo sapien
aaatttcaacgttaagtctgtggct

SEQ ID NO: 1065443 - DNA, 25 bp, Homo sapien
agaaaatttcaacgttaagtctgtg

SEQ ID NO: 1065444 - DNA, 25 bp, Homo sapien
aaacaggtcacccaaaatggagatg

SEQ ID NO: 1065445 - DNA, 25 bp, Homo sapien
tatggccaaatctgtaacccggaaa

SEQ ID NO: 1065446 - DNA, 25 bp, Homo sapien
gatactgatctcaatgcaccaagga

SEQ ID NO: 1065447 - DNA, 25 bp, Homo sapien
aagattctagagttggccggaggca

SEQ ID NO: 1065448 - DNA, 25 bp, Homo sapien
tggaagttgcaaatactggctgacc

SEQ ID NO: 1065449 - DNA, 25 bp, Homo sapien
aaacagtgcggattgatgtgccaca

SEQ ID NO: 1065450 - DNA, 25 bp, Homo sapien
catggctgggcactaaaaaaggtcc

SEQ ID NO: 1065451 - DNA, 25 bp, Homo sapien
ttaaggatccatgccagctagcagg

SEQ ID NO: 1065452 - DNA, 25 bp, Homo sapien
taatagcatgtaccccaacaactgg

SEQ ID NO: 1065453 - DNA, 25 bp, Homo sapien
caggggaagattgctggcttgggcc

SEQ ID NO: 1065454 - DNA, 25 bp, Homo sapien
gcgttgcttcagtttgagggatgta

SEQ ID NO: 1065455 - DNA, 25 bp, Homo sapien
tttgagggatgtagtgggattggcc

SEQ ID NO: 1065456 - DNA, 25 bp, Homo sapien
ggagaacaaacggggcgttgcttca

SEQ ID NO: 1065457 - DNA, 25 bp, Homo sapien
agtccctgtctcaggagtcagcact

SEQ ID NO: 1065458 - DNA, 25 bp, Homo sapien
gtccctgtctcaggagtcagcactc

SEQ ID NO: 1065459 - DNA, 25 bp, Homo sapien
ccctgtctcaggagtcagcactctc

SEQ ID NO: 1065460 - DNA, 25 bp, Homo sapien
tccctgtctcaggagtcagcactct

SEQ ID NO: 1065461 - DNA, 25 bp, Homo sapien
ggaatcccaggtgttgacctcacag

SEQ ID NO: 1065462 - DNA, 25 bp, Homo sapien
aatcccaggtgttgacctcacaggg

SEQ ID NO: 1065463 - DNA, 25 bp, Homo sapien
gagcaggaatcccaggtgttgacct

SEQ ID NO: 1065464 - DNA, 25 bp, Homo sapien
caggaatcccaggtgttgacctcac

SEQ ID NO: 1065465 - DNA, 25 bp, Homo sapien
agggccacgccctccactgggaaag

SEQ ID NO: 1065466 - DNA, 25 bp, Homo sapien
cagggccacgccctccactgggaaa

SEQ ID NO: 1065467 - DNA, 25 bp, Homo sapien
tctccagccaagcaggctccgcctt

SEQ ID NO: 1065468 - DNA, 25 bp, Homo sapien
ccccttctctccagccaagcaggct

SEQ ID NO: 1065469 - DNA, 25 bp, Homo sapien
ctctccagccaagcaggctccgcct

SEQ ID NO: 1065470 - DNA, 25 bp, Homo sapien
ctccagccaagcaggctccgccttt

SEQ ID NO: 1065471 - DNA, 25 bp, Homo sapien
tggttgttcacgaacacagtcactg

SEQ ID NO: 1065472 - DNA, 25 bp, Homo sapien
cactgacgtttaactctgccagcct

SEQ ID NO: 1065473 - DNA, 25 bp, Homo sapien
ggttgttcacgaacacagtcactga

SEQ ID NO: 1065474 - DNA, 25 bp, Homo sapien
aacacagtcactgacgtttaactct

SEQ ID NO: 1065475 - DNA, 25 bp, Homo sapien
gttcacatgccatagccataccagc

SEQ ID NO: 1065476 - DNA, 25 bp, Homo sapien
gtgttcacatgccatagccatacca

SEQ ID NO: 1065477 - DNA, 25 bp, Homo sapien
tcaagccttattggtattaacctcc

SEQ ID NO: 1065478 - DNA, 25 bp, Homo sapien
tattggtattaacctccagttccca

SEQ ID NO: 1065479 - DNA, 25 bp, Homo sapien
cacatctggtctcagatcttgatac

SEQ ID NO: 1065480 - DNA, 25 bp, Homo sapien
tctggtctcagatcttgatacccag

SEQ ID NO: 1065481 - DNA, 25 bp, Homo sapien
catctggtctcagatcttgataccc

SEQ ID NO: 1065482 - DNA, 25 bp, Homo sapien
acacatctggtctcagatcttgata

SEQ ID NO: 1065483 - DNA, 25 bp, Homo sapien
tttgcagacatgcactccaccagtc

SEQ ID NO: 1065484 - DNA, 25 bp, Homo sapien
agcccctctctaggtgtttgcagac

SEQ ID NO: 1065485 - DNA, 25 bp, Homo sapien
tacgagtgaaacacccacactcagg

SEQ ID NO: 1065486 - DNA, 25 bp, Homo sapien
ccaggagcagggctacgagtgaaac

SEQ ID NO: 1065487 - DNA, 25 bp, Homo sapien
gcgccggagcgggacttcttcctgc

SEQ ID NO: 1065488 - DNA, 25 bp, Homo sapien
gaaggcgcggcggaggccggacgcg

SEQ ID NO: 1065489 - DNA, 25 bp, Homo sapien
gccccgcagccagctgaaggcgcgg

SEQ ID NO: 1065490 - DNA, 25 bp, Homo sapien
cgccttcttcttgcgccgcttgccc

SEQ ID NO: 1065491 - DNA, 25 bp, Homo sapien
ccagctcgaccacgcccccgagctc

SEQ ID NO: 1065492 - DNA, 25 bp, Homo sapien
cgagctctgcggccaatggccaggc

SEQ ID NO: 1065493 - DNA, 25 bp, Homo sapien
gaggcagcgagactcgcgggcgggc

SEQ ID NO: 1065494 - DNA, 25 bp, Homo sapien
ggcagcgagactcgcgggcgggcac

SEQ ID NO: 1065495 - DNA, 25 bp, Homo sapien
gcgggtgcgggagccggcgcgggaa

SEQ ID NO: 1065496 - DNA, 25 bp, Homo sapien
tgcgggtgcgggagccggcgcggga

SEQ ID NO: 1065497 - DNA, 25 bp, Homo sapien
tgccggccgcttcgccgaccgcccg

SEQ ID NO: 1065498 - DNA, 25 bp, Homo sapien
aaccgccagaagctgcggacccggg

SEQ ID NO: 1065499 - DNA, 25 bp, Homo sapien
cgaaccgccagaagctgcggacccg

SEQ ID NO: 1065500 - DNA, 25 bp, Homo sapien
cgcccgaaccgccagaagctgcgga

SEQ ID NO: 1065501 - DNA, 25 bp, Homo sapien
cctactgcgatggtacgagagtgtg

SEQ ID NO: 1065502 - DNA, 25 bp, Homo sapien
tctgcgtgtccgtacatttgagtgg

SEQ ID NO: 1065503 - DNA, 25 bp, Homo sapien
taaactgcgaacatgtacgtgtgcc

SEQ ID NO: 1065504 - DNA, 25 bp, Homo sapien
tattaccgtgtacgtgtgtctccgt

SEQ ID NO: 1065505 - DNA, 25 bp, Homo sapien
tggctagccagaacagtaagtgtcc

SEQ ID NO: 1065506 - DNA, 25 bp, Homo sapien
taagtgtcccaagaagtcacctagg

SEQ ID NO: 1065507 - DNA, 25 bp, Homo sapien
tgggcccacagttagttcctaggaa

SEQ ID NO: 1065508 - DNA, 25 bp, Homo sapien
gacaggtaggcacagacagggcttt

SEQ ID NO: 1065509 - DNA, 25 bp, Homo sapien
agagcgcggggcgtaccttcactgt

SEQ ID NO: 1065510 - DNA, 25 bp, Homo sapien
gcgcggggcgtaccttcactgtaac

SEQ ID NO: 1065511 - DNA, 25 bp, Homo sapien
ctgtaacccagcactatggggatgc

SEQ ID NO: 1065512 - DNA, 25 bp, Homo sapien
acccagcactatggggatgcgagcc

SEQ ID NO: 1065513 - DNA, 25 bp, Homo sapien
ctgcgggcgccactcgagacgttcc

SEQ ID NO: 1065514 - DNA, 25 bp, Homo sapien
tcttcttaaacagccctaggagcgc

SEQ ID NO: 1065515 - DNA, 25 bp, Homo sapien
ttaaacagccctaggagcgccggga

SEQ ID NO: 1065516 - DNA, 25 bp, Homo sapien
ccttcttcttaaacagccctaggag

SEQ ID NO: 1065517 - DNA, 25 bp, Homo sapien
cggcggccaacgaacaccaccatga

SEQ ID NO: 1065518 - DNA, 25 bp, Homo sapien
cttggtgttgtagggagcggagccc

SEQ ID NO: 1065519 - DNA, 25 bp, Homo sapien
tggccaggccctacacttagatgtt

SEQ ID NO: 1065520 - DNA, 25 bp, Homo sapien
ctggtgctcatccactgcagaccct

SEQ ID NO: 1065521 - DNA, 25 bp, Homo sapien
ctacacttagatgtttgtcattctc

SEQ ID NO: 1065522 - DNA, 25 bp, Homo sapien
gccacccttgttcagtttctgtttc

SEQ ID NO: 1065523 - DNA, 25 bp, Homo sapien
tggtcccagccacccttgttcagtt

SEQ ID NO: 1065524 - DNA, 25 bp, Homo sapien
tccatggtcccagccacccttgttc

SEQ ID NO: 1065525 - DNA, 25 bp, Homo sapien
gatactctgggtgtctccatggtcc

SEQ ID NO: 1065526 - DNA, 25 bp, Homo sapien
cgctggatcatctccgagcggatgg

SEQ ID NO: 1065527 - DNA, 25 bp, Homo sapien
tgctgtggagctctcagccacgtag

SEQ ID NO: 1065528 - DNA, 25 bp, Homo sapien
cagccacgtaggatgtggtctgact

SEQ ID NO: 1065529 - DNA, 25 bp, Homo sapien
gatggagagcgcgtcctctgctgtg

SEQ ID NO: 1065530 - DNA, 25 bp, Homo sapien
ggaaaagaagctacagatgctggga

SEQ ID NO: 1065531 - DNA, 25 bp, Homo sapien
gcacccggccgccaagattttctaa

SEQ ID NO: 1065532 - DNA, 25 bp, Homo sapien
cagagagcctggtgaaacactggat

SEQ ID NO: 1065533 - DNA, 25 bp, Homo sapien
tatcacgaatgtgcaagaggacaca

SEQ ID NO: 1065534 - DNA, 25 bp, Homo sapien
gccctgactttccagatttgggaaa

SEQ ID NO: 1065535 - DNA, 25 bp, Homo sapien
acatgctgcgggagtcccagcacag

SEQ ID NO: 1065536 - DNA, 25 bp, Homo sapien
gaaatgagtcatggggtcggaaggt

SEQ ID NO: 1065537 - DNA, 25 bp, Homo sapien
cttctgcacatgctgcgggagtccc

SEQ ID NO: 1065538 - DNA, 25 bp, Homo sapien
tcaatccaggcactgctagggacat

SEQ ID NO: 1065539 - DNA, 25 bp, Homo sapien
aatcaacttcgacaggtaggtggcc

SEQ ID NO: 1065540 - DNA, 25 bp, Homo sapien
cacggtcaatgtggcgctgcagcat

SEQ ID NO: 1065541 - DNA, 25 bp, Homo sapien
tggaccggccaacaaaggtgtcatc

SEQ ID NO: 1065542 - DNA, 25 bp, Homo sapien
ggtggaaccgtcagacacaatggtg

SEQ ID NO: 1065543 - DNA, 25 bp, Homo sapien
taccacgctattgctagccgtagag

SEQ ID NO: 1065544 - DNA, 25 bp, Homo sapien
gtggaggccgcttcagcttacgcag

SEQ ID NO: 1065545 - DNA, 25 bp, Homo sapien
taatggcccatcaggcactgctaag

SEQ ID NO: 1065546 - DNA, 25 bp, Homo sapien
tttggctcgagtatccactggaggg

SEQ ID NO: 1065547 - DNA, 25 bp, Homo sapien
tcctgcagtggagtcaaggttgtct

SEQ ID NO: 1065548 - DNA, 25 bp, Homo sapien
agacgtgacacgctctggtttaggg

SEQ ID NO: 1065549 - DNA, 25 bp, Homo sapien
cactggagggcgaaagtgtccgttc

SEQ ID NO: 1065550 - DNA, 25 bp, Homo sapien
gcagtctctgaggcagatggtgcct

SEQ ID NO: 1065551 - DNA, 25 bp, Homo sapien
tcttggaggggctcctcagcagtct

SEQ ID NO: 1065552 - DNA, 25 bp, Homo sapien
aggcagatggtgcctccacaaccac

SEQ ID NO: 1065553 - DNA, 25 bp, Homo sapien
gagggggccagttgggatcttggag

SEQ ID NO: 1065554 - DNA, 25 bp, Homo sapien
gccacatgccctggggcggaactag

SEQ ID NO: 1065555 - DNA, 25 bp, Homo sapien
ggctacccgggggctgaatctgcaa

SEQ ID NO: 1065556 - DNA, 25 bp, Homo sapien
acagcccaccggttccttctgaggg

SEQ ID NO: 1065557 - DNA, 25 bp, Homo sapien
tgcaaagcagtagctgaggaggacg

SEQ ID NO: 1065558 - DNA, 25 bp, Homo sapien
atctgcaggagcgagggcgtgacca

SEQ ID NO: 1065559 - DNA, 25 bp, Homo sapien
gctggcccgccctgacagggccctt

SEQ ID NO: 1065560 - DNA, 25 bp, Homo sapien
gacagggcccttcgcagtggtttct

SEQ ID NO: 1065561 - DNA, 25 bp, Homo sapien
ggagcgcagccgcaccatctgcagg

SEQ ID NO: 1065562 - DNA, 25 bp, Homo sapien
ccttgagtcggaccgcagcatggag

SEQ ID NO: 1065563 - DNA, 25 bp, Homo sapien
gagttctgccaccagattccgctgg

SEQ ID NO: 1065564 - DNA, 25 bp, Homo sapien
gaagatgaaactggccgttgaggca

SEQ ID NO: 1065565 - DNA, 25 bp, Homo sapien
agctgcagcttcctagagcccttgg

SEQ ID NO: 1065566 - DNA, 25 bp, Homo sapien
ctgagcccgggaggcccatcttctc

SEQ ID NO: 1065567 - DNA, 25 bp, Homo sapien
gacacctccattctccgccagctcc

SEQ ID NO: 1065568 - DNA, 25 bp, Homo sapien
cagctgcaggacacctccattctcc

SEQ ID NO: 1065569 - DNA, 25 bp, Homo sapien
cagtaaggggctcagctcgagggta

SEQ ID NO: 1065570 - DNA, 25 bp, Homo sapien
ttactgacagtgcccgcagcactgg

SEQ ID NO: 1065571 - DNA, 25 bp, Homo sapien
tttactgacagtgcccgcagcactg

SEQ ID NO: 1065572 - DNA, 25 bp, Homo sapien
tgatttactgacagtgcccgcagca

SEQ ID NO: 1065573 - DNA, 25 bp, Homo sapien
gatttactgacagtgcccgcagcac

SEQ ID NO: 1065574 - DNA, 25 bp, Homo sapien
cataagtatcgaaggccgtggaggt

SEQ ID NO: 1065575 - DNA, 25 bp, Homo sapien
gaaaaggcatgagcgcaggatgact

SEQ ID NO: 1065576 - DNA, 25 bp, Homo sapien
tgctgtatcctctcgtccttggagc

SEQ ID NO: 1065577 - DNA, 25 bp, Homo sapien
tgcaggcgccctctctattaggttg

SEQ ID NO: 1065578 - DNA, 25 bp, Homo sapien
gactggtcccaagctatgggctgac

SEQ ID NO: 1065579 - DNA, 25 bp, Homo sapien
aaactcaggtgaggtgtcctgctcc

SEQ ID NO: 1065580 - DNA, 25 bp, Homo sapien
gaaccaagaggagtaaactggactg

SEQ ID NO: 1065581 - DNA, 25 bp, Homo sapien
tgccatgtaaacaggcccttggaat

SEQ ID NO: 1065582 - DNA, 25 bp, Homo sapien
tgtccccagcatggagcacctggca

SEQ ID NO: 1065583 - DNA, 25 bp, Homo sapien
ctacttgtccccagcatggagcacc

SEQ ID NO: 1065584 - DNA, 25 bp, Homo sapien
ccccagcatggagcacctggcagaa

SEQ ID NO: 1065585 - DNA, 25 bp, Homo sapien
tacttgtccccagcatggagcacct

SEQ ID NO: 1065586 - DNA, 25 bp, Homo sapien
catttctttgggccctggcagtctc

SEQ ID NO: 1065587 - DNA, 25 bp, Homo sapien
ccatttctttgggccctggcagtct

SEQ ID NO: 1065588 - DNA, 25 bp, Homo sapien
ctgggcccactgctcaaggaagctc

SEQ ID NO: 1065589 - DNA, 25 bp, Homo sapien
agagaatgaagtgtggagggccagg

SEQ ID NO: 1065590 - DNA, 25 bp, Homo sapien
caagtgccccgagatgactctactg

SEQ ID NO: 1065591 - DNA, 25 bp, Homo sapien
gaatgaagtgtggagggccaggcct

SEQ ID NO: 1065592 - DNA, 25 bp, Homo sapien
gacttgagtaaaatgcacctgtggc

SEQ ID NO: 1065593 - DNA, 25 bp, Homo sapien
gggtgcccctcattgactagagaag

SEQ ID NO: 1065594 - DNA, 25 bp, Homo sapien
gatcaagaaagaagcggtggccctg

SEQ ID NO: 1065595 - DNA, 25 bp, Homo sapien
ggaagccagcttgcctagacaggtg

SEQ ID NO: 1065596 - DNA, 25 bp, Homo sapien
tcagctgcgtgttgttagcatcagg

SEQ ID NO: 1065597 - DNA, 25 bp, Homo sapien
cagagaacctagtggtctaccaagt

SEQ ID NO: 1065598 - DNA, 25 bp, Homo sapien
tgggacactccctaaatcagctgcg

SEQ ID NO: 1065599 - DNA, 25 bp, Homo sapien
caatgtctgcttactctgaggcttg

SEQ ID NO: 1065600 - DNA, 25 bp, Homo sapien
ggtgctataccagaatcagtttgga

SEQ ID NO: 1065601 - DNA, 25 bp, Homo sapien
ggtctcgacccctgatctgatgatc

SEQ ID NO: 1065602 - DNA, 25 bp, Homo sapien
gggaagagatttctctacagaatgc

SEQ ID NO: 1065603 - DNA, 25 bp, Homo sapien
agctgaagctaaggttcttgtcatg

SEQ ID NO: 1065604 - DNA, 25 bp, Homo sapien
gcgtccagttgtcttgtgttggagc

SEQ ID NO: 1065605 - DNA, 25 bp, Homo sapien
ctcttgcgtccagttgtcttgtgtt

SEQ ID NO: 1065606 - DNA, 25 bp, Homo sapien
tgtgttggagccaaactttgaatcc

SEQ ID NO: 1065607 - DNA, 25 bp, Homo sapien
caaactttgaatccaggactcccat

SEQ ID NO: 1065608 - DNA, 25 bp, Homo sapien
tcgacctgctcgactctctgctgct

SEQ ID NO: 1065609 - DNA, 25 bp, Homo sapien
ccgagtaagcggagcgccgagccca

SEQ ID NO: 1065610 - DNA, 25 bp, Homo sapien
tcactttttccggccgctgccggag

SEQ ID NO: 1065611 - DNA, 25 bp, Homo sapien
ggctggactcgcgtgacagttcccg

SEQ ID NO: 1065612 - DNA, 25 bp, Homo sapien
taggagggttgtgccccgctcaggc

SEQ ID NO: 1065613 - DNA, 25 bp, Homo sapien
agggttgtgccccgctcaggcgcct

SEQ ID NO: 1065614 - DNA, 25 bp, Homo sapien
ggagggttgtgccccgctcaggcgc

SEQ ID NO: 1065615 - DNA, 25 bp, Homo sapien
ctaggagggttgtgccccgctcagg

SEQ ID NO: 1065616 - DNA, 25 bp, Homo sapien
gcagtgattggcaggaaaccgtccc

SEQ ID NO: 1065617 - DNA, 25 bp, Homo sapien
cgagtcagccgggccaacaccaggg

SEQ ID NO: 1065618 - DNA, 25 bp, Homo sapien
acaccagggggagggcaaaccagca

SEQ ID NO: 1065619 - DNA, 25 bp, Homo sapien
tgattggcaggaaaccgtcccgcct

SEQ ID NO: 1065620 - DNA, 25 bp, Homo sapien
gccccctgcgccattttatcgcccc

SEQ ID NO: 1065621 - DNA, 25 bp, Homo sapien
ggccaaagcctgggcgaacgactgc

SEQ ID NO: 1065622 - DNA, 25 bp, Homo sapien
agcctgggcgaacgactgcgcctca

SEQ ID NO: 1065623 - DNA, 25 bp, Homo sapien
aaagcctgggcgaacgactgcgcct

SEQ ID NO: 1065624 - DNA, 25 bp, Homo sapien
caaagcctgggcgaacgactgcgcc

SEQ ID NO: 1065625 - DNA, 25 bp, Homo sapien
aaccccctggagaagcaacaggcgc

SEQ ID NO: 1065626 - DNA, 25 bp, Homo sapien
cagggcgtgggcctcccaatccctc

SEQ ID NO: 1065627 - DNA, 25 bp, Homo sapien
ctcaggagctagaacgcgcccttct

SEQ ID NO: 1065628 - DNA, 25 bp, Homo sapien
caatccctccaaggggcggacggcg

SEQ ID NO: 1065629 - DNA, 25 bp, Homo sapien
cgactctcaagacgaccagggagct

SEQ ID NO: 1065630 - DNA, 25 bp, Homo sapien
cgcggcagaaaagcccgcggctatc

SEQ ID NO: 1065631 - DNA, 25 bp, Homo sapien
aaagcgggagaagcgagagttttct

SEQ ID NO: 1065632 - DNA, 25 bp, Homo sapien
tccaggaagggcctttgcgtctccc

SEQ ID NO: 1065633 - DNA, 25 bp, Homo sapien
acacttcaggcaggtctggtagagc

SEQ ID NO: 1065634 - DNA, 25 bp, Homo sapien
taactaaaaacactgcaggacggaa

SEQ ID NO: 1065635 - DNA, 25 bp, Homo sapien
gaacagatgcgctaagctgcagcaa

SEQ ID NO: 1065636 - DNA, 25 bp, Homo sapien
taacatttcactagatgagggtgcc

SEQ ID NO: 1065637 - DNA, 25 bp, Homo sapien
agagagcagtcatcatatcgctgca

SEQ ID NO: 1065638 - DNA, 25 bp, Homo sapien
aaacagaaaaatcagcggcgcatgg

SEQ ID NO: 1065639 - DNA, 25 bp, Homo sapien
caagcctgggcacaacgtgaaatgc

SEQ ID NO: 1065640 - DNA, 25 bp, Homo sapien
tgggcacaacgtgaaatgctgtctc

SEQ ID NO: 1065641 - DNA, 25 bp, Homo sapien
aataacttgggtatgccacttgacc

SEQ ID NO: 1065642 - DNA, 25 bp, Homo sapien
taggcaatgtctaaggttccaccaa

SEQ ID NO: 1065643 - DNA, 25 bp, Homo sapien
ggttgtatcactagccagctccaat

SEQ ID NO: 1065644 - DNA, 25 bp, Homo sapien
tactttagtaggatgaatactggca

SEQ ID NO: 1065645 - DNA, 25 bp, Homo sapien
tctgcctttgccacgagaccaaatg

SEQ ID NO: 1065646 - DNA, 25 bp, Homo sapien
cctttgccacgagaccaaatggaaa

SEQ ID NO: 1065647 - DNA, 25 bp, Homo sapien
tgcctttgccacgagaccaaatgga

SEQ ID NO: 1065648 - DNA, 25 bp, Homo sapien
ctctgcctttgccacgagaccaaat

SEQ ID NO: 1065649 - DNA, 25 bp, Homo sapien
agaggtaccagaagactgttcagag

SEQ ID NO: 1065650 - DNA, 25 bp, Homo sapien
cagcaaggagtcatccaatccatcc

SEQ ID NO: 1065651 - DNA, 25 bp, Homo sapien
gactgctcatatgatgggtcatctt

SEQ ID NO: 1065652 - DNA, 25 bp, Homo sapien
gttcagagggcacccgtgagcacat

SEQ ID NO: 1065653 - DNA, 25 bp, Homo sapien
ggtcccaggctgtacgatgaatttt

SEQ ID NO: 1065654 - DNA, 25 bp, Homo sapien
aggagtctcagctactggtcccagg

SEQ ID NO: 1065655 - DNA, 25 bp, Homo sapien
ggtttagtatgagctggtccatgac

SEQ ID NO: 1065656 - DNA, 25 bp, Homo sapien
gaccacttgatgtacttagctgagg

SEQ ID NO: 1065657 - DNA, 25 bp, Homo sapien
caagcagagcatcacaaactgttgg

SEQ ID NO: 1065658 - DNA, 25 bp, Homo sapien
tatctttggacgaatcagtctcgtc

SEQ ID NO: 1065659 - DNA, 25 bp, Homo sapien
aaatggtgcaacagttacttttata

SEQ ID NO: 1065660 - DNA, 25 bp, Homo sapien
agtctcgtccttatcaagcagagca

SEQ ID NO: 1065661 - DNA, 25 bp, Homo sapien
gaggtggaaacaaccagagatctca

SEQ ID NO: 1065662 - DNA, 25 bp, Homo sapien
gaatacagacgtagggttctcactg

SEQ ID NO: 1065663 - DNA, 25 bp, Homo sapien
ccttcagattcagtacaaagtttgc

SEQ ID NO: 1065664 - DNA, 25 bp, Homo sapien
tctgaatggtctgagatccgagaga

SEQ ID NO: 1065665 - DNA, 25 bp, Homo sapien
ttcccagaatccttgttaagaacat

SEQ ID NO: 1065666 - DNA, 25 bp, Homo sapien
tagaacaggaatgactttgcctagt

SEQ ID NO: 1065667 - DNA, 25 bp, Homo sapien
acaggaatgactttgcctagtcttc

SEQ ID NO: 1065668 - DNA, 25 bp, Homo sapien
tcccagaatccttgttaagaacatc

SEQ ID NO: 1065669 - DNA, 25 bp, Homo sapien
ctgtgaaaacgtcggaacattagtc

SEQ ID NO: 1065670 - DNA, 25 bp, Homo sapien
atgagcaatgacactcctgagataa

SEQ ID NO: 1065671 - DNA, 25 bp, Homo sapien
tgtgaacccagatgttaactctaga

SEQ ID NO: 1065672 - DNA, 25 bp, Homo sapien
ccagtaagcagtggtgccaagatgt

SEQ ID NO: 1065673 - DNA, 25 bp, Homo sapien
tcaatatttaatggctcacccagcc

SEQ ID NO: 1065674 - DNA, 25 bp, Homo sapien
tcagtgtcaactgcctaggatataa

SEQ ID NO: 1065675 - DNA, 25 bp, Homo sapien
ttatcaacattttatcaaagctgtt

SEQ ID NO: 1065676 - DNA, 25 bp, Homo sapien
tcaacattttatcaaagctgtttcc

SEQ ID NO: 1065677 - DNA, 25 bp, Homo sapien
tcatttatcaacattttatcaaagc

SEQ ID NO: 1065678 - DNA, 25 bp, Homo sapien
ttatcaaagctgtttccagtatttt

SEQ ID NO: 1065679 - DNA, 25 bp, Homo sapien
tagcacctaggaattatccctgcca

SEQ ID NO: 1065680 - DNA, 25 bp, Homo sapien
actttacaatgggaagacatggcag

SEQ ID NO: 1065681 - DNA, 25 bp, Homo sapien
caggatattcacatggtaccaaagc

SEQ ID NO: 1065682 - DNA, 25 bp, Homo sapien
tggacccagcttctagtttacagga

SEQ ID NO: 1065683 - DNA, 25 bp, Homo sapien
gaggatgtcctctactaaaaccaaa

SEQ ID NO: 1065684 - DNA, 25 bp, Homo sapien
aaattggagcagtagaacagaaggc

SEQ ID NO: 1065685 - DNA, 25 bp, Homo sapien
tctgtagacccatgttcatagtggc

SEQ ID NO: 1065686 - DNA, 25 bp, Homo sapien
gttgcagggctaaagaacaagcagt

SEQ ID NO: 1065687 - DNA, 25 bp, Homo sapien
ttaaaatagtgaccatacccaattg

SEQ ID NO: 1065688 - DNA, 25 bp, Homo sapien
gaccatacccaattgttggtaaggc

SEQ ID NO: 1065689 - DNA, 25 bp, Homo sapien
caaccggaattcatacaactgctaa

SEQ ID NO: 1065690 - DNA, 25 bp, Homo sapien
catacaactgctaatagaaatgaaa

SEQ ID NO: 1065691 - DNA, 25 bp, Homo sapien
gcagggtctcaaaaagatacgtgta

SEQ ID NO: 1065692 - DNA, 25 bp, Homo sapien
aacaacaaacatgaatcttgaggac

SEQ ID NO: 1065693 - DNA, 25 bp, Homo sapien
gcataacggcattattcacaaagct

SEQ ID NO: 1065694 - DNA, 25 bp, Homo sapien
cgtgtagatgcatatgcataacggc

SEQ ID NO: 1065695 - DNA, 25 bp, Homo sapien
taagaaattgatacgctaattctaa

SEQ ID NO: 1065696 - DNA, 25 bp, Homo sapien
taagaacactagtggaacacattag

SEQ ID NO: 1065697 - DNA, 25 bp, Homo sapien
tcccaccaagccttaagaaattgat

SEQ ID NO: 1065698 - DNA, 25 bp, Homo sapien
acaatcccaatggaaatcccaccaa

SEQ ID NO: 1065699 - DNA, 25 bp, Homo sapien
cagggaaaacctgatgaaatctatt

SEQ ID NO: 1065700 - DNA, 25 bp, Homo sapien
ttatagaatgtaagaccaagacaca

SEQ ID NO: 1065701 - DNA, 25 bp, Homo sapien
atgttaattctcagtcaggcgcggg

SEQ ID NO: 1065702 - DNA, 25 bp, Homo sapien
cacaatatgaaacactccgggataa

SEQ ID NO: 1065703 - DNA, 25 bp, Homo sapien
gaggcacacatttctgacggagcgt

SEQ ID NO: 1065704 - DNA, 25 bp, Homo sapien
taattcttttcactacgagacctgg

SEQ ID NO: 1065705 - DNA, 25 bp, Homo sapien
gaacagtacacatgcagggctctag

SEQ ID NO: 1065706 - DNA, 25 bp, Homo sapien
gagtacctgctatgccaattctgac

SEQ ID NO: 1065707 - DNA, 25 bp, Homo sapien
tcctccaaatttagagatgctaaca

SEQ ID NO: 1065708 - DNA, 25 bp, Homo sapien
catctatcatctagtaaatcaggaa

SEQ ID NO: 1065709 - DNA, 25 bp, Homo sapien
tagtttgaacctcatcttcctccaa

SEQ ID NO: 1065710 - DNA, 25 bp, Homo sapien
ttcttggaccaacaatcagtaccat

SEQ ID NO: 1065711 - DNA, 25 bp, Homo sapien
tacgtgctacgtactttgctaactg

SEQ ID NO: 1065712 - DNA, 25 bp, Homo sapien
tctcagctcatgtaccaaaaaattt

SEQ ID NO: 1065713 - DNA, 25 bp, Homo sapien
ggctcaataattagatctcagctca

SEQ ID NO: 1065714 - DNA, 25 bp, Homo sapien
ttaattctaacaatcacagatggca

SEQ ID NO: 1065715 - DNA, 25 bp, Homo sapien
taaaggcactgtcctatgtgctagt

SEQ ID NO: 1065716 - DNA, 25 bp, Homo sapien
gaagaatagccagttagccaaaggg

SEQ ID NO: 1065717 - DNA, 25 bp, Homo sapien
tcctaccaaagcttcacaaaggagg

SEQ ID NO: 1065718 - DNA, 25 bp, Homo sapien
tccctgtggtcacccaaaaaggaca

SEQ ID NO: 1065719 - DNA, 25 bp, Homo sapien
gcttgaagctgagttttaggaatat

SEQ ID NO: 1065720 - DNA, 25 bp, Homo sapien
atacaatttagcttgaagctgagtt

SEQ ID NO: 1065721 - DNA, 25 bp, Homo sapien
caatttagcttgaagctgagtttta

SEQ ID NO: 1065722 - DNA, 25 bp, Homo sapien
tttagcttgaagctgagttttagga

SEQ ID NO: 1065723 - DNA, 25 bp, Homo sapien
gctttcgggaatcaaaagcagtctc

SEQ ID NO: 1065724 - DNA, 25 bp, Homo sapien
gaagcctcaaaaagtagagctttgt

SEQ ID NO: 1065725 - DNA, 25 bp, Homo sapien
taccttatctactgtgctttcggga

SEQ ID NO: 1065726 - DNA, 25 bp, Homo sapien
ttgaaaatcaaagccctagacagtg

SEQ ID NO: 1065727 - DNA, 25 bp, Homo sapien
catggccctgaaattcttgatgacc

SEQ ID NO: 1065728 - DNA, 25 bp, Homo sapien
taatttccctagaccagtggttcgc

SEQ ID NO: 1065729 - DNA, 25 bp, Homo sapien
tgatgacccaggattcaactagctc

SEQ ID NO: 1065730 - DNA, 25 bp, Homo sapien
caacgattgagacttaggctaaaac

SEQ ID NO: 1065731 - DNA, 25 bp, Homo sapien
tacagagggatcagtggttaggaac

SEQ ID NO: 1065732 - DNA, 25 bp, Homo sapien
tcaatgaagtttatacaggagacag

SEQ ID NO: 1065733 - DNA, 25 bp, Homo sapien
caattatcacaagcagtgagcacag

SEQ ID NO: 1065734 - DNA, 25 bp, Homo sapien
cgtcagccaacgtcaaagtatgtgt

SEQ ID NO: 1065735 - DNA, 25 bp, Homo sapien
ttgagtgctgcatatgatgaacttg

SEQ ID NO: 1065736 - DNA, 25 bp, Homo sapien
gaacttgatccatcaaggcacaaag

SEQ ID NO: 1065737 - DNA, 25 bp, Homo sapien
tgaggtccgaaggatgctgccattt

SEQ ID NO: 1065738 - DNA, 25 bp, Homo sapien
aaggcacaaagctcccccgagatac

SEQ ID NO: 1065739 - DNA, 25 bp, Homo sapien
gttgcaaagctagtattagaactca

SEQ ID NO: 1065740 - DNA, 25 bp, Homo sapien
gaaggtcctttgacaccaagttgca

SEQ ID NO: 1065741 - DNA, 25 bp, Homo sapien
gaataaatttgtacagccacactgc

SEQ ID NO: 1065742 - DNA, 25 bp, Homo sapien
gattccaaggtttttgagtatctga

SEQ ID NO: 1065743 - DNA, 25 bp, Homo sapien
aagtctgggagacgctggaaccgat

SEQ ID NO: 1065744 - DNA, 25 bp, Homo sapien
tggaaccgatggtggcttcgcatgt

SEQ ID NO: 1065745 - DNA, 25 bp, Homo sapien
tgttcctgtcaacccactgagtcag

SEQ ID NO: 1065746 - DNA, 25 bp, Homo sapien
cagatgtttctgtcggcgggcgtag

SEQ ID NO: 1065747 - DNA, 25 bp, Homo sapien
tcagggcctgcattcgaaactacag

SEQ ID NO: 1065748 - DNA, 25 bp, Homo sapien
tgtaaagagagaataaccggccagg

SEQ ID NO: 1065749 - DNA, 25 bp, Homo sapien
caacctaatttagggcagcctggag

SEQ ID NO: 1065750 - DNA, 25 bp, Homo sapien
catgtaccaggagggcacgagtctt

SEQ ID NO: 1065751 - DNA, 25 bp, Homo sapien
tgctcttggatagcatggcttcttc

SEQ ID NO: 1065752 - DNA, 25 bp, Homo sapien
aagagagaatgctcttggatagcat

SEQ ID NO: 1065753 - DNA, 25 bp, Homo sapien
tcttggatagcatggcttcttccac

SEQ ID NO: 1065754 - DNA, 25 bp, Homo sapien
ctggtttcttacatccccttcaaag

SEQ ID NO: 1065755 - DNA, 25 bp, Homo sapien
gaaaagtcacatcacagctggcatt

SEQ ID NO: 1065756 - DNA, 25 bp, Homo sapien
cattcaccacggacaggaagagcag

SEQ ID NO: 1065757 - DNA, 25 bp, Homo sapien
caaaacaccccttctggagtagaag

SEQ ID NO: 1065758 - DNA, 25 bp, Homo sapien
cagaaatgctagcttggacaactga

SEQ ID NO: 1065759 - DNA, 25 bp, Homo sapien
tatttaggctacagccctgctgctg

SEQ ID NO: 1065760 - DNA, 25 bp, Homo sapien
tgaacatcattgaagcgtgactgcc

SEQ ID NO: 1065761 - DNA, 25 bp, Homo sapien
tattcacaattaggcctggctgctt

SEQ ID NO: 1065762 - DNA, 25 bp, Homo sapien
tttccacaagggacaagagcttggc

SEQ ID NO: 1065763 - DNA, 25 bp, Homo sapien
acctggaggaggatacggagtacat

SEQ ID NO: 1065764 - DNA, 25 bp, Homo sapien
cggagtacatagtccacgtgcaggc

SEQ ID NO: 1065765 - DNA, 25 bp, Homo sapien
gcccagccagcgagcctgtgctctt

SEQ ID NO: 1065766 - DNA, 25 bp, Homo sapien
gaggaggatacggagtacatagtcc

SEQ ID NO: 1065767 - DNA, 25 bp, Homo sapien
ccaactctgcagtggtgagctggga

SEQ ID NO: 1065768 - DNA, 25 bp, Homo sapien
cccagtgaacgtcaccgtcaggcac

SEQ ID NO: 1065769 - DNA, 25 bp, Homo sapien
aggccaactctgcagtggtgagctg

SEQ ID NO: 1065770 - DNA, 25 bp, Homo sapien
aacgtcaccgtcaggcacctcaagg

SEQ ID NO: 1065771 - DNA, 25 bp, Homo sapien
gcgtctgcttcgcgctggtgcaggc

SEQ ID NO: 1065772 - DNA, 25 bp, Homo sapien
ctgcgtctgcttcgcgctggtgcag

SEQ ID NO: 1065773 - DNA, 25 bp, Homo sapien
ggctgcgtctgcttcgcgctggtgc

SEQ ID NO: 1065774 - DNA, 25 bp, Homo sapien
gtctgcttcgcgctggtgcaggcgg

SEQ ID NO: 1065775 - DNA, 25 bp, Homo sapien
gatttacttcgcaggtaaagccggc

SEQ ID NO: 1065776 - DNA, 25 bp, Homo sapien
cagagtgagagggtgtgacctccat

SEQ ID NO: 1065777 - DNA, 25 bp, Homo sapien
tcctcagagtctagccttagtccct

SEQ ID NO: 1065778 - DNA, 25 bp, Homo sapien
cagcccagagtttcttcagcatcgg

SEQ ID NO: 1065779 - DNA, 25 bp, Homo sapien
agagtcgatgacccctagcccagct

SEQ ID NO: 1065780 - DNA, 25 bp, Homo sapien
ctgccgaccgcacagctcctctcca

SEQ ID NO: 1065781 - DNA, 25 bp, Homo sapien
gccgaccgcacagctcctctccaga

SEQ ID NO: 1065782 - DNA, 25 bp, Homo sapien
tcctctccagagtcgatgaccccta

SEQ ID NO: 1065783 - DNA, 25 bp, Homo sapien
cccaactaacggagctgggagcgtg

SEQ ID NO: 1065784 - DNA, 25 bp, Homo sapien
gggccgaattggcaccctgggcacc

SEQ ID NO: 1065785 - DNA, 25 bp, Homo sapien
ggctctgagccgcacgtcgcttcga

SEQ ID NO: 1065786 - DNA, 25 bp, Homo sapien
tcaactcccaactaacggagctggg

SEQ ID NO: 1065787 - DNA, 25 bp, Homo sapien
cagcgacgcggagacaccgactgcg

SEQ ID NO: 1065788 - DNA, 25 bp, Homo sapien
cgacgcggagacaccgactgcgcag

SEQ ID NO: 1065789 - DNA, 25 bp, Homo sapien
cggagacaccgactgcgcagggaag

SEQ ID NO: 1065790 - DNA, 25 bp, Homo sapien
gagacaccgactgcgcagggaaggc

SEQ ID NO: 1065791 - DNA, 25 bp, Homo sapien
gcatcctgtatctatgccatgctcc

SEQ ID NO: 1065792 - DNA, 25 bp, Homo sapien
tcacacagcctagacccaggcatcc

SEQ ID NO: 1065793 - DNA, 25 bp, Homo sapien
aggccctcctggctactagacactg

SEQ ID NO: 1065794 - DNA, 25 bp, Homo sapien
cccaagggggtcaagggcagagagg

SEQ ID NO: 1065795 - DNA, 25 bp, Homo sapien
ggtgccatcgctgttggtgtcaaag

SEQ ID NO: 1065796 - DNA, 25 bp, Homo sapien
tcgcaggtcctgcaacatctcgggc

SEQ ID NO: 1065797 - DNA, 25 bp, Homo sapien
gagaactctgtgttctctcgcaggt

SEQ ID NO: 1065798 - DNA, 25 bp, Homo sapien
ggcgtcaccatagggaaagaagttg

SEQ ID NO: 1065799 - DNA, 25 bp, Homo sapien
tgtaagcacgcactgagctcatgag

SEQ ID NO: 1065800 - DNA, 25 bp, Homo sapien
catgagcacctcactcaatgctagg

SEQ ID NO: 1065801 - DNA, 25 bp, Homo sapien
agtgggccctcaatcaattagttag

SEQ ID NO: 1065802 - DNA, 25 bp, Homo sapien
caatgctaggctcatagtgggccct

SEQ ID NO: 1065803 - DNA, 25 bp, Homo sapien
ccagggcggcccgcgctcggtggtc

SEQ ID NO: 1065804 - DNA, 25 bp, Homo sapien
gcggcccgcgctcggtggtcgaaag

SEQ ID NO: 1065805 - DNA, 25 bp, Homo sapien
agggcggcccgcgctcggtggtcga

SEQ ID NO: 1065806 - DNA, 25 bp, Homo sapien
ggcggcccgcgctcggtggtcgaaa

SEQ ID NO: 1065807 - DNA, 25 bp, Homo sapien
gtccatttggcggaagattttctca

SEQ ID NO: 1065808 - DNA, 25 bp, Homo sapien
ttgtgtccatttggcggaagatttt

SEQ ID NO: 1065809 - DNA, 25 bp, Homo sapien
tctcagtcctcttttccggggtcga

SEQ ID NO: 1065810 - DNA, 25 bp, Homo sapien
catcacggacgaaaccatcttgtaa

SEQ ID NO: 1065811 - DNA, 25 bp, Homo sapien
gcagacgcacgatggacgggtcgct

SEQ ID NO: 1065812 - DNA, 25 bp, Homo sapien
cagacgcacgatggacgggtcgctt

SEQ ID NO: 1065813 - DNA, 25 bp, Homo sapien
ccccgcggatgaactcctccaagga

SEQ ID NO: 1065814 - DNA, 25 bp, Homo sapien
tggccccgcggatgaactcctccaa

SEQ ID NO: 1065815 - DNA, 25 bp, Homo sapien
caagtgctaaaaggcaggctggctt

SEQ ID NO: 1065816 - DNA, 25 bp, Homo sapien
cagctggcgggctagtatcctggaa

SEQ ID NO: 1065817 - DNA, 25 bp, Homo sapien
aaaaagtctcctcccctgggcatga

SEQ ID NO: 1065818 - DNA, 25 bp, Homo sapien
cacaagggagtggaagctaagagcc

SEQ ID NO: 1065819 - DNA, 25 bp, Homo sapien
tggcatggcatgttgttagcaccca

SEQ ID NO: 1065820 - DNA, 25 bp, Homo sapien
tagcacccactactgtgagctagga

SEQ ID NO: 1065821 - DNA, 25 bp, Homo sapien
ccaatttggcaggagcttagcatta

SEQ ID NO: 1065822 - DNA, 25 bp, Homo sapien
aatagccacagcaccactggacaga

SEQ ID NO: 1065823 - DNA, 25 bp, Homo sapien
taccaactgcccaagtcactcaact

SEQ ID NO: 1065824 - DNA, 25 bp, Homo sapien
gtggtggtaagcagacagcctcaag

SEQ ID NO: 1065825 - DNA, 25 bp, Homo sapien
gacagcctcaaggactaaccctttg

SEQ ID NO: 1065826 - DNA, 25 bp, Homo sapien
taaccctttgtctgccacttaccaa

SEQ ID NO: 1065827 - DNA, 25 bp, Homo sapien
tgtcacttccgccatcgtggtatgg

SEQ ID NO: 1065828 - DNA, 25 bp, Homo sapien
acccctcaagatgcggtggctctgc

SEQ ID NO: 1065829 - DNA, 25 bp, Homo sapien
cccaatgtccatcactagggccagg

SEQ ID NO: 1065830 - DNA, 25 bp, Homo sapien
tactgcgtggtcaacatcctctctg

SEQ ID NO: 1065831 - DNA, 25 bp, Homo sapien
gctgagacctaaaaagcctttgtgg

SEQ ID NO: 1065832 - DNA, 25 bp, Homo sapien
tccccaaagggatcttaagccatgt

SEQ ID NO: 1065833 - DNA, 25 bp, Homo sapien
ggtcttattggcatagggtggcccc

SEQ ID NO: 1065834 - DNA, 25 bp, Homo sapien
tggccctaagccagcacaaatgctg

SEQ ID NO: 1065835 - DNA, 25 bp, Homo sapien
gaaagcatccgcagtgacctagaga

SEQ ID NO: 1065836 - DNA, 25 bp, Homo sapien
caagtgcccatatgaacctctctgc

SEQ ID NO: 1065837 - DNA, 25 bp, Homo sapien
gacaaactgtcttgaagccagaagg

SEQ ID NO: 1065838 - DNA, 25 bp, Homo sapien
tgtgccagacatcacctcagatgag

SEQ ID NO: 1065839 - DNA, 25 bp, Homo sapien
tctagctttctactagaagcttcct

SEQ ID NO: 1065840 - DNA, 25 bp, Homo sapien
ttttctagctttctactagaagctt

SEQ ID NO: 1065841 - DNA, 25 bp, Homo sapien
gctttctactagaagcttcctatta

SEQ ID NO: 1065842 - DNA, 25 bp, Homo sapien
tagctttctactagaagcttcctat

SEQ ID NO: 1065843 - DNA, 25 bp, Homo sapien
taacgtagggcacaagtaacgtaga

SEQ ID NO: 1065844 - DNA, 25 bp, Homo sapien
ttaagagcttcacagagctgagact

SEQ ID NO: 1065845 - DNA, 25 bp, Homo sapien
taatgtggtttctactcgtagtaag

SEQ ID NO: 1065846 - DNA, 25 bp, Homo sapien
ggcaagtcttctgacttttacttta

SEQ ID NO: 1065847 - DNA, 25 bp, Homo sapien
cattatgctggcatatgtttatggg

SEQ ID NO: 1065848 - DNA, 25 bp, Homo sapien
ttctctttgtcgtggaggcggctgt

SEQ ID NO: 1065849 - DNA, 25 bp, Homo sapien
tgtgcccatttctctttgtcgtgga

SEQ ID NO: 1065850 - DNA, 25 bp, Homo sapien
attggtgtccccattatgctggcat

SEQ ID NO: 1065851 - DNA, 25 bp, Homo sapien
tccccagttattgctgcagttagtg

SEQ ID NO: 1065852 - DNA, 25 bp, Homo sapien
ccagttattgctgcagttagtgttg

SEQ ID NO: 1065853 - DNA, 25 bp, Homo sapien
ttgtcggtcattgcatccccagtta

SEQ ID NO: 1065854 - DNA, 25 bp, Homo sapien
gtcggtcattgcatccccagttatt

SEQ ID NO: 1065855 - DNA, 25 bp, Homo sapien
gctgtacattctggggcaagaagcc

SEQ ID NO: 1065856 - DNA, 25 bp, Homo sapien
cagctgggcacgttgattggtgctc

SEQ ID NO: 1065857 - DNA, 25 bp, Homo sapien
ccatggagccgtaagaagaaaattc

SEQ ID NO: 1065858 - DNA, 25 bp, Homo sapien
ggcattgccattcctgccatggtca

SEQ ID NO: 1065859 - DNA, 25 bp, Homo sapien
cgatgcagtgcatacattatcaaga

SEQ ID NO: 1065860 - DNA, 25 bp, Homo sapien
agatctcagacttgcattacctcag

SEQ ID NO: 1065861 - DNA, 25 bp, Homo sapien
gacatcaagccatgcccacgatgca

SEQ ID NO: 1065862 - DNA, 25 bp, Homo sapien
ggaagctgtaatcacatgacctgtg

SEQ ID NO: 1065863 - DNA, 25 bp, Homo sapien
cactgcaagcagatatggcatccaa

SEQ ID NO: 1065864 - DNA, 25 bp, Homo sapien
agttcggaccaaacacacttcaggt

SEQ ID NO: 1065865 - DNA, 25 bp, Homo sapien
cagagggcccagactttacgagttc

SEQ ID NO: 1065866 - DNA, 25 bp, Homo sapien
caaatcagacatgcgatatggcccg

SEQ ID NO: 1065867 - DNA, 25 bp, Homo sapien
tgcatctgcaaaggggcgttggaga

SEQ ID NO: 1065868 - DNA, 25 bp, Homo sapien
ctgcatctgcaaaggggcgttggag

SEQ ID NO: 1065869 - DNA, 25 bp, Homo sapien
gtggctcctgcatgtgcgccggctc

SEQ ID NO: 1065870 - DNA, 25 bp, Homo sapien
ccactggtggctcctgcatgtgcgc

SEQ ID NO: 1065871 - DNA, 25 bp, Homo sapien
tctgtaactctgttgcccgtgctgg

SEQ ID NO: 1065872 - DNA, 25 bp, Homo sapien
agttgtatgaacttaagcagcaggg

SEQ ID NO: 1065873 - DNA, 25 bp, Homo sapien
gagatagggtttaactctgtaactc

SEQ ID NO: 1065874 - DNA, 25 bp, Homo sapien
gaagctaagtaatgctgtggtctag

SEQ ID NO: 1065875 - DNA, 25 bp, Homo sapien
gaaaatacgggtgctcttagataga

SEQ ID NO: 1065876 - DNA, 25 bp, Homo sapien
gatacactgttgaaccctgggtgag

SEQ ID NO: 1065877 - DNA, 25 bp, Homo sapien
cacctggtagaggagacagataatt

SEQ ID NO: 1065878 - DNA, 25 bp, Homo sapien
tttgcatgatggtttcaagaaagac

SEQ ID NO: 1065879 - DNA, 25 bp, Homo sapien
actacctgcgcctggagataagcga

SEQ ID NO: 1065880 - DNA, 25 bp, Homo sapien
ccgccgcttatgcacaagtacgagg

SEQ ID NO: 1065881 - DNA, 25 bp, Homo sapien
agataagcgagagcagggtgcccat

SEQ ID NO: 1065882 - DNA, 25 bp, Homo sapien
aagtacgaggagttcatgctgcgcc

SEQ ID NO: 1065883 - DNA, 25 bp, Homo sapien
gaaccagttgggagtcaccatctga

SEQ ID NO: 1065884 - DNA, 25 bp, Homo sapien
tgagagtctccgcaacatggcggcc

SEQ ID NO: 1065885 - DNA, 25 bp, Homo sapien
tactggaagtggcaatcaacctgtg

SEQ ID NO: 1065886 - DNA, 25 bp, Homo sapien
cagcgggctaggatctctgagagtc

SEQ ID NO: 1065887 - DNA, 25 bp, Homo sapien
caggcaagaaaacgctgggtctcct

SEQ ID NO: 1065888 - DNA, 25 bp, Homo sapien
tgcctcccactaggaagcctaaggg

SEQ ID NO: 1065889 - DNA, 25 bp, Homo sapien
ccacaagtttggtaagtaagcaaga

SEQ ID NO: 1065890 - DNA, 25 bp, Homo sapien
taatgcctcgcactttgtagaagct

SEQ ID NO: 1065891 - DNA, 25 bp, Homo sapien
cagcggctcattggagatgggccat

SEQ ID NO: 1065892 - DNA, 25 bp, Homo sapien
gtgtgcccagcggctcattggagat

SEQ ID NO: 1065893 - DNA, 25 bp, Homo sapien
gatgggtgccgggtctgtgtggata

SEQ ID NO: 1065894 - DNA, 25 bp, Homo sapien
cccagcggctcattggagatgggcc

SEQ ID NO: 1065895 - DNA, 25 bp, Homo sapien
ccgcacaaggataggaggaaacatt

SEQ ID NO: 1065896 - DNA, 25 bp, Homo sapien
tcatgtagtccgcacaaggatagga

SEQ ID NO: 1065897 - DNA, 25 bp, Homo sapien
tagtccgcacaaggataggaggaaa

SEQ ID NO: 1065898 - DNA, 25 bp, Homo sapien
gccttcatgtagtccgcacaaggat

SEQ ID NO: 1065899 - DNA, 25 bp, Homo sapien
ttgtactcttgttgtgtgcccaagg

SEQ ID NO: 1065900 - DNA, 25 bp, Homo sapien
tgtactcttgttgtgtgcccaaggc

SEQ ID NO: 1065901 - DNA, 25 bp, Homo sapien
tactcttgttgtgtgcccaaggcct

SEQ ID NO: 1065902 - DNA, 25 bp, Homo sapien
ccttgtactcttgttgtgtgcccaa

SEQ ID NO: 1065903 - DNA, 25 bp, Homo sapien
tgtgtggcatttgggggtgggcagg

SEQ ID NO: 1065904 - DNA, 25 bp, Homo sapien
tgggggtgggcaggcagtgacacac

SEQ ID NO: 1065905 - DNA, 25 bp, Homo sapien
atttgggggtgggcaggcagtgaca

SEQ ID NO: 1065906 - DNA, 25 bp, Homo sapien
gtggtagaggggcagtgtgtggcat

SEQ ID NO: 1065907 - DNA, 25 bp, Homo sapien
cagcgcccatggtggttaggtcccg

SEQ ID NO: 1065908 - DNA, 25 bp, Homo sapien
tggaacttggcgactacatgattag

SEQ ID NO: 1065909 - DNA, 25 bp, Homo sapien
gtaccagaagtggaacttggcgact

SEQ ID NO: 1065910 - DNA, 25 bp, Homo sapien
ggatgaagttggcccgggcgcggta

SEQ ID NO: 1065911 - DNA, 25 bp, Homo sapien
gttgggtctcctggtgaagcgtggc

SEQ ID NO: 1065912 - DNA, 25 bp, Homo sapien
ggtcaaggagaagggctagatttcc

SEQ ID NO: 1065913 - DNA, 25 bp, Homo sapien
gtcaaggagaagggctagatttcct

SEQ ID NO: 1065914 - DNA, 25 bp, Homo sapien
gtgacaggcatccattcctcatctt

SEQ ID NO: 1065915 - DNA, 25 bp, Homo sapien
tggtcaaggagaagggctagatttc

SEQ ID NO: 1065916 - DNA, 25 bp, Homo sapien
cacgggcgtggtcttcaaaacctca

SEQ ID NO: 1065917 - DNA, 25 bp, Homo sapien
ctgcttttgcacgggcgtggtcttc

SEQ ID NO: 1065918 - DNA, 25 bp, Homo sapien
gtatgctggtcagcgcaggtctgct

SEQ ID NO: 1065919 - DNA, 25 bp, Homo sapien
cctggtatgctggtcagcgcaggtc

SEQ ID NO: 1065920 - DNA, 25 bp, Homo sapien
ccactgtagtccccaatggcaacac

SEQ ID NO: 1065921 - DNA, 25 bp, Homo sapien
cactgtagtccccaatggcaacaca

SEQ ID NO: 1065922 - DNA, 25 bp, Homo sapien
tgtagtccccaatggcaacacacac

SEQ ID NO: 1065923 - DNA, 25 bp, Homo sapien
gtggccactgtagtccccaatggca

SEQ ID NO: 1065924 - DNA, 25 bp, Homo sapien
gggaaacttgatgaatatggtctct

SEQ ID NO: 1065925 - DNA, 25 bp, Homo sapien
cagatagctataattcttggagatg

SEQ ID NO: 1065926 - DNA, 25 bp, Homo sapien
gatagggaaacttgatgaatatggt

SEQ ID NO: 1065927 - DNA, 25 bp, Homo sapien
gttgagggtcagatagctataattc

SEQ ID NO: 1065928 - DNA, 25 bp, Homo sapien
tccaggtgcccagtccagattgagg

SEQ ID NO: 1065929 - DNA, 25 bp, Homo sapien
tgatgagctgctctcacagagggcc

SEQ ID NO: 1065930 - DNA, 25 bp, Homo sapien
aatggaaagacagagcatcagaggg

SEQ ID NO: 1065931 - DNA, 25 bp, Homo sapien
gaaagacagagcatcagagggcaag

SEQ ID NO: 1065932 - DNA, 25 bp, Homo sapien
cacaggcagccgtctcagattgcag

SEQ ID NO: 1065933 - DNA, 25 bp, Homo sapien
gaaggagccggttcccatctcttgt

SEQ ID NO: 1065934 - DNA, 25 bp, Homo sapien
caatgtgctggatttgcatagctcc

SEQ ID NO: 1065935 - DNA, 25 bp, Homo sapien
gaatcacccgtattccagaaaggct

SEQ ID NO: 1065936 - DNA, 25 bp, Homo sapien
gagctttgattactgactccggttc

SEQ ID NO: 1065937 - DNA, 25 bp, Homo sapien
ttactaggctacctactttcatgag

SEQ ID NO: 1065938 - DNA, 25 bp, Homo sapien
gctacctactttcatgagtaacctc

SEQ ID NO: 1065939 - DNA, 25 bp, Homo sapien
catttactctggactggtgaaaata

SEQ ID NO: 1065940 - DNA, 25 bp, Homo sapien
cattgctcagttacgtgacagaccc

SEQ ID NO: 1065941 - DNA, 25 bp, Homo sapien
cagtcttatgggtcagatgcatcag

SEQ ID NO: 1065942 - DNA, 25 bp, Homo sapien
tatgcccaattcttcgaggccaggc

SEQ ID NO: 1065943 - DNA, 25 bp, Homo sapien
ccacagagcgttttcggttatgcaa

SEQ ID NO: 1065944 - DNA, 25 bp, Homo sapien
ggaagagggcaaaaaatcgtgcttc

SEQ ID NO: 1065945 - DNA, 25 bp, Homo sapien
taagggcaggcacatttgaaagaga

SEQ ID NO: 1065946 - DNA, 25 bp, Homo sapien
gagctgagttgtgctcagttcattc

SEQ ID NO: 1065947 - DNA, 25 bp, Homo sapien
tgtgcctgaccaatcatagtcctct

SEQ ID NO: 1065948 - DNA, 25 bp, Homo sapien
gtaaaaatcgattttctctcacttg

SEQ ID NO: 1065949 - DNA, 25 bp, Homo sapien
agtaaaaatcgattttctctcactt

SEQ ID NO: 1065950 - DNA, 25 bp, Homo sapien
gagggctctccaaccagaagttcca

SEQ ID NO: 1065951 - DNA, 25 bp, Homo sapien
gaactgtcacatcctggaatttggg

SEQ ID NO: 1065952 - DNA, 25 bp, Homo sapien
cacagctgttactctagggctcggt

SEQ ID NO: 1065953 - DNA, 25 bp, Homo sapien
aaggcagtagacctgggaactgtca

SEQ ID NO: 1065954 - DNA, 25 bp, Homo sapien
tccagctcttgtctgcgtcaggaac

SEQ ID NO: 1065955 - DNA, 25 bp, Homo sapien
tggtccagctcttgtctgcgtcagg

SEQ ID NO: 1065956 - DNA, 25 bp, Homo sapien
cagctcttgtctgcgtcaggaactg

SEQ ID NO: 1065957 - DNA, 25 bp, Homo sapien
ctcttgtctgcgtcaggaactgctc

SEQ ID NO: 1065958 - DNA, 25 bp, Homo sapien
taggtcttagagagtgggcaggacc

SEQ ID NO: 1065959 - DNA, 25 bp, Homo sapien
cttaggtcttagagagtgggcagga

SEQ ID NO: 1065960 - DNA, 25 bp, Homo sapien
ggtcttagagagtgggcaggaccag

SEQ ID NO: 1065961 - DNA, 25 bp, Homo sapien
ttaggtcttagagagtgggcaggac

SEQ ID NO: 1065962 - DNA, 25 bp, Homo sapien
gccatcccattggtcgattccgaca

SEQ ID NO: 1065963 - DNA, 25 bp, Homo sapien
ggaagtcagaactacagggccgccg

SEQ ID NO: 1065964 - DNA, 25 bp, Homo sapien
gattccgacataaagcattcagctc

SEQ ID NO: 1065965 - DNA, 25 bp, Homo sapien
gcggtggctacctcacgctggaagt

SEQ ID NO: 1065966 - DNA, 25 bp, Homo sapien
tttacacggcttcggcccataggtc

SEQ ID NO: 1065967 - DNA, 25 bp, Homo sapien
tctccccagggagtgaatcggatcc

SEQ ID NO: 1065968 - DNA, 25 bp, Homo sapien
cttaaaacgcatttacacggcttcg

SEQ ID NO: 1065969 - DNA, 25 bp, Homo sapien
gcccgccgctggcttatataacccc

SEQ ID NO: 1065970 - DNA, 25 bp, Homo sapien
gctccccaggccactttccgcactc

SEQ ID NO: 1065971 - DNA, 25 bp, Homo sapien
gcaccagggcggagggcgtccgctc

SEQ ID NO: 1065972 - DNA, 25 bp, Homo sapien
tccccaggccactttccgcactcgc

SEQ ID NO: 1065973 - DNA, 25 bp, Homo sapien
cagcaccagggcggagggcgtccgc

SEQ ID NO: 1065974 - DNA, 25 bp, Homo sapien
tgacctcgaaacttgtgcaacaccc

SEQ ID NO: 1065975 - DNA, 25 bp, Homo sapien
gccggtgacctcgaaacttgtgcaa

SEQ ID NO: 1065976 - DNA, 25 bp, Homo sapien
aaacttgtgcaacaccccgaggagg

SEQ ID NO: 1065977 - DNA, 25 bp, Homo sapien
gtcgccggtgacctcgaaacttgtg

SEQ ID NO: 1065978 - DNA, 25 bp, Homo sapien
gtagccggtggccacatcaaggcgt

SEQ ID NO: 1065979 - DNA, 25 bp, Homo sapien
gctctctactgcttgacctcgggta

SEQ ID NO: 1065980 - DNA, 25 bp, Homo sapien
tgctagaattctaggcgtgcctggg

SEQ ID NO: 1065981 - DNA, 25 bp, Homo sapien
gagcaagagcttaagttcgagtccg

SEQ ID NO: 1065982 - DNA, 25 bp, Homo sapien
caaggcaccgtatgcccaaatgtca

SEQ ID NO: 1065983 - DNA, 25 bp, Homo sapien
gatttcagacggagacaaggcaccg

SEQ ID NO: 1065984 - DNA, 25 bp, Homo sapien
aatgtcactgcctctccgagtcagt

SEQ ID NO: 1065985 - DNA, 25 bp, Homo sapien
cgagtcagttgctccctctgtaaaa

SEQ ID NO: 1065986 - DNA, 25 bp, Homo sapien
gaggagctgacgggctggatggagc

SEQ ID NO: 1065987 - DNA, 25 bp, Homo sapien
aggaggagctgacgggctggatgga

SEQ ID NO: 1065988 - DNA, 25 bp, Homo sapien
ggaggagctgacgggctggatggag

SEQ ID NO: 1065989 - DNA, 25 bp, Homo sapien
tccttcagcaggtctcgggtactga

SEQ ID NO: 1065990 - DNA, 25 bp, Homo sapien
caaagtccgattcactcaggtagcc

SEQ ID NO: 1065991 - DNA, 25 bp, Homo sapien
ggcccccagagtgagttccttcagc

SEQ ID NO: 1065992 - DNA, 25 bp, Homo sapien
accatcacaaagtccgattcactca

SEQ ID NO: 1065993 - DNA, 25 bp, Homo sapien
gcatggtaatagcatcattgggcac

SEQ ID NO: 1065994 - DNA, 25 bp, Homo sapien
caaggattgcgtaccaaataagcga

SEQ ID NO: 1065995 - DNA, 25 bp, Homo sapien
gaggttccacataagcacactggag

SEQ ID NO: 1065996 - DNA, 25 bp, Homo sapien
gaggcagaattcacagagcttggta

SEQ ID NO: 1065997 - DNA, 25 bp, Homo sapien
ggcgatcaggaaaggcaacactgat

SEQ ID NO: 1065998 - DNA, 25 bp, Homo sapien
ctggggcgatcaggaaaggcaacac

SEQ ID NO: 1065999 - DNA, 25 bp, Homo sapien
gggcgatcaggaaaggcaacactga

SEQ ID NO: 1066000 - DNA, 25 bp, Homo sapien
tggggcgatcaggaaaggcaacact

SEQ ID NO: 1066001 - DNA, 25 bp, Homo sapien
gttagatggcagtttctacaaggtg

SEQ ID NO: 1066002 - DNA, 25 bp, Homo sapien
ccattcagcagatgttagatggcag

SEQ ID NO: 1066003 - DNA, 25 bp, Homo sapien
tttctacaaggtgcaatgcaggggc

SEQ ID NO: 1066004 - DNA, 25 bp, Homo sapien
tctacaaggtgcaatgcaggggcat

SEQ ID NO: 1066005 - DNA, 25 bp, Homo sapien
ccaaacgttatgctaagggacagag

SEQ ID NO: 1066006 - DNA, 25 bp, Homo sapien
gatgaatgtgagaccccatccagct

SEQ ID NO: 1066007 - DNA, 25 bp, Homo sapien
gaagccttaagctagtcccactgac

SEQ ID NO: 1066008 - DNA, 25 bp, Homo sapien
tatgcttccaaggtatcagaactgc

SEQ ID NO: 1066009 - DNA, 25 bp, Homo sapien
cttgttggcacagctaaagcccagc

SEQ ID NO: 1066010 - DNA, 25 bp, Homo sapien
caaaagtgcttcctcactatggcac

SEQ ID NO: 1066011 - DNA, 25 bp, Homo sapien
acccaggtcagccacgaagaaggca

SEQ ID NO: 1066012 - DNA, 25 bp, Homo sapien
gcacttgacagcataaaagggccgg

SEQ ID NO: 1066013 - DNA, 25 bp, Homo sapien
atctaaagtggctatgcgcggtggc

SEQ ID NO: 1066014 - DNA, 25 bp, Homo sapien
cacgctgtaggagttcagtagatac

SEQ ID NO: 1066015 - DNA, 25 bp, Homo sapien
cctagcacagtgactacacgctgta

SEQ ID NO: 1066016 - DNA, 25 bp, Homo sapien
aattctgtattgctagccctgccta

SEQ ID NO: 1066017 - DNA, 25 bp, Homo sapien
caaatccccacctagaataatgctt

SEQ ID NO: 1066018 - DNA, 25 bp, Homo sapien
tgccaaatccccacctagaataatg

SEQ ID NO: 1066019 - DNA, 25 bp, Homo sapien
gccaaatccccacctagaataatgc

SEQ ID NO: 1066020 - DNA, 25 bp, Homo sapien
actgccaaatccccacctagaataa

SEQ ID NO: 1066021 - DNA, 25 bp, Homo sapien
ctttgccagctccatctcattgtca

SEQ ID NO: 1066022 - DNA, 25 bp, Homo sapien
gcagatgatcttactggcagggatt

SEQ ID NO: 1066023 - DNA, 25 bp, Homo sapien
tgatctgtgcaatttgcttacaggg

SEQ ID NO: 1066024 - DNA, 25 bp, Homo sapien
aaagctcagcagctggatcccatgc

SEQ ID NO: 1066025 - DNA, 25 bp, Homo sapien
tgatgagacacgcagtgcccctctg

SEQ ID NO: 1066026 - DNA, 25 bp, Homo sapien
atgagacacgcagtgcccctctgct

SEQ ID NO: 1066027 - DNA, 25 bp, Homo sapien
gagacacgcagtgcccctctgctgg

SEQ ID NO: 1066028 - DNA, 25 bp, Homo sapien
ctgatgagacacgcagtgcccctct

SEQ ID NO: 1066029 - DNA, 25 bp, Homo sapien
caggtgtctgcaggatttcagtgac

SEQ ID NO: 1066030 - DNA, 25 bp, Homo sapien
ctccaaactttaggctcaggcagct

SEQ ID NO: 1066031 - DNA, 25 bp, Homo sapien
catcggtagcaatgcacagaaccat

SEQ ID NO: 1066032 - DNA, 25 bp, Homo sapien
tcttcgcattttcaagcaggtgtct

SEQ ID NO: 1066033 - DNA, 25 bp, Homo sapien
catttcaaacacgagccgggcgtct

SEQ ID NO: 1066034 - DNA, 25 bp, Homo sapien
tgcgatggactgagcataggcctga

SEQ ID NO: 1066035 - DNA, 25 bp, Homo sapien
cgtctgcgatggactgagcataggc

SEQ ID NO: 1066036 - DNA, 25 bp, Homo sapien
cttgtgacccagctcggtgcccatt

SEQ ID NO: 1066037 - DNA, 25 bp, Homo sapien
gggaagccaccaccaaggtccagaa

SEQ ID NO: 1066038 - DNA, 25 bp, Homo sapien
caccaccaaggtccagaacgtgcat

SEQ ID NO: 1066039 - DNA, 25 bp, Homo sapien
tgccagggaagccaccaccaaggtc

SEQ ID NO: 1066040 - DNA, 25 bp, Homo sapien
tttggccccttctgtgccagggaag

SEQ ID NO: 1066041 - DNA, 25 bp, Homo sapien
acagtgaaggccgaggtcacgtagt

SEQ ID NO: 1066042 - DNA, 25 bp, Homo sapien
aaggccgaggtcacgtagtagcgcc

SEQ ID NO: 1066043 - DNA, 25 bp, Homo sapien
gtagtagcgccccagctcagcaaag

SEQ ID NO: 1066044 - DNA, 25 bp, Homo sapien
gaggtcacgtagtagcgccccagct

SEQ ID NO: 1066045 - DNA, 25 bp, Homo sapien
cctccctgccaggctggtctagcag

SEQ ID NO: 1066046 - DNA, 25 bp, Homo sapien
tccctgccaggctggtctagcagaa

SEQ ID NO: 1066047 - DNA, 25 bp, Homo sapien
ccctgccaggctggtctagcagaac

SEQ ID NO: 1066048 - DNA, 25 bp, Homo sapien
ctccctgccaggctggtctagcaga

SEQ ID NO: 1066049 - DNA, 25 bp, Homo sapien
agccaaccactatctgaagcttcag

SEQ ID NO: 1066050 - DNA, 25 bp, Homo sapien
gctcagccaaccactatctgaagct

SEQ ID NO: 1066051 - DNA, 25 bp, Homo sapien
ctgctcagccaaccactatctgaag

SEQ ID NO: 1066052 - DNA, 25 bp, Homo sapien
ccaaccactatctgaagcttcaggg

SEQ ID NO: 1066053 - DNA, 25 bp, Homo sapien
tcagaggcagcacaagtagcaatgt

SEQ ID NO: 1066054 - DNA, 25 bp, Homo sapien
agggttcagaggcagcacaagtagc

SEQ ID NO: 1066055 - DNA, 25 bp, Homo sapien
aggcagcacaagtagcaatgtgagg

SEQ ID NO: 1066056 - DNA, 25 bp, Homo sapien
caagtagcaatgtgagggggtggta

SEQ ID NO: 1066057 - DNA, 25 bp, Homo sapien
tgagttgaagatcccatacacgccc

SEQ ID NO: 1066058 - DNA, 25 bp, Homo sapien
catacacgccctcatcaaggtggta

SEQ ID NO: 1066059 - DNA, 25 bp, Homo sapien
ttgtcaaacaggactgagttgaaga

SEQ ID NO: 1066060 - DNA, 25 bp, Homo sapien
caaggtggtacacgatggtcttgga

SEQ ID NO: 1066061 - DNA, 25 bp, Homo sapien
aatgaaatgaatggactctagagac

SEQ ID NO: 1066062 - DNA, 25 bp, Homo sapien
aatggactctagagacatgtagcag

SEQ ID NO: 1066063 - DNA, 25 bp, Homo sapien
acatgtagcagggtgagtggttctt

SEQ ID NO: 1066064 - DNA, 25 bp, Homo sapien
catgtagcagggtgagtggttctta

SEQ ID NO: 1066065 - DNA, 25 bp, Homo sapien
cagtctggcaatactccatgctgga

SEQ ID NO: 1066066 - DNA, 25 bp, Homo sapien
agttccgggaaacacatttggccag

SEQ ID NO: 1066067 - DNA, 25 bp, Homo sapien
cttgctcactcatcagagagaggga

SEQ ID NO: 1066068 - DNA, 25 bp, Homo sapien
gccatatggaagagctagcagcgtg

SEQ ID NO: 1066069 - DNA, 25 bp, Homo sapien
tgaaagaaacaatggccgggtacag

SEQ ID NO: 1066070 - DNA, 25 bp, Homo sapien
tgcaagctcatttctatgtgcaaga

SEQ ID NO: 1066071 - DNA, 25 bp, Homo sapien
aagacctcccaaattaagtgaacag

SEQ ID NO: 1066072 - DNA, 25 bp, Homo sapien
gataatctataacagcagagcacaa

SEQ ID NO: 1066073 - DNA, 25 bp, Homo sapien
gtaagaaagccccatcttggcaata

SEQ ID NO: 1066074 - DNA, 25 bp, Homo sapien
tgctagtagtggtctcttatgatcc

SEQ ID NO: 1066075 - DNA, 25 bp, Homo sapien
ccagtaaagccataaggtcctgggc

SEQ ID NO: 1066076 - DNA, 25 bp, Homo sapien
tcttagtctagggacacacttggta

SEQ ID NO: 1066077 - DNA, 25 bp, Homo sapien
aggaagaagggatggccatgccagc

SEQ ID NO: 1066078 - DNA, 25 bp, Homo sapien
gaagaagggatggccatgccagctc

SEQ ID NO: 1066079 - DNA, 25 bp, Homo sapien
ctgtaggaagaagggatggccatgc

SEQ ID NO: 1066080 - DNA, 25 bp, Homo sapien
agaagggatggccatgccagctctc

SEQ ID NO: 1066081 - DNA, 25 bp, Homo sapien
caaatgtcacttgtagtacactcgt

SEQ ID NO: 1066082 - DNA, 25 bp, Homo sapien
acgagtgtactacaagtgacatttg

SEQ ID NO: 1066083 - DNA, 25 bp, Homo sapien
gccacccgggacatggcataggtga

SEQ ID NO: 1066084 - DNA, 25 bp, Homo sapien
cctacgtgtagttgcggcagccaca

SEQ ID NO: 1066085 - DNA, 25 bp, Homo sapien
catgttgtcaaagaccagccagtcc

SEQ ID NO: 1066086 - DNA, 25 bp, Homo sapien
tgcccacagtgtaggcgcccatgtt

SEQ ID NO: 1066087 - DNA, 25 bp, Homo sapien
tgctgtcaaagcgtgtcactcggcc

SEQ ID NO: 1066088 - DNA, 25 bp, Homo sapien
tcaggtctcagctttggtgacagtc

SEQ ID NO: 1066089 - DNA, 25 bp, Homo sapien
tagtagaactaggactgaacccaac

SEQ ID NO: 1066090 - DNA, 25 bp, Homo sapien
tgacctctctgtgataacgctgacc

SEQ ID NO: 1066091 - DNA, 25 bp, Homo sapien
ggcccacgcacagggtgtctgtgat

SEQ ID NO: 1066092 - DNA, 25 bp, Homo sapien
ccacgcacagggtgtctgtgatctc

SEQ ID NO: 1066093 - DNA, 25 bp, Homo sapien
aggacagaggcttgcacacaccctc

SEQ ID NO: 1066094 - DNA, 25 bp, Homo sapien
cccagccgcaggacagaggcttgca

SEQ ID NO: 1066095 - DNA, 25 bp, Homo sapien
tgtaagactggtcctatttacaggg

SEQ ID NO: 1066096 - DNA, 25 bp, Homo sapien
cagagtcctggccaagggtaccctt

SEQ ID NO: 1066097 - DNA, 25 bp, Homo sapien
tgttgcatacttgaactacagcgag

SEQ ID NO: 1066098 - DNA, 25 bp, Homo sapien
agatgcatctctgaggccccgctgg

SEQ ID NO: 1066099 - DNA, 25 bp, Homo sapien
gagaccaaaggagaccccaagaaca

SEQ ID NO: 1066100 - DNA, 25 bp, Homo sapien
atttgcattatatttacaaaggtgg

SEQ ID NO: 1066101 - DNA, 25 bp, Homo sapien
gcattatatttacaaaggtgggaag

SEQ ID NO: 1066102 - DNA, 25 bp, Homo sapien
ttgcattatatttacaaaggtggga

SEQ ID NO: 1066103 - DNA, 25 bp, Homo sapien
gaccaccaggtgtctgctttactct

SEQ ID NO: 1066104 - DNA, 25 bp, Homo sapien
gctttactctgactgccttgccaac

SEQ ID NO: 1066105 - DNA, 25 bp, Homo sapien
ctaacaggcactgcccaaagaagca

SEQ ID NO: 1066106 - DNA, 25 bp, Homo sapien
cgtggccagccctgttctaacaggc

SEQ ID NO: 1066107 - DNA, 25 bp, Homo sapien
gatgcgcaaataagcccacttccgg

SEQ ID NO: 1066108 - DNA, 25 bp, Homo sapien
aactgtggcagagagtaacttaggc

SEQ ID NO: 1066109 - DNA, 25 bp, Homo sapien
cattaagacgcactgcacaggcctg

SEQ ID NO: 1066110 - DNA, 25 bp, Homo sapien
cacaggcctgtgtcgattaattgaa

SEQ ID NO: 1066111 - DNA, 25 bp, Homo sapien
gacagtctgtgtaccgcctttatca

SEQ ID NO: 1066112 - DNA, 25 bp, Homo sapien
ctggtctggaatgctcccctcaact

SEQ ID NO: 1066113 - DNA, 25 bp, Homo sapien
taccattcccttgtacacgccagtg

SEQ ID NO: 1066114 - DNA, 25 bp, Homo sapien
gaaagggctctgaatcatcaaacta

SEQ ID NO: 1066115 - DNA, 25 bp, Homo sapien
gaagccggtggctaacataacagac

SEQ ID NO: 1066116 - DNA, 25 bp, Homo sapien
cacagatttagaccctcagagccct

SEQ ID NO: 1066117 - DNA, 25 bp, Homo sapien
tgtctcatagccacaggaagccggt

SEQ ID NO: 1066118 - DNA, 25 bp, Homo sapien
tctctgcaaccaagttatgaacagt

SEQ ID NO: 1066119 - DNA, 25 bp, Homo sapien
ggaaggagggtggtcatatttatgt

SEQ ID NO: 1066120 - DNA, 25 bp, Homo sapien
cgcccagatccatgaatggttttaa

SEQ ID NO: 1066121 - DNA, 25 bp, Homo sapien
tatgtggagtgaaacacagctggag

SEQ ID NO: 1066122 - DNA, 25 bp, Homo sapien
acccagcgggaaagcagcaaggctg

SEQ ID NO: 1066123 - DNA, 25 bp, Homo sapien
tagaccagccttttttctacgtgag

SEQ ID NO: 1066124 - DNA, 25 bp, Homo sapien
cgtgagtctattctacgtaaatcaa

SEQ ID NO: 1066125 - DNA, 25 bp, Homo sapien
aactagctaggactattattgggcg

SEQ ID NO: 1066126 - DNA, 25 bp, Homo sapien
tgttattccatgttagtctacagca

SEQ ID NO: 1066127 - DNA, 25 bp, Homo sapien
agtcagggccagatccaagtctcct

SEQ ID NO: 1066128 - DNA, 25 bp, Homo sapien
cccagcctccccagtcttgctgaac

SEQ ID NO: 1066129 - DNA, 25 bp, Homo sapien
tccccagtcttgctgaacaggcttt

SEQ ID NO: 1066130 - DNA, 25 bp, Homo sapien
agcctccccagtcttgctgaacagg

SEQ ID NO: 1066131 - DNA, 25 bp, Homo sapien
ctgaacaggctttctggggccacat

SEQ ID NO: 1066132 - DNA, 25 bp, Homo sapien
tgacgttaagcccttcctcatgcgg

SEQ ID NO: 1066133 - DNA, 25 bp, Homo sapien
gcagaactttcaactaggagagggt

SEQ ID NO: 1066134 - DNA, 25 bp, Homo sapien
aattgagcctttgtagagcctccca

SEQ ID NO: 1066135 - DNA, 25 bp, Homo sapien
tatagcccgtgtcgtcctgacgtta

SEQ ID NO: 1066136 - DNA, 25 bp, Homo sapien
agctgctcaagcgacaactggcgga

SEQ ID NO: 1066137 - DNA, 25 bp, Homo sapien
gactctgaaaggtagggccaaactc

SEQ ID NO: 1066138 - DNA, 25 bp, Homo sapien
tcgattgtcacagaagcctctaggg

SEQ ID NO: 1066139 - DNA, 25 bp, Homo sapien
gctatggaccaatacccacctgtgg

SEQ ID NO: 1066140 - DNA, 25 bp, Homo sapien
gactcagtccagtgttgttttccca

SEQ ID NO: 1066141 - DNA, 25 bp, Homo sapien
ggttgacacgctccccattttgcag

SEQ ID NO: 1066142 - DNA, 25 bp, Homo sapien
agatttggaggtgagttctgtcttg

SEQ ID NO: 1066143 - DNA, 25 bp, Homo sapien
tccatctctgcttgaacactcagag

SEQ ID NO: 1066144 - DNA, 25 bp, Homo sapien
tgttgagaaactgctgttgcatgag

SEQ ID NO: 1066145 - DNA, 25 bp, Homo sapien
gagcaaccaactatttttctcgcaa

SEQ ID NO: 1066146 - DNA, 25 bp, Homo sapien
gaaaatgttgagaaactgctgttgc

SEQ ID NO: 1066147 - DNA, 25 bp, Homo sapien
tgctgttgcatgagcaaccaactat

SEQ ID NO: 1066148 - DNA, 25 bp, Homo sapien
ggacctgcccaaaccgtcactggca

SEQ ID NO: 1066149 - DNA, 25 bp, Homo sapien
cctttagtttttcaggctggacctg

SEQ ID NO: 1066150 - DNA, 25 bp, Homo sapien
aaaacccctctctgccataggcttc

SEQ ID NO: 1066151 - DNA, 25 bp, Homo sapien
gcccaaaccgtcactggcaagagga

SEQ ID NO: 1066152 - DNA, 25 bp, Homo sapien
ttagtcaccaagtctcactcggctg

SEQ ID NO: 1066153 - DNA, 25 bp, Homo sapien
ggtgcacgtcagtatatcagttggg

SEQ ID NO: 1066154 - DNA, 25 bp, Homo sapien
tgtatgatctctagtggaccagcca

SEQ ID NO: 1066155 - DNA, 25 bp, Homo sapien
tatatgtgagaatgcttagcaagcc

SEQ ID NO: 1066156 - DNA, 25 bp, Homo sapien
tgcagtcaggatctctaagtcttag

SEQ ID NO: 1066157 - DNA, 25 bp, Homo sapien
gagtatgaatggaagcagatggcat

SEQ ID NO: 1066158 - DNA, 25 bp, Homo sapien
tcagaccactcaaccacatcagatg

SEQ ID NO: 1066159 - DNA, 25 bp, Homo sapien
gaagcagatggcatacactgcagtc

SEQ ID NO: 1066160 - DNA, 25 bp, Homo sapien
ggccatgtgctggccttttctgcct

SEQ ID NO: 1066161 - DNA, 25 bp, Homo sapien
gcctgggaacaccatatcttcctgt

SEQ ID NO: 1066162 - DNA, 25 bp, Homo sapien
tgcctgggaacaccatatcttcctg

SEQ ID NO: 1066163 - DNA, 25 bp, Homo sapien
cacggccatgtgctggccttttctg

SEQ ID NO: 1066164 - DNA, 25 bp, Homo sapien
ccctctcctggccagcacatctcac

SEQ ID NO: 1066165 - DNA, 25 bp, Homo sapien
cttcggccatgccttgttcccagta

SEQ ID NO: 1066166 - DNA, 25 bp, Homo sapien
tgttcccagtataagggaggagtag

SEQ ID NO: 1066167 - DNA, 25 bp, Homo sapien
tagtcatgcccatcagaaacccatt

SEQ ID NO: 1066168 - DNA, 25 bp, Homo sapien
catagtcatgcccatcagaaaccca

SEQ ID NO: 1066169 - DNA, 25 bp, Homo sapien
tccttccctacaaagcccacagcct

SEQ ID NO: 1066170 - DNA, 25 bp, Homo sapien
ctttccttccctacaaagcccacag

SEQ ID NO: 1066171 - DNA, 25 bp, Homo sapien
tttccttccctacaaagcccacagc

SEQ ID NO: 1066172 - DNA, 25 bp, Homo sapien
cttccctacaaagcccacagcctcc

SEQ ID NO: 1066173 - DNA, 25 bp, Homo sapien
gaaatgcagtttacttgtgggccca

SEQ ID NO: 1066174 - DNA, 25 bp, Homo sapien
taacacagccttcgaggtttccctg

SEQ ID NO: 1066175 - DNA, 25 bp, Homo sapien
tggttccagcgtctttaacacagcc

SEQ ID NO: 1066176 - DNA, 25 bp, Homo sapien
ggctccacctggctacaagaggcct

SEQ ID NO: 1066177 - DNA, 25 bp, Homo sapien
cccgtgctggatcctcgcagcacat

SEQ ID NO: 1066178 - DNA, 25 bp, Homo sapien
gtgctggatcctcgcagcacatctg

SEQ ID NO: 1066179 - DNA, 25 bp, Homo sapien
cgtgctggatcctcgcagcacatct

SEQ ID NO: 1066180 - DNA, 25 bp, Homo sapien
ccccatctgggctgacaatcctccc

SEQ ID NO: 1066181 - DNA, 25 bp, Homo sapien
cctaggccggatccccgacggatgg

SEQ ID NO: 1066182 - DNA, 25 bp, Homo sapien
tctatcagaggtggcaccggctgtc

SEQ ID NO: 1066183 - DNA, 25 bp, Homo sapien
gacctgctcaaaatccaggccgatt

SEQ ID NO: 1066184 - DNA, 25 bp, Homo sapien
gcagtggctcctctcgcagagtcta

SEQ ID NO: 1066185 - DNA, 25 bp, Homo sapien
gcgcctccgggacgcggccgcagcc

SEQ ID NO: 1066186 - DNA, 25 bp, Homo sapien
tgctggcggcgcctccgggacgcgg

SEQ ID NO: 1066187 - DNA, 25 bp, Homo sapien
ggctgtgctggcggcgcctccggga

SEQ ID NO: 1066188 - DNA, 25 bp, Homo sapien
cggcggcccgagcagggccgggctg

SEQ ID NO: 1066189 - DNA, 25 bp, Homo sapien
ccccgaaaggctcgcggctctcgcc

SEQ ID NO: 1066190 - DNA, 25 bp, Homo sapien
cgaaaggctcgcggctctcgccaaa

SEQ ID NO: 1066191 - DNA, 25 bp, Homo sapien
aaggctcgcggctctcgccaaagaa

SEQ ID NO: 1066192 - DNA, 25 bp, Homo sapien
tccccgaaaggctcgcggctctcgc

SEQ ID NO: 1066193 - DNA, 25 bp, Homo sapien
tctggatgtttacacagtcactggg

SEQ ID NO: 1066194 - DNA, 25 bp, Homo sapien
tgggttcagcagaagaattagagag

SEQ ID NO: 1066195 - DNA, 25 bp, Homo sapien
cagtctgacattctttgggtggggt

SEQ ID NO: 1066196 - DNA, 25 bp, Homo sapien
aaacctagaagagtccttcccacag

SEQ ID NO: 1066197 - DNA, 25 bp, Homo sapien
cattcaacaatgcaccgaggctgtc

SEQ ID NO: 1066198 - DNA, 25 bp, Homo sapien
gaaatcctgagggttcatgcggtct

SEQ ID NO: 1066199 - DNA, 25 bp, Homo sapien
caattaccctggatgagtgccgagc

SEQ ID NO: 1066200 - DNA, 25 bp, Homo sapien
tattcacaagggaggtgcagcactt

SEQ ID NO: 1066201 - DNA, 25 bp, Homo sapien
ctgaatttctcacctccgggtctct

SEQ ID NO: 1066202 - DNA, 25 bp, Homo sapien
gcaacttccctaggtcccagtgcca

SEQ ID NO: 1066203 - DNA, 25 bp, Homo sapien
catctcctgcaacttccctaggtcc

SEQ ID NO: 1066204 - DNA, 25 bp, Homo sapien
tctctttgtccctgaatttctcacc

SEQ ID NO: 1066205 - DNA, 25 bp, Homo sapien
cctcttctacggagctttccctgaa

SEQ ID NO: 1066206 - DNA, 25 bp, Homo sapien
tgttccctcttctacggagctttcc

SEQ ID NO: 1066207 - DNA, 25 bp, Homo sapien
tccctcttctacggagctttccctg

SEQ ID NO: 1066208 - DNA, 25 bp, Homo sapien
agtgttccctcttctacggagcttt

SEQ ID NO: 1066209 - DNA, 25 bp, Homo sapien
ttcccacttggtgaacttctactca

SEQ ID NO: 1066210 - DNA, 25 bp, Homo sapien
tcccacttggtgaacttctactcat

SEQ ID NO: 1066211 - DNA, 25 bp, Homo sapien
ctttcccacttggtgaacttctact

SEQ ID NO: 1066212 - DNA, 25 bp, Homo sapien
tttcccacttggtgaacttctactc

SEQ ID NO: 1066213 - DNA, 25 bp, Homo sapien
aacatgcggacagacagcaccaaac

SEQ ID NO: 1066214 - DNA, 25 bp, Homo sapien
acacagccacaggaacatgcggaca

SEQ ID NO: 1066215 - DNA, 25 bp, Homo sapien
gacacaaatgacagatacagacctg

SEQ ID NO: 1066216 - DNA, 25 bp, Homo sapien
gcagctgccgtgaggaggaacccac

SEQ ID NO: 1066217 - DNA, 25 bp, Homo sapien
ttccagaaggtttgtcttcctgcta

SEQ ID NO: 1066218 - DNA, 25 bp, Homo sapien
ccagaaggtttgtcttcctgctacc

SEQ ID NO: 1066219 - DNA, 25 bp, Homo sapien
ggctatctcagtcttccagaaggtt

SEQ ID NO: 1066220 - DNA, 25 bp, Homo sapien
ctatctcagtcttccagaaggtttg

SEQ ID NO: 1066221 - DNA, 25 bp, Homo sapien
aaggcctggggcgagcacccctcag

SEQ ID NO: 1066222 - DNA, 25 bp, Homo sapien
aagagagcgactgtcaccgggaaga

SEQ ID NO: 1066223 - DNA, 25 bp, Homo sapien
actgtcaccgggaagagagccctcc

SEQ ID NO: 1066224 - DNA, 25 bp, Homo sapien
tgcgcccactcaagtcagggccagt

SEQ ID NO: 1066225 - DNA, 25 bp, Homo sapien
ggttgttaaatcgaggctcggccat

SEQ ID NO: 1066226 - DNA, 25 bp, Homo sapien
gggttgttaaatcgaggctcggcca

SEQ ID NO: 1066227 - DNA, 25 bp, Homo sapien
tgatcttgttaatcagaaccaggtt

SEQ ID NO: 1066228 - DNA, 25 bp, Homo sapien
tgaggcggcctgatcttctcggcca

SEQ ID NO: 1066229 - DNA, 25 bp, Homo sapien
gcagcgacatgacggcctggctgct

SEQ ID NO: 1066230 - DNA, 25 bp, Homo sapien
actagcaacggctgctgcgacgagg

SEQ ID NO: 1066231 - DNA, 25 bp, Homo sapien
ccttgatctttttgcggccgcgttc

SEQ ID NO: 1066232 - DNA, 25 bp, Homo sapien
acgaggcgatgaggcggctctggct

SEQ ID NO: 1066233 - DNA, 25 bp, Homo sapien
ggccctggattgtcttgatggagtc

SEQ ID NO: 1066234 - DNA, 25 bp, Homo sapien
cccgcgcttgactcagaagtgctca

SEQ ID NO: 1066235 - DNA, 25 bp, Homo sapien
tcagagagaccttgcacctgggaca

SEQ ID NO: 1066236 - DNA, 25 bp, Homo sapien
gacaggttcacgtgggaagatcccc

SEQ ID NO: 1066237 - DNA, 25 bp, Homo sapien
tatatcccacggttctgggcaggag

SEQ ID NO: 1066238 - DNA, 25 bp, Homo sapien
cagagcctggagcataggttacacc

SEQ ID NO: 1066239 - DNA, 25 bp, Homo sapien
cctctgtgtgcgacttggagtggat

SEQ ID NO: 1066240 - DNA, 25 bp, Homo sapien
caggtaggaggcgttggcaaaggac

SEQ ID NO: 1066241 - DNA, 25 bp, Homo sapien
tctctgacttggtgaaaaaggtcag

SEQ ID NO: 1066242 - DNA, 25 bp, Homo sapien
tgccggaaggacttatcacagtagg

SEQ ID NO: 1066243 - DNA, 25 bp, Homo sapien
tgaggtccacaagggccgtgacccc

SEQ ID NO: 1066244 - DNA, 25 bp, Homo sapien
ggagaaggtccttgcccctccttgc

SEQ ID NO: 1066245 - DNA, 25 bp, Homo sapien
tgaccccgagggcaatgggcacctg

SEQ ID NO: 1066246 - DNA, 25 bp, Homo sapien
ccgtgaccccgagggcaatgggcac

SEQ ID NO: 1066247 - DNA, 25 bp, Homo sapien
ccagctagagcaatcagggagggct

SEQ ID NO: 1066248 - DNA, 25 bp, Homo sapien
tgctatgatggacatgcacagagcc

SEQ ID NO: 1066249 - DNA, 25 bp, Homo sapien
tctggtaaaggacacagcatgtgca

SEQ ID NO: 1066250 - DNA, 25 bp, Homo sapien
gcagataaagagacacgggcgtgac

SEQ ID NO: 1066251 - DNA, 25 bp, Homo sapien
cctttcacacactcaactagactgt

SEQ ID NO: 1066252 - DNA, 25 bp, Homo sapien
aagcatttatagctttgagtctccc

SEQ ID NO: 1066253 - DNA, 25 bp, Homo sapien
ccacgaaggcagagattttcgtctg

SEQ ID NO: 1066254 - DNA, 25 bp, Homo sapien
actagactgtatgccccacgaaggc

SEQ ID NO: 1066255 - DNA, 25 bp, Homo sapien
gagcccttctgtatagtattagtcc

SEQ ID NO: 1066256 - DNA, 25 bp, Homo sapien
cagagggactgcaatcttggtaatc

SEQ ID NO: 1066257 - DNA, 25 bp, Homo sapien
tgagaaaacggtgctgcttcccctc

SEQ ID NO: 1066258 - DNA, 25 bp, Homo sapien
tattggcaaacacgtgacaatgctc

SEQ ID NO: 1066259 - DNA, 25 bp, Homo sapien
caaatttgtaaccatggctgtgcca

SEQ ID NO: 1066260 - DNA, 25 bp, Homo sapien
tgtataggcacaatctggcagaggt

SEQ ID NO: 1066261 - DNA, 25 bp, Homo sapien
gcaggctaactaacccaggatcaga

SEQ ID NO: 1066262 - DNA, 25 bp, Homo sapien
gaaaccggactggacctgcttatgg

SEQ ID NO: 1066263 - DNA, 25 bp, Homo sapien
ggcatgtacataacatcactctgtc

SEQ ID NO: 1066264 - DNA, 25 bp, Homo sapien
gctgcaatgatcattaggcatgtac

SEQ ID NO: 1066265 - DNA, 25 bp, Homo sapien
cctttgcaccctgaataaacagaca

SEQ ID NO: 1066266 - DNA, 25 bp, Homo sapien
cagagtcactctgtctagttctagt

SEQ ID NO: 1066267 - DNA, 25 bp, Homo sapien
tgggcacttgtagggtctgtcgcct

SEQ ID NO: 1066268 - DNA, 25 bp, Homo sapien
gctgagtgaaagccttctcgcagcc

SEQ ID NO: 1066269 - DNA, 25 bp, Homo sapien
ctgagtgaaagccttctcgcagcca

SEQ ID NO: 1066270 - DNA, 25 bp, Homo sapien
cttgtccttgttgtgctggcgctgg

SEQ ID NO: 1066271 - DNA, 25 bp, Homo sapien
tgcaaagaagcggagtccgaatagg

SEQ ID NO: 1066272 - DNA, 25 bp, Homo sapien
cggagtccgaataggcccggtagca

SEQ ID NO: 1066273 - DNA, 25 bp, Homo sapien
ccggtagcagttgggacacttgtag

SEQ ID NO: 1066274 - DNA, 25 bp, Homo sapien
gaggtgtaggcccgcccacacatgc

SEQ ID NO: 1066275 - DNA, 25 bp, Homo sapien
tgcttgatggcgtgggccgagaggt

SEQ ID NO: 1066276 - DNA, 25 bp, Homo sapien
cttggcgtgcttgatggcgtgggcc

SEQ ID NO: 1066277 - DNA, 25 bp, Homo sapien
cgaggtgtaggcccgcccacacatg

SEQ ID NO: 1066278 - DNA, 25 bp, Homo sapien
ggatgccgggggactccgtcctctg

SEQ ID NO: 1066279 - DNA, 25 bp, Homo sapien
tcctctggggcgagtgatggctcac

SEQ ID NO: 1066280 - DNA, 25 bp, Homo sapien
ttggacatgtgcttcatcaggtagg

SEQ ID NO: 1066281 - DNA, 25 bp, Homo sapien
tgtttggacatgtgcttcatcaggt

SEQ ID NO: 1066282 - DNA, 25 bp, Homo sapien
tacaccgacacgcatggctttcaga

SEQ ID NO: 1066283 - DNA, 25 bp, Homo sapien
tctgagatcgtctttggatgccacc

SEQ ID NO: 1066284 - DNA, 25 bp, Homo sapien
ctttgcagtccagaaacctaggccc

SEQ ID NO: 1066285 - DNA, 25 bp, Homo sapien
taaatttctcggtcttagcagcacc

SEQ ID NO: 1066286 - DNA, 25 bp, Homo sapien
atacaaagagcagagggtttgtaat

SEQ ID NO: 1066287 - DNA, 25 bp, Homo sapien
cttcctgaagtgtctgaggggcacc

SEQ ID NO: 1066288 - DNA, 25 bp, Homo sapien
caaagagcagagggtttgtaattcc

SEQ ID NO: 1066289 - DNA, 25 bp, Homo sapien
taaggcaggctgacttgttatgaga

SEQ ID NO: 1066290 - DNA, 25 bp, Homo sapien
tgttaaggcaggctgacttgttatg

SEQ ID NO: 1066291 - DNA, 25 bp, Homo sapien
tgacttgttatgagatgactctggg

SEQ ID NO: 1066292 - DNA, 25 bp, Homo sapien
caggctgacttgttatgagatgact

SEQ ID NO: 1066293 - DNA, 25 bp, Homo sapien
gttgggttacttcaagggcagccag

SEQ ID NO: 1066294 - DNA, 25 bp, Homo sapien
tatgcttgtaaatattgatagcact

SEQ ID NO: 1066295 - DNA, 25 bp, Homo sapien
aaagtcccaatactctagccccgct

SEQ ID NO: 1066296 - DNA, 25 bp, Homo sapien
tattgatagcactggcttcctccaa

SEQ ID NO: 1066297 - DNA, 25 bp, Homo sapien
ccctaaaggccatgagacttctata

SEQ ID NO: 1066298 - DNA, 25 bp, Homo sapien
ttgatgtcagcactccttttccagg

SEQ ID NO: 1066299 - DNA, 25 bp, Homo sapien
tgggcagtcctggtatgaggctcct

SEQ ID NO: 1066300 - DNA, 25 bp, Homo sapien
cagaactcagtgactttaagcagca

SEQ ID NO: 1066301 - DNA, 25 bp, Homo sapien
ggttattgaccaaagcacccagagc

SEQ ID NO: 1066302 - DNA, 25 bp, Homo sapien
tatccacgagccacgaagatgggtt

SEQ ID NO: 1066303 - DNA, 25 bp, Homo sapien
tctgttctgatgaaaagtatctggc

SEQ ID NO: 1066304 - DNA, 25 bp, Homo sapien
gcactcagaaaggtcacgatggaag

SEQ ID NO: 1066305 - DNA, 25 bp, Homo sapien
tcaatcagcctcaaccgcgagcccg

SEQ ID NO: 1066306 - DNA, 25 bp, Homo sapien
cacggcgggccgcctgaacccactt

SEQ ID NO: 1066307 - DNA, 25 bp, Homo sapien
aatcagcctcaaccgcgagcccgag

SEQ ID NO: 1066308 - DNA, 25 bp, Homo sapien
aggcacggcgggccgcctgaaccca

SEQ ID NO: 1066309 - DNA, 25 bp, Homo sapien
tgactcaagagctcacacttgactt

SEQ ID NO: 1066310 - DNA, 25 bp, Homo sapien
ggtaactcactcaccccatgtcaca

SEQ ID NO: 1066311 - DNA, 25 bp, Homo sapien
aagcggcctgattgtcatctcagag

SEQ ID NO: 1066312 - DNA, 25 bp, Homo sapien
aatccaagcattttgactcaagagc

SEQ ID NO: 1066313 - DNA, 25 bp, Homo sapien
gaaagcagactgacacacaaaggga

SEQ ID NO: 1066314 - DNA, 25 bp, Homo sapien
cctaggcttctgttagactatttcc

SEQ ID NO: 1066315 - DNA, 25 bp, Homo sapien
taacatctttgtgtgtacgagcctg

SEQ ID NO: 1066316 - DNA, 25 bp, Homo sapien
tgtgtacgagcctgtgtgcacgtat

SEQ ID NO: 1066317 - DNA, 25 bp, Homo sapien
gccttgcggcacgagcatgtgacct

SEQ ID NO: 1066318 - DNA, 25 bp, Homo sapien
tggtcaccgctgagccaagaaaggc

SEQ ID NO: 1066319 - DNA, 25 bp, Homo sapien
caaagggtcagtcgctgcattccag

SEQ ID NO: 1066320 - DNA, 25 bp, Homo sapien
gtcagagatgccgtccttcagagga

SEQ ID NO: 1066321 - DNA, 25 bp, Homo sapien
ctgatcctgcattaaccctgtggat

SEQ ID NO: 1066322 - DNA, 25 bp, Homo sapien
cctgcattaaccctgtggatttgtg

SEQ ID NO: 1066323 - DNA, 25 bp, Homo sapien
tgatcctgcattaaccctgtggatt

SEQ ID NO: 1066324 - DNA, 25 bp, Homo sapien
atcctgcattaaccctgtggatttg

SEQ ID NO: 1066325 - DNA, 25 bp, Homo sapien
aggcatcaccaaaattattttcctc

SEQ ID NO: 1066326 - DNA, 25 bp, Homo sapien
gcatcaccaaaattattttcctcat

SEQ ID NO: 1066327 - DNA, 25 bp, Homo sapien
atcaccaaaattattttcctcattt

SEQ ID NO: 1066328 - DNA, 25 bp, Homo sapien
ggcatcaccaaaattattttcctca

SEQ ID NO: 1066329 - DNA, 25 bp, Homo sapien
ccacatgatcagggacaggccagaa

SEQ ID NO: 1066330 - DNA, 25 bp, Homo sapien
gaccacaggtatcaggaatgccagc

SEQ ID NO: 1066331 - DNA, 25 bp, Homo sapien
aggccagaaacctgaccacaggtat

SEQ ID NO: 1066332 - DNA, 25 bp, Homo sapien
gctaacctgatgactacttcattgt

SEQ ID NO: 1066333 - DNA, 25 bp, Homo sapien
ctccctgagagagtcattcacaaag

SEQ ID NO: 1066334 - DNA, 25 bp, Homo sapien
gctccctgagagagtcattcacaaa

SEQ ID NO: 1066335 - DNA, 25 bp, Homo sapien
tgctccctgagagagtcattcacaa

SEQ ID NO: 1066336 - DNA, 25 bp, Homo sapien
ccctgctctgatctgacaactcctg

SEQ ID NO: 1066337 - DNA, 25 bp, Homo sapien
tgacaactcctgctgggttgacccc

SEQ ID NO: 1066338 - DNA, 25 bp, Homo sapien
ctgctctgatctgacaactcctgct

SEQ ID NO: 1066339 - DNA, 25 bp, Homo sapien
acaactcctgctgggttgaccccat

SEQ ID NO: 1066340 - DNA, 25 bp, Homo sapien
ctgccctagttcctggactttgatc

SEQ ID NO: 1066341 - DNA, 25 bp, Homo sapien
tgccctagttcctggactttgatca

SEQ ID NO: 1066342 - DNA, 25 bp, Homo sapien
agttcctggactttgatcaccagtc

SEQ ID NO: 1066343 - DNA, 25 bp, Homo sapien
ggacaggagcagaccaggcaacagc

SEQ ID NO: 1066344 - DNA, 25 bp, Homo sapien
caggcaacagcaagtgcctgtccat

SEQ ID NO: 1066345 - DNA, 25 bp, Homo sapien
aggaagggacaggagcagaccaggc

SEQ ID NO: 1066346 - DNA, 25 bp, Homo sapien
gagcagaccaggcaacagcaagtgc

SEQ ID NO: 1066347 - DNA, 25 bp, Homo sapien
gagaccatagacagccgggagcctt

SEQ ID NO: 1066348 - DNA, 25 bp, Homo sapien
cgggagccttcagtcactaaactat

SEQ ID NO: 1066349 - DNA, 25 bp, Homo sapien
aggaagaagcgggagaccatagaca

SEQ ID NO: 1066350 - DNA, 25 bp, Homo sapien
gccttcagtcactaaactattggag

SEQ ID NO: 1066351 - DNA, 25 bp, Homo sapien
gttctgcagcacagtttccaaggcc

SEQ ID NO: 1066352 - DNA, 25 bp, Homo sapien
gcagcacagtttccaaggcccgcac

SEQ ID NO: 1066353 - DNA, 25 bp, Homo sapien
tgcagcacagtttccaaggcccgca

SEQ ID NO: 1066354 - DNA, 25 bp, Homo sapien
tctgcagcacagtttccaaggcccg

SEQ ID NO: 1066355 - DNA, 25 bp, Homo sapien
agcagaagtggaaccagattgacag

SEQ ID NO: 1066356 - DNA, 25 bp, Homo sapien
ccaggaaagcgggagaaggcatcct

SEQ ID NO: 1066357 - DNA, 25 bp, Homo sapien
gcagagcagaagtggaaccagattg

SEQ ID NO: 1066358 - DNA, 25 bp, Homo sapien
ggaaagcgggagaaggcatcctgag

SEQ ID NO: 1066359 - DNA, 25 bp, Homo sapien
gggccatgcaccagatctgggaaga

SEQ ID NO: 1066360 - DNA, 25 bp, Homo sapien
tattgaatgacaggtccaacatgtc

SEQ ID NO: 1066361 - DNA, 25 bp, Homo sapien
cagcttcagcctactattgaatgac

SEQ ID NO: 1066362 - DNA, 25 bp, Homo sapien
caccagatctgggaagatatcagcc

SEQ ID NO: 1066363 - DNA, 25 bp, Homo sapien
gcatccaatctctgcagcccccgtc

SEQ ID NO: 1066364 - DNA, 25 bp, Homo sapien
agggcatccaatctctgcagccccc

SEQ ID NO: 1066365 - DNA, 25 bp, Homo sapien
ccaatctctgcagcccccgtcccac

SEQ ID NO: 1066366 - DNA, 25 bp, Homo sapien
tccaatctctgcagcccccgtccca

SEQ ID NO: 1066367 - DNA, 25 bp, Homo sapien
gccaggaaacctcgtggtaactcaa

SEQ ID NO: 1066368 - DNA, 25 bp, Homo sapien
tgtaggccctggaatacctggtctt

SEQ ID NO: 1066369 - DNA, 25 bp, Homo sapien
tatgtgccttgtccgattaatcccc

SEQ ID NO: 1066370 - DNA, 25 bp, Homo sapien
gacagggtacacagcctattcttgg

SEQ ID NO: 1066371 - DNA, 25 bp, Homo sapien
cagaggaagaagctggaggtgtcct

SEQ ID NO: 1066372 - DNA, 25 bp, Homo sapien
gaggaagaagctggaggtgtcctgg

SEQ ID NO: 1066373 - DNA, 25 bp, Homo sapien
gccagaggaagaagctggaggtgtc

SEQ ID NO: 1066374 - DNA, 25 bp, Homo sapien
ctgccagaggaagaagctggaggtg

SEQ ID NO: 1066375 - DNA, 25 bp, Homo sapien
ccccatccttcaaggacttgagctt

SEQ ID NO: 1066376 - DNA, 25 bp, Homo sapien
ccttcaaggacttgagcttcgggag

SEQ ID NO: 1066377 - DNA, 25 bp, Homo sapien
ctagggctatgcctgtttccccatc

SEQ ID NO: 1066378 - DNA, 25 bp, Homo sapien
catccttcaaggacttgagcttcgg

SEQ ID NO: 1066379 - DNA, 25 bp, Homo sapien
gcttcagctcctgtagactgggcag

SEQ ID NO: 1066380 - DNA, 25 bp, Homo sapien
gggcagtcccgtgatgcagtagggc

SEQ ID NO: 1066381 - DNA, 25 bp, Homo sapien
gcaggggcatgcttgagactgcagt

SEQ ID NO: 1066382 - DNA, 25 bp, Homo sapien
ccagctcctcaagccgcactgggca

SEQ ID NO: 1066383 - DNA, 25 bp, Homo sapien
tgcagcatatcaagcctgggcaact

SEQ ID NO: 1066384 - DNA, 25 bp, Homo sapien
gcagcatatcaagcctgggcaactc

SEQ ID NO: 1066385 - DNA, 25 bp, Homo sapien
ctgcagcatatcaagcctgggcaac

SEQ ID NO: 1066386 - DNA, 25 bp, Homo sapien
agcatatcaagcctgggcaactcac

SEQ ID NO: 1066387 - DNA, 25 bp, Homo sapien
tactaagacctggagactgccgagg

SEQ ID NO: 1066388 - DNA, 25 bp, Homo sapien
gatgaggtcagaatatagatgtact

SEQ ID NO: 1066389 - DNA, 25 bp, Homo sapien
tatagatgtactggggcatccgagg

SEQ ID NO: 1066390 - DNA, 25 bp, Homo sapien
ctttctccctgtctagtactaagac

SEQ ID NO: 1066391 - DNA, 25 bp, Homo sapien
cttgagttagaggatccaggaattc

SEQ ID NO: 1066392 - DNA, 25 bp, Homo sapien
gggacacaaacacgtcatagaggaa

SEQ ID NO: 1066393 - DNA, 25 bp, Homo sapien
gtgggacacaaacacgtcatagagg

SEQ ID NO: 1066394 - DNA, 25 bp, Homo sapien
gacacaaacacgtcatagaggaacc

SEQ ID NO: 1066395 - DNA, 25 bp, Homo sapien
agtgggacacaaacacgtcatagag

SEQ ID NO: 1066396 - DNA, 25 bp, Homo sapien
gctggagggcagtcctctagagcag

SEQ ID NO: 1066397 - DNA, 25 bp, Homo sapien
agctggagggcagtcctctagagca

SEQ ID NO: 1066398 - DNA, 25 bp, Homo sapien
cagctggagggcagtcctctagagc

SEQ ID NO: 1066399 - DNA, 25 bp, Homo sapien
ctggagggcagtcctctagagcagg

SEQ ID NO: 1066400 - DNA, 25 bp, Homo sapien
tcagcacacagagcgtgacccagct

SEQ ID NO: 1066401 - DNA, 25 bp, Homo sapien
cacagagcgtgacccagctgcccac

SEQ ID NO: 1066402 - DNA, 25 bp, Homo sapien
agcacacagagcgtgacccagctgc

SEQ ID NO: 1066403 - DNA, 25 bp, Homo sapien
cacacagagcgtgacccagctgccc

SEQ ID NO: 1066404 - DNA, 25 bp, Homo sapien
cagggggtgtgcagggcctggtgac

SEQ ID NO: 1066405 - DNA, 25 bp, Homo sapien
gcagggggtgtgcagggcctggtga

SEQ ID NO: 1066406 - DNA, 25 bp, Homo sapien
tcagcagggggtgtgcagggcctgg

SEQ ID NO: 1066407 - DNA, 25 bp, Homo sapien
cagcagggggtgtgcagggcctggt

SEQ ID NO: 1066408 - DNA, 25 bp, Homo sapien
cacatgcaatagtctcttcagcgga

SEQ ID NO: 1066409 - DNA, 25 bp, Homo sapien
atagtctcttcagcggagcaaccag

SEQ ID NO: 1066410 - DNA, 25 bp, Homo sapien
ccttgggccacatgcaatagtctct

SEQ ID NO: 1066411 - DNA, 25 bp, Homo sapien
tgcaatagtctcttcagcggagcaa

SEQ ID NO: 1066412 - DNA, 25 bp, Homo sapien
gacacccacttcacaacagggcgga

SEQ ID NO: 1066413 - DNA, 25 bp, Homo sapien
cacccacttcacaacagggcggaag

SEQ ID NO: 1066414 - DNA, 25 bp, Homo sapien
cgagacacccacttcacaacagggc

SEQ ID NO: 1066415 - DNA, 25 bp, Homo sapien
gagacacccacttcacaacagggcg

SEQ ID NO: 1066416 - DNA, 25 bp, Homo sapien
caaagctctcttccaatatccagaa

SEQ ID NO: 1066417 - DNA, 25 bp, Homo sapien
tcaaagctctcttccaatatccaga

SEQ ID NO: 1066418 - DNA, 25 bp, Homo sapien
aagctctcttccaatatccagaaag

SEQ ID NO: 1066419 - DNA, 25 bp, Homo sapien
gctctcttccaatatccagaaagac

SEQ ID NO: 1066420 - DNA, 25 bp, Homo sapien
catccaatgtcttcctgcatctacg

SEQ ID NO: 1066421 - DNA, 25 bp, Homo sapien
agacacctcacttcagctatgctga

SEQ ID NO: 1066422 - DNA, 25 bp, Homo sapien
ggctcctagaaaagggactgctccc

SEQ ID NO: 1066423 - DNA, 25 bp, Homo sapien
catctacggtgagtccttcaagagg

SEQ ID NO: 1066424 - DNA, 25 bp, Homo sapien
cctgggcttgcaattccagggccat

SEQ ID NO: 1066425 - DNA, 25 bp, Homo sapien
ttggattctgatccccaagagtcct

SEQ ID NO: 1066426 - DNA, 25 bp, Homo sapien
tctccggcctcagccaacgacagca

SEQ ID NO: 1066427 - DNA, 25 bp, Homo sapien
aagcgctggcgggaggcctctgggc

SEQ ID NO: 1066428 - DNA, 25 bp, Homo sapien
aaggcctcgtggggtccagctgcat

SEQ ID NO: 1066429 - DNA, 25 bp, Homo sapien
accactctcagggtggcgtgcctgc

SEQ ID NO: 1066430 - DNA, 25 bp, Homo sapien
ctggacctccctaggcaagatagtc

SEQ ID NO: 1066431 - DNA, 25 bp, Homo sapien
ccctaggcaagatagtcaggaactg

SEQ ID NO: 1066432 - DNA, 25 bp, Homo sapien
tgcagtcctggtctctcggtgccaa

SEQ ID NO: 1066433 - DNA, 25 bp, Homo sapien
tgcaggagaagactgtttgtctcac

SEQ ID NO: 1066434 - DNA, 25 bp, Homo sapien
gcaattattaacgtagtcacaaccc

SEQ ID NO: 1066435 - DNA, 25 bp, Homo sapien
tattaacgtagtcacaaccctgctg

SEQ ID NO: 1066436 - DNA, 25 bp, Homo sapien
acgtagtcacaaccctgctgccttg

SEQ ID NO: 1066437 - DNA, 25 bp, Homo sapien
gtctttaagggcctggtctcttctg

SEQ ID NO: 1066438 - DNA, 25 bp, Homo sapien
aaggtcagggcatgtattcttcacc

SEQ ID NO: 1066439 - DNA, 25 bp, Homo sapien
gtccctcaggccagggatccactgg

SEQ ID NO: 1066440 - DNA, 25 bp, Homo sapien
cctcggcatttaggtgattgggaag

SEQ ID NO: 1066441 - DNA, 25 bp, Homo sapien
tgggagagtagggactcggggagtg

SEQ ID NO: 1066442 - DNA, 25 bp, Homo sapien
acctcccaatctccaacgctcccca

SEQ ID NO: 1066443 - DNA, 25 bp, Homo sapien
tcacctcccaatctccaacgctccc

SEQ ID NO: 1066444 - DNA, 25 bp, Homo sapien
cacctcccaatctccaacgctcccc

SEQ ID NO: 1066445 - DNA, 25 bp, Homo sapien
acaggaaaggaagaacgagtaacag

SEQ ID NO: 1066446 - DNA, 25 bp, Homo sapien
aggaaaggaagaacgagtaacagct

SEQ ID NO: 1066447 - DNA, 25 bp, Homo sapien
gaaaggaagaacgagtaacagctta

SEQ ID NO: 1066448 - DNA, 25 bp, Homo sapien
caggaaaggaagaacgagtaacagc

SEQ ID NO: 1066449 - DNA, 25 bp, Homo sapien
ggtctttacagagctccttctcagc

SEQ ID NO: 1066450 - DNA, 25 bp, Homo sapien
tctttacagagctccttctcagcat

SEQ ID NO: 1066451 - DNA, 25 bp, Homo sapien
cctggggggtctttacagagctcct

SEQ ID NO: 1066452 - DNA, 25 bp, Homo sapien
ggggtctttacagagctccttctca

SEQ ID NO: 1066453 - DNA, 25 bp, Homo sapien
cactggtattgttcctcccaggctc

SEQ ID NO: 1066454 - DNA, 25 bp, Homo sapien
caggctgtaatctgcagtgctcctt

SEQ ID NO: 1066455 - DNA, 25 bp, Homo sapien
ggtccttgctctttctcggaggtat

SEQ ID NO: 1066456 - DNA, 25 bp, Homo sapien
ctccaggtcaatgcctgagctggct

SEQ ID NO: 1066457 - DNA, 25 bp, Homo sapien
tgcaatggcccgatatacctggcgg

SEQ ID NO: 1066458 - DNA, 25 bp, Homo sapien
tgcgtcactatacccgagcctggga

SEQ ID NO: 1066459 - DNA, 25 bp, Homo sapien
ggcccctgggtagactcaacattga

SEQ ID NO: 1066460 - DNA, 25 bp, Homo sapien
tacctggcggttctggtgacaagtc

SEQ ID NO: 1066461 - DNA, 25 bp, Homo sapien
agtctacactgtcgggatttctgcc

SEQ ID NO: 1066462 - DNA, 25 bp, Homo sapien
gatgatcatcccatactaccagtga

SEQ ID NO: 1066463 - DNA, 25 bp, Homo sapien
tactggattcactctttgaggcccc

SEQ ID NO: 1066464 - DNA, 25 bp, Homo sapien
tgctcctacctgtgcgtctataaga

SEQ ID NO: 1066465 - DNA, 25 bp, Homo sapien
tacaggtgcatgccaccacacccag

SEQ ID NO: 1066466 - DNA, 25 bp, Homo sapien
ctgcaatctctgcctcctgggttca

SEQ ID NO: 1066467 - DNA, 25 bp, Homo sapien
agtgcagcgatgcaatcctggctca

SEQ ID NO: 1066468 - DNA, 25 bp, Homo sapien
tgcctcctgggttcaagcaattctc

SEQ ID NO: 1066469 - DNA, 25 bp, Homo sapien
tggtgacaggtacgaagcttttccg

SEQ ID NO: 1066470 - DNA, 25 bp, Homo sapien
tgaatctgtagcgacactgctccag

SEQ ID NO: 1066471 - DNA, 25 bp, Homo sapien
caatggcccggtacacctggctgtt

SEQ ID NO: 1066472 - DNA, 25 bp, Homo sapien
tggctttccggtagcttcgaaggag

SEQ ID NO: 1066473 - DNA, 25 bp, Homo sapien
ttaggacacaaggttgaaggtttga

SEQ ID NO: 1066474 - DNA, 25 bp, Homo sapien
gacacaaggttgaaggtttgacagc

SEQ ID NO: 1066475 - DNA, 25 bp, Homo sapien
acaaggttgaaggtttgacagcatc

SEQ ID NO: 1066476 - DNA, 25 bp, Homo sapien
tggggctttaggacacaaggttgaa

SEQ ID NO: 1066477 - DNA, 25 bp, Homo sapien
actgttcctgtgagggatttcccca

SEQ ID NO: 1066478 - DNA, 25 bp, Homo sapien
tctccccagtcaagaggttggcaaa

SEQ ID NO: 1066479 - DNA, 25 bp, Homo sapien
tgtgagggatttccccactgccctt

SEQ ID NO: 1066480 - DNA, 25 bp, Homo sapien
tcttctccccagtcaagaggttggc

SEQ ID NO: 1066481 - DNA, 25 bp, Homo sapien
caggccttgatggtcaataagtttt

SEQ ID NO: 1066482 - DNA, 25 bp, Homo sapien
caaggtacaggccttgatggtcaat

SEQ ID NO: 1066483 - DNA, 25 bp, Homo sapien
ctgcaaggtacaggccttgatggtc

SEQ ID NO: 1066484 - DNA, 25 bp, Homo sapien
ggtacaggccttgatggtcaataag

SEQ ID NO: 1066485 - DNA, 25 bp, Homo sapien
tagaatggtcactaaagcttttccc

SEQ ID NO: 1066486 - DNA, 25 bp, Homo sapien
tccagtgagcactaaaagatgggct

SEQ ID NO: 1066487 - DNA, 25 bp, Homo sapien
tgtgtggtccaggagaattcaagtc

SEQ ID NO: 1066488 - DNA, 25 bp, Homo sapien
taatgaggttagaacggtcacggaa

SEQ ID NO: 1066489 - DNA, 25 bp, Homo sapien
gttctccggtgagcactgaagtggg

SEQ ID NO: 1066490 - DNA, 25 bp, Homo sapien
ggttctccggtgagcactgaagtgg

SEQ ID NO: 1066491 - DNA, 25 bp, Homo sapien
cctgcatgggttctccggtgagcac

SEQ ID NO: 1066492 - DNA, 25 bp, Homo sapien
gatagcaaatacaaggacagtcagg

SEQ ID NO: 1066493 - DNA, 25 bp, Homo sapien
taatctcgtaagttgccagtttggc

SEQ ID NO: 1066494 - DNA, 25 bp, Homo sapien
taagagcacgatagactcaagacag

SEQ ID NO: 1066495 - DNA, 25 bp, Homo sapien
tgcatggagattctggcccctaagt

SEQ ID NO: 1066496 - DNA, 25 bp, Homo sapien
ccatattattgcgaagatggaaact

SEQ ID NO: 1066497 - DNA, 25 bp, Homo sapien
gatggaaactcacatcaagtatttt

SEQ ID NO: 1066498 - DNA, 25 bp, Homo sapien
gctcatccttgctcaaatcacttca

SEQ ID NO: 1066499 - DNA, 25 bp, Homo sapien
caagtattttgataatagctcatcc

SEQ ID NO: 1066500 - DNA, 25 bp, Homo sapien
ccgcagagataacgtgggccagaaa

SEQ ID NO: 1066501 - DNA, 25 bp, Homo sapien
catggcaagaagtaggactgtcccc

SEQ ID NO: 1066502 - DNA, 25 bp, Homo sapien
ttctaacttagcctgtccatgtggg

SEQ ID NO: 1066503 - DNA, 25 bp, Homo sapien
gggttaacctatgatcagccaagca

SEQ ID NO: 1066504 - DNA, 25 bp, Homo sapien
gccccagtgactcgagattctagta

SEQ ID NO: 1066505 - DNA, 25 bp, Homo sapien
caaccgggtttagcgtgagctcctg

SEQ ID NO: 1066506 - DNA, 25 bp, Homo sapien
tgctccaggaccagcttagagactg

SEQ ID NO: 1066507 - DNA, 25 bp, Homo sapien
taaatatgcggaagcttctctgtgg

SEQ ID NO: 1066508 - DNA, 25 bp, Homo sapien
taaaatgaagccagggattggtcca

SEQ ID NO: 1066509 - DNA, 25 bp, Homo sapien
ccccatgcttttggtgtaaccagga

SEQ ID NO: 1066510 - DNA, 25 bp, Homo sapien
ttaatttcacagtccctaagaggga

SEQ ID NO: 1066511 - DNA, 25 bp, Homo sapien
tgaagagccacccatgtctgaagga

SEQ ID NO: 1066512 - DNA, 25 bp, Homo sapien
tgtttccatttgtgcctgtgtttgg

SEQ ID NO: 1066513 - DNA, 25 bp, Homo sapien
gcctgtgtttggcttctaagttcat

SEQ ID NO: 1066514 - DNA, 25 bp, Homo sapien
ctgtggttgtgactgtttgtttctc

SEQ ID NO: 1066515 - DNA, 25 bp, Homo sapien
catttgtgcctgtgtttggcttcta

SEQ ID NO: 1066516 - DNA, 25 bp, Homo sapien
cttctgtttcacatgttattaataa

SEQ ID NO: 1066517 - DNA, 25 bp, Homo sapien
tttgttcatgacacctcacaatatt

SEQ ID NO: 1066518 - DNA, 25 bp, Homo sapien
aataatgcacagtagttatagtcac

SEQ ID NO: 1066519 - DNA, 25 bp, Homo sapien
ttcatgacacctcacaatattttca

SEQ ID NO: 1066520 - DNA, 25 bp, Homo sapien
cagttggcagtcgagcagtcagtca

SEQ ID NO: 1066521 - DNA, 25 bp, Homo sapien
cacagttggcagtcgagcagtcagt

SEQ ID NO: 1066522 - DNA, 25 bp, Homo sapien
tcacagttggcagtcgagcagtcag

SEQ ID NO: 1066523 - DNA, 25 bp, Homo sapien
ggtcacagttggcagtcgagcagtc

SEQ ID NO: 1066524 - DNA, 25 bp, Homo sapien
ttcaccaagggcagaagaccttgaa

SEQ ID NO: 1066525 - DNA, 25 bp, Homo sapien
tgagctgggcactgcttgcaaacag

SEQ ID NO: 1066526 - DNA, 25 bp, Homo sapien
ccttggtgtccacaagcagggccgg

SEQ ID NO: 1066527 - DNA, 25 bp, Homo sapien
aagaccttgaagtgctgcccagcag

SEQ ID NO: 1066528 - DNA, 25 bp, Homo sapien
ttagaatatagagcccaacagcatt

SEQ ID NO: 1066529 - DNA, 25 bp, Homo sapien
cattagccacgtagcatgctgggag

SEQ ID NO: 1066530 - DNA, 25 bp, Homo sapien
ggagccacaaggacctggaggagca

SEQ ID NO: 1066531 - DNA, 25 bp, Homo sapien
ggctttgcccattgcagagaccaag

SEQ ID NO: 1066532 - DNA, 25 bp, Homo sapien
catattaagttgttgactagagggc

SEQ ID NO: 1066533 - DNA, 25 bp, Homo sapien
tgcctggaaccacagtgctgggaac

SEQ ID NO: 1066534 - DNA, 25 bp, Homo sapien
ctagttaatgggaaaggacacttca

SEQ ID NO: 1066535 - DNA, 25 bp, Homo sapien
tgagggtggaggctaggccagaagg

SEQ ID NO: 1066536 - DNA, 25 bp, Homo sapien
acatcttcaagctttagggtcaagc

SEQ ID NO: 1066537 - DNA, 25 bp, Homo sapien
gctttagggtcaagctctcttccaa

SEQ ID NO: 1066538 - DNA, 25 bp, Homo sapien
catagacactaatagtaacatctaa

SEQ ID NO: 1066539 - DNA, 25 bp, Homo sapien
ttgccggatgttcttctagttttcc

SEQ ID NO: 1066540 - DNA, 25 bp, Homo sapien
tccagacaagctgagagggagcttc

SEQ ID NO: 1066541 - DNA, 25 bp, Homo sapien
tgtgagatcctctttacttggtggc

SEQ ID NO: 1066542 - DNA, 25 bp, Homo sapien
tggacttagccacccactactaatg

SEQ ID NO: 1066543 - DNA, 25 bp, Homo sapien
gggtcacactccaagaatggatttg

SEQ ID NO: 1066544 - DNA, 25 bp, Homo sapien
cagctgagccggacaaggaaacttg

SEQ ID NO: 1066545 - DNA, 25 bp, Homo sapien
aagcctgtgcttcatcctgcctgca

SEQ ID NO: 1066546 - DNA, 25 bp, Homo sapien
cactgagggtccagatatgtggtct

SEQ ID NO: 1066547 - DNA, 25 bp, Homo sapien
gattttgacggctgattgcttgacc

SEQ ID NO: 1066548 - DNA, 25 bp, Homo sapien
tcacttaatggttgatgatagcccc

SEQ ID NO: 1066549 - DNA, 25 bp, Homo sapien
tgttcaaggttgaacagccactcac

SEQ ID NO: 1066550 - DNA, 25 bp, Homo sapien
gatgatagccccaaatttataggac

SEQ ID NO: 1066551 - DNA, 25 bp, Homo sapien
gggcctttggacactgctaggtact

SEQ ID NO: 1066552 - DNA, 25 bp, Homo sapien
taattaacactggagttcatgaaaa

SEQ ID NO: 1066553 - DNA, 25 bp, Homo sapien
catgtgaggggtccccatttcttag

SEQ ID NO: 1066554 - DNA, 25 bp, Homo sapien
taacagctacactcaaactggccgg

SEQ ID NO: 1066555 - DNA, 25 bp, Homo sapien
tggtcaaagtaattgcagatattcc

SEQ ID NO: 1066556 - DNA, 25 bp, Homo sapien
cacttgggctatgagttggaactct

SEQ ID NO: 1066557 - DNA, 25 bp, Homo sapien
ttcagtaacgtggacaggagagact

SEQ ID NO: 1066558 - DNA, 25 bp, Homo sapien
tctgtctgcaagagctgtagtcagg

SEQ ID NO: 1066559 - DNA, 25 bp, Homo sapien
ttaaaatccctaggctgtagtgaca

SEQ ID NO: 1066560 - DNA, 25 bp, Homo sapien
taattcagcaaaaagtgaacgtaag

SEQ ID NO: 1066561 - DNA, 25 bp, Homo sapien
agagacatttgccttaggctttagc

SEQ ID NO: 1066562 - DNA, 25 bp, Homo sapien
gtgaacgtaagaagagacatttgcc

SEQ ID NO: 1066563 - DNA, 25 bp, Homo sapien
gacatttgccttaggctttagctgg

SEQ ID NO: 1066564 - DNA, 25 bp, Homo sapien
tctagagaactctttaaagccaaca

SEQ ID NO: 1066565 - DNA, 25 bp, Homo sapien
gtttggccagggcttcatatttggc

SEQ ID NO: 1066566 - DNA, 25 bp, Homo sapien
gatctccatttttccgaacactttc

SEQ ID NO: 1066567 - DNA, 25 bp, Homo sapien
tatcgggctttgtcgagtttggcca

SEQ ID NO: 1066568 - DNA, 25 bp, Homo sapien
tgatggaggccgtctgggttcctgg

SEQ ID NO: 1066569 - DNA, 25 bp, Homo sapien
tgcaccaccgaccagttcgggttct

SEQ ID NO: 1066570 - DNA, 25 bp, Homo sapien
tctttgctcataagggtgcttctcc

SEQ ID NO: 1066571 - DNA, 25 bp, Homo sapien
gctgttgaccacatcttccctgtgg

SEQ ID NO: 1066572 - DNA, 25 bp, Homo sapien
tacggtagagttcaagttcctcgaa

SEQ ID NO: 1066573 - DNA, 25 bp, Homo sapien
cattacattgtttacggtagagttc

SEQ ID NO: 1066574 - DNA, 25 bp, Homo sapien
acttcttcctggcattacattgttt

SEQ ID NO: 1066575 - DNA, 25 bp, Homo sapien
gtagagttcaagttcctcgaagtac

SEQ ID NO: 1066576 - DNA, 25 bp, Homo sapien
tccctctgcaccggtttctagctga

SEQ ID NO: 1066577 - DNA, 25 bp, Homo sapien
ccctctgcaccggtttctagctgac

SEQ ID NO: 1066578 - DNA, 25 bp, Homo sapien
tttccctctgcaccggtttctagct

SEQ ID NO: 1066579 - DNA, 25 bp, Homo sapien
cttttccctctgcaccggtttctag

SEQ ID NO: 1066580 - DNA, 25 bp, Homo sapien
ttgaatggcattttgttttttcaaa

SEQ ID NO: 1066581 - DNA, 25 bp, Homo sapien
gcattttgttttttcaaactggatc

SEQ ID NO: 1066582 - DNA, 25 bp, Homo sapien
tggcattttgttttttcaaactgga

SEQ ID NO: 1066583 - DNA, 25 bp, Homo sapien
aatggcattttgttttttcaaactg

SEQ ID NO: 1066584 - DNA, 25 bp, Homo sapien
ccattatcttaggtccaggctcccc

SEQ ID NO: 1066585 - DNA, 25 bp, Homo sapien
ttatcttaggtccaggctcccccaa

SEQ ID NO: 1066586 - DNA, 25 bp, Homo sapien
atcttaggtccaggctcccccaact

SEQ ID NO: 1066587 - DNA, 25 bp, Homo sapien
attatcttaggtccaggctccccca

SEQ ID NO: 1066588 - DNA, 25 bp, Homo sapien
caagctcgcttctgcaaggaccttt

SEQ ID NO: 1066589 - DNA, 25 bp, Homo sapien
atgccaagctcgcttctgcaaggac

SEQ ID NO: 1066590 - DNA, 25 bp, Homo sapien
aatatgccaagctcgcttctgcaag

SEQ ID NO: 1066591 - DNA, 25 bp, Homo sapien
ccctctgtccctctaatatgccaag

SEQ ID NO: 1066592 - DNA, 25 bp, Homo sapien
ccttgttggcacttgatagtctctg

SEQ ID NO: 1066593 - DNA, 25 bp, Homo sapien
tgttggcacttgatagtctctgaag

SEQ ID NO: 1066594 - DNA, 25 bp, Homo sapien
cagaggggtaatccccttgttggca

SEQ ID NO: 1066595 - DNA, 25 bp, Homo sapien
ttggcacttgatagtctctgaagac

SEQ ID NO: 1066596 - DNA, 25 bp, Homo sapien
tatcccagagataggattcacagtt

SEQ ID NO: 1066597 - DNA, 25 bp, Homo sapien
taggattcacagttcccacatttgg

SEQ ID NO: 1066598 - DNA, 25 bp, Homo sapien
aaacatatcccagagataggattca

SEQ ID NO: 1066599 - DNA, 25 bp, Homo sapien
catatcccagagataggattcacag

SEQ ID NO: 1066600 - DNA, 25 bp, Homo sapien
tatgcatcagatgccacttaacgat

SEQ ID NO: 1066601 - DNA, 25 bp, Homo sapien
tcctgcttgaagctatcttcttgtg

SEQ ID NO: 1066602 - DNA, 25 bp, Homo sapien
aggcaaccccattcctagggcactg

SEQ ID NO: 1066603 - DNA, 25 bp, Homo sapien
tgccttttgaacccatcctttagag

SEQ ID NO: 1066604 - DNA, 25 bp, Homo sapien
tcaagggatggcctcataatgaaat

SEQ ID NO: 1066605 - DNA, 25 bp, Homo sapien
tcattgtgtcactggtaatccaacc

SEQ ID NO: 1066606 - DNA, 25 bp, Homo sapien
gaaatgttcattgtgtcactggtaa

SEQ ID NO: 1066607 - DNA, 25 bp, Homo sapien
caagggatggcctcataatgaaatg

SEQ ID NO: 1066608 - DNA, 25 bp, Homo sapien
ccataggtgatggacaaccactgaa

SEQ ID NO: 1066609 - DNA, 25 bp, Homo sapien
atttcagaaactgcctaccacggtg

SEQ ID NO: 1066610 - DNA, 25 bp, Homo sapien
gagagagcggtcacagcctttcata

SEQ ID NO: 1066611 - DNA, 25 bp, Homo sapien
taccacggtgaatatcagggacagc

SEQ ID NO: 1066612 - DNA, 25 bp, Homo sapien
tcactgggtgttggccagaagccac

SEQ ID NO: 1066613 - DNA, 25 bp, Homo sapien
ctcactgggtgttggccagaagcca

SEQ ID NO: 1066614 - DNA, 25 bp, Homo sapien
cactgggtgttggccagaagccacc

SEQ ID NO: 1066615 - DNA, 25 bp, Homo sapien
tgagaagtgacattctatcactttt

SEQ ID NO: 1066616 - DNA, 25 bp, Homo sapien
atgagaagtgacattctatcacttt

SEQ ID NO: 1066617 - DNA, 25 bp, Homo sapien
tatgagaagtgacattctatcactt

SEQ ID NO: 1066618 - DNA, 25 bp, Homo sapien
accagagacagccctcagttcttct

SEQ ID NO: 1066619 - DNA, 25 bp, Homo sapien
tgaccagagacagccctcagttctt

SEQ ID NO: 1066620 - DNA, 25 bp, Homo sapien
cagttcttctccaaagggaagcttt

SEQ ID NO: 1066621 - DNA, 25 bp, Homo sapien
ctccaaagggaagctttcaacccag

SEQ ID NO: 1066622 - DNA, 25 bp, Homo sapien
agctcaactagaggggaggacaagc

SEQ ID NO: 1066623 - DNA, 25 bp, Homo sapien
cacataattgtttgctggattcagt

SEQ ID NO: 1066624 - DNA, 25 bp, Homo sapien
aaggtgtccactagggcggcagtca

SEQ ID NO: 1066625 - DNA, 25 bp, Homo sapien
ctagggcggcagtcatctcaaagct

SEQ ID NO: 1066626 - DNA, 25 bp, Homo sapien
tctgtgttaggaatgtaagcgtagc

SEQ ID NO: 1066627 - DNA, 25 bp, Homo sapien
tgtgttaggaatgtaagcgtagctt

SEQ ID NO: 1066628 - DNA, 25 bp, Homo sapien
tctctgtgttaggaatgtaagcgta

SEQ ID NO: 1066629 - DNA, 25 bp, Homo sapien
tgttaggaatgtaagcgtagcttaa

SEQ ID NO: 1066630 - DNA, 25 bp, Homo sapien
ctgtggtgtgcattctccctcactg

SEQ ID NO: 1066631 - DNA, 25 bp, Homo sapien
tacagggaggtccatggtggtcatt

SEQ ID NO: 1066632 - DNA, 25 bp, Homo sapien
ctttgttcaactacagggaggtcca

SEQ ID NO: 1066633 - DNA, 25 bp, Homo sapien
tcaactacagggaggtccatggtgg

SEQ ID NO: 1066634 - DNA, 25 bp, Homo sapien
ctgaaggaaagcatgttgtgtccaa

SEQ ID NO: 1066635 - DNA, 25 bp, Homo sapien
gttgtgtccaaaagaaacaaagcag

SEQ ID NO: 1066636 - DNA, 25 bp, Homo sapien
tgtttgcagtaacggcctcacggga

SEQ ID NO: 1066637 - DNA, 25 bp, Homo sapien
aaacaaagcaggattttcagcttgt

SEQ ID NO: 1066638 - DNA, 25 bp, Homo sapien
ggtgctggcctcatcgtctactgaa

SEQ ID NO: 1066639 - DNA, 25 bp, Homo sapien
catgtacatctagcccatgtggtgc

SEQ ID NO: 1066640 - DNA, 25 bp, Homo sapien
gatgctgtctgtccccgtcagaggg

SEQ ID NO: 1066641 - DNA, 25 bp, Homo sapien
tggttgctcacatctcatgtacatc

SEQ ID NO: 1066642 - DNA, 25 bp, Homo sapien
catagctgtttaatcttagacaagt

SEQ ID NO: 1066643 - DNA, 25 bp, Homo sapien
tcatagctgtttaatcttagacaag

SEQ ID NO: 1066644 - DNA, 25 bp, Homo sapien
tagatggaggccagatgattcgtat

SEQ ID NO: 1066645 - DNA, 25 bp, Homo sapien
aaccgctggaaggtttacagcaggg

SEQ ID NO: 1066646 - DNA, 25 bp, Homo sapien
caggcacagacacaaactgctcatt

SEQ ID NO: 1066647 - DNA, 25 bp, Homo sapien
tctgaaggcaataggaaaccgctgg

SEQ ID NO: 1066648 - DNA, 25 bp, Homo sapien
gggtttccattcaagcagggtagct

SEQ ID NO: 1066649 - DNA, 25 bp, Homo sapien
tcacaggcagatattctccagcagt

SEQ ID NO: 1066650 - DNA, 25 bp, Homo sapien
cataggccactggaaataggtctga

SEQ ID NO: 1066651 - DNA, 25 bp, Homo sapien
caatgtgggcttaagaatcacccgt

SEQ ID NO: 1066652 - DNA, 25 bp, Homo sapien
tgtgctctgagtgaagtcgtgctta

SEQ ID NO: 1066653 - DNA, 25 bp, Homo sapien
ctgagcaggaactcccacttggagg

SEQ ID NO: 1066654 - DNA, 25 bp, Homo sapien
gctgtgctctgagtgaagtcgtgct

SEQ ID NO: 1066655 - DNA, 25 bp, Homo sapien
cgctctcttgaactgccaggagaag

SEQ ID NO: 1066656 - DNA, 25 bp, Homo sapien
cagtcccctgatatgtgctctcata

SEQ ID NO: 1066657 - DNA, 25 bp, Homo sapien
taattcctgataatgaagttaggat

SEQ ID NO: 1066658 - DNA, 25 bp, Homo sapien
aaaatctacatatttcagtcccctg

SEQ ID NO: 1066659 - DNA, 25 bp, Homo sapien
tcattggttttctgatgagcatgaa

SEQ ID NO: 1066660 - DNA, 25 bp, Homo sapien
aaacaaatggtcctactgcaaaaat

SEQ ID NO: 1066661 - DNA, 25 bp, Homo sapien
gaaacaaatggtcctactgcaaaaa

SEQ ID NO: 1066662 - DNA, 25 bp, Homo sapien
cgaggcctccagtatgtggccatgt

SEQ ID NO: 1066663 - DNA, 25 bp, Homo sapien
accgaggcctccagtatgtggccat

SEQ ID NO: 1066664 - DNA, 25 bp, Homo sapien
ccgaggcctccagtatgtggccatg

SEQ ID NO: 1066665 - DNA, 25 bp, Homo sapien
gaggcctccagtatgtggccatgtg

SEQ ID NO: 1066666 - DNA, 25 bp, Homo sapien
caacaagaaccgcaactcagatggg

SEQ ID NO: 1066667 - DNA, 25 bp, Homo sapien
tctggcaatgactccacgatatccc

SEQ ID NO: 1066668 - DNA, 25 bp, Homo sapien
tatctcttcggagtctggcaatgac

SEQ ID NO: 1066669 - DNA, 25 bp, Homo sapien
tcattcaatttgcagtgctttatct

SEQ ID NO: 1066670 - DNA, 25 bp, Homo sapien
ggagcccatgaaattgcatctgctg

SEQ ID NO: 1066671 - DNA, 25 bp, Homo sapien
ttaagtcacactaagtaactgtcct

SEQ ID NO: 1066672 - DNA, 25 bp, Homo sapien
aaaatctcgtctcctgtatctcttg

SEQ ID NO: 1066673 - DNA, 25 bp, Homo sapien
tatccatcaggagccaagccataaa

SEQ ID NO: 1066674 - DNA, 25 bp, Homo sapien
caatgagcaccagcatcgtctttca

SEQ ID NO: 1066675 - DNA, 25 bp, Homo sapien
gcttggtgttcaataccctggcagg

SEQ ID NO: 1066676 - DNA, 25 bp, Homo sapien
gaccatgagcggtcatcttcacaat

SEQ ID NO: 1066677 - DNA, 25 bp, Homo sapien
accagcatcgtctttcatagggaaa

SEQ ID NO: 1066678 - DNA, 25 bp, Homo sapien
ctgggactggggatacagaagaccc

SEQ ID NO: 1066679 - DNA, 25 bp, Homo sapien
ttttaacaatatggggatgtaggtc

SEQ ID NO: 1066680 - DNA, 25 bp, Homo sapien
taagcttcctcatgaagccccagga

SEQ ID NO: 1066681 - DNA, 25 bp, Homo sapien
tttgataagcttcctcatgaagccc

SEQ ID NO: 1066682 - DNA, 25 bp, Homo sapien
ccattcctttccatcacgttctaag

SEQ ID NO: 1066683 - DNA, 25 bp, Homo sapien
ttcctttccatcacgttctaagaaa

SEQ ID NO: 1066684 - DNA, 25 bp, Homo sapien
tttccatcacgttctaagaaaacac

SEQ ID NO: 1066685 - DNA, 25 bp, Homo sapien
ctttccatcacgttctaagaaaaca

SEQ ID NO: 1066686 - DNA, 25 bp, Homo sapien
tgccgcagtgggaatagcgttctgg

SEQ ID NO: 1066687 - DNA, 25 bp, Homo sapien
gggattccacttcctgatgtcaggc

SEQ ID NO: 1066688 - DNA, 25 bp, Homo sapien
atgtcaggcaggagtcacggcgttg

SEQ ID NO: 1066689 - DNA, 25 bp, Homo sapien
tgtcactgaggattctgagcggagc

SEQ ID NO: 1066690 - DNA, 25 bp, Homo sapien
tcagctgggctgtaggcatcatgga

SEQ ID NO: 1066691 - DNA, 25 bp, Homo sapien
catggaaacgttgcaagttggcaca

SEQ ID NO: 1066692 - DNA, 25 bp, Homo sapien
acgttgcaagttggcacaggttgag

SEQ ID NO: 1066693 - DNA, 25 bp, Homo sapien
aggcatcatggaaacgttgcaagtt

SEQ ID NO: 1066694 - DNA, 25 bp, Homo sapien
aaatcaagctgagctcctaattcac

SEQ ID NO: 1066695 - DNA, 25 bp, Homo sapien
ctggcagctccttgatgatgaataa

SEQ ID NO: 1066696 - DNA, 25 bp, Homo sapien
tcaggcggcgcctcgtgggggaaaa

SEQ ID NO: 1066697 - DNA, 25 bp, Homo sapien
aattcacattccatctctggcagct

SEQ ID NO: 1066698 - DNA, 25 bp, Homo sapien
ctcgtacttaaaggtcagctcagca

SEQ ID NO: 1066699 - DNA, 25 bp, Homo sapien
gaaatgttgacgtggctcccagctg

SEQ ID NO: 1066700 - DNA, 25 bp, Homo sapien
cttttctcgtacttaaaggtcagct

SEQ ID NO: 1066701 - DNA, 25 bp, Homo sapien
gctttatggaaatgttgacgtggct

SEQ ID NO: 1066702 - DNA, 25 bp, Homo sapien
acccgcccaacctgccgaaggcact

SEQ ID NO: 1066703 - DNA, 25 bp, Homo sapien
aggcacccgcccaacctgccgaagg

SEQ ID NO: 1066704 - DNA, 25 bp, Homo sapien
caacctgccgaaggcacttgaacca

SEQ ID NO: 1066705 - DNA, 25 bp, Homo sapien
ccaaaacaggcacccgcccaacctg

SEQ ID NO: 1066706 - DNA, 25 bp, Homo sapien
tgccagcgtgctgggcaataggccc

SEQ ID NO: 1066707 - DNA, 25 bp, Homo sapien
tgctgtcaacacagcttggggacat

SEQ ID NO: 1066708 - DNA, 25 bp, Homo sapien
cagcttggggacatgccagcgtgct

SEQ ID NO: 1066709 - DNA, 25 bp, Homo sapien
tcaacacagcttggggacatgccag

SEQ ID NO: 1066710 - DNA, 25 bp, Homo sapien
ggtaggcaaatgaatgatgtgtgtt

SEQ ID NO: 1066711 - DNA, 25 bp, Homo sapien
aagctgcccttaaggtaggcaaatg

SEQ ID NO: 1066712 - DNA, 25 bp, Homo sapien
gcccttaaggtaggcaaatgaatga

SEQ ID NO: 1066713 - DNA, 25 bp, Homo sapien
taaggtaggcaaatgaatgatgtgt

SEQ ID NO: 1066714 - DNA, 25 bp, Homo sapien
gtcagcatgtggaagggttgggtca

SEQ ID NO: 1066715 - DNA, 25 bp, Homo sapien
gggtcagcatgtggaagggttgggt

SEQ ID NO: 1066716 - DNA, 25 bp, Homo sapien
tcagcatgtggaagggttgggtcag

SEQ ID NO: 1066717 - DNA, 25 bp, Homo sapien
ggtcagcatgtggaagggttgggtc

SEQ ID NO: 1066718 - DNA, 25 bp, Homo sapien
tctgacagcagggagtgactttcgc

SEQ ID NO: 1066719 - DNA, 25 bp, Homo sapien
aagagtctgtttggaggcacggcaa

SEQ ID NO: 1066720 - DNA, 25 bp, Homo sapien
tgtgcttggcactgcgctagactct

SEQ ID NO: 1066721 - DNA, 25 bp, Homo sapien
aatggacctgagttacggcttcagc

SEQ ID NO: 1066722 - DNA, 25 bp, Homo sapien
tgagggcttaacttgggtgagtcca

SEQ ID NO: 1066723 - DNA, 25 bp, Homo sapien
gagtcttgctggatccacttgtgga

SEQ ID NO: 1066724 - DNA, 25 bp, Homo sapien
tgtgagaagcgaagacagcagagtc

SEQ ID NO: 1066725 - DNA, 25 bp, Homo sapien
gacagtgtcgtagtcctgcagctga

SEQ ID NO: 1066726 - DNA, 25 bp, Homo sapien
gtcttgacccagaggccggttgcag

SEQ ID NO: 1066727 - DNA, 25 bp, Homo sapien
gatgtcccagagcttagccctgaag

SEQ ID NO: 1066728 - DNA, 25 bp, Homo sapien
tgatcctagattgctgggctggtaa

SEQ ID NO: 1066729 - DNA, 25 bp, Homo sapien
gaatcgaagttttgcacaagccctg

SEQ ID NO: 1066730 - DNA, 25 bp, Homo sapien
agctgaatttgaacaaactcatgag

SEQ ID NO: 1066731 - DNA, 25 bp, Homo sapien
tgaacaaactcatgagggggtggtt

SEQ ID NO: 1066732 - DNA, 25 bp, Homo sapien
tggggactggtgagatagctgccat

SEQ ID NO: 1066733 - DNA, 25 bp, Homo sapien
cagaagtggggactggtgagatagc

SEQ ID NO: 1066734 - DNA, 25 bp, Homo sapien
tgaagtccttttgaggactgagata

SEQ ID NO: 1066735 - DNA, 25 bp, Homo sapien
cttgtcactttcatcaaaaagttta

SEQ ID NO: 1066736 - DNA, 25 bp, Homo sapien
attgaagtccttttgaggactgaga

SEQ ID NO: 1066737 - DNA, 25 bp, Homo sapien
tttattgaagtccttttgaggactg

SEQ ID NO: 1066738 - DNA, 25 bp, Homo sapien
tttccgcgggacactcccatggctg

SEQ ID NO: 1066739 - DNA, 25 bp, Homo sapien
tcattcgggtgaaaaggcacatggt

SEQ ID NO: 1066740 - DNA, 25 bp, Homo sapien
agacagggccgtccatcattcgggt

SEQ ID NO: 1066741 - DNA, 25 bp, Homo sapien
ggccgtccatcattcgggtgaaaag

SEQ ID NO: 1066742 - DNA, 25 bp, Homo sapien
tgcataggctctgctagaatacaaa

SEQ ID NO: 1066743 - DNA, 25 bp, Homo sapien
gaaagactcttgagctcagcagtgt

SEQ ID NO: 1066744 - DNA, 25 bp, Homo sapien
tcagcagtgtcccaaaccttggtga

SEQ ID NO: 1066745 - DNA, 25 bp, Homo sapien
gaatctgacaaggttccagtgctag

SEQ ID NO: 1066746 - DNA, 25 bp, Homo sapien
cttggggtagttacgactccacact

SEQ ID NO: 1066747 - DNA, 25 bp, Homo sapien
cacttgcatactccttgggggcctt

SEQ ID NO: 1066748 - DNA, 25 bp, Homo sapien
ttgcatactccttgggggcctttac

SEQ ID NO: 1066749 - DNA, 25 bp, Homo sapien
ggggtagttacgactccacactgga

SEQ ID NO: 1066750 - DNA, 25 bp, Homo sapien
tgatagagccctgaggcagaaaact

SEQ ID NO: 1066751 - DNA, 25 bp, Homo sapien
cgatgttaaagtcccagccatgctg

SEQ ID NO: 1066752 - DNA, 25 bp, Homo sapien
tcagatgggcgcaagtctactgact

SEQ ID NO: 1066753 - DNA, 25 bp, Homo sapien
aactagagaccaccttcagatgggc

SEQ ID NO: 1066754 - DNA, 25 bp, Homo sapien
gaaagaaactcctgatggatttagg

SEQ ID NO: 1066755 - DNA, 25 bp, Homo sapien
ggagttaagcgctactatatgctag

SEQ ID NO: 1066756 - DNA, 25 bp, Homo sapien
ttacatggagggaccatcactgagg

SEQ ID NO: 1066757 - DNA, 25 bp, Homo sapien
tatatgctagttaaccctccaggag

SEQ ID NO: 1066758 - DNA, 25 bp, Homo sapien
tttgtcgatggccataacgctcagc

SEQ ID NO: 1066759 - DNA, 25 bp, Homo sapien
tcgatggccataacgctcagccagc

SEQ ID NO: 1066760 - DNA, 25 bp, Homo sapien
gcctttgtcgatggccataacgctc

SEQ ID NO: 1066761 - DNA, 25 bp, Homo sapien
tcagtgcctttgtcgatggccataa

SEQ ID NO: 1066762 - DNA, 25 bp, Homo sapien
ctaagaaggggcagatcaggctgta

SEQ ID NO: 1066763 - DNA, 25 bp, Homo sapien
aaggggcagatcaggctgtagagag

SEQ ID NO: 1066764 - DNA, 25 bp, Homo sapien
aagaaggggcagatcaggctgtaga

SEQ ID NO: 1066765 - DNA, 25 bp, Homo sapien
gaaggggcagatcaggctgtagaga

SEQ ID NO: 1066766 - DNA, 25 bp, Homo sapien
ccaggtgtggacctggaaaacagtt

SEQ ID NO: 1066767 - DNA, 25 bp, Homo sapien
ggttcttgcagcagttgtagtgtca

SEQ ID NO: 1066768 - DNA, 25 bp, Homo sapien
ttctggttcttgcagcagttgtagt

SEQ ID NO: 1066769 - DNA, 25 bp, Homo sapien
ttgcagcagttgtagtgtcagctcc

SEQ ID NO: 1066770 - DNA, 25 bp, Homo sapien
gcctgtggccctcctgttgtaccag

SEQ ID NO: 1066771 - DNA, 25 bp, Homo sapien
cctacagccctttgtgatccaggaa

SEQ ID NO: 1066772 - DNA, 25 bp, Homo sapien
gaacccctacagccctttgtgatcc

SEQ ID NO: 1066773 - DNA, 25 bp, Homo sapien
cctgtggccctcctgttgtaccaga

SEQ ID NO: 1066774 - DNA, 25 bp, Homo sapien
cctcctgactcccatgtctgcccat

SEQ ID NO: 1066775 - DNA, 25 bp, Homo sapien
ctcctcctcctgactcccatgtctg

SEQ ID NO: 1066776 - DNA, 25 bp, Homo sapien
tcctcctcctgactcccatgtctgc

SEQ ID NO: 1066777 - DNA, 25 bp, Homo sapien
ctcctcctgactcccatgtctgccc

SEQ ID NO: 1066778 - DNA, 25 bp, Homo sapien
catccccaaatgtctgctatcaaag

SEQ ID NO: 1066779 - DNA, 25 bp, Homo sapien
gctatcaaagcgagtttgatcctcc

SEQ ID NO: 1066780 - DNA, 25 bp, Homo sapien
ttcaaaatggcatcagggccctgct

SEQ ID NO: 1066781 - DNA, 25 bp, Homo sapien
ctattcatgatgttgttgtgtccgt

SEQ ID NO: 1066782 - DNA, 25 bp, Homo sapien
ggcttgccaataccatcgatcctgt

SEQ ID NO: 1066783 - DNA, 25 bp, Homo sapien
cagagctgtgagtcattgggataac

SEQ ID NO: 1066784 - DNA, 25 bp, Homo sapien
tctggagtccatccctcaatgcgag

SEQ ID NO: 1066785 - DNA, 25 bp, Homo sapien
tctgcgagggcatgacaggcttgcc

SEQ ID NO: 1066786 - DNA, 25 bp, Homo sapien
tgatctggattgatcttgccctgga

SEQ ID NO: 1066787 - DNA, 25 bp, Homo sapien
ggattcccagtagatgtccagtctg

SEQ ID NO: 1066788 - DNA, 25 bp, Homo sapien
catgagtgaaccttctggattccca

SEQ ID NO: 1066789 - DNA, 25 bp, Homo sapien
gggttgggctgctatggagaaacaa

SEQ ID NO: 1066790 - DNA, 25 bp, Homo sapien
cccgtccaagtactaacaaggcctg

SEQ ID NO: 1066791 - DNA, 25 bp, Homo sapien
gatcagacaagatcaggcacgttca

SEQ ID NO: 1066792 - DNA, 25 bp, Homo sapien
cagacaagatcaggcacgttcaggg

SEQ ID NO: 1066793 - DNA, 25 bp, Homo sapien
ccgagatcagacaagatcaggcacg

SEQ ID NO: 1066794 - DNA, 25 bp, Homo sapien
ccacaggactgtaagggccatgagg

SEQ ID NO: 1066795 - DNA, 25 bp, Homo sapien
tacaattataaaggtcttgttgggc

SEQ ID NO: 1066796 - DNA, 25 bp, Homo sapien
tgagggggcgccagggatttacaat

SEQ ID NO: 1066797 - DNA, 25 bp, Homo sapien
agcagaagccacaggactgtaaggg

SEQ ID NO: 1066798 - DNA, 25 bp, Homo sapien
tttttctgcttaagtctgttattga

SEQ ID NO: 1066799 - DNA, 25 bp, Homo sapien
gcttaagtctgttattgaacccctc

SEQ ID NO: 1066800 - DNA, 25 bp, Homo sapien
tttctgtttgatcttgtattatagt

SEQ ID NO: 1066801 - DNA, 25 bp, Homo sapien
tctgttattgaacccctccagtaaa

SEQ ID NO: 1066802 - DNA, 25 bp, Homo sapien
ttttgacagttctgttgtgttcctg

SEQ ID NO: 1066803 - DNA, 25 bp, Homo sapien
ccttggaatgataagttgggatgcc

SEQ ID NO: 1066804 - DNA, 25 bp, Homo sapien
caaatagaactgtgacttttgtttc

SEQ ID NO: 1066805 - DNA, 25 bp, Homo sapien
gggatgccaacctcgcattgatcca

SEQ ID NO: 1066806 - DNA, 25 bp, Homo sapien
ttcttcctgctgacagttcccacca

SEQ ID NO: 1066807 - DNA, 25 bp, Homo sapien
tcttcctgctgacagttcccaccat

SEQ ID NO: 1066808 - DNA, 25 bp, Homo sapien
attcttcctgctgacagttcccacc

SEQ ID NO: 1066809 - DNA, 25 bp, Homo sapien
gacggagcctttgttgtgaagctgt

SEQ ID NO: 1066810 - DNA, 25 bp, Homo sapien
ttcttggtgtctcactctgggtcat

SEQ ID NO: 1066811 - DNA, 25 bp, Homo sapien
gtcggatgccgctgacggagccttt

SEQ ID NO: 1066812 - DNA, 25 bp, Homo sapien
gccgctgacggagcctttgttgtga

SEQ ID NO: 1066813 - DNA, 25 bp, Homo sapien
tgaaggacatgggattcccacaaat

SEQ ID NO: 1066814 - DNA, 25 bp, Homo sapien
gaaggacatgggattcccacaaatt

SEQ ID NO: 1066815 - DNA, 25 bp, Homo sapien
ccttcctgcgggtacagtctttgaa

SEQ ID NO: 1066816 - DNA, 25 bp, Homo sapien
tccccgatgacccaggatatgagtc

SEQ ID NO: 1066817 - DNA, 25 bp, Homo sapien
gaaggttaggagacacaccctcaga

SEQ ID NO: 1066818 - DNA, 25 bp, Homo sapien
gatatgagtctgcacttgacaacca

SEQ ID NO: 1066819 - DNA, 25 bp, Homo sapien
cacttcgacaacgtgctggcttgga

SEQ ID NO: 1066820 - DNA, 25 bp, Homo sapien
cacaacatcaggtggaagggacacc

SEQ ID NO: 1066821 - DNA, 25 bp, Homo sapien
gacaggtacactgctttaccactca

SEQ ID NO: 1066822 - DNA, 25 bp, Homo sapien
tacacagtttcacaagacaggtaca

SEQ ID NO: 1066823 - DNA, 25 bp, Homo sapien
gggacacccagacctttacacagat

SEQ ID NO: 1066824 - DNA, 25 bp, Homo sapien
gatgcagttacccaaatgacctaat

SEQ ID NO: 1066825 - DNA, 25 bp, Homo sapien
caggcagggcctggatagtcttcag

SEQ ID NO: 1066826 - DNA, 25 bp, Homo sapien
taaagtatagaccagatctctgagt

SEQ ID NO: 1066827 - DNA, 25 bp, Homo sapien
tagagcaacctgtgtgactgaagat

SEQ ID NO: 1066828 - DNA, 25 bp, Homo sapien
ttggctccaaggacaagttgtctga

SEQ ID NO: 1066829 - DNA, 25 bp, Homo sapien
cagagaagagccgatcttgggcctt

SEQ ID NO: 1066830 - DNA, 25 bp, Homo sapien
gcaaaggccaattccgctgggcttg

SEQ ID NO: 1066831 - DNA, 25 bp, Homo sapien
gaatttcaggacttgcgtctcctgg

SEQ ID NO: 1066832 - DNA, 25 bp, Homo sapien
cacacatttgctttgcagacaaggg

SEQ ID NO: 1066833 - DNA, 25 bp, Homo sapien
gatgtcagattagggccgggcatca

SEQ ID NO: 1066834 - DNA, 25 bp, Homo sapien
taactccttgatagaaactgatgtc

SEQ ID NO: 1066835 - DNA, 25 bp, Homo sapien
gaataatagacccaaggcaagagga

SEQ ID NO: 1066836 - DNA, 25 bp, Homo sapien
ttgtcccctggaagagtaaatggag

SEQ ID NO: 1066837 - DNA, 25 bp, Homo sapien
cattgtcccctggaagagtaaatgg

SEQ ID NO: 1066838 - DNA, 25 bp, Homo sapien
tcattgtcccctggaagagtaaatg

SEQ ID NO: 1066839 - DNA, 25 bp, Homo sapien
cttcattgtcccctggaagagtaaa

SEQ ID NO: 1066840 - DNA, 25 bp, Homo sapien
caaagctgttatccagactgagagg

SEQ ID NO: 1066841 - DNA, 25 bp, Homo sapien
gacattgatcatctggcccgcttat

SEQ ID NO: 1066842 - DNA, 25 bp, Homo sapien
cccaccttggactcagctgtagata

SEQ ID NO: 1066843 - DNA, 25 bp, Homo sapien
tggtacttggtcctctggagcatgg

SEQ ID NO: 1066844 - DNA, 25 bp, Homo sapien
gaatgccgttcttgtccaatttctc

SEQ ID NO: 1066845 - DNA, 25 bp, Homo sapien
tactgcctttgaagagccacagggg

SEQ ID NO: 1066846 - DNA, 25 bp, Homo sapien
cccaggcagggaatgccgttcttgt

SEQ ID NO: 1066847 - DNA, 25 bp, Homo sapien
ccctctcaagtttggaatgaactgc

SEQ ID NO: 1066848 - DNA, 25 bp, Homo sapien
gattgggaatagttccagcccaaag

SEQ ID NO: 1066849 - DNA, 25 bp, Homo sapien
gcagtgtgacctcactgattgggaa

SEQ ID NO: 1066850 - DNA, 25 bp, Homo sapien
cttaattggcaagcctctggtgtcc

SEQ ID NO: 1066851 - DNA, 25 bp, Homo sapien
tctcaccgatcagagtggacaaagg

SEQ ID NO: 1066852 - DNA, 25 bp, Homo sapien
aggaggctggaggatttggagaagg

SEQ ID NO: 1066853 - DNA, 25 bp, Homo sapien
agaagggggatggctggctggcttg

SEQ ID NO: 1066854 - DNA, 25 bp, Homo sapien
caaagaagggcattgaggaggctgg

SEQ ID NO: 1066855 - DNA, 25 bp, Homo sapien
tggcttggccggcagccacaggtct

SEQ ID NO: 1066856 - DNA, 25 bp, Homo sapien
gaggaaaattccctgcattcgagaa

SEQ ID NO: 1066857 - DNA, 25 bp, Homo sapien
tgaggcctttaactatagcaagagg

SEQ ID NO: 1066858 - DNA, 25 bp, Homo sapien
cattcgagaacctctgggactcaca

SEQ ID NO: 1066859 - DNA, 25 bp, Homo sapien
taacacattcgtccagggtaccaga

SEQ ID NO: 1066860 - DNA, 25 bp, Homo sapien
tccttgctcagtagagaagttgcgg

SEQ ID NO: 1066861 - DNA, 25 bp, Homo sapien
gctcagcggtgctggaatcctgccc

SEQ ID NO: 1066862 - DNA, 25 bp, Homo sapien
ggaatcctgccctatagagatccat

SEQ ID NO: 1066863 - DNA, 25 bp, Homo sapien
agatccatttgctcgcagctccttg

SEQ ID NO: 1066864 - DNA, 25 bp, Homo sapien
tggagaatgtctcggcatcggactg

SEQ ID NO: 1066865 - DNA, 25 bp, Homo sapien
gaggccggtctctggcttagctgat

SEQ ID NO: 1066866 - DNA, 25 bp, Homo sapien
cccagacttgccacatgggcggtgg

SEQ ID NO: 1066867 - DNA, 25 bp, Homo sapien
caggcctcccggacgtacgttgagg

SEQ ID NO: 1066868 - DNA, 25 bp, Homo sapien
gggtcccgcgcattccttgcaggag

SEQ ID NO: 1066869 - DNA, 25 bp, Homo sapien
cgcgcattccttgcaggagggtgca

SEQ ID NO: 1066870 - DNA, 25 bp, Homo sapien
tcccgcgcattccttgcaggagggt

SEQ ID NO: 1066871 - DNA, 25 bp, Homo sapien
ggtcccgcgcattccttgcaggagg

SEQ ID NO: 1066872 - DNA, 25 bp, Homo sapien
ggcgagcggagcctctccctcggcg

SEQ ID NO: 1066873 - DNA, 25 bp, Homo sapien
ggcggcgagcggagcctctccctcg

SEQ ID NO: 1066874 - DNA, 25 bp, Homo sapien
cgagcggagcctctccctcggcgct

SEQ ID NO: 1066875 - DNA, 25 bp, Homo sapien
gcggcgagcggagcctctccctcgg

SEQ ID NO: 1066876 - DNA, 25 bp, Homo sapien
tttggcgtagacagcgaaggagcca

SEQ ID NO: 1066877 - DNA, 25 bp, Homo sapien
tcgccgagagtttggcgtagacagc

SEQ ID NO: 1066878 - DNA, 25 bp, Homo sapien
ttccctctcgccgagagtttggcgt

SEQ ID NO: 1066879 - DNA, 25 bp, Homo sapien
gacagcgaaggagccatcgtgactg

SEQ ID NO: 1066880 - DNA, 25 bp, Homo sapien
gggtgcccatcgcaggtgcctttcc

SEQ ID NO: 1066881 - DNA, 25 bp, Homo sapien
cacacagatgccaacgctccgtttt

SEQ ID NO: 1066882 - DNA, 25 bp, Homo sapien
atcgcaggtgcctttccactgcacg

SEQ ID NO: 1066883 - DNA, 25 bp, Homo sapien
ttctctggggtgtgtcggcaaaggg

SEQ ID NO: 1066884 - DNA, 25 bp, Homo sapien
gcttcggttggttcttggcacccag

SEQ ID NO: 1066885 - DNA, 25 bp, Homo sapien
ctttcactgaggagttctggctgct

SEQ ID NO: 1066886 - DNA, 25 bp, Homo sapien
tgccccgggaacataaagcaggcct

SEQ ID NO: 1066887 - DNA, 25 bp, Homo sapien
accaggcccgcgattctgaggagat

SEQ ID NO: 1066888 - DNA, 25 bp, Homo sapien
tgctggcgtagtcagtcccttcctc

SEQ ID NO: 1066889 - DNA, 25 bp, Homo sapien
gctggcgtagtcagtcccttcctcc

SEQ ID NO: 1066890 - DNA, 25 bp, Homo sapien
ggatgacaaacgctccttttgcccg

SEQ ID NO: 1066891 - DNA, 25 bp, Homo sapien
taactgggccttttgcagggataaa

SEQ ID NO: 1066892 - DNA, 25 bp, Homo sapien
gaatggcggaggatgtgagtaactg

SEQ ID NO: 1066893 - DNA, 25 bp, Homo sapien
ggtaaatctcatctgcccgttgcag

SEQ ID NO: 1066894 - DNA, 25 bp, Homo sapien
agtggaggcatttctttaaggaact

SEQ ID NO: 1066895 - DNA, 25 bp, Homo sapien
tggaggcatttctttaaggaactca

SEQ ID NO: 1066896 - DNA, 25 bp, Homo sapien
taaatcataactcagtggaggcatt

SEQ ID NO: 1066897 - DNA, 25 bp, Homo sapien
gaggcatttctttaaggaactcaaa

SEQ ID NO: 1066898 - DNA, 25 bp, Homo sapien
ggttcgtcagtttctcgcatcaggg

SEQ ID NO: 1066899 - DNA, 25 bp, Homo sapien
gacactgagtgacatagtgggcaat

SEQ ID NO: 1066900 - DNA, 25 bp, Homo sapien
acagagatgctgttaggttcgtcag

SEQ ID NO: 1066901 - DNA, 25 bp, Homo sapien
tcatgagtccttgtataaaggacac

SEQ ID NO: 1066902 - DNA, 25 bp, Homo sapien
ttttggctatagaggaaaattgaaa

SEQ ID NO: 1066903 - DNA, 25 bp, Homo sapien
tggctatagaggaaaattgaaagga

SEQ ID NO: 1066904 - DNA, 25 bp, Homo sapien
gctatagaggaaaattgaaaggatt

SEQ ID NO: 1066905 - DNA, 25 bp, Homo sapien
ttggctatagaggaaaattgaaagg

SEQ ID NO: 1066906 - DNA, 25 bp, Homo sapien
tctgtgatggagaaacgaattcaca

SEQ ID NO: 1066907 - DNA, 25 bp, Homo sapien
ttttgagcatccatcatgggtcaaa

SEQ ID NO: 1066908 - DNA, 25 bp, Homo sapien
ccatcatgggtcaaaattgtgaaag

SEQ ID NO: 1066909 - DNA, 25 bp, Homo sapien
cataatcacttacgcctttccaggc

SEQ ID NO: 1066910 - DNA, 25 bp, Homo sapien
ggagactttctggttccgagagtca

SEQ ID NO: 1066911 - DNA, 25 bp, Homo sapien
agggagactttctggttccgagagt

SEQ ID NO: 1066912 - DNA, 25 bp, Homo sapien
gactttctggttccgagagtcaggg

SEQ ID NO: 1066913 - DNA, 25 bp, Homo sapien
gagactttctggttccgagagtcag

SEQ ID NO: 1066914 - DNA, 25 bp, Homo sapien
cgcctgggcgggcagaatgacatct

SEQ ID NO: 1066915 - DNA, 25 bp, Homo sapien
tgtgggtttcaaacgcaacggctcg

SEQ ID NO: 1066916 - DNA, 25 bp, Homo sapien
aatgacatctgggaacagctggaag

SEQ ID NO: 1066917 - DNA, 25 bp, Homo sapien
tggaatgctgcggagctcaggaacc

SEQ ID NO: 1066918 - DNA, 25 bp, Homo sapien
cctcattcaccagaaagggagatga

SEQ ID NO: 1066919 - DNA, 25 bp, Homo sapien
ggctttcgctccagcaaggtggtta

SEQ ID NO: 1066920 - DNA, 25 bp, Homo sapien
cagcaaggtggttaggttcagaggc

SEQ ID NO: 1066921 - DNA, 25 bp, Homo sapien
cattcaccagaaagggagatgagga

SEQ ID NO: 1066922 - DNA, 25 bp, Homo sapien
ttctggaagcccctctgtccaccca

SEQ ID NO: 1066923 - DNA, 25 bp, Homo sapien
tcctctctttctggaagcccctctg

SEQ ID NO: 1066924 - DNA, 25 bp, Homo sapien
ctctttctggaagcccctctgtcca

SEQ ID NO: 1066925 - DNA, 25 bp, Homo sapien
ctggaagcccctctgtccacccagg

SEQ ID NO: 1066926 - DNA, 25 bp, Homo sapien
ccaccagggccgaggatgaaggaag

SEQ ID NO: 1066927 - DNA, 25 bp, Homo sapien
tcctggtggatccagatgtatctgg

SEQ ID NO: 1066928 - DNA, 25 bp, Homo sapien
tctcttccagatttcatggcaagtc

SEQ ID NO: 1066929 - DNA, 25 bp, Homo sapien
atgaaggaagcccattcccgctggc

SEQ ID NO: 1066930 - DNA, 25 bp, Homo sapien
gaaagctgagctcattgcctcttag

SEQ ID NO: 1066931 - DNA, 25 bp, Homo sapien
tgagctcattgcctcttagagttcc

SEQ ID NO: 1066932 - DNA, 25 bp, Homo sapien
gctcattgcctcttagagttccaac

SEQ ID NO: 1066933 - DNA, 25 bp, Homo sapien
agctgagctcattgcctcttagagt

SEQ ID NO: 1066934 - DNA, 25 bp, Homo sapien
tatgtcctctgaatatgtcagtgcc

SEQ ID NO: 1066935 - DNA, 25 bp, Homo sapien
ccggaaacgggctatttacagccat

SEQ ID NO: 1066936 - DNA, 25 bp, Homo sapien
taaatattttgatgtgtgctcttgc

SEQ ID NO: 1066937 - DNA, 25 bp, Homo sapien
tctgcccaactttgccctgatggag

SEQ ID NO: 1066938 - DNA, 25 bp, Homo sapien
ttggtccacaaagtggacaatcagc

SEQ ID NO: 1066939 - DNA, 25 bp, Homo sapien
cttggtccacaaagtggacaatcag

SEQ ID NO: 1066940 - DNA, 25 bp, Homo sapien
agcttcttggccattgagagcagag

SEQ ID NO: 1066941 - DNA, 25 bp, Homo sapien
gtggctttgcagaaggacataggcc

SEQ ID NO: 1066942 - DNA, 25 bp, Homo sapien
gctttgcagaaggacataggcccca

SEQ ID NO: 1066943 - DNA, 25 bp, Homo sapien
tttgcagaaggacataggccccaga

SEQ ID NO: 1066944 - DNA, 25 bp, Homo sapien
gcagaaggacataggccccagaaaa

SEQ ID NO: 1066945 - DNA, 25 bp, Homo sapien
aacaaggagatctcatctttgccac

SEQ ID NO: 1066946 - DNA, 25 bp, Homo sapien
gttccaccaacaaggagatctcatc

SEQ ID NO: 1066947 - DNA, 25 bp, Homo sapien
ctgttccaccaacaaggagatctca

SEQ ID NO: 1066948 - DNA, 25 bp, Homo sapien
caccaacaaggagatctcatctttg

SEQ ID NO: 1066949 - DNA, 25 bp, Homo sapien
gcttcagaagcttgtctccgacaat

SEQ ID NO: 1066950 - DNA, 25 bp, Homo sapien
gctctttggtgaggcttaggaactc

SEQ ID NO: 1066951 - DNA, 25 bp, Homo sapien
gtcccctcgggagagctgccgggta

SEQ ID NO: 1066952 - DNA, 25 bp, Homo sapien
tcgaccaggatcgagtgctctttgg

SEQ ID NO: 1066953 - DNA, 25 bp, Homo sapien
tgacagtagaagtggcagaatcaca

SEQ ID NO: 1066954 - DNA, 25 bp, Homo sapien
aagttggagtcacctaggatgcggc

SEQ ID NO: 1066955 - DNA, 25 bp, Homo sapien
gttgtcagggaccttggatgtctca

SEQ ID NO: 1066956 - DNA, 25 bp, Homo sapien
cctcggcggcacacagaatgtctgt

SEQ ID NO: 1066957 - DNA, 25 bp, Homo sapien
cacagacatgcttagacacaccact

SEQ ID NO: 1066958 - DNA, 25 bp, Homo sapien
cagacatatgcacaaatgtgtacac

SEQ ID NO: 1066959 - DNA, 25 bp, Homo sapien
aactccttttggcacacttttgctc

SEQ ID NO: 1066960 - DNA, 25 bp, Homo sapien
ccaacagggaaatatctatgggtcc

SEQ ID NO: 1066961 - DNA, 25 bp, Homo sapien
gggaccatcacaggatcctccacag

SEQ ID NO: 1066962 - DNA, 25 bp, Homo sapien
aggcaccgggatctgtctggatgca

SEQ ID NO: 1066963 - DNA, 25 bp, Homo sapien
gcctcagtgttacctgttgataata

SEQ ID NO: 1066964 - DNA, 25 bp, Homo sapien
gtgcactgtgctgcccaatagcagg

SEQ ID NO: 1066965 - DNA, 25 bp, Homo sapien
aatgatgaatcctctgcagcacaca

SEQ ID NO: 1066966 - DNA, 25 bp, Homo sapien
ctttttgtggactaaatgatgaatc

SEQ ID NO: 1066967 - DNA, 25 bp, Homo sapien
tttgtggactaaatgatgaatcctc

SEQ ID NO: 1066968 - DNA, 25 bp, Homo sapien
gactaaatgatgaatcctctgcagc

SEQ ID NO: 1066969 - DNA, 25 bp, Homo sapien
tggccccaaggaactcatagagcaa

SEQ ID NO: 1066970 - DNA, 25 bp, Homo sapien
tttgtttcgaagtctcggctgcccg

SEQ ID NO: 1066971 - DNA, 25 bp, Homo sapien
tctcggctggacatgtaggtttctt

SEQ ID NO: 1066972 - DNA, 25 bp, Homo sapien
actggctgagaaagaggctcccttg

SEQ ID NO: 1066973 - DNA, 25 bp, Homo sapien
tagttcaggttgagccagagtggct

SEQ ID NO: 1066974 - DNA, 25 bp, Homo sapien
ctgatactgcaagaaggtagagtga

SEQ ID NO: 1066975 - DNA, 25 bp, Homo sapien
ttgctgaggtcatggctgtaggaaa

SEQ ID NO: 1066976 - DNA, 25 bp, Homo sapien
tgaaaacattccctgtgtacttcgg

SEQ ID NO: 1066977 - DNA, 25 bp, Homo sapien
agccacaactagcaaagagactctg

SEQ ID NO: 1066978 - DNA, 25 bp, Homo sapien
tggaacagaagacctaaattgggac

SEQ ID NO: 1066979 - DNA, 25 bp, Homo sapien
ccaaaccaggacacttgagagtgaa

SEQ ID NO: 1066980 - DNA, 25 bp, Homo sapien
cacagtgtgaactggaattcggaca

SEQ ID NO: 1066981 - DNA, 25 bp, Homo sapien
tttatatgcagaagagccaatcccc

SEQ ID NO: 1066982 - DNA, 25 bp, Homo sapien
gacatagcaacaggacaagccgagt

SEQ ID NO: 1066983 - DNA, 25 bp, Homo sapien
gaagccagtgcgaggaacagaagac

SEQ ID NO: 1066984 - DNA, 25 bp, Homo sapien
cagaaactaagcctggtggaccagc

SEQ ID NO: 1066985 - DNA, 25 bp, Homo sapien
gaagcccaggaacctcatagtcagc

SEQ ID NO: 1066986 - DNA, 25 bp, Homo sapien
gaacctcatagtcagccctatgatg

SEQ ID NO: 1066987 - DNA, 25 bp, Homo sapien
ccaggaacctcatagtcagccctat

SEQ ID NO: 1066988 - DNA, 25 bp, Homo sapien
aagcccaggaacctcatagtcagcc

SEQ ID NO: 1066989 - DNA, 25 bp, Homo sapien
ccagacaggactgagtttgtcccat

SEQ ID NO: 1066990 - DNA, 25 bp, Homo sapien
cccagacaggactgagtttgtccca

SEQ ID NO: 1066991 - DNA, 25 bp, Homo sapien
ttcccagacaggactgagtttgtcc

SEQ ID NO: 1066992 - DNA, 25 bp, Homo sapien
tgagtttgtcccatcacattgctga

SEQ ID NO: 1066993 - DNA, 25 bp, Homo sapien
ggtgcaaagcctgctgatagggcat

SEQ ID NO: 1066994 - DNA, 25 bp, Homo sapien
agggcatcctcgctgcctgctgtgg

SEQ ID NO: 1066995 - DNA, 25 bp, Homo sapien
tgttgggagtaacatcccagctgcg

SEQ ID NO: 1066996 - DNA, 25 bp, Homo sapien
gtaacatcccagctgcgggtgcaaa

SEQ ID NO: 1066997 - DNA, 25 bp, Homo sapien
gttttccacacgcatgccggtatgt

SEQ ID NO: 1066998 - DNA, 25 bp, Homo sapien
catgccggtatgtgagtctgtactc

SEQ ID NO: 1066999 - DNA, 25 bp, Homo sapien
ttgtgttttccacacgcatgccggt

SEQ ID NO: 1067000 - DNA, 25 bp, Homo sapien
gagtctgtactccagagccaatggt

SEQ ID NO: 1067001 - DNA, 25 bp, Homo sapien
gaggtgcggtttgcacggagggtgg

SEQ ID NO: 1067002 - DNA, 25 bp, Homo sapien
tttcaggtcagaggtgcggtttgca

SEQ ID NO: 1067003 - DNA, 25 bp, Homo sapien
ctcccgaacattctaacacatttca

SEQ ID NO: 1067004 - DNA, 25 bp, Homo sapien
cctcccgaacattctaacacatttc

SEQ ID NO: 1067005 - DNA, 25 bp, Homo sapien
gaaagaggtactgcggtccatctcc

SEQ ID NO: 1067006 - DNA, 25 bp, Homo sapien
gaagagcggaagatctgctgtccca

SEQ ID NO: 1067007 - DNA, 25 bp, Homo sapien
gacaaaagggatgtagctcagcaga

SEQ ID NO: 1067008 - DNA, 25 bp, Homo sapien
catctttggaggtgtcctctgaggg

SEQ ID NO: 1067009 - DNA, 25 bp, Homo sapien
tgggcagccctgataagcagtcgaa

SEQ ID NO: 1067010 - DNA, 25 bp, Homo sapien
gccttcagactgtcccaggaagtag

SEQ ID NO: 1067011 - DNA, 25 bp, Homo sapien
gctgtttgctgttaagccttcagac

SEQ ID NO: 1067012 - DNA, 25 bp, Homo sapien
caatttgagtagaattttcagccag

SEQ ID NO: 1067013 - DNA, 25 bp, Homo sapien
atcaagggccctccggatgtcgagc

SEQ ID NO: 1067014 - DNA, 25 bp, Homo sapien
tgtgcatcaagggccctccggatgt

SEQ ID NO: 1067015 - DNA, 25 bp, Homo sapien
gggccctccggatgtcgagccgaac

SEQ ID NO: 1067016 - DNA, 25 bp, Homo sapien
aaaataggggctgtgcatcaagggc

SEQ ID NO: 1067017 - DNA, 25 bp, Homo sapien
ctagtcctgatccaagggctaaggg

SEQ ID NO: 1067018 - DNA, 25 bp, Homo sapien
tgtgacctggtcagaaccttgcttt

SEQ ID NO: 1067019 - DNA, 25 bp, Homo sapien
tcagtgttggccaatagatgaatct

SEQ ID NO: 1067020 - DNA, 25 bp, Homo sapien
caagcaagtatgaatatgagggtca

SEQ ID NO: 1067021 - DNA, 25 bp, Homo sapien
taataaactgctgaagctaagcctt

SEQ ID NO: 1067022 - DNA, 25 bp, Homo sapien
tgcagcaagaagaggacttgtctgt

SEQ ID NO: 1067023 - DNA, 25 bp, Homo sapien
taagccttaagactttataatgcag

SEQ ID NO: 1067024 - DNA, 25 bp, Homo sapien
tgattaatagtttttgatcgtcccc

SEQ ID NO: 1067025 - DNA, 25 bp, Homo sapien
caggctaaacgtgttgtctgcccat

SEQ ID NO: 1067026 - DNA, 25 bp, Homo sapien
tcctgcaggctaaacgtgttgtctg

SEQ ID NO: 1067027 - DNA, 25 bp, Homo sapien
gtttcctgcaggctaaacgtgttgt

SEQ ID NO: 1067028 - DNA, 25 bp, Homo sapien
tgcaggctaaacgtgttgtctgccc

SEQ ID NO: 1067029 - DNA, 25 bp, Homo sapien
tccccactgacagttactaaaagta

SEQ ID NO: 1067030 - DNA, 25 bp, Homo sapien
cagctactgtcatgggttgaggttt

SEQ ID NO: 1067031 - DNA, 25 bp, Homo sapien
catcttaagtgaagtctgggcattc

SEQ ID NO: 1067032 - DNA, 25 bp, Homo sapien
gaagtgtctaggaacattttcgatg

SEQ ID NO: 1067033 - DNA, 25 bp, Homo sapien
agaactgaggactgtttcaacctgc

SEQ ID NO: 1067034 - DNA, 25 bp, Homo sapien
tgaatatgagaagaactgaggactg

SEQ ID NO: 1067035 - DNA, 25 bp, Homo sapien
cgacctccacctctgaatatgagaa

SEQ ID NO: 1067036 - DNA, 25 bp, Homo sapien
cacctctgaatatgagaagaactga

SEQ ID NO: 1067037 - DNA, 25 bp, Homo sapien
gattctaagcccttgatttctaatg

SEQ ID NO: 1067038 - DNA, 25 bp, Homo sapien
gcttctccttggttgatattttccc

SEQ ID NO: 1067039 - DNA, 25 bp, Homo sapien
tctaatgccaatgcttctccttggt

SEQ ID NO: 1067040 - DNA, 25 bp, Homo sapien
ttgatttctaatgcccttgattcta

SEQ ID NO: 1067041 - DNA, 25 bp, Homo sapien
taacattcttgtaggtcgaggacca

SEQ ID NO: 1067042 - DNA, 25 bp, Homo sapien
gaggactgtcatccgcaggattgta

SEQ ID NO: 1067043 - DNA, 25 bp, Homo sapien
taaaggtgaatgtatgatcacgagt

SEQ ID NO: 1067044 - DNA, 25 bp, Homo sapien
tgaagaaagcgttggacatgcacac

SEQ ID NO: 1067045 - DNA, 25 bp, Homo sapien
tgaatgtagtgaagtctgcgttcca

SEQ ID NO: 1067046 - DNA, 25 bp, Homo sapien
agtgagagtgtgagttggtcattat

SEQ ID NO: 1067047 - DNA, 25 bp, Homo sapien
gttggtcattattaaaattgtgcac

SEQ ID NO: 1067048 - DNA, 25 bp, Homo sapien
gaacaccaagaaagtagcccatcgc

SEQ ID NO: 1067049 - DNA, 25 bp, Homo sapien
tgtggagttcttgctaggaagtaaa

SEQ ID NO: 1067050 - DNA, 25 bp, Homo sapien
agctctttgtggtctgtgagttgtt

SEQ ID NO: 1067051 - DNA, 25 bp, Homo sapien
tctttgtggtctgtgagttgttagg

SEQ ID NO: 1067052 - DNA, 25 bp, Homo sapien
gctgtggagttcttgctaggaagta

SEQ ID NO: 1067053 - DNA, 25 bp, Homo sapien
ttctggacctcccattgacccctgg

SEQ ID NO: 1067054 - DNA, 25 bp, Homo sapien
ggacctcccattgacccctggatgt

SEQ ID NO: 1067055 - DNA, 25 bp, Homo sapien
acccctggatgtctggagcaaaacc

SEQ ID NO: 1067056 - DNA, 25 bp, Homo sapien
caggtttctggacctcccattgacc

SEQ ID NO: 1067057 - DNA, 25 bp, Homo sapien
tgagctccaccaagctgtcagcgtt

SEQ ID NO: 1067058 - DNA, 25 bp, Homo sapien
tcctgtcactgcctgttgcttggaa

SEQ ID NO: 1067059 - DNA, 25 bp, Homo sapien
cctgttgcttggaatgaaaggccat

SEQ ID NO: 1067060 - DNA, 25 bp, Homo sapien
gctgtcagcgttgctttgtcctgtc

SEQ ID NO: 1067061 - DNA, 25 bp, Homo sapien
actaggagttagtgaagatgcaaac

SEQ ID NO: 1067062 - DNA, 25 bp, Homo sapien
tgggccaatcaagttcttgtaaaaa

SEQ ID NO: 1067063 - DNA, 25 bp, Homo sapien
ctatagagcgtttggcttcttgcag

SEQ ID NO: 1067064 - DNA, 25 bp, Homo sapien
tgaagatgcaaactcaatgcaagct

SEQ ID NO: 1067065 - DNA, 25 bp, Homo sapien
tttcaactcatcatagcccagcttc

SEQ ID NO: 1067066 - DNA, 25 bp, Homo sapien
tcggaggccccaaactttcaactca

SEQ ID NO: 1067067 - DNA, 25 bp, Homo sapien
aattcatagcccacgtctctgtcct

SEQ ID NO: 1067068 - DNA, 25 bp, Homo sapien
ccctgtttctgtgatcaattcatag

SEQ ID NO: 1067069 - DNA, 25 bp, Homo sapien
aaagtcctggttccaaagcacctag

SEQ ID NO: 1067070 - DNA, 25 bp, Homo sapien
ttcactctccatgaacgtcctttca

SEQ ID NO: 1067071 - DNA, 25 bp, Homo sapien
aaagcacctagaaaccatacagcaa

SEQ ID NO: 1067072 - DNA, 25 bp, Homo sapien
actgtgaagctgttcactctccatg

SEQ ID NO: 1067073 - DNA, 25 bp, Homo sapien
agatctctaactctgctctgatgct

SEQ ID NO: 1067074 - DNA, 25 bp, Homo sapien
gatctctaactctgctctgatgctc

SEQ ID NO: 1067075 - DNA, 25 bp, Homo sapien
atctctaactctgctctgatgctct

SEQ ID NO: 1067076 - DNA, 25 bp, Homo sapien
tcccacagatgcctcatgctttgaa

SEQ ID NO: 1067077 - DNA, 25 bp, Homo sapien
tagtatgaatgaggagttggcagct

SEQ ID NO: 1067078 - DNA, 25 bp, Homo sapien
gaacatctagtatgaatgaggagtt

SEQ ID NO: 1067079 - DNA, 25 bp, Homo sapien
ggacactgccttgcctgcagtctga

SEQ ID NO: 1067080 - DNA, 25 bp, Homo sapien
atccatctccccaatgatctcactg

SEQ ID NO: 1067081 - DNA, 25 bp, Homo sapien
actccaggcagaactgtgcttcatc

SEQ ID NO: 1067082 - DNA, 25 bp, Homo sapien
gtgcttcatccatctccccaatgat

SEQ ID NO: 1067083 - DNA, 25 bp, Homo sapien
gatctcactgacttcttgaacatga

SEQ ID NO: 1067084 - DNA, 25 bp, Homo sapien
aattgggtcacaaccctggttattg

SEQ ID NO: 1067085 - DNA, 25 bp, Homo sapien
tctctttactggttctgatctgtct

SEQ ID NO: 1067086 - DNA, 25 bp, Homo sapien
ctgaccactagacttgagggaaaat

SEQ ID NO: 1067087 - DNA, 25 bp, Homo sapien
tcctctctttactggttctgatctg

SEQ ID NO: 1067088 - DNA, 25 bp, Homo sapien
gacagtgcactgtccttgctgagaa

SEQ ID NO: 1067089 - DNA, 25 bp, Homo sapien
gctcagtttgtcctgctgaggtagg

SEQ ID NO: 1067090 - DNA, 25 bp, Homo sapien
tgcaggacagtgcactgtccttgct

SEQ ID NO: 1067091 - DNA, 25 bp, Homo sapien
ccttgctgagaaagtggggctcagt

SEQ ID NO: 1067092 - DNA, 25 bp, Homo sapien
aggaagcagacataggtctgtaggc

SEQ ID NO: 1067093 - DNA, 25 bp, Homo sapien
cataggtctgtaggctgaggcttcc

SEQ ID NO: 1067094 - DNA, 25 bp, Homo sapien
gaagcagacataggtctgtaggctg

SEQ ID NO: 1067095 - DNA, 25 bp, Homo sapien
cagacataggtctgtaggctgaggc

SEQ ID NO: 1067096 - DNA, 25 bp, Homo sapien
tgcagcccttgaatcagactcagcc

SEQ ID NO: 1067097 - DNA, 25 bp, Homo sapien
tttctgcagcccttgaatcagactc

SEQ ID NO: 1067098 - DNA, 25 bp, Homo sapien
tctgcagcccttgaatcagactcag

SEQ ID NO: 1067099 - DNA, 25 bp, Homo sapien
ctgctctgattgccactgcaggagt

SEQ ID NO: 1067100 - DNA, 25 bp, Homo sapien
tggtgagcttgacactgttggccag

SEQ ID NO: 1067101 - DNA, 25 bp, Homo sapien
ctttctgttggtgagcttgacactg

SEQ ID NO: 1067102 - DNA, 25 bp, Homo sapien
tctgttggtgagcttgacactgttg

SEQ ID NO: 1067103 - DNA, 25 bp, Homo sapien
ctgtattctttctgttggtgagctt

SEQ ID NO: 1067104 - DNA, 25 bp, Homo sapien
ttgcctgccaacaccgcaccaccct

SEQ ID NO: 1067105 - DNA, 25 bp, Homo sapien
agccttgcctgccaacaccgcacca

SEQ ID NO: 1067106 - DNA, 25 bp, Homo sapien
attagccttgcctgccaacaccgca

SEQ ID NO: 1067107 - DNA, 25 bp, Homo sapien
cttattagccttgcctgccaacacc

SEQ ID NO: 1067108 - DNA, 25 bp, Homo sapien
cctgggtgcctgttaggaaggtgcg

SEQ ID NO: 1067109 - DNA, 25 bp, Homo sapien
catttgcctcaaggtcccctgcatt

SEQ ID NO: 1067110 - DNA, 25 bp, Homo sapien
tgttaggaaggtgcggcaaacctcg

SEQ ID NO: 1067111 - DNA, 25 bp, Homo sapien
tgcggcaaacctcgtaagtctcctt

SEQ ID NO: 1067112 - DNA, 25 bp, Homo sapien
acaaccaggaaatggtgtagccctg

SEQ ID NO: 1067113 - DNA, 25 bp, Homo sapien
caaccaggaaatggtgtagccctgc

SEQ ID NO: 1067114 - DNA, 25 bp, Homo sapien
tggtgtagccctgcttccaactctt

SEQ ID NO: 1067115 - DNA, 25 bp, Homo sapien
gttctcattgtacattcttttggtt

SEQ ID NO: 1067116 - DNA, 25 bp, Homo sapien
ctttgttctcattgtacattctttt

SEQ ID NO: 1067117 - DNA, 25 bp, Homo sapien
gcagtttggtggctcctcccatctc

SEQ ID NO: 1067118 - DNA, 25 bp, Homo sapien
tctgggccctgcagtttggtggctc

SEQ ID NO: 1067119 - DNA, 25 bp, Homo sapien
ccaggctgggatagggcaggatgag

SEQ ID NO: 1067120 - DNA, 25 bp, Homo sapien
ggtaggatctccagacaggtagtca

SEQ ID NO: 1067121 - DNA, 25 bp, Homo sapien
tagggcaggatgagctcagagtcta

SEQ ID NO: 1067122 - DNA, 25 bp, Homo sapien
gctcagagtctatgtgggtaggatc

SEQ ID NO: 1067123 - DNA, 25 bp, Homo sapien
aggcctggatatgtctgcttgtagg

SEQ ID NO: 1067124 - DNA, 25 bp, Homo sapien
gcctggatatgtctgcttgtagggt

SEQ ID NO: 1067125 - DNA, 25 bp, Homo sapien
ctaggcctggatatgtctgcttgta

SEQ ID NO: 1067126 - DNA, 25 bp, Homo sapien
ctggatatgtctgcttgtagggttc

SEQ ID NO: 1067127 - DNA, 25 bp, Homo sapien
aaggcggcaacgcagatgacctgat

SEQ ID NO: 1067128 - DNA, 25 bp, Homo sapien
ctgccaaggcggcaacgcagatgac

SEQ ID NO: 1067129 - DNA, 25 bp, Homo sapien
tagtcacaggctgccaaggcggcaa

SEQ ID NO: 1067130 - DNA, 25 bp, Homo sapien
gatgacctgatgtctcttgctggct

SEQ ID NO: 1067131 - DNA, 25 bp, Homo sapien
tcatttggcctgcccattaagactt

SEQ ID NO: 1067132 - DNA, 25 bp, Homo sapien
cattatagttgtcctctttgtttcc

SEQ ID NO: 1067133 - DNA, 25 bp, Homo sapien
gtcacacccattatagttgtcctct

SEQ ID NO: 1067134 - DNA, 25 bp, Homo sapien
ttggcctgcccattaagacttcttg

SEQ ID NO: 1067135 - DNA, 25 bp, Homo sapien
cgcatgccaaagagcgagtgtggac

SEQ ID NO: 1067136 - DNA, 25 bp, Homo sapien
aaagagcgagtgtggacatagatga

SEQ ID NO: 1067137 - DNA, 25 bp, Homo sapien
tgccaaagagcgagtgtggacatag

SEQ ID NO: 1067138 - DNA, 25 bp, Homo sapien
agggttgcacatagaggtgctgcat

SEQ ID NO: 1067139 - DNA, 25 bp, Homo sapien
tgcatctctgcttggttggcccctg

SEQ ID NO: 1067140 - DNA, 25 bp, Homo sapien
gggtcccacttctagagtttctgag

SEQ ID NO: 1067141 - DNA, 25 bp, Homo sapien
ccaggagggaggcacctaggtaact

SEQ ID NO: 1067142 - DNA, 25 bp, Homo sapien
ctttctttgtgatgcatggaggcca

SEQ ID NO: 1067143 - DNA, 25 bp, Homo sapien
tgtagtccacctgagggtagttgtg

SEQ ID NO: 1067144 - DNA, 25 bp, Homo sapien
gtagtccacctgagggtagttgtgg

SEQ ID NO: 1067145 - DNA, 25 bp, Homo sapien
aagctgaaggggtttccttgatact

SEQ ID NO: 1067146 - DNA, 25 bp, Homo sapien
agctgaaggggtttccttgatactt

SEQ ID NO: 1067147 - DNA, 25 bp, Homo sapien
ggcgatgctgatagcaacgttttcc

SEQ ID NO: 1067148 - DNA, 25 bp, Homo sapien
cagcaaggcgatgctgatagcaacg

SEQ ID NO: 1067149 - DNA, 25 bp, Homo sapien
gcaaggcgatgctgatagcaacgtt

SEQ ID NO: 1067150 - DNA, 25 bp, Homo sapien
caaggcgatgctgatagcaacgttt

SEQ ID NO: 1067151 - DNA, 25 bp, Homo sapien
tggaggaagtgtcatgtgtcctgca

SEQ ID NO: 1067152 - DNA, 25 bp, Homo sapien
gaagtgtcatgtgtcctgcatgtag

SEQ ID NO: 1067153 - DNA, 25 bp, Homo sapien
tgtcatgtgtcctgcatgtaggtac

SEQ ID NO: 1067154 - DNA, 25 bp, Homo sapien
tgtgtcctgcatgtaggtaccactt

SEQ ID NO: 1067155 - DNA, 25 bp, Homo sapien
gtgtcccctacctggctgtgaggac

SEQ ID NO: 1067156 - DNA, 25 bp, Homo sapien
tatttgttgctgtgctcccagtgtc

SEQ ID NO: 1067157 - DNA, 25 bp, Homo sapien
gagcctgacatctagtcagtgttag

SEQ ID NO: 1067158 - DNA, 25 bp, Homo sapien
ctctgtgggctaaattgagggttaa

SEQ ID NO: 1067159 - DNA, 25 bp, Homo sapien
tggagaaggccacgttgacctccat

SEQ ID NO: 1067160 - DNA, 25 bp, Homo sapien
ccgaatggagaaggccacgttgacc

SEQ ID NO: 1067161 - DNA, 25 bp, Homo sapien
aatggagaaggccacgttgacctcc

SEQ ID NO: 1067162 - DNA, 25 bp, Homo sapien
ctgccgaatggagaaggccacgttg

SEQ ID NO: 1067163 - DNA, 25 bp, Homo sapien
tgggagcagactctcaatgtcctct

SEQ ID NO: 1067164 - DNA, 25 bp, Homo sapien
gattgggagcagactctcaatgtcc

SEQ ID NO: 1067165 - DNA, 25 bp, Homo sapien
gagcgattgggagcagactctcaat

SEQ ID NO: 1067166 - DNA, 25 bp, Homo sapien
aagatgagcgattgggagcagactc

SEQ ID NO: 1067167 - DNA, 25 bp, Homo sapien
ggcaaggctttttccgatatcgaac

SEQ ID NO: 1067168 - DNA, 25 bp, Homo sapien
gatatcgaacactgaactctgtttc

SEQ ID NO: 1067169 - DNA, 25 bp, Homo sapien
ggctttttccgatatcgaacactga

SEQ ID NO: 1067170 - DNA, 25 bp, Homo sapien
ccttgacattggcaaggctttttcc

SEQ ID NO: 1067171 - DNA, 25 bp, Homo sapien
gctgggtgcacatcaatgtttttca

SEQ ID NO: 1067172 - DNA, 25 bp, Homo sapien
cagctgggtgcacatcaatgttttt

SEQ ID NO: 1067173 - DNA, 25 bp, Homo sapien
tgggtgcacatcaatgtttttcaca

SEQ ID NO: 1067174 - DNA, 25 bp, Homo sapien
ctcagctgggtgcacatcaatgttt

SEQ ID NO: 1067175 - DNA, 25 bp, Homo sapien
caagagactcggtggtgaatcgaag

SEQ ID NO: 1067176 - DNA, 25 bp, Homo sapien
caggagtgctgacggcaagagactc

SEQ ID NO: 1067177 - DNA, 25 bp, Homo sapien
gcttttattagcaatcagtgctctg

SEQ ID NO: 1067178 - DNA, 25 bp, Homo sapien
tgaatcgaagtggttggctctcagg

SEQ ID NO: 1067179 - DNA, 25 bp, Homo sapien
tggttctgctagttcctttccctgg

SEQ ID NO: 1067180 - DNA, 25 bp, Homo sapien
gaaaatccagctgattcccagggcc

SEQ ID NO: 1067181 - DNA, 25 bp, Homo sapien
tatggccccagtggatgaagttctt

SEQ ID NO: 1067182 - DNA, 25 bp, Homo sapien
ccagggccccattgactgagtacat

SEQ ID NO: 1067183 - DNA, 25 bp, Homo sapien
aatggcttttacaccccactcgaca

SEQ ID NO: 1067184 - DNA, 25 bp, Homo sapien
catcttcaatggcttttacacccca

SEQ ID NO: 1067185 - DNA, 25 bp, Homo sapien
tttacaccccactcgacataactgt

SEQ ID NO: 1067186 - DNA, 25 bp, Homo sapien
cattcatcttcaatggcttttacac

SEQ ID NO: 1067187 - DNA, 25 bp, Homo sapien
tcttgctgttccacctcataactcc

SEQ ID NO: 1067188 - DNA, 25 bp, Homo sapien
ttgctgttccacctcataactccta

SEQ ID NO: 1067189 - DNA, 25 bp, Homo sapien
tgttccacctcataactcctaaaag

SEQ ID NO: 1067190 - DNA, 25 bp, Homo sapien
gctgttccacctcataactcctaaa

SEQ ID NO: 1067191 - DNA, 25 bp, Homo sapien
gagccattccggacgtctttctcat

SEQ ID NO: 1067192 - DNA, 25 bp, Homo sapien
gctccgagccattccggacgtcttt

SEQ ID NO: 1067193 - DNA, 25 bp, Homo sapien
tcctggctccgagccattccggacg

SEQ ID NO: 1067194 - DNA, 25 bp, Homo sapien
cattccggacgtctttctcatccat

SEQ ID NO: 1067195 - DNA, 25 bp, Homo sapien
tcattcaacaccgggtggccctgga

SEQ ID NO: 1067196 - DNA, 25 bp, Homo sapien
agccagcaataagcacggcgggtgt

SEQ ID NO: 1067197 - DNA, 25 bp, Homo sapien
caccgggtggccctggaaatctgtt

SEQ ID NO: 1067198 - DNA, 25 bp, Homo sapien
taagcacggcgggtgtcagcaccgt

SEQ ID NO: 1067199 - DNA, 25 bp, Homo sapien
tgcgaaccaggagcactaatctcag

SEQ ID NO: 1067200 - DNA, 25 bp, Homo sapien
gaaattcattgcgaaccaggagcac

SEQ ID NO: 1067201 - DNA, 25 bp, Homo sapien
ccaggagcactaatctcagctttga

SEQ ID NO: 1067202 - DNA, 25 bp, Homo sapien
ttagtatgatggaaattcattgcga

SEQ ID NO: 1067203 - DNA, 25 bp, Homo sapien
cacaattttgatgacccctggcctt

SEQ ID NO: 1067204 - DNA, 25 bp, Homo sapien
caagaatgtcctgtaccatggagct

SEQ ID NO: 1067205 - DNA, 25 bp, Homo sapien
tatggcagcactaggtatctggcgg

SEQ ID NO: 1067206 - DNA, 25 bp, Homo sapien
gtaacccttggtctagctgaactca

SEQ ID NO: 1067207 - DNA, 25 bp, Homo sapien
tgactattgactccataacatctct

SEQ ID NO: 1067208 - DNA, 25 bp, Homo sapien
tcctgcaagaattccactgacaagc

SEQ ID NO: 1067209 - DNA, 25 bp, Homo sapien
gagagttactggcatcacctttcca

SEQ ID NO: 1067210 - DNA, 25 bp, Homo sapien
gcacagcacagatactggtgcaaag

SEQ ID NO: 1067211 - DNA, 25 bp, Homo sapien
gagagcagtgagtagcttccagctg

SEQ ID NO: 1067212 - DNA, 25 bp, Homo sapien
ggataccagccagagatgtaaactg

SEQ ID NO: 1067213 - DNA, 25 bp, Homo sapien
cagtgcagactgctgtagacacagc

SEQ ID NO: 1067214 - DNA, 25 bp, Homo sapien
tgtaaactgggttctagctgtgtag

SEQ ID NO: 1067215 - DNA, 25 bp, Homo sapien
tgttccctcccagtgtaacttaggc

SEQ ID NO: 1067216 - DNA, 25 bp, Homo sapien
cttgttccctcccagtgtaacttag

SEQ ID NO: 1067217 - DNA, 25 bp, Homo sapien
ttgcaggaaatggcagtcagctgcc

SEQ ID NO: 1067218 - DNA, 25 bp, Homo sapien
gcaggaaatggcagtcagctgcctt

SEQ ID NO: 1067219 - DNA, 25 bp, Homo sapien
aattccagttcttgcaggaaatggc

SEQ ID NO: 1067220 - DNA, 25 bp, Homo sapien
tcaccagtagaaattccagttcttg

SEQ ID NO: 1067221 - DNA, 25 bp, Homo sapien
caagacttatcatccgtagcatcag

SEQ ID NO: 1067222 - DNA, 25 bp, Homo sapien
tcaaaataggacgttgaccaagact

SEQ ID NO: 1067223 - DNA, 25 bp, Homo sapien
gacgttgaccaagacttatcatccg

SEQ ID NO: 1067224 - DNA, 25 bp, Homo sapien
tgcatctcaaaataggacgttgacc

SEQ ID NO: 1067225 - DNA, 25 bp, Homo sapien
tgcacttggtcttgagttttcggga

SEQ ID NO: 1067226 - DNA, 25 bp, Homo sapien
gagttttcgggagtgctgcactgcc

SEQ ID NO: 1067227 - DNA, 25 bp, Homo sapien
cacgagcagtcttaggtctgcccca

SEQ ID NO: 1067228 - DNA, 25 bp, Homo sapien
tccagagttggcctgtaggaagatc

SEQ ID NO: 1067229 - DNA, 25 bp, Homo sapien
aggttgtatttgtgtcctgccgcca

SEQ ID NO: 1067230 - DNA, 25 bp, Homo sapien
ctgccgccaggctcagcataatggc

SEQ ID NO: 1067231 - DNA, 25 bp, Homo sapien
gtttggcaaggatccaacttaaaga

SEQ ID NO: 1067232 - DNA, 25 bp, Homo sapien
tggctggacccctgttctagtgatc

SEQ ID NO: 1067233 - DNA, 25 bp, Homo sapien
tcgcagtttcccaagaatccctggg

SEQ ID NO: 1067234 - DNA, 25 bp, Homo sapien
agtgagcaccaagttgccctctagg

SEQ ID NO: 1067235 - DNA, 25 bp, Homo sapien
cacttctggacacatatgctgctgt

SEQ ID NO: 1067236 - DNA, 25 bp, Homo sapien
ctgggacgtctctggcacttctgga

SEQ ID NO: 1067237 - DNA, 25 bp, Homo sapien
aataggtagaaatctatatttgatg

SEQ ID NO: 1067238 - DNA, 25 bp, Homo sapien
tagaataggtagaaatctatatttg

SEQ ID NO: 1067239 - DNA, 25 bp, Homo sapien
ttagaataggtagaaatctatattt

SEQ ID NO: 1067240 - DNA, 25 bp, Homo sapien
aggtagaaatctatatttgatgagt

SEQ ID NO: 1067241 - DNA, 25 bp, Homo sapien
gcatctctatttcggctgtttgcat

SEQ ID NO: 1067242 - DNA, 25 bp, Homo sapien
accacatgcatctctatttcggctg

SEQ ID NO: 1067243 - DNA, 25 bp, Homo sapien
tatttcggctgtttgcattctcctg

SEQ ID NO: 1067244 - DNA, 25 bp, Homo sapien
tctatttcggctgtttgcattctcc

SEQ ID NO: 1067245 - DNA, 25 bp, Homo sapien
ctgggggagctgttacctttgatgt

SEQ ID NO: 1067246 - DNA, 25 bp, Homo sapien
gggggagctgttacctttgatgtaa

SEQ ID NO: 1067247 - DNA, 25 bp, Homo sapien
actgggggagctgttacctttgatg

SEQ ID NO: 1067248 - DNA, 25 bp, Homo sapien
ggggagctgttacctttgatgtaat

SEQ ID NO: 1067249 - DNA, 25 bp, Homo sapien
taggaaccagaactgagttaatact

SEQ ID NO: 1067250 - DNA, 25 bp, Homo sapien
tttctgcttgtgttgacaattggaa

SEQ ID NO: 1067251 - DNA, 25 bp, Homo sapien
tgttgacaattggaaacagaagcag

SEQ ID NO: 1067252 - DNA, 25 bp, Homo sapien
ggtaggaaccagaactgagttaata

SEQ ID NO: 1067253 - DNA, 25 bp, Homo sapien
gcttttccaactctgccacggcatt

SEQ ID NO: 1067254 - DNA, 25 bp, Homo sapien
cacggcattggaattctaaatcggt

SEQ ID NO: 1067255 - DNA, 25 bp, Homo sapien
ggaattctaaatcggtgcctgacat

SEQ ID NO: 1067256 - DNA, 25 bp, Homo sapien
tgtccataaggatgctcctttaccc

SEQ ID NO: 1067257 - DNA, 25 bp, Homo sapien
tcttgtttaacatgaggcttagcca

SEQ ID NO: 1067258 - DNA, 25 bp, Homo sapien
cagatttagattggacccacgggtc

SEQ ID NO: 1067259 - DNA, 25 bp, Homo sapien
aactaccaggaatgctcagatttag

SEQ ID NO: 1067260 - DNA, 25 bp, Homo sapien
caaccagccaacaagacttagaata

SEQ ID NO: 1067261 - DNA, 25 bp, Homo sapien
aatgaggttgtctttcaccttttca

SEQ ID NO: 1067262 - DNA, 25 bp, Homo sapien
ttgcctgtgcgggacactgggcact

SEQ ID NO: 1067263 - DNA, 25 bp, Homo sapien
gaggttgcagttgcctgtgcgggac

SEQ ID NO: 1067264 - DNA, 25 bp, Homo sapien
atgaggttgtctttcaccttttcag

SEQ ID NO: 1067265 - DNA, 25 bp, Homo sapien
ctgctgaactggtgtttcctgatta

SEQ ID NO: 1067266 - DNA, 25 bp, Homo sapien
tatctgctgaactggtgtttcctga

SEQ ID NO: 1067267 - DNA, 25 bp, Homo sapien
tctgctgaactggtgtttcctgatt

SEQ ID NO: 1067268 - DNA, 25 bp, Homo sapien
gctgaactggtgtttcctgattaat

SEQ ID NO: 1067269 - DNA, 25 bp, Homo sapien
gcagcagcaagcagaccagccaagg

SEQ ID NO: 1067270 - DNA, 25 bp, Homo sapien
caaggggctcattctggagcattca

SEQ ID NO: 1067271 - DNA, 25 bp, Homo sapien
ggagcattcaaggccgtacccttga

SEQ ID NO: 1067272 - DNA, 25 bp, Homo sapien
gcattcaaggccgtacccttgaaaa

SEQ ID NO: 1067273 - DNA, 25 bp, Homo sapien
cacatttggatgatgggatgggtag

SEQ ID NO: 1067274 - DNA, 25 bp, Homo sapien
ggtggcgtaaacatcgatggttgct

SEQ ID NO: 1067275 - DNA, 25 bp, Homo sapien
tgctgttagtggtgtgggagggaaa

SEQ ID NO: 1067276 - DNA, 25 bp, Homo sapien
gtgggttaagaaagattggctgggc

SEQ ID NO: 1067277 - DNA, 25 bp, Homo sapien
cagatgctggcttttgcagatagag

SEQ ID NO: 1067278 - DNA, 25 bp, Homo sapien
gcagatagagagaaaccctttagaa

SEQ ID NO: 1067279 - DNA, 25 bp, Homo sapien
tcttggccacccaggcaagttgggc

SEQ ID NO: 1067280 - DNA, 25 bp, Homo sapien
ttcaagggaggagcgtagaaacacc

SEQ ID NO: 1067281 - DNA, 25 bp, Homo sapien
cagtgcggctttgtctcggtcttag

SEQ ID NO: 1067282 - DNA, 25 bp, Homo sapien
tgcggctttgtctcggtcttagaag

SEQ ID NO: 1067283 - DNA, 25 bp, Homo sapien
agtgcggctttgtctcggtcttaga

SEQ ID NO: 1067284 - DNA, 25 bp, Homo sapien
tcagtgcggctttgtctcggtctta

SEQ ID NO: 1067285 - DNA, 25 bp, Homo sapien
tagggtttgatgtttgccctcaggc

SEQ ID NO: 1067286 - DNA, 25 bp, Homo sapien
catcggctttgatattgtaaacaca

SEQ ID NO: 1067287 - DNA, 25 bp, Homo sapien
ttgagtccttttcagaggcctcctt

SEQ ID NO: 1067288 - DNA, 25 bp, Homo sapien
tgctgccccagtaggtagggtttga

SEQ ID NO: 1067289 - DNA, 25 bp, Homo sapien
caagggaaagccaaagtgcagagca

SEQ ID NO: 1067290 - DNA, 25 bp, Homo sapien
ccaagggaaagccaaagtgcagagc

SEQ ID NO: 1067291 - DNA, 25 bp, Homo sapien
tggtggcagccaagggaaagccaaa

SEQ ID NO: 1067292 - DNA, 25 bp, Homo sapien
gggaaagccaaagtgcagagcagca

SEQ ID NO: 1067293 - DNA, 25 bp, Homo sapien
tggccagacgttctgcacagttctg

SEQ ID NO: 1067294 - DNA, 25 bp, Homo sapien
taactcctttggaagatctccaaca

SEQ ID NO: 1067295 - DNA, 25 bp, Homo sapien
ctggcacctgtgaattctcatttag

SEQ ID NO: 1067296 - DNA, 25 bp, Homo sapien
aacgtcttgtgaaagacctgtggcc

SEQ ID NO: 1067297 - DNA, 25 bp, Homo sapien
ctggtcccctcaaacttgcagacag

SEQ ID NO: 1067298 - DNA, 25 bp, Homo sapien
ggaggagtccttactccatctgtgt

SEQ ID NO: 1067299 - DNA, 25 bp, Homo sapien
gcagggcccctggaggagtccttac

SEQ ID NO: 1067300 - DNA, 25 bp, Homo sapien
gtgctgtcctggtcccctcaaactt

SEQ ID NO: 1067301 - DNA, 25 bp, Homo sapien
tctgtgttccaggttctgtcagtca

SEQ ID NO: 1067302 - DNA, 25 bp, Homo sapien
gaaaacagggccactgatagccctc

SEQ ID NO: 1067303 - DNA, 25 bp, Homo sapien
gagggctgactatcaaatttggttt

SEQ ID NO: 1067304 - DNA, 25 bp, Homo sapien
cacaggagagggctgactatcaaat

SEQ ID NO: 1067305 - DNA, 25 bp, Homo sapien
gggtatgccgcttcacctctactgg

SEQ ID NO: 1067306 - DNA, 25 bp, Homo sapien
cacaagctggtcaggagattgcagg

SEQ ID NO: 1067307 - DNA, 25 bp, Homo sapien
caggaggtcacagatcaggagaatt

SEQ ID NO: 1067308 - DNA, 25 bp, Homo sapien
ggtagttccatcagtgcagtctgca

SEQ ID NO: 1067309 - DNA, 25 bp, Homo sapien
gattctagagtctgacaggctcgag

SEQ ID NO: 1067310 - DNA, 25 bp, Homo sapien
tgtaaaagcccctccgtcttgctca

SEQ ID NO: 1067311 - DNA, 25 bp, Homo sapien
taagcacttgtagggtagggagcca

SEQ ID NO: 1067312 - DNA, 25 bp, Homo sapien
gctcgagttatgaatactgccttaa

SEQ ID NO: 1067313 - DNA, 25 bp, Homo sapien
tgtgttagcacaagtcggctgggca

SEQ ID NO: 1067314 - DNA, 25 bp, Homo sapien
tagtatagggtcctctccgagcacg

SEQ ID NO: 1067315 - DNA, 25 bp, Homo sapien
tgggactgccgctgagtgaaacatc

SEQ ID NO: 1067316 - DNA, 25 bp, Homo sapien
tccgagcacggcaggaatcacttct

SEQ ID NO: 1067317 - DNA, 25 bp, Homo sapien
tgatgagcaggccttatcggcacac

SEQ ID NO: 1067318 - DNA, 25 bp, Homo sapien
atgagcaggccttatcggcacacca

SEQ ID NO: 1067319 - DNA, 25 bp, Homo sapien
gagcaggccttatcggcacaccagt

SEQ ID NO: 1067320 - DNA, 25 bp, Homo sapien
aggccttatcggcacaccagtgctg

SEQ ID NO: 1067321 - DNA, 25 bp, Homo sapien
cctagtgggaatgcggaaatgagct

SEQ ID NO: 1067322 - DNA, 25 bp, Homo sapien
tcccagggaacaaatcggatggaac

SEQ ID NO: 1067323 - DNA, 25 bp, Homo sapien
tggcttcttctaaggctccctgagg

SEQ ID NO: 1067324 - DNA, 25 bp, Homo sapien
gaacttgggaagagactgtcagcta

SEQ ID NO: 1067325 - DNA, 25 bp, Homo sapien
aggttctctctcgtgaggcctgatg

SEQ ID NO: 1067326 - DNA, 25 bp, Homo sapien
taggttctctctcgtgaggcctgat

SEQ ID NO: 1067327 - DNA, 25 bp, Homo sapien
ttaggttctctctcgtgaggcctga

SEQ ID NO: 1067328 - DNA, 25 bp, Homo sapien
gaatttgccccgaaagctgtgctga

SEQ ID NO: 1067329 - DNA, 25 bp, Homo sapien
tactgtgggtggtgacttgtcctgc

SEQ ID NO: 1067330 - DNA, 25 bp, Homo sapien
gatgagcttctaggcaaggaccaca

SEQ ID NO: 1067331 - DNA, 25 bp, Homo sapien
gctaccatgttgacagagccccaga

SEQ ID NO: 1067332 - DNA, 25 bp, Homo sapien
tttttgcgtgcccagacctaggtct

SEQ ID NO: 1067333 - DNA, 25 bp, Homo sapien
ttctggtgccaagtctgggagccca

SEQ ID NO: 1067334 - DNA, 25 bp, Homo sapien
caaggtcactagaaagctagcccgg

SEQ ID NO: 1067335 - DNA, 25 bp, Homo sapien
tgactgtcagggctaattcttccgc

SEQ ID NO: 1067336 - DNA, 25 bp, Homo sapien
cagaaagttatggtgcaaagggaaa

SEQ ID NO: 1067337 - DNA, 25 bp, Homo sapien
tgtcaatccacccatgagagtgcag

SEQ ID NO: 1067338 - DNA, 25 bp, Homo sapien
ggagagagcctctagcaaccagggt

SEQ ID NO: 1067339 - DNA, 25 bp, Homo sapien
tgcttacagtctggccatggccagc

SEQ ID NO: 1067340 - DNA, 25 bp, Homo sapien
cagagagggctgatggcagtctcca

SEQ ID NO: 1067341 - DNA, 25 bp, Homo sapien
tttgggcgccacaggaatagccctg

SEQ ID NO: 1067342 - DNA, 25 bp, Homo sapien
tgcaggcttcttagaccagagaggg

SEQ ID NO: 1067343 - DNA, 25 bp, Homo sapien
caggactaaatgtggtggacccagg

SEQ ID NO: 1067344 - DNA, 25 bp, Homo sapien
gaacgcgccgcgctttggtggaaaa

SEQ ID NO: 1067345 - DNA, 25 bp, Homo sapien
ggtatgtgcaccctcattgcggagc

SEQ ID NO: 1067346 - DNA, 25 bp, Homo sapien
gattctgagcgccatcgcgttcgga

SEQ ID NO: 1067347 - DNA, 25 bp, Homo sapien
gaaaaaccggctctgctgcgagctg

SEQ ID NO: 1067348 - DNA, 25 bp, Homo sapien
tcttccattcccagatagattcgag

SEQ ID NO: 1067349 - DNA, 25 bp, Homo sapien
tagattcgagctgcatcagagaaga

SEQ ID NO: 1067350 - DNA, 25 bp, Homo sapien
tcttggtgacggcatctgtgccact

SEQ ID NO: 1067351 - DNA, 25 bp, Homo sapien
tggtgacggcatctgtgccacttct

SEQ ID NO: 1067352 - DNA, 25 bp, Homo sapien
aactacagagatcctgccacaggca

SEQ ID NO: 1067353 - DNA, 25 bp, Homo sapien
tgggcaaagccagtgtcaaatcagt

SEQ ID NO: 1067354 - DNA, 25 bp, Homo sapien
gaatgaataaaacggcaagccttcc

SEQ ID NO: 1067355 - DNA, 25 bp, Homo sapien
gcatgccaagtcttcagcaacaggg

SEQ ID NO: 1067356 - DNA, 25 bp, Homo sapien
tatgtgggtggggatctgatctttt

SEQ ID NO: 1067357 - DNA, 25 bp, Homo sapien
gggtggggatctgatctttttctga

SEQ ID NO: 1067358 - DNA, 25 bp, Homo sapien
aagcatcagaacatgcttgtgcctg

SEQ ID NO: 1067359 - DNA, 25 bp, Homo sapien
ttccaagcatcagaacatgcttgtg

SEQ ID NO: 1067360 - DNA, 25 bp, Homo sapien
ttgaatgcaatgcagcctccaagtt

SEQ ID NO: 1067361 - DNA, 25 bp, Homo sapien
ggccttcaggctacggccgaattcc

SEQ ID NO: 1067362 - DNA, 25 bp, Homo sapien
tccatggccttcaggctacggccga

SEQ ID NO: 1067363 - DNA, 25 bp, Homo sapien
cttgaatgcaatgcagcctccaagt

SEQ ID NO: 1067364 - DNA, 25 bp, Homo sapien
caatccgcagcatgcagcctgctgt

SEQ ID NO: 1067365 - DNA, 25 bp, Homo sapien
actggaccttgtcctcactgggacg

SEQ ID NO: 1067366 - DNA, 25 bp, Homo sapien
cactgggacgtccagatgagtgagt

SEQ ID NO: 1067367 - DNA, 25 bp, Homo sapien
tgtgtccacctcacatacgcactgg

SEQ ID NO: 1067368 - DNA, 25 bp, Homo sapien
tgcgttccaaggcagcatccggtcc

SEQ ID NO: 1067369 - DNA, 25 bp, Homo sapien
ttccaaggcagcatccggtcctggg

SEQ ID NO: 1067370 - DNA, 25 bp, Homo sapien
gttccaaggcagcatccggtcctgg

SEQ ID NO: 1067371 - DNA, 25 bp, Homo sapien
ctttgcgttccaaggcagcatccgg

SEQ ID NO: 1067372 - DNA, 25 bp, Homo sapien
ggtcctcccgacatcctgtaagcta

SEQ ID NO: 1067373 - DNA, 25 bp, Homo sapien
atgagtgttccaggtcctcccgaca

SEQ ID NO: 1067374 - DNA, 25 bp, Homo sapien
cagccattcaggaggatgagtgttc

SEQ ID NO: 1067375 - DNA, 25 bp, Homo sapien
tcctgtaagctaccagggcttttat

SEQ ID NO: 1067376 - DNA, 25 bp, Homo sapien
tgctgagcctcaacagctgcctgga

SEQ ID NO: 1067377 - DNA, 25 bp, Homo sapien
tagattctaatcctgacgcaaccac

SEQ ID NO: 1067378 - DNA, 25 bp, Homo sapien
aagacaacggagaccggtgtcgcgc

SEQ ID NO: 1067379 - DNA, 25 bp, Homo sapien
ccctcccagtggcatccagggtgga

SEQ ID NO: 1067380 - DNA, 25 bp, Homo sapien
taactcggaacccagagagggaagc

SEQ ID NO: 1067381 - DNA, 25 bp, Homo sapien
aaatccccagagacagacagcttag

SEQ ID NO: 1067382 - DNA, 25 bp, Homo sapien
gagggatgccctgaagtcgtctttc

SEQ ID NO: 1067383 - DNA, 25 bp, Homo sapien
gaagagtcactttgagcccacctaa

SEQ ID NO: 1067384 - DNA, 25 bp, Homo sapien
tgagctcttacatgtgcaggcactg

SEQ ID NO: 1067385 - DNA, 25 bp, Homo sapien
agcactccgtattggctgggaaaca

SEQ ID NO: 1067386 - DNA, 25 bp, Homo sapien
tcttttgatggtagctgaaccgcac

SEQ ID NO: 1067387 - DNA, 25 bp, Homo sapien
tgtttagtcagttaccagccagtgg

SEQ ID NO: 1067388 - DNA, 25 bp, Homo sapien
agttttgggttcaagtgctggagac

SEQ ID NO: 1067389 - DNA, 25 bp, Homo sapien
tgctgcaagcaagaagccattctcc

SEQ ID NO: 1067390 - DNA, 25 bp, Homo sapien
tgtttactagttgaaaagtcacttg

SEQ ID NO: 1067391 - DNA, 25 bp, Homo sapien
ttgctgaagaattaattaaaccata

SEQ ID NO: 1067392 - DNA, 25 bp, Homo sapien
cttgggattacttgtacatgtacca

SEQ ID NO: 1067393 - DNA, 25 bp, Homo sapien
tatacctagtgatcaagctttgggc

SEQ ID NO: 1067394 - DNA, 25 bp, Homo sapien
gtacatgtaccacatcctacagttt

SEQ ID NO: 1067395 - DNA, 25 bp, Homo sapien
gttttcagtagcatcattggaagta

SEQ ID NO: 1067396 - DNA, 25 bp, Homo sapien
gattataggtgtgagccaccctgct

SEQ ID NO: 1067397 - DNA, 25 bp, Homo sapien
caagtgacccacccaccttggtgtc

SEQ ID NO: 1067398 - DNA, 25 bp, Homo sapien
tgacccacccaccttggtgtcccaa

SEQ ID NO: 1067399 - DNA, 25 bp, Homo sapien
ccaccttggtgtcccaaagcactgg

SEQ ID NO: 1067400 - DNA, 25 bp, Homo sapien
ccataaagtggcgaggcaacattaa

SEQ ID NO: 1067401 - DNA, 25 bp, Homo sapien
gccaagtgtgatggttgtaaacgac

SEQ ID NO: 1067402 - DNA, 25 bp, Homo sapien
tccaggtgagtagatagatccatga

SEQ ID NO: 1067403 - DNA, 25 bp, Homo sapien
cgacagggtaaactaagcgagtcca

SEQ ID NO: 1067404 - DNA, 25 bp, Homo sapien
cccagccagatttaatttcatttat

SEQ ID NO: 1067405 - DNA, 25 bp, Homo sapien
gcccagccagatttaatttcattta

SEQ ID NO: 1067406 - DNA, 25 bp, Homo sapien
gcatgaatgccctcttttgtaaggg

SEQ ID NO: 1067407 - DNA, 25 bp, Homo sapien
gatttgttgtcttggaattactctc

SEQ ID NO: 1067408 - DNA, 25 bp, Homo sapien
ggaacattgttatcatacagtgagg

SEQ ID NO: 1067409 - DNA, 25 bp, Homo sapien
cacttcttataccatcgccttaatg

SEQ ID NO: 1067410 - DNA, 25 bp, Homo sapien
tgctatgggtcatgtgacttcgtgt

SEQ ID NO: 1067411 - DNA, 25 bp, Homo sapien
tttgcaggttcttgcttggtcttgc

SEQ ID NO: 1067412 - DNA, 25 bp, Homo sapien
tcttgctatgggtcatgtgacttcg

SEQ ID NO: 1067413 - DNA, 25 bp, Homo sapien
tggtcttgctatgggtcatgtgact

SEQ ID NO: 1067414 - DNA, 25 bp, Homo sapien
gcacgatacaaagctgggccctttt

SEQ ID NO: 1067415 - DNA, 25 bp, Homo sapien
tggagttggttttggcacgatacaa

SEQ ID NO: 1067416 - DNA, 25 bp, Homo sapien
tggttttggcacgatacaaagctgg

SEQ ID NO: 1067417 - DNA, 25 bp, Homo sapien
tttggcacgatacaaagctgggccc

SEQ ID NO: 1067418 - DNA, 25 bp, Homo sapien
cagcccttgcattgacttgtttttc

SEQ ID NO: 1067419 - DNA, 25 bp, Homo sapien
tacagcccttgcattgacttgtttt

SEQ ID NO: 1067420 - DNA, 25 bp, Homo sapien
cctgggatagttcatattcactgtc

SEQ ID NO: 1067421 - DNA, 25 bp, Homo sapien
ggtacagcccttgcattgacttgtt

SEQ ID NO: 1067422 - DNA, 25 bp, Homo sapien
gctgaacactatcctgtgtgggctc

SEQ ID NO: 1067423 - DNA, 25 bp, Homo sapien
tgaacactatcctgtgtgggctcac

SEQ ID NO: 1067424 - DNA, 25 bp, Homo sapien
tattggctgaacactatcctgtgtg

SEQ ID NO: 1067425 - DNA, 25 bp, Homo sapien
gaaatattggctgaacactatcctg

SEQ ID NO: 1067426 - DNA, 25 bp, Homo sapien
ttctagacctagagagccatggagt

SEQ ID NO: 1067427 - DNA, 25 bp, Homo sapien
tcctcttggaattggctaggtagcc

SEQ ID NO: 1067428 - DNA, 25 bp, Homo sapien
tcatccattgtttctagacctagag

SEQ ID NO: 1067429 - DNA, 25 bp, Homo sapien
tttcttcctcttggaattggctagg

SEQ ID NO: 1067430 - DNA, 25 bp, Homo sapien
tggcactgacttccccatcggtaca

SEQ ID NO: 1067431 - DNA, 25 bp, Homo sapien
gactcaggggcttgatcttaggagc

SEQ ID NO: 1067432 - DNA, 25 bp, Homo sapien
ccatcggtacacctaaggtttgcaa

SEQ ID NO: 1067433 - DNA, 25 bp, Homo sapien
cctaaggtttgcaacattaatcttg

SEQ ID NO: 1067434 - DNA, 25 bp, Homo sapien
ggttctggccaaagactggtgccac

SEQ ID NO: 1067435 - DNA, 25 bp, Homo sapien
gccaaagactggtgccacacctgtt

SEQ ID NO: 1067436 - DNA, 25 bp, Homo sapien
tttaatggttctggccaaagactgg

SEQ ID NO: 1067437 - DNA, 25 bp, Homo sapien
tctctttaatggttctggccaaaga

SEQ ID NO: 1067438 - DNA, 25 bp, Homo sapien
tttgtggctggactgggttttgtaa

SEQ ID NO: 1067439 - DNA, 25 bp, Homo sapien
tggctggactgggttttgtaatcag

SEQ ID NO: 1067440 - DNA, 25 bp, Homo sapien
gttgttcactgtggaaggagctgca

SEQ ID NO: 1067441 - DNA, 25 bp, Homo sapien
agccaagttgttcactgtggaagga

SEQ ID NO: 1067442 - DNA, 25 bp, Homo sapien
caaagtaggacccttgactcagagc

SEQ ID NO: 1067443 - DNA, 25 bp, Homo sapien
tgctagtaagcgatttgacaacttc

SEQ ID NO: 1067444 - DNA, 25 bp, Homo sapien
ggctgcatcgtaggtttgtaaacat

SEQ ID NO: 1067445 - DNA, 25 bp, Homo sapien
taaacattaggcaggcttctgcaga

SEQ ID NO: 1067446 - DNA, 25 bp, Homo sapien
taatttctctcagggacgccccgcc

SEQ ID NO: 1067447 - DNA, 25 bp, Homo sapien
cgagtaaggcgcaggagtaaagacc

SEQ ID NO: 1067448 - DNA, 25 bp, Homo sapien
caggagtaaagaccgaaaccagagc

SEQ ID NO: 1067449 - DNA, 25 bp, Homo sapien
tgcccctttcgagtaaggcgcagga

SEQ ID NO: 1067450 - DNA, 25 bp, Homo sapien
accgaaaccagagccgcatgaggag

SEQ ID NO: 1067451 - DNA, 25 bp, Homo sapien
taggatgtcccaaccagtaagtata

SEQ ID NO: 1067452 - DNA, 25 bp, Homo sapien
aatgtccatggttaattctgcaggc

SEQ ID NO: 1067453 - DNA, 25 bp, Homo sapien
caaggtcttttactagcctgatggg

SEQ ID NO: 1067454 - DNA, 25 bp, Homo sapien
ccttggtaccgggttacactgatga

SEQ ID NO: 1067455 - DNA, 25 bp, Homo sapien
aaagaaatgtaaagctttctatctg

SEQ ID NO: 1067456 - DNA, 25 bp, Homo sapien
aatgtaaagctttctatctgaggtt

SEQ ID NO: 1067457 - DNA, 25 bp, Homo sapien
taaagctttctatctgaggttaacc

SEQ ID NO: 1067458 - DNA, 25 bp, Homo sapien
aagctttctatctgaggttaaccca

SEQ ID NO: 1067459 - DNA, 25 bp, Homo sapien
gtcgcagtgaatggacattgagcca

SEQ ID NO: 1067460 - DNA, 25 bp, Homo sapien
tcgcagtgaatggacattgagccac

SEQ ID NO: 1067461 - DNA, 25 bp, Homo sapien
aggtcgcagtgaatggacattgagc

SEQ ID NO: 1067462 - DNA, 25 bp, Homo sapien
ggtcgcagtgaatggacattgagcc

SEQ ID NO: 1067463 - DNA, 25 bp, Homo sapien
attctccagttccaaactaatgggt

SEQ ID NO: 1067464 - DNA, 25 bp, Homo sapien
aattctccagttccaaactaatggg

SEQ ID NO: 1067465 - DNA, 25 bp, Homo sapien
gaattctccagttccaaactaatgg

SEQ ID NO: 1067466 - DNA, 25 bp, Homo sapien
ctgtcttaatttcatctagcagccc

SEQ ID NO: 1067467 - DNA, 25 bp, Homo sapien
gagcattgtcgggttctgtcttaat

SEQ ID NO: 1067468 - DNA, 25 bp, Homo sapien
cttaatttcatctagcagccccagc

SEQ ID NO: 1067469 - DNA, 25 bp, Homo sapien
ttgagcattgtcgggttctgtctta

SEQ ID NO: 1067470 - DNA, 25 bp, Homo sapien
tggactgttgcctatgacaatactc

SEQ ID NO: 1067471 - DNA, 25 bp, Homo sapien
ttcagttcattctcctgagttctgg

SEQ ID NO: 1067472 - DNA, 25 bp, Homo sapien
gttctggactgttgcctatgacaat

SEQ ID NO: 1067473 - DNA, 25 bp, Homo sapien
tcagttcattctcctgagttctgga

SEQ ID NO: 1067474 - DNA, 25 bp, Homo sapien
ctcttagaaggaactggtgaactgg

SEQ ID NO: 1067475 - DNA, 25 bp, Homo sapien
atgcatggtatggagcagaaaagtt

SEQ ID NO: 1067476 - DNA, 25 bp, Homo sapien
tggtatggagcagaaaagttgagca

SEQ ID NO: 1067477 - DNA, 25 bp, Homo sapien
aaggaactggtgaactggcagatga

SEQ ID NO: 1067478 - DNA, 25 bp, Homo sapien
gaagaagaaactacatcagcgacgc

SEQ ID NO: 1067479 - DNA, 25 bp, Homo sapien
tgggcaaaacggtgagactccgcct

SEQ ID NO: 1067480 - DNA, 25 bp, Homo sapien
cagaataaagataccagccagatgg

SEQ ID NO: 1067481 - DNA, 25 bp, Homo sapien
cattcaggatttgcggttggttcca

SEQ ID NO: 1067482 - DNA, 25 bp, Homo sapien
gcaaaaagttcactgatccacatgg

SEQ ID NO: 1067483 - DNA, 25 bp, Homo sapien
caaaggatgatggttgtctcaagga

SEQ ID NO: 1067484 - DNA, 25 bp, Homo sapien
tccagctagatgtaaagtgatttgc

SEQ ID NO: 1067485 - DNA, 25 bp, Homo sapien
tcaatacacctaatagcaggcgcgg

SEQ ID NO: 1067486 - DNA, 25 bp, Homo sapien
ccctgtcacaaaaaggtcatatatg

SEQ ID NO: 1067487 - DNA, 25 bp, Homo sapien
catactggtggttgacaggcactgg

SEQ ID NO: 1067488 - DNA, 25 bp, Homo sapien
tgagcaacagagtaataataccctg

SEQ ID NO: 1067489 - DNA, 25 bp, Homo sapien
gctaagggaaagaaccagacacaaa

SEQ ID NO: 1067490 - DNA, 25 bp, Homo sapien
aaccgagggatgatgagagatcaca

SEQ ID NO: 1067491 - DNA, 25 bp, Homo sapien
tagttttggagactagccagcctgt

SEQ ID NO: 1067492 - DNA, 25 bp, Homo sapien
gctaatggtaggaccctgcaatccc

SEQ ID NO: 1067493 - DNA, 25 bp, Homo sapien
tattaggtggtgctagtgaaaaccg

SEQ ID NO: 1067494 - DNA, 25 bp, Homo sapien
ctaagaataaataacaaggacatca

SEQ ID NO: 1067495 - DNA, 25 bp, Homo sapien
taagaataaataacaaggacatcat

SEQ ID NO: 1067496 - DNA, 25 bp, Homo sapien
taaataacaaggacatcattaaaca

SEQ ID NO: 1067497 - DNA, 25 bp, Homo sapien
gaataaataacaaggacatcattaa

SEQ ID NO: 1067498 - DNA, 25 bp, Homo sapien
gacaagataggctgcaaaaagtttt

SEQ ID NO: 1067499 - DNA, 25 bp, Homo sapien
gctggacactaatcacatcctttgg

SEQ ID NO: 1067500 - DNA, 25 bp, Homo sapien
gctgcacttggtcaaaatgctatta

SEQ ID NO: 1067501 - DNA, 25 bp, Homo sapien
ttgcaagaggtagtgtcttccagct

SEQ ID NO: 1067502 - DNA, 25 bp, Homo sapien
gatgaagttgttagcagagtgaaac

SEQ ID NO: 1067503 - DNA, 25 bp, Homo sapien
tgaagttgttagcagagtgaaactt

SEQ ID NO: 1067504 - DNA, 25 bp, Homo sapien
tttggtattttacttcatactgaat

SEQ ID NO: 1067505 - DNA, 25 bp, Homo sapien
cattttggtattttacttcatactg

SEQ ID NO: 1067506 - DNA, 25 bp, Homo sapien
tgtaatactctttgaactattaaag

SEQ ID NO: 1067507 - DNA, 25 bp, Homo sapien
gagctggtgtaacagtaagtgccac

SEQ ID NO: 1067508 - DNA, 25 bp, Homo sapien
tgaagtatgtgggacagactagagc

SEQ ID NO: 1067509 - DNA, 25 bp, Homo sapien
gagactgtccttccatctgaagtat

SEQ ID NO: 1067510 - DNA, 25 bp, Homo sapien
tgcagagaaacaattaatagagcag

SEQ ID NO: 1067511 - DNA, 25 bp, Homo sapien
gagggcttcaatggtttgcaaggaa

SEQ ID NO: 1067512 - DNA, 25 bp, Homo sapien
catctgagggcttcaatggtttgca

SEQ ID NO: 1067513 - DNA, 25 bp, Homo sapien
caatggtttgcaaggaacagatata

SEQ ID NO: 1067514 - DNA, 25 bp, Homo sapien
tcaatggagcgctaggttggtgccc

SEQ ID NO: 1067515 - DNA, 25 bp, Homo sapien
cctaatgggcatctatttcaaactc

SEQ ID NO: 1067516 - DNA, 25 bp, Homo sapien
gttggtgcccaagccactattgcag

SEQ ID NO: 1067517 - DNA, 25 bp, Homo sapien
tagcaccactggtcctacatgaggc

SEQ ID NO: 1067518 - DNA, 25 bp, Homo sapien
ctgttgaagtatcatgcaccacaga

SEQ ID NO: 1067519 - DNA, 25 bp, Homo sapien
agctctgttgaagtatcatgcacca

SEQ ID NO: 1067520 - DNA, 25 bp, Homo sapien
tctgttgaagtatcatgcaccacag

SEQ ID NO: 1067521 - DNA, 25 bp, Homo sapien
gctctgttgaagtatcatgcaccac

SEQ ID NO: 1067522 - DNA, 25 bp, Homo sapien
gacactatattgcttataactggag

SEQ ID NO: 1067523 - DNA, 25 bp, Homo sapien
catcagtgttcatgatgggcaaggc

SEQ ID NO: 1067524 - DNA, 25 bp, Homo sapien
tattgcttataactggagtcgtatc

SEQ ID NO: 1067525 - DNA, 25 bp, Homo sapien
gcaacatcggtgtctgccaatgaca

SEQ ID NO: 1067526 - DNA, 25 bp, Homo sapien
ctgttgctgttactgaagaaactgt

SEQ ID NO: 1067527 - DNA, 25 bp, Homo sapien
atccacaatgacatctgctgttgct

SEQ ID NO: 1067528 - DNA, 25 bp, Homo sapien
caatgacatctgctgttgctgttac

SEQ ID NO: 1067529 - DNA, 25 bp, Homo sapien
gttgctgttactgaagaaactgtat

SEQ ID NO: 1067530 - DNA, 25 bp, Homo sapien
cagcattactgggttcactaggtga

SEQ ID NO: 1067531 - DNA, 25 bp, Homo sapien
gcatgctgactgaatactgatgaag

SEQ ID NO: 1067532 - DNA, 25 bp, Homo sapien
gaaacgcttggctgttccgtactac

SEQ ID NO: 1067533 - DNA, 25 bp, Homo sapien
tgtacttctgtactggaaccaattg

SEQ ID NO: 1067534 - DNA, 25 bp, Homo sapien
cacaacaagattttttaatacttcg

SEQ ID NO: 1067535 - DNA, 25 bp, Homo sapien
caagattttttaatacttcgtgatt

SEQ ID NO: 1067536 - DNA, 25 bp, Homo sapien
ctgcacaacaagattttttaatact

SEQ ID NO: 1067537 - DNA, 25 bp, Homo sapien
caacaagattttttaatacttcgtg

SEQ ID NO: 1067538 - DNA, 25 bp, Homo sapien
gaatagataaatcgtcactgacagc

SEQ ID NO: 1067539 - DNA, 25 bp, Homo sapien
cacaaaattggtattctctccaaaa

SEQ ID NO: 1067540 - DNA, 25 bp, Homo sapien
catgaataacagaatgccacatctt

SEQ ID NO: 1067541 - DNA, 25 bp, Homo sapien
aagttccgtgggttgcaaatgactc

SEQ ID NO: 1067542 - DNA, 25 bp, Homo sapien
gaaactgactggtcgtttcctctta

SEQ ID NO: 1067543 - DNA, 25 bp, Homo sapien
tattttcaattataagctttaggta

SEQ ID NO: 1067544 - DNA, 25 bp, Homo sapien
gatgaaactgactggtcgtttcctc

SEQ ID NO: 1067545 - DNA, 25 bp, Homo sapien
ctgactggtcgtttcctcttaaggg

SEQ ID NO: 1067546 - DNA, 25 bp, Homo sapien
tcattcacaatatcctgcaacattt

SEQ ID NO: 1067547 - DNA, 25 bp, Homo sapien
tcatggcactattgattgtctcatc

SEQ ID NO: 1067548 - DNA, 25 bp, Homo sapien
tcataagtcgaaatgtttcttctcc

SEQ ID NO: 1067549 - DNA, 25 bp, Homo sapien
tttgtgtactgttatagaagtcaac

SEQ ID NO: 1067550 - DNA, 25 bp, Homo sapien
gatagtcctatgtaagtgggtccca

SEQ ID NO: 1067551 - DNA, 25 bp, Homo sapien
taacactcagcactcgatacaggaa

SEQ ID NO: 1067552 - DNA, 25 bp, Homo sapien
cagccgagactgacgaagtttatgc

SEQ ID NO: 1067553 - DNA, 25 bp, Homo sapien
gaatattactgtgaagaccatgctg

SEQ ID NO: 1067554 - DNA, 25 bp, Homo sapien
tatttctttcatctgactgataaac

SEQ ID NO: 1067555 - DNA, 25 bp, Homo sapien
tagggctgggccagtaagcttctct

SEQ ID NO: 1067556 - DNA, 25 bp, Homo sapien
tcaggctccattagtttatttacca

SEQ ID NO: 1067557 - DNA, 25 bp, Homo sapien
tcctgctcaacagccattagggctg

SEQ ID NO: 1067558 - DNA, 25 bp, Homo sapien
tatacaccgtacaataccacttagg

SEQ ID NO: 1067559 - DNA, 25 bp, Homo sapien
gaaactcttcatgtaacgacatggg

SEQ ID NO: 1067560 - DNA, 25 bp, Homo sapien
caagctgaagaacagtatacaccgt

SEQ ID NO: 1067561 - DNA, 25 bp, Homo sapien
aactggcacaatccttatagatggc

SEQ ID NO: 1067562 - DNA, 25 bp, Homo sapien
ccttcctgtgtaggccctcaaaggg

SEQ ID NO: 1067563 - DNA, 25 bp, Homo sapien
taacgtttaaacaggacagtctaca

SEQ ID NO: 1067564 - DNA, 25 bp, Homo sapien
aatttattgtgccatccagctgaga

SEQ ID NO: 1067565 - DNA, 25 bp, Homo sapien
tgggacttcgggtgtgcagtaccac

SEQ ID NO: 1067566 - DNA, 25 bp, Homo sapien
ctctaggcaaatgcatttgaaagaa

SEQ ID NO: 1067567 - DNA, 25 bp, Homo sapien
gcctcaatgaaatagatgttctcct

SEQ ID NO: 1067568 - DNA, 25 bp, Homo sapien
tattttctacaactctaggcaaatg

SEQ ID NO: 1067569 - DNA, 25 bp, Homo sapien
atcaaaattgatgagagggtaaggg

SEQ ID NO: 1067570 - DNA, 25 bp, Homo sapien
tgagctaccgtccccagcctatttt

SEQ ID NO: 1067571 - DNA, 25 bp, Homo sapien
gctaccgtccccagcctattttctc

SEQ ID NO: 1067572 - DNA, 25 bp, Homo sapien
agctaccgtccccagcctattttct

SEQ ID NO: 1067573 - DNA, 25 bp, Homo sapien
cgtgagctaccgtccccagcctatt

SEQ ID NO: 1067574 - DNA, 25 bp, Homo sapien
tgtataatagactacaagaatagaa

SEQ ID NO: 1067575 - DNA, 25 bp, Homo sapien
cttcttgattttatgacaagataga

SEQ ID NO: 1067576 - DNA, 25 bp, Homo sapien
tcttgattttatgacaagatagaaa

SEQ ID NO: 1067577 - DNA, 25 bp, Homo sapien
ttacattattggctgtataatagac

SEQ ID NO: 1067578 - DNA, 25 bp, Homo sapien
ttgttgttattgtgggcggtggagg

SEQ ID NO: 1067579 - DNA, 25 bp, Homo sapien
cgttgttgttattgtgggcggtgga

SEQ ID NO: 1067580 - DNA, 25 bp, Homo sapien
tgttgttattgtgggcggtggaggc

SEQ ID NO: 1067581 - DNA, 25 bp, Homo sapien
tgttattgtgggcggtggaggccgc

SEQ ID NO: 1067582 - DNA, 25 bp, Homo sapien
tccttgagggcatccagatcctcct

SEQ ID NO: 1067583 - DNA, 25 bp, Homo sapien
aaatttttccttgagggcatccaga

SEQ ID NO: 1067584 - DNA, 25 bp, Homo sapien
tgcatccacaccaagccaacacagg

SEQ ID NO: 1067585 - DNA, 25 bp, Homo sapien
cctgcatccacaccaagccaacaca

SEQ ID NO: 1067586 - DNA, 25 bp, Homo sapien
aaagctattctcgtgcttcaacctc

SEQ ID NO: 1067587 - DNA, 25 bp, Homo sapien
ttaaagctattctcgtgcttcaacc

SEQ ID NO: 1067588 - DNA, 25 bp, Homo sapien
agaggggatttcaccctgttggcag

SEQ ID NO: 1067589 - DNA, 25 bp, Homo sapien
ggttaaagctattctcgtgcttcaa

SEQ ID NO: 1067590 - DNA, 25 bp, Homo sapien
catcacacagcgtgagtcaatcaag

SEQ ID NO: 1067591 - DNA, 25 bp, Homo sapien
tctcaagacatcacacagcgtgagt

SEQ ID NO: 1067592 - DNA, 25 bp, Homo sapien
ggatagatacttctcaagacatcac

SEQ ID NO: 1067593 - DNA, 25 bp, Homo sapien
acacagcgtgagtcaatcaaggagg

SEQ ID NO: 1067594 - DNA, 25 bp, Homo sapien
tgcctgacaatggaagacatacttg

SEQ ID NO: 1067595 - DNA, 25 bp, Homo sapien
cagtaaggcatagcttttccagccc

SEQ ID NO: 1067596 - DNA, 25 bp, Homo sapien
gattgcaggacaacaactacagcgt

SEQ ID NO: 1067597 - DNA, 25 bp, Homo sapien
ggtacatgtgcaacagggaactctt

SEQ ID NO: 1067598 - DNA, 25 bp, Homo sapien
cttggaacagataccggtgctttct

SEQ ID NO: 1067599 - DNA, 25 bp, Homo sapien
ttcgtactgttaggcccttggaaca

SEQ ID NO: 1067600 - DNA, 25 bp, Homo sapien
tgggtgctcttcatgcaaggttgca

SEQ ID NO: 1067601 - DNA, 25 bp, Homo sapien
ccccaataaagagatgcgtgtgact

SEQ ID NO: 1067602 - DNA, 25 bp, Homo sapien
actttagaatgagaaacttgtgacg

SEQ ID NO: 1067603 - DNA, 25 bp, Homo sapien
gaattgtgaatcttagtgcagtggg

SEQ ID NO: 1067604 - DNA, 25 bp, Homo sapien
taataatgctataccgaggtgcttg

SEQ ID NO: 1067605 - DNA, 25 bp, Homo sapien
actcaaaaagctgggaattaagtgg

SEQ ID NO: 1067606 - DNA, 25 bp, Homo sapien
taactgtgaggaacgtagtaccgca

SEQ ID NO: 1067607 - DNA, 25 bp, Homo sapien
gcttgctccaagattctcattgccg

SEQ ID NO: 1067608 - DNA, 25 bp, Homo sapien
catttctgcagtgcgtaactgtgag

SEQ ID NO: 1067609 - DNA, 25 bp, Homo sapien
tggacattaggacccggatgtagta

SEQ ID NO: 1067610 - DNA, 25 bp, Homo sapien
cctaaaagtcgatctgaaacttggg

SEQ ID NO: 1067611 - DNA, 25 bp, Homo sapien
gcttttgatacccttactgtggact

SEQ ID NO: 1067612 - DNA, 25 bp, Homo sapien
cactaaaacagcaatgtactcaggg

SEQ ID NO: 1067613 - DNA, 25 bp, Homo sapien
gtactcagggttgtaagcttactca

SEQ ID NO: 1067614 - DNA, 25 bp, Homo sapien
gcctgttagtataatgggagcctga

SEQ ID NO: 1067615 - DNA, 25 bp, Homo sapien
taaatatgttagaggaacagcttcc

SEQ ID NO: 1067616 - DNA, 25 bp, Homo sapien
ctccttgtgctacttctgttgggca

SEQ ID NO: 1067617 - DNA, 25 bp, Homo sapien
tccattagaacaagagactttgact

SEQ ID NO: 1067618 - DNA, 25 bp, Homo sapien
ccctcaagtttatggcagtgtacct

SEQ ID NO: 1067619 - DNA, 25 bp, Homo sapien
tgaaagcatgagagtgtctaggcct

SEQ ID NO: 1067620 - DNA, 25 bp, Homo sapien
aaatggatcttttatggccctatga

SEQ ID NO: 1067621 - DNA, 25 bp, Homo sapien
gcacgctggtgctaagtatttttta

SEQ ID NO: 1067622 - DNA, 25 bp, Homo sapien
aaaaccccgattttagatgtgatat

SEQ ID NO: 1067623 - DNA, 25 bp, Homo sapien
actccagcaggatatggtagaggga

SEQ ID NO: 1067624 - DNA, 25 bp, Homo sapien
gagaagagtacgaaggcccaaacaa

SEQ ID NO: 1067625 - DNA, 25 bp, Homo sapien
ctggaactccagcaggatatggtag

SEQ ID NO: 1067626 - DNA, 25 bp, Homo sapien
gcacaaggtttcttaagcagcacat

SEQ ID NO: 1067627 - DNA, 25 bp, Homo sapien
tagcttcgtgtttcactgttcggga

SEQ ID NO: 1067628 - DNA, 25 bp, Homo sapien
gaatctctggttgggcttgttaggc

SEQ ID NO: 1067629 - DNA, 25 bp, Homo sapien
cacatgccactaactggtgagtagg

SEQ ID NO: 1067630 - DNA, 25 bp, Homo sapien
tgactcgtcgtttcccacctgttgg

SEQ ID NO: 1067631 - DNA, 25 bp, Homo sapien
cggttgccaacaaggagtcaatgct

SEQ ID NO: 1067632 - DNA, 25 bp, Homo sapien
catagaagaactcggtgtgtggtaa

SEQ ID NO: 1067633 - DNA, 25 bp, Homo sapien
gcttttgaactctagtgcatggcaa

SEQ ID NO: 1067634 - DNA, 25 bp, Homo sapien
gaactggatgatacacccatgagag

SEQ ID NO: 1067635 - DNA, 25 bp, Homo sapien
gaagaagcctttagccaatttggtc

SEQ ID NO: 1067636 - DNA, 25 bp, Homo sapien
tagacagcttcgagttcgctttgcc

SEQ ID NO: 1067637 - DNA, 25 bp, Homo sapien
gctgaaattgccaaagccgaactgg

SEQ ID NO: 1067638 - DNA, 25 bp, Homo sapien
gaaaacttacacacagcgatgtcgg

SEQ ID NO: 1067639 - DNA, 25 bp, Homo sapien
tcacggaggatgaattcaaaagact

SEQ ID NO: 1067640 - DNA, 25 bp, Homo sapien
tatcaacaaaggcaaaggattcgga

SEQ ID NO: 1067641 - DNA, 25 bp, Homo sapien
gaatctacctgctgatatcacggag

SEQ ID NO: 1067642 - DNA, 25 bp, Homo sapien
ctcaatcagaatcgcggccccatgg

SEQ ID NO: 1067643 - DNA, 25 bp, Homo sapien
ttccaagcccgtcgttgctcaggga

SEQ ID NO: 1067644 - DNA, 25 bp, Homo sapien
cgggcctaagtacgcctggcggcca

SEQ ID NO: 1067645 - DNA, 25 bp, Homo sapien
ccaaaggcggcaaaatgcctggcgg

SEQ ID NO: 1067646 - DNA, 25 bp, Homo sapien
caattagttgtaaacaccgccgcac

SEQ ID NO: 1067647 - DNA, 25 bp, Homo sapien
aacaccgccgcactcagaccagcca

SEQ ID NO: 1067648 - DNA, 25 bp, Homo sapien
aaacaccgccgcactcagaccagcc

SEQ ID NO: 1067649 - DNA, 25 bp, Homo sapien
ttagttgtaaacaccgccgcactca

SEQ ID NO: 1067650 - DNA, 25 bp, Homo sapien
cagcagttctttcactgcatctgcc

SEQ ID NO: 1067651 - DNA, 25 bp, Homo sapien
gcagttctttcactgcatctgccat

SEQ ID NO: 1067652 - DNA, 25 bp, Homo sapien
ctgtttccagcagttctttcactgc

SEQ ID NO: 1067653 - DNA, 25 bp, Homo sapien
gtttccagcagttctttcactgcat

SEQ ID NO: 1067654 - DNA, 25 bp, Homo sapien
ttatcaagaccaagtaattctgcct

SEQ ID NO: 1067655 - DNA, 25 bp, Homo sapien
tcattatcaagaccaagtaattctg

SEQ ID NO: 1067656 - DNA, 25 bp, Homo sapien
ttctgccttgcaatgtctttcatac

SEQ ID NO: 1067657 - DNA, 25 bp, Homo sapien
aagtaattctgccttgcaatgtctt

SEQ ID NO: 1067658 - DNA, 25 bp, Homo sapien
tcaagccaggtcaacacaatcggtt

SEQ ID NO: 1067659 - DNA, 25 bp, Homo sapien
tcaacacaatcggttccctttgtgg

SEQ ID NO: 1067660 - DNA, 25 bp, Homo sapien
cctttgtggcctcacaggaacagca

SEQ ID NO: 1067661 - DNA, 25 bp, Homo sapien
acaatcggttccctttgtggcctca

SEQ ID NO: 1067662 - DNA, 25 bp, Homo sapien
ccatgacgcagggatgaaggagaaa

SEQ ID NO: 1067663 - DNA, 25 bp, Homo sapien
atctggagaattgggtgcaatgtca

SEQ ID NO: 1067664 - DNA, 25 bp, Homo sapien
tgtcagtgaagggttccacatcacc

SEQ ID NO: 1067665 - DNA, 25 bp, Homo sapien
gaaattactggaaagacaatctgga

SEQ ID NO: 1067666 - DNA, 25 bp, Homo sapien
aggccaaatcctgcaagtctctttg

SEQ ID NO: 1067667 - DNA, 25 bp, Homo sapien
cgtgcgcggtaagtggccatgggta

SEQ ID NO: 1067668 - DNA, 25 bp, Homo sapien
tgctcccaccactcaactatggccg

SEQ ID NO: 1067669 - DNA, 25 bp, Homo sapien
ccccggtcctgagcgtgcgcggtaa

SEQ ID NO: 1067670 - DNA, 25 bp, Homo sapien
tcaccaaatcagccccttgcgcgcg

SEQ ID NO: 1067671 - DNA, 25 bp, Homo sapien
ccttgcgcgcgcccctgatgcgcag

SEQ ID NO: 1067672 - DNA, 25 bp, Homo sapien
aatcagccccttgcgcgcgcccctg

SEQ ID NO: 1067673 - DNA, 25 bp, Homo sapien
ttgcgcgcgcccctgatgcgcaggc

SEQ ID NO: 1067674 - DNA, 25 bp, Homo sapien
aggcacggccgcctcgcggcagctt

SEQ ID NO: 1067675 - DNA, 25 bp, Homo sapien
gcgccgggccgcagcttctgagatc

SEQ ID NO: 1067676 - DNA, 25 bp, Homo sapien
gagggggcggatgccgcgcgccggg

SEQ ID NO: 1067677 - DNA, 25 bp, Homo sapien
ttctgagatcccacgggtccgcgcg

SEQ ID NO: 1067678 - DNA, 25 bp, Homo sapien
cccgctcggaaccgctgcggctccc

SEQ ID NO: 1067679 - DNA, 25 bp, Homo sapien
ctcggaaccgctgcggctccccgcg

SEQ ID NO: 1067680 - DNA, 25 bp, Homo sapien
gctccccgcgcggtggcggcggtac

SEQ ID NO: 1067681 - DNA, 25 bp, Homo sapien
gttgggccccgctcggaaccgctgc

SEQ ID NO: 1067682 - DNA, 25 bp, Homo sapien
gggccggactccacctctctctccg

SEQ ID NO: 1067683 - DNA, 25 bp, Homo sapien
ggccggactccacctctctctccgc

SEQ ID NO: 1067684 - DNA, 25 bp, Homo sapien
cacaggcactatagttgggacaaac

SEQ ID NO: 1067685 - DNA, 25 bp, Homo sapien
tttacgctaagctgaaagggcattc

SEQ ID NO: 1067686 - DNA, 25 bp, Homo sapien
gctgtagcatcattacgagattact

SEQ ID NO: 1067687 - DNA, 25 bp, Homo sapien
ctaggaggagttactatgaagttaa

SEQ ID NO: 1067688 - DNA, 25 bp, Homo sapien
atgcaatctcgaaatcctaggctca

SEQ ID NO: 1067689 - DNA, 25 bp, Homo sapien
tcatagttcaatgcaatctcgaaat

SEQ ID NO: 1067690 - DNA, 25 bp, Homo sapien
caagatgggaagaaccagcgtgtga

SEQ ID NO: 1067691 - DNA, 25 bp, Homo sapien
tcattctcagtattagaatggcctc

SEQ ID NO: 1067692 - DNA, 25 bp, Homo sapien
ccttttgggattgttctagtgtaca

SEQ ID NO: 1067693 - DNA, 25 bp, Homo sapien
tcatgtcacctttaaatagagatag

SEQ ID NO: 1067694 - DNA, 25 bp, Homo sapien
ggtgaaagaaggcatcctcatcttg

SEQ ID NO: 1067695 - DNA, 25 bp, Homo sapien
cactgaatatgatgtaagcaatgat

SEQ ID NO: 1067696 - DNA, 25 bp, Homo sapien
gtagatgctgcctatttctcctaga

SEQ ID NO: 1067697 - DNA, 25 bp, Homo sapien
gactgaatctcctaaagtgaactga

SEQ ID NO: 1067698 - DNA, 25 bp, Homo sapien
ttattattctttgtccagcacttgg

SEQ ID NO: 1067699 - DNA, 25 bp, Homo sapien
gatattcccaatgttagtcagccag

SEQ ID NO: 1067700 - DNA, 25 bp, Homo sapien
tagtgtgctagctatgccaattggg

SEQ ID NO: 1067701 - DNA, 25 bp, Homo sapien
caagtgcaggagaccaccaggttac

SEQ ID NO: 1067702 - DNA, 25 bp, Homo sapien
gggtcgcgcctgagattagctactg

SEQ ID NO: 1067703 - DNA, 25 bp, Homo sapien
aatatggtaacctcccaagtgcagg

SEQ ID NO: 1067704 - DNA, 25 bp, Homo sapien
ctgatgttaggagttagaggtcagc

SEQ ID NO: 1067705 - DNA, 25 bp, Homo sapien
gatgttaggagttagaggtcagcct

SEQ ID NO: 1067706 - DNA, 25 bp, Homo sapien
tgatgttaggagttagaggtcagcc

SEQ ID NO: 1067707 - DNA, 25 bp, Homo sapien
ccagcagggatctttggcagtggct

SEQ ID NO: 1067708 - DNA, 25 bp, Homo sapien
tggccagcagggatctttggcagtg

SEQ ID NO: 1067709 - DNA, 25 bp, Homo sapien
cagtggctaattgatcacgatgttc

SEQ ID NO: 1067710 - DNA, 25 bp, Homo sapien
agcagggatctttggcagtggctaa

SEQ ID NO: 1067711 - DNA, 25 bp, Homo sapien
ggctcaagcaggaactagtttggta

SEQ ID NO: 1067712 - DNA, 25 bp, Homo sapien
ggagacaggcacacaaaaatgggat

SEQ ID NO: 1067713 - DNA, 25 bp, Homo sapien
tccttaggcttgagtatagggctca

SEQ ID NO: 1067714 - DNA, 25 bp, Homo sapien
gggcatcacagttaatcaggctatc

SEQ ID NO: 1067715 - DNA, 25 bp, Homo sapien
tacaaacacagtgagtgcactgcag

SEQ ID NO: 1067716 - DNA, 25 bp, Homo sapien
tggtgggctggccatcatccagatt

SEQ ID NO: 1067717 - DNA, 25 bp, Homo sapien
tactgacttttattggcaccccagg

SEQ ID NO: 1067718 - DNA, 25 bp, Homo sapien
gatgagggactcaccatcctactga

SEQ ID NO: 1067719 - DNA, 25 bp, Homo sapien
aaggaaaagaccttctaacacatgg

SEQ ID NO: 1067720 - DNA, 25 bp, Homo sapien
cacactcagcccagaaggaaaagac

SEQ ID NO: 1067721 - DNA, 25 bp, Homo sapien
aagaccttctaacacatggggtatc

SEQ ID NO: 1067722 - DNA, 25 bp, Homo sapien
ccacactcagcccagaaggaaaaga

SEQ ID NO: 1067723 - DNA, 25 bp, Homo sapien
tccactcactggatcagagaccctt

SEQ ID NO: 1067724 - DNA, 25 bp, Homo sapien
cacttgtgagcttataccttttaaa

SEQ ID NO: 1067725 - DNA, 25 bp, Homo sapien
taaaatctttcaaatcatctacaac

SEQ ID NO: 1067726 - DNA, 25 bp, Homo sapien
cagagacccttgtaatattagtgaa

SEQ ID NO: 1067727 - DNA, 25 bp, Homo sapien
acagtgagtagtaaaattacaagag

SEQ ID NO: 1067728 - DNA, 25 bp, Homo sapien
cagtgagtagtaaaattacaagaga

SEQ ID NO: 1067729 - DNA, 25 bp, Homo sapien
agtgagtagtaaaattacaagagat

SEQ ID NO: 1067730 - DNA, 25 bp, Homo sapien
gtgagtagtaaaattacaagagatt

SEQ ID NO: 1067731 - DNA, 25 bp, Homo sapien
ctacaatttcatcaaaaactgcacc

SEQ ID NO: 1067732 - DNA, 25 bp, Homo sapien
tacaatttcatcaaaaactgcacca

SEQ ID NO: 1067733 - DNA, 25 bp, Homo sapien
acaatttcatcaaaaactgcaccac

SEQ ID NO: 1067734 - DNA, 25 bp, Homo sapien
aaacaaggtgattgtgatttgcttt

SEQ ID NO: 1067735 - DNA, 25 bp, Homo sapien
caaaaacaaggtgattgtgatttgc

SEQ ID NO: 1067736 - DNA, 25 bp, Homo sapien
acaaaaacaaggtgattgtgatttg

SEQ ID NO: 1067737 - DNA, 25 bp, Homo sapien
tgagttatgactgcgccactgaacc

SEQ ID NO: 1067738 - DNA, 25 bp, Homo sapien
tggtatctcttaaagcaggccttat

SEQ ID NO: 1067739 - DNA, 25 bp, Homo sapien
gcaggccttattcttaacaacttta

SEQ ID NO: 1067740 - DNA, 25 bp, Homo sapien
aaagcaggccttattcttaacaact

SEQ ID NO: 1067741 - DNA, 25 bp, Homo sapien
ttggtatctcttaaagcaggcctta

SEQ ID NO: 1067742 - DNA, 25 bp, Homo sapien
cctgtatcactaagcgtttccaagc

SEQ ID NO: 1067743 - DNA, 25 bp, Homo sapien
tcactaagcgtttccaagcatagta

SEQ ID NO: 1067744 - DNA, 25 bp, Homo sapien
actaagcgtttccaagcatagtaat

SEQ ID NO: 1067745 - DNA, 25 bp, Homo sapien
tatcactaagcgtttccaagcatag

SEQ ID NO: 1067746 - DNA, 25 bp, Homo sapien
tccccctctataagggcataagcaa

SEQ ID NO: 1067747 - DNA, 25 bp, Homo sapien
ccccctctataagggcataagcaat

SEQ ID NO: 1067748 - DNA, 25 bp, Homo sapien
atccccctctataagggcataagca

SEQ ID NO: 1067749 - DNA, 25 bp, Homo sapien
ttcatatgcatatgccgcacagact

SEQ ID NO: 1067750 - DNA, 25 bp, Homo sapien
agttcatatgcatatgccgcacaga

SEQ ID NO: 1067751 - DNA, 25 bp, Homo sapien
tcatatgcatatgccgcacagacta

SEQ ID NO: 1067752 - DNA, 25 bp, Homo sapien
cagttcatatgcatatgccgcacag

SEQ ID NO: 1067753 - DNA, 25 bp, Homo sapien
ggcacgtggctgaccaagattgcct

SEQ ID NO: 1067754 - DNA, 25 bp, Homo sapien
ttcatcttctttcattaagtagtgc

SEQ ID NO: 1067755 - DNA, 25 bp, Homo sapien
catcttctttcattaagtagtgcat

SEQ ID NO: 1067756 - DNA, 25 bp, Homo sapien
cttctttcattaagtagtgcatgta

SEQ ID NO: 1067757 - DNA, 25 bp, Homo sapien
ctttcattaagtagtgcatgtaatc

SEQ ID NO: 1067758 - DNA, 25 bp, Homo sapien
tacatctcctccatcatgtctggag

SEQ ID NO: 1067759 - DNA, 25 bp, Homo sapien
agctttcttatacatctcctccatc

SEQ ID NO: 1067760 - DNA, 25 bp, Homo sapien
catgagctttcttatacatctcctc

SEQ ID NO: 1067761 - DNA, 25 bp, Homo sapien
tggattctctcgtatagcagcatga

SEQ ID NO: 1067762 - DNA, 25 bp, Homo sapien
gtttcttgggcttcttttcatagac

SEQ ID NO: 1067763 - DNA, 25 bp, Homo sapien
ttgtttcttgggcttcttttcatag

SEQ ID NO: 1067764 - DNA, 25 bp, Homo sapien
tttgtttcttgggcttcttttcata

SEQ ID NO: 1067765 - DNA, 25 bp, Homo sapien
tgtttcttgggcttcttttcataga

SEQ ID NO: 1067766 - DNA, 25 bp, Homo sapien
caagggatattttgggatggttcca

SEQ ID NO: 1067767 - DNA, 25 bp, Homo sapien
tgagcaagggatattttgggatggt

SEQ ID NO: 1067768 - DNA, 25 bp, Homo sapien
tctgagcaagggatattttgggatg

SEQ ID NO: 1067769 - DNA, 25 bp, Homo sapien
agcaagggatattttgggatggttc

SEQ ID NO: 1067770 - DNA, 25 bp, Homo sapien
tgtagtatgcttacaagaaagctct

SEQ ID NO: 1067771 - DNA, 25 bp, Homo sapien
tacttcgaggtaaagtcaaccgcca

SEQ ID NO: 1067772 - DNA, 25 bp, Homo sapien
tagacttagattttgcacaaggaga

SEQ ID NO: 1067773 - DNA, 25 bp, Homo sapien
gtccctcttagtcattgctttagca

SEQ ID NO: 1067774 - DNA, 25 bp, Homo sapien
tgaaactaggtaagatcacccagtg

SEQ ID NO: 1067775 - DNA, 25 bp, Homo sapien
gagactggtgtcatagaagctaacg

SEQ ID NO: 1067776 - DNA, 25 bp, Homo sapien
aacagagataactattcagaggccc

SEQ ID NO: 1067777 - DNA, 25 bp, Homo sapien
tacaagtcagagtggagtgatccca

SEQ ID NO: 1067778 - DNA, 25 bp, Homo sapien
gagataggaacactaagggaggacc

SEQ ID NO: 1067779 - DNA, 25 bp, Homo sapien
gaggcattgcctgatacgtatatga

SEQ ID NO: 1067780 - DNA, 25 bp, Homo sapien
gaagtgttcaatgttatacggagca

SEQ ID NO: 1067781 - DNA, 25 bp, Homo sapien
taggaagctacaataacccaaggaa

SEQ ID NO: 1067782 - DNA, 25 bp, Homo sapien
gtgaattagcaattttggtacttac

SEQ ID NO: 1067783 - DNA, 25 bp, Homo sapien
atgtgaattagcaattttggtactt

SEQ ID NO: 1067784 - DNA, 25 bp, Homo sapien
caactgatgtgaattagcaattttg

SEQ ID NO: 1067785 - DNA, 25 bp, Homo sapien
agagatgtcaatttctaacaaagca

SEQ ID NO: 1067786 - DNA, 25 bp, Homo sapien
tgtcaagggtaggagttaagttgtg

SEQ ID NO: 1067787 - DNA, 25 bp, Homo sapien
aggagttaagttgtggtctatatct

SEQ ID NO: 1067788 - DNA, 25 bp, Homo sapien
ctgtcaagggtaggagttaagttgt

SEQ ID NO: 1067789 - DNA, 25 bp, Homo sapien
ggtaggagttaagttgtggtctata

SEQ ID NO: 1067790 - DNA, 25 bp, Homo sapien
ttgattcggcattccataagacatg

SEQ ID NO: 1067791 - DNA, 25 bp, Homo sapien
cattgtctgattcatgctgtgtgac

SEQ ID NO: 1067792 - DNA, 25 bp, Homo sapien
tcattgtcactaccaacgactggaa

SEQ ID NO: 1067793 - DNA, 25 bp, Homo sapien
caagatccccagagttcaaaaaata

SEQ ID NO: 1067794 - DNA, 25 bp, Homo sapien
tatggttctaagtccaacaattatt

SEQ ID NO: 1067795 - DNA, 25 bp, Homo sapien
tggttctaagtccaacaattattac

SEQ ID NO: 1067796 - DNA, 25 bp, Homo sapien
tttatggttctaagtccaacaatta

SEQ ID NO: 1067797 - DNA, 25 bp, Homo sapien
atggttctaagtccaacaattatta

SEQ ID NO: 1067798 - DNA, 25 bp, Homo sapien
tatagtatatccttgcacagacttg

SEQ ID NO: 1067799 - DNA, 25 bp, Homo sapien
gatgagtaagatacaatctggccct

SEQ ID NO: 1067800 - DNA, 25 bp, Homo sapien
tggccctcaactcctacactagtag

SEQ ID NO: 1067801 - DNA, 25 bp, Homo sapien
ggacattggcacttctacggcctga

SEQ ID NO: 1067802 - DNA, 25 bp, Homo sapien
tggtaaatgggtatgtaatgtttct

SEQ ID NO: 1067803 - DNA, 25 bp, Homo sapien
gtggtaaatgggtatgtaatgtttc

SEQ ID NO: 1067804 - DNA, 25 bp, Homo sapien
atgggtatgtaatgtttcttcaact

SEQ ID NO: 1067805 - DNA, 25 bp, Homo sapien
gggtatgtaatgtttcttcaacttg

SEQ ID NO: 1067806 - DNA, 25 bp, Homo sapien
gtggtgccattgctttgtcatactc

SEQ ID NO: 1067807 - DNA, 25 bp, Homo sapien
tccccagttccgaaccaatggattc

SEQ ID NO: 1067808 - DNA, 25 bp, Homo sapien
tttgtctagtagtccctgctgtggt

SEQ ID NO: 1067809 - DNA, 25 bp, Homo sapien
catcatccaaaggttcttctttaat

SEQ ID NO: 1067810 - DNA, 25 bp, Homo sapien
taacgatgacatccgcaacttgtat

SEQ ID NO: 1067811 - DNA, 25 bp, Homo sapien
tcattggcatacattaacggtctgc

SEQ ID NO: 1067812 - DNA, 25 bp, Homo sapien
gccttcaaggcacaatcatgtttgg

SEQ ID NO: 1067813 - DNA, 25 bp, Homo sapien
gatggctattgcaaacttctgctgg

SEQ ID NO: 1067814 - DNA, 25 bp, Homo sapien
gaattcctgaagtggaactactagg

SEQ ID NO: 1067815 - DNA, 25 bp, Homo sapien
tcagtaatgccacgatgaatatctc

SEQ ID NO: 1067816 - DNA, 25 bp, Homo sapien
gggcaccaaaaacctcagtaatgaa

SEQ ID NO: 1067817 - DNA, 25 bp, Homo sapien
cggctccaatggcaccaagatttta

SEQ ID NO: 1067818 - DNA, 25 bp, Homo sapien
aaagtaatacacaatcactatagaa

SEQ ID NO: 1067819 - DNA, 25 bp, Homo sapien
taaaagtaatacacaatcactatag

SEQ ID NO: 1067820 - DNA, 25 bp, Homo sapien
aaaagtaatacacaatcactataga

SEQ ID NO: 1067821 - DNA, 25 bp, Homo sapien
cactaattttcagttccccctcttg

SEQ ID NO: 1067822 - DNA, 25 bp, Homo sapien
ctaattttcagttccccctcttgag

SEQ ID NO: 1067823 - DNA, 25 bp, Homo sapien
tgaaagccagtagtcaactgtggag

SEQ ID NO: 1067824 - DNA, 25 bp, Homo sapien
ctgaaagccagtagtcaactgtgga

SEQ ID NO: 1067825 - DNA, 25 bp, Homo sapien
ggaaactcgaacagctgtggctgga

SEQ ID NO: 1067826 - DNA, 25 bp, Homo sapien
tgtatatccagtgaggcacagtgtg

SEQ ID NO: 1067827 - DNA, 25 bp, Homo sapien
ggcgggcaggtggaactgtatatcc

SEQ ID NO: 1067828 - DNA, 25 bp, Homo sapien
gaatagctgagtagaccctttcctc

SEQ ID NO: 1067829 - DNA, 25 bp, Homo sapien
gataaaaatttgatagcacagaagc

SEQ ID NO: 1067830 - DNA, 25 bp, Homo sapien
aaatggcttttagccacatgtgaac

SEQ ID NO: 1067831 - DNA, 25 bp, Homo sapien
tgaacagtaaataagcactcaggag

SEQ ID NO: 1067832 - DNA, 25 bp, Homo sapien
gcttgaaagatagtcccaaaacaaa

SEQ ID NO: 1067833 - DNA, 25 bp, Homo sapien
tcttcaaactgatttaagtcttaca

SEQ ID NO: 1067834 - DNA, 25 bp, Homo sapien
aatcccatgatgagtgccgggcacg

SEQ ID NO: 1067835 - DNA, 25 bp, Homo sapien
tattatgtgaatgatttcatggcaa

SEQ ID NO: 1067836 - DNA, 25 bp, Homo sapien
ttttaaagactgttgatccctagag

SEQ ID NO: 1067837 - DNA, 25 bp, Homo sapien
actgggcactgatcacatcctttgg

SEQ ID NO: 1067838 - DNA, 25 bp, Homo sapien
gcaaaaatctttactagtggtggtg

SEQ ID NO: 1067839 - DNA, 25 bp, Homo sapien
tctttactagtggtggtgttttcaa

SEQ ID NO: 1067840 - DNA, 25 bp, Homo sapien
catttggttgaaatactatttgtat

SEQ ID NO: 1067841 - DNA, 25 bp, Homo sapien
tagcagaacgaaacttagagaagca

SEQ ID NO: 1067842 - DNA, 25 bp, Homo sapien
gactgtccctctatctgaagcatgt

SEQ ID NO: 1067843 - DNA, 25 bp, Homo sapien
tgaagcatgtggcattgtcccgacc

SEQ ID NO: 1067844 - DNA, 25 bp, Homo sapien
tcactgcaaagtttatggaccacat

SEQ ID NO: 1067845 - DNA, 25 bp, Homo sapien
aaagcgcacacggtgtaattttggc

SEQ ID NO: 1067846 - DNA, 25 bp, Homo sapien
tgtcttccccaagctattggtattt

SEQ ID NO: 1067847 - DNA, 25 bp, Homo sapien
ctctgtcttccccaagctattggta

SEQ ID NO: 1067848 - DNA, 25 bp, Homo sapien
caatgatttgcaaagcgcacacggt

SEQ ID NO: 1067849 - DNA, 25 bp, Homo sapien
aagttgcgtatacttccatctgaca

SEQ ID NO: 1067850 - DNA, 25 bp, Homo sapien
ctgtagctgcagaagttgcgtatac

SEQ ID NO: 1067851 - DNA, 25 bp, Homo sapien
gctgcagaagttgcgtatacttcca

SEQ ID NO: 1067852 - DNA, 25 bp, Homo sapien
aaagctaccacacagctgtagctgc

SEQ ID NO: 1067853 - DNA, 25 bp, Homo sapien
agacaagggcactactgaagaattc

SEQ ID NO: 1067854 - DNA, 25 bp, Homo sapien
cagctgcagcagagctactgatgga

SEQ ID NO: 1067855 - DNA, 25 bp, Homo sapien
caaaaagacggttacagtgttgaca

SEQ ID NO: 1067856 - DNA, 25 bp, Homo sapien
acagcagatgtgctacctcctccgg

SEQ ID NO: 1067857 - DNA, 25 bp, Homo sapien
gagaaccgaacagtctcctttacaa

SEQ ID NO: 1067858 - DNA, 25 bp, Homo sapien
tctcaattttacaatattcacacat

SEQ ID NO: 1067859 - DNA, 25 bp, Homo sapien
ttttacaatattcacacattgccat

SEQ ID NO: 1067860 - DNA, 25 bp, Homo sapien
ctacagaatgacttgtcagcacctg

SEQ ID NO: 1067861 - DNA, 25 bp, Homo sapien
aattattctgtaccaatttgggaga

SEQ ID NO: 1067862 - DNA, 25 bp, Homo sapien
gcgttttgccaagtcatgtttataa

SEQ ID NO: 1067863 - DNA, 25 bp, Homo sapien
acattttacagtgatttccccagcg

SEQ ID NO: 1067864 - DNA, 25 bp, Homo sapien
tatttggacatgcattcttcacaac

SEQ ID NO: 1067865 - DNA, 25 bp, Homo sapien
tgagtttaccctgtcgcttacaagc

SEQ ID NO: 1067866 - DNA, 25 bp, Homo sapien
gagtttaccctgtcgcttacaagca

SEQ ID NO: 1067867 - DNA, 25 bp, Homo sapien
ccctgtcgcttacaagcatcacatt

SEQ ID NO: 1067868 - DNA, 25 bp, Homo sapien
gcttacaagcatcacatttggccat

SEQ ID NO: 1067869 - DNA, 25 bp, Homo sapien
atttcccctcgccatttcaaggact

SEQ ID NO: 1067870 - DNA, 25 bp, Homo sapien
tgctgattacagaacatcaagatac

SEQ ID NO: 1067871 - DNA, 25 bp, Homo sapien
catcaagatacaaagcaggttacag

SEQ ID NO: 1067872 - DNA, 25 bp, Homo sapien
tgtgaaggcgggtcacatacacttt

SEQ ID NO: 1067873 - DNA, 25 bp, Homo sapien
tcagcattccaaaggcggtgggatt

SEQ ID NO: 1067874 - DNA, 25 bp, Homo sapien
tagtcctgataagataagtaagtcc

SEQ ID NO: 1067875 - DNA, 25 bp, Homo sapien
attgctgtgctgtggtcaccgctca

SEQ ID NO: 1067876 - DNA, 25 bp, Homo sapien
taaagtggcctagcacatagtgtgt

SEQ ID NO: 1067877 - DNA, 25 bp, Homo sapien
tagaattcactgtaggctgagcagc

SEQ ID NO: 1067878 - DNA, 25 bp, Homo sapien
gcagcaggggcacttgccaatgata

SEQ ID NO: 1067879 - DNA, 25 bp, Homo sapien
tggagtcgaatcttttctcagagat

SEQ ID NO: 1067880 - DNA, 25 bp, Homo sapien
atgatactacattggctataactgg

SEQ ID NO: 1067881 - DNA, 25 bp, Homo sapien
gatgattttcgctgttactgttgga

SEQ ID NO: 1067882 - DNA, 25 bp, Homo sapien
atcaccgatgattttcgctgttact

SEQ ID NO: 1067883 - DNA, 25 bp, Homo sapien
accgatgattttcgctgttactgtt

SEQ ID NO: 1067884 - DNA, 25 bp, Homo sapien
tcaccgatgattttcgctgttactg

SEQ ID NO: 1067885 - DNA, 25 bp, Homo sapien
gtgatgggtttgcataataaagctt

SEQ ID NO: 1067886 - DNA, 25 bp, Homo sapien
gatgggtttgcataataaagctttg

SEQ ID NO: 1067887 - DNA, 25 bp, Homo sapien
tggctttagtctgtgtgatgggttt

SEQ ID NO: 1067888 - DNA, 25 bp, Homo sapien
ctttagtctgtgtgatgggtttgca

SEQ ID NO: 1067889 - DNA, 25 bp, Homo sapien
taaattcctggtgagtacgggcaag

SEQ ID NO: 1067890 - DNA, 25 bp, Homo sapien
cacttgtagggcagaagttccatgc

SEQ ID NO: 1067891 - DNA, 25 bp, Homo sapien
caagaacactgggatcctgatcacc

SEQ ID NO: 1067892 - DNA, 25 bp, Homo sapien
gatggaggctctaccctaggaaaag

SEQ ID NO: 1067893 - DNA, 25 bp, Homo sapien
tatgggaacaaacactggtacggga

SEQ ID NO: 1067894 - DNA, 25 bp, Homo sapien
tggaattccaaatgggactggagca

SEQ ID NO: 1067895 - DNA, 25 bp, Homo sapien
ctggagcatattgagtataaaggtg

SEQ ID NO: 1067896 - DNA, 25 bp, Homo sapien
tataaaggtgaagaggtatgggaac

SEQ ID NO: 1067897 - DNA, 25 bp, Homo sapien
ataactgtttcctttaaggactcag

SEQ ID NO: 1067898 - DNA, 25 bp, Homo sapien
gaaagaccaaggatagactgaaggc

SEQ ID NO: 1067899 - DNA, 25 bp, Homo sapien
agaccaaggatagactgaaggcttt

SEQ ID NO: 1067900 - DNA, 25 bp, Homo sapien
ctgaaagaccaaggatagactgaag

SEQ ID NO: 1067901 - DNA, 25 bp, Homo sapien
aaagaccaaggatagactgaaggct

SEQ ID NO: 1067902 - DNA, 25 bp, Homo sapien
tcagcttcaaatggatgtgtgggaa

SEQ ID NO: 1067903 - DNA, 25 bp, Homo sapien
tcaaatggatgtgtgggaagctttt

SEQ ID NO: 1067904 - DNA, 25 bp, Homo sapien
ctttatcttcactatccattgaaga

SEQ ID NO: 1067905 - DNA, 25 bp, Homo sapien
cttcaaatggatgtgtgggaagctt

SEQ ID NO: 1067906 - DNA, 25 bp, Homo sapien
tctagaaagagttcgtgttcagaag

SEQ ID NO: 1067907 - DNA, 25 bp, Homo sapien
gaaagagttcgtgttcagaagtttg

SEQ ID NO: 1067908 - DNA, 25 bp, Homo sapien
ttggtgtctagaaagagttcgtgtt

SEQ ID NO: 1067909 - DNA, 25 bp, Homo sapien
ggtgtctagaaagagttcgtgttca

SEQ ID NO: 1067910 - DNA, 25 bp, Homo sapien
taaggcatagtgattcagctcttcc

SEQ ID NO: 1067911 - DNA, 25 bp, Homo sapien
cagctcttcctcccagctatgtgga

SEQ ID NO: 1067912 - DNA, 25 bp, Homo sapien
gatactgcctctgattcaagatcac

SEQ ID NO: 1067913 - DNA, 25 bp, Homo sapien
gatcaccactgtatgtacttccttg

SEQ ID NO: 1067914 - DNA, 25 bp, Homo sapien
aagccatctctgtgtcgtcgtcttg

SEQ ID NO: 1067915 - DNA, 25 bp, Homo sapien
tcttgttcgggaacgtgcctggatt

SEQ ID NO: 1067916 - DNA, 25 bp, Homo sapien
tcgtcgtcttgttcgggaacgtgcc

SEQ ID NO: 1067917 - DNA, 25 bp, Homo sapien
tctgtgtcgtcgtcttgttcgggaa

SEQ ID NO: 1067918 - DNA, 25 bp, Homo sapien
aaaaggaatcaactactgggacatg

SEQ ID NO: 1067919 - DNA, 25 bp, Homo sapien
gaaggccatcaaaatgtacactcag

SEQ ID NO: 1067920 - DNA, 25 bp, Homo sapien
gtggcattctgcatcaatcggtaca

SEQ ID NO: 1067921 - DNA, 25 bp, Homo sapien
caactttgtataggaaagccctgtc

SEQ ID NO: 1067922 - DNA, 25 bp, Homo sapien
taaagaatacttacaactcagcaag

SEQ ID NO: 1067923 - DNA, 25 bp, Homo sapien
caaattgataaaagggacttcctca

SEQ ID NO: 1067924 - DNA, 25 bp, Homo sapien
gaacaaagctggaagatttacactc

SEQ ID NO: 1067925 - DNA, 25 bp, Homo sapien
aaatgaaccttgacccttgtctcaa

SEQ ID NO: 1067926 - DNA, 25 bp, Homo sapien
tatatcctaaagattcagagttctt

SEQ ID NO: 1067927 - DNA, 25 bp, Homo sapien
ttatatcctaaagattcagagttct

SEQ ID NO: 1067928 - DNA, 25 bp, Homo sapien
tttatatcctaaagattcagagttc

SEQ ID NO: 1067929 - DNA, 25 bp, Homo sapien
gaattccaaaaatttacagaacata

SEQ ID NO: 1067930 - DNA, 25 bp, Homo sapien
cagaacataaaatttagttttggat

SEQ ID NO: 1067931 - DNA, 25 bp, Homo sapien
ctgtaagaattccaaaaatttacag

SEQ ID NO: 1067932 - DNA, 25 bp, Homo sapien
tggatttttaagagtcagggttctc

SEQ ID NO: 1067933 - DNA, 25 bp, Homo sapien
gctccttgaataagactcctgggct

SEQ ID NO: 1067934 - DNA, 25 bp, Homo sapien
cacagccactatagacttcttccgt

SEQ ID NO: 1067935 - DNA, 25 bp, Homo sapien
tcttccaagcatttaccccatacat

SEQ ID NO: 1067936 - DNA, 25 bp, Homo sapien
gtgtcatcccggacactgagcagcc

SEQ ID NO: 1067937 - DNA, 25 bp, Homo sapien
tcctaaggggtcagaacgtgggcta

SEQ ID NO: 1067938 - DNA, 25 bp, Homo sapien
tctgaggattcttgagagagtgcat

SEQ ID NO: 1067939 - DNA, 25 bp, Homo sapien
gtcttgagtacttcctaaggggtca

SEQ ID NO: 1067940 - DNA, 25 bp, Homo sapien
tgggctagatgaggcctgttcaacc

SEQ ID NO: 1067941 - DNA, 25 bp, Homo sapien
ggattactatacagacgcagggctc

SEQ ID NO: 1067942 - DNA, 25 bp, Homo sapien
cgcagggctcaagaagacatatttt

SEQ ID NO: 1067943 - DNA, 25 bp, Homo sapien
tattttgaggcacttgcacagtgtc

SEQ ID NO: 1067944 - DNA, 25 bp, Homo sapien
ttcctggcagctgaagtgaaaccca

SEQ ID NO: 1067945 - DNA, 25 bp, Homo sapien
ccaaaaccaacagggtagactggag

SEQ ID NO: 1067946 - DNA, 25 bp, Homo sapien
taaggacagttacatgtgccccaaa

SEQ ID NO: 1067947 - DNA, 25 bp, Homo sapien
tgtgccccaaaaccaacagggtaga

SEQ ID NO: 1067948 - DNA, 25 bp, Homo sapien
ataaggacagttacatgtgccccaa

SEQ ID NO: 1067949 - DNA, 25 bp, Homo sapien
actacacccgaccagctgtttaact

SEQ ID NO: 1067950 - DNA, 25 bp, Homo sapien
tgtggaaaggtagaaaacatctgaa

SEQ ID NO: 1067951 - DNA, 25 bp, Homo sapien
aggtagaaaacatctgaaacattaa

SEQ ID NO: 1067952 - DNA, 25 bp, Homo sapien
ctgtggaaaggtagaaaacatctga

SEQ ID NO: 1067953 - DNA, 25 bp, Homo sapien
gaaaggtagaaaacatctgaaacat

SEQ ID NO: 1067954 - DNA, 25 bp, Homo sapien
gaattccaaggcacaagtataagat

SEQ ID NO: 1067955 - DNA, 25 bp, Homo sapien
tctccgcacctcttggataaactgg

SEQ ID NO: 1067956 - DNA, 25 bp, Homo sapien
ggcataagcccaaactcaactcagc

SEQ ID NO: 1067957 - DNA, 25 bp, Homo sapien
tcaactcagcaaaagtgcaggacag

SEQ ID NO: 1067958 - DNA, 25 bp, Homo sapien
aatgtacttattagtcctactgaat

SEQ ID NO: 1067959 - DNA, 25 bp, Homo sapien
cataacaatcacactatatatataa

SEQ ID NO: 1067960 - DNA, 25 bp, Homo sapien
ttcccataacaatcacactatatat

SEQ ID NO: 1067961 - DNA, 25 bp, Homo sapien
tatatataattctgcaagttacttt

SEQ ID NO: 1067962 - DNA, 25 bp, Homo sapien
gcaaaactgtgtactgccctaaaaa

SEQ ID NO: 1067963 - DNA, 25 bp, Homo sapien
gaaggtagacctagctcataccaga

SEQ ID NO: 1067964 - DNA, 25 bp, Homo sapien
gctgagagaactggataaccacata

SEQ ID NO: 1067965 - DNA, 25 bp, Homo sapien
gcccttgaatgtggcagtagattcc

SEQ ID NO: 1067966 - DNA, 25 bp, Homo sapien
tctggaatagggctcagtaaaaatg

SEQ ID NO: 1067967 - DNA, 25 bp, Homo sapien
cccatattttcaagagtttggtaag

SEQ ID NO: 1067968 - DNA, 25 bp, Homo sapien
gttcaatcataaatctggaataggg

SEQ ID NO: 1067969 - DNA, 25 bp, Homo sapien
cattaggaagtattgtaggttccca

SEQ ID NO: 1067970 - DNA, 25 bp, Homo sapien
tcatagattgcaaaacagggagcag

SEQ ID NO: 1067971 - DNA, 25 bp, Homo sapien
tttttagctcatagattgcaaaaca

SEQ ID NO: 1067972 - DNA, 25 bp, Homo sapien
gatcattaagcttactgttaaaggt

SEQ ID NO: 1067973 - DNA, 25 bp, Homo sapien
aattttcacatgatgaaataggaat

SEQ ID NO: 1067974 - DNA, 25 bp, Homo sapien
tggtactgtacttcagagtcctggt

SEQ ID NO: 1067975 - DNA, 25 bp, Homo sapien
aaggacgattggtgagtaagcgccc

SEQ ID NO: 1067976 - DNA, 25 bp, Homo sapien
ctggtccgtctcatcacatgggcaa

SEQ ID NO: 1067977 - DNA, 25 bp, Homo sapien
tcctcaatgcgagagaacatgtaac

SEQ ID NO: 1067978 - DNA, 25 bp, Homo sapien
gaggccagcctttgaccactctctg

SEQ ID NO: 1067979 - DNA, 25 bp, Homo sapien
tatattgaagcacgtgattcctctc

SEQ ID NO: 1067980 - DNA, 25 bp, Homo sapien
aaggtacactctttcacgtctagca

SEQ ID NO: 1067981 - DNA, 25 bp, Homo sapien
aatgcaggctatttgagctctgccc

SEQ ID NO: 1067982 - DNA, 25 bp, Homo sapien
tgctcttaacaaccggtataggact

SEQ ID NO: 1067983 - DNA, 25 bp, Homo sapien
gcactcagcctatatctgctcttaa

SEQ ID NO: 1067984 - DNA, 25 bp, Homo sapien
tagttactcacttagaaagcaagct

SEQ ID NO: 1067985 - DNA, 25 bp, Homo sapien
tagcagctagctaaatagaaagact

SEQ ID NO: 1067986 - DNA, 25 bp, Homo sapien
aatgagctttgcttcgcagccagaa

SEQ ID NO: 1067987 - DNA, 25 bp, Homo sapien
gaaaacgtctctattctgagcctga

SEQ ID NO: 1067988 - DNA, 25 bp, Homo sapien
gacaaaaagtatggcactggcactg

SEQ ID NO: 1067989 - DNA, 25 bp, Homo sapien
aatactgagtgcctatgaaggtgcc

SEQ ID NO: 1067990 - DNA, 25 bp, Homo sapien
taaaactcataaagtcggactgggc

SEQ ID NO: 1067991 - DNA, 25 bp, Homo sapien
cattttgacaggtaaaactcataaa

SEQ ID NO: 1067992 - DNA, 25 bp, Homo sapien
ttagtggattgtcagtattctctgc

SEQ ID NO: 1067993 - DNA, 25 bp, Homo sapien
gactgggcatcttagtggattgtca

SEQ ID NO: 1067994 - DNA, 25 bp, Homo sapien
gtgcactacattcagttcagagaaa

SEQ ID NO: 1067995 - DNA, 25 bp, Homo sapien
gttaactgccttctgagtgcactac

SEQ ID NO: 1067996 - DNA, 25 bp, Homo sapien
gtctaaagccacgggcaagctactt

SEQ ID NO: 1067997 - DNA, 25 bp, Homo sapien
ctaaagccacgggcaagctactttt

SEQ ID NO: 1067998 - DNA, 25 bp, Homo sapien
cacatgtgacactatggccaagcac

SEQ ID NO: 1067999 - DNA, 25 bp, Homo sapien
tatggctctcaacctttctccactg

SEQ ID NO: 1068000 - DNA, 25 bp, Homo sapien
cacattatcaaagggcaaatgaagc

SEQ ID NO: 1068001 - DNA, 25 bp, Homo sapien
gaactccaagggcactcaatacaca

SEQ ID NO: 1068002 - DNA, 25 bp, Homo sapien
catcattcctttgcttcacactttc

SEQ ID NO: 1068003 - DNA, 25 bp, Homo sapien
ctattcgggacacaggagcgctcag

SEQ ID NO: 1068004 - DNA, 25 bp, Homo sapien
aaacacatcattcctttgcttcaca

SEQ ID NO: 1068005 - DNA, 25 bp, Homo sapien
gcgctcaggttgaaggtaaaacaca

SEQ ID NO: 1068006 - DNA, 25 bp, Homo sapien
gtcttcagatttggctttggcaagt

SEQ ID NO: 1068007 - DNA, 25 bp, Homo sapien
catgtacctccctcaccatgagaat

SEQ ID NO: 1068008 - DNA, 25 bp, Homo sapien
tgagaatacgtgttaacatggtgtc

SEQ ID NO: 1068009 - DNA, 25 bp, Homo sapien
tctatcgggaatgtggagtaccaca

SEQ ID NO: 1068010 - DNA, 25 bp, Homo sapien
aataagattatgcaccactcggaga

SEQ ID NO: 1068011 - DNA, 25 bp, Homo sapien
ttcatttgcacatccacactgtggg

SEQ ID NO: 1068012 - DNA, 25 bp, Homo sapien
tccaacagctggatgcattcacagt

SEQ ID NO: 1068013 - DNA, 25 bp, Homo sapien
tgacttttacggagggcttgccaaa

SEQ ID NO: 1068014 - DNA, 25 bp, Homo sapien
atttttattgggtcttcaaatctgg

SEQ ID NO: 1068015 - DNA, 25 bp, Homo sapien
tttattgggtcttcaaatctgggtc

SEQ ID NO: 1068016 - DNA, 25 bp, Homo sapien
tattgggtcttcaaatctgggtccc

SEQ ID NO: 1068017 - DNA, 25 bp, Homo sapien
ttgggtcttcaaatctgggtcccac

SEQ ID NO: 1068018 - DNA, 25 bp, Homo sapien
agacccaccgctgagaaggcttgat

SEQ ID NO: 1068019 - DNA, 25 bp, Homo sapien
gagatggactgatatgccacacaca

SEQ ID NO: 1068020 - DNA, 25 bp, Homo sapien
tgacaagggcctccagaaactggtg

SEQ ID NO: 1068021 - DNA, 25 bp, Homo sapien
taaaacaacgggagaaaagctgcca

SEQ ID NO: 1068022 - DNA, 25 bp, Homo sapien
tgttttttcatacaactacagaagg

SEQ ID NO: 1068023 - DNA, 25 bp, Homo sapien
taatcagacgcacacatcaacagct

SEQ ID NO: 1068024 - DNA, 25 bp, Homo sapien
gggtgttctcagtaaaagatacaga

SEQ ID NO: 1068025 - DNA, 25 bp, Homo sapien
tagggttctgggcaactctgtggac

SEQ ID NO: 1068026 - DNA, 25 bp, Homo sapien
aatatgttgactggactacataaaa

SEQ ID NO: 1068027 - DNA, 25 bp, Homo sapien
gacgtaaagaagaagaactcaccca

SEQ ID NO: 1068028 - DNA, 25 bp, Homo sapien
atttctttctcggaaactgctctct

SEQ ID NO: 1068029 - DNA, 25 bp, Homo sapien
gggtcataccaataaggtcaatcag

SEQ ID NO: 1068030 - DNA, 25 bp, Homo sapien
ccatccggcccgagattagggagga

SEQ ID NO: 1068031 - DNA, 25 bp, Homo sapien
tagagtgagcgcgtatgcatcaact

SEQ ID NO: 1068032 - DNA, 25 bp, Homo sapien
ccagaggagatagccccagatggac

SEQ ID NO: 1068033 - DNA, 25 bp, Homo sapien
tactgcactactgtccattgtggga

SEQ ID NO: 1068034 - DNA, 25 bp, Homo sapien
gacccagccagctgctaagctctgc

SEQ ID NO: 1068035 - DNA, 25 bp, Homo sapien
aaacctgtctggtgggcccccagat

SEQ ID NO: 1068036 - DNA, 25 bp, Homo sapien
caggaacccctcaacgaagctgtga

SEQ ID NO: 1068037 - DNA, 25 bp, Homo sapien
tgctggtcatttcgccctgacagtc

SEQ ID NO: 1068038 - DNA, 25 bp, Homo sapien
ctcccgagtctgcgggcagctgctg

SEQ ID NO: 1068039 - DNA, 25 bp, Homo sapien
agtctgcgggcagctgctgtcccag

SEQ ID NO: 1068040 - DNA, 25 bp, Homo sapien
ctgcgggcagctgctgtcccagcat

SEQ ID NO: 1068041 - DNA, 25 bp, Homo sapien
tcccgagtctgcgggcagctgctgt

SEQ ID NO: 1068042 - DNA, 25 bp, Homo sapien
tggaataatctagtgtgaacaatga

SEQ ID NO: 1068043 - DNA, 25 bp, Homo sapien
tatgattacacaactgcactctatc

SEQ ID NO: 1068044 - DNA, 25 bp, Homo sapien
cagatttgtaaccatttgccttccc

SEQ ID NO: 1068045 - DNA, 25 bp, Homo sapien
gcagttagcaatagtagaagccact

SEQ ID NO: 1068046 - DNA, 25 bp, Homo sapien
tctctcttaattgtggttacatggg

SEQ ID NO: 1068047 - DNA, 25 bp, Homo sapien
caaaactttgaccttatatacttga

SEQ ID NO: 1068048 - DNA, 25 bp, Homo sapien
ctttgatagcaaacaaatcagtggt

SEQ ID NO: 1068049 - DNA, 25 bp, Homo sapien
caaaaacgtgttgagtgaaagccag

SEQ ID NO: 1068050 - DNA, 25 bp, Homo sapien
ggaggacccctatatggattgtgat

SEQ ID NO: 1068051 - DNA, 25 bp, Homo sapien
tagcatgttccttaccaaggaggac

SEQ ID NO: 1068052 - DNA, 25 bp, Homo sapien
cgttacagactcctactcaaaatgg

SEQ ID NO: 1068053 - DNA, 25 bp, Homo sapien
aacatcctgtgtgtggcgttacaga

SEQ ID NO: 1068054 - DNA, 25 bp, Homo sapien
tgtatatgccaagggagataccacc

SEQ ID NO: 1068055 - DNA, 25 bp, Homo sapien
gctgtatatgccaagggagatacca

SEQ ID NO: 1068056 - DNA, 25 bp, Homo sapien
ctgtatatgccaagggagataccac

SEQ ID NO: 1068057 - DNA, 25 bp, Homo sapien
aagctgtatatgccaagggagatac

SEQ ID NO: 1068058 - DNA, 25 bp, Homo sapien
ctggggctaggttggaactgggcat

SEQ ID NO: 1068059 - DNA, 25 bp, Homo sapien
acatcttctggggctaggttggaac

SEQ ID NO: 1068060 - DNA, 25 bp, Homo sapien
ttctggggctaggttggaactgggc

SEQ ID NO: 1068061 - DNA, 25 bp, Homo sapien
atcttctggggctaggttggaactg

SEQ ID NO: 1068062 - DNA, 25 bp, Homo sapien
tcagtctgtgttgctgccagtttgc

SEQ ID NO: 1068063 - DNA, 25 bp, Homo sapien
gctggggaaactgttcttctggtcc

SEQ ID NO: 1068064 - DNA, 25 bp, Homo sapien
aactgttcttctggtcccacagttc

SEQ ID NO: 1068065 - DNA, 25 bp, Homo sapien
cacattgctacctgttcttctggtc

SEQ ID NO: 1068066 - DNA, 25 bp, Homo sapien
ttctgatgctccaacaaagttgagt

SEQ ID NO: 1068067 - DNA, 25 bp, Homo sapien
tgctccaacaaagttgagttatctc

SEQ ID NO: 1068068 - DNA, 25 bp, Homo sapien
caaagttgagttatctctgaaagct

SEQ ID NO: 1068069 - DNA, 25 bp, Homo sapien
ctgtatttattacaccaatgtactt

SEQ ID NO: 1068070 - DNA, 25 bp, Homo sapien
cctacagtcattgccctgatagggt

SEQ ID NO: 1068071 - DNA, 25 bp, Homo sapien
cattgccctgatagggtttatttcc

SEQ ID NO: 1068072 - DNA, 25 bp, Homo sapien
ggctttcctacagtcattgccctga

SEQ ID NO: 1068073 - DNA, 25 bp, Homo sapien
ccttgatgtccaataagagttgagc

SEQ ID NO: 1068074 - DNA, 25 bp, Homo sapien
ctggtttgagcacatagatcctggt

SEQ ID NO: 1068075 - DNA, 25 bp, Homo sapien
tctggtttgagcacatagatcctgg

SEQ ID NO: 1068076 - DNA, 25 bp, Homo sapien
gaagcgaggtggataacccaggcaa

SEQ ID NO: 1068077 - DNA, 25 bp, Homo sapien
tcattgtcgaagatataagggcccg

SEQ ID NO: 1068078 - DNA, 25 bp, Homo sapien
tctttcaagatgaccgactagaggt

SEQ ID NO: 1068079 - DNA, 25 bp, Homo sapien
cctagccacgagagagtgctttgac

SEQ ID NO: 1068080 - DNA, 25 bp, Homo sapien
aatacctgattgtgtccttcaaagg

SEQ ID NO: 1068081 - DNA, 25 bp, Homo sapien
tcaaacttcgtaatacctgattgtg

SEQ ID NO: 1068082 - DNA, 25 bp, Homo sapien
gctaacccctgcagggtagaactga

SEQ ID NO: 1068083 - DNA, 25 bp, Homo sapien
aaggatttagttacctcctctgcct

SEQ ID NO: 1068084 - DNA, 25 bp, Homo sapien
taaaggccgtatgtgtacgatatgt

SEQ ID NO: 1068085 - DNA, 25 bp, Homo sapien
gtatgtgtacgatatgtttccaggg

SEQ ID NO: 1068086 - DNA, 25 bp, Homo sapien
ggtggagagtaaaggccgtatgtgt

SEQ ID NO: 1068087 - DNA, 25 bp, Homo sapien
gcagcatggctgcctctgtcagtgg

SEQ ID NO: 1068088 - DNA, 25 bp, Homo sapien
tttttaggtggcattatatctctgc

SEQ ID NO: 1068089 - DNA, 25 bp, Homo sapien
tattttgaatatgcattggtcttaa

SEQ ID NO: 1068090 - DNA, 25 bp, Homo sapien
taggtggcattatatctctgctctt

SEQ ID NO: 1068091 - DNA, 25 bp, Homo sapien
gaatatgcattggtcttaatcttca

SEQ ID NO: 1068092 - DNA, 25 bp, Homo sapien
ccatctgggataactaatcagcctt

SEQ ID NO: 1068093 - DNA, 25 bp, Homo sapien
tgatttagcaccatcagaataggga

SEQ ID NO: 1068094 - DNA, 25 bp, Homo sapien
tctggccagtgaccaaaaaccttct

SEQ ID NO: 1068095 - DNA, 25 bp, Homo sapien
gacagaaagctgatctacatggttt

SEQ ID NO: 1068096 - DNA, 25 bp, Homo sapien
gcggaggccgccgagagccggggcc

SEQ ID NO: 1068097 - DNA, 25 bp, Homo sapien
ggccccgctatgtggccctgagccc

SEQ ID NO: 1068098 - DNA, 25 bp, Homo sapien
ctcctccgggtgaggggagcgaagg

SEQ ID NO: 1068099 - DNA, 25 bp, Homo sapien
gagagccggggccccgctatgtggc

SEQ ID NO: 1068100 - DNA, 25 bp, Homo sapien
ggcgagaggtagctgtccgggtggg

SEQ ID NO: 1068101 - DNA, 25 bp, Homo sapien
ctgaggcgagaggtagctgtccggg

SEQ ID NO: 1068102 - DNA, 25 bp, Homo sapien
gaggcgagaggtagctgtccgggtg

SEQ ID NO: 1068103 - DNA, 25 bp, Homo sapien
agaggtagctgtccgggtggggagc

SEQ ID NO: 1068104 - DNA, 25 bp, Homo sapien
gagggcttggttagcatggagagtg

SEQ ID NO: 1068105 - DNA, 25 bp, Homo sapien
ttggttagcatggagagtgtgtttc

SEQ ID NO: 1068106 - DNA, 25 bp, Homo sapien
cggtgtttccggccgccgtcgctgt

SEQ ID NO: 1068107 - DNA, 25 bp, Homo sapien
gggcgggagggcttggttagcatgg

SEQ ID NO: 1068108 - DNA, 25 bp, Homo sapien
tgcttgtgggtattgcccgagtctg

SEQ ID NO: 1068109 - DNA, 25 bp, Homo sapien
gcccagattccttcgcttgtgcgta

SEQ ID NO: 1068110 - DNA, 25 bp, Homo sapien
gctcgagcgaaggaggcaaggtgca

SEQ ID NO: 1068111 - DNA, 25 bp, Homo sapien
caagtcagggtgctaagcagtaggg

SEQ ID NO: 1068112 - DNA, 25 bp, Homo sapien
gaatccgcggctgcttcactccggg

SEQ ID NO: 1068113 - DNA, 25 bp, Homo sapien
accgctcttgacgaatccgcggctg

SEQ ID NO: 1068114 - DNA, 25 bp, Homo sapien
ctcttgacgaatccgcggctgcttc

SEQ ID NO: 1068115 - DNA, 25 bp, Homo sapien
ccccgcaccgctcttgacgaatccg

SEQ ID NO: 1068116 - DNA, 25 bp, Homo sapien
gcgaagtcttctcccagcgcgatgc

SEQ ID NO: 1068117 - DNA, 25 bp, Homo sapien
cggcgaagtcttctcccagcgcgat

SEQ ID NO: 1068118 - DNA, 25 bp, Homo sapien
cgagcggcgaagtcttctcccagcg

SEQ ID NO: 1068119 - DNA, 25 bp, Homo sapien
ttctcccagcgcgatgctccgggag

SEQ ID NO: 1068120 - DNA, 25 bp, Homo sapien
tgggatgcaggggagggcccgaagg

SEQ ID NO: 1068121 - DNA, 25 bp, Homo sapien
ctgggatgcaggggagggcccgaag

SEQ ID NO: 1068122 - DNA, 25 bp, Homo sapien
agggcccgaagggggctgagctcac

SEQ ID NO: 1068123 - DNA, 25 bp, Homo sapien
ggagggcccgaagggggctgagctc

SEQ ID NO: 1068124 - DNA, 25 bp, Homo sapien
gatggtgtcgcgatatggcgcgatg

SEQ ID NO: 1068125 - DNA, 25 bp, Homo sapien
gggtgtgtcggcatcgatcagcgcc

SEQ ID NO: 1068126 - DNA, 25 bp, Homo sapien
atggagtcgcgatagggtccccggg

SEQ ID NO: 1068127 - DNA, 25 bp, Homo sapien
cggcatcgatcagcgccggctcgga

SEQ ID NO: 1068128 - DNA, 25 bp, Homo sapien
gatgtcacggagagatcacgtcaaa

SEQ ID NO: 1068129 - DNA, 25 bp, Homo sapien
gatcacgtcaaaatcacgacatggg

SEQ ID NO: 1068130 - DNA, 25 bp, Homo sapien
ttcacgatggcgcggtgatgtcacg

SEQ ID NO: 1068131 - DNA, 25 bp, Homo sapien
caaaatcacgacatgggagacagcc

SEQ ID NO: 1068132 - DNA, 25 bp, Homo sapien
tgatgaagtcacgacagggcggcga

SEQ ID NO: 1068133 - DNA, 25 bp, Homo sapien
tcacgacagggcggcgatgagatca

SEQ ID NO: 1068134 - DNA, 25 bp, Homo sapien
acgacagggcggcgatgagatcaca

SEQ ID NO: 1068135 - DNA, 25 bp, Homo sapien
gaagtcacgacagggcggcgatgag

SEQ ID NO: 1068136 - DNA, 25 bp, Homo sapien
ccgcagccaggtcacaacacgacat

SEQ ID NO: 1068137 - DNA, 25 bp, Homo sapien
cccgccgcagccaggtcacaacacg

SEQ ID NO: 1068138 - DNA, 25 bp, Homo sapien
cgccgcagccaggtcacaacacgac

SEQ ID NO: 1068139 - DNA, 25 bp, Homo sapien
ctgtcccgccgcagccaggtcacaa

SEQ ID NO: 1068140 - DNA, 25 bp, Homo sapien
agaattaaccccttgcgctccctct

SEQ ID NO: 1068141 - DNA, 25 bp, Homo sapien
tagttcccaggacaacggagaatcc

SEQ ID NO: 1068142 - DNA, 25 bp, Homo sapien
cgtcccgctaccagcctgtggatgc

SEQ ID NO: 1068143 - DNA, 25 bp, Homo sapien
ccggataatcgaagcagggctgctg

SEQ ID NO: 1068144 - DNA, 25 bp, Homo sapien
ttcttcagaggcagagatacgcttc

SEQ ID NO: 1068145 - DNA, 25 bp, Homo sapien
tcagaagtgagaatacaagacgctc

SEQ ID NO: 1068146 - DNA, 25 bp, Homo sapien
atacaagacgctcaacagggaaggc

SEQ ID NO: 1068147 - DNA, 25 bp, Homo sapien
gattatccggactcaggctgacatg

SEQ ID NO: 1068148 - DNA, 25 bp, Homo sapien
gtgaacacaagagggactgagcatc

SEQ ID NO: 1068149 - DNA, 25 bp, Homo sapien
aacacaagagggactgagcatccct

SEQ ID NO: 1068150 - DNA, 25 bp, Homo sapien
gaacacaagagggactgagcatccc

SEQ ID NO: 1068151 - DNA, 25 bp, Homo sapien
ctgtgaacacaagagggactgagca

SEQ ID NO: 1068152 - DNA, 25 bp, Homo sapien
gagctggctcgcaatccgaggccat

SEQ ID NO: 1068153 - DNA, 25 bp, Homo sapien
cagggctgcaaactgctcgctgtca

SEQ ID NO: 1068154 - DNA, 25 bp, Homo sapien
gttcagagctggctcgcaatccgag

SEQ ID NO: 1068155 - DNA, 25 bp, Homo sapien
gctcgctgtcattcttggcctcacg

SEQ ID NO: 1068156 - DNA, 25 bp, Homo sapien
tgaagccgacagcatcgaagatccg

SEQ ID NO: 1068157 - DNA, 25 bp, Homo sapien
tgcagcaggtagtggataacagccc

SEQ ID NO: 1068158 - DNA, 25 bp, Homo sapien
ccaactccatgagggcatagcaggc

SEQ ID NO: 1068159 - DNA, 25 bp, Homo sapien
agcttgcttcccaggatgcgtgcca

SEQ ID NO: 1068160 - DNA, 25 bp, Homo sapien
ccgaggcaaacacaaagggctcctt

SEQ ID NO: 1068161 - DNA, 25 bp, Homo sapien
tacgcaaggatgaggtctcctcggc

SEQ ID NO: 1068162 - DNA, 25 bp, Homo sapien
gctggcacacctccttacgcaagga

SEQ ID NO: 1068163 - DNA, 25 bp, Homo sapien
gggaaaggtcattggcctcctcggc

SEQ ID NO: 1068164 - DNA, 25 bp, Homo sapien
tgatcagccccggtgcggtgaccac

SEQ ID NO: 1068165 - DNA, 25 bp, Homo sapien
ggaaatacttgcacagaagcgaggg

SEQ ID NO: 1068166 - DNA, 25 bp, Homo sapien
catcttcaacggtcaggtggcacca

SEQ ID NO: 1068167 - DNA, 25 bp, Homo sapien
ggccaatctccacgctgtcaggcag

SEQ ID NO: 1068168 - DNA, 25 bp, Homo sapien
tagtacagccaaatcaagcccttgg

SEQ ID NO: 1068169 - DNA, 25 bp, Homo sapien
gcagtagggtgattaactttgggcc

SEQ ID NO: 1068170 - DNA, 25 bp, Homo sapien
gggttccagcatgccgaatccttgt

SEQ ID NO: 1068171 - DNA, 25 bp, Homo sapien
tgagaattgaggcaactgggcagcc

SEQ ID NO: 1068172 - DNA, 25 bp, Homo sapien
gagaggtgctaaggagccgggccat

SEQ ID NO: 1068173 - DNA, 25 bp, Homo sapien
tccctgttgctgcactagtgctggt

SEQ ID NO: 1068174 - DNA, 25 bp, Homo sapien
tcattagagatgtgaagcaggcgtc

SEQ ID NO: 1068175 - DNA, 25 bp, Homo sapien
gtagcgacgtcatgagggtgttcat

SEQ ID NO: 1068176 - DNA, 25 bp, Homo sapien
gattccaggtgcctatgcctgtgcc

SEQ ID NO: 1068177 - DNA, 25 bp, Homo sapien
gcctgtgagcaggtctgtacttaac

SEQ ID NO: 1068178 - DNA, 25 bp, Homo sapien
ccaagtgctgaaggctgtcactgat

SEQ ID NO: 1068179 - DNA, 25 bp, Homo sapien
agaaggtgtgcatagagggacacca

SEQ ID NO: 1068180 - DNA, 25 bp, Homo sapien
gaaggtacgggcatgttacgccctg

SEQ ID NO: 1068181 - DNA, 25 bp, Homo sapien
gaggcagtggaaggtacgggcatgt

SEQ ID NO: 1068182 - DNA, 25 bp, Homo sapien
gagggacccaagcagacacccacag

SEQ ID NO: 1068183 - DNA, 25 bp, Homo sapien
acgggcatgttacgccctgttccca

SEQ ID NO: 1068184 - DNA, 25 bp, Homo sapien
cagacacaggttaagggagttgcac

SEQ ID NO: 1068185 - DNA, 25 bp, Homo sapien
gggtgaccctcacactgcaggtgct

SEQ ID NO: 1068186 - DNA, 25 bp, Homo sapien
ggaacataagcaagtgaccctgctt

SEQ ID NO: 1068187 - DNA, 25 bp, Homo sapien
ccagaactgggaccatgaaattggg

SEQ ID NO: 1068188 - DNA, 25 bp, Homo sapien
acacagccggtgaaggcctgcatgc

SEQ ID NO: 1068189 - DNA, 25 bp, Homo sapien
aggatggcagctgcgaagaaccctc

SEQ ID NO: 1068190 - DNA, 25 bp, Homo sapien
ataggcggccaccatctcgggcttg

SEQ ID NO: 1068191 - DNA, 25 bp, Homo sapien
tccaaggcagccatgcggtagtggc

SEQ ID NO: 1068192 - DNA, 25 bp, Homo sapien
tctgcccgcccctgggtctgtcccc

SEQ ID NO: 1068193 - DNA, 25 bp, Homo sapien
cgttgatttccaagccgatccctgc

SEQ ID NO: 1068194 - DNA, 25 bp, Homo sapien
ccagacatcgggcacaatgacacct

SEQ ID NO: 1068195 - DNA, 25 bp, Homo sapien
gaacgcagttccttacacttgaggg

SEQ ID NO: 1068196 - DNA, 25 bp, Homo sapien
catgcccttgccctcagaaaagcca

SEQ ID NO: 1068197 - DNA, 25 bp, Homo sapien
gaagaactgcgatatcaatggccta

SEQ ID NO: 1068198 - DNA, 25 bp, Homo sapien
taagaaaggtagtccctgctggagc

SEQ ID NO: 1068199 - DNA, 25 bp, Homo sapien
gagttaaagccaggcaccacggtgg

SEQ ID NO: 1068200 - DNA, 25 bp, Homo sapien
tctgctgcaacacgacacaaaggtt

SEQ ID NO: 1068201 - DNA, 25 bp, Homo sapien
tgagtttggcaatctgctgtacaag

SEQ ID NO: 1068202 - DNA, 25 bp, Homo sapien
acttggcagcaacccagtgacatgg

SEQ ID NO: 1068203 - DNA, 25 bp, Homo sapien
gctctggcactgactagcggcaaca

SEQ ID NO: 1068204 - DNA, 25 bp, Homo sapien
gtctcatgatgtgtttagcagggca

SEQ ID NO: 1068205 - DNA, 25 bp, Homo sapien
tgagcacagcacagtaggatctggt

SEQ ID NO: 1068206 - DNA, 25 bp, Homo sapien
ctaaaaaatctgcagtctagccggg

SEQ ID NO: 1068207 - DNA, 25 bp, Homo sapien
cacactgtgtttggacctacataga

SEQ ID NO: 1068208 - DNA, 25 bp, Homo sapien
tacaccatggaatgcgaaactactc

SEQ ID NO: 1068209 - DNA, 25 bp, Homo sapien
gcacaaggagatgccaaggcgccat

SEQ ID NO: 1068210 - DNA, 25 bp, Homo sapien
ctccaggccaggctgagtgtttgca

SEQ ID NO: 1068211 - DNA, 25 bp, Homo sapien
ggctgagtgtttgcagggtggggaa

SEQ ID NO: 1068212 - DNA, 25 bp, Homo sapien
aatctggcacaaggagatgccaagg

SEQ ID NO: 1068213 - DNA, 25 bp, Homo sapien
ccatggaggcaggacggacgggcac

SEQ ID NO: 1068214 - DNA, 25 bp, Homo sapien
gttcccgggcgggtccatggaggca

SEQ ID NO: 1068215 - DNA, 25 bp, Homo sapien
acccagccgggatcctagtgggcgt

SEQ ID NO: 1068216 - DNA, 25 bp, Homo sapien
tgcggtagctgggtgcgacccagcc

SEQ ID NO: 1068217 - DNA, 25 bp, Homo sapien
tgcgggcagaggcgccgggagccgg

SEQ ID NO: 1068218 - DNA, 25 bp, Homo sapien
ggcagaggcgccgggagccggcaca

SEQ ID NO: 1068219 - DNA, 25 bp, Homo sapien
cgggagccggcacagcccgcggagg

SEQ ID NO: 1068220 - DNA, 25 bp, Homo sapien
gccgggagccggcacagcccgcgga

SEQ ID NO: 1068221 - DNA, 25 bp, Homo sapien
ggcggcggagccctagcccgacggc

SEQ ID NO: 1068222 - DNA, 25 bp, Homo sapien
ggggcggtgagtgccgggcgcgagg

SEQ ID NO: 1068223 - DNA, 25 bp, Homo sapien
gcggtgagtgccgggcgcgaggcgt

SEQ ID NO: 1068224 - DNA, 25 bp, Homo sapien
ggcggagccctagcccgacggcgag

SEQ ID NO: 1068225 - DNA, 25 bp, Homo sapien
gtagggcggctggaattcggcggca

SEQ ID NO: 1068226 - DNA, 25 bp, Homo sapien
ggcggcagctgtggcggccggcgtg

SEQ ID NO: 1068227 - DNA, 25 bp, Homo sapien
ccggcgtgtggcagagcgggggcgc

SEQ ID NO: 1068228 - DNA, 25 bp, Homo sapien
gtggctgcgggtagggcggcgggaa

SEQ ID NO: 1068229 - DNA, 25 bp, Homo sapien
ggaggctcctcgtgggcgcgggcgg

SEQ ID NO: 1068230 - DNA, 25 bp, Homo sapien
gccaggccgccatatgggtcccctg

SEQ ID NO: 1068231 - DNA, 25 bp, Homo sapien
catagtcacggcgcgggtcaaggcc

SEQ ID NO: 1068232 - DNA, 25 bp, Homo sapien
gaggctgcggctgcgccaggggcgc

SEQ ID NO: 1068233 - DNA, 25 bp, Homo sapien
gccgccagccccggaaggccgagag

SEQ ID NO: 1068234 - DNA, 25 bp, Homo sapien
ccgccagccccggaaggccgagagg

SEQ ID NO: 1068235 - DNA, 25 bp, Homo sapien
cgccagccccggaaggccgagaggt

SEQ ID NO: 1068236 - DNA, 25 bp, Homo sapien
gccagccccggaaggccgagaggtg

SEQ ID NO: 1068237 - DNA, 25 bp, Homo sapien
tgcaaatagcagagggcagcggtga

SEQ ID NO: 1068238 - DNA, 25 bp, Homo sapien
ggcagcggtgagggcgcataaagcc

SEQ ID NO: 1068239 - DNA, 25 bp, Homo sapien
caaatagcagagggcagcggtgagg

SEQ ID NO: 1068240 - DNA, 25 bp, Homo sapien
ctgcaaatagcagagggcagcggtg

SEQ ID NO: 1068241 - DNA, 25 bp, Homo sapien
cacggactggtctaggaggctcatt

SEQ ID NO: 1068242 - DNA, 25 bp, Homo sapien
ctttcttgatcacggactggtctag

SEQ ID NO: 1068243 - DNA, 25 bp, Homo sapien
aggaggctcattcccggctcgtcca

SEQ ID NO: 1068244 - DNA, 25 bp, Homo sapien
gtctaggaggctcattcccggctcg

SEQ ID NO: 1068245 - DNA, 25 bp, Homo sapien
gccccagccctgctaccaccacttc

SEQ ID NO: 1068246 - DNA, 25 bp, Homo sapien
agctcctggtaactcagccccagct

SEQ ID NO: 1068247 - DNA, 25 bp, Homo sapien
cagccctgctaccaccacttccacc

SEQ ID NO: 1068248 - DNA, 25 bp, Homo sapien
ctcctggtaactcagccccagctcc

SEQ ID NO: 1068249 - DNA, 25 bp, Homo sapien
catgctcatatttctggtggccagg

SEQ ID NO: 1068250 - DNA, 25 bp, Homo sapien
gccacctgggatgttaggactctcg

SEQ ID NO: 1068251 - DNA, 25 bp, Homo sapien
gatttcggcgtacccctaggatcta

SEQ ID NO: 1068252 - DNA, 25 bp, Homo sapien
tcttgagcccaagcatgaataggga

SEQ ID NO: 1068253 - DNA, 25 bp, Homo sapien
cgcagtctccgctcaggtcgccagc

SEQ ID NO: 1068254 - DNA, 25 bp, Homo sapien
ggtcgccagcgctccactcgctcca

SEQ ID NO: 1068255 - DNA, 25 bp, Homo sapien
gctcaggtcgccagcgctccactcg

SEQ ID NO: 1068256 - DNA, 25 bp, Homo sapien
gggcgtccagggcgcagtctccgct

SEQ ID NO: 1068257 - DNA, 25 bp, Homo sapien
cacgctttcccctgggtcacgacct

SEQ ID NO: 1068258 - DNA, 25 bp, Homo sapien
tccggatccaactgtgcccggctcc

SEQ ID NO: 1068259 - DNA, 25 bp, Homo sapien
tgctgcgcgggctgtaacttgacgt

SEQ ID NO: 1068260 - DNA, 25 bp, Homo sapien
tgccctgggtcgaccgcccacgctt

SEQ ID NO: 1068261 - DNA, 25 bp, Homo sapien
aatcccgcagtgaccgcggagggcc

SEQ ID NO: 1068262 - DNA, 25 bp, Homo sapien
ttcctcgtgccgtcggaagggccga

SEQ ID NO: 1068263 - DNA, 25 bp, Homo sapien
gaaggagggcgctaattcactcccc

SEQ ID NO: 1068264 - DNA, 25 bp, Homo sapien
gcggagggccaaggtgaaaactgct

SEQ ID NO: 1068265 - DNA, 25 bp, Homo sapien
cagtaccgcactcggcggaggccga

SEQ ID NO: 1068266 - DNA, 25 bp, Homo sapien
gcggggcaggctccagtaccgcact

SEQ ID NO: 1068267 - DNA, 25 bp, Homo sapien
tttctctgattccagggccctggcg

SEQ ID NO: 1068268 - DNA, 25 bp, Homo sapien
gctccagtaccgcactcggcggagg

SEQ ID NO: 1068269 - DNA, 25 bp, Homo sapien
ggaggcactgtagggatccgacgct

SEQ ID NO: 1068270 - DNA, 25 bp, Homo sapien
ggatccgacgcttcaggtggccaaa

SEQ ID NO: 1068271 - DNA, 25 bp, Homo sapien
ctgtagggatccgacgcttcaggtg

SEQ ID NO: 1068272 - DNA, 25 bp, Homo sapien
gcactgtagggatccgacgcttcag

SEQ ID NO: 1068273 - DNA, 25 bp, Homo sapien
tagggcgactgtttacatcagctcc

SEQ ID NO: 1068274 - DNA, 25 bp, Homo sapien
cctgagattggacagctgagcccgt

SEQ ID NO: 1068275 - DNA, 25 bp, Homo sapien
caaagacagcaaggaatagggcgac

SEQ ID NO: 1068276 - DNA, 25 bp, Homo sapien
tcctgtcctagagatcccctgagat

SEQ ID NO: 1068277 - DNA, 25 bp, Homo sapien
ttttctcagagcttcttcccttgaa

SEQ ID NO: 1068278 - DNA, 25 bp, Homo sapien
gaaaatggcaagagggatggaatcc

SEQ ID NO: 1068279 - DNA, 25 bp, Homo sapien
ttcccttgaaaatggcaagagggat

SEQ ID NO: 1068280 - DNA, 25 bp, Homo sapien
ttctcagagcttcttcccttgaaaa

SEQ ID NO: 1068281 - DNA, 25 bp, Homo sapien
ttcttggctataagagaaagaaagt

SEQ ID NO: 1068282 - DNA, 25 bp, Homo sapien
cttggctataagagaaagaaagttc

SEQ ID NO: 1068283 - DNA, 25 bp, Homo sapien
gggaagggagaatatcgaagcactt

SEQ ID NO: 1068284 - DNA, 25 bp, Homo sapien
aagggagaatatcgaagcacttgct

SEQ ID NO: 1068285 - DNA, 25 bp, Homo sapien
accaggctgtctttggccaaggaga

SEQ ID NO: 1068286 - DNA, 25 bp, Homo sapien
ttgagctgagcagtgaaagccggcc

SEQ ID NO: 1068287 - DNA, 25 bp, Homo sapien
ccaccgtcaccttgtacttggacgt

SEQ ID NO: 1068288 - DNA, 25 bp, Homo sapien
caccaggatttgtgatgccgcccac

SEQ ID NO: 1068289 - DNA, 25 bp, Homo sapien
gagataacccctatgactgcacaca

SEQ ID NO: 1068290 - DNA, 25 bp, Homo sapien
cacaggatcacaccaagtcagggtc

SEQ ID NO: 1068291 - DNA, 25 bp, Homo sapien
catgtacagacactcagggactcac

SEQ ID NO: 1068292 - DNA, 25 bp, Homo sapien
tatgactagctccagatgcacaggc

SEQ ID NO: 1068293 - DNA, 25 bp, Homo sapien
attggcggccttgcgacggccagct

SEQ ID NO: 1068294 - DNA, 25 bp, Homo sapien
tgagcccaatcttctctaaccgttc

SEQ ID NO: 1068295 - DNA, 25 bp, Homo sapien
cagctggcaggttgagcccaatctt

SEQ ID NO: 1068296 - DNA, 25 bp, Homo sapien
actagcgaagtcagcagcgtcacat

SEQ ID NO: 1068297 - DNA, 25 bp, Homo sapien
ggaggggagctgtcactactgcagg

SEQ ID NO: 1068298 - DNA, 25 bp, Homo sapien
gagctgtcactactgcagggtgtac

SEQ ID NO: 1068299 - DNA, 25 bp, Homo sapien
gggagctgtcactactgcagggtgt

SEQ ID NO: 1068300 - DNA, 25 bp, Homo sapien
gctgtcactactgcagggtgtacct

SEQ ID NO: 1068301 - DNA, 25 bp, Homo sapien
tcagcgtgctgtcggcacaggtact

SEQ ID NO: 1068302 - DNA, 25 bp, Homo sapien
gcagcatgctcttgcggctgtgcag

SEQ ID NO: 1068303 - DNA, 25 bp, Homo sapien
gctgggaactccgtctcacagacgt

SEQ ID NO: 1068304 - DNA, 25 bp, Homo sapien
taaccgaagtctcgggccaggtgca

SEQ ID NO: 1068305 - DNA, 25 bp, Homo sapien
gatggggagtagggctggtggtgtc

SEQ ID NO: 1068306 - DNA, 25 bp, Homo sapien
ctgcgatggggagtagggctggtgg

SEQ ID NO: 1068307 - DNA, 25 bp, Homo sapien
cgatggggagtagggctggtggtgt

SEQ ID NO: 1068308 - DNA, 25 bp, Homo sapien
tgcgatggggagtagggctggtggt

SEQ ID NO: 1068309 - DNA, 25 bp, Homo sapien
aaggagggtcagaggttggaggaca

SEQ ID NO: 1068310 - DNA, 25 bp, Homo sapien
gaaggagggtcagaggttggaggac

SEQ ID NO: 1068311 - DNA, 25 bp, Homo sapien
gagggtcagaggttggaggacaaaa

SEQ ID NO: 1068312 - DNA, 25 bp, Homo sapien
tggtgcgagaaggagggtcagaggt

SEQ ID NO: 1068313 - DNA, 25 bp, Homo sapien
gaagccttggtttcaccatgcccac

SEQ ID NO: 1068314 - DNA, 25 bp, Homo sapien
tgtcaagcagctctgtactccgggc

SEQ ID NO: 1068315 - DNA, 25 bp, Homo sapien
tgcttagaaacatcttgtccagccc

SEQ ID NO: 1068316 - DNA, 25 bp, Homo sapien
tgtccagccccttgagtgactccag

SEQ ID NO: 1068317 - DNA, 25 bp, Homo sapien
taagtccctatttcagggcctggga

SEQ ID NO: 1068318 - DNA, 25 bp, Homo sapien
taaataggacagacagcaacaggac

SEQ ID NO: 1068319 - DNA, 25 bp, Homo sapien
gctttggcctctagaagcacccacg

SEQ ID NO: 1068320 - DNA, 25 bp, Homo sapien
ccaactctgggatctctggatgaat

SEQ ID NO: 1068321 - DNA, 25 bp, Homo sapien
cattaaattgatgtatcatgggcag

SEQ ID NO: 1068322 - DNA, 25 bp, Homo sapien
tcacttaacactatattagagattg

SEQ ID NO: 1068323 - DNA, 25 bp, Homo sapien
catgggcagttaaccagttactcgt

SEQ ID NO: 1068324 - DNA, 25 bp, Homo sapien
gatatgcttattcttgttgacagtt

SEQ ID NO: 1068325 - DNA, 25 bp, Homo sapien
gacctggaccagagggctcaattat

SEQ ID NO: 1068326 - DNA, 25 bp, Homo sapien
taaagggtactgagcgttaatggag

SEQ ID NO: 1068327 - DNA, 25 bp, Homo sapien
ggctcaattatatccatagtcacct

SEQ ID NO: 1068328 - DNA, 25 bp, Homo sapien
gggccgtcagctgctaaagggtact

SEQ ID NO: 1068329 - DNA, 25 bp, Homo sapien
tatatgaaagagctagttggaaagg

SEQ ID NO: 1068330 - DNA, 25 bp, Homo sapien
aaactgagacctggaccagagggct

SEQ ID NO: 1068331 - DNA, 25 bp, Homo sapien
taatattacctcagaaaggatatgg

SEQ ID NO: 1068332 - DNA, 25 bp, Homo sapien
aggtgactatggatataattgagcc

SEQ ID NO: 1068333 - DNA, 25 bp, Homo sapien
taattgagccctctggtccaggtct

SEQ ID NO: 1068334 - DNA, 25 bp, Homo sapien
aaaggatatggagggaagatgatct

SEQ ID NO: 1068335 - DNA, 25 bp, Homo sapien
agtaccctttagcagctgacggccc

SEQ ID NO: 1068336 - DNA, 25 bp, Homo sapien
tccattaacgctcagtaccctttag

SEQ ID NO: 1068337 - DNA, 25 bp, Homo sapien
tgcataaacctaagtaccatgtact

SEQ ID NO: 1068338 - DNA, 25 bp, Homo sapien
cctgaatgtcaggactaagccttat

SEQ ID NO: 1068339 - DNA, 25 bp, Homo sapien
tgtgcactgactttagaccctaaaa

SEQ ID NO: 1068340 - DNA, 25 bp, Homo sapien
agtgaagtcatacagtacctactgg

SEQ ID NO: 1068341 - DNA, 25 bp, Homo sapien
ctggacttcagaagcattactgaca

SEQ ID NO: 1068342 - DNA, 25 bp, Homo sapien
agcagaatgcttaccatagaagagg

SEQ ID NO: 1068343 - DNA, 25 bp, Homo sapien
tgtcagtaatgcttctgaagtccag

SEQ ID NO: 1068344 - DNA, 25 bp, Homo sapien
tttagggtctaaagtcagtgcacag

SEQ ID NO: 1068345 - DNA, 25 bp, Homo sapien
ccagtaggtactgtatgacttcact

SEQ ID NO: 1068346 - DNA, 25 bp, Homo sapien
tacatggtacttaggtttatgcagg

SEQ ID NO: 1068347 - DNA, 25 bp, Homo sapien
taaggcttagtcctgacattcagga

SEQ ID NO: 1068348 - DNA, 25 bp, Homo sapien
gatctattcacatagtttgggcagt

SEQ ID NO: 1068349 - DNA, 25 bp, Homo sapien
ggccctttgaataactattggatgg

SEQ ID NO: 1068350 - DNA, 25 bp, Homo sapien
tggcattgcttggccctttgaataa

SEQ ID NO: 1068351 - DNA, 25 bp, Homo sapien
gcttggccctttgaataactattgg

SEQ ID NO: 1068352 - DNA, 25 bp, Homo sapien
tgaataactattggatggctctggg

SEQ ID NO: 1068353 - DNA, 25 bp, Homo sapien
catggaccacttcagttctactggg

SEQ ID NO: 1068354 - DNA, 25 bp, Homo sapien
gcagccctgatgcttgcgttttaga

SEQ ID NO: 1068355 - DNA, 25 bp, Homo sapien
catttgtctgaaagccgctgggata

SEQ ID NO: 1068356 - DNA, 25 bp, Homo sapien
tcctgtgaggcctacaagtgttgtg

SEQ ID NO: 1068357 - DNA, 25 bp, Homo sapien
cctctgggcaaatggttgaaacaat

SEQ ID NO: 1068358 - DNA, 25 bp, Homo sapien
gcaaataacagttgtttgccagtga

SEQ ID NO: 1068359 - DNA, 25 bp, Homo sapien
atggcaaataacagttgtttgccag

SEQ ID NO: 1068360 - DNA, 25 bp, Homo sapien
cctgcctctgggcaaatggttgaaa

SEQ ID NO: 1068361 - DNA, 25 bp, Homo sapien
tagaccaagccatctttgtcactgt

SEQ ID NO: 1068362 - DNA, 25 bp, Homo sapien
gtgccttctgcatgtagaccaagcc

SEQ ID NO: 1068363 - DNA, 25 bp, Homo sapien
ctcatcagagtcgagccctaggcca

SEQ ID NO: 1068364 - DNA, 25 bp, Homo sapien
gattatatctgccattagtgttggt

SEQ ID NO: 1068365 - DNA, 25 bp, Homo sapien
tactcaggatgctgtgtcaagcccc

SEQ ID NO: 1068366 - DNA, 25 bp, Homo sapien
gccttctcatcattccctgagggtg

SEQ ID NO: 1068367 - DNA, 25 bp, Homo sapien
atactcaggatgctgtgtcaagccc

SEQ ID NO: 1068368 - DNA, 25 bp, Homo sapien
tctcatcattccctgagggtgtcat

SEQ ID NO: 1068369 - DNA, 25 bp, Homo sapien
gatgcagctaaagtggctctgagca

SEQ ID NO: 1068370 - DNA, 25 bp, Homo sapien
tctggagactccaggtagtagggat

SEQ ID NO: 1068371 - DNA, 25 bp, Homo sapien
tttggaggaggtctggagactccag

SEQ ID NO: 1068372 - DNA, 25 bp, Homo sapien
tggctctgagcacccgttagctgtg

SEQ ID NO: 1068373 - DNA, 25 bp, Homo sapien
catggacttgttggtgcagccagtg

SEQ ID NO: 1068374 - DNA, 25 bp, Homo sapien
cagtggcatggacttgttggtgcag

SEQ ID NO: 1068375 - DNA, 25 bp, Homo sapien
tggcatggacttgttggtgcagcca

SEQ ID NO: 1068376 - DNA, 25 bp, Homo sapien
tgcagccagtgccatgggctccact

SEQ ID NO: 1068377 - DNA, 25 bp, Homo sapien
tcactttcaaggctctctaaagatg

SEQ ID NO: 1068378 - DNA, 25 bp, Homo sapien
gctgtttccaaccaaatcggcctca

SEQ ID NO: 1068379 - DNA, 25 bp, Homo sapien
aaccaaatcggcctcactttcaagg

SEQ ID NO: 1068380 - DNA, 25 bp, Homo sapien
ggcctcactttcaaggctctctaaa

SEQ ID NO: 1068381 - DNA, 25 bp, Homo sapien
tacaagccatcgtaagctagaccta

SEQ ID NO: 1068382 - DNA, 25 bp, Homo sapien
cactcctctgtgtttgagatcctca

SEQ ID NO: 1068383 - DNA, 25 bp, Homo sapien
gggtgtctgaccatgcccgtcatca

SEQ ID NO: 1068384 - DNA, 25 bp, Homo sapien
gatcctcagacagcgtatggtggtg

SEQ ID NO: 1068385 - DNA, 25 bp, Homo sapien
ttttaagatggaagagacagcacca

SEQ ID NO: 1068386 - DNA, 25 bp, Homo sapien
tgaagggaaggatctagtagagacc

SEQ ID NO: 1068387 - DNA, 25 bp, Homo sapien
ttgacctgtgggattcaagcgatcc

SEQ ID NO: 1068388 - DNA, 25 bp, Homo sapien
caggatgtagagcatcagtgagcaa

SEQ ID NO: 1068389 - DNA, 25 bp, Homo sapien
tacctgctgacatggtttgcactgc

SEQ ID NO: 1068390 - DNA, 25 bp, Homo sapien
ttacctgctgacatggtttgcactg

SEQ ID NO: 1068391 - DNA, 25 bp, Homo sapien
agatctcctccgagcaaaccagctg

SEQ ID NO: 1068392 - DNA, 25 bp, Homo sapien
tgctattttaattaacggagatctc

SEQ ID NO: 1068393 - DNA, 25 bp, Homo sapien
tccccatccacggaagtaggaggac

SEQ ID NO: 1068394 - DNA, 25 bp, Homo sapien
tcctccccatccacggaagtaggag

SEQ ID NO: 1068395 - DNA, 25 bp, Homo sapien
cccatccacggaagtaggaggacag

SEQ ID NO: 1068396 - DNA, 25 bp, Homo sapien
tcgttcctccccatccacggaagta

SEQ ID NO: 1068397 - DNA, 25 bp, Homo sapien
cctcggcccagatttcctcaccctt

SEQ ID NO: 1068398 - DNA, 25 bp, Homo sapien
cggcccagatttcctcacccttggc

SEQ ID NO: 1068399 - DNA, 25 bp, Homo sapien
tgctgcctgacttgtacccactcca

SEQ ID NO: 1068400 - DNA, 25 bp, Homo sapien
gctgcctgacttgtacccactccat

SEQ ID NO: 1068401 - DNA, 25 bp, Homo sapien
gtgaggcaggaacggttaggatcac

SEQ ID NO: 1068402 - DNA, 25 bp, Homo sapien
aggcaggaacggttaggatcaccat

SEQ ID NO: 1068403 - DNA, 25 bp, Homo sapien
gaggcaggaacggttaggatcacca

SEQ ID NO: 1068404 - DNA, 25 bp, Homo sapien
ccagtgaggcaggaacggttaggat

SEQ ID NO: 1068405 - DNA, 25 bp, Homo sapien
gccttaggtacaatcactgtgttga

SEQ ID NO: 1068406 - DNA, 25 bp, Homo sapien
ggtacaatcactgtgttgatctcca

SEQ ID NO: 1068407 - DNA, 25 bp, Homo sapien
tgatgctcccactccccgcatgcct

SEQ ID NO: 1068408 - DNA, 25 bp, Homo sapien
tccccgcatgccttaggtacaatca

SEQ ID NO: 1068409 - DNA, 25 bp, Homo sapien
acgttggaagccgagctcgtcttct

SEQ ID NO: 1068410 - DNA, 25 bp, Homo sapien
tcaggcttcccacgttggaagccga

SEQ ID NO: 1068411 - DNA, 25 bp, Homo sapien
gaagccgagctcgtcttctccgcag

SEQ ID NO: 1068412 - DNA, 25 bp, Homo sapien
ttcccacgttggaagccgagctcgt

SEQ ID NO: 1068413 - DNA, 25 bp, Homo sapien
cctccgtctccagcaggggctttgc

SEQ ID NO: 1068414 - DNA, 25 bp, Homo sapien
agcaggggctttgccttccgcccca

SEQ ID NO: 1068415 - DNA, 25 bp, Homo sapien
cactctcggggctccccaacctccg

SEQ ID NO: 1068416 - DNA, 25 bp, Homo sapien
ctccagcaggggctttgccttccgc

SEQ ID NO: 1068417 - DNA, 25 bp, Homo sapien
tcgtccccgaaaggcgcagacaaag

SEQ ID NO: 1068418 - DNA, 25 bp, Homo sapien
ggcctcctcgccgtgaatgaaaggg

SEQ ID NO: 1068419 - DNA, 25 bp, Homo sapien
ttagatgtcgctgccgggagagggc

SEQ ID NO: 1068420 - DNA, 25 bp, Homo sapien
gctgtgggatgggagccgtccgagg

SEQ ID NO: 1068421 - DNA, 25 bp, Homo sapien
tgggatctgagccagacctcaaatc

SEQ ID NO: 1068422 - DNA, 25 bp, Homo sapien
caggagttaaaggatgcaggtggtg

SEQ ID NO: 1068423 - DNA, 25 bp, Homo sapien
ggagatgcatgtagcatctggaatc

SEQ ID NO: 1068424 - DNA, 25 bp, Homo sapien
caaatccacactggtatacgtgctc

SEQ ID NO: 1068425 - DNA, 25 bp, Homo sapien
cactgcatggcccttcaaacaggga

SEQ ID NO: 1068426 - DNA, 25 bp, Homo sapien
caagatgttccaaggccgatgagga

SEQ ID NO: 1068427 - DNA, 25 bp, Homo sapien
caagagaatgcaagatcctggtggg

SEQ ID NO: 1068428 - DNA, 25 bp, Homo sapien
ggattggcaggctccgcgagttaca

SEQ ID NO: 1068429 - DNA, 25 bp, Homo sapien
actgcaggagagcttcgacaccatc

SEQ ID NO: 1068430 - DNA, 25 bp, Homo sapien
tatttgcaggcatgtgtgaggcgca

SEQ ID NO: 1068431 - DNA, 25 bp, Homo sapien
tccacaagtgtgcaagggtatatgt

SEQ ID NO: 1068432 - DNA, 25 bp, Homo sapien
caaccggaaggagcttattcgctgt

SEQ ID NO: 1068433 - DNA, 25 bp, Homo sapien
gcccacgtgggaccggtcgctccgc

SEQ ID NO: 1068434 - DNA, 25 bp, Homo sapien
tgggaccggtcgctccgccctgctg

SEQ ID NO: 1068435 - DNA, 25 bp, Homo sapien
cgtgggaccggtcgctccgccctgc

SEQ ID NO: 1068436 - DNA, 25 bp, Homo sapien
cacgtgggaccggtcgctccgccct

SEQ ID NO: 1068437 - DNA, 25 bp, Homo sapien
ccgctgtccatcattgggtcttgat

SEQ ID NO: 1068438 - DNA, 25 bp, Homo sapien
ccctgttcaggctgatactggccat

SEQ ID NO: 1068439 - DNA, 25 bp, Homo sapien
tcattgggtcttgatggcatggcct

SEQ ID NO: 1068440 - DNA, 25 bp, Homo sapien
tggccttttgcaaagccctgttcag

SEQ ID NO: 1068441 - DNA, 25 bp, Homo sapien
ttctgggaattggagccagatggat

SEQ ID NO: 1068442 - DNA, 25 bp, Homo sapien
agattcttctgggaattggagccag

SEQ ID NO: 1068443 - DNA, 25 bp, Homo sapien
gattcttctgggaattggagccaga

SEQ ID NO: 1068444 - DNA, 25 bp, Homo sapien
tcttctgggaattggagccagatgg

SEQ ID NO: 1068445 - DNA, 25 bp, Homo sapien
taccaagtggtttgggttcagctca

SEQ ID NO: 1068446 - DNA, 25 bp, Homo sapien
ccttgaagggaagatttgctgtcca

SEQ ID NO: 1068447 - DNA, 25 bp, Homo sapien
gaaaccctctgggtctaaactgaga

SEQ ID NO: 1068448 - DNA, 25 bp, Homo sapien
tcagtgcctgtctaaccttgaggag

SEQ ID NO: 1068449 - DNA, 25 bp, Homo sapien
taatgactcctttacacccatgaga

SEQ ID NO: 1068450 - DNA, 25 bp, Homo sapien
gagatacgtaccatgatgaccaggg

SEQ ID NO: 1068451 - DNA, 25 bp, Homo sapien
ccagggctcggtgaaagaaagattt

SEQ ID NO: 1068452 - DNA, 25 bp, Homo sapien
gaggacctaggaaccaacagatggg

SEQ ID NO: 1068453 - DNA, 25 bp, Homo sapien
tgaagaggacgtaattgatgaagta

SEQ ID NO: 1068454 - DNA, 25 bp, Homo sapien
gaagtgatgtgggaagcgaagatga

SEQ ID NO: 1068455 - DNA, 25 bp, Homo sapien
gaatatgaagaggacgtaattgatg

SEQ ID NO: 1068456 - DNA, 25 bp, Homo sapien
tgggaagcgaagatgagtatgatgg

SEQ ID NO: 1068457 - DNA, 25 bp, Homo sapien
gagactttcggcttgtttcaaatga

SEQ ID NO: 1068458 - DNA, 25 bp, Homo sapien
gactctggtaatgatctggcactgg

SEQ ID NO: 1068459 - DNA, 25 bp, Homo sapien
gagctccatgtattgctgccctcaa

SEQ ID NO: 1068460 - DNA, 25 bp, Homo sapien
tgtaggatgaacacagtgactctgg

SEQ ID NO: 1068461 - DNA, 25 bp, Homo sapien
ctgtctcagtctgtgcttggtttga

SEQ ID NO: 1068462 - DNA, 25 bp, Homo sapien
gcccagcaacttgagttattattta

SEQ ID NO: 1068463 - DNA, 25 bp, Homo sapien
caatggctgagctatacagcctgtc

SEQ ID NO: 1068464 - DNA, 25 bp, Homo sapien
ccatgcccagcaacttgagttatta

SEQ ID NO: 1068465 - DNA, 25 bp, Homo sapien
gaggctttgcagagcagtatctctg

SEQ ID NO: 1068466 - DNA, 25 bp, Homo sapien
tatctctggcatgattcacgtgtag

SEQ ID NO: 1068467 - DNA, 25 bp, Homo sapien
tcacgtgtagcacacctagaggtgt

SEQ ID NO: 1068468 - DNA, 25 bp, Homo sapien
gacaggttctataaccatatcgtgt

SEQ ID NO: 1068469 - DNA, 25 bp, Homo sapien
tggcgccatctcacgatctcagctc

SEQ ID NO: 1068470 - DNA, 25 bp, Homo sapien
gtggcgccatctcacgatctcagct

SEQ ID NO: 1068471 - DNA, 25 bp, Homo sapien
gtatagccggaaggcaccacgggaa

SEQ ID NO: 1068472 - DNA, 25 bp, Homo sapien
cacgggaatggaccctgatgaatga

SEQ ID NO: 1068473 - DNA, 25 bp, Homo sapien
ggcaccacgggaatggaccctgatg

SEQ ID NO: 1068474 - DNA, 25 bp, Homo sapien
gcgtccctctccgtatagccggaag

SEQ ID NO: 1068475 - DNA, 25 bp, Homo sapien
ccgccgccaacgggagcgggagcgg

SEQ ID NO: 1068476 - DNA, 25 bp, Homo sapien
ccgccgccgccaacgggagcgggag

SEQ ID NO: 1068477 - DNA, 25 bp, Homo sapien
cctcagcgacaacaaaaacaatccc

SEQ ID NO: 1068478 - DNA, 25 bp, Homo sapien
tcagcgacaacaaaaacaatccccg

SEQ ID NO: 1068479 - DNA, 25 bp, Homo sapien
ggtggcgccgcggagacgcgggcgc

SEQ ID NO: 1068480 - DNA, 25 bp, Homo sapien
tggcgccgcggagacgcgggcgctg

SEQ ID NO: 1068481 - DNA, 25 bp, Homo sapien
gcgccgcggagacgcgggcgctggg

SEQ ID NO: 1068482 - DNA, 25 bp, Homo sapien
cagggacccggctccggctcttccg

SEQ ID NO: 1068483 - DNA, 25 bp, Homo sapien
gtaacgcttgatctccggaatattg

SEQ ID NO: 1068484 - DNA, 25 bp, Homo sapien
acgcttgatctccggaatattggcg

SEQ ID NO: 1068485 - DNA, 25 bp, Homo sapien
gccgccgccgcgtaacgcttgatct

SEQ ID NO: 1068486 - DNA, 25 bp, Homo sapien
cgccgccgccgcgtaacgcttgatc

SEQ ID NO: 1068487 - DNA, 25 bp, Homo sapien
gcagtgcctaatatcaccaggttga

SEQ ID NO: 1068488 - DNA, 25 bp, Homo sapien
tccaggtgtgctctgccaaagaagc

SEQ ID NO: 1068489 - DNA, 25 bp, Homo sapien
ttcaagtgaggagggcacaaagcac

SEQ ID NO: 1068490 - DNA, 25 bp, Homo sapien
tctgaacaatcctgagtgaaccact

SEQ ID NO: 1068491 - DNA, 25 bp, Homo sapien
gtcagccttaatgaagaggagatga

SEQ ID NO: 1068492 - DNA, 25 bp, Homo sapien
aagggcaactgatatgacaacatag

SEQ ID NO: 1068493 - DNA, 25 bp, Homo sapien
gattagattagaagtcaaatgaccc

SEQ ID NO: 1068494 - DNA, 25 bp, Homo sapien
gagctaatagtcataaaagcacttt

SEQ ID NO: 1068495 - DNA, 25 bp, Homo sapien
cagcagcctcagactacaggagcac

SEQ ID NO: 1068496 - DNA, 25 bp, Homo sapien
aagctctggaaccaaattacctagg

SEQ ID NO: 1068497 - DNA, 25 bp, Homo sapien
cctaattgcatgacgttgggccagt

SEQ ID NO: 1068498 - DNA, 25 bp, Homo sapien
tagccagctatctacttaatgaagc

SEQ ID NO: 1068499 - DNA, 25 bp, Homo sapien
ggcatctatcccatgagatgatgta

SEQ ID NO: 1068500 - DNA, 25 bp, Homo sapien
cagggtttcaccacattggccaggc

SEQ ID NO: 1068501 - DNA, 25 bp, Homo sapien
agggtttcaccacattggccaggct

SEQ ID NO: 1068502 - DNA, 25 bp, Homo sapien
ctgccttccagttccaagcgattct

SEQ ID NO: 1068503 - DNA, 25 bp, Homo sapien
aacctctgccttccagttccaagcg

SEQ ID NO: 1068504 - DNA, 25 bp, Homo sapien
tgttgactctacgaggccgtttttc

SEQ ID NO: 1068505 - DNA, 25 bp, Homo sapien
ccgtttttcaggcttaatatccaca

SEQ ID NO: 1068506 - DNA, 25 bp, Homo sapien
gctaacagtcgaattggttttccaa

SEQ ID NO: 1068507 - DNA, 25 bp, Homo sapien
acgacgaggtggctgaaacaggcta

SEQ ID NO: 1068508 - DNA, 25 bp, Homo sapien
tcactctgtcgaataggctgacgtg

SEQ ID NO: 1068509 - DNA, 25 bp, Homo sapien
tacaagttctgcatgatagaggcct

SEQ ID NO: 1068510 - DNA, 25 bp, Homo sapien
tgtccaaaacgcacaggtctcctga

SEQ ID NO: 1068511 - DNA, 25 bp, Homo sapien
tcatggtgaattcccagagcacagg

SEQ ID NO: 1068512 - DNA, 25 bp, Homo sapien
cagatcacactgtatgcaggccgtg

SEQ ID NO: 1068513 - DNA, 25 bp, Homo sapien
gtttaagatatggacagaccagggt

SEQ ID NO: 1068514 - DNA, 25 bp, Homo sapien
caacccctttgcctaatgccagtga

SEQ ID NO: 1068515 - DNA, 25 bp, Homo sapien
tgatacacaaataagtcaacccctt

SEQ ID NO: 1068516 - DNA, 25 bp, Homo sapien
cctatcttggatatctaagtttgac

SEQ ID NO: 1068517 - DNA, 25 bp, Homo sapien
catcactgaacgatgataagtttgt

SEQ ID NO: 1068518 - DNA, 25 bp, Homo sapien
gaggtacatcactgaacgatgataa

SEQ ID NO: 1068519 - DNA, 25 bp, Homo sapien
tctaagtttgacacggaggtacatc

SEQ ID NO: 1068520 - DNA, 25 bp, Homo sapien
tacccaggctgccgatcaccaaata

SEQ ID NO: 1068521 - DNA, 25 bp, Homo sapien
cctatcccgtccaattggtagtgga

SEQ ID NO: 1068522 - DNA, 25 bp, Homo sapien
cccgtccaattggtagtggatgtgc

SEQ ID NO: 1068523 - DNA, 25 bp, Homo sapien
caaatatttgcatcttgaagtgccg

SEQ ID NO: 1068524 - DNA, 25 bp, Homo sapien
catcaagtgcttgtactgagtcatc

SEQ ID NO: 1068525 - DNA, 25 bp, Homo sapien
tttaccctcgcctggaagagtcacc

SEQ ID NO: 1068526 - DNA, 25 bp, Homo sapien
taaaagcaactgaaggctcacaact

SEQ ID NO: 1068527 - DNA, 25 bp, Homo sapien
tgggacttcattcaagtgcccagcc

SEQ ID NO: 1068528 - DNA, 25 bp, Homo sapien
tgaaaggtccttcatttcactctca

SEQ ID NO: 1068529 - DNA, 25 bp, Homo sapien
aacatgtgaaaggtccttcatttca

SEQ ID NO: 1068530 - DNA, 25 bp, Homo sapien
tcacattaaacatgtgaaaggtcct

SEQ ID NO: 1068531 - DNA, 25 bp, Homo sapien
cattaaacatgtgaaaggtccttca

SEQ ID NO: 1068532 - DNA, 25 bp, Homo sapien
atcaatgttgagcatcatattccac

SEQ ID NO: 1068533 - DNA, 25 bp, Homo sapien
tcaatgttgagcatcatattccaca

SEQ ID NO: 1068534 - DNA, 25 bp, Homo sapien
gcatcatattccacatggcaggtct

SEQ ID NO: 1068535 - DNA, 25 bp, Homo sapien
catcaatgttgagcatcatattcca

SEQ ID NO: 1068536 - DNA, 25 bp, Homo sapien
gaaggatacttcacttcagggaaaa

SEQ ID NO: 1068537 - DNA, 25 bp, Homo sapien
aaaccagcccaaagagttattggat

SEQ ID NO: 1068538 - DNA, 25 bp, Homo sapien
cccaaagagttattggataaagaga

SEQ ID NO: 1068539 - DNA, 25 bp, Homo sapien
caaacagagaaggatacttcacttc

SEQ ID NO: 1068540 - DNA, 25 bp, Homo sapien
gtctgttagaggtttggtctgttca

SEQ ID NO: 1068541 - DNA, 25 bp, Homo sapien
aactcaatgataggctgagcccggt

SEQ ID NO: 1068542 - DNA, 25 bp, Homo sapien
tgagcccggtagaaagcagttgcag

SEQ ID NO: 1068543 - DNA, 25 bp, Homo sapien
tctttggtaaatttgacacgctggg

SEQ ID NO: 1068544 - DNA, 25 bp, Homo sapien
gtctagtcacattacaaactcggta

SEQ ID NO: 1068545 - DNA, 25 bp, Homo sapien
ttgatgactggctggccgtctagtc

SEQ ID NO: 1068546 - DNA, 25 bp, Homo sapien
cagtgggtcacctcaactttgagac

SEQ ID NO: 1068547 - DNA, 25 bp, Homo sapien
aaactcggtattttcgtttcatctg

SEQ ID NO: 1068548 - DNA, 25 bp, Homo sapien
ctggagtacaaggtgtgatcttggc

SEQ ID NO: 1068549 - DNA, 25 bp, Homo sapien
tcactgcaaactctgcctcctgggt

SEQ ID NO: 1068550 - DNA, 25 bp, Homo sapien
attacaagcgcctgccactaagcct

SEQ ID NO: 1068551 - DNA, 25 bp, Homo sapien
actctgcctcctgggttcaagcgat

SEQ ID NO: 1068552 - DNA, 25 bp, Homo sapien
cagtgggccatgacggtgccaagca

SEQ ID NO: 1068553 - DNA, 25 bp, Homo sapien
agaagtgttgggtgattaggaaaat

SEQ ID NO: 1068554 - DNA, 25 bp, Homo sapien
tgccaagcactatatatatacgtgt

SEQ ID NO: 1068555 - DNA, 25 bp, Homo sapien
aaatggaaaggagtatgctgctgga

SEQ ID NO: 1068556 - DNA, 25 bp, Homo sapien
tgtagtgtgtacatgaggtcatact

SEQ ID NO: 1068557 - DNA, 25 bp, Homo sapien
tcaactatctagacaaagccctctg

SEQ ID NO: 1068558 - DNA, 25 bp, Homo sapien
taccactcttaagaaattcatgtag

SEQ ID NO: 1068559 - DNA, 25 bp, Homo sapien
gaagaatttattccaatcagactga

SEQ ID NO: 1068560 - DNA, 25 bp, Homo sapien
caaatacatgtggatctggagacaa

SEQ ID NO: 1068561 - DNA, 25 bp, Homo sapien
tgaggtcaggtaacacctacaggta

SEQ ID NO: 1068562 - DNA, 25 bp, Homo sapien
ggtacaaatacaacctcttgctggc

SEQ ID NO: 1068563 - DNA, 25 bp, Homo sapien
gatactgcagaaccagaacatacat

SEQ ID NO: 1068564 - DNA, 25 bp, Homo sapien
caataaacaaacaaagcccactaat

SEQ ID NO: 1068565 - DNA, 25 bp, Homo sapien
gcccactaataattcctaccttcat

SEQ ID NO: 1068566 - DNA, 25 bp, Homo sapien
actgtgactggccaaattctttctt

SEQ ID NO: 1068567 - DNA, 25 bp, Homo sapien
tcctaccttcatcagtcacttaaaa

SEQ ID NO: 1068568 - DNA, 25 bp, Homo sapien
cagttgcagactatacttttgctta

SEQ ID NO: 1068569 - DNA, 25 bp, Homo sapien
gcttgaccgttttctagctgcaaag

SEQ ID NO: 1068570 - DNA, 25 bp, Homo sapien
cattccatagcttgaccgttttcta

SEQ ID NO: 1068571 - DNA, 25 bp, Homo sapien
agatgggggtatttcagttgcagac

SEQ ID NO: 1068572 - DNA, 25 bp, Homo sapien
agtggcaagtatgtatgcttttgtt

SEQ ID NO: 1068573 - DNA, 25 bp, Homo sapien
ctcgagtggcaagtatgtatgcttt

SEQ ID NO: 1068574 - DNA, 25 bp, Homo sapien
cgagtggcaagtatgtatgcttttg

SEQ ID NO: 1068575 - DNA, 25 bp, Homo sapien
tcgagtggcaagtatgtatgctttt

SEQ ID NO: 1068576 - DNA, 25 bp, Homo sapien
taaacctttgccaaaccatatctta

SEQ ID NO: 1068577 - DNA, 25 bp, Homo sapien
caccactagtttagaactctactta

SEQ ID NO: 1068578 - DNA, 25 bp, Homo sapien
tggttatatagtgaaatcatctgcc

SEQ ID NO: 1068579 - DNA, 25 bp, Homo sapien
tttgtgtaaagggttccacatctta

SEQ ID NO: 1068580 - DNA, 25 bp, Homo sapien
tgagcttcttgatacatcgctgtcc

SEQ ID NO: 1068581 - DNA, 25 bp, Homo sapien
agcagatcttgctgtagctttgatc

SEQ ID NO: 1068582 - DNA, 25 bp, Homo sapien
gtggaagtctgattgtctgtgagct

SEQ ID NO: 1068583 - DNA, 25 bp, Homo sapien
gctgtcctgccactatattacagac

SEQ ID NO: 1068584 - DNA, 25 bp, Homo sapien
caggaaagcctgcatatataaaaac

SEQ ID NO: 1068585 - DNA, 25 bp, Homo sapien
ccaggaggagttttctattcttttg

SEQ ID NO: 1068586 - DNA, 25 bp, Homo sapien
caaagctagctcatcttgaagacca

SEQ ID NO: 1068587 - DNA, 25 bp, Homo sapien
cagagagtaactgtgtcccaggagg

SEQ ID NO: 1068588 - DNA, 25 bp, Homo sapien
ccaaattctttaaggtatggatcag

SEQ ID NO: 1068589 - DNA, 25 bp, Homo sapien
ccggcctccatattgcagcattggt

SEQ ID NO: 1068590 - DNA, 25 bp, Homo sapien
taaggtatggatcaggtccacccac

SEQ ID NO: 1068591 - DNA, 25 bp, Homo sapien
cattgtggacaacaataccaaattc

SEQ ID NO: 1068592 - DNA, 25 bp, Homo sapien
aactatgggtaaattcagcagtggc

SEQ ID NO: 1068593 - DNA, 25 bp, Homo sapien
gaaaagacattacaatctaaggcca

SEQ ID NO: 1068594 - DNA, 25 bp, Homo sapien
tctaaggccattttactattgacta

SEQ ID NO: 1068595 - DNA, 25 bp, Homo sapien
cagcagtggcagagtagagaaaccc

SEQ ID NO: 1068596 - DNA, 25 bp, Homo sapien
ccctggttgggtgtggctactgttt

SEQ ID NO: 1068597 - DNA, 25 bp, Homo sapien
aaaactgctttcctcgcatgtccca

SEQ ID NO: 1068598 - DNA, 25 bp, Homo sapien
ggtgcaaaacaagcaactgcccaaa

SEQ ID NO: 1068599 - DNA, 25 bp, Homo sapien
gcatgtcccagacaccctggttggg

SEQ ID NO: 1068600 - DNA, 25 bp, Homo sapien
tctggaagggatattactaagctga

SEQ ID NO: 1068601 - DNA, 25 bp, Homo sapien
gatgcgaacctacttttacccagag

SEQ ID NO: 1068602 - DNA, 25 bp, Homo sapien
ctatgggagtcagggatttagtgcc

SEQ ID NO: 1068603 - DNA, 25 bp, Homo sapien
tagccagatggtgtcactatgggag

SEQ ID NO: 1068604 - DNA, 25 bp, Homo sapien
gataaccactattagctgtaggccc

SEQ ID NO: 1068605 - DNA, 25 bp, Homo sapien
ttgtgcatacttgcagaaacatggc

SEQ ID NO: 1068606 - DNA, 25 bp, Homo sapien
cttagagattttacgcagctggtca

SEQ ID NO: 1068607 - DNA, 25 bp, Homo sapien
acatggctgaccctggatgggcatt

SEQ ID NO: 1068608 - DNA, 25 bp, Homo sapien
cattcagcattaaaagggtccatac

SEQ ID NO: 1068609 - DNA, 25 bp, Homo sapien
tcattcagcattaaaagggtccata

SEQ ID NO: 1068610 - DNA, 25 bp, Homo sapien
actgtgtggccatacctagaagggt

SEQ ID NO: 1068611 - DNA, 25 bp, Homo sapien
cctagaagggtatctccaacacgtt

SEQ ID NO: 1068612 - DNA, 25 bp, Homo sapien
gaggtgaggtcttcactacattttt

SEQ ID NO: 1068613 - DNA, 25 bp, Homo sapien
gccatacctagaagggtatctccaa

SEQ ID NO: 1068614 - DNA, 25 bp, Homo sapien
cattgttaattcctccaagttttgc

SEQ ID NO: 1068615 - DNA, 25 bp, Homo sapien
gcacattgttaattcctccaagttt

SEQ ID NO: 1068616 - DNA, 25 bp, Homo sapien
acaagcacattgttaattcctccaa

SEQ ID NO: 1068617 - DNA, 25 bp, Homo sapien
ttgttaattcctccaagttttgcat

SEQ ID NO: 1068618 - DNA, 25 bp, Homo sapien
taggatttgggactgcgagtgttaa

SEQ ID NO: 1068619 - DNA, 25 bp, Homo sapien
taacagcggacatatataggcaaca

SEQ ID NO: 1068620 - DNA, 25 bp, Homo sapien
gtaaggtcccatgggagaagaggct

SEQ ID NO: 1068621 - DNA, 25 bp, Homo sapien
taagaggcatcccatacttgacaac

SEQ ID NO: 1068622 - DNA, 25 bp, Homo sapien
ctatactacactgtactgtgtcaca

SEQ ID NO: 1068623 - DNA, 25 bp, Homo sapien
gcagtgagttatgtactatactaca

SEQ ID NO: 1068624 - DNA, 25 bp, Homo sapien
gcccagcgtggcagcgcctgcctgt

SEQ ID NO: 1068625 - DNA, 25 bp, Homo sapien
tactacactgtactgtgtcacatca

SEQ ID NO: 1068626 - DNA, 25 bp, Homo sapien
gatacccctccacggtaatagatga

SEQ ID NO: 1068627 - DNA, 25 bp, Homo sapien
gcagctctcgaaccatgttagtcag

SEQ ID NO: 1068628 - DNA, 25 bp, Homo sapien
gtgtgacatccgctcccaggaagat

SEQ ID NO: 1068629 - DNA, 25 bp, Homo sapien
ttgggagatctcctgccgggaagtc

SEQ ID NO: 1068630 - DNA, 25 bp, Homo sapien
gtgatgtcttttttgcaccacaata

SEQ ID NO: 1068631 - DNA, 25 bp, Homo sapien
tataagttattcctggccggtaatc

SEQ ID NO: 1068632 - DNA, 25 bp, Homo sapien
gaattgctattagttctggccaagc

SEQ ID NO: 1068633 - DNA, 25 bp, Homo sapien
tccaagctaatacatgcctttcgaa

SEQ ID NO: 1068634 - DNA, 25 bp, Homo sapien
aatagaaggtttagacatgctttgc

SEQ ID NO: 1068635 - DNA, 25 bp, Homo sapien
ggattatacatccacacccaattat

SEQ ID NO: 1068636 - DNA, 25 bp, Homo sapien
tagattgtattactggtgccaaaca

SEQ ID NO: 1068637 - DNA, 25 bp, Homo sapien
ggtttagacatgctttgcttgaaat

SEQ ID NO: 1068638 - DNA, 25 bp, Homo sapien
gaattattatacagtcagcccttgg

SEQ ID NO: 1068639 - DNA, 25 bp, Homo sapien
taggtgagccatgccttataagtag

SEQ ID NO: 1068640 - DNA, 25 bp, Homo sapien
tcaccagttattgcttgagcaccca

SEQ ID NO: 1068641 - DNA, 25 bp, Homo sapien
tgagcacccatatgactgctaggct

SEQ ID NO: 1068642 - DNA, 25 bp, Homo sapien
caagggaaggaattacatcttgcta

SEQ ID NO: 1068643 - DNA, 25 bp, Homo sapien
gcatacaggcacaaatttgatggga

SEQ ID NO: 1068644 - DNA, 25 bp, Homo sapien
tcagtttcagatctaggcctagcct

SEQ ID NO: 1068645 - DNA, 25 bp, Homo sapien
cactggcaaatggttatcaggaaga

SEQ ID NO: 1068646 - DNA, 25 bp, Homo sapien
aaagtcaaactcagatggatgtgtg

SEQ ID NO: 1068647 - DNA, 25 bp, Homo sapien
ggatgtgtgatggtactatccactg

SEQ ID NO: 1068648 - DNA, 25 bp, Homo sapien
ctcagatggatgtgtgatggtacta

SEQ ID NO: 1068649 - DNA, 25 bp, Homo sapien
tactatccactgtagtgcctgctgg

SEQ ID NO: 1068650 - DNA, 25 bp, Homo sapien
agtcaaagatctgaaccagcttcca

SEQ ID NO: 1068651 - DNA, 25 bp, Homo sapien
aatttgcaaacatctccctatcaag

SEQ ID NO: 1068652 - DNA, 25 bp, Homo sapien
tgaatttgcaaacatctccctatca

SEQ ID NO: 1068653 - DNA, 25 bp, Homo sapien
tctccctatcaagtcaaagatctga

SEQ ID NO: 1068654 - DNA, 25 bp, Homo sapien
cgcctctggacttcaaacaattctc

SEQ ID NO: 1068655 - DNA, 25 bp, Homo sapien
tacgatcttggttcacagaaacccc

SEQ ID NO: 1068656 - DNA, 25 bp, Homo sapien
gtggtacgatcttggttcacagaaa

SEQ ID NO: 1068657 - DNA, 25 bp, Homo sapien
ccccgcctctggacttcaaacaatt

SEQ ID NO: 1068658 - DNA, 25 bp, Homo sapien
gctggtaagtcagtagctggagttc

SEQ ID NO: 1068659 - DNA, 25 bp, Homo sapien
gacctggtaatgtgagggacggctg

SEQ ID NO: 1068660 - DNA, 25 bp, Homo sapien
tgcagtgaagcagttgtcatcccac

SEQ ID NO: 1068661 - DNA, 25 bp, Homo sapien
aagtcagtagctggagttcatctgc

SEQ ID NO: 1068662 - DNA, 25 bp, Homo sapien
gccctaaatgctacaagccgggcat

SEQ ID NO: 1068663 - DNA, 25 bp, Homo sapien
tacaagccgggcataatatgcaggg

SEQ ID NO: 1068664 - DNA, 25 bp, Homo sapien
ctacaagccgggcataatatgcagg

SEQ ID NO: 1068665 - DNA, 25 bp, Homo sapien
taaatgctacaagccgggcataata

SEQ ID NO: 1068666 - DNA, 25 bp, Homo sapien
gtcatgatctttatccaccagatga

SEQ ID NO: 1068667 - DNA, 25 bp, Homo sapien
catgatctttatccaccagatgata

SEQ ID NO: 1068668 - DNA, 25 bp, Homo sapien
ctgtcatgatctttatccaccagat

SEQ ID NO: 1068669 - DNA, 25 bp, Homo sapien
atgatctttatccaccagatgatac

SEQ ID NO: 1068670 - DNA, 25 bp, Homo sapien
aagttttctattgtagctcattttt

SEQ ID NO: 1068671 - DNA, 25 bp, Homo sapien
aaagttttctattgtagctcatttt

SEQ ID NO: 1068672 - DNA, 25 bp, Homo sapien
gaccactttttgaggctacttagga

SEQ ID NO: 1068673 - DNA, 25 bp, Homo sapien
tacttaggacctgagcagaactgaa

SEQ ID NO: 1068674 - DNA, 25 bp, Homo sapien
actgaaatgcatttggctccatggg

SEQ ID NO: 1068675 - DNA, 25 bp, Homo sapien
gtgactactttgaccggagccaggg

SEQ ID NO: 1068676 - DNA, 25 bp, Homo sapien
gaaactgctacacttcacagatggt

SEQ ID NO: 1068677 - DNA, 25 bp, Homo sapien
taatagtagctcaggaataggtcaa

SEQ ID NO: 1068678 - DNA, 25 bp, Homo sapien
gcaaagtgaactggtcaggcctcct

SEQ ID NO: 1068679 - DNA, 25 bp, Homo sapien
aaaatccccgtggacaagaaacatg

SEQ ID NO: 1068680 - DNA, 25 bp, Homo sapien
tctgtcctgacacatgactgccttc

SEQ ID NO: 1068681 - DNA, 25 bp, Homo sapien
gatttgcacagccttagccaaggcc

SEQ ID NO: 1068682 - DNA, 25 bp, Homo sapien
caaaatacatcgtgtgctgggtatc

SEQ ID NO: 1068683 - DNA, 25 bp, Homo sapien
gctgggtatcatggtggatttgcac

SEQ ID NO: 1068684 - DNA, 25 bp, Homo sapien
catggggtgccaaattggttgagtt

SEQ ID NO: 1068685 - DNA, 25 bp, Homo sapien
gctcgatctagaggcggtaggcatt

SEQ ID NO: 1068686 - DNA, 25 bp, Homo sapien
ctgaagtcaacgtggctcgatctag

SEQ ID NO: 1068687 - DNA, 25 bp, Homo sapien
cattttgaggctgcatggggtgcca

SEQ ID NO: 1068688 - DNA, 25 bp, Homo sapien
gattcagtgcaactattccgagctg

SEQ ID NO: 1068689 - DNA, 25 bp, Homo sapien
tttgttgacgcatcagacagtgctg

SEQ ID NO: 1068690 - DNA, 25 bp, Homo sapien
tatcatggcagtgttatctccgtca

SEQ ID NO: 1068691 - DNA, 25 bp, Homo sapien
agactagagggatgcggtgaacacc

SEQ ID NO: 1068692 - DNA, 25 bp, Homo sapien
cctttccaataaggaagcatcctgg

SEQ ID NO: 1068693 - DNA, 25 bp, Homo sapien
aagttgcagcatcactcattgtacc

SEQ ID NO: 1068694 - DNA, 25 bp, Homo sapien
tcattgtaccttaaggactggcaaa

SEQ ID NO: 1068695 - DNA, 25 bp, Homo sapien
tcgtgtgagttaccttgattcccag

SEQ ID NO: 1068696 - DNA, 25 bp, Homo sapien
gctcgctttagagcaactccctttg

SEQ ID NO: 1068697 - DNA, 25 bp, Homo sapien
tacaagtcagtaaactctgggctgg

SEQ ID NO: 1068698 - DNA, 25 bp, Homo sapien
cactggctggtgctaccaagacact

SEQ ID NO: 1068699 - DNA, 25 bp, Homo sapien
tggacaagaaaggaatcccatctcc

SEQ ID NO: 1068700 - DNA, 25 bp, Homo sapien
gcaaaattgttttcaccccattgtg

SEQ ID NO: 1068701 - DNA, 25 bp, Homo sapien
tgttttcaccccattgtgtctatct

SEQ ID NO: 1068702 - DNA, 25 bp, Homo sapien
ccttcctcagccatatagagtgtgg

SEQ ID NO: 1068703 - DNA, 25 bp, Homo sapien
ttcaccccattgtgtctatctcttt

SEQ ID NO: 1068704 - DNA, 25 bp, Homo sapien
tatgagatttggaccgtctcatgag

SEQ ID NO: 1068705 - DNA, 25 bp, Homo sapien
gctttatattgctgggattttgaga

SEQ ID NO: 1068706 - DNA, 25 bp, Homo sapien
gctagtttatgagatttggaccgtc

SEQ ID NO: 1068707 - DNA, 25 bp, Homo sapien
ggattttgagaaggctagtttatga

SEQ ID NO: 1068708 - DNA, 25 bp, Homo sapien
gcaaacacaggtggcgccgttgatc

SEQ ID NO: 1068709 - DNA, 25 bp, Homo sapien
ggattaaggacgtctgcactcagct

SEQ ID NO: 1068710 - DNA, 25 bp, Homo sapien
gatcgacataaaactctctcagaga

SEQ ID NO: 1068711 - DNA, 25 bp, Homo sapien
tgagcaacaggcctcgatcgacata

SEQ ID NO: 1068712 - DNA, 25 bp, Homo sapien
gtggccatgctgaagggtattctct

SEQ ID NO: 1068713 - DNA, 25 bp, Homo sapien
cagcaagtcctccttctcctaaaaa

SEQ ID NO: 1068714 - DNA, 25 bp, Homo sapien
tgctgaagggtattctctgtgctct

SEQ ID NO: 1068715 - DNA, 25 bp, Homo sapien
caagagttcttcacatcttggattc

SEQ ID NO: 1068716 - DNA, 25 bp, Homo sapien
cataacgattcagtcagtcccgagg

SEQ ID NO: 1068717 - DNA, 25 bp, Homo sapien
tattaataagcaagcccgaggcact

SEQ ID NO: 1068718 - DNA, 25 bp, Homo sapien
gctaatcagggctttcgggaacata

SEQ ID NO: 1068719 - DNA, 25 bp, Homo sapien
cacttgaagggtaggcagctttgcc

SEQ ID NO: 1068720 - DNA, 25 bp, Homo sapien
catacttattagacaattgacagga

SEQ ID NO: 1068721 - DNA, 25 bp, Homo sapien
tctcaacatgaggatacaacccctc

SEQ ID NO: 1068722 - DNA, 25 bp, Homo sapien
gaaagtacctcgtattgctagagac

SEQ ID NO: 1068723 - DNA, 25 bp, Homo sapien
gtatgttgccattacagtgtactgc

SEQ ID NO: 1068724 - DNA, 25 bp, Homo sapien
ctatctcccaaagaaggagtaaggg

SEQ ID NO: 1068725 - DNA, 25 bp, Homo sapien
tttctataataaagagggatcctat

SEQ ID NO: 1068726 - DNA, 25 bp, Homo sapien
ctataataaagagggatcctatctc

SEQ ID NO: 1068727 - DNA, 25 bp, Homo sapien
taataaagagggatcctatctccca

SEQ ID NO: 1068728 - DNA, 25 bp, Homo sapien
ccttgatttctaagacaacttgttc

SEQ ID NO: 1068729 - DNA, 25 bp, Homo sapien
gctaactcctacatagccgatcctg

SEQ ID NO: 1068730 - DNA, 25 bp, Homo sapien
gtgtcacacagctaactcctacata

SEQ ID NO: 1068731 - DNA, 25 bp, Homo sapien
ttatccatttgtccatggggtttgt

SEQ ID NO: 1068732 - DNA, 25 bp, Homo sapien
gcctgcggtgcgacaaatcaagata

SEQ ID NO: 1068733 - DNA, 25 bp, Homo sapien
caagctaccctacatgctggtaaga

SEQ ID NO: 1068734 - DNA, 25 bp, Homo sapien
tagctgctatagagaacagtatggc

SEQ ID NO: 1068735 - DNA, 25 bp, Homo sapien
ccacagtgccaaaacctggttaatg

SEQ ID NO: 1068736 - DNA, 25 bp, Homo sapien
tctgcgtgggcctcacgcactcctg

SEQ ID NO: 1068737 - DNA, 25 bp, Homo sapien
gcgtgggcctcacgcactcctgagg

SEQ ID NO: 1068738 - DNA, 25 bp, Homo sapien
ggctccccgagttctgcgtgggcct

SEQ ID NO: 1068739 - DNA, 25 bp, Homo sapien
aaggctccccgagttctgcgtgggc

SEQ ID NO: 1068740 - DNA, 25 bp, Homo sapien
acagcccattaagaagagcttccag

SEQ ID NO: 1068741 - DNA, 25 bp, Homo sapien
tactcttgaccaatacagcccatta

SEQ ID NO: 1068742 - DNA, 25 bp, Homo sapien
tccaggacatccagtgctaccagtg

SEQ ID NO: 1068743 - DNA, 25 bp, Homo sapien
gagatctactcttgaccaatacagc

SEQ ID NO: 1068744 - DNA, 25 bp, Homo sapien
tgcgagcgcccggccagctgccagt

SEQ ID NO: 1068745 - DNA, 25 bp, Homo sapien
ctgcgagcgcccggccagctgccag

SEQ ID NO: 1068746 - DNA, 25 bp, Homo sapien
gcgtgaggggcctaggtaccccaca

SEQ ID NO: 1068747 - DNA, 25 bp, Homo sapien
ccatatacccgtgcggaggtcaggc

SEQ ID NO: 1068748 - DNA, 25 bp, Homo sapien
ccggagactgtgaagtccagcgtga

SEQ ID NO: 1068749 - DNA, 25 bp, Homo sapien
acactctcgctgctcgggatcccgg

SEQ ID NO: 1068750 - DNA, 25 bp, Homo sapien
ctgctcccgagggtcccgcttccat

SEQ ID NO: 1068751 - DNA, 25 bp, Homo sapien
ggagtccttccgtgcgtgcaggccc

SEQ ID NO: 1068752 - DNA, 25 bp, Homo sapien
gtgcaggcccttctcccagattact

SEQ ID NO: 1068753 - DNA, 25 bp, Homo sapien
cgtaggcctccacggatgtctggga

SEQ ID NO: 1068754 - DNA, 25 bp, Homo sapien
agattacttccaacccgcaggactg

SEQ ID NO: 1068755 - DNA, 25 bp, Homo sapien
tcgccctcgcgtcaggcccagtggg

SEQ ID NO: 1068756 - DNA, 25 bp, Homo sapien
cccaagagacattagcctattccag

SEQ ID NO: 1068757 - DNA, 25 bp, Homo sapien
attagcctattccagcccagcggag

SEQ ID NO: 1068758 - DNA, 25 bp, Homo sapien
atgcggtagctccaggcccatctgt

SEQ ID NO: 1068759 - DNA, 25 bp, Homo sapien
catcgcttcggtcccagtctttcct

SEQ ID NO: 1068760 - DNA, 25 bp, Homo sapien
tgactgagggccaagtgtaagagcc

SEQ ID NO: 1068761 - DNA, 25 bp, Homo sapien
cttagcaaactgtgactgagggcca

SEQ ID NO: 1068762 - DNA, 25 bp, Homo sapien
ctcaacccattcttagcaaactgtg

SEQ ID NO: 1068763 - DNA, 25 bp, Homo sapien
tgggaagaacacaagattctctcca

SEQ ID NO: 1068764 - DNA, 25 bp, Homo sapien
tctgggaagaacacaagattctctc

SEQ ID NO: 1068765 - DNA, 25 bp, Homo sapien
aagaggtggcaattagaatgctgga

SEQ ID NO: 1068766 - DNA, 25 bp, Homo sapien
ggctctgggaagaacacaagattct

SEQ ID NO: 1068767 - DNA, 25 bp, Homo sapien
gaattaaggcaactgaatggcgaga

SEQ ID NO: 1068768 - DNA, 25 bp, Homo sapien
tctagtagagtaagacacttgcctc

SEQ ID NO: 1068769 - DNA, 25 bp, Homo sapien
gaataagatccagacaaggccaggc

SEQ ID NO: 1068770 - DNA, 25 bp, Homo sapien
caaaatggcataaccttgatgttcc

SEQ ID NO: 1068771 - DNA, 25 bp, Homo sapien
gatcttagggatgtccacctcaaag

SEQ ID NO: 1068772 - DNA, 25 bp, Homo sapien
tctacggggacacttatccggcttg

SEQ ID NO: 1068773 - DNA, 25 bp, Homo sapien
tccacctcgtagtggtacacgtcga

SEQ ID NO: 1068774 - DNA, 25 bp, Homo sapien
caggagcttgattggtttccccaca

SEQ ID NO: 1068775 - DNA, 25 bp, Homo sapien
gatgggagtataagttgatacaact

SEQ ID NO: 1068776 - DNA, 25 bp, Homo sapien
tgaaatgtattaggccaacagtccc

SEQ ID NO: 1068777 - DNA, 25 bp, Homo sapien
tagattggtgcaggtataggaagac

SEQ ID NO: 1068778 - DNA, 25 bp, Homo sapien
ctctgatgccttattgatgggagta

SEQ ID NO: 1068779 - DNA, 25 bp, Homo sapien
ggcttgaaatgctggaccatgtatt

SEQ ID NO: 1068780 - DNA, 25 bp, Homo sapien
ttcgttgccaatgggcagtgctgtg

SEQ ID NO: 1068781 - DNA, 25 bp, Homo sapien
gctggaccatgtattccaccacttc

SEQ ID NO: 1068782 - DNA, 25 bp, Homo sapien
ccgttcgttgccaatgggcagtgct

SEQ ID NO: 1068783 - DNA, 25 bp, Homo sapien
cttcaggagggtgaaagaaagggat

SEQ ID NO: 1068784 - DNA, 25 bp, Homo sapien
aaagggatgaaggattgccattgct

SEQ ID NO: 1068785 - DNA, 25 bp, Homo sapien
agaaagggatgaaggattgccattg

SEQ ID NO: 1068786 - DNA, 25 bp, Homo sapien
tcaggagggtgaaagaaagggatga

SEQ ID NO: 1068787 - DNA, 25 bp, Homo sapien
tgcagcattcgccagctcacaatgg

SEQ ID NO: 1068788 - DNA, 25 bp, Homo sapien
tcatggatgccaggtgcctcatggc

SEQ ID NO: 1068789 - DNA, 25 bp, Homo sapien
cagggattgtcacctcaaagtcgac

SEQ ID NO: 1068790 - DNA, 25 bp, Homo sapien
atccagggcttgcacagactccaag

SEQ ID NO: 1068791 - DNA, 25 bp, Homo sapien
gcatcctgggcacggaggagccctg

SEQ ID NO: 1068792 - DNA, 25 bp, Homo sapien
aggcatcctgggcacggaggagccc

SEQ ID NO: 1068793 - DNA, 25 bp, Homo sapien
ctgtgaggcatcctgggcacggagg

SEQ ID NO: 1068794 - DNA, 25 bp, Homo sapien
gtgaggcatcctgggcacggaggag

SEQ ID NO: 1068795 - DNA, 25 bp, Homo sapien
gcagagaactggtccctcgggcaca

SEQ ID NO: 1068796 - DNA, 25 bp, Homo sapien
ggcagagaactggtccctcgggcac

SEQ ID NO: 1068797 - DNA, 25 bp, Homo sapien
cacatggcagggcgcacagactggt

SEQ ID NO: 1068798 - DNA, 25 bp, Homo sapien
tggtgaaagccgaaccagacctcgc

SEQ ID NO: 1068799 - DNA, 25 bp, Homo sapien
tagtagccctcaggcggtgagaaga

SEQ ID NO: 1068800 - DNA, 25 bp, Homo sapien
cgcacagactggtgaaagccgaacc

SEQ ID NO: 1068801 - DNA, 25 bp, Homo sapien
ctcacacatgaactcaatcactggc

SEQ ID NO: 1068802 - DNA, 25 bp, Homo sapien
caatcactggctgtgccttataaaa

SEQ ID NO: 1068803 - DNA, 25 bp, Homo sapien
gggcttgggctgctcatctatgttc

SEQ ID NO: 1068804 - DNA, 25 bp, Homo sapien
aagcgaacgcgctgagagtccgtga

SEQ ID NO: 1068805 - DNA, 25 bp, Homo sapien
ctcttagggctaaagtggcgctgtt

SEQ ID NO: 1068806 - DNA, 25 bp, Homo sapien
tagggctaaagtggcgctgtttccc

SEQ ID NO: 1068807 - DNA, 25 bp, Homo sapien
cttagggctaaagtggcgctgtttc

SEQ ID NO: 1068808 - DNA, 25 bp, Homo sapien
ttcctcttagggctaaagtggcgct

SEQ ID NO: 1068809 - DNA, 25 bp, Homo sapien
tctgtccacagtgggtgacttccac

SEQ ID NO: 1068810 - DNA, 25 bp, Homo sapien
catctgtccacagtgggtgacttcc

SEQ ID NO: 1068811 - DNA, 25 bp, Homo sapien
gtctgatggctagcagggcgacggg

SEQ ID NO: 1068812 - DNA, 25 bp, Homo sapien
taacattacacacgcggtacttcct

SEQ ID NO: 1068813 - DNA, 25 bp, Homo sapien
tctgcttgaaatactgtgccactgt

SEQ ID NO: 1068814 - DNA, 25 bp, Homo sapien
tggccaacttgtaggcagggcagat

SEQ ID NO: 1068815 - DNA, 25 bp, Homo sapien
gaaggtaggtatgcttttgttcctg

SEQ ID NO: 1068816 - DNA, 25 bp, Homo sapien
gggatacttgagctgaaggttatat

SEQ ID NO: 1068817 - DNA, 25 bp, Homo sapien
tgtctgtctggagcggatctagctg

SEQ ID NO: 1068818 - DNA, 25 bp, Homo sapien
ggttgtcggtcagctttttaataca

SEQ ID NO: 1068819 - DNA, 25 bp, Homo sapien
gcctttatcatggtcgaggtctggt

SEQ ID NO: 1068820 - DNA, 25 bp, Homo sapien
gctttttaatacagcgctgcccagc

SEQ ID NO: 1068821 - DNA, 25 bp, Homo sapien
cctgtcacctccgtcatgtcatcct

SEQ ID NO: 1068822 - DNA, 25 bp, Homo sapien
ccaaattcctggatgtagggatcta

SEQ ID NO: 1068823 - DNA, 25 bp, Homo sapien
tctaagttgtagctggcattcttca

SEQ ID NO: 1068824 - DNA, 25 bp, Homo sapien
ccgtactgcaagatgggcgccggca

SEQ ID NO: 1068825 - DNA, 25 bp, Homo sapien
taggtagagggggcgcctaggtgag

SEQ ID NO: 1068826 - DNA, 25 bp, Homo sapien
gataggtagagggggcgcctaggtg

SEQ ID NO: 1068827 - DNA, 25 bp, Homo sapien
aggtagagggggcgcctaggtgagc

SEQ ID NO: 1068828 - DNA, 25 bp, Homo sapien
ctggggataggtagagggggcgcct

SEQ ID NO: 1068829 - DNA, 25 bp, Homo sapien
gacactgtttttggggtgcgaagca

SEQ ID NO: 1068830 - DNA, 25 bp, Homo sapien
tcaatcccattgtagaactgtttcc

SEQ ID NO: 1068831 - DNA, 25 bp, Homo sapien
caggcgatggcccagactttgatct

SEQ ID NO: 1068832 - DNA, 25 bp, Homo sapien
gcatgtcccagacaccctgattggg

SEQ ID NO: 1068833 - DNA, 25 bp, Homo sapien
aatgaagtgactatggcacaaaggc

SEQ ID NO: 1068834 - DNA, 25 bp, Homo sapien
tatttacctttagcccagtcagaac

SEQ ID NO: 1068835 - DNA, 25 bp, Homo sapien
gagcctttccaatgttgccaagcag

SEQ ID NO: 1068836 - DNA, 25 bp, Homo sapien
gagtttctgggtttactggtgccca

SEQ ID NO: 1068837 - DNA, 25 bp, Homo sapien
caagcctcgagctgctaggctaaaa

SEQ ID NO: 1068838 - DNA, 25 bp, Homo sapien
gtaggtaggactagaggaatgccac

SEQ ID NO: 1068839 - DNA, 25 bp, Homo sapien
tagttgagtaaggtaagagagtact

SEQ ID NO: 1068840 - DNA, 25 bp, Homo sapien
gagattctaacatgaatgatacaca

SEQ ID NO: 1068841 - DNA, 25 bp, Homo sapien
gtgttcttgagatgccggaacatag

SEQ ID NO: 1068842 - DNA, 25 bp, Homo sapien
gttgaccctggataggcatccccgc

SEQ ID NO: 1068843 - DNA, 25 bp, Homo sapien
taggcatccccgcatccttggaaat

SEQ ID NO: 1068844 - DNA, 25 bp, Homo sapien
tgttcttgagatgccggaacatagg

SEQ ID NO: 1068845 - DNA, 25 bp, Homo sapien
ccagcatagcctggcatgaggacca

SEQ ID NO: 1068846 - DNA, 25 bp, Homo sapien
agcacacaaaggaccccagtaaatg

SEQ ID NO: 1068847 - DNA, 25 bp, Homo sapien
ccagcacacaaaggaccccagtaaa

SEQ ID NO: 1068848 - DNA, 25 bp, Homo sapien
cctggcatgaggaccagcacacaaa

SEQ ID NO: 1068849 - DNA, 25 bp, Homo sapien
gttacccaagctgggtaactgcagc

SEQ ID NO: 1068850 - DNA, 25 bp, Homo sapien
taatgtgcattaggatgggggatct

SEQ ID NO: 1068851 - DNA, 25 bp, Homo sapien
ccacaggtgcacaagatgactgggt

SEQ ID NO: 1068852 - DNA, 25 bp, Homo sapien
tgtaccaggcctcagaaggtttaat

SEQ ID NO: 1068853 - DNA, 25 bp, Homo sapien
acaatccaaatatgtgtattaacag

SEQ ID NO: 1068854 - DNA, 25 bp, Homo sapien
gaaatggtgttatattcatatgatg

SEQ ID NO: 1068855 - DNA, 25 bp, Homo sapien
gaatggatagatggaaatggtgtta

SEQ ID NO: 1068856 - DNA, 25 bp, Homo sapien
tataacaaaccacaactttatgttg

SEQ ID NO: 1068857 - DNA, 25 bp, Homo sapien
gactaggatgttgttaatgccacca

SEQ ID NO: 1068858 - DNA, 25 bp, Homo sapien
acacactgcgtagccattcccaaga

SEQ ID NO: 1068859 - DNA, 25 bp, Homo sapien
tcccaagagtgtatctccgacacgt

SEQ ID NO: 1068860 - DNA, 25 bp, Homo sapien
cagagtctgaggtgaggtcttgacc

SEQ ID NO: 1068861 - DNA, 25 bp, Homo sapien
ttgacaagggcaagtggacaacaga

SEQ ID NO: 1068862 - DNA, 25 bp, Homo sapien
cttgacaagggcaagtggacaacag

SEQ ID NO: 1068863 - DNA, 25 bp, Homo sapien
tgtaacatctgctcccaggaatatc

SEQ ID NO: 1068864 - DNA, 25 bp, Homo sapien
aacatctgctcccaggaatatcact

SEQ ID NO: 1068865 - DNA, 25 bp, Homo sapien
gtaacatctgctcccaggaatatca

SEQ ID NO: 1068866 - DNA, 25 bp, Homo sapien
catctgctcccaggaatatcactgg

SEQ ID NO: 1068867 - DNA, 25 bp, Homo sapien
gtggtcgctgtacccgcacagtagc

SEQ ID NO: 1068868 - DNA, 25 bp, Homo sapien
tcaatgatctcttgccgtggtcgct

SEQ ID NO: 1068869 - DNA, 25 bp, Homo sapien
tcaggcaccccatctcggtagaaga

SEQ ID NO: 1068870 - DNA, 25 bp, Homo sapien
gagctcacgcaccatgtaggacaag

SEQ ID NO: 1068871 - DNA, 25 bp, Homo sapien
gtgtgatggcgtttctgcaccacaa

SEQ ID NO: 1068872 - DNA, 25 bp, Homo sapien
tcacgaatggccagtagctcatagt

SEQ ID NO: 1068873 - DNA, 25 bp, Homo sapien
gcaccacaatataagtgatcccagg

SEQ ID NO: 1068874 - DNA, 25 bp, Homo sapien
gatcccaggctggtagtccttttcc

SEQ ID NO: 1068875 - DNA, 25 bp, Homo sapien
tagaagtcaaactcaaatgggtggg

SEQ ID NO: 1068876 - DNA, 25 bp, Homo sapien
tcaaactcaaatgggtgggtgatgt

SEQ ID NO: 1068877 - DNA, 25 bp, Homo sapien
cagctgggatgttaccactcttccc

SEQ ID NO: 1068878 - DNA, 25 bp, Homo sapien
ctgcacagatagaagtcaaactcaa

SEQ ID NO: 1068879 - DNA, 25 bp, Homo sapien
ggggtcccaggctgggcagagaaga

SEQ ID NO: 1068880 - DNA, 25 bp, Homo sapien
taggaaggtgaggggtcccaggctg

SEQ ID NO: 1068881 - DNA, 25 bp, Homo sapien
gtcccaggctgggcagagaagatgg

SEQ ID NO: 1068882 - DNA, 25 bp, Homo sapien
aggaaggtgaggggtcccaggctgg

SEQ ID NO: 1068883 - DNA, 25 bp, Homo sapien
gcatcgtacgtaagtgtggcacagc

SEQ ID NO: 1068884 - DNA, 25 bp, Homo sapien
tgtccaccaggtggtatcgtgcccg

SEQ ID NO: 1068885 - DNA, 25 bp, Homo sapien
gaaacggttgtcatcccaaagaaca

SEQ ID NO: 1068886 - DNA, 25 bp, Homo sapien
tacgtcaggatctggagctcatctg

SEQ ID NO: 1068887 - DNA, 25 bp, Homo sapien
cctggtgaacctgcacggctttggc

SEQ ID NO: 1068888 - DNA, 25 bp, Homo sapien
gagtatcctggtgaacctgcacggc

SEQ ID NO: 1068889 - DNA, 25 bp, Homo sapien
tatcctggtgaacctgcacggcttt

SEQ ID NO: 1068890 - DNA, 25 bp, Homo sapien
gcccattgctctgccccgatatgtg

SEQ ID NO: 1068891 - DNA, 25 bp, Homo sapien
tttcttctatccagtgaggtaacag

SEQ ID NO: 1068892 - DNA, 25 bp, Homo sapien
tccagtgaggtaacagcgttctgcc

SEQ ID NO: 1068893 - DNA, 25 bp, Homo sapien
ggaaacaaggcatcctacactcctc

SEQ ID NO: 1068894 - DNA, 25 bp, Homo sapien
tcctctggatttgggtggcacagct

SEQ ID NO: 1068895 - DNA, 25 bp, Homo sapien
tgtgtgtatggtgggcaccagtgct

SEQ ID NO: 1068896 - DNA, 25 bp, Homo sapien
ggacatgaggttgatatcagagatt

SEQ ID NO: 1068897 - DNA, 25 bp, Homo sapien
gctggtggtctgtcttgctggccct

SEQ ID NO: 1068898 - DNA, 25 bp, Homo sapien
ttagcactgtgagtcacatgagaca

SEQ ID NO: 1068899 - DNA, 25 bp, Homo sapien
tagcaaatccgggtcatacaagggc

SEQ ID NO: 1068900 - DNA, 25 bp, Homo sapien
gcattaccgttacagggaaggcact

SEQ ID NO: 1068901 - DNA, 25 bp, Homo sapien
caatctaggatgagccaaagggtca

SEQ ID NO: 1068902 - DNA, 25 bp, Homo sapien
tatgaaagtaactccagacctgggc

SEQ ID NO: 1068903 - DNA, 25 bp, Homo sapien
cacaaacttgttgctgggagtagag

SEQ ID NO: 1068904 - DNA, 25 bp, Homo sapien
tggagaacatgcagagcccactgtc

SEQ ID NO: 1068905 - DNA, 25 bp, Homo sapien
aatggcataagccacgtcaaagggc

SEQ ID NO: 1068906 - DNA, 25 bp, Homo sapien
cagctgggcttgtgcctatagggca

SEQ ID NO: 1068907 - DNA, 25 bp, Homo sapien
gtataagcttgagggcagtccagcc

SEQ ID NO: 1068908 - DNA, 25 bp, Homo sapien
caagagacccaactaagaggatgag

SEQ ID NO: 1068909 - DNA, 25 bp, Homo sapien
cacaagttgggcaggtcagttgctc

SEQ ID NO: 1068910 - DNA, 25 bp, Homo sapien
tgaccctgccagctaacagtgggat

SEQ ID NO: 1068911 - DNA, 25 bp, Homo sapien
tatgagtagagtaagggagagcacc

SEQ ID NO: 1068912 - DNA, 25 bp, Homo sapien
tggacaaggtacagctcaaagcagg

SEQ ID NO: 1068913 - DNA, 25 bp, Homo sapien
tacagatatcctatgggccagctaa

SEQ ID NO: 1068914 - DNA, 25 bp, Homo sapien
taatagtcagtgcacccttggctgc

SEQ ID NO: 1068915 - DNA, 25 bp, Homo sapien
tatggtcaaggagaaacctgggagc

SEQ ID NO: 1068916 - DNA, 25 bp, Homo sapien
taattcccttaatgagacggacact

SEQ ID NO: 1068917 - DNA, 25 bp, Homo sapien
tgagcaccaacctgtgtttactgga

SEQ ID NO: 1068918 - DNA, 25 bp, Homo sapien
cccatcttgactggcagaatgtccc

SEQ ID NO: 1068919 - DNA, 25 bp, Homo sapien
ccatgaccctgagatgacaaaaatg

SEQ ID NO: 1068920 - DNA, 25 bp, Homo sapien
tattatctagtatgctggaacatgg

SEQ ID NO: 1068921 - DNA, 25 bp, Homo sapien
tctgctcctaggagttcataggctc

SEQ ID NO: 1068922 - DNA, 25 bp, Homo sapien
tactgatctgttggtatatgccatg

SEQ ID NO: 1068923 - DNA, 25 bp, Homo sapien
cctgtgtactcctatcacttcttga

SEQ ID NO: 1068924 - DNA, 25 bp, Homo sapien
tgtgtactcctatcacttcttgatc

SEQ ID NO: 1068925 - DNA, 25 bp, Homo sapien
ttcttgatccactgcccacccagcc

SEQ ID NO: 1068926 - DNA, 25 bp, Homo sapien
tgtactcctatcacttcttgatcca

SEQ ID NO: 1068927 - DNA, 25 bp, Homo sapien
gaagattcaggaattctgagttcat

SEQ ID NO: 1068928 - DNA, 25 bp, Homo sapien
tgaagattcaggaattctgagttca

SEQ ID NO: 1068929 - DNA, 25 bp, Homo sapien
ctgaagattcaggaattctgagttc

SEQ ID NO: 1068930 - DNA, 25 bp, Homo sapien
gagctccaggaccaaacaatgcagg

SEQ ID NO: 1068931 - DNA, 25 bp, Homo sapien
tttcccaagggagtctgccagatga

SEQ ID NO: 1068932 - DNA, 25 bp, Homo sapien
ttcccattcaggcagtagacagcag

SEQ ID NO: 1068933 - DNA, 25 bp, Homo sapien
tgttcctgcagggtaagccacaaag

SEQ ID NO: 1068934 - DNA, 25 bp, Homo sapien
tgaagtacctttgagaccagatgct

SEQ ID NO: 1068935 - DNA, 25 bp, Homo sapien
caagattagagtcaactgggcacct

SEQ ID NO: 1068936 - DNA, 25 bp, Homo sapien
tattgggaccatgaggcgaactggc

SEQ ID NO: 1068937 - DNA, 25 bp, Homo sapien
gcttgaagctaagagaggccagcct

SEQ ID NO: 1068938 - DNA, 25 bp, Homo sapien
cagggtaaataccaactcttgtgca

SEQ ID NO: 1068939 - DNA, 25 bp, Homo sapien
gactacatgtacaccctatatttgg

SEQ ID NO: 1068940 - DNA, 25 bp, Homo sapien
tatgaggctctctcctgactacatg

SEQ ID NO: 1068941 - DNA, 25 bp, Homo sapien
ggaacccacctctttagagtcaatg

SEQ ID NO: 1068942 - DNA, 25 bp, Homo sapien
caataaatgtatgggactcaaaacc

SEQ ID NO: 1068943 - DNA, 25 bp, Homo sapien
accacatctgactccaattcttact

SEQ ID NO: 1068944 - DNA, 25 bp, Homo sapien
atccctacccccatggctgaaaata

SEQ ID NO: 1068945 - DNA, 25 bp, Homo sapien
catggctgaaaataccctccccaat

SEQ ID NO: 1068946 - DNA, 25 bp, Homo sapien
cccatgtccctatgcttcagtaata

SEQ ID NO: 1068947 - DNA, 25 bp, Homo sapien
tctccccatgtccctatgcttcagt

SEQ ID NO: 1068948 - DNA, 25 bp, Homo sapien
cactgtgggactttggatcagtcac

SEQ ID NO: 1068949 - DNA, 25 bp, Homo sapien
tccccatgtccctatgcttcagtaa

SEQ ID NO: 1068950 - DNA, 25 bp, Homo sapien
tattgccttggtagccctttgccca

SEQ ID NO: 1068951 - DNA, 25 bp, Homo sapien
ttttccggaccacccatctatggtg

SEQ ID NO: 1068952 - DNA, 25 bp, Homo sapien
ctttccagggtgaaaacgcacggcg

SEQ ID NO: 1068953 - DNA, 25 bp, Homo sapien
agacatctgagacgccttttccgga

SEQ ID NO: 1068954 - DNA, 25 bp, Homo sapien
gcggaggccccgagccgagcccgct

SEQ ID NO: 1068955 - DNA, 25 bp, Homo sapien
ctgccgcggaggccccgagccgagc

SEQ ID NO: 1068956 - DNA, 25 bp, Homo sapien
gccgagcccgctggggtagggccac

SEQ ID NO: 1068957 - DNA, 25 bp, Homo sapien
cccgagccgagcccgctggggtagg

SEQ ID NO: 1068958 - DNA, 25 bp, Homo sapien
ggagatgtgaggcgcggacagaggg

SEQ ID NO: 1068959 - DNA, 25 bp, Homo sapien
accgctcctccacgactgcgggccg

SEQ ID NO: 1068960 - DNA, 25 bp, Homo sapien
gagtcccgtccggaagttgcatcgc

SEQ ID NO: 1068961 - DNA, 25 bp, Homo sapien
gtccggaagttgcatcgcccgcggc

SEQ ID NO: 1068962 - DNA, 25 bp, Homo sapien
gggcggcgacggcttcccctgagca

SEQ ID NO: 1068963 - DNA, 25 bp, Homo sapien
gaagagtcgcggacggaaaacggca

SEQ ID NO: 1068964 - DNA, 25 bp, Homo sapien
tccgaaagctctgggccggaagagt

SEQ ID NO: 1068965 - DNA, 25 bp, Homo sapien
aacggagcccgccactggcggcaag

SEQ ID NO: 1068966 - DNA, 25 bp, Homo sapien
cccgcctcgcagtttcgccgactca

SEQ ID NO: 1068967 - DNA, 25 bp, Homo sapien
ctccaagcgtttccccgcctcgcag

SEQ ID NO: 1068968 - DNA, 25 bp, Homo sapien
gcctcgcagtttcgccgactcaggg

SEQ ID NO: 1068969 - DNA, 25 bp, Homo sapien
ccaagcgtttccccgcctcgcagtt

SEQ ID NO: 1068970 - DNA, 25 bp, Homo sapien
tctagaagaagggtactccagcaaa

SEQ ID NO: 1068971 - DNA, 25 bp, Homo sapien
aagtctagaagaagggtactccagc

SEQ ID NO: 1068972 - DNA, 25 bp, Homo sapien
tagaagaagggtactccagcaaaga

SEQ ID NO: 1068973 - DNA, 25 bp, Homo sapien
taaagtctagaagaagggtactcca

SEQ ID NO: 1068974 - DNA, 25 bp, Homo sapien
tatggtatttgtgttcgaggttccc

SEQ ID NO: 1068975 - DNA, 25 bp, Homo sapien
tcagtagattgcacaagatatcctt

SEQ ID NO: 1068976 - DNA, 25 bp, Homo sapien
tgtgtatccaccgagcaactagaat

SEQ ID NO: 1068977 - DNA, 25 bp, Homo sapien
caagatgattcctgagaatctccac

SEQ ID NO: 1068978 - DNA, 25 bp, Homo sapien
ggcaccatgagtaggggctgggccc

SEQ ID NO: 1068979 - DNA, 25 bp, Homo sapien
gccagcagtttaatgggtttgccca

SEQ ID NO: 1068980 - DNA, 25 bp, Homo sapien
gaggtagacatcaatctttgggatt

SEQ ID NO: 1068981 - DNA, 25 bp, Homo sapien
agacatcaatctttgggatttcaac

SEQ ID NO: 1068982 - DNA, 25 bp, Homo sapien
ttcaacttgaaaacagttagccagc

SEQ ID NO: 1068983 - DNA, 25 bp, Homo sapien
tatcatatgatatcactcttaggta

SEQ ID NO: 1068984 - DNA, 25 bp, Homo sapien
gagttatcatatgatatcactctta

SEQ ID NO: 1068985 - DNA, 25 bp, Homo sapien
gttatcatatgatatcactcttagg

SEQ ID NO: 1068986 - DNA, 25 bp, Homo sapien
tcatatgatatcactcttaggtata

SEQ ID NO: 1068987 - DNA, 25 bp, Homo sapien
attatttttatcaggccactgactt

SEQ ID NO: 1068988 - DNA, 25 bp, Homo sapien
tatttttatcaggccactgacttct

SEQ ID NO: 1068989 - DNA, 25 bp, Homo sapien
ttatttttatcaggccactgacttc

SEQ ID NO: 1068990 - DNA, 25 bp, Homo sapien
taatttgtaatataaaatcgatact

SEQ ID NO: 1068991 - DNA, 25 bp, Homo sapien
ttgtaatataaaatcgatactgagc

SEQ ID NO: 1068992 - DNA, 25 bp, Homo sapien
gtaatataaaatcgatactgagcat

SEQ ID NO: 1068993 - DNA, 25 bp, Homo sapien
tttgtaatataaaatcgatactgag

SEQ ID NO: 1068994 - DNA, 25 bp, Homo sapien
gtcttattctgtcgcctagactgga

SEQ ID NO: 1068995 - DNA, 25 bp, Homo sapien
attcttcagactcagcctcctgggt

SEQ ID NO: 1068996 - DNA, 25 bp, Homo sapien
actggagtgcagtggtgtgatctcg

SEQ ID NO: 1068997 - DNA, 25 bp, Homo sapien
agctgggattacaaacgcgcaccac

SEQ ID NO: 1068998 - DNA, 25 bp, Homo sapien
gttactagcagagaaggtagccaat

SEQ ID NO: 1068999 - DNA, 25 bp, Homo sapien
aacacaactaaaacagctggcagtc

SEQ ID NO: 1069000 - DNA, 25 bp, Homo sapien
aaagtctactgacattatccatggc

SEQ ID NO: 1069001 - DNA, 25 bp, Homo sapien
taggtacctcttaattctctgctcc

SEQ ID NO: 1069002 - DNA, 25 bp, Homo sapien
gaattgggaaactaccaacctgaga

SEQ ID NO: 1069003 - DNA, 25 bp, Homo sapien
agataacagtctcaggaaccaaatg

SEQ ID NO: 1069004 - DNA, 25 bp, Homo sapien
taagaaggcatgagtttttagtccc

SEQ ID NO: 1069005 - DNA, 25 bp, Homo sapien
tagtcagctatagtagcaaaggtgc

SEQ ID NO: 1069006 - DNA, 25 bp, Homo sapien
catcataaactggtctacggtctcc

SEQ ID NO: 1069007 - DNA, 25 bp, Homo sapien
tagttgccacaggaagtggattggc

SEQ ID NO: 1069008 - DNA, 25 bp, Homo sapien
gtggattggcggtgtaaagacttct

SEQ ID NO: 1069009 - DNA, 25 bp, Homo sapien
tgctgaaccattgagtcaaccacct

SEQ ID NO: 1069010 - DNA, 25 bp, Homo sapien
ctttccaatacaggaatgcatatct

SEQ ID NO: 1069011 - DNA, 25 bp, Homo sapien
tccaatacaggaatgcatatcttac

SEQ ID NO: 1069012 - DNA, 25 bp, Homo sapien
ttccaatacaggaatgcatatctta

SEQ ID NO: 1069013 - DNA, 25 bp, Homo sapien
tttccaatacaggaatgcatatctt

SEQ ID NO: 1069014 - DNA, 25 bp, Homo sapien
ccgagagacaaatttgattgacacc

SEQ ID NO: 1069015 - DNA, 25 bp, Homo sapien
cttgaaaggtcgatcttttccacct

SEQ ID NO: 1069016 - DNA, 25 bp, Homo sapien
aatttgattgacaccttgaaaggtc

SEQ ID NO: 1069017 - DNA, 25 bp, Homo sapien
gattgacaccttgaaaggtcgatct

SEQ ID NO: 1069018 - DNA, 25 bp, Homo sapien
cagggttagtgctgattggcttgtc

SEQ ID NO: 1069019 - DNA, 25 bp, Homo sapien
caggcaaggtccgtcctgtcagtac

SEQ ID NO: 1069020 - DNA, 25 bp, Homo sapien
cttcatgcagtaggtgccaactcac

SEQ ID NO: 1069021 - DNA, 25 bp, Homo sapien
tcgtagcaccacatcaacggcatgg

SEQ ID NO: 1069022 - DNA, 25 bp, Homo sapien
agcggagaaaaatgaacgccccaca

SEQ ID NO: 1069023 - DNA, 25 bp, Homo sapien
aaatgaacgccccacaggtgtgtat

SEQ ID NO: 1069024 - DNA, 25 bp, Homo sapien
tggagcggagaaaaatgaacgcccc

SEQ ID NO: 1069025 - DNA, 25 bp, Homo sapien
ctggagcggagaaaaatgaacgccc

SEQ ID NO: 1069026 - DNA, 25 bp, Homo sapien
tggcaggccgaacagactgatggaa

SEQ ID NO: 1069027 - DNA, 25 bp, Homo sapien
catggcaggccgaacagactgatgg

SEQ ID NO: 1069028 - DNA, 25 bp, Homo sapien
cacatggcaggccgaacagactgat

SEQ ID NO: 1069029 - DNA, 25 bp, Homo sapien
acatggcaggccgaacagactgatg

SEQ ID NO: 1069030 - DNA, 25 bp, Homo sapien
caatacagaatatggctttagttcc

SEQ ID NO: 1069031 - DNA, 25 bp, Homo sapien
acccaatacagaatatggctttagt

SEQ ID NO: 1069032 - DNA, 25 bp, Homo sapien
ccaatacagaatatggctttagttc

SEQ ID NO: 1069033 - DNA, 25 bp, Homo sapien
cccaatacagaatatggctttagtt

SEQ ID NO: 1069034 - DNA, 25 bp, Homo sapien
aacggcaggtcacaaggttttatag

SEQ ID NO: 1069035 - DNA, 25 bp, Homo sapien
aaatgtgagctaccaaaagtgaacc

SEQ ID NO: 1069036 - DNA, 25 bp, Homo sapien
gtatatatctatgggttacacgagc

SEQ ID NO: 1069037 - DNA, 25 bp, Homo sapien
ggaattctacgaaatcatacaagag

SEQ ID NO: 1069038 - DNA, 25 bp, Homo sapien
aatttcagcaaaaggactggcagtg

SEQ ID NO: 1069039 - DNA, 25 bp, Homo sapien
tttcttgaagaaacaacttgaggac

SEQ ID NO: 1069040 - DNA, 25 bp, Homo sapien
gaataaggctacagataactcaggc

SEQ ID NO: 1069041 - DNA, 25 bp, Homo sapien
tcatgtgcaacaggtaggagtcaaa

SEQ ID NO: 1069042 - DNA, 25 bp, Homo sapien
ggcacagtaagaagcatgtaggata

SEQ ID NO: 1069043 - DNA, 25 bp, Homo sapien
aaggagcaactaaccagtcaacagg

SEQ ID NO: 1069044 - DNA, 25 bp, Homo sapien
gagttgtagtgaaacaagcatggca

SEQ ID NO: 1069045 - DNA, 25 bp, Homo sapien
agatgaagactaaaatgcaatgagc

SEQ ID NO: 1069046 - DNA, 25 bp, Homo sapien
ctattctccacactgctgccagagg

SEQ ID NO: 1069047 - DNA, 25 bp, Homo sapien
ccacactgctgccagaggtctcttt

SEQ ID NO: 1069048 - DNA, 25 bp, Homo sapien
ctccacactgctgccagaggtctct

SEQ ID NO: 1069049 - DNA, 25 bp, Homo sapien
ttctccacactgctgccagaggtct

SEQ ID NO: 1069050 - DNA, 25 bp, Homo sapien
gaactagtgattgaaaagcctccta

SEQ ID NO: 1069051 - DNA, 25 bp, Homo sapien
ctagtgattgaaaagcctcctaact

SEQ ID NO: 1069052 - DNA, 25 bp, Homo sapien
ggcttctcagattagttttttctcc

SEQ ID NO: 1069053 - DNA, 25 bp, Homo sapien
ctgaactagtgattgaaaagcctcc

SEQ ID NO: 1069054 - DNA, 25 bp, Homo sapien
gttaacttgctaggctaccagctgc

SEQ ID NO: 1069055 - DNA, 25 bp, Homo sapien
gtcttaaaagtagggctgaagcttc

SEQ ID NO: 1069056 - DNA, 25 bp, Homo sapien
tgaaccttgactgatatgccaggct

SEQ ID NO: 1069057 - DNA, 25 bp, Homo sapien
caatccgttccatgtaccagtacta

SEQ ID NO: 1069058 - DNA, 25 bp, Homo sapien
tattcagttgacagtaccaccattc

SEQ ID NO: 1069059 - DNA, 25 bp, Homo sapien
ggtgtatactgccaactaaccagca

SEQ ID NO: 1069060 - DNA, 25 bp, Homo sapien
taaatgctagtattcctcgacggct

SEQ ID NO: 1069061 - DNA, 25 bp, Homo sapien
gagtatgaccttcttgggagccagt

SEQ ID NO: 1069062 - DNA, 25 bp, Homo sapien
ggagaagggtgtcaaacactgcttc

SEQ ID NO: 1069063 - DNA, 25 bp, Homo sapien
ggcatagagggtacactggtgaata

SEQ ID NO: 1069064 - DNA, 25 bp, Homo sapien
taatatgaccaaaagttgtgctggg

SEQ ID NO: 1069065 - DNA, 25 bp, Homo sapien
tcatggagctttcgttctaacagga

SEQ ID NO: 1069066 - DNA, 25 bp, Homo sapien
tatgtggctcgtttctagactctgc

SEQ ID NO: 1069067 - DNA, 25 bp, Homo sapien
gaagccatgtggtataactgttaca

SEQ ID NO: 1069068 - DNA, 25 bp, Homo sapien
tggaaatactggcatacccaccgta

SEQ ID NO: 1069069 - DNA, 25 bp, Homo sapien
tctgcttcattaatctgcctgttcc

SEQ ID NO: 1069070 - DNA, 25 bp, Homo sapien
taccaaatggtactactacaaacaa

SEQ ID NO: 1069071 - DNA, 25 bp, Homo sapien
caaacaatgtgtgagagttcctttt

SEQ ID NO: 1069072 - DNA, 25 bp, Homo sapien
ttctagttgagaattgctctccggg

SEQ ID NO: 1069073 - DNA, 25 bp, Homo sapien
tatgtagtacaccacaatattatgt

SEQ ID NO: 1069074 - DNA, 25 bp, Homo sapien
ctcatatgatccgaaggcctctgcc

SEQ ID NO: 1069075 - DNA, 25 bp, Homo sapien
ggcctcatatgatccgaaggcctct

SEQ ID NO: 1069076 - DNA, 25 bp, Homo sapien
gcctcatatgatccgaaggcctctg

SEQ ID NO: 1069077 - DNA, 25 bp, Homo sapien
catatgatccgaaggcctctgcctc

SEQ ID NO: 1069078 - DNA, 25 bp, Homo sapien
tgtacctagtacatacttttgttct

SEQ ID NO: 1069079 - DNA, 25 bp, Homo sapien
gctcacataaacatactctcacatt

SEQ ID NO: 1069080 - DNA, 25 bp, Homo sapien
ggcacgttatactttgctcacataa

SEQ ID NO: 1069081 - DNA, 25 bp, Homo sapien
gaaattggtgtgtatttgtcccatc

SEQ ID NO: 1069082 - DNA, 25 bp, Homo sapien
tgtaagcaagtaagatggtcagtgc

SEQ ID NO: 1069083 - DNA, 25 bp, Homo sapien
tcagtgcatataccacgtacaaggc

SEQ ID NO: 1069084 - DNA, 25 bp, Homo sapien
gggaaacatccctcaaccagtgaga

SEQ ID NO: 1069085 - DNA, 25 bp, Homo sapien
cagtgagactacaatggatccctcc

SEQ ID NO: 1069086 - DNA, 25 bp, Homo sapien
tgtgttttctcagcggtagcttgtg

SEQ ID NO: 1069087 - DNA, 25 bp, Homo sapien
tgttctgttacgttttgcaaatgtg

SEQ ID NO: 1069088 - DNA, 25 bp, Homo sapien
tgtgcccgaccacacatattctttt

SEQ ID NO: 1069089 - DNA, 25 bp, Homo sapien
tttcatatattctggacctaagcgt

SEQ ID NO: 1069090 - DNA, 25 bp, Homo sapien
aagaatgctcatatccttattgtag

SEQ ID NO: 1069091 - DNA, 25 bp, Homo sapien
gagcagccactagaattcagataaa

SEQ ID NO: 1069092 - DNA, 25 bp, Homo sapien
caggcgcgtataatcctggatactc

SEQ ID NO: 1069093 - DNA, 25 bp, Homo sapien
tatatactctagagaaattccctgt

SEQ ID NO: 1069094 - DNA, 25 bp, Homo sapien
ctggcccatgagtatttctgtggaa

SEQ ID NO: 1069095 - DNA, 25 bp, Homo sapien
gagtatttctgtggaaaagataaga

SEQ ID NO: 1069096 - DNA, 25 bp, Homo sapien
tattcacttctaaacttccatccaa

SEQ ID NO: 1069097 - DNA, 25 bp, Homo sapien
acgcctggcccatgagtatttctgt

SEQ ID NO: 1069098 - DNA, 25 bp, Homo sapien
acaggttgtgctttgtagaaggcag

SEQ ID NO: 1069099 - DNA, 25 bp, Homo sapien
caggttgtgctttgtagaaggcagt

SEQ ID NO: 1069100 - DNA, 25 bp, Homo sapien
cagaggtcttggttgctcatcaata

SEQ ID NO: 1069101 - DNA, 25 bp, Homo sapien
ccgatgagaatcagtcagaggtctt

SEQ ID NO: 1069102 - DNA, 25 bp, Homo sapien
tattatgaatatcaagaacttcaca

SEQ ID NO: 1069103 - DNA, 25 bp, Homo sapien
tctttggtgaattttacccgatgag

SEQ ID NO: 1069104 - DNA, 25 bp, Homo sapien
cccttcagctagtaagggaaagtat

SEQ ID NO: 1069105 - DNA, 25 bp, Homo sapien
catgagacattcttatcccttcagc

SEQ ID NO: 1069106 - DNA, 25 bp, Homo sapien
catgaaacaggctagccccacattt

SEQ ID NO: 1069107 - DNA, 25 bp, Homo sapien
ttagctggtagtgatactaactcca

SEQ ID NO: 1069108 - DNA, 25 bp, Homo sapien
gatatgagttgattgcatagttacc

SEQ ID NO: 1069109 - DNA, 25 bp, Homo sapien
gagttgattgcatagttaccgcaaa

SEQ ID NO: 1069110 - DNA, 25 bp, Homo sapien
tgatagagtggtgatatgagttgat

SEQ ID NO: 1069111 - DNA, 25 bp, Homo sapien
catagttaccgcaaaataatgtaag

SEQ ID NO: 1069112 - DNA, 25 bp, Homo sapien
tgaagttaagatcgagtccatgctc

SEQ ID NO: 1069113 - DNA, 25 bp, Homo sapien
caactttattatgctttctagtcat

SEQ ID NO: 1069114 - DNA, 25 bp, Homo sapien
tgaatccttgttctgtacatcttgt

SEQ ID NO: 1069115 - DNA, 25 bp, Homo sapien
gctcttcgggcagcagttgaatcct

SEQ ID NO: 1069116 - DNA, 25 bp, Homo sapien
cgtctcattgttccacaatgagtca

SEQ ID NO: 1069117 - DNA, 25 bp, Homo sapien
tttgatgactggcaggcctccttgt

SEQ ID NO: 1069118 - DNA, 25 bp, Homo sapien
gcctccttgttacattacaaacacg

SEQ ID NO: 1069119 - DNA, 25 bp, Homo sapien
caaacacggtatttccgtctcattg

SEQ ID NO: 1069120 - DNA, 25 bp, Homo sapien
aaggtgcgggtacttcagctgaaga

SEQ ID NO: 1069121 - DNA, 25 bp, Homo sapien
tctccacagtttggccgttttctaa

SEQ ID NO: 1069122 - DNA, 25 bp, Homo sapien
aatactgcgctactgttctctccac

SEQ ID NO: 1069123 - DNA, 25 bp, Homo sapien
tcctgcccgacttgcagacagggaa

SEQ ID NO: 1069124 - DNA, 25 bp, Homo sapien
taaaatgtacaccagatgaagactg

SEQ ID NO: 1069125 - DNA, 25 bp, Homo sapien
gactgaaagaagtatagtataccaa

SEQ ID NO: 1069126 - DNA, 25 bp, Homo sapien
ctcttacttagtgccaattacatgt

SEQ ID NO: 1069127 - DNA, 25 bp, Homo sapien
caagacagctctacagtaattaagt

SEQ ID NO: 1069128 - DNA, 25 bp, Homo sapien
ggaagtctgattgtctgttagcttc

SEQ ID NO: 1069129 - DNA, 25 bp, Homo sapien
tgctgttgccttgatcatagtggaa

SEQ ID NO: 1069130 - DNA, 25 bp, Homo sapien
tgttagcttcttgatacatcgttgc

SEQ ID NO: 1069131 - DNA, 25 bp, Homo sapien
ttgtctatctggtgcagatcttgct

SEQ ID NO: 1069132 - DNA, 25 bp, Homo sapien
tctcatatagcccaccaaggcttgt

SEQ ID NO: 1069133 - DNA, 25 bp, Homo sapien
ggatctgttccctggatctacttaa

SEQ ID NO: 1069134 - DNA, 25 bp, Homo sapien
tcagggttaaatgagaaggacctaa

SEQ ID NO: 1069135 - DNA, 25 bp, Homo sapien
aagaattttagtattgctagtcata

SEQ ID NO: 1069136 - DNA, 25 bp, Homo sapien
gagccagtttttgccaaaggtgaaa

SEQ ID NO: 1069137 - DNA, 25 bp, Homo sapien
taaaagagccagttttgcatcccta

SEQ ID NO: 1069138 - DNA, 25 bp, Homo sapien
gattgccaaaaaccgcacagctaag

SEQ ID NO: 1069139 - DNA, 25 bp, Homo sapien
ccagggttgttagactccaaagtct

SEQ ID NO: 1069140 - DNA, 25 bp, Homo sapien
gcgtccagttacatgagccatttca

SEQ ID NO: 1069141 - DNA, 25 bp, Homo sapien
tactggagcataggtgctggaagta

SEQ ID NO: 1069142 - DNA, 25 bp, Homo sapien
taaattgaaactcctgaacaaatgg

SEQ ID NO: 1069143 - DNA, 25 bp, Homo sapien
gagccatttcatcccgaactttaaa

SEQ ID NO: 1069144 - DNA, 25 bp, Homo sapien
tgtgtggaattgtttccctcgcatg

SEQ ID NO: 1069145 - DNA, 25 bp, Homo sapien
ggctcggtgttgctactgtccgatt

SEQ ID NO: 1069146 - DNA, 25 bp, Homo sapien
cccatactccatggctcggtgttgc

SEQ ID NO: 1069147 - DNA, 25 bp, Homo sapien
gaattgtttccctcgcatgtcccat

SEQ ID NO: 1069148 - DNA, 25 bp, Homo sapien
tgtgtggcaaaacaagcgatagccc

SEQ ID NO: 1069149 - DNA, 25 bp, Homo sapien
gtgtggcaaaacaagcgatagccca

SEQ ID NO: 1069150 - DNA, 25 bp, Homo sapien
tgtggcaaaacaagcgatagcccac

SEQ ID NO: 1069151 - DNA, 25 bp, Homo sapien
tggagttaatgtaatgaggcaatga

SEQ ID NO: 1069152 - DNA, 25 bp, Homo sapien
ctctaaattttctagcctattagaa

SEQ ID NO: 1069153 - DNA, 25 bp, Homo sapien
cgtgcaccactgtgctcggattatt

SEQ ID NO: 1069154 - DNA, 25 bp, Homo sapien
cgcctggcctatggtttggagttaa

SEQ ID NO: 1069155 - DNA, 25 bp, Homo sapien
gaattaccagaaccatattgaagag

SEQ ID NO: 1069156 - DNA, 25 bp, Homo sapien
tggtccaggtcaaactacctatgat

SEQ ID NO: 1069157 - DNA, 25 bp, Homo sapien
tgaaatggaccttggtaagcactcc

SEQ ID NO: 1069158 - DNA, 25 bp, Homo sapien
taagcactcctgaagataggtttct

SEQ ID NO: 1069159 - DNA, 25 bp, Homo sapien
atacactggtgtcttccccggcagg

SEQ ID NO: 1069160 - DNA, 25 bp, Homo sapien
gccagaatatgtgttcttgagatgc

SEQ ID NO: 1069161 - DNA, 25 bp, Homo sapien
tgacgataataagctgtaggccaga

SEQ ID NO: 1069162 - DNA, 25 bp, Homo sapien
tccccggcaggatgacgataataag

SEQ ID NO: 1069163 - DNA, 25 bp, Homo sapien
ttgaggaaaaatgcagtcttaagat

SEQ ID NO: 1069164 - DNA, 25 bp, Homo sapien
gaggaaaaatgcagtcttaagatat

SEQ ID NO: 1069165 - DNA, 25 bp, Homo sapien
gaaaaatgcagtcttaagatatcct

SEQ ID NO: 1069166 - DNA, 25 bp, Homo sapien
aaatgcagtcttaagatatccttac

SEQ ID NO: 1069167 - DNA, 25 bp, Homo sapien
cacaagtttgacagagtttgaggag

SEQ ID NO: 1069168 - DNA, 25 bp, Homo sapien
tgtgtagccatacccaaaagtgtgt

SEQ ID NO: 1069169 - DNA, 25 bp, Homo sapien
aaaagtgtgtctcctacacgtttca

SEQ ID NO: 1069170 - DNA, 25 bp, Homo sapien
caagaatattattgatccctccgag

SEQ ID NO: 1069171 - DNA, 25 bp, Homo sapien
gttgaaaagggctgtattaatatta

SEQ ID NO: 1069172 - DNA, 25 bp, Homo sapien
gtattaatattaacagatgctagta

SEQ ID NO: 1069173 - DNA, 25 bp, Homo sapien
atattaacagatgctagtattctcc

SEQ ID NO: 1069174 - DNA, 25 bp, Homo sapien
taacagatgctagtattctccaaca

SEQ ID NO: 1069175 - DNA, 25 bp, Homo sapien
catcggctcccaaaaagatcactgg

SEQ ID NO: 1069176 - DNA, 25 bp, Homo sapien
caccagcaggtggatgagtgacatc

SEQ ID NO: 1069177 - DNA, 25 bp, Homo sapien
ggtggatgagtgacatcggctccca

SEQ ID NO: 1069178 - DNA, 25 bp, Homo sapien
aaagatcactggttgctggaacaca

SEQ ID NO: 1069179 - DNA, 25 bp, Homo sapien
aactcttactgtggcacagtatctg

SEQ ID NO: 1069180 - DNA, 25 bp, Homo sapien
ctggatgatctcctgtcggggtctc

SEQ ID NO: 1069181 - DNA, 25 bp, Homo sapien
tgaactcttactgtggcacagtatc

SEQ ID NO: 1069182 - DNA, 25 bp, Homo sapien
tctcctgtcggggtctctgaactct

SEQ ID NO: 1069183 - DNA, 25 bp, Homo sapien
tcccgataaaagatgatacgagtag

SEQ ID NO: 1069184 - DNA, 25 bp, Homo sapien
attgaataagaagttcccggaccat

SEQ ID NO: 1069185 - DNA, 25 bp, Homo sapien
tctgaaacaccatcccgataaaaga

SEQ ID NO: 1069186 - DNA, 25 bp, Homo sapien
gaaccgagttgacttataaaattga

SEQ ID NO: 1069187 - DNA, 25 bp, Homo sapien
tctgatgagattctaggtaaccaac

SEQ ID NO: 1069188 - DNA, 25 bp, Homo sapien
catagtctgatgagattctaggtaa

SEQ ID NO: 1069189 - DNA, 25 bp, Homo sapien
gtctgatgagattctaggtaaccaa

SEQ ID NO: 1069190 - DNA, 25 bp, Homo sapien
tagtctgatgagattctaggtaacc

SEQ ID NO: 1069191 - DNA, 25 bp, Homo sapien
tgatgcaggcttctcgaattgctag

SEQ ID NO: 1069192 - DNA, 25 bp, Homo sapien
caatgtaggttattccaggttgata

SEQ ID NO: 1069193 - DNA, 25 bp, Homo sapien
taatcgagtgtgatgtctcttctga

SEQ ID NO: 1069194 - DNA, 25 bp, Homo sapien
ggttgatagtctttctccaaactga

SEQ ID NO: 1069195 - DNA, 25 bp, Homo sapien
caacatcttgtaagaggacaccatg

SEQ ID NO: 1069196 - DNA, 25 bp, Homo sapien
aatatttttgccacgtgagtgactg

SEQ ID NO: 1069197 - DNA, 25 bp, Homo sapien
ccttgaattatagtggtgtggacca

SEQ ID NO: 1069198 - DNA, 25 bp, Homo sapien
tgtggaccaaccagcttcactttac

SEQ ID NO: 1069199 - DNA, 25 bp, Homo sapien
tcagagcagactacgcaggtcctag

SEQ ID NO: 1069200 - DNA, 25 bp, Homo sapien
cttgaaatatgacttaagcagtcat

SEQ ID NO: 1069201 - DNA, 25 bp, Homo sapien
tgtatgaatacataggctgatccta

SEQ ID NO: 1069202 - DNA, 25 bp, Homo sapien
taggctgatcctacatttcactact

SEQ ID NO: 1069203 - DNA, 25 bp, Homo sapien
gttgttccagctgggatattgccac

SEQ ID NO: 1069204 - DNA, 25 bp, Homo sapien
gtatcaactgttgttccagctggga

SEQ ID NO: 1069205 - DNA, 25 bp, Homo sapien
gggtgtgtaatgtctgtatcaactg

SEQ ID NO: 1069206 - DNA, 25 bp, Homo sapien
gaggtaaaaatcgaactcatatggg

SEQ ID NO: 1069207 - DNA, 25 bp, Homo sapien
taaagatgcatatgctaaaggaaca

SEQ ID NO: 1069208 - DNA, 25 bp, Homo sapien
aaaatacacgtaagaatgacagttc

SEQ ID NO: 1069209 - DNA, 25 bp, Homo sapien
taagggcctgttttagggagattca

SEQ ID NO: 1069210 - DNA, 25 bp, Homo sapien
ggaacaatcaggtactttcacattt

SEQ ID NO: 1069211 - DNA, 25 bp, Homo sapien
tgtttcataagtctcagaggcgctc

SEQ ID NO: 1069212 - DNA, 25 bp, Homo sapien
aactcatgagcaaaagcggtctgcc

SEQ ID NO: 1069213 - DNA, 25 bp, Homo sapien
ctctactgggtacagcattcttggc

SEQ ID NO: 1069214 - DNA, 25 bp, Homo sapien
gactacaatgttccttgggaagaac

SEQ ID NO: 1069215 - DNA, 25 bp, Homo sapien
ggattatgaccttcagctccatcta

SEQ ID NO: 1069216 - DNA, 25 bp, Homo sapien
aaattcattcagtggctgggcttgg

SEQ ID NO: 1069217 - DNA, 25 bp, Homo sapien
gctgtaaaggatatggtttcattct

SEQ ID NO: 1069218 - DNA, 25 bp, Homo sapien
tgcacccagccccaatagaattttt

SEQ ID NO: 1069219 - DNA, 25 bp, Homo sapien
gcagtatatatctctctgtggttgg

SEQ ID NO: 1069220 - DNA, 25 bp, Homo sapien
atacaataagttggtaattacagcc

SEQ ID NO: 1069221 - DNA, 25 bp, Homo sapien
ttacagccatcctatagtgctatag

SEQ ID NO: 1069222 - DNA, 25 bp, Homo sapien
ggatatctatgcctcaaacattgtg

SEQ ID NO: 1069223 - DNA, 25 bp, Homo sapien
tacagcgtacgtaagtgtggcagag

SEQ ID NO: 1069224 - DNA, 25 bp, Homo sapien
gatagtgtgaaggacgactggtacc

SEQ ID NO: 1069225 - DNA, 25 bp, Homo sapien
gctaccaggtgagcataatacgctg

SEQ ID NO: 1069226 - DNA, 25 bp, Homo sapien
tagaaacagatcgtgtacagcgtac

SEQ ID NO: 1069227 - DNA, 25 bp, Homo sapien
atcctaccatgcagacaatattggg

SEQ ID NO: 1069228 - DNA, 25 bp, Homo sapien
cgctaatagcttgtggaacttgaaa

SEQ ID NO: 1069229 - DNA, 25 bp, Homo sapien
ggatcactgactccgctaatagctt

SEQ ID NO: 1069230 - DNA, 25 bp, Homo sapien
tgactccgctaatagcttgtggaac

SEQ ID NO: 1069231 - DNA, 25 bp, Homo sapien
gatctcgcccattgctttgtcctga

SEQ ID NO: 1069232 - DNA, 25 bp, Homo sapien
taagcgaagtacattgtgcgtaagg

SEQ ID NO: 1069233 - DNA, 25 bp, Homo sapien
tgtgcgtaaggtatcttggtgaatc

SEQ ID NO: 1069234 - DNA, 25 bp, Homo sapien
ggtgaatctgtacagccttggcaag

SEQ ID NO: 1069235 - DNA, 25 bp, Homo sapien
caattgcgatacttcctataggaga

SEQ ID NO: 1069236 - DNA, 25 bp, Homo sapien
gcaaagatagttgtgctgccaagca

SEQ ID NO: 1069237 - DNA, 25 bp, Homo sapien
gagaccgcacaaaaagcagttggct

SEQ ID NO: 1069238 - DNA, 25 bp, Homo sapien
ggagagacgcactctcacagaaagt

SEQ ID NO: 1069239 - DNA, 25 bp, Homo sapien
acttctgacaggttttatatttata

SEQ ID NO: 1069240 - DNA, 25 bp, Homo sapien
cagagagaaagttacaacttctgac

SEQ ID NO: 1069241 - DNA, 25 bp, Homo sapien
gagaaagttacaacttctgacaggt

SEQ ID NO: 1069242 - DNA, 25 bp, Homo sapien
gacaggttttatatttatagcagct

SEQ ID NO: 1069243 - DNA, 25 bp, Homo sapien
ttccatgtataacccatagaaacag

SEQ ID NO: 1069244 - DNA, 25 bp, Homo sapien
tttccatgtataacccatagaaaca

SEQ ID NO: 1069245 - DNA, 25 bp, Homo sapien
aatttccatgtataacccatagaaa

SEQ ID NO: 1069246 - DNA, 25 bp, Homo sapien
agaatttccatgtataacccataga

SEQ ID NO: 1069247 - DNA, 25 bp, Homo sapien
tccggtgatatacctgtctcagcct

SEQ ID NO: 1069248 - DNA, 25 bp, Homo sapien
gagctccggtgatatacctgtctca

SEQ ID NO: 1069249 - DNA, 25 bp, Homo sapien
gctccggtgatatacctgtctcagc

SEQ ID NO: 1069250 - DNA, 25 bp, Homo sapien
ctgagctccggtgatatacctgtct

SEQ ID NO: 1069251 - DNA, 25 bp, Homo sapien
tatactggtgatacattagcaaaag

SEQ ID NO: 1069252 - DNA, 25 bp, Homo sapien
tattcaagttggactcatttaggca

SEQ ID NO: 1069253 - DNA, 25 bp, Homo sapien
gtaaatgaaaatgggcatctagcca

SEQ ID NO: 1069254 - DNA, 25 bp, Homo sapien
tcaataaacacaatctatttgcaaa

SEQ ID NO: 1069255 - DNA, 25 bp, Homo sapien
agggctccactctagcatatatgag

SEQ ID NO: 1069256 - DNA, 25 bp, Homo sapien
gcaatgctgactagtgtaagagcac

SEQ ID NO: 1069257 - DNA, 25 bp, Homo sapien
catagagaaagggtatctacagtca

SEQ ID NO: 1069258 - DNA, 25 bp, Homo sapien
tctacagtcattccctaaagtttcc

SEQ ID NO: 1069259 - DNA, 25 bp, Homo sapien
tgagaatccctgtgctggaaagcag

SEQ ID NO: 1069260 - DNA, 25 bp, Homo sapien
gaatacacaagcaaacactaggcag

SEQ ID NO: 1069261 - DNA, 25 bp, Homo sapien
ctgtggagaagctagcttggaaact

SEQ ID NO: 1069262 - DNA, 25 bp, Homo sapien
tctttcatgactctgtcagaaggcc

SEQ ID NO: 1069263 - DNA, 25 bp, Homo sapien
tttccttgaacacagagatccgctg

SEQ ID NO: 1069264 - DNA, 25 bp, Homo sapien
tccttgaacacagagatccgctgcc

SEQ ID NO: 1069265 - DNA, 25 bp, Homo sapien
acagagatccgctgccagtcattcc

SEQ ID NO: 1069266 - DNA, 25 bp, Homo sapien
tgaacacagagatccgctgccagtc

SEQ ID NO: 1069267 - DNA, 25 bp, Homo sapien
ctaattcctggtctgcaatccatct

SEQ ID NO: 1069268 - DNA, 25 bp, Homo sapien
tctgcaatccatctaaatacttcgg

SEQ ID NO: 1069269 - DNA, 25 bp, Homo sapien
ccatcactggcatgcttagcgctca

SEQ ID NO: 1069270 - DNA, 25 bp, Homo sapien
catcactggcatgcttagcgctcac

SEQ ID NO: 1069271 - DNA, 25 bp, Homo sapien
taatgcagcatacaaggttactgag

SEQ ID NO: 1069272 - DNA, 25 bp, Homo sapien
taatgactaattagggccgggtgtg

SEQ ID NO: 1069273 - DNA, 25 bp, Homo sapien
taactcaagagtctacgccctgaca

SEQ ID NO: 1069274 - DNA, 25 bp, Homo sapien
gcaaaattgccctctggtaggtaac

SEQ ID NO: 1069275 - DNA, 25 bp, Homo sapien
tattcactaggaaactggactgtct

SEQ ID NO: 1069276 - DNA, 25 bp, Homo sapien
tgatactcagggattcaatcaactt

SEQ ID NO: 1069277 - DNA, 25 bp, Homo sapien
agtctttatacctggctctccctag

SEQ ID NO: 1069278 - DNA, 25 bp, Homo sapien
tatccataatcttgatcttggccag

SEQ ID NO: 1069279 - DNA, 25 bp, Homo sapien
caagctgtactgatgtcaggtagca

SEQ ID NO: 1069280 - DNA, 25 bp, Homo sapien
caagtacttcactgcggtcaagctg

SEQ ID NO: 1069281 - DNA, 25 bp, Homo sapien
ttgtggagccaaccagttaaaacag

SEQ ID NO: 1069282 - DNA, 25 bp, Homo sapien
tctaaagaggtgaactaaacatgaa

SEQ ID NO: 1069283 - DNA, 25 bp, Homo sapien
gttttaggcactaaatatcagagta

SEQ ID NO: 1069284 - DNA, 25 bp, Homo sapien
tatcagagtaatctccctctctagt

SEQ ID NO: 1069285 - DNA, 25 bp, Homo sapien
gcataccgccaatttttggaaagaa

SEQ ID NO: 1069286 - DNA, 25 bp, Homo sapien
aaagcaaggctctaatgaccaacac

SEQ ID NO: 1069287 - DNA, 25 bp, Homo sapien
gaactgggtcggactgtctatgcca

SEQ ID NO: 1069288 - DNA, 25 bp, Homo sapien
actatgttgatagcaatgcctggcc

SEQ ID NO: 1069289 - DNA, 25 bp, Homo sapien
gatcaaactgtatccatgaactggg

SEQ ID NO: 1069290 - DNA, 25 bp, Homo sapien
tggaccctgggctaagaaatgagaa

SEQ ID NO: 1069291 - DNA, 25 bp, Homo sapien
taatctaactcaaaactgcagctgc

SEQ ID NO: 1069292 - DNA, 25 bp, Homo sapien
tgaatgcgtccataccctgtgtacc

SEQ ID NO: 1069293 - DNA, 25 bp, Homo sapien
gaattgtttacactccctgcagtgg

SEQ ID NO: 1069294 - DNA, 25 bp, Homo sapien
catgtagcaaaagtgcctgaaggca

SEQ ID NO: 1069295 - DNA, 25 bp, Homo sapien
gcagcaattatctagtgggagcagt

SEQ ID NO: 1069296 - DNA, 25 bp, Homo sapien
aatgacaaccaaatccaaggcctgg

SEQ ID NO: 1069297 - DNA, 25 bp, Homo sapien
tatgaatgcatccacgtactagtcc

SEQ ID NO: 1069298 - DNA, 25 bp, Homo sapien
tgcaatacaaataggcacacacggt

SEQ ID NO: 1069299 - DNA, 25 bp, Homo sapien
tagaactctccagtaggcagaatgg

SEQ ID NO: 1069300 - DNA, 25 bp, Homo sapien
gaacatttcgtgacagtttggctca

SEQ ID NO: 1069301 - DNA, 25 bp, Homo sapien
cttcaaactgaagctaagcaacact

SEQ ID NO: 1069302 - DNA, 25 bp, Homo sapien
aaaaaagagtagtggttctgtcaca

SEQ ID NO: 1069303 - DNA, 25 bp, Homo sapien
agtgtttggcaccaccggttgctag

SEQ ID NO: 1069304 - DNA, 25 bp, Homo sapien
tgtttggcaccaccggttgctaggc

SEQ ID NO: 1069305 - DNA, 25 bp, Homo sapien
cagtgtttggcaccaccggttgcta

SEQ ID NO: 1069306 - DNA, 25 bp, Homo sapien
tttggcaccaccggttgctaggcaa

SEQ ID NO: 1069307 - DNA, 25 bp, Homo sapien
tgtctccagggacgcgtgcctgttg

SEQ ID NO: 1069308 - DNA, 25 bp, Homo sapien
ccagggacgcgtgcctgttggcact

SEQ ID NO: 1069309 - DNA, 25 bp, Homo sapien
ttctgtctccagggacgcgtgcctg

SEQ ID NO: 1069310 - DNA, 25 bp, Homo sapien
tcttccccaggctgcgggccagtcc

SEQ ID NO: 1069311 - DNA, 25 bp, Homo sapien
tccctcccgtccccaggcggacaca

SEQ ID NO: 1069312 - DNA, 25 bp, Homo sapien
ttgtgtgaggtattaactaagtttc

SEQ ID NO: 1069313 - DNA, 25 bp, Homo sapien
tgtgtgaggtattaactaagtttcc

SEQ ID NO: 1069314 - DNA, 25 bp, Homo sapien
ctttgtgtgaggtattaactaagtt

SEQ ID NO: 1069315 - DNA, 25 bp, Homo sapien
aaacccctaggcctgttcacagaca

SEQ ID NO: 1069316 - DNA, 25 bp, Homo sapien
ggtcagaaacccctaggcctgttca

SEQ ID NO: 1069317 - DNA, 25 bp, Homo sapien
tcagaaacccctaggcctgttcaca

SEQ ID NO: 1069318 - DNA, 25 bp, Homo sapien
cagaaacccctaggcctgttcacag

SEQ ID NO: 1069319 - DNA, 25 bp, Homo sapien
gaagcgccgacttggcttgacgctc

SEQ ID NO: 1069320 - DNA, 25 bp, Homo sapien
gctggaagcgccgacttggcttgac

SEQ ID NO: 1069321 - DNA, 25 bp, Homo sapien
tggaagcgccgacttggcttgacgc

SEQ ID NO: 1069322 - DNA, 25 bp, Homo sapien
gcagctggaagcgccgacttggctt

SEQ ID NO: 1069323 - DNA, 25 bp, Homo sapien
ctggcggatctgatgggaagcatct

SEQ ID NO: 1069324 - DNA, 25 bp, Homo sapien
gatgggaagcatctcgctgcagctg

SEQ ID NO: 1069325 - DNA, 25 bp, Homo sapien
tgttggtctcgttgcggagcacccg

SEQ ID NO: 1069326 - DNA, 25 bp, Homo sapien
tgggcattggtggatagcaggtagc

SEQ ID NO: 1069327 - DNA, 25 bp, Homo sapien
agggcatcgatctcggcatctaaat

SEQ ID NO: 1069328 - DNA, 25 bp, Homo sapien
cggttgacagtatcaatcctctcca

SEQ ID NO: 1069329 - DNA, 25 bp, Homo sapien
agcatctccttccaccggttgacag

SEQ ID NO: 1069330 - DNA, 25 bp, Homo sapien
caccagtcgagtcctgttgtcatgt

SEQ ID NO: 1069331 - DNA, 25 bp, Homo sapien
ttcgggaggccgagttggatggaac

SEQ ID NO: 1069332 - DNA, 25 bp, Homo sapien
ctagaaaagagggcgcggccgggca

SEQ ID NO: 1069333 - DNA, 25 bp, Homo sapien
cgggaggccgagttggatggaacac

SEQ ID NO: 1069334 - DNA, 25 bp, Homo sapien
ccgagttggatggaacacttgaggt

SEQ ID NO: 1069335 - DNA, 25 bp, Homo sapien
gatgacctccacctctttatgcagc

SEQ ID NO: 1069336 - DNA, 25 bp, Homo sapien
ttcttggtggcctcgatgacctcca

SEQ ID NO: 1069337 - DNA, 25 bp, Homo sapien
gggtccttcaccacatcaatgtctc

SEQ ID NO: 1069338 - DNA, 25 bp, Homo sapien
ggctttcccgcagggtcaggcactc

SEQ ID NO: 1069339 - DNA, 25 bp, Homo sapien
aaaatcgagtggaaatgctgacccc

SEQ ID NO: 1069340 - DNA, 25 bp, Homo sapien
ccgcaggatgaaaatcgagtggaaa

SEQ ID NO: 1069341 - DNA, 25 bp, Homo sapien
agtggaaatgctgacccccatgagc

SEQ ID NO: 1069342 - DNA, 25 bp, Homo sapien
caggatgaaaatcgagtggaaatgc

SEQ ID NO: 1069343 - DNA, 25 bp, Homo sapien
cctctgtcgatctctagtgtctcca

SEQ ID NO: 1069344 - DNA, 25 bp, Homo sapien
ccccgatggtcggagttgagctgct

SEQ ID NO: 1069345 - DNA, 25 bp, Homo sapien
catcaggtacacgtgtggggtcaac

SEQ ID NO: 1069346 - DNA, 25 bp, Homo sapien
caaccttcagcgagatgtttgggga

SEQ ID NO: 1069347 - DNA, 25 bp, Homo sapien
ctccgctcggtccttgttgaaccga

SEQ ID NO: 1069348 - DNA, 25 bp, Homo sapien
tcggtccttgttgaaccgactgaag

SEQ ID NO: 1069349 - DNA, 25 bp, Homo sapien
gctcggtccttgttgaaccgactga

SEQ ID NO: 1069350 - DNA, 25 bp, Homo sapien
gtccttgttgaaccgactgaagtca

SEQ ID NO: 1069351 - DNA, 25 bp, Homo sapien
tctgggcttcaagctcgttgttggt

SEQ ID NO: 1069352 - DNA, 25 bp, Homo sapien
ctgaaggcaaattccgttgcaactc

SEQ ID NO: 1069353 - DNA, 25 bp, Homo sapien
ggcaaattccgttgcaactctctgg

SEQ ID NO: 1069354 - DNA, 25 bp, Homo sapien
cttgagctcactgtacactttctcc

SEQ ID NO: 1069355 - DNA, 25 bp, Homo sapien
ttgggccggtaggttctggcctcta

SEQ ID NO: 1069356 - DNA, 25 bp, Homo sapien
tggtcccggcagagttccacgttgg

SEQ ID NO: 1069357 - DNA, 25 bp, Homo sapien
tcaggagctttgtgcgcagatcctc

SEQ ID NO: 1069358 - DNA, 25 bp, Homo sapien
tctagccgggtatgggacagcttca

SEQ ID NO: 1069359 - DNA, 25 bp, Homo sapien
cctcgtcggtgaggccgtactgtgc

SEQ ID NO: 1069360 - DNA, 25 bp, Homo sapien
tctagctggtgaacctcgtcggtga

SEQ ID NO: 1069361 - DNA, 25 bp, Homo sapien
gcgatggttgcctctagctggtgaa

SEQ ID NO: 1069362 - DNA, 25 bp, Homo sapien
agggcagcgatggttgcctctagct

SEQ ID NO: 1069363 - DNA, 25 bp, Homo sapien
cagcaagaggccccatttgtgggca

SEQ ID NO: 1069364 - DNA, 25 bp, Homo sapien
tccttccgcccactcccgagaccta

SEQ ID NO: 1069365 - DNA, 25 bp, Homo sapien
agccagcaagaggccccatttgtgg

SEQ ID NO: 1069366 - DNA, 25 bp, Homo sapien
ctgggctgcgtgcatagccttcagt

SEQ ID NO: 1069367 - DNA, 25 bp, Homo sapien
cttgcacagggcgtccagtgcgtcc

SEQ ID NO: 1069368 - DNA, 25 bp, Homo sapien
tgtggtacgtgtgaaggtgtccacc

SEQ ID NO: 1069369 - DNA, 25 bp, Homo sapien
tgagtggactcagggtgctatttgt

SEQ ID NO: 1069370 - DNA, 25 bp, Homo sapien
tgtgtccatgcacttggtgtccagc

SEQ ID NO: 1069371 - DNA, 25 bp, Homo sapien
ctccttccattgcccacccaaccct

SEQ ID NO: 1069372 - DNA, 25 bp, Homo sapien
tccttccattgcccacccaaccctg

SEQ ID NO: 1069373 - DNA, 25 bp, Homo sapien
ccttccattgcccacccaaccctgc

SEQ ID NO: 1069374 - DNA, 25 bp, Homo sapien
gggtccggctccagactctggacat

SEQ ID NO: 1069375 - DNA, 25 bp, Homo sapien
actgacgtcaggtcgacggtgtcgt

SEQ ID NO: 1069376 - DNA, 25 bp, Homo sapien
gactctggacatgacgcaggactga

SEQ ID NO: 1069377 - DNA, 25 bp, Homo sapien
tcgtgggcctcgtagaaggagccca

SEQ ID NO: 1069378 - DNA, 25 bp, Homo sapien
aacggtcgtctaagctgaaagcgca

SEQ ID NO: 1069379 - DNA, 25 bp, Homo sapien
gaacgggctggtggtatactgactc

SEQ ID NO: 1069380 - DNA, 25 bp, Homo sapien
ggctgcgtccagataaaacggtcgt

SEQ ID NO: 1069381 - DNA, 25 bp, Homo sapien
tctataaggccggagatcgcactgg

SEQ ID NO: 1069382 - DNA, 25 bp, Homo sapien
gccttaggatctcagcaatgggatt

SEQ ID NO: 1069383 - DNA, 25 bp, Homo sapien
gattacagttgtggctacggcaccc

SEQ ID NO: 1069384 - DNA, 25 bp, Homo sapien
ggacttaagcgatgatccttccacc

SEQ ID NO: 1069385 - DNA, 25 bp, Homo sapien
tatgagcctacatcatggtttgatc

SEQ ID NO: 1069386 - DNA, 25 bp, Homo sapien
gaggatgagagcctcctgctcacct

SEQ ID NO: 1069387 - DNA, 25 bp, Homo sapien
agaggagggaggatgagagcctcct

SEQ ID NO: 1069388 - DNA, 25 bp, Homo sapien
ctgctcaccttttattttagtttat

SEQ ID NO: 1069389 - DNA, 25 bp, Homo sapien
ggagggaggatgagagcctcctgct

SEQ ID NO: 1069390 - DNA, 25 bp, Homo sapien
gagccatgtccacctcgtcaaaggc

SEQ ID NO: 1069391 - DNA, 25 bp, Homo sapien
gcctccttggctagcagggactgca

SEQ ID NO: 1069392 - DNA, 25 bp, Homo sapien
caaaggcctccttggctagcaggga

SEQ ID NO: 1069393 - DNA, 25 bp, Homo sapien
ccttggctagcagggactgcaccag

SEQ ID NO: 1069394 - DNA, 25 bp, Homo sapien
tgaagacagtgactactccagcacc

SEQ ID NO: 1069395 - DNA, 25 bp, Homo sapien
gctcaaagacatcgcgacatttggg

SEQ ID NO: 1069396 - DNA, 25 bp, Homo sapien
ggagatgccagccacccgcatggca

SEQ ID NO: 1069397 - DNA, 25 bp, Homo sapien
tggacactgctataggccagggaga

SEQ ID NO: 1069398 - DNA, 25 bp, Homo sapien
tgctgtcacagaagccctgctgcag

SEQ ID NO: 1069399 - DNA, 25 bp, Homo sapien
ggaggaggagacctgctgtcacaga

SEQ ID NO: 1069400 - DNA, 25 bp, Homo sapien
tcacagaagccctgctgcagaagag

SEQ ID NO: 1069401 - DNA, 25 bp, Homo sapien
gaggagacctgctgtcacagaagcc

SEQ ID NO: 1069402 - DNA, 25 bp, Homo sapien
gcaggatggcgccattgtaacccag

SEQ ID NO: 1069403 - DNA, 25 bp, Homo sapien
gcttgagaaagtgctcgctggaaga

SEQ ID NO: 1069404 - DNA, 25 bp, Homo sapien
acccagggaggaggcgtgtgtcagc

SEQ ID NO: 1069405 - DNA, 25 bp, Homo sapien
gcatccaagacggactgggcatcac

SEQ ID NO: 1069406 - DNA, 25 bp, Homo sapien
gaccctgagagccttgaaacataga

SEQ ID NO: 1069407 - DNA, 25 bp, Homo sapien
gaaggtttacagtttgcggcaatgc

SEQ ID NO: 1069408 - DNA, 25 bp, Homo sapien
tccctagggtctgcaattgaggaag

SEQ ID NO: 1069409 - DNA, 25 bp, Homo sapien
atttcagggaggtcagagctagcag

SEQ ID NO: 1069410 - DNA, 25 bp, Homo sapien
ttcttcaggcggctggagtatggac

SEQ ID NO: 1069411 - DNA, 25 bp, Homo sapien
cctggtctagaagctctccaatctt

SEQ ID NO: 1069412 - DNA, 25 bp, Homo sapien
gagtatggacgctcctccatgccca

SEQ ID NO: 1069413 - DNA, 25 bp, Homo sapien
ggtcaccgatgcctggtctagaagc

SEQ ID NO: 1069414 - DNA, 25 bp, Homo sapien
cacaacgcccagtatagatgctaga

SEQ ID NO: 1069415 - DNA, 25 bp, Homo sapien
gattcaactccttaagcagacaggg

SEQ ID NO: 1069416 - DNA, 25 bp, Homo sapien
aacgttagcaactctctgacagggc

SEQ ID NO: 1069417 - DNA, 25 bp, Homo sapien
tctacagttagaccacctgggctca

SEQ ID NO: 1069418 - DNA, 25 bp, Homo sapien
gtgggtaccgactcaaaggcagcaa

SEQ ID NO: 1069419 - DNA, 25 bp, Homo sapien
tccatgcagcgtaggaagcagtaga

SEQ ID NO: 1069420 - DNA, 25 bp, Homo sapien
gtccccaccaagtgagatggaataa

SEQ ID NO: 1069421 - DNA, 25 bp, Homo sapien
tattgaaggcagaagggatctcagg

SEQ ID NO: 1069422 - DNA, 25 bp, Homo sapien
gccacactcaaggaagcgcagggtt

SEQ ID NO: 1069423 - DNA, 25 bp, Homo sapien
gaccctgctaggatgcgcttgctgg

SEQ ID NO: 1069424 - DNA, 25 bp, Homo sapien
caggtgtgacctagatcagctggat

SEQ ID NO: 1069425 - DNA, 25 bp, Homo sapien
gtactcagtcagctccacaatgcag

SEQ ID NO: 1069426 - DNA, 25 bp, Homo sapien
caaaaactgtttattgcgacttcca

SEQ ID NO: 1069427 - DNA, 25 bp, Homo sapien
gaaacaagagcgatgacggggaccc

SEQ ID NO: 1069428 - DNA, 25 bp, Homo sapien
aggtgtcgagagggcagaatgtaca

SEQ ID NO: 1069429 - DNA, 25 bp, Homo sapien
ctcaagggaggcgtccagccagttt

SEQ ID NO: 1069430 - DNA, 25 bp, Homo sapien
acccgtgggtatcggcaggcctcaa

SEQ ID NO: 1069431 - DNA, 25 bp, Homo sapien
ctggggtcctgaggcaccaactctc

SEQ ID NO: 1069432 - DNA, 25 bp, Homo sapien
gcagggctgcgtttcatccacccac

SEQ ID NO: 1069433 - DNA, 25 bp, Homo sapien
tctgccggtccgttgggaacctagc

SEQ ID NO: 1069434 - DNA, 25 bp, Homo sapien
tttattgagacctctgatcgctcac

SEQ ID NO: 1069435 - DNA, 25 bp, Homo sapien
gatggggttttctgatatctcaggc

SEQ ID NO: 1069436 - DNA, 25 bp, Homo sapien
tggggttttctgatatctcaggcca

SEQ ID NO: 1069437 - DNA, 25 bp, Homo sapien
gggttttctgatatctcaggccaga

SEQ ID NO: 1069438 - DNA, 25 bp, Homo sapien
ttttagtacagacaatgtctcccta

SEQ ID NO: 1069439 - DNA, 25 bp, Homo sapien
tgtggccccatgacccagctctggg

SEQ ID NO: 1069440 - DNA, 25 bp, Homo sapien
catccaggctgtggccccatgaccc

SEQ ID NO: 1069441 - DNA, 25 bp, Homo sapien
ctgggctccatcatccaggctgtgg

SEQ ID NO: 1069442 - DNA, 25 bp, Homo sapien
aggctgtggccccatgacccagctc

SEQ ID NO: 1069443 - DNA, 25 bp, Homo sapien
aggccacgctccctgacaggcgacc

SEQ ID NO: 1069444 - DNA, 25 bp, Homo sapien
cctgacaggcgaccacggctctgct

SEQ ID NO: 1069445 - DNA, 25 bp, Homo sapien
cgctccctgacaggcgaccacggct

SEQ ID NO: 1069446 - DNA, 25 bp, Homo sapien
gacaggcgaccacggctctgctcat

SEQ ID NO: 1069447 - DNA, 25 bp, Homo sapien
gagtccccttggcaaggacagcctc

SEQ ID NO: 1069448 - DNA, 25 bp, Homo sapien
tagcagagtccccttggcaaggaca

SEQ ID NO: 1069449 - DNA, 25 bp, Homo sapien
tcttagcagagtccccttggcaagg

SEQ ID NO: 1069450 - DNA, 25 bp, Homo sapien
actcctcttagcagagtccccttgg

SEQ ID NO: 1069451 - DNA, 25 bp, Homo sapien
cctctttttacagagggtacatcct

SEQ ID NO: 1069452 - DNA, 25 bp, Homo sapien
gacacattgtagtgtttgccaggaa

SEQ ID NO: 1069453 - DNA, 25 bp, Homo sapien
ggagccagtcatgccggaaacactg

SEQ ID NO: 1069454 - DNA, 25 bp, Homo sapien
gaattgctagctgtagtgtgacaca

SEQ ID NO: 1069455 - DNA, 25 bp, Homo sapien
ctattactagtattagtgctatctg

SEQ ID NO: 1069456 - DNA, 25 bp, Homo sapien
ttaggtaaaatgctagtgtttagca

SEQ ID NO: 1069457 - DNA, 25 bp, Homo sapien
taaaatgctagtgtttagcatagtg

SEQ ID NO: 1069458 - DNA, 25 bp, Homo sapien
tgtttactattactagtattagtgc

SEQ ID NO: 1069459 - DNA, 25 bp, Homo sapien
tttcgggaaactgcggatgtcattg

SEQ ID NO: 1069460 - DNA, 25 bp, Homo sapien
ggaaactgcggatgtcattgccaag

SEQ ID NO: 1069461 - DNA, 25 bp, Homo sapien
tgactttcgggaaactgcggatgtc

SEQ ID NO: 1069462 - DNA, 25 bp, Homo sapien
cgggaaactgcggatgtcattgcca

SEQ ID NO: 1069463 - DNA, 25 bp, Homo sapien
aaccagttgattctgaagagtcacc

SEQ ID NO: 1069464 - DNA, 25 bp, Homo sapien
cagtgcaatgaacttggtctgggac

SEQ ID NO: 1069465 - DNA, 25 bp, Homo sapien
gtacagtttactctaggccaggaca

SEQ ID NO: 1069466 - DNA, 25 bp, Homo sapien
ggaaaccattggtcacacctgccag

SEQ ID NO: 1069467 - DNA, 25 bp, Homo sapien
tgcccagccagaaagttgtttatat

SEQ ID NO: 1069468 - DNA, 25 bp, Homo sapien
gggctcaggtgaccacttccgaccc

SEQ ID NO: 1069469 - DNA, 25 bp, Homo sapien
ccagaaagttgtttatattgattca

SEQ ID NO: 1069470 - DNA, 25 bp, Homo sapien
tctttctttatgacttgccctccct

SEQ ID NO: 1069471 - DNA, 25 bp, Homo sapien
ggtctctcggctgcggtcgcgaacc

SEQ ID NO: 1069472 - DNA, 25 bp, Homo sapien
cgctggcgcgtaccaagttcgaggc

SEQ ID NO: 1069473 - DNA, 25 bp, Homo sapien
gcccgcgagtctcggaggtgccggt

SEQ ID NO: 1069474 - DNA, 25 bp, Homo sapien
ccggcaagtagcgactcggaggcgg

SEQ ID NO: 1069475 - DNA, 25 bp, Homo sapien
ggcggcggcggccagtggccaggac

SEQ ID NO: 1069476 - DNA, 25 bp, Homo sapien
agtggccaggacaggggtcccgcgg

SEQ ID NO: 1069477 - DNA, 25 bp, Homo sapien
gcggcggcggccagtggccaggaca

SEQ ID NO: 1069478 - DNA, 25 bp, Homo sapien
ccaggacaggggtcccgcggcgcat

SEQ ID NO: 1069479 - DNA, 25 bp, Homo sapien
gctgcggcgtcactgggggtctcgg

SEQ ID NO: 1069480 - DNA, 25 bp, Homo sapien
ggctgcggcgtcactgggggtctcg

SEQ ID NO: 1069481 - DNA, 25 bp, Homo sapien
ctgcggcgtcactgggggtctcggg

SEQ ID NO: 1069482 - DNA, 25 bp, Homo sapien
cgcccccagctccgcacgcgggccg

SEQ ID NO: 1069483 - DNA, 25 bp, Homo sapien
gctccgcacgcgggccgctctccat

SEQ ID NO: 1069484 - DNA, 25 bp, Homo sapien
cccatctcgcctccgcgtggctccc

SEQ ID NO: 1069485 - DNA, 25 bp, Homo sapien
tctcgcctccgcgtggctcccggca

SEQ ID NO: 1069486 - DNA, 25 bp, Homo sapien
catctcgcctccgcgtggctcccgg

SEQ ID NO: 1069487 - DNA, 25 bp, Homo sapien
ccccatctcgcctccgcgtggctcc

SEQ ID NO: 1069488 - DNA, 25 bp, Homo sapien
aaagaccaacacaagagaggagaga

SEQ ID NO: 1069489 - DNA, 25 bp, Homo sapien
gaaagaccaacacaagagaggagag

SEQ ID NO: 1069490 - DNA, 25 bp, Homo sapien
tgaaagaccaacacaagagaggaga

SEQ ID NO: 1069491 - DNA, 25 bp, Homo sapien
ctgaaagaccaacacaagagaggag

SEQ ID NO: 1069492 - DNA, 25 bp, Homo sapien
ccagtgggagctgcttagagctagt

SEQ ID NO: 1069493 - DNA, 25 bp, Homo sapien
ggtgggtcctctgctctttgcttca

SEQ ID NO: 1069494 - DNA, 25 bp, Homo sapien
tcgaggaggtctggcatcccgtggg

SEQ ID NO: 1069495 - DNA, 25 bp, Homo sapien
gctagtggcattcttcatggcagga

SEQ ID NO: 1069496 - DNA, 25 bp, Homo sapien
caggtacttggcccgctcttctcgc

SEQ ID NO: 1069497 - DNA, 25 bp, Homo sapien
tacttggcccgctcttctcgccgct

SEQ ID NO: 1069498 - DNA, 25 bp, Homo sapien
gcccgctcttctcgccgctcctttg

SEQ ID NO: 1069499 - DNA, 25 bp, Homo sapien
tcttctcgccgctcctttgccagct

SEQ ID NO: 1069500 - DNA, 25 bp, Homo sapien
agcagttctcctatctcagtctccc

SEQ ID NO: 1069501 - DNA, 25 bp, Homo sapien
acattggtcaggctagtctcaaact

SEQ ID NO: 1069502 - DNA, 25 bp, Homo sapien
attggtcaggctagtctcaaactcc

SEQ ID NO: 1069503 - DNA, 25 bp, Homo sapien
cagttctcctatctcagtctcccga

SEQ ID NO: 1069504 - DNA, 25 bp, Homo sapien
gcttgagtgcaagatccccatctga

SEQ ID NO: 1069505 - DNA, 25 bp, Homo sapien
tgggtctgaatgtcagctactctac

SEQ ID NO: 1069506 - DNA, 25 bp, Homo sapien
gatgtgtgtcctgctcttagcacag

SEQ ID NO: 1069507 - DNA, 25 bp, Homo sapien
tctttctcccgcctgcttaggtgga

SEQ ID NO: 1069508 - DNA, 25 bp, Homo sapien
gctttaagacgttgctcctccagcc

SEQ ID NO: 1069509 - DNA, 25 bp, Homo sapien
ctgcacggcgttgctcggctttaag

SEQ ID NO: 1069510 - DNA, 25 bp, Homo sapien
tgctcggctttaagacgttgctcct

SEQ ID NO: 1069511 - DNA, 25 bp, Homo sapien
gcgttgctcggctttaagacgttgc

SEQ ID NO: 1069512 - DNA, 25 bp, Homo sapien
gttggatggctgcttcatagcgctc

SEQ ID NO: 1069513 - DNA, 25 bp, Homo sapien
aggaccagcgctgctgccggatttc

SEQ ID NO: 1069514 - DNA, 25 bp, Homo sapien
gtcttcttcactgaccgttggatgg

SEQ ID NO: 1069515 - DNA, 25 bp, Homo sapien
tgctgccggatttcggcccacgtct

SEQ ID NO: 1069516 - DNA, 25 bp, Homo sapien
tccagagcgtggcagaggactttga

SEQ ID NO: 1069517 - DNA, 25 bp, Homo sapien
gttaactgccgacacggagcacctg

SEQ ID NO: 1069518 - DNA, 25 bp, Homo sapien
cacgtgtttgggcaggttaactgcc

SEQ ID NO: 1069519 - DNA, 25 bp, Homo sapien
ttgagagccgcttgttgattataga

SEQ ID NO: 1069520 - DNA, 25 bp, Homo sapien
tgaacggcgcatataggaaggagcc

SEQ ID NO: 1069521 - DNA, 25 bp, Homo sapien
gatctggacttccactacagaccca

SEQ ID NO: 1069522 - DNA, 25 bp, Homo sapien
gcttttagcagtcctgtgccaggga

SEQ ID NO: 1069523 - DNA, 25 bp, Homo sapien
tgtcccagtgtaaggtcttgcccct

SEQ ID NO: 1069524 - DNA, 25 bp, Homo sapien
tccacgatgctgctctcccatgcgc

SEQ ID NO: 1069525 - DNA, 25 bp, Homo sapien
ccacgatgctgctctcccatgcgct

SEQ ID NO: 1069526 - DNA, 25 bp, Homo sapien
accgcgctgcgactccgagcaagga

SEQ ID NO: 1069527 - DNA, 25 bp, Homo sapien
ggcagtgtgaccgcgctgcgactcc

SEQ ID NO: 1069528 - DNA, 25 bp, Homo sapien
tgtgaccgcgctgcgactccgagca

SEQ ID NO: 1069529 - DNA, 25 bp, Homo sapien
ctgcgactccgagcaaggaaggaga

SEQ ID NO: 1069530 - DNA, 25 bp, Homo sapien
gatgagtgcggtcgggttgcggccc

SEQ ID NO: 1069531 - DNA, 25 bp, Homo sapien
gggatgagtgcggtcgggttgcggc

SEQ ID NO: 1069532 - DNA, 25 bp, Homo sapien
gtgcggtcgggttgcggcccgcgcg

SEQ ID NO: 1069533 - DNA, 25 bp, Homo sapien
cagagggatgagtgcggtcgggttg

SEQ ID NO: 1069534 - DNA, 25 bp, Homo sapien
ggcgcagcggtgcacgcttcgggtg

SEQ ID NO: 1069535 - DNA, 25 bp, Homo sapien
ggcgttgggcttgcggcgctccccg

SEQ ID NO: 1069536 - DNA, 25 bp, Homo sapien
tgcacgcttcgggtgacgctgcacg

SEQ ID NO: 1069537 - DNA, 25 bp, Homo sapien
cttcgggtgacgctgcacggcgtca

SEQ ID NO: 1069538 - DNA, 25 bp, Homo sapien
gaggcgggcagcgactggcgcttct

SEQ ID NO: 1069539 - DNA, 25 bp, Homo sapien
cttcttgaggctgcgctcccgggct

SEQ ID NO: 1069540 - DNA, 25 bp, Homo sapien
cagcgactggcgcttcttgaggctg

SEQ ID NO: 1069541 - DNA, 25 bp, Homo sapien
cgggctagggcactcttctccttct

SEQ ID NO: 1069542 - DNA, 25 bp, Homo sapien
gacagaatctggctgacccccaggc

SEQ ID NO: 1069543 - DNA, 25 bp, Homo sapien
aggcctgtgccaggatgtggaggga

SEQ ID NO: 1069544 - DNA, 25 bp, Homo sapien
ggagggagaggatggcctggccttg

SEQ ID NO: 1069545 - DNA, 25 bp, Homo sapien
ctttggaggcagagtgtggcctggc

SEQ ID NO: 1069546 - DNA, 25 bp, Homo sapien
gtggagggagaggatggcctggcct

SEQ ID NO: 1069547 - DNA, 25 bp, Homo sapien
ggatgcagtggtgcctcggggggac

SEQ ID NO: 1069548 - DNA, 25 bp, Homo sapien
cagtggtgcctcggggggacggtgg

SEQ ID NO: 1069549 - DNA, 25 bp, Homo sapien
gatgcagtggtgcctcggggggacg

SEQ ID NO: 1069550 - DNA, 25 bp, Homo sapien
gggctgctgactccttctcgttact

SEQ ID NO: 1069551 - DNA, 25 bp, Homo sapien
gcggcgctggggctctcctttgcct

SEQ ID NO: 1069552 - DNA, 25 bp, Homo sapien
ggctcttgtcctcgggccctgcggc

SEQ ID NO: 1069553 - DNA, 25 bp, Homo sapien
cttctcgttactggccctgcgcttg

SEQ ID NO: 1069554 - DNA, 25 bp, Homo sapien
ctgggggtgaggtcaagacagcagc

SEQ ID NO: 1069555 - DNA, 25 bp, Homo sapien
gggggtgaggtcaagacagcagcgt

SEQ ID NO: 1069556 - DNA, 25 bp, Homo sapien
tgggggtgaggtcaagacagcagcg

SEQ ID NO: 1069557 - DNA, 25 bp, Homo sapien
gagtggcttcttctcggtctgtggt

SEQ ID NO: 1069558 - DNA, 25 bp, Homo sapien
gcctggcgccgcttctcagccaaga

SEQ ID NO: 1069559 - DNA, 25 bp, Homo sapien
tctcagccaagagccgagtggcttc

SEQ ID NO: 1069560 - DNA, 25 bp, Homo sapien
ccaagagccgagtggcttcttctcg

SEQ ID NO: 1069561 - DNA, 25 bp, Homo sapien
gcctccgctcctgctcctcgcgctc

SEQ ID NO: 1069562 - DNA, 25 bp, Homo sapien
ttgtccctttctgcctgcagcctcc

SEQ ID NO: 1069563 - DNA, 25 bp, Homo sapien
ctccgctcctgctcctcgcgctccc

SEQ ID NO: 1069564 - DNA, 25 bp, Homo sapien
cagcctccgctcctgctcctcgcgc

SEQ ID NO: 1069565 - DNA, 25 bp, Homo sapien
ggcctcggcctcccgtgccagctgc

SEQ ID NO: 1069566 - DNA, 25 bp, Homo sapien
ctcggcctcccgtgccagctgctcc

SEQ ID NO: 1069567 - DNA, 25 bp, Homo sapien
tgccagctgctcctctcgcattcgc

SEQ ID NO: 1069568 - DNA, 25 bp, Homo sapien
cgtgccagctgctcctctcgcattc

SEQ ID NO: 1069569 - DNA, 25 bp, Homo sapien
tcctgctcggcctgcgccttctctc

SEQ ID NO: 1069570 - DNA, 25 bp, Homo sapien
ggcctgcgccttctctcgtgcctcc

SEQ ID NO: 1069571 - DNA, 25 bp, Homo sapien
tgctcggcctgcgccttctctcgtg

SEQ ID NO: 1069572 - DNA, 25 bp, Homo sapien
tcggcctgcgccttctctcgtgcct

SEQ ID NO: 1069573 - DNA, 25 bp, Homo sapien
catgagcgtggggcacttgactcca

SEQ ID NO: 1069574 - DNA, 25 bp, Homo sapien
ctgccaaagacccccatgagcgtgg

SEQ ID NO: 1069575 - DNA, 25 bp, Homo sapien
caaagacccccatgagcgtggggca

SEQ ID NO: 1069576 - DNA, 25 bp, Homo sapien
tgagcgtggggcacttgactccagc

SEQ ID NO: 1069577 - DNA, 25 bp, Homo sapien
tttctgcgctcttgccgctcttgct

SEQ ID NO: 1069578 - DNA, 25 bp, Homo sapien
gcctcttcccgcgaccgagcttcgg

SEQ ID NO: 1069579 - DNA, 25 bp, Homo sapien
tggaagtgcttttcccgctccagac

SEQ ID NO: 1069580 - DNA, 25 bp, Homo sapien
cgctccagacgctgccgctccgcct

SEQ ID NO: 1069581 - DNA, 25 bp, Homo sapien
tggaatttgccccagcgctttcccg

SEQ ID NO: 1069582 - DNA, 25 bp, Homo sapien
gctttcccgtcctgtccgctctaag

SEQ ID NO: 1069583 - DNA, 25 bp, Homo sapien
gcagatcagttaggctcgagccccg

SEQ ID NO: 1069584 - DNA, 25 bp, Homo sapien
cttagggcctcccagctcatagcag

SEQ ID NO: 1069585 - DNA, 25 bp, Homo sapien
ctgacttccgagtcctcttcatgat

SEQ ID NO: 1069586 - DNA, 25 bp, Homo sapien
tgacttccgagtcctcttcatgatc

SEQ ID NO: 1069587 - DNA, 25 bp, Homo sapien
tctgacttccgagtcctcttcatga

SEQ ID NO: 1069588 - DNA, 25 bp, Homo sapien
gtggccatggatgcctttccgcagc

SEQ ID NO: 1069589 - DNA, 25 bp, Homo sapien
ccagccacttcggactgagttcggc

SEQ ID NO: 1069590 - DNA, 25 bp, Homo sapien
agtcaggctcaagggacagccggcc

SEQ ID NO: 1069591 - DNA, 25 bp, Homo sapien
gaagagcagtcaggctcaagggaca

SEQ ID NO: 1069592 - DNA, 25 bp, Homo sapien
ctgggctggaaccgttggcgttggc

SEQ ID NO: 1069593 - DNA, 25 bp, Homo sapien
aaccgttggcgttggcctccttgct

SEQ ID NO: 1069594 - DNA, 25 bp, Homo sapien
gctggaaccgttggcgttggcctcc

SEQ ID NO: 1069595 - DNA, 25 bp, Homo sapien
gaaccgttggcgttggcctccttgc

SEQ ID NO: 1069596 - DNA, 25 bp, Homo sapien
ggggaccgagcctccacagctttca

SEQ ID NO: 1069597 - DNA, 25 bp, Homo sapien
tggggaccgagcctccacagctttc

SEQ ID NO: 1069598 - DNA, 25 bp, Homo sapien
gggaccgagcctccacagctttcac

SEQ ID NO: 1069599 - DNA, 25 bp, Homo sapien
gctgcagtctgcctccctgctcagg

SEQ ID NO: 1069600 - DNA, 25 bp, Homo sapien
ctgtggatgcagaggccaaggctca

SEQ ID NO: 1069601 - DNA, 25 bp, Homo sapien
agctccagctgcagtctgcctccct

SEQ ID NO: 1069602 - DNA, 25 bp, Homo sapien
ctcagggaccctgggattggaagct

SEQ ID NO: 1069603 - DNA, 25 bp, Homo sapien
cggctcagactcttgtccccagagg

SEQ ID NO: 1069604 - DNA, 25 bp, Homo sapien
gactgcaccacagctttcttgagga

SEQ ID NO: 1069605 - DNA, 25 bp, Homo sapien
gggacgctggcaactccttgcttgg

SEQ ID NO: 1069606 - DNA, 25 bp, Homo sapien
gagtgtctctggtgttcggctcaga

SEQ ID NO: 1069607 - DNA, 25 bp, Homo sapien
agggaaacagtcagggcaaacagca

SEQ ID NO: 1069608 - DNA, 25 bp, Homo sapien
gcagaggagccctcacaactgtgcc

SEQ ID NO: 1069609 - DNA, 25 bp, Homo sapien
tgtgcccggatccaaggcaaaccct

SEQ ID NO: 1069610 - DNA, 25 bp, Homo sapien
tctcctccagacatcctggtaggtg

SEQ ID NO: 1069611 - DNA, 25 bp, Homo sapien
tttttctcctccagacatcctggta

SEQ ID NO: 1069612 - DNA, 25 bp, Homo sapien
tcaaggcaaatactacaggtggccc

SEQ ID NO: 1069613 - DNA, 25 bp, Homo sapien
tggctccggccaaagagacatcagt

SEQ ID NO: 1069614 - DNA, 25 bp, Homo sapien
gaagcaaccagtatcctgtggccca

SEQ ID NO: 1069615 - DNA, 25 bp, Homo sapien
tccacgcagaggagtctgagcacaa

SEQ ID NO: 1069616 - DNA, 25 bp, Homo sapien
ccaggtggagcgagatcgccattca

SEQ ID NO: 1069617 - DNA, 25 bp, Homo sapien
tcgccattcattgggaagcagggca

SEQ ID NO: 1069618 - DNA, 25 bp, Homo sapien
gactgaatgttcctttgagagggcc

SEQ ID NO: 1069619 - DNA, 25 bp, Homo sapien
tgtgctcatgtaaccaccaggtgga

SEQ ID NO: 1069620 - DNA, 25 bp, Homo sapien
tgccaccccctgttccatggtgccc

SEQ ID NO: 1069621 - DNA, 25 bp, Homo sapien
caggaatcccgcgccagggctgcag

SEQ ID NO: 1069622 - DNA, 25 bp, Homo sapien
tgttattgtcttatctggcccccac

SEQ ID NO: 1069623 - DNA, 25 bp, Homo sapien
accccctgttccatggtgcccagtt

SEQ ID NO: 1069624 - DNA, 25 bp, Homo sapien
ttccaggtaggctaagaagtctttc

SEQ ID NO: 1069625 - DNA, 25 bp, Homo sapien
tccaggtaggctaagaagtctttct

SEQ ID NO: 1069626 - DNA, 25 bp, Homo sapien
cctgtgtttagtctccttccaggta

SEQ ID NO: 1069627 - DNA, 25 bp, Homo sapien
ctcacagtgcctgtgtttagtctcc

SEQ ID NO: 1069628 - DNA, 25 bp, Homo sapien
gtaataactaacacaattctgttgt

SEQ ID NO: 1069629 - DNA, 25 bp, Homo sapien
tcaataaattcgtgctttccttccc

SEQ ID NO: 1069630 - DNA, 25 bp, Homo sapien
gttcctcaataaattcgtgctttcc

SEQ ID NO: 1069631 - DNA, 25 bp, Homo sapien
tattcagtaataactaacacaattc

SEQ ID NO: 1069632 - DNA, 25 bp, Homo sapien
cgggggcgttgctgacgccactgcc

SEQ ID NO: 1069633 - DNA, 25 bp, Homo sapien
gcgggggcgttgctgacgccactgc

SEQ ID NO: 1069634 - DNA, 25 bp, Homo sapien
ggggcgttgctgacgccactgcccc

SEQ ID NO: 1069635 - DNA, 25 bp, Homo sapien
gggggcgttgctgacgccactgccc

SEQ ID NO: 1069636 - DNA, 25 bp, Homo sapien
ggaaatgtagtcctacgccctcctc

SEQ ID NO: 1069637 - DNA, 25 bp, Homo sapien
tcccaaaagacaaggcgagcgttgg

SEQ ID NO: 1069638 - DNA, 25 bp, Homo sapien
gctgccatcagaactacgtttccca

SEQ ID NO: 1069639 - DNA, 25 bp, Homo sapien
gggcctaccacagagatcgcagctg

SEQ ID NO: 1069640 - DNA, 25 bp, Homo sapien
taaagcggcgtaggagctgctctgc

SEQ ID NO: 1069641 - DNA, 25 bp, Homo sapien
tagagccggttaagctgccctaact

SEQ ID NO: 1069642 - DNA, 25 bp, Homo sapien
aagagacgaaaccactagagccggt

SEQ ID NO: 1069643 - DNA, 25 bp, Homo sapien
ctctgcagagaaggcgaccaagagc

SEQ ID NO: 1069644 - DNA, 25 bp, Homo sapien
ttgccactggaatgcaagccggcct

SEQ ID NO: 1069645 - DNA, 25 bp, Homo sapien
cccgtaggagacaaatttggactat

SEQ ID NO: 1069646 - DNA, 25 bp, Homo sapien
gagaactctaatattcccgtaggag

SEQ ID NO: 1069647 - DNA, 25 bp, Homo sapien
tataagcagaactcacgccgattgc

SEQ ID NO: 1069648 - DNA, 25 bp, Homo sapien
cagaggctttcccttcaccccaagt

SEQ ID NO: 1069649 - DNA, 25 bp, Homo sapien
aagacaacagttgataaaagttgct

SEQ ID NO: 1069650 - DNA, 25 bp, Homo sapien
tccccataaacactgtactgccact

SEQ ID NO: 1069651 - DNA, 25 bp, Homo sapien
ctcagaggctttcccttcaccccaa

SEQ ID NO: 1069652 - DNA, 25 bp, Homo sapien
ctgaggcagctggagatgaagactc

SEQ ID NO: 1069653 - DNA, 25 bp, Homo sapien
gcagctggagatgaagactcttgac

SEQ ID NO: 1069654 - DNA, 25 bp, Homo sapien
gaggcagctggagatgaagactctt

SEQ ID NO: 1069655 - DNA, 25 bp, Homo sapien
ggcagctggagatgaagactcttga

SEQ ID NO: 1069656 - DNA, 25 bp, Homo sapien
cctccaatctctgcttcttgctctt

SEQ ID NO: 1069657 - DNA, 25 bp, Homo sapien
tccaatctctgcttcttgctcttcc

SEQ ID NO: 1069658 - DNA, 25 bp, Homo sapien
ccaatctctgcttcttgctcttcca

SEQ ID NO: 1069659 - DNA, 25 bp, Homo sapien
caatctctgcttcttgctcttccat

SEQ ID NO: 1069660 - DNA, 25 bp, Homo sapien
aagcaaggctatgtaaagggtcatc

SEQ ID NO: 1069661 - DNA, 25 bp, Homo sapien
aactaggacttgacaatgggagcac

SEQ ID NO: 1069662 - DNA, 25 bp, Homo sapien
taacagaacctgagtgaactaggac

SEQ ID NO: 1069663 - DNA, 25 bp, Homo sapien
caaagccaaggtgatacagcaactc

SEQ ID NO: 1069664 - DNA, 25 bp, Homo sapien
tgaatgtaccataagcagtcccatg

SEQ ID NO: 1069665 - DNA, 25 bp, Homo sapien
cacgcccagtccgacataaaggttt

SEQ ID NO: 1069666 - DNA, 25 bp, Homo sapien
gttgtcctctagaaaagtctacagc

SEQ ID NO: 1069667 - DNA, 25 bp, Homo sapien
tgtcacggtggaaatctcaggaaga

SEQ ID NO: 1069668 - DNA, 25 bp, Homo sapien
ccggcccctacctagctgctttttg

SEQ ID NO: 1069669 - DNA, 25 bp, Homo sapien
cggcccctacctagctgctttttgt

SEQ ID NO: 1069670 - DNA, 25 bp, Homo sapien
tgcccggcccctacctagctgcttt

SEQ ID NO: 1069671 - DNA, 25 bp, Homo sapien
catgcccggcccctacctagctgct

SEQ ID NO: 1069672 - DNA, 25 bp, Homo sapien
gtggaaggatcactcgatcctctca

SEQ ID NO: 1069673 - DNA, 25 bp, Homo sapien
aggatcactcgatcctctcaggatc

SEQ ID NO: 1069674 - DNA, 25 bp, Homo sapien
ggaaggatcactcgatcctctcagg

SEQ ID NO: 1069675 - DNA, 25 bp, Homo sapien
gaaggatcactcgatcctctcagga

SEQ ID NO: 1069676 - DNA, 25 bp, Homo sapien
ggtgcaatgggtctggcctgcaatc

SEQ ID NO: 1069677 - DNA, 25 bp, Homo sapien
gtctggcctgcaatccaacacttag

SEQ ID NO: 1069678 - DNA, 25 bp, Homo sapien
aatgggtctggcctgcaatccaaca

SEQ ID NO: 1069679 - DNA, 25 bp, Homo sapien
gaatttactgaaactagcacaacta

SEQ ID NO: 1069680 - DNA, 25 bp, Homo sapien
aggtggagcttgcggtgagccgaga

SEQ ID NO: 1069681 - DNA, 25 bp, Homo sapien
gaggtgggagagtggcgtgaaccca

SEQ ID NO: 1069682 - DNA, 25 bp, Homo sapien
aggtgggagagtggcgtgaacccag

SEQ ID NO: 1069683 - DNA, 25 bp, Homo sapien
ggtgggagagtggcgtgaacccagg

SEQ ID NO: 1069684 - DNA, 25 bp, Homo sapien
tcactttacaagtcagcatacactt

SEQ ID NO: 1069685 - DNA, 25 bp, Homo sapien
aactcgtactggatcccagacacta

SEQ ID NO: 1069686 - DNA, 25 bp, Homo sapien
ggcttcttcactttacaagtcagca

SEQ ID NO: 1069687 - DNA, 25 bp, Homo sapien
aacaatgattcaactcgtactggat

SEQ ID NO: 1069688 - DNA, 25 bp, Homo sapien
aataatcaattcttaacgtaagatt

SEQ ID NO: 1069689 - DNA, 25 bp, Homo sapien
gctggtctcgaaataatcaattctt

SEQ ID NO: 1069690 - DNA, 25 bp, Homo sapien
atcaattcttaacgtaagattggtt

SEQ ID NO: 1069691 - DNA, 25 bp, Homo sapien
taatcaattcttaacgtaagattgg

SEQ ID NO: 1069692 - DNA, 25 bp, Homo sapien
tagagagatataccaaaaggaactg

SEQ ID NO: 1069693 - DNA, 25 bp, Homo sapien
cccagagtgacaattaatgttggca

SEQ ID NO: 1069694 - DNA, 25 bp, Homo sapien
taaagagccctagggagctgatggt

SEQ ID NO: 1069695 - DNA, 25 bp, Homo sapien
tatgtctactatagtgtttttgcaa

SEQ ID NO: 1069696 - DNA, 25 bp, Homo sapien
caaaatgaatagcacagctggcggc

SEQ ID NO: 1069697 - DNA, 25 bp, Homo sapien
gcaacttgagatactcctctgagaa

SEQ ID NO: 1069698 - DNA, 25 bp, Homo sapien
tctatattaactaacgacctgtggt

SEQ ID NO: 1069699 - DNA, 25 bp, Homo sapien
caatgcgtgtctattaagctcagga

SEQ ID NO: 1069700 - DNA, 25 bp, Homo sapien
caatgtaacaaatactggaccggct

SEQ ID NO: 1069701 - DNA, 25 bp, Homo sapien
tggtccctcgtactatggaagctga

SEQ ID NO: 1069702 - DNA, 25 bp, Homo sapien
ccggctcttatccatggaggttcaa

SEQ ID NO: 1069703 - DNA, 25 bp, Homo sapien
gaatggcaagcctggtgtaacactg

SEQ ID NO: 1069704 - DNA, 25 bp, Homo sapien
tgtggcacatctagtcataaagaac

SEQ ID NO: 1069705 - DNA, 25 bp, Homo sapien
gaagctttgagactaaagtcagctg

SEQ ID NO: 1069706 - DNA, 25 bp, Homo sapien
tcctagttccaagagaagaaaccgc

SEQ ID NO: 1069707 - DNA, 25 bp, Homo sapien
gatgtgagacaggtttcctagttcc

SEQ ID NO: 1069708 - DNA, 25 bp, Homo sapien
ctgaagagaggatcacttttcaatt

SEQ ID NO: 1069709 - DNA, 25 bp, Homo sapien
aagagaggatcacttttcaattaca

SEQ ID NO: 1069710 - DNA, 25 bp, Homo sapien
agagaggatcacttttcaattacac

SEQ ID NO: 1069711 - DNA, 25 bp, Homo sapien
gaagagaggatcacttttcaattac

SEQ ID NO: 1069712 - DNA, 25 bp, Homo sapien
gcctgcgcttccttgaacgagagag

SEQ ID NO: 1069713 - DNA, 25 bp, Homo sapien
ttccttgaacgagagagagatcggc

SEQ ID NO: 1069714 - DNA, 25 bp, Homo sapien
ttgaacgagagagagatcggcttcg

SEQ ID NO: 1069715 - DNA, 25 bp, Homo sapien
gcgcttccttgaacgagagagagat

SEQ ID NO: 1069716 - DNA, 25 bp, Homo sapien
cagtcaaagctgatctggatttgta

SEQ ID NO: 1069717 - DNA, 25 bp, Homo sapien
agagacctggaatatcttatagccc

SEQ ID NO: 1069718 - DNA, 25 bp, Homo sapien
catcgactgatgcaatgattatctc

SEQ ID NO: 1069719 - DNA, 25 bp, Homo sapien
cccagtccatttgacactcacagga

SEQ ID NO: 1069720 - DNA, 25 bp, Homo sapien
gatagatactttccttgcaggagag

SEQ ID NO: 1069721 - DNA, 25 bp, Homo sapien
tcaggctggcttctcatagactcca

SEQ ID NO: 1069722 - DNA, 25 bp, Homo sapien
tcaagattctgggtacagggtagga

SEQ ID NO: 1069723 - DNA, 25 bp, Homo sapien
taaagtgtctctagacctaccccag

SEQ ID NO: 1069724 - DNA, 25 bp, Homo sapien
tccactatttattgcccactgtact

SEQ ID NO: 1069725 - DNA, 25 bp, Homo sapien
ccagcactaaggagggtttaattca

SEQ ID NO: 1069726 - DNA, 25 bp, Homo sapien
tacaccatgaataagagcaactggc

SEQ ID NO: 1069727 - DNA, 25 bp, Homo sapien
tgaatacaacccgattaaagggcta

SEQ ID NO: 1069728 - DNA, 25 bp, Homo sapien
cacaggcacggggattttaacaggg

SEQ ID NO: 1069729 - DNA, 25 bp, Homo sapien
tcacaggcacggggattttaacagg

SEQ ID NO: 1069730 - DNA, 25 bp, Homo sapien
gagacaaatgtttgaatttttgaca

SEQ ID NO: 1069731 - DNA, 25 bp, Homo sapien
atggaaaggaaagagacaaatgttt

SEQ ID NO: 1069732 - DNA, 25 bp, Homo sapien
gaaaggaaagagacaaatgtttgaa

SEQ ID NO: 1069733 - DNA, 25 bp, Homo sapien
aatgtttgaatttttgacacaagca

SEQ ID NO: 1069734 - DNA, 25 bp, Homo sapien
tgtatgcttgccggtaattctgcca

SEQ ID NO: 1069735 - DNA, 25 bp, Homo sapien
ctcgacgaggactgtatgcttgccg

SEQ ID NO: 1069736 - DNA, 25 bp, Homo sapien
atcttgaacggcctcgacgaggact

SEQ ID NO: 1069737 - DNA, 25 bp, Homo sapien
cggcctcgacgaggactgtatgctt

SEQ ID NO: 1069738 - DNA, 25 bp, Homo sapien
ctatccttagaagaggactttttct

SEQ ID NO: 1069739 - DNA, 25 bp, Homo sapien
tatccttagaagaggactttttctc

SEQ ID NO: 1069740 - DNA, 25 bp, Homo sapien
taggacggggtgaccgccgcctcac

SEQ ID NO: 1069741 - DNA, 25 bp, Homo sapien
gctaggacggggtgaccgccgcctc

SEQ ID NO: 1069742 - DNA, 25 bp, Homo sapien
ctaggacggggtgaccgccgcctca

SEQ ID NO: 1069743 - DNA, 25 bp, Homo sapien
ggcaccactcggcagagttgagccc

SEQ ID NO: 1069744 - DNA, 25 bp, Homo sapien
ccggcaccactcggcagagttgagc

SEQ ID NO: 1069745 - DNA, 25 bp, Homo sapien
gcaccactcggcagagttgagccca

SEQ ID NO: 1069746 - DNA, 25 bp, Homo sapien
caccactcggcagagttgagcccat

SEQ ID NO: 1069747 - DNA, 25 bp, Homo sapien
gggacccagaaccatggtcgaactg

SEQ ID NO: 1069748 - DNA, 25 bp, Homo sapien
ggacccagaaccatggtcgaactga

SEQ ID NO: 1069749 - DNA, 25 bp, Homo sapien
gacccagaaccatggtcgaactgac

SEQ ID NO: 1069750 - DNA, 25 bp, Homo sapien
tggagccagtggatggtggactctt

SEQ ID NO: 1069751 - DNA, 25 bp, Homo sapien
gagccagtggatggtggactcttac

SEQ ID NO: 1069752 - DNA, 25 bp, Homo sapien
tgtggagccagtggatggtggactc

SEQ ID NO: 1069753 - DNA, 25 bp, Homo sapien
ggagccagtggatggtggactctta

SEQ ID NO: 1069754 - DNA, 25 bp, Homo sapien
acaaccaggcaggggaaatgagata

SEQ ID NO: 1069755 - DNA, 25 bp, Homo sapien
caaccaggcaggggaaatgagatac

SEQ ID NO: 1069756 - DNA, 25 bp, Homo sapien
tcaggaaggtaggaaagctagagtt

SEQ ID NO: 1069757 - DNA, 25 bp, Homo sapien
ccttgggtgatgcttttaatgttta

SEQ ID NO: 1069758 - DNA, 25 bp, Homo sapien
tgatgcttttaatgtttactaacga

SEQ ID NO: 1069759 - DNA, 25 bp, Homo sapien
taccttttaccattaatcagagctc

SEQ ID NO: 1069760 - DNA, 25 bp, Homo sapien
catgataggctgatgcagatcgaac

SEQ ID NO: 1069761 - DNA, 25 bp, Homo sapien
ccttcctggactatgccttggcctt

SEQ ID NO: 1069762 - DNA, 25 bp, Homo sapien
tagagggtctaagagctccaatggc

SEQ ID NO: 1069763 - DNA, 25 bp, Homo sapien
tgcccagtctcctcaactggagggt

SEQ ID NO: 1069764 - DNA, 25 bp, Homo sapien
taacacgcagccgtgttggcttcta

SEQ ID NO: 1069765 - DNA, 25 bp, Homo sapien
tctcctaacacgcagccgtgttggc

SEQ ID NO: 1069766 - DNA, 25 bp, Homo sapien
ccgtgttggcttctactgggacata

SEQ ID NO: 1069767 - DNA, 25 bp, Homo sapien
tgtcatgtcctctcctaacacgcag

SEQ ID NO: 1069768 - DNA, 25 bp, Homo sapien
ggcaagtacagattcaaaacatctc

SEQ ID NO: 1069769 - DNA, 25 bp, Homo sapien
tcaaagtcgtgttaatacagccaag

SEQ ID NO: 1069770 - DNA, 25 bp, Homo sapien
tgaccacaacctggtcccagtgcaa

SEQ ID NO: 1069771 - DNA, 25 bp, Homo sapien
ggagccacttgctgggttagtccct

SEQ ID NO: 1069772 - DNA, 25 bp, Homo sapien
taacatagaatgttcaaccttggac

SEQ ID NO: 1069773 - DNA, 25 bp, Homo sapien
gatccatggagttgtgtcttacaaa

SEQ ID NO: 1069774 - DNA, 25 bp, Homo sapien
tcctggcatggaacaaaacttatgt

SEQ ID NO: 1069775 - DNA, 25 bp, Homo sapien
tacctgtaatgtgatctagggcaaa

SEQ ID NO: 1069776 - DNA, 25 bp, Homo sapien
tttttgattctctgaaaaaaacatg

SEQ ID NO: 1069777 - DNA, 25 bp, Homo sapien
gattctctgaaaaaaacatgtctta

SEQ ID NO: 1069778 - DNA, 25 bp, Homo sapien
tctgaaaaaaacatgtcttatggat

SEQ ID NO: 1069779 - DNA, 25 bp, Homo sapien
tgaaaaaaacatgtcttatggattc

SEQ ID NO: 1069780 - DNA, 25 bp, Homo sapien
tcttaacagcatgctctaaaatagt

SEQ ID NO: 1069781 - DNA, 25 bp, Homo sapien
gagagagacacaagaggcttcttaa

SEQ ID NO: 1069782 - DNA, 25 bp, Homo sapien
tataaaaacacaagagagagacaca

SEQ ID NO: 1069783 - DNA, 25 bp, Homo sapien
agacacaagaggcttcttaacagca

SEQ ID NO: 1069784 - DNA, 25 bp, Homo sapien
gagtccatccggacattgacctgtg

SEQ ID NO: 1069785 - DNA, 25 bp, Homo sapien
tgacctgtgcctctcgagtaatgga

SEQ ID NO: 1069786 - DNA, 25 bp, Homo sapien
catctcggagcttataccttttggg

SEQ ID NO: 1069787 - DNA, 25 bp, Homo sapien
tgctttataagcagtcactcggaaa

SEQ ID NO: 1069788 - DNA, 25 bp, Homo sapien
ctttttgttgctatggactagatct

SEQ ID NO: 1069789 - DNA, 25 bp, Homo sapien
cctttttgttgctatggactagatc

SEQ ID NO: 1069790 - DNA, 25 bp, Homo sapien
tcctgctcagttcctctctttaggt

SEQ ID NO: 1069791 - DNA, 25 bp, Homo sapien
tagtaaagcgttcatgtaatgtcat

SEQ ID NO: 1069792 - DNA, 25 bp, Homo sapien
ctctctttaggtatttagtaaagcg

SEQ ID NO: 1069793 - DNA, 25 bp, Homo sapien
taatgtcattcctgaggacccaaag

SEQ ID NO: 1069794 - DNA, 25 bp, Homo sapien
ttctgaatgtactgggggaaatgtc

SEQ ID NO: 1069795 - DNA, 25 bp, Homo sapien
tcatttcatcatgagccaaaccatg

SEQ ID NO: 1069796 - DNA, 25 bp, Homo sapien
ttcccggggacttttcatttcatca

SEQ ID NO: 1069797 - DNA, 25 bp, Homo sapien
gccaaaccatgttttctgaatgtac

SEQ ID NO: 1069798 - DNA, 25 bp, Homo sapien
gcccaacgcactcattttgttggaa

SEQ ID NO: 1069799 - DNA, 25 bp, Homo sapien
ttctgtcaagttcatgcccaacgca

SEQ ID NO: 1069800 - DNA, 25 bp, Homo sapien
tgttggaattactgatcaaatcaac

SEQ ID NO: 1069801 - DNA, 25 bp, Homo sapien
attactgatcaaatcaacagttcac

SEQ ID NO: 1069802 - DNA, 25 bp, Homo sapien
catcattgcaaatgtagctgggcca

SEQ ID NO: 1069803 - DNA, 25 bp, Homo sapien
tacatggctagtacaaagctggaga

SEQ ID NO: 1069804 - DNA, 25 bp, Homo sapien
tagaaaaggtttcagcagcattgga

SEQ ID NO: 1069805 - DNA, 25 bp, Homo sapien
gggtaacacctccaatgagttggct

SEQ ID NO: 1069806 - DNA, 25 bp, Homo sapien
ctatgaaggtatgttttgcagcagc

SEQ ID NO: 1069807 - DNA, 25 bp, Homo sapien
gttccgggacatcccacactaggat

SEQ ID NO: 1069808 - DNA, 25 bp, Homo sapien
caaaggtgcatggtagttccgggac

SEQ ID NO: 1069809 - DNA, 25 bp, Homo sapien
ggcttcctaagcagttcagctatga

SEQ ID NO: 1069810 - DNA, 25 bp, Homo sapien
gattcagagctgtcaactcaaccat

SEQ ID NO: 1069811 - DNA, 25 bp, Homo sapien
cacccaagcttggaagggatgcagg

SEQ ID NO: 1069812 - DNA, 25 bp, Homo sapien
gaaatgtgaggcatctcacccaagc

SEQ ID NO: 1069813 - DNA, 25 bp, Homo sapien
caggatgtcccacagaagttactcc

SEQ ID NO: 1069814 - DNA, 25 bp, Homo sapien
tctctcgatttacctcgtttaagat

SEQ ID NO: 1069815 - DNA, 25 bp, Homo sapien
cgatttacctcgtttaagatctctc

SEQ ID NO: 1069816 - DNA, 25 bp, Homo sapien
tctcgatttacctcgtttaagatct

SEQ ID NO: 1069817 - DNA, 25 bp, Homo sapien
tgattctctcgatttacctcgttta

SEQ ID NO: 1069818 - DNA, 25 bp, Homo sapien
tttggtccccagtcttgatttgtca

SEQ ID NO: 1069819 - DNA, 25 bp, Homo sapien
tctttcacttggacccacaaagtct

SEQ ID NO: 1069820 - DNA, 25 bp, Homo sapien
cctctgtctcttcagtgtactcttc

SEQ ID NO: 1069821 - DNA, 25 bp, Homo sapien
aaaggttcctcgagctctgccacct

SEQ ID NO: 1069822 - DNA, 25 bp, Homo sapien
ttttgggtgtgtactctgggtccca

SEQ ID NO: 1069823 - DNA, 25 bp, Homo sapien
gttcccagagtagttgcctctgccc

SEQ ID NO: 1069824 - DNA, 25 bp, Homo sapien
ttgttgttattgttcccagagtagt

SEQ ID NO: 1069825 - DNA, 25 bp, Homo sapien
cttttttgaaaatcgttgttgctgt

SEQ ID NO: 1069826 - DNA, 25 bp, Homo sapien
gagtgcacaggaatgatcaacagcc

SEQ ID NO: 1069827 - DNA, 25 bp, Homo sapien
caacagcctagatgagagaagcccc

SEQ ID NO: 1069828 - DNA, 25 bp, Homo sapien
tgttacagatcaaggccaagagagc

SEQ ID NO: 1069829 - DNA, 25 bp, Homo sapien
aaagtattaatctgagggaggccca

SEQ ID NO: 1069830 - DNA, 25 bp, Homo sapien
tataacactcacaccagcttggatc

SEQ ID NO: 1069831 - DNA, 25 bp, Homo sapien
tagttataacactcacaccagcttg

SEQ ID NO: 1069832 - DNA, 25 bp, Homo sapien
ataacactcacaccagcttggatct

SEQ ID NO: 1069833 - DNA, 25 bp, Homo sapien
gttataacactcacaccagcttgga

SEQ ID NO: 1069834 - DNA, 25 bp, Homo sapien
ccacaaaagctagggtcttaggctg

SEQ ID NO: 1069835 - DNA, 25 bp, Homo sapien
aaaggtcctctagtagcctcaaagc

SEQ ID NO: 1069836 - DNA, 25 bp, Homo sapien
tcttaggctgttggagctcagctca

SEQ ID NO: 1069837 - DNA, 25 bp, Homo sapien
gaatcaggctggcaatactctctca

SEQ ID NO: 1069838 - DNA, 25 bp, Homo sapien
ctgaacttgtcatgggcccacttgg

SEQ ID NO: 1069839 - DNA, 25 bp, Homo sapien
actgaacttgtcatgggcccacttg

SEQ ID NO: 1069840 - DNA, 25 bp, Homo sapien
cactgaacttgtcatgggcccactt

SEQ ID NO: 1069841 - DNA, 25 bp, Homo sapien
tgaacttgtcatgggcccacttggg

SEQ ID NO: 1069842 - DNA, 25 bp, Homo sapien
tagaaaacagaccagacactgccct

SEQ ID NO: 1069843 - DNA, 25 bp, Homo sapien
gcaggaatcccgtcaagggtggccc

SEQ ID NO: 1069844 - DNA, 25 bp, Homo sapien
cggtagtacaatctgtgcggctggt

SEQ ID NO: 1069845 - DNA, 25 bp, Homo sapien
tccacgtgatacatggctgcgcaga

SEQ ID NO: 1069846 - DNA, 25 bp, Homo sapien
tgaggcaagacagtagggtaaagga

SEQ ID NO: 1069847 - DNA, 25 bp, Homo sapien
agccgccagccgataggtcgggcca

SEQ ID NO: 1069848 - DNA, 25 bp, Homo sapien
aggcgtagccgccagccgataggtc

SEQ ID NO: 1069849 - DNA, 25 bp, Homo sapien
tagggtaaaggaggcgtagccgcca

SEQ ID NO: 1069850 - DNA, 25 bp, Homo sapien
tctgacggccgagtactgggcccgc

SEQ ID NO: 1069851 - DNA, 25 bp, Homo sapien
ggcagctccctctgacggccgagta

SEQ ID NO: 1069852 - DNA, 25 bp, Homo sapien
ctccctctgacggccgagtactggg

SEQ ID NO: 1069853 - DNA, 25 bp, Homo sapien
gtactgggcccgcgcagggtgcgac

SEQ ID NO: 1069854 - DNA, 25 bp, Homo sapien
agactcagctcgtcctccttctgcg

SEQ ID NO: 1069855 - DNA, 25 bp, Homo sapien
cttctgcgcgcggtatccggccagg

SEQ ID NO: 1069856 - DNA, 25 bp, Homo sapien
gtccccgggcgccagactcagctcg

SEQ ID NO: 1069857 - DNA, 25 bp, Homo sapien
ggaagaggccatagcggcccccaaa

SEQ ID NO: 1069858 - DNA, 25 bp, Homo sapien
agccccgcagggtctctgggatctc

SEQ ID NO: 1069859 - DNA, 25 bp, Homo sapien
ctctccggagccccgcagggtctct

SEQ ID NO: 1069860 - DNA, 25 bp, Homo sapien
cgcgcacagcgcggcctccgcgcct

SEQ ID NO: 1069861 - DNA, 25 bp, Homo sapien
ccggagccccgcagggtctctggga

SEQ ID NO: 1069862 - DNA, 25 bp, Homo sapien
cgcccgtccccgcccttgcgctcac

SEQ ID NO: 1069863 - DNA, 25 bp, Homo sapien
aagcgcaaggcgcgcacgtagcctt

SEQ ID NO: 1069864 - DNA, 25 bp, Homo sapien
gggaagcgcaaggcgcgcacgtagc

SEQ ID NO: 1069865 - DNA, 25 bp, Homo sapien
tgggggaagcgcaaggcgcgcacgt

SEQ ID NO: 1069866 - DNA, 25 bp, Homo sapien
ctgggggaagcgcaaggcgcgcacg

SEQ ID NO: 1069867 - DNA, 25 bp, Homo sapien
ccagtcggacgccccagtcagagga

SEQ ID NO: 1069868 - DNA, 25 bp, Homo sapien
ctagcaccggacaagcgcggctgag

SEQ ID NO: 1069869 - DNA, 25 bp, Homo sapien
gagctccagtcggacgccccagtca

SEQ ID NO: 1069870 - DNA, 25 bp, Homo sapien
agcaccggacaagcgcggctgagct

SEQ ID NO: 1069871 - DNA, 25 bp, Homo sapien
ctttggggcctcgggtgtttggcag

SEQ ID NO: 1069872 - DNA, 25 bp, Homo sapien
tggggcctcgggtgtttggcaggat

SEQ ID NO: 1069873 - DNA, 25 bp, Homo sapien
ggcctcgggtgtttggcaggatgac

SEQ ID NO: 1069874 - DNA, 25 bp, Homo sapien
gggcctcgggtgtttggcaggatga

SEQ ID NO: 1069875 - DNA, 25 bp, Homo sapien
tccccagcttgcagcttcagctcgt

SEQ ID NO: 1069876 - DNA, 25 bp, Homo sapien
agcttcagctcgtccgcctgctctg

SEQ ID NO: 1069877 - DNA, 25 bp, Homo sapien
tttatcatttccacgatctccccag

SEQ ID NO: 1069878 - DNA, 25 bp, Homo sapien
tgtagctgaagttcactttgcacca

SEQ ID NO: 1069879 - DNA, 25 bp, Homo sapien
cagcaattccacaaagttggatggg

SEQ ID NO: 1069880 - DNA, 25 bp, Homo sapien
ttgggggcccactgtccagcaattc

SEQ ID NO: 1069881 - DNA, 25 bp, Homo sapien
ggaaggctcccagctgcccgttctt

SEQ ID NO: 1069882 - DNA, 25 bp, Homo sapien
tggatgggaaggctcccagctgccc

SEQ ID NO: 1069883 - DNA, 25 bp, Homo sapien
cagggtcaggatatgtgaatcacag

SEQ ID NO: 1069884 - DNA, 25 bp, Homo sapien
ggtcacagggtcaggatatgtgaat

SEQ ID NO: 1069885 - DNA, 25 bp, Homo sapien
cactgggagggtcattggagattgc

SEQ ID NO: 1069886 - DNA, 25 bp, Homo sapien
tcattggagattgcgagtcacaggg

SEQ ID NO: 1069887 - DNA, 25 bp, Homo sapien
gggctgactgaaggcatgtctgggt

SEQ ID NO: 1069888 - DNA, 25 bp, Homo sapien
agggctgactgaaggcatgtctggg

SEQ ID NO: 1069889 - DNA, 25 bp, Homo sapien
ctgcaggtagtctggagggctgtca

SEQ ID NO: 1069890 - DNA, 25 bp, Homo sapien
ctcaggctggtagtcaaacaggacc

SEQ ID NO: 1069891 - DNA, 25 bp, Homo sapien
tgctgagtacttttaccacgtcccc

SEQ ID NO: 1069892 - DNA, 25 bp, Homo sapien
tccgcagcgccaactcgtctggggc

SEQ ID NO: 1069893 - DNA, 25 bp, Homo sapien
gggcctcaggctggtagtcaaacag

SEQ ID NO: 1069894 - DNA, 25 bp, Homo sapien
ggtggtgggagtacaaagttgtctg

SEQ ID NO: 1069895 - DNA, 25 bp, Homo sapien
ttcccaccagcccttatcctctgtg

SEQ ID NO: 1069896 - DNA, 25 bp, Homo sapien
cccaccagcccttatcctctgtggt

SEQ ID NO: 1069897 - DNA, 25 bp, Homo sapien
ggtgggagtacaaagttgtctggaa

SEQ ID NO: 1069898 - DNA, 25 bp, Homo sapien
ctatgccgaaaagaagtaaaggttg

SEQ ID NO: 1069899 - DNA, 25 bp, Homo sapien
tatgccgaaaagaagtaaaggttga

SEQ ID NO: 1069900 - DNA, 25 bp, Homo sapien
ctgattcccgagataccactttccg

SEQ ID NO: 1069901 - DNA, 25 bp, Homo sapien
tcccgagataccactttccgtggga

SEQ ID NO: 1069902 - DNA, 25 bp, Homo sapien
taccactttccgtgggaccagcttc

SEQ ID NO: 1069903 - DNA, 25 bp, Homo sapien
agataccactttccgtgggaccagc

SEQ ID NO: 1069904 - DNA, 25 bp, Homo sapien
ttggctttgctgggcccagtggtgg

SEQ ID NO: 1069905 - DNA, 25 bp, Homo sapien
tggggagggatgttttgggcatcaa

SEQ ID NO: 1069906 - DNA, 25 bp, Homo sapien
tggctttgctgggcccagtggtggc

SEQ ID NO: 1069907 - DNA, 25 bp, Homo sapien
gagggatgttttgggcatcaacttt

SEQ ID NO: 1069908 - DNA, 25 bp, Homo sapien
gtccctgctgggtgtccgagatgtc

SEQ ID NO: 1069909 - DNA, 25 bp, Homo sapien
tgtccctgctgggtgtccgagatgt

SEQ ID NO: 1069910 - DNA, 25 bp, Homo sapien
ctgtccctccgcacagccaccccat

SEQ ID NO: 1069911 - DNA, 25 bp, Homo sapien
cacctctgtccctccgcacagccac

SEQ ID NO: 1069912 - DNA, 25 bp, Homo sapien
cccacctctgtccctccgcacagcc

SEQ ID NO: 1069913 - DNA, 25 bp, Homo sapien
tctgtccctccgcacagccacccca

SEQ ID NO: 1069914 - DNA, 25 bp, Homo sapien
taagagagcagaacctcagggaccc

SEQ ID NO: 1069915 - DNA, 25 bp, Homo sapien
aagagagcagaacctcagggaccca

SEQ ID NO: 1069916 - DNA, 25 bp, Homo sapien
ctaagagagcagaacctcagggacc

SEQ ID NO: 1069917 - DNA, 25 bp, Homo sapien
gagagcagaacctcagggacccaag

SEQ ID NO: 1069918 - DNA, 25 bp, Homo sapien
agtctgggttttggatcgctttcgg

SEQ ID NO: 1069919 - DNA, 25 bp, Homo sapien
cgctttcggccagggtgatacgaac

SEQ ID NO: 1069920 - DNA, 25 bp, Homo sapien
cagggtgatacgaacccccactttg

SEQ ID NO: 1069921 - DNA, 25 bp, Homo sapien
tgactggacacagagcgttgctggg

SEQ ID NO: 1069922 - DNA, 25 bp, Homo sapien
agacttcacccgtgcacaccacagc

SEQ ID NO: 1069923 - DNA, 25 bp, Homo sapien
ctgccgtgatgggaggtgaagtctc

SEQ ID NO: 1069924 - DNA, 25 bp, Homo sapien
gaggttgagtctggttccccttggc

SEQ ID NO: 1069925 - DNA, 25 bp, Homo sapien
gtgaagtctcagctgaggttgagtc

SEQ ID NO: 1069926 - DNA, 25 bp, Homo sapien
gttctcttcacagagggggccttta

SEQ ID NO: 1069927 - DNA, 25 bp, Homo sapien
agagggggcctttaccgggctgctg

SEQ ID NO: 1069928 - DNA, 25 bp, Homo sapien
ggggcctttaccgggctgctgtgct

SEQ ID NO: 1069929 - DNA, 25 bp, Homo sapien
agggggcctttaccgggctgctgtg

SEQ ID NO: 1069930 - DNA, 25 bp, Homo sapien
tagaagccttgtcctccggagtcac

SEQ ID NO: 1069931 - DNA, 25 bp, Homo sapien
ggccatctttggattagggacttta

SEQ ID NO: 1069932 - DNA, 25 bp, Homo sapien
ggccttgtcccctagagtgagggtc

SEQ ID NO: 1069933 - DNA, 25 bp, Homo sapien
caggagccgggatcttcttggagct

SEQ ID NO: 1069934 - DNA, 25 bp, Homo sapien
tctggtggacacctcttcttcagaa

SEQ ID NO: 1069935 - DNA, 25 bp, Homo sapien
agagaagtgatggaattgaatgtca

SEQ ID NO: 1069936 - DNA, 25 bp, Homo sapien
gaagtgatggaattgaatgtcatct

SEQ ID NO: 1069937 - DNA, 25 bp, Homo sapien
gagaagtgatggaattgaatgtcat

SEQ ID NO: 1069938 - DNA, 25 bp, Homo sapien
tccgtgtagttttgcgggaccagcg

SEQ ID NO: 1069939 - DNA, 25 bp, Homo sapien
agacttcaactcagcctggcgtggg

SEQ ID NO: 1069940 - DNA, 25 bp, Homo sapien
gatgatggatcctctttggctacaa

SEQ ID NO: 1069941 - DNA, 25 bp, Homo sapien
ggagctgtcccctctaactagggta

SEQ ID NO: 1069942 - DNA, 25 bp, Homo sapien
tcctcccagatgtcggtcagcttcc

SEQ ID NO: 1069943 - DNA, 25 bp, Homo sapien
cctcccagatgtcggtcagcttcct

SEQ ID NO: 1069944 - DNA, 25 bp, Homo sapien
ctcctcccagatgtcggtcagcttc

SEQ ID NO: 1069945 - DNA, 25 bp, Homo sapien
ctcccagatgtcggtcagcttcctc

SEQ ID NO: 1069946 - DNA, 25 bp, Homo sapien
tctgggtcccctgcatcacctggac

SEQ ID NO: 1069947 - DNA, 25 bp, Homo sapien
cgtctgcgtgtggatgacgcgcggg

SEQ ID NO: 1069948 - DNA, 25 bp, Homo sapien
gacgcgcggggtctgggacttctgg

SEQ ID NO: 1069949 - DNA, 25 bp, Homo sapien
ctgcgtctgcgtgtggatgacgcgc

SEQ ID NO: 1069950 - DNA, 25 bp, Homo sapien
gtgcaaggacgtgggtggccccagc

SEQ ID NO: 1069951 - DNA, 25 bp, Homo sapien
tcccaaagtcgtgtgcaaggacgtg

SEQ ID NO: 1069952 - DNA, 25 bp, Homo sapien
gcgtttcccaaagtcgtgtgcaagg

SEQ ID NO: 1069953 - DNA, 25 bp, Homo sapien
tctcgcgtttcccaaagtcgtgtgc

SEQ ID NO: 1069954 - DNA, 25 bp, Homo sapien
cttgggaacggtaatgggagccaca

SEQ ID NO: 1069955 - DNA, 25 bp, Homo sapien
tggataaaaatagccgcgcgcaggc

SEQ ID NO: 1069956 - DNA, 25 bp, Homo sapien
gattccggaatctaggccgggcgtc

SEQ ID NO: 1069957 - DNA, 25 bp, Homo sapien
ctagccccggtgtaagcatgcgtgc

SEQ ID NO: 1069958 - DNA, 25 bp, Homo sapien
gcctggacacacgtcgccctgtccc

SEQ ID NO: 1069959 - DNA, 25 bp, Homo sapien
aaacgcctggacacacgtcgccctg

SEQ ID NO: 1069960 - DNA, 25 bp, Homo sapien
cggcaaacgcctggacacacgtcgc

SEQ ID NO: 1069961 - DNA, 25 bp, Homo sapien
ctggacacacgtcgccctgtcccca

SEQ ID NO: 1069962 - DNA, 25 bp, Homo sapien
ctgggcacaggcacgctggggccca

SEQ ID NO: 1069963 - DNA, 25 bp, Homo sapien
tgggcacaggcacgctggggcccag

SEQ ID NO: 1069964 - DNA, 25 bp, Homo sapien
gggcacaggcacgctggggcccagc

SEQ ID NO: 1069965 - DNA, 25 bp, Homo sapien
ggcacaggcacgctggggcccagcc

SEQ ID NO: 1069966 - DNA, 25 bp, Homo sapien
tgcctgctcgtcatcagcatctcgt

SEQ ID NO: 1069967 - DNA, 25 bp, Homo sapien
cgcgaacggatcctgcgggagatct

SEQ ID NO: 1069968 - DNA, 25 bp, Homo sapien
aacgtcttcacgtcggcggaggagc

SEQ ID NO: 1069969 - DNA, 25 bp, Homo sapien
cgagctgtccgcagagccggacggg

SEQ ID NO: 1069970 - DNA, 25 bp, Homo sapien
ggatctgactttgctgacctcgcag

SEQ ID NO: 1069971 - DNA, 25 bp, Homo sapien
gcggttccctaatgcccttcgagta

SEQ ID NO: 1069972 - DNA, 25 bp, Homo sapien
ccgcgaagggacatggagttgctca

SEQ ID NO: 1069973 - DNA, 25 bp, Homo sapien
cacgaagttagggaagcgctctctc

SEQ ID NO: 1069974 - DNA, 25 bp, Homo sapien
ctcggtccgtgtcccgcccgtgctg

SEQ ID NO: 1069975 - DNA, 25 bp, Homo sapien
tcccgcccgtgctgccgcggcctgg

SEQ ID NO: 1069976 - DNA, 25 bp, Homo sapien
gccggctggtccctcggtccgtgtc

SEQ ID NO: 1069977 - DNA, 25 bp, Homo sapien
gctggtccctcggtccgtgtcccgc

SEQ ID NO: 1069978 - DNA, 25 bp, Homo sapien
ttgtcaggcggagtaagtgaaagaa

SEQ ID NO: 1069979 - DNA, 25 bp, Homo sapien
aatggtatcacgtcgcagggttgtc

SEQ ID NO: 1069980 - DNA, 25 bp, Homo sapien
tgaaagaacctgtccaaggtttagc

SEQ ID NO: 1069981 - DNA, 25 bp, Homo sapien
ggataatggtatcacgtcgcagggt

SEQ ID NO: 1069982 - DNA, 25 bp, Homo sapien
tcaatctctccaagactccgtttat

SEQ ID NO: 1069983 - DNA, 25 bp, Homo sapien
ctctccaagactccgtttatttgat

SEQ ID NO: 1069984 - DNA, 25 bp, Homo sapien
caatctctccaagactccgtttatt

SEQ ID NO: 1069985 - DNA, 25 bp, Homo sapien
atctctccaagactccgtttatttg

SEQ ID NO: 1069986 - DNA, 25 bp, Homo sapien
gccctggctcaaagctggagtccaa

SEQ ID NO: 1069987 - DNA, 25 bp, Homo sapien
tcaggcagcgccttcagctatgtct

SEQ ID NO: 1069988 - DNA, 25 bp, Homo sapien
tacagatgtgggcaaaaatacctgc

SEQ ID NO: 1069989 - DNA, 25 bp, Homo sapien
cttggtgcacaagagcgcaggagct

SEQ ID NO: 1069990 - DNA, 25 bp, Homo sapien
tctaatataatgtaaccgctatgaa

SEQ ID NO: 1069991 - DNA, 25 bp, Homo sapien
gacctccctcccatagacaccaaaa

SEQ ID NO: 1069992 - DNA, 25 bp, Homo sapien
aaaaaactgtccctcagtattctca

SEQ ID NO: 1069993 - DNA, 25 bp, Homo sapien
aaaataaattggttcagtatttgca

SEQ ID NO: 1069994 - DNA, 25 bp, Homo sapien
taaaaaccaagctcctggccgggca

SEQ ID NO: 1069995 - DNA, 25 bp, Homo sapien
agtactctccgtgctttccaaggtg

SEQ ID NO: 1069996 - DNA, 25 bp, Homo sapien
taagtcctgggcagataggcagcga

SEQ ID NO: 1069997 - DNA, 25 bp, Homo sapien
gaagcagtcaacaagcaggcaggtg

SEQ ID NO: 1069998 - DNA, 25 bp, Homo sapien
gtgacacacgtgcagagatccgaag

SEQ ID NO: 1069999 - DNA, 25 bp, Homo sapien
tgccagaaagggtactcaatgtccc

SEQ ID NO: 1070000 - DNA, 25 bp, Homo sapien
tagagttgccccatggaaagcggtg

SEQ ID NO: 1070001 - DNA, 25 bp, Homo sapien
tcaggagcataaagggagcaacagc

SEQ ID NO: 1070002 - DNA, 25 bp, Homo sapien
gctacaaactgcacagggttcctgg

SEQ ID NO: 1070003 - DNA, 25 bp, Homo sapien
tcttatatattaataaggacaaaaa

SEQ ID NO: 1070004 - DNA, 25 bp, Homo sapien
gaaggaaacgtgcacttcattgtgt

SEQ ID NO: 1070005 - DNA, 25 bp, Homo sapien
ccagcaactgggcacttcacaaaca

SEQ ID NO: 1070006 - DNA, 25 bp, Homo sapien
tgtacacagagctgtgacctcccca

SEQ ID NO: 1070007 - DNA, 25 bp, Homo sapien
cgtttcagacgttgacaccaccaca

SEQ ID NO: 1070008 - DNA, 25 bp, Homo sapien
ttggttagcaggtgttctgaccgca

SEQ ID NO: 1070009 - DNA, 25 bp, Homo sapien
cagcagggctttacagggcgaggaa

SEQ ID NO: 1070010 - DNA, 25 bp, Homo sapien
ttttgccagctttggttagcaggtg

SEQ ID NO: 1070011 - DNA, 25 bp, Homo sapien
gctgaagtcttctggacaaacagtt

SEQ ID NO: 1070012 - DNA, 25 bp, Homo sapien
tcggatgcgcttctgtaaaaactgg

SEQ ID NO: 1070013 - DNA, 25 bp, Homo sapien
gagctatgcggaggtcacaaaggac

SEQ ID NO: 1070014 - DNA, 25 bp, Homo sapien
tactctcgaagggtcagttgtggcg

SEQ ID NO: 1070015 - DNA, 25 bp, Homo sapien
gggcgttgttctcatcaggctgctt

SEQ ID NO: 1070016 - DNA, 25 bp, Homo sapien
gctgctgcccgtgcgtggtctttct

SEQ ID NO: 1070017 - DNA, 25 bp, Homo sapien
cagactgggcccttccaaggtcaag

SEQ ID NO: 1070018 - DNA, 25 bp, Homo sapien
tagccgccgggtctgcaaagccctg

SEQ ID NO: 1070019 - DNA, 25 bp, Homo sapien
ggagcggaaatgcagtccggcctag

SEQ ID NO: 1070020 - DNA, 25 bp, Homo sapien
ccatctctaggtggctcagtccatg

SEQ ID NO: 1070021 - DNA, 25 bp, Homo sapien
gatgggaggcctttctagacctggc

SEQ ID NO: 1070022 - DNA, 25 bp, Homo sapien
aatccacagcccacacgtgagctcc

SEQ ID NO: 1070023 - DNA, 25 bp, Homo sapien
ccggtgatgggaggcctttctagac

SEQ ID NO: 1070024 - DNA, 25 bp, Homo sapien
gatgctgtgcacctcagctgctaag

SEQ ID NO: 1070025 - DNA, 25 bp, Homo sapien
cagacagaaacgctcagtggttccc

SEQ ID NO: 1070026 - DNA, 25 bp, Homo sapien
tggctgccacctgagtcaattcgtg

SEQ ID NO: 1070027 - DNA, 25 bp, Homo sapien
cctgagaggccatcgggacgatgct

SEQ ID NO: 1070028 - DNA, 25 bp, Homo sapien
aaaactcgagagtgggatggcctgc

SEQ ID NO: 1070029 - DNA, 25 bp, Homo sapien
tgtaaaatgccaccagctctctcag

SEQ ID NO: 1070030 - DNA, 25 bp, Homo sapien
gaagctgaaccgcagtgaagtccca

SEQ ID NO: 1070031 - DNA, 25 bp, Homo sapien
ttgtcatcccgcctcgacagagggt

SEQ ID NO: 1070032 - DNA, 25 bp, Homo sapien
ttccaggagtatcagcaaaaacaaa

SEQ ID NO: 1070033 - DNA, 25 bp, Homo sapien
tcagagtaggagacggcttccagga

SEQ ID NO: 1070034 - DNA, 25 bp, Homo sapien
gacggcttccaggagtatcagcaaa

SEQ ID NO: 1070035 - DNA, 25 bp, Homo sapien
ctcagagtaggagacggcttccagg

SEQ ID NO: 1070036 - DNA, 25 bp, Homo sapien
ccagggccgccgaccctggcaatga

SEQ ID NO: 1070037 - DNA, 25 bp, Homo sapien
ggagggaaggtatccgttcactcat

SEQ ID NO: 1070038 - DNA, 25 bp, Homo sapien
cctggcaatgactgtcaccagctgg

SEQ ID NO: 1070039 - DNA, 25 bp, Homo sapien
cgaccctggcaatgactgtcaccag

SEQ ID NO: 1070040 - DNA, 25 bp, Homo sapien
ctgttgtctagaccatgcctgtgcg

SEQ ID NO: 1070041 - DNA, 25 bp, Homo sapien
cgtaggcagcgtctacacagatgtt

SEQ ID NO: 1070042 - DNA, 25 bp, Homo sapien
gatgttacgcgcctccatggtggtc

SEQ ID NO: 1070043 - DNA, 25 bp, Homo sapien
tgcttgagtcgaatcctgagatggg

SEQ ID NO: 1070044 - DNA, 25 bp, Homo sapien
gtttgtggaccacttgcaggcgtgt

SEQ ID NO: 1070045 - DNA, 25 bp, Homo sapien
gtgaagccgggatccctctgagcag

SEQ ID NO: 1070046 - DNA, 25 bp, Homo sapien
tgtgaagccgggatccctctgagca

SEQ ID NO: 1070047 - DNA, 25 bp, Homo sapien
agcaggccctctagaggagtgtttg

SEQ ID NO: 1070048 - DNA, 25 bp, Homo sapien
cagaagctatgtccttcggcagtaa

SEQ ID NO: 1070049 - DNA, 25 bp, Homo sapien
ggaggcaccaggtctgaattccaga

SEQ ID NO: 1070050 - DNA, 25 bp, Homo sapien
taggtaattgccagcatgtgtgcgc

SEQ ID NO: 1070051 - DNA, 25 bp, Homo sapien
acagacccattcagggaggctggcg

SEQ ID NO: 1070052 - DNA, 25 bp, Homo sapien
tagggagaagctcggttcagcgcct

SEQ ID NO: 1070053 - DNA, 25 bp, Homo sapien
tactttttgcaataagtatggcgct

SEQ ID NO: 1070054 - DNA, 25 bp, Homo sapien
ctggtgtagcccagcattccgtggg

SEQ ID NO: 1070055 - DNA, 25 bp, Homo sapien
cgcttccagcattactgagtttggg

SEQ ID NO: 1070056 - DNA, 25 bp, Homo sapien
cactgccagctttgcctagagtcac

SEQ ID NO: 1070057 - DNA, 25 bp, Homo sapien
ggcgttcaggtacgagtcacagcta

SEQ ID NO: 1070058 - DNA, 25 bp, Homo sapien
atagttagaacgagtccccagggag

SEQ ID NO: 1070059 - DNA, 25 bp, Homo sapien
ccagtgagtgaagcaaccggcgtgt

SEQ ID NO: 1070060 - DNA, 25 bp, Homo sapien
tatgggcgaatagctctgaccaccc

SEQ ID NO: 1070061 - DNA, 25 bp, Homo sapien
gcggtgagaggctcgcacgcctcca

SEQ ID NO: 1070062 - DNA, 25 bp, Homo sapien
tgaccacccggcgaaggtgagggca

SEQ ID NO: 1070063 - DNA, 25 bp, Homo sapien
cccggctctgggctacggactatgg

SEQ ID NO: 1070064 - DNA, 25 bp, Homo sapien
cggcgccgcagccatggagggaggc

SEQ ID NO: 1070065 - DNA, 25 bp, Homo sapien
tcaggtggcggcgccgcagccatgg

SEQ ID NO: 1070066 - DNA, 25 bp, Homo sapien
gcgccgcagccatggagggaggcgg

SEQ ID NO: 1070067 - DNA, 25 bp, Homo sapien
gtggcggcgccgcagccatggaggg

SEQ ID NO: 1070068 - DNA, 25 bp, Homo sapien
tatagatcagcagtaagtaccgccc

SEQ ID NO: 1070069 - DNA, 25 bp, Homo sapien
tcggcctccaatcgtgtaacaggtt

SEQ ID NO: 1070070 - DNA, 25 bp, Homo sapien
cagcctcgccgcagatatagatcag

SEQ ID NO: 1070071 - DNA, 25 bp, Homo sapien
aattggccgatcttccaaccgctgg

SEQ ID NO: 1070072 - DNA, 25 bp, Homo sapien
gacaataatagtaacactgtggcta

SEQ ID NO: 1070073 - DNA, 25 bp, Homo sapien
cctgtggtgtcttaatttcgtaact

SEQ ID NO: 1070074 - DNA, 25 bp, Homo sapien
tagttaaactgagaagaagcctgtc

SEQ ID NO: 1070075 - DNA, 25 bp, Homo sapien
acacctgtggtgtcttaatttcgta

SEQ ID NO: 1070076 - DNA, 25 bp, Homo sapien
gctgcagattatccatcgggtgcga

SEQ ID NO: 1070077 - DNA, 25 bp, Homo sapien
tgcgaaactttggtggcaagggcca

SEQ ID NO: 1070078 - DNA, 25 bp, Homo sapien
tgatctccggagctagttccctgcc

SEQ ID NO: 1070079 - DNA, 25 bp, Homo sapien
caccctgtctggtacccgagaagaa

SEQ ID NO: 1070080 - DNA, 25 bp, Homo sapien
taagtggtttgctaagtgatcgccc

SEQ ID NO: 1070081 - DNA, 25 bp, Homo sapien
cccaggtcgccggttcaatgaatgc

SEQ ID NO: 1070082 - DNA, 25 bp, Homo sapien
gattgtagtttctccgtgacgcggt

SEQ ID NO: 1070083 - DNA, 25 bp, Homo sapien
tccaatgacgcaggccgggatttgc

SEQ ID NO: 1070084 - DNA, 25 bp, Homo sapien
caggagccctgttcaaaccaatggc

SEQ ID NO: 1070085 - DNA, 25 bp, Homo sapien
aagtgttactttctgagctcactgc

SEQ ID NO: 1070086 - DNA, 25 bp, Homo sapien
tagtttccacttggtgatgtagaac

SEQ ID NO: 1070087 - DNA, 25 bp, Homo sapien
tatcctgccagctaaaacaggatgg

SEQ ID NO: 1070088 - DNA, 25 bp, Homo sapien
cactccactgtactctgggctgtgc

SEQ ID NO: 1070089 - DNA, 25 bp, Homo sapien
ggctgtgcagctgagcaagaccctg

SEQ ID NO: 1070090 - DNA, 25 bp, Homo sapien
agaagggagaatcatttaagtccag

SEQ ID NO: 1070091 - DNA, 25 bp, Homo sapien
aagggagaatcatttaagtccagga

SEQ ID NO: 1070092 - DNA, 25 bp, Homo sapien
ggtggaggtggaagtatcgcttgag

SEQ ID NO: 1070093 - DNA, 25 bp, Homo sapien
gagcccgagaggttggagaggttga

SEQ ID NO: 1070094 - DNA, 25 bp, Homo sapien
gaggtggaggtggaagtatcgcttg

SEQ ID NO: 1070095 - DNA, 25 bp, Homo sapien
ttgagcccgagaggttggagaggtt

SEQ ID NO: 1070096 - DNA, 25 bp, Homo sapien
tcctgtacaaacgtgcccagctgag

SEQ ID NO: 1070097 - DNA, 25 bp, Homo sapien
cctcaattgcattaggcccgatgga

SEQ ID NO: 1070098 - DNA, 25 bp, Homo sapien
gccgcagggcctagatgtgcacaat

SEQ ID NO: 1070099 - DNA, 25 bp, Homo sapien
gggccccgtgtcagcaaaggacatt

SEQ ID NO: 1070100 - DNA, 25 bp, Homo sapien
aattatgccttggataactcctttt

SEQ ID NO: 1070101 - DNA, 25 bp, Homo sapien
tattctctccaaattatgccttgga

SEQ ID NO: 1070102 - DNA, 25 bp, Homo sapien
tctccaaattatgccttggataact

SEQ ID NO: 1070103 - DNA, 25 bp, Homo sapien
ccttggataactccttttcagctgc

SEQ ID NO: 1070104 - DNA, 25 bp, Homo sapien
gctggtgatttcaaacgtatctgtc

SEQ ID NO: 1070105 - DNA, 25 bp, Homo sapien
actgctctgagtgtgtcccagggcc

SEQ ID NO: 1070106 - DNA, 25 bp, Homo sapien
acctatcccagagcgatgctggtga

SEQ ID NO: 1070107 - DNA, 25 bp, Homo sapien
caccttgctgtcacatatcagaatg

SEQ ID NO: 1070108 - DNA, 25 bp, Homo sapien
gttgcatcagatgtacaaagtgcct

SEQ ID NO: 1070109 - DNA, 25 bp, Homo sapien
cagcaatctggccaccattcagggg

SEQ ID NO: 1070110 - DNA, 25 bp, Homo sapien
caaagtgcctttcgttttagtctct

SEQ ID NO: 1070111 - DNA, 25 bp, Homo sapien
acatactcacgaaaagtctgttggg

SEQ ID NO: 1070112 - DNA, 25 bp, Homo sapien
agcctggccaacatggcgaaaaccc

SEQ ID NO: 1070113 - DNA, 25 bp, Homo sapien
tggccaacatggcgaaaacccatct

SEQ ID NO: 1070114 - DNA, 25 bp, Homo sapien
ggcttaggattttgagcctggccaa

SEQ ID NO: 1070115 - DNA, 25 bp, Homo sapien
cctggccaacatggcgaaaacccat

SEQ ID NO: 1070116 - DNA, 25 bp, Homo sapien
tatcaagtattgctgtgtccccgac

SEQ ID NO: 1070117 - DNA, 25 bp, Homo sapien
gctgtatggcaagcccagagttggt

SEQ ID NO: 1070118 - DNA, 25 bp, Homo sapien
taagagtgccatcagtgtctcgcct

SEQ ID NO: 1070119 - DNA, 25 bp, Homo sapien
caagtggacgagactttgcggcagc

SEQ ID NO: 1070120 - DNA, 25 bp, Homo sapien
cccatagagtcttgattctcaccga

SEQ ID NO: 1070121 - DNA, 25 bp, Homo sapien
tctagccaactgcatttttccttat

SEQ ID NO: 1070122 - DNA, 25 bp, Homo sapien
gattctcaccgatttctctagccaa

SEQ ID NO: 1070123 - DNA, 25 bp, Homo sapien
tagagccaggtttcaacccatagag

SEQ ID NO: 1070124 - DNA, 25 bp, Homo sapien
tgcgcaagaggtgaaacaagatgtg

SEQ ID NO: 1070125 - DNA, 25 bp, Homo sapien
ttcagaagcgcatagaccgtggcgg

SEQ ID NO: 1070126 - DNA, 25 bp, Homo sapien
tatttaaggagatggtcctcagccc

SEQ ID NO: 1070127 - DNA, 25 bp, Homo sapien
gctgagtttgattcggacccgggca

SEQ ID NO: 1070128 - DNA, 25 bp, Homo sapien
gattggtcgatcctgggccagcatg

SEQ ID NO: 1070129 - DNA, 25 bp, Homo sapien
attctctcggtcttcgtctgctccg

SEQ ID NO: 1070130 - DNA, 25 bp, Homo sapien
tattgcaactgcctcgattggtcga

SEQ ID NO: 1070131 - DNA, 25 bp, Homo sapien
tgctccggtattgcaactgcctcga

SEQ ID NO: 1070132 - DNA, 25 bp, Homo sapien
cccttggaggcccttcagtatgagc

SEQ ID NO: 1070133 - DNA, 25 bp, Homo sapien
gactggacacatggtggcggcagag

SEQ ID NO: 1070134 - DNA, 25 bp, Homo sapien
tgcagatacgctgcatccgctggcc

SEQ ID NO: 1070135 - DNA, 25 bp, Homo sapien
agccaacagtatccagtccaggccc

SEQ ID NO: 1070136 - DNA, 25 bp, Homo sapien
gaagtacagggaccttggcctcctc

SEQ ID NO: 1070137 - DNA, 25 bp, Homo sapien
ggaatacagtaataagcaaacagcc

SEQ ID NO: 1070138 - DNA, 25 bp, Homo sapien
tcaagatgcctaagcgttaaccagg

SEQ ID NO: 1070139 - DNA, 25 bp, Homo sapien
tccaaaaagaacagcatgccgggca

SEQ ID NO: 1070140 - DNA, 25 bp, Homo sapien
gccacgccctgcctattgcatgttt

SEQ ID NO: 1070141 - DNA, 25 bp, Homo sapien
tacaagcatgacccgccacgccctg

SEQ ID NO: 1070142 - DNA, 25 bp, Homo sapien
cgccctgcctattgcatgttttttg

SEQ ID NO: 1070143 - DNA, 25 bp, Homo sapien
cacgccctgcctattgcatgttttt

SEQ ID NO: 1070144 - DNA, 25 bp, Homo sapien
taaaatacatattgttagattggat

SEQ ID NO: 1070145 - DNA, 25 bp, Homo sapien
gaggtggaagggttatttgagccaa

SEQ ID NO: 1070146 - DNA, 25 bp, Homo sapien
gctctatgctgcatatggtggcata

SEQ ID NO: 1070147 - DNA, 25 bp, Homo sapien
aagaaagctggaggccgaatgcagt

SEQ ID NO: 1070148 - DNA, 25 bp, Homo sapien
tccacggcacgccacaccctctgtg

SEQ ID NO: 1070149 - DNA, 25 bp, Homo sapien
tggcagaggtggtgtttggctccat

SEQ ID NO: 1070150 - DNA, 25 bp, Homo sapien
ccgggcactgagcaagcactttcca

SEQ ID NO: 1070151 - DNA, 25 bp, Homo sapien
gcaggccgggcactgagcaagcact

SEQ ID NO: 1070152 - DNA, 25 bp, Homo sapien
gattgtggtgatgatcatgatgatg

SEQ ID NO: 1070153 - DNA, 25 bp, Homo sapien
cagtgattgtggtgatgatcatgat

SEQ ID NO: 1070154 - DNA, 25 bp, Homo sapien
tgtggtgatgatcatgatgatgacc

SEQ ID NO: 1070155 - DNA, 25 bp, Homo sapien
ggtgatgatcatgatgatgaccatc

SEQ ID NO: 1070156 - DNA, 25 bp, Homo sapien
tgccaaaggtgtccctgaaatacga

SEQ ID NO: 1070157 - DNA, 25 bp, Homo sapien
tgcttctgccctgatgtgacagagt

SEQ ID NO: 1070158 - DNA, 25 bp, Homo sapien
tgtccctgaaatacgaagtcttcca

SEQ ID NO: 1070159 - DNA, 25 bp, Homo sapien
agccaacccacgacagctgtcaggg

SEQ ID NO: 1070160 - DNA, 25 bp, Homo sapien
ggagcatccctctcatcggggtgca

SEQ ID NO: 1070161 - DNA, 25 bp, Homo sapien
gttcttaaatcaaacactccatggt

SEQ ID NO: 1070162 - DNA, 25 bp, Homo sapien
cccacatattggtgttggctgttct

SEQ ID NO: 1070163 - DNA, 25 bp, Homo sapien
cttctcccacatattggtgttggct

SEQ ID NO: 1070164 - DNA, 25 bp, Homo sapien
tgttggggtgatgaggatgacaagt

SEQ ID NO: 1070165 - DNA, 25 bp, Homo sapien
tggggtgatgaggatgacaagttta

SEQ ID NO: 1070166 - DNA, 25 bp, Homo sapien
gggtgatgaggatgacaagtttatc

SEQ ID NO: 1070167 - DNA, 25 bp, Homo sapien
tcatgttggggtgatgaggatgaca

SEQ ID NO: 1070168 - DNA, 25 bp, Homo sapien
ctggcctgtcaagagcggtgacaga

SEQ ID NO: 1070169 - DNA, 25 bp, Homo sapien
ggcctgtcaagagcggtgacagaag

SEQ ID NO: 1070170 - DNA, 25 bp, Homo sapien
tggcctgtcaagagcggtgacagaa

SEQ ID NO: 1070171 - DNA, 25 bp, Homo sapien
ttcttccaattgtgctctcagcctt

SEQ ID NO: 1070172 - DNA, 25 bp, Homo sapien
gaaacaagcttagggacacactgaa

SEQ ID NO: 1070173 - DNA, 25 bp, Homo sapien
ttcccctcgctgtgtaatccattgc

SEQ ID NO: 1070174 - DNA, 25 bp, Homo sapien
attgctattgacttccccgtaggcg

SEQ ID NO: 1070175 - DNA, 25 bp, Homo sapien
cttcaggcccaacatatgtgggatc

SEQ ID NO: 1070176 - DNA, 25 bp, Homo sapien
caggacgcgtaggatgccttcaggc

SEQ ID NO: 1070177 - DNA, 25 bp, Homo sapien
taggatgccttcaggcccaacatat

SEQ ID NO: 1070178 - DNA, 25 bp, Homo sapien
ttcagctcccaggacgcgtaggatg

SEQ ID NO: 1070179 - DNA, 25 bp, Homo sapien
cctggatatctatgcaagatctgtt

SEQ ID NO: 1070180 - DNA, 25 bp, Homo sapien
tggatatctatgcaagatctgttgg

SEQ ID NO: 1070181 - DNA, 25 bp, Homo sapien
aaggttctgagaccacctggatatc

SEQ ID NO: 1070182 - DNA, 25 bp, Homo sapien
tctctctgacaaggttctgagacca

SEQ ID NO: 1070183 - DNA, 25 bp, Homo sapien
ttcctttcagaggaaaaatgagagg

SEQ ID NO: 1070184 - DNA, 25 bp, Homo sapien
tattaattctttcctttcagaggaa

SEQ ID NO: 1070185 - DNA, 25 bp, Homo sapien
tttctattaattctttcctttcaga

SEQ ID NO: 1070186 - DNA, 25 bp, Homo sapien
tctattaattctttcctttcagagg

SEQ ID NO: 1070187 - DNA, 25 bp, Homo sapien
tacaccccgaagttgcaatttgccg

SEQ ID NO: 1070188 - DNA, 25 bp, Homo sapien
tcattgtatcagttaccctgccaaa

SEQ ID NO: 1070189 - DNA, 25 bp, Homo sapien
atttgccgtttttcattgtatcagt

SEQ ID NO: 1070190 - DNA, 25 bp, Homo sapien
gcacagtgggagaaacaaataatgc

SEQ ID NO: 1070191 - DNA, 25 bp, Homo sapien
cagtgcacggagggctgtttttaag

SEQ ID NO: 1070192 - DNA, 25 bp, Homo sapien
ccagtgcacggagggctgtttttaa

SEQ ID NO: 1070193 - DNA, 25 bp, Homo sapien
agtgcacggagggctgtttttaagt

SEQ ID NO: 1070194 - DNA, 25 bp, Homo sapien
gccagtttccatgggctgaaggttc

SEQ ID NO: 1070195 - DNA, 25 bp, Homo sapien
tgccagtttccatgggctgaaggtt

SEQ ID NO: 1070196 - DNA, 25 bp, Homo sapien
tatcttgtaaaaggcccgttccagc

SEQ ID NO: 1070197 - DNA, 25 bp, Homo sapien
ctaaaggctaggatgctgcagtgtg

SEQ ID NO: 1070198 - DNA, 25 bp, Homo sapien
tctccgagccacgttgaaaaggtta

SEQ ID NO: 1070199 - DNA, 25 bp, Homo sapien
gaaaaaggtcatgtgctccgatatg

SEQ ID NO: 1070200 - DNA, 25 bp, Homo sapien
tatttggtccatgccttggacgagg

SEQ ID NO: 1070201 - DNA, 25 bp, Homo sapien
tctctgtactgatgagcactttggg

SEQ ID NO: 1070202 - DNA, 25 bp, Homo sapien
cactttgggaatacccacgggagca

SEQ ID NO: 1070203 - DNA, 25 bp, Homo sapien
ggctaaaaagctgcctaatggctgg

SEQ ID NO: 1070204 - DNA, 25 bp, Homo sapien
agtcacacagactcttggcagtgcc

SEQ ID NO: 1070205 - DNA, 25 bp, Homo sapien
ttgggctatacccatgtctacccca

SEQ ID NO: 1070206 - DNA, 25 bp, Homo sapien
ccatcaccagttctggtaggctttg

SEQ ID NO: 1070207 - DNA, 25 bp, Homo sapien
tcaccagttctggtaggctttggtt

SEQ ID NO: 1070208 - DNA, 25 bp, Homo sapien
tttcccagggcttagggatgagcag

SEQ ID NO: 1070209 - DNA, 25 bp, Homo sapien
ctgtcctcatttttcccagggctta

SEQ ID NO: 1070210 - DNA, 25 bp, Homo sapien
tgtcctcatttttcccagggcttag

SEQ ID NO: 1070211 - DNA, 25 bp, Homo sapien
tcatttttcccagggcttagggatg

SEQ ID NO: 1070212 - DNA, 25 bp, Homo sapien
ctgtgggtcttcaaccttgtcctga

SEQ ID NO: 1070213 - DNA, 25 bp, Homo sapien
ggctggcccatgagcttcccactgg

SEQ ID NO: 1070214 - DNA, 25 bp, Homo sapien
tcttcattcgtgtgaggctggccca

SEQ ID NO: 1070215 - DNA, 25 bp, Homo sapien
tgacattccccgcaggacttctgtg

SEQ ID NO: 1070216 - DNA, 25 bp, Homo sapien
ctcatttcctgttctatcgagtgac

SEQ ID NO: 1070217 - DNA, 25 bp, Homo sapien
ttctatcgagtgaccgccaacctag

SEQ ID NO: 1070218 - DNA, 25 bp, Homo sapien
tcgagtgaccgccaacctagtgaaa

SEQ ID NO: 1070219 - DNA, 25 bp, Homo sapien
tcctgttctatcgagtgaccgccaa

SEQ ID NO: 1070220 - DNA, 25 bp, Homo sapien
gatagatggagtaatcagggtaaat

SEQ ID NO: 1070221 - DNA, 25 bp, Homo sapien
aagatagatggagtaatcagggtaa

SEQ ID NO: 1070222 - DNA, 25 bp, Homo sapien
aaagatagatggagtaatcagggta

SEQ ID NO: 1070223 - DNA, 25 bp, Homo sapien
agatagatggagtaatcagggtaaa

SEQ ID NO: 1070224 - DNA, 25 bp, Homo sapien
ttgcttcttgttccatcgagtacaa

SEQ ID NO: 1070225 - DNA, 25 bp, Homo sapien
tcttgttccatcgagtacaattgag

SEQ ID NO: 1070226 - DNA, 25 bp, Homo sapien
ttgagtcaaaggtgctaatagatcc

SEQ ID NO: 1070227 - DNA, 25 bp, Homo sapien
ccatcgagtacaattgagtcaaagg

SEQ ID NO: 1070228 - DNA, 25 bp, Homo sapien
gagggtgggaacagaagggcagaag

SEQ ID NO: 1070229 - DNA, 25 bp, Homo sapien
ggcagaagatgccatgaaaatgagt

SEQ ID NO: 1070230 - DNA, 25 bp, Homo sapien
catggagggtgggaacagaagggca

SEQ ID NO: 1070231 - DNA, 25 bp, Homo sapien
gatgccatgaaaatgagtgcagttt

SEQ ID NO: 1070232 - DNA, 25 bp, Homo sapien
taattccctggtaaatggacagaaa

SEQ ID NO: 1070233 - DNA, 25 bp, Homo sapien
atctaatttggcctttgtcagctcc

SEQ ID NO: 1070234 - DNA, 25 bp, Homo sapien
ttggcctttgtcagctccataaatg

SEQ ID NO: 1070235 - DNA, 25 bp, Homo sapien
tgtcagctccataaatggtgttctt

SEQ ID NO: 1070236 - DNA, 25 bp, Homo sapien
tctgcagtctccacatcaggttttg

SEQ ID NO: 1070237 - DNA, 25 bp, Homo sapien
cagtctccacatcaggttttgctac

SEQ ID NO: 1070238 - DNA, 25 bp, Homo sapien
caggttttgctactcctttgctacc

SEQ ID NO: 1070239 - DNA, 25 bp, Homo sapien
cacatcaggttttgctactcctttg

SEQ ID NO: 1070240 - DNA, 25 bp, Homo sapien
tctctcgcccttccgccttccacaa

SEQ ID NO: 1070241 - DNA, 25 bp, Homo sapien
ttccacaatgtggacatgagagcac

SEQ ID NO: 1070242 - DNA, 25 bp, Homo sapien
agccctccctgttcaacaaggccgg

SEQ ID NO: 1070243 - DNA, 25 bp, Homo sapien
agaagaggtgtcacccagcctctct

SEQ ID NO: 1070244 - DNA, 25 bp, Homo sapien
tgatggttctgagggctgcttccag

SEQ ID NO: 1070245 - DNA, 25 bp, Homo sapien
catcacaaataattctacagccatc

SEQ ID NO: 1070246 - DNA, 25 bp, Homo sapien
gcttccagatgggtcatcacaaata

SEQ ID NO: 1070247 - DNA, 25 bp, Homo sapien
agggctgcttccagatgggtcatca

SEQ ID NO: 1070248 - DNA, 25 bp, Homo sapien
gaaccactcgctcgtgtttctaagg

SEQ ID NO: 1070249 - DNA, 25 bp, Homo sapien
aagaccgcggctgttcagaaccact

SEQ ID NO: 1070250 - DNA, 25 bp, Homo sapien
tgttctagcccatgtagatgctttc

SEQ ID NO: 1070251 - DNA, 25 bp, Homo sapien
tgtaacaccggtttggagcagggcc

SEQ ID NO: 1070252 - DNA, 25 bp, Homo sapien
gtgcccagccacatcatgctttttt

SEQ ID NO: 1070253 - DNA, 25 bp, Homo sapien
cactgtgcccagccacatcatgctt

SEQ ID NO: 1070254 - DNA, 25 bp, Homo sapien
actgtgcccagccacatcatgcttt

SEQ ID NO: 1070255 - DNA, 25 bp, Homo sapien
ctgtgcccagccacatcatgctttt

SEQ ID NO: 1070256 - DNA, 25 bp, Homo sapien
ctattttctccttcaattctgtcat

SEQ ID NO: 1070257 - DNA, 25 bp, Homo sapien
accctgctggcaattttcctatttt

SEQ ID NO: 1070258 - DNA, 25 bp, Homo sapien
ccctgctggcaattttcctattttc

SEQ ID NO: 1070259 - DNA, 25 bp, Homo sapien
ttcctattttctccttcaattctgt

SEQ ID NO: 1070260 - DNA, 25 bp, Homo sapien
tgcctctctagatgtcttgcttagt

SEQ ID NO: 1070261 - DNA, 25 bp, Homo sapien
ttcaaaatgacacttgccttagcat

SEQ ID NO: 1070262 - DNA, 25 bp, Homo sapien
aaaatgacacttgccttagcatcca

SEQ ID NO: 1070263 - DNA, 25 bp, Homo sapien
ctgcatgagtccagtacagagcctg

SEQ ID NO: 1070264 - DNA, 25 bp, Homo sapien
tctgggacagacttgggtgtctgca

SEQ ID NO: 1070265 - DNA, 25 bp, Homo sapien
aaggctggggtccactcgtctggga

SEQ ID NO: 1070266 - DNA, 25 bp, Homo sapien
aggctggggtccactcgtctgggac

SEQ ID NO: 1070267 - DNA, 25 bp, Homo sapien
ggctggggtccactcgtctgggaca

SEQ ID NO: 1070268 - DNA, 25 bp, Homo sapien
agaacaggtatatctgacgagtcac

SEQ ID NO: 1070269 - DNA, 25 bp, Homo sapien
tcagagaacaggtatatctgacgag

SEQ ID NO: 1070270 - DNA, 25 bp, Homo sapien
gaacaggtatatctgacgagtcact

SEQ ID NO: 1070271 - DNA, 25 bp, Homo sapien
agagaacaggtatatctgacgagtc

SEQ ID NO: 1070272 - DNA, 25 bp, Homo sapien
gtttcccgtgtgaaaatgggctcca

SEQ ID NO: 1070273 - DNA, 25 bp, Homo sapien
gcagcgtgggcttgaaagtacaaca

SEQ ID NO: 1070274 - DNA, 25 bp, Homo sapien
ggcaagttgcctcatgtctccgagc

SEQ ID NO: 1070275 - DNA, 25 bp, Homo sapien
tatgaagcataacctacctcgtggg

SEQ ID NO: 1070276 - DNA, 25 bp, Homo sapien
tttgcttttggcaaccgggagccat

SEQ ID NO: 1070277 - DNA, 25 bp, Homo sapien
gaagatgaggatatgcacccgccac

SEQ ID NO: 1070278 - DNA, 25 bp, Homo sapien
cgggagccatactgcatccagtgag

SEQ ID NO: 1070279 - DNA, 25 bp, Homo sapien
tgcatccagtgagcatccgcagctg

SEQ ID NO: 1070280 - DNA, 25 bp, Homo sapien
cagtttcaggggtcagtctgctaca

SEQ ID NO: 1070281 - DNA, 25 bp, Homo sapien
gtttcaggggtcagtctgctacagc

SEQ ID NO: 1070282 - DNA, 25 bp, Homo sapien
ttcaggggtcagtctgctacagctc

SEQ ID NO: 1070283 - DNA, 25 bp, Homo sapien
caggggtcagtctgctacagctcct

SEQ ID NO: 1070284 - DNA, 25 bp, Homo sapien
gctgtgggcaaagcgctgatacgta

SEQ ID NO: 1070285 - DNA, 25 bp, Homo sapien
atttgctgtgggcaaagcgctgata

SEQ ID NO: 1070286 - DNA, 25 bp, Homo sapien
gggcaaagcgctgatacgtacattt

SEQ ID NO: 1070287 - DNA, 25 bp, Homo sapien
gtgggcaaagcgctgatacgtacat

SEQ ID NO: 1070288 - DNA, 25 bp, Homo sapien
gggttgtgggactccagccactcca

SEQ ID NO: 1070289 - DNA, 25 bp, Homo sapien
gagagctcccaacgcatcactaggg

SEQ ID NO: 1070290 - DNA, 25 bp, Homo sapien
ttgcacccgatgaagccatgactgg

SEQ ID NO: 1070291 - DNA, 25 bp, Homo sapien
caggccctgctttcgtccagttgca

SEQ ID NO: 1070292 - DNA, 25 bp, Homo sapien
gacttgctcctgatcaaagctcact

SEQ ID NO: 1070293 - DNA, 25 bp, Homo sapien
ctgttatcaacatcaaccaggcggc

SEQ ID NO: 1070294 - DNA, 25 bp, Homo sapien
caatgctgttatcaacatcaaccag

SEQ ID NO: 1070295 - DNA, 25 bp, Homo sapien
cttgctcctgatcaaagctcactct

SEQ ID NO: 1070296 - DNA, 25 bp, Homo sapien
ctgatcagaggttgagctaataata

SEQ ID NO: 1070297 - DNA, 25 bp, Homo sapien
ttcttgagatcaaaaagtgggagtg

SEQ ID NO: 1070298 - DNA, 25 bp, Homo sapien
taagaggtaggatggttctggtcct

SEQ ID NO: 1070299 - DNA, 25 bp, Homo sapien
ataagaacgtgggttgcctaagagg

SEQ ID NO: 1070300 - DNA, 25 bp, Homo sapien
gtgaaagtggtaatatggcatcctc

SEQ ID NO: 1070301 - DNA, 25 bp, Homo sapien
ggcagccacgatgaaaggtgaaagt

SEQ ID NO: 1070302 - DNA, 25 bp, Homo sapien
aaggtgaaagtggtaatatggcatc

SEQ ID NO: 1070303 - DNA, 25 bp, Homo sapien
gtggtaatatggcatcctcaggcct

SEQ ID NO: 1070304 - DNA, 25 bp, Homo sapien
tctggtataccaggtcacaccatcc

SEQ ID NO: 1070305 - DNA, 25 bp, Homo sapien
accaggtcacaccatcctttgttca

SEQ ID NO: 1070306 - DNA, 25 bp, Homo sapien
tggtataccaggtcacaccatcctt

SEQ ID NO: 1070307 - DNA, 25 bp, Homo sapien
tataccaggtcacaccatcctttgt

SEQ ID NO: 1070308 - DNA, 25 bp, Homo sapien
tgtcaacatcggaattcacagcctt

SEQ ID NO: 1070309 - DNA, 25 bp, Homo sapien
gaattaaaacaagcatcgaatgaag

SEQ ID NO: 1070310 - DNA, 25 bp, Homo sapien
tcagtcaaattggagttacggtcaa

SEQ ID NO: 1070311 - DNA, 25 bp, Homo sapien
tacggtcaatcagcaggaaattgtc

SEQ ID NO: 1070312 - DNA, 25 bp, Homo sapien
caaaaccaagggccagctttctaca

SEQ ID NO: 1070313 - DNA, 25 bp, Homo sapien
gtgagtggattaacaggctggcagg

SEQ ID NO: 1070314 - DNA, 25 bp, Homo sapien
tcggtgagtggattaacaggctggc

SEQ ID NO: 1070315 - DNA, 25 bp, Homo sapien
ttgtcggtgagtggattaacaggct

SEQ ID NO: 1070316 - DNA, 25 bp, Homo sapien
tcagttgtcggtgagtggattaaca

SEQ ID NO: 1070317 - DNA, 25 bp, Homo sapien
tcagcttcattagcatatatttgga

SEQ ID NO: 1070318 - DNA, 25 bp, Homo sapien
gagttgccaaactaataattcacct

SEQ ID NO: 1070319 - DNA, 25 bp, Homo sapien
cattagtgagatcattcaggaggga

SEQ ID NO: 1070320 - DNA, 25 bp, Homo sapien
tatttcctgactcgcagttagtttg

SEQ ID NO: 1070321 - DNA, 25 bp, Homo sapien
caggaaaaacagtgtgaggccaatg

SEQ ID NO: 1070322 - DNA, 25 bp, Homo sapien
ccaggaaaaacagtgtgaggccaat

SEQ ID NO: 1070323 - DNA, 25 bp, Homo sapien
aggaaaaacagtgtgaggccaatgc

SEQ ID NO: 1070324 - DNA, 25 bp, Homo sapien
tgtgaggccaatgcttgcagcagac

SEQ ID NO: 1070325 - DNA, 25 bp, Homo sapien
tgagagggcaccagggtcagctcag

SEQ ID NO: 1070326 - DNA, 25 bp, Homo sapien
gagggcaccagggtcagctcagcca

SEQ ID NO: 1070327 - DNA, 25 bp, Homo sapien
ggcaccagggtcagctcagccactg

SEQ ID NO: 1070328 - DNA, 25 bp, Homo sapien
ctgagagggcaccagggtcagctca

SEQ ID NO: 1070329 - DNA, 25 bp, Homo sapien
tctaggtcttgccttgctaccacca

SEQ ID NO: 1070330 - DNA, 25 bp, Homo sapien
aggtcttgccttgctaccaccaggc

SEQ ID NO: 1070331 - DNA, 25 bp, Homo sapien
gcctctctaggtcttgccttgctac

SEQ ID NO: 1070332 - DNA, 25 bp, Homo sapien
gcagcctctctaggtcttgccttgc

SEQ ID NO: 1070333 - DNA, 25 bp, Homo sapien
aatgaacagtgtggccgacggccag

SEQ ID NO: 1070334 - DNA, 25 bp, Homo sapien
ttaatgaacagtgtggccgacggcc

SEQ ID NO: 1070335 - DNA, 25 bp, Homo sapien
acggccaggggtggagccagctggg

SEQ ID NO: 1070336 - DNA, 25 bp, Homo sapien
tgaacagtgtggccgacggccaggg

SEQ ID NO: 1070337 - DNA, 25 bp, Homo sapien
aagactggcttagccaagcccagag

SEQ ID NO: 1070338 - DNA, 25 bp, Homo sapien
cacagccaaagactggcttagccaa

SEQ ID NO: 1070339 - DNA, 25 bp, Homo sapien
caggatgtgggtaccaattgggcca

SEQ ID NO: 1070340 - DNA, 25 bp, Homo sapien
agcccagagcatgttgtccaaaggc

SEQ ID NO: 1070341 - DNA, 25 bp, Homo sapien
gaggaggtgtcaccaagaaccttgt

SEQ ID NO: 1070342 - DNA, 25 bp, Homo sapien
gaaccttgtcttcctcaccgtcacc

SEQ ID NO: 1070343 - DNA, 25 bp, Homo sapien
tcacctaccagttctgagaatctgg

SEQ ID NO: 1070344 - DNA, 25 bp, Homo sapien
gcctttgttaagaaggccttggcca

SEQ ID NO: 1070345 - DNA, 25 bp, Homo sapien
atgtgatggtcgagagtggtgtggg

SEQ ID NO: 1070346 - DNA, 25 bp, Homo sapien
gtcgagagtggtgtggggtggacat

SEQ ID NO: 1070347 - DNA, 25 bp, Homo sapien
tggtcgagagtggtgtggggtggac

SEQ ID NO: 1070348 - DNA, 25 bp, Homo sapien
gcatgtgatggtcgagagtggtgtg

SEQ ID NO: 1070349 - DNA, 25 bp, Homo sapien
gggctcagggtccgcctctctcagt

SEQ ID NO: 1070350 - DNA, 25 bp, Homo sapien
ctgggctcagggtccgcctctctca

SEQ ID NO: 1070351 - DNA, 25 bp, Homo sapien
tgggctcagggtccgcctctctcag

SEQ ID NO: 1070352 - DNA, 25 bp, Homo sapien
gatatgagagttgaagacaggtcgt

SEQ ID NO: 1070353 - DNA, 25 bp, Homo sapien
ctgggatatgagagttgaagacagg

SEQ ID NO: 1070354 - DNA, 25 bp, Homo sapien
gggatatgagagttgaagacaggtc

SEQ ID NO: 1070355 - DNA, 25 bp, Homo sapien
ggatatgagagttgaagacaggtcg

SEQ ID NO: 1070356 - DNA, 25 bp, Homo sapien
agggacaggataacaagagagctgc

SEQ ID NO: 1070357 - DNA, 25 bp, Homo sapien
agaaaccagcgaaacagggacagga

SEQ ID NO: 1070358 - DNA, 25 bp, Homo sapien
ctgcagaaaccagcgaaacagggac

SEQ ID NO: 1070359 - DNA, 25 bp, Homo sapien
gcagaaaccagcgaaacagggacag

SEQ ID NO: 1070360 - DNA, 25 bp, Homo sapien
ggggagaagaggcatcaccggatgt

SEQ ID NO: 1070361 - DNA, 25 bp, Homo sapien
ctccatgtgcaggggagaagaggca

SEQ ID NO: 1070362 - DNA, 25 bp, Homo sapien
tgcaggggagaagaggcatcaccgg

SEQ ID NO: 1070363 - DNA, 25 bp, Homo sapien
tccatgtgcaggggagaagaggcat

SEQ ID NO: 1070364 - DNA, 25 bp, Homo sapien
gctaatcagcctgtcagaacaaaga

SEQ ID NO: 1070365 - DNA, 25 bp, Homo sapien
cacagcaagcctggcctgtcggagg

SEQ ID NO: 1070366 - DNA, 25 bp, Homo sapien
cagactttggaattcaggccaaggc

SEQ ID NO: 1070367 - DNA, 25 bp, Homo sapien
tgcacgcagtgtgttgcatggagcc

SEQ ID NO: 1070368 - DNA, 25 bp, Homo sapien
tggtcaacttggaagagtcattaaa

SEQ ID NO: 1070369 - DNA, 25 bp, Homo sapien
cttggaagagtcattaaattttctg

SEQ ID NO: 1070370 - DNA, 25 bp, Homo sapien
tgttcgctggcgagtgtggcctctg

SEQ ID NO: 1070371 - DNA, 25 bp, Homo sapien
tacctgccttggtcaacttggaaga

SEQ ID NO: 1070372 - DNA, 25 bp, Homo sapien
caagcttgactgctctgatgaacgt

SEQ ID NO: 1070373 - DNA, 25 bp, Homo sapien
gcctgatagcctgtctggtcccatg

SEQ ID NO: 1070374 - DNA, 25 bp, Homo sapien
caaaccatgacctttccgtctgaca

SEQ ID NO: 1070375 - DNA, 25 bp, Homo sapien
gatgaacgtccaaggcccctgttgg

SEQ ID NO: 1070376 - DNA, 25 bp, Homo sapien
ctggtgtcagtgtttccatagagac

SEQ ID NO: 1070377 - DNA, 25 bp, Homo sapien
cctggtgtcagtgtttccatagaga

SEQ ID NO: 1070378 - DNA, 25 bp, Homo sapien
atagagacacagatgacccatgagt

SEQ ID NO: 1070379 - DNA, 25 bp, Homo sapien
gagacacagatgacccatgagtctt

SEQ ID NO: 1070380 - DNA, 25 bp, Homo sapien
gcctgatatggtacggtggccccac

SEQ ID NO: 1070381 - DNA, 25 bp, Homo sapien
tcatcacctgtggaagacatacgga

SEQ ID NO: 1070382 - DNA, 25 bp, Homo sapien
tcctgagggcaatgaggcctgatat

SEQ ID NO: 1070383 - DNA, 25 bp, Homo sapien
tatcagactccggtgtttaaggaat

SEQ ID NO: 1070384 - DNA, 25 bp, Homo sapien
cacctttgggctattatctgtgctg

SEQ ID NO: 1070385 - DNA, 25 bp, Homo sapien
ctaaaataaggacgtgagggcaggt

SEQ ID NO: 1070386 - DNA, 25 bp, Homo sapien
cctgccctgaaagcacagcctaaaa

SEQ ID NO: 1070387 - DNA, 25 bp, Homo sapien
aagtaactgcggtttctgtcattga

SEQ ID NO: 1070388 - DNA, 25 bp, Homo sapien
cagtatattgatagatgctccgtaa

SEQ ID NO: 1070389 - DNA, 25 bp, Homo sapien
tgcacttcctgccacttacagagaa

SEQ ID NO: 1070390 - DNA, 25 bp, Homo sapien
acaaatgaatagctcactgactgat

SEQ ID NO: 1070391 - DNA, 25 bp, Homo sapien
cgtaatctgggtgcagtgcgtgcca

SEQ ID NO: 1070392 - DNA, 25 bp, Homo sapien
cagcctttgagttatggatggacca

SEQ ID NO: 1070393 - DNA, 25 bp, Homo sapien
gctcaattggttgtgtcaagagacc

SEQ ID NO: 1070394 - DNA, 25 bp, Homo sapien
ccattggtccaaacaaggagtgtga

SEQ ID NO: 1070395 - DNA, 25 bp, Homo sapien
caagccccgagccttctagatctga

SEQ ID NO: 1070396 - DNA, 25 bp, Homo sapien
caaaggctatgaatagggcagttcc

SEQ ID NO: 1070397 - DNA, 25 bp, Homo sapien
caggcacagtatgagctcattccaa

SEQ ID NO: 1070398 - DNA, 25 bp, Homo sapien
tctaaggagcatgtgatacaaaacc

SEQ ID NO: 1070399 - DNA, 25 bp, Homo sapien
cattccaaatcgagagcattcctgc

SEQ ID NO: 1070400 - DNA, 25 bp, Homo sapien
ttctgatacttcaaccttgatcaga

SEQ ID NO: 1070401 - DNA, 25 bp, Homo sapien
ggagctgtgaccttaactctgcctc

SEQ ID NO: 1070402 - DNA, 25 bp, Homo sapien
gatacttcaaccttgatcagaattt

SEQ ID NO: 1070403 - DNA, 25 bp, Homo sapien
tggagctgtgaccttaactctgcct

SEQ ID NO: 1070404 - DNA, 25 bp, Homo sapien
ccccagagatgggagggcaagtgct

SEQ ID NO: 1070405 - DNA, 25 bp, Homo sapien
ccagagatgggagggcaagtgctgg

SEQ ID NO: 1070406 - DNA, 25 bp, Homo sapien
ctgccccagagatgggagggcaagt

SEQ ID NO: 1070407 - DNA, 25 bp, Homo sapien
agatgggagggcaagtgctggctgc

SEQ ID NO: 1070408 - DNA, 25 bp, Homo sapien
ctggccggcggccacggttgcttct

SEQ ID NO: 1070409 - DNA, 25 bp, Homo sapien
tgttcccaacgcctgcagatgcttc

SEQ ID NO: 1070410 - DNA, 25 bp, Homo sapien
cggaaagggctctcaggtcgctgcc

SEQ ID NO: 1070411 - DNA, 25 bp, Homo sapien
agtcctcccacggaaagggctctca

SEQ ID NO: 1070412 - DNA, 25 bp, Homo sapien
caaggctggctcatatttcagaaac

SEQ ID NO: 1070413 - DNA, 25 bp, Homo sapien
caggatggtgtcaggacaggaggtg

SEQ ID NO: 1070414 - DNA, 25 bp, Homo sapien
ggcatcgtgactgtcaaggctggct

SEQ ID NO: 1070415 - DNA, 25 bp, Homo sapien
acaggaggtgcccagtcgggtggat

SEQ ID NO: 1070416 - DNA, 25 bp, Homo sapien
cagctgccccgcgtgtcttggcttg

SEQ ID NO: 1070417 - DNA, 25 bp, Homo sapien
tggcactgagaatccaggtcttggg

SEQ ID NO: 1070418 - DNA, 25 bp, Homo sapien
cgtgtcttggcttgtcccggttttg

SEQ ID NO: 1070419 - DNA, 25 bp, Homo sapien
gagaatccaggtcttgggaatgcca

SEQ ID NO: 1070420 - DNA, 25 bp, Homo sapien
cccaccatgagcagggagaaattcc

SEQ ID NO: 1070421 - DNA, 25 bp, Homo sapien
caggtccccaccatgagcagggaga

SEQ ID NO: 1070422 - DNA, 25 bp, Homo sapien
agcagggagaaattccatcgtgcac

SEQ ID NO: 1070423 - DNA, 25 bp, Homo sapien
atgagcagggagaaattccatcgtg

SEQ ID NO: 1070424 - DNA, 25 bp, Homo sapien
ctctccttcccacttgtccgtcagc

SEQ ID NO: 1070425 - DNA, 25 bp, Homo sapien
gtgaggggaagctgcactgcccaaa

SEQ ID NO: 1070426 - DNA, 25 bp, Homo sapien
gaggggaagctgcactgcccaaagt

SEQ ID NO: 1070427 - DNA, 25 bp, Homo sapien
aagtgaggggaagctgcactgccca

SEQ ID NO: 1070428 - DNA, 25 bp, Homo sapien
ggggaagctgcactgcccaaagtca

SEQ ID NO: 1070429 - DNA, 25 bp, Homo sapien
tgtctgcagtattccttctcccatg

SEQ ID NO: 1070430 - DNA, 25 bp, Homo sapien
tctgtctgcagtattccttctccca

SEQ ID NO: 1070431 - DNA, 25 bp, Homo sapien
aggggagcctgggataatggtggct

SEQ ID NO: 1070432 - DNA, 25 bp, Homo sapien
caggggagcctgggataatggtggc

SEQ ID NO: 1070433 - DNA, 25 bp, Homo sapien
ttccagagggaactgaaacagcggg

SEQ ID NO: 1070434 - DNA, 25 bp, Homo sapien
actgaaacagcgggtgcttcactcc

SEQ ID NO: 1070435 - DNA, 25 bp, Homo sapien
aaacagcgggtgcttcactccactg

SEQ ID NO: 1070436 - DNA, 25 bp, Homo sapien
tgaaacagcgggtgcttcactccac

SEQ ID NO: 1070437 - DNA, 25 bp, Homo sapien
cacagattcgcatgacgagggcagc

SEQ ID NO: 1070438 - DNA, 25 bp, Homo sapien
ctctggcatagctcgagcagccgca

SEQ ID NO: 1070439 - DNA, 25 bp, Homo sapien
ttctctcctggtggtcgcccttggc

SEQ ID NO: 1070440 - DNA, 25 bp, Homo sapien
ttggcctcggtggtaccggttcagc

SEQ ID NO: 1070441 - DNA, 25 bp, Homo sapien
ctgctgagccgatcggtgaccacca

SEQ ID NO: 1070442 - DNA, 25 bp, Homo sapien
cgagctgctgagccgatcggtgacc

SEQ ID NO: 1070443 - DNA, 25 bp, Homo sapien
agctgctgagccgatcggtgaccac

SEQ ID NO: 1070444 - DNA, 25 bp, Homo sapien
gctgagccgatcggtgaccaccagg

SEQ ID NO: 1070445 - DNA, 25 bp, Homo sapien
cctctctcatcttgatcaaggaagc

SEQ ID NO: 1070446 - DNA, 25 bp, Homo sapien
tctctcatcttgatcaaggaagcca

SEQ ID NO: 1070447 - DNA, 25 bp, Homo sapien
tctcatcttgatcaaggaagccact

SEQ ID NO: 1070448 - DNA, 25 bp, Homo sapien
ctctcatcttgatcaaggaagccac

SEQ ID NO: 1070449 - DNA, 25 bp, Homo sapien
tctgaccagctgagcgggagtgtgc

SEQ ID NO: 1070450 - DNA, 25 bp, Homo sapien
ctgaccagctgagcgggagtgtgct

SEQ ID NO: 1070451 - DNA, 25 bp, Homo sapien
cttttgtgttctgaccagctgagcg

SEQ ID NO: 1070452 - DNA, 25 bp, Homo sapien
ttgtgttctgaccagctgagcggga

SEQ ID NO: 1070453 - DNA, 25 bp, Homo sapien
ttcctgatcattttgggccccaggc

SEQ ID NO: 1070454 - DNA, 25 bp, Homo sapien
aggctccaagaacctactccccaca

SEQ ID NO: 1070455 - DNA, 25 bp, Homo sapien
tcctcctctggatgatggttgtgga

SEQ ID NO: 1070456 - DNA, 25 bp, Homo sapien
agtccacaggctccaagaacctact

SEQ ID NO: 1070457 - DNA, 25 bp, Homo sapien
gcctgccgggctctgtactgtccat

SEQ ID NO: 1070458 - DNA, 25 bp, Homo sapien
ttcatctggcctgccgggctctgta

SEQ ID NO: 1070459 - DNA, 25 bp, Homo sapien
acagaacactcagataccagccagg

SEQ ID NO: 1070460 - DNA, 25 bp, Homo sapien
gttggcgctgcattgacagaacact

SEQ ID NO: 1070461 - DNA, 25 bp, Homo sapien
aaattatggtatgtaaaaagctgtt

SEQ ID NO: 1070462 - DNA, 25 bp, Homo sapien
cagcagaggtgagatcctacgctca

SEQ ID NO: 1070463 - DNA, 25 bp, Homo sapien
cgctcagagtaagtcgtgtggtagc

SEQ ID NO: 1070464 - DNA, 25 bp, Homo sapien
gagttgatagagtgcctcctactcc

SEQ ID NO: 1070465 - DNA, 25 bp, Homo sapien
tgaatgcctcccctctagaaaagcc

SEQ ID NO: 1070466 - DNA, 25 bp, Homo sapien
tagggattctattctggctgctcaa

SEQ ID NO: 1070467 - DNA, 25 bp, Homo sapien
taccaggagtcagcctagcagggtc

SEQ ID NO: 1070468 - DNA, 25 bp, Homo sapien
tatgcctaatgtgtgatctcccttg

SEQ ID NO: 1070469 - DNA, 25 bp, Homo sapien
tttctgccttcctccgagatgtgtg

SEQ ID NO: 1070470 - DNA, 25 bp, Homo sapien
caagatttgtcgctggctgtgagca

SEQ ID NO: 1070471 - DNA, 25 bp, Homo sapien
tcctccgagatgtgtgacaagtgta

SEQ ID NO: 1070472 - DNA, 25 bp, Homo sapien
tgtaatcacacagtttagcagtaac

SEQ ID NO: 1070473 - DNA, 25 bp, Homo sapien
agctgacagcggcttctcctcttcc

SEQ ID NO: 1070474 - DNA, 25 bp, Homo sapien
cttctcctcttccatcatgcaggca

SEQ ID NO: 1070475 - DNA, 25 bp, Homo sapien
ccgagctgacagcggcttctcctct

SEQ ID NO: 1070476 - DNA, 25 bp, Homo sapien
ttctcctcttccatcatgcaggcac

SEQ ID NO: 1070477 - DNA, 25 bp, Homo sapien
gtcccatcccactgttgcaagcagg

SEQ ID NO: 1070478 - DNA, 25 bp, Homo sapien
cccatcccactgttgcaagcaggag

SEQ ID NO: 1070479 - DNA, 25 bp, Homo sapien
ttgtcccatcccactgttgcaagca

SEQ ID NO: 1070480 - DNA, 25 bp, Homo sapien
tgtcccatcccactgttgcaagcag

SEQ ID NO: 1070481 - DNA, 25 bp, Homo sapien
gctatgcagtggtacatgtccaggt

SEQ ID NO: 1070482 - DNA, 25 bp, Homo sapien
ccaggttcttagtttcaagtgacag

SEQ ID NO: 1070483 - DNA, 25 bp, Homo sapien
gacgattatcctagggagctgctga

SEQ ID NO: 1070484 - DNA, 25 bp, Homo sapien
tgcatcccacggtagacgattatcc

SEQ ID NO: 1070485 - DNA, 25 bp, Homo sapien
catccatggttgacaatacggctga

SEQ ID NO: 1070486 - DNA, 25 bp, Homo sapien
tccatggttgacaatacggctgaca

SEQ ID NO: 1070487 - DNA, 25 bp, Homo sapien
catccatccatggttgacaatacgg

SEQ ID NO: 1070488 - DNA, 25 bp, Homo sapien
catgggcatccatccatggttgaca

SEQ ID NO: 1070489 - DNA, 25 bp, Homo sapien
tggatggagggagtaactgaggctc

SEQ ID NO: 1070490 - DNA, 25 bp, Homo sapien
gtgaacttagttgggcttcaccagc

SEQ ID NO: 1070491 - DNA, 25 bp, Homo sapien
aggctccaagggttcgaagtggctc

SEQ ID NO: 1070492 - DNA, 25 bp, Homo sapien
cacttgggtgaacttagttgggctt

SEQ ID NO: 1070493 - DNA, 25 bp, Homo sapien
ctccttggctggtatgccagtctcg

SEQ ID NO: 1070494 - DNA, 25 bp, Homo sapien
tcgggctctaagacagctacctcct

SEQ ID NO: 1070495 - DNA, 25 bp, Homo sapien
ggtatgccagtctcgggctctaaga

SEQ ID NO: 1070496 - DNA, 25 bp, Homo sapien
cctcctccgcggcatgtgtaaatat

SEQ ID NO: 1070497 - DNA, 25 bp, Homo sapien
caccccatacagtaggaccagagtc

SEQ ID NO: 1070498 - DNA, 25 bp, Homo sapien
ccccatacagtaggaccagagtcat

SEQ ID NO: 1070499 - DNA, 25 bp, Homo sapien
gcatctttgtccaccccaaacaccc

SEQ ID NO: 1070500 - DNA, 25 bp, Homo sapien
acaccccatacagtaggaccagagt

SEQ ID NO: 1070501 - DNA, 25 bp, Homo sapien
tggcttgctccctgttgctcgcagc

SEQ ID NO: 1070502 - DNA, 25 bp, Homo sapien
tttcctccatcggcctctctggctt

SEQ ID NO: 1070503 - DNA, 25 bp, Homo sapien
atgaaagggatttggcagcaacatc

SEQ ID NO: 1070504 - DNA, 25 bp, Homo sapien
tctctctgctggagatgaaagggat

SEQ ID NO: 1070505 - DNA, 25 bp, Homo sapien
tgggatggcatttattctggggcct

SEQ ID NO: 1070506 - DNA, 25 bp, Homo sapien
gagcagctccttggtccctccgaca

SEQ ID NO: 1070507 - DNA, 25 bp, Homo sapien
tcagagctgccaaggactttctcag

SEQ ID NO: 1070508 - DNA, 25 bp, Homo sapien
gtccctccgacagcctgggatggca

SEQ ID NO: 1070509 - DNA, 25 bp, Homo sapien
ctcttgcctctttgctgtggtcctg

SEQ ID NO: 1070510 - DNA, 25 bp, Homo sapien
tcttgcctctttgctgtggtcctgt

SEQ ID NO: 1070511 - DNA, 25 bp, Homo sapien
cagtgtggcaacatgagctatctcc

SEQ ID NO: 1070512 - DNA, 25 bp, Homo sapien
gaagtacagcaactcagtgtggcaa

SEQ ID NO: 1070513 - DNA, 25 bp, Homo sapien
agctctgattgccagttatagatgt

SEQ ID NO: 1070514 - DNA, 25 bp, Homo sapien
ctggaagtacagcaactcagtgtgg

SEQ ID NO: 1070515 - DNA, 25 bp, Homo sapien
tcagcccacatcgtgcagctcaatg

SEQ ID NO: 1070516 - DNA, 25 bp, Homo sapien
ggacttcttgggactatcatctgga

SEQ ID NO: 1070517 - DNA, 25 bp, Homo sapien
tgatttggttgtgcaagggctgaca

SEQ ID NO: 1070518 - DNA, 25 bp, Homo sapien
caactcaatggcagatttctttgct

SEQ ID NO: 1070519 - DNA, 25 bp, Homo sapien
agatgaccataaagggtcctgtggg

SEQ ID NO: 1070520 - DNA, 25 bp, Homo sapien
cagcataaaagatgaccataaaggg

SEQ ID NO: 1070521 - DNA, 25 bp, Homo sapien
taaaagatgaccataaagggtcctg

SEQ ID NO: 1070522 - DNA, 25 bp, Homo sapien
ggagcagcataaaagatgaccataa

SEQ ID NO: 1070523 - DNA, 25 bp, Homo sapien
cctctttcgtaaagtcatctttggc

SEQ ID NO: 1070524 - DNA, 25 bp, Homo sapien
gccattggggtcctgaatctcctct

SEQ ID NO: 1070525 - DNA, 25 bp, Homo sapien
tttggcttccctgagataagcaggc

SEQ ID NO: 1070526 - DNA, 25 bp, Homo sapien
gagataagcaggcaacctctgctct

SEQ ID NO: 1070527 - DNA, 25 bp, Homo sapien
ggagacatggttccttcttcaagga

SEQ ID NO: 1070528 - DNA, 25 bp, Homo sapien
aggagacatggttccttcttcaagg

SEQ ID NO: 1070529 - DNA, 25 bp, Homo sapien
ttcttcaaggaggagtcgagagcca

SEQ ID NO: 1070530 - DNA, 25 bp, Homo sapien
tcaaggaggagtcgagagccacagc

SEQ ID NO: 1070531 - DNA, 25 bp, Homo sapien
taacggcaataaggaatgaaatctc

SEQ ID NO: 1070532 - DNA, 25 bp, Homo sapien
gcagcccctgtgtatgcagtgtgca

SEQ ID NO: 1070533 - DNA, 25 bp, Homo sapien
tccacagatctgtctggtaacggca

SEQ ID NO: 1070534 - DNA, 25 bp, Homo sapien
attcccatttggcagcccctgtgta

SEQ ID NO: 1070535 - DNA, 25 bp, Homo sapien
ggcaaaagcgcctgaagctgctact

SEQ ID NO: 1070536 - DNA, 25 bp, Homo sapien
gctactgcagccatggctataaaac

SEQ ID NO: 1070537 - DNA, 25 bp, Homo sapien
gattgatgtcaatcctgcaaggcaa

SEQ ID NO: 1070538 - DNA, 25 bp, Homo sapien
cactccactggagcatgtttcagaa

SEQ ID NO: 1070539 - DNA, 25 bp, Homo sapien
tctgtcaatgtacataagaaatgtt

SEQ ID NO: 1070540 - DNA, 25 bp, Homo sapien
tgcccgggcagcgttttgcaaaaga

SEQ ID NO: 1070541 - DNA, 25 bp, Homo sapien
taatgtggatttgccggatgagaac

SEQ ID NO: 1070542 - DNA, 25 bp, Homo sapien
gataacgttcccctgtaatgtggat

SEQ ID NO: 1070543 - DNA, 25 bp, Homo sapien
caggggcgcaataggggagcccaga

SEQ ID NO: 1070544 - DNA, 25 bp, Homo sapien
gagcaggggcgcaataggggagccc

SEQ ID NO: 1070545 - DNA, 25 bp, Homo sapien
aggagcaggggcgcaataggggagc

SEQ ID NO: 1070546 - DNA, 25 bp, Homo sapien
agcaggggcgcaataggggagccca

SEQ ID NO: 1070547 - DNA, 25 bp, Homo sapien
cattcatgttacattcactaacttc

SEQ ID NO: 1070548 - DNA, 25 bp, Homo sapien
ttcatgttacattcactaacttcca

SEQ ID NO: 1070549 - DNA, 25 bp, Homo sapien
tcatgttacattcactaacttccat

SEQ ID NO: 1070550 - DNA, 25 bp, Homo sapien
tcattcatgttacattcactaactt

SEQ ID NO: 1070551 - DNA, 25 bp, Homo sapien
ggactatcatatctagcttctaagg

SEQ ID NO: 1070552 - DNA, 25 bp, Homo sapien
gaggacttggactatcatatctagc

SEQ ID NO: 1070553 - DNA, 25 bp, Homo sapien
tctagcttctaaggagaaggttgat

SEQ ID NO: 1070554 - DNA, 25 bp, Homo sapien
caggtaagccgcctgaggacttgga

SEQ ID NO: 1070555 - DNA, 25 bp, Homo sapien
tcatgaatttttgggttatccttga

SEQ ID NO: 1070556 - DNA, 25 bp, Homo sapien
gaatttttgggttatccttgagcag

SEQ ID NO: 1070557 - DNA, 25 bp, Homo sapien
catgaatttttgggttatccttgag

SEQ ID NO: 1070558 - DNA, 25 bp, Homo sapien
atttttgggttatccttgagcagga

SEQ ID NO: 1070559 - DNA, 25 bp, Homo sapien
ggcaatgtagaaagagctcctaaaa

SEQ ID NO: 1070560 - DNA, 25 bp, Homo sapien
aaattagtcgaaataattttagctg

SEQ ID NO: 1070561 - DNA, 25 bp, Homo sapien
gaaagagctcctaaaattagtcgaa

SEQ ID NO: 1070562 - DNA, 25 bp, Homo sapien
cacaggggcaatgtagaaagagctc

SEQ ID NO: 1070563 - DNA, 25 bp, Homo sapien
ggcagccacttattagcgaagacaa

SEQ ID NO: 1070564 - DNA, 25 bp, Homo sapien
cacttattagcgaagacaaaggcag

SEQ ID NO: 1070565 - DNA, 25 bp, Homo sapien
tattagcgaagacaaaggcagcatt

SEQ ID NO: 1070566 - DNA, 25 bp, Homo sapien
tcctctgcgtggcagccacttatta

SEQ ID NO: 1070567 - DNA, 25 bp, Homo sapien
ccttgttgcatcgcgagccaggagc

SEQ ID NO: 1070568 - DNA, 25 bp, Homo sapien
gcagcggaagccaggcctcgcagaa

SEQ ID NO: 1070569 - DNA, 25 bp, Homo sapien
gcattctcgcgaccattgtctcttc

SEQ ID NO: 1070570 - DNA, 25 bp, Homo sapien
aggcctcgcagaaggcggccctata

SEQ ID NO: 1070571 - DNA, 25 bp, Homo sapien
catgggtcctagtctctttctggga

SEQ ID NO: 1070572 - DNA, 25 bp, Homo sapien
tgcatgctcttctgcatgggtccta

SEQ ID NO: 1070573 - DNA, 25 bp, Homo sapien
ttgcatgctcttctgcatgggtcct

SEQ ID NO: 1070574 - DNA, 25 bp, Homo sapien
ctgcatgggtcctagtctctttctg

SEQ ID NO: 1070575 - DNA, 25 bp, Homo sapien
tctgtgccgtctggataaccgttca

SEQ ID NO: 1070576 - DNA, 25 bp, Homo sapien
tcagtttgggccctaagaggccacc

SEQ ID NO: 1070577 - DNA, 25 bp, Homo sapien
ggaagtctgacatctccactgggtg

SEQ ID NO: 1070578 - DNA, 25 bp, Homo sapien
gttcaagccagaagccatcagtttg

SEQ ID NO: 1070579 - DNA, 25 bp, Homo sapien
tttttataaccctggcaaaatgctc

SEQ ID NO: 1070580 - DNA, 25 bp, Homo sapien
cgcgcgcgcacatatgatacataac

SEQ ID NO: 1070581 - DNA, 25 bp, Homo sapien
cactggatcactgagtggaaagggc

SEQ ID NO: 1070582 - DNA, 25 bp, Homo sapien
taatcttctaaattgaaagccataa

SEQ ID NO: 1070583 - DNA, 25 bp, Homo sapien
gcacagagagataaggagctcatca

SEQ ID NO: 1070584 - DNA, 25 bp, Homo sapien
tattttggagagtctgctgaggctg

SEQ ID NO: 1070585 - DNA, 25 bp, Homo sapien
gagggactgctgttcccgagcagct

SEQ ID NO: 1070586 - DNA, 25 bp, Homo sapien
ttaccatgaagtgctcctgatttgc

SEQ ID NO: 1070587 - DNA, 25 bp, Homo sapien
caccgactccaggtagatcaggcat

SEQ ID NO: 1070588 - DNA, 25 bp, Homo sapien
ggggggccaggaccagcccatcagg

SEQ ID NO: 1070589 - DNA, 25 bp, Homo sapien
tgtgttcacgctgcatgccctggcc

SEQ ID NO: 1070590 - DNA, 25 bp, Homo sapien
tccaggtagatcaggcatctggatg

SEQ ID NO: 1070591 - DNA, 25 bp, Homo sapien
tggagcaagggaggtctaaaggtgg

SEQ ID NO: 1070592 - DNA, 25 bp, Homo sapien
tctaaaggtgggcccaagtggttga

SEQ ID NO: 1070593 - DNA, 25 bp, Homo sapien
tgattggagcaagggaggtctaaag

SEQ ID NO: 1070594 - DNA, 25 bp, Homo sapien
attggagcaagggaggtctaaaggt

SEQ ID NO: 1070595 - DNA, 25 bp, Homo sapien
gagataagtggaggcctctccaaag

SEQ ID NO: 1070596 - DNA, 25 bp, Homo sapien
taagagataagtggaggcctctcca

SEQ ID NO: 1070597 - DNA, 25 bp, Homo sapien
ttaagagataagtggaggcctctcc

SEQ ID NO: 1070598 - DNA, 25 bp, Homo sapien
aagagataagtggaggcctctccaa

SEQ ID NO: 1070599 - DNA, 25 bp, Homo sapien
gtcctggcaaggacaggctcttctt

SEQ ID NO: 1070600 - DNA, 25 bp, Homo sapien
cctggcaaggacaggctcttcttca

SEQ ID NO: 1070601 - DNA, 25 bp, Homo sapien
gcagggcagtcctggcaaggacagg

SEQ ID NO: 1070602 - DNA, 25 bp, Homo sapien
cagtcctggcaaggacaggctcttc

SEQ ID NO: 1070603 - DNA, 25 bp, Homo sapien
catcttgcaaggctcgatcataaag

SEQ ID NO: 1070604 - DNA, 25 bp, Homo sapien
gatggcagtgccaggatcgaagcaa

SEQ ID NO: 1070605 - DNA, 25 bp, Homo sapien
tcgatcataaaggatggcagtgcca

SEQ ID NO: 1070606 - DNA, 25 bp, Homo sapien
tgccaggatcgaagcaataggtcat

SEQ ID NO: 1070607 - DNA, 25 bp, Homo sapien
tggtgtcatcagatgtgaggtcatt

SEQ ID NO: 1070608 - DNA, 25 bp, Homo sapien
tggagctctgcatgtccccgagctc

SEQ ID NO: 1070609 - DNA, 25 bp, Homo sapien
catggagctctgcatgtccccgagc

SEQ ID NO: 1070610 - DNA, 25 bp, Homo sapien
tgtcatcagatgtgaggtcattctg

SEQ ID NO: 1070611 - DNA, 25 bp, Homo sapien
cctgctggtttgagcagacgtgaca

SEQ ID NO: 1070612 - DNA, 25 bp, Homo sapien
cctggccgaatttttgttggtggct

SEQ ID NO: 1070613 - DNA, 25 bp, Homo sapien
gccgaatttttgttggtggctccag

SEQ ID NO: 1070614 - DNA, 25 bp, Homo sapien
tgagcagacgtgacaagagcaagaa

SEQ ID NO: 1070615 - DNA, 25 bp, Homo sapien
cttcataaccttccaacgtgtgaaa

SEQ ID NO: 1070616 - DNA, 25 bp, Homo sapien
ttaaattaagaatttgatacattcc

SEQ ID NO: 1070617 - DNA, 25 bp, Homo sapien
cctttcacgacatgctggcgccggg

SEQ ID NO: 1070618 - DNA, 25 bp, Homo sapien
cttccaacgtgtgaaatggcccttt

SEQ ID NO: 1070619 - DNA, 25 bp, Homo sapien
cacagtcctcagggaagggactcat

SEQ ID NO: 1070620 - DNA, 25 bp, Homo sapien
acttgatctccacctcgctccacct

SEQ ID NO: 1070621 - DNA, 25 bp, Homo sapien
aagaggccccgtcccacagtttctg

SEQ ID NO: 1070622 - DNA, 25 bp, Homo sapien
gtgggacttgatctccacctcgctc

SEQ ID NO: 1070623 - DNA, 25 bp, Homo sapien
ttacagacgtttgatgtccctggaa

SEQ ID NO: 1070624 - DNA, 25 bp, Homo sapien
ctctctttcaagggctatgaattca

SEQ ID NO: 1070625 - DNA, 25 bp, Homo sapien
caagtttgctcatgtgcagctcatc

SEQ ID NO: 1070626 - DNA, 25 bp, Homo sapien
tctttcaagggctatgaattcaagt

SEQ ID NO: 1070627 - DNA, 25 bp, Homo sapien
ctgcaggatgaggcaaaaaaagttg

SEQ ID NO: 1070628 - DNA, 25 bp, Homo sapien
tgcagaaagctttttctgccagctg

SEQ ID NO: 1070629 - DNA, 25 bp, Homo sapien
tggttctctgagatccctgagggcc

SEQ ID NO: 1070630 - DNA, 25 bp, Homo sapien
aatcatgtaattctgctgcagaaag

SEQ ID NO: 1070631 - DNA, 25 bp, Homo sapien
acagcaggaaagaggtgagctctgg

SEQ ID NO: 1070632 - DNA, 25 bp, Homo sapien
cagcaggaaagaggtgagctctggc

SEQ ID NO: 1070633 - DNA, 25 bp, Homo sapien
agcaggaaagaggtgagctctggcc

SEQ ID NO: 1070634 - DNA, 25 bp, Homo sapien
ctgtgacttggtggtaacggtgctc

SEQ ID NO: 1070635 - DNA, 25 bp, Homo sapien
gtgacttggtggtaacggtgctcat

SEQ ID NO: 1070636 - DNA, 25 bp, Homo sapien
tgtgacttggtggtaacggtgctca

SEQ ID NO: 1070637 - DNA, 25 bp, Homo sapien
ggtctggatatgcaccttctggtgt

SEQ ID NO: 1070638 - DNA, 25 bp, Homo sapien
aggtctggatatgcaccttctggtg

SEQ ID NO: 1070639 - DNA, 25 bp, Homo sapien
ctggatatgcaccttctggtgtctc

SEQ ID NO: 1070640 - DNA, 25 bp, Homo sapien
ccaggtctggatatgcaccttctgg

SEQ ID NO: 1070641 - DNA, 25 bp, Homo sapien
caaaccacagggtgggattaagcag

SEQ ID NO: 1070642 - DNA, 25 bp, Homo sapien
ctgatgcttatctgcagggcttgct

SEQ ID NO: 1070643 - DNA, 25 bp, Homo sapien
tggggcaggctgatgcttatctgca

SEQ ID NO: 1070644 - DNA, 25 bp, Homo sapien
gcaggctgatgcttatctgcagggc

SEQ ID NO: 1070645 - DNA, 25 bp, Homo sapien
ctgtggggcaggctgatgcttatct

SEQ ID NO: 1070646 - DNA, 25 bp, Homo sapien
gctggaattacacagcgtctccgca

SEQ ID NO: 1070647 - DNA, 25 bp, Homo sapien
agctagagtcctttggcgagccagg

SEQ ID NO: 1070648 - DNA, 25 bp, Homo sapien
tgtaattagggcagtgacagctgga

SEQ ID NO: 1070649 - DNA, 25 bp, Homo sapien
gacaggtaatacctggcaagttctg

SEQ ID NO: 1070650 - DNA, 25 bp, Homo sapien
cctctgtgaaaaggagagagtgtct

SEQ ID NO: 1070651 - DNA, 25 bp, Homo sapien
gagattgttcgccttcaaaaggcct

SEQ ID NO: 1070652 - DNA, 25 bp, Homo sapien
ctaggcagtgctgtcattaagcgac

SEQ ID NO: 1070653 - DNA, 25 bp, Homo sapien
cgacattgtgtgagattgttcgcct

SEQ ID NO: 1070654 - DNA, 25 bp, Homo sapien
ggagtgtgtctcagcaccgctgcgc

SEQ ID NO: 1070655 - DNA, 25 bp, Homo sapien
ctcgggagtgtgtctcagcaccgct

SEQ ID NO: 1070656 - DNA, 25 bp, Homo sapien
tgtgtctcagcaccgctgcgcgtgc

SEQ ID NO: 1070657 - DNA, 25 bp, Homo sapien
tgtgctcgggagtgtgtctcagcac

SEQ ID NO: 1070658 - DNA, 25 bp, Homo sapien
gcccagaccgcaccaggagtgtggc

SEQ ID NO: 1070659 - DNA, 25 bp, Homo sapien
tgctggatacctggatgaatgactt

SEQ ID NO: 1070660 - DNA, 25 bp, Homo sapien
ccgcaccaggagtgtggcaagtgct

SEQ ID NO: 1070661 - DNA, 25 bp, Homo sapien
ggcaagtgctgcatagatgctggat

SEQ ID NO: 1070662 - DNA, 25 bp, Homo sapien
acattcagatggcaggcgatagtgg

SEQ ID NO: 1070663 - DNA, 25 bp, Homo sapien
cttgcacattcagatggcaggcgat

SEQ ID NO: 1070664 - DNA, 25 bp, Homo sapien
tgcacattcagatggcaggcgatag

SEQ ID NO: 1070665 - DNA, 25 bp, Homo sapien
gcacattcagatggcaggcgatagt

SEQ ID NO: 1070666 - DNA, 25 bp, Homo sapien
cattttctttaaatgcttctcactc

SEQ ID NO: 1070667 - DNA, 25 bp, Homo sapien
tctttaaatgcttctcactctctgt

SEQ ID NO: 1070668 - DNA, 25 bp, Homo sapien
ttctttaaatgcttctcactctctg

SEQ ID NO: 1070669 - DNA, 25 bp, Homo sapien
ttttctttaaatgcttctcactctc

SEQ ID NO: 1070670 - DNA, 25 bp, Homo sapien
cacaatcaccggagaaacaggatct

SEQ ID NO: 1070671 - DNA, 25 bp, Homo sapien
cactttcaccgccagtccttgtgtg

SEQ ID NO: 1070672 - DNA, 25 bp, Homo sapien
tgtggaccctttgtgaccctttatg

SEQ ID NO: 1070673 - DNA, 25 bp, Homo sapien
ccttggtggccgaagcagaagtcac

SEQ ID NO: 1070674 - DNA, 25 bp, Homo sapien
ggagcttgagggtagcagctgcctc

SEQ ID NO: 1070675 - DNA, 25 bp, Homo sapien
gagcttgagggtagcagctgcctct

SEQ ID NO: 1070676 - DNA, 25 bp, Homo sapien
tagcaaattcggagcagcaggttct

SEQ ID NO: 1070677 - DNA, 25 bp, Homo sapien
cttggcctctgaaatagaatggaga

SEQ ID NO: 1070678 - DNA, 25 bp, Homo sapien
aatggagaccggctattaaaccagt

SEQ ID NO: 1070679 - DNA, 25 bp, Homo sapien
tgacattccaccttgtcgccgccat

SEQ ID NO: 1070680 - DNA, 25 bp, Homo sapien
catggggccgagtcctgggggtaag

SEQ ID NO: 1070681 - DNA, 25 bp, Homo sapien
gcggccggcggcgtctccatggggc

SEQ ID NO: 1070682 - DNA, 25 bp, Homo sapien
cggcgtctccatggggccgagtcct

SEQ ID NO: 1070683 - DNA, 25 bp, Homo sapien
tccatggggccgagtcctgggggta

SEQ ID NO: 1070684 - DNA, 25 bp, Homo sapien
cctggaaggccccgcgccacagctc

SEQ ID NO: 1070685 - DNA, 25 bp, Homo sapien
actcctggaaggccccgcgccacag

SEQ ID NO: 1070686 - DNA, 25 bp, Homo sapien
agactcctggaaggccccgcgccac

SEQ ID NO: 1070687 - DNA, 25 bp, Homo sapien
agctcagactcctggaaggccccgc

SEQ ID NO: 1070688 - DNA, 25 bp, Homo sapien
ggacaggcttctctccacaggggcc

SEQ ID NO: 1070689 - DNA, 25 bp, Homo sapien
ccaggacaggcttctctccacaggg

SEQ ID NO: 1070690 - DNA, 25 bp, Homo sapien
gcttctctccacaggggccactcat

SEQ ID NO: 1070691 - DNA, 25 bp, Homo sapien
gggctggcttccaggacaggcttct

SEQ ID NO: 1070692 - DNA, 25 bp, Homo sapien
gtccaccttcatctgcagttccagg

SEQ ID NO: 1070693 - DNA, 25 bp, Homo sapien
gtgccctgacggctgtggctgtcct

SEQ ID NO: 1070694 - DNA, 25 bp, Homo sapien
gccagctcttgacccggccttgggg

SEQ ID NO: 1070695 - DNA, 25 bp, Homo sapien
catctgcagttccagggccgaggcc

SEQ ID NO: 1070696 - DNA, 25 bp, Homo sapien
tccggtgaggtctggcgctcccgct

SEQ ID NO: 1070697 - DNA, 25 bp, Homo sapien
tgaccactggtctcaggtcgctgcc

SEQ ID NO: 1070698 - DNA, 25 bp, Homo sapien
tggccacgttgctcccatcgatgac

SEQ ID NO: 1070699 - DNA, 25 bp, Homo sapien
ccaccccgcgggactagagggagct

SEQ ID NO: 1070700 - DNA, 25 bp, Homo sapien
tggcgaacgggagaaacaatgctgc

SEQ ID NO: 1070701 - DNA, 25 bp, Homo sapien
tgccacaataggtcaggtccctggt

SEQ ID NO: 1070702 - DNA, 25 bp, Homo sapien
taagagacagtcagaactcgaaccc

SEQ ID NO: 1070703 - DNA, 25 bp, Homo sapien
gaacccttgtgagatgtcactgcct

SEQ ID NO: 1070704 - DNA, 25 bp, Homo sapien
gccagttcccacagctccaggatgg

SEQ ID NO: 1070705 - DNA, 25 bp, Homo sapien
agtgccagttcccacagctccagga

SEQ ID NO: 1070706 - DNA, 25 bp, Homo sapien
aggccaaggcctccattcccagtgc

SEQ ID NO: 1070707 - DNA, 25 bp, Homo sapien
aaggcctccattcccagtgccagtt

SEQ ID NO: 1070708 - DNA, 25 bp, Homo sapien
ggagaggacagggttagcccacact

SEQ ID NO: 1070709 - DNA, 25 bp, Homo sapien
acagggttagcccacactgatggcc

SEQ ID NO: 1070710 - DNA, 25 bp, Homo sapien
ttagcccacactgatggccagcctg

SEQ ID NO: 1070711 - DNA, 25 bp, Homo sapien
agaggacagggttagcccacactga

SEQ ID NO: 1070712 - DNA, 25 bp, Homo sapien
tgtgatgtctgtgtggccccgctcc

SEQ ID NO: 1070713 - DNA, 25 bp, Homo sapien
ccagaaaccagttcactgccagcag

SEQ ID NO: 1070714 - DNA, 25 bp, Homo sapien
ctgtgatgggcacgtcgggccgagg

SEQ ID NO: 1070715 - DNA, 25 bp, Homo sapien
gcacgtcgggccgaggctgctcctt

SEQ ID NO: 1070716 - DNA, 25 bp, Homo sapien
cacgcgtcgtgatggtgtgaacacc

SEQ ID NO: 1070717 - DNA, 25 bp, Homo sapien
tccagttcccgcaggatgtgctggt

SEQ ID NO: 1070718 - DNA, 25 bp, Homo sapien
cacggtatgtgtcgttggaaaccac

SEQ ID NO: 1070719 - DNA, 25 bp, Homo sapien
cgctcgccttggaggtcacggtatg

SEQ ID NO: 1070720 - DNA, 25 bp, Homo sapien
aattgctgagaaggggccgatggca

SEQ ID NO: 1070721 - DNA, 25 bp, Homo sapien
taattgctgagaaggggccgatggc

SEQ ID NO: 1070722 - DNA, 25 bp, Homo sapien
ctgcagagggtgcaaagaactctct

SEQ ID NO: 1070723 - DNA, 25 bp, Homo sapien
cagagggtgcaaagaactctctgga

SEQ ID NO: 1070724 - DNA, 25 bp, Homo sapien
ttgtccaggctgggcccgtgccggc

SEQ ID NO: 1070725 - DNA, 25 bp, Homo sapien
cccgtgccggcccagtgggtcatca

SEQ ID NO: 1070726 - DNA, 25 bp, Homo sapien
ggctgggcccgtgccggcccagtgg

SEQ ID NO: 1070727 - DNA, 25 bp, Homo sapien
ggcccgtgccggcccagtgggtcat

SEQ ID NO: 1070728 - DNA, 25 bp, Homo sapien
tgctccaaagtgagtggcttcttac

SEQ ID NO: 1070729 - DNA, 25 bp, Homo sapien
tcctgtgctccaaagtgagtggctt

SEQ ID NO: 1070730 - DNA, 25 bp, Homo sapien
tgtgctccaaagtgagtggcttctt

SEQ ID NO: 1070731 - DNA, 25 bp, Homo sapien
cctgtgctccaaagtgagtggcttc

SEQ ID NO: 1070732 - DNA, 25 bp, Homo sapien
agggactctaagcaggggcacttca

SEQ ID NO: 1070733 - DNA, 25 bp, Homo sapien
gtggtccaatggtggaggtccccaa

SEQ ID NO: 1070734 - DNA, 25 bp, Homo sapien
gttgggtggtccaatggtggaggtc

SEQ ID NO: 1070735 - DNA, 25 bp, Homo sapien
gagggactctaagcaggggcacttc

SEQ ID NO: 1070736 - DNA, 25 bp, Homo sapien
gaagaatcggcacttgatcccatag

SEQ ID NO: 1070737 - DNA, 25 bp, Homo sapien
gtccagcgtctgtgggagccagtct

SEQ ID NO: 1070738 - DNA, 25 bp, Homo sapien
tggttcagaccagtactctcgaggt

SEQ ID NO: 1070739 - DNA, 25 bp, Homo sapien
tgggagctcagatccatagggactg

SEQ ID NO: 1070740 - DNA, 25 bp, Homo sapien
ctcattggcgtagaggaggcccttg

SEQ ID NO: 1070741 - DNA, 25 bp, Homo sapien
ggcagcgtctccttaaactacagag

SEQ ID NO: 1070742 - DNA, 25 bp, Homo sapien
caatgtgtatcaacagggtgatcgc

SEQ ID NO: 1070743 - DNA, 25 bp, Homo sapien
gagaaaagacggtttgggcctcagc

SEQ ID NO: 1070744 - DNA, 25 bp, Homo sapien
gtactttattgatgtgttacaggag

SEQ ID NO: 1070745 - DNA, 25 bp, Homo sapien
atgattgtactttattgatgtgtta

SEQ ID NO: 1070746 - DNA, 25 bp, Homo sapien
ctttattgatgtgttacaggaggta

SEQ ID NO: 1070747 - DNA, 25 bp, Homo sapien
tgattgtactttattgatgtgttac

SEQ ID NO: 1070748 - DNA, 25 bp, Homo sapien
catccttcacctgagttcgtggcca

SEQ ID NO: 1070749 - DNA, 25 bp, Homo sapien
caaacaactgttctgccgagagtaa

SEQ ID NO: 1070750 - DNA, 25 bp, Homo sapien
tagagcagtcccctagtagagttgt

SEQ ID NO: 1070751 - DNA, 25 bp, Homo sapien
tcacatttcagatggaggctgtaaa

SEQ ID NO: 1070752 - DNA, 25 bp, Homo sapien
taatacaggaagttgggatggagga

SEQ ID NO: 1070753 - DNA, 25 bp, Homo sapien
tatcagtaacaaaggtgacaccagt

SEQ ID NO: 1070754 - DNA, 25 bp, Homo sapien
aatgcccattgtggctacactgtag

SEQ ID NO: 1070755 - DNA, 25 bp, Homo sapien
caccagtctgaggttagacaggaaa

SEQ ID NO: 1070756 - DNA, 25 bp, Homo sapien
ttatgtgtggaagactacaatgccc

SEQ ID NO: 1070757 - DNA, 25 bp, Homo sapien
gagtctcttcctagtcatatcctgg

SEQ ID NO: 1070758 - DNA, 25 bp, Homo sapien
caaacaacgtgccagcaatacctgc

SEQ ID NO: 1070759 - DNA, 25 bp, Homo sapien
ggatgactcattaagtgcaactggt

SEQ ID NO: 1070760 - DNA, 25 bp, Homo sapien
tatcttttctccacggtggctgggc

SEQ ID NO: 1070761 - DNA, 25 bp, Homo sapien
cctgcatttgaagagcaggttttca

SEQ ID NO: 1070762 - DNA, 25 bp, Homo sapien
tgtaaattgtgtgttaaagagctga

SEQ ID NO: 1070763 - DNA, 25 bp, Homo sapien
tatttgctgcttacatatagtgtgt

SEQ ID NO: 1070764 - DNA, 25 bp, Homo sapien
cagtgtcctagttttccaccagagg

SEQ ID NO: 1070765 - DNA, 25 bp, Homo sapien
atgtaggaggcatagagctccacgt

SEQ ID NO: 1070766 - DNA, 25 bp, Homo sapien
tcgggtgccctcatcttgcgcaagt

SEQ ID NO: 1070767 - DNA, 25 bp, Homo sapien
ctccccggggtgtgcttgtcagaga

SEQ ID NO: 1070768 - DNA, 25 bp, Homo sapien
gattcgggtgccctcatcttgcgca

SEQ ID NO: 1070769 - DNA, 25 bp, Homo sapien
gtctccccggggtgtgcttgtcaga

SEQ ID NO: 1070770 - DNA, 25 bp, Homo sapien
cactggtgatcttgaccagcaattt

SEQ ID NO: 1070771 - DNA, 25 bp, Homo sapien
ggaggtcactggtgatcttgaccag

SEQ ID NO: 1070772 - DNA, 25 bp, Homo sapien
gaagactgagaattggccactggat

SEQ ID NO: 1070773 - DNA, 25 bp, Homo sapien
taataagggtgagacctgattggag

SEQ ID NO: 1070774 - DNA, 25 bp, Homo sapien
ttagagtctgggccgatcacagtgg

SEQ ID NO: 1070775 - DNA, 25 bp, Homo sapien
ggattagagtctgggccgatcacag

SEQ ID NO: 1070776 - DNA, 25 bp, Homo sapien
gggattagagtctgggccgatcaca

SEQ ID NO: 1070777 - DNA, 25 bp, Homo sapien
gagtctgggccgatcacagtggctc

SEQ ID NO: 1070778 - DNA, 25 bp, Homo sapien
gcggccacacccactagggagtagt

SEQ ID NO: 1070779 - DNA, 25 bp, Homo sapien
cgtgtttaacctttgccgcgaggat

SEQ ID NO: 1070780 - DNA, 25 bp, Homo sapien
cactagggagtagtcacgtgtttaa

SEQ ID NO: 1070781 - DNA, 25 bp, Homo sapien
tagtcacgtgtttaacctttgccgc

SEQ ID NO: 1070782 - DNA, 25 bp, Homo sapien
caaaactgccgtttgtgcatggcta

SEQ ID NO: 1070783 - DNA, 25 bp, Homo sapien
actgccgtttgtgcatggctaaaga

SEQ ID NO: 1070784 - DNA, 25 bp, Homo sapien
gctaaagactgtggtgattttatag

SEQ ID NO: 1070785 - DNA, 25 bp, Homo sapien
acacaaaactgccgtttgtgcatgg

SEQ ID NO: 1070786 - DNA, 25 bp, Homo sapien
ctgaaggaacatccttctgtaagcc

SEQ ID NO: 1070787 - DNA, 25 bp, Homo sapien
ttagtgctgcttcctcctgaaggaa

SEQ ID NO: 1070788 - DNA, 25 bp, Homo sapien
aggaacatccttctgtaagccttac

SEQ ID NO: 1070789 - DNA, 25 bp, Homo sapien
agtgctgcttcctcctgaaggaaca

SEQ ID NO: 1070790 - DNA, 25 bp, Homo sapien
tgttgttgtagttgttcccaaaatg

SEQ ID NO: 1070791 - DNA, 25 bp, Homo sapien
tgttgtagttgttcccaaaatgtgt

SEQ ID NO: 1070792 - DNA, 25 bp, Homo sapien
caaaatgtgttcattgagattgttt

SEQ ID NO: 1070793 - DNA, 25 bp, Homo sapien
atgtgttcattgagattgtttccca

SEQ ID NO: 1070794 - DNA, 25 bp, Homo sapien
cactcccgcccccgcgcttcttggc

SEQ ID NO: 1070795 - DNA, 25 bp, Homo sapien
ctcactcccgcccccgcgcttcttg

SEQ ID NO: 1070796 - DNA, 25 bp, Homo sapien
tcactcccgcccccgcgcttcttgg

SEQ ID NO: 1070797 - DNA, 25 bp, Homo sapien
ccctcactcccgcccccgcgcttct

SEQ ID NO: 1070798 - DNA, 25 bp, Homo sapien
cggaggcgagagtagcaacccagca

SEQ ID NO: 1070799 - DNA, 25 bp, Homo sapien
ggcgagagtagcaacccagcagctg

SEQ ID NO: 1070800 - DNA, 25 bp, Homo sapien
cgagagtagcaacccagcagctgcc

SEQ ID NO: 1070801 - DNA, 25 bp, Homo sapien
gaggcgagagtagcaacccagcagc

SEQ ID NO: 1070802 - DNA, 25 bp, Homo sapien
tccgtgttccggctcaccagcactg

SEQ ID NO: 1070803 - DNA, 25 bp, Homo sapien
cgtgttccggctcaccagcactggg

SEQ ID NO: 1070804 - DNA, 25 bp, Homo sapien
ttctccgtgttccggctcaccagca

SEQ ID NO: 1070805 - DNA, 25 bp, Homo sapien
gtgtcgtacttgagcaaagagtctg

SEQ ID NO: 1070806 - DNA, 25 bp, Homo sapien
ggaatgtgtctttccctatcggagt

SEQ ID NO: 1070807 - DNA, 25 bp, Homo sapien
tcggagtttcgaggctcctttgtct

SEQ ID NO: 1070808 - DNA, 25 bp, Homo sapien
gctgcaatccccgtcccttgagatt

SEQ ID NO: 1070809 - DNA, 25 bp, Homo sapien
tgagattcctgaccctccatgcggg

SEQ ID NO: 1070810 - DNA, 25 bp, Homo sapien
gaggggagcttggtcttgggtggct

SEQ ID NO: 1070811 - DNA, 25 bp, Homo sapien
ctgtggggctgaacctgaaggtcca

SEQ ID NO: 1070812 - DNA, 25 bp, Homo sapien
gctgtggggctgaacctgaaggtcc

SEQ ID NO: 1070813 - DNA, 25 bp, Homo sapien
gggggtagtatggcattcaagattt

SEQ ID NO: 1070814 - DNA, 25 bp, Homo sapien
gggtagtatggcattcaagatttct

SEQ ID NO: 1070815 - DNA, 25 bp, Homo sapien
ggtagtatggcattcaagatttctt

SEQ ID NO: 1070816 - DNA, 25 bp, Homo sapien
ggggtagtatggcattcaagatttc

SEQ ID NO: 1070817 - DNA, 25 bp, Homo sapien
ccaggatccagccatatgtaagttc

SEQ ID NO: 1070818 - DNA, 25 bp, Homo sapien
gctctgtgatactgggaggaaaccc

SEQ ID NO: 1070819 - DNA, 25 bp, Homo sapien
tgtaaaagcttaggccttctcccag

SEQ ID NO: 1070820 - DNA, 25 bp, Homo sapien
cagcacataggtggtatctaaagcc

SEQ ID NO: 1070821 - DNA, 25 bp, Homo sapien
caaaacactgtgagtagagttccct

SEQ ID NO: 1070822 - DNA, 25 bp, Homo sapien
gctcctggaggtgcaccacgtccat

SEQ ID NO: 1070823 - DNA, 25 bp, Homo sapien
cagctttaagtctaactgctcctgg

SEQ ID NO: 1070824 - DNA, 25 bp, Homo sapien
cacctgctggatccatagctgcgtg

SEQ ID NO: 1070825 - DNA, 25 bp, Homo sapien
gaccagtgccggtgcgggtcctccg

SEQ ID NO: 1070826 - DNA, 25 bp, Homo sapien
agaccagtgccggtgcgggtcctcc

SEQ ID NO: 1070827 - DNA, 25 bp, Homo sapien
ggagacagccatttgacaccagcac

SEQ ID NO: 1070828 - DNA, 25 bp, Homo sapien
tgctgacctggagggcaaaccataa

SEQ ID NO: 1070829 - DNA, 25 bp, Homo sapien
gcagatcggcgtccataagagccaa

SEQ ID NO: 1070830 - DNA, 25 bp, Homo sapien
taacacacggatagggaagcctgct

SEQ ID NO: 1070831 - DNA, 25 bp, Homo sapien
cccctctccgcacagttgatggtga

SEQ ID NO: 1070832 - DNA, 25 bp, Homo sapien
tctcgtacagggtctggtaggcagc

SEQ ID NO: 1070833 - DNA, 25 bp, Homo sapien
tgatggtgacctcccggatcaactc

SEQ ID NO: 1070834 - DNA, 25 bp, Homo sapien
cagcgatggtcatgcggatctcgtc

SEQ ID NO: 1070835 - DNA, 25 bp, Homo sapien
gacattgccagggtatatactgcca

SEQ ID NO: 1070836 - DNA, 25 bp, Homo sapien
gtctacagcggaaacaactctgcca

SEQ ID NO: 1070837 - DNA, 25 bp, Homo sapien
tgcctggcatggagcgtctacagcg

SEQ ID NO: 1070838 - DNA, 25 bp, Homo sapien
tacagaagagatgggaccaagggtc

SEQ ID NO: 1070839 - DNA, 25 bp, Homo sapien
ttgccttctgctcgttcacttgcct

SEQ ID NO: 1070840 - DNA, 25 bp, Homo sapien
cttcagctgctgatttgttcgcttc

SEQ ID NO: 1070841 - DNA, 25 bp, Homo sapien
tgatttgttcgcttcaggaactgaa

SEQ ID NO: 1070842 - DNA, 25 bp, Homo sapien
attttgccttctgctcgttcacttg

SEQ ID NO: 1070843 - DNA, 25 bp, Homo sapien
tttttccagggagaagaatcctcca

SEQ ID NO: 1070844 - DNA, 25 bp, Homo sapien
tcaagattgtaaggtttctatctga

SEQ ID NO: 1070845 - DNA, 25 bp, Homo sapien
aagattgtaaggtttctatctgagc

SEQ ID NO: 1070846 - DNA, 25 bp, Homo sapien
caagattgtaaggtttctatctgag

SEQ ID NO: 1070847 - DNA, 25 bp, Homo sapien
ggtgcaataatgccttccagttggg

SEQ ID NO: 1070848 - DNA, 25 bp, Homo sapien
ccagaggaacacagtaaataactcc

SEQ ID NO: 1070849 - DNA, 25 bp, Homo sapien
tgattttattggctgccagaggaac

SEQ ID NO: 1070850 - DNA, 25 bp, Homo sapien
gaacacagtaaataactcccaagtg

SEQ ID NO: 1070851 - DNA, 25 bp, Homo sapien
cttgttggaaattaatcatgtggaa

SEQ ID NO: 1070852 - DNA, 25 bp, Homo sapien
ttcaaggacgttagtgtacatggcc

SEQ ID NO: 1070853 - DNA, 25 bp, Homo sapien
taaaatgcagttgtctagcagccgt

SEQ ID NO: 1070854 - DNA, 25 bp, Homo sapien
tagaggcctggaactagcagatctc

SEQ ID NO: 1070855 - DNA, 25 bp, Homo sapien
tgaagctcactgaacccaagacgga

SEQ ID NO: 1070856 - DNA, 25 bp, Homo sapien
gactaacacatttctggccaccgta

SEQ ID NO: 1070857 - DNA, 25 bp, Homo sapien
ggtttaggcaacaacagcacatgat

SEQ ID NO: 1070858 - DNA, 25 bp, Homo sapien
tgtatgtagttgttacgtgcccaca

SEQ ID NO: 1070859 - DNA, 25 bp, Homo sapien
gagcagcccagagttggtccagaca

SEQ ID NO: 1070860 - DNA, 25 bp, Homo sapien
cagcagccgggggatcaaggggaaa

SEQ ID NO: 1070861 - DNA, 25 bp, Homo sapien
ggcagaggcggagtgagtaatggag

SEQ ID NO: 1070862 - DNA, 25 bp, Homo sapien
catcagcagccgggggatcaagggg

SEQ ID NO: 1070863 - DNA, 25 bp, Homo sapien
cagaggcggagtgagtaatggagca

SEQ ID NO: 1070864 - DNA, 25 bp, Homo sapien
tatctcccgtgcaggtgggctctgc

SEQ ID NO: 1070865 - DNA, 25 bp, Homo sapien
ccacttgagtgtgtctggccttcaa

SEQ ID NO: 1070866 - DNA, 25 bp, Homo sapien
gggataatgatttatctcccgtgca

SEQ ID NO: 1070867 - DNA, 25 bp, Homo sapien
gccttcaaagccagcgggagaggcc

SEQ ID NO: 1070868 - DNA, 25 bp, Homo sapien
gttttcatgagggtctccggccgcg

SEQ ID NO: 1070869 - DNA, 25 bp, Homo sapien
gcgttctgacgccaagatgagcgga

SEQ ID NO: 1070870 - DNA, 25 bp, Homo sapien
ttcgggcaaggacgtgtggactccc

SEQ ID NO: 1070871 - DNA, 25 bp, Homo sapien
ggttctctggctgcgtggaatcccc

SEQ ID NO: 1070872 - DNA, 25 bp, Homo sapien
caggatctgatagccttggtatttc

SEQ ID NO: 1070873 - DNA, 25 bp, Homo sapien
ggatctgatagccttggtatttctt

SEQ ID NO: 1070874 - DNA, 25 bp, Homo sapien
aggatctgatagccttggtatttct

SEQ ID NO: 1070875 - DNA, 25 bp, Homo sapien
cagctttttctagagtaacagtaat

SEQ ID NO: 1070876 - DNA, 25 bp, Homo sapien
tcttccgtgcggacagagttctgct

SEQ ID NO: 1070877 - DNA, 25 bp, Homo sapien
gatgccagtagtttccaatccaaaa

SEQ ID NO: 1070878 - DNA, 25 bp, Homo sapien
taacagtaatgatcacagatgccag

SEQ ID NO: 1070879 - DNA, 25 bp, Homo sapien
ctgctggtatggggcttccagagga

SEQ ID NO: 1070880 - DNA, 25 bp, Homo sapien
caaggtagagaatctgagaagtgtg

SEQ ID NO: 1070881 - DNA, 25 bp, Homo sapien
ggtagagaatctgagaagtgtgttt

SEQ ID NO: 1070882 - DNA, 25 bp, Homo sapien
tgtttctgctggtatggggcttcca

SEQ ID NO: 1070883 - DNA, 25 bp, Homo sapien
cagtgcagaaatcgttatcgggcag

SEQ ID NO: 1070884 - DNA, 25 bp, Homo sapien
cagttgagatgttgaggcaaggcca

SEQ ID NO: 1070885 - DNA, 25 bp, Homo sapien
cagaaatcgttatcgggcaggtgaa

SEQ ID NO: 1070886 - DNA, 25 bp, Homo sapien
tatcgggcaggtgaaacgccaagaa

SEQ ID NO: 1070887 - DNA, 25 bp, Homo sapien
acatgtacactcacttgcatgctca

SEQ ID NO: 1070888 - DNA, 25 bp, Homo sapien
gacatgtacactcacttgcatgctc

SEQ ID NO: 1070889 - DNA, 25 bp, Homo sapien
catgtacactcacttgcatgctcat

SEQ ID NO: 1070890 - DNA, 25 bp, Homo sapien
gctcctgtgagaataaggcctctgg

SEQ ID NO: 1070891 - DNA, 25 bp, Homo sapien
gggtagttcttaggaatgtgcctct

SEQ ID NO: 1070892 - DNA, 25 bp, Homo sapien
tctggctcctgtgagaataaggcct

SEQ ID NO: 1070893 - DNA, 25 bp, Homo sapien
tccacttcctgggtagttcttagga

SEQ ID NO: 1070894 - DNA, 25 bp, Homo sapien
agggtctcctgagctggcttgtaat

SEQ ID NO: 1070895 - DNA, 25 bp, Homo sapien
tctttcatataagcagagttttatg

SEQ ID NO: 1070896 - DNA, 25 bp, Homo sapien
tcaaccataaattcctggcacctgc

SEQ ID NO: 1070897 - DNA, 25 bp, Homo sapien
ctagtttgttctttcatataagcag

SEQ ID NO: 1070898 - DNA, 25 bp, Homo sapien
ttcttggtttccacgtagagcaaag

SEQ ID NO: 1070899 - DNA, 25 bp, Homo sapien
cttggtttccacgtagagcaaagtc

SEQ ID NO: 1070900 - DNA, 25 bp, Homo sapien
tcttggtttccacgtagagcaaagt

SEQ ID NO: 1070901 - DNA, 25 bp, Homo sapien
tggtttccacgtagagcaaagtcat

SEQ ID NO: 1070902 - DNA, 25 bp, Homo sapien
gaacaaacgtgctatcatcgataca

SEQ ID NO: 1070903 - DNA, 25 bp, Homo sapien
aaatgtaccgttatccatctaccag

SEQ ID NO: 1070904 - DNA, 25 bp, Homo sapien
tatattgcccagctcactcctgagc

SEQ ID NO: 1070905 - DNA, 25 bp, Homo sapien
cactgctcctgaccaattcacaaat

SEQ ID NO: 1070906 - DNA, 25 bp, Homo sapien
ggccacagggttggattgctcaaga

SEQ ID NO: 1070907 - DNA, 25 bp, Homo sapien
gaatgggcgtgtagacggcgagccc

SEQ ID NO: 1070908 - DNA, 25 bp, Homo sapien
gtgactgcagcatgagccgcggcca

SEQ ID NO: 1070909 - DNA, 25 bp, Homo sapien
ccgcggtcctgtcggaggtgctaac

SEQ ID NO: 1070910 - DNA, 25 bp, Homo sapien
gagagagcggctctacagtcaaccg

SEQ ID NO: 1070911 - DNA, 25 bp, Homo sapien
ggctgacgaatgagaagccgccgtc

SEQ ID NO: 1070912 - DNA, 25 bp, Homo sapien
ctgcggtcccgagacaagggctgag

SEQ ID NO: 1070913 - DNA, 25 bp, Homo sapien
aaaacctcgctgtgccagtgagaga

SEQ ID NO: 1070914 - DNA, 25 bp, Homo sapien
acccgaagaagtcgccaggcacgta

SEQ ID NO: 1070915 - DNA, 25 bp, Homo sapien
aagcaagaaactgggtagggacgag

SEQ ID NO: 1070916 - DNA, 25 bp, Homo sapien
ggaccacccgaagaagtcgccaggc

SEQ ID NO: 1070917 - DNA, 25 bp, Homo sapien
gaagcaagaaactgggtagggacga

SEQ ID NO: 1070918 - DNA, 25 bp, Homo sapien
cttcacggtcgaagtctttcagaaa

SEQ ID NO: 1070919 - DNA, 25 bp, Homo sapien
tcacggtcgaagtctttcagaaagg

SEQ ID NO: 1070920 - DNA, 25 bp, Homo sapien
ttcacggtcgaagtctttcagaaag

SEQ ID NO: 1070921 - DNA, 25 bp, Homo sapien
agccagttcatctcgcgcagagcct

SEQ ID NO: 1070922 - DNA, 25 bp, Homo sapien
tgtagaggttatccacctccttgag

SEQ ID NO: 1070923 - DNA, 25 bp, Homo sapien
ccttgaggaggttctgcctgtctga

SEQ ID NO: 1070924 - DNA, 25 bp, Homo sapien
cgcaggatctcgatgttgtagaggt

SEQ ID NO: 1070925 - DNA, 25 bp, Homo sapien
gcctcttccagggcctgtttgtttc

SEQ ID NO: 1070926 - DNA, 25 bp, Homo sapien
ttgccgcctcttccagggcctgttt

SEQ ID NO: 1070927 - DNA, 25 bp, Homo sapien
ttccagggcctgtttgtttcctcca

SEQ ID NO: 1070928 - DNA, 25 bp, Homo sapien
tgttgccgcctcttccagggcctgt

SEQ ID NO: 1070929 - DNA, 25 bp, Homo sapien
tctacagggtctcaataaggttttc

SEQ ID NO: 1070930 - DNA, 25 bp, Homo sapien
taagtatgggcactacaaagagcag

SEQ ID NO: 1070931 - DNA, 25 bp, Homo sapien
gatgatcctgggtccttcaaaaagg

SEQ ID NO: 1070932 - DNA, 25 bp, Homo sapien
caaagagcagtcatgattcacagtc

SEQ ID NO: 1070933 - DNA, 25 bp, Homo sapien
gttacccttgactacagcccatctg

SEQ ID NO: 1070934 - DNA, 25 bp, Homo sapien
gacatgacagggattataggttaca

SEQ ID NO: 1070935 - DNA, 25 bp, Homo sapien
taaatattcagccttcgcattatgc

SEQ ID NO: 1070936 - DNA, 25 bp, Homo sapien
tttggataggacatgacagggatta

SEQ ID NO: 1070937 - DNA, 25 bp, Homo sapien
acaaacatagccagaaagcaccagg

SEQ ID NO: 1070938 - DNA, 25 bp, Homo sapien
aaagcaccaggcttattccaccaaa

SEQ ID NO: 1070939 - DNA, 25 bp, Homo sapien
agcaccaggcttattccaccaaaat

SEQ ID NO: 1070940 - DNA, 25 bp, Homo sapien
tgacaaacatagccagaaagcacca

SEQ ID NO: 1070941 - DNA, 25 bp, Homo sapien
atttcaggggtgtctgaatagcttc

SEQ ID NO: 1070942 - DNA, 25 bp, Homo sapien
gatttcaggggtgtctgaatagctt

SEQ ID NO: 1070943 - DNA, 25 bp, Homo sapien
ggagcgtctcagttggtgttaccag

SEQ ID NO: 1070944 - DNA, 25 bp, Homo sapien
tgttgattacatcagggagcgtctc

SEQ ID NO: 1070945 - DNA, 25 bp, Homo sapien
tttcattttagctcgcacacgggtc

SEQ ID NO: 1070946 - DNA, 25 bp, Homo sapien
gacattaaagggaagaggctctacc

SEQ ID NO: 1070947 - DNA, 25 bp, Homo sapien
tcatctacctgtattacctttcgtg

SEQ ID NO: 1070948 - DNA, 25 bp, Homo sapien
tatcatttcatctacctgtattacc

SEQ ID NO: 1070949 - DNA, 25 bp, Homo sapien
catttcatctacctgtattaccttt

SEQ ID NO: 1070950 - DNA, 25 bp, Homo sapien
ttccactatcatttcatctacctgt

SEQ ID NO: 1070951 - DNA, 25 bp, Homo sapien
taaactgtgagctctggtgtacaac

SEQ ID NO: 1070952 - DNA, 25 bp, Homo sapien
tttgccttagctagaaaccatgcag

SEQ ID NO: 1070953 - DNA, 25 bp, Homo sapien
gggtcccacacctcactggatagca

SEQ ID NO: 1070954 - DNA, 25 bp, Homo sapien
tatagtgtcagcatgtcagttcaag

SEQ ID NO: 1070955 - DNA, 25 bp, Homo sapien
ctgtgaaggtcactcagggcgtccc

SEQ ID NO: 1070956 - DNA, 25 bp, Homo sapien
ccactggctgggttttcaaaataga

SEQ ID NO: 1070957 - DNA, 25 bp, Homo sapien
tcccaggtgcccaatcaaaggcaaa

SEQ ID NO: 1070958 - DNA, 25 bp, Homo sapien
tcttttgaactgattgcagcctggc

SEQ ID NO: 1070959 - DNA, 25 bp, Homo sapien
ttttccttgtatggactgagttctc

SEQ ID NO: 1070960 - DNA, 25 bp, Homo sapien
ggggtaacagtgttagcacggcttg

SEQ ID NO: 1070961 - DNA, 25 bp, Homo sapien
tggggtaacagtgttagcacggctt

SEQ ID NO: 1070962 - DNA, 25 bp, Homo sapien
ctggggtaacagtgttagcacggct

SEQ ID NO: 1070963 - DNA, 25 bp, Homo sapien
accatggacacctccaatcggccca

SEQ ID NO: 1070964 - DNA, 25 bp, Homo sapien
ggtttgaccatggacacctccaatc

SEQ ID NO: 1070965 - DNA, 25 bp, Homo sapien
tggagttggtttgaccatggacacc

SEQ ID NO: 1070966 - DNA, 25 bp, Homo sapien
caggcctggagttggtttgaccatg

SEQ ID NO: 1070967 - DNA, 25 bp, Homo sapien
tgtaaatccgctctcctgctgctgg

SEQ ID NO: 1070968 - DNA, 25 bp, Homo sapien
gatgttgtaaatccgctctcctgct

SEQ ID NO: 1070969 - DNA, 25 bp, Homo sapien
attccctgagatgttgtaaatccgc

SEQ ID NO: 1070970 - DNA, 25 bp, Homo sapien
ccctgagatgttgtaaatccgctct

SEQ ID NO: 1070971 - DNA, 25 bp, Homo sapien
atgcttgactaagcagcacactgtg

SEQ ID NO: 1070972 - DNA, 25 bp, Homo sapien
aaatgcttgactaagcagcacactg

SEQ ID NO: 1070973 - DNA, 25 bp, Homo sapien
agaaatgcttgactaagcagcacac

SEQ ID NO: 1070974 - DNA, 25 bp, Homo sapien
gaaatgcttgactaagcagcacact

SEQ ID NO: 1070975 - DNA, 25 bp, Homo sapien
tcaggacccacgcactgaaaggact

SEQ ID NO: 1070976 - DNA, 25 bp, Homo sapien
tgggttctgagtcccgcagaagtgt

SEQ ID NO: 1070977 - DNA, 25 bp, Homo sapien
gagatcaggacccacgcactgaaag

SEQ ID NO: 1070978 - DNA, 25 bp, Homo sapien
tgagtcccgcagaagtgtggagatc

SEQ ID NO: 1070979 - DNA, 25 bp, Homo sapien
cacaggtaccatgattgcaaaccca

SEQ ID NO: 1070980 - DNA, 25 bp, Homo sapien
tattattgcgcatatcacaggtacc

SEQ ID NO: 1070981 - DNA, 25 bp, Homo sapien
cctttaacatctctattattgcgca

SEQ ID NO: 1070982 - DNA, 25 bp, Homo sapien
tgcaccaccctttaacatctctatt

SEQ ID NO: 1070983 - DNA, 25 bp, Homo sapien
gctgggcaatactgtgcctctgcaa

SEQ ID NO: 1070984 - DNA, 25 bp, Homo sapien
ccagctgggcaatactgtgcctctg

SEQ ID NO: 1070985 - DNA, 25 bp, Homo sapien
gatccagctgggcaatactgtgcct

SEQ ID NO: 1070986 - DNA, 25 bp, Homo sapien
ctggatccagctgggcaatactgtg

SEQ ID NO: 1070987 - DNA, 25 bp, Homo sapien
ctgctgcagatttgggcgagacggt

SEQ ID NO: 1070988 - DNA, 25 bp, Homo sapien
tgctgcagatttgggcgagacggtt

SEQ ID NO: 1070989 - DNA, 25 bp, Homo sapien
gaacatagcacatgattctccaggg

SEQ ID NO: 1070990 - DNA, 25 bp, Homo sapien
tgagaaagccatgtgccttcaagcc

SEQ ID NO: 1070991 - DNA, 25 bp, Homo sapien
tgaaagatccctaagtcccactgac

SEQ ID NO: 1070992 - DNA, 25 bp, Homo sapien
gacagctctacctaactggtgtggg

SEQ ID NO: 1070993 - DNA, 25 bp, Homo sapien
gttgaaggtaccgatgctctggatc

SEQ ID NO: 1070994 - DNA, 25 bp, Homo sapien
tctggatcttgtagtaagcccctct

SEQ ID NO: 1070995 - DNA, 25 bp, Homo sapien
taagcccctctttcagatatcagaa

SEQ ID NO: 1070996 - DNA, 25 bp, Homo sapien
cagaatgaatctgcccaaagcaaag

SEQ ID NO: 1070997 - DNA, 25 bp, Homo sapien
agtggcatgatctcagctcagtgca

SEQ ID NO: 1070998 - DNA, 25 bp, Homo sapien
ctccccggttcaactgattcttttg

SEQ ID NO: 1070999 - DNA, 25 bp, Homo sapien
gctcttgtcacccagactgaggtgc

SEQ ID NO: 1071000 - DNA, 25 bp, Homo sapien
cggttcaactgattcttttgcctcg

SEQ ID NO: 1071001 - DNA, 25 bp, Homo sapien
cacatacgagtgtgaatccccaatc

SEQ ID NO: 1071002 - DNA, 25 bp, Homo sapien
acatacgagtgtgaatccccaatca

SEQ ID NO: 1071003 - DNA, 25 bp, Homo sapien
catacgagtgtgaatccccaatcat

SEQ ID NO: 1071004 - DNA, 25 bp, Homo sapien
aagtcccttgatgaacgccctggtt

SEQ ID NO: 1071005 - DNA, 25 bp, Homo sapien
tgcagtacagcctgagccgctcgcc

SEQ ID NO: 1071006 - DNA, 25 bp, Homo sapien
tcgccgctggtgctgcgactgcgct

SEQ ID NO: 1071007 - DNA, 25 bp, Homo sapien
ctgtgccgcctcagggccgccgtcg

SEQ ID NO: 1071008 - DNA, 25 bp, Homo sapien
gtgtattctgatgggcagatgttga

SEQ ID NO: 1071009 - DNA, 25 bp, Homo sapien
cttctccctataaggtgggagggag

SEQ ID NO: 1071010 - DNA, 25 bp, Homo sapien
gcatttgtgtattctgatgggcaga

SEQ ID NO: 1071011 - DNA, 25 bp, Homo sapien
gatgggggcatttgtgtattctgat

SEQ ID NO: 1071012 - DNA, 25 bp, Homo sapien
gtatgcggaaggacaaagagccact

SEQ ID NO: 1071013 - DNA, 25 bp, Homo sapien
gacttgtttgtatgcggaaggacaa

SEQ ID NO: 1071014 - DNA, 25 bp, Homo sapien
tttgtatgcggaaggacaaagagcc

SEQ ID NO: 1071015 - DNA, 25 bp, Homo sapien
agagacttgtttgtatgcggaagga

SEQ ID NO: 1071016 - DNA, 25 bp, Homo sapien
caccagttgggtgttccgcccctgg

SEQ ID NO: 1071017 - DNA, 25 bp, Homo sapien
ttcccaccctctgctggcggggatt

SEQ ID NO: 1071018 - DNA, 25 bp, Homo sapien
tgttccgcccctggcctatgaaact

SEQ ID NO: 1071019 - DNA, 25 bp, Homo sapien
ccaccctctgctggcggggattggt

SEQ ID NO: 1071020 - DNA, 25 bp, Homo sapien
cagagacagcgtggttcaccagggc

SEQ ID NO: 1071021 - DNA, 25 bp, Homo sapien
actcggcgttcaaagaggtatggac

SEQ ID NO: 1071022 - DNA, 25 bp, Homo sapien
gcgtggttcaccagggcatccgcag

SEQ ID NO: 1071023 - DNA, 25 bp, Homo sapien
cgttcaaagaggtatggactctggc

SEQ ID NO: 1071024 - DNA, 25 bp, Homo sapien
cattttgcggttctggttggtggca

SEQ ID NO: 1071025 - DNA, 25 bp, Homo sapien
aggggggctgttttgctgaatccac

SEQ ID NO: 1071026 - DNA, 25 bp, Homo sapien
tgctcatgcccctggtagacagcca

SEQ ID NO: 1071027 - DNA, 25 bp, Homo sapien
taattttccatcaactgctcatgcc

SEQ ID NO: 1071028 - DNA, 25 bp, Homo sapien
gcactttggacagcttgtggatgca

SEQ ID NO: 1071029 - DNA, 25 bp, Homo sapien
ctgcactttggacagcttgtggatg

SEQ ID NO: 1071030 - DNA, 25 bp, Homo sapien
tgcaccagtagtcatgaaagacttc

SEQ ID NO: 1071031 - DNA, 25 bp, Homo sapien
gcttgtggatgcaccagtagtcatg

SEQ ID NO: 1071032 - DNA, 25 bp, Homo sapien
ggcaggctggttgcttaggtgcagc

SEQ ID NO: 1071033 - DNA, 25 bp, Homo sapien
tctgcagcgtgttgaaggtgagctc

SEQ ID NO: 1071034 - DNA, 25 bp, Homo sapien
aaggtgagctccagctggcctctct

SEQ ID NO: 1071035 - DNA, 25 bp, Homo sapien
cctcagagcccgtgaaggcaggctg

SEQ ID NO: 1071036 - DNA, 25 bp, Homo sapien
ggtgctgcccactgttgttgatgtt

SEQ ID NO: 1071037 - DNA, 25 bp, Homo sapien
tgcccactgttgttgatgttcaaga

SEQ ID NO: 1071038 - DNA, 25 bp, Homo sapien
gctgcccactgttgttgatgttcaa

SEQ ID NO: 1071039 - DNA, 25 bp, Homo sapien
gcccactgttgttgatgttcaagac

SEQ ID NO: 1071040 - DNA, 25 bp, Homo sapien
gcaactcctcatgtcaattcttggc

SEQ ID NO: 1071041 - DNA, 25 bp, Homo sapien
gcagcaactcctcatgtcaattctt

SEQ ID NO: 1071042 - DNA, 25 bp, Homo sapien
aactcctcatgtcaattcttggcct

SEQ ID NO: 1071043 - DNA, 25 bp, Homo sapien
ctcctcatgtcaattcttggcctac

SEQ ID NO: 1071044 - DNA, 25 bp, Homo sapien
ctgccaggtggttgagctgctccag

SEQ ID NO: 1071045 - DNA, 25 bp, Homo sapien
tgccaggtggttgagctgctccagc

SEQ ID NO: 1071046 - DNA, 25 bp, Homo sapien
ctcatagtcccgctgcttaagcctg

SEQ ID NO: 1071047 - DNA, 25 bp, Homo sapien
catggttgtggataagggctttgat

SEQ ID NO: 1071048 - DNA, 25 bp, Homo sapien
tgtctgatagggtggctgtctcata

SEQ ID NO: 1071049 - DNA, 25 bp, Homo sapien
tggcttccttctcatcggtccaggc

SEQ ID NO: 1071050 - DNA, 25 bp, Homo sapien
aaagtcctggtgtatggccagatca

SEQ ID NO: 1071051 - DNA, 25 bp, Homo sapien
aagtcctggtgtatggccagatcac

SEQ ID NO: 1071052 - DNA, 25 bp, Homo sapien
gggcattgacaactgtgggagtcac

SEQ ID NO: 1071053 - DNA, 25 bp, Homo sapien
ggcattgacaactgtgggagtcaca

SEQ ID NO: 1071054 - DNA, 25 bp, Homo sapien
tgggcattgacaactgtgggagtca

SEQ ID NO: 1071055 - DNA, 25 bp, Homo sapien
ctgggcattgacaactgtgggagtc

SEQ ID NO: 1071056 - DNA, 25 bp, Homo sapien
ttcccactgcttgtaaatcttctgg

SEQ ID NO: 1071057 - DNA, 25 bp, Homo sapien
tccctgtgactgtgggtcagagagt

SEQ ID NO: 1071058 - DNA, 25 bp, Homo sapien
ctgtgactgtgggtcagagagtaca

SEQ ID NO: 1071059 - DNA, 25 bp, Homo sapien
cccactgcttgtaaatcttctggca

SEQ ID NO: 1071060 - DNA, 25 bp, Homo sapien
atcttctcagtattgtagatgagga

SEQ ID NO: 1071061 - DNA, 25 bp, Homo sapien
gatgaggaacatgtcctggagctcc

SEQ ID NO: 1071062 - DNA, 25 bp, Homo sapien
agtattgtagatgaggaacatgtcc

SEQ ID NO: 1071063 - DNA, 25 bp, Homo sapien
ctcagtattgtagatgaggaacatg

SEQ ID NO: 1071064 - DNA, 25 bp, Homo sapien
ttctccctatcattatctggcaggg

SEQ ID NO: 1071065 - DNA, 25 bp, Homo sapien
ctgcctgacagcttggtatgtttgc

SEQ ID NO: 1071066 - DNA, 25 bp, Homo sapien
cttggtatgtttgctatctgtgatc

SEQ ID NO: 1071067 - DNA, 25 bp, Homo sapien
tgtttgctatctgtgatcctctggg

SEQ ID NO: 1071068 - DNA, 25 bp, Homo sapien
cctccagaagtgcataatcctgctt

SEQ ID NO: 1071069 - DNA, 25 bp, Homo sapien
tccagaagtgcataatcctgctttg

SEQ ID NO: 1071070 - DNA, 25 bp, Homo sapien
ctccagaagtgcataatcctgcttt

SEQ ID NO: 1071071 - DNA, 25 bp, Homo sapien
ccagaagtgcataatcctgctttga

SEQ ID NO: 1071072 - DNA, 25 bp, Homo sapien
attgcttcaggtttagctggtcctc

SEQ ID NO: 1071073 - DNA, 25 bp, Homo sapien
tgcttcaggtttagctggtcctctg

SEQ ID NO: 1071074 - DNA, 25 bp, Homo sapien
cttcaggtttagctggtcctctggg

SEQ ID NO: 1071075 - DNA, 25 bp, Homo sapien
caggttcagcttgtggtccatgatg

SEQ ID NO: 1071076 - DNA, 25 bp, Homo sapien
catgtagctgatatgcttgttgttg

SEQ ID NO: 1071077 - DNA, 25 bp, Homo sapien
tgtagctgatatgcttgttgttgaa

SEQ ID NO: 1071078 - DNA, 25 bp, Homo sapien
tagctgatatgcttgttgttgaaga

SEQ ID NO: 1071079 - DNA, 25 bp, Homo sapien
gctgatatgcttgttgttgaagatg

SEQ ID NO: 1071080 - DNA, 25 bp, Homo sapien
tgctcccagccgtgcggatgtgttc

SEQ ID NO: 1071081 - DNA, 25 bp, Homo sapien
tcccagccgtgcggatgtgttccac

SEQ ID NO: 1071082 - DNA, 25 bp, Homo sapien
ctcccagccgtgcggatgtgttcca

SEQ ID NO: 1071083 - DNA, 25 bp, Homo sapien
gctcccagccgtgcggatgtgttcc

SEQ ID NO: 1071084 - DNA, 25 bp, Homo sapien
caatgccctgggtattgcaggtgag

SEQ ID NO: 1071085 - DNA, 25 bp, Homo sapien
cctggccaatgccctgggtattgca

SEQ ID NO: 1071086 - DNA, 25 bp, Homo sapien
ccaatgccctgggtattgcaggtga

SEQ ID NO: 1071087 - DNA, 25 bp, Homo sapien
ggccaatgccctgggtattgcaggt

SEQ ID NO: 1071088 - DNA, 25 bp, Homo sapien
tatcccaagctgatgaagcaggcct

SEQ ID NO: 1071089 - DNA, 25 bp, Homo sapien
tgtatcccaagctgatgaagcaggc

SEQ ID NO: 1071090 - DNA, 25 bp, Homo sapien
tcccaagctgatgaagcaggccttg

SEQ ID NO: 1071091 - DNA, 25 bp, Homo sapien
attgtatcccaagctgatgaagcag

SEQ ID NO: 1071092 - DNA, 25 bp, Homo sapien
tcccggtgcagttgaactcagcatt

SEQ ID NO: 1071093 - DNA, 25 bp, Homo sapien
cccggtgcagttgaactcagcattg

SEQ ID NO: 1071094 - DNA, 25 bp, Homo sapien
gcattgctctgctgttatcctccac

SEQ ID NO: 1071095 - DNA, 25 bp, Homo sapien
actcagcattgctctgctgttatcc

SEQ ID NO: 1071096 - DNA, 25 bp, Homo sapien
gctgctatggttggggtcaaccaca

SEQ ID NO: 1071097 - DNA, 25 bp, Homo sapien
ctgccatgaccttgaaggaggtaac

SEQ ID NO: 1071098 - DNA, 25 bp, Homo sapien
taacgacctggctgtgtctacgttg

SEQ ID NO: 1071099 - DNA, 25 bp, Homo sapien
ccttgaaggaggtaacgacctggct

SEQ ID NO: 1071100 - DNA, 25 bp, Homo sapien
tgtctacgttggttgtctcccaaga

SEQ ID NO: 1071101 - DNA, 25 bp, Homo sapien
tcaggtgggcaatgcagtacttgac

SEQ ID NO: 1071102 - DNA, 25 bp, Homo sapien
tttgatacgagtctcaccaggagcc

SEQ ID NO: 1071103 - DNA, 25 bp, Homo sapien
ccacgaggaagggtgtttgatacga

SEQ ID NO: 1071104 - DNA, 25 bp, Homo sapien
accaggagcctcatagtcactcttg

SEQ ID NO: 1071105 - DNA, 25 bp, Homo sapien
gatttgtagacaagggcaccaggca

SEQ ID NO: 1071106 - DNA, 25 bp, Homo sapien
cactcgtctacatactgatggccga

SEQ ID NO: 1071107 - DNA, 25 bp, Homo sapien
ccactcgtctacatactgatggccg

SEQ ID NO: 1071108 - DNA, 25 bp, Homo sapien
cctcagggctaatgttgtagtcact

SEQ ID NO: 1071109 - DNA, 25 bp, Homo sapien
ctcagggctaatgttgtagtcactg

SEQ ID NO: 1071110 - DNA, 25 bp, Homo sapien
tcagggctaatgttgtagtcactga

SEQ ID NO: 1071111 - DNA, 25 bp, Homo sapien
cagggctaatgttgtagtcactgat

SEQ ID NO: 1071112 - DNA, 25 bp, Homo sapien
aacgcctgagttttctggcgactgg

SEQ ID NO: 1071113 - DNA, 25 bp, Homo sapien
cccacacgctgagccggcggttggt

SEQ ID NO: 1071114 - DNA, 25 bp, Homo sapien
gctggagctgggttcgggcaccgga

SEQ ID NO: 1071115 - DNA, 25 bp, Homo sapien
agttttctggcgactgggcccacac

SEQ ID NO: 1071116 - DNA, 25 bp, Homo sapien
catgggttgcatcgtttgggacgct

SEQ ID NO: 1071117 - DNA, 25 bp, Homo sapien
tgggatggtacggtgctaccactac

SEQ ID NO: 1071118 - DNA, 25 bp, Homo sapien
gcgactacgccagagtcttcactgg

SEQ ID NO: 1071119 - DNA, 25 bp, Homo sapien
tgggacgctgcatatgtcctttcta

SEQ ID NO: 1071120 - DNA, 25 bp, Homo sapien
gtggtaaatgtgaatgaagtggaat

SEQ ID NO: 1071121 - DNA, 25 bp, Homo sapien
ggtaaatgtgaatgaagtggaatgc

SEQ ID NO: 1071122 - DNA, 25 bp, Homo sapien
cttatggtggtaaatgtgaatgaag

SEQ ID NO: 1071123 - DNA, 25 bp, Homo sapien
taaatgtgaatgaagtggaatgcct

SEQ ID NO: 1071124 - DNA, 25 bp, Homo sapien
tgcagccgaggaaagtgagcttgag

SEQ ID NO: 1071125 - DNA, 25 bp, Homo sapien
cagccgaggaaagtgagcttgagag

SEQ ID NO: 1071126 - DNA, 25 bp, Homo sapien
ctgcagccgaggaaagtgagcttga

SEQ ID NO: 1071127 - DNA, 25 bp, Homo sapien
gccgaggaaagtgagcttgagagac

SEQ ID NO: 1071128 - DNA, 25 bp, Homo sapien
tgttagacgccaagggctgccggaa

SEQ ID NO: 1071129 - DNA, 25 bp, Homo sapien
ttgttagacgccaagggctgccgga

SEQ ID NO: 1071130 - DNA, 25 bp, Homo sapien
gttagacgccaagggctgccggaac

SEQ ID NO: 1071131 - DNA, 25 bp, Homo sapien
cttgttagacgccaagggctgccgg

SEQ ID NO: 1071132 - DNA, 25 bp, Homo sapien
agtccgtccggagccttgagcgtgc

SEQ ID NO: 1071133 - DNA, 25 bp, Homo sapien
ccctctgggcgtcgctcaaagggcg

SEQ ID NO: 1071134 - DNA, 25 bp, Homo sapien
ggcgtcgctcaaagggcgccagctc

SEQ ID NO: 1071135 - DNA, 25 bp, Homo sapien
gagccttgagcgtgcgcagacccat

SEQ ID NO: 1071136 - DNA, 25 bp, Homo sapien
ggctcccgtaccacgagtagtagaa

SEQ ID NO: 1071137 - DNA, 25 bp, Homo sapien
ccagtgaatgtagtggccctcgcgc

SEQ ID NO: 1071138 - DNA, 25 bp, Homo sapien
gcaccatgacgtggtcccagtgaat

SEQ ID NO: 1071139 - DNA, 25 bp, Homo sapien
gtcccagtgcggcaccatgacgtgg

SEQ ID NO: 1071140 - DNA, 25 bp, Homo sapien
ccttgagctgggtcatatgctcccg

SEQ ID NO: 1071141 - DNA, 25 bp, Homo sapien
tatgctcccgcagcacttcggggtc

SEQ ID NO: 1071142 - DNA, 25 bp, Homo sapien
tcccgggagctgtagggccccagct

SEQ ID NO: 1071143 - DNA, 25 bp, Homo sapien
tgagctgggtcatatgctcccgcag

SEQ ID NO: 1071144 - DNA, 25 bp, Homo sapien
cagtacccccctcaacagagatttt

SEQ ID NO: 1071145 - DNA, 25 bp, Homo sapien
agctgtccacgcccgcggtgctgaa

SEQ ID NO: 1071146 - DNA, 25 bp, Homo sapien
cacttcagagacacacagtaccccc

SEQ ID NO: 1071147 - DNA, 25 bp, Homo sapien
gagcgcctgcgggaaccgtagcgcg

SEQ ID NO: 1071148 - DNA, 25 bp, Homo sapien
tgccaggtgggtaccaggacaggac

SEQ ID NO: 1071149 - DNA, 25 bp, Homo sapien
catgccaggtgggtaccaggacagg

SEQ ID NO: 1071150 - DNA, 25 bp, Homo sapien
caggtgggtaccaggacaggaccag

SEQ ID NO: 1071151 - DNA, 25 bp, Homo sapien
atgccaggtgggtaccaggacagga

SEQ ID NO: 1071152 - DNA, 25 bp, Homo sapien
ctggatgctgtactgatgggcggtg

SEQ ID NO: 1071153 - DNA, 25 bp, Homo sapien
atgctgtactgatgggcggtgtcca

SEQ ID NO: 1071154 - DNA, 25 bp, Homo sapien
tgctgtactgatgggcggtgtccag

SEQ ID NO: 1071155 - DNA, 25 bp, Homo sapien
ggatgctgtactgatgggcggtgtc

SEQ ID NO: 1071156 - DNA, 25 bp, Homo sapien
tcctcttgaaagtgagcccacctgc

SEQ ID NO: 1071157 - DNA, 25 bp, Homo sapien
tgttatccctttgggctactgccaa

SEQ ID NO: 1071158 - DNA, 25 bp, Homo sapien
agaacttctgtagaggcactaaccc

SEQ ID NO: 1071159 - DNA, 25 bp, Homo sapien
tcccactagagagttgagtctgcag

SEQ ID NO: 1071160 - DNA, 25 bp, Homo sapien
ccggcccttgtagggttggatgtgg

SEQ ID NO: 1071161 - DNA, 25 bp, Homo sapien
cggcccttgtagggttggatgtgga

SEQ ID NO: 1071162 - DNA, 25 bp, Homo sapien
ggcccttgtagggttggatgtggaa

SEQ ID NO: 1071163 - DNA, 25 bp, Homo sapien
tacttgccattgaccctgttgcgcg

SEQ ID NO: 1071164 - DNA, 25 bp, Homo sapien
cgcgtattgtggttgttccagggcc

SEQ ID NO: 1071165 - DNA, 25 bp, Homo sapien
taatggaaacgatctcgggcctcac

SEQ ID NO: 1071166 - DNA, 25 bp, Homo sapien
gcaaagtaggtgtacatgccgtcaa

SEQ ID NO: 1071167 - DNA, 25 bp, Homo sapien
tgggaaaaattaggctctggagcac

SEQ ID NO: 1071168 - DNA, 25 bp, Homo sapien
catggtgacatcttccagcaaggca

SEQ ID NO: 1071169 - DNA, 25 bp, Homo sapien
gaatctactgggaggagcttaaacc

SEQ ID NO: 1071170 - DNA, 25 bp, Homo sapien
tgtgcccaggcactagctacaaggc

SEQ ID NO: 1071171 - DNA, 25 bp, Homo sapien
ggtcagaatctgtgaggtcttaaag

SEQ ID NO: 1071172 - DNA, 25 bp, Homo sapien
tgtcacagaatctaaggtcagaatc

SEQ ID NO: 1071173 - DNA, 25 bp, Homo sapien
gcccagctcctgtatcagtttgtca

SEQ ID NO: 1071174 - DNA, 25 bp, Homo sapien
tgtggtaaagccatagccagcccag

SEQ ID NO: 1071175 - DNA, 25 bp, Homo sapien
cacctgtttccaagtatatcctaag

SEQ ID NO: 1071176 - DNA, 25 bp, Homo sapien
tcagtacagtggtttccaatgcacc

SEQ ID NO: 1071177 - DNA, 25 bp, Homo sapien
gaccacgcctagcttccaattcagt

SEQ ID NO: 1071178 - DNA, 25 bp, Homo sapien
gcctgctttaatcagggttcctgca

SEQ ID NO: 1071179 - DNA, 25 bp, Homo sapien
gagtcaagttacactgctgttagca

SEQ ID NO: 1071180 - DNA, 25 bp, Homo sapien
gctctcagtatggattagccttcaa

SEQ ID NO: 1071181 - DNA, 25 bp, Homo sapien
agtgttctccgcagccttttgtcta

SEQ ID NO: 1071182 - DNA, 25 bp, Homo sapien
tccttaggagagtaggtcaaagtgt

SEQ ID NO: 1071183 - DNA, 25 bp, Homo sapien
caaaggctcctgaagctagaaccag

SEQ ID NO: 1071184 - DNA, 25 bp, Homo sapien
ctgagcactgtagaccaagcccttg

SEQ ID NO: 1071185 - DNA, 25 bp, Homo sapien
ctcatttgcagaggccaccggagct

SEQ ID NO: 1071186 - DNA, 25 bp, Homo sapien
gatttagaatctagtgagagcctcc

SEQ ID NO: 1071187 - DNA, 25 bp, Homo sapien
agtgagagttcagcatcccttccca

SEQ ID NO: 1071188 - DNA, 25 bp, Homo sapien
catagattagaacaaaggaggacac

SEQ ID NO: 1071189 - DNA, 25 bp, Homo sapien
gtccagagttagagcccgtatccct

SEQ ID NO: 1071190 - DNA, 25 bp, Homo sapien
gtaataagctacattgtgtccccag

SEQ ID NO: 1071191 - DNA, 25 bp, Homo sapien
tatcatgatatcacagcggtgcagc

SEQ ID NO: 1071192 - DNA, 25 bp, Homo sapien
tatgtaccgaggacttaacgtgccc

SEQ ID NO: 1071193 - DNA, 25 bp, Homo sapien
agtgaccctggtgatggaacgctcg

SEQ ID NO: 1071194 - DNA, 25 bp, Homo sapien
cattgatagtacactgggatggcca

SEQ ID NO: 1071195 - DNA, 25 bp, Homo sapien
tccccagcgctgcgttagggcttcg

SEQ ID NO: 1071196 - DNA, 25 bp, Homo sapien
cagcgctgcgttagggcttcgcaag

SEQ ID NO: 1071197 - DNA, 25 bp, Homo sapien
ctgcgttagggcttcgcaaggctgc

SEQ ID NO: 1071198 - DNA, 25 bp, Homo sapien
gctgcgttagggcttcgcaaggctg

SEQ ID NO: 1071199 - DNA, 25 bp, Homo sapien
ccgtgaccagtctgagcccgggccc

SEQ ID NO: 1071200 - DNA, 25 bp, Homo sapien
ccccgtgaccagtctgagcccgggc

SEQ ID NO: 1071201 - DNA, 25 bp, Homo sapien
gtgaccagtctgagcccgggcccca

SEQ ID NO: 1071202 - DNA, 25 bp, Homo sapien
tgaccagtctgagcccgggccccat

SEQ ID NO: 1071203 - DNA, 25 bp, Homo sapien
agagacagacggtcagggccggcgc

SEQ ID NO: 1071204 - DNA, 25 bp, Homo sapien
gggccggcgcttgcgcggggccaag

SEQ ID NO: 1071205 - DNA, 25 bp, Homo sapien
tcagggccggcgcttgcgcggggcc

SEQ ID NO: 1071206 - DNA, 25 bp, Homo sapien
agcgagagacagacggtcagggccg

SEQ ID NO: 1071207 - DNA, 25 bp, Homo sapien
ttcccgcggtccacgccggcagcct

SEQ ID NO: 1071208 - DNA, 25 bp, Homo sapien
tgtgggggtggcctcccgccgagcc

SEQ ID NO: 1071209 - DNA, 25 bp, Homo sapien
tgccgctgctccaccgcgtccagca

SEQ ID NO: 1071210 - DNA, 25 bp, Homo sapien
tcctcgcaggctgcgatggtgtcca

SEQ ID NO: 1071211 - DNA, 25 bp, Homo sapien
tctcaccagatcaaaggaggttagg

SEQ ID NO: 1071212 - DNA, 25 bp, Homo sapien
tggccatttggcatttggatagtat

SEQ ID NO: 1071213 - DNA, 25 bp, Homo sapien
tggattaggccccacaaggatgtgg

SEQ ID NO: 1071214 - DNA, 25 bp, Homo sapien
gataaagcggcggagacatacttcc

SEQ ID NO: 1071215 - DNA, 25 bp, Homo sapien
agctccatcgccagcatcctttgga

SEQ ID NO: 1071216 - DNA, 25 bp, Homo sapien
gcgctccaggtttggctgagacgtt

SEQ ID NO: 1071217 - DNA, 25 bp, Homo sapien
gccagcatcctttggaaagccgcct

SEQ ID NO: 1071218 - DNA, 25 bp, Homo sapien
gaaagccgcctctggcggagacagc

SEQ ID NO: 1071219 - DNA, 25 bp, Homo sapien
tgccagtgaagactggcccctttac

SEQ ID NO: 1071220 - DNA, 25 bp, Homo sapien
agagtccagccaccggccctgggga

SEQ ID NO: 1071221 - DNA, 25 bp, Homo sapien
tgaagggagttgttcagagtccagc

SEQ ID NO: 1071222 - DNA, 25 bp, Homo sapien
agagaagtcagggtattctgctcgg

SEQ ID NO: 1071223 - DNA, 25 bp, Homo sapien
gctggtctgcccaaatctgggtaat

SEQ ID NO: 1071224 - DNA, 25 bp, Homo sapien
tgaaatggacatgtaacaccacctg

SEQ ID NO: 1071225 - DNA, 25 bp, Homo sapien
cactctggcgagcactgctggtctg

SEQ ID NO: 1071226 - DNA, 25 bp, Homo sapien
cagactgggtattcattggctgcat

SEQ ID NO: 1071227 - DNA, 25 bp, Homo sapien
tgatgggaccccaaagtaagcttgt

SEQ ID NO: 1071228 - DNA, 25 bp, Homo sapien
gaacaacggacttccactgagcgat

SEQ ID NO: 1071229 - DNA, 25 bp, Homo sapien
tatcagagggcagtaatgaccttcc

SEQ ID NO: 1071230 - DNA, 25 bp, Homo sapien
tatcctcgtagtgtgccaagtcaga

SEQ ID NO: 1071231 - DNA, 25 bp, Homo sapien
cactgttaattgctaagttgctgct

SEQ ID NO: 1071232 - DNA, 25 bp, Homo sapien
gctgctaaaattggtaagaaatggt

SEQ ID NO: 1071233 - DNA, 25 bp, Homo sapien
taattgctaagttgctgctgctaaa

SEQ ID NO: 1071234 - DNA, 25 bp, Homo sapien
taagaaatggtatcaagctctccag

SEQ ID NO: 1071235 - DNA, 25 bp, Homo sapien
gcaggcagggaaatgtctgccgccg

SEQ ID NO: 1071236 - DNA, 25 bp, Homo sapien
caggcagggaaatgtctgccgccgc

SEQ ID NO: 1071237 - DNA, 25 bp, Homo sapien
aattggcggaggcaggtatccgtcc

SEQ ID NO: 1071238 - DNA, 25 bp, Homo sapien
ctttcgattgatggagcgggcacac

SEQ ID NO: 1071239 - DNA, 25 bp, Homo sapien
ggagaagacaggctttcgattgatg

SEQ ID NO: 1071240 - DNA, 25 bp, Homo sapien
ctggccagggtacgcgacaattggc

SEQ ID NO: 1071241 - DNA, 25 bp, Homo sapien
gacccgggatcctgaattcctgtgg

SEQ ID NO: 1071242 - DNA, 25 bp, Homo sapien
cgcgcggttgtaactcggccctagt

SEQ ID NO: 1071243 - DNA, 25 bp, Homo sapien
aggcttcgattctgcgacccgggat

SEQ ID NO: 1071244 - DNA, 25 bp, Homo sapien
tgtctcggtataggtgcgcagagct

SEQ ID NO: 1071245 - DNA, 25 bp, Homo sapien
tcatatatcatgtccttgcacatcc

SEQ ID NO: 1071246 - DNA, 25 bp, Homo sapien
ttgcacatcctattcagttcggtcg

SEQ ID NO: 1071247 - DNA, 25 bp, Homo sapien
tattcagttcggtcgggttcatgca

SEQ ID NO: 1071248 - DNA, 25 bp, Homo sapien
tcttctcatatatcatgtccttgca

SEQ ID NO: 1071249 - DNA, 25 bp, Homo sapien
agcttgctaggtcagaatgagagac

SEQ ID NO: 1071250 - DNA, 25 bp, Homo sapien
tgaggctagaagatcctttgaacct

SEQ ID NO: 1071251 - DNA, 25 bp, Homo sapien
ggctagaagatcctttgaacctagg

SEQ ID NO: 1071252 - DNA, 25 bp, Homo sapien
gctagaagatcctttgaacctagga

SEQ ID NO: 1071253 - DNA, 25 bp, Homo sapien
tagaagatcctttgaacctaggagt

SEQ ID NO: 1071254 - DNA, 25 bp, Homo sapien
taagtgtcgcaccaaggtttgcctt

SEQ ID NO: 1071255 - DNA, 25 bp, Homo sapien
ctaaggactaagtgtcgcaccaagg

SEQ ID NO: 1071256 - DNA, 25 bp, Homo sapien
cgcaccaaggtttgccttttgtatt

SEQ ID NO: 1071257 - DNA, 25 bp, Homo sapien
tgcataaagaaaggagttggagctg

SEQ ID NO: 1071258 - DNA, 25 bp, Homo sapien
cctttgttgctgcttccctgaatga

SEQ ID NO: 1071259 - DNA, 25 bp, Homo sapien
gaggtctgccatcagcttagttagc

SEQ ID NO: 1071260 - DNA, 25 bp, Homo sapien
tagccattgatgcaaatactaggga

SEQ ID NO: 1071261 - DNA, 25 bp, Homo sapien
gaatgagtattaccccaggatgagg

SEQ ID NO: 1071262 - DNA, 25 bp, Homo sapien
tattacctgggcttgaagacttcag

SEQ ID NO: 1071263 - DNA, 25 bp, Homo sapien
tagtaagcacataacttctccagtc

SEQ ID NO: 1071264 - DNA, 25 bp, Homo sapien
tagattcttgaagggctttggcaaa

SEQ ID NO: 1071265 - DNA, 25 bp, Homo sapien
cccaggctgaattcttggttagatt

SEQ ID NO: 1071266 - DNA, 25 bp, Homo sapien
gatgctttcatggttcatcattgta

SEQ ID NO: 1071267 - DNA, 25 bp, Homo sapien
ggacgttttatctggacatacactg

SEQ ID NO: 1071268 - DNA, 25 bp, Homo sapien
tacctacaagtggagatatatagac

SEQ ID NO: 1071269 - DNA, 25 bp, Homo sapien
ttgggctgcatccagtttttgtcta

SEQ ID NO: 1071270 - DNA, 25 bp, Homo sapien
tatatgtgctgccatagcaagcacc

SEQ ID NO: 1071271 - DNA, 25 bp, Homo sapien
aatcttctctgtatggttccaattt

SEQ ID NO: 1071272 - DNA, 25 bp, Homo sapien
ttttttctttttgcaggggccatgc

SEQ ID NO: 1071273 - DNA, 25 bp, Homo sapien
tagtatatgtgctgccatagcaagc

SEQ ID NO: 1071274 - DNA, 25 bp, Homo sapien
taactcaattgtagcctaaagctgc

SEQ ID NO: 1071275 - DNA, 25 bp, Homo sapien
gagttgtaaacagaccatagcctac

SEQ ID NO: 1071276 - DNA, 25 bp, Homo sapien
ttccaatctcacctgcggtcacaag

SEQ ID NO: 1071277 - DNA, 25 bp, Homo sapien
gcaaagaccaagctgtaataaccgg

SEQ ID NO: 1071278 - DNA, 25 bp, Homo sapien
gcaggtatgcgcacacagtggcgcc

SEQ ID NO: 1071279 - DNA, 25 bp, Homo sapien
ccccgccaacagtgattcaagtcaa

SEQ ID NO: 1071280 - DNA, 25 bp, Homo sapien
gattcccggcatgaatgggtcacgc

SEQ ID NO: 1071281 - DNA, 25 bp, Homo sapien
acgccgcgggaacatctggatccga

SEQ ID NO: 1071282 - DNA, 25 bp, Homo sapien
ctgccagcgctcactagccgatgaa

SEQ ID NO: 1071283 - DNA, 25 bp, Homo sapien
gttttcctcgcagtgctccgcttgt

SEQ ID NO: 1071284 - DNA, 25 bp, Homo sapien
aggagctgttctatgaagaccgcca

SEQ ID NO: 1071285 - DNA, 25 bp, Homo sapien
gaccgccatttccacgagggctgct

SEQ ID NO: 1071286 - DNA, 25 bp, Homo sapien
aggtaggagccgccgagggacgcgg

SEQ ID NO: 1071287 - DNA, 25 bp, Homo sapien
gtaggagccgccgagggacgcggcg

SEQ ID NO: 1071288 - DNA, 25 bp, Homo sapien
caggtaggagccgccgagggacgcg

SEQ ID NO: 1071289 - DNA, 25 bp, Homo sapien
ggtaggagccgccgagggacgcggc

SEQ ID NO: 1071290 - DNA, 25 bp, Homo sapien
gttcagacacacctgtttcccaggg

SEQ ID NO: 1071291 - DNA, 25 bp, Homo sapien
ccactgattcctaccggaaataggc

SEQ ID NO: 1071292 - DNA, 25 bp, Homo sapien
tctgtacagccttggaaaagatcag

SEQ ID NO: 1071293 - DNA, 25 bp, Homo sapien
ggagaacgccggatccgcactgcct

SEQ ID NO: 1071294 - DNA, 25 bp, Homo sapien
aagtccactgattcctaccggaaat

SEQ ID NO: 1071295 - DNA, 25 bp, Homo sapien
tggcttcgctctctgtgttcccgct

SEQ ID NO: 1071296 - DNA, 25 bp, Homo sapien
ccgccttccgaaaagccgccgccat

SEQ ID NO: 1071297 - DNA, 25 bp, Homo sapien
gctctctgtgttcccgctgccggga

SEQ ID NO: 1071298 - DNA, 25 bp, Homo sapien
gctgccgggacttagccgccttccg

SEQ ID NO: 1071299 - DNA, 25 bp, Homo sapien
aggtttcttggcctattaaggacag

SEQ ID NO: 1071300 - DNA, 25 bp, Homo sapien
gagaggcaacaatgactcggcacta

SEQ ID NO: 1071301 - DNA, 25 bp, Homo sapien
caagcagttgccagttgtactaaaa

SEQ ID NO: 1071302 - DNA, 25 bp, Homo sapien
tgactcggcactaagcaagcagttg

SEQ ID NO: 1071303 - DNA, 25 bp, Homo sapien
tccagcaggcccagatgttttcgaa

SEQ ID NO: 1071304 - DNA, 25 bp, Homo sapien
cagcaggcccagatgttttcgaaag

SEQ ID NO: 1071305 - DNA, 25 bp, Homo sapien
tctccagcaggcccagatgttttcg

SEQ ID NO: 1071306 - DNA, 25 bp, Homo sapien
tctgcacgaagtttgtaatctttct

SEQ ID NO: 1071307 - DNA, 25 bp, Homo sapien
gcagggtccacagtctaatcaacag

SEQ ID NO: 1071308 - DNA, 25 bp, Homo sapien
tgagctcatgtcttcgcagggtcca

SEQ ID NO: 1071309 - DNA, 25 bp, Homo sapien
tggcagcgcctctaccagaaagact

SEQ ID NO: 1071310 - DNA, 25 bp, Homo sapien
tatatcattacagggagacaccaaa

SEQ ID NO: 1071311 - DNA, 25 bp, Homo sapien
ttcaagagccttcttccgaagagct

SEQ ID NO: 1071312 - DNA, 25 bp, Homo sapien
ccgaagagctttgaggtattcttgt

SEQ ID NO: 1071313 - DNA, 25 bp, Homo sapien
cttccgaagagctttgaggtattct

SEQ ID NO: 1071314 - DNA, 25 bp, Homo sapien
agccttcttccgaagagctttgagg

SEQ ID NO: 1071315 - DNA, 25 bp, Homo sapien
tatatatttgacgtcctgagttctc

SEQ ID NO: 1071316 - DNA, 25 bp, Homo sapien
catttctatatatttgacgtcctga

SEQ ID NO: 1071317 - DNA, 25 bp, Homo sapien
tatttgacgtcctgagttctcatca

SEQ ID NO: 1071318 - DNA, 25 bp, Homo sapien
cagctttagttgttctggggttact

SEQ ID NO: 1071319 - DNA, 25 bp, Homo sapien
tggaaatccagcagatggagctctg

SEQ ID NO: 1071320 - DNA, 25 bp, Homo sapien
taaagactctgtcgactagctccgg

SEQ ID NO: 1071321 - DNA, 25 bp, Homo sapien
ggtgagttgcgacatcaaactgttc

SEQ ID NO: 1071322 - DNA, 25 bp, Homo sapien
tttctgcaaggtctctatcctgggc

SEQ ID NO: 1071323 - DNA, 25 bp, Homo sapien
taagtccagtctgattggtaactcc

SEQ ID NO: 1071324 - DNA, 25 bp, Homo sapien
tttacaaacgcagaaaaatgaggcc

SEQ ID NO: 1071325 - DNA, 25 bp, Homo sapien
tgcttcaacctttgtgtgagtgcca

SEQ ID NO: 1071326 - DNA, 25 bp, Homo sapien
gaatgaatcagtgttggaaacccta

SEQ ID NO: 1071327 - DNA, 25 bp, Homo sapien
tgtagactatcttatcgaaacccgt

SEQ ID NO: 1071328 - DNA, 25 bp, Homo sapien
tttctgagcaataacgaacaatttc

SEQ ID NO: 1071329 - DNA, 25 bp, Homo sapien
cttctctcgttcaatccgctgtgtc

SEQ ID NO: 1071330 - DNA, 25 bp, Homo sapien
cgctgtgtcaggcagttatactgct

SEQ ID NO: 1071331 - DNA, 25 bp, Homo sapien
caataacgaacaatttcttctctcg

SEQ ID NO: 1071332 - DNA, 25 bp, Homo sapien
aatcaaggcgcatttcaacactgtc

SEQ ID NO: 1071333 - DNA, 25 bp, Homo sapien
caacactgtcagagtaacagacact

SEQ ID NO: 1071334 - DNA, 25 bp, Homo sapien
ctccttaatcaaggcgcatttcaac

SEQ ID NO: 1071335 - DNA, 25 bp, Homo sapien
tgtcagagtaacagacactggctca

SEQ ID NO: 1071336 - DNA, 25 bp, Homo sapien
tcatatgctacccgatcctaccctt

SEQ ID NO: 1071337 - DNA, 25 bp, Homo sapien
atatgctacccgatcctaccctttg

SEQ ID NO: 1071338 - DNA, 25 bp, Homo sapien
gcactgactaataacccccttatta

SEQ ID NO: 1071339 - DNA, 25 bp, Homo sapien
gctacccgatcctaccctttgctgt

SEQ ID NO: 1071340 - DNA, 25 bp, Homo sapien
cgttttcgacgactctgaaatttat

SEQ ID NO: 1071341 - DNA, 25 bp, Homo sapien
aatagctggggagttcaccgtttct

SEQ ID NO: 1071342 - DNA, 25 bp, Homo sapien
aatttataaatagctggggagttca

SEQ ID NO: 1071343 - DNA, 25 bp, Homo sapien
tcaacgttttcgacgactctgaaat

SEQ ID NO: 1071344 - DNA, 25 bp, Homo sapien
gaaagacattaaatgtcagactgac

SEQ ID NO: 1071345 - DNA, 25 bp, Homo sapien
gatttttgatacagaatgacaaggc

SEQ ID NO: 1071346 - DNA, 25 bp, Homo sapien
tgaagttactagaaaacgacaacag

SEQ ID NO: 1071347 - DNA, 25 bp, Homo sapien
caaaccggaaaaccatgccatttgg

SEQ ID NO: 1071348 - DNA, 25 bp, Homo sapien
aataagactaatttcacaatccaaa

SEQ ID NO: 1071349 - DNA, 25 bp, Homo sapien
aaataagactaatttcacaatccaa

SEQ ID NO: 1071350 - DNA, 25 bp, Homo sapien
tgaataagcactgggattaggaatg

SEQ ID NO: 1071351 - DNA, 25 bp, Homo sapien
tgatgcctcgttttacaaaatggag

SEQ ID NO: 1071352 - DNA, 25 bp, Homo sapien
tagctcctagcacagttaagcatgc

SEQ ID NO: 1071353 - DNA, 25 bp, Homo sapien
tcacagtaattgtccacctccacag

SEQ ID NO: 1071354 - DNA, 25 bp, Homo sapien
ccttactccaaggacacaagtgcta

SEQ ID NO: 1071355 - DNA, 25 bp, Homo sapien
agcctccaattccttactccaagga

SEQ ID NO: 1071356 - DNA, 25 bp, Homo sapien
tgctaacctaaactggagggatttc

SEQ ID NO: 1071357 - DNA, 25 bp, Homo sapien
tcactgcgactttgaactcctaggt

SEQ ID NO: 1071358 - DNA, 25 bp, Homo sapien
gagttgtgacgctgggactagagga

SEQ ID NO: 1071359 - DNA, 25 bp, Homo sapien
gggcagaggaggtcggcggagttgt

SEQ ID NO: 1071360 - DNA, 25 bp, Homo sapien
aggcgtgaagccagagtccgtccga

SEQ ID NO: 1071361 - DNA, 25 bp, Homo sapien
gtcgcgccggaaccgagccgcgaat

SEQ ID NO: 1071362 - DNA, 25 bp, Homo sapien
catccagggctcaaacagacattgc

SEQ ID NO: 1071363 - DNA, 25 bp, Homo sapien
tgcaatgacaagtccatccccaggc

SEQ ID NO: 1071364 - DNA, 25 bp, Homo sapien
cagacagatgttgtgccaggttcaa

SEQ ID NO: 1071365 - DNA, 25 bp, Homo sapien
cagacaggtattgttccaggcccag

SEQ ID NO: 1071366 - DNA, 25 bp, Homo sapien
ggaggctggacctcaggaacatgga

SEQ ID NO: 1071367 - DNA, 25 bp, Homo sapien
gaggctggacctcaggaacatggag

SEQ ID NO: 1071368 - DNA, 25 bp, Homo sapien
tggaggctggacctcaggaacatgg

SEQ ID NO: 1071369 - DNA, 25 bp, Homo sapien
ggctggacctcaggaacatggaggg

SEQ ID NO: 1071370 - DNA, 25 bp, Homo sapien
gttacttatgttcctgtggccctca

SEQ ID NO: 1071371 - DNA, 25 bp, Homo sapien
taaggtcaggtttcaggctcagtct

SEQ ID NO: 1071372 - DNA, 25 bp, Homo sapien
gaaggcttggaattcactacgcaca

SEQ ID NO: 1071373 - DNA, 25 bp, Homo sapien
caccaggcgagtgctgttgaatcat

SEQ ID NO: 1071374 - DNA, 25 bp, Homo sapien
ccatgtatggaataagtacagatgc

SEQ ID NO: 1071375 - DNA, 25 bp, Homo sapien
gaccaaggatattccttccatggcc

SEQ ID NO: 1071376 - DNA, 25 bp, Homo sapien
cttgtggaccgtacccatgtatgga

SEQ ID NO: 1071377 - DNA, 25 bp, Homo sapien
tggaataagtacagatgctgtgtcc

SEQ ID NO: 1071378 - DNA, 25 bp, Homo sapien
tgctcaaaaaatgtaggctccctct

SEQ ID NO: 1071379 - DNA, 25 bp, Homo sapien
cattgggcatccaaaatggtgtgca

SEQ ID NO: 1071380 - DNA, 25 bp, Homo sapien
gttcaaacactgtctaggcctcagt

SEQ ID NO: 1071381 - DNA, 25 bp, Homo sapien
tacagcttgctcataataggtgctc

SEQ ID NO: 1071382 - DNA, 25 bp, Homo sapien
gtattaattaccatgtacagtacac

SEQ ID NO: 1071383 - DNA, 25 bp, Homo sapien
cagcccggctgtgatggtattttgc

SEQ ID NO: 1071384 - DNA, 25 bp, Homo sapien
tattaattaccatgtacagtacaca

SEQ ID NO: 1071385 - DNA, 25 bp, Homo sapien
tgtattaattaccatgtacagtaca

SEQ ID NO: 1071386 - DNA, 25 bp, Homo sapien
ctcatccttgtcctcactcttctcc

SEQ ID NO: 1071387 - DNA, 25 bp, Homo sapien
agctcatccttgtcctcactcttct

SEQ ID NO: 1071388 - DNA, 25 bp, Homo sapien
gctcatccttgtcctcactcttctc

SEQ ID NO: 1071389 - DNA, 25 bp, Homo sapien
atccttgtcctcactcttctcctcc

SEQ ID NO: 1071390 - DNA, 25 bp, Homo sapien
ccctttacgggatggaacacatgta

SEQ ID NO: 1071391 - DNA, 25 bp, Homo sapien
cacatgtaaaaccttggtgagaagc

SEQ ID NO: 1071392 - DNA, 25 bp, Homo sapien
caacctcgtggcataccctttacgg

SEQ ID NO: 1071393 - DNA, 25 bp, Homo sapien
tatgtgacagcgctatgcttaaccc

SEQ ID NO: 1071394 - DNA, 25 bp, Homo sapien
agctgagtggcaaccaggaagccac

SEQ ID NO: 1071395 - DNA, 25 bp, Homo sapien
gccacacgggcagctgagtggcaac

SEQ ID NO: 1071396 - DNA, 25 bp, Homo sapien
tttggccacacgggcagctgagtgg

SEQ ID NO: 1071397 - DNA, 25 bp, Homo sapien
acacgggcagctgagtggcaaccag

SEQ ID NO: 1071398 - DNA, 25 bp, Homo sapien
gcgacgagcacacgcccatcccagg

SEQ ID NO: 1071399 - DNA, 25 bp, Homo sapien
ctccaggagtgggagacgagagcac

SEQ ID NO: 1071400 - DNA, 25 bp, Homo sapien
ggaggaagggcgctggcatccggct

SEQ ID NO: 1071401 - DNA, 25 bp, Homo sapien
agagcacggcgacagcgacgagcac

SEQ ID NO: 1071402 - DNA, 25 bp, Homo sapien
gtcaaactccagaaggactctgcct

SEQ ID NO: 1071403 - DNA, 25 bp, Homo sapien
gggtcaaactccagaaggactctgc

SEQ ID NO: 1071404 - DNA, 25 bp, Homo sapien
tcaaactccagaaggactctgcctc

SEQ ID NO: 1071405 - DNA, 25 bp, Homo sapien
ggtcaaactccagaaggactctgcc

SEQ ID NO: 1071406 - DNA, 25 bp, Homo sapien
taaggctggctggtatctcttcatc

SEQ ID NO: 1071407 - DNA, 25 bp, Homo sapien
gttcagtttcaccaggcaggatgtc

SEQ ID NO: 1071408 - DNA, 25 bp, Homo sapien
tttcaccaggcaggatgtccactcc

SEQ ID NO: 1071409 - DNA, 25 bp, Homo sapien
atgcggtaggtgtcttgttcagttt

SEQ ID NO: 1071410 - DNA, 25 bp, Homo sapien
tacatttggaaggtcctatggccca

SEQ ID NO: 1071411 - DNA, 25 bp, Homo sapien
gtgtgacaaggccaagtaaaattca

SEQ ID NO: 1071412 - DNA, 25 bp, Homo sapien
gggaaagttttcttgccagacagca

SEQ ID NO: 1071413 - DNA, 25 bp, Homo sapien
cagaaacgcacgagccaagctgatg

SEQ ID NO: 1071414 - DNA, 25 bp, Homo sapien
gctttccacaagctagcccctttga

SEQ ID NO: 1071415 - DNA, 25 bp, Homo sapien
tgtctcatctttccaattagtagtc

SEQ ID NO: 1071416 - DNA, 25 bp, Homo sapien
gattgaagcctacaaaatgctttcc

SEQ ID NO: 1071417 - DNA, 25 bp, Homo sapien
gtcacagaactgattgaagcctaca

SEQ ID NO: 1071418 - DNA, 25 bp, Homo sapien
gccagacggtgccaaactgctgact

SEQ ID NO: 1071419 - DNA, 25 bp, Homo sapien
aactgaaagaaatgtcaccgccttt

SEQ ID NO: 1071420 - DNA, 25 bp, Homo sapien
caataaagtgccaaaggaagccggt

SEQ ID NO: 1071421 - DNA, 25 bp, Homo sapien
tgtcaccgcctttgccaataaagtg

SEQ ID NO: 1071422 - DNA, 25 bp, Homo sapien
tatttgtaaatgaggccgggcctag

SEQ ID NO: 1071423 - DNA, 25 bp, Homo sapien
ttctggaagagcttggcagttgctg

SEQ ID NO: 1071424 - DNA, 25 bp, Homo sapien
catatttgtaaatgaggccgggcct

SEQ ID NO: 1071425 - DNA, 25 bp, Homo sapien
gctcttgccactgaagcatgggccg

SEQ ID NO: 1071426 - DNA, 25 bp, Homo sapien
ggtcccacgatgacagaagggatcg

SEQ ID NO: 1071427 - DNA, 25 bp, Homo sapien
tccagcaggcagtgcggctgccttt

SEQ ID NO: 1071428 - DNA, 25 bp, Homo sapien
cggctgccttttaccagcagtgtag

SEQ ID NO: 1071429 - DNA, 25 bp, Homo sapien
gcgtcgccctaaatcaaatcccagg

SEQ ID NO: 1071430 - DNA, 25 bp, Homo sapien
tgactaagcaaagaggaccagccag

SEQ ID NO: 1071431 - DNA, 25 bp, Homo sapien
cagcacatgagaggagccatatcca

SEQ ID NO: 1071432 - DNA, 25 bp, Homo sapien
caggaatgaatctgcccgagtccct

SEQ ID NO: 1071433 - DNA, 25 bp, Homo sapien
cattgcaagatgtgagctggagtac

SEQ ID NO: 1071434 - DNA, 25 bp, Homo sapien
ccctcttgacatcataaaggacttg

SEQ ID NO: 1071435 - DNA, 25 bp, Homo sapien
cgctaatgttatcttggcggcatgt

SEQ ID NO: 1071436 - DNA, 25 bp, Homo sapien
tcggcagcgggaaggaatccctctt

SEQ ID NO: 1071437 - DNA, 25 bp, Homo sapien
tatgatgtcattaggcagcttcggc

SEQ ID NO: 1071438 - DNA, 25 bp, Homo sapien
ggcacacgcaagtgtacacacaaaa

SEQ ID NO: 1071439 - DNA, 25 bp, Homo sapien
gtgggcccagcagtcctgtctgtcc

SEQ ID NO: 1071440 - DNA, 25 bp, Homo sapien
ttagcaccacggaggtactctaggc

SEQ ID NO: 1071441 - DNA, 25 bp, Homo sapien
tcaagagataggtcagccctcagga

SEQ ID NO: 1071442 - DNA, 25 bp, Homo sapien
gaaaattccctggtcactataggca

SEQ ID NO: 1071443 - DNA, 25 bp, Homo sapien
tcagaggatccatcctgggaaggag

SEQ ID NO: 1071444 - DNA, 25 bp, Homo sapien
gagatgtgggtgcaaccttgagtta

SEQ ID NO: 1071445 - DNA, 25 bp, Homo sapien
caagaaatatagagctcagaggatc

SEQ ID NO: 1071446 - DNA, 25 bp, Homo sapien
cacagttgaaaaatctgggtccatg

SEQ ID NO: 1071447 - DNA, 25 bp, Homo sapien
tctgcaaaggcaaacaagtaggact

SEQ ID NO: 1071448 - DNA, 25 bp, Homo sapien
tcacacagttgaaaaatctgggtcc

SEQ ID NO: 1071449 - DNA, 25 bp, Homo sapien
aaaggcaaacaagtaggactcatgg

SEQ ID NO: 1071450 - DNA, 25 bp, Homo sapien
cctggtcccaacgtgtgcgactgga

SEQ ID NO: 1071451 - DNA, 25 bp, Homo sapien
cacggtgtggaaaagccagtgtcac

SEQ ID NO: 1071452 - DNA, 25 bp, Homo sapien
taagcaaagagatatggccctaccc

SEQ ID NO: 1071453 - DNA, 25 bp, Homo sapien
cgactggattgctatgggacacaaa

SEQ ID NO: 1071454 - DNA, 25 bp, Homo sapien
tgctgagtccaaacgccgtccactg

SEQ ID NO: 1071455 - DNA, 25 bp, Homo sapien
aaacgccgtccactgctcagttcca

SEQ ID NO: 1071456 - DNA, 25 bp, Homo sapien
tccactgctcagttccagccagcca

SEQ ID NO: 1071457 - DNA, 25 bp, Homo sapien
gctgctgagtccaaacgccgtccac

SEQ ID NO: 1071458 - DNA, 25 bp, Homo sapien
cctcccaggggaatacggtagtgct

SEQ ID NO: 1071459 - DNA, 25 bp, Homo sapien
tggtctggggtcgtttcaacagcag

SEQ ID NO: 1071460 - DNA, 25 bp, Homo sapien
tgtgctcgtctctgtgcaggacctg

SEQ ID NO: 1071461 - DNA, 25 bp, Homo sapien
tgtggacggactaagggctgaagaa

SEQ ID NO: 1071462 - DNA, 25 bp, Homo sapien
ggtgaatcaagctcatgcccatcca

SEQ ID NO: 1071463 - DNA, 25 bp, Homo sapien
tgggtctctgtaccacgacacagct

SEQ ID NO: 1071464 - DNA, 25 bp, Homo sapien
taaaaggtgaatcaagctcatgccc

SEQ ID NO: 1071465 - DNA, 25 bp, Homo sapien
ttcggtgctagaaaaaatccagctg

SEQ ID NO: 1071466 - DNA, 25 bp, Homo sapien
tgaacagtatgcacagtctcctggt

SEQ ID NO: 1071467 - DNA, 25 bp, Homo sapien
cctggttcattaggaggagcacaag

SEQ ID NO: 1071468 - DNA, 25 bp, Homo sapien
gggacatctgaacagtatgcacagt

SEQ ID NO: 1071469 - DNA, 25 bp, Homo sapien
gaacggtggggagtgaatcataaaa

SEQ ID NO: 1071470 - DNA, 25 bp, Homo sapien
ccaggactgagctttaaacaaaaca

SEQ ID NO: 1071471 - DNA, 25 bp, Homo sapien
tcaaccacatgcaccaatttgggta

SEQ ID NO: 1071472 - DNA, 25 bp, Homo sapien
ccaatttgggtaatgtattctttca

SEQ ID NO: 1071473 - DNA, 25 bp, Homo sapien
taatcctgcctgcatatcaatttcc

SEQ ID NO: 1071474 - DNA, 25 bp, Homo sapien
tcaccgtcaagtgccaaagcttggg

SEQ ID NO: 1071475 - DNA, 25 bp, Homo sapien
catcttgacgtggaagttgggatcc

SEQ ID NO: 1071476 - DNA, 25 bp, Homo sapien
tcatcttaacacacttcaggatgga

SEQ ID NO: 1071477 - DNA, 25 bp, Homo sapien
tgggactggctcatacacagggaac

SEQ ID NO: 1071478 - DNA, 25 bp, Homo sapien
ctcctggcctctccgggcctgggcc

SEQ ID NO: 1071479 - DNA, 25 bp, Homo sapien
ggcctgggcccaggcccagctgagc

SEQ ID NO: 1071480 - DNA, 25 bp, Homo sapien
ctctgctcctggcctctccgggcct

SEQ ID NO: 1071481 - DNA, 25 bp, Homo sapien
cctgggcccaggcccagctgagctt

SEQ ID NO: 1071482 - DNA, 25 bp, Homo sapien
cacacaacaacacatccatattcct

SEQ ID NO: 1071483 - DNA, 25 bp, Homo sapien
caacaacacatccatattcctgttt

SEQ ID NO: 1071484 - DNA, 25 bp, Homo sapien
cacaacaacacatccatattcctgt

SEQ ID NO: 1071485 - DNA, 25 bp, Homo sapien
acaacacatccatattcctgtttta

SEQ ID NO: 1071486 - DNA, 25 bp, Homo sapien
gctggaccatcatcagaatggagat

SEQ ID NO: 1071487 - DNA, 25 bp, Homo sapien
gttcaaacatccaacagaagttagt

SEQ ID NO: 1071488 - DNA, 25 bp, Homo sapien
caagtaggtctgactagctgaccag

SEQ ID NO: 1071489 - DNA, 25 bp, Homo sapien
gagatgcgtacgtacatgggagaac

SEQ ID NO: 1071490 - DNA, 25 bp, Homo sapien
cagcttctgggaagttgcccattcc

SEQ ID NO: 1071491 - DNA, 25 bp, Homo sapien
aatggcgatcgatgcatcttcctgc

SEQ ID NO: 1071492 - DNA, 25 bp, Homo sapien
tcaaatcaataggcagtccacgtgg

SEQ ID NO: 1071493 - DNA, 25 bp, Homo sapien
gctgccaatggcgatcgatgcatct

SEQ ID NO: 1071494 - DNA, 25 bp, Homo sapien
ccagctgccaatggcgatcgatgca

SEQ ID NO: 1071495 - DNA, 25 bp, Homo sapien
gtgggccgcatgttaacagccccga

SEQ ID NO: 1071496 - DNA, 25 bp, Homo sapien
agctgactttggccgcgctggccgt

SEQ ID NO: 1071497 - DNA, 25 bp, Homo sapien
gggccgcatgttaacagccccgaca

SEQ ID NO: 1071498 - DNA, 25 bp, Homo sapien
gccgtgggccgcatgttaacagccc

SEQ ID NO: 1071499 - DNA, 25 bp, Homo sapien
tagagaaactggagccatatagcag

SEQ ID NO: 1071500 - DNA, 25 bp, Homo sapien
agaaactggagccatatagcaggag

SEQ ID NO: 1071501 - DNA, 25 bp, Homo sapien
aaactggagccatatagcaggagca

SEQ ID NO: 1071502 - DNA, 25 bp, Homo sapien
agagaaactggagccatatagcagg

SEQ ID NO: 1071503 - DNA, 25 bp, Homo sapien
ctgatcccctgggagcgggacgcct

SEQ ID NO: 1071504 - DNA, 25 bp, Homo sapien
ttattgtgtcaaagataaacgccgc

SEQ ID NO: 1071505 - DNA, 25 bp, Homo sapien
gataaacgccgcttggctgatcccc

SEQ ID NO: 1071506 - DNA, 25 bp, Homo sapien
cgggacgcctgttccgcagggcttt

SEQ ID NO: 1071507 - DNA, 25 bp, Homo sapien
tccccagtggccagactctggacat

SEQ ID NO: 1071508 - DNA, 25 bp, Homo sapien
catcatggctttagcagtggtggca

SEQ ID NO: 1071509 - DNA, 25 bp, Homo sapien
tgcactgggcatcatggctttagca

SEQ ID NO: 1071510 - DNA, 25 bp, Homo sapien
ggcagaacctctagtggccacatct

SEQ ID NO: 1071511 - DNA, 25 bp, Homo sapien
cagcagtgacaagttgaatgatgga

SEQ ID NO: 1071512 - DNA, 25 bp, Homo sapien
gagagatagagcagtcactcaaggg

SEQ ID NO: 1071513 - DNA, 25 bp, Homo sapien
ggaggacctgagcacatttataaga

SEQ ID NO: 1071514 - DNA, 25 bp, Homo sapien
cattcaatctggtgatgagcatgct

SEQ ID NO: 1071515 - DNA, 25 bp, Homo sapien
aaaggaaacacccactaatcatagt

SEQ ID NO: 1071516 - DNA, 25 bp, Homo sapien
agcacaagggcttgtaaccaaagga

SEQ ID NO: 1071517 - DNA, 25 bp, Homo sapien
tatgaaatatcgaagcacaagggct

SEQ ID NO: 1071518 - DNA, 25 bp, Homo sapien
catagttttcgccaggaacacccta

SEQ ID NO: 1071519 - DNA, 25 bp, Homo sapien
ggtaatgactttggcaatttaacat

SEQ ID NO: 1071520 - DNA, 25 bp, Homo sapien
ggcaatttaacatgttcttgcagac

SEQ ID NO: 1071521 - DNA, 25 bp, Homo sapien
ttaacatgttcttgcagacactttt

SEQ ID NO: 1071522 - DNA, 25 bp, Homo sapien
aattggtgactggtaatgactttgg

SEQ ID NO: 1071523 - DNA, 25 bp, Homo sapien
gtcctatcattgtcatctccctgca

SEQ ID NO: 1071524 - DNA, 25 bp, Homo sapien
tgcactctcccacttcgaagttgca

SEQ ID NO: 1071525 - DNA, 25 bp, Homo sapien
catagtagagctcactcctgtccta

SEQ ID NO: 1071526 - DNA, 25 bp, Homo sapien
ttttcaggcgtttgcatctccagcg

SEQ ID NO: 1071527 - DNA, 25 bp, Homo sapien
tccaaattcgcctgccagttaagtc

SEQ ID NO: 1071528 - DNA, 25 bp, Homo sapien
atactccatcctcgttccaaattcg

SEQ ID NO: 1071529 - DNA, 25 bp, Homo sapien
aagaggctgagccatactccatcct

SEQ ID NO: 1071530 - DNA, 25 bp, Homo sapien
tcgttccaaattcgcctgccagtta

SEQ ID NO: 1071531 - DNA, 25 bp, Homo sapien
taatttgcccgcattgtagcaggat

SEQ ID NO: 1071532 - DNA, 25 bp, Homo sapien
taaaaaagcaggtgccgtcaatggt

SEQ ID NO: 1071533 - DNA, 25 bp, Homo sapien
agacatgttaagtggttcttctctc

SEQ ID NO: 1071534 - DNA, 25 bp, Homo sapien
ccggactcggttttgtaatgctaat

SEQ ID NO: 1071535 - DNA, 25 bp, Homo sapien
agtagaccatttgggtcaccttgtg

SEQ ID NO: 1071536 - DNA, 25 bp, Homo sapien
caggatgacattcttgaagaaagta

SEQ ID NO: 1071537 - DNA, 25 bp, Homo sapien
tacaaggcagcggtttagcagaaaa

SEQ ID NO: 1071538 - DNA, 25 bp, Homo sapien
tggggcaaaggtgagtagaccattt

SEQ ID NO: 1071539 - DNA, 25 bp, Homo sapien
ccaggcggctgcgaatacaggtatt

SEQ ID NO: 1071540 - DNA, 25 bp, Homo sapien
aaagtcataactgatctctctgagg

SEQ ID NO: 1071541 - DNA, 25 bp, Homo sapien
acttcaatcagagttacagaaagaa

SEQ ID NO: 1071542 - DNA, 25 bp, Homo sapien
tctgaggtctctcgtggaatgagct

SEQ ID NO: 1071543 - DNA, 25 bp, Homo sapien
ggtcaacagtatatttcccaaagac

SEQ ID NO: 1071544 - DNA, 25 bp, Homo sapien
ttcccaaagactgtatcaaatctcc

SEQ ID NO: 1071545 - DNA, 25 bp, Homo sapien
tggctggccgtcacatggtcaacag

SEQ ID NO: 1071546 - DNA, 25 bp, Homo sapien
aaagactgtatcaaatctcctccag

SEQ ID NO: 1071547 - DNA, 25 bp, Homo sapien
cctaggttgagtctgggccctatga

SEQ ID NO: 1071548 - DNA, 25 bp, Homo sapien
tcctaggttgagtctgggccctatg

SEQ ID NO: 1071549 - DNA, 25 bp, Homo sapien
ctaggttgagtctgggccctatgac

SEQ ID NO: 1071550 - DNA, 25 bp, Homo sapien
cattgatggagggactagggctccc

SEQ ID NO: 1071551 - DNA, 25 bp, Homo sapien
ctggcattgatggagggactagggc

SEQ ID NO: 1071552 - DNA, 25 bp, Homo sapien
gatggagggactagggctcccttct

SEQ ID NO: 1071553 - DNA, 25 bp, Homo sapien
tgatggagggactagggctcccttc

SEQ ID NO: 1071554 - DNA, 25 bp, Homo sapien
ctaatcttccctgtgtcatttcaat

SEQ ID NO: 1071555 - DNA, 25 bp, Homo sapien
catgctaatcttccctgtgtcattt

SEQ ID NO: 1071556 - DNA, 25 bp, Homo sapien
aaatacaaaatacttcacaaatttg

SEQ ID NO: 1071557 - DNA, 25 bp, Homo sapien
aatacaaaatacttcacaaatttgc

SEQ ID NO: 1071558 - DNA, 25 bp, Homo sapien
gttacacagtccgatttccagtggg

SEQ ID NO: 1071559 - DNA, 25 bp, Homo sapien
cttccaaggccatcgggcagcatca

SEQ ID NO: 1071560 - DNA, 25 bp, Homo sapien
ggtctacggggcttccaaggccatc

SEQ ID NO: 1071561 - DNA, 25 bp, Homo sapien
agcatcagtcttccgctgctaagcc

SEQ ID NO: 1071562 - DNA, 25 bp, Homo sapien
tctaattagagtgcctaaggagatt

SEQ ID NO: 1071563 - DNA, 25 bp, Homo sapien
gtctaagttagtctggtgtctggaa

SEQ ID NO: 1071564 - DNA, 25 bp, Homo sapien
ggagtatgactagactgcagatagt

SEQ ID NO: 1071565 - DNA, 25 bp, Homo sapien
catctatacaggagctcaaatgggc

SEQ ID NO: 1071566 - DNA, 25 bp, Homo sapien
taagtccctgagtggaatataagat

SEQ ID NO: 1071567 - DNA, 25 bp, Homo sapien
agagcagaggcagataagtccctga

SEQ ID NO: 1071568 - DNA, 25 bp, Homo sapien
tggaatataagatctcttacagaag

SEQ ID NO: 1071569 - DNA, 25 bp, Homo sapien
gatctcttacagaagtagtaataga

SEQ ID NO: 1071570 - DNA, 25 bp, Homo sapien
tgaacaaccaattacgccgccatca

SEQ ID NO: 1071571 - DNA, 25 bp, Homo sapien
cactaaggtgggctgtcactttaat

SEQ ID NO: 1071572 - DNA, 25 bp, Homo sapien
gccgccatcactaaggtgggctgtc

SEQ ID NO: 1071573 - DNA, 25 bp, Homo sapien
gagctgaacaaccaattacgccgcc

SEQ ID NO: 1071574 - DNA, 25 bp, Homo sapien
ccccagggctggtcgttggacaatc

SEQ ID NO: 1071575 - DNA, 25 bp, Homo sapien
tacgtggtctttagtaagttcagga

SEQ ID NO: 1071576 - DNA, 25 bp, Homo sapien
ttagtaagttcaggatgaccatggc

SEQ ID NO: 1071577 - DNA, 25 bp, Homo sapien
ggctttgctcgtccttgtctccata

SEQ ID NO: 1071578 - DNA, 25 bp, Homo sapien
tattctactttccaacaaaaggagc

SEQ ID NO: 1071579 - DNA, 25 bp, Homo sapien
aaatcccagtgactaggctgggcca

SEQ ID NO: 1071580 - DNA, 25 bp, Homo sapien
ctttccaacaaaaggagcctctgaa

SEQ ID NO: 1071581 - DNA, 25 bp, Homo sapien
aaaaatcccagtgactaggctgggc

SEQ ID NO: 1071582 - DNA, 25 bp, Homo sapien
tttacaaccagcaccgtctctaggg

SEQ ID NO: 1071583 - DNA, 25 bp, Homo sapien
cacacagtgatgactcaggcaggct

SEQ ID NO: 1071584 - DNA, 25 bp, Homo sapien
catttcagagtgcaaggacctcctg

SEQ ID NO: 1071585 - DNA, 25 bp, Homo sapien
gaaagagtagagctgccattcccac

SEQ ID NO: 1071586 - DNA, 25 bp, Homo sapien
aggagggagaacctgagtagccacc

SEQ ID NO: 1071587 - DNA, 25 bp, Homo sapien
agggcaaggagggagaacctgagta

SEQ ID NO: 1071588 - DNA, 25 bp, Homo sapien
caaggagggagaacctgagtagcca

SEQ ID NO: 1071589 - DNA, 25 bp, Homo sapien
ggagaacctgagtagccacccctcc

SEQ ID NO: 1071590 - DNA, 25 bp, Homo sapien
tttgtgccggccacatattgtgaaa

SEQ ID NO: 1071591 - DNA, 25 bp, Homo sapien
gtcttggaatacagcagggcatatg

SEQ ID NO: 1071592 - DNA, 25 bp, Homo sapien
gcagggcatatgctgggtcaccgta

SEQ ID NO: 1071593 - DNA, 25 bp, Homo sapien
catatgctgggtcaccgtagaggga

SEQ ID NO: 1071594 - DNA, 25 bp, Homo sapien
cccagaaatgaggtccaaataatgt

SEQ ID NO: 1071595 - DNA, 25 bp, Homo sapien
gccctggcattggaggttggaccca

SEQ ID NO: 1071596 - DNA, 25 bp, Homo sapien
caagtgaacaatcgggcagcaagga

SEQ ID NO: 1071597 - DNA, 25 bp, Homo sapien
catgccatgttgagggcaagtgaac

SEQ ID NO: 1071598 - DNA, 25 bp, Homo sapien
tggaccctgggccattgtccttcag

SEQ ID NO: 1071599 - DNA, 25 bp, Homo sapien
tgctgggaaattgggttagaaaatc

SEQ ID NO: 1071600 - DNA, 25 bp, Homo sapien
tgtgatagtggttcttgctgggaaa

SEQ ID NO: 1071601 - DNA, 25 bp, Homo sapien
gttagaaaatctttgatggctcctc

SEQ ID NO: 1071602 - DNA, 25 bp, Homo sapien
gttgtggcctgcatgccctcagagg

SEQ ID NO: 1071603 - DNA, 25 bp, Homo sapien
ttacgcactggagtatctgttccct

SEQ ID NO: 1071604 - DNA, 25 bp, Homo sapien
caccagcgtccagctgttgtggcct

SEQ ID NO: 1071605 - DNA, 25 bp, Homo sapien
atgccctcagaggttctacttgctt

SEQ ID NO: 1071606 - DNA, 25 bp, Homo sapien
ttgaaggcagaacgcaccggatgtt

SEQ ID NO: 1071607 - DNA, 25 bp, Homo sapien
ttttcaaaagcacgggttgctccag

SEQ ID NO: 1071608 - DNA, 25 bp, Homo sapien
gctgccgctgtgaaatgttcctcgt

SEQ ID NO: 1071609 - DNA, 25 bp, Homo sapien
taactggcagctatttttgaaggca

SEQ ID NO: 1071610 - DNA, 25 bp, Homo sapien
cgacagaactgcctgggctcagctc

SEQ ID NO: 1071611 - DNA, 25 bp, Homo sapien
ggcaaagaggcatttaaattgctaa

SEQ ID NO: 1071612 - DNA, 25 bp, Homo sapien
taatattgcactggggaacgacgac

SEQ ID NO: 1071613 - DNA, 25 bp, Homo sapien
ggaacgacgacagaactgcctgggc

SEQ ID NO: 1071614 - DNA, 25 bp, Homo sapien
tagctcgcagcaaatatgccatcca

SEQ ID NO: 1071615 - DNA, 25 bp, Homo sapien
ctagctcgcagcaaatatgccatcc

SEQ ID NO: 1071616 - DNA, 25 bp, Homo sapien
gctcgcagcaaatatgccatccata

SEQ ID NO: 1071617 - DNA, 25 bp, Homo sapien
agctcgcagcaaatatgccatccat

SEQ ID NO: 1071618 - DNA, 25 bp, Homo sapien
cacaatttaattaagtggctttaga

SEQ ID NO: 1071619 - DNA, 25 bp, Homo sapien
aatgaaagatttgtccgcagcagcg

SEQ ID NO: 1071620 - DNA, 25 bp, Homo sapien
tccggagttggcctaacaagctcct

SEQ ID NO: 1071621 - DNA, 25 bp, Homo sapien
tttagagtccggagttggcctaaca

SEQ ID NO: 1071622 - DNA, 25 bp, Homo sapien
gttgcacaggttaaactccagggct

SEQ ID NO: 1071623 - DNA, 25 bp, Homo sapien
caggatttcaacaccacccagatgt

SEQ ID NO: 1071624 - DNA, 25 bp, Homo sapien
ttcttaagagcaatgccccaggaac

SEQ ID NO: 1071625 - DNA, 25 bp, Homo sapien
gatcaccaggatacaatagcccact

SEQ ID NO: 1071626 - DNA, 25 bp, Homo sapien
gtagttccagtctgactccgaaggc

SEQ ID NO: 1071627 - DNA, 25 bp, Homo sapien
taagaaattggtttttgcaattatg

SEQ ID NO: 1071628 - DNA, 25 bp, Homo sapien
gaccctggaaagccgatggtgtagt

SEQ ID NO: 1071629 - DNA, 25 bp, Homo sapien
tttgcaattatgaggctgattccaa

SEQ ID NO: 1071630 - DNA, 25 bp, Homo sapien
catcagatcggtttgcatattcata

SEQ ID NO: 1071631 - DNA, 25 bp, Homo sapien
tcttctaaccacataaaacggagtg

SEQ ID NO: 1071632 - DNA, 25 bp, Homo sapien
gcagtaggagccaatcatgctaatt

SEQ ID NO: 1071633 - DNA, 25 bp, Homo sapien
taagtgggtcactttcaggactgta

SEQ ID NO: 1071634 - DNA, 25 bp, Homo sapien
cacatcaaagcggtagatcacgtga

SEQ ID NO: 1071635 - DNA, 25 bp, Homo sapien
tcaaaccacatcaaagcggtagatc

SEQ ID NO: 1071636 - DNA, 25 bp, Homo sapien
gtagatcacgtgagcccctgcgatg

SEQ ID NO: 1071637 - DNA, 25 bp, Homo sapien
cccctgcgatggcaccaggagatgg

SEQ ID NO: 1071638 - DNA, 25 bp, Homo sapien
cctgatgaattctctctgggtgact

SEQ ID NO: 1071639 - DNA, 25 bp, Homo sapien
ggctttcttgggaactgcacaaata

SEQ ID NO: 1071640 - DNA, 25 bp, Homo sapien
aaatatttggagtcgggtgtgtgcc

SEQ ID NO: 1071641 - DNA, 25 bp, Homo sapien
gcaggttgacgcgatcaggtactta

SEQ ID NO: 1071642 - DNA, 25 bp, Homo sapien
tctggttgaaagcacttgcgtgaga

SEQ ID NO: 1071643 - DNA, 25 bp, Homo sapien
gacagccaaatcgtaaatccaaaga

SEQ ID NO: 1071644 - DNA, 25 bp, Homo sapien
cacagatgattaatcaggagcgtcc

SEQ ID NO: 1071645 - DNA, 25 bp, Homo sapien
gcgtgagaacatgcaccttgcagta

SEQ ID NO: 1071646 - DNA, 25 bp, Homo sapien
gattctgccatccaacagatagtct

SEQ ID NO: 1071647 - DNA, 25 bp, Homo sapien
tagggttaggatcagcggctccaaa

SEQ ID NO: 1071648 - DNA, 25 bp, Homo sapien
gatagtctcacaggtagggttagga

SEQ ID NO: 1071649 - DNA, 25 bp, Homo sapien
aaaggaacacattgcatagtctgac

SEQ ID NO: 1071650 - DNA, 25 bp, Homo sapien
aaagcagcggtgtactctccaggtc

SEQ ID NO: 1071651 - DNA, 25 bp, Homo sapien
aaaaagcagcggtgtactctccagg

SEQ ID NO: 1071652 - DNA, 25 bp, Homo sapien
gggaaaaagcagcggtgtactctcc

SEQ ID NO: 1071653 - DNA, 25 bp, Homo sapien
gaaaaagcagcggtgtactctccag

SEQ ID NO: 1071654 - DNA, 25 bp, Homo sapien
gtgccctttgaaggcgcgcccagct

SEQ ID NO: 1071655 - DNA, 25 bp, Homo sapien
atgcgtgccctttgaaggcgcgccc

SEQ ID NO: 1071656 - DNA, 25 bp, Homo sapien
gcgtgccctttgaaggcgcgcccag

SEQ ID NO: 1071657 - DNA, 25 bp, Homo sapien
ctaatgcgtgccctttgaaggcgcg

SEQ ID NO: 1071658 - DNA, 25 bp, Homo sapien
tagtagagagctaagcaggatgcac

SEQ ID NO: 1071659 - DNA, 25 bp, Homo sapien
ccccacagggtgtagtagagagcta

SEQ ID NO: 1071660 - DNA, 25 bp, Homo sapien
caaatagcacagcttgtaaatgtgc

SEQ ID NO: 1071661 - DNA, 25 bp, Homo sapien
gcacacgctgtaatcaataatgcag

SEQ ID NO: 1071662 - DNA, 25 bp, Homo sapien
cagaggatcaaagtcactctctctg

SEQ ID NO: 1071663 - DNA, 25 bp, Homo sapien
ctgctacctgcaacaaatggtgttg

SEQ ID NO: 1071664 - DNA, 25 bp, Homo sapien
aaccacatagcaggggaattagcca

SEQ ID NO: 1071665 - DNA, 25 bp, Homo sapien
aacaaatggtgttgactcctgctca

SEQ ID NO: 1071666 - DNA, 25 bp, Homo sapien
tcagcgtcagggagataagtgatgt

SEQ ID NO: 1071667 - DNA, 25 bp, Homo sapien
gagagatgaggcgaccataagtctt

SEQ ID NO: 1071668 - DNA, 25 bp, Homo sapien
gagataagtgatgtagccagaccca

SEQ ID NO: 1071669 - DNA, 25 bp, Homo sapien
tgaggcgaccataagtcttgacagt

SEQ ID NO: 1071670 - DNA, 25 bp, Homo sapien
tttgtgaggcgggtaattgttctct

SEQ ID NO: 1071671 - DNA, 25 bp, Homo sapien
tgtcttttgtgaggcgggtaattgt

SEQ ID NO: 1071672 - DNA, 25 bp, Homo sapien
tctggggtgtcttttgtgaggcggg

SEQ ID NO: 1071673 - DNA, 25 bp, Homo sapien
tgaggcgggtaattgttctctgatg

SEQ ID NO: 1071674 - DNA, 25 bp, Homo sapien
agtttaactctaccaagtcacacag

SEQ ID NO: 1071675 - DNA, 25 bp, Homo sapien
taagggcttaacatgcctgaactca

SEQ ID NO: 1071676 - DNA, 25 bp, Homo sapien
taagtcctgatatgtaccaggtaca

SEQ ID NO: 1071677 - DNA, 25 bp, Homo sapien
gtcccacagaggaacacgttgtttg

SEQ ID NO: 1071678 - DNA, 25 bp, Homo sapien
ccccgaggctgctttaatcagagaa

SEQ ID NO: 1071679 - DNA, 25 bp, Homo sapien
gagagattagcatcagaggagtcga

SEQ ID NO: 1071680 - DNA, 25 bp, Homo sapien
ttagagggtatgatttatggagaga

SEQ ID NO: 1071681 - DNA, 25 bp, Homo sapien
ctctgggactgtcttaggacatcaa

SEQ ID NO: 1071682 - DNA, 25 bp, Homo sapien
gagcagcataaagcgaagctaaaaa

SEQ ID NO: 1071683 - DNA, 25 bp, Homo sapien
cagagcagcataaagcgaagctaaa

SEQ ID NO: 1071684 - DNA, 25 bp, Homo sapien
gacagagcagcataaagcgaagcta

SEQ ID NO: 1071685 - DNA, 25 bp, Homo sapien
agagacagagcagcataaagcgaag

SEQ ID NO: 1071686 - DNA, 25 bp, Homo sapien
tttcgtattcccagatcaattgccc

SEQ ID NO: 1071687 - DNA, 25 bp, Homo sapien
gcccgcgacgccactagattagttt

SEQ ID NO: 1071688 - DNA, 25 bp, Homo sapien
ccacttcattgagaaaagccctgca

SEQ ID NO: 1071689 - DNA, 25 bp, Homo sapien
tatttctgaggcgatcccacttcat

SEQ ID NO: 1071690 - DNA, 25 bp, Homo sapien
tagatgggagtagggtttgcacaaa

SEQ ID NO: 1071691 - DNA, 25 bp, Homo sapien
cagagcacacccttatagatgggag

SEQ ID NO: 1071692 - DNA, 25 bp, Homo sapien
aaagatatatagattaagactctgg

SEQ ID NO: 1071693 - DNA, 25 bp, Homo sapien
tctgggacagttatcaatgtggaac

SEQ ID NO: 1071694 - DNA, 25 bp, Homo sapien
ggcaaagtgaattagcgcgcagccg

SEQ ID NO: 1071695 - DNA, 25 bp, Homo sapien
caaagtgaattagcgcgcagccgag

SEQ ID NO: 1071696 - DNA, 25 bp, Homo sapien
tgaattagcgcgcagccgagggcgc

SEQ ID NO: 1071697 - DNA, 25 bp, Homo sapien
agtgaattagcgcgcagccgagggc

SEQ ID NO: 1071698 - DNA, 25 bp, Homo sapien
ccttgcttctgctgatctgtctttt

SEQ ID NO: 1071699 - DNA, 25 bp, Homo sapien
ttctgctgatctgtcttttgctcca

SEQ ID NO: 1071700 - DNA, 25 bp, Homo sapien
tgccttgcttctgctgatctgtctt

SEQ ID NO: 1071701 - DNA, 25 bp, Homo sapien
tgcttctgctgatctgtcttttgct

SEQ ID NO: 1071702 - DNA, 25 bp, Homo sapien
gggccatttaatatgcagctgagaa

SEQ ID NO: 1071703 - DNA, 25 bp, Homo sapien
gaatttagcaccttagcccagcagc

SEQ ID NO: 1071704 - DNA, 25 bp, Homo sapien
tctgtcttgcaaaaccaccgctctg

SEQ ID NO: 1071705 - DNA, 25 bp, Homo sapien
taggcttgtctctgtaagatccttg

SEQ ID NO: 1071706 - DNA, 25 bp, Homo sapien
tatgtgaaagggctgccaaatccag

SEQ ID NO: 1071707 - DNA, 25 bp, Homo sapien
cacgatctaaggtacaaaagcagcg

SEQ ID NO: 1071708 - DNA, 25 bp, Homo sapien
tcattgctgggagatctcaaaagtc

SEQ ID NO: 1071709 - DNA, 25 bp, Homo sapien
ttttatgagggcaaatgtcacgatc

SEQ ID NO: 1071710 - DNA, 25 bp, Homo sapien
caaaggccaccttatgagggtcggt

SEQ ID NO: 1071711 - DNA, 25 bp, Homo sapien
tgtagggtgcattctccagaagcag

SEQ ID NO: 1071712 - DNA, 25 bp, Homo sapien
tggtggctttgcaaatctccagaac

SEQ ID NO: 1071713 - DNA, 25 bp, Homo sapien
ctccagaactgccttgttgaaatag

SEQ ID NO: 1071714 - DNA, 25 bp, Homo sapien
gtttggttgttatggtcaggagaca

SEQ ID NO: 1071715 - DNA, 25 bp, Homo sapien
tacatggcctgggtttggttgttat

SEQ ID NO: 1071716 - DNA, 25 bp, Homo sapien
gttgttatggtcaggagacaaggcc

SEQ ID NO: 1071717 - DNA, 25 bp, Homo sapien
tatggtcaggagacaaggccacaaa

SEQ ID NO: 1071718 - DNA, 25 bp, Homo sapien
ggtctgcttcataaccattgatttg

SEQ ID NO: 1071719 - DNA, 25 bp, Homo sapien
gggtctgcttcataaccattgattt

SEQ ID NO: 1071720 - DNA, 25 bp, Homo sapien
cgggtctgcttcataaccattgatt

SEQ ID NO: 1071721 - DNA, 25 bp, Homo sapien
aaagtaattgccagtagaatgcagc

SEQ ID NO: 1071722 - DNA, 25 bp, Homo sapien
caaagtaattgccagtagaatgcag

SEQ ID NO: 1071723 - DNA, 25 bp, Homo sapien
ctggcaaagtaattgccagtagaat

SEQ ID NO: 1071724 - DNA, 25 bp, Homo sapien
ggcaaagtaattgccagtagaatgc

SEQ ID NO: 1071725 - DNA, 25 bp, Homo sapien
aggcctgagcgactcccaagaatcc

SEQ ID NO: 1071726 - DNA, 25 bp, Homo sapien
tgagctcctcgtaaccctgtatagg

SEQ ID NO: 1071727 - DNA, 25 bp, Homo sapien
taaccctgtataggcaggcctgagc

SEQ ID NO: 1071728 - DNA, 25 bp, Homo sapien
tgctgctgagctcctcgtaaccctg

SEQ ID NO: 1071729 - DNA, 25 bp, Homo sapien
tgccttccaattgccaactggtggg

SEQ ID NO: 1071730 - DNA, 25 bp, Homo sapien
ggtacagagatgaaacggtcatggt

SEQ ID NO: 1071731 - DNA, 25 bp, Homo sapien
atcattgcaatgaatgctgagcaat

SEQ ID NO: 1071732 - DNA, 25 bp, Homo sapien
agagatgaaacggtcatggtcccca

SEQ ID NO: 1071733 - DNA, 25 bp, Homo sapien
tcccaaaactcagaagaaggtatga

SEQ ID NO: 1071734 - DNA, 25 bp, Homo sapien
ggtatgaggaggtgcaacaaaaatg

SEQ ID NO: 1071735 - DNA, 25 bp, Homo sapien
gaaggtatgaggaggtgcaacaaaa

SEQ ID NO: 1071736 - DNA, 25 bp, Homo sapien
tctcccaaaactcagaagaaggtat

SEQ ID NO: 1071737 - DNA, 25 bp, Homo sapien
cataatactctcctcaccaaagaca

SEQ ID NO: 1071738 - DNA, 25 bp, Homo sapien
taagcaatattggatttcttcctca

SEQ ID NO: 1071739 - DNA, 25 bp, Homo sapien
catagatgattggagttttgagtag

SEQ ID NO: 1071740 - DNA, 25 bp, Homo sapien
ttgagtagataggtcactatgacca

SEQ ID NO: 1071741 - DNA, 25 bp, Homo sapien
tgcaggtagcagcacccttcgggtg

SEQ ID NO: 1071742 - DNA, 25 bp, Homo sapien
tagcagcacccttcgggtgatgtgg

SEQ ID NO: 1071743 - DNA, 25 bp, Homo sapien
acccttcgggtgatgtggctgggcc

SEQ ID NO: 1071744 - DNA, 25 bp, Homo sapien
ctgggagctatggtaagctgaggca

SEQ ID NO: 1071745 - DNA, 25 bp, Homo sapien
tgtcacctttcatatgatgctcagc

SEQ ID NO: 1071746 - DNA, 25 bp, Homo sapien
ttgtcacctttcatatgatgctcag

SEQ ID NO: 1071747 - DNA, 25 bp, Homo sapien
gtcacctttcatatgatgctcagct

SEQ ID NO: 1071748 - DNA, 25 bp, Homo sapien
gtcacatgtggaaaagcttctcgag

SEQ ID NO: 1071749 - DNA, 25 bp, Homo sapien
ggtagccacgtttgctcacattatc

SEQ ID NO: 1071750 - DNA, 25 bp, Homo sapien
tgacaggatttagaggggtagccac

SEQ ID NO: 1071751 - DNA, 25 bp, Homo sapien
ttctgttcccctgagtggttctgat

SEQ ID NO: 1071752 - DNA, 25 bp, Homo sapien
tacaacatccctcattccatttctg

SEQ ID NO: 1071753 - DNA, 25 bp, Homo sapien
tctgcccacagtgcccggaatagtg

SEQ ID NO: 1071754 - DNA, 25 bp, Homo sapien
aggagcctctacaacatccctcatt

SEQ ID NO: 1071755 - DNA, 25 bp, Homo sapien
ttgactgtaagcctcacaggagcct

SEQ ID NO: 1071756 - DNA, 25 bp, Homo sapien
tgtttgattcatctgagaggtccat

SEQ ID NO: 1071757 - DNA, 25 bp, Homo sapien
tgataatccacatctcttgggcacg

SEQ ID NO: 1071758 - DNA, 25 bp, Homo sapien
actctgaattgtcccgattgtttga

SEQ ID NO: 1071759 - DNA, 25 bp, Homo sapien
caaagcgttgtactcgaagcgtgac

SEQ ID NO: 1071760 - DNA, 25 bp, Homo sapien
gagcacagcgcggttaccgacttgc

SEQ ID NO: 1071761 - DNA, 25 bp, Homo sapien
ctggaaatgcaggccgcggcgctta

SEQ ID NO: 1071762 - DNA, 25 bp, Homo sapien
acattcacgaaacaccccagtcggt

SEQ ID NO: 1071763 - DNA, 25 bp, Homo sapien
cgcggttaccgacttgcaggtggca

SEQ ID NO: 1071764 - DNA, 25 bp, Homo sapien
gcccgcgccgcgctgagcagcagca

SEQ ID NO: 1071765 - DNA, 25 bp, Homo sapien
cagcagcagcatcgcggccaccagg

SEQ ID NO: 1071766 - DNA, 25 bp, Homo sapien
tgtcctcctccttggcccgcgccgc

SEQ ID NO: 1071767 - DNA, 25 bp, Homo sapien
gcagcagcatcgcggccaccaggga

SEQ ID NO: 1071768 - DNA, 25 bp, Homo sapien
aacacgccgacacaggggtaggttg

SEQ ID NO: 1071769 - DNA, 25 bp, Homo sapien
cttgaacacgccgacacaggggtag

SEQ ID NO: 1071770 - DNA, 25 bp, Homo sapien
cacgccgacacaggggtaggttgtc

SEQ ID NO: 1071771 - DNA, 25 bp, Homo sapien
cgacacaggggtaggttgtccccag

SEQ ID NO: 1071772 - DNA, 25 bp, Homo sapien
caatttgaatgtatgatttagtgtt

SEQ ID NO: 1071773 - DNA, 25 bp, Homo sapien
agctggttcttagctgcatcgccga

SEQ ID NO: 1071774 - DNA, 25 bp, Homo sapien
ctgcacagacgggtcgtgccacctg

SEQ ID NO: 1071775 - DNA, 25 bp, Homo sapien
agctgcatcgccgatcagacattcc

SEQ ID NO: 1071776 - DNA, 25 bp, Homo sapien
taggcttattgatgatcctcataac

SEQ ID NO: 1071777 - DNA, 25 bp, Homo sapien
gctgtaggcttattgatgatcctca

SEQ ID NO: 1071778 - DNA, 25 bp, Homo sapien
tgtaggcttattgatgatcctcata

SEQ ID NO: 1071779 - DNA, 25 bp, Homo sapien
ctgctgtaggcttattgatgatcct

SEQ ID NO: 1071780 - DNA, 25 bp, Homo sapien
tgtcaatggtgagaagagacacatc

SEQ ID NO: 1071781 - DNA, 25 bp, Homo sapien
ccatgacacgctggtcaaagtcttc

SEQ ID NO: 1071782 - DNA, 25 bp, Homo sapien
gaagtgttccatgacacgctggtca

SEQ ID NO: 1071783 - DNA, 25 bp, Homo sapien
gtacagtttgatgaagtgttccatg

SEQ ID NO: 1071784 - DNA, 25 bp, Homo sapien
tcatagtagactggaacagatccag

SEQ ID NO: 1071785 - DNA, 25 bp, Homo sapien
tagactggaacagatccagttgagc

SEQ ID NO: 1071786 - DNA, 25 bp, Homo sapien
aatttcaattactgcttgcttgatg

SEQ ID NO: 1071787 - DNA, 25 bp, Homo sapien
caatttcaattactgcttgcttgat

SEQ ID NO: 1071788 - DNA, 25 bp, Homo sapien
cttcttcaaatcagagtcttccaac

SEQ ID NO: 1071789 - DNA, 25 bp, Homo sapien
accaacaagaacagtttcatcaatg

SEQ ID NO: 1071790 - DNA, 25 bp, Homo sapien
ttcatcaatgtcagacttcttcaaa

SEQ ID NO: 1071791 - DNA, 25 bp, Homo sapien
gaatttgagtaaagccaccaacaag

SEQ ID NO: 1071792 - DNA, 25 bp, Homo sapien
tacagcttcatatgggcttatgccg

SEQ ID NO: 1071793 - DNA, 25 bp, Homo sapien
cttatgccgcgggatagttccttgc

SEQ ID NO: 1071794 - DNA, 25 bp, Homo sapien
tcatatgggcttatgccgcgggata

SEQ ID NO: 1071795 - DNA, 25 bp, Homo sapien
catatgctacagcttcatatgggct

SEQ ID NO: 1071796 - DNA, 25 bp, Homo sapien
catgacacctcccacagtttcaata

SEQ ID NO: 1071797 - DNA, 25 bp, Homo sapien
tcatgacacctcccacagtttcaat

SEQ ID NO: 1071798 - DNA, 25 bp, Homo sapien
atgacacctcccacagtttcaatac

SEQ ID NO: 1071799 - DNA, 25 bp, Homo sapien
cttcatagaccttgattgtaacggt

SEQ ID NO: 1071800 - DNA, 25 bp, Homo sapien
catagaccttgattgtaacggttga

SEQ ID NO: 1071801 - DNA, 25 bp, Homo sapien
ccttgattgtaacggttgattatca

SEQ ID NO: 1071802 - DNA, 25 bp, Homo sapien
gattgtaacggttgattatcaaaag

SEQ ID NO: 1071803 - DNA, 25 bp, Homo sapien
ggagcaggaggaattccagtcagat

SEQ ID NO: 1071804 - DNA, 25 bp, Homo sapien
ctgtgggaccccacaaggagcagga

SEQ ID NO: 1071805 - DNA, 25 bp, Homo sapien
ggaggaattccagtcagatcaaatg

SEQ ID NO: 1071806 - DNA, 25 bp, Homo sapien
cagtcagatcaaatgtacccagaag

SEQ ID NO: 1071807 - DNA, 25 bp, Homo sapien
aggcatagctttccaactcatttct

SEQ ID NO: 1071808 - DNA, 25 bp, Homo sapien
gcatagctttccaactcatttctag

SEQ ID NO: 1071809 - DNA, 25 bp, Homo sapien
taggcatagctttccaactcatttc

SEQ ID NO: 1071810 - DNA, 25 bp, Homo sapien
ggcatagctttccaactcatttcta

SEQ ID NO: 1071811 - DNA, 25 bp, Homo sapien
cctgacccgtccaaagacatgtgag

SEQ ID NO: 1071812 - DNA, 25 bp, Homo sapien
ttcttctcctgacccgtccaaagac

SEQ ID NO: 1071813 - DNA, 25 bp, Homo sapien
ttctcctgacccgtccaaagacatg

SEQ ID NO: 1071814 - DNA, 25 bp, Homo sapien
tcctgacccgtccaaagacatgtga

SEQ ID NO: 1071815 - DNA, 25 bp, Homo sapien
cctgaggaatctgctgctaatgctt

SEQ ID NO: 1071816 - DNA, 25 bp, Homo sapien
gttttacttgactggctcttgacca

SEQ ID NO: 1071817 - DNA, 25 bp, Homo sapien
ttgaccatacacttagctccttagg

SEQ ID NO: 1071818 - DNA, 25 bp, Homo sapien
gaatctgctgctaatgcttgtttta

SEQ ID NO: 1071819 - DNA, 25 bp, Homo sapien
tattatggggttcgagctgccgctg

SEQ ID NO: 1071820 - DNA, 25 bp, Homo sapien
ggtgtggtgaacacatggcctattt

SEQ ID NO: 1071821 - DNA, 25 bp, Homo sapien
cagccggagcgtgcatatattatgg

SEQ ID NO: 1071822 - DNA, 25 bp, Homo sapien
cattaatctcatacctgctttgcca

SEQ ID NO: 1071823 - DNA, 25 bp, Homo sapien
tctgtatgtgtggtcaggctggaca

SEQ ID NO: 1071824 - DNA, 25 bp, Homo sapien
gacaattgtgatggcaccctgcaca

SEQ ID NO: 1071825 - DNA, 25 bp, Homo sapien
cctgcacagcaagggtagagtcctt

SEQ ID NO: 1071826 - DNA, 25 bp, Homo sapien
agcactgccagctcaatattgccag

SEQ ID NO: 1071827 - DNA, 25 bp, Homo sapien
tacaggacattttgcggtaggaatg

SEQ ID NO: 1071828 - DNA, 25 bp, Homo sapien
cattttgcggtaggaatgtggtaag

SEQ ID NO: 1071829 - DNA, 25 bp, Homo sapien
cggtaggaatgtggtaagaggtcca

SEQ ID NO: 1071830 - DNA, 25 bp, Homo sapien
gcttctattgttacaggacattttg

SEQ ID NO: 1071831 - DNA, 25 bp, Homo sapien
agactagcagggggactatcggcaa

SEQ ID NO: 1071832 - DNA, 25 bp, Homo sapien
ggggactatcggcaaaggcctcttg

SEQ ID NO: 1071833 - DNA, 25 bp, Homo sapien
gcagggggactatcggcaaaggcct

SEQ ID NO: 1071834 - DNA, 25 bp, Homo sapien
actagcagggggactatcggcaaag

SEQ ID NO: 1071835 - DNA, 25 bp, Homo sapien
tccacttgcggggaatggctccttt

SEQ ID NO: 1071836 - DNA, 25 bp, Homo sapien
gctcctttgaaggtgcacggcagcc

SEQ ID NO: 1071837 - DNA, 25 bp, Homo sapien
tcctttgaaggtgcacggcagcctc

SEQ ID NO: 1071838 - DNA, 25 bp, Homo sapien
atggctcctttgaaggtgcacggca

SEQ ID NO: 1071839 - DNA, 25 bp, Homo sapien
cagcatcaagcttccagtgaatcac

SEQ ID NO: 1071840 - DNA, 25 bp, Homo sapien
gagttgtcgctctttgctgagatga

SEQ ID NO: 1071841 - DNA, 25 bp, Homo sapien
gagatgaaagggctcagcctgctac

SEQ ID NO: 1071842 - DNA, 25 bp, Homo sapien
gagaagccagacagcttccgggcta

SEQ ID NO: 1071843 - DNA, 25 bp, Homo sapien
tccaagtagatcctgagagttcatg

SEQ ID NO: 1071844 - DNA, 25 bp, Homo sapien
cctgagagttcatggctggcttgct

SEQ ID NO: 1071845 - DNA, 25 bp, Homo sapien
cagctccagctgattcatccaagta

SEQ ID NO: 1071846 - DNA, 25 bp, Homo sapien
gctgattcatccaagtagatcctga

SEQ ID NO: 1071847 - DNA, 25 bp, Homo sapien
aatctgtataatctctggggatcag

SEQ ID NO: 1071848 - DNA, 25 bp, Homo sapien
taagatcctcttgcataaatgtgaa

SEQ ID NO: 1071849 - DNA, 25 bp, Homo sapien
ctagattctcaagggattccttccg

SEQ ID NO: 1071850 - DNA, 25 bp, Homo sapien
tccttccgtaagatcctcttgcata

SEQ ID NO: 1071851 - DNA, 25 bp, Homo sapien
cgtctggattggtctcaggttatca

SEQ ID NO: 1071852 - DNA, 25 bp, Homo sapien
actgtcttaggtctgaggagcgtct

SEQ ID NO: 1071853 - DNA, 25 bp, Homo sapien
gatgaggcagtgaaggttagccact

SEQ ID NO: 1071854 - DNA, 25 bp, Homo sapien
gtgaaggttagccactgtcttaggt

SEQ ID NO: 1071855 - DNA, 25 bp, Homo sapien
cccgcatatgatgtccatcttttaa

SEQ ID NO: 1071856 - DNA, 25 bp, Homo sapien
tttcccgcatatgatgtccatcttt

SEQ ID NO: 1071857 - DNA, 25 bp, Homo sapien
tcagaatgttttcccgcatatgatg

SEQ ID NO: 1071858 - DNA, 25 bp, Homo sapien
ttcagaatgttttcccgcatatgat

SEQ ID NO: 1071859 - DNA, 25 bp, Homo sapien
cctgatgcctcagcgtaatttagag

SEQ ID NO: 1071860 - DNA, 25 bp, Homo sapien
tttcgtcccctgatgcctcagcgta

SEQ ID NO: 1071861 - DNA, 25 bp, Homo sapien
cagcgtaatttagaggactgtccat

SEQ ID NO: 1071862 - DNA, 25 bp, Homo sapien
tgcctcagcgtaatttagaggactg

SEQ ID NO: 1071863 - DNA, 25 bp, Homo sapien
ggagtgtgaccggaatgaagggttg

SEQ ID NO: 1071864 - DNA, 25 bp, Homo sapien
gtgtgaccggaatgaagggttgctc

SEQ ID NO: 1071865 - DNA, 25 bp, Homo sapien
tgaccggaatgaagggttgctctgt

SEQ ID NO: 1071866 - DNA, 25 bp, Homo sapien
gctctgtctgtctccgaggtggcat

SEQ ID NO: 1071867 - DNA, 25 bp, Homo sapien
cgcttccggaagcttgcgcgcgtgt

SEQ ID NO: 1071868 - DNA, 25 bp, Homo sapien
agaccccttgcggtggctgcgcttc

SEQ ID NO: 1071869 - DNA, 25 bp, Homo sapien
tcaataattaatgagcaggatcctg

SEQ ID NO: 1071870 - DNA, 25 bp, Homo sapien
gcgcgcgtgtgcacactcacgtgtg

SEQ ID NO: 1071871 - DNA, 25 bp, Homo sapien
taggcagatactcccattgtctccc

SEQ ID NO: 1071872 - DNA, 25 bp, Homo sapien
gtcccaacgagtattcagctcctat

SEQ ID NO: 1071873 - DNA, 25 bp, Homo sapien
tggtagtcccgatgtctgcccagct

SEQ ID NO: 1071874 - DNA, 25 bp, Homo sapien
tattcagctcctatcagagaggaga

SEQ ID NO: 1071875 - DNA, 25 bp, Homo sapien
ccggacgccgccgaggcctgcccct

SEQ ID NO: 1071876 - DNA, 25 bp, Homo sapien
tcgcccccagcccggacgccgccga

SEQ ID NO: 1071877 - DNA, 25 bp, Homo sapien
ggacgccgccgaggcctgcccctga

SEQ ID NO: 1071878 - DNA, 25 bp, Homo sapien
ccagcccggacgccgccgaggcctg

SEQ ID NO: 1071879 - DNA, 25 bp, Homo sapien
cttcggagatgctaatgcggcgccc

SEQ ID NO: 1071880 - DNA, 25 bp, Homo sapien
gcggtcatggcgctgtgcctcatta

SEQ ID NO: 1071881 - DNA, 25 bp, Homo sapien
tgcctcattattaccgccggtggcc

SEQ ID NO: 1071882 - DNA, 25 bp, Homo sapien
aggaaggcttcggagatgctaatgc

SEQ ID NO: 1071883 - DNA, 25 bp, Homo sapien
gcggtccgggatgtgccgagcattc

SEQ ID NO: 1071884 - DNA, 25 bp, Homo sapien
ccgggatgtgccgagcattcgggct

SEQ ID NO: 1071885 - DNA, 25 bp, Homo sapien
ggatgtgccgagcattcgggctgga

SEQ ID NO: 1071886 - DNA, 25 bp, Homo sapien
gtgccgagcattcgggctggaaaat

SEQ ID NO: 1071887 - DNA, 25 bp, Homo sapien
gcattgttgcgaagggctggcaggt

SEQ ID NO: 1071888 - DNA, 25 bp, Homo sapien
gctcagaggagaagtgcaagccaga

SEQ ID NO: 1071889 - DNA, 25 bp, Homo sapien
tgcaagccagagatgtgttccagag

SEQ ID NO: 1071890 - DNA, 25 bp, Homo sapien
acccaggaggaatgtggatggcatt

SEQ ID NO: 1071891 - DNA, 25 bp, Homo sapien
tagccaagcagtttgcagcgtgttc

SEQ ID NO: 1071892 - DNA, 25 bp, Homo sapien
tggaaaaacttgtgtcggcggcgtc

SEQ ID NO: 1071893 - DNA, 25 bp, Homo sapien
tctgggcgaacaagccgcctctgaa

SEQ ID NO: 1071894 - DNA, 25 bp, Homo sapien
tctgaagccgctggagaagtacccc

SEQ ID NO: 1071895 - DNA, 25 bp, Homo sapien
tgtcaactcggcttaggccccagtg

SEQ ID NO: 1071896 - DNA, 25 bp, Homo sapien
agcacacttccacgagagaggcggt

SEQ ID NO: 1071897 - DNA, 25 bp, Homo sapien
catagggcggcagaataccttttcg

SEQ ID NO: 1071898 - DNA, 25 bp, Homo sapien
cattaactgtgccttgtactgggag

SEQ ID NO: 1071899 - DNA, 25 bp, Homo sapien
aggcctccgcgggacgcctgaattt

SEQ ID NO: 1071900 - DNA, 25 bp, Homo sapien
aaaatcagcttgctggtagaggtag

SEQ ID NO: 1071901 - DNA, 25 bp, Homo sapien
gtagaggtaggaaccttgatcatcc

SEQ ID NO: 1071902 - DNA, 25 bp, Homo sapien
tgatggaggcccaccaaatgcaaaa

SEQ ID NO: 1071903 - DNA, 25 bp, Homo sapien
ccttaccagggaatgttgccatcaa

SEQ ID NO: 1071904 - DNA, 25 bp, Homo sapien
gaagacacatagtctgcagcaagac

SEQ ID NO: 1071905 - DNA, 25 bp, Homo sapien
tattttggacctggagataacacca

SEQ ID NO: 1071906 - DNA, 25 bp, Homo sapien
catttgcttgctaactcggaagaca

SEQ ID NO: 1071907 - DNA, 25 bp, Homo sapien
tctgaaagcgctgacacacaatggc

SEQ ID NO: 1071908 - DNA, 25 bp, Homo sapien
tcaactggtggtgtacaactgaagc

SEQ ID NO: 1071909 - DNA, 25 bp, Homo sapien
ttcactccagggtcggatgccacgt

SEQ ID NO: 1071910 - DNA, 25 bp, Homo sapien
gatgccacgtgctacaggacatggg

SEQ ID NO: 1071911 - DNA, 25 bp, Homo sapien
caataaatatcggttgggcaagtac

SEQ ID NO: 1071912 - DNA, 25 bp, Homo sapien
caagtacagttgcaggatgaggaca

SEQ ID NO: 1071913 - DNA, 25 bp, Homo sapien
tacggcgcggccgattcgtttccaa

SEQ ID NO: 1071914 - DNA, 25 bp, Homo sapien
gcggcaagtcctccatccagaaggt

SEQ ID NO: 1071915 - DNA, 25 bp, Homo sapien
ccgatttggtacacactagctgcaa

SEQ ID NO: 1071916 - DNA, 25 bp, Homo sapien
ctctccgatttggtacacactagct

SEQ ID NO: 1071917 - DNA, 25 bp, Homo sapien
ccaatagaggatttgaatatataag

SEQ ID NO: 1071918 - DNA, 25 bp, Homo sapien
taaagagtgaccaatagaggatttg

SEQ ID NO: 1071919 - DNA, 25 bp, Homo sapien
ggtagtgccaaatctgtaagtgaca

SEQ ID NO: 1071920 - DNA, 25 bp, Homo sapien
catttaggcactaggattgctgaca

SEQ ID NO: 1071921 - DNA, 25 bp, Homo sapien
acgtggaatacccaaactgctgggc

SEQ ID NO: 1071922 - DNA, 25 bp, Homo sapien
ggattacatacagaccagatggtgg

SEQ ID NO: 1071923 - DNA, 25 bp, Homo sapien
ggtttaactagcaaaagccttggca

SEQ ID NO: 1071924 - DNA, 25 bp, Homo sapien
tctccctgttgttagagaacctatc

SEQ ID NO: 1071925 - DNA, 25 bp, Homo sapien
cagaagatcattcccttgcatagat

SEQ ID NO: 1071926 - DNA, 25 bp, Homo sapien
tgagtgcctcctacatgggcagcag

SEQ ID NO: 1071927 - DNA, 25 bp, Homo sapien
caagatgcttttgtacgggttccca

SEQ ID NO: 1071928 - DNA, 25 bp, Homo sapien
tctgggttcacacacaagctgagat

SEQ ID NO: 1071929 - DNA, 25 bp, Homo sapien
tcaggatatgaacacaggtacagtc

SEQ ID NO: 1071930 - DNA, 25 bp, Homo sapien
tagtgggtcctagttgcacactggc

SEQ ID NO: 1071931 - DNA, 25 bp, Homo sapien
tatcaagtatttgaacagtgcagtc

SEQ ID NO: 1071932 - DNA, 25 bp, Homo sapien
agcgtgctgaataggattcttctca

SEQ ID NO: 1071933 - DNA, 25 bp, Homo sapien
ctgtctttgccccatagcttgctca

SEQ ID NO: 1071934 - DNA, 25 bp, Homo sapien
cacctcaggaggagaagcgtgctga

SEQ ID NO: 1071935 - DNA, 25 bp, Homo sapien
aattagtcaactcttaagtctttca

SEQ ID NO: 1071936 - DNA, 25 bp, Homo sapien
tgactcaaacgttcctcctggcctg

SEQ ID NO: 1071937 - DNA, 25 bp, Homo sapien
ccacattcttaatcacataatgtat

SEQ ID NO: 1071938 - DNA, 25 bp, Homo sapien
caaactcatgactcaaacgttcctc

SEQ ID NO: 1071939 - DNA, 25 bp, Homo sapien
aatttgttccatagatgaagagcaa

SEQ ID NO: 1071940 - DNA, 25 bp, Homo sapien
gcaaggcagtgctcatatgagtgat

SEQ ID NO: 1071941 - DNA, 25 bp, Homo sapien
ttgagcatgttgactactggtaaag

SEQ ID NO: 1071942 - DNA, 25 bp, Homo sapien
tcagagcttcttccggtaattacca

SEQ ID NO: 1071943 - DNA, 25 bp, Homo sapien
atttttacagcttatttccaagatg

SEQ ID NO: 1071944 - DNA, 25 bp, Homo sapien
tttttacagcttatttccaagatga

SEQ ID NO: 1071945 - DNA, 25 bp, Homo sapien
gcttaaagagctcgagggcatatca

SEQ ID NO: 1071946 - DNA, 25 bp, Homo sapien
tggacacgctgaccaagggtgagcc

SEQ ID NO: 1071947 - DNA, 25 bp, Homo sapien
cagtggacatgtttgccaaggacct

SEQ ID NO: 1071948 - DNA, 25 bp, Homo sapien
tccgcaccgggagtgaaactcttgc

SEQ ID NO: 1071949 - DNA, 25 bp, Homo sapien
actatggcccattacaaagtgaggg

SEQ ID NO: 1071950 - DNA, 25 bp, Homo sapien
aagaggtgcggctccgacagccaga

SEQ ID NO: 1071951 - DNA, 25 bp, Homo sapien
gcagagcgtcctggtcgccatgaaa

SEQ ID NO: 1071952 - DNA, 25 bp, Homo sapien
atcccggccggtggtttgcaagtgc

SEQ ID NO: 1071953 - DNA, 25 bp, Homo sapien
tatgggtcaccacagtttccgaggt

SEQ ID NO: 1071954 - DNA, 25 bp, Homo sapien
tgcccctggaacacaatcacgtaag

SEQ ID NO: 1071955 - DNA, 25 bp, Homo sapien
gcaatagtctcaatgctcccgggcc

SEQ ID NO: 1071956 - DNA, 25 bp, Homo sapien
cattgcccggattggactcgactct

SEQ ID NO: 1071957 - DNA, 25 bp, Homo sapien
gcttgttctgggtgtagcagctgaa

SEQ ID NO: 1071958 - DNA, 25 bp, Homo sapien
ttggaaagatctggctcaccatcct

SEQ ID NO: 1071959 - DNA, 25 bp, Homo sapien
tgtctggaatgatgagcagtctggc

SEQ ID NO: 1071960 - DNA, 25 bp, Homo sapien
ggagatactctggaggaagttcaca

SEQ ID NO: 1071961 - DNA, 25 bp, Homo sapien
ggatgtagtcgattatttaaccagt

SEQ ID NO: 1071962 - DNA, 25 bp, Homo sapien
tctactggttgcatagtatcacacc

SEQ ID NO: 1071963 - DNA, 25 bp, Homo sapien
tactatgtgttgtcctttatgaaaa

SEQ ID NO: 1071964 - DNA, 25 bp, Homo sapien
caacatccagagctaatcaccgtta

SEQ ID NO: 1071965 - DNA, 25 bp, Homo sapien
tcccctataggtccaacaatgctgt

SEQ ID NO: 1071966 - DNA, 25 bp, Homo sapien
gtacaggaacaaacatctatgcggg

SEQ ID NO: 1071967 - DNA, 25 bp, Homo sapien
cactgaagggtatcataggagtaca

SEQ ID NO: 1071968 - DNA, 25 bp, Homo sapien
tgataccgtgtctaagatcccaagg

SEQ ID NO: 1071969 - DNA, 25 bp, Homo sapien
gaatacttcatactgtccaagtgaa

SEQ ID NO: 1071970 - DNA, 25 bp, Homo sapien
ttctggctagcaaaattgtgtcatt

SEQ ID NO: 1071971 - DNA, 25 bp, Homo sapien
catttaaaaactcggctgtgacact

SEQ ID NO: 1071972 - DNA, 25 bp, Homo sapien
gaggtttcatttgtccatagatagc

SEQ ID NO: 1071973 - DNA, 25 bp, Homo sapien
tactgaggacagacactttttcttg

SEQ ID NO: 1071974 - DNA, 25 bp, Homo sapien
taatgaaaatgctatctcctcctcc

SEQ ID NO: 1071975 - DNA, 25 bp, Homo sapien
cctcctcctcagagtagcaaggact

SEQ ID NO: 1071976 - DNA, 25 bp, Homo sapien
gaccttgaaaggaatagaccaagta

SEQ ID NO: 1071977 - DNA, 25 bp, Homo sapien
taatctccctcaaggtagtacctgg

SEQ ID NO: 1071978 - DNA, 25 bp, Homo sapien
tcaagtgagacagcaaatcctattc

SEQ ID NO: 1071979 - DNA, 25 bp, Homo sapien
gaatcattgctctaagttgctctgg

SEQ ID NO: 1071980 - DNA, 25 bp, Homo sapien
tagtacctgggcaatcagataactc

SEQ ID NO: 1071981 - DNA, 25 bp, Homo sapien
agttcattaattcaaccagtctgtt

SEQ ID NO: 1071982 - DNA, 25 bp, Homo sapien
cccacatccctaggtgcccagtgtt

SEQ ID NO: 1071983 - DNA, 25 bp, Homo sapien
tggggcaaaacacattggttcattt

SEQ ID NO: 1071984 - DNA, 25 bp, Homo sapien
tttctaagggaaacctggctgtggc

SEQ ID NO: 1071985 - DNA, 25 bp, Homo sapien
tctcaaacttccgaccttaatgatc

SEQ ID NO: 1071986 - DNA, 25 bp, Homo sapien
actgcactcggcccagggggttctt

SEQ ID NO: 1071987 - DNA, 25 bp, Homo sapien
cggcccagggggttcttgtgtctca

SEQ ID NO: 1071988 - DNA, 25 bp, Homo sapien
acttccgaccttaatgatccacctg

SEQ ID NO: 1071989 - DNA, 25 bp, Homo sapien
cagccaactgtaagttttttgtagg

SEQ ID NO: 1071990 - DNA, 25 bp, Homo sapien
catgcccagccaactgtaagttttt

SEQ ID NO: 1071991 - DNA, 25 bp, Homo sapien
tgcccagccaactgtaagttttttg

SEQ ID NO: 1071992 - DNA, 25 bp, Homo sapien
ggcctcaagtaattcatttgcctca

SEQ ID NO: 1071993 - DNA, 25 bp, Homo sapien
tataaatattttcacccagtctgta

SEQ ID NO: 1071994 - DNA, 25 bp, Homo sapien
cactgaaccttaggtcctgaggatt

SEQ ID NO: 1071995 - DNA, 25 bp, Homo sapien
tattctagatgctagcccttagctg

SEQ ID NO: 1071996 - DNA, 25 bp, Homo sapien
ccaaggtctttcagagaacatgaat

SEQ ID NO: 1071997 - DNA, 25 bp, Homo sapien
cagtatggtgggaaatcggctttac

SEQ ID NO: 1071998 - DNA, 25 bp, Homo sapien
tgccattcaagtccaaaggtagagt

SEQ ID NO: 1071999 - DNA, 25 bp, Homo sapien
cataccctcacaaaaacacctagga

SEQ ID NO: 1072000 - DNA, 25 bp, Homo sapien
tcctaacagaggacaatcttttctc

SEQ ID NO: 1072001 - DNA, 25 bp, Homo sapien
ttgtctcaaaatggatgctgcccga

SEQ ID NO: 1072002 - DNA, 25 bp, Homo sapien
gaggacccaggacaatggctgctgt

SEQ ID NO: 1072003 - DNA, 25 bp, Homo sapien
cccgaggaacatacttggagagagc

SEQ ID NO: 1072004 - DNA, 25 bp, Homo sapien
tggaaagcagtcgttgcgccagaca

SEQ ID NO: 1072005 - DNA, 25 bp, Homo sapien
tgtgaactgtccctaattgaactta

SEQ ID NO: 1072006 - DNA, 25 bp, Homo sapien
gaactgttgaaatcccaagataagg

SEQ ID NO: 1072007 - DNA, 25 bp, Homo sapien
taacatgcagtgtgaaaacaggcgc

SEQ ID NO: 1072008 - DNA, 25 bp, Homo sapien
tgatctgattcccagtaacatgcag

SEQ ID NO: 1072009 - DNA, 25 bp, Homo sapien
gctgcctagggacatgcaaaagtga

SEQ ID NO: 1072010 - DNA, 25 bp, Homo sapien
tgctggatgccatgctgaccccagt

SEQ ID NO: 1072011 - DNA, 25 bp, Homo sapien
cacagagccagataggtgaggacag

SEQ ID NO: 1072012 - DNA, 25 bp, Homo sapien
tgttgtcaaagaatccactggaagt

SEQ ID NO: 1072013 - DNA, 25 bp, Homo sapien
gtcatctttgtgtagagaccatgtt

SEQ ID NO: 1072014 - DNA, 25 bp, Homo sapien
tttgtgtagagaccatgttaatctt

SEQ ID NO: 1072015 - DNA, 25 bp, Homo sapien
catctttgtgtagagaccatgttaa

SEQ ID NO: 1072016 - DNA, 25 bp, Homo sapien
attggtccggtttttagtatatgtg

SEQ ID NO: 1072017 - DNA, 25 bp, Homo sapien
tttaactctaatcccatcacagttg

SEQ ID NO: 1072018 - DNA, 25 bp, Homo sapien
cacttggtgcgtagaaatcacaggg

SEQ ID NO: 1072019 - DNA, 25 bp, Homo sapien
gagtacctttctataacacttggtg

SEQ ID NO: 1072020 - DNA, 25 bp, Homo sapien
cagttgaaggagtacctttctataa

SEQ ID NO: 1072021 - DNA, 25 bp, Homo sapien
ctaagggcgataacctgcttcctgc

SEQ ID NO: 1072022 - DNA, 25 bp, Homo sapien
tgacctctttgctggatgcaactaa

SEQ ID NO: 1072023 - DNA, 25 bp, Homo sapien
tctgaacttctactcttttgacctc

SEQ ID NO: 1072024 - DNA, 25 bp, Homo sapien
gctggatgcaactaagggcgataac

SEQ ID NO: 1072025 - DNA, 25 bp, Homo sapien
cttgacggttatgggtgtagggaca

SEQ ID NO: 1072026 - DNA, 25 bp, Homo sapien
tcttgacggttatgggtgtagggac

SEQ ID NO: 1072027 - DNA, 25 bp, Homo sapien
cgtcttgacggttatgggtgtaggg

SEQ ID NO: 1072028 - DNA, 25 bp, Homo sapien
gtcgtcttgacggttatgggtgtag

SEQ ID NO: 1072029 - DNA, 25 bp, Homo sapien
ctgccagtcccagagatgagagaca

SEQ ID NO: 1072030 - DNA, 25 bp, Homo sapien
gatgagagacaggaagcctttcttc

SEQ ID NO: 1072031 - DNA, 25 bp, Homo sapien
agagatgagagacaggaagcctttc

SEQ ID NO: 1072032 - DNA, 25 bp, Homo sapien
tgagagacaggaagcctttcttctc

SEQ ID NO: 1072033 - DNA, 25 bp, Homo sapien
tgagtgttgacaacaggtaccacag

SEQ ID NO: 1072034 - DNA, 25 bp, Homo sapien
aatctgagtgttgacaacaggtacc

SEQ ID NO: 1072035 - DNA, 25 bp, Homo sapien
cagaatctgagtgttgacaacaggt

SEQ ID NO: 1072036 - DNA, 25 bp, Homo sapien
ttacagaatctgagtgttgacaaca

SEQ ID NO: 1072037 - DNA, 25 bp, Homo sapien
cttttcatctcgaactgaaaatgca

SEQ ID NO: 1072038 - DNA, 25 bp, Homo sapien
ccttttcatctcgaactgaaaatgc

SEQ ID NO: 1072039 - DNA, 25 bp, Homo sapien
ttttcatctcgaactgaaaatgcag

SEQ ID NO: 1072040 - DNA, 25 bp, Homo sapien
taccttttcatctcgaactgaaaat

SEQ ID NO: 1072041 - DNA, 25 bp, Homo sapien
gtaagtgcggcccaagaggctcctc

SEQ ID NO: 1072042 - DNA, 25 bp, Homo sapien
gccgggctcgccagccaagccggct

SEQ ID NO: 1072043 - DNA, 25 bp, Homo sapien
aagccggctccaatggcgcctccag

SEQ ID NO: 1072044 - DNA, 25 bp, Homo sapien
gtcacgggcgcacaccatcgcccgg

SEQ ID NO: 1072045 - DNA, 25 bp, Homo sapien
atgggccgcttcagcgtcgccccgc

SEQ ID NO: 1072046 - DNA, 25 bp, Homo sapien
gcctcgaactccatgggccgcttca

SEQ ID NO: 1072047 - DNA, 25 bp, Homo sapien
gccgcctcgaactccatgggccgct

SEQ ID NO: 1072048 - DNA, 25 bp, Homo sapien
aactccatgggccgcttcagcgtcg

SEQ ID NO: 1072049 - DNA, 25 bp, Homo sapien
cgggcagaggggcgcagcgccgccg

SEQ ID NO: 1072050 - DNA, 25 bp, Homo sapien
gaggggcgcagcgccgccgcttcgg

SEQ ID NO: 1072051 - DNA, 25 bp, Homo sapien
gcagaggggcgcagcgccgccgctt

SEQ ID NO: 1072052 - DNA, 25 bp, Homo sapien
ggcagaggggcgcagcgccgccgct

SEQ ID NO: 1072053 - DNA, 25 bp, Homo sapien
cggcggctcggcgtccgggggcctg

SEQ ID NO: 1072054 - DNA, 25 bp, Homo sapien
gcggctcggcgtccgggggcctgag

SEQ ID NO: 1072055 - DNA, 25 bp, Homo sapien
ggctcggcgtccgggggcctgaggc

SEQ ID NO: 1072056 - DNA, 25 bp, Homo sapien
gctcggcgtccgggggcctgaggcc

SEQ ID NO: 1072057 - DNA, 25 bp, Homo sapien
ccggagttggaaggcgccgctcgct

SEQ ID NO: 1072058 - DNA, 25 bp, Homo sapien
cggagttggaaggcgccgctcgctg

SEQ ID NO: 1072059 - DNA, 25 bp, Homo sapien
gagttggaaggcgccgctcgctgcc

SEQ ID NO: 1072060 - DNA, 25 bp, Homo sapien
gttggaaggcgccgctcgctgccgg

SEQ ID NO: 1072061 - DNA, 25 bp, Homo sapien
catatatggtacgaggcaatagcca

SEQ ID NO: 1072062 - DNA, 25 bp, Homo sapien
tggaaatcatgtctccctacagggc

SEQ ID NO: 1072063 - DNA, 25 bp, Homo sapien
tataataaaagaacgtggccagtcc

SEQ ID NO: 1072064 - DNA, 25 bp, Homo sapien
gattccgtgactcttgcggcggcct

SEQ ID NO: 1072065 - DNA, 25 bp, Homo sapien
aactgacatgaattcaagtggttcc

SEQ ID NO: 1072066 - DNA, 25 bp, Homo sapien
aacattaaatacctacctgataagg

SEQ ID NO: 1072067 - DNA, 25 bp, Homo sapien
gtcataacaagtgacagtacagtcc

SEQ ID NO: 1072068 - DNA, 25 bp, Homo sapien
taaccttgagaagttattcaggatc

SEQ ID NO: 1072069 - DNA, 25 bp, Homo sapien
gactttccgaagcacaagcttcact

SEQ ID NO: 1072070 - DNA, 25 bp, Homo sapien
aggagtgaggttgactttccgaagc

SEQ ID NO: 1072071 - DNA, 25 bp, Homo sapien
ctgataacgactatattcttgtttt

SEQ ID NO: 1072072 - DNA, 25 bp, Homo sapien
caacttctaaatgtctccacctctg

SEQ ID NO: 1072073 - DNA, 25 bp, Homo sapien
gccaacttgtcggagggtaaatgtg

SEQ ID NO: 1072074 - DNA, 25 bp, Homo sapien
taagaggcgctcacatattatgcca

SEQ ID NO: 1072075 - DNA, 25 bp, Homo sapien
tgctcatactcctcccgaattttat

SEQ ID NO: 1072076 - DNA, 25 bp, Homo sapien
ggtaaatgtgggctggtccttcttc

SEQ ID NO: 1072077 - DNA, 25 bp, Homo sapien
catgggacatgaatctttgaaactc

SEQ ID NO: 1072078 - DNA, 25 bp, Homo sapien
caaacagttccacagaagtaccacc

SEQ ID NO: 1072079 - DNA, 25 bp, Homo sapien
gctcactaccatagccaggaaattt

SEQ ID NO: 1072080 - DNA, 25 bp, Homo sapien
ttagaacccagagccaaatccttgg

SEQ ID NO: 1072081 - DNA, 25 bp, Homo sapien
ataatctgatcatgtgtgaatttca

SEQ ID NO: 1072082 - DNA, 25 bp, Homo sapien
cgcataatctgatcatgtgtgaatt

SEQ ID NO: 1072083 - DNA, 25 bp, Homo sapien
cgtcgcataatctgatcatgtgtga

SEQ ID NO: 1072084 - DNA, 25 bp, Homo sapien
gtcgcataatctgatcatgtgtgaa

SEQ ID NO: 1072085 - DNA, 25 bp, Homo sapien
ctggtacccagatatgtgacaaagc

SEQ ID NO: 1072086 - DNA, 25 bp, Homo sapien
tggtacccagatatgtgacaaagct

SEQ ID NO: 1072087 - DNA, 25 bp, Homo sapien
aacgtttaagtgttctcaggatgca

SEQ ID NO: 1072088 - DNA, 25 bp, Homo sapien
gaacagcctatatgcgacttcgggc

SEQ ID NO: 1072089 - DNA, 25 bp, Homo sapien
gatataggaccgcagaccttcgctt

SEQ ID NO: 1072090 - DNA, 25 bp, Homo sapien
cctttagaggttcagtgtccaggga

SEQ ID NO: 1072091 - DNA, 25 bp, Homo sapien
tgaggtgagcgctgactccatgtga

SEQ ID NO: 1072092 - DNA, 25 bp, Homo sapien
tagcagctctcacataagttatttg

SEQ ID NO: 1072093 - DNA, 25 bp, Homo sapien
aatggttatagcagctctcacataa

SEQ ID NO: 1072094 - DNA, 25 bp, Homo sapien
ttaaaggtccataaattttcaatgc

SEQ ID NO: 1072095 - DNA, 25 bp, Homo sapien
tcaatgcaatgttgaactggggaaa

SEQ ID NO: 1072096 - DNA, 25 bp, Homo sapien
tcttcccctttggaagatcttaaca

SEQ ID NO: 1072097 - DNA, 25 bp, Homo sapien
cacccgctggcttaaattcttgtac

SEQ ID NO: 1072098 - DNA, 25 bp, Homo sapien
aggcgtgcgccacccgctggcttaa

SEQ ID NO: 1072099 - DNA, 25 bp, Homo sapien
tgtactctctgatggtcttcccctt

SEQ ID NO: 1072100 - DNA, 25 bp, Homo sapien
tacaggtaagcaagccatgtttcag

SEQ ID NO: 1072101 - DNA, 25 bp, Homo sapien
tagtctatgccctaagctgtgctaa

SEQ ID NO: 1072102 - DNA, 25 bp, Homo sapien
gctgagaatcactacttgggacaca

SEQ ID NO: 1072103 - DNA, 25 bp, Homo sapien
gtaatctggcaaggctgacataacc

SEQ ID NO: 1072104 - DNA, 25 bp, Homo sapien
agaacgactagctagcgacgcggac

SEQ ID NO: 1072105 - DNA, 25 bp, Homo sapien
gccgcttcagaacgactagctagcg

SEQ ID NO: 1072106 - DNA, 25 bp, Homo sapien
ttcagaacgactagctagcgacgcg

SEQ ID NO: 1072107 - DNA, 25 bp, Homo sapien
tctggccgccgcttcagaacgacta

SEQ ID NO: 1072108 - DNA, 25 bp, Homo sapien
acacacactcggaattgcgaataca

SEQ ID NO: 1072109 - DNA, 25 bp, Homo sapien
ttactgagtagttacgttccaggca

SEQ ID NO: 1072110 - DNA, 25 bp, Homo sapien
gagacacacactcggaattgcgaat

SEQ ID NO: 1072111 - DNA, 25 bp, Homo sapien
gctccaacgtaagcaccagagacac

SEQ ID NO: 1072112 - DNA, 25 bp, Homo sapien
gcccgagtataaccgattccatgtg

SEQ ID NO: 1072113 - DNA, 25 bp, Homo sapien
tctctgcccgagtataaccgattcc

SEQ ID NO: 1072114 - DNA, 25 bp, Homo sapien
ctttctctgcccgagtataaccgat

SEQ ID NO: 1072115 - DNA, 25 bp, Homo sapien
cgagtataaccgattccatgtgcac

SEQ ID NO: 1072116 - DNA, 25 bp, Homo sapien
catgcaatttctaacctggtggcta

SEQ ID NO: 1072117 - DNA, 25 bp, Homo sapien
cgttgttcacgctcatgtacagcaa

SEQ ID NO: 1072118 - DNA, 25 bp, Homo sapien
cgtgcctggccaactcattcaactt

SEQ ID NO: 1072119 - DNA, 25 bp, Homo sapien
gattttcaagggtcaacatccaaaa

SEQ ID NO: 1072120 - DNA, 25 bp, Homo sapien
tgttctttccaccttactacaatgc

SEQ ID NO: 1072121 - DNA, 25 bp, Homo sapien
gaaccagcatcagaacctgactctc

SEQ ID NO: 1072122 - DNA, 25 bp, Homo sapien
gctgtgaacacgctaccgcactcca

SEQ ID NO: 1072123 - DNA, 25 bp, Homo sapien
accttactacaatgcctcctgttgg

SEQ ID NO: 1072124 - DNA, 25 bp, Homo sapien
cagccttgccaggataaaatcccag

SEQ ID NO: 1072125 - DNA, 25 bp, Homo sapien
tagagtctcccaacacaagactagt

SEQ ID NO: 1072126 - DNA, 25 bp, Homo sapien
cagtaactctggataaaagcatagg

SEQ ID NO: 1072127 - DNA, 25 bp, Homo sapien
cataggtattgaagccagccttgcc

SEQ ID NO: 1072128 - DNA, 25 bp, Homo sapien
ccgctgcttcctgatggtacctgca

SEQ ID NO: 1072129 - DNA, 25 bp, Homo sapien
ttcctttatcagcttatcccgctgc

SEQ ID NO: 1072130 - DNA, 25 bp, Homo sapien
tcctgatggtacctgcacgtctcat

SEQ ID NO: 1072131 - DNA, 25 bp, Homo sapien
ccccttgccaatgtggtgaggtgga

SEQ ID NO: 1072132 - DNA, 25 bp, Homo sapien
tgacaaggaggtttgtcgtaaacaa

SEQ ID NO: 1072133 - DNA, 25 bp, Homo sapien
ttgacaaggaggtttgtcgtaaaca

SEQ ID NO: 1072134 - DNA, 25 bp, Homo sapien
tgtgaatgacaaaagttgtagactc

SEQ ID NO: 1072135 - DNA, 25 bp, Homo sapien
tatacacgtctgttgtatactaaat

SEQ ID NO: 1072136 - DNA, 25 bp, Homo sapien
cacacacggcccaaatatatttttg

SEQ ID NO: 1072137 - DNA, 25 bp, Homo sapien
tccttctctgctgattcaacttctg

SEQ ID NO: 1072138 - DNA, 25 bp, Homo sapien
taagctgagatcatgccgtcgcact

SEQ ID NO: 1072139 - DNA, 25 bp, Homo sapien
tgcggtaagctgagatcatgccgtc

SEQ ID NO: 1072140 - DNA, 25 bp, Homo sapien
ggtaagctgagatcatgccgtcgca

SEQ ID NO: 1072141 - DNA, 25 bp, Homo sapien
aagctgagatcatgccgtcgcactc

SEQ ID NO: 1072142 - DNA, 25 bp, Homo sapien
ctcctttgaacccagcagtcagagg

SEQ ID NO: 1072143 - DNA, 25 bp, Homo sapien
ctttgaacccagcagtcagaggtgg

SEQ ID NO: 1072144 - DNA, 25 bp, Homo sapien
cttctcctttgaacccagcagtcag

SEQ ID NO: 1072145 - DNA, 25 bp, Homo sapien
ttccgccttctcctttgaacccagc

SEQ ID NO: 1072146 - DNA, 25 bp, Homo sapien
taggacattgtaactttgagttccc

SEQ ID NO: 1072147 - DNA, 25 bp, Homo sapien
gacaccagctcaacacatttgcaga

SEQ ID NO: 1072148 - DNA, 25 bp, Homo sapien
tttgcagatgtgtttggcctggaac

SEQ ID NO: 1072149 - DNA, 25 bp, Homo sapien
gcagatgtgtttggcctggaacatc

SEQ ID NO: 1072150 - DNA, 25 bp, Homo sapien
acaatttgatttgtcatcaaggaca

SEQ ID NO: 1072151 - DNA, 25 bp, Homo sapien
atgaagcccaacgtggacagcaggc

SEQ ID NO: 1072152 - DNA, 25 bp, Homo sapien
ctgttgcttccgacaggagctgaga

SEQ ID NO: 1072153 - DNA, 25 bp, Homo sapien
gagaaatgatgagctctttgctgta

SEQ ID NO: 1072154 - DNA, 25 bp, Homo sapien
aaaatgaagcccaacgtggacagca

SEQ ID NO: 1072155 - DNA, 25 bp, Homo sapien
gagtcattggcaggatcctttaagg

SEQ ID NO: 1072156 - DNA, 25 bp, Homo sapien
gcagcaaagattggatgtgacacca

SEQ ID NO: 1072157 - DNA, 25 bp, Homo sapien
tcacttagaaaaggcccgcatcact

SEQ ID NO: 1072158 - DNA, 25 bp, Homo sapien
gcattgaatttaccgtaggtcccac

SEQ ID NO: 1072159 - DNA, 25 bp, Homo sapien
tctctacaaaaaaacataacaaaca

SEQ ID NO: 1072160 - DNA, 25 bp, Homo sapien
atgcctgtaatcccagcactttggg

SEQ ID NO: 1072161 - DNA, 25 bp, Homo sapien
tgagatcagcctgggaaacagtgag

SEQ ID NO: 1072162 - DNA, 25 bp, Homo sapien
acaaaaaggccgggcacgatggctc

SEQ ID NO: 1072163 - DNA, 25 bp, Homo sapien
tgttaccactccctttgtttagaga

SEQ ID NO: 1072164 - DNA, 25 bp, Homo sapien
tgtttcaccaggtatgggattccaa

SEQ ID NO: 1072165 - DNA, 25 bp, Homo sapien
agacaatctattgtattgacctgta

SEQ ID NO: 1072166 - DNA, 25 bp, Homo sapien
gtttttccctcatgtaagaatgtca

SEQ ID NO: 1072167 - DNA, 25 bp, Homo sapien
ccagttacttgggagaccgaggtag

SEQ ID NO: 1072168 - DNA, 25 bp, Homo sapien
attagctgggcctgggccgggctcg

SEQ ID NO: 1072169 - DNA, 25 bp, Homo sapien
gctgggcctgggccgggctcggtgg

SEQ ID NO: 1072170 - DNA, 25 bp, Homo sapien
agaccgaggtaggaggattacctga

SEQ ID NO: 1072171 - DNA, 25 bp, Homo sapien
actaaggcaattaaaggaattgtct

SEQ ID NO: 1072172 - DNA, 25 bp, Homo sapien
cagcaagctaaagacccagggaaga

SEQ ID NO: 1072173 - DNA, 25 bp, Homo sapien
ctagatctctgtattcatcagaact

SEQ ID NO: 1072174 - DNA, 25 bp, Homo sapien
gaacaagtctgaaggcagtctagat

SEQ ID NO: 1072175 - DNA, 25 bp, Homo sapien
gtcccagcaacaagaggattgattg

SEQ ID NO: 1072176 - DNA, 25 bp, Homo sapien
ttgatatcatctcgagatccttaac

SEQ ID NO: 1072177 - DNA, 25 bp, Homo sapien
cccagataatctaggttgatatcat

SEQ ID NO: 1072178 - DNA, 25 bp, Homo sapien
gtggtcccagcaacaagaggattga

SEQ ID NO: 1072179 - DNA, 25 bp, Homo sapien
tacagcattacaattcaacagtggc

SEQ ID NO: 1072180 - DNA, 25 bp, Homo sapien
tagcaatgtattcccctgaacgtac

SEQ ID NO: 1072181 - DNA, 25 bp, Homo sapien
ccagctcacagtctaacagggaaac

SEQ ID NO: 1072182 - DNA, 25 bp, Homo sapien
taatacctactgtcttcagcatgca

SEQ ID NO: 1072183 - DNA, 25 bp, Homo sapien
aagagttcagctcctaaactaggag

SEQ ID NO: 1072184 - DNA, 25 bp, Homo sapien
catagaatgcttgacactaagaggg

SEQ ID NO: 1072185 - DNA, 25 bp, Homo sapien
gagggaaccttaacattaactatga

SEQ ID NO: 1072186 - DNA, 25 bp, Homo sapien
taagaactctcagcatattcagtcc

SEQ ID NO: 1072187 - DNA, 25 bp, Homo sapien
ggaccatggacatgtgccactacac

SEQ ID NO: 1072188 - DNA, 25 bp, Homo sapien
ccctcaaccagagctactattttat

SEQ ID NO: 1072189 - DNA, 25 bp, Homo sapien
tgccctcaaccagagctactatttt

SEQ ID NO: 1072190 - DNA, 25 bp, Homo sapien
gggaccatggacatgtgccactaca

SEQ ID NO: 1072191 - DNA, 25 bp, Homo sapien
gagcgtggcggagccgaggggagcg

SEQ ID NO: 1072192 - DNA, 25 bp, Homo sapien
gagcggctcccacaatggccgagct

SEQ ID NO: 1072193 - DNA, 25 bp, Homo sapien
ggaagaagacgggcccgtggcggca

SEQ ID NO: 1072194 - DNA, 25 bp, Homo sapien
ccccgcgccctagcggcagcggctg

SEQ ID NO: 1072195 - DNA, 25 bp, Homo sapien
agggcgcctgcatccaaccccgcgc

SEQ ID NO: 1072196 - DNA, 25 bp, Homo sapien
ggcagggcgcctgcatccaaccccg

SEQ ID NO: 1072197 - DNA, 25 bp, Homo sapien
cgggcagggcgcctgcatccaaccc

SEQ ID NO: 1072198 - DNA, 25 bp, Homo sapien
cagcgggcagggcgcctgcatccaa

SEQ ID NO: 1072199 - DNA, 25 bp, Homo sapien
ctgggtacccagctttgactttggc

SEQ ID NO: 1072200 - DNA, 25 bp, Homo sapien
tcccttatagggaataccggctcac

SEQ ID NO: 1072201 - DNA, 25 bp, Homo sapien
tggacacaatgggtctgtggccaca

SEQ ID NO: 1072202 - DNA, 25 bp, Homo sapien
tagagacagcgaggtagcctacatg

SEQ ID NO: 1072203 - DNA, 25 bp, Homo sapien
ttcacctctctgagactcagtttct

SEQ ID NO: 1072204 - DNA, 25 bp, Homo sapien
agtcacttcacctctctgagactca

SEQ ID NO: 1072205 - DNA, 25 bp, Homo sapien
cacttcacctctctgagactcagtt

SEQ ID NO: 1072206 - DNA, 25 bp, Homo sapien
tcacctctctgagactcagtttctt

SEQ ID NO: 1072207 - DNA, 25 bp, Homo sapien
tgtgagcagacaaaaggggtcccat

SEQ ID NO: 1072208 - DNA, 25 bp, Homo sapien
ccataaggaacactgggacttggga

SEQ ID NO: 1072209 - DNA, 25 bp, Homo sapien
gaagcagaggttctagtcctgccta

SEQ ID NO: 1072210 - DNA, 25 bp, Homo sapien
aaaggggtgaatgtgagcagacaaa

SEQ ID NO: 1072211 - DNA, 25 bp, Homo sapien
aggagggcctgggagcccagggaga

SEQ ID NO: 1072212 - DNA, 25 bp, Homo sapien
gcctgggagcccagggagaagtgat

SEQ ID NO: 1072213 - DNA, 25 bp, Homo sapien
ggcctgggagcccagggagaagtga

SEQ ID NO: 1072214 - DNA, 25 bp, Homo sapien
agggcctgggagcccagggagaagt

SEQ ID NO: 1072215 - DNA, 25 bp, Homo sapien
gacaggctccccgaccgctcgctcc

SEQ ID NO: 1072216 - DNA, 25 bp, Homo sapien
ccgaccgctcgctcctgtaagatcg

SEQ ID NO: 1072217 - DNA, 25 bp, Homo sapien
gaccgctcgctcctgtaagatcgct

SEQ ID NO: 1072218 - DNA, 25 bp, Homo sapien
gctccccgaccgctcgctcctgtaa

SEQ ID NO: 1072219 - DNA, 25 bp, Homo sapien
tgctcatgcagtggcaggttccagg

SEQ ID NO: 1072220 - DNA, 25 bp, Homo sapien
ggcttttccgctttttctgctcatg

SEQ ID NO: 1072221 - DNA, 25 bp, Homo sapien
cgactctgaccacagcacgctctgc

SEQ ID NO: 1072222 - DNA, 25 bp, Homo sapien
cgctttttctgctcatgcagtggca

SEQ ID NO: 1072223 - DNA, 25 bp, Homo sapien
taataacaaatcagatgatggctgc

SEQ ID NO: 1072224 - DNA, 25 bp, Homo sapien
aataacaaatcagatgatggctgct

SEQ ID NO: 1072225 - DNA, 25 bp, Homo sapien
tttcaacgtctttccaagaataata

SEQ ID NO: 1072226 - DNA, 25 bp, Homo sapien
caaaagaggcattcagcagtgtcag

SEQ ID NO: 1072227 - DNA, 25 bp, Homo sapien
cctcaaaagaggcattcagcagtgt

SEQ ID NO: 1072228 - DNA, 25 bp, Homo sapien
gtcaggatgcaaaggagatcagcat

SEQ ID NO: 1072229 - DNA, 25 bp, Homo sapien
gaggcattcagcagtgtcaggatgc

SEQ ID NO: 1072230 - DNA, 25 bp, Homo sapien
tctccactagactgagttccatgca

SEQ ID NO: 1072231 - DNA, 25 bp, Homo sapien
ttgaatatcaatgccaaggacaggg

SEQ ID NO: 1072232 - DNA, 25 bp, Homo sapien
tccttagctctaatgattctcctgc

SEQ ID NO: 1072233 - DNA, 25 bp, Homo sapien
agttccatgcagaagggaccacatc

SEQ ID NO: 1072234 - DNA, 25 bp, Homo sapien
ttggccagaataagccacttccatc

SEQ ID NO: 1072235 - DNA, 25 bp, Homo sapien
ccctgcattcccttcttcccactca

SEQ ID NO: 1072236 - DNA, 25 bp, Homo sapien
tagggttccatttcccatccctgca

SEQ ID NO: 1072237 - DNA, 25 bp, Homo sapien
catccctgcattcccttcttcccac

SEQ ID NO: 1072238 - DNA, 25 bp, Homo sapien
ttagggttccatttcccatccctgc

SEQ ID NO: 1072239 - DNA, 25 bp, Homo sapien
ttctcaccagctgttctctcttcat

SEQ ID NO: 1072240 - DNA, 25 bp, Homo sapien
aattctcaccagctgttctctcttc

SEQ ID NO: 1072241 - DNA, 25 bp, Homo sapien
ctaattctcaccagctgttctctct

SEQ ID NO: 1072242 - DNA, 25 bp, Homo sapien
tctcttcattttccttctttccttc

SEQ ID NO: 1072243 - DNA, 25 bp, Homo sapien
gcatttctaagaaggctgcaatggg

SEQ ID NO: 1072244 - DNA, 25 bp, Homo sapien
gggggaagcagaaggatgtactcgg

SEQ ID NO: 1072245 - DNA, 25 bp, Homo sapien
tgctcctgatgggtgagactgctgc

SEQ ID NO: 1072246 - DNA, 25 bp, Homo sapien
ctcctgatgggtgagactgctgctg

SEQ ID NO: 1072247 - DNA, 25 bp, Homo sapien
ggaggtttttcgcttctttcaagca

SEQ ID NO: 1072248 - DNA, 25 bp, Homo sapien
gaaataatgcattcttctaatgaat

SEQ ID NO: 1072249 - DNA, 25 bp, Homo sapien
taatgaatggaaagtggggaagtcc

SEQ ID NO: 1072250 - DNA, 25 bp, Homo sapien
tacaaggctagaggaacaaagcggc

SEQ ID NO: 1072251 - DNA, 25 bp, Homo sapien
agatgtgtgactgatgcttgccaaa

SEQ ID NO: 1072252 - DNA, 25 bp, Homo sapien
tacacgcgccactttgtgagcaggt

SEQ ID NO: 1072253 - DNA, 25 bp, Homo sapien
tttataccagcaggcctaagaaggc

SEQ ID NO: 1072254 - DNA, 25 bp, Homo sapien
caagcacatttttcgtaaacagcag

SEQ ID NO: 1072255 - DNA, 25 bp, Homo sapien
ggcccgctcgcgctccgccggtccc

SEQ ID NO: 1072256 - DNA, 25 bp, Homo sapien
tcccggctcgcgtttccgcgtcctc

SEQ ID NO: 1072257 - DNA, 25 bp, Homo sapien
tcgcgtttccgcgtcctcacccctc

SEQ ID NO: 1072258 - DNA, 25 bp, Homo sapien
cggctcgcgtttccgcgtcctcacc

SEQ ID NO: 1072259 - DNA, 25 bp, Homo sapien
tttgtgcgtctcagagacggcgacg

SEQ ID NO: 1072260 - DNA, 25 bp, Homo sapien
agcctcgaccctttgtgcgtctcag

SEQ ID NO: 1072261 - DNA, 25 bp, Homo sapien
gcggccccagcctcgaccctttgtg

SEQ ID NO: 1072262 - DNA, 25 bp, Homo sapien
gaccctttgtgcgtctcagagacgg

SEQ ID NO: 1072263 - DNA, 25 bp, Homo sapien
ctcgccgagccccgggggctgccgg

SEQ ID NO: 1072264 - DNA, 25 bp, Homo sapien
gggctgccggttccaggcccgcgcg

SEQ ID NO: 1072265 - DNA, 25 bp, Homo sapien
ggggctgccggttccaggcccgcgc

SEQ ID NO: 1072266 - DNA, 25 bp, Homo sapien
ctccagcacatcctcgtacgcctgc

SEQ ID NO: 1072267 - DNA, 25 bp, Homo sapien
ctgctgacccggcacgtagccggcc

SEQ ID NO: 1072268 - DNA, 25 bp, Homo sapien
gctgacccggcacgtagccggccat

SEQ ID NO: 1072269 - DNA, 25 bp, Homo sapien
tacgcctgcacgaactccttctcct

SEQ ID NO: 1072270 - DNA, 25 bp, Homo sapien
cgaaggccacgctgcgccggcccgc

SEQ ID NO: 1072271 - DNA, 25 bp, Homo sapien
cgagccgaccggctccgaaggccac

SEQ ID NO: 1072272 - DNA, 25 bp, Homo sapien
ccgagccgaccggctccgaaggcca

SEQ ID NO: 1072273 - DNA, 25 bp, Homo sapien
gctccgaaggccacgctgcgccggc

SEQ ID NO: 1072274 - DNA, 25 bp, Homo sapien
ctggggccggataatagggcaaatc

SEQ ID NO: 1072275 - DNA, 25 bp, Homo sapien
gccttgtctcgccttcttccagctg

SEQ ID NO: 1072276 - DNA, 25 bp, Homo sapien
cagagcagagcgggtggtttctccc

SEQ ID NO: 1072277 - DNA, 25 bp, Homo sapien
caaatcatgtaactggcgctctgag

SEQ ID NO: 1072278 - DNA, 25 bp, Homo sapien
ggagcctggctcttagacagtaatt

SEQ ID NO: 1072279 - DNA, 25 bp, Homo sapien
cacttagcccaagtcatctactgtg

SEQ ID NO: 1072280 - DNA, 25 bp, Homo sapien
taaaactcccttctgtgatacaatg

SEQ ID NO: 1072281 - DNA, 25 bp, Homo sapien
tggaaatgtatgtcacttaaagtgt

SEQ ID NO: 1072282 - DNA, 25 bp, Homo sapien
caagacaaggcagtagctcccataa

SEQ ID NO: 1072283 - DNA, 25 bp, Homo sapien
tctcttaaacctggaattggcactg

SEQ ID NO: 1072284 - DNA, 25 bp, Homo sapien
taagcactgttagcacatggacaca

SEQ ID NO: 1072285 - DNA, 25 bp, Homo sapien
ggcttacgctggtgcatttccctgg

SEQ ID NO: 1072286 - DNA, 25 bp, Homo sapien
tatgctccaaccttatcaatgccca

SEQ ID NO: 1072287 - DNA, 25 bp, Homo sapien
tcttcactaccacagcatcagcatt

SEQ ID NO: 1072288 - DNA, 25 bp, Homo sapien
tcactctggctatactgggtactcc

SEQ ID NO: 1072289 - DNA, 25 bp, Homo sapien
cacatcctttaggtaacagttcagg

SEQ ID NO: 1072290 - DNA, 25 bp, Homo sapien
caggccaggtcagttagcttctttc

SEQ ID NO: 1072291 - DNA, 25 bp, Homo sapien
ggcaaaaaggtcctgcatgactaga

SEQ ID NO: 1072292 - DNA, 25 bp, Homo sapien
gagaaattacctggcatcaaagggc

SEQ ID NO: 1072293 - DNA, 25 bp, Homo sapien
gataactgtaccagaagagccaagc

SEQ ID NO: 1072294 - DNA, 25 bp, Homo sapien
tgctacagctacacaagatattttg

SEQ ID NO: 1072295 - DNA, 25 bp, Homo sapien
caaagtgaagtaactaacgacagca

SEQ ID NO: 1072296 - DNA, 25 bp, Homo sapien
tggagtttcggctctgctgtcagac

SEQ ID NO: 1072297 - DNA, 25 bp, Homo sapien
gacaatacatataggcaaggcaaag

SEQ ID NO: 1072298 - DNA, 25 bp, Homo sapien
tcagcccagaaaacgaaggaactcc

SEQ ID NO: 1072299 - DNA, 25 bp, Homo sapien
tgcttaacacagtccattcctggca

SEQ ID NO: 1072300 - DNA, 25 bp, Homo sapien
ggagttctgaagtccaacagagcta

SEQ ID NO: 1072301 - DNA, 25 bp, Homo sapien
ccaggttacaaagtgactaaaccat

SEQ ID NO: 1072302 - DNA, 25 bp, Homo sapien
agagccagagaatgggacatgtagg

SEQ ID NO: 1072303 - DNA, 25 bp, Homo sapien
agaatgggacatgtaggaggattta

SEQ ID NO: 1072304 - DNA, 25 bp, Homo sapien
ctgtcagtacttcccagagccagag

SEQ ID NO: 1072305 - DNA, 25 bp, Homo sapien
tactgtcagtacttcccagagccag

SEQ ID NO: 1072306 - DNA, 25 bp, Homo sapien
cagagggatctgacatcaaaaagga

SEQ ID NO: 1072307 - DNA, 25 bp, Homo sapien
aacaggtgctggacaaggtgtctca

SEQ ID NO: 1072308 - DNA, 25 bp, Homo sapien
tagacactttgagctggacactgtc

SEQ ID NO: 1072309 - DNA, 25 bp, Homo sapien
agatgttctcgcagctctcaaggtg

SEQ ID NO: 1072310 - DNA, 25 bp, Homo sapien
tagcggatgtggcaagagcagaatc

SEQ ID NO: 1072311 - DNA, 25 bp, Homo sapien
taccagtgcaggtcaagtagacaca

SEQ ID NO: 1072312 - DNA, 25 bp, Homo sapien
tccagcggatttaggcacaaaaagg

SEQ ID NO: 1072313 - DNA, 25 bp, Homo sapien
catgagggaccgagcttttctaacc

SEQ ID NO: 1072314 - DNA, 25 bp, Homo sapien
taaaaataatctggccggacgcagt

SEQ ID NO: 1072315 - DNA, 25 bp, Homo sapien
gagactgtctaagctgtcaaggccc

SEQ ID NO: 1072316 - DNA, 25 bp, Homo sapien
aagatgctgctttctaccctagagg

SEQ ID NO: 1072317 - DNA, 25 bp, Homo sapien
tacaagggtttggagggactactgc

SEQ ID NO: 1072318 - DNA, 25 bp, Homo sapien
gatttatgctaggtatgatggctca

SEQ ID NO: 1072319 - DNA, 25 bp, Homo sapien
gagataatcagggaaggatccacaa

SEQ ID NO: 1072320 - DNA, 25 bp, Homo sapien
aggactaacgcagaaggatcatttc

SEQ ID NO: 1072321 - DNA, 25 bp, Homo sapien
tatacgcaatactctgtgctatggg

SEQ ID NO: 1072322 - DNA, 25 bp, Homo sapien
caaccataaatggagctgcctgagc

SEQ ID NO: 1072323 - DNA, 25 bp, Homo sapien
tgctccttacccatgagctagaggt

SEQ ID NO: 1072324 - DNA, 25 bp, Homo sapien
aatgaggtgtccctaattagccatc

SEQ ID NO: 1072325 - DNA, 25 bp, Homo sapien
gcattatgccaagagtgctccaggt

SEQ ID NO: 1072326 - DNA, 25 bp, Homo sapien
gagtaggtcaactcatccagagata

SEQ ID NO: 1072327 - DNA, 25 bp, Homo sapien
catgtgagtccagatagctcttcaa

SEQ ID NO: 1072328 - DNA, 25 bp, Homo sapien
caaaccttggctatagtggctcacg

SEQ ID NO: 1072329 - DNA, 25 bp, Homo sapien
ttcaggataggattgagagccaggc

SEQ ID NO: 1072330 - DNA, 25 bp, Homo sapien
ccttctggtctgctggacagaaaat

SEQ ID NO: 1072331 - DNA, 25 bp, Homo sapien
gagtttgccatttgaagaaagggct

SEQ ID NO: 1072332 - DNA, 25 bp, Homo sapien
cagaaaatgagtttgccatttgaag

SEQ ID NO: 1072333 - DNA, 25 bp, Homo sapien
tgccatttgaagaaagggctgtccc

SEQ ID NO: 1072334 - DNA, 25 bp, Homo sapien
aacttctgatacttgtaagcgttca

SEQ ID NO: 1072335 - DNA, 25 bp, Homo sapien
ctccaggaacttctgatacttgtaa

SEQ ID NO: 1072336 - DNA, 25 bp, Homo sapien
ctctaaggttgttgagtccctccag

SEQ ID NO: 1072337 - DNA, 25 bp, Homo sapien
taaggttgttgagtccctccaggaa

SEQ ID NO: 1072338 - DNA, 25 bp, Homo sapien
acgatcagcaaggacaaagggtagg

SEQ ID NO: 1072339 - DNA, 25 bp, Homo sapien
caaagggtagggagcctgaagcctt

SEQ ID NO: 1072340 - DNA, 25 bp, Homo sapien
gtagggagcctgaagccttgtaata

SEQ ID NO: 1072341 - DNA, 25 bp, Homo sapien
agcaaggacaaagggtagggagcct

SEQ ID NO: 1072342 - DNA, 25 bp, Homo sapien
ggtgaaactcaacccacaggaggat

SEQ ID NO: 1072343 - DNA, 25 bp, Homo sapien
tagttcagcctgtcatacccatgag

SEQ ID NO: 1072344 - DNA, 25 bp, Homo sapien
caggactcgggccaatagttcagcc

SEQ ID NO: 1072345 - DNA, 25 bp, Homo sapien
gaaaaagactcaggttgcaggagca

SEQ ID NO: 1072346 - DNA, 25 bp, Homo sapien
gcagggatgtaatcaattgtgtcca

SEQ ID NO: 1072347 - DNA, 25 bp, Homo sapien
gaaatactctcattgaaggtaaaag

SEQ ID NO: 1072348 - DNA, 25 bp, Homo sapien
gaccagggagagtagacaagagatc

SEQ ID NO: 1072349 - DNA, 25 bp, Homo sapien
caaatctatctgtaaaaagttatgc

SEQ ID NO: 1072350 - DNA, 25 bp, Homo sapien
aagctacagtgcagtgacagggtca

SEQ ID NO: 1072351 - DNA, 25 bp, Homo sapien
gctacagtgcagtgacagggtcatg

SEQ ID NO: 1072352 - DNA, 25 bp, Homo sapien
ccaagctacagtgcagtgacagggt

SEQ ID NO: 1072353 - DNA, 25 bp, Homo sapien
ctacagtgcagtgacagggtcatgg

SEQ ID NO: 1072354 - DNA, 25 bp, Homo sapien
cattccctagtgcaaagaaaccatc

SEQ ID NO: 1072355 - DNA, 25 bp, Homo sapien
ctgtgttgtttattgctgggatccc

SEQ ID NO: 1072356 - DNA, 25 bp, Homo sapien
aacaaagcctggagccctagaagca

SEQ ID NO: 1072357 - DNA, 25 bp, Homo sapien
tgtcctcacttagagtcctgcctgg

SEQ ID NO: 1072358 - DNA, 25 bp, Homo sapien
gacagactagttattcttaacccta

SEQ ID NO: 1072359 - DNA, 25 bp, Homo sapien
tcaaaagcgcttttcttctggcaaa

SEQ ID NO: 1072360 - DNA, 25 bp, Homo sapien
ttccacagacagactagttattctt

SEQ ID NO: 1072361 - DNA, 25 bp, Homo sapien
taatcaaaagcgcttttcttctggc

SEQ ID NO: 1072362 - DNA, 25 bp, Homo sapien
gacttagggcaggtcattctgcaca

SEQ ID NO: 1072363 - DNA, 25 bp, Homo sapien
aaacaaacagcccagagacttaggg

SEQ ID NO: 1072364 - DNA, 25 bp, Homo sapien
ccagggaaatgcagtggccaggcac

SEQ ID NO: 1072365 - DNA, 25 bp, Homo sapien
tagtagagtcactgggacgagaccc

SEQ ID NO: 1072366 - DNA, 25 bp, Homo sapien
taaaatacaatcacaacatacttgc

SEQ ID NO: 1072367 - DNA, 25 bp, Homo sapien
catacttgcatttaactatgcaaac

SEQ ID NO: 1072368 - DNA, 25 bp, Homo sapien
taactatgcaaacttgaccaggaag

SEQ ID NO: 1072369 - DNA, 25 bp, Homo sapien
tgcatttaactatgcaaacttgacc

SEQ ID NO: 1072370 - DNA, 25 bp, Homo sapien
tctcctgcactagcctccctcctga

SEQ ID NO: 1072371 - DNA, 25 bp, Homo sapien
tcctgcactagcctccctcctgagt

SEQ ID NO: 1072372 - DNA, 25 bp, Homo sapien
gattctcctgcactagcctccctcc

SEQ ID NO: 1072373 - DNA, 25 bp, Homo sapien
attctcctgcactagcctccctcct

SEQ ID NO: 1072374 - DNA, 25 bp, Homo sapien
cttcctctatgaacacaaatacgcc

SEQ ID NO: 1072375 - DNA, 25 bp, Homo sapien
acacaaatacgcctgcccccaccat

SEQ ID NO: 1072376 - DNA, 25 bp, Homo sapien
tctatgaacacaaatacgcctgccc

SEQ ID NO: 1072377 - DNA, 25 bp, Homo sapien
aacacaaatacgcctgcccccacca

SEQ ID NO: 1072378 - DNA, 25 bp, Homo sapien
tgttagctacaagaaaccactacct

SEQ ID NO: 1072379 - DNA, 25 bp, Homo sapien
tgggtcatgtggcaactctactttt

SEQ ID NO: 1072380 - DNA, 25 bp, Homo sapien
tgtgtatactttcagtgttagctac

SEQ ID NO: 1072381 - DNA, 25 bp, Homo sapien
tatgttgtgtgaggtcagggtttaa

SEQ ID NO: 1072382 - DNA, 25 bp, Homo sapien
aaatgggcaaatgatgaaagaagtg

SEQ ID NO: 1072383 - DNA, 25 bp, Homo sapien
aatgatgaaagaagtgaggatcttg

SEQ ID NO: 1072384 - DNA, 25 bp, Homo sapien
atgggcaaatgatgaaagaagtgag

SEQ ID NO: 1072385 - DNA, 25 bp, Homo sapien
tgatgaaagaagtgaggatcttggt

SEQ ID NO: 1072386 - DNA, 25 bp, Homo sapien
gctactctcgctatacctcccaaga

SEQ ID NO: 1072387 - DNA, 25 bp, Homo sapien
ggcagggtgccacccagaggtttct

SEQ ID NO: 1072388 - DNA, 25 bp, Homo sapien
cctcccaagaaagaaggcctcagag

SEQ ID NO: 1072389 - DNA, 25 bp, Homo sapien
gcctcagagcaagatcaaacatagc

SEQ ID NO: 1072390 - DNA, 25 bp, Homo sapien
catttaatatcttccagcagctcaa

SEQ ID NO: 1072391 - DNA, 25 bp, Homo sapien
catcctgtcattatatgttctttga

SEQ ID NO: 1072392 - DNA, 25 bp, Homo sapien
agctcaatcaaggttcctgtctcca

SEQ ID NO: 1072393 - DNA, 25 bp, Homo sapien
gcctcttccacacatgtcattcttt

SEQ ID NO: 1072394 - DNA, 25 bp, Homo sapien
attctgactgcccaggcagccacac

SEQ ID NO: 1072395 - DNA, 25 bp, Homo sapien
tcaatcattctgactgcccaggcag

SEQ ID NO: 1072396 - DNA, 25 bp, Homo sapien
caatcattctgactgcccaggcagc

SEQ ID NO: 1072397 - DNA, 25 bp, Homo sapien
atcattctgactgcccaggcagcca

SEQ ID NO: 1072398 - DNA, 25 bp, Homo sapien
tggtgagtaatgctttccccagcgt

SEQ ID NO: 1072399 - DNA, 25 bp, Homo sapien
ttcacggctgcctcaacaggatcgt

SEQ ID NO: 1072400 - DNA, 25 bp, Homo sapien
cagacagaaaaggagcagtcactgg

SEQ ID NO: 1072401 - DNA, 25 bp, Homo sapien
gaggtgactcactcttaacacagcc

SEQ ID NO: 1072402 - DNA, 25 bp, Homo sapien
ttactaacagccaacgggcagggcc

SEQ ID NO: 1072403 - DNA, 25 bp, Homo sapien
cccacaggaatttgggatggtctcc

SEQ ID NO: 1072404 - DNA, 25 bp, Homo sapien
gatggtctcccctaactgttaccca

SEQ ID NO: 1072405 - DNA, 25 bp, Homo sapien
gaagccttgtagaagacagactcag

SEQ ID NO: 1072406 - DNA, 25 bp, Homo sapien
acctccgtctcccggctccaagcaa

SEQ ID NO: 1072407 - DNA, 25 bp, Homo sapien
gacggggtttcatcacattggttag

SEQ ID NO: 1072408 - DNA, 25 bp, Homo sapien
gagacggggtttcatcacattggtt

SEQ ID NO: 1072409 - DNA, 25 bp, Homo sapien
cggggtttcatcacattggttaggc

SEQ ID NO: 1072410 - DNA, 25 bp, Homo sapien
agccaggagactagatggcattatt

SEQ ID NO: 1072411 - DNA, 25 bp, Homo sapien
taaagccaggagactagatggcatt

SEQ ID NO: 1072412 - DNA, 25 bp, Homo sapien
catagagaagagatcaagttcaagg

SEQ ID NO: 1072413 - DNA, 25 bp, Homo sapien
caaggactaagtcctggaagccttt

SEQ ID NO: 1072414 - DNA, 25 bp, Homo sapien
gaagcattagggaacctcttgcggg

SEQ ID NO: 1072415 - DNA, 25 bp, Homo sapien
tgagcaccacaagtaccctggagtt

SEQ ID NO: 1072416 - DNA, 25 bp, Homo sapien
aaaggagcgcctaagccagtgtcaa

SEQ ID NO: 1072417 - DNA, 25 bp, Homo sapien
tgaagatcagcgaggagagcaaact

SEQ ID NO: 1072418 - DNA, 25 bp, Homo sapien
gagacccaagggtatacactccagt

SEQ ID NO: 1072419 - DNA, 25 bp, Homo sapien
gagtactgaaggcaatgagacccaa

SEQ ID NO: 1072420 - DNA, 25 bp, Homo sapien
tattctgtgatgtccaactggcagg

SEQ ID NO: 1072421 - DNA, 25 bp, Homo sapien
tctgggacgtactggaaaggacact

SEQ ID NO: 1072422 - DNA, 25 bp, Homo sapien
gtgcacttaactcagctgtgccaga

SEQ ID NO: 1072423 - DNA, 25 bp, Homo sapien
atcagtagaaggctgcctgcttgtt

SEQ ID NO: 1072424 - DNA, 25 bp, Homo sapien
agtcagtgcacttaactcagctgtg

SEQ ID NO: 1072425 - DNA, 25 bp, Homo sapien
gctgcctgcttgtttgtccaacttg

SEQ ID NO: 1072426 - DNA, 25 bp, Homo sapien
agatccctagattccaaagaaagtt

SEQ ID NO: 1072427 - DNA, 25 bp, Homo sapien
ccagctactggcctgtgcacccttc

SEQ ID NO: 1072428 - DNA, 25 bp, Homo sapien
gctactggcctgtgcacccttcgca

SEQ ID NO: 1072429 - DNA, 25 bp, Homo sapien
agctactggcctgtgcacccttcgc

SEQ ID NO: 1072430 - DNA, 25 bp, Homo sapien
cagctactggcctgtgcacccttcg

SEQ ID NO: 1072431 - DNA, 25 bp, Homo sapien
gcgcccctgtgtctgctgaccccac

SEQ ID NO: 1072432 - DNA, 25 bp, Homo sapien
ggcgcccctgtgtctgctgacccca

SEQ ID NO: 1072433 - DNA, 25 bp, Homo sapien
tgttcatcttggtaactcggccaca

SEQ ID NO: 1072434 - DNA, 25 bp, Homo sapien
caggtgggcgttgaactcgtgttca

SEQ ID NO: 1072435 - DNA, 25 bp, Homo sapien
gcgacaaaccaggtgggcgttgaac

SEQ ID NO: 1072436 - DNA, 25 bp, Homo sapien
ccatacagcacatgcgacaaaccag

SEQ ID NO: 1072437 - DNA, 25 bp, Homo sapien
tgaaagcccacaccatcccatataa

SEQ ID NO: 1072438 - DNA, 25 bp, Homo sapien
tctagaccagtgagccatcagtcct

SEQ ID NO: 1072439 - DNA, 25 bp, Homo sapien
tcttgttcaaatcatcctcactgtc

SEQ ID NO: 1072440 - DNA, 25 bp, Homo sapien
tttctccgactcctgccaattcccc

SEQ ID NO: 1072441 - DNA, 25 bp, Homo sapien
cacttggtgaacgttttcttctgaa

SEQ ID NO: 1072442 - DNA, 25 bp, Homo sapien
cattaagtgcttgttgacccacttg

SEQ ID NO: 1072443 - DNA, 25 bp, Homo sapien
attaagtgcttgttgacccacttgg

SEQ ID NO: 1072444 - DNA, 25 bp, Homo sapien
cttcattaagtgcttgttgacccac

SEQ ID NO: 1072445 - DNA, 25 bp, Homo sapien
catagagatggacatatgcaaggta

SEQ ID NO: 1072446 - DNA, 25 bp, Homo sapien
gaaggtgacaggtacgttatacaac

SEQ ID NO: 1072447 - DNA, 25 bp, Homo sapien
tgagtgacaaaccaagacccttttg

SEQ ID NO: 1072448 - DNA, 25 bp, Homo sapien
catacgtaaagacttcctcgaagaa

SEQ ID NO: 1072449 - DNA, 25 bp, Homo sapien
caacagagagatcaggttatggcca

SEQ ID NO: 1072450 - DNA, 25 bp, Homo sapien
gccatcccgcagatcttcataaaga

SEQ ID NO: 1072451 - DNA, 25 bp, Homo sapien
aaagatcattgatgtgcttgcggac

SEQ ID NO: 1072452 - DNA, 25 bp, Homo sapien
tgatgcctgagaggacctccaacag

SEQ ID NO: 1072453 - DNA, 25 bp, Homo sapien
cctgctcctcgttgtttgtatggca

SEQ ID NO: 1072454 - DNA, 25 bp, Homo sapien
ggcatgctcaccagacggagggtct

SEQ ID NO: 1072455 - DNA, 25 bp, Homo sapien
tcaccagacggagggtcttcagccc

SEQ ID NO: 1072456 - DNA, 25 bp, Homo sapien
tcctcgttgtttgtatggcaccagg

SEQ ID NO: 1072457 - DNA, 25 bp, Homo sapien
tgctggcatccccaggaggacctac

SEQ ID NO: 1072458 - DNA, 25 bp, Homo sapien
ctctgatggccctgcagtgccagca

SEQ ID NO: 1072459 - DNA, 25 bp, Homo sapien
ctgatggccctgcagtgccagcagt

SEQ ID NO: 1072460 - DNA, 25 bp, Homo sapien
ctcagactctgatggccctgcagtg

SEQ ID NO: 1072461 - DNA, 25 bp, Homo sapien
tgcagcctatgaaaacgcatcctgc

SEQ ID NO: 1072462 - DNA, 25 bp, Homo sapien
cagcctatgaaaacgcatcctgccc

SEQ ID NO: 1072463 - DNA, 25 bp, Homo sapien
gcagcctatgaaaacgcatcctgcc

SEQ ID NO: 1072464 - DNA, 25 bp, Homo sapien
aatggggaaggcatgtgatggtctt

SEQ ID NO: 1072465 - DNA, 25 bp, Homo sapien
ggaagaatggggaaggcatgtgatg

SEQ ID NO: 1072466 - DNA, 25 bp, Homo sapien
aagaatggggaaggcatgtgatggt

SEQ ID NO: 1072467 - DNA, 25 bp, Homo sapien
tggggaaggcatgtgatggtcttac

SEQ ID NO: 1072468 - DNA, 25 bp, Homo sapien
acatctctgaatagggccccaatgc

SEQ ID NO: 1072469 - DNA, 25 bp, Homo sapien
aaacatctctgaatagggccccaat

SEQ ID NO: 1072470 - DNA, 25 bp, Homo sapien
catctctgaatagggccccaatgcc

SEQ ID NO: 1072471 - DNA, 25 bp, Homo sapien
aacatctctgaatagggccccaatg

SEQ ID NO: 1072472 - DNA, 25 bp, Homo sapien
aatgcaaaataatggtccagatcag

SEQ ID NO: 1072473 - DNA, 25 bp, Homo sapien
aaaataatggtccagatcagaccca

SEQ ID NO: 1072474 - DNA, 25 bp, Homo sapien
cattgcgaatattcactagtttcac

SEQ ID NO: 1072475 - DNA, 25 bp, Homo sapien
tgtgatgtcatcattgcgaatattc

SEQ ID NO: 1072476 - DNA, 25 bp, Homo sapien
aacaggaattccaaacttcacatgc

SEQ ID NO: 1072477 - DNA, 25 bp, Homo sapien
ttctaggccatgtccaaacaaagca

SEQ ID NO: 1072478 - DNA, 25 bp, Homo sapien
agcaacaggaattccaaacttcaca

SEQ ID NO: 1072479 - DNA, 25 bp, Homo sapien
tgcaactttctaggccatgtccaaa

SEQ ID NO: 1072480 - DNA, 25 bp, Homo sapien
gaatagagacagtgaataaattctc

SEQ ID NO: 1072481 - DNA, 25 bp, Homo sapien
ttggggtgaatagagacagtgaata

SEQ ID NO: 1072482 - DNA, 25 bp, Homo sapien
gagacagtgaataaattctccttac

SEQ ID NO: 1072483 - DNA, 25 bp, Homo sapien
gacagtgaataaattctccttacct

SEQ ID NO: 1072484 - DNA, 25 bp, Homo sapien
gccattgcactccagcctgtgcaac

SEQ ID NO: 1072485 - DNA, 25 bp, Homo sapien
agaggttttggtaagccgagatggt

SEQ ID NO: 1072486 - DNA, 25 bp, Homo sapien
actccagcctgtgcaacaagagcga

SEQ ID NO: 1072487 - DNA, 25 bp, Homo sapien
ccagcctgtgcaacaagagcgaaat

SEQ ID NO: 1072488 - DNA, 25 bp, Homo sapien
gatacaaaagaccatctatcatagg

SEQ ID NO: 1072489 - DNA, 25 bp, Homo sapien
aactacagagaatgggaagatacag

SEQ ID NO: 1072490 - DNA, 25 bp, Homo sapien
tgaaaatgtccccaaactagattat

SEQ ID NO: 1072491 - DNA, 25 bp, Homo sapien
caagaaggatcttatttggatgatg

SEQ ID NO: 1072492 - DNA, 25 bp, Homo sapien
tgccgattcagacagccatcttaca

SEQ ID NO: 1072493 - DNA, 25 bp, Homo sapien
ccaaccttggcctcatcggattcga

SEQ ID NO: 1072494 - DNA, 25 bp, Homo sapien
aaaacgcagctaagccagtcctggg

SEQ ID NO: 1072495 - DNA, 25 bp, Homo sapien
aaaacatgcactatgccggcaatcc

SEQ ID NO: 1072496 - DNA, 25 bp, Homo sapien
ttaaaacagcccagtgaatttccca

SEQ ID NO: 1072497 - DNA, 25 bp, Homo sapien
cagcccagtgaatttcccatttcct

SEQ ID NO: 1072498 - DNA, 25 bp, Homo sapien
aacagcccagtgaatttcccatttc

SEQ ID NO: 1072499 - DNA, 25 bp, Homo sapien
aaaacagcccagtgaatttcccatt

SEQ ID NO: 1072500 - DNA, 25 bp, Homo sapien
tgagtccccaggcagcaaaatatct

SEQ ID NO: 1072501 - DNA, 25 bp, Homo sapien
gaatagctattgactctttcggctc

SEQ ID NO: 1072502 - DNA, 25 bp, Homo sapien
tctctaacaaaaggtgggcggtctg

SEQ ID NO: 1072503 - DNA, 25 bp, Homo sapien
tatgggagccttctcaggaatagct

SEQ ID NO: 1072504 - DNA, 25 bp, Homo sapien
gcaggatgctgtcctaggaaattcc

SEQ ID NO: 1072505 - DNA, 25 bp, Homo sapien
agttggctcactgacttctcgcagt

SEQ ID NO: 1072506 - DNA, 25 bp, Homo sapien
tatcaagcaggtgagcaatgacagt

SEQ ID NO: 1072507 - DNA, 25 bp, Homo sapien
ctaggaaattccaccagttggctca

SEQ ID NO: 1072508 - DNA, 25 bp, Homo sapien
cacatgggaaggctccgtgcgtctt

SEQ ID NO: 1072509 - DNA, 25 bp, Homo sapien
ggtagtctgtcctaggcaaagcaca

SEQ ID NO: 1072510 - DNA, 25 bp, Homo sapien
gctccgaaacccacgctgaatattt

SEQ ID NO: 1072511 - DNA, 25 bp, Homo sapien
cactgatggacaaatcactctgaga

SEQ ID NO: 1072512 - DNA, 25 bp, Homo sapien
ctttaatatgtttgagggccaagaa

SEQ ID NO: 1072513 - DNA, 25 bp, Homo sapien
ttatctcttgaacatgcccacctac

SEQ ID NO: 1072514 - DNA, 25 bp, Homo sapien
gtttgattatctcttgaacatgccc

SEQ ID NO: 1072515 - DNA, 25 bp, Homo sapien
ccacactcagctttaatatgtttga

SEQ ID NO: 1072516 - DNA, 25 bp, Homo sapien
gagactcggtcacttagtttttcag

SEQ ID NO: 1072517 - DNA, 25 bp, Homo sapien
gctatacataagtagtatgactgtg

SEQ ID NO: 1072518 - DNA, 25 bp, Homo sapien
tcacatgatggacacaaaacctgga

SEQ ID NO: 1072519 - DNA, 25 bp, Homo sapien
aacctggaaatatgccaggtgtctg

SEQ ID NO: 1072520 - DNA, 25 bp, Homo sapien
aacctgttccaagttatactgctag

SEQ ID NO: 1072521 - DNA, 25 bp, Homo sapien
gtagcacagagaagtttagtaacct

SEQ ID NO: 1072522 - DNA, 25 bp, Homo sapien
ccttttcagtagtcatccatggaga

SEQ ID NO: 1072523 - DNA, 25 bp, Homo sapien
tccatggagaattggttctaggacc

SEQ ID NO: 1072524 - DNA, 25 bp, Homo sapien
gcagaaatccagctttagtttcaga

SEQ ID NO: 1072525 - DNA, 25 bp, Homo sapien
tctgggctttttaaggaggaagcca

SEQ ID NO: 1072526 - DNA, 25 bp, Homo sapien
ctttagtttcagagatctttctccc

SEQ ID NO: 1072527 - DNA, 25 bp, Homo sapien
tctcccaaatgcagaaatccagctt

SEQ ID NO: 1072528 - DNA, 25 bp, Homo sapien
cttggctgacatatcccctgattct

SEQ ID NO: 1072529 - DNA, 25 bp, Homo sapien
gagtgcattgaacatcttcccatca

SEQ ID NO: 1072530 - DNA, 25 bp, Homo sapien
ctccactaatgtagatgtcagagat

SEQ ID NO: 1072531 - DNA, 25 bp, Homo sapien
tcccctgattctccactaatgtaga

SEQ ID NO: 1072532 - DNA, 25 bp, Homo sapien
agcaaggcacatgaaacgccaccat

SEQ ID NO: 1072533 - DNA, 25 bp, Homo sapien
ctgtaaaagtccagcaaggcacatg

SEQ ID NO: 1072534 - DNA, 25 bp, Homo sapien
aaagtccagcaaggcacatgaaacg

SEQ ID NO: 1072535 - DNA, 25 bp, Homo sapien
gtccagcaaggcacatgaaacgcca

SEQ ID NO: 1072536 - DNA, 25 bp, Homo sapien
agcaggcgagtgacccccagtcttt

SEQ ID NO: 1072537 - DNA, 25 bp, Homo sapien
tgttccagattctctcggttacttt

SEQ ID NO: 1072538 - DNA, 25 bp, Homo sapien
gattctctcggttactttggatttg

SEQ ID NO: 1072539 - DNA, 25 bp, Homo sapien
tctctcggttactttggatttgcac

SEQ ID NO: 1072540 - DNA, 25 bp, Homo sapien
tcaggaactttagggaaggcatcat

SEQ ID NO: 1072541 - DNA, 25 bp, Homo sapien
cacataagtgattacagacttttca

SEQ ID NO: 1072542 - DNA, 25 bp, Homo sapien
gcatcataaatcgaagacacataag

SEQ ID NO: 1072543 - DNA, 25 bp, Homo sapien
tcatctggagatggcacatccacat

SEQ ID NO: 1072544 - DNA, 25 bp, Homo sapien
tagcttcaaagctcctcaagggctc

SEQ ID NO: 1072545 - DNA, 25 bp, Homo sapien
caatttcctgacactaagaaaggct

SEQ ID NO: 1072546 - DNA, 25 bp, Homo sapien
tctgaaaagagccatgatctaccta

SEQ ID NO: 1072547 - DNA, 25 bp, Homo sapien
caagcacaagagaaagtagctcagg

SEQ ID NO: 1072548 - DNA, 25 bp, Homo sapien
gtattgtatgctgtttgatccaggg

SEQ ID NO: 1072549 - DNA, 25 bp, Homo sapien
atgctgtttgatccagggaatgagg

SEQ ID NO: 1072550 - DNA, 25 bp, Homo sapien
tgtatgctgtttgatccagggaatg

SEQ ID NO: 1072551 - DNA, 25 bp, Homo sapien
gtccactcggctttggtattcttgc

SEQ ID NO: 1072552 - DNA, 25 bp, Homo sapien
ggacccaatttttcataccacctca

SEQ ID NO: 1072553 - DNA, 25 bp, Homo sapien
gcttggagacttactccctagaaag

SEQ ID NO: 1072554 - DNA, 25 bp, Homo sapien
cacctcacctagaagccagcagtga

SEQ ID NO: 1072555 - DNA, 25 bp, Homo sapien
cagtgataagcttggagacttactc

SEQ ID NO: 1072556 - DNA, 25 bp, Homo sapien
ctttgaagtgtatatattggttata

SEQ ID NO: 1072557 - DNA, 25 bp, Homo sapien
agtgtatatattggttataaagtgc

SEQ ID NO: 1072558 - DNA, 25 bp, Homo sapien
ttctttgaagtgtatatattggtta

SEQ ID NO: 1072559 - DNA, 25 bp, Homo sapien
tgaagtgtatatattggttataaag

SEQ ID NO: 1072560 - DNA, 25 bp, Homo sapien
ccttgaggcagtttaattcggccaa

SEQ ID NO: 1072561 - DNA, 25 bp, Homo sapien
cacagccggccgaagtgatttctct

SEQ ID NO: 1072562 - DNA, 25 bp, Homo sapien
tcttccacatcattagggtgataac

SEQ ID NO: 1072563 - DNA, 25 bp, Homo sapien
gcatctctatgatgagctttcccca

SEQ ID NO: 1072564 - DNA, 25 bp, Homo sapien
gcctgcagtgtattcttagctagtg

SEQ ID NO: 1072565 - DNA, 25 bp, Homo sapien
ggattttgtttgcaatctgtagcag

SEQ ID NO: 1072566 - DNA, 25 bp, Homo sapien
cttcacagttcaaagcaccattctg

SEQ ID NO: 1072567 - DNA, 25 bp, Homo sapien
cagttcaaagcaccattctggattt

SEQ ID NO: 1072568 - DNA, 25 bp, Homo sapien
tctggattcctcgattgctaacttc

SEQ ID NO: 1072569 - DNA, 25 bp, Homo sapien
gacagagggagccaagaagtctact

SEQ ID NO: 1072570 - DNA, 25 bp, Homo sapien
gacacagatgttggacaaaacagtc

SEQ ID NO: 1072571 - DNA, 25 bp, Homo sapien
gaagcaggaaacatgtgacacagat

SEQ ID NO: 1072572 - DNA, 25 bp, Homo sapien
gacatctgactcacattgtaccggt

SEQ ID NO: 1072573 - DNA, 25 bp, Homo sapien
tcatcccgcaggatctggagatcca

SEQ ID NO: 1072574 - DNA, 25 bp, Homo sapien
cagctgcctgatgagaccttcacac

SEQ ID NO: 1072575 - DNA, 25 bp, Homo sapien
ctcttctagctggtagtaattctca

SEQ ID NO: 1072576 - DNA, 25 bp, Homo sapien
cataggctttcggaaccaggaggta

SEQ ID NO: 1072577 - DNA, 25 bp, Homo sapien
gaccagctcatcctgaagacgcatg

SEQ ID NO: 1072578 - DNA, 25 bp, Homo sapien
tacaggtttgtacactctagacgca

SEQ ID NO: 1072579 - DNA, 25 bp, Homo sapien
cagtagttcatacacaaatcggaga

SEQ ID NO: 1072580 - DNA, 25 bp, Homo sapien
cataagcttttggatatgcacccac

SEQ ID NO: 1072581 - DNA, 25 bp, Homo sapien
actgcataagcttttggatatgcac

SEQ ID NO: 1072582 - DNA, 25 bp, Homo sapien
tgcataagcttttggatatgcaccc

SEQ ID NO: 1072583 - DNA, 25 bp, Homo sapien
gtactgcataagcttttggatatgc

SEQ ID NO: 1072584 - DNA, 25 bp, Homo sapien
actaggcaggtcattgccccactct

SEQ ID NO: 1072585 - DNA, 25 bp, Homo sapien
tacactcgtatggatgtgctgctgt

SEQ ID NO: 1072586 - DNA, 25 bp, Homo sapien
atacaacctggcctccttgacactt

SEQ ID NO: 1072587 - DNA, 25 bp, Homo sapien
ctagctgcaactccacactaggcag

SEQ ID NO: 1072588 - DNA, 25 bp, Homo sapien
gagtttcagcatagctggtatggaa

SEQ ID NO: 1072589 - DNA, 25 bp, Homo sapien
tccaagagtttcagcatagctggta

SEQ ID NO: 1072590 - DNA, 25 bp, Homo sapien
ttccaagagtttcagcatagctggt

SEQ ID NO: 1072591 - DNA, 25 bp, Homo sapien
caagagtttcagcatagctggtatg

SEQ ID NO: 1072592 - DNA, 25 bp, Homo sapien
tcaaccagatcaactcagctgtagc

SEQ ID NO: 1072593 - DNA, 25 bp, Homo sapien
tctgaaggtgcctcatccggaagct

SEQ ID NO: 1072594 - DNA, 25 bp, Homo sapien
ggaaacaaatttatgcaggctctga

SEQ ID NO: 1072595 - DNA, 25 bp, Homo sapien
gatattggaattgttgtcactccag

SEQ ID NO: 1072596 - DNA, 25 bp, Homo sapien
aaagtagttctgctgtatcttgtag

SEQ ID NO: 1072597 - DNA, 25 bp, Homo sapien
tgtagagaacgaaacacatcctgtt

SEQ ID NO: 1072598 - DNA, 25 bp, Homo sapien
gtatcttgtagagaacgaaacacat

SEQ ID NO: 1072599 - DNA, 25 bp, Homo sapien
gtagttctgctgtatcttgtagaga

SEQ ID NO: 1072600 - DNA, 25 bp, Homo sapien
ctgaaaataagcagtattctctttc

SEQ ID NO: 1072601 - DNA, 25 bp, Homo sapien
agctgcttcatccactgcaactggg

SEQ ID NO: 1072602 - DNA, 25 bp, Homo sapien
tctctttcacatgctgctcaacaca

SEQ ID NO: 1072603 - DNA, 25 bp, Homo sapien
tgggactggacagcagcactgtaag

SEQ ID NO: 1072604 - DNA, 25 bp, Homo sapien
gattacaccctactgcattagtgac

SEQ ID NO: 1072605 - DNA, 25 bp, Homo sapien
gagcttagcaaagctgattacaccc

SEQ ID NO: 1072606 - DNA, 25 bp, Homo sapien
tgctcaaaacattagaacaccggaa

SEQ ID NO: 1072607 - DNA, 25 bp, Homo sapien
tagaacaccggaatattaactaaga

SEQ ID NO: 1072608 - DNA, 25 bp, Homo sapien
gcaggtcttcaaggcgggataagct

SEQ ID NO: 1072609 - DNA, 25 bp, Homo sapien
cacaggaatattttcgtttaatgga

SEQ ID NO: 1072610 - DNA, 25 bp, Homo sapien
tccagctctcgtgcatcactgaaga

SEQ ID NO: 1072611 - DNA, 25 bp, Homo sapien
aatggaatcttggaggttcctcaag

SEQ ID NO: 1072612 - DNA, 25 bp, Homo sapien
gtaatcatccccactgaggcaacac

SEQ ID NO: 1072613 - DNA, 25 bp, Homo sapien
agaagtaatcatccccactgaggca

SEQ ID NO: 1072614 - DNA, 25 bp, Homo sapien
tctctttctcagaagtaatcatccc

SEQ ID NO: 1072615 - DNA, 25 bp, Homo sapien
tcagaagtaatcatccccactgagg

SEQ ID NO: 1072616 - DNA, 25 bp, Homo sapien
aacaatggcccattgccctggagct

SEQ ID NO: 1072617 - DNA, 25 bp, Homo sapien
gagacagaacaacatcgattaaact

SEQ ID NO: 1072618 - DNA, 25 bp, Homo sapien
gctcagaggagaagactaggccttt

SEQ ID NO: 1072619 - DNA, 25 bp, Homo sapien
taagccaaactttattacaacaatg

SEQ ID NO: 1072620 - DNA, 25 bp, Homo sapien
ccttggctccaactattacattaaa

SEQ ID NO: 1072621 - DNA, 25 bp, Homo sapien
tttcttcatgctcaacacctcatcc

SEQ ID NO: 1072622 - DNA, 25 bp, Homo sapien
tcatccttggctccaactattacat

SEQ ID NO: 1072623 - DNA, 25 bp, Homo sapien
ttcttcatgctcaacacctcatcct

SEQ ID NO: 1072624 - DNA, 25 bp, Homo sapien
gagattccccttacttctcacaaag

SEQ ID NO: 1072625 - DNA, 25 bp, Homo sapien
ttttctattgaaatgcgagattccc

SEQ ID NO: 1072626 - DNA, 25 bp, Homo sapien
tttgagatgtagcttgagccttgtc

SEQ ID NO: 1072627 - DNA, 25 bp, Homo sapien
gaaaagtaagttccctattgcatat

SEQ ID NO: 1072628 - DNA, 25 bp, Homo sapien
tgacgccgccaacccgatgaccctg

SEQ ID NO: 1072629 - DNA, 25 bp, Homo sapien
gtgactccatgccccgatgacgccg

SEQ ID NO: 1072630 - DNA, 25 bp, Homo sapien
atgccccgatgacgccgccaacccg

SEQ ID NO: 1072631 - DNA, 25 bp, Homo sapien
cgatgacgccgccaacccgatgacc

SEQ ID NO: 1072632 - DNA, 25 bp, Homo sapien
catgacaaatgatttagggtttacc

SEQ ID NO: 1072633 - DNA, 25 bp, Homo sapien
gattggttagaaagaagtatcatgc

SEQ ID NO: 1072634 - DNA, 25 bp, Homo sapien
gagaaagatcttagctcttcaacca

SEQ ID NO: 1072635 - DNA, 25 bp, Homo sapien
aattgagtcaagctttctagagaaa

SEQ ID NO: 1072636 - DNA, 25 bp, Homo sapien
aataggtatattattattagtcaat

SEQ ID NO: 1072637 - DNA, 25 bp, Homo sapien
taataggtatattattattagtcaa

SEQ ID NO: 1072638 - DNA, 25 bp, Homo sapien
gactggcaacggaactcttggactg

SEQ ID NO: 1072639 - DNA, 25 bp, Homo sapien
tagctgaacgatggtttttgatctc

SEQ ID NO: 1072640 - DNA, 25 bp, Homo sapien
tcacagacagccttgacagaaatgg

SEQ ID NO: 1072641 - DNA, 25 bp, Homo sapien
ttaacacatggtctggactgcgtgg

SEQ ID NO: 1072642 - DNA, 25 bp, Homo sapien
gaagagataaatttaccagtgattg

SEQ ID NO: 1072643 - DNA, 25 bp, Homo sapien
tgaagagataaatttaccagtgatt

SEQ ID NO: 1072644 - DNA, 25 bp, Homo sapien
ctgaagagataaatttaccagtgat

SEQ ID NO: 1072645 - DNA, 25 bp, Homo sapien
ccgctgagaattatcttctagcaca

SEQ ID NO: 1072646 - DNA, 25 bp, Homo sapien
tctcaatggcatccttattgggtgg

SEQ ID NO: 1072647 - DNA, 25 bp, Homo sapien
cactttccatttggtccgctgagaa

SEQ ID NO: 1072648 - DNA, 25 bp, Homo sapien
ggaagcagactgacggcaccattgc

SEQ ID NO: 1072649 - DNA, 25 bp, Homo sapien
aaccttctgataagattgttcgacc

SEQ ID NO: 1072650 - DNA, 25 bp, Homo sapien
gcagatagttccaagagataaggct

SEQ ID NO: 1072651 - DNA, 25 bp, Homo sapien
ccaggtctgtacaaggtcaaggtct

SEQ ID NO: 1072652 - DNA, 25 bp, Homo sapien
cttttctaggttccaggtctgtaca

SEQ ID NO: 1072653 - DNA, 25 bp, Homo sapien
cagaaagtcttcatagtgggcctga

SEQ ID NO: 1072654 - DNA, 25 bp, Homo sapien
ggttcttcataatctgatggcactc

SEQ ID NO: 1072655 - DNA, 25 bp, Homo sapien
tctgatggcactcccctggtgctga

SEQ ID NO: 1072656 - DNA, 25 bp, Homo sapien
gaaagtcttcatagtgggcctgaag

SEQ ID NO: 1072657 - DNA, 25 bp, Homo sapien
caagcgatcagccactgagaacagc

SEQ ID NO: 1072658 - DNA, 25 bp, Homo sapien
tcttccaagcgcaagcgatcagcca

SEQ ID NO: 1072659 - DNA, 25 bp, Homo sapien
gaagcgggctttacaagcttccacc

SEQ ID NO: 1072660 - DNA, 25 bp, Homo sapien
ctggaagcgggctttacaagcttcc

SEQ ID NO: 1072661 - DNA, 25 bp, Homo sapien
tgaattcgtttgaccaccctctgtt

SEQ ID NO: 1072662 - DNA, 25 bp, Homo sapien
tcctccaggcgtagccggatgttct

SEQ ID NO: 1072663 - DNA, 25 bp, Homo sapien
ccttaatgcattgtcctgccaggca

SEQ ID NO: 1072664 - DNA, 25 bp, Homo sapien
tctgtcagtcctagagctggctaga

SEQ ID NO: 1072665 - DNA, 25 bp, Homo sapien
gggacacttgaactagatggagact

SEQ ID NO: 1072666 - DNA, 25 bp, Homo sapien
gatatacagtagagagaccatagac

SEQ ID NO: 1072667 - DNA, 25 bp, Homo sapien
caagtctgacctcaattgctgtaaa

SEQ ID NO: 1072668 - DNA, 25 bp, Homo sapien
tctgagcgcagagttgggacacttg

SEQ ID NO: 1072669 - DNA, 25 bp, Homo sapien
gctgagagatctgccagtactactt

SEQ ID NO: 1072670 - DNA, 25 bp, Homo sapien
gaccaagagttcagcatcctgtatg

SEQ ID NO: 1072671 - DNA, 25 bp, Homo sapien
tgctacgtactataacatcaactgt

SEQ ID NO: 1072672 - DNA, 25 bp, Homo sapien
taatgtcgaccaatgggcctccaga

SEQ ID NO: 1072673 - DNA, 25 bp, Homo sapien
cagatttcgctctggtgtcagacga

SEQ ID NO: 1072674 - DNA, 25 bp, Homo sapien
cactaccttggccttggcaatttcc

SEQ ID NO: 1072675 - DNA, 25 bp, Homo sapien
gcctttttcctgatagcgctccaaa

SEQ ID NO: 1072676 - DNA, 25 bp, Homo sapien
tgggcaatgactcggtgccaacgct

SEQ ID NO: 1072677 - DNA, 25 bp, Homo sapien
tgctgggcagtggtttcctcaatcc

SEQ ID NO: 1072678 - DNA, 25 bp, Homo sapien
gcaggctcggtaatctcccagaact

SEQ ID NO: 1072679 - DNA, 25 bp, Homo sapien
cctggatactttctagctcagattg

SEQ ID NO: 1072680 - DNA, 25 bp, Homo sapien
aatccacttgatgagagttccatgg

SEQ ID NO: 1072681 - DNA, 25 bp, Homo sapien
ggaatccaggcaatacaactccaga

SEQ ID NO: 1072682 - DNA, 25 bp, Homo sapien
tcagaactgaaggtaccttacaggt

SEQ ID NO: 1072683 - DNA, 25 bp, Homo sapien
tctctagtctaaatgcaaaaccagt

SEQ ID NO: 1072684 - DNA, 25 bp, Homo sapien
cagtatcttgggacgatcctgctca

SEQ ID NO: 1072685 - DNA, 25 bp, Homo sapien
tacaatagtagagtactgctgggaa

SEQ ID NO: 1072686 - DNA, 25 bp, Homo sapien
gggaaaatttttgacattgatccag

SEQ ID NO: 1072687 - DNA, 25 bp, Homo sapien
ttgacattgatccagttttgtctga

SEQ ID NO: 1072688 - DNA, 25 bp, Homo sapien
caatagtagagtactgctgggaaaa

SEQ ID NO: 1072689 - DNA, 25 bp, Homo sapien
gagctggtgatgattcatgttcttt

SEQ ID NO: 1072690 - DNA, 25 bp, Homo sapien
ctgagctggtgatgattcatgttct

SEQ ID NO: 1072691 - DNA, 25 bp, Homo sapien
ttttcctgagctggtgatgattcat

SEQ ID NO: 1072692 - DNA, 25 bp, Homo sapien
ctggtgatgattcatgttctttttg

SEQ ID NO: 1072693 - DNA, 25 bp, Homo sapien
aagggcctacggtcacgcaaatgga

SEQ ID NO: 1072694 - DNA, 25 bp, Homo sapien
tcaaatcacagccaacgtctgctac

SEQ ID NO: 1072695 - DNA, 25 bp, Homo sapien
tgcttaactgaaggatcaggccagc

SEQ ID NO: 1072696 - DNA, 25 bp, Homo sapien
tggccatactatttcctgagatagg

SEQ ID NO: 1072697 - DNA, 25 bp, Homo sapien
catgtcacataactggcagagtttc

SEQ ID NO: 1072698 - DNA, 25 bp, Homo sapien
cgactatgatatgaagccattggac

SEQ ID NO: 1072699 - DNA, 25 bp, Homo sapien
gggagagctaaatcattcacggcct

SEQ ID NO: 1072700 - DNA, 25 bp, Homo sapien
cttctgggatcaagtaaccctcttg

SEQ ID NO: 1072701 - DNA, 25 bp, Homo sapien
cacaaaggccttgtatgtcatcagt

SEQ ID NO: 1072702 - DNA, 25 bp, Homo sapien
atgtcatcagttgcaattcatagtc

SEQ ID NO: 1072703 - DNA, 25 bp, Homo sapien
tttctgctgcgattccacaaaggcc

SEQ ID NO: 1072704 - DNA, 25 bp, Homo sapien
aagaggaaagcatgcgacggcgctt

SEQ ID NO: 1072705 - DNA, 25 bp, Homo sapien
cagacgccggagtgcatcactgatg

SEQ ID NO: 1072706 - DNA, 25 bp, Homo sapien
ccgtgtagcgagtccttaagtccat

SEQ ID NO: 1072707 - DNA, 25 bp, Homo sapien
ctgatgtatttcacgtgctgagttg

SEQ ID NO: 1072708 - DNA, 25 bp, Homo sapien
tgagttgttaaagtcaccaatgccg

SEQ ID NO: 1072709 - DNA, 25 bp, Homo sapien
atgactttggacccaactgtcctca

SEQ ID NO: 1072710 - DNA, 25 bp, Homo sapien
tgactttggacccaactgtcctcac

SEQ ID NO: 1072711 - DNA, 25 bp, Homo sapien
ctagggtagacacccagcccaaaag

SEQ ID NO: 1072712 - DNA, 25 bp, Homo sapien
tctttggtctcggatgaggtagctt

SEQ ID NO: 1072713 - DNA, 25 bp, Homo sapien
tttccttgtgtattcctcgctaggg

SEQ ID NO: 1072714 - DNA, 25 bp, Homo sapien
tcggatgaggtagcttttccttgtg

SEQ ID NO: 1072715 - DNA, 25 bp, Homo sapien
gccaagaagatctgtgatgttttaa

SEQ ID NO: 1072716 - DNA, 25 bp, Homo sapien
tttaatagcttcagagacttgttct

SEQ ID NO: 1072717 - DNA, 25 bp, Homo sapien
ttatgaccatgcttggccaagaaga

SEQ ID NO: 1072718 - DNA, 25 bp, Homo sapien
ttgttgtcagctcttctgacagaac

SEQ ID NO: 1072719 - DNA, 25 bp, Homo sapien
tgaggcttccttaacaggctgagaa

SEQ ID NO: 1072720 - DNA, 25 bp, Homo sapien
ggtttccaatctcaactgggtcaca

SEQ ID NO: 1072721 - DNA, 25 bp, Homo sapien
tacactaaggctgctaggtaaatcc

SEQ ID NO: 1072722 - DNA, 25 bp, Homo sapien
aaagagcagttctgtttcgccttgc

SEQ ID NO: 1072723 - DNA, 25 bp, Homo sapien
tcatggtaagccttgtttagggcat

SEQ ID NO: 1072724 - DNA, 25 bp, Homo sapien
tggtgagccaactggctctgaagct

SEQ ID NO: 1072725 - DNA, 25 bp, Homo sapien
tagggcattcaattgctcagatatt

SEQ ID NO: 1072726 - DNA, 25 bp, Homo sapien
tttgcagaaccatcacaaaggtcat

SEQ ID NO: 1072727 - DNA, 25 bp, Homo sapien
ccttatatggtgaagcaacaagcca

SEQ ID NO: 1072728 - DNA, 25 bp, Homo sapien
ctatcacgtgagcttaattttggcc

SEQ ID NO: 1072729 - DNA, 25 bp, Homo sapien
gccactggaagtgggctaccttaaa

SEQ ID NO: 1072730 - DNA, 25 bp, Homo sapien
gaaatacaccatcaaatcatagctg

SEQ ID NO: 1072731 - DNA, 25 bp, Homo sapien
tcattaagccatttcccctcaggtg

SEQ ID NO: 1072732 - DNA, 25 bp, Homo sapien
ggtctaggaacagtagctgtcattt

SEQ ID NO: 1072733 - DNA, 25 bp, Homo sapien
aagagctgatccattgtccatgaag

SEQ ID NO: 1072734 - DNA, 25 bp, Homo sapien
tctgtccctctttggtcagtgctac

SEQ ID NO: 1072735 - DNA, 25 bp, Homo sapien
aagaaaaagaaaactgaatcagagc

SEQ ID NO: 1072736 - DNA, 25 bp, Homo sapien
gaagaaaaagaaaactgaatcagag

SEQ ID NO: 1072737 - DNA, 25 bp, Homo sapien
agaaaaagaaaactgaatcagagcc

SEQ ID NO: 1072738 - DNA, 25 bp, Homo sapien
agaagaaaaagaaaactgaatcaga

SEQ ID NO: 1072739 - DNA, 25 bp, Homo sapien
tctccactgtgcctaggtcaatcac

SEQ ID NO: 1072740 - DNA, 25 bp, Homo sapien
gaaatatctccactgtgcctaggtc

SEQ ID NO: 1072741 - DNA, 25 bp, Homo sapien
agatgggaaatatctccactgtgcc

SEQ ID NO: 1072742 - DNA, 25 bp, Homo sapien
ttgaagatgggaaatatctccactg

SEQ ID NO: 1072743 - DNA, 25 bp, Homo sapien
gtcttggtcaaggaggcccttttgc

SEQ ID NO: 1072744 - DNA, 25 bp, Homo sapien
tgtgtcttggtcaaggaggcccttt

SEQ ID NO: 1072745 - DNA, 25 bp, Homo sapien
gcctgtgtcttggtcaaggaggccc

SEQ ID NO: 1072746 - DNA, 25 bp, Homo sapien
cagaagcactaggcctgtgtcttgg

SEQ ID NO: 1072747 - DNA, 25 bp, Homo sapien
aatgaggtttctggctatgccctcc

SEQ ID NO: 1072748 - DNA, 25 bp, Homo sapien
gattaatgaggtttctggctatgcc

SEQ ID NO: 1072749 - DNA, 25 bp, Homo sapien
gggattaatgaggtttctggctatg

SEQ ID NO: 1072750 - DNA, 25 bp, Homo sapien
attaatgaggtttctggctatgccc

SEQ ID NO: 1072751 - DNA, 25 bp, Homo sapien
tattagcccttcctgaactgcacgg

SEQ ID NO: 1072752 - DNA, 25 bp, Homo sapien
tcctggtggacaatacatcgctgca

SEQ ID NO: 1072753 - DNA, 25 bp, Homo sapien
gaaaatgctaaccttccggcctgat

SEQ ID NO: 1072754 - DNA, 25 bp, Homo sapien
tgcttccaccacagaaagagggcct

SEQ ID NO: 1072755 - DNA, 25 bp, Homo sapien
gctgattcttgcaatccctcaggag

SEQ ID NO: 1072756 - DNA, 25 bp, Homo sapien
tgtagtgcaatcttcccgatcggga

SEQ ID NO: 1072757 - DNA, 25 bp, Homo sapien
gccttagggtggctcttgctgcacg

SEQ ID NO: 1072758 - DNA, 25 bp, Homo sapien
gctgcacggtagaactgctgctcca

SEQ ID NO: 1072759 - DNA, 25 bp, Homo sapien
caattctaatggatgactgcatgac

SEQ ID NO: 1072760 - DNA, 25 bp, Homo sapien
tccgcctcagcaggaggtatggtca

SEQ ID NO: 1072761 - DNA, 25 bp, Homo sapien
acatctttgtcaaccaccaacggca

SEQ ID NO: 1072762 - DNA, 25 bp, Homo sapien
tgacatcatcatactaccacctgcg

SEQ ID NO: 1072763 - DNA, 25 bp, Homo sapien
ctgtgcagataatacatttaaggta

SEQ ID NO: 1072764 - DNA, 25 bp, Homo sapien
gtgcagataatacatttaaggtagc

SEQ ID NO: 1072765 - DNA, 25 bp, Homo sapien
gcagataatacatttaaggtagctt

SEQ ID NO: 1072766 - DNA, 25 bp, Homo sapien
tgcagataatacatttaaggtagct

SEQ ID NO: 1072767 - DNA, 25 bp, Homo sapien
tctccataagcttcacggcagtgtg

SEQ ID NO: 1072768 - DNA, 25 bp, Homo sapien
tgtgacttggcacaatgcctcggga

SEQ ID NO: 1072769 - DNA, 25 bp, Homo sapien
tgcttagtcaacaaacgaacggcct

SEQ ID NO: 1072770 - DNA, 25 bp, Homo sapien
taaaggtgctttactatcagggtct

SEQ ID NO: 1072771 - DNA, 25 bp, Homo sapien
tacaatgccatgcatcattcctgga

SEQ ID NO: 1072772 - DNA, 25 bp, Homo sapien
tagcttctgccaaggtcaatctctg

SEQ ID NO: 1072773 - DNA, 25 bp, Homo sapien
tgcttcattagttaacagtccttct

SEQ ID NO: 1072774 - DNA, 25 bp, Homo sapien
cagtaaaggcctgaacctcctggat

SEQ ID NO: 1072775 - DNA, 25 bp, Homo sapien
tgggcttctagaaccttcagcgtag

SEQ ID NO: 1072776 - DNA, 25 bp, Homo sapien
cctgtgatcgctgaactctgaacta

SEQ ID NO: 1072777 - DNA, 25 bp, Homo sapien
gggacaattctgcagttctcgggat

SEQ ID NO: 1072778 - DNA, 25 bp, Homo sapien
gatcatatttgccagttcagggctg

SEQ ID NO: 1072779 - DNA, 25 bp, Homo sapien
gcttctagacctgcaacattagggt

SEQ ID NO: 1072780 - DNA, 25 bp, Homo sapien
ggcttacgttgatccttgcacccaa

SEQ ID NO: 1072781 - DNA, 25 bp, Homo sapien
gtgtcaatgacacttggcccaagga

SEQ ID NO: 1072782 - DNA, 25 bp, Homo sapien
cactgcagagcatactgttagggac

SEQ ID NO: 1072783 - DNA, 25 bp, Homo sapien
tagctccaaaggttgaatctgtttg

SEQ ID NO: 1072784 - DNA, 25 bp, Homo sapien
taacagagacagataggatactagc

SEQ ID NO: 1072785 - DNA, 25 bp, Homo sapien
gtcctcatttcaatgttccgtaaca

SEQ ID NO: 1072786 - DNA, 25 bp, Homo sapien
taaacagagttgccgggtaaataca

SEQ ID NO: 1072787 - DNA, 25 bp, Homo sapien
tggtcaaaccatagcgggagcaagg

SEQ ID NO: 1072788 - DNA, 25 bp, Homo sapien
gatgctgaagtggagtgtaatgccc

SEQ ID NO: 1072789 - DNA, 25 bp, Homo sapien
catccagcctttcgttagagcacag

SEQ ID NO: 1072790 - DNA, 25 bp, Homo sapien
gctgggccatacagttgggaaacca

SEQ ID NO: 1072791 - DNA, 25 bp, Homo sapien
tagagccttcaacagttgagcagga

SEQ ID NO: 1072792 - DNA, 25 bp, Homo sapien
tcttgaggctggctgatgataatct

SEQ ID NO: 1072793 - DNA, 25 bp, Homo sapien
agctcctgactgaccaaggtggtca

SEQ ID NO: 1072794 - DNA, 25 bp, Homo sapien
gataatctgattcacacactccagc

SEQ ID NO: 1072795 - DNA, 25 bp, Homo sapien
cttttctatttccacagcattctgg

SEQ ID NO: 1072796 - DNA, 25 bp, Homo sapien
attctggaagtggagtagcctggaa

SEQ ID NO: 1072797 - DNA, 25 bp, Homo sapien
tctggaagtggagtagcctggaatt

SEQ ID NO: 1072798 - DNA, 25 bp, Homo sapien
cacagcattctggaagtggagtagc

SEQ ID NO: 1072799 - DNA, 25 bp, Homo sapien
gctgtgtgtgctgatttaacacttt

SEQ ID NO: 1072800 - DNA, 25 bp, Homo sapien
tgaagtcggccttctagctgtgtgt

SEQ ID NO: 1072801 - DNA, 25 bp, Homo sapien
ctctcagatcttgaagtcggccttc

SEQ ID NO: 1072802 - DNA, 25 bp, Homo sapien
gaggttcaggctgtcaacatctatt

SEQ ID NO: 1072803 - DNA, 25 bp, Homo sapien
agccaccacgcctggccctaaaact

SEQ ID NO: 1072804 - DNA, 25 bp, Homo sapien
ctcctgaacttcaggtgatcctccc

SEQ ID NO: 1072805 - DNA, 25 bp, Homo sapien
gtgttgggatttataggcatgagcc

SEQ ID NO: 1072806 - DNA, 25 bp, Homo sapien
gccttcgcctcccaaagtgttggga

SEQ ID NO: 1072807 - DNA, 25 bp, Homo sapien
gaaggacctctgcagttcattcaga

SEQ ID NO: 1072808 - DNA, 25 bp, Homo sapien
ccacctgagcggcagtctgttccaa

SEQ ID NO: 1072809 - DNA, 25 bp, Homo sapien
aagcctcagcatctgtcgattctgc

SEQ ID NO: 1072810 - DNA, 25 bp, Homo sapien
ctgggcatgttctgagataaagaac

SEQ ID NO: 1072811 - DNA, 25 bp, Homo sapien
gcctgtcctacccaactgcaaagat

SEQ ID NO: 1072812 - DNA, 25 bp, Homo sapien
gcaaagcagagagatcctgctgggt

SEQ ID NO: 1072813 - DNA, 25 bp, Homo sapien
tgcaaagatcctccagttgctggtg

SEQ ID NO: 1072814 - DNA, 25 bp, Homo sapien
ttcaagtcactttggttcttctgca

SEQ ID NO: 1072815 - DNA, 25 bp, Homo sapien
gaatggctaggatgacatatagtcc

SEQ ID NO: 1072816 - DNA, 25 bp, Homo sapien
gagccttcgactttagtgcttctaa

SEQ ID NO: 1072817 - DNA, 25 bp, Homo sapien
tatagtcctgtatatagtccctaac

SEQ ID NO: 1072818 - DNA, 25 bp, Homo sapien
aggaggttgtccataaacatgaaca

SEQ ID NO: 1072819 - DNA, 25 bp, Homo sapien
caatgtccttgacaacagtggcaaa

SEQ ID NO: 1072820 - DNA, 25 bp, Homo sapien
tgctgtaaggcggaggtcactgctt

SEQ ID NO: 1072821 - DNA, 25 bp, Homo sapien
tgggccacacgtgtctcttcctgga

SEQ ID NO: 1072822 - DNA, 25 bp, Homo sapien
gaagagctgtcaactcacgtgggct

SEQ ID NO: 1072823 - DNA, 25 bp, Homo sapien
ggaaggttggtcagcagctgtccac

SEQ ID NO: 1072824 - DNA, 25 bp, Homo sapien
gctgtccaccagatgatcctactga

SEQ ID NO: 1072825 - DNA, 25 bp, Homo sapien
tgaagttacccaatccaggagagca

SEQ ID NO: 1072826 - DNA, 25 bp, Homo sapien
taaccatcagtggtgtccaaggctc

SEQ ID NO: 1072827 - DNA, 25 bp, Homo sapien
ctgggacagcaattcttggtgacgg

SEQ ID NO: 1072828 - DNA, 25 bp, Homo sapien
ccagctctttctcggatcgttccaa

SEQ ID NO: 1072829 - DNA, 25 bp, Homo sapien
catgtccaagactttctgtcctgag

SEQ ID NO: 1072830 - DNA, 25 bp, Homo sapien
gagaagcttccttgccgctttagca

SEQ ID NO: 1072831 - DNA, 25 bp, Homo sapien
gctgatccaagaaggcctgagctga

SEQ ID NO: 1072832 - DNA, 25 bp, Homo sapien
taacagcatattcaggtgagatcct

SEQ ID NO: 1072833 - DNA, 25 bp, Homo sapien
attgatgatactggcctaacagcat

SEQ ID NO: 1072834 - DNA, 25 bp, Homo sapien
tcaggtgagatcctaatcgtgtaca

SEQ ID NO: 1072835 - DNA, 25 bp, Homo sapien
cagggtcagaggcaacagtatctga

SEQ ID NO: 1072836 - DNA, 25 bp, Homo sapien
aatttccattatgtcacgagctact

SEQ ID NO: 1072837 - DNA, 25 bp, Homo sapien
tatgtcacgagctactttttggagt

SEQ ID NO: 1072838 - DNA, 25 bp, Homo sapien
tgctcagccaattcctcctgcaact

SEQ ID NO: 1072839 - DNA, 25 bp, Homo sapien
tagtttcttgaacatgcctgtggtc

SEQ ID NO: 1072840 - DNA, 25 bp, Homo sapien
gaagcatgggcaagatttcaccacg

SEQ ID NO: 1072841 - DNA, 25 bp, Homo sapien
tagcctggcaccacagatatttgca

SEQ ID NO: 1072842 - DNA, 25 bp, Homo sapien
acgcccggcctgtatacgatatatt

SEQ ID NO: 1072843 - DNA, 25 bp, Homo sapien
tgaaggtccttcaatggtgcaagaa

SEQ ID NO: 1072844 - DNA, 25 bp, Homo sapien
ctgcagcagagaagatcgctcagcc

SEQ ID NO: 1072845 - DNA, 25 bp, Homo sapien
ccaggctataggagaggctttggaa

SEQ ID NO: 1072846 - DNA, 25 bp, Homo sapien
gagaagatcgctcagccaggctata

SEQ ID NO: 1072847 - DNA, 25 bp, Homo sapien
gatcgctcagccaggctataggaga

SEQ ID NO: 1072848 - DNA, 25 bp, Homo sapien
cttcctggatgactcctgatgagag

SEQ ID NO: 1072849 - DNA, 25 bp, Homo sapien
cctggacactctgagattgggcaat

SEQ ID NO: 1072850 - DNA, 25 bp, Homo sapien
gactcctgatgagagtgatgacacc

SEQ ID NO: 1072851 - DNA, 25 bp, Homo sapien
tccccaatagactgcaacaggctct

SEQ ID NO: 1072852 - DNA, 25 bp, Homo sapien
aatcgggtcaccatctcacgggtgg

SEQ ID NO: 1072853 - DNA, 25 bp, Homo sapien
gctcttttgccgagcaatgtcctgc

SEQ ID NO: 1072854 - DNA, 25 bp, Homo sapien
gtagacagagctgttcgaaccgctg

SEQ ID NO: 1072855 - DNA, 25 bp, Homo sapien
aggtgttcaaacatctctgcctggg

SEQ ID NO: 1072856 - DNA, 25 bp, Homo sapien
aaaattgtgtatatgatgaagatgg

SEQ ID NO: 1072857 - DNA, 25 bp, Homo sapien
gatacaggttggatatcctttatgc

SEQ ID NO: 1072858 - DNA, 25 bp, Homo sapien
cctttgagcatgacctcttgagtgt

SEQ ID NO: 1072859 - DNA, 25 bp, Homo sapien
agaaatagactcaaagacatataaa

SEQ ID NO: 1072860 - DNA, 25 bp, Homo sapien
cagctgggattacagtctcctgcca

SEQ ID NO: 1072861 - DNA, 25 bp, Homo sapien
gacagagttttactcctgtcatcca

SEQ ID NO: 1072862 - DNA, 25 bp, Homo sapien
agtacaatggcggtatcttggctca

SEQ ID NO: 1072863 - DNA, 25 bp, Homo sapien
ggctggagtacaatggcggtatctt

SEQ ID NO: 1072864 - DNA, 25 bp, Homo sapien
cagcgcaaagccacaagagctcagt

SEQ ID NO: 1072865 - DNA, 25 bp, Homo sapien
ggtgctcaagagtatctaggttctc

SEQ ID NO: 1072866 - DNA, 25 bp, Homo sapien
tcagttcagtgaccaggtgctcaag

SEQ ID NO: 1072867 - DNA, 25 bp, Homo sapien
ttagattctgtaccctgtcctgatg

SEQ ID NO: 1072868 - DNA, 25 bp, Homo sapien
actcatagaagtttccgtaggtgga

SEQ ID NO: 1072869 - DNA, 25 bp, Homo sapien
ctttcaaccatttctggaaggtcct

SEQ ID NO: 1072870 - DNA, 25 bp, Homo sapien
gaaggtcctgaccagcttccggaat

SEQ ID NO: 1072871 - DNA, 25 bp, Homo sapien
ggaattcatccaactgttcctggca

SEQ ID NO: 1072872 - DNA, 25 bp, Homo sapien
tgcgcctggccattaatcactcttg

SEQ ID NO: 1072873 - DNA, 25 bp, Homo sapien
tgaacaactactaagttgtttggac

SEQ ID NO: 1072874 - DNA, 25 bp, Homo sapien
ccacagtccccaaactatggcttta

SEQ ID NO: 1072875 - DNA, 25 bp, Homo sapien
attaatcactcttgattccaaagag

SEQ ID NO: 1072876 - DNA, 25 bp, Homo sapien
ggacatctgttctgtatatactccc

SEQ ID NO: 1072877 - DNA, 25 bp, Homo sapien
tactatatgactggcaccatgccaa

SEQ ID NO: 1072878 - DNA, 25 bp, Homo sapien
aaaatggccaaatgtagtatctggg

SEQ ID NO: 1072879 - DNA, 25 bp, Homo sapien
tatactccctagtgttttgaaaagc

SEQ ID NO: 1072880 - DNA, 25 bp, Homo sapien
cccttacttgcccagtcatctagta

SEQ ID NO: 1072881 - DNA, 25 bp, Homo sapien
tccaccagagttcccttacttgccc

SEQ ID NO: 1072882 - DNA, 25 bp, Homo sapien
tacttgcccagtcatctagtagact

SEQ ID NO: 1072883 - DNA, 25 bp, Homo sapien
aagaagtacctttgcaattgatttc

SEQ ID NO: 1072884 - DNA, 25 bp, Homo sapien
cttgccttgggaatcaggtgctgtg

SEQ ID NO: 1072885 - DNA, 25 bp, Homo sapien
ttgccttgggaatcaggtgctgtga

SEQ ID NO: 1072886 - DNA, 25 bp, Homo sapien
gggaagactgctttgggcatgccct

SEQ ID NO: 1072887 - DNA, 25 bp, Homo sapien
tccatcatgggaaggaattttgcaa

SEQ ID NO: 1072888 - DNA, 25 bp, Homo sapien
gccagtgcccaagtttaaagatgat

SEQ ID NO: 1072889 - DNA, 25 bp, Homo sapien
gagtgcatgcactgtcgtggctcaa

SEQ ID NO: 1072890 - DNA, 25 bp, Homo sapien
caggtgtggtatccgtttacactgc

SEQ ID NO: 1072891 - DNA, 25 bp, Homo sapien
tgcaggtgtggtatccgtttacact

SEQ ID NO: 1072892 - DNA, 25 bp, Homo sapien
ggtgtggtatccgtttacactgcct

SEQ ID NO: 1072893 - DNA, 25 bp, Homo sapien
ctttgcaggtgtggtatccgtttac

SEQ ID NO: 1072894 - DNA, 25 bp, Homo sapien
tgcagcacagagtttgcctccttgt

SEQ ID NO: 1072895 - DNA, 25 bp, Homo sapien
gcatccatggatttcaggacttcct

SEQ ID NO: 1072896 - DNA, 25 bp, Homo sapien
tctgacatgtcacactggatctccg

SEQ ID NO: 1072897 - DNA, 25 bp, Homo sapien
gaaggctttcctggcgttcatgaag

SEQ ID NO: 1072898 - DNA, 25 bp, Homo sapien
tcctgtgagttgggatatgtcacca

SEQ ID NO: 1072899 - DNA, 25 bp, Homo sapien
cctgtgagttgggatatgtcaccag

SEQ ID NO: 1072900 - DNA, 25 bp, Homo sapien
tgtgagttgggatatgtcaccagta

SEQ ID NO: 1072901 - DNA, 25 bp, Homo sapien
tgagttgggatatgtcaccagtaat

SEQ ID NO: 1072902 - DNA, 25 bp, Homo sapien
ctcagtggccctttcccatcgggaa

SEQ ID NO: 1072903 - DNA, 25 bp, Homo sapien
tcagtggccctttcccatcgggaat

SEQ ID NO: 1072904 - DNA, 25 bp, Homo sapien
ctagctgcctttgccgagccacagt

SEQ ID NO: 1072905 - DNA, 25 bp, Homo sapien
cctctagctgcctttgccgagccac

SEQ ID NO: 1072906 - DNA, 25 bp, Homo sapien
tctagctgcctttgccgagccacag

SEQ ID NO: 1072907 - DNA, 25 bp, Homo sapien
gctgcctttgccgagccacagtaac

SEQ ID NO: 1072908 - DNA, 25 bp, Homo sapien
tgcattcaacatgttggggtcaata

SEQ ID NO: 1072909 - DNA, 25 bp, Homo sapien
cattcaacatgttggggtcaataga

SEQ ID NO: 1072910 - DNA, 25 bp, Homo sapien
ttgtgcattcaacatgttggggtca

SEQ ID NO: 1072911 - DNA, 25 bp, Homo sapien
tggggtcaatagacaggggccccag

SEQ ID NO: 1072912 - DNA, 25 bp, Homo sapien
gcagttccttcaaaaagtactctta

SEQ ID NO: 1072913 - DNA, 25 bp, Homo sapien
tgcaggaactaaaagaagcagttcc

SEQ ID NO: 1072914 - DNA, 25 bp, Homo sapien
ctggatgcaggaactaaaagaagca

SEQ ID NO: 1072915 - DNA, 25 bp, Homo sapien
gatgcaggaactaaaagaagcagtt

SEQ ID NO: 1072916 - DNA, 25 bp, Homo sapien
catgctgttgcctgcgtgcttcaaa

SEQ ID NO: 1072917 - DNA, 25 bp, Homo sapien
tgtctgagcctccttaacctcgtgg

SEQ ID NO: 1072918 - DNA, 25 bp, Homo sapien
gcctgttaggatgccctgagctgcc

SEQ ID NO: 1072919 - DNA, 25 bp, Homo sapien
gagagttcatcgcacagtgtctgag

SEQ ID NO: 1072920 - DNA, 25 bp, Homo sapien
tagaagtcctctacacggcctagtg

SEQ ID NO: 1072921 - DNA, 25 bp, Homo sapien
gagactggactctagctgcactgga

SEQ ID NO: 1072922 - DNA, 25 bp, Homo sapien
gaatagccggacatcctcgatttgg

SEQ ID NO: 1072923 - DNA, 25 bp, Homo sapien
gcactattcaatatttccagcaggg

SEQ ID NO: 1072924 - DNA, 25 bp, Homo sapien
aacagatgtgctcctaacccagtaa

SEQ ID NO: 1072925 - DNA, 25 bp, Homo sapien
gataaataacgctggcaagcagggt

SEQ ID NO: 1072926 - DNA, 25 bp, Homo sapien
tatagtgagaaccaagatccaacag

SEQ ID NO: 1072927 - DNA, 25 bp, Homo sapien
tctattccatgtacagtggcagagt

SEQ ID NO: 1072928 - DNA, 25 bp, Homo sapien
ttctaaatagcctggatgcaagtaa

SEQ ID NO: 1072929 - DNA, 25 bp, Homo sapien
ggttaattctaaatagcctggatgc

SEQ ID NO: 1072930 - DNA, 25 bp, Homo sapien
ttggagcctaaagggataagtttca

SEQ ID NO: 1072931 - DNA, 25 bp, Homo sapien
gttagatggttaattctaaatagcc

SEQ ID NO: 1072932 - DNA, 25 bp, Homo sapien
tatactgagaccctgatcctgggct

SEQ ID NO: 1072933 - DNA, 25 bp, Homo sapien
tgatgctgcacctattagaacccag

SEQ ID NO: 1072934 - DNA, 25 bp, Homo sapien
ttcatagtaggatacctaggtcccc

SEQ ID NO: 1072935 - DNA, 25 bp, Homo sapien
tgggctctgctcaacctgaattagg

SEQ ID NO: 1072936 - DNA, 25 bp, Homo sapien
gtatgtccacaaaggaagttcctct

SEQ ID NO: 1072937 - DNA, 25 bp, Homo sapien
gaagctccctgaagtatgtccacaa

SEQ ID NO: 1072938 - DNA, 25 bp, Homo sapien
cctgaagtatgtccacaaaggaagt

SEQ ID NO: 1072939 - DNA, 25 bp, Homo sapien
aaacacctgcatcaacaactgacaa

SEQ ID NO: 1072940 - DNA, 25 bp, Homo sapien
gagaacaactgagagactgtagtct

SEQ ID NO: 1072941 - DNA, 25 bp, Homo sapien
ggagaacaactgagagactgtagtc

SEQ ID NO: 1072942 - DNA, 25 bp, Homo sapien
gtggagaacaactgagagactgtag

SEQ ID NO: 1072943 - DNA, 25 bp, Homo sapien
aacaactgagagactgtagtctccc

SEQ ID NO: 1072944 - DNA, 25 bp, Homo sapien
ggtggtcacataagggttataaata

SEQ ID NO: 1072945 - DNA, 25 bp, Homo sapien
ggattattacagagcattggaattc

SEQ ID NO: 1072946 - DNA, 25 bp, Homo sapien
ggtggagaggattattacagagcat

SEQ ID NO: 1072947 - DNA, 25 bp, Homo sapien
ataaatatcagcagccaaactcttg

SEQ ID NO: 1072948 - DNA, 25 bp, Homo sapien
acatgaagcaaacttaaaggcctta

SEQ ID NO: 1072949 - DNA, 25 bp, Homo sapien
tttaaaatctcaccttgctatcaaa

SEQ ID NO: 1072950 - DNA, 25 bp, Homo sapien
tctcaccttgctatcaaatttccag

SEQ ID NO: 1072951 - DNA, 25 bp, Homo sapien
cctttcttgatgattttactacctt

SEQ ID NO: 1072952 - DNA, 25 bp, Homo sapien
gtaaaatctatcaatcctttcttga

SEQ ID NO: 1072953 - DNA, 25 bp, Homo sapien
gtacccaccacaaggactagcacag

SEQ ID NO: 1072954 - DNA, 25 bp, Homo sapien
cccggctgtcagtaggtacattaaa

SEQ ID NO: 1072955 - DNA, 25 bp, Homo sapien
taaattacatgagcgagtcagcact

SEQ ID NO: 1072956 - DNA, 25 bp, Homo sapien
taagtcaaggcacatctgtacactg

SEQ ID NO: 1072957 - DNA, 25 bp, Homo sapien
tcccaactgggcttacagcatgagc

SEQ ID NO: 1072958 - DNA, 25 bp, Homo sapien
ctcccaactgggcttacagcatgag

SEQ ID NO: 1072959 - DNA, 25 bp, Homo sapien
cactcgagttcccgtgtgccggcag

SEQ ID NO: 1072960 - DNA, 25 bp, Homo sapien
gcgaacgaatccagaaagggcgccc

SEQ ID NO: 1072961 - DNA, 25 bp, Homo sapien
agctagccggctctggcgacggcca

SEQ ID NO: 1072962 - DNA, 25 bp, Homo sapien
gagcccagcccaaaggcgaacgaat

SEQ ID NO: 1072963 - DNA, 25 bp, Homo sapien
caggtcccgcgctcaggaagttagt

SEQ ID NO: 1072964 - DNA, 25 bp, Homo sapien
tcacggtcccggcatgcaaacttct

SEQ ID NO: 1072965 - DNA, 25 bp, Homo sapien
tccggcagctgagtcccgagtgctg

SEQ ID NO: 1072966 - DNA, 25 bp, Homo sapien
aagttagtttgtccctccggcagct

SEQ ID NO: 1072967 - DNA, 25 bp, Homo sapien
caggaagtccttcattcggggccag

SEQ ID NO: 1072968 - DNA, 25 bp, Homo sapien
tcctgcaactttaaacacaggaagt

SEQ ID NO: 1072969 - DNA, 25 bp, Homo sapien
ttagccattcgtcctccctagctgg

SEQ ID NO: 1072970 - DNA, 25 bp, Homo sapien
aactgggctggtcggcggatattcc

SEQ ID NO: 1072971 - DNA, 25 bp, Homo sapien
tatggcccaagctcctaagaattcc

SEQ ID NO: 1072972 - DNA, 25 bp, Homo sapien
cagcctctctagtcttcaagtatgg

SEQ ID NO: 1072973 - DNA, 25 bp, Homo sapien
cttctcaccgaagcagagttgggag

SEQ ID NO: 1072974 - DNA, 25 bp, Homo sapien
tagcagcctcatggttgacagacga

SEQ ID NO: 1072975 - DNA, 25 bp, Homo sapien
cgtatcatatatagaccgttgtgga

SEQ ID NO: 1072976 - DNA, 25 bp, Homo sapien
ccgttgtggaacatagcagtcctct

SEQ ID NO: 1072977 - DNA, 25 bp, Homo sapien
tctggtgctctagattcaaaaacat

SEQ ID NO: 1072978 - DNA, 25 bp, Homo sapien
gctgctcctaatgtaccattgctgg

SEQ ID NO: 1072979 - DNA, 25 bp, Homo sapien
tctttgcgttctgcatttggccgcc

SEQ ID NO: 1072980 - DNA, 25 bp, Homo sapien
cactgcttagctttagtgcatcaaa

SEQ ID NO: 1072981 - DNA, 25 bp, Homo sapien
ccagcttctgaaacctcactgagag

SEQ ID NO: 1072982 - DNA, 25 bp, Homo sapien
agttgggtggcatgaaggacttcca

SEQ ID NO: 1072983 - DNA, 25 bp, Homo sapien
gttactgactctgactgaggttccc

SEQ ID NO: 1072984 - DNA, 25 bp, Homo sapien
cctcaaactttagctcagactctgt

SEQ ID NO: 1072985 - DNA, 25 bp, Homo sapien
tgttaatgcagaactggactccttc

SEQ ID NO: 1072986 - DNA, 25 bp, Homo sapien
gattctacaggctggaattcatgag

SEQ ID NO: 1072987 - DNA, 25 bp, Homo sapien
tatatccttgggaacagtagccaac

SEQ ID NO: 1072988 - DNA, 25 bp, Homo sapien
gtaagaacacaatcgcaatccaggg

SEQ ID NO: 1072989 - DNA, 25 bp, Homo sapien
tgctgaatctgaaacaagtccctct

SEQ ID NO: 1072990 - DNA, 25 bp, Homo sapien
gataggtggccaaaagtcctcaaga

SEQ ID NO: 1072991 - DNA, 25 bp, Homo sapien
ccacaatccaatctagtatcataat

SEQ ID NO: 1072992 - DNA, 25 bp, Homo sapien
atccaatctagtatcataatctttt

SEQ ID NO: 1072993 - DNA, 25 bp, Homo sapien
atccacaatccaatctagtatcata

SEQ ID NO: 1072994 - DNA, 25 bp, Homo sapien
caatccaatctagtatcataatctt

SEQ ID NO: 1072995 - DNA, 25 bp, Homo sapien
tgtaacagctgggacagtagccctc

SEQ ID NO: 1072996 - DNA, 25 bp, Homo sapien
ggagaaccctgcgacagctgacata

SEQ ID NO: 1072997 - DNA, 25 bp, Homo sapien
cactgcagcaattgaggtaccctcc

SEQ ID NO: 1072998 - DNA, 25 bp, Homo sapien
gaatttaatccagcggttgcagcca

SEQ ID NO: 1072999 - DNA, 25 bp, Homo sapien
gacccttcccagaatcaaaatggac

SEQ ID NO: 1073000 - DNA, 25 bp, Homo sapien
ttagacccttcccagaatcaaaatg

SEQ ID NO: 1073001 - DNA, 25 bp, Homo sapien
actctttagacccttcccagaatca

SEQ ID NO: 1073002 - DNA, 25 bp, Homo sapien
ctctttagacccttcccagaatcaa

SEQ ID NO: 1073003 - DNA, 25 bp, Homo sapien
caggctattgggatctcggtgtcat

SEQ ID NO: 1073004 - DNA, 25 bp, Homo sapien
aaatgattttgttgtcaggacctgc

SEQ ID NO: 1073005 - DNA, 25 bp, Homo sapien
caagaatggctctgttgttgaccta

SEQ ID NO: 1073006 - DNA, 25 bp, Homo sapien
tgctctagctgacttaaggctgccc

SEQ ID NO: 1073007 - DNA, 25 bp, Homo sapien
tattccatcgagcattgatctcttc

SEQ ID NO: 1073008 - DNA, 25 bp, Homo sapien
cactctgaattaatccctggccaag

SEQ ID NO: 1073009 - DNA, 25 bp, Homo sapien
ttattcaatgtattccatcgagcat

SEQ ID NO: 1073010 - DNA, 25 bp, Homo sapien
tccatgtcatgttctaaaccctgta

SEQ ID NO: 1073011 - DNA, 25 bp, Homo sapien
ccacaatgcaacaaagcttcctgta

SEQ ID NO: 1073012 - DNA, 25 bp, Homo sapien
tcggtatctgccaaccagctgagca

SEQ ID NO: 1073013 - DNA, 25 bp, Homo sapien
gatggaggtttctgattggctatga

SEQ ID NO: 1073014 - DNA, 25 bp, Homo sapien
ccactttatactcagcagatggagg

SEQ ID NO: 1073015 - DNA, 25 bp, Homo sapien
tactgtggcctttcgatcatctagg

SEQ ID NO: 1073016 - DNA, 25 bp, Homo sapien
tgcttgaagcatgtctactgtggcc

SEQ ID NO: 1073017 - DNA, 25 bp, Homo sapien
tgctgactgggctattctgcctcct

SEQ ID NO: 1073018 - DNA, 25 bp, Homo sapien
tctactttcaagactctccagctgt

SEQ ID NO: 1073019 - DNA, 25 bp, Homo sapien
gctgtattttggcagtctgagtgcc

SEQ ID NO: 1073020 - DNA, 25 bp, Homo sapien
cagtctgagtgccaacaggttctga

SEQ ID NO: 1073021 - DNA, 25 bp, Homo sapien
ggttctgagttagcaagctttttct

SEQ ID NO: 1073022 - DNA, 25 bp, Homo sapien
cttgtgccgaatgatctgctgctgt

SEQ ID NO: 1073023 - DNA, 25 bp, Homo sapien
ggactgcccaattttgactgcctgg

SEQ ID NO: 1073024 - DNA, 25 bp, Homo sapien
gaatttcactgtatcgggcctgcaa

SEQ ID NO: 1073025 - DNA, 25 bp, Homo sapien
tcctttacgaacactgaactgagct

SEQ ID NO: 1073026 - DNA, 25 bp, Homo sapien
tgccttccgacaacagcggtcttga

SEQ ID NO: 1073027 - DNA, 25 bp, Homo sapien
ggttagcccattgactattcaaaat

SEQ ID NO: 1073028 - DNA, 25 bp, Homo sapien
tcctatgcgctggatgagaaaaact

SEQ ID NO: 1073029 - DNA, 25 bp, Homo sapien
gaaaaacttagaattacatcagctt

SEQ ID NO: 1073030 - DNA, 25 bp, Homo sapien
gaaacaaaatgcgagacctttaaga

SEQ ID NO: 1073031 - DNA, 25 bp, Homo sapien
aggaaagaataccattaatcctgaa

SEQ ID NO: 1073032 - DNA, 25 bp, Homo sapien
aataccattaatcctgaaactgtgg

SEQ ID NO: 1073033 - DNA, 25 bp, Homo sapien
aagaataccattaatcctgaaactg

SEQ ID NO: 1073034 - DNA, 25 bp, Homo sapien
tgaaaggaaagaataccattaatcc

SEQ ID NO: 1073035 - DNA, 25 bp, Homo sapien
tgaccatttttaatagcttgatcta

SEQ ID NO: 1073036 - DNA, 25 bp, Homo sapien
gaccatttttaatagcttgatctac

SEQ ID NO: 1073037 - DNA, 25 bp, Homo sapien
gatttcacctatcccatactaaggg

SEQ ID NO: 1073038 - DNA, 25 bp, Homo sapien
tatggaagatagcacacaattactc

SEQ ID NO: 1073039 - DNA, 25 bp, Homo sapien
agacctaggaatgaggagtctctga

SEQ ID NO: 1073040 - DNA, 25 bp, Homo sapien
tctgagttcagcgtcaagtgtttct

SEQ ID NO: 1073041 - DNA, 25 bp, Homo sapien
tagtaactgtgatgtctgcgtaacg

SEQ ID NO: 1073042 - DNA, 25 bp, Homo sapien
ctgagggccttggagctagtaactg

SEQ ID NO: 1073043 - DNA, 25 bp, Homo sapien
cacccggtcagttcctcataagtag

SEQ ID NO: 1073044 - DNA, 25 bp, Homo sapien
tgggagactgtcctccactggttgc

SEQ ID NO: 1073045 - DNA, 25 bp, Homo sapien
tcaatttcatccaccctttgtccaa

SEQ ID NO: 1073046 - DNA, 25 bp, Homo sapien
caccctttgtccaatagtgtcactg

SEQ ID NO: 1073047 - DNA, 25 bp, Homo sapien
gactagtttgtactgctcgttagca

SEQ ID NO: 1073048 - DNA, 25 bp, Homo sapien
catcggacacaagtttatccagccc

SEQ ID NO: 1073049 - DNA, 25 bp, Homo sapien
tccgttttgtttcagcaacccaagc

SEQ ID NO: 1073050 - DNA, 25 bp, Homo sapien
cctgttccaggcgaattggacccag

SEQ ID NO: 1073051 - DNA, 25 bp, Homo sapien
gctgagctgtggtctggtcctgttc

SEQ ID NO: 1073052 - DNA, 25 bp, Homo sapien
gttctgcatcggcagcttgctcata

SEQ ID NO: 1073053 - DNA, 25 bp, Homo sapien
cccacatgtgccaaagatttcacta

SEQ ID NO: 1073054 - DNA, 25 bp, Homo sapien
cactacggtgactgaagagttcatc

SEQ ID NO: 1073055 - DNA, 25 bp, Homo sapien
gtcgaataatgtcaatggagaaagc

SEQ ID NO: 1073056 - DNA, 25 bp, Homo sapien
tccattgaatctttgtgtcgaataa

SEQ ID NO: 1073057 - DNA, 25 bp, Homo sapien
tttactaagacctgggcccgctcta

SEQ ID NO: 1073058 - DNA, 25 bp, Homo sapien
gctctaggcgggcataacgctctga

SEQ ID NO: 1073059 - DNA, 25 bp, Homo sapien
tgtgctattagtgcccgagtttcct

SEQ ID NO: 1073060 - DNA, 25 bp, Homo sapien
tgagctgctcatgatcaatggctgg

SEQ ID NO: 1073061 - DNA, 25 bp, Homo sapien
taattcctttagttgtgggcctatc

SEQ ID NO: 1073062 - DNA, 25 bp, Homo sapien
tgtgtggactgggacacggcttcat

SEQ ID NO: 1073063 - DNA, 25 bp, Homo sapien
tcctcctttatttgggcatacatgt

SEQ ID NO: 1073064 - DNA, 25 bp, Homo sapien
ggtttgtgttcagcaatagattccc

SEQ ID NO: 1073065 - DNA, 25 bp, Homo sapien
gagacatacctgatacagagacctc

SEQ ID NO: 1073066 - DNA, 25 bp, Homo sapien
cagagacctcttgtttagaacagta

SEQ ID NO: 1073067 - DNA, 25 bp, Homo sapien
gacaatatataccagccaagactca

SEQ ID NO: 1073068 - DNA, 25 bp, Homo sapien
tcaaggttatgagtgtcagacacac

SEQ ID NO: 1073069 - DNA, 25 bp, Homo sapien
tacttcagcagggatcagtggtggc

SEQ ID NO: 1073070 - DNA, 25 bp, Homo sapien
catacgcaggcgagaggaaagattc

SEQ ID NO: 1073071 - DNA, 25 bp, Homo sapien
gtttttctagctccacggtggcact

SEQ ID NO: 1073072 - DNA, 25 bp, Homo sapien
gcgcttcaaggcctcaaaggatggc

SEQ ID NO: 1073073 - DNA, 25 bp, Homo sapien
cctgggctttccaagtcatggacaa

SEQ ID NO: 1073074 - DNA, 25 bp, Homo sapien
tcctgggtgtctttgatggtggtca

SEQ ID NO: 1073075 - DNA, 25 bp, Homo sapien
tctcgttcttcagcccgagctttga

SEQ ID NO: 1073076 - DNA, 25 bp, Homo sapien
tgatggaaggatcaatgcctgggct

SEQ ID NO: 1073077 - DNA, 25 bp, Homo sapien
aaaatcaaatctgctccaaggatcc

SEQ ID NO: 1073078 - DNA, 25 bp, Homo sapien
tgctccaaggatccgaataaactcc

SEQ ID NO: 1073079 - DNA, 25 bp, Homo sapien
aatctgctccaaggatccgaataaa

SEQ ID NO: 1073080 - DNA, 25 bp, Homo sapien
tcaaatctgctccaaggatccgaat

SEQ ID NO: 1073081 - DNA, 25 bp, Homo sapien
gcttgcatagcatcctcaagttttt

SEQ ID NO: 1073082 - DNA, 25 bp, Homo sapien
tgaagagtgtcctgatactgcacag

SEQ ID NO: 1073083 - DNA, 25 bp, Homo sapien
tttaagttctcccaagcattattca

SEQ ID NO: 1073084 - DNA, 25 bp, Homo sapien
acagcagcttgcatagcatcctcaa

SEQ ID NO: 1073085 - DNA, 25 bp, Homo sapien
taatcacagtgttatctagccagtc

SEQ ID NO: 1073086 - DNA, 25 bp, Homo sapien
tgttatctagccagtcaaacatagc

SEQ ID NO: 1073087 - DNA, 25 bp, Homo sapien
tcatttaactgatctttaacagtat

SEQ ID NO: 1073088 - DNA, 25 bp, Homo sapien
agtattgaggtcagtgccaacaggg

SEQ ID NO: 1073089 - DNA, 25 bp, Homo sapien
tctttaacatcagttcaccctggtg

SEQ ID NO: 1073090 - DNA, 25 bp, Homo sapien
taatgtctctgtccgtctcatcagt

SEQ ID NO: 1073091 - DNA, 25 bp, Homo sapien
caccctggtgattaagcttctccat

SEQ ID NO: 1073092 - DNA, 25 bp, Homo sapien
tcagtggttctcgtataatgtctct

SEQ ID NO: 1073093 - DNA, 25 bp, Homo sapien
aactgaccaagggccaacagagccc

SEQ ID NO: 1073094 - DNA, 25 bp, Homo sapien
ctggaactgaccaagggccaacaga

SEQ ID NO: 1073095 - DNA, 25 bp, Homo sapien
ggaactgaccaagggccaacagagc

SEQ ID NO: 1073096 - DNA, 25 bp, Homo sapien
tgaccaagggccaacagagcccctt

SEQ ID NO: 1073097 - DNA, 25 bp, Homo sapien
gctttgcgagctcaacttcaatgac

SEQ ID NO: 1073098 - DNA, 25 bp, Homo sapien
aactcttcggtatgagtcagccaac

SEQ ID NO: 1073099 - DNA, 25 bp, Homo sapien
cttcaatgacttttgggtctccact

SEQ ID NO: 1073100 - DNA, 25 bp, Homo sapien
ggtctccacttattggtctctgagc

SEQ ID NO: 1073101 - DNA, 25 bp, Homo sapien
tcaagaagctcattgccagctttgt

SEQ ID NO: 1073102 - DNA, 25 bp, Homo sapien
cttccaaacggctccttaagctgct

SEQ ID NO: 1073103 - DNA, 25 bp, Homo sapien
ggcttccaaacggctccttaagctg

SEQ ID NO: 1073104 - DNA, 25 bp, Homo sapien
gattcaagaagctcattgccagctt

SEQ ID NO: 1073105 - DNA, 25 bp, Homo sapien
ttcaatttcactgtggaagccctgg

SEQ ID NO: 1073106 - DNA, 25 bp, Homo sapien
tcctgtgggcttagatgcagaaagc

SEQ ID NO: 1073107 - DNA, 25 bp, Homo sapien
tatgtgtatcaagctgttccctagc

SEQ ID NO: 1073108 - DNA, 25 bp, Homo sapien
gaaagctggctctccattctagtaa

SEQ ID NO: 1073109 - DNA, 25 bp, Homo sapien
tagaagcatgagtctgcccttgtca

SEQ ID NO: 1073110 - DNA, 25 bp, Homo sapien
tactgctgaccacatgccacttctg

SEQ ID NO: 1073111 - DNA, 25 bp, Homo sapien
caagtagttgattataagtctcttc

SEQ ID NO: 1073112 - DNA, 25 bp, Homo sapien
agtgctacactctgttctgtcttgg

SEQ ID NO: 1073113 - DNA, 25 bp, Homo sapien
gagaagcgatgtttaaactctgctc

SEQ ID NO: 1073114 - DNA, 25 bp, Homo sapien
agtatttagaatcaggcttggtgga

SEQ ID NO: 1073115 - DNA, 25 bp, Homo sapien
tctgctagagtgagccagttgataa

SEQ ID NO: 1073116 - DNA, 25 bp, Homo sapien
gccagttgataaattcttgtaggga

SEQ ID NO: 1073117 - DNA, 25 bp, Homo sapien
tcaatgatctggtctcgatgagcat

SEQ ID NO: 1073118 - DNA, 25 bp, Homo sapien
tagtgatcgccctctttcaatagat

SEQ ID NO: 1073119 - DNA, 25 bp, Homo sapien
caatagatcgctggacaaccttctc

SEQ ID NO: 1073120 - DNA, 25 bp, Homo sapien
taattgattcccagtttgatccagc

SEQ ID NO: 1073121 - DNA, 25 bp, Homo sapien
gtctgggtcattggatatctctagt

SEQ ID NO: 1073122 - DNA, 25 bp, Homo sapien
ctagttctgagtccaggtgactctc

SEQ ID NO: 1073123 - DNA, 25 bp, Homo sapien
tctgcatcttctagccagtcaatca

SEQ ID NO: 1073124 - DNA, 25 bp, Homo sapien
cttatgcttagaaagctgaagttta

SEQ ID NO: 1073125 - DNA, 25 bp, Homo sapien
ggtatcatacacaggctgcttgcca

SEQ ID NO: 1073126 - DNA, 25 bp, Homo sapien
gacttctcctaggaaattgtcaagt

SEQ ID NO: 1073127 - DNA, 25 bp, Homo sapien
tatcttcgggaagcaaagtcttttc

SEQ ID NO: 1073128 - DNA, 25 bp, Homo sapien
cagacttgccacaaacagtatccca

SEQ ID NO: 1073129 - DNA, 25 bp, Homo sapien
taaatcaaaccaccctctagaatgg

SEQ ID NO: 1073130 - DNA, 25 bp, Homo sapien
caggtagagataccctttaggcatc

SEQ ID NO: 1073131 - DNA, 25 bp, Homo sapien
tatagcccagtgacacacaggcaca

SEQ ID NO: 1073132 - DNA, 25 bp, Homo sapien
tagaatggattaagggtagcacagg

SEQ ID NO: 1073133 - DNA, 25 bp, Homo sapien
gaactgacccgaaaagagcagggct

SEQ ID NO: 1073134 - DNA, 25 bp, Homo sapien
tcatgacgaggtcaaggtccccgtg

SEQ ID NO: 1073135 - DNA, 25 bp, Homo sapien
tgtataaccagtcaaccaatgcctg

SEQ ID NO: 1073136 - DNA, 25 bp, Homo sapien
aagcatccatgaactgacccgaaaa

SEQ ID NO: 1073137 - DNA, 25 bp, Homo sapien
tacagacagtgtcccagcgagtgct

SEQ ID NO: 1073138 - DNA, 25 bp, Homo sapien
gactattctcaatcagctctcggcc

SEQ ID NO: 1073139 - DNA, 25 bp, Homo sapien
tggagctgtccttttacccaagtgg

SEQ ID NO: 1073140 - DNA, 25 bp, Homo sapien
tgttttaaggcctgctcaagccggc

SEQ ID NO: 1073141 - DNA, 25 bp, Homo sapien
aaagattcaacctctctctgcagcc

SEQ ID NO: 1073142 - DNA, 25 bp, Homo sapien
ggacatgctagggaaagggtccagt

SEQ ID NO: 1073143 - DNA, 25 bp, Homo sapien
accaagcacaaaagattcaacctct

SEQ ID NO: 1073144 - DNA, 25 bp, Homo sapien
cagccaaggacctagatactgggac

SEQ ID NO: 1073145 - DNA, 25 bp, Homo sapien
gcgaagcgtttgctctgcttcagaa

SEQ ID NO: 1073146 - DNA, 25 bp, Homo sapien
cagcatgtggactgtgtctcgaaac

SEQ ID NO: 1073147 - DNA, 25 bp, Homo sapien
ggactgtgtctcgaaacacttccgc

SEQ ID NO: 1073148 - DNA, 25 bp, Homo sapien
gaagtgctccccgaaagcgaagcgt

SEQ ID NO: 1073149 - DNA, 25 bp, Homo sapien
tcctcgaagcgagctcggatgatgg

SEQ ID NO: 1073150 - DNA, 25 bp, Homo sapien
ccagtgtttgatggttgtgatgcaa

SEQ ID NO: 1073151 - DNA, 25 bp, Homo sapien
tactgctgagttaacgtccactcgc

SEQ ID NO: 1073152 - DNA, 25 bp, Homo sapien
gacttctcccatggctactgctgag

SEQ ID NO: 1073153 - DNA, 25 bp, Homo sapien
gagagaccacccaaacagtcaagag

SEQ ID NO: 1073154 - DNA, 25 bp, Homo sapien
tgctcccggccaacacaatgacttt

SEQ ID NO: 1073155 - DNA, 25 bp, Homo sapien
tcaagaggcttcactattaccccag

SEQ ID NO: 1073156 - DNA, 25 bp, Homo sapien
gaatgtggaccccaccaacatggag

SEQ ID NO: 1073157 - DNA, 25 bp, Homo sapien
gattggctcctgatcccgctgaatg

SEQ ID NO: 1073158 - DNA, 25 bp, Homo sapien
cagaagttcttccaggagctcagca

SEQ ID NO: 1073159 - DNA, 25 bp, Homo sapien
tctgacaaggccgtttcaagacgct

SEQ ID NO: 1073160 - DNA, 25 bp, Homo sapien
taactcggtcaatgttctgcgggat

SEQ ID NO: 1073161 - DNA, 25 bp, Homo sapien
tgtcagccagaccacagggacttgg

SEQ ID NO: 1073162 - DNA, 25 bp, Homo sapien
tttgaaagtgggactgacaagccct

SEQ ID NO: 1073163 - DNA, 25 bp, Homo sapien
caggagacagatcacgaaaggcttc

SEQ ID NO: 1073164 - DNA, 25 bp, Homo sapien
agggtgcaacccaaacagagacagg

SEQ ID NO: 1073165 - DNA, 25 bp, Homo sapien
tgtatgtcttggtgacccggtccac

SEQ ID NO: 1073166 - DNA, 25 bp, Homo sapien
ggctgtttgcgagtcatctcctcca

SEQ ID NO: 1073167 - DNA, 25 bp, Homo sapien
tatgaaaggcgcgtgagtaggctct

SEQ ID NO: 1073168 - DNA, 25 bp, Homo sapien
tccgctgcgggatttctctatgaaa

SEQ ID NO: 1073169 - DNA, 25 bp, Homo sapien
cctaccttagtgagctgatgacacg

SEQ ID NO: 1073170 - DNA, 25 bp, Homo sapien
tagatacggaggtgtactaattcca

SEQ ID NO: 1073171 - DNA, 25 bp, Homo sapien
cagctagggctgataaccaaaacaa

SEQ ID NO: 1073172 - DNA, 25 bp, Homo sapien
tacctgctgcctacatatctccaag

SEQ ID NO: 1073173 - DNA, 25 bp, Homo sapien
acacctgctgccagcgggcagaaag

SEQ ID NO: 1073174 - DNA, 25 bp, Homo sapien
tttgccgctccagtgctaacagcca

SEQ ID NO: 1073175 - DNA, 25 bp, Homo sapien
gctggttgatccgtgggttttttgc

SEQ ID NO: 1073176 - DNA, 25 bp, Homo sapien
tcagactgtgaaaggattggcatgg

SEQ ID NO: 1073177 - DNA, 25 bp, Homo sapien
gcacaatctggctctttcacttaaa

SEQ ID NO: 1073178 - DNA, 25 bp, Homo sapien
taaagccatgactatttacacgagc

SEQ ID NO: 1073179 - DNA, 25 bp, Homo sapien
attcagtaaagccatgcttccaggg

SEQ ID NO: 1073180 - DNA, 25 bp, Homo sapien
tacacgagctatggtataatggaat

SEQ ID NO: 1073181 - DNA, 25 bp, Homo sapien
gccggaagaaatccatcactcgaga

SEQ ID NO: 1073182 - DNA, 25 bp, Homo sapien
ggtccttatcaatgcgccggaagaa

SEQ ID NO: 1073183 - DNA, 25 bp, Homo sapien
aaatgccatcgataaactcctgacg

SEQ ID NO: 1073184 - DNA, 25 bp, Homo sapien
tttcctccagacatcaaagtcaaag

SEQ ID NO: 1073185 - DNA, 25 bp, Homo sapien
gaatccaggtgtgacccatgtttgg

SEQ ID NO: 1073186 - DNA, 25 bp, Homo sapien
aatatcacagcttctacaaagtgca

SEQ ID NO: 1073187 - DNA, 25 bp, Homo sapien
tgtttggaatgatgactagactcac

SEQ ID NO: 1073188 - DNA, 25 bp, Homo sapien
gaaagactgtttagctagaatatca

SEQ ID NO: 1073189 - DNA, 25 bp, Homo sapien
cacagcagtcatctctaacttggtg

SEQ ID NO: 1073190 - DNA, 25 bp, Homo sapien
aaccatccccatctcggtcgaaaat

SEQ ID NO: 1073191 - DNA, 25 bp, Homo sapien
atctcggtcgaaaatgtcagccaca

SEQ ID NO: 1073192 - DNA, 25 bp, Homo sapien
cagtcatctctaacttggtggtggg

SEQ ID NO: 1073193 - DNA, 25 bp, Homo sapien
catcttcgattttatctgcatcggt

SEQ ID NO: 1073194 - DNA, 25 bp, Homo sapien
ggttgttggtcgatacgcatccttg

SEQ ID NO: 1073195 - DNA, 25 bp, Homo sapien
ttttatctgcatcggttgttggtcg

SEQ ID NO: 1073196 - DNA, 25 bp, Homo sapien
gatacgcatccttgttgggatgaag

SEQ ID NO: 1073197 - DNA, 25 bp, Homo sapien
tcccaagtgactatacaacacattc

SEQ ID NO: 1073198 - DNA, 25 bp, Homo sapien
ggcatttcaggcttttgacatatac

SEQ ID NO: 1073199 - DNA, 25 bp, Homo sapien
tcttcttactaagtgaactaattga

SEQ ID NO: 1073200 - DNA, 25 bp, Homo sapien
gaaaagtgctaatatgcttgcatca

SEQ ID NO: 1073201 - DNA, 25 bp, Homo sapien
ccggtatttattctctccgatctgc

SEQ ID NO: 1073202 - DNA, 25 bp, Homo sapien
ttgcacatttgcactgagccacttg

SEQ ID NO: 1073203 - DNA, 25 bp, Homo sapien
catttgcactgagccacttgtcttg

SEQ ID NO: 1073204 - DNA, 25 bp, Homo sapien
cacatttgcactgagccacttgtct

SEQ ID NO: 1073205 - DNA, 25 bp, Homo sapien
tacctgacacttggcatctatagag

SEQ ID NO: 1073206 - DNA, 25 bp, Homo sapien
ctctttgtgggcaagtggtcagtca

SEQ ID NO: 1073207 - DNA, 25 bp, Homo sapien
tgaccctggtcccaaaagaagctaa

SEQ ID NO: 1073208 - DNA, 25 bp, Homo sapien
atctcaagtccgatgggctctgggc

SEQ ID NO: 1073209 - DNA, 25 bp, Homo sapien
gacttgggttcttgcagtggctgac

SEQ ID NO: 1073210 - DNA, 25 bp, Homo sapien
taggcatattggacactctcaagca

SEQ ID NO: 1073211 - DNA, 25 bp, Homo sapien
gaaaggaggtttgaccaagccagca

SEQ ID NO: 1073212 - DNA, 25 bp, Homo sapien
cacacctggtaggacaaggttgtca

SEQ ID NO: 1073213 - DNA, 25 bp, Homo sapien
gcaagaaaggatatctgaggtcata

SEQ ID NO: 1073214 - DNA, 25 bp, Homo sapien
tttcatctgatacaatttaaacatg

SEQ ID NO: 1073215 - DNA, 25 bp, Homo sapien
gaaaaatactgtatcctccctccca

SEQ ID NO: 1073216 - DNA, 25 bp, Homo sapien
ggtcatatagccatcctccctcaaa

SEQ ID NO: 1073217 - DNA, 25 bp, Homo sapien
tgcgccgggccaatatactttctat

SEQ ID NO: 1073218 - DNA, 25 bp, Homo sapien
cttcagctgaacaaatgattaggtc

SEQ ID NO: 1073219 - DNA, 25 bp, Homo sapien
ttaaggaaacctttgcaaagcatca

SEQ ID NO: 1073220 - DNA, 25 bp, Homo sapien
gctcccatgatgattatgaacagta

SEQ ID NO: 1073221 - DNA, 25 bp, Homo sapien
gaccagccgcaactgctgagaatcc

SEQ ID NO: 1073222 - DNA, 25 bp, Homo sapien
gcgcagaatacggaccagccgcaac

SEQ ID NO: 1073223 - DNA, 25 bp, Homo sapien
acggaccagccgcaactgctgagaa

SEQ ID NO: 1073224 - DNA, 25 bp, Homo sapien
agaatacggaccagccgcaactgct

SEQ ID NO: 1073225 - DNA, 25 bp, Homo sapien
atccatcctccaccaacgcgaacca

SEQ ID NO: 1073226 - DNA, 25 bp, Homo sapien
tccatcctccaccaacgcgaaccat

SEQ ID NO: 1073227 - DNA, 25 bp, Homo sapien
catccatcctccaccaacgcgaacc

SEQ ID NO: 1073228 - DNA, 25 bp, Homo sapien
tcggcagggatcatttttcactaaa

SEQ ID NO: 1073229 - DNA, 25 bp, Homo sapien
ctcggcagggatcatttttcactaa

SEQ ID NO: 1073230 - DNA, 25 bp, Homo sapien
tcatttttcactaaaaattcatcca

SEQ ID NO: 1073231 - DNA, 25 bp, Homo sapien
ttttcactaaaaattcatccaaggc

SEQ ID NO: 1073232 - DNA, 25 bp, Homo sapien
gagactgactggaaatcgaagagct

SEQ ID NO: 1073233 - DNA, 25 bp, Homo sapien
ctatgggagactgactggaaatcga

SEQ ID NO: 1073234 - DNA, 25 bp, Homo sapien
tgggagactgactggaaatcgaaga

SEQ ID NO: 1073235 - DNA, 25 bp, Homo sapien
ctgactggaaatcgaagagctggaa

SEQ ID NO: 1073236 - DNA, 25 bp, Homo sapien
ggctggagcgcagtatatacacaca

SEQ ID NO: 1073237 - DNA, 25 bp, Homo sapien
caatgtggtaagtacccaggaccca

SEQ ID NO: 1073238 - DNA, 25 bp, Homo sapien
gatgtggctgaagcaacacctcctt

SEQ ID NO: 1073239 - DNA, 25 bp, Homo sapien
gagtcttatctggtcgctaaccttg

SEQ ID NO: 1073240 - DNA, 25 bp, Homo sapien
tccatgttttagaagtgggcaggga

SEQ ID NO: 1073241 - DNA, 25 bp, Homo sapien
tactccatgccctacatgtctcatg

SEQ ID NO: 1073242 - DNA, 25 bp, Homo sapien
tcagcaagggagcaggcgtccttga

SEQ ID NO: 1073243 - DNA, 25 bp, Homo sapien
atatatctaagagggagaacgggac

SEQ ID NO: 1073244 - DNA, 25 bp, Homo sapien
caggttgcataagtgtccaagcagc

SEQ ID NO: 1073245 - DNA, 25 bp, Homo sapien
tcaggtcaaccgatctctaagagcc

SEQ ID NO: 1073246 - DNA, 25 bp, Homo sapien
gatctatgacttaatggtccctgaa

SEQ ID NO: 1073247 - DNA, 25 bp, Homo sapien
gacacagctaaacaaatgggactgc

SEQ ID NO: 1073248 - DNA, 25 bp, Homo sapien
ttggaccttcgaccccgtgagcgga

SEQ ID NO: 1073249 - DNA, 25 bp, Homo sapien
tggttactctgactagcactggagc

SEQ ID NO: 1073250 - DNA, 25 bp, Homo sapien
tggtaggatgaatttctctctaagt

SEQ ID NO: 1073251 - DNA, 25 bp, Homo sapien
aagatggcatggatgtacagctgtg

SEQ ID NO: 1073252 - DNA, 25 bp, Homo sapien
cagaggctaccgtgaacaatgaaca

SEQ ID NO: 1073253 - DNA, 25 bp, Homo sapien
aaagtagtaacactggatgggctca

SEQ ID NO: 1073254 - DNA, 25 bp, Homo sapien
catatatctgtgtactgctaggaac

SEQ ID NO: 1073255 - DNA, 25 bp, Homo sapien
catttctgacataaccaggctgagt

SEQ ID NO: 1073256 - DNA, 25 bp, Homo sapien
aacccatcataacatcaaacttagc

SEQ ID NO: 1073257 - DNA, 25 bp, Homo sapien
acataacccatcataacatcaaact

SEQ ID NO: 1073258 - DNA, 25 bp, Homo sapien
catcaaacttagctgttagctccac

SEQ ID NO: 1073259 - DNA, 25 bp, Homo sapien
taacccatcataacatcaaacttag

SEQ ID NO: 1073260 - DNA, 25 bp, Homo sapien
aaggaacaaaaagggtgcacattgg

SEQ ID NO: 1073261 - DNA, 25 bp, Homo sapien
acaaaaagggtgcacattgggaaca

SEQ ID NO: 1073262 - DNA, 25 bp, Homo sapien
gaacaaaaagggtgcacattgggaa

SEQ ID NO: 1073263 - DNA, 25 bp, Homo sapien
ggaacaaaaagggtgcacattggga

SEQ ID NO: 1073264 - DNA, 25 bp, Homo sapien
ccaaccagggtttgtcataacagcg

SEQ ID NO: 1073265 - DNA, 25 bp, Homo sapien
cagctttactgtttaccaaccaggg

SEQ ID NO: 1073266 - DNA, 25 bp, Homo sapien
tccctgataggggtgccagctttac

SEQ ID NO: 1073267 - DNA, 25 bp, Homo sapien
tgtcataacagcgagagaactgaag

SEQ ID NO: 1073268 - DNA, 25 bp, Homo sapien
gaacattgtagaacatgcgccatag

SEQ ID NO: 1073269 - DNA, 25 bp, Homo sapien
tagtagtttagtggcagtaggtccc

SEQ ID NO: 1073270 - DNA, 25 bp, Homo sapien
gaacccgggctagaattccaagtca

SEQ ID NO: 1073271 - DNA, 25 bp, Homo sapien
tgaatccgagttagaaacccctgaa

SEQ ID NO: 1073272 - DNA, 25 bp, Homo sapien
tccctagtggctggcttatttttgt

SEQ ID NO: 1073273 - DNA, 25 bp, Homo sapien
ggagcacagtggcatacttcatggc

SEQ ID NO: 1073274 - DNA, 25 bp, Homo sapien
ccatgtccagccttaaatctgtgtg

SEQ ID NO: 1073275 - DNA, 25 bp, Homo sapien
cagccttaaatctgtgtggggtttt

SEQ ID NO: 1073276 - DNA, 25 bp, Homo sapien
gactgagacatcaggaacaagtctg

SEQ ID NO: 1073277 - DNA, 25 bp, Homo sapien
aagcctaccccagatacacgtgtgg

SEQ ID NO: 1073278 - DNA, 25 bp, Homo sapien
cagtgagggtccaccagtcttgtcc

SEQ ID NO: 1073279 - DNA, 25 bp, Homo sapien
tatgagaagcacacgactgtgggac

SEQ ID NO: 1073280 - DNA, 25 bp, Homo sapien
cccgattagttttggcacctgtgga

SEQ ID NO: 1073281 - DNA, 25 bp, Homo sapien
tatcaccagcaagggatgtccgact

SEQ ID NO: 1073282 - DNA, 25 bp, Homo sapien
tccgactagaatgaaaagttggtgt

SEQ ID NO: 1073283 - DNA, 25 bp, Homo sapien
gaagaactattgctggtatcaccag

SEQ ID NO: 1073284 - DNA, 25 bp, Homo sapien
actaagtgccactctcattacccgc

SEQ ID NO: 1073285 - DNA, 25 bp, Homo sapien
cccgctccttgggagcagtgaaaca

SEQ ID NO: 1073286 - DNA, 25 bp, Homo sapien
gaaacattccacataggctgttgtt

SEQ ID NO: 1073287 - DNA, 25 bp, Homo sapien
gaaaaagtaaaggtcacttgagcat

SEQ ID NO: 1073288 - DNA, 25 bp, Homo sapien
gaaagccactctatcagcagcactg

SEQ ID NO: 1073289 - DNA, 25 bp, Homo sapien
tgctcatcccaacactggactggtg

SEQ ID NO: 1073290 - DNA, 25 bp, Homo sapien
ggaagattcctaggttcccatgagg

SEQ ID NO: 1073291 - DNA, 25 bp, Homo sapien
gctgtggaagcatctcatctcagaa

SEQ ID NO: 1073292 - DNA, 25 bp, Homo sapien
agaagcgtcacttcctcgccggctg

SEQ ID NO: 1073293 - DNA, 25 bp, Homo sapien
cagggcgactggcagactttttagg

SEQ ID NO: 1073294 - DNA, 25 bp, Homo sapien
ggtcaaagtcagaagcgtcacttcc

SEQ ID NO: 1073295 - DNA, 25 bp, Homo sapien
tgctggctcgactcccggctcgact

SEQ ID NO: 1073296 - DNA, 25 bp, Homo sapien
cccctgcagcgctgctttctgaagt

SEQ ID NO: 1073297 - DNA, 25 bp, Homo sapien
tttgtttagccctctcctggagttg

SEQ ID NO: 1073298 - DNA, 25 bp, Homo sapien
gaagtgtcggaacaagcagactgcg

SEQ ID NO: 1073299 - DNA, 25 bp, Homo sapien
gtggtcttcttagacatggttggga

SEQ ID NO: 1073300 - DNA, 25 bp, Homo sapien
caccgcgcagaaaccctattaatag

SEQ ID NO: 1073301 - DNA, 25 bp, Homo sapien
gcaggattcaaagtggatagtggct

SEQ ID NO: 1073302 - DNA, 25 bp, Homo sapien
tctgggccccatccattacagggtt

SEQ ID NO: 1073303 - DNA, 25 bp, Homo sapien
cacccaatgtatggagcaggattca

SEQ ID NO: 1073304 - DNA, 25 bp, Homo sapien
cagttcttgctaattgaggtgtccg

SEQ ID NO: 1073305 - DNA, 25 bp, Homo sapien
tctaggctggatagggagcaacaaa

SEQ ID NO: 1073306 - DNA, 25 bp, Homo sapien
gaacaggctcgtggaattcattcct

SEQ ID NO: 1073307 - DNA, 25 bp, Homo sapien
caaatgttacttagatgaggttccc

SEQ ID NO: 1073308 - DNA, 25 bp, Homo sapien
taaacagttcattggtagagcttca

SEQ ID NO: 1073309 - DNA, 25 bp, Homo sapien
tgtttctaaacagttcattggtaga

SEQ ID NO: 1073310 - DNA, 25 bp, Homo sapien
ctgcctcaattaaaaccaattgaga

SEQ ID NO: 1073311 - DNA, 25 bp, Homo sapien
aattaaaaccaattgagataatcac

SEQ ID NO: 1073312 - DNA, 25 bp, Homo sapien
caagatattttgatttgcggaatgc

SEQ ID NO: 1073313 - DNA, 25 bp, Homo sapien
ccccagggtaacatttatagataag

SEQ ID NO: 1073314 - DNA, 25 bp, Homo sapien
gcatttaagtacctacaacatgatt

SEQ ID NO: 1073315 - DNA, 25 bp, Homo sapien
tagataaggtaatagttgaaaagaa

SEQ ID NO: 1073316 - DNA, 25 bp, Homo sapien
ggcctctgcccacgcttcagttcag

SEQ ID NO: 1073317 - DNA, 25 bp, Homo sapien
aagggcctctgcccacgcttcagtt

SEQ ID NO: 1073318 - DNA, 25 bp, Homo sapien
tgcccacgcttcagttcagcaacaa

SEQ ID NO: 1073319 - DNA, 25 bp, Homo sapien
tttagccattccaagggcctctgcc

SEQ ID NO: 1073320 - DNA, 25 bp, Homo sapien
ggacgcagacgccaacgcttcgagg

SEQ ID NO: 1073321 - DNA, 25 bp, Homo sapien
ggctgggactgtcagccaatccgtc

SEQ ID NO: 1073322 - DNA, 25 bp, Homo sapien
tcggcgcagagatcctaaggccgcg

SEQ ID NO: 1073323 - DNA, 25 bp, Homo sapien
ggcggcgcgattcccgcgagtcctt

SEQ ID NO: 1073324 - DNA, 25 bp, Homo sapien
ccagcgcgcacaacgtcaggcccag

SEQ ID NO: 1073325 - DNA, 25 bp, Homo sapien
gaagccagagcggtccggggcgcgc

SEQ ID NO: 1073326 - DNA, 25 bp, Homo sapien
gcgcgcacaacgtcaggcccagaag

SEQ ID NO: 1073327 - DNA, 25 bp, Homo sapien
cgcccagcgcgcacaacgtcaggcc

SEQ ID NO: 1073328 - DNA, 25 bp, Homo sapien
cgtcgtcgtcgccagccatggcgtg

SEQ ID NO: 1073329 - DNA, 25 bp, Homo sapien
cgtcgccagccatggcgtggtacag

SEQ ID NO: 1073330 - DNA, 25 bp, Homo sapien
ccatgttgacgaagctcatgaccag

SEQ ID NO: 1073331 - DNA, 25 bp, Homo sapien
tcgtcgtcgccagccatggcgtggt

SEQ ID NO: 1073332 - DNA, 25 bp, Homo sapien
tcagcgatggtgaatggctgccttc

SEQ ID NO: 1073333 - DNA, 25 bp, Homo sapien
cgctcagcgatggtgaatggctgcc

SEQ ID NO: 1073334 - DNA, 25 bp, Homo sapien
cactgggcgctcagcgatggtgaat

SEQ ID NO: 1073335 - DNA, 25 bp, Homo sapien
cagcgatggtgaatggctgccttct

SEQ ID NO: 1073336 - DNA, 25 bp, Homo sapien
cctcaacttcctgccacggggtggg

SEQ ID NO: 1073337 - DNA, 25 bp, Homo sapien
ccctcaacttcctgccacggggtgg

SEQ ID NO: 1073338 - DNA, 25 bp, Homo sapien
tccctcaacttcctgccacggggtg

SEQ ID NO: 1073339 - DNA, 25 bp, Homo sapien
ctcaacttcctgccacggggtgggg

SEQ ID NO: 1073340 - DNA, 25 bp, Homo sapien
cgacattcccgttgctgtggacctg

SEQ ID NO: 1073341 - DNA, 25 bp, Homo sapien
cactgccagtctgggtgtggctacc

SEQ ID NO: 1073342 - DNA, 25 bp, Homo sapien
gaggctcgcatgtcagctcatcggc

SEQ ID NO: 1073343 - DNA, 25 bp, Homo sapien
agccctttgggctgggtatcactgc

SEQ ID NO: 1073344 - DNA, 25 bp, Homo sapien
agcccagctaacttttgtattttca

SEQ ID NO: 1073345 - DNA, 25 bp, Homo sapien
ttacaagtgcctgccactaagccca

SEQ ID NO: 1073346 - DNA, 25 bp, Homo sapien
gattacaagtgcctgccactaagcc

SEQ ID NO: 1073347 - DNA, 25 bp, Homo sapien
acaagtgcctgccactaagcccagc

SEQ ID NO: 1073348 - DNA, 25 bp, Homo sapien
gagtctcacactataccgactgaga

SEQ ID NO: 1073349 - DNA, 25 bp, Homo sapien
taagagtctcacactataccgactg

SEQ ID NO: 1073350 - DNA, 25 bp, Homo sapien
tcacactataccgactgagacatgc

SEQ ID NO: 1073351 - DNA, 25 bp, Homo sapien
ctataccgactgagacatgctggtg

SEQ ID NO: 1073352 - DNA, 25 bp, Homo sapien
ggtctggaatctcccaaagatgcct

SEQ ID NO: 1073353 - DNA, 25 bp, Homo sapien
aatgccactgggacggtcccccagt

SEQ ID NO: 1073354 - DNA, 25 bp, Homo sapien
tctggctcggacagaaagtaccaaa

SEQ ID NO: 1073355 - DNA, 25 bp, Homo sapien
aaagatgcctggctgagcggcagca

SEQ ID NO: 1073356 - DNA, 25 bp, Homo sapien
ggacataaccgacataaccgacggc

SEQ ID NO: 1073357 - DNA, 25 bp, Homo sapien
ctggtagacagggacataaccgaca

SEQ ID NO: 1073358 - DNA, 25 bp, Homo sapien
cgacataaccgacggcatctcaggg

SEQ ID NO: 1073359 - DNA, 25 bp, Homo sapien
tgaggcatgagtgcgaatctgccat

SEQ ID NO: 1073360 - DNA, 25 bp, Homo sapien
tgaactcccgttgcgccccttcttg

SEQ ID NO: 1073361 - DNA, 25 bp, Homo sapien
tccaaatcctgaactcccgttgcgc

SEQ ID NO: 1073362 - DNA, 25 bp, Homo sapien
caaatcctgaactcccgttgcgccc

SEQ ID NO: 1073363 - DNA, 25 bp, Homo sapien
cgttgcgccccttcttggcccggct

SEQ ID NO: 1073364 - DNA, 25 bp, Homo sapien
gggctggcactcagaatggctcggg

SEQ ID NO: 1073365 - DNA, 25 bp, Homo sapien
tgggctggcactcagaatggctcgg

SEQ ID NO: 1073366 - DNA, 25 bp, Homo sapien
ggctggcactcagaatggctcgggc

SEQ ID NO: 1073367 - DNA, 25 bp, Homo sapien
gctggcactcagaatggctcgggct

SEQ ID NO: 1073368 - DNA, 25 bp, Homo sapien
ccacctggaacatgctgacgtggag

SEQ ID NO: 1073369 - DNA, 25 bp, Homo sapien
tgggcaccttgtaaatccggaactc

SEQ ID NO: 1073370 - DNA, 25 bp, Homo sapien
cctggaccacctggaacatgctgac

SEQ ID NO: 1073371 - DNA, 25 bp, Homo sapien
aaatccggaactccgcagctgtgac

SEQ ID NO: 1073372 - DNA, 25 bp, Homo sapien
gagcgtctgaagatccaaaaagaac

SEQ ID NO: 1073373 - DNA, 25 bp, Homo sapien
tccttgtgacgcttcagcaaccagc

SEQ ID NO: 1073374 - DNA, 25 bp, Homo sapien
tctccacatagaggcggagtcccag

SEQ ID NO: 1073375 - DNA, 25 bp, Homo sapien
tcgtctccagctcggagcgtctgaa

SEQ ID NO: 1073376 - DNA, 25 bp, Homo sapien
acagctggtgaggccgggcacccag

SEQ ID NO: 1073377 - DNA, 25 bp, Homo sapien
agggccacaggaagccactaccgct

SEQ ID NO: 1073378 - DNA, 25 bp, Homo sapien
gtgacccttgcagcgggcacagctg

SEQ ID NO: 1073379 - DNA, 25 bp, Homo sapien
tcagtgacccttgcagcgggcacag

SEQ ID NO: 1073380 - DNA, 25 bp, Homo sapien
ctactgcctggcataaaagaggctc

SEQ ID NO: 1073381 - DNA, 25 bp, Homo sapien
tttcacccagggcacatgctagcac

SEQ ID NO: 1073382 - DNA, 25 bp, Homo sapien
tgtcaggtattctgcggaaagccct

SEQ ID NO: 1073383 - DNA, 25 bp, Homo sapien
tgacggttttctcgtggctggactg

SEQ ID NO: 1073384 - DNA, 25 bp, Homo sapien
cactttcgggaagcaagtcactggg

SEQ ID NO: 1073385 - DNA, 25 bp, Homo sapien
tacacaaggagttcccatacacctg

SEQ ID NO: 1073386 - DNA, 25 bp, Homo sapien
gctggtcttcttaggtgcctctggg

SEQ ID NO: 1073387 - DNA, 25 bp, Homo sapien
ggttaccgtcagctgtgattgcgcc

SEQ ID NO: 1073388 - DNA, 25 bp, Homo sapien
taagtaaacaccatgatcgatctgg

SEQ ID NO: 1073389 - DNA, 25 bp, Homo sapien
ctcgggccgcgcgtcacagagcagg

SEQ ID NO: 1073390 - DNA, 25 bp, Homo sapien
gggccgcgcgtcacagagcagggcg

SEQ ID NO: 1073391 - DNA, 25 bp, Homo sapien
tgtgagccctgcgtgcgcctcgggc

SEQ ID NO: 1073392 - DNA, 25 bp, Homo sapien
gccgcgcgtcacagagcagggcggg

SEQ ID NO: 1073393 - DNA, 25 bp, Homo sapien
gaccccgcgcccgagcactgacgcc

SEQ ID NO: 1073394 - DNA, 25 bp, Homo sapien
cgcgcccgagcactgacgccaggag

SEQ ID NO: 1073395 - DNA, 25 bp, Homo sapien
agcactgacgccaggagccgcagcg

SEQ ID NO: 1073396 - DNA, 25 bp, Homo sapien
gcccgagcactgacgccaggagccg

SEQ ID NO: 1073397 - DNA, 25 bp, Homo sapien
ccgtcagagatgtccttcaccatct

SEQ ID NO: 1073398 - DNA, 25 bp, Homo sapien
ccgggtccgcgtagaacttggcacg

SEQ ID NO: 1073399 - DNA, 25 bp, Homo sapien
gcaggtctttcacgcgggtcctgag

SEQ ID NO: 1073400 - DNA, 25 bp, Homo sapien
gatcatgacggtcgccccgtcagag

SEQ ID NO: 1073401 - DNA, 25 bp, Homo sapien
ctggaccagggtcccgtagcccgtg

SEQ ID NO: 1073402 - DNA, 25 bp, Homo sapien
tactggctctcgcacagggtgttct

SEQ ID NO: 1073403 - DNA, 25 bp, Homo sapien
tgccctggggcgtgagctccagctc

SEQ ID NO: 1073404 - DNA, 25 bp, Homo sapien
cgtaggaacagacgatgcgacggac

SEQ ID NO: 1073405 - DNA, 25 bp, Homo sapien
aagtggtcgccgttgaactccctca

SEQ ID NO: 1073406 - DNA, 25 bp, Homo sapien
tttcaccagggcgaagtctgcccgg

SEQ ID NO: 1073407 - DNA, 25 bp, Homo sapien
tggcgcgctccaaaaggaagtggtc

SEQ ID NO: 1073408 - DNA, 25 bp, Homo sapien
tgcacatgggcacgttgaaattgcg

SEQ ID NO: 1073409 - DNA, 25 bp, Homo sapien
aatgttaggaacgtggatgtcttct

SEQ ID NO: 1073410 - DNA, 25 bp, Homo sapien
tgttaggaacgtggatgtcttctgg

SEQ ID NO: 1073411 - DNA, 25 bp, Homo sapien
aaatgttaggaacgtggatgtcttc

SEQ ID NO: 1073412 - DNA, 25 bp, Homo sapien
ataaatgttaggaacgtggatgtct

SEQ ID NO: 1073413 - DNA, 25 bp, Homo sapien
tatgcccagattggcgtacatgccg

SEQ ID NO: 1073414 - DNA, 25 bp, Homo sapien
cagggatcatccagttcgccaggtc

SEQ ID NO: 1073415 - DNA, 25 bp, Homo sapien
tctcggtgatgatgcggtccacgca

SEQ ID NO: 1073416 - DNA, 25 bp, Homo sapien
caggatcccgttctcactgtgaaga

SEQ ID NO: 1073417 - DNA, 25 bp, Homo sapien
ctgcatgggcctgaggttcggggac

SEQ ID NO: 1073418 - DNA, 25 bp, Homo sapien
tgcatgggcctgaggttcggggaca

SEQ ID NO: 1073419 - DNA, 25 bp, Homo sapien
tgctgcatgggcctgaggttcgggg

SEQ ID NO: 1073420 - DNA, 25 bp, Homo sapien
gcatgggcctgaggttcggggacac

SEQ ID NO: 1073421 - DNA, 25 bp, Homo sapien
aggaaagtaggaggccagtagcaaa

SEQ ID NO: 1073422 - DNA, 25 bp, Homo sapien
gagctggggacatgtattcccctgg

SEQ ID NO: 1073423 - DNA, 25 bp, Homo sapien
gagcactgtccacctagggaggaaa

SEQ ID NO: 1073424 - DNA, 25 bp, Homo sapien
taggaggccagtagcaaacccctcc

SEQ ID NO: 1073425 - DNA, 25 bp, Homo sapien
cctcctgtcctaggctgtagccttt

SEQ ID NO: 1073426 - DNA, 25 bp, Homo sapien
ttagggttctagaactcctcctgtc

SEQ ID NO: 1073427 - DNA, 25 bp, Homo sapien
acacacagatagaggaagcttcctg

SEQ ID NO: 1073428 - DNA, 25 bp, Homo sapien
aaactcatctagtcccttggttagg

SEQ ID NO: 1073429 - DNA, 25 bp, Homo sapien
tatagattcaggaggaaatgcctcg

SEQ ID NO: 1073430 - DNA, 25 bp, Homo sapien
aaatgcctcgcagcctcttgggtta

SEQ ID NO: 1073431 - DNA, 25 bp, Homo sapien
tacacttatgcagtgcatgcaccag

SEQ ID NO: 1073432 - DNA, 25 bp, Homo sapien
gctgtcaacagcacgtgtgcacgcg

SEQ ID NO: 1073433 - DNA, 25 bp, Homo sapien
gaaactgacgcccagggcaaatcag

SEQ ID NO: 1073434 - DNA, 25 bp, Homo sapien
agtctgtgccctccatgagcgccaa

SEQ ID NO: 1073435 - DNA, 25 bp, Homo sapien
tgtccgcttctagatacctcagcct

SEQ ID NO: 1073436 - DNA, 25 bp, Homo sapien
aggagccccaaaaggcaccccactg

SEQ ID NO: 1073437 - DNA, 25 bp, Homo sapien
ccattcttaggcaggactccctggc

SEQ ID NO: 1073438 - DNA, 25 bp, Homo sapien
ttaggcaggactccctggctccagc

SEQ ID NO: 1073439 - DNA, 25 bp, Homo sapien
ggcaggactccctggctccagctgg

SEQ ID NO: 1073440 - DNA, 25 bp, Homo sapien
tcttaggcaggactccctggctcca

SEQ ID NO: 1073441 - DNA, 25 bp, Homo sapien
ctttgacccgtgacatcatccgcca

SEQ ID NO: 1073442 - DNA, 25 bp, Homo sapien
tccctccctctcacgagcatggaca

SEQ ID NO: 1073443 - DNA, 25 bp, Homo sapien
gacatcatccgccacaaacaaatgc

SEQ ID NO: 1073444 - DNA, 25 bp, Homo sapien
ccctctcacgagcatggacaagagc

SEQ ID NO: 1073445 - DNA, 25 bp, Homo sapien
taaaatcccttggagcagtataccg

SEQ ID NO: 1073446 - DNA, 25 bp, Homo sapien
atggagcctcttcactccgtgcatg

SEQ ID NO: 1073447 - DNA, 25 bp, Homo sapien
gagcctcttcactccgtgcatgggt

SEQ ID NO: 1073448 - DNA, 25 bp, Homo sapien
gtaattgacttgatattggctcatc

SEQ ID NO: 1073449 - DNA, 25 bp, Homo sapien
caagagcagggcattaactgtctcc

SEQ ID NO: 1073450 - DNA, 25 bp, Homo sapien
tctgccaggttgagcgagtgcttgt

SEQ ID NO: 1073451 - DNA, 25 bp, Homo sapien
tgtgaatgtcaaacttatcaccgag

SEQ ID NO: 1073452 - DNA, 25 bp, Homo sapien
tatcaccgagacagctcgtggtagc

SEQ ID NO: 1073453 - DNA, 25 bp, Homo sapien
cagctcgtggtagcatctgccaggt

SEQ ID NO: 1073454 - DNA, 25 bp, Homo sapien
ctgtgttctgtcttccgtcccgcac

SEQ ID NO: 1073455 - DNA, 25 bp, Homo sapien
ctgggcaggtccaggagcgtggagg

SEQ ID NO: 1073456 - DNA, 25 bp, Homo sapien
cctgcagcagacacagcagcggtct

SEQ ID NO: 1073457 - DNA, 25 bp, Homo sapien
tgcagcagacacagcagcggtctct

SEQ ID NO: 1073458 - DNA, 25 bp, Homo sapien
gccctgcagcagacacagcagcggt

SEQ ID NO: 1073459 - DNA, 25 bp, Homo sapien
gggcagcggccctgcagcagacaca

SEQ ID NO: 1073460 - DNA, 25 bp, Homo sapien
aagatccctgggagtcggttggcct

SEQ ID NO: 1073461 - DNA, 25 bp, Homo sapien
gggactcggactggccctgaagaaa

SEQ ID NO: 1073462 - DNA, 25 bp, Homo sapien
agcgtggggcccgttgacccagcag

SEQ ID NO: 1073463 - DNA, 25 bp, Homo sapien
tgaagaaagtgaccacgaaaggctg

SEQ ID NO: 1073464 - DNA, 25 bp, Homo sapien
gagctcgtgccgacggcagacctgc

SEQ ID NO: 1073465 - DNA, 25 bp, Homo sapien
gaagctgacgtagagctcgtgccga

SEQ ID NO: 1073466 - DNA, 25 bp, Homo sapien
gacggcagacctgccggccgtggga

SEQ ID NO: 1073467 - DNA, 25 bp, Homo sapien
ggtcctggaagctgacgtagagctc

SEQ ID NO: 1073468 - DNA, 25 bp, Homo sapien
ctgcagattcacttctgatctacag

SEQ ID NO: 1073469 - DNA, 25 bp, Homo sapien
ttggtggcgttcatgcaggagtcca

SEQ ID NO: 1073470 - DNA, 25 bp, Homo sapien
tccccctcacagtaataggctgagt

SEQ ID NO: 1073471 - DNA, 25 bp, Homo sapien
cagtaataggctgagtagccttggg

SEQ ID NO: 1073472 - DNA, 25 bp, Homo sapien
gagtccagcgggaaggagcactccc

SEQ ID NO: 1073473 - DNA, 25 bp, Homo sapien
agggggctgggcaggatgggcacgg

SEQ ID NO: 1073474 - DNA, 25 bp, Homo sapien
gggctgggcaggatgggcacggtac

SEQ ID NO: 1073475 - DNA, 25 bp, Homo sapien
gctgggcaggatgggcacggtactg

SEQ ID NO: 1073476 - DNA, 25 bp, Homo sapien
tgggcaggatgggcacggtactgac

SEQ ID NO: 1073477 - DNA, 25 bp, Homo sapien
ccatgttgcggtgcttgcgcaggat

SEQ ID NO: 1073478 - DNA, 25 bp, Homo sapien
catagtagagcacagaggtggcgct

SEQ ID NO: 1073479 - DNA, 25 bp, Homo sapien
tgaccaccatgttgcggtgcttgcg

SEQ ID NO: 1073480 - DNA, 25 bp, Homo sapien
tgtcatagtagagcacagaggtggc

SEQ ID NO: 1073481 - DNA, 25 bp, Homo sapien
gataggacttctgtgctgactccag

SEQ ID NO: 1073482 - DNA, 25 bp, Homo sapien
tgccttaggccaccaaagtgtcggg

SEQ ID NO: 1073483 - DNA, 25 bp, Homo sapien
cccagaaatggccagtgttgtacct

SEQ ID NO: 1073484 - DNA, 25 bp, Homo sapien
taatatgctaactgcaccctggacc

SEQ ID NO: 1073485 - DNA, 25 bp, Homo sapien
tgcaatggcagataggccccaagtc

SEQ ID NO: 1073486 - DNA, 25 bp, Homo sapien
aattactgcctgtcactccctggga

SEQ ID NO: 1073487 - DNA, 25 bp, Homo sapien
tgggcccaccctttatgtacatgag

SEQ ID NO: 1073488 - DNA, 25 bp, Homo sapien
tgtgccagcctacactacatgttgg

SEQ ID NO: 1073489 - DNA, 25 bp, Homo sapien
ggaaggccacgactgtcacactttg

SEQ ID NO: 1073490 - DNA, 25 bp, Homo sapien
taaaaagggagtctcatcatgatcc

SEQ ID NO: 1073491 - DNA, 25 bp, Homo sapien
aggttacacactgggcactgaagag

SEQ ID NO: 1073492 - DNA, 25 bp, Homo sapien
aagttgctagaagtctggccaccag

SEQ ID NO: 1073493 - DNA, 25 bp, Homo sapien
gcatcgcccggtccctatgtaaaga

SEQ ID NO: 1073494 - DNA, 25 bp, Homo sapien
gatgccaggtcgacttggctccaaa

SEQ ID NO: 1073495 - DNA, 25 bp, Homo sapien
gttgttctgcaccaaatggccccag

SEQ ID NO: 1073496 - DNA, 25 bp, Homo sapien
gaatttctctaaagcgcatcgcccg

SEQ ID NO: 1073497 - DNA, 25 bp, Homo sapien
tatgaggaaggcacacaaggaacgc

SEQ ID NO: 1073498 - DNA, 25 bp, Homo sapien
cctcatggaggcctcaaaagggcag

SEQ ID NO: 1073499 - DNA, 25 bp, Homo sapien
tccttccacgagcaggcgagtgtgc

SEQ ID NO: 1073500 - DNA, 25 bp, Homo sapien
tgtttattccacaggtctgcgcagg

SEQ ID NO: 1073501 - DNA, 25 bp, Homo sapien
gataacattttcttacgtgagaaaa

SEQ ID NO: 1073502 - DNA, 25 bp, Homo sapien
caactgtttgctcaagacttttcag

SEQ ID NO: 1073503 - DNA, 25 bp, Homo sapien
gatccgatcaccaagcagtgcatag

SEQ ID NO: 1073504 - DNA, 25 bp, Homo sapien
tgtatatgtgccaagtaagaagact

SEQ ID NO: 1073505 - DNA, 25 bp, Homo sapien
attttgcattcttaacggcagtgta

SEQ ID NO: 1073506 - DNA, 25 bp, Homo sapien
ctttctattgttgagtaagaattct

SEQ ID NO: 1073507 - DNA, 25 bp, Homo sapien
gacctatcctagtgatgtgaagtgg

SEQ ID NO: 1073508 - DNA, 25 bp, Homo sapien
cggcagtgtatgatgtttctgatgc

SEQ ID NO: 1073509 - DNA, 25 bp, Homo sapien
cagtacatcattccttttttttctt

SEQ ID NO: 1073510 - DNA, 25 bp, Homo sapien
tcagtacatcattccttttttttct

SEQ ID NO: 1073511 - DNA, 25 bp, Homo sapien
gacctcgtgatctgcccaccttggc

SEQ ID NO: 1073512 - DNA, 25 bp, Homo sapien
cctgacctcgtgatctgcccacctt

SEQ ID NO: 1073513 - DNA, 25 bp, Homo sapien
tgcctagagctgcacttagtagtgt

SEQ ID NO: 1073514 - DNA, 25 bp, Homo sapien
ggactgattcaggtgtgttgttttg

SEQ ID NO: 1073515 - DNA, 25 bp, Homo sapien
tcaaatgcttggaagcaactacatg

SEQ ID NO: 1073516 - DNA, 25 bp, Homo sapien
gaacatgtgtacttctgcctagagc

SEQ ID NO: 1073517 - DNA, 25 bp, Homo sapien
agaattttctctacatgtgcaccca

SEQ ID NO: 1073518 - DNA, 25 bp, Homo sapien
gttagatattcttacctcagcactt

SEQ ID NO: 1073519 - DNA, 25 bp, Homo sapien
ggaagcagcttccaccgcattatcc

SEQ ID NO: 1073520 - DNA, 25 bp, Homo sapien
tgtgcacccatttaaaggactcggc

SEQ ID NO: 1073521 - DNA, 25 bp, Homo sapien
acaagcagcgagagtcaaaacccag

SEQ ID NO: 1073522 - DNA, 25 bp, Homo sapien
ctgaatggagacaagcagcgagagt

SEQ ID NO: 1073523 - DNA, 25 bp, Homo sapien
gaaatgtggatttttctccgttggc

SEQ ID NO: 1073524 - DNA, 25 bp, Homo sapien
aatgtggatttttctccgttggcca

SEQ ID NO: 1073525 - DNA, 25 bp, Homo sapien
aaactttcgggatgctctgagtcca

SEQ ID NO: 1073526 - DNA, 25 bp, Homo sapien
gccaaggtgggagccaggctgttgc

SEQ ID NO: 1073527 - DNA, 25 bp, Homo sapien
ctgtgatggcgattgtatgatggac

SEQ ID NO: 1073528 - DNA, 25 bp, Homo sapien
tgaaagatgcaaagttaaccaagca

SEQ ID NO: 1073529 - DNA, 25 bp, Homo sapien
cacggtgcgggcttccggcggaagc

SEQ ID NO: 1073530 - DNA, 25 bp, Homo sapien
tctttccttaatctggtgccggatg

SEQ ID NO: 1073531 - DNA, 25 bp, Homo sapien
tcaccttaacagatctaaaggagat

SEQ ID NO: 1073532 - DNA, 25 bp, Homo sapien
gagatgtccttgtttccggacggcc

SEQ ID NO: 1073533 - DNA, 25 bp, Homo sapien
tgtcctatggacctcaacaccaagg

SEQ ID NO: 1073534 - DNA, 25 bp, Homo sapien
gaagacttcctagcttgtcctatgg

SEQ ID NO: 1073535 - DNA, 25 bp, Homo sapien
tcaggagccttgtcatctagtggta

SEQ ID NO: 1073536 - DNA, 25 bp, Homo sapien
gacccaacagaatgtccaaagtgtc

SEQ ID NO: 1073537 - DNA, 25 bp, Homo sapien
tatgcaacgagtggctggaatgaga

SEQ ID NO: 1073538 - DNA, 25 bp, Homo sapien
cagtatatgcaacgagtggctggaa

SEQ ID NO: 1073539 - DNA, 25 bp, Homo sapien
gtatatgcaacgagtggctggaatg

SEQ ID NO: 1073540 - DNA, 25 bp, Homo sapien
tatatgcaacgagtggctggaatga

SEQ ID NO: 1073541 - DNA, 25 bp, Homo sapien
gacagatggtgctacagaatgagca

SEQ ID NO: 1073542 - DNA, 25 bp, Homo sapien
tttggatcaattaccagtgctaagg

SEQ ID NO: 1073543 - DNA, 25 bp, Homo sapien
ttccttgctgcctcgtgccggtgtg

SEQ ID NO: 1073544 - DNA, 25 bp, Homo sapien
tataggcttattggcatttgtccca

SEQ ID NO: 1073545 - DNA, 25 bp, Homo sapien
tgcagtggttgatctacagatatca

SEQ ID NO: 1073546 - DNA, 25 bp, Homo sapien
agaagagacaataagtcttggctat

SEQ ID NO: 1073547 - DNA, 25 bp, Homo sapien
gtcattcagtatgccagaggatggg

SEQ ID NO: 1073548 - DNA, 25 bp, Homo sapien
aagtcttggctattacaagccaaaa

SEQ ID NO: 1073549 - DNA, 25 bp, Homo sapien
tctggtgtgggaaacgtcttcatca

SEQ ID NO: 1073550 - DNA, 25 bp, Homo sapien
cagctgagcgggctttggacaccat

SEQ ID NO: 1073551 - DNA, 25 bp, Homo sapien
catcatgtggtctcagagggatccc

SEQ ID NO: 1073552 - DNA, 25 bp, Homo sapien
gggaaagccaatccgcatcatgtgg

SEQ ID NO: 1073553 - DNA, 25 bp, Homo sapien
gacttgataactttgatgcaatacc

SEQ ID NO: 1073554 - DNA, 25 bp, Homo sapien
cataggtggattgcagactaaatga

SEQ ID NO: 1073555 - DNA, 25 bp, Homo sapien
caggttttgtcacttgtctccatag

SEQ ID NO: 1073556 - DNA, 25 bp, Homo sapien
ttttccagatcatttgctttacagg

SEQ ID NO: 1073557 - DNA, 25 bp, Homo sapien
tgcggcgggcccgataagaagtcct

SEQ ID NO: 1073558 - DNA, 25 bp, Homo sapien
caggaccgcggagaagtgcaaagtc

SEQ ID NO: 1073559 - DNA, 25 bp, Homo sapien
aatttggagcttcgcaccaggaccg

SEQ ID NO: 1073560 - DNA, 25 bp, Homo sapien
cgtattgtgcggagagccttttgtc

SEQ ID NO: 1073561 - DNA, 25 bp, Homo sapien
gcttttaatatctggttcttggtca

SEQ ID NO: 1073562 - DNA, 25 bp, Homo sapien
agcttttaatatctggttcttggtc

SEQ ID NO: 1073563 - DNA, 25 bp, Homo sapien
catctttgtagccagtgttcagcct

SEQ ID NO: 1073564 - DNA, 25 bp, Homo sapien
tctttgtagccagtgttcagcctgg

SEQ ID NO: 1073565 - DNA, 25 bp, Homo sapien
tagcagttatgattctcctcgttca

SEQ ID NO: 1073566 - DNA, 25 bp, Homo sapien
gggacttgaacaggagaatagcagt

SEQ ID NO: 1073567 - DNA, 25 bp, Homo sapien
tttgagactgaatctttctcttgtc

SEQ ID NO: 1073568 - DNA, 25 bp, Homo sapien
gagactgaatctttctcttgtcacc

SEQ ID NO: 1073569 - DNA, 25 bp, Homo sapien
tttttgagactgaatctttctcttg

SEQ ID NO: 1073570 - DNA, 25 bp, Homo sapien
tgagactgaatctttctcttgtcac

SEQ ID NO: 1073571 - DNA, 25 bp, Homo sapien
gagaagaggagattcataacctgca

SEQ ID NO: 1073572 - DNA, 25 bp, Homo sapien
tagattttctctgaggcaggcaaga

SEQ ID NO: 1073573 - DNA, 25 bp, Homo sapien
aggcaggccattagacccctcagtc

SEQ ID NO: 1073574 - DNA, 25 bp, Homo sapien
gagtggacttgcagtgtagacagca

SEQ ID NO: 1073575 - DNA, 25 bp, Homo sapien
aagaagggttagcagttgggctgga

SEQ ID NO: 1073576 - DNA, 25 bp, Homo sapien
cattctaagagagcttctgaagcag

SEQ ID NO: 1073577 - DNA, 25 bp, Homo sapien
ttagcagttgggctggagattattt

SEQ ID NO: 1073578 - DNA, 25 bp, Homo sapien
gggttagcagttgggctggagatta

SEQ ID NO: 1073579 - DNA, 25 bp, Homo sapien
tattttagacatagcgtgggcaggt

SEQ ID NO: 1073580 - DNA, 25 bp, Homo sapien
gttcagatgtgtggcgttgtgtctt

SEQ ID NO: 1073581 - DNA, 25 bp, Homo sapien
cagctttccaccttgcagaactggg

SEQ ID NO: 1073582 - DNA, 25 bp, Homo sapien
agaactggggtaccttcactgagat

SEQ ID NO: 1073583 - DNA, 25 bp, Homo sapien
aagtgcccagtgttgatttcagcag

SEQ ID NO: 1073584 - DNA, 25 bp, Homo sapien
taaacatgagttttggatagattga

SEQ ID NO: 1073585 - DNA, 25 bp, Homo sapien
gatagattgaagtgcccagtgttga

SEQ ID NO: 1073586 - DNA, 25 bp, Homo sapien
ccgagccaacaaggtcatccatgta

SEQ ID NO: 1073587 - DNA, 25 bp, Homo sapien
tcagctgtagtcaggattatttaac

SEQ ID NO: 1073588 - DNA, 25 bp, Homo sapien
cagatggccactttagtcctttcag

SEQ ID NO: 1073589 - DNA, 25 bp, Homo sapien
ggctttgagctgactttagagatca

SEQ ID NO: 1073590 - DNA, 25 bp, Homo sapien
tcctgacaatggcagagtctctaga

SEQ ID NO: 1073591 - DNA, 25 bp, Homo sapien
cccgcggcccgccgaggctcggagc

SEQ ID NO: 1073592 - DNA, 25 bp, Homo sapien
gccggcccgcgagccagcctcggtt

SEQ ID NO: 1073593 - DNA, 25 bp, Homo sapien
cagcctcggttcccgcggcccgccg

SEQ ID NO: 1073594 - DNA, 25 bp, Homo sapien
ttcccgcggcccgccgaggctcgga

SEQ ID NO: 1073595 - DNA, 25 bp, Homo sapien
tgtaaaccgcctcgggtttgtgtca

SEQ ID NO: 1073596 - DNA, 25 bp, Homo sapien
caggagctctcagacgccagtgcag

SEQ ID NO: 1073597 - DNA, 25 bp, Homo sapien
tttgtgtcaacatccgaggccggag

SEQ ID NO: 1073598 - DNA, 25 bp, Homo sapien
aaagcttccagacccgctcagtgta

SEQ ID NO: 1073599 - DNA, 25 bp, Homo sapien
tgctcttcagcgtccgcgctccgat

SEQ ID NO: 1073600 - DNA, 25 bp, Homo sapien
ccgtccgccccgactttcgacagat

SEQ ID NO: 1073601 - DNA, 25 bp, Homo sapien
gattaggccaatccccagccgtccg

SEQ ID NO: 1073602 - DNA, 25 bp, Homo sapien
ccgactttcgacagatccttagaag

SEQ ID NO: 1073603 - DNA, 25 bp, Homo sapien
tactgatcctgcagggactgtctct

SEQ ID NO: 1073604 - DNA, 25 bp, Homo sapien
caacttaacctagagcacgcctttc

SEQ ID NO: 1073605 - DNA, 25 bp, Homo sapien
taagctgaggtcactatccgcctgc

SEQ ID NO: 1073606 - DNA, 25 bp, Homo sapien
tcgaacaagccagttctaggcctac

SEQ ID NO: 1073607 - DNA, 25 bp, Homo sapien
ggtcccggcggtggtgcagtgactc

SEQ ID NO: 1073608 - DNA, 25 bp, Homo sapien
tgtactgggatgaattaatgctgct

SEQ ID NO: 1073609 - DNA, 25 bp, Homo sapien
tactgggatgaattaatgctgctgc

SEQ ID NO: 1073610 - DNA, 25 bp, Homo sapien
atagtgtactgggatgaattaatgc

SEQ ID NO: 1073611 - DNA, 25 bp, Homo sapien
gtgtactgggatgaattaatgctgc

SEQ ID NO: 1073612 - DNA, 25 bp, Homo sapien
gaatgctactggctttcacaaggtg

SEQ ID NO: 1073613 - DNA, 25 bp, Homo sapien
tactggctttcacaaggtgggcaca

SEQ ID NO: 1073614 - DNA, 25 bp, Homo sapien
cttgaatgctactggctttcacaag

SEQ ID NO: 1073615 - DNA, 25 bp, Homo sapien
ggtgggcacagtccatcagcacttc

SEQ ID NO: 1073616 - DNA, 25 bp, Homo sapien
tctgcctgtgaaaacctatgtgccc

SEQ ID NO: 1073617 - DNA, 25 bp, Homo sapien
tataccacattaacgttcatcttgc

SEQ ID NO: 1073618 - DNA, 25 bp, Homo sapien
gaaaacctatgtgccccacatccat

SEQ ID NO: 1073619 - DNA, 25 bp, Homo sapien
ttcttcaggttagactgcggcgtat

SEQ ID NO: 1073620 - DNA, 25 bp, Homo sapien
ttttctcccatgtcacaatttttac

SEQ ID NO: 1073621 - DNA, 25 bp, Homo sapien
tcattagtggtaaatagctcctaag

SEQ ID NO: 1073622 - DNA, 25 bp, Homo sapien
tcattgccatcctgatttgaagaca

SEQ ID NO: 1073623 - DNA, 25 bp, Homo sapien
ggtaaatagctcctaagttcatcca

SEQ ID NO: 1073624 - DNA, 25 bp, Homo sapien
gtctgggaaccactccactttggtc

SEQ ID NO: 1073625 - DNA, 25 bp, Homo sapien
aaggtctgcaattgtctctacattc

SEQ ID NO: 1073626 - DNA, 25 bp, Homo sapien
caaaaggtctgcaattgtctctaca

SEQ ID NO: 1073627 - DNA, 25 bp, Homo sapien
aaaaggtctgcaattgtctctacat

SEQ ID NO: 1073628 - DNA, 25 bp, Homo sapien
ggtctgcaattgtctctacattcac

SEQ ID NO: 1073629 - DNA, 25 bp, Homo sapien
ctaacagacccagatgacacgatgg

SEQ ID NO: 1073630 - DNA, 25 bp, Homo sapien
actaacagacccagatgacacgatg

SEQ ID NO: 1073631 - DNA, 25 bp, Homo sapien
acagacccagatgacacgatggaac

SEQ ID NO: 1073632 - DNA, 25 bp, Homo sapien
taacagacccagatgacacgatgga

SEQ ID NO: 1073633 - DNA, 25 bp, Homo sapien
tctgttcttgggaaagtgctgccgc

SEQ ID NO: 1073634 - DNA, 25 bp, Homo sapien
gccctctcttctttcgtaggcgcgt

SEQ ID NO: 1073635 - DNA, 25 bp, Homo sapien
ttcgtaggcgcgtgggtcactcact

SEQ ID NO: 1073636 - DNA, 25 bp, Homo sapien
ttctgttcttgggaaagtgctgccg

SEQ ID NO: 1073637 - DNA, 25 bp, Homo sapien
gacaacctgggagctaagaatgaat

SEQ ID NO: 1073638 - DNA, 25 bp, Homo sapien
ttggacaacctgggagctaagaatg

SEQ ID NO: 1073639 - DNA, 25 bp, Homo sapien
tggacaacctgggagctaagaatga

SEQ ID NO: 1073640 - DNA, 25 bp, Homo sapien
caacctgggagctaagaatgaattt

SEQ ID NO: 1073641 - DNA, 25 bp, Homo sapien
cttgctcgcgcgcttttccgccgga

SEQ ID NO: 1073642 - DNA, 25 bp, Homo sapien
tgctcgcgcgcttttccgccggaag

SEQ ID NO: 1073643 - DNA, 25 bp, Homo sapien
cggaagccagcactcgacccgtcct

SEQ ID NO: 1073644 - DNA, 25 bp, Homo sapien
ccgccggaagccagcactcgacccg

SEQ ID NO: 1073645 - DNA, 25 bp, Homo sapien
ccagcgaatcgggaagcaaagcaaa

SEQ ID NO: 1073646 - DNA, 25 bp, Homo sapien
tggcaaggctgttcactgcaaggga

SEQ ID NO: 1073647 - DNA, 25 bp, Homo sapien
gtcatttttcgggagacccagcgaa

SEQ ID NO: 1073648 - DNA, 25 bp, Homo sapien
gaagtgcgtactgctaagaagtctg

SEQ ID NO: 1073649 - DNA, 25 bp, Homo sapien
cttctgagccactgatctccatact

SEQ ID NO: 1073650 - DNA, 25 bp, Homo sapien
actgatctccatactcttgcagaag

SEQ ID NO: 1073651 - DNA, 25 bp, Homo sapien
tgagccactgatctccatactcttg

SEQ ID NO: 1073652 - DNA, 25 bp, Homo sapien
ctgcaaataagccaagggccttctg

SEQ ID NO: 1073653 - DNA, 25 bp, Homo sapien
agaactttgtcgtccacttcctctg

SEQ ID NO: 1073654 - DNA, 25 bp, Homo sapien
cgcagcatgaagaactttgtcgtcc

SEQ ID NO: 1073655 - DNA, 25 bp, Homo sapien
gcatgaagaactttgtcgtccactt

SEQ ID NO: 1073656 - DNA, 25 bp, Homo sapien
tgaagaactttgtcgtccacttcct

SEQ ID NO: 1073657 - DNA, 25 bp, Homo sapien
ctctgccaactcaaattcaacaaaa

SEQ ID NO: 1073658 - DNA, 25 bp, Homo sapien
ttcaacaaaagcaaatcctcggtgc

SEQ ID NO: 1073659 - DNA, 25 bp, Homo sapien
caacaaaagcaaatcctcggtgctt

SEQ ID NO: 1073660 - DNA, 25 bp, Homo sapien
acaaaagcaaatcctcggtgctttt

SEQ ID NO: 1073661 - DNA, 25 bp, Homo sapien
tggaagtccagaacactgatatatg

SEQ ID NO: 1073662 - DNA, 25 bp, Homo sapien
gcctctgtaccaccaaaaagcaact

SEQ ID NO: 1073663 - DNA, 25 bp, Homo sapien
agtccagaacactgatatatgaata

SEQ ID NO: 1073664 - DNA, 25 bp, Homo sapien
aaggagcctctgtaccaccaaaaag

SEQ ID NO: 1073665 - DNA, 25 bp, Homo sapien
caaagataatcggtaccaggaaagg

SEQ ID NO: 1073666 - DNA, 25 bp, Homo sapien
tcaggactaactatgcactaatcgg

SEQ ID NO: 1073667 - DNA, 25 bp, Homo sapien
taggttaaaagagggccagccagct

SEQ ID NO: 1073668 - DNA, 25 bp, Homo sapien
gggcctctaccagtaagctatgcag

SEQ ID NO: 1073669 - DNA, 25 bp, Homo sapien
ctgaaaagattgaaaatccagctgc

SEQ ID NO: 1073670 - DNA, 25 bp, Homo sapien
aaaagattgaaaatccagctgctta

SEQ ID NO: 1073671 - DNA, 25 bp, Homo sapien
gaaaagattgaaaatccagctgctt

SEQ ID NO: 1073672 - DNA, 25 bp, Homo sapien
agattgaaaatccagctgcttaaac

SEQ ID NO: 1073673 - DNA, 25 bp, Homo sapien
tggccaaattgacacgaattgtacg

SEQ ID NO: 1073674 - DNA, 25 bp, Homo sapien
caaattgacacgaattgtacgtcca

SEQ ID NO: 1073675 - DNA, 25 bp, Homo sapien
gacacgaattgtacgtccaaaaagc

SEQ ID NO: 1073676 - DNA, 25 bp, Homo sapien
gaattgtacgtccaaaaagctcaga

SEQ ID NO: 1073677 - DNA, 25 bp, Homo sapien
gaaaacttcttcaaccagtcatcat

SEQ ID NO: 1073678 - DNA, 25 bp, Homo sapien
tcttcaaccagtcatcatctgacca

SEQ ID NO: 1073679 - DNA, 25 bp, Homo sapien
ttcaaccagtcatcatctgaccaaa

SEQ ID NO: 1073680 - DNA, 25 bp, Homo sapien
attctcttcaagcgtcttcccagaa

SEQ ID NO: 1073681 - DNA, 25 bp, Homo sapien
tgagcgggcctttttagcaatgggc

SEQ ID NO: 1073682 - DNA, 25 bp, Homo sapien
agcgggcctttttagcaatgggctc

SEQ ID NO: 1073683 - DNA, 25 bp, Homo sapien
gaggatttgagcgggcctttttagc

SEQ ID NO: 1073684 - DNA, 25 bp, Homo sapien
atttgagcgggcctttttagcaatg

SEQ ID NO: 1073685 - DNA, 25 bp, Homo sapien
gggcacgacatcagaacgcaggagc

SEQ ID NO: 1073686 - DNA, 25 bp, Homo sapien
acatcagaacgcaggagcatctgga

SEQ ID NO: 1073687 - DNA, 25 bp, Homo sapien
tgctgtcatgggcacgacatcagaa

SEQ ID NO: 1073688 - DNA, 25 bp, Homo sapien
tgtcatgggcacgacatcagaacgc

SEQ ID NO: 1073689 - DNA, 25 bp, Homo sapien
tcaaagaaccgtaccaatagagggc

SEQ ID NO: 1073690 - DNA, 25 bp, Homo sapien
taggacatcctacgcatagtgaggg

SEQ ID NO: 1073691 - DNA, 25 bp, Homo sapien
tgatatagcagacccgagaaagctg

SEQ ID NO: 1073692 - DNA, 25 bp, Homo sapien
tgctatgcaaaatcaacaaggcgtg

SEQ ID NO: 1073693 - DNA, 25 bp, Homo sapien
cttgtaaggactataagggattctt

SEQ ID NO: 1073694 - DNA, 25 bp, Homo sapien
aaagccaaagcccttttcatgagtg

SEQ ID NO: 1073695 - DNA, 25 bp, Homo sapien
agccaaagcccttttcatgagtgca

SEQ ID NO: 1073696 - DNA, 25 bp, Homo sapien
gtcccgtatgcttgaggataaagtt

SEQ ID NO: 1073697 - DNA, 25 bp, Homo sapien
tggtcccgtatgcttgaggataaag

SEQ ID NO: 1073698 - DNA, 25 bp, Homo sapien
gaggctggcctaggagagacagctc

SEQ ID NO: 1073699 - DNA, 25 bp, Homo sapien
gagagggacaggatccagtccacag

SEQ ID NO: 1073700 - DNA, 25 bp, Homo sapien
gctcatcccctgtaattggaagaaa

SEQ ID NO: 1073701 - DNA, 25 bp, Homo sapien
gagacagctcatcccctgtaattgg

SEQ ID NO: 1073702 - DNA, 25 bp, Homo sapien
cagttagaaaaacggagcacagggt

SEQ ID NO: 1073703 - DNA, 25 bp, Homo sapien
aaaataacgatgtgggtcagtgggc

SEQ ID NO: 1073704 - DNA, 25 bp, Homo sapien
tagtggtatccagttgacactcccg

SEQ ID NO: 1073705 - DNA, 25 bp, Homo sapien
ccagccaagtgaagaaggagtcaag

SEQ ID NO: 1073706 - DNA, 25 bp, Homo sapien
agccattggtgtttgggccagagtt

SEQ ID NO: 1073707 - DNA, 25 bp, Homo sapien
ctaggccttcggtgacctctccaaa

SEQ ID NO: 1073708 - DNA, 25 bp, Homo sapien
tcaatttgccgcaagacatctaggc

SEQ ID NO: 1073709 - DNA, 25 bp, Homo sapien
tgtcacatgtcaggaagaactgaga

SEQ ID NO: 1073710 - DNA, 25 bp, Homo sapien
tttagggataccaacccctgcctgc

SEQ ID NO: 1073711 - DNA, 25 bp, Homo sapien
gaggaggcccattcctggccacata

SEQ ID NO: 1073712 - DNA, 25 bp, Homo sapien
tcacacagggctgtgctcctagggc

SEQ ID NO: 1073713 - DNA, 25 bp, Homo sapien
ttccaccccggaacctgggcagcag

SEQ ID NO: 1073714 - DNA, 25 bp, Homo sapien
ccccacagtcggcgatgatcacctt

SEQ ID NO: 1073715 - DNA, 25 bp, Homo sapien
ctgctttggcttcccgtccttgctg

SEQ ID NO: 1073716 - DNA, 25 bp, Homo sapien
cgtactccccacagtcggcgatgat

SEQ ID NO: 1073717 - DNA, 25 bp, Homo sapien
tactccccacagtcggcgatgatca

SEQ ID NO: 1073718 - DNA, 25 bp, Homo sapien
gctgtgcctgggaatagtccaggct

SEQ ID NO: 1073719 - DNA, 25 bp, Homo sapien
gatatgcagggtcaagagcggaggg

SEQ ID NO: 1073720 - DNA, 25 bp, Homo sapien
tgctgcttgcttcaaacaggcaccc

SEQ ID NO: 1073721 - DNA, 25 bp, Homo sapien
ttcaaacaggcaccctcggtgctgc

SEQ ID NO: 1073722 - DNA, 25 bp, Homo sapien
agcaaagaaaacacgtaagagccac

SEQ ID NO: 1073723 - DNA, 25 bp, Homo sapien
tagcaaagaaaacacgtaagagcca

SEQ ID NO: 1073724 - DNA, 25 bp, Homo sapien
tttgcacagcctgcccatggtggag

SEQ ID NO: 1073725 - DNA, 25 bp, Homo sapien
gcaaagaaaacacgtaagagccaca

SEQ ID NO: 1073726 - DNA, 25 bp, Homo sapien
tttccgttgccctgacatcgatgcc

SEQ ID NO: 1073727 - DNA, 25 bp, Homo sapien
tattgtgtctatagccccttacgca

SEQ ID NO: 1073728 - DNA, 25 bp, Homo sapien
gaggcagcagaagaccggagctttc

SEQ ID NO: 1073729 - DNA, 25 bp, Homo sapien
tgcttccaaactgcctcagagctga

SEQ ID NO: 1073730 - DNA, 25 bp, Homo sapien
tcccagagaggtcagagttttcccg

SEQ ID NO: 1073731 - DNA, 25 bp, Homo sapien
tgtaaccgtttcagggccagcatgt

SEQ ID NO: 1073732 - DNA, 25 bp, Homo sapien
gagattctttataaccgcctggctg

SEQ ID NO: 1073733 - DNA, 25 bp, Homo sapien
tgagctttcagaactgcccactggc

SEQ ID NO: 1073734 - DNA, 25 bp, Homo sapien
aatccttatccgtttgctgagccaa

SEQ ID NO: 1073735 - DNA, 25 bp, Homo sapien
ccttgcggtgcaatactggccttga

SEQ ID NO: 1073736 - DNA, 25 bp, Homo sapien
tctcgttgcaccagatgagggttgg

SEQ ID NO: 1073737 - DNA, 25 bp, Homo sapien
gagaggacgcatacaacaggcaaaa

SEQ ID NO: 1073738 - DNA, 25 bp, Homo sapien
ctgggcactgcgtgttactacagct

SEQ ID NO: 1073739 - DNA, 25 bp, Homo sapien
gagcctctgggggtccgaagggcca

SEQ ID NO: 1073740 - DNA, 25 bp, Homo sapien
tccaggcccctcattagcgccttgc

SEQ ID NO: 1073741 - DNA, 25 bp, Homo sapien
ctccctgggcactgcgtgttactac

SEQ ID NO: 1073742 - DNA, 25 bp, Homo sapien
ctgacaggtgatggcagctggacgg

SEQ ID NO: 1073743 - DNA, 25 bp, Homo sapien
gacaggtgatggcagctggacgggg

SEQ ID NO: 1073744 - DNA, 25 bp, Homo sapien
tgacaggtgatggcagctggacggg

SEQ ID NO: 1073745 - DNA, 25 bp, Homo sapien
acaggtgatggcagctggacggggc

SEQ ID NO: 1073746 - DNA, 25 bp, Homo sapien
cttaggaggttcaacggtgatgcct

SEQ ID NO: 1073747 - DNA, 25 bp, Homo sapien
ctagaatcccagttcctggtattgc

SEQ ID NO: 1073748 - DNA, 25 bp, Homo sapien
gttcaacggtgatgccttgatcagg

SEQ ID NO: 1073749 - DNA, 25 bp, Homo sapien
ggtattgcacagccttatgttttcc

SEQ ID NO: 1073750 - DNA, 25 bp, Homo sapien
tgatgggatcactggtgctgctcac

SEQ ID NO: 1073751 - DNA, 25 bp, Homo sapien
gctgctcactgttgagtgctctgtg

SEQ ID NO: 1073752 - DNA, 25 bp, Homo sapien
ggatcactggtgctgctcactgttg

SEQ ID NO: 1073753 - DNA, 25 bp, Homo sapien
tcactgttgagtgctctgtgtgttt

SEQ ID NO: 1073754 - DNA, 25 bp, Homo sapien
ttctagatggtgtggctctcaacct

SEQ ID NO: 1073755 - DNA, 25 bp, Homo sapien
caggaagcttctagatggtgtggct

SEQ ID NO: 1073756 - DNA, 25 bp, Homo sapien
tggtgtggctctcaaccttttggct

SEQ ID NO: 1073757 - DNA, 25 bp, Homo sapien
gaagcttctagatggtgtggctctc

SEQ ID NO: 1073758 - DNA, 25 bp, Homo sapien
gaatcaaccaactaagctgtcagca

SEQ ID NO: 1073759 - DNA, 25 bp, Homo sapien
cattggctacgactgcagctctggg

SEQ ID NO: 1073760 - DNA, 25 bp, Homo sapien
tgaaatgacaatcaccacctgtaga

SEQ ID NO: 1073761 - DNA, 25 bp, Homo sapien
tctgcagggaggacatagaatcatg

SEQ ID NO: 1073762 - DNA, 25 bp, Homo sapien
ccaggacctcggctggctggtaatt

SEQ ID NO: 1073763 - DNA, 25 bp, Homo sapien
gacctcggctggctggtaattgctg

SEQ ID NO: 1073764 - DNA, 25 bp, Homo sapien
tacgtcagcttccaggacctcggct

SEQ ID NO: 1073765 - DNA, 25 bp, Homo sapien
gctggtaattgctgactcttcttgt

SEQ ID NO: 1073766 - DNA, 25 bp, Homo sapien
accctggtaccccatagtagctgca

SEQ ID NO: 1073767 - DNA, 25 bp, Homo sapien
aaatgtgctcatcagggcatccccc

SEQ ID NO: 1073768 - DNA, 25 bp, Homo sapien
ggcaggtctgccgtcggcacgagct

SEQ ID NO: 1073769 - DNA, 25 bp, Homo sapien
ggtaccccatagtagctgcacacag

SEQ ID NO: 1073770 - DNA, 25 bp, Homo sapien
tgagttagtagaggcatttccgcgg

SEQ ID NO: 1073771 - DNA, 25 bp, Homo sapien
caagtgctgactgttacctgccatt

SEQ ID NO: 1073772 - DNA, 25 bp, Homo sapien
tgagaacatgcctcgcgcgtggcaa

SEQ ID NO: 1073773 - DNA, 25 bp, Homo sapien
ggagccttcccagtacagtctaggt

SEQ ID NO: 1073774 - DNA, 25 bp, Homo sapien
aagacggttttactcattcattgcg

SEQ ID NO: 1073775 - DNA, 25 bp, Homo sapien
aggagcaaaataccgccacatgtta

SEQ ID NO: 1073776 - DNA, 25 bp, Homo sapien
tacttctgaatagtggaaaaactac

SEQ ID NO: 1073777 - DNA, 25 bp, Homo sapien
gttttagcagcacttacagacaaat

SEQ ID NO: 1073778 - DNA, 25 bp, Homo sapien
tcctcagttcccagacggggtcacg

SEQ ID NO: 1073779 - DNA, 25 bp, Homo sapien
atggggtggcggtcgggcagagaca

SEQ ID NO: 1073780 - DNA, 25 bp, Homo sapien
tggggtggcggtcgggcagagacac

SEQ ID NO: 1073781 - DNA, 25 bp, Homo sapien
tcagttcccagacggggtcacggcc

SEQ ID NO: 1073782 - DNA, 25 bp, Homo sapien
catcagcagtaatgggacaagttga

SEQ ID NO: 1073783 - DNA, 25 bp, Homo sapien
tatggtacactgagaagaatgtcgc

SEQ ID NO: 1073784 - DNA, 25 bp, Homo sapien
ccttgaaggcgactgaattggatgc

SEQ ID NO: 1073785 - DNA, 25 bp, Homo sapien
gatgcataaatcatgaggacacagc

SEQ ID NO: 1073786 - DNA, 25 bp, Homo sapien
agtccccctactccagggatgggca

SEQ ID NO: 1073787 - DNA, 25 bp, Homo sapien
tactccagggatgggcagttgcatg

SEQ ID NO: 1073788 - DNA, 25 bp, Homo sapien
ggatgggcagttgcatggcagtcat

SEQ ID NO: 1073789 - DNA, 25 bp, Homo sapien
agtgaacacacgagtccccctactc

SEQ ID NO: 1073790 - DNA, 25 bp, Homo sapien
ttcaccagtgacttggtgacaacca

SEQ ID NO: 1073791 - DNA, 25 bp, Homo sapien
ggcgctctcccagtttcaccagtga

SEQ ID NO: 1073792 - DNA, 25 bp, Homo sapien
tcccagtttcaccagtgacttggtg

SEQ ID NO: 1073793 - DNA, 25 bp, Homo sapien
caggggcgctctcccagtttcacca

SEQ ID NO: 1073794 - DNA, 25 bp, Homo sapien
cttcctgagcctccgaacactgcca

SEQ ID NO: 1073795 - DNA, 25 bp, Homo sapien
aggagctccccctcagagcagtggc

SEQ ID NO: 1073796 - DNA, 25 bp, Homo sapien
tccatgatgtccgaggcaggtggct

SEQ ID NO: 1073797 - DNA, 25 bp, Homo sapien
ggcttgtcttatgtgcactctggac

SEQ ID NO: 1073798 - DNA, 25 bp, Homo sapien
ggtacagggcttggcggcaaagtgg

SEQ ID NO: 1073799 - DNA, 25 bp, Homo sapien
gcggaagcgcgggaaggagctgctg

SEQ ID NO: 1073800 - DNA, 25 bp, Homo sapien
ggcttggcggcaaagtgggttgtgc

SEQ ID NO: 1073801 - DNA, 25 bp, Homo sapien
gggccgggtacagggcttggcggca

SEQ ID NO: 1073802 - DNA, 25 bp, Homo sapien
tggacctttggcctgtggactgccc

SEQ ID NO: 1073803 - DNA, 25 bp, Homo sapien
tgacacatgggtactcctcggaaga

SEQ ID NO: 1073804 - DNA, 25 bp, Homo sapien
gcagcgctgaatctacttggacctt

SEQ ID NO: 1073805 - DNA, 25 bp, Homo sapien
cctcggaagagtctatgtggcttct

SEQ ID NO: 1073806 - DNA, 25 bp, Homo sapien
tgagccacatattgggagttctaga

SEQ ID NO: 1073807 - DNA, 25 bp, Homo sapien
gctgtgacataggacttgaagacca

SEQ ID NO: 1073808 - DNA, 25 bp, Homo sapien
tccattgagatgattaagtgaacca

SEQ ID NO: 1073809 - DNA, 25 bp, Homo sapien
gaataccaggattgactgcatccct

SEQ ID NO: 1073810 - DNA, 25 bp, Homo sapien
ccattgaggcaagaaagtgattgaa

SEQ ID NO: 1073811 - DNA, 25 bp, Homo sapien
tattgagccataatccaaggttgtg

SEQ ID NO: 1073812 - DNA, 25 bp, Homo sapien
cagcaagcagtgattatattgagcc

SEQ ID NO: 1073813 - DNA, 25 bp, Homo sapien
tcaaggcaggtgtaatccattgagg

SEQ ID NO: 1073814 - DNA, 25 bp, Homo sapien
gcctgatgagaatccttactgttaa

SEQ ID NO: 1073815 - DNA, 25 bp, Homo sapien
tgctatgtgcctctcaatgatggaa

SEQ ID NO: 1073816 - DNA, 25 bp, Homo sapien
tacaggtctggcaccacaaaaagag

SEQ ID NO: 1073817 - DNA, 25 bp, Homo sapien
tgatggaatgtccactagacagttg

SEQ ID NO: 1073818 - DNA, 25 bp, Homo sapien
atcccttatagtggcccctttgtag

SEQ ID NO: 1073819 - DNA, 25 bp, Homo sapien
caatatgtagcctttgaggtttggc

SEQ ID NO: 1073820 - DNA, 25 bp, Homo sapien
caatctctggcaacaacttacctgt

SEQ ID NO: 1073821 - DNA, 25 bp, Homo sapien
tagagtcagatatataccccacagt

SEQ ID NO: 1073822 - DNA, 25 bp, Homo sapien
gctccagcctgcatgaaatctcaca

SEQ ID NO: 1073823 - DNA, 25 bp, Homo sapien
ggctgacagatgctatgcaacaggt

SEQ ID NO: 1073824 - DNA, 25 bp, Homo sapien
cagaatgcattgcagccggtgcaca

SEQ ID NO: 1073825 - DNA, 25 bp, Homo sapien
cacactctgcatgagctttaggcta

SEQ ID NO: 1073826 - DNA, 25 bp, Homo sapien
aagccggtcaccatcacggtgcgag

SEQ ID NO: 1073827 - DNA, 25 bp, Homo sapien
ctccagaaagctgctcccaagaaga

SEQ ID NO: 1073828 - DNA, 25 bp, Homo sapien
cagtctctgggtattcggaagccgg

SEQ ID NO: 1073829 - DNA, 25 bp, Homo sapien
caagcaccagcgtagacagctaaag

SEQ ID NO: 1073830 - DNA, 25 bp, Homo sapien
gagaaataatgcgattgtccacaca

SEQ ID NO: 1073831 - DNA, 25 bp, Homo sapien
tatgcaaagaagctgagaacggagc

SEQ ID NO: 1073832 - DNA, 25 bp, Homo sapien
caggtctctggtgttatgagcccca

SEQ ID NO: 1073833 - DNA, 25 bp, Homo sapien
cagcttcgccgacctatgattacaa

SEQ ID NO: 1073834 - DNA, 25 bp, Homo sapien
tgctcctcccaagctcgcttcgtag

SEQ ID NO: 1073835 - DNA, 25 bp, Homo sapien
ttcgtagcagccttagccacggccg

SEQ ID NO: 1073836 - DNA, 25 bp, Homo sapien
tggcagacgaggaacgcactctgct

SEQ ID NO: 1073837 - DNA, 25 bp, Homo sapien
agacgaggaacgcactctgctgcac

SEQ ID NO: 1073838 - DNA, 25 bp, Homo sapien
cgcttgggacctggtagacgggatg

SEQ ID NO: 1073839 - DNA, 25 bp, Homo sapien
cgggccacgccgcttgggacctggt

SEQ ID NO: 1073840 - DNA, 25 bp, Homo sapien
gccacgccgcttgggacctggtaga

SEQ ID NO: 1073841 - DNA, 25 bp, Homo sapien
cacgccgcttgggacctggtagacg

SEQ ID NO: 1073842 - DNA, 25 bp, Homo sapien
ctggtgggtagcagccccgccgcgg

SEQ ID NO: 1073843 - DNA, 25 bp, Homo sapien
cgcggagccgctctcggcgccttct

SEQ ID NO: 1073844 - DNA, 25 bp, Homo sapien
gctggtgggtagcagccccgccgcg

SEQ ID NO: 1073845 - DNA, 25 bp, Homo sapien
ctgggccgggcgttcagtgctttgg

SEQ ID NO: 1073846 - DNA, 25 bp, Homo sapien
tctggctcgtaggcttcctgtccct

SEQ ID NO: 1073847 - DNA, 25 bp, Homo sapien
cccagccgctcaacacggaagaatg

SEQ ID NO: 1073848 - DNA, 25 bp, Homo sapien
ggcgagggcgcccacagcttttctc

SEQ ID NO: 1073849 - DNA, 25 bp, Homo sapien
gaagaatggaaaccggctaggcaga

SEQ ID NO: 1073850 - DNA, 25 bp, Homo sapien
ggtctcgatgcgcaaagcaccgttc

SEQ ID NO: 1073851 - DNA, 25 bp, Homo sapien
ttcttatgaatgaacttgagcggcc

SEQ ID NO: 1073852 - DNA, 25 bp, Homo sapien
taaggaaacttatcagcccaccatc

SEQ ID NO: 1073853 - DNA, 25 bp, Homo sapien
tccttcaataagtccccagggctgg

SEQ ID NO: 1073854 - DNA, 25 bp, Homo sapien
caagtgcatagcaaagcttgttgca

SEQ ID NO: 1073855 - DNA, 25 bp, Homo sapien
ccaataggtagatctgaaggaagaa

SEQ ID NO: 1073856 - DNA, 25 bp, Homo sapien
ggctcccccaagtgcatagcaaagc

SEQ ID NO: 1073857 - DNA, 25 bp, Homo sapien
gcttgttgcaaacagacaactgttg

SEQ ID NO: 1073858 - DNA, 25 bp, Homo sapien
aatggatacaactaagatgcgatgc

SEQ ID NO: 1073859 - DNA, 25 bp, Homo sapien
ctaagatgcgatgcttgccaagtta

SEQ ID NO: 1073860 - DNA, 25 bp, Homo sapien
ccaagttagatgctacacagagaag

SEQ ID NO: 1073861 - DNA, 25 bp, Homo sapien
cccctctgtaaatggatacaactaa

SEQ ID NO: 1073862 - DNA, 25 bp, Homo sapien
aagcaaaagacaacttcctcatcct

SEQ ID NO: 1073863 - DNA, 25 bp, Homo sapien
aggagaagcaaaagacaacttcctc

SEQ ID NO: 1073864 - DNA, 25 bp, Homo sapien
gagaagcaaaagacaacttcctcat

SEQ ID NO: 1073865 - DNA, 25 bp, Homo sapien
gaagcaaaagacaacttcctcatcc

SEQ ID NO: 1073866 - DNA, 25 bp, Homo sapien
cagggcataaggcgacccaggcagg

SEQ ID NO: 1073867 - DNA, 25 bp, Homo sapien
ggcataaggcgacccaggcaggtcc

SEQ ID NO: 1073868 - DNA, 25 bp, Homo sapien
gcataaggcgacccaggcaggtcca

SEQ ID NO: 1073869 - DNA, 25 bp, Homo sapien
cagggggatttgctgatgcagaggc

SEQ ID NO: 1073870 - DNA, 25 bp, Homo sapien
ccaaggagcagatatgctggaagtc

SEQ ID NO: 1073871 - DNA, 25 bp, Homo sapien
agcagatatgctggaagtcctgcct

SEQ ID NO: 1073872 - DNA, 25 bp, Homo sapien
tgccttgtgccacctcgaaggggca

SEQ ID NO: 1073873 - DNA, 25 bp, Homo sapien
tgccacctcgaaggggcatattcta

SEQ ID NO: 1073874 - DNA, 25 bp, Homo sapien
tctgtctcctcagggaacaagagct

SEQ ID NO: 1073875 - DNA, 25 bp, Homo sapien
cctttgtcaaacactccatcctctg

SEQ ID NO: 1073876 - DNA, 25 bp, Homo sapien
tctgctcataagcagctgagcagct

SEQ ID NO: 1073877 - DNA, 25 bp, Homo sapien
gtctcctcagggaacaagagctcct

SEQ ID NO: 1073878 - DNA, 25 bp, Homo sapien
ctccgcggaaggcaccagagttccc

SEQ ID NO: 1073879 - DNA, 25 bp, Homo sapien
ggcccccccgctgcaccagtgtcat

SEQ ID NO: 1073880 - DNA, 25 bp, Homo sapien
gcggaaggcaccagagttccccatc

SEQ ID NO: 1073881 - DNA, 25 bp, Homo sapien
cgcggaaggcaccagagttccccat

SEQ ID NO: 1073882 - DNA, 25 bp, Homo sapien
ccggccccggatgccactgccgaaa

SEQ ID NO: 1073883 - DNA, 25 bp, Homo sapien
cccggccccggatgccactgccgaa

SEQ ID NO: 1073884 - DNA, 25 bp, Homo sapien
cggccccggatgccactgccgaaac

SEQ ID NO: 1073885 - DNA, 25 bp, Homo sapien
ctcagcaagctccgcagcttcggcc

SEQ ID NO: 1073886 - DNA, 25 bp, Homo sapien
gcaagctccgcagcttcggcccggg

SEQ ID NO: 1073887 - DNA, 25 bp, Homo sapien
cagcaagctccgcagcttcggcccg

SEQ ID NO: 1073888 - DNA, 25 bp, Homo sapien
gcccgggccccgtccacggccatga

SEQ ID NO: 1073889 - DNA, 25 bp, Homo sapien
agatcccttaatgggcagagagaag

SEQ ID NO: 1073890 - DNA, 25 bp, Homo sapien
tcagatcccttaatgggcagagaga

SEQ ID NO: 1073891 - DNA, 25 bp, Homo sapien
tctcagatcccttaatgggcagaga

SEQ ID NO: 1073892 - DNA, 25 bp, Homo sapien
gatctcagatcccttaatgggcaga

SEQ ID NO: 1073893 - DNA, 25 bp, Homo sapien
gatggccccacggatggcggtggcc

SEQ ID NO: 1073894 - DNA, 25 bp, Homo sapien
atgatggccccacggatggcggtgg

SEQ ID NO: 1073895 - DNA, 25 bp, Homo sapien
gatgatggccccacggatggcggtg

SEQ ID NO: 1073896 - DNA, 25 bp, Homo sapien
aggatgatggccccacggatggcgg

SEQ ID NO: 1073897 - DNA, 25 bp, Homo sapien
tcaaaggtgcccttggcaaagctgc

SEQ ID NO: 1073898 - DNA, 25 bp, Homo sapien
tgcccttggcaaagctgcccagggt

SEQ ID NO: 1073899 - DNA, 25 bp, Homo sapien
gcatcaaaggtgcccttggcaaagc

SEQ ID NO: 1073900 - DNA, 25 bp, Homo sapien
ggtgcccttggcaaagctgcccagg

SEQ ID NO: 1073901 - DNA, 25 bp, Homo sapien
gtcagtgaattcctgatcgggagac

SEQ ID NO: 1073902 - DNA, 25 bp, Homo sapien
ctggagcctggtgggtcttgatgag

SEQ ID NO: 1073903 - DNA, 25 bp, Homo sapien
gtggtcagtgaattcctgatcggga

SEQ ID NO: 1073904 - DNA, 25 bp, Homo sapien
agctggagcctggtgggtcttgatg

SEQ ID NO: 1073905 - DNA, 25 bp, Homo sapien
tgggctgggcgctattctaattact

SEQ ID NO: 1073906 - DNA, 25 bp, Homo sapien
tcagtatagcaaggcagcacaggcc

SEQ ID NO: 1073907 - DNA, 25 bp, Homo sapien
tttgagccactcttcagggattcca

SEQ ID NO: 1073908 - DNA, 25 bp, Homo sapien
tcataagttccagctatgggctggg

SEQ ID NO: 1073909 - DNA, 25 bp, Homo sapien
cacaccatcaaaaggggttagacct

SEQ ID NO: 1073910 - DNA, 25 bp, Homo sapien
ccccatgtgagttccacaccatcaa

SEQ ID NO: 1073911 - DNA, 25 bp, Homo sapien
ccatcaaaaggggttagacctcagg

SEQ ID NO: 1073912 - DNA, 25 bp, Homo sapien
ccatgtgagttccacaccatcaaaa

SEQ ID NO: 1073913 - DNA, 25 bp, Homo sapien
tgggaccccagactgaaatcctagg

SEQ ID NO: 1073914 - DNA, 25 bp, Homo sapien
gctgatgaccaagcccggaatggca

SEQ ID NO: 1073915 - DNA, 25 bp, Homo sapien
tcagagcctgagtctagtccagagg

SEQ ID NO: 1073916 - DNA, 25 bp, Homo sapien
tctcacacggatagtcatcaaccgc

SEQ ID NO: 1073917 - DNA, 25 bp, Homo sapien
ggaagtaggcaatgacggccagggg

SEQ ID NO: 1073918 - DNA, 25 bp, Homo sapien
agtaggcaatgacggccaggggcgt

SEQ ID NO: 1073919 - DNA, 25 bp, Homo sapien
ggcaatgacggccaggggcgtggag

SEQ ID NO: 1073920 - DNA, 25 bp, Homo sapien
caatgacggccaggggcgtggagaa

SEQ ID NO: 1073921 - DNA, 25 bp, Homo sapien
agcaggtaccaataggtctggccgt

SEQ ID NO: 1073922 - DNA, 25 bp, Homo sapien
taccaataggtctggccgtgtggga

SEQ ID NO: 1073923 - DNA, 25 bp, Homo sapien
gccgtgtgggaagtcgggcacgaac

SEQ ID NO: 1073924 - DNA, 25 bp, Homo sapien
tcaaagaggcaatagaaaagcaggt

SEQ ID NO: 1073925 - DNA, 25 bp, Homo sapien
tgatgaacatggtgagagccgagta

SEQ ID NO: 1073926 - DNA, 25 bp, Homo sapien
gagccgagtagggaacatggaaaca

SEQ ID NO: 1073927 - DNA, 25 bp, Homo sapien
gataggcggtggcagaatcccgctc

SEQ ID NO: 1073928 - DNA, 25 bp, Homo sapien
gtctgctcggtgctgatgaacatgg

SEQ ID NO: 1073929 - DNA, 25 bp, Homo sapien
cgatttgtccctggatcgccgtgcc

SEQ ID NO: 1073930 - DNA, 25 bp, Homo sapien
ggtcctggaaacaaggcgtgtctgc

SEQ ID NO: 1073931 - DNA, 25 bp, Homo sapien
gttggcactttgtgaagctactgta

SEQ ID NO: 1073932 - DNA, 25 bp, Homo sapien
tactgtagagctattgaggtcctgg

SEQ ID NO: 1073933 - DNA, 25 bp, Homo sapien
ccgctgccagcaggtatgccttttg

SEQ ID NO: 1073934 - DNA, 25 bp, Homo sapien
ggatgacagcacagattatatagat

SEQ ID NO: 1073935 - DNA, 25 bp, Homo sapien
cccgctgccagcaggtatgcctttt

SEQ ID NO: 1073936 - DNA, 25 bp, Homo sapien
ttatatagatacagacaatgacccc

SEQ ID NO: 1073937 - DNA, 25 bp, Homo sapien
ggccgtggctcatgaccagccgtag

SEQ ID NO: 1073938 - DNA, 25 bp, Homo sapien
aagtaggcgattggctcagactgct

SEQ ID NO: 1073939 - DNA, 25 bp, Homo sapien
gaagaggaagccagtaataagtttg

SEQ ID NO: 1073940 - DNA, 25 bp, Homo sapien
taagtttgatgtatgggccgtggct

SEQ ID NO: 1073941 - DNA, 25 bp, Homo sapien
ggaagcccaaggtgtaggtgcaaaa

SEQ ID NO: 1073942 - DNA, 25 bp, Homo sapien
catgatggccaggagtagattctgg

SEQ ID NO: 1073943 - DNA, 25 bp, Homo sapien
tcattgcggaagcccaaggtgtagg

SEQ ID NO: 1073944 - DNA, 25 bp, Homo sapien
ggagtagattctggaattcattgcg

SEQ ID NO: 1073945 - DNA, 25 bp, Homo sapien
aaacctctgagccaagttcctggtg

SEQ ID NO: 1073946 - DNA, 25 bp, Homo sapien
gcagcaacgaagatgacaggcacct

SEQ ID NO: 1073947 - DNA, 25 bp, Homo sapien
tccaaccaaataccctgagaagcct

SEQ ID NO: 1073948 - DNA, 25 bp, Homo sapien
taaagggaggtgctttagagccaca

SEQ ID NO: 1073949 - DNA, 25 bp, Homo sapien
tcaagaaccactgccagatgggaat

SEQ ID NO: 1073950 - DNA, 25 bp, Homo sapien
tgagatcccaacatatacagctgtc

SEQ ID NO: 1073951 - DNA, 25 bp, Homo sapien
ccagatgggaatggttaaagtggcc

SEQ ID NO: 1073952 - DNA, 25 bp, Homo sapien
tcttgccaaaccgggtcaagaacca

SEQ ID NO: 1073953 - DNA, 25 bp, Homo sapien
acatcccaactcaacccaggctctg

SEQ ID NO: 1073954 - DNA, 25 bp, Homo sapien
gaagatgaatcagctgggaggttcc

SEQ ID NO: 1073955 - DNA, 25 bp, Homo sapien
ggctctgctcttcaaccccactcac

SEQ ID NO: 1073956 - DNA, 25 bp, Homo sapien
accagacatcccaactcaacccagg

SEQ ID NO: 1073957 - DNA, 25 bp, Homo sapien
ccaccaagatgagaaatggcactgc

SEQ ID NO: 1073958 - DNA, 25 bp, Homo sapien
gccaccaagatgagaaatggcactg

SEQ ID NO: 1073959 - DNA, 25 bp, Homo sapien
gggccaccaagatgagaaatggcac

SEQ ID NO: 1073960 - DNA, 25 bp, Homo sapien
accaagatgagaaatggcactgctg

SEQ ID NO: 1073961 - DNA, 25 bp, Homo sapien
tatgtaatgatgaggttactctcca

SEQ ID NO: 1073962 - DNA, 25 bp, Homo sapien
tgccacagctaccgcatatgtaatg

SEQ ID NO: 1073963 - DNA, 25 bp, Homo sapien
catatgtaatgatgaggttactctc

SEQ ID NO: 1073964 - DNA, 25 bp, Homo sapien
atgtaatgatgaggttactctccat

SEQ ID NO: 1073965 - DNA, 25 bp, Homo sapien
aatggcctgtgggagaacactgcat

SEQ ID NO: 1073966 - DNA, 25 bp, Homo sapien
tgttaatgagaagaggtggccctct

SEQ ID NO: 1073967 - DNA, 25 bp, Homo sapien
tctgactaggtgttcttgcaaagct

SEQ ID NO: 1073968 - DNA, 25 bp, Homo sapien
tgctctaagaggaagtaaccctgcc

SEQ ID NO: 1073969 - DNA, 25 bp, Homo sapien
cagccatgaggactgacccacctaa

SEQ ID NO: 1073970 - DNA, 25 bp, Homo sapien
cagagtagtgacagccatgaggact

SEQ ID NO: 1073971 - DNA, 25 bp, Homo sapien
tgaggactgacccacctaacgggcc

SEQ ID NO: 1073972 - DNA, 25 bp, Homo sapien
ctgcgcagagtagtgacagccatga

SEQ ID NO: 1073973 - DNA, 25 bp, Homo sapien
ctccagaggcaaacttggtgaagaa

SEQ ID NO: 1073974 - DNA, 25 bp, Homo sapien
gggctgcttcagatggaagtcgtca

SEQ ID NO: 1073975 - DNA, 25 bp, Homo sapien
gtcgtcaatgacatcaggcagcatg

SEQ ID NO: 1073976 - DNA, 25 bp, Homo sapien
tgacactccagaggcaaacttggtg

SEQ ID NO: 1073977 - DNA, 25 bp, Homo sapien
taaacttgacacgttccggctgcga

SEQ ID NO: 1073978 - DNA, 25 bp, Homo sapien
gcagggccttcttattctgccgccg

SEQ ID NO: 1073979 - DNA, 25 bp, Homo sapien
aactatgggagccatggtcacgagc

SEQ ID NO: 1073980 - DNA, 25 bp, Homo sapien
cgagcatgttcagtgtaaacttgac

SEQ ID NO: 1073981 - DNA, 25 bp, Homo sapien
agaggatgctagccagctctgtgga

SEQ ID NO: 1073982 - DNA, 25 bp, Homo sapien
tagaggatgctagccagctctgtgg

SEQ ID NO: 1073983 - DNA, 25 bp, Homo sapien
ctagaggatgctagccagctctgtg

SEQ ID NO: 1073984 - DNA, 25 bp, Homo sapien
gctaggcccgatcagtccttggcat

SEQ ID NO: 1073985 - DNA, 25 bp, Homo sapien
tgggccacctccttgagtcttcagt

SEQ ID NO: 1073986 - DNA, 25 bp, Homo sapien
agcaagccggcagacaggtcctgat

SEQ ID NO: 1073987 - DNA, 25 bp, Homo sapien
tacattagtgttccgggctaggccc

SEQ ID NO: 1073988 - DNA, 25 bp, Homo sapien
taacagttgtggagaaagaaccacc

SEQ ID NO: 1073989 - DNA, 25 bp, Homo sapien
gaagcacagtgtacaggcacaccca

SEQ ID NO: 1073990 - DNA, 25 bp, Homo sapien
ctcagacacaaggaagtagacagtg

SEQ ID NO: 1073991 - DNA, 25 bp, Homo sapien
tgccggtcccctggtcattctcaga

SEQ ID NO: 1073992 - DNA, 25 bp, Homo sapien
taagagcccaggcactatagccaac

SEQ ID NO: 1073993 - DNA, 25 bp, Homo sapien
caagtatcagctcttccagtgactg

SEQ ID NO: 1073994 - DNA, 25 bp, Homo sapien
tcctcatagggaagttctgacaact

SEQ ID NO: 1073995 - DNA, 25 bp, Homo sapien
cagtgactgtccaatgaccttgagc

SEQ ID NO: 1073996 - DNA, 25 bp, Homo sapien
gtgaacctttgttttcctaggcaga

SEQ ID NO: 1073997 - DNA, 25 bp, Homo sapien
agtgaacctttgttttcctaggcag

SEQ ID NO: 1073998 - DNA, 25 bp, Homo sapien
aaaggaagtcctgcatatcaacccc

SEQ ID NO: 1073999 - DNA, 25 bp, Homo sapien
tatagaaactggaggcaggccagat

SEQ ID NO: 1074000 - DNA, 25 bp, Homo sapien
tatcaaccccaataatagagcagaa

SEQ ID NO: 1074001 - DNA, 25 bp, Homo sapien
tcctggtccctgacctaggaaagaa

SEQ ID NO: 1074002 - DNA, 25 bp, Homo sapien
ttaagctgcagtccgtaaagggtct

SEQ ID NO: 1074003 - DNA, 25 bp, Homo sapien
caggattctctgagggcgggaatcc

SEQ ID NO: 1074004 - DNA, 25 bp, Homo sapien
gcgactgggcaggaagtctcaccgc

SEQ ID NO: 1074005 - DNA, 25 bp, Homo sapien
cagaggccggttcctttaagctgca

SEQ ID NO: 1074006 - DNA, 25 bp, Homo sapien
acttccgggccctcactgggcgcgg

SEQ ID NO: 1074007 - DNA, 25 bp, Homo sapien
ctccggactgcgatcagccgctctc

SEQ ID NO: 1074008 - DNA, 25 bp, Homo sapien
aatctccgcgcgacccacttccggg

SEQ ID NO: 1074009 - DNA, 25 bp, Homo sapien
agccgctctccgcttccggcaagaa

SEQ ID NO: 1074010 - DNA, 25 bp, Homo sapien
ttaacaccaccaggggccgatgggc

SEQ ID NO: 1074011 - DNA, 25 bp, Homo sapien
gcgcgtaggccagaagggccattaa

SEQ ID NO: 1074012 - DNA, 25 bp, Homo sapien
cctctcggcagggttcatgacacgc

SEQ ID NO: 1074013 - DNA, 25 bp, Homo sapien
agagaccgcgcccaagagtccgggt

SEQ ID NO: 1074014 - DNA, 25 bp, Homo sapien
gaccggaagaccatcccaagttaga

SEQ ID NO: 1074015 - DNA, 25 bp, Homo sapien
tcagagcacctcaggaatcaggcct

SEQ ID NO: 1074016 - DNA, 25 bp, Homo sapien
gttagagaggttccgagcaacacgg

SEQ ID NO: 1074017 - DNA, 25 bp, Homo sapien
caatgggagcatcaacaggagacag

SEQ ID NO: 1074018 - DNA, 25 bp, Homo sapien
cctggcttgtcaaagtaagagcagc

SEQ ID NO: 1074019 - DNA, 25 bp, Homo sapien
ggcttgtcaaagtaagagcagcagc

SEQ ID NO: 1074020 - DNA, 25 bp, Homo sapien
ctggcttgtcaaagtaagagcagca

SEQ ID NO: 1074021 - DNA, 25 bp, Homo sapien
cttgtcaaagtaagagcagcagccg

SEQ ID NO: 1074022 - DNA, 25 bp, Homo sapien
cagtatcactgaacaatttaggccc

SEQ ID NO: 1074023 - DNA, 25 bp, Homo sapien
gaaagccaggcaatcgcgctattct

SEQ ID NO: 1074024 - DNA, 25 bp, Homo sapien
ttgcctggatgtgctacaaacacct

SEQ ID NO: 1074025 - DNA, 25 bp, Homo sapien
tacagcaagagcttccaaacactgt

SEQ ID NO: 1074026 - DNA, 25 bp, Homo sapien
aaccaaaaaaccaggcctggcgcag

SEQ ID NO: 1074027 - DNA, 25 bp, Homo sapien
tgtggcatgttctagttagggcaac

SEQ ID NO: 1074028 - DNA, 25 bp, Homo sapien
gcctaggaaagaatcaagactggag

SEQ ID NO: 1074029 - DNA, 25 bp, Homo sapien
caatgtctattgtggtttgaaacca

SEQ ID NO: 1074030 - DNA, 25 bp, Homo sapien
cacacgtacattcttccggtggtca

SEQ ID NO: 1074031 - DNA, 25 bp, Homo sapien
tctatacacacgtacattcttccgg

SEQ ID NO: 1074032 - DNA, 25 bp, Homo sapien
tattctctatacacacgtacattct

SEQ ID NO: 1074033 - DNA, 25 bp, Homo sapien
ttcttattctctatacacacgtaca

SEQ ID NO: 1074034 - DNA, 25 bp, Homo sapien
ctttccattccttggcctgcagcag

SEQ ID NO: 1074035 - DNA, 25 bp, Homo sapien
ccattccttggcctgcagcagcagc

SEQ ID NO: 1074036 - DNA, 25 bp, Homo sapien
tttccattccttggcctgcagcagc

SEQ ID NO: 1074037 - DNA, 25 bp, Homo sapien
ttccttggcctgcagcagcagcaga

SEQ ID NO: 1074038 - DNA, 25 bp, Homo sapien
ttttgaaggactgtctgcataccca

SEQ ID NO: 1074039 - DNA, 25 bp, Homo sapien
cttttgaaggactgtctgcataccc

SEQ ID NO: 1074040 - DNA, 25 bp, Homo sapien
gaccagcaagcagcgagtcaaatgc

SEQ ID NO: 1074041 - DNA, 25 bp, Homo sapien
gatcttcaagtactctgccacagga

SEQ ID NO: 1074042 - DNA, 25 bp, Homo sapien
gtactctgccacaggaccagcaagc

SEQ ID NO: 1074043 - DNA, 25 bp, Homo sapien
cacaggaccagcaagcagcgagtca

SEQ ID NO: 1074044 - DNA, 25 bp, Homo sapien
aacagagctcgctccaacttcaaac

SEQ ID NO: 1074045 - DNA, 25 bp, Homo sapien
gctccaacttcaaacctgtgtggac

SEQ ID NO: 1074046 - DNA, 25 bp, Homo sapien
tctgctggctgttgacactgagaag

SEQ ID NO: 1074047 - DNA, 25 bp, Homo sapien
gaagctgtaaccaacagagctcgct

SEQ ID NO: 1074048 - DNA, 25 bp, Homo sapien
attaaacaacttgctgcctcggttc

SEQ ID NO: 1074049 - DNA, 25 bp, Homo sapien
tgattaaacaacttgctgcctcggt

SEQ ID NO: 1074050 - DNA, 25 bp, Homo sapien
gattaaacaacttgctgcctcggtt

SEQ ID NO: 1074051 - DNA, 25 bp, Homo sapien
ctttgtactctttgaggactcggtt

SEQ ID NO: 1074052 - DNA, 25 bp, Homo sapien
aaaacatggcggcatcattcatttc

SEQ ID NO: 1074053 - DNA, 25 bp, Homo sapien
gactcggtttgtataaaacatggcg

SEQ ID NO: 1074054 - DNA, 25 bp, Homo sapien
gtttgtataaaacatggcggcatca

SEQ ID NO: 1074055 - DNA, 25 bp, Homo sapien
tcactgtggaactctaaagactaag

SEQ ID NO: 1074056 - DNA, 25 bp, Homo sapien
gcattgtgcctacggttcaagtccc

SEQ ID NO: 1074057 - DNA, 25 bp, Homo sapien
gagagctcttaagtatcactgtgga

SEQ ID NO: 1074058 - DNA, 25 bp, Homo sapien
ttaactgccttatgagacaatgcct

SEQ ID NO: 1074059 - DNA, 25 bp, Homo sapien
catatacttaaataagctttgaccc

SEQ ID NO: 1074060 - DNA, 25 bp, Homo sapien
gacccagtctacatgcttcttatcc

SEQ ID NO: 1074061 - DNA, 25 bp, Homo sapien
ctgcagctctgtccatatacttaaa

SEQ ID NO: 1074062 - DNA, 25 bp, Homo sapien
tacttaaataagctttgacccagtc

SEQ ID NO: 1074063 - DNA, 25 bp, Homo sapien
ggccagtccggtggtatggaactcc

SEQ ID NO: 1074064 - DNA, 25 bp, Homo sapien
gctccaggccagtccggtggtatgg

SEQ ID NO: 1074065 - DNA, 25 bp, Homo sapien
tggtatggaactccttaatgtaagc

SEQ ID NO: 1074066 - DNA, 25 bp, Homo sapien
caggccagtccggtggtatggaact

SEQ ID NO: 1074067 - DNA, 25 bp, Homo sapien
tatgagcatgaaatggtagagactg

SEQ ID NO: 1074068 - DNA, 25 bp, Homo sapien
ggaagcagactcatatgagcatgaa

SEQ ID NO: 1074069 - DNA, 25 bp, Homo sapien
ctgcgcgaacagtgatgagcgggaa

SEQ ID NO: 1074070 - DNA, 25 bp, Homo sapien
agtgatgagcgggaagcagactcat

SEQ ID NO: 1074071 - DNA, 25 bp, Homo sapien
atgtgtaatgctctccccctgatta

SEQ ID NO: 1074072 - DNA, 25 bp, Homo sapien
catgtgtaatgctctccccctgatt

SEQ ID NO: 1074073 - DNA, 25 bp, Homo sapien
gtgtaatgctctccccctgattaat

SEQ ID NO: 1074074 - DNA, 25 bp, Homo sapien
tgtgtaatgctctccccctgattaa

SEQ ID NO: 1074075 - DNA, 25 bp, Homo sapien
taaatccttatcctctatgtctaga

SEQ ID NO: 1074076 - DNA, 25 bp, Homo sapien
tctccccaagattaaattatatggt

SEQ ID NO: 1074077 - DNA, 25 bp, Homo sapien
ggcatttgcaactctacaatattgt

SEQ ID NO: 1074078 - DNA, 25 bp, Homo sapien
gaaagacatatcaaatgtatgtgca

SEQ ID NO: 1074079 - DNA, 25 bp, Homo sapien
agccaaaaccagagcctttgagatg

SEQ ID NO: 1074080 - DNA, 25 bp, Homo sapien
gcctttgagatgttctcttgcaagc

SEQ ID NO: 1074081 - DNA, 25 bp, Homo sapien
cttgcaagcagttttggaaaagtac

SEQ ID NO: 1074082 - DNA, 25 bp, Homo sapien
aaaccagagcctttgagatgttctc

SEQ ID NO: 1074083 - DNA, 25 bp, Homo sapien
aagaacaacagctaccttgttcctg

SEQ ID NO: 1074084 - DNA, 25 bp, Homo sapien
gaacaacagctaccttgttcctgtc

SEQ ID NO: 1074085 - DNA, 25 bp, Homo sapien
agaacaacagctaccttgttcctgt

SEQ ID NO: 1074086 - DNA, 25 bp, Homo sapien
aacaacagctaccttgttcctgtcc

SEQ ID NO: 1074087 - DNA, 25 bp, Homo sapien
tactggaccactctgagccttcagg

SEQ ID NO: 1074088 - DNA, 25 bp, Homo sapien
tttggggtttaggtgcagagaatgg

SEQ ID NO: 1074089 - DNA, 25 bp, Homo sapien
gtttggggtttaggtgcagagaatg

SEQ ID NO: 1074090 - DNA, 25 bp, Homo sapien
tctagctaagctccatttaacctcc

SEQ ID NO: 1074091 - DNA, 25 bp, Homo sapien
ttcttgcaattgaagccagaactct

SEQ ID NO: 1074092 - DNA, 25 bp, Homo sapien
gattctcatcacaaagcacacaccg

SEQ ID NO: 1074093 - DNA, 25 bp, Homo sapien
gaactctgccctcatctagctaagc

SEQ ID NO: 1074094 - DNA, 25 bp, Homo sapien
ccttgatttgcaatgtcgtgttgac

SEQ ID NO: 1074095 - DNA, 25 bp, Homo sapien
taagccacctgtttcagctctgtgt

SEQ ID NO: 1074096 - DNA, 25 bp, Homo sapien
cacacttgtatatgtaagccacctg

SEQ ID NO: 1074097 - DNA, 25 bp, Homo sapien
tgtcctcaatcaccaggttggaaac

SEQ ID NO: 1074098 - DNA, 25 bp, Homo sapien
cacgtcatcgaataccaggccaagt

SEQ ID NO: 1074099 - DNA, 25 bp, Homo sapien
acgtcatcgaataccaggccaagtt

SEQ ID NO: 1074100 - DNA, 25 bp, Homo sapien
cccaccacgtcatcgaataccaggc

SEQ ID NO: 1074101 - DNA, 25 bp, Homo sapien
accacgtcatcgaataccaggccaa

SEQ ID NO: 1074102 - DNA, 25 bp, Homo sapien
caccaaagcaacatctgtgggtcta

SEQ ID NO: 1074103 - DNA, 25 bp, Homo sapien
tgggatgggtcctgaaaagaacttg

SEQ ID NO: 1074104 - DNA, 25 bp, Homo sapien
tgcgcaagacactggatactcgggt

SEQ ID NO: 1074105 - DNA, 25 bp, Homo sapien
tgaaaagctcacagatgcgcaagac

SEQ ID NO: 1074106 - DNA, 25 bp, Homo sapien
tggcagccatctgttttgttgatgg

SEQ ID NO: 1074107 - DNA, 25 bp, Homo sapien
ggctccactacatgggactacctca

SEQ ID NO: 1074108 - DNA, 25 bp, Homo sapien
taccttgagctccacttaggcagaa

SEQ ID NO: 1074109 - DNA, 25 bp, Homo sapien
ttcaatgccagaaatcttcagtccc

SEQ ID NO: 1074110 - DNA, 25 bp, Homo sapien
tttatagcaccagcctgacaaggtg

SEQ ID NO: 1074111 - DNA, 25 bp, Homo sapien
ccaacttctgcccgttccatagggt

SEQ ID NO: 1074112 - DNA, 25 bp, Homo sapien
caacttctgcccgttccatagggtc

SEQ ID NO: 1074113 - DNA, 25 bp, Homo sapien
tatggaatgctagatggccaagcct

SEQ ID NO: 1074114 - DNA, 25 bp, Homo sapien
tccttaagaatggactggcggcgtg

SEQ ID NO: 1074115 - DNA, 25 bp, Homo sapien
tcatcagtcctagtcggcagttcct

SEQ ID NO: 1074116 - DNA, 25 bp, Homo sapien
gagggcaaagaacccagtggcactt

SEQ ID NO: 1074117 - DNA, 25 bp, Homo sapien
tagtggtcttgatgctagagtcaac

SEQ ID NO: 1074118 - DNA, 25 bp, Homo sapien
ggagaaatgatgagctacgccttga

SEQ ID NO: 1074119 - DNA, 25 bp, Homo sapien
cgccttgatgaaagaaccgtgttgg

SEQ ID NO: 1074120 - DNA, 25 bp, Homo sapien
gaagaaaatgtaggcgcgaaagtga

SEQ ID NO: 1074121 - DNA, 25 bp, Homo sapien
gctaagtactacatctgaaccaatc

SEQ ID NO: 1074122 - DNA, 25 bp, Homo sapien
cgcccagccctaaggattttatatt

SEQ ID NO: 1074123 - DNA, 25 bp, Homo sapien
tttgcactgggtgcctcaacttggg

SEQ ID NO: 1074124 - DNA, 25 bp, Homo sapien
gaaccaatcaccgtctactagaatt

SEQ ID NO: 1074125 - DNA, 25 bp, Homo sapien
gatattcaggcacctgagaccctgg

SEQ ID NO: 1074126 - DNA, 25 bp, Homo sapien
tttcacagggcgacagagagctcct

SEQ ID NO: 1074127 - DNA, 25 bp, Homo sapien
acagactctgtagggcttccaaggc

SEQ ID NO: 1074128 - DNA, 25 bp, Homo sapien
gaggcaatagactcactcaggcaag

SEQ ID NO: 1074129 - DNA, 25 bp, Homo sapien
gacggtggcgctggctttgatcccc

SEQ ID NO: 1074130 - DNA, 25 bp, Homo sapien
cctcggcgaactgctggagaactgc

SEQ ID NO: 1074131 - DNA, 25 bp, Homo sapien
ctactcctcgcccaaagactctctc

SEQ ID NO: 1074132 - DNA, 25 bp, Homo sapien
ggggacaaggggtctcacaatctca

SEQ ID NO: 1074133 - DNA, 25 bp, Homo sapien
tctctccccgacgtgtaggccatga

SEQ ID NO: 1074134 - DNA, 25 bp, Homo sapien
caggacaactaggttcagagccaaa

SEQ ID NO: 1074135 - DNA, 25 bp, Homo sapien
actaggttcagagccaaataaatgg

SEQ ID NO: 1074136 - DNA, 25 bp, Homo sapien
aaataaatggttctcatggtcagga

SEQ ID NO: 1074137 - DNA, 25 bp, Homo sapien
tcatggtcaggaatggcagggtcat

SEQ ID NO: 1074138 - DNA, 25 bp, Homo sapien
tagtcattgatcacaagcaagctga

SEQ ID NO: 1074139 - DNA, 25 bp, Homo sapien
gcaagctgaaacacgaatcatgagt

SEQ ID NO: 1074140 - DNA, 25 bp, Homo sapien
gaagtctcattcctagagagtcatg

SEQ ID NO: 1074141 - DNA, 25 bp, Homo sapien
caaggagtcttgtatctcaggtacc

SEQ ID NO: 1074142 - DNA, 25 bp, Homo sapien
gaaccatggactcagtctcgactcc

SEQ ID NO: 1074143 - DNA, 25 bp, Homo sapien
cagaagctccggcagtagttcaaag

SEQ ID NO: 1074144 - DNA, 25 bp, Homo sapien
ttcaaagatgagacctccgacacct

SEQ ID NO: 1074145 - DNA, 25 bp, Homo sapien
gatgaccccgaaccatggactcagt

SEQ ID NO: 1074146 - DNA, 25 bp, Homo sapien
ggtacaacagataaggagctgatgg

SEQ ID NO: 1074147 - DNA, 25 bp, Homo sapien
ctaaggtacaacagataaggagctg

SEQ ID NO: 1074148 - DNA, 25 bp, Homo sapien
cagataaggagctgatgggtgcctc

SEQ ID NO: 1074149 - DNA, 25 bp, Homo sapien
aacagataaggagctgatgggtgcc

SEQ ID NO: 1074150 - DNA, 25 bp, Homo sapien
cagggatgactactactaaggaagc

SEQ ID NO: 1074151 - DNA, 25 bp, Homo sapien
caatgttgcaggttgtacacacaaa

SEQ ID NO: 1074152 - DNA, 25 bp, Homo sapien
aatgagcttactaaacagggatgac

SEQ ID NO: 1074153 - DNA, 25 bp, Homo sapien
aagtccctggcactatcctatgaag

SEQ ID NO: 1074154 - DNA, 25 bp, Homo sapien
tctgggtccttaccaatctctacct

SEQ ID NO: 1074155 - DNA, 25 bp, Homo sapien
cagttgcaagcactagacataaagc

SEQ ID NO: 1074156 - DNA, 25 bp, Homo sapien
ccagggagacaactcaagcttagaa

SEQ ID NO: 1074157 - DNA, 25 bp, Homo sapien
tggtgtcaccaagactcaagacatt

SEQ ID NO: 1074158 - DNA, 25 bp, Homo sapien
tcacaggaataactgcaatcacatg

SEQ ID NO: 1074159 - DNA, 25 bp, Homo sapien
tccatggactgactccaagtaaaga

SEQ ID NO: 1074160 - DNA, 25 bp, Homo sapien
ccatggactgactccaagtaaagaa

SEQ ID NO: 1074161 - DNA, 25 bp, Homo sapien
gtccatggactgactccaagtaaag

SEQ ID NO: 1074162 - DNA, 25 bp, Homo sapien
cacagtaagagacaagatggtacca

SEQ ID NO: 1074163 - DNA, 25 bp, Homo sapien
agttttcactgcttcacgggtcaca

SEQ ID NO: 1074164 - DNA, 25 bp, Homo sapien
gaaaccactagaggtcacagtacac

SEQ ID NO: 1074165 - DNA, 25 bp, Homo sapien
gatatcgctaaaaagaaggcagcgc

SEQ ID NO: 1074166 - DNA, 25 bp, Homo sapien
actgaaggaaacatgcctaaagaat

SEQ ID NO: 1074167 - DNA, 25 bp, Homo sapien
agcaagtaggctaatgcacaaatac

SEQ ID NO: 1074168 - DNA, 25 bp, Homo sapien
aatacagtatctgcaaatagcgaga

SEQ ID NO: 1074169 - DNA, 25 bp, Homo sapien
gcgagaaccaactgtatattcaaag

SEQ ID NO: 1074170 - DNA, 25 bp, Homo sapien
ggccaggctaatcttctccatattg

SEQ ID NO: 1074171 - DNA, 25 bp, Homo sapien
ggggccaggctaatcttctccatat

SEQ ID NO: 1074172 - DNA, 25 bp, Homo sapien
cacttcaaaaatttgcaggtcatct

SEQ ID NO: 1074173 - DNA, 25 bp, Homo sapien
tatagaacacttcaaaaatttgcag

SEQ ID NO: 1074174 - DNA, 25 bp, Homo sapien
gggcagggaggataaattcaaacca

SEQ ID NO: 1074175 - DNA, 25 bp, Homo sapien
aattgactacccattttgtaccagc

SEQ ID NO: 1074176 - DNA, 25 bp, Homo sapien
ccatttctgcattagcgagccatta

SEQ ID NO: 1074177 - DNA, 25 bp, Homo sapien
aattctgaggtagttgtgtaacaac

SEQ ID NO: 1074178 - DNA, 25 bp, Homo sapien
ctacaagaggtagacttccaggaga

SEQ ID NO: 1074179 - DNA, 25 bp, Homo sapien
taaaatgtgactgcactacaagagg

SEQ ID NO: 1074180 - DNA, 25 bp, Homo sapien
tcaggatttgaactagagccatctg

SEQ ID NO: 1074181 - DNA, 25 bp, Homo sapien
tctctgaagtacgagcaaaagtgag

SEQ ID NO: 1074182 - DNA, 25 bp, Homo sapien
tgtacccagccacggtctcttattt

SEQ ID NO: 1074183 - DNA, 25 bp, Homo sapien
cctgcccttgaaaggctatgatata

SEQ ID NO: 1074184 - DNA, 25 bp, Homo sapien
gatggagactctattcctgcccttg

SEQ ID NO: 1074185 - DNA, 25 bp, Homo sapien
gtgaccaaattaatgacctctctct

SEQ ID NO: 1074186 - DNA, 25 bp, Homo sapien
tccttaaagtcagacattatgtctc

SEQ ID NO: 1074187 - DNA, 25 bp, Homo sapien
tataggcctaccactcctctaccca

SEQ ID NO: 1074188 - DNA, 25 bp, Homo sapien
gtcagacattatgtctcatcaatcc

SEQ ID NO: 1074189 - DNA, 25 bp, Homo sapien
atccttataggcctaccactcctct

SEQ ID NO: 1074190 - DNA, 25 bp, Homo sapien
gggtaccctattcctcatactgtgg

SEQ ID NO: 1074191 - DNA, 25 bp, Homo sapien
gaatagtcctcttaccacacagggt

SEQ ID NO: 1074192 - DNA, 25 bp, Homo sapien
gctggcttatgttctccctggacag

SEQ ID NO: 1074193 - DNA, 25 bp, Homo sapien
caaatgatggtggaaagctggctta

SEQ ID NO: 1074194 - DNA, 25 bp, Homo sapien
gcaagtcgatatacctccagaagat

SEQ ID NO: 1074195 - DNA, 25 bp, Homo sapien
gcaaagctttggatggcaagtcgat

SEQ ID NO: 1074196 - DNA, 25 bp, Homo sapien
tatggacgtgcactggcaaagcttt

SEQ ID NO: 1074197 - DNA, 25 bp, Homo sapien
gccaagcactaagaggacatcttca

SEQ ID NO: 1074198 - DNA, 25 bp, Homo sapien
aggaagactggcaaagtcgtttctt

SEQ ID NO: 1074199 - DNA, 25 bp, Homo sapien
gaagactggcaaagtcgtttcttta

SEQ ID NO: 1074200 - DNA, 25 bp, Homo sapien
taataattaagtagagtatgacagc

SEQ ID NO: 1074201 - DNA, 25 bp, Homo sapien
tacattgttgctttagtacatttgg

SEQ ID NO: 1074202 - DNA, 25 bp, Homo sapien
tgaagaggcacccatataggacaat

SEQ ID NO: 1074203 - DNA, 25 bp, Homo sapien
catttggtaagaatataataagctc

SEQ ID NO: 1074204 - DNA, 25 bp, Homo sapien
ctgtagagactgaaggaatggtagc

SEQ ID NO: 1074205 - DNA, 25 bp, Homo sapien
actgaaagcagtaattcgaaacaac

SEQ ID NO: 1074206 - DNA, 25 bp, Homo sapien
gaacaaaacgactggcaggcttcag

SEQ ID NO: 1074207 - DNA, 25 bp, Homo sapien
gatattaggactgcattacagggct

SEQ ID NO: 1074208 - DNA, 25 bp, Homo sapien
tttttgctaagaccactctgccgcc

SEQ ID NO: 1074209 - DNA, 25 bp, Homo sapien
tgtgcctccatgaaacaggtctaag

SEQ ID NO: 1074210 - DNA, 25 bp, Homo sapien
cacaccccttccttggtaacatgaa

SEQ ID NO: 1074211 - DNA, 25 bp, Homo sapien
ctggctgttgagacagaattttaag

SEQ ID NO: 1074212 - DNA, 25 bp, Homo sapien
cttcctccgtttctactggctgttg

SEQ ID NO: 1074213 - DNA, 25 bp, Homo sapien
caatatttgtaggttattattccca

SEQ ID NO: 1074214 - DNA, 25 bp, Homo sapien
aaaggatcgacaatcaaatggctag

SEQ ID NO: 1074215 - DNA, 25 bp, Homo sapien
catcttctcactatacagagaggtc

SEQ ID NO: 1074216 - DNA, 25 bp, Homo sapien
gagaggtccaaacaccatgtatatg

SEQ ID NO: 1074217 - DNA, 25 bp, Homo sapien
cactagaatgatcagaggaaacgga

SEQ ID NO: 1074218 - DNA, 25 bp, Homo sapien
aggtccttcttgtgcaatcaattta

SEQ ID NO: 1074219 - DNA, 25 bp, Homo sapien
tccttcttgtgcaatcaatttattg

SEQ ID NO: 1074220 - DNA, 25 bp, Homo sapien
ccttcttgtgcaatcaatttattga

SEQ ID NO: 1074221 - DNA, 25 bp, Homo sapien
ggtccttcttgtgcaatcaatttat

SEQ ID NO: 1074222 - DNA, 25 bp, Homo sapien
ctttagattctgcacatagttttga

SEQ ID NO: 1074223 - DNA, 25 bp, Homo sapien
tcttcattagggagcatagaacata

SEQ ID NO: 1074224 - DNA, 25 bp, Homo sapien
taaacatgtgatataggcttgctga

SEQ ID NO: 1074225 - DNA, 25 bp, Homo sapien
aatagcatcttcattagggagcata

SEQ ID NO: 1074226 - DNA, 25 bp, Homo sapien
ggctatctctgtgtataccacattg

SEQ ID NO: 1074227 - DNA, 25 bp, Homo sapien
atgtagatgaagtcataggaggcta

SEQ ID NO: 1074228 - DNA, 25 bp, Homo sapien
gaagtcataggaggctatctctgtg

SEQ ID NO: 1074229 - DNA, 25 bp, Homo sapien
gatgaagtcataggaggctatctct

SEQ ID NO: 1074230 - DNA, 25 bp, Homo sapien
ggcaaacaaactgggccatacagtt

SEQ ID NO: 1074231 - DNA, 25 bp, Homo sapien
gaatttagggcagtaatcattgagc

SEQ ID NO: 1074232 - DNA, 25 bp, Homo sapien
tattacaggatgaggaatcaaaccc

SEQ ID NO: 1074233 - DNA, 25 bp, Homo sapien
cattacttaaagctccaattcaagg

SEQ ID NO: 1074234 - DNA, 25 bp, Homo sapien
agtacctgtgctttactaccattca

SEQ ID NO: 1074235 - DNA, 25 bp, Homo sapien
taatgcaatggagtttccaagccct

SEQ ID NO: 1074236 - DNA, 25 bp, Homo sapien
cagtggatccctgcaaagtactcat

SEQ ID NO: 1074237 - DNA, 25 bp, Homo sapien
acatgtcacttcctaactgcaaagc

SEQ ID NO: 1074238 - DNA, 25 bp, Homo sapien
tagttgggcctcactatttgcagat

SEQ ID NO: 1074239 - DNA, 25 bp, Homo sapien
caaacatgcgcagtgtgacaaaaaa

SEQ ID NO: 1074240 - DNA, 25 bp, Homo sapien
cagctgaggtcaaaggtgatattct

SEQ ID NO: 1074241 - DNA, 25 bp, Homo sapien
tgagccacctgacaggcatattacc

SEQ ID NO: 1074242 - DNA, 25 bp, Homo sapien
gatgctgaccttctctagtgaatta

SEQ ID NO: 1074243 - DNA, 25 bp, Homo sapien
cagtccagttggtttacagtattgt

SEQ ID NO: 1074244 - DNA, 25 bp, Homo sapien
ggagaatagaccatgtgcatttgag

SEQ ID NO: 1074245 - DNA, 25 bp, Homo sapien
tagtctatagatgtctgctcagtcc

SEQ ID NO: 1074246 - DNA, 25 bp, Homo sapien
ggtaacccagcaatactgtgggagc

SEQ ID NO: 1074247 - DNA, 25 bp, Homo sapien
tactgtgggagcatcaactcttgag

SEQ ID NO: 1074248 - DNA, 25 bp, Homo sapien
tatttcagtatagttgtgggtaacc

SEQ ID NO: 1074249 - DNA, 25 bp, Homo sapien
gcatcaactcttgagagttgctagg

SEQ ID NO: 1074250 - DNA, 25 bp, Homo sapien
gcagtgcagttagggtaatcacggc

SEQ ID NO: 1074251 - DNA, 25 bp, Homo sapien
ggccaacatttaacctactcatact

SEQ ID NO: 1074252 - DNA, 25 bp, Homo sapien
acaaatctgtaagactggcaaggca

SEQ ID NO: 1074253 - DNA, 25 bp, Homo sapien
cctactcatactggcctttaccttt

SEQ ID NO: 1074254 - DNA, 25 bp, Homo sapien
tctagtacttccttgcagtcgacct

SEQ ID NO: 1074255 - DNA, 25 bp, Homo sapien
tgcccctcagattccagattacaaa

SEQ ID NO: 1074256 - DNA, 25 bp, Homo sapien
aatgctgtgttatcctgcccctcag

SEQ ID NO: 1074257 - DNA, 25 bp, Homo sapien
aaatgatgtctagtacttccttgca

SEQ ID NO: 1074258 - DNA, 25 bp, Homo sapien
aatagacagacgatccagagggaga

SEQ ID NO: 1074259 - DNA, 25 bp, Homo sapien
aatactctggtatacagtgagcacc

SEQ ID NO: 1074260 - DNA, 25 bp, Homo sapien
gatcaatgagggctgaagtacacaa

SEQ ID NO: 1074261 - DNA, 25 bp, Homo sapien
cactttagccttgagaccatggaca

SEQ ID NO: 1074262 - DNA, 25 bp, Homo sapien
caccaggtcggctaattttccgtat

SEQ ID NO: 1074263 - DNA, 25 bp, Homo sapien
ggcacgcccgccaccaggtcggcta

SEQ ID NO: 1074264 - DNA, 25 bp, Homo sapien
tacaggcacgcccgccaccaggtcg

SEQ ID NO: 1074265 - DNA, 25 bp, Homo sapien
aggcacgcccgccaccaggtcggct

SEQ ID NO: 1074266 - DNA, 25 bp, Homo sapien
caaaacactacctccttaacagtgg

SEQ ID NO: 1074267 - DNA, 25 bp, Homo sapien
ccctgtcctaatgggcagaaataat

SEQ ID NO: 1074268 - DNA, 25 bp, Homo sapien
aaggttttatccttcacactggtga

SEQ ID NO: 1074269 - DNA, 25 bp, Homo sapien
tactgattgaattaagccctgtcct

SEQ ID NO: 1074270 - DNA, 25 bp, Homo sapien
tgacaccaaactgacgacagcgctc

SEQ ID NO: 1074271 - DNA, 25 bp, Homo sapien
cagtttgtataactctaatgaggca

SEQ ID NO: 1074272 - DNA, 25 bp, Homo sapien
gtatctaaagaagggtcaattcttc

SEQ ID NO: 1074273 - DNA, 25 bp, Homo sapien
gctgcgttttagctatgacaccaaa

SEQ ID NO: 1074274 - DNA, 25 bp, Homo sapien
ataactccctacctttcagacgagc

SEQ ID NO: 1074275 - DNA, 25 bp, Homo sapien
taactccctacctttcagacgagct

SEQ ID NO: 1074276 - DNA, 25 bp, Homo sapien
tcttcacttgatctgagttgaagag

SEQ ID NO: 1074277 - DNA, 25 bp, Homo sapien
tctgagttgaagagctctgacacac

SEQ ID NO: 1074278 - DNA, 25 bp, Homo sapien
tgagttgaagagctctgacacacag

SEQ ID NO: 1074279 - DNA, 25 bp, Homo sapien
gttgaagagctctgacacacagtaa

SEQ ID NO: 1074280 - DNA, 25 bp, Homo sapien
aagagacttagcaccactggatggg

SEQ ID NO: 1074281 - DNA, 25 bp, Homo sapien
tcaggatcaaaaggccagtgggctt

SEQ ID NO: 1074282 - DNA, 25 bp, Homo sapien
tgcttaaacacacgggaacagtctg

SEQ ID NO: 1074283 - DNA, 25 bp, Homo sapien
tactgcgatgggtgaaaatctggcc

SEQ ID NO: 1074284 - DNA, 25 bp, Homo sapien
tatacagggatctgcttcagaaggg

SEQ ID NO: 1074285 - DNA, 25 bp, Homo sapien
tcctggtggtctgatgttcatgccc

SEQ ID NO: 1074286 - DNA, 25 bp, Homo sapien
tctgatgagtgcgtttgtaatgcct

SEQ ID NO: 1074287 - DNA, 25 bp, Homo sapien
aatggctgtgttctgtgcgctctga

SEQ ID NO: 1074288 - DNA, 25 bp, Homo sapien
gaggaggaggctgaactatattaca

SEQ ID NO: 1074289 - DNA, 25 bp, Homo sapien
ttcaaagttcccctgtagagcagag

SEQ ID NO: 1074290 - DNA, 25 bp, Homo sapien
cagtcccattgggattaggtatgga

SEQ ID NO: 1074291 - DNA, 25 bp, Homo sapien
gaaataagtcccactttcagtccca

SEQ ID NO: 1074292 - DNA, 25 bp, Homo sapien
tcttgccctgaactatgctgcctag

SEQ ID NO: 1074293 - DNA, 25 bp, Homo sapien
taaaggtgggattgcagtcaggttc

SEQ ID NO: 1074294 - DNA, 25 bp, Homo sapien
tgctttgtccaatacaaccctcagg

SEQ ID NO: 1074295 - DNA, 25 bp, Homo sapien
caccactggccgaagataatgaagc

SEQ ID NO: 1074296 - DNA, 25 bp, Homo sapien
caactggagagctaatggactcagc

SEQ ID NO: 1074297 - DNA, 25 bp, Homo sapien
cctaaacaacggtgtggctgcttct

SEQ ID NO: 1074298 - DNA, 25 bp, Homo sapien
caaatgtccccatgttgcagtgttg

SEQ ID NO: 1074299 - DNA, 25 bp, Homo sapien
cagtgttggagccagtctgttacta

SEQ ID NO: 1074300 - DNA, 25 bp, Homo sapien
cacattcaagtcaagtaagaactcc

SEQ ID NO: 1074301 - DNA, 25 bp, Homo sapien
tgtattaattagcaccaaacaagtg

SEQ ID NO: 1074302 - DNA, 25 bp, Homo sapien
atatattacacaaagcaccctcagg

SEQ ID NO: 1074303 - DNA, 25 bp, Homo sapien
ggaagccccagtatattttgatgta

SEQ ID NO: 1074304 - DNA, 25 bp, Homo sapien
tgcagtgagctgatgttgtgctcca

SEQ ID NO: 1074305 - DNA, 25 bp, Homo sapien
ttgcagtgagctgatgttgtgctcc

SEQ ID NO: 1074306 - DNA, 25 bp, Homo sapien
gtgagctgatgttgtgctccagcct

SEQ ID NO: 1074307 - DNA, 25 bp, Homo sapien
cagtgagctgatgttgtgctccagc

SEQ ID NO: 1074308 - DNA, 25 bp, Homo sapien
gaatacttcgtttccataaggcata

SEQ ID NO: 1074309 - DNA, 25 bp, Homo sapien
gaggttgtcccagctagaagatgaa

SEQ ID NO: 1074310 - DNA, 25 bp, Homo sapien
taagcagcagctctaggaactacat

SEQ ID NO: 1074311 - DNA, 25 bp, Homo sapien
gctgaggtgcactagtctctcccaa

SEQ ID NO: 1074312 - DNA, 25 bp, Homo sapien
caggtttttgagcaacgattatccc

SEQ ID NO: 1074313 - DNA, 25 bp, Homo sapien
ttctcttgcagacccaaggacagga

SEQ ID NO: 1074314 - DNA, 25 bp, Homo sapien
tccttctgggttggctagcaaagcc

SEQ ID NO: 1074315 - DNA, 25 bp, Homo sapien
aggagcaatccctcttcgtggcagg

SEQ ID NO: 1074316 - DNA, 25 bp, Homo sapien
gggaagtaaaccctgatgtggacaa

SEQ ID NO: 1074317 - DNA, 25 bp, Homo sapien
cctggaaaagattggagtccatcac

SEQ ID NO: 1074318 - DNA, 25 bp, Homo sapien
ttcctggaaaagattggagtccatc

SEQ ID NO: 1074319 - DNA, 25 bp, Homo sapien
gaaaagattggagtccatcacattt

SEQ ID NO: 1074320 - DNA, 25 bp, Homo sapien
caccactgcacacatgagggaaaca

SEQ ID NO: 1074321 - DNA, 25 bp, Homo sapien
ttctctatctttattgatacaccac

SEQ ID NO: 1074322 - DNA, 25 bp, Homo sapien
tctatctttattgatacaccactgc

SEQ ID NO: 1074323 - DNA, 25 bp, Homo sapien
tctttattgatacaccactgcacac

SEQ ID NO: 1074324 - DNA, 25 bp, Homo sapien
tgaaccctgttaatctaccagtagg

SEQ ID NO: 1074325 - DNA, 25 bp, Homo sapien
ttcagaagaattccagcgtagagcc

SEQ ID NO: 1074326 - DNA, 25 bp, Homo sapien
gcgtagagccataaagttacacgaa

SEQ ID NO: 1074327 - DNA, 25 bp, Homo sapien
gacatgcttacaacaaaactactag

SEQ ID NO: 1074328 - DNA, 25 bp, Homo sapien
ccggctccttcagcgtgcaccggtg

SEQ ID NO: 1074329 - DNA, 25 bp, Homo sapien
gcaatatccgttctttccgagggcc

SEQ ID NO: 1074330 - DNA, 25 bp, Homo sapien
accgacactcgtcccttcagagcgt

SEQ ID NO: 1074331 - DNA, 25 bp, Homo sapien
agcgtccccgcggtgtcacagcaat

SEQ ID NO: 1074332 - DNA, 25 bp, Homo sapien
acaaagcgtccagcgatgcccacat

SEQ ID NO: 1074333 - DNA, 25 bp, Homo sapien
ggtctcccaaagatacactgtccag

SEQ ID NO: 1074334 - DNA, 25 bp, Homo sapien
cgaagatacgcttctcggccggcat

SEQ ID NO: 1074335 - DNA, 25 bp, Homo sapien
ctgccgctgtgctaggaaggtctcc

SEQ ID NO: 1074336 - DNA, 25 bp, Homo sapien
gggaccgaagcaatcaagagtctca

SEQ ID NO: 1074337 - DNA, 25 bp, Homo sapien
acagtccgccatcgggccaagttac

SEQ ID NO: 1074338 - DNA, 25 bp, Homo sapien
ccaagttacgagactcagcagggac

SEQ ID NO: 1074339 - DNA, 25 bp, Homo sapien
accacaaagacgagactggcgcggg

SEQ ID NO: 1074340 - DNA, 25 bp, Homo sapien
catgatctgtcctaactccggtggt

SEQ ID NO: 1074341 - DNA, 25 bp, Homo sapien
ctgaatagagtcctgaccagaagct

SEQ ID NO: 1074342 - DNA, 25 bp, Homo sapien
gaaagtgcttttatccagttgatag

SEQ ID NO: 1074343 - DNA, 25 bp, Homo sapien
gtcgagatttctcaaatgtttcaga

SEQ ID NO: 1074344 - DNA, 25 bp, Homo sapien
tagcaatagctgtgtatccccaaag

SEQ ID NO: 1074345 - DNA, 25 bp, Homo sapien
tgtccctaacagaagcaatgctcag

SEQ ID NO: 1074346 - DNA, 25 bp, Homo sapien
ggcaaatacacttaccaagcaatgg

SEQ ID NO: 1074347 - DNA, 25 bp, Homo sapien
caaaacagcaaaactcagccgtcag

SEQ ID NO: 1074348 - DNA, 25 bp, Homo sapien
gggaaaagggtataatcatctctat

SEQ ID NO: 1074349 - DNA, 25 bp, Homo sapien
ggcttcactactacagtcttgaaaa

SEQ ID NO: 1074350 - DNA, 25 bp, Homo sapien
gtaattcctacgcattgagcttcat

SEQ ID NO: 1074351 - DNA, 25 bp, Homo sapien
taacttgtccaaagaaacccaatga

SEQ ID NO: 1074352 - DNA, 25 bp, Homo sapien
tctccagagataaggtattcctcca

SEQ ID NO: 1074353 - DNA, 25 bp, Homo sapien
agtctccagagataaggtattcctc

SEQ ID NO: 1074354 - DNA, 25 bp, Homo sapien
ctccagagataaggtattcctccaa

SEQ ID NO: 1074355 - DNA, 25 bp, Homo sapien
gtctccagagataaggtattcctcc

SEQ ID NO: 1074356 - DNA, 25 bp, Homo sapien
atggcaaaccagtcaatgcactgaa

SEQ ID NO: 1074357 - DNA, 25 bp, Homo sapien
aaagtattataaagactccatggca

SEQ ID NO: 1074358 - DNA, 25 bp, Homo sapien
accagtcaatgcactgaaaagtgta

SEQ ID NO: 1074359 - DNA, 25 bp, Homo sapien
gtcaatgcactgaaaagtgtagcca

SEQ ID NO: 1074360 - DNA, 25 bp, Homo sapien
aatgtgaacagccaggcataaataa

SEQ ID NO: 1074361 - DNA, 25 bp, Homo sapien
ttaataatgtaaagtagaagtgaag

SEQ ID NO: 1074362 - DNA, 25 bp, Homo sapien
cagagacacaactaatgtgaacagc

SEQ ID NO: 1074363 - DNA, 25 bp, Homo sapien
aaatttcttgattgcatctttcatg

SEQ ID NO: 1074364 - DNA, 25 bp, Homo sapien
tcgtcaaaggaaagtcaatactctt

SEQ ID NO: 1074365 - DNA, 25 bp, Homo sapien
tactctttgccattacttcaatttc

SEQ ID NO: 1074366 - DNA, 25 bp, Homo sapien
aatcagcatagattgtgacaagaac

SEQ ID NO: 1074367 - DNA, 25 bp, Homo sapien
cacaacatacaccttcgtcaaagga

SEQ ID NO: 1074368 - DNA, 25 bp, Homo sapien
ctgcttaaatcagccacagttggtt

SEQ ID NO: 1074369 - DNA, 25 bp, Homo sapien
caggtcaaaagtctaggccattatc

SEQ ID NO: 1074370 - DNA, 25 bp, Homo sapien
tatgtcctacctagacttttgcctg

SEQ ID NO: 1074371 - DNA, 25 bp, Homo sapien
catattctccatacagtagcccagg

SEQ ID NO: 1074372 - DNA, 25 bp, Homo sapien
gagcaatcatcggagctgatcccct

SEQ ID NO: 1074373 - DNA, 25 bp, Homo sapien
aatggagagcaatcatcggagctga

SEQ ID NO: 1074374 - DNA, 25 bp, Homo sapien
gaccaatggagagcaatcatcggag

SEQ ID NO: 1074375 - DNA, 25 bp, Homo sapien
atcggagctgatccccttacaacta

SEQ ID NO: 1074376 - DNA, 25 bp, Homo sapien
ggttccatgccagaatcctcctgga

SEQ ID NO: 1074377 - DNA, 25 bp, Homo sapien
aactattcgcttgttcttgaagaag

SEQ ID NO: 1074378 - DNA, 25 bp, Homo sapien
tagagtgtcaaacaaaactattcgc

SEQ ID NO: 1074379 - DNA, 25 bp, Homo sapien
tacagagtactcttctagtagagtg

SEQ ID NO: 1074380 - DNA, 25 bp, Homo sapien
tagtggtgatctctcctaaatacca

SEQ ID NO: 1074381 - DNA, 25 bp, Homo sapien
ccagaactataaaggagccatggtt

SEQ ID NO: 1074382 - DNA, 25 bp, Homo sapien
ggttttcatctgatagtctccctga

SEQ ID NO: 1074383 - DNA, 25 bp, Homo sapien
ccacattctataaaagcttgcaagg

SEQ ID NO: 1074384 - DNA, 25 bp, Homo sapien
agtgaacaggcatctaaaatcatct

SEQ ID NO: 1074385 - DNA, 25 bp, Homo sapien
gcacagagttacacagacagtgagt

SEQ ID NO: 1074386 - DNA, 25 bp, Homo sapien
caaaggcaatggcacattccatcac

SEQ ID NO: 1074387 - DNA, 25 bp, Homo sapien
gaaagcttaacttacttgcacagag

SEQ ID NO: 1074388 - DNA, 25 bp, Homo sapien
cctgtgatgcacaagatacctccca

SEQ ID NO: 1074389 - DNA, 25 bp, Homo sapien
agtgtcaaaacagatgctcagatgc

SEQ ID NO: 1074390 - DNA, 25 bp, Homo sapien
catctacgtatttataacaggctag

SEQ ID NO: 1074391 - DNA, 25 bp, Homo sapien
tacatttgggtagagagtacaaggt

SEQ ID NO: 1074392 - DNA, 25 bp, Homo sapien
aattagcagggtatcgtggtatgcg

SEQ ID NO: 1074393 - DNA, 25 bp, Homo sapien
ttatgaaacaatgtgaatgtgtata

SEQ ID NO: 1074394 - DNA, 25 bp, Homo sapien
tagcagggtatcgtggtatgcgcct

SEQ ID NO: 1074395 - DNA, 25 bp, Homo sapien
gattaggtgaagaaagtaagacaca

SEQ ID NO: 1074396 - DNA, 25 bp, Homo sapien
gactgtatgtcccaacttccagtgc

SEQ ID NO: 1074397 - DNA, 25 bp, Homo sapien
ccagttcatggcctagtacagcgag

SEQ ID NO: 1074398 - DNA, 25 bp, Homo sapien
tagtacagcgagtacctcctcattt

SEQ ID NO: 1074399 - DNA, 25 bp, Homo sapien
tatttttgactgtatgtcccaactt

SEQ ID NO: 1074400 - DNA, 25 bp, Homo sapien
ggaagatgatcaatagtccaataag

SEQ ID NO: 1074401 - DNA, 25 bp, Homo sapien
aagctcctttcgaccaattaataca

SEQ ID NO: 1074402 - DNA, 25 bp, Homo sapien
gagtgggttggctatcataaaaacc

SEQ ID NO: 1074403 - DNA, 25 bp, Homo sapien
tcctttcgaccaattaatacagcaa

SEQ ID NO: 1074404 - DNA, 25 bp, Homo sapien
aatctgcggcttaggactgttaggc

SEQ ID NO: 1074405 - DNA, 25 bp, Homo sapien
tcagcttgaaactcaaatctgcggc

SEQ ID NO: 1074406 - DNA, 25 bp, Homo sapien
gcttgaagtctctctagcagtggag

SEQ ID NO: 1074407 - DNA, 25 bp, Homo sapien
tgagaacaaccagtcagaaacaggg

SEQ ID NO: 1074408 - DNA, 25 bp, Homo sapien
ggcgtacagttgatcccactttgga

SEQ ID NO: 1074409 - DNA, 25 bp, Homo sapien
tgggatcatatctaccacgtgggaa

SEQ ID NO: 1074410 - DNA, 25 bp, Homo sapien
gagaaactcttgatcactgtgtagc

SEQ ID NO: 1074411 - DNA, 25 bp, Homo sapien
cagtgagtgagagctctaggcacaa

SEQ ID NO: 1074412 - DNA, 25 bp, Homo sapien
cagataaaggatgctgaataaaagc

SEQ ID NO: 1074413 - DNA, 25 bp, Homo sapien
gaaaggcagttatcagagcatgaag

SEQ ID NO: 1074414 - DNA, 25 bp, Homo sapien
gttatcagagcatgaagtcacagat

SEQ ID NO: 1074415 - DNA, 25 bp, Homo sapien
ggactgctcctctttagccttagga

SEQ ID NO: 1074416 - DNA, 25 bp, Homo sapien
agcctacgtaagactccctggtggg

SEQ ID NO: 1074417 - DNA, 25 bp, Homo sapien
cctggtgggtaaatttcactcagac

SEQ ID NO: 1074418 - DNA, 25 bp, Homo sapien
cagaccatttgctgtgatctacgaa

SEQ ID NO: 1074419 - DNA, 25 bp, Homo sapien
tatgctgtccctctaacacgtgtac

SEQ ID NO: 1074420 - DNA, 25 bp, Homo sapien
tgctgccactgtagccgccaagggc

SEQ ID NO: 1074421 - DNA, 25 bp, Homo sapien
atgctgccactgtagccgccaaggg

SEQ ID NO: 1074422 - DNA, 25 bp, Homo sapien
tgccttggagcttcggcctatgcct

SEQ ID NO: 1074423 - DNA, 25 bp, Homo sapien
tggccaggcaatcaacggcaaggat

SEQ ID NO: 1074424 - DNA, 25 bp, Homo sapien
ctgagacaagaggtgcccctaatgt

SEQ ID NO: 1074425 - DNA, 25 bp, Homo sapien
caaggatggagatcgagggtcccca

SEQ ID NO: 1074426 - DNA, 25 bp, Homo sapien
tgaatgcatgtaatggcacacagtg

SEQ ID NO: 1074427 - DNA, 25 bp, Homo sapien
ggacccttcacgttctgagccagtt

SEQ ID NO: 1074428 - DNA, 25 bp, Homo sapien
gattctcaatacgtgggagttcgcg

SEQ ID NO: 1074429 - DNA, 25 bp, Homo sapien
cacacagtgcctgctatacagaaga

SEQ ID NO: 1074430 - DNA, 25 bp, Homo sapien
aatgtagtctgtggattgtattgtc

SEQ ID NO: 1074431 - DNA, 25 bp, Homo sapien
catgcatgcgatcacatatgaatgc

SEQ ID NO: 1074432 - DNA, 25 bp, Homo sapien
ttgcttagaactgtacatgcatgcg

SEQ ID NO: 1074433 - DNA, 25 bp, Homo sapien
tatgaatgcatgtaacactggtgac

SEQ ID NO: 1074434 - DNA, 25 bp, Homo sapien
aaaagatgtgtactgtacagttcca

SEQ ID NO: 1074435 - DNA, 25 bp, Homo sapien
tactgtcaccaaggtttaaggggca

SEQ ID NO: 1074436 - DNA, 25 bp, Homo sapien
agaaaaaagccgatctcaaaaagat

SEQ ID NO: 1074437 - DNA, 25 bp, Homo sapien
ctgtaatattttcgtagtggacaaa

SEQ ID NO: 1074438 - DNA, 25 bp, Homo sapien
cagttgtggctcaaaacgttgcttt

SEQ ID NO: 1074439 - DNA, 25 bp, Homo sapien
ctaagagacaactttgatagatggc

SEQ ID NO: 1074440 - DNA, 25 bp, Homo sapien
tttgatagatggcatcaacctggct

SEQ ID NO: 1074441 - DNA, 25 bp, Homo sapien
tagatggcatcaacctggcttctct

SEQ ID NO: 1074442 - DNA, 25 bp, Homo sapien
gagacaactttgatagatggcatca

SEQ ID NO: 1074443 - DNA, 25 bp, Homo sapien
ccaggttggtcctgagctcctggaa

SEQ ID NO: 1074444 - DNA, 25 bp, Homo sapien
gttggtcctgagctcctggaatcaa

SEQ ID NO: 1074445 - DNA, 25 bp, Homo sapien
ttctgtttgtagaaataggatctgg

SEQ ID NO: 1074446 - DNA, 25 bp, Homo sapien
aggttggtcctgagctcctggaatc

SEQ ID NO: 1074447 - DNA, 25 bp, Homo sapien
gtttttgttgtgtgtcagcagggga

SEQ ID NO: 1074448 - DNA, 25 bp, Homo sapien
tcagcaggggagggaacttacccac

SEQ ID NO: 1074449 - DNA, 25 bp, Homo sapien
ttttgttgtgtgtcagcaggggagg

SEQ ID NO: 1074450 - DNA, 25 bp, Homo sapien
tgtcagcaggggagggaacttaccc

SEQ ID NO: 1074451 - DNA, 25 bp, Homo sapien
ataaagcttgaatgtcttggcaatt

SEQ ID NO: 1074452 - DNA, 25 bp, Homo sapien
aatacaggcacgtgggcttgcccac

SEQ ID NO: 1074453 - DNA, 25 bp, Homo sapien
ttaatacaggcacgtgggcttgccc

SEQ ID NO: 1074454 - DNA, 25 bp, Homo sapien
taatacaggcacgtgggcttgccca

SEQ ID NO: 1074455 - DNA, 25 bp, Homo sapien
gtgccggacgcagatgaccctctgg

SEQ ID NO: 1074456 - DNA, 25 bp, Homo sapien
aggcccgcctccaagagaggctgcg

SEQ ID NO: 1074457 - DNA, 25 bp, Homo sapien
agcccaggcaaaggcggaccacgag

SEQ ID NO: 1074458 - DNA, 25 bp, Homo sapien
tcctgggtgccggacgcagatgacc

SEQ ID NO: 1074459 - DNA, 25 bp, Homo sapien
cccaggggcacctcctgagcgggga

SEQ ID NO: 1074460 - DNA, 25 bp, Homo sapien
ggcacctcctgagcggggagagccc

SEQ ID NO: 1074461 - DNA, 25 bp, Homo sapien
ctcctcgcccccagagacccctgcc

SEQ ID NO: 1074462 - DNA, 25 bp, Homo sapien
agagggcgacgcgccctcctcgccc

SEQ ID NO: 1074463 - DNA, 25 bp, Homo sapien
ctggcaatctgcacaaaacttgtta

SEQ ID NO: 1074464 - DNA, 25 bp, Homo sapien
cgatccacgtccttcaccgacttgc

SEQ ID NO: 1074465 - DNA, 25 bp, Homo sapien
aggacagcctggtaccgatccacgt

SEQ ID NO: 1074466 - DNA, 25 bp, Homo sapien
ccacgtccttcaccgacttgcctgt

SEQ ID NO: 1074467 - DNA, 25 bp, Homo sapien
atcatttaagcagttttcctttccg

SEQ ID NO: 1074468 - DNA, 25 bp, Homo sapien
ttaagcagttttcctttccgccatc

SEQ ID NO: 1074469 - DNA, 25 bp, Homo sapien
tcatttaagcagttttcctttccgc

SEQ ID NO: 1074470 - DNA, 25 bp, Homo sapien
agcagttttcctttccgccatctca

SEQ ID NO: 1074471 - DNA, 25 bp, Homo sapien
gcatctgtggattttagtaccccag

SEQ ID NO: 1074472 - DNA, 25 bp, Homo sapien
ttcctgacacactgataaaatctgg

SEQ ID NO: 1074473 - DNA, 25 bp, Homo sapien
tatgaccccaagtacaaaggaagta

SEQ ID NO: 1074474 - DNA, 25 bp, Homo sapien
cagccagagttaccattgacatatc

SEQ ID NO: 1074475 - DNA, 25 bp, Homo sapien
ttgaagccatgacttcccgaggaag

SEQ ID NO: 1074476 - DNA, 25 bp, Homo sapien
tttgaagccatgacttcccgaggaa

SEQ ID NO: 1074477 - DNA, 25 bp, Homo sapien
atcagtggaccggcattcacaaagc

SEQ ID NO: 1074478 - DNA, 25 bp, Homo sapien
ggagagacctgcagttcagccatca

SEQ ID NO: 1074479 - DNA, 25 bp, Homo sapien
ccacagctgaggcagatctggctca

SEQ ID NO: 1074480 - DNA, 25 bp, Homo sapien
tcagccatcagtggaccggcattca

SEQ ID NO: 1074481 - DNA, 25 bp, Homo sapien
taagatgctagtcaatggcgcaagg

SEQ ID NO: 1074482 - DNA, 25 bp, Homo sapien
tgccagacaccgtgcattaagtatg

SEQ ID NO: 1074483 - DNA, 25 bp, Homo sapien
taataatgcagtagctgttacctcc

SEQ ID NO: 1074484 - DNA, 25 bp, Homo sapien
gcaagggtatttccgcacatcaggt

SEQ ID NO: 1074485 - DNA, 25 bp, Homo sapien
ccagtggtgtgcagaatatcagtca

SEQ ID NO: 1074486 - DNA, 25 bp, Homo sapien
tcaaaacagccctggcttaagggag

SEQ ID NO: 1074487 - DNA, 25 bp, Homo sapien
tgagcccttgtgcaagaccatggac

SEQ ID NO: 1074488 - DNA, 25 bp, Homo sapien
taacctactagagctcaagactgag

SEQ ID NO: 1074489 - DNA, 25 bp, Homo sapien
gctttacagggcctatttcctctat

SEQ ID NO: 1074490 - DNA, 25 bp, Homo sapien
ctctcacaaatagctttacagggcc

SEQ ID NO: 1074491 - DNA, 25 bp, Homo sapien
aatagctttacagggcctatttcct

SEQ ID NO: 1074492 - DNA, 25 bp, Homo sapien
tcacaaatagctttacagggcctat

SEQ ID NO: 1074493 - DNA, 25 bp, Homo sapien
caaacaatctatgaagatgttaggt

SEQ ID NO: 1074494 - DNA, 25 bp, Homo sapien
aatgaaacaaacaatctatgaagat

SEQ ID NO: 1074495 - DNA, 25 bp, Homo sapien
gaaacaaacaatctatgaagatgtt

SEQ ID NO: 1074496 - DNA, 25 bp, Homo sapien
acaaacaatctatgaagatgttagg

SEQ ID NO: 1074497 - DNA, 25 bp, Homo sapien
gatgtggtatagaataaggtttcca

SEQ ID NO: 1074498 - DNA, 25 bp, Homo sapien
tataccaacactctatgcaacacca

SEQ ID NO: 1074499 - DNA, 25 bp, Homo sapien
ggacaataactgaggactatatata

SEQ ID NO: 1074500 - DNA, 25 bp, Homo sapien
ccatcttcctgataagggccagtta

SEQ ID NO: 1074501 - DNA, 25 bp, Homo sapien
ctataaaacgtgtacaatagcattc

SEQ ID NO: 1074502 - DNA, 25 bp, Homo sapien
tataaaacgtgtacaatagcattca

SEQ ID NO: 1074503 - DNA, 25 bp, Homo sapien
catctataaaacgtgtacaatagca

SEQ ID NO: 1074504 - DNA, 25 bp, Homo sapien
tctataaaacgtgtacaatagcatt

SEQ ID NO: 1074505 - DNA, 25 bp, Homo sapien
gtaggacttaggtttgagcacagct

SEQ ID NO: 1074506 - DNA, 25 bp, Homo sapien
gtgggagcaaccacactctgccagt

SEQ ID NO: 1074507 - DNA, 25 bp, Homo sapien
caaccacactctgccagttgtagga

SEQ ID NO: 1074508 - DNA, 25 bp, Homo sapien
ccagttgtaggacttaggtttgagc

SEQ ID NO: 1074509 - DNA, 25 bp, Homo sapien
tgtgggagagtgtcacgtcaaacac

SEQ ID NO: 1074510 - DNA, 25 bp, Homo sapien
gatggatttacatagttggtccgcc

SEQ ID NO: 1074511 - DNA, 25 bp, Homo sapien
tgtttgctaacaaagtcagaagcca

SEQ ID NO: 1074512 - DNA, 25 bp, Homo sapien
tgaggaatgcaaggctaagacttgg

SEQ ID NO: 1074513 - DNA, 25 bp, Homo sapien
acaaattacaacattcaaggcctaa

SEQ ID NO: 1074514 - DNA, 25 bp, Homo sapien
caaattacaacattcaaggcctaaa

SEQ ID NO: 1074515 - DNA, 25 bp, Homo sapien
gactttaccctggatatgtgcaccc

SEQ ID NO: 1074516 - DNA, 25 bp, Homo sapien
gattccagcacatcgaatgcagatg

SEQ ID NO: 1074517 - DNA, 25 bp, Homo sapien
tgaacacaccaatgttccaagaggc

SEQ ID NO: 1074518 - DNA, 25 bp, Homo sapien
tcttgagtccactggtcgaggttaa

SEQ ID NO: 1074519 - DNA, 25 bp, Homo sapien
tggaagcagctgactcactcttggg

SEQ ID NO: 1074520 - DNA, 25 bp, Homo sapien
ttacatagatatatggaagcagctg

SEQ ID NO: 1074521 - DNA, 25 bp, Homo sapien
gcagctgactcactcttgggctaag

SEQ ID NO: 1074522 - DNA, 25 bp, Homo sapien
acatagatatatggaagcagctgac

SEQ ID NO: 1074523 - DNA, 25 bp, Homo sapien
catgactaaccgcagcttcaacttc

SEQ ID NO: 1074524 - DNA, 25 bp, Homo sapien
tgactaaccgcagcttcaacttctg

SEQ ID NO: 1074525 - DNA, 25 bp, Homo sapien
atcatgactaaccgcagcttcaact

SEQ ID NO: 1074526 - DNA, 25 bp, Homo sapien
atgactaaccgcagcttcaacttct

SEQ ID NO: 1074527 - DNA, 25 bp, Homo sapien
ccactactgtacaattgaagaacca

SEQ ID NO: 1074528 - DNA, 25 bp, Homo sapien
gtagaaacatggaacgtcagatcaa

SEQ ID NO: 1074529 - DNA, 25 bp, Homo sapien
gagtgtcagaaccaacatttaaact

SEQ ID NO: 1074530 - DNA, 25 bp, Homo sapien
gaagaaccaacctagagagtgtcag

SEQ ID NO: 1074531 - DNA, 25 bp, Homo sapien
ccgaaaggtctcaggaagataggct

SEQ ID NO: 1074532 - DNA, 25 bp, Homo sapien
cataaagtcggtttgcctttccatt

SEQ ID NO: 1074533 - DNA, 25 bp, Homo sapien
ggtctatctgaggtcgccgaaaggt

SEQ ID NO: 1074534 - DNA, 25 bp, Homo sapien
gaagataggcttcataaagtcggtt

SEQ ID NO: 1074535 - DNA, 25 bp, Homo sapien
cttctaagttgctccagaaaagata

SEQ ID NO: 1074536 - DNA, 25 bp, Homo sapien
gccttctaagttgctccagaaaaga

SEQ ID NO: 1074537 - DNA, 25 bp, Homo sapien
ttctaagttgctccagaaaagatac

SEQ ID NO: 1074538 - DNA, 25 bp, Homo sapien
ccttctaagttgctccagaaaagat

SEQ ID NO: 1074539 - DNA, 25 bp, Homo sapien
agacttcggtccatgtatttcttct

SEQ ID NO: 1074540 - DNA, 25 bp, Homo sapien
tgtctcgaataaatccttcaacagc

SEQ ID NO: 1074541 - DNA, 25 bp, Homo sapien
tgatgtccagacttcggtccatgta

SEQ ID NO: 1074542 - DNA, 25 bp, Homo sapien
tcttctcatatttgtctcgaataaa

SEQ ID NO: 1074543 - DNA, 25 bp, Homo sapien
tttctggaactggttcgctccctct

SEQ ID NO: 1074544 - DNA, 25 bp, Homo sapien
gaactggttcgctccctcttttcca

SEQ ID NO: 1074545 - DNA, 25 bp, Homo sapien
tggaactggttcgctccctcttttc

SEQ ID NO: 1074546 - DNA, 25 bp, Homo sapien
tctggaactggttcgctccctcttt

SEQ ID NO: 1074547 - DNA, 25 bp, Homo sapien
tctccactgtaaagccacggtgttc

SEQ ID NO: 1074548 - DNA, 25 bp, Homo sapien
ggtatctgatggtacaagagccaag

SEQ ID NO: 1074549 - DNA, 25 bp, Homo sapien
ggaatgtgcctcttgcttagatgga

SEQ ID NO: 1074550 - DNA, 25 bp, Homo sapien
cgcctgtgattgtctggtgtcctaa

SEQ ID NO: 1074551 - DNA, 25 bp, Homo sapien
gtgaaaatatgttatagcaagaaat

SEQ ID NO: 1074552 - DNA, 25 bp, Homo sapien
aaatatgttatagcaagaaataagc

SEQ ID NO: 1074553 - DNA, 25 bp, Homo sapien
ctaaggtgaaaatatgttatagcaa

SEQ ID NO: 1074554 - DNA, 25 bp, Homo sapien
aggtgaaaatatgttatagcaagaa

SEQ ID NO: 1074555 - DNA, 25 bp, Homo sapien
ccatgacaggcgctgtggatttcgg

SEQ ID NO: 1074556 - DNA, 25 bp, Homo sapien
aggcccaacaaatccatgacaggcg

SEQ ID NO: 1074557 - DNA, 25 bp, Homo sapien
agcttttccgaggtagctgtgggtc

SEQ ID NO: 1074558 - DNA, 25 bp, Homo sapien
tccgaggtagctgtgggtcttcttt

SEQ ID NO: 1074559 - DNA, 25 bp, Homo sapien
taaacacttccttagagcaactgct

SEQ ID NO: 1074560 - DNA, 25 bp, Homo sapien
tgtcgctctgaaaagtgtcacagta

SEQ ID NO: 1074561 - DNA, 25 bp, Homo sapien
catggaagctgaaaagtccaactct

SEQ ID NO: 1074562 - DNA, 25 bp, Homo sapien
taagtaacacagagcgacactggct

SEQ ID NO: 1074563 - DNA, 25 bp, Homo sapien
tccttctctagggtattgctggtct

SEQ ID NO: 1074564 - DNA, 25 bp, Homo sapien
agaggccaacagatctaaatccttc

SEQ ID NO: 1074565 - DNA, 25 bp, Homo sapien
aacagaggccaacagatctaaatcc

SEQ ID NO: 1074566 - DNA, 25 bp, Homo sapien
ttactatttgcaatggagcaggcca

SEQ ID NO: 1074567 - DNA, 25 bp, Homo sapien
ggcactccctgcagttggcatggaa

SEQ ID NO: 1074568 - DNA, 25 bp, Homo sapien
gattttcaggaacagagccggcact

SEQ ID NO: 1074569 - DNA, 25 bp, Homo sapien
catttgaggcgtctgggatccatac

SEQ ID NO: 1074570 - DNA, 25 bp, Homo sapien
ttgctccctggctccggaaacaggt

SEQ ID NO: 1074571 - DNA, 25 bp, Homo sapien
gcacatggccatgacacccatgaaa

SEQ ID NO: 1074572 - DNA, 25 bp, Homo sapien
atggccatgacacccatgaaatcta

SEQ ID NO: 1074573 - DNA, 25 bp, Homo sapien
ctggcacatggccatgacacccatg

SEQ ID NO: 1074574 - DNA, 25 bp, Homo sapien
catggccatgacacccatgaaatct

SEQ ID NO: 1074575 - DNA, 25 bp, Homo sapien
catctgagcgggagccatgaacatt

SEQ ID NO: 1074576 - DNA, 25 bp, Homo sapien
tcctggctgagcaaccatgcctact

SEQ ID NO: 1074577 - DNA, 25 bp, Homo sapien
tgggtggtcatcattccattcggca

SEQ ID NO: 1074578 - DNA, 25 bp, Homo sapien
tggctggaccccatacacagtctgg

SEQ ID NO: 1074579 - DNA, 25 bp, Homo sapien
tattttttctcaatcagcaataata

SEQ ID NO: 1074580 - DNA, 25 bp, Homo sapien
taagagcaccatcttttattagtga

SEQ ID NO: 1074581 - DNA, 25 bp, Homo sapien
tttgagggagaatattcattacgtg

SEQ ID NO: 1074582 - DNA, 25 bp, Homo sapien
ctgatttaaggtgttttgtcttatc

SEQ ID NO: 1074583 - DNA, 25 bp, Homo sapien
gggcattccgccaattagtgcaaaa

SEQ ID NO: 1074584 - DNA, 25 bp, Homo sapien
tgttatggacagtaaaccctggacc

SEQ ID NO: 1074585 - DNA, 25 bp, Homo sapien
caatgctgacggagactaaagctca

SEQ ID NO: 1074586 - DNA, 25 bp, Homo sapien
tcagatcatttcaaggccacgtacg

SEQ ID NO: 1074587 - DNA, 25 bp, Homo sapien
catagttcatcatgccattggctcc

SEQ ID NO: 1074588 - DNA, 25 bp, Homo sapien
ccactcattgactgtccatagttca

SEQ ID NO: 1074589 - DNA, 25 bp, Homo sapien
tgactgtccatagttcatcatgcca

SEQ ID NO: 1074590 - DNA, 25 bp, Homo sapien
gtccatttccgccactcattgactg

SEQ ID NO: 1074591 - DNA, 25 bp, Homo sapien
ttccacatctgaggactgagagtct

SEQ ID NO: 1074592 - DNA, 25 bp, Homo sapien
ttatttccacatctgaggactgaga

SEQ ID NO: 1074593 - DNA, 25 bp, Homo sapien
tatttccacatctgaggactgagag

SEQ ID NO: 1074594 - DNA, 25 bp, Homo sapien
tttccacatctgaggactgagagtc

SEQ ID NO: 1074595 - DNA, 25 bp, Homo sapien
agtacacgttaagctctgcattccc

SEQ ID NO: 1074596 - DNA, 25 bp, Homo sapien
acaacttctaaggtgctggtgccag

SEQ ID NO: 1074597 - DNA, 25 bp, Homo sapien
gagcaccctggatacacaggcatga

SEQ ID NO: 1074598 - DNA, 25 bp, Homo sapien
tgggaggcggaacacacactcatac

SEQ ID NO: 1074599 - DNA, 25 bp, Homo sapien
caaagttttgattgtgaccccatca

SEQ ID NO: 1074600 - DNA, 25 bp, Homo sapien
tctgagatgccagaaggaatggatt

SEQ ID NO: 1074601 - DNA, 25 bp, Homo sapien
tcaggaatgactcaaagagaccttc

SEQ ID NO: 1074602 - DNA, 25 bp, Homo sapien
aacagttttcgccacgatgcccagg

SEQ ID NO: 1074603 - DNA, 25 bp, Homo sapien
ggagatggagcctgcgttcttgggc

SEQ ID NO: 1074604 - DNA, 25 bp, Homo sapien
atggagcctgcgttcttgggcccca

SEQ ID NO: 1074605 - DNA, 25 bp, Homo sapien
gagatggagcctgcgttcttgggcc

SEQ ID NO: 1074606 - DNA, 25 bp, Homo sapien
gatggagcctgcgttcttgggcccc

SEQ ID NO: 1074607 - DNA, 25 bp, Homo sapien
ggttccggcactgcgcggccaagct

SEQ ID NO: 1074608 - DNA, 25 bp, Homo sapien
cctgcgcagcggctggctagagcat

SEQ ID NO: 1074609 - DNA, 25 bp, Homo sapien
gctagagcatggttcccagcgtcct

SEQ ID NO: 1074610 - DNA, 25 bp, Homo sapien
tgcgcgccgggttggctgcgttcag

SEQ ID NO: 1074611 - DNA, 25 bp, Homo sapien
tctccccgctgggccggcacgcccc

SEQ ID NO: 1074612 - DNA, 25 bp, Homo sapien
gctgggccggcacgcccccgccttc

SEQ ID NO: 1074613 - DNA, 25 bp, Homo sapien
cctctccccgctgggccggcacgcc

SEQ ID NO: 1074614 - DNA, 25 bp, Homo sapien
ccgctgggccggcacgcccccgcct

SEQ ID NO: 1074615 - DNA, 25 bp, Homo sapien
agctggaggcgccaagtatttactc

SEQ ID NO: 1074616 - DNA, 25 bp, Homo sapien
tatcaaaatccgagatctggacttg

SEQ ID NO: 1074617 - DNA, 25 bp, Homo sapien
tcagggcgtatctcccaacttgagc

SEQ ID NO: 1074618 - DNA, 25 bp, Homo sapien
gtctatcatcggctctcagggcgta

SEQ ID NO: 1074619 - DNA, 25 bp, Homo sapien
ggaggcttcccaattgtaccgatct

SEQ ID NO: 1074620 - DNA, 25 bp, Homo sapien
aatcgccgactcctactcctcaatg

SEQ ID NO: 1074621 - DNA, 25 bp, Homo sapien
tgtaccgatctccttaatcgccgac

SEQ ID NO: 1074622 - DNA, 25 bp, Homo sapien
tagggcttgtccacctctgatgagg

SEQ ID NO: 1074623 - DNA, 25 bp, Homo sapien
acggcgtccgcactcctttctgagg

SEQ ID NO: 1074624 - DNA, 25 bp, Homo sapien
gcgtccgcactcctttctgaggacc

SEQ ID NO: 1074625 - DNA, 25 bp, Homo sapien
gacggcgtccgcactcctttctgag

SEQ ID NO: 1074626 - DNA, 25 bp, Homo sapien
cggcgtccgcactcctttctgagga

SEQ ID NO: 1074627 - DNA, 25 bp, Homo sapien
gctttaaacatcttagtcacatcct

SEQ ID NO: 1074628 - DNA, 25 bp, Homo sapien
gcctttggatgacgcaacttcaccc

SEQ ID NO: 1074629 - DNA, 25 bp, Homo sapien
ctttggatgacgcaacttcacccag

SEQ ID NO: 1074630 - DNA, 25 bp, Homo sapien
ttggatgacgcaacttcacccaggt

SEQ ID NO: 1074631 - DNA, 25 bp, Homo sapien
cctgggtctcatcagcatcctgaga

SEQ ID NO: 1074632 - DNA, 25 bp, Homo sapien
caagggtcactctactctctaaact

SEQ ID NO: 1074633 - DNA, 25 bp, Homo sapien
agggtcactctactctctaaacttt

SEQ ID NO: 1074634 - DNA, 25 bp, Homo sapien
ctgggtctcatcagcatcctgagac

SEQ ID NO: 1074635 - DNA, 25 bp, Homo sapien
ctcccggtacagattccggtgagca

SEQ ID NO: 1074636 - DNA, 25 bp, Homo sapien
cacctcccggtacagattccggtga

SEQ ID NO: 1074637 - DNA, 25 bp, Homo sapien
cccggtacagattccggtgagcagg

SEQ ID NO: 1074638 - DNA, 25 bp, Homo sapien
acctcccggtacagattccggtgag

SEQ ID NO: 1074639 - DNA, 25 bp, Homo sapien
ccaggttcccatagttctccagcat

SEQ ID NO: 1074640 - DNA, 25 bp, Homo sapien
cactgagaccaggttcccatagttc

SEQ ID NO: 1074641 - DNA, 25 bp, Homo sapien
agaccaggttcccatagttctccag

SEQ ID NO: 1074642 - DNA, 25 bp, Homo sapien
ccactgagaccaggttcccatagtt

SEQ ID NO: 1074643 - DNA, 25 bp, Homo sapien
attttcaagaggagcccatccttac

SEQ ID NO: 1074644 - DNA, 25 bp, Homo sapien
tattttcaagaggagcccatcctta

SEQ ID NO: 1074645 - DNA, 25 bp, Homo sapien
gttctattttcaagaggagcccatc

SEQ ID NO: 1074646 - DNA, 25 bp, Homo sapien
tctattttcaagaggagcccatcct

SEQ ID NO: 1074647 - DNA, 25 bp, Homo sapien
atatggttctttggtattcgggcct

SEQ ID NO: 1074648 - DNA, 25 bp, Homo sapien
tctaatacagaaccgaaagcccaaa

SEQ ID NO: 1074649 - DNA, 25 bp, Homo sapien
gaaaagagcatagcaatcctgactg

SEQ ID NO: 1074650 - DNA, 25 bp, Homo sapien
tattcgggccttctaaagaaagcag

SEQ ID NO: 1074651 - DNA, 25 bp, Homo sapien
cacgccaggtttggaaagctgacat

SEQ ID NO: 1074652 - DNA, 25 bp, Homo sapien
ttctccaactgggaaatcacgccag

SEQ ID NO: 1074653 - DNA, 25 bp, Homo sapien
actgggaaatcacgccaggtttgga

SEQ ID NO: 1074654 - DNA, 25 bp, Homo sapien
gaactcctgaaatatctctctccat

SEQ ID NO: 1074655 - DNA, 25 bp, Homo sapien
catgtatctgcattaaaaaagacac

SEQ ID NO: 1074656 - DNA, 25 bp, Homo sapien
tcatgtatctgcattaaaaaagaca

SEQ ID NO: 1074657 - DNA, 25 bp, Homo sapien
ttaaaaaagacactgatgagaaaca

SEQ ID NO: 1074658 - DNA, 25 bp, Homo sapien
gcattaaaaaagacactgatgagaa

SEQ ID NO: 1074659 - DNA, 25 bp, Homo sapien
tcccacgaaatatcattctgtaagg

SEQ ID NO: 1074660 - DNA, 25 bp, Homo sapien
tagttcttcccacgaaatatcattc

SEQ ID NO: 1074661 - DNA, 25 bp, Homo sapien
cacaatgtagttcttcccacgaaat

SEQ ID NO: 1074662 - DNA, 25 bp, Homo sapien
ccatcattaggccacaatgtagttc

SEQ ID NO: 1074663 - DNA, 25 bp, Homo sapien
gacctattggtcctggcataacttc

SEQ ID NO: 1074664 - DNA, 25 bp, Homo sapien
gaataatctcatgttgcctaaggtg

SEQ ID NO: 1074665 - DNA, 25 bp, Homo sapien
caaatgctggatcagtccaatgctc

SEQ ID NO: 1074666 - DNA, 25 bp, Homo sapien
taaggtgtctaatctggaaaaacgc

SEQ ID NO: 1074667 - DNA, 25 bp, Homo sapien
agaatcttgtgctccaacatagatt

SEQ ID NO: 1074668 - DNA, 25 bp, Homo sapien
ttagaatcttgtgctccaacataga

SEQ ID NO: 1074669 - DNA, 25 bp, Homo sapien
tagaatcttgtgctccaacatagat

SEQ ID NO: 1074670 - DNA, 25 bp, Homo sapien
caggacttaagagttagaggccagc

SEQ ID NO: 1074671 - DNA, 25 bp, Homo sapien
aaaatgacagcccttgagccaaacg

SEQ ID NO: 1074672 - DNA, 25 bp, Homo sapien
tagcaaagtattatccggtccaaaa

SEQ ID NO: 1074673 - DNA, 25 bp, Homo sapien
gacaattttggcctctaggtacacc

SEQ ID NO: 1074674 - DNA, 25 bp, Homo sapien
caacagctagtgaaacggcccaaag

SEQ ID NO: 1074675 - DNA, 25 bp, Homo sapien
gatttctcgatctggaaggtagaca

SEQ ID NO: 1074676 - DNA, 25 bp, Homo sapien
tgagtcccttctgcgtgtcaggcac

SEQ ID NO: 1074677 - DNA, 25 bp, Homo sapien
tattggtccacttgcacagaaaaga

SEQ ID NO: 1074678 - DNA, 25 bp, Homo sapien
cacttcgtgaaggatttgcttctcc

SEQ ID NO: 1074679 - DNA, 25 bp, Homo sapien
tctcctgccacttcgtgaaggattt

SEQ ID NO: 1074680 - DNA, 25 bp, Homo sapien
ttatgtgttcggaagttcctccttc

SEQ ID NO: 1074681 - DNA, 25 bp, Homo sapien
tctgatggttttatgtgttcggaag

SEQ ID NO: 1074682 - DNA, 25 bp, Homo sapien
tgaagacattgctcaattattgctg

SEQ ID NO: 1074683 - DNA, 25 bp, Homo sapien
gcttcccgtaaaggcaaatgaccta

SEQ ID NO: 1074684 - DNA, 25 bp, Homo sapien
caattattgctgtgagaagtctaaa

SEQ ID NO: 1074685 - DNA, 25 bp, Homo sapien
tgacctatcatcttgccccaggagg

SEQ ID NO: 1074686 - DNA, 25 bp, Homo sapien
tcttttccctacaggcattagcaca

SEQ ID NO: 1074687 - DNA, 25 bp, Homo sapien
tattgtgatgaaaaccacataccat

SEQ ID NO: 1074688 - DNA, 25 bp, Homo sapien
actgggtactaatatgtgtctgctg

SEQ ID NO: 1074689 - DNA, 25 bp, Homo sapien
tagcacacgtgagtttgaaaaaatt

SEQ ID NO: 1074690 - DNA, 25 bp, Homo sapien
tcagtataccaaggaactgcaccgg

SEQ ID NO: 1074691 - DNA, 25 bp, Homo sapien
cagtataccaaggaactgcaccggc

SEQ ID NO: 1074692 - DNA, 25 bp, Homo sapien
agtataccaaggaactgcaccggca

SEQ ID NO: 1074693 - DNA, 25 bp, Homo sapien
aatggacctattaaatttgagatgc

SEQ ID NO: 1074694 - DNA, 25 bp, Homo sapien
tgcctaatacatatccaagaatgaa

SEQ ID NO: 1074695 - DNA, 25 bp, Homo sapien
tagggcatagagcaggttcagaaat

SEQ ID NO: 1074696 - DNA, 25 bp, Homo sapien
gaatgaagtatgcactaggagtctc

SEQ ID NO: 1074697 - DNA, 25 bp, Homo sapien
cattggtacatacaactgttttgga

SEQ ID NO: 1074698 - DNA, 25 bp, Homo sapien
agcctgtcagcagtagaatgggtaa

SEQ ID NO: 1074699 - DNA, 25 bp, Homo sapien
gaagcctgacatagaagaatacaca

SEQ ID NO: 1074700 - DNA, 25 bp, Homo sapien
gctagtgagactatacattggtaca

SEQ ID NO: 1074701 - DNA, 25 bp, Homo sapien
taacagatattgttccctcccggcc

SEQ ID NO: 1074702 - DNA, 25 bp, Homo sapien
cactcttgaggttttcagcggtaaa

SEQ ID NO: 1074703 - DNA, 25 bp, Homo sapien
acatcggccttggacccaggtagga

SEQ ID NO: 1074704 - DNA, 25 bp, Homo sapien
cattctccaagaagcgtccagcgtt

SEQ ID NO: 1074705 - DNA, 25 bp, Homo sapien
actttctttgggaggcagccagtta

SEQ ID NO: 1074706 - DNA, 25 bp, Homo sapien
agattccaatcacctgccctcagga

SEQ ID NO: 1074707 - DNA, 25 bp, Homo sapien
taggtttgagttcatgtctccatac

SEQ ID NO: 1074708 - DNA, 25 bp, Homo sapien
gggttcctagagactgatgtgactt

SEQ ID NO: 1074709 - DNA, 25 bp, Homo sapien
aattgccagaagctcttgatgagac

SEQ ID NO: 1074710 - DNA, 25 bp, Homo sapien
gaaattgccagaagctcttgatgag

SEQ ID NO: 1074711 - DNA, 25 bp, Homo sapien
ggaaattgccagaagctcttgatga

SEQ ID NO: 1074712 - DNA, 25 bp, Homo sapien
attgccagaagctcttgatgagacg

SEQ ID NO: 1074713 - DNA, 25 bp, Homo sapien
gatgcctgccttactggacttgtcc

SEQ ID NO: 1074714 - DNA, 25 bp, Homo sapien
ccctccacggccttctttggatgtt

SEQ ID NO: 1074715 - DNA, 25 bp, Homo sapien
ccaggtgctggcctcggtaggcagg

SEQ ID NO: 1074716 - DNA, 25 bp, Homo sapien
caggtgctggcctcggtaggcaggg

SEQ ID NO: 1074717 - DNA, 25 bp, Homo sapien
tccacggccttctttggatgttgca

SEQ ID NO: 1074718 - DNA, 25 bp, Homo sapien
ctgggattctgctgtcgggagtcca

SEQ ID NO: 1074719 - DNA, 25 bp, Homo sapien
tctctctgggtctttacgtcctcag

SEQ ID NO: 1074720 - DNA, 25 bp, Homo sapien
caggggtcacttcatcctctaaact

SEQ ID NO: 1074721 - DNA, 25 bp, Homo sapien
ctgtcgggagtccaggggtcacttc

SEQ ID NO: 1074722 - DNA, 25 bp, Homo sapien
actgtctggaactgtagtctgtctg

SEQ ID NO: 1074723 - DNA, 25 bp, Homo sapien
tttatcaggagccttctctggatct

SEQ ID NO: 1074724 - DNA, 25 bp, Homo sapien
ttatcaggagccttctctggatctg

SEQ ID NO: 1074725 - DNA, 25 bp, Homo sapien
gtcaatagatatgtccttgaaagtc

SEQ ID NO: 1074726 - DNA, 25 bp, Homo sapien
catcacctctcggtatagattctgg

SEQ ID NO: 1074727 - DNA, 25 bp, Homo sapien
acctctcggtatagattctggtgag

SEQ ID NO: 1074728 - DNA, 25 bp, Homo sapien
gggtgaagtcaatagatatgtcctt

SEQ ID NO: 1074729 - DNA, 25 bp, Homo sapien
tctctaactgggatatcacactagg

SEQ ID NO: 1074730 - DNA, 25 bp, Homo sapien
taactgggatatcacactaggtttg

SEQ ID NO: 1074731 - DNA, 25 bp, Homo sapien
gggatatcacactaggtttggaaag

SEQ ID NO: 1074732 - DNA, 25 bp, Homo sapien
tcctttctctaactgggatatcaca

SEQ ID NO: 1074733 - DNA, 25 bp, Homo sapien
gaggagattgttagggaccccgaca

SEQ ID NO: 1074734 - DNA, 25 bp, Homo sapien
catgtaataaaagcacgaagacatg

SEQ ID NO: 1074735 - DNA, 25 bp, Homo sapien
tctaggtggaagctacacagaaatg

SEQ ID NO: 1074736 - DNA, 25 bp, Homo sapien
acactgatatatagactgcttttac

SEQ ID NO: 1074737 - DNA, 25 bp, Homo sapien
gaaatggtactctttgcagttgact

SEQ ID NO: 1074738 - DNA, 25 bp, Homo sapien
tatgggtcaagatggcttgtctcac

SEQ ID NO: 1074739 - DNA, 25 bp, Homo sapien
cataatgccatgatataagcgctcc

SEQ ID NO: 1074740 - DNA, 25 bp, Homo sapien
cacatctctcatacaagtttcctgg

SEQ ID NO: 1074741 - DNA, 25 bp, Homo sapien
tactgagggatgcactttgactaaa

SEQ ID NO: 1074742 - DNA, 25 bp, Homo sapien
taagtgatgagcgatgtctgaaggc

SEQ ID NO: 1074743 - DNA, 25 bp, Homo sapien
taggcttttccacagcggttgcatt

SEQ ID NO: 1074744 - DNA, 25 bp, Homo sapien
gctaaggtgtatcctctgcctaaag

SEQ ID NO: 1074745 - DNA, 25 bp, Homo sapien
caattcctcatatctgagtcctgaa

SEQ ID NO: 1074746 - DNA, 25 bp, Homo sapien
gaggtgttagtagtcaatacctgtc

SEQ ID NO: 1074747 - DNA, 25 bp, Homo sapien
catgatgtcgactaagtgaagagtt

SEQ ID NO: 1074748 - DNA, 25 bp, Homo sapien
cttatttcggaaggcgttcctcctg

SEQ ID NO: 1074749 - DNA, 25 bp, Homo sapien
aatacggttggtgatattttaagct

SEQ ID NO: 1074750 - DNA, 25 bp, Homo sapien
gatattttaagctatagttcccaaa

SEQ ID NO: 1074751 - DNA, 25 bp, Homo sapien
ttgacctcccaattacaggcacaag

SEQ ID NO: 1074752 - DNA, 25 bp, Homo sapien
agttcccaaatgctggtctgcaaat

SEQ ID NO: 1074753 - DNA, 25 bp, Homo sapien
ctccagcctgagcaacagagtgaga

SEQ ID NO: 1074754 - DNA, 25 bp, Homo sapien
ccagcctgagcaacagagtgagacc

SEQ ID NO: 1074755 - DNA, 25 bp, Homo sapien
tgaaccatgatcataccaactgcac

SEQ ID NO: 1074756 - DNA, 25 bp, Homo sapien
agtgaaccatgatcataccaactgc

SEQ ID NO: 1074757 - DNA, 25 bp, Homo sapien
tacatgataatataggccggttgcc

SEQ ID NO: 1074758 - DNA, 25 bp, Homo sapien
ggaaggcggcttttcactgcatata

SEQ ID NO: 1074759 - DNA, 25 bp, Homo sapien
gcgcgcagcctgcatgttactttta

SEQ ID NO: 1074760 - DNA, 25 bp, Homo sapien
gaaatctatggtgggaaatacagga

SEQ ID NO: 1074761 - DNA, 25 bp, Homo sapien
aatatgtaagttgaggccaggtacg

SEQ ID NO: 1074762 - DNA, 25 bp, Homo sapien
tatgtaagttgaggccaggtacggt

SEQ ID NO: 1074763 - DNA, 25 bp, Homo sapien
tagaaatatgtaagttgaggccagg

SEQ ID NO: 1074764 - DNA, 25 bp, Homo sapien
tcttagaaatatgtaagttgaggcc

SEQ ID NO: 1074765 - DNA, 25 bp, Homo sapien
aagtgccgcgtctccgcttggccat

SEQ ID NO: 1074766 - DNA, 25 bp, Homo sapien
ggacaatccgagcaaggtctgggcc

SEQ ID NO: 1074767 - DNA, 25 bp, Homo sapien
tggcgaggtctcccagttaccaccg

SEQ ID NO: 1074768 - DNA, 25 bp, Homo sapien
gtgaagtgccgcgtctccgcttggc

SEQ ID NO: 1074769 - DNA, 25 bp, Homo sapien
aggctgcggctggggcagaaatccg

SEQ ID NO: 1074770 - DNA, 25 bp, Homo sapien
ctgcggctggggcagaaatccgtct

SEQ ID NO: 1074771 - DNA, 25 bp, Homo sapien
tcgcgaggctgcggctggggcagaa

SEQ ID NO: 1074772 - DNA, 25 bp, Homo sapien
ctcgcgaggctgcggctggggcaga

SEQ ID NO: 1074773 - DNA, 25 bp, Homo sapien
ctggtttcgccgcggcctcggagct

SEQ ID NO: 1074774 - DNA, 25 bp, Homo sapien
agtcggcccgccactcgcaaaaaag

SEQ ID NO: 1074775 - DNA, 25 bp, Homo sapien
tgccggagcggactacacagtcggc

SEQ ID NO: 1074776 - DNA, 25 bp, Homo sapien
gcgaggagactgaggaagccgggca

SEQ ID NO: 1074777 - DNA, 25 bp, Homo sapien
agccgcgcccaccaagggagggaga

SEQ ID NO: 1074778 - DNA, 25 bp, Homo sapien
gggagacgagacgagccgcttcccg

SEQ ID NO: 1074779 - DNA, 25 bp, Homo sapien
acgcggcgatcgcagggacagaacc

SEQ ID NO: 1074780 - DNA, 25 bp, Homo sapien
agaaccctaagctccgaaacgcagc

SEQ ID NO: 1074781 - DNA, 25 bp, Homo sapien
ctcgggaaggagtcccggccaacag

SEQ ID NO: 1074782 - DNA, 25 bp, Homo sapien
gagccgtccacctcgggaaggagtc

SEQ ID NO: 1074783 - DNA, 25 bp, Homo sapien
ggaaggagtcccggccaacagcact

SEQ ID NO: 1074784 - DNA, 25 bp, Homo sapien
aaggagtcccggccaacagcactgt

SEQ ID NO: 1074785 - DNA, 25 bp, Homo sapien
cagtgcggcccggacttgtgggctc

SEQ ID NO: 1074786 - DNA, 25 bp, Homo sapien
tccgcgggcgtttgccttcagggaa

SEQ ID NO: 1074787 - DNA, 25 bp, Homo sapien
cagggagtgccatgcatgccctaaa

SEQ ID NO: 1074788 - DNA, 25 bp, Homo sapien
tggccctaaagcactgtctcccagg

SEQ ID NO: 1074789 - DNA, 25 bp, Homo sapien
tgccgatggcaacatcctgacttgt

SEQ ID NO: 1074790 - DNA, 25 bp, Homo sapien
tcagacataaccaagatccccaagg

SEQ ID NO: 1074791 - DNA, 25 bp, Homo sapien
caaggagctccgagatcagttccct

SEQ ID NO: 1074792 - DNA, 25 bp, Homo sapien
aagcaagagaccttatgacagcggc

SEQ ID NO: 1074793 - DNA, 25 bp, Homo sapien
cccgtactctagatgcaatgacttg

SEQ ID NO: 1074794 - DNA, 25 bp, Homo sapien
caatgacttgatccaatccctgctc

SEQ ID NO: 1074795 - DNA, 25 bp, Homo sapien
tgaccattccctcacgttgggtgtt

SEQ ID NO: 1074796 - DNA, 25 bp, Homo sapien
taggttacataacgctcgcctctct

SEQ ID NO: 1074797 - DNA, 25 bp, Homo sapien
ctgaaagaccaggtctgcattaaag

SEQ ID NO: 1074798 - DNA, 25 bp, Homo sapien
ccaggtctgcattaaagaacctaaa

SEQ ID NO: 1074799 - DNA, 25 bp, Homo sapien
ctaaattagcaacttaggtccttgc

SEQ ID NO: 1074800 - DNA, 25 bp, Homo sapien
gctatggtagaaccggaacttctgg

SEQ ID NO: 1074801 - DNA, 25 bp, Homo sapien
tgtgacttcgttgatcttcctcctc

SEQ ID NO: 1074802 - DNA, 25 bp, Homo sapien
ctgtgacttcgttgatcttcctcct

SEQ ID NO: 1074803 - DNA, 25 bp, Homo sapien
atcttcctcctcatagggaaggcca

SEQ ID NO: 1074804 - DNA, 25 bp, Homo sapien
acagctctggattgggctagaaggg

SEQ ID NO: 1074805 - DNA, 25 bp, Homo sapien
cagctctggattgggctagaagggc

SEQ ID NO: 1074806 - DNA, 25 bp, Homo sapien
agctctggattgggctagaagggcc

SEQ ID NO: 1074807 - DNA, 25 bp, Homo sapien
tacagctctggattgggctagaagg

SEQ ID NO: 1074808 - DNA, 25 bp, Homo sapien
caagtctgagaaccctgaggcttct

SEQ ID NO: 1074809 - DNA, 25 bp, Homo sapien
aatgtctgcataggtacacgtccgg

SEQ ID NO: 1074810 - DNA, 25 bp, Homo sapien
gacaagttccatgaggtcacccaaa

SEQ ID NO: 1074811 - DNA, 25 bp, Homo sapien
gatgggccaggcatgttaactaaag

SEQ ID NO: 1074812 - DNA, 25 bp, Homo sapien
gcttttttgacttggggcgccagtg

SEQ ID NO: 1074813 - DNA, 25 bp, Homo sapien
tggcttttttgacttggggcgccag

SEQ ID NO: 1074814 - DNA, 25 bp, Homo sapien
acttggggcgccagtgtagagctga

SEQ ID NO: 1074815 - DNA, 25 bp, Homo sapien
gcgccagtgtagagctgagcactcc

SEQ ID NO: 1074816 - DNA, 25 bp, Homo sapien
tcttttgcttaggtacaacaggagc

SEQ ID NO: 1074817 - DNA, 25 bp, Homo sapien
tctcaggcaatcatgatgaagctcc

SEQ ID NO: 1074818 - DNA, 25 bp, Homo sapien
cataaaagccaagctcagagactgg

SEQ ID NO: 1074819 - DNA, 25 bp, Homo sapien
cattccagccatgatgagcatctgt

SEQ ID NO: 1074820 - DNA, 25 bp, Homo sapien
taaaggcttggaataacacgtacac

SEQ ID NO: 1074821 - DNA, 25 bp, Homo sapien
gaaggactgcagttatgaaaaaacc

SEQ ID NO: 1074822 - DNA, 25 bp, Homo sapien
caactatatatggtggtcatctttg

SEQ ID NO: 1074823 - DNA, 25 bp, Homo sapien
tattgtttatgttttggtctgctca

SEQ ID NO: 1074824 - DNA, 25 bp, Homo sapien
taagattccagggtccataagaaga

SEQ ID NO: 1074825 - DNA, 25 bp, Homo sapien
taagagctccactgccttctaagat

SEQ ID NO: 1074826 - DNA, 25 bp, Homo sapien
gcaaattctccagtagtgtcacaag

SEQ ID NO: 1074827 - DNA, 25 bp, Homo sapien
gatgtccaggatttaccagctcatg

SEQ ID NO: 1074828 - DNA, 25 bp, Homo sapien
gaagattgaataccggctaccgtcc

SEQ ID NO: 1074829 - DNA, 25 bp, Homo sapien
tccaagcctgggatcagtcacagcg

SEQ ID NO: 1074830 - DNA, 25 bp, Homo sapien
tacgcgtgtgcggaagtaactgtcc

SEQ ID NO: 1074831 - DNA, 25 bp, Homo sapien
cccgcggcgctgatttgaagattga

SEQ ID NO: 1074832 - DNA, 25 bp, Homo sapien
cactggatcccttgacacggcttaa

SEQ ID NO: 1074833 - DNA, 25 bp, Homo sapien
tcagctactcgagttgaacaggacc

SEQ ID NO: 1074834 - DNA, 25 bp, Homo sapien
aaacctgaagtcactgcgcttggag

SEQ ID NO: 1074835 - DNA, 25 bp, Homo sapien
taaaattgtcgcaggctccagtcgg

SEQ ID NO: 1074836 - DNA, 25 bp, Homo sapien
atgaaccttgacaatatttgttatt

SEQ ID NO: 1074837 - DNA, 25 bp, Homo sapien
gagtaaatgctcaggatagctagag

SEQ ID NO: 1074838 - DNA, 25 bp, Homo sapien
gaagagtaaatgctcaggatagcta

SEQ ID NO: 1074839 - DNA, 25 bp, Homo sapien
agtaaatgctcaggatagctagaga

SEQ ID NO: 1074840 - DNA, 25 bp, Homo sapien
cttcaaactaaagtgtgtatcacta

SEQ ID NO: 1074841 - DNA, 25 bp, Homo sapien
atcttcaaactaaagtgtgtatcac

SEQ ID NO: 1074842 - DNA, 25 bp, Homo sapien
tcttcaaactaaagtgtgtatcact

SEQ ID NO: 1074843 - DNA, 25 bp, Homo sapien
tctctcagcacaatcaagcagctgc

SEQ ID NO: 1074844 - DNA, 25 bp, Homo sapien
cactgagatgaggtttctatagttc

SEQ ID NO: 1074845 - DNA, 25 bp, Homo sapien
ccactgagatgaggtttctatagtt

SEQ ID NO: 1074846 - DNA, 25 bp, Homo sapien
tcacatcccaatacagggttctctc

SEQ ID NO: 1074847 - DNA, 25 bp, Homo sapien
acaattggcaaacgttcccaagtct

SEQ ID NO: 1074848 - DNA, 25 bp, Homo sapien
tacactgaaaagttaccactcattg

SEQ ID NO: 1074849 - DNA, 25 bp, Homo sapien
gcatgagcgaccacaattggcaaac

SEQ ID NO: 1074850 - DNA, 25 bp, Homo sapien
gaaaagttaccactcattgtcctta

SEQ ID NO: 1074851 - DNA, 25 bp, Homo sapien
taaaggataacaagcagcctttaaa

SEQ ID NO: 1074852 - DNA, 25 bp, Homo sapien
ttgggttacctccttgagtctcagg

SEQ ID NO: 1074853 - DNA, 25 bp, Homo sapien
gtgctaggcaaacaaccagctcaca

SEQ ID NO: 1074854 - DNA, 25 bp, Homo sapien
aagtggggccaaagtgctaggcaaa

SEQ ID NO: 1074855 - DNA, 25 bp, Homo sapien
ctggagagctctcgtgtggattcgc

SEQ ID NO: 1074856 - DNA, 25 bp, Homo sapien
gagagctctcgtgtggattcgctcc

SEQ ID NO: 1074857 - DNA, 25 bp, Homo sapien
tgtccttgctctaccttgaggatca

SEQ ID NO: 1074858 - DNA, 25 bp, Homo sapien
gtccttgctctaccttgaggatcac

SEQ ID NO: 1074859 - DNA, 25 bp, Homo sapien
tgctcatgttcgttgtccaccttca

SEQ ID NO: 1074860 - DNA, 25 bp, Homo sapien
caacaaataccttctactccatgga

SEQ ID NO: 1074861 - DNA, 25 bp, Homo sapien
gaaccactgttccatgacctcaaaa

SEQ ID NO: 1074862 - DNA, 25 bp, Homo sapien
tagatactctttagggaggaaccac

SEQ ID NO: 1074863 - DNA, 25 bp, Homo sapien
tcatcaacaagtgggtagtcagatt

SEQ ID NO: 1074864 - DNA, 25 bp, Homo sapien
ttattgaatgtgagcaaaactgact

SEQ ID NO: 1074865 - DNA, 25 bp, Homo sapien
aaaaattgtctttgctttcccgatg

SEQ ID NO: 1074866 - DNA, 25 bp, Homo sapien
gatgcttccctggttcatcaacaag

SEQ ID NO: 1074867 - DNA, 25 bp, Homo sapien
cttgtgctcatattataatggtgga

SEQ ID NO: 1074868 - DNA, 25 bp, Homo sapien
ctaaattaggtggcaaacacttctc

SEQ ID NO: 1074869 - DNA, 25 bp, Homo sapien
acttgtgctcatattataatggtgg

SEQ ID NO: 1074870 - DNA, 25 bp, Homo sapien
cacttctcaaacgatttatatgatt

SEQ ID NO: 1074871 - DNA, 25 bp, Homo sapien
actgcattcataagcgttttctaca

SEQ ID NO: 1074872 - DNA, 25 bp, Homo sapien
tcataagcgttttctacagtataac

SEQ ID NO: 1074873 - DNA, 25 bp, Homo sapien
gcattcataagcgttttctacagta

SEQ ID NO: 1074874 - DNA, 25 bp, Homo sapien
taagcgttttctacagtataacttc

SEQ ID NO: 1074875 - DNA, 25 bp, Homo sapien
taacaagcacggatgtgttgccaaa

SEQ ID NO: 1074876 - DNA, 25 bp, Homo sapien
tctggtggaccacgagttgggcttt

SEQ ID NO: 1074877 - DNA, 25 bp, Homo sapien
taaagggatgaactatacctgaagg

SEQ ID NO: 1074878 - DNA, 25 bp, Homo sapien
gatgagttgcaaggtgtgccttcct

SEQ ID NO: 1074879 - DNA, 25 bp, Homo sapien
acttccagaacatgattggcattgg

SEQ ID NO: 1074880 - DNA, 25 bp, Homo sapien
aaaagtcaggaatggcaaatgtagt

SEQ ID NO: 1074881 - DNA, 25 bp, Homo sapien
taataaggccttctcatattcataa

SEQ ID NO: 1074882 - DNA, 25 bp, Homo sapien
taaattgtagacttctcaccatgaa

SEQ ID NO: 1074883 - DNA, 25 bp, Homo sapien
taattatgtatgttgagactggaag

SEQ ID NO: 1074884 - DNA, 25 bp, Homo sapien
tgtcatgcccattaaaagtgccagc

SEQ ID NO: 1074885 - DNA, 25 bp, Homo sapien
cctcaactgaatacttactgtaata

SEQ ID NO: 1074886 - DNA, 25 bp, Homo sapien
cagattcagaaacactgtcatgccc

SEQ ID NO: 1074887 - DNA, 25 bp, Homo sapien
taatgatgcctatgctgttcatacg

SEQ ID NO: 1074888 - DNA, 25 bp, Homo sapien
gatgcctatgctgttcatacggaaa

SEQ ID NO: 1074889 - DNA, 25 bp, Homo sapien
tatgctgttcatacggaaaattcca

SEQ ID NO: 1074890 - DNA, 25 bp, Homo sapien
cattaatgatgcctatgctgttcat

SEQ ID NO: 1074891 - DNA, 25 bp, Homo sapien
atagatgataattgtcattcccatt

SEQ ID NO: 1074892 - DNA, 25 bp, Homo sapien
tatagatgataattgtcattcccat

SEQ ID NO: 1074893 - DNA, 25 bp, Homo sapien
ctatagatgataattgtcattccca

SEQ ID NO: 1074894 - DNA, 25 bp, Homo sapien
caggttcctaaaacaccaatgaaca

SEQ ID NO: 1074895 - DNA, 25 bp, Homo sapien
aggttcctaaaacaccaatgaacag

SEQ ID NO: 1074896 - DNA, 25 bp, Homo sapien
ctctgtaaaggccctttgtgcatag

SEQ ID NO: 1074897 - DNA, 25 bp, Homo sapien
gcatagtctagttgcccccattcct

SEQ ID NO: 1074898 - DNA, 25 bp, Homo sapien
ttctccaaagagtagttgtcctcac

SEQ ID NO: 1074899 - DNA, 25 bp, Homo sapien
atttgaatctcaagccctagctttg

SEQ ID NO: 1074900 - DNA, 25 bp, Homo sapien
tctcaagccctagctttgttaaaca

SEQ ID NO: 1074901 - DNA, 25 bp, Homo sapien
gaatctcaagccctagctttgttaa

SEQ ID NO: 1074902 - DNA, 25 bp, Homo sapien
ttttgctatttgccaagcaatagta

SEQ ID NO: 1074903 - DNA, 25 bp, Homo sapien
cttttgctatttgccaagcaatagt

SEQ ID NO: 1074904 - DNA, 25 bp, Homo sapien
ggttgctctcccatacggttcctga

SEQ ID NO: 1074905 - DNA, 25 bp, Homo sapien
ctggtgaagctctcactacgttcat

SEQ ID NO: 1074906 - DNA, 25 bp, Homo sapien
cactacgttcatcacacaggtaggg

SEQ ID NO: 1074907 - DNA, 25 bp, Homo sapien
cacacaggtagggttgctctcccat

SEQ ID NO: 1074908 - DNA, 25 bp, Homo sapien
gaaaaattctcaccgctcttagaaa

SEQ ID NO: 1074909 - DNA, 25 bp, Homo sapien
aatgataatgatgtgctttctctcc

SEQ ID NO: 1074910 - DNA, 25 bp, Homo sapien
tatgcacttgctcatcagtgccaag

SEQ ID NO: 1074911 - DNA, 25 bp, Homo sapien
gagaagcccgtactgaactcatcac

SEQ ID NO: 1074912 - DNA, 25 bp, Homo sapien
ggaatcaaaattctggatggtgaag

SEQ ID NO: 1074913 - DNA, 25 bp, Homo sapien
ggatgaaggaacttggaatcaaaat

SEQ ID NO: 1074914 - DNA, 25 bp, Homo sapien
ttgcgtccactgagagtctttgaaa

SEQ ID NO: 1074915 - DNA, 25 bp, Homo sapien
aaataaaccagggtacttcttcatg

SEQ ID NO: 1074916 - DNA, 25 bp, Homo sapien
ccatgcctctccagctttatgtttt

SEQ ID NO: 1074917 - DNA, 25 bp, Homo sapien
cagctttatgttttatttgccacaa

SEQ ID NO: 1074918 - DNA, 25 bp, Homo sapien
caagcgattcgcctgatttggcctc

SEQ ID NO: 1074919 - DNA, 25 bp, Homo sapien
aaattctggaatcgcaggcgtgagc

SEQ ID NO: 1074920 - DNA, 25 bp, Homo sapien
catcgggactaaactgggaattcat

SEQ ID NO: 1074921 - DNA, 25 bp, Homo sapien
tgcagcattatctcagacccatcgg

SEQ ID NO: 1074922 - DNA, 25 bp, Homo sapien
aacacctgaatgtgggagttgcagc

SEQ ID NO: 1074923 - DNA, 25 bp, Homo sapien
tggccaacacctgaatgtgggagtt

SEQ ID NO: 1074924 - DNA, 25 bp, Homo sapien
ggcttgggcttcttttggaggatcc

SEQ ID NO: 1074925 - DNA, 25 bp, Homo sapien
cttgggcttcttttggaggatcctg

SEQ ID NO: 1074926 - DNA, 25 bp, Homo sapien
cctggcttgggcttcttttggagga

SEQ ID NO: 1074927 - DNA, 25 bp, Homo sapien
tttggaggatcctgccatgatttcc

SEQ ID NO: 1074928 - DNA, 25 bp, Homo sapien
ccacgaaaatcttcatcctccaaga

SEQ ID NO: 1074929 - DNA, 25 bp, Homo sapien
ccaggaacaggcagaagagtttttc

SEQ ID NO: 1074930 - DNA, 25 bp, Homo sapien
caggcagaagagtttttccccacga

SEQ ID NO: 1074931 - DNA, 25 bp, Homo sapien
atcctccaagatgtaactcttttca

SEQ ID NO: 1074932 - DNA, 25 bp, Homo sapien
cgatgggtgactttgactcaaggac

SEQ ID NO: 1074933 - DNA, 25 bp, Homo sapien
tgagttctgaaatccatcctgagct

SEQ ID NO: 1074934 - DNA, 25 bp, Homo sapien
gcgtcactgtgcgatggctctctca

SEQ ID NO: 1074935 - DNA, 25 bp, Homo sapien
taagtgatactcttccgatgggtga

SEQ ID NO: 1074936 - DNA, 25 bp, Homo sapien
ttatcacgcagttggaaaccacagc

SEQ ID NO: 1074937 - DNA, 25 bp, Homo sapien
taagcatgccgttcaagtagacagc

SEQ ID NO: 1074938 - DNA, 25 bp, Homo sapien
gatgaaggtcgacatggcgttccag

SEQ ID NO: 1074939 - DNA, 25 bp, Homo sapien
cattaggtaacaagcgcagagagga

SEQ ID NO: 1074940 - DNA, 25 bp, Homo sapien
tgtgctccttgaggtctcgcgagaa

SEQ ID NO: 1074941 - DNA, 25 bp, Homo sapien
tcgagatctgagttttgaccccgcc

SEQ ID NO: 1074942 - DNA, 25 bp, Homo sapien
tcccagtatcgtgcggtgcgcagaa

SEQ ID NO: 1074943 - DNA, 25 bp, Homo sapien
ctcctacggagtcgggcaatgcaga

SEQ ID NO: 1074944 - DNA, 25 bp, Homo sapien
tccctatcaccctcgcacagaaact

SEQ ID NO: 1074945 - DNA, 25 bp, Homo sapien
tcgcacagaaactcccgcacactca

SEQ ID NO: 1074946 - DNA, 25 bp, Homo sapien
gccgccgcttccctatcaccctcgc

SEQ ID NO: 1074947 - DNA, 25 bp, Homo sapien
cagaaactcccgcacactcacacac

SEQ ID NO: 1074948 - DNA, 25 bp, Homo sapien
ggcgacagcagcgggccaggcaaga

SEQ ID NO: 1074949 - DNA, 25 bp, Homo sapien
agcagcgggccaggcaagagcacaa

SEQ ID NO: 1074950 - DNA, 25 bp, Homo sapien
cgacagcagcgggccaggcaagagc

SEQ ID NO: 1074951 - DNA, 25 bp, Homo sapien
agcgggccaggcaagagcacaacat

SEQ ID NO: 1074952 - DNA, 25 bp, Homo sapien
ttccgccaatgggagaaagcccgcg

SEQ ID NO: 1074953 - DNA, 25 bp, Homo sapien
gtcgccttccgccaatgggagaaag

SEQ ID NO: 1074954 - DNA, 25 bp, Homo sapien
cgccaccgaccaatcacgagcgagc

SEQ ID NO: 1074955 - DNA, 25 bp, Homo sapien
gagctggcgcgtccaataaggtgcc

SEQ ID NO: 1074956 - DNA, 25 bp, Homo sapien
ccgccctagcccaagacgcgcgcat

SEQ ID NO: 1074957 - DNA, 25 bp, Homo sapien
gcctgcgccgcagggggtcattgcc

SEQ ID NO: 1074958 - DNA, 25 bp, Homo sapien
gggtcattgccccagccgccctagc

SEQ ID NO: 1074959 - DNA, 25 bp, Homo sapien
ctctcttcccccttaaagcctctag

SEQ ID NO: 1074960 - DNA, 25 bp, Homo sapien
gactatctgcaatattctgaagctt

SEQ ID NO: 1074961 - DNA, 25 bp, Homo sapien
aaagactatctgcaatattctgaag

SEQ ID NO: 1074962 - DNA, 25 bp, Homo sapien
tacagaaagactatctgcaatattc

SEQ ID NO: 1074963 - DNA, 25 bp, Homo sapien
cagaaagactatctgcaatattctg

SEQ ID NO: 1074964 - DNA, 25 bp, Homo sapien
caaaaagacacccagcatagcctgg

SEQ ID NO: 1074965 - DNA, 25 bp, Homo sapien
tcaaaaagacacccagcatagcctg

SEQ ID NO: 1074966 - DNA, 25 bp, Homo sapien
ctcaaaaagacacccagcatagcct

SEQ ID NO: 1074967 - DNA, 25 bp, Homo sapien
cattgggtacagtgtggagaataag

SEQ ID NO: 1074968 - DNA, 25 bp, Homo sapien
caattgttttgctaggtagacgagc

SEQ ID NO: 1074969 - DNA, 25 bp, Homo sapien
gatttctgaacacctactagtgcca

SEQ ID NO: 1074970 - DNA, 25 bp, Homo sapien
tgtgcagagattcagcagggacccg

SEQ ID NO: 1074971 - DNA, 25 bp, Homo sapien
cagggacccgaaataggagcaaggt

SEQ ID NO: 1074972 - DNA, 25 bp, Homo sapien
aatgtccactccactgaaaacccga

SEQ ID NO: 1074973 - DNA, 25 bp, Homo sapien
ttatttatacctccaccgactggga

SEQ ID NO: 1074974 - DNA, 25 bp, Homo sapien
gaatttaagtcactcctatccctac

SEQ ID NO: 1074975 - DNA, 25 bp, Homo sapien
gaaacatgagtctggaatgtccact

SEQ ID NO: 1074976 - DNA, 25 bp, Homo sapien
cagtgcaaatcgtattttcacacaa

SEQ ID NO: 1074977 - DNA, 25 bp, Homo sapien
ctgcagcagtgcaaatcgtattttc

SEQ ID NO: 1074978 - DNA, 25 bp, Homo sapien
caccattagaacctgcagcagtgca

SEQ ID NO: 1074979 - DNA, 25 bp, Homo sapien
cctgcagcagtgcaaatcgtatttt

SEQ ID NO: 1074980 - DNA, 25 bp, Homo sapien
tggctgacggctccacactgagtct

SEQ ID NO: 1074981 - DNA, 25 bp, Homo sapien
aactggctggttactgattagcaac

SEQ ID NO: 1074982 - DNA, 25 bp, Homo sapien
gagtctgctgcagaaatgttccaat

SEQ ID NO: 1074983 - DNA, 25 bp, Homo sapien
taactttcctattcacaaactgcag

SEQ ID NO: 1074984 - DNA, 25 bp, Homo sapien
gattttattctgagaggttcctaaa

SEQ ID NO: 1074985 - DNA, 25 bp, Homo sapien
attttattctgagaggttcctaaat

SEQ ID NO: 1074986 - DNA, 25 bp, Homo sapien
agattttattctgagaggttcctaa

SEQ ID NO: 1074987 - DNA, 25 bp, Homo sapien
actccagcctggcacaccagccttg

SEQ ID NO: 1074988 - DNA, 25 bp, Homo sapien
agcctggcacaccagccttggcaac

SEQ ID NO: 1074989 - DNA, 25 bp, Homo sapien
cagcctggcacaccagccttggcaa

SEQ ID NO: 1074990 - DNA, 25 bp, Homo sapien
tccagcctggcacaccagccttggc

SEQ ID NO: 1074991 - DNA, 25 bp, Homo sapien
gatgggaaacagtaaagtcagcaca

SEQ ID NO: 1074992 - DNA, 25 bp, Homo sapien
ttgggtgtctataaacaatgattcc

SEQ ID NO: 1074993 - DNA, 25 bp, Homo sapien
tacataacttacatcgttcaagccc

SEQ ID NO: 1074994 - DNA, 25 bp, Homo sapien
tacacacataataccactttgctga

SEQ ID NO: 1074995 - DNA, 25 bp, Homo sapien
tgaccacgttataaagaggtgggcc

SEQ ID NO: 1074996 - DNA, 25 bp, Homo sapien
atggaggtagcagaacacattaaaa

SEQ ID NO: 1074997 - DNA, 25 bp, Homo sapien
ggagagacaagaagataagagtgat

SEQ ID NO: 1074998 - DNA, 25 bp, Homo sapien
tacaaatagaatctgaccacgttat

SEQ ID NO: 1074999 - DNA, 25 bp, Homo sapien
tgctagactgtaatctaatttagaa

SEQ ID NO: 1075000 - DNA, 25 bp, Homo sapien
ccttcgattgcccattttcactgca

SEQ ID NO: 1075001 - DNA, 25 bp, Homo sapien
ttttggtcaattattgaacagcggg

SEQ ID NO: 1075002 - DNA, 25 bp, Homo sapien
acagcggggtctagctttgggatcc

SEQ ID NO: 1075003 - DNA, 25 bp, Homo sapien
tctttgaactaaggaacacaaggtc

SEQ ID NO: 1075004 - DNA, 25 bp, Homo sapien
ctatggaaacagaccaaaacggtag

SEQ ID NO: 1075005 - DNA, 25 bp, Homo sapien
tattttcaattgagcaggtcttccc

SEQ ID NO: 1075006 - DNA, 25 bp, Homo sapien
ggataaccaagtgaattagcactgc

SEQ ID NO: 1075007 - DNA, 25 bp, Homo sapien
cgcacctgtagctcccgctactcag

SEQ ID NO: 1075008 - DNA, 25 bp, Homo sapien
gatcacttgagccgaggagctggga

SEQ ID NO: 1075009 - DNA, 25 bp, Homo sapien
tcacttgagccgaggagctgggaga

SEQ ID NO: 1075010 - DNA, 25 bp, Homo sapien
acttgagccgaggagctgggagact

SEQ ID NO: 1075011 - DNA, 25 bp, Homo sapien
agtttctggcagtatcctgtgtttg

SEQ ID NO: 1075012 - DNA, 25 bp, Homo sapien
ctgagattcacaaacagcctcttgc

SEQ ID NO: 1075013 - DNA, 25 bp, Homo sapien
agattcacaaacagcctcttgccca

SEQ ID NO: 1075014 - DNA, 25 bp, Homo sapien
cccagtttctggcagtatcctgtgt

SEQ ID NO: 1075015 - DNA, 25 bp, Homo sapien
cagcctgagcaggaacagcagagca

SEQ ID NO: 1075016 - DNA, 25 bp, Homo sapien
ctccagcctgagcaggaacagcaga

SEQ ID NO: 1075017 - DNA, 25 bp, Homo sapien
gcctgagcaggaacagcagagcaag

SEQ ID NO: 1075018 - DNA, 25 bp, Homo sapien
cctgagcaggaacagcagagcaaga

SEQ ID NO: 1075019 - DNA, 25 bp, Homo sapien
ttcttcactcacttttgtgacttgc

SEQ ID NO: 1075020 - DNA, 25 bp, Homo sapien
cttcttcactcacttttgtgacttg

SEQ ID NO: 1075021 - DNA, 25 bp, Homo sapien
cttcactcacttttgtgacttgcat

SEQ ID NO: 1075022 - DNA, 25 bp, Homo sapien
tcttcactcacttttgtgacttgca

SEQ ID NO: 1075023 - DNA, 25 bp, Homo sapien
aaaagtaagaggaggctgggtgttg

SEQ ID NO: 1075024 - DNA, 25 bp, Homo sapien
tctgggttcatcttctaggataata

SEQ ID NO: 1075025 - DNA, 25 bp, Homo sapien
gttcatcttctaggataataaggga

SEQ ID NO: 1075026 - DNA, 25 bp, Homo sapien
tacaagcccatggaaaatattctgg

SEQ ID NO: 1075027 - DNA, 25 bp, Homo sapien
gatccattctttgcatggagcttta

SEQ ID NO: 1075028 - DNA, 25 bp, Homo sapien
ttcctaaagcagatccattctttgc

SEQ ID NO: 1075029 - DNA, 25 bp, Homo sapien
ttttcctaaagcagatccattcttt

SEQ ID NO: 1075030 - DNA, 25 bp, Homo sapien
tttcctaaagcagatccattctttg

SEQ ID NO: 1075031 - DNA, 25 bp, Homo sapien
ttcaaccagcttacatttgagggcc

SEQ ID NO: 1075032 - DNA, 25 bp, Homo sapien
ggacacaagttcttctcaccaggaa

SEQ ID NO: 1075033 - DNA, 25 bp, Homo sapien
gattctaccttaagtgttcaaccag

SEQ ID NO: 1075034 - DNA, 25 bp, Homo sapien
tgggaaactggcttactggtaagac

SEQ ID NO: 1075035 - DNA, 25 bp, Homo sapien
tgcacaattgccaggacgatatctc

SEQ ID NO: 1075036 - DNA, 25 bp, Homo sapien
gcaaactgctaaggtcaaaggagaa

SEQ ID NO: 1075037 - DNA, 25 bp, Homo sapien
tattgcatgggtccctggacaggcc

SEQ ID NO: 1075038 - DNA, 25 bp, Homo sapien
acttgctaatggatgggtaggttta

SEQ ID NO: 1075039 - DNA, 25 bp, Homo sapien
aataaccaagtaagacccctgcatt

SEQ ID NO: 1075040 - DNA, 25 bp, Homo sapien
tacacatggcctatatgctactctc

SEQ ID NO: 1075041 - DNA, 25 bp, Homo sapien
gagccaatttcttgtggtggaggcc

SEQ ID NO: 1075042 - DNA, 25 bp, Homo sapien
ggtggaggcctataaacagctgaac

SEQ ID NO: 1075043 - DNA, 25 bp, Homo sapien
tgggcagaacactctatcacagcag

SEQ ID NO: 1075044 - DNA, 25 bp, Homo sapien
catgtggatacatactgggcagaac

SEQ ID NO: 1075045 - DNA, 25 bp, Homo sapien
ttaacgtgccagtgacgggatgctg

SEQ ID NO: 1075046 - DNA, 25 bp, Homo sapien
gacttgttactttccaggctccatg

SEQ ID NO: 1075047 - DNA, 25 bp, Homo sapien
tcttttgttttagacactgtgatcc

SEQ ID NO: 1075048 - DNA, 25 bp, Homo sapien
tcagacaaatctgtctcaaaggaca

SEQ ID NO: 1075049 - DNA, 25 bp, Homo sapien
gatgattattccttctaatctcaga

SEQ ID NO: 1075050 - DNA, 25 bp, Homo sapien
gagagagcacgctaagtttcttctt

SEQ ID NO: 1075051 - DNA, 25 bp, Homo sapien
atgacccgaggccagaacgactgta

SEQ ID NO: 1075052 - DNA, 25 bp, Homo sapien
ccgaggccagaacgactgtaggctt

SEQ ID NO: 1075053 - DNA, 25 bp, Homo sapien
acccgaggccagaacgactgtaggc

SEQ ID NO: 1075054 - DNA, 25 bp, Homo sapien
ggccagaacgactgtaggctttgct

SEQ ID NO: 1075055 - DNA, 25 bp, Homo sapien
tctacatcaggaaggaatccagtgt

SEQ ID NO: 1075056 - DNA, 25 bp, Homo sapien
ccaggatgctagtatttccagggca

SEQ ID NO: 1075057 - DNA, 25 bp, Homo sapien
gacccagaggtatatccaaaacatg

SEQ ID NO: 1075058 - DNA, 25 bp, Homo sapien
tcagaatatatgttccatgagcgca

SEQ ID NO: 1075059 - DNA, 25 bp, Homo sapien
catagcatggcagaggtctaggagt

SEQ ID NO: 1075060 - DNA, 25 bp, Homo sapien
taaaatgtttggtcatgttacacag

SEQ ID NO: 1075061 - DNA, 25 bp, Homo sapien
attaccctgactttactggattgca

SEQ ID NO: 1075062 - DNA, 25 bp, Homo sapien
gccatcacgtgttgcactcctgaga

SEQ ID NO: 1075063 - DNA, 25 bp, Homo sapien
tccataaagacaaagttagctttct

SEQ ID NO: 1075064 - DNA, 25 bp, Homo sapien
gggcaaaactcaacacgaagaagtc

SEQ ID NO: 1075065 - DNA, 25 bp, Homo sapien
cacgaagaagtctgttatttgctgt

SEQ ID NO: 1075066 - DNA, 25 bp, Homo sapien
gacaaagttagctttctctttccta

SEQ ID NO: 1075067 - DNA, 25 bp, Homo sapien
catagagggacattatgagcgcctt

SEQ ID NO: 1075068 - DNA, 25 bp, Homo sapien
agtgaccaaactaacagcaacgccg

SEQ ID NO: 1075069 - DNA, 25 bp, Homo sapien
acaactgatagtggccatttctgac

SEQ ID NO: 1075070 - DNA, 25 bp, Homo sapien
tcacagtagcaatggccttgtctcc

SEQ ID NO: 1075071 - DNA, 25 bp, Homo sapien
tgggagttcctgcactcggaagtct

SEQ ID NO: 1075072 - DNA, 25 bp, Homo sapien
gtgggagttcctgcactcggaagtc

SEQ ID NO: 1075073 - DNA, 25 bp, Homo sapien
gggagttcctgcactcggaagtctt

SEQ ID NO: 1075074 - DNA, 25 bp, Homo sapien
ggagttcctgcactcggaagtcttt

SEQ ID NO: 1075075 - DNA, 25 bp, Homo sapien
gcaaagagtacaggcgcttctgcac

SEQ ID NO: 1075076 - DNA, 25 bp, Homo sapien
gagtccggcgcttgttatcttctgt

SEQ ID NO: 1075077 - DNA, 25 bp, Homo sapien
gtccggcgcttgttatcttctgtgt

SEQ ID NO: 1075078 - DNA, 25 bp, Homo sapien
tagagtccggcgcttgttatcttct

SEQ ID NO: 1075079 - DNA, 25 bp, Homo sapien
ctgtagagtccggcgcttgttatct

SEQ ID NO: 1075080 - DNA, 25 bp, Homo sapien
ctttggaggtttcagttcatctctt

SEQ ID NO: 1075081 - DNA, 25 bp, Homo sapien
catccgactgaaagctcctctgaac

SEQ ID NO: 1075082 - DNA, 25 bp, Homo sapien
tccgactgaaagctcctctgaacac

SEQ ID NO: 1075083 - DNA, 25 bp, Homo sapien
gaaagctcctctgaacaccttacag

SEQ ID NO: 1075084 - DNA, 25 bp, Homo sapien
gactgaaagctcctctgaacacctt

SEQ ID NO: 1075085 - DNA, 25 bp, Homo sapien
ggcagaaggagtaaacaaccctctc

SEQ ID NO: 1075086 - DNA, 25 bp, Homo sapien
atgtttacacacactacagcatggt

SEQ ID NO: 1075087 - DNA, 25 bp, Homo sapien
gcagaaggagtaaacaaccctctcc

SEQ ID NO: 1075088 - DNA, 25 bp, Homo sapien
acttggacagcggtgggttgctgag

SEQ ID NO: 1075089 - DNA, 25 bp, Homo sapien
tgctgagccagcgtgaaatagtact

SEQ ID NO: 1075090 - DNA, 25 bp, Homo sapien
cctgctgaggctgtgcgatgatgat

SEQ ID NO: 1075091 - DNA, 25 bp, Homo sapien
aatagtactggactggctcggcagg

SEQ ID NO: 1075092 - DNA, 25 bp, Homo sapien
actgtcttgctggatgggcatcctc

SEQ ID NO: 1075093 - DNA, 25 bp, Homo sapien
catccaaaaacctaaggggcactgt

SEQ ID NO: 1075094 - DNA, 25 bp, Homo sapien
aaacctaaggggcactgtcttgctg

SEQ ID NO: 1075095 - DNA, 25 bp, Homo sapien
taaatccagtgctctataatgatct

SEQ ID NO: 1075096 - DNA, 25 bp, Homo sapien
ctggggccataagagcatgccacca

SEQ ID NO: 1075097 - DNA, 25 bp, Homo sapien
ttactataaactggaggagggccaa

SEQ ID NO: 1075098 - DNA, 25 bp, Homo sapien
gagattcaagggattactacggaga

SEQ ID NO: 1075099 - DNA, 25 bp, Homo sapien
taattctgactgcataggttactga

SEQ ID NO: 1075100 - DNA, 25 bp, Homo sapien
tgcatccaaagttacaagggaaggg

SEQ ID NO: 1075101 - DNA, 25 bp, Homo sapien
cagtgccactctgggcctgttgggc

SEQ ID NO: 1075102 - DNA, 25 bp, Homo sapien
gcctgttgggcttgaccctgtggct

SEQ ID NO: 1075103 - DNA, 25 bp, Homo sapien
caacctgcattgtcacaggtgtggt

SEQ ID NO: 1075104 - DNA, 25 bp, Homo sapien
tgagcctggacaatctgcacctgct

SEQ ID NO: 1075105 - DNA, 25 bp, Homo sapien
tgatctgctgcatcacctgcatggt

SEQ ID NO: 1075106 - DNA, 25 bp, Homo sapien
ctcctgtgttagtgatgatctgctg

SEQ ID NO: 1075107 - DNA, 25 bp, Homo sapien
tgctgcatcacctgcatggtctgtc

SEQ ID NO: 1075108 - DNA, 25 bp, Homo sapien
ctggatctctcctgtgttagtgatg

SEQ ID NO: 1075109 - DNA, 25 bp, Homo sapien
cttcatcagtctgagtgacacagca

SEQ ID NO: 1075110 - DNA, 25 bp, Homo sapien
tcaagccactgcacttcatcagtct

SEQ ID NO: 1075111 - DNA, 25 bp, Homo sapien
gccactgcacttcatcagtctgagt

SEQ ID NO: 1075112 - DNA, 25 bp, Homo sapien
tgcacttcatcagtctgagtgacac

SEQ ID NO: 1075113 - DNA, 25 bp, Homo sapien
tctgtaaagagatccagcatctgcc

SEQ ID NO: 1075114 - DNA, 25 bp, Homo sapien
aacagccatcattccgcatcatagc

SEQ ID NO: 1075115 - DNA, 25 bp, Homo sapien
ttaagtgtgggcctctttcgctccc

SEQ ID NO: 1075116 - DNA, 25 bp, Homo sapien
aaagcaaacagccatcattccgcat

SEQ ID NO: 1075117 - DNA, 25 bp, Homo sapien
cattgagtataatctcaaacaggca

SEQ ID NO: 1075118 - DNA, 25 bp, Homo sapien
gagatgttgattgccccctacccct

SEQ ID NO: 1075119 - DNA, 25 bp, Homo sapien
agacattgagtataatctcaaacag

SEQ ID NO: 1075120 - DNA, 25 bp, Homo sapien
accagagatgttgattgccccctac

SEQ ID NO: 1075121 - DNA, 25 bp, Homo sapien
gatctgtccctgcacaacttgagtg

SEQ ID NO: 1075122 - DNA, 25 bp, Homo sapien
tctgtccctgcacaacttgagtgcc

SEQ ID NO: 1075123 - DNA, 25 bp, Homo sapien
atctgtccctgcacaacttgagtgc

SEQ ID NO: 1075124 - DNA, 25 bp, Homo sapien
caattaccacccatgcctcttgggt

SEQ ID NO: 1075125 - DNA, 25 bp, Homo sapien
ccaacacaggccttgtgtctctggg

SEQ ID NO: 1075126 - DNA, 25 bp, Homo sapien
tgctgagcgctcctttcctgtcaga

SEQ ID NO: 1075127 - DNA, 25 bp, Homo sapien
gaatctaatgttccaattaccaccc

SEQ ID NO: 1075128 - DNA, 25 bp, Homo sapien
aggtttctttcaggcaccttcgagg

SEQ ID NO: 1075129 - DNA, 25 bp, Homo sapien
tctttcaggcaccttcgaggcttcc

SEQ ID NO: 1075130 - DNA, 25 bp, Homo sapien
gtttctttcaggcaccttcgaggct

SEQ ID NO: 1075131 - DNA, 25 bp, Homo sapien
ttctttcaggcaccttcgaggcttc

SEQ ID NO: 1075132 - DNA, 25 bp, Homo sapien
tatcagctacggaaaagccgcgtcc

SEQ ID NO: 1075133 - DNA, 25 bp, Homo sapien
ggcgatctgtcgaacatttcccagg

SEQ ID NO: 1075134 - DNA, 25 bp, Homo sapien
gacgggtccagctcttaaacgatcg

SEQ ID NO: 1075135 - DNA, 25 bp, Homo sapien
catcaatattgtagggcacgagagg

SEQ ID NO: 1075136 - DNA, 25 bp, Homo sapien
aacaagtgagcctgagacaaatgga

SEQ ID NO: 1075137 - DNA, 25 bp, Homo sapien
gaagactgcggtgtgcatgcacatg

SEQ ID NO: 1075138 - DNA, 25 bp, Homo sapien
aacagcctataagatgcctgagggc

SEQ ID NO: 1075139 - DNA, 25 bp, Homo sapien
tcggtaaactagaaagaagactgcg

SEQ ID NO: 1075140 - DNA, 25 bp, Homo sapien
ctttttccgagagaggcactgtgca

SEQ ID NO: 1075141 - DNA, 25 bp, Homo sapien
tggtcccagcagtcctcatggcaaa

SEQ ID NO: 1075142 - DNA, 25 bp, Homo sapien
aaacccgtatcacccagatcatctg

SEQ ID NO: 1075143 - DNA, 25 bp, Homo sapien
atgaaacaccctggcgagcaagtgg

SEQ ID NO: 1075144 - DNA, 25 bp, Homo sapien
tacgtcaagagttggcagcacaaag

SEQ ID NO: 1075145 - DNA, 25 bp, Homo sapien
tcaaacagaacacatggaccctagg

SEQ ID NO: 1075146 - DNA, 25 bp, Homo sapien
caaagtgacatcgagaatcctggag

SEQ ID NO: 1075147 - DNA, 25 bp, Homo sapien
cagacaaagtggtaagtggcctctt

SEQ ID NO: 1075148 - DNA, 25 bp, Homo sapien
tctgtgaactggctgaactgctgct

SEQ ID NO: 1075149 - DNA, 25 bp, Homo sapien
aactggctgaactgctgctgtcctt

SEQ ID NO: 1075150 - DNA, 25 bp, Homo sapien
ctgtccatctgtgaactggctgaac

SEQ ID NO: 1075151 - DNA, 25 bp, Homo sapien
cttgctggacctctgtctgtgtaat

SEQ ID NO: 1075152 - DNA, 25 bp, Homo sapien
taaaactaaaggataggtgccctga

SEQ ID NO: 1075153 - DNA, 25 bp, Homo sapien
ggagccctggcatgtaagcctagca

SEQ ID NO: 1075154 - DNA, 25 bp, Homo sapien
catggaccctgctaaggaggtggcc

SEQ ID NO: 1075155 - DNA, 25 bp, Homo sapien
gaagattctctcctcgcatggactg

SEQ ID NO: 1075156 - DNA, 25 bp, Homo sapien
caaacacaagcaattcgaaccactg

SEQ ID NO: 1075157 - DNA, 25 bp, Homo sapien
cacaagcaattcgaaccactgtacc

SEQ ID NO: 1075158 - DNA, 25 bp, Homo sapien
tgtggcaaacacaagcaattcgaac

SEQ ID NO: 1075159 - DNA, 25 bp, Homo sapien
caagcaattcgaaccactgtaccag

SEQ ID NO: 1075160 - DNA, 25 bp, Homo sapien
gagactcgagcttgctgcacgctgt

SEQ ID NO: 1075161 - DNA, 25 bp, Homo sapien
tccctatgggtctcgagctggttgg

SEQ ID NO: 1075162 - DNA, 25 bp, Homo sapien
ccactgcaaggcgtcagaaggagga

SEQ ID NO: 1075163 - DNA, 25 bp, Homo sapien
tctcccgttagctcagagactcgag

SEQ ID NO: 1075164 - DNA, 25 bp, Homo sapien
gtcctggcccgcaggcatggtgact

SEQ ID NO: 1075165 - DNA, 25 bp, Homo sapien
gtagtgcaccagtgtcctagcctgc

SEQ ID NO: 1075166 - DNA, 25 bp, Homo sapien
tggggtgtagtgcaccagtgtccta

SEQ ID NO: 1075167 - DNA, 25 bp, Homo sapien
gaggaaggctgtgcccattgcctgg

SEQ ID NO: 1075168 - DNA, 25 bp, Homo sapien
ggtgtagtgcaccagtgtcctagcc

SEQ ID NO: 1075169 - DNA, 25 bp, Homo sapien
ggaccacgagtgaaaaagcagctac

SEQ ID NO: 1075170 - DNA, 25 bp, Homo sapien
gatttgctcctaaaaagaagtggca

SEQ ID NO: 1075171 - DNA, 25 bp, Homo sapien
ctgagggcagaacaacgtggcaagt

SEQ ID NO: 1075172 - DNA, 25 bp, Homo sapien
cagagtcaagaaataccgtacaccc

SEQ ID NO: 1075173 - DNA, 25 bp, Homo sapien
ggtccctgggagaaaagagtgtggc

SEQ ID NO: 1075174 - DNA, 25 bp, Homo sapien
tgtggcaatgaatccacccactctc

SEQ ID NO: 1075175 - DNA, 25 bp, Homo sapien
ttgcatttcatgcagcttgaagtcc

SEQ ID NO: 1075176 - DNA, 25 bp, Homo sapien
gtccatgcaaaggagactagcacag

SEQ ID NO: 1075177 - DNA, 25 bp, Homo sapien
tggaaggatttaccccaggctttga

SEQ ID NO: 1075178 - DNA, 25 bp, Homo sapien
ctggaaggatttaccccaggctttg

SEQ ID NO: 1075179 - DNA, 25 bp, Homo sapien
tttaccccaggctttgacggagcca

SEQ ID NO: 1075180 - DNA, 25 bp, Homo sapien
aggctttgacggagccagctttctc

SEQ ID NO: 1075181 - DNA, 25 bp, Homo sapien
gggttgttctctatggcagatgcca

SEQ ID NO: 1075182 - DNA, 25 bp, Homo sapien
tgcttcaattaacaggaagtaggtc

SEQ ID NO: 1075183 - DNA, 25 bp, Homo sapien
caatgaagtggaatgctctctctat

SEQ ID NO: 1075184 - DNA, 25 bp, Homo sapien
gcctttgttaatgggcatggccaca

SEQ ID NO: 1075185 - DNA, 25 bp, Homo sapien
gcaaggaagccagccagattgtctg

SEQ ID NO: 1075186 - DNA, 25 bp, Homo sapien
agctgcaaggaagccagccagattg

SEQ ID NO: 1075187 - DNA, 25 bp, Homo sapien
gagctgcaaggaagccagccagatt

SEQ ID NO: 1075188 - DNA, 25 bp, Homo sapien
ctgcaaggaagccagccagattgtc

SEQ ID NO: 1075189 - DNA, 25 bp, Homo sapien
acaggtgagggctgcatgctgcccc

SEQ ID NO: 1075190 - DNA, 25 bp, Homo sapien
ctcccagagacacaggtgagggctg

SEQ ID NO: 1075191 - DNA, 25 bp, Homo sapien
ctgcccccttgtggcctccgcagac

SEQ ID NO: 1075192 - DNA, 25 bp, Homo sapien
tgctgcccccttgtggcctccgcag

SEQ ID NO: 1075193 - DNA, 25 bp, Homo sapien
taactccatgttctcggtgagaacc

SEQ ID NO: 1075194 - DNA, 25 bp, Homo sapien
ctgtggtcctgctggttaactccat

SEQ ID NO: 1075195 - DNA, 25 bp, Homo sapien
gctggttaactccatgttctcggtg

SEQ ID NO: 1075196 - DNA, 25 bp, Homo sapien
gaaggcaacagtgctgtggtcctgc

SEQ ID NO: 1075197 - DNA, 25 bp, Homo sapien
catgagagaaagataaggccttctt

SEQ ID NO: 1075198 - DNA, 25 bp, Homo sapien
gagagaaagataaggccttcttcct

SEQ ID NO: 1075199 - DNA, 25 bp, Homo sapien
tgagagaaagataaggccttcttcc

SEQ ID NO: 1075200 - DNA, 25 bp, Homo sapien
gcatgagagaaagataaggccttct

SEQ ID NO: 1075201 - DNA, 25 bp, Homo sapien
cgtgccaagggatcaaacttccagg

SEQ ID NO: 1075202 - DNA, 25 bp, Homo sapien
tcgtgccaagggatcaaacttccag

SEQ ID NO: 1075203 - DNA, 25 bp, Homo sapien
gtgccaagggatcaaacttccaggt

SEQ ID NO: 1075204 - DNA, 25 bp, Homo sapien
gggggcgcgctcggggcgctcagag

SEQ ID NO: 1075205 - DNA, 25 bp, Homo sapien
cgcgctcggggcgctcagagacgca

SEQ ID NO: 1075206 - DNA, 25 bp, Homo sapien
ggcgcgctcggggcgctcagagacg

SEQ ID NO: 1075207 - DNA, 25 bp, Homo sapien
cgctcggggcgctcagagacgcatg

SEQ ID NO: 1075208 - DNA, 25 bp, Homo sapien
gttcgctctgcacggccgtgagcgc

SEQ ID NO: 1075209 - DNA, 25 bp, Homo sapien
gccctgttcgctctgcacggccgtg

SEQ ID NO: 1075210 - DNA, 25 bp, Homo sapien
tgcacggccgtgagcgccactagct

SEQ ID NO: 1075211 - DNA, 25 bp, Homo sapien
cctgttcgctctgcacggccgtgag

SEQ ID NO: 1075212 - DNA, 25 bp, Homo sapien
ggtagcgcttgtgcgcggccgagga

SEQ ID NO: 1075213 - DNA, 25 bp, Homo sapien
acgtggtagacgaaggcccagccgc

SEQ ID NO: 1075214 - DNA, 25 bp, Homo sapien
atgaagacgtggtagacgaaggccc

SEQ ID NO: 1075215 - DNA, 25 bp, Homo sapien
ctgcaggcggcggtagcgcttgtgc

SEQ ID NO: 1075216 - DNA, 25 bp, Homo sapien
ccagggtagaatcggggtgggagca

SEQ ID NO: 1075217 - DNA, 25 bp, Homo sapien
ttctcaaatgaaagggcgagagagg

SEQ ID NO: 1075218 - DNA, 25 bp, Homo sapien
gtgggagcaggaccttgaactgtat

SEQ ID NO: 1075219 - DNA, 25 bp, Homo sapien
gaaggaatgagtccccagggtagaa

SEQ ID NO: 1075220 - DNA, 25 bp, Homo sapien
ctcttggagccattataaggccact

SEQ ID NO: 1075221 - DNA, 25 bp, Homo sapien
caactaagatgcttggactgagcct

SEQ ID NO: 1075222 - DNA, 25 bp, Homo sapien
gtgtccctccattatctgggccaaa

SEQ ID NO: 1075223 - DNA, 25 bp, Homo sapien
tgctgacctgagtttagtccctgcc

SEQ ID NO: 1075224 - DNA, 25 bp, Homo sapien
ccagcccaggagttctgtagactca

SEQ ID NO: 1075225 - DNA, 25 bp, Homo sapien
gagcaccaagagctgacagggtcga

SEQ ID NO: 1075226 - DNA, 25 bp, Homo sapien
gggaaagagttagtccttgccactg

SEQ ID NO: 1075227 - DNA, 25 bp, Homo sapien
gcatctggttacagctgccctgaga

SEQ ID NO: 1075228 - DNA, 25 bp, Homo sapien
gtgatcccactactggtcaacacgg

SEQ ID NO: 1075229 - DNA, 25 bp, Homo sapien
aacttgatggtcctctgttcccagg

SEQ ID NO: 1075230 - DNA, 25 bp, Homo sapien
ggacacctgattggaatagctcacc

SEQ ID NO: 1075231 - DNA, 25 bp, Homo sapien
cctccctaggcaacttgatggtcct

SEQ ID NO: 1075232 - DNA, 25 bp, Homo sapien
cagccttcccagatgtccccagtct

SEQ ID NO: 1075233 - DNA, 25 bp, Homo sapien
tctgcaccgttgctggcacggtgca

SEQ ID NO: 1075234 - DNA, 25 bp, Homo sapien
gtctccccacctctgcaccgttgct

SEQ ID NO: 1075235 - DNA, 25 bp, Homo sapien
agccttcccagatgtccccagtctc

SEQ ID NO: 1075236 - DNA, 25 bp, Homo sapien
gaggagacactcgttggcaagttcc

SEQ ID NO: 1075237 - DNA, 25 bp, Homo sapien
cgttggcaagttcctggtgctcctg

SEQ ID NO: 1075238 - DNA, 25 bp, Homo sapien
caagatgaggagacactcgttggca

SEQ ID NO: 1075239 - DNA, 25 bp, Homo sapien
cactcgttggcaagttcctggtgct

SEQ ID NO: 1075240 - DNA, 25 bp, Homo sapien
ctgccatcctcggtagcggcagcag

SEQ ID NO: 1075241 - DNA, 25 bp, Homo sapien
gacgatgtactccaagccgaaaacc

SEQ ID NO: 1075242 - DNA, 25 bp, Homo sapien
atccggcggaccagacccggacgat

SEQ ID NO: 1075243 - DNA, 25 bp, Homo sapien
tctggcaaagcggaagcgaccctgc

SEQ ID NO: 1075244 - DNA, 25 bp, Homo sapien
atgttgccctgggtacccgcggcga

SEQ ID NO: 1075245 - DNA, 25 bp, Homo sapien
accgaggccacgaacacgatgaagt

SEQ ID NO: 1075246 - DNA, 25 bp, Homo sapien
gcggacgtggcgaagatgttgccct

SEQ ID NO: 1075247 - DNA, 25 bp, Homo sapien
tgctatgcgcgtagaccactgagcc

SEQ ID NO: 1075248 - DNA, 25 bp, Homo sapien
aacccgatgtaccaggcggtgatca

SEQ ID NO: 1075249 - DNA, 25 bp, Homo sapien
gtcggagttggcgtccttctcagcc

SEQ ID NO: 1075250 - DNA, 25 bp, Homo sapien
tgagcaccaggaacccgatgtacca

SEQ ID NO: 1075251 - DNA, 25 bp, Homo sapien
gcgagtcggcgtaggaggagaagtc

SEQ ID NO: 1075252 - DNA, 25 bp, Homo sapien
gtgcggtgtcttgtcaccatagccg

SEQ ID NO: 1075253 - DNA, 25 bp, Homo sapien
ccagtaaggcgaagccagcagccag

SEQ ID NO: 1075254 - DNA, 25 bp, Homo sapien
agagatgcccagtaaggcgaagcca

SEQ ID NO: 1075255 - DNA, 25 bp, Homo sapien
ccagccatgtgtgcggtgtcttgtc

SEQ ID NO: 1075256 - DNA, 25 bp, Homo sapien
tcctccgcttctcgaagtgcttctg

SEQ ID NO: 1075257 - DNA, 25 bp, Homo sapien
tcagggcaaagccggagcctaggat

SEQ ID NO: 1075258 - DNA, 25 bp, Homo sapien
tgaggttggctgccggcatcctccg

SEQ ID NO: 1075259 - DNA, 25 bp, Homo sapien
gggcaaagccggagcctaggatgcc

SEQ ID NO: 1075260 - DNA, 25 bp, Homo sapien
agtcacacggccctgctcctagggc

SEQ ID NO: 1075261 - DNA, 25 bp, Homo sapien
gggcttcttcccgggcatcttgtac

SEQ ID NO: 1075262 - DNA, 25 bp, Homo sapien
gcagtcacacggccctgctcctagg

SEQ ID NO: 1075263 - DNA, 25 bp, Homo sapien
cagtgcagtcacacggccctgctcc

SEQ ID NO: 1075264 - DNA, 25 bp, Homo sapien
catccatgggcttgccgagcttcct

SEQ ID NO: 1075265 - DNA, 25 bp, Homo sapien
gcatccatgggcttgccgagcttcc

SEQ ID NO: 1075266 - DNA, 25 bp, Homo sapien
tgggaggatactgtcatagtagtac

SEQ ID NO: 1075267 - DNA, 25 bp, Homo sapien
gctgtcaggtaggcccggctcatat

SEQ ID NO: 1075268 - DNA, 25 bp, Homo sapien
tcatatcggtggagtacaggcgcca

SEQ ID NO: 1075269 - DNA, 25 bp, Homo sapien
atagtagtaccaggtggctgtcagg

SEQ ID NO: 1075270 - DNA, 25 bp, Homo sapien
gtgctcaaacaagagggccagctct

SEQ ID NO: 1075271 - DNA, 25 bp, Homo sapien
tggcaggtggcaacgggcgggtaac

SEQ ID NO: 1075272 - DNA, 25 bp, Homo sapien
attgcgggcccgttgcacgtgctca

SEQ ID NO: 1075273 - DNA, 25 bp, Homo sapien
gctgcccggccggtggcaggtggca

SEQ ID NO: 1075274 - DNA, 25 bp, Homo sapien
atgctgcttggaaggacccgtccgc

SEQ ID NO: 1075275 - DNA, 25 bp, Homo sapien
gatgcggtctttgatgcccatccgg

SEQ ID NO: 1075276 - DNA, 25 bp, Homo sapien
cccggaagcgggtgcggtcattgaa

SEQ ID NO: 1075277 - DNA, 25 bp, Homo sapien
gctgcccatgcggatgcggtctttg

SEQ ID NO: 1075278 - DNA, 25 bp, Homo sapien
tggagcggatgactgtcttcacagc

SEQ ID NO: 1075279 - DNA, 25 bp, Homo sapien
ctgatggagcggatgactgtcttca

SEQ ID NO: 1075280 - DNA, 25 bp, Homo sapien
tggtagctcttctcctctgctactt

SEQ ID NO: 1075281 - DNA, 25 bp, Homo sapien
tccaccgtgagctcacactggtagc

SEQ ID NO: 1075282 - DNA, 25 bp, Homo sapien
aatgacgtccttcacgtcgtacggt

SEQ ID NO: 1075283 - DNA, 25 bp, Homo sapien
gtcgcagtgtctccttgaatttcct

SEQ ID NO: 1075284 - DNA, 25 bp, Homo sapien
aggctcttgatccggcccagcatgt

SEQ ID NO: 1075285 - DNA, 25 bp, Homo sapien
tccttcacgtcgtacggtcgcagtg

SEQ ID NO: 1075286 - DNA, 25 bp, Homo sapien
ctccgcgtcggagggccccttgtcg

SEQ ID NO: 1075287 - DNA, 25 bp, Homo sapien
ttctccaccttgaccacgcgtccca

SEQ ID NO: 1075288 - DNA, 25 bp, Homo sapien
cacgcgtcccatcatgctgatttca

SEQ ID NO: 1075289 - DNA, 25 bp, Homo sapien
tcatccaccacctccgcgtcggagg

SEQ ID NO: 1075290 - DNA, 25 bp, Homo sapien
gtcgaacagcggcacttgcacggcg

SEQ ID NO: 1075291 - DNA, 25 bp, Homo sapien
tccagcttgtgctcgatggactgca

SEQ ID NO: 1075292 - DNA, 25 bp, Homo sapien
cgaatagaagcccaacagcaggtcc

SEQ ID NO: 1075293 - DNA, 25 bp, Homo sapien
tctgtgcggagacggagatgtcctc

SEQ ID NO: 1075294 - DNA, 25 bp, Homo sapien
agttcaagtacgagaggagtccgga

SEQ ID NO: 1075295 - DNA, 25 bp, Homo sapien
cagctcaatactgcgtgtggtctct

SEQ ID NO: 1075296 - DNA, 25 bp, Homo sapien
ctcagagggcagtcggagcgccagg

SEQ ID NO: 1075297 - DNA, 25 bp, Homo sapien
tctctccccgtgagggagtgagttc

SEQ ID NO: 1075298 - DNA, 25 bp, Homo sapien
acatagggccttgatggagtgggca

SEQ ID NO: 1075299 - DNA, 25 bp, Homo sapien
gccctctgtgcgacctggcatctca

SEQ ID NO: 1075300 - DNA, 25 bp, Homo sapien
tctgtgcgacctggcatctcacgct

SEQ ID NO: 1075301 - DNA, 25 bp, Homo sapien
gccacatagggccttgatggagtgg

SEQ ID NO: 1075302 - DNA, 25 bp, Homo sapien
tccaagtgtgtcacgtcattgcatg

SEQ ID NO: 1075303 - DNA, 25 bp, Homo sapien
ggaggatacagaaacctgtgctgac

SEQ ID NO: 1075304 - DNA, 25 bp, Homo sapien
gatcgtccacgaagcactgtctggg

SEQ ID NO: 1075305 - DNA, 25 bp, Homo sapien
aaaggctatgtttgtgcgatcgtcc

SEQ ID NO: 1075306 - DNA, 25 bp, Homo sapien
ctgcaaggccagtccactggcatct

SEQ ID NO: 1075307 - DNA, 25 bp, Homo sapien
gtggtcgtcaccctgcaaggccagt

SEQ ID NO: 1075308 - DNA, 25 bp, Homo sapien
cctgcaaggccagtccactggcatc

SEQ ID NO: 1075309 - DNA, 25 bp, Homo sapien
ttagtggtcgtcaccctgcaaggcc

SEQ ID NO: 1075310 - DNA, 25 bp, Homo sapien
cctggagagctctcgggttacttca

SEQ ID NO: 1075311 - DNA, 25 bp, Homo sapien
ctctcgggttacttcaaagctcctt

SEQ ID NO: 1075312 - DNA, 25 bp, Homo sapien
tccttctcctgctcagatggagttg

SEQ ID NO: 1075313 - DNA, 25 bp, Homo sapien
gagagctctcgggttacttcaaagc

SEQ ID NO: 1075314 - DNA, 25 bp, Homo sapien
aggcctgggcccgagttgtgctgtg

SEQ ID NO: 1075315 - DNA, 25 bp, Homo sapien
tattctctctgggagttagagtgac

SEQ ID NO: 1075316 - DNA, 25 bp, Homo sapien
ccggatgcgcggttggtatagctat

SEQ ID NO: 1075317 - DNA, 25 bp, Homo sapien
cagtgcatgtgaaagccggatgcgc

SEQ ID NO: 1075318 - DNA, 25 bp, Homo sapien
cggttggtatagctattacatgcat

SEQ ID NO: 1075319 - DNA, 25 bp, Homo sapien
tccatccagggcatgacggtcacat

SEQ ID NO: 1075320 - DNA, 25 bp, Homo sapien
aggtccccagcacgagatgcaggca

SEQ ID NO: 1075321 - DNA, 25 bp, Homo sapien
gcaccatggactgagtaagatccag

SEQ ID NO: 1075322 - DNA, 25 bp, Homo sapien
tggtgctggcgcatgcaggtcccca

SEQ ID NO: 1075323 - DNA, 25 bp, Homo sapien
tctccttggtcatagggtaatccca

SEQ ID NO: 1075324 - DNA, 25 bp, Homo sapien
ggtacttgcatatccgagaaccgag

SEQ ID NO: 1075325 - DNA, 25 bp, Homo sapien
tcttcccatgtctccttggtcatag

SEQ ID NO: 1075326 - DNA, 25 bp, Homo sapien
tgatggcggaacctcgatcgtggaa

SEQ ID NO: 1075327 - DNA, 25 bp, Homo sapien
tgggcggcatggacgccgaactcat

SEQ ID NO: 1075328 - DNA, 25 bp, Homo sapien
tcatcgacgaggaggcgctgacgtc

SEQ ID NO: 1075329 - DNA, 25 bp, Homo sapien
tgggccagagcgagttcgactgctt

SEQ ID NO: 1075330 - DNA, 25 bp, Homo sapien
ggctccgtgagctgctgagggcggc

SEQ ID NO: 1075331 - DNA, 25 bp, Homo sapien
tccagccctttccggccgtgcctcc

SEQ ID NO: 1075332 - DNA, 25 bp, Homo sapien
tctgccgccgtacgcgggcccgggc

SEQ ID NO: 1075333 - DNA, 25 bp, Homo sapien
ttccagccctttccggccgtgcctc

SEQ ID NO: 1075334 - DNA, 25 bp, Homo sapien
cagccctttccggccgtgcctccgc

SEQ ID NO: 1075335 - DNA, 25 bp, Homo sapien
gcagaggccgccgtccgccgcggcc

SEQ ID NO: 1075336 - DNA, 25 bp, Homo sapien
ggtgcagaggccgccgtccgccgcg

SEQ ID NO: 1075337 - DNA, 25 bp, Homo sapien
gccgccgtccgccgcggccgcccat

SEQ ID NO: 1075338 - DNA, 25 bp, Homo sapien
ggccgccgtccgccgcggccgccca

SEQ ID NO: 1075339 - DNA, 25 bp, Homo sapien
acctgatgctcgccgagggctaccg

SEQ ID NO: 1075340 - DNA, 25 bp, Homo sapien
cacctgatgctcgccgagggctacc

SEQ ID NO: 1075341 - DNA, 25 bp, Homo sapien
cctgatgctcgccgagggctaccgc

SEQ ID NO: 1075342 - DNA, 25 bp, Homo sapien
ttggttttgctccgcccggccgagc

SEQ ID NO: 1075343 - DNA, 25 bp, Homo sapien
caggttgcgggcctttgtgacccca

SEQ ID NO: 1075344 - DNA, 25 bp, Homo sapien
gccggcgctgaccaccgcgcgctgt

SEQ ID NO: 1075345 - DNA, 25 bp, Homo sapien
ccgcaaggtgcgcagtagtgggctg

SEQ ID NO: 1075346 - DNA, 25 bp, Homo sapien
gagaataaattccagggtgtagctt

SEQ ID NO: 1075347 - DNA, 25 bp, Homo sapien
agatcaccgtctccctttcacagag

SEQ ID NO: 1075348 - DNA, 25 bp, Homo sapien
ttatcactacccacaagctctcagg

SEQ ID NO: 1075349 - DNA, 25 bp, Homo sapien
ggaatcaagtaatactccccgctca

SEQ ID NO: 1075350 - DNA, 25 bp, Homo sapien
catgtagttgtagtcagctgatggc

SEQ ID NO: 1075351 - DNA, 25 bp, Homo sapien
gaaggtgacccagcacttactgact

SEQ ID NO: 1075352 - DNA, 25 bp, Homo sapien
tactatatgctgcagtttggctggg

SEQ ID NO: 1075353 - DNA, 25 bp, Homo sapien
tattagctcatgatactatatgctg

SEQ ID NO: 1075354 - DNA, 25 bp, Homo sapien
gctcggcgcgcatggccccctttcg

SEQ ID NO: 1075355 - DNA, 25 bp, Homo sapien
ccggctgcgctcggcgcgcatggcc

SEQ ID NO: 1075356 - DNA, 25 bp, Homo sapien
gcacccatcaactccgcatccccat

SEQ ID NO: 1075357 - DNA, 25 bp, Homo sapien
ttcgactgcccctttcatctgcccc

SEQ ID NO: 1075358 - DNA, 25 bp, Homo sapien
agcgtgggaaccgccgtgccctctg

SEQ ID NO: 1075359 - DNA, 25 bp, Homo sapien
cggtggtggtgagcgcggccacgcc

SEQ ID NO: 1075360 - DNA, 25 bp, Homo sapien
cagggcccgagcgtgggaaccgccg

SEQ ID NO: 1075361 - DNA, 25 bp, Homo sapien
gcctggatgggcgataagcctgccc

SEQ ID NO: 1075362 - DNA, 25 bp, Homo sapien
ggagctttgtgggttcccaagtgaa

SEQ ID NO: 1075363 - DNA, 25 bp, Homo sapien
ttccagatgtcgctgtaccccggtg

SEQ ID NO: 1075364 - DNA, 25 bp, Homo sapien
gggttcccaagtgaattaagcatga

SEQ ID NO: 1075365 - DNA, 25 bp, Homo sapien
gcttggtgatttggtgtgccaagtc

SEQ ID NO: 1075366 - DNA, 25 bp, Homo sapien
aagtgttggccccttgttccactgg

SEQ ID NO: 1075367 - DNA, 25 bp, Homo sapien
ttctgaagtgttggccccttgttcc

SEQ ID NO: 1075368 - DNA, 25 bp, Homo sapien
aacacaactccagcatatggcagtt

SEQ ID NO: 1075369 - DNA, 25 bp, Homo sapien
gccccttgttccactggatggctgc

SEQ ID NO: 1075370 - DNA, 25 bp, Homo sapien
ttcataattgccaattaaattgtga

SEQ ID NO: 1075371 - DNA, 25 bp, Homo sapien
atgtagtagccatcttcagtactcc

SEQ ID NO: 1075372 - DNA, 25 bp, Homo sapien
aactggtgtcatgactggaatgtag

SEQ ID NO: 1075373 - DNA, 25 bp, Homo sapien
gctggtgatggtgggacataactgg

SEQ ID NO: 1075374 - DNA, 25 bp, Homo sapien
tcttcagtactccaaactattgcta

SEQ ID NO: 1075375 - DNA, 25 bp, Homo sapien
agctcgggcaggtggcatcatggat

SEQ ID NO: 1075376 - DNA, 25 bp, Homo sapien
tagttgttggccgagcactgtggag

SEQ ID NO: 1075377 - DNA, 25 bp, Homo sapien
tgagtagggaagagacacagtagtt

SEQ ID NO: 1075378 - DNA, 25 bp, Homo sapien
gatttcagagaaccaagctctggag

SEQ ID NO: 1075379 - DNA, 25 bp, Homo sapien
tcacatcatctattgtggatttcag

SEQ ID NO: 1075380 - DNA, 25 bp, Homo sapien
aattcaccatttttgatcacatcat

SEQ ID NO: 1075381 - DNA, 25 bp, Homo sapien
attcaccatttttgatcacatcatc

SEQ ID NO: 1075382 - DNA, 25 bp, Homo sapien
taattcaccatttttgatcacatca

SEQ ID NO: 1075383 - DNA, 25 bp, Homo sapien
tcctggcggtgatgcgccagcgcat

SEQ ID NO: 1075384 - DNA, 25 bp, Homo sapien
gggctcctggcggtgatgcgccagc

SEQ ID NO: 1075385 - DNA, 25 bp, Homo sapien
tgtgggctcctggcggtgatgcgcc

SEQ ID NO: 1075386 - DNA, 25 bp, Homo sapien
ctcctggcggtgatgcgccagcgca

SEQ ID NO: 1075387 - DNA, 25 bp, Homo sapien
aactgtgccgccgtaggttcgaggc

SEQ ID NO: 1075388 - DNA, 25 bp, Homo sapien
agtctttcacggaggcgggctctag

SEQ ID NO: 1075389 - DNA, 25 bp, Homo sapien
gcctgtggcccaagcttactctctt

SEQ ID NO: 1075390 - DNA, 25 bp, Homo sapien
cacagcggtctcctggagttctggg

SEQ ID NO: 1075391 - DNA, 25 bp, Homo sapien
tacagagaacagaggtaaggccgtg

SEQ ID NO: 1075392 - DNA, 25 bp, Homo sapien
gccttgaaggactgactgcacgact

SEQ ID NO: 1075393 - DNA, 25 bp, Homo sapien
taatcctgaaggtgacggaaggcgc

SEQ ID NO: 1075394 - DNA, 25 bp, Homo sapien
gcaagaaggttttccggcacagaag

SEQ ID NO: 1075395 - DNA, 25 bp, Homo sapien
gaaggaagaatgctcagaagtcttc

SEQ ID NO: 1075396 - DNA, 25 bp, Homo sapien
agtcttccccgctccaaaggctctt

SEQ ID NO: 1075397 - DNA, 25 bp, Homo sapien
tcagaagtcttccccgctccaaagg

SEQ ID NO: 1075398 - DNA, 25 bp, Homo sapien
gggaaggaagaatgctcagaagtct

SEQ ID NO: 1075399 - DNA, 25 bp, Homo sapien
cctcctcaggaacgttccatgtgaa

SEQ ID NO: 1075400 - DNA, 25 bp, Homo sapien
tcctcctcaggaacgttccatgtga

SEQ ID NO: 1075401 - DNA, 25 bp, Homo sapien
tgatataaatgtatctcaacaaacc

SEQ ID NO: 1075402 - DNA, 25 bp, Homo sapien
caaaccaaactcatctgggttcaaa

SEQ ID NO: 1075403 - DNA, 25 bp, Homo sapien
tagctatgaaccctcttgaagcctc

SEQ ID NO: 1075404 - DNA, 25 bp, Homo sapien
ctctgccaattattagctatgaacc

SEQ ID NO: 1075405 - DNA, 25 bp, Homo sapien
catgacttgagtattgtgcccacac

SEQ ID NO: 1075406 - DNA, 25 bp, Homo sapien
catgctcataaggagagaatgttcc

SEQ ID NO: 1075407 - DNA, 25 bp, Homo sapien
acactgctggcaatgattccttttc

SEQ ID NO: 1075408 - DNA, 25 bp, Homo sapien
tataacaccaccagtaaccagaatg

SEQ ID NO: 1075409 - DNA, 25 bp, Homo sapien
cagtggtcagattattgtccttggt

SEQ ID NO: 1075410 - DNA, 25 bp, Homo sapien
ggatgtcaaggaaccgctcatagtt

SEQ ID NO: 1075411 - DNA, 25 bp, Homo sapien
aggtcaaggtctacttccccaccat

SEQ ID NO: 1075412 - DNA, 25 bp, Homo sapien
tcctttccgttccttgttaatgaca

SEQ ID NO: 1075413 - DNA, 25 bp, Homo sapien
gattgcatctgtgatatgagggaca

SEQ ID NO: 1075414 - DNA, 25 bp, Homo sapien
aggccatcttcatctacaggtatta

SEQ ID NO: 1075415 - DNA, 25 bp, Homo sapien
tcatcacccactcctggattgcatc

SEQ ID NO: 1075416 - DNA, 25 bp, Homo sapien
gtattaacgcctgtctcatcaccca

SEQ ID NO: 1075417 - DNA, 25 bp, Homo sapien
tccactgggaactgtcttatcagtt

SEQ ID NO: 1075418 - DNA, 25 bp, Homo sapien
tgagtacacttgttcacatgtgcag

SEQ ID NO: 1075419 - DNA, 25 bp, Homo sapien
tggctgactaaggagatgagtacac

SEQ ID NO: 1075420 - DNA, 25 bp, Homo sapien
tcttatcagttattgatggctgact

SEQ ID NO: 1075421 - DNA, 25 bp, Homo sapien
ggcactaaacccttctctggcagtt

SEQ ID NO: 1075422 - DNA, 25 bp, Homo sapien
caaagttgtttcagaggttaggcac

SEQ ID NO: 1075423 - DNA, 25 bp, Homo sapien
ggaactagactgacgtggatgttac

SEQ ID NO: 1075424 - DNA, 25 bp, Homo sapien
gacggaaggcctcaataaagggcat

SEQ ID NO: 1075425 - DNA, 25 bp, Homo sapien
taaagggcatgctttctatgtcccc

SEQ ID NO: 1075426 - DNA, 25 bp, Homo sapien
ctctcttttgaccttgaattggaac

SEQ ID NO: 1075427 - DNA, 25 bp, Homo sapien
agagccttttagaacttctgcccca

SEQ ID NO: 1075428 - DNA, 25 bp, Homo sapien
catccaatatgataggcaccaaggg

SEQ ID NO: 1075429 - DNA, 25 bp, Homo sapien
caataatatgccttggtgtaggtca

SEQ ID NO: 1075430 - DNA, 25 bp, Homo sapien
ggtccagtggcacaatgattcttga

SEQ ID NO: 1075431 - DNA, 25 bp, Homo sapien
cgaacactattctgggtaggtttag

SEQ ID NO: 1075432 - DNA, 25 bp, Homo sapien
caagtcctctaagttcccgaacact

SEQ ID NO: 1075433 - DNA, 25 bp, Homo sapien
tattctgggtaggtttagtcttctg

SEQ ID NO: 1075434 - DNA, 25 bp, Homo sapien
tctaagttcccgaacactattctgg

SEQ ID NO: 1075435 - DNA, 25 bp, Homo sapien
tgtcaagtggatttgagcacctgca

SEQ ID NO: 1075436 - DNA, 25 bp, Homo sapien
gtgtcaagtggatttgagcacctgc

SEQ ID NO: 1075437 - DNA, 25 bp, Homo sapien
gtcaagtggatttgagcacctgcat

SEQ ID NO: 1075438 - DNA, 25 bp, Homo sapien
ggtcaagtcttcgaagaaaataatc

SEQ ID NO: 1075439 - DNA, 25 bp, Homo sapien
gcctctcaataggaaggtcaagtct

SEQ ID NO: 1075440 - DNA, 25 bp, Homo sapien
gatggatgagacatcgtggacacag

SEQ ID NO: 1075441 - DNA, 25 bp, Homo sapien
gaaaataatctacaaccccttgctc

SEQ ID NO: 1075442 - DNA, 25 bp, Homo sapien
gccactgtcagccattcgtgtgggc

SEQ ID NO: 1075443 - DNA, 25 bp, Homo sapien
ccgctgccaccaggacgcccatctg

SEQ ID NO: 1075444 - DNA, 25 bp, Homo sapien
caccaggacgcccatctgcactgat

SEQ ID NO: 1075445 - DNA, 25 bp, Homo sapien
cagccattcgtgtgggctttggata

SEQ ID NO: 1075446 - DNA, 25 bp, Homo sapien
tctgtgtacagaccagtaaagagga

SEQ ID NO: 1075447 - DNA, 25 bp, Homo sapien
cacctgggaagaatataacgggaat

SEQ ID NO: 1075448 - DNA, 25 bp, Homo sapien
ttttcagatcaacatggcaggcttt

SEQ ID NO: 1075449 - DNA, 25 bp, Homo sapien
gaaggtacacgctatcatgagacca

SEQ ID NO: 1075450 - DNA, 25 bp, Homo sapien
gagccttaatgacagaggcatagga

SEQ ID NO: 1075451 - DNA, 25 bp, Homo sapien
aacttcgtgtatttgcccacaaggg

SEQ ID NO: 1075452 - DNA, 25 bp, Homo sapien
tatttgcccacaagggcaatagagc

SEQ ID NO: 1075453 - DNA, 25 bp, Homo sapien
cgtgtatttgcccacaagggcaata

SEQ ID NO: 1075454 - DNA, 25 bp, Homo sapien
tcttaaccatgacactctactgcca

SEQ ID NO: 1075455 - DNA, 25 bp, Homo sapien
catgctcttaaccatgacactctac

SEQ ID NO: 1075456 - DNA, 25 bp, Homo sapien
tgctgcccgccatggcacagaccag

SEQ ID NO: 1075457 - DNA, 25 bp, Homo sapien
aacgcgcctagccacggcatccatg

SEQ ID NO: 1075458 - DNA, 25 bp, Homo sapien
aaccctaggaggaaggcaccatcac

SEQ ID NO: 1075459 - DNA, 25 bp, Homo sapien
tgaacttcttacaacaaccctagga

SEQ ID NO: 1075460 - DNA, 25 bp, Homo sapien
ggtttaacgacagctgacatagtgc

SEQ ID NO: 1075461 - DNA, 25 bp, Homo sapien
agtagaaagcaaaccccaatgtggg

SEQ ID NO: 1075462 - DNA, 25 bp, Homo sapien
cactcccggcagcaaggtaagagct

SEQ ID NO: 1075463 - DNA, 25 bp, Homo sapien
gggaatggacttattggatcacacg

SEQ ID NO: 1075464 - DNA, 25 bp, Homo sapien
tggtggtgccattttacactcccgg

SEQ ID NO: 1075465 - DNA, 25 bp, Homo sapien
ctcaagtgagtatctgggaatggac

SEQ ID NO: 1075466 - DNA, 25 bp, Homo sapien
cagcagactctagagggctttctgt

SEQ ID NO: 1075467 - DNA, 25 bp, Homo sapien
catcttccgcccagcttttgtgggt

SEQ ID NO: 1075468 - DNA, 25 bp, Homo sapien
tcagctaagcctctgcagcagactc

SEQ ID NO: 1075469 - DNA, 25 bp, Homo sapien
tttctgcactctactgtgttcagga

SEQ ID NO: 1075470 - DNA, 25 bp, Homo sapien
tcgtggtagcgcacgggctcttctt

SEQ ID NO: 1075471 - DNA, 25 bp, Homo sapien
ttctgccaagcttcgtggtagcgca

SEQ ID NO: 1075472 - DNA, 25 bp, Homo sapien
ctcttcttgcgaggtgatgggctcc

SEQ ID NO: 1075473 - DNA, 25 bp, Homo sapien
gctccaagtccgcagaatctatgta

SEQ ID NO: 1075474 - DNA, 25 bp, Homo sapien
tcttggcttaaaatgctcccctaag

SEQ ID NO: 1075475 - DNA, 25 bp, Homo sapien
ctcttggcttaaaatgctcccctaa

SEQ ID NO: 1075476 - DNA, 25 bp, Homo sapien
ggctttttctgattccgagcccagg

SEQ ID NO: 1075477 - DNA, 25 bp, Homo sapien
ctcgaacaccaaatcctcctggaac

SEQ ID NO: 1075478 - DNA, 25 bp, Homo sapien
aggctttttctgattccgagcccag

SEQ ID NO: 1075479 - DNA, 25 bp, Homo sapien
cctcgaacaccaaatcctcctggaa

SEQ ID NO: 1075480 - DNA, 25 bp, Homo sapien
ccatcccagcacgtttcttgagaat

SEQ ID NO: 1075481 - DNA, 25 bp, Homo sapien
tcccagcacgtttcttgagaattca

SEQ ID NO: 1075482 - DNA, 25 bp, Homo sapien
tgccatcccagcacgtttcttgaga

SEQ ID NO: 1075483 - DNA, 25 bp, Homo sapien
cttgccatcccagcacgtttcttga

SEQ ID NO: 1075484 - DNA, 25 bp, Homo sapien
aggcaccagcttcaggatggtggcc

SEQ ID NO: 1075485 - DNA, 25 bp, Homo sapien
ttaggacaaggacttcacaccaggc

SEQ ID NO: 1075486 - DNA, 25 bp, Homo sapien
ggccacggtgatcaaagtgacagaa

SEQ ID NO: 1075487 - DNA, 25 bp, Homo sapien
taatgaatgatgagccactaggtgg

SEQ ID NO: 1075488 - DNA, 25 bp, Homo sapien
gagacagcatcttgacgtcccggct

SEQ ID NO: 1075489 - DNA, 25 bp, Homo sapien
gaagcttgggctggattaatgaatg

SEQ ID NO: 1075490 - DNA, 25 bp, Homo sapien
gctgggccgagctcacagctgaaca

SEQ ID NO: 1075491 - DNA, 25 bp, Homo sapien
acatcagcaggcctgataagtgcct

SEQ ID NO: 1075492 - DNA, 25 bp, Homo sapien
agtgcctgcataacaggcctgtcat

SEQ ID NO: 1075493 - DNA, 25 bp, Homo sapien
tgttttggccaacgggacatcagca

SEQ ID NO: 1075494 - DNA, 25 bp, Homo sapien
gctcagtcttcacacccatgtgtgt

SEQ ID NO: 1075495 - DNA, 25 bp, Homo sapien
agaataaatgggctgtggtggacca

SEQ ID NO: 1075496 - DNA, 25 bp, Homo sapien
aatgggctgtggtggaccattccag

SEQ ID NO: 1075497 - DNA, 25 bp, Homo sapien
tctagtatttgtcgggtgggctaca

SEQ ID NO: 1075498 - DNA, 25 bp, Homo sapien
tccacagaatttacaaggtctttct

SEQ ID NO: 1075499 - DNA, 25 bp, Homo sapien
gggtcaaactctgtagaattggcat

SEQ ID NO: 1075500 - DNA, 25 bp, Homo sapien
cacgggatgactggtcgtagggtca

SEQ ID NO: 1075501 - DNA, 25 bp, Homo sapien
ggatgactggtcgtagggtcaaact

SEQ ID NO: 1075502 - DNA, 25 bp, Homo sapien
tagggtcaaactctgtagaattggc

SEQ ID NO: 1075503 - DNA, 25 bp, Homo sapien
tggaacagggttctcctcttgccca

SEQ ID NO: 1075504 - DNA, 25 bp, Homo sapien
cccatctgccctgggttgtgttctg

SEQ ID NO: 1075505 - DNA, 25 bp, Homo sapien
catgactgagttcttggtctggaac

SEQ ID NO: 1075506 - DNA, 25 bp, Homo sapien
tcttgcccagcctcatggttccgcc

SEQ ID NO: 1075507 - DNA, 25 bp, Homo sapien
gcttctatggctatcacagtgcatc

SEQ ID NO: 1075508 - DNA, 25 bp, Homo sapien
gtcctttctaagacccacactgctt

SEQ ID NO: 1075509 - DNA, 25 bp, Homo sapien
ctgcttctatggctatcacagtgca

SEQ ID NO: 1075510 - DNA, 25 bp, Homo sapien
ccacactgcttctatggctatcaca

SEQ ID NO: 1075511 - DNA, 25 bp, Homo sapien
cttccaagtagtctgcgtctccata

SEQ ID NO: 1075512 - DNA, 25 bp, Homo sapien
tagtctgcgtctccatagagtttcc

SEQ ID NO: 1075513 - DNA, 25 bp, Homo sapien
ctcaaatcggtggcggtgcctctct

SEQ ID NO: 1075514 - DNA, 25 bp, Homo sapien
aaatcggtggcggtgcctctcttcc

SEQ ID NO: 1075515 - DNA, 25 bp, Homo sapien
actatctttccagagtaccagcaag

SEQ ID NO: 1075516 - DNA, 25 bp, Homo sapien
tatctttccagagtaccagcaagct

SEQ ID NO: 1075517 - DNA, 25 bp, Homo sapien
agtaccagcaagctggaatcctcac

SEQ ID NO: 1075518 - DNA, 25 bp, Homo sapien
tcagctcactatctttccagagtac

SEQ ID NO: 1075519 - DNA, 25 bp, Homo sapien
ggcatgaaaaataattctgctggtc

SEQ ID NO: 1075520 - DNA, 25 bp, Homo sapien
tgaggcatgaaaaataattctgctg

SEQ ID NO: 1075521 - DNA, 25 bp, Homo sapien
gaggcatgaaaaataattctgctgg

SEQ ID NO: 1075522 - DNA, 25 bp, Homo sapien
catgaaaaataattctgctggtctc

SEQ ID NO: 1075523 - DNA, 25 bp, Homo sapien
caagccttgttcttccaaacacttt

SEQ ID NO: 1075524 - DNA, 25 bp, Homo sapien
ttaaataaaactgcccgaataatca

SEQ ID NO: 1075525 - DNA, 25 bp, Homo sapien
taaataaaactgcccgaataatcac

SEQ ID NO: 1075526 - DNA, 25 bp, Homo sapien
tctggaggtaatgtgagagccgccc

SEQ ID NO: 1075527 - DNA, 25 bp, Homo sapien
gagggcttgataggcctggacagga

SEQ ID NO: 1075528 - DNA, 25 bp, Homo sapien
aggccaaagtatggtggggagggct

SEQ ID NO: 1075529 - DNA, 25 bp, Homo sapien
gaactcagggtggtactgaacccca

SEQ ID NO: 1075530 - DNA, 25 bp, Homo sapien
taaaggtggcaatgggacataaacc

SEQ ID NO: 1075531 - DNA, 25 bp, Homo sapien
cacggttcctacagggacacttgcc

SEQ ID NO: 1075532 - DNA, 25 bp, Homo sapien
taccaccaactctgagtactggttc

SEQ ID NO: 1075533 - DNA, 25 bp, Homo sapien
tgcacatggcaggaatcacaaagac

SEQ ID NO: 1075534 - DNA, 25 bp, Homo sapien
tccactcctgtcactataggtgtcc

SEQ ID NO: 1075535 - DNA, 25 bp, Homo sapien
ttcagttcggtgatttcagagtcag

SEQ ID NO: 1075536 - DNA, 25 bp, Homo sapien
ctgcttccactcctgtcactatagg

SEQ ID NO: 1075537 - DNA, 25 bp, Homo sapien
aacttcagttcggtgatttcagagt

SEQ ID NO: 1075538 - DNA, 25 bp, Homo sapien
gaatttctagtcagctgccatggga

SEQ ID NO: 1075539 - DNA, 25 bp, Homo sapien
catttacatttcgtggcagtgccca

SEQ ID NO: 1075540 - DNA, 25 bp, Homo sapien
taaacgcttacctagcacacaggcc

SEQ ID NO: 1075541 - DNA, 25 bp, Homo sapien
cagaggcccactggtgatgaacaca

SEQ ID NO: 1075542 - DNA, 25 bp, Homo sapien
taaagaaagtctccaaagccgagtg

SEQ ID NO: 1075543 - DNA, 25 bp, Homo sapien
tagtggcaagcaataccctgaggtt

SEQ ID NO: 1075544 - DNA, 25 bp, Homo sapien
tatccaagggaaagcgacaggcaac

SEQ ID NO: 1075545 - DNA, 25 bp, Homo sapien
gatgcaaggagtgtttcccagccct

SEQ ID NO: 1075546 - DNA, 25 bp, Homo sapien
aagttagagtacacatcgagtctgg

SEQ ID NO: 1075547 - DNA, 25 bp, Homo sapien
taagttagagtacacatcgagtctg

SEQ ID NO: 1075548 - DNA, 25 bp, Homo sapien
cttaagttagagtacacatcgagtc

SEQ ID NO: 1075549 - DNA, 25 bp, Homo sapien
tcttaagttagagtacacatcgagt

SEQ ID NO: 1075550 - DNA, 25 bp, Homo sapien
taaaaatctatgcagtggccaggcg

SEQ ID NO: 1075551 - DNA, 25 bp, Homo sapien
tatggctggcatatggtagacaccc

SEQ ID NO: 1075552 - DNA, 25 bp, Homo sapien
tcaggatgtccgtaagagtcaggct

SEQ ID NO: 1075553 - DNA, 25 bp, Homo sapien
catgcacctgggacaagaatggttc

SEQ ID NO: 1075554 - DNA, 25 bp, Homo sapien
taggctggagccactcaagtcagag

SEQ ID NO: 1075555 - DNA, 25 bp, Homo sapien
taagtaccctgagtcactggacatg

SEQ ID NO: 1075556 - DNA, 25 bp, Homo sapien
cccttgactggccttcctgggcaaa

SEQ ID NO: 1075557 - DNA, 25 bp, Homo sapien
caagcatcagaactgcggctctgtg

SEQ ID NO: 1075558 - DNA, 25 bp, Homo sapien
tttctggcacttgggcaaaccctgt

SEQ ID NO: 1075559 - DNA, 25 bp, Homo sapien
tggagagacccataaagccttgacc

SEQ ID NO: 1075560 - DNA, 25 bp, Homo sapien
ccagaactgctgtcgaagaaaatca

SEQ ID NO: 1075561 - DNA, 25 bp, Homo sapien
tcttcagaggacactaccctagggc

SEQ ID NO: 1075562 - DNA, 25 bp, Homo sapien
tttgtccgggaagctgatcctcagc

SEQ ID NO: 1075563 - DNA, 25 bp, Homo sapien
tgacctctcagtaggaacctgtgtg

SEQ ID NO: 1075564 - DNA, 25 bp, Homo sapien
gccgcgatgcctctcgactgagtgg

SEQ ID NO: 1075565 - DNA, 25 bp, Homo sapien
tgtttcgcaaacacgtaggtgctgc

SEQ ID NO: 1075566 - DNA, 25 bp, Homo sapien
gagcatcacctagaaggccactgag

SEQ ID NO: 1075567 - DNA, 25 bp, Homo sapien
cagggtattttttgcccacgtgcca

SEQ ID NO: 1075568 - DNA, 25 bp, Homo sapien
cagtccccgccctttatggtaggtg

SEQ ID NO: 1075569 - DNA, 25 bp, Homo sapien
tcatcgtctggcactactgtgagca

SEQ ID NO: 1075570 - DNA, 25 bp, Homo sapien
cagaatgttcctcatgtgcaaactg

SEQ ID NO: 1075571 - DNA, 25 bp, Homo sapien
ctctcaggtcttcctcatatgcaga

SEQ ID NO: 1075572 - DNA, 25 bp, Homo sapien
ttcctcatatgcagaatgttcctca

SEQ ID NO: 1075573 - DNA, 25 bp, Homo sapien
catgtgcaaactggagatggtgaca

SEQ ID NO: 1075574 - DNA, 25 bp, Homo sapien
caaccccagcttccttgaagtgttt

SEQ ID NO: 1075575 - DNA, 25 bp, Homo sapien
cgctcatcaaccccagcttccttga

SEQ ID NO: 1075576 - DNA, 25 bp, Homo sapien
gctcatcaaccccagcttccttgaa

SEQ ID NO: 1075577 - DNA, 25 bp, Homo sapien
catcaaccccagcttccttgaagtg

SEQ ID NO: 1075578 - DNA, 25 bp, Homo sapien
tagatgaggagactaacatgctccg

SEQ ID NO: 1075579 - DNA, 25 bp, Homo sapien
taacatgctccgagaagcactctgc

SEQ ID NO: 1075580 - DNA, 25 bp, Homo sapien
ttatacccgattctcatctccatgc

SEQ ID NO: 1075581 - DNA, 25 bp, Homo sapien
agtggcagagccagattatacccga

SEQ ID NO: 1075582 - DNA, 25 bp, Homo sapien
ttttcccatgactgcccttagggtg

SEQ ID NO: 1075583 - DNA, 25 bp, Homo sapien
ccttgacttttctccggacgatgcc

SEQ ID NO: 1075584 - DNA, 25 bp, Homo sapien
ggacgatgccttcccgttgcctttc

SEQ ID NO: 1075585 - DNA, 25 bp, Homo sapien
ttgaggttcctcaccaccactctga

SEQ ID NO: 1075586 - DNA, 25 bp, Homo sapien
cctaagaataaggaacataatagta

SEQ ID NO: 1075587 - DNA, 25 bp, Homo sapien
tcctaagaataaggaacataatagt

SEQ ID NO: 1075588 - DNA, 25 bp, Homo sapien
ctaagaataaggaacataatagtat

SEQ ID NO: 1075589 - DNA, 25 bp, Homo sapien
tcctttgattccttagcttcctcgt

SEQ ID NO: 1075590 - DNA, 25 bp, Homo sapien
ctaaaccaggcccagaagaagagaa

SEQ ID NO: 1075591 - DNA, 25 bp, Homo sapien
tgattccttagcttcctcgtcctaa

SEQ ID NO: 1075592 - DNA, 25 bp, Homo sapien
tcctaaaccaggcccagaagaagag

SEQ ID NO: 1075593 - DNA, 25 bp, Homo sapien
taacttgggctttgccataccatgg

SEQ ID NO: 1075594 - DNA, 25 bp, Homo sapien
tgatcaatcagtcacagagcctaga

SEQ ID NO: 1075595 - DNA, 25 bp, Homo sapien
gaatacagctcatctctgcgccaca

SEQ ID NO: 1075596 - DNA, 25 bp, Homo sapien
ggtggctgcgttcctagagcaagtt

SEQ ID NO: 1075597 - DNA, 25 bp, Homo sapien
cagataggtgtagatatgcggtgtt

SEQ ID NO: 1075598 - DNA, 25 bp, Homo sapien
gatcagataggtgtagatatgcggt

SEQ ID NO: 1075599 - DNA, 25 bp, Homo sapien
taggtgtagatatgcggtgttattt

SEQ ID NO: 1075600 - DNA, 25 bp, Homo sapien
ataggtgtagatatgcggtgttatt

SEQ ID NO: 1075601 - DNA, 25 bp, Homo sapien
agcttccttctttgtcttcagtgcc

SEQ ID NO: 1075602 - DNA, 25 bp, Homo sapien
ggctttggctttgggagggacagga

SEQ ID NO: 1075603 - DNA, 25 bp, Homo sapien
ttggccctcaaaggccttgctttgg

SEQ ID NO: 1075604 - DNA, 25 bp, Homo sapien
tctttttggccctcaaaggccttgc

SEQ ID NO: 1075605 - DNA, 25 bp, Homo sapien
ccaggttggtgacatgtacatttgt

SEQ ID NO: 1075606 - DNA, 25 bp, Homo sapien
ggctgccaggttggtgacatgtaca

SEQ ID NO: 1075607 - DNA, 25 bp, Homo sapien
gcctccagagctgtagtgtcttggg

SEQ ID NO: 1075608 - DNA, 25 bp, Homo sapien
ctgtagtgtcttgggctgccaggtt

SEQ ID NO: 1075609 - DNA, 25 bp, Homo sapien
tgttgattttgacatccacaagtgt

SEQ ID NO: 1075610 - DNA, 25 bp, Homo sapien
atctggtacttgttgattttgacat

SEQ ID NO: 1075611 - DNA, 25 bp, Homo sapien
aatggcatagcggtcacgcttattt

SEQ ID NO: 1075612 - DNA, 25 bp, Homo sapien
ggacttaataatggcatagcggtca

SEQ ID NO: 1075613 - DNA, 25 bp, Homo sapien
cacgctcacggataggatgaatcaa

SEQ ID NO: 1075614 - DNA, 25 bp, Homo sapien
ccacgctcacggataggatgaatca

SEQ ID NO: 1075615 - DNA, 25 bp, Homo sapien
aaaattcctaaaacacgatgataat

SEQ ID NO: 1075616 - DNA, 25 bp, Homo sapien
tagccttaaatatttaacatcagta

SEQ ID NO: 1075617 - DNA, 25 bp, Homo sapien
ctaaatagctcttagttgaacaggg

SEQ ID NO: 1075618 - DNA, 25 bp, Homo sapien
taaacatcatacatcagaattttga

SEQ ID NO: 1075619 - DNA, 25 bp, Homo sapien
tctcagatttccatctgtgagctgg

SEQ ID NO: 1075620 - DNA, 25 bp, Homo sapien
ccattctcagatttccatctgtgag

SEQ ID NO: 1075621 - DNA, 25 bp, Homo sapien
tcagatttccatctgtgagctggga

SEQ ID NO: 1075622 - DNA, 25 bp, Homo sapien
agatttccatctgtgagctgggaga

SEQ ID NO: 1075623 - DNA, 25 bp, Homo sapien
cacagaatgctaacagggaccttca

SEQ ID NO: 1075624 - DNA, 25 bp, Homo sapien
agaatgctaacagggaccttcaggg

SEQ ID NO: 1075625 - DNA, 25 bp, Homo sapien
ctggggcacagaatgctaacaggga

SEQ ID NO: 1075626 - DNA, 25 bp, Homo sapien
gggcacagaatgctaacagggacct

SEQ ID NO: 1075627 - DNA, 25 bp, Homo sapien
ttagaagatgctccataaaaattgt

SEQ ID NO: 1075628 - DNA, 25 bp, Homo sapien
cagatctcttagaagatgctccata

SEQ ID NO: 1075629 - DNA, 25 bp, Homo sapien
taatgaggagttatacttatttgga

SEQ ID NO: 1075630 - DNA, 25 bp, Homo sapien
cttaatgaggagttatacttatttg

SEQ ID NO: 1075631 - DNA, 25 bp, Homo sapien
aaacaatgtcggcaaacaaaagatc

SEQ ID NO: 1075632 - DNA, 25 bp, Homo sapien
caaacaatgtcggcaaacaaaagat

SEQ ID NO: 1075633 - DNA, 25 bp, Homo sapien
aacaatgtcggcaaacaaaagatcc

SEQ ID NO: 1075634 - DNA, 25 bp, Homo sapien
gttcctggacacatttggttataag

SEQ ID NO: 1075635 - DNA, 25 bp, Homo sapien
cccgataatttgacgagcccgtttg

SEQ ID NO: 1075636 - DNA, 25 bp, Homo sapien
gcccgtttggaacctcttccagtga

SEQ ID NO: 1075637 - DNA, 25 bp, Homo sapien
gatccgaagcgaatctctttaaagg

SEQ ID NO: 1075638 - DNA, 25 bp, Homo sapien
gtctgcgcgggtcagtcggtcccct

SEQ ID NO: 1075639 - DNA, 25 bp, Homo sapien
tccggcgccagaggtgggaatgcct

SEQ ID NO: 1075640 - DNA, 25 bp, Homo sapien
gtccgtataggtcgccgtgtctggc

SEQ ID NO: 1075641 - DNA, 25 bp, Homo sapien
tcgcggccctgacgccgccaggact

SEQ ID NO: 1075642 - DNA, 25 bp, Homo sapien
tgggccctttctcggccgtgtcagc

SEQ ID NO: 1075643 - DNA, 25 bp, Homo sapien
ggctgggccctttctcggccgtgtc

SEQ ID NO: 1075644 - DNA, 25 bp, Homo sapien
tttctcggccgtgtcagcccggccc

SEQ ID NO: 1075645 - DNA, 25 bp, Homo sapien
ctttctcggccgtgtcagcccggcc

SEQ ID NO: 1075646 - DNA, 25 bp, Homo sapien
ggtggctgtgcgaagtaactcgccc

SEQ ID NO: 1075647 - DNA, 25 bp, Homo sapien
ggctactggcgtcctcgagattcga

SEQ ID NO: 1075648 - DNA, 25 bp, Homo sapien
cagttttcccatctacaggacgcag

SEQ ID NO: 1075649 - DNA, 25 bp, Homo sapien
tgctatcgtgttggagaagaggccc

SEQ ID NO: 1075650 - DNA, 25 bp, Homo sapien
tagctcagtgggtattggaatgtct

SEQ ID NO: 1075651 - DNA, 25 bp, Homo sapien
gacttgtgggataacagagctctga

SEQ ID NO: 1075652 - DNA, 25 bp, Homo sapien
ccttgtgcggctggtagacacagac

SEQ ID NO: 1075653 - DNA, 25 bp, Homo sapien
cacaagctggaaagttagatggcac

SEQ ID NO: 1075654 - DNA, 25 bp, Homo sapien
tgcattctaccagtgagaagcaagt

SEQ ID NO: 1075655 - DNA, 25 bp, Homo sapien
cccaccactcaaacagaaggaatta

SEQ ID NO: 1075656 - DNA, 25 bp, Homo sapien
ggtgggatggtgagcaacttcccca

SEQ ID NO: 1075657 - DNA, 25 bp, Homo sapien
cataatatacccatgtcatcgctga

SEQ ID NO: 1075658 - DNA, 25 bp, Homo sapien
caaagcctgatagtcagagagccgg

SEQ ID NO: 1075659 - DNA, 25 bp, Homo sapien
ggtggtgtagatttcagctcaggtc

SEQ ID NO: 1075660 - DNA, 25 bp, Homo sapien
gcccaaagtatagtccaaagcctga

SEQ ID NO: 1075661 - DNA, 25 bp, Homo sapien
gctgtctgccaggtaagagacccag

SEQ ID NO: 1075662 - DNA, 25 bp, Homo sapien
gcttaatagagtgagccctggactt

SEQ ID NO: 1075663 - DNA, 25 bp, Homo sapien
caaaagagggcttagggccttctgt

SEQ ID NO: 1075664 - DNA, 25 bp, Homo sapien
ccctggacttggagctggacagttc

SEQ ID NO: 1075665 - DNA, 25 bp, Homo sapien
tagggactcattcctcatggagtgg

SEQ ID NO: 1075666 - DNA, 25 bp, Homo sapien
tcttaggtcgttggaagcagaaact

SEQ ID NO: 1075667 - DNA, 25 bp, Homo sapien
caaaatagtgactggaaaatccact

SEQ ID NO: 1075668 - DNA, 25 bp, Homo sapien
ggttagactcccattcattcgtgca

SEQ ID NO: 1075669 - DNA, 25 bp, Homo sapien
atccacttctggttagactcccatt

SEQ ID NO: 1075670 - DNA, 25 bp, Homo sapien
gactaaagccatcaacaaaattccc

SEQ ID NO: 1075671 - DNA, 25 bp, Homo sapien
ttatgaagacaatacacccttgagg

SEQ ID NO: 1075672 - DNA, 25 bp, Homo sapien
tgtagctggtcttttaggagggaat

SEQ ID NO: 1075673 - DNA, 25 bp, Homo sapien
aggagggaatagactaaagccatca

SEQ ID NO: 1075674 - DNA, 25 bp, Homo sapien
gagttaatggcagagttgaagcttc

SEQ ID NO: 1075675 - DNA, 25 bp, Homo sapien
gctgcttgtattcagaactggctca

SEQ ID NO: 1075676 - DNA, 25 bp, Homo sapien
catatggcaaataggattgttggtc

SEQ ID NO: 1075677 - DNA, 25 bp, Homo sapien
gaagcagctgaactgttaactgctg

SEQ ID NO: 1075678 - DNA, 25 bp, Homo sapien
aaagggcctgggaactagtgattgc

SEQ ID NO: 1075679 - DNA, 25 bp, Homo sapien
taagttgccagactctatgggttct

SEQ ID NO: 1075680 - DNA, 25 bp, Homo sapien
tcaagcaggacaagggtaggctgca

SEQ ID NO: 1075681 - DNA, 25 bp, Homo sapien
caaaagacctggttcgaagccagcc

SEQ ID NO: 1075682 - DNA, 25 bp, Homo sapien
ttctcaacaacatttgatattatcg

SEQ ID NO: 1075683 - DNA, 25 bp, Homo sapien
ttctcattctcaacaacatttgata

SEQ ID NO: 1075684 - DNA, 25 bp, Homo sapien
caacatttgatattatcggttttct

SEQ ID NO: 1075685 - DNA, 25 bp, Homo sapien
aaattactatccctttagccattct

SEQ ID NO: 1075686 - DNA, 25 bp, Homo sapien
gttacttctaccacatgggtctgaa

SEQ ID NO: 1075687 - DNA, 25 bp, Homo sapien
acttctaccacatgggtctgaatcc

SEQ ID NO: 1075688 - DNA, 25 bp, Homo sapien
tctgaatccctctcacccgctccga

SEQ ID NO: 1075689 - DNA, 25 bp, Homo sapien
gaatccctctcacccgctccgacat

SEQ ID NO: 1075690 - DNA, 25 bp, Homo sapien
agcttgccacaggaacggatgggaa

SEQ ID NO: 1075691 - DNA, 25 bp, Homo sapien
ttgccacaccgaaggccccataagg

SEQ ID NO: 1075692 - DNA, 25 bp, Homo sapien
gggaagaagagcttgccacaggaac

SEQ ID NO: 1075693 - DNA, 25 bp, Homo sapien
ggccccataaggctctgagcaggca

SEQ ID NO: 1075694 - DNA, 25 bp, Homo sapien
gcaaacagattgggaacaatcttgg

SEQ ID NO: 1075695 - DNA, 25 bp, Homo sapien
tagcaaacagattgggaacaatctt

SEQ ID NO: 1075696 - DNA, 25 bp, Homo sapien
agcaaacagattgggaacaatcttg

SEQ ID NO: 1075697 - DNA, 25 bp, Homo sapien
atagcaaacagattgggaacaatct

SEQ ID NO: 1075698 - DNA, 25 bp, Homo sapien
gctagggggcggagccctaacactc

SEQ ID NO: 1075699 - DNA, 25 bp, Homo sapien
cgcagcccctgcaagcaacagcgcc

SEQ ID NO: 1075700 - DNA, 25 bp, Homo sapien
caacagcgccgcctacggagcaggg

SEQ ID NO: 1075701 - DNA, 25 bp, Homo sapien
cgggctgggagaccgggcgctgagc

SEQ ID NO: 1075702 - DNA, 25 bp, Homo sapien
gaggcttcgcggagggtgggcgggc

SEQ ID NO: 1075703 - DNA, 25 bp, Homo sapien
agggaggcttcgcggagggtgggcg

SEQ ID NO: 1075704 - DNA, 25 bp, Homo sapien
gcttcgcggagggtgggcgggcggc

SEQ ID NO: 1075705 - DNA, 25 bp, Homo sapien
gagggaggcttcgcggagggtgggc

SEQ ID NO: 1075706 - DNA, 25 bp, Homo sapien
acctgatgcgctcgcagcttcgcag

SEQ ID NO: 1075707 - DNA, 25 bp, Homo sapien
agtccgggtccacgtccacctgatg

SEQ ID NO: 1075708 - DNA, 25 bp, Homo sapien
gagagctcttcgctttccgcagcgg

SEQ ID NO: 1075709 - DNA, 25 bp, Homo sapien
ggcacgtaacggaccatccagtcgt

SEQ ID NO: 1075710 - DNA, 25 bp, Homo sapien
ctggaagccccagtcggcgtcccca

SEQ ID NO: 1075711 - DNA, 25 bp, Homo sapien
ggaagccccagtcggcgtccccagc

SEQ ID NO: 1075712 - DNA, 25 bp, Homo sapien
tggaagccccagtcggcgtccccag

SEQ ID NO: 1075713 - DNA, 25 bp, Homo sapien
aaagccggcattggccccaagtcat

SEQ ID NO: 1075714 - DNA, 25 bp, Homo sapien
tccaggaagcgcaatgatagagatt

SEQ ID NO: 1075715 - DNA, 25 bp, Homo sapien
tagagatttgggagggaaagccggc

SEQ ID NO: 1075716 - DNA, 25 bp, Homo sapien
tattccagcgctctaagaagggtgc

SEQ ID NO: 1075717 - DNA, 25 bp, Homo sapien
tccaggaataagtggggaagtaggc

SEQ ID NO: 1075718 - DNA, 25 bp, Homo sapien
tgggagctgggacggctctttcacc

SEQ ID NO: 1075719 - DNA, 25 bp, Homo sapien
gctgggacggctctttcaccaggcc

SEQ ID NO: 1075720 - DNA, 25 bp, Homo sapien
gcctctggaggaaacgactgggaat

SEQ ID NO: 1075721 - DNA, 25 bp, Homo sapien
tcagcatagtctgggtgtccccaag

SEQ ID NO: 1075722 - DNA, 25 bp, Homo sapien
taggaggctctacctggatattcag

SEQ ID NO: 1075723 - DNA, 25 bp, Homo sapien
gaagttcccatccagagtgctcctt

SEQ ID NO: 1075724 - DNA, 25 bp, Homo sapien
tgtgaccacagggataaggctaagc

SEQ ID NO: 1075725 - DNA, 25 bp, Homo sapien
tggcacgggctcgtgcccaggaggc

SEQ ID NO: 1075726 - DNA, 25 bp, Homo sapien
ccgggcgtgccagcaactgtgccag

SEQ ID NO: 1075727 - DNA, 25 bp, Homo sapien
cagcgctcgtgggtgggtgtgagca

SEQ ID NO: 1075728 - DNA, 25 bp, Homo sapien
tggtcgtgggagtctgccgggcgtg

SEQ ID NO: 1075729 - DNA, 25 bp, Homo sapien
gcccgccatcgtcccgctggagcgg

SEQ ID NO: 1075730 - DNA, 25 bp, Homo sapien
cctggcacggcgctgcccgccatcg

SEQ ID NO: 1075731 - DNA, 25 bp, Homo sapien
ccgctggagcggcgccaggtggcag

SEQ ID NO: 1075732 - DNA, 25 bp, Homo sapien
gctgcccgccatcgtcccgctggag

SEQ ID NO: 1075733 - DNA, 25 bp, Homo sapien
tgggtggcgatgagggtctgatggg

SEQ ID NO: 1075734 - DNA, 25 bp, Homo sapien
ctgggtggcgatgagggtctgatgg

SEQ ID NO: 1075735 - DNA, 25 bp, Homo sapien
aattcccaggtccactacttcacag

SEQ ID NO: 1075736 - DNA, 25 bp, Homo sapien
tacttcacaggtagcgacctcaggg

SEQ ID NO: 1075737 - DNA, 25 bp, Homo sapien
atggaacagaaaaagctcgagcttg

SEQ ID NO: 1075738 - DNA, 25 bp, Homo sapien
tcagggaaagtcacttccccacctg

SEQ ID NO: 1075739 - DNA, 25 bp, Homo sapien
tggactagaaaaccctgtgtgatgc

SEQ ID NO: 1075740 - DNA, 25 bp, Homo sapien
tcctaaaagctttaagactcaccta

SEQ ID NO: 1075741 - DNA, 25 bp, Homo sapien
taagtcctaaaagctttaagactca

SEQ ID NO: 1075742 - DNA, 25 bp, Homo sapien
tgacaccaaagggctggactagaaa

SEQ ID NO: 1075743 - DNA, 25 bp, Homo sapien
aggaagaggggcgtagcctcaacct

SEQ ID NO: 1075744 - DNA, 25 bp, Homo sapien
ctgcatggggttcagaactctggag

SEQ ID NO: 1075745 - DNA, 25 bp, Homo sapien
tgactgcatggggttcagaactctg

SEQ ID NO: 1075746 - DNA, 25 bp, Homo sapien
cctgcttggagtagaagctggtcca

SEQ ID NO: 1075747 - DNA, 25 bp, Homo sapien
aagccatggggtggctgcatgatgc

SEQ ID NO: 1075748 - DNA, 25 bp, Homo sapien
catggggtggctgcatgatgctgac

SEQ ID NO: 1075749 - DNA, 25 bp, Homo sapien
gccatggggtggctgcatgatgctg

SEQ ID NO: 1075750 - DNA, 25 bp, Homo sapien
ctaagccatggggtggctgcatgat

SEQ ID NO: 1075751 - DNA, 25 bp, Homo sapien
aaatgaacaagtgatcagagtaagc

SEQ ID NO: 1075752 - DNA, 25 bp, Homo sapien
ctggaaaatgaacaagtgatcagag

SEQ ID NO: 1075753 - DNA, 25 bp, Homo sapien
aatgaacaagtgatcagagtaagcc

SEQ ID NO: 1075754 - DNA, 25 bp, Homo sapien
ggaaaatgaacaagtgatcagagta

SEQ ID NO: 1075755 - DNA, 25 bp, Homo sapien
acatgttggagcactcaaatgtcca

SEQ ID NO: 1075756 - DNA, 25 bp, Homo sapien
cctagagactgagaggtccttgcag

SEQ ID NO: 1075757 - DNA, 25 bp, Homo sapien
gcaggacatgttggagcactcaaat

SEQ ID NO: 1075758 - DNA, 25 bp, Homo sapien
tgagaggtccttgcaggacatgttg

SEQ ID NO: 1075759 - DNA, 25 bp, Homo sapien
cagctctggggagggcccagcagct

SEQ ID NO: 1075760 - DNA, 25 bp, Homo sapien
gctctggggagggcccagcagctgt

SEQ ID NO: 1075761 - DNA, 25 bp, Homo sapien
gcagctgtgccccagccctgcaggc

SEQ ID NO: 1075762 - DNA, 25 bp, Homo sapien
tgtgccccagccctgcaggctggct

SEQ ID NO: 1075763 - DNA, 25 bp, Homo sapien
caaaagatgtgacctggatgatgcc

SEQ ID NO: 1075764 - DNA, 25 bp, Homo sapien
agacaccctgagagtcacttgccct

SEQ ID NO: 1075765 - DNA, 25 bp, Homo sapien
ctggcaaaagatgtgacctggatga

SEQ ID NO: 1075766 - DNA, 25 bp, Homo sapien
catgtgcaaatcctcggcactaggg

SEQ ID NO: 1075767 - DNA, 25 bp, Homo sapien
atagctcatggtacccttgacctcc

SEQ ID NO: 1075768 - DNA, 25 bp, Homo sapien
ttatagctcatggtacccttgacct

SEQ ID NO: 1075769 - DNA, 25 bp, Homo sapien
tatagctcatggtacccttgacctc

SEQ ID NO: 1075770 - DNA, 25 bp, Homo sapien
attatagctcatggtacccttgacc

SEQ ID NO: 1075771 - DNA, 25 bp, Homo sapien
ccaaaggagagtgtagagaaaagag

SEQ ID NO: 1075772 - DNA, 25 bp, Homo sapien
atgcctccagccagggcctgccaga

SEQ ID NO: 1075773 - DNA, 25 bp, Homo sapien
tgcctccagccagggcctgccagat

SEQ ID NO: 1075774 - DNA, 25 bp, Homo sapien
tatgcctccagccagggcctgccag

SEQ ID NO: 1075775 - DNA, 25 bp, Homo sapien
cttatgcctccagccagggcctgcc

SEQ ID NO: 1075776 - DNA, 25 bp, Homo sapien
agcttcattctccaacagctcaacc

SEQ ID NO: 1075777 - DNA, 25 bp, Homo sapien
tcttctcccaacacagcttcattct

SEQ ID NO: 1075778 - DNA, 25 bp, Homo sapien
ctccaacagctcaacctcatctaat

SEQ ID NO: 1075779 - DNA, 25 bp, Homo sapien
ttcttctcccaacacagcttcattc

SEQ ID NO: 1075780 - DNA, 25 bp, Homo sapien
cagcacaacctcgttgatcttccgg

SEQ ID NO: 1075781 - DNA, 25 bp, Homo sapien
cctgacagcacaacctcgttgatct

SEQ ID NO: 1075782 - DNA, 25 bp, Homo sapien
caacctcgttgatcttccggtacaa

SEQ ID NO: 1075783 - DNA, 25 bp, Homo sapien
ctcgttgatcttccggtacaacctc

SEQ ID NO: 1075784 - DNA, 25 bp, Homo sapien
gacagggtctgatccatttggtggt

SEQ ID NO: 1075785 - DNA, 25 bp, Homo sapien
taacctcgtcgttgctgatggtgcc

SEQ ID NO: 1075786 - DNA, 25 bp, Homo sapien
ggtggcagctcatctatccagcagg

SEQ ID NO: 1075787 - DNA, 25 bp, Homo sapien
ctgggccagaagacgctccaggagc

SEQ ID NO: 1075788 - DNA, 25 bp, Homo sapien
agagacttggataacccagggctgg

SEQ ID NO: 1075789 - DNA, 25 bp, Homo sapien
agagagacttggataacccagggct

SEQ ID NO: 1075790 - DNA, 25 bp, Homo sapien
gagagacttggataacccagggctg

SEQ ID NO: 1075791 - DNA, 25 bp, Homo sapien
cagagagacttggataacccagggc

SEQ ID NO: 1075792 - DNA, 25 bp, Homo sapien
tgattcagggcccgagggagaccat

SEQ ID NO: 1075793 - DNA, 25 bp, Homo sapien
ctgattcagggcccgagggagacca

SEQ ID NO: 1075794 - DNA, 25 bp, Homo sapien
agctccaggcactgatctgactcct

SEQ ID NO: 1075795 - DNA, 25 bp, Homo sapien
gctccaggcactgatctgactcctc

SEQ ID NO: 1075796 - DNA, 25 bp, Homo sapien
cactgcctgcttttgccaggcctgt

SEQ ID NO: 1075797 - DNA, 25 bp, Homo sapien
taattctgctgtgccagtctccagt

SEQ ID NO: 1075798 - DNA, 25 bp, Homo sapien
tgctgtgccagtctccagtgctccc

SEQ ID NO: 1075799 - DNA, 25 bp, Homo sapien
catctctccatacatcctcttttta

SEQ ID NO: 1075800 - DNA, 25 bp, Homo sapien
tttaatttcgtgtctttaaaatgca

SEQ ID NO: 1075801 - DNA, 25 bp, Homo sapien
ttaatttcgtgtctttaaaatgcaa

SEQ ID NO: 1075802 - DNA, 25 bp, Homo sapien
tacatgagcggcgatgatggcgcca

SEQ ID NO: 1075803 - DNA, 25 bp, Homo sapien
cccttgatgcgcaggaacttggccc

SEQ ID NO: 1075804 - DNA, 25 bp, Homo sapien
aagtcggcccaagcctcgtagtcgt

SEQ ID NO: 1075805 - DNA, 25 bp, Homo sapien
ttctgcacgcggatgaaacgggtgt

SEQ ID NO: 1075806 - DNA, 25 bp, Homo sapien
cggacagcgcgagcccagcgccggc

SEQ ID NO: 1075807 - DNA, 25 bp, Homo sapien
acagcgcgagcccagcgccggcgac

SEQ ID NO: 1075808 - DNA, 25 bp, Homo sapien
ccggacagcgcgagcccagcgccgg

SEQ ID NO: 1075809 - DNA, 25 bp, Homo sapien
gacagcgcgagcccagcgccggcga

SEQ ID NO: 1075810 - DNA, 25 bp, Homo sapien
gcgtcctgcgcgccgtccagcaggc

SEQ ID NO: 1075811 - DNA, 25 bp, Homo sapien
gcgccgtccagcaggccctcgggca

SEQ ID NO: 1075812 - DNA, 25 bp, Homo sapien
cgtgcaggcccagcgggcctcccag

SEQ ID NO: 1075813 - DNA, 25 bp, Homo sapien
gccgtgcaggcccagcgggcctccc

SEQ ID NO: 1075814 - DNA, 25 bp, Homo sapien
aaggcactgcgcgagggcgcgggcg

SEQ ID NO: 1075815 - DNA, 25 bp, Homo sapien
ggtgggctaaggcactgcgcgaggg

SEQ ID NO: 1075816 - DNA, 25 bp, Homo sapien
cgccgggcagcgtcataaggctgat

SEQ ID NO: 1075817 - DNA, 25 bp, Homo sapien
tcgaggtccaggtcggccgggaagc

SEQ ID NO: 1075818 - DNA, 25 bp, Homo sapien
catgaagtcgttgaggatgatggac

SEQ ID NO: 1075819 - DNA, 25 bp, Homo sapien
cagggccgaatcgaagttgaagtcc

SEQ ID NO: 1075820 - DNA, 25 bp, Homo sapien
gaagttgaagtccatttcgtcgctg

SEQ ID NO: 1075821 - DNA, 25 bp, Homo sapien
gatgatggactccacgtcgcactcg

SEQ ID NO: 1075822 - DNA, 25 bp, Homo sapien
gcagggacccgggaatcaggatggg

SEQ ID NO: 1075823 - DNA, 25 bp, Homo sapien
cggcctccgagaggggtccctagct

SEQ ID NO: 1075824 - DNA, 25 bp, Homo sapien
cgagaggggtccctagctgggctgg

SEQ ID NO: 1075825 - DNA, 25 bp, Homo sapien
ggcagggacccgggaatcaggatgg

SEQ ID NO: 1075826 - DNA, 25 bp, Homo sapien
gctaggcctccgcaaatgaaactga

SEQ ID NO: 1075827 - DNA, 25 bp, Homo sapien
tgtgagttttccgcagagggttgct

SEQ ID NO: 1075828 - DNA, 25 bp, Homo sapien
gaaagtgtgtcaagtgggaatcaga

SEQ ID NO: 1075829 - DNA, 25 bp, Homo sapien
gctggcttcgggtgggtgagactaa

SEQ ID NO: 1075830 - DNA, 25 bp, Homo sapien
acactctgacggcacggccacggta

SEQ ID NO: 1075831 - DNA, 25 bp, Homo sapien
cggccacggtacactgcctacgata

SEQ ID NO: 1075832 - DNA, 25 bp, Homo sapien
tacactgcctacgatacgcgccggg

SEQ ID NO: 1075833 - DNA, 25 bp, Homo sapien
ctacacagcctcgacacggcacaca

SEQ ID NO: 1075834 - DNA, 25 bp, Homo sapien
atgaaaatatgctgtacaatgcact

SEQ ID NO: 1075835 - DNA, 25 bp, Homo sapien
acaattttattcatgaaaatatgct

SEQ ID NO: 1075836 - DNA, 25 bp, Homo sapien
ttcatgaaaatatgctgtacaatgc

SEQ ID NO: 1075837 - DNA, 25 bp, Homo sapien
ttattcatgaaaatatgctgtacaa

SEQ ID NO: 1075838 - DNA, 25 bp, Homo sapien
ccagggagtgggcatagaggggagc

SEQ ID NO: 1075839 - DNA, 25 bp, Homo sapien
cagggagtgggcatagaggggagcg

SEQ ID NO: 1075840 - DNA, 25 bp, Homo sapien
aagtgcctcccttgatgccatcctc

SEQ ID NO: 1075841 - DNA, 25 bp, Homo sapien
tcctggcaccacctcaataatggtg

SEQ ID NO: 1075842 - DNA, 25 bp, Homo sapien
tggcaccacctcaataatggtgact

SEQ ID NO: 1075843 - DNA, 25 bp, Homo sapien
atggggcccaagtgcctcccttgat

SEQ ID NO: 1075844 - DNA, 25 bp, Homo sapien
gacacagcctacagccaggctggtg

SEQ ID NO: 1075845 - DNA, 25 bp, Homo sapien
tggcagaacggaaacttgctgtcag

SEQ ID NO: 1075846 - DNA, 25 bp, Homo sapien
gctggtgggaatccaggatgtcctt

SEQ ID NO: 1075847 - DNA, 25 bp, Homo sapien
atgcaagctggtggcagaacggaaa

SEQ ID NO: 1075848 - DNA, 25 bp, Homo sapien
tgtttgttgtgtgaccagagacctg

SEQ ID NO: 1075849 - DNA, 25 bp, Homo sapien
ggctacattcaggtcgacccctggg

SEQ ID NO: 1075850 - DNA, 25 bp, Homo sapien
tcaatcctggtctccctttgggccg

SEQ ID NO: 1075851 - DNA, 25 bp, Homo sapien
tttgggccggtctatgctcaggttc

SEQ ID NO: 1075852 - DNA, 25 bp, Homo sapien
tccccccatcgccttcgtgccccat

SEQ ID NO: 1075853 - DNA, 25 bp, Homo sapien
ccatccccccatcgccttcgtgccc

SEQ ID NO: 1075854 - DNA, 25 bp, Homo sapien
cccatccccccatcgccttcgtgcc

SEQ ID NO: 1075855 - DNA, 25 bp, Homo sapien
catccccccatcgccttcgtgcccc

SEQ ID NO: 1075856 - DNA, 25 bp, Homo sapien
cagtccaggattgtgctgtttcatt

SEQ ID NO: 1075857 - DNA, 25 bp, Homo sapien
gctttgatcaacaggtcagtccagg

SEQ ID NO: 1075858 - DNA, 25 bp, Homo sapien
gccggagaatggagcctcgtagctt

SEQ ID NO: 1075859 - DNA, 25 bp, Homo sapien
gcagtcttgtctgggtccggatcca

SEQ ID NO: 1075860 - DNA, 25 bp, Homo sapien
gaagtaaggccatcagtcttgagcc

SEQ ID NO: 1075861 - DNA, 25 bp, Homo sapien
tacattacacaacacgggggtgcca

SEQ ID NO: 1075862 - DNA, 25 bp, Homo sapien
caaacgactttacttgctccccaag

SEQ ID NO: 1075863 - DNA, 25 bp, Homo sapien
tagcctgctccaccatacacagtga

SEQ ID NO: 1075864 - DNA, 25 bp, Homo sapien
ggcagaaagatcaaagaggtgccac

SEQ ID NO: 1075865 - DNA, 25 bp, Homo sapien
caaagaggtgccacaaggtgaagta

SEQ ID NO: 1075866 - DNA, 25 bp, Homo sapien
gacagcgcaggcagaaagatcaaag

SEQ ID NO: 1075867 - DNA, 25 bp, Homo sapien
agaggtgccacaaggtgaagtagaa

SEQ ID NO: 1075868 - DNA, 25 bp, Homo sapien
ttccttatacgccttgagtgtcagc

SEQ ID NO: 1075869 - DNA, 25 bp, Homo sapien
ctagtgttccttatacgccttgagt

SEQ ID NO: 1075870 - DNA, 25 bp, Homo sapien
gtgttccttatacgccttgagtgtc

SEQ ID NO: 1075871 - DNA, 25 bp, Homo sapien
ccttatacgccttgagtgtcagctg

SEQ ID NO: 1075872 - DNA, 25 bp, Homo sapien
gtaggtgactgccaggtgctgacat

SEQ ID NO: 1075873 - DNA, 25 bp, Homo sapien
ggggcgtaggtgactgccaggtgct

SEQ ID NO: 1075874 - DNA, 25 bp, Homo sapien
cgtaggtgactgccaggtgctgaca

SEQ ID NO: 1075875 - DNA, 25 bp, Homo sapien
ggcgtaggtgactgccaggtgctga

SEQ ID NO: 1075876 - DNA, 25 bp, Homo sapien
gagtccacagcagtaggcactgcgg

SEQ ID NO: 1075877 - DNA, 25 bp, Homo sapien
tggagtccacagcagtaggcactgc

SEQ ID NO: 1075878 - DNA, 25 bp, Homo sapien
gttggagtccacagcagtaggcact

SEQ ID NO: 1075879 - DNA, 25 bp, Homo sapien
gtccacagcagtaggcactgcggaa

SEQ ID NO: 1075880 - DNA, 25 bp, Homo sapien
gctggatttgtcaaacaattgatta

SEQ ID NO: 1075881 - DNA, 25 bp, Homo sapien
ctgctggatttgtcaaacaattgat

SEQ ID NO: 1075882 - DNA, 25 bp, Homo sapien
tgctggatttgtcaaacaattgatt

SEQ ID NO: 1075883 - DNA, 25 bp, Homo sapien
ctggatttgtcaaacaattgattaa

SEQ ID NO: 1075884 - DNA, 25 bp, Homo sapien
ctgttggcatgagctggcgcctcac

SEQ ID NO: 1075885 - DNA, 25 bp, Homo sapien
ttggcatgagctggcgcctcaccca

SEQ ID NO: 1075886 - DNA, 25 bp, Homo sapien
tgttggcatgagctggcgcctcacc

SEQ ID NO: 1075887 - DNA, 25 bp, Homo sapien
ggcatgagctggcgcctcacccagg

SEQ ID NO: 1075888 - DNA, 25 bp, Homo sapien
accccagcgctggcagccaagcgct

SEQ ID NO: 1075889 - DNA, 25 bp, Homo sapien
caccccagcgctggcagccaagcgc

SEQ ID NO: 1075890 - DNA, 25 bp, Homo sapien
ccccagcgctggcagccaagcgctc

SEQ ID NO: 1075891 - DNA, 25 bp, Homo sapien
ccaccccagcgctggcagccaagcg

SEQ ID NO: 1075892 - DNA, 25 bp, Homo sapien
tcagaagtggtcctccacagatgcc

SEQ ID NO: 1075893 - DNA, 25 bp, Homo sapien
gtcagaagtggtcctccacagatgc

SEQ ID NO: 1075894 - DNA, 25 bp, Homo sapien
tccgttcgcttcatgagacaccagg

SEQ ID NO: 1075895 - DNA, 25 bp, Homo sapien
cagccagcctgatctccgttcgctt

SEQ ID NO: 1075896 - DNA, 25 bp, Homo sapien
cattgtttaggacatggagagcaat

SEQ ID NO: 1075897 - DNA, 25 bp, Homo sapien
caggcattgtttaggacatggagag

SEQ ID NO: 1075898 - DNA, 25 bp, Homo sapien
ggcattgtttaggacatggagagca

SEQ ID NO: 1075899 - DNA, 25 bp, Homo sapien
ccaggcattgtttaggacatggaga

SEQ ID NO: 1075900 - DNA, 25 bp, Homo sapien
caagaaatgcattcgtggatagacc

SEQ ID NO: 1075901 - DNA, 25 bp, Homo sapien
gatagaccatgcgtccttgggcaag

SEQ ID NO: 1075902 - DNA, 25 bp, Homo sapien
ccattttagaggtgggagaaccgag

SEQ ID NO: 1075903 - DNA, 25 bp, Homo sapien
tgaagtcttttgatccccaaacacg

SEQ ID NO: 1075904 - DNA, 25 bp, Homo sapien
ccagtcccattggattaagctccca

SEQ ID NO: 1075905 - DNA, 25 bp, Homo sapien
ggtttgtagacagctattaccttct

SEQ ID NO: 1075906 - DNA, 25 bp, Homo sapien
tcctcttcttgtagggaccccagtc

SEQ ID NO: 1075907 - DNA, 25 bp, Homo sapien
caatcacaatcgcatggcaggttaa

SEQ ID NO: 1075908 - DNA, 25 bp, Homo sapien
cagttgctgattctttgcgagccac

SEQ ID NO: 1075909 - DNA, 25 bp, Homo sapien
gcttgggcggccaggaccactcaga

SEQ ID NO: 1075910 - DNA, 25 bp, Homo sapien
actgcccgtgcggtcgtgtcaggcc

SEQ ID NO: 1075911 - DNA, 25 bp, Homo sapien
gcagggaacaaagcgtcctgcgcat

SEQ ID NO: 1075912 - DNA, 25 bp, Homo sapien
cttgtatgtttcctcccacataggc

SEQ ID NO: 1075913 - DNA, 25 bp, Homo sapien
tctgtgcatacctgccaatgcatgc

SEQ ID NO: 1075914 - DNA, 25 bp, Homo sapien
agcttgtatgtttcctcccacatag

SEQ ID NO: 1075915 - DNA, 25 bp, Homo sapien
gcttgtatgtttcctcccacatagg

SEQ ID NO: 1075916 - DNA, 25 bp, Homo sapien
taccagtacagacacagtttcctca

SEQ ID NO: 1075917 - DNA, 25 bp, Homo sapien
aaggcccaggcactataccagtaca

SEQ ID NO: 1075918 - DNA, 25 bp, Homo sapien
ggcactataccagtacagacacagt

SEQ ID NO: 1075919 - DNA, 25 bp, Homo sapien
ccagtacagacacagtttcctcagt

SEQ ID NO: 1075920 - DNA, 25 bp, Homo sapien
tgatgaagagcagatgtagactcct

SEQ ID NO: 1075921 - DNA, 25 bp, Homo sapien
cttgatgaagagcagatgtagactc

SEQ ID NO: 1075922 - DNA, 25 bp, Homo sapien
ggcttgatgaagagcagatgtagac

SEQ ID NO: 1075923 - DNA, 25 bp, Homo sapien
ctggcttgatgaagagcagatgtag

SEQ ID NO: 1075924 - DNA, 25 bp, Homo sapien
aaggacgagagggttcagaggctgt

SEQ ID NO: 1075925 - DNA, 25 bp, Homo sapien
tgttccaggactcggaaggacgaga

SEQ ID NO: 1075926 - DNA, 25 bp, Homo sapien
cagttttcggacctggaggactcgg

SEQ ID NO: 1075927 - DNA, 25 bp, Homo sapien
ctgtggaggagcaccagttttcgga

SEQ ID NO: 1075928 - DNA, 25 bp, Homo sapien
cacatcacggtttgggagtagctgc

SEQ ID NO: 1075929 - DNA, 25 bp, Homo sapien
cattagactaatgggacagagcacc

SEQ ID NO: 1075930 - DNA, 25 bp, Homo sapien
tcctagaacgctcctgtccacagag

SEQ ID NO: 1075931 - DNA, 25 bp, Homo sapien
gctgggcccaaaggaatatcctgag

SEQ ID NO: 1075932 - DNA, 25 bp, Homo sapien
gacccaccagcagtggaccgtcttg

SEQ ID NO: 1075933 - DNA, 25 bp, Homo sapien
agacactgggagaaattactccata

SEQ ID NO: 1075934 - DNA, 25 bp, Homo sapien
gaccgtcttgcagcctcagaacagg

SEQ ID NO: 1075935 - DNA, 25 bp, Homo sapien
tactccataagtcagccctgccaga

SEQ ID NO: 1075936 - DNA, 25 bp, Homo sapien
cttttgagctgccttgtgactttgg

SEQ ID NO: 1075937 - DNA, 25 bp, Homo sapien
gggtccagtccttgcgtcaccactt

SEQ ID NO: 1075938 - DNA, 25 bp, Homo sapien
gcgtcaccacttttgagctgccttg

SEQ ID NO: 1075939 - DNA, 25 bp, Homo sapien
cagtccttgcgtcaccacttttgag

SEQ ID NO: 1075940 - DNA, 25 bp, Homo sapien
ttcagatagatcaaaaactgtttca

SEQ ID NO: 1075941 - DNA, 25 bp, Homo sapien
cccattcagatagatcaaaaactgt

SEQ ID NO: 1075942 - DNA, 25 bp, Homo sapien
tcaaaaactgtttcacggccttcat

SEQ ID NO: 1075943 - DNA, 25 bp, Homo sapien
gatcaaaaactgtttcacggccttc

SEQ ID NO: 1075944 - DNA, 25 bp, Homo sapien
ggaggagatggtagagagactccat

SEQ ID NO: 1075945 - DNA, 25 bp, Homo sapien
gaaggaggagatggtagagagactc

SEQ ID NO: 1075946 - DNA, 25 bp, Homo sapien
agagaaggaggagatggtagagaga

SEQ ID NO: 1075947 - DNA, 25 bp, Homo sapien
gagagaaggaggagatggtagagag

SEQ ID NO: 1075948 - DNA, 25 bp, Homo sapien
tcctgggaagttcatggtccccttg

SEQ ID NO: 1075949 - DNA, 25 bp, Homo sapien
gggacaagactctcatcaggagaga

SEQ ID NO: 1075950 - DNA, 25 bp, Homo sapien
gttatggattcctccgcaaacctgg

SEQ ID NO: 1075951 - DNA, 25 bp, Homo sapien
ccatcctggcatgagtgtggtcatt

SEQ ID NO: 1075952 - DNA, 25 bp, Homo sapien
ctcttctacttcatcggaatattga

SEQ ID NO: 1075953 - DNA, 25 bp, Homo sapien
tcttctacttcatcggaatattgac

SEQ ID NO: 1075954 - DNA, 25 bp, Homo sapien
taaaagtggaagagtggttcaagct

SEQ ID NO: 1075955 - DNA, 25 bp, Homo sapien
gtattcagtgtcaaagtttggaagc

SEQ ID NO: 1075956 - DNA, 25 bp, Homo sapien
ggaagctgaaatgcttcacattcca

SEQ ID NO: 1075957 - DNA, 25 bp, Homo sapien
cgtgtcatacggatcatgtgtcata

SEQ ID NO: 1075958 - DNA, 25 bp, Homo sapien
cttcatcttcaaagcccaggccagg

SEQ ID NO: 1075959 - DNA, 25 bp, Homo sapien
tgcagggccatttccccttcttcat

SEQ ID NO: 1075960 - DNA, 25 bp, Homo sapien
ctgcagggccatttccccttcttca

SEQ ID NO: 1075961 - DNA, 25 bp, Homo sapien
caaagcccaggccaggcacccccat

SEQ ID NO: 1075962 - DNA, 25 bp, Homo sapien
accactgggtcagctgacctgggtg

SEQ ID NO: 1075963 - DNA, 25 bp, Homo sapien
ctggggtcaccgttgaaacaagatc

SEQ ID NO: 1075964 - DNA, 25 bp, Homo sapien
ccactgggtcagctgacctgggtgc

SEQ ID NO: 1075965 - DNA, 25 bp, Homo sapien
tggggtcaccgttgaaacaagatct

SEQ ID NO: 1075966 - DNA, 25 bp, Homo sapien
taccctggtttgaggtgaggcatct

SEQ ID NO: 1075967 - DNA, 25 bp, Homo sapien
tcttattgggcaggaccgtggccgt

SEQ ID NO: 1075968 - DNA, 25 bp, Homo sapien
ccgtggccgtgtaccctggtttgag

SEQ ID NO: 1075969 - DNA, 25 bp, Homo sapien
tgcaggatgcttcttattgggcagg

SEQ ID NO: 1075970 - DNA, 25 bp, Homo sapien
tccatctcccccagctcatgcctca

SEQ ID NO: 1075971 - DNA, 25 bp, Homo sapien
cccagccaacatccccttcaggcag

SEQ ID NO: 1075972 - DNA, 25 bp, Homo sapien
tcctccccatgccatacccgacctc

SEQ ID NO: 1075973 - DNA, 25 bp, Homo sapien
tactgttctgcacccaggccaactc

SEQ ID NO: 1075974 - DNA, 25 bp, Homo sapien
cccctgtccaccgaagacaagccca

SEQ ID NO: 1075975 - DNA, 25 bp, Homo sapien
aataggacagcggaccgccatgctg

SEQ ID NO: 1075976 - DNA, 25 bp, Homo sapien
cgaataggacagcggaccgccatgc

SEQ ID NO: 1075977 - DNA, 25 bp, Homo sapien
taggacagcggaccgccatgctgac

SEQ ID NO: 1075978 - DNA, 25 bp, Homo sapien
gttgatctccaacccagaactaaag

SEQ ID NO: 1075979 - DNA, 25 bp, Homo sapien
agccgtcttgggtttggctcccaca

SEQ ID NO: 1075980 - DNA, 25 bp, Homo sapien
caatagaatagcgtgggccctgatg

SEQ ID NO: 1075981 - DNA, 25 bp, Homo sapien
gacgttttcccgacagacattcagg

SEQ ID NO: 1075982 - DNA, 25 bp, Homo sapien
cctcagtggaactaggtgggcattg

SEQ ID NO: 1075983 - DNA, 25 bp, Homo sapien
ccctgcatgggaagggttcatcttc

SEQ ID NO: 1075984 - DNA, 25 bp, Homo sapien
gcccttaggcagtcgggtcattgac

SEQ ID NO: 1075985 - DNA, 25 bp, Homo sapien
tccatgaactactaggctgcccagg

SEQ ID NO: 1075986 - DNA, 25 bp, Homo sapien
cccaacccccgccccagcagctctc

SEQ ID NO: 1075987 - DNA, 25 bp, Homo sapien
ccgccccagcagctctcagaacctt

SEQ ID NO: 1075988 - DNA, 25 bp, Homo sapien
aacccccgccccagcagctctcaga

SEQ ID NO: 1075989 - DNA, 25 bp, Homo sapien
ccccagcagctctcagaaccttcat

SEQ ID NO: 1075990 - DNA, 25 bp, Homo sapien
ccggggagatttagaagccttcttg

SEQ ID NO: 1075991 - DNA, 25 bp, Homo sapien
tctggcttctgtgtctacaacccgg

SEQ ID NO: 1075992 - DNA, 25 bp, Homo sapien
ggaagcagctcaggttttgggctcc

SEQ ID NO: 1075993 - DNA, 25 bp, Homo sapien
ggagatttagaagccttcttgcggg

SEQ ID NO: 1075994 - DNA, 25 bp, Homo sapien
caaagggactgagcacactaagagt

SEQ ID NO: 1075995 - DNA, 25 bp, Homo sapien
caggtcctcttgccgtagcaactgg

SEQ ID NO: 1075996 - DNA, 25 bp, Homo sapien
ggtcctcttgccgtagcaactggct

SEQ ID NO: 1075997 - DNA, 25 bp, Homo sapien
actaagagtggacctgccagggttg

SEQ ID NO: 1075998 - DNA, 25 bp, Homo sapien
cccataggtccatgagtttagctac

SEQ ID NO: 1075999 - DNA, 25 bp, Homo sapien
cacacgtactgtcccataggtccat

SEQ ID NO: 1076000 - DNA, 25 bp, Homo sapien
tacttcaggcacaataggtggccac

SEQ ID NO: 1076001 - DNA, 25 bp, Homo sapien
catgagtttagctacttcaggcaca

SEQ ID NO: 1076002 - DNA, 25 bp, Homo sapien
tctgctggcctggattcgattcaag

SEQ ID NO: 1076003 - DNA, 25 bp, Homo sapien
gctggcctggattcgattcaagggc

SEQ ID NO: 1076004 - DNA, 25 bp, Homo sapien
gcattgccctgtcttgtgcagcaga

SEQ ID NO: 1076005 - DNA, 25 bp, Homo sapien
tccaagaggaacaaggcattgccct

SEQ ID NO: 1076006 - DNA, 25 bp, Homo sapien
cgtagggtgagtcctgtagactgcc

SEQ ID NO: 1076007 - DNA, 25 bp, Homo sapien
acccctccacgttgctcgtagggtg

SEQ ID NO: 1076008 - DNA, 25 bp, Homo sapien
tgagtcctgtagactgcctggcctg

SEQ ID NO: 1076009 - DNA, 25 bp, Homo sapien
ctggcctgctctttaaaactcttgc

SEQ ID NO: 1076010 - DNA, 25 bp, Homo sapien
cgaggatgtgagctttggatatcag

SEQ ID NO: 1076011 - DNA, 25 bp, Homo sapien
tgcataaccattgctccatggagag

SEQ ID NO: 1076012 - DNA, 25 bp, Homo sapien
catgcctctgacatcgatgggctca

SEQ ID NO: 1076013 - DNA, 25 bp, Homo sapien
tgtgagtttaggcttgtgctcacct

SEQ ID NO: 1076014 - DNA, 25 bp, Homo sapien
tgtgaattagttgtgctgcttccat

SEQ ID NO: 1076015 - DNA, 25 bp, Homo sapien
tccatctggaaggattgtgaattag

SEQ ID NO: 1076016 - DNA, 25 bp, Homo sapien
ttcctgatcggctgcagagcactct

SEQ ID NO: 1076017 - DNA, 25 bp, Homo sapien
taaccatgatgtcatacatctgtgc

SEQ ID NO: 1076018 - DNA, 25 bp, Homo sapien
gcccgggcccatctgcgaccccggc

SEQ ID NO: 1076019 - DNA, 25 bp, Homo sapien
gcccatctgcgaccccggccgcgaa

SEQ ID NO: 1076020 - DNA, 25 bp, Homo sapien
agccgcgcccgggcccatctgcgac

SEQ ID NO: 1076021 - DNA, 25 bp, Homo sapien
tctgcgaccccggccgcgaaggcat

SEQ ID NO: 1076022 - DNA, 25 bp, Homo sapien
tgctgtggatgcaggcttttgaaag

SEQ ID NO: 1076023 - DNA, 25 bp, Homo sapien
tgtggatgcaggcttttgaaagtag

SEQ ID NO: 1076024 - DNA, 25 bp, Homo sapien
tcccgtattcatctctctcgcccat

SEQ ID NO: 1076025 - DNA, 25 bp, Homo sapien
tcacccctcccgtattcatctctct

SEQ ID NO: 1076026 - DNA, 25 bp, Homo sapien
ggatgaattcttcggggtctgcgct

SEQ ID NO: 1076027 - DNA, 25 bp, Homo sapien
ctgggatgaattcttcggggtctgc

SEQ ID NO: 1076028 - DNA, 25 bp, Homo sapien
aattcttcggggtctgcgctgggag

SEQ ID NO: 1076029 - DNA, 25 bp, Homo sapien
atgaattcttcggggtctgcgctgg

SEQ ID NO: 1076030 - DNA, 25 bp, Homo sapien
gtttggctccaactgtcctgtggtt

SEQ ID NO: 1076031 - DNA, 25 bp, Homo sapien
ccaactgtcctgtggttagagcagc

SEQ ID NO: 1076032 - DNA, 25 bp, Homo sapien
tgtcctgtggttagagcagctagcc

SEQ ID NO: 1076033 - DNA, 25 bp, Homo sapien
ctgtggttagagcagctagccggct

SEQ ID NO: 1076034 - DNA, 25 bp, Homo sapien
tactccaggttccagtcagcaccct

SEQ ID NO: 1076035 - DNA, 25 bp, Homo sapien
tgccctgagaatcccacgtccttga

SEQ ID NO: 1076036 - DNA, 25 bp, Homo sapien
cacgtccttgaaatactccaggttc

SEQ ID NO: 1076037 - DNA, 25 bp, Homo sapien
tgagaatcccacgtccttgaaatac

SEQ ID NO: 1076038 - DNA, 25 bp, Homo sapien
gagatttgatagttacaggccaatg

SEQ ID NO: 1076039 - DNA, 25 bp, Homo sapien
tcagccaacctcacgtcatcggaga

SEQ ID NO: 1076040 - DNA, 25 bp, Homo sapien
gggaagcagacgcatcagccaacct

SEQ ID NO: 1076041 - DNA, 25 bp, Homo sapien
cacgtcatcggagatttgatagtta

SEQ ID NO: 1076042 - DNA, 25 bp, Homo sapien
cagaactgttgttcctgcggactca

SEQ ID NO: 1076043 - DNA, 25 bp, Homo sapien
agaactgttgttcctgcggactcac

SEQ ID NO: 1076044 - DNA, 25 bp, Homo sapien
agactggatagtgcctgctgctgtg

SEQ ID NO: 1076045 - DNA, 25 bp, Homo sapien
tgctcagactggatagtgcctgctg

SEQ ID NO: 1076046 - DNA, 25 bp, Homo sapien
tttctctccaagttgctttgatgtg

SEQ ID NO: 1076047 - DNA, 25 bp, Homo sapien
gtttctctccaagttgctttgatgt

SEQ ID NO: 1076048 - DNA, 25 bp, Homo sapien
ggtccatgtctgtacggctccgtga

SEQ ID NO: 1076049 - DNA, 25 bp, Homo sapien
accaggactaagtcccaggccaagc

SEQ ID NO: 1076050 - DNA, 25 bp, Homo sapien
ggctccgtgagcaccaggactaagt

SEQ ID NO: 1076051 - DNA, 25 bp, Homo sapien
ttagattttcaccccgctttgcagc

SEQ ID NO: 1076052 - DNA, 25 bp, Homo sapien
gtggcccaccaaacacacgggagat

SEQ ID NO: 1076053 - DNA, 25 bp, Homo sapien
gctgctgttgatgttcgtggcccag

SEQ ID NO: 1076054 - DNA, 25 bp, Homo sapien
cacgggagattgcttctctggatgg

SEQ ID NO: 1076055 - DNA, 25 bp, Homo sapien
ttaaaatgtgcctcgtcacccgcca

SEQ ID NO: 1076056 - DNA, 25 bp, Homo sapien
cacctgacatgacccggatgcagct

SEQ ID NO: 1076057 - DNA, 25 bp, Homo sapien
tctctgggcttccacctgacatgac

SEQ ID NO: 1076058 - DNA, 25 bp, Homo sapien
gacatgacccggatgcagctgtcct

SEQ ID NO: 1076059 - DNA, 25 bp, Homo sapien
gggcttccacctgacatgacccgga

SEQ ID NO: 1076060 - DNA, 25 bp, Homo sapien
agaatcttagttcccagtgggccag

SEQ ID NO: 1076061 - DNA, 25 bp, Homo sapien
ctgagctgaacctggctaaagccag

SEQ ID NO: 1076062 - DNA, 25 bp, Homo sapien
atcttagttcccagtgggccagcag

SEQ ID NO: 1076063 - DNA, 25 bp, Homo sapien
tgaacctggctaaagccagcagaat

SEQ ID NO: 1076064 - DNA, 25 bp, Homo sapien
gacacgtcagggagtagggcagccc

SEQ ID NO: 1076065 - DNA, 25 bp, Homo sapien
acacgtcagggagtagggcagcccc

SEQ ID NO: 1076066 - DNA, 25 bp, Homo sapien
ggacacgtcagggagtagggcagcc

SEQ ID NO: 1076067 - DNA, 25 bp, Homo sapien
caggacacgtcagggagtagggcag

SEQ ID NO: 1076068 - DNA, 25 bp, Homo sapien
catcaggtttagcatgccaattatg

SEQ ID NO: 1076069 - DNA, 25 bp, Homo sapien
caggtttagcatgccaattatggaa

SEQ ID NO: 1076070 - DNA, 25 bp, Homo sapien
agctcatcaggtttagcatgccaat

SEQ ID NO: 1076071 - DNA, 25 bp, Homo sapien
agaggtggtgtcctgagctcatcag

SEQ ID NO: 1076072 - DNA, 25 bp, Homo sapien
gcagcttagctgagcagttcttgct

SEQ ID NO: 1076073 - DNA, 25 bp, Homo sapien
tctccataggctgtttgacatggca

SEQ ID NO: 1076074 - DNA, 25 bp, Homo sapien
tctttatgacctagccatggaagtc

SEQ ID NO: 1076075 - DNA, 25 bp, Homo sapien
ttaaagcattagacatttctgtagg

SEQ ID NO: 1076076 - DNA, 25 bp, Homo sapien
ctgtgtaagggagttggtcagccca

SEQ ID NO: 1076077 - DNA, 25 bp, Homo sapien
caggccttgtcctcggggatagagc

SEQ ID NO: 1076078 - DNA, 25 bp, Homo sapien
tggagactgtagcttgaagtgtttg

SEQ ID NO: 1076079 - DNA, 25 bp, Homo sapien
gagcgtcgcggtccaggtgctgtat

SEQ ID NO: 1076080 - DNA, 25 bp, Homo sapien
tgtcactatgtctcagcacagcccc

SEQ ID NO: 1076081 - DNA, 25 bp, Homo sapien
tggacattggctgtcagcactcggg

SEQ ID NO: 1076082 - DNA, 25 bp, Homo sapien
gcacagccccatatggagtgttgcc

SEQ ID NO: 1076083 - DNA, 25 bp, Homo sapien
gtttcagaatccaaggacatcccat

SEQ ID NO: 1076084 - DNA, 25 bp, Homo sapien
ttttcttccctacatctccaagtag

SEQ ID NO: 1076085 - DNA, 25 bp, Homo sapien
ccaagtagaattgatggtctgagaa

SEQ ID NO: 1076086 - DNA, 25 bp, Homo sapien
ggtctgagaagatgccccgctaccc

SEQ ID NO: 1076087 - DNA, 25 bp, Homo sapien
gctaccccatggctccgtgctgagg

SEQ ID NO: 1076088 - DNA, 25 bp, Homo sapien
gtgtctgttccctcctcgcccaatc

SEQ ID NO: 1076089 - DNA, 25 bp, Homo sapien
tcctcgcccaatcacaccaggtttg

SEQ ID NO: 1076090 - DNA, 25 bp, Homo sapien
tccagaacctttgggcttcccagtg

SEQ ID NO: 1076091 - DNA, 25 bp, Homo sapien
gagaaaagcaggcaatgtcattcca

SEQ ID NO: 1076092 - DNA, 25 bp, Homo sapien
aactgctgtcatgggcttgccctga

SEQ ID NO: 1076093 - DNA, 25 bp, Homo sapien
aaactgctgtcatgggcttgccctg

SEQ ID NO: 1076094 - DNA, 25 bp, Homo sapien
actctttgcacccaaaactgctgtc

SEQ ID NO: 1076095 - DNA, 25 bp, Homo sapien
ctttgcacccaaaactgctgtcatg

SEQ ID NO: 1076096 - DNA, 25 bp, Homo sapien
ggcccaagagccacagggacccctc

SEQ ID NO: 1076097 - DNA, 25 bp, Homo sapien
ctgcccttcactggggtcctcagag

SEQ ID NO: 1076098 - DNA, 25 bp, Homo sapien
ccacgtcatcctgcccttcactggg

SEQ ID NO: 1076099 - DNA, 25 bp, Homo sapien
attcaggcttttatcatccacgtca

SEQ ID NO: 1076100 - DNA, 25 bp, Homo sapien
tgaggagctattgcggagcctccgt

SEQ ID NO: 1076101 - DNA, 25 bp, Homo sapien
ggtctaggcccctggttcatctcag

SEQ ID NO: 1076102 - DNA, 25 bp, Homo sapien
agcctccgtgggtgactgccacaga

SEQ ID NO: 1076103 - DNA, 25 bp, Homo sapien
acatcacagtcagagccgcagtctt

SEQ ID NO: 1076104 - DNA, 25 bp, Homo sapien
gactggcaggcctcagtgcctccat

SEQ ID NO: 1076105 - DNA, 25 bp, Homo sapien
agactggcaggcctcagtgcctcca

SEQ ID NO: 1076106 - DNA, 25 bp, Homo sapien
cagactggcaggcctcagtgcctcc

SEQ ID NO: 1076107 - DNA, 25 bp, Homo sapien
ccaggggtggggcatccaacttgaa

SEQ ID NO: 1076108 - DNA, 25 bp, Homo sapien
gcaggtctcagagaggacgagcact

SEQ ID NO: 1076109 - DNA, 25 bp, Homo sapien
agaggacgagcactccctggatggc

SEQ ID NO: 1076110 - DNA, 25 bp, Homo sapien
gcatccaacttgaatggaagcaagc

SEQ ID NO: 1076111 - DNA, 25 bp, Homo sapien
gagccagggagagcgtcactgccat

SEQ ID NO: 1076112 - DNA, 25 bp, Homo sapien
gatgatggccctgagttgtgaagaa

SEQ ID NO: 1076113 - DNA, 25 bp, Homo sapien
ggttggaattcctctcaggagatgg

SEQ ID NO: 1076114 - DNA, 25 bp, Homo sapien
ccctgagttgtgaagaaaggttgga

SEQ ID NO: 1076115 - DNA, 25 bp, Homo sapien
ttgaggtggcatcactcgcggcagc

SEQ ID NO: 1076116 - DNA, 25 bp, Homo sapien
tgcaggtagaggccgctcgtggcaa

SEQ ID NO: 1076117 - DNA, 25 bp, Homo sapien
ggtggcatcactcgcggcagcagct

SEQ ID NO: 1076118 - DNA, 25 bp, Homo sapien
tggcctacttgaggtggcatcactc

SEQ ID NO: 1076119 - DNA, 25 bp, Homo sapien
tgttctctgttgtcactgatctcca

SEQ ID NO: 1076120 - DNA, 25 bp, Homo sapien
tccacatcgggtctgctgaaaccat

SEQ ID NO: 1076121 - DNA, 25 bp, Homo sapien
tgctgaaaccatgccgatggcttct

SEQ ID NO: 1076122 - DNA, 25 bp, Homo sapien
actgatctccacatcgggtctgctg

SEQ ID NO: 1076123 - DNA, 25 bp, Homo sapien
aatgggtgtcacaggctggtctgca

SEQ ID NO: 1076124 - DNA, 25 bp, Homo sapien
ggctggtctgcagcctcatcttcac

SEQ ID NO: 1076125 - DNA, 25 bp, Homo sapien
aggctggtctgcagcctcatcttca

SEQ ID NO: 1076126 - DNA, 25 bp, Homo sapien
ctgaatgggtgtcacaggctggtct

SEQ ID NO: 1076127 - DNA, 25 bp, Homo sapien
ctcaggtctgacttgtctggatttg

SEQ ID NO: 1076128 - DNA, 25 bp, Homo sapien
gctcaggtctgacttgtctggattt

SEQ ID NO: 1076129 - DNA, 25 bp, Homo sapien
tcaggtctgacttgtctggatttgg

SEQ ID NO: 1076130 - DNA, 25 bp, Homo sapien
gtgtacactggtaagatagggaccc

SEQ ID NO: 1076131 - DNA, 25 bp, Homo sapien
tgtgtacactggtaagatagggacc

SEQ ID NO: 1076132 - DNA, 25 bp, Homo sapien
ctggttgtgtacactggtaagatag

SEQ ID NO: 1076133 - DNA, 25 bp, Homo sapien
gttgtgtacactggtaagataggga

SEQ ID NO: 1076134 - DNA, 25 bp, Homo sapien
tccaggtttgaaaaccacagccctg

SEQ ID NO: 1076135 - DNA, 25 bp, Homo sapien
tggcaccctgaagccccgctgctga

SEQ ID NO: 1076136 - DNA, 25 bp, Homo sapien
caggagccctggaacctggtttggt

SEQ ID NO: 1076137 - DNA, 25 bp, Homo sapien
agagtcagctgcatccccaaagatt

SEQ ID NO: 1076138 - DNA, 25 bp, Homo sapien
ccattggtgactctgtactcggttc

SEQ ID NO: 1076139 - DNA, 25 bp, Homo sapien
tgactctgtactcggttcccaggag

SEQ ID NO: 1076140 - DNA, 25 bp, Homo sapien
actctgtactcggttcccaggagaa

SEQ ID NO: 1076141 - DNA, 25 bp, Homo sapien
tggtgactctgtactcggttcccag

SEQ ID NO: 1076142 - DNA, 25 bp, Homo sapien
agccctcgaggggccctgggtgatt

SEQ ID NO: 1076143 - DNA, 25 bp, Homo sapien
ttcagccctcgaggggccctgggtg

SEQ ID NO: 1076144 - DNA, 25 bp, Homo sapien
tcagccctcgaggggccctgggtga

SEQ ID NO: 1076145 - DNA, 25 bp, Homo sapien
ctttctgagcggggttcagccctcg

SEQ ID NO: 1076146 - DNA, 25 bp, Homo sapien
agagcacagggttgtcctgactcac

SEQ ID NO: 1076147 - DNA, 25 bp, Homo sapien
agggttgtcctgactcactgggtac

SEQ ID NO: 1076148 - DNA, 25 bp, Homo sapien
gtccagggaagacagcggtgtccaa

SEQ ID NO: 1076149 - DNA, 25 bp, Homo sapien
cacagggttgtcctgactcactggg

SEQ ID NO: 1076150 - DNA, 25 bp, Homo sapien
ccttgcagcagctgtttccatgctc

SEQ ID NO: 1076151 - DNA, 25 bp, Homo sapien
gctcactggtctccttgcagcagct

SEQ ID NO: 1076152 - DNA, 25 bp, Homo sapien
ttccatgctccttggccttttgtgg

SEQ ID NO: 1076153 - DNA, 25 bp, Homo sapien
ttcctgctcactggtctccttgcag

SEQ ID NO: 1076154 - DNA, 25 bp, Homo sapien
ggaacttgaagcttgcatgggttca

SEQ ID NO: 1076155 - DNA, 25 bp, Homo sapien
aagttcatccacacgagcacagtgc

SEQ ID NO: 1076156 - DNA, 25 bp, Homo sapien
agcttgcatgggttcaagttcatcc

SEQ ID NO: 1076157 - DNA, 25 bp, Homo sapien
gtgccagcctgtgaagtacttactg

SEQ ID NO: 1076158 - DNA, 25 bp, Homo sapien
ccatcttccttgatggtggacactc

SEQ ID NO: 1076159 - DNA, 25 bp, Homo sapien
ctggactgggagacgtgttcagcca

SEQ ID NO: 1076160 - DNA, 25 bp, Homo sapien
ttgaggaggcccttcacggaggatg

SEQ ID NO: 1076161 - DNA, 25 bp, Homo sapien
aggaggcccttcacggaggatgcca

SEQ ID NO: 1076162 - DNA, 25 bp, Homo sapien
tgtcagggccaatcctgttaggaca

SEQ ID NO: 1076163 - DNA, 25 bp, Homo sapien
tcattagtagctggatcagagactg

SEQ ID NO: 1076164 - DNA, 25 bp, Homo sapien
taaagacattgcaagactttttcgc

SEQ ID NO: 1076165 - DNA, 25 bp, Homo sapien
gacaggaatcaaggcttctgtggcc

SEQ ID NO: 1076166 - DNA, 25 bp, Homo sapien
gacataaacctgctagaggtgatga

SEQ ID NO: 1076167 - DNA, 25 bp, Homo sapien
taggacataaacctgctagaggtga

SEQ ID NO: 1076168 - DNA, 25 bp, Homo sapien
ttaggacataaacctgctagaggtg

SEQ ID NO: 1076169 - DNA, 25 bp, Homo sapien
gctagaggtgatgaacaggtttggc

SEQ ID NO: 1076170 - DNA, 25 bp, Homo sapien
tgacttcctgacctattcccatgca

SEQ ID NO: 1076171 - DNA, 25 bp, Homo sapien
ttgacttcctgacctattcccatgc

SEQ ID NO: 1076172 - DNA, 25 bp, Homo sapien
gacatgtcgtttggatatttctctc

SEQ ID NO: 1076173 - DNA, 25 bp, Homo sapien
tgcacccacatgcatctggtgtgtg

SEQ ID NO: 1076174 - DNA, 25 bp, Homo sapien
ttctcttcatcagatggacatgtcg

SEQ ID NO: 1076175 - DNA, 25 bp, Homo sapien
tgtgcatgtacactgttctcttcat

SEQ ID NO: 1076176 - DNA, 25 bp, Homo sapien
tccccgtggtgctccaagctcagtg

SEQ ID NO: 1076177 - DNA, 25 bp, Homo sapien
tgggcggccccaagtgagtcacata

SEQ ID NO: 1076178 - DNA, 25 bp, Homo sapien
agcacagcacgatggttcaggacag

SEQ ID NO: 1076179 - DNA, 25 bp, Homo sapien
gatgtggtagcatttgcctaacagc

SEQ ID NO: 1076180 - DNA, 25 bp, Homo sapien
gaagatctgtcctctatggctagca

SEQ ID NO: 1076181 - DNA, 25 bp, Homo sapien
tctccctttggcgtagaagatctgt

SEQ ID NO: 1076182 - DNA, 25 bp, Homo sapien
acagagatttctatccactgtggtc

SEQ ID NO: 1076183 - DNA, 25 bp, Homo sapien
tgtcctctatggctagcagccaaga

SEQ ID NO: 1076184 - DNA, 25 bp, Homo sapien
ctgtttcaggaagaataccctgatt

SEQ ID NO: 1076185 - DNA, 25 bp, Homo sapien
gaagaataccctgattatggccgtc

SEQ ID NO: 1076186 - DNA, 25 bp, Homo sapien
tcaggaagaataccctgattatggc

SEQ ID NO: 1076187 - DNA, 25 bp, Homo sapien
taccctgattatggccgtcagcagc

SEQ ID NO: 1076188 - DNA, 25 bp, Homo sapien
gaagaggtgtcaccaagccagccaa

SEQ ID NO: 1076189 - DNA, 25 bp, Homo sapien
tctagaactaggcataagagggtca

SEQ ID NO: 1076190 - DNA, 25 bp, Homo sapien
tgttggtgactatggaaaaggcgat

SEQ ID NO: 1076191 - DNA, 25 bp, Homo sapien
cacttgcaggtgatggtaaattggt

SEQ ID NO: 1076192 - DNA, 25 bp, Homo sapien
tcaggcatcttccctggaacctcta

SEQ ID NO: 1076193 - DNA, 25 bp, Homo sapien
aggcatcttccctggaacctctatg

SEQ ID NO: 1076194 - DNA, 25 bp, Homo sapien
gcatcttccctggaacctctatgat

SEQ ID NO: 1076195 - DNA, 25 bp, Homo sapien
atcttccctggaacctctatgatac

SEQ ID NO: 1076196 - DNA, 25 bp, Homo sapien
gttgcaggggaagcccggcatcatc

SEQ ID NO: 1076197 - DNA, 25 bp, Homo sapien
tactagggtccagagtgactgcttc

SEQ ID NO: 1076198 - DNA, 25 bp, Homo sapien
agctcctttactagggtccagagtg

SEQ ID NO: 1076199 - DNA, 25 bp, Homo sapien
taaactcttaactacaccagctcct

SEQ ID NO: 1076200 - DNA, 25 bp, Homo sapien
gtgtcaatgaagatgtccgtggtct

SEQ ID NO: 1076201 - DNA, 25 bp, Homo sapien
aatgggggtgtcaatgaagatgtcc

SEQ ID NO: 1076202 - DNA, 25 bp, Homo sapien
gaatgggggtgtcaatgaagatgtc

SEQ ID NO: 1076203 - DNA, 25 bp, Homo sapien
ggggtgtcaatgaagatgtccgtgg

SEQ ID NO: 1076204 - DNA, 25 bp, Homo sapien
agggacagtctgcttggattggctg

SEQ ID NO: 1076205 - DNA, 25 bp, Homo sapien
tcttagaagaacactccctctggag

SEQ ID NO: 1076206 - DNA, 25 bp, Homo sapien
tattcacagagcattcggctccgga

SEQ ID NO: 1076207 - DNA, 25 bp, Homo sapien
taagctacatggacgaagtcagcgg

SEQ ID NO: 1076208 - DNA, 25 bp, Homo sapien
cattgaggccctgagcttagataac

SEQ ID NO: 1076209 - DNA, 25 bp, Homo sapien
cctctcagtctggtgtctcggattt

SEQ ID NO: 1076210 - DNA, 25 bp, Homo sapien
actcgtgaactagaatgaggtgacc

SEQ ID NO: 1076211 - DNA, 25 bp, Homo sapien
gtgaccagatggtccagatcaccca

SEQ ID NO: 1076212 - DNA, 25 bp, Homo sapien
ctggatcttgtccagtcgagggaca

SEQ ID NO: 1076213 - DNA, 25 bp, Homo sapien
atgtttgttgtggtaggatttgatc

SEQ ID NO: 1076214 - DNA, 25 bp, Homo sapien
gatttgatctatgaccacgaaggtt

SEQ ID NO: 1076215 - DNA, 25 bp, Homo sapien
ttgtggtaggatttgatctatgacc

SEQ ID NO: 1076216 - DNA, 25 bp, Homo sapien
tgatctatgaccacgaaggttttcc

SEQ ID NO: 1076217 - DNA, 25 bp, Homo sapien
ttaggagtctttgtgctatgctgac

SEQ ID NO: 1076218 - DNA, 25 bp, Homo sapien
cttaggagtctttgtgctatgctga

SEQ ID NO: 1076219 - DNA, 25 bp, Homo sapien
cagttgctggtagcagtcgatgctg

SEQ ID NO: 1076220 - DNA, 25 bp, Homo sapien
cccagcagaagcagatctgaccctg

SEQ ID NO: 1076221 - DNA, 25 bp, Homo sapien
cttacgcagtttactttcagctccc

SEQ ID NO: 1076222 - DNA, 25 bp, Homo sapien
agtttactttcagctccccagcaga

SEQ ID NO: 1076223 - DNA, 25 bp, Homo sapien
gatccagtgagtcccacagggagca

SEQ ID NO: 1076224 - DNA, 25 bp, Homo sapien
gtgaatccttggcaagcagcctgcc

SEQ ID NO: 1076225 - DNA, 25 bp, Homo sapien
cactgagtggggtttccgtttgtct

SEQ ID NO: 1076226 - DNA, 25 bp, Homo sapien
tgtagctgcgtcaggctctgtcatc

SEQ ID NO: 1076227 - DNA, 25 bp, Homo sapien
gatctcagatgtagctgcgtcaggc

SEQ ID NO: 1076228 - DNA, 25 bp, Homo sapien
gctcttctcacactgagtggggttt

SEQ ID NO: 1076229 - DNA, 25 bp, Homo sapien
cagatgaagagaggagcaccgaagg

SEQ ID NO: 1076230 - DNA, 25 bp, Homo sapien
aaggcagatgaagagaggagcaccg

SEQ ID NO: 1076231 - DNA, 25 bp, Homo sapien
gggctgcacgtccactgaaggtggg

SEQ ID NO: 1076232 - DNA, 25 bp, Homo sapien
ggcagatgaagagaggagcaccgaa

SEQ ID NO: 1076233 - DNA, 25 bp, Homo sapien
gaaagcgtttggcagctgccctgct

SEQ ID NO: 1076234 - DNA, 25 bp, Homo sapien
caggaaagcgtttggcagctgccct

SEQ ID NO: 1076235 - DNA, 25 bp, Homo sapien
gcaggaaagcgtttggcagctgccc

SEQ ID NO: 1076236 - DNA, 25 bp, Homo sapien
agggcaggaaagcgtttggcagctg

SEQ ID NO: 1076237 - DNA, 25 bp, Homo sapien
acagagaggccacggtgagggaggt

SEQ ID NO: 1076238 - DNA, 25 bp, Homo sapien
tactgaaacagagaggccacggtga

SEQ ID NO: 1076239 - DNA, 25 bp, Homo sapien
agatactgaaacagagaggccacgg

SEQ ID NO: 1076240 - DNA, 25 bp, Homo sapien
aaacagagaggccacggtgagggag

SEQ ID NO: 1076241 - DNA, 25 bp, Homo sapien
gttccattgaaatacagcaggaccc

SEQ ID NO: 1076242 - DNA, 25 bp, Homo sapien
tatgtgttttagagcaaagtttcgc

SEQ ID NO: 1076243 - DNA, 25 bp, Homo sapien
cttaaaattggtagctaaggccagg

SEQ ID NO: 1076244 - DNA, 25 bp, Homo sapien
gaacccttgcagaatagaacatcct

SEQ ID NO: 1076245 - DNA, 25 bp, Homo sapien
ggtcacaggttctcttttggccctg

SEQ ID NO: 1076246 - DNA, 25 bp, Homo sapien
tctggttctgctgtcaggtgtacca

SEQ ID NO: 1076247 - DNA, 25 bp, Homo sapien
ggtaagccttcagtgaaagttctgg

SEQ ID NO: 1076248 - DNA, 25 bp, Homo sapien
gcattgagggggcaggctcgatcct

SEQ ID NO: 1076249 - DNA, 25 bp, Homo sapien
cctctcttctctctggataggcctt

SEQ ID NO: 1076250 - DNA, 25 bp, Homo sapien
tcagtcactttaggttctatttcct

SEQ ID NO: 1076251 - DNA, 25 bp, Homo sapien
tctctacaaggcctaacacctcagt

SEQ ID NO: 1076252 - DNA, 25 bp, Homo sapien
atatcggccacactcacctgcaaac

SEQ ID NO: 1076253 - DNA, 25 bp, Homo sapien
ctgtcctttgatggtggaatacagg

SEQ ID NO: 1076254 - DNA, 25 bp, Homo sapien
ctagaatgcgtgaatttttgctctt

SEQ ID NO: 1076255 - DNA, 25 bp, Homo sapien
aaaagggctagagtcccccatgctg

SEQ ID NO: 1076256 - DNA, 25 bp, Homo sapien
tggtggaatacaggagagtttaacc

SEQ ID NO: 1076257 - DNA, 25 bp, Homo sapien
catttaaagagagctatgcagtgtc

SEQ ID NO: 1076258 - DNA, 25 bp, Homo sapien
taagaaatatattgaccagccgctc

SEQ ID NO: 1076259 - DNA, 25 bp, Homo sapien
tcacagtgtgaagggtcccagagca

SEQ ID NO: 1076260 - DNA, 25 bp, Homo sapien
caagaggagagccaacgttcaacat

SEQ ID NO: 1076261 - DNA, 25 bp, Homo sapien
gctgcctttcttggaggcacagctg

SEQ ID NO: 1076262 - DNA, 25 bp, Homo sapien
cactgacccatgctgcctttcttgg

SEQ ID NO: 1076263 - DNA, 25 bp, Homo sapien
cagccacactgacccatgctgcctt

SEQ ID NO: 1076264 - DNA, 25 bp, Homo sapien
ctgcctttcttggaggcacagctgg

SEQ ID NO: 1076265 - DNA, 25 bp, Homo sapien
ggctgggcacgttcagactataagg

SEQ ID NO: 1076266 - DNA, 25 bp, Homo sapien
cacgttcagactataaggtgggcca

SEQ ID NO: 1076267 - DNA, 25 bp, Homo sapien
ggcacgttcagactataaggtgggc

SEQ ID NO: 1076268 - DNA, 25 bp, Homo sapien
tgggcacgttcagactataaggtgg

SEQ ID NO: 1076269 - DNA, 25 bp, Homo sapien
gctgcccatcaactcttggttcagg

SEQ ID NO: 1076270 - DNA, 25 bp, Homo sapien
cttggttcaggcttagcttggttgc

SEQ ID NO: 1076271 - DNA, 25 bp, Homo sapien
gttgcatctggcttcaagaaacaag

SEQ ID NO: 1076272 - DNA, 25 bp, Homo sapien
gtcacctcataaccaggcataaatg

SEQ ID NO: 1076273 - DNA, 25 bp, Homo sapien
tcctggccagctcaacagaggagca

SEQ ID NO: 1076274 - DNA, 25 bp, Homo sapien
agctcctggccagctcaacagagga

SEQ ID NO: 1076275 - DNA, 25 bp, Homo sapien
ttagctcctggccagctcaacagag

SEQ ID NO: 1076276 - DNA, 25 bp, Homo sapien
tggccagctcaacagaggagcacac

SEQ ID NO: 1076277 - DNA, 25 bp, Homo sapien
taaagcatggcggtaagcaccttcc

SEQ ID NO: 1076278 - DNA, 25 bp, Homo sapien
ccaatcagaaaatggtcaggaccag

SEQ ID NO: 1076279 - DNA, 25 bp, Homo sapien
tatcacggcctccttttacggcgca

SEQ ID NO: 1076280 - DNA, 25 bp, Homo sapien
tacggcgcactctgtgtaaagcatg

SEQ ID NO: 1076281 - DNA, 25 bp, Homo sapien
atccttggcagggttttgtatcatg

SEQ ID NO: 1076282 - DNA, 25 bp, Homo sapien
acctgacttggttgtaatgggttca

SEQ ID NO: 1076283 - DNA, 25 bp, Homo sapien
taaaggacatccttaaggacagttc

SEQ ID NO: 1076284 - DNA, 25 bp, Homo sapien
gataaggaactactcctgttctgta

SEQ ID NO: 1076285 - DNA, 25 bp, Homo sapien
ggtagcccttggcattgtaaccaca

SEQ ID NO: 1076286 - DNA, 25 bp, Homo sapien
actggctacctggagtgcttcggtt

SEQ ID NO: 1076287 - DNA, 25 bp, Homo sapien
ttggcattgtaaccacagcagccag

SEQ ID NO: 1076288 - DNA, 25 bp, Homo sapien
ctctttctggtatacgctgacgttt

SEQ ID NO: 1076289 - DNA, 25 bp, Homo sapien
gctgctgctccggattgtttaggcg

SEQ ID NO: 1076290 - DNA, 25 bp, Homo sapien
cgtggcaccggcgttttcttgtgct

SEQ ID NO: 1076291 - DNA, 25 bp, Homo sapien
gcggactgcagtagcctgcttggtt

SEQ ID NO: 1076292 - DNA, 25 bp, Homo sapien
ttaggcatcgcgttccgtggcaccg

SEQ ID NO: 1076293 - DNA, 25 bp, Homo sapien
tgcgctccagcgctgcttgcagcag

SEQ ID NO: 1076294 - DNA, 25 bp, Homo sapien
gcgccgtgcgctccagcgctgcttg

SEQ ID NO: 1076295 - DNA, 25 bp, Homo sapien
gctccagcgctgcttgcagcaggct

SEQ ID NO: 1076296 - DNA, 25 bp, Homo sapien
tatgcgcgccgtgcgctccagcgct

SEQ ID NO: 1076297 - DNA, 25 bp, Homo sapien
cattttgtgtatgcctttcttaggc

SEQ ID NO: 1076298 - DNA, 25 bp, Homo sapien
tgtttttgcctgaggccgcaccgcg

SEQ ID NO: 1076299 - DNA, 25 bp, Homo sapien
gcaccgcgaagcagaatagcgagct

SEQ ID NO: 1076300 - DNA, 25 bp, Homo sapien
tagcgagctgcgattccattttgtg

SEQ ID NO: 1076301 - DNA, 25 bp, Homo sapien
ctggtgacatttccggctgccaggg

SEQ ID NO: 1076302 - DNA, 25 bp, Homo sapien
gagagccagctccacgctgtgtggc

SEQ ID NO: 1076303 - DNA, 25 bp, Homo sapien
ccaatcagtgatggacccagcttgc

SEQ ID NO: 1076304 - DNA, 25 bp, Homo sapien
tgatggacccagcttgcttgggcga

SEQ ID NO: 1076305 - DNA, 25 bp, Homo sapien
agtgacaggctctctgtggtaggtc

SEQ ID NO: 1076306 - DNA, 25 bp, Homo sapien
tggcttatcagggttgtcagagtta

SEQ ID NO: 1076307 - DNA, 25 bp, Homo sapien
tatcagggttgtcagagttagccat

SEQ ID NO: 1076308 - DNA, 25 bp, Homo sapien
agtggcttatcagggttgtcagagt

SEQ ID NO: 1076309 - DNA, 25 bp, Homo sapien
gcttatcagggttgtcagagttagc

SEQ ID NO: 1076310 - DNA, 25 bp, Homo sapien
agtcatctgaatagattcattttct

SEQ ID NO: 1076311 - DNA, 25 bp, Homo sapien
tgacagaagcccctggatcagttgc

SEQ ID NO: 1076312 - DNA, 25 bp, Homo sapien
tgtgcatcttgactcgcacatgagt

SEQ ID NO: 1076313 - DNA, 25 bp, Homo sapien
tcagttgcctcttgctgagtcatct

SEQ ID NO: 1076314 - DNA, 25 bp, Homo sapien
agcaaagagaagaggtgtagtaatt

SEQ ID NO: 1076315 - DNA, 25 bp, Homo sapien
cagcaaagagaagaggtgtagtaat

SEQ ID NO: 1076316 - DNA, 25 bp, Homo sapien
tcacgtggcccaaatggcaaggctg

SEQ ID NO: 1076317 - DNA, 25 bp, Homo sapien
aatggcattgtctcgctcctgaacc

SEQ ID NO: 1076318 - DNA, 25 bp, Homo sapien
tgccttgagatgtgcctggtcacgt

SEQ ID NO: 1076319 - DNA, 25 bp, Homo sapien
tctgcactactggagcatgcccaag

SEQ ID NO: 1076320 - DNA, 25 bp, Homo sapien
taatcacagatgtagacgtaagcgt

SEQ ID NO: 1076321 - DNA, 25 bp, Homo sapien
agatgtagacgtaagcgtggttgac

SEQ ID NO: 1076322 - DNA, 25 bp, Homo sapien
ctaatcacagatgtagacgtaagcg

SEQ ID NO: 1076323 - DNA, 25 bp, Homo sapien
tcacagatgtagacgtaagcgtggt

SEQ ID NO: 1076324 - DNA, 25 bp, Homo sapien
tttatgtttgcgcttgttaaatttg

SEQ ID NO: 1076325 - DNA, 25 bp, Homo sapien
atgtttgcgcttgttaaatttgatt

SEQ ID NO: 1076326 - DNA, 25 bp, Homo sapien
gcattactgatgtctagatcttctt

SEQ ID NO: 1076327 - DNA, 25 bp, Homo sapien
tatgtttgcgcttgttaaatttgat

SEQ ID NO: 1076328 - DNA, 25 bp, Homo sapien
agcatcacttgaattctcccttttg

SEQ ID NO: 1076329 - DNA, 25 bp, Homo sapien
gagaggctgtatgtttgttacatcc

SEQ ID NO: 1076330 - DNA, 25 bp, Homo sapien
tcccttttgtacatgagaggctgta

SEQ ID NO: 1076331 - DNA, 25 bp, Homo sapien
gcatcacttgaattctcccttttgt

SEQ ID NO: 1076332 - DNA, 25 bp, Homo sapien
tcttcatgttatatggtgttttggt

SEQ ID NO: 1076333 - DNA, 25 bp, Homo sapien
tccttatgctcaaagttggatgtaa

SEQ ID NO: 1076334 - DNA, 25 bp, Homo sapien
cttatgctcaaagttggatgtaatt

SEQ ID NO: 1076335 - DNA, 25 bp, Homo sapien
cttcatgttatatggtgttttggtc

SEQ ID NO: 1076336 - DNA, 25 bp, Homo sapien
ctggcagatcaactgtgctagttat

SEQ ID NO: 1076337 - DNA, 25 bp, Homo sapien
gttatagctgtcatgtactgagcat

SEQ ID NO: 1076338 - DNA, 25 bp, Homo sapien
ttatagctgtcatgtactgagcata

SEQ ID NO: 1076339 - DNA, 25 bp, Homo sapien
tcaactgtgctagttatagctgtca

SEQ ID NO: 1076340 - DNA, 25 bp, Homo sapien
cctggacaggtacagggatttccca

SEQ ID NO: 1076341 - DNA, 25 bp, Homo sapien
ggatttcccagcaaccgaggtgtca

SEQ ID NO: 1076342 - DNA, 25 bp, Homo sapien
tgaagatctctgtcagagccagtcc

SEQ ID NO: 1076343 - DNA, 25 bp, Homo sapien
tgtttgcactctttcgcgactgaca

SEQ ID NO: 1076344 - DNA, 25 bp, Homo sapien
ctgcatgtaccaaagagaagaatct

SEQ ID NO: 1076345 - DNA, 25 bp, Homo sapien
ctggttggattttgatgttggccat

SEQ ID NO: 1076346 - DNA, 25 bp, Homo sapien
actgagaattgtcctcataacaaat

SEQ ID NO: 1076347 - DNA, 25 bp, Homo sapien
gctggttggattttgatgttggcca

SEQ ID NO: 1076348 - DNA, 25 bp, Homo sapien
gagtctgcgtctgaatccttgttcc

SEQ ID NO: 1076349 - DNA, 25 bp, Homo sapien
taaggccaattcaccgtggagtctg

SEQ ID NO: 1076350 - DNA, 25 bp, Homo sapien
ctgcccgggatgaaaaaacgatgcc

SEQ ID NO: 1076351 - DNA, 25 bp, Homo sapien
gttttctcctggacgttcgttcaca

SEQ ID NO: 1076352 - DNA, 25 bp, Homo sapien
gggagcgaacccagggcttgaataa

SEQ ID NO: 1076353 - DNA, 25 bp, Homo sapien
gggcttgaataaagcacccctagac

SEQ ID NO: 1076354 - DNA, 25 bp, Homo sapien
gaacccagggcttgaataaagcacc

SEQ ID NO: 1076355 - DNA, 25 bp, Homo sapien
ccagggcttgaataaagcaccccta

SEQ ID NO: 1076356 - DNA, 25 bp, Homo sapien
tcacatcttctagaccctctgcaaa

SEQ ID NO: 1076357 - DNA, 25 bp, Homo sapien
ttcacatcttctagaccctctgcaa

SEQ ID NO: 1076358 - DNA, 25 bp, Homo sapien
tgggcgagacctgatactgtttaca

SEQ ID NO: 1076359 - DNA, 25 bp, Homo sapien
catcactcactctctgtttggcaca

SEQ ID NO: 1076360 - DNA, 25 bp, Homo sapien
tggccttctgaatacaccgctatga

SEQ ID NO: 1076361 - DNA, 25 bp, Homo sapien
ccatttgtcaatcagtggacattca

SEQ ID NO: 1076362 - DNA, 25 bp, Homo sapien
atcaccaccgtctaattccttaaca

SEQ ID NO: 1076363 - DNA, 25 bp, Homo sapien
ccccaaagaggctttgtactcatta

SEQ ID NO: 1076364 - DNA, 25 bp, Homo sapien
acagtcatcaccaccgtctaattcc

SEQ ID NO: 1076365 - DNA, 25 bp, Homo sapien
ccaaagaggctttgtactcattaag

SEQ ID NO: 1076366 - DNA, 25 bp, Homo sapien
cagcagcctccttagatgttatccg

SEQ ID NO: 1076367 - DNA, 25 bp, Homo sapien
ccttccgtgaggtctgaaggccccg

SEQ ID NO: 1076368 - DNA, 25 bp, Homo sapien
cctgatatgcgcgtgtttggctgga

SEQ ID NO: 1076369 - DNA, 25 bp, Homo sapien
tttggctggaagcagcgaatccagg

SEQ ID NO: 1076370 - DNA, 25 bp, Homo sapien
gcctgaccacaaagccctcccctcc

SEQ ID NO: 1076371 - DNA, 25 bp, Homo sapien
ggagcctgaccacaaagccctcccc

SEQ ID NO: 1076372 - DNA, 25 bp, Homo sapien
ctgaccacaaagccctcccctccct

SEQ ID NO: 1076373 - DNA, 25 bp, Homo sapien
tcccctccctcagggcccagcagca

SEQ ID NO: 1076374 - DNA, 25 bp, Homo sapien
gcatcctcgacagatcagggccagg

SEQ ID NO: 1076375 - DNA, 25 bp, Homo sapien
ttggagaggacgtcctgcgcatcct

SEQ ID NO: 1076376 - DNA, 25 bp, Homo sapien
agaggacgtcctgcgcatcctcgac

SEQ ID NO: 1076377 - DNA, 25 bp, Homo sapien
gtcctgcgcatcctcgacagatcag

SEQ ID NO: 1076378 - DNA, 25 bp, Homo sapien
cctctccggtgtagatggaactcgc

SEQ ID NO: 1076379 - DNA, 25 bp, Homo sapien
ccctctccggtgtagatggaactcg

SEQ ID NO: 1076380 - DNA, 25 bp, Homo sapien
tgaacaccgcaatgcgccagtgtcc

SEQ ID NO: 1076381 - DNA, 25 bp, Homo sapien
ggttctgtgggacttgaacaccgca

SEQ ID NO: 1076382 - DNA, 25 bp, Homo sapien
catgctttcccggtctttttccagg

SEQ ID NO: 1076383 - DNA, 25 bp, Homo sapien
agtgtcccatgctttcccggtcttt

SEQ ID NO: 1076384 - DNA, 25 bp, Homo sapien
gcttcacgatgccagggtagctccc

SEQ ID NO: 1076385 - DNA, 25 bp, Homo sapien
tccgtggtgcagaggccgctatgct

SEQ ID NO: 1076386 - DNA, 25 bp, Homo sapien
tcctcaaagttcgagcgcgaagccg

SEQ ID NO: 1076387 - DNA, 25 bp, Homo sapien
ccggtggtgctatgccctgtgaact

SEQ ID NO: 1076388 - DNA, 25 bp, Homo sapien
gaatagttctatgtatctgtgccac

SEQ ID NO: 1076389 - DNA, 25 bp, Homo sapien
tctctggaggtagctgccactgctt

SEQ ID NO: 1076390 - DNA, 25 bp, Homo sapien
tctgctttgccggtcactcttccat

SEQ ID NO: 1076391 - DNA, 25 bp, Homo sapien
gaggttgtaaatgtcgctcttggtc

SEQ ID NO: 1076392 - DNA, 25 bp, Homo sapien
actggctcttcaggtcactgtaggt

SEQ ID NO: 1076393 - DNA, 25 bp, Homo sapien
gactgctgtacgccccattgctagc

SEQ ID NO: 1076394 - DNA, 25 bp, Homo sapien
actgtaggtggtcaagcccatgcct

SEQ ID NO: 1076395 - DNA, 25 bp, Homo sapien
catcacagccgctcactgactggct

SEQ ID NO: 1076396 - DNA, 25 bp, Homo sapien
catctgtgtctttgcatcactcgtc

SEQ ID NO: 1076397 - DNA, 25 bp, Homo sapien
ctctcatctgtgtctttgcatcact

SEQ ID NO: 1076398 - DNA, 25 bp, Homo sapien
ctgctctcatctgtgtctttgcatc

SEQ ID NO: 1076399 - DNA, 25 bp, Homo sapien
tctgtgtctttgcatcactcgtcat

SEQ ID NO: 1076400 - DNA, 25 bp, Homo sapien
cttccagggttcagctcagcgcctg

SEQ ID NO: 1076401 - DNA, 25 bp, Homo sapien
aaacaggtgccatcaggagttgctg

SEQ ID NO: 1076402 - DNA, 25 bp, Homo sapien
gagtgaatgactgtcacaagagaga

SEQ ID NO: 1076403 - DNA, 25 bp, Homo sapien
tcagcgcctggtgcaaaacaggtgc

SEQ ID NO: 1076404 - DNA, 25 bp, Homo sapien
atctcagtgggttttgaggagctga

SEQ ID NO: 1076405 - DNA, 25 bp, Homo sapien
ctcagtgggttttgaggagctgatc

SEQ ID NO: 1076406 - DNA, 25 bp, Homo sapien
ttgaggagctgatcagtgggtttct

SEQ ID NO: 1076407 - DNA, 25 bp, Homo sapien
ggatctcagtgggttttgaggagct

SEQ ID NO: 1076408 - DNA, 25 bp, Homo sapien
gcagctgcagacttgggatgaggag

SEQ ID NO: 1076409 - DNA, 25 bp, Homo sapien
gagcagctgcagacttgggatgagg

SEQ ID NO: 1076410 - DNA, 25 bp, Homo sapien
tgagcagctgcagacttgggatgag

SEQ ID NO: 1076411 - DNA, 25 bp, Homo sapien
cattgaagaggtagaaggaggcttt

SEQ ID NO: 1076412 - DNA, 25 bp, Homo sapien
tcaatcagcattgaagaggtagaag

SEQ ID NO: 1076413 - DNA, 25 bp, Homo sapien
aatcagcattgaagaggtagaagga

SEQ ID NO: 1076414 - DNA, 25 bp, Homo sapien
cagcattgaagaggtagaaggaggc

SEQ ID NO: 1076415 - DNA, 25 bp, Homo sapien
gcttgggtgaccatccatcaaactt

SEQ ID NO: 1076416 - DNA, 25 bp, Homo sapien
catcaaacttatctcctgggaggat

SEQ ID NO: 1076417 - DNA, 25 bp, Homo sapien
aacattgatcctttgtgcaccagca

SEQ ID NO: 1076418 - DNA, 25 bp, Homo sapien
cataggtccgacttgccatcagtgg

SEQ ID NO: 1076419 - DNA, 25 bp, Homo sapien
gtctcctgttgaggccgactgggca

SEQ ID NO: 1076420 - DNA, 25 bp, Homo sapien
taaaggcaggctcggcattaagtag

SEQ ID NO: 1076421 - DNA, 25 bp, Homo sapien
tctactggactgatggataaaggca

SEQ ID NO: 1076422 - DNA, 25 bp, Homo sapien
tgtcgggaagaacctgtctactgga

SEQ ID NO: 1076423 - DNA, 25 bp, Homo sapien
tcagtggatgctgtcagtcgtgccc

SEQ ID NO: 1076424 - DNA, 25 bp, Homo sapien
gtggatgctgtcagtcgtgcccgcc

SEQ ID NO: 1076425 - DNA, 25 bp, Homo sapien
cagtggatgctgtcagtcgtgcccg

SEQ ID NO: 1076426 - DNA, 25 bp, Homo sapien
ggatgctgtcagtcgtgcccgcctc

SEQ ID NO: 1076427 - DNA, 25 bp, Homo sapien
gattgatgtccaagacgcagctgcc

SEQ ID NO: 1076428 - DNA, 25 bp, Homo sapien
gggattgatgtccaagacgcagctg

SEQ ID NO: 1076429 - DNA, 25 bp, Homo sapien
tgatgtccaagacgcagctgccatt

SEQ ID NO: 1076430 - DNA, 25 bp, Homo sapien
tgtccaagacgcagctgccatttgt

SEQ ID NO: 1076431 - DNA, 25 bp, Homo sapien
ctttgtttgcagcacccgggctgag

SEQ ID NO: 1076432 - DNA, 25 bp, Homo sapien
cagttagactgcatcctctagagag

SEQ ID NO: 1076433 - DNA, 25 bp, Homo sapien
aggatgcaccgcatctctgctgatg

SEQ ID NO: 1076434 - DNA, 25 bp, Homo sapien
tctagagagtacagcctcaattgca

SEQ ID NO: 1076435 - DNA, 25 bp, Homo sapien
tctgtttttggtgcaagggacccac

SEQ ID NO: 1076436 - DNA, 25 bp, Homo sapien
gcttctgtttttggtgcaagggacc

SEQ ID NO: 1076437 - DNA, 25 bp, Homo sapien
ttctgtttttggtgcaagggaccca

SEQ ID NO: 1076438 - DNA, 25 bp, Homo sapien
cgagtcctggggtttgcagagagga

SEQ ID NO: 1076439 - DNA, 25 bp, Homo sapien
ctcctgctaatgcccgagtcctggg

SEQ ID NO: 1076440 - DNA, 25 bp, Homo sapien
gcagagaggagatgcggaggtgaac

SEQ ID NO: 1076441 - DNA, 25 bp, Homo sapien
gaggagatgcggaggtgaacagtgg

SEQ ID NO: 1076442 - DNA, 25 bp, Homo sapien
gttccccctgccgctgtccaccgtc

SEQ ID NO: 1076443 - DNA, 25 bp, Homo sapien
ttccccctgccgctgtccaccgtct

SEQ ID NO: 1076444 - DNA, 25 bp, Homo sapien
tccccctgccgctgtccaccgtctc

SEQ ID NO: 1076445 - DNA, 25 bp, Homo sapien
cccctgccgctgtccaccgtctccc

SEQ ID NO: 1076446 - DNA, 25 bp, Homo sapien
caggagccctgatgcagccctgcag

SEQ ID NO: 1076447 - DNA, 25 bp, Homo sapien
tggcaggagccctgatgcagccctg

SEQ ID NO: 1076448 - DNA, 25 bp, Homo sapien
gaccacggccactcctggcaggagc

SEQ ID NO: 1076449 - DNA, 25 bp, Homo sapien
agcagcaggaggaccacggccactc

SEQ ID NO: 1076450 - DNA, 25 bp, Homo sapien
cagcgctgaatcagtttggtgttgt

SEQ ID NO: 1076451 - DNA, 25 bp, Homo sapien
cctttgaggggagcagcgctgaatc

SEQ ID NO: 1076452 - DNA, 25 bp, Homo sapien
ctctgtgaccagcacgggcctttga

SEQ ID NO: 1076453 - DNA, 25 bp, Homo sapien
ctgtgaccagcacgggcctttgagg

SEQ ID NO: 1076454 - DNA, 25 bp, Homo sapien
tcctgcgaggcgcagacaggctgaa

SEQ ID NO: 1076455 - DNA, 25 bp, Homo sapien
ggctgggtgcccactgtgcctccag

SEQ ID NO: 1076456 - DNA, 25 bp, Homo sapien
tcatggattccagctggacccggaa

SEQ ID NO: 1076457 - DNA, 25 bp, Homo sapien
gggtggtggcacacggcgggcagga

SEQ ID NO: 1076458 - DNA, 25 bp, Homo sapien
agccgctgggtgcttaagagaaaca

SEQ ID NO: 1076459 - DNA, 25 bp, Homo sapien
tcacagtcgtcgttagcgatggtcc

SEQ ID NO: 1076460 - DNA, 25 bp, Homo sapien
agctcacagtcgtcgttagcgatgg

SEQ ID NO: 1076461 - DNA, 25 bp, Homo sapien
acagctcacagtcgtcgttagcgat

SEQ ID NO: 1076462 - DNA, 25 bp, Homo sapien
gctcacagtcgtcgttagcgatggt

SEQ ID NO: 1076463 - DNA, 25 bp, Homo sapien
tgggctcagggtacccagggctatc

SEQ ID NO: 1076464 - DNA, 25 bp, Homo sapien
aagggcgaggtgtccctggtgggct

SEQ ID NO: 1076465 - DNA, 25 bp, Homo sapien
agggtggtgggctgaagggcgaggt

SEQ ID NO: 1076466 - DNA, 25 bp, Homo sapien
ctggtgggctcagggtacccagggc

SEQ ID NO: 1076467 - DNA, 25 bp, Homo sapien
gattgctttgtaccagatccagctg

SEQ ID NO: 1076468 - DNA, 25 bp, Homo sapien
cctccaactctatgtccgattgctt

SEQ ID NO: 1076469 - DNA, 25 bp, Homo sapien
tggccagggacccatcttgagcatg

SEQ ID NO: 1076470 - DNA, 25 bp, Homo sapien
actctatgtccgattgctttgtacc

SEQ ID NO: 1076471 - DNA, 25 bp, Homo sapien
gccaacttgcgcctcttagaaggat

SEQ ID NO: 1076472 - DNA, 25 bp, Homo sapien
tgttgccttgaatgaatcactggga

SEQ ID NO: 1076473 - DNA, 25 bp, Homo sapien
gtttggaccctacttggcatgaaaa

SEQ ID NO: 1076474 - DNA, 25 bp, Homo sapien
gccccttggatcaacgaaaatcaga

SEQ ID NO: 1076475 - DNA, 25 bp, Homo sapien
tccttttaccatgtgaatagatttc

SEQ ID NO: 1076476 - DNA, 25 bp, Homo sapien
tttaccatgtgaatagatttctctg

SEQ ID NO: 1076477 - DNA, 25 bp, Homo sapien
ctcagagagacattgtgtcattctc

SEQ ID NO: 1076478 - DNA, 25 bp, Homo sapien
cctggcccagcgttacttttcttga

SEQ ID NO: 1076479 - DNA, 25 bp, Homo sapien
caatttggaaactgctagactggag

SEQ ID NO: 1076480 - DNA, 25 bp, Homo sapien
tgatattactaggtgatgtggcaat

SEQ ID NO: 1076481 - DNA, 25 bp, Homo sapien
gattcatcatgataaccttgctaag

SEQ ID NO: 1076482 - DNA, 25 bp, Homo sapien
tattggtactgtaatgtaaagagca

SEQ ID NO: 1076483 - DNA, 25 bp, Homo sapien
tggctcactgcaaataggctagttt

SEQ ID NO: 1076484 - DNA, 25 bp, Homo sapien
gctcactgcaaataggctagttttc

SEQ ID NO: 1076485 - DNA, 25 bp, Homo sapien
agacaaactcaagcactgtaaaaat

SEQ ID NO: 1076486 - DNA, 25 bp, Homo sapien
tcactgcaaataggctagttttcta

SEQ ID NO: 1076487 - DNA, 25 bp, Homo sapien
aattgtgtgtgctagggctcagaca

SEQ ID NO: 1076488 - DNA, 25 bp, Homo sapien
gagagccatggtaatacaccctagg

SEQ ID NO: 1076489 - DNA, 25 bp, Homo sapien
gcctcaacagttactagagtggtat

SEQ ID NO: 1076490 - DNA, 25 bp, Homo sapien
tgttctgagagtaagagcaaaccaa

SEQ ID NO: 1076491 - DNA, 25 bp, Homo sapien
gatgttcactgtcttatgacctcca

SEQ ID NO: 1076492 - DNA, 25 bp, Homo sapien
tatacagtctggattgataattctg

SEQ ID NO: 1076493 - DNA, 25 bp, Homo sapien
tagtgcaggtctcctagcaacaaat

SEQ ID NO: 1076494 - DNA, 25 bp, Homo sapien
catttcctagtcgatgtttacctgc

SEQ ID NO: 1076495 - DNA, 25 bp, Homo sapien
tttgagcctcaaagataaagatctc

SEQ ID NO: 1076496 - DNA, 25 bp, Homo sapien
tgtgcccattcccagtaaagggtta

SEQ ID NO: 1076497 - DNA, 25 bp, Homo sapien
ggaattcagtaagccagttatcaag

SEQ ID NO: 1076498 - DNA, 25 bp, Homo sapien
caaactgggattaggttgggatcac

SEQ ID NO: 1076499 - DNA, 25 bp, Homo sapien
ccaacttttagttgacagtttgtat

SEQ ID NO: 1076500 - DNA, 25 bp, Homo sapien
ccagtctggagggaagtgacacgat

SEQ ID NO: 1076501 - DNA, 25 bp, Homo sapien
gagatgagatcagcccatttcccag

SEQ ID NO: 1076502 - DNA, 25 bp, Homo sapien
caggatacctgtcacctcagtctct

SEQ ID NO: 1076503 - DNA, 25 bp, Homo sapien
ccttagtgtccaggaggtgtttact

SEQ ID NO: 1076504 - DNA, 25 bp, Homo sapien
gactctcaatggctgggctcgatcc

SEQ ID NO: 1076505 - DNA, 25 bp, Homo sapien
taaccctggtcatgtaagcaccttg

SEQ ID NO: 1076506 - DNA, 25 bp, Homo sapien
tagcgaccgtcatcattgtagtagc

SEQ ID NO: 1076507 - DNA, 25 bp, Homo sapien
gggactacccaagctgtaaggtctg

SEQ ID NO: 1076508 - DNA, 25 bp, Homo sapien
aagtcttggctttcgtatctcagtg

SEQ ID NO: 1076509 - DNA, 25 bp, Homo sapien
tcaggatgacgaagtttattacagt

SEQ ID NO: 1076510 - DNA, 25 bp, Homo sapien
cattgtatcctagcttttgggttaa

SEQ ID NO: 1076511 - DNA, 25 bp, Homo sapien
gtgataacttcccatattatagaga

SEQ ID NO: 1076512 - DNA, 25 bp, Homo sapien
cccatattatagagaggctggcagt

SEQ ID NO: 1076513 - DNA, 25 bp, Homo sapien
aatttatcagtggatttgtgataac

SEQ ID NO: 1076514 - DNA, 25 bp, Homo sapien
aacttcccatattatagagaggctg

SEQ ID NO: 1076515 - DNA, 25 bp, Homo sapien
cttgtccactatcctcaatggccac

SEQ ID NO: 1076516 - DNA, 25 bp, Homo sapien
tgtccactatcctcaatggccacat

SEQ ID NO: 1076517 - DNA, 25 bp, Homo sapien
ttgtccactatcctcaatggccaca

SEQ ID NO: 1076518 - DNA, 25 bp, Homo sapien
ggagagcagcccaaactgtttcact

SEQ ID NO: 1076519 - DNA, 25 bp, Homo sapien
gcagcccaaactgtttcacttctaa

SEQ ID NO: 1076520 - DNA, 25 bp, Homo sapien
gagcagcccaaactgtttcacttct

SEQ ID NO: 1076521 - DNA, 25 bp, Homo sapien
tcaggagagcagcccaaactgtttc

SEQ ID NO: 1076522 - DNA, 25 bp, Homo sapien
gaggggcagtccacactggaccctg

SEQ ID NO: 1076523 - DNA, 25 bp, Homo sapien
ggggacggctgcctttttagccaca

SEQ ID NO: 1076524 - DNA, 25 bp, Homo sapien
ttgtctgtgagtggtttagcgccag

SEQ ID NO: 1076525 - DNA, 25 bp, Homo sapien
aaagtgtgttccgtgacaggcaagg

SEQ ID NO: 1076526 - DNA, 25 bp, Homo sapien
gggtttgggggtggatcctgtggca

SEQ ID NO: 1076527 - DNA, 25 bp, Homo sapien
cactgaccagggatatagatgctag

SEQ ID NO: 1076528 - DNA, 25 bp, Homo sapien
tgtatgacaggtattctaagcgcct

SEQ ID NO: 1076529 - DNA, 25 bp, Homo sapien
ttttaggaataagctgatgagggtc

SEQ ID NO: 1076530 - DNA, 25 bp, Homo sapien
cccatatacaatgaacggttagatg

SEQ ID NO: 1076531 - DNA, 25 bp, Homo sapien
cagccgttccatgcggacgtgttgc

SEQ ID NO: 1076532 - DNA, 25 bp, Homo sapien
ggattagggcaaaggcagccgttcc

SEQ ID NO: 1076533 - DNA, 25 bp, Homo sapien
gcccatgcgagggtgcttgcgttcc

SEQ ID NO: 1076534 - DNA, 25 bp, Homo sapien
gagggtgcttgcgttcccgcccatc

SEQ ID NO: 1076535 - DNA, 25 bp, Homo sapien
ctgaggtaagtgccccccgccaggg

SEQ ID NO: 1076536 - DNA, 25 bp, Homo sapien
ggcggagacgcacggagcggccggg

SEQ ID NO: 1076537 - DNA, 25 bp, Homo sapien
ggccgggccgtcccggcctgcgcag

SEQ ID NO: 1076538 - DNA, 25 bp, Homo sapien
ggagacgcacggagcggccgggggc

SEQ ID NO: 1076539 - DNA, 25 bp, Homo sapien
cggagacgcacggagcggccggggg

SEQ ID NO: 1076540 - DNA, 25 bp, Homo sapien
ctgcgtgcgtcgaagcgaccgtgac

SEQ ID NO: 1076541 - DNA, 25 bp, Homo sapien
accgctcgcagtaggcaccgttggg

SEQ ID NO: 1076542 - DNA, 25 bp, Homo sapien
cagggcactacttgtcccagcggag

SEQ ID NO: 1076543 - DNA, 25 bp, Homo sapien
cccggatgttggctgctcttgctgc

SEQ ID NO: 1076544 - DNA, 25 bp, Homo sapien
atgacaccggctgcgccgatgcaga

SEQ ID NO: 1076545 - DNA, 25 bp, Homo sapien
gctgcgccgatgcagagcctcggga

SEQ ID NO: 1076546 - DNA, 25 bp, Homo sapien
gcgccgatgcagagcctcgggagtc

SEQ ID NO: 1076547 - DNA, 25 bp, Homo sapien
gatgacaccggctgcgccgatgcag

SEQ ID NO: 1076548 - DNA, 25 bp, Homo sapien
tgccaggtcggaaaaggcgtccgct

SEQ ID NO: 1076549 - DNA, 25 bp, Homo sapien
tgactaacgcgaatgaagcaacagc

SEQ ID NO: 1076550 - DNA, 25 bp, Homo sapien
tgcttgaccaaacggcaggtgttca

SEQ ID NO: 1076551 - DNA, 25 bp, Homo sapien
tccagtgcctagaaatgcttgacca

SEQ ID NO: 1076552 - DNA, 25 bp, Homo sapien
gtgagagaagcggagctgcccaaca

SEQ ID NO: 1076553 - DNA, 25 bp, Homo sapien
gaagtgccttagaattccagacaag

SEQ ID NO: 1076554 - DNA, 25 bp, Homo sapien
cagccctatcccatattagctcagg

SEQ ID NO: 1076555 - DNA, 25 bp, Homo sapien
tcattctggcagctatccacctctg

SEQ ID NO: 1076556 - DNA, 25 bp, Homo sapien
gtgcccttcaagctagatttctcat

SEQ ID NO: 1076557 - DNA, 25 bp, Homo sapien
cagtgcccttcaagctagatttctc

SEQ ID NO: 1076558 - DNA, 25 bp, Homo sapien
agtgcccttcaagctagatttctca

SEQ ID NO: 1076559 - DNA, 25 bp, Homo sapien
tgcccttcaagctagatttctcatt

SEQ ID NO: 1076560 - DNA, 25 bp, Homo sapien
cggtggcacgaacacaaatcactgc

SEQ ID NO: 1076561 - DNA, 25 bp, Homo sapien
tgttaagacttaggactttgcacct

SEQ ID NO: 1076562 - DNA, 25 bp, Homo sapien
tgaagaactgatccacagatctgag

SEQ ID NO: 1076563 - DNA, 25 bp, Homo sapien
gatctgagcagtcctaattagttct

SEQ ID NO: 1076564 - DNA, 25 bp, Homo sapien
tttcattggtccaatgaccagttgc

SEQ ID NO: 1076565 - DNA, 25 bp, Homo sapien
gatagcaaggtgactaagagaaaga

SEQ ID NO: 1076566 - DNA, 25 bp, Homo sapien
gatggagatcatgttaccatgacaa

SEQ ID NO: 1076567 - DNA, 25 bp, Homo sapien
taacagtctcatatatccatctaaa

SEQ ID NO: 1076568 - DNA, 25 bp, Homo sapien
ttcagtatgactcaggtagtaacgg

SEQ ID NO: 1076569 - DNA, 25 bp, Homo sapien
catgttcagtatgactcaggtagta

SEQ ID NO: 1076570 - DNA, 25 bp, Homo sapien
gcctcccaggatcccacaagtacat

SEQ ID NO: 1076571 - DNA, 25 bp, Homo sapien
tatgactcaggtagtaacggatgag

SEQ ID NO: 1076572 - DNA, 25 bp, Homo sapien
caggcttgttggagtcagcttttga

SEQ ID NO: 1076573 - DNA, 25 bp, Homo sapien
aatggacatagttttgcagggtgga

SEQ ID NO: 1076574 - DNA, 25 bp, Homo sapien
caaggaagtcttattagcaggcttg

SEQ ID NO: 1076575 - DNA, 25 bp, Homo sapien
ttttgaaggtggcaatggacatagt

SEQ ID NO: 1076576 - DNA, 25 bp, Homo sapien
agccctgacccagcgaatccgcccg

SEQ ID NO: 1076577 - DNA, 25 bp, Homo sapien
cctgacccagcgaatccgcccggcc

SEQ ID NO: 1076578 - DNA, 25 bp, Homo sapien
ccctgacccagcgaatccgcccggc

SEQ ID NO: 1076579 - DNA, 25 bp, Homo sapien
cagccctgacccagcgaatccgccc

SEQ ID NO: 1076580 - DNA, 25 bp, Homo sapien
ccgcgcggcgcggacccctcggcgc

SEQ ID NO: 1076581 - DNA, 25 bp, Homo sapien
ccccgggccgctcgctcagtagggc

SEQ ID NO: 1076582 - DNA, 25 bp, Homo sapien
cgtccggggcgagcgcgccacggct

SEQ ID NO: 1076583 - DNA, 25 bp, Homo sapien
gctcgctcagtagggcgagcggagg

SEQ ID NO: 1076584 - DNA, 25 bp, Homo sapien
tgcgggtagtcctcgcggatgcgcc

SEQ ID NO: 1076585 - DNA, 25 bp, Homo sapien
cgcaggatctgcacctgcgggtagt

SEQ ID NO: 1076586 - DNA, 25 bp, Homo sapien
cggagggcgcgcaggatctgcacct

SEQ ID NO: 1076587 - DNA, 25 bp, Homo sapien
atgcgccggtccgtcaggaaccaga

SEQ ID NO: 1076588 - DNA, 25 bp, Homo sapien
gaggtggccgccgacgatggtgacg

SEQ ID NO: 1076589 - DNA, 25 bp, Homo sapien
ccgccgacgatggtgacggcgatct

SEQ ID NO: 1076590 - DNA, 25 bp, Homo sapien
cgatggtgacggcgatctggtccat

SEQ ID NO: 1076591 - DNA, 25 bp, Homo sapien
acgatggtgacggcgatctggtcca

SEQ ID NO: 1076592 - DNA, 25 bp, Homo sapien
tacagaatttgtgacggttctacaa

SEQ ID NO: 1076593 - DNA, 25 bp, Homo sapien
tctataaataagaatcccgagattc

SEQ ID NO: 1076594 - DNA, 25 bp, Homo sapien
cacataaagtgagaggaaccttaac

SEQ ID NO: 1076595 - DNA, 25 bp, Homo sapien
taactacttaatctaggtcggtgaa

SEQ ID NO: 1076596 - DNA, 25 bp, Homo sapien
gtactttatacacactaggccatca

SEQ ID NO: 1076597 - DNA, 25 bp, Homo sapien
tgcctactttattctggtgcctaga

SEQ ID NO: 1076598 - DNA, 25 bp, Homo sapien
taataatgagcgtgaagcctgcctc

SEQ ID NO: 1076599 - DNA, 25 bp, Homo sapien
aacaacagagttataggaatgcaga

SEQ ID NO: 1076600 - DNA, 25 bp, Homo sapien
gagattatagtctcctcacagagaa

SEQ ID NO: 1076601 - DNA, 25 bp, Homo sapien
gactcagacacactactaagcagga

SEQ ID NO: 1076602 - DNA, 25 bp, Homo sapien
ttttaacaagtagatgccacacccc

SEQ ID NO: 1076603 - DNA, 25 bp, Homo sapien
tgtgacaatgcccaaagaaagctca

SEQ ID NO: 1076604 - DNA, 25 bp, Homo sapien
aaggtaaatctttgggcctggctca

SEQ ID NO: 1076605 - DNA, 25 bp, Homo sapien
tgggcctggctcattccaactgaag

SEQ ID NO: 1076606 - DNA, 25 bp, Homo sapien
gggcctggctcattccaactgaagc

SEQ ID NO: 1076607 - DNA, 25 bp, Homo sapien
ctcttctccaaaggtaaatctttgg

SEQ ID NO: 1076608 - DNA, 25 bp, Homo sapien
tcaacataatgcacaaatgtcaatg

SEQ ID NO: 1076609 - DNA, 25 bp, Homo sapien
cattgcgctgagctatgcaaccatt

SEQ ID NO: 1076610 - DNA, 25 bp, Homo sapien
tgagccattgcgctgagctatgcaa

SEQ ID NO: 1076611 - DNA, 25 bp, Homo sapien
caaattgggaacagctagaaggaaa

SEQ ID NO: 1076612 - DNA, 25 bp, Homo sapien
ttctccaggtgtcgcaggacagtga

SEQ ID NO: 1076613 - DNA, 25 bp, Homo sapien
cactgagggtgtgggtacccgtaca

SEQ ID NO: 1076614 - DNA, 25 bp, Homo sapien
tgctctgtgggcgattgaccaaccg

SEQ ID NO: 1076615 - DNA, 25 bp, Homo sapien
tccagccagttcttggaacgtccag

SEQ ID NO: 1076616 - DNA, 25 bp, Homo sapien
gtggcctcgtgtgctcttcaccacg

SEQ ID NO: 1076617 - DNA, 25 bp, Homo sapien
cccggtggcctcgtgtgctcttcac

SEQ ID NO: 1076618 - DNA, 25 bp, Homo sapien
ttcaccacgactgggtagcccaggg

SEQ ID NO: 1076619 - DNA, 25 bp, Homo sapien
tcttcaccacgactgggtagcccag

SEQ ID NO: 1076620 - DNA, 25 bp, Homo sapien
tctggtccccaccaatgagcagctc

SEQ ID NO: 1076621 - DNA, 25 bp, Homo sapien
tccccaccaatgagcagctcgcagt

SEQ ID NO: 1076622 - DNA, 25 bp, Homo sapien
agacagatgctcaggatctggtccc

SEQ ID NO: 1076623 - DNA, 25 bp, Homo sapien
gatgctcaggatctggtccccacca

SEQ ID NO: 1076624 - DNA, 25 bp, Homo sapien
cttctggaacaggtagggcacatcg

SEQ ID NO: 1076625 - DNA, 25 bp, Homo sapien
gggactccttcacgtacttctggaa

SEQ ID NO: 1076626 - DNA, 25 bp, Homo sapien
tggagcagcgaagcatagagcctat

SEQ ID NO: 1076627 - DNA, 25 bp, Homo sapien
ccacccggatgtcctttccatggga

SEQ ID NO: 1076628 - DNA, 25 bp, Homo sapien
catctaagttgcatgcctggtcaaa

SEQ ID NO: 1076629 - DNA, 25 bp, Homo sapien
catgcctaggatgttggacacctga

SEQ ID NO: 1076630 - DNA, 25 bp, Homo sapien
tgagctgaagcacagccatccggct

SEQ ID NO: 1076631 - DNA, 25 bp, Homo sapien
cactgttgatggtatagacgctctc

SEQ ID NO: 1076632 - DNA, 25 bp, Homo sapien
tgttgtagccaggttcgggcagcat

SEQ ID NO: 1076633 - DNA, 25 bp, Homo sapien
aatcccggatctctcccagttcagg

SEQ ID NO: 1076634 - DNA, 25 bp, Homo sapien
ttttaactcagaagcaatcctgttg

SEQ ID NO: 1076635 - DNA, 25 bp, Homo sapien
tgcttgctgaggaatcccggatctc

SEQ ID NO: 1076636 - DNA, 25 bp, Homo sapien
tactagggaagcagtaggatttggt

SEQ ID NO: 1076637 - DNA, 25 bp, Homo sapien
aaaactactagggaagcagtaggat

SEQ ID NO: 1076638 - DNA, 25 bp, Homo sapien
actcaaaactactagggaagcagta

SEQ ID NO: 1076639 - DNA, 25 bp, Homo sapien
tagggaagcagtaggatttggttta

SEQ ID NO: 1076640 - DNA, 25 bp, Homo sapien
gagtcagtgccttagcgtcagccgt

SEQ ID NO: 1076641 - DNA, 25 bp, Homo sapien
gagctaatgggttctactgctaaaa

SEQ ID NO: 1076642 - DNA, 25 bp, Homo sapien
cagtctcatactgatcagtcgggac

SEQ ID NO: 1076643 - DNA, 25 bp, Homo sapien
gtaatatccacgtgctcacagcaga

SEQ ID NO: 1076644 - DNA, 25 bp, Homo sapien
gaaaggcccagttacaaagcaggac

SEQ ID NO: 1076645 - DNA, 25 bp, Homo sapien
caaaggtgcaagaagctgctagagc

SEQ ID NO: 1076646 - DNA, 25 bp, Homo sapien
caccatatcctgagtgtcggagaaa

SEQ ID NO: 1076647 - DNA, 25 bp, Homo sapien
cagggtctataaattcagagtggca

SEQ ID NO: 1076648 - DNA, 25 bp, Homo sapien
tgaaacatggagacgcagagttcct

SEQ ID NO: 1076649 - DNA, 25 bp, Homo sapien
tacaactgtgtagtgtgacatctcc

SEQ ID NO: 1076650 - DNA, 25 bp, Homo sapien
cacgaggtcagctgttcaagcggag

SEQ ID NO: 1076651 - DNA, 25 bp, Homo sapien
gatacctgagtcttccccgtttgga

SEQ ID NO: 1076652 - DNA, 25 bp, Homo sapien
accactgtttggtgtgctaatgcca

SEQ ID NO: 1076653 - DNA, 25 bp, Homo sapien
ccagtttcaagatgctactaccaga

SEQ ID NO: 1076654 - DNA, 25 bp, Homo sapien
caggtcttaagtttccctggctgga

SEQ ID NO: 1076655 - DNA, 25 bp, Homo sapien
tatacgatacatccagaaggctgtc

SEQ ID NO: 1076656 - DNA, 25 bp, Homo sapien
gagggaactgtcttcgtccaggaaa

SEQ ID NO: 1076657 - DNA, 25 bp, Homo sapien
taaaatctcaaggatggatgggacc

SEQ ID NO: 1076658 - DNA, 25 bp, Homo sapien
aaggtgtacccctgacaacgagtgg

SEQ ID NO: 1076659 - DNA, 25 bp, Homo sapien
gagatggcactcgaattccgcttgg

SEQ ID NO: 1076660 - DNA, 25 bp, Homo sapien
cagtgaccgttatcagctctgcaga

SEQ ID NO: 1076661 - DNA, 25 bp, Homo sapien
actggaactcgggacctcaaggtgg

SEQ ID NO: 1076662 - DNA, 25 bp, Homo sapien
gaatttagctgaactactgcccaca

SEQ ID NO: 1076663 - DNA, 25 bp, Homo sapien
cagttaggcaggaaaagctacagtc

SEQ ID NO: 1076664 - DNA, 25 bp, Homo sapien
tatcaggcaatacagtacagaccag

SEQ ID NO: 1076665 - DNA, 25 bp, Homo sapien
caaaagatgcttaggcccttgagga

SEQ ID NO: 1076666 - DNA, 25 bp, Homo sapien
cagcgtgatagacaagtgggtgcca

SEQ ID NO: 1076667 - DNA, 25 bp, Homo sapien
cctaaggttagtggaagagcgatca

SEQ ID NO: 1076668 - DNA, 25 bp, Homo sapien
tatcattgcgctccatggctttctg

SEQ ID NO: 1076669 - DNA, 25 bp, Homo sapien
gactctgtgaggtacaacatttctc

SEQ ID NO: 1076670 - DNA, 25 bp, Homo sapien
tggaaccaaactgctagcaccaggc

SEQ ID NO: 1076671 - DNA, 25 bp, Homo sapien
aggccttgccatgtcccattacaga

SEQ ID NO: 1076672 - DNA, 25 bp, Homo sapien
ctatgaagtcccaggggcttacttg

SEQ ID NO: 1076673 - DNA, 25 bp, Homo sapien
cccaggggcttacttgtctttcagc

SEQ ID NO: 1076674 - DNA, 25 bp, Homo sapien
caggggcttacttgtctttcagcca

SEQ ID NO: 1076675 - DNA, 25 bp, Homo sapien
gatggctatgaagtcccaggggctt

SEQ ID NO: 1076676 - DNA, 25 bp, Homo sapien
ccccacttccatacttgtgggcatt

SEQ ID NO: 1076677 - DNA, 25 bp, Homo sapien
gcccccacttccatacttgtgggca

SEQ ID NO: 1076678 - DNA, 25 bp, Homo sapien
cgcccccacttccatacttgtgggc

SEQ ID NO: 1076679 - DNA, 25 bp, Homo sapien
aacctgtcagagagttttatgttcc

SEQ ID NO: 1076680 - DNA, 25 bp, Homo sapien
tgcaggtcaagaacctgtcagagag

SEQ ID NO: 1076681 - DNA, 25 bp, Homo sapien
cctgtcagagagttttatgttcctc

SEQ ID NO: 1076682 - DNA, 25 bp, Homo sapien
gggagaagatatgcaggtcaagaac

SEQ ID NO: 1076683 - DNA, 25 bp, Homo sapien
gcagcattttgcttcgtgagtagat

SEQ ID NO: 1076684 - DNA, 25 bp, Homo sapien
cagacttgccaagcagcattttgct

SEQ ID NO: 1076685 - DNA, 25 bp, Homo sapien
gactctggtaatttagcatatcctt

SEQ ID NO: 1076686 - DNA, 25 bp, Homo sapien
ctcccttagttcctctccagacttg

SEQ ID NO: 1076687 - DNA, 25 bp, Homo sapien
gaaatgctggcaagtacgcagcccc

SEQ ID NO: 1076688 - DNA, 25 bp, Homo sapien
agatgttagtcgagtcacgtcccgc

SEQ ID NO: 1076689 - DNA, 25 bp, Homo sapien
ccttgctgggcaaccgtcttagaga

SEQ ID NO: 1076690 - DNA, 25 bp, Homo sapien
tgtacgggcctttctggacttggac

SEQ ID NO: 1076691 - DNA, 25 bp, Homo sapien
tcctagcctgggtgaagaactggcc

SEQ ID NO: 1076692 - DNA, 25 bp, Homo sapien
cctcacgttcgtttcctagcctggg

SEQ ID NO: 1076693 - DNA, 25 bp, Homo sapien
aatgcgtagttgttctgccccagag

SEQ ID NO: 1076694 - DNA, 25 bp, Homo sapien
ccagagcccagcgaaagtgacactg

SEQ ID NO: 1076695 - DNA, 25 bp, Homo sapien
ccttcttttgacactaggtcccgat

SEQ ID NO: 1076696 - DNA, 25 bp, Homo sapien
tggtgtacgcgccgcgccgtactga

SEQ ID NO: 1076697 - DNA, 25 bp, Homo sapien
gccgtactgagtgggcggttcacta

SEQ ID NO: 1076698 - DNA, 25 bp, Homo sapien
acactaggtcccgatctcgccaagt

SEQ ID NO: 1076699 - DNA, 25 bp, Homo sapien
ctgcgcacgtttcgcggccgccgcg

SEQ ID NO: 1076700 - DNA, 25 bp, Homo sapien
ccggcgcctgcgcacgtttcgcggc

SEQ ID NO: 1076701 - DNA, 25 bp, Homo sapien
gcctgcgcacgtttcgcggccgccg

SEQ ID NO: 1076702 - DNA, 25 bp, Homo sapien
gcgcctgcgcacgtttcgcggccgc

SEQ ID NO: 1076703 - DNA, 25 bp, Homo sapien
agcccagcgcgcagcaccgggaggc

SEQ ID NO: 1076704 - DNA, 25 bp, Homo sapien
ccagcgcgcagcaccgggaggctgg

SEQ ID NO: 1076705 - DNA, 25 bp, Homo sapien
ctcagcccagcgcgcagcaccggga

SEQ ID NO: 1076706 - DNA, 25 bp, Homo sapien
cccagcgcgcagcaccgggaggctg

SEQ ID NO: 1076707 - DNA, 25 bp, Homo sapien
caaagtggtgaactctactgccagg

SEQ ID NO: 1076708 - DNA, 25 bp, Homo sapien
agcgagcgcgatacaagaacaggac

SEQ ID NO: 1076709 - DNA, 25 bp, Homo sapien
gatgcaaatagtccgccaaagtggt

SEQ ID NO: 1076710 - DNA, 25 bp, Homo sapien
agagcctcagcaaaacccggaagtg

SEQ ID NO: 1076711 - DNA, 25 bp, Homo sapien
ggatcagctccttctcaactcgggt

SEQ ID NO: 1076712 - DNA, 25 bp, Homo sapien
tggctggaaagaaaggctgtgcttc

SEQ ID NO: 1076713 - DNA, 25 bp, Homo sapien
gcgaggtacgatataggatcagctc

SEQ ID NO: 1076714 - DNA, 25 bp, Homo sapien
aacacaaggtgttaacaaatcggcg

SEQ ID NO: 1076715 - DNA, 25 bp, Homo sapien
acagccgcagccaggtaaaacatcg

SEQ ID NO: 1076716 - DNA, 25 bp, Homo sapien
aacatagaaatctgacacagccgca

SEQ ID NO: 1076717 - DNA, 25 bp, Homo sapien
gccaggtaaaacatcgcagaagggc

SEQ ID NO: 1076718 - DNA, 25 bp, Homo sapien
tagaaatctgacacagccgcagcca

SEQ ID NO: 1076719 - DNA, 25 bp, Homo sapien
gcagaaaggccatctccagatcaag

SEQ ID NO: 1076720 - DNA, 25 bp, Homo sapien
tatcccctgtgcctagcgaatacag

SEQ ID NO: 1076721 - DNA, 25 bp, Homo sapien
taacccaagattggttatatgggat

SEQ ID NO: 1076722 - DNA, 25 bp, Homo sapien
cactagattgtgaggtccatgaggg

SEQ ID NO: 1076723 - DNA, 25 bp, Homo sapien
gaaattataaatgctttgggagccc

SEQ ID NO: 1076724 - DNA, 25 bp, Homo sapien
gctttgggagcccaatctttaacca

SEQ ID NO: 1076725 - DNA, 25 bp, Homo sapien
ggagaaagcagttttggcaccatct

SEQ ID NO: 1076726 - DNA, 25 bp, Homo sapien
gagaaagcagttttggcaccatctt

SEQ ID NO: 1076727 - DNA, 25 bp, Homo sapien
tagcaataacttggtttccgagtct

SEQ ID NO: 1076728 - DNA, 25 bp, Homo sapien
taaacacaaaggactgtcgtgactc

SEQ ID NO: 1076729 - DNA, 25 bp, Homo sapien
cgagtctttggttacaataaacaca

SEQ ID NO: 1076730 - DNA, 25 bp, Homo sapien
cacaaaggactgtcgtgactcaagg

SEQ ID NO: 1076731 - DNA, 25 bp, Homo sapien
cttctatctctacgcctttttctat

SEQ ID NO: 1076732 - DNA, 25 bp, Homo sapien
gctgtgtgtcgagactgaagattat

SEQ ID NO: 1076733 - DNA, 25 bp, Homo sapien
cttctcttctatctctacgcctttt

SEQ ID NO: 1076734 - DNA, 25 bp, Homo sapien
ctataaaagctgtgtgtcgagactg

SEQ ID NO: 1076735 - DNA, 25 bp, Homo sapien
agggcctgacatacataggcattca

SEQ ID NO: 1076736 - DNA, 25 bp, Homo sapien
tatctgtccatatgaaagccatggt

SEQ ID NO: 1076737 - DNA, 25 bp, Homo sapien
gaacaatttttgatcctataagggc

SEQ ID NO: 1076738 - DNA, 25 bp, Homo sapien
gatctccaaagcatgaccattcatg

SEQ ID NO: 1076739 - DNA, 25 bp, Homo sapien
aaattgcacctggactatcctacag

SEQ ID NO: 1076740 - DNA, 25 bp, Homo sapien
ggacagagatcaccaagtggcccct

SEQ ID NO: 1076741 - DNA, 25 bp, Homo sapien
tgtgcactccaaacccaaaacgtag

SEQ ID NO: 1076742 - DNA, 25 bp, Homo sapien
ggattcaaagattaagcagggcagt

SEQ ID NO: 1076743 - DNA, 25 bp, Homo sapien
cgtatcgatagtacaactcattcca

SEQ ID NO: 1076744 - DNA, 25 bp, Homo sapien
gttgtcccggccgtatcgatagtac

SEQ ID NO: 1076745 - DNA, 25 bp, Homo sapien
gagcgtttgcgacttagcgaataca

SEQ ID NO: 1076746 - DNA, 25 bp, Homo sapien
gtaaccatggtaacatgtcgagcgt

SEQ ID NO: 1076747 - DNA, 25 bp, Homo sapien
tcttgtggagactgttattatgtct

SEQ ID NO: 1076748 - DNA, 25 bp, Homo sapien
tgtggagactgttattatgtctcac

SEQ ID NO: 1076749 - DNA, 25 bp, Homo sapien
cttgtggagactgttattatgtctc

SEQ ID NO: 1076750 - DNA, 25 bp, Homo sapien
tggagactgttattatgtctcacac

SEQ ID NO: 1076751 - DNA, 25 bp, Homo sapien
aaacgggcgaattctccttcaggcg

SEQ ID NO: 1076752 - DNA, 25 bp, Homo sapien
ctccagccagggaatagaaaggccg

SEQ ID NO: 1076753 - DNA, 25 bp, Homo sapien
tcggaaattttcctgcggagggtgc

SEQ ID NO: 1076754 - DNA, 25 bp, Homo sapien
taagcggcagcctaatactaaatgc

SEQ ID NO: 1076755 - DNA, 25 bp, Homo sapien
gaccttcgggcgttgtctgtccagg

SEQ ID NO: 1076756 - DNA, 25 bp, Homo sapien
gaaagctgcccctccgtggacttcg

SEQ ID NO: 1076757 - DNA, 25 bp, Homo sapien
cctccgtggacttcgtagtggcctg

SEQ ID NO: 1076758 - DNA, 25 bp, Homo sapien
ttcgtagtggcctggaccttcgggc

SEQ ID NO: 1076759 - DNA, 25 bp, Homo sapien
tccaaatcttcatcgggattcaagg

SEQ ID NO: 1076760 - DNA, 25 bp, Homo sapien
gaggatacaaaaggcctccaaatct

SEQ ID NO: 1076761 - DNA, 25 bp, Homo sapien
tgcatgacgaacatcggccaaaaaa

SEQ ID NO: 1076762 - DNA, 25 bp, Homo sapien
gggattcaaggttctgcatgacgaa

SEQ ID NO: 1076763 - DNA, 25 bp, Homo sapien
ggagaatgcgaaatacttaggtacg

SEQ ID NO: 1076764 - DNA, 25 bp, Homo sapien
cccaagactgaaaggttgccatagt

SEQ ID NO: 1076765 - DNA, 25 bp, Homo sapien
taggtacgcaaagcattgtagcagg

SEQ ID NO: 1076766 - DNA, 25 bp, Homo sapien
cattcaataatgtgcagcgtgaaca

SEQ ID NO: 1076767 - DNA, 25 bp, Homo sapien
caaaacacactagacctacagtatt

SEQ ID NO: 1076768 - DNA, 25 bp, Homo sapien
ttcaaaacacactagacctacagta

SEQ ID NO: 1076769 - DNA, 25 bp, Homo sapien
aacacactagacctacagtatttaa

SEQ ID NO: 1076770 - DNA, 25 bp, Homo sapien
cactagacctacagtatttaatgtt

SEQ ID NO: 1076771 - DNA, 25 bp, Homo sapien
gctggtgtcctttaatatttactat

SEQ ID NO: 1076772 - DNA, 25 bp, Homo sapien
tgctggtgtcctttaatatttacta

SEQ ID NO: 1076773 - DNA, 25 bp, Homo sapien
acaaatacaggtgagtgtggcagag

SEQ ID NO: 1076774 - DNA, 25 bp, Homo sapien
gattaaataagaatctctctctgct

SEQ ID NO: 1076775 - DNA, 25 bp, Homo sapien
tctctctgctatgctccagatcaat

SEQ ID NO: 1076776 - DNA, 25 bp, Homo sapien
ctcactctgttgtttgaaagattaa

SEQ ID NO: 1076777 - DNA, 25 bp, Homo sapien
aagattaaataagaatctctctctg

SEQ ID NO: 1076778 - DNA, 25 bp, Homo sapien
ccatgtgattaatagcttgggcaca

SEQ ID NO: 1076779 - DNA, 25 bp, Homo sapien
ttgggcacaggagtctaatatacct

SEQ ID NO: 1076780 - DNA, 25 bp, Homo sapien
tgttttgactcctatgtctctagcc

SEQ ID NO: 1076781 - DNA, 25 bp, Homo sapien
taccttggctcaaaccttggcttcg

SEQ ID NO: 1076782 - DNA, 25 bp, Homo sapien
tggcaatacacatacaaagctgcta

SEQ ID NO: 1076783 - DNA, 25 bp, Homo sapien
gaaagctagtaagctacctgaacct

SEQ ID NO: 1076784 - DNA, 25 bp, Homo sapien
cacacaactgaggatgcaagatatc

SEQ ID NO: 1076785 - DNA, 25 bp, Homo sapien
tgccaccttagtctccttattagag

SEQ ID NO: 1076786 - DNA, 25 bp, Homo sapien
ctacatctgtggtagcagtcctcag

SEQ ID NO: 1076787 - DNA, 25 bp, Homo sapien
tttcaagatggtgaagtatgtcttc

SEQ ID NO: 1076788 - DNA, 25 bp, Homo sapien
taagcaccaaacagagttgttcttc

SEQ ID NO: 1076789 - DNA, 25 bp, Homo sapien
tgtttcacccatgtgcttcactata

SEQ ID NO: 1076790 - DNA, 25 bp, Homo sapien
aaatcacaggtgtctttaaaattct

SEQ ID NO: 1076791 - DNA, 25 bp, Homo sapien
acaaaatcacaggtgtctttaaaat

SEQ ID NO: 1076792 - DNA, 25 bp, Homo sapien
caaaatcacaggtgtctttaaaatt

SEQ ID NO: 1076793 - DNA, 25 bp, Homo sapien
cagactgttgccatgtttcattaga

SEQ ID NO: 1076794 - DNA, 25 bp, Homo sapien
ttcagccagtcatcactgggcaaca

SEQ ID NO: 1076795 - DNA, 25 bp, Homo sapien
tcactgggcaacatcctatacatgg

SEQ ID NO: 1076796 - DNA, 25 bp, Homo sapien
tcctatacatggagtcttaatggaa

SEQ ID NO: 1076797 - DNA, 25 bp, Homo sapien
tatgaggtccagaaacgagggtaga

SEQ ID NO: 1076798 - DNA, 25 bp, Homo sapien
tccaagagagtaacaatagggccaa

SEQ ID NO: 1076799 - DNA, 25 bp, Homo sapien
tattgtggaaacctggctatctcag

SEQ ID NO: 1076800 - DNA, 25 bp, Homo sapien
tgcctggtcctaggatatgaggtcc

SEQ ID NO: 1076801 - DNA, 25 bp, Homo sapien
tagcacctaagtgtgtacctacaca

SEQ ID NO: 1076802 - DNA, 25 bp, Homo sapien
gcctaatagcacctaagtgtgtacc

SEQ ID NO: 1076803 - DNA, 25 bp, Homo sapien
cacaaatatagaatattctaaaagg

SEQ ID NO: 1076804 - DNA, 25 bp, Homo sapien
gctggcctaatagcacctaagtgtg

SEQ ID NO: 1076805 - DNA, 25 bp, Homo sapien
agcattttgggaggacaagacagga

SEQ ID NO: 1076806 - DNA, 25 bp, Homo sapien
ttgagcccaggaggttgaggctgca

SEQ ID NO: 1076807 - DNA, 25 bp, Homo sapien
tgggaggacaagacaggaggattac

SEQ ID NO: 1076808 - DNA, 25 bp, Homo sapien
ggctgcagtgaacggagatcatgct

SEQ ID NO: 1076809 - DNA, 25 bp, Homo sapien
tcttcctaggcagttttgtgatgtt

SEQ ID NO: 1076810 - DNA, 25 bp, Homo sapien
ctcttcctaggcagttttgtgatgt

SEQ ID NO: 1076811 - DNA, 25 bp, Homo sapien
tccttcacttgtagttcatcagtga

SEQ ID NO: 1076812 - DNA, 25 bp, Homo sapien
gttcatcagtgagcctttgaatctc

SEQ ID NO: 1076813 - DNA, 25 bp, Homo sapien
gaatctcttcatgagccacccctaa

SEQ ID NO: 1076814 - DNA, 25 bp, Homo sapien
ttctccttcacttgtagttcatcag

SEQ ID NO: 1076815 - DNA, 25 bp, Homo sapien
gcatgatcggaaatggtcatctgaa

SEQ ID NO: 1076816 - DNA, 25 bp, Homo sapien
gatcagtacagttaaagcatgatcg

SEQ ID NO: 1076817 - DNA, 25 bp, Homo sapien
tcggaaatggtcatctgaaaccaca

SEQ ID NO: 1076818 - DNA, 25 bp, Homo sapien
gttaaagcatgatcggaaatggtca

SEQ ID NO: 1076819 - DNA, 25 bp, Homo sapien
tagttgagccttcttaagtgcagaa

SEQ ID NO: 1076820 - DNA, 25 bp, Homo sapien
ttctagttgagccttcttaagtgca

SEQ ID NO: 1076821 - DNA, 25 bp, Homo sapien
caatttctagttgagccttcttaag

SEQ ID NO: 1076822 - DNA, 25 bp, Homo sapien
tttgtcaatttctagttgagccttc

SEQ ID NO: 1076823 - DNA, 25 bp, Homo sapien
ttcataaggtgcttgttcttgccaa

SEQ ID NO: 1076824 - DNA, 25 bp, Homo sapien
cataaggtgcttgttcttgccaaca

SEQ ID NO: 1076825 - DNA, 25 bp, Homo sapien
ataaggtgcttgttcttgccaacag

SEQ ID NO: 1076826 - DNA, 25 bp, Homo sapien
ctttcataaggtgcttgttcttgcc

SEQ ID NO: 1076827 - DNA, 25 bp, Homo sapien
cactctattttcggctccctttttg

SEQ ID NO: 1076828 - DNA, 25 bp, Homo sapien
aaacacacgacgcttgaggctatca

SEQ ID NO: 1076829 - DNA, 25 bp, Homo sapien
aacacacgacgcttgaggctatcag

SEQ ID NO: 1076830 - DNA, 25 bp, Homo sapien
gattcttggaccagtgcttcatatc

SEQ ID NO: 1076831 - DNA, 25 bp, Homo sapien
tcttggaccagtgcttcatatccat

SEQ ID NO: 1076832 - DNA, 25 bp, Homo sapien
ggaccagtgcttcatatccatcagc

SEQ ID NO: 1076833 - DNA, 25 bp, Homo sapien
aacagattcttggaccagtgcttca

SEQ ID NO: 1076834 - DNA, 25 bp, Homo sapien
ctgagtcaagtgatcgaaccctatt

SEQ ID NO: 1076835 - DNA, 25 bp, Homo sapien
gagtcaagtgatcgaaccctatttc

SEQ ID NO: 1076836 - DNA, 25 bp, Homo sapien
caagtgatcgaaccctatttcttaa

SEQ ID NO: 1076837 - DNA, 25 bp, Homo sapien
aatttcctcatccagtctctgattt

SEQ ID NO: 1076838 - DNA, 25 bp, Homo sapien
caggggagtggtttccaagttgctt

SEQ ID NO: 1076839 - DNA, 25 bp, Homo sapien
tccaggggagtggtttccaagttgc

SEQ ID NO: 1076840 - DNA, 25 bp, Homo sapien
ctgttcaccacccacagtttttcca

SEQ ID NO: 1076841 - DNA, 25 bp, Homo sapien
tctgttcaccacccacagtttttcc

SEQ ID NO: 1076842 - DNA, 25 bp, Homo sapien
ctgaagaagacagagacgcaagaga

SEQ ID NO: 1076843 - DNA, 25 bp, Homo sapien
agagacgcaagagaaaaatccactg

SEQ ID NO: 1076844 - DNA, 25 bp, Homo sapien
tgaagaagacagagacgcaagagaa

SEQ ID NO: 1076845 - DNA, 25 bp, Homo sapien
cagagacgcaagagaaaaatccact

SEQ ID NO: 1076846 - DNA, 25 bp, Homo sapien
actccgcttttcctcggcaactatg

SEQ ID NO: 1076847 - DNA, 25 bp, Homo sapien
caaacccgatatggctgagatggag

SEQ ID NO: 1076848 - DNA, 25 bp, Homo sapien
ggcaactatgtctgacaaacccgat

SEQ ID NO: 1076849 - DNA, 25 bp, Homo sapien
gagatggagaaattcgataagtcga

SEQ ID NO: 1076850 - DNA, 25 bp, Homo sapien
taccttaggttaggatacaggccca

SEQ ID NO: 1076851 - DNA, 25 bp, Homo sapien
cagaagcttgacatactggcaaaag

SEQ ID NO: 1076852 - DNA, 25 bp, Homo sapien
cataagcctgttgatcaagccagct

SEQ ID NO: 1076853 - DNA, 25 bp, Homo sapien
tatgtccttcggaacatgacctgta

SEQ ID NO: 1076854 - DNA, 25 bp, Homo sapien
tgagacaatgaaccctggatatttc

SEQ ID NO: 1076855 - DNA, 25 bp, Homo sapien
caatgatgctacttcccttggtggc

SEQ ID NO: 1076856 - DNA, 25 bp, Homo sapien
cagaacaggaacagaaggtataacc

SEQ ID NO: 1076857 - DNA, 25 bp, Homo sapien
cacccatgtatgtccatgtccttaa

SEQ ID NO: 1076858 - DNA, 25 bp, Homo sapien
gtaagcaaagaggactaatgactta

SEQ ID NO: 1076859 - DNA, 25 bp, Homo sapien
cagcagtaagcaaagaggactaatg

SEQ ID NO: 1076860 - DNA, 25 bp, Homo sapien
gccagcagtaagcaaagaggactaa

SEQ ID NO: 1076861 - DNA, 25 bp, Homo sapien
cagtaagcaaagaggactaatgact

SEQ ID NO: 1076862 - DNA, 25 bp, Homo sapien
gataattcaggctctaacatggaag

SEQ ID NO: 1076863 - DNA, 25 bp, Homo sapien
ctatgttactgataattcaggctct

SEQ ID NO: 1076864 - DNA, 25 bp, Homo sapien
tgttactgataattcaggctctaac

SEQ ID NO: 1076865 - DNA, 25 bp, Homo sapien
tactgataattcaggctctaacatg

SEQ ID NO: 1076866 - DNA, 25 bp, Homo sapien
aaatcttgtactttgtctcttgatc

SEQ ID NO: 1076867 - DNA, 25 bp, Homo sapien
ttgtactggtttctcttctatcttc

SEQ ID NO: 1076868 - DNA, 25 bp, Homo sapien
gtctcttgatcttttgtactggttt

SEQ ID NO: 1076869 - DNA, 25 bp, Homo sapien
tcattcaaatcttgtactttgtctc

SEQ ID NO: 1076870 - DNA, 25 bp, Homo sapien
caaggccttctctgcagtgtcaaga

SEQ ID NO: 1076871 - DNA, 25 bp, Homo sapien
ccttctctgcagtgtcaagaccaga

SEQ ID NO: 1076872 - DNA, 25 bp, Homo sapien
ctgcagtgtcaagaccagatgccaa

SEQ ID NO: 1076873 - DNA, 25 bp, Homo sapien
agtgtcaagaccagatgccaactgc

SEQ ID NO: 1076874 - DNA, 25 bp, Homo sapien
taaaacgagcgataagcccatgact

SEQ ID NO: 1076875 - DNA, 25 bp, Homo sapien
tagaactcagcttggagaaacaaca

SEQ ID NO: 1076876 - DNA, 25 bp, Homo sapien
aaatttacttcaggagaggagctac

SEQ ID NO: 1076877 - DNA, 25 bp, Homo sapien
tgcactgattgactggtggaagact

SEQ ID NO: 1076878 - DNA, 25 bp, Homo sapien
ctttgtaacaggtcacatgctatta

SEQ ID NO: 1076879 - DNA, 25 bp, Homo sapien
ttgctttctgattcccctggaagat

SEQ ID NO: 1076880 - DNA, 25 bp, Homo sapien
taagctctgactttgatttttgcaa

SEQ ID NO: 1076881 - DNA, 25 bp, Homo sapien
tcccctggaagattgtgaacttcat

SEQ ID NO: 1076882 - DNA, 25 bp, Homo sapien
ccaagtgctggttgaagtctgaata

SEQ ID NO: 1076883 - DNA, 25 bp, Homo sapien
tccacagtatatggcagtatatggc

SEQ ID NO: 1076884 - DNA, 25 bp, Homo sapien
tatagcttgactcataatccacagt

SEQ ID NO: 1076885 - DNA, 25 bp, Homo sapien
gattaatcctaattgccaagtgctg

SEQ ID NO: 1076886 - DNA, 25 bp, Homo sapien
tgtgcaaattcttgtgaaagcttca

SEQ ID NO: 1076887 - DNA, 25 bp, Homo sapien
tcttcctttcggctttgaatttctg

SEQ ID NO: 1076888 - DNA, 25 bp, Homo sapien
tttccaaaattggttcattagattc

SEQ ID NO: 1076889 - DNA, 25 bp, Homo sapien
caaattcttgtgaaagcttcaagac

SEQ ID NO: 1076890 - DNA, 25 bp, Homo sapien
aattaatgtgatataggattttccc

SEQ ID NO: 1076891 - DNA, 25 bp, Homo sapien
atcaagccaaataaaatataccctc

SEQ ID NO: 1076892 - DNA, 25 bp, Homo sapien
atgatcaagccaaataaaatatacc

SEQ ID NO: 1076893 - DNA, 25 bp, Homo sapien
tgatcaagccaaataaaatataccc

SEQ ID NO: 1076894 - DNA, 25 bp, Homo sapien
tccactcacataatttggaaatgaa

SEQ ID NO: 1076895 - DNA, 25 bp, Homo sapien
tttccactcacataatttggaaatg

SEQ ID NO: 1076896 - DNA, 25 bp, Homo sapien
aatttttccactcacataatttgga

SEQ ID NO: 1076897 - DNA, 25 bp, Homo sapien
tttttccactcacataatttggaaa

SEQ ID NO: 1076898 - DNA, 25 bp, Homo sapien
aaactgccctcctttactgactcct

SEQ ID NO: 1076899 - DNA, 25 bp, Homo sapien
tcgattctgttgtgagccctcctcc

SEQ ID NO: 1076900 - DNA, 25 bp, Homo sapien
tgcccctctcttggaaaactgccct

SEQ ID NO: 1076901 - DNA, 25 bp, Homo sapien
ttactgactcctctggaatttcctt

SEQ ID NO: 1076902 - DNA, 25 bp, Homo sapien
tcctcaggcttcatggttaactgct

SEQ ID NO: 1076903 - DNA, 25 bp, Homo sapien
tgaagaaggctctgatttatatggc

SEQ ID NO: 1076904 - DNA, 25 bp, Homo sapien
tttcctcaggcttcatggttaactg
